(19) United States
(12) Patent Application Publication
(10) Pub. No.: US 2005/0266409 A1
(43) Pub. Date: Dec. 1, 2005

(54) Compositions and methods for diagnosing, preventing, and treating cancers

(75) Inventors: Eugene Brown, Newton Highlands, MA (US); Wei Liu, Sudbury, MA (US)

Correspondence Address: NIXON PEABODY, LLP, 401 9TH STREET, NW, SUITE 900, WASHINGTON, DC, 20004-2128, US

(73) Assignee: Wyeth, Madison, NJ (US)

(21) Appl. No.: 10/770,726

(22) Filed: Feb. 4, 2004

Related U.S. Application Data
(60) Provisional application No. 60/444,637, filed on Feb. 4, 2003.

(51) Int. Cl. C12Q 1/68; G06F 19/00; G01N 33/48; G01N 33/50

(52) U.S. Cl. 435/6; 702/20

(57) ABSTRACT

Compositions and methods for diagnosing, preventing, and treating cancers. In one embodiment, genes differentially expressed in colon, lung, breast and prostate cancer tissues relative to corresponding cancer-free tissues are identified. These genes or their products can be used as markers for the detection of respective cancers. Modulators of these genes or their products can be used for the treatment or prevention of respective cancers.

### REFERENCE TO RELATED APPLICATION

[0001] This application incorporates by reference all materials recorded in compact discs labeled “Copy 1” and “Copy 2.” Each of the compact discs includes the file entitled “AM101079 Sequence Listing.ST25.txt” (7,373 KB, created on Feb. 2, 2004).

### TECHNICAL FIELD

[0002] The present invention relates generally to the diagnosis, prevention, and treatment of cancers, such as colon, lung, breast, or prostate cancers. In one embodiment, this invention employs cancer-related protein kinase genes (CPKGs), or polynucleotides or polypeptides encoded thereby, for the diagnosis, prevention, or treatment of cancers.

### BACKGROUND OF THE INVENTION

[0003] Cancer is a significant health problem throughout the world. The most frequently diagnosed cancers include colon cancer, lung cancer, breast cancer, and prostate cancer.

Colon Cancer

[0004] Colon cancer is the second most frequently diagnosed malignancy in the United States and is the second most common cause of cancer death. In 2001, there were about 135,400 newly diagnosed cases of colon cancer, with an estimated 56,700 deaths. Although the five-year survival rate for patients with colon cancer detected in an early localized stage is 92%, only 37% of colon cancer is diagnosed at this stage however. The survival rate drops to 64% if the cancer is allowed to spread to adjacent organs or lymph nodes, and to 7% in patients with distant metastases.

[0005] The prognosis of colon cancer is directly related to the degree of penetration of the tumor through the bowel wall and the presence or absence of nodal involvement. As a consequence, early detection and treatment are particularly important. Colon cancer typically originates in the colonic epithelium and is not extensively vascularized (non-invasive) during the early stages of development. The transition to a highly-vascularized, invasive and ultimately metastatic cancer commonly takes ten years or longer. With early detection and diagnosis, colon cancer may be effectively treated by, for example, surgical removal of the cancerous or precancerous tissue. However, colon cancer is often detected only upon manifestation of clinical symptoms, such as pain and black tarry stool. Generally, such symptoms are present only when the disease is well established, and only after metastasis has occurred. Therefore, early detection of colon cancer is critically important to significantly reduce its morbidity. Currently, the best means of preventing colon cancer is by early detection of pre-neoplastic lesions in the colon via various invasive and noninvasive screening techniques.

Lung Cancer

[0006] Lung cancer is the leading cancer killer in both men and women. In 2000, there were an estimated 164,100 new cases of lung cancer and an estimated 156,900 deaths from lung cancer in the United States. The five-year survival rate among all lung cancer patients, regardless of the stage of disease at diagnosis, is only 13%. This contrasts with a five-year survival rate of 46% among cases detected while the disease is still localized. However, only 16% of lung cancers are discovered before the disease has spread.

[0007] Two major types of lung cancer include non-small cell lung cancer and small cell lung cancer. Non-small cell lung cancer is much more common and usually spreads to different parts of the body more slowly than small cell lung cancer. Examples of non-small cell lung cancer include squamous cell carcinoma, adenocarcinoma, and large cell carcinoma. Small cell lung cancer accounts for about 20% of all lung cancers.

[0008] Early lung cancer detection is difficult since clinical symptoms are often not seen until the disease has reached an advanced stage. Currently, diagnosis is aided by the use of chest x-rays, sputum analysis of particular cell types, and fiber optic examination of bronchial passages.

Breast Cancer

[0009] Breast cancer is a major cause of cancer-related deaths of women in North America. Although advances have been made in its detection and treatment, breast cancer remains to be the second leading cause of cancer-related deaths in women, affecting more than 180,000 women in the United States each year.

[0010] Approximately 10% of all breast cancers are currently classified as strongly familial, with many of these appearing to be due to mutations of the hereditary breast cancer genes, BRCA1 or BRCA2. However, at least one-third of breast cancers which seem to run in families are not linked to BRCA1 or BRCA2, suggesting the existence of an additional hereditary breast cancer gene or genes. Recently, structural and functional studies of cancer cell lines and tissues have demonstrated the involvement of many genetic loci and genes in the development of human breast cancer. Cytogenesis and loss of heterozygozity (LOH) studies have led to the discoveries of alterations in human chromosomes including 1p, 1q, 3p, 6q, 7q, 11p, 13q, 16q, 17p, 17q, and 18q, at frequencies as high as 20-60%. Thus, multiple genes are involved in the development of extensively heterogeneous breast cancers.

[0011] Diagnosis of the disease currently relies on a combination of routine breast screening procedures and a variety of prognostic parameters, including the analysis of specific tumor markers. However, the use of established markers often leads to a result that is difficult to interpret.

Prostate Cancer

[0012] Other than non-melanoma skin cancers, prostate cancer is the most common cancer afflicting American men. In 2000, the American Cancer Society estimated that over 180,000 new cases were diagnosed with prostate cancer in the U.S. alone and that nearly 32,000 people would die from the disease. Prostate cancer is second only to lung cancer as the leading cause of cancer deaths in men, accounting for roughly 11%.

[0013] Prostate cancer is a malignant tumor growth within the prostate gland. Its cause is unknown, although high dietary fat intake and increased testosterone levels are believed to be contributory factors. A letter scale (“A” through “D”), which accounts for the location of the cancer, is commonly used to classify the stage of disease. In Stage A, the tumor is not palpable but is detectable in microscopic biopsy. Stage B is characterized by a palpable tumor confined to the prostate. In Stage C, the tumor extends locally beyond the prostate with no distant metastasis. In Stage D, the cancer has spread to the regional lymph nodes or has produced distant metastasis.

[0014] Early prostate cancer usually causes no symptoms and can be detected by prostate-specific antigen (PSA) test and/or direct rectal examination (DRE). Advanced prostate cancers often result in hematuria, impotence, and pain in pelvic bone, spine, hips, or ribs. Other diseases can also cause these same symptoms. A core needle biopsy is the main method used to diagnose prostate cancer.

[0015] The development of prostate cancer has been linked to several genetic segments. For example, using tumor-derived CREF-Trans 6 cells and differential RNA display, a putative oncogene, prostate tumor inducing gene-1 (PTI-1), was identified (Shen et al., Proc. Natl. Acad Sci USA, 92:6788-6782, 1995). PTI-1 encodes a mutated and truncated human elongation factor-1α (EF-1 α). Normal EF-1α plays a prominent role in protein translation, a process that is critical in controlling gene expression and regulating cell growth. PTI-1 expression is observed in human prostate cancer cell lines (LNCaP, DU-145 and PC-3) and patient-derived prostate carcinoma tissue samples, but not in normal prostate or BPH tissue. This observation suggests that PTI-1 expression may be related specifically to carcinoma development. In addition, the observation that PTI-1 expression also occurs in a high proportion of carcinoma cell lines of the breast, colon and lung indicates that this genetic alteration may be a common event in carcinogenesis.

Protein Kinases

[0016] It is estimated that more than 1,000 of the 10,000 proteins active in a typical mammalian cell are phosphorylated. The high energy phosphate, which drives activation, is generally transferred from adenosine triphosphate molecules (ATP) to a particular protein by protein kinases and removed from that protein by protein phosphatases.

[0017] The presence or absence of a phosphate moiety modulates protein function in multiple ways. A common mechanism includes changes in the catalytic properties (Vₘₐₓ and Kₘ) of an enzyme, leading to its activation or inactivation.

[0018] A second widely recognized mechanism involves promoting protein-protein interactions. An example of such mechanism is the tyrosine autophosphorylation of the ligand-activated EGF receptor tyrosine phosphatase. This event triggers the high-affinity binding to the phosphotyrosine residue on the receptor's C-terminal intracellular domain to the SH2 motif of the adaptor molecule, Grb2. Grb2, in turn, binds through its SH3 motif to a second adaptor molecule, for example, SHC. The formation of this ternary complex activates the signaling events that are responsible for the biological effects of EGF. Serine and threonine phosphorylation events also have been recognized to exert their biological function through protein-protein interaction events that are mediated by the high-affinity binding of phosphoserine and phosphothreonine to WW motifs present in a large variety of proteins.

[0019] A third important outcome of protein phosphorylation is changes in the subcellular localization of the substrate. As an example, nuclear import and export events in a large diversity of proteins are regulated by protein phosphorylation.

[0020] Protein phosphorylation/dephosphorylation plays a central role in the regulation of a variety of cell functions, such as cell proliferation, differentiation, and cellular signal transduction process. Abnormal phosphorylation processes have been shown many times to be associated with uncontrolled cellular growth and cancer. Current therapies, which are generally based on a combination of chemotherapy or surgery and radiation, continue to prove inadequate in many cancer patients. Accordingly, there is a need in the art for improved methods for screening, diagnosing, and treating cancers.

### SUMMARY OF THE INVENTION

[0021] The present invention is directed to cancer genes which are differentially expressed in at least two types of cancer tissues relative to corresponding cancer-free tissues. In many embodiments, the two types of cancer tissues are selected from colon cancer tissue, lung cancer tissue, breast cancer tissue, and prostate cancer tissue. In some embodiments, the cancer genes include cancer-related protein kinase genes (CPKGs), such as those depicted in Table 1. The polynucleotides (e.g., SEQ ID NOS:1-44) and polypeptides (e.g., SEQ ID NOS:45-88) encoded by these genes are designated herein as cancer-related protein kinase polynucleotides (CPKPNs) and cancer-related protein kinases polypeptides (CPKPPs), respectively.

[0022] In one aspect, the present invention provides methods useful for diagnosing or monitoring cancers by comparing the expression levels of one or more cancer genes (e.g., CPKGs) in a biological sample of a subject of interest to reference expression levels of the same genes.

[0023] In another aspect, the present invention provides pharmaceutical compositions useful for the treatment of cancers. In one embodiment, the pharmaceutical compositions comprise a pharmaceutically acceptable carrier and at least one of the following: (1) an agent that modulates an activity of a CPKPP; (2) an agent that modulates an activity of a CPKPN; and (3) an agent that modulates the expression of a CPKG. In another embodiment, the pharmaceutical compositions include polynucleotides which encode or comprise RNAs capable of inhibiting or reducing the expression of cancer genes (e.g., CPKGs) by RNA interference or antisense mechanisms.

[0024] In another aspect, the present invention provides vaccines for prophylactic or therapeutic uses. In one embodiment, the vaccines are generated using at least one of the following (1) a CPKPP or its variant, and (2) a CPKPN or its variant.

[0025] The present invention also features methods of the pharmaceutical compositions or vaccines described above for treating or preventing cancers.

[0026] In yet another aspect, the present invention provides methods useful for screening anti-tumor agents or chemicals based on the interactions with CPKPPs, or the effects on the expression of CPKGs.

[0027] In still another aspect, the present invention provides biochips useful for diagnosing cancer or screening for agents that inhibit cancer. In many cases, the biochips comprise at least one of the following (1) a CPKPP or its variant, (2) a portion of a CPKPP or its variant, (3) a CPKPN or its variant, (4) a portion of a CPKPN or its variant, and (5) an antibody specific for a CPKPP or its variant.

[0028] In addition, the present invention provides kits useful for diagnosing cancers. The kits comprise at least one of the following (1) a polynucleotide probe that can hybridize to a CPKPN under reduced stringent, stringent, or highly stringent conditions, and (2) an antibody capable of specifically binding to a CPKPP.

[0029] Furthermore, the present invention provides host cells harboring transfected CPKGs. These cells can be used for the treatment of cancers. The present invention also provides knock-out animals in which the genomic seqeunce of at least one CPKG is disrupted.

[0030] Other objects, features and advantages of the present invention will become apparent from the following detailed description. The detailed description and specific examples, while indicating preferred embodiments, are given for illustration only since various changes and modifications within the scope of the invention will become apparent to those skilled in the art from this detailed description. Further, the examples demonstrate the principle of the invention and should not be expected to specifically illustrate the application of this invention to all the examples of infections where it obviously will be useful to those skilled in the prior art.

### BRIEF DESCRIPTION OF THE DRAWINGS

[0031] The patent or application file contains at least one drawing executed in color. Copies of this patent or patent application publication with color drawing(s) will be provided by the Office upon request and payment of the necessary fee. The drawing is provided for illustration, not limitation.

[0032] FIG. 1 depicts the transmembrane hidden Markov model (TMHMM) profile of the polypeptide consisting of an amino acid sequence recited in SEQ ID NO:45.

[0033] FIG. 2 depicts the TMHMM profile of the polypeptide consisting of an amino acid sequence recited in SEQ ID NO:46.

[0034] FIG. 3 depicts the TMHMM profile of the polypeptide consisting of an amino acid sequence recited in SEQ ID NO:47.

[0035] FIG. 4 depicts the TMHMM profile of the polypeptide consisting of an amino acid sequence recited in SEQ ID NO:48.

[0036] FIG. 5 depicts the TMHMM profile of the polypeptide consisting of an amino acid sequence recited in SEQ ID NO:49.

[0037] FIG. 6 depicts the TMHMM profile of the polypeptide consisting of an amino acid sequence recited in SEQ ID NO:50.

[0038] FIG. 7 depicts the TMHMM profile of the polypeptide consisting of an amino acid sequence recited in SEQ ID NO:51.

[0039] FIG. 8 depicts the TMHMM profile of the polypeptide consisting of an amino acid sequence recited in SEQ ID NO:52.

[0040] FIG. 9 depicts the TMHMM profile of the polypeptide consisting of an amino acid sequence recited in SEQ ID NO:53.

[0041] FIG. 10 depicts the TMHMM profile of the polypeptide consisting of an amino acid sequence recited in SEQ ID NO:54.

[0042] FIG. 11 depicts the TMHMM profile of the polypeptide consisting of an amino acid sequence recited in SEQ ID NO:55.

[0043] FIG. 12 depicts the TMHMM profile of the polypeptide consisting of an amino acid sequence recited in SEQ ID NO:56.

[0044] FIG. 13 depicts the TMHMM profile of the polypeptide consisting of an amino acid sequence recited in SEQ ID NO:57.

[0045] FIG. 14 depicts the TMHMM profile of the polypeptide consisting of an amino acid sequence recited in SEQ ID NO:58.

[0046] FIG. 15 depicts the TMHMM profile of the polypeptide consisting of an amino acid sequence recited in SEQ ID NO:59.

[0047] FIG. 16 depicts the TMHMM profile of the polypeptide consisting of an amino acid sequence recited in SEQ ID NO:60.

[0048] FIG. 17 depicts the TMHMM profile of the polypeptide consisting of an amino acid sequence recited in SEQ ID NO:61.

[0049] FIG. 18 depicts the TMHMM profile of the polypeptide consisting of an amino acid sequence recited in SEQ ID NO:62.

[0050] FIG. 19 depicts the TMHMM profile of the polypeptide consisting of an amino acid sequence recited in SEQ ID NO:63.

[0051] FIG. 20 depicts the TMHMM profile of the polypeptide consisting of an amino acid sequence recited in SEQ ID NO:64.

[0052] FIG. 21 depicts the TMHMM profile of the polypeptide consisting of an amino acid sequence recited in SEQ ID NO:65.

[0053] FIG. 22 depicts the TMHMM profile of the polypeptide consisting of an amino acid sequence recited in SEQ ID NO:66.

[0054] FIG. 23 depicts the TMHMM profile of the polypeptide consisting of an amino acid sequence recited in SEQ ID NO:67.

[0055] FIG. 24 depicts the TMHMM profile of the polypeptide consisting of an amino acid sequence recited in SEQ ID NO:68.

[0056] FIG. 25 depicts the TMHMM profile of the polypeptide consisting of an amino acid sequence recited in SEQ ID NO:69.

[0057] FIG. 26 depicts the TMHMM profile of the polypeptide consisting of an amino acid sequence recited in SEQ ID NO:70.

[0058] FIG. 27 depicts the TMHMM profile of the polypeptide consisting of an amino acid sequence recited in SEQ ID NO:71.

[0059] FIG. 28 depicts the TMHMM profile of the polypeptide consisting of an amino acid sequence recited in SEQ ID NO:72.

[0060] FIG. 29 depicts the TMHMM profile of the polypeptide consisting of an amino acid sequence recited in SEQ ID NO:73.

[0061] FIG. 30 depicts the TMHMM profile of the polypeptide consisting of an amino acid sequence recited in SEQ ID NO:74.

[0062] FIG. 31 depicts the TMHMM profile of the polypeptide consisting of an amino acid sequence recited in SEQ ID NO:75.

[0063] FIG. 32 depicts the TMHMM profile of the polypeptide consisting of an amino acid sequence recited in SEQ ID NO:76.

[0064] FIG. 33 depicts the TMHMM profile of the polypeptide consisting of an amino acid sequence recited in SEQ ID NO:77.

[0065] FIG. 34 depicts the TMHMM profile of the polypeptide consisting of an amino acid sequence recited in SEQ ID NO:78.

[0066] FIG. 35 depicts the TMHMM profile of the polypeptide consisting of an amino acid sequence recited in SEQ ID NO:79.

[0067] FIG. 36 depicts the TMHMM profile of the polypeptide consisting of an amino acid sequence recited in SEQ ID NO:80.

[0068] FIG. 37 depicts the TMHMM profile of the polypeptide consisting of an amino acid sequence recited in SEQ ID NO:81.

[0069] FIG. 38 depicts the TMHMM profile of the polypeptide consisting of an amino acid sequence recited in SEQ ID NO:82.

[0070] FIG. 39 depicts the TMHMM profile of the polypeptide consisting of an amino acid sequence recited in SEQ ID NO:83.

[0071] FIG. 40 depicts the TMHMM profile of the polypeptide consisting of an amino acid sequence recited in SEQ ID NO:84.

[0072] FIG. 41 depicts the TMHMM profile of the polypeptide consisting of an amino acid sequence recited in SEQ ID NO:85.

[0073] FIG. 42 depicts the TMHMM profile of the polypeptide consisting of an amino acid sequence recited in SEQ ID NO:86

[0074] FIG. 43 depicts the TMHMM profile of the polypeptide consisting of an amino acid sequence recited in SEQ ID NO:87.

[0075] FIG. 44 depicts the TMHMM profile of the polypeptide consisting of an amino acid sequence recited in SEQ ID NO:88.

### DETAILED DESCRIPTION OF THE INVENTION

[0076] The present invention provides compositions and methods for the diagnosis, prevention, or treatment of numerous cancers. The present invention also provides methods for the identification of novel therapeutic agents for treating cancers. In addition, the present invention provides animal models useful for studying the pathogenesis of cancers. The present invention is based on the discovery of cancer genes that are overexpressed in at least two types of cancer tissues as compared to corresponding cancer-free tissues. In many embodiments, the cancer genes are overexpressed in colon cancer, lung cancer, breast cancer, or prostate cancer tissues, as compared to the corresponding cancer-free tissues. In one example, the average expression level of each cancer gene in a cancer tissue is at least 1.5, 2, 3, 4, 5, or more times higher than that in the corresponding cancer-free tissue. In another example, the p-value of Student's t-test for the over-expression of each cancer gene in cancer versus cancer-free tissues is no greater than 0.01, 0.005, 0.001, or less.

[0077] In many other embodiments, the cancer genes of the present invention include “cancer-related protein kinase gene (CPKG).” CPKGs are protein kinase genes that are identified by the two-tier statistical analysis of the Gene Logic BioExpress database as showing higher levels of mRNA expression in tumor specimens when compared with the corresponding cancer-free (normal) tissue samples. Examples of the CPKGs of the present invention are shown in Table 1. The mRNA molecules of these CPKGs were found to be up-regulated in tissues from at least two of the four major types of cancers, i.e., colon adenocarcinoma, lung adenocarcinoma, breast infiltrating ductal carcinoma, and prostate adenocarcinoma. The kinases encoded by the CPKGs are referred to as cancer-related protein kinases (CPKs).

TABLE 1
Cancer-Related Protein Kinases

| Gene Symbol | Locuslink | cDNA Sequence | Amino Acid Sequence |
|---|---|---|---|
| ATR | 545 | SEQ ID NO: 1 | SEQ ID NO: 45 |
| BCR | 613 | SEQ ID NO: 2 | SEQ ID NO: 46 |
| BUB1B | 701 | SEQ ID NO: 3 | SEQ ID NO: 47 |
| CDC2 | 983 | SEQ ID NO: 4 | SEQ ID NO: 48 |
| CDC2L1 | 984 | SEQ ID NO: 5 | SEQ ID NO: 49 |
| CDC7L1 | 8317 | SEQ ID NO: 6 | SEQ ID NO: 50 |
| CDK2 | 1017 | SEQ ID NO: 7 | SEQ ID NO: 51 |
| CDK4 | 1019 | SEQ ID NO: 8 | SEQ ID NO: 52 |
| CDK5 | 1020 | SEQ ID NO: 9 | SEQ ID NO: 53 |
| CDK5R1 | 8851 | SEQ ID NO: 10 | SEQ ID NO: 54 |
| CDK7 | 1022 | SEQ ID NO: 11 | SEQ ID NO: 55 |
| CHEK1 | 1111 | SEQ ID NO: 12 | SEQ ID NO: 56 |
| CIT | 11113 | SEQ ID NO: 13 | SEQ ID NO: 57 |
| CKS2 | 1164 | SEQ ID NO: 14 | SEQ ID NO: 58 |
| CSNX2A1 | 1457 | SEQ ID NO: 15 | SEQ ID NO: 59 |
| C20orf97 | 57761 | SEQ ID NO: 16 | SEQ ID NO: 60 |
| EPHB2 | 2048 | SEQ ID NO: 17 | SEQ ID NO: 61 |
| ERBB2 | 2064 | SEQ ID NO: 18 | SEQ ID NO: 62 |
| ERBB3 | 2065 | SEQ ID NO: 19 | SEQ ID NO: 63 |
| GSG2 | 83903 | SEQ ID NO: 20 | SEQ ID NO: 64 |
| GSK3B | 2932 | SEQ ID NO: 21 | SEQ ID NO: 65 |
| IRAK1 | 3654 | SEQ ID NO: 22 | SEQ ID NO: 66 |
| KIAA0175 | 9833 | SEQ ID NO: 23 | SEQ ID NO: 67 |
| MAPKAPK5 | 8550 | SEQ ID NO: 24 | SEQ ID NO: 68 |
| MAPK13 | 5603 | SEQ ID NO: 25 | SEQ ID NO: 69 |
| NEK2 | 4751 | SEQ ID NO: 26 | SEQ ID NO: 70 |
| PAK4 | 10298 | SEQ ID NO: 27 | SEQ ID NO: 71 |
| PCTK1 | 5127 | SEQ ID NO: 28 | SEQ ID NO: 72 |
| PDK3 | 5165 | SEQ ID NO: 29 | SEQ ID NO: 73 |
| PKMYT1 | 9088 | SEQ ID NO: 30 | SEQ ID NO: 74 |
| PLK | 5347 | SEQ ID NO: 31 | SEQ ID NO: 75 |
| PRKCL1 | 5585 | SEQ ID NO: 32 | SEQ ID NO: 76 |
| PRKDC | 5591 | SEQ ID NO: 33 | SEQ ID NO: 77 |
| PTK2 | 5747 | SEQ ID NO: 34 | SEQ ID NO: 78 |
| PTK6 | 5753 | SEQ ID NO: 35 | SEQ ID NO: 79 |
| RIPK2 | 8767 | SEQ ID NO: 36 | SEQ ID NO: 80 |
| RPS6KB2 | 6199 | SEQ ID NO: 37 | SEQ ID NO: 81 |
| SRPK1 | 6732 | SEQ ID NO: 38 | SEQ ID NO: 82 |
| STK6 | 6790 | SEQ ID NO: 39 | SEQ ID NO: 83 |
| STK12 | 9212 | SEQ ID NO: 40 | SEQ ID NO: 84 |
| STK15 | 8465 | SEQ ID NO: 41 | SEQ ID NO: 85 |
| STK18 | 10733 | SEQ ID NO: 42 | SEQ ID NO: 86 |
| STK39 | 27347 | SEQ ID NO: 43 | SEQ ID NO: 87 |
| TTK | 7272 | SEQ ID NO: 44 | SEQ ID NO: 88 |

[0078] The following is a brief annotation for each CRKG in Table 1:

[0079] ATR (ataxia telangiectasia and Rad3 related): ATR belongs to the P13/PI4-kinase family, and is most closely related to ATM, a protein kinase encoded by the gene mutated in ataxia telangiectasia. ATR and ATM share similarity with Schizosaccharomyces pombe rad3, a cell cycle checkpoint gene required for cell cycle arrest and DNA damage repair in response to DNA damage. ATR has been shown to phosphorylate checkpoint kinase CHKI, checkpoint proteins RAD17 and RAD9, as well as tumor suppressor protein BRCAL An alternatively spliced transcript variant of ATR gene has been reported, however, its full length nature is not known. Transcript variants utilizing alternative polyA sites exist. ATR is highly expressed in tumor endothelial cells but not in normal endothelial cells. ATR kinase plays an important role during tumor development in responding to hypoxia-induced replication arrest. ATR-deficient mice have been generated. The ATR +/− mice survived nearly as long as ATR +/+ mice but had an increase in tumor incidence. In contrast, and unlike ATM −/− or p53 −/− mice, ATR −/− embryos survived to the blastocyst stage at day 3.5 postcoitum but not to day 7.5. In culture, wild type and heterozygous blastocysts were initially indistinguishable from the ATR −/− cells, but the ATR −/− cells would die due to suffering from chromosomal fragmentation. TUNEL analysis revealed widespread apoptosis after 3 days of culture, and the apoptosis could be blocked by inhibition of Casp3. It was thus speculated that ATR may be particularly essential in the early embryo to sense incomplete DNA replication and prevent mitotic catastrophe. The transmembrane hidden Markov model (TMHMM) profile of ATR is shown in FIG. 1.

[0080] BCR (breakpoint cluster region): A reciprocal translocation between chromosomes 22 and 9 produces the Philadelphia chromosome, which is often found in patients with chronic myelogenous leukemia. The chromosome 22 breakpoint for this translocation is located within the BCR gene. The translocation produces a fusion protein which is encoded by sequence from both BCR and ABL, the gene at the chromosome 9 breakpoint. Although the BCR-ABL fusion protein has been extensively studied, the function of the normal BCR gene product is not clear. The protein has ser/thr kinase activity and is a GTPase-activating protein for p21 rac. The TMHMM profile of BCR is shown in FIG. 2.

[0081] BUBIB (budding uninhibited by benzimidazoles 1 (yeast homolog), beta): BUBI is a protein kinase that makes up the mitotic spindle checkpoint and is required for normal mitotic progression. The predicted BUBIB protein contains the conserved CD1 and CD2 domains that are found in yeast, human, and mouse BUB1; the human and mouse BUBIB proteins are 29% identical in these regions. CD1 directs kinetochore localization and binding to BUB3, and CD2 contains the kinase domain. BUB1 gene expression was detected in 19 colorectal cancer cell lines showing a chromosome instability (CIN) phenotype. A mutation in the BUB1 gene was detected in two of these cell lines. The TMHMM profile of BUBIB is shown in FIG. 3.

[0082] CDC2: This is a ser/thr protein kinase that regulates entry into mitosis. It is the catalytic subunit of the highly conserved protein kinase complex known as M phase promoting factor, which is essential for G1/S and G2/M phase transitions. Unlike yeast CDC2, the mammalian counterpart appears to be transcriptionally regulated. Its phosphorylation provides a second level of regulation. The TMHMM profile of CDC2 is shown in FIG. 4.

[0083] CDC21J1 (cell division cycle 2-like 1 (PITSLRE proteins)): CDC21J1 is a member of the p34Cdc2 protein kinase family. P34Cdc2 kinase family members are known to be essential for eukaryotic cell cycle control. The CDC21J1 gene is in close proximity to the CDC2L2 gene, a nearly identical gene in the same chromosomal region. The gene loci including this gene, CDC2L2, as well as metalloprotease MMP21/22, consist of two identical, tandemly linked genomic regions which are thought to be a part of the larger region that has been duplicated. The CDC21J1 and CDC2L2 genes were shown to be deleted or altered frequently in neuroblastoma with amplified MYCN genes. CDC21J1 could be cleaved by caspases and was demonstrated to play roles in cell apoptosis. A large number of the alternatively spliced variants of the CDC21J1 gene has been reported. The TMHMM profile of CDC21J1 is shown in FIG. 5.

[0084] CDC7L1 (CDC7 cell division cycle 7-like 1, S. cerevisiae): CDC7L1 is predominantly localized in the nucleus and is a cell division cycle protein with kinase activity. Although expression levels of the protein appear to be constant throughout the cell cycle, the protein kinase activity appears to increase during S phase. It has been suggested that the protein is essential for initiation of DNA replication and that it plays a role in regulating cell cycle progression. Overexpression of this gene product may be associated with neoplastic transformation for some tumors. Additional transcript sizes have been detected, suggesting the presence of alternative splicing. CDC21J1 is a ser/thr kinase and phosphorylates histone H1 and Mcm proteins in vitro. It is similar to S. cerevisiae CDC7p. The TMHMM profile of CDC7L1 is shown in FIG. 6.

[0085] CDK2 (cyclin-dependent kinase 2): CDK2 is a member of the ser/thr protein kinase family. This protein kinase is highly similar to the gene products of S. cerevisiae CDC28, and S. pombe CDC2. It is a catalytic subunit of the cyclin-dependent protein kinase complex, whose activity is restricted to the Gl-S phase and is essential for cell cycle GUS phase transition. This protein associates with and regulated by the regulatory subunits of the complex including cyclin A or E, CDK inhibitor p21Cip1 (CDKNIA) and p27Kip1 (CDKNIB). Its activity is also regulated by protein phosphorylation. Phosphorylation at thr14 or tyr15 inactivates the enzyme, while phosphorylation at thr160 activates it. Two alternatively spliced variants and multiple transcription initiation sites of the CDK2 gene have been reported. CDK2 is associated with cyclin A and cyclin E, and is involved in promoting DNA synthesis and cell cycle progression. The N-terminal domain of CDK2 interacts with cyclins, while the C-terminal domain interacts with CSK1. It is probably involved in the control of the cell cycle. The TMHMM profile of CDK2 is shown in FIG. 7.

[0086] CDK4 (cyclin-dependent kinase 4): The protein encoded by this gene is a member of the ser/thr protein kinase family. This protein is highly homologous to the gene products of S. cerevisiae CDC28, and S. pombe CDC2. It is a catalytic subunit of the protein kinase complex that is important for cell cycle G1 phase progression. The activity of this kinase is restricted to the G_{1/}S phase, which is controlled by the regulatory subunits D-type cyclins and CDK inhibitor p16 (INK4a). This kinase was shown to be responsible for the phosphorylation of retinoblastoma gene product (Rb). The mutations in this gene, as well as its related proteins including D-type cyclins, pl6(INK4a) and Rb, were all found to be associated with tumorigenesis of a variety of cancers. Two alternatively spliced variants and multiple polyadenylation sites of this gene have been reported. The TMHMM profile of CDK4 is shown in FIG. 8.

[0087] CDK5 (cyclin-dependent kinase 5): CDK5 interacts with a non-cyclin regulatory subunit CDK5R1 and is strongly similar to murine CDK5. The p34Cdc2 protein kinase regulates important transitions in the eukaryotic cell cycle. cDNAs encoding 7 novel human protein kinases were identified using RT-PCR of HeLa cell mRNA with degenerate primers corresponding to conserved regions of CDC2. One of these proteins is CDK5 (also designated PSSALRE, following the accepted practice of naming CDC2-related kinases based on the amino acid sequence of the region corresponding to the conserved PSTAIRE motif of CDC2). The predicted 291-amino acid CDK5 protein shares 57% identity with CDC2. The in vitro transcription/translation product of the CDK5 has an apparent molecular weight of 31 kd by SDS-PAGE. Northern blot analysis detected CDK5 expression in all human tissues and cell lines tested. CDK5-null mice were also generated and were found to exhibit unique lesions in the central nervous system, which is associated with perinatal mortality. The brains of CDK5-null mice lacked cortical laminar structure and cerebellar foliation. In addition, the large neurons in the brain stem and in the spinal cord showed chromatolytic changes with accumulation of neurofilament immunoreactivity. It thus appears that CDK5 is an important molecule for brain development and neuronal differentiation and that CDK5 may play critical roles in neuronal cytoskeleton structure and organization. The TMHMM profile of CDK5 is shown in FIG. 9.

[0088] CDK5R1 (cyclin-dependent kinase 5, regulatory subunit 1 (p35)): CDK5R1 is a neuron-specific activator of CDK5, whose activation is required for proper development of the central nervous system. A truncated form of CDK5R1 is found to be accumulated in the brain neurons of patients with Alzheimer's disease. Accumulation of the truncated protein could lead to the deregulation of CDK5, and consequently create aberrantly phosphorylated forms of the microtubuleassociated protein tau, which contributes to patients with Alzheimer's disease. CDK5R1 is not a cyclin family member and is strongly similar to rat Rn11213. The TMHMM profile of CDK5R1 is shown in FIG. 10.

[0089] CDK7 (cyclin-dependent kinase 7): CDK7 is a member of the cyclin-dependent protein kinase (CDK) family. CDK family members are highly similar to the gene products of S cerevisiae CDC28, and Spombe CDC2, and are known to be important regulators of cell cycle progression. CDK7 forms a trimeric complex with cyclin H and MAT1, which functions as a CDK-activating kinase (CAK). It is an essential component of the transcription factor TFIIH, which is involved in transcription initiation and DNA repair. This protein is thought to serve as a direct link between the regulation of transcription and the cell cycle. The TMHMM profile of CDK7 is shown in FIG. 11.

[0090] CHEK1 (CHK1 checkpoint homolog, S. pombe): This protein kinase inhibits mitotic entry after DNA damage. It is required for the DNA damage checkpoint. In vitro, CHK1 directly phosphorylates a regulator of CDC2 tyrosine phosphorylation, CDC25C. It has been proposed that, in response to DNA damage, CHK1 phosphorylates and inhibits CDC25C, thus preventing activation of the CDC2-cyclin B complex and mitotic entry. Targeted disruption of CHEK1 in mice showed that CHEK1 deficiency is lethal in early embryogenesis. In culture, CHEK1 −/−, but not CHEK1 +/, blastocysts demonstrated a severe defect in outgrowth of the inner cell mass and died of apoptosis, as determined by TUNEL analysis. CHEK1 is also indispensable for cell cycle arrest before mitosis. The TMHMM profile of CHEK1 is shown in FIG. 12.

[0091] CIT (citron, rho-interacting, ser/thr kinase 21): CIT is a ser/thr kinase in the myotonic dystrophy kinase family. It may or may not contain the sequence of Citron. CIT is a putative rho/rac effector that binds to the GTP-bound forms of rho and rac1. It probably binds p21 with a tighter specificity in vivo. Mice deficient in citron kinase (Citron-K −/− mice), growing at slower rates, are severely ataxic and die before adulthood due to fatal seizures. The brains of the Citron-K −/− mice display defective neurogenesis, with dramatic depletion of microneurons in the olfactory bulb, hippocampus, and cerebellum. These abnormalities arise during development of the central nervous system due to altered cytokinesis and massive apoptosis. It was suggested that citron kinase is essential for cytokinesis in vivo, and in specific neuronal precursors only. Moreover, CIP may be involved in a novel molecular mechanism for a subset of human malformation syndromes of the central nervous system. The TMHMM profile of CIT is shown in FIG. 13.

[0092] CKS2 (CDC28 protein kinase 2): CKS2 protein binds to the catalytic subunit of the cyclin dependent kinases and is essential for their biological function. The CKS2 mRNA is found to be expressed in different patterns through the cell cycle in HeLa cells, which reflects specialized role for the encoded protein. The TMHMM profile of CKS2 is shown in FIG. 14.

[0093] CSNK2A1 (casein kinase 2, alpha 1 polypeptide): CSNK2A1 is a ser/thr protein kinase. It is very similar to murine Csnk2a1, which is an oncogene when expressed inappropriately. CSNK2A1 phosphorylates acidic protein such as casein. It has a tetrameric a(2)/b(2) structure. The alpha subunit of molecular weight 40,000 possesses catalytic activity, whereas the beta subunit, molecular weight 25,000, is autophosphorylated in vitro. Phosphorylation of the human p53 protein at ser392 is responsive to ultraviolet (UV) but not gamma irradiation. identified and purified a mammalian UV-activated protein kinase complex that phosphorylates ser392 in vitro. This kinase complex contains CK2 and the chromatin transcriptional elongation factor FACT, a heterodimer of SPT16 and SSRP1. In vitro studies showed that FACT alters the specificity of CK2 in the complex such that it selectively phosphorylates p53 over other substrates, including casein. In addition, phosphorylation by the kinase complex was found to enhance p53 activity. These results provided a potential mechanism for p53 activation by UV irradiation. The TMHMM profile of CSNK2A1 is shown in FIG. 15.

[0094] C20orf97 (protein kinase domains containing protein similar to phosphoprotein C8FW): The protein is phosphorylated as cells enter mitosis and dephosphorylated as cells exit mitosis (by similarity). C20orf97 belongs to the ser/thr family of protein kinases and CDC5/polo subfamily. It is involved in regulating M phase functions during the cell cycle and may also be part of the signaling network controlling cellular adhesion. C20orf97 is capable of phosphorylating CDC25c and casein in vitro. The TMHMM profile of C20orf97 is shown in FIG. 16.

[0095] EPHB2 (Eph-related receptor tyrosine kinase B2): EPHB2 is one of the EPH receptors. The ligands of the EPH receptors are the ephrins. The EPH and EPH-related receptors comprise the largest subfamily of receptor protein-tyrosine kinases. They have been implicated in mediating developmental events, particularly in the nervous system. Northern blot analysis revealed that EPHB2 is expressed as transcripts of several sizes in a variety of human tissues, with the highest level of expression in the placenta. The related EPHB3 receptor was expressed in all of the adult tissues tested. The TMHMM profile of EPHB2 is shown in FIG. 17.

[0096] ERBB2/HER2/NEU (v-erb-b2 erythroblastic leukemia viral oncogene homolog 2, neuro/glioblastoma derived oncogene homolog (avian)): ERBB2 is a tyrosine kinase receptor and a component of IL-6 signaling through the MAP kinase pathway. ERBB2 is similar to the EGF receptor. Overexpression of ERBB2 confers Taxol resistance in breast cancer cells. Transfected MDA-MB-435 cells that overexpress HER2 transcriptionally upregulates CDKN1A which when associated with CDC2 would inhibit Taxol-mediated CDC2 activation, and delay cell entrance to G₂/M phase, and thereby inhibits Taxol-induced apoptosis. In CDKNIA anti sense-transfected MDA-MB-435 cells or in p21/MEF cells, ERBB2 was unable to inhibit Taxol-induced apoptosis. Therefore, CDKNIA participates in the regulation of a G₂/M checkpoint that contributes to resistance to Taxol-induced apoptosis in ERBB2-over-expressing breast cancer cells. The TMHMM profile of ERBB2 is shown in FIG. 18.

[0097] ERBB3/HER3(v-erbB2 erythroblastic leukemia viral oncogene homolog 3 (avian)): ERBB3 is a tyrosine kinase receptor that binds heregulin. Markedly elevated ERBB3 mRNA levels were demonstrated in certain human mammary tumor cell lines, suggesting that it may play a role in some human malignancies just as does EGFR. The TMHMM profile of ERBB3 is shown in FIG. 19.

[0098] GSG2 (haspin): GSG2 is a predicted protein with tyrosine and ser/thr kinase domains. GSG2 may play a role in cell-cycle cessation and differentiation of haploid germ cells. In addition, GSG2 mRNA can be detected in diploid cell lines and tissues. GSG2-like proteins are identified in several major eukaryotic phyla-including yeasts, plants, flies, fish, and mammals-and an extended group in C elegans. The TMHMM profile of GSG2 is shown in FIG. 20.

[0099] GSK3B (glycogen synthase kinase 3 beta): The intracellular distribution of GSK3B is dynamically regulated by signaling cascades, and apoptotic stimuli cause increased nuclear levels of GSK3B, which facilitates interactions with nuclear substrates. GSK3B is implicated in the hormonal control of several regulatory proteins including glycogen synthase, myb, and the transcription factor c-jun. GSK3B phosphorylates c-jun at sites proximal to its DNA-binding domain, reducing DNA-binding affinity. GSK3B is phosphorylated by AKT1 and ILK1. The ILK protein is a ser/thr protein kinase with 4 ankyrin-like repeats. ILK regulates integrinmediated signal transduction. GSK3B-deficient mice have been generated by targeted disruption. Although GSK3B +/− male and female mice were healthy and fertile, they did not give rise to live GSK3B −/− progeny. Embryonic lethality occurred between embryonic days 13.5 and 14.5 due to severe liver degeneration, a phenotype consistent with excessive tumor necrosis factor TNF toxicity, as observed in mice lacking genes involved in the activation of transcription factor NFKB. GSK3B-deficient embryos were rescued by inhibition of TNF using anti-TNF-alpha antibody. Fibroblasts from GSK3B-deficient embryos were hypersensitive to TNF-alpha and showed reduced NFKB function. Lithium treatment, which inhibits GSK3, sensitized wildtype fibroblasts to TNF and inhibited transactivation of NFKB. The early steps leading to NFKB activation were unaffected by the loss of GSK3B, indicating that NFKB is regulated by GSK3B at the level of the transcriptional complex. The TMHMM profile of GSK3B is shown in FIG. 21.

[0100] IRAK1 (interleukin-1 receptor-associated kinase 1): IRAK1 is one of the two putative ser/thr kinases that become associated with the interleukin-1 receptor (IL1R) upon stimulation. IRAK1 is partially responsible for IL1-induced upregulation of the transcription factor NF-kappa B. The TMHMM profile of IRAK1 is shown in FIG. 22.

[0101] KIAA0175: This gene is the likely orthologue of the murine maternal embryonic leucine zipper kinase which is a member of the SnfI/AMPK kinase family. The mouse gene is known as MELK and encodes a protein with a catalytic domain and a leucine zipper motif. SnfI is a histone kinase that works in concert with the histone acetyltransferase Gen5 to regulate transcription. This gene product may play a role in signal transduction events in the egg and early embryo. The TMHMM profile of KIAA0175 is shown in FIG. 23.

[0102] MAPKAPK5 (mitogen-activated protein kinase-activated protein kinase 5): MAPKAPK5 is a ser/thr kinase that phosphorylates HSP2 and may have a role in stress response. MAPKAPK5 is a 471-amino acid protein that shares 20 to 30% sequence identity with RSK, MNK, and MAPKAPK kinases. MAPKAPK5 contains the conserved protein kinase domains I through XI, which are characteristic of all protein kinases. The TMHMM profile of MAPKAPK5 is shown in FIG. 24.

[0103] MAPK13 (mitogen-activated protein kinase 13): MAPK13 is a member of the MAP kinase family. MAP kinases act as an integration point for multiple biochemical signals, and are involved in a wide variety of cellular processes such as proliferation, differentiation, transcription regulation and development. MAPK13 is closely related to p38 MAP kinase, both of which can be activated by proinflammatory cytokines and cellular stress. MAP kinase kinases 3, and 6 can phosphorylate and activate MAPK13. Transcription factor ATF2, and microtubule dynamics regulator stathmin have been shown to be the substrates of this kinase. MAPK13 is activated by stress and proinflammatory cytokines and is phosphorylated by MKK6 (PRKMK6). Mitogen-activated protein kinase (MAPK) cascades represent one of the major signal systems used by eukaryotic cells to transduce extracellular signals into cellular responses. The stress-activated protein kinases (SAPKS) are MAPKs that are activated by chemical and environmental stresses as well as by proinflammatory cytokines. The TMHMM profile of MAPK1 3 is shown in FIG. 25.

[0104] NEK2/NIMA (never in mitosis gene A) related kinase 2): NIMA was first characterized in Aspergillus nidulans as required for entry into mitosis. Cells with a NIMA mutation arrest in G2 while over-expression induces mitosis. Using Western blots of extracts of synchronized HeLa cells, it has been shown that the NEK2 protein was almost undetected during GI, but accumulated progressively throughout S phase reaching maximal levels in late G2. NEK2 localized to the centrosome throughout the cell cycle. Over-expression of active NEK2 induces a splitting of the centrosomes, which probably results from the phosphorylation of the centrosomal proteins by NEK2. NEK2 may play a role in the regulation of centrosome separation. The TMHMM profile of NEK2 is shown in FIG. 26.

[0105] PAK4 (p21(CDKNIA)-activated kinase 4): PAK proteins are critical effectors that link Rho GTPases to cytoskeleton reorganization and nuclear signaling. PAK proteins, a family of ser/thr p21-activating kinases, include PAK1, PAK2, PAK3 and PAK4. PAK proteins serve as targets for the small GTP binding proteins CDC42 and Rae and have been implicated in a wide range of biological activities. PAK4 interacts specifically with the GTP-bound form of CDC42Hs and weakly activates the JNK family of MAP kinases. PAK4 is a mediator of filopodia formation and may play a role in the reorganization of the actin cytoskeleton. The TMHMM profile of PAK4 is shown in FIG. 27.

[0106] PCTK1/PCTAIRE protein kinase 1: PCTK1 belongs to the PCTAIRE protein kinases subfamily of CDC2 kinases (it is also named PCTAIRE protein kinase 1 for the presence of a cysteine-for-serine substitution in the conserved PSTAIRE amino acid motif found in prototypic CDC2 kinases). Three members of this kinase subfamily, PCTAME1-3, have been identified in humans. This ser/thr kinase may play a role in signal transduction cascades in terminally differentiated cells. The PCTK1 gene is thought to escape X inactivation. There are three alternatively spliced transcript variants described for this gene. PCTK1 is ubiquitously expressed with the highest levels detected in the brain and testis. The TMHMM profile of PCTK1 is shown in FIG. 28.

[0107] PDK3 (pyruvate dehydrogenase kinase, isoenzyme 3): PDK3 phosphorylates the El alpha subunit of the pyruvate dehydrogenase complex and regulates glucose metabolism. The TMHMM profile of PDK3 is shown in FIG. 29.

[0108] PKMYTI (membrane-associated tyrosine- and threonine-specific cdc2-inhibitory kinase): PKMYTI inhibits the activity of cyclin-bound CDC2 by phosphorylating the protein at residue thr14. Entry into mitosis requires the activity of CDC2 kinase coupled with cyclin B. Phosphorylation of the CDC2 protein on residues thr14 and tyr15 is inhibitory to CDC2 activity. PKMYT1 is, in effect, an inhibitor of mitosis. The TMHMM profile of PKMYT1 is shown in FIG. 30.

[0109] PLK (Polo (Drosophia)-like kinase): PLK is a ser/thr kinase that is active in chromosomal segregation. PLK has been shown not to be expressed in any adult human tissues except placenta. Among cultured cell lines, PLK mRNA was detected in all growing cells. PLK localizes to the mitotic spindle and is thought to be involved in the promotion or progression of cancers. Cells transformed with PLK grew in soft agar and produced tumors in nude mice. PLK may be involved in targeting MPF (mitosis promoting factor) to the nucleus during prophase. The TMHMM profile of PLK is shown in FIG. 31.

[0110] PRKCL1 (protein kinase C-like 1): PRKCL1 phosphorylates ribosomal protein s6, and mediates GTPase rho-dependent intracellular signaling. The putative 942-amino acid protein has leucine zipper-like sequences at its amino terminus and contains a domain with strong similarity to that of the protein kinase C family. PRKCL1 is ubiquitously expressed in human tissues. Antisera detected a 120-kD recombinantly expressed protein on Western blots. The protein showed intrinsic protein kinase activity that was abolished by a mutation in the predicted ATP binding site. The TMHMM profile of PRKCL1 is shown in FIG. 32.

[0111] PRKDC (protein kinase, DNA-activated, catalytic polypeptide): PRKDC is the catalytic subunit of DNA-activated (DNA dependent) protein kinase. It has a role in DNA double strand break repair and recombination and has similarity to PI3Ks. PRKDC is a nuclear protein ser/thr kinase that is present in a variety of eukaryotic species. This kinase is not required for p53-dependent response to DNA damage. The hydrophobicity profile of PRKDC is shown in FIG. 33.

[0112] PTK2 (protein tyrosine kinase 2): PTK2 is a putative homolog of chicken focal adhesion associated kinase (FAK). Activation of PTK2 may be an important early step in cell growth and intracellular signal transduction pathways triggered in response to several neural peptides and/or to cell interactions with the extracellular matrix. Activation of focal adhesion kinases (FAK) may be an early step in intracellular signal transduction pathways. This tyrosine-phosphorylation is triggered by integrin interactions with various extracellular matrix adhesive molecules and by neuropeptide growth factors. PTK2 may also play a role in oncogenic transformation resulting in increased kinase activity. The TMHMM profile of PTK2 is shown in FIG. 34.

[0113] PTK6 (PTK6 protein tyrosine kinase 6): PTK6 is a non-receptor protein tyrosine kinase and is involved in sensitization of mammary epithelial cells to epidermal growth factor (EGF). PTK6 is capable of tyrosine autophosphorylation. Overexpression of PTK6 in mammary epithelial cells led to sensitization of cells to epidermal growth factor (EGF; and resulted in a partially transformed phenotype. Coimmunoprecipitation of BRK and the EGF receptor has been reported. The TMHMM profile of PTK6 is shown in FIG. 35.

[0114] RIPK2 (receptor-interacting ser/thr kinase 2): RIPK2 interacts with CD40 or the tumor necrosis factor receptor; and has a C-terminal domain for caspase recruitment and activation. RIPK2 is a death domain-containing protein kinase that interacts with the death domain of FAS, but does not appear to mediate FAS-initiated apoptosis. The 540-amino acid protein contains an N-terminal ser/thr kinase catalytic domain and a C-terminal caspase activation and recruitment domain (CARD). RIPK2-knockout mice are viable and fertile. However, the subclass-specific IgG responses are lower in RIPK2-deficient mice. T-cell responses, specifically Th1 differentiation and cytokine production, are more severely affected. IFNγ production in response to T-cell receptor activation plus IL12 and/or IL18 stimulation was also reduced in the RIPK2-deficient mice, possibly through defective Stat4 activation. NK cells in the RIPK2-deficient mice were also unable to produce IFNγ in response to IL12 and/or IL18. The TMHMM profile of RIPK2 is shown in FIG. 36.

[0115] RPS6 KB2/P70S6 KB (ribosomal protein S6 kinase, 70 kD, polypeptide 2): RPS6 KB2 phosphorylates specifically ribosomal protein s6. The enzyme is activated by ser/thr phosphorylation and protein kinase C, and is inactivated by type 2a phosphatase. RPS6 KB2 has both tyrosine and serine/threonine catalytic domains. It is part of mTOR signal transduction pathway. The TMHMM profile of P70S6 KB is shown in FIG. 37.

[0116] SRPK1 (SFRS protein kinase 1): This gene encodes a ser/arg protein kinase specific for the SR (serine/arginine-rich domain) family of splicing factors. The protein localizes to the nucleus and the cytoplasm. It is thought to play a role in regulation of both constitutive and alternative splicing by regulating intracellular localization of splicing factors. A second alternatively spliced transcript variant for this gene has been described, but its full length nature has not been determined. Inactivation of SRPK1 induces cisplatin resistance in a human ovarian carcinoma cell line. The TMHMM profile of SRPK1 is shown in FIG. 38.

[0117] STK6/aurora/IPL1-like (ser/thr kinase 6): STK6 is most highly expressed during mitosis. It has high homology with Aurora and Ip11 kinases. Mutations in yeast STK6 are known to cause abnormal spindle formation and missegregation of chromosomes. Northern and Western blotting analyses revealed a high level of STK6 expression in testis and proliferating culture cells such as HeLa cells. The endogenous levels of STK6 protein and protein kinase activity were tightly regulated during cell cycle progression in HeLa cells. The protein was upregulated during G2/M and rapidly reduced after mitosis. Immunofluorescence studies revealed specific localization of STK6 protein to the spindle pole region during mitosis. The TMHMM profile of STK6 is shown in FIG. 39.

[0118] STK12/AURORA-RELATED KINASE 2/ARK2 (Ser/thr kinase 12): Drosophila ‘aurora’ and S. cerevisiae Ip1 1 ser/thr protein kinases (STKs) are involved in mitotic events such as centrosome separation and chromosome segregation. Human STK12 is a 344-amino acid protein containing kinase domains that share high homology with the catalytic domains of other STKs. Cell cycle and Northern blot analyses showed that STK12 is expressed in the S phase and persistently thereafter. Northern blot analysis detected strong expression of a 1.5-kb STK12 transcript in thymus, with weaker expression in small intestine, testis, colon, spleen, and brain. The TMHMM profile of STK12 is shown in FIG. 40.

[0119] STK18 (ser/thr kinase 18): Chromosomal segregation during mitosis and meiosis is regulated by kinases and phosphatases. The cDNA encoding STK18 was isolated by screening embryonic tissue using degenerate PCR primers corresponding to conserved amino acid motifs within the catalytic domain of protein kinases, followed by screening a squamous cell carcinoma cDNA library. The predicted 970-amino acid STK18 protein shares significant homology with other STKs, particularly to those related to Drosophila ‘polo’, all of which have an N-terminal kinase domain. Because STK18 is homologous to the murine Sak gene, it is also named SAK. Northern blot analysis detected abundant expression of a 4.0-kb STK18 transcript in testis and thymus but not in other tissues or tumors. The TMHMM profile of STK18 is shown in FIG. 42.

[0120] STK39/SPAK/Ste-20 related kinase: Human STK39 is very similar to rat SPAK. SPAK modulates p38 MAP kinase activity and exhibits increased expression in androgen-treated LNCaP cells. R1881-induced SPAK expression was completely abrogated by the antiandrogen casodex and by actinomycin D indicating that androgen induction of SPAK requires the androgen receptor and transcription. Cycloheximide caused a partial inhibition of R1881-induced SPAK expression which suggests that androgen induction of SPAK expression may require synthesis of additional proteins. Northern blot and ribonuclease protection assays demonstrated that SPAK is expressed at high levels in normal human testes and prostate, as well as in a number of breast and prostate cancer cell lines. The TMHMM profile of STK39 is shown in FIG. 43.

[0121] TTK protein kinase: This is a dual specific ser/thr and tyrosine kinase. It functions as a kinetochore-associated kinase whose activity is necessary to establish and maintain the mitotic checkpoint. The TMHMM profile of TTK is shown in FIG. 44.

[0122] Various aspects of the invention are described in further detail in the following sections and subsections. The use of sections and subsections is not meant to limit the invention; these section and subsections may apply to any aspect of the invention. As used herein, the term “or” means “and/or” unless otherwise specified.

Cancer-Related Protein Kinases (CPKs) and Cancer-Related Protein Kinase Genes (CPKGs)

1. CPKGs and Cancer

[0123] Table 1 provides CPKGs that are expressed at abnormally increased levels in human cancer tissues. These protein kinase genes may be a component in the disease mechanism and can be used as markers for diagnosing and monitoring cancer. Furthermore, CPKGs and CPKG products (CPKPNs and CPKPPs) may become novel therapeutic targets for the treatment and prevention of cancer.

[0124] Kinase proteins are a major target for drug action and development. A January 2002 survey of ongoing clinical trials in the USA revealed more than 100 clinical trials involving the modulation of kinases. Trials are ongoing in a wide variety of therapeutic indications including asthma, Parkinson's, inflammation, psoriasis, rheumatoid arthritis, spinal cord injuries, muscle conditions, osteoporosis, graft versus host disease, cardiovascular disorders, autoimmune disorders, retinal detachment, stroke, epilepsy, ischemia/reperfusion, breast cancer, ovarian cancer, glioblastoma, non-Hodgkin's lymphoma, colorectal cancer, non-small cell lung cancer, brain cancer, Kaposi's sarcoma, pancreatic cancer, liver cancer, and other tumors. Numerous kinds of modulators of kinase activity are currently in clinical trials including antisense molecules, antibodies, small molecules, and even gene therapy. The present invention advances the state of the art by providing new links of kinase proteins to the etiology of cancer.

[0125] Many therapeutic strategies are aimed at protein kinases since they are critical components in signal transduction pathways. Approaches for regulating kinase gene expression include specific antisense oligonucleotides for inhibiting post-transcriptional processing of the messenger RNA, naturally occurring products and their chemical derivatives to inhibit kinase activity and monoclonal antibodies to inhibit receptor linked kinases. In some cases, kinase inhibitors also allow other therapeutic agents additional time to become effective and act synergistically with current treatments.

[0126] The role of phosphorylation in transcriptional control, apoptosis, protein degradation, nuclear import and export, cytoskeletal regulation, and checkpoint signaling has been an important subject in pharmaceutical research. The accumulating knowledge about signaling networks and the proteins involved will be put to practical use in the development of potent and specific pharmacological modulators of phosphorylation-dependent signaling that can be used for therapeutic purposes. The rational structure-based design and development of highly specific kinase modulators is becoming routine and drugs that intercede in signaling pathways are becoming a major class of drug.

[0127] The kinases comprise the largest known protein group, a superfamily of enzymes with widely varied functions and specificities. They are usually named after their substrate, their regulatory molecules, or some aspect of a mutant phenotype. With regard to substrates, the protein kinases may be roughly divided into two groups; those that phosphorylate tyrosine residues (protein tyrosine kinases, PTK) and those that phosphorylate serine or threonine residues (ser/thr kinases, STK).

[0128] An important subfamily of the STK family is cyclic-AMP dependent protein kinases (PKA). Cyclic-AMP is an intracellular mediator of hormone action in all prokaryotic and animal cells that have been studied. Such hormone-induced cellular responses include thyroid hormone secretion, cortisol secretion, progesterone secretion, glycogen breakdown, bone resorption, and regulation of heart rate and force of heart muscle contraction. PKA is found in all animal cells and is thought to account for the effects of cyclic-AMP in most of these cells. Altered PKA expression is implicated in a variety of disorders and diseases including cancer, thyroid disorders, diabetes, atherosclerosis, and cardiovascular disease.

[0129] The mitogen-activated protein kinases (MAP) are also members of the STK family. MAP kinases also regulate intracellular signaling pathways. They mediate signal transduction from the cell surface to the nucleus via phosphorylation cascades. Several subgroups have been identified, and each manifests different substrate specificities and responds to distinct extracellular stimuli. MAP kinase signaling pathways are present in mammalian cells as well as in yeast. The extracellular stimuli that activate mammalian pathways include epidermal growth factor (EGF), ultraviolet light, hyperosmolar medium, heat shock, endotoxic lipopolysaccharide (LPS), and pro-inflammatory cytokines such as tumor necrosis factor (TNF) and interleukin-1 (IL-1).

[0130] EGF receptor is found in over half of breast tumors unresponsive to hormone. EGF is found in many tumors, and EGF may be required for tumor cell growth. Antibody to EGF blocked the growth of tumor xenografts in mice. An antisense oligonucleotide for amphiregulin inhibited growth of a pancreatic cancer cell line.

[0131] Cell proliferation and differentiation in normal cells are under the regulation and control of multiple MAP kinase cascades. Aberrant and deregulated functioning of MAP kinases can initiate and support carcinogenesis. Insulin and IGF-1 also activate a mitogenic MAP kinase pathway that may be important in acquired insulin resistance occurring in type 2 diabetes.

[0132] Many cancers become refractory to chemotherapy by developing a survival strategy involving the constitutive activation of the phosphatidylinositol 3-kinase-protein kinase B/Akt signaling cascade. This survival signaling pathway thus becomes an important target for the development of specific inhibitors that would block its function. PI-3 kinase/Akt signaling is equally important in diabetes. The pathway activated by RTKs subsequently regulates glycogen synthase 3 (GSK3) and glucose uptake. Since Akt has decreased activity in type 2 diabetes, it provides a therapeutic target.

[0133] Although some protein kinases have, to date, no known system of physiological regulation, many are activated or inactivated by autophosphorylation or phosphorylation by upstream protein kinases. The regulation of protein kinases also occurs transcriptionally, post-transcriptionally, and post-translationally. The mechanism of post-transcriptional regulation is alternative splicing of precursor mRNA. Protein kinase CβI and βII are two isoforms of a single PKCβ gene derived from differences in the splicing of the exon encoding the C-terminal 50-52 amino acids. Splicing can be regulated by a kinase cascade in response to peptide hormones such as insulin and IGF-1. PKCβI and βII have different specificities for phosphorylating members of the MAP kinase family, for glycogen synthase 3β, for nuclear transcription factors such as TLS/Fus, and for other nuclear kinases. By inhibiting the post-transcriptional alternative splicing of PKCβII mRNA, PKCβII-dependent processes are inhibited.

[0134] Protein kinase C isoforms have been implicated in cellular changes observed in the vascular complications of diabetes. Hyperglycemia is associated with increased levels of PKCα and β forms in renal glomeruli of diabetic rats. Oral administration of a PKCβ inhibitor prevented the increased mRNA expression of TGF-β1 and extracellular matrix component genes. Administration of the specific PKCβ inhibitor (LY333531) also normalized levels of cytokines, caldesmon and hemodynamics of retinal and renal blood flow. Over-expression of the PKCβ form in the myocardium resulted in cardiac hypertrophy and failure. The use of LY33353 1 to prevent adverse effects of cardiac PKCPβ over-expression in diabetic subjects is under investigation. The compound is also in Phase I/II clinical trials for diabetic retinopathy and diabetic macular edema indicating that it may be pharmacodynamically active.

[0135] PRK (proliferation-related kinase) is a serum/cytokine inducible STK that is involved in regulation of the cell cycle and cell proliferation in human megakaroytic cells. PRK is related to the polo (derived from human polo gene) family of STKs implicated in cell division. PRK is downregulated in lung tumor tissue and may be a proto-oncogene whose deregulated expression in normal tissue leads to oncogenic transformation. Altered MAP kinase expression is implicated in a variety of disease conditions including cancer, inflammation, immune disorders, and disorders affecting growth and development.

[0136] Protein kinase inhibitors provide much of our knowledge about in vivo regulation and coordination of kinase functions. A pseudosubstrate sequence within PKC acts to inhibit the kinase in the absence of its lipid activator. A PKC inhibitor such as chelerythrine acts on the catalytic domain to block substrate interaction, while calphostin acts on the regulatory domain to mimic the pseudosubstrate sequence and block ATPase activity, or by inhibiting cofactor binding. The ability to inhibit specific PKC isozymes is limited.

[0137] Tamoxifen, a protein kinase C inhibitor with anti-estrogen activity, is currently a standard treatment for hormone-dependent breast cancer. The use of this compound may increase the risk of developing cancer in other tissues such as the endometrium. Raloxifene, a related compound, has been shown to protect against osteoporosis. The tissue specificity of inhibitors must be considered when identifying therapeutic targets.

[0138] The cyclin-dependent protein kinases (CDKs) are another group of STKs that control the progression of cells through the cell cycle. Cyclins are small regulatory proteins that act by binding to and activating CDKs that then trigger various phases of the cell cycle by phosphorylating and activating selected proteins involved in the mitotic process. CDKs are unique in that they require multiple inputs to become activated. In addition to the binding of cyclin, CDK activation requires the phosphorylation of a specific threonine residue and the dephosphorylation of a specific tyrosine residue.

[0139] Cellular inhibitors of CDKs also play a major role in cell cycle progression. Alterations in the expression, function, and structure of cyclin and CDK are encountered in the cancer phenotype. Therefore CDKs may be important targets for new cancer therapeutic agents.

[0140] Often chemotherapy resistant cells tend to escape apoptosis. Under certain circumstances, inappropriate CDK activation may even promote apoptosis by encouraging the progression of the cell cycle under unfavorable conditions, i.e., attempting mitosis while DNA damage is largely unrepaired.

[0141] Purines and purine analogs act as CDK inhibitors. Flavopiridol (L86-2,275) is a flavonoid that causes 50% growth inhibition of tumor cells at 60 nM (57). It also inhibits EGFR and protein kinase A. Flavopiridel induces apoptosis and inhibits lymphoid, myeloid, colon, and prostate cancer cells grown in vivo as tumor xenografts in nude mice.

[0142] Staurosporine and its derivative, UCN-O1, in addition to inhibiting protein kinase C, inhibit cyclin B/CDK (IC₅₀ 3 to 6 nM). Staurosporine is toxic, but its derivative 7-hydroxystaurosporine (UCN1) has anti-tumor properties and is in clinical trials. UCN-01 affects the phosphorylation of CDKs and alters the cell cycle checkpoint functioning. These compounds illustrate that multiple intracellular targets may be affected as the concentration of an inhibitor is increased within cells.

[0143] Protein tyrosine kinases, PTKs, specifically phosphorylate tyrosine residues on their target proteins and may be divided into transmembrane, receptor PTKs and non-transmembrane, non-receptor PTKs. Transmembrane protein-tyrosine kinases are receptors for most growth factors. Binding of growth factor to the receptor activates the transfer of a phosphate group from ATP to selected tyrosine side chains of the receptor and other specific proteins. Growth factors (GF) associated with receptor protein-tyrosine kinases (RTK) include epidermal GF, platelet-derived GF, fibroblast GF, hepatocyte GF, insulin and insulin-like GFs, nerve GF, vascular endothelial GF, and macrophage colony stimulating factor.

[0144] Inhibitors of RTKs may inhibit the growth and proliferation of such cancers, since RTKs stimulate tumor cell proliferation. Inhibitors of RTKs are also useful in preventing tumor angiogenesis and can eliminate support from the host tissue by targeting RTKs located on vascular cells (e.g., blood vessel endothelial cells and stromal fibroblasts (FGF receptor)).

[0145] Increasing knowledge of the structure and activation mechanism of RTKs and the signaling pathways controlled by tyrosine kinases provided the possibility for the development of target-specific drugs and new anti-cancer therapies. Approaches towards the prevention or interception of deregulated RTK signaling include the development of selective components that target either the extracellular ligand-binding domain or the intracellular tyrosine kinase or substrate binding region.

[0146] The most successful strategy to selectively kill tumor cells is the use of monoclonal antibodies (mAbs) that are directed against the extracellular domain of RTKs which are critically involved in cancer and are expressed at the surface of tumor cells. In the past years, recombinant antibody technology has made enormous progress in the design, selection and production of new engineered antibodies, and it is possible to generate humanized antibodies, human-mouse chimeric or biospecific antibodies for targeted cancer therapy. Mechanistically, anti-RTK mAbs might work by blocking the ligand-receptor interaction and therefore inhibiting ligand-induced RTK signaling. In addition, by binding of to certain epitopes on the cancer cells, the anti-RTK mAbs induce immune-mediated responses such as opsonization and complement-mediated lysis and trigger antibody-dependent cellular cytotoxicity by macrophages or natural killer cells. In recent years, it became evident that mAbs control tumor growth by altering the intracellular signaling pattern inside the targeted tumor cell, leading to growth inhibition and/or apoptosis. In contrast, biospecific antibodies can bridge selected surface molecules on a target cell with receptors on an effector cell triggering cytotoxic responses against the target cell. Despite the toxicity that has been seen in clinical trials of bispecific antibodies, advances in antibody engineering, characterization of tumor antigens and immunology might help to produce rationally designed bispecific antibodies for anti-cancer therapy.

[0147] Another promising approach to inhibit aberrant RTK signaling are small molecule drugs that selectively interfere with the intrinsic tyrosine kinase activity and thereby block receptor autophosphorylation and activation of downstream signal transducers. The tyrphostins, which belong to the quinazolines, are one important group of such inhibitors that compete with ATP for the ATP binding site at the receptor's tyrosine kinase domain and some members have been shown to specifically inhibit the EGFR. Potent and selective inhibitors of receptors involved in neovascularization have been developed and are now undergoing clinical evaluation. Using the advantages of structure-based drug design, crystallographic structure information, combinatorial chemistry and high-throughput screening, new structural classes of tyrosine kinase inhibitors with increased potency and selectivity, higher in vitro and in vivo efficacy and decreased toxicity have emerged.

[0148] Recombinant immunotoxins provide another possibility of target-selective drug design. They are composed of a bacterial or plant toxin either fused or chemically conjugated to a specific ligand such as the variable domains of the heavy and light chains of mAbs or to a growth factor. Immunotoxins either contain the bacterial toxins Pseudomouas exotoxin A or diphtheria toxin or the plant toxins ricin A or clavin. These recombinant molecules can selectively kill their target cells when internalized after binding to specific cell surface receptors.

[0149] The use of antisense oligonucleotides represents another strategy to inhibit the activation of RTKs. Antisense oligonucleotides are short pieces of synthetic DNA or RNA that are designed to interact with the mRNA to block the transcription and thus the expression of specific-target proteins. These compounds interact with the mRNA by Watson-Crick base-pairing and are therefore highly specific for the target protein. Several preclinical and clinical studies suggest that antisense therapy might be therapeutically useful for the treatment of solid tumors

[0150] A variety of successful target specific drugs such as mAbs and RTK inhibitors have been developed and are currently evaluated in clinical trials. Table 2 summarizes the most successful drugs against receptor tyrosine kinase signaling which are currently evaluated in clinical phases or have already been approved by the FDA.

TABLE 2
RTK Drugs Currently Under Clinical Evaluation

| RTK | Drug | Company | Description | Status |
|---|---|---|---|---|
| EGFR | ZA18539 Iressa | AstraZeneca | TKI that inhibits EGFR | Phase III |
| | | | signaling | |
| EGFR | Cetuximab C225 | ImClone | Mab directed against EGFR | Phase III |
| | | Systems | | |
| EGFR | EGF fusion protein | Seragen | Recombinant diphtheria toxin- | Phase II |
| | | | hEGF fusion protein | |
| HER2 | Trastuzumab | Genetech | Mab directed against HER2 | Approved by |
| | Herceptin | | | the FDA in |
| | | | | 1998 |
| IGF-IR | INX-4437 | INEX USA | Antisense oligonucleotides | Phase I |
| | | | targeting IGR-IR | |
| VEGFR | SU5416 | SUGEN | TKI that inhibits VEGFR2 | Phase II |
| VEGFR/ | SU6668 | SUGEN | RTK inhibition of VEGFR, | Phase I |
| FGFR/ | | | FGFR, and PDGFR | |
| PDGFR | | | | |

[0151] Non-receptor PTKs lack transmembrane regions and, instead, form complexes with the intracellular regions of cell surface receptors. Such receptors that function through non-receptor PTKs include those for cytokines, hormones (growth hormone and prolactin) and antigen-specific receptors on T and B lymphocytes.

[0152] Many of these PTKs were first identified as the products of mutant oncogenes in cancer cells where their activation was no longer subject to normal cellular controls. In fact, about one third of the known oncogenes encode PTKs, and it is well known that cellular transformation (oncogenesis) is often accompanied by increased tyrosine phosphorylation activity.

[0153] Targeting the signaling potential of growth promoting tyrosine kinases such as EGFR, HER2, PDGFR, src, and abl, will block tumor growth while blocking IGF-I and TRK will interfere with tumor cell survival. Inhibiting these kinases will lead to tumor shrinkage and apoptosis. FklI/KDR and src are kinases necessary for neovascularization (angiogenesis) of tumors and inhibition of these will slow tumor growth thereby decreasing metastases.

[0154] Inhibitors of RTKs stabilize the tumor in terms of cell proliferation, normal cell loss via apoptosis, and prevent cell migration, invasion and metastases. These drugs are likely to increase the time required for tumor progression, and may inhibit or attenuate the aggressiveness of the disease but may not initially result in measurable tumor regression.

[0155] Many tyrosine kinase inhibitors are derived from natural products including flavopiridol, genistem, erbstatin, lavendustin A, staurosporine, and UCN-O1. Inhibitors directed at the ATP binding site are also available. Signals from RTKs can also be inhibited at other target sites such as: nuclear tyrosine kinases, membrane anchors (inhibition of farnesylation) and transcription factors.

[0156] An example of cancer arising from a defective tyrosine kinase is a class of ALK positive lymphomas referred to as “ALKomas” which display inappropriate expression of a neural-specific tyrosine kinase, anaplastic lymphoma kinase (ALK).

[0157] Iressa (ZD1839) is an orally active selective EGF-R inhibitor. This compound disrupts signaling involved in cancer cell proliferation, cell survival and tumor growth support by the host. The clinical efficacy of this agent shows that it is well tolerated by patients undergoing Phase I/II clinical trials. The compound has shown promising cytotoxicity towards several cancer cell lines.

[0158] Since the majority of protein kinases are expressed in the brain, often in neuron-specific fashion, protein phosphorylation must play a key role in the development and function of the vertebrate central nervous system. Thus neuron-specific kinases are well established as targets for the development of pharmacologically active modulators.

[0159] In summary, kinase proteins are a major target for drug action and development. Accordingly, it is valuable to the field of pharmaceutical development to identify and characterize kinase proteins that are associated with cancer.

2. CPKGs and CPKG Products As Markers for Cancers

[0160] The present invention pertains to the use of the CPKGs listed in Table 1, the transcribed polynucleotides (CPKPN), and the encoded polypeptides (CPKPP) as markers for cancer. Moreover, the use of expression profiles of these genes can indicate the presence of a risk of cancer. These markers are further useful to correlate differences in levels of expression with a poor or favorable prognosis of cancer. The present invention is directed to the use of CPKGs and panels of CPKGs set forth in Table 1 or homologs thereof. For example, panels of the CPKGs can be conveniently arrayed on solid supports, i.e., biochips, such as the GeneChip®, for use in kits. The CPKGs can be used to assess the efficacy of a treatment or therapy of cancer, or as a target for a treatment or therapeutic agent. The CPKGs can also be used to generate vaccines for cancer, to produce antibodies specific to cancer cells, and to construct gene therapy vectors that inhibit tumor growth. Therefore, without limitation as to mechanism, the invention is based in part on the principle that modulation of the expression of the CPKGs of the invention may ameliorate cancer when they are expressed at levels similar or substantially similar to normal (non-diseased) tissue.

[0161] In one aspect, the invention provides CPKGs whose level of expression, which signifies their quantity or activity, is correlated with the presence of cancer. In certain embodiments, the invention is performed by detecting the presence of a CPKPN or a CPKPP.

[0162] In another aspect of the invention, the expression levels of the CPKGs are determined in a particular subject sample for which either diagnosis or prognosis information is desired. The level of expression of a number of CPKGs simultaneously provides an expression profile, which is essentially a “fingerprint” of the presence or activity of a CPKG or a plurality of CPKGs that is unique to the state of the cell. In certain embodiments, comparison of relative levels of expression is indicative of the severity of cancer, and as such permits for diagnostic and prognostic analysis. Moreover, by comparing relative expression profiles of CPKGs from tissue samples taken at different points in time, e.g., pre- and post-therapy and/or at different time points within a course of therapy, information regarding which genes are important in each of these stages is obtained. The identification of genes that are abnormally expressed in cancer versus normal tissue, as well as differentially expressed genes during cancer development, allows the use of this invention in a number of ways. For example, comparison of expression profiles of CPKGs at different stages of the tumor progression provides a method for long-term prognosis, including survival. In another example mentioned above, the evaluation of a particular treatment regime may be evaluated, including whether a particular drug will act to improve the long-term prognosis in a particular patient.

[0163] The discovery of these differential expression patterns for individual or panels of CPKGs allows for screening of test compounds that modulate a particular expression pattern. For example, screening can be done for compounds that will convert an expression profile for a poor prognosis to one for a better prognosis. In certain embodiments, this may be done by making biochips comprising sets of the significant CPKGs, which can then be used in these screens. These methods can also be done on the protein level. Protein expression levels of the CPKGs can be evaluated for diagnostic and prognostic purposes, or used to screen test compounds. For example, in relation to these embodiments, significant CPKGs may comprise CPKGs which are determined to have modulated activity or expression in response to a therapy regime. Alternatively, the modulation of the activity or expression of a CPKG may be correlated with the diagnosis or prognosis of cancer. In addition, the CPKGs can be administered for therapeutic purposes, including the administration of antisense nucleic acids and/or proteins (including CPKPPs, antibodies to CPKPPs and other modulators of CPKPPs).

[0164] For example, the CPKG STK-15 has increased expression in cancer tissue samples, relative to control tissue samples. The presence of increased mRNA for this gene (or any other CPKGs set forth in Table 1), or increased levels of the protein products of this gene (or any other CPKGs set forth in Table 1) serve as markers for cancer. Accordingly, amelioration of cancer can be achieved by modulating up-regulated cancer markers, such as STK-15, to normal levels (e.g., levels similar or substantially similar to tissue substantially free of cancer). In many cases, the up-regulated cancer marker is modulated to be similar to a control sample which is taken from a subject or tissue that is substantially free of cancer. Indeed, it is well established that the targets of many cancer therapeutics are kinases.

[0165] In another embodiment of the invention, a product of CPKG, either in the form of a polynucleotide or a polypeptide, can be used as a therapeutic compound of the invention. In yet other embodiments, a modulator of CPKG expression or the activity of a CPKG product may be used as a therapeutic compound of the invention. The modulation may also be used in combination with one or more other therapeutic compositions of the invention. Formulation of such compounds into pharmaceutical compositions is described in subsections below. Administration of such a therapeutic may suppress bioactivity of CPKG product, and therefore may be used to ameliorate cancer

3. Sources of CPKG Products

[0166] The CPKG products (CPKPNs and CPKPPs) of the invention may be isolated from any body fluid, tissue or cell of a subject. The tissue samples containing one or more of the CPKG products themselves may be useful in the methods of the invention, and one skilled in the art will be cognizant of the methods by which such samples may be conveniently obtained, stored and/or preserved.

Isolated Polynucleotides

[0167] One aspect of the invention pertains to isolated polynucleotides. Another aspect of the invention pertains to isolated polynucleotide fragments sufficient for use as hybridization probes to identify a CPKPN in a sample, as well as nucleotide fragments for use as PCR primers of the amplification or mutation of the nucleic acid molecules which encode the CPKPP of the invention.

[0168] A CPKPN molecule of the present invention, e.g., a polynucleotide molecule having the nucleotide sequence of one of the CPKGs listed in Table 1, or homologs thereof, or a portion thereof, can be isolated using standard molecular biology techniques and the sequence information provided herein as well as sequence information known in the art. Using all or a portion of the polynucleotide sequence of one of the CPKGs listed Table 1 (or a homolog thereof) as a hybridization probe, a CPKG of the invention or a CPKPN of the invention can be isolated using standard hybridization and cloning techniques.

[0169] A CPKPN of the invention can be amplified using cDNA, mRNA or alternatively, genomic DNA, as a template and appropriate oligonucleotide primers according to standard PCR amplification techniques. The polynucleotide so amplified can be cloned into an appropriate vector and characterized by DNA sequence analysis. Furthermore, oligonucleotides corresponding to CPKG nucleotide sequences, or CPKPN of the invention can be prepared by standard synthetic techniques, e.g., using an automated DNA synthesizer.

[0170] Alternatively, there are numerous amplification techniques for obtaining a full length coding sequence from a partial cDNA sequence. Within such techniques, amplification is generally performed via PCR. Any of a variety of commercially available kits may be used to perform the amplification step. Primers may be designed using, for example, software well-known in the art. In many embodiments, primers are 22-30 nucleotides in length, have a GC content of at least 50% and anneal to the target sequence at temperatures of about 68° C. to 72° C. The amplified region may be sequenced as described above, and overlapping sequences assembled into a contiguous sequence.

[0171] One such amplification technique is inverse PCR, which uses restriction enzymes to generate a fragment in the known region of the gene. The fragment is then circularized by intramolecular ligation and used as a template for PCR with divergent primers derived from the known region. Within an alternative approach, sequences adjacent to a partial sequence may be retrieved by amplification with a primer to a linker sequence and a primer specific to a known region. The amplified sequences are subjected to a second round of amplification with the same linker primer and a second primer specific to the known region. A variation on this procedure, which employs two primers that initiate extension in opposite directions from the known sequence, is described in WO96/38591.

[0172] Another such technique is known as “rapid amplification of cDNA ends” or RACE. This technique involves the use of an internal primer and an external primer, which hybridizes to a polyA region or vector sequence, to identify sequences that are 5′ and 3′ of a known sequence. Additional techniques include capture PCR (Lagerstrom et al., PCR Methods Applic., 1:11-19, 1991) and walking PCR (Parker et al., Nucl. Acids. Res., 19:3055-60, 1991). Other methods using amplification may also be employed to obtain a full length cDNA sequence.

[0173] In certain instances, it is possible to obtain a full length cDNA sequence by analysis of sequences provided in an expressed sequence tag (EST) database, such as that available from GenBanK. Searches for overlapping ESTs may generally be performed using well-known programs (e.g., BLAST searches), and such ESTs may be used to generate a contiguous full length sequence. Full length DNA sequences may also be obtained by analysis of genomic fragments.

[0174] In another embodiment, an isolated polynucleotide molecule of the invention comprises a polynucleotide molecule which is a complement of the nucleotide sequence of a CPKG listed in Table 1. A polynucleotide molecule which is complementary to such a nucleotide sequence is one which is sufficiently complementary to the nucleotide sequence such that it can hybridize to the nucleotide sequence, thereby forming a stable duplex.

[0175] The polynucleotide molecule of the invention, moreover, can comprise sequences corresponding to only a portion of the polynucleotide sequence of a CPKG, for example, a fragment which can be used as targets for developing agents that modulate a CPKPP-mediated activity or as a probe or primer. A biological active portion of a CPKPP may include a fragment of a CPKPP comprising an amino acid that includes fewer amino acids than the full length CPKPP, and exhibits at least one activity of the CPKPP. A biologically active portion of a CPKPP comprises a domain or motif with at least one activity of the CPKPP. The probe/primer typically comprises substantially purified oligonucleotide. The oligonucleotide typically comprises a region of nucleotide sequence that hybridizes under stringent conditions to at least about 7, 10, 15, 25, 50, 75, 100, 125, 150, 175, 200, 225, 250, 275, 300, 325, 350, 400 or more consecutive nucleotides of a CPKG, or a CPKPN.

[0176] Probes based on the nucleotide sequence of a CPKG or of a CPKPN can be used to detect transcripts or genomic sequences corresponding to the CPKG and/or CPKPP. In some embodiments, the probe comprises a label group attached thereto, e.g., the label group can be a radioisotope, a fluorescent compound, an enzyme, or an enzyme co-factor. Such probes can be used as a part of a diagnostic test kit for identifying cells or tissue which misexpress (e.g., over- or under-express) a CPKG polynucleotide or polypeptide of the invention, or which have greater or fewer copies of a CPKG. For example, the level of a CPKG product in a sample of cells from a subject may be detected, the amount of polypeptide or mRNA transcript of a CPKG may be determined, or the presence of mutations or deletions of a CPKG of the invention may be assessed.

[0177] The invention further encompasses polynucleotide molecules that differ from the polynucleotide sequences of the CPKGs listed in Table 1 due to degeneracy of the genetic code but encode the same proteins encoded by CPKGs shown in Table 1.

[0178] The invention also encompasses homologs of the CPKGs listed in Table 1 of other species. Gene homologs are well understood in the art and are available using databases or search engines such as the Pubmed-Entrez database.

[0179] The invention also encompasses polynucleotide molecules which are structurally different from the molecules described above (i.e., which have a slight altered sequence), but which have substantially the same properties as the molecules above (e.g., encoded amino acid sequences, or which are changed only in non-essential amino acid residues). Such molecules include allelic variants, and are described in greater detail in subsections herein.

[0180] In addition to the nucleotide sequences of the CPKGs listed in Table 1, it will be appreciated by those skilled in the art that DNA sequence polymorphisms leading to changes in the amino acid sequences of the proteins encoded by the CPKGs listed in Table 1 may exist within a population (e.g., the human population). These polymorphic DNA sequences are also encompassed by the present invention. Such genetic polymorphism in the CPKGs listed in Table 1 may exist among individuals within a population due to natural allelic variation. An allele is one of a group of genes which occur alternatively at a given genetic locus. In addition, it will be appreciated that DNA polymorphisms that affect RNA expression levels can also exist and may affect the overall expression level of that gene (e.g., by affecting regulation or degradation). An allelic variant includes a nucleotide sequence which occurs at a given locus and to a polypeptide encoded by the nucleotide sequence.

[0181] Polynucleotide molecules corresponding to natural allelic variants and homologs of the CPKGs can be isolated based on their homology to the CPKGs listed in Table 1, using the cDNAs disclosed herein, or a portion thereof, as a hybridization probe according to standard hybridization techniques. Stringency of a hybridization reaction refers to the difficulty with which any two nucleic acid molecules will hybridize to one another. The present invention also includes polynucleotides capable of hybridizing under reduced stringency conditions, stringent conditions, or highly stringent conditions, to polynucleotides described herein. Examples of stringency conditions are shown in Table 3 below: highly stringent conditions are those that are at least as stringent as, for example, conditions A-F; stringent conditions are at least as stringent as, for example, conditions G-L; and reduced stringency conditions are at least as stringent as, for example, conditions M-R.

TABLE 3
Stringency Conditions

| Stringency | Poly-nucleotide | Hybrid | Hybridization | Wash Temp. |
|---|---|---|---|---|
| Condition | Hybrid | Length (bp)¹ | Temperature and Buffer^{H} | and Buffer^{H} |
| A | DNA:DNA | >50 | 65° C.; 1xSSC -or- | 65° C.; 0.3xSSC |
| | | | 42° C.; 1xSSC, 50% formamide | |
| B | DNA:DNA | <50 | T_{B}*; 1xSSC | T_{B}*; 1xSSC |
| C | DNA:RNA | >50 | 67° C.; 1xSSC -or- | 67° C.; 0.3xSSC |
| | | | 45° C.; 1xSSC, 50% formamide | |
| D | DNA:RNA | <50 | T_{D}*; 1xSSC | T_{D}*; 1xSSC |
| E | RNA:RNA | >50 | 70° C.; 1xSSC -or- | 70° C.; 0.3xSSC |
| | | | 50° C.; 1xSSC, 50% formamide | |
| F | RNA:RNA | <50 | T_{F}*; 1xSSC | T_{F}*; 1xSSC |
| G | DNA:DNA | >50 | 65° C.; 4xSSC -or- | 65° C.; 1xSSC |
| | | | 42° C.; 4xSSC, 50% formamide | |
| H | DNA:DNA | <50 | T_{H}*; 4xSSC | T_{H}*; 4xSSC |
| I | DNA:RNA | >50 | 67° C.; 4xSSC -or- | 67° C.; 1xSSC |
| | | | 45° C.; 4xSSC, 50% formamide | |
| J | DNA:RNA | <50 | T_{J}*; 4xSSC | T_{J}*; 4xSSC |
| K | RNA:RNA | >50 | 70° C.; 4xSSC -or- | 67° C.; 1xSSC |
| | | | 50° C.; 4xSSC, 50% formamide | |
| L | RNA:RNA | <50 | T_{L}*; 2xSSC | T_{L}*; 2xSSC |
| M | DNA:DNA | >50 | 50° C.; 4xSSC -or- | 50° C.; 2xSSC |
| | | | 40° C.; 6xSSC, 50% formamide | |
| N | DNA:DNA | <50 | T_{N}*; 6xSSC | T_{N}*; 6xSSC |
| O | DNA:RNA | >50 | 55° C.; 4xSSC -or- | 55° C.; 2xSSC |
| | | | 42° C.; 6xSSC, 50% formamide | |
| P | DNA:RNA | <50 | T_{P}*; 6xSSC | T_{P}*; 6xSSC |
| Q | RNA:RNA | >50 | 60° C.; 4xSSC -or- | 60° C.; 2xSSC |
| | | | 45° C.; 6xSSC, 50% formamide | |
| R | RNA:RNA | <50 | T_{R}*; 4xSSC | T_{R}*; 4xSSC |
| ¹The hybrid length is that anticipated for the hybridized region(s) of the hybridizing polynucleotides. When hybridizing a polynucleotide to a target polynucleotide of unknown sequence, the hybrid length is assumed to be that of the hybridizing polynucleotide. When polynucleotides of known sequence are hybridized, the hybrid length can be determined by aligning the sequences of the polynucleotides and identifying the region or regions of optimal sequence complementarity. | | | | |
| ^{H}SSPE (1xSSPE is 0.15M NaCl, 10 mM NaH₂PO₄, and 1.25 mM EDTA, pH 7.4) can be substituted for SSC (1xSSC is 0.15M NaCl and 15 mM sodium citrate) in the hybridization and wash buffers; washes are performed for 15 minutes after hybridization is complete. | | | | |
| T_{B}*-T_{R}*: The hybridization temperature for hybrids anticipated to be less than 50 base pairs in length should be 5-10° C. less than the melting temperature (Tₘ) of the hybrid, where Tₘ is determined according to the following equations. For hybrids less than 18 base pairs in length, Tₘ(° C.) = 2(# of A + T bases) | | | | |
| # ⁺ 4(# of G + C bases). For hybrids between 18 and 49 base pairs in length, Tₘ(° C.) = 81.5 + 16.6(log₁₀Na⁺) + 0.41(% G⁺C) − (600/N), where N is the number of bases in the hybrid, and Na⁺ is the concentration of sodium ions in the hybridization buffer (Na⁺ for 1xSSC = 0.165M). | | | | |

[0182] Polynucleotide molecules corresponding to natural allelic variants and homologs of the CPKGs of the invention can further be isolated by mapping to the same chromosome or locus as the CPKGs of the invention.

[0183] In another embodiment, an isolated polynucleotide molecule of the invention is at least 15, 20, 25, 30, 50, 100, 150, 200, 250, 300, 350, 400, 450, 500, 550, 600, 650, 700, 750, 800, 850, 900, 950, 1000, 1100, 1200, 1300, 1400, 1500, 1600, 1700, 1800, 1900, 2000 or more nucleotides in length and hybridizes under stringent conditions to a polynucleotide molecule corresponding to a nucleotide sequence of a CPKG of the invention. In one embodiment, an isolated polynucleotide molecule of the invention that hybridizes under stringent conditions to the sequence of one of the CPKGs set forth in Table 1 corresponds to a naturally-occurring polynucleotide molecule.

[0184] In addition to naturally-occurring CPKG allelic variants that may exist in the population, the skilled artisan will further appreciate that changes can be introduced by mutation into the nucleotide sequences of the CPKGs of the invention, thereby leading to changes in the amino acid sequence of the encoded proteins, without altering the functional activity of these proteins. For example, nucleotide substitutions leading to amino acid substitutions at “non-essential” amino acid residues can be made. A “non-essential” amino acid residue is a residue that can be altered from the wild-type sequence of a protein without altering the biological activity, whereas an “essential” amino acid residue is required for biological activity. For example, amino acid residues that are conserved among allelic variants or homologs of a gene (e.g., among homologs of a gene from different species) are predicted to be particularly unamenable to alteration.

[0185] Accordingly, another aspect of the invention pertains to CPKPP variants that contain changes in amino acid residues that are not essential for activity. Such variants differ in amino acid sequence from the original CPKPP encoded by the CPKG listed in Table 1, yet retain biological activity of the corresponding CPKPP. In one embodiment, the variant comprises an amino acid sequence at least about 60%, 65%, 70%, 75%, 80%, 85%, 90%, 95%, 98% or more homologous to a CPKPP of the invention.

[0186] In yet other aspects of the invention, polynucleotides of a CPKG may comprise one or more mutations. An isolated polynucleotide molecule encoding a mutated CPKPP can be created by introducing one or more nucleotide substitutions, additions or deletions into the nucleotide sequence of the gene encoding the CPKPP, such that one or more amino acid substitutions, additions or deletions are introduced into the encoded protein. Such techniques are well-known in the art. Mutations can be introduced into the CPKG polynucleotide of the invention (e.g., a CPKG listed in Table 1) by standard techniques, such as site-directed mutagenesis and PCR-mediated mutagenesis. In many instances, conservative amino acid substitutions are made at one or more predicted non-essential amino acid residues. Alternatively, mutations can be introduced randomly along all or part of a coding sequence of a CPKG of the invention, such as by saturation mutagenesis. The resultant mutants can be screened for biological activity to identify mutants that retain activity. Following mutagenesis, the encoded protein can be expressed recombinantly and the activity of the protein can be determined.

[0187] A polynucleotide may be further modified to increase stability in vivo. Possible modifications include, but are not limited to, the addition of flanking sequences at the 5′ and/or 3′ ends; the use of phosphorothioate or 2-o-methyl rather than phosphodiester linkages in the backbone; and the inclusion of nontraditional bases such as inosine, queosine and wybutosine, as well as acetyl-methyl-, thio- and other modified forms of adenine, cytidine, guanine, thymine and uridine.

[0188] Another aspect of the invention pertains to isolated polynucleotide molecules that are antisense to the CPKGs of the invention. An “antisense” polynucleotide comprises a nucleotide sequence which is complementary to a “sense” polynucleotide encoding a protein, e.g., complementary to the coding strand of a double-stranded cDNA molecule or complementary to an mRNA sequence. Accordingly, an antisense polynucleotide can form hydrogen bonds to a sense polynucleotide. The antisense polynucleotide can be complementary to an entire coding strand of a CPKG of the invention or to only a portion thereof. In one embodiment, an antisense polynucleotide molecule is antisense to a “coding region” of the coding strand of a nucleotide sequence of the invention. In another embodiment, the antisense polynucleotide molecule is antisense to a “noncoding region” of the coding strand of a nucleotide sequence of the invention.

[0189] Antisense polynucleotides of the invention can be designed according to the rules of Watson and Crick base pairing. The antisense polynucleotide molecule can be complementary to the entire coding region of an mRNA corresponding to a gene of the invention. The antisense polynucleotide molecule can also be an oligonucleotide which is antisense to only a portion of the coding or noncoding region. An antisense oligonucleotide can be, for example, about 5, 10, 15, 20, 25, 30, 35, 40, 45 or 50 nucleotides in length. An antisense polynucleotide of the invention can be constructed using chemical synthesis and enzymatic ligation reactions known in the art. For example, an antisense polynucleotide can be chemically synthesized using naturally occurring nucleotides or variously modified nucleotides designed to increase the biological stability of the molecules or to increase the physical stability of the duplex formed between the antisense and sense polynucleotides, e.g., phosphorothioate derivatives and acridine substituted nucleotides can be used. Examples of modified nucleotides which can be used to generate the antisense polynucleotide include 5-fluorouracil, 5-bromouracil, 5-chlorouracil, 5 iodouracil, hypoxanthine, xanthine, 4-acetylcytosine, 5-(carboxyhydroxymethyl) uracil, 5-carboxymethylaminomethyl-2-thiouridine, 5-carboxymethylaminomethyluracil, dihydrouracil, beta-D-galactosylqueosine, inosine, N6-isopentenyladenine, 1-methylguanine, 1-methylinosine, 2,2-dimethylguanine, 2-methyladenine, 2-methylguanine, 3-methylcytosine, 5-methylcytosine, N6-adenine, 7-methylguanine, 5-methylaminomethyluracil, 5-methoxyaminomethyl-2-thiouracil, beta-D-mannosylqueosine, 5′-methoxycarboxymethyluracil, 5-methoxyuracil, 2-methylthio-N6-isopentenyladen4exine, unacil-5-oxyacetic acid (v), wybutoxosine, pseudouracil, queosine, 2-thiocytosine, 5-methyl-2-thiouracil, 2-thiouracil, 4-thiouracil, 5-methyluracil, uracil-5-oxyacetic acid methylester, 3-(3-amino-3-N-2-carboxypropyl) uracil, (acp3)w, and 2,6-diaminopurine. Alternatively, the antisense polynucleotide can be produced biologically using an expression vector into which a polynucleotide has been subcloned in an antisense orientation (i.e., RNA transcribed from the inserted polynucleotide will be of an antisense orientation to a target polynucleotide of interest, described further in the following subsection).

[0190] The antisense polynucleotide molecules of the invention are administered to a subject or generated in situ such that they hybridize with or bind to cellular mRNA and/or genomic DNA encoding a CPKPP of the invention to thereby inhibit expression of the protein, e.g., by inhibiting transcription and/or translation. The hybridization may occur based on conventional nucleotide complementarity to form a stable duplex or, in the cases of an antisense polynucleotide molecule which binds to DNA duplexes, through specific interactions in the major groove of the DNA double helix. An example of a route of administration of antisense polynucleotide molecules of the invention is direct injection at a tissue site (e.g., intestine). Alternatively, antisense polynucleotide molecules can be modified to target selected cells and then administered systemically. For systemic administration, antisense molecules can be modified such that they specifically bind to receptors or antigens expressed on a selected cell surface, e.g., by linking the antisense polynucleotide molecules to peptides or antibodies which bind to cell surface receptors or antigens. The antisense polynucleotide molecules can also be delivered to cells using the vectors described herein. To achieve sufficient intracellular concentrations of the antisense molecules, vector constructs in which the antisense polynucleotide molecule is placed under the control of a strong promoter, such as pol II or pol III promoter, may be employed.

[0191] In yet another embodiment, the antisense polynucleotide molecule of the invention is an α-anomeric polynucleotide molecule. An α-anomeric polynucleotide molecule forms specific double-stranded hybrids with complementary RNA in which, contrary to the usual β-units, the strands run parallel to each other (Gaultier et al., Polynucleotides. Res., 15:6625-6641, 1987). The antisense polynucleotide molecule can also comprise a 2′-o-methylribonucleotide or a chimeric RNA-DNA analogue.

[0192] In still another embodiment, an antisense polynucleotide of the invention is a ribozyme. Ribozymes are catalytic RNA molecules with ribonuclease activity which are capable of cleaving a single-stranded polynucleotide, such as an mRNA, to which they have a complementary region. Thus, ribozymes (e.g., hammerhead ribozymes) can be used to catalytically cleave mRNA transcripts of the CPKGs to thereby inhibit translation of said mRNA. A ribozyme having specificity for a CPKPN can be designed based upon the nucleotide sequence of a gene of the invention, disclosed herein. For example, a derivative of a Tetrahymena L-19 IVS RNA can be constructed in which the nucleotide sequence of the active site is complementary to the nucleotide sequence to be cleaved in a CPKG protein-encoding mRNA. Alternatively, mRNA transcribed from a gene of the invention can be used to select a catalytic RNA having a specific ribonuclease activity from a pool of RNA molecules. Alternatively, expression of a CPKG of the invention can be inhibited by targeting the regulatory region of these genes (e.g., the promoter and/or enhancers) with complementary nucleotide sequences that will form triple helical structures with the target sequence to prevent transcription of the gene in target cells.

[0193] Expression of the CPKGs of the invention can also be inhibited using RNA interference (“RNAᵢ”). This is a technique for post-transcriptional gene silencing (“PTGS”), in which target gene activity is specifically abolished with cognate double-stranded RNA (“dsRNA”). RNAᵢ resembles in many aspects PTGS in plants and has been detected in many invertebrates including trypanosome, hydra, planaria, nematode and fruit fly (Drosophila melanogaster). It may be involved in the modulation of transposable element mobilization and antiviral state formation. RNAᵢ technology is disclosed in U.S. Pat. No. 5,919,619 and PCT Publication Nos. WO99/14346, WO01/70949, WO01/36646, WO00/63364, WO00/44895, WO01/75164, WO01/92513, WO01/68836 and WO01/29058. Basically, dsRNA of at least about 21 nucleotides, homologous to the target gene, is introduced into the cell and a sequence specific reduction in gene activity is observed For example, in mammalian cells, introduction of long dsRNA can initiate a potent antiviral response, exemplified by nonspecific inhibition of protein synthesis and RNA degradation. RNA interference provides a mechanism of gene silencing at the mRNA level. In recent years, RNAi has become an endogenous and potent gene-specific silencing technique that uses double-stranded RNAs (dsRNA) to mark a particular transcript for degradation in vivo. It also offers an efficient and broadly applicable approach for gene knock-out. In addition, RNAi technology can be used for therapeutic purposes. For example, RNAi targeting Fas-mediated apoptosis has been shown to protect mice from fulminant hepatitis.

[0194] Sequences capable of inhibiting gene expression by RNA interference can have any desired length. For instance, the sequence can have at least 10, 15, 20, 25, or more consecutive nucleotides. The sequence can be dsRNA or any other type of polynucleotide, provided that the sequence can form a functional silencing complex to degrade the target mRNA transcript.

[0195] In one embodiment, the sequence comprises or consists of a short interfering RNA (siRNA). The siRNA can be, for example, dsRNA having 19-25 nucleotides. siRNAs can be produced endogenously by degradation of longer dsRNA molecules by an RNase III-related nuclease called Dicer. siRNAs can also be introduced into a cell exogenously or by transcription of an expression construct. Once formed, the siRNAs assemble with protein components into endoribonuclease-containing complexes known as RNA-induced silencing complexes (RISCs). An ATP-generated unwinding of the siRNA activates the RISCs, which in turn target the complementary mRNA transcript by Watson-Crick base-pairing, thereby cleaving and destroying the mRNA. Cleavage of the mRNA takes place near the middle of the region bound by the siRNA strand. This sequence-specific mRNA degradation results in gene silencing.

[0196] At least two ways can be employed to achieve siRNA-mediated gene silencing. First, siRNAs can be synthesized in vitro and introduced into cells to transiently suppress gene expression. Synthetic siRNA provides an easy and efficient way to achieve RNAi. siRNA are duplexes of short mixed oligonucleotides which can include, for example, 19 nucleotides with symmetric dinucleotide 3′ overhangs. Using synthetic 21 bp siRNA duplexes (e.g., 19 RNA bases followed by a UU or dTdT 3′ overhang), sequence-specific gene silencing can be achieved in mammalian cells. These siRNAs can specifically suppress targeted gene translation in mammalian cells without activation of DNA-dependent protein kinase (PKR) by longer dsRNA, which may result in non-specific repression of translation of many proteins.

[0197] Second, siRNAs can be expressed in vivo from vectors. This approach can be used to stably express siRNAs in cells or transgenic animals. In one embodiment, siRNA expression vectors are engineered to drive siRNA transcription from polymerase III (pol III) transcription units. Pol III transcription units are suitable for hairpin siRNA expression, since they deploy a short AT rich transcription termination site that leads to the addition of 2 bp overhangs (e.g., UU) to hairpin siRNAs—a feature that is helpful for siRNA function. The Pol III expression vectors can also be used to create transgenic mice that express siRNA.

[0198] In another embodiment, siRNAs can be expressed in a tissue-specific manner. Under this approach, long double-stranded RNAs (dsRNAs) are first expressed from a promoter (such as CMV (pol II)) in the nuclei of selected cell lines or transgenic mice. The long dsRNAs are processed into siRNAs in the nuclei (e.g., by Dicer). The siRNAs exit from the nuclei and mediate gene-specific silencing. A similar approach can be used in conjunction with tissue-specific promoters to create tissue-specific knockdown mice.

[0199] Any 3′ dinucleotide overhang, such as UU, can be used for siRNA design. In some cases, G residues in the overhang are avoided because of the potential for the siRNA to be cleaved by RNase at single-stranded G residues.

[0200] With regard to the siRNA sequence itself, it has been found that siRNAs with 30-50% GC content can be more active than those with a higher G/C content in certain cases. Moreover, since a 4-6 nucleotide poly(T) tract may act as a termination signal for RNA pol III, stretches of >4 Ts or As in the target sequence may be avoided in certain cases when designing sequences to be expressed from an RNA pol III promoter. In addition, some regions of mRNA may be either highly structured or bound by regulatory proteins. Thus, it may be helpful to select siRNA target sites at different positions along the length of the gene sequence. Finally, the potential target sites can be compared to the appropriate genome database (human, mouse, rat, etc.). Any target sequences with more than 16-17 contiguous base pairs of homology to other coding sequences may be eliminated from consideration in certain cases.

[0201] In one embodiment, siRNA is designed to have two inverted repeats separated by a short spacer sequence and end with a string of Ts that serve as a transcription termination site. This design produces an RNA transcript that is predicted to fold into a short hairpin siRNA. The selection of siRNA target sequence, the length of the inverted repeats that encode the stem of a putative hairpin, the order of the inverted repeats, the length and composition of the spacer sequence that encodes the loop of the hairpin, and the presence or absence of 5′-overhangs, can vary to achieve desirable results.

[0202] The siRNA targets can be selected by scanning an mRNA sequence for AA dinucleotides and recording the 19 nucleotides immediately downstream of the AA. Other methods can also been used to select the siRNA targets. In one example, the selection of the siRNA target sequence is purely empirically determined (see e.g., Sui et al, Proc. Natl. Acad. Sci. USA 99: 5515-5520, 2002), as long as the target sequence starts with GG and does not share significant sequence homology with other genes as analyzed by BLAST search. In another example, a more elaborate method is employed to select the siRNA target sequences. This procedure exploits an observation that any accessible site in endogenous mRNA can be targeted for degradation by synthetic oligodeoxyribonucleotide/RNase H method (Lee et al, Nature Biotechnology 20:500-505, 2002).

[0203] In another embodiment, the hairpin siRNA expression cassette is constructed to contain the sense strand of the target, followed by a short spacer, the antisense strand of the target, and 5-6 Ts as transcription terminator. The order of the sense and antisense strands within the siRNA expression constructs can be altered without affecting the gene silencing activities of the hairpin siRNA. In certain instances, the reversal of the order may cause partial reduction in gene silencing activities.

[0204] The length of nucleotide sequence being used as the stem of siRNA expression cassette can range, for instance, from 19 to 29. The loop size can range from 3 to 23 nucleotides. Other lengths and/or loop sizes can also be used.

[0205] In yet another embodiment, a 5′ overhang in the hairpin siRNA construct can be used, provided that the hairpin siRNA is functional in gene silencing. In one example, the 5′ overhang includes about 6 nucleotide residues.

[0206] In still yet another embodiment, the target sequences for RNAi are 21-mer or 20-mer sequence fragments selected from CPKG coding sequences, such as SEQ ID NOS:1-44. The target sequences can be selected from either ORF regions or non-ORF regions. The 5′ end of each target sequence has dinucleotide “NA,” where “N” can be any base and “A” represents adenine. The remaining 19-mer or 18-mer sequence has a GC content of between 30% and 65%. In many examples, the remaining 19-mer or 18-mer sequence does not include any four consecutive A or T (i.e., AAAA or TTTT), three consecutive G or C (i.e., GGG or CCC), or seven “GC” in a row. Examples of the target sequences prepared using the above-described criteria (“Relaxed Criteria”) are illustrated in Table 4. Each target sequence in Table 4 has SEQ ID NO:3n−1, and the corresponding siRNA sense and antisense strands have SEQ ID NO:3n and SEQ ID NO:3n+1, respectively, where n is a positive integer. Antisense strand sequences (SEQ ID NO:3n+1) are presented in the 3′ to 5′ direction. For each CPKG coding sequence (SEQ ID NOS:1-44), multiple target sequences can be selected.

[0207] Additional criteria can be used for RNAi target sequence design. In one example, the GC content of the remaining 19-mer or 18-mer sequence is limited to between 35% and 55%, and any 19-mer or 18-mer sequence having three consecutive A or T (i.e., AAA or TTT) or a palindrome sequence with 5 or more bases is excluded. In addition, the 19-mer or 18-mer sequence can be selected to have low sequence homology to other human genes. In one embodiment, potential target sequences are searched by BLASTN against NCBI's human UniGene cluster sequence database. The human UniGene database contains non-redundant sets of gene-oriented clusters. Each UniGene cluster includes sequences that represent a unique gene. 19-mer/18-mer sequences producing no hit to other human genes under the BLASTN search can be selected. During the search, the e-value may be set at a stringent value (such as “1”). Furthermore, the target sequence can be selected from the ORF region, and is at least 75-bp from the start and stop codons. Examples of the target sequences prepared using these criteria (“Stringent Criteria”) are demonstrated in Table 4. siRNA sense and antisense sequences (SEQ ID NO:3n and SEQ ID NO:3n+1, respectively) for each target sequence (SEQ ID NO:3n−1) are also provided. Antisense strand sequences (SEQ ID NO:3n+1) are presented in the 3′ to 5′ direction.

TABLE 4
RNAi Target Sequences and siRNA Sequences for CPKGs

| | Relaxed Criteria | Stringent Criteria |
|---|---|---|
| SEQ ID NO | (target seq.: SEQ ID NO: 3n − 1; | (target seq.: SEQ ID NO: 3n − 1; |
| (CPKG | siRNA sense seq.: SEQ ID NO: 3n; | siRNA sense seq.: SEQ ID NO: 3n; |
| coding seq.) | siRNA antisense seq.: SEQ ID NO: 3n + 1) | siRNA antisense seq.: SEQ ID NO: 3n + 1) |
| 1 | SEQ ID NOS: 89-3,829 | SEQ ID NOS: 3,830-4,717 |
| 2 | SEQ ID NOS: 4,718-5,950 | SEQ ID NOS: 5,951-6,067 |
| 3 | SEQ ID NOS: 6,068-7,723 | SEQ ID NOS: 7,724-8,029 |
| 4 | SEQ ID NOS: 8,030-8,443 | SEQ ID NOS: 8,444-8,500 |
| 5 | SEQ ID NOS: 8,501-9,349 | |
| 6 | SEQ ID NOS: 9,350-10,396 | SEQ ID NOS: 10,397-10,468 |
| 7 | SEQ ID NOS: 10,469-10,939 | SEQ ID NOS: 10,940-10,987 |
| 8 | SEQ ID NOS: 10,988-11,422 | SEQ ID NOS: 11,423-11,476 |
| 9 | SEQ ID NOS: 11,477-11,710 | |
| 10 | SEQ ID NOS: 11,711-12,037 | SEQ ID NOS: 12,038-12,043 |
| 11 | SEQ ID NOS: 12,044-12,574 | SEQ ID NOS: 12,575-12,730 |
| 12 | SEQ ID NOS: 12,731-13,450 | SEQ ID NOS: 13,451-13,576 |
| 13 | SEQ ID NOS: 13,577-15,277 | SEQ ID NOS: 15,278-15,442 |
| 14 | SEQ ID NOS: 15,443-15,658 | |
| 15 | SEQ ID NOS: 15,659-16,294 | SEQ ID NOS: 16,295-16,297 |
| 16 | SEQ ID NOS: 16,298-16,729 | SEQ ID NOS: 16,730-16,741 |
| 17 | SEQ ID NOS: 16,742-18,592 | SEQ ID NOS: 18,593-18,742 |
| 18 | SEQ ID NOS: 18,743-19,651 | SEQ ID NOS: 19,652-19,735 |
| 19 | SEQ ID NOS: 19,736-21,373 | SEQ ID NOS: 21,374-21,622 |
| 20 | SEQ ID NOS: 21,623-22,375 | SEQ ID NOS: 22,376-22,489 |
| 21 | SEQ ID NOS: 22,490-23,338 | SEQ ID NOS: 23,339-23,533 |
| 22 | SEQ ID NOS: 23,534-24,172 | SEQ ID NOS: 24,173-24,214 |
| 23 | SEQ ID NOS: 24,215-25,198 | SEQ ID NOS: 25,199-25,360 |
| 24 | SEQ ID NOS: 25,361-26,278 | SEQ ID NOS: 26,279-26,446 |
| 25 | SEQ ID NOS: 26,447-26,986 | SEQ ID NOS: 26,987-27,028 |
| 26 | SEQ ID NOS: 27,029-27,988 | SEQ ID NOS: 27,989-28,162 |
| 27 | SEQ ID NOS: 28,163-28,468 | SEQ ID NOS: 28,469-28,486 |
| 28 | SEQ ID NOS: 28,487-29,218 | SEQ ID NOS: 29,219-29,323 |
| 29 | SEQ ID NOS: 29,324-29,941 | SEQ ID NOS: 29,942-30,043 |
| 30 | SEQ ID NOS: 30,044-30,217 | |
| 31 | SEQ ID NOS: 30,218-30,763 | SEQ ID NOS: 30,764-30,877 |
| 32 | SEQ ID NOS: 30,878-31,504 | SEQ ID NOS: 31,505-31,540 |
| 33 | SEQ ID NOS: 31,541-36,385 | SEQ ID NOS: 36,386-37,465 |
| 34 | SEQ ID NOS: 37,466-38,731 | SEQ ID NOS: 38,732-38,947 |
| 35 | SEQ ID NOS: 38,948-39,466 | SEQ ID NOS: 39,467-39,496 |
| 36 | SEQ ID NOS: 39,497-40,159 | SEQ ID NOS: 40,160-40,288 |
| 37 | SEQ ID NOS: 40,289-40,570 | SEQ ID NOS: 40,571-40,573 |
| 38 | SEQ ID NOS: 40,574-42,196 | SEQ ID NOS: 42,197-42,313 |
| 39 | SEQ ID NOS: 42,314-43,150 | SEQ ID NOS: 43,151-43,222 |
| 40 | SEQ ID NOS: 43,223-43,528 | SEQ ID NOS: 43,529-43,564 |
| 41 | SEQ ID NOS: 43,565-44,392 | SEQ ID NOS: 44,393-44,404 |
| 42 | SEQ ID NOS: 44,405-45,721 | SEQ ID NOS: 45,722-45,946 |
| 43 | SEQ ID NOS: 45,947-46,879 | SEQ ID NOS: 46,880-46,999 |
| 44 | SEQ ID NOS: 47,000-48,358 | SEQ ID NOS: 48,359-48,640 |

[0208] The effectiveness of the siRNA sequences can be evaluated using various methods known in the art. For instance, a siRNA sequence of the present invention can be introduced into a cell that expresses a CPKG. The polypeptide or mRNA level of the CPKG in the cell can be detected. A substantial change in the expression level of the CPKG before and after the introduction of the siRNA sequence is indicative of the effectiveness of the siRNA sequence in suppressing the expression of the CPKG. In one example, the expression levels of other genes are also monitored before and after the introduction of the siRNA sequence. A siRNA sequence which has inhibitory effect on the CPKG expression but does not significantly affect the expression of other genes can be selected. In another example, multiple siRNA or other RNAi sequences can be introduced into the same target cell. These siRNA or RNAi sequences specifically inhibit the CPKG gene expression but not the expression of other genes. In yet another example, siRNA or other RNAi sequences that inhibit the expression of both the CPKG gene and other gene or genes can be used.

[0209] In yet another embodiment, the polynucleotide molecules of the present invention can be modified at the base moiety, sugar moiety or phosphate backbone to improve, e.g., the stability, hybridization, or solubility of the molecule. For example, the deoxyribose phosphate backbone of the polynucleotide molecules can be modified to generate peptide polynucleotides (PNAs). In PNAs, the deoxyribose phosphate backbone is replaced by a pseudopeptide backbone. The neutral backbone of PNAs has been shown to allow for specific hybridization to DNA and RNA under conditions of low ionic strength. The synthesis of PNA oligomers can be performed using standard solid phase peptide synthesis protocols.

[0210] PNAs can be used in therapeutic and diagnostic applications. For example, PNAs can be used as antisense or antigene agents for sequence specific modulation of CPKG expression by inducing transcription or translation arrest or inhibiting replication. PNAs of the polynucleotide molecules of the invention (e.g., set forth in Table 1 or homologs thereof) can also be used in the analysis of single base pair mutations in a gene, (e.g., by PNA-directed PCR clamping), as artificial restriction enzymes when used in combination with other enzymes (e.g., S1 nucleases) or as probes or primers for DNA sequencing or hybridization.

[0211] In another embodiment, PNAs can be modified to enhance their stability or cellular uptake by attaching lipophilic or other helper groups to PNA, by the formation of PNA-DNA chimeras, or by the use of liposomes or other techniques of drug delivery known in the art. For example, PNA-DNA chimeras of the polynucleotide molecules of the invention can be generated. Such chimeras allow DNA recognition enzymes, (e.g., RNAse H and DNA polymerases), to interact with the DNA portion while the PNA portion would provide high binding affinity and specificity. PNA-DNA chimeras can be linked using linkers of appropriate lengths selected in terms of base stacking, number of bonds between the nucleobases, and orientation. The synthesis of PNA-DNA chimeras can be performed. For example, a DNA chain can be synthesized on a solid support using standard phosphoramidite coupling chemistry and modified nucleoside analogs, e.g., 5′-(4-methoxytrityl)amino-5′-deoxy-thymidine phosphoramidite, can be used as a spacer between the PNA and the 5′ end of DNA. PNA monomers are then coupled in a stepwise manner to produce a chimeric molecule with a 5′ PNA segment and a 3′ DNA segment. Alternatively, chimeric molecules can be synthesized with a 5′ DNA segment and a 3′ PNA segment.

[0212] In other embodiments, the polynucleotide may include other appended groups such as peptides (e.g., for targeting host cell receptors in vivo), or agents facilitating transport across the cell membrane or the blood-kidney barrier (see, e.g., PCT Publication No. WO89/10134). In addition, polynucleotides can be modified with hybridization-triggered cleavage agents or intercalating agents. To this end, the polynucleotide may be conjugated to another molecule (e.g., a peptide, hybridization triggered cross-linking agent, transport agent, or hybridization-triggered cleavage agent). Finally, the polynucleotide may be detectably labeled, either such that the label is detected by the addition of another reagent (e.g., a substrate for an enzymatic label), or is detectable immediately upon hybridization of the nucleotide (e.g., a radioactive label or a fluorescent label).

Isolated Polypeptides

[0213] Several aspects of the invention pertain to isolated CPKPPs and biologically active portions thereof, as well as polypeptide fragments suitable for use as immunogens to raise anti-CPKPP antibodies. In one embodiment, native CPKPPs can be isolated from cells or tissue sources by an appropriate purification scheme using standard protein purification techniques.

[0214] Standard purification methods include electrophoretic, molecular, immunological and chromatographic techniques, including ion exchange, hydrophobic, affinity, and reverse-phase HPLC chromatography, and chromatofocusing. For example, the CPKPPs may be purified using a standard anti-CPKPP antibody column. Ultrafiltration and diafiltration techniques, in conjunction with protein concentration, are also useful. The degree of purification necessary will vary depending on the use of the CPKPP. In some instances no purification will be necessary.

[0215] In another embodiment, CPKPPs or mutated CPKPPs capable of inhibiting normal CPKPP activity (dominant-negative mutants) are produced by recombinant DNA techniques. Alternative to recombinant expression, a CPKPP or mutated CPKPP can be synthesized chemically using standard peptide synthesis techniques.

[0216] The invention provides CPKPPs encoded by CPKGs set forth in Table 1 or homologs thereof. In other embodiments, the CPKPP is substantially homologous to a CPKPP encoded by a CPKG listed in Table 1, and retains the functional activity of the CPKPP, yet differs in amino acid sequence due to natural allelic variation or mutagenesis, as described in detail above. Accordingly, in another embodiment, the CPKPP is a protein which comprises an amino acid sequence at least about 60%, 65%, 70%, 75%, 80%, 85%, 90%, 95%, 98% or more homologous to the amino acid sequence encoded by a CPKG listed in Table 1.

[0217] When the proteins are “homologs” and “homologous,” the first protein region and the second protein region are compared in terms of identity. To determine the percent identity of two amino acid sequences or of two polynucleotide sequences, the sequences are aligned for optimal comparison purposes (e.g., gaps can be introduced in one or both of a first and a second amino acid or polynucleotide sequence for optimal alignment and non-homologous sequences can be disregarded for comparison purposes). In one embodiment, the length of a reference sequence aligned for comparison purposes is at least 30%, 40%, 50%, 60%, 70%, 80%, or 90% of the length of the reference sequence. The amino acid residues or nucleotides at corresponding amino acid positions or nucleotide positions are then compared. When a position in the first sequence is occupied by the same amino acid residue or nucleotide as the corresponding position in the second sequence, then the molecules are identical at that position (as used herein amino acid or polynucleotide “identity” is equivalent to amino acid or polynucleotide “homology”). The percent identity between the two sequences is a function of the number of identical positions shared by the sequences, taking into account the number of gaps, and the length of each gap, which need to be introduced for optimal alignment of the two sequences.

[0218] The comparison of sequences and determination of percent identity between two sequences can be accomplished using a mathematical algorithm. In one embodiment, the percent identity between two amino acid sequences is determined using the Needleman and Wunsch (J. Mol. Biol., 48:444-453, 1970) algorithm which has been incorporated into the GAP program in the GCG software package, using either a Blossom 62 matrix or a PAM250 matrix, and a gap weight of 16, 14, 12, 10, 8, 6, or 4 and a length weight of 1, 2, 3, 4, 5, or 6. In yet another embodiment, the percent identity between two nucleotide sequences is determined using the GAP program in the GCG software package, using a NWSgapdna.CMP matrix and a gap weight of 40, 50, 60, 70, or 80 and a length weight of 1,2,3,4,5, or 6.

[0219] The polynucleotide and protein sequences of the present invention can further be used as a “query sequence” to perform a search against public databases to, for example, identify other family members or related sequences. Such searches can be performed using BLAST programs available at the BLAST website maintained by the National Center of Biotechnology Information (NCBI), National Library of Medicine, Washington, D.C., USA.

[0220] The invention also provides chimeric or fusion CPKPPs. A fusion CPKPP may contain all or a portion of a CPKPP and a fusion partner (non-CPKPP-related polypeptide). In one embodiment, a fusion CPKPP comprises at least one biologically active portion of a CPKPP. The non-CPKPP-related polypeptide can be fused to the N-terminus or C-terminus of the CPKPP-related polypeptide.

[0221] A peptide linker sequence may be employed to separate the CPKPP-related polypeptide from non-CPKPP-related polypeptide by a distance sufficient to ensure that each polypeptide folds into its secondary and tertiary structures. Such a peptide linker sequence is incorporated into the fusion protein using standard techniques well-known in the art. Suitable peptide linker sequences may be chosen based on the following factors: (1) their ability to adopt a flexible extended conformation; (2) their inability to adopt a secondary structure that could interact with functional epitopes on the CPKPP-related polypeptide and non-CPKPP-related polypeptide; and (3) the lack of hydrophobic or charged residues that might react with the polypeptide functional epitopes. Exemplary peptide linker sequences contain Gly, Asn and Ser residues. Other near neutral amino acids, such as Thr and Ala may also be used in the linker sequence. Amino acid sequences which may be usefully employed as linkers include those disclosed in Maratea et al., Gene, 40:39-46, 1985; Murphy et al., Proc. Natl. Acad. Sci., USA, 83:8258-8262, 1986; U.S. Pat. No. 4,935,233 and U.S. Pat. No. 4,751,180. The linker sequence may generally be from 1 to about 50 amino acids in length. Linker sequences are not required when the CPKPP-related polypeptide and non-CPKPP-related polypeptide have non-essential N-terminal amino acid regions that can be used to separate the functional domains and prevent steric interference.

[0222] In one embodiment, the fusion protein is a glutathione s-transferase (GST)-CPKPP fusion protein in which the CPKPP sequence is fused to the C-terminus of the GST sequences. Such fusion proteins can facilitate the purification of recombinant CPKPPs.

[0223] In another embodiment, the fusion protein is a CPKPP containing a heterologous signal sequence at its N-terminus. In certain host cells (e.g., mammalian host cells), expression and/or secretion of CPKPPs can be increased through use of a heterologous signal sequence. Such signal sequences are well-known in the art.

[0224] The CPKPP fusion proteins of the invention can be incorporated into pharmaceutical compositions and administered to a subject in vivo. The CPKPP fusion proteins can be used to affect the bioavailability of a CPKPP substrate. Use of CPKPP fusion proteins may be useful therapeutically for the treatment of or prevention of damage caused by, for example, (i) aberrant modification or mutation of a CPKG; (ii) mis-regulation of a CPKG; and (iii) aberrant post-translational modification of a CPKPP.

[0225] Moreover, the CPKPP fusion proteins of the invention can be used as immunogens to produce anti-CPKPP antibodies in a subject, to purify CPKPP ligands and in screening assays to identify molecules which inhibit the interaction of a CPKPP with a CPKPP substrate.

[0226] CPKPP fusion proteins used as immunogens may comprise a non-CPKPP immunogenic polypeptide. In one embodiment, the immunogenic protein is capable of eliciting a recall response.

[0227] In another embodiment, a CPKPP chimeric or fusion protein of the invention is produced by standard recombinant DNA techniques. For example, DNA fragments coding for the different polypeptide sequences are ligated together in-frame in accordance with conventional techniques, for example by employing blunt-ended or stagger-ended termini for ligation, restriction enzyme digestion to provide for appropriate termini, filling-in of cohesive ends as appropriate, alkaline phosphatase treatment to avoid undesirable joining, and enzymatic ligation.

[0228] In another embodiment, the fusion gene can be synthesized by conventional techniques including automated DNA synthesizers. Alternatively, PCR amplification of gene fragments can be carried out using anchor primers which give rise to complementary overhangs between two consecutive gene fragments which can subsequently be annealed and reamplified to generate a chimeric gene sequence. Moreover, many expression vectors are commercially available that already encode a fusion moiety (e.g., a GST polypeptide). A CPKPP-encoding polynucleotide can be cloned into such an expression vector such that the fusion moiety is linked in-frame to the CPKPP.

[0229] A signal sequence can be used to facilitate secretion and isolation of the secreted protein or other proteins of interest. Signal sequences are characterized by a core of hydrophobic amino acids which are generally cleaved from the mature protein during secretion in one or more cleavage events. Such signal peptides contain processing sites that allow cleavage of the signal sequence from the mature proteins as they pass through the secretory pathway. Thus, the invention pertains to the described polypeptides having a signal sequence, as well as to polypeptides from which the signal sequence has been proteolytically cleaved (i.e., the cleavage products). In one embodiment, a polynucleotide sequence encoding a signal sequence can be operably linked in an expression vector to a protein of interest, such as a protein which is ordinarily not secreted or is otherwise difficult to isolate. The signal sequence directs secretion of the protein, such as from a eukaryotic host into which the expression vector is transformed, and the signal sequence is subsequently or concurrently cleaved. The protein can then be readily purified from the extracellular medium by art recognized methods.

[0230] Alternatively, the signal sequence can be linked to the protein of interest using a sequence which facilitates purification, such as with a GST domain.

[0231] The present invention also pertains to variants of the CPKPPs of the invention which function as either agonists or as antagonists to the CPKPPs. These CPKPP variants differ from their native CPKPPs in one or more substitutions, deletions, additions and/or insertions, such that the activity or immunogenicity of the native polypeptide is not substantially diminished. In one embodiment, a bioactivity of a CPKPP variant or the ability of a variant CPKPP to react with antigen-specific antisera is enhanced or diminished by less than 50% relative to the native polypeptide. In another embodiment, CPKPP variants include variants in which a small portion (e.g., 1-30 amino acids or 5-15 amino acids) has been removed from the N- and/or C-terminal of the mature protein.

[0232] In one embodiment, antagonists or agonists of CPKPPs are used as therapeutic agents. For example, antagonists of an up-regulated CPKG that can decrease the activity or expression of such a gene may ameliorate cancer in a subject wherein the CPKG is abnormally increased in level or activity. In this embodiment, treatment of such a subject may comprise administering the antagonists to decrease activity or expression of the targeted CPKG. Variants of the CPKPPs may contain conservative substitutions wherein an amino acid is substituted for another amino acid that has similar properties, such that one skilled in the art of peptide chemistry would expect the secondary structure and hydropathic nature of the polypeptide to be substantially unchanged. Amino acid substitutions may generally be made on the basis of similarity in polarity, charge, solubility, hydrophobicity, hydrophilicity and/or the amphipathic nature of the residues. In addition, a variant CPKPP may also, or alternatively, contain nonconservative changes. For example, a variant CPKPP may differ from its native sequence by substitution, deletion or addition of five amino acids or fewer. A variant CPKPP may also (or alternatively) be modified by, for example, the deletion or addition of amino acids that have minimal influence on the immunogenicity, secondary structure and hydropathic nature of the polypeptide. In one embodiment, a CPKPP variant exhibits at least about 70%, 80%, 90%, 95% or more sequence homology to the original polypeptide. Lastly, a variant CPKPP may include a CPK polypeptide that is modified from the original CPK polypeptide by either natural processes, such as post-translational processing, or by chemical modification techniques that are well-known in the art. Modifications can occur anywhere in the CPK polypeptide, including the peptide backbone, the amino acid side-chains and the amino or carboxyl termini. It will be appreciated that the same type of modification may be present in the same or varying degrees at several sites in a given polypeptide.

[0233] In certain embodiments, an agonist of the CPKPPs can retain substantially the same, or a subset, of the biological activities of the naturally occurring form of.a CPKPP or may enhance an activity of a CPKPP. In certain embodiments, an antagonist of a CPKPP can inhibit one or more of the activities of the naturally occurring form of the CPKPP by, for example, competitively modulating an activity of a CPKPP. Thus, specific biological effects can be elicited by treatment with a variant of limited function. In one embodiment, treatment of a subject with a variant having a subset of the biological activities of the naturally occurring form of the protein has fewer side effects in a subject relative to treatment with the naturally occurring form of the CPKPP.

[0234] Mutants of a CPKPP which function as either CPKPP agonists or as CPKPP antagonists can be identified by screening combinatorial libraries of mutants, e.g., truncation mutants, of a CPKPP for CPKPP agonist or antagonist activity. A variegated library of CPKPP variants can be produced by, for example, enzymatically ligating a mixture of synthetic oligonucleotides into gene sequences such that a degenerate set of potential CPKPP sequences is expressible as individual polypeptides, or alternatively, as a set of larger fusion proteins (e.g., for phage display) containing the set of CPKPP sequences therein. There are a variety of methods which can be used to produce libraries of potential CPKPP variants from a degenerate oligonucleotide sequence. Chemical synthesis of a degenerate gene sequence can be performed in an automatic DNA synthesizer, and the synthetic gene is then ligated into an appropriate expression vector. Use of a degenerate set of genes allows for the provision, in one mixture, of all of the sequences encoding the desired set of potential CPKPP sequences. Methods for synthesizing degenerate oligonucleotides are known in the art.

[0235] In addition, libraries of fragments of a protein coding sequence corresponding to a CPKPP of the invention can be used to generate a variegated population of CPKPP fragments for screening and subsequent selection of variants of a CPKPP. In one embodiment, a library of coding sequence fragments can be generated by treating a double-stranded PCR fragment of a CPKPP coding sequence with a nuclease under conditions wherein nicking occurs only about once per molecule, denaturing the double-stranded DNA, renaturing the DNA to form double-stranded DNA which can include sense/antisense pairs from different nicked products, removing single-stranded portions from reformed duplexes by treatment with S1 nuclease, and ligating the resulting fragment library into an expression vector. By this method, an expression library can be derived which encodes N-terminal, C-terminal and internal fragments of various sizes of the CPKPP.

[0236] Several techniques are known in the art for screening gene products of combinatorial libraries made by point mutations or truncation, and for screening cDNA libraries for gene products having a selected property. The most widely used techniques, which are amenable to high-throughput analysis, for screening large gene libraries typically include cloning the gene library into replicable expression vectors, transforming appropriate cells with the resulting library of vectors, and expressing the combinatorial genes under conditions in which detection of a desired activity facilitates isolation of the vector encoding the gene whose product was detected. Recursive ensemble mutagenesis (REM), a technique which enhances the frequency of functional mutants in the libraries, can be used in combination with the screening assays to identify CPKPP variants (Delgrave et al. Protein Engineering, 6:327-331, 1993).

[0237] Portions of a CPKPP or variants of a CPKPP having less than about 100 amino acids, and generally less than about 50 amino acids, may also be generated by synthetic means, using techniques well-known to those of ordinary skill in the art. For example, such polypeptides may be synthesized using any of the commercially available solid-phase techniques, such as the Merrifield solid-phase synthesis method, where amino acids are sequentially added to a growing amino acid chain. Equipment for automated synthesis of polypeptides is commercially available from suppliers such as Perkin Elmer/Applied BioSystems Division (Foster City, Calif.), and may be operated according to the manufacturer's instructions.

[0238] Methods and compositions for screening for protein inhibitors or activators are known in the art (see U.S. Pat. Nos. 4,980,281, 5,266,464, 5,688,635, and 5,877,007, which are incorporated herein by reference).

Antibodies

[0239] In another aspect, the invention includes antibodies that are specific to CPKPPs of the invention or their variants. In one embodiment, the antibodies are, without limitation, monoclonal or humanized.

[0240] In another aspect, the invention provides methods of making an isolated hybridoma which produces an antibody useful for diagnosing a patient or animal with cancer. In this method, a CPKPP or its variant is isolated (e.g., by purification from a cell in which it is expressed or by transcription and translation of a polynucleotide encoding the protein in vivo or in vitro using known methods). A vertebrate, such as a mammal (e.g., a mouse, rabbit or sheep), is immunized using the isolated polypeptide or polypeptide fragment. The vertebrate may be immunized at least one additional time with the isolated polypeptide or polypeptide fragment, so that the vertebrate exhibits a robust immune response to the polypeptide or polypeptide fragment. Splenocytes are isolated from the immunized vertebrate and fused with an immortalized cell line to form hybridomas, using any of a variety of methods well-known in the art. Hybridomas formed in this manner are then screened using standard methods to identify one or more hybridomas which produce an antibody which specifically binds with the polypeptide or polypeptide fragment. The invention also includes hybridomas made by this method and antibodies made using such hybridomas.

[0241] An isolated CPKPP, or a portion or fragment thereof, can be used as an immunogen to generate antibodies that bind the CPKPP using standard techniques for polyclonal and monoclonal antibody preparation. A full-length CPKPP can be used or, alternatively, the invention provides antigenic peptide fragments of the CPKPP for use as immunogens. The antigenic peptide of a CPKPP comprises at least 8 amino acid residues of an amino acid sequence encoded by a CPKG set forth in Table 1, and encompasses an epitope of a CPKPP such that an antibody raised against the peptide forms a specific immune complex with the CPKPP. In many instances, the antigenic peptide comprises at least 8, 12, 16, 20, or more amino acid residues.

[0242] Immunogenic portions (epitopes) may generally be identified using well-known techniques. Such techniques include screening polypeptides for the ability to react with antigen-specific antibodies, antisera and/or T cell lines or clones. When an antisera and antibodies are antigen-specific, they bind to an antigen with a siginifcant binding affinity. In many cases, the binding affinity is equal to or greater than 10⁵ M⁻¹. Such antisera and antibodies may be prepared by using well-known techniques. An epitope of a CPKPP is a portion that reacts with such antisera and/or T cells at a level that is not substantially less than the reactivity of the full length polypeptide (e.g., in an ELISA and/or T cell reactivity assay). Such epitopes may react within such assays at a level that is similar to or greater than the reactivity of the full length polypeptide. Such screens may generally be performed using methods well-known to those of ordinary skill in the art. For example, a polypeptide may be immobilized on a solid support and contacted with patient sera to allow binding of antibodies within the sera to the immobilized polypeptide. Unbound sera may then be removed and bound antibodies detected using, for example, ¹²⁵I-labeled Protein A.

[0243] Exemplary epitopes encompassed by the antigenic peptide are regions of the CPKPP that are located on the surface of the protein, e.g., hydrophilic regions, as well as regions with high antigenicity.

[0244] A CPKPP immunogen typically is used to prepare antibodies by immunizing a suitable subject (e.g., rabbit, goat, mouse or other mammal) with the immunogen. An appropriate immunogenic preparation can contain, for example, recombinantly expressed CPKPP or a chemically synthesized CPKPP. The preparation can further include an adjuvant, such as Freund's complete or incomplete adjuvant, or similar immunostimulatory agent. Immunization of a suitable subject with an immunogenic CPKPP preparation induces a polyclonal anti-CPKPP antibody response. Techniques for preparing, isolating and using antibodies are well-known in the art.

[0245] Accordingly, another aspect of the invention pertains to monoclonal or polyclonal anti-CPKPP antibodies. Examples of immunologically active portions of immunoglobulin molecules include F(ab) and F(ab′)₂ fragments which can be generated by treating the antibody with an enzyme such as pepsin. The invention provides polyclonal and monoclonal antibodies that bind to CPKPP.

[0246] Polyclonal anti-CPKPP antibodies can be prepared as described above by immunizing a suitable subject with a CPKPP. The anti-CPKPP antibody titer in the immunized subject can be monitored over time by standard techniques, such as with an enzyme linked immunosorbent assay (ELISA) using immobilized CPKPP. If desired, the antibody molecules directed against CPKPPs can be isolated from the mammal (e.g., from the blood) and further purified by well-known techniques, such as protein A chromatography, to obtain the IgG fraction. At an appropriate time after immunization, e.g., when the anti-CPKPP antibody titers are highest, antibody-producing cells can be obtained from the subject and used to prepare monoclonal antibodies by standard techniques, such as the hybridoma technique, human B cell hybridoma technique, the EBV-hybridoma technique, or trioma techniques. The technology for producing monoclonal antibody hybridomas is well-known. Briefly, an immortal cell line (typically a myeloma) is fused to lymphocytes (typically splenocytes) from a mammal immunized with a CPKPP immunogen as described above, and the culture supernatants of the resulting hybridoma cells are screened to identify a hybridoma producing a monoclonal antibody that binds to a CPKPP of the invention.

[0247] Any of the many well-known protocols used for fusing lymphocytes and immortalized cell lines can be applied for the purpose of generating an anti-CPKPP monoclonal antibody. Moreover, the ordinarily skilled worker will appreciate that there are many variations of such methods which also would be useful.

[0248] Alternative to preparing monoclonal antibody-secreting hybridomas, a monoclonal anti-CPKPP antibody can be identified and isolated by screening a recombinant combinatorial immunoglobulin library (e.g., an antibody phase display library) with CPKPP to thereby isolate immunoglobulin library members that bind to a CPKPP. Kits for generating and screening phage display libraries are commercially available (e.g., the Pharmacia Recombinant Phage Antibody System, Catalog No. 27-9400-01; and the Stratagene SurfZAP™ Phage Display Kit, Catalog No. 240612).

[0249] The anti-CPKPP antibodies also include “Single-chain Fv” or “scFv” antibody fragments. The scFv fragments comprise the V_{H} and V_{L} domains of an antibody, wherein these domains are present in a single polypeptide chain. Generally, the Fv polypeptide further comprises a polypeptide linker between the V_{H} and V_{L} domains which enables the scFv to form the desired structure for antigen binding.

[0250] Additionally, recombinant anti-CPKPP antibodies, such as chimeric and humanized monoclonal antibodies, comprising both human and non-human portions, which can be made using standard recombinant DNA techniques, are within the scope of the invention. Such chimeric and humanized monoclonal antibodies can be produced by recombinant DNA techniques known in the art.

[0251] Humanized antibodies are particularly desirable for therapeutic treatment of human subjects. Humanized forms of non-human (e.g., murine) antibodies are chimeric molecules of immunoglobulins, immunoglobulin chains or fragments thereof (such as Fv, Fab, Fab′, F(ab′)₂ or other antigen-binding subsequences of antibodies), which contain minimal sequence derived from non-human immunoglobulin. Humanized antibodies include human immunoglobulins (recipient antibody) in which residues forming a complementary determining region (CDR) of the recipient are replaced by residues from a CDR of a non-human species (donor antibody) such as mouse, rat or rabbit having the desired specificity, affinity and capacity. In some instances, Fv framework residues of the human immunoglobulin are replaced by corresponding non-human residues. Humanized antibodies may also comprise residues which are found neither in the recipient antibody nor in the imported CDR or framework sequences. In general, the humanized antibody will comprise substantially all of at least one, and typically two, variable domains, in which all or substantially all of the CDR regions correspond to those of a non-human immunoglobulin and all or substantially all of the constant regions being those of a human immunoglobulin consensus sequence. In one embodiment, the humanized antibody comprises at least a portion of an immunoglobulin constant region (Fc), typically that of a human immunoglobulin.

[0252] Such humanized antibodies can be produced using transgenic mice which are incapable of expressing endogenous immunoglobulin heavy and light chain genes, but which can express human heavy and light chain genes. The transgenic mice are immunized in the normal fashion with a selected antigen, e.g., all or a portion of a polypeptide corresponding to a CPKPP of the invention. Monoclonal antibodies directed against the antigen can be obtained using conventional hybridoma technology. The human immunoglobulin transgenes harbored by the transgenic mice rearrange during B cell differentiation, and subsequently undergo class switching and somatic mutation. Thus, using such a technique, it is possible to produce therapeutically useful IgG, IgA and IgE antibodies.

[0253] Humanized antibodies which recognize a selected epitope can be generated using a technique referred to as “guided selection.” In this approach a selected non-human monoclonal antibody, e.g., a murine antibody, is used to guide the selection of a humanized antibody recognizing the same epitope.

[0254] In one embodiment, the antibodies to CPKPP are capable of reducing or eliminating the biological function of CPKPP, as is described below. That is, the addition of anti-CPKPP antibodies (either polyclonal or monoclonal) to CPKPP (or cells containing CPKPP) may reduce or eliminate the CPKPP activity. In one embodiment, at least a 25% decrease in activity is achieved. In another embodiment, at least a 50%, 60%, 70%, 80%, 90%, or 100% decrease in activity is achieved.

[0255] An anti-CPKPP antibody can be used to isolate a CPKPP of the invention by standard techniques, such as affinity chromatography or immunoprecipitation. An anti-CPKPP antibody can facilitate the purification of natural CPKPPs from cells and of recombinantly produced CPKPPs expressed in host cells. Moreover, an anti-CPKPP antibody can be used to detect a CPKPP (e.g., in a cellular lysate or cell supernatant on the cell surface) in order to evaluate the abundance and pattern of expression of the CPKPP. Anti-CPKPP antibodies can be used diagnostically to monitor protein levels in tissue as part of a clinical testing procedure, for example, to determine the efficacy of a given treatment regimen. Detection can be facilitated by coupling (i.e., physically linking) the antibody to a detectable substance. Examples of detectable substances include various enzymes, prosthetic groups, fluorescent materials, luminescent materials, bioluminescent materials, and radioactive materials. Examples of suitable enzymes include horseradish peroxidase, alkaline phosphatase, galactosidase, or acetylcholinesterase; examples of suitable prosthetic group complexes include streptavidin/biotin and avidin/biotin; examples of suitable fluorescent materials include umbelliferone, fluorescein, fluorescein isothiocyanate, rhodamine, dichlorotriazinylamine fluorescein, dansyl chloride or phycoerythrin; an example of a luminescent material includes luminol; examples of bioluminescent materials include luciferase, luciferin, and aequorin, and examples of suitable radioactive material include ¹²⁵I, ¹³¹I, ³⁵S or ³H.

[0256] Anti-CPKPP antibodies of the invention are also useful for targeting a therapeutic to a cell or tissue comprising the antigen of the anti-CPKPP antibody. For example, a therapeutic such as a small molecule can be linked to the anti-CPKPP antibody in order to target the therapeutic to the cell or tissue comprising the CPKPP antigen. The method is particularly useful in connection with CPKPPs which are surface markers.

[0257] A therapeutic agent may be coupled (e.g., covalently bonded) to a suitable monoclonal antibody either directly or indirectly (e.g., via a linker group). A direct reaction between an agent and an antibody is possible when each possesses a substituent capable of reacting with the other. For example, a nucleophilic group, such as an amino or sulfhydryl group, on one may be capable of reacting with a carbonyl-containing group, such as an anhydride or an acid halide, or with an alkyl group containing a good leaving group (e.g., a halide) on the other.

[0258] Alternatively, it may be desirable to couple a therapeutic agent and an antibody via a linker group. A linker group can function as a spacer to distance an antibody from an agent in order to avoid interference with binding capabilities. A linker group can also serve to increase the chemical reactivity of a substituent on an agent or an antibody, and thus increase the coupling efficiency. An increase in chemical reactivity may also facilitate the use of agents, or functional groups on agents, which otherwise would not be possible.

[0259] It will be evident to those skilled in the art that a variety of bifunctional or polyfunctional reagents, both homo- and hetero-functional, may be employed as the linker group. Coupling may be effected, for example, through amino groups, carboxyl groups, sulfhydryl groups or oxidized carbohydrate residues. There are numerous references describing such methodology, e.g., U.S. Pat. No. 4,671,958, to Rodwell et al.

[0260] Where a therapeutic agent is more potent when free from the antibody portion of the immunoconjugates of the present invention, it may be desirable to use a linker group which is cleavable during or upon internalization into a cell. A number of different cleavable linker groups have been described. The mechanisms for the intracellular release of an agent from these linker groups include cleavage by reduction of a disulfide bond (e.g., U.S. Pat. No. 4,489,710, to Spitler), by irradiation of a photolabile bond (e.g., U.S. Pat. No. 4,625,014, to Senter et al.), by hydrolysis of derivatized amino acid side chains (e.g., U.S. Pat. No. 4,638,045, to Kohn et al.), by serum complement-mediated hydrolysis (e.g., U.S. Pat. No. 4,671,958, to Rodwell et al.), and acid-catalyzed hydrolysis (e.g., U.S. Pat. No. 4,569,789, to Blattler et al.).

[0261] It may be desirable to couple more than one agent to an antibody. In one embodiment, multiple molecules of an agent are coupled to one antibody molecule. In another embodiment, more than one type of agent may be coupled to one antibody. Regardless of the particular embodiment, immunoconjugates with more than one agent may be prepared in a variety of ways. For example, more than one agent may be coupled directly to an antibody molecule, or linkers that provide multiple sites for attachment can be used.

[0262] In another embodiment, antibodies to a CPKPP may be used to eliminate the CPKPP-containing cell population in vivo by activating the complement system, by mediating antibody-dependent cellular cytotoxicity (ADCC), or by causing uptake of the antibody coated cells by the receptor-mediated endocytosis (RE) system.

CPKPP-specific Cytotoxic Lymphocytes (T cells)

[0263] Another aspect of the invention pertains to immunotherapeutic compositions comprising T cells specific for a CPKPP. Such cells may generally be prepared in vitro or ex vivo, using standard procedures. T cells may be isolated from bone marrow, peripheral blood, or a fraction of bone marrow or peripheral blood of a patient, using a commercially available cell separation system, such as the Isolex™ System, available from Nexell Therapeutics, Inc. (Irvine, Calif.). Alternatively, T cells may be derived from related or unrelated humans, non-human mammals, cell lines or cultures.

[0264] T cells may be stimulated with a CPKPP or polynucleotide encoding a CPKPP and/or an antigen presenting cell (APC) that expresses a CPKPP. Such stimulation is performed under conditions and for a time sufficient to permit the generation of T cells that are specific for the polypeptide. In one embodiment, a CPKPP or polynucleotide encoding a CPKPP is present within a delivery vehicle, such as a microsphere, to facilitate the generation of specific T cells.

[0265] T cells are considered to be specific for a CPKPP if the T cells specifically proliferate, secrete cytokines or kill target cells coated with the polypeptide or expressing a gene encoding the polypeptide. T cell specificity may be evaluated using any of a variety of standard techniques. For example, within a chromium release assay or proliferation assay, a stimulation index of more than two-fold increase in lysis and/or proliferation, compared to negative controls, indicates T cell specificity. Alternatively, detection of the proliferation of T cells may be accomplished by a variety of known techniques. For example, T cell proliferation can be detected by measuring an increased rate of DNA synthesis (e.g., by pulse-labeling cultures of T cells with tritiated thymidine and measuring the amount of tritiated thymidine incorporated into DNA). Contact with a tumor polypeptide (e.g., 100 ng/ml-100 μg/ml, or 200 ng/ml-25 μg/ml) for 3-7 days should result in at least a two-fold increase in proliferation of the T cells. Contact as described above for 2-3 hours should result in activation of the T cells, as measured using standard cytokine assays in which a two-fold increase in the level of cytokine release (e.g., TNF or IFNγ) is indicative of T cell activation. T cells that have been activated in response to a CPKPP, polynucleotide encoding a CPKPP, or CPKPPe-expressing APC may be CD4⁺ and/or CD8⁺. Tumor protein-specific T cells may be expanded using standard techniques. Within many embodiments, the T cells are derived from a patient, a related donor or an unrelated donor, and are administered to the patient following stimulation and expansion.

[0266] For therapeutic purposes, CD4⁺ or CD8⁺ T cells that proliferate in response to a CPKPP, polynucleotide encoding a CPKPP, or APC can be expanded in number either in vitro or in vivo. Proliferation of such T cells in vitro may be accomplished in a variety of ways. For example, the T cells can be re-exposed to a CPKPP, or a short peptide corresponding to an immunogenic portion of such a polypeptide, with or without the addition of T cell growth factors, such as interleukin-2, and/or stimulator cells that synthesize a CPKPP. Alternatively, one or more T cells that proliferate in the presence of a CPKPP can be expanded in number by cloning. Methods for cloning cells are well-known in the art, and include limiting dilution.

Vaccines

[0267] Within certain aspects, CPKPP, CPKPN, CPKPP-specific T cell, CPKPP-presenting APC, and CPKG-containing vectors including, but not limited to, expression vectors and gene delivery vectors, may be utilized as vaccines for cancer. Vaccines may comprise one or more such compounds/cells and an immunostimulant. An immunostimulant may be any substance that enhances or potentiates an immune response (antibody and/or cell-mediated) to an exogenous antigen. Examples of immunostimulants include adjuvants, biodegradable microspheres (e.g., polylactic galactide) and liposomes (into which the compound is incorporated). Vaccines within the scope of the present invention may also contain other compounds, which may be biologically active or inactive. For example, one or more immunogenic portions of other tumor antigens may be present, either incorporated into a fusion polypeptide or as a separate compound, within the composition of vaccine.

[0268] A vaccine may contain DNA encoding one or more CPKPP or portion of CPKPP, such that the polypeptide is generated in situ. As noted above, the DNA may be present within any of a variety of delivery systems known to those of ordinary skill in the art, including nucleic acid expression vectors, gene delivery vectors, and bacteria expression systems. Numerous gene delivery techniques are well-known in the art. Appropriate nucleic acid expression systems contain the necessary DNA sequences for expression in the patient (such as a suitable promoter and terminating signal). Bacterial delivery systems involve the administration of a bacterium (such as Bacillus-Calmette-Guerrin) that expresses an immunogenic portion of the polypeptide on its cell surface or secretes such an epitope. In one embodiment, the DNA may be introduced using a viral expression system (e.g., vaccinia or other pox virus, retrovirus, or adenovirus), which may involve the use of a non-pathogenic (defective), replication competent virus. Techniques for incorporating DNA into such expression systems are well-known to those of ordinary skill in the art. The DNA may also be “naked,” as described, for example, in Ulmer et al., (Science, 259:1745-1749, 1993). The uptake of naked DNA may be increased by coating the DNA onto biodegradable beads, which are efficiently transported into the cells. A vaccine may comprise both a polynucleotide and a polypeptide component. Such vaccines may provide for an enhanced immune response.

[0269] A vaccine may contain pharmaceutically acceptable salts of the polynucleotides and polypeptides provided herein. Such salts may be prepared from pharmaceutically acceptable non-toxic bases, including organic bases (e.g., salts of primary, secondary and tertiary amines and basic amino acids) and inorganic bases (e.g., sodium, potassium, lithium, ammonium, calcium and magnesium salts).

[0270] Any of a variety of immunostimulants may be employed in the vaccines of this invention. For example, an adjuvant may be included. Most adjuvants contain a substance designed to protect the antigen from rapid catabolism, such as aluminum hydroxide or mineral oil, and a stimulator of immune responses, such as lipid A, Bortadella pertussis or Mycobacterium tuberculosis derived proteins. Suitable adjuvants are commercially available as, for example, Freund's Incomplete Adjuvant and Complete Adjuvant (Difco Laboratories, Detroit, Mich.); Merck Adjuvant 65 (Merck and Company, Inc., Rahway, N.J.); AS-2 (SmithKline Beecham, Philadelphia, Pa.); aluminum salts such as aluminum hydroxide gel (alum) or aluminum phosphate; salts of calcium, iron or zinc; an insoluble suspension of acylated tyrosine; acylated sugars; cationically or anionically derivatized polysaccharides; polyphosphazenes; biodegradable micro spheres; monophosphoryl lipid A and quil A. Cytokines, such as GM-CSF or IL-2, IL-7, or IL-12, may also be used as adjuvants.

[0271] Within the vaccines provided herein, the adjuvant composition can be designed to induce an immune response predominantly of the Th1 type. High levels of Th1-type cytokines (e.g., IFNγ, TNFα, IL-2 and IL-12) tend to favor the induction of cell mediated immune responses to an administered antigen. In contrast, high levels of Th2-type cytokines (e.g., IL-4, IL-5, IL-6 and IL-10) tend to favor the induction of humoral immune responses. Following application of a vaccine as provided herein, a patient will support an immune response that includes Th1- and Th2-type responses. Within one embodiment, in which a response is predominantly Th1-type, the level of Th1-type cytokines will increase to a greater extent than the level of Th2-type cytokines. The levels of these cytokines may be readily assessed using standard assays.

[0272] Exemplary adjuvants for use in eliciting a predominantly Th1-type response include, for example, a combination of monophosphoryl lipid A (e.g., 3-de-O-acylated monophosphoryl lipid A (3D-MPL)) together with an aluminum salt. MPL adjuvants are available from Corixa Corporation (Seattle, Wash.). CpG-containing oligonucleotides (in which the CpG dinucleotide is unmethylated) also induce a predominantly Th1 response. Such oligonucleotides are well-known. Immunostimulatory DNA sequences are also described, for example, by Sato et al., Science, 273:352, 1996. Another exemplary adjuvant is a saponin, such as QS21 (Aquila Biopharmaceuticals Inc., Framingham, Mass.), which may be used alone or in combination with other adjuvants. For example, an enhanced system involves the combination of a monophosphoryl lipid A and saponin derivative, such as the combination of QS21 and 3D-MPL as described in WO94/00153, or a less reactogenic composition where the QS21 is quenched with cholesterol, as described in WO96/33739. Other exemplary formulations comprise an oil-in-water emulsion and tocopherol. A particularly potent adjuvant formulation involving QS21, 3D-MPL and tocopherol in an oil-in-water emulsion is described in WO 95/17210.

[0273] Other examples of adjuvants include Montamide ISA 720 (Seppic, France), SAF (Chiron, Calif.), ISCOMS (CSL), MF-59 (Chiron, Calif.), the SBAS series of adjuvants (e.g., SBAS-2 or SBAS-4, available from SmithKline Beecham, Rixensart, Belgium), Detox (Ribi ImmunoChem Research Inc., Hamilton, Mont.), RC-529 (Ribi ImmunoChem Research Inc., Hamilton, Mont.) and Aminoalkyl glucosaminide 4-phosphates (AGPs).

[0274] Any vaccine provided herein may be prepared using well-known methods that result in a combination of antigen, immune response enhancer and a suitable carrier or excipient. The compositions described herein may be administered as part of a sustained release formulation (i.e., a formulation such as a capsule, sponge or gel (composed of polysaccharides, for example) that effects a slow release of compound following administration). Such formulations may generally be prepared using well-known technology and administered by, for example, oral, rectal or subcutaneous implantation, or by implantation at the desired target site. Sustained-release formulations may contain a polypeptide, polynucleotide or antibody dispersed in a carrier matrix and/or contained within a reservoir surrounded by a rate controlling membrane.

[0275] Carriers for use within such formulations are biocompatible, and may also be biodegradable. In one embodiment, the formulation provides a relatively constant level of active component release. Such carriers include microparticles of poly (lactide-co-glycolide), as well as polyacrylate, latex, starch, cellulose and dextran. Other delayed-release carriers include supramolecular biovectors, which comprise a non-liquid hydrophilic core (e.g., a cross-linked polysaccharide or oligosaccharide) and, optionally, an external layer comprising an amphiphilic compound, such as a phospholipid (see e.g., U.S. Pat. No. 5,151,254). The amount of active compound contained within a sustained release formulation depends upon the site of implantation, the rate and expected duration of release and the nature of the condition to be treated or prevented.

[0276] Any of a variety of delivery vehicles may be employed within vaccines to facilitate production of an antigen-specific immune response that targets cancer cells. Delivery vehicles include antigen presenting cells (APCs), such as dendritic cells, macrophages, B cells, monocytes and other cells that may be engineered to be efficient APCs. Such cells may, but need not, be genetically modified to increase the capacity for presenting the antigen, to improve activation and/or maintenance of the T cell response, to have anti-tumor effects per se and/or to be immunologically compatible with the receiver (i.e., matched HLA haplotype). APCs may generally be isolated from any of a variety of biological fluids and organs, including tumor and peritumoral tissues, and may be autologous, allogeneic, syngeneic or xenogeneic cells.

[0277] Certain embodiments of the present invention use dendritic cells or progenitors thereof as APCs. Dendritic cells are highly potent APCs and have been shown to be effective as a physiological adjuvant for eliciting prophylactic or therapeutic antitumor immunity. In general, dendritic cells may be identified based on their typical shape (stellate in situ, with marked cytoplasmic processes (dendrites) visible in vitro), their ability to take up, process and present antigens with high efficiency and their ability to activate naive T cell responses. Dendritic cells may, of course, be engineered to express specific cell-surface receptors or ligands that are not commonly found on dendritic cells in vivo, and such modified dendritic cells are contemplated by the present invention. As an alternative to dendritic cells, secreted vesicles antigen-loaded dendritic cells (called exosomes) may be used within a vaccine (see Zitvogel et al., Nature Med., 4:594-600, 1998).

[0278] Dendritic cells and progenitors may be obtained from peripheral blood, bone marrow, tumor-infiltrating cells, peritumoral tissues-infiltrating cells, lymph nodes, spleen, skin, umbilical cord blood or any other suitable tissue or fluid. For example, dendritic cells may be differentiated ex vivo by adding a combination of cytokines such as GM-CSF, IL-4, IL-13 and/or TNFα to cultures of monocytes harvested from peripheral blood. Alternatively, CD34 positive cells harvested from peripheral blood, umbilical cord blood or bone marrow may be differentiated into dendritic cells by adding to the culture medium combinations of GM-CSF, IL-3, TNFα, CD40 ligand, LPS, flt3 ligand and/or other compound(s) that induce differentiation, maturation and proliferation of dendritic cells.

[0279] Dendritic cells are conveniently categorized as “immature” and “mature” cells, which allows a simple way to discriminate between two well-characterized phenotypes. However, this nomenclature should not be construed to exclude all possible intermediate stages of differentiation. Immature dendritic cells are characterized as APC with a high capacity for antigen uptake and processing, which correlates with the high expression of Fcy receptor and mannose receptor. The mature phenotype is typically characterized by a lower expression of these markers, but a high expression of cell surface molecules responsible for T cell activation such as class I and class II MHC, adhesion molecules (e.g., CD54 and CD11) and costimulatory molecules (e.g., CD40, CD80, CD86 and 4-1BB).

[0280] APCs may generally be transfected with a polynucleotide encoding a CPKPP (or portion or other variant thereof) such that the CPKPP, or an immunogenic portion thereof, is expressed on the cell surface. Such transfection may take place ex vivo, and a composition or vaccine comprising such transfected cells may then be used for therapeutic purposes, as described herein. Alternatively, a gene delivery vehicle that targets a dendritic or other antigen presenting cell may be administered to a patient, resulting in transfection that occurs in vivo. In vivo and ex vivo transfection of dendritic cells, for example, may generally be performed using any methods known in the art, such as those described in WO97/24447, or the gene gun approach described by Mahvi et al., Immunology and Cell Biology, 75:456-460, 1997. Antigen loading of dendritic cells may be achieved by incubating dendritic cells or progenitor cells with the CPKPPs, DNA or RNA; or with antigen-expressing recombinant bacterium or viruses (e.g., vaccinia, fowlpox, adenovirus or lentivirus vectors). Prior to loading, the polypeptide may be covalently conjugated to an immunological partner that provides T cell help (e.g., a carrier molecule). Alternatively, a dendritic cell may be pulsed with a non-conjugated immunological partner, separately or in the presence of the polypeptide.

[0281] Vaccines may be presented in unit-dose or multi-dose containers, such as sealed ampoules or vials. Such containers can be hermetically sealed to preserve sterility of the formulation until use. In general, formulations may be stored as suspensions, solutions or emulsions in oily or aqueous vehicles. Alternatively, a vaccine may be stored in a freeze-dried condition requiring only the addition of a sterile liquid carrier immediately prior to use. Vectors

[0282] Another aspect of the invention pertains to vectors containing a polynucleotide encoding a CPKPP or a portion thereof. One type of vector is a “plasmid,” which includes a circular double-stranded DNA loop into which additional DNA segments can be ligated. In the present specification, “plasmid” and “vector” can be used interchangeably as the plasmid is the most commonly used form of vector. Vectors include expression vectors and gene delivery vectors. The latter may be non-plasmid vectors such as viral vectors.

[0283] The expression vectors of the invention comprise a polynucleotide encoding a CPKPP or a portion thereof in a form suitable for expression of the polynucleotide in a host cell, which means that the expression vectors include one or more regulatory sequences, selected on the basis of the host cells to be used for expression, which are operatively linked to the polynucleotide sequence to be expressed. It will be appreciated by those skilled in the art that the design of the expression vector can depend on such factors as the choice of the host cell to be transformed, the level of expression of protein desired, and the like. The expression vectors of the invention can be introduced into host cells to thereby produce proteins or peptides, including fusion proteins or peptides, encoded by polynucleotides as described herein (e.g., CPKPPs, mutant forms of CPKPPs, fusion proteins, and the like).

[0284] The expression vectors of the invention can be designed for expression of CPKPPs in prokaryotic or eukaryotic cells. For example, CPKPPs can be expressed in bacterial cells such as E. coli, insect cells (using baculovirus expression vectors), yeast cells, or mammalian cells. In certain embodiments, such protein may be used, for example, as a therapeutic protein of the invention. Alternatively, the expression vector can be transcribed and translated in vitro, for example using T7 promoter regulatory sequences and T7 polymerase.

[0285] Expression of proteins in prokaryotes is most often carried out in E. coli with vectors containing constitutive or inducible promoters directing the expression of either fusion or non-fusion proteins. Fusion vectors add a number of amino acids to a protein encoded therein, usually to the amino terminus of the recombinant protein. Such fusion vectors typically serve three purposes: 1) to increase expression of the recombinant protein; 2) to increase the solubility of the recombinant protein; and 3) to aid in the purification of the recombinant protein by acting as a ligand in affinity purification. Often, in fusion expression vectors, a proteolytic cleavage site is introduced at the junction of the fusion moiety and the recombinant protein to enable separation of the recombinant protein from the fusion moiety subsequent to purification of the fusion protein. Such enzymes, and their cognate recognition sequences, include Factor Xa, thrombin and enterokinase. Typical fusion expression vectors include pGEX (Pharmacia, Piscataway, N.J.), pMAL (New England Biolabs, Beverly, Mass.) and pRITS (Pharmacia, Piscataway, N.J.), which fuse GST, maltose E binding protein, or protein A, respectively, to the target recombinant protein.

[0286] Purified fusion proteins can be utilized in CPKPP activity assays, (e.g., direct assays or competitive assays described in detail below), or to generate antibodies specific for CPKPPs.

[0287] Examples of suitable inducible non-fusion E. coli expression vectors include pTrc and pET 11d. Target gene expression from the pTrc vector relies on host RNA polymerase transcription from a hybrid trp-lac fusion promoter. Target gene expression from the pET 11d vector relies on transcription from a T7 gn10-lac fusion promoter mediated by a coexpressed viral RNA polymerase (T7 gn1). This viral polymerase is supplied by host strains BL21(DE3) or HSLE174(DE3) from a resident prophage harboring a T7 gn1 gene under the transcriptional control of the lacUV 5 promoter.

[0288] One strategy to maximize recombinant protein expression in E. coli is to express the protein in a host bacteria with an impaired capacity to proteolytically cleave the recombinant protein. Another strategy is to alter the polynucleotide sequence of the polynucleotide to be inserted into an expression vector so that the individual codons for each amino acid are those preferentially utilized in E. coli. Such alteration of polynucleotide sequences of the invention can be carried out by standard DNA synthesis techniques.

[0289] In another embodiment, the CPKPP expression vector is a yeast expression vector. Examples of vectors for expression in yeast S. cerevisiae include pYepSec1, pMFa, pJRY88, pYES2 and picZ (Invitrogen Corp, San Diego, Calif.).

[0290] Alternatively, CPKPPs of the invention can be expressed in insect cells using baculovirus expression vectors. Baculovirus vectors available for expression of proteins in cultured insect cells (e.g., Sf9 cells) include the pAc series and the pVL series.

[0291] In yet another embodiment, a polynucleotide of the invention is expressed in mammalian cells using a mammalian expression vector. Examples of mammalian expression vectors include pCDM8 and pMT2PC. When used in mammalian cells, the expression vector's control functions are often provided by viral regulatory elements. For example, commonly used promoters are derived from polyoma, adenovirus 2, cytomegalovirus and Simian Virus 40. Target gene expression from the pTrc vector relies on host RNA polymerase transcription from a hybrid trp-lac fusion promoter. Target gene expression from the pET 11d vector relies on transcription from a T7 gn10-lac fusion promoter mediated by a coexpressed viral RNA polymerase (T7 gn1). This viral polymerase is supplied by host strains BL21 (DE3) or HSLE174(DE3) from a resident prophage harboring a T7 gn1 gene under the transcriptional control of the lacUV 5 promoter.

[0292] In another embodiment, the mammalian expression vector is capable of directing expression of the polynucleotide preferentially in a particular cell type (e.g., tissue-specific regulatory elements are used to express the polynucleotide). Tissue-specific regulatory elements are known in the art and may include epithelial cell-specific promoters. Other non-limiting examples of suitable tissue-specific promoters include the liver-specific albumin promoter, lymphoid-specific promoters, promoters of T cell receptors and immunoglobulins, neuron-specific promoters (e.g., the neurofilament promoter), pancreas-specific promoters, and mammary gland-specific promoters (e.g., milk whey promoter). Developmentally-regulated promoters are also encompassed, for example the α-fetoprotein promoter.

[0293] The CPKGs identified in the present invention can be used for therapeutical purposes. For example, antisense constructs of the CPKGs can be delivered therapeutically to cancer cells. The goal of such therapy is to retard the growth rate of the cancer cells. Expression of the sense molecules and their translation products or expression of the antisense mRNA molecules has the effect of inhibiting the growth rate of cancer cells or inducing apoptosis (a radical reduction in the growth rate of a cell).

[0294] The invention provides a recombinant expression vector comprising a polynucleotide encoding a CPKPP cloned into the expression vector in an antisense orientation. That is, the DNA molecule is operatively linked to a regulatory sequence in a manner which allows for expression (by transcription of the DNA molecule) of an RNA molecule which is antisense to mRNA corresponding to a CPKG of the invention. Regulatory sequences operatively linked to a polynucleotide cloned in the antisense orientation can be chosen to direct the continuous expression of the antisense RNA molecule in a variety of cell types. For instance viral promoters and/or enhancers, or regulatory sequences can be chosen to direct constitutive, tissue specific or cell type specific expression of antisense RNA. The antisense expression vector can be in the form of a recombinant plasmid, phagemid or attenuated virus in which antisense polynucleotides are produced under the control of a high efficiency regulatory region. The activity of the promoter/enhancer can be determined by the cell type into which the vector is introduced.

[0295] The invention further provides gene delivery vehicles for delivery of polynucleotides to cells, tissues, or a mammal for expression. For example, a polynucleotide sequence of the invention can be administered either locally or systemically in a gene delivery vehicle. These constructs can utilize viral or non-viral vector approaches in in vivo or ex vivo modality. Expression of such coding sequence can be induced using endogenous mammalian or heterologous promoters. Expression of the coding sequence in vivo can be either constituted or regulated. The invention includes gene delivery vehicles capable of expressing the contemplated polynucleotides. The gene delivery vehicle can be, without limitation, a viral vector, such as a retroviral, lentiviral, adenoviral, adeno-associated viral (AAV), herpes viral, or alphavirus vector. The viral vector can also be an astrovirus, coronavirus, orthomyxovirus, papovavirus, paramyxovirus, parvovirus, picomavirus, poxvirus, or togavirus viral vector.

[0296] Delivery of the gene therapy constructs of this invention into cells is not limited to the above mentioned viral vectors. Other delivery methods and media may be employed such as, for example, nucleic acid expression vectors, polycationic condensed DNA linked or unlinked to killed adenovirus alone, ligand linked DNA, liposome-DNA complex, eukaryotic cell delivery vehicles cells, deposition of photopolymerized hydrogel materials, handheld gene transfer particle gun, ionizing radiation, nucleic charge neutralization or fusion with cell membranes. Particle mediated gene transfer may be employed. Briefly, the sequence can be inserted into conventional vectors that contain conventional control sequences for high level expression, and then be incubated with synthetic gene transfer molecules such as polymeric DNA-binding cations like polylysine, protamine, and albumin, linked to cell targeting ligands such as asialoorosomucoid, insulin, galactose, lactose or transferrin. Naked DNA may also be employed. Uptake efficiency may be improved using biodegradable latex beads. DNA coated latex beads are efficiently transported into cells after endocytosis initiation by the beads. The method may be improved further by treatment of the beads to increase hydrophobicity and thereby facilitate disruption of the endosome and release of the DNA into the cytoplasm.

Regulatable Expression Systems

[0297] Another aspect of the invention pertains to the expression of CPKGs using a regulatable expression system. Systems to regulate expression of therapeutic genes have been developed and incorporated into the current viral and nonviral gene delivery vectors. Examples of these systems include, but are not limited to, Tet-on/off system, Ecdysone system, Progesterone-system, and Rapamycin-system.

Host Cells

[0298] Another aspect of the invention pertains to host cells into which a polynucleotide molecule of the invention is introduced, e.g., a CPKG listed in Table 1, or homolog thereof, within an expression vector, a gene delivery vector, or a polynucleotide molecule of the invention containing sequences which allow it to homologously recombine into a specific site of the host cell's genome. The terms “host cell” and “recombinant host cell” are used interchangeably and do not not only refer to a particular subject cell but also to the progeny or potential progeny of such cell. Because certain modifications may occur in succeeding generations due to either mutation or environmental influences, such progeny may not, in fact, be identical to the parent cell, but are still included within the scope of the term as used herein.

[0299] A host cell can be any prokaryotic or eukaryotic cell. For example, a CPKPP of the invention can be expressed in bacterial cells such as E. coli, insect cells, yeast or mammalian cells (such as Chinese hamster ovary cells (CHO), COS cells, Fischer 344 rat cells, HLA-B27 rat cells, HeLa cells, A549 cells, or 293 cells). Other suitable host cells are known to those skilled in the art.

[0300] Vector DNA can be introduced into prokaryotic or eukaryotic cells via conventional transformation or transfection techniques. A variety of art-recognized techniques are available for introducing foreign polynucleotide (e.g., DNA) into a host cell, including calcium phosphate or calcium chloride co-precipitation, DEAE-dextran-mediated transfection, lipofection, or electoporation.

[0301] For stable transfection of mammalian cells, it is known that, depending upon the expression vector and transfection technique used, only a small fraction of cells may integrate the foreign DNA into their genome. In order to identify and select these integrants, a gene that encodes a selectable flag (e.g., resistance to antibiotics) is generally introduced into the host cells along with the gene of interest. Examples of selectable flags include those which confer resistance to drugs, such as G418, hygromycin and methotrexate. Polynucleotide encoding a selectable flag can be introduced into a host cell on the same vector as that encoding a CPKPP or can be introduced on a separate vector. Cells stably transfected with the introduced polynucleotide can be identified by drug selection (e.g., cells that have incorporated the selectable flag gene will survive, while the other cells die).

[0302] A host cell of the invention, such as a prokaryotic or eukaryotic host cell in culture, can be used to produce (i.e., express) a CPKPP. Accordingly, the invention further provides methods for producing a CPKPP using the host cells of the invention. In one embodiment, the method comprises culturing the host cell of invention (into which a recombinant expression vector encoding a CPKPP has been introduced) in a suitable medium such that a CPKPP of the invention is produced. In another embodiment, the method further comprises isolating a CPKPP from the medium or the host cell.

Transgenic and Knockout Animals

[0303] The host cells of the invention can also be used to produce non-human transgenic animals. For example, in one embodiment, a host cell of the invention is a fertilized oocyte or an embryonic stem cell into which CPKPP-coding sequences have been introduced. Such host cells can then be used to create non-human transgenic animals in which exogenous sequences encoding a CPKPP of the invention have been introduced into their genome or homologous recombinant animals in which endogenous sequences encoding the CPKPP of the invention have been altered. Such animals are useful for studying the function and/or activity of a CPKPP and for identifying and/or evaluating modulators of CPKPP activity.

[0304] A transgenic animal of the invention can be created by introducing a CPKPP-encoding polynucleotide into the mate pronuclei of a fertilized oocyte, e.g., by microinjection or retroviral infection, and allowing the oocyte to develop in a pseudopregnant female foster animal. Intronic sequences and polyadenylation signals can also be included in the transgene to increase the efficiency of expression of the transgene. A tissue-specific regulatory sequence(s) can be operably linked to a transgene to direct expression of a CPKPP to particular cells. Methods for generating transgenic animals via embryo manipulation and microinjection, particularly animals such as mice, have become conventional in the art. Similar methods are used for production of other transgenic animals. A transgenic founder animal can be identified based upon the presence of a transgene of the invention in its genome and/or expression of mRNA corresponding to a gene of the invention in tissues or cells of the animals. A transgenic founder animal can then be used to breed additional animals carrying the transgene. Moreover, transgenic animals carrying a transgene encoding a CPKPP can further be bred to other transgenic animals carrying other transgenes.

[0305] To create a homologous recombinant animal (knockout animal), a vector is prepared which contains at least a portion of a gene of the invention into which a deletion, addition or substitution has been introduced to thereby alter, e.g., functionally disrupt, the gene. The gene can be a human gene or a non-human homolog of a human gene of the invention (e.g., a homolog of a CPKG listed in Table 1). For example, a mouse gene can be used to construct a homologous recombination polynucleotide molecule, e.g., a vector, suitable for altering an endogenous gene of the invention in the mouse genome. In one embodiment, the homologous recombination polynucleotide molecule is designed such that, upon homologous recombination, the endogenous gene of the invention is functionally disrupted (i.e., no longer encodes a functional protein; also referred to as a “knockout” vector). Alternatively, the homologous recombination polynucleotide molecule can be designed such that, upon homologous recombination, the endogenous gene is mutated or otherwise altered but still encodes functional protein (e.g., the upstream regulatory region can be altered to thereby alter the expression of the endogenous CPKPP). In the homologous recombination polynucleotide molecule, the altered portion of the gene of the invention is flanked at its 5′ and 3′ ends by additional polynucleotide sequence of the gene of the invention to allow for homologous recombination to occur between the exogenous gene carried by the homologous recombination polynucleotide molecule and an endogenous gene in a cell, e.g., an embryonic stem cell. The additional flanking polynucleotide sequence is of sufficient length for successful homologous recombination with the endogenous gene.

[0306] Typically, several kilobases of flanking DNA (both at the 5′ and 3′ ends) are included in the homologous recombination polynucleotide molecule. The homologous recombination polynucleotide molecule is introduced into a cell, e.g., an embryonic stem cell line (e.g., by electroporation) and cells in which the introduced gene has homologously recombined with the endogenous gene are selected. The selected cells can then be injected into a blastocyst of an animal (e.g., a mouse) to form aggregation chimeras. A chimeric embryo can then be implanted into a suitable pseudopregnant female foster animal and the embryo brought to term. Progeny harboring the homologously recombined DNA in their germ cells can be used to breed animals in which all cells of the animal contain the homologously recombined DNA by germline transmission of the transgene. Methods for constructing homologous recombination polynucleotide molecules is well-known in the art.

[0307] In another embodiment, transgenic non-human animals can be produced which contain selected systems which allow for regulated expression of the transgene. One example of such a system is the cre/loxP recombinase system of bacteriophage P1. For a description of the cre/loxP recombinase system, see, e.g., Laksa et al., Proc. Natl. Acad. Sci., USA, 89:6232-6236, 1992. Another example of a recombinase system is the FLP recombinase system of Saccharomyces cerevisiae (O'Gorman et al., Science, 251:1351-1355, 1991). If a cre/loxP recombinase system is used to regulate expression of the transgene, animals containing transgenes encoding both the Cre recombinase and a selected protein are required. Such animals can be provided through the construction of “double” transgenic animals, e.g., by mating two transgenic animals, one containing a transgene encoding a selected protein and the other containing a transgene encoding a recombinase.

[0308] Clones of the non-human transgenic animals described herein can also be produced according to the methods described in Wilmut, I. et al., Nature, 385:810-813, 1997, and PCT International Publication Nos. WO97/07668 and WO97/07669. In brief, a cell, e.g., a somatic cell, from the transgenic animal can be isolated and induced to exit the growth cycle and enter G₀ phase. The quiescent cell can then be fused, e.g., through the use of electrical pulses, to an enucleated oocyte from an animal of the same species from which the quiescent cell is isolated. The reconstructed oocyte is then cultured such that it develops to morula or blastocyte and then transferred to pseudopregnant female foster animal. The offspring borne of this female foster animal will be a clone of the animal from which the cell, e.g., the somatic cell, is isolated.

[0309] In many embodiments of the invention, the non-human transgenic animals comprise a CPKG, such as, for example, STK15. In some other embodiments, the non-human “knock-out” animal is a STK15 knock-out.

Detection Methods

[0310] As discussed earlier, expression level of CPKGs may be used as a marker for cancer. Detection and measurement of the relative amount of a CPKG product (polynucleotide or polypeptide) of the invention can be by any method known in the art.

[0311] Methodologies for detection of a transcribed polynucleotide include RNA extraction from a cell or tissue sample, followed by hybridization of a labeled probe (i.e., a complementary polynucleotide molecule) specific for the target RNA to the extracted RNA and detection of the probe (i.e., Northern blotting).

[0312] Methodologies for peptide detection include protein extraction from a cell or tissue sample, followed by binding of an antibody specific for the target protein to the protein sample, and detection of the antibody. For example, detection of STK15 may be accomplished using polyclonal anti-STK15 antibody. Antibodies are generally detected by the use of a labeled secondary antibody. The label can be a radioisotope, a fluorescent compound, an enzyme, an enzyme co-factor, or ligand. Such methods are well understood in the art.

[0313] In certain embodiments, the CPKGs themselves (i.e., the DNA or cDNA) may serve as markers for cancer. For example, an increase of genomic copies of a CPKG, such as by duplication of the gene, may also be correlated with cancer.

[0314] Detection of specific polynucleotide molecules may also be assessed by gel electrophoresis, column chromatography, or direct sequencing, quantitative PCR (in the case of polynucleotide molecules), RT-PCR, or nested-PCR among many other techniques well-known to those skilled in the art.

[0315] Detection of the presence or number of copies of all or a part of a CPKG of the invention may be performed using any method known in the art. It is convenient to assess the presence and/or quantity of a DNA or cDNA by Southern analysis, in which total DNA from a cell or tissue sample is extracted, is hybridized with a labeled probe (i.e., a complementary DNA molecules), and the probe is detected. The label group can be a radioisotope, a fluorescent compound, an enzyme, or an enzyme co-factor. Other useful methods of DNA detection and/or quantification include direct sequencing, gel electrophoresis, column chromatography, and quantitative PCR, as is known by one skilled in the art.

[0316] In certain embodiments, the CPKPPs may serve as markers for cancer. Detection of specific polypeptide molecules may be assessed by gel electrophoresis, Western blot, column chromatography, or direct sequencing, among many other techniques well-known to those skilled in the art.

Panels of CPKGs

[0317] Expression level of each CPKG may be considered individually, although it is within the scope of the invention to provide combinations of two or more CPKGs for use in the methods and compositions of the invention to increase the confidence of the analysis. In another aspect, the invention provides panels of the CPKGs of the invention. A panel of CPKGs comprises two or more CPKGs. A panel may also comprise 2-5,5-15, 15-35, 35-50, or more than 50 CPKGs. In one embodiment, these panels of CPKGs are selected such that the CPKGs within any one panel share certain features. For example, the CPKGs of a first panel may be protein kinases that exhibit at least a two-fold increase in quantity or activity in a cancer sample, as compared to a sample which is substantially free of cancer from the same subject or a sample which is substantially free of cancer from a different subject without cancer. Alternatively, CPKGs of a second panel may each exhibit differential regulation as compared to a first panel. Similarly, different panels of CPKGs may be composed of CPKGs representing different stages of cancer. Panels of the CPKGs of the invention may be made by independently selecting CPKGs from Table 1, and may further be provided on biochips, as discussed below.

Screening Methods

[0318] The invention also provides methods (also referred to herein as “screening assays”) for identifying modulators, i.e., candidate or test compounds or agents comprising therapeutic moieties (e.g., peptides, peptidomimetics, peptoids, polynucleotides, small molecules or other drugs) which (a) bind to a CPKPP, or (b) have a modulatory (e.g., up-regulation or down-regulation; stimulatory or inhibitory; potentiation/induction or suppression) effect on the activity of a CPKPP or, more specifically, (c) have a modulatory effect on the interactions of the CPKPP with one or more of its natural substrates, or (d) have a modulatory effect on the expression of the CPKPPs. Such assays typically comprise a reaction between the CPKPP and one or more assay components. The other components may be either the test compound itself, or a combination of test compound and a binding partner of the CPKPP.

[0319] The test compounds of the present invention are generally either small molecules or biomolecules. Small molecules include, but are not limited to, inorganic molecules and small organic molecules. Biomolecules include, but are not limited to, naturally-occurring and synthetic compounds that have a bioactivity in mammals, such as polypeptides, polysaccharides, and polynucleotides. In one embodiment the test compound is a small molecule. In another embodiment, the test compound is a biomolecule. One skilled in the art will appreciate that the nature of the test compound may vary depending on the nature of the protein encoded by the CPKG of the invention. For example, if the CPKG encodes an orphan receptor having an unknown ligand, the test compound may be any of a number of biomolecules which may act as cognate ligand, including but not limited to, cytokines, lipid-derived mediators, small biogenic amines, hormones, neuropeptides, or proteases.

[0320] The test compounds of the present invention may be obtained from any available source, including systematic libraries of natural and/or synthetic compounds. Test compounds may also be obtained by any of the numerous approaches in combinatorial library methods known in the art, including: biological libraries; peptoid libraries (libraries of molecules having the functionalities of peptides, but with a novel, non-peptide backbone which are resistant to enzymatic degradation but which nevertheless remain bioactive; see, e.g., Zuckermann et al., J. Med. Chem., 37:2678-85, 1994); spatially addressable parallel solid phase or solution phase libraries; synthetic library methods requiring deconvolution; the ‘one-bead one-compound’ library method; and synthetic library methods using affinity chromatography selection. The biological library and peptoid library approaches are limited to peptide libraries, while the other four approaches are applicable to peptide, non-peptide oligomer or small molecule libraries of compounds (Lam, Anticancer Drug Des., 12:145, 1997).

Screening for Inhibitors of CPKPP

[0321] The invention provides methods of screening test compounds for inhibitors of CPKPP, and to the pharmaceutical compositions comprising the test compounds. The method of screening comprises obtaining samples from subjects diagnosed with or suspected of having cancer, contacting each separate aliquot of the samples with one of a plurality of test compounds, and comparing expression of one or more CPKGs in each of the aliquots to determine whether any of the test compounds provides a substantially decreased level of expression or activity of a CPKG relative to samples with other test compounds or relative to an untreated sample or control sample. In addition, methods of screening may be devised by combining a test compound with a protein and thereby determining the effect of the test compound on the protein.

[0322] In addition, the invention is further directed to a method of screening for test compounds capable of modulating with the binding of a CPKPP and a binding partner, by combining the test compound, CPKPP, and binding partner together and determining whether binding of the binding partner and CPKPP occurs. The test compound may be either small molecules or a biomolecule. As discussed below, test compounds may be provided from a variety of libraries well-known in the art.

[0323] Modulators of a CPKG expression, activity or binding ability are useful as therapeutic compositions of the invention. Such modulators (e.g., antagonists or agonists) may be formulated as pharmaceutical compositions, as described herein below. Such modulators may also be used in the methods of the invention, for example, to diagnose, treat, or prognose cancer.

High-Throughput Screening Assays

[0324] The invention provides methods of conducting high-throughput screening for test compounds capable of inhibiting activity or expression of a CPKPP of the present invention. In one embodiment, the method of high-throughput screening involves combining test compounds and the CPKPP and detecting the effect of the test compound on the CPKPP.

[0325] A variety of high-throughput functional assays well-known in the art may be used in combination to screen and/or study the reactivity of different types of activating test compounds. Since the coupling system is often difficult to predict, a number of assays may need to be configured to detect a wide range of coupling mechanisms. A variety of fluorescence-based techniques are well-known in the art and are capable of high-throughput and ultra high throughput screening for activity, including but not limited to BRET® or FRET® (both by Packard Instrument Co., Meriden, Conn.). The ability to screen a large volume and a variety of test compounds with great sensitivity permits for analysis of the therapeutic targets of the invention to further provide potential inhibitors of cancer. For example, where the CPKG encodes an orphan receptor with an unidentified ligand, high-throughput assays may be utilized to identify the ligand, and to further identify test compounds which prevent binding of the receptor to the ligand. The BIACORE® system may also be manipulated to detect binding of test compounds with individual components of the therapeutic target, to detect binding to either the encoded protein or to the ligand.

[0326] By combining test compounds with CPKPPs of the invention and determining the binding activity between such, diagnostic analysis can be performed to elucidate the coupling systems. Generic assays using cytosensor microphysiometer may also be used to measure metabolic activation, while changes in calcium mobilization can be detected by using the fluorescence-based techniques such as FLIPR® (Molecular Devices Corp, Sunnyvale, Calif.). In addition, the presence of apoptotic cells may be determined by TUNEL assay, which utilizes flow cytometry to detect free 3-OH termini resulting from cleavage of genomic DNA during apoptosis. As mentioned above, a variety of functional assays well-known in the art may be used in combination to screen and/or study the reactivity of different types of activating test compounds. In some cases, the high-throughput screening assay of the present invention utilizes label-free plasmon resonance technology as provided by BIACORE® systems (Biacore International AB, Uppsala, Sweden). Plasmon free resonance occurs when surface plasmon waves are excited at a metal/liquid interface. By reflecting directed light from the surface as a result of contact with a sample, the surface plasmon resonance causes a change in the refractive index at the surface layer. The refractive index change for a given change of mass concentration at the surface layer is similar for many bioactive agents (including proteins, peptides, lipids and polynucleotides), and since the BIACORE® sensor surface can be functionalized to bind a variety of these bioactive agents, detection of a wide selection of test compounds can thus be accomplished.

[0327] Therefore, the invention provides for high-throughput screening of test compounds for the ability to inhibit activity of a protein encoded by the CPKGs listed in Table 1, by combining the test compounds and the protein in high-throughput assays such as BIACORE®, or in fluorescence-based assays such as BRET®. In addition, high-throughput assays may be utilized to identify specific factors which bind to the encoded proteins, or alternatively, to identify test compounds which prevent binding of the receptor to the binding partner. In the case of orphan receptors, the binding partner may be the natural ligand for the receptor. Moreover, the high-throughput screening assays may be modified to determine whether test compounds can bind to either the encoded protein or to the binding partner (e.g., substrate or ligand) which binds to the protein.

[0328] In one embodiment, the high-throughput screening assay detects the ability of a plurality of test compounds to bind to a Group I gene product. In another specific embodiment, the high-throughput screening assay detects the ability of a plurality of a test compound to inhibit a binding partner (such as a ligand) to bind to a Group I gene product. In yet another specific embodiment, the high-throughput screening assay detects the ability of a plurality of a test compounds to modulate signaling through a Group I gene product.

Predictive Medicine

[0329] The present invention pertains to the field of predictive medicine in which diagnostic assays, prognostic assays, pharmacogenetics and monitoring clinical trials are used for prognostic (predictive) purpose to thereby treat an individual prophylactically. Accordingly, one aspect of the present invention relates to diagnostic assays for determining CPKG polynucleotide and/or polypeptide expression and/or activity, in the context of a biological sample (e.g., blood, serum, cells, tissue) to thereby determine whether an individual is at risk for developing cancer associated with modulated CPKG expression or activity. The invention also provides for prognostic (or predictive) assays for determining whether an individual is at risk of developing cancer associated with aberrant CPKG protein or polynucleotide expression or activity.

[0330] For example, the number of copies of a CPKG can be assayed in a biological sample. Such assays can be used for prognostic or predictive purposes to thereby prophylactically treat an individual prior to the onset of cancer associated with aberrant CPKG protein, polynucleotide expression or activity.

[0331] Another aspect of the invention pertains to monitoring the influence of agents (e.g., drugs, compounds) on the expression or activity of CPKGs in clinical trials.

Diagnostic Assays

[0332] An exemplary method for detecting the presence or absence of a CPKPP or polynucleotide encoding a CPKPP in a biological sample involves contacting a biological sample with a compound or an agent capable of detecting the CPKPP or polynucleotide (e.g., mRNA, genomic DNA) that encodes the CPKPP such that the presence of the CPKPP or polynucleotide is detected in the biological sample. One example agent for detecting mRNA or genomic DNA corresponding to a CPKG or CPKPP of the invention is a labeled polynucleotide probe capable of hybridizing to an mRNA or genomic DNA of the invention. In one embodiment, the polynucleotides to be screened are arranged on a GeneChip®. Suitable probes for use in the diagnostic assays of the invention are described herein. One example agent for detecting a CPKPP of the invention is an antibody which specifically recognizes the CPKPP.

[0333] The diagnostic assays may also be used to quantify the amount of expression or activity of a CPKG in a biological sample. Such quantification is useful, for example, to determine the progression or severity of cancer. Such quantification is also useful, for example, to determine the severity of cancer following treatment.

Determining Severity of Cancer

[0334] In the field of diagnostic assays, the invention also provides methods for determining the severity of cancer by isolating a sample from a subject (e.g., a biopsy), detecting the presence, quantity and/or activity of one or more CPKGs of the invention in the sample relative to a second sample from a normal sample or control sample. In one embodiment, the expression levels of CPKGs in the two samples are compared, and a modulation in one or more CPKGs in the test sample indicates cancer. In other embodiments the modulation of 2, 3, 4 or more CPKGs indicate a severe case of cancer.

[0335] In another aspect, the invention provides CPKGs whose quantity or activity is correlated with the severity of cancer. The subsequent level of expression may further be compared to different expression profiles of various stages of the cancer to confirm whether the subject has a matching profile. In yet another aspect, the invention provides CPKGs whose quantity or activity is correlated with a risk in a subject for developing cancer.

[0336] In one embodiment, the agent for detecting CPKPP is an antibody capable of binding to CPKPP, including an antibody with a detectable label. Antibodies can be, for example, polyclonal or monoclonal. An intact antibody, or a fragment thereof (e.g., Fab or F(ab′)₂) can be used. The probe or antibody can be directly labeled by coupling (i.e., physically linking) a detectable substance to the probe or antibody and can be indirectly labeled by reactivity with another reagent that is directly labeled. Examples of indirect labeling include detection of a primary antibody using a fluorescently labeled secondary antibody and end-labeling of a DNA probe with biotin such that it can be detected with fluorescently labeled streptavidin. Biological sample includes tissues, cells and biological fluids isolated from a subject, as well as tissues, cells and fluids present within a subject. That is, the detection method of the invention can be used to detect CPKG mRNA, protein or genomic DNA in a biological sample in vitro as well as in vivo. For example, in vitro techniques for detection of CPKG mRNA include Northern hybridizations and in situ hybridizations. In vitro techniques for detection of CPKPP include enzyme linked immunosorbent assays (ELISAs), Western blots, immunoprecipitations and immunofluorescence. In vitro techniques for detection of CPKG genomic DNA include Southern hybridizations. Furthermore, in vivo techniques for detection of CPKPP include introducing into a subject a labeled anti-CPKPP antibody. For example, the antibody can be labeled with a radioactive marker whose presence and location in a subject can be detected by standard imaging techniques.

[0337] In one embodiment, the biological sample contains protein molecules from the test subject. Alternatively, the biological sample can contain mRNA molecules from the test subject or genomic DNA molecules from the test subject. An exemplary biological sample is a serum sample isolated by conventional means from a subject, e.g., a biopsy or blood draw.

[0338] In another embodiment, the methods further involve obtaining a control biological sample from a subject, contacting the control sample with a compound or agent capable of detecting CPKG protein, mRNA, or genomic DNA of, such that the presence of CPKG protein, mRNA or genomic DNA is detected in the biological sample, and comparing the presence of CPKG protein, mRNA or genomic DNA in the control sample with the presence of CPKG protein, mRNA or genomic DNA in the test sample.

Detection of CPKPP Specific T cells

[0339] Cancer may also be detected based on the presence of T cells that specifically react with a CPKPP in a biological sample. Within certain methods, a biological sample comprising CD4⁺ and/or CD8⁺ T cells isolated from a patient is incubated with a CPKPP, a polynucleotide encoding such a polypeptide and/or an APC that expresses at least an immunogenic portion of such a polypeptide, and the presence or absence of specific activation of the T cells is detected. Suitable biological samples include, but are not limited to, isolated T cells. For example, T cells may be isolated from a patient by routine techniques (such as by Ficoll/Hypaque density gradient centrifugation of peripheral blood lymphocytes). T cells may be incubated in vitro for 2-9 days (typically 4 days) at 37° C. with polypeptide (e.g., 5-25 μg/ml). It may be desirable to incubate another aliquot of a T cell sample in the absence of tumor polypeptide to serve as a control. For CD4⁺ T cells, activation can be detected, for instance, by evaluating proliferation of the T cells. For CD8⁺ T cells, activation can be detected, for instance, by evaluating cytolytic activity. A level of proliferation that is at least two-fold greater and/or a level of cytolytic activity that is at least 20% greater than in disease-free patients indicates the presence of cancer in the patient.

Prognostic Assays

[0340] The diagnostic method described herein can furthermore be utilized to identify subjects having or at risk of developing colon cancer associated with aberrant CPKG expression or activity.

[0341] The assays described herein, such as the preceding or following assays, can be utilized to identify a subject having cancer associated with an aberrant level of CPKG activity or expression. Alternatively, the prognostic assays can be utilized to identify a subject at risk for developing cancer associated with aberrant levels of CPKG protein activity or polynucleotide expression. Thus, the present invention provides a method for identifying cancer associated with aberrant CPKG expression or activity in which a test sample is obtained from a subject and CPKG protein or polynucleotide (e.g., mRNA or genomic DNA) is detected, wherein the presence of CPKG protein or polynucleotide is diagnostic or prognostic for a subject having or at risk of developing cancer with aberrant CPKG expression or activity.

[0342] Furthermore, the prognostic assays described herein can be used to determine whether a subject can be administered an agent (e.g., an agonist, antagonist, peptidomimetic, protein, peptide, polynucleotide, small molecule, or other drug candidate) to treat or prevent cancer associated with aberrant CPKG expression or activity, such as, for example, a cytokine. For example, such methods can be used to determine whether a subject can be effectively treated with an agent to inhibit cancer. Thus, the present invention provides methods for determining whether a subject can be effectively treated with an agent for cancer associated with increased CPKG expression or activity in which a test sample is obtained and CPKG protein or polynucleotide expression or activity is detected (e.g., wherein the abundance of CPKG protein or polynucleotide expression or activity is diagnostic for a subject that can be administered the agent to treat injury associated with aberrant CPKG expression or activity).

[0343] Prognostic assays can be devised to determine whether a subject undergoing treatment for cancer has a poor outlook for long term survival or disease progression. In one embodiment, prognosis can be determined shortly after diagnosis, i.e., within a few days. By establishing expression profiles of different stages of CPKGs, from onset to later stages, an expression pattern may emerge to correlate a particular expression profile to increased likelihood of a poor prognosis. The prognosis may then be used to devise a more aggressive treatment program and enhance the likelihood of long-term survival and well-being.

[0344] The methods of the invention can also be used to detect genetic alterations in a CPKG, thereby determining if a subject with the altered gene is at risk for damage characterized by aberrant regulation in CPKG protein activity or polynucleotide expression. In some embodiments, the methods include detecting, in a sample of cells from the subject, the presence or absence of a genetic alteration characterized by at least one alteration affecting the integrity of a CPKG, or the aberrant expression of the CPKG. For example, such genetic alterations can be detected by ascertaining the existence of at least one of the following: 1) deletion of one or more nucleotides from a CPKG; 2) addition of one or more nucleotides to a CPKG; 3) substitution of one or more nucleotides of a CPKG; 4) a chromosomal rearrangement of a CPKG; 5) alteration in the level of a messenger RNA transcript of a CPKG; 6) aberrant modification of a CPKG, such as of the methylation pattern of the genomic DNA; 7) the presence of a non-wild-type splicing pattern of a messenger RNA transcript of a CPKG; 8) non-wild-type level of a CPKG protein; 9) allelic loss of a CPKG; and 10) inappropriate post-translational modification of a CPKG protein. As described herein, there are a large number of assays known in the art which can be used for detecting alterations in a CPKG. An exemplary biological sample is a blood sample isolated by conventional means from a subject.

[0345] In certain embodiments, detection of the alteration involves the use of a probe/primer in a polymerase chain reaction (PCR), such as anchor PCR or RACE PCR, or, alternatively, in a ligation chain reaction (LCR), the latter of which can be particularly useful for detecting point mutations in the CPKG. This method can include the steps of collecting a cell sample of from a subject, isolating a polynucleotide sample (e.g., genomic, mRNA or both) from the cell sample, contacting the polynucleotide sample with one or more primers which specifically hybridize to a CPKG under conditions such that hybridization and amplification of the CPKG (if present) occur, and detecting the presence or absence of an amplification product, or detecting the size of the amplification product and comparing the length to a control sample. It is understood that PCR and/or LCR may be desirable to use as a preliminary amplification step in conjunction with any of the techniques used for detecting mutations described herein.

[0346] Alternative amplification methods include: self sustained sequence replication, transcriptional amplification system, Q-Beta Replicase, or any other polynucleotide amplification method, followed by the detection of the amplified molecules using techniques well-known to those of skill in the art. These detection schemes are especially useful for the detection of polynucleotide molecules if such molecules are present in very low numbers.

[0347] In an alternative embodiment, mutations in a CPKG from a sample cell can be identified by alterations in restriction enzyme cleavage patterns. For example, sample and control DNA is isolated, amplified (optionally), digested with one or more restriction endonucleases, and fragment length sizes are determined by gel electrophoresis and compared. Differences in fragment length sizes between sample and control DNA indicate mutations in the sample DNA. Moreover, sequence specific ribozymes (see, for example, U.S. Pat. No. 5,498,531) can be used to score for the presence of specific mutations by development or loss of a.ribozyme cleavage site.

[0348] In other embodiments, genetic mutations in a CPKG can be identified by hybridizing sample and control polynucleotides, e.g., DNA or RNA, to high density arrays containing hundreds or thousands of oligonucleotide probes. For example, genetic mutations in a CPKG can be identified in two dimensional arrays containing light generated DNA probes. Briefly, a first hybridization array of probes can be used to scan through long stretches of DNA in a sample and control to identify base changes between the sequences by making linear arrays of sequential overlapping probes. This step allows the identification of point mutations. This step is followed by a second hybridization array that allows the characterization of specific mutations by using smaller, specialized probe arrays complementary to all variants or mutations detected. Each mutation array is composed of parallel probe sets, one complementary to the wild-type gene and the other complementary to the mutant gene.

[0349] In yet another embodiment, any of a variety of sequencing reactions known in the art can be used to directly sequence the CPKG and detect mutations by comparing the sequence of the sample CPKG with the corresponding wild-type (control) sequence. It is also contemplated that any of a variety of automated sequencing procedures can be utilized when performing the diagnostic assays, including sequencing by mass spectrometry.

[0350] Other methods for detecting mutations in a CPKG include methods in which protection from cleavage agents is used to detect mismatched bases in RNA/RNA or RNA/DNA heteroduplexes. In general, the art technique of “mismatch cleavage” starts by providing heteroduplexes by hybridizing (labeled) RNA or DNA containing the wild-type CPKG sequence with potentially mutant RNA or DNA obtained from a tissue sample. The double-stranded duplexes are treated with an agent which cleaves single-stranded regions of the duplex, which will exist due to base pair mismatches between the control and sample strands. For instance, RNA/DNA duplexes can be treated with RNase and DNA/DNA hybrids treated with S1 nuclease to enzymatically digest the mismatched regions. In other embodiments, either DNA/DNA or RNA/DNA duplexes can be treated with hydroxylamine or osmium tetroxide and with piperidine in order to digest mismatched regions. After digestion of the mismatched regions, the resulting material is then separated by size on denaturing polyacrylamide gels to determine the site of mutation. In one embodiment, the control DNA or RNA can be labeled for detection.

[0351] In still another embodiment, the mismatch cleavage reaction employs one or more proteins that recognize mismatched base pairs in double-stranded DNA (so called “DNA mismatch repair” enzymes) in defined systems for detecting and mapping point mutations in CPKG cDNAs obtained from samples of cells. For example, the mutY enzyme of E. coli cleaves A at G/A mismatches and the thymidine DNA glycosylase from HeLa cells cleaves T at G/T mismatches. According to another embodiment, a probe based on a CPKG sequence, e.g., a wild-type CPKG sequence, is hybridized to cDNA or other DNA product from a test cell(s). The duplex is treated with a DNA mismatch repair enzyme, and the cleavage products, if any, can be detected from electrophoresis protocols or the like. See, for example, U.S. Pat. No. 5,459,039.

[0352] In other embodiments, alterations in electrophoretic mobility will be used to identify mutations in CPKGs. For example, single strand conformation polymorphism (SSCP) may be used to detect differences in electrophoretic mobility between mutant and wild-type polynucleotides. Single-stranded DNA fragments of sample and control CPKG polynucleotides will be denatured and allowed to renature. The secondary structure of single-stranded polynucleotides varies according to sequence. The resulting alteration in electrophoretic mobility enables the detection of even a single base change. The DNA fragments may be labeled or detected with labeled probes. The sensitivity of the assay may be enhanced by using RNA (rather than DNA) in which the secondary structure is more sensitive to a change in sequence. In one embodiment, the subject method utilizes heteroduplex analysis to separate double-stranded heteroduplex molecules on the basis of changes in electrophoretic mobility (Keen et al., Trends Genet., 7:5, 1991).

[0353] In yet another embodiment the movement of mutant or wild-type fragments in polyacrylamide gels containing a gradient of denaturant is assayed using denaturing gradient gel electrophoresis (DGGE). When DGGE is used as the method of analysis, DNA will be modified to insure that it does not completely denature, for example by adding a GC clamp of approximately 40 bp of high-melting GC-rich DNA by PCR. In a further embodiment, a temperature gradient is used in place of a denaturing gradient to identify differences in the mobility of control and sample DNA (Rosenbaum and Reissner, Biophys. Chem., 265:12753, 1987).

[0354] Examples of other techniques for detecting point mutations include, but are not limited to, selective oligonucleotide hybridization, selective amplification, or selective primer extension. For example, oligonucleotide primers may be prepared in which the known mutation is placed centrally and then hybridized to target DNA under conditions which permit hybridization only if a perfect match is found (Saiki et al., Proc. Natl. Acad. Sci., USA, 86:6230, 1989). Such allele specific oligonucleotides are hybridized to PCR amplified target or a number of different mutations when the oligonucleotides are attached to the hybridizing membrane and hybridized with labeled target DNA.

[0355] Alternatively, allele specific amplification technology which depends on selective PCR amplification may be used in conjunction with the instant invention. Oligonucleotides used as primers for specific amplification may carry the mutation of interest in the center of the molecule (so that amplification depends on differential hybridization) or at the extreme 3′ end of one primer where, under appropriate conditions, mismatch can prevent or reduce polymerase extension. In addition, it may be desirable to introduce a novel restriction site in the region of the mutation to create cleavage-based detection. It is anticipated that, in certain embodiments, amplification may also be performed using Taq ligase for amplification. In such cases, ligation will occur only if there is a perfect match at the 3′ end of the 5′ sequence making it possible to detect the presence of a known mutation at a specific site by looking for the presence or absence of amplification.

[0356] The methods described herein may be performed, for example, by utilizing prepackaged diagnostic kits comprising at least one probe polynucleotide or antibody reagent described herein, which may be conveniently used, e.g., in clinical settings to diagnose subjects exhibiting symptoms or family history of a disease or illness involving a CPKG.

[0357] Furthermore, any cell type or tissue in which a CPKG is expressed may be utilized in the prognostic or diagnostic assays described herein.

Monitoring Effects During Clinical Trials

[0358] Monitoring the influence of agents (e.g., drugs, small molecules and biomolecule) on the expression or activity of a CPKG protein can be applied not only in basic drug screening, but also in clinical trials. For example, the effectiveness of an agent determined by a screening assay, as described herein to decrease CPKG expression, protein levels, or downregulate CPKG activity, can be monitored in clinical trials of subjects exhibiting increased CPKG expression, protein levels, or up-regulated CPKG activity. In such clinical trials, the expression or activity of a CPKG can be used as a “read out” of the phenotype of a particular tissue.

[0359] For example, and not by way of limitation, genes, including CPKGs, that are modulated in tissues by treatment with an agent that modulates CPKPP activity (e.g., identified in a screening assay as described herein) can be identified. Thus, to study the effect of agents on CPKPP-associated damage, for example, in a clinical trial, cells can be isolated and RNA prepared and analyzed for the levels of expression of a CPKG. The levels of gene expression or a gene expression pattern can be quantified by Northern blot analysis, RT-PCR or GeneChip® as described herein, or alternatively by measuring the amount of protein produced, by one of the methods as described herein, or by measuring the levels of activity of CPKPP. In this way, the gene expression pattern can serve as a read-out, indicative of the physiological response of the cells to the agent. Accordingly, this response state may be determined before treatment and at various points during treatment of the individual with the agent.

[0360] In one embodiment, the present invention provides a method for monitoring the effectiveness of treatment of a subject with an agent (e.g., an agonist, antagonist, peptidomimetic, biomolecule, small molecule, or other drug candidate identified by the screening assays described herein) including the steps of (i) obtaining a pre-administration sample from a subject prior to administration of the agent; (ii) detecting the level of expression of a CPKG protein or mRNA in the pre-administration sample; (iii) obtaining one or more post-administration samples from the subject; (iv) detecting the level of expression or activity of the CPKG protein or mRNA in the post-administration samples; (v) comparing the level of expression or activity of the CPKG protein or mRNA in the pre-administration sample with the CPKG protein or mRNA the post administration sample or samples; and (vi) altering the administration of the agent to the subject accordingly. For example, decreased administration of the agent may be desirable to decrease expression or activity of CPKG to lower levels than detected, i.e., to decrease the effectiveness of the agent. According to such an embodiment, CPKG expression or activity may be used as an indicator of the effectiveness of an agent, even in the absence of an observable phenotypic response.

Methods of Treatment

[0361] The present invention provides for both prophylactic and therapeutic methods of treating a subject at risk for, susceptible to or diagnosed with cancer. With regard to both prophylactic and therapeutic methods of treatment, such treatments may be specifically tailored or modified, based on knowledge obtained from the field of pharmacogenomics. Pharmacogenomics includes the application of genomics technologies such as gene sequencing, statistical genetics, and gene expression analysis to drugs in clinical development and on the market and the study of how a subject's genes determine his or her response to a drug (e.g., a subject's “drug response phenotype” or “drug response genotype”). Thus, another aspect of the invention provides methods for tailoring an individual's prophylactic or therapeutic treatment with either the CPKPP molecules of the present invention or CPKPP modulators (e.g., agonists or antagonists) according to that individual's drug response. Pharmacogenomics allows a clinician or physician to target prophylactic or therapeutic treatments to subjects who will most benefit from the treatment and to avoid treatment of subjects who will experience toxic drug-related side effects.

Prophylactic Methods

[0362] In one aspect, the invention provides a method for preventing in a subject cancer associated with aberrant CPKG expression or activity, by administering to the subject a CPKG protein or an agent which modulates CPKG protein expression or activity.

[0363] Subjects at risk for cancer which is caused or contributed to by aberrant CPKG expression or activity can be identified by, for example, any or a combination of diagnostic or prognostic assays as described herein.

[0364] Administration of a prophylactic agent can occur prior to the manifestation of symptoms characteristic of the differential CPKG protein expression, such that cancer is prevented or, alternatively, delayed in its progression. Depending on the type of CPKG aberrancy (e.g., typically a modulation outside the normal standard deviation), a CPKG protein, CPKG agonist or antagonist agent can be used for treating the subject. The appropriate agent can be determined based on screening assays described herein.

Therapeutic Methods

[0365] Another aspect of the invention pertains to methods of modulating CPKG protein expression or activity for therapeutic purposes. Accordingly, in one embodiment, the modulatory method of the invention involves contacting a cell with an agent that modulates one or more of the activities of a CPKG product activity associated with the cell. An agent that modulates CPKG product activity can be an agent as described herein, such as a polynucleotide (e.g., an antisense molecule) or a polypeptide (e.g., a dominant-negative mutant of a CPKPP), a naturally-occurring target molecule of a CPKPP (e.g., a CPKPP substrate), an anti-CPKPP antibody, a CPKPP modulator (e.g., agonist or antagonist), a peptidomimetic of a CPKG protein agonist or antagonist, or other small molecules.

[0366] The invention further provides methods of modulating a level of expression of a CPKG of the invention, comprising administration to a subject having cancer, a variety of compositions which correspond to the CPKGs of Table 1, including proteins or antisense oligonucleotides. The protein may be provided by further providing a vector comprising a polynucleotide encoding the protein to the cells. Alternatively, the expression levels of the CPKGs of the invention may be modulated by providing an antibody, a plurality of antibodies or an antibody conjugated to a therapeutic moiety. Treatment with the antibody may further be localized to the tissue comprising cancer. In another aspect, the invention provides methods for localizing a therapeutic moiety to cancer tissue or cells comprising exposing the tissue or cells to an antibody which is specific to a protein encoded by the CPKGs of the invention. This method may therefore provide a means to inhibit expression of a specific gene corresponding to a CPKG listed in Table 1.

Determining Efficacy of a Test Compound or Therapy

[0367] The invention also provides methods of assessing the efficacy of a test compound or therapy for inhibiting cancer in a subject. These methods involve isolating samples from a subject suffering from cancer, who is undergoing treatment or therapy, and detecting the presence, quantity, and/or activity of one or more CPKGs of the invention in the first sample relative to a second sample. Where the efficacy of a test compound is determined, the first and second samples can be, for example, sub-portions of a single sample taken from the subject, wherein the first portion is exposed to the test compound and the second portion is not. In one aspect of this embodiment, the CPKG is expressed at a substantially decreased level in the first sample, relative to the second. In some instances, the level of expression in the first sample approximates (i.e., is less than the standard deviation for normal samples) the level of expression in a third control sample, taken from a control sample of normal tissue. This result suggests that the test compound inhibits the expression of the CPKG in the sample. In another aspect of this embodiment, the CPKG is expressed at a substantially increased level in the first sample, relative to the second. In some other instances, the level of expression in the first sample approximates (i.e., is less than the standard deviation for normal samples) the level of expression in a third control sample, taken from a control sample of normal tissue. This result suggests that the test compound augments the expression of the CPKG in the sample.

[0368] Where the efficacy of a therapy is being assessed, the first sample obtained from the subject can be obtained prior to provision of at least a portion of the therapy, whereas the second sample is obtained following provision of the portion of the therapy. The levels of CPKGs in the samples are compared, for example, against a third control sample as well, and correlated with the presence, or risk of presence, of cancer. In one embodiment, the level of CPKGs in the second sample approximates the level of expression of a third control sample. In the present invention, a substantially decreased level of expression of a CPKG indicates that the therapy is efficacious for treating cancer.

Pharmacogenomics

[0369] The CPKG protein and polynucleotide molecules of the present invention, as well as agents, inhibitors or modulators which have a stimulatory or inhibitory effect on CPKG or CPKG protein as identified by a screening assay described herein, can be administered to individuals to treat (prophylactically or therapeutically) cancer associated with aberrant CPKG activity.

[0370] In conjunction with such treatment, pharmacogenomics (i.e., the study of the relationship between an individual's genotype and that individual's response to a foreign compound or drug) may be considered. Differences in metabolism of therapeutics can lead to severe toxicity or therapeutic failure by altering the relation between dose and blood concentration of the pharmacologically active drug. Thus, a physician or clinician may consider applying knowledge obtained in relevant pharmacogenomics studies in determining whether to administer a CPKG product (polynucleotide or polypeptide) or CPKG modulator as well as tailoring the dosage and/or therapeutic regimen of treatment with a CPKG product or CPKG modulator.

[0371] Pharmacogenomics deals with clinically significant hereditary variations in the response to drugs due to altered drug disposition and abnormal action in affected persons. In general, two types of pharmacogenetic conditions can be differentiated. Genetic conditions transmitted as a single factor altering the way drugs act on the body (altered drug action) or genetic conditions transmitted as single factors altering the way the body acts on drugs (altered drug metabolism). These pharmacogenetic conditions can occur either as rare genetic defects or as naturally-occurring polymorphisms. For example, glucose-6-phosphate dehydrogenase deficiency (G6PD) is a common inherited enzymopathy in which the main clinical complication is haemolysis after ingestion of oxidant drugs (anti-malarials, sulfonamides, analgesics, nitrofurans) and consumption of fava beans.

[0372] One pharmacogenomics approach to identifying genes that predict drug response, known as a “genome-wide association,” relies primarily on a high-resolution map of the human genome consisting of already known gene-related sites (e.g., a “bi-allelic” gene marker map which consists of 60,000-100,000 polymorphic or variable sites on the human genome, each of which has two variants). Such a high-resolution genetic map can be compared to a map of the genome of each of a statistically substantial number of subjects taking part in a Phase II/III drug trial to identify genes associated with a particular observed drug response or side effect. Alternatively, such a high resolution map can be generated from a combination of some ten-million known single nucleotide polymorphisms (SNPs) in the human genome. A SNP may be involved in a disease process. However, the vast majority of SNPs may not be disease associated. Given a genetic map based on the occurrence of such SNPs, individuals can be grouped into genetic categories depending on a particular pattern of SNPs in their individual genome. In such a manner, treatment regimens can be tailored to groups of genetically similar individuals, taking into account traits that may be common among such genetically similar individuals. Thus, mapping of the CPKGs of the invention to SNP maps of cancer patients may allow easier identification of these genes according to the genetic methods described herein.

[0373] Alternatively, a method termed the “candidate gene approach,” can be utilized to identify genes that predict drug response. According to this method, if a gene that encodes a drug target is known (e.g., a CPKG of the present invention), all common variants of that gene can be fairly easily identified in the population and it can be determined if having one version of the gene versus another is associated with a particular drug response.

[0374] As an illustrative embodiment, the activity of drug metabolizing enzymes is a major determinant of both the intensity and duration of drug action. The discovery of genetic polymorphisms of drug metabolizing enzymes (e.g., N-acetyltransferase 2 (NAT 2) and cytochrome P450 enzymes CYP2D6 and CYPZC19) has provided an explanation as to why some subjects do not obtain the expected drug effects or show exaggerated drug response and serious toxicity after taking the standard and safe dose of a drug. These polymorphisms are expressed in two phenotypes in the population, the extensive metabolizer and poor metabolizer. The prevalence of poor metabolizer phenotypes is different among different populations. For example, the gene coding for CYP2D6 is highly polymorphic and several mutations have been identified in poor metabolizers, which all lead to the absence of functional CYP2D6. Poor metabolizers of CYP2D6 and CYP2C19 quite frequently experience exaggerated drug response and side effects when they receive standard doses. If a metabolite is the active therapeutic moiety, poor metabolizers show no therapeutic response, as demonstrated for the analgesic effect of codeine mediated by its CYP2D6-formed metabolite morphine. The other extreme are the so called ultra-rapid metabolizers who do not respond to standard doses. Recently, the molecular basis of ultra-rapid metabolism has been identified to be due to CYP2D6 gene amplification.

[0375] Alternatively, a method termed the “gene expression profiling” can be utilized to identify genes that predict drug response. For example, the gene expression of an animal dosed with a drug (e.g., CPKG expression in response to a CPKG modulator of the present invention) can give an indication whether gene pathways related to toxicity have been turned on.

[0376] Information generated from more than one of the above pharmacogenomics approaches can be used to determine appropriate dosage and treatment regimens for prophylactic or therapeutic treatment an individual. This knowledge, when applied to dosing or drug selection, can avoid adverse reactions or therapeutic failure and thus enhance therapeutic or prophylactic efficiency when treating a subject with a CPKG product or CPKG modulator, such as a modulator identified by one of the exemplary screening assays described herein.

Pharmaceutical Compositions

[0377] The invention is further directed to pharmaceutical compositions comprising the test compound, or bioactive agent, or a CPKG modulator (i.e., agonist or antagonist), which may further include a CPKG product, and can be formulated as described herein. Alternatively, these compositions may include an antibody which specifically binds to a CPKG protein of the invention and/or an antisense polynucleotide molecule which is complementary to a CPKG polynucleotide of the invention and can be formulated as described herein.

[0378] One or more of the CPKGs of the invention, fragments of CPKGs, CPKG products, fragments of CPKG products, CPKG modulators, or anti-CPKPP antibodies of the invention can be incorporated into pharmaceutical compositions suitable for administration.

[0379] Suitable pharmaceutically acceptable carriers include solvents, solubilizers, fillers, stabilizers, binders, absorbents, bases, buffering agents, lubricants, controlled release vehicles, diluents, emulsifying agents, humectants, lubricants, dispersion media, coatings, antibacterial or antifungal agents, isotonic and absorption delaying agents, and the like, compatible with pharmaceutical administration. The use of such media and agents for pharmaceutically active substances is well-known in the art. Except insofar as any conventional media or agent is incompatible with the active compound, use thereof in the compositions is contemplated. Supplementary agents can also be incorporated into the compositions.

[0380] The invention includes methods for preparing pharmaceutical compositions for modulating the expression or activity of a polypeptide or polynucleotide corresponding to a CPKG of the invention. Such methods comprise formulating a pharmaceutically acceptable carrier with an agent which modulates expression or activity of a polypeptide or polynucleotide corresponding to a CPKG of the invention. Such compositions can further include additional active agents. Thus, the invention further includes methods for preparing a pharmaceutical composition by formulating a pharmaceutically acceptable carrier with an agent which modulates expression or activity of a polypeptide or polynucleotide corresponding to a CPKG of the invention and one or more additional bioactive agents.

[0381] A pharmaceutical composition of the invention is formulated to be compatible with its intended route of administration. Examples of routes of administration include parenteral, e.g., intravenous, intradermal, subcutaneous, oral (e.g., inhalation), transdermal (topical), transmucosal, and rectal administration. Solutions or suspensions used for parenteral, intradermal, or subcutaneous application can include the following components: a sterile diluent such as water for injection, saline solution, fixed oils, polyethylene glycols, glycerine; propylene glycol or other synthetic solvents; antibacterial agents such as benzyl alcohol or methyl parabens; antioxidants such as ascorbic acid or sodium bisulfate; chelating agents such as ethylenediaminetetraacetic acid; buffers such as acetates, citrates or phosphates and agents for the adjustment of tonicity such as sodium chloride or dextrose. pH can be adjusted with acids or bases, such as hydrochloric acid or sodium hydroxide. The parenteral preparation can be enclosed in ampoules, disposable syringes or multiple dose vials made of glass or plastic.

[0382] Pharmaceutical compositions suitable for injectable use include sterile aqueous solutions (where water soluble) or dispersions and sterile powders for the extemporaneous preparation of sterile injectable solutions or dispersion. For intravenous administration, suitable carriers include physiological saline, bacteriostatic water, Cremophor EL™ (BASF, Parsippany, N.J.) or phosphate buffered saline (PBS). In all cases, the injectable composition should be sterile and should be fluid to the extent that easy syringability exists. It must be stable under the conditions of manufacture and storage and must be preserved against the contaminating action of microorganisms such as bacteria and fungi. The carrier can be a solvent or dispersion medium containing, for example, water, ethanol, polyol (for example, glycerol, propylene glycol, and liquid polyetheylene glycol, and the like), and suitable mixtures thereof. The proper fluidity can be maintained, for example, by the use of a coating such as lecithin, by the maintenance of the requited particle size in the case of dispersion and by the use of surfactants. Prevention of the action of microorganisms can be achieved by various antibacterial and antifungal agents, for example, parabens, chlorobutanol, phenol, ascorbic acid, thimerosal, and the like. In many cases, isotonic agents, for example, sugars, polyalcohols such as manitol, sorbitol, sodium chloride can be included in the composition. Prolonged absorption of the injectable compositions can be brought about by including in the composition an agent which delays absorption, for example, aluminum monostearate and gelatin.

[0383] Sterile injectable solutions can be prepared by incorporating the active compound (e.g., a fragment of a CPKPP or an anti-CPKPP antibody) in the required amount in an appropriate solvent with one or a combination of ingredients enumerated above, as required, followed by filtered sterilization. Generally, dispersions are prepared by incorporating the active compound into a sterile vehicle which contains a basic dispersion medium and the required other ingredients from those enumerated above. In the case of sterile powders for the preparation of sterile injectable solutions, examples of methods of preparation are vacuum drying and freeze-drying which yields a powder of the active ingredient plus any additional desired ingredient from a previously sterile-filtered solution thereof.

[0384] Oral compositions generally include an inert diluent or an edible carrier. They can be enclosed in gelatin capsules or compressed into tablets. For the purpose of oral therapeutic administration, the active compound can be incorporated with excipients and used in the form of tablets, troches, or capsules. Oral compositions can also be prepared using a fluid carrier for use as a mouthwash, wherein the compound in the fluid carrier is applied orally and swished and expectorated or swallowed. Pharmaceutically compatible binding agents, and/or adjuvant materials can be included as part of the composition. The tablets, pills, capsules, troches and the like can contain any of the following ingredients, or compounds of a similar nature: a binder such as microcrystalline cellulose, gum tragacanth or gelatin; an excipient such as starch or lactose; a disintegrating agent such as alginic acid, Primogel, or corn starch; a lubricant such as magnesium stearate or Stertes; a glidant such as colloidal silicon dioxide; a sweetening agent such as sucrose or saccharin; or a flavoring agent such as peppermint, methyl salicylate, or orange flavoring.

[0385] For administration by inhalation, the compounds are delivered in the form of an aerosol spray from a pressured container or dispenser which contains a suitable propellant, e.g., a gas such as carbon dioxide, or a nebulizer.

[0386] Systemic administration can also be by transmucosal or transdermal means. For transmucosal or transdermal administration, penetrants appropriate to the barrier to be permeated are used in the formulation. Such penetrants are generally known in the art, and include, for example, for transmucosal administration, detergents, bile salts, and fusidic acid derivatives. Transmucosal administration can be accomplished through the use of nasal sprays or suppositories. For transdermal administration, the bioactive compounds are formulated into ointments, salves, gels, or creams as generally known in the art.

[0387] The compounds can also be prepared in the form of suppositories (e.g., with conventional suppository bases such as cocoa butter and other glycerides) or retention enemas for rectal delivery.

[0388] In one embodiment, the therapeutic moieties, which may contain a bioactive compound, are prepared with carriers that will protect the compound against rapid elimination from the body, such as a controlled release formulation, including implants and microencapsulated delivery systems. Biodegradable, biocompatible polymers can be used, such as ethylene vinyl acetate, polyanhydrides, polyglycolic acid, collagen, polyorthoesters, and polylactic acid. Methods for preparation of such formulations will be apparent to those skilled in the art. The materials can also be obtained commercially from e.g. Alza Corporation and Nova Pharmaceuticals, Inc. Liposomal suspensions (including liposomes targeted to infected cells with monoclonal antibodies to viral antigens) can also be used as pharmaceutically acceptable carriers.

[0389] It is especially advantageous to formulate oral or parenteral compositions in dosage unit form for ease of administration and uniformity of dosage. Dosage unit form as used herein includes physically discrete units suited as unitary dosages for the subject to be treated; each unit contains a predetermined quantity of active compound calculated to produce the desired therapeutic effect in association with the required pharmaceutical carrier. The specification for the dosage unit forms of the invention are dictated by and directly dependent on the unique characteristics of the active compound and the particular therapeutic effect to be achieved, and the limitations inherent in the art of compounding such an active compound for the treatment of individuals.

[0390] Toxicity and therapeutic efficacy of such compounds can be determined by standard pharmaceutical procedures in cell cultures or experimental animals, e.g., for determining the LD50 (the dose lethal to 50% of the population) and the ED50 (the dose therapeutically effective in 50% of the population). The dose ratio between toxic and therapeutic effects is the therapeutic index and it can be expressed as the ratio LD50/ED50. In many embodiments, compounds which exhibit large therapeutic indices are selected. While compounds that exhibit toxic side effects may be used, care should be taken to design a delivery system that targets such compounds to the site of affected tissue in order to minimize potential damage to uninfected cells and, thereby, reduce side effects.

[0391] The data obtained from the cell culture assays and animal studies can be used in formulating a range of dosage for use in humans. The dosage of such compounds can lie within a range of circulating concentrations that includes the ED50 with little or no toxicity. The dosage may vary within this range depending upon the dosage form employed and the route of administration utilized. For any compound used in the method of the invention, the therapeutically effective dose can be estimated initially from cell culture assays. A dose may be formulated in animal models to achieve a circulating plasma concentration range that includes the IC50 (i.e., the concentration of the test compound which achieves a half-maximal inhibition of symptoms) as determined in cell culture. Such information can be used to more accurately determine useful doses in humans. Levels in plasma may be measured, for example, by high performance liquid chromatography.

[0392] The CPKGs of the invention can be inserted into gene delivery vectors and used as gene therapy vectors. Gene therapy vectors can be delivered to a subject by, for example, intravenous administration, intraportal administration, intrabiliary administration, intra-arterial administration, direct injection into the liver parenchyma, by intramusclular injection, by inhalation, by perfusion, or by stereotactic injection. The pharmaceutical preparation of the gene therapy vector can include the gene therapy vector in an acceptable diluent, or can comprise a slow release matrix in which the gene delivery vehicle is imbedded. Alternatively, where the complete gene delivery vector can be produced intact from recombinant cells, e.g., retroviral vectors, the pharmaceutical preparation can include one or more cells which produce the gene delivery system.

[0393] The pharmaceutical compositions can be included in a container, pack, or dispenser together with instructions for administration.

Kits

[0394] The invention also encompasses kits for detecting the presence of a CPKG product in a biological sample, the kit comprising reagents for assessing expression of the CPKGs of the invention. The reagents may be an antibody or fragment thereof, wherein the antibody or fragment thereof specifically binds with a protein corresponding to a CPKG from Table 1. For example, antibodies of interest may be prepared by methods known in the art. Optionally, the kits may comprise a polynucleotide probe wherein the probe specifically binds with a transcribed polynucleotide corresponding to a CPKG. The kits may also include an array of CPKGs arranged on a biochip, such as, for example, a GeneChip®. The kit may contain means for determining the amount of the CPKG protein or mRNA in the sample and means for comparing the amount of the CPKG protein or mRNA in the sample with a control or standard. The compound or agent can be packaged in a suitable container. The kit can further comprise instructions for using the kit to detect CPKG protein or polynucleotide

[0395] The invention further provides kits for assessing the suitability of each of a plurality of compounds for inhibiting cancer in a subject. Such kits include a plurality of compounds to be tested, and a reagent (i.e., antibody specific to corresponding proteins, or a probe or primer specific to corresponding polynucleotides) for assessing expression of a CPKG listed in Table 1.

Computer Readable Means and Arrays

[0396] Computer readable media comprising CPKG information of the present invention is also provided. Suitable computer readable media include any medium that can be read and accessed directly by a computer. Such media include, but are not limited to: magnetic storage media, such as floppy discs, hard disc storage medium, and magnetic tape; optical storage media such as CD-ROM; electrical storage media such as RAM and ROM; and hybrids of these categories such as magnetic/optical storage media. The skilled artisan will readily appreciate how any of the presently known computer readable mediums can be used to create a manufacture comprising computer readable medium having recorded thereon CPKG information of the present invention.

[0397] A variety of data processor programs and formats can be used to store the CPKG information of the present invention on computer readable medium. For example, the polynucleotide sequence corresponding to the CPKGs can be represented in a word processing text file, formatted in commercially-available software such as WordPerfect and Microsoft Word, or represented in the form of an ASCII file, stored in a database application, such as DB2, Sybase, Oracle, or the like. Any number of data processor structuring formats (e.g., text file or database) may be adapted in order to obtain computer readable medium having recorded thereon the CPKG information of the present invention.

[0398] By providing the CPKG information of the invention in computer readable form, one can routinely access the CPKG sequence information for a variety of purposes. For example, one skilled in the art can use the nucleotide or amino acid sequences of the invention in computer readable form to compare a target sequence or target structural motif with the sequence information stored within the data storage means. Search means are used to identify fragments or regions of the sequences of the invention which match a particular target sequence or target motif.

Arrays and Biochips

[0399] The invention also includes an array comprising a panel of CPKGs of the present invention. The array can be used to assay expression of one or more genes in the array.

[0400] It will be appreciated by one skilled in the art that the panels of CPKGs of the invention may conveniently be provided on solid supports, as a biochip. For example, polynucleotides may be coupled to an array (e.g., a biochip using GeneChip® for hybridization analysis), to a resin (e.g., a resin which can be packed into a column for column chromatography), or a matrix (e.g., a nitrocellulose matrix for northern blot analysis). The immobilization of molecules complementary to the CPKG(s), either covalently or noncovalently, permits a discrete analysis of the presence or activity of each CPKG in a sample. In an array, for example, polynucleotides complementary to each member of a panel of CPKGs may individually be attached to different, known locations on the array. The array may be hybridized with, for example, polynucleotides extracted from a blood or tissue sample from a subject. The hybridization of polynucleotides from the sample with the array at any location on the array can be detected, and thus the presence or quantity of the CPKG and CPKG transcripts in the sample can be ascertained. In one embodiment, an array based on a biochip is employed. Similarly, Western analyses may be performed on immobilized antibodies specific for CPKPPs hybridized to a protein sample from a subject.

[0401] It will also be apparent to one skilled in the art that the entire CPKG product (protein or polynucleotide) molecule need not be conjugated to the biochip support; a portion of the CPKG product or sufficient length for detection purposes (i.e., for hybridization), for example a portion of the CPKG product which is 7, 10, 15, 20, 25, 30, 35, 40, 45, 50, 55, 60, 65, 70, 75, 100 or more nucleotides or amino acids in length, may be sufficient for detection purposes.

[0402] In one embodiment, the array can be used to assay gene expression in a tissue to ascertain tissue specificity of genes in the array. In this manner, up to about 12,000 genes can be simultaneously assayed for expression. This allows an expression profile to be developed showing a battery of genes specifically expressed in one or more tissues at a given point in time.

[0403] In addition to such qualitative determination, the invention allows the quantitation of gene expression in the biochip. Thus, not only tissue specificity, but also the level of expression of a battery of CPKGs in the tissue is ascertainable. Thus, CPKGs can be grouped on the basis of their tissue expression per se and level of expression in that tissue. Normal levels of expression can be determined using cancer-free samples. The determination of normal levels of expression is useful, for example, in ascertaining the relationship of gene expression between or among tissues. Thus, one tissue or cell type can be perturbed and the effect on gene expression in a second tissue or cell type can be determined. In this context, the effect of one cell type on another cell type in response to a biological stimulus can be determined. Such a determination is useful, for example, to know the effect of cell-cell interaction at the level of gene expression. If an agent is administered therapeutically to treat one cell type but has an undesirable effect on another cell type, the invention provides an assay to determine the molecular basis of the undesirable effect and thus provides the opportunity to co-administer a counteracting agent or otherwise treat the undesired effect. Similarly, even within a single cell type, undesirable biological effects can be determined at the molecular level. Thus, the effects of an agent on expression of other than the target gene can be ascertained and counteracted.

[0404] In another embodiment, the arrays can be used to monitor the time course of expression of one or more genes in the array. This can occur in various biological contexts, such as development and differentiation, disease progression and cellular transformation and activation.

[0405] The array is also useful for ascertaining the effect of the expression of a gene on the expression of other genes in the same cell or in different cells. This provides, for example, for a selection of alternate molecular targets for therapeutic intervention if the ultimate or downstream target cannot be regulated.

[0406] Importantly, the invention provides arrays useful for ascertaining differential expression patterns of one or more genes identified in diseased tissue versus non-diseased tissue. This provides a battery of genes that serve as a molecular target for diagnosis or therapeutic intervention. In particular, biochips can be made comprising arrays not only of the CPKGs listed in Table 1, but of CPKGs specific to subjects suffering from specific manifestations or stages of the disease (i.e., metastasized vs. non-metastasized cancer).

[0407] In general, the probes are attached to the biochip in a wide variety of ways, as will be appreciated by those in the art. As described herein, the nucleic acids can either be synthesized first, with subsequent attachment to the biochip, or can be directly synthesized on the biochip.

[0408] The biochip comprises a suitable solid substrate. By “substrate” or “solid support” or other grammatical equivalents herein is meant any material that can be modified to contain discrete individual sites appropriate for the attachment or association of the nucleic acid probes and is amenable to at least one detection method. As will be appreciated by those in the art, the number of possible substrates are very large, and include, but are not limited to, glass and modified or functionalized glass, plastics (including acrylics, polystyrene and copolymers of styrene and other materials, polypropylene, polyethylene, polybutylene, polyurethanes, Teflon, etc.), polysaccharides, nylon or nitrocellulose, resins, silica or silica-based materials including silicon and modified silicon, carbon, metals, etc. In general, the substrates allow optical detection and have low background fluorescence.

[0409] Generally the substrate is planar, although as will be appreciated by those in the art, other configurations of substrates may be used as well. For example, the probes may be placed on the inside surface of a tube, for flow-through sample analysis to minimize sample volume. Similarly, the substrate may be flexible, such as a flexible foam, including closed cell foams made of particular plastics.

[0410] In one embodiment, the surface of the biochip and the probe may be derivatized with chemical functional groups for subsequent attachment of the two. Thus, for example, the biochip is derivatized with a chemical functional group including, but are not limited to, amino groups, carboxy groups, oxo groups and thiol groups. Using these functional groups, the probes can be attached using functional groups on the probes. For example, nucleic acids containing amino groups can be attached to surfaces comprising amino groups using homo-or hetero-bifunctional linkers. In addition, in some cases, additional linkers, such as alkyl groups (including substituted and heteroalkyl groups) may be used.

[0411] In an embodiment, the oligonucleotides are synthesized as is known in the art, and then attached to the surface of the solid support. As will be appreciated by those skilled in the art, either the 5′ or 3′ terminus may be attached to the solid support, or attachment may be via an internal nucleoside.

[0412] In an additional embodiment, the immobilization to the solid support may be very strong, yet non-covalent. For example, biotinylated oligonucleotides can be made, which bind to surfaces covalently coated with streptavidin, resulting in attachment.

[0413] Alternatively, the oligonucleotides may be synthesized on the surface. For example, photoactivation techniques utilizing photopolymerization compounds and techniques are used. In one embodiment, the nucleic acids can be synthesized in situ, using well-known photolithographic techniques. In one embodiment, a substantial portion of the polynucleotide probes stably attached to a nucleic acid array of the present invention can hybridize under stringent conditions to RNA transcripts of cancer genes, or the complements thereof. For instance, at least 15%, 20%, 25%, 30%, 35%, 40%, 45%, or 50% of the polynucleotide probes on the nucleic acid array can hybridize to cancer genes.

[0414] The present invention also contemplates polypeptide arrays. In one embodiment, a substantial portion of the polypeptides that are stably associated with a polypeptide array of the present invention are antibodies specific for polypeptides encoded by cancer genes. In many examples, these antibodies constitute at least 15%, 20%, 25%, 30%, 35%, 40%, 45%, or 50% of the total polypeptides attached to the polypeptide array.

[0415] Modifications to the above-described compositions and methods of the invention, according to standard techniques, will be readily apparent to one skilled in the art and are meant to be encompassed by the invention.

[0416] This invention is further illustrated by the following examples which should not be construed as limiting.

### EXAMPLES

### Example 1

### Two-Tier Statistical Analysis of Gene Expression Data

[0417] The two-tier statistical analysis approach can be described in the following way. Sample sets are created for the four cancers listed above along with the corresponding normal tissues. The gene expression data generated from the Affymetrix MG U95 microarray set for each of the tissue sample types is “extracted” from the Gene Logic BioExpress™ database. The number of samples in each of the sample sets is in the range of 25 to over 100. The number of different genes whose expression is monitored by these arrays is in the range of 40,000-50,000.

[0418] The first step in the statistical analysis was to do a contrast analysis in the expression data for the above described sample sets. This method used the results of a one-way analysis of variance (ANOVA) on the individual sample sets. Unlike a simple t-test, which would compare the mean expression for each gene across a two-sample set, a contrast analysis compared the relative levels of the mean expression of each gene for the eight samples sets (described above) to a specified pattern. This pattern was defined as “high in the tumor sample set, low in the normal sample set.” As in the case with a two-group t-test, a ranking score (t-score) was generated to characterize how well a pattern matches the data. The analysis was done in a way such that ranking the genes for the comparisons in the decreasing order of t-score gave the same order as ranking the gene in increasing order of p-value. The actual contrast analysis was carried out with the Contrast Tool algorithm presented in the Gene Logic gx2000 analysis suite. A complete description of this algorithm can be found in the GeneExpress® 2000 Users Manual. Table 5A lists the U95 probe set names (qualifiers) that met the specified contrast pattern with a p-value equal to or smaller than 0.01 for the eight sample sets defined in the above paragraph. Table 5B provides the corresponding gene name for each qualifier in Table 5A.

[0419] The second step in the two-tier approach was to perform a simple t-test on each pair of cancer and normal tissues samples and identify the genes that show a statistical difference in expression with a p-value that was equal to or smaller than 0.01. This analysis was executed with the Fold Change Analysis tool in the Gene Logic gx200O analysis suite. A complete description of this algorithm can be found in the GeneExpress® 2000 Users Manual. The p-value of the simple t-test for each gene in Table 5A on each pair of cancer and normal tissue samples is depicted in Table 6A. Genes with p-values of no greater than 0.01 in at least two of the four sample sets of the major cancer types listed above are identified in Table 6B.

### Example 2

### Transmembrane Hidden Markov Model (TMHMM) Analysis

[0420] The TMHMM profiles of the polypeptides encoded by the CPKGs were generated using the TMHMM algorithm described by Krogh et al., J. Mol. Biol., 305:567-580, 2001.

[0421] The foregoing description of the present invention provides illustration and description, but is not intended to be exhaustive or to limit the invention to the precise one disclosed. Modifications and variations are possible consistent with the above teachings or may be acquired from practice of the invention. Thus, it is noted that the scope of the invention is defined by the claims and their equivalents.

TABLE 5A
Contrast Analysis of Gene Expression in Cancer and Cancer-Free Samples

| | | | BLAST Hits And | | |
|---|---|---|---|---|---|
| | | GenBank | Warnings.Ref sequence | | |
| On Chip | Qualifier | Accession No. | ID | T Score | P-Value |
| HG_U95A | 36174_at | X70326 | NM_023009 | 16.0300 | 0.0000 |
| HG_U95A | 40690_at | X54942 | NM_001827 | 12.9000 | 0.0000 |
| HG_U95A | 35699_at | AF053306 | NM_001211 | 11.4700 | 0.0000 |
| HG_U95A | 1721_g_at | U65410 | NM_002358 | 11.4600 | 0.0000 |
| HG_U95A | 38618_at | AC002073 | | 10.9400 | 0.0000 |
| HG_U95A | 1942_s_at | U37022 | NM_000075, NM_032913 | 10.8400 | 0.0000 |
| HG_U95E | 91194_at | AF154332 | | 10.5500 | 0.0000 |
| HG_U95A | 572_at | M86699 | NM_003318 | 10.0200 | 0.0000 |
| HG_U95A | 40129_at | U47077 | NM_023936 | 10.0100 | 0.0000 |
| HG_U95A | 38847_at | D79997 | NM_014791 | 9.6900 | 0.0000 |
| HG_U95A | 40788_at | U84371 | NM_001625 | 9.6600 | 0.0000 |
| HG_U95A | 34852_g_at | AF011468 | NM_003158, NM_003600 | 9.6400 | 0.0000 |
| HG_U95A | 910_at | M15205 | NM_003258 | 9.5900 | 0.0000 |
| HG_U95A | 40915_r_at | Y00272 | | 9.5300 | 0.0000 |
| HG_U95B | 51141_at | AI949781 | NM_021158 | 9.5100 | 0.0000 |
| HG_U95A | 33324_s_at | D88357 | NM_001786 | 9.3600 | 0.0000 |
| HG_U95A | 37310_at | X02419 | NM_002658 | 8.7500 | 0.0000 |
| HG_U95A | 1100_at | L76191 | NM_001569 | 8.7100 | 0.0000 |
| HG_U95A | 37677_at | V00572 | NM_000291 | 8.6000 | 0.0000 |
| HG_U95A | 34851_at | AF011468 | NM_003158, NM_003600 | 8.4200 | 0.0000 |
| HG_U95A | 480_at | U56816 | NM_004203 | 8.2500 | 0.0000 |
| HG_U95A | 366_s_at | Z29066 | NM_002497 | 8.1600 | 0.0000 |
| HG_U95A | 1225_g_at | X66363 | NM_006201 | 8.0800 | 0.0000 |
| HG_U95A | 1803_at | X05360 | NM_001786 | 7.9900 | 0.0000 |
| HG_U95A | 31873_at | U52112 | NM_003491 | 7.9700 | 0.0000 |
| HG_U95A | 1031_at | U09564 | NM_003137 | 7.8600 | 0.0000 |
| HG_U95A | 33266_at | AF015254 | NM_004217 | 7.5600 | 0.0000 |
| HG_U95A | 38920_at | AF016582 | NM_001274 | 7.3100 | 0.0000 |
| HG_U95A | 36004_at | AF074382 | NM_003639 | 7.3100 | 0.0000 |
| HG_U95A | 33317_at | L20320 | NM_001799 | 7.2500 | 0.0000 |
| HG_U95A | 33559_at | U61412 | NM_005975 | 7.0700 | 0.0000 |
| HG_U95E | 88045_at | AI345571 | | 6.9700 | 0.0000 |
| HG_U95A | 975_at | Y13115 | NM_014264 | 6.9300 | 0.0000 |
| HG_U95C | 62248_at | R80823 | | 6.9000 | 0.0000 |
| HG_U95A | 39183_at | X66363 | NM_006201 | 6.8700 | 0.0000 |
| HG_U95A | 1224_at | X66363 | NM_006201 | 6.8000 | 0.0000 |
| HG_U95A | 37228_at | U01038 | NM_005030 | 6.7900 | 0.0000 |
| HG_U95A | 1250_at | U47077 | | 6.6800 | 0.0000 |
| HG_U95A | 35714_at | U89606 | NM_003681 | 6.6600 | 0.0000 |
| HG_U95A | 41374_at | AB016869 | NM_003952 | 6.4700 | 0.0000 |
| HG_U95A | 594_s_at | M55265 | NM_001895 | 6.3900 | 0.0000 |
| HG_U95A | 37238_s_at | AF014118 | NM_004203 | 6.3100 | 0.0000 |
| HG_U95B | 47096_at | AA161293 | | 6.2400 | 0.0000 |
| HG_U95A | 32378_at | M26252 | NM_002654 | 6.1900 | 0.0000 |
| HG_U95A | 40549_at | L04658 | NM_004935 | 5.9900 | 0.0000 |
| HG_U95A | 32081_at | AB023166 | | 5.9600 | 0.0000 |
| HG_U95A | 40645_at | L33801 | NM_002093 | 5.8600 | 0.0000 |
| HG_U95E | 91445_at | AI560159 | | 5.7100 | 0.0000 |
| HG_U95A | 168_at | U50196 | NM_001123, NM_006721 | 5.6900 | 0.0000 |
| HG_U95A | 41384_at | AF117829 | | 5.6100 | 0.0000 |
| HG_U95B | 52888_at | AA456454 | | 5.5200 | 0.0000 |
| HG_U95C | 55889_at | W72923 | NM_016364 | 5.4000 | 0.0000 |
| HG_U95E | 73710_at | AI475805 | | 5.3700 | 0.0000 |
| HG_U95A | 905_at | L76200 | NM_000858 | 5.3100 | 0.0000 |
| HG_U95A | 33208_at | U28424 | NM_006260 | 5.2900 | 0.0000 |
| HG_U95A | 32799_at | AF023268 | NM_005698 | 5.2500 | 0.0000 |
| HG_U95D | 68350_s_at | AI589365 | NM_004327, NM_021574 | 5.1100 | 0.0000 |
| HG_U95A | 37229_at | U49844 | NM_001184 | 5.0700 | 0.0000 |
| HG_U95B | 53647_at | AL037995 | | 5.0200 | 0.0000 |
| HG_U95A | 31670_s_at | U81554 | NM_001222, NM_006947 | 4.9900 | 0.0000 |
| HG_U95A | 40966_at | AF099989 | NM_013233 | 4.9800 | 0.0000 |
| HG_U95A | 38819_at | U33635 | NM_002821 | 4.9800 | 0.0000 |
| HG_U95A | 1823_g_at | HG4677-HT5102 | | 4.8600 | 0.0000 |
| HG_U95E | 73996_at | AA912743 | | 4.8300 | 0.0000 |
| HG_U95A | 31488_s_at | S81916 | NM_000291 | 4.8100 | 0.0000 |
| HG_U95A | 1752_at | AD000092 | NM_004343 | 4.8100 | 0.0000 |
| HG_U95D | 88282_at | AA765234 | | 4.8000 | 0.0000 |
| HG_U95A | 1809_at | AB003698 | NM_003503 | 4.7900 | 0.0000 |
| HG_U95B | 55644_at | R49183 | | 4.7700 | 0.0000 |
| HG_U95A | 1108_s_at | M18391 | NM_005232 | 4.7600 | 0.0000 |
| HG_U95A | 1438_at | X75208 | NM_004443 | 4.7500 | 0.0000 |
| HG_U95A | 1064_at | U02680 | NM_002822 | 4.7400 | 0.0000 |
| HG_U95A | 799_at | X80343 | NM_003885 | 4.7200 | 0.0000 |
| HG_U95A | 36718_s_at | L42452 | NM_005391 | 4.7100 | 0.0000 |
| HG_U95A | 175_s_at | U33053 | NM_002741 | 4.6300 | 0.0000 |
| HG_U95A | 36117_at | L13616 | | 4.6200 | 0.0000 |
| HG_U95A | 33642_s_at | U17986 | NM_005629 | 4.5700 | 0.0000 |
| HG_U95A | 1792_g_at | M68520 | | 4.5400 | 0.0000 |
| HG_U95D | 79789_at | AI221234 | | 4.5100 | 0.0000 |
| HG_U95A | 41506_at | AF032437 | NM_003668 | 4.3300 | 0.0100 |
| HG_U95A | 33245_at | AF004709 | | 4.3200 | 0.0100 |
| HG_U95A | 39173_at | X56597 | NM_001436 | 4.2800 | 0.0100 |
| HG_U95A | 35694_at | AB014587 | NM_004834 | 4.2800 | 0.0100 |
| HG_U95A | 1082_at | M34667 | NM_002660 | 4.2800 | 0.0000 |
| HG_U95A | 33814_at | AF005046 | NM_005884 | 3.9900 | 0.0000 |
| HG_U95E | 71762_at | AI630528 | | 3.8800 | 0.0000 |

[0422] TABLE 5B
Contrast Analysis of Gene Expression in Cancer and Cancer-Free Samples

| Qualifier | Known Gene Name |
|---|---|
| 36174_at | macrophage myristoylated alanine-rich C kinase substrate |
| 40690_at | CDC28 protein kinase 2 |
| 35699_at | budding uninhibited by benzimidazoles 1 (yeast homolog), beta |
| 1721_g_at | MAD2 (mitotic arrest deficient, yeast, homolog)-like 1 |
| 38618_at | |
| 1942_s_at | cyclin-dependent kinase 4 |
| 91194_at | |
| 572_at | TTK protein kinase |
| 40129_at | protein kinase, DNA-activated, catalytic polypeptide, hypothetical protein MGC2616 |
| 38847_at | KIAA0175 gene product |
| 40788_at | adenylate kinase 2 |
| 34852_g_at | serine/threonine kinase 6, serine/threonine kinase 15 |
| 910_at | thymidine kinase 1, soluble |
| 40915_r_at | cell division cycle 2, G1 to S and G2 to M |
| 51141_at | protein kinase domains containing protein similar to phosphoprot |
| 33324_s_at | cell division cycle 2, G1 to S and G2 to M |
| 37310_at | plasminogen activator, urokinase |
| 1100_at | interleukin-1 receptor-associated kinase 1 |
| 37677_at | phosphoglycerate kinase 1 |
| 34851_at | serine/threonine kinase 6, serine/threonine kinase 15 |
| 480_at | membrane-associated tyrosine- and threonine-specific cdc2-inhibi |
| 366_s_at | NIMA (never in mitosis gene a)-related kinase 2 |
| 1225_g_at | PCTAIRE protein kinase 1 |
| 1803_at | cell division cycle 2, G1 to S and G2 to M |
| 31873_at | N-acetyltransferase, homolog of S. cerevisiae ARD1 |
| 1031_at | SFRS protein kinase 1 |
| 33266_at | serine/threonine kinase 12 |
| 38920_at | CHK1 (checkpoint, S. pombe) homolog |
| 36004_at | inhibitor of kappa light polypeptide gene enhancer in B-cells, kinase gamma |
| 33317_at | cyclin-dependent kinase 7 (homolog of Xenopus MO15 cdk-activating kinase) |
| 33559_at | PTK6 protein tyrosine kinase 6 |
| 88045_at | mitogen-activated protein kinase kinase kinase kinase 3 |
| 975_at | serine/threonine kinase 18 |
| 62248_at | v-erb-b2 avian erythroblastic leukemia viral oncogene homolog 3 |
| 39183_at | PCTAIRE protein kinase 1 |
| 1224_at | PCTAIRE protein kinase 1 |
| 37228_at | polo (Drosophia)-like kinase |
| 1250_at | protein kinase, DNA-activated, catalytic polypeptide |
| 35714_at | pyridoxal (pyridoxine, vitamin B6) kinase |
| 41374_at | ribosomal protein S6 kinase, 70 kD, polypeptide 2 |
| 594_s_at | casein kinase 2, alpha 1 polypeptide |
| 37238_s_at | membrane-associated tyrosine- and threonine-specific cdc2-inhibi |
| 47096_at | EphB2 |
| 32378_at | pyruvate kinase, muscle |
| 40549_at | cyclin-dependent kinase 5 |
| 32081_at | citron (rho-interacting, serine/threonine kinase 21) |
| 40645_at | glycogen synthase kinase 3 beta |
| 91445_at | phosphoglycerate kinase 1 |
| 168_at | adenosine kinase |
| 41384_at | receptor-interacting serine-threonine kinase 2 |
| 52888_at | cell division cycle 2-like 1 (PITSLRE proteins) |
| 55889_at | protein phosphatase |
| 73710_at | chymotrypsin-like |
| 905_at | guanylate kinase 1 |
| 33208_at | DnaJ (Hsp40) homolog, subfamily C, member 3 |
| 32799_at | secretory carrier membrane protein 3 |
| 68350_s_at | breakpoint cluster region |
| 37229_at | ataxia telangiectasia and Rad3 related |
| 53647_at | hypothetical protein FLJ21324 |
| 31670_s_at | signal recognition particle 72 kD, calcium/calmodulin-dependent protein kinase (CaM kinase) II |
| | gamma |
| 40966_at | Ste-20 related kinase |
| 38819_at | PTK7 protein tyrosine kinase 7 |
| 1823_g_at | ret proto-oncogene (multiple endocrine neoplasia and medullary thyroid carcinoma 1, Hirschsprung |
| | disease) |
| 73996_at | PTK2 protein tyrosine kinase 2 |
| 31488_s_at | phosphoglycerate kinase 1 |
| 1752_at | calreticulin |
| 88282_at | haspin |
| 1809_at | CDC7 (cell division cycle 7, S. cerevisiae, homolog)-like 1 |
| 55644_at | cyclin-dependent kinase 5, regulatory subunit 1 (p35) |
| 1108_s_at | EphA1 |
| 1438_at | EphB3 |
| 1064_at | protein tyrosine kinase 9 |
| 799_at | cyclin-dependent kinase 5, regulatory subunit 1 (p35) |
| 36718_s_at | pyruvate dehydrogenase kinase, isoenzyme 3 |
| 175_s_at | protein kinase C-like 1 |
| 36117_at | PTK2 protein tyrosine kinase 2 |
| 33642_s_at | solute carrier family 6 (neurotransmitter transporter, creatine), member 8 |
| 1792_g_at | cyclin-dependent kinase 2 |
| 79789_at | |
| 41506_at | mitogen-activated protein kinase-activated protein kinase 5 |
| 33245_at | mitogen-activated protein kinase 13 |
| 39173_at | fibrillarin |
| 35694_at | mitogen-activated protein kinase kinase kinase kinase 4 |
| 1082_at | phospholipase C, gamma 1 (formerly subtype 148) |
| 33814_at | p21(CDKN1A)-activated kinase 4 |
| 71762_at | |

[0423] TABLE 6A
Fold Change Analysis of Gene Expression in Cancer and Cancer-Free Samples

| Qualifier | P-value (Colon) | P-value (Lung) | P-value (Breast) | P-value (Prostate) |
|---|---|---|---|---|
| 36174_at | 0.0000 | 0.0000 | 0.0000 | 0.0000 |
| 40690_at | 0.0000 | 0.0000 | 0.0000 | 0.0090 |
| 35699_at | 0.0000 | 0.0000 | 0.0000 | 0.0002 |
| 1721_g_at | 0.0000 | 0.0001 | 0.0000 | 0.2100 |
| 38618_at | 0.0000 | 0.0000 | 0.0000 | 0.0000 |
| 1942_s_at | 0.0000 | 0.0000 | 0.0006 | 0.0021 |
| 91194_at | 0.0000 | 0.0000 | 0.0000 | 0.0034 |
| 572_at | 0.0000 | 0.0000 | 0.0000 | 0.0004 |
| 40129_at | 0.0000 | 0.0000 | 0.0000 | 0.0080 |
| 38847_at | 0.0000 | 0.0000 | 0.0000 | 0.1200 |
| 40788_at | 0.1780 | 0.0000 | 0.0000 | 0.0000 |
| 34852_g_at | 0.0000 | 0.0000 | 0.0000 | 0.1200 |
| 910_at | 0.0005 | 0.0000 | 0.0000 | down |
| 40915_r_at | 0.0000 | 0.0010 | 0.0000 | no change |
| 51141_at | 0.0000 | 0.0120 | 0.0000 | 0.0070 |
| 33324_s_at | 0.0000 | 0.0000 | 0.0000 | 0.0110 |
| 37310_at | 0.0000 | 0.0000 | 0.0000 | down |
| 1100_at | 0.0000 | 0.0000 | 0.0010 | 0.0240 |
| 37677_at | 0.0000 | 0.0000 | 0.0000 | down |
| 34851_at | 0.0000 | 0.0000 | 0.0000 | 0.3000 |
| 480_at | 0.0000 | 0.0000 | 0.0000 | 0.0110 |
| 366_s_at | 0.0000 | 0.0004 | 0.0000 | 0.2420 |
| 1225_g_at | 0.0400 | 0.0002 | 0.0000 | 0.0001 |
| 1803_at | 0.0000 | 0.0000 | 0.0000 | 0.2300 |
| 31873_at | 0.0000 | 0.0031 | 0.0000 | 0.0782 |
| 1031_at | 0.0000 | 0.0000 | 0.0005 | 0.3400 |
| 33266_at | 0.0000 | 0.0000 | 0.0000 | 0.0180 |
| 38920_at | 0.0005 | 0.0200 | 0.0200 | no change |
| 36004_at | 0.0000 | 0.0002 | 0.0000 | 0.2860 |
| 33317_at | 0.0000 | 0.0070 | 0.0100 | 0.0013 |
| 33559_at | 0.0600 | 0.0000 | 0.0000 | 0.0000 |
| 88045_at | 0.0000 | 0.0009 | 0.3803 | 0.0002 |
| 975_at | 0.0000 | 0.0070 | 0.0000 | 0.3000 |
| 62248_at | 0.1400 | 0.0001 | 0.0000 | 0.0000 |
| 39183_at | 0.0700 | 0.0200 | 0.0000 | 0.0002 |
| 1224_at | 0.0300 | 0.0004 | 0.0000 | 0.0089 |
| 37228_at | 0.0000 | 0.0000 | 0.0000 | 0.7100 |
| 1250_at | 0.0000 | 0.0002 | 0.0001 | 0.0600 |
| 35714_at | 0.0000 | 0.0769 | 0.0000 | 0.0650 |
| 41374_at | 0.4000 | 0.0000 | 0.0000 | 0.6000 |
| 594_s_at | 0.0000 | 0.0000 | 0.0030 | 0.0700 |
| 37238_s_at | 0.0010 | 0.0000 | 0.0000 | 0.8000 |
| 47096_at | 0.0000 | 0.0005 | 0.4000 | no change |
| 32378_at | 0.0000 | 0.0000 | 0.0000 | down |
| 40549_at | 0.0000 | 0.0030 | 0.0000 | 0.2700 |
| 32081_at | 0.0001 | 0.0030 | 0.0000 | 0.3000 |
| 40645_at | 0.0010 | 0.7000 | 0.0000 | 0.0400 |
| 91445_at | 0.0056 | 0.0008 | 0.0000 | 0.3790 |
| 168_at | 0.0006 | 0.0143 | 0.0008 | 0.0089 |
| 41384_at | 0.0500 | 0.9000 | 0.0000 | 0.0080 |
| 52888_at | 0.6000 | 0.0007 | 0.9000 | 0.0700 |
| 55889_at | 0.0000 | 0.0120 | 0.2499 | 0.0885 |
| 73710_at | 0.0000 | 0.0002 | 0.0500 | 0.4000 |
| 905_at | 0.0000 | 0.0860 | 0.0000 | 0.8910 |
| 33208_at | 0.4900 | 0.2040 | 0.0102 | 0.1290 |
| 32799_at | 0.0010 | 0.0002 | 0.0000 | 0.0069 |
| 68350_s_at | 0.0008 | 0.0900 | 0.0003 | 0.0300 |
| 37229_at | 0.0000 | 0.0500 | 0.7000 | 0.0060 |
| 53647_at | 0.0000 | 0.0977 | 0.0004 | 0.1999 |
| 31670_s_at | 0.0200 | 0.0400 | 0.0120 | 0.0160 |
| 40966_at | 0.7000 | 0.0002 | 0.4000 | 0.0003 |
| 38819_at | 0.0000 | 0.0200 | 0.0120 | 0.1200 |
| 1823_g_at | 0.5000 | 0.1000 | 0.0000 | 0.3000 |
| 73996_at | 0.0030 | 0.0300 | 0.0000 | 0.7000 |
| 31488_s_at | 0.0000 | 0.0003 | 0.0000 | 0.9000 |
| 1752_at | 0.8660 | 0.0840 | 0.0000 | 0.1012 |
| 88282_at | 0.0000 | 0.0003 | 0.1000 | 0.0050 |
| 1809_at | 0.0008 | 0.0004 | 0.0000 | 0.9775 |
| 55644_at | 0.0000 | 0.0380 | 0.0000 | 0.1080 |
| 1108_s_at | 0.0000 | 0.0040 | 0.5000 | 0.0400 |
| 1438_at | 0.0000 | 0.0110 | 0.1100 | 0.1550 |
| 1064_at | 0.7000 | 0.0000 | 0.0400 | 0.0900 |
| 799_at | 0.7128 | 0.0167 | 0.5880 | 0.0366 |
| 36718_s_at | 0.0002 | 0.0000 | 0.0000 | 0.2800 |
| 175_s_at | 0.0500 | 0.0300 | 0.0000 | 0.0000 |
| 36117_at | 0.0002 | 0.5000 | 0.0080 | 0.0090 |
| 33642_s_at | 0.4000 | 0.0060 | 0.0000 | 0.1400 |
| 1792_g_at | 0.0000 | 0.0100 | 0.0030 | 0.1400 |
| 79789_at | 0.0160 | down | 0.0000 | 0.2520 |
| 41506_at | 0.0098 | 0.0021 | 0.0960 | 0.0700 |
| 33245_at | 0.9200 | 0.0000 | 0.0000 | 0.0370 |
| 39173_at | 0.0000 | 0.0001 | 0.0000 | 0.0200 |
| 35694_at | 0.0000 | 0.2080 | 0.9200 | 0.1460 |
| 1082_at | 0.0004 | 0.0126 | 0.0820 | 0.6196 |
| 33814_at | down | down | 0.0000 | 0.0005 |
| 71762_at | 0.4391 | 0.1822 | 0.0000 | 0.1425 |

[0424] TABLE 6B
Genes Differentially Expressed in Two or More Major Cancers Relative to Cancer-Free Tissues

| Qualifier | Known Gene Name |
|---|---|
| 36174_at | macrophage myristoylated alanine-rich C kinase substrate |
| 40690_at | CDC28 protein kinase 2 |
| 35699_at | budding uninhibited by benzimidazoles 1 (yeast homolog), beta |
| 1721_g_at | MAD2 (mitotic arrest deficient, yeast, homolog)-like 1 |
| 38618_at | |
| 1942_s_at | cyclin-dependent kinase 4 |
| 91194_at | |
| 572_at | TTK protein kinase |
| 40129_at | protein kinase, DNA-activated, catalytic polypeptide, hypothetical protein MGC2616 |
| 38847_at | KIAA0175 gene product |
| 40788_at | adenylate kinase 2 |
| 34852_g_at | serine/threonine kinase 6, serine/threonine kinase 15 |
| 910_at | thymidine kinase 1, soluble |
| 40915_r_at | cell division cycle 2, G1 to S and G2 to M |
| 51141_at | protein kinase domains containing protein similar to phosphoprot |
| 33324_s_at | cell division cycle 2, G1 to S and G2 to M |
| 37310_at | plasminogen activator, urokinase |
| 1100_at | interleukin-1 receptor-associated kinase 1 |
| 37677_at | phosphoglycerate kinase 1 |
| 34851_at | serine/threonine kinase 6, serine/threonine kinase 15 |
| 480_at | membrane-associated tyrosine- and threonine-specific cdc2-inhibi |
| 366_s_at | NIMA (never in mitosis gene a)-related kinase 2 |
| 1225_g_at | PCTAIRE protein kinase 1 |
| 1803_at | cell division cycle 2, G1 to S and G2 to M |
| 31873_at | N-acetyltransferase, homolog of S. cerevisiae ARD1 |
| 1031_at | SFRS protein kinase 1 |
| 33266_at | serine/threonine kinase 12 |
| 36004_at | inhibitor of kappa light polypeptide gene enhancer in B-cells, kinase gamma |
| 33317_at | cyclin-dependent kinase 7 (homolog of Xenopus MO15 cdk-activating kinase) |
| 33559_at | PTK6 protein tyrosine kinase 6 |
| 88045_at | mitogen-activated protein kinase kinase kinase kinase 3 |
| 975_at | serine/threonine kinase 18 |
| 62248_at | v-erb-b2 avian erythroblastic leukemia viral oncogene homolog 3 |
| 39183_at | PCTAIRE protein kinase 1 |
| 1224_at | PCTAIRE protein kinase 1 |
| 37228_at | polo (Drosophia)-like kinase |
| 1250_at | protein kinase, DNA-activated, catalytic polypeptide |
| 35714_at | pyridoxal (pyridoxine, vitamin B6) kinase |
| 41374_at | ribosomal protein S6 kinase, 70 kD, polypeptide 2 |
| 594_s_at | casein kinase 2, alpha 1 polypeptide |
| 37238_s_at | membrane-associated tyrosine- and threonine-specific cdc2-inhibi |
| 47096_at | EphB2 |
| 32378_at | pyruvate kinase, muscle |
| 40549_at | cyclin-dependent kinase 5 |
| 32081_at | citron (rho-interacting, serine/threonine kinase 21) |
| 40645_at | glycogen synthase kinase 3 beta |
| 91445_at | phosphoglycerate kinase 1 |
| 168_at | adenosine kinase |
| 41384_at | receptor-interacting serine-threonine kinase 2 |
| 73710_at | chymotrypsin-like |
| 905_at | guanylate kinase 1 |
| 32799_at | secretory carrier membrane protein 3 |
| 68350_s_at | breakpoint cluster region |
| 37229_at | ataxia telangiectasia and Rad3 related |
| 53647_at | hypothetical protein FLJ21324 |
| 40966_at | Ste-20 related kinase |
| 73996_at | PTK2 protein tyrosine kinase 2 |
| 31488_s_at | phosphoglycerate kinase 1 |
| 88282_at | haspin |
| 1809_at | CDC7 (cell division cycle 7, S. cerevisiae, homolog)-like 1 |
| 55644_at | cyclin-dependent kinase 5, regulatory subunit 1 (p35) |
| 1108_s_at | EphA1 |
| 36718_s_at | pyruvate dehydrogenase kinase, isoenzyme 3 |
| 175_s_at | protein kinase C-like 1 |
| 36117_at | PTK2 protein tyrosine kinase 2 |
| 33642_s_at | solute carrier family 6 (neurotransmitter transporter, creatine), member 8 |
| 1792_g_at | cyclin-dependent kinase 2 |
| 41506_at | mitogen-activated protein kinase-activated protein kinase 5 |
| 33245_at | mitogen-activated protein kinase 13 |
| 39173_at | fibrillarin |
| 33814_at | p21(CDKN1A)-activated kinase 4 |

The application's sequence listing, which the Patent Office published only in electronic form, follows.

SEQUENCE LISTING (48640 sequences)

SEQ ID NO: 1 - DNA, 8265 bp, Homo sapiens
gcctccacacggctccgtcgggcgccgcgctcttccggcagcggtacgtttggagacgccgggaacccgcgttggcgtggttgactagtgcctcgcagcctcagcatgggggaacatggcctggagctggcttccatgatccccgccctgcgggagctgggcagtgccacaccagaggaatataatacagttgtacagaagccaagacaaattctgtgtcaattcattgaccggatacttacagatgtaaatgttgttgctgtagaacttgtaaagaaaactgactctcagccaacctccgtgatgttgcttgatttcatccagcatatcatgaaatcctccccacttatgtttgtaaatgtgagtggaagccatgagcgcaaaggcagttgtattgaattcagtaattggatcataacgagacttctgcggattgcagcaactccctcctgtcatttgttacacaagaaaatctgtgaagtcatctgttcattattatttctttttaaaagcaagagtcctgctatttttggggtactcacaaaagaattattacaactttttgaagacttggtttacctccatagaagaaatgtgatgggtcatgctgtggaatggccagtggtcatgagccgatttttaagtcaattagatgaacacatgggatatttacaatcagctcctttgcagttgatgagtatgcaaaatttagaatttattgaagtcactttattaatggttcttactcgtattattgcaattgtgttttttagaaggcaagaactcttactttggcagataggttgtgttctgctagagtatggtagtccaaaaattaaatccctagcaattagctttttaacagaactttttcagcttggaggactaccagcacaaccagctagcacttttttcagctcatttttggaattattaaaacaccttgtagaaatggatactgaccaattgaaactctatgaagagccattatcaaagctgataaagacactatttccctttgaagcagaagcttatagaaatattgaacctgtctatttaaatatgctgctggaaaaactctgtgtcatgtttgaagacggtgtgctcatgcggcttaagtctgatttgctaaaagcagctttgtgccatttactgcagtatttccttaaatttgtgccagctgggtatgaatctgctttacaagtcaggaaggtctatgtgagaaatatttgtaaagctcttttggatgtgcttggaattgaggtagatgcagagtacttgttgggcccactttatgcagctttgaaaatggaaagtatggaaatcattgaggagattcaatgccaaactcaacaggaaaacctcagcagtaatagtgatggaatatcacccaaaaggcgtcgtctcagctcgtctctaaacccttctaaaagagcaccaaaacagactgaggaaattaaacatgtggacatgaaccaaaagagcatattatggagtgcactgaaacagaaagctgaatcccttcagatttcccttgaatacagtggcctaaagaatcctgttattgagatgttagaaggaattgctgttgtcttacaactgactgctctgtgtactgttcattgttctcatcaaaacatgaactgccgtactttcaaggactgtcaacataaatccaagaagaaaccttctgtagtgataacttggatgtcattggatttttacacaaaagtgcttaagagctgtagaagtttgttagaatctgttcagaaactggacctggaggcaaccattgataaggtggtgaaaatttatgatgctttgatttatatgcaagtaaacagttcatttgaagatcatatcctggaagatttatgtggtatgctctcacttccatggatttattcccattctgatgatggctgtttaaagttgaccacatttgccgctaatcttctaacattaagctgtaggatttcagatagctattcaccacaggcacaatcacgatgtgtgtttcttctgactctgtttccaagaagaatattccttgagtggagaacagcagtttacaactgggccctgcagagctcccatgaagtaatccgggctagttgtgttagtggattttttatcttattgcagcagcagaattcttgtaacagagttcccaagattcttatagataaagtcaaagatgattctgacattgtcaagaaagaatttgcttctatacttggtcaacttgtctgtactcttcacggcatgttttatctgacaagttctttaacagaacctttctctgaacacggacatgtggacctcttctgtaggaacttgaaagccacttctcaacatgaatgttcatcttctcaactaaaagcttctgtctgcaagccattccttttcctactgaaaaaaaaaatacctagtccagtaaaacttgctttcatagataatctacatcatctttgtaagcatcttgattttagagaagatgaaacagatgtaaaagcagttcttggaactttattaaatttaatggaagatccagacaaagatgttagagtggcttttagtggaaatatcaagcacatattggaatccttggactctgaagatggatttataaaggagctttttgtcttaagaatgaaggaagcatatacacatgcccaaatatcaagaaataatgagctgaaggataccttgattcttacaacaggggatattggaagggccgcaaaaggagatttggtaccatttgcactcttacacttattgcattgtttgttatccaagtcagcatctgtctctggagcagcatacacagaaattagagctctggttgcagctaaaagtgttaaactgcaaagttttttcagccagtataagaaacccatctgtcagtttttggtagaatcccttcactctagtcagatgacagcacttccgaatactccatgccagaatgctgacgtgcgaaaacaagatgtggctcaccagagagaaatggctttaaatacgttgtctgaaattgccaacgttttcgactttcctgatcttaatcgttttcttactaggacattacaagttctactacctgatcttgctgccaaagcaagccctgcagcttctgctctcattcgaactttaggaaaacaattaaatgtcaatcgtagagagattttaataaacaacttcaaatatattttttctcatttggtctgttcttgttccaaagatgaattagaacgtgcccttcattatctgaagaatgaaacagaaattgaactggggagcctgttgagacaagatttccaaggattgcataatgaattattgctgcgtattggagaacactatcaacaggtttttaatggtttgtcaatacttgcctcatttgcatccagtgatgatccatatcagggcccgagagatatcatatcacctgaactgatggctgattatttacaacccaaattgttgggcattttggctttttttaacatgcagttactgagctctagtgttggcattgaagataagaaaatggccttgaacagtttgatgtctttgatgaagttaatgggacccaaacatgtcagttctgtgagggtgaagatgatgaccacactgagaactggccttcgattcaaggatgattttcctgaattgtgttgcagagcttgggactgctttgttcgctgcctggatcatgcttgtctgggctcccttctcagtcatgtaatagtagctttgttacctcttatacacatccagcctaaagaaactgcagctatcttccactacctcataattgaaaacagggatgctgtgcaagattttcttcatgaaatatattttttacctgatcatccagaattaaaaaagataaaagccgttctccaggaatacagaaaggagacctctgagagcactgatcttcagacaactcttcagctctctatgaaggccattcaacatgaaaatgtcgatgttcgtattcatgctcttacaagcttgaaggaaaccttgtataaaaatcaggaaaaactgataaagtatgcaacagacagtgaaacagtagaacctattatctcacagttggtgacagtgcttttgaaaggttgccaagatgcaaactctcaagctcggttgctctgtggggaatgtttaggggaattgggggcgatagatccaggtcgattagatttctcaacaactgaaactcaaggaaaagattttacatttgtgactggagtagaagattcaagctttgcctatggattattgatggagctaacaagagcttaccttgcgtatgctgataatagccgagctcaagattcagctgcctatgccattcaggagttgctttctatttatgactgtagagagatggagaccaacggcccaggtcaccaattgtggaggagatttcctgagcatgttcgggaaatactagaacctcatctaaataccagatacaagagttctcagaagtcaaccgattggtctggagtaaagaagccaatttacttaagtaaattgggtagtaactttgcagaatggtcagcatcttgggcaggttatcttattacaaaggttcgacatgatcttgccagtaaaattttcacctgctgtagcattatgatgaagcatgatttcaaagtgaccatctatcttcttccacatattctggtgtatgtcttactgggttgtaatcaagaagatcagcaggaggtttatgcagaaattatggcagttctaaagcatgacgatcagcataccataaatacccaagacattgcatctgatctgtgtcaactcagtacacagactgtgttctccatgcttgaccatctcacacagtgggcaaggcacaaatttcaggcactgaaagctgagaaatgtccacacagcaaatcaaacagaaataaggtagactcaatggtatctactgtggattatgaagactatcagagtgtaacccgttttctagacctcataccccaggatactctggcagtagcttcctttcgctccaaagcatacacacgagctgtaatgcactttgaatcatttattacagaaaagaagcaaaatattcaggaacatcttggatttttacagaaattgtatgctgctatgcatgaacctgatggagtggccggagtcagtgcaattagaaaggcagaaccatctctaaaagaacagatccttgaacatgaaagccttggcttgctgagggatgccactgcttgttatgacagggctattcagctagaaccagaccagatcattcattatcatggtgtagtaaagtccatgttaggtcttggtcagctgtctactgttatcactcaggtgaatggagtgcatgctaacaggtccgagtggacagatgaattaaacacgtacagagtggaagcagcttggaaattgtcacagtgggatttggtggaaaactatttggcagcagatggaaaatctacaacatggagtgtcagactgggacagctattattatcagccaaaaaaagagatatcacagctttttatgactcactgaaactagtgagagcagaacaaattgtacctctttcagctgcaagctttgaaagaggctcctaccaacgaggatatgaatatattgtgagattgcacatgttatgtgagttggagcatagcatcaaaccacttttccagcattctccaggtgacagttctcaagaagattctctaaactgggtagctcgactagaaatgacccagaattcctacagagccaaggagcctatcctggctctccggagggctttactaagcctcaacaaaagaccagattacaatgaaatggttggagaatgctggctgcagagtgccagggtagctagaaaggctggtcaccaccagacagcctacaatgctctccttaatgcaggggaatcacgactcgctgaactgtacgtggaaagggcaaagtggctctggtccaagggtgatgttcaccaggcactaattgttcttcaaaaaggtgttgaattatgttttcctgaaaatgaaaccccacctgagggtaagaacatgttaatccatggtcgagctatgctactagtgggccgatttatggaagaaacagctaactttgaaagcaatgcaattatgaaaaaatataaggatgtgaccgcgtgcctgccagaatgggaggatgggcatttttaccttgccaagtactatgacaaattgatgcccatggtcacagacaacaaaatggaaaagcaaggtgatctcatccggtatatagttcttcattttggcagatctctacaatatggaaatcagttcatatatcagtcaatgccacgaatgttaactctatggcttgattatggtacaaaggcatatgaatgggaaaaagctggccgctccgatcgtgtacaaatgaggaatgatttgggtaaaataaacaaggttatcacagagcatacaaactatttagctccatatcaatttttgactgctttttcacaattgatctctcgaatttgtcattctcacgatgaagtttttgttgtcttgatggaaataatagccaaagtatttctagcctatcctcaacaagcaatgtggatgatgacagctgtgtcaaagtcatcttatcccatgcgtgtgaacagatgcaaggaaatcctcaataaagctattcatatgaaaaaatccttagagaagtttgttggagatgcaactcgcctaacagataagcttctagaattgtgcaataaaccggttgatggaagtagttccacattaagcatgagcactcattttaaaatgcttaaaaagctggtagaagaagcaacatttagtgaaatcctcattcctctacaatcagtcatgatacctacacttccatcaattctgggtacccatgctaaccatgctagccatgaaccatttcctggacattgggcctatattgcagggtttgatgatatggtggaaattcttgcttctcttcagaaaccaaagaagatttctttaaaaggctcagatggaaagttctacatcatgatgtgtaagccaaaagatgacctgagaaaggattgtagactaatggaattcaattccttgattaataagtgcttaagaaaagatgcagagtctcgtagaagagaacttcatattcgaacatatgcagttattccactaaatgatgaatgtgggattattgaatgggtgaacaacactgctggtttgagacctattctgaccaaactatataaagaaaagggagtgtatatgacaggaaaagaacttcgccagtgtatgctaccaaagtcagcagctttatctgaaaaactcaaagtattccgagaatttctcctgcccaggcatcctcctatttttcatgagtggtttctgagaacattccctgatcctacatcatggtacagtagtagatcagcttactgccgttccactgcagtaatgtcaatggttggttatattctggggcttggagaccgtcatggtgaaaatattctctttgattctttgactggtgaatgcgtacatgtagatttcaattgtcttttcaataagggagaaacctttgaagttccagaaattgtgccatttcgcctgactcataatatggttaatggaatgggtcctatgggaacagagggtctttttcgaagagcatgtgaagttacaatgaggctgatgcgtgatcagcgagagcctttaatgagtgtcttaaagacttttctacatgatcctcttgtggaatggagtaaaccagtgaaagggcattccaaagcgccactgaatgaaactggagaagttgtcaatgaaaaggccaagacccatgttcttgacattgagcagcgactacaaggtgtaatcaagactcgaaatagagtgacaggactgccgttatctattgaaggacatgtgcattaccttatacaagaagctactgatgaaaacttactatgccagatgtatcttggttggactccatatatgtgaaatgaaattatgtaaaagaatatgttaataatctaaaagtaatgcatttggtatgaatctgtggttgtatctgttcaattctaaagtacaacataaatttacgttctcagcaactgttatttctctctgatcattaattatatgtaaaataatatacattcagttattaagaaataaactgctttcttaataaaaaaaaaaaaaaaaaaaaaaaaaaaaaaaaaa

SEQ ID NO: 2 - DNA, 4739 bp, Homo sapiens
ggggagataggtaggagtagcgtggtaagggcgatgagtgtgggccgggcgggagtgcggcgagagccggctggctgagcttagcgtccgaggaggcggcggcggcggcggcggcagcggcggcggcggggctgtggggcggtgcggaagcgagaggcgaggagcgcgcgggccgtggccagagtctggcggcggcctggcggagcggagagcagcgcccgcgcctcgccgtgcggaggagccccgcacacaatagcggcgcgcgcagcccgcgcccttccccccggcgcgccccgccccgcgcgccgagcgccccgctccgcctcacctgccaccagggagtgggcgggcattgttcgccgccgccgccgccgcgcggggccatgggggccgcccggcgcccggggccgggcctggcgaggccgccgcgccgccgctgagacgggccccgcgcgcagcccggcggcgcaggtaaggccggccgcgccatggtggacccggtgggcttcgcggaggcgtggaaggcgcagttcccggactcagagcccccgcgcatggagctgcgctcagtgggcgacatcgagcaggagctggagcgctgcaaggcctccattcggcgcctggagcaggaggtgaaccaggagcgcttccgcatgatctacctgcagacgttgctggccaaggaaaagaagagctatgaccggcagcgatggggcttccggcgcgcggcgcaggcccccgacggcgcctccgagccccgagcgtccgcgtcgcgcccgcagccagcgcccgccgacggagccgacccgccgcccgccgaggagcccgaggcccggcccgacggcgagggttctccgggtaaggccaggcccgggaccgcccgcaggcccggggcagccgcgtcgggggaacgggacgaccggggaccccccgccagcgtggcggcgctcaggtccaacttcgagcggatccgcaagggccatggccagcccggggcggacgccgagaagcccttctacgtgaacgtcgagtttcaccacgagcgcggcctggtgaaggtcaacgacaaagaggtgtcggaccgcatcagctccctgggcagccaggccatgcagatggagcgcaaaaagtcccagcacggcgcgggctcgagcgtgggggatgcatccaggcccccttaccggggacgctcctcggagagcagctgcggcgtcgacggcgactacgaggacgccgagttgaacccccgcttcctgaaggacaacctgatcgacgccaatggcggtagcaggcccccttggccgcccctggagtaccagccctaccagagcatctacgtcgggggcatgatggaaggggagggcaagggcccgctcctgcgcagccagagcacctctgagcaggagaagcgccttacctggccccgcaggtcctactccccccggagttttgaggattgcggaggcggctataccccggactgcagctccaatgagaacctcacctccagcgaggaggacttctcctctggccagtccagccgcgtgtccccaagccccaccacctaccgcatgttccgggacaaaagccgctctccctcgcagaactcgcaacagtccttcgacagcagcagtccccccacgccgcagtgccataagcggcaccggcactgcccggttgtcgtgtccgaggccaccatcgtgggcgtccgcaagaccgggcagatctggcccaacgatggcgagggcgccttccatggagacgcagatggctcgttcggaacaccacctggatacggctgcgctgcagaccgggcagaggagcagcgccggcaccaagatgggctgccctacattgatgactcgccctcctcatcgccccacctcagcagcaagggcaggggcagccgggatgcgctggtctcgggagccctggagtccactaaagcgagtgagctggacttggaaaagggcttggagatgagaaaatgggtcctgtcgggaatcctggctagcgaggagacttacctgagccacctggaggcactgctgctgcccatgaagcctttgaaagccgctgccaccacctctcagccggtgctgacgagtcagcagatcgagaccatcttcttcaaagtgcctgagctctacgagatccacaaggagttctatgatgggctcttcccccgcgtgcagcagtggagccaccagcagcgggtgggcgacctcttccagaagctggccagccagctgggtgtgtaccgggccttcgtggacaactacggagttgccatggaaatggctgagaagtgctgtcaggccaatgctcagtttgcagaaatctccgagaacctgagagccagaagcaacaaagatgccaaggatccaacgaccaagaactctctggaaactctgctctacaagcctgtggaccgtgtgacgaggagcacgctggtcctccatgacttgctgaagcacactcctgccagccaccctgaccaccccttgctgcaggacgccctccgcatctcacagaacttcctgtccagcatcaatgaggagatcacaccccgacggcagtccatgacggtgaagaagggagagcaccggcagctgctgaaggacagcttcatggtggagctggtggagggggcccgcaagctgcgccacgtcttcctgttcaccgagctgcttctctgcaccaagctcaagaagcagagcggaggcaaaacgcagcagtatgactgcaaatggtacattccgctcacggatctcagcttccagatggtggatgaactggaggcagtgcccaacatccccctggtgcccgatgaggagctggacgctttgaagatcaagatctcccagatcaagagtgacatccagagagagaagagggcgaacaagggcagcaaggctacggagaggctgaagaagaagctgtcggagcaggagtcactgctgctgcttatgtctcccagcatggccttcagggtgcacagccgcaacggcaagagttacacgttcctgatctcctctgactatgagcgtgcagagtggagggagaacatccgggagcagcagaagaagtgtttcagaagcttctccctgacatccgtggagctgcagatgctgaccaactcgtgtgtgaaactccagactgtccacagcattccgctgaccatcaataaggaagatgatgagtctccggggctctatgggtttctgaatgtcatcgtccactcagccactggatttaagcagagttcaaatctgtactgcaccctggaggtggattcctttgggtattttgtgaataaagcaaagacgcgcgtctacagggacacagctgagccaaactggaacgaggaatttgagatagagctggagggctcccagaccctgaggatactgtgctatgaaaagtgttacaacaagacgaagatccccaaggaggacggcgagagcacggacagactcatggggaagggccaggtccagctggacccgcaggccctgcaggacagagactggcagcgcaccgtcatcgccatgaatgggatcgaagtaaagctctcggtcaagttcaacagcagggagttcagcttgaagaggatgccgtcccgaaaacagacaggggtcttcggagtcaagattgctgtggtcaccaagagagagaggtccaaggtgccctacatcgtgcgccagtgcgtggaggagatcgagcgccgaggcatggaggaggtgggcatctaccgcgtgtccggtgtggccacggacatccaggcactgaaggcagccttcgacgtcaataacaaggatgtgtcggtgatgatgagcgagatggacgtgaacgccatcgcaggcacgctgaagctgtacttccgtgagctgcccgagcccctcttcactgacgagttctaccccaacttcgcagagggcatcgctctttcagacccggttgcaaaggagagctgcatgctcaacctgctgctgtccctgccggaggccaacctgctcaccttccttttccttctggaccacctgaaaagggtggcagagaaggaggcagtcaataagatgtccctgcacaacctcgccacggtctttggccccacgctgctccggccctccgagaaggagagcaagctccctgccaaccccagccagcctatcaccatgactgacagctggtccttggaggtcatgtcccaggtccaggtgctgctgtacttcctgcagctggaggccatccctgccccggacagcaagagacagagcatcctgttctccaccgaagtctaaaggtcccagtccatctcctggaggcagacagatggcctggaaacctctggctaatcgggccatccgtagagcgggaaccttcctgaggtgtccttgggccacccccaagtgttgggccatctgccaagagacagcgacccaaagccgaaggacaggtggcctgggcagatctcgcccaggtctgggagccccaggctggcctcagactgtggttttttatgtggccacccgagggcgccccaagccagttcatctcagagtccaggcctgaccctgggagacagggtgaagggagtgatttttatgaacttaacttagagtctaaaagatttctactggatcacttgtcaagatgcgccctctctggggagaagggaacgtgaccggattccctcactgttgtatcttgaataaacgctgctgcttcatcctgtg

SEQ ID NO: 3 - DNA, 3702 bp, Homo sapiens
gtttgttagggagtcgtgtgcgtgccttggtcgcttctgtagctccgagggcaggttgcggaagaaagcccaggcggtctgtggcccagaggaaaggcctgcagcaggacgaggacctgagccaggaatgcaggatggcggcggtgaagaaggaagggggtgctctgagtgaagccatgtccctggagggagatgaatgggaactgagtaaagaaaatgtacaacctttaaggcaagggcggatcatgtccacgcttcagggagcactggcacaagaatctgcctgtaacaatactcttcagcagcagaaacgggcatttgaatatgaaattcgattttacactggaaatgaccctctggatgtttgggataggtatatcagctggacagagcagaactatcctcaaggtgggaaggagagtaatatgtcaacgttattagaaagagctgtagaagcactacaaggagaaaaacgatattatagtgatcctcgatttctcaatctctggcttaaattagggcgtttatgcaatgagcctttggatatgtacagttacttgcacaaccaagggattggtgtttcacttgctcagttctatatctcatgggcagaagaatatgaagctagagaaaactttaggaaagcagatgcgatatttcaggaagggattcaacagaaggctgaaccactagaaagactacagtcccagcaccgacaattccaagctcgagtgtctcggcaaactctgttggcacttgagaaagaagaagaggaggaagtttttgagtcttctgtaccacaacgaagcacactagctgaactaaagagcaaagggaaaaagacagcaagagctccaatcatccgtgtaggaggtgctctcaaggctccaagccagaacagaggactccaaaatccatttcctcaacagatgcaaaataatagtagaattactgtttttgatgaaaatgctgatgaggcttctacagcagagttgtctaagcctacagtccagccatggatagcaccccccatgcccagggccaaagagaatgagctgcaagcaggcccttggaacacaggcaggtccttggaacacaggcctcgtggcaatacagcttcactgatagctgtacccgctgtgcttcccagtttcactccatatgtggaagagactgcacaacagccagttatgacaccatgtaaaattgaacctagtataaaccacatcctaagcaccagaaagcctggaaaggaagaaggagattctctacaaagggttcagagccatcagcaagcgtctgaggagaagaaagagaagatgatgtattgtaaggagaagatttatgcaggagtaggggaattctcctttgaagaaattcgggctgaagttttccggaagaaattaaaagagcaaagggaagccgagctattgaccagtgcagagaagagagcagaaatgcagaaacagattgaagagatggagaagaagctaaaagaaatccaaactactcagcaagaaagaacaggtgatcagcaagaagagacgatgcctacaaaggagacaactaaactgcaaattgcttccgagtctcagaaaataccaggaatgactctatccagttctgtttgtcaagtaaactgttgtgccagagaaacttcacttgcggagaacatttggcaggaacaacctcattctaaaggtcccagtgtacctttctccatttttgatgagtttcttctttcagaaaagaagaataaaagtcctcctgcagatcccccacgagttttagctcaacgaagaccccttgcagttctcaaaacctcagaaagcatcacctcaaatgaagatgtgtctccagatgtttgtgatgaatttacaggaattgaacccttgagcgaggatgccattatcacaggcttcagaaatgtaacaatttgtcctaacccagaagacacttgtgactttgccagagcagctcgttttgtatccactccttttcatgagataatgtccttgaaggatctcccttctgatcctgagagactgttaccggaagaagatctagatgtaaagacctctgaggaccagcagacagcttgtggcactatctacagtcagactctcagcatcaagaagctgagcccaattattgaagacagtcgtgaagccacacactcctctggcttctctggttcttctgcctcggttgcaagcacctcctccatcaaatgtcttcaaattcctgagaaactagaacttactaatgagacttcagaaaaccctactcagtcaccatggtgttcacagtatcgcagacagctactgaagtccctaccagagttaagtgcctctgcagagttgtgtatagaagacagaccaatgcctaagttggaaattgagaaggaaattgaattaggtaatgaggattactgcattaaacgagaatacctaatatgtgaagattacaagttattctgggtggcgccaagaaactctgcagaattaacagtaataaaggtatcttctcaacctgtcccatgggacttttatatcaacctcaagttaaaggaacgtttaaatgaagattttgatcatttttgcagctgttatcaatatcaagatggctgtattgtttggcaccaatatataaactgcttcacccttcaggatcttctccaacacagtgaatatattacccatgaaataacagtgttgattatttataaccttttgacaatagtggagatgctacacaaagcagaaatagtccatggtgacttgagtccaaggtgtctgattctcagaaacagaatccacgatccctatgattgtaacaagaacaatcaagctttgaagatagtggacttttcctacagtgttgaccttagggtgcagctggatgtttttaccctcagcggctttcggactgtacagatcctggaaggacaaaagatcctggctaactgttcttctccctaccaggtagacctgtttggtatagcagatttagcacatttactattgttcaaggaacacctacaggtcttctgggatgggtccttctggaaacttagccaaaatatttctgagctaaaagatggtgaattgtggaataaattctttgtgcggattctgaatgccaatgatgaggccacagtgtctgttcttggggagcttgcagcagaaatgaatggggtttttgacactacattccaaagtcacctgaacaaagccttatggaaggtagggaagttaactagtcctggggctttgctctttcagtgagctaggcaatcaagtctcacagattgctgcctcagagcaatggttgtattgtggaacactgaaactgtatgtgctgtaatttaatttaggacacatttagatgcactaccattgctgttctactttttggtacaggtatattttgacgtcactgatattttttatacagtgatatacttactcatggccttgtctaacttttgtgaagaactattttattctaaacagactcattacaaatggttaccttgttatttaacccatttgtctctacttttccctgtacttttcccatttgtaatttgtaaaatgttctcttatgatcaccatgtattttgtaaataataaaatagtatctgttaaaaaaaaaaaaaaaaaaaaaaaaaaaaaaaaaaaaaaaaaaaaaaaaaaaaaa

SEQ ID NO: 4 - DNA, 1235 bp, Homo sapiens
ggggggggggggcacttggcttcaaagctggctcttggaaattgagcggagagcgacgcggttgttgtagctgccgctgcggccgccgcggaataataagccgggatctaccatacccattgactaactatggaagattataccaaaatagagaaaattggagaaggtacctatggagttgtgtataagggtagacacaaaactacaggtcaagtggtagccatgaaaaaaatcagactagaaagtgaagaggaaggggttcctagtactgcaattcgggaaatttctctattaaaggaacttcgtcatccaaatatagtcagtcttcaggatgtgcttatgcaggattccaggttatatctcatctttgagtttctttccatggatctgaagaaatacttggattctatccctcctggtcagtacatggattcttcacttgttaagagttatttataccaaatcctacaggggattgtgttttgtcactctagaagagttcttcacagagacttaaaacctcaaaatctcttgattgatgacaaaggaacaattaaactggctgattttggccttgccagagcttttggaatacctatcagagtatatacacatgaggtagtaacactctggtacagatctccagaagtattgctggggtcagctcgttactcaactccagttgacatttggagtataggcaccatatttgctgaactagcaactaagaaaccacttttccatggggattcagaaattgatcaactcttcaggattttcagagctttgggcactcccaataatgaagtgtggccagaagtggaatctttacaggactataagaatacatttcccaaatggaaaccaggaagcctagcatcccatgtcaaaaacttggatgaaaatggcttggatttgctctcgaaaatgttaatctatgatccagccaaacgaatttctggcaaaatggcactgaatcatccatattttaatgatttggacaatcagattaagaagatgtagctttctgacaaaaagtttccatatgttatgtcaacagatagttgtgtttttattgttaactcttgtctatttttgtcttatatatatttctttgttatcaaacttcagctgtacttcgtcttctaatttcaaaaatataacttaaaaatgtaaatattctatatgaatttaaatataattctgtaaatgtgaaaaaaaaaaaaaaaaaaaaa

SEQ ID NO: 5 - DNA, 2525 bp, Homo sapiens
atacaggaagtgacgatacttttggcgcgcgcggttgctgtttcttctctggctccgggaccggcggcggcggcggcggcacgggcggcggcgtagggtgttttaactcaaatgggtgatgaaaaggactcttggaaagtgaaaactttagatgaaattcttcaggaaaagaaacgaaggaaggaacaagaggagaaagcagagataaaacgcttaaaaaattctgatgaccgggattccaagcgggattcccttgaggagggggagctgagagatcaccgcatggagatcacaataaggaactccccgtatagaagagaagactctatggaagacagaggagaagaagatgattctttggccatcaaaccaccccagcaaatgtctcggaaagaaaaagttcatcacagaaaagatgaaaagagaaaagagaaacgtaggcatcgtagccattcagcagaaggggggaagcatgctagagtgaaagaaaaagaaagagagcacgaacgtcggaaacgacatcgagaagaacaggataaagctcgccgggaatgggaaagacagaagagaagggaaatggcaagggagcattccaggagagaaagggaccgcttggagcagttagaaaggaagcgggagcgggagcgcaagatgcgggagcagcagaaggagcagcgggagcagaaggagcgcgagcggcgggcggaggagcggcgcaaggagcgggaggcccgcagggaagtgtctgcacatcaccgaacgatgagagaggactacagcgacaaagtgaaagccagccactggagtcgcagcccgcctcggccgccgcgggagcggttcgagttgggagacggccggaagccaggtgaggccaggccggcgcgtgcgcagaagccagcacagttaaaagaagagaaaatggaagaaagggacctgctgtccgacttacaggacatcagcgacagcgagaggaagaccagctcggccgagtcctcgtcagcagaatcaggctcaggttctgaggaagaagaggaggaggaggaagaggaggaggaggaagggagcaccagtgaagaatcagaggaggaggaggaggaagaggaagaggaggaggaggagaccggcagcaactctgaggaggcatcagagcagtctgccgaagaagtaagtgaggaagaaatgagtgaagatgaagaacgagaaaatgaaaaccacctcttggttgttccagagtcacggttcgaccgagattccggggagagtgaagaagcagaggaagaagtgggtgagggaacgccgcagagcagcgccctgacagagggcgactatgtgcccgactcccctgccctgtcgcccatcgagctcaagcaggagctgcccaagtacctgccggccctgcagggctgccggagcgtcgaggagttccagtgcctgaacaggatcgaggagggcacctatggagtggtctacagagcaaaagacaagaaaacagatgaaattgtggctctaaagcggctgaagatggagaaggagaaggagggcttcccgatcacgtcgctgagggagatcaacaccatcctcaaggcccagcatcccaacatcgtcaccgttagagagattgtggtgggcagcaacatggacaagatctacatcgtgatgaactatgtggagcacgacctcaagagcctgatggagaccatgaaacagcccttcctgccaggggaggtgaagaccctgatgatccagctgctgcgtggggtgaaacacctgcacgacaactggatcctgcaccgtgacctcaagacgtccaacctgctgctgagccacgccggcatcctcaaggtgggtgacttcgggctggcgcgggagtacggatcccctctgaaggcctacaccccggtcgtggtgaccctgtggtaccgcgccccagagctgctgcttggtgccaaggaatactccacggccgtggacatgtggtcagtgggttgcatcttcggggagctgctgactcagaagcctctgttccccgggaagtcagaaatcgatcagatcaacaaggtgttcaaggatctggggacccctagtgagaaaatctggcccggctacagcgagctcccagcagtcaagaagatgaccttcagcgagcacccctacaacaacctccgcaagcgcttcggggctctgctctcagaccagggcttcgacctcatgaacaagttcctgacctacttccccgggaggaggatcagcgctgaggacggcctcaagcatgagtatttccgcgagacccccctccccatcgacccctccatgttccccacgtggcccgccaagagcgagcagcagcgtgtgaagcggggcaccagcccgaggccccctgagggaggcctgggctacagccagctgggtgacgacgacctgaaggagacgggcttccaccttaccaccacgaaccagggggcctctgccgcgggccccggcttcagcctcaagttctgaaggtcagagtggaccccgtcatgggg

SEQ ID NO: 6 - DNA, 3178 bp, Homo sapiens
gatctcttggagacggcgacccaggcatctggggagccacagaagtcgtactcccttaaaccctgctttgctccccctgtggatgtaaccccttagctggcattttgcatctcaattggcttgtgatggaggcgtctttggggattcagatggatgagccaatggctttttctccccagcgtgaccggtttcaggctgaaggctctttaaaaaaaaacgagcagaattttaaacttgcaggtgttaaaaaagatattgagaagctttatgaagctgtaccacagcttagtaatgtgtttaagattgaggacaaaattggagaaggcactttcagctctgtttatttggccacagcacagttacaagtaggacctgaagagaaaattgctctaaaacacttgattccaacaagtcatcctataagaattgcagctgaacttcagtgcctaacagtggctggggggcaagataatgtcatgggagttaaatactgctttaggaagaatgatcatgtagttattgctatgccatatctggagcatgagtcgtttttggacattctgaattctctttcctttcaagaagtacgggaatatatgcttaatctgttcaaagctttgaaacgcattcatcagtttggtattgttcaccgtgatgttaagcccagcaattttttatataataggcgcctgaaaaagtatgccttggtagactttggtttggcccaaggaacccatgatacgaaaatagagcttcttaaatttgtccagtctgaagctcagcaggaaaggtgttcacaaaacaaatcccacataatcacaggaaacaagattccactgagtggcccagtacctaaggagctggatcagcagtccaccacaaaagcttctgttaaaagaccctacacaaatgcacaaattcagattaaacaaggaaaagacggaaaggagggatctgtaggcctttctgtccagcgctctgtttttggagaaagaaatttcaatatacacagctccatttcacatgagagccctgcagtgaaactcatgaagcagtcaaagactgtggatgtactgtctagaaagttagcaacaaaaaagaaggctatttctacgaaagttatgaatagtgctgtgatgaggaaaactgccagttcttgcccagctagcctgacctgtgactgctatgcaacagataaagtttgtagtatttgcctttcaaggcgtcagcaggttgcccctagggcaggtacaccaggattcagagcaccagaggtcttgacaaagtgccccaatcaaactacagcaattgacatgtggtctgcaggtgtcatatttctttctttgcttagtggacgatatccattttataaagcaagtgatgatttaactgctttggcccaaattatgacaattaggggatccagagaaactatccaagctgctaaaacttttgggaaatcaatattatgtagcaaagaagttccagcacaagacttgagaaaactctgtgagagactcaggggtatggattctagcactcccaagttaacaagtgatatacaagggcatgcttctcatcaaccagctatttcagagaagactgaccataaagcttcttgcctcgttcaaacacctccaggacaatactcagggaattcatttaaaaagggggatagtaatagctgtgagcattgttttgatgagtataataccaatttagaaggctggaatgaggtacctgatgaagcttatgacctgcttgataaacttctagatctaaatccagcttcaagaataacagcagaagaagctttgttgcatccattttttaaagatatgagcttgtgataatggatcttcatttaatgtttactgttatgaggtagaataaaaaagaatactttgtaatagccacaagttcttgtttagagaccagagcaggattaataatttattttaacattttagtgtttggtggcacattctaaaatatagattaagaatacttaaaatgcctgggatagttcttgggactaacaacatgatcttctttgagttaaacctacctaagtagattttaggtgggttcctattaggtcagatttttagcttccctaattacctttcactgacatacagaaaaaggagcagttttagttttaattaattaaaattaacagatgtgatgaggattaaatgaatcaaaagacttaatttgtagattcttttagagttatgagctaggtatagtttggggaaactcaacctggtgctggtgctcttaacaattttgtaaataaagaagataatttccttttctagaggtacatattaggccttttatgaacactaaaacaatgaggaaatgttggtcatggggcaaagtatcacttaaaattgaattcatccatttttaaaaaacacttcatgaaagcattctggtgtgaattgccatttttttcttactggcttctcaattttcttccttctctgcccctacctaaaacattctcctcggaaattacatggtgctgaccacaaagtttctggatgttttattaaatattgtacgtgtttacagttgggaatttaaaataatacatacactggttgataaagggaagctgcaggaccaaggtgaagattgatagtccaaatgcttttcttttttgagttgtatattttttcacaccatcttagatataattaggtagctgctgaaaggaaaagtgaatacagaattgacggtattattggagatttttcctctgcgtagagccatccagatctctgtatcctgttttgactaagtcttaggtgggttgggaagacagataatgaagtaggcaaagagaaaaggacccaagatagaggtttatattcagaaatggtatatatcaatgacagcatatcaaacttcctatgggaaaaagtctggtgggtggtcagctgacagatttcccatttagtagtcatagaatacagaaatagtttagggacatgtattcattttgttattttgagcattgataggtcagtatatctacctaatctgtttggtaagtataggatatataaaccattaccattgatctgtcttatgccataatcttaaaaaaaaattgaatgctcttgaatttgtatattcaataaagttatccttttataaaaaaaaa

SEQ ID NO: 7 - DNA, 2328 bp, Homo sapiens
ggaagcagggcggggcctctggtggcggtcgggaactcggtgggaggcggcaacattgtttcaagttggccaaattgacaagagcgagaggtatactgcgttccatcccgacccggggccacggtactgggccctgtttccccctcctcggcccccgagagccagggtccgccttctgcagggttcccaggcccccgctccagggccgggctgacccgactcgctggcgcttcatggagaacttccaaaaggtggaaaagatcggagagggcacgtacggagttgtgtacaaagccagaaacaagttgacgggagaggtggtggcgcttaagaaaatccgcctggacactgagactgagggtgtgcccagtactgccatccgagagatctctctgcttaaggagcttaaccatcctaatattgtcaagctgctggatgtcattcacacagaaaataaactctacctggtttttgaatttctgcaccaagatctcaagaaattcatggatgcctctgctctcactggcattcctcttcccctcatcaagagctatctgttccagctgctccagggcctagctttctgccattctcatcgggtcctccaccgagaccttaaacctcagaatctgcttattaacacagagggggccatcaagctagcagactttggactagccagagcttttggagtccctgttcgtacttacacccatgaggtggtgaccctgtggtaccgagctcctgaaatcctcctgggctgcaaatattattccacagctgtggacatctggagcctgggctgcatctttgctgagatggtgactcgccgggccctattccctggagattctgagattgaccagctcttccggatctttcggactctggggaccccagatgaggtggtgtggccaggagttacttctatgcctgattacaagccaagtttccccaagtgggcccggcaagattttagtaaagttgtacctcccctggatgaagatggacggagcttgttatcgcaaatgctgcactacgaccctaacaagcggatttcggccaaggcagccctggctcaccctttcttccaggatgtgaccaagccagtaccccatcttcgactctgatagccttcttgaagcccccagccctaatctcaccctctcctccagtgtgggcttgaccaggcttggccttgggctatttggactcaggtgggccctctgaacttgccttaaacactcaccttctagtcttggccagccaactctgggaatacaggggtgaaaggggggaaccagtgaaaatgaaaggaagtttcagtattagatgcacttaagttagcctccaccaccctttcccccttctcttagttattgctgaagagggttggtataaaaataattttaaaaaagccttcctacacgttagatttgccgtaccaatctctgaatgccccataattattatttccagtgtttgggatgaccaggatcccaagcctcctgctgccacaatgtttataaaggccaaatgatagcgggggctaagttggtgcttttgagaaccaagtaaaacaaaaccactgggaggagtctattttaaagaattcggttgaaaaaatagatccaatcagtttataccctagttagtgttttgcctcacctaataggctgggagactgaagactcagcccgggtggggctgcagaaaaatgattggccccagtccccttgtttgtcccttctacaggcatgaggaatctgggaggccctgagacagggattgtgcttcattccaatctattgcttcaccatggccttatgaggcaggtgagagatgtttgaatttttctcttccttttagtattcttagttgttcagttgccaaggatccctgatcccattttcctctgacgtccacctcctaccccataggagttagaagttagggtttaggcatcattttgagaatgctgacactttttcagggctgtgattgagtgagggcatgggtaaaaatatttctttaaaagaaggatgaacaattatatttatatttcaggttatatccaatagtagagttggcttttttttttttttttttggtcatagtgggtggatttgttgccatgtgcaccttggggttttgtaatgacagtgctaaaaaaaaaaaagcatttttttttatgatttgtctctgtcacccttgtccttgagtgctcttgctattaacgttatttgtaatttagtttgtagctcattaaaaaaatgtgcctagttttataaaaaaaaaaaaaaaaaaaaaaaaaaaaaaaaaaaaaaa

SEQ ID NO: 8 - DNA, 1474 bp, Homo sapiens
agccctcccagtttccgcgcgcctctttggcagctggtcacatggtgagggtgggggtgagggggcctctctagcttgcggcctgtgtctatggtcgggccctctgcgtccagctgctccggaccgagctcgggtgtatggggccgtaggaaccggctccggggccccgataacgggccgcccccacagcaccccgggctggcgtgagggtctcccttgatctgagaatggctacctctcgatatgagccagtggctgaaattggtgtcggtgcctatgggacagtgtacaaggcccgtgatccccacagtggccactttgtggccctcaagagtgtgagagtccccaatggaggaggaggtggaggaggccttcccatcagcacagttcgtgaggtggctttactgaggcgactggaggcttttgagcatcccaatgttgtccggctgatggacgtctgtgccacatcccgaactgaccgggagatcaaggtaaccctggtgtttgagcatgtagaccaggacctaaggacatatctggacaaggcacccccaccaggcttgccagccgaaacgatcaaggatctgatgcgccagtttctaagaggcctagatttccttcatgccaattgcatcgttcaccgagatctgaagccagagaacattctggtgacaagtggtggaacagtcaagctggctgactttggcctggccagaatctacagctaccagatggcacttacacccgtggttgttacactctggtaccgagctcccgaagttcttctgcagtccacatatgcaacacctgtggacatgtggagtgttggctgtatctttgcagagatgtttcgtcgaaagcctctcttctgtggaaactctgaagccgaccagttgggcaaaatctttgacctgattgggctgcctccagaggatgactggcctcgagatgtatccctgccccgtggagcctttccccccagagggccccgcccagtgcagtcggtggtacctgagatggaggagtcgggagcacagctgctgctggaaatgctgacttttaacccacacaagcgaatctctgcctttcgagctctgcagcactcttatctacataaggatgaaggtaatccggagtgagcaatggagtggctgccatggaaggaagaaaagctgccatttcccttctggacactgagagggcaatctttgcctttatctctgaggctatggagggtcctcctccatctttctacagagattactttgctgccttaatgacattcccctcccacctctccttttgaggcttctccttctccttcccatttctctacactaaggggtatgttccctcttgtccctttccctacctttatatttggggtccttttttatacaggaaaaacaaaacaaagaaataatggtcttttttttttttttaaaaaaaaaaaaaaaaaaaaaaaaaaaaaaaa

SEQ ID NO: 9 - DNA, 983 bp, Homo sapiens
cgcaggggtcccccggccgccgcgatgcagaaatacgagaaactggaaaagattggggaaggcacctacggaactgtgttcaaggccaaaaaccgggagactcatgagatcgtggctctgaaacgggtgaggctggatgacgatgatgagggtgtgccgagttccgccctccgggagatctgcctactcaaggagctgaagcacaagaacatcgtcaggcttcatgacgtcctgcacagcgacaagaagctgactttggtttttgaattctgtgaccaggacctgaagaagtattttgacagttgcaatggtgacctcgatcctgagattgtaaagtcattcctcttccagctactaaaagggctgggattctgtcatagccgcaatgtgctacacagggacctgaagccccagaacctgctaataaacaggaatggggagctgaaattggctgattttggcctggctcgagcctttgggattcccgtccgctgttactcagctgaggtggtcacactgtggtaccgcccaccggatgtcctctttggggccaagctgtactccacgtccatcgacatgtggtcagccggctgcatctttgcagagctggccaatgctgggcggcctctttttcccggcaatgatgtcgatgaccagttgaagaggatcttccgactgctggggacgcccaccgaggagcagtggccctctatgaccaagctgccagactataagccctatccgatgtacccggccacaacatccctggtgaacgtcgtgcccaaactcaatgccacagggagggatctgctgcagaaccttctgaagtgtaaccctgtccagcgtatctcagcagaagaggccctgcagcacccctacttctccgacttctgtccgccctaggccccgggacccccgcctccaggctgggcctggcctatttaagccccctcttgagagggtgagacagtgggggtgcctgg

SEQ ID NO: 10 - DNA, 1097 bp, Homo sapiens
aaactcagaattttcgcgggctcggtgagcggttttatccctccggccggcaggctgggcgcagggggcgagcccccgcccggcgcgcagcagcaccatgggcacggtgctgtccctgtctcccagctaccggaaggccacgctgtttgaggatggcgcggccaccgtgggccactatacggccgtacagaacagcaagaacgccaaggacaagaacctgaagcgccactccatcatctccgtgctgccttggaagagaatcgtggccgtgtcggccaagaagaagaactccaagaaggtgcagcctaacagcagctaccagaacaacatcacgcacctcaacaatgagaacctgaagaagtcgctgtcgtgcgccaacctgtccacattcgcccagcccccaccggcccagccgcctgcacccccggccagccagctctcgggttcccagaccgggggctcctcctcagtcaagaaagcccctcaccctgccgtcacctccgcagggacgcccaaacgggtcatcgtccaggcgtccaccagtgagctgcttcgctgcctgggtgagtttctctgccgccggtgctaccgcctgaagcacctgtcccccacggaccccgtgctctggctgcgcagcgtggaccgctcgctgcttctgcagggctggcaggaccagggcttcatcacgccggccaacgtggtcttcctctacatgctctgcagggatgttatctcctccgaggtgggctcggatcacgagctccaggccgtcctgctgacatgcctgtacctctcctactcctacatgggcaacgagatctcctacccgctcaagcccttcctggtggagagctgcaaggaggccttttgggaccgttgcctctctgtcatcaacctcatgagctcaaagatgctgcagataaatgccgacccacactacttcacacaggtcttctccgacctgaagaacgagagcggccaggaggacaagaagcggctcctcctaggcctggatcggtgagcactgtagcctgcgtcatggctcaaggattcaatgcatttttaagaatttattattaaatcagttttgtgtacag

SEQ ID NO: 11 - DNA, 1427 bp, Homo sapiens
tgggtgttggaggctttaaggtagctttaaattcgtgttgtcctgggagctcgcccttttcggctggagtcgggctttacggcgccggatggctctggacgtgaagtctcgggcaaagcgttatgagaagctggacttccttggggagggacagtttgccaccgtttacaaggccagagataagaataccaaccaaattgtcgccattaagaaaatcaaacttggacatagatcagaagctaaagatggtataaatagaaccgccttaagagagataaaattattacaggagctaagtcatccaaatataattggtctccttgatgcttttggacataaatctaatattagccttgtctttgattttatggaaactgatctagaggttataataaaggataatagtcttgtgctgacaccatcacacatcaaagcctacatgttgatgactcttcaaggattagaatatttacatcaacattggatcctacatagggatctgaaaccaaacaacttgttgctagatgaaaatggagttctaaaactggcagattttggcctggccaaatcttttgggagccccaatagagcttatacacatcaggttgtaaccaggtggtatcgggcccccgagttactatttggagctaggatgtatggtgtaggtgtggacatgtgggctgttggctgtatattagcagagttacttctaagggttccttttttgccaggagattcagaccttgatcagctaacaagaatatttgaaactttgggcacaccaactgaggaacagtggccggacatgtgtagtcttccagattatgtgacatttaagagtttccctggaatacctttgcatcacatcttcagtgcagcaggagacgacttactagatctcatacaaggcttattcttatttaatccatgtgctcgaattacggccacacaggcactgaaaatgaagtatttcagtaatcggccagggccaacacctggatgtcagctgccaagaccaaactgtccagtggaaaccttaaaggagcaatcaaatccagctttggcaataaaaaggaaaagaacagaggccttagaacaaggaggattgcccaagaaactaattttttaaagagaacactggacaacattttactactgagggaaatagccaaaaaggcaaataatggaaaaatagtaaacattaagtaaatgctgtagaagtgagtttgtaaatattctacacatgtaaaatatgtaaaactatgggttatttttattaaatgtattttaaaataaaaatttaattctggtttttctgattagagtcccaaagtgagaaaagttcaatactcttgaaatgtagaattgaaaatgcattagggaaaacttaataaaaattattaccagttatttggaaaaaaaaaaaa

SEQ ID NO: 12 - DNA, 2042 bp, Homo sapiens
ggggccagtcgttcgccggaaagcatttgtctcccacctcatcataacaacaattaatttcctctggggcctgaggagggcagaatttcaaccttcggtgtgcttgggagtggcgattgtgatttacacgacaaaatgccgaggtgctcggtggagtcatggcagtgccctttgtggaagactgggacttggtgcaaaccctgggagaaggtgcctatggagaagttcaacttgctgtgaatagagtaactgaagaagcagtcgcagtgaagattgtagatatgaagcgtgccgtagactgtccagaaaatattaagaaagagatctgtatcaataaaatgctaaatcatgaaaatgtagtaaaattctatggtcacaggagagaaggcaatatccaatatttatttctggagtactgtagtggaggagagctttttgacagaatagagccagacataggcatgcctgaaccagatgctcagagattcttccatcaactcatggcaggggtggtttatctgcatggtattggaataactcacagggatattaaaccagaaaatcttctgttggatgaaagggataacctcaaaatctcagactttggcttggcaacagtatttcggtataataatcgtgagcgtttgttgaacaagatgtgtggtactttaccatatgttgctccagaacttctgaagagaagagaatttcatgcagaaccagttgatgtttggtcctgtggaatagtacttactgcaatgctcgctggagaattgccatgggaccaacccagtgacagctgtcaggagtattctgactggaaagaaaaaaaaacatacctcaacccttggaaaaaaatcgattctgctcctctagctctgctgcataaaatcttagttgagaatccatcagcaagaattaccattccagacatcaaaaaagatagatggtacaacaaacccctcaagaaaggggcaaaaaggccccgagtcacttcaggtggtgtgtcagagtctcccagtggattttctaagcacattcaatccaatttggacttctctccagtaaacagtgcttctagtgaagaaaatgtgaagtactccagttctcagccagaaccccgcacaggtctttccttatgggataccagcccctcatacattgataaattggtacaagggatcagcttttcccagcccacatgtcctgatcatatgcttttgaatagtcagttacttggcaccccaggatcctcacagaacccctggcagcggttggtcaaaagaatgacacgattctttaccaaattggatgcagacaaatcttatcaatgcctgaaagagacttgtgagaagttgggctatcaatggaagaaaagttgtatgaatcaggttactatatcaacaactgataggagaaacaataaactcattttcaaagtgaatttgttagaaatggatgataaaatattggttgacttccggctttctaagggtgatggattggagttcaagagacacttcctgaagattaaagggaagctgattgatattgtgagcagccagaaggtttggcttcctgccacatgatcggaccatcggctctggggaatcctggtgaatatagtgctgctatgttgacattattcttcctagagaagattatcctgtcctgcaaactgcaaatagtagttcctgaagtgttcacttccctgtttatccaaacatcttccaatttattttgtttgttcggcatacaaataatacctatatcttaattgtaagcaaaactttggggaaaggatgaatagaattcatttgattatttcttcatgtgtgtttagtatctgaatttgaaactcatctggtggaaaccaagtttcaggggacatgagttttccagcttttatacacacgtatctcatttttatcaaaacattttgtttaattcaaaaagtacatatttcttccatgttgatttaattctaagatgaaccaataaagacataattcttgcaaaaaaaaaaaaaaaaaaaaaaaaaa

SEQ ID NO: 13 - DNA, 5258 bp, Homo sapiens
gcagggcgagagccgatcagcggatcaccgagtctcgccaggtggtggagctggcagtgaaggagcacaaggctgagattctcgctctgcagcaggctctcaaagagcagaagctgaaggccgagagcctctctgacaagctcaatgacctggagaagaagcatgctatgcttgaaatgaatgcccgaagcttacagcagaagctggagactgaacgagagctcaaacagaggcttctggaagagcaagccaaattacagcagcagatggacctgcagaaaaatcacattttccgtctgactcaaggactgcaagaagctctagatcgggctgatctactgaagacagaaagaagtgacttggagtatcagctggaaaacattcaggttctctattctcatgaaaaggtgaaaatggaaggcactatttctcaacaaaccaaactcattgattttctgcaagccaaaatggaccaacctgctaaaaagaaaaaggttcctctgcagtacaatgagctgaagctggccctggagaaggagaaagctcgctgtgcagagctagaggaagcccttcagaagacccgcatcgagctccggtccgcccgggaggaagctgcccaccgcaaagcaacggaccacccacacccatccacgccagccaccgcgaggcagcagatcgccatgtccgccatcgtgcggtcgccagagcaccagcccagtgccatgagcctgctggccccgccatccagccgcagaaaggagtcttcaactccagaggaatttagtcggcgtcttaaggaacgcatgcaccacaatattcctcaccgattcaacgtaggactgaacatgcgagccacaaagtgtgctgtgtgtctggataccgtgcactttggacgccaggcatccaaatgtctcgaatgtcaggtgatgtgtcaccccaagtgctccacgtgcttgccagccacctgcggcttgcctgctgaatatgccacacacttcaccgaggccttctgccgtgacaaaatgaactccccaggtctccagaccaaggagcccagcagcagcttgcacctggaagggtggatgaaggtgcccaggaataacaaacgaggacagcaaggctgggacaggaagtacattgtcctggagggatcaaaagtcctcatttatgacaatgaagccagagaagctggacagaggccggtggaagaatttgagctgtgccttcccgacggggatgtatctattcatggtgccgttggtgcttccgaactcgcaaatacagccaaagcagatgtcccatacatactgaagatggaatctcacccgcacaccacctgctggcccgggagaaccctctacttgctagctcccagcttccctgacaaacagcgctgggtcaccgccttagaatcagttgtcgcaggtgggagagtttctagggaaaaagcagaagctgatgctaaactgcttggaaactccctgctgaaactggaaggtgatgaccgtctagacatgaactgcacgctgcccttcagtgaccaggtggtgttggtgggcaccgaggaagggctctacgccctgaatgtcttgaaaaactccctaacccatgtcccaggaattggagcagtcttccaaatttatattatcaaggacctggagaagctactcatgatagcaggagaagagcgggcactgtgtcttgtggacgtgaagaaagtgaaacagtccctggcccagtcccacctgcctgcccagcccgacatctcacccaacatttttgaagctgtcaagggctgccacttgtttggggcaggcaagattgagaacgggctctgcatctgtgcagccatgcccagcaaagtcgtcattctccgctacaacgaaaacctcagcaaatactgcatccggaaagagatagagacctcagagccctgcagctgtatccacttcaccaattacagtatcctcattggaaccaataaattctacgaaatcgacatgaagcagtacacgctcgaggaattcctggataagaatgaccattccttggcacctgctgtgtttgccgcctcttccaacagcttccctgtctcaatcgtgcaggtgaacagcgcagggcagcgagaggagtacttgctgtgtttccacgaatttggagtgttcgtggattcttacggaagacgtagccgcacagacgatctcaagtggagtcgcttacctttggcctttgcctacagagaaccctatctgtttgtgacccacttcaactcactcgaagtaattgagatccaggcacgctcctcagcagggacccctgcccgagcgtacctggacatcccgaacccgcgctacctgggccctgccatttcctcaggagcgatttacttggcgtcctcataccaggataaattaagggtcatttgctgcaagggaaacctcgtgaaggagtccggcactgaacaccaccggggcccgtccacctcccgcagcagccccaacaagcgaggcccacccacgtacaacgagcacatcaccaagcgcgtggcctccagcccagcgccgcccgaaggccccagccacccgcgagagccaagcacaccccaccgctaccgcgaggggcggaccgagctgcgcagggacaagtctcctggccgccccctggagcgagagaagtcccccggccggatgctcagcacgcggagagagcggtcccccgggaggctgtttgaagacagcagcaggggccggctgcctgcgggagccgtgaggaccccgctgtcccaggtgaacaaggtctgggaccagtcttcagtataaatctcagccagaaaaaccaactcctcatcttgatctgcaggaaaacaccaaacacactatggaactctgctgatggggacccaagcgcccacgtgctcagccaccctctggctcagcggggcccagacccacctcggcacggacacccctgtctccaggaggggcaggtggctgaggctcttcggagctgtcagcgcccggtgcctgccctgggcacctccctgcagtcatctctttgcactttgttactctttcaaagcattcacaaacttttgtacctagctctagcctgtaccagttagttcatcaaaggaaaccaaccgggatgctaactacaacatggttagaatcctaattagctactttaagatcctaggattggttggtttttcttttttttttctctttgtttctttcctttttttttttttttttttaagacaacagaattcttaatagatttgaatagcgacgtatttcctgttgtagtcatttttagctcgaccacatcatcaggtctttgccaccgaggcatagtgtagaacagtcccggtcagttggccaacctcccgcagccaagtaggttcatccttgttcctgttcattctcatagatggccctgctttccccagggtgacatcgtagccaaatgtttactgttttcattgccttttatggccttgacgacttcccctcccaccagctgagaatgtatggaggtcatcggggcctcagctcggaggcagtgacttggggccaagggacctcgagacgctttccttccccaccccccagcgtcatctccccagcctgctgttcccgctttccatatagctttggccaggaaagcatgcaatagacttgctcggagcccagcactcctgggtctcggggtcggggaggggacgggggcacccacttccttgtctgtgacggcgtgttgttccccactctgggatggggaagaggcccgtcgggagttctgcatggcagttcactgcatgtgctgcccccttgggttgctctgccaatgtattaataccatcccatagctcctgccaaatcgagaccctctgacgacttgccgactaactggccaccacaagctgcagtctgtagcactgaacaaacaaaaaacaaaacgctcaagccttacgaccagagaaggatttcagcaaaccaccacctcccactcagtgtcccctccaaacttcacacttccctgcctgcagaggatgactctgttcacacccaatccagcgcggttctaccccacgaaactgtgactttccaaatgagcctttccctagggctagacctaagaccaggaagtttgagaaagcagccgcagctcaactcttccagctccgccagggttgggaagtccttaggtgcagtgcggctcccactgggtctgcggaccctcctattagagtacgaaattcctggcaactggtacagaaccaacctagaggctttgcagttggcaagctaactcgcggccttatttctgcctttaatctcccacaaggcatctgttgctttgggtcctccacgactcttaggcccgcctcaacaacccaggcacctcctaggtaggctcaaaggtagacccgtttccaccgcagcaggtgaacatgaccgtgttttcaactgtgtccacagttcagatccctttccagattgcaacctggcctgcatcccagctccttcctgctcgtgtcttaacctaagtgctttcttgtttgaaacgcctacaaacctccatgtggtagctcctttggcaaatgtcctgctgtggcgttttatgtgttgcttggagtctgtggggtcgtactccctcccctcccgtccccagggcagatttgattgaatgtttgctgaagttttgtctcttggtccacagtatttggaaaggtcactgaaaatgggtctttcagtcttggcatttcatttaggatctccatgagaaatgggcttcttgagccctgaaaatgtatattgtgtgtctcatctgtgaactgctttctgctatatagaactagctcaaaagactgtacatatttacaagaaactttatattcgtaaaaaaaaaaagaggaaattgaattggtttctacttttttattgtaaaaggtgcatttttcaacacttacttttggtttcaatggtggtagttgtggacagccatcttcactggagggtggggagctccgtgtgaccaccaagatgccagcaggatataccgtaacacgaaattgctgtcaaaagcttattagcatcaatcaagattctaggtctccaaaagtacaggctttttcttcattaccttttttattcagaacgaggaagagaacacaaggaatgattcaagatccaccttgagaggaatgaactttgttgttgaacaattagtgaaataaagcaatgatctaaact

SEQ ID NO: 14 - DNA, 627 bp, Homo sapiens
agtctccggcgagttgttgcctgggctggacgtggttttgtctgctgcgcccgctcttcgcgctctcgtttcattttctgcagcgcgccacgaggatggcccacaagcagatctactactcggacaagtacttcgacgaacactacgagtaccggcatgttatgttacccagagaactttccaaacaagtacctaaaactcatctgatgtctgaagaggagtggaggagacttggtgtccaacagagtctaggctgggttcattacatgattcatgagccagaaccacatattcttctctttagacgacctcttccaaaagatcaacaaaaatgaagtttatctggggatcgtcaaatctttttcaaatttaatgtatatgtgtatataaggtagtattcagtgaatacttgagaaatgtacaaatctttcatccatacctgtgcatgagctgtattcttcacagcaacagagctcagttaaatgcaactgcaagtaggttactgtaagatgtttaagataaaagttcttccagtcagtttttctcttaagtgcctgtttgagtttactgaaacagtttacttttgttcaataaagtttgtatgttgcatttaaaaaaaaaaaaaaa

SEQ ID NO: 15 - DNA, 2195 bp, Homo sapiens
aggggagagcggccgccgccgctgccgcttccaccacagtttgaagaaaacaggtctgaaacaaggtcttacccccagctgcttctgaacacagtgactgccagatctccaaacatcaagtccagctttgtccgccaacctgtctgacatgtcgggacccgtgccaagcagggccagagtttacacagatgttaatacacacagacctcgagaatactgggattacgagtcacatgtggtggaatggggaaatcaagatgactaccagctggttcgaaaattaggccgaggtaaatacagtgaagtatttgaagccatcaacatcacaaataatgaaaaagttgttgttaaaattctcaagccagtaaaaaagaagaaaattaagcgtgaaataaagattttggagaatttgagaggaggtcccaacatcatcacactggcagacattgtaaaagaccctgtgtcacgaacccccgccttggtttttgaacacgtaaacaacacagacttcaagcaattgtaccagacgttaacagactatgatattcgattttacatgtatgagattctgaaggccctggattattgtcacagcatgggaattatgcacagagatgtcaagccccataatgtcatgattgatcatgagcacagaaagctacgactaatagactggggtttggctgagttttatcatcctggccaagaatataatgtccgagttgcttcccgatacttcaaaggtcctgagctacttgtagactatcagatgtacgattatagtttggatatgtggagtttgggttgtatgctggcaagtatgatctttcggaaggagccatttttccatggacatgacaattatgatcagttggtgaggatagccaaggttctggggacagaagatttatatgactatattgacaaatacaacattgaattagatccacgtttcaatgatatcttgggcagacactctcgaaagcgatgggaacgctttgtccacagtgaaaatcagcaccttgtcagccctgaggccttggatttcctggacaaactgctgcgatatgaccaccagtcacggcttactgcaagagaggcaatggagcacccctatttctacactgttgtgaaggaccaggctcgaatgggttcatctagcatgccagggggcagtacgcccgtcagcagcgccaatatgatgtcagggatttcttcagtgccaaccccttcaccccttggacctctggcaggctcaccagtgattgctgctgccaacccccttgggatgcctgttccagctgccgctggcgctcagcagtaacggccctatctgtctcctgatgcctgagcagaggtgggggagtccaccctctccttgatgcagcttgcgcctggcggggaggggtgaaacacttcagaagcaccgtgtctgaaccgttgcttgtggatttatagtagttcagtcataaaaaaaaaattataataggctgattttcttttttctttttttttttaactcgaacttttcataactcaggggattccctgaaaaattacctgcaggtggaatatttcatggacaaatttttttttctcccctcccaaatttagttcctcatcacaaaagaacaaagataaaccagcctcaatcccggctgctgcatttaggtggagacttcttcccattcccaccattgttcctccaccgtcccacactttagggggttggtatctcgtgctcttctccagagattacaaaaatgtagcttctcaggggaggcaggaagaaaggaaggaaggaaagaaggaagggaggacccaatctataggagcagtggactgcttgctggtcgcttacatcactttactccataagcgcttcagtggggttatcctagtggctcttgtggaagtgtgtcttagttacatcaagatgttgaaaatctacccaaaatgcagacagatactaaaaacttctgttcagtaagaatcatgtcttactgatctaaccctaaatccaactcatttatacttttatttttagttcagtttaaaatgttgataccttccctcccaggctccttaccttggtcttttccctgttcatctcccaacatgctgtgctccatagctggtaggagagggaaggcaaaatctttcttagttttctttgtcttggccattttgaattc

SEQ ID NO: 16 - DNA, 2257 bp, Homo sapiens
gtgcgatcccgggcccgagggcatcagacggcggctgattagctccggtttgcatcacccggaccgggggattagctccggtttgcatcacccggaccgggggccgggcgcgcacgagactcgcagcggaagtggaggcggctccgcgcgcgtccgctgctaggacccgggcagggctggagctgggctgggatcccgagctcggcagcagcgcagcgggccggcccacctgctggtgccctggaggctctgagccccggcggcgcccgggcccacgcggaacgacggggcgagatgcgagccacccctctagctgctcctgcgggttccctgtccaggaagaagcggttggagttggatgacaacttagataccgagcgtcccgtccagaaacgagctcgaagtgggccccagcccagactgcccccctgcctgttgcccctgagcccacctactgctccagatcgtgcaactgctgtggccactgcctcccgtcttgggccctatgtcctcctggagcccgaggagggcgggcgggcctaccaggccctgcactgccctacaggcactgagtatacctgcaaggtgtaccccgtccaggaagccccggccgtgctggagccctatgcgcggctgcccccgcacaagcatgtggctcggcccactgaggtcctggctggtacccagctcctctacgcctttttcactcggacccatggggacatgcacagcctggtgcgaagccgccaccgtatccctgagcctgaggctgccgtgctcttccgccagatggccaccgccctggcgcactgtcaccagcacggtctggtcctgcgtgatctcaagctgtgtcgctttgtcttcgctgaccgtgagaggaagaagctggtgctggagaacctggaggactcctgcgtgctgactgggccagatgattccctgtgggacaagcacgcgtgcccagcctacgtgggacctgagatactcagctcacgggcctcatactcgggcaaggcagccgatgtctggagcctgggcgtggcgctcttcaccatgctggccggccactaccccttccaggactcggagcctgtcctgctcttcggcaagatccgccgcggggcctacgccttgcctgcaggcctctcggcccctgcccgctgtctggttcgctgcctccttcgtcgggagccagctgaacggctcacagccacaggcatcctcctgcacccctggctgcgacaggacccgatgcccttagccccaacccgatcccatctctgggaggctgcccaggtggtccctgatggtctggggctggacgaagccagggaagaggagggagacagagaagtggttctgtatggctaggaccaccctactacacgctcagctgccaacagtggattgagtttgggggtagctccaagccttctcctgcctctgaactgagccaaaccttcagtgccttccagaagggagaaaggcagaagcctgtgtggagtgtgctgtgtacacatctgctttgttccacacacatgcagttcctgcttgggtgcttatcaggtgccaagccctgttctcggtgctgggagtacagcagtgagcaaaggagacaatattccctgctcacagagatgacaaactggcatccttgagctgacaacacttttccatgaccataggtcactgtctacactgggtacactttgtaccagtgtcggcctccactgatgctggtgctcaggcacctctgtccaaggacaatccctttcacaaacaaaccagctgcctttgtatcttgtaccttttcagagaaagggaggtatccctgtgccaaaggctccaggcctctcccctgcaactcaggacccaagcccagctcactctgggaactgtgttcccagcatctctgtcctcttgattaagagattctccttccaggcctaagcctgggatttgggccagagataagaatccaaactatgaggctagttcttgtctaactcaagactgttctggaatgagggtccaggcctgtcaaccatggggcttctgacctgagcaccaaggttgagggacaggattaggcagggtctgtcctgtggccacctggaaagtcccaggtgggactcttctggggacacttggggtccacaatcccaggtccatactctaggttttggataccatgagtatgtatgtttacctgtgcctaataaaggagaattatgaaataaaaaaaaaaaaaaaaaaa

SEQ ID NO: 17 - DNA, 6058 bp, Homo sapiens
gccccgggaagcgcagccatggctctgcggaggctgggggccgcgctgctgctgctgccgctgctcgccgccgtggaagaaacgctaatggactccactacagcgactgctgagctgggctggatggtgcatcctccatcagggtgggaagaggtgagtggctacgatgagaacatgaacacgatccgcacgtaccaggtgtgcaacgtgtttgagtcaagccagaacaactggctacggaccaagtttatccggcgccgtggcgcccaccgcatccacgtggagatgaagttttcggtgcgtgactgcagcagcatccccagcgtgcctggctcctgcaaggagaccttcaacctctattactatgaggctgactttgactcggccaccaagaccttccccaactggatggagaatccatgggtgaaggtggataccattgcagccgacgagagcttctcccaggtggacctgggtggccgcgtcatgaaaatcaacaccgaggtgcggagcttcggacctgtgtcccgcagcggcttctacctggccttccaggactatggcggctgcatgtccctcatcgccgtgcgtgtcttctaccgcaagtgcccccgcatcatccagaatggcgccatcttccaggaaaccctgtcgggggctgagagcacatcgctggtggctgcccggggcagctgcatcgccaatgcggaagaggtggatgtacccatcaagctctactgtaacggggacggcgagtggctggtgcccatcgggcgctgcatgtgcaaagcaggcttcgaggccgttgagaatggcaccgtctgccgaggttgtccatctgggactttcaaggccaaccaaggggatgaggcctgtacccactgtcccatcaacagccggaccacttctgaaggggccaccaactgtgtctgccgcaatggctactacagagcagacctggaccccctggacatgccctgcacaaccatcccctccgcgccccaggctgtgatttccagtgtcaatgagacctccctcatgctggagtggacccctccccgcgactccggaggccgagaggacctcgtctacaacatcatctgcaagagctgtggctcgggccggggtgcctgcacccgctgcggggacaatgtacagtacgcaccacgccagctaggcctgaccgagccacgcatttacatcagtgacctgctggcccacacccagtacaccttcgagatccaggctgtgaacggcgttactgaccagagccccttctcgcctcagttcgcctctgtgaacatcaccaccaaccaggcagctccatcggcagtgtccatcatgcatcaggtgagccgcaccgtggacagcattaccctgtcgtggtcccagccggaccagcccaatggcgtgatcctggactatgagctgcagtactatgagaaggagctcagtgagtacaacgccacagccataaaaagccccaccaacacggtcaccgtgcagggcctcaaagccggcgccatctatgtcttccaggtgcgggcacgcaccgtggcaggctacgggcgctacagcggcaagatgtacttccagaccatgacagaagccgagtaccagacaagcatccaggagaagttgccactcatcatcggctcctcggccgctggcctggtcttcctcattgctgtggttgtcatcgccatcgtgtgtaacagaagacgggggtttgagcgtgctgactcggagtacacggacaagctgcaacactacaccagtggccacatgaccccaggcatgaagatctacatcgatcctttcacctacgaggaccccaacgaggcagtgcgggagtttgccaaggaaattgacatctcctgtgtcaaaattgagcaggtgatcggagcaggggagtttggcgaggtctgcagtggccacctgaagctgccaggcaagagagagatctttgtggccatcaagacgctcaagtcgggctacacggagaagcagcgccgggacttcctgagcgaagcctccatcatgggccagttcgaccatcccaacgtcatccacctggagggtgtcgtgaccaagagcacacctgtgatgatcatcaccgagttcatggagaatggctccctggactcctttctccggcaaaacgatgggcagttcacagtcatccagctggtgggcatgcttcggggcatcgcagctggcatgaagtacctggcagacatgaactatgttcaccgtgacctggctgcccgcaacatcctcgtcaacagcaacctggtctgcaaggtgtcggactttgggctctcacgctttctagaggacgatacctcagaccccacctacaccagtgccctgggcggaaagatccccatccgctggacagccccggaagccatccagtaccggaagttcacctcggccagtgatgtgtggagctacggcattgtcatgtgggaggtgatgtcctatggggagcggccctactgggacatgaccaaccaggatgtaatcaatgccattgagcaggactatcggctgccaccgcccatggactgcccgagcgccctgcaccaactcatgctggactgttggcagaaggaccgcaaccaccggcccaagttcggccaaattgtcaacacgctagacaagatgatccgcaatcccaacagcctcaaagccatggcgcccctctcctctggcatcaacctgccgctgctggaccgcacgatccccgactacaccagctttaacacggtggacgagtggctggaggccatcaagatggggcagtacaaggagagcttcgccaatgccggcttcacctcctttgacgtcgtgtctcagatgatgatggaggacattctccgggttggggtcactttggctggccaccagaaaaaaatcctgaacagtatccaggtgatgcgggcgcagatgaaccagattcagtctgtggaggtttgacattcacctgcctcggctcacctcttcctccaagccccgccccctctgccccacgtgccggccctcctggtgctctatccactgcagggccagccactcgccaggaggccacgggccacgggaagaaccaagcggtgccagccacgagacgtcaccaagaaaacatgcaactcaaacgacggaaaaaaaaagggaatgggaaaaaagaaaacagatcctgggagggggcgggaaatacaaggaatattttttaaagaggattctcataaggaaagcaatgactgttcttgcgggggataaaaaagggcttgggagattcatgcgatgtgtccaatcggagacaaaagcagtttctctccaactccctctgggaaggtgacctggccagagccaagaaacactttcagaaaaacaaatgtgaaggggagagacaggggccgcccttggctcctgtccctgctgctcctctaggcctcactcaacaaccaagcgcctggaggacgggacagatggacagacagccaccctgagaacccctctgggaaaatctattcctgccaccactgggcaaacagaagaatttttctgtctttggagagtattttagaaactccaatgaaagacactgtttctcctgttggctcacagggctgaaaggggcttttgtcctcctgggtcagggagaacgcggggaccccagaaaggtcagccttcctgaggatgggcaacccccaggtctgcagctccaggtacatatcacgcgcacagcctggcagcctggccctcctggtgcccactcccgccagcccctgcctcgaggactgatactgcagtgactgccgtcagctccgactgccgctgagaagggttgatcctgcatctgggtttgtttacagcaattcctggactcgggggtattttggtcacagggtggttttggtttagggggtttgtttgttgggttgttttttgttttttggttttttttaatgacaatgaagtgacactttgacatttcctaccttttgaggacttgatccttctccaggaagaaggtgctttctgcttactgacttaggcaatacaccaagggcgagattttatatgcacatttctggatttttttatacggttttcattgacactcttccctcctcccacctgccaccaggcctcaccaaagcccactgccatggggccatctgggccattcagagactggagtgagatttgggtgtggagggggaggcgccaaggtggaggagcttcccactccaggactgttgatgaaagggacagattgaggaggaagtgggctctgaggctgcagggctggaagtccttgcccacttcccactctcctgccccaatctatctagtacttcccaggcaaataggcccctttgaggctcctgagtgccctcagatggtcaaaacccagttttccctctgggagcctaaaccaggctgcatcggaggccaggacccggatcattcactgtgataccctgccctccagagggtgcgctcagagacacgggcaagcatgcctcttcccttccctggagagaaagtgtgtgatttctctcccacctccttccccccaccagacctttgctgggcctaaaggtcttggccatggggacgccctcagtctagggatctggccacagactccctcctgtgaaccaacacagacacccaagcagagcaatcagttagtgaattggaattccccaagtctttgctattgtgaatagtgctgcaataaacatacgtgtgcatgtgtctttatagtagaatgatctataatcctctgggtatgtacccagtaatgggattgctgggtcaaatggtttttctggttctagatccttgaggaattgccacactgtctttcacaatggttgaactaatttacactcctaccaacagtgtaaaagtcttcctgtttctccacatcctctccagcatctgttgtttcctgactttttaatgattgccattctaactggtgtgagatggtatctcattgtgggtttgatttgcatttctctaatgaccagtgaagatgagctttttttcatatgtttgttggccacatgtttgttgtttcttttgagaagtgtctgttcataaccttcaccaatttttgatgaggttgtttgttcttttcttgtaaacttaatgaaataaagcatgaagacaagattagaagaaaaagaatgaaaaggaacaaacaaagcgtccaagaaatatgggactatgtgacaagaacaaacttacgtttgactggtgtgctgaaaatgacagggagaatgaaaccaagttggaaaacactcttcaggatattatccaggagaacttctccaacctagcaagacagaccaacgttcaaattcaggaaatacagagaacacccaaagatatttctcgagaagagcaacccgaagacacataattgtcagattcaccaaggttgaaatgaaggaaaaaatgctaagggcagccagagagaaaggtcaggttactcacaaaaggaagcccatcagactaacagcagatctctctgcagaaaccctacaacctagaagagagtggggaccaatattcaacattcacaaagaaaagaattttcaatccagaatttcatatccagccaaactaagcttcataagcaaaggagaaataaaatcctttacagacaagcaaatcctgggagattttgtcaccaccaggcctgccttacaagacatcctgaaggaagcactaaatatggaaaagaaaaactggtgccagccactgcaaaaaataccaaattgtagagaccattgacactatgaagaaaccgtgtcaactaatgggcaaaataaccagctagtatcataatgacaggatcagattcacacataacaatattaaccttatatctaaatgggctaaatcccccaattaaaagacgcagactggcaaattggttaaagagtcaagactcattggtgtgccgtattcaggagacccatctcacgtgcaaagacacacataggctcagagtaaaagggatacaggggaattc

SEQ ID NO: 18 - DNA, 4530 bp, Homo sapiens
aattctcgagctcgtcgaccggtcgacgagctcgagggtcgacgagctcgagggcgcgcgcccggcccccacccctcgcagcaccccgcgccccgcgccctcccagccgggtccagccggagccatggggccggagccgcagtgagcaccatggagctggcggccttgtgccgctgggggctcctcctcgccctcttgccccccggagccgcgagcacccaagtgtgcaccggcacagacatgaagctgcggctccctgccagtcccgagacccacctggacatgctccgccacctctaccagggctgccaggtggtgcagggaaacctggaactcacctacctgcccaccaatgccagcctgtccttcctgcaggatatccaggaggtgcagggctacgtgctcatcgctcacaaccaagtgaggcaggtcccactgcagaggctgcggattgtgcgaggcacccagctctttgaggacaactatgccctggccgtgctagacaatggagacccgctgaacaataccacccctgtcacaggggcctccccaggaggcctgcgggagctgcagcttcgaagcctcacagagatcttgaaaggaggggtcttgatccagcggaacccccagctctgctaccaggacacgattttgtggaaggacatcttccacaagaacaaccagctggctctcacactgatagacaccaaccgctctcgggcctgccacccctgttctccgatgtgtaagggctcccgctgctggggagagagttctgaggattgtcagagcctgacgcgcactgtctgtgccggtggctgtgcccgctgcaaggggccactgcccactgactgctgccatgagcagtgtgctgccggctgcacgggccccaagcactctgactgcctggcctgcctccacttcaaccacagtggcatctgtgagctgcactgcccagccctggtcacctacaacacagacacgtttgagtccatgcccaatcccgagggccggtatacattcggcgccagctgtgtgactgcctgtccctacaactacctttctacggacgtgggatcctgcaccctcgtctgccccctgcacaaccaagaggtgacagcagaggatggaacacagcggtgtgagaagtgcagcaagccctgtgcccgagtgtgctatggtctgggcatggagcacttgcgagaggtgagggcagttaccagtgccaatatccaggagtttgctggctgcaagaagatctttgggagcctggcatttctgccggagagctttgatggggacccagcctccaacactgccccgctccagccagagcagctccaagtgtttgagactctggaagagatcacaggttacctatacatctcagcatggccggacagcctgcctgacctcagcgtcttccagaacctgcaagtaatccggggacgaattctgcacaatggcgcctactcgctgaccctgcaagggctgggcatcagctggctggggctgcgctcactgagggaactgggcagtggactggccctcatccaccataacacccacctctgcttcgtgcacacggtgccctgggaccagctctttcggaacccgcaccaagctctgctccacactgccaaccggccagaggacgagtgtgtgggcgagggcctggcctgccaccagctgtgcgcccgagggcactgctggggtccagggcccacccagtgtgtcaactgcagccagttccttcggggccaggagtgcgtggaggaatgccgagtactgcaggggctccccagggagtatgtgaatgccaggcactgtttgccgtgccaccctgagtgtcagccccagaatggctcagtgacctgttttggaccggaggctgaccagtgtgtggcctgtgcccactataaggaccctcccttctgcgtggcccgctgccccagcggtgtgaaacctgacctctcctacatgcccatctggaagtttccagatgaggagggcgcatgccagccttgccccatcaactgcacccactcctgtgtggacctggatgacaagggctgccccgccgagcagagagccagccctctgacgtccatcgtctctgcggtggttggcattctgctggtcgtggtcttgggggtggtctttgggatcctcatcaagcgacggcagcagaagatccggaagtacacgatgcggagactgctgcaggaaacggagctggtggagccgctgacacctagcggagcgatgcccaaccaggcgcagatgcggatcctgaaagagacggagctgaggaaggtgaaggtgcttggatctggcgcttttggcacagtctacaagggcatctggatccctgatggggagaatgtgaaaattccagtggccatcaaagtgttgagggaaaacacatcccccaaagccaacaaagaaatcttagacgaagcatacgtgatggctggtgtgggctccccatatgtctcccgccttctgggcatctgcctgacatccacggtgcagctggtgacacagcttatgccctatggctgcctcttagaccatgtccgggaaaaccgcggacgcctgggctcccaggacctgctgaactggtgtatgcagattgccaaggggatgagctacctggaggatgtgcggctcgtacacagggacttggccgctcggaacgtgctggtcaagagtcccaaccatgtcaaaattacagacttcgggctggctcggctgctggacattgacgagacagagtaccatgcagatgggggcaaggtgcccatcaagtggatggcgctggagtccattctccgccggcggttcacccaccagagtgatgtgtggagttatggtgtgactgtgtgggagctgatgacttttggggccaaaccttacgatgggatcccagcccgggagatccctgacctgctggaaaagggggagcggctgccccagccccccatctgcaccattgatgtctacatgatcatggtcaaatgttggatgattgactctgaatgtcggccaagattccgggagttggtgtctgaattctcccgcatggccagggacccccagcgctttgtggtcatccagaatgaggacttgggcccagccagtcccttggacagcaccttctaccgctcactgctggaggacgatgacatgggggacctggtggatgctgaggagtatctggtaccccagcagggcttcttctgtccagaccctgccccgggcgctgggggcatggtccaccacaggcaccgcagctcatctaccaggagtggcggtggggacctgacactagggctggagccctctgaagaggaggcccccaggtctccactggcaccctccgaaggggctggctccgatgtatttgatggtgacctgggaatgggggcagccaaggggctgcaaagcctccccacacatgaccccagccctctacagcggtacagtgaggaccccacagtacccctgccctctgagactgatggctacgttgcccccctgacctgcagcccccagcctgaatatgtgaaccagccagatgttcggccccagcccccttcgccccgagagggccctctgcctgctgcccgacctgctggtgccactctggaaagggccaagactctctccccagggaagaatggggtcgtcaaagacgtttttgcctttgggggtgccgtggagaaccccgagtacttgacaccccagggaggagctgcccctcagccccaccctcctcctgccttcagcccagccttcgacaacctctattactgggaccaggacccaccagagcggggggctccacccagcaccttcaaagggacacctacggcagagaacccagagtacctgggtctggacgtgccagtgtgaaccagaaggccaagtccgcagaagccctgatgtgtcctcagggagcagggaaggcctgacttctgctggcatcaagaggtgggagggccctccgaccacttccaggggaacctgccatgccaggaacctgtcctaaggaaccttccttcctgcttgagttcccagatggctggaaggggtccagcctcgttggaagaggaacagcactggggagtctttgtggattctgaggccctgcccaatgagactctagggtccagtggatgccacagcccagcttggccctttccttccagatcctgggtactgaaagccttagggaagctggcctgagaggggaagcggccctaagggagtgtctaagaacaaaagcgacccattcagagactgtccctgaaacctagtactgccccccatgaggaaggaacagcaatggtgtcagtatccaggctttgtacagagtgcttttctgtttagtttttactttttttgttttgtttttttaaagacgaaataaagacccaggggagaatgggtgttgtatggggaggcaagtgtggggggtccttctccacacccactttgtccatttgcaaatatattttggaaaac

SEQ ID NO: 19 - DNA, 4975 bp, Homo sapiens
ctctcacacacacacacccctcccctgccatccctccccggactccggctccggctccgattgcaatttgcaacctccgctgccgtcgccgcagcagccaccaattcgccagcggttcaggtggctcttgcctcgatgtcctagcctaggggcccccgggccggacttggctgggctcccttcaccctctgcggagtcatgagggcgaacgacgctctgcaggtgctgggcttgcttttcagcctggcccggggctccgaggtgggcaactctcaggcagtgtgtcctgggactctgaatggcctgagtgtgaccggcgatgctgagaaccaataccagacactgtacaagctctacgagaggtgtgaggtggtgatggggaaccttgagattgtgctcacgggacacaatgccgacctctccttcctgcagtggattcgagaagtgacaggctatgtcctcgtggccatgaatgaattctctactctaccattgcccaacctccgcgtggtgcgagggacccaggtctacgatgggaagtttgccatcttcgtcatgttgaactataacaccaactccagccacgctctgcgccagctccgcttgactcagctcaccgagattctgtcagggggtgtttatattgagaagaacgataagctttgtcacatggacacaattgactggagggacatcgtgagggaccgagatgctgagatagtggtgaaggacaatggcagaagctgtcccccctgtcatgaggtttgcaaggggcgatgctggggtcctggatcagaagactgccagacattgaccaagaccatctgtgctcctcagtgtaatggtcactgctttgggcccaaccccaaccagtgctgccatgatgagtgtgccgggggctgctcaggccctcaggacacagactgctttgcctgccggcacttcaatgacagtggagcctgtgtacctcgctgtccacagcctcttgtctacaacaagctaactttccagctggaacccaatccccacaccaagtatcagtatggaggagtttgtgtagccagctgtccccataactttgtggtggatcaaacatcctgtgtcagggcctgtcctcctgacaagatggaagtagataaaaatgggctcaagatgtgtgagccttgtgggggactatgtcccaaagcctgtgagggaacaggctctgggagccgcttccagactgtggactcgagcaacattgatggatttgtgaactgcaccaagatcctgggcaacctggactttctgatcaccggcctcaatggagacccctggcacaagatccctgccctggacccagagaagctcaatgtcttccggacagtacgggagatcacaggttacctgaacatccagtcctggccgccccacatgcacaacttcagtgttttttccaatttgacaaccattggaggcagaagcctctacaaccggggcttctcattgttgatcatgaagaacttgaatgtcacatctctgggcttccgatccctgaaggaaattagtgctgggcgtatctatataagtgccaataggcagctctgctaccaccactctttgaactggaccaaggtgcttcgggggcctacggaagagcgactagacatcaagcataatcggccgcgcagagactgcgtggcagagggcaaagtgtgtgacccactgtgctcctctgggggatgctggggcccaggccctggtcagtgcttgtcctgtcgaaattatagccgaggaggtgtctgtgtgacccactgcaactttctgaatggggagcctcgagaatttgcccatgaggccgaatgcttctcctgccacccggaatgccaacccatggggggcactgccacatgcaatggctcgggctctgatacttgtgctcaatgtgcccattttcgagatgggccccactgtgtgagcagctgcccccatggagtcctaggtgccaagggcccaatctacaagtacccagatgttcagaatgaatgtcggccctgccatgagaactgcacccaggggtgtaaaggaccagagcttcaagactgtttaggacaaacactggtgctgatcggcaaaacccatctgacaatggctttgacagtgatagcaggattggtagtgattttcatgatgctgggcggcacttttctctactggcgtgggcgccggattcagaataaaagggctatgaggcgatacttggaacggggtgagagcatagagcctctggaccccagtgagaaggctaacaaagtcttggccagaatcttcaaagagacagagctaaggaagcttaaagtgcttggctcgggtgtctttggaactgtgcacaaaggagtgtggatccctgagggtgaatcaatcaagattccagtctgcattaaagtcattgaggacaagagtggacggcagagttttcaagctgtgacagatcatatgctggccattggcagcctggaccatgcccacattgtaaggctgctgggactatgcccagggtcatctctgcagcttgtcactcaatatttgcctctgggttctctgctggatcatgtgagacaacaccggggggcactggggccacagctgctgctcaactggggagtacaaattgccaagggaatgtactaccttgaggaacatggtatggtgcatagaaacctggctgcccgaaacgtgctactcaagtcacccagtcaggttcaggtggcagattttggtgtggctgacctgctgcctcctgatgataagcagctgctatacagtgaggccaagactccaattaagtggatggcccttgagagtatccactttgggaaatacacacaccagagtgatgtctggagctatggtgtgacagtttgggagttgatgaccttcggggcagagccctatgcagggctacgattggctgaagtaccagacctgctagagaagggggagcggttggcacagccccagatctgcacaattgatgtctacatggtgatggtcaagtgttggatgattgatgagaacattcgcccaacctttaaagaactagccaatgagttcaccaggatggcccgagacccaccacggtatctggtcataaagagagagagtgggcctggaatagcccctgggccagagccccatggtctgacaaacaagaagctagaggaagtagagctggagccagaactagacctagacctagacttggaagcagaggaggacaacctggcaaccaccacactgggctccgccctcagcctaccagttggaacacttaatcggccacgtgggagccagagccttttaagtccatcatctggatacatgcccatgaaccagggtaatcttggggggtcttgccaggagtctgcagtttctgggagcagtgaacggtgcccccgtccagtctctctacacccaatgccacggggatgcctggcatcagagtcatcagaggggcatgtaacaggctctgaggctgagctccaggagaaagtgtcaatgtgtagaagccggagcaggagccggagcccacggccacgcggagatagcgcctaccattcccagcgccacagtctgctgactcctgttaccccactctccccacccgggttagaggaagaggatgtcaacggttatgtcatgccagatacacacctcaaaggtactccctcctcccgggaaggcaccctttcttcagtgggtctcagttctgtcctgggtactgaagaagaagatgaagatgaggagtatgaatacatgaaccggaggagaaggcacagtccacctcatccccctaggccaagttcccttgaggagctgggttatgagtacatggatgtggggtcagacctcagtgcctctctgggcagcacacagagttgcccactccaccctgtacccatcatgcccactgcaggcacaactccagatgaagactatgaatatatgaatcggcaacgagatggaggtggtcctgggggtgattatgcagccatgggggcctgcccagcatctgagcaagggtatgaagagatgagagcttttcaggggcctggacatcaggccccccatgtccattatgcccgcctaaaaactctacgtagcttagaggctacagactctgcctttgataaccctgattactggcatagcaggcttttccccaaggctaatgcccagagaacgtaactcctgctccctgtggcactcagggagcatttaatggcagctagtgcctttagagggtaccgtcttctccctattccctctctctcccaggtcccagccccttttccccagtcccagacaattccattcaatctttggaggcttttaaacattttgacacaaaattcttatggtatgtagccagctgtgcactttcttctctttcccaaccccaggaaaggttttccttattttgtgtgctttcccagtcccattcctcagcttcttcacaggcactcctggagatatgaaggattactctccatatcccttcctctcaggctcttgactacttggaactaggctcttatgtgtgcctttgtttcccatcagactgtcaagaagaggaaagggaggaaacctagcagaggaaagtgtaattttggtttatgactcttaaccccctagaaagacagaagcttaaaatctgtgaagaaagaggttaggagtagatattgattactatcataattcagcacttaactatgagccaggcatcatactaaacttcacctacattatctcacttagtcctttatcatccttaaaacaattctgtgacatacatattatctcattttacacaaagggaagtcgggcatggtggctcatgcctgtaatctcagcactttgggaggctgaggcagaaggattacctgaggcaaggagtttgagaccagcttagccaacatagtaagacccccatctc

SEQ ID NO: 20 - DNA, 2820 bp, Homo sapiens
gcgtttgaacctcttggcgggtgccggccatggcggcttcgctcccgggacctgggagccggcttttccgcacatatggggctgcggacggcaggagacagcggcggccgggccgggaagccgcgcagtggttcccgccgcaggaccggaggcgtttcttcaacagcagcggcagcagcgacgccagcatcggcgacccctcgcagtccgacgatcctgacgatcccgacgaccccgacttccccggcagcccggtgaggcggcggcggaggtgtcccggcggccgagtgcccaaggaccggcccagcctgaccgtgaccccaaagcgctggaagctgcgagctcgcccaagcctaaccgtgaccccaagacgcctggggctgcgagctcggcccccgcagaagtgcagcacaccctgcggcccgctccgacttccgcccttccccagccgcgactccggccgcctcagcccggacctcagcgtgtgcggccagcccagggacggcgacgagctgggcatcagtgcctccctgttcagctctctggcctcgccctgccccgggtccccaacgccaagggacagtgtcatctcgatcggcacctccgcctgtctggttgcagcctcagccgtcccgagcgacctccacctcccagaagtctccctggaccgagcatctctcccctgctcccaggaggaagcgacaggaggagccaaggacaccaggatggtccaccaaacccgcgccagcctcaggtcagttctctttggccttatgaactcaggaacccctgaggattctgagtttcgggcagatgggaagaatatgagagagtcctgctgtaaaaggaaactggtggtgggaaatggaccagagggtccaggtctgtcaagcacaggcaagaggagggccacaggccaggactcttgtcaagagagagggcttcaagaggccgtccggagagagcatcaggaggccagtgttcccaagggccgcattgtgccaaggggaacagacaggctggagagaactagatcaagccggaagagcaaacatcaggaggcaacggaaacctctctcctccattcccaccgctttaaaaagggccaaaagctgggaaaagattcgttccccacccaggacctgactcctttacagaatgcctgcttttggaccaaaaccagggcttccttcagtttccacaagaagaaaattgtgactgatgtgtcagaggtctgcagcatctataccactgccacttctctctctggatccctcctatcagaatgttcaaaccggcctgtcatgaacagaacaagtggtgctccgtcctcttggcactcctcctctatgtatttgctaagccccttaaacactctaagtatttcaaacaaaaaggcatctgatgctgaaaaggtttatggggaatgcagtcagaagggtcctgtcccctttagccattgccttcccacagaaaaactgcaacgctgtgagaagattggggaaggggtgtttggcgaagtgtttcaaacaattgctgatcacacacccgtagccataaaaatcattgctattgaaggaccagatttagtcaatggatcccatcagaaaacctttgaggaaatcctgccagagatcatcatctccaaagagttgagcctcttatccggtgaagtgtgcaaccgcacagaaggctttatcgggctgaactcagtgcactgtgtccagggatcttaccctcccttgctcctcaaagcctgggatcactataattcaaccaaaggctctgcaaatgaccggcctgatttttttaaagacgaccagctcttcattgtgctggaatttgagtttggagggattgacttagagcaaatgcgaaccaagttgtcttccttggctactgcaaagagcattctacaccagctcacagcctccctcgcagtggcagaggcatcactgcgctttgagcaccgagacttacactgggggaacgtgctcttaaagaaaaccagcctcaaaaaactccactacaccctcaatgggaagagcagcactatccccagctgtgggttgcaagtgagcatcattgactacaccctgtcgcgcttggaacgggatgggattgtggttttctgtgacgtttccatggatgaggacctgtttaccggtgacggtgactaccagtttgacatctacaggctcatgaagaaggagaataacaaccgctggggtgaatatcacccttatagtaatgtgctctggttacattacctgacagacaagatgctgaaacaaatgaccttcaagactaaatgtaacactcctgccatgaagcaaattaagagaaaaatccaggagttccacaggacaatgctgaacttcagctctgccactgacttgctctgccagcacagtctgtttaagtaagctaaatgtatcttactgccccgaaatgagaggagactggtcttgaagcctctggtgctgtttcaacctccgtccccacaggagggtggaactcccattctcacaggtttccagtcagcttttcaaacaagaattttgtttccaaatggaaactgaaatatttgttgaaatgtttaaatttgctgataacaaatgttctgaaagaagtaaactagccgggcgcagtggcgtgcgcctgtagtcccagctactcgggaggctgaggcaggaggatcgcttgagcccaagagttcatatctagcctggtcaacatagcaagacccctgtctctatttttttaaataaataaactacatgtgaaaacaaaaaaaaaaaaaaaaaaaaaaaaaaaaaa

SEQ ID NO: 21 - DNA, 1639 bp, Homo sapiens
atcatctatatgttaaatatccgtgccgatctgtcttgaaggagaaatatatcgcttgttttgttttttatagtatacaaaaggagtgaaaagccaagaggacgaagtctttttctttttcttctgtgggagaacttaatgctgcatttatcgttaacctaacaccccaacataaagacaaaaggaagaaaaggaggaaggaaggaaaaggtgattcgcgaagagagtgatcatgtcagggcggcccagaaccacctcctttgcggagagctgcaagccggtgcagcagccttcagcttttggcagcatgaaagttagcagagacaaggacggcagcaaggtgacaacagtggtggcaactcctgggcagggtccagacaggccacaagaagtcagctatacagacactaaagtgattggaaatggatcatttggtgtggtatatcaagccaaactttgtgattcaggagaactggtcgccatcaagaaagtattgcaggacaagagatttaagaatcgagagctccagatcatgagaaagctagatcactgtaacatagtccgattgcgttatttcttctactccagtggtgagaagaaagatgaggtctatcttaatctggtgctggactatgttccggaaacagtatacagagttgccagacactatagtcgagccaaacagacgctccctgtgatttatgtcaagttgtatatgtatcagctgttccgaagtttagcctatatccattcctttggaatctgccatcgggatattaaaccgcagaacctcttgttggatcctgatactgctgtattaaaactctgtgactttggaagtgcaaagcagctggtccgaggagaacccaatgtttcgtatatctgttctcggtactatagggcaccagagttgatctttggagccactgattatacctctagtatagatgtatggtctgctggctgtgtgttggctgagctgttactaggacaaccaatatttccaggggatagtggtgtggatcagttggtagaaataatcaaggtcctgggaactccaacaagggagcaaatcagagaaatgaacccaaactacacagaatttaaattccctcaaattaaggcacatccttggactaaggattcgtcaggaacaggacatttcacctcaggagtgcgggtcttccgaccccgaactccaccggaggcaattgcactgtgtagccgtctgctggagtatacaccaactgcccgactaacaccactggaagcttgtgcacattcattttttgatgaattacgggacccaaatgtcaaactaccaaatgggcgagacacacctgcactcttcaacttcaccactcaagaactgtcaagtaatccacctctggctaccatccttattcctcctcatgctcggattcaagcagctgcttcaacccccacaaatgccacagcagcgtcagatgctaatactggagaccgtggacagaccaataatgctgcttctgcatcagcttccaactccacctgaacagtcccgagcagccagctgcacaggaaaaaccaccagttacttgagtgtcactcagcaacactggtcacgtttggaaagaatattaaaaaaaaaaaaaaaaaa

SEQ ID NO: 22 - DNA, 3583 bp, Homo sapiens
cgcggacccggccggcccaggcccgcgcccgccgcggccctgagaggccccggcaggtcccggcccggcggcggcagccatggccggggggccgggcccgggggagcccgcagcccccggcgcccagcacttcttgtacgaggtgccgccctgggtcatgtgccgcttctacaaagtgatggacgccctggagcccgccgactggtgccagttcgccgccctgatcgtgcgcgaccagaccgagctgcggctgtgcgagcgctccgggcagcgcacggccagcgtcctgtggccctggatcaaccgcaacgcccgtgtggccgacctcgtgcacatcctcacgcacctgcagctgctccgtgcgcgggacatcatcacagcctggcaccctcccgccccgcttccgtccccaggcaccactgccccgaggcccagcagcatccctgcacccgccgaggccgaggcctggagcccccggaagttgccatcctcagcctccaccttcctctccccagcttttccaggctcccagacccattcagggcctgagctcggcctggttccaagccctgcttccctgtggcctccaccgccatctccagccccttcttctaccaagccaggcccagagagctcagtgtccctcctgcagggagcccgcccctctccgttttgctggcccctctgtgagatttcccggggcacccacaacttctcggaggagctcaagatcggggagggtggctttgggtgcgtgtaccgggcggtgatgaggaacacggtgtatgctgtgaagaggctgaaggagaacgctgacctggagtggactgcagtgaagcagagcttcctgaccgaggtggagcagctgtccaggtttcgtcacccaaacattgtggactttgctggctactgtgctcagaacggcttctactgcctggtgtacggcttcctgcccaacggctccctggaggaccgtctccactgccagacccaggcctgcccacctctctcctggcctcagcgactggacatccttctgggtacagcccgggcaattcagtttctacatcaggacagccccagcctcatccatggagacatcaagagttccaacgtccttctggatgagaggctgacacccaagctgggagactttggcctggcccggttcagccgctttgccgggtccagccccagccagagcagcatggtggcccggacacagacagtgcggggcaccctggcctacctgcccgaggagtacatcaagacgggaaggctggctgtggacacggacaccttcagctttggggtggtagtgctagagaccttggctggtcagagggctgtgaagacgcacggtgccaggaccaagtatctgaaagacctggtggaagaggaggctgaggaggctggagtggctttgagaagcacccagagcacactgcaagcaggtctggctgcagatgcctgggctgctcccatcgccatgcagatctacaagaagcacctggaccccaggcccgggccctgcccacctgagctgggcctgggcctgggccagctggcctgctgctgcctgcaccgccgggccaaaaggaggcctcctatgacccaggtgtacgagaggctagagaagctgcaggcagtggtggcgggggtgcccgggcatttggaggccgccagctgcatccccccttccccgcaggagaactcctacgtgtccagcactggcagagcccacagtggggctgctccatggcagcccctggcagcgccatcaggagccagtgcccaggcagcagagcagctgcagagaggccccaaccagcccgtggagagtgacgagagcctaggcggcctctctgctgccctgcgctcctggcacttgactccaagctgccctctggacccagcacccctcagggaggccggctgtcctcagggggacacggcaggagaatcgagctgggggagtggcccaggatcccggcccacagccgtggaaggactggcccttggcagctctgcatcatcgtcgtcagagccaccgcagattatcatcaaccctgcccgacagaagatggtccagaagctggccctgtacgaggatggggccctggacagcctgcagctgctgtcgtccagctccctcccaggcttgggcctggaacaggacaggcaggggcccgaagaaagtgatgaatttcagagctgatgtgttcacctgggcagatcccccaaatccggaagtcaaagttctcatggtcagaagttctcatggtgcacgagtcctcagcactctgccggcagtgggggtgggggcccatgcccgcgggggagagaaggaggtggccctgctgttctaggctctgtgggcataggcaggcagagtggaaccctgcctccatgccagcatctgggggcaaggaaggctggcatcatccagtgaggaggctggcgcatgttgggaggctgctggctgcacagacccgtgaggggaggagaggggctgctgtgcaggggtgtggagtagggagctggctcccctgagagccatgcagggcgtctgcagcccaggcctctggcagcagctctttgcccatctctttggacagtggccaccctgcacaatggggccgacgaggcctagggccctcctacctgcttacaatttggaaaagtgtggccgggtgcggtggctcacgcctgtaatcccagcactttgggaggccaaggcaggaggatcgctggagcccagtaggtcaagaccagccagggcaacatgatgagaccctgtctctgccaaaaaattttttaaactattagcctggcgtggtagcgcacgcctgtggtcccagctgctggggaggctgaagtaggaggatcatttatgcttgggaggtcgaggctgcagtgagtcatgattgtatgactgcactccagcctgggtgacagagcaagaccctgtttcaaaaagaaaaaccctgggaaaagtgaagtatggctgtaagtctcatggttcagtcctagcaagaagcgagaattctgagatcctccagaaagtcgagcagcacccacctccaacctcgggccagtgtcttcaggctttactggggacctgcgagctggcctaatgtggtggcctgcaagccaggccatccctgggcgccacagacgagctccgagccaggtcaggcttcggaggccacaagctcagcctcaggcccaggcactgattgtggcagaggggccactacccaaggtctagctaggcccaagacctagttacccagacagtgagaagcccctggaaggcagaaaagttgggagcatggcagacagggaagggaaacattttcagggaaaagacatgtatcacatgtcttcagaagcaagtcaggtttcatgtaaccgagtgtcctcttgcgtgtccaaaagtagcccagggctgtagcacaggcttcacagtgattttgtgttcagccgtgagtcacactacatgcccccgtgaagctgggcattggtgacgtccaggttgtccttgagtaataaaaacgtatgttccctaaaaaaaaaaaaa

SEQ ID NO: 23 - DNA, 2470 bp, Homo sapiens
ttggcgggcggaagcggccacaacccggcgatcgaaaagattcttaggaacgccgtaccagccgcgtctctcaggacagcaggcccctgtccttctgtcgggcgccgctcagccgtgccctccgcccctcaggttctttttctaattccaaataaacttgcaagaggactatgaaagattatgatgaacttctcaaatattatgaattacatgaaactattgggacaggtggctttgcaaaggtcaaacttgcctgccatatccttactggagagatggtagctataaaaatcatggataaaaacacactagggagtgatttgccccggatcaaaacggagattgaggccttgaagaacctgagacatcagcatatatgtcaactctaccatgtgctagagacagccaacaaaatattcatggttcttgagtactgccctggaggagagctgtttgactatataatttcccaggatcgcctgtcagaagaggagacccgggttgtcttccgtcagatagtatctgctgttgcttatgtgcacagccagggctatgctcacagggacctcaagccagaaaatttgctgtttgatgaatatcataaattaaagctgattgactttggtctctgtgcaaaacccaagggtaacaaggattaccatctacagacatgctgtgggagtctggcttatgcagcacctgagttaatacaaggcaaatcatatcttggatcagaggcagatgtttggagcatgggcatactgttatatgttcttatgtgtggatttctaccatttgatgatgataatgtaatggctttatacaagaagattatgagaggaaaatatgatgttcccaagtggctctctcccagtagcattctgcttcttcaacaaatgctgcaggtggacccaaagaaacggatttctatgaaaaatctattgaaccatccctggatcatgcaagattacaactatcctgttgagtggcaaagcaagaatccttttattcacctcgatgatgattgcgtaacagaactttctgtacatcacagaaacaacaggcaaacaatggaggatttaatttcactgtggcagtatgatcacctcacggctacctatcttctgcttctagccaagaaggctcggggaaaaccagttcgtttaaggctttcttctttctcctgtggacaagccagtgctaccccattcacagacatcaagtcaaataattggagtctggaagatgtgaccgcaagtgataaaaattatgtggcgggattaatagactatgattggtgtgaagatgatttatcaacaggtgctgctactccccgaacatcacagtttaccaagtactggacagaatcaaatggggtggaatctaaatcattaactccagccttatgcagaacacctgcaaataaattaaagaacaaagaaaatgtatatactcctaagtctgctgtaaagaatgaagagtactttatgtttcctgagccaaagactccagttaataagaaccagcataagagagaaatactcactacgccaaatcgttacactacaccctcaaaagctagaaaccagtgcctgaaagaaactccaattaaaataccagtaaattcaacaggaacagacaagttaatgacaggtgtcattagccctgagaggcggtgccgctcagtggaattggatctcaaccaagcacatatggaggagactccaaaaagaaagggagccaaagtgtttgggagccttgaaagggggttggataaggttatcactgtgctcaccaggagcaaaaggaagggttctgccagagacgggcccagaagactaaagcttcactataatgtgactacaactagattagtgaatccagatcaactgttgaatgaaataatgtctattcttccaaagaagcatgttgactttgtacaaaagggttatacactgaagtgtcaaacacagtcagattttgggaaagtgacaatgcaatttgaattagaagtgtgccagcttcaaaaacccgatgtggtgggtatcaggaggcagcggcttaagggcgatgcctgggtttacaaaagattagtggaagacatcctatctagctgcaaggtataattgatggattcttccatcctgccggatgagtgtgggtgtgatacagcctacataaagactgttatgatcgctttgattttaaagttcattggaactaccaacttgtttctaaagagctatcttaagaccaatatctctttgtttttaaacaaaagatattattttgtgtatgaatctaaatcaagcccatctgtcattatgttactgtcttttttaatcatgtggttttgtatattaataattgttgactttcttagattcacttccatatgtgaatgtaagctcttaactatgtctctttgtaatgtgtaatttctttctgaaataaaaccatttgtgaatat

SEQ ID NO: 24 - DNA, 2060 bp, Homo sapiens
gcggccgcgtggggcccagcacaaagacctgtccccaggggccgccgcctccgccgctgctgctgccgccagcctagagccgcccgccgaagcagagccggcgccggggtcctcatccccaccggtcccgaggggcggctgctgcccgtcgccacgaggcccaggggcccgagtgccgagccctttgctccctcggccgcgcggggacagggctgctgagcagcctccgcctctcccggctgtgggggccccactgagtatgtcggaggagagcgacatggacaaagccatcaaggaaacttccattttagaagaatacagtatcaattggactcagaagctgggagctggaattagtggtccagttagagtctgtgtaaagaaatctactcaagaacggtttgcgctgaaaattcttcttgatcgtccaaaagctagaaatgaggtacgtctgcacatgatgtgtgccacacacccaaacatagttcagattattgaagtgtttgctaacagtgtccagtttccccatgagtccagccctagggcccgactcttaattgtaatggagatgatggaagggggagagctatttcacagaatcagccagcaccggcactttacagagaagcaagccagccaagtaacaaagcagatagctttggctctgcggcactgtcacttgttaaacattgcgcacagagacctcaagcctgaaaatctgctttttaaggataactctttggatgccccagtgaagttgtgtgactttggatttgccaagattgaccaaggtgacttgatgacaccccagttcaccccttattatgtagcaccccaggtactggaggcgcaaagaaggcatcagaaggagaaatctggcatcatacctacctcaccgacgccctacacttacaacaagagctgtgacttgtggtccctaggggtgattatctatgtgatgctgtgcggataccctcctttttactccaaacaccacagccggactatcccaaaggatatgcgaagaaagatcatgacaggcagttttgagttcccagaggaagagtggagtcagatctcagagatggccaaagatgttgtgaggaagctcctgaaggtcaaaccggaggagagactcaccatcgagggagtgctggaccacccctggctcaattccaccgaggccctggataatgtgctgccttctgctcagctgatgatggacaaggcagtggttgcaggaatccagcaggctcacgcggaacagttggccaacatgagaatccaggatctgaaagtcagcctcaaacccctgcactcagtgaacaaccccattctgcggaagaggaagttacttggcaccaagccaaaggacagtgtctatatccacgaccatgagaatggagccgaggattccaatgttgccttggaaaaactccgagatgtgattgctcagtgtattctcccccaggctggagagaatgaagatgagaaactgaatgaagtaatgcaggaggcttggaagtataaccgggaatgcaaactcctaagagatactctgcagagcttcagctggaatggtcgtggattcacagataaagtagatcgactaaaactggcagaaattgtgaagcaggtgatagaagagcaaaccacgtcccacgaatcccaataatgacagcttcagactttgtttttttaacaatttgaaaaattattctttaatgtataaagtaattttatgtaaattaataaatcataatttcatttccacattgattaaagctgctgtatagatttagggtgcaggacttaataatagtatagttattgtttgtttttaagaaaagctcagttctagagacatactattactttaggactgtgtagttgtatatttgtaagatgacagatgatgctgtcaagcaatattgttttatttgtaataaaatatacaaaaatcacttgccagcagtagaaaaaggaccgactataccgacctttctgattagtaaacagttgaatcaaggactctggaaaaaaaaaaaaaaaaaaaaaaa

SEQ ID NO: 25 - DNA, 1888 bp, Homo sapiens
gcggcgcggggcgggcgcagcgggggtcggggcgctgggagcccgttgggccgcgaacgcagccgccacgccggggccgccgagatcgggtgcccgggatgagcctcatccggaaaaagggcttctacaagcaggacgtcaacaagaccgcctgggagctgcccaagacctacgtgtccccgacgcacgtcggcagcggggcctatggctccgtgtgctcggccatcgacaagcggtcaggggagaaggtggccatcaagaagctgagccgaccctttcagtccgagatcttcgccaagcgcgcctaccgggagctgctgctgctgaagcacatgcagcatgagaacgtcattgggctcctggatgtcttcaccccagcctcctccctgcgcaacttctatgacttctacctggtgatgcccttcatgcagacggatctgcagaagatcatggggatggagttcagtgaggagaagatccagtacctggtgtatcagatgctcaaaggccttaagtacatccactctgctggggtcgtgcacagggacctgaagccaggcaacctggctgtgaatgaggactgtgaactgaagattctggattttgggctggcgcgacatgcagacgccgagatgactggctacgtggtgacccgctggtaccgagcccccgaggtgatcctcagctggatgcactacaaccagacagtggacatctggtctgtgggctgtatcatggcagagatgctgacagggaaaactctgttcaaggggaaagattacctggaccagctgacccagatcctgaaagtgaccggggtgcctggcacggagtttgtgcagaagctgaacgacaaagcggccaaatcctacatccagtccctgccacagacccccaggaaggatttcactcagctgttcccacgggccagcccccaggctgcggacctgctggagaagatgctggagctagacgtggacaagcgcctgacggccgcgcaggccctcacccatcccttctttgaacccttccgggaccctgaggaagagacggaggcccagcagccgtttgatgattccttagaacacgagaaactcacagtggatgaatggaagcagcacatctacaaggagattgtgaacttcagccccattgcccggaaggactcacggcgccggagtggcatgaagctgtagggactcatcttgcatggcaccaccggccagacactgcccaaggaccagtatttgtcactaccaaactcagcccttcttggaatacagcctttcaagcagaggacagaagggtccttctccttatgtgggaaatgggcctagtagatgcagaattcaaagatgtcggttgggagaaactagctctgatcctaacaggccacgttaaactgcccatctggagaatcgcctgcaggtggggccctttccttcccgccagagtggggctgagtgggcgctgagccaggccgggggcctatggcagtgatgctgtgttggtttcctagggatgctctaacgaattaccacaaacctggtggattgaaacagcagaacttgattcccttacagttctggaggctggaaatctgggatggaggtgttggcagggctgtggtccctttgaaggctctggggaagaatccttccttggctctttttagcttgtggcggcagtgggcagtccgtggcattccccagcttattgctgcatcactccagtctctgtctcttctgttctctcctcttttaacaacagtcattggatttagggcccaccctaatcctgtgtgatcttatcttgatccttattaattaaacctgcaaatactctagttccaaataaagtcacattctcaggttccaggtggacatga

SEQ ID NO: 26 - DNA, 2119 bp, Homo sapiens
ggcacgagtaggggtggcgggtcagtgctgctcgggggcttctccatccaggtccctggagttcctggtccctggagctccgcacttggcgcgcaacctgcgtgaggcagcgcgactctggcgactggccggccatgccttcccgggctgaggactatgaagtgttgtacaccattggcacaggctcctacggccgctgccagaagatccggaggaagagtgatggcaagatattagtttggaaagaacttgactatggctccatgacagaagctgagaaacagatgcttgtttctgaagtgaatttgcttcgtgaactgaaacatccaaacatcgttcgttactatgatcggattattgaccggaccaatacaacactgtacattgtaatggaatattgtgaaggaggggatctggctagtgtaattacaaagggaaccaaggaaaggcaatacttagatgaagagtttgttcttcgagtgatgactcagttgactctggccctgaaggaatgccacagacgaagtgatggtggtcataccgtattgcatcgggatcttaaaccagccaatgttttcctggatggcaagcaaaacgtcaagcttggagactttgggctagctagaatattaaaccatgacacgagttttgcaaaaacatttgttggcacaccttattacatgtctcctgaacaaatgaatcgcatgtcctacaatgagaaatcagatatctggtcattgggctgcttgctgtatgagttatgtgcattaatgcctccatttacagcttttagccagaaagaactcgctgggaaaatcagagaaggcaaattcaggcgaattccataccgttactctgatgaattgaatgaaattattacgaggatgttaaacttaaaggattaccatcgaccttctgttgaagaaattcttgagaaccctttaatagcagatttggttgcagacgagcaaagaagaaatcttgagagaagagggcgacaattaggagagccagaaaaatcgcaggattccagccctgtattgagtgagctgaaactgaaggaaattcagttacaggagcgagagcgagctctcaaagcaagagaagaaagattggagcagaaagaacaggagctttgtgttcgtgagagactagcagaggacaaactggctagagcagaaaatctgttgaagaactacagcttgctaaaggaacggaagttcctgtctctggcaagtaatccagaacttcttaatcttccatcctcagtaattaagaagaaagttcatttcagtggggaaagtaaagagaacatcatgaggagtgagaattctgagagtcagctcacatctaagtccaagtgcaaggacctgaagaaaaggcttcacgctgcccagctgcgggctcaagccctgtcagatattgagaaaaattaccaactgaaaagcagacagatcctgggcatgcgctagccaggtagagagacacagagctgtgtacaggatgtaatattaccaacctttaaagactgatattcaaatgctgtagtgttgaatacttggccccatgagccatgcctttctgtatagtacacatgatatttcggaattggttttactgttcttcagcaactattgtacaaaatgttcacatttaatttttctttcttcttttaagaacatattataaaaagaatactttcttggttgggcttttaatcctgtgtgtgattactagtaggaacatgagatgtgacattctaaatcttgggagaaaaaataatattaggaaaaaaatatttatgcaggaagagtagcactcactgaatagttttaaatgactgagtggtatgcttacaattgtcatgtctagatttaaattttaagtctgagattttaaatgtttttgagcttagaaaacccagttagatgcaatttggtcattaataccatgacatcttgcttataaatattccattgctctgtagttcaaatctgttagctttgtgaaaattcatcactgtgatgtttgtattctttttttttttctgtttaacagaatatgagctgtctgtcatttacctacttctttcccactaaataaaagaattcttcagtta

SEQ ID NO: 27 - DNA, 2838 bp, Homo sapiens
ccagtgtggtggaattcgtccgcggtggtggcggtgcaagagagctgagggaggcgcgagggcgcggagttccaggtcgagcagttaggccgcgagcgactgcggcgccgagccgatgagtaacccgaagcccctagaggagtggtcacctgcctgagggcacttctgtcccaccagcatcagaccaggccgcaccgagtccccggcaccatgtttgggaagaggaagaagcgggtggagatctccgcgccgtccaacttcgagcaccgcgtgcacacgggcttcgaccagcacgagcagaagttcacggggctgccccgccagtggcagagcctgatcgaggagtcggctcgccggcccaagcccctcgtcgaccccgcctgcatcacctccatccagcccggggcccccaagaccatcgtgcggggcagcaaaggtgccaaagatggggccctcacgctgctgctggacgagtttgagaacatgtcggtgacacgctccaactccctgcggagagacagcccgccgccgcccgcccgtgcccgccaggaaaatgggatgccagaggagccggccaccacggccagagggggcccagggaaggcaggcagccgaggccggttcgccggtcacagcgaggcgggtggcggcagtggtgacaggcgacgggcggggccagagaagaggcccaagtcttccagggagggctcagggggtccccaggagtcctcccgggacaaacgccccctctccgggcctgatgtcggcaccccccagcctgctggtctggccagtggggcgaaactggcagctggccggccctttaacacctacccgagggctgacacggaccacccatcccggggtgcccagggggagcctcatgacgtggcccctaacgggccatcagcggggggcctggccatcccccagtcctcctcctcctcctcccggcctcccacccgagcccgaggtgcccccagccctggagtgctgggaccccacgcctcagagccccagctggcccctccagcctgcacccccgccgcccctgctgttcctgggccccctggcccccgctcaccacagcgggagccacagcgagtatcccatgagcagttccgggctgccctgcagctggtggtggacccaggcgacccccgctcctacctggacaacttcatcaagattggcgagggctccacgggcatcgtgtgcatcgccaccgtgcgcagctcgggcaagctggtggccgtcaagaagatggacctgcgcaagcagcagaggcgcgagctgctcttcaacgaggtggtaatcatgagggactaccagcacgagaatgtggtggagatgtacaacagctacctggtgggggacgagctctgggtggtcatggagttcctggaaggaggcgccctcaccgacatcgtcacccacaccaggatgaacgaggagcagatcgcggccgtgtgccttgcagtgctgcaggccctgtcggtgctccacgcccagggcgtcatccaccgggacatcaagagcgactcgatcctgctgacccatgatggcagggtgaagctgtcagactttgggttctgcgcccaggtgagcaaggaagtgccccgaaggaagtcgctggtcggcacgccctactggatggccccagagctcatctcccgccttccctacgggccagaggtagacatctggtcgctggggataatggtgattgagatggtggacggagagcccccctacttcaacgagccacccctcaaagccatgaagatgattcgggacaacctgccaccccgactgaagaacctgcacaaggtgtcgccatccctgaagggcttcctggaccgcctgctggtgcgagaccctgcccagcgggccacggcagccgagctgctgaagcacccattcctggccaaggcagggccgcctgccagcatcgtgcccctcatgcgccagaaccgcaccagatgaggcccagcgcccttcccctcaaccaaagagccccccgggtcacccccgccccactgaggccagtagggggccaggcctcccactcctcccagcccgggagatgctccgcgtggcaccaccctccttgctgggggtagatgagaccctactactgaactccagttttgatctcgtgacttttagaaaaacacagggactcgtgggagcaagcgaggctcccaggacccccaccctctgggacaggccctcccccatgttcttctgtctccaggaagggcagcggccctcccatcactggaagtctgcagtgggggtcgctgggggtggagagaacactaagaggtgaacatgtatgagtgtgtgcacgcgtgtgagtgtgcatgtgtgtgtgtgtgcaaaggtccagccaccccgtcctccagcccgcaaggggtgtctggcgccttgcctgacacccagccccctctccccctgagccattgtgggggtcgatcatgaatgtccgaagagtggccttttcccgtagccctgcgccccctttctgtggctggatggggagacaggtcagggccccccaccctctccagcccctgcagcaaatgactactgcacctggacagcctcctcttttctagaagtctatttatattgtcattttataacactctagcccctgcccttattgggggacagatggtccctgtcctgcggggtggccctggcagaaccactgcctgaagaaccaggttcctgcccggtcagcgcagccccagcccgcccacccctgcctcgagttagttttacaattaaaacattgtcttgtttaaaaaaaaaaaaaaaaaaaaaaaaaaa

SEQ ID NO: 28 - DNA, 3131 bp, Homo sapiens
gcggagcgcggcgcgcgcggcggttgggccgttggctgttcggccctgggatccgccgccactccgcgatcagaccgctctgtgccgcgagccgccgtgagcactcggattcaagccggcgccaacgagtccgggggcatcgcccgcagcggccaagctcatggccggctgagcgggacgccgcctccgcctcagccaccgccgccgccgccgcctcctcctcctcagccggcggcggcccgggcccagcaaccatggctgaagactactgggacgggcgcctgcggcgaacaggaggagaaggaggtcgcgcggcctcatcccgggccgccgccccaggcgccgccgcgccggccccgcggctctgaggttgctcgcgcgcccccgccgatcgccatggatcggatgaagaagatcaaacggcagctgtcaatgacactccgaggtggccgaggcatagacaagaccaatggtgcccctgagcagataggcctggatgagagtggtggtggtggcggcagtgaccctggagaggcccccacacgtgctgctcctggggaacttcgttctgcacggggcccactcagctctgcaccagagattgtgcacgaggacttgaagatggggtctgatggggagagtgaccaggcttcagccacgtcctcggatgaggtgcagtctccagtgagagtgcgtatgcgcaaccatcccccacgcaagatctccactgaggacatcaacaagcgcctatcactaccagctgacatccggctgcctgagggctacctggagaagctgaccctcaatagccccatctttgacaagcccctcagccgccgcctccgtcgtgtcagcctatctgagattggctttgggaaactggagacctacattaagctggacaaactgggcgagggtacctatgccaccgtctacaaaggcaaaagcaagctcacagacaaccttgtggcactcaaggagatcagactggaacatgaagagggggcaccctgcaccgccatccgggaagtgtccctgctcaaggacctcaaacacgccaacatcgttacgctacatgacattatccacacggagaagtccctcacccttgtctttgagtacctggacaaggacctgaagcagtacctggatgactgtgggaacatcatcaacatgcacaacgtgaaactgttcctgttccagctgctccgtggcctggcctactgccaccggcagaaggtgctacaccgagacctcaagccccagaacctgctcatcaacgagaggggagagctcaagctggctgactttggcctggcccgagccaagtcaatcccaacaaagacatactccaatgaggtggtgacactgtggtaccggccccctgacatcctgcttgggtccacggactactccactcagattgacatgtggggtgtgggctgcatcttctatgagatggccacaggccgtcccctctttccgggctccacggtggaggaacagctacacttcatcttccgtatcttaggaaccccaactgaggagacgtggccaggcatcctgtccaacgaggagttcaagacatacaactaccccaagtaccgagccgaggcccttttgagccacgcaccccgacttgatagcgacggggccgacctcctcaccaagctgttgcagtttgagggtcgaaatcggatctccgcagaggatgccatgaaacatccattcttcctcagtctgggggagcggatccacaaacttcctgacactacttccatatttgcactaaaggagattcagctacaaaaggaggccagccttcggtcttcgtcgatgcctgactcaggcaggccagctttccgcgtggtggacaccgagttctaagccacagaccgaggccccagcaggcagcggctggagggatgccacacccctcacagggcagcccccaactacatcttccctgcttactctctgcctacctgcctgagccatgttcacctgcccacttgtcccctgctgcctgcccaaacaccccaccattggcctgtcaacccacccattggcctgtctgctgggtgctaacaaagctctcatcactccttcacttggtctgtctgtctctgtcttggtagttgccggtggacagcatggccgtgccagcctcccacactgaggccaggtctaccccccatcataccagcccccaggaccactaccccacggccagccaggggtccagagctagcccaggctggggatctcgactcagacaagatggtgacaatgccttgagtctgaggcatcctctgcctgctttcctgcctgccccacctgcctcatattgtgtgggcctttttttgtttgtttcattcattgttttttttttttttaattattttaaatgagatttttgttttttttaaatgcaatatctctgtatacagactggctgggccccaccccctgcgtgtggccctcccacagtattttgtgcaatgaagccctgctcccagcctttcagagacagggacacagcccctatttggaaccctgatcatcaccagaccctgggattggctatgggaaagcatgccacagccactcgccttcctacccccgcccgccatccccagttgcagggggatctggggactaccagagactctgggaaatggacaaggtggggggccccactctttctctcctgcagtcccgtagctggggcctccttccttctcagggtctccccagcccagtccccttgctcccatcccactcggtgctgttgggtaggggccctgccaggaactgaccagctcagcgaggagccataatgtgcatatgtgcacaagcagggttgggggaggggggtgtgaggggttgtgcccaggtgttgccccctatctcctggggagggtgaggcagggcagggacagtctccagggtcagtccctggatgggtggttacctccccttcctccaccctaagccctggggccctgaaatggggtgggagggcaggggtgggagccctcctagtgggtttggggggttgggttcctgaatgcaccataatcgctgtatgaaatattaaaaagtctaaagtgaaaaaaaaaaaaaaaaaa

SEQ ID NO: 29 - DNA, 1599 bp, Homo sapiens
gtggtgcgccgcccgggcgaggatgcggctgttccggtggctgctgaagcagccggtgcccaagcagatcgagcgctactcgcgcttttcgccgtcgccgctctccatcaaacaattcctggacttcgggagagataatgcatgtgagaaaacttcatatatgtttctacgaaaggaacttcctgtgcggctggctaacacaatgagagaagttaatcttctgccggataatttacttaaccgcccttcagtgggattggttcagagttggtatatgcagagttttcttgaacttttagaatatgaaaataagagccctgaggatccacaggtcttggataactttctacaagttctgattaaagtcagaaatagacacaatgatgtggttcctacaatggcacaaggagtgattgaatacaaggagaagtttgggtttgatcctttcattagcactaacatccaatattttctggatcggttttataccaaccgcatctctttccgcatgcttattaatcagcacacacttctgtttgggggtgacactaatcctgttcatcctaaacacataggaagtatcgatcccacctgtaacgtggcggatgtggtgaaagatgcatatgaaacagccaagatgctgtgtgaacagtattacctggtagctccagagctggaagttgaagaattcaatgccaaagcgccagacaaacctattcaggtggtttatgtgccctcacatctgtttcatatgctatttgagttgttcaagaactcaatgagagcgacagttgaactctatgaagacagaaaagagggctaccctgctgttaaaaccctcgttactttgggtaaagaagacttatccattaagatcagtgacctaggtggtggtgtcccacttcgaaaaatagatcgtctttttaactacatgtattctactgctcctaggcccagcctggagcctaccagagctgcccctttggctggatttggttatggtttgccaatttcccgtctgtatgctagatattttcaaggagatctgaaactgtattccatggaaggagtgggtactgatgctgtcatttatttgaaggctctttcaagtgagtcatttgagagacttccagtttttaataagtccgcatggcgccattacaagaccacgcctgaagccgatgattggagcaatcccagcagtgaacccagggatgcttcaaaatacaaagcaaaacagtaatataccaccttgatttccattacaaagtatctgatttgtctgaataaaggtgtcccactcactgttccaggaattcttgcagtgtagaggtattcacaacagcaagcagggatttggcctgccatcaattttatttaaaaagcaattaagtttgcagtttgtcctcataaacgttgtaggttgaaactgaaaaataagttaaaatgatcaatcaagataaaaggtgatctatccatccaatggaatattatttggccttaaaaaggaaggacatctgatatgtgctgcaacatgggtgaatcttgaagtcattatgctaagtgaaataaaccagacataaaaggacaaatacatcg

SEQ ID NO: 30 - DNA, 1976 bp, Homo sapiens
caggactcccgtgagggggaacggcccgtgaacgcgcgcggagctgctcgcgccccgcccagtcgccccagggcttccccacacccacggagtgaagtcagccgcggccctgcctgggaggaacttaccgtctaccgggaaaggtggccagcagatgtgtcgggcctggtgagagggtgaggcgagacggcccgatcgcccagggccccggaagctgcggaggtcacccccgcctggccttagctcagggacaccctggattcacgtgggagcccctgctcctgcctcccccgtcccaccactgaagctgttgggccaggccagtcatgctagaacggcctcctgcactggccatgcccatgcccacggagggcaccccgccacctctgagtggcacccccatcccagtcccagcctacttccgccacgcagaacctggattctccctcaagaggcccagggggctcagccggagcctcccacctccgccccctgccaagggcagcattcccatcagccgcctcttccctcctcggaccccaggctggcaccagctgcagccccggcgggtgtcattccggggcgaggcctcagagactctgcagagccctgggtatgacccaagccggccagagtccttcttccagcagagcttccagaggctcagccgcctgggccatggctcctacggagaggtcttcaaggtgcgctccaaggaggacggccggctctatgcggtaaagcgttccatgtcaccattccggggccccaaggaccgggcccgcaagttggccgaggtgggcagccacgagaaggtggggcagcacccatgctgcgtgcggctggagcaggcctgggaggagggcggcatcctgtacctgcagacggagctgtgcgggcccagcctgcagcaacactgtgaagcctggggtgccagcctgcctgaggcccaggtctggggctacctgcgggacacgctgcttgccctggcccatctgcacagccagggcctggtgcaccttgatgtcaagcctgccaacatcttcctggggccccggggccgctgcaagctgggtgacttcggactgctggtggagctgggtacagcaggagctggtgaggtccaggagggagacccccgctacatggcccccgagctgctgcagggctcctatgggacagcagcggatgtgttcagtctgggcctcaccatcctggaagtggcatgcaacatggagctgccccacggtggggagggctggcagcagctgcgccagggctacctgccccctgagttcactgccggtctgtcttccgagctgcgttctgtccttgtcatgatgctggagccagaccccaagctgcgggccacggccgaggccctgctggcactgcctgtgttgaggcagccgcgggcctggggtgtgctgtggtgcatggcagcggaggccctgagccgagggtgggccctgtggcaggccctgcttgccctgctctgctggctctggcatgggctggctcaccctgccagctggctacagcccctgggcccgccagccaccccgcctgactcaccaccctgcagtttgctcctggacagcagcttctccagcaactgggatgacgacagcctagggccttcactctcccctgaggctgtcctggcccggactgtggggagcacctccaccccccggagcaggtgcacacccagggatgccctggacctaagtgacatcaactcagagcctcctcggggctccttcccctcctttgagcctcggaacctcctcagcatgtttgaggacaccctagacccaacctgagccccagattctgcctctgcacttttaaccttttatcctgtgtctctcccgtcgcccttgaaagctggggcccctcgggaactcccatggtcttctctgcctggccgtgtctaataaaaagtatttgaaccttgaaaaaaaaaaaagaag

SEQ ID NO: 31 - DNA, 2213 bp, Homo sapiens
ggcacgagggagcggtgcggaggctctgctcggatcgaggtctgcagcgcagcttcgggagcatgagtgctgcagtgactgcagggaagctggcacgggcaccggccgaccctgggaaagccggggtccccggagttgcagctcccggagctccggcggcggctccaccggcgaaagagatcccggaggtcctagtggacccacgcagccggcggcgctatgtgcggggccgctttttgggcaagggcggctttgccaagtgcttcgagatctcggacgcggacaccaaggaggtgttcgcgggcaagattgtgcctaagtctctgctgctcaagccgcaccagagggagaagatgtccatggaaatatccattcaccgcagcctcgcccaccagcacgtcgtaggattccacggctttttcgaggacaacgacttcgtgttcgtggtgttggagctctgccgccggaggtctctcctggagctgcacaagaggaggaaagccctgactgagcctgaggcccgatactacctacggcaaattgtgcttggctgccagtacctgcaccgaaaccgagttattcatcgagacctcaagctgggcaaccttttcctgaatgaagatctggaggtgaaaataggggattttggactggcaaccaaagtcgaatatgacggggagaggaagaagaccctgtgtgggactcctaattacatagctcccgaggtgctgagcaagaaagggcacagtttcgaggtggatgtgtggtccattgggtgtatcatgtataccttgttagtgggcaaaccaccttttgagacttcttgcctaaaagagacctacctccggatcaagaagaatgaatacagtattcccaagcacatcaaccccgtggccgcctccctcatccagaagatgcttcagacagatcccactgcccgcccaaccattaacgagctgcttaatgacgagttctttacttctggctatatccctgcccgtctccccatcacctgcctgaccattccaccaaggttttcgattgctcccagcagcctggaccccagcaaccggaagcccctcacagtcctcaataaaggcttggagaaccccctgcctgagcgtccccgggaaaaagaagaaccagtggttcgagagacaggtgaggtggtcgactgccacctcagtgacatgctgcagcagctgcacagtgtcaatgcctccaagccctcggagcgtgggctggtcaggcaagaggaggctgaggatcctgcctgcatccccatcttctgggtcagcaagtgggtggactattcggacaagtacggccttgggtatcagctctgtgataacagcgtgggggtgctcttcaatgactcaacacgcctcatcctctacaatgatggtgacagcctgcagtacatagagcgtgacggcactgagtcctacctcaccgtgagttcccatcccaactccttgatgaagaagatcaccctccttaaatatttccgcaattacatgagcgagcacttgctgaaggcaggtgccaacatcacgccgcgcgaaggtgatgagctcgcccggctgccctacctacggacctggttccgcacccgcagcgccatcatcctgcacctcagcaacggcagcgtgcagatcaacttcttccaggatcacaccaagctcatcttgtgcccactgatggcagccgtgacctacatcgacgagaagcgggacttccgcacataccgcctgagtctcctggaggagtacggctgctgcaaggagctggccagccggctccgctacgcccgcactatggtggacaagctgctgagctcacgctcggccagcaaccgtctcaaggcctcctaatagctgccctcccctccggactggtgccctcctcactcccacctgcatctggggcccatactggttggctcccgcggtgccatgtctgcagtgtgccccccagccccggtggctgggcagagctgcatcatccttgcaggtgggggttgctgtgtaagttatttttgtacatgttcgggtgtgggttctacagccttgtccccctccccctcaaccccaccatatgaattgtacagaatatttctattgaattcggaactgtcctttccttggctttatgcacattaaacagatgtgaatattcaaaaaaaaaaaaaaaaaaaaaaaaaaaaaaaaaaa

SEQ ID NO: 32 - DNA, 3001 bp, Homo sapiens
tgagtaaatcgatacatcatacgcgcgctcctctggccgcccctccctccgacgatcggggaccctggcgggcggcaggaggacatggccagcgacgccgtgcagagtgagcctcgcagctggtccctgctagagcagctgggcctggccggggcagacctggcggcccccggggtacagcagcagctggagctggagcgggagcggctgcggcgggaaatccgcaaggagctgaagctgaaggagggtgctgagaacctgcggcgggccaccactgacctgggccgcagcctgggccccgtagagctgctgctgcggggctcctcgcgccgcctcgacctgctgcaccagcagctgcaggagctgcacgcccacgtggtgcttcccgacccggcggccacccacgatggcccccagtcccctggtgcgggtggccccacctgctcggccaccaacctgagccgcgtggcgggcctggagaagcagttggccattgagctgaaggtgaagcagggggcggagaacatgatccagacctacagcaatggcagcaccaaggaccggaagctgctgctgacagcccagcagatgttgcaggacagtaagaccaagattgacatcatccgcatgcaactccgccgggcgctgcaggccgaccagctggagaaccaggcagccccggatgacacccaagggagtcctgacctgggggctgtggagctgcgcatcgaagagctgcggcaccacttccgagtggagcacgcggtggccgagggtgccaagaacgtactgcgcctgctcagcgctgccaaggccccggaccgcaaggcagtcagcgaggcccaggagaaattgacagaatccaaccagaagctggggctgctgcgggaggctctggagcggagacttggggagctgcccgccgaccaccccaaggggcggctgctgcgagaagagctcgctgcggcctcctccgctgccttcagcacccgcctggccgggccctttcccgccacgcactacagcaccctgtgcaagcccgcgccgctcacagggaccctggaggtacgagtggtgggctgcagagacctcccagagaccatcccgtggaaccctaccccctcaatggggggacctgggaccccagacagccgcccccccttcctgagccgcccagcccggggcctttacagccgaagcggaagcctcagtggccggagcagcctcaaagcagaagccgagaacaccagtgaagtcagcactgtgcttaagctggataacacagtggtggggcagacgtcttggaagccatgtggccccaatgcctgggaccagagcttcactctggagctggaaagggcacgggaactggagttggctgtgttctggcgggaccagcggggcctgtgtgccctcaaattcctgaagttggaggatttcttggacaatgagaggcatgaggtgcagctggacatggaaccccagggctgcctggtggctgaggtcaccttccgcaaccctgtcattgagaggattcctcggctccgacggcagaagaaaattttctccaagcagcaagggaaggcgttccagcgtgctaggcagatgaacatcgatgtcgccacgtgggtgcggctgctccggaggctcatccccaatgccacgggcacaggcacctttagccctggggcttctccaggatccgaggcccggaccacgggtgacatatcggtggagaagctgaacctcggcactgactcggacagctcacctcagaagagctcgcgggatcctccttccagcccatcgagcctgagctcccccatccaggaatccactgctcccgagctgccttcggagacccaggagaccccaggccccgccctgtgcagccctctgaggaagtcacctctgaccctcgaagatttcaagttcctggcggtgctgggccggggtcattttgggaaggtgctcctctccgaattccggcccagtggggagctgttcgccatcaaggctctgaagaaaggggacattgtggcccgagacgaggtggagagcctgatgtgtgagaagcggatattggcggcagtgaccagtgcgggacaccccttcctggtgaacctcttcggctgtttccagacaccggagcacgtgtgcttcgtgatggagtactcggccggtggggacctgatgctgcacatccacagcgacgtgttctctgagccccgtgccatcttttattccgcctgcgtggtgctgggcctacagtttcttcacgaacacaagatcgtctacagggacctgaagttggacaatttgctcctggacaccgagggctacgtcaagatcgcagactttggcctctgcaaggaggggatgggctatggggaccggaccagcacattctgtgggaccccggagttcctggcccctgaggtgctgacggacacgtcgtacacgcgagctgtggactggtggggactgggtgtgctgctctacgagatgctggttggcgagtccccattcccaggggatgatgaggaggaggtcttcgacagcatcgtcaacgacgaggttcgctacccccgcttcctgtcggccgaagccatcggcatcatgagaaggctgcttcggaggaacccagagcggaggctgggatctagcgagagagatgcagaagatgtgaagaaacagcccttcttcaggactctgggctgggaagccctgttggcccggcgcctgccaccgccctttgtgcccacgctgtccggccgcaccgacgtcagcaacttcgacgaggagttcaccggggaggcccccacactgagcccgccccgcgacgcgcggcccctcacagccgcggagcaggcagccttcctggacttcgacttcgtggccgggggctgctagccccctcccctgcccctgcccctgcccctgcccgagagctcttagtttttaaaaaggcctttgggatttgccggaaaaaaaaaaaaaa

SEQ ID NO: 33 - DNA, 12387 bp, Homo sapiens
atggcgggctccggagccggtgtgcgttgctccctgctgcggctgcaggagaccttgtccgctgcggaccgctgcggtgctgccctggccggtcatcaactgatccgcggcctggggcaggaatgcgtcctgagcagcagccccgcggtgctggcattacagacatctttagttttttccagagatttcggtttgcttgtatttgtccggaagtcactcaacagtattgaatttcgtgaatgtagagaagaaatcctaaagtttttatgtattttcttagaaaaaatgggccagaagatcgcaccttactctgttgaaattaagaacacttgtaccagtgtttatacaaaagatagagctgctaaatgtaaaattccagccctggaccttcttattaagttacttcagacttttagaagttctagactcatggatgaatttaaaattggagaattatttagtaaattctatggagaacttgcattgaaaaaaaaaataccagatacagttttagaaaaagtatatgagctcctaggattattgggtgaagttcatcctagtgagatgataaataatgcagaaaacctgttccgcgcttttctgggtgaacttaagacccagatgacatcagcagtaagagagcccaaactacctgttctggcaggatgtctgaaggggttgtcctcacttctgtgcaacttcactaagtccatggaagaagatccccagacttcaagggagatttttaattttgtactaaaggcaattcgtcctcagattgatctgaagagatatgctgtgccctcagctggcttgcgcctatttgccctgcatgcatctcagtttagcacctgccttctggacaactacgtgtctctatttgaagtcttgttaaagtggtgtgcccacacaaatgtagaattgaaaaaagctgcactttcagccctggaatcctttctgaaacaggtttctaatatggtggcgaaaaatgcagaaatgcataaaaataaactgcagtactttatggagcagttttatggaatcatcagaaatgtggattcgaacaacaaggagttatctattgctatccgtggatatggactttttgcaggaccgtgcaaggttataaacgcaaaagatgttgacttcatgtacgttgagctcattcagcgctgcaagcagatgttcctcacccagacagacactggtgacgaccgtgtttatcagatgccaagcttcctccagtctgttgcaagcgtcttgctgtaccttgacacagttcctgaggtgtatactccagttctggagcacctcgtggtgatgcagatagacagtttcccacagtacagtccaaaaatgcagctggtgtgttgcagagccatagtgaaggtgttcctagctttggcagcaaaagggccagttctcaggaattgcattagtactgtggtgcatcagggtttaatcagaatatgttctaaaccagtggtccttccaaagggccctgagtctgaatctgaagaccaccgtgcttcaggggaagtcagaactggcaaatggaaggtgcccacatacaaagactacgtggatctcttcagacatctcctgagctctgaccagatgatggattctattttagcagatgaagcatttttctctgtgaattcctccagtgaaagtctgaatcatttactttatgatgaatttgtaaaatccgttttgaagattgttgagaaattggatcttacacttgaaatacagactgttggggaacaagagaatggagatgaggcgcctggtgtttggatgatcccaacttcagatccagcggctaacttgcatccagctaaacctaaagatttttcggctttcattaacctggtggaattttgcagagagattctccctgagaaacaagcagaattttttgaaccatgggtgtactcattttcatatgaattaattttgcaatctacaaggttgcccctcatcagtggtttctacaaattgctttctattacagtaagaaatgccaagaaaataaaatatttcgagggagttagtccaaagagtctgaaacactctcctgaagacccagaaaagtattcttgctttgctttatttgtgaaatttggcaaagaggtggcagttaaaatgaagcagtacaaagatgaacttttggcctcttgtttgacctttcttctgtccttgccacacaacatcattgaactcgatgttagagcctacgttcctgcactgcagatggctttcaaactgggcctgagctatacccccttggcagaagtaggcctgaatgctctagaagaatggtcaatttatattgacagacatgtaatgcagccttattacaaagacattctcccctgcctggatggatacctgaagacttcagccttgtcagatgagaccaagaataactgggaagtgtcagctctttctcgggctgcccagaaaggatttaataaagtggtgttaaagcatctgaagaagacaaagaacctttcatcaaacgaagcaatatccttagaagaaataagaattagagtagtacaaatgcttggatctctaggaggacaaataaacaaaaatcttctgacagtcacgtcctcagatgagatgatgaagagctatgtggcctgggacagagagaagcggctgagctttgcagtgccctttagagagatgaaacctgtcattttcctggatgtgttcctgcctcgagtcacagaattagcgctcacagccagtgacagacaaactaaagttgcagcctgtgaacttttacatagcatggttatgtttatgttgggcaaagccacgcagatgccagaagggggacagggagccccacccatgtaccagctctataagcggacgtttcctgtgctgcttcgacttgcgtgtgatgttgatcaggtgacaaggcaactgtatgagccactagttatgcagctgattcactggttcactaacaacaagaaatttgaaagtcaggatactgttgccttactagaagctatattggatggaattgtggaccctgttgacagtactttaagagatttttgtggtcggtgtattcgagaattccttaaatggtccattaagcaaataacaccacagcagcaggagaagagtccagtaaacaccaaatcgcttttcaagcgactttatagccttgcgcttcaccccaatgctttcaagaggctgggagcatcacttgcctttaataatatctacagggaattcagggaagaagagtctctggtggaacagtttgtgtttgaagccttggtgatatacatggagagtctggccttagcacatgcagatgagaagtccttaggtacaattcaacagtgttgtgatgccattgatcacctatgccgcatcattgaaaagaagcatgtttctttaaataaagcaaagaaacgacgtttgccgcgaggatttccaccttccgcatcattgtgtttattggatctggtcaagtggcttttagctcattgtgggaggccccagacagaatgtcgacacaaatccattgaactcttttataaattcgttcctttattgccaggcaacagatcccctaatttgtggctgaaagatgttctcaaggaagaaggtgtctcttttctcatcaacacctttgaggggggtggctgtggccagccctcgggcatcctggcccagcccaccctcttgtaccttcgggggccattcagcctgcaggccacgctatgctggctggacctgctcctggccgcgttggagtgctacaacacgttcattggcgagagaactgtaggagcgctccaggtcctaggtactgaagcccagtcttcacttttgaaagcagtggctttcttcttagaaagcattgccatgcatgacattatagcagcagaaaagtgctttggcactggggcagcaggtaacagaacaagcccacaagagggagaaaggtacaactacagcaaatgcaccgttgtggtccggattatggagtttaccacgactctgctaaacacctccccggaaggatggaagctcctgaagaaggacttgtgtaatacacacctgatgagagtcctggtgcagacgctgtgtgagcccgcaagcataggtttcaacatcggagacgtccaggttatggctcatcttcctgatgtttgtgtgaatctgatgaaagctctaaagatgtccccatacaaagatatcctagagacccatctgagagagaaaataacagcacagagcattgaggagctttgtgccgtcaacttgtatggccctgacgcgcaagtggacaggagcaggctggctgctgttgtgtctgcctgtaaacagcttcacagagctgggcttctgcataatatattaccgtctcagtccacagatttgcatcattctgttggcacagaacttctttccctggtttataaaggcattgcccctggagatgagagacagtgtctgccttctctagacctcagttgtaagcagctggccagcggacttctggagttagcctttgcttttggaggactgtgtgagcgccttgtgagtcttctcctgaacccagcggtgctgtccacggcgtccttgggcagctcacagggcagcgtcatccacttctcccatggggagtatttctatagcttgttctcagaaacgatcaacacggaattattgaaaaatctggatcttgctgtattggagctcatgcagtcttcagtggataataccaaaatggtgagtgccgttttgaacggcatgttagaccagagcttcagggagcgagcaaaccagaaacaccaaggactgaaacttgcgactacaattctgcaacactggaagaagtgtgattcatggtgggccaaagattcccctctcgaaactaaaatggcagtgctggccttactggcaaaaattttacagattgattcatctgtatcttttaatacaagtcatggttcattccctgaagtctttacaacatatattagtctacttgctgacacaaagctggatctacatttaaagggccaagctgtcactcttcttccattcttcaccagcctcactggaggcagtctggaggaacttagacgtgttctggagcagctcatcgttgctcacttccccatgcagtccagggaatttcctccaggaactccgcggttcaataattatgtggactgcatgaaaaagtttctagatgcattggaattatctcaaagccctatgttgttggaattgatgacagaagttctttgtcgggaacagcagcatgtcatggaagaattatttcaatccagtttcaggaggattgccagaaggggttcatgtgtcacacaagtaggccttctggaaagcgtgtatgaaatgttcaggaaggatgacccccgcctaagtttcacacgccagtcctttgtggaccgctccctcctcactctgctgtggcactgtagcctggatgctttgagagaattcttcagcacaattgtggtggatgccattgatgtgttgaagtccaggtttacaaagctaaatgaatctacctttgatactcaaatcaccaagaagatgggctactataagattctagacgtgatgtattctcgccttcccaaagatgatgttcatgctaaggaatcaaaaattaatcaagttttccatggctcgtgtattacagaaggaaatgaacttacaaagacattgattaaattgtgctacgatgcatttacagagaacatggcaggagagaatcagctgctggagaggagaagactttaccattgtgcagcatacaactgcgccatatctgtcatctgctgtgtcttcaatgagttaaaattttaccaaggttttctgtttagtgaaaaaccagaaaagaacttgcttatttttgaaaatctgatcgacctgaagcgccgctataattttcctgtagaagttgaggttcctatggaaagaaagaaaaagtacattgaaattaggaaagaagccagagaagcagcaaatggggattcagatggtccttcctatatgtcttccctgtcatatttggcagacagtaccctgagtgaggaaatgagtcaatttgatttctcaaccggagttcagagctattcatacagctcccaagaccctagacctgccactggtcgttttcggagacgggagcagcgggaccccacggtgcatgatgatgtgctggagctggagatggacgagctcaatcggcatgagtgcatggcgcccctgacggccctggtcaagcacatgcacagaagcctgggcccgcctcaaggagaagaggattcagtgccaagagatcttccttcttggatgaaattcctccatggcaaactgggaaatccaatagtaccattaaatatccgtctcttcttagccaagcttgttattaatacagaagaggtctttcgcccttacgcgaagcactggcttagccccttgctgcagctggctgcttctgaaaacaatggaggagaaggaattcactacatggtggttgagatagtggccactattctttcatggacaggcttggccactccaacaggggtccctaaagatgaagtgttagcaaatcgattgcttaatttcctaatgaaacatgtctttcatccaaaaagagctgtgtttagacacaaccttgaaattataaagacccttgtcgagtgctggaaggattgtttatccatcccttataggttaatatttgaaaagttttccggtaaagatcctaattctaaagacaactcagtagggattcaattgctaggcatcgtgatggccaatgacctgcctccctatgacccacagtgtggcatccagagtagcgaatacttccaggctttggtgaataatatgtcctttgtaagatataaagaagtgtatgccgctgcagcagaagttctaggacttatacttcgatatgttatggagagaaaaaacatactggaggagtctctgtgtgaactggttgcgaaacaattgaagcaacatcagaatactatggaggacaagtttattgtgtgcttgaacaaagtgaccaagagcttccctcctcttgcagacaggttcatgaatgctgtgttctttctgctgccaaaatttcatggagtgttgaaaacactctgtctggaggtggtactttgtcgtgtggagggaatgacagagctgtacttccagttaaagagcaaggacttcgttcaagtcatgagacatagagatgatgaaagacaaaaagtatgtttggacataatttataagatgatgccaaagttaaaaccagtagaactccgagaacttctgaaccccgttgtggaattcgtttcccatccttctacaacatgtagggaacaaatgtataatattctcatgtggattcatgataattacagagatccagaaagtgagacagataatgactcccaggaaatatttaagttggcaaaagatgtgctgattcaaggattgatcgatgagaaccctggacttcaattaattattcgaaatttctggagccatgaaactaggttaccttcaaataccttggaccggttgctggcactaaattccttatattctcctaagatagaagtgcactttttaagtttagcaacaaattttctgctcgaaatgaccagcatgagcccagattatccaaaccccatgttcgagcatcctctgtcagaatgcgaatttcaggaatataccattgattctgattggcgtttccgaagtactgttctcactccgatgtttgtggagacccaggcctcccagggcactctccagacccgtacccaggaagggtccctctcagctcgctggccagtggcagggcagataagggccacccagcagcagcatgacttcacactgacacagactgcagatggaagaagctcatttgattggctgaccgggagcagcactgacccgctggtcgaccacaccagtccctcatctgactccttgctgtttgcccacaagaggagtgaaaggttacagagagcacccttgaagtcagtggggcctgattttgggaaaaaaaggctgggccttccaggggacgaggtggataacaaagtgaaaggtgcggccggccggacggacctactacgactgcgcagacggtttatgagggaccaggagaagctcagtttgatgtatgccagaaaaggcgttgctgagcaaaaacgagagaaggaaatcaagagtgagttaaaaatgaagcaggatgcccaggtcgttctgtacagaagctaccggcacggagaccttcctgacattcagatcaagcacagcagcctcatcaccccgttacaggccgtggcccagagggacccaataattgcaaaacagctctttagcagcttgttttctggaattttgaaagagatggataaatttaagacactgtctgaaaaaaacaacatcactcaaaagttgcttcaagacttcaatcgttttcttaataccaccttctctttctttccaccctttgtctcttgtattcaggacattagctgtcagcacgcagccctgctgagcctcgacccagcggctgttagcgctggttgcctggccagcctacagcagcccgtgggcatccgcctgctagaggaggctctgctccgcctgctgcctgctgagctgcctgccaagcgagtccgtgggaaggcccgcctccctcctgatgtcctcagatgggtggagcttgctaagctgtatagatcaattggagaatacgacgtcctccgtgggatttttaccagtgagataggaacaaagcaaatcactcagagtgcattattagcagaagccagaagtgattattctgaagctgctaagcagtatgatgaggctctcaataaacaagactgggtagatggtgagcccacagaagccgagaaggatttttgggaacttgcatcccttgactgttacaaccaccttgctgagtggaaatcacttgaatactgttctacagccagtatagacagtgagaaccccccagacctaaataaaatctggagtgaaccattttatcaggaaacatatctaccttacatgatccgcagcaagctgaagctgctgctccagggagaggctgaccagtccctgctgacatttattgacaaagctatgcacggggagctccagaaggcgattctagagcttcattacagtcaagagctgagtctgctttacctcctgcaagatgatgttgacagagccaaatattacattcaaaatggcattcagagttttatgcagaattattctagtattgatgtcctcttacaccaaagtagactcaccaaattgcagtctgtacaggctttaacagaaattcaggagttcatcagctttataagcaaacaaggcaatttatcatctcaagttccccttaagagacttctgaacacctggacaaacagatatccagatgctaaaatggacccaatgaacatctgggatgacatcatcacaaatcgatgtttctttctcagcaaaatagaggagaagcttacccctcttccagaagataatagtatgaatgtggatcaagatggagaccccagtgacaggatggaagtgcaagagcaggaagaagatatcagctccctgatcaggagttgcaagttttccatgaaaatgaagatgatagacagtgcccggaagcagaacaatttctcacttgctatgaaactactgaaggagctgcataaagagtcaaaaaccagagacgattggctggtgagctgggtgcagagctactgccgcctgagccactgccggagccggtcccagggctgctctgagcaggtgctcactgtgctgaaaacagtctctttgttggatgagaacaacgtgtcaagctacttaagcaaaaatattctggctttccgtgaccagaacattctcttgggtacaacttacaggatcatagcgaatgctctcagcagtgagccagcctgccttgctgaaatcgaggaggacaaggctagaagaatcttagagctttctggatccagttcagaggattcagagaaggtgatcgcgggtctgtaccagagagcattccagcacctctctgaggctgtgcaggcggctgaggaggaggcccagcctccctcctggagctgtgggcctgcagctggggtgattgatgcttacatgacgctggcagatttctgtgaccaacagctgcgcaaggaggaagagaatgcatcagttattgattctgcagaactgcaggcgtatccagcacttgtggtggagaaaatgttgaaagctttaaaattaaattccaatgaagccagattgaagtttcctagattacttcagattatagaacggtatccagaggagactttgagcctcatgacaaaagagatctcttccgttccctgctggcagttcatcagctggatcagccacatggtggccttactggacaaagaccaagccgttgctgttcagcactctgtggaagaaatcactgataactacccgcaggctattgtttatcccttcatcataagcagcgaaagctattccttcaaggatacttctactggtcataagaataaggagtttgtggcaaggattaaaagtaagttggatcaaggaggagtgattcaagattttattaatgccttagatcagctctctaatcctgaactgctctttaaggattggagcaatgatgtaagagctgaactagcaaaaacccctgtaaataaaaaaaacattgaaaaaatgtatgaaagaatgtatgcagccttgggtgacccaaaggctccaggcctgggggcctttagaaggaagtttattcagacttttggaaaagaatttgataaacattttgggaaaggaggttctaaactactgagaatgaagctcagtgacttcaacgacattaccaacatgctacttttaaaaatgaacaaagactcaaagccccctgggaatctgaaagaatgttcaccctggatgagcgacttcaaagtggagttcctgagaaatgagctggagattcccggtcagtatgacggtaggggaaagccattgccagagtaccacgtgcgaatcgccgggtttgatgagcgggtgacagtcatggcgtctctgcgaaggcccaagcgcatcatcatccgtggccatgacgagagggaacaccctttcctggtgaagggtggcgaggacctgcggcaggaccagcgcgtggagcagctcttccaggtcatgaatgggatcctggcccaagactccgcctgcagccagagggccctgcagctgaggacctatagcgttgtgcccatgacctccaggttaggattaattgagtggcttgaaaatactgttaccttgaaggaccttcttttgaacaccatgtcccaagaggagaaggcggcttacctgagtgatcccagggcaccgccgtgtgaatataaagattggctgacaaaaatgtcaggaaaacatgatgttggagcttacatgctaatgtataagggcgctaatcgtactgaaacagtcacgtcttttagaaaacgagaaagtaaagtgcctgctgatctcttaaagcgggccttcgtgaggatgagtacaagccctgaggctttcctggcgctccgctcccacttcgccagctctcacgctctgatatgcatcagccactggatcctcgggattggagacagacatctgaacaactttatggtggccatggagactggcggcgtgatcgggatcgactttgggcatgcgtttggatccgctacacagtttctgccagtccctgagttgatgccttttcggctaactcgccagtttatcaatctgatgttaccaatgaaagaaacgggccttatgtacagcatcatggtacacgcactccgggccttccgctcagaccctggcctgctcaccaacaccatggatgtgtttgtcaaggagccctcctttgattggaaaaattttgaacagaaaatgctgaaaaaaggagggtcatggattcaagaaataaatgttgctgaaaaaaattggtacccccgacagaaaatatgttacgctaagagaaagttagcaggtgccaatccagcagtcattacttgtgatgagctactcctgggtcatgagaaggcccctgccttcagagactatgtggctgtggcacgaggaagcaaagatcacaacattcgtgcccaagaaccagagagtgggctttcagaagagactcaagtgaagtgcctgatggaccaggcaacagaccccaacatccttggcagaacctgggaaggatgggagccctggatgtga

SEQ ID NO: 34 - DNA, 3052 bp, Homo sapiens
ccggtgtgaaggccatgagtgattactgggttgttggaaagaagtctaactatgaagtattagaaaaagatgttggtttaaagcgattttttcctaagagtttactggattctgtcaaggccaaaacactaagaaaactgatccaacaaacatttagacaatttgccaaccttaatagagaagaaagtattctgaaattctttgagatcctgtctccagtctacagatttgataaggaatgcttcaagtgtgctcttggttcaagctggattatttcagtggaactggcaatcggcccagaagaaggaatcagttacctaacggacaagggctgcaatcccacacatcttgctgacttcactcaagtgcaaaccattcagtattcaaacagtgaagacaaggacagaaaaggaatgctacaactaaaaatagcaggtgcacccgagcctctgacagtgacggcaccatccctaaccattgcggagaatatggctgacctaatagatgggtactgccggctggtgaatggaacctcgcagtcatttatcatcagacctcagaaagaaggtgaacgggctttgccatcaataccaaagttggccaacagcgaaaagcaaggcatgcggacacacgccgtctctgtgtcagaaacagatgattatgctgagattatagatgaagaagatacttacaccatgccctcaaccagggattatgagattcaaagagaaagaatagaacttggacgatgtattggagaaggccaatttggagatgtacatcaaggcatttatatgagtccagagaatccagctttggcggttgcaattaaaacatgtaaaaactgtacttcggacagcgtgagagagaaatttcttcaagaagcctgccattacacatctttgcactggaattggtgcagatatataagtgatcctaatgttgatgcctgcccagaccccaggaatgcagagttaacaatgcgtcagtttgaccatcctcatattgtgaagctgattggagtcatcacagagaatcctgtctggataatcatggagctgtgcacacttggagagctgaggtcatttttgcaagtaaggaaatacagtttggatctagcatctttgatcctgtatgcctatcagcttagtacagctcttgcatatctagagagcaaaagatttgtacacagggacattgctgctcggaatgttctggtgtcctcaaatgattgtgtaaaattaggagactttggattatcccgatatatggaagatagtacttactacaaagcttccaaaggaaaattgcctattaaatggatggctccagagtcaatcaattttcgacgttttacctcagctagtgacgtatggatgtttggtgtgtgtatgtgggagatactgatgcatggtgtgaagccttttcaaggagtgaagaacaatgatgtaatcggtcgaattgaaaatggggaaagattaccaatgcctccaaattgtcctcctaccctctacagccttatgacgaaatgctgggcctatgaccccagcaggcggcccaggtttactgaacttaaagctcagctcagcacaatcctggaggaagagaaggctcagcaagaagagcgcatgaggatggagtccagaagacaggccacagtgtcctgggactccggagggtctgatgaagcaccgcccaagcccagcagaccgggttatcccagtccgaggtccagcgaaggattttatcccagcccacagcacatggtacaaaccaatcattaccaggtttctggctaccctggttcacatggaatcacagccatggctggcagcatctatccaggtcaggcatctcttttggaccaaacagattcatggaatcatagatctcaggagatagcaatgtggcagcccaatgtggaggactctacagtattggacctgcgagggattgggcaagtgttgccaacccatctgatggaagagcgtctaatccgacagcaacaggaaatggaagaagatcagcgctggctggaaaaagaggaaagatttctgattggaaaccaacatatatatcagcctgtgggtaaaccagatcctgcagctccaccaaagaaaccgcctcgccctggagctcccggtcatctgggaagccttgccagcctcagcagccctgctgacagctacaacgagggtgtcaagcttcagccccaggaaatcagcccccctcctactgccaacctggaccggtcgaatgataaggtgtacgagaatgtgacgggcctggtgaaagctgtcatcgagatgtccagtaaaatccagccagccccaccagaggagtatgtccctatggtgaaggaagtcggcttggccctgaggacattattggccactgtggatgagaccattcccctcctaccagccagcacccaccgagagattgagatggcacagaagctattgaactctgacctgggtgagctcatcaacaagatgaaactggcccagcagtatgtcatgaccagcctccagcaagagtacaaaaagcaaatgctgactgccgctcacgccctggctgtggatgccaaaaacttactcgatgtcattgaccaagcaagactgaaaatgcttgggcagacgagaccacactgagcctcccctaggagcacgtcttgctaccctcttttgaagatgttctctagccttccaccagcagcgaggaattaaccctgtgtcctcagtcgccagcactcacagctccaacttttttgaatgaccatctggttgaaaaatctttctcatataagtttaaccacactttgatttgggttcattttttgttttgtttttttcaatcatgatattcagaaaaatccaggatccaaaatgtggcgtttttctaagaatgaaaattatatgtaagcttttaagcatcatgaagaacaatttatgttcacattaagatacgttctaaagggggatggccaaggggtgacatcttaattcctaaactaccttagctgcatagtggaagaggagagccggaattc

SEQ ID NO: 35 - DNA, 3527 bp, Homo sapiens
ccatgggcgcttccaggccgcactcacggtccttgcctgccccctggcgtccgtgtggaggaaggcagtgcccgtttcttcagccgtgggtgcccctggctctgcctccccggggatcccccaaaaccctcgggccctcctcttccgggaagtcctccgggccgacccacacagctgtcgctgccctgattccactccctcttccctgcttggcccttacccgagggcgggcctgcccatgaggccgctctcaggacgcctgcccacagcagctcctgacattgggccctgtgctcaggggtggagtctggggctgggtgagggcaccgacgggtggaggggaagctgccggaagcggggagagaggcggcccccacctgtgcccccgcagctctgagggttgggaaggcagcgcctgcagccctcaccttcctgccctcaggctgcgaggcttgttcccagagggccgttggcttccctgagtgcctgagtgtccataagttggacccccaagaagccccaaccgggaggtcctcctccccctctcctgcgctcaggccggccctggcggtgcttgcccagtgggttcccatagtgcgggcgctaagtgctcagatgggccccagtgggcctgaggacttgtggggccggctgggccctcaggaggagccggggtgctctggagcgcctgtgggtgctgggtgtggctgcttcccggcctgtcatgaggaagtgggacggcccgcctgccacgcccagctctgggtgctccagctgggccacagcctggtcctgccgctgcgcccgcccgccatggtgtcccgggaccaggctcacctgggccccaagtatgtgggcctctgggacttcaagtcccggacggacgaggagctgagcttccgcgcgggggacgtcttccacgtggccaggaaggaggagcagtggtggtgggccacgctgctggacgaggcgggtggggccgtggcccagggctatgtgccccacaactacctggccgagagggagacggtggagtcggaaccgtggttctttggctgcatctcccgctcggaagctgtgcgtcggctgcaggccgagggcaacgccacgggcgccttcctgatcagggtcagcgagaagccgagtgccgactacgtcctgtcggtgcgggacacgcaggctgtgcggcactacaagatctggcggcgtgccgggggccggctgcacctgaacgaggcggtgtccttcctcagcctgcccgagcttgtgaactaccacagggcccagagcctgtcccacggcctgcggctggccgcgccctgccggaagcacgagcctgagcccctgccccattgggatgactgggagaggccgagggaggagttcacgctctgcaggaagctggggtccggctactttggggaggtcttcgaggggctctggaaagaccgggtccaggtggccattaaggtgatttctcgagacaacctcctgcaccagcagatgctgcagtcggagatccaggccatgaagaagctgcggcacaaacacatcctggcgctgtacgccgtggtgtccgtgggggaccccgtgtacatcatcacggagctcatggccaagggcagcctgctggagctgctccgcgactctgatgagaaagtcctgcccgtttcggagctgctggacatcgcctggcaggtggctgagggcatgtgttacctggagtcgcagaattacatccaccgggacctggccgccaggaacatcctcgtcggggaaaacaccctctgcaaagttggggacttcgggttagccaggcttatcaaggaggacgtctacctctcccatgaccacaatatcccctacaagtggacggcccctgaagcgctctcccgaggccattactccaccaaatccgacgtctggtcctttgggattctcctgcatgagatgttcagcaggggtcaggtgccctacccaggcatgtccaaccatgaggccttcctgagggtggacgccggctaccgcatgccctgccctctggagtgcccgcccagcgtgcacaagctgatgctgacatgctggtgcagggaccccgagcagagaccctgcttcaaggccctgcgggagaggctctccagcttcaccagctacgagaacccgacctgagctgctgtggagcgggcatggccgggccctgctgaggaggggcctgggcagagggcctggacctgggatcaaggcccacgcgcttccctggggtttactgaggtgatgggtgcaggaaaggttcacaaatgtggagtgtctgcgtccaatacacgcgtgtgctcctctccttactccatcgtgtgtgccttgggtctcagctgctgacacgcagcctgctctggagcctgcagatgagatccgggagactgacacgaagccagcagaggtcagaggggactctgaccacagcccgctctctggctgtctgtctgcagtgcccggctgagggtgggaggcaaacacgccttgttcctgctcttcccagttcagcttggtgggagaaagtcattcgcgtggctcgggacgctcatgtaaatttggttttggtgctcaagggttctttcctcccaggggcaggtgtttctttcctgtttgtcttgtgtcttgagagcttggccttatgaccagtgagaactctctccctggtctctgccagcccaagcatcactgcccgaggcgccagctcagtttcaccgtccacgtccacaaggggcttttcccaccttcacctttgtcgctgggtcagtgctggaaagcgcccctcactcctgcgctgacaagggcccttctctactgtctgtggggtggttccgggctgggggggctgcctcctttgcacctgattttgaaggtgtctctttcatccatggttaagtcataaaaagcttattggttttggttttgactcacctgaaagtttttttggtttaaaagaagaataggcggggcacggtggctcatgcctgtaatcccagcactttgggaggctgaggcaggtggatcacgaggtcaggagatcgacaccatcctggctaacacggtgaaaccccgtctctactaaaaaatacaaaaaattagctgggtgtggtggtgggggtgggcgcctgtgatcccagctacgtgggaggctgaggcagcagactggtgtgaacccgggaggtggagcttgcagtgagccgagatcgcgccactgcactccagcctgggcgacagagcgagactccatctcaaaaaaaaaaaaaaaaaaaagaaagaaagaaaaataattttgggagtttctggaaaggtactaggatttctcaaaaggatttgtcttctcccttgtgaaagacagatgtcagactaatcaggcttatccgatgtgctacatgagatggaaatgcgtgtgaaatagtaagtcacactaagtcttctggaggttctatttacgggtttggtttgatatgaatgttgcagaaactctataaaattctaga

SEQ ID NO: 36 - DNA, 1898 bp, Homo sapiens
ggcacgagggtcagctctggttcggagaagcagcggctggcgtgggccatccggggaatgggcgccctcgtgacctagtgttgcggggcaaaaagggtcttgccggcctcgctcgtgcaggggcgtatctgggcgcctgagcgcggcgtgggagccttgggagccgccgcagcagggggcacacccggaaccggcctgagcgcccgggaccatgaacggggaggccatctgcagcgccctgcccaccattccctaccacaaactcgccgacctgcgctacctgagccgcggcgcctctggcactgtgtcgtccgcccgccacgcagactggcgcgtccaggtggccgtgaagcacctgcacatccacactccgctgctcgacagtgaaagaaaggatgtcttaagagaagctgaaattttacacaaagctagatttagttacattcttccaattttgggaatttgcaatgagcctgaatttttgggaatagttactgaatacatgccaaatggatcattaaatgaactcctacataggaaaactgaatatcctgatgttgcttggccattgagatttcgcatcctgcatgaaattgcccttggtgtaaattacctgcacaatatgactcctcctttacttcatcatgacttgaagactcagaatatcttattggacaatgaatttcatgttaagattgcagattttggtttatcaaagtggcgcatgatgtccctctcacagtcacgaagtagcaaatctgcaccagaaggagggacaattatctatatgccacctgaaaactatgaacctggacaaaaatcaagggccagtatcaagcacgatatatatagctatgcagttatcacatgggaagtgttatccagaaaacagccttttgaagatgtcaccaatcctttgcagataatgtatagtgtgtcacaaggacatcgacctgttattaatgaagaaagtttgccatatgatatacctcaccgagcacgtatgatctctctaatagaaagtggatgggcacaaaatccagatgaaagaccatctttcttaaaatgtttaatagaacttgaaccagttttgagaacatttgaagagataacttttcttgaagctgttattcagctaaagaaaacaaagttacagagtgtttcaagtgccattcacctatgtgacaagaagaaaatggaattatctctgaacatacctgtaaatcatggtccacaagaggaatcatgtggatcctctcagctccatgaaaatagtggttctcctgaaacttcaaggtccctgccagctcctcaagacaatgattttttatctagaaaagctcaagactgttattttatgaagctgcatcactgtcctggaaatcacagttgggatagcaccatttctggatctcaaagggctgcattctgtgatcacaagaccactccatgctcttcagcaataataaatccactctcaactgcaggaaactcagaacgtctgcagcctggtatagcccagcagtggatccagagcaaaagggaagacattgtgaaccaaatgacagaagcctgccttaaccagtcgctagatgcccttctgtccagggacttgatcatgaaagaggactatgaacttgttagtaccaagcctacaaggacctcaaaagtcagacaattactagacactactgacatccaaggagaagaatttgccaaagttatagtacaaaaattgaaagataacaaacaaatgggtcttcagccttacccggaaatacttgtggtttctagatcaccatctttaaatttacttcaaaataaaagcatgtaagtgactgtttttcaagaagaaatgtgtttcataaaaggatatttataaaaaaaaaaaaaaaaaa

SEQ ID NO: 37 - DNA, 1680 bp, Homo sapiens
agagactcgtgccgaatggcacgaggccgacgggcccgcggggccggcgccgccatggcggccgtgtttgatttggatttggagacggaggaaggcagcgagggcgagggcgagccagagctcagccccgcggacgcatgtccccttgccgagttgagggcagctggcctagagcctgtgggacactatgaagaggtggagctgactgagaccagcgtgaacgttggcccagagcgcatcgggccccactgctttgagctgctgcgtgtgctgggcaaggggggctatggcaaggtgttccaggtgcgaaaggtgcaaggcaccaacttgggcaaaatatatgccatgaaagtcctaaggaaggccaaaattgtgcgcaatgccaaggacacagcacacacacgggctgagcggaacattctagagtcagtgaagcacccctttattgtggaactggcctatgccttccagactggtggcaaactctacctcatccttgagtgcctcagtggtggcgagctcttcacgcatctggagcgagagggcatcttcctggaagatacggcctgcttctacctggctgagatcacgctggccctgggccatctccactcccagggcatcatctaccgggacctcaagcccgagaacatcatgctcagcagccagggccacatcaaactgaccgactttggactctgcaaggagtctatccatgagggcgccgtcactcacaccttctgcggcaccattgagtacatggcccctgagattctggtgcgcagtggccacaaccgggctgtggactggtggagcctgggggccctgatgtacgacatgctcactggatcgccgccctttaccgcagagaaccggaagaaaaccatggataagatcatcaggggcaagctggcactgcccccctacctcaccccagatgcccgggaccttgtcaaaaagtttctgaaacggaatcccagccagcggattgggggtggcccaggggatgctgctgatgtgcagagacatccctttttccggcacatgaattgggacgaccttctggcctggcgtgtggacccccctttcaggccctgtctgcagtcagaggaggacgtgagccagtttgatacccgcttcacacggcagacgccggtggacagtcctgatgacacagccctcagcgagagtgccaaccaggccttcctgggcttcacatacgtggcgccgtctgtcctggacagcatcaaggagggcttctccttccagcccaagctgcgctcacccaggcgcctcaacagtagcccccgggtccccgtcagccccctcaagttctccccttttgaggggtttcggcccagccccagcctgccggagcccacggagctacctctacctccactcctgccaccgccgccgccctcgaccaccgcccctctccccatccgtcccccctcagggaccaagaagtccaagaggggccgtgggcgtccagggcgctaggaagccgggtgggggtgagggtagcccttgagccctgtccctgcggctgtgagagcagcaggaccctgggccagttccagagacctgggggtgtgtctgggggtggggtgtgagtgcgtatgaaagtgtgtgtctgctggggcagctgtgcccctgaatcatgggcacggagggccg

SEQ ID NO: 38 - DNA, 4244 bp, Homo sapiens
ggtctcaccatggagcggaaagtgcttgcgctccaggcccgaaagaaaaggaccaaggccaagaaggacaaagcccaaaggaaatctgaaactcagcaccgaggctctgctccccactctgagagtgatctaccagagcaggaagaggagattctgggatctgatgatgatgagcaagaagatcctaatgattattgtaaaggaggttatcatcttgtgaaaattggagatctattcaatgggagataccatgtgatccgaaagttaggctggggacacttttcaacagtatggttatcatgggatattcaggggaagaaatttgtggcaatgaaagtagttaaaagtgctgaacattacactgaaacagcactagatgaaatccggttgctgaagtcagttcgcaattcagaccctaatgatccaaatagagaaatggttgttcaactactagatgactttaaaatatcaggagttaatggaacacatatctgcatggtatttgaagttttggggcatcatctgctcaagtggatcatcaaatccaattatcaggggcttccactgccttgtgtcaaaaaaattattcagcaagtgttacagggtcttgattatttacataccaagtgccgtatcatccacactgacattaaaccagagaacatcttattgtcagtgaatgagcagtacattcggaggctggctgcagaagcaacagaatggcagcgatctggagctcctccgccttccggatctgcagtcagtactgctccccagcctaaaccagctgacaaaatgtcaaagaataagaagaagaaattgaagaagaagcagaagcgccaggcagaattactagagaagcgaatgcaggaaattgaggaaatggagaaagagtcgggccctgggcaaaaaagaccaaacaagcaagaagaatcagagagtcctgttgaaagacccttgaaagagaacccacctaataaaatgacccaagaaaaacttgaagagtcaagtaccattggccaggatcaaacgcttatggaacgtgatacagagggtggtgcagcagaaattaattgcaatggagtgattgaagtcattaattatactcagaacagtaataatgaaacattgagacataaagaggatctacataatgctaatgactgtgatgtccaaaatttgaatcaggaatctagtttcctaagctcccaaaatggagacagcagcacatctcaagaaacagactcttgtacacctataacatctgaggtgtcagacaccatggtgtgccagtcttcctcaactgtaggtcagtcattcagtgaacaacacattagccaacttcaagaaagcattcgggcagagataccctgtgaagatgaacaagagcaagaacataacggaccactggacaacaaaggaaaatccacggctggaaattttcttgttaatccccttgagccaaaaaatgcagaaaagctcaaggtgaagattgctgaccttggaaatgcttgttggcacaaacatttcactgaagatattcaaacaaggcaatatcgttccttggaagttctaatcggatctggctataatacccctgctgacatttggagcacggcatgcatggcctttgaactggccacaggtgactatttgtttgaacctcattcaggggaagagtacactcgagatgaagatcacattgcattgatcatagaacttctggggaaggtgcctcgcaagctcattgtggcaggaaaatattccaaggaatttttcaccaaaaaaggtgacctgaaacatatcacgaagctgaaaccttggggcctttttgaggttctagtggagaagtatgagtggtcgcaggaagaggcagctggcttcacagatttcttactgcccatgttggagctgatccctgagaagagagccactgccgccgagtgtctccggcacccttggcttaactcctaagcccctgcccagcaccacagcagagatcacacactgaccctccgcccttccccttcaagcattttcctcttcccttttcagggtgaagctcttccttcaagagtttctagatcttgttttttttttaatccaacatgttcatttgggtttgcttacttgaccctgtggagatccccacagccattgggcatcctaggtgaatttggccttggttgggctctgccaaagactaatggactaaaatgtgaaacagcctcttgccctgtacctttccttcccattaggacatcctttaaattataagcatcctttttgaaaagagctatgaaggtgtatgagcccatccttttattcattgactctaagagtcaaattttctagtgcatatcctattgccagcataaggatgaggagggggaaagggtcttaattctatgtacagcagagacattaaacttgctgtgtccgggctgcatcatcttcctggactgtttctgttgttctctgtgttcacattttttcctgcaacttttaagctactgtcttttttaaatagctatatgaacaccaaatttgggtaccattttatcactgttcaaagcactgtcaaattcctttcatcctttaatagttaagatctttgaatcttcagtctgatttttaatgtaagcaaaaacagaaccattgaatagtaatttcttgagaacctcaggtgttctataaacagtcctttcctgtatgtcttctattaccctaagaccagagttattttggttggttgttttgttttattttttgtttttgtatccatggctggcactttactcattgcacttgagtttattgccccataactaaaggatcaggatgatggtagaacggagatctgggtttcagagctttcccatttaagaaaaatagatcttgagattctgattcttttccaaacagtcccctgctttcatgtacagctttttctttaccttacccaaaattctggccttgaagcagttttcctctatggctttgcctttctgattttctcagaggctcgagtctttaatataaccccaaatgaaagaaccaaggggaggggtgggatggcacttttttttgttggtcttgttttgttttgttttttggttggttggttcgttattttttaagattagccattctctgctgctatttccctacataatgtcaatttttaaccataattttgacatgattgagatgtacttgaggcttttttgttttaattgagaaaagactttgcaattttttttttaggatgagcctctcctagacttgacctagaatattacatattcctccagtaagtaatactgaagagcaaaagagaggcaggattggggtcacagccgcttcttcagcatggaccaagtgggccttggggattgcagcgttctcgaagtggctgtaggactcgaatttacagaaagccacagaggtgcaacttgaggctctgctagcaagccaccagtgaggctattgggtaaccacctttctatacaggagattggaatctactttgtcatttatccaccacagtgacaaaggaaaagtggtgccgttatgcaatccatttaactcataaacatattactctgagtaactggccagccattcatcggatccttcattgggtactcctgaaatcagacatgttcctgtagaaagaattttaagttaggctttctatgcacctatcaagaatcaagagaatagattgtatcaaacaacggcagggaaatccttcagcaattctaatccactttgggttttcagctgtttttacatctaaagcaatagactagaactgaattatcttctacatagtaaaatcacaattgtggaattacaggaattctggtgatattaaggtgaaataacaaaacacaaaaggccctattttaacagttgatgtgacagtaagttttaatagaacctgtaacttcattttggaaatgcttctccaccaaataagggctttttcccctatttaaggagccagatggattgaaagatgtggaaataggcagctgtagatcttgatcttccaggtaccccatgtacctttattgagcttaattataatactgtcaaattgccacgatctcactaaaggatttctatttgctgtcagttaaaaataaagccctaaatacatttttattctttctactgagggcattgtctgttttctttgtaaatgccgtacaataaacaaattatttaataaccta

SEQ ID NO: 39 - DNA, 2253 bp, Homo sapiens
ggaagacttgggtccttgggtcgcaggtgggagccgacgggtgggtagaccgtgggggatatctcagtggcggacgaggacggcggggacaaggggcggctggtcggagtggcggagcgtcaagtcccctgtcggttcctccgtccctgagtgtccttggcgctgccttgtgcccgcccagcgcctttgcatccgctcctgggcaccgaggcgccctgtaggatactgcttgttacttattacagctagaggcatcatggaccgatctaaagaaaactgcatttcaggacctgttaaggctacagctccagttggaggtccaaaacgtgttctcgtgactcagcaaattccttgtcagaatccattacctgtaaatagtggccaggctcagcgggtcttgtgtccttcaaattcttcccagcgcgttcctttgcaagcacaaaagcttgtctccagtcacaagccggttcagaatcagaagcagaagcaattgcaggcaaccagtgtacctcatcctgtctccaggccactgaataacacccaaaagagcaagcagcccctgccatcggcacctgaaaataatcctgaggaggaactggcatcaaaacagaaaaatgaagaatcaaaaaagaggcagtgggctttggaagactttgaaattggtcgccctctgggtaaaggaaagtttggtaatgtttatttggcaagagaaaagcaaagcaagtttattctggctcttaaagtgttatttaaagctcagctggagaaagccggagtggagcatcagctcagaagagaagtagaaatacagtcccaccttcggcatcctaatattcttagactgtatggttatttccatgatgctaccagagtctacctaattctggaatatgcaccacttggaacagtttatagagaacttcagaaactttcaaagtttgatgagcagagaactgctacttatataacagaattggcaaatgccctgtcttactgtcattcgaagagagttattcatagagacattaagccagagaacttacttcttggatcagctggagagcttaaaattgcagattttgggtggtcagtacatgctccatcttccaggaggaccactctctgtggcaccctggactacctgccccctgaaatgattgaaggtcggatgcatgatgagaaggtggatctctggagccttggagttctttgctatgaatttttagttgggaagcctccttttgaggcaaacacataccaagagacctacaaaagaatatcacgggttgaattcacattccctgactttgtaacagagggagccagggacctcatttcaagactgttgaagcataatcccagccagaggccaatgctcagagaagtacttgaacacccctggatcacagcaaattcatcaaaaccatcaaattgccaaaacaaagaatcagctagcaaacagtcttaggaatcgtgcagggggagaaatccttgagccagggctgccatataacctgacaggaacatgctactgaagtttattttaccattgactgctgccctcaatctagaacgctacacaagaaatatttgttttactcagcaggtgtgccttaacctccctattcagaaagctccacatcaataaacatgacactctgaagtgaaagtagccacgagaattgtgctacttatactggttcataatctggaggcaaggttcgactgcagccgccccgtcagcctgtgctaggcatggtgtcttcacaggaggcaaatccagagcctggctgtggggaaagtgaccactctgccctgaccccgatcagttaaggagctgtgcaataaccttcctagtacctgagtgagtgtgtaacttattgggttggcgaagcctggtaaagctgttggaatgagtatgtgattctttttaagtatgaaaataaagatatatgtacagacttgtattttttctctggtggcattcctttaggaatgctgtgtgtctgtccggcaccccggtaggcctgattgggtttctagtcctccttaaccacttatctcccatatgagagtgtgaaaaataggaacacgtgctctacctccatttagggatttgcttgggatacagaagaggccatgtgtctcagagctgttaagggcttatttttttaaaacattggagtcatagcatgtgtgtaaactttaaatatgcaaataaataagtatctatgtctaaaaaaaaaaaaaaaa

SEQ ID NO: 40 - DNA, 1224 bp, Homo sapiens
ggccgggagagtagcagtgccttggaccccagctctcctccccctttctctctaaggatggcccagaaggagaactcctacccctggccctacggccgacagacggctccatctggcctgagcaccctgccccagcgagtcctccggaaagagcctgtcaccccatctgcacttgtcctcatgagccgctccaatgtccagcccacagctgcccctggccagaaggtgatggagaatagcagtgggacacccgacatcttaacgcggcacttcacaattgatgactttgagattgggcgtcctctgggcaaaggcaagtttggaaacgtgtacttggctcgggagaagaaaagccatttcatcgtggcgctcaaggtcctcttcaagtcccagatagagaaggagggcgtggagcatcagctgcgcagagagatcgaaatccaggcccacctgcaccatcccaacatcctgcgtctctacaactatttttatgaccggaggaggatctacttgattctagagtatgccccccgcggggagctctacaaggagctgcagaagagctgcacatttgacgagcagcgaacagccacgatcatggaggagttggcagatgctctaatgtactgccatgggaagaaggtgattcacagagacataaagccagaaaatctgctcttagggctcaagggagagctgaagattgctgacttcggctggtctgtgcatgcgccctccctgaggaggaagacaatgtgtggcaccctggactacctgcccccagagatgattgaggggcgcatgcacaatgagaaggtggatctgtggtgcattggagtgctttgctatgagctgctggtggggaacccaccctttgagagtgcatcacacaacgagacctatcgccgcatcgtcaaggtggacctaaagttccccgcttctgtgcccacgggagcccaggacctcatctccaaactgctcaggcataacccctcggaacggctgcccctggcccaggtctcagcccacccttgggtccgggccaactctcggagggtgctgcctccctctgcccttcaatctgtcgcctgatggtccctgtcattcactcgggtgcgtgtgtttgtatgtctgtgtatgtataggggaaagaagggatccctaactgttcccttatctgttttctacctcctcctttgtttaataaaggctgaagctttttgt

SEQ ID NO: 41 - DNA, 2347 bp, Homo sapiens
ggaagacttgggtccttgggtcgcaggtgggagccgacgggtgggtagaccgtgggggatatctcagtggcggacgaggacggcggggacaaggggcggctggtcggagtggcggagcgtcaagtcccctgtcggttcctccgtccctgagtgtccttggcgctgccttgtgcccgcccagcgcctttgcatccgctcctgggcaccgaggcgccctgtaggatactgcttgttacttattacagctagagggtctcactccattgcccaggccagagtgcggggatatttgataagaaacttcagtgaaggccgggcgcggtggctcatgcccgtaatcccagcattttcggaggccgaggcatcatggaccgatctaaagaaaactgcatttcaggacctgttaaggctacagctccagttggaggtccaaaacgtgttctcgtgactcagcaatttccttgtcagaatccattacctgtaaatagtggccaggctcagcgggtcttgtgtccttcaaattcttcccagcgcattcctttgcaagcacaaaagcttgtctccagtcacaagccggttcagaatcagaagcagaagcaattgcaggcaaccagtgtacctcatcctgtctccaggccactgaataacacccaaaagagcaagcagcccctgccatcggcacctgaaaataatcctgaggaggaactggcatcaaaacagaaaaatgaagaatcaaaaaagaggcagtgggctttggaagactttgaaattggtcgccctctgggtaaaggaaagtttggtaatgtttatttggcaagagaaaagcaaagcaagtttattctggctcttaaagtgttatttaaagctcagctggagaaagccggagtggagcatcagctcagaagagaagtagaaatacagtcccaccttcggcatcctaatattcttagactgtatggttatttccatgatgctaccagagtctacctaattctggaatatgcaccacttggaacagtttatagagaacttcagaaactttcaaagtttgatgagcagagaactgctacttatataacagaattggcaaatgccctgtcttactgtcattcgaagagagttattcatagagacattaagccagagaacttacttcttggatcagctggagagcttaaaattgcagattttgggtggtcagtacatgctccatcttccaggaggaccactctctgtggcaccctggactacctgccccctgaaatgattgaaggtcggatgcatgatgagaaggtggatctctggagccttggagttctttgctatgaatttttagttgggaagcctccttttgaggcaaacacataccaagagacctacaaaagaatatcacgggttgaattcacattccctgactttgtaacagagggagccagggacctcatttcaagactgttgaagcataatcccagccagaggccaatgctcagagaagtacttgaacacccctggatcacagcaaattcatcaaaaccatcaaattgccaaaacaaagaatcagctagcaaacagtcttaggaatcgtgcagggggagaaatccttgagccagggctgccatataacctgacaggaacatgctactgaagtttattttaccattgactgctgccctcaatctagaacgctacacaagaaatatttgttttactcagcaggtgtgccttaacctccctattcagaaagctccacatcaataaacatgacactctgaagtgaaagtagccacgagaattgtgctacttatactggttcataatctggaggcaaggttcgactgcagccgccccgtcagcctgtgctaggcatggtgtcttcacaggaggcaaatccagagcctggctgtggggaaagtgaccactctgccctgaccccgatcagttaaggagctgtgcaataaccttcctagtacctgagtgagtgtgtaacttattgggttggcgaagcctggtaaagctgttggaatgagtatgtgattctttttaagtatgaaaataaagatatatgtacagacttgtattttttctctggtggcattcctttaggaatgctgtgtgtctgtccggcaccccggtaggcctgattgggtttctagtcctccttaaccacttatctcccatatgagagtgtgaaaaataggaacacgtgctctacctccatttagggatttgcttgggatacagaagaggccatgtgtctcagagctgttaagggcttatttttttaaaacattggagtcatagcatgtgtgtaaactttaaatatgcaaataaataagtatctatgtct

SEQ ID NO: 42 - DNA, 3331 bp, Homo sapiens
cagagggcaccgcccaggcctcggaaggtgtcagggagaactttccgtggtttcagcgtcgtcgcctggagcggcggtttagagagccgagcctgatgggcgccaaggccggctggctgcttggagcgctgcctcgaagggactgcgtaaggaagctaatccggagaacccaggccagagcctgaaatatggcgacctgcatcggggagaagatcgaggattttaaagttggaaatctgcttggtaaaggatcatttgctggtgtctacagagctgagtccattcacagtggtttggaagttgcaatcaaaatgatagataagaaagccatgtacaaagcaggaatggtacagagagtccaaaatgaggtgaaaatacattgccaattgaaacatccttctatcttggagctttataactattttgaagatagcaattatgtgtatctggtattagaaatgtgccataatggagaaatgaacaggtatctaaagaatagagtgaaacccttctcagaaaatgaagctcgacacttcatgcaccagatcatcacagggatgttgtatcttcattctcatggtatactacaccgggacctcacactttctaacctcctactgactcgtaatatgaacatcaagattgctgattttgggctggcaactcaactgaaaatgccacatgaaaagcactatacattatgtggaactcctaactacatttcaccagaaattgccactcgaagtgcacatggccttgaatctgatgtttggtccctgggctgtatgttttatacattacttatcgggagaccacccttcgacactgacacagtcaagaacacattaaataaagtagtattggcagattatgaaatgccaacttttttgtcaatagaggccaaggaccttattcaccagttacttcgtagaaatccagcagatcgtttaagtctgtcttcagtattggaccatccttttatgtcccgaaattcttcaacaaaaagtaaagatttaggaactgtggaagactcaattgatagtgggcatgccacaatttctactgcaattacagcttcttccagtaccagtataagtggtagtttatttgacaaaagaagacttttgattggtcagccactcccaaataaaatgactgtatttccaaagaataaaagttcaactgatttttcttcttcaggagatggaaacagtttttatactcagtggggaaatcaagaaaccagtaatagtggaaggggaagagtaattcaagatgcagaagaaaggccacattctcgataccttcgtagagcttattcctctgatagatctggcacttctaatagacagtctcaagcaaaaacatatacaatggaacgatgtcactcagcagaaatgctttcagtgtccaaaagatcaggaggaggtgaaaatgaagagaggtactcacccacagacaacaatgccaacatttttaacttctttaaagaaaagacatccagtagttctggatcttttgaaagacctgataacaatcaagcactctccaatcatctttgtccaggaaaaactccttttccatttgcagacccgacacctcagactgaaaccgtacaacagtggtttgggaatctgcaaataaatgctcatttaagaaaaactactgaatatgacagcatcagcccaaaccgggacttccagggccatccagatttgcagaaggacacatcaaaaaatgcctggactgatacaaaagtcaaaaagaactctgatgcttctgataatgcacattctgtaaaacagcaaaataccatgaaatatatgactgcacttcacagtaaacctgagataatccaacaagaatgtgtttttggctcagatcctctttctgaacagagcaagactaggggtatggagccaccatggggttatcagaatcgtacattaagaagcattacatctccgttggttgctcacaggttaaaaccaatcagacagaaaaccaaaaaggctgtggtgagcatacttgattcagaggaggtgtgtgtggagcttgtaaaggagtatgcatctcaagaatatgtgaaagaagttcttcagatatctagtgatggaaatacgatcactatttattatccaaatggtggtagaggttttcctcttgctgatagaccaccctcacctactgacaacatcagtaggtacagctttgacaatttaccagaaaaatactggcgaaaatatcaatatgcttccaggtttgtacagcttctaagatctaaatctcccaaaatcacttattttacaagatatgctaaatgcattttgatggagaattctcctggtgctgattttgaggtttggttttatgatggggtaaaaatacacaaaacagaagatttcattcaggtgattgaaaagacagggaagtcttacactttaaaaagtgaaagtgaagttaatagcttgaaagaggagataaaaatgtatatggaccatgctaatgagggtcatcgtatttgtttagcactggaatccataatttcagaagaggaaaggaaaactaggagtgctccctttttcccaataatcataggaagaaaacctggtagtactagttcacctaaggccttatcacctcctccttctgtggattcaaattacccaacgagagatagagcatctttcaacagaatggtcatgcatagtgatgcttctccaacacaggcaccaatccttaatccctctatggttacaaatgaaggacttggtcttacaactacagcttctggaacagacatctcttctaatagtctaaaagattgtcttcctaaatcagcacaacttttgaaatctgtttttgtgaaaaatgttggttgggctacacagttaactagtggagctgtgtgggttcagtttaatgatgggtcccagttggttgtgcaggcaggagtgtcttctatcagttatacctcaccaaatggtcaaacaactaggtatggagaaaatgaaaaattaccagactacatcaaacagaaattacagtgtctgtcttccatccttttgatgttttctaatccgactcctaattttcattgattaaaactcctttcagacatataagtttaataaataacttttttgttgactttcaagtaaagtgattttttttaatttaacataaagtcttcagaaagcctttctatgaaagaattttaacctataatgtaaaccatgtatctgagataacaaagcagaatgaaacttgagtcacttactaaatatagtggatataaaatagaacacctgactttgctcttagaccataa

SEQ ID NO: 43 - DNA, 3293 bp, Homo sapiens
cgctccctcccctcctagctggcttcggcggggacggcggcggcggcggcggcggcggcggcgggcggggagggcgtgcgccggccgagaggtgtcggcggcgaggcaaaggaagtttcaagtggaaggtcgtccgtcggccggcgcgtcctcctgctctcctccgcagcatcatggcggagccgagcggctcgcccgtgcacgtccagcttccccagcaggcggccccggtgacagcggcggcggcggcggccccggcggccgcgacagcagcgccggccccggcagctcccgcggccccggccccggccccggccccggccccggcggcacaggctgtcggctggcccatctgcagggacgcgtacgagctgcaggaggttatcggcagtggagctactgctgtggttcaggcagccctatgcaaacccaggcaagaacgtgtagcaataaaacggatcaacttggaaaaatgccagaccagtatggatgaactattaaaagaaattcaagccatgagtcagtgcagccatcccaacgtagtgacctattacacctcttttgtggtcaaagatgaactttggctggtcatgaaattactaagtggaggttcaatgttggatatcataaaatacattgtcaaccgaggagaacacaagaatggagttctggaagaggcaataatagcaacaattcttaaagaggttttggaaggcttagactatctacacagaaacggtcagattcacagggatttgaaagctggtaatattcttctgggtgaggatggttcagtacaaatagcagattttggggtaagtgcgttcctagcaacagggggtgatgttacccgaaataaagtaagaaaaacattcgttggcaccccatgttggatggctcctgaagtcatggaacaggtgagaggctatgacttcaaggctgacatgtggagttttggaataactgccattgaattagcaacaggagcagcgccttatcacaaatatcctcccatgaaagtgttaatgttgactttgcaaaatgatccacccactttggaaacaggggtagaggataaagaaatgatgaaaaagtacggcaagtcctttagaaaattactttcactgtgtcttcagaaagatccttccaaaaggcccacagcagcagaacttttaaaatgcaaattcttccagaaagccaagaacagagagtacctgattgagaagctgcttacaagaacaccagacatagcccaaagagccaaaaaggtaagaagagttcctgggtcaagtggtcaccttcataaaaccgaagacggggactgggagtggagtgacgacgagatggatgagaagagcgaagaagggaaagcagctttttctcaggaaaagtcacgaagagtaaaagaagaaaatccagagattgcagtgagtgccagcaccatccccgaacaaatacagtccctctctgtgcacgactctcagggcccacccaatgctaatgaagactacagagaagcttcttcttgtgccgtgaacctcgttttgagattaagaaactccagaaaggaacttaatgacatacgatttgagtttactccaggaagagatacagcagatggtgtatctcaggagctcttctctgctggcttggtggatggtcacgatgtagttatagtggctgctaatttacagaagattgtagatgatcccaaagctttaaaaacattgacatttaagttggcttctggctgtgatgggtcggagattcctgatgaagtgaagctgattgggtttgctcagttgagtgtcagctgatgtatgtcccttgatgtcaccctgatctgtcatgccccaccgccacccctactcccttcaaccctccctctttctgcccatttcctcccaccccctcactcccatttcctagcaaaatcagaagattgtgaagaggccggcttcaacaaaatgggataaaaaaataattttttaaaacttacaacactccgagttctgctttattctctagcaatccacagtacaagaacaagcaaatgccacagctgcacgactgttgctcatttttccaaaagctatttaatattcttagcaatcaatttggatatcccttaagtgaaaagaatctgaaatacactcaggtggtcttatttattggcaacaaaaggaattttctatccagaagcctatttctcctttcattgttgttatttctgttataatactttaaattgtacatctgacaatactgcctcttttatgttgtatttagaaattaatatacttataaaattaagatttattagccaaacttgaattctagttttaaaactgactgtgaattttatttttcatatatttatgcattacacaccttagctataagaaaaaaagggttttgattatatgcttcttgcagttaatctcgttatttaaacaaaaagttttgggtctgtctttggagtatttgtaacttctaaattttgaaatgactgaattaggaatttggatgcttattcttttagtctgtttgcctaaaaaccaatttacaatctgactgtctcttgggagagggaggtgccttgcaaactttcacattaagaatgtgcctgaggctgctttactctggaatagtctcagatctaaaatttcctctatataaggtggcatatgttaagttttgcttcattggaccgtttagaatgctatgtaaaatgttgccattctgttagattgctaactatatacccatctctgatttggctctccttaagtgataggatttgttattctaaaggtgataaacttgaaaatatcagaatctgagttttacttgaaattttgcagaatacccaggtggagtgaaaattggaagggttttgtgcaatgactaaaaggtaaaacgctgttaaggttcaagaatcaatactttcaacccaagtagccccctgcttgactgtatattatggaactagtaaaccttaggattttgaaaattggagtctaatctttcaaggaggtgggctcccaggatggtaccattgctctttcctagctaaccctagatatggcagctctttaatgtacttcaaaaagcaaatatatattactaaggaaaaaaagttatttataattgccttgtcataattgttaaggtgttctagagccatttgcatacaatttaatgtaatttcattccattctattgtttacacaacgattactcgaagatgactgcaaaggtaaaaggaaaataaaagtgtattgcacaatgag

SEQ ID NO: 44 - DNA, 2935 bp, Homo sapiens
agtttgggttccatcttttcatttccccagcgcagctttctgtagaaatggaatccgaggatttaagtggcagagaattgacaattgattccataatgaacaaagtgagagacattaaaaataagtttaaaaatgaagaccttactgatgaactaagcttgaataaaatttctgctgatactacagataactcgggaactgttaaccaaattatgatgatggcaaacaacccagaggactggttgagtttgttgctcaaactagagaaaaacagtgttccgctaagtgatgctcttttaaataaattgattggtcgttacagtcaagcaattgaagcgcttcccccagataaatatggccaaaatgagagttttgctagaattcaagtgagatttgctgaattaaaagctattcaagagccagatgatgcacgtgactactttcaaatggccagagcaaactgcaagaaatttgcttttgttcatatatcttttgcacaatttgaactgtcacaaggtaatgtcaaaaaaagtaaacaacttcttcaaaaagctgtagaacgtggagcagtaccactagaaatgctggaaattgccctgcggaatttaaacctccaaaaaaagcagctgctttcagaggaggaaaagaagaatttatcagcatctacggtattaactgcccaagaatcattttccggttcacttgggcatttacagaataggaacaacagttgtgattccagaggacagactactaaagccaggtttttatatggagagaacatgccaccacaagatgcagaaataggttaccggaattcattgagacaaactaacaaaactaaacagtcatgcccatttggaagagtcccagttaaccttctaaatagcccagattgtgatgtgaagacagatgattcagttgtaccttgttttatgaaaagacaaacctctagatcagaatgccgagatttggttgtgcctggatctaaaccaagtggaaatgattcctgtgaattaagaaatttaaagtctgttcaaaatagtcatttcaaggaacctctggtgtcagatgaaaagagttctgaacttattattactgattcaataaccctgaagaataaaacggaatcaagtcttctagctaaattagaagaaactaaagagtatcaagaaccagaggttccagagagtaaccagaaacagtggcaatctaagagaaagtcagagtgtattaaccagaatcctgctgcatcttcaaatcactggcagattccggagttagcccgaaaagttaatacagagcagaaacataccacttttgagcaacctgtcttttcagtttcaaaacagtcaccaccaatatcaacatctaaatggtttgacccaaaatctatttgtaagacaccaagcagcaataccttggatgattacatgagctgttttagaactccagttgtaaagaatgactttccacctgcttgtcagttgtcaacaccttatggccaacctgcctgtttccagcagcaacagcatcaaatacttgccactccacttcaaaatttacaggttttagcatcttcttcagcaaatgaatgcatttcggttaaaggaagaatttattccatattaaagcagataggaagtggaggttcaagcaaggtatttcaggtgttaaatgaaaagaaacagatatatgctataaaatatgtgaacttagaagaagcagataaccaaactcttgatagttaccggaacgaaatagcttatttgaataaactacaacaacacagtgataagatcatccgactttatgattatgaaatcacggaccagtacatctacatggtaatggagtgtggaaatattgatcttaatagttggcttaaaaagaaaaaatccattgatccatgggaacgcaagagttactggaaaaatatgttagaggcagttcacacaatccatcaacatggcattgttcacagtgatcttaaaccagctaactttctgatagttgatggaatgctaaagctaattgattttgggattgcaaaccaaatgcaaccagatacaacaagtgttgttaaagattctcaggttggcacagttaattatatgccaccagaagcaatcaaagatatgtcttcctccagagagaatgggaaatctaagtcaaagataagccccaaaagtgatgtttggtccttaggatgtattttgtactatatgacttacgggaaaacaccatttcagcagataattaatcagatttctaaattacatgccataattgatcctaatcatgaaattgaatttcccgatattccagagaaagatcttcaagatgtgttaaagtgttgtttaaaaagggacccaaaacagaggatatccattcctgagctcctggctcatccatatgttcaaattcaaactcatccagttaaccaaatggccaagggaaccactgaagaaatgaaatatgttctgggccaacttgttggtctgaattctcctaactccattttgaaagctgctaaaactttatatgaacactatagtggtggtgaaagtcataattcttcatcctccaagacttttgaaaaaaaaaggggaaaaaaatgatttgcagttattcgtaatgtcagataccacctataaaatatattggactgttatactcttgaatccctgtggaaatctacatttgaagacaacatcactctgaagtgttatcagcaaaaaaaattcagtagattatctttaaaagaaaactgtaaaaatagcaaccacttatggcactgtatatattgtagacttgttttctctgttttatgctcttgtgtaatctacttgacatcattttactcttggaatagtgggtggatagcaagtatattctaaaaaactttgtaaataaagttttgtggctaaaatga

SEQ ID NO: 45 - protein, 2644 aa, Homo sapiens
MGEHGLELASMIPALRELGSATPEEYNTVVQKPRQILCQFIDRILTDVNVVAVELVKKTDSQPTSVMLLDFIQHIMKSSPLMFVNVSGSHERKGSCIEFSNWIITRLLRIAATPSCHLLHKKICEVICSLLFLFKSKSPAIFGVLTKELLQLFEDLVYLHRRNVMGHAVEWPVVMSRFLSQLDEHMGYLQSAPLQLMSMQNLEFIEVTLLMVLTRIIAIVFFRRQELLLWQIGCVLLEYGSPKIKSLAISFLTELFQLGGLPAQPASTFFSSFLELLKHLVEMDTDQLKLYEEPLSKLIKTLFPFEAEAYRNIEPVYLNMLLEKLCVMFEDGVLMRLKSDLLKAALCHLLQYFLKFVPAGYESALQVRKVYVRNICKALLDVLGIEVDAEYLLGPLYAALKMESMEIIEEIQCQTQQENLSSNSDGISPKRRRLSSSLNPSKRAPKQTEEIKHVDMNQKSILWSALKQKAESLQISLEYSGLKNPVIEMLEGIAVVLQLTALCTVHCSHQNMNCRTFKDCQHKSKKKPSVVITWMSLDFYTKVLKSCRSLLESVQKLDLEATIDKVVKIYDALIYMQVNSSFEDHILEDLCGMLSLPWIYSHSDDGCLKLTTFAANLLTLSCRISDSYSPQAQSRCVFLLTLFPRRIFLEWRTAVYNWALQSSHEVIRASCVSGFFILLQQQNSCNRVPKILIDKVKDDSDIVKKEFASILGQLVCTLHGMFYLTSSLTEPFSEHGHVDLFCRNLKATSQHECSSSQLKASVCKPFLFLLKKKIPSPVKLAFIDNLHHLCKHLDFREDETDVKAVLGTLLNLMEDPDKDVRVAFSGNIKHILESLDSEDGFIKELFVLRMKEAYTHAQISRNNELKDTLILTTGDIGRAAKGDLVPFALLHLLHCLLSKSASVSGAAYTEIRALVAAKSVKLQSFFSQYKKPICQFLVESLHSSQMTALPNTPCQNADVRKQDVAHQREMALNTLSEIANVFDFPDLNRFLTRTLQVLLPDLAAKASPAASALIRTLGKQLNVNRREILINNFKYIFSHLVCSCSKDELERALHYLKNETEIELGSLLRQDFQGLHNELLLRIGEHYQQVFNGLSILASFASSDDPYQGPRDIISPELMADYLQPKLLGILAFFNMQLLSSSVGIEDKKMALNSLMSLMKLMGPKHVSSVRVKMMTTLRTGLRFKDDFPELCCRAWDCFVRCLDHACLGSLLSHVIVALLPLIHIQPKETAAIFHYLIIENRDAVQDFLHEIYFLPDHPELKKIKAVLQEYRKETSESTDLQTTLQLSMKAIQHENVDVRIHALTSLKETLYKNQEKLIKYATDSETVEPIISQLVTVLLKGCQDANSQARLLCGECLGELGAIDPGRLDFSTTETQGKDFTFVTGVEDSSFAYGLLMELTRAYLAYADNSRAQDSAAYAIQELLSIYDCREMETNGPGHQLWRRFPEHVREILEPHLNTRYKSSQKSTDWSGVKKPIYLSKLGSNFAEWSASWAGYLITKVRHDLASKIFTCCSIMMKHDFKVTIYLLPHILVYVLLGCNQEDQQEVYAEIMAVLKHDDQHTINTQDIASDLCQLSTQTVFSMLDHLTQWARHKFQALKAEKCPHSKSNRNKVDSMVSTVDYEDYQSVTRFLDLIPQDTLAVASFRSKAYTRAVMHFESFITEKKQNIQEHLGFLQKLYAAMHEPDGVAGVSAIRKAEPSLKEQILEHESLGLLRDATACYDRAIQLEPDQIIHYHGVVKSMLGLGQLSTVITQVNGVHANRSEWTDELNTYRVEAAWKLSQWDLVENYLAADGKSTTWSVRLGQLLLSAKKRDITAFYDSLKLVRAEQIVPLSAASFERGSYQRGYEYIVRLHMLCELEHSIKPLFQHSPGDSSQEDSLNWVARLEMTQNSYRAKEPILALRRALLSLNKRPDYNEMVGECWLQSARVARKAGHHQTAYNALLNAGESRLAELYVERAKWLWSKGDVHQALIVLQKGVELCFPENETPPEGKNMLIHGRAMLLVGRFMEETANFESNAIMKKYKDVTACLPEWEDGHFYLAKYYDKLMPMVTDNKMEKQGDLIRYIVLHFGRSLQYGNQFIYQSMPRMLTLWLDYGTKAYEWEKAGRSDRVQMRNDLGKINKVITEHTNYLAPYQFLTAFSQLISRICHSHDEVFVVLMEIIAKVFLAYPQQAMWMMTAVSKSSYPMRVNRCKEILNKAIHMKKSLEKFVGDATRLTDKLLELCNKPVDGSSSTLSMSTHFKMLKKLVEEATFSEILIPLQSVMIPTLPSILGTHANHASHEPFPGHWAYIAGFDDMVEILASLQKPKKISLKGSDGKFYIMMCKPKDDLRKDCRLMEFNSLINKCLRKDAESRRRELHIRTYAVIPLNDECGIIEWVNNTAGLRPILTKLYKEKGVYMTGKELRQCMLPKSAALSEKLKVFREFLLPRHPPIFHEWFLRTFPDPTSWYSSRSAYCRSTAVMSMVGYILGLGDRHGENILFDSLTGECVHVDFNCLFNKGETFEVPEIVPFRLTHNMVNGMGPMGTEGLFRRACEVTMRLMRDQREPLMSVLKTFLHDPLVEWSKPVKGHSKAPLNETGEVVNEKAKTHVLDIEQRLQGVIKTRNRVTGLPLSIEGHVHYLIQEATDENLLCQMYLGWTPYM

SEQ ID NO: 46 - protein, 1271 aa, Homo sapiens
MVDPVGFAEAWKAQFPDSEPPRMELRSVGDIEQELERCKASIRRLEQEVNQERFRMIYLQTLLAKEKKSYDRQRWGFRRAAQAPDGASEPRASASRPQPAPADGADPPPAEEPEARPDGEGSPGKARPGTARRPGAAASGERDDRGPPASVAALRSNFERIRKGHGQPGADAEKPFYVNVEFHHERGLVKVNDKEVSDRISSLGSQAMQMERKKSQHGAGSSVGDASRPPYRGRSSESSCGVDGDYEDAELNPRFLKDNLIDANGGSRPPWPPLEYQPYQSIYVGGMMEGEGKGPLLRSQSTSEQEKRLTWPRRSYSPRSFEDCGGGYTPDCSSNENLTSSEEDFSSGQSSRVSPSPTTYRMFRDKSRSPSQNSQQSFDSSSPPTPQCHKRHRHCPVVVSEATIVGVRKTGQIWPNDGEGAFHGDADGSFGTPPGYGCAADRAEEQRRHQDGLPYIDDSPSSSPHLSSKGRGSRDALVSGALESTKASELDLEKGLEMRKWVLSGILASEETYLSHLEALLLPMKPLKAAATTSQPVLTSQQIETIFFKVPELYEIHKEFYDGLFPRVQQWSHQQRVGDLFQKLASQLGVYRAFVDNYGVAMEMAEKCCQANAQFAEISENLRARSNKDAKDPTTKNSLETLLYKPVDRVTRSTLVLHDLLKHTPASHPDHPLLQDALRISQNFLSSINEEITPRRQSMTVKKGEHRQLLKDSFMVELVEGARKLRHVFLFTELLLCTKLKKQSGGKTQQYDCKWYIPLTDLSFQMVDELEAVPNIPLVPDEELDALKIKISQIKSDIQREKRANKGSKATERLKKKLSEQESLLLLMSPSMAFRVHSRNGKSYTFLISSDYERAEWRENIREQQKKCFRSFSLTSVELQMLTNSCVKLQTVHSIPLTINKEDDESPGLYGFLNVIVHSATGFKQSSNLYCTLEVDSFGYFVNKAKTRVYRDTAEPNWNEEFEIELEGSQTLRILCYEKCYNKTKIPKEDGESTDRLMGKGQVQLDPQALQDRDWQRTVIAMNGIEVKLSVKFNSREFSLKRMPSRKQTGVFGVKIAVVTKRERSKVPYIVRQCVEEIERRGMEEVGIYRVSGVATDIQALKAAFDVNNKDVSVMMSEMDVNAIAGTLKLYFRELPEPLFTDEFYPNFAEGIALSDPVAKESCMLNLLLSLPEANLLTFLFLLDHLKRVAEKEAVNKMSLHNLATVFGPTLLRPSEKESKLPANPSQPITMTDSWSLEVMSQVQVLLYFLQLEAIPAPDSKRQSILFSTEV

SEQ ID NO: 47 - protein, 1050 aa, Homo sapiens
MAAVKKEGGALSEAMSLEGDEWELSKENVQPLRQGRIMSTLQGALAQESACNNTLQQQKRAFEYEIRFYTGNDPLDVWDRYISWTEQNYPQGGKESNMSTLLERAVEALQGEKRYYSDPRFLNLWLKLGRLCNEPLDMYSYLHNQGIGVSLAQFYISWAEEYEARENFRKADAIFQEGIQQKAEPLERLQSQHRQFQARVSRQTLLALEKEEEEEVFESSVPQRSTLAELKSKGKKTARAPIIRVGGALKAPSQNRGLQNPFPQQMQNNSRITVFDENADEASTAELSKPTVQPWIAPPMPRAKENELQAGPWNTGRSLEHRPRGNTASLIAVPAVLPSFTPYVEETAQQPVMTPCKIEPSINHILSTRKPGKEEGDSLQRVQSHQQASEEKKEKMMYCKEKIYAGVGEFSFEEIRAEVFRKKLKEQREAELLTSAEKRAEMQKQIEEMEKKLKEIQTTQQERTGDQQEETMPTKETTKLQIASESQKIPGMTLSSSVCQVNCCARETSLAENIWQEQPHSKGPSVPFSIFDEFLLSEKKNKSPPADPPRVLAQRRPLAVLKTSESITSNEDVSPDVCDEFTGIEPLSEDAIITGFRNVTICPNPEDTCDFARAARFVSTPFHEIMSLKDLPSDPERLLPEEDLDVKTSEDQQTACGTIYSQTLSIKKLSPIIEDSREATHSSGFSGSSASVASTSSIKCLQIPEKLELTNETSENPTQSPWCSQYRRQLLKSLPELSASAELCIEDRPMPKLEIEKEIELGNEDYCIKREYLICEDYKLFWVAPRNSAELTVIKVSSQPVPWDFYINLKLKERLNEDFDHFCSCYQYQDGCIVWHQYINCFTLQDLLQHSEYITHEITVLIIYNLLTIVEMLHKAEIVHGDLSPRCLILRNRIHDPYDCNKNNQALKIVDFSYSVDLRVQLDVFTLSGFRTVQILEGQKILANCSSPYQVDLFGIADLAHLLLFKEHLQVFWDGSFWKLSQNISELKDGELWNKFFVRILNANDEATVSVLGELAAEMNGVFDTTFQSHLNKALWKVGKLTSPGALLFQ

SEQ ID NO: 48 - protein, 297 aa, Homo sapiens
MEDYTKIEKIGEGTYGVVYKGRHKTTGQVVAMKKIRLESEEEGVPSTAIREISLLKELRHPNIVSLQDVLMQDSRLYLIFEFLSMDLKKYLDSIPPGQYMDSSLVKSYLYQILQGIVFCHSRRVLHRDLKPQNLLIDDKGTIKLADFGLARAFGIPIRVYTHEVVTLWYRSPEVLLGSARYSTPVDIWSIGTIFAELATKKPLFHGDSEIDQLFRIFRALGTPNNEVWPEVESLQDYKNTFPKWKPGSLASHVKNLDENGLDLLSKMLIYDPAKRISGKMALNHPYFNDLDNQIKKM

SEQ ID NO: 49 - protein, 795 aa, Homo sapiens
MGDEKDSWKVKTLDEILQEKKRRKEQEEKAEIKRLKNSDDRDSKRDSLEEGELRDHRMEITIRNSPYRREDSMEDRGEEDDSLAIKPPQQMSRKEKVHHRKDEKRKEKRRHRSHSAEGGKHARVKEKEREHERRKRHREEQDKARREWERQKRREMAREHSRRERDRLEQLERKRERERKMREQQKEQREQKERERRAEERRKEREARREVSAHHRTMREDYSDKVKASHWSRSPPRPPRERFELGDGRKPGEARPARAQKPAQLKEEKMEERDLLSDLQDISDSERKTSSAESSSAESGSGSEEEEEEEEEEEEEGSTSEESEEEEEEEEEEEEETGSNSEEASEQSAEEVSEEEMSEDEERENENHLLVVPESRFDRDSGESEEAEEEVGEGTPQSSALTEGDYVPDSPALSPIELKQELPKYLPALQGCRSVEEFQCLNRIEEGTYGVVYRAKDKKTDEIVALKRLKMEKEKEGFPITSLREINTILKAQHPNIVTVREIVVGSNMDKIYIVMNYVEHDLKSLMETMKQPFLPGEVKTLMIQLLRGVKHLHDNWILHRDLKTSNLLLSHAGILKVGDFGLAREYGSPLKAYTPVVVTLWYRAPELLLGAKEYSTAVDMWSVGCIFGELLTQKPLFPGKSEIDQINKVFKDLGTPSEKIWPGYSELPAVKKMTFSEHPYNNLRKRFGALLSDQGFDLMNKFLTYFPGRRISAEDGLKHEYFRETPLPIDPSMFPTWPAKSEQQRVKRGTSPRPPEGGLGYSQLGDDDLKETGFHLTTTNQGASAAGPGFSLKF

SEQ ID NO: 50 - protein, 574 aa, Homo sapiens
MEASLGIQMDEPMAFSPQRDRFQAEGSLKKNEQNFKLAGVKKDIEKLYEAVPQLSNVFKIEDKIGEGTFSSVYLATAQLQVGPEEKIALKHLIPTSHPIRIAAELQCLTVAGGQDNVMGVKYCFRKNDHVVIAMPYLEHESFLDILNSLSFQEVREYMLNLFKALKRIHQFGIVHRDVKPSNFLYNRRLKKYALVDFGLAQGTHDTKIELLKFVQSEAQQERCSQNKSHIITGNKIPLSGPVPKELDQQSTTKASVKRPYTNAQIQIKQGKDGKEGSVGLSVQRSVFGERNFNIHSSISHESPAVKLMKQSKTVDVLSRKLATKKKAISTKVMNSAVMRKTASSCPASLTCDCYATDKVCSICLSRRQQVAPRAGTPGFRAPEVLTKCPNQTTAIDMWSAGVIFLSLLSGRYPFYKASDDLTALAQIMTIRGSRETIQAAKTFGKSILCSKEVPAQDLRKLCERLRGMDSSTPKLTSDIQGHASHQPAISEKTDHKASCLVQTPPGQYSGNSFKKGDSNSCEHCFDEYNTNLEGWNEVPDEAYDLLDKLLDLNPASRITAEEALLHPFFKDMSL

SEQ ID NO: 51 - protein, 298 aa, Homo sapiens
MENFQKVEKIGEGTYGVVYKARNKLTGEVVALKKIRLDTETEGVPSTAIREISLLKELNHPNIVKLLDVIHTENKLYLVFEFLHQDLKKFMDASALTGIPLPLIKSYLFQLLQGLAFCHSHRVLHRDLKPQNLLINTEGAIKLADFGLARAFGVPVRTYTHEVVTLWYRAPEILLGCKYYSTAVDIWSLGCIFAEMVTRRALFPGDSEIDQLFRIFRTLGTPDEVVWPGVTSMPDYKPSFPKWARQDFSKVVPPLDEDGRSLLSQMLHYDPNKRISAKAALAHPFFQDVTKPVPHLRL

SEQ ID NO: 52 - protein, 303 aa, Homo sapiens
MATSRYEPVAEIGVGAYGTVYKARDPHSGHFVALKSVRVPNGGGGGGGLPISTVREVALLRRLEAFEHPNVVRLMDVCATSRTDREIKVTLVFEHVDQDLRTYLDKAPPPGLPAETIKDLMRQFLRGLDFLHANCIVHRDLKPENILVTSGGTVKLADFGLARIYSYQMALTPVVVTLWYRAPEVLLQSTYATPVDMWSVGCIFAEMFRRKPLFCGNSEADQLGKIFDLIGLPPEDDWPRDVSLPRGAFPPRGPRPVQSVVPEMEESGAQLLLEMLTFNPHKRISAFRALQHSYLHKDEGNPE

SEQ ID NO: 53 - protein, 292 aa, Homo sapiens
MQKYEKLEKIGEGTYGTVFKAKNRETHEIVALKRVRLDDDDEGVPSSALREICLLKELKHKNIVRLHDVLHSDKKLTLVFEFCDQDLKKYFDSCNGDLDPEIVKSFLFQLLKGLGFCHSRNVLHRDLKPQNLLINRNGELKLADFGLARAFGIPVRCYSAEVVTLWYRPPDVLFGAKLYSTSIDMWSAGCIFAELANAGRPLFPGNDVDDQLKRIFRLLGTPTEEQWPSMTKLPDYKPYPMYPATTSLVNVVPKLNATGRDLLQNLLKCNPVQRISAEEALQHPYFSDFCPP

SEQ ID NO: 54 - protein, 307 aa, Homo sapiens
MGTVLSLSPSYRKATLFEDGAATVGHYTAVQNSKNAKDKNLKRHSIISVLPWKRIVAVSAKKKNSKKVQPNSSYQNNITHLNNENLKKSLSCANLSTFAQPPPAQPPAPPASQLSGSQTGGSSSVKKAPHPAVTSAGTPKRVIVQASTSELLRCLGEFLCRRCYRLKHLSPTDPVLWLRSVDRSLLLQGWQDQGFITPANVVFLYMLCRDVISSEVGSDHELQAVLLTCLYLSYSYMGNEISYPLKPFLVESCKEAFWDRCLSVINLMSSKMLQINADPHYFTQVFSDLKNESGQEDKKRLLLGLDR

SEQ ID NO: 55 - protein, 346 aa, Homo sapiens
MALDVKSRAKRYEKLDFLGEGQFATVYKARDKNTNQIVAIKKIKLGHRSEAKDGINRTALREIKLLQELSHPNIIGLLDAFGHKSNISLVFDFMETDLEVIIKDNSLVLTPSHIKAYMLMTLQGLEYLHQHWILHRDLKPNNLLLDENGVLKLADFGLAKSFGSPNRAYTHQVVTRWYRAPELLFGARMYGVGVDMWAVGCILAELLLRVPFLPGDSDLDQLTRIFETLGTPTEEQWPDMCSLPDYVTFKSFPGIPLHHIFSAAGDDLLDLIQGLFLFNPCARITATQALKMKYFSNRPGPTPGCQLPRPNCPVETLKEQSNPALAIKRKRTEALEQGGLPKKLIF

SEQ ID NO: 56 - protein, 476 aa, Homo sapiens
MAVPFVEDWDLVQTLGEGAYGEVQLAVNRVTEEAVAVKIVDMKRAVDCPENIKKEICINKMLNHENVVKFYGHRREGNIQYLFLEYCSGGELFDRIEPDIGMPEPDAQRFFHQLMAGVVYLHGIGITHRDIKPENLLLDERDNLKISDFGLATVFRYNNRERLLNKMCGTLPYVAPELLKRREFHAEPVDVWSCGIVLTAMLAGELPWDQPSDSCQEYSDWKEKKTYLNPWKKIDSAPLALLHKILVENPSARITIPDIKKDRWYNKPLKKGAKRPRVTSGGVSESPSGFSKHIQSNLDFSPVNSASSEENVKYSSSQPEPRTGLSLWDTSPSYIDKLVQGISFSQPTCPDHMLLNSQLLGTPGSSQNPWQRLVKRMTRFFTKLDADKSYQCLKETCEKLGYQWKKSCMNQVTISTTDRRNNKLIFKVNLLEMDDKILVDFRLSKGDGLEFKRHFLKIKGKLIDIVSSQKVWLPAT

SEQ ID NO: 57 - protein, 883 aa, Homo sapiens
MLEMNARSLQQKLETERELKQRLLEEQAKLQQQMDLQKNHIFRLTQGLQEALDRADLLKTERSDLEYQLENIQVLYSHEKVKMEGTISQQTKLIDFLQAKMDQPAKKKKVPLQYNELKLALEKEKARCAELEEALQKTRIELRSAREEAAHRKATDHPHPSTPATARQQIAMSAIVRSPEHQPSAMSLLAPPSSRRKESSTPEEFSRRLKERMHHNIPHRFNVGLNMRATKCAVCLDTVHFGRQASKCLECQVMCHPKCSTCLPATCGLPAEYATHFTEAFCRDKMNSPGLQTKEPSSSLHLEGWMKVPRNNKRGQQGWDRKYIVLEGSKVLIYDNEAREAGQRPVEEFELCLPDGDVSIHGAVGASELANTAKADVPYILKMESHPHTTCWPGRTLYLLAPSFPDKQRWVTALESVVAGGRVSREKAEADAKLLGNSLLKLEGDDRLDMNCTLPFSDQVVLVGTEEGLYALNVLKNSLTHVPGIGAVFQIYIIKDLEKLLMIAGEERALCLVDVKKVKQSLAQSHLPAQPDISPNIFEAVKGCHLFGAGKIENGLCICAAMPSKVVILRYNENLSKYCIRKEIETSEPCSCIHFTNYSILIGTNKFYEIDMKQYTLEEFLDKNDHSLAPAVFAASSNSFPVSIVQVNSAGQREEYLLCFHEFGVFVDSYGRRSRTDDLKWSRLPLAFAYREPYLFVTHFNSLEVIEIQARSSAGTPARAYLDIPNPRYLGPAISSGAIYLASSYQDKLRVICCKGNLVKESGTEHHRGPSTSRSSPNKRGPPTYNEHITKRVASSPAPPEGPSHPREPSTPHRYREGRTELRRDKSPGRPLEREKSPGRMLSTRRERSPGRLFEDSSRGRLPAGAVRTPLSQVNKVWDQSSV

SEQ ID NO: 58 - protein, 79 aa, Homo sapiens
MAHKQIYYSDKYFDEHYEYRHVMLPRELSKQVPKTHLMSEEEWRRLGVQQSLGWVHYMIHEPEPHILLFRRPLPKDQQK

SEQ ID NO: 59 - protein, 391 aa, Homo sapiens
MSGPVPSRARVYTDVNTHRPREYWDYESHVVEWGNQDDYQLVRKLGRGKYSEVFEAINITNNEKVVVKILKPVKKKKIKREIKILENLRGGPNIITLADIVKDPVSRTPALVFEHVNNTDFKQLYQTLTDYDIRFYMYEILKALDYCHSMGIMHRDVKPHNVMIDHEHRKLRLIDWGLAEFYHPGQEYNVRVASRYFKGPELLVDYQMYDYSLDMWSLGCMLASMIFRKEPFFHGHDNYDQLVRIAKVLGTEDLYDYIDKYNIELDPRFNDILGRHSRKRWERFVHSENQHLVSPEALDFLDKLLRYDHQSRLTAREAMEHPYFYTVVKDQARMGSSSMPGGSTPVSSANMMSGISSVPTPSPLGPLAGSPVIAAANPLGMPVPAAAGAQQ

SEQ ID NO: 60 - protein, 358 aa, Homo sapiens
MRATPLAAPAGSLSRKKRLELDDNLDTERPVQKRARSGPQPRLPPCLLPLSPPTAPDRATAVATASRLGPYVLLEPEEGGRAYQALHCPTGTEYTCKVYPVQEAPAVLEPYARLPPHKHVARPTEVLAGTQLLYAFFTRTHGDMHSLVRSRHRIPEPEAAVLFRQMATALAHCHQHGLVLRDLKLCRFVFADRERKKLVLENLEDSCVLTGPDDSLWDKHACPAYVGPEILSSRASYSGKAADVWSLGVALFTMLAGHYPFQDSEPVLLFGKIRRGAYALPAGLSAPARCLVRCLLRREPAERLTATGILLHPWLRQDPMPLAPTRSHLWEAAQVVPDGLGLDEAREEEGDREVVLYG

SEQ ID NO: 61 - protein, 987 aa, Homo sapiens
MALRRLGAALLLLPLLAAVEETLMDSTTATAELGWMVHPPSGWEEVSGYDENMNTIRTYQVCNVFESSQNNWLRTKFIRRRGAHRIHVEMKFSVRDCSSIPSVPGSCKETFNLYYYEADFDSATKTFPNWMENPWVKVDTIAADESFSQVDLGGRVMKINTEVRSFGPVSRSGFYLAFQDYGGCMSLIAVRVFYRKCPRIIQNGAIFQETLSGAESTSLVAARGSCIANAEEVDVPIKLYCNGDGEWLVPIGRCMCKAGFEAVENGTVCRGCPSGTFKANQGDEACTHCPINSRTTSEGATNCVCRNGYYRADLDPLDMPCTTIPSAPQAVISSVNETSLMLEWTPPRDSGGREDLVYNIICKSCGSGRGACTRCGDNVQYAPRQLGLTEPRIYISDLLAHTQYTFEIQAVNGVTDQSPFSPQFASVNITTNQAAPSAVSIMHQVSRTVDSITLSWSQPDQPNGVILDYELQYYEKELSEYNATAIKSPTNTVTVQGLKAGAIYVFQVRARTVAGYGRYSGKMYFQTMTEAEYQTSIQEKLPLIIGSSAAGLVFLIAVVVIAIVCNRRRGFERADSEYTDKLQHYTSGHMTPGMKIYIDPFTYEDPNEAVREFAKEIDISCVKIEQVIGAGEFGEVCSGHLKLPGKREIFVAIKTLKSGYTEKQRRDFLSEASIMGQFDHPNVIHLEGVVTKSTPVMIITEFMENGSLDSFLRQNDGQFTVIQLVGMLRGIAAGMKYLADMNYVHRDLAARNILVNSNLVCKVSDFGLSRFLEDDTSDPTYTSALGGKIPIRWTAPEAIQYRKFTSASDVWSYGIVMWEVMSYGERPYWDMTNQDVINAIEQDYRLPPPMDCPSALHQLMLDCWQKDRNHRPKFGQIVNTLDKMIRNPNSLKAMAPLSSGINLPLLDRTIPDYTSFNTVDEWLEAIKMGQYKESFANAGFTSFDVVSQMMMEDILRVGVTLAGHQKKILNSIQVMRAQMNQIQSVEV

SEQ ID NO: 62 - protein, 1255 aa, Homo sapiens
MELAALCRWGLLLALLPPGAASTQVCTGTDMKLRLPASPETHLDMLRHLYQGCQVVQGNLELTYLPTNASLSFLQDIQEVQGYVLIAHNQVRQVPLQRLRIVRGTQLFEDNYALAVLDNGDPLNNTTPVTGASPGGLRELQLRSLTEILKGGVLIQRNPQLCYQDTILWKDIFHKNNQLALTLIDTNRSRACHPCSPMCKGSRCWGESSEDCQSLTRTVCAGGCARCKGPLPTDCCHEQCAAGCTGPKHSDCLACLHFNHSGICELHCPALVTYNTDTFESMPNPEGRYTFGASCVTACPYNYLSTDVGSCTLVCPLHNQEVTAEDGTQRCEKCSKPCARVCYGLGMEHLREVRAVTSANIQEFAGCKKIFGSLAFLPESFDGDPASNTAPLQPEQLQVFETLEEITGYLYISAWPDSLPDLSVFQNLQVIRGRILHNGAYSLTLQGLGISWLGLRSLRELGSGLALIHHNTHLCFVHTVPWDQLFRNPHQALLHTANRPEDECVGEGLACHQLCARGHCWGPGPTQCVNCSQFLRGQECVEECRVLQGLPREYVNARHCLPCHPECQPQNGSVTCFGPEADQCVACAHYKDPPFCVARCPSGVKPDLSYMPIWKFPDEEGACQPCPINCTHSCVDLDDKGCPAEQRASPLTSIVSAVVGILLVVVLGVVFGILIKRRQQKIRKYTMRRLLQETELVEPLTPSGAMPNQAQMRILKETELRKVKVLGSGAFGTVYKGIWIPDGENVKIPVAIKVLRENTSPKANKEILDEAYVMAGVGSPYVSRLLGICLTSTVQLVTQLMPYGCLLDHVRENRGRLGSQDLLNWCMQIAKGMSYLEDVRLVHRDLAARNVLVKSPNHVKITDFGLARLLDIDETEYHADGGKVPIKWMALESILRRRFTHQSDVWSYGVTVWELMTFGAKPYDGIPAREIPDLLEKGERLPQPPICTIDVYMIMVKCWMIDSECRPRFRELVSEFSRMARDPQRFVVIQNEDLGPASPLDSTFYRSLLEDDDMGDLVDAEEYLVPQQGFFCPDPAPGAGGMVHHRHRSSSTRSGGGDLTLGLEPSEEEAPRSPLAPSEGAGSDVFDGDLGMGAAKGLQSLPTHDPSPLQRYSEDPTVPLPSETDGYVAPLTCSPQPEYVNQPDVRPQPPSPREGPLPAARPAGATLERAKTLSPGKNGVVKDVFAFGGAVENPEYLTPQGGAAPQPHPPPAFSPAFDNLYYWDQDPPERGAPPSTFKGTPTAENPEYLGLDVPV

SEQ ID NO: 63 - protein, 1342 aa, Homo sapiens
MRANDALQVLGLLFSLARGSEVGNSQAVCPGTLNGLSVTGDAENQYQTLYKLYERCEVVMGNLEIVLTGHNADLSFLQWIREVTGYVLVAMNEFSTLPLPNLRVVRGTQVYDGKFAIFVMLNYNTNSSHALRQLRLTQLTEILSGGVYIEKNDKLCHMDTIDWRDIVRDRDAEIVVKDNGRSCPPCHEVCKGRCWGPGSEDCQTLTKTICAPQCNGHCFGPNPNQCCHDECAGGCSGPQDTDCFACRHFNDSGACVPRCPQPLVYNKLTFQLEPNPHTKYQYGGVCVASCPHNFVVDQTSCVRACPPDKMEVDKNGLKMCEPCGGLCPKACEGTGSGSRFQTVDSSNIDGFVNCTKILGNLDFLITGLNGDPWHKIPALDPEKLNVFRTVREITGYLNIQSWPPHMHNFSVFSNLTTIGGRSLYNRGFSLLIMKNLNVTSLGFRSLKEISAGRIYISANRQLCYHHSLNWTKVLRGPTEERLDIKHNRPRRDCVAEGKVCDPLCSSGGCWGPGPGQCLSCRNYSRGGVCVTHCNFLNGEPREFAHEAECFSCHPECQPMGGTATCNGSGSDTCAQCAHFRDGPHCVSSCPHGVLGAKGPIYKYPDVQNECRPCHENCTQGCKGPELQDCLGQTLVLIGKTHLTMALTVIAGLVVIFMMLGGTFLYWRGRRIQNKRAMRRYLERGESIEPLDPSEKANKVLARIFKETELRKLKVLGSGVFGTVHKGVWIPEGESIKIPVCIKVIEDKSGRQSFQAVTDHMLAIGSLDHAHIVRLLGLCPGSSLQLVTQYLPLGSLLDHVRQHRGALGPQLLLNWGVQIAKGMYYLEEHGMVHRNLAARNVLLKSPSQVQVADFGVADLLPPDDKQLLYSEAKTPIKWMALESIHFGKYTHQSDVWSYGVTVWELMTFGAEPYAGLRLAEVPDLLEKGERLAQPQICTIDVYMVMVKCWMIDENIRPTFKELANEFTRMARDPPRYLVIKRESGPGIAPGPEPHGLTNKKLEEVELEPELDLDLDLEAEEDNLATTTLGSALSLPVGTLNRPRGSQSLLSPSSGYMPMNQGNLGGSCQESAVSGSSERCPRPVSLHPMPRGCLASESSEGHVTGSEAELQEKVSMCRSRSRSRSPRPRGDSAYHSQRHSLLTPVTPLSPPGLEEEDVNGYVMPDTHLKGTPSSREGTLSSVGLSSVLGTEEEDEDEEYEYMNRRRRHSPPHPPRPSSLEELGYEYMDVGSDLSASLGSTQSCPLHPVPIMPTAGTTPDEDYEYMNRQRDGGGPGGDYAAMGACPASEQGYEEMRAFQGPGHQAPHVHYARLKTLRSLEATDSAFDNPDYWHSRLFPKANAQRT

SEQ ID NO: 64 - protein, 798 aa, Homo sapiens
MAASLPGPGSRLFRTYGAADGRRQRRPGREAAQWFPPQDRRRFFNSSGSSDASIGDPSQSDDPDDPDDPDFPGSPVRRRRRCPGGRVPKDRPSLTVTPKRWKLRARPSLTVTPRRLGLRARPPQKCSTPCGPLRLPPFPSRDSGRLSPDLSVCGQPRDGDELGISASLFSSLASPCPGSPTPRDSVISIGTSACLVAASAVPSDLHLPEVSLDRASLPCSQEEATGGAKDTRMVHQTRASLRSVLFGLMNSGTPEDSEFRADGKNMRESCCKRKLVVGNGPEGPGLSSTGKRRATGQDSCQERGLQEAVRREHQEASVPKGRIVPRGTDRLERTRSSRKSKHQEATETSLLHSHRFKKGQKLGKDSFPTQDLTPLQNACFWTKTRASFSFHKKKIVTDVSEVCSIYTTATSLSGSLLSECSNRPVMNRTSGAPSSWHSSSMYLLSPLNTLSISNKKASDAEKVYGECSQKGPVPFSHCLPTEKLQRCEKIGEGVFGEVFQTIADHTPVAIKIIAIEGPDLVNGSHQKTFEEILPEIIISKELSLLSGEVCNRTEGFIGLNSVHCVQGSYPPLLLKAWDHYNSTKGSANDRPDFFKDDQLFIVLEFEFGGIDLEQMRTKLSSLATAKSILHQLTASLAVAEASLRFEHRDLHWGNVLLKKTSLKKLHYTLNGKSSTIPSCGLQVSIIDYTLSRLERDGIVVFCDVSMDEDLFTGDGDYQFDIYRLMKKENNNRWGEYHPYSNVLWLHYLTDKMLKQMTFKTKCNTPAMKQIKRKIQEFHRTMLNFSSATDLLCQHSLFK

SEQ ID NO: 65 - protein, 433 aa, Homo sapiens
MSGRPRTTSFAESCKPVQQPSAFGSMKVSRDKDGSKVTTVVATPGQGPDRPQEVSYTDTKVIGNGSFGVVYQAKLCDSGELVAIKKVLQDKRFKNRELQIMRKLDHCNIVRLRYFFYSSGEKKDEVYLNLVLDYVPETVYRVARHYSRAKQTLPVIYVKLYMYQLFRSLAYIHSFGICHRDIKPQNLLLDPDTAVLKLCDFGSAKQLVRGEPNVSYICSRYYRAPELIFGATDYTSSIDVWSAGCVLAELLLGQPIFPGDSGVDQLVEIIKVLGTPTREQIREMNPNYTEFKFPQIKAHPWTKDSSGTGHFTSGVRVFRPRTPPEAIALCSRLLEYTPTARLTPLEACAHSFFDELRDPNVKLPNGRDTPALFNFTTQELSSNPPLATILIPPHARIQAAASTPTNATAASDANTGDRGQTNNAASASASNST

SEQ ID NO: 66 - protein, 712 aa, Homo sapiens
MAGGPGPGEPAAPGAQHFLYEVPPWVMCRFYKVMDALEPADWCQFAALIVRDQTELRLCERSGQRTASVLWPWINRNARVADLVHILTHLQLLRARDIITAWHPPAPLPSPGTTAPRPSSIPAPAEAEAWSPRKLPSSASTFLSPAFPGSQTHSGPELGLVPSPASLWPPPPSPAPSSTKPGPESSVSLLQGARPSPFCWPLCEISRGTHNFSEELKIGEGGFGCVYRAVMRNTVYAVKRLKENADLEWTAVKQSFLTEVEQLSRFRHPNIVDFAGYCAQNGFYCLVYGFLPNGSLEDRLHCQTQACPPLSWPQRLDILLGTARAIQFLHQDSPSLIHGDIKSSNVLLDERLTPKLGDFGLARFSRFAGSSPSQSSMVARTQTVRGTLAYLPEEYIKTGRLAVDTDTFSFGVVVLETLAGQRAVKTHGARTKYLKDLVEEEAEEAGVALRSTQSTLQAGLAADAWAAPIAMQIYKKHLDPRPGPCPPELGLGLGQLACCCLHRRAKRRPPMTQVYERLEKLQAVVAGVPGHLEAASCIPPSPQENSYVSSTGRAHSGAAPWQPLAAPSGASAQAAEQLQRGPNQPVESDESLGGLSAALRSWHLTPSCPLDPAPLREAGCPQGDTAGESSWGSGPGSRPTAVEGLALGSSASSSSEPPQIIINPARQKMVQKLALYEDGALDSLQLLSSSSLPGLGLEQDRQGPEESDEFQS

SEQ ID NO: 67 - protein, 651 aa, Homo sapiens
MKDYDELLKYYELHETIGTGGFAKVKLACHILTGEMVAIKIMDKNTLGSDLPRIKTEIEALKNLRHQHICQLYHVLETANKIFMVLEYCPGGELFDYIISQDRLSEEETRVVFRQIVSAVAYVHSQGYAHRDLKPENLLFDEYHKLKLIDFGLCAKPKGNKDYHLQTCCGSLAYAAPELIQGKSYLGSEADVWSMGILLYVLMCGFLPFDDDNVMALYKKIMRGKYDVPKWLSPSSILLLQQMLQVDPKKRISMKNLLNHPWIMQDYNYPVEWQSKNPFIHLDDDCVTELSVHHRNNRQTMEDLISLWQYDHLTATYLLLLAKKARGKPVRLRLSSFSCGQASATPFTDIKSNNWSLEDVTASDKNYVAGLIDYDWCEDDLSTGAATPRTSQFTKYWTESNGVESKSLTPALCRTPANKLKNKENVYTPKSAVKNEEYFMFPEPKTPVNKNQHKREILTTPNRYTTPSKARNQCLKETPIKIPVNSTGTDKLMTGVISPERRCRSVELDLNQAHMEETPKRKGAKVFGSLERGLDKVITVLTRSKRKGSARDGPRRLKLHYNVTTTRLVNPDQLLNEIMSILPKKHVDFVQKGYTLKCQTQSDFGKVTMQFELEVCQLQKPDVVGIRRQRLKGDAWVYKRLVEDILSSCKV

SEQ ID NO: 68 - protein, 471 aa, Homo sapiens
MSEESDMDKAIKETSILEEYSINWTQKLGAGISGPVRVCVKKSTQERFALKILLDRPKARNEVRLHMMCATHPNIVQIIEVFANSVQFPHESSPRARLLIVMEMMEGGELFHRISQHRHFTEKQASQVTKQIALALRHCHLLNIAHRDLKPENLLFKDNSLDAPVKLCDFGFAKIDQGDLMTPQFTPYYVAPQVLEAQRRHQKEKSGIIPTSPTPYTYNKSCDLWSLGVIIYVMLCGYPPFYSKHHSRTIPKDMRRKIMTGSFEFPEEEWSQISEMAKDVVRKLLKVKPEERLTIEGVLDHPWLNSTEALDNVLPSAQLMMDKAVVAGIQQAHAEQLANMRIQDLKVSLKPLHSVNNPILRKRKLLGTKPKDSVYIHDHENGAEDSNVALEKLRDVIAQCILPQAGENEDEKLNEVMQEAWKYNRECKLLRDTLQSFSWNGRGFTDKVDRLKLAEIVKQVIEEQTTSHESQ

SEQ ID NO: 69 - protein, 365 aa, Homo sapiens
MSLIRKKGFYKQDVNKTAWELPKTYVSPTHVGSGAYGSVCSAIDKRSGEKVAIKKLSRPFQSEIFAKRAYRELLLLKHMQHENVIGLLDVFTPASSLRNFYDFYLVMPFMQTDLQKIMGMEFSEEKIQYLVYQMLKGLKYIHSAGVVHRDLKPGNLAVNEDCELKILDFGLARHADAEMTGYVVTRWYRAPEVILSWMHYNQTVDIWSVGCIMAEMLTGKTLFKGKDYLDQLTQILKVTGVPGTEFVQKLNDKAAKSYIQSLPQTPRKDFTQLFPRASPQAADLLEKMLELDVDKRLTAAQALTHPFFEPFRDPEEETEAQQPFDDSLEHEKLTVDEWKQHIYKEIVNFSPIARKDSRRRSGMKL

SEQ ID NO: 70 - protein, 445 aa, Homo sapiens
MPSRAEDYEVLYTIGTGSYGRCQKIRRKSDGKILVWKELDYGSMTEAEKQMLVSEVNLLRELKHPNIVRYYDRIIDRTNTTLYIVMEYCEGGDLASVITKGTKERQYLDEEFVLRVMTQLTLALKECHRRSDGGHTVLHRDLKPANVFLDGKQNVKLGDFGLARILNHDTSFAKTFVGTPYYMSPEQMNRMSYNEKSDIWSLGCLLYELCALMPPFTAFSQKELAGKIREGKFRRIPYRYSDELNEIITRMLNLKDYHRPSVEEILENPLIADLVADEQRRNLERRGRQLGEPEKSQDSSPVLSELKLKEIQLQERERALKAREERLEQKEQELCVRERLAEDKLARAENLLKNYSLLKERKFLSLASNPELLNLPSSVIKKKVHFSGESKENIMRSENSESQLTSKSKCKDLKKRLHAAQLRAQALSDIEKNYQLKSRQILGMR

SEQ ID NO: 71 - protein, 591 aa, Homo sapiens
MFGKRKKRVEISAPSNFEHRVHTGFDQHEQKFTGLPRQWQSLIEESARRPKPLVDPACITSIQPGAPKTIVRGSKGAKDGALTLLLDEFENMSVTRSNSLRRDSPPPPARARQENGMPEEPATTARGGPGKAGSRGRFAGHSEAGGGSGDRRRAGPEKRPKSSREGSGGPQESSRDKRPLSGPDVGTPQPAGLASGAKLAAGRPFNTYPRADTDHPSRGAQGEPHDVAPNGPSAGGLAIPQSSSSSSRPPTRARGAPSPGVLGPHASEPQLAPPACTPAAPAVPGPPGPRSPQREPQRVSHEQFRAALQLVVDPGDPRSYLDNFIKIGEGSTGIVCIATVRSSGKLVAVKKMDLRKQQRRELLFNEVVIMRDYQHENVVEMYNSYLVGDELWVVMEFLEGGALTDIVTHTRMNEEQIAAVCLAVLQALSVLHAQGVIHRDIKSDSILLTHDGRVKLSDFGFCAQVSKEVPRRKSLVGTPYWMAPELISRLPYGPEVDIWSLGIMVIEMVDGEPPYFNEPPLKAMKMIRDNLPPRLKNLHKVSPSLKGFLDRLLVRDPAQRATAAELLKHPFLAKAGPPASIVPLMRQNRTR

SEQ ID NO: 72 - protein, 496 aa, Homo sapiens [sequence omitted]

SEQ ID NO: 73 - protein, 406 aa, Homo sapiens
MRLFRWLLKQPVPKQIERYSRFSPSPLSIKQFLDFGRDNACEKTSYMFLRKELPVRLANTMREVNLLPDNLLNRPSVGLVQSWYMQSFLELLEYENKSPEDPQVLDNFLQVLIKVRNRHNDVVPTMAQGVIEYKEKFGFDPFISTNIQYFLDRFYTNRISFRMLINQHTLLFGGDTNPVHPKHIGSIDPTCNVADVVKDAYETAKMLCEQYYLVAPELEVEEFNAKAPDKPIQVVYVPSHLFHMLFELFKNSMRATVELYEDRKEGYPAVKTLVTLGKEDLSIKISDLGGGVPLRKIDRLFNYMYSTAPRPSLEPTRAAPLAGFGYGLPISRLYARYFQGDLKLYSMEGVGTDAVIYLKALSSESFERLPVFNKSAWRHYKTTPEADDWSNPSSEPRDASKYKAKQ

SEQ ID NO: 74 - protein, 499 aa, Homo sapiens [sequence omitted]

SEQ ID NO: 75 - protein, 603 aa, Homo sapiens
MSAAVTAGKLARAPADPGKAGVPGVAAPGAPAAAPPAKEIPEVLVDPRSRRRYVRGRFLGKGGFAKCFEISDADTKEVFAGKIVPKSLLLKPHQREKMSMEISIHRSLAHQHVVGFHGFFEDNDFVFVVLELCRRRSLLELHKRRKALTEPEARYYLRQIVLGCQYLHRNRVIHRDLKLGNLFLNEDLEVKIGDFGLATKVEYDGERKKTLCGTPNYIAPEVLSKKGHSFEVDVWSIGCIMYTLLVGKPPFETSCLKETYLRIKKNEYSIPKHINPVAASLIQKMLQTDPTARPTINELLNDEFFTSGYIPARLPITCLTIPPRFSIAPSSLDPSNRKPLTVLNKGLENPLPERPREKEEPVVRETGEVVDCHLSDMLQQLHSVNASKPSERGLVRQEEAEDPACIPIFWVSKWVDYSDKYGLGYQLCDNSVGVLFNDSTRLILYNDGDSLQYIERDGTESYLTVSSHPNSLMKKITLLKYFRNYMSEHLLKAGANITPREGDELARLPYLRTWFRTRSAIILHLSNGSVQINFFQDHTKLILCPLMAAVTYIDEKRDFRTYRLSLLEEYGCCKELASRLRYARTMVDKLLSSRSASNRLKAS

SEQ ID NO: 76 - protein, 942 aa, Homo sapiens
MASDAVQSEPRSWSLLEQLGLAGADLAAPGVQQQLELERERLRREIRKELKLKEGAENLRRATTDLGRSLGPVELLLRGSSRRLDLLHQQLQELHAHVVLPDPAATHDGPQSPGAGGPTCSATNLSRVAGLEKQLAIELKVKQGAENMIQTYSNGSTKDRKLLLTAQQMLQDSKTKIDIIRMQLRRALQADQLENQAAPDDTQGSPDLGAVELRIEELRHHFRVEHAVAEGAKNVLRLLSAAKAPDRKAVSEAQEKLTESNQKLGLLREALERRLGELPADHPKGRLLREELAAASSAAFSTRLAGPFPATHYSTLCKPAPLTGTLEVRVVGCRDLPETIPWNPTPSMGGPGTPDSRPPFLSRPARGLYSRSGSLSGRSSLKAEAENTSEVSTVLKLDNTVVGQTSWKPCGPNAWDQSFTLELERARELELAVFWRDQRGLCALKFLKLEDFLDNERHEVQLDMEPQGCLVAEVTFRNPVIERIPRLRRQKKIFSKQQGKAFQRARQMNIDVATWVRLLRRLIPNATGTGTFSPGASPGSEARTTGDISVEKLNLGTDSDSSPQKSSRDPPSSPSSLSSPIQESTAPELPSETQETPGPALCSPLRKSPLTLEDFKFLAVLGRGHFGKVLLSEFRPSGELFAIKALKKGDIVARDEVESLMCEKRILAAVTSAGHPFLVNLFGCFQTPEHVCFVMEYSAGGDLMLHIHSDVFSEPRAIFYSACVVLGLQFLHEHKIVYRDLKLDNLLLDTEGYVKIADFGLCKEGMGYGDRTSTFCGTPEFLAPEVLTDTSYTRAVDWWGLGVLLYEMLVGESPFPGDDEEEVFDSIVNDEVRYPRFLSAEAIGIMRRLLRRNPERRLGSSERDAEDVKKQPFFRTLGWEALLARRLPPPFVPTLSGRTDVSNFDEEFTGEAPTLSPPRDARPLTAAEQAAFLDFDFVAGGC

SEQ ID NO: 77 - protein, 4128 aa, Homo sapiens [sequence omitted]

SEQ ID NO: 78 - protein, 879 aa, Homo sapiens
MSDYWVVGKKSNYEVLEKDVGLKRFFPKSLLDSVKAKTLRKLIQQTFRQFANLNREESILKFFEILSPVYRFDKECFKCALGSSWIISVELAIGPEEGISYLTDKGCNPTHLADFTQVQTIQYSNSEDKDRKGMLQLKIAGAPEPLTVTAPSLTIAENMADLIDGYCRLVNGTSQSFIIRPQKEGERALPSIPKLANSEKQGMRTHAVSVSETDDYAEIIDEEDTYTMPSTRDYEIQRERIELGRCIGEGQFGDVHQGIYMSPENPALAVAIKTCKNCTSDSVREKFLQEACHYTSLHWNWCRYISDPNVDACPDPRNAELTMRQFDHPHIVKLIGVITENPVWIIMELCTLGELRSFLQVRKYSLDLASLILYAYQLSTALAYLESKRFVHRDIAARNVLVSSNDCVKLGDFGLSRYMEDSTYYKASKGKLPIKWMAPESINFRRFTSASDVWMFGVCMWEILMHGVKPFQGVKNNDVIGRIENGERLPMPPNCPPTLYSLMTKCWAYDPSRRPRFTELKAQLSTILEEEKAQQEERMRMESRRQATVSWDSGGSDEAPPKPSRPGYPSPRSSEGFYPSPQHMVQTNHYQVSGYPGSHGITAMAGSIYPGQASLLDQTDSWNHRSQEIAMWQPNVEDSTVLDLRGIGQVLPTHLMEERLIRQQQEMEEDQRWLEKEERFLIGNQHIYQPVGKPDPAAPPKKPPRPGAPGHLGSLASLSSPADSYNEGVKLQPQEISPPPTANLDRSNDKVYENVTGLVKAVIEMSSKIQPAPPEEYVPMVKEVGLALRTLLATVDETIPLLPASTHREIEMAQKLLNSDLGELINKMKLAQQYVMTSLQQEYKKQMLTAAHALAVDAKNLLDVIDQARLKMLGQTRPH

SEQ ID NO: 79 - protein, 451 aa, Homo sapiens
MVSRDQAHLGPKYVGLWDFKSRTDEELSFRAGDVFHVARKEEQWWWATLLDEAGGAVAQGYVPHNYLAERETVESEPWFFGCISRSEAVRRLQAEGNATGAFLIRVSEKPSADYVLSVRDTQAVRHYKIWRRAGGRLHLNEAVSFLSLPELVNYHRAQSLSHGLRLAAPCRKHEPEPLPHWDDWERPREEFTLCRKLGSGYFGEVFEGLWKDRVQVAIKVISRDNLLHQQMLQSEIQAMKKLRHKHILALYAVVSVGDPVYIITELMAKGSLLELLRDSDEKVLPVSELLDIAWQVAEGMCYLESQNYIHRDLAARNILVGENTLCKVGDFGLARLIKEDVYLSHDHNIPYKWTAPEALSRGHYSTKSDVWSFGILLHEMFSRGQVPYPGMSNHEAFLRVDAGYRMPCPLECPPSVHKLMLTCWCRDPEQRPCFKALRERLSSFTSYENPT

SEQ ID NO: 80 - protein, 540 aa, Homo sapiens
MNGEAICSALPTIPYHKLADLRYLSRGASGTVSSARHADWRVQVAVKHLHIHTPLLDSERKDVLREAEILHKARFSYILPILGICNEPEFLGIVTEYMPNGSLNELLHRKTEYPDVAWPLRFRILHEIALGVNYLHNMTPPLLHHDLKTQNILLDNEFHVKIADFGLSKWRMMSLSQSRSSKSAPEGGTIIYMPPENYEPGQKSRASIKHDIYSYAVITWEVLSRKQPFEDVTNPLQIMYSVSQGHRPVINEESLPYDIPHRARMISLIESGWAQNPDERPSFLKCLIELEPVLRTFEEITFLEAVIQLKKTKLQSVSSAIHLCDKKKMELSLNIPVNHGPQEESCGSSQLHENSGSPETSRSLPAPQDNDFLSRKAQDCYFMKLHHCPGNHSWDSTISGSQRAAFCDHKTTPCSSAIINPLSTAGNSERLQPGIAQQWIQSKREDIVNQMTEACLNQSLDALLSRDLIMKEDYELVSTKPTRTSKVRQLLDTTDIQGEEFAKVIVQKLKDNKQMGLQPYPEILVVSRSPSLNLLQNKSM

SEQ ID NO: 81 - protein, 495 aa, Homo sapiens
MARGRRARGAGAAMAAVFDLDLETEEGSEGEGEPELSPADACPLAELRAAGLEPVGHYEEVELTETSVNVGPERIGPHCFELLRVLGKGGYGKVFQVRKVQGTNLGKIYAMKVLRKAKIVRNAKDTAHTRAERNILESVKHPFIVELAYAFQTGGKLYLILECLSGGELFTHLEREGIFLEDTACFYLAEITLALGHLHSQGIIYRDLKPENIMLSSQGHIKLTDFGLCKESIHEGAVTHTFCGTIEYMAPEILVRSGHNRAVDWWSLGALMYDMLTGSPPFTAENRKKTMDKIIRGKLALPPYLTPDARDLVKKFLKRNPSQRIGGGPGDAADVQRHPFFRHMNWDDLLAWRVDPPFRPCLQSEEDVSQFDTRFTRQTPVDSPDDTALSESANQAFLGFTYVAPSVLDSIKEGFSFQPKLRSPRRLNSSPRVPVSPLKFSPFEGFRPSPSLPEPTELPLPPLLPPPPPSTTAPLPIRPPSGTKKSKRGRGRPGR

SEQ ID NO: 82 - protein, 654 aa, Homo sapiens
MERKVLALQARKKRTKAKKDKAQRKSETQHRGSAPHSESDLPEQEEEILGSDDDEQEDPNDYCKGGYHLVKIGDLFNGRYHVIRKLGWGHFSTVWLSWDIQGKKFVAMKVVKSAEHYTETALDEIRLLKSVRNSDPNDPNREMVVQLLDDFKISGVNGTHICMVFEVLGHHLLKWIIKSNYQGLPLPCVKKIIQQVLQGLDYLHTKCRIIHTDIKPENILLSVNEQYIRRLAAEATEWQRSGAPPPSGSAVSTAPQPKPADKMSKNKKKKLKKKQKRQAELLEKRMQEIEEMEKESGPGQKRPNKQEESESPVERPLKENPPNKMTQEKLEESSTIGQDQTLMERDTEGGAAEINCNGVIEVINYTQNSNNETLRHKEDLHNANDCDVQNLNQESSFLSSQNGDSSTSQETDSCTPITSEVSDTMVCQSSSTVGQSFSEQHISQLQESIRAEIPCEDEQEQEHNGPLDNKGKSTAGNFLVNPLEPKNAEKLKVKIADLGNACWHKHFTEDIQTRQYRSLEVLIGSGYNTPADIWSTACMAFELATGDYLFEPHSGEEYTRDEDHIALIIELLGKVPRKLIVAGKYSKEFFTKKGDLKHITKLKPWGLFEVLVEKYEWSQEEAAGFTDFLLPMLELIPEKRATAAECLRHPWLNS

SEQ ID NO: 83 - protein, 403 aa, Homo sapiens
MDRSKENCISGPVKATAPVGGPKRVLVTQQIPCQNPLPVNSGQAQRVLCPSNSSQRVPLQAQKLVSSHKPVQNQKQKQLQATSVPHPVSRPLNNTQKSKQPLPSAPENNPEEELASKQKNEESKKRQWALEDFEIGRPLGKGKFGNVYLAREKQSKFILALKVLFKAQLEKAGVEHQLRREVEIQSHLRHPNILRLYGYFHDATRVYLILEYAPLGTVYRELQKLSKFDEQRTATYITELANALSYCHSKRVIHRDIKPENLLLGSAGELKIADFGWSVHAPSSRRTTLCGTLDYLPPEMIEGRMHDEKVDLWSLGVLCYEFLVGKPPFEANTYQETYKRISRVEFTFPDFVTEGARDLISRLLKHNPSQRPMLREVLEHPWITANSSKPSNCQNKESASKQS

SEQ ID NO: 84 - protein, 344 aa, Homo sapiens
MAQKENSYPWPYGRQTAPSGLSTLPQRVLRKEPVTPSALVLMSRSNVQPTAAPGQKVMENSSGTPDILTRHFTIDDFEIGRPLGKGKFGNVYLAREKKSHFIVALKVLFKSQIEKEGVEHQLRREIEIQAHLHHPNILRLYNYFYDRRRIYLILEYAPRGELYKELQKSCTFDEQRTATIMEELADALMYCHGKKVIHRDIKPENLLLGLKGELKIADFGWSVHAPSLRRKTMCGTLDYLPPEMIEGRMHNEKVDLWCIGVLCYELLVGNPPFESASHNETYRRIVKVDLKFPASVPTGAQDLISKLLRHNPSERLPLAQVSAHPWVRANSRRVLPPSALQSVA

SEQ ID NO: 85 - protein, 403 aa, Homo sapiens
MDRSKENCISGPVKATAPVGGPKRVLVTQQFPCQNPLPVNSGQAQRVLCPSNSSQRIPLQAQKLVSSHKPVQNQKQKQLQATSVPHPVSRPLNNTQKSKQPLPSAPENNPEEELASKQKNEESKKRQWALEDFEIGRPLGKGKFGNVYLAREKQSKFILALKVLFKAQLEKAGVEHQLRREVEIQSHLRHPNILRLYGYFHDATRVYLILEYAPLGTVYRELQKLSKFDEQRTATYITELANALSYCHSKRVIHRDIKPENLLLGSAGELKIADFGWSVHAPSSRRTTLCGTLDYLPPEMIEGRMHDEKVDLWSLGVLCYEFLVGKPPFEANTYQETYKRISRVEFTFPDFVTEGARDLISRLLKHNPSQRPMLREVLEHPWITANSSKPSNCQNKESASKQS

SEQ ID NO: 86 - protein, 970 aa, Homo sapiens
MATCIGEKIEDFKVGNLLGKGSFAGVYRAESIHSGLEVAIKMIDKKAMYKAGMVQRVQNEVKIHCQLKHPSILELYNYFEDSNYVYLVLEMCHNGEMNRYLKNRVKPFSENEARHFMHQIITGMLYLHSHGILHRDLTLSNLLLTRNMNIKIADFGLATQLKMPHEKHYTLCGTPNYISPEIATRSAHGLESDVWSLGCMFYTLLIGRPPFDTDTVKNTLNKVVLADYEMPTFLSIEAKDLIHQLLRRNPADRLSLSSVLDHPFMSRNSSTKSKDLGTVEDSIDSGHATISTAITASSSTSISGSLFDKRRLLIGQPLPNKMTVFPKNKSSTDFSSSGDGNSFYTQWGNQETSNSGRGRVIQDAEERPHSRYLRRAYSSDRSGTSNRQSQAKTYTMERCHSAEMLSVSKRSGGGENEERYSPTDNNANIFNFFKEKTSSSSGSFERPDNNQALSNHLCPGKTPFPFADPTPQTETVQQWFGNLQINAHLRKTTEYDSISPNRDFQGHPDLQKDTSKNAWTDTKVKKNSDASDNAHSVKQQNTMKYMTALHSKPEIIQQECVFGSDPLSEQSKTRGMEPPWGYQNRTLRSITSPLVAHRLKPIRQKTKKAVVSILDSEEVCVELVKEYASQEYVKEVLQISSDGNTITIYYPNGGRGFPLADRPPSPTDNISRYSFDNLPEKYWRKYQYASRFVQLLRSKSPKITYFTRYAKCILMENSPGADFEVWFYDGVKIHKTEDFIQVIEKTGKSYTLKSESEVNSLKEEIKMYMDHANEGHRICLALESIISEEERKTRSAPFFPIIIGRKPGSTSSPKALSPPPSVDSNYPTRDRASFNRMVMHSDASPTQAPILNPSMVTNEGLGLTTTASGTDISSNSLKDCLPKSAQLLKSVFVKNVGWATQLTSGAVWVQFNDGSQLVVQAGVSSISYTSPNGQTTRYGENEKLPDYIKQKLQCLSSILLMFSNPTPNFH

SEQ ID NO: 87 - protein, 547 aa, Homo sapiens
MAEPSGSPVHVQLPQQAAPVTAAAAAAPAAATAAPAPAAPAAPAPAPAPAPAAQAVGWPICRDAYELQEVIGSGATAVVQAALCKPRQERVAIKRINLEKCQTSMDELLKEIQAMSQCSHPNVVTYYTSFVVKDELWLVMKLLSGGSMLDIIKYIVNRGEHKNGVLEEAIIATILKEVLEGLDYLHRNGQIHRDLKAGNILLGEDGSVQIADFGVSAFLATGGDVTRNKVRKTFVGTPCWMAPEVMEQVRGYDFKADMWSFGITAIELATGAAPYHKYPPMKVLMLTLQNDPPTLETGVEDKEMMKKYGKSFRKLLSLCLQKDPSKRPTAAELLKCKFFQKAKNREYLIEKLLTRTPDIAQRAKKVRRVPGSSGHLHKTEDGDWEWSDDEMDEKSEEGKAAFSQEKSRRVKEENPEIAVSASTIPEQIQSLSVHDSQGPPNANEDYREASSCAVNLVLRLRNSRKELNDIRFEFTPGRDTADGVSQELFSAGLVDGHDVVIVAANLQKIVDDPKALKTLTFKLASGCDGSEIPDEVKLIGFAQLSVS

SEQ ID NO: 88 - protein, 841 aa, Homo sapiens [sequence omitted]

SEQ ID NO: 89 - DNA, 21 bp, Homo sapiens
aacatggcctggagctggctt

SEQ ID NO: 90 - RNA, 21 nt, RNAi
cauggccuggagcuggcuuuu

SEQ ID NO: 91 - RNA, 21 nt, RNAi
uuguaccggaccucgaccgaa

SEQ ID NO: 92 - DNA, 21 bp, Homo sapiens
aatacagttgtacagaagcca

SEQ ID NO: 93 - RNA, 21 nt, RNAi
uacaguuguacagaagccauu

SEQ ID NO: 94 - RNA, 21 nt, RNAi
uuaugucaacaugucuucggu

SEQ ID NO: 95 - DNA, 21 bp, Homo sapiens
aagccaagacaaattctgtgt

SEQ ID NO: 96 - RNA, 21 nt, RNAi
gccaagacaaauucuguguuu

SEQ ID NO: 97 - RNA, 21 nt, RNAi
uucgguucuguuuaagacaca

SEQ ID NO: 98 - DNA, 21 bp, Homo sapiens
aattcattgaccggatactta

SEQ ID NO: 99 - RNA, 21 nt, RNAi
uucauugaccggauacuuauu

SEQ ID NO: 100 - RNA, 21 nt, RNAi
uuaaguaacuggccuaugaau

SEQ ID NO: 101 - DNA, 21 bp, Homo sapiens
aaatgttgttgctgtagaact

SEQ ID NO: 102 - RNA, 21 nt, RNAi
auguuguugcuguagaacuuu

SEQ ID NO: 103 - RNA, 21 nt, RNAi
uuuacaacaacgacaucuuga

SEQ ID NO: 104 - DNA, 21 bp, Homo sapiens
aatgttgttgctgtagaactt

SEQ ID NO: 105 - RNA, 21 nt, RNAi
uguuguugcuguagaacuuuu

SEQ ID NO: 106 - RNA, 21 nt, RNAi
uuacaacaacgacaucuugaa

SEQ ID NO: 107 - DNA, 21 bp, Homo sapiens
aaactgactctcagccaacct

SEQ ID NO: 108 - RNA, 21 nt, RNAi
acugacucucagccaaccuuu

SEQ ID NO: 109 - RNA, 21 nt, RNAi
uuugacugagagucgguugga

SEQ ID NO: 110 - DNA, 21 bp, Homo sapiens
aactgactctcagccaacctc

SEQ ID NO: 111 - RNA, 21 nt, RNAi
cugacucucagccaaccucuu

SEQ ID NO: 112 - RNA, 21 nt, RNAi
uugacugagagucgguuggag

SEQ ID NO: 113 - DNA, 21 bp, Homo sapiens
aacctccgtgatgttgcttga

SEQ ID NO: 114 - RNA, 21 nt, RNAi
ccuccgugauguugcuugauu

SEQ ID NO: 115 - RNA, 21 nt, RNAi
uuggaggcacuacaacgaacu

SEQ ID NO: 116 - DNA, 21 bp, Homo sapiens
aaatgtgagtggaagccatga

SEQ ID NO: 117 - RNA, 21 nt, RNAi
augugaguggaagccaugauu

SEQ ID NO: 118 - RNA, 21 nt, RNAi
uuuacacucaccuucgguacu

SEQ ID NO: 119 - DNA, 21 bp, Homo sapiens
aatgtgagtggaagccatgag

SEQ ID NO: 120 - RNA, 21 nt, RNAi
ugugaguggaagccaugaguu

SEQ ID NO: 121 - RNA, 21 nt, RNAi
uuacacucaccuucgguacuc

SEQ ID NO: 122 - DNA, 21 bp, Homo sapiens
aagccatgagcgcaaaggcag

SEQ ID NO: 123 - RNA, 21 nt, RNAi
gccaugagcgcaaaggcaguu

SEQ ID NO: 124 - RNA, 21 nt, RNAi
uucgguacucgcguuuccguc

SEQ ID NO: 125 - DNA, 21 bp, Homo sapiens
aaaggcagttgtattgaattc

SEQ ID NO: 126 - RNA, 21 nt, RNAi
aggcaguuguauugaauucuu

SEQ ID NO: 127 - RNA, 21 nt, RNAi
uuuccgucaacauaacuuaag

SEQ ID NO: 128 - DNA, 21 bp, Homo sapiens
aaggcagttgtattgaattca

SEQ ID NO: 129 - RNA, 21 nt, RNAi
ggcaguuguauugaauucauu

SEQ ID NO: 130 - RNA, 21 nt, RNAi
uuccgucaacauaacuuaagu

SEQ ID NO: 131 - DNA, 21 bp, Homo sapiens
aattggatcataacgagactt

SEQ ID NO: 132 - RNA, 21 nt, RNAi
uuggaucauaacgagacuuuu

SEQ ID NO: 133 - RNA, 21 nt, RNAi
uuaaccuaguauugcucugaa

SEQ ID NO: 134 - DNA, 21 bp, Homo sapiens
aacgagacttctgcggattgc

SEQ ID NO: 135 - RNA, 21 nt, RNAi
cgagacuucugcggauugcuu

SEQ ID NO: 136 - RNA, 21 nt, RNAi
uugcucugaagacgccuaacg

SEQ ID NO: 137 - DNA, 21 bp, Homo sapiens
aaatctgtgaagtcatctgtt

SEQ ID NO: 138 - RNA, 21 nt, RNAi
aucugugaagucaucuguuuu

SEQ ID NO: 139 - RNA, 21 nt, RNAi
uuuagacacuucaguagacaa

SEQ ID NO: 140 - DNA, 21 bp, Homo sapiens
aatctgtgaagtcatctgttc

SEQ ID NO: 141 - RNA, 21 nt, RNAi
ucugugaagucaucuguucuu

SEQ ID NO: 142 - RNA, 21 nt, RNAi
uuagacacuucaguagacaag

SEQ ID NO: 143 - DNA, 21 bp, Homo sapiens
aaagcaagagtcctgctattt

SEQ ID NO: 144 - RNA, 21 nt, RNAi
agcaagaguccugcuauuuuu

SEQ ID NO: 145 - RNA, 21 nt, RNAi
uuucguucucaggacgauaaa

SEQ ID NO: 146 - DNA, 21 bp, Homo sapiens
aagacttggtttacctccata

SEQ ID NO: 147 - RNA, 21 nt, RNAi
gacuugguuuaccuccauauu

SEQ ID NO: 148 - RNA, 21 nt, RNAi
uucugaaccaaauggagguau

SEQ ID NO: 149 - DNA, 21 bp, Homo sapiens
aatggccagtggtcatgagcc

SEQ ID NO: 150 - RNA, 21 nt, RNAi
uggccaguggucaugagccuu

SEQ ID NO: 151 - RNA, 21 nt, RNAi
uuaccggucaccaguacucgg

SEQ ID NO: 152 - DNA, 21 bp, Homo sapiens
aatcagctcctttgcagttga

SEQ ID NO: 153 - RNA, 21 nt, RNAi
ucagcuccuuugcaguugauu

SEQ ID NO: 154 - RNA, 21 nt, RNAi
uuagucgaggaaacgucaacu

SEQ ID NO: 155 - DNA, 21 bp, Homo sapiens
aaggcaagaactcttactttg

SEQ ID NO: 156 - RNA, 21 nt, RNAi
ggcaagaacucuuacuuuguu

SEQ ID NO: 157 - RNA, 21 nt, RNAi
uuccguucuugagaaugaaac

SEQ ID NO: 158 - DNA, 21 bp, Homo sapiens
aagaactcttactttggcaga

SEQ ID NO: 159 - RNA, 21 nt, RNAi
gaacucuuacuuuggcagauu

SEQ ID NO: 160 - RNA, 21 nt, RNAi
uucuugagaaugaaaccgucu

SEQ ID NO: 161 - DNA, 21 bp, Homo sapiens
aactcttactttggcagatag

SEQ ID NO: 162 - RNA, 21 nt, RNAi
cucuuacuuuggcagauaguu

SEQ ID NO: 163 - RNA, 21 nt, RNAi
uugagaaugaaaccgucuauc

SEQ ID NO: 164 - DNA, 21 bp, Homo sapiens
aaacaccttgtagaaatggat

SEQ ID NO: 165 - RNA, 21 nt, RNAi
acaccuuguagaaauggauuu

SEQ ID NO: 166 - RNA, 21 nt, RNAi
uuuguggaacaucuuuaccua

SEQ ID NO: 167 - DNA, 21 bp, Homo sapiens
aacaccttgtagaaatggata

SEQ ID NO: 168 - RNA, 21 nt, RNAi
caccuuguagaaauggauauu

SEQ ID NO: 169 - RNA, 21 nt, RNAi
uuguggaacaucuuuaccuau

SEQ ID NO: 170 - DNA, 21 bp, Homo sapiens
aaatggatactgaccaattga

SEQ ID NO: 171 - RNA, 21 nt, RNAi
auggauacugaccaauugauu

SEQ ID NO: 172 - RNA, 21 nt, RNAi
uuuaccuaugacugguuaacu

SEQ ID NO: 173 - DNA, 21 bp, Homo sapiens
aatggatactgaccaattgaa

SEQ ID NO: 174 - RNA, 21 nt, RNAi
uggauacugaccaauugaauu

SEQ ID NO: 175 - RNA, 21 nt, RNAi
uuaccuaugacugguuaacuu

SEQ ID NO: 176 - DNA, 21 bp, Homo sapiens
aattgaaactctatgaagagc

SEQ ID NO: 177 - RNA, 21 nt, RNAi
uugaaacucuaugaagagcuu

SEQ ID NO: 178 - RNA, 21 nt, RNAi
uuaacuuugagauacuucucg

SEQ ID NO: 179 - DNA, 21 bp, Homo sapiens
aaactctatgaagagccatta

SEQ ID NO: 180 - RNA, 21 nt, RNAi
acucuaugaagagccauuauu

SEQ ID NO: 181 - RNA, 21 nt, RNAi
uuugagauacuucucgguaau

SEQ ID NO: 182 - DNA, 21 bp, Homo sapiens
aactctatgaagagccattat

SEQ ID NO: 183 - RNA, 21 nt, RNAi
cucuaugaagagccauuauuu

SEQ ID NO: 184 - RNA, 21 nt, RNAi
uugagauacuucucgguaaua

SEQ ID NO: 185 - DNA, 21 bp, Homo sapiens
aagagccattatcaaagctga

SEQ ID NO: 186 - RNA, 21 nt, RNAi
gagccauuaucaaagcugauu

SEQ ID NO: 187 - RNA, 21 nt, RNAi
uucucgguaauaguuucgacu

SEQ ID NO: 188 - DNA, 21 bp, Homo sapiens
aaactctgtgtcatgtttgaa

SEQ ID NO: 189 - RNA, 21 nt, RNAi
acucugugucauguuugaauu

SEQ ID NO: 190 - RNA, 21 nt, RNAi
uuugagacacaguacaaacuu

SEQ ID NO: 191 - DNA, 21 bp, Homo sapiens
aactctgtgtcatgtttgaag

SEQ ID NO: 192 - RNA, 21 nt, RNAi
cucugugucauguuugaaguu

SEQ ID NO: 193 - RNA, 21 nt, RNAi
uugagacacaguacaaacuuc

SEQ ID NO: 194 - DNA, 21 bp, Homo sapiens
aagacggtgtgctcatgcggc

SEQ ID NO: 195 - RNA, 21 nt, RNAi
gacggugugcucaugcggcuu

SEQ ID NO: 196 - RNA, 21 nt, RNAi
uucugccacacgaguacgccg

SEQ ID NO: 197 - DNA, 21 bp, Homo sapiens
aaagcagctttgtgccattta

SEQ ID NO: 198 - RNA, 21 nt, RNAi
agcagcuuugugccauuuauu

SEQ ID NO: 199 - RNA, 21 nt, RNAi
uuucgucgaaacacgguaaau

SEQ ID NO: 200 - DNA, 21 bp, Homo sapiens
aagcagctttgtgccatttac

SEQ ID NO: 201 - RNA, 21 nt, RNAi
gcagcuuugugccauuuacuu

SEQ ID NO: 202 - RNA, 21 nt, RNAi
uucgucgaaacacgguaaaug

SEQ ID NO: 203 - DNA, 21 bp, Homo sapiens
aatctgctttacaagtcagga

SEQ ID NO: 204 - RNA, 21 nt, RNAi
ucugcuuuacaagucaggauu

SEQ ID NO: 205 - RNA, 21 nt, RNAi
uuagacgaaauguucaguccu

SEQ ID NO: 206 - DNA, 21 bp, Homo sapiens
aagtcaggaaggtctatgtga

SEQ ID NO: 207 - RNA, 21 nt, RNAi
gucaggaaggucuaugugauu

SEQ ID NO: 208 - RNA, 21 nt, RNAi
uucaguccuuccagauacacu

SEQ ID NO: 209 - DNA, 21 bp, Homo sapiens
aattgaggtagatgcagagta

SEQ ID NO: 210 - RNA, 21 nt, RNAi
uugagguagaugcagaguauu

SEQ ID NO: 211 - RNA, 21 nt, RNAi
uuaacuccaucuacgucucau

SEQ ID NO: 212 - DNA, 21 bp, Homo sapiens
aaagtatggaaatcattgagg

SEQ ID NO: 213 - RNA, 21 nt, RNAi
aguauggaaaucauugagguu

SEQ ID NO: 214 - RNA, 21 nt, RNAi
uuucauaccuuuaguaacucc

SEQ ID NO: 215 - DNA, 21 bp, Homo sapiens
aagtatggaaatcattgagga

SEQ ID NO: 216 - RNA, 21 nt, RNAi
guauggaaaucauugaggauu

SEQ ID NO: 217 - RNA, 21 nt, RNAi
uucauaccuuuaguaacuccu

SEQ ID NO: 218 - DNA, 21 bp, Homo sapiens
aatcattgaggagattcaatg

SEQ ID NO: 219 - RNA, 21 nt, RNAi
ucauugaggagauucaauguu

SEQ ID NO: 220 - RNA, 21 nt, RNAi
uuaguaacuccucuaaguuac

SEQ ID NO: 221 - DNA, 21 bp, Homo sapiens
aatgccaaactcaacaggaaa

SEQ ID NO: 222 - RNA, 21 nt, RNAi
ugccaaacucaacaggaaauu

SEQ ID NO: 223 - RNA, 21 nt, RNAi
uuacgguuugaguuguccuuu

SEQ ID NO: 224 - DNA, 21 bp, Homo sapiens
aaacctcagcagtaatagtga

SEQ ID NO: 225 - RNA, 21 nt, RNAi
accucagcaguaauagugauu

SEQ ID NO: 226 - RNA, 21 nt, RNAi
uuuggagucgucauuaucacu

SEQ ID NO: 227 - DNA, 21 bp, Homo sapiens
aacctcagcagtaatagtgat

SEQ ID NO: 228 - RNA, 21 nt, RNAi
ccucagcaguaauagugauuu

SEQ ID NO: 229 - RNA, 21 nt, RNAi
uuggagucgucauuaucacua

SEQ ID NO: 230 - DNA, 21 bp, Homo sapiens
aaaggcgtcgtctcagctcgt

SEQ ID NO: 231 - RNA, 21 nt, RNAi
aggcgucgucucagcucguuu

SEQ ID NO: 232 - RNA, 21 nt, RNAi
uuuccgcagcagagucgagca

SEQ ID NO: 233 - DNA, 21 bp, Homo sapiens
aaggcgtcgtctcagctcgtc

SEQ ID NO: 234 - RNA, 21 nt, RNAi
ggcgucgucucagcucgucuu

SEQ ID NO: 235 - RNA, 21 nt, RNAi
uuccgcagcagagucgagcag

SEQ ID NO: 236 - DNA, 21 bp, Homo sapiens
aacagactgaggaaattaaac

SEQ ID NO: 237 - RNA, 21 nt, RNAi
cagacugaggaaauuaaacuu

SEQ ID NO: 238 - RNA, 21 nt, RNAi
uugucugacuccuuuaauuug

SEQ ID NO: 239 - DNA, 21 bp, Homo sapiens
aaacatgtggacatgaaccaa

SEQ ID NO: 240 - RNA, 21 nt, RNAi
acauguggacaugaaccaauu

SEQ ID NO: 241 - RNA, 21 nt, RNAi
uuuguacaccuguacuugguu

SEQ ID NO: 242 - DNA, 21 bp, Homo sapiens
aacatgtggacatgaaccaaa

SEQ ID NO: 243 - RNA, 21 nt, RNAi
cauguggacaugaaccaaauu

SEQ ID NO: 244 - RNA, 21 nt, RNAi
uuguacaccuguacuugguuu

SEQ ID NO: 245 - DNA, 21 bp, Homo sapiens
aaagagcatattatggagtgc

SEQ ID NO: 246 - RNA, 21 nt, RNAi
agagcauauuauggagugcuu

SEQ ID NO: 247 - RNA, 21 nt, RNAi
uuucucguauaauaccucacg

SEQ ID NO: 248 - DNA, 21 bp, Homo sapiens
aagagcatattatggagtgca

SEQ ID NO: 249 - RNA, 21 nt, RNAi
gagcauauuauggagugcauu

SEQ ID NO: 250 - RNA, 21 nt, RNAi
uucucguauaauaccucacgu

SEQ ID NO: 251 - DNA, 21 bp, Homo sapiens
aatacagtggcctaaagaatc

SEQ ID NO: 252 - RNA, 21 nt, RNAi
uacaguggccuaaagaaucuu

SEQ ID NO: 253 - RNA, 21 nt, RNAi
uuaugucaccggauuucuuag

SEQ ID NO: 254 - DNA, 21 bp, Homo sapiens
aagaatcctgttattgagatg

SEQ ID NO: 255 - RNA, 21 nt, RNAi
gaauccuguuauugagauguu

SEQ ID NO: 256 - RNA, 21 nt, RNAi
uucuuaggacaauaacucuac

SEQ ID NO: 257 - DNA, 21 bp, Homo sapiens
aaggaattgctgttgtcttac

SEQ ID NO: 258 - RNA, 21 nt, RNAi
ggaauugcuguugucuuacuu

SEQ ID NO: 259 - RNA, 21 nt, RNAi
uuccuuaacgacaacagaaug

SEQ ID NO: 260 - DNA, 21 bp, Homo sapiens
aattgctgttgtcttacaact

SEQ ID NO: 261 - RNA, 21 nt, RNAi
uugcuguugucuuacaacuuu

SEQ ID NO: 262 - RNA, 21 nt, RNAi
uuaacgacaacagaauguuga

SEQ ID NO: 263 - DNA, 21 bp, Homo sapiens
aactgactgctctgtgtactg

SEQ ID NO: 264 - RNA, 21 nt, RNAi
cugacugcucuguguacuguu

SEQ ID NO: 265 - RNA, 21 nt, RNAi
uugacugacgagacacaugac

SEQ ID NO: 266 - DNA, 21 bp, Homo sapiens
aaacatgaactgccgtacttt

SEQ ID NO: 267 - RNA, 21 nt, RNAi
acaugaacugccguacuuuuu

SEQ ID NO: 268 - RNA, 21 nt, RNAi
uuuguacuugacggcaugaaa

SEQ ID NO: 269 - DNA, 21 bp, Homo sapiens
aacatgaactgccgtactttc

SEQ ID NO: 270 - RNA, 21 nt, RNAi
caugaacugccguacuuucuu

SEQ ID NO: 271 - RNA, 21 nt, RNAi
uuguacuugacggcaugaaag

SEQ ID NO: 272 - DNA, 21 bp, Homo sapiens
aactgccgtactttcaaggac

SEQ ID NO: 273 - RNA, 21 nt, RNAi
cugccguacuuucaaggacuu

SEQ ID NO: 274 - RNA, 21 nt, RNAi
uugacggcaugaaaguuccug

SEQ ID NO: 275 - DNA, 21 bp, Homo sapiens
aaggactgtcaacataaatcc

SEQ ID NO: 276 - RNA, 21 nt, RNAi
ggacugucaacauaaauccuu

SEQ ID NO: 277 - RNA, 21 nt, RNAi
uuccugacaguuguauuuagg

SEQ ID NO: 278 - DNA, 21 bp, Homo sapiens
aaatccaagaagaaaccttct

SEQ ID NO: 279 - RNA, 21 nt, RNAi
auccaagaagaaaccuucuuu

SEQ ID NO: 280 - RNA, 21 nt, RNAi
uuuagguucuucuuuggaaga

SEQ ID NO: 281 - DNA, 21 bp, Homo sapiens
aatccaagaagaaaccttctg

SEQ ID NO: 282 - RNA, 21 nt, RNAi
uccaagaagaaaccuucuguu

SEQ ID NO: 283 - RNA, 21 nt, RNAi
uuagguucuucuuuggaagac

SEQ ID NO: 284 - DNA, 21 bp, Homo sapiens
aagaagaaaccttctgtagtg

SEQ ID NO: 285 - RNA, 21 nt, RNAi
gaagaaaccuucuguaguguu

SEQ ID NO: 286 - RNA, 21 nt, RNAi
uucuucuuuggaagacaucac

SEQ ID NO: 287 - DNA, 21 bp, Homo sapiens
aagaaaccttctgtagtgata

SEQ ID NO: 288 - RNA, 21 nt, RNAi
gaaaccuucuguagugauauu

SEQ ID NO: 289 - RNA, 21 nt, RNAi
uucuuuggaagacaucacuau

SEQ ID NO: 290 - DNA, 21 bp, Homo sapiens
aaaccttctgtagtgataact

SEQ ID NO: 291 - RNA, 21 nt, RNAi
accuucuguagugauaacuuu

SEQ ID NO: 292 - RNA, 21 nt, RNAi
uuuggaagacaucacuauuga

SEQ ID NO: 293 - DNA, 21 bp, Homo sapiens
aaccttctgtagtgataactt

SEQ ID NO: 294 - RNA, 21 nt, RNAi
ccuucuguagugauaacuuuu

SEQ ID NO: 295 - RNA, 21 nt, RNAi
uuggaagacaucacuauugaa

SEQ ID NO: 296 - DNA, 21 bp, Homo sapiens
aacttggatgtcattggattt

SEQ ID NO: 297 - RNA, 21 nt, RNAi
cuuggaugucauuggauuuuu

SEQ ID NO: 298 - RNA, 21 nt, RNAi
uugaaccuacaguaaccuaaa

SEQ ID NO: 299 - DNA, 21 bp, Homo sapiens
aaagtgcttaagagctgtaga

SEQ ID NO: 300 - RNA, 21 nt, RNAi
agugcuuaagagcuguagauu

SEQ ID NO: 301 - RNA, 21 nt, RNAi
uuucacgaauucucgacaucu

SEQ ID NO: 302 - DNA, 21 bp, Homo sapiens
aagtgcttaagagctgtagaa

SEQ ID NO: 303 - RNA, 21 nt, RNAi
gugcuuaagagcuguagaauu

SEQ ID NO: 304 - RNA, 21 nt, RNAi
uucacgaauucucgacaucuu

SEQ ID NO: 305 - DNA, 21 bp, Homo sapiens
aagagctgtagaagtttgtta

SEQ ID NO: 306 - RNA, 21 nt, RNAi
gagcuguagaaguuuguuauu

SEQ ID NO: 307 - RNA, 21 nt, RNAi
uucucgacaucuucaaacaau

SEQ ID NO: 308 - DNA, 21 bp, Homo sapiens
aatctgttcagaaactggacc

SEQ ID NO: 309 - RNA, 21 nt, RNAi
ucuguucagaaacuggaccuu

SEQ ID NO: 310 - RNA, 21 nt, RNAi
uuagacaagucuuugaccugg

SEQ ID NO: 311 - DNA, 21 bp, Homo sapiens
aaactggacctggaggcaacc

SEQ ID NO: 312 - RNA, 21 nt, RNAi
acuggaccuggaggcaaccuu

SEQ ID NO: 313 - RNA, 21 nt, RNAi
uuugaccuggaccuccguugg

SEQ ID NO: 314 - DNA, 21 bp, Homo sapiens
aactggacctggaggcaacca

SEQ ID NO: 315 - RNA, 21 nt, RNAi
cuggaccuggaggcaaccauu

SEQ ID NO: 316 - RNA, 21 nt, RNAi
uugaccuggaccuccguuggu

SEQ ID NO: 317 - DNA, 21 bp, Homo sapiens
aaccattgataaggtggtgaa

SEQ ID NO: 318 - RNA, 21 nt, RNAi
ccauugauaagguggugaauu

SEQ ID NO: 319 - RNA, 21 nt, RNAi
uugguaacuauuccaccacuu

SEQ ID NO: 320 - DNA, 21 bp, Homo sapiens
aagatcatatcctggaagatt

SEQ ID NO: 321 - RNA, 21 nt, RNAi
gaucauauccuggaagauuuu

SEQ ID NO: 322 - RNA, 21 nt, RNAi
uucuaguauaggaccuucuaa

SEQ ID NO: 323 - DNA, 21 bp, Homo sapiens
aagatttatgtggtatgctct

SEQ ID NO: 324 - RNA, 21 nt, RNAi
gauuuaugugguaugcucuuu

SEQ ID NO: 325 - RNA, 21 nt, RNAi
uucuaaauacaccauacgaga

SEQ ID NO: 326 - DNA, 21 bp, Homo sapiens
aaagttgaccacatttgccgc

SEQ ID NO: 327 - RNA, 21 nt, RNAi
aguugaccacauuugccgcuu

SEQ ID NO: 328 - RNA, 21 nt, RNAi
uuucaacugguguaaacggcg

SEQ ID NO: 329 - DNA, 21 bp, Homo sapiens
aagttgaccacatttgccgct

SEQ ID NO: 330 - RNA, 21 nt, RNAi
guugaccacauuugccgcuuu

SEQ ID NO: 331 - RNA, 21 nt, RNAi
uucaacugguguaaacggcga

SEQ ID NO: 332 - DNA, 21 bp, Homo sapiens
aacattaagctgtaggatttc

SEQ ID NO: 333 - RNA, 21 nt, RNAi
cauuaagcuguaggauuucuu

SEQ ID NO: 334 - RNA, 21 nt, RNAi
uuguaauucgacauccuaaag

SEQ ID NO: 335 - DNA, 21 bp, Homo sapiens
aagctgtaggatttcagatag

SEQ ID NO: 336 - RNA, 21 nt, RNAi
gcuguaggauuucagauaguu

SEQ ID NO: 337 - RNA, 21 nt, RNAi
uucgacauccuaaagucuauc

SEQ ID NO: 338 - DNA, 21 bp, Homo sapiens
aatcacgatgtgtgtttcttc

SEQ ID NO: 339 - RNA, 21 nt, RNAi
ucacgauguguguuucuucuu

SEQ ID NO: 340 - RNA, 21 nt, RNAi
uuagugcuacacacaaagaag

SEQ ID NO: 341 - DNA, 21 bp, Homo sapiens
aagaagaatattccttgagtg

SEQ ID NO: 342 - RNA, 21 nt, RNAi
gaagaauauuccuugaguguu

SEQ ID NO: 343 - RNA, 21 nt, RNAi
uucuucuuauaaggaacucac

SEQ ID NO: 344 - DNA, 21 bp, Homo sapiens
aagaatattccttgagtggag

SEQ ID NO: 345 - RNA, 21 nt, RNAi
gaauauuccuugaguggaguu

SEQ ID NO: 346 - RNA, 21 nt, RNAi
uucuuauaaggaacucaccuc

SEQ ID NO: 347 - DNA, 21 bp, Homo sapiens
aatattccttgagtggagaac

SEQ ID NO: 348 - RNA, 21 nt, RNAi
uauuccuugaguggagaacuu

SEQ ID NO: 349 - RNA, 21 nt, RNAi
uuauaaggaacucaccucuug

SEQ ID NO: 350 - DNA, 21 bp, Homo sapiens
aaagtcaaagatgattctgac

SEQ ID NO: 351 - RNA, 21 nt, RNAi
agucaaagaugauucugacuu

SEQ ID NO: 352 - RNA, 21 nt, RNAi
uuucaguuucuacuaagacug

SEQ ID NO: 353 - DNA, 21 bp, Homo sapiens
aagtcaaagatgattctgaca

SEQ ID NO: 354 - RNA, 21 nt, RNAi
gucaaagaugauucugacauu

SEQ ID NO: 355 - RNA, 21 nt, RNAi
uucaguuucuacuaagacugu

SEQ ID NO: 356 - DNA, 21 bp, Homo sapiens
aaagatgattctgacattgtc

SEQ ID NO: 357 - RNA, 21 nt, RNAi
agaugauucugacauugucuu

SEQ ID NO: 358 - RNA, 21 nt, RNAi
uuucuacuaagacuguaacag

SEQ ID NO: 359 - DNA, 21 bp, Homo sapiens
aagatgattctgacattgtca

SEQ ID NO: 360 - RNA, 21 nt, RNAi
gaugauucugacauugucauu

SEQ ID NO: 361 - RNA, 21 nt, RNAi
uucuacuaagacuguaacagu

SEQ ID NO: 362 - DNA, 21 bp, Homo sapiens
aatttgcttctatacttggtc

SEQ ID NO: 363 - RNA, 21 nt, RNAi
uuugcuucuauacuuggucuu

SEQ ID NO: 364 - RNA, 21 nt, RNAi
uuaaacgaagauaugaaccag

SEQ ID NO: 365 - DNA, 21 bp, Homo sapiens
aacttgtctgtactcttcacg

SEQ ID NO: 366 - RNA, 21 nt, RNAi
cuugucuguacucuucacguu

SEQ ID NO: 367 - RNA, 21 nt, RNAi
uugaacagacaugagaagugc

SEQ ID NO: 368 - DNA, 21 bp, Homo sapiens
aacagaacctttctctgaaca

SEQ ID NO: 369 - RNA, 21 nt, RNAi
cagaaccuuucucugaacauu

SEQ ID NO: 370 - RNA, 21 nt, RNAi
uugucuuggaaagagacuugu

SEQ ID NO: 371 - DNA, 21 bp, Homo sapiens
aacctttctctgaacacggac

SEQ ID NO: 372 - RNA, 21 nt, RNAi
ccuuucucugaacacggacuu

SEQ ID NO: 373 - RNA, 21 nt, RNAi
uuggaaagagacuugugccug

SEQ ID NO: 374 - DNA, 21 bp, Homo sapiens
aacacggacatgtggacctct

SEQ ID NO: 375 - RNA, 21 nt, RNAi
cacggacauguggaccucuuu

SEQ ID NO: 376 - RNA, 21 nt, RNAi
uugugccuguacaccuggaga

SEQ ID NO: 377 - DNA, 21 bp, Homo sapiens
aacttgaaagccacttctcaa

SEQ ID NO: 378 - RNA, 21 nt, RNAi
cuugaaagccacuucucaauu

SEQ ID NO: 379 - RNA, 21 nt, RNAi
uugaacuuucggugaagaguu

SEQ ID NO: 380 - DNA, 21 bp, Homo sapiens
aaagccacttctcaacatgaa

SEQ ID NO: 381 - RNA, 21 nt, RNAi
agccacuucucaacaugaauu

SEQ ID NO: 382 - RNA, 21 nt, RNAi
uuucggugaagaguuguacuu

SEQ ID NO: 383 - DNA, 21 bp, Homo sapiens
aagccacttctcaacatgaat

SEQ ID NO: 384 - RNA, 21 nt, RNAi
gccacuucucaacaugaauuu

SEQ ID NO: 385 - RNA, 21 nt, RNAi
uucggugaagaguuguacuua

SEQ ID NO: 386 - DNA, 21 bp, Homo sapiens
aacatgaatgttcatcttctc

SEQ ID NO: 387 - RNA, 21 nt, RNAi
caugaauguucaucuucucuu

SEQ ID NO: 388 - RNA, 21 nt, RNAi
uuguacuuacaaguagaagag

SEQ ID NO: 389 - DNA, 21 bp, Homo sapiens
aaagcttctgtctgcaagcca

SEQ ID NO: 390 - RNA, 21 nt, RNAi
agcuucugucugcaagccauu

SEQ ID NO: 391 - RNA, 21 nt, RNAi
uuucgaagacagacguucggu

SEQ ID NO: 392 - DNA, 21 bp, Homo sapiens
aagcttctgtctgcaagccat

SEQ ID NO: 393 - RNA, 21 nt, RNAi
gcuucugucugcaagccauuu

SEQ ID NO: 394 - RNA, 21 nt, RNAi
uucgaagacagacguucggua

SEQ ID NO: 395 - DNA, 21 bp, Homo sapiens
aaagcagttcttggaacttta

SEQ ID NO: 396 - RNA, 21 nt, RNAi
agcaguucuuggaacuuuauu

SEQ ID NO: 397 - RNA, 21 nt, RNAi
uuucgucaagaaccuugaaau

SEQ ID NO: 398 - DNA, 21 bp, Homo sapiens
aagcagttcttggaactttat

SEQ ID NO: 399 - RNA, 21 nt, RNAi
gcaguucuuggaacuuuauuu

SEQ ID NO: 400 - RNA, 21 nt, RNAi
uucgucaagaaccuugaaaua

SEQ ID NO: 401 - DNA, 21 bp, Homo sapiens
aatttaatggaagatccagac

SEQ ID NO: 402 - RNA, 21 nt, RNAi
uuuaauggaagauccagacuu

SEQ ID NO: 403 - RNA, 21 nt, RNAi
uuaaauuaccuucuaggucug

SEQ ID NO: 404 - DNA, 21 bp, Homo sapiens
aatggaagatccagacaaaga

SEQ ID NO: 405 - RNA, 21 nt, RNAi
uggaagauccagacaaagauu

SEQ ID NO: 406 - RNA, 21 nt, RNAi
uuaccuucuaggucuguuucu

SEQ ID NO: 407 - DNA, 21 bp, Homo sapiens
aagatccagacaaagatgtta

SEQ ID NO: 408 - RNA, 21 nt, RNAi
gauccagacaaagauguuauu

SEQ ID NO: 409 - RNA, 21 nt, RNAi
uucuaggucuguuucuacaau

SEQ ID NO: 410 - DNA, 21 bp, Homo sapiens
aagcacatattggaatccttg

SEQ ID NO: 411 - RNA, 21 nt, RNAi
gcacauauuggaauccuuguu

SEQ ID NO: 412 - RNA, 21 nt, RNAi
uucguguauaaccuuaggaac

SEQ ID NO: 413 - DNA, 21 bp, Homo sapiens
aatccttggactctgaagatg

SEQ ID NO: 414 - RNA, 21 nt, RNAi
uccuuggacucugaagauguu

SEQ ID NO: 415 - RNA, 21 nt, RNAi
uuaggaaccugagacuucuac

SEQ ID NO: 416 - DNA, 21 bp, Homo sapiens
aagatggatttataaaggagc

SEQ ID NO: 417 - RNA, 21 nt, RNAi
gauggauuuauaaaggagcuu

SEQ ID NO: 418 - RNA, 21 nt, RNAi
uucuaccuaaauauuuccucg

SEQ ID NO: 419 - DNA, 21 bp, Homo sapiens
aagaatgaaggaagcatatac

SEQ ID NO: 420 - RNA, 21 nt, RNAi
gaaugaaggaagcauauacuu

SEQ ID NO: 421 - RNA, 21 nt, RNAi
uucuuacuuccuucguauaug

SEQ ID NO: 422 - DNA, 21 bp, Homo sapiens
aatgaaggaagcatatacaca

SEQ ID NO: 423 - RNA, 21 nt, RNAi
ugaaggaagcauauacacauu

SEQ ID NO: 424 - RNA, 21 nt, RNAi
uuacuuccuucguauaugugu

SEQ ID NO: 425 - DNA, 21 bp, Homo sapiens
aaggaagcatatacacatgcc

SEQ ID NO: 426 - RNA, 21 nt, RNAi
ggaagcauauacacaugccuu

SEQ ID NO: 427 - RNA, 21 nt, RNAi
uuccuucguauauguguacgg

SEQ ID NO: 428 - DNA, 21 bp, Homo sapiens
aagaaataatgagctgaagga

SEQ ID NO: 429 - RNA, 21 nt, RNAi
gaaauaaugagcugaaggauu

SEQ ID NO: 430 - RNA, 21 nt, RNAi
uucuuuauuacucgacuuccu

SEQ ID NO: 431 - DNA, 21 bp, Homo sapiens
aaataatgagctgaaggatac

SEQ ID NO: 432 - RNA, 21 nt, RNAi
auaaugagcugaaggauacuu

SEQ ID NO: 433 - RNA, 21 nt, RNAi
uuuauuacucgacuuccuaug

SEQ ID NO: 434 - DNA, 21 bp, Homo sapiens
aataatgagctgaaggatacc

SEQ ID NO: 435 - RNA, 21 nt, RNAi
uaaugagcugaaggauaccuu

SEQ ID NO: 436 - RNA, 21 nt, RNAi
uuauuacucgacuuccuaugg

SEQ ID NO: 437 - DNA, 21 bp, Homo sapiens
aatgagctgaaggataccttg

SEQ ID NO: 438 - RNA, 21 nt, RNAi
ugagcugaaggauaccuuguu

SEQ ID NO: 439 - RNA, 21 nt, RNAi
uuacucgacuuccuauggaac

SEQ ID NO: 440 - DNA, 21 bp, Homo sapiens
aaggataccttgattcttaca

SEQ ID NO: 441 - RNA, 21 nt, RNAi
ggauaccuugauucuuacauu

SEQ ID NO: 442 - RNA, 21 nt, RNAi
uuccuauggaacuaagaaugu

SEQ ID NO: 443 - DNA, 21 bp, Homo sapiens
aaaggagatttggtaccattt

SEQ ID NO: 444 - RNA, 21 nt, RNAi
aggagauuugguaccauuuuu

SEQ ID NO: 445 - RNA, 21 nt, RNAi
uuuccucuaaaccaugguaaa

SEQ ID NO: 446 - DNA, 21 bp, Homo sapiens
aaggagatttggtaccatttg

SEQ ID NO: 447 - RNA, 21 nt, RNAi
ggagauuugguaccauuuguu

SEQ ID NO: 448 - RNA, 21 nt, RNAi
uuccucuaaaccaugguaaac

SEQ ID NO: 449 - DNA, 21 bp, Homo sapiens
aagtcagcatctgtctctgga

SEQ ID NO: 450 - RNA, 21 nt, RNAi
gucagcaucugucucuggauu

SEQ ID NO: 451 - RNA, 21 nt, RNAi
uucagucguagacagagaccu

SEQ ID NO: 452 - DNA, 21 bp, Homo sapiens
aaattagagctctggttgcag

SEQ ID NO: 453 - RNA, 21 nt, RNAi
auuagagcucugguugcaguu

SEQ ID NO: 454 - RNA, 21 nt, RNAi
uuuaaucucgagaccaacguc

SEQ ID NO: 455 - DNA, 21 bp, Homo sapiens
aattagagctctggttgcagc

SEQ ID NO: 456 - RNA, 21 nt, RNAi
uuagagcucugguugcagcuu

SEQ ID NO: 457 - RNA, 21 nt, RNAi
uuaaucucgagaccaacgucg

SEQ ID NO: 458 - DNA, 21 bp, Homo sapiens
aatactccatgccagaatgct

SEQ ID NO: 459 - RNA, 21 nt, RNAi
uacuccaugccagaaugcuuu

SEQ ID NO: 460 - RNA, 21 nt, RNAi
uuaugagguacggucuuacga

SEQ ID NO: 461 - DNA, 21 bp, Homo sapiens
aaacaagatgtggctcaccag

SEQ ID NO: 462 - RNA, 21 nt, RNAi
acaagauguggcucaccaguu

SEQ ID NO: 463 - RNA, 21 nt, RNAi
uuuguucuacaccgagugguc

SEQ ID NO: 464 - DNA, 21 bp, Homo sapiens
aacaagatgtggctcaccaga

SEQ ID NO: 465 - RNA, 21 nt, RNAi
caagauguggcucaccagauu

SEQ ID NO: 466 - RNA, 21 nt, RNAi
uuguucuacaccgaguggucu

SEQ ID NO: 467 - DNA, 21 bp, Homo sapiens
aagatgtggctcaccagagag

SEQ ID NO: 468 - RNA, 21 nt, RNAi
gauguggcucaccagagaguu

SEQ ID NO: 469 - RNA, 21 nt, RNAi
uucuacaccgaguggucucuc

SEQ ID NO: 470 - DNA, 21 bp, Homo sapiens
aatggctttaaatacgttgtc

SEQ ID NO: 471 - RNA, 21 nt, RNAi
uggcuuuaaauacguugucuu

SEQ ID NO: 472 - RNA, 21 nt, RNAi
uuaccgaaauuuaugcaacag

SEQ ID NO: 473 - DNA, 21 bp, Homo sapiens
aaatacgttgtctgaaattgc

SEQ ID NO: 474 - RNA, 21 nt, RNAi
auacguugucugaaauugcuu

SEQ ID NO: 475 - RNA, 21 nt, RNAi
uuuaugcaacagacuuuaacg

SEQ ID NO: 476 - DNA, 21 bp, Homo sapiens
aatacgttgtctgaaattgcc

SEQ ID NO: 477 - RNA, 21 nt, RNAi
uacguugucugaaauugccuu

SEQ ID NO: 478 - RNA, 21 nt, RNAi
uuaugcaacagacuuuaacgg

SEQ ID NO: 479 - DNA, 21 bp, Homo sapiens
aagttctactacctgatcttg

SEQ ID NO: 480 - RNA, 21 nt, RNAi
guucuacuaccugaucuuguu

SEQ ID NO: 481 - RNA, 21 nt, RNAi
uucaagaugauggacuagaac

SEQ ID NO: 482 - DNA, 21 bp, Homo sapiens
aaatgtcaatcgtagagagat

SEQ ID NO: 483 - RNA, 21 nt, RNAi
augucaaucguagagagauuu

SEQ ID NO: 484 - RNA, 21 nt, RNAi
uuuacaguuagcaucucucua

SEQ ID NO: 485 - DNA, 21 bp, Homo sapiens
aatgtcaatcgtagagagatt

SEQ ID NO: 486 - RNA, 21 nt, RNAi
ugucaaucguagagagauuuu

SEQ ID NO: 487 - RNA, 21 nt, RNAi
uuacaguuagcaucucucuaa

SEQ ID NO: 488 - DNA, 21 bp, Homo sapiens
aaagatgaattagaacgtgcc

SEQ ID NO: 489 - RNA, 21 nt, RNAi
agaugaauuagaacgugccuu

SEQ ID NO: 490 - RNA, 21 nt, RNAi
uuucuacuuaaucuugcacgg

SEQ ID NO: 491 - DNA, 21 bp, Homo sapiens
aagatttccaaggattgcata

SEQ ID NO: 492 - RNA, 21 nt, RNAi
gauuuccaaggauugcauauu

SEQ ID NO: 493 - RNA, 21 nt, RNAi
uucuaaagguuccuaacguau

SEQ ID NO: 494 - DNA, 21 bp, Homo sapiens
aattattgctgcgtattggag

SEQ ID NO: 495 - RNA, 21 nt, RNAi
uuauugcugcguauuggaguu

SEQ ID NO: 496 - RNA, 21 nt, RNAi
uuaauaacgacgcauaaccuc

SEQ ID NO: 497 - DNA, 21 bp, Homo sapiens
aatggtttgtcaatacttgcc

SEQ ID NO: 498 - RNA, 21 nt, RNAi
ugguuugucaauacuugccuu

SEQ ID NO: 499 - RNA, 21 nt, RNAi
uuaccaaacaguuaugaacgg

SEQ ID NO: 500 - DNA, 21 bp, Homo sapiens
aatacttgcctcatttgcatc

SEQ ID NO: 501 - RNA, 21 nt, RNAi
uacuugccucauuugcaucuu

SEQ ID NO: 502 - RNA, 21 nt, RNAi
uuaugaacggaguaaacguag

SEQ ID NO: 503 - DNA, 21 bp, Homo sapiens
aactgatggctgattatttac

SEQ ID NO: 504 - RNA, 21 nt, RNAi
cugauggcugauuauuuacuu

SEQ ID NO: 505 - RNA, 21 nt, RNAi
uugacuaccgacuaauaaaug

SEQ ID NO: 506 - DNA, 21 bp, Homo sapiens
aacatgcagttactgagctct

SEQ ID NO: 507 - RNA, 21 nt, RNAi
caugcaguuacugagcucuuu

SEQ ID NO: 508 - RNA, 21 nt, RNAi
uuguacgucaaugacucgaga

SEQ ID NO: 509 - DNA, 21 bp, Homo sapiens
aaatggccttgaacagtttga

SEQ ID NO: 510 - RNA, 21 nt, RNAi
auggccuugaacaguuugauu

SEQ ID NO: 511 - RNA, 21 nt, RNAi
uuuaccggaacuugucaaacu

SEQ ID NO: 512 - DNA, 21 bp, Homo sapiens
aatggccttgaacagtttgat

SEQ ID NO: 513 - RNA, 21 nt, RNAi
uggccuugaacaguuugauuu

SEQ ID NO: 514 - RNA, 21 nt, RNAi
uuaccggaacuugucaaacua

SEQ ID NO: 515 - DNA, 21 bp, Homo sapiens
aacagtttgatgtctttgatg

SEQ ID NO: 516 - RNA, 21 nt, RNAi
caguuugaugucuuugauguu

SEQ ID NO: 517 - RNA, 21 nt, RNAi
uugucaaacuacagaaacuac

SEQ ID NO: 518 - DNA, 21 bp, Homo sapiens
aaacatgtcagttctgtgagg

SEQ ID NO: 519 - RNA, 21 nt, RNAi
acaugucaguucugugagguu

SEQ ID NO: 520 - RNA, 21 nt, RNAi
uuuguacagucaagacacucc

SEQ ID NO: 521 - DNA, 21 bp, Homo sapiens
aagatgatgaccacactgaga

SEQ ID NO: 522 - RNA, 21 nt, RNAi
gaugaugaccacacugagauu

SEQ ID NO: 523 - RNA, 21 nt, RNAi
uucuacuacuggugugacucu

SEQ ID NO: 524 - DNA, 21 bp, Homo sapiens
aactggccttcgattcaagga

SEQ ID NO: 525 - RNA, 21 nt, RNAi
cuggccuucgauucaaggauu

SEQ ID NO: 526 - RNA, 21 nt, RNAi
uugaccggaagcuaaguuccu

SEQ ID NO: 527 - DNA, 21 bp, Homo sapiens
aatagtagctttgttacctct

SEQ ID NO: 528 - RNA, 21 nt, RNAi
uaguagcuuuguuaccucuuu

SEQ ID NO: 529 - RNA, 21 nt, RNAi
uuaucaucgaaacaauggaga

SEQ ID NO: 530 - DNA, 21 bp, Homo sapiens
aaagaaactgcagctatcttc

SEQ ID NO: 531 - RNA, 21 nt, RNAi
agaaacugcagcuaucuucuu

SEQ ID NO: 532 - RNA, 21 nt, RNAi
uuucuuugacgucgauagaag

SEQ ID NO: 533 - DNA, 21 bp, Homo sapiens
aagaaactgcagctatcttcc

SEQ ID NO: 534 - RNA, 21 nt, RNAi
gaaacugcagcuaucuuccuu

SEQ ID NO: 535 - RNA, 21 nt, RNAi
uucuuugacgucgauagaagg

SEQ ID NO: 536 - DNA, 21 bp, Homo sapiens
aaactgcagctatcttccact

SEQ ID NO: 537 - RNA, 21 nt, RNAi
acugcagcuaucuuccacuuu

SEQ ID NO: 538 - RNA, 21 nt, RNAi
uuugacgucgauagaagguga

SEQ ID NO: 539 - DNA, 21 bp, Homo sapiens
aactgcagctatcttccacta

SEQ ID NO: 540 - RNA, 21 nt, RNAi
cugcagcuaucuuccacuauu

SEQ ID NO: 541 - RNA, 21 nt, RNAi
uugacgucgauagaaggugau

SEQ ID NO: 542 - DNA, 21 bp, Homo sapiens
aaagccgttctccaggaatac

SEQ ID NO: 543 - RNA, 21 nt, RNAi
agccguucuccaggaauacuu

SEQ ID NO: 544 - RNA, 21 nt, RNAi
uuucggcaagagguccuuaug

SEQ ID NO: 545 - DNA, 21 bp, Homo sapiens
aagccgttctccaggaataca

SEQ ID NO: 546 - RNA, 21 nt, RNAi
gccguucuccaggaauacauu

SEQ ID NO: 547 - RNA, 21 nt, RNAi
uucggcaagagguccuuaugu

SEQ ID NO: 548 - DNA, 21 bp, Homo sapiens
aatacagaaaggagacctctg

SEQ ID NO: 549 - RNA, 21 nt, RNAi
uacagaaaggagaccucuguu

SEQ ID NO: 550 - RNA, 21 nt, RNAi
uuaugucuuuccucuggagac

SEQ ID NO: 551 - DNA, 21 bp, Homo sapiens
aaaggagacctctgagagcac

SEQ ID NO: 552 - RNA, 21 nt, RNAi
aggagaccucugagagcacuu

SEQ ID NO: 553 - RNA, 21 nt, RNAi
uuuccucuggagacucucgug

SEQ ID NO: 554 - DNA, 21 bp, Homo sapiens
aaggagacctctgagagcact

SEQ ID NO: 555 - RNA, 21 nt, RNAi
ggagaccucugagagcacuuu

SEQ ID NO: 556 - RNA, 21 nt, RNAi
uuccucuggagacucucguga

SEQ ID NO: 557 - DNA, 21 bp, Homo sapiens
aactcttcagctctctatgaa

SEQ ID NO: 558 - RNA, 21 nt, RNAi
cucuucagcucucuaugaauu

SEQ ID NO: 559 - RNA, 21 nt, RNAi
uugagaagucgagagauacuu

SEQ ID NO: 560 - DNA, 21 bp, Homo sapiens
aaatgtcgatgttcgtattca

SEQ ID NO: 561 - RNA, 21 nt, RNAi
augucgauguucguauucauu

SEQ ID NO: 562 - RNA, 21 nt, RNAi
uuuacagcuacaagcauaagu

SEQ ID NO: 563 - DNA, 21 bp, Homo sapiens
aatgtcgatgttcgtattcat

SEQ ID NO: 564 - RNA, 21 nt, RNAi
ugucgauguucguauucauuu

SEQ ID NO: 565 - RNA, 21 nt, RNAi
uuacagcuacaagcauaagua

SEQ ID NO: 566 - DNA, 21 bp, Homo sapiens
aagcttgaaggaaaccttgta

SEQ ID NO: 567 - RNA, 21 nt, RNAi
gcuugaaggaaaccuuguauu

SEQ ID NO: 568 - RNA, 21 nt, RNAi
uucgaacuuccuuuggaacau

SEQ ID NO: 569 - DNA, 21 bp, Homo sapiens
aactgataaagtatgcaacag

SEQ ID NO: 570 - RNA, 21 nt, RNAi
cugauaaaguaugcaacaguu

SEQ ID NO: 571 - RNA, 21 nt, RNAi
uugacuauuucauacguuguc

SEQ ID NO: 572 - DNA, 21 bp, Homo sapiens
aaagtatgcaacagacagtga

SEQ ID NO: 573 - RNA, 21 nt, RNAi
aguaugcaacagacagugauu

SEQ ID NO: 574 - RNA, 21 nt, RNAi
uuucauacguugucugucacu

SEQ ID NO: 575 - DNA, 21 bp, Homo sapiens
aagtatgcaacagacagtgaa

SEQ ID NO: 576 - RNA, 21 nt, RNAi
guaugcaacagacagugaauu

SEQ ID NO: 577 - RNA, 21 nt, RNAi
uucauacguugucugucacuu

SEQ ID NO: 578 - DNA, 21 bp, Homo sapiens
aacagacagtgaaacagtaga

SEQ ID NO: 579 - RNA, 21 nt, RNAi
cagacagugaaacaguagauu

SEQ ID NO: 580 - RNA, 21 nt, RNAi
uugucugucacuuugucaucu

SEQ ID NO: 581 - DNA, 21 bp, Homo sapiens
aacagtagaacctattatctc

SEQ ID NO: 582 - RNA, 21 nt, RNAi
caguagaaccuauuaucucuu

SEQ ID NO: 583 - RNA, 21 nt, RNAi
uugucaucuuggauaauagag

SEQ ID NO: 584 - DNA, 21 bp, Homo sapiens
aacctattatctcacagttgg

SEQ ID NO: 585 - RNA, 21 nt, RNAi
ccuauuaucucacaguugguu

SEQ ID NO: 586 - RNA, 21 nt, RNAi
uuggauaauagagugucaacc

SEQ ID NO: 587 - DNA, 21 bp, Homo sapiens
aaaggttgccaagatgcaaac

SEQ ID NO: 588 - RNA, 21 nt, RNAi
agguugccaagaugcaaacuu

SEQ ID NO: 589 - RNA, 21 nt, RNAi
uuuccaacgguucuacguuug

SEQ ID NO: 590 - DNA, 21 bp, Homo sapiens
aaggttgccaagatgcaaact

SEQ ID NO: 591 - RNA, 21 nt, RNAi
gguugccaagaugcaaacuuu

SEQ ID NO: 592 - RNA, 21 nt, RNAi
uuccaacgguucuacguuuga

SEQ ID NO: 593 - DNA, 21 bp, Homo sapiens
aagatgcaaactctcaagctc

SEQ ID NO: 594 - RNA, 21 nt, RNAi
gaugcaaacucucaagcucuu

SEQ ID NO: 595 - RNA, 21 nt, RNAi
uucuacguuugagaguucgag

SEQ ID NO: 596 - DNA, 21 bp, Homo sapiens
aaactctcaagctcggttgct

SEQ ID NO: 597 - RNA, 21 nt, RNAi
acucucaagcucgguugcuuu

SEQ ID NO: 598 - RNA, 21 nt, RNAi
uuugagaguucgagccaacga

SEQ ID NO: 599 - DNA, 21 bp, Homo sapiens
aactctcaagctcggttgctc

SEQ ID NO: 600 - RNA, 21 nt, RNAi
cucucaagcucgguugcucuu

SEQ ID NO: 601 - RNA, 21 nt, RNAi
uugagaguucgagccaacgag

SEQ ID NO: 602 - DNA, 21 bp, Homo sapiens
aacaactgaaactcaaggaaa

SEQ ID NO: 603 - RNA, 21 nt, RNAi
caacugaaacucaaggaaauu

SEQ ID NO: 604 - RNA, 21 nt, RNAi
uuguugacuuugaguuccuuu

SEQ ID NO: 605 - DNA, 21 bp, Homo sapiens
aagattcaagctttgcctatg

SEQ ID NO: 606 - RNA, 21 nt, RNAi
gauucaagcuuugccuauguu

SEQ ID NO: 607 - RNA, 21 nt, RNAi
uucuaaguucgaaacggauac

SEQ ID NO: 608 - DNA, 21 bp, Homo sapiens
aagctttgcctatggattatt

SEQ ID NO: 609 - RNA, 21 nt, RNAi
gcuuugccuauggauuauuuu

SEQ ID NO: 610 - RNA, 21 nt, RNAi
uucgaaacggauaccuaauaa

SEQ ID NO: 611 - DNA, 21 bp, Homo sapiens
aacaagagcttaccttgcgta

SEQ ID NO: 612 - RNA, 21 nt, RNAi
caagagcuuaccuugcguauu

SEQ ID NO: 613 - RNA, 21 nt, RNAi
uuguucucgaauggaacgcau

SEQ ID NO: 614 - DNA, 21 bp, Homo sapiens
aagagcttaccttgcgtatgc

SEQ ID NO: 615 - RNA, 21 nt, RNAi
gagcuuaccuugcguaugcuu

SEQ ID NO: 616 - RNA, 21 nt, RNAi
uucucgaauggaacgcauacg

SEQ ID NO: 617 - DNA, 21 bp, Homo sapiens
aatagccgagctcaagattca

SEQ ID NO: 618 - RNA, 21 nt, RNAi
uagccgagcucaagauucauu

SEQ ID NO: 619 - RNA, 21 nt, RNAi
uuaucggcucgaguucuaagu

SEQ ID NO: 620 - DNA, 21 bp, Homo sapiens
aagattcagctgcctatgcca

SEQ ID NO: 621 - RNA, 21 nt, RNAi
gauucagcugccuaugccauu

SEQ ID NO: 622 - RNA, 21 nt, RNAi
uucuaagucgacggauacggu

SEQ ID NO: 623 - DNA, 21 bp, Homo sapiens
aattgtggaggagatttcctg

SEQ ID NO: 624 - RNA, 21 nt, RNAi
uuguggaggagauuuccuguu

SEQ ID NO: 625 - RNA, 21 nt, RNAi
uuaacaccuccucuaaaggac

SEQ ID NO: 626 - DNA, 21 bp, Homo sapiens
aacctcatctaaataccagat

SEQ ID NO: 627 - RNA, 21 nt, RNAi
ccucaucuaaauaccagauuu

SEQ ID NO: 628 - RNA, 21 nt, RNAi
uuggaguagauuuauggucua

SEQ ID NO: 629 - DNA, 21 bp, Homo sapiens
aaataccagatacaagagttc

SEQ ID NO: 630 - RNA, 21 nt, RNAi
auaccagauacaagaguucuu

SEQ ID NO: 631 - RNA, 21 nt, RNAi
uuuauggucuauguucucaag

SEQ ID NO: 632 - DNA, 21 bp, Homo sapiens
aataccagatacaagagttct

SEQ ID NO: 633 - RNA, 21 nt, RNAi
uaccagauacaagaguucuuu

SEQ ID NO: 634 - RNA, 21 nt, RNAi
uuauggucuauguucucaaga

SEQ ID NO: 635 - DNA, 21 bp, Homo sapiens
aagagttctcagaagtcaacc

SEQ ID NO: 636 - RNA, 21 nt, RNAi
gaguucucagaagucaaccuu

SEQ ID NO: 637 - RNA, 21 nt, RNAi
uucucaagagucuucaguugg

SEQ ID NO: 638 - DNA, 21 bp, Homo sapiens
aagtcaaccgattggtctgga

SEQ ID NO: 639 - RNA, 21 nt, RNAi
gucaaccgauuggucuggauu

SEQ ID NO: 640 - RNA, 21 nt, RNAi
uucaguuggcuaaccagaccu

SEQ ID NO: 641 - DNA, 21 bp, Homo sapiens
aaccgattggtctggagtaaa

SEQ ID NO: 642 - RNA, 21 nt, RNAi
ccgauuggucuggaguaaauu

SEQ ID NO: 643 - RNA, 21 nt, RNAi
uuggcuaaccagaccucauuu

SEQ ID NO: 644 - DNA, 21 bp, Homo sapiens
aactttgcagaatggtcagca

SEQ ID NO: 645 - RNA, 21 nt, RNAi
cuuugcagaauggucagcauu

SEQ ID NO: 646 - RNA, 21 nt, RNAi
uugaaacgucuuaccagucgu

SEQ ID NO: 647 - DNA, 21 bp, Homo sapiens
aaaggttcgacatgatcttgc

SEQ ID NO: 648 - RNA, 21 nt, RNAi
agguucgacaugaucuugcuu

SEQ ID NO: 649 - RNA, 21 nt, RNAi
uuuccaagcuguacuagaacg

SEQ ID NO: 650 - DNA, 21 bp, Homo sapiens
aaggttcgacatgatcttgcc

SEQ ID NO: 651 - RNA, 21 nt, RNAi
gguucgacaugaucuugccuu

SEQ ID NO: 652 - RNA, 21 nt, RNAi
uuccaagcuguacuagaacgg

SEQ ID NO: 653 - DNA, 21 bp, Homo sapiens
aagcatgatttcaaagtgacc

SEQ ID NO: 654 - RNA, 21 nt, RNAi
gcaugauuucaaagugaccuu

SEQ ID NO: 655 - RNA, 21 nt, RNAi
uucguacuaaaguuucacugg

SEQ ID NO: 656 - DNA, 21 bp, Homo sapiens
aaagtgaccatctatcttctt

SEQ ID NO: 657 - RNA, 21 nt, RNAi
agugaccaucuaucuucuuuu

SEQ ID NO: 658 - RNA, 21 nt, RNAi
uuucacugguagauagaagaa

SEQ ID NO: 659 - DNA, 21 bp, Homo sapiens
aagtgaccatctatcttcttc

SEQ ID NO: 660 - RNA, 21 nt, RNAi
gugaccaucuaucuucuucuu

SEQ ID NO: 661 - RNA, 21 nt, RNAi
uucacugguagauagaagaag

SEQ ID NO: 662 - DNA, 21 bp, Homo sapiens
aatcaagaagatcagcaggag

SEQ ID NO: 663 - RNA, 21 nt, RNAi
ucaagaagaucagcaggaguu

SEQ ID NO: 664 - RNA, 21 nt, RNAi
uuaguucuucuagucguccuc

SEQ ID NO: 665 - DNA, 21 bp, Homo sapiens
aagaagatcagcaggaggttt

SEQ ID NO: 666 - RNA, 21 nt, RNAi
gaagaucagcaggagguuuuu

SEQ ID NO: 667 - RNA, 21 nt, RNAi
uucuucuagucguccuccaaa

SEQ ID NO: 668 - DNA, 21 bp, Homo sapiens
aagatcagcaggaggtttatg

SEQ ID NO: 669 - RNA, 21 nt, RNAi
gaucagcaggagguuuauguu

SEQ ID NO: 670 - RNA, 21 nt, RNAi
uucuagucguccuccaaauac

SEQ ID NO: 671 - DNA, 21 bp, Homo sapiens
aaattatggcagttctaaagc

SEQ ID NO: 672 - RNA, 21 nt, RNAi
auuauggcaguucuaaagcuu

SEQ ID NO: 673 - RNA, 21 nt, RNAi
uuuaauaccgucaagauuucg

SEQ ID NO: 674 - DNA, 21 bp, Homo sapiens
aattatggcagttctaaagca

SEQ ID NO: 675 - RNA, 21 nt, RNAi
uuauggcaguucuaaagcauu

SEQ ID NO: 676 - RNA, 21 nt, RNAi
uuaauaccgucaagauuucgu

SEQ ID NO: 677 - DNA, 21 bp, Homo sapiens
aaagcatgacgatcagcatac

SEQ ID NO: 678 - RNA, 21 nt, RNAi
agcaugacgaucagcauacuu

SEQ ID NO: 679 - RNA, 21 nt, RNAi
uuucguacugcuagucguaug

SEQ ID NO: 680 - DNA, 21 bp, Homo sapiens
aagcatgacgatcagcatacc

SEQ ID NO: 681 - RNA, 21 nt, RNAi
gcaugacgaucagcauaccuu

SEQ ID NO: 682 - RNA, 21 nt, RNAi
uucguacugcuagucguaugg

SEQ ID NO: 683 - DNA, 21 bp, Homo sapiens
aagacattgcatctgatctgt

SEQ ID NO: 684 - RNA, 21 nt, RNAi
gacauugcaucugaucuguuu

SEQ ID NO: 685 - RNA, 21 nt, RNAi
uucuguaacguagacuagaca

SEQ ID NO: 686 - DNA, 21 bp, Homo sapiens
aactcagtacacagactgtgt

SEQ ID NO: 687 - RNA, 21 nt, RNAi
cucaguacacagacuguguuu

SEQ ID NO: 688 - RNA, 21 nt, RNAi
uugagucaugugucugacaca

SEQ ID NO: 689 - DNA, 21 bp, Homo sapiens
aaggcacaaatttcaggcact

SEQ ID NO: 690 - RNA, 21 nt, RNAi
ggcacaaauuucaggcacuuu

SEQ ID NO: 691 - RNA, 21 nt, RNAi
uuccguguuuaaaguccguga

SEQ ID NO: 692 - DNA, 21 bp, Homo sapiens
aaatttcaggcactgaaagct

SEQ ID NO: 693 - RNA, 21 nt, RNAi
auuucaggcacugaaagcuuu

SEQ ID NO: 694 - RNA, 21 nt, RNAi
uuuaaaguccgugacuuucga

SEQ ID NO: 695 - DNA, 21 bp, Homo sapiens
aatttcaggcactgaaagctg

SEQ ID NO: 696 - RNA, 21 nt, RNAi
uuucaggcacugaaagcuguu

SEQ ID NO: 697 - RNA, 21 nt, RNAi
uuaaaguccgugacuuucgac

SEQ ID NO: 698 - DNA, 21 bp, Homo sapiens
aaagctgagaaatgtccacac

SEQ ID NO: 699 - RNA, 21 nt, RNAi
agcugagaaauguccacacuu

SEQ ID NO: 700 - RNA, 21 nt, RNAi
uuucgacucuuuacaggugug

SEQ ID NO: 701 - DNA, 21 bp, Homo sapiens
aagctgagaaatgtccacaca

SEQ ID NO: 702 - RNA, 21 nt, RNAi
gcugagaaauguccacacauu

SEQ ID NO: 703 - RNA, 21 nt, RNAi
uucgacucuuuacaggugugu

SEQ ID NO: 704 - DNA, 21 bp, Homo sapiens
aaatgtccacacagcaaatca

SEQ ID NO: 705 - RNA, 21 nt, RNAi
auguccacacagcaaaucauu

SEQ ID NO: 706 - RNA, 21 nt, RNAi
uuuacaggugugucguuuagu

SEQ ID NO: 707 - DNA, 21 bp, Homo sapiens
aatgtccacacagcaaatcaa

SEQ ID NO: 708 - RNA, 21 nt, RNAi
uguccacacagcaaaucaauu

SEQ ID NO: 709 - RNA, 21 nt, RNAi
uuacaggugugucguuuaguu

SEQ ID NO: 710 - DNA, 21 bp, Homo sapiens
aaacagaaataaggtagactc

SEQ ID NO: 711 - RNA, 21 nt, RNAi
acagaaauaagguagacucuu

SEQ ID NO: 712 - RNA, 21 nt, RNAi
uuugucuuuauuccaucugag

SEQ ID NO: 713 - DNA, 21 bp, Homo sapiens
aacagaaataaggtagactca

SEQ ID NO: 714 - RNA, 21 nt, RNAi
cagaaauaagguagacucauu

SEQ ID NO: 715 - RNA, 21 nt, RNAi
uugucuuuauuccaucugagu

SEQ ID NO: 716 - DNA, 21 bp, Homo sapiens
aaataaggtagactcaatggt

SEQ ID NO: 717 - RNA, 21 nt, RNAi
auaagguagacucaaugguuu

SEQ ID NO: 718 - RNA, 21 nt, RNAi
uuuauuccaucugaguuacca

SEQ ID NO: 719 - DNA, 21 bp, Homo sapiens
aataaggtagactcaatggta

SEQ ID NO: 720 - RNA, 21 nt, RNAi
uaagguagacucaaugguauu

SEQ ID NO: 721 - RNA, 21 nt, RNAi
uuauuccaucugaguuaccau

SEQ ID NO: 722 - DNA, 21 bp, Homo sapiens
aaggtagactcaatggtatct

SEQ ID NO: 723 - RNA, 21 nt, RNAi
gguagacucaaugguaucuuu

SEQ ID NO: 724 - RNA, 21 nt, RNAi
uuccaucugaguuaccauaga

SEQ ID NO: 725 - DNA, 21 bp, Homo sapiens
aatggtatctactgtggatta

SEQ ID NO: 726 - RNA, 21 nt, RNAi
ugguaucuacuguggauuauu

SEQ ID NO: 727 - RNA, 21 nt, RNAi
uuaccauagaugacaccuaau

SEQ ID NO: 728 - DNA, 21 bp, Homo sapiens
aaagcatacacacgagctgta

SEQ ID NO: 729 - RNA, 21 nt, RNAi
agcauacacacgagcuguauu

SEQ ID NO: 730 - RNA, 21 nt, RNAi
uuucguaugugugcucgacau

SEQ ID NO: 731 - DNA, 21 bp, Homo sapiens
aagcatacacacgagctgtaa

SEQ ID NO: 732 - RNA, 21 nt, RNAi
gcauacacacgagcuguaauu

SEQ ID NO: 733 - RNA, 21 nt, RNAi
uucguaugugugcucgacauu

SEQ ID NO: 734 - DNA, 21 bp, Homo sapiens
aaatattcaggaacatcttgg

SEQ ID NO: 735 - RNA, 21 nt, RNAi
auauucaggaacaucuugguu

SEQ ID NO: 736 - RNA, 21 nt, RNAi
uuuauaaguccuuguagaacc

SEQ ID NO: 737 - DNA, 21 bp, Homo sapiens
aatattcaggaacatcttgga

SEQ ID NO: 738 - RNA, 21 nt, RNAi
uauucaggaacaucuuggauu

SEQ ID NO: 739 - RNA, 21 nt, RNAi
uuauaaguccuuguagaaccu

SEQ ID NO: 740 - DNA, 21 bp, Homo sapiens
aaattgtatgctgctatgcat

SEQ ID NO: 741 - RNA, 21 nt, RNAi
auuguaugcugcuaugcauuu

SEQ ID NO: 742 - RNA, 21 nt, RNAi
uuuaacauacgacgauacgua

SEQ ID NO: 743 - DNA, 21 bp, Homo sapiens
aattgtatgctgctatgcatg

SEQ ID NO: 744 - RNA, 21 nt, RNAi
uuguaugcugcuaugcauguu

SEQ ID NO: 745 - RNA, 21 nt, RNAi
uuaacauacgacgauacguac

SEQ ID NO: 746 - DNA, 21 bp, Homo sapiens
aacctgatggagtggccggag

SEQ ID NO: 747 - RNA, 21 nt, RNAi
ccugauggaguggccggaguu

SEQ ID NO: 748 - RNA, 21 nt, RNAi
uuggacuaccucaccggccuc

SEQ ID NO: 749 - DNA, 21 bp, Homo sapiens
aattagaaaggcagaaccatc

SEQ ID NO: 750 - RNA, 21 nt, RNAi
uuagaaaggcagaaccaucuu

SEQ ID NO: 751 - RNA, 21 nt, RNAi
uuaaucuuuccgucuugguag

SEQ ID NO: 752 - DNA, 21 bp, Homo sapiens
aaaggcagaaccatctctaaa

SEQ ID NO: 753 - RNA, 21 nt, RNAi
aggcagaaccaucucuaaauu

SEQ ID NO: 754 - RNA, 21 nt, RNAi
uuuccgucuugguagagauuu

SEQ ID NO: 755 - DNA, 21 bp, Homo sapiens
aaagaacagatccttgaacat

SEQ ID NO: 756 - RNA, 21 nt, RNAi
agaacagauccuugaacauuu

SEQ ID NO: 757 - RNA, 21 nt, RNAi
uuucuugucuaggaacuugua

SEQ ID NO: 758 - DNA, 21 bp, Homo sapiens
aagaacagatccttgaacatg

SEQ ID NO: 759 - RNA, 21 nt, RNAi
gaacagauccuugaacauguu

SEQ ID NO: 760 - RNA, 21 nt, RNAi
uucuugucuaggaacuuguac

SEQ ID NO: 761 - DNA, 21 bp, Homo sapiens
aacagatccttgaacatgaaa

SEQ ID NO: 762 - RNA, 21 nt, RNAi
cagauccuugaacaugaaauu

SEQ ID NO: 763 - RNA, 21 nt, RNAi
uugucuaggaacuuguacuuu

SEQ ID NO: 764 - DNA, 21 bp, Homo sapiens
aacatgaaagccttggcttgc

SEQ ID NO: 765 - RNA, 21 nt, RNAi
caugaaagccuuggcuugcuu

SEQ ID NO: 766 - RNA, 21 nt, RNAi
uuguacuuucggaaccgaacg

SEQ ID NO: 767 - DNA, 21 bp, Homo sapiens
aaccagaccagatcattcatt

SEQ ID NO: 768 - RNA, 21 nt, RNAi
ccagaccagaucauucauuuu

SEQ ID NO: 769 - RNA, 21 nt, RNAi
uuggucuggucuaguaaguaa

SEQ ID NO: 770 - DNA, 21 bp, Homo sapiens
aaagtccatgttaggtcttgg

SEQ ID NO: 771 - RNA, 21 nt, RNAi
aguccauguuaggucuugguu

SEQ ID NO: 772 - RNA, 21 nt, RNAi
uuucagguacaauccagaacc

SEQ ID NO: 773 - DNA, 21 bp, Homo sapiens
aagtccatgttaggtcttggt

SEQ ID NO: 774 - RNA, 21 nt, RNAi
guccauguuaggucuugguuu

SEQ ID NO: 775 - RNA, 21 nt, RNAi
uucagguacaauccagaacca

SEQ ID NO: 776 - DNA, 21 bp, Homo sapiens
aatggagtgcatgctaacagg

SEQ ID NO: 777 - RNA, 21 nt, RNAi
uggagugcaugcuaacagguu

SEQ ID NO: 778 - RNA, 21 nt, RNAi
uuaccucacguacgauugucc

SEQ ID NO: 779 - DNA, 21 bp, Homo sapiens
aacaggtccgagtggacagat

SEQ ID NO: 780 - RNA, 21 nt, RNAi
cagguccgaguggacagauuu

SEQ ID NO: 781 - RNA, 21 nt, RNAi
uuguccaggcucaccugucua

SEQ ID NO: 782 - DNA, 21 bp, Homo sapiens
aattaaacacgtacagagtgg

SEQ ID NO: 783 - RNA, 21 nt, RNAi
uuaaacacguacagagugguu

SEQ ID NO: 784 - RNA, 21 nt, RNAi
uuaauuugugcaugucucacc

SEQ ID NO: 785 - DNA, 21 bp, Homo sapiens
aaacacgtacagagtggaagc

SEQ ID NO: 786 - RNA, 21 nt, RNAi
acacguacagaguggaagcuu

SEQ ID NO: 787 - RNA, 21 nt, RNAi
uuugugcaugucucaccuucg

SEQ ID NO: 788 - DNA, 21 bp, Homo sapiens
aacacgtacagagtggaagca

SEQ ID NO: 789 - RNA, 21 nt, RNAi
cacguacagaguggaagcauu

SEQ ID NO: 790 - RNA, 21 nt, RNAi
uugugcaugucucaccuucgu

SEQ ID NO: 791 - DNA, 21 bp, Homo sapiens
aagcagcttggaaattgtcac

SEQ ID NO: 792 - RNA, 21 nt, RNAi
gcagcuuggaaauugucacuu

SEQ ID NO: 793 - RNA, 21 nt, RNAi
uucgucgaaccuuuaacagug

SEQ ID NO: 794 - DNA, 21 bp, Homo sapiens
aaactatttggcagcagatgg

SEQ ID NO: 795 - RNA, 21 nt, RNAi
acuauuuggcagcagaugguu

SEQ ID NO: 796 - RNA, 21 nt, RNAi
uuugauaaaccgucgucuacc

SEQ ID NO: 797 - DNA, 21 bp, Homo sapiens
aactatttggcagcagatgga

SEQ ID NO: 798 - RNA, 21 nt, RNAi
cuauuuggcagcagauggauu

SEQ ID NO: 799 - RNA, 21 nt, RNAi
uugauaaaccgucgucuaccu

SEQ ID NO: 800 - DNA, 21 bp, Homo sapiens
aaatctacaacatggagtgtc

SEQ ID NO: 801 - RNA, 21 nt, RNAi
aucuacaacauggagugucuu

SEQ ID NO: 802 - RNA, 21 nt, RNAi
uuuagauguuguaccucacag

SEQ ID NO: 803 - DNA, 21 bp, Homo sapiens
aatctacaacatggagtgtca

SEQ ID NO: 804 - RNA, 21 nt, RNAi
ucuacaacauggagugucauu

SEQ ID NO: 805 - RNA, 21 nt, RNAi
uuagauguuguaccucacagu

SEQ ID NO: 806 - DNA, 21 bp, Homo sapiens
aaactagtgagagcagaacaa

SEQ ID NO: 807 - RNA, 21 nt, RNAi
acuagugagagcagaacaauu

SEQ ID NO: 808 - RNA, 21 nt, RNAi
uuugaucacucucgucuuguu

SEQ ID NO: 809 - DNA, 21 bp, Homo sapiens
aactagtgagagcagaacaaa

SEQ ID NO: 810 - RNA, 21 nt, RNAi
cuagugagagcagaacaaauu

SEQ ID NO: 811 - RNA, 21 nt, RNAi
uugaucacucucgucuuguuu

SEQ ID NO: 812 - DNA, 21 bp, Homo sapiens
aacaaattgtacctctttcag

SEQ ID NO: 813 - RNA, 21 nt, RNAi
caaauuguaccucuuucaguu

SEQ ID NO: 814 - RNA, 21 nt, RNAi
uuguuuaacauggagaaaguc

SEQ ID NO: 815 - DNA, 21 bp, Homo sapiens
aaattgtacctctttcagctg

SEQ ID NO: 816 - RNA, 21 nt, RNAi
auuguaccucuuucagcuguu

SEQ ID NO: 817 - RNA, 21 nt, RNAi
uuuaacauggagaaagucgac

SEQ ID NO: 818 - DNA, 21 bp, Homo sapiens
aattgtacctctttcagctgc

SEQ ID NO: 819 - RNA, 21 nt, RNAi
uuguaccucuuucagcugcuu

SEQ ID NO: 820 - RNA, 21 nt, RNAi
uuaacauggagaaagucgacg

SEQ ID NO: 821 - DNA, 21 bp, Homo sapiens
aagctttgaaagaggctccta

SEQ ID NO: 822 - RNA, 21 nt, RNAi
gcuuugaaagaggcuccuauu

SEQ ID NO: 823 - RNA, 21 nt, RNAi
uucgaaacuuucuccgaggau

SEQ ID NO: 824 - DNA, 21 bp, Homo sapiens
aaagaggctcctaccaacgag

SEQ ID NO: 825 - RNA, 21 nt, RNAi
agaggcuccuaccaacgaguu

SEQ ID NO: 826 - RNA, 21 nt, RNAi
uuucuccgaggaugguugcuc

SEQ ID NO: 827 - DNA, 21 bp, Homo sapiens
aagaggctcctaccaacgagg

SEQ ID NO: 828 - RNA, 21 nt, RNAi
gaggcuccuaccaacgagguu

SEQ ID NO: 829 - RNA, 21 nt, RNAi
uucuccgaggaugguugcucc

SEQ ID NO: 830 - DNA, 21 bp, Homo sapiens
aattcctacagagccaaggag

SEQ ID NO: 831 - RNA, 21 nt, RNAi
uuccuacagagccaaggaguu

SEQ ID NO: 832 - RNA, 21 nt, RNAi
uuaaggaugucucgguuccuc

SEQ ID NO: 833 - DNA, 21 bp, Homo sapiens
aaggagcctatcctggctctc

SEQ ID NO: 834 - RNA, 21 nt, RNAi
ggagccuauccuggcucucuu

SEQ ID NO: 835 - RNA, 21 nt, RNAi
uuccucggauaggaccgagag

SEQ ID NO: 836 - DNA, 21 bp, Homo sapiens
aatgaaatggttggagaatgc

SEQ ID NO: 837 - RNA, 21 nt, RNAi
ugaaaugguuggagaaugcuu

SEQ ID NO: 838 - RNA, 21 nt, RNAi
uuacuuuaccaaccucuuacg

SEQ ID NO: 839 - DNA, 21 bp, Homo sapiens
aaatggttggagaatgctggc

SEQ ID NO: 840 - RNA, 21 nt, RNAi
augguuggagaaugcuggcuu

SEQ ID NO: 841 - RNA, 21 nt, RNAi
uuuaccaaccucuuacgaccg

SEQ ID NO: 842 - DNA, 21 bp, Homo sapiens
aatggttggagaatgctggct

SEQ ID NO: 843 - RNA, 21 nt, RNAi
ugguuggagaaugcuggcuuu

SEQ ID NO: 844 - RNA, 21 nt, RNAi
uuaccaaccucuuacgaccga

SEQ ID NO: 845 - DNA, 21 bp, Homo sapiens
aatgctggctgcagagtgcca

SEQ ID NO: 846 - RNA, 21 nt, RNAi
ugcuggcugcagagugccauu

SEQ ID NO: 847 - RNA, 21 nt, RNAi
uuacgaccgacgucucacggu

SEQ ID NO: 848 - DNA, 21 bp, Homo sapiens
aaaggctggtcaccaccagac

SEQ ID NO: 849 - RNA, 21 nt, RNAi
aggcuggucaccaccagacuu

SEQ ID NO: 850 - RNA, 21 nt, RNAi
uuuccgaccagugguggucug

SEQ ID NO: 851 - DNA, 21 bp, Homo sapiens
aaggctggtcaccaccagaca

SEQ ID NO: 852 - RNA, 21 nt, RNAi
ggcuggucaccaccagacauu

SEQ ID NO: 853 - RNA, 21 nt, RNAi
uuccgaccagugguggucugu

SEQ ID NO: 854 - DNA, 21 bp, Homo sapiens
aatcacgactcgctgaactgt

SEQ ID NO: 855 - RNA, 21 nt, RNAi
ucacgacucgcugaacuguuu

SEQ ID NO: 856 - RNA, 21 nt, RNAi
uuagugcugagcgacuugaca

SEQ ID NO: 857 - DNA, 21 bp, Homo sapiens
aagaacatgttaatccatggt

SEQ ID NO: 858 - RNA, 21 nt, RNAi
gaacauguuaauccaugguuu

SEQ ID NO: 859 - RNA, 21 nt, RNAi
uucuuguacaauuagguacca

SEQ ID NO: 860 - DNA, 21 bp, Homo sapiens
aacatgttaatccatggtcga

SEQ ID NO: 861 - RNA, 21 nt, RNAi
cauguuaauccauggucgauu

SEQ ID NO: 862 - RNA, 21 nt, RNAi
uuguacaauuagguaccagcu

SEQ ID NO: 863 - DNA, 21 bp, Homo sapiens
aatccatggtcgagctatgct

SEQ ID NO: 864 - RNA, 21 nt, RNAi
uccauggucgagcuaugcuuu

SEQ ID NO: 865 - RNA, 21 nt, RNAi
uuagguaccagcucgauacga

SEQ ID NO: 866 - DNA, 21 bp, Homo sapiens
aaacagctaactttgaaagca

SEQ ID NO: 867 - RNA, 21 nt, RNAi
acagcuaacuuugaaagcauu

SEQ ID NO: 868 - RNA, 21 nt, RNAi
uuugucgauugaaacuuucgu

SEQ ID NO: 869 - DNA, 21 bp, Homo sapiens
aacagctaactttgaaagcaa

SEQ ID NO: 870 - RNA, 21 nt, RNAi
cagcuaacuuugaaagcaauu

SEQ ID NO: 871 - RNA, 21 nt, RNAi
uugucgauugaaacuuucguu

SEQ ID NO: 872 - DNA, 21 bp, Homo sapiens
aaatataaggatgtgaccgcg

SEQ ID NO: 873 - RNA, 21 nt, RNAi
auauaaggaugugaccgcguu

SEQ ID NO: 874 - RNA, 21 nt, RNAi
uuuauauuccuacacuggcgc

SEQ ID NO: 875 - DNA, 21 bp, Homo sapiens
aatataaggatgtgaccgcgt

SEQ ID NO: 876 - RNA, 21 nt, RNAi
uauaaggaugugaccgcguuu

SEQ ID NO: 877 - RNA, 21 nt, RNAi
uuauauuccuacacuggcgca

SEQ ID NO: 878 - DNA, 21 bp, Homo sapiens
aaggatgtgaccgcgtgcctg

SEQ ID NO: 879 - RNA, 21 nt, RNAi
ggaugugaccgcgugccuguu

SEQ ID NO: 880 - RNA, 21 nt, RNAi
uuccuacacuggcgcacggac

SEQ ID NO: 881 - DNA, 21 bp, Homo sapiens
aaagcaaggtgatctcatccg

SEQ ID NO: 882 - RNA, 21 nt, RNAi
agcaaggugaucucauccguu

SEQ ID NO: 883 - RNA, 21 nt, RNAi
uuucguuccacuagaguaggc

SEQ ID NO: 884 - DNA, 21 bp, Homo sapiens
aagcaaggtgatctcatccgg

SEQ ID NO: 885 - RNA, 21 nt, RNAi
gcaaggugaucucauccgguu

SEQ ID NO: 886 - RNA, 21 nt, RNAi
uucguuccacuagaguaggcc

SEQ ID NO: 887 - DNA, 21 bp, Homo sapiens
aaggtgatctcatccggtata

SEQ ID NO: 888 - RNA, 21 nt, RNAi
ggugaucucauccgguauauu

SEQ ID NO: 889 - RNA, 21 nt, RNAi
uuccacuagaguaggccauau

SEQ ID NO: 890 - DNA, 21 bp, Homo sapiens
aatgccacgaatgttaactct

SEQ ID NO: 891 - RNA, 21 nt, RNAi
ugccacgaauguuaacucuuu

SEQ ID NO: 892 - RNA, 21 nt, RNAi
uuacggugcuuacaauugaga

SEQ ID NO: 893 - DNA, 21 bp, Homo sapiens
aatgttaactctatggcttga

SEQ ID NO: 894 - RNA, 21 nt, RNAi
uguuaacucuauggcuugauu

SEQ ID NO: 895 - RNA, 21 nt, RNAi
uuacaauugagauaccgaacu

SEQ ID NO: 896 - DNA, 21 bp, Homo sapiens
aactctatggcttgattatgg

SEQ ID NO: 897 - RNA, 21 nt, RNAi
cucuauggcuugauuaugguu

SEQ ID NO: 898 - RNA, 21 nt, RNAi
uugagauaccgaacuaauacc

SEQ ID NO: 899 - DNA, 21 bp, Homo sapiens
aaagctggccgctccgatcgt

SEQ ID NO: 900 - RNA, 21 nt, RNAi
agcuggccgcuccgaucguuu

SEQ ID NO: 901 - RNA, 21 nt, RNAi
uuucgaccggcgaggcuagca

SEQ ID NO: 902 - DNA, 21 bp, Homo sapiens
aaacaaggttatcacagagca

SEQ ID NO: 903 - RNA, 21 nt, RNAi
acaagguuaucacagagcauu

SEQ ID NO: 904 - RNA, 21 nt, RNAi
uuuguuccaauagugucucgu

SEQ ID NO: 905 - DNA, 21 bp, Homo sapiens
aacaaggttatcacagagcat

SEQ ID NO: 906 - RNA, 21 nt, RNAi
caagguuaucacagagcauuu

SEQ ID NO: 907 - RNA, 21 nt, RNAi
uuguuccaauagugucucgua

SEQ ID NO: 908 - DNA, 21 bp, Homo sapiens
aaggttatcacagagcataca

SEQ ID NO: 909 - RNA, 21 nt, RNAi
gguuaucacagagcauacauu

SEQ ID NO: 910 - RNA, 21 nt, RNAi
uuccaauagugucucguaugu

SEQ ID NO: 911 - DNA, 21 bp, Homo sapiens
aattgatctctcgaatttgtc

SEQ ID NO: 912 - RNA, 21 nt, RNAi
uugaucucucgaauuugucuu

SEQ ID NO: 913 - RNA, 21 nt, RNAi
uuaacuagagagcuuaaacag

SEQ ID NO: 914 - DNA, 21 bp, Homo sapiens
aatttgtcattctcacgatga

SEQ ID NO: 915 - RNA, 21 nt, RNAi
uuugucauucucacgaugauu

SEQ ID NO: 916 - RNA, 21 nt, RNAi
uuaaacaguaagagugcuacu

SEQ ID NO: 917 - DNA, 21 bp, Homo sapiens
aatagccaaagtatttctagc

SEQ ID NO: 918 - RNA, 21 nt, RNAi
uagccaaaguauuucuagcuu

SEQ ID NO: 919 - RNA, 21 nt, RNAi
uuaucgguuucauaaagaucg

SEQ ID NO: 920 - DNA, 21 bp, Homo sapiens
aaagtatttctagcctatcct

SEQ ID NO: 921 - RNA, 21 nt, RNAi
aguauuucuagccuauccuuu

SEQ ID NO: 922 - RNA, 21 nt, RNAi
uuucauaaagaucggauagga

SEQ ID NO: 923 - DNA, 21 bp, Homo sapiens
aagtatttctagcctatcctc

SEQ ID NO: 924 - RNA, 21 nt, RNAi
guauuucuagccuauccucuu

SEQ ID NO: 925 - RNA, 21 nt, RNAi
uucauaaagaucggauaggag

SEQ ID NO: 926 - DNA, 21 bp, Homo sapiens
aacaagcaatgtggatgatga

SEQ ID NO: 927 - RNA, 21 nt, RNAi
caagcaauguggaugaugauu

SEQ ID NO: 928 - RNA, 21 nt, RNAi
uuguucguuacaccuacuacu

SEQ ID NO: 929 - DNA, 21 bp, Homo sapiens
aagcaatgtggatgatgacag

SEQ ID NO: 930 - RNA, 21 nt, RNAi
gcaauguggaugaugacaguu

SEQ ID NO: 931 - RNA, 21 nt, RNAi
uucguuacaccuacuacuguc

SEQ ID NO: 932 - DNA, 21 bp, Homo sapiens
aatgtggatgatgacagctgt

SEQ ID NO: 933 - RNA, 21 nt, RNAi
uguggaugaugacagcuguuu

SEQ ID NO: 934 - RNA, 21 nt, RNAi
uuacaccuacuacugucgaca

SEQ ID NO: 935 - DNA, 21 bp, Homo sapiens
aacagatgcaaggaaatcctc

SEQ ID NO: 936 - RNA, 21 nt, RNAi
cagaugcaaggaaauccucuu

SEQ ID NO: 937 - RNA, 21 nt, RNAi
uugucuacguuccuuuaggag

SEQ ID NO: 938 - DNA, 21 bp, Homo sapiens
aaggaaatcctcaataaagct

SEQ ID NO: 939 - RNA, 21 nt, RNAi
ggaaauccucaauaaagcuuu

SEQ ID NO: 940 - RNA, 21 nt, RNAi
uuccuuuaggaguuauuucga

SEQ ID NO: 941 - DNA, 21 bp, Homo sapiens
aatccttagagaagtttgttg

SEQ ID NO: 942 - RNA, 21 nt, RNAi
uccuuagagaaguuuguuguu

SEQ ID NO: 943 - RNA, 21 nt, RNAi
uuaggaaucucuucaaacaac

SEQ ID NO: 944 - DNA, 21 bp, Homo sapiens
aagtttgttggagatgcaact

SEQ ID NO: 945 - RNA, 21 nt, RNAi
guuuguuggagaugcaacuuu

SEQ ID NO: 946 - RNA, 21 nt, RNAi
uucaaacaaccucuacguuga

SEQ ID NO: 947 - DNA, 21 bp, Homo sapiens
aactcgcctaacagataagct

SEQ ID NO: 948 - RNA, 21 nt, RNAi
cucgccuaacagauaagcuuu

SEQ ID NO: 949 - RNA, 21 nt, RNAi
uugagcggauugucuauucga

SEQ ID NO: 950 - DNA, 21 bp, Homo sapiens
aagcttctagaattgtgcaat

SEQ ID NO: 951 - RNA, 21 nt, RNAi
gcuucuagaauugugcaauuu

SEQ ID NO: 952 - RNA, 21 nt, RNAi
uucgaagaucuuaacacguua

SEQ ID NO: 953 - DNA, 21 bp, Homo sapiens
aattgtgcaataaaccggttg

SEQ ID NO: 954 - RNA, 21 nt, RNAi
uugugcaauaaaccgguuguu

SEQ ID NO: 955 - RNA, 21 nt, RNAi
uuaacacguuauuuggccaac

SEQ ID NO: 956 - DNA, 21 bp, Homo sapiens
aataaaccggttgatggaagt

SEQ ID NO: 957 - RNA, 21 nt, RNAi
uaaaccgguugauggaaguuu

SEQ ID NO: 958 - RNA, 21 nt, RNAi
uuauuuggccaacuaccuuca

SEQ ID NO: 959 - DNA, 21 bp, Homo sapiens
aaaccggttgatggaagtagt

SEQ ID NO: 960 - RNA, 21 nt, RNAi
accgguugauggaaguaguuu

SEQ ID NO: 961 - RNA, 21 nt, RNAi
uuuggccaacuaccuucauca

SEQ ID NO: 962 - DNA, 21 bp, Homo sapiens
aaccggttgatggaagtagtt

SEQ ID NO: 963 - RNA, 21 nt, RNAi
ccgguugauggaaguaguuuu

SEQ ID NO: 964 - RNA, 21 nt, RNAi
uuggccaacuaccuucaucaa

SEQ ID NO: 965 - DNA, 21 bp, Homo sapiens
aagtagttccacattaagcat

SEQ ID NO: 966 - RNA, 21 nt, RNAi
guaguuccacauuaagcauuu

SEQ ID NO: 967 - RNA, 21 nt, RNAi
uucaucaagguguaauucgua

SEQ ID NO: 968 - DNA, 21 bp, Homo sapiens
aaagctggtagaagaagcaac

SEQ ID NO: 969 - RNA, 21 nt, RNAi
agcugguagaagaagcaacuu

SEQ ID NO: 970 - RNA, 21 nt, RNAi
uuucgaccaucuucuucguug

SEQ ID NO: 971 - DNA, 21 bp, Homo sapiens
aagctggtagaagaagcaaca

SEQ ID NO: 972 - RNA, 21 nt, RNAi
gcugguagaagaagcaacauu

SEQ ID NO: 973 - RNA, 21 nt, RNAi
uucgaccaucuucuucguugu

SEQ ID NO: 974 - DNA, 21 bp, Homo sapiens
aagcaacatttagtgaaatcc

SEQ ID NO: 975 - RNA, 21 nt, RNAi
gcaacauuuagugaaauccuu

SEQ ID NO: 976 - RNA, 21 nt, RNAi
uucguuguaaaucacuuuagg

SEQ ID NO: 977 - DNA, 21 bp, Homo sapiens
aaatcctcattcctctacaat

SEQ ID NO: 978 - RNA, 21 nt, RNAi
auccucauuccucuacaauuu

SEQ ID NO: 979 - RNA, 21 nt, RNAi
uuuaggaguaaggagauguua

SEQ ID NO: 980 - DNA, 21 bp, Homo sapiens
aatcctcattcctctacaatc

SEQ ID NO: 981 - RNA, 21 nt, RNAi
uccucauuccucuacaaucuu

SEQ ID NO: 982 - RNA, 21 nt, RNAi
uuaggaguaaggagauguuag

SEQ ID NO: 983 - DNA, 21 bp, Homo sapiens
aatcagtcatgatacctacac

SEQ ID NO: 984 - RNA, 21 nt, RNAi
ucagucaugauaccuacacuu

SEQ ID NO: 985 - RNA, 21 nt, RNAi
uuagucaguacuauggaugug

SEQ ID NO: 986 - DNA, 21 bp, Homo sapiens
aaccatgctagccatgaacca

SEQ ID NO: 987 - RNA, 21 nt, RNAi
ccaugcuagccaugaaccauu

SEQ ID NO: 988 - RNA, 21 nt, RNAi
uugguacgaucgguacuuggu

SEQ ID NO: 989 - DNA, 21 bp, Homo sapiens
aaattcttgcttctcttcaga

SEQ ID NO: 990 - RNA, 21 nt, RNAi
auucuugcuucucuucagauu

SEQ ID NO: 991 - RNA, 21 nt, RNAi
uuuaagaacgaagagaagucu

SEQ ID NO: 992 - DNA, 21 bp, Homo sapiens
aattcttgcttctcttcagaa

SEQ ID NO: 993 - RNA, 21 nt, RNAi
uucuugcuucucuucagaauu

SEQ ID NO: 994 - RNA, 21 nt, RNAi
uuaagaacgaagagaagucuu

SEQ ID NO: 995 - DNA, 21 bp, Homo sapiens
aaaggctcagatggaaagttc

SEQ ID NO: 996 - RNA, 21 nt, RNAi
aggcucagauggaaaguucuu

SEQ ID NO: 997 - RNA, 21 nt, RNAi
uuuccgagucuaccuuucaag

SEQ ID NO: 998 - DNA, 21 bp, Homo sapiens
aaggctcagatggaaagttct

SEQ ID NO: 999 - RNA, 21 nt, RNAi
ggcucagauggaaaguucuuu

SEQ ID NO: 1000 - RNA, 21 nt, RNAi
uuccgagucuaccuuucaaga

SEQ ID NO: 1001 - DNA, 21 bp, Homo sapiens
aaagttctacatcatgatgtg

SEQ ID NO: 1002 - RNA, 21 nt, RNAi
aguucuacaucaugauguguu

SEQ ID NO: 1003 - RNA, 21 nt, RNAi
uuucaagauguaguacuacac

SEQ ID NO: 1004 - DNA, 21 bp, Homo sapiens
aagttctacatcatgatgtgt

SEQ ID NO: 1005 - RNA, 21 nt, RNAi
guucuacaucaugauguguuu

SEQ ID NO: 1006 - RNA, 21 nt, RNAi
uucaagauguaguacuacaca

SEQ ID NO: 1007 - DNA, 21 bp, Homo sapiens
aaagatgacctgagaaaggat

SEQ ID NO: 1008 - RNA, 21 nt, RNAi
agaugaccugagaaaggauuu

SEQ ID NO: 1009 - RNA, 21 nt, RNAi
uuucuacuggacucuuuccua

SEQ ID NO: 1010 - DNA, 21 bp, Homo sapiens
aagatgacctgagaaaggatt

SEQ ID NO: 1011 - RNA, 21 nt, RNAi
gaugaccugagaaaggauuuu

SEQ ID NO: 1012 - RNA, 21 nt, RNAi
uucuacuggacucuuuccuaa

SEQ ID NO: 1013 - DNA, 21 bp, Homo sapiens
aaaggattgtagactaatgga

SEQ ID NO: 1014 - RNA, 21 nt, RNAi
aggauuguagacuaauggauu

SEQ ID NO: 1015 - RNA, 21 nt, RNAi
uuuccuaacaucugauuaccu

SEQ ID NO: 1016 - DNA, 21 bp, Homo sapiens
aaggattgtagactaatggaa

SEQ ID NO: 1017 - RNA, 21 nt, RNAi
ggauuguagacuaauggaauu

SEQ ID NO: 1018 - RNA, 21 nt, RNAi
uuccuaacaucugauuaccuu

SEQ ID NO: 1019 - DNA, 21 bp, Homo sapiens
aaagatgcagagtctcgtaga

SEQ ID NO: 1020 - RNA, 21 nt, RNAi
agaugcagagucucguagauu

SEQ ID NO: 1021 - RNA, 21 nt, RNAi
uuucuacgucucagagcaucu

SEQ ID NO: 1022 - DNA, 21 bp, Homo sapiens
aagatgcagagtctcgtagaa

SEQ ID NO: 1023 - RNA, 21 nt, RNAi
gaugcagagucucguagaauu

SEQ ID NO: 1024 - RNA, 21 nt, RNAi
uucuacgucucagagcaucuu

SEQ ID NO: 1025 - DNA, 21 bp, Homo sapiens
aagagaacttcatattcgaac

SEQ ID NO: 1026 - RNA, 21 nt, RNAi
gagaacuucauauucgaacuu

SEQ ID NO: 1027 - RNA, 21 nt, RNAi
uucucuugaaguauaagcuug

SEQ ID NO: 1028 - DNA, 21 bp, Homo sapiens
aacatatgcagttattccact

SEQ ID NO: 1029 - RNA, 21 nt, RNAi
cauaugcaguuauuccacuuu

SEQ ID NO: 1030 - RNA, 21 nt, RNAi
uuguauacgucaauaagguga

SEQ ID NO: 1031 - DNA, 21 bp, Homo sapiens
aacaacactgctggtttgaga

SEQ ID NO: 1032 - RNA, 21 nt, RNAi
caacacugcugguuugagauu

SEQ ID NO: 1033 - RNA, 21 nt, RNAi
uuguugugacgaccaaacucu

SEQ ID NO: 1034 - DNA, 21 bp, Homo sapiens
aacactgctggtttgagacct

SEQ ID NO: 1035 - RNA, 21 nt, RNAi
cacugcugguuugagaccuuu

SEQ ID NO: 1036 - RNA, 21 nt, RNAi
uugugacgaccaaacucugga

SEQ ID NO: 1037 - DNA, 21 bp, Homo sapiens
aaagaacttcgccagtgtatg

SEQ ID NO: 1038 - RNA, 21 nt, RNAi
agaacuucgccaguguauguu

SEQ ID NO: 1039 - RNA, 21 nt, RNAi
uuucuugaagcggucacauac

SEQ ID NO: 1040 - DNA, 21 bp, Homo sapiens
aagaacttcgccagtgtatgc

SEQ ID NO: 1041 - RNA, 21 nt, RNAi
gaacuucgccaguguaugcuu

SEQ ID NO: 1042 - RNA, 21 nt, RNAi
uucuugaagcggucacauacg

SEQ ID NO: 1043 - DNA, 21 bp, Homo sapiens
aacttcgccagtgtatgctac

SEQ ID NO: 1044 - RNA, 21 nt, RNAi
cuucgccaguguaugcuacuu

SEQ ID NO: 1045 - RNA, 21 nt, RNAi
uugaagcggucacauacgaug

SEQ ID NO: 1046 - DNA, 21 bp, Homo sapiens
aaagtcagcagctttatctga

SEQ ID NO: 1047 - RNA, 21 nt, RNAi
agucagcagcuuuaucugauu

SEQ ID NO: 1048 - RNA, 21 nt, RNAi
uuucagucgucgaaauagacu

SEQ ID NO: 1049 - DNA, 21 bp, Homo sapiens
aagtcagcagctttatctgaa

SEQ ID NO: 1050 - RNA, 21 nt, RNAi
gucagcagcuuuaucugaauu

SEQ ID NO: 1051 - RNA, 21 nt, RNAi
uucagucgucgaaauagacuu

SEQ ID NO: 1052 - DNA, 21 bp, Homo sapiens
aaactcaaagtattccgagaa

SEQ ID NO: 1053 - RNA, 21 nt, RNAi
acucaaaguauuccgagaauu

SEQ ID NO: 1054 - RNA, 21 nt, RNAi
uuugaguuucauaaggcucuu

SEQ ID NO: 1055 - DNA, 21 bp, Homo sapiens
aactcaaagtattccgagaat

SEQ ID NO: 1056 - RNA, 21 nt, RNAi
cucaaaguauuccgagaauuu

SEQ ID NO: 1057 - RNA, 21 nt, RNAi
uugaguuucauaaggcucuua

SEQ ID NO: 1058 - DNA, 21 bp, Homo sapiens
aaagtattccgagaatttctc

SEQ ID NO: 1059 - RNA, 21 nt, RNAi
aguauuccgagaauuucucuu

SEQ ID NO: 1060 - RNA, 21 nt, RNAi
uuucauaaggcucuuaaagag

SEQ ID NO: 1061 - DNA, 21 bp, Homo sapiens
aagtattccgagaatttctcc

SEQ ID NO: 1062 - RNA, 21 nt, RNAi
guauuccgagaauuucuccuu

SEQ ID NO: 1063 - RNA, 21 nt, RNAi
uucauaaggcucuuaaagagg

SEQ ID NO: 1064 - DNA, 21 bp, Homo sapiens
aatgcgtacatgtagatttca

SEQ ID NO: 1065 - RNA, 21 nt, RNAi
ugcguacauguagauuucauu

SEQ ID NO: 1066 - RNA, 21 nt, RNAi
uuacgcauguacaucuaaagu

SEQ ID NO: 1067 - DNA, 21 bp, Homo sapiens
aaacctttgaagttccagaaa

SEQ ID NO: 1068 - RNA, 21 nt, RNAi
accuuugaaguuccagaaauu

SEQ ID NO: 1069 - RNA, 21 nt, RNAi
uuuggaaacuucaaggucuuu

SEQ ID NO: 1070 - DNA, 21 bp, Homo sapiens
aacctttgaagttccagaaat

SEQ ID NO: 1071 - RNA, 21 nt, RNAi
ccuuugaaguuccagaaauuu

SEQ ID NO: 1072 - RNA, 21 nt, RNAi
uuggaaacuucaaggucuuua

SEQ ID NO: 1073 - DNA, 21 bp, Homo sapiens
aagttccagaaattgtgccat

SEQ ID NO: 1074 - RNA, 21 nt, RNAi
guuccagaaauugugccauuu

SEQ ID NO: 1075 - RNA, 21 nt, RNAi
uucaaggucuuuaacacggua

SEQ ID NO: 1076 - DNA, 21 bp, Homo sapiens
aaattgtgccatttcgcctga

SEQ ID NO: 1077 - RNA, 21 nt, RNAi
auugugccauuucgccugauu

SEQ ID NO: 1078 - RNA, 21 nt, RNAi
uuuaacacgguaaagcggacu

SEQ ID NO: 1079 - DNA, 21 bp, Homo sapiens
aattgtgccatttcgcctgac

SEQ ID NO: 1080 - RNA, 21 nt, RNAi
uugugccauuucgccugacuu

SEQ ID NO: 1081 - RNA, 21 nt, RNAi
uuaacacgguaaagcggacug

SEQ ID NO: 1082 - DNA, 21 bp, Homo sapiens
aagagcatgtgaagttacaat

SEQ ID NO: 1083 - RNA, 21 nt, RNAi
gagcaugugaaguuacaauuu

SEQ ID NO: 1084 - RNA, 21 nt, RNAi
uucucguacacuucaauguua

SEQ ID NO: 1085 - DNA, 21 bp, Homo sapiens
aagttacaatgaggctgatgc

SEQ ID NO: 1086 - RNA, 21 nt, RNAi
guuacaaugaggcugaugcuu

SEQ ID NO: 1087 - RNA, 21 nt, RNAi
uucaauguuacuccgacuacg

SEQ ID NO: 1088 - DNA, 21 bp, Homo sapiens
aatgaggctgatgcgtgatca

SEQ ID NO: 1089 - RNA, 21 nt, RNAi
ugaggcugaugcgugaucauu

SEQ ID NO: 1090 - RNA, 21 nt, RNAi
uuacuccgacuacgcacuagu

SEQ ID NO: 1091 - DNA, 21 bp, Homo sapiens
aatggagtaaaccagtgaaag

SEQ ID NO: 1092 - RNA, 21 nt, RNAi
uggaguaaaccagugaaaguu

SEQ ID NO: 1093 - RNA, 21 nt, RNAi
uuaccucauuuggucacuuuc

SEQ ID NO: 1094 - DNA, 21 bp, Homo sapiens
aaagcgccactgaatgaaact

SEQ ID NO: 1095 - RNA, 21 nt, RNAi
agcgccacugaaugaaacuuu

SEQ ID NO: 1096 - RNA, 21 nt, RNAi
uuucgcggugacuuacuuuga

SEQ ID NO: 1097 - DNA, 21 bp, Homo sapiens
aagcgccactgaatgaaactg

SEQ ID NO: 1098 - RNA, 21 nt, RNAi
gcgccacugaaugaaacuguu

SEQ ID NO: 1099 - RNA, 21 nt, RNAi
uucgcggugacuuacuuugac

SEQ ID NO: 1100 - DNA, 21 bp, Homo sapiens
aatgaaactggagaagttgtc

SEQ ID NO: 1101 - RNA, 21 nt, RNAi
ugaaacuggagaaguugucuu

SEQ ID NO: 1102 - RNA, 21 nt, RNAi
uuacuuugaccucuucaacag

SEQ ID NO: 1103 - DNA, 21 bp, Homo sapiens
aaactggagaagttgtcaatg

SEQ ID NO: 1104 - RNA, 21 nt, RNAi
acuggagaaguugucaauguu

SEQ ID NO: 1105 - RNA, 21 nt, RNAi
uuugaccucuucaacaguuac

SEQ ID NO: 1106 - DNA, 21 bp, Homo sapiens
aactggagaagttgtcaatga

SEQ ID NO: 1107 - RNA, 21 nt, RNAi
cuggagaaguugucaaugauu

SEQ ID NO: 1108 - RNA, 21 nt, RNAi
uugaccucuucaacaguuacu

SEQ ID NO: 1109 - DNA, 21 bp, Homo sapiens
aaggtgtaatcaagactcgaa

SEQ ID NO: 1110 - RNA, 21 nt, RNAi
gguguaaucaagacucgaauu

SEQ ID NO: 1111 - RNA, 21 nt, RNAi
uuccacauuaguucugagcuu

SEQ ID NO: 1112 - DNA, 21 bp, Homo sapiens
aatcaagactcgaaatagagt

SEQ ID NO: 1113 - RNA, 21 nt, RNAi
ucaagacucgaaauagaguuu

SEQ ID NO: 1114 - RNA, 21 nt, RNAi
uuaguucugagcuuuaucuca

SEQ ID NO: 1115 - DNA, 21 bp, Homo sapiens
aagactcgaaatagagtgaca

SEQ ID NO: 1116 - RNA, 21 nt, RNAi
gacucgaaauagagugacauu

SEQ ID NO: 1117 - RNA, 21 nt, RNAi
uucugagcuuuaucucacugu

SEQ ID NO: 1118 - DNA, 21 bp, Homo sapiens
aaatagagtgacaggactgcc

SEQ ID NO: 1119 - RNA, 21 nt, RNAi
auagagugacaggacugccuu

SEQ ID NO: 1120 - RNA, 21 nt, RNAi
uuuaucucacuguccugacgg

SEQ ID NO: 1121 - DNA, 21 bp, Homo sapiens
aatagagtgacaggactgccg

SEQ ID NO: 1122 - RNA, 21 nt, RNAi
uagagugacaggacugccguu

SEQ ID NO: 1123 - RNA, 21 nt, RNAi
uuaucucacuguccugacggc

SEQ ID NO: 1124 - DNA, 21 bp, Homo sapiens
aaggacatgtgcattacctta

SEQ ID NO: 1125 - RNA, 21 nt, RNAi
ggacaugugcauuaccuuauu

SEQ ID NO: 1126 - RNA, 21 nt, RNAi
uuccuguacacguaauggaau

SEQ ID NO: 1127 - DNA, 21 bp, Homo sapiens
aaacttactatgccagatgta

SEQ ID NO: 1128 - RNA, 21 nt, RNAi
acuuacuaugccagauguauu

SEQ ID NO: 1129 - RNA, 21 nt, RNAi
uuugaaugauacggucuacau

SEQ ID NO: 1130 - DNA, 21 bp, Homo sapiens
aacttactatgccagatgtat

SEQ ID NO: 1131 - RNA, 21 nt, RNAi
cuuacuaugccagauguauuu

SEQ ID NO: 1132 - RNA, 21 nt, RNAi
uugaaugauacggucuacaua

SEQ ID NO: 1133 - DNA, 21 bp, Homo sapiens
aatgcatttggtatgaatctg

SEQ ID NO: 1134 - RNA, 21 nt, RNAi
ugcauuugguaugaaucuguu

SEQ ID NO: 1135 - RNA, 21 nt, RNAi
uuacguaaaccauacuuagac

SEQ ID NO: 1136 - DNA, 21 bp, Homo sapiens
aatctgtggttgtatctgttc

SEQ ID NO: 1137 - RNA, 21 nt, RNAi
ucugugguuguaucuguucuu

SEQ ID NO: 1138 - RNA, 21 nt, RNAi
uuagacaccaacauagacaag

SEQ ID NO: 1139 - DNA, 21 bp, Homo sapiens
aaatttacgttctcagcaact

SEQ ID NO: 1140 - RNA, 21 nt, RNAi
auuuacguucucagcaacuuu

SEQ ID NO: 1141 - RNA, 21 nt, RNAi
uuuaaaugcaagagucguuga

SEQ ID NO: 1142 - DNA, 21 bp, Homo sapiens
aatttacgttctcagcaactg

SEQ ID NO: 1143 - RNA, 21 nt, RNAi
uuuacguucucagcaacuguu

SEQ ID NO: 1144 - RNA, 21 nt, RNAi
uuaaaugcaagagucguugac

SEQ ID NO: 1145 - DNA, 21 bp, Homo sapiens
aactgttatttctctctgatc

SEQ ID NO: 1146 - RNA, 21 nt, RNAi
cuguuauuucucucugaucuu

SEQ ID NO: 1147 - RNA, 21 nt, RNAi
uugacaauaaagagagacuag

SEQ ID NO: 1148 - DNA, 21 bp, Homo sapiens
cagcggtacgtttggagacgc

SEQ ID NO: 1149 - RNA, 21 nt, RNAi
gcgguacguuuggagacgcuu

SEQ ID NO: 1150 - RNA, 21 nt, RNAi
uucgccaugcaaaccucugcg

SEQ ID NO: 1151 - DNA, 21 bp, Homo sapiens
cagtgccacaccagaggaata

SEQ ID NO: 1152 - RNA, 21 nt, RNAi
gugccacaccagaggaauauu

SEQ ID NO: 1153 - RNA, 21 nt, RNAi
uucacgguguggucuccuuau

SEQ ID NO: 1154 - DNA, 21 bp, Homo sapiens
cacaccagaggaatataatac

SEQ ID NO: 1155 - RNA, 21 nt, RNAi
caccagaggaauauaauacuu

SEQ ID NO: 1156 - RNA, 21 nt, RNAi
uuguggucuccuuauauuaug

SEQ ID NO: 1157 - DNA, 21 bp, Homo sapiens
caccagaggaatataatacag

SEQ ID NO: 1158 - RNA, 21 nt, RNAi
ccagaggaauauaauacaguu

SEQ ID NO: 1159 - RNA, 21 nt, RNAi
uuggucuccuuauauuauguc

SEQ ID NO: 1160 - DNA, 21 bp, Homo sapiens
cagaggaatataatacagttg

SEQ ID NO: 1161 - RNA, 21 nt, RNAi
gaggaauauaauacaguuguu

SEQ ID NO: 1162 - RNA, 21 nt, RNAi
uucuccuuauauuaugucaac

SEQ ID NO: 1163 - DNA, 21 bp, Homo sapiens
cagttgtacagaagccaagac

SEQ ID NO: 1164 - RNA, 21 nt, RNAi
guuguacagaagccaagacuu

SEQ ID NO: 1165 - RNA, 21 nt, RNAi
uucaacaugucuucgguucug

SEQ ID NO: 1166 - DNA, 21 bp, Homo sapiens
cagaagccaagacaaattctg

SEQ ID NO: 1167 - RNA, 21 nt, RNAi
gaagccaagacaaauucuguu

SEQ ID NO: 1168 - RNA, 21 nt, RNAi
uucuucgguucuguuuaagac

SEQ ID NO: 1169 - DNA, 21 bp, Homo sapiens
caagacaaattctgtgtcaat

SEQ ID NO: 1170 - RNA, 21 nt, RNAi
agacaaauucugugucaauuu

SEQ ID NO: 1171 - RNA, 21 nt, RNAi
uuucuguuuaagacacaguua

SEQ ID NO: 1172 - DNA, 21 bp, Homo sapiens
caattcattgaccggatactt

SEQ ID NO: 1173 - RNA, 21 nt, RNAi
auucauugaccggauacuuuu

SEQ ID NO: 1174 - RNA, 21 nt, RNAi
uuuaaguaacuggccuaugaa

SEQ ID NO: 1175 - DNA, 21 bp, Homo sapiens
cattgaccggatacttacaga

SEQ ID NO: 1176 - RNA, 21 nt, RNAi
uugaccggauacuuacagauu

SEQ ID NO: 1177 - RNA, 21 nt, RNAi
uuaacuggccuaugaaugucu

SEQ ID NO: 1178 - DNA, 21 bp, Homo sapiens
cagatgtaaatgttgttgctg

SEQ ID NO: 1179 - RNA, 21 nt, RNAi
gauguaaauguuguugcuguu

SEQ ID NO: 1180 - RNA, 21 nt, RNAi
uucuacauuuacaacaacgac

SEQ ID NO: 1181 - DNA, 21 bp, Homo sapiens
cagccaacctccgtgatgttg

SEQ ID NO: 1182 - RNA, 21 nt, RNAi
gccaaccuccgugauguuguu

SEQ ID NO: 1183 - RNA, 21 nt, RNAi
uucgguuggaggcacuacaac

SEQ ID NO: 1184 - DNA, 21 bp, Homo sapiens
caacctccgtgatgttgcttg

SEQ ID NO: 1185 - RNA, 21 nt, RNAi
accuccgugauguugcuuguu

SEQ ID NO: 1186 - RNA, 21 nt, RNAi
uuuggaggcacuacaacgaac

SEQ ID NO: 1187 - DNA, 21 bp, Homo sapiens
catccagcatatcatgaaatc

SEQ ID NO: 1188 - RNA, 21 nt, RNAi
uccagcauaucaugaaaucuu

SEQ ID NO: 1189 - RNA, 21 nt, RNAi
uuaggucguauaguacuuuag

SEQ ID NO: 1190 - DNA, 21 bp, Homo sapiens
cagcatatcatgaaatcctcc

SEQ ID NO: 1191 - RNA, 21 nt, RNAi
gcauaucaugaaauccuccuu

SEQ ID NO: 1192 - RNA, 21 nt, RNAi
uucguauaguacuuuaggagg

SEQ ID NO: 1193 - DNA, 21 bp, Homo sapiens
catgagcgcaaaggcagttgt

SEQ ID NO: 1194 - RNA, 21 nt, RNAi
ugagcgcaaaggcaguuguuu

SEQ ID NO: 1195 - RNA, 21 nt, RNAi
uuacucgcguuuccgucaaca

SEQ ID NO: 1196 - DNA, 21 bp, Homo sapiens
caaaggcagttgtattgaatt

SEQ ID NO: 1197 - RNA, 21 nt, RNAi
aaggcaguuguauugaauuuu

SEQ ID NO: 1198 - RNA, 21 nt, RNAi
uuuuccgucaacauaacuuaa

SEQ ID NO: 1199 - DNA, 21 bp, Homo sapiens
cagtaattggatcataacgag

SEQ ID NO: 1200 - RNA, 21 nt, RNAi
guaauuggaucauaacgaguu

SEQ ID NO: 1201 - RNA, 21 nt, RNAi
uucauuaaccuaguauugcuc

SEQ ID NO: 1202 - DNA, 21 bp, Homo sapiens
cataacgagacttctgcggat

SEQ ID NO: 1203 - RNA, 21 nt, RNAi
uaacgagacuucugcggauuu

SEQ ID NO: 1204 - RNA, 21 nt, RNAi
uuauugcucugaagacgccua

SEQ ID NO: 1205 - DNA, 21 bp, Homo sapiens
catgctgtggaatggccagtg

SEQ ID NO: 1206 - RNA, 21 nt, RNAi
ugcuguggaauggccaguguu

SEQ ID NO: 1207 - RNA, 21 nt, RNAi
uuacgacaccuuaccggucac

SEQ ID NO: 1208 - DNA, 21 bp, Homo sapiens
caatcagctcctttgcagttg

SEQ ID NO: 1209 - RNA, 21 nt, RNAi
aucagcuccuuugcaguuguu

SEQ ID NO: 1210 - RNA, 21 nt, RNAi
uuuagucgaggaaacgucaac

SEQ ID NO: 1211 - DNA, 21 bp, Homo sapiens
cagctcctttgcagttgatga

SEQ ID NO: 1212 - RNA, 21 nt, RNAi
gcuccuuugcaguugaugauu

SEQ ID NO: 1213 - RNA, 21 nt, RNAi
uucgaggaaacgucaacuacu

SEQ ID NO: 1214 - DNA, 21 bp, Homo sapiens
caagaactcttactttggcag

SEQ ID NO: 1215 - RNA, 21 nt, RNAi
agaacucuuacuuuggcaguu

SEQ ID NO: 1216 - RNA, 21 nt, RNAi
uuucuugagaaugaaaccguc

SEQ ID NO: 1217 - DNA, 21 bp, Homo sapiens
cagataggttgtgttctgcta

SEQ ID NO: 1218 - RNA, 21 nt, RNAi
gauagguuguguucugcuauu

SEQ ID NO: 1219 - RNA, 21 nt, RNAi
uucuauccaacacaagacgau

SEQ ID NO: 1220 - DNA, 21 bp, Homo sapiens
cagcttggaggactaccagca

SEQ ID NO: 1221 - RNA, 21 nt, RNAi
gcuuggaggacuaccagcauu

SEQ ID NO: 1222 - RNA, 21 nt, RNAi
uucgaaccuccugauggucgu

SEQ ID NO: 1223 - DNA, 21 bp, Homo sapiens
cagcacaaccagctagcactt

SEQ ID NO: 1224 - RNA, 21 nt, RNAi
gcacaaccagcuagcacuuuu

SEQ ID NO: 1225 - RNA, 21 nt, RNAi
uucguguuggucgaucgugaa

SEQ ID NO: 1226 - DNA, 21 bp, Homo sapiens
caccttgtagaaatggatact

SEQ ID NO: 1227 - RNA, 21 nt, RNAi
ccuuguagaaauggauacuuu

SEQ ID NO: 1228 - RNA, 21 nt, RNAi
uuggaacaucuuuaccuauga

SEQ ID NO: 1229 - DNA, 21 bp, Homo sapiens
caattgaaactctatgaagag

SEQ ID NO: 1230 - RNA, 21 nt, RNAi
auugaaacucuaugaagaguu

SEQ ID NO: 1231 - RNA, 21 nt, RNAi
uuuaacuuugagauacuucuc

SEQ ID NO: 1232 - DNA, 21 bp, Homo sapiens
caaagctgataaagacactat

SEQ ID NO: 1233 - RNA, 21 nt, RNAi
aagcugauaaagacacuauuu

SEQ ID NO: 1234 - RNA, 21 nt, RNAi
uuuucgacuauuucugugaua

SEQ ID NO: 1235 - DNA, 21 bp, Homo sapiens
catgtttgaagacggtgtgct

SEQ ID NO: 1236 - RNA, 21 nt, RNAi
uguuugaagacggugugcuuu

SEQ ID NO: 1237 - RNA, 21 nt, RNAi
uuacaaacuucugccacacga

SEQ ID NO: 1238 - DNA, 21 bp, Homo sapiens
catgcggcttaagtctgattt

SEQ ID NO: 1239 - RNA, 21 nt, RNAi
ugcggcuuaagucugauuuuu

SEQ ID NO: 1240 - RNA, 21 nt, RNAi
uuacgccgaauucagacuaaa

SEQ ID NO: 1241 - DNA, 21 bp, Homo sapiens
cagctttgtgccatttactgc

SEQ ID NO: 1242 - RNA, 21 nt, RNAi
gcuuugugccauuuacugcuu

SEQ ID NO: 1243 - RNA, 21 nt, RNAi
uucgaaacacgguaaaugacg

SEQ ID NO: 1244 - DNA, 21 bp, Homo sapiens
catttactgcagtatttcctt

SEQ ID NO: 1245 - RNA, 21 nt, RNAi
uuuacugcaguauuuccuuuu

SEQ ID NO: 1246 - RNA, 21 nt, RNAi
uuaaaugacgucauaaaggaa

SEQ ID NO: 1247 - DNA, 21 bp, Homo sapiens
caagtcaggaaggtctatgtg

SEQ ID NO: 1248 - RNA, 21 nt, RNAi
agucaggaaggucuauguguu

SEQ ID NO: 1249 - RNA, 21 nt, RNAi
uuucaguccuuccagauacac

SEQ ID NO: 1250 - DNA, 21 bp, Homo sapiens
caggaaggtctatgtgagaaa

SEQ ID NO: 1251 - RNA, 21 nt, RNAi
ggaaggucuaugugagaaauu

SEQ ID NO: 1252 - RNA, 21 nt, RNAi
uuccuuccagauacacucuuu

SEQ ID NO: 1253 - DNA, 21 bp, Homo sapiens
cattgaggagattcaatgcca

SEQ ID NO: 1254 - RNA, 21 nt, RNAi
uugaggagauucaaugccauu

SEQ ID NO: 1255 - RNA, 21 nt, RNAi
uuaacuccucuaaguuacggu

SEQ ID NO: 1256 - DNA, 21 bp, Homo sapiens
caatgccaaactcaacaggaa

SEQ ID NO: 1257 - RNA, 21 nt, RNAi
augccaaacucaacaggaauu

SEQ ID NO: 1258 - RNA, 21 nt, RNAi
uuuacgguuugaguuguccuu

SEQ ID NO: 1259 - DNA, 21 bp, Homo sapiens
cagcagtaatagtgatggaat

SEQ ID NO: 1260 - RNA, 21 nt, RNAi
gcaguaauagugauggaauuu

SEQ ID NO: 1261 - RNA, 21 nt, RNAi
uucgucauuaucacuaccuua

SEQ ID NO: 1262 - DNA, 21 bp, Homo sapiens
cagtaatagtgatggaatatc

SEQ ID NO: 1263 - RNA, 21 nt, RNAi
guaauagugauggaauaucuu

SEQ ID NO: 1264 - RNA, 21 nt, RNAi
uucauuaucacuaccuuauag

SEQ ID NO: 1265 - DNA, 21 bp, Homo sapiens
cagactgaggaaattaaacat

SEQ ID NO: 1266 - RNA, 21 nt, RNAi
gacugaggaaauuaaacauuu

SEQ ID NO: 1267 - RNA, 21 nt, RNAi
uucugacuccuuuaauuugua

SEQ ID NO: 1268 - DNA, 21 bp, Homo sapiens
catattatggagtgcactgaa

SEQ ID NO: 1269 - RNA, 21 nt, RNAi
uauuauggagugcacugaauu

SEQ ID NO: 1270 - RNA, 21 nt, RNAi
uuauaauaccucacgugacuu

SEQ ID NO: 1271 - DNA, 21 bp, Homo sapiens
cactgaaacagaaagctgaat

SEQ ID NO: 1272 - RNA, 21 nt, RNAi
cugaaacagaaagcugaauuu

SEQ ID NO: 1273 - RNA, 21 nt, RNAi
uugacuuugucuuucgacuua

SEQ ID NO: 1274 - DNA, 21 bp, Homo sapiens
cagtggcctaaagaatcctgt

SEQ ID NO: 1275 - RNA, 21 nt, RNAi
guggccuaaagaauccuguuu

SEQ ID NO: 1276 - RNA, 21 nt, RNAi
uucaccggauuucuuaggaca

SEQ ID NO: 1277 - DNA, 21 bp, Homo sapiens
caactgactgctctgtgtact

SEQ ID NO: 1278 - RNA, 21 nt, RNAi
acugacugcucuguguacuuu

SEQ ID NO: 1279 - RNA, 21 nt, RNAi
uuugacugacgagacacauga

SEQ ID NO: 1280 - DNA, 21 bp, Homo sapiens
catgaactgccgtactttcaa

SEQ ID NO: 1281 - RNA, 21 nt, RNAi
ugaacugccguacuuucaauu

SEQ ID NO: 1282 - RNA, 21 nt, RNAi
uuacuugacggcaugaaaguu

SEQ ID NO: 1283 - DNA, 21 bp, Homo sapiens
caaggactgtcaacataaatc

SEQ ID NO: 1284 - RNA, 21 nt, RNAi
aggacugucaacauaaaucuu

SEQ ID NO: 1285 - RNA, 21 nt, RNAi
uuuccugacaguuguauuuag

SEQ ID NO: 1286 - DNA, 21 bp, Homo sapiens
cataaatccaagaagaaacct

SEQ ID NO: 1287 - RNA, 21 nt, RNAi
uaaauccaagaagaaaccuuu

SEQ ID NO: 1288 - RNA, 21 nt, RNAi
uuauuuagguucuucuuugga

SEQ ID NO: 1289 - DNA, 21 bp, Homo sapiens
caagaagaaaccttctgtagt

SEQ ID NO: 1290 - RNA, 21 nt, RNAi
agaagaaaccuucuguaguuu

SEQ ID NO: 1291 - RNA, 21 nt, RNAi
uuucuucuuuggaagacauca

SEQ ID NO: 1292 - DNA, 21 bp, Homo sapiens
cagaaactggacctggaggca

SEQ ID NO: 1293 - RNA, 21 nt, RNAi
gaaacuggaccuggaggcauu

SEQ ID NO: 1294 - RNA, 21 nt, RNAi
uucuuugaccuggaccuccgu

SEQ ID NO: 1295 - DNA, 21 bp, Homo sapiens
caaccattgataaggtggtga

SEQ ID NO: 1296 - RNA, 21 nt, RNAi
accauugauaagguggugauu

SEQ ID NO: 1297 - RNA, 21 nt, RNAi
uuugguaacuauuccaccacu

SEQ ID NO: 1298 - DNA, 21 bp, Homo sapiens
catttgaagatcatatcctgg

SEQ ID NO: 1299 - RNA, 21 nt, RNAi
uuugaagaucauauccugguu

SEQ ID NO: 1300 - RNA, 21 nt, RNAi
uuaaacuucuaguauaggacc

SEQ ID NO: 1301 - DNA, 21 bp, Homo sapiens
catatcctggaagatttatgt

SEQ ID NO: 1302 - RNA, 21 nt, RNAi
uauccuggaagauuuauguuu

SEQ ID NO: 1303 - RNA, 21 nt, RNAi
uuauaggaccuucuaaauaca

SEQ ID NO: 1304 - DNA, 21 bp, Homo sapiens
cattctgatgatggctgttta

SEQ ID NO: 1305 - RNA, 21 nt, RNAi
uucugaugauggcuguuuauu

SEQ ID NO: 1306 - RNA, 21 nt, RNAi
uuaagacuacuaccgacaaau

SEQ ID NO: 1307 - DNA, 21 bp, Homo sapiens
cacatttgccgctaatcttct

SEQ ID NO: 1308 - RNA, 21 nt, RNAi
cauuugccgcuaaucuucuuu

SEQ ID NO: 1309 - RNA, 21 nt, RNAi
uuguaaacggcgauuagaaga

SEQ ID NO: 1310 - DNA, 21 bp, Homo sapiens
catttgccgctaatcttctaa

SEQ ID NO: 1311 - RNA, 21 nt, RNAi
uuugccgcuaaucuucuaauu

SEQ ID NO: 1312 - RNA, 21 nt, RNAi
uuaaacggcgauuagaagauu

SEQ ID NO: 1313 - DNA, 21 bp, Homo sapiens
cattaagctgtaggatttcag

SEQ ID NO: 1314 - RNA, 21 nt, RNAi
uuaagcuguaggauuucaguu

SEQ ID NO: 1315 - RNA, 21 nt, RNAi
uuaauucgacauccuaaaguc

SEQ ID NO: 1316 - DNA, 21 bp, Homo sapiens
cagatagctattcaccacagg

SEQ ID NO: 1317 - RNA, 21 nt, RNAi
gauagcuauucaccacagguu

SEQ ID NO: 1318 - RNA, 21 nt, RNAi
uucuaucgauaaguggugucc

SEQ ID NO: 1319 - DNA, 21 bp, Homo sapiens
caccacaggcacaatcacgat

SEQ ID NO: 1320 - RNA, 21 nt, RNAi
ccacaggcacaaucacgauuu

SEQ ID NO: 1321 - RNA, 21 nt, RNAi
uugguguccguguuagugcua

SEQ ID NO: 1322 - DNA, 21 bp, Homo sapiens
cacaggcacaatcacgatgtg

SEQ ID NO: 1323 - RNA, 21 nt, RNAi
caggcacaaucacgauguguu

SEQ ID NO: 1324 - RNA, 21 nt, RNAi
uuguccguguuagugcuacac

SEQ ID NO: 1325 - DNA, 21 bp, Homo sapiens
caggcacaatcacgatgtgtg

SEQ ID NO: 1326 - RNA, 21 nt, RNAi
ggcacaaucacgauguguguu

SEQ ID NO: 1327 - RNA, 21 nt, RNAi
uuccguguuagugcuacacac

SEQ ID NO: 1328 - DNA, 21 bp, Homo sapiens
cacaatcacgatgtgtgtttc

SEQ ID NO: 1329 - RNA, 21 nt, RNAi
caaucacgauguguguuucuu

SEQ ID NO: 1330 - RNA, 21 nt, RNAi
uuguuagugcuacacacaaag

SEQ ID NO: 1331 - DNA, 21 bp, Homo sapiens
caatcacgatgtgtgtttctt

SEQ ID NO: 1332 - RNA, 21 nt, RNAi
aucacgauguguguuucuuuu

SEQ ID NO: 1333 - RNA, 21 nt, RNAi
uuuagugcuacacacaaagaa

SEQ ID NO: 1334 - DNA, 21 bp, Homo sapiens
cacgatgtgtgtttcttctga

SEQ ID NO: 1335 - RNA, 21 nt, RNAi
cgauguguguuucuucugauu

SEQ ID NO: 1336 - RNA, 21 nt, RNAi
uugcuacacacaaagaagacu

SEQ ID NO: 1337 - DNA, 21 bp, Homo sapiens
caagaagaatattccttgagt

SEQ ID NO: 1338 - RNA, 21 nt, RNAi
agaagaauauuccuugaguuu

SEQ ID NO: 1339 - RNA, 21 nt, RNAi
uuucuucuuauaaggaacuca

SEQ ID NO: 1340 - DNA, 21 bp, Homo sapiens
cagcagcagaattcttgtaac

SEQ ID NO: 1341 - RNA, 21 nt, RNAi
gcagcagaauucuuguaacuu

SEQ ID NO: 1342 - RNA, 21 nt, RNAi
uucgucgucuuaagaacauug

SEQ ID NO: 1343 - DNA, 21 bp, Homo sapiens
cagcagaattcttgtaacaga

SEQ ID NO: 1344 - RNA, 21 nt, RNAi
gcagaauucuuguaacagauu

SEQ ID NO: 1345 - RNA, 21 nt, RNAi
uucgucuuaagaacauugucu

SEQ ID NO: 1346 - DNA, 21 bp, Homo sapiens
cagaattcttgtaacagagtt

SEQ ID NO: 1347 - RNA, 21 nt, RNAi
gaauucuuguaacagaguuuu

SEQ ID NO: 1348 - RNA, 21 nt, RNAi
uucuuaagaacauugucucaa

SEQ ID NO: 1349 - DNA, 21 bp, Homo sapiens
caaagatgattctgacattgt

SEQ ID NO: 1350 - RNA, 21 nt, RNAi
aagaugauucugacauuguuu

SEQ ID NO: 1351 - RNA, 21 nt, RNAi
uuuucuacuaagacuguaaca

SEQ ID NO: 1352 - DNA, 21 bp, Homo sapiens
cattgtcaagaaagaatttgc

SEQ ID NO: 1353 - RNA, 21 nt, RNAi
uugucaagaaagaauuugcuu

SEQ ID NO: 1354 - RNA, 21 nt, RNAi
uuaacaguucuuucuuaaacg

SEQ ID NO: 1355 - DNA, 21 bp, Homo sapiens
caacttgtctgtactcttcac

SEQ ID NO: 1356 - RNA, 21 nt, RNAi
acuugucuguacucuucacuu

SEQ ID NO: 1357 - RNA, 21 nt, RNAi
uuugaacagacaugagaagug

SEQ ID NO: 1358 - DNA, 21 bp, Homo sapiens
caagttctttaacagaacctt

SEQ ID NO: 1359 - RNA, 21 nt, RNAi
aguucuuuaacagaaccuuuu

SEQ ID NO: 1360 - RNA, 21 nt, RNAi
uuucaagaaauugucuuggaa

SEQ ID NO: 1361 - DNA, 21 bp, Homo sapiens
cagaacctttctctgaacacg

SEQ ID NO: 1362 - RNA, 21 nt, RNAi
gaaccuuucucugaacacguu

SEQ ID NO: 1363 - RNA, 21 nt, RNAi
uucuuggaaagagacuugugc

SEQ ID NO: 1364 - DNA, 21 bp, Homo sapiens
cacggacatgtggacctcttc

SEQ ID NO: 1365 - RNA, 21 nt, RNAi
cggacauguggaccucuucuu

SEQ ID NO: 1366 - RNA, 21 nt, RNAi
uugccuguacaccuggagaag

SEQ ID NO: 1367 - DNA, 21 bp, Homo sapiens
catgtggacctcttctgtagg

SEQ ID NO: 1368 - RNA, 21 nt, RNAi
uguggaccucuucuguagguu

SEQ ID NO: 1369 - RNA, 21 nt, RNAi
uuacaccuggagaagacaucc

SEQ ID NO: 1370 - DNA, 21 bp, Homo sapiens
cacttctcaacatgaatgttc

SEQ ID NO: 1371 - RNA, 21 nt, RNAi
cuucucaacaugaauguucuu

SEQ ID NO: 1372 - RNA, 21 nt, RNAi
uugaagaguuguacuuacaag

SEQ ID NO: 1373 - DNA, 21 bp, Homo sapiens
caacatgaatgttcatcttct

SEQ ID NO: 1374 - RNA, 21 nt, RNAi
acaugaauguucaucuucuuu

SEQ ID NO: 1375 - RNA, 21 nt, RNAi
uuuguacuuacaaguagaaga

SEQ ID NO: 1376 - DNA, 21 bp, Homo sapiens
catgaatgttcatcttctcaa

SEQ ID NO: 1377 - RNA, 21 nt, RNAi
ugaauguucaucuucucaauu

SEQ ID NO: 1378 - RNA, 21 nt, RNAi
uuacuuacaaguagaagaguu

SEQ ID NO: 1379 - DNA, 21 bp, Homo sapiens
catcatctttgtaagcatctt

SEQ ID NO: 1380 - RNA, 21 nt, RNAi
ucaucuuuguaagcaucuuuu

SEQ ID NO: 1381 - RNA, 21 nt, RNAi
uuaguagaaacauucguagaa

SEQ ID NO: 1382 - DNA, 21 bp, Homo sapiens
catctttgtaagcatcttgat

SEQ ID NO: 1383 - RNA, 21 nt, RNAi
ucuuuguaagcaucuugauuu

SEQ ID NO: 1384 - RNA, 21 nt, RNAi
uuagaaacauucguagaacua

SEQ ID NO: 1385 - DNA, 21 bp, Homo sapiens
cagacaaagatgttagagtgg

SEQ ID NO: 1386 - RNA, 21 nt, RNAi
gacaaagauguuagagugguu

SEQ ID NO: 1387 - RNA, 21 nt, RNAi
uucuguuucuacaaucucacc

SEQ ID NO: 1388 - DNA, 21 bp, Homo sapiens
caaagatgttagagtggcttt

SEQ ID NO: 1389 - RNA, 21 nt, RNAi
aagauguuagaguggcuuuuu

SEQ ID NO: 1390 - RNA, 21 nt, RNAi
uuuucuacaaucucaccgaaa

SEQ ID NO: 1391 - DNA, 21 bp, Homo sapiens
caagcacatattggaatcctt

SEQ ID NO: 1392 - RNA, 21 nt, RNAi
agcacauauuggaauccuuuu

SEQ ID NO: 1393 - RNA, 21 nt, RNAi
uuucguguauaaccuuaggaa

SEQ ID NO: 1394 - DNA, 21 bp, Homo sapiens
cacatattggaatccttggac

SEQ ID NO: 1395 - RNA, 21 nt, RNAi
cauauuggaauccuuggacuu

SEQ ID NO: 1396 - RNA, 21 nt, RNAi
uuguauaaccuuaggaaccug

SEQ ID NO: 1397 - DNA, 21 bp, Homo sapiens
catattggaatccttggactc

SEQ ID NO: 1398 - RNA, 21 nt, RNAi
uauuggaauccuuggacucuu

SEQ ID NO: 1399 - RNA, 21 nt, RNAi
uuauaaccuuaggaaccugag

SEQ ID NO: 1400 - DNA, 21 bp, Homo sapiens
caagaaataatgagctgaagg

SEQ ID NO: 1401 - RNA, 21 nt, RNAi
agaaauaaugagcugaagguu

SEQ ID NO: 1402 - RNA, 21 nt, RNAi
uuucuuuauuacucgacuucc

SEQ ID NO: 1403 - DNA, 21 bp, Homo sapiens
catttgcactcttacacttat

SEQ ID NO: 1404 - RNA, 21 nt, RNAi
uuugcacucuuacacuuauuu

SEQ ID NO: 1405 - RNA, 21 nt, RNAi
uuaaacgugagaaugugaaua

SEQ ID NO: 1406 - DNA, 21 bp, Homo sapiens
cactcttacacttattgcatt

SEQ ID NO: 1407 - RNA, 21 nt, RNAi
cucuuacacuuauugcauuuu

SEQ ID NO: 1408 - RNA, 21 nt, RNAi
uugagaaugugaauaacguaa

SEQ ID NO: 1409 - DNA, 21 bp, Homo sapiens
cattgtttgttatccaagtca

SEQ ID NO: 1410 - RNA, 21 nt, RNAi
uuguuuguuauccaagucauu

SEQ ID NO: 1411 - RNA, 21 nt, RNAi
uuaacaaacaauagguucagu

SEQ ID NO: 1412 - DNA, 21 bp, Homo sapiens
caagtcagcatctgtctctgg

SEQ ID NO: 1413 - RNA, 21 nt, RNAi
agucagcaucugucucugguu

SEQ ID NO: 1414 - RNA, 21 nt, RNAi
uuucagucguagacagagacc

SEQ ID NO: 1415 - DNA, 21 bp, Homo sapiens
cagcatctgtctctggagcag

SEQ ID NO: 1416 - RNA, 21 nt, RNAi
gcaucugucucuggagcaguu

SEQ ID NO: 1417 - RNA, 21 nt, RNAi
uucguagacagagaccucguc

SEQ ID NO: 1418 - DNA, 21 bp, Homo sapiens
catctgtctctggagcagcat

SEQ ID NO: 1419 - RNA, 21 nt, RNAi
ucugucucuggagcagcauuu

SEQ ID NO: 1420 - RNA, 21 nt, RNAi
uuagacagagaccucgucgua

SEQ ID NO: 1421 - DNA, 21 bp, Homo sapiens
cagcatacacagaaattagag

SEQ ID NO: 1422 - RNA, 21 nt, RNAi
gcauacacagaaauuagaguu

SEQ ID NO: 1423 - RNA, 21 nt, RNAi
uucguaugugucuuuaaucuc

SEQ ID NO: 1424 - DNA, 21 bp, Homo sapiens
catacacagaaattagagctc

SEQ ID NO: 1425 - RNA, 21 nt, RNAi
uacacagaaauuagagcucuu

SEQ ID NO: 1426 - RNA, 21 nt, RNAi
uuaugugucuuuaaucucgag

SEQ ID NO: 1427 - DNA, 21 bp, Homo sapiens
cacagaaattagagctctggt

SEQ ID NO: 1428 - RNA, 21 nt, RNAi
cagaaauuagagcucugguuu

SEQ ID NO: 1429 - RNA, 21 nt, RNAi
uugucuuuaaucucgagacca

SEQ ID NO: 1430 - DNA, 21 bp, Homo sapiens
cagaaattagagctctggttg

SEQ ID NO: 1431 - RNA, 21 nt, RNAi
gaaauuagagcucugguuguu

SEQ ID NO: 1432 - RNA, 21 nt, RNAi
uucuuuaaucucgagaccaac

SEQ ID NO: 1433 - DNA, 21 bp, Homo sapiens
cactctagtcagatgacagca

SEQ ID NO: 1434 - RNA, 21 nt, RNAi
cucuagucagaugacagcauu

SEQ ID NO: 1435 - RNA, 21 nt, RNAi
uugagaucagucuacugucgu

SEQ ID NO: 1436 - DNA, 21 bp, Homo sapiens
cagatgacagcacttccgaat

SEQ ID NO: 1437 - RNA, 21 nt, RNAi
gaugacagcacuuccgaauuu

SEQ ID NO: 1438 - RNA, 21 nt, RNAi
uucuacugucgugaaggcuua

SEQ ID NO: 1439 - DNA, 21 bp, Homo sapiens
cagcacttccgaatactccat

SEQ ID NO: 1440 - RNA, 21 nt, RNAi
gcacuuccgaauacuccauuu

SEQ ID NO: 1441 - RNA, 21 nt, RNAi
uucgugaaggcuuaugaggua

SEQ ID NO: 1442 - DNA, 21 bp, Homo sapiens
cacttccgaatactccatgcc

SEQ ID NO: 1443 - RNA, 21 nt, RNAi
cuuccgaauacuccaugccuu

SEQ ID NO: 1444 - RNA, 21 nt, RNAi
uugaaggcuuaugagguacgg

SEQ ID NO: 1445 - DNA, 21 bp, Homo sapiens
catgccagaatgctgacgtgc

SEQ ID NO: 1446 - RNA, 21 nt, RNAi
ugccagaaugcugacgugcuu

SEQ ID NO: 1447 - RNA, 21 nt, RNAi
uuacggucuuacgacugcacg

SEQ ID NO: 1448 - DNA, 21 bp, Homo sapiens
caagatgtggctcaccagaga

SEQ ID NO: 1449 - RNA, 21 nt, RNAi
agauguggcucaccagagauu

SEQ ID NO: 1450 - RNA, 21 nt, RNAi
uuucuacaccgaguggucucu

SEQ ID NO: 1451 - DNA, 21 bp, Homo sapiens
caccagagagaaatggcttta

SEQ ID NO: 1452 - RNA, 21 nt, RNAi
ccagagagaaauggcuuuauu

SEQ ID NO: 1453 - RNA, 21 nt, RNAi
uuggucucucuuuaccgaaau

SEQ ID NO: 1454 - DNA, 21 bp, Homo sapiens
cagagagaaatggctttaaat

SEQ ID NO: 1455 - RNA, 21 nt, RNAi
gagagaaauggcuuuaaauuu

SEQ ID NO: 1456 - RNA, 21 nt, RNAi
uucucucuuuaccgaaauuua

SEQ ID NO: 1457 - DNA, 21 bp, Homo sapiens
cattacaagttctactacctg

SEQ ID NO: 1458 - RNA, 21 nt, RNAi
uuacaaguucuacuaccuguu

SEQ ID NO: 1459 - RNA, 21 nt, RNAi
uuaauguucaagaugauggac

SEQ ID NO: 1460 - DNA, 21 bp, Homo sapiens
caagttctactacctgatctt

SEQ ID NO: 1461 - RNA, 21 nt, RNAi
aguucuacuaccugaucuuuu

SEQ ID NO: 1462 - RNA, 21 nt, RNAi
uuucaagaugauggacuagaa

SEQ ID NO: 1463 - DNA, 21 bp, Homo sapiens
cagcttctgctctcattcgaa

SEQ ID NO: 1464 - RNA, 21 nt, RNAi
gcuucugcucucauucgaauu

SEQ ID NO: 1465 - RNA, 21 nt, RNAi
uucgaagacgagaguaagcuu

SEQ ID NO: 1466 - DNA, 21 bp, Homo sapiens
catttggtctgttcttgttcc

SEQ ID NO: 1467 - RNA, 21 nt, RNAi
uuuggucuguucuuguuccuu

SEQ ID NO: 1468 - RNA, 21 nt, RNAi
uuaaaccagacaagaacaagg

SEQ ID NO: 1469 - DNA, 21 bp, Homo sapiens
caaagatgaattagaacgtgc

SEQ ID NO: 1470 - RNA, 21 nt, RNAi
aagaugaauuagaacgugcuu

SEQ ID NO: 1471 - RNA, 21 nt, RNAi
uuuucuacuuaaucuugcacg

SEQ ID NO: 1472 - DNA, 21 bp, Homo sapiens
caagatttccaaggattgcat

SEQ ID NO: 1473 - RNA, 21 nt, RNAi
agauuuccaaggauugcauuu

SEQ ID NO: 1474 - RNA, 21 nt, RNAi
uuucuaaagguuccuaacgua

SEQ ID NO: 1475 - DNA, 21 bp, Homo sapiens
cataatgaattattgctgcgt

SEQ ID NO: 1476 - RNA, 21 nt, RNAi
uaaugaauuauugcugcguuu

SEQ ID NO: 1477 - RNA, 21 nt, RNAi
uuauuacuuaauaacgacgca

SEQ ID NO: 1478 - DNA, 21 bp, Homo sapiens
caatacttgcctcatttgcat

SEQ ID NO: 1479 - RNA, 21 nt, RNAi
auacuugccucauuugcauuu

SEQ ID NO: 1480 - RNA, 21 nt, RNAi
uuuaugaacggaguaaacgua

SEQ ID NO: 1481 - DNA, 21 bp, Homo sapiens
catttgcatccagtgatgatc

SEQ ID NO: 1482 - RNA, 21 nt, RNAi
uuugcauccagugaugaucuu

SEQ ID NO: 1483 - RNA, 21 nt, RNAi
uuaaacguaggucacuacuag

SEQ ID NO: 1484 - DNA, 21 bp, Homo sapiens
catccagtgatgatccatatc

SEQ ID NO: 1485 - RNA, 21 nt, RNAi
uccagugaugauccauaucuu

SEQ ID NO: 1486 - RNA, 21 nt, RNAi
uuaggucacuacuagguauag

SEQ ID NO: 1487 - DNA, 21 bp, Homo sapiens
catatcacctgaactgatggc

SEQ ID NO: 1488 - RNA, 21 nt, RNAi
uaucaccugaacugauggcuu

SEQ ID NO: 1489 - RNA, 21 nt, RNAi
uuauaguggacuugacuaccg

SEQ ID NO: 1490 - DNA, 21 bp, Homo sapiens
cacctgaactgatggctgatt

SEQ ID NO: 1491 - RNA, 21 nt, RNAi
ccugaacugauggcugauuuu

SEQ ID NO: 1492 - RNA, 21 nt, RNAi
uuggacuugacuaccgacuaa

SEQ ID NO: 1493 - DNA, 21 bp, Homo sapiens
catgcagttactgagctctag

SEQ ID NO: 1494 - RNA, 21 nt, RNAi
ugcaguuacugagcucuaguu

SEQ ID NO: 1495 - RNA, 21 nt, RNAi
uuacgucaaugacucgagauc

SEQ ID NO: 1496 - DNA, 21 bp, Homo sapiens
cagttactgagctctagtgtt

SEQ ID NO: 1497 - RNA, 21 nt, RNAi
guuacugagcucuaguguuuu

SEQ ID NO: 1498 - RNA, 21 nt, RNAi
uucaaugacucgagaucacaa

SEQ ID NO: 1499 - DNA, 21 bp, Homo sapiens
cagtttgatgtctttgatgaa

SEQ ID NO: 1500 - RNA, 21 nt, RNAi
guuugaugucuuugaugaauu

SEQ ID NO: 1501 - RNA, 21 nt, RNAi
uucaaacuacagaaacuacuu

SEQ ID NO: 1502 - DNA, 21 bp, Homo sapiens
caaacatgtcagttctgtgag

SEQ ID NO: 1503 - RNA, 21 nt, RNAi
aacaugucaguucugugaguu

SEQ ID NO: 1504 - RNA, 21 nt, RNAi
uuuuguacagucaagacacuc

SEQ ID NO: 1505 - DNA, 21 bp, Homo sapiens
cacactgagaactggccttcg

SEQ ID NO: 1506 - RNA, 21 nt, RNAi
cacugagaacuggccuucguu

SEQ ID NO: 1507 - RNA, 21 nt, RNAi
uugugacucuugaccggaagc

SEQ ID NO: 1508 - DNA, 21 bp, Homo sapiens
cactgagaactggccttcgat

SEQ ID NO: 1509 - RNA, 21 nt, RNAi
cugagaacuggccuucgauuu

SEQ ID NO: 1510 - RNA, 21 nt, RNAi
uugacucuugaccggaagcua

SEQ ID NO: 1511 - DNA, 21 bp, Homo sapiens
cagtcatgtaatagtagcttt

SEQ ID NO: 1512 - RNA, 21 nt, RNAi
gucauguaauaguagcuuuuu

SEQ ID NO: 1513 - RNA, 21 nt, RNAi
uucaguacauuaucaucgaaa

SEQ ID NO: 1514 - DNA, 21 bp, Homo sapiens
cacatccagcctaaagaaact

SEQ ID NO: 1515 - RNA, 21 nt, RNAi
cauccagccuaaagaaacuuu

SEQ ID NO: 1516 - RNA, 21 nt, RNAi
uuguaggucggauuucuuuga

SEQ ID NO: 1517 - DNA, 21 bp, Homo sapiens
catccagcctaaagaaactgc

SEQ ID NO: 1518 - RNA, 21 nt, RNAi
uccagccuaaagaaacugcuu

SEQ ID NO: 1519 - RNA, 21 nt, RNAi
uuaggucggauuucuuugacg

SEQ ID NO: 1520 - DNA, 21 bp, Homo sapiens
cagcctaaagaaactgcagct

SEQ ID NO: 1521 - RNA, 21 nt, RNAi
gccuaaagaaacugcagcuuu

SEQ ID NO: 1522 - RNA, 21 nt, RNAi
uucggauuucuuugacgucga

SEQ ID NO: 1523 - DNA, 21 bp, Homo sapiens
cagctatcttccactacctca

SEQ ID NO: 1524 - RNA, 21 nt, RNAi
gcuaucuuccacuaccucauu

SEQ ID NO: 1525 - RNA, 21 nt, RNAi
uucgauagaaggugauggagu

SEQ ID NO: 1526 - DNA, 21 bp, Homo sapiens
caggaatacagaaaggagacc

SEQ ID NO: 1527 - RNA, 21 nt, RNAi
ggaauacagaaaggagaccuu

SEQ ID NO: 1528 - RNA, 21 nt, RNAi
uuccuuaugucuuuccucugg

SEQ ID NO: 1529 - DNA, 21 bp, Homo sapiens
cagaaaggagacctctgagag

SEQ ID NO: 1530 - RNA, 21 nt, RNAi
gaaaggagaccucugagaguu

SEQ ID NO: 1531 - RNA, 21 nt, RNAi
uucuuuccucuggagacucuc

SEQ ID NO: 1532 - DNA, 21 bp, Homo sapiens
cactgatcttcagacaactct

SEQ ID NO: 1533 - RNA, 21 nt, RNAi
cugaucuucagacaacucuuu

SEQ ID NO: 1534 - RNA, 21 nt, RNAi
uugacuagaagucuguugaga

SEQ ID NO: 1535 - DNA, 21 bp, Homo sapiens
cagacaactcttcagctctct

SEQ ID NO: 1536 - RNA, 21 nt, RNAi
gacaacucuucagcucucuuu

SEQ ID NO: 1537 - RNA, 21 nt, RNAi
uucuguugagaagucgagaga

SEQ ID NO: 1538 - DNA, 21 bp, Homo sapiens
caactcttcagctctctatga

SEQ ID NO: 1539 - RNA, 21 nt, RNAi
acucuucagcucucuaugauu

SEQ ID NO: 1540 - RNA, 21 nt, RNAi
uuugagaagucgagagauacu

SEQ ID NO: 1541 - DNA, 21 bp, Homo sapiens
cagctctctatgaaggccatt

SEQ ID NO: 1542 - RNA, 21 nt, RNAi
gcucucuaugaaggccauuuu

SEQ ID NO: 1543 - RNA, 21 nt, RNAi
uucgagagauacuuccgguaa

SEQ ID NO: 1544 - DNA, 21 bp, Homo sapiens
catgctcttacaagcttgaag

SEQ ID NO: 1545 - RNA, 21 nt, RNAi
ugcucuuacaagcuugaaguu

SEQ ID NO: 1546 - RNA, 21 nt, RNAi
uuacgagaauguucgaacuuc

SEQ ID NO: 1547 - DNA, 21 bp, Homo sapiens
caagcttgaaggaaaccttgt

SEQ ID NO: 1548 - RNA, 21 nt, RNAi
agcuugaaggaaaccuuguuu

SEQ ID NO: 1549 - RNA, 21 nt, RNAi
uuucgaacuuccuuuggaaca

SEQ ID NO: 1550 - DNA, 21 bp, Homo sapiens
caacagacagtgaaacagtag

SEQ ID NO: 1551 - RNA, 21 nt, RNAi
acagacagugaaacaguaguu

SEQ ID NO: 1552 - RNA, 21 nt, RNAi
uuugucugucacuuugucauc

SEQ ID NO: 1553 - DNA, 21 bp, Homo sapiens
cagacagtgaaacagtagaac

SEQ ID NO: 1554 - RNA, 21 nt, RNAi
gacagugaaacaguagaacuu

SEQ ID NO: 1555 - RNA, 21 nt, RNAi
uucugucacuuugucaucuug

SEQ ID NO: 1556 - DNA, 21 bp, Homo sapiens
cagtgaaacagtagaacctat

SEQ ID NO: 1557 - RNA, 21 nt, RNAi
gugaaacaguagaaccuauuu

SEQ ID NO: 1558 - RNA, 21 nt, RNAi
uucacuuugucaucuuggaua

SEQ ID NO: 1559 - DNA, 21 bp, Homo sapiens
cagtagaacctattatctcac

SEQ ID NO: 1560 - RNA, 21 nt, RNAi
guagaaccuauuaucucacuu

SEQ ID NO: 1561 - RNA, 21 nt, RNAi
uucaucuuggauaauagagug

SEQ ID NO: 1562 - DNA, 21 bp, Homo sapiens
cacagttggtgacagtgcttt

SEQ ID NO: 1563 - RNA, 21 nt, RNAi
caguuggugacagugcuuuuu

SEQ ID NO: 1564 - RNA, 21 nt, RNAi
uugucaaccacugucacgaaa

SEQ ID NO: 1565 - DNA, 21 bp, Homo sapiens
caagatgcaaactctcaagct

SEQ ID NO: 1566 - RNA, 21 nt, RNAi
agaugcaaacucucaagcuuu

SEQ ID NO: 1567 - RNA, 21 nt, RNAi
uuucuacguuugagaguucga

SEQ ID NO: 1568 - DNA, 21 bp, Homo sapiens
caaactctcaagctcggttgc

SEQ ID NO: 1569 - RNA, 21 nt, RNAi
aacucucaagcucgguugcuu

SEQ ID NO: 1570 - RNA, 21 nt, RNAi
uuuugagaguucgagccaacg

SEQ ID NO: 1571 - DNA, 21 bp, Homo sapiens
caggtcgattagatttctcaa

SEQ ID NO: 1572 - RNA, 21 nt, RNAi
ggucgauuagauuucucaauu

SEQ ID NO: 1573 - RNA, 21 nt, RNAi
uuccagcuaaucuaaagaguu

SEQ ID NO: 1574 - DNA, 21 bp, Homo sapiens
caacaactgaaactcaaggaa

SEQ ID NO: 1575 - RNA, 21 nt, RNAi
acaacugaaacucaaggaauu

SEQ ID NO: 1576 - RNA, 21 nt, RNAi
uuuguugacuuugaguuccuu

SEQ ID NO: 1577 - DNA, 21 bp, Homo sapiens
catttgtgactggagtagaag

SEQ ID NO: 1578 - RNA, 21 nt, RNAi
uuugugacuggaguagaaguu

SEQ ID NO: 1579 - RNA, 21 nt, RNAi
uuaaacacugaccucaucuuc

SEQ ID NO: 1580 - DNA, 21 bp, Homo sapiens
caagctttgcctatggattat

SEQ ID NO: 1581 - RNA, 21 nt, RNAi
agcuuugccuauggauuauuu

SEQ ID NO: 1582 - RNA, 21 nt, RNAi
uuucgaaacggauaccuaaua

SEQ ID NO: 1583 - DNA, 21 bp, Homo sapiens
caagagcttaccttgcgtatg

SEQ ID NO: 1584 - RNA, 21 nt, RNAi
agagcuuaccuugcguauguu

SEQ ID NO: 1585 - RNA, 21 nt, RNAi
uuucucgaauggaacgcauac

SEQ ID NO: 1586 - DNA, 21 bp, Homo sapiens
caagattcagctgcctatgcc

SEQ ID NO: 1587 - RNA, 21 nt, RNAi
agauucagcugccuaugccuu

SEQ ID NO: 1588 - RNA, 21 nt, RNAi
uuucuaagucgacggauacgg

SEQ ID NO: 1589 - DNA, 21 bp, Homo sapiens
cagctgcctatgccattcagg

SEQ ID NO: 1590 - RNA, 21 nt, RNAi
gcugccuaugccauucagguu

SEQ ID NO: 1591 - RNA, 21 nt, RNAi
uucgacggauacgguaagucc

SEQ ID NO: 1592 - DNA, 21 bp, Homo sapiens
cattcaggagttgctttctat

SEQ ID NO: 1593 - RNA, 21 nt, RNAi
uucaggaguugcuuucuauuu

SEQ ID NO: 1594 - RNA, 21 nt, RNAi
uuaaguccucaacgaaagaua

SEQ ID NO: 1595 - DNA, 21 bp, Homo sapiens
caggagttgctttctatttat

SEQ ID NO: 1596 - RNA, 21 nt, RNAi
ggaguugcuuucuauuuauuu

SEQ ID NO: 1597 - RNA, 21 nt, RNAi
uuccucaacgaaagauaaaua

SEQ ID NO: 1598 - DNA, 21 bp, Homo sapiens
caggtcaccaattgtggagga

SEQ ID NO: 1599 - RNA, 21 nt, RNAi
ggucaccaauuguggaggauu

SEQ ID NO: 1600 - RNA, 21 nt, RNAi
uuccagugguuaacaccuccu

SEQ ID NO: 1601 - DNA, 21 bp, Homo sapiens
caccaattgtggaggagattt

SEQ ID NO: 1602 - RNA, 21 nt, RNAi
ccaauuguggaggagauuuuu

SEQ ID NO: 1603 - RNA, 21 nt, RNAi
uugguuaacaccuccucuaaa

SEQ ID NO: 1604 - DNA, 21 bp, Homo sapiens
caattgtggaggagatttcct

SEQ ID NO: 1605 - RNA, 21 nt, RNAi
auuguggaggagauuuccuuu

SEQ ID NO: 1606 - RNA, 21 nt, RNAi
uuuaacaccuccucuaaagga

SEQ ID NO: 1607 - DNA, 21 bp, Homo sapiens
catctaaataccagatacaag

SEQ ID NO: 1608 - RNA, 21 nt, RNAi
ucuaaauaccagauacaaguu

SEQ ID NO: 1609 - RNA, 21 nt, RNAi
uuagauuuauggucuauguuc

SEQ ID NO: 1610 - DNA, 21 bp, Homo sapiens
cagatacaagagttctcagaa

SEQ ID NO: 1611 - RNA, 21 nt, RNAi
gauacaagaguucucagaauu

SEQ ID NO: 1612 - RNA, 21 nt, RNAi
uucuauguucucaagagucuu

SEQ ID NO: 1613 - DNA, 21 bp, Homo sapiens
caagagttctcagaagtcaac

SEQ ID NO: 1614 - RNA, 21 nt, RNAi
agaguucucagaagucaacuu

SEQ ID NO: 1615 - RNA, 21 nt, RNAi
uuucucaagagucuucaguug

SEQ ID NO: 1616 - DNA, 21 bp, Homo sapiens
cagaagtcaaccgattggtct

SEQ ID NO: 1617 - RNA, 21 nt, RNAi
gaagucaaccgauuggucuuu

SEQ ID NO: 1618 - RNA, 21 nt, RNAi
uucuucaguuggcuaaccaga

SEQ ID NO: 1619 - DNA, 21 bp, Homo sapiens
caaccgattggtctggagtaa

SEQ ID NO: 1620 - RNA, 21 nt, RNAi
accgauuggucuggaguaauu

SEQ ID NO: 1621 - RNA, 21 nt, RNAi
uuuggcuaaccagaccucauu

SEQ ID NO: 1622 - DNA, 21 bp, Homo sapiens
caggttatcttattacaaagg

SEQ ID NO: 1623 - RNA, 21 nt, RNAi
gguuaucuuauuacaaagguu

SEQ ID NO: 1624 - RNA, 21 nt, RNAi
uuccaauagaauaauguuucc

SEQ ID NO: 1625 - DNA, 21 bp, Homo sapiens
caaaggttcgacatgatcttg

SEQ ID NO: 1626 - RNA, 21 nt, RNAi
aagguucgacaugaucuuguu

SEQ ID NO: 1627 - RNA, 21 nt, RNAi
uuuuccaagcuguacuagaac

SEQ ID NO: 1628 - DNA, 21 bp, Homo sapiens
cacctgctgtagcattatgat

SEQ ID NO: 1629 - RNA, 21 nt, RNAi
ccugcuguagcauuaugauuu

SEQ ID NO: 1630 - RNA, 21 nt, RNAi
uuggacgacaucguaauacua

SEQ ID NO: 1631 - DNA, 21 bp, Homo sapiens
catgatttcaaagtgaccatc

SEQ ID NO: 1632 - RNA, 21 nt, RNAi
ugauuucaaagugaccaucuu

SEQ ID NO: 1633 - RNA, 21 nt, RNAi
uuacuaaaguuucacugguag

SEQ ID NO: 1634 - DNA, 21 bp, Homo sapiens
caaagtgaccatctatcttct

SEQ ID NO: 1635 - RNA, 21 nt, RNAi
aagugaccaucuaucuucuuu

SEQ ID NO: 1636 - RNA, 21 nt, RNAi
uuuucacugguagauagaaga

SEQ ID NO: 1637 - DNA, 21 bp, Homo sapiens
catctatcttcttccacatat

SEQ ID NO: 1638 - RNA, 21 nt, RNAi
ucuaucuucuuccacauauuu

SEQ ID NO: 1639 - RNA, 21 nt, RNAi
uuagauagaagaagguguaua

SEQ ID NO: 1640 - DNA, 21 bp, Homo sapiens
cacatattctggtgtatgtct

SEQ ID NO: 1641 - RNA, 21 nt, RNAi
cauauucugguguaugucuuu

SEQ ID NO: 1642 - RNA, 21 nt, RNAi
uuguauaagaccacauacaga

SEQ ID NO: 1643 - DNA, 21 bp, Homo sapiens
catattctggtgtatgtctta

SEQ ID NO: 1644 - RNA, 21 nt, RNAi
uauucugguguaugucuuauu

SEQ ID NO: 1645 - RNA, 21 nt, RNAi
uuauaagaccacauacagaau

SEQ ID NO: 1646 - DNA, 21 bp, Homo sapiens
caagaagatcagcaggaggtt

SEQ ID NO: 1647 - RNA, 21 nt, RNAi
agaagaucagcaggagguuuu

SEQ ID NO: 1648 - RNA, 21 nt, RNAi
uuucuucuagucguccuccaa

SEQ ID NO: 1649 - DNA, 21 bp, Homo sapiens
cagcaggaggtttatgcagaa

SEQ ID NO: 1650 - RNA, 21 nt, RNAi
gcaggagguuuaugcagaauu

SEQ ID NO: 1651 - RNA, 21 nt, RNAi
uucguccuccaaauacgucuu

SEQ ID NO: 1652 - DNA, 21 bp, Homo sapiens
caggaggtttatgcagaaatt

SEQ ID NO: 1653 - RNA, 21 nt, RNAi
ggagguuuaugcagaaauuuu

SEQ ID NO: 1654 - RNA, 21 nt, RNAi
uuccuccaaauacgucuuuaa

SEQ ID NO: 1655 - DNA, 21 bp, Homo sapiens
cagaaattatggcagttctaa

SEQ ID NO: 1656 - RNA, 21 nt, RNAi
gaaauuauggcaguucuaauu

SEQ ID NO: 1657 - RNA, 21 nt, RNAi
uucuuuaauaccgucaagauu

SEQ ID NO: 1658 - DNA, 21 bp, Homo sapiens
cagttctaaagcatgacgatc

SEQ ID NO: 1659 - RNA, 21 nt, RNAi
guucuaaagcaugacgaucuu

SEQ ID NO: 1660 - RNA, 21 nt, RNAi
uucaagauuucguacugcuag

SEQ ID NO: 1661 - DNA, 21 bp, Homo sapiens
catgacgatcagcataccata

SEQ ID NO: 1662 - RNA, 21 nt, RNAi
ugacgaucagcauaccauauu

SEQ ID NO: 1663 - RNA, 21 nt, RNAi
uuacugcuagucguaugguau

SEQ ID NO: 1664 - DNA, 21 bp, Homo sapiens
caagacattgcatctgatctg

SEQ ID NO: 1665 - RNA, 21 nt, RNAi
agacauugcaucugaucuguu

SEQ ID NO: 1666 - RNA, 21 nt, RNAi
uuucuguaacguagacuagac

SEQ ID NO: 1667 - DNA, 21 bp, Homo sapiens
cattgcatctgatctgtgtca

SEQ ID NO: 1668 - RNA, 21 nt, RNAi
uugcaucugaucugugucauu

SEQ ID NO: 1669 - RNA, 21 nt, RNAi
uuaacguagacuagacacagu

SEQ ID NO: 1670 - DNA, 21 bp, Homo sapiens
catctgatctgtgtcaactca

SEQ ID NO: 1671 - RNA, 21 nt, RNAi
ucugaucugugucaacucauu

SEQ ID NO: 1672 - RNA, 21 nt, RNAi
uuagacuagacacaguugagu

SEQ ID NO: 1673 - DNA, 21 bp, Homo sapiens
caactcagtacacagactgtg

SEQ ID NO: 1674 - RNA, 21 nt, RNAi
acucaguacacagacuguguu

SEQ ID NO: 1675 - RNA, 21 nt, RNAi
uuugagucaugugucugacac

SEQ ID NO: 1676 - DNA, 21 bp, Homo sapiens
cagtacacagactgtgttctc

SEQ ID NO: 1677 - RNA, 21 nt, RNAi
guacacagacuguguucucuu

SEQ ID NO: 1678 - RNA, 21 nt, RNAi
uucaugugucugacacaagag

SEQ ID NO: 1679 - DNA, 21 bp, Homo sapiens
cacagactgtgttctccatgc

SEQ ID NO: 1680 - RNA, 21 nt, RNAi
cagacuguguucuccaugcuu

SEQ ID NO: 1681 - RNA, 21 nt, RNAi
uugucugacacaagagguacg

SEQ ID NO: 1682 - DNA, 21 bp, Homo sapiens
cagactgtgttctccatgctt

SEQ ID NO: 1683 - RNA, 21 nt, RNAi
gacuguguucuccaugcuuuu

SEQ ID NO: 1684 - RNA, 21 nt, RNAi
uucugacacaagagguacgaa

SEQ ID NO: 1685 - DNA, 21 bp, Homo sapiens
catgcttgaccatctcacaca

SEQ ID NO: 1686 - RNA, 21 nt, RNAi
ugcuugaccaucucacacauu

SEQ ID NO: 1687 - RNA, 21 nt, RNAi
uuacgaacugguagagugugu

SEQ ID NO: 1688 - DNA, 21 bp, Homo sapiens
caaggcacaaatttcaggcac

SEQ ID NO: 1689 - RNA, 21 nt, RNAi
aggcacaaauuucaggcacuu

SEQ ID NO: 1690 - RNA, 21 nt, RNAi
uuuccguguuuaaaguccgug

SEQ ID NO: 1691 - DNA, 21 bp, Homo sapiens
cacaaatttcaggcactgaaa

SEQ ID NO: 1692 - RNA, 21 nt, RNAi
caaauuucaggcacugaaauu

SEQ ID NO: 1693 - RNA, 21 nt, RNAi
uuguuuaaaguccgugacuuu

SEQ ID NO: 1694 - DNA, 21 bp, Homo sapiens
caaatttcaggcactgaaagc

SEQ ID NO: 1695 - RNA, 21 nt, RNAi
aauuucaggcacugaaagcuu

SEQ ID NO: 1696 - RNA, 21 nt, RNAi
uuuuaaaguccgugacuuucg

SEQ ID NO: 1697 - DNA, 21 bp, Homo sapiens
caggcactgaaagctgagaaa

SEQ ID NO: 1698 - RNA, 21 nt, RNAi
ggcacugaaagcugagaaauu

SEQ ID NO: 1699 - RNA, 21 nt, RNAi
uuccgugacuuucgacucuuu

SEQ ID NO: 1700 - DNA, 21 bp, Homo sapiens
cactgaaagctgagaaatgtc

SEQ ID NO: 1701 - RNA, 21 nt, RNAi
cugaaagcugagaaaugucuu

SEQ ID NO: 1702 - RNA, 21 nt, RNAi
uugacuuucgacucuuuacag

SEQ ID NO: 1703 - DNA, 21 bp, Homo sapiens
cacacagcaaatcaaacagaa

SEQ ID NO: 1704 - RNA, 21 nt, RNAi
cacagcaaaucaaacagaauu

SEQ ID NO: 1705 - RNA, 21 nt, RNAi
uugugucguuuaguuugucuu

SEQ ID NO: 1706 - DNA, 21 bp, Homo sapiens
cacagcaaatcaaacagaaat

SEQ ID NO: 1707 - RNA, 21 nt, RNAi
cagcaaaucaaacagaaauuu

SEQ ID NO: 1708 - RNA, 21 nt, RNAi
uugucguuuaguuugucuuua

SEQ ID NO: 1709 - DNA, 21 bp, Homo sapiens
caaacagaaataaggtagact

SEQ ID NO: 1710 - RNA, 21 nt, RNAi
aacagaaauaagguagacuuu

SEQ ID NO: 1711 - RNA, 21 nt, RNAi
uuuugucuuuauuccaucuga

SEQ ID NO: 1712 - DNA, 21 bp, Homo sapiens
cagaaataaggtagactcaat

SEQ ID NO: 1713 - RNA, 21 nt, RNAi
gaaauaagguagacucaauuu

SEQ ID NO: 1714 - RNA, 21 nt, RNAi
uucuuuauuccaucugaguua

SEQ ID NO: 1715 - DNA, 21 bp, Homo sapiens
caatggtatctactgtggatt

SEQ ID NO: 1716 - RNA, 21 nt, RNAi
augguaucuacuguggauuuu

SEQ ID NO: 1717 - RNA, 21 nt, RNAi
uuuaccauagaugacaccuaa

SEQ ID NO: 1718 - DNA, 21 bp, Homo sapiens
caggatactctggcagtagct

SEQ ID NO: 1719 - RNA, 21 nt, RNAi
ggauacucuggcaguagcuuu

SEQ ID NO: 1720 - RNA, 21 nt, RNAi
uuccuaugagaccgucaucga

SEQ ID NO: 1721 - DNA, 21 bp, Homo sapiens
cagtagcttcctttcgctcca

SEQ ID NO: 1722 - RNA, 21 nt, RNAi
guagcuuccuuucgcuccauu

SEQ ID NO: 1723 - RNA, 21 nt, RNAi
uucaucgaaggaaagcgaggu

SEQ ID NO: 1724 - DNA, 21 bp, Homo sapiens
caaagcatacacacgagctgt

SEQ ID NO: 1725 - RNA, 21 nt, RNAi
aagcauacacacgagcuguuu

SEQ ID NO: 1726 - RNA, 21 nt, RNAi
uuuucguaugugugcucgaca

SEQ ID NO: 1727 - DNA, 21 bp, Homo sapiens
catacacacgagctgtaatgc

SEQ ID NO: 1728 - RNA, 21 nt, RNAi
uacacacgagcuguaaugcuu

SEQ ID NO: 1729 - RNA, 21 nt, RNAi
uuaugugugcucgacauuacg

SEQ ID NO: 1730 - DNA, 21 bp, Homo sapiens
cacacgagctgtaatgcactt

SEQ ID NO: 1731 - RNA, 21 nt, RNAi
cacgagcuguaaugcacuuuu

SEQ ID NO: 1732 - RNA, 21 nt, RNAi
uugugcucgacauuacgugaa

SEQ ID NO: 1733 - DNA, 21 bp, Homo sapiens
cacgagctgtaatgcactttg

SEQ ID NO: 1734 - RNA, 21 nt, RNAi
cgagcuguaaugcacuuuguu

SEQ ID NO: 1735 - RNA, 21 nt, RNAi
uugcucgacauuacgugaaac

SEQ ID NO: 1736 - DNA, 21 bp, Homo sapiens
cagaaattgtatgctgctatg

SEQ ID NO: 1737 - RNA, 21 nt, RNAi
gaaauuguaugcugcuauguu

SEQ ID NO: 1738 - RNA, 21 nt, RNAi
uucuuuaacauacgacgauac

SEQ ID NO: 1739 - DNA, 21 bp, Homo sapiens
catgaacctgatggagtggcc

SEQ ID NO: 1740 - RNA, 21 nt, RNAi
ugaaccugauggaguggccuu

SEQ ID NO: 1741 - RNA, 21 nt, RNAi
uuacuuggacuaccucaccgg

SEQ ID NO: 1742 - DNA, 21 bp, Homo sapiens
cagtgcaattagaaaggcaga

SEQ ID NO: 1743 - RNA, 21 nt, RNAi
gugcaauuagaaaggcagauu

SEQ ID NO: 1744 - RNA, 21 nt, RNAi
uucacguuaaucuuuccgucu

SEQ ID NO: 1745 - DNA, 21 bp, Homo sapiens
caattagaaaggcagaaccat

SEQ ID NO: 1746 - RNA, 21 nt, RNAi
auuagaaaggcagaaccauuu

SEQ ID NO: 1747 - RNA, 21 nt, RNAi
uuuaaucuuuccgucuuggua

SEQ ID NO: 1748 - DNA, 21 bp, Homo sapiens
cagatccttgaacatgaaagc

SEQ ID NO: 1749 - RNA, 21 nt, RNAi
gauccuugaacaugaaagcuu

SEQ ID NO: 1750 - RNA, 21 nt, RNAi
uucuaggaacuuguacuuucg

SEQ ID NO: 1751 - DNA, 21 bp, Homo sapiens
catgaaagccttggcttgctg

SEQ ID NO: 1752 - RNA, 21 nt, RNAi
ugaaagccuuggcuugcuguu

SEQ ID NO: 1753 - RNA, 21 nt, RNAi
uuacuuucggaaccgaacgac

SEQ ID NO: 1754 - DNA, 21 bp, Homo sapiens
cagctagaaccagaccagatc

SEQ ID NO: 1755 - RNA, 21 nt, RNAi
gcuagaaccagaccagaucuu

SEQ ID NO: 1756 - RNA, 21 nt, RNAi
uucgaucuuggucuggucuag

SEQ ID NO: 1757 - DNA, 21 bp, Homo sapiens
cagaccagatcattcattatc

SEQ ID NO: 1758 - RNA, 21 nt, RNAi
gaccagaucauucauuaucuu

SEQ ID NO: 1759 - RNA, 21 nt, RNAi
uucuggucuaguaaguaauag

SEQ ID NO: 1760 - DNA, 21 bp, Homo sapiens
cagatcattcattatcatggt

SEQ ID NO: 1761 - RNA, 21 nt, RNAi
gaucauucauuaucaugguuu

SEQ ID NO: 1762 - RNA, 21 nt, RNAi
uucuaguaaguaauaguacca

SEQ ID NO: 1763 - DNA, 21 bp, Homo sapiens
cattcattatcatggtgtagt

SEQ ID NO: 1764 - RNA, 21 nt, RNAi
uucauuaucaugguguaguuu

SEQ ID NO: 1765 - RNA, 21 nt, RNAi
uuaaguaauaguaccacauca

SEQ ID NO: 1766 - DNA, 21 bp, Homo sapiens
cattatcatggtgtagtaaag

SEQ ID NO: 1767 - RNA, 21 nt, RNAi
uuaucaugguguaguaaaguu

SEQ ID NO: 1768 - RNA, 21 nt, RNAi
uuaauaguaccacaucauuuc

SEQ ID NO: 1769 - DNA, 21 bp, Homo sapiens
catggtgtagtaaagtccatg

SEQ ID NO: 1770 - RNA, 21 nt, RNAi
ugguguaguaaaguccauguu

SEQ ID NO: 1771 - RNA, 21 nt, RNAi
uuaccacaucauuucagguac

SEQ ID NO: 1772 - DNA, 21 bp, Homo sapiens
catgttaggtcttggtcagct

SEQ ID NO: 1773 - RNA, 21 nt, RNAi
uguuaggucuuggucagcuuu

SEQ ID NO: 1774 - RNA, 21 nt, RNAi
uuacaauccagaaccagucga

SEQ ID NO: 1775 - DNA, 21 bp, Homo sapiens
cagctgtctactgttatcact

SEQ ID NO: 1776 - RNA, 21 nt, RNAi
gcugucuacuguuaucacuuu

SEQ ID NO: 1777 - RNA, 21 nt, RNAi
uucgacagaugacaauaguga

SEQ ID NO: 1778 - DNA, 21 bp, Homo sapiens
cactcaggtgaatggagtgca

SEQ ID NO: 1779 - RNA, 21 nt, RNAi
cucaggugaauggagugcauu

SEQ ID NO: 1780 - RNA, 21 nt, RNAi
uugaguccacuuaccucacgu

SEQ ID NO: 1781 - DNA, 21 bp, Homo sapiens
caggtgaatggagtgcatgct

SEQ ID NO: 1782 - RNA, 21 nt, RNAi
ggugaauggagugcaugcuuu

SEQ ID NO: 1783 - RNA, 21 nt, RNAi
uuccacuuaccucacguacga

SEQ ID NO: 1784 - DNA, 21 bp, Homo sapiens
catgctaacaggtccgagtgg

SEQ ID NO: 1785 - RNA, 21 nt, RNAi
ugcuaacagguccgagugguu

SEQ ID NO: 1786 - RNA, 21 nt, RNAi
uuacgauuguccaggcucacc

SEQ ID NO: 1787 - DNA, 21 bp, Homo sapiens
caggtccgagtggacagatga

SEQ ID NO: 1788 - RNA, 21 nt, RNAi
gguccgaguggacagaugauu

SEQ ID NO: 1789 - RNA, 21 nt, RNAi
uuccaggcucaccugucuacu

SEQ ID NO: 1790 - DNA, 21 bp, Homo sapiens
cagatgaattaaacacgtaca

SEQ ID NO: 1791 - RNA, 21 nt, RNAi
gaugaauuaaacacguacauu

SEQ ID NO: 1792 - RNA, 21 nt, RNAi
uucuacuuaauuugugcaugu

SEQ ID NO: 1793 - DNA, 21 bp, Homo sapiens
cacgtacagagtggaagcagc

SEQ ID NO: 1794 - RNA, 21 nt, RNAi
cguacagaguggaagcagcuu

SEQ ID NO: 1795 - RNA, 21 nt, RNAi
uugcaugucucaccuucgucg

SEQ ID NO: 1796 - DNA, 21 bp, Homo sapiens
cagagtggaagcagcttggaa

SEQ ID NO: 1797 - RNA, 21 nt, RNAi
gaguggaagcagcuuggaauu

SEQ ID NO: 1798 - RNA, 21 nt, RNAi
uucucaccuucgucgaaccuu

SEQ ID NO: 1799 - DNA, 21 bp, Homo sapiens
cagcttggaaattgtcacagt

SEQ ID NO: 1800 - RNA, 21 nt, RNAi
gcuuggaaauugucacaguuu

SEQ ID NO: 1801 - RNA, 21 nt, RNAi
uucgaaccuuuaacaguguca

SEQ ID NO: 1802 - DNA, 21 bp, Homo sapiens
caacatggagtgtcagactgg

SEQ ID NO: 1803 - RNA, 21 nt, RNAi
acauggagugucagacugguu

SEQ ID NO: 1804 - RNA, 21 nt, RNAi
uuuguaccucacagucugacc

SEQ ID NO: 1805 - DNA, 21 bp, Homo sapiens
cagctattattatcagccaaa

SEQ ID NO: 1806 - RNA, 21 nt, RNAi
gcuauuauuaucagccaaauu

SEQ ID NO: 1807 - RNA, 21 nt, RNAi
uucgauaauaauagucgguuu

SEQ ID NO: 1808 - DNA, 21 bp, Homo sapiens
cactgaaactagtgagagcag

SEQ ID NO: 1809 - RNA, 21 nt, RNAi
cugaaacuagugagagcaguu

SEQ ID NO: 1810 - RNA, 21 nt, RNAi
uugacuuugaucacucucguc

SEQ ID NO: 1811 - DNA, 21 bp, Homo sapiens
cagaacaaattgtacctcttt

SEQ ID NO: 1812 - RNA, 21 nt, RNAi
gaacaaauuguaccucuuuuu

SEQ ID NO: 1813 - RNA, 21 nt, RNAi
uucuuguuuaacauggagaaa

SEQ ID NO: 1814 - DNA, 21 bp, Homo sapiens
caaattgtacctctttcagct

SEQ ID NO: 1815 - RNA, 21 nt, RNAi
aauuguaccucuuucagcuuu

SEQ ID NO: 1816 - RNA, 21 nt, RNAi
uuuuaacauggagaaagucga

SEQ ID NO: 1817 - DNA, 21 bp, Homo sapiens
cagctgcaagctttgaaagag

SEQ ID NO: 1818 - RNA, 21 nt, RNAi
gcugcaagcuuugaaagaguu

SEQ ID NO: 1819 - RNA, 21 nt, RNAi
uucgacguucgaaacuuucuc

SEQ ID NO: 1820 - DNA, 21 bp, Homo sapiens
caagctttgaaagaggctcct

SEQ ID NO: 1821 - RNA, 21 nt, RNAi
agcuuugaaagaggcuccuuu

SEQ ID NO: 1822 - RNA, 21 nt, RNAi
uuucgaaacuuucuccgagga

SEQ ID NO: 1823 - DNA, 21 bp, Homo sapiens
cacatgttatgtgagttggag

SEQ ID NO: 1824 - RNA, 21 nt, RNAi
cauguuaugugaguuggaguu

SEQ ID NO: 1825 - RNA, 21 nt, RNAi
uuguacaauacacucaaccuc

SEQ ID NO: 1826 - DNA, 21 bp, Homo sapiens
catgttatgtgagttggagca

SEQ ID NO: 1827 - RNA, 21 nt, RNAi
uguuaugugaguuggagcauu

SEQ ID NO: 1828 - RNA, 21 nt, RNAi
uuacaauacacucaaccucgu

SEQ ID NO: 1829 - DNA, 21 bp, Homo sapiens
cagcattctccaggtgacagt

SEQ ID NO: 1830 - RNA, 21 nt, RNAi
gcauucuccaggugacaguuu

SEQ ID NO: 1831 - RNA, 21 nt, RNAi
uucguaagagguccacuguca

SEQ ID NO: 1832 - DNA, 21 bp, Homo sapiens
cattctccaggtgacagttct

SEQ ID NO: 1833 - RNA, 21 nt, RNAi
uucuccaggugacaguucuuu

SEQ ID NO: 1834 - RNA, 21 nt, RNAi
uuaagagguccacugucaaga

SEQ ID NO: 1835 - DNA, 21 bp, Homo sapiens
caggtgacagttctcaagaag

SEQ ID NO: 1836 - RNA, 21 nt, RNAi
ggugacaguucucaagaaguu

SEQ ID NO: 1837 - RNA, 21 nt, RNAi
uuccacugucaagaguucuuc

SEQ ID NO: 1838 - DNA, 21 bp, Homo sapiens
cagttctcaagaagattctct

SEQ ID NO: 1839 - RNA, 21 nt, RNAi
guucucaagaagauucucuuu

SEQ ID NO: 1840 - RNA, 21 nt, RNAi
uucaagaguucuucuaagaga

SEQ ID NO: 1841 - DNA, 21 bp, Homo sapiens
caagaagattctctaaactgg

SEQ ID NO: 1842 - RNA, 21 nt, RNAi
agaagauucucuaaacugguu

SEQ ID NO: 1843 - RNA, 21 nt, RNAi
uuucuucuaagagauuugacc

SEQ ID NO: 1844 - DNA, 21 bp, Homo sapiens
cagaattcctacagagccaag

SEQ ID NO: 1845 - RNA, 21 nt, RNAi
gaauuccuacagagccaaguu

SEQ ID NO: 1846 - RNA, 21 nt, RNAi
uucuuaaggaugucucgguuc

SEQ ID NO: 1847 - DNA, 21 bp, Homo sapiens
cagagccaaggagcctatcct

SEQ ID NO: 1848 - RNA, 21 nt, RNAi
gagccaaggagccuauccuuu

SEQ ID NO: 1849 - RNA, 21 nt, RNAi
uucucgguuccucggauagga

SEQ ID NO: 1850 - DNA, 21 bp, Homo sapiens
caaggagcctatcctggctct

SEQ ID NO: 1851 - RNA, 21 nt, RNAi
aggagccuauccuggcucuuu

SEQ ID NO: 1852 - RNA, 21 nt, RNAi
uuuccucggauaggaccgaga

SEQ ID NO: 1853 - DNA, 21 bp, Homo sapiens
cagattacaatgaaatggttg

SEQ ID NO: 1854 - RNA, 21 nt, RNAi
gauuacaaugaaaugguuguu

SEQ ID NO: 1855 - RNA, 21 nt, RNAi
uucuaauguuacuuuaccaac

SEQ ID NO: 1856 - DNA, 21 bp, Homo sapiens
caatgaaatggttggagaatg

SEQ ID NO: 1857 - RNA, 21 nt, RNAi
augaaaugguuggagaauguu

SEQ ID NO: 1858 - RNA, 21 nt, RNAi
uuuacuuuaccaaccucuuac

SEQ ID NO: 1859 - DNA, 21 bp, Homo sapiens
caccaccagacagcctacaat

SEQ ID NO: 1860 - RNA, 21 nt, RNAi
ccaccagacagccuacaauuu

SEQ ID NO: 1861 - RNA, 21 nt, RNAi
uugguggucugucggauguua

SEQ ID NO: 1862 - DNA, 21 bp, Homo sapiens
caccagacagcctacaatgct

SEQ ID NO: 1863 - RNA, 21 nt, RNAi
ccagacagccuacaaugcuuu

SEQ ID NO: 1864 - RNA, 21 nt, RNAi
uuggucugucggauguuacga

SEQ ID NO: 1865 - DNA, 21 bp, Homo sapiens
cagacagcctacaatgctctc

SEQ ID NO: 1866 - RNA, 21 nt, RNAi
gacagccuacaaugcucucuu

SEQ ID NO: 1867 - RNA, 21 nt, RNAi
uucugucggauguuacgagag

SEQ ID NO: 1868 - DNA, 21 bp, Homo sapiens
cagcctacaatgctctcctta

SEQ ID NO: 1869 - RNA, 21 nt, RNAi
gccuacaaugcucuccuuauu

SEQ ID NO: 1870 - RNA, 21 nt, RNAi
uucggauguuacgagaggaau

SEQ ID NO: 1871 - DNA, 21 bp, Homo sapiens
caatgctctccttaatgcagg

SEQ ID NO: 1872 - RNA, 21 nt, RNAi
augcucuccuuaaugcagguu

SEQ ID NO: 1873 - RNA, 21 nt, RNAi
uuuacgagaggaauuacgucc

SEQ ID NO: 1874 - DNA, 21 bp, Homo sapiens
cacgactcgctgaactgtacg

SEQ ID NO: 1875 - RNA, 21 nt, RNAi
cgacucgcugaacuguacguu

SEQ ID NO: 1876 - RNA, 21 nt, RNAi
uugcugagcgacuugacaugc

SEQ ID NO: 1877 - DNA, 21 bp, Homo sapiens
caaagtggctctggtccaagg

SEQ ID NO: 1878 - RNA, 21 nt, RNAi
aaguggcucugguccaagguu

SEQ ID NO: 1879 - RNA, 21 nt, RNAi
uuuucaccgagaccagguucc

SEQ ID NO: 1880 - DNA, 21 bp, Homo sapiens
caccaggcactaattgttctt

SEQ ID NO: 1881 - RNA, 21 nt, RNAi
ccaggcacuaauuguucuuuu

SEQ ID NO: 1882 - RNA, 21 nt, RNAi
uugguccgugauuaacaagaa

SEQ ID NO: 1883 - DNA, 21 bp, Homo sapiens
caggcactaattgttcttcaa

SEQ ID NO: 1884 - RNA, 21 nt, RNAi
ggcacuaauuguucuucaauu

SEQ ID NO: 1885 - RNA, 21 nt, RNAi
uuccgugauuaacaagaaguu

SEQ ID NO: 1886 - DNA, 21 bp, Homo sapiens
catgttaatccatggtcgagc

SEQ ID NO: 1887 - RNA, 21 nt, RNAi
uguuaauccauggucgagcuu

SEQ ID NO: 1888 - RNA, 21 nt, RNAi
uuacaauuagguaccagcucg

SEQ ID NO: 1889 - DNA, 21 bp, Homo sapiens
catggtcgagctatgctacta

SEQ ID NO: 1890 - RNA, 21 nt, RNAi
uggucgagcuaugcuacuauu

SEQ ID NO: 1891 - RNA, 21 nt, RNAi
uuaccagcucgauacgaugau

SEQ ID NO: 1892 - DNA, 21 bp, Homo sapiens
cagctaactttgaaagcaatg

SEQ ID NO: 1893 - RNA, 21 nt, RNAi
gcuaacuuugaaagcaauguu

SEQ ID NO: 1894 - RNA, 21 nt, RNAi
uucgauugaaacuuucguuac

SEQ ID NO: 1895 - DNA, 21 bp, Homo sapiens
caaggtgatctcatccggtat

SEQ ID NO: 1896 - RNA, 21 nt, RNAi
aggugaucucauccgguauuu

SEQ ID NO: 1897 - RNA, 21 nt, RNAi
uuuccacuagaguaggccaua

SEQ ID NO: 1898 - DNA, 21 bp, Homo sapiens
catccggtatatagttcttca

SEQ ID NO: 1899 - RNA, 21 nt, RNAi
uccgguauauaguucuucauu

SEQ ID NO: 1900 - RNA, 21 nt, RNAi
uuaggccauauaucaagaagu

SEQ ID NO: 1901 - DNA, 21 bp, Homo sapiens
cagatctctacaatatggaaa

SEQ ID NO: 1902 - RNA, 21 nt, RNAi
gaucucuacaauauggaaauu

SEQ ID NO: 1903 - RNA, 21 nt, RNAi
uucuagagauguuauaccuuu

SEQ ID NO: 1904 - DNA, 21 bp, Homo sapiens
cagttcatatatcagtcaatg

SEQ ID NO: 1905 - RNA, 21 nt, RNAi
guucauauaucagucaauguu

SEQ ID NO: 1906 - RNA, 21 nt, RNAi
uucaaguauauagucaguuac

SEQ ID NO: 1907 - DNA, 21 bp, Homo sapiens
catatatcagtcaatgccacg

SEQ ID NO: 1908 - RNA, 21 nt, RNAi
uauaucagucaaugccacguu

SEQ ID NO: 1909 - RNA, 21 nt, RNAi
uuauauagucaguuacggugc

SEQ ID NO: 1910 - DNA, 21 bp, Homo sapiens
cagtcaatgccacgaatgtta

SEQ ID NO: 1911 - RNA, 21 nt, RNAi
gucaaugccacgaauguuauu

SEQ ID NO: 1912 - RNA, 21 nt, RNAi
uucaguuacggugcuuacaau

SEQ ID NO: 1913 - DNA, 21 bp, Homo sapiens
caatgccacgaatgttaactc

SEQ ID NO: 1914 - RNA, 21 nt, RNAi
augccacgaauguuaacucuu

SEQ ID NO: 1915 - RNA, 21 nt, RNAi
uuuacggugcuuacaauugag

SEQ ID NO: 1916 - DNA, 21 bp, Homo sapiens
cacgaatgttaactctatggc

SEQ ID NO: 1917 - RNA, 21 nt, RNAi
cgaauguuaacucuauggcuu

SEQ ID NO: 1918 - RNA, 21 nt, RNAi
uugcuuacaauugagauaccg

SEQ ID NO: 1919 - DNA, 21 bp, Homo sapiens
caaggttatcacagagcatac

SEQ ID NO: 1920 - RNA, 21 nt, RNAi
agguuaucacagagcauacuu

SEQ ID NO: 1921 - RNA, 21 nt, RNAi
uuuccaauagugucucguaug

SEQ ID NO: 1922 - DNA, 21 bp, Homo sapiens
cacagagcatacaaactattt

SEQ ID NO: 1923 - RNA, 21 nt, RNAi
cagagcauacaaacuauuuuu

SEQ ID NO: 1924 - RNA, 21 nt, RNAi
uugucucguauguuugauaaa

SEQ ID NO: 1925 - DNA, 21 bp, Homo sapiens
cagagcatacaaactatttag

SEQ ID NO: 1926 - RNA, 21 nt, RNAi
gagcauacaaacuauuuaguu

SEQ ID NO: 1927 - RNA, 21 nt, RNAi
uucucguauguuugauaaauc

SEQ ID NO: 1928 - DNA, 21 bp, Homo sapiens
catacaaactatttagctcca

SEQ ID NO: 1929 - RNA, 21 nt, RNAi
uacaaacuauuuagcuccauu

SEQ ID NO: 1930 - RNA, 21 nt, RNAi
uuauguuugauaaaucgaggu

SEQ ID NO: 1931 - DNA, 21 bp, Homo sapiens
caaactatttagctccatatc

SEQ ID NO: 1932 - RNA, 21 nt, RNAi
aacuauuuagcuccauaucuu

SEQ ID NO: 1933 - RNA, 21 nt, RNAi
uuuugauaaaucgagguauag

SEQ ID NO: 1934 - DNA, 21 bp, Homo sapiens
cacaattgatctctcgaattt

SEQ ID NO: 1935 - RNA, 21 nt, RNAi
caauugaucucucgaauuuuu

SEQ ID NO: 1936 - RNA, 21 nt, RNAi
uuguuaacuagagagcuuaaa

SEQ ID NO: 1937 - DNA, 21 bp, Homo sapiens
caattgatctctcgaatttgt

SEQ ID NO: 1938 - RNA, 21 nt, RNAi
auugaucucucgaauuuguuu

SEQ ID NO: 1939 - RNA, 21 nt, RNAi
uuuaacuagagagcuuaaaca

SEQ ID NO: 1940 - DNA, 21 bp, Homo sapiens
caaagtatttctagcctatcc

SEQ ID NO: 1941 - RNA, 21 nt, RNAi
aaguauuucuagccuauccuu

SEQ ID NO: 1942 - RNA, 21 nt, RNAi
uuuucauaaagaucggauagg

SEQ ID NO: 1943 - DNA, 21 bp, Homo sapiens
caacaagcaatgtggatgatg

SEQ ID NO: 1944 - RNA, 21 nt, RNAi
acaagcaauguggaugauguu

SEQ ID NO: 1945 - RNA, 21 nt, RNAi
uuuguucguuacaccuacuac

SEQ ID NO: 1946 - DNA, 21 bp, Homo sapiens
caagcaatgtggatgatgaca

SEQ ID NO: 1947 - RNA, 21 nt, RNAi
agcaauguggaugaugacauu

SEQ ID NO: 1948 - RNA, 21 nt, RNAi
uuucguuacaccuacuacugu

SEQ ID NO: 1949 - DNA, 21 bp, Homo sapiens
caatgtggatgatgacagctg

SEQ ID NO: 1950 - RNA, 21 nt, RNAi
auguggaugaugacagcuguu

SEQ ID NO: 1951 - RNA, 21 nt, RNAi
uuuacaccuacuacugucgac

SEQ ID NO: 1952 - DNA, 21 bp, Homo sapiens
cagctgtgtcaaagtcatctt

SEQ ID NO: 1953 - RNA, 21 nt, RNAi
gcugugucaaagucaucuuuu

SEQ ID NO: 1954 - RNA, 21 nt, RNAi
uucgacacaguuucaguagaa

SEQ ID NO: 1955 - DNA, 21 bp, Homo sapiens
catgcgtgtgaacagatgcaa

SEQ ID NO: 1956 - RNA, 21 nt, RNAi
ugcgugugaacagaugcaauu

SEQ ID NO: 1957 - RNA, 21 nt, RNAi
uuacgcacacuugucuacguu

SEQ ID NO: 1958 - DNA, 21 bp, Homo sapiens
cagatgcaaggaaatcctcaa

SEQ ID NO: 1959 - RNA, 21 nt, RNAi
gaugcaaggaaauccucaauu

SEQ ID NO: 1960 - RNA, 21 nt, RNAi
uucuacguuccuuuaggaguu

SEQ ID NO: 1961 - DNA, 21 bp, Homo sapiens
caaggaaatcctcaataaagc

SEQ ID NO: 1962 - RNA, 21 nt, RNAi
aggaaauccucaauaaagcuu

SEQ ID NO: 1963 - RNA, 21 nt, RNAi
uuuccuuuaggaguuauuucg

SEQ ID NO: 1964 - DNA, 21 bp, Homo sapiens
caactcgcctaacagataagc

SEQ ID NO: 1965 - RNA, 21 nt, RNAi
acucgccuaacagauaagcuu

SEQ ID NO: 1966 - RNA, 21 nt, RNAi
uuugagcggauugucuauucg

SEQ ID NO: 1967 - DNA, 21 bp, Homo sapiens
cagataagcttctagaattgt

SEQ ID NO: 1968 - RNA, 21 nt, RNAi
gauaagcuucuagaauuguuu

SEQ ID NO: 1969 - RNA, 21 nt, RNAi
uucuauucgaagaucuuaaca

SEQ ID NO: 1970 - DNA, 21 bp, Homo sapiens
caataaaccggttgatggaag

SEQ ID NO: 1971 - RNA, 21 nt, RNAi
auaaaccgguugauggaaguu

SEQ ID NO: 1972 - RNA, 21 nt, RNAi
uuuauuuggccaacuaccuuc

SEQ ID NO: 1973 - DNA, 21 bp, Homo sapiens
cacattaagcatgagcactca

SEQ ID NO: 1974 - RNA, 21 nt, RNAi
cauuaagcaugagcacucauu

SEQ ID NO: 1975 - RNA, 21 nt, RNAi
uuguaauucguacucgugagu

SEQ ID NO: 1976 - DNA, 21 bp, Homo sapiens
cattaagcatgagcactcatt

SEQ ID NO: 1977 - RNA, 21 nt, RNAi
uuaagcaugagcacucauuuu

SEQ ID NO: 1978 - RNA, 21 nt, RNAi
uuaauucguacucgugaguaa

SEQ ID NO: 1979 - DNA, 21 bp, Homo sapiens
caacatttagtgaaatcctca

SEQ ID NO: 1980 - RNA, 21 nt, RNAi
acauuuagugaaauccucauu

SEQ ID NO: 1981 - RNA, 21 nt, RNAi
uuuguaaaucacuuuaggagu

SEQ ID NO: 1982 - DNA, 21 bp, Homo sapiens
catttagtgaaatcctcattc

SEQ ID NO: 1983 - RNA, 21 nt, RNAi
uuuagugaaauccucauucuu

SEQ ID NO: 1984 - RNA, 21 nt, RNAi
uuaaaucacuuuaggaguaag

SEQ ID NO: 1985 - DNA, 21 bp, Homo sapiens
cattcctctacaatcagtcat

SEQ ID NO: 1986 - RNA, 21 nt, RNAi
uuccucuacaaucagucauuu

SEQ ID NO: 1987 - RNA, 21 nt, RNAi
uuaaggagauguuagucagua

SEQ ID NO: 1988 - DNA, 21 bp, Homo sapiens
caatcagtcatgatacctaca

SEQ ID NO: 1989 - RNA, 21 nt, RNAi
aucagucaugauaccuacauu

SEQ ID NO: 1990 - RNA, 21 nt, RNAi
uuuagucaguacuauggaugu

SEQ ID NO: 1991 - DNA, 21 bp, Homo sapiens
cagtcatgatacctacacttc

SEQ ID NO: 1992 - RNA, 21 nt, RNAi
gucaugauaccuacacuucuu

SEQ ID NO: 1993 - RNA, 21 nt, RNAi
uucaguacuauggaugugaag

SEQ ID NO: 1994 - DNA, 21 bp, Homo sapiens
catgatacctacacttccatc

SEQ ID NO: 1995 - RNA, 21 nt, RNAi
ugauaccuacacuuccaucuu

SEQ ID NO: 1996 - RNA, 21 nt, RNAi
uuacuauggaugugaagguag

SEQ ID NO: 1997 - DNA, 21 bp, Homo sapiens
catgctaaccatgctagccat

SEQ ID NO: 1998 - RNA, 21 nt, RNAi
ugcuaaccaugcuagccauuu

SEQ ID NO: 1999 - RNA, 21 nt, RNAi
uuacgauugguacgaucggua

SEQ ID NO: 2000 - DNA, 21 bp, Homo sapiens
catgctagccatgaaccattt

SEQ ID NO: 2001 - RNA, 21 nt, RNAi
ugcuagccaugaaccauuuuu

SEQ ID NO: 2002 - RNA, 21 nt, RNAi
uuacgaucgguacuugguaaa

SEQ ID NO: 2003 - DNA, 21 bp, Homo sapiens
catgaaccatttcctggacat

SEQ ID NO: 2004 - RNA, 21 nt, RNAi
ugaaccauuuccuggacauuu

SEQ ID NO: 2005 - RNA, 21 nt, RNAi
uuacuugguaaaggaccugua

SEQ ID NO: 2006 - DNA, 21 bp, Homo sapiens
cagaaaccaaagaagatttct

SEQ ID NO: 2007 - RNA, 21 nt, RNAi
gaaaccaaagaagauuucuuu

SEQ ID NO: 2008 - RNA, 21 nt, RNAi
uucuuugguuucuucuaaaga

SEQ ID NO: 2009 - DNA, 21 bp, Homo sapiens
cagatggaaagttctacatca

SEQ ID NO: 2010 - RNA, 21 nt, RNAi
gauggaaaguucuacaucauu

SEQ ID NO: 2011 - RNA, 21 nt, RNAi
uucuaccuuucaagauguagu

SEQ ID NO: 2012 - DNA, 21 bp, Homo sapiens
catcatgatgtgtaagccaaa

SEQ ID NO: 2013 - RNA, 21 nt, RNAi
ucaugauguguaagccaaauu

SEQ ID NO: 2014 - RNA, 21 nt, RNAi
uuaguacuacacauucgguuu

SEQ ID NO: 2015 - DNA, 21 bp, Homo sapiens
cagagtctcgtagaagagaac

SEQ ID NO: 2016 - RNA, 21 nt, RNAi
gagucucguagaagagaacuu

SEQ ID NO: 2017 - RNA, 21 nt, RNAi
uucucagagcaucuucucuug

SEQ ID NO: 2018 - DNA, 21 bp, Homo sapiens
catattcgaacatatgcagtt

SEQ ID NO: 2019 - RNA, 21 nt, RNAi
uauucgaacauaugcaguuuu

SEQ ID NO: 2020 - RNA, 21 nt, RNAi
uuauaagcuuguauacgucaa

SEQ ID NO: 2021 - DNA, 21 bp, Homo sapiens
catatgcagttattccactaa

SEQ ID NO: 2022 - RNA, 21 nt, RNAi
uaugcaguuauuccacuaauu

SEQ ID NO: 2023 - RNA, 21 nt, RNAi
uuauacgucaauaaggugauu

SEQ ID NO: 2024 - DNA, 21 bp, Homo sapiens
cagttattccactaaatgatg

SEQ ID NO: 2025 - RNA, 21 nt, RNAi
guuauuccacuaaaugauguu

SEQ ID NO: 2026 - RNA, 21 nt, RNAi
uucaauaaggugauuuacuac

SEQ ID NO: 2027 - DNA, 21 bp, Homo sapiens
caacactgctggtttgagacc

SEQ ID NO: 2028 - RNA, 21 nt, RNAi
acacugcugguuugagaccuu

SEQ ID NO: 2029 - RNA, 21 nt, RNAi
uuugugacgaccaaacucugg

SEQ ID NO: 2030 - DNA, 21 bp, Homo sapiens
cactgctggtttgagacctat

SEQ ID NO: 2031 - RNA, 21 nt, RNAi
cugcugguuugagaccuauuu

SEQ ID NO: 2032 - RNA, 21 nt, RNAi
uugacgaccaaacucuggaua

SEQ ID NO: 2033 - DNA, 21 bp, Homo sapiens
cagtgtatgctaccaaagtca

SEQ ID NO: 2034 - RNA, 21 nt, RNAi
guguaugcuaccaaagucauu

SEQ ID NO: 2035 - RNA, 21 nt, RNAi
uucacauacgaugguuucagu

SEQ ID NO: 2036 - DNA, 21 bp, Homo sapiens
caaagtcagcagctttatctg

SEQ ID NO: 2037 - RNA, 21 nt, RNAi
aagucagcagcuuuaucuguu

SEQ ID NO: 2038 - RNA, 21 nt, RNAi
uuuucagucgucgaaauagac

SEQ ID NO: 2039 - DNA, 21 bp, Homo sapiens
caaagtattccgagaatttct

SEQ ID NO: 2040 - RNA, 21 nt, RNAi
aaguauuccgagaauuucuuu

SEQ ID NO: 2041 - RNA, 21 nt, RNAi
uuuucauaaggcucuuaaaga

SEQ ID NO: 2042 - DNA, 21 bp, Homo sapiens
catgagtggtttctgagaaca

SEQ ID NO: 2043 - RNA, 21 nt, RNAi
ugagugguuucugagaacauu

SEQ ID NO: 2044 - RNA, 21 nt, RNAi
uuacucaccaaagacucuugu

SEQ ID NO: 2045 - DNA, 21 bp, Homo sapiens
catcatggtacagtagtagat

SEQ ID NO: 2046 - RNA, 21 nt, RNAi
ucaugguacaguaguagauuu

SEQ ID NO: 2047 - RNA, 21 nt, RNAi
uuaguaccaugucaucaucua

SEQ ID NO: 2048 - DNA, 21 bp, Homo sapiens
catggtacagtagtagatcag

SEQ ID NO: 2049 - RNA, 21 nt, RNAi
ugguacaguaguagaucaguu

SEQ ID NO: 2050 - RNA, 21 nt, RNAi
uuaccaugucaucaucuaguc

SEQ ID NO: 2051 - DNA, 21 bp, Homo sapiens
cagtagtagatcagcttactg

SEQ ID NO: 2052 - RNA, 21 nt, RNAi
guaguagaucagcuuacuguu

SEQ ID NO: 2053 - RNA, 21 nt, RNAi
uucaucaucuagucgaaugac

SEQ ID NO: 2054 - DNA, 21 bp, Homo sapiens
cagcttactgccgttccactg

SEQ ID NO: 2055 - RNA, 21 nt, RNAi
gcuuacugccguuccacuguu

SEQ ID NO: 2056 - RNA, 21 nt, RNAi
uucgaaugacggcaaggugac

SEQ ID NO: 2057 - DNA, 21 bp, Homo sapiens
cactgcagtaatgtcaatggt

SEQ ID NO: 2058 - RNA, 21 nt, RNAi
cugcaguaaugucaaugguuu

SEQ ID NO: 2059 - RNA, 21 nt, RNAi
uugacgucauuacaguuacca

SEQ ID NO: 2060 - DNA, 21 bp, Homo sapiens
cagtaatgtcaatggttggtt

SEQ ID NO: 2061 - RNA, 21 nt, RNAi
guaaugucaaugguugguuuu

SEQ ID NO: 2062 - RNA, 21 nt, RNAi
uucauuacaguuaccaaccaa

SEQ ID NO: 2063 - DNA, 21 bp, Homo sapiens
caatggttggttatattctgg

SEQ ID NO: 2064 - RNA, 21 nt, RNAi
augguugguuauauucugguu

SEQ ID NO: 2065 - RNA, 21 nt, RNAi
uuuaccaaccaauauaagacc

SEQ ID NO: 2066 - DNA, 21 bp, Homo sapiens
cagaaattgtgccatttcgcc

SEQ ID NO: 2067 - RNA, 21 nt, RNAi
gaaauugugccauuucgccuu

SEQ ID NO: 2068 - RNA, 21 nt, RNAi
uucuuuaacacgguaaagcgg

SEQ ID NO: 2069 - DNA, 21 bp, Homo sapiens
catttcgcctgactcataata

SEQ ID NO: 2070 - RNA, 21 nt, RNAi
uuucgccugacucauaauauu

SEQ ID NO: 2071 - RNA, 21 nt, RNAi
uuaaagcggacugaguauuau

SEQ ID NO: 2072 - DNA, 21 bp, Homo sapiens
catgtgaagttacaatgaggc

SEQ ID NO: 2073 - RNA, 21 nt, RNAi
ugugaaguuacaaugaggcuu

SEQ ID NO: 2074 - RNA, 21 nt, RNAi
uuacacuucaauguuacuccg

SEQ ID NO: 2075 - DNA, 21 bp, Homo sapiens
caatgaggctgatgcgtgatc

SEQ ID NO: 2076 - RNA, 21 nt, RNAi
augaggcugaugcgugaucuu

SEQ ID NO: 2077 - RNA, 21 nt, RNAi
uuuacuccgacuacgcacuag

SEQ ID NO: 2078 - DNA, 21 bp, Homo sapiens
cagcgagagcctttaatgagt

SEQ ID NO: 2079 - RNA, 21 nt, RNAi
gcgagagccuuuaaugaguuu

SEQ ID NO: 2080 - RNA, 21 nt, RNAi
uucgcucucggaaauuacuca

SEQ ID NO: 2081 - DNA, 21 bp, Homo sapiens
catgatcctcttgtggaatgg

SEQ ID NO: 2082 - RNA, 21 nt, RNAi
ugauccucuuguggaaugguu

SEQ ID NO: 2083 - RNA, 21 nt, RNAi
uuacuaggagaacaccuuacc

SEQ ID NO: 2084 - DNA, 21 bp, Homo sapiens
cattccaaagcgccactgaat

SEQ ID NO: 2085 - RNA, 21 nt, RNAi
uuccaaagcgccacugaauuu

SEQ ID NO: 2086 - RNA, 21 nt, RNAi
uuaagguuucgcggugacuua

SEQ ID NO: 2087 - DNA, 21 bp, Homo sapiens
caaagcgccactgaatgaaac

SEQ ID NO: 2088 - RNA, 21 nt, RNAi
aagcgccacugaaugaaacuu

SEQ ID NO: 2089 - RNA, 21 nt, RNAi
uuuucgcggugacuuacuuug

SEQ ID NO: 2090 - DNA, 21 bp, Homo sapiens
cactgaatgaaactggagaag

SEQ ID NO: 2091 - RNA, 21 nt, RNAi
cugaaugaaacuggagaaguu

SEQ ID NO: 2092 - RNA, 21 nt, RNAi
uugacuuacuuugaccucuuc

SEQ ID NO: 2093 - DNA, 21 bp, Homo sapiens
catgttcttgacattgagcag

SEQ ID NO: 2094 - RNA, 21 nt, RNAi
uguucuugacauugagcaguu

SEQ ID NO: 2095 - RNA, 21 nt, RNAi
uuacaagaacuguaacucguc

SEQ ID NO: 2096 - DNA, 21 bp, Homo sapiens
cattgagcagcgactacaagg

SEQ ID NO: 2097 - RNA, 21 nt, RNAi
uugagcagcgacuacaagguu

SEQ ID NO: 2098 - RNA, 21 nt, RNAi
uuaacucgucgcugauguucc

SEQ ID NO: 2099 - DNA, 21 bp, Homo sapiens
cagcgactacaaggtgtaatc

SEQ ID NO: 2100 - RNA, 21 nt, RNAi
gcgacuacaagguguaaucuu

SEQ ID NO: 2101 - RNA, 21 nt, RNAi
uucgcugauguuccacauuag

SEQ ID NO: 2102 - DNA, 21 bp, Homo sapiens
caaggtgtaatcaagactcga

SEQ ID NO: 2103 - RNA, 21 nt, RNAi
agguguaaucaagacucgauu

SEQ ID NO: 2104 - RNA, 21 nt, RNAi
uuuccacauuaguucugagcu

SEQ ID NO: 2105 - DNA, 21 bp, Homo sapiens
caagactcgaaatagagtgac

SEQ ID NO: 2106 - RNA, 21 nt, RNAi
agacucgaaauagagugacuu

SEQ ID NO: 2107 - RNA, 21 nt, RNAi
uuucugagcuuuaucucacug

SEQ ID NO: 2108 - DNA, 21 bp, Homo sapiens
caggactgccgttatctattg

SEQ ID NO: 2109 - RNA, 21 nt, RNAi
ggacugccguuaucuauuguu

SEQ ID NO: 2110 - RNA, 21 nt, RNAi
uuccugacggcaauagauaac

SEQ ID NO: 2111 - DNA, 21 bp, Homo sapiens
catgtgcattaccttatacaa

SEQ ID NO: 2112 - RNA, 21 nt, RNAi
ugugcauuaccuuauacaauu

SEQ ID NO: 2113 - RNA, 21 nt, RNAi
uuacacguaauggaauauguu

SEQ ID NO: 2114 - DNA, 21 bp, Homo sapiens
cattaccttatacaagaagct

SEQ ID NO: 2115 - RNA, 21 nt, RNAi
uuaccuuauacaagaagcuuu

SEQ ID NO: 2116 - RNA, 21 nt, RNAi
uuaauggaauauguucuucga

SEQ ID NO: 2117 - DNA, 21 bp, Homo sapiens
cagatgtatcttggttggact

SEQ ID NO: 2118 - RNA, 21 nt, RNAi
gauguaucuugguuggacuuu

SEQ ID NO: 2119 - RNA, 21 nt, RNAi
uucuacauagaaccaaccuga

SEQ ID NO: 2120 - DNA, 21 bp, Homo sapiens
catttggtatgaatctgtggt

SEQ ID NO: 2121 - RNA, 21 nt, RNAi
uuugguaugaaucugugguuu

SEQ ID NO: 2122 - RNA, 21 nt, RNAi
uuaaaccauacuuagacacca

SEQ ID NO: 2123 - DNA, 21 bp, Homo sapiens
cataaatttacgttctcagca

SEQ ID NO: 2124 - RNA, 21 nt, RNAi
uaaauuuacguucucagcauu

SEQ ID NO: 2125 - RNA, 21 nt, RNAi
uuauuuaaaugcaagagucgu

SEQ ID NO: 2126 - DNA, 21 bp, Homo sapiens
cagcaactgttatttctctct

SEQ ID NO: 2127 - RNA, 21 nt, RNAi
gcaacuguuauuucucucuuu

SEQ ID NO: 2128 - RNA, 21 nt, RNAi
uucguugacaauaaagagaga

SEQ ID NO: 2129 - DNA, 21 bp, Homo sapiens
caactgttatttctctctgat

SEQ ID NO: 2130 - RNA, 21 nt, RNAi
acuguuauuucucucugauuu

SEQ ID NO: 2131 - RNA, 21 nt, RNAi
uuugacaauaaagagagacua

SEQ ID NO: 2132 - DNA, 21 bp, Homo sapiens
gactagtgcctcgcagcctca

SEQ ID NO: 2133 - RNA, 21 nt, RNAi
cuagugccucgcagccucauu

SEQ ID NO: 2134 - RNA, 21 nt, RNAi
uugaucacggagcgucggagu

SEQ ID NO: 2135 - DNA, 21 bp, Homo sapiens
gaacatggcctggagctggct

SEQ ID NO: 2136 - RNA, 21 nt, RNAi
acauggccuggagcuggcuuu

SEQ ID NO: 2137 - RNA, 21 nt, RNAi
uuuguaccggaccucgaccga

SEQ ID NO: 2138 - DNA, 21 bp, Homo sapiens
gaagccaagacaaattctgtg

SEQ ID NO: 2139 - RNA, 21 nt, RNAi
agccaagacaaauucuguguu

SEQ ID NO: 2140 - RNA, 21 nt, RNAi
uuucgguucuguuuaagacac

SEQ ID NO: 2141 - DNA, 21 bp, Homo sapiens
gacaaattctgtgtcaattca

SEQ ID NO: 2142 - RNA, 21 nt, RNAi
caaauucugugucaauucauu

SEQ ID NO: 2143 - RNA, 21 nt, RNAi
uuguuuaagacacaguuaagu

SEQ ID NO: 2144 - DNA, 21 bp, Homo sapiens
gaccggatacttacagatgta

SEQ ID NO: 2145 - RNA, 21 nt, RNAi
ccggauacuuacagauguauu

SEQ ID NO: 2146 - RNA, 21 nt, RNAi
uuggccuaugaaugucuacau

SEQ ID NO: 2147 - DNA, 21 bp, Homo sapiens
gatgtaaatgttgttgctgta

SEQ ID NO: 2148 - RNA, 21 nt, RNAi
uguaaauguuguugcuguauu

SEQ ID NO: 2149 - RNA, 21 nt, RNAi
uuacauuuacaacaacgacau

SEQ ID NO: 2150 - DNA, 21 bp, Homo sapiens
gactctcagccaacctccgtg

SEQ ID NO: 2151 - RNA, 21 nt, RNAi
cucucagccaaccuccguguu

SEQ ID NO: 2152 - RNA, 21 nt, RNAi
uugagagucgguuggaggcac

SEQ ID NO: 2153 - DNA, 21 bp, Homo sapiens
gatgttgcttgatttcatcca

SEQ ID NO: 2154 - RNA, 21 nt, RNAi
uguugcuugauuucauccauu

SEQ ID NO: 2155 - RNA, 21 nt, RNAi
uuacaacgaacuaaaguaggu

SEQ ID NO: 2156 - DNA, 21 bp, Homo sapiens
gatttcatccagcatatcatg

SEQ ID NO: 2157 - RNA, 21 nt, RNAi
uuucauccagcauaucauguu

SEQ ID NO: 2158 - RNA, 21 nt, RNAi
uuaaaguaggucguauaguac

SEQ ID NO: 2159 - DNA, 21 bp, Homo sapiens
gagtggaagccatgagcgcaa

SEQ ID NO: 2160 - RNA, 21 nt, RNAi
guggaagccaugagcgcaauu

SEQ ID NO: 2161 - RNA, 21 nt, RNAi
uucaccuucgguacucgcguu

SEQ ID NO: 2162 - DNA, 21 bp, Homo sapiens
gaagccatgagcgcaaaggca

SEQ ID NO: 2163 - RNA, 21 nt, RNAi
agccaugagcgcaaaggcauu

SEQ ID NO: 2164 - RNA, 21 nt, RNAi
uuucgguacucgcguuuccgu

SEQ ID NO: 2165 - DNA, 21 bp, Homo sapiens
gagcgcaaaggcagttgtatt

SEQ ID NO: 2166 - RNA, 21 nt, RNAi
gcgcaaaggcaguuguauuuu

SEQ ID NO: 2167 - RNA, 21 nt, RNAi
uucgcguuuccgucaacauaa

SEQ ID NO: 2168 - DNA, 21 bp, Homo sapiens
gatcataacgagacttctgcg

SEQ ID NO: 2169 - RNA, 21 nt, RNAi
ucauaacgagacuucugcguu

SEQ ID NO: 2170 - RNA, 21 nt, RNAi
uuaguauugcucugaagacgc

SEQ ID NO: 2171 - DNA, 21 bp, Homo sapiens
gagacttctgcggattgcagc

SEQ ID NO: 2172 - RNA, 21 nt, RNAi
gacuucugcggauugcagcuu

SEQ ID NO: 2173 - RNA, 21 nt, RNAi
uucugaagacgccuaacgucg

SEQ ID NO: 2174 - DNA, 21 bp, Homo sapiens
gacttctgcggattgcagcaa

SEQ ID NO: 2175 - RNA, 21 nt, RNAi
cuucugcggauugcagcaauu

SEQ ID NO: 2176 - RNA, 21 nt, RNAi
uugaagacgccuaacgucguu

SEQ ID NO: 2177 - DNA, 21 bp, Homo sapiens
gaagacttggtttacctccat

SEQ ID NO: 2178 - RNA, 21 nt, RNAi
agacuugguuuaccuccauuu

SEQ ID NO: 2179 - RNA, 21 nt, RNAi
uuucugaaccaaauggaggua

SEQ ID NO: 2180 - DNA, 21 bp, Homo sapiens
gacttggtttacctccataga

SEQ ID NO: 2181 - RNA, 21 nt, RNAi
cuugguuuaccuccauagauu

SEQ ID NO: 2182 - RNA, 21 nt, RNAi
uugaaccaaauggagguaucu

SEQ ID NO: 2183 - DNA, 21 bp, Homo sapiens
gaatggccagtggtcatgagc

SEQ ID NO: 2184 - RNA, 21 nt, RNAi
auggccaguggucaugagcuu

SEQ ID NO: 2185 - RNA, 21 nt, RNAi
uuuaccggucaccaguacucg

SEQ ID NO: 2186 - DNA, 21 bp, Homo sapiens
gatatttacaatcagctcctt

SEQ ID NO: 2187 - RNA, 21 nt, RNAi
uauuuacaaucagcuccuuuu

SEQ ID NO: 2188 - RNA, 21 nt, RNAi
uuauaaauguuagucgaggaa

SEQ ID NO: 2189 - DNA, 21 bp, Homo sapiens
gaaggcaagaactcttacttt

SEQ ID NO: 2190 - RNA, 21 nt, RNAi
aggcaagaacucuuacuuuuu

SEQ ID NO: 2191 - RNA, 21 nt, RNAi
uuuccguucuugagaaugaaa

SEQ ID NO: 2192 - DNA, 21 bp, Homo sapiens
gaactcttactttggcagata

SEQ ID NO: 2193 - RNA, 21 nt, RNAi
acucuuacuuuggcagauauu

SEQ ID NO: 2194 - RNA, 21 nt, RNAi
uuugagaaugaaaccgucuau

SEQ ID NO: 2195 - DNA, 21 bp, Homo sapiens
gataggttgtgttctgctaga

SEQ ID NO: 2196 - RNA, 21 nt, RNAi
uagguuguguucugcuagauu

SEQ ID NO: 2197 - RNA, 21 nt, RNAi
uuauccaacacaagacgaucu

SEQ ID NO: 2198 - DNA, 21 bp, Homo sapiens
gaggactaccagcacaaccag

SEQ ID NO: 2199 - RNA, 21 nt, RNAi
ggacuaccagcacaaccaguu

SEQ ID NO: 2200 - RNA, 21 nt, RNAi
uuccugauggucguguugguc

SEQ ID NO: 2201 - DNA, 21 bp, Homo sapiens
gactaccagcacaaccagcta

SEQ ID NO: 2202 - RNA, 21 nt, RNAi
cuaccagcacaaccagcuauu

SEQ ID NO: 2203 - RNA, 21 nt, RNAi
uugauggucguguuggucgau

SEQ ID NO: 2204 - DNA, 21 bp, Homo sapiens
gaaatggatactgaccaattg

SEQ ID NO: 2205 - RNA, 21 nt, RNAi
aauggauacugaccaauuguu

SEQ ID NO: 2206 - RNA, 21 nt, RNAi
uuuuaccuaugacugguuaac

SEQ ID NO: 2207 - DNA, 21 bp, Homo sapiens
gatactgaccaattgaaactc

SEQ ID NO: 2208 - RNA, 21 nt, RNAi
uacugaccaauugaaacucuu

SEQ ID NO: 2209 - RNA, 21 nt, RNAi
uuaugacugguuaacuuugag

SEQ ID NO: 2210 - DNA, 21 bp, Homo sapiens
gaccaattgaaactctatgaa

SEQ ID NO: 2211 - RNA, 21 nt, RNAi
ccaauugaaacucuaugaauu

SEQ ID NO: 2212 - RNA, 21 nt, RNAi
uugguuaacuuugagauacuu

SEQ ID NO: 2213 - DNA, 21 bp, Homo sapiens
gaaactctatgaagagccatt

SEQ ID NO: 2214 - RNA, 21 nt, RNAi
aacucuaugaagagccauuuu

SEQ ID NO: 2215 - RNA, 21 nt, RNAi
uuuugagauacuucucgguaa

SEQ ID NO: 2216 - DNA, 21 bp, Homo sapiens
gaagagccattatcaaagctg

SEQ ID NO: 2217 - RNA, 21 nt, RNAi
agagccauuaucaaagcuguu

SEQ ID NO: 2218 - RNA, 21 nt, RNAi
uuucucgguaauaguuucgac

SEQ ID NO: 2219 - DNA, 21 bp, Homo sapiens
gagccattatcaaagctgata

SEQ ID NO: 2220 - RNA, 21 nt, RNAi
gccauuaucaaagcugauauu

SEQ ID NO: 2221 - RNA, 21 nt, RNAi
uucgguaauaguuucgacuau

SEQ ID NO: 2222 - DNA, 21 bp, Homo sapiens
gaagcagaagcttatagaaat

SEQ ID NO: 2223 - RNA, 21 nt, RNAi
agcagaagcuuauagaaauuu

SEQ ID NO: 2224 - RNA, 21 nt, RNAi
uuucgucuucgaauaucuuua

SEQ ID NO: 2225 - DNA, 21 bp, Homo sapiens
gaagacggtgtgctcatgcgg

SEQ ID NO: 2226 - RNA, 21 nt, RNAi
agacggugugcucaugcgguu

SEQ ID NO: 2227 - RNA, 21 nt, RNAi
uuucugccacacgaguacgcc

SEQ ID NO: 2228 - DNA, 21 bp, Homo sapiens
gacggtgtgctcatgcggctt

SEQ ID NO: 2229 - RNA, 21 nt, RNAi
cggugugcucaugcggcuuuu

SEQ ID NO: 2230 - RNA, 21 nt, RNAi
uugccacacgaguacgccgaa

SEQ ID NO: 2231 - DNA, 21 bp, Homo sapiens
gaatctgctttacaagtcagg

SEQ ID NO: 2232 - RNA, 21 nt, RNAi
aucugcuuuacaagucagguu

SEQ ID NO: 2233 - RNA, 21 nt, RNAi
uuuagacgaaauguucagucc

SEQ ID NO: 2234 - DNA, 21 bp, Homo sapiens
gaaggtctatgtgagaaatat

SEQ ID NO: 2235 - RNA, 21 nt, RNAi
aggucuaugugagaaauauuu

SEQ ID NO: 2236 - RNA, 21 nt, RNAi
uuuccagauacacucuuuaua

SEQ ID NO: 2237 - DNA, 21 bp, Homo sapiens
gatgtgcttggaattgaggta

SEQ ID NO: 2238 - RNA, 21 nt, RNAi
ugugcuuggaauugagguauu

SEQ ID NO: 2239 - RNA, 21 nt, RNAi
uuacacgaaccuuaacuccau

SEQ ID NO: 2240 - DNA, 21 bp, Homo sapiens
gaattgaggtagatgcagagt

SEQ ID NO: 2241 - RNA, 21 nt, RNAi
auugagguagaugcagaguuu

SEQ ID NO: 2242 - RNA, 21 nt, RNAi
uuuaacuccaucuacgucuca

SEQ ID NO: 2243 - DNA, 21 bp, Homo sapiens
gaggtagatgcagagtacttg

SEQ ID NO: 2244 - RNA, 21 nt, RNAi
gguagaugcagaguacuuguu

SEQ ID NO: 2245 - RNA, 21 nt, RNAi
uuccaucuacgucucaugaac

SEQ ID NO: 2246 - DNA, 21 bp, Homo sapiens
gaaagtatggaaatcattgag

SEQ ID NO: 2247 - RNA, 21 nt, RNAi
aaguauggaaaucauugaguu

SEQ ID NO: 2248 - RNA, 21 nt, RNAi
uuuucauaccuuuaguaacuc

SEQ ID NO: 2249 - DNA, 21 bp, Homo sapiens
gaaatcattgaggagattcaa

SEQ ID NO: 2250 - RNA, 21 nt, RNAi
aaucauugaggagauucaauu

SEQ ID NO: 2251 - RNA, 21 nt, RNAi
uuuuaguaacuccucuaaguu

SEQ ID NO: 2252 - DNA, 21 bp, Homo sapiens
gaggagattcaatgccaaact

SEQ ID NO: 2253 - RNA, 21 nt, RNAi
ggagauucaaugccaaacuuu

SEQ ID NO: 2254 - RNA, 21 nt, RNAi
uuccucuaaguuacgguuuga

SEQ ID NO: 2255 - DNA, 21 bp, Homo sapiens
gagattcaatgccaaactcaa

SEQ ID NO: 2256 - RNA, 21 nt, RNAi
gauucaaugccaaacucaauu

SEQ ID NO: 2257 - RNA, 21 nt, RNAi
uucuaaguuacgguuugaguu

SEQ ID NO: 2258 - DNA, 21 bp, Homo sapiens
gattcaatgccaaactcaaca

SEQ ID NO: 2259 - RNA, 21 nt, RNAi
uucaaugccaaacucaacauu

SEQ ID NO: 2260 - RNA, 21 nt, RNAi
uuaaguuacgguuugaguugu

SEQ ID NO: 2261 - DNA, 21 bp, Homo sapiens
gactgaggaaattaaacatgt

SEQ ID NO: 2262 - RNA, 21 nt, RNAi
cugaggaaauuaaacauguuu

SEQ ID NO: 2263 - RNA, 21 nt, RNAi
uugacuccuuuaauuuguaca

SEQ ID NO: 2264 - DNA, 21 bp, Homo sapiens
gaggaaattaaacatgtggac

SEQ ID NO: 2265 - RNA, 21 nt, RNAi
ggaaauuaaacauguggacuu

SEQ ID NO: 2266 - RNA, 21 nt, RNAi
uuccuuuaauuuguacaccug

SEQ ID NO: 2267 - DNA, 21 bp, Homo sapiens
gaaattaaacatgtggacatg

SEQ ID NO: 2268 - RNA, 21 nt, RNAi
aauuaaacauguggacauguu

SEQ ID NO: 2269 - RNA, 21 nt, RNAi
uuuuaauuuguacaccuguac

SEQ ID NO: 2270 - DNA, 21 bp, Homo sapiens
gagcatattatggagtgcact

SEQ ID NO: 2271 - RNA, 21 nt, RNAi
gcauauuauggagugcacuuu

SEQ ID NO: 2272 - RNA, 21 nt, RNAi
uucguauaauaccucacguga

SEQ ID NO: 2273 - DNA, 21 bp, Homo sapiens
gagtgcactgaaacagaaagc

SEQ ID NO: 2274 - RNA, 21 nt, RNAi
gugcacugaaacagaaagcuu

SEQ ID NO: 2275 - RNA, 21 nt, RNAi
uucacgugacuuugucuuucg

SEQ ID NO: 2276 - DNA, 21 bp, Homo sapiens
gaatacagtggcctaaagaat

SEQ ID NO: 2277 - RNA, 21 nt, RNAi
auacaguggccuaaagaauuu

SEQ ID NO: 2278 - RNA, 21 nt, RNAi
uuuaugucaccggauuucuua

SEQ ID NO: 2279 - DNA, 21 bp, Homo sapiens
gaatcctgttattgagatgtt

SEQ ID NO: 2280 - RNA, 21 nt, RNAi
auccuguuauugagauguuuu

SEQ ID NO: 2281 - RNA, 21 nt, RNAi
uuuaggacaauaacucuacaa

SEQ ID NO: 2282 - DNA, 21 bp, Homo sapiens
gagatgttagaaggaattgct

SEQ ID NO: 2283 - RNA, 21 nt, RNAi
gauguuagaaggaauugcuuu

SEQ ID NO: 2284 - RNA, 21 nt, RNAi
uucuacaaucuuccuuaacga

SEQ ID NO: 2285 - DNA, 21 bp, Homo sapiens
gatgttagaaggaattgctgt

SEQ ID NO: 2286 - RNA, 21 nt, RNAi
uguuagaaggaauugcuguuu

SEQ ID NO: 2287 - RNA, 21 nt, RNAi
uuacaaucuuccuuaacgaca

SEQ ID NO: 2288 - DNA, 21 bp, Homo sapiens
gaaggaattgctgttgtctta

SEQ ID NO: 2289 - RNA, 21 nt, RNAi
aggaauugcuguugucuuauu

SEQ ID NO: 2290 - RNA, 21 nt, RNAi
uuuccuuaacgacaacagaau

SEQ ID NO: 2291 - DNA, 21 bp, Homo sapiens
gaattgctgttgtcttacaac

SEQ ID NO: 2292 - RNA, 21 nt, RNAi
auugcuguugucuuacaacuu

SEQ ID NO: 2293 - RNA, 21 nt, RNAi
uuuaacgacaacagaauguug

SEQ ID NO: 2294 - DNA, 21 bp, Homo sapiens
gactgctctgtgtactgttca

SEQ ID NO: 2295 - RNA, 21 nt, RNAi
cugcucuguguacuguucauu

SEQ ID NO: 2296 - RNA, 21 nt, RNAi
uugacgagacacaugacaagu

SEQ ID NO: 2297 - DNA, 21 bp, Homo sapiens
gaactgccgtactttcaagga

SEQ ID NO: 2298 - RNA, 21 nt, RNAi
acugccguacuuucaaggauu

SEQ ID NO: 2299 - RNA, 21 nt, RNAi
uuugacggcaugaaaguuccu

SEQ ID NO: 2300 - DNA, 21 bp, Homo sapiens
gactgtcaacataaatccaag

SEQ ID NO: 2301 - RNA, 21 nt, RNAi
cugucaacauaaauccaaguu

SEQ ID NO: 2302 - RNA, 21 nt, RNAi
uugacaguuguauuuagguuc

SEQ ID NO: 2303 - DNA, 21 bp, Homo sapiens
gaagaaaccttctgtagtgat

SEQ ID NO: 2304 - RNA, 21 nt, RNAi
agaaaccuucuguagugauuu

SEQ ID NO: 2305 - RNA, 21 nt, RNAi
uuucuuuggaagacaucacua

SEQ ID NO: 2306 - DNA, 21 bp, Homo sapiens
gaaaccttctgtagtgataac

SEQ ID NO: 2307 - RNA, 21 nt, RNAi
aaccuucuguagugauaacuu

SEQ ID NO: 2308 - RNA, 21 nt, RNAi
uuuuggaagacaucacuauug

SEQ ID NO: 2309 - DNA, 21 bp, Homo sapiens
gataacttggatgtcattgga

SEQ ID NO: 2310 - RNA, 21 nt, RNAi
uaacuuggaugucauuggauu

SEQ ID NO: 2311 - RNA, 21 nt, RNAi
uuauugaaccuacaguaaccu

SEQ ID NO: 2312 - DNA, 21 bp, Homo sapiens
gagctgtagaagtttgttaga

SEQ ID NO: 2313 - RNA, 21 nt, RNAi
gcuguagaaguuuguuagauu

SEQ ID NO: 2314 - RNA, 21 nt, RNAi
uucgacaucuucaaacaaucu

SEQ ID NO: 2315 - DNA, 21 bp, Homo sapiens
gaagtttgttagaatctgttc

SEQ ID NO: 2316 - RNA, 21 nt, RNAi
aguuuguuagaaucuguucuu

SEQ ID NO: 2317 - RNA, 21 nt, RNAi
uuucaaacaaucuuagacaag

SEQ ID NO: 2318 - DNA, 21 bp, Homo sapiens
gaatctgttcagaaactggac

SEQ ID NO: 2319 - RNA, 21 nt, RNAi
aucuguucagaaacuggacuu

SEQ ID NO: 2320 - RNA, 21 nt, RNAi
uuuagacaagucuuugaccug

SEQ ID NO: 2321 - DNA, 21 bp, Homo sapiens
gaaactggacctggaggcaac

SEQ ID NO: 2322 - RNA, 21 nt, RNAi
aacuggaccuggaggcaacuu

SEQ ID NO: 2323 - RNA, 21 nt, RNAi
uuuugaccuggaccuccguug

SEQ ID NO: 2324 - DNA, 21 bp, Homo sapiens
gacctggaggcaaccattgat

SEQ ID NO: 2325 - RNA, 21 nt, RNAi
ccuggaggcaaccauugauuu

SEQ ID NO: 2326 - RNA, 21 nt, RNAi
uuggaccuccguugguaacua

SEQ ID NO: 2327 - DNA, 21 bp, Homo sapiens
gaggcaaccattgataaggtg

SEQ ID NO: 2328 - RNA, 21 nt, RNAi
ggcaaccauugauaagguguu

SEQ ID NO: 2329 - RNA, 21 nt, RNAi
uuccguugguaacuauuccac

SEQ ID NO: 2330 - DNA, 21 bp, Homo sapiens
gaagatcatatcctggaagat

SEQ ID NO: 2331 - RNA, 21 nt, RNAi
agaucauauccuggaagauuu

SEQ ID NO: 2332 - RNA, 21 nt, RNAi
uuucuaguauaggaccuucua

SEQ ID NO: 2333 - DNA, 21 bp, Homo sapiens
gatcatatcctggaagattta

SEQ ID NO: 2334 - RNA, 21 nt, RNAi
ucauauccuggaagauuuauu

SEQ ID NO: 2335 - RNA, 21 nt, RNAi
uuaguauaggaccuucuaaau

SEQ ID NO: 2336 - DNA, 21 bp, Homo sapiens
gaagatttatgtggtatgctc

SEQ ID NO: 2337 - RNA, 21 nt, RNAi
agauuuaugugguaugcucuu

SEQ ID NO: 2338 - RNA, 21 nt, RNAi
uuucuaaauacaccauacgag

SEQ ID NO: 2339 - DNA, 21 bp, Homo sapiens
gatttatgtggtatgctctca

SEQ ID NO: 2340 - RNA, 21 nt, RNAi
uuuaugugguaugcucucauu

SEQ ID NO: 2341 - RNA, 21 nt, RNAi
uuaaauacaccauacgagagu

SEQ ID NO: 2342 - DNA, 21 bp, Homo sapiens
gatgatggctgtttaaagttg

SEQ ID NO: 2343 - RNA, 21 nt, RNAi
ugauggcuguuuaaaguuguu

SEQ ID NO: 2344 - RNA, 21 nt, RNAi
uuacuaccgacaaauuucaac

SEQ ID NO: 2345 - DNA, 21 bp, Homo sapiens
gatggctgtttaaagttgacc

SEQ ID NO: 2346 - RNA, 21 nt, RNAi
uggcuguuuaaaguugaccuu

SEQ ID NO: 2347 - RNA, 21 nt, RNAi
uuaccgacaaauuucaacugg

SEQ ID NO: 2348 - DNA, 21 bp, Homo sapiens
gaccacatttgccgctaatct

SEQ ID NO: 2349 - RNA, 21 nt, RNAi
ccacauuugccgcuaaucuuu

SEQ ID NO: 2350 - RNA, 21 nt, RNAi
uugguguaaacggcgauuaga

SEQ ID NO: 2351 - DNA, 21 bp, Homo sapiens
gatttcagatagctattcacc

SEQ ID NO: 2352 - RNA, 21 nt, RNAi
uuucagauagcuauucaccuu

SEQ ID NO: 2353 - RNA, 21 nt, RNAi
uuaaagucuaucgauaagugg

SEQ ID NO: 2354 - DNA, 21 bp, Homo sapiens
gatagctattcaccacaggca

SEQ ID NO: 2355 - RNA, 21 nt, RNAi
uagcuauucaccacaggcauu

SEQ ID NO: 2356 - RNA, 21 nt, RNAi
uuaucgauaagugguguccgu

SEQ ID NO: 2357 - DNA, 21 bp, Homo sapiens
gatgtgtgtttcttctgactc

SEQ ID NO: 2358 - RNA, 21 nt, RNAi
uguguguuucuucugacucuu

SEQ ID NO: 2359 - RNA, 21 nt, RNAi
uuacacacaaagaagacugag

SEQ ID NO: 2360 - DNA, 21 bp, Homo sapiens
gactctgtttccaagaagaat

SEQ ID NO: 2361 - RNA, 21 nt, RNAi
cucuguuuccaagaagaauuu

SEQ ID NO: 2362 - RNA, 21 nt, RNAi
uugagacaaagguucuucuua

SEQ ID NO: 2363 - DNA, 21 bp, Homo sapiens
gaagaatattccttgagtgga

SEQ ID NO: 2364 - RNA, 21 nt, RNAi
agaauauuccuugaguggauu

SEQ ID NO: 2365 - RNA, 21 nt, RNAi
uuucuuauaaggaacucaccu

SEQ ID NO: 2366 - DNA, 21 bp, Homo sapiens
gaatattccttgagtggagaa

SEQ ID NO: 2367 - RNA, 21 nt, RNAi
auauuccuugaguggagaauu

SEQ ID NO: 2368 - RNA, 21 nt, RNAi
uuuauaaggaacucaccucuu

SEQ ID NO: 2369 - DNA, 21 bp, Homo sapiens
gagtggagaacagcagtttac

SEQ ID NO: 2370 - RNA, 21 nt, RNAi
guggagaacagcaguuuacuu

SEQ ID NO: 2371 - RNA, 21 nt, RNAi
uucaccucuugucgucaaaug

SEQ ID NO: 2372 - DNA, 21 bp, Homo sapiens
gagaacagcagtttacaactg

SEQ ID NO: 2373 - RNA, 21 nt, RNAi
gaacagcaguuuacaacuguu

SEQ ID NO: 2374 - RNA, 21 nt, RNAi
uucuugucgucaaauguugac

SEQ ID NO: 2375 - DNA, 21 bp, Homo sapiens
gaattcttgtaacagagttcc

SEQ ID NO: 2376 - RNA, 21 nt, RNAi
auucuuguaacagaguuccuu

SEQ ID NO: 2377 - RNA, 21 nt, RNAi
uuuaagaacauugucucaagg

SEQ ID NO: 2378 - DNA, 21 bp, Homo sapiens
gatgattctgacattgtcaag

SEQ ID NO: 2379 - RNA, 21 nt, RNAi
ugauucugacauugucaaguu

SEQ ID NO: 2380 - RNA, 21 nt, RNAi
uuacuaagacuguaacaguuc

SEQ ID NO: 2381 - DNA, 21 bp, Homo sapiens
gattctgacattgtcaagaaa

SEQ ID NO: 2382 - RNA, 21 nt, RNAi
uucugacauugucaagaaauu

SEQ ID NO: 2383 - RNA, 21 nt, RNAi
uuaagacuguaacaguucuuu

SEQ ID NO: 2384 - DNA, 21 bp, Homo sapiens
gaatttgcttctatacttggt

SEQ ID NO: 2385 - RNA, 21 nt, RNAi
auuugcuucuauacuugguuu

SEQ ID NO: 2386 - RNA, 21 nt, RNAi
uuuaaacgaagauaugaacca

SEQ ID NO: 2387 - DNA, 21 bp, Homo sapiens
gacaagttctttaacagaacc

SEQ ID NO: 2388 - RNA, 21 nt, RNAi
caaguucuuuaacagaaccuu

SEQ ID NO: 2389 - RNA, 21 nt, RNAi
uuguucaagaaauugucuugg

SEQ ID NO: 2390 - DNA, 21 bp, Homo sapiens
gaacctttctctgaacacgga

SEQ ID NO: 2391 - RNA, 21 nt, RNAi
accuuucucugaacacggauu

SEQ ID NO: 2392 - RNA, 21 nt, RNAi
uuuggaaagagacuugugccu

SEQ ID NO: 2393 - DNA, 21 bp, Homo sapiens
gaacacggacatgtggacctc

SEQ ID NO: 2394 - RNA, 21 nt, RNAi
acacggacauguggaccucuu

SEQ ID NO: 2395 - RNA, 21 nt, RNAi
uuugugccuguacaccuggag

SEQ ID NO: 2396 - DNA, 21 bp, Homo sapiens
gacatgtggacctcttctgta

SEQ ID NO: 2397 - RNA, 21 nt, RNAi
cauguggaccucuucuguauu

SEQ ID NO: 2398 - RNA, 21 nt, RNAi
uuguacaccuggagaagacau

SEQ ID NO: 2399 - DNA, 21 bp, Homo sapiens
gacctcttctgtaggaacttg

SEQ ID NO: 2400 - RNA, 21 nt, RNAi
ccucuucuguaggaacuuguu

SEQ ID NO: 2401 - RNA, 21 nt, RNAi
uuggagaagacauccuugaac

SEQ ID NO: 2402 - DNA, 21 bp, Homo sapiens
gaacttgaaagccacttctca

SEQ ID NO: 2403 - RNA, 21 nt, RNAi
acuugaaagccacuucucauu

SEQ ID NO: 2404 - RNA, 21 nt, RNAi
uuugaacuuucggugaagagu

SEQ ID NO: 2405 - DNA, 21 bp, Homo sapiens
gaaagccacttctcaacatga

SEQ ID NO: 2406 - RNA, 21 nt, RNAi
aagccacuucucaacaugauu

SEQ ID NO: 2407 - RNA, 21 nt, RNAi
uuuucggugaagaguuguacu

SEQ ID NO: 2408 - DNA, 21 bp, Homo sapiens
gaatgttcatcttctcaacta

SEQ ID NO: 2409 - RNA, 21 nt, RNAi
auguucaucuucucaacuauu

SEQ ID NO: 2410 - RNA, 21 nt, RNAi
uuuacaaguagaagaguugau

SEQ ID NO: 2411 - DNA, 21 bp, Homo sapiens
gagaagatgaaacagatgtaa

SEQ ID NO: 2412 - RNA, 21 nt, RNAi
gaagaugaaacagauguaauu

SEQ ID NO: 2413 - RNA, 21 nt, RNAi
uucuucuacuuugucuacauu

SEQ ID NO: 2414 - DNA, 21 bp, Homo sapiens
gaagatccagacaaagatgtt

SEQ ID NO: 2415 - RNA, 21 nt, RNAi
agauccagacaaagauguuuu

SEQ ID NO: 2416 - RNA, 21 nt, RNAi
uuucuaggucuguuucuacaa

SEQ ID NO: 2417 - DNA, 21 bp, Homo sapiens
gatccagacaaagatgttaga

SEQ ID NO: 2418 - RNA, 21 nt, RNAi
uccagacaaagauguuagauu

SEQ ID NO: 2419 - RNA, 21 nt, RNAi
uuaggucuguuucuacaaucu

SEQ ID NO: 2420 - DNA, 21 bp, Homo sapiens
gacaaagatgttagagtggct

SEQ ID NO: 2421 - RNA, 21 nt, RNAi
caaagauguuagaguggcuuu

SEQ ID NO: 2422 - RNA, 21 nt, RNAi
uuguuucuacaaucucaccga

SEQ ID NO: 2423 - DNA, 21 bp, Homo sapiens
gaaatatcaagcacatattgg

SEQ ID NO: 2424 - RNA, 21 nt, RNAi
aauaucaagcacauauugguu

SEQ ID NO: 2425 - RNA, 21 nt, RNAi
uuuuauaguucguguauaacc

SEQ ID NO: 2426 - DNA, 21 bp, Homo sapiens
gaatccttggactctgaagat

SEQ ID NO: 2427 - RNA, 21 nt, RNAi
auccuuggacucugaagauuu

SEQ ID NO: 2428 - RNA, 21 nt, RNAi
uuuaggaaccugagacuucua

SEQ ID NO: 2429 - DNA, 21 bp, Homo sapiens
gactctgaagatggatttata

SEQ ID NO: 2430 - RNA, 21 nt, RNAi
cucugaagauggauuuauauu

SEQ ID NO: 2431 - RNA, 21 nt, RNAi
uugagacuucuaccuaaauau

SEQ ID NO: 2432 - DNA, 21 bp, Homo sapiens
gaagatggatttataaaggag

SEQ ID NO: 2433 - RNA, 21 nt, RNAi
agauggauuuauaaaggaguu

SEQ ID NO: 2434 - RNA, 21 nt, RNAi
uuucuaccuaaauauuuccuc

SEQ ID NO: 2435 - DNA, 21 bp, Homo sapiens
gatggatttataaaggagctt

SEQ ID NO: 2436 - RNA, 21 nt, RNAi
uggauuuauaaaggagcuuuu

SEQ ID NO: 2437 - RNA, 21 nt, RNAi
uuaccuaaauauuuccucgaa

SEQ ID NO: 2438 - DNA, 21 bp, Homo sapiens
gaatgaaggaagcatatacac

SEQ ID NO: 2439 - RNA, 21 nt, RNAi
augaaggaagcauauacacuu

SEQ ID NO: 2440 - RNA, 21 nt, RNAi
uuuacuuccuucguauaugug

SEQ ID NO: 2441 - DNA, 21 bp, Homo sapiens
gaaggaagcatatacacatgc

SEQ ID NO: 2442 - RNA, 21 nt, RNAi
aggaagcauauacacaugcuu

SEQ ID NO: 2443 - RNA, 21 nt, RNAi
uuuccuucguauauguguacg

SEQ ID NO: 2444 - DNA, 21 bp, Homo sapiens
gaaataatgagctgaaggata

SEQ ID NO: 2445 - RNA, 21 nt, RNAi
aauaaugagcugaaggauauu

SEQ ID NO: 2446 - RNA, 21 nt, RNAi
uuuuauuacucgacuuccuau

SEQ ID NO: 2447 - DNA, 21 bp, Homo sapiens
gagctgaaggataccttgatt

SEQ ID NO: 2448 - RNA, 21 nt, RNAi
gcugaaggauaccuugauuuu

SEQ ID NO: 2449 - RNA, 21 nt, RNAi
uucgacuuccuauggaacuaa

SEQ ID NO: 2450 - DNA, 21 bp, Homo sapiens
gaaggataccttgattcttac

SEQ ID NO: 2451 - RNA, 21 nt, RNAi
aggauaccuugauucuuacuu

SEQ ID NO: 2452 - RNA, 21 nt, RNAi
uuuccuauggaacuaagaaug

SEQ ID NO: 2453 - DNA, 21 bp, Homo sapiens
gataccttgattcttacaaca

SEQ ID NO: 2454 - RNA, 21 nt, RNAi
uaccuugauucuuacaacauu

SEQ ID NO: 2455 - RNA, 21 nt, RNAi
uuauggaacuaagaauguugu

SEQ ID NO: 2456 - DNA, 21 bp, Homo sapiens
gagatttggtaccatttgcac

SEQ ID NO: 2457 - RNA, 21 nt, RNAi
gauuugguaccauuugcacuu

SEQ ID NO: 2458 - RNA, 21 nt, RNAi
uucuaaaccaugguaaacgug

SEQ ID NO: 2459 - DNA, 21 bp, Homo sapiens
gatttggtaccatttgcactc

SEQ ID NO: 2460 - RNA, 21 nt, RNAi
uuugguaccauuugcacucuu

SEQ ID NO: 2461 - RNA, 21 nt, RNAi
uuaaaccaugguaaacgugag

SEQ ID NO: 2462 - DNA, 21 bp, Homo sapiens
gagcagcatacacagaaatta

SEQ ID NO: 2463 - RNA, 21 nt, RNAi
gcagcauacacagaaauuauu

SEQ ID NO: 2464 - RNA, 21 nt, RNAi
uucgucguaugugucuuuaau

SEQ ID NO: 2465 - DNA, 21 bp, Homo sapiens
gaaattagagctctggttgca

SEQ ID NO: 2466 - RNA, 21 nt, RNAi
aauuagagcucugguugcauu

SEQ ID NO: 2467 - RNA, 21 nt, RNAi
uuuuaaucucgagaccaacgu

SEQ ID NO: 2468 - DNA, 21 bp, Homo sapiens
gatgacagcacttccgaatac

SEQ ID NO: 2469 - RNA, 21 nt, RNAi
ugacagcacuuccgaauacuu

SEQ ID NO: 2470 - RNA, 21 nt, RNAi
uuacugucgugaaggcuuaug

SEQ ID NO: 2471 - DNA, 21 bp, Homo sapiens
gacagcacttccgaatactcc

SEQ ID NO: 2472 - RNA, 21 nt, RNAi
cagcacuuccgaauacuccuu

SEQ ID NO: 2473 - RNA, 21 nt, RNAi
uugucgugaaggcuuaugagg

SEQ ID NO: 2474 - DNA, 21 bp, Homo sapiens
gaatactccatgccagaatgc

SEQ ID NO: 2475 - RNA, 21 nt, RNAi
auacuccaugccagaaugcuu

SEQ ID NO: 2476 - RNA, 21 nt, RNAi
uuuaugagguacggucuuacg

SEQ ID NO: 2477 - DNA, 21 bp, Homo sapiens
gatgtggctcaccagagagaa

SEQ ID NO: 2478 - RNA, 21 nt, RNAi
uguggcucaccagagagaauu

SEQ ID NO: 2479 - RNA, 21 nt, RNAi
uuacaccgaguggucucucuu

SEQ ID NO: 2480 - DNA, 21 bp, Homo sapiens
gagagaaatggctttaaatac

SEQ ID NO: 2481 - RNA, 21 nt, RNAi
gagaaauggcuuuaaauacuu

SEQ ID NO: 2482 - RNA, 21 nt, RNAi
uucucuuuaccgaaauuuaug

SEQ ID NO: 2483 - DNA, 21 bp, Homo sapiens
gagaaatggctttaaatacgt

SEQ ID NO: 2484 - RNA, 21 nt, RNAi
gaaauggcuuuaaauacguuu

SEQ ID NO: 2485 - RNA, 21 nt, RNAi
uucuuuaccgaaauuuaugca

SEQ ID NO: 2486 - DNA, 21 bp, Homo sapiens
gaaatggctttaaatacgttg

SEQ ID NO: 2487 - RNA, 21 nt, RNAi
aauggcuuuaaauacguuguu

SEQ ID NO: 2488 - RNA, 21 nt, RNAi
uuuuaccgaaauuuaugcaac

SEQ ID NO: 2489 - DNA, 21 bp, Homo sapiens
gactttcctgatcttaatcgt

SEQ ID NO: 2490 - RNA, 21 nt, RNAi
cuuuccugaucuuaaucguuu

SEQ ID NO: 2491 - RNA, 21 nt, RNAi
uugaaaggacuagaauuagca

SEQ ID NO: 2492 - DNA, 21 bp, Homo sapiens
gacattacaagttctactacc

SEQ ID NO: 2493 - RNA, 21 nt, RNAi
cauuacaaguucuacuaccuu

SEQ ID NO: 2494 - RNA, 21 nt, RNAi
uuguaauguucaagaugaugg

SEQ ID NO: 2495 - DNA, 21 bp, Homo sapiens
gatcttgctgccaaagcaagc

SEQ ID NO: 2496 - RNA, 21 nt, RNAi
ucuugcugccaaagcaagcuu

SEQ ID NO: 2497 - RNA, 21 nt, RNAi
uuagaacgacgguuucguucg

SEQ ID NO: 2498 - DNA, 21 bp, Homo sapiens
gagcctgttgagacaagattt

SEQ ID NO: 2499 - RNA, 21 nt, RNAi
gccuguugagacaagauuuuu

SEQ ID NO: 2500 - RNA, 21 nt, RNAi
uucggacaacucuguucuaaa

SEQ ID NO: 2501 - DNA, 21 bp, Homo sapiens
gagacaagatttccaaggatt

SEQ ID NO: 2502 - RNA, 21 nt, RNAi
gacaagauuuccaaggauuuu

SEQ ID NO: 2503 - RNA, 21 nt, RNAi
uucuguucuaaagguuccuaa

SEQ ID NO: 2504 - DNA, 21 bp, Homo sapiens
gacaagatttccaaggattgc

SEQ ID NO: 2505 - RNA, 21 nt, RNAi
caagauuuccaaggauugcuu

SEQ ID NO: 2506 - RNA, 21 nt, RNAi
uuguucuaaagguuccuaacg

SEQ ID NO: 2507 - DNA, 21 bp, Homo sapiens
gatttccaaggattgcataat

SEQ ID NO: 2508 - RNA, 21 nt, RNAi
uuuccaaggauugcauaauuu

SEQ ID NO: 2509 - RNA, 21 nt, RNAi
uuaaagguuccuaacguauua

SEQ ID NO: 2510 - DNA, 21 bp, Homo sapiens
gaattattgctgcgtattgga

SEQ ID NO: 2511 - RNA, 21 nt, RNAi
auuauugcugcguauuggauu

SEQ ID NO: 2512 - RNA, 21 nt, RNAi
uuuaauaacgacgcauaaccu

SEQ ID NO: 2513 - DNA, 21 bp, Homo sapiens
gagaacactatcaacaggttt

SEQ ID NO: 2514 - RNA, 21 nt, RNAi
gaacacuaucaacagguuuuu

SEQ ID NO: 2515 - RNA, 21 nt, RNAi
uucuugugauaguuguccaaa

SEQ ID NO: 2516 - DNA, 21 bp, Homo sapiens
gagagatatcatatcacctga

SEQ ID NO: 2517 - RNA, 21 nt, RNAi
gagauaucauaucaccugauu

SEQ ID NO: 2518 - RNA, 21 nt, RNAi
uucucuauaguauaguggacu

SEQ ID NO: 2519 - DNA, 21 bp, Homo sapiens
gagatatcatatcacctgaac

SEQ ID NO: 2520 - RNA, 21 nt, RNAi
gauaucauaucaccugaacuu

SEQ ID NO: 2521 - RNA, 21 nt, RNAi
uucuauaguauaguggacuug

SEQ ID NO: 2522 - DNA, 21 bp, Homo sapiens
gatatcatatcacctgaactg

SEQ ID NO: 2523 - RNA, 21 nt, RNAi
uaucauaucaccugaacuguu

SEQ ID NO: 2524 - RNA, 21 nt, RNAi
uuauaguauaguggacuugac

SEQ ID NO: 2525 - DNA, 21 bp, Homo sapiens
gaactgatggctgattattta

SEQ ID NO: 2526 - RNA, 21 nt, RNAi
acugauggcugauuauuuauu

SEQ ID NO: 2527 - RNA, 21 nt, RNAi
uuugacuaccgacuaauaaau

SEQ ID NO: 2528 - DNA, 21 bp, Homo sapiens
gatggctgattatttacaacc

SEQ ID NO: 2529 - RNA, 21 nt, RNAi
uggcugauuauuuacaaccuu

SEQ ID NO: 2530 - RNA, 21 nt, RNAi
uuaccgacuaauaaauguugg

SEQ ID NO: 2531 - DNA, 21 bp, Homo sapiens
gagctctagtgttggcattga

SEQ ID NO: 2532 - RNA, 21 nt, RNAi
gcucuaguguuggcauugauu

SEQ ID NO: 2533 - RNA, 21 nt, RNAi
uucgagaucacaaccguaacu

SEQ ID NO: 2534 - DNA, 21 bp, Homo sapiens
gaacagtttgatgtctttgat

SEQ ID NO: 2535 - RNA, 21 nt, RNAi
acaguuugaugucuuugauuu

SEQ ID NO: 2536 - RNA, 21 nt, RNAi
uuugucaaacuacagaaacua

SEQ ID NO: 2537 - DNA, 21 bp, Homo sapiens
gaagatgatgaccacactgag

SEQ ID NO: 2538 - RNA, 21 nt, RNAi
agaugaugaccacacugaguu

SEQ ID NO: 2539 - RNA, 21 nt, RNAi
uuucuacuacuggugugacuc

SEQ ID NO: 2540 - DNA, 21 bp, Homo sapiens
gatgatgaccacactgagaac

SEQ ID NO: 2541 - RNA, 21 nt, RNAi
ugaugaccacacugagaacuu

SEQ ID NO: 2542 - RNA, 21 nt, RNAi
uuacuacuggugugacucuug

SEQ ID NO: 2543 - DNA, 21 bp, Homo sapiens
gatgaccacactgagaactgg

SEQ ID NO: 2544 - RNA, 21 nt, RNAi
ugaccacacugagaacugguu

SEQ ID NO: 2545 - RNA, 21 nt, RNAi
uuacuggugugacucuugacc

SEQ ID NO: 2546 - DNA, 21 bp, Homo sapiens
gaccacactgagaactggcct

SEQ ID NO: 2547 - RNA, 21 nt, RNAi
ccacacugagaacuggccuuu

SEQ ID NO: 2548 - RNA, 21 nt, RNAi
uuggugugacucuugaccgga

SEQ ID NO: 2549 - DNA, 21 bp, Homo sapiens
gagaactggccttcgattcaa

SEQ ID NO: 2550 - RNA, 21 nt, RNAi
gaacuggccuucgauucaauu

SEQ ID NO: 2551 - RNA, 21 nt, RNAi
uucuugaccggaagcuaaguu

SEQ ID NO: 2552 - DNA, 21 bp, Homo sapiens
gaactggccttcgattcaagg

SEQ ID NO: 2553 - RNA, 21 nt, RNAi
acuggccuucgauucaagguu

SEQ ID NO: 2554 - RNA, 21 nt, RNAi
uuugaccggaagcuaaguucc

SEQ ID NO: 2555 - DNA, 21 bp, Homo sapiens
gaattgtgttgcagagcttgg

SEQ ID NO: 2556 - RNA, 21 nt, RNAi
auuguguugcagagcuugguu

SEQ ID NO: 2557 - RNA, 21 nt, RNAi
uuuaacacaacgucucgaacc

SEQ ID NO: 2558 - DNA, 21 bp, Homo sapiens
gactgctttgttcgctgcctg

SEQ ID NO: 2559 - RNA, 21 nt, RNAi
cugcuuuguucgcugccuguu

SEQ ID NO: 2560 - RNA, 21 nt, RNAi
uugacgaaacaagcgacggac

SEQ ID NO: 2561 - DNA, 21 bp, Homo sapiens
gaaactgcagctatcttccac

SEQ ID NO: 2562 - RNA, 21 nt, RNAi
aacugcagcuaucuuccacuu

SEQ ID NO: 2563 - RNA, 21 nt, RNAi
uuuugacgucgauagaaggug

SEQ ID NO: 2564 - DNA, 21 bp, Homo sapiens
gaatacagaaaggagacctct

SEQ ID NO: 2565 - RNA, 21 nt, RNAi
auacagaaaggagaccucuuu

SEQ ID NO: 2566 - RNA, 21 nt, RNAi
uuuaugucuuuccucuggaga

SEQ ID NO: 2567 - DNA, 21 bp, Homo sapiens
gaaaggagacctctgagagca

SEQ ID NO: 2568 - RNA, 21 nt, RNAi
aaggagaccucugagagcauu

SEQ ID NO: 2569 - RNA, 21 nt, RNAi
uuuuccucuggagacucucgu

SEQ ID NO: 2570 - DNA, 21 bp, Homo sapiens
gagacctctgagagcactgat

SEQ ID NO: 2571 - RNA, 21 nt, RNAi
gaccucugagagcacugauuu

SEQ ID NO: 2572 - RNA, 21 nt, RNAi
uucuggagacucucgugacua

SEQ ID NO: 2573 - DNA, 21 bp, Homo sapiens
gacctctgagagcactgatct

SEQ ID NO: 2574 - RNA, 21 nt, RNAi
ccucugagagcacugaucuuu

SEQ ID NO: 2575 - RNA, 21 nt, RNAi
uuggagacucucgugacuaga

SEQ ID NO: 2576 - DNA, 21 bp, Homo sapiens
gagagcactgatcttcagaca

SEQ ID NO: 2577 - RNA, 21 nt, RNAi
gagcacugaucuucagacauu

SEQ ID NO: 2578 - RNA, 21 nt, RNAi
uucucgugacuagaagucugu

SEQ ID NO: 2579 - DNA, 21 bp, Homo sapiens
gagcactgatcttcagacaac

SEQ ID NO: 2580 - RNA, 21 nt, RNAi
gcacugaucuucagacaacuu

SEQ ID NO: 2581 - RNA, 21 nt, RNAi
uucgugacuagaagucuguug

SEQ ID NO: 2582 - DNA, 21 bp, Homo sapiens
gatcttcagacaactcttcag

SEQ ID NO: 2583 - RNA, 21 nt, RNAi
ucuucagacaacucuucaguu

SEQ ID NO: 2584 - RNA, 21 nt, RNAi
uuagaagucuguugagaaguc

SEQ ID NO: 2585 - DNA, 21 bp, Homo sapiens
gacaactcttcagctctctat

SEQ ID NO: 2586 - RNA, 21 nt, RNAi
caacucuucagcucucuauuu

SEQ ID NO: 2587 - RNA, 21 nt, RNAi
uuguugagaagucgagagaua

SEQ ID NO: 2588 - DNA, 21 bp, Homo sapiens
gatgttcgtattcatgctctt

SEQ ID NO: 2589 - RNA, 21 nt, RNAi
uguucguauucaugcucuuuu

SEQ ID NO: 2590 - RNA, 21 nt, RNAi
uuacaagcauaaguacgagaa

SEQ ID NO: 2591 - DNA, 21 bp, Homo sapiens
gataaagtatgcaacagacag

SEQ ID NO: 2592 - RNA, 21 nt, RNAi
uaaaguaugcaacagacaguu

SEQ ID NO: 2593 - RNA, 21 nt, RNAi
uuauuucauacguugucuguc

SEQ ID NO: 2594 - DNA, 21 bp, Homo sapiens
gacagtgaaacagtagaacct

SEQ ID NO: 2595 - RNA, 21 nt, RNAi
cagugaaacaguagaaccuuu

SEQ ID NO: 2596 - RNA, 21 nt, RNAi
uugucacuuugucaucuugga

SEQ ID NO: 2597 - DNA, 21 bp, Homo sapiens
gaaacagtagaacctattatc

SEQ ID NO: 2598 - RNA, 21 nt, RNAi
aacaguagaaccuauuaucuu

SEQ ID NO: 2599 - RNA, 21 nt, RNAi
uuuugucaucuuggauaauag

SEQ ID NO: 2600 - DNA, 21 bp, Homo sapiens
gaacctattatctcacagttg

SEQ ID NO: 2601 - RNA, 21 nt, RNAi
accuauuaucucacaguuguu

SEQ ID NO: 2602 - RNA, 21 nt, RNAi
uuuggauaauagagugucaac

SEQ ID NO: 2603 - DNA, 21 bp, Homo sapiens
gaaaggttgccaagatgcaaa

SEQ ID NO: 2604 - RNA, 21 nt, RNAi
aagguugccaagaugcaaauu

SEQ ID NO: 2605 - RNA, 21 nt, RNAi
uuuuccaacgguucuacguuu

SEQ ID NO: 2606 - DNA, 21 bp, Homo sapiens
gatgcaaactctcaagctcgg

SEQ ID NO: 2607 - RNA, 21 nt, RNAi
ugcaaacucucaagcucgguu

SEQ ID NO: 2608 - RNA, 21 nt, RNAi
uuacguuugagaguucgagcc

SEQ ID NO: 2609 - DNA, 21 bp, Homo sapiens
gatagatccaggtcgattaga

SEQ ID NO: 2610 - RNA, 21 nt, RNAi
uagauccaggucgauuagauu

SEQ ID NO: 2611 - RNA, 21 nt, RNAi
uuaucuagguccagcuaaucu

SEQ ID NO: 2612 - DNA, 21 bp, Homo sapiens
gatccaggtcgattagatttc

SEQ ID NO: 2613 - RNA, 21 nt, RNAi
uccaggucgauuagauuucuu

SEQ ID NO: 2614 - RNA, 21 nt, RNAi
uuagguccagcuaaucuaaag

SEQ ID NO: 2615 - DNA, 21 bp, Homo sapiens
gattagatttctcaacaactg

SEQ ID NO: 2616 - RNA, 21 nt, RNAi
uuagauuucucaacaacuguu

SEQ ID NO: 2617 - RNA, 21 nt, RNAi
uuaaucuaaagaguuguugac

SEQ ID NO: 2618 - DNA, 21 bp, Homo sapiens
gatttctcaacaactgaaact

SEQ ID NO: 2619 - RNA, 21 nt, RNAi
uuucucaacaacugaaacuuu

SEQ ID NO: 2620 - RNA, 21 nt, RNAi
uuaaagaguuguugacuuuga

SEQ ID NO: 2621 - DNA, 21 bp, Homo sapiens
gactggagtagaagattcaag

SEQ ID NO: 2622 - RNA, 21 nt, RNAi
cuggaguagaagauucaaguu

SEQ ID NO: 2623 - RNA, 21 nt, RNAi
uugaccucaucuucuaaguuc

SEQ ID NO: 2624 - DNA, 21 bp, Homo sapiens
gagtagaagattcaagctttg

SEQ ID NO: 2625 - RNA, 21 nt, RNAi
guagaagauucaagcuuuguu

SEQ ID NO: 2626 - RNA, 21 nt, RNAi
uucaucuucuaaguucgaaac

SEQ ID NO: 2627 - DNA, 21 bp, Homo sapiens
gaagattcaagctttgcctat

SEQ ID NO: 2628 - RNA, 21 nt, RNAi
agauucaagcuuugccuauuu

SEQ ID NO: 2629 - RNA, 21 nt, RNAi
uuucuaaguucgaaacggaua

SEQ ID NO: 2630 - DNA, 21 bp, Homo sapiens
gattcaagctttgcctatgga

SEQ ID NO: 2631 - RNA, 21 nt, RNAi
uucaagcuuugccuauggauu

SEQ ID NO: 2632 - RNA, 21 nt, RNAi
uuaaguucgaaacggauaccu

SEQ ID NO: 2633 - DNA, 21 bp, Homo sapiens
gattattgatggagctaacaa

SEQ ID NO: 2634 - RNA, 21 nt, RNAi
uuauugauggagcuaacaauu

SEQ ID NO: 2635 - RNA, 21 nt, RNAi
uuaauaacuaccucgauuguu

SEQ ID NO: 2636 - DNA, 21 bp, Homo sapiens
gatggagctaacaagagctta

SEQ ID NO: 2637 - RNA, 21 nt, RNAi
uggagcuaacaagagcuuauu

SEQ ID NO: 2638 - RNA, 21 nt, RNAi
uuaccucgauuguucucgaau

SEQ ID NO: 2639 - DNA, 21 bp, Homo sapiens
gagctaacaagagcttacctt

SEQ ID NO: 2640 - RNA, 21 nt, RNAi
gcuaacaagagcuuaccuuuu

SEQ ID NO: 2641 - RNA, 21 nt, RNAi
uucgauuguucucgaauggaa

SEQ ID NO: 2642 - DNA, 21 bp, Homo sapiens
gagcttaccttgcgtatgctg

SEQ ID NO: 2643 - RNA, 21 nt, RNAi
gcuuaccuugcguaugcuguu

SEQ ID NO: 2644 - RNA, 21 nt, RNAi
uucgaauggaacgcauacgac

SEQ ID NO: 2645 - DNA, 21 bp, Homo sapiens
gataatagccgagctcaagat

SEQ ID NO: 2646 - RNA, 21 nt, RNAi
uaauagccgagcucaagauuu

SEQ ID NO: 2647 - RNA, 21 nt, RNAi
uuauuaucggcucgaguucua

SEQ ID NO: 2648 - DNA, 21 bp, Homo sapiens
gagctcaagattcagctgcct

SEQ ID NO: 2649 - RNA, 21 nt, RNAi
gcucaagauucagcugccuuu

SEQ ID NO: 2650 - RNA, 21 nt, RNAi
uucgaguucuaagucgacgga

SEQ ID NO: 2651 - DNA, 21 bp, Homo sapiens
gattcagctgcctatgccatt

SEQ ID NO: 2652 - RNA, 21 nt, RNAi
uucagcugccuaugccauuuu

SEQ ID NO: 2653 - RNA, 21 nt, RNAi
uuaagucgacggauacgguaa

SEQ ID NO: 2654 - DNA, 21 bp, Homo sapiens
gagttgctttctatttatgac

SEQ ID NO: 2655 - RNA, 21 nt, RNAi
guugcuuucuauuuaugacuu

SEQ ID NO: 2656 - RNA, 21 nt, RNAi
uucaacgaaagauaaauacug

SEQ ID NO: 2657 - DNA, 21 bp, Homo sapiens
gactgtagagagatggagacc

SEQ ID NO: 2658 - RNA, 21 nt, RNAi
cuguagagagauggagaccuu

SEQ ID NO: 2659 - RNA, 21 nt, RNAi
uugacaucucucuaccucugg

SEQ ID NO: 2660 - DNA, 21 bp, Homo sapiens
gagagatggagaccaacggcc

SEQ ID NO: 2661 - RNA, 21 nt, RNAi
gagauggagaccaacggccuu

SEQ ID NO: 2662 - RNA, 21 nt, RNAi
uucucuaccucugguugccgg

SEQ ID NO: 2663 - DNA, 21 bp, Homo sapiens
gaggagatttcctgagcatgt

SEQ ID NO: 2664 - RNA, 21 nt, RNAi
ggagauuuccugagcauguuu

SEQ ID NO: 2665 - RNA, 21 nt, RNAi
uuccucuaaaggacucguaca

SEQ ID NO: 2666 - DNA, 21 bp, Homo sapiens
gagatttcctgagcatgttcg

SEQ ID NO: 2667 - RNA, 21 nt, RNAi
gauuuccugagcauguucguu

SEQ ID NO: 2668 - RNA, 21 nt, RNAi
uucuaaaggacucguacaagc

SEQ ID NO: 2669 - DNA, 21 bp, Homo sapiens
gaaatactagaacctcatcta

SEQ ID NO: 2670 - RNA, 21 nt, RNAi
aauacuagaaccucaucuauu

SEQ ID NO: 2671 - RNA, 21 nt, RNAi
uuuuaugaucuuggaguagau

SEQ ID NO: 2672 - DNA, 21 bp, Homo sapiens
gaacctcatctaaataccaga

SEQ ID NO: 2673 - RNA, 21 nt, RNAi
accucaucuaaauaccagauu

SEQ ID NO: 2674 - RNA, 21 nt, RNAi
uuuggaguagauuuauggucu

SEQ ID NO: 2675 - DNA, 21 bp, Homo sapiens
gatacaagagttctcagaagt

SEQ ID NO: 2676 - RNA, 21 nt, RNAi
uacaagaguucucagaaguuu

SEQ ID NO: 2677 - RNA, 21 nt, RNAi
uuauguucucaagagucuuca

SEQ ID NO: 2678 - DNA, 21 bp, Homo sapiens
gagttctcagaagtcaaccga

SEQ ID NO: 2679 - RNA, 21 nt, RNAi
guucucagaagucaaccgauu

SEQ ID NO: 2680 - RNA, 21 nt, RNAi
uucaagagucuucaguuggcu

SEQ ID NO: 2681 - DNA, 21 bp, Homo sapiens
gaagtcaaccgattggtctgg

SEQ ID NO: 2682 - RNA, 21 nt, RNAi
agucaaccgauuggucugguu

SEQ ID NO: 2683 - RNA, 21 nt, RNAi
uuucaguuggcuaaccagacc

SEQ ID NO: 2684 - DNA, 21 bp, Homo sapiens
gattggtctggagtaaagaag

SEQ ID NO: 2685 - RNA, 21 nt, RNAi
uuggucuggaguaaagaaguu

SEQ ID NO: 2686 - RNA, 21 nt, RNAi
uuaaccagaccucauuucuuc

SEQ ID NO: 2687 - DNA, 21 bp, Homo sapiens
gagtaaagaagccaatttact

SEQ ID NO: 2688 - RNA, 21 nt, RNAi
guaaagaagccaauuuacuuu

SEQ ID NO: 2689 - RNA, 21 nt, RNAi
uucauuucuucgguuaaauga

SEQ ID NO: 2690 - DNA, 21 bp, Homo sapiens
gatgaagcatgatttcaaagt

SEQ ID NO: 2691 - RNA, 21 nt, RNAi
ugaagcaugauuucaaaguuu

SEQ ID NO: 2692 - RNA, 21 nt, RNAi
uuacuucguacuaaaguuuca

SEQ ID NO: 2693 - DNA, 21 bp, Homo sapiens
gaagcatgatttcaaagtgac

SEQ ID NO: 2694 - RNA, 21 nt, RNAi
agcaugauuucaaagugacuu

SEQ ID NO: 2695 - RNA, 21 nt, RNAi
uuucguacuaaaguuucacug

SEQ ID NO: 2696 - DNA, 21 bp, Homo sapiens
gatttcaaagtgaccatctat

SEQ ID NO: 2697 - RNA, 21 nt, RNAi
uuucaaagugaccaucuauuu

SEQ ID NO: 2698 - RNA, 21 nt, RNAi
uuaaaguuucacugguagaua

SEQ ID NO: 2699 - DNA, 21 bp, Homo sapiens
gaccatctatcttcttccaca

SEQ ID NO: 2700 - RNA, 21 nt, RNAi
ccaucuaucuucuuccacauu

SEQ ID NO: 2701 - RNA, 21 nt, RNAi
uugguagauagaagaaggugu

SEQ ID NO: 2702 - DNA, 21 bp, Homo sapiens
gaagatcagcaggaggtttat

SEQ ID NO: 2703 - RNA, 21 nt, RNAi
agaucagcaggagguuuauuu

SEQ ID NO: 2704 - RNA, 21 nt, RNAi
uuucuagucguccuccaaaua

SEQ ID NO: 2705 - DNA, 21 bp, Homo sapiens
gatcagcaggaggtttatgca

SEQ ID NO: 2706 - RNA, 21 nt, RNAi
ucagcaggagguuuaugcauu

SEQ ID NO: 2707 - RNA, 21 nt, RNAi
uuagucguccuccaaauacgu

SEQ ID NO: 2708 - DNA, 21 bp, Homo sapiens
gaggtttatgcagaaattatg

SEQ ID NO: 2709 - RNA, 21 nt, RNAi
gguuuaugcagaaauuauguu

SEQ ID NO: 2710 - RNA, 21 nt, RNAi
uuccaaauacgucuuuaauac

SEQ ID NO: 2711 - DNA, 21 bp, Homo sapiens
gaaattatggcagttctaaag

SEQ ID NO: 2712 - RNA, 21 nt, RNAi
aauuauggcaguucuaaaguu

SEQ ID NO: 2713 - RNA, 21 nt, RNAi
uuuuaauaccgucaagauuuc

SEQ ID NO: 2714 - DNA, 21 bp, Homo sapiens
gacgatcagcataccataaat

SEQ ID NO: 2715 - RNA, 21 nt, RNAi
cgaucagcauaccauaaauuu

SEQ ID NO: 2716 - RNA, 21 nt, RNAi
uugcuagucguaugguauuua

SEQ ID NO: 2717 - DNA, 21 bp, Homo sapiens
gatcagcataccataaatacc

SEQ ID NO: 2718 - RNA, 21 nt, RNAi
ucagcauaccauaaauaccuu

SEQ ID NO: 2719 - RNA, 21 nt, RNAi
uuagucguaugguauuuaugg

SEQ ID NO: 2720 - DNA, 21 bp, Homo sapiens
gacattgcatctgatctgtgt

SEQ ID NO: 2721 - RNA, 21 nt, RNAi
cauugcaucugaucuguguuu

SEQ ID NO: 2722 - RNA, 21 nt, RNAi
uuguaacguagacuagacaca

SEQ ID NO: 2723 - DNA, 21 bp, Homo sapiens
gatctgtgtcaactcagtaca

SEQ ID NO: 2724 - RNA, 21 nt, RNAi
ucugugucaacucaguacauu

SEQ ID NO: 2725 - RNA, 21 nt, RNAi
uuagacacaguugagucaugu

SEQ ID NO: 2726 - DNA, 21 bp, Homo sapiens
gactgtgttctccatgcttga

SEQ ID NO: 2727 - RNA, 21 nt, RNAi
cuguguucuccaugcuugauu

SEQ ID NO: 2728 - RNA, 21 nt, RNAi
uugacacaagagguacgaacu

SEQ ID NO: 2729 - DNA, 21 bp, Homo sapiens
gaaagctgagaaatgtccaca

SEQ ID NO: 2730 - RNA, 21 nt, RNAi
aagcugagaaauguccacauu

SEQ ID NO: 2731 - RNA, 21 nt, RNAi
uuuucgacucuuuacaggugu

SEQ ID NO: 2732 - DNA, 21 bp, Homo sapiens
gagaaatgtccacacagcaaa

SEQ ID NO: 2733 - RNA, 21 nt, RNAi
gaaauguccacacagcaaauu

SEQ ID NO: 2734 - RNA, 21 nt, RNAi
uucuuuacaggugugucguuu

SEQ ID NO: 2735 - DNA, 21 bp, Homo sapiens
gaaatgtccacacagcaaatc

SEQ ID NO: 2736 - RNA, 21 nt, RNAi
aauguccacacagcaaaucuu

SEQ ID NO: 2737 - RNA, 21 nt, RNAi
uuuuacaggugugucguuuag

SEQ ID NO: 2738 - DNA, 21 bp, Homo sapiens
gaaataaggtagactcaatgg

SEQ ID NO: 2739 - RNA, 21 nt, RNAi
aauaagguagacucaaugguu

SEQ ID NO: 2740 - RNA, 21 nt, RNAi
uuuuauuccaucugaguuacc

SEQ ID NO: 2741 - DNA, 21 bp, Homo sapiens
gactcaatggtatctactgtg

SEQ ID NO: 2742 - RNA, 21 nt, RNAi
cucaaugguaucuacuguguu

SEQ ID NO: 2743 - RNA, 21 nt, RNAi
uugaguuaccauagaugacac

SEQ ID NO: 2744 - DNA, 21 bp, Homo sapiens
gattatgaagactatcagagt

SEQ ID NO: 2745 - RNA, 21 nt, RNAi
uuaugaagacuaucagaguuu

SEQ ID NO: 2746 - RNA, 21 nt, RNAi
uuaauacuucugauagucuca

SEQ ID NO: 2747 - DNA, 21 bp, Homo sapiens
gaagactatcagagtgtaacc

SEQ ID NO: 2748 - RNA, 21 nt, RNAi
agacuaucagaguguaaccuu

SEQ ID NO: 2749 - RNA, 21 nt, RNAi
uuucugauagucucacauugg

SEQ ID NO: 2750 - DNA, 21 bp, Homo sapiens
gatactctggcagtagcttcc

SEQ ID NO: 2751 - RNA, 21 nt, RNAi
uacucuggcaguagcuuccuu

SEQ ID NO: 2752 - RNA, 21 nt, RNAi
uuaugagaccgucaucgaagg

SEQ ID NO: 2753 - DNA, 21 bp, Homo sapiens
gagctgtaatgcactttgaat

SEQ ID NO: 2754 - RNA, 21 nt, RNAi
gcuguaaugcacuuugaauuu

SEQ ID NO: 2755 - RNA, 21 nt, RNAi
uucgacauuacgugaaacuua

SEQ ID NO: 2756 - DNA, 21 bp, Homo sapiens
gaaattgtatgctgctatgca

SEQ ID NO: 2757 - RNA, 21 nt, RNAi
aauuguaugcugcuaugcauu

SEQ ID NO: 2758 - RNA, 21 nt, RNAi
uuuuaacauacgacgauacgu

SEQ ID NO: 2759 - DNA, 21 bp, Homo sapiens
gaacctgatggagtggccgga

SEQ ID NO: 2760 - RNA, 21 nt, RNAi
accugauggaguggccggauu

SEQ ID NO: 2761 - RNA, 21 nt, RNAi
uuuggacuaccucaccggccu

SEQ ID NO: 2762 - DNA, 21 bp, Homo sapiens
gatggagtggccggagtcagt

SEQ ID NO: 2763 - RNA, 21 nt, RNAi
uggaguggccggagucaguuu

SEQ ID NO: 2764 - RNA, 21 nt, RNAi
uuaccucaccggccucaguca

SEQ ID NO: 2765 - DNA, 21 bp, Homo sapiens
gagtggccggagtcagtgcaa

SEQ ID NO: 2766 - RNA, 21 nt, RNAi
guggccggagucagugcaauu

SEQ ID NO: 2767 - RNA, 21 nt, RNAi
uucaccggccucagucacguu

SEQ ID NO: 2768 - DNA, 21 bp, Homo sapiens
gagtcagtgcaattagaaagg

SEQ ID NO: 2769 - RNA, 21 nt, RNAi
gucagugcaauuagaaagguu

SEQ ID NO: 2770 - RNA, 21 nt, RNAi
uucagucacguuaaucuuucc

SEQ ID NO: 2771 - DNA, 21 bp, Homo sapiens
gaaaggcagaaccatctctaa

SEQ ID NO: 2772 - RNA, 21 nt, RNAi
aaggcagaaccaucucuaauu

SEQ ID NO: 2773 - RNA, 21 nt, RNAi
uuuuccgucuugguagagauu

SEQ ID NO: 2774 - DNA, 21 bp, Homo sapiens
gaacagatccttgaacatgaa

SEQ ID NO: 2775 - RNA, 21 nt, RNAi
acagauccuugaacaugaauu

SEQ ID NO: 2776 - RNA, 21 nt, RNAi
uuugucuaggaacuuguacuu

SEQ ID NO: 2777 - DNA, 21 bp, Homo sapiens
gatccttgaacatgaaagcct

SEQ ID NO: 2778 - RNA, 21 nt, RNAi
uccuugaacaugaaagccuuu

SEQ ID NO: 2779 - RNA, 21 nt, RNAi
uuaggaacuuguacuuucgga

SEQ ID NO: 2780 - DNA, 21 bp, Homo sapiens
gaacatgaaagccttggcttg

SEQ ID NO: 2781 - RNA, 21 nt, RNAi
acaugaaagccuuggcuuguu

SEQ ID NO: 2782 - RNA, 21 nt, RNAi
uuuguacuuucggaaccgaac

SEQ ID NO: 2783 - DNA, 21 bp, Homo sapiens
gaaagccttggcttgctgagg

SEQ ID NO: 2784 - RNA, 21 nt, RNAi
aagccuuggcuugcugagguu

SEQ ID NO: 2785 - RNA, 21 nt, RNAi
uuuucggaaccgaacgacucc

SEQ ID NO: 2786 - DNA, 21 bp, Homo sapiens
gatgccactgcttgttatgac

SEQ ID NO: 2787 - RNA, 21 nt, RNAi
ugccacugcuuguuaugacuu

SEQ ID NO: 2788 - RNA, 21 nt, RNAi
uuacggugacgaacaauacug

SEQ ID NO: 2789 - DNA, 21 bp, Homo sapiens
gaaccagaccagatcattcat

SEQ ID NO: 2790 - RNA, 21 nt, RNAi
accagaccagaucauucauuu

SEQ ID NO: 2791 - RNA, 21 nt, RNAi
uuuggucuggucuaguaagua

SEQ ID NO: 2792 - DNA, 21 bp, Homo sapiens
gaccagatcattcattatcat

SEQ ID NO: 2793 - RNA, 21 nt, RNAi
ccagaucauucauuaucauuu

SEQ ID NO: 2794 - RNA, 21 nt, RNAi
uuggucuaguaaguaauagua

SEQ ID NO: 2795 - DNA, 21 bp, Homo sapiens
gatcattcattatcatggtgt

SEQ ID NO: 2796 - RNA, 21 nt, RNAi
ucauucauuaucaugguguuu

SEQ ID NO: 2797 - RNA, 21 nt, RNAi
uuaguaaguaauaguaccaca

SEQ ID NO: 2798 - DNA, 21 bp, Homo sapiens
gaatggagtgcatgctaacag

SEQ ID NO: 2799 - RNA, 21 nt, RNAi
auggagugcaugcuaacaguu

SEQ ID NO: 2800 - RNA, 21 nt, RNAi
uuuaccucacguacgauuguc

SEQ ID NO: 2801 - DNA, 21 bp, Homo sapiens
gagtgcatgctaacaggtccg

SEQ ID NO: 2802 - RNA, 21 nt, RNAi
gugcaugcuaacagguccguu

SEQ ID NO: 2803 - RNA, 21 nt, RNAi
uucacguacgauuguccaggc

SEQ ID NO: 2804 - DNA, 21 bp, Homo sapiens
gagtggacagatgaattaaac

SEQ ID NO: 2805 - RNA, 21 nt, RNAi
guggacagaugaauuaaacuu

SEQ ID NO: 2806 - RNA, 21 nt, RNAi
uucaccugucuacuuaauuug

SEQ ID NO: 2807 - DNA, 21 bp, Homo sapiens
gacagatgaattaaacacgta

SEQ ID NO: 2808 - RNA, 21 nt, RNAi
cagaugaauuaaacacguauu

SEQ ID NO: 2809 - RNA, 21 nt, RNAi
uugucuacuuaauuugugcau

SEQ ID NO: 2810 - DNA, 21 bp, Homo sapiens
gatgaattaaacacgtacaga

SEQ ID NO: 2811 - RNA, 21 nt, RNAi
ugaauuaaacacguacagauu

SEQ ID NO: 2812 - RNA, 21 nt, RNAi
uuacuuaauuugugcaugucu

SEQ ID NO: 2813 - DNA, 21 bp, Homo sapiens
gaattaaacacgtacagagtg

SEQ ID NO: 2814 - RNA, 21 nt, RNAi
auuaaacacguacagaguguu

SEQ ID NO: 2815 - RNA, 21 nt, RNAi
uuuaauuugugcaugucucac

SEQ ID NO: 2816 - DNA, 21 bp, Homo sapiens
gagtggaagcagcttggaaat

SEQ ID NO: 2817 - RNA, 21 nt, RNAi
guggaagcagcuuggaaauuu

SEQ ID NO: 2818 - RNA, 21 nt, RNAi
uucaccuucgucgaaccuuua

SEQ ID NO: 2819 - DNA, 21 bp, Homo sapiens
gaagcagcttggaaattgtca

SEQ ID NO: 2820 - RNA, 21 nt, RNAi
agcagcuuggaaauugucauu

SEQ ID NO: 2821 - RNA, 21 nt, RNAi
uuucgucgaaccuuuaacagu

SEQ ID NO: 2822 - DNA, 21 bp, Homo sapiens
gacagctattattatcagcca

SEQ ID NO: 2823 - RNA, 21 nt, RNAi
cagcuauuauuaucagccauu

SEQ ID NO: 2824 - RNA, 21 nt, RNAi
uugucgauaauaauagucggu

SEQ ID NO: 2825 - DNA, 21 bp, Homo sapiens
gactcactgaaactagtgaga

SEQ ID NO: 2826 - RNA, 21 nt, RNAi
cucacugaaacuagugagauu

SEQ ID NO: 2827 - RNA, 21 nt, RNAi
uugagugacuuugaucacucu

SEQ ID NO: 2828 - DNA, 21 bp, Homo sapiens
gaaactagtgagagcagaaca

SEQ ID NO: 2829 - RNA, 21 nt, RNAi
aacuagugagagcagaacauu

SEQ ID NO: 2830 - RNA, 21 nt, RNAi
uuuugaucacucucgucuugu

SEQ ID NO: 2831 - DNA, 21 bp, Homo sapiens
gagagcagaacaaattgtacc

SEQ ID NO: 2832 - RNA, 21 nt, RNAi
gagcagaacaaauuguaccuu

SEQ ID NO: 2833 - RNA, 21 nt, RNAi
uucucgucuuguuuaacaugg

SEQ ID NO: 2834 - DNA, 21 bp, Homo sapiens
gagcagaacaaattgtacctc

SEQ ID NO: 2835 - RNA, 21 nt, RNAi
gcagaacaaauuguaccucuu

SEQ ID NO: 2836 - RNA, 21 nt, RNAi
uucgucuuguuuaacauggag

SEQ ID NO: 2837 - DNA, 21 bp, Homo sapiens
gaacaaattgtacctctttca

SEQ ID NO: 2838 - RNA, 21 nt, RNAi
acaaauuguaccucuuucauu

SEQ ID NO: 2839 - RNA, 21 nt, RNAi
uuuguuuaacauggagaaagu

SEQ ID NO: 2840 - DNA, 21 bp, Homo sapiens
gaaagaggctcctaccaacga

SEQ ID NO: 2841 - RNA, 21 nt, RNAi
aagaggcuccuaccaacgauu

SEQ ID NO: 2842 - RNA, 21 nt, RNAi
uuuucuccgaggaugguugcu

SEQ ID NO: 2843 - DNA, 21 bp, Homo sapiens
gaggctcctaccaacgaggat

SEQ ID NO: 2844 - RNA, 21 nt, RNAi
ggcuccuaccaacgaggauuu

SEQ ID NO: 2845 - RNA, 21 nt, RNAi
uuccgaggaugguugcuccua

SEQ ID NO: 2846 - DNA, 21 bp, Homo sapiens
gaatatattgtgagattgcac

SEQ ID NO: 2847 - RNA, 21 nt, RNAi
auauauugugagauugcacuu

SEQ ID NO: 2848 - RNA, 21 nt, RNAi
uuuauauaacacucuaacgug

SEQ ID NO: 2849 - DNA, 21 bp, Homo sapiens
gagattgcacatgttatgtga

SEQ ID NO: 2850 - RNA, 21 nt, RNAi
gauugcacauguuaugugauu

SEQ ID NO: 2851 - RNA, 21 nt, RNAi
uucuaacguguacaauacacu

SEQ ID NO: 2852 - DNA, 21 bp, Homo sapiens
gattgcacatgttatgtgagt

SEQ ID NO: 2853 - RNA, 21 nt, RNAi
uugcacauguuaugugaguuu

SEQ ID NO: 2854 - RNA, 21 nt, RNAi
uuaacguguacaauacacuca

SEQ ID NO: 2855 - DNA, 21 bp, Homo sapiens
gagttggagcatagcatcaaa

SEQ ID NO: 2856 - RNA, 21 nt, RNAi
guuggagcauagcaucaaauu

SEQ ID NO: 2857 - RNA, 21 nt, RNAi
uucaaccucguaucguaguuu

SEQ ID NO: 2858 - DNA, 21 bp, Homo sapiens
gagcatagcatcaaaccactt

SEQ ID NO: 2859 - RNA, 21 nt, RNAi
gcauagcaucaaaccacuuuu

SEQ ID NO: 2860 - RNA, 21 nt, RNAi
uucguaucguaguuuggugaa

SEQ ID NO: 2861 - DNA, 21 bp, Homo sapiens
gacagttctcaagaagattct

SEQ ID NO: 2862 - RNA, 21 nt, RNAi
caguucucaagaagauucuuu

SEQ ID NO: 2863 - RNA, 21 nt, RNAi
uugucaagaguucuucuaaga

SEQ ID NO: 2864 - DNA, 21 bp, Homo sapiens
gaattcctacagagccaagga

SEQ ID NO: 2865 - RNA, 21 nt, RNAi
auuccuacagagccaaggauu

SEQ ID NO: 2866 - RNA, 21 nt, RNAi
uuuaaggaugucucgguuccu

SEQ ID NO: 2867 - DNA, 21 bp, Homo sapiens
gagccaaggagcctatcctgg

SEQ ID NO: 2868 - RNA, 21 nt, RNAi
gccaaggagccuauccugguu

SEQ ID NO: 2869 - RNA, 21 nt, RNAi
uucgguuccucggauaggacc

SEQ ID NO: 2870 - DNA, 21 bp, Homo sapiens
gaccagattacaatgaaatgg

SEQ ID NO: 2871 - RNA, 21 nt, RNAi
ccagauuacaaugaaaugguu

SEQ ID NO: 2872 - RNA, 21 nt, RNAi
uuggucuaauguuacuuuacc

SEQ ID NO: 2873 - DNA, 21 bp, Homo sapiens
gattacaatgaaatggttgga

SEQ ID NO: 2874 - RNA, 21 nt, RNAi
uuacaaugaaaugguuggauu

SEQ ID NO: 2875 - RNA, 21 nt, RNAi
uuaauguuacuuuaccaaccu

SEQ ID NO: 2876 - DNA, 21 bp, Homo sapiens
gaaatggttggagaatgctgg

SEQ ID NO: 2877 - RNA, 21 nt, RNAi
aaugguuggagaaugcugguu

SEQ ID NO: 2878 - RNA, 21 nt, RNAi
uuuuaccaaccucuuacgacc

SEQ ID NO: 2879 - DNA, 21 bp, Homo sapiens
gagaatgctggctgcagagtg

SEQ ID NO: 2880 - RNA, 21 nt, RNAi
gaaugcuggcugcagaguguu

SEQ ID NO: 2881 - RNA, 21 nt, RNAi
uucuuacgaccgacgucucac

SEQ ID NO: 2882 - DNA, 21 bp, Homo sapiens
gaatgctggctgcagagtgcc

SEQ ID NO: 2883 - RNA, 21 nt, RNAi
augcuggcugcagagugccuu

SEQ ID NO: 2884 - RNA, 21 nt, RNAi
uuuacgaccgacgucucacgg

SEQ ID NO: 2885 - DNA, 21 bp, Homo sapiens
gaaaggctggtcaccaccaga

SEQ ID NO: 2886 - RNA, 21 nt, RNAi
aaggcuggucaccaccagauu

SEQ ID NO: 2887 - RNA, 21 nt, RNAi
uuuuccgaccagugguggucu

SEQ ID NO: 2888 - DNA, 21 bp, Homo sapiens
gacagcctacaatgctctcct

SEQ ID NO: 2889 - RNA, 21 nt, RNAi
cagccuacaaugcucuccuuu

SEQ ID NO: 2890 - RNA, 21 nt, RNAi
uugucggauguuacgagagga

SEQ ID NO: 2891 - DNA, 21 bp, Homo sapiens
gaatcacgactcgctgaactg

SEQ ID NO: 2892 - RNA, 21 nt, RNAi
aucacgacucgcugaacuguu

SEQ ID NO: 2893 - RNA, 21 nt, RNAi
uuuagugcugagcgacuugac

SEQ ID NO: 2894 - DNA, 21 bp, Homo sapiens
gactcgctgaactgtacgtgg

SEQ ID NO: 2895 - RNA, 21 nt, RNAi
cucgcugaacuguacgugguu

SEQ ID NO: 2896 - RNA, 21 nt, RNAi
uugagcgacuugacaugcacc

SEQ ID NO: 2897 - DNA, 21 bp, Homo sapiens
gatgttcaccaggcactaatt

SEQ ID NO: 2898 - RNA, 21 nt, RNAi
uguucaccaggcacuaauuuu

SEQ ID NO: 2899 - RNA, 21 nt, RNAi
uuacaagugguccgugauuaa

SEQ ID NO: 2900 - DNA, 21 bp, Homo sapiens
gaacatgttaatccatggtcg

SEQ ID NO: 2901 - RNA, 21 nt, RNAi
acauguuaauccauggucguu

SEQ ID NO: 2902 - RNA, 21 nt, RNAi
uuuguacaauuagguaccagc

SEQ ID NO: 2903 - DNA, 21 bp, Homo sapiens
gatttatggaagaaacagcta

SEQ ID NO: 2904 - RNA, 21 nt, RNAi
uuuauggaagaaacagcuauu

SEQ ID NO: 2905 - RNA, 21 nt, RNAi
uuaaauaccuucuuugucgau

SEQ ID NO: 2906 - DNA, 21 bp, Homo sapiens
gaagaaacagctaactttgaa

SEQ ID NO: 2907 - RNA, 21 nt, RNAi
agaaacagcuaacuuugaauu

SEQ ID NO: 2908 - RNA, 21 nt, RNAi
uuucuuugucgauugaaacuu

SEQ ID NO: 2909 - DNA, 21 bp, Homo sapiens
gaaacagctaactttgaaagc

SEQ ID NO: 2910 - RNA, 21 nt, RNAi
aacagcuaacuuugaaagcuu

SEQ ID NO: 2911 - RNA, 21 nt, RNAi
uuuugucgauugaaacuuucg

SEQ ID NO: 2912 - DNA, 21 bp, Homo sapiens
gatctcatccggtatatagtt

SEQ ID NO: 2913 - RNA, 21 nt, RNAi
ucucauccgguauauaguuuu

SEQ ID NO: 2914 - RNA, 21 nt, RNAi
uuagaguaggccauauaucaa

SEQ ID NO: 2915 - DNA, 21 bp, Homo sapiens
gatctctacaatatggaaatc

SEQ ID NO: 2916 - RNA, 21 nt, RNAi
ucucuacaauauggaaaucuu

SEQ ID NO: 2917 - RNA, 21 nt, RNAi
uuagagauguuauaccuuuag

SEQ ID NO: 2918 - DNA, 21 bp, Homo sapiens
gaatgttaactctatggcttg

SEQ ID NO: 2919 - RNA, 21 nt, RNAi
auguuaacucuauggcuuguu

SEQ ID NO: 2920 - RNA, 21 nt, RNAi
uuuacaauugagauaccgaac

SEQ ID NO: 2921 - DNA, 21 bp, Homo sapiens
gattatggtacaaaggcatat

SEQ ID NO: 2922 - RNA, 21 nt, RNAi
uuaugguacaaaggcauauuu

SEQ ID NO: 2923 - RNA, 21 nt, RNAi
uuaauaccauguuuccguaua

SEQ ID NO: 2924 - DNA, 21 bp, Homo sapiens
gatcgtgtacaaatgaggaat

SEQ ID NO: 2925 - RNA, 21 nt, RNAi
ucguguacaaaugaggaauuu

SEQ ID NO: 2926 - RNA, 21 nt, RNAi
uuagcacauguuuacuccuua

SEQ ID NO: 2927 - DNA, 21 bp, Homo sapiens
gagcatacaaactatttagct

SEQ ID NO: 2928 - RNA, 21 nt, RNAi
gcauacaaacuauuuagcuuu

SEQ ID NO: 2929 - RNA, 21 nt, RNAi
uucguauguuugauaaaucga

SEQ ID NO: 2930 - DNA, 21 bp, Homo sapiens
gatctctcgaatttgtcattc

SEQ ID NO: 2931 - RNA, 21 nt, RNAi
ucucucgaauuugucauucuu

SEQ ID NO: 2932 - RNA, 21 nt, RNAi
uuagagagcuuaaacaguaag

SEQ ID NO: 2933 - DNA, 21 bp, Homo sapiens
gaatttgtcattctcacgatg

SEQ ID NO: 2934 - RNA, 21 nt, RNAi
auuugucauucucacgauguu

SEQ ID NO: 2935 - RNA, 21 nt, RNAi
uuuaaacaguaagagugcuac

SEQ ID NO: 2936 - DNA, 21 bp, Homo sapiens
gatggaaataatagccaaagt

SEQ ID NO: 2937 - RNA, 21 nt, RNAi
uggaaauaauagccaaaguuu

SEQ ID NO: 2938 - RNA, 21 nt, RNAi
uuaccuuuauuaucgguuuca

SEQ ID NO: 2939 - DNA, 21 bp, Homo sapiens
gatgatgacagctgtgtcaaa

SEQ ID NO: 2940 - RNA, 21 nt, RNAi
ugaugacagcugugucaaauu

SEQ ID NO: 2941 - RNA, 21 nt, RNAi
uuacuacugucgacacaguuu

SEQ ID NO: 2942 - DNA, 21 bp, Homo sapiens
gatgacagctgtgtcaaagtc

SEQ ID NO: 2943 - RNA, 21 nt, RNAi
ugacagcugugucaaagucuu

SEQ ID NO: 2944 - RNA, 21 nt, RNAi
uuacugucgacacaguuucag

SEQ ID NO: 2945 - DNA, 21 bp, Homo sapiens
gacagctgtgtcaaagtcatc

SEQ ID NO: 2946 - RNA, 21 nt, RNAi
cagcugugucaaagucaucuu

SEQ ID NO: 2947 - RNA, 21 nt, RNAi
uugucgacacaguuucaguag

SEQ ID NO: 2948 - DNA, 21 bp, Homo sapiens
gaacagatgcaaggaaatcct

SEQ ID NO: 2949 - RNA, 21 nt, RNAi
acagaugcaaggaaauccuuu

SEQ ID NO: 2950 - RNA, 21 nt, RNAi
uuugucuacguuccuuuagga

SEQ ID NO: 2951 - DNA, 21 bp, Homo sapiens
gatgcaaggaaatcctcaata

SEQ ID NO: 2952 - RNA, 21 nt, RNAi
ugcaaggaaauccucaauauu

SEQ ID NO: 2953 - RNA, 21 nt, RNAi
uuacguuccuuuaggaguuau

SEQ ID NO: 2954 - DNA, 21 bp, Homo sapiens
gagaagtttgttggagatgca

SEQ ID NO: 2955 - RNA, 21 nt, RNAi
gaaguuuguuggagaugcauu

SEQ ID NO: 2956 - RNA, 21 nt, RNAi
uucuucaaacaaccucuacgu

SEQ ID NO: 2957 - DNA, 21 bp, Homo sapiens
gaagtttgttggagatgcaac

SEQ ID NO: 2958 - RNA, 21 nt, RNAi
aguuuguuggagaugcaacuu

SEQ ID NO: 2959 - RNA, 21 nt, RNAi
uuucaaacaaccucuacguug

SEQ ID NO: 2960 - DNA, 21 bp, Homo sapiens
gagatgcaactcgcctaacag

SEQ ID NO: 2961 - RNA, 21 nt, RNAi
gaugcaacucgccuaacaguu

SEQ ID NO: 2962 - RNA, 21 nt, RNAi
uucuacguugagcggauuguc

SEQ ID NO: 2963 - DNA, 21 bp, Homo sapiens
gatgcaactcgcctaacagat

SEQ ID NO: 2964 - RNA, 21 nt, RNAi
ugcaacucgccuaacagauuu

SEQ ID NO: 2965 - RNA, 21 nt, RNAi
uuacguugagcggauugucua

SEQ ID NO: 2966 - DNA, 21 bp, Homo sapiens
gataagcttctagaattgtgc

SEQ ID NO: 2967 - RNA, 21 nt, RNAi
uaagcuucuagaauugugcuu

SEQ ID NO: 2968 - RNA, 21 nt, RNAi
uuauucgaagaucuuaacacg

SEQ ID NO: 2969 - DNA, 21 bp, Homo sapiens
gaattgtgcaataaaccggtt

SEQ ID NO: 2970 - RNA, 21 nt, RNAi
auugugcaauaaaccgguuuu

SEQ ID NO: 2971 - RNA, 21 nt, RNAi
uuuaacacguuauuuggccaa

SEQ ID NO: 2972 - DNA, 21 bp, Homo sapiens
gatggaagtagttccacatta

SEQ ID NO: 2973 - RNA, 21 nt, RNAi
uggaaguaguuccacauuauu

SEQ ID NO: 2974 - RNA, 21 nt, RNAi
uuaccuucaucaagguguaau

SEQ ID NO: 2975 - DNA, 21 bp, Homo sapiens
gaagtagttccacattaagca

SEQ ID NO: 2976 - RNA, 21 nt, RNAi
aguaguuccacauuaagcauu

SEQ ID NO: 2977 - RNA, 21 nt, RNAi
uuucaucaagguguaauucgu

SEQ ID NO: 2978 - DNA, 21 bp, Homo sapiens
gaagaagcaacatttagtgaa

SEQ ID NO: 2979 - RNA, 21 nt, RNAi
agaagcaacauuuagugaauu

SEQ ID NO: 2980 - RNA, 21 nt, RNAi
uuucuucguuguaaaucacuu

SEQ ID NO: 2981 - DNA, 21 bp, Homo sapiens
gaagcaacatttagtgaaatc

SEQ ID NO: 2982 - RNA, 21 nt, RNAi
agcaacauuuagugaaaucuu

SEQ ID NO: 2983 - RNA, 21 nt, RNAi
uuucguuguaaaucacuuuag

SEQ ID NO: 2984 - DNA, 21 bp, Homo sapiens
gaaatcctcattcctctacaa

SEQ ID NO: 2985 - RNA, 21 nt, RNAi
aauccucauuccucuacaauu

SEQ ID NO: 2986 - RNA, 21 nt, RNAi
uuuuaggaguaaggagauguu

SEQ ID NO: 2987 - DNA, 21 bp, Homo sapiens
gatacctacacttccatcaat

SEQ ID NO: 2988 - RNA, 21 nt, RNAi
uaccuacacuuccaucaauuu

SEQ ID NO: 2989 - RNA, 21 nt, RNAi
uuauggaugugaagguaguua

SEQ ID NO: 2990 - DNA, 21 bp, Homo sapiens
gaaccatttcctggacattgg

SEQ ID NO: 2991 - RNA, 21 nt, RNAi
accauuuccuggacauugguu

SEQ ID NO: 2992 - RNA, 21 nt, RNAi
uuugguaaaggaccuguaacc

SEQ ID NO: 2993 - DNA, 21 bp, Homo sapiens
gatgatatggtggaaattctt

SEQ ID NO: 2994 - RNA, 21 nt, RNAi
ugauaugguggaaauucuuuu

SEQ ID NO: 2995 - RNA, 21 nt, RNAi
uuacuauaccaccuuuaagaa

SEQ ID NO: 2996 - DNA, 21 bp, Homo sapiens
gatatggtggaaattcttgct

SEQ ID NO: 2997 - RNA, 21 nt, RNAi
uaugguggaaauucuugcuuu

SEQ ID NO: 2998 - RNA, 21 nt, RNAi
uuauaccaccuuuaagaacga

SEQ ID NO: 2999 - DNA, 21 bp, Homo sapiens
gaaattcttgcttctcttcag

SEQ ID NO: 3000 - RNA, 21 nt, RNAi
aauucuugcuucucuucaguu

SEQ ID NO: 3001 - RNA, 21 nt, RNAi
uuuuaagaacgaagagaaguc

SEQ ID NO: 3002 - DNA, 21 bp, Homo sapiens
gatggaaagttctacatcatg

SEQ ID NO: 3003 - RNA, 21 nt, RNAi
uggaaaguucuacaucauguu

SEQ ID NO: 3004 - RNA, 21 nt, RNAi
uuaccuuucaagauguaguac

SEQ ID NO: 3005 - DNA, 21 bp, Homo sapiens
gaaagttctacatcatgatgt

SEQ ID NO: 3006 - RNA, 21 nt, RNAi
aaguucuacaucaugauguuu

SEQ ID NO: 3007 - RNA, 21 nt, RNAi
uuuucaagauguaguacuaca

SEQ ID NO: 3008 - DNA, 21 bp, Homo sapiens
gatgacctgagaaaggattgt

SEQ ID NO: 3009 - RNA, 21 nt, RNAi
ugaccugagaaaggauuguuu

SEQ ID NO: 3010 - RNA, 21 nt, RNAi
uuacuggacucuuuccuaaca

SEQ ID NO: 3011 - DNA, 21 bp, Homo sapiens
gacctgagaaaggattgtaga

SEQ ID NO: 3012 - RNA, 21 nt, RNAi
ccugagaaaggauuguagauu

SEQ ID NO: 3013 - RNA, 21 nt, RNAi
uuggacucuuuccuaacaucu

SEQ ID NO: 3014 - DNA, 21 bp, Homo sapiens
gagaaaggattgtagactaat

SEQ ID NO: 3015 - RNA, 21 nt, RNAi
gaaaggauuguagacuaauuu

SEQ ID NO: 3016 - RNA, 21 nt, RNAi
uucuuuccuaacaucugauua

SEQ ID NO: 3017 - DNA, 21 bp, Homo sapiens
gaaaggattgtagactaatgg

SEQ ID NO: 3018 - RNA, 21 nt, RNAi
aaggauuguagacuaaugguu

SEQ ID NO: 3019 - RNA, 21 nt, RNAi
uuuuccuaacaucugauuacc

SEQ ID NO: 3020 - DNA, 21 bp, Homo sapiens
gattgtagactaatggaattc

SEQ ID NO: 3021 - RNA, 21 nt, RNAi
uuguagacuaauggaauucuu

SEQ ID NO: 3022 - RNA, 21 nt, RNAi
uuaacaucugauuaccuuaag

SEQ ID NO: 3023 - DNA, 21 bp, Homo sapiens
gactaatggaattcaattcct

SEQ ID NO: 3024 - RNA, 21 nt, RNAi
cuaauggaauucaauuccuuu

SEQ ID NO: 3025 - RNA, 21 nt, RNAi
uugauuaccuuaaguuaagga

SEQ ID NO: 3026 - DNA, 21 bp, Homo sapiens
gatgcagagtctcgtagaaga

SEQ ID NO: 3027 - RNA, 21 nt, RNAi
ugcagagucucguagaagauu

SEQ ID NO: 3028 - RNA, 21 nt, RNAi
uuacgucucagagcaucuucu

SEQ ID NO: 3029 - DNA, 21 bp, Homo sapiens
gagtctcgtagaagagaactt

SEQ ID NO: 3030 - RNA, 21 nt, RNAi
gucucguagaagagaacuuuu

SEQ ID NO: 3031 - RNA, 21 nt, RNAi
uucagagcaucuucucuugaa

SEQ ID NO: 3032 - DNA, 21 bp, Homo sapiens
gaagagaacttcatattcgaa

SEQ ID NO: 3033 - RNA, 21 nt, RNAi
agagaacuucauauucgaauu

SEQ ID NO: 3034 - RNA, 21 nt, RNAi
uuucucuugaaguauaagcuu

SEQ ID NO: 3035 - DNA, 21 bp, Homo sapiens
gagaacttcatattcgaacat

SEQ ID NO: 3036 - RNA, 21 nt, RNAi
gaacuucauauucgaacauuu

SEQ ID NO: 3037 - RNA, 21 nt, RNAi
uucuugaaguauaagcuugua

SEQ ID NO: 3038 - DNA, 21 bp, Homo sapiens
gaacatatgcagttattccac

SEQ ID NO: 3039 - RNA, 21 nt, RNAi
acauaugcaguuauuccacuu

SEQ ID NO: 3040 - RNA, 21 nt, RNAi
uuuguauacgucaauaaggug

SEQ ID NO: 3041 - DNA, 21 bp, Homo sapiens
gaacaacactgctggtttgag

SEQ ID NO: 3042 - RNA, 21 nt, RNAi
acaacacugcugguuugaguu

SEQ ID NO: 3043 - RNA, 21 nt, RNAi
uuuguugugacgaccaaacuc

SEQ ID NO: 3044 - DNA, 21 bp, Homo sapiens
gagacctattctgaccaaact

SEQ ID NO: 3045 - RNA, 21 nt, RNAi
gaccuauucugaccaaacuuu

SEQ ID NO: 3046 - RNA, 21 nt, RNAi
uucuggauaagacugguuuga

SEQ ID NO: 3047 - DNA, 21 bp, Homo sapiens
gacctattctgaccaaactat

SEQ ID NO: 3048 - RNA, 21 nt, RNAi
ccuauucugaccaaacuauuu

SEQ ID NO: 3049 - RNA, 21 nt, RNAi
uuggauaagacugguuugaua

SEQ ID NO: 3050 - DNA, 21 bp, Homo sapiens
gaacttcgccagtgtatgcta

SEQ ID NO: 3051 - RNA, 21 nt, RNAi
acuucgccaguguaugcuauu

SEQ ID NO: 3052 - RNA, 21 nt, RNAi
uuugaagcggucacauacgau

SEQ ID NO: 3053 - DNA, 21 bp, Homo sapiens
gagtggtttctgagaacattc

SEQ ID NO: 3054 - RNA, 21 nt, RNAi
gugguuucugagaacauucuu

SEQ ID NO: 3055 - RNA, 21 nt, RNAi
uucaccaaagacucuuguaag

SEQ ID NO: 3056 - DNA, 21 bp, Homo sapiens
gatcctacatcatggtacagt

SEQ ID NO: 3057 - RNA, 21 nt, RNAi
uccuacaucaugguacaguuu

SEQ ID NO: 3058 - RNA, 21 nt, RNAi
uuaggauguaguaccauguca

SEQ ID NO: 3059 - DNA, 21 bp, Homo sapiens
gatcagcttactgccgttcca

SEQ ID NO: 3060 - RNA, 21 nt, RNAi
ucagcuuacugccguuccauu

SEQ ID NO: 3061 - RNA, 21 nt, RNAi
uuagucgaaugacggcaaggu

SEQ ID NO: 3062 - DNA, 21 bp, Homo sapiens
gattctttgactggtgaatgc

SEQ ID NO: 3063 - RNA, 21 nt, RNAi
uucuuugacuggugaaugcuu

SEQ ID NO: 3064 - RNA, 21 nt, RNAi
uuaagaaacugaccacuuacg

SEQ ID NO: 3065 - DNA, 21 bp, Homo sapiens
gactggtgaatgcgtacatgt

SEQ ID NO: 3066 - RNA, 21 nt, RNAi
cuggugaaugcguacauguuu

SEQ ID NO: 3067 - RNA, 21 nt, RNAi
uugaccacuuacgcauguaca

SEQ ID NO: 3068 - DNA, 21 bp, Homo sapiens
gaatgcgtacatgtagatttc

SEQ ID NO: 3069 - RNA, 21 nt, RNAi
augcguacauguagauuucuu

SEQ ID NO: 3070 - RNA, 21 nt, RNAi
uuuacgcauguacaucuaaag

SEQ ID NO: 3071 - DNA, 21 bp, Homo sapiens
gagaaacctttgaagttccag

SEQ ID NO: 3072 - RNA, 21 nt, RNAi
gaaaccuuugaaguuccaguu

SEQ ID NO: 3073 - RNA, 21 nt, RNAi
uucuuuggaaacuucaagguc

SEQ ID NO: 3074 - DNA, 21 bp, Homo sapiens
gaaacctttgaagttccagaa

SEQ ID NO: 3075 - RNA, 21 nt, RNAi
aaccuuugaaguuccagaauu

SEQ ID NO: 3076 - RNA, 21 nt, RNAi
uuuuggaaacuucaaggucuu

SEQ ID NO: 3077 - DNA, 21 bp, Homo sapiens
gaagttccagaaattgtgcca

SEQ ID NO: 3078 - RNA, 21 nt, RNAi
aguuccagaaauugugccauu

SEQ ID NO: 3079 - RNA, 21 nt, RNAi
uuucaaggucuuuaacacggu

SEQ ID NO: 3080 - DNA, 21 bp, Homo sapiens
gaaattgtgccatttcgcctg

SEQ ID NO: 3081 - RNA, 21 nt, RNAi
aauugugccauuucgccuguu

SEQ ID NO: 3082 - RNA, 21 nt, RNAi
uuuuaacacgguaaagcggac

SEQ ID NO: 3083 - DNA, 21 bp, Homo sapiens
gactcataatatggttaatgg

SEQ ID NO: 3084 - RNA, 21 nt, RNAi
cucauaauaugguuaaugguu

SEQ ID NO: 3085 - RNA, 21 nt, RNAi
uugaguauuauaccaauuacc

SEQ ID NO: 3086 - DNA, 21 bp, Homo sapiens
gaagagcatgtgaagttacaa

SEQ ID NO: 3087 - RNA, 21 nt, RNAi
agagcaugugaaguuacaauu

SEQ ID NO: 3088 - RNA, 21 nt, RNAi
uuucucguacacuucaauguu

SEQ ID NO: 3089 - DNA, 21 bp, Homo sapiens
gagcatgtgaagttacaatga

SEQ ID NO: 3090 - RNA, 21 nt, RNAi
gcaugugaaguuacaaugauu

SEQ ID NO: 3091 - RNA, 21 nt, RNAi
uucguacacuucaauguuacu

SEQ ID NO: 3092 - DNA, 21 bp, Homo sapiens
gaagttacaatgaggctgatg

SEQ ID NO: 3093 - RNA, 21 nt, RNAi
aguuacaaugaggcugauguu

SEQ ID NO: 3094 - RNA, 21 nt, RNAi
uuucaauguuacuccgacuac

SEQ ID NO: 3095 - DNA, 21 bp, Homo sapiens
gaggctgatgcgtgatcagcg

SEQ ID NO: 3096 - RNA, 21 nt, RNAi
ggcugaugcgugaucagcguu

SEQ ID NO: 3097 - RNA, 21 nt, RNAi
uuccgacuacgcacuagucgc

SEQ ID NO: 3098 - DNA, 21 bp, Homo sapiens
gatgcgtgatcagcgagagcc

SEQ ID NO: 3099 - RNA, 21 nt, RNAi
ugcgugaucagcgagagccuu

SEQ ID NO: 3100 - RNA, 21 nt, RNAi
uuacgcacuagucgcucucgg

SEQ ID NO: 3101 - DNA, 21 bp, Homo sapiens
gatcagcgagagcctttaatg

SEQ ID NO: 3102 - RNA, 21 nt, RNAi
ucagcgagagccuuuaauguu

SEQ ID NO: 3103 - RNA, 21 nt, RNAi
uuagucgcucucggaaauuac

SEQ ID NO: 3104 - DNA, 21 bp, Homo sapiens
gagagcctttaatgagtgtct

SEQ ID NO: 3105 - RNA, 21 nt, RNAi
gagccuuuaaugagugucuuu

SEQ ID NO: 3106 - RNA, 21 nt, RNAi
uucucggaaauuacucacaga

SEQ ID NO: 3107 - DNA, 21 bp, Homo sapiens
gagcctttaatgagtgtctta

SEQ ID NO: 3108 - RNA, 21 nt, RNAi
gccuuuaaugagugucuuauu

SEQ ID NO: 3109 - RNA, 21 nt, RNAi
uucggaaauuacucacagaau

SEQ ID NO: 3110 - DNA, 21 bp, Homo sapiens
gatcctcttgtggaatggagt

SEQ ID NO: 3111 - RNA, 21 nt, RNAi
uccucuuguggaauggaguuu

SEQ ID NO: 3112 - RNA, 21 nt, RNAi
uuaggagaacaccuuaccuca

SEQ ID NO: 3113 - DNA, 21 bp, Homo sapiens
gaatggagtaaaccagtgaaa

SEQ ID NO: 3114 - RNA, 21 nt, RNAi
auggaguaaaccagugaaauu

SEQ ID NO: 3115 - RNA, 21 nt, RNAi
uuuaccucauuuggucacuuu

SEQ ID NO: 3116 - DNA, 21 bp, Homo sapiens
gaatgaaactggagaagttgt

SEQ ID NO: 3117 - RNA, 21 nt, RNAi
augaaacuggagaaguuguuu

SEQ ID NO: 3118 - RNA, 21 nt, RNAi
uuuacuuugaccucuucaaca

SEQ ID NO: 3119 - DNA, 21 bp, Homo sapiens
gaaactggagaagttgtcaat

SEQ ID NO: 3120 - RNA, 21 nt, RNAi
aacuggagaaguugucaauuu

SEQ ID NO: 3121 - RNA, 21 nt, RNAi
uuuugaccucuucaacaguua

SEQ ID NO: 3122 - DNA, 21 bp, Homo sapiens
gacattgagcagcgactacaa

SEQ ID NO: 3123 - RNA, 21 nt, RNAi
cauugagcagcgacuacaauu

SEQ ID NO: 3124 - RNA, 21 nt, RNAi
uuguaacucgucgcugauguu

SEQ ID NO: 3125 - DNA, 21 bp, Homo sapiens
gagcagcgactacaaggtgta

SEQ ID NO: 3126 - RNA, 21 nt, RNAi
gcagcgacuacaagguguauu

SEQ ID NO: 3127 - RNA, 21 nt, RNAi
uucgucgcugauguuccacau

SEQ ID NO: 3128 - DNA, 21 bp, Homo sapiens
gactacaaggtgtaatcaaga

SEQ ID NO: 3129 - RNA, 21 nt, RNAi
cuacaagguguaaucaagauu

SEQ ID NO: 3130 - RNA, 21 nt, RNAi
uugauguuccacauuaguucu

SEQ ID NO: 3131 - DNA, 21 bp, Homo sapiens
gactcgaaatagagtgacagg

SEQ ID NO: 3132 - RNA, 21 nt, RNAi
cucgaaauagagugacagguu

SEQ ID NO: 3133 - RNA, 21 nt, RNAi
uugagcuuuaucucacugucc

SEQ ID NO: 3134 - DNA, 21 bp, Homo sapiens
gaaatagagtgacaggactgc

SEQ ID NO: 3135 - RNA, 21 nt, RNAi
aauagagugacaggacugcuu

SEQ ID NO: 3136 - RNA, 21 nt, RNAi
uuuuaucucacuguccugacg

SEQ ID NO: 3137 - DNA, 21 bp, Homo sapiens
gagtgacaggactgccgttat

SEQ ID NO: 3138 - RNA, 21 nt, RNAi
gugacaggacugccguuauuu

SEQ ID NO: 3139 - RNA, 21 nt, RNAi
uucacuguccugacggcaaua

SEQ ID NO: 3140 - DNA, 21 bp, Homo sapiens
gacaggactgccgttatctat

SEQ ID NO: 3141 - RNA, 21 nt, RNAi
caggacugccguuaucuauuu

SEQ ID NO: 3142 - RNA, 21 nt, RNAi
uuguccugacggcaauagaua

SEQ ID NO: 3143 - DNA, 21 bp, Homo sapiens
gactgccgttatctattgaag

SEQ ID NO: 3144 - RNA, 21 nt, RNAi
cugccguuaucuauugaaguu

SEQ ID NO: 3145 - RNA, 21 nt, RNAi
uugacggcaauagauaacuuc

SEQ ID NO: 3146 - DNA, 21 bp, Homo sapiens
gaaggacatgtgcattacctt

SEQ ID NO: 3147 - RNA, 21 nt, RNAi
aggacaugugcauuaccuuuu

SEQ ID NO: 3148 - RNA, 21 nt, RNAi
uuuccuguacacguaauggaa

SEQ ID NO: 3149 - DNA, 21 bp, Homo sapiens
gacatgtgcattaccttatac

SEQ ID NO: 3150 - RNA, 21 nt, RNAi
caugugcauuaccuuauacuu

SEQ ID NO: 3151 - RNA, 21 nt, RNAi
uuguacacguaauggaauaug

SEQ ID NO: 3152 - DNA, 21 bp, Homo sapiens
gatgtatcttggttggactcc

SEQ ID NO: 3153 - RNA, 21 nt, RNAi
uguaucuugguuggacuccuu

SEQ ID NO: 3154 - RNA, 21 nt, RNAi
uuacauagaaccaaccugagg

SEQ ID NO: 3155 - DNA, 21 bp, Homo sapiens
gactccatatatgtgaaatga

SEQ ID NO: 3156 - RNA, 21 nt, RNAi
cuccauauaugugaaaugauu

SEQ ID NO: 3157 - RNA, 21 nt, RNAi
uugagguauauacacuuuacu

SEQ ID NO: 3158 - DNA, 21 bp, Homo sapiens
gaatctgtggttgtatctgtt

SEQ ID NO: 3159 - RNA, 21 nt, RNAi
aucugugguuguaucuguuuu

SEQ ID NO: 3160 - RNA, 21 nt, RNAi
uuuagacaccaacauagacaa

SEQ ID NO: 3161 - DNA, 21 bp, Homo sapiens
tagtgcctcgcagcctcagca

SEQ ID NO: 3162 - RNA, 21 nt, RNAi
gugccucgcagccucagcauu

SEQ ID NO: 3163 - RNA, 21 nt, RNAi
uucacggagcgucggagucgu

SEQ ID NO: 3164 - DNA, 21 bp, Homo sapiens
taatacagttgtacagaagcc

SEQ ID NO: 3165 - RNA, 21 nt, RNAi
auacaguuguacagaagccuu

SEQ ID NO: 3166 - RNA, 21 nt, RNAi
uuuaugucaacaugucuucgg

SEQ ID NO: 3167 - DNA, 21 bp, Homo sapiens
tacagttgtacagaagccaag

SEQ ID NO: 3168 - RNA, 21 nt, RNAi
caguuguacagaagccaaguu

SEQ ID NO: 3169 - RNA, 21 nt, RNAi
uugucaacaugucuucgguuc

SEQ ID NO: 3170 - DNA, 21 bp, Homo sapiens
tacagaagccaagacaaattc

SEQ ID NO: 3171 - RNA, 21 nt, RNAi
cagaagccaagacaaauucuu

SEQ ID NO: 3172 - RNA, 21 nt, RNAi
uugucuucgguucuguuuaag

SEQ ID NO: 3173 - DNA, 21 bp, Homo sapiens
tacagatgtaaatgttgttgc

SEQ ID NO: 3174 - RNA, 21 nt, RNAi
cagauguaaauguuguugcuu

SEQ ID NO: 3175 - RNA, 21 nt, RNAi
uugucuacauuuacaacaacg

SEQ ID NO: 3176 - DNA, 21 bp, Homo sapiens
taaatgttgttgctgtagaac

SEQ ID NO: 3177 - RNA, 21 nt, RNAi
aauguuguugcuguagaacuu

SEQ ID NO: 3178 - RNA, 21 nt, RNAi
uuuuacaacaacgacaucuug

SEQ ID NO: 3179 - DNA, 21 bp, Homo sapiens
tatgtttgtaaatgtgagtgg

SEQ ID NO: 3180 - RNA, 21 nt, RNAi
uguuuguaaaugugagugguu

SEQ ID NO: 3181 - RNA, 21 nt, RNAi
uuacaaacauuuacacucacc

SEQ ID NO: 3182 - DNA, 21 bp, Homo sapiens
taaatgtgagtggaagccatg

SEQ ID NO: 3183 - RNA, 21 nt, RNAi
aaugugaguggaagccauguu

SEQ ID NO: 3184 - RNA, 21 nt, RNAi
uuuuacacucaccuucgguac

SEQ ID NO: 3185 - DNA, 21 bp, Homo sapiens
taattggatcataacgagact

SEQ ID NO: 3186 - RNA, 21 nt, RNAi
auuggaucauaacgagacuuu

SEQ ID NO: 3187 - RNA, 21 nt, RNAi
uuuaaccuaguauugcucuga

SEQ ID NO: 3188 - DNA, 21 bp, Homo sapiens
taacgagacttctgcggattg

SEQ ID NO: 3189 - RNA, 21 nt, RNAi
acgagacuucugcggauuguu

SEQ ID NO: 3190 - RNA, 21 nt, RNAi
uuugcucugaagacgccuaac

SEQ ID NO: 3191 - DNA, 21 bp, Homo sapiens
tacctccatagaagaaatgtg

SEQ ID NO: 3192 - RNA, 21 nt, RNAi
ccuccauagaagaaauguguu

SEQ ID NO: 3193 - RNA, 21 nt, RNAi
uuggagguaucuucuuuacac

SEQ ID NO: 3194 - DNA, 21 bp, Homo sapiens
tatttacaatcagctcctttg

SEQ ID NO: 3195 - RNA, 21 nt, RNAi
uuuacaaucagcuccuuuguu

SEQ ID NO: 3196 - RNA, 21 nt, RNAi
uuaaauguuagucgaggaaac

SEQ ID NO: 3197 - DNA, 21 bp, Homo sapiens
tacaatcagctcctttgcagt

SEQ ID NO: 3198 - RNA, 21 nt, RNAi
caaucagcuccuuugcaguuu

SEQ ID NO: 3199 - RNA, 21 nt, RNAi
uuguuagucgaggaaacguca

SEQ ID NO: 3200 - DNA, 21 bp, Homo sapiens
tagaaggcaagaactcttact

SEQ ID NO: 3201 - RNA, 21 nt, RNAi
gaaggcaagaacucuuacuuu

SEQ ID NO: 3202 - RNA, 21 nt, RNAi
uucuuccguucuugagaauga

SEQ ID NO: 3203 - DNA, 21 bp, Homo sapiens
tactttggcagataggttgtg

SEQ ID NO: 3204 - RNA, 21 nt, RNAi
cuuuggcagauagguuguguu

SEQ ID NO: 3205 - RNA, 21 nt, RNAi
uugaaaccgucuauccaacac

SEQ ID NO: 3206 - DNA, 21 bp, Homo sapiens
taggttgtgttctgctagagt

SEQ ID NO: 3207 - RNA, 21 nt, RNAi
gguuguguucugcuagaguuu

SEQ ID NO: 3208 - RNA, 21 nt, RNAi
uuccaacacaagacgaucuca

SEQ ID NO: 3209 - DNA, 21 bp, Homo sapiens
taccagcacaaccagctagca

SEQ ID NO: 3210 - RNA, 21 nt, RNAi
ccagcacaaccagcuagcauu

SEQ ID NO: 3211 - RNA, 21 nt, RNAi
uuggucguguuggucgaucgu

SEQ ID NO: 3212 - DNA, 21 bp, Homo sapiens
tagaaatggatactgaccaat

SEQ ID NO: 3213 - RNA, 21 nt, RNAi
gaaauggauacugaccaauuu

SEQ ID NO: 3214 - RNA, 21 nt, RNAi
uucuuuaccuaugacugguua

SEQ ID NO: 3215 - DNA, 21 bp, Homo sapiens
tactgaccaattgaaactcta

SEQ ID NO: 3216 - RNA, 21 nt, RNAi
cugaccaauugaaacucuauu

SEQ ID NO: 3217 - RNA, 21 nt, RNAi
uugacugguuaacuuugagau

SEQ ID NO: 3218 - DNA, 21 bp, Homo sapiens
tatgaagagccattatcaaag

SEQ ID NO: 3219 - RNA, 21 nt, RNAi
ugaagagccauuaucaaaguu

SEQ ID NO: 3220 - RNA, 21 nt, RNAi
uuacuucucgguaauaguuuc

SEQ ID NO: 3221 - DNA, 21 bp, Homo sapiens
tatcaaagctgataaagacac

SEQ ID NO: 3222 - RNA, 21 nt, RNAi
ucaaagcugauaaagacacuu

SEQ ID NO: 3223 - RNA, 21 nt, RNAi
uuaguuucgacuauuucugug

SEQ ID NO: 3224 - DNA, 21 bp, Homo sapiens
tatgaatctgctttacaagtc

SEQ ID NO: 3225 - RNA, 21 nt, RNAi
ugaaucugcuuuacaagucuu

SEQ ID NO: 3226 - RNA, 21 nt, RNAi
uuacuuagacgaaauguucag

SEQ ID NO: 3227 - DNA, 21 bp, Homo sapiens
tacaagtcaggaaggtctatg

SEQ ID NO: 3228 - RNA, 21 nt, RNAi
caagucaggaaggucuauguu

SEQ ID NO: 3229 - RNA, 21 nt, RNAi
uuguucaguccuuccagauac

SEQ ID NO: 3230 - DNA, 21 bp, Homo sapiens
tagatgcagagtacttgttgg

SEQ ID NO: 3231 - RNA, 21 nt, RNAi
gaugcagaguacuuguugguu

SEQ ID NO: 3232 - RNA, 21 nt, RNAi
uucuacgucucaugaacaacc

SEQ ID NO: 3233 - DNA, 21 bp, Homo sapiens
tatggaaatcattgaggagat

SEQ ID NO: 3234 - RNA, 21 nt, RNAi
uggaaaucauugaggagauuu

SEQ ID NO: 3235 - RNA, 21 nt, RNAi
uuaccuuuaguaacuccucua

SEQ ID NO: 3236 - DNA, 21 bp, Homo sapiens
taatagtgatggaatatcacc

SEQ ID NO: 3237 - RNA, 21 nt, RNAi
auagugauggaauaucaccuu

SEQ ID NO: 3238 - RNA, 21 nt, RNAi
uuuaucacuaccuuauagugg

SEQ ID NO: 3239 - DNA, 21 bp, Homo sapiens
taaacatgtggacatgaacca

SEQ ID NO: 3240 - RNA, 21 nt, RNAi
aacauguggacaugaaccauu

SEQ ID NO: 3241 - RNA, 21 nt, RNAi
uuuuguacaccuguacuuggu

SEQ ID NO: 3242 - DNA, 21 bp, Homo sapiens
tattatggagtgcactgaaac

SEQ ID NO: 3243 - RNA, 21 nt, RNAi
uuauggagugcacugaaacuu

SEQ ID NO: 3244 - RNA, 21 nt, RNAi
uuaauaccucacgugacuuug

SEQ ID NO: 3245 - DNA, 21 bp, Homo sapiens
tatggagtgcactgaaacaga

SEQ ID NO: 3246 - RNA, 21 nt, RNAi
uggagugcacugaaacagauu

SEQ ID NO: 3247 - RNA, 21 nt, RNAi
uuaccucacgugacuuugucu

SEQ ID NO: 3248 - DNA, 21 bp, Homo sapiens
tacagtggcctaaagaatcct

SEQ ID NO: 3249 - RNA, 21 nt, RNAi
caguggccuaaagaauccuuu

SEQ ID NO: 3250 - RNA, 21 nt, RNAi
uugucaccggauuucuuagga

SEQ ID NO: 3251 - DNA, 21 bp, Homo sapiens
tagaaggaattgctgttgtct

SEQ ID NO: 3252 - RNA, 21 nt, RNAi
gaaggaauugcuguugucuuu

SEQ ID NO: 3253 - RNA, 21 nt, RNAi
uucuuccuuaacgacaacaga

SEQ ID NO: 3254 - DNA, 21 bp, Homo sapiens
tacaactgactgctctgtgta

SEQ ID NO: 3255 - RNA, 21 nt, RNAi
caacugacugcucuguguauu

SEQ ID NO: 3256 - RNA, 21 nt, RNAi
uuguugacugacgagacacau

SEQ ID NO: 3257 - DNA, 21 bp, Homo sapiens
tactgttcattgttctcatca

SEQ ID NO: 3258 - RNA, 21 nt, RNAi
cuguucauuguucucaucauu

SEQ ID NO: 3259 - RNA, 21 nt, RNAi
uugacaaguaacaagaguagu

SEQ ID NO: 3260 - DNA, 21 bp, Homo sapiens
tactttcaaggactgtcaaca

SEQ ID NO: 3261 - RNA, 21 nt, RNAi
cuuucaaggacugucaacauu

SEQ ID NO: 3262 - RNA, 21 nt, RNAi
uugaaaguuccugacaguugu

SEQ ID NO: 3263 - DNA, 21 bp, Homo sapiens
taaatccaagaagaaaccttc

SEQ ID NO: 3264 - RNA, 21 nt, RNAi
aauccaagaagaaaccuucuu

SEQ ID NO: 3265 - RNA, 21 nt, RNAi
uuuuagguucuucuuuggaag

SEQ ID NO: 3266 - DNA, 21 bp, Homo sapiens
tagtgataacttggatgtcat

SEQ ID NO: 3267 - RNA, 21 nt, RNAi
gugauaacuuggaugucauuu

SEQ ID NO: 3268 - RNA, 21 nt, RNAi
uucacuauugaaccuacagua

SEQ ID NO: 3269 - DNA, 21 bp, Homo sapiens
taacttggatgtcattggatt

SEQ ID NO: 3270 - RNA, 21 nt, RNAi
acuuggaugucauuggauuuu

SEQ ID NO: 3271 - RNA, 21 nt, RNAi
uuugaaccuacaguaaccuaa

SEQ ID NO: 3272 - DNA, 21 bp, Homo sapiens
taagagctgtagaagtttgtt

SEQ ID NO: 3273 - RNA, 21 nt, RNAi
agagcuguagaaguuuguuuu

SEQ ID NO: 3274 - RNA, 21 nt, RNAi
uuucucgacaucuucaaacaa

SEQ ID NO: 3275 - DNA, 21 bp, Homo sapiens
tagaatctgttcagaaactgg

SEQ ID NO: 3276 - RNA, 21 nt, RNAi
gaaucuguucagaaacugguu

SEQ ID NO: 3277 - RNA, 21 nt, RNAi
uucuuagacaagucuuugacc

SEQ ID NO: 3278 - DNA, 21 bp, Homo sapiens
tatcctggaagatttatgtgg

SEQ ID NO: 3279 - RNA, 21 nt, RNAi
uccuggaagauuuaugugguu

SEQ ID NO: 3280 - RNA, 21 nt, RNAi
uuaggaccuucuaaauacacc

SEQ ID NO: 3281 - DNA, 21 bp, Homo sapiens
tatgtggtatgctctcacttc

SEQ ID NO: 3282 - RNA, 21 nt, RNAi
ugugguaugcucucacuucuu

SEQ ID NO: 3283 - RNA, 21 nt, RNAi
uuacaccauacgagagugaag

SEQ ID NO: 3284 - DNA, 21 bp, Homo sapiens
tatgctctcacttccatggat

SEQ ID NO: 3285 - RNA, 21 nt, RNAi
ugcucucacuuccauggauuu

SEQ ID NO: 3286 - RNA, 21 nt, RNAi
uuacgagagugaagguaccua

SEQ ID NO: 3287 - DNA, 21 bp, Homo sapiens
taaagttgaccacatttgccg

SEQ ID NO: 3288 - RNA, 21 nt, RNAi
aaguugaccacauuugccguu

SEQ ID NO: 3289 - RNA, 21 nt, RNAi
uuuucaacugguguaaacggc

SEQ ID NO: 3290 - DNA, 21 bp, Homo sapiens
taagctgtaggatttcagata

SEQ ID NO: 3291 - RNA, 21 nt, RNAi
agcuguaggauuucagauauu

SEQ ID NO: 3292 - RNA, 21 nt, RNAi
uuucgacauccuaaagucuau

SEQ ID NO: 3293 - DNA, 21 bp, Homo sapiens
taggatttcagatagctattc

SEQ ID NO: 3294 - RNA, 21 nt, RNAi
ggauuucagauagcuauucuu

SEQ ID NO: 3295 - RNA, 21 nt, RNAi
uuccuaaagucuaucgauaag

SEQ ID NO: 3296 - DNA, 21 bp, Homo sapiens
tagctattcaccacaggcaca

SEQ ID NO: 3297 - RNA, 21 nt, RNAi
gcuauucaccacaggcacauu

SEQ ID NO: 3298 - RNA, 21 nt, RNAi
uucgauaagugguguccgugu

SEQ ID NO: 3299 - DNA, 21 bp, Homo sapiens
tattcaccacaggcacaatca

SEQ ID NO: 3300 - RNA, 21 nt, RNAi
uucaccacaggcacaaucauu

SEQ ID NO: 3301 - RNA, 21 nt, RNAi
uuaagugguguccguguuagu

SEQ ID NO: 3302 - DNA, 21 bp, Homo sapiens
tattccttgagtggagaacag

SEQ ID NO: 3303 - RNA, 21 nt, RNAi
uuccuugaguggagaacaguu

SEQ ID NO: 3304 - RNA, 21 nt, RNAi
uuaaggaacucaccucuuguc

SEQ ID NO: 3305 - DNA, 21 bp, Homo sapiens
tatcttattgcagcagcagaa

SEQ ID NO: 3306 - RNA, 21 nt, RNAi
ucuuauugcagcagcagaauu

SEQ ID NO: 3307 - RNA, 21 nt, RNAi
uuagaauaacgucgucgucuu

SEQ ID NO: 3308 - DNA, 21 bp, Homo sapiens
tattgcagcagcagaattctt

SEQ ID NO: 3309 - RNA, 21 nt, RNAi
uugcagcagcagaauucuuuu

SEQ ID NO: 3310 - RNA, 21 nt, RNAi
uuaacgucgucgucuuaagaa

SEQ ID NO: 3311 - DNA, 21 bp, Homo sapiens
tatacttggtcaacttgtctg

SEQ ID NO: 3312 - RNA, 21 nt, RNAi
uacuuggucaacuugucuguu

SEQ ID NO: 3313 - RNA, 21 nt, RNAi
uuaugaaccaguugaacagac

SEQ ID NO: 3314 - DNA, 21 bp, Homo sapiens
tacttggtcaacttgtctgta

SEQ ID NO: 3315 - RNA, 21 nt, RNAi
cuuggucaacuugucuguauu

SEQ ID NO: 3316 - RNA, 21 nt, RNAi
uugaaccaguugaacagacau

SEQ ID NO: 3317 - DNA, 21 bp, Homo sapiens
taacagaacctttctctgaac

SEQ ID NO: 3318 - RNA, 21 nt, RNAi
acagaaccuuucucugaacuu

SEQ ID NO: 3319 - RNA, 21 nt, RNAi
uuugucuuggaaagagacuug

SEQ ID NO: 3320 - DNA, 21 bp, Homo sapiens
taggaacttgaaagccacttc

SEQ ID NO: 3321 - RNA, 21 nt, RNAi
ggaacuugaaagccacuucuu

SEQ ID NO: 3322 - RNA, 21 nt, RNAi
uuccuugaacuuucggugaag

SEQ ID NO: 3323 - DNA, 21 bp, Homo sapiens
tacatcatctttgtaagcatc

SEQ ID NO: 3324 - RNA, 21 nt, RNAi
caucaucuuuguaagcaucuu

SEQ ID NO: 3325 - RNA, 21 nt, RNAi
uuguaguagaaacauucguag

SEQ ID NO: 3326 - DNA, 21 bp, Homo sapiens
tagagaagatgaaacagatgt

SEQ ID NO: 3327 - RNA, 21 nt, RNAi
gagaagaugaaacagauguuu

SEQ ID NO: 3328 - RNA, 21 nt, RNAi
uucucuucuacuuugucuaca

SEQ ID NO: 3329 - DNA, 21 bp, Homo sapiens
taatggaagatccagacaaag

SEQ ID NO: 3330 - RNA, 21 nt, RNAi
auggaagauccagacaaaguu

SEQ ID NO: 3331 - RNA, 21 nt, RNAi
uuuaccuucuaggucuguuuc

SEQ ID NO: 3332 - DNA, 21 bp, Homo sapiens
tagtggaaatatcaagcacat

SEQ ID NO: 3333 - RNA, 21 nt, RNAi
guggaaauaucaagcacauuu

SEQ ID NO: 3334 - RNA, 21 nt, RNAi
uucaccuuuauaguucgugua

SEQ ID NO: 3335 - DNA, 21 bp, Homo sapiens
tatcaagcacatattggaatc

SEQ ID NO: 3336 - RNA, 21 nt, RNAi
ucaagcacauauuggaaucuu

SEQ ID NO: 3337 - RNA, 21 nt, RNAi
uuaguucguguauaaccuuag

SEQ ID NO: 3338 - DNA, 21 bp, Homo sapiens
tattggaatccttggactctg

SEQ ID NO: 3339 - RNA, 21 nt, RNAi
uuggaauccuuggacucuguu

SEQ ID NO: 3340 - RNA, 21 nt, RNAi
uuaaccuuaggaaccugagac

SEQ ID NO: 3341 - DNA, 21 bp, Homo sapiens
taatgagctgaaggatacctt

SEQ ID NO: 3342 - RNA, 21 nt, RNAi
augagcugaaggauaccuuuu

SEQ ID NO: 3343 - RNA, 21 nt, RNAi
uuuacucgacuuccuauggaa

SEQ ID NO: 3344 - DNA, 21 bp, Homo sapiens
taccttgattcttacaacagg

SEQ ID NO: 3345 - RNA, 21 nt, RNAi
ccuugauucuuacaacagguu

SEQ ID NO: 3346 - RNA, 21 nt, RNAi
uuggaacuaagaauguugucc

SEQ ID NO: 3347 - DNA, 21 bp, Homo sapiens
taccatttgcactcttacact

SEQ ID NO: 3348 - RNA, 21 nt, RNAi
ccauuugcacucuuacacuuu

SEQ ID NO: 3349 - RNA, 21 nt, RNAi
uugguaaacgugagaauguga

SEQ ID NO: 3350 - DNA, 21 bp, Homo sapiens
tatccaagtcagcatctgtct

SEQ ID NO: 3351 - RNA, 21 nt, RNAi
uccaagucagcaucugucuuu

SEQ ID NO: 3352 - RNA, 21 nt, RNAi
uuagguucagucguagacaga

SEQ ID NO: 3353 - DNA, 21 bp, Homo sapiens
tacacagaaattagagctctg

SEQ ID NO: 3354 - RNA, 21 nt, RNAi
cacagaaauuagagcucuguu

SEQ ID NO: 3355 - RNA, 21 nt, RNAi
uugugucuuuaaucucgagac

SEQ ID NO: 3356 - DNA, 21 bp, Homo sapiens
tagagctctggttgcagctaa

SEQ ID NO: 3357 - RNA, 21 nt, RNAi
gagcucugguugcagcuaauu

SEQ ID NO: 3358 - RNA, 21 nt, RNAi
uucucgagaccaacgucgauu

SEQ ID NO: 3359 - DNA, 21 bp, Homo sapiens
tagtcagatgacagcacttcc

SEQ ID NO: 3360 - RNA, 21 nt, RNAi
gucagaugacagcacuuccuu

SEQ ID NO: 3361 - RNA, 21 nt, RNAi
uucagucuacugucgugaagg

SEQ ID NO: 3362 - DNA, 21 bp, Homo sapiens
tactccatgccagaatgctga

SEQ ID NO: 3363 - RNA, 21 nt, RNAi
cuccaugccagaaugcugauu

SEQ ID NO: 3364 - RNA, 21 nt, RNAi
uugagguacggucuuacgacu

SEQ ID NO: 3365 - DNA, 21 bp, Homo sapiens
tacgttgtctgaaattgccaa

SEQ ID NO: 3366 - RNA, 21 nt, RNAi
cguugucugaaauugccaauu

SEQ ID NO: 3367 - RNA, 21 nt, RNAi
uugcaacagacuuuaacgguu

SEQ ID NO: 3368 - DNA, 21 bp, Homo sapiens
tactaggacattacaagttct

SEQ ID NO: 3369 - RNA, 21 nt, RNAi
cuaggacauuacaaguucuuu

SEQ ID NO: 3370 - RNA, 21 nt, RNAi
uugauccuguaauguucaaga

SEQ ID NO: 3371 - DNA, 21 bp, Homo sapiens
taggacattacaagttctact

SEQ ID NO: 3372 - RNA, 21 nt, RNAi
ggacauuacaaguucuacuuu

SEQ ID NO: 3373 - RNA, 21 nt, RNAi
uuccuguaauguucaagauga

SEQ ID NO: 3374 - DNA, 21 bp, Homo sapiens
tacaagttctactacctgatc

SEQ ID NO: 3375 - RNA, 21 nt, RNAi
caaguucuacuaccugaucuu

SEQ ID NO: 3376 - RNA, 21 nt, RNAi
uuguucaagaugauggacuag

SEQ ID NO: 3377 - DNA, 21 bp, Homo sapiens
tactacctgatcttgctgcca

SEQ ID NO: 3378 - RNA, 21 nt, RNAi
cuaccugaucuugcugccauu

SEQ ID NO: 3379 - RNA, 21 nt, RNAi
uugauggacuagaacgacggu

SEQ ID NO: 3380 - DNA, 21 bp, Homo sapiens
tacctgatcttgctgccaaag

SEQ ID NO: 3381 - RNA, 21 nt, RNAi
ccugaucuugcugccaaaguu

SEQ ID NO: 3382 - RNA, 21 nt, RNAi
uuggacuagaacgacgguuuc

SEQ ID NO: 3383 - DNA, 21 bp, Homo sapiens
taaatgtcaatcgtagagaga

SEQ ID NO: 3384 - RNA, 21 nt, RNAi
aaugucaaucguagagagauu

SEQ ID NO: 3385 - RNA, 21 nt, RNAi
uuuuacaguuagcaucucucu

SEQ ID NO: 3386 - DNA, 21 bp, Homo sapiens
tattgctgcgtattggagaac

SEQ ID NO: 3387 - RNA, 21 nt, RNAi
uugcugcguauuggagaacuu

SEQ ID NO: 3388 - RNA, 21 nt, RNAi
uuaacgacgcauaaccucuug

SEQ ID NO: 3389 - DNA, 21 bp, Homo sapiens
tattggagaacactatcaaca

SEQ ID NO: 3390 - RNA, 21 nt, RNAi
uuggagaacacuaucaacauu

SEQ ID NO: 3391 - RNA, 21 nt, RNAi
uuaaccucuugugauaguugu

SEQ ID NO: 3392 - DNA, 21 bp, Homo sapiens
taatggtttgtcaatacttgc

SEQ ID NO: 3393 - RNA, 21 nt, RNAi
augguuugucaauacuugcuu

SEQ ID NO: 3394 - RNA, 21 nt, RNAi
uuuaccaaacaguuaugaacg

SEQ ID NO: 3395 - DNA, 21 bp, Homo sapiens
tacttgcctcatttgcatcca

SEQ ID NO: 3396 - RNA, 21 nt, RNAi
cuugccucauuugcauccauu

SEQ ID NO: 3397 - RNA, 21 nt, RNAi
uugaacggaguaaacguaggu

SEQ ID NO: 3398 - DNA, 21 bp, Homo sapiens
tatcatatcacctgaactgat

SEQ ID NO: 3399 - RNA, 21 nt, RNAi
ucauaucaccugaacugauuu

SEQ ID NO: 3400 - RNA, 21 nt, RNAi
uuaguauaguggacuugacua

SEQ ID NO: 3401 - DNA, 21 bp, Homo sapiens
tatcacctgaactgatggctg

SEQ ID NO: 3402 - RNA, 21 nt, RNAi
ucaccugaacugauggcuguu

SEQ ID NO: 3403 - RNA, 21 nt, RNAi
uuaguggacuugacuaccgac

SEQ ID NO: 3404 - DNA, 21 bp, Homo sapiens
taacatgcagttactgagctc

SEQ ID NO: 3405 - RNA, 21 nt, RNAi
acaugcaguuacugagcucuu

SEQ ID NO: 3406 - RNA, 21 nt, RNAi
uuuguacgucaaugacucgag

SEQ ID NO: 3407 - DNA, 21 bp, Homo sapiens
tactgagctctagtgttggca

SEQ ID NO: 3408 - RNA, 21 nt, RNAi
cugagcucuaguguuggcauu

SEQ ID NO: 3409 - RNA, 21 nt, RNAi
uugacucgagaucacaaccgu

SEQ ID NO: 3410 - DNA, 21 bp, Homo sapiens
tagtgttggcattgaagataa

SEQ ID NO: 3411 - RNA, 21 nt, RNAi
guguuggcauugaagauaauu

SEQ ID NO: 3412 - RNA, 21 nt, RNAi
uucacaaccguaacuucuauu

SEQ ID NO: 3413 - DNA, 21 bp, Homo sapiens
taatagtagctttgttacctc

SEQ ID NO: 3414 - RNA, 21 nt, RNAi
auaguagcuuuguuaccucuu

SEQ ID NO: 3415 - RNA, 21 nt, RNAi
uuuaucaucgaaacaauggag

SEQ ID NO: 3416 - DNA, 21 bp, Homo sapiens
tagtagctttgttacctctta

SEQ ID NO: 3417 - RNA, 21 nt, RNAi
guagcuuuguuaccucuuauu

SEQ ID NO: 3418 - RNA, 21 nt, RNAi
uucaucgaaacaauggagaau

SEQ ID NO: 3419 - DNA, 21 bp, Homo sapiens
tagctttgttacctcttatac

SEQ ID NO: 3420 - RNA, 21 nt, RNAi
gcuuuguuaccucuuauacuu

SEQ ID NO: 3421 - RNA, 21 nt, RNAi
uucgaaacaauggagaauaug

SEQ ID NO: 3422 - DNA, 21 bp, Homo sapiens
tacctcttatacacatccagc

SEQ ID NO: 3423 - RNA, 21 nt, RNAi
ccucuuauacacauccagcuu

SEQ ID NO: 3424 - RNA, 21 nt, RNAi
uuggagaauauguguaggucg

SEQ ID NO: 3425 - DNA, 21 bp, Homo sapiens
tatacacatccagcctaaaga

SEQ ID NO: 3426 - RNA, 21 nt, RNAi
uacacauccagccuaaagauu

SEQ ID NO: 3427 - RNA, 21 nt, RNAi
uuauguguaggucggauuucu

SEQ ID NO: 3428 - DNA, 21 bp, Homo sapiens
tacacatccagcctaaagaaa

SEQ ID NO: 3429 - RNA, 21 nt, RNAi
cacauccagccuaaagaaauu

SEQ ID NO: 3430 - RNA, 21 nt, RNAi
uuguguaggucggauuucuuu

SEQ ID NO: 3431 - DNA, 21 bp, Homo sapiens
taaagaaactgcagctatctt

SEQ ID NO: 3432 - RNA, 21 nt, RNAi
aagaaacugcagcuaucuuuu

SEQ ID NO: 3433 - RNA, 21 nt, RNAi
uuuucuuugacgucgauagaa

SEQ ID NO: 3434 - DNA, 21 bp, Homo sapiens
tatcttccactacctcataat

SEQ ID NO: 3435 - RNA, 21 nt, RNAi
ucuuccacuaccucauaauuu

SEQ ID NO: 3436 - RNA, 21 nt, RNAi
uuagaaggugauggaguauua

SEQ ID NO: 3437 - DNA, 21 bp, Homo sapiens
tacctgatcatccagaattaa

SEQ ID NO: 3438 - RNA, 21 nt, RNAi
ccugaucauccagaauuaauu

SEQ ID NO: 3439 - RNA, 21 nt, RNAi
uuggacuaguaggucuuaauu

SEQ ID NO: 3440 - DNA, 21 bp, Homo sapiens
tacagaaaggagacctctgag

SEQ ID NO: 3441 - RNA, 21 nt, RNAi
cagaaaggagaccucugaguu

SEQ ID NO: 3442 - RNA, 21 nt, RNAi
uugucuuuccucuggagacuc

SEQ ID NO: 3443 - DNA, 21 bp, Homo sapiens
tatgaaggccattcaacatga

SEQ ID NO: 3444 - RNA, 21 nt, RNAi
ugaaggccauucaacaugauu

SEQ ID NO: 3445 - RNA, 21 nt, RNAi
uuacuuccgguaaguuguacu

SEQ ID NO: 3446 - DNA, 21 bp, Homo sapiens
tattcatgctcttacaagctt

SEQ ID NO: 3447 - RNA, 21 nt, RNAi
uucaugcucuuacaagcuuuu

SEQ ID NO: 3448 - RNA, 21 nt, RNAi
uuaaguacgagaauguucgaa

SEQ ID NO: 3449 - DNA, 21 bp, Homo sapiens
tacaagcttgaaggaaacctt

SEQ ID NO: 3450 - RNA, 21 nt, RNAi
caagcuugaaggaaaccuuuu

SEQ ID NO: 3451 - RNA, 21 nt, RNAi
uuguucgaacuuccuuuggaa

SEQ ID NO: 3452 - DNA, 21 bp, Homo sapiens
taaagtatgcaacagacagtg

SEQ ID NO: 3453 - RNA, 21 nt, RNAi
aaguaugcaacagacaguguu

SEQ ID NO: 3454 - RNA, 21 nt, RNAi
uuuucauacguugucugucac

SEQ ID NO: 3455 - DNA, 21 bp, Homo sapiens
tatgcaacagacagtgaaaca

SEQ ID NO: 3456 - RNA, 21 nt, RNAi
ugcaacagacagugaaacauu

SEQ ID NO: 3457 - RNA, 21 nt, RNAi
uuacguugucugucacuuugu

SEQ ID NO: 3458 - DNA, 21 bp, Homo sapiens
tagaacctattatctcacagt

SEQ ID NO: 3459 - RNA, 21 nt, RNAi
gaaccuauuaucucacaguuu

SEQ ID NO: 3460 - RNA, 21 nt, RNAi
uucuuggauaauagaguguca

SEQ ID NO: 3461 - DNA, 21 bp, Homo sapiens
tattatctcacagttggtgac

SEQ ID NO: 3462 - RNA, 21 nt, RNAi
uuaucucacaguuggugacuu

SEQ ID NO: 3463 - RNA, 21 nt, RNAi
uuaauagagugucaaccacug

SEQ ID NO: 3464 - DNA, 21 bp, Homo sapiens
tatctcacagttggtgacagt

SEQ ID NO: 3465 - RNA, 21 nt, RNAi
ucucacaguuggugacaguuu

SEQ ID NO: 3466 - RNA, 21 nt, RNAi
uuagagugucaaccacuguca

SEQ ID NO: 3467 - DNA, 21 bp, Homo sapiens
tagatccaggtcgattagatt

SEQ ID NO: 3468 - RNA, 21 nt, RNAi
gauccaggucgauuagauuuu

SEQ ID NO: 3469 - RNA, 21 nt, RNAi
uucuagguccagcuaaucuaa

SEQ ID NO: 3470 - DNA, 21 bp, Homo sapiens
tacatttgtgactggagtaga

SEQ ID NO: 3471 - RNA, 21 nt, RNAi
cauuugugacuggaguagauu

SEQ ID NO: 3472 - RNA, 21 nt, RNAi
uuguaaacacugaccucaucu

SEQ ID NO: 3473 - DNA, 21 bp, Homo sapiens
tagaagattcaagctttgcct

SEQ ID NO: 3474 - RNA, 21 nt, RNAi
gaagauucaagcuuugccuuu

SEQ ID NO: 3475 - RNA, 21 nt, RNAi
uucuucuaaguucgaaacgga

SEQ ID NO: 3476 - DNA, 21 bp, Homo sapiens
tatggattattgatggagcta

SEQ ID NO: 3477 - RNA, 21 nt, RNAi
uggauuauugauggagcuauu

SEQ ID NO: 3478 - RNA, 21 nt, RNAi
uuaccuaauaacuaccucgau

SEQ ID NO: 3479 - DNA, 21 bp, Homo sapiens
tattgatggagctaacaagag

SEQ ID NO: 3480 - RNA, 21 nt, RNAi
uugauggagcuaacaagaguu

SEQ ID NO: 3481 - RNA, 21 nt, RNAi
uuaacuaccucgauuguucuc

SEQ ID NO: 3482 - DNA, 21 bp, Homo sapiens
taacaagagcttaccttgcgt

SEQ ID NO: 3483 - RNA, 21 nt, RNAi
acaagagcuuaccuugcguuu

SEQ ID NO: 3484 - RNA, 21 nt, RNAi
uuuguucucgaauggaacgca

SEQ ID NO: 3485 - DNA, 21 bp, Homo sapiens
taccttgcgtatgctgataat

SEQ ID NO: 3486 - RNA, 21 nt, RNAi
ccuugcguaugcugauaauuu

SEQ ID NO: 3487 - RNA, 21 nt, RNAi
uuggaacgcauacgacuauua

SEQ ID NO: 3488 - DNA, 21 bp, Homo sapiens
tatgctgataatagccgagct

SEQ ID NO: 3489 - RNA, 21 nt, RNAi
ugcugauaauagccgagcuuu

SEQ ID NO: 3490 - RNA, 21 nt, RNAi
uuacgacuauuaucggcucga

SEQ ID NO: 3491 - DNA, 21 bp, Homo sapiens
taatagccgagctcaagattc

SEQ ID NO: 3492 - RNA, 21 nt, RNAi
auagccgagcucaagauucuu

SEQ ID NO: 3493 - RNA, 21 nt, RNAi
uuuaucggcucgaguucuaag

SEQ ID NO: 3494 - DNA, 21 bp, Homo sapiens
tagccgagctcaagattcagc

SEQ ID NO: 3495 - RNA, 21 nt, RNAi
gccgagcucaagauucagcuu

SEQ ID NO: 3496 - RNA, 21 nt, RNAi
uucggcucgaguucuaagucg

SEQ ID NO: 3497 - DNA, 21 bp, Homo sapiens
tatgccattcaggagttgctt

SEQ ID NO: 3498 - RNA, 21 nt, RNAi
ugccauucaggaguugcuuuu

SEQ ID NO: 3499 - RNA, 21 nt, RNAi
uuacgguaaguccucaacgaa

SEQ ID NO: 3500 - DNA, 21 bp, Homo sapiens
tatgactgtagagagatggag

SEQ ID NO: 3501 - RNA, 21 nt, RNAi
ugacuguagagagauggaguu

SEQ ID NO: 3502 - RNA, 21 nt, RNAi
uuacugacaucucucuaccuc

SEQ ID NO: 3503 - DNA, 21 bp, Homo sapiens
tagagagatggagaccaacgg

SEQ ID NO: 3504 - RNA, 21 nt, RNAi
gagagauggagaccaacgguu

SEQ ID NO: 3505 - RNA, 21 nt, RNAi
uucucucuaccucugguugcc

SEQ ID NO: 3506 - DNA, 21 bp, Homo sapiens
tagaacctcatctaaatacca

SEQ ID NO: 3507 - RNA, 21 nt, RNAi
gaaccucaucuaaauaccauu

SEQ ID NO: 3508 - RNA, 21 nt, RNAi
uucuuggaguagauuuauggu

SEQ ID NO: 3509 - DNA, 21 bp, Homo sapiens
taccagatacaagagttctca

SEQ ID NO: 3510 - RNA, 21 nt, RNAi
ccagauacaagaguucucauu

SEQ ID NO: 3511 - RNA, 21 nt, RNAi
uuggucuauguucucaagagu

SEQ ID NO: 3512 - DNA, 21 bp, Homo sapiens
tacaagagttctcagaagtca

SEQ ID NO: 3513 - RNA, 21 nt, RNAi
caagaguucucagaagucauu

SEQ ID NO: 3514 - RNA, 21 nt, RNAi
uuguucucaagagucuucagu

SEQ ID NO: 3515 - DNA, 21 bp, Homo sapiens
tagtaactttgcagaatggtc

SEQ ID NO: 3516 - RNA, 21 nt, RNAi
guaacuuugcagaauggucuu

SEQ ID NO: 3517 - RNA, 21 nt, RNAi
uucauugaaacgucuuaccag

SEQ ID NO: 3518 - DNA, 21 bp, Homo sapiens
taactttgcagaatggtcagc

SEQ ID NO: 3519 - RNA, 21 nt, RNAi
acuuugcagaauggucagcuu

SEQ ID NO: 3520 - RNA, 21 nt, RNAi
uuugaaacgucuuaccagucg

SEQ ID NO: 3521 - DNA, 21 bp, Homo sapiens
tattacaaaggttcgacatga

SEQ ID NO: 3522 - RNA, 21 nt, RNAi
uuacaaagguucgacaugauu

SEQ ID NO: 3523 - RNA, 21 nt, RNAi
uuaauguuuccaagcuguacu

SEQ ID NO: 3524 - DNA, 21 bp, Homo sapiens
tacaaaggttcgacatgatct

SEQ ID NO: 3525 - RNA, 21 nt, RNAi
caaagguucgacaugaucuuu

SEQ ID NO: 3526 - RNA, 21 nt, RNAi
uuguuuccaagcuguacuaga

SEQ ID NO: 3527 - DNA, 21 bp, Homo sapiens
tagcattatgatgaagcatga

SEQ ID NO: 3528 - RNA, 21 nt, RNAi
gcauuaugaugaagcaugauu

SEQ ID NO: 3529 - RNA, 21 nt, RNAi
uucguaauacuacuucguacu

SEQ ID NO: 3530 - DNA, 21 bp, Homo sapiens
tatcttcttccacatattctg

SEQ ID NO: 3531 - RNA, 21 nt, RNAi
ucuucuuccacauauucuguu

SEQ ID NO: 3532 - RNA, 21 nt, RNAi
uuagaagaagguguauaagac

SEQ ID NO: 3533 - DNA, 21 bp, Homo sapiens
tattctggtgtatgtcttact

SEQ ID NO: 3534 - RNA, 21 nt, RNAi
uucugguguaugucuuacuuu

SEQ ID NO: 3535 - RNA, 21 nt, RNAi
uuaagaccacauacagaauga

SEQ ID NO: 3536 - DNA, 21 bp, Homo sapiens
taatcaagaagatcagcagga

SEQ ID NO: 3537 - RNA, 21 nt, RNAi
aucaagaagaucagcaggauu

SEQ ID NO: 3538 - RNA, 21 nt, RNAi
uuuaguucuucuagucguccu

SEQ ID NO: 3539 - DNA, 21 bp, Homo sapiens
tatgcagaaattatggcagtt

SEQ ID NO: 3540 - RNA, 21 nt, RNAi
ugcagaaauuauggcaguuuu

SEQ ID NO: 3541 - RNA, 21 nt, RNAi
uuacgucuuuaauaccgucaa

SEQ ID NO: 3542 - DNA, 21 bp, Homo sapiens
tatggcagttctaaagcatga

SEQ ID NO: 3543 - RNA, 21 nt, RNAi
uggcaguucuaaagcaugauu

SEQ ID NO: 3544 - RNA, 21 nt, RNAi
uuaccgucaagauuucguacu

SEQ ID NO: 3545 - DNA, 21 bp, Homo sapiens
taaagcatgacgatcagcata

SEQ ID NO: 3546 - RNA, 21 nt, RNAi
aagcaugacgaucagcauauu

SEQ ID NO: 3547 - RNA, 21 nt, RNAi
uuuucguacugcuagucguau

SEQ ID NO: 3548 - DNA, 21 bp, Homo sapiens
tacacagactgtgttctccat

SEQ ID NO: 3549 - RNA, 21 nt, RNAi
cacagacuguguucuccauuu

SEQ ID NO: 3550 - RNA, 21 nt, RNAi
uugugucugacacaagaggua

SEQ ID NO: 3551 - DNA, 21 bp, Homo sapiens
taaggtagactcaatggtatc

SEQ ID NO: 3552 - RNA, 21 nt, RNAi
agguagacucaaugguaucuu

SEQ ID NO: 3553 - RNA, 21 nt, RNAi
uuuccaucugaguuaccauag

SEQ ID NO: 3554 - DNA, 21 bp, Homo sapiens
tagactcaatggtatctactg

SEQ ID NO: 3555 - RNA, 21 nt, RNAi
gacucaaugguaucuacuguu

SEQ ID NO: 3556 - RNA, 21 nt, RNAi
uucugaguuaccauagaugac

SEQ ID NO: 3557 - DNA, 21 bp, Homo sapiens
tatctactgtggattatgaag

SEQ ID NO: 3558 - RNA, 21 nt, RNAi
ucuacuguggauuaugaaguu

SEQ ID NO: 3559 - RNA, 21 nt, RNAi
uuagaugacaccuaauacuuc

SEQ ID NO: 3560 - DNA, 21 bp, Homo sapiens
tactgtggattatgaagacta

SEQ ID NO: 3561 - RNA, 21 nt, RNAi
cuguggauuaugaagacuauu

SEQ ID NO: 3562 - RNA, 21 nt, RNAi
uugacaccuaauacuucugau

SEQ ID NO: 3563 - DNA, 21 bp, Homo sapiens
tatgaagactatcagagtgta

SEQ ID NO: 3564 - RNA, 21 nt, RNAi
ugaagacuaucagaguguauu

SEQ ID NO: 3565 - RNA, 21 nt, RNAi
uuacuucugauagucucacau

SEQ ID NO: 3566 - DNA, 21 bp, Homo sapiens
tactctggcagtagcttcctt

SEQ ID NO: 3567 - RNA, 21 nt, RNAi
cucuggcaguagcuuccuuuu

SEQ ID NO: 3568 - RNA, 21 nt, RNAi
uugagaccgucaucgaaggaa

SEQ ID NO: 3569 - DNA, 21 bp, Homo sapiens
tagcttcctttcgctccaaag

SEQ ID NO: 3570 - RNA, 21 nt, RNAi
gcuuccuuucgcuccaaaguu

SEQ ID NO: 3571 - RNA, 21 nt, RNAi
uucgaaggaaagcgagguuuc

SEQ ID NO: 3572 - DNA, 21 bp, Homo sapiens
tacacacgagctgtaatgcac

SEQ ID NO: 3573 - RNA, 21 nt, RNAi
cacacgagcuguaaugcacuu

SEQ ID NO: 3574 - RNA, 21 nt, RNAi
uugugugcucgacauuacgug

SEQ ID NO: 3575 - DNA, 21 bp, Homo sapiens
tattcaggaacatcttggatt

SEQ ID NO: 3576 - RNA, 21 nt, RNAi
uucaggaacaucuuggauuuu

SEQ ID NO: 3577 - RNA, 21 nt, RNAi
uuaaguccuuguagaaccuaa

SEQ ID NO: 3578 - DNA, 21 bp, Homo sapiens
tacagaaattgtatgctgcta

SEQ ID NO: 3579 - RNA, 21 nt, RNAi
cagaaauuguaugcugcuauu

SEQ ID NO: 3580 - RNA, 21 nt, RNAi
uugucuuuaacauacgacgau

SEQ ID NO: 3581 - DNA, 21 bp, Homo sapiens
tatgctgctatgcatgaacct

SEQ ID NO: 3582 - RNA, 21 nt, RNAi
ugcugcuaugcaugaaccuuu

SEQ ID NO: 3583 - RNA, 21 nt, RNAi
uuacgacgauacguacuugga

SEQ ID NO: 3584 - DNA, 21 bp, Homo sapiens
tatgcatgaacctgatggagt

SEQ ID NO: 3585 - RNA, 21 nt, RNAi
ugcaugaaccugauggaguuu

SEQ ID NO: 3586 - RNA, 21 nt, RNAi
uuacguacuuggacuaccuca

SEQ ID NO: 3587 - DNA, 21 bp, Homo sapiens
tagaaaggcagaaccatctct

SEQ ID NO: 3588 - RNA, 21 nt, RNAi
gaaaggcagaaccaucucuuu

SEQ ID NO: 3589 - RNA, 21 nt, RNAi
uucuuuccgucuugguagaga

SEQ ID NO: 3590 - DNA, 21 bp, Homo sapiens
tattcagctagaaccagacca

SEQ ID NO: 3591 - RNA, 21 nt, RNAi
uucagcuagaaccagaccauu

SEQ ID NO: 3592 - RNA, 21 nt, RNAi
uuaagucgaucuuggucuggu

SEQ ID NO: 3593 - DNA, 21 bp, Homo sapiens
tagaaccagaccagatcattc

SEQ ID NO: 3594 - RNA, 21 nt, RNAi
gaaccagaccagaucauucuu

SEQ ID NO: 3595 - RNA, 21 nt, RNAi
uucuuggucuggucuaguaag

SEQ ID NO: 3596 - DNA, 21 bp, Homo sapiens
tatcatggtgtagtaaagtcc

SEQ ID NO: 3597 - RNA, 21 nt, RNAi
ucaugguguaguaaaguccuu

SEQ ID NO: 3598 - RNA, 21 nt, RNAi
uuaguaccacaucauuucagg

SEQ ID NO: 3599 - DNA, 21 bp, Homo sapiens
tagtaaagtccatgttaggtc

SEQ ID NO: 3600 - RNA, 21 nt, RNAi
guaaaguccauguuaggucuu

SEQ ID NO: 3601 - RNA, 21 nt, RNAi
uucauuucagguacaauccag

SEQ ID NO: 3602 - DNA, 21 bp, Homo sapiens
taaagtccatgttaggtcttg

SEQ ID NO: 3603 - RNA, 21 nt, RNAi
aaguccauguuaggucuuguu

SEQ ID NO: 3604 - RNA, 21 nt, RNAi
uuuucagguacaauccagaac

SEQ ID NO: 3605 - DNA, 21 bp, Homo sapiens
taggtcttggtcagctgtcta

SEQ ID NO: 3606 - RNA, 21 nt, RNAi
ggucuuggucagcugucuauu

SEQ ID NO: 3607 - RNA, 21 nt, RNAi
uuccagaaccagucgacagau

SEQ ID NO: 3608 - DNA, 21 bp, Homo sapiens
tactgttatcactcaggtgaa

SEQ ID NO: 3609 - RNA, 21 nt, RNAi
cuguuaucacucaggugaauu

SEQ ID NO: 3610 - RNA, 21 nt, RNAi
uugacaauagugaguccacuu

SEQ ID NO: 3611 - DNA, 21 bp, Homo sapiens
tatcactcaggtgaatggagt

SEQ ID NO: 3612 - RNA, 21 nt, RNAi
ucacucaggugaauggaguuu

SEQ ID NO: 3613 - RNA, 21 nt, RNAi
uuagugaguccacuuaccuca

SEQ ID NO: 3614 - DNA, 21 bp, Homo sapiens
taacaggtccgagtggacaga

SEQ ID NO: 3615 - RNA, 21 nt, RNAi
acagguccgaguggacagauu

SEQ ID NO: 3616 - RNA, 21 nt, RNAi
uuuguccaggcucaccugucu

SEQ ID NO: 3617 - DNA, 21 bp, Homo sapiens
taaacacgtacagagtggaag

SEQ ID NO: 3618 - RNA, 21 nt, RNAi
aacacguacagaguggaaguu

SEQ ID NO: 3619 - RNA, 21 nt, RNAi
uuuugugcaugucucaccuuc

SEQ ID NO: 3620 - DNA, 21 bp, Homo sapiens
tacagagtggaagcagcttgg

SEQ ID NO: 3621 - RNA, 21 nt, RNAi
cagaguggaagcagcuugguu

SEQ ID NO: 3622 - RNA, 21 nt, RNAi
uugucucaccuucgucgaacc

SEQ ID NO: 3623 - DNA, 21 bp, Homo sapiens
tacaacatggagtgtcagact

SEQ ID NO: 3624 - RNA, 21 nt, RNAi
caacauggagugucagacuuu

SEQ ID NO: 3625 - RNA, 21 nt, RNAi
uuguuguaccucacagucuga

SEQ ID NO: 3626 - DNA, 21 bp, Homo sapiens
tatgactcactgaaactagtg

SEQ ID NO: 3627 - RNA, 21 nt, RNAi
ugacucacugaaacuaguguu

SEQ ID NO: 3628 - RNA, 21 nt, RNAi
uuacugagugacuuugaucac

SEQ ID NO: 3629 - DNA, 21 bp, Homo sapiens
tagtgagagcagaacaaattg

SEQ ID NO: 3630 - RNA, 21 nt, RNAi
gugagagcagaacaaauuguu

SEQ ID NO: 3631 - RNA, 21 nt, RNAi
uucacucucgucuuguuuaac

SEQ ID NO: 3632 - DNA, 21 bp, Homo sapiens
tacctctttcagctgcaagct

SEQ ID NO: 3633 - RNA, 21 nt, RNAi
ccucuuucagcugcaagcuuu

SEQ ID NO: 3634 - RNA, 21 nt, RNAi
uuggagaaagucgacguucga

SEQ ID NO: 3635 - DNA, 21 bp, Homo sapiens
taccaacgaggatatgaatat

SEQ ID NO: 3636 - RNA, 21 nt, RNAi
ccaacgaggauaugaauauuu

SEQ ID NO: 3637 - RNA, 21 nt, RNAi
uugguugcuccuauacuuaua

SEQ ID NO: 3638 - DNA, 21 bp, Homo sapiens
tatattgtgagattgcacatg

SEQ ID NO: 3639 - RNA, 21 nt, RNAi
uauugugagauugcacauguu

SEQ ID NO: 3640 - RNA, 21 nt, RNAi
uuauaacacucuaacguguac

SEQ ID NO: 3641 - DNA, 21 bp, Homo sapiens
tattgtgagattgcacatgtt

SEQ ID NO: 3642 - RNA, 21 nt, RNAi
uugugagauugcacauguuuu

SEQ ID NO: 3643 - RNA, 21 nt, RNAi
uuaacacucuaacguguacaa

SEQ ID NO: 3644 - DNA, 21 bp, Homo sapiens
tatgtgagttggagcatagca

SEQ ID NO: 3645 - RNA, 21 nt, RNAi
ugugaguuggagcauagcauu

SEQ ID NO: 3646 - RNA, 21 nt, RNAi
uuacacucaaccucguaucgu

SEQ ID NO: 3647 - DNA, 21 bp, Homo sapiens
tacagagccaaggagcctatc

SEQ ID NO: 3648 - RNA, 21 nt, RNAi
cagagccaaggagccuaucuu

SEQ ID NO: 3649 - RNA, 21 nt, RNAi
uugucucgguuccucggauag

SEQ ID NO: 3650 - DNA, 21 bp, Homo sapiens
tacaatgaaatggttggagaa

SEQ ID NO: 3651 - RNA, 21 nt, RNAi
caaugaaaugguuggagaauu

SEQ ID NO: 3652 - RNA, 21 nt, RNAi
uuguuacuuuaccaaccucuu

SEQ ID NO: 3653 - DNA, 21 bp, Homo sapiens
tagctagaaaggctggtcacc

SEQ ID NO: 3654 - RNA, 21 nt, RNAi
gcuagaaaggcuggucaccuu

SEQ ID NO: 3655 - RNA, 21 nt, RNAi
uucgaucuuuccgaccagugg

SEQ ID NO: 3656 - DNA, 21 bp, Homo sapiens
tagaaaggctggtcaccacca

SEQ ID NO: 3657 - RNA, 21 nt, RNAi
gaaaggcuggucaccaccauu

SEQ ID NO: 3658 - RNA, 21 nt, RNAi
uucuuuccgaccagugguggu

SEQ ID NO: 3659 - DNA, 21 bp, Homo sapiens
tacaatgctctccttaatgca

SEQ ID NO: 3660 - RNA, 21 nt, RNAi
caaugcucuccuuaaugcauu

SEQ ID NO: 3661 - RNA, 21 nt, RNAi
uuguuacgagaggaauuacgu

SEQ ID NO: 3662 - DNA, 21 bp, Homo sapiens
taagaacatgttaatccatgg

SEQ ID NO: 3663 - RNA, 21 nt, RNAi
agaacauguuaauccaugguu

SEQ ID NO: 3664 - RNA, 21 nt, RNAi
uuucuuguacaauuagguacc

SEQ ID NO: 3665 - DNA, 21 bp, Homo sapiens
taatccatggtcgagctatgc

SEQ ID NO: 3666 - RNA, 21 nt, RNAi
auccauggucgagcuaugcuu

SEQ ID NO: 3667 - RNA, 21 nt, RNAi
uuuagguaccagcucgauacg

SEQ ID NO: 3668 - DNA, 21 bp, Homo sapiens
tatggaagaaacagctaactt

SEQ ID NO: 3669 - RNA, 21 nt, RNAi
uggaagaaacagcuaacuuuu

SEQ ID NO: 3670 - RNA, 21 nt, RNAi
uuaccuucuuugucgauugaa

SEQ ID NO: 3671 - DNA, 21 bp, Homo sapiens
tataaggatgtgaccgcgtgc

SEQ ID NO: 3672 - RNA, 21 nt, RNAi
uaaggaugugaccgcgugcuu

SEQ ID NO: 3673 - RNA, 21 nt, RNAi
uuauuccuacacuggcgcacg

SEQ ID NO: 3674 - DNA, 21 bp, Homo sapiens
taaggatgtgaccgcgtgcct

SEQ ID NO: 3675 - RNA, 21 nt, RNAi
aggaugugaccgcgugccuuu

SEQ ID NO: 3676 - RNA, 21 nt, RNAi
uuuccuacacuggcgcacgga

SEQ ID NO: 3677 - DNA, 21 bp, Homo sapiens
taccttgccaagtactatgac

SEQ ID NO: 3678 - RNA, 21 nt, RNAi
ccuugccaaguacuaugacuu

SEQ ID NO: 3679 - RNA, 21 nt, RNAi
uuggaacgguucaugauacug

SEQ ID NO: 3680 - DNA, 21 bp, Homo sapiens
tatatcagtcaatgccacgaa

SEQ ID NO: 3681 - RNA, 21 nt, RNAi
uaucagucaaugccacgaauu

SEQ ID NO: 3682 - RNA, 21 nt, RNAi
uuauagucaguuacggugcuu

SEQ ID NO: 3683 - DNA, 21 bp, Homo sapiens
tatcagtcaatgccacgaatg

SEQ ID NO: 3684 - RNA, 21 nt, RNAi
ucagucaaugccacgaauguu

SEQ ID NO: 3685 - RNA, 21 nt, RNAi
uuagucaguuacggugcuuac

SEQ ID NO: 3686 - DNA, 21 bp, Homo sapiens
taactctatggcttgattatg

SEQ ID NO: 3687 - RNA, 21 nt, RNAi
acucuauggcuugauuauguu

SEQ ID NO: 3688 - RNA, 21 nt, RNAi
uuugagauaccgaacuaauac

SEQ ID NO: 3689 - DNA, 21 bp, Homo sapiens
tatggcttgattatggtacaa

SEQ ID NO: 3690 - RNA, 21 nt, RNAi
uggcuugauuaugguacaauu

SEQ ID NO: 3691 - RNA, 21 nt, RNAi
uuaccgaacuaauaccauguu

SEQ ID NO: 3692 - DNA, 21 bp, Homo sapiens
tatggtacaaaggcatatgaa

SEQ ID NO: 3693 - RNA, 21 nt, RNAi
ugguacaaaggcauaugaauu

SEQ ID NO: 3694 - RNA, 21 nt, RNAi
uuaccauguuuccguauacuu

SEQ ID NO: 3695 - DNA, 21 bp, Homo sapiens
tacaaatgaggaatgatttgg

SEQ ID NO: 3696 - RNA, 21 nt, RNAi
caaaugaggaaugauuugguu

SEQ ID NO: 3697 - RNA, 21 nt, RNAi
uuguuuacuccuuacuaaacc

SEQ ID NO: 3698 - DNA, 21 bp, Homo sapiens
taaacaaggttatcacagagc

SEQ ID NO: 3699 - RNA, 21 nt, RNAi
aacaagguuaucacagagcuu

SEQ ID NO: 3700 - RNA, 21 nt, RNAi
uuuuguuccaauagugucucg

SEQ ID NO: 3701 - DNA, 21 bp, Homo sapiens
tatcacagagcatacaaacta

SEQ ID NO: 3702 - RNA, 21 nt, RNAi
ucacagagcauacaaacuauu

SEQ ID NO: 3703 - RNA, 21 nt, RNAi
uuagugucucguauguuugau

SEQ ID NO: 3704 - DNA, 21 bp, Homo sapiens
tagccaaagtatttctagcct

SEQ ID NO: 3705 - RNA, 21 nt, RNAi
gccaaaguauuucuagccuuu

SEQ ID NO: 3706 - RNA, 21 nt, RNAi
uucgguuucauaaagaucgga

SEQ ID NO: 3707 - DNA, 21 bp, Homo sapiens
tatttctagcctatcctcaac

SEQ ID NO: 3708 - RNA, 21 nt, RNAi
uuucuagccuauccucaacuu

SEQ ID NO: 3709 - RNA, 21 nt, RNAi
uuaaagaucggauaggaguug

SEQ ID NO: 3710 - DNA, 21 bp, Homo sapiens
tagcctatcctcaacaagcaa

SEQ ID NO: 3711 - RNA, 21 nt, RNAi
gccuauccucaacaagcaauu

SEQ ID NO: 3712 - RNA, 21 nt, RNAi
uucggauaggaguuguucguu

SEQ ID NO: 3713 - DNA, 21 bp, Homo sapiens
tatcctcaacaagcaatgtgg

SEQ ID NO: 3714 - RNA, 21 nt, RNAi
uccucaacaagcaaugugguu

SEQ ID NO: 3715 - RNA, 21 nt, RNAi
uuaggaguuguucguuacacc

SEQ ID NO: 3716 - DNA, 21 bp, Homo sapiens
tagagaagtttgttggagatg

SEQ ID NO: 3717 - RNA, 21 nt, RNAi
gagaaguuuguuggagauguu

SEQ ID NO: 3718 - RNA, 21 nt, RNAi
uucucuucaaacaaccucuac

SEQ ID NO: 3719 - DNA, 21 bp, Homo sapiens
taagcttctagaattgtgcaa

SEQ ID NO: 3720 - RNA, 21 nt, RNAi
agcuucuagaauugugcaauu

SEQ ID NO: 3721 - RNA, 21 nt, RNAi
uuucgaagaucuuaacacguu

SEQ ID NO: 3722 - DNA, 21 bp, Homo sapiens
tagaattgtgcaataaaccgg

SEQ ID NO: 3723 - RNA, 21 nt, RNAi
gaauugugcaauaaaccgguu

SEQ ID NO: 3724 - RNA, 21 nt, RNAi
uucuuaacacguuauuuggcc

SEQ ID NO: 3725 - DNA, 21 bp, Homo sapiens
taaaccggttgatggaagtag

SEQ ID NO: 3726 - RNA, 21 nt, RNAi
aaccgguugauggaaguaguu

SEQ ID NO: 3727 - RNA, 21 nt, RNAi
uuuuggccaacuaccuucauc

SEQ ID NO: 3728 - DNA, 21 bp, Homo sapiens
tagttccacattaagcatgag

SEQ ID NO: 3729 - RNA, 21 nt, RNAi
guuccacauuaagcaugaguu

SEQ ID NO: 3730 - RNA, 21 nt, RNAi
uucaagguguaauucguacuc

SEQ ID NO: 3731 - DNA, 21 bp, Homo sapiens
tagaagaagcaacatttagtg

SEQ ID NO: 3732 - RNA, 21 nt, RNAi
gaagaagcaacauuuaguguu

SEQ ID NO: 3733 - RNA, 21 nt, RNAi
uucuucuucguuguaaaucac

SEQ ID NO: 3734 - DNA, 21 bp, Homo sapiens
tagtgaaatcctcattcctct

SEQ ID NO: 3735 - RNA, 21 nt, RNAi
gugaaauccucauuccucuuu

SEQ ID NO: 3736 - RNA, 21 nt, RNAi
uucacuuuaggaguaaggaga

SEQ ID NO: 3737 - DNA, 21 bp, Homo sapiens
tacaatcagtcatgataccta

SEQ ID NO: 3738 - RNA, 21 nt, RNAi
caaucagucaugauaccuauu

SEQ ID NO: 3739 - RNA, 21 nt, RNAi
uuguuagucaguacuauggau

SEQ ID NO: 3740 - DNA, 21 bp, Homo sapiens
tacctacacttccatcaattc

SEQ ID NO: 3741 - RNA, 21 nt, RNAi
ccuacacuuccaucaauucuu

SEQ ID NO: 3742 - RNA, 21 nt, RNAi
uuggaugugaagguaguuaag

SEQ ID NO: 3743 - DNA, 21 bp, Homo sapiens
taaccatgctagccatgaacc

SEQ ID NO: 3744 - RNA, 21 nt, RNAi
accaugcuagccaugaaccuu

SEQ ID NO: 3745 - RNA, 21 nt, RNAi
uuugguacgaucgguacuugg

SEQ ID NO: 3746 - DNA, 21 bp, Homo sapiens
tagccatgaaccatttcctgg

SEQ ID NO: 3747 - RNA, 21 nt, RNAi
gccaugaaccauuuccugguu

SEQ ID NO: 3748 - RNA, 21 nt, RNAi
uucgguacuugguaaaggacc

SEQ ID NO: 3749 - DNA, 21 bp, Homo sapiens
tatggtggaaattcttgcttc

SEQ ID NO: 3750 - RNA, 21 nt, RNAi
ugguggaaauucuugcuucuu

SEQ ID NO: 3751 - RNA, 21 nt, RNAi
uuaccaccuuuaagaacgaag

SEQ ID NO: 3752 - DNA, 21 bp, Homo sapiens
tacatcatgatgtgtaagcca

SEQ ID NO: 3753 - RNA, 21 nt, RNAi
caucaugauguguaagccauu

SEQ ID NO: 3754 - RNA, 21 nt, RNAi
uuguaguacuacacauucggu

SEQ ID NO: 3755 - DNA, 21 bp, Homo sapiens
tagaagagaacttcatattcg

SEQ ID NO: 3756 - RNA, 21 nt, RNAi
gaagagaacuucauauucguu

SEQ ID NO: 3757 - RNA, 21 nt, RNAi
uucuucucuugaaguauaagc

SEQ ID NO: 3758 - DNA, 21 bp, Homo sapiens
tatgctaccaaagtcagcagc

SEQ ID NO: 3759 - RNA, 21 nt, RNAi
ugcuaccaaagucagcagcuu

SEQ ID NO: 3760 - RNA, 21 nt, RNAi
uuacgaugguuucagucgucg

SEQ ID NO: 3761 - DNA, 21 bp, Homo sapiens
taccaaagtcagcagctttat

SEQ ID NO: 3762 - RNA, 21 nt, RNAi
ccaaagucagcagcuuuauuu

SEQ ID NO: 3763 - RNA, 21 nt, RNAi
uugguuucagucgucgaaaua

SEQ ID NO: 3764 - DNA, 21 bp, Homo sapiens
tattccgagaatttctcctgc

SEQ ID NO: 3765 - RNA, 21 nt, RNAi
uuccgagaauuucuccugcuu

SEQ ID NO: 3766 - RNA, 21 nt, RNAi
uuaaggcucuuaaagaggacg

SEQ ID NO: 3767 - DNA, 21 bp, Homo sapiens
tacatcatggtacagtagtag

SEQ ID NO: 3768 - RNA, 21 nt, RNAi
caucaugguacaguaguaguu

SEQ ID NO: 3769 - RNA, 21 nt, RNAi
uuguaguaccaugucaucauc

SEQ ID NO: 3770 - DNA, 21 bp, Homo sapiens
tacagtagtagatcagcttac

SEQ ID NO: 3771 - RNA, 21 nt, RNAi
caguaguagaucagcuuacuu

SEQ ID NO: 3772 - RNA, 21 nt, RNAi
uugucaucaucuagucgaaug

SEQ ID NO: 3773 - DNA, 21 bp, Homo sapiens
tagtagatcagcttactgccg

SEQ ID NO: 3774 - RNA, 21 nt, RNAi
guagaucagcuuacugccguu

SEQ ID NO: 3775 - RNA, 21 nt, RNAi
uucaucuagucgaaugacggc

SEQ ID NO: 3776 - DNA, 21 bp, Homo sapiens
tagatcagcttactgccgttc

SEQ ID NO: 3777 - RNA, 21 nt, RNAi
gaucagcuuacugccguucuu

SEQ ID NO: 3778 - RNA, 21 nt, RNAi
uucuagucgaaugacggcaag

SEQ ID NO: 3779 - DNA, 21 bp, Homo sapiens
tactgccgttccactgcagta

SEQ ID NO: 3780 - RNA, 21 nt, RNAi
cugccguuccacugcaguauu

SEQ ID NO: 3781 - RNA, 21 nt, RNAi
uugacggcaaggugacgucau

SEQ ID NO: 3782 - DNA, 21 bp, Homo sapiens
tacaatgaggctgatgcgtga

SEQ ID NO: 3783 - RNA, 21 nt, RNAi
caaugaggcugaugcgugauu

SEQ ID NO: 3784 - RNA, 21 nt, RNAi
uuguuacuccgacuacgcacu

SEQ ID NO: 3785 - DNA, 21 bp, Homo sapiens
tacatgatcctcttgtggaat

SEQ ID NO: 3786 - RNA, 21 nt, RNAi
caugauccucuuguggaauuu

SEQ ID NO: 3787 - RNA, 21 nt, RNAi
uuguacuaggagaacaccuua

SEQ ID NO: 3788 - DNA, 21 bp, Homo sapiens
tacaaggtgtaatcaagactc

SEQ ID NO: 3789 - RNA, 21 nt, RNAi
caagguguaaucaagacucuu

SEQ ID NO: 3790 - RNA, 21 nt, RNAi
uuguuccacauuaguucugag

SEQ ID NO: 3791 - DNA, 21 bp, Homo sapiens
taatcaagactcgaaatagag

SEQ ID NO: 3792 - RNA, 21 nt, RNAi
aucaagacucgaaauagaguu

SEQ ID NO: 3793 - RNA, 21 nt, RNAi
uuuaguucugagcuuuaucuc

SEQ ID NO: 3794 - DNA, 21 bp, Homo sapiens
tagagtgacaggactgccgtt

SEQ ID NO: 3795 - RNA, 21 nt, RNAi
gagugacaggacugccguuuu

SEQ ID NO: 3796 - RNA, 21 nt, RNAi
uucucacuguccugacggcaa

SEQ ID NO: 3797 - DNA, 21 bp, Homo sapiens
tatctattgaaggacatgtgc

SEQ ID NO: 3798 - RNA, 21 nt, RNAi
ucuauugaaggacaugugcuu

SEQ ID NO: 3799 - RNA, 21 nt, RNAi
uuagauaacuuccuguacacg

SEQ ID NO: 3800 - DNA, 21 bp, Homo sapiens
tattgaaggacatgtgcatta

SEQ ID NO: 3801 - RNA, 21 nt, RNAi
uugaaggacaugugcauuauu

SEQ ID NO: 3802 - RNA, 21 nt, RNAi
uuaacuuccuguacacguaau

SEQ ID NO: 3803 - DNA, 21 bp, Homo sapiens
taccttatacaagaagctact

SEQ ID NO: 3804 - RNA, 21 nt, RNAi
ccuuauacaagaagcuacuuu

SEQ ID NO: 3805 - RNA, 21 nt, RNAi
uuggaauauguucuucgauga

SEQ ID NO: 3806 - DNA, 21 bp, Homo sapiens
tatacaagaagctactgatga

SEQ ID NO: 3807 - RNA, 21 nt, RNAi
uacaagaagcuacugaugauu

SEQ ID NO: 3808 - RNA, 21 nt, RNAi
uuauguucuucgaugacuacu

SEQ ID NO: 3809 - DNA, 21 bp, Homo sapiens
tacaagaagctactgatgaaa

SEQ ID NO: 3810 - RNA, 21 nt, RNAi
caagaagcuacugaugaaauu

SEQ ID NO: 3811 - RNA, 21 nt, RNAi
uuguucuucgaugacuacuuu

SEQ ID NO: 3812 - DNA, 21 bp, Homo sapiens
tactatgccagatgtatcttg

SEQ ID NO: 3813 - RNA, 21 nt, RNAi
cuaugccagauguaucuuguu

SEQ ID NO: 3814 - RNA, 21 nt, RNAi
uugauacggucuacauagaac

SEQ ID NO: 3815 - DNA, 21 bp, Homo sapiens
tatgccagatgtatcttggtt

SEQ ID NO: 3816 - RNA, 21 nt, RNAi
ugccagauguaucuugguuuu

SEQ ID NO: 3817 - RNA, 21 nt, RNAi
uuacggucuacauagaaccaa

SEQ ID NO: 3818 - DNA, 21 bp, Homo sapiens
tatcttggttggactccatat

SEQ ID NO: 3819 - RNA, 21 nt, RNAi
ucuugguuggacuccauauuu

SEQ ID NO: 3820 - RNA, 21 nt, RNAi
uuagaaccaaccugagguaua

SEQ ID NO: 3821 - DNA, 21 bp, Homo sapiens
tatgaatctgtggttgtatct

SEQ ID NO: 3822 - RNA, 21 nt, RNAi
ugaaucugugguuguaucuuu

SEQ ID NO: 3823 - RNA, 21 nt, RNAi
uuacuuagacaccaacauaga

SEQ ID NO: 3824 - DNA, 21 bp, Homo sapiens
taaatttacgttctcagcaac

SEQ ID NO: 3825 - RNA, 21 nt, RNAi
aauuuacguucucagcaacuu

SEQ ID NO: 3826 - RNA, 21 nt, RNAi
uuuuaaaugcaagagucguug

SEQ ID NO: 3827 - DNA, 21 bp, Homo sapiens
tacgttctcagcaactgttat

SEQ ID NO: 3828 - RNA, 21 nt, RNAi
cguucucagcaacuguuauuu

SEQ ID NO: 3829 - RNA, 21 nt, RNAi
uugcaagagucguugacaaua

SEQ ID NO: 3830 - DNA, 21 bp, Homo sapiens
aattcattgaccggatactta

SEQ ID NO: 3831 - RNA, 21 nt, RNAi
uucauugaccggauacuuauu

SEQ ID NO: 3832 - RNA, 21 nt, RNAi
uuaaguaacuggccuaugaau

SEQ ID NO: 3833 - DNA, 21 bp, Homo sapiens
aaactgactctcagccaacct

SEQ ID NO: 3834 - RNA, 21 nt, RNAi
acugacucucagccaaccuuu

SEQ ID NO: 3835 - RNA, 21 nt, RNAi
uuugacugagagucgguugga

SEQ ID NO: 3836 - DNA, 21 bp, Homo sapiens
aacctccgtgatgttgcttga

SEQ ID NO: 3837 - RNA, 21 nt, RNAi
ccuccgugauguugcuugauu

SEQ ID NO: 3838 - RNA, 21 nt, RNAi
uuggaggcacuacaacgaacu

SEQ ID NO: 3839 - DNA, 21 bp, Homo sapiens
aaaggcagttgtattgaattc

SEQ ID NO: 3840 - RNA, 21 nt, RNAi
aggcaguuguauugaauucuu

SEQ ID NO: 3841 - RNA, 21 nt, RNAi
uuuccgucaacauaacuuaag

SEQ ID NO: 3842 - DNA, 21 bp, Homo sapiens
aaggcagttgtattgaattca

SEQ ID NO: 3843 - RNA, 21 nt, RNAi
ggcaguuguauugaauucauu

SEQ ID NO: 3844 - RNA, 21 nt, RNAi
uuccgucaacauaacuuaagu

SEQ ID NO: 3845 - DNA, 21 bp, Homo sapiens
aattggatcataacgagactt

SEQ ID NO: 3846 - RNA, 21 nt, RNAi
uuggaucauaacgagacuuuu

SEQ ID NO: 3847 - RNA, 21 nt, RNAi
uuaaccuaguauugcucugaa

SEQ ID NO: 3848 - DNA, 21 bp, Homo sapiens
aactcttactttggcagatag

SEQ ID NO: 3849 - RNA, 21 nt, RNAi
cucuuacuuuggcagauaguu

SEQ ID NO: 3850 - RNA, 21 nt, RNAi
uugagaaugaaaccgucuauc

SEQ ID NO: 3851 - DNA, 21 bp, Homo sapiens
aaatggatactgaccaattga

SEQ ID NO: 3852 - RNA, 21 nt, RNAi
auggauacugaccaauugauu

SEQ ID NO: 3853 - RNA, 21 nt, RNAi
uuuaccuaugacugguuaacu

SEQ ID NO: 3854 - DNA, 21 bp, Homo sapiens
aatggatactgaccaattgaa

SEQ ID NO: 3855 - RNA, 21 nt, RNAi
uggauacugaccaauugaauu

SEQ ID NO: 3856 - RNA, 21 nt, RNAi
uuaccuaugacugguuaacuu

SEQ ID NO: 3857 - DNA, 21 bp, Homo sapiens
aattgaaactctatgaagagc

SEQ ID NO: 3858 - RNA, 21 nt, RNAi
uugaaacucuaugaagagcuu

SEQ ID NO: 3859 - RNA, 21 nt, RNAi
uuaacuuugagauacuucucg

SEQ ID NO: 3860 - DNA, 21 bp, Homo sapiens
aatgccaaactcaacaggaaa

SEQ ID NO: 3861 - RNA, 21 nt, RNAi
ugccaaacucaacaggaaauu

SEQ ID NO: 3862 - RNA, 21 nt, RNAi
uuacgguuugaguuguccuuu

SEQ ID NO: 3863 - DNA, 21 bp, Homo sapiens
aaacctcagcagtaatagtga

SEQ ID NO: 3864 - RNA, 21 nt, RNAi
accucagcaguaauagugauu

SEQ ID NO: 3865 - RNA, 21 nt, RNAi
uuuggagucgucauuaucacu

SEQ ID NO: 3866 - DNA, 21 bp, Homo sapiens
aaagagcatattatggagtgc

SEQ ID NO: 3867 - RNA, 21 nt, RNAi
agagcauauuauggagugcuu

SEQ ID NO: 3868 - RNA, 21 nt, RNAi
uuucucguauaauaccucacg

SEQ ID NO: 3869 - DNA, 21 bp, Homo sapiens
aagagcatattatggagtgca

SEQ ID NO: 3870 - RNA, 21 nt, RNAi
gagcauauuauggagugcauu

SEQ ID NO: 3871 - RNA, 21 nt, RNAi
uucucguauaauaccucacgu

SEQ ID NO: 3872 - DNA, 21 bp, Homo sapiens
aagaatcctgttattgagatg

SEQ ID NO: 3873 - RNA, 21 nt, RNAi
gaauccuguuauugagauguu

SEQ ID NO: 3874 - RNA, 21 nt, RNAi
uucuuaggacaauaacucuac

SEQ ID NO: 3875 - DNA, 21 bp, Homo sapiens
aaggactgtcaacataaatcc

SEQ ID NO: 3876 - RNA, 21 nt, RNAi
ggacugucaacauaaauccuu

SEQ ID NO: 3877 - RNA, 21 nt, RNAi
uuccugacaguuguauuuagg

SEQ ID NO: 3878 - DNA, 21 bp, Homo sapiens
aacttggatgtcattggattt

SEQ ID NO: 3879 - RNA, 21 nt, RNAi
cuuggaugucauuggauuuuu

SEQ ID NO: 3880 - RNA, 21 nt, RNAi
uugaaccuacaguaaccuaaa

SEQ ID NO: 3881 - DNA, 21 bp, Homo sapiens
aatattccttgagtggagaac

SEQ ID NO: 3882 - RNA, 21 nt, RNAi
uauuccuugaguggagaacuu

SEQ ID NO: 3883 - RNA, 21 nt, RNAi
uuauaaggaacucaccucuug

SEQ ID NO: 3884 - DNA, 21 bp, Homo sapiens
aatggctttaaatacgttgtc

SEQ ID NO: 3885 - RNA, 21 nt, RNAi
uggcuuuaaauacguugucuu

SEQ ID NO: 3886 - RNA, 21 nt, RNAi
uuaccgaaauuuaugcaacag

SEQ ID NO: 3887 - DNA, 21 bp, Homo sapiens
aaatacgttgtctgaaattgc

SEQ ID NO: 3888 - RNA, 21 nt, RNAi
auacguugucugaaauugcuu

SEQ ID NO: 3889 - RNA, 21 nt, RNAi
uuuaugcaacagacuuuaacg

SEQ ID NO: 3890 - DNA, 21 bp, Homo sapiens
aatacgttgtctgaaattgcc

SEQ ID NO: 3891 - RNA, 21 nt, RNAi
uacguugucugaaauugccuu

SEQ ID NO: 3892 - RNA, 21 nt, RNAi
uuaugcaacagacuuuaacgg

SEQ ID NO: 3893 - DNA, 21 bp, Homo sapiens
aaatgtcaatcgtagagagat

SEQ ID NO: 3894 - RNA, 21 nt, RNAi
augucaaucguagagagauuu

SEQ ID NO: 3895 - RNA, 21 nt, RNAi
uuuacaguuagcaucucucua

SEQ ID NO: 3896 - DNA, 21 bp, Homo sapiens
aatgtcaatcgtagagagatt

SEQ ID NO: 3897 - RNA, 21 nt, RNAi
ugucaaucguagagagauuuu

SEQ ID NO: 3898 - RNA, 21 nt, RNAi
uuacaguuagcaucucucuaa

SEQ ID NO: 3899 - DNA, 21 bp, Homo sapiens
aaagatgaattagaacgtgcc

SEQ ID NO: 3900 - RNA, 21 nt, RNAi
agaugaauuagaacgugccuu

SEQ ID NO: 3901 - RNA, 21 nt, RNAi
uuucuacuuaaucuugcacgg

SEQ ID NO: 3902 - DNA, 21 bp, Homo sapiens
aagatttccaaggattgcata

SEQ ID NO: 3903 - RNA, 21 nt, RNAi
gauuuccaaggauugcauauu

SEQ ID NO: 3904 - RNA, 21 nt, RNAi
uucuaaagguuccuaacguau

SEQ ID NO: 3905 - DNA, 21 bp, Homo sapiens
aattattgctgcgtattggag

SEQ ID NO: 3906 - RNA, 21 nt, RNAi
uuauugcugcguauuggaguu

SEQ ID NO: 3907 - RNA, 21 nt, RNAi
uuaauaacgacgcauaaccuc

SEQ ID NO: 3908 - DNA, 21 bp, Homo sapiens
aatggtttgtcaatacttgcc

SEQ ID NO: 3909 - RNA, 21 nt, RNAi
ugguuugucaauacuugccuu

SEQ ID NO: 3910 - RNA, 21 nt, RNAi
uuaccaaacaguuaugaacgg

SEQ ID NO: 3911 - DNA, 21 bp, Homo sapiens
aactggccttcgattcaagga

SEQ ID NO: 3912 - RNA, 21 nt, RNAi
cuggccuucgauucaaggauu

SEQ ID NO: 3913 - RNA, 21 nt, RNAi
uugaccggaagcuaaguuccu

SEQ ID NO: 3914 - DNA, 21 bp, Homo sapiens
aatagtagctttgttacctct

SEQ ID NO: 3915 - RNA, 21 nt, RNAi
uaguagcuuuguuaccucuuu

SEQ ID NO: 3916 - RNA, 21 nt, RNAi
uuaucaucgaaacaauggaga

SEQ ID NO: 3917 - DNA, 21 bp, Homo sapiens
aaatgtcgatgttcgtattca

SEQ ID NO: 3918 - RNA, 21 nt, RNAi
augucgauguucguauucauu

SEQ ID NO: 3919 - RNA, 21 nt, RNAi
uuuacagcuacaagcauaagu

SEQ ID NO: 3920 - DNA, 21 bp, Homo sapiens
aatgtcgatgttcgtattcat

SEQ ID NO: 3921 - RNA, 21 nt, RNAi
ugucgauguucguauucauuu

SEQ ID NO: 3922 - RNA, 21 nt, RNAi
uuacagcuacaagcauaagua

SEQ ID NO: 3923 - DNA, 21 bp, Homo sapiens
aaggttgccaagatgcaaact

SEQ ID NO: 3924 - RNA, 21 nt, RNAi
gguugccaagaugcaaacuuu

SEQ ID NO: 3925 - RNA, 21 nt, RNAi
uuccaacgguucuacguuuga

SEQ ID NO: 3926 - DNA, 21 bp, Homo sapiens
aaactctcaagctcggttgct

SEQ ID NO: 3927 - RNA, 21 nt, RNAi
acucucaagcucgguugcuuu

SEQ ID NO: 3928 - RNA, 21 nt, RNAi
uuugagaguucgagccaacga

SEQ ID NO: 3929 - DNA, 21 bp, Homo sapiens
aagagcttaccttgcgtatgc

SEQ ID NO: 3930 - RNA, 21 nt, RNAi
gagcuuaccuugcguaugcuu

SEQ ID NO: 3931 - RNA, 21 nt, RNAi
uucucgaauggaacgcauacg

SEQ ID NO: 3932 - DNA, 21 bp, Homo sapiens
aacctcatctaaataccagat

SEQ ID NO: 3933 - RNA, 21 nt, RNAi
ccucaucuaaauaccagauuu

SEQ ID NO: 3934 - RNA, 21 nt, RNAi
uuggaguagauuuauggucua

SEQ ID NO: 3935 - DNA, 21 bp, Homo sapiens
aagtcaaccgattggtctgga

SEQ ID NO: 3936 - RNA, 21 nt, RNAi
gucaaccgauuggucuggauu

SEQ ID NO: 3937 - RNA, 21 nt, RNAi
uucaguuggcuaaccagaccu

SEQ ID NO: 3938 - DNA, 21 bp, Homo sapiens
aaccgattggtctggagtaaa

SEQ ID NO: 3939 - RNA, 21 nt, RNAi
ccgauuggucuggaguaaauu

SEQ ID NO: 3940 - RNA, 21 nt, RNAi
uuggcuaaccagaccucauuu

SEQ ID NO: 3941 - DNA, 21 bp, Homo sapiens
aactttgcagaatggtcagca

SEQ ID NO: 3942 - RNA, 21 nt, RNAi
cuuugcagaauggucagcauu

SEQ ID NO: 3943 - RNA, 21 nt, RNAi
uugaaacgucuuaccagucgu

SEQ ID NO: 3944 - DNA, 21 bp, Homo sapiens
aaaggttcgacatgatcttgc

SEQ ID NO: 3945 - RNA, 21 nt, RNAi
agguucgacaugaucuugcuu

SEQ ID NO: 3946 - RNA, 21 nt, RNAi
uuuccaagcuguacuagaacg

SEQ ID NO: 3947 - DNA, 21 bp, Homo sapiens
aaggttcgacatgatcttgcc

SEQ ID NO: 3948 - RNA, 21 nt, RNAi
gguucgacaugaucuugccuu

SEQ ID NO: 3949 - RNA, 21 nt, RNAi
uuccaagcuguacuagaacgg

SEQ ID NO: 3950 - DNA, 21 bp, Homo sapiens
aaagcatgacgatcagcatac

SEQ ID NO: 3951 - RNA, 21 nt, RNAi
agcaugacgaucagcauacuu

SEQ ID NO: 3952 - RNA, 21 nt, RNAi
uuucguacugcuagucguaug

SEQ ID NO: 3953 - DNA, 21 bp, Homo sapiens
aagcatgacgatcagcatacc

SEQ ID NO: 3954 - RNA, 21 nt, RNAi
gcaugacgaucagcauaccuu

SEQ ID NO: 3955 - RNA, 21 nt, RNAi
uucguacugcuagucguaugg

SEQ ID NO: 3956 - DNA, 21 bp, Homo sapiens
aaggcacaaatttcaggcact

SEQ ID NO: 3957 - RNA, 21 nt, RNAi
ggcacaaauuucaggcacuuu

SEQ ID NO: 3958 - RNA, 21 nt, RNAi
uuccguguuuaaaguccguga

SEQ ID NO: 3959 - DNA, 21 bp, Homo sapiens
aaacagaaataaggtagactc

SEQ ID NO: 3960 - RNA, 21 nt, RNAi
acagaaauaagguagacucuu

SEQ ID NO: 3961 - RNA, 21 nt, RNAi
uuugucuuuauuccaucugag

SEQ ID NO: 3962 - DNA, 21 bp, Homo sapiens
aacagaaataaggtagactca

SEQ ID NO: 3963 - RNA, 21 nt, RNAi
cagaaauaagguagacucauu

SEQ ID NO: 3964 - RNA, 21 nt, RNAi
uugucuuuauuccaucugagu

SEQ ID NO: 3965 - DNA, 21 bp, Homo sapiens
aaggtagactcaatggtatct

SEQ ID NO: 3966 - RNA, 21 nt, RNAi
gguagacucaaugguaucuuu

SEQ ID NO: 3967 - RNA, 21 nt, RNAi
uuccaucugaguuaccauaga

SEQ ID NO: 3968 - DNA, 21 bp, Homo sapiens
aaattgtatgctgctatgcat

SEQ ID NO: 3969 - RNA, 21 nt, RNAi
auuguaugcugcuaugcauuu

SEQ ID NO: 3970 - RNA, 21 nt, RNAi
uuuaacauacgacgauacgua

SEQ ID NO: 3971 - DNA, 21 bp, Homo sapiens
aattgtatgctgctatgcatg

SEQ ID NO: 3972 - RNA, 21 nt, RNAi
uuguaugcugcuaugcauguu

SEQ ID NO: 3973 - RNA, 21 nt, RNAi
uuaacauacgacgauacguac

SEQ ID NO: 3974 - DNA, 21 bp, Homo sapiens
aatggagtgcatgctaacagg

SEQ ID NO: 3975 - RNA, 21 nt, RNAi
uggagugcaugcuaacagguu

SEQ ID NO: 3976 - RNA, 21 nt, RNAi
uuaccucacguacgauugucc

SEQ ID NO: 3977 - DNA, 21 bp, Homo sapiens
aattaaacacgtacagagtgg

SEQ ID NO: 3978 - RNA, 21 nt, RNAi
uuaaacacguacagagugguu

SEQ ID NO: 3979 - RNA, 21 nt, RNAi
uuaauuugugcaugucucacc

SEQ ID NO: 3980 - DNA, 21 bp, Homo sapiens
aaacacgtacagagtggaagc

SEQ ID NO: 3981 - RNA, 21 nt, RNAi
acacguacagaguggaagcuu

SEQ ID NO: 3982 - RNA, 21 nt, RNAi
uuugugcaugucucaccuucg

SEQ ID NO: 3983 - DNA, 21 bp, Homo sapiens
aacacgtacagagtggaagca

SEQ ID NO: 3984 - RNA, 21 nt, RNAi
cacguacagaguggaagcauu

SEQ ID NO: 3985 - RNA, 21 nt, RNAi
uugugcaugucucaccuucgu

SEQ ID NO: 3986 - DNA, 21 bp, Homo sapiens
aaactatttggcagcagatgg

SEQ ID NO: 3987 - RNA, 21 nt, RNAi
acuauuuggcagcagaugguu

SEQ ID NO: 3988 - RNA, 21 nt, RNAi
uuugauaaaccgucgucuacc

SEQ ID NO: 3989 - DNA, 21 bp, Homo sapiens
aactatttggcagcagatgga

SEQ ID NO: 3990 - RNA, 21 nt, RNAi
cuauuuggcagcagauggauu

SEQ ID NO: 3991 - RNA, 21 nt, RNAi
uugauaaaccgucgucuaccu

SEQ ID NO: 3992 - DNA, 21 bp, Homo sapiens
aatcacgactcgctgaactgt

SEQ ID NO: 3993 - RNA, 21 nt, RNAi
ucacgacucgcugaacuguuu

SEQ ID NO: 3994 - RNA, 21 nt, RNAi
uuagugcugagcgacuugaca

SEQ ID NO: 3995 - DNA, 21 bp, Homo sapiens
aagaacatgttaatccatggt

SEQ ID NO: 3996 - RNA, 21 nt, RNAi
gaacauguuaauccaugguuu

SEQ ID NO: 3997 - RNA, 21 nt, RNAi
uucuuguacaauuagguacca

SEQ ID NO: 3998 - DNA, 21 bp, Homo sapiens
aacatgttaatccatggtcga

SEQ ID NO: 3999 - RNA, 21 nt, RNAi
cauguuaauccauggucgauu

SEQ ID NO: 4000 - RNA, 21 nt, RNAi
uuguacaauuagguaccagcu

SEQ ID NO: 4001 - DNA, 21 bp, Homo sapiens
aatccatggtcgagctatgct

SEQ ID NO: 4002 - RNA, 21 nt, RNAi
uccauggucgagcuaugcuuu

SEQ ID NO: 4003 - RNA, 21 nt, RNAi
uuagguaccagcucgauacga

SEQ ID NO: 4004 - DNA, 21 bp, Homo sapiens
aatataaggatgtgaccgcgt

SEQ ID NO: 4005 - RNA, 21 nt, RNAi
uauaaggaugugaccgcguuu

SEQ ID NO: 4006 - RNA, 21 nt, RNAi
uuauauuccuacacuggcgca

SEQ ID NO: 4007 - DNA, 21 bp, Homo sapiens
aaggtgatctcatccggtata

SEQ ID NO: 4008 - RNA, 21 nt, RNAi
ggugaucucauccgguauauu

SEQ ID NO: 4009 - RNA, 21 nt, RNAi
uuccacuagaguaggccauau

SEQ ID NO: 4010 - DNA, 21 bp, Homo sapiens
aatgccacgaatgttaactct

SEQ ID NO: 4011 - RNA, 21 nt, RNAi
ugccacgaauguuaacucuuu

SEQ ID NO: 4012 - RNA, 21 nt, RNAi
uuacggugcuuacaauugaga

SEQ ID NO: 4013 - DNA, 21 bp, Homo sapiens
aatgttaactctatggcttga

SEQ ID NO: 4014 - RNA, 21 nt, RNAi
uguuaacucuauggcuugauu

SEQ ID NO: 4015 - RNA, 21 nt, RNAi
uuacaauugagauaccgaacu

SEQ ID NO: 4016 - DNA, 21 bp, Homo sapiens
aattgatctctcgaatttgtc

SEQ ID NO: 4017 - RNA, 21 nt, RNAi
uugaucucucgaauuugucuu

SEQ ID NO: 4018 - RNA, 21 nt, RNAi
uuaacuagagagcuuaaacag

SEQ ID NO: 4019 - DNA, 21 bp, Homo sapiens
aatttgtcattctcacgatga

SEQ ID NO: 4020 - RNA, 21 nt, RNAi
uuugucauucucacgaugauu

SEQ ID NO: 4021 - RNA, 21 nt, RNAi
uuaaacaguaagagugcuacu

SEQ ID NO: 4022 - DNA, 21 bp, Homo sapiens
aaagtatttctagcctatcct

SEQ ID NO: 4023 - RNA, 21 nt, RNAi
aguauuucuagccuauccuuu

SEQ ID NO: 4024 - RNA, 21 nt, RNAi
uuucauaaagaucggauagga

SEQ ID NO: 4025 - DNA, 21 bp, Homo sapiens
aagtatttctagcctatcctc

SEQ ID NO: 4026 - RNA, 21 nt, RNAi
guauuucuagccuauccucuu

SEQ ID NO: 4027 - RNA, 21 nt, RNAi
uucauaaagaucggauaggag

SEQ ID NO: 4028 - DNA, 21 bp, Homo sapiens
aactcgcctaacagataagct

SEQ ID NO: 4029 - RNA, 21 nt, RNAi
cucgccuaacagauaagcuuu

SEQ ID NO: 4030 - RNA, 21 nt, RNAi
uugagcggauugucuauucga

SEQ ID NO: 4031 - DNA, 21 bp, Homo sapiens
aagcttctagaattgtgcaat

SEQ ID NO: 4032 - RNA, 21 nt, RNAi
gcuucuagaauugugcaauuu

SEQ ID NO: 4033 - RNA, 21 nt, RNAi
uucgaagaucuuaacacguua

SEQ ID NO: 4034 - DNA, 21 bp, Homo sapiens
aattgtgcaataaaccggttg

SEQ ID NO: 4035 - RNA, 21 nt, RNAi
uugugcaauaaaccgguuguu

SEQ ID NO: 4036 - RNA, 21 nt, RNAi
uuaacacguuauuuggccaac

SEQ ID NO: 4037 - DNA, 21 bp, Homo sapiens
aataaaccggttgatggaagt

SEQ ID NO: 4038 - RNA, 21 nt, RNAi
uaaaccgguugauggaaguuu

SEQ ID NO: 4039 - RNA, 21 nt, RNAi
uuauuuggccaacuaccuuca

SEQ ID NO: 4040 - DNA, 21 bp, Homo sapiens
aagtagttccacattaagcat

SEQ ID NO: 4041 - RNA, 21 nt, RNAi
guaguuccacauuaagcauuu

SEQ ID NO: 4042 - RNA, 21 nt, RNAi
uucaucaagguguaauucgua

SEQ ID NO: 4043 - DNA, 21 bp, Homo sapiens
aatcagtcatgatacctacac

SEQ ID NO: 4044 - RNA, 21 nt, RNAi
ucagucaugauaccuacacuu

SEQ ID NO: 4045 - RNA, 21 nt, RNAi
uuagucaguacuauggaugug

SEQ ID NO: 4046 - DNA, 21 bp, Homo sapiens
aaccatgctagccatgaacca

SEQ ID NO: 4047 - RNA, 21 nt, RNAi
ccaugcuagccaugaaccauu

SEQ ID NO: 4048 - RNA, 21 nt, RNAi
uugguacgaucgguacuuggu

SEQ ID NO: 4049 - DNA, 21 bp, Homo sapiens
aagatgcagagtctcgtagaa

SEQ ID NO: 4050 - RNA, 21 nt, RNAi
gaugcagagucucguagaauu

SEQ ID NO: 4051 - RNA, 21 nt, RNAi
uucuacgucucagagcaucuu

SEQ ID NO: 4052 - DNA, 21 bp, Homo sapiens
aagagaacttcatattcgaac

SEQ ID NO: 4053 - RNA, 21 nt, RNAi
gagaacuucauauucgaacuu

SEQ ID NO: 4054 - RNA, 21 nt, RNAi
uucucuugaaguauaagcuug

SEQ ID NO: 4055 - DNA, 21 bp, Homo sapiens
aacaacactgctggtttgaga

SEQ ID NO: 4056 - RNA, 21 nt, RNAi
caacacugcugguuugagauu

SEQ ID NO: 4057 - RNA, 21 nt, RNAi
uuguugugacgaccaaacucu

SEQ ID NO: 4058 - DNA, 21 bp, Homo sapiens
aacactgctggtttgagacct

SEQ ID NO: 4059 - RNA, 21 nt, RNAi
cacugcugguuugagaccuuu

SEQ ID NO: 4060 - RNA, 21 nt, RNAi
uugugacgaccaaacucugga

SEQ ID NO: 4061 - DNA, 21 bp, Homo sapiens
aaagaacttcgccagtgtatg

SEQ ID NO: 4062 - RNA, 21 nt, RNAi
agaacuucgccaguguauguu

SEQ ID NO: 4063 - RNA, 21 nt, RNAi
uuucuugaagcggucacauac

SEQ ID NO: 4064 - DNA, 21 bp, Homo sapiens
aagaacttcgccagtgtatgc

SEQ ID NO: 4065 - RNA, 21 nt, RNAi
gaacuucgccaguguaugcuu

SEQ ID NO: 4066 - RNA, 21 nt, RNAi
uucuugaagcggucacauacg

SEQ ID NO: 4067 - DNA, 21 bp, Homo sapiens
aacttcgccagtgtatgctac

SEQ ID NO: 4068 - RNA, 21 nt, RNAi
cuucgccaguguaugcuacuu

SEQ ID NO: 4069 - RNA, 21 nt, RNAi
uugaagcggucacauacgaug

SEQ ID NO: 4070 - DNA, 21 bp, Homo sapiens
aaactcaaagtattccgagaa

SEQ ID NO: 4071 - RNA, 21 nt, RNAi
acucaaaguauuccgagaauu

SEQ ID NO: 4072 - RNA, 21 nt, RNAi
uuugaguuucauaaggcucuu

SEQ ID NO: 4073 - DNA, 21 bp, Homo sapiens
aactcaaagtattccgagaat

SEQ ID NO: 4074 - RNA, 21 nt, RNAi
cucaaaguauuccgagaauuu

SEQ ID NO: 4075 - RNA, 21 nt, RNAi
uugaguuucauaaggcucuua

SEQ ID NO: 4076 - DNA, 21 bp, Homo sapiens
aatgcgtacatgtagatttca

SEQ ID NO: 4077 - RNA, 21 nt, RNAi
ugcguacauguagauuucauu

SEQ ID NO: 4078 - RNA, 21 nt, RNAi
uuacgcauguacaucuaaagu

SEQ ID NO: 4079 - DNA, 21 bp, Homo sapiens
aaattgtgccatttcgcctga

SEQ ID NO: 4080 - RNA, 21 nt, RNAi
auugugccauuucgccugauu

SEQ ID NO: 4081 - RNA, 21 nt, RNAi
uuuaacacgguaaagcggacu

SEQ ID NO: 4082 - DNA, 21 bp, Homo sapiens
aattgtgccatttcgcctgac

SEQ ID NO: 4083 - RNA, 21 nt, RNAi
uugugccauuucgccugacuu

SEQ ID NO: 4084 - RNA, 21 nt, RNAi
uuaacacgguaaagcggacug

SEQ ID NO: 4085 - DNA, 21 bp, Homo sapiens
aatgaggctgatgcgtgatca

SEQ ID NO: 4086 - RNA, 21 nt, RNAi
ugaggcugaugcgugaucauu

SEQ ID NO: 4087 - RNA, 21 nt, RNAi
uuacuccgacuacgcacuagu

SEQ ID NO: 4088 - DNA, 21 bp, Homo sapiens
aaagcgccactgaatgaaact

SEQ ID NO: 4089 - RNA, 21 nt, RNAi
agcgccacugaaugaaacuuu

SEQ ID NO: 4090 - RNA, 21 nt, RNAi
uuucgcggugacuuacuuuga

SEQ ID NO: 4091 - DNA, 21 bp, Homo sapiens
aagcgccactgaatgaaactg

SEQ ID NO: 4092 - RNA, 21 nt, RNAi
gcgccacugaaugaaacuguu

SEQ ID NO: 4093 - RNA, 21 nt, RNAi
uucgcggugacuuacuuugac

SEQ ID NO: 4094 - DNA, 21 bp, Homo sapiens
aatcaagactcgaaatagagt

SEQ ID NO: 4095 - RNA, 21 nt, RNAi
ucaagacucgaaauagaguuu

SEQ ID NO: 4096 - RNA, 21 nt, RNAi
uuaguucugagcuuuaucuca

SEQ ID NO: 4097 - DNA, 21 bp, Homo sapiens
aagactcgaaatagagtgaca

SEQ ID NO: 4098 - RNA, 21 nt, RNAi
gacucgaaauagagugacauu

SEQ ID NO: 4099 - RNA, 21 nt, RNAi
uucugagcuuuaucucacugu

SEQ ID NO: 4100 - DNA, 21 bp, Homo sapiens
aaatagagtgacaggactgcc

SEQ ID NO: 4101 - RNA, 21 nt, RNAi
auagagugacaggacugccuu

SEQ ID NO: 4102 - RNA, 21 nt, RNAi
uuuaucucacuguccugacgg

SEQ ID NO: 4103 - DNA, 21 bp, Homo sapiens
caattcattgaccggatactt

SEQ ID NO: 4104 - RNA, 21 nt, RNAi
auucauugaccggauacuuuu

SEQ ID NO: 4105 - RNA, 21 nt, RNAi
uuuaaguaacuggccuaugaa

SEQ ID NO: 4106 - DNA, 21 bp, Homo sapiens
cattgaccggatacttacaga

SEQ ID NO: 4107 - RNA, 21 nt, RNAi
uugaccggauacuuacagauu

SEQ ID NO: 4108 - RNA, 21 nt, RNAi
uuaacuggccuaugaaugucu

SEQ ID NO: 4109 - DNA, 21 bp, Homo sapiens
caacctccgtgatgttgcttg

SEQ ID NO: 4110 - RNA, 21 nt, RNAi
accuccgugauguugcuuguu

SEQ ID NO: 4111 - RNA, 21 nt, RNAi
uuuggaggcacuacaacgaac

SEQ ID NO: 4112 - DNA, 21 bp, Homo sapiens
catccagcatatcatgaaatc

SEQ ID NO: 4113 - RNA, 21 nt, RNAi
uccagcauaucaugaaaucuu

SEQ ID NO: 4114 - RNA, 21 nt, RNAi
uuaggucguauaguacuuuag

SEQ ID NO: 4115 - DNA, 21 bp, Homo sapiens
cagcatatcatgaaatcctcc

SEQ ID NO: 4116 - RNA, 21 nt, RNAi
gcauaucaugaaauccuccuu

SEQ ID NO: 4117 - RNA, 21 nt, RNAi
uucguauaguacuuuaggagg

SEQ ID NO: 4118 - DNA, 21 bp, Homo sapiens
catgagcgcaaaggcagttgt

SEQ ID NO: 4119 - RNA, 21 nt, RNAi
ugagcgcaaaggcaguuguuu

SEQ ID NO: 4120 - RNA, 21 nt, RNAi
uuacucgcguuuccgucaaca

SEQ ID NO: 4121 - DNA, 21 bp, Homo sapiens
cataacgagacttctgcggat

SEQ ID NO: 4122 - RNA, 21 nt, RNAi
uaacgagacuucugcggauuu

SEQ ID NO: 4123 - RNA, 21 nt, RNAi
uuauugcucugaagacgccua

SEQ ID NO: 4124 - DNA, 21 bp, Homo sapiens
cagcacaaccagctagcactt

SEQ ID NO: 4125 - RNA, 21 nt, RNAi
gcacaaccagcuagcacuuuu

SEQ ID NO: 4126 - RNA, 21 nt, RNAi
uucguguuggucgaucgugaa

SEQ ID NO: 4127 - DNA, 21 bp, Homo sapiens
cattgaggagattcaatgcca

SEQ ID NO: 4128 - RNA, 21 nt, RNAi
uugaggagauucaaugccauu

SEQ ID NO: 4129 - RNA, 21 nt, RNAi
uuaacuccucuaaguuacggu

SEQ ID NO: 4130 - DNA, 21 bp, Homo sapiens
caatgccaaactcaacaggaa

SEQ ID NO: 4131 - RNA, 21 nt, RNAi
augccaaacucaacaggaauu

SEQ ID NO: 4132 - RNA, 21 nt, RNAi
uuuacgguuugaguuguccuu

SEQ ID NO: 4133 - DNA, 21 bp, Homo sapiens
catattatggagtgcactgaa

SEQ ID NO: 4134 - RNA, 21 nt, RNAi
uauuauggagugcacugaauu

SEQ ID NO: 4135 - RNA, 21 nt, RNAi
uuauaauaccucacgugacuu

SEQ ID NO: 4136 - DNA, 21 bp, Homo sapiens
catgaactgccgtactttcaa

SEQ ID NO: 4137 - RNA, 21 nt, RNAi
ugaacugccguacuuucaauu

SEQ ID NO: 4138 - RNA, 21 nt, RNAi
uuacuugacggcaugaaaguu

SEQ ID NO: 4139 - DNA, 21 bp, Homo sapiens
caaggactgtcaacataaatc

SEQ ID NO: 4140 - RNA, 21 nt, RNAi
aggacugucaacauaaaucuu

SEQ ID NO: 4141 - RNA, 21 nt, RNAi
uuuccugacaguuguauuuag

SEQ ID NO: 4142 - DNA, 21 bp, Homo sapiens
catttgaagatcatatcctgg

SEQ ID NO: 4143 - RNA, 21 nt, RNAi
uuugaagaucauauccugguu

SEQ ID NO: 4144 - RNA, 21 nt, RNAi
uuaaacuucuaguauaggacc

SEQ ID NO: 4145 - DNA, 21 bp, Homo sapiens
cacatttgccgctaatcttct

SEQ ID NO: 4146 - RNA, 21 nt, RNAi
cauuugccgcuaaucuucuuu

SEQ ID NO: 4147 - RNA, 21 nt, RNAi
uuguaaacggcgauuagaaga

SEQ ID NO: 4148 - DNA, 21 bp, Homo sapiens
catttgccgctaatcttctaa

SEQ ID NO: 4149 - RNA, 21 nt, RNAi
uuugccgcuaaucuucuaauu

SEQ ID NO: 4150 - RNA, 21 nt, RNAi
uuaaacggcgauuagaagauu

SEQ ID NO: 4151 - DNA, 21 bp, Homo sapiens
cagatagctattcaccacagg

SEQ ID NO: 4152 - RNA, 21 nt, RNAi
gauagcuauucaccacagguu

SEQ ID NO: 4153 - RNA, 21 nt, RNAi
uucuaucgauaaguggugucc

SEQ ID NO: 4154 - DNA, 21 bp, Homo sapiens
cacaggcacaatcacgatgtg

SEQ ID NO: 4155 - RNA, 21 nt, RNAi
caggcacaaucacgauguguu

SEQ ID NO: 4156 - RNA, 21 nt, RNAi
uuguccguguuagugcuacac

SEQ ID NO: 4157 - DNA, 21 bp, Homo sapiens
caggcacaatcacgatgtgtg

SEQ ID NO: 4158 - RNA, 21 nt, RNAi
ggcacaaucacgauguguguu

SEQ ID NO: 4159 - RNA, 21 nt, RNAi
uuccguguuagugcuacacac

SEQ ID NO: 4160 - DNA, 21 bp, Homo sapiens
cacaatcacgatgtgtgtttc

SEQ ID NO: 4161 - RNA, 21 nt, RNAi
caaucacgauguguguuucuu

SEQ ID NO: 4162 - RNA, 21 nt, RNAi
uuguuagugcuacacacaaag

SEQ ID NO: 4163 - DNA, 21 bp, Homo sapiens
caatcacgatgtgtgtttctt

SEQ ID NO: 4164 - RNA, 21 nt, RNAi
aucacgauguguguuucuuuu

SEQ ID NO: 4165 - RNA, 21 nt, RNAi
uuuagugcuacacacaaagaa

SEQ ID NO: 4166 - DNA, 21 bp, Homo sapiens
cagcagcagaattcttgtaac

SEQ ID NO: 4167 - RNA, 21 nt, RNAi
gcagcagaauucuuguaacuu

SEQ ID NO: 4168 - RNA, 21 nt, RNAi
uucgucgucuuaagaacauug

SEQ ID NO: 4169 - DNA, 21 bp, Homo sapiens
catacacagaaattagagctc

SEQ ID NO: 4170 - RNA, 21 nt, RNAi
uacacagaaauuagagcucuu

SEQ ID NO: 4171 - RNA, 21 nt, RNAi
uuaugugucuuuaaucucgag

SEQ ID NO: 4172 - DNA, 21 bp, Homo sapiens
cactctagtcagatgacagca

SEQ ID NO: 4173 - RNA, 21 nt, RNAi
cucuagucagaugacagcauu

SEQ ID NO: 4174 - RNA, 21 nt, RNAi
uugagaucagucuacugucgu

SEQ ID NO: 4175 - DNA, 21 bp, Homo sapiens
cagatgacagcacttccgaat

SEQ ID NO: 4176 - RNA, 21 nt, RNAi
gaugacagcacuuccgaauuu

SEQ ID NO: 4177 - RNA, 21 nt, RNAi
uucuacugucgugaaggcuua

SEQ ID NO: 4178 - DNA, 21 bp, Homo sapiens
cagcacttccgaatactccat

SEQ ID NO: 4179 - RNA, 21 nt, RNAi
gcacuuccgaauacuccauuu

SEQ ID NO: 4180 - RNA, 21 nt, RNAi
uucgugaaggcuuaugaggua

SEQ ID NO: 4181 - DNA, 21 bp, Homo sapiens
cacttccgaatactccatgcc

SEQ ID NO: 4182 - RNA, 21 nt, RNAi
cuuccgaauacuccaugccuu

SEQ ID NO: 4183 - RNA, 21 nt, RNAi
uugaaggcuuaugagguacgg

SEQ ID NO: 4184 - DNA, 21 bp, Homo sapiens
cattacaagttctactacctg

SEQ ID NO: 4185 - RNA, 21 nt, RNAi
uuacaaguucuacuaccuguu

SEQ ID NO: 4186 - RNA, 21 nt, RNAi
uuaauguucaagaugauggac

SEQ ID NO: 4187 - DNA, 21 bp, Homo sapiens
caaagatgaattagaacgtgc

SEQ ID NO: 4188 - RNA, 21 nt, RNAi
aagaugaauuagaacgugcuu

SEQ ID NO: 4189 - RNA, 21 nt, RNAi
uuuucuacuuaaucuugcacg

SEQ ID NO: 4190 - DNA, 21 bp, Homo sapiens
caagatttccaaggattgcat

SEQ ID NO: 4191 - RNA, 21 nt, RNAi
agauuuccaaggauugcauuu

SEQ ID NO: 4192 - RNA, 21 nt, RNAi
uuucuaaagguuccuaacgua

SEQ ID NO: 4193 - DNA, 21 bp, Homo sapiens
catatcacctgaactgatggc

SEQ ID NO: 4194 - RNA, 21 nt, RNAi
uaucaccugaacugauggcuu

SEQ ID NO: 4195 - RNA, 21 nt, RNAi
uuauaguggacuugacuaccg

SEQ ID NO: 4196 - DNA, 21 bp, Homo sapiens
cagttactgagctctagtgtt

SEQ ID NO: 4197 - RNA, 21 nt, RNAi
guuacugagcucuaguguuuu

SEQ ID NO: 4198 - RNA, 21 nt, RNAi
uucaaugacucgagaucacaa

SEQ ID NO: 4199 - DNA, 21 bp, Homo sapiens
cagctctctatgaaggccatt

SEQ ID NO: 4200 - RNA, 21 nt, RNAi
gcucucuaugaaggccauuuu

SEQ ID NO: 4201 - RNA, 21 nt, RNAi
uucgagagauacuuccgguaa

SEQ ID NO: 4202 - DNA, 21 bp, Homo sapiens
caaactctcaagctcggttgc

SEQ ID NO: 4203 - RNA, 21 nt, RNAi
aacucucaagcucgguugcuu

SEQ ID NO: 4204 - RNA, 21 nt, RNAi
uuuugagaguucgagccaacg

SEQ ID NO: 4205 - DNA, 21 bp, Homo sapiens
caggtcgattagatttctcaa

SEQ ID NO: 4206 - RNA, 21 nt, RNAi
ggucgauuagauuucucaauu

SEQ ID NO: 4207 - RNA, 21 nt, RNAi
uuccagcuaaucuaaagaguu

SEQ ID NO: 4208 - DNA, 21 bp, Homo sapiens
caagagcttaccttgcgtatg

SEQ ID NO: 4209 - RNA, 21 nt, RNAi
agagcuuaccuugcguauguu

SEQ ID NO: 4210 - RNA, 21 nt, RNAi
uuucucgaauggaacgcauac

SEQ ID NO: 4211 - DNA, 21 bp, Homo sapiens
caggtcaccaattgtggagga

SEQ ID NO: 4212 - RNA, 21 nt, RNAi
ggucaccaauuguggaggauu

SEQ ID NO: 4213 - RNA, 21 nt, RNAi
uuccagugguuaacaccuccu

SEQ ID NO: 4214 - DNA, 21 bp, Homo sapiens
cagaagtcaaccgattggtct

SEQ ID NO: 4215 - RNA, 21 nt, RNAi
gaagucaaccgauuggucuuu

SEQ ID NO: 4216 - RNA, 21 nt, RNAi
uucuucaguuggcuaaccaga

SEQ ID NO: 4217 - DNA, 21 bp, Homo sapiens
caaccgattggtctggagtaa

SEQ ID NO: 4218 - RNA, 21 nt, RNAi
accgauuggucuggaguaauu

SEQ ID NO: 4219 - RNA, 21 nt, RNAi
uuuggcuaaccagaccucauu

SEQ ID NO: 4220 - DNA, 21 bp, Homo sapiens
caaaggttcgacatgatcttg

SEQ ID NO: 4221 - RNA, 21 nt, RNAi
aagguucgacaugaucuuguu

SEQ ID NO: 4222 - RNA, 21 nt, RNAi
uuuuccaagcuguacuagaac

SEQ ID NO: 4223 - DNA, 21 bp, Homo sapiens
cacctgctgtagcattatgat

SEQ ID NO: 4224 - RNA, 21 nt, RNAi
ccugcuguagcauuaugauuu

SEQ ID NO: 4225 - RNA, 21 nt, RNAi
uuggacgacaucguaauacua

SEQ ID NO: 4226 - DNA, 21 bp, Homo sapiens
cagttctaaagcatgacgatc

SEQ ID NO: 4227 - RNA, 21 nt, RNAi
guucuaaagcaugacgaucuu

SEQ ID NO: 4228 - RNA, 21 nt, RNAi
uucaagauuucguacugcuag

SEQ ID NO: 4229 - DNA, 21 bp, Homo sapiens
catgacgatcagcataccata

SEQ ID NO: 4230 - RNA, 21 nt, RNAi
ugacgaucagcauaccauauu

SEQ ID NO: 4231 - RNA, 21 nt, RNAi
uuacugcuagucguaugguau

SEQ ID NO: 4232 - DNA, 21 bp, Homo sapiens
caaggcacaaatttcaggcac

SEQ ID NO: 4233 - RNA, 21 nt, RNAi
aggcacaaauuucaggcacuu

SEQ ID NO: 4234 - RNA, 21 nt, RNAi
uuuccguguuuaaaguccgug

SEQ ID NO: 4235 - DNA, 21 bp, Homo sapiens
cagtagcttcctttcgctcca

SEQ ID NO: 4236 - RNA, 21 nt, RNAi
guagcuuccuuucgcuccauu

SEQ ID NO: 4237 - RNA, 21 nt, RNAi
uucaucgaaggaaagcgaggu

SEQ ID NO: 4238 - DNA, 21 bp, Homo sapiens
catacacacgagctgtaatgc

SEQ ID NO: 4239 - RNA, 21 nt, RNAi
uacacacgagcuguaaugcuu

SEQ ID NO: 4240 - RNA, 21 nt, RNAi
uuaugugugcucgacauuacg

SEQ ID NO: 4241 - DNA, 21 bp, Homo sapiens
cacacgagctgtaatgcactt

SEQ ID NO: 4242 - RNA, 21 nt, RNAi
cacgagcuguaaugcacuuuu

SEQ ID NO: 4243 - RNA, 21 nt, RNAi
uugugcucgacauuacgugaa

SEQ ID NO: 4244 - DNA, 21 bp, Homo sapiens
cagaaattgtatgctgctatg

SEQ ID NO: 4245 - RNA, 21 nt, RNAi
gaaauuguaugcugcuauguu

SEQ ID NO: 4246 - RNA, 21 nt, RNAi
uucuuuaacauacgacgauac

SEQ ID NO: 4247 - DNA, 21 bp, Homo sapiens
catggtgtagtaaagtccatg

SEQ ID NO: 4248 - RNA, 21 nt, RNAi
ugguguaguaaaguccauguu

SEQ ID NO: 4249 - RNA, 21 nt, RNAi
uuaccacaucauuucagguac

SEQ ID NO: 4250 - DNA, 21 bp, Homo sapiens
cagctgtctactgttatcact

SEQ ID NO: 4251 - RNA, 21 nt, RNAi
gcugucuacuguuaucacuuu

SEQ ID NO: 4252 - RNA, 21 nt, RNAi
uucgacagaugacaauaguga

SEQ ID NO: 4253 - DNA, 21 bp, Homo sapiens
caggtgaatggagtgcatgct

SEQ ID NO: 4254 - RNA, 21 nt, RNAi
ggugaauggagugcaugcuuu

SEQ ID NO: 4255 - RNA, 21 nt, RNAi
uuccacuuaccucacguacga

SEQ ID NO: 4256 - DNA, 21 bp, Homo sapiens
cactgaaactagtgagagcag

SEQ ID NO: 4257 - RNA, 21 nt, RNAi
cugaaacuagugagagcaguu

SEQ ID NO: 4258 - RNA, 21 nt, RNAi
uugacuuugaucacucucguc

SEQ ID NO: 4259 - DNA, 21 bp, Homo sapiens
catgttatgtgagttggagca

SEQ ID NO: 4260 - RNA, 21 nt, RNAi
uguuaugugaguuggagcauu

SEQ ID NO: 4261 - RNA, 21 nt, RNAi
uuacaauacacucaaccucgu

SEQ ID NO: 4262 - DNA, 21 bp, Homo sapiens
cagcctacaatgctctcctta

SEQ ID NO: 4263 - RNA, 21 nt, RNAi
gccuacaaugcucuccuuauu

SEQ ID NO: 4264 - RNA, 21 nt, RNAi
uucggauguuacgagaggaau

SEQ ID NO: 4265 - DNA, 21 bp, Homo sapiens
caccaggcactaattgttctt

SEQ ID NO: 4266 - RNA, 21 nt, RNAi
ccaggcacuaauuguucuuuu

SEQ ID NO: 4267 - RNA, 21 nt, RNAi
uugguccgugauuaacaagaa

SEQ ID NO: 4268 - DNA, 21 bp, Homo sapiens
catgttaatccatggtcgagc

SEQ ID NO: 4269 - RNA, 21 nt, RNAi
uguuaauccauggucgagcuu

SEQ ID NO: 4270 - RNA, 21 nt, RNAi
uuacaauuagguaccagcucg

SEQ ID NO: 4271 - DNA, 21 bp, Homo sapiens
catggtcgagctatgctacta

SEQ ID NO: 4272 - RNA, 21 nt, RNAi
uggucgagcuaugcuacuauu

SEQ ID NO: 4273 - RNA, 21 nt, RNAi
uuaccagcucgauacgaugau

SEQ ID NO: 4274 - DNA, 21 bp, Homo sapiens
caaggtgatctcatccggtat

SEQ ID NO: 4275 - RNA, 21 nt, RNAi
aggugaucucauccgguauuu

SEQ ID NO: 4276 - RNA, 21 nt, RNAi
uuuccacuagaguaggccaua

SEQ ID NO: 4277 - DNA, 21 bp, Homo sapiens
catccggtatatagttcttca

SEQ ID NO: 4278 - RNA, 21 nt, RNAi
uccgguauauaguucuucauu

SEQ ID NO: 4279 - RNA, 21 nt, RNAi
uuaggccauauaucaagaagu

SEQ ID NO: 4280 - DNA, 21 bp, Homo sapiens
cagtcaatgccacgaatgtta

SEQ ID NO: 4281 - RNA, 21 nt, RNAi
gucaaugccacgaauguuauu

SEQ ID NO: 4282 - RNA, 21 nt, RNAi
uucaguuacggugcuuacaau

SEQ ID NO: 4283 - DNA, 21 bp, Homo sapiens
caatgccacgaatgttaactc

SEQ ID NO: 4284 - RNA, 21 nt, RNAi
augccacgaauguuaacucuu

SEQ ID NO: 4285 - RNA, 21 nt, RNAi
uuuacggugcuuacaauugag

SEQ ID NO: 4286 - DNA, 21 bp, Homo sapiens
caaagtatttctagcctatcc

SEQ ID NO: 4287 - RNA, 21 nt, RNAi
aaguauuucuagccuauccuu

SEQ ID NO: 4288 - RNA, 21 nt, RNAi
uuuucauaaagaucggauagg

SEQ ID NO: 4289 - DNA, 21 bp, Homo sapiens
caactcgcctaacagataagc

SEQ ID NO: 4290 - RNA, 21 nt, RNAi
acucgccuaacagauaagcuu

SEQ ID NO: 4291 - RNA, 21 nt, RNAi
uuugagcggauugucuauucg

SEQ ID NO: 4292 - DNA, 21 bp, Homo sapiens
caataaaccggttgatggaag

SEQ ID NO: 4293 - RNA, 21 nt, RNAi
auaaaccgguugauggaaguu

SEQ ID NO: 4294 - RNA, 21 nt, RNAi
uuuauuuggccaacuaccuuc

SEQ ID NO: 4295 - DNA, 21 bp, Homo sapiens
cacattaagcatgagcactca

SEQ ID NO: 4296 - RNA, 21 nt, RNAi
cauuaagcaugagcacucauu

SEQ ID NO: 4297 - RNA, 21 nt, RNAi
uuguaauucguacucgugagu

SEQ ID NO: 4298 - DNA, 21 bp, Homo sapiens
caatcagtcatgatacctaca

SEQ ID NO: 4299 - RNA, 21 nt, RNAi
aucagucaugauaccuacauu

SEQ ID NO: 4300 - RNA, 21 nt, RNAi
uuuagucaguacuauggaugu

SEQ ID NO: 4301 - DNA, 21 bp, Homo sapiens
catcatgatgtgtaagccaaa

SEQ ID NO: 4302 - RNA, 21 nt, RNAi
ucaugauguguaagccaaauu

SEQ ID NO: 4303 - RNA, 21 nt, RNAi
uuaguacuacacauucgguuu

SEQ ID NO: 4304 - DNA, 21 bp, Homo sapiens
cagagtctcgtagaagagaac

SEQ ID NO: 4305 - RNA, 21 nt, RNAi
gagucucguagaagagaacuu

SEQ ID NO: 4306 - RNA, 21 nt, RNAi
uucucagagcaucuucucuug

SEQ ID NO: 4307 - DNA, 21 bp, Homo sapiens
caacactgctggtttgagacc

SEQ ID NO: 4308 - RNA, 21 nt, RNAi
acacugcugguuugagaccuu

SEQ ID NO: 4309 - RNA, 21 nt, RNAi
uuugugacgaccaaacucugg

SEQ ID NO: 4310 - DNA, 21 bp, Homo sapiens
cagtgtatgctaccaaagtca

SEQ ID NO: 4311 - RNA, 21 nt, RNAi
guguaugcuaccaaagucauu

SEQ ID NO: 4312 - RNA, 21 nt, RNAi
uucacauacgaugguuucagu

SEQ ID NO: 4313 - DNA, 21 bp, Homo sapiens
catgagtggtttctgagaaca

SEQ ID NO: 4314 - RNA, 21 nt, RNAi
ugagugguuucugagaacauu

SEQ ID NO: 4315 - RNA, 21 nt, RNAi
uuacucaccaaagacucuugu

SEQ ID NO: 4316 - DNA, 21 bp, Homo sapiens
catcatggtacagtagtagat

SEQ ID NO: 4317 - RNA, 21 nt, RNAi
ucaugguacaguaguagauuu

SEQ ID NO: 4318 - RNA, 21 nt, RNAi
uuaguaccaugucaucaucua

SEQ ID NO: 4319 - DNA, 21 bp, Homo sapiens
cagtagtagatcagcttactg

SEQ ID NO: 4320 - RNA, 21 nt, RNAi
guaguagaucagcuuacuguu

SEQ ID NO: 4321 - RNA, 21 nt, RNAi
uucaucaucuagucgaaugac

SEQ ID NO: 4322 - DNA, 21 bp, Homo sapiens
caatgaggctgatgcgtgatc

SEQ ID NO: 4323 - RNA, 21 nt, RNAi
augaggcugaugcgugaucuu

SEQ ID NO: 4324 - RNA, 21 nt, RNAi
uuuacuccgacuacgcacuag

SEQ ID NO: 4325 - DNA, 21 bp, Homo sapiens
caaagcgccactgaatgaaac

SEQ ID NO: 4326 - RNA, 21 nt, RNAi
aagcgccacugaaugaaacuu

SEQ ID NO: 4327 - RNA, 21 nt, RNAi
uuuucgcggugacuuacuuug

SEQ ID NO: 4328 - DNA, 21 bp, Homo sapiens
caagactcgaaatagagtgac

SEQ ID NO: 4329 - RNA, 21 nt, RNAi
agacucgaaauagagugacuu

SEQ ID NO: 4330 - RNA, 21 nt, RNAi
uuucugagcuuuaucucacug

SEQ ID NO: 4331 - DNA, 21 bp, Homo sapiens
caggactgccgttatctattg

SEQ ID NO: 4332 - RNA, 21 nt, RNAi
ggacugccguuaucuauuguu

SEQ ID NO: 4333 - RNA, 21 nt, RNAi
uuccugacggcaauagauaac

SEQ ID NO: 4334 - DNA, 21 bp, Homo sapiens
gaagccaagacaaattctgtg

SEQ ID NO: 4335 - RNA, 21 nt, RNAi
agccaagacaaauucuguguu

SEQ ID NO: 4336 - RNA, 21 nt, RNAi
uuucgguucuguuuaagacac

SEQ ID NO: 4337 - DNA, 21 bp, Homo sapiens
gatttcatccagcatatcatg

SEQ ID NO: 4338 - RNA, 21 nt, RNAi
uuucauccagcauaucauguu

SEQ ID NO: 4339 - RNA, 21 nt, RNAi
uuaaaguaggucguauaguac

SEQ ID NO: 4340 - DNA, 21 bp, Homo sapiens
gacttctgcggattgcagcaa

SEQ ID NO: 4341 - RNA, 21 nt, RNAi
cuucugcggauugcagcaauu

SEQ ID NO: 4342 - RNA, 21 nt, RNAi
uugaagacgccuaacgucguu

SEQ ID NO: 4343 - DNA, 21 bp, Homo sapiens
gataggttgtgttctgctaga

SEQ ID NO: 4344 - RNA, 21 nt, RNAi
uagguuguguucugcuagauu

SEQ ID NO: 4345 - RNA, 21 nt, RNAi
uuauccaacacaagacgaucu

SEQ ID NO: 4346 - DNA, 21 bp, Homo sapiens
gatactgaccaattgaaactc

SEQ ID NO: 4347 - RNA, 21 nt, RNAi
uacugaccaauugaaacucuu

SEQ ID NO: 4348 - RNA, 21 nt, RNAi
uuaugacugguuaacuuugag

SEQ ID NO: 4349 - DNA, 21 bp, Homo sapiens
gaggtagatgcagagtacttg

SEQ ID NO: 4350 - RNA, 21 nt, RNAi
gguagaugcagaguacuuguu

SEQ ID NO: 4351 - RNA, 21 nt, RNAi
uuccaucuacgucucaugaac

SEQ ID NO: 4352 - DNA, 21 bp, Homo sapiens
gaggagattcaatgccaaact

SEQ ID NO: 4353 - RNA, 21 nt, RNAi
ggagauucaaugccaaacuuu

SEQ ID NO: 4354 - RNA, 21 nt, RNAi
uuccucuaaguuacgguuuga

SEQ ID NO: 4355 - DNA, 21 bp, Homo sapiens
gagattcaatgccaaactcaa

SEQ ID NO: 4356 - RNA, 21 nt, RNAi
gauucaaugccaaacucaauu

SEQ ID NO: 4357 - RNA, 21 nt, RNAi
uucuaaguuacgguuugaguu

SEQ ID NO: 4358 - DNA, 21 bp, Homo sapiens
gattcaatgccaaactcaaca

SEQ ID NO: 4359 - RNA, 21 nt, RNAi
uucaaugccaaacucaacauu

SEQ ID NO: 4360 - RNA, 21 nt, RNAi
uuaaguuacgguuugaguugu

SEQ ID NO: 4361 - DNA, 21 bp, Homo sapiens
gagcatattatggagtgcact

SEQ ID NO: 4362 - RNA, 21 nt, RNAi
gcauauuauggagugcacuuu

SEQ ID NO: 4363 - RNA, 21 nt, RNAi
uucguauaauaccucacguga

SEQ ID NO: 4364 - DNA, 21 bp, Homo sapiens
gaaggaattgctgttgtctta

SEQ ID NO: 4365 - RNA, 21 nt, RNAi
aggaauugcuguugucuuauu

SEQ ID NO: 4366 - RNA, 21 nt, RNAi
uuuccuuaacgacaacagaau

SEQ ID NO: 4367 - DNA, 21 bp, Homo sapiens
gactgctctgtgtactgttca

SEQ ID NO: 4368 - RNA, 21 nt, RNAi
cugcucuguguacuguucauu

SEQ ID NO: 4369 - RNA, 21 nt, RNAi
uugacgagacacaugacaagu

SEQ ID NO: 4370 - DNA, 21 bp, Homo sapiens
gaactgccgtactttcaagga

SEQ ID NO: 4371 - RNA, 21 nt, RNAi
acugccguacuuucaaggauu

SEQ ID NO: 4372 - RNA, 21 nt, RNAi
uuugacggcaugaaaguuccu

SEQ ID NO: 4373 - DNA, 21 bp, Homo sapiens
gactgtcaacataaatccaag

SEQ ID NO: 4374 - RNA, 21 nt, RNAi
cugucaacauaaauccaaguu

SEQ ID NO: 4375 - RNA, 21 nt, RNAi
uugacaguuguauuuagguuc

SEQ ID NO: 4376 - DNA, 21 bp, Homo sapiens
gaggcaaccattgataaggtg

SEQ ID NO: 4377 - RNA, 21 nt, RNAi
ggcaaccauugauaagguguu

SEQ ID NO: 4378 - RNA, 21 nt, RNAi
uuccguugguaacuauuccac

SEQ ID NO: 4379 - DNA, 21 bp, Homo sapiens
gatttatgtggtatgctctca

SEQ ID NO: 4380 - RNA, 21 nt, RNAi
uuuaugugguaugcucucauu

SEQ ID NO: 4381 - RNA, 21 nt, RNAi
uuaaauacaccauacgagagu

SEQ ID NO: 4382 - DNA, 21 bp, Homo sapiens
gatggctgtttaaagttgacc

SEQ ID NO: 4383 - RNA, 21 nt, RNAi
uggcuguuuaaaguugaccuu

SEQ ID NO: 4384 - RNA, 21 nt, RNAi
uuaccgacaaauuucaacugg

SEQ ID NO: 4385 - DNA, 21 bp, Homo sapiens
gaccacatttgccgctaatct

SEQ ID NO: 4386 - RNA, 21 nt, RNAi
ccacauuugccgcuaaucuuu

SEQ ID NO: 4387 - RNA, 21 nt, RNAi
uugguguaaacggcgauuaga

SEQ ID NO: 4388 - DNA, 21 bp, Homo sapiens
gatgacagcacttccgaatac

SEQ ID NO: 4389 - RNA, 21 nt, RNAi
ugacagcacuuccgaauacuu

SEQ ID NO: 4390 - RNA, 21 nt, RNAi
uuacugucgugaaggcuuaug

SEQ ID NO: 4391 - DNA, 21 bp, Homo sapiens
gacagcacttccgaatactcc

SEQ ID NO: 4392 - RNA, 21 nt, RNAi
cagcacuuccgaauacuccuu

SEQ ID NO: 4393 - RNA, 21 nt, RNAi
uugucgugaaggcuuaugagg

SEQ ID NO: 4394 - DNA, 21 bp, Homo sapiens
gactttcctgatcttaatcgt

SEQ ID NO: 4395 - RNA, 21 nt, RNAi
cuuuccugaucuuaaucguuu

SEQ ID NO: 4396 - RNA, 21 nt, RNAi
uugaaaggacuagaauuagca

SEQ ID NO: 4397 - DNA, 21 bp, Homo sapiens
gagcctgttgagacaagattt

SEQ ID NO: 4398 - RNA, 21 nt, RNAi
gccuguugagacaagauuuuu

SEQ ID NO: 4399 - RNA, 21 nt, RNAi
uucggacaacucuguucuaaa

SEQ ID NO: 4400 - DNA, 21 bp, Homo sapiens
gaattattgctgcgtattgga

SEQ ID NO: 4401 - RNA, 21 nt, RNAi
auuauugcugcguauuggauu

SEQ ID NO: 4402 - RNA, 21 nt, RNAi
uuuaauaacgacgcauaaccu

SEQ ID NO: 4403 - DNA, 21 bp, Homo sapiens
gatatcatatcacctgaactg

SEQ ID NO: 4404 - RNA, 21 nt, RNAi
uaucauaucaccugaacuguu

SEQ ID NO: 4405 - RNA, 21 nt, RNAi
uuauaguauaguggacuugac

SEQ ID NO: 4406 - DNA, 21 bp, Homo sapiens
gaactggccttcgattcaagg

SEQ ID NO: 4407 - RNA, 21 nt, RNAi
acuggccuucgauucaagguu

SEQ ID NO: 4408 - RNA, 21 nt, RNAi
uuugaccggaagcuaaguucc

SEQ ID NO: 4409 - DNA, 21 bp, Homo sapiens
gatgttcgtattcatgctctt

SEQ ID NO: 4410 - RNA, 21 nt, RNAi
uguucguauucaugcucuuuu

SEQ ID NO: 4411 - RNA, 21 nt, RNAi
uuacaagcauaaguacgagaa

SEQ ID NO: 4412 - DNA, 21 bp, Homo sapiens
gataaagtatgcaacagacag

SEQ ID NO: 4413 - RNA, 21 nt, RNAi
uaaaguaugcaacagacaguu

SEQ ID NO: 4414 - RNA, 21 nt, RNAi
uuauuucauacguugucuguc

SEQ ID NO: 4415 - DNA, 21 bp, Homo sapiens
gatagatccaggtcgattaga

SEQ ID NO: 4416 - RNA, 21 nt, RNAi
uagauccaggucgauuagauu

SEQ ID NO: 4417 - RNA, 21 nt, RNAi
uuaucuagguccagcuaaucu

SEQ ID NO: 4418 - DNA, 21 bp, Homo sapiens
gatccaggtcgattagatttc

SEQ ID NO: 4419 - RNA, 21 nt, RNAi
uccaggucgauuagauuucuu

SEQ ID NO: 4420 - RNA, 21 nt, RNAi
uuagguccagcuaaucuaaag

SEQ ID NO: 4421 - DNA, 21 bp, Homo sapiens
gatggagctaacaagagctta

SEQ ID NO: 4422 - RNA, 21 nt, RNAi
uggagcuaacaagagcuuauu

SEQ ID NO: 4423 - RNA, 21 nt, RNAi
uuaccucgauuguucucgaau

SEQ ID NO: 4424 - DNA, 21 bp, Homo sapiens
gagcttaccttgcgtatgctg

SEQ ID NO: 4425 - RNA, 21 nt, RNAi
gcuuaccuugcguaugcuguu

SEQ ID NO: 4426 - RNA, 21 nt, RNAi
uucgaauggaacgcauacgac

SEQ ID NO: 4427 - DNA, 21 bp, Homo sapiens
gataatagccgagctcaagat

SEQ ID NO: 4428 - RNA, 21 nt, RNAi
uaauagccgagcucaagauuu

SEQ ID NO: 4429 - RNA, 21 nt, RNAi
uuauuaucggcucgaguucua

SEQ ID NO: 4430 - DNA, 21 bp, Homo sapiens
gagatttcctgagcatgttcg

SEQ ID NO: 4431 - RNA, 21 nt, RNAi
gauuuccugagcauguucguu

SEQ ID NO: 4432 - RNA, 21 nt, RNAi
uucuaaaggacucguacaagc

SEQ ID NO: 4433 - DNA, 21 bp, Homo sapiens
gaacctcatctaaataccaga

SEQ ID NO: 4434 - RNA, 21 nt, RNAi
accucaucuaaauaccagauu

SEQ ID NO: 4435 - RNA, 21 nt, RNAi
uuuggaguagauuuauggucu

SEQ ID NO: 4436 - DNA, 21 bp, Homo sapiens
gaagtcaaccgattggtctgg

SEQ ID NO: 4437 - RNA, 21 nt, RNAi
agucaaccgauuggucugguu

SEQ ID NO: 4438 - RNA, 21 nt, RNAi
uuucaguuggcuaaccagacc

SEQ ID NO: 4439 - DNA, 21 bp, Homo sapiens
gacgatcagcataccataaat

SEQ ID NO: 4440 - RNA, 21 nt, RNAi
cgaucagcauaccauaaauuu

SEQ ID NO: 4441 - RNA, 21 nt, RNAi
uugcuagucguaugguauuua

SEQ ID NO: 4442 - DNA, 21 bp, Homo sapiens
gatcagcataccataaatacc

SEQ ID NO: 4443 - RNA, 21 nt, RNAi
ucagcauaccauaaauaccuu

SEQ ID NO: 4444 - RNA, 21 nt, RNAi
uuagucguaugguauuuaugg

SEQ ID NO: 4445 - DNA, 21 bp, Homo sapiens
gacattgcatctgatctgtgt

SEQ ID NO: 4446 - RNA, 21 nt, RNAi
cauugcaucugaucuguguuu

SEQ ID NO: 4447 - RNA, 21 nt, RNAi
uuguaacguagacuagacaca

SEQ ID NO: 4448 - DNA, 21 bp, Homo sapiens
gatctgtgtcaactcagtaca

SEQ ID NO: 4449 - RNA, 21 nt, RNAi
ucugugucaacucaguacauu

SEQ ID NO: 4450 - RNA, 21 nt, RNAi
uuagacacaguugagucaugu

SEQ ID NO: 4451 - DNA, 21 bp, Homo sapiens
gaagactatcagagtgtaacc

SEQ ID NO: 4452 - RNA, 21 nt, RNAi
agacuaucagaguguaaccuu

SEQ ID NO: 4453 - RNA, 21 nt, RNAi
uuucugauagucucacauugg

SEQ ID NO: 4454 - DNA, 21 bp, Homo sapiens
gaaattgtatgctgctatgca

SEQ ID NO: 4455 - RNA, 21 nt, RNAi
aauuguaugcugcuaugcauu

SEQ ID NO: 4456 - RNA, 21 nt, RNAi
uuuuaacauacgacgauacgu

SEQ ID NO: 4457 - DNA, 21 bp, Homo sapiens
gatgccactgcttgttatgac

SEQ ID NO: 4458 - RNA, 21 nt, RNAi
ugccacugcuuguuaugacuu

SEQ ID NO: 4459 - RNA, 21 nt, RNAi
uuacggugacgaacaauacug

SEQ ID NO: 4460 - DNA, 21 bp, Homo sapiens
gaaccagaccagatcattcat

SEQ ID NO: 4461 - RNA, 21 nt, RNAi
accagaccagaucauucauuu

SEQ ID NO: 4462 - RNA, 21 nt, RNAi
uuuggucuggucuaguaagua

SEQ ID NO: 4463 - DNA, 21 bp, Homo sapiens
gaatggagtgcatgctaacag

SEQ ID NO: 4464 - RNA, 21 nt, RNAi
auggagugcaugcuaacaguu

SEQ ID NO: 4465 - RNA, 21 nt, RNAi
uuuaccucacguacgauuguc

SEQ ID NO: 4466 - DNA, 21 bp, Homo sapiens
gaattaaacacgtacagagtg

SEQ ID NO: 4467 - RNA, 21 nt, RNAi
auuaaacacguacagaguguu

SEQ ID NO: 4468 - RNA, 21 nt, RNAi
uuuaauuugugcaugucucac

SEQ ID NO: 4469 - DNA, 21 bp, Homo sapiens
gaaagaggctcctaccaacga

SEQ ID NO: 4470 - RNA, 21 nt, RNAi
aagaggcuccuaccaacgauu

SEQ ID NO: 4471 - RNA, 21 nt, RNAi
uuuucuccgaggaugguugcu

SEQ ID NO: 4472 - DNA, 21 bp, Homo sapiens
gaatcacgactcgctgaactg

SEQ ID NO: 4473 - RNA, 21 nt, RNAi
aucacgacucgcugaacuguu

SEQ ID NO: 4474 - RNA, 21 nt, RNAi
uuuagugcugagcgacuugac

SEQ ID NO: 4475 - DNA, 21 bp, Homo sapiens
gatgttcaccaggcactaatt

SEQ ID NO: 4476 - RNA, 21 nt, RNAi
uguucaccaggcacuaauuuu

SEQ ID NO: 4477 - RNA, 21 nt, RNAi
uuacaagugguccgugauuaa

SEQ ID NO: 4478 - DNA, 21 bp, Homo sapiens
gaacatgttaatccatggtcg

SEQ ID NO: 4479 - RNA, 21 nt, RNAi
acauguuaauccauggucguu

SEQ ID NO: 4480 - RNA, 21 nt, RNAi
uuuguacaauuagguaccagc

SEQ ID NO: 4481 - DNA, 21 bp, Homo sapiens
gagatgcaactcgcctaacag

SEQ ID NO: 4482 - RNA, 21 nt, RNAi
gaugcaacucgccuaacaguu

SEQ ID NO: 4483 - RNA, 21 nt, RNAi
uucuacguugagcggauuguc

SEQ ID NO: 4484 - DNA, 21 bp, Homo sapiens
gatgcaactcgcctaacagat

SEQ ID NO: 4485 - RNA, 21 nt, RNAi
ugcaacucgccuaacagauuu

SEQ ID NO: 4486 - RNA, 21 nt, RNAi
uuacguugagcggauugucua

SEQ ID NO: 4487 - DNA, 21 bp, Homo sapiens
gataagcttctagaattgtgc

SEQ ID NO: 4488 - RNA, 21 nt, RNAi
uaagcuucuagaauugugcuu

SEQ ID NO: 4489 - RNA, 21 nt, RNAi
uuauucgaagaucuuaacacg

SEQ ID NO: 4490 - DNA, 21 bp, Homo sapiens
gaagtagttccacattaagca

SEQ ID NO: 4491 - RNA, 21 nt, RNAi
aguaguuccacauuaagcauu

SEQ ID NO: 4492 - RNA, 21 nt, RNAi
uuucaucaagguguaauucgu

SEQ ID NO: 4493 - DNA, 21 bp, Homo sapiens
gatgacctgagaaaggattgt

SEQ ID NO: 4494 - RNA, 21 nt, RNAi
ugaccugagaaaggauuguuu

SEQ ID NO: 4495 - RNA, 21 nt, RNAi
uuacuggacucuuuccuaaca

SEQ ID NO: 4496 - DNA, 21 bp, Homo sapiens
gatgcagagtctcgtagaaga

SEQ ID NO: 4497 - RNA, 21 nt, RNAi
ugcagagucucguagaagauu

SEQ ID NO: 4498 - RNA, 21 nt, RNAi
uuacgucucagagcaucuucu

SEQ ID NO: 4499 - DNA, 21 bp, Homo sapiens
gaacaacactgctggtttgag

SEQ ID NO: 4500 - RNA, 21 nt, RNAi
acaacacugcugguuugaguu

SEQ ID NO: 4501 - RNA, 21 nt, RNAi
uuuguugugacgaccaaacuc

SEQ ID NO: 4502 - DNA, 21 bp, Homo sapiens
gagacctattctgaccaaact

SEQ ID NO: 4503 - RNA, 21 nt, RNAi
gaccuauucugaccaaacuuu

SEQ ID NO: 4504 - RNA, 21 nt, RNAi
uucuggauaagacugguuuga

SEQ ID NO: 4505 - DNA, 21 bp, Homo sapiens
gaacttcgccagtgtatgcta

SEQ ID NO: 4506 - RNA, 21 nt, RNAi
acuucgccaguguaugcuauu

SEQ ID NO: 4507 - RNA, 21 nt, RNAi
uuugaagcggucacauacgau

SEQ ID NO: 4508 - DNA, 21 bp, Homo sapiens
gattctttgactggtgaatgc

SEQ ID NO: 4509 - RNA, 21 nt, RNAi
uucuuugacuggugaaugcuu

SEQ ID NO: 4510 - RNA, 21 nt, RNAi
uuaagaaacugaccacuuacg

SEQ ID NO: 4511 - DNA, 21 bp, Homo sapiens
gactggtgaatgcgtacatgt

SEQ ID NO: 4512 - RNA, 21 nt, RNAi
cuggugaaugcguacauguuu

SEQ ID NO: 4513 - RNA, 21 nt, RNAi
uugaccacuuacgcauguaca

SEQ ID NO: 4514 - DNA, 21 bp, Homo sapiens
gaatgcgtacatgtagatttc

SEQ ID NO: 4515 - RNA, 21 nt, RNAi
augcguacauguagauuucuu

SEQ ID NO: 4516 - RNA, 21 nt, RNAi
uuuacgcauguacaucuaaag

SEQ ID NO: 4517 - DNA, 21 bp, Homo sapiens
gaaattgtgccatttcgcctg

SEQ ID NO: 4518 - RNA, 21 nt, RNAi
aauugugccauuucgccuguu

SEQ ID NO: 4519 - RNA, 21 nt, RNAi
uuuuaacacgguaaagcggac

SEQ ID NO: 4520 - DNA, 21 bp, Homo sapiens
gatcagcgagagcctttaatg

SEQ ID NO: 4521 - RNA, 21 nt, RNAi
ucagcgagagccuuuaauguu

SEQ ID NO: 4522 - RNA, 21 nt, RNAi
uuagucgcucucggaaauuac

SEQ ID NO: 4523 - DNA, 21 bp, Homo sapiens
gactcgaaatagagtgacagg

SEQ ID NO: 4524 - RNA, 21 nt, RNAi
cucgaaauagagugacagguu

SEQ ID NO: 4525 - RNA, 21 nt, RNAi
uugagcuuuaucucacugucc

SEQ ID NO: 4526 - DNA, 21 bp, Homo sapiens
gaaatagagtgacaggactgc

SEQ ID NO: 4527 - RNA, 21 nt, RNAi
aauagagugacaggacugcuu

SEQ ID NO: 4528 - RNA, 21 nt, RNAi
uuuuaucucacuguccugacg

SEQ ID NO: 4529 - DNA, 21 bp, Homo sapiens
gagtgacaggactgccgttat

SEQ ID NO: 4530 - RNA, 21 nt, RNAi
gugacaggacugccguuauuu

SEQ ID NO: 4531 - RNA, 21 nt, RNAi
uucacuguccugacggcaaua

SEQ ID NO: 4532 - DNA, 21 bp, Homo sapiens
gacaggactgccgttatctat

SEQ ID NO: 4533 - RNA, 21 nt, RNAi
caggacugccguuaucuauuu

SEQ ID NO: 4534 - RNA, 21 nt, RNAi
uuguccugacggcaauagaua

SEQ ID NO: 4535 - DNA, 21 bp, Homo sapiens
gactgccgttatctattgaag

SEQ ID NO: 4536 - RNA, 21 nt, RNAi
cugccguuaucuauugaaguu

SEQ ID NO: 4537 - RNA, 21 nt, RNAi
uugacggcaauagauaacuuc

SEQ ID NO: 4538 - DNA, 21 bp, Homo sapiens
tatgtttgtaaatgtgagtgg

SEQ ID NO: 4539 - RNA, 21 nt, RNAi
uguuuguaaaugugagugguu

SEQ ID NO: 4540 - RNA, 21 nt, RNAi
uuacaaacauuuacacucacc

SEQ ID NO: 4541 - DNA, 21 bp, Homo sapiens
taattggatcataacgagact

SEQ ID NO: 4542 - RNA, 21 nt, RNAi
auuggaucauaacgagacuuu

SEQ ID NO: 4543 - RNA, 21 nt, RNAi
uuuaaccuaguauugcucuga

SEQ ID NO: 4544 - DNA, 21 bp, Homo sapiens
taacgagacttctgcggattg

SEQ ID NO: 4545 - RNA, 21 nt, RNAi
acgagacuucugcggauuguu

SEQ ID NO: 4546 - RNA, 21 nt, RNAi
uuugcucugaagacgccuaac

SEQ ID NO: 4547 - DNA, 21 bp, Homo sapiens
tatttacaatcagctcctttg

SEQ ID NO: 4548 - RNA, 21 nt, RNAi
uuuacaaucagcuccuuuguu

SEQ ID NO: 4549 - RNA, 21 nt, RNAi
uuaaauguuagucgaggaaac

SEQ ID NO: 4550 - DNA, 21 bp, Homo sapiens
tactttggcagataggttgtg

SEQ ID NO: 4551 - RNA, 21 nt, RNAi
cuuuggcagauagguuguguu

SEQ ID NO: 4552 - RNA, 21 nt, RNAi
uugaaaccgucuauccaacac

SEQ ID NO: 4553 - DNA, 21 bp, Homo sapiens
taggttgtgttctgctagagt

SEQ ID NO: 4554 - RNA, 21 nt, RNAi
gguuguguucugcuagaguuu

SEQ ID NO: 4555 - RNA, 21 nt, RNAi
uuccaacacaagacgaucuca

SEQ ID NO: 4556 - DNA, 21 bp, Homo sapiens
tactgaccaattgaaactcta

SEQ ID NO: 4557 - RNA, 21 nt, RNAi
cugaccaauugaaacucuauu

SEQ ID NO: 4558 - RNA, 21 nt, RNAi
uugacugguuaacuuugagau

SEQ ID NO: 4559 - DNA, 21 bp, Homo sapiens
tagatgcagagtacttgttgg

SEQ ID NO: 4560 - RNA, 21 nt, RNAi
gaugcagaguacuuguugguu

SEQ ID NO: 4561 - RNA, 21 nt, RNAi
uucuacgucucaugaacaacc

SEQ ID NO: 4562 - DNA, 21 bp, Homo sapiens
tattatggagtgcactgaaac

SEQ ID NO: 4563 - RNA, 21 nt, RNAi
uuauggagugcacugaaacuu

SEQ ID NO: 4564 - RNA, 21 nt, RNAi
uuaauaccucacgugacuuug

SEQ ID NO: 4565 - DNA, 21 bp, Homo sapiens
tatggagtgcactgaaacaga

SEQ ID NO: 4566 - RNA, 21 nt, RNAi
uggagugcacugaaacagauu

SEQ ID NO: 4567 - RNA, 21 nt, RNAi
uuaccucacgugacuuugucu

SEQ ID NO: 4568 - DNA, 21 bp, Homo sapiens
tagaaggaattgctgttgtct

SEQ ID NO: 4569 - RNA, 21 nt, RNAi
gaaggaauugcuguugucuuu

SEQ ID NO: 4570 - RNA, 21 nt, RNAi
uucuuccuuaacgacaacaga

SEQ ID NO: 4571 - DNA, 21 bp, Homo sapiens
taacttggatgtcattggatt

SEQ ID NO: 4572 - RNA, 21 nt, RNAi
acuuggaugucauuggauuuu

SEQ ID NO: 4573 - RNA, 21 nt, RNAi
uuugaaccuacaguaaccuaa

SEQ ID NO: 4574 - DNA, 21 bp, Homo sapiens
tatgctctcacttccatggat

SEQ ID NO: 4575 - RNA, 21 nt, RNAi
ugcucucacuuccauggauuu

SEQ ID NO: 4576 - RNA, 21 nt, RNAi
uuacgagagugaagguaccua

SEQ ID NO: 4577 - DNA, 21 bp, Homo sapiens
tattccttgagtggagaacag

SEQ ID NO: 4578 - RNA, 21 nt, RNAi
uuccuugaguggagaacaguu

SEQ ID NO: 4579 - RNA, 21 nt, RNAi
uuaaggaacucaccucuuguc

SEQ ID NO: 4580 - DNA, 21 bp, Homo sapiens
tatcttattgcagcagcagaa

SEQ ID NO: 4581 - RNA, 21 nt, RNAi
ucuuauugcagcagcagaauu

SEQ ID NO: 4582 - RNA, 21 nt, RNAi
uuagaauaacgucgucgucuu

SEQ ID NO: 4583 - DNA, 21 bp, Homo sapiens
tacttggtcaacttgtctgta

SEQ ID NO: 4584 - RNA, 21 nt, RNAi
cuuggucaacuugucuguauu

SEQ ID NO: 4585 - RNA, 21 nt, RNAi
uugaaccaguugaacagacau

SEQ ID NO: 4586 - DNA, 21 bp, Homo sapiens
tacgttgtctgaaattgccaa

SEQ ID NO: 4587 - RNA, 21 nt, RNAi
cguugucugaaauugccaauu

SEQ ID NO: 4588 - RNA, 21 nt, RNAi
uugcaacagacuuuaacgguu

SEQ ID NO: 4589 - DNA, 21 bp, Homo sapiens
taaatgtcaatcgtagagaga

SEQ ID NO: 4590 - RNA, 21 nt, RNAi
aaugucaaucguagagagauu

SEQ ID NO: 4591 - RNA, 21 nt, RNAi
uuuuacaguuagcaucucucu

SEQ ID NO: 4592 - DNA, 21 bp, Homo sapiens
tattgctgcgtattggagaac

SEQ ID NO: 4593 - RNA, 21 nt, RNAi
uugcugcguauuggagaacuu

SEQ ID NO: 4594 - RNA, 21 nt, RNAi
uuaacgacgcauaaccucuug

SEQ ID NO: 4595 - DNA, 21 bp, Homo sapiens
taatggtttgtcaatacttgc

SEQ ID NO: 4596 - RNA, 21 nt, RNAi
augguuugucaauacuugcuu

SEQ ID NO: 4597 - RNA, 21 nt, RNAi
uuuaccaaacaguuaugaacg

SEQ ID NO: 4598 - DNA, 21 bp, Homo sapiens
tatcatatcacctgaactgat

SEQ ID NO: 4599 - RNA, 21 nt, RNAi
ucauaucaccugaacugauuu

SEQ ID NO: 4600 - RNA, 21 nt, RNAi
uuaguauaguggacuugacua

SEQ ID NO: 4601 - DNA, 21 bp, Homo sapiens
tatgaaggccattcaacatga

SEQ ID NO: 4602 - RNA, 21 nt, RNAi
ugaaggccauucaacaugauu

SEQ ID NO: 4603 - RNA, 21 nt, RNAi
uuacuuccgguaaguuguacu

SEQ ID NO: 4604 - DNA, 21 bp, Homo sapiens
tattcatgctcttacaagctt

SEQ ID NO: 4605 - RNA, 21 nt, RNAi
uucaugcucuuacaagcuuuu

SEQ ID NO: 4606 - RNA, 21 nt, RNAi
uuaaguacgagaauguucgaa

SEQ ID NO: 4607 - DNA, 21 bp, Homo sapiens
tagatccaggtcgattagatt

SEQ ID NO: 4608 - RNA, 21 nt, RNAi
gauccaggucgauuagauuuu

SEQ ID NO: 4609 - RNA, 21 nt, RNAi
uucuagguccagcuaaucuaa

SEQ ID NO: 4610 - DNA, 21 bp, Homo sapiens
tattgatggagctaacaagag

SEQ ID NO: 4611 - RNA, 21 nt, RNAi
uugauggagcuaacaagaguu

SEQ ID NO: 4612 - RNA, 21 nt, RNAi
uuaacuaccucgauuguucuc

SEQ ID NO: 4613 - DNA, 21 bp, Homo sapiens
taccttgcgtatgctgataat

SEQ ID NO: 4614 - RNA, 21 nt, RNAi
ccuugcguaugcugauaauuu

SEQ ID NO: 4615 - RNA, 21 nt, RNAi
uuggaacgcauacgacuauua

SEQ ID NO: 4616 - DNA, 21 bp, Homo sapiens
tatgctgataatagccgagct

SEQ ID NO: 4617 - RNA, 21 nt, RNAi
ugcugauaauagccgagcuuu

SEQ ID NO: 4618 - RNA, 21 nt, RNAi
uuacgacuauuaucggcucga

SEQ ID NO: 4619 - DNA, 21 bp, Homo sapiens
taatagccgagctcaagattc

SEQ ID NO: 4620 - RNA, 21 nt, RNAi
auagccgagcucaagauucuu

SEQ ID NO: 4621 - RNA, 21 nt, RNAi
uuuaucggcucgaguucuaag

SEQ ID NO: 4622 - DNA, 21 bp, Homo sapiens
tatgactgtagagagatggag

SEQ ID NO: 4623 - RNA, 21 nt, RNAi
ugacuguagagagauggaguu

SEQ ID NO: 4624 - RNA, 21 nt, RNAi
uuacugacaucucucuaccuc

SEQ ID NO: 4625 - DNA, 21 bp, Homo sapiens
tagaacctcatctaaatacca

SEQ ID NO: 4626 - RNA, 21 nt, RNAi
gaaccucaucuaaauaccauu

SEQ ID NO: 4627 - RNA, 21 nt, RNAi
uucuuggaguagauuuauggu

SEQ ID NO: 4628 - DNA, 21 bp, Homo sapiens
tattacaaaggttcgacatga

SEQ ID NO: 4629 - RNA, 21 nt, RNAi
uuacaaagguucgacaugauu

SEQ ID NO: 4630 - RNA, 21 nt, RNAi
uuaauguuuccaagcuguacu

SEQ ID NO: 4631 - DNA, 21 bp, Homo sapiens
tacaaaggttcgacatgatct

SEQ ID NO: 4632 - RNA, 21 nt, RNAi
caaagguucgacaugaucuuu

SEQ ID NO: 4633 - RNA, 21 nt, RNAi
uuguuuccaagcuguacuaga

SEQ ID NO: 4634 - DNA, 21 bp, Homo sapiens
taaagcatgacgatcagcata

SEQ ID NO: 4635 - RNA, 21 nt, RNAi
aagcaugacgaucagcauauu

SEQ ID NO: 4636 - RNA, 21 nt, RNAi
uuuucguacugcuagucguau

SEQ ID NO: 4637 - DNA, 21 bp, Homo sapiens
tatctactgtggattatgaag

SEQ ID NO: 4638 - RNA, 21 nt, RNAi
ucuacuguggauuaugaaguu

SEQ ID NO: 4639 - RNA, 21 nt, RNAi
uuagaugacaccuaauacuuc

SEQ ID NO: 4640 - DNA, 21 bp, Homo sapiens
tactgtggattatgaagacta

SEQ ID NO: 4641 - RNA, 21 nt, RNAi
cuguggauuaugaagacuauu

SEQ ID NO: 4642 - RNA, 21 nt, RNAi
uugacaccuaauacuucugau

SEQ ID NO: 4643 - DNA, 21 bp, Homo sapiens
tatgaagactatcagagtgta

SEQ ID NO: 4644 - RNA, 21 nt, RNAi
ugaagacuaucagaguguauu

SEQ ID NO: 4645 - RNA, 21 nt, RNAi
uuacuucugauagucucacau

SEQ ID NO: 4646 - DNA, 21 bp, Homo sapiens
tagcttcctttcgctccaaag

SEQ ID NO: 4647 - RNA, 21 nt, RNAi
gcuuccuuucgcuccaaaguu

SEQ ID NO: 4648 - RNA, 21 nt, RNAi
uucgaaggaaagcgagguuuc

SEQ ID NO: 4649 - DNA, 21 bp, Homo sapiens
tacacacgagctgtaatgcac

SEQ ID NO: 4650 - RNA, 21 nt, RNAi
cacacgagcuguaaugcacuu

SEQ ID NO: 4651 - RNA, 21 nt, RNAi
uugugugcucgacauuacgug

SEQ ID NO: 4652 - DNA, 21 bp, Homo sapiens
tacagaaattgtatgctgcta

SEQ ID NO: 4653 - RNA, 21 nt, RNAi
cagaaauuguaugcugcuauu

SEQ ID NO: 4654 - RNA, 21 nt, RNAi
uugucuuuaacauacgacgau

SEQ ID NO: 4655 - DNA, 21 bp, Homo sapiens
tatgctgctatgcatgaacct

SEQ ID NO: 4656 - RNA, 21 nt, RNAi
ugcugcuaugcaugaaccuuu

SEQ ID NO: 4657 - RNA, 21 nt, RNAi
uuacgacgauacguacuugga

SEQ ID NO: 4658 - DNA, 21 bp, Homo sapiens
tatcatggtgtagtaaagtcc

SEQ ID NO: 4659 - RNA, 21 nt, RNAi
ucaugguguaguaaaguccuu

SEQ ID NO: 4660 - RNA, 21 nt, RNAi
uuaguaccacaucauuucagg

SEQ ID NO: 4661 - DNA, 21 bp, Homo sapiens
tactgttatcactcaggtgaa

SEQ ID NO: 4662 - RNA, 21 nt, RNAi
cuguuaucacucaggugaauu

SEQ ID NO: 4663 - RNA, 21 nt, RNAi
uugacaauagugaguccacuu

SEQ ID NO: 4664 - DNA, 21 bp, Homo sapiens
tatcactcaggtgaatggagt

SEQ ID NO: 4665 - RNA, 21 nt, RNAi
ucacucaggugaauggaguuu

SEQ ID NO: 4666 - RNA, 21 nt, RNAi
uuagugaguccacuuaccuca

SEQ ID NO: 4667 - DNA, 21 bp, Homo sapiens
taaacacgtacagagtggaag

SEQ ID NO: 4668 - RNA, 21 nt, RNAi
aacacguacagaguggaaguu

SEQ ID NO: 4669 - RNA, 21 nt, RNAi
uuuugugcaugucucaccuuc

SEQ ID NO: 4670 - DNA, 21 bp, Homo sapiens
taccaacgaggatatgaatat

SEQ ID NO: 4671 - RNA, 21 nt, RNAi
ccaacgaggauaugaauauuu

SEQ ID NO: 4672 - RNA, 21 nt, RNAi
uugguugcuccuauacuuaua

SEQ ID NO: 4673 - DNA, 21 bp, Homo sapiens
taagaacatgttaatccatgg

SEQ ID NO: 4674 - RNA, 21 nt, RNAi
agaacauguuaauccaugguu

SEQ ID NO: 4675 - RNA, 21 nt, RNAi
uuucuuguacaauuagguacc

SEQ ID NO: 4676 - DNA, 21 bp, Homo sapiens
taatccatggtcgagctatgc

SEQ ID NO: 4677 - RNA, 21 nt, RNAi
auccauggucgagcuaugcuu

SEQ ID NO: 4678 - RNA, 21 nt, RNAi
uuuagguaccagcucgauacg

SEQ ID NO: 4679 - DNA, 21 bp, Homo sapiens
tatcagtcaatgccacgaatg

SEQ ID NO: 4680 - RNA, 21 nt, RNAi
ucagucaaugccacgaauguu

SEQ ID NO: 4681 - RNA, 21 nt, RNAi
uuagucaguuacggugcuuac

SEQ ID NO: 4682 - DNA, 21 bp, Homo sapiens
tatttctagcctatcctcaac

SEQ ID NO: 4683 - RNA, 21 nt, RNAi
uuucuagccuauccucaacuu

SEQ ID NO: 4684 - RNA, 21 nt, RNAi
uuaaagaucggauaggaguug

SEQ ID NO: 4685 - DNA, 21 bp, Homo sapiens
tagagaagtttgttggagatg

SEQ ID NO: 4686 - RNA, 21 nt, RNAi
gagaaguuuguuggagauguu

SEQ ID NO: 4687 - RNA, 21 nt, RNAi
uucucuucaaacaaccucuac

SEQ ID NO: 4688 - DNA, 21 bp, Homo sapiens
taagcttctagaattgtgcaa

SEQ ID NO: 4689 - RNA, 21 nt, RNAi
agcuucuagaauugugcaauu

SEQ ID NO: 4690 - RNA, 21 nt, RNAi
uuucgaagaucuuaacacguu

SEQ ID NO: 4691 - DNA, 21 bp, Homo sapiens
taaaccggttgatggaagtag

SEQ ID NO: 4692 - RNA, 21 nt, RNAi
aaccgguugauggaaguaguu

SEQ ID NO: 4693 - RNA, 21 nt, RNAi
uuuuggccaacuaccuucauc

SEQ ID NO: 4694 - DNA, 21 bp, Homo sapiens
tagttccacattaagcatgag

SEQ ID NO: 4695 - RNA, 21 nt, RNAi
guuccacauuaagcaugaguu

SEQ ID NO: 4696 - RNA, 21 nt, RNAi
uucaagguguaauucguacuc

SEQ ID NO: 4697 - DNA, 21 bp, Homo sapiens
taaccatgctagccatgaacc

SEQ ID NO: 4698 - RNA, 21 nt, RNAi
accaugcuagccaugaaccuu

SEQ ID NO: 4699 - RNA, 21 nt, RNAi
uuugguacgaucgguacuugg

SEQ ID NO: 4700 - DNA, 21 bp, Homo sapiens
tatgctaccaaagtcagcagc

SEQ ID NO: 4701 - RNA, 21 nt, RNAi
ugcuaccaaagucagcagcuu

SEQ ID NO: 4702 - RNA, 21 nt, RNAi
uuacgaugguuucagucgucg

SEQ ID NO: 4703 - DNA, 21 bp, Homo sapiens
tagtagatcagcttactgccg

SEQ ID NO: 4704 - RNA, 21 nt, RNAi
guagaucagcuuacugccguu

SEQ ID NO: 4705 - RNA, 21 nt, RNAi
uucaucuagucgaaugacggc

SEQ ID NO: 4706 - DNA, 21 bp, Homo sapiens
tagatcagcttactgccgttc

SEQ ID NO: 4707 - RNA, 21 nt, RNAi
gaucagcuuacugccguucuu

SEQ ID NO: 4708 - RNA, 21 nt, RNAi
uucuagucgaaugacggcaag

SEQ ID NO: 4709 - DNA, 21 bp, Homo sapiens
tacaatgaggctgatgcgtga

SEQ ID NO: 4710 - RNA, 21 nt, RNAi
caaugaggcugaugcgugauu

SEQ ID NO: 4711 - RNA, 21 nt, RNAi
uuguuacuccgacuacgcacu

SEQ ID NO: 4712 - DNA, 21 bp, Homo sapiens
tacatgatcctcttgtggaat

SEQ ID NO: 4713 - RNA, 21 nt, RNAi
caugauccucuuguggaauuu

SEQ ID NO: 4714 - RNA, 21 nt, RNAi
uuguacuaggagaacaccuua

SEQ ID NO: 4715 - DNA, 21 bp, Homo sapiens
taatcaagactcgaaatagag

SEQ ID NO: 4716 - RNA, 21 nt, RNAi
aucaagacucgaaauagaguu

SEQ ID NO: 4717 - RNA, 21 nt, RNAi
uuuaguucugagcuuuaucuc

SEQ ID NO: 4718 - DNA, 21 bp, Homo sapiens
aaccaggagcgcttccgcatg

SEQ ID NO: 4719 - RNA, 21 nt, RNAi
ccaggagcgcuuccgcauguu

SEQ ID NO: 4720 - RNA, 21 nt, RNAi
uugguccucgcgaaggcguac

SEQ ID NO: 4721 - DNA, 21 bp, Homo sapiens
aaagaagagctatgaccggca

SEQ ID NO: 4722 - RNA, 21 nt, RNAi
agaagagcuaugaccggcauu

SEQ ID NO: 4723 - RNA, 21 nt, RNAi
uuucuucucgauacuggccgu

SEQ ID NO: 4724 - DNA, 21 bp, Homo sapiens
aagaagagctatgaccggcag

SEQ ID NO: 4725 - RNA, 21 nt, RNAi
gaagagcuaugaccggcaguu

SEQ ID NO: 4726 - RNA, 21 nt, RNAi
uucuucucgauacuggccguc

SEQ ID NO: 4727 - DNA, 21 bp, Homo sapiens
aagagctatgaccggcagcga

SEQ ID NO: 4728 - RNA, 21 nt, RNAi
gagcuaugaccggcagcgauu

SEQ ID NO: 4729 - RNA, 21 nt, RNAi
uucucgauacuggccgucgcu

SEQ ID NO: 4730 - DNA, 21 bp, Homo sapiens
aacttcgagcggatccgcaag

SEQ ID NO: 4731 - RNA, 21 nt, RNAi
cuucgagcggauccgcaaguu

SEQ ID NO: 4732 - RNA, 21 nt, RNAi
uugaagcucgccuaggcguuc

SEQ ID NO: 4733 - DNA, 21 bp, Homo sapiens
aacgtcgagtttcaccacgag

SEQ ID NO: 4734 - RNA, 21 nt, RNAi
cgucgaguuucaccacgaguu

SEQ ID NO: 4735 - RNA, 21 nt, RNAi
uugcagcucaaaguggugcuc

SEQ ID NO: 4736 - DNA, 21 bp, Homo sapiens
aaggtcaacgacaaagaggtg

SEQ ID NO: 4737 - RNA, 21 nt, RNAi
ggucaacgacaaagagguguu

SEQ ID NO: 4738 - RNA, 21 nt, RNAi
uuccaguugcuguuucuccac

SEQ ID NO: 4739 - DNA, 21 bp, Homo sapiens
aacgacaaagaggtgtcggac

SEQ ID NO: 4740 - RNA, 21 nt, RNAi
cgacaaagaggugucggacuu

SEQ ID NO: 4741 - RNA, 21 nt, RNAi
uugcuguuucuccacagccug

SEQ ID NO: 4742 - DNA, 21 bp, Homo sapiens
aaagaggtgtcggaccgcatc

SEQ ID NO: 4743 - RNA, 21 nt, RNAi
agaggugucggaccgcaucuu

SEQ ID NO: 4744 - RNA, 21 nt, RNAi
uuucuccacagccuggcguag

SEQ ID NO: 4745 - DNA, 21 bp, Homo sapiens
aagaggtgtcggaccgcatca

SEQ ID NO: 4746 - RNA, 21 nt, RNAi
gaggugucggaccgcaucauu

SEQ ID NO: 4747 - RNA, 21 nt, RNAi
uucuccacagccuggcguagu

SEQ ID NO: 4748 - DNA, 21 bp, Homo sapiens
aaggacaacctgatcgacgcc

SEQ ID NO: 4749 - RNA, 21 nt, RNAi
ggacaaccugaucgacgccuu

SEQ ID NO: 4750 - RNA, 21 nt, RNAi
uuccuguuggacuagcugcgg

SEQ ID NO: 4751 - DNA, 21 bp, Homo sapiens
aacctgatcgacgccaatggc

SEQ ID NO: 4752 - RNA, 21 nt, RNAi
ccugaucgacgccaauggcuu

SEQ ID NO: 4753 - RNA, 21 nt, RNAi
uuggacuagcugcgguuaccg

SEQ ID NO: 4754 - DNA, 21 bp, Homo sapiens
aatgagaacctcacctccagc

SEQ ID NO: 4755 - RNA, 21 nt, RNAi
ugagaaccucaccuccagcuu

SEQ ID NO: 4756 - RNA, 21 nt, RNAi
uuacucuuggaguggaggucg

SEQ ID NO: 4757 - DNA, 21 bp, Homo sapiens
aacctcacctccagcgaggag

SEQ ID NO: 4758 - RNA, 21 nt, RNAi
ccucaccuccagcgaggaguu

SEQ ID NO: 4759 - RNA, 21 nt, RNAi
uuggaguggaggucgcuccuc

SEQ ID NO: 4760 - DNA, 21 bp, Homo sapiens
aactcgcaacagtccttcgac

SEQ ID NO: 4761 - RNA, 21 nt, RNAi
cucgcaacaguccuucgacuu

SEQ ID NO: 4762 - RNA, 21 nt, RNAi
uugagcguugucaggaagcug

SEQ ID NO: 4763 - DNA, 21 bp, Homo sapiens
aacagtccttcgacagcagca

SEQ ID NO: 4764 - RNA, 21 nt, RNAi
caguccuucgacagcagcauu

SEQ ID NO: 4765 - RNA, 21 nt, RNAi
uugucaggaagcugucgucgu

SEQ ID NO: 4766 - DNA, 21 bp, Homo sapiens
aacaccacctggatacggctg

SEQ ID NO: 4767 - RNA, 21 nt, RNAi
caccaccuggauacggcuguu

SEQ ID NO: 4768 - RNA, 21 nt, RNAi
uugugguggaccuaugccgac

SEQ ID NO: 4769 - DNA, 21 bp, Homo sapiens
aaagcgagtgagctggacttg

SEQ ID NO: 4770 - RNA, 21 nt, RNAi
agcgagugagcuggacuuguu

SEQ ID NO: 4771 - RNA, 21 nt, RNAi
uuucgcucacucgaccugaac

SEQ ID NO: 4772 - DNA, 21 bp, Homo sapiens
aagcgagtgagctggacttgg

SEQ ID NO: 4773 - RNA, 21 nt, RNAi
gcgagugagcuggacuugguu

SEQ ID NO: 4774 - RNA, 21 nt, RNAi
uucgcucacucgaccugaacc

SEQ ID NO: 4775 - DNA, 21 bp, Homo sapiens
aatcctggctagcgaggagac

SEQ ID NO: 4776 - RNA, 21 nt, RNAi
uccuggcuagcgaggagacuu

SEQ ID NO: 4777 - RNA, 21 nt, RNAi
uuaggaccgaucgcuccucug

SEQ ID NO: 4778 - DNA, 21 bp, Homo sapiens
aagcctttgaaagccgctgcc

SEQ ID NO: 4779 - RNA, 21 nt, RNAi
gccuuugaaagccgcugccuu

SEQ ID NO: 4780 - RNA, 21 nt, RNAi
uucggaaacuuucggcgacgg

SEQ ID NO: 4781 - DNA, 21 bp, Homo sapiens
aaagccgctgccaccacctct

SEQ ID NO: 4782 - RNA, 21 nt, RNAi
agccgcugccaccaccucuuu

SEQ ID NO: 4783 - RNA, 21 nt, RNAi
uuucggcgacggugguggaga

SEQ ID NO: 4784 - DNA, 21 bp, Homo sapiens
aaagtgcctgagctctacgag

SEQ ID NO: 4785 - RNA, 21 nt, RNAi
agugccugagcucuacgaguu

SEQ ID NO: 4786 - RNA, 21 nt, RNAi
uuucacggacucgagaugcuc

SEQ ID NO: 4787 - DNA, 21 bp, Homo sapiens
aagtgcctgagctctacgaga

SEQ ID NO: 4788 - RNA, 21 nt, RNAi
gugccugagcucuacgagauu

SEQ ID NO: 4789 - RNA, 21 nt, RNAi
uucacggacucgagaugcucu

SEQ ID NO: 4790 - DNA, 21 bp, Homo sapiens
aactacggagttgccatggaa

SEQ ID NO: 4791 - RNA, 21 nt, RNAi
cuacggaguugccauggaauu

SEQ ID NO: 4792 - RNA, 21 nt, RNAi
uugaugccucaacgguaccuu

SEQ ID NO: 4793 - DNA, 21 bp, Homo sapiens
aaatggctgagaagtgctgtc

SEQ ID NO: 4794 - RNA, 21 nt, RNAi
auggcugagaagugcugucuu

SEQ ID NO: 4795 - RNA, 21 nt, RNAi
uuuaccgacucuucacgacag

SEQ ID NO: 4796 - DNA, 21 bp, Homo sapiens
aatggctgagaagtgctgtca

SEQ ID NO: 4797 - RNA, 21 nt, RNAi
uggcugagaagugcugucauu

SEQ ID NO: 4798 - RNA, 21 nt, RNAi
uuaccgacucuucacgacagu

SEQ ID NO: 4799 - DNA, 21 bp, Homo sapiens
aagtgctgtcaggccaatgct

SEQ ID NO: 4800 - RNA, 21 nt, RNAi
gugcugucaggccaaugcuuu

SEQ ID NO: 4801 - RNA, 21 nt, RNAi
uucacgacaguccgguuacga

SEQ ID NO: 4802 - DNA, 21 bp, Homo sapiens
aatgctcagtttgcagaaatc

SEQ ID NO: 4803 - RNA, 21 nt, RNAi
ugcucaguuugcagaaaucuu

SEQ ID NO: 4804 - RNA, 21 nt, RNAi
uuacgagucaaacgucuuuag

SEQ ID NO: 4805 - DNA, 21 bp, Homo sapiens
aaatctccgagaacctgagag

SEQ ID NO: 4806 - RNA, 21 nt, RNAi
aucuccgagaaccugagaguu

SEQ ID NO: 4807 - RNA, 21 nt, RNAi
uuuagaggcucuuggacucuc

SEQ ID NO: 4808 - DNA, 21 bp, Homo sapiens
aatctccgagaacctgagagc

SEQ ID NO: 4809 - RNA, 21 nt, RNAi
ucuccgagaaccugagagcuu

SEQ ID NO: 4810 - RNA, 21 nt, RNAi
uuagaggcucuuggacucucg

SEQ ID NO: 4811 - DNA, 21 bp, Homo sapiens
aacctgagagccagaagcaac

SEQ ID NO: 4812 - RNA, 21 nt, RNAi
ccugagagccagaagcaacuu

SEQ ID NO: 4813 - RNA, 21 nt, RNAi
uuggacucucggucuucguug

SEQ ID NO: 4814 - DNA, 21 bp, Homo sapiens
aagcaacaaagatgccaagga

SEQ ID NO: 4815 - RNA, 21 nt, RNAi
gcaacaaagaugccaaggauu

SEQ ID NO: 4816 - RNA, 21 nt, RNAi
uucguuguuucuacgguuccu

SEQ ID NO: 4817 - DNA, 21 bp, Homo sapiens
aacaaagatgccaaggatcca

SEQ ID NO: 4818 - RNA, 21 nt, RNAi
caaagaugccaaggauccauu

SEQ ID NO: 4819 - RNA, 21 nt, RNAi
uuguuucuacgguuccuaggu

SEQ ID NO: 4820 - DNA, 21 bp, Homo sapiens
aaagatgccaaggatccaacg

SEQ ID NO: 4821 - RNA, 21 nt, RNAi
agaugccaaggauccaacguu

SEQ ID NO: 4822 - RNA, 21 nt, RNAi
uuucuacgguuccuagguugc

SEQ ID NO: 4823 - DNA, 21 bp, Homo sapiens
aagatgccaaggatccaacga

SEQ ID NO: 4824 - RNA, 21 nt, RNAi
gaugccaaggauccaacgauu

SEQ ID NO: 4825 - RNA, 21 nt, RNAi
uucuacgguuccuagguugcu

SEQ ID NO: 4826 - DNA, 21 bp, Homo sapiens
aaggatccaacgaccaagaac

SEQ ID NO: 4827 - RNA, 21 nt, RNAi
ggauccaacgaccaagaacuu

SEQ ID NO: 4828 - RNA, 21 nt, RNAi
uuccuagguugcugguucuug

SEQ ID NO: 4829 - DNA, 21 bp, Homo sapiens
aacgaccaagaactctctgga

SEQ ID NO: 4830 - RNA, 21 nt, RNAi
cgaccaagaacucucuggauu

SEQ ID NO: 4831 - RNA, 21 nt, RNAi
uugcugguucuugagagaccu

SEQ ID NO: 4832 - DNA, 21 bp, Homo sapiens
aagaactctctggaaactctg

SEQ ID NO: 4833 - RNA, 21 nt, RNAi
gaacucucuggaaacucuguu

SEQ ID NO: 4834 - RNA, 21 nt, RNAi
uucuugagagaccuuugagac

SEQ ID NO: 4835 - DNA, 21 bp, Homo sapiens
aactctctggaaactctgctc

SEQ ID NO: 4836 - RNA, 21 nt, RNAi
cucucuggaaacucugcucuu

SEQ ID NO: 4837 - RNA, 21 nt, RNAi
uugagagaccuuugagacgag

SEQ ID NO: 4838 - DNA, 21 bp, Homo sapiens
aaactctgctctacaagcctg

SEQ ID NO: 4839 - RNA, 21 nt, RNAi
acucugcucuacaagccuguu

SEQ ID NO: 4840 - RNA, 21 nt, RNAi
uuugagacgagauguucggac

SEQ ID NO: 4841 - DNA, 21 bp, Homo sapiens
aactctgctctacaagcctgt

SEQ ID NO: 4842 - RNA, 21 nt, RNAi
cucugcucuacaagccuguuu

SEQ ID NO: 4843 - RNA, 21 nt, RNAi
uugagacgagauguucggaca

SEQ ID NO: 4844 - DNA, 21 bp, Homo sapiens
aagcctgtggaccgtgtgacg

SEQ ID NO: 4845 - RNA, 21 nt, RNAi
gccuguggaccgugugacguu

SEQ ID NO: 4846 - RNA, 21 nt, RNAi
uucggacaccuggcacacugc

SEQ ID NO: 4847 - DNA, 21 bp, Homo sapiens
aagcacactcctgccagccac

SEQ ID NO: 4848 - RNA, 21 nt, RNAi
gcacacuccugccagccacuu

SEQ ID NO: 4849 - RNA, 21 nt, RNAi
uucgugugaggacggucggug

SEQ ID NO: 4850 - DNA, 21 bp, Homo sapiens
aacttcctgtccagcatcaat

SEQ ID NO: 4851 - RNA, 21 nt, RNAi
cuuccuguccagcaucaauuu

SEQ ID NO: 4852 - RNA, 21 nt, RNAi
uugaaggacaggucguaguua

SEQ ID NO: 4853 - DNA, 21 bp, Homo sapiens
aaggacagcttcatggtggag

SEQ ID NO: 4854 - RNA, 21 nt, RNAi
ggacagcuucaugguggaguu

SEQ ID NO: 4855 - RNA, 21 nt, RNAi
uuccugucgaaguaccaccuc

SEQ ID NO: 4856 - DNA, 21 bp, Homo sapiens
aagctgcgccacgtcttcctg

SEQ ID NO: 4857 - RNA, 21 nt, RNAi
gcugcgccacgucuuccuguu

SEQ ID NO: 4858 - RNA, 21 nt, RNAi
uucgacgcggugcagaaggac

SEQ ID NO: 4859 - DNA, 21 bp, Homo sapiens
aagctcaagaagcagagcgga

SEQ ID NO: 4860 - RNA, 21 nt, RNAi
gcucaagaagcagagcggauu

SEQ ID NO: 4861 - RNA, 21 nt, RNAi
uucgaguucuucgucucgccu

SEQ ID NO: 4862 - DNA, 21 bp, Homo sapiens
aagaagcagagcggaggcaaa

SEQ ID NO: 4863 - RNA, 21 nt, RNAi
gaagcagagcggaggcaaauu

SEQ ID NO: 4864 - RNA, 21 nt, RNAi
uucuucgucucgccuccguuu

SEQ ID NO: 4865 - DNA, 21 bp, Homo sapiens
aaacgcagcagtatgactgca

SEQ ID NO: 4866 - RNA, 21 nt, RNAi
acgcagcaguaugacugcauu

SEQ ID NO: 4867 - RNA, 21 nt, RNAi
uuugcgucgucauacugacgu

SEQ ID NO: 4868 - DNA, 21 bp, Homo sapiens
aacgcagcagtatgactgcaa

SEQ ID NO: 4869 - RNA, 21 nt, RNAi
cgcagcaguaugacugcaauu

SEQ ID NO: 4870 - RNA, 21 nt, RNAi
uugcgucgucauacugacguu

SEQ ID NO: 4871 - DNA, 21 bp, Homo sapiens
aaatggtacattccgctcacg

SEQ ID NO: 4872 - RNA, 21 nt, RNAi
augguacauuccgcucacguu

SEQ ID NO: 4873 - RNA, 21 nt, RNAi
uuuaccauguaaggcgagugc

SEQ ID NO: 4874 - DNA, 21 bp, Homo sapiens
aatggtacattccgctcacgg

SEQ ID NO: 4875 - RNA, 21 nt, RNAi
ugguacauuccgcucacgguu

SEQ ID NO: 4876 - RNA, 21 nt, RNAi
uuaccauguaaggcgagugcc

SEQ ID NO: 4877 - DNA, 21 bp, Homo sapiens
aagagtgacatccagagagag

SEQ ID NO: 4878 - RNA, 21 nt, RNAi
gagugacauccagagagaguu

SEQ ID NO: 4879 - RNA, 21 nt, RNAi
uucucacuguaggucucucuc

SEQ ID NO: 4880 - DNA, 21 bp, Homo sapiens
aaggctacggagaggctgaag

SEQ ID NO: 4881 - RNA, 21 nt, RNAi
ggcuacggagaggcugaaguu

SEQ ID NO: 4882 - RNA, 21 nt, RNAi
uuccgaugccucuccgacuuc

SEQ ID NO: 4883 - DNA, 21 bp, Homo sapiens
aagaagaagctgtcggagcag

SEQ ID NO: 4884 - RNA, 21 nt, RNAi
gaagaagcugucggagcaguu

SEQ ID NO: 4885 - RNA, 21 nt, RNAi
uucuucuucgacagccucguc

SEQ ID NO: 4886 - DNA, 21 bp, Homo sapiens
aagaagctgtcggagcaggag

SEQ ID NO: 4887 - RNA, 21 nt, RNAi
gaagcugucggagcaggaguu

SEQ ID NO: 4888 - RNA, 21 nt, RNAi
uucuucgacagccucguccuc

SEQ ID NO: 4889 - DNA, 21 bp, Homo sapiens
aagctgtcggagcaggagtca

SEQ ID NO: 4890 - RNA, 21 nt, RNAi
gcugucggagcaggagucauu

SEQ ID NO: 4891 - RNA, 21 nt, RNAi
uucgacagccucguccucagu

SEQ ID NO: 4892 - DNA, 21 bp, Homo sapiens
aacggcaagagttacacgttc

SEQ ID NO: 4893 - RNA, 21 nt, RNAi
cggcaagaguuacacguucuu

SEQ ID NO: 4894 - RNA, 21 nt, RNAi
uugccguucucaaugugcaag

SEQ ID NO: 4895 - DNA, 21 bp, Homo sapiens
aagagttacacgttcctgatc

SEQ ID NO: 4896 - RNA, 21 nt, RNAi
gaguuacacguuccugaucuu

SEQ ID NO: 4897 - RNA, 21 nt, RNAi
uucucaaugugcaaggacuag

SEQ ID NO: 4898 - DNA, 21 bp, Homo sapiens
aagaagtgtttcagaagcttc

SEQ ID NO: 4899 - RNA, 21 nt, RNAi
gaaguguuucagaagcuucuu

SEQ ID NO: 4900 - RNA, 21 nt, RNAi
uucuucacaaagucuucgaag

SEQ ID NO: 4901 - DNA, 21 bp, Homo sapiens
aagtgtttcagaagcttctcc

SEQ ID NO: 4902 - RNA, 21 nt, RNAi
guguuucagaagcuucuccuu

SEQ ID NO: 4903 - RNA, 21 nt, RNAi
uucacaaagucuucgaagagg

SEQ ID NO: 4904 - DNA, 21 bp, Homo sapiens
aactcgtgtgtgaaactccag

SEQ ID NO: 4905 - RNA, 21 nt, RNAi
cucgugugugaaacuccaguu

SEQ ID NO: 4906 - RNA, 21 nt, RNAi
uugagcacacacuuugagguc

SEQ ID NO: 4907 - DNA, 21 bp, Homo sapiens
aaactccagactgtccacagc

SEQ ID NO: 4908 - RNA, 21 nt, RNAi
acuccagacuguccacagcuu

SEQ ID NO: 4909 - RNA, 21 nt, RNAi
uuugaggucugacaggugucg

SEQ ID NO: 4910 - DNA, 21 bp, Homo sapiens
aactccagactgtccacagca

SEQ ID NO: 4911 - RNA, 21 nt, RNAi
cuccagacuguccacagcauu

SEQ ID NO: 4912 - RNA, 21 nt, RNAi
uugaggucugacaggugucgu

SEQ ID NO: 4913 - DNA, 21 bp, Homo sapiens
aataaggaagatgatgagtct

SEQ ID NO: 4914 - RNA, 21 nt, RNAi
uaaggaagaugaugagucuuu

SEQ ID NO: 4915 - RNA, 21 nt, RNAi
uuauuccuucuacuacucaga

SEQ ID NO: 4916 - DNA, 21 bp, Homo sapiens
aaggaagatgatgagtctccg

SEQ ID NO: 4917 - RNA, 21 nt, RNAi
ggaagaugaugagucuccguu

SEQ ID NO: 4918 - RNA, 21 nt, RNAi
uuccuucuacuacucagaggc

SEQ ID NO: 4919 - DNA, 21 bp, Homo sapiens
aatgtcatcgtccactcagcc

SEQ ID NO: 4920 - RNA, 21 nt, RNAi
ugucaucguccacucagccuu

SEQ ID NO: 4921 - RNA, 21 nt, RNAi
uuacaguagcaggugagucgg

SEQ ID NO: 4922 - DNA, 21 bp, Homo sapiens
aagcagagttcaaatctgtac

SEQ ID NO: 4923 - RNA, 21 nt, RNAi
gcagaguucaaaucuguacuu

SEQ ID NO: 4924 - RNA, 21 nt, RNAi
uucgucucaaguuuagacaug

SEQ ID NO: 4925 - DNA, 21 bp, Homo sapiens
aataaagcaaagacgcgcgtc

SEQ ID NO: 4926 - RNA, 21 nt, RNAi
uaaagcaaagacgcgcgucuu

SEQ ID NO: 4927 - RNA, 21 nt, RNAi
uuauuucguuucugcgcgcag

SEQ ID NO: 4928 - DNA, 21 bp, Homo sapiens
aaagcaaagacgcgcgtctac

SEQ ID NO: 4929 - RNA, 21 nt, RNAi
agcaaagacgcgcgucuacuu

SEQ ID NO: 4930 - RNA, 21 nt, RNAi
uuucguuucugcgcgcagaug

SEQ ID NO: 4931 - DNA, 21 bp, Homo sapiens
aagcaaagacgcgcgtctaca

SEQ ID NO: 4932 - RNA, 21 nt, RNAi
gcaaagacgcgcgucuacauu

SEQ ID NO: 4933 - RNA, 21 nt, RNAi
uucguuucugcgcgcagaugu

SEQ ID NO: 4934 - DNA, 21 bp, Homo sapiens
aaactggaacgaggaatttga

SEQ ID NO: 4935 - RNA, 21 nt, RNAi
acuggaacgaggaauuugauu

SEQ ID NO: 4936 - RNA, 21 nt, RNAi
uuugaccuugcuccuuaaacu

SEQ ID NO: 4937 - DNA, 21 bp, Homo sapiens
aactggaacgaggaatttgag

SEQ ID NO: 4938 - RNA, 21 nt, RNAi
cuggaacgaggaauuugaguu

SEQ ID NO: 4939 - RNA, 21 nt, RNAi
uugaccuugcuccuuaaacuc

SEQ ID NO: 4940 - DNA, 21 bp, Homo sapiens
aacgaggaatttgagatagag

SEQ ID NO: 4941 - RNA, 21 nt, RNAi
cgaggaauuugagauagaguu

SEQ ID NO: 4942 - RNA, 21 nt, RNAi
uugcuccuuaaacucuaucuc

SEQ ID NO: 4943 - DNA, 21 bp, Homo sapiens
aatttgagatagagctggagg

SEQ ID NO: 4944 - RNA, 21 nt, RNAi
uuugagauagagcuggagguu

SEQ ID NO: 4945 - RNA, 21 nt, RNAi
uuaaacucuaucucgaccucc

SEQ ID NO: 4946 - DNA, 21 bp, Homo sapiens
aaagtgttacaacaagacgaa

SEQ ID NO: 4947 - RNA, 21 nt, RNAi
aguguuacaacaagacgaauu

SEQ ID NO: 4948 - RNA, 21 nt, RNAi
uuucacaauguuguucugcuu

SEQ ID NO: 4949 - DNA, 21 bp, Homo sapiens
aagtgttacaacaagacgaag

SEQ ID NO: 4950 - RNA, 21 nt, RNAi
guguuacaacaagacgaaguu

SEQ ID NO: 4951 - RNA, 21 nt, RNAi
uucacaauguuguucugcuuc

SEQ ID NO: 4952 - DNA, 21 bp, Homo sapiens
aagtaaagctctcggtcaagt

SEQ ID NO: 4953 - RNA, 21 nt, RNAi
guaaagcucucggucaaguuu

SEQ ID NO: 4954 - RNA, 21 nt, RNAi
uucauuucgagagccaguuca

SEQ ID NO: 4955 - DNA, 21 bp, Homo sapiens
aaagctctcggtcaagttcaa

SEQ ID NO: 4956 - RNA, 21 nt, RNAi
agcucucggucaaguucaauu

SEQ ID NO: 4957 - RNA, 21 nt, RNAi
uuucgagagccaguucaaguu

SEQ ID NO: 4958 - DNA, 21 bp, Homo sapiens
aagctctcggtcaagttcaac

SEQ ID NO: 4959 - RNA, 21 nt, RNAi
gcucucggucaaguucaacuu

SEQ ID NO: 4960 - RNA, 21 nt, RNAi
uucgagagccaguucaaguug

SEQ ID NO: 4961 - DNA, 21 bp, Homo sapiens
aagattgctgtggtcaccaag

SEQ ID NO: 4962 - RNA, 21 nt, RNAi
gauugcuguggucaccaaguu

SEQ ID NO: 4963 - RNA, 21 nt, RNAi
uucuaacgacaccagugguuc

SEQ ID NO: 4964 - DNA, 21 bp, Homo sapiens
aagagagagaggtccaaggtg

SEQ ID NO: 4965 - RNA, 21 nt, RNAi
gagagagagguccaagguguu

SEQ ID NO: 4966 - RNA, 21 nt, RNAi
uucucucucuccagguuccac

SEQ ID NO: 4967 - DNA, 21 bp, Homo sapiens
aaggcagccttcgacgtcaat

SEQ ID NO: 4968 - RNA, 21 nt, RNAi
ggcagccuucgacgucaauuu

SEQ ID NO: 4969 - RNA, 21 nt, RNAi
uuccgucggaagcugcaguua

SEQ ID NO: 4970 - DNA, 21 bp, Homo sapiens
aataacaaggatgtgtcggtg

SEQ ID NO: 4971 - RNA, 21 nt, RNAi
uaacaaggaugugucgguguu

SEQ ID NO: 4972 - RNA, 21 nt, RNAi
uuauuguuccuacacagccac

SEQ ID NO: 4973 - DNA, 21 bp, Homo sapiens
aacaaggatgtgtcggtgatg

SEQ ID NO: 4974 - RNA, 21 nt, RNAi
caaggaugugucggugauguu

SEQ ID NO: 4975 - RNA, 21 nt, RNAi
uuguuccuacacagccacuac

SEQ ID NO: 4976 - DNA, 21 bp, Homo sapiens
aaggatgtgtcggtgatgatg

SEQ ID NO: 4977 - RNA, 21 nt, RNAi
ggaugugucggugaugauguu

SEQ ID NO: 4978 - RNA, 21 nt, RNAi
uuccuacacagccacuacuac

SEQ ID NO: 4979 - DNA, 21 bp, Homo sapiens
aagctgtacttccgtgagctg

SEQ ID NO: 4980 - RNA, 21 nt, RNAi
gcuguacuuccgugagcuguu

SEQ ID NO: 4981 - RNA, 21 nt, RNAi
uucgacaugaaggcacucgac

SEQ ID NO: 4982 - DNA, 21 bp, Homo sapiens
aaaggagagctgcatgctcaa

SEQ ID NO: 4983 - RNA, 21 nt, RNAi
aggagagcugcaugcucaauu

SEQ ID NO: 4984 - RNA, 21 nt, RNAi
uuuccucucgacguacgaguu

SEQ ID NO: 4985 - DNA, 21 bp, Homo sapiens
aaggagagctgcatgctcaac

SEQ ID NO: 4986 - RNA, 21 nt, RNAi
ggagagcugcaugcucaacuu

SEQ ID NO: 4987 - RNA, 21 nt, RNAi
uuccucucgacguacgaguug

SEQ ID NO: 4988 - DNA, 21 bp, Homo sapiens
aaggaggcagtcaataagatg

SEQ ID NO: 4989 - RNA, 21 nt, RNAi
ggaggcagucaauaagauguu

SEQ ID NO: 4990 - RNA, 21 nt, RNAi
uuccuccgucaguuauucuac

SEQ ID NO: 4991 - DNA, 21 bp, Homo sapiens
aacctcgccacggtctttggc

SEQ ID NO: 4992 - RNA, 21 nt, RNAi
ccucgccacggucuuuggcuu

SEQ ID NO: 4993 - RNA, 21 nt, RNAi
uuggagcggugccagaaaccg

SEQ ID NO: 4994 - DNA, 21 bp, Homo sapiens
aagagacagagcatcctgttc

SEQ ID NO: 4995 - RNA, 21 nt, RNAi
gagacagagcauccuguucuu

SEQ ID NO: 4996 - RNA, 21 nt, RNAi
uucucugucucguaggacaag

SEQ ID NO: 4997 - DNA, 21 bp, Homo sapiens
aaccttcctgaggtgtccttg

SEQ ID NO: 4998 - RNA, 21 nt, RNAi
ccuuccugagguguccuuguu

SEQ ID NO: 4999 - RNA, 21 nt, RNAi
uuggaaggacuccacaggaac

SEQ ID NO: 5000 - DNA, 21 bp, Homo sapiens
aaagccgaaggacaggtggcc

SEQ ID NO: 5001 - RNA, 21 nt, RNAi
agccgaaggacagguggccuu

SEQ ID NO: 5002 - RNA, 21 nt, RNAi
uuucggcuuccuguccaccgg

SEQ ID NO: 5003 - DNA, 21 bp, Homo sapiens
aagccgaaggacaggtggcct

SEQ ID NO: 5004 - RNA, 21 nt, RNAi
gccgaaggacagguggccuuu

SEQ ID NO: 5005 - RNA, 21 nt, RNAi
uucggcuuccuguccaccgga

SEQ ID NO: 5006 - DNA, 21 bp, Homo sapiens
aagccagttcatctcagagtc

SEQ ID NO: 5007 - RNA, 21 nt, RNAi
gccaguucaucucagagucuu

SEQ ID NO: 5008 - RNA, 21 nt, RNAi
uucggucaaguagagucucag

SEQ ID NO: 5009 - DNA, 21 bp, Homo sapiens
aaagatttctactggatcact

SEQ ID NO: 5010 - RNA, 21 nt, RNAi
agauuucuacuggaucacuuu

SEQ ID NO: 5011 - RNA, 21 nt, RNAi
uuucuaaagaugaccuaguga

SEQ ID NO: 5012 - DNA, 21 bp, Homo sapiens
aagatttctactggatcactt

SEQ ID NO: 5013 - RNA, 21 nt, RNAi
gauuucuacuggaucacuuuu

SEQ ID NO: 5014 - RNA, 21 nt, RNAi
uucuaaagaugaccuagugaa

SEQ ID NO: 5015 - DNA, 21 bp, Homo sapiens
aataaacgctgctgcttcatc

SEQ ID NO: 5016 - RNA, 21 nt, RNAi
uaaacgcugcugcuucaucuu

SEQ ID NO: 5017 - RNA, 21 nt, RNAi
uuauuugcgacgacgaaguag

SEQ ID NO: 5018 - DNA, 21 bp, Homo sapiens
aaacgctgctgcttcatcctg

SEQ ID NO: 5019 - RNA, 21 nt, RNAi
acgcugcugcuucauccuguu

SEQ ID NO: 5020 - RNA, 21 nt, RNAi
uuugcgacgacgaaguaggac

SEQ ID NO: 5021 - DNA, 21 bp, Homo sapiens
caggagcgcttccgcatgatc

SEQ ID NO: 5022 - RNA, 21 nt, RNAi
ggagcgcuuccgcaugaucuu

SEQ ID NO: 5023 - RNA, 21 nt, RNAi
uuccucgcgaaggcguacuag

SEQ ID NO: 5024 - DNA, 21 bp, Homo sapiens
catgatctacctgcagacgtt

SEQ ID NO: 5025 - RNA, 21 nt, RNAi
ugaucuaccugcagacguuuu

SEQ ID NO: 5026 - RNA, 21 nt, RNAi
uuacuagauggacgucugcaa

SEQ ID NO: 5027 - DNA, 21 bp, Homo sapiens
cagacgttgctggccaaggaa

SEQ ID NO: 5028 - RNA, 21 nt, RNAi
gacguugcuggccaaggaauu

SEQ ID NO: 5029 - RNA, 21 nt, RNAi
uucugcaacgaccgguuccuu

SEQ ID NO: 5030 - DNA, 21 bp, Homo sapiens
caggtccaacttcgagcggat

SEQ ID NO: 5031 - RNA, 21 nt, RNAi
gguccaacuucgagcggauuu

SEQ ID NO: 5032 - RNA, 21 nt, RNAi
uuccagguugaagcucgccua

SEQ ID NO: 5033 - DNA, 21 bp, Homo sapiens
caacttcgagcggatccgcaa

SEQ ID NO: 5034 - RNA, 21 nt, RNAi
acuucgagcggauccgcaauu

SEQ ID NO: 5035 - RNA, 21 nt, RNAi
uuugaagcucgccuaggcguu

SEQ ID NO: 5036 - DNA, 21 bp, Homo sapiens
caacgacaaagaggtgtcgga

SEQ ID NO: 5037 - RNA, 21 nt, RNAi
acgacaaagaggugucggauu

SEQ ID NO: 5038 - RNA, 21 nt, RNAi
uuugcuguuucuccacagccu

SEQ ID NO: 5039 - DNA, 21 bp, Homo sapiens
caaagaggtgtcggaccgcat

SEQ ID NO: 5040 - RNA, 21 nt, RNAi
aagaggugucggaccgcauuu

SEQ ID NO: 5041 - RNA, 21 nt, RNAi
uuuucuccacagccuggcgua

SEQ ID NO: 5042 - DNA, 21 bp, Homo sapiens
cagccaggccatgcagatgga

SEQ ID NO: 5043 - RNA, 21 nt, RNAi
gccaggccaugcagauggauu

SEQ ID NO: 5044 - RNA, 21 nt, RNAi
uucgguccgguacgucuaccu

SEQ ID NO: 5045 - DNA, 21 bp, Homo sapiens
caacctgatcgacgccaatgg

SEQ ID NO: 5046 - RNA, 21 nt, RNAi
accugaucgacgccaaugguu

SEQ ID NO: 5047 - RNA, 21 nt, RNAi
uuuggacuagcugcgguuacc

SEQ ID NO: 5048 - DNA, 21 bp, Homo sapiens
cagccagagcacctctgagca

SEQ ID NO: 5049 - RNA, 21 nt, RNAi
gccagagcaccucugagcauu

SEQ ID NO: 5050 - RNA, 21 nt, RNAi
uucggucucguggagacucgu

SEQ ID NO: 5051 - DNA, 21 bp, Homo sapiens
cagagcacctctgagcaggag

SEQ ID NO: 5052 - RNA, 21 nt, RNAi
gagcaccucugagcaggaguu

SEQ ID NO: 5053 - RNA, 21 nt, RNAi
uucucguggagacucguccuc

SEQ ID NO: 5054 - DNA, 21 bp, Homo sapiens
cacctctgagcaggagaagcg

SEQ ID NO: 5055 - RNA, 21 nt, RNAi
ccucugagcaggagaagcguu

SEQ ID NO: 5056 - RNA, 21 nt, RNAi
uuggagacucguccucuucgc

SEQ ID NO: 5057 - DNA, 21 bp, Homo sapiens
caggagaagcgccttacctgg

SEQ ID NO: 5058 - RNA, 21 nt, RNAi
ggagaagcgccuuaccugguu

SEQ ID NO: 5059 - RNA, 21 nt, RNAi
uuccucuucgcggaauggacc

SEQ ID NO: 5060 - DNA, 21 bp, Homo sapiens
cagctccaatgagaacctcac

SEQ ID NO: 5061 - RNA, 21 nt, RNAi
gcuccaaugagaaccucacuu

SEQ ID NO: 5062 - RNA, 21 nt, RNAi
uucgagguuacucuuggagug

SEQ ID NO: 5063 - DNA, 21 bp, Homo sapiens
caatgagaacctcacctccag

SEQ ID NO: 5064 - RNA, 21 nt, RNAi
augagaaccucaccuccaguu

SEQ ID NO: 5065 - RNA, 21 nt, RNAi
uuuacucuuggaguggagguc

SEQ ID NO: 5066 - DNA, 21 bp, Homo sapiens
cacctccagcgaggaggactt

SEQ ID NO: 5067 - RNA, 21 nt, RNAi
ccuccagcgaggaggacuuuu

SEQ ID NO: 5068 - RNA, 21 nt, RNAi
uuggaggucgcuccuccugaa

SEQ ID NO: 5069 - DNA, 21 bp, Homo sapiens
cagcgaggaggacttctcctc

SEQ ID NO: 5070 - RNA, 21 nt, RNAi
gcgaggaggacuucuccucuu

SEQ ID NO: 5071 - RNA, 21 nt, RNAi
uucgcuccuccugaagaggag

SEQ ID NO: 5072 - DNA, 21 bp, Homo sapiens
caccacctaccgcatgttccg

SEQ ID NO: 5073 - RNA, 21 nt, RNAi
ccaccuaccgcauguuccguu

SEQ ID NO: 5074 - RNA, 21 nt, RNAi
uugguggauggcguacaaggc

SEQ ID NO: 5075 - DNA, 21 bp, Homo sapiens
cagaactcgcaacagtccttc

SEQ ID NO: 5076 - RNA, 21 nt, RNAi
gaacucgcaacaguccuucuu

SEQ ID NO: 5077 - RNA, 21 nt, RNAi
uucuugagcguugucaggaag

SEQ ID NO: 5078 - DNA, 21 bp, Homo sapiens
caacagtccttcgacagcagc

SEQ ID NO: 5079 - RNA, 21 nt, RNAi
acaguccuucgacagcagcuu

SEQ ID NO: 5080 - RNA, 21 nt, RNAi
uuugucaggaagcugucgucg

SEQ ID NO: 5081 - DNA, 21 bp, Homo sapiens
cagtccttcgacagcagcagt

SEQ ID NO: 5082 - RNA, 21 nt, RNAi
guccuucgacagcagcaguuu

SEQ ID NO: 5083 - RNA, 21 nt, RNAi
uucaggaagcugucgucguca

SEQ ID NO: 5084 - DNA, 21 bp, Homo sapiens
catggagacgcagatggctcg

SEQ ID NO: 5085 - RNA, 21 nt, RNAi
uggagacgcagauggcucguu

SEQ ID NO: 5086 - RNA, 21 nt, RNAi
uuaccucugcgucuaccgagc

SEQ ID NO: 5087 - DNA, 21 bp, Homo sapiens
cagatggctcgttcggaacac

SEQ ID NO: 5088 - RNA, 21 nt, RNAi
gauggcucguucggaacacuu

SEQ ID NO: 5089 - RNA, 21 nt, RNAi
uucuaccgagcaagccuugug

SEQ ID NO: 5090 - DNA, 21 bp, Homo sapiens
cactaaagcgagtgagctgga

SEQ ID NO: 5091 - RNA, 21 nt, RNAi
cuaaagcgagugagcuggauu

SEQ ID NO: 5092 - RNA, 21 nt, RNAi
uugauuucgcucacucgaccu

SEQ ID NO: 5093 - DNA, 21 bp, Homo sapiens
catgaagcctttgaaagccgc

SEQ ID NO: 5094 - RNA, 21 nt, RNAi
ugaagccuuugaaagccgcuu

SEQ ID NO: 5095 - RNA, 21 nt, RNAi
uuacuucggaaacuuucggcg

SEQ ID NO: 5096 - DNA, 21 bp, Homo sapiens
cagcagatcgagaccatcttc

SEQ ID NO: 5097 - RNA, 21 nt, RNAi
gcagaucgagaccaucuucuu

SEQ ID NO: 5098 - RNA, 21 nt, RNAi
uucgucuagcucugguagaag

SEQ ID NO: 5099 - DNA, 21 bp, Homo sapiens
cagatcgagaccatcttcttc

SEQ ID NO: 5100 - RNA, 21 nt, RNAi
gaucgagaccaucuucuucuu

SEQ ID NO: 5101 - RNA, 21 nt, RNAi
uucuagcucugguagaagaag

SEQ ID NO: 5102 - DNA, 21 bp, Homo sapiens
catcttcttcaaagtgcctga

SEQ ID NO: 5103 - RNA, 21 nt, RNAi
ucuucuucaaagugccugauu

SEQ ID NO: 5104 - RNA, 21 nt, RNAi
uuagaagaaguuucacggacu

SEQ ID NO: 5105 - DNA, 21 bp, Homo sapiens
caaagtgcctgagctctacga

SEQ ID NO: 5106 - RNA, 21 nt, RNAi
aagugccugagcucuacgauu

SEQ ID NO: 5107 - RNA, 21 nt, RNAi
uuuucacggacucgagaugcu

SEQ ID NO: 5108 - DNA, 21 bp, Homo sapiens
caactacggagttgccatgga

SEQ ID NO: 5109 - RNA, 21 nt, RNAi
acuacggaguugccauggauu

SEQ ID NO: 5110 - RNA, 21 nt, RNAi
uuugaugccucaacgguaccu

SEQ ID NO: 5111 - DNA, 21 bp, Homo sapiens
catggaaatggctgagaagtg

SEQ ID NO: 5112 - RNA, 21 nt, RNAi
uggaaauggcugagaaguguu

SEQ ID NO: 5113 - RNA, 21 nt, RNAi
uuaccuuuaccgacucuucac

SEQ ID NO: 5114 - DNA, 21 bp, Homo sapiens
caggccaatgctcagtttgca

SEQ ID NO: 5115 - RNA, 21 nt, RNAi
ggccaaugcucaguuugcauu

SEQ ID NO: 5116 - RNA, 21 nt, RNAi
uuccgguuacgagucaaacgu

SEQ ID NO: 5117 - DNA, 21 bp, Homo sapiens
caatgctcagtttgcagaaat

SEQ ID NO: 5118 - RNA, 21 nt, RNAi
augcucaguuugcagaaauuu

SEQ ID NO: 5119 - RNA, 21 nt, RNAi
uuuacgagucaaacgucuuua

SEQ ID NO: 5120 - DNA, 21 bp, Homo sapiens
cagtttgcagaaatctccgag

SEQ ID NO: 5121 - RNA, 21 nt, RNAi
guuugcagaaaucuccgaguu

SEQ ID NO: 5122 - RNA, 21 nt, RNAi
uucaaacgucuuuagaggcuc

SEQ ID NO: 5123 - DNA, 21 bp, Homo sapiens
cagaaatctccgagaacctga

SEQ ID NO: 5124 - RNA, 21 nt, RNAi
gaaaucuccgagaaccugauu

SEQ ID NO: 5125 - RNA, 21 nt, RNAi
uucuuuagaggcucuuggacu

SEQ ID NO: 5126 - DNA, 21 bp, Homo sapiens
cagaagcaacaaagatgccaa

SEQ ID NO: 5127 - RNA, 21 nt, RNAi
gaagcaacaaagaugccaauu

SEQ ID NO: 5128 - RNA, 21 nt, RNAi
uucuucguuguuucuacgguu

SEQ ID NO: 5129 - DNA, 21 bp, Homo sapiens
caacaaagatgccaaggatcc

SEQ ID NO: 5130 - RNA, 21 nt, RNAi
acaaagaugccaaggauccuu

SEQ ID NO: 5131 - RNA, 21 nt, RNAi
uuuguuucuacgguuccuagg

SEQ ID NO: 5132 - DNA, 21 bp, Homo sapiens
caaagatgccaaggatccaac

SEQ ID NO: 5133 - RNA, 21 nt, RNAi
aagaugccaaggauccaacuu

SEQ ID NO: 5134 - RNA, 21 nt, RNAi
uuuucuacgguuccuagguug

SEQ ID NO: 5135 - DNA, 21 bp, Homo sapiens
caaggatccaacgaccaagaa

SEQ ID NO: 5136 - RNA, 21 nt, RNAi
aggauccaacgaccaagaauu

SEQ ID NO: 5137 - RNA, 21 nt, RNAi
uuuccuagguugcugguucuu

SEQ ID NO: 5138 - DNA, 21 bp, Homo sapiens
caacgaccaagaactctctgg

SEQ ID NO: 5139 - RNA, 21 nt, RNAi
acgaccaagaacucucugguu

SEQ ID NO: 5140 - RNA, 21 nt, RNAi
uuugcugguucuugagagacc

SEQ ID NO: 5141 - DNA, 21 bp, Homo sapiens
caagaactctctggaaactct

SEQ ID NO: 5142 - RNA, 21 nt, RNAi
agaacucucuggaaacucuuu

SEQ ID NO: 5143 - RNA, 21 nt, RNAi
uuucuugagagaccuuugaga

SEQ ID NO: 5144 - DNA, 21 bp, Homo sapiens
caagcctgtggaccgtgtgac

SEQ ID NO: 5145 - RNA, 21 nt, RNAi
agccuguggaccgugugacuu

SEQ ID NO: 5146 - RNA, 21 nt, RNAi
uuucggacaccuggcacacug

SEQ ID NO: 5147 - DNA, 21 bp, Homo sapiens
cacgctggtcctccatgactt

SEQ ID NO: 5148 - RNA, 21 nt, RNAi
cgcugguccuccaugacuuuu

SEQ ID NO: 5149 - RNA, 21 nt, RNAi
uugcgaccaggagguacugaa

SEQ ID NO: 5150 - DNA, 21 bp, Homo sapiens
catgacttgctgaagcacact

SEQ ID NO: 5151 - RNA, 21 nt, RNAi
ugacuugcugaagcacacuuu

SEQ ID NO: 5152 - RNA, 21 nt, RNAi
uuacugaacgacuucguguga

SEQ ID NO: 5153 - DNA, 21 bp, Homo sapiens
catctcacagaacttcctgtc

SEQ ID NO: 5154 - RNA, 21 nt, RNAi
ucucacagaacuuccugucuu

SEQ ID NO: 5155 - RNA, 21 nt, RNAi
uuagagugucuugaaggacag

SEQ ID NO: 5156 - DNA, 21 bp, Homo sapiens
cacagaacttcctgtccagca

SEQ ID NO: 5157 - RNA, 21 nt, RNAi
cagaacuuccuguccagcauu

SEQ ID NO: 5158 - RNA, 21 nt, RNAi
uugucuugaaggacaggucgu

SEQ ID NO: 5159 - DNA, 21 bp, Homo sapiens
cagaacttcctgtccagcatc

SEQ ID NO: 5160 - RNA, 21 nt, RNAi
gaacuuccuguccagcaucuu

SEQ ID NO: 5161 - RNA, 21 nt, RNAi
uucuugaaggacaggucguag

SEQ ID NO: 5162 - DNA, 21 bp, Homo sapiens
cagcatcaatgaggagatcac

SEQ ID NO: 5163 - RNA, 21 nt, RNAi
gcaucaaugaggagaucacuu

SEQ ID NO: 5164 - RNA, 21 nt, RNAi
uucguaguuacuccucuagug

SEQ ID NO: 5165 - DNA, 21 bp, Homo sapiens
catcaatgaggagatcacacc

SEQ ID NO: 5166 - RNA, 21 nt, RNAi
ucaaugaggagaucacaccuu

SEQ ID NO: 5167 - RNA, 21 nt, RNAi
uuaguuacuccucuagugugg

SEQ ID NO: 5168 - DNA, 21 bp, Homo sapiens
cagtccatgacggtgaagaag

SEQ ID NO: 5169 - RNA, 21 nt, RNAi
guccaugacggugaagaaguu

SEQ ID NO: 5170 - RNA, 21 nt, RNAi
uucagguacugccacuucuuc

SEQ ID NO: 5171 - DNA, 21 bp, Homo sapiens
cagctgctgaaggacagcttc

SEQ ID NO: 5172 - RNA, 21 nt, RNAi
gcugcugaaggacagcuucuu

SEQ ID NO: 5173 - RNA, 21 nt, RNAi
uucgacgacuuccugucgaag

SEQ ID NO: 5174 - DNA, 21 bp, Homo sapiens
cagcttcatggtggagctggt

SEQ ID NO: 5175 - RNA, 21 nt, RNAi
gcuucaugguggagcugguuu

SEQ ID NO: 5176 - RNA, 21 nt, RNAi
uucgaaguaccaccucgacca

SEQ ID NO: 5177 - DNA, 21 bp, Homo sapiens
caagctgcgccacgtcttcct

SEQ ID NO: 5178 - RNA, 21 nt, RNAi
agcugcgccacgucuuccuuu

SEQ ID NO: 5179 - RNA, 21 nt, RNAi
uuucgacgcggugcagaagga

SEQ ID NO: 5180 - DNA, 21 bp, Homo sapiens
cacgtcttcctgttcaccgag

SEQ ID NO: 5181 - RNA, 21 nt, RNAi
cgucuuccuguucaccgaguu

SEQ ID NO: 5182 - RNA, 21 nt, RNAi
uugcagaaggacaaguggcuc

SEQ ID NO: 5183 - DNA, 21 bp, Homo sapiens
caccgagctgcttctctgcac

SEQ ID NO: 5184 - RNA, 21 nt, RNAi
ccgagcugcuucucugcacuu

SEQ ID NO: 5185 - RNA, 21 nt, RNAi
uuggcucgacgaagagacgug

SEQ ID NO: 5186 - DNA, 21 bp, Homo sapiens
caccaagctcaagaagcagag

SEQ ID NO: 5187 - RNA, 21 nt, RNAi
ccaagcucaagaagcagaguu

SEQ ID NO: 5188 - RNA, 21 nt, RNAi
uugguucgaguucuucgucuc

SEQ ID NO: 5189 - DNA, 21 bp, Homo sapiens
caagctcaagaagcagagcgg

SEQ ID NO: 5190 - RNA, 21 nt, RNAi
agcucaagaagcagagcgguu

SEQ ID NO: 5191 - RNA, 21 nt, RNAi
uuucgaguucuucgucucgcc

SEQ ID NO: 5192 - DNA, 21 bp, Homo sapiens
caagaagcagagcggaggcaa

SEQ ID NO: 5193 - RNA, 21 nt, RNAi
agaagcagagcggaggcaauu

SEQ ID NO: 5194 - RNA, 21 nt, RNAi
uuucuucgucucgccuccguu

SEQ ID NO: 5195 - DNA, 21 bp, Homo sapiens
cagcagtatgactgcaaatgg

SEQ ID NO: 5196 - RNA, 21 nt, RNAi
gcaguaugacugcaaaugguu

SEQ ID NO: 5197 - RNA, 21 nt, RNAi
uucgucauacugacguuuacc

SEQ ID NO: 5198 - DNA, 21 bp, Homo sapiens
cagtatgactgcaaatggtac

SEQ ID NO: 5199 - RNA, 21 nt, RNAi
guaugacugcaaaugguacuu

SEQ ID NO: 5200 - RNA, 21 nt, RNAi
uucauacugacguuuaccaug

SEQ ID NO: 5201 - DNA, 21 bp, Homo sapiens
caaatggtacattccgctcac

SEQ ID NO: 5202 - RNA, 21 nt, RNAi
aaugguacauuccgcucacuu

SEQ ID NO: 5203 - RNA, 21 nt, RNAi
uuuuaccauguaaggcgagug

SEQ ID NO: 5204 - DNA, 21 bp, Homo sapiens
cattccgctcacggatctcag

SEQ ID NO: 5205 - RNA, 21 nt, RNAi
uuccgcucacggaucucaguu

SEQ ID NO: 5206 - RNA, 21 nt, RNAi
uuaaggcgagugccuagaguc

SEQ ID NO: 5207 - DNA, 21 bp, Homo sapiens
cacggatctcagcttccagat

SEQ ID NO: 5208 - RNA, 21 nt, RNAi
cggaucucagcuuccagauuu

SEQ ID NO: 5209 - RNA, 21 nt, RNAi
uugccuagagucgaaggucua

SEQ ID NO: 5210 - DNA, 21 bp, Homo sapiens
cagcttccagatggtggatga

SEQ ID NO: 5211 - RNA, 21 nt, RNAi
gcuuccagaugguggaugauu

SEQ ID NO: 5212 - RNA, 21 nt, RNAi
uucgaaggucuaccaccuacu

SEQ ID NO: 5213 - DNA, 21 bp, Homo sapiens
cagatggtggatgaactggag

SEQ ID NO: 5214 - RNA, 21 nt, RNAi
gaugguggaugaacuggaguu

SEQ ID NO: 5215 - RNA, 21 nt, RNAi
uucuaccaccuacuugaccuc

SEQ ID NO: 5216 - DNA, 21 bp, Homo sapiens
cagatcaagagtgacatccag

SEQ ID NO: 5217 - RNA, 21 nt, RNAi
gaucaagagugacauccaguu

SEQ ID NO: 5218 - RNA, 21 nt, RNAi
uucuaguucucacuguagguc

SEQ ID NO: 5219 - DNA, 21 bp, Homo sapiens
caagagtgacatccagagaga

SEQ ID NO: 5220 - RNA, 21 nt, RNAi
agagugacauccagagagauu

SEQ ID NO: 5221 - RNA, 21 nt, RNAi
uuucucacuguaggucucucu

SEQ ID NO: 5222 - DNA, 21 bp, Homo sapiens
cagcaaggctacggagaggct

SEQ ID NO: 5223 - RNA, 21 nt, RNAi
gcaaggcuacggagaggcuuu

SEQ ID NO: 5224 - RNA, 21 nt, RNAi
uucguuccgaugccucuccga

SEQ ID NO: 5225 - DNA, 21 bp, Homo sapiens
caaggctacggagaggctgaa

SEQ ID NO: 5226 - RNA, 21 nt, RNAi
aggcuacggagaggcugaauu

SEQ ID NO: 5227 - RNA, 21 nt, RNAi
uuuccgaugccucuccgacuu

SEQ ID NO: 5228 - DNA, 21 bp, Homo sapiens
caggagtcactgctgctgctt

SEQ ID NO: 5229 - RNA, 21 nt, RNAi
ggagucacugcugcugcuuuu

SEQ ID NO: 5230 - RNA, 21 nt, RNAi
uuccucagugacgacgacgaa

SEQ ID NO: 5231 - DNA, 21 bp, Homo sapiens
cactgctgctgcttatgtctc

SEQ ID NO: 5232 - RNA, 21 nt, RNAi
cugcugcugcuuaugucucuu

SEQ ID NO: 5233 - RNA, 21 nt, RNAi
uugacgacgacgaauacagag

SEQ ID NO: 5234 - DNA, 21 bp, Homo sapiens
cacagccgcaacggcaagagt

SEQ ID NO: 5235 - RNA, 21 nt, RNAi
cagccgcaacggcaagaguuu

SEQ ID NO: 5236 - RNA, 21 nt, RNAi
uugucggcguugccguucuca

SEQ ID NO: 5237 - DNA, 21 bp, Homo sapiens
cagccgcaacggcaagagtta

SEQ ID NO: 5238 - RNA, 21 nt, RNAi
gccgcaacggcaagaguuauu

SEQ ID NO: 5239 - RNA, 21 nt, RNAi
uucggcguugccguucucaau

SEQ ID NO: 5240 - DNA, 21 bp, Homo sapiens
caacggcaagagttacacgtt

SEQ ID NO: 5241 - RNA, 21 nt, RNAi
acggcaagaguuacacguuuu

SEQ ID NO: 5242 - RNA, 21 nt, RNAi
uuugccguucucaaugugcaa

SEQ ID NO: 5243 - DNA, 21 bp, Homo sapiens
caagagttacacgttcctgat

SEQ ID NO: 5244 - RNA, 21 nt, RNAi
agaguuacacguuccugauuu

SEQ ID NO: 5245 - RNA, 21 nt, RNAi
uuucucaaugugcaaggacua

SEQ ID NO: 5246 - DNA, 21 bp, Homo sapiens
cacgttcctgatctcctctga

SEQ ID NO: 5247 - RNA, 21 nt, RNAi
cguuccugaucuccucugauu

SEQ ID NO: 5248 - RNA, 21 nt, RNAi
uugcaaggacuagaggagacu

SEQ ID NO: 5249 - DNA, 21 bp, Homo sapiens
cagcagaagaagtgtttcaga

SEQ ID NO: 5250 - RNA, 21 nt, RNAi
gcagaagaaguguuucagauu

SEQ ID NO: 5251 - RNA, 21 nt, RNAi
uucgucuucuucacaaagucu

SEQ ID NO: 5252 - DNA, 21 bp, Homo sapiens
cagaagaagtgtttcagaagc

SEQ ID NO: 5253 - RNA, 21 nt, RNAi
gaagaaguguuucagaagcuu

SEQ ID NO: 5254 - RNA, 21 nt, RNAi
uucuucuucacaaagucuucg

SEQ ID NO: 5255 - DNA, 21 bp, Homo sapiens
catccgtggagctgcagatgc

SEQ ID NO: 5256 - RNA, 21 nt, RNAi
uccguggagcugcagaugcuu

SEQ ID NO: 5257 - RNA, 21 nt, RNAi
uuaggcaccucgacgucuacg

SEQ ID NO: 5258 - DNA, 21 bp, Homo sapiens
cagatgctgaccaactcgtgt

SEQ ID NO: 5259 - RNA, 21 nt, RNAi
gaugcugaccaacucguguuu

SEQ ID NO: 5260 - RNA, 21 nt, RNAi
uucuacgacugguugagcaca

SEQ ID NO: 5261 - DNA, 21 bp, Homo sapiens
caactcgtgtgtgaaactcca

SEQ ID NO: 5262 - RNA, 21 nt, RNAi
acucgugugugaaacuccauu

SEQ ID NO: 5263 - RNA, 21 nt, RNAi
uuugagcacacacuuugaggu

SEQ ID NO: 5264 - DNA, 21 bp, Homo sapiens
cagactgtccacagcattccg

SEQ ID NO: 5265 - RNA, 21 nt, RNAi
gacuguccacagcauuccguu

SEQ ID NO: 5266 - RNA, 21 nt, RNAi
uucugacaggugucguaaggc

SEQ ID NO: 5267 - DNA, 21 bp, Homo sapiens
cacagcattccgctgaccatc

SEQ ID NO: 5268 - RNA, 21 nt, RNAi
cagcauuccgcugaccaucuu

SEQ ID NO: 5269 - RNA, 21 nt, RNAi
uugucguaaggcgacugguag

SEQ ID NO: 5270 - DNA, 21 bp, Homo sapiens
cagcattccgctgaccatcaa

SEQ ID NO: 5271 - RNA, 21 nt, RNAi
gcauuccgcugaccaucaauu

SEQ ID NO: 5272 - RNA, 21 nt, RNAi
uucguaaggcgacugguaguu

SEQ ID NO: 5273 - DNA, 21 bp, Homo sapiens
cattccgctgaccatcaataa

SEQ ID NO: 5274 - RNA, 21 nt, RNAi
uuccgcugaccaucaauaauu

SEQ ID NO: 5275 - RNA, 21 nt, RNAi
uuaaggcgacugguaguuauu

SEQ ID NO: 5276 - DNA, 21 bp, Homo sapiens
catcaataaggaagatgatga

SEQ ID NO: 5277 - RNA, 21 nt, RNAi
ucaauaaggaagaugaugauu

SEQ ID NO: 5278 - RNA, 21 nt, RNAi
uuaguuauuccuucuacuacu

SEQ ID NO: 5279 - DNA, 21 bp, Homo sapiens
caataaggaagatgatgagtc

SEQ ID NO: 5280 - RNA, 21 nt, RNAi
auaaggaagaugaugagucuu

SEQ ID NO: 5281 - RNA, 21 nt, RNAi
uuuauuccuucuacuacucag

SEQ ID NO: 5282 - DNA, 21 bp, Homo sapiens
catcgtccactcagccactgg

SEQ ID NO: 5283 - RNA, 21 nt, RNAi
ucguccacucagccacugguu

SEQ ID NO: 5284 - RNA, 21 nt, RNAi
uuagcaggugagucggugacc

SEQ ID NO: 5285 - DNA, 21 bp, Homo sapiens
cactcagccactggatttaag

SEQ ID NO: 5286 - RNA, 21 nt, RNAi
cucagccacuggauuuaaguu

SEQ ID NO: 5287 - RNA, 21 nt, RNAi
uugagucggugaccuaaauuc

SEQ ID NO: 5288 - DNA, 21 bp, Homo sapiens
cagccactggatttaagcaga

SEQ ID NO: 5289 - RNA, 21 nt, RNAi
gccacuggauuuaagcagauu

SEQ ID NO: 5290 - RNA, 21 nt, RNAi
uucggugaccuaaauucgucu

SEQ ID NO: 5291 - DNA, 21 bp, Homo sapiens
cactggatttaagcagagttc

SEQ ID NO: 5292 - RNA, 21 nt, RNAi
cuggauuuaagcagaguucuu

SEQ ID NO: 5293 - RNA, 21 nt, RNAi
uugaccuaaauucgucucaag

SEQ ID NO: 5294 - DNA, 21 bp, Homo sapiens
cagagttcaaatctgtactgc

SEQ ID NO: 5295 - RNA, 21 nt, RNAi
gaguucaaaucuguacugcuu

SEQ ID NO: 5296 - RNA, 21 nt, RNAi
uucucaaguuuagacaugacg

SEQ ID NO: 5297 - DNA, 21 bp, Homo sapiens
cacagctgagccaaactggaa

SEQ ID NO: 5298 - RNA, 21 nt, RNAi
cagcugagccaaacuggaauu

SEQ ID NO: 5299 - RNA, 21 nt, RNAi
uugucgacucgguuugaccuu

SEQ ID NO: 5300 - DNA, 21 bp, Homo sapiens
cagctgagccaaactggaacg

SEQ ID NO: 5301 - RNA, 21 nt, RNAi
gcugagccaaacuggaacguu

SEQ ID NO: 5302 - RNA, 21 nt, RNAi
uucgacucgguuugaccuugc

SEQ ID NO: 5303 - DNA, 21 bp, Homo sapiens
caaactggaacgaggaatttg

SEQ ID NO: 5304 - RNA, 21 nt, RNAi
aacuggaacgaggaauuuguu

SEQ ID NO: 5305 - RNA, 21 nt, RNAi
uuuugaccuugcuccuuaaac

SEQ ID NO: 5306 - DNA, 21 bp, Homo sapiens
caccgtcatcgccatgaatgg

SEQ ID NO: 5307 - RNA, 21 nt, RNAi
ccgucaucgccaugaaugguu

SEQ ID NO: 5308 - RNA, 21 nt, RNAi
uuggcaguagcgguacuuacc

SEQ ID NO: 5309 - DNA, 21 bp, Homo sapiens
cagcttgaagaggatgccgtc

SEQ ID NO: 5310 - RNA, 21 nt, RNAi
gcuugaagaggaugccgucuu

SEQ ID NO: 5311 - RNA, 21 nt, RNAi
uucgaacuucuccuacggcag

SEQ ID NO: 5312 - DNA, 21 bp, Homo sapiens
caagattgctgtggtcaccaa

SEQ ID NO: 5313 - RNA, 21 nt, RNAi
agauugcuguggucaccaauu

SEQ ID NO: 5314 - RNA, 21 nt, RNAi
uuucuaacgacaccagugguu

SEQ ID NO: 5315 - DNA, 21 bp, Homo sapiens
caccaagagagagaggtccaa

SEQ ID NO: 5316 - RNA, 21 nt, RNAi
ccaagagagagagguccaauu

SEQ ID NO: 5317 - RNA, 21 nt, RNAi
uugguucucucucuccagguu

SEQ ID NO: 5318 - DNA, 21 bp, Homo sapiens
caagagagagaggtccaaggt

SEQ ID NO: 5319 - RNA, 21 nt, RNAi
agagagagagguccaagguuu

SEQ ID NO: 5320 - RNA, 21 nt, RNAi
uuucucucucuccagguucca

SEQ ID NO: 5321 - DNA, 21 bp, Homo sapiens
cagtgcgtggaggagatcgag

SEQ ID NO: 5322 - RNA, 21 nt, RNAi
gugcguggaggagaucgaguu

SEQ ID NO: 5323 - RNA, 21 nt, RNAi
uucacgcaccuccucuagcuc

SEQ ID NO: 5324 - DNA, 21 bp, Homo sapiens
catctaccgcgtgtccggtgt

SEQ ID NO: 5325 - RNA, 21 nt, RNAi
ucuaccgcguguccgguguuu

SEQ ID NO: 5326 - RNA, 21 nt, RNAi
uuagauggcgcacaggccaca

SEQ ID NO: 5327 - DNA, 21 bp, Homo sapiens
cacggacatccaggcactgaa

SEQ ID NO: 5328 - RNA, 21 nt, RNAi
cggacauccaggcacugaauu

SEQ ID NO: 5329 - RNA, 21 nt, RNAi
uugccuguagguccgugacuu

SEQ ID NO: 5330 - DNA, 21 bp, Homo sapiens
catccaggcactgaaggcagc

SEQ ID NO: 5331 - RNA, 21 nt, RNAi
uccaggcacugaaggcagcuu

SEQ ID NO: 5332 - RNA, 21 nt, RNAi
uuagguccgugacuuccgucg

SEQ ID NO: 5333 - DNA, 21 bp, Homo sapiens
caggcactgaaggcagccttc

SEQ ID NO: 5334 - RNA, 21 nt, RNAi
ggcacugaaggcagccuucuu

SEQ ID NO: 5335 - RNA, 21 nt, RNAi
uuccgugacuuccgucggaag

SEQ ID NO: 5336 - DNA, 21 bp, Homo sapiens
cactgaaggcagccttcgacg

SEQ ID NO: 5337 - RNA, 21 nt, RNAi
cugaaggcagccuucgacguu

SEQ ID NO: 5338 - RNA, 21 nt, RNAi
uugacuuccgucggaagcugc

SEQ ID NO: 5339 - DNA, 21 bp, Homo sapiens
cagccttcgacgtcaataaca

SEQ ID NO: 5340 - RNA, 21 nt, RNAi
gccuucgacgucaauaacauu

SEQ ID NO: 5341 - RNA, 21 nt, RNAi
uucggaagcugcaguuauugu

SEQ ID NO: 5342 - DNA, 21 bp, Homo sapiens
caataacaaggatgtgtcggt

SEQ ID NO: 5343 - RNA, 21 nt, RNAi
auaacaaggaugugucgguuu

SEQ ID NO: 5344 - RNA, 21 nt, RNAi
uuuauuguuccuacacagcca

SEQ ID NO: 5345 - DNA, 21 bp, Homo sapiens
caaggatgtgtcggtgatgat

SEQ ID NO: 5346 - RNA, 21 nt, RNAi
aggaugugucggugaugauuu

SEQ ID NO: 5347 - RNA, 21 nt, RNAi
uuuccuacacagccacuacua

SEQ ID NO: 5348 - DNA, 21 bp, Homo sapiens
catcgcaggcacgctgaagct

SEQ ID NO: 5349 - RNA, 21 nt, RNAi
ucgcaggcacgcugaagcuuu

SEQ ID NO: 5350 - RNA, 21 nt, RNAi
uuagcguccgugcgacuucga

SEQ ID NO: 5351 - DNA, 21 bp, Homo sapiens
caggcacgctgaagctgtact

SEQ ID NO: 5352 - RNA, 21 nt, RNAi
ggcacgcugaagcuguacuuu

SEQ ID NO: 5353 - RNA, 21 nt, RNAi
uuccgugcgacuucgacauga

SEQ ID NO: 5354 - DNA, 21 bp, Homo sapiens
cacgctgaagctgtacttccg

SEQ ID NO: 5355 - RNA, 21 nt, RNAi
cgcugaagcuguacuuccguu

SEQ ID NO: 5356 - RNA, 21 nt, RNAi
uugcgacuucgacaugaaggc

SEQ ID NO: 5357 - DNA, 21 bp, Homo sapiens
caaaggagagctgcatgctca

SEQ ID NO: 5358 - RNA, 21 nt, RNAi
aaggagagcugcaugcucauu

SEQ ID NO: 5359 - RNA, 21 nt, RNAi
uuuuccucucgacguacgagu

SEQ ID NO: 5360 - DNA, 21 bp, Homo sapiens
catgctcaacctgctgctgtc

SEQ ID NO: 5361 - RNA, 21 nt, RNAi
ugcucaaccugcugcugucuu

SEQ ID NO: 5362 - RNA, 21 nt, RNAi
uuacgaguuggacgacgacag

SEQ ID NO: 5363 - DNA, 21 bp, Homo sapiens
cagagaaggaggcagtcaata

SEQ ID NO: 5364 - RNA, 21 nt, RNAi
gagaaggaggcagucaauauu

SEQ ID NO: 5365 - RNA, 21 nt, RNAi
uucucuuccuccgucaguuau

SEQ ID NO: 5366 - DNA, 21 bp, Homo sapiens
cacaacctcgccacggtcttt

SEQ ID NO: 5367 - RNA, 21 nt, RNAi
caaccucgccacggucuuuuu

SEQ ID NO: 5368 - RNA, 21 nt, RNAi
uuguuggagcggugccagaaa

SEQ ID NO: 5369 - DNA, 21 bp, Homo sapiens
caacctcgccacggtctttgg

SEQ ID NO: 5370 - RNA, 21 nt, RNAi
accucgccacggucuuugguu

SEQ ID NO: 5371 - RNA, 21 nt, RNAi
uuuggagcggugccagaaacc

SEQ ID NO: 5372 - DNA, 21 bp, Homo sapiens
cagccagcctatcaccatgac

SEQ ID NO: 5373 - RNA, 21 nt, RNAi
gccagccuaucaccaugacuu

SEQ ID NO: 5374 - RNA, 21 nt, RNAi
uucggucggauagugguacug

SEQ ID NO: 5375 - DNA, 21 bp, Homo sapiens
cagcctatcaccatgactgac

SEQ ID NO: 5376 - RNA, 21 nt, RNAi
gccuaucaccaugacugacuu

SEQ ID NO: 5377 - RNA, 21 nt, RNAi
uucggauagugguacugacug

SEQ ID NO: 5378 - DNA, 21 bp, Homo sapiens
caccatgactgacagctggtc

SEQ ID NO: 5379 - RNA, 21 nt, RNAi
ccaugacugacagcuggucuu

SEQ ID NO: 5380 - RNA, 21 nt, RNAi
uugguacugacugucgaccag

SEQ ID NO: 5381 - DNA, 21 bp, Homo sapiens
catgactgacagctggtcctt

SEQ ID NO: 5382 - RNA, 21 nt, RNAi
ugacugacagcugguccuuuu

SEQ ID NO: 5383 - RNA, 21 nt, RNAi
uuacugacugucgaccaggaa

SEQ ID NO: 5384 - DNA, 21 bp, Homo sapiens
cagctggtccttggaggtcat

SEQ ID NO: 5385 - RNA, 21 nt, RNAi
gcugguccuuggaggucauuu

SEQ ID NO: 5386 - RNA, 21 nt, RNAi
uucgaccaggaaccuccagua

SEQ ID NO: 5387 - DNA, 21 bp, Homo sapiens
caggtccaggtgctgctgtac

SEQ ID NO: 5388 - RNA, 21 nt, RNAi
gguccaggugcugcuguacuu

SEQ ID NO: 5389 - RNA, 21 nt, RNAi
uuccagguccacgacgacaug

SEQ ID NO: 5390 - DNA, 21 bp, Homo sapiens
caggtgctgctgtacttcctg

SEQ ID NO: 5391 - RNA, 21 nt, RNAi
ggugcugcuguacuuccuguu

SEQ ID NO: 5392 - RNA, 21 nt, RNAi
uuccacgacgacaugaaggac

SEQ ID NO: 5393 - DNA, 21 bp, Homo sapiens
cagcaagagacagagcatcct

SEQ ID NO: 5394 - RNA, 21 nt, RNAi
gcaagagacagagcauccuuu

SEQ ID NO: 5395 - RNA, 21 nt, RNAi
uucguucucugucucguagga

SEQ ID NO: 5396 - DNA, 21 bp, Homo sapiens
caagagacagagcatcctgtt

SEQ ID NO: 5397 - RNA, 21 nt, RNAi
agagacagagcauccuguuuu

SEQ ID NO: 5398 - RNA, 21 nt, RNAi
uuucucugucucguaggacaa

SEQ ID NO: 5399 - DNA, 21 bp, Homo sapiens
cagagcatcctgttctccacc

SEQ ID NO: 5400 - RNA, 21 nt, RNAi
gagcauccuguucuccaccuu

SEQ ID NO: 5401 - RNA, 21 nt, RNAi
uucucguaggacaagaggugg

SEQ ID NO: 5402 - DNA, 21 bp, Homo sapiens
catcctgttctccaccgaagt

SEQ ID NO: 5403 - RNA, 21 nt, RNAi
uccuguucuccaccgaaguuu

SEQ ID NO: 5404 - RNA, 21 nt, RNAi
uuaggacaagagguggcuuca

SEQ ID NO: 5405 - DNA, 21 bp, Homo sapiens
cagtccatctcctggaggcag

SEQ ID NO: 5406 - RNA, 21 nt, RNAi
guccaucuccuggaggcaguu

SEQ ID NO: 5407 - RNA, 21 nt, RNAi
uucagguagaggaccuccguc

SEQ ID NO: 5408 - DNA, 21 bp, Homo sapiens
catctcctggaggcagacaga

SEQ ID NO: 5409 - RNA, 21 nt, RNAi
ucuccuggaggcagacagauu

SEQ ID NO: 5410 - RNA, 21 nt, RNAi
uuagaggaccuccgucugucu

SEQ ID NO: 5411 - DNA, 21 bp, Homo sapiens
cagacagatggcctggaaacc

SEQ ID NO: 5412 - RNA, 21 nt, RNAi
gacagauggccuggaaaccuu

SEQ ID NO: 5413 - RNA, 21 nt, RNAi
uucugucuaccggaccuuugg

SEQ ID NO: 5414 - DNA, 21 bp, Homo sapiens
cagatggcctggaaacctctg

SEQ ID NO: 5415 - RNA, 21 nt, RNAi
gauggccuggaaaccucuguu

SEQ ID NO: 5416 - RNA, 21 nt, RNAi
uucuaccggaccuuuggagac

SEQ ID NO: 5417 - DNA, 21 bp, Homo sapiens
catctgccaagagacagcgac

SEQ ID NO: 5418 - RNA, 21 nt, RNAi
ucugccaagagacagcgacuu

SEQ ID NO: 5419 - RNA, 21 nt, RNAi
uuagacgguucucugucgcug

SEQ ID NO: 5420 - DNA, 21 bp, Homo sapiens
caaagccgaaggacaggtggc

SEQ ID NO: 5421 - RNA, 21 nt, RNAi
aagccgaaggacagguggcuu

SEQ ID NO: 5422 - RNA, 21 nt, RNAi
uuuucggcuuccuguccaccg

SEQ ID NO: 5423 - DNA, 21 bp, Homo sapiens
caagccagttcatctcagagt

SEQ ID NO: 5424 - RNA, 21 nt, RNAi
agccaguucaucucagaguuu

SEQ ID NO: 5425 - RNA, 21 nt, RNAi
uuucggucaaguagagucuca

SEQ ID NO: 5426 - DNA, 21 bp, Homo sapiens
cagttcatctcagagtccagg

SEQ ID NO: 5427 - RNA, 21 nt, RNAi
guucaucucagaguccagguu

SEQ ID NO: 5428 - RNA, 21 nt, RNAi
uucaaguagagucucaggucc

SEQ ID NO: 5429 - DNA, 21 bp, Homo sapiens
catctcagagtccaggcctga

SEQ ID NO: 5430 - RNA, 21 nt, RNAi
ucucagaguccaggccugauu

SEQ ID NO: 5431 - RNA, 21 nt, RNAi
uuagagucucagguccggacu

SEQ ID NO: 5432 - DNA, 21 bp, Homo sapiens
gagataggtaggagtagcgtg

SEQ ID NO: 5433 - RNA, 21 nt, RNAi
gauagguaggaguagcguguu

SEQ ID NO: 5434 - RNA, 21 nt, RNAi
uucuauccauccucaucgcac

SEQ ID NO: 5435 - DNA, 21 bp, Homo sapiens
gataggtaggagtagcgtggt

SEQ ID NO: 5436 - RNA, 21 nt, RNAi
uagguaggaguagcgugguuu

SEQ ID NO: 5437 - RNA, 21 nt, RNAi
uuauccauccucaucgcacca

SEQ ID NO: 5438 - DNA, 21 bp, Homo sapiens
gacatcgagcaggagctggag

SEQ ID NO: 5439 - RNA, 21 nt, RNAi
caucgagcaggagcuggaguu

SEQ ID NO: 5440 - RNA, 21 nt, RNAi
uuguagcucguccucgaccuc

SEQ ID NO: 5441 - DNA, 21 bp, Homo sapiens
gagcgctgcaaggcctccatt

SEQ ID NO: 5442 - RNA, 21 nt, RNAi
gcgcugcaaggccuccauuuu

SEQ ID NO: 5443 - RNA, 21 nt, RNAi
uucgcgacguuccggagguaa

SEQ ID NO: 5444 - DNA, 21 bp, Homo sapiens
gagcaggaggtgaaccaggag

SEQ ID NO: 5445 - RNA, 21 nt, RNAi
gcaggaggugaaccaggaguu

SEQ ID NO: 5446 - RNA, 21 nt, RNAi
uucguccuccacuugguccuc

SEQ ID NO: 5447 - DNA, 21 bp, Homo sapiens
gaggtgaaccaggagcgcttc

SEQ ID NO: 5448 - RNA, 21 nt, RNAi
ggugaaccaggagcgcuucuu

SEQ ID NO: 5449 - RNA, 21 nt, RNAi
uuccacuugguccucgcgaag

SEQ ID NO: 5450 - DNA, 21 bp, Homo sapiens
gaaccaggagcgcttccgcat

SEQ ID NO: 5451 - RNA, 21 nt, RNAi
accaggagcgcuuccgcauuu

SEQ ID NO: 5452 - RNA, 21 nt, RNAi
uuugguccucgcgaaggcgua

SEQ ID NO: 5453 - DNA, 21 bp, Homo sapiens
gagcgcttccgcatgatctac

SEQ ID NO: 5454 - RNA, 21 nt, RNAi
gcgcuuccgcaugaucuacuu

SEQ ID NO: 5455 - RNA, 21 nt, RNAi
uucgcgaaggcguacuagaug

SEQ ID NO: 5456 - DNA, 21 bp, Homo sapiens
gatctacctgcagacgttgct

SEQ ID NO: 5457 - RNA, 21 nt, RNAi
ucuaccugcagacguugcuuu

SEQ ID NO: 5458 - RNA, 21 nt, RNAi
uuagauggacgucugcaacga

SEQ ID NO: 5459 - DNA, 21 bp, Homo sapiens
gaagagctatgaccggcagcg

SEQ ID NO: 5460 - RNA, 21 nt, RNAi
agagcuaugaccggcagcguu

SEQ ID NO: 5461 - RNA, 21 nt, RNAi
uuucucgauacuggccgucgc

SEQ ID NO: 5462 - DNA, 21 bp, Homo sapiens
gagctatgaccggcagcgatg

SEQ ID NO: 5463 - RNA, 21 nt, RNAi
gcuaugaccggcagcgauguu

SEQ ID NO: 5464 - RNA, 21 nt, RNAi
uucgauacuggccgucgcuac

SEQ ID NO: 5465 - DNA, 21 bp, Homo sapiens
gaacgtcgagtttcaccacga

SEQ ID NO: 5466 - RNA, 21 nt, RNAi
acgucgaguuucaccacgauu

SEQ ID NO: 5467 - RNA, 21 nt, RNAi
uuugcagcucaaaguggugcu

SEQ ID NO: 5468 - DNA, 21 bp, Homo sapiens
gaaggtcaacgacaaagaggt

SEQ ID NO: 5469 - RNA, 21 nt, RNAi
aggucaacgacaaagagguuu

SEQ ID NO: 5470 - RNA, 21 nt, RNAi
uuuccaguugcuguuucucca

SEQ ID NO: 5471 - DNA, 21 bp, Homo sapiens
gacaaagaggtgtcggaccgc

SEQ ID NO: 5472 - RNA, 21 nt, RNAi
caaagaggugucggaccgcuu

SEQ ID NO: 5473 - RNA, 21 nt, RNAi
uuguuucuccacagccuggcg

SEQ ID NO: 5474 - DNA, 21 bp, Homo sapiens
gactacgaggacgccgagttg

SEQ ID NO: 5475 - RNA, 21 nt, RNAi
cuacgaggacgccgaguuguu

SEQ ID NO: 5476 - RNA, 21 nt, RNAi
uugaugcuccugcggcucaac

SEQ ID NO: 5477 - DNA, 21 bp, Homo sapiens
gaaggacaacctgatcgacgc

SEQ ID NO: 5478 - RNA, 21 nt, RNAi
aggacaaccugaucgacgcuu

SEQ ID NO: 5479 - RNA, 21 nt, RNAi
uuuccuguuggacuagcugcg

SEQ ID NO: 5480 - DNA, 21 bp, Homo sapiens
gacaacctgatcgacgccaat

SEQ ID NO: 5481 - RNA, 21 nt, RNAi
caaccugaucgacgccaauuu

SEQ ID NO: 5482 - RNA, 21 nt, RNAi
uuguuggacuagcugcgguua

SEQ ID NO: 5483 - DNA, 21 bp, Homo sapiens
gatcgacgccaatggcggtag

SEQ ID NO: 5484 - RNA, 21 nt, RNAi
ucgacgccaauggcgguaguu

SEQ ID NO: 5485 - RNA, 21 nt, RNAi
uuagcugcgguuaccgccauc

SEQ ID NO: 5486 - DNA, 21 bp, Homo sapiens
gagcacctctgagcaggagaa

SEQ ID NO: 5487 - RNA, 21 nt, RNAi
gcaccucugagcaggagaauu

SEQ ID NO: 5488 - RNA, 21 nt, RNAi
uucguggagacucguccucuu

SEQ ID NO: 5489 - DNA, 21 bp, Homo sapiens
gagcaggagaagcgccttacc

SEQ ID NO: 5490 - RNA, 21 nt, RNAi
gcaggagaagcgccuuaccuu

SEQ ID NO: 5491 - RNA, 21 nt, RNAi
uucguccucuucgcggaaugg

SEQ ID NO: 5492 - DNA, 21 bp, Homo sapiens
gaggattgcggaggcggctat

SEQ ID NO: 5493 - RNA, 21 nt, RNAi
ggauugcggaggcggcuauuu

SEQ ID NO: 5494 - RNA, 21 nt, RNAi
uuccuaacgccuccgccgaua

SEQ ID NO: 5495 - DNA, 21 bp, Homo sapiens
gattgcggaggcggctatacc

SEQ ID NO: 5496 - RNA, 21 nt, RNAi
uugcggaggcggcuauaccuu

SEQ ID NO: 5497 - RNA, 21 nt, RNAi
uuaacgccuccgccgauaugg

SEQ ID NO: 5498 - DNA, 21 bp, Homo sapiens
gactgcagctccaatgagaac

SEQ ID NO: 5499 - RNA, 21 nt, RNAi
cugcagcuccaaugagaacuu

SEQ ID NO: 5500 - RNA, 21 nt, RNAi
uugacgucgagguuacucuug

SEQ ID NO: 5501 - DNA, 21 bp, Homo sapiens
gagaacctcacctccagcgag

SEQ ID NO: 5502 - RNA, 21 nt, RNAi
gaaccucaccuccagcgaguu

SEQ ID NO: 5503 - RNA, 21 nt, RNAi
uucuuggaguggaggucgcuc

SEQ ID NO: 5504 - DNA, 21 bp, Homo sapiens
gaacctcacctccagcgagga

SEQ ID NO: 5505 - RNA, 21 nt, RNAi
accucaccuccagcgaggauu

SEQ ID NO: 5506 - RNA, 21 nt, RNAi
uuuggaguggaggucgcuccu

SEQ ID NO: 5507 - DNA, 21 bp, Homo sapiens
gaggaggacttctcctctggc

SEQ ID NO: 5508 - RNA, 21 nt, RNAi
ggaggacuucuccucuggcuu

SEQ ID NO: 5509 - RNA, 21 nt, RNAi
uuccuccugaagaggagaccg

SEQ ID NO: 5510 - DNA, 21 bp, Homo sapiens
gaggacttctcctctggccag

SEQ ID NO: 5511 - RNA, 21 nt, RNAi
ggacuucuccucuggccaguu

SEQ ID NO: 5512 - RNA, 21 nt, RNAi
uuccugaagaggagaccgguc

SEQ ID NO: 5513 - DNA, 21 bp, Homo sapiens
gacttctcctctggccagtcc

SEQ ID NO: 5514 - RNA, 21 nt, RNAi
cuucuccucuggccaguccuu

SEQ ID NO: 5515 - RNA, 21 nt, RNAi
uugaagaggagaccggucagg

SEQ ID NO: 5516 - DNA, 21 bp, Homo sapiens
gaactcgcaacagtccttcga

SEQ ID NO: 5517 - RNA, 21 nt, RNAi
acucgcaacaguccuucgauu

SEQ ID NO: 5518 - RNA, 21 nt, RNAi
uuugagcguugucaggaagcu

SEQ ID NO: 5519 - DNA, 21 bp, Homo sapiens
gagacgcagatggctcgttcg

SEQ ID NO: 5520 - RNA, 21 nt, RNAi
gacgcagauggcucguucguu

SEQ ID NO: 5521 - RNA, 21 nt, RNAi
uucugcgucuaccgagcaagc

SEQ ID NO: 5522 - DNA, 21 bp, Homo sapiens
gacgcagatggctcgttcgga

SEQ ID NO: 5523 - RNA, 21 nt, RNAi
cgcagauggcucguucggauu

SEQ ID NO: 5524 - RNA, 21 nt, RNAi
uugcgucuaccgagcaagccu

SEQ ID NO: 5525 - DNA, 21 bp, Homo sapiens
gatggctcgttcggaacacca

SEQ ID NO: 5526 - RNA, 21 nt, RNAi
uggcucguucggaacaccauu

SEQ ID NO: 5527 - RNA, 21 nt, RNAi
uuaccgagcaagccuuguggu

SEQ ID NO: 5528 - DNA, 21 bp, Homo sapiens
gaacaccacctggatacggct

SEQ ID NO: 5529 - RNA, 21 nt, RNAi
acaccaccuggauacggcuuu

SEQ ID NO: 5530 - RNA, 21 nt, RNAi
uuugugguggaccuaugccga

SEQ ID NO: 5531 - DNA, 21 bp, Homo sapiens
gagtccactaaagcgagtgag

SEQ ID NO: 5532 - RNA, 21 nt, RNAi
guccacuaaagcgagugaguu

SEQ ID NO: 5533 - RNA, 21 nt, RNAi
uucaggugauuucgcucacuc

SEQ ID NO: 5534 - DNA, 21 bp, Homo sapiens
gaatcctggctagcgaggaga

SEQ ID NO: 5535 - RNA, 21 nt, RNAi
auccuggcuagcgaggagauu

SEQ ID NO: 5536 - RNA, 21 nt, RNAi
uuuaggaccgaucgcuccucu

SEQ ID NO: 5537 - DNA, 21 bp, Homo sapiens
gaggagacttacctgagccac

SEQ ID NO: 5538 - RNA, 21 nt, RNAi
ggagacuuaccugagccacuu

SEQ ID NO: 5539 - RNA, 21 nt, RNAi
uuccucugaauggacucggug

SEQ ID NO: 5540 - DNA, 21 bp, Homo sapiens
gagacttacctgagccacctg

SEQ ID NO: 5541 - RNA, 21 nt, RNAi
gacuuaccugagccaccuguu

SEQ ID NO: 5542 - RNA, 21 nt, RNAi
uucugaauggacucgguggac

SEQ ID NO: 5543 - DNA, 21 bp, Homo sapiens
gacttacctgagccacctgga

SEQ ID NO: 5544 - RNA, 21 nt, RNAi
cuuaccugagccaccuggauu

SEQ ID NO: 5545 - RNA, 21 nt, RNAi
uugaauggacucgguggaccu

SEQ ID NO: 5546 - DNA, 21 bp, Homo sapiens
gaagcctttgaaagccgctgc

SEQ ID NO: 5547 - RNA, 21 nt, RNAi
agccuuugaaagccgcugcuu

SEQ ID NO: 5548 - RNA, 21 nt, RNAi
uuucggaaacuuucggcgacg

SEQ ID NO: 5549 - DNA, 21 bp, Homo sapiens
gacgagtcagcagatcgagac

SEQ ID NO: 5550 - RNA, 21 nt, RNAi
cgagucagcagaucgagacuu

SEQ ID NO: 5551 - RNA, 21 nt, RNAi
uugcucagucgucuagcucug

SEQ ID NO: 5552 - DNA, 21 bp, Homo sapiens
gagtcagcagatcgagaccat

SEQ ID NO: 5553 - RNA, 21 nt, RNAi
gucagcagaucgagaccauuu

SEQ ID NO: 5554 - RNA, 21 nt, RNAi
uucagucgucuagcucuggua

SEQ ID NO: 5555 - DNA, 21 bp, Homo sapiens
gatcgagaccatcttcttcaa

SEQ ID NO: 5556 - RNA, 21 nt, RNAi
ucgagaccaucuucuucaauu

SEQ ID NO: 5557 - RNA, 21 nt, RNAi
uuagcucugguagaagaaguu

SEQ ID NO: 5558 - DNA, 21 bp, Homo sapiens
gagaccatcttcttcaaagtg

SEQ ID NO: 5559 - RNA, 21 nt, RNAi
gaccaucuucuucaaaguguu

SEQ ID NO: 5560 - RNA, 21 nt, RNAi
uucugguagaagaaguuucac

SEQ ID NO: 5561 - DNA, 21 bp, Homo sapiens
gaccatcttcttcaaagtgcc

SEQ ID NO: 5562 - RNA, 21 nt, RNAi
ccaucuucuucaaagugccuu

SEQ ID NO: 5563 - RNA, 21 nt, RNAi
uugguagaagaaguuucacgg

SEQ ID NO: 5564 - DNA, 21 bp, Homo sapiens
gagctctacgagatccacaag

SEQ ID NO: 5565 - RNA, 21 nt, RNAi
gcucuacgagauccacaaguu

SEQ ID NO: 5566 - RNA, 21 nt, RNAi
uucgagaugcucuagguguuc

SEQ ID NO: 5567 - DNA, 21 bp, Homo sapiens
gagatccacaaggagttctat

SEQ ID NO: 5568 - RNA, 21 nt, RNAi
gauccacaaggaguucuauuu

SEQ ID NO: 5569 - RNA, 21 nt, RNAi
uucuagguguuccucaagaua

SEQ ID NO: 5570 - DNA, 21 bp, Homo sapiens
gatccacaaggagttctatga

SEQ ID NO: 5571 - RNA, 21 nt, RNAi
uccacaaggaguucuaugauu

SEQ ID NO: 5572 - RNA, 21 nt, RNAi
uuagguguuccucaagauacu

SEQ ID NO: 5573 - DNA, 21 bp, Homo sapiens
gacctcttccagaagctggcc

SEQ ID NO: 5574 - RNA, 21 nt, RNAi
ccucuuccagaagcuggccuu

SEQ ID NO: 5575 - RNA, 21 nt, RNAi
uuggagaaggucuucgaccgg

SEQ ID NO: 5576 - DNA, 21 bp, Homo sapiens
gacaactacggagttgccatg

SEQ ID NO: 5577 - RNA, 21 nt, RNAi
caacuacggaguugccauguu

SEQ ID NO: 5578 - RNA, 21 nt, RNAi
uuguugaugccucaacgguac

SEQ ID NO: 5579 - DNA, 21 bp, Homo sapiens
gagttgccatggaaatggctg

SEQ ID NO: 5580 - RNA, 21 nt, RNAi
guugccauggaaauggcuguu

SEQ ID NO: 5581 - RNA, 21 nt, RNAi
uucaacgguaccuuuaccgac

SEQ ID NO: 5582 - DNA, 21 bp, Homo sapiens
gaaatggctgagaagtgctgt

SEQ ID NO: 5583 - RNA, 21 nt, RNAi
aauggcugagaagugcuguuu

SEQ ID NO: 5584 - RNA, 21 nt, RNAi
uuuuaccgacucuucacgaca

SEQ ID NO: 5585 - DNA, 21 bp, Homo sapiens
gagaagtgctgtcaggccaat

SEQ ID NO: 5586 - RNA, 21 nt, RNAi
gaagugcugucaggccaauuu

SEQ ID NO: 5587 - RNA, 21 nt, RNAi
uucuucacgacaguccgguua

SEQ ID NO: 5588 - DNA, 21 bp, Homo sapiens
gaagtgctgtcaggccaatgc

SEQ ID NO: 5589 - RNA, 21 nt, RNAi
agugcugucaggccaaugcuu

SEQ ID NO: 5590 - RNA, 21 nt, RNAi
uuucacgacaguccgguuacg

SEQ ID NO: 5591 - DNA, 21 bp, Homo sapiens
gaaatctccgagaacctgaga

SEQ ID NO: 5592 - RNA, 21 nt, RNAi
aaucuccgagaaccugagauu

SEQ ID NO: 5593 - RNA, 21 nt, RNAi
uuuuagaggcucuuggacucu

SEQ ID NO: 5594 - DNA, 21 bp, Homo sapiens
gagaacctgagagccagaagc

SEQ ID NO: 5595 - RNA, 21 nt, RNAi
gaaccugagagccagaagcuu

SEQ ID NO: 5596 - RNA, 21 nt, RNAi
uucuuggacucucggucuucg

SEQ ID NO: 5597 - DNA, 21 bp, Homo sapiens
gaacctgagagccagaagcaa

SEQ ID NO: 5598 - RNA, 21 nt, RNAi
accugagagccagaagcaauu

SEQ ID NO: 5599 - RNA, 21 nt, RNAi
uuuggacucucggucuucguu

SEQ ID NO: 5600 - DNA, 21 bp, Homo sapiens
gagagccagaagcaacaaaga

SEQ ID NO: 5601 - RNA, 21 nt, RNAi
gagccagaagcaacaaagauu

SEQ ID NO: 5602 - RNA, 21 nt, RNAi
uucucggucuucguuguuucu

SEQ ID NO: 5603 - DNA, 21 bp, Homo sapiens
gagccagaagcaacaaagatg

SEQ ID NO: 5604 - RNA, 21 nt, RNAi
gccagaagcaacaaagauguu

SEQ ID NO: 5605 - RNA, 21 nt, RNAi
uucggucuucguuguuucuac

SEQ ID NO: 5606 - DNA, 21 bp, Homo sapiens
gaagcaacaaagatgccaagg

SEQ ID NO: 5607 - RNA, 21 nt, RNAi
agcaacaaagaugccaagguu

SEQ ID NO: 5608 - RNA, 21 nt, RNAi
uuucguuguuucuacgguucc

SEQ ID NO: 5609 - DNA, 21 bp, Homo sapiens
gatgccaaggatccaacgacc

SEQ ID NO: 5610 - RNA, 21 nt, RNAi
ugccaaggauccaacgaccuu

SEQ ID NO: 5611 - RNA, 21 nt, RNAi
uuacgguuccuagguugcugg

SEQ ID NO: 5612 - DNA, 21 bp, Homo sapiens
gatccaacgaccaagaactct

SEQ ID NO: 5613 - RNA, 21 nt, RNAi
uccaacgaccaagaacucuuu

SEQ ID NO: 5614 - RNA, 21 nt, RNAi
uuagguugcugguucuugaga

SEQ ID NO: 5615 - DNA, 21 bp, Homo sapiens
gaccaagaactctctggaaac

SEQ ID NO: 5616 - RNA, 21 nt, RNAi
ccaagaacucucuggaaacuu

SEQ ID NO: 5617 - RNA, 21 nt, RNAi
uugguucuugagagaccuuug

SEQ ID NO: 5618 - DNA, 21 bp, Homo sapiens
gaactctctggaaactctgct

SEQ ID NO: 5619 - RNA, 21 nt, RNAi
acucucuggaaacucugcuuu

SEQ ID NO: 5620 - RNA, 21 nt, RNAi
uuugagagaccuuugagacga

SEQ ID NO: 5621 - DNA, 21 bp, Homo sapiens
gaaactctgctctacaagcct

SEQ ID NO: 5622 - RNA, 21 nt, RNAi
aacucugcucuacaagccuuu

SEQ ID NO: 5623 - RNA, 21 nt, RNAi
uuuugagacgagauguucgga

SEQ ID NO: 5624 - DNA, 21 bp, Homo sapiens
gagcacgctggtcctccatga

SEQ ID NO: 5625 - RNA, 21 nt, RNAi
gcacgcugguccuccaugauu

SEQ ID NO: 5626 - RNA, 21 nt, RNAi
uucgugcgaccaggagguacu

SEQ ID NO: 5627 - DNA, 21 bp, Homo sapiens
gacttgctgaagcacactcct

SEQ ID NO: 5628 - RNA, 21 nt, RNAi
cuugcugaagcacacuccuuu

SEQ ID NO: 5629 - RNA, 21 nt, RNAi
uugaacgacuucgugugagga

SEQ ID NO: 5630 - DNA, 21 bp, Homo sapiens
gaagcacactcctgccagcca

SEQ ID NO: 5631 - RNA, 21 nt, RNAi
agcacacuccugccagccauu

SEQ ID NO: 5632 - RNA, 21 nt, RNAi
uuucgugugaggacggucggu

SEQ ID NO: 5633 - DNA, 21 bp, Homo sapiens
gaacttcctgtccagcatcaa

SEQ ID NO: 5634 - RNA, 21 nt, RNAi
acuuccuguccagcaucaauu

SEQ ID NO: 5635 - RNA, 21 nt, RNAi
uuugaaggacaggucguaguu

SEQ ID NO: 5636 - DNA, 21 bp, Homo sapiens
gacggcagtccatgacggtga

SEQ ID NO: 5637 - RNA, 21 nt, RNAi
cggcaguccaugacggugauu

SEQ ID NO: 5638 - RNA, 21 nt, RNAi
uugccgucagguacugccacu

SEQ ID NO: 5639 - DNA, 21 bp, Homo sapiens
gaaggacagcttcatggtgga

SEQ ID NO: 5640 - RNA, 21 nt, RNAi
aggacagcuucaugguggauu

SEQ ID NO: 5641 - RNA, 21 nt, RNAi
uuuccugucgaaguaccaccu

SEQ ID NO: 5642 - DNA, 21 bp, Homo sapiens
gacagcttcatggtggagctg

SEQ ID NO: 5643 - RNA, 21 nt, RNAi
cagcuucaugguggagcuguu

SEQ ID NO: 5644 - RNA, 21 nt, RNAi
uugucgaaguaccaccucgac

SEQ ID NO: 5645 - DNA, 21 bp, Homo sapiens
gagctgcttctctgcaccaag

SEQ ID NO: 5646 - RNA, 21 nt, RNAi
gcugcuucucugcaccaaguu

SEQ ID NO: 5647 - RNA, 21 nt, RNAi
uucgacgaagagacgugguuc

SEQ ID NO: 5648 - DNA, 21 bp, Homo sapiens
gactgcaaatggtacattccg

SEQ ID NO: 5649 - RNA, 21 nt, RNAi
cugcaaaugguacauuccguu

SEQ ID NO: 5650 - RNA, 21 nt, RNAi
uugacguuuaccauguaaggc

SEQ ID NO: 5651 - DNA, 21 bp, Homo sapiens
gatctcagcttccagatggtg

SEQ ID NO: 5652 - RNA, 21 nt, RNAi
ucucagcuuccagaugguguu

SEQ ID NO: 5653 - RNA, 21 nt, RNAi
uuagagucgaaggucuaccac

SEQ ID NO: 5654 - DNA, 21 bp, Homo sapiens
gatggtggatgaactggaggc

SEQ ID NO: 5655 - RNA, 21 nt, RNAi
ugguggaugaacuggaggcuu

SEQ ID NO: 5656 - RNA, 21 nt, RNAi
uuaccaccuacuugaccuccg

SEQ ID NO: 5657 - DNA, 21 bp, Homo sapiens
gatgaggagctggacgctttg

SEQ ID NO: 5658 - RNA, 21 nt, RNAi
ugaggagcuggacgcuuuguu

SEQ ID NO: 5659 - RNA, 21 nt, RNAi
uuacuccucgaccugcgaaac

SEQ ID NO: 5660 - DNA, 21 bp, Homo sapiens
gaggagctggacgctttgaag

SEQ ID NO: 5661 - RNA, 21 nt, RNAi
ggagcuggacgcuuugaaguu

SEQ ID NO: 5662 - RNA, 21 nt, RNAi
uuccucgaccugcgaaacuuc

SEQ ID NO: 5663 - DNA, 21 bp, Homo sapiens
gagctggacgctttgaagatc

SEQ ID NO: 5664 - RNA, 21 nt, RNAi
gcuggacgcuuugaagaucuu

SEQ ID NO: 5665 - RNA, 21 nt, RNAi
uucgaccugcgaaacuucuag

SEQ ID NO: 5666 - DNA, 21 bp, Homo sapiens
gacgctttgaagatcaagatc

SEQ ID NO: 5667 - RNA, 21 nt, RNAi
cgcuuugaagaucaagaucuu

SEQ ID NO: 5668 - RNA, 21 nt, RNAi
uugcgaaacuucuaguucuag

SEQ ID NO: 5669 - DNA, 21 bp, Homo sapiens
gatcaagagtgacatccagag

SEQ ID NO: 5670 - RNA, 21 nt, RNAi
ucaagagugacauccagaguu

SEQ ID NO: 5671 - RNA, 21 nt, RNAi
uuaguucucacuguaggucuc

SEQ ID NO: 5672 - DNA, 21 bp, Homo sapiens
gagtgacatccagagagagaa

SEQ ID NO: 5673 - RNA, 21 nt, RNAi
gugacauccagagagagaauu

SEQ ID NO: 5674 - RNA, 21 nt, RNAi
uucacuguaggucucucucuu

SEQ ID NO: 5675 - DNA, 21 bp, Homo sapiens
gacatccagagagagaagagg

SEQ ID NO: 5676 - RNA, 21 nt, RNAi
cauccagagagagaagagguu

SEQ ID NO: 5677 - RNA, 21 nt, RNAi
uuguaggucucucucuucucc

SEQ ID NO: 5678 - DNA, 21 bp, Homo sapiens
gagaggctgaagaagaagctg

SEQ ID NO: 5679 - RNA, 21 nt, RNAi
gaggcugaagaagaagcuguu

SEQ ID NO: 5680 - RNA, 21 nt, RNAi
uucuccgacuucuucuucgac

SEQ ID NO: 5681 - DNA, 21 bp, Homo sapiens
gaggctgaagaagaagctgtc

SEQ ID NO: 5682 - RNA, 21 nt, RNAi
ggcugaagaagaagcugucuu

SEQ ID NO: 5683 - RNA, 21 nt, RNAi
uuccgacuucuucuucgacag

SEQ ID NO: 5684 - DNA, 21 bp, Homo sapiens
gaagaagaagctgtcggagca

SEQ ID NO: 5685 - RNA, 21 nt, RNAi
agaagaagcugucggagcauu

SEQ ID NO: 5686 - RNA, 21 nt, RNAi
uuucuucuucgacagccucgu

SEQ ID NO: 5687 - DNA, 21 bp, Homo sapiens
gaagaagctgtcggagcagga

SEQ ID NO: 5688 - RNA, 21 nt, RNAi
agaagcugucggagcaggauu

SEQ ID NO: 5689 - RNA, 21 nt, RNAi
uuucuucgacagccucguccu

SEQ ID NO: 5690 - DNA, 21 bp, Homo sapiens
gaagctgtcggagcaggagtc

SEQ ID NO: 5691 - RNA, 21 nt, RNAi
agcugucggagcaggagucuu

SEQ ID NO: 5692 - RNA, 21 nt, RNAi
uuucgacagccucguccucag

SEQ ID NO: 5693 - DNA, 21 bp, Homo sapiens
gagcaggagtcactgctgctg

SEQ ID NO: 5694 - RNA, 21 nt, RNAi
gcaggagucacugcugcuguu

SEQ ID NO: 5695 - RNA, 21 nt, RNAi
uucguccucagugacgacgac

SEQ ID NO: 5696 - DNA, 21 bp, Homo sapiens
gagtcactgctgctgcttatg

SEQ ID NO: 5697 - RNA, 21 nt, RNAi
gucacugcugcugcuuauguu

SEQ ID NO: 5698 - RNA, 21 nt, RNAi
uucagugacgacgacgaauac

SEQ ID NO: 5699 - DNA, 21 bp, Homo sapiens
gagttacacgttcctgatctc

SEQ ID NO: 5700 - RNA, 21 nt, RNAi
guuacacguuccugaucucuu

SEQ ID NO: 5701 - RNA, 21 nt, RNAi
uucaaugugcaaggacuagag

SEQ ID NO: 5702 - DNA, 21 bp, Homo sapiens
gatctcctctgactatgagcg

SEQ ID NO: 5703 - RNA, 21 nt, RNAi
ucuccucugacuaugagcguu

SEQ ID NO: 5704 - RNA, 21 nt, RNAi
uuagaggagacugauacucgc

SEQ ID NO: 5705 - DNA, 21 bp, Homo sapiens
gactatgagcgtgcagagtgg

SEQ ID NO: 5706 - RNA, 21 nt, RNAi
cuaugagcgugcagagugguu

SEQ ID NO: 5707 - RNA, 21 nt, RNAi
uugauacucgcacgucucacc

SEQ ID NO: 5708 - DNA, 21 bp, Homo sapiens
gagcagcagaagaagtgtttc

SEQ ID NO: 5709 - RNA, 21 nt, RNAi
gcagcagaagaaguguuucuu

SEQ ID NO: 5710 - RNA, 21 nt, RNAi
uucgucgucuucuucacaaag

SEQ ID NO: 5711 - DNA, 21 bp, Homo sapiens
gaagaagtgtttcagaagctt

SEQ ID NO: 5712 - RNA, 21 nt, RNAi
agaaguguuucagaagcuuuu

SEQ ID NO: 5713 - RNA, 21 nt, RNAi
uuucuucacaaagucuucgaa

SEQ ID NO: 5714 - DNA, 21 bp, Homo sapiens
gaagtgtttcagaagcttctc

SEQ ID NO: 5715 - RNA, 21 nt, RNAi
aguguuucagaagcuucucuu

SEQ ID NO: 5716 - RNA, 21 nt, RNAi
uuucacaaagucuucgaagag

SEQ ID NO: 5717 - DNA, 21 bp, Homo sapiens
gacatccgtggagctgcagat

SEQ ID NO: 5718 - RNA, 21 nt, RNAi
cauccguggagcugcagauuu

SEQ ID NO: 5719 - RNA, 21 nt, RNAi
uuguaggcaccucgacgucua

SEQ ID NO: 5720 - DNA, 21 bp, Homo sapiens
gagctgcagatgctgaccaac

SEQ ID NO: 5721 - RNA, 21 nt, RNAi
gcugcagaugcugaccaacuu

SEQ ID NO: 5722 - RNA, 21 nt, RNAi
uucgacgucuacgacugguug

SEQ ID NO: 5723 - DNA, 21 bp, Homo sapiens
gatgctgaccaactcgtgtgt

SEQ ID NO: 5724 - RNA, 21 nt, RNAi
ugcugaccaacucguguguuu

SEQ ID NO: 5725 - RNA, 21 nt, RNAi
uuacgacugguugagcacaca

SEQ ID NO: 5726 - DNA, 21 bp, Homo sapiens
gaccaactcgtgtgtgaaact

SEQ ID NO: 5727 - RNA, 21 nt, RNAi
ccaacucgugugugaaacuuu

SEQ ID NO: 5728 - RNA, 21 nt, RNAi
uugguugagcacacacuuuga

SEQ ID NO: 5729 - DNA, 21 bp, Homo sapiens
gaaactccagactgtccacag

SEQ ID NO: 5730 - RNA, 21 nt, RNAi
aacuccagacuguccacaguu

SEQ ID NO: 5731 - RNA, 21 nt, RNAi
uuuugaggucugacagguguc

SEQ ID NO: 5732 - DNA, 21 bp, Homo sapiens
gactgtccacagcattccgct

SEQ ID NO: 5733 - RNA, 21 nt, RNAi
cuguccacagcauuccgcuuu

SEQ ID NO: 5734 - RNA, 21 nt, RNAi
uugacaggugucguaaggcga

SEQ ID NO: 5735 - DNA, 21 bp, Homo sapiens
gaccatcaataaggaagatga

SEQ ID NO: 5736 - RNA, 21 nt, RNAi
ccaucaauaaggaagaugauu

SEQ ID NO: 5737 - RNA, 21 nt, RNAi
uugguaguuauuccuucuacu

SEQ ID NO: 5738 - DNA, 21 bp, Homo sapiens
gaatgtcatcgtccactcagc

SEQ ID NO: 5739 - RNA, 21 nt, RNAi
augucaucguccacucagcuu

SEQ ID NO: 5740 - RNA, 21 nt, RNAi
uuuacaguagcaggugagucg

SEQ ID NO: 5741 - DNA, 21 bp, Homo sapiens
gatttaagcagagttcaaatc

SEQ ID NO: 5742 - RNA, 21 nt, RNAi
uuuaagcagaguucaaaucuu

SEQ ID NO: 5743 - RNA, 21 nt, RNAi
uuaaauucgucucaaguuuag

SEQ ID NO: 5744 - DNA, 21 bp, Homo sapiens
gagttcaaatctgtactgcac

SEQ ID NO: 5745 - RNA, 21 nt, RNAi
guucaaaucuguacugcacuu

SEQ ID NO: 5746 - RNA, 21 nt, RNAi
uucaaguuuagacaugacgug

SEQ ID NO: 5747 - DNA, 21 bp, Homo sapiens
gaataaagcaaagacgcgcgt

SEQ ID NO: 5748 - RNA, 21 nt, RNAi
auaaagcaaagacgcgcguuu

SEQ ID NO: 5749 - RNA, 21 nt, RNAi
uuuauuucguuucugcgcgca

SEQ ID NO: 5750 - DNA, 21 bp, Homo sapiens
gacacagctgagccaaactgg

SEQ ID NO: 5751 - RNA, 21 nt, RNAi
cacagcugagccaaacugguu

SEQ ID NO: 5752 - RNA, 21 nt, RNAi
uugugucgacucgguuugacc

SEQ ID NO: 5753 - DNA, 21 bp, Homo sapiens
gagccaaactggaacgaggaa

SEQ ID NO: 5754 - RNA, 21 nt, RNAi
gccaaacuggaacgaggaauu

SEQ ID NO: 5755 - RNA, 21 nt, RNAi
uucgguuugaccuugcuccuu

SEQ ID NO: 5756 - DNA, 21 bp, Homo sapiens
gaacgaggaatttgagataga

SEQ ID NO: 5757 - RNA, 21 nt, RNAi
acgaggaauuugagauagauu

SEQ ID NO: 5758 - RNA, 21 nt, RNAi
uuugcuccuuaaacucuaucu

SEQ ID NO: 5759 - DNA, 21 bp, Homo sapiens
gaggaatttgagatagagctg

SEQ ID NO: 5760 - RNA, 21 nt, RNAi
ggaauuugagauagagcuguu

SEQ ID NO: 5761 - RNA, 21 nt, RNAi
uuccuuaaacucuaucucgac

SEQ ID NO: 5762 - DNA, 21 bp, Homo sapiens
gaatttgagatagagctggag

SEQ ID NO: 5763 - RNA, 21 nt, RNAi
auuugagauagagcuggaguu

SEQ ID NO: 5764 - RNA, 21 nt, RNAi
uuuaaacucuaucucgaccuc

SEQ ID NO: 5765 - DNA, 21 bp, Homo sapiens
gagagcacggacagactcatg

SEQ ID NO: 5766 - RNA, 21 nt, RNAi
gagcacggacagacucauguu

SEQ ID NO: 5767 - RNA, 21 nt, RNAi
uucucgugccugucugaguac

SEQ ID NO: 5768 - DNA, 21 bp, Homo sapiens
gatcgaagtaaagctctcggt

SEQ ID NO: 5769 - RNA, 21 nt, RNAi
ucgaaguaaagcucucgguuu

SEQ ID NO: 5770 - RNA, 21 nt, RNAi
uuagcuucauuucgagagcca

SEQ ID NO: 5771 - DNA, 21 bp, Homo sapiens
gaagtaaagctctcggtcaag

SEQ ID NO: 5772 - RNA, 21 nt, RNAi
aguaaagcucucggucaaguu

SEQ ID NO: 5773 - RNA, 21 nt, RNAi
uuucauuucgagagccaguuc

SEQ ID NO: 5774 - DNA, 21 bp, Homo sapiens
gagttcagcttgaagaggatg

SEQ ID NO: 5775 - RNA, 21 nt, RNAi
guucagcuugaagaggauguu

SEQ ID NO: 5776 - RNA, 21 nt, RNAi
uucaagucgaacuucuccuac

SEQ ID NO: 5777 - DNA, 21 bp, Homo sapiens
gagtcaagattgctgtggtca

SEQ ID NO: 5778 - RNA, 21 nt, RNAi
gucaagauugcuguggucauu

SEQ ID NO: 5779 - RNA, 21 nt, RNAi
uucaguucuaacgacaccagu

SEQ ID NO: 5780 - DNA, 21 bp, Homo sapiens
gattgctgtggtcaccaagag

SEQ ID NO: 5781 - RNA, 21 nt, RNAi
uugcuguggucaccaagaguu

SEQ ID NO: 5782 - RNA, 21 nt, RNAi
uuaacgacaccagugguucuc

SEQ ID NO: 5783 - DNA, 21 bp, Homo sapiens
gagagagaggtccaaggtgcc

SEQ ID NO: 5784 - RNA, 21 nt, RNAi
gagagagguccaaggugccuu

SEQ ID NO: 5785 - RNA, 21 nt, RNAi
uucucucuccagguuccacgg

SEQ ID NO: 5786 - DNA, 21 bp, Homo sapiens
gacatccaggcactgaaggca

SEQ ID NO: 5787 - RNA, 21 nt, RNAi
cauccaggcacugaaggcauu

SEQ ID NO: 5788 - RNA, 21 nt, RNAi
uuguagguccgugacuuccgu

SEQ ID NO: 5789 - DNA, 21 bp, Homo sapiens
gaaggcagccttcgacgtcaa

SEQ ID NO: 5790 - RNA, 21 nt, RNAi
aggcagccuucgacgucaauu

SEQ ID NO: 5791 - RNA, 21 nt, RNAi
uuuccgucggaagcugcaguu

SEQ ID NO: 5792 - DNA, 21 bp, Homo sapiens
gacgtcaataacaaggatgtg

SEQ ID NO: 5793 - RNA, 21 nt, RNAi
cgucaauaacaaggauguguu

SEQ ID NO: 5794 - RNA, 21 nt, RNAi
uugcaguuauuguuccuacac

SEQ ID NO: 5795 - DNA, 21 bp, Homo sapiens
gatgtgtcggtgatgatgagc

SEQ ID NO: 5796 - RNA, 21 nt, RNAi
ugugucggugaugaugagcuu

SEQ ID NO: 5797 - RNA, 21 nt, RNAi
uuacacagccacuacuacucg

SEQ ID NO: 5798 - DNA, 21 bp, Homo sapiens
gatgatgagcgagatggacgt

SEQ ID NO: 5799 - RNA, 21 nt, RNAi
ugaugagcgagauggacguuu

SEQ ID NO: 5800 - RNA, 21 nt, RNAi
uuacuacucgcucuaccugca

SEQ ID NO: 5801 - DNA, 21 bp, Homo sapiens
gatgagcgagatggacgtgaa

SEQ ID NO: 5802 - RNA, 21 nt, RNAi
ugagcgagauggacgugaauu

SEQ ID NO: 5803 - RNA, 21 nt, RNAi
uuacucgcucuaccugcacuu

SEQ ID NO: 5804 - DNA, 21 bp, Homo sapiens
gagcgagatggacgtgaacgc

SEQ ID NO: 5805 - RNA, 21 nt, RNAi
gcgagauggacgugaacgcuu

SEQ ID NO: 5806 - RNA, 21 nt, RNAi
uucgcucuaccugcacuugcg

SEQ ID NO: 5807 - DNA, 21 bp, Homo sapiens
gagatggacgtgaacgccatc

SEQ ID NO: 5808 - RNA, 21 nt, RNAi
gauggacgugaacgccaucuu

SEQ ID NO: 5809 - RNA, 21 nt, RNAi
uucuaccugcacuugcgguag

SEQ ID NO: 5810 - DNA, 21 bp, Homo sapiens
gatggacgtgaacgccatcgc

SEQ ID NO: 5811 - RNA, 21 nt, RNAi
uggacgugaacgccaucgcuu

SEQ ID NO: 5812 - RNA, 21 nt, RNAi
uuaccugcacuugcgguagcg

SEQ ID NO: 5813 - DNA, 21 bp, Homo sapiens
gaagctgtacttccgtgagct

SEQ ID NO: 5814 - RNA, 21 nt, RNAi
agcuguacuuccgugagcuuu

SEQ ID NO: 5815 - RNA, 21 nt, RNAi
uuucgacaugaaggcacucga

SEQ ID NO: 5816 - DNA, 21 bp, Homo sapiens
gagagctgcatgctcaacctg

SEQ ID NO: 5817 - RNA, 21 nt, RNAi
gagcugcaugcucaaccuguu

SEQ ID NO: 5818 - RNA, 21 nt, RNAi
uucucgacguacgaguuggac

SEQ ID NO: 5819 - DNA, 21 bp, Homo sapiens
gagctgcatgctcaacctgct

SEQ ID NO: 5820 - RNA, 21 nt, RNAi
gcugcaugcucaaccugcuuu

SEQ ID NO: 5821 - RNA, 21 nt, RNAi
uucgacguacgaguuggacga

SEQ ID NO: 5822 - DNA, 21 bp, Homo sapiens
gaggccaacctgctcaccttc

SEQ ID NO: 5823 - RNA, 21 nt, RNAi
ggccaaccugcucaccuucuu

SEQ ID NO: 5824 - RNA, 21 nt, RNAi
uuccgguuggacgaguggaag

SEQ ID NO: 5825 - DNA, 21 bp, Homo sapiens
gagaaggaggcagtcaataag

SEQ ID NO: 5826 - RNA, 21 nt, RNAi
gaaggaggcagucaauaaguu

SEQ ID NO: 5827 - RNA, 21 nt, RNAi
uucuuccuccgucaguuauuc

SEQ ID NO: 5828 - DNA, 21 bp, Homo sapiens
gaaggaggcagtcaataagat

SEQ ID NO: 5829 - RNA, 21 nt, RNAi
aggaggcagucaauaagauuu

SEQ ID NO: 5830 - RNA, 21 nt, RNAi
uuuccuccgucaguuauucua

SEQ ID NO: 5831 - DNA, 21 bp, Homo sapiens
gaggcagtcaataagatgtcc

SEQ ID NO: 5832 - RNA, 21 nt, RNAi
ggcagucaauaagauguccuu

SEQ ID NO: 5833 - RNA, 21 nt, RNAi
uuccgucaguuauucuacagg

SEQ ID NO: 5834 - DNA, 21 bp, Homo sapiens
gactgacagctggtccttgga

SEQ ID NO: 5835 - RNA, 21 nt, RNAi
cugacagcugguccuuggauu

SEQ ID NO: 5836 - RNA, 21 nt, RNAi
uugacugucgaccaggaaccu

SEQ ID NO: 5837 - DNA, 21 bp, Homo sapiens
gacagctggtccttggaggtc

SEQ ID NO: 5838 - RNA, 21 nt, RNAi
cagcugguccuuggaggucuu

SEQ ID NO: 5839 - RNA, 21 nt, RNAi
uugucgaccaggaaccuccag

SEQ ID NO: 5840 - DNA, 21 bp, Homo sapiens
gacagcaagagacagagcatc

SEQ ID NO: 5841 - RNA, 21 nt, RNAi
cagcaagagacagagcaucuu

SEQ ID NO: 5842 - RNA, 21 nt, RNAi
uugucguucucugucucguag

SEQ ID NO: 5843 - DNA, 21 bp, Homo sapiens
gagacagagcatcctgttctc

SEQ ID NO: 5844 - RNA, 21 nt, RNAi
gacagagcauccuguucucuu

SEQ ID NO: 5845 - RNA, 21 nt, RNAi
uucugucucguaggacaagag

SEQ ID NO: 5846 - DNA, 21 bp, Homo sapiens
gacagagcatcctgttctcca

SEQ ID NO: 5847 - RNA, 21 nt, RNAi
cagagcauccuguucuccauu

SEQ ID NO: 5848 - RNA, 21 nt, RNAi
uugucucguaggacaagaggu

SEQ ID NO: 5849 - DNA, 21 bp, Homo sapiens
gagcatcctgttctccaccga

SEQ ID NO: 5850 - RNA, 21 nt, RNAi
gcauccuguucuccaccgauu

SEQ ID NO: 5851 - RNA, 21 nt, RNAi
uucguaggacaagagguggcu

SEQ ID NO: 5852 - DNA, 21 bp, Homo sapiens
gaggcagacagatggcctgga

SEQ ID NO: 5853 - RNA, 21 nt, RNAi
ggcagacagauggccuggauu

SEQ ID NO: 5854 - RNA, 21 nt, RNAi
uuccgucugucuaccggaccu

SEQ ID NO: 5855 - DNA, 21 bp, Homo sapiens
gacagatggcctggaaacctc

SEQ ID NO: 5856 - RNA, 21 nt, RNAi
cagauggccuggaaaccucuu

SEQ ID NO: 5857 - RNA, 21 nt, RNAi
uugucuaccggaccuuuggag

SEQ ID NO: 5858 - DNA, 21 bp, Homo sapiens
gatggcctggaaacctctggc

SEQ ID NO: 5859 - RNA, 21 nt, RNAi
uggccuggaaaccucuggcuu

SEQ ID NO: 5860 - RNA, 21 nt, RNAi
uuaccggaccuuuggagaccg

SEQ ID NO: 5861 - DNA, 21 bp, Homo sapiens
gaaccttcctgaggtgtcctt

SEQ ID NO: 5862 - RNA, 21 nt, RNAi
accuuccugagguguccuuuu

SEQ ID NO: 5863 - RNA, 21 nt, RNAi
uuuggaaggacuccacaggaa

SEQ ID NO: 5864 - DNA, 21 bp, Homo sapiens
gatttctactggatcacttgt

SEQ ID NO: 5865 - RNA, 21 nt, RNAi
uuucuacuggaucacuuguuu

SEQ ID NO: 5866 - RNA, 21 nt, RNAi
uuaaagaugaccuagugaaca

SEQ ID NO: 5867 - DNA, 21 bp, Homo sapiens
gatcacttgtcaagatgcgcc

SEQ ID NO: 5868 - RNA, 21 nt, RNAi
ucacuugucaagaugcgccuu

SEQ ID NO: 5869 - RNA, 21 nt, RNAi
uuagugaacaguucuacgcgg

SEQ ID NO: 5870 - DNA, 21 bp, Homo sapiens
gaataaacgctgctgcttcat

SEQ ID NO: 5871 - RNA, 21 nt, RNAi
auaaacgcugcugcuucauuu

SEQ ID NO: 5872 - RNA, 21 nt, RNAi
uuuauuugcgacgacgaagua

SEQ ID NO: 5873 - DNA, 21 bp, Homo sapiens
taggtaggagtagcgtggtaa

SEQ ID NO: 5874 - RNA, 21 nt, RNAi
gguaggaguagcgugguaauu

SEQ ID NO: 5875 - RNA, 21 nt, RNAi
uuccauccucaucgcaccauu

SEQ ID NO: 5876 - DNA, 21 bp, Homo sapiens
tacctgcagacgttgctggcc

SEQ ID NO: 5877 - RNA, 21 nt, RNAi
ccugcagacguugcuggccuu

SEQ ID NO: 5878 - RNA, 21 nt, RNAi
uuggacgucugcaacgaccgg

SEQ ID NO: 5879 - DNA, 21 bp, Homo sapiens
tacgtgaacgtcgagtttcac

SEQ ID NO: 5880 - RNA, 21 nt, RNAi
cgugaacgucgaguuucacuu

SEQ ID NO: 5881 - RNA, 21 nt, RNAi
uugcacuugcagcucaaagug

SEQ ID NO: 5882 - DNA, 21 bp, Homo sapiens
tacgaggacgccgagttgaac

SEQ ID NO: 5883 - RNA, 21 nt, RNAi
cgaggacgccgaguugaacuu

SEQ ID NO: 5884 - RNA, 21 nt, RNAi
uugcuccugcggcucaacuug

SEQ ID NO: 5885 - DNA, 21 bp, Homo sapiens
taaagcgagtgagctggactt

SEQ ID NO: 5886 - RNA, 21 nt, RNAi
aagcgagugagcuggacuuuu

SEQ ID NO: 5887 - RNA, 21 nt, RNAi
uuuucgcucacucgaccugaa

SEQ ID NO: 5888 - DNA, 21 bp, Homo sapiens
tagcgaggagacttacctgag

SEQ ID NO: 5889 - RNA, 21 nt, RNAi
gcgaggagacuuaccugaguu

SEQ ID NO: 5890 - RNA, 21 nt, RNAi
uucgcuccucugaauggacuc

SEQ ID NO: 5891 - DNA, 21 bp, Homo sapiens
tacctgagccacctggaggca

SEQ ID NO: 5892 - RNA, 21 nt, RNAi
ccugagccaccuggaggcauu

SEQ ID NO: 5893 - RNA, 21 nt, RNAi
uuggacucgguggaccuccgu

SEQ ID NO: 5894 - DNA, 21 bp, Homo sapiens
tacgagatccacaaggagttc

SEQ ID NO: 5895 - RNA, 21 nt, RNAi
cgagauccacaaggaguucuu

SEQ ID NO: 5896 - RNA, 21 nt, RNAi
uugcucuagguguuccucaag

SEQ ID NO: 5897 - DNA, 21 bp, Homo sapiens
tacggagttgccatggaaatg

SEQ ID NO: 5898 - RNA, 21 nt, RNAi
cggaguugccauggaaauguu

SEQ ID NO: 5899 - RNA, 21 nt, RNAi
uugccucaacgguaccuuuac

SEQ ID NO: 5900 - DNA, 21 bp, Homo sapiens
tacaagcctgtggaccgtgtg

SEQ ID NO: 5901 - RNA, 21 nt, RNAi
caagccuguggaccguguguu

SEQ ID NO: 5902 - RNA, 21 nt, RNAi
uuguucggacaccuggcacac

SEQ ID NO: 5903 - DNA, 21 bp, Homo sapiens
tatgactgcaaatggtacatt

SEQ ID NO: 5904 - RNA, 21 nt, RNAi
ugacugcaaaugguacauuuu

SEQ ID NO: 5905 - RNA, 21 nt, RNAi
uuacugacguuuaccauguaa

SEQ ID NO: 5906 - DNA, 21 bp, Homo sapiens
tacattccgctcacggatctc

SEQ ID NO: 5907 - RNA, 21 nt, RNAi
cauuccgcucacggaucucuu

SEQ ID NO: 5908 - RNA, 21 nt, RNAi
uuguaaggcgagugccuagag

SEQ ID NO: 5909 - DNA, 21 bp, Homo sapiens
tacggagaggctgaagaagaa

SEQ ID NO: 5910 - RNA, 21 nt, RNAi
cggagaggcugaagaagaauu

SEQ ID NO: 5911 - RNA, 21 nt, RNAi
uugccucuccgacuucuucuu

SEQ ID NO: 5912 - DNA, 21 bp, Homo sapiens
tacacgttcctgatctcctct

SEQ ID NO: 5913 - RNA, 21 nt, RNAi
cacguuccugaucuccucuuu

SEQ ID NO: 5914 - RNA, 21 nt, RNAi
uugugcaaggacuagaggaga

SEQ ID NO: 5915 - DNA, 21 bp, Homo sapiens
tatgagcgtgcagagtggagg

SEQ ID NO: 5916 - RNA, 21 nt, RNAi
ugagcgugcagaguggagguu

SEQ ID NO: 5917 - RNA, 21 nt, RNAi
uuacucgcacgucucaccucc

SEQ ID NO: 5918 - DNA, 21 bp, Homo sapiens
taaggaagatgatgagtctcc

SEQ ID NO: 5919 - RNA, 21 nt, RNAi
aggaagaugaugagucuccuu

SEQ ID NO: 5920 - RNA, 21 nt, RNAi
uuuccuucuacuacucagagg

SEQ ID NO: 5921 - DNA, 21 bp, Homo sapiens
taagcagagttcaaatctgta

SEQ ID NO: 5922 - RNA, 21 nt, RNAi
agcagaguucaaaucuguauu

SEQ ID NO: 5923 - RNA, 21 nt, RNAi
uuucgucucaaguuuagacau

SEQ ID NO: 5924 - DNA, 21 bp, Homo sapiens
taaagcaaagacgcgcgtcta

SEQ ID NO: 5925 - RNA, 21 nt, RNAi
aagcaaagacgcgcgucuauu

SEQ ID NO: 5926 - RNA, 21 nt, RNAi
uuuucguuucugcgcgcagau

SEQ ID NO: 5927 - DNA, 21 bp, Homo sapiens
taaagctctcggtcaagttca

SEQ ID NO: 5928 - RNA, 21 nt, RNAi
aagcucucggucaaguucauu

SEQ ID NO: 5929 - RNA, 21 nt, RNAi
uuuucgagagccaguucaagu

SEQ ID NO: 5930 - DNA, 21 bp, Homo sapiens
tacatcgtgcgccagtgcgtg

SEQ ID NO: 5931 - RNA, 21 nt, RNAi
caucgugcgccagugcguguu

SEQ ID NO: 5932 - RNA, 21 nt, RNAi
uuguagcacgcggucacgcac

SEQ ID NO: 5933 - DNA, 21 bp, Homo sapiens
taacaaggatgtgtcggtgat

SEQ ID NO: 5934 - RNA, 21 nt, RNAi
acaaggaugugucggugauuu

SEQ ID NO: 5935 - RNA, 21 nt, RNAi
uuuguuccuacacagccacua

SEQ ID NO: 5936 - DNA, 21 bp, Homo sapiens
tatcaccatgactgacagctg

SEQ ID NO: 5937 - RNA, 21 nt, RNAi
ucaccaugacugacagcuguu

SEQ ID NO: 5938 - RNA, 21 nt, RNAi
uuagugguacugacugucgac

SEQ ID NO: 5939 - DNA, 21 bp, Homo sapiens
tacttcctgcagctggaggcc

SEQ ID NO: 5940 - RNA, 21 nt, RNAi
cuuccugcagcuggaggccuu

SEQ ID NO: 5941 - RNA, 21 nt, RNAi
uugaaggacgucgaccuccgg

SEQ ID NO: 5942 - DNA, 21 bp, Homo sapiens
tactggatcacttgtcaagat

SEQ ID NO: 5943 - RNA, 21 nt, RNAi
cuggaucacuugucaagauuu

SEQ ID NO: 5944 - RNA, 21 nt, RNAi
uugaccuagugaacaguucua

SEQ ID NO: 5945 - DNA, 21 bp, Homo sapiens
tatcttgaataaacgctgctg

SEQ ID NO: 5946 - RNA, 21 nt, RNAi
ucuugaauaaacgcugcuguu

SEQ ID NO: 5947 - RNA, 21 nt, RNAi
uuagaacuuauuugcgacgac

SEQ ID NO: 5948 - DNA, 21 bp, Homo sapiens
taaacgctgctgcttcatcct

SEQ ID NO: 5949 - RNA, 21 nt, RNAi
aacgcugcugcuucauccuuu

SEQ ID NO: 5950 - RNA, 21 nt, RNAi
uuuugcgacgacgaaguagga

SEQ ID NO: 5951 - DNA, 21 bp, Homo sapiens
aaggtcaacgacaaagaggtg

SEQ ID NO: 5952 - RNA, 21 nt, RNAi
ggucaacgacaaagagguguu

SEQ ID NO: 5953 - RNA, 21 nt, RNAi
uuccaguugcuguuucuccac

SEQ ID NO: 5954 - DNA, 21 bp, Homo sapiens
aaggatccaacgaccaagaac

SEQ ID NO: 5955 - RNA, 21 nt, RNAi
ggauccaacgaccaagaacuu

SEQ ID NO: 5956 - RNA, 21 nt, RNAi
uuccuagguugcugguucuug

SEQ ID NO: 5957 - DNA, 21 bp, Homo sapiens
aaatggtacattccgctcacg

SEQ ID NO: 5958 - RNA, 21 nt, RNAi
augguacauuccgcucacguu

SEQ ID NO: 5959 - RNA, 21 nt, RNAi
uuuaccauguaaggcgagugc

SEQ ID NO: 5960 - DNA, 21 bp, Homo sapiens
aacggcaagagttacacgttc

SEQ ID NO: 5961 - RNA, 21 nt, RNAi
cggcaagaguuacacguucuu

SEQ ID NO: 5962 - RNA, 21 nt, RNAi
uugccguucucaaugugcaag

SEQ ID NO: 5963 - DNA, 21 bp, Homo sapiens
aagagttacacgttcctgatc

SEQ ID NO: 5964 - RNA, 21 nt, RNAi
gaguuacacguuccugaucuu

SEQ ID NO: 5965 - RNA, 21 nt, RNAi
uucucaaugugcaaggacuag

SEQ ID NO: 5966 - DNA, 21 bp, Homo sapiens
aacgaggaatttgagatagag

SEQ ID NO: 5967 - RNA, 21 nt, RNAi
cgaggaauuugagauagaguu

SEQ ID NO: 5968 - RNA, 21 nt, RNAi
uugcuccuuaaacucuaucuc

SEQ ID NO: 5969 - DNA, 21 bp, Homo sapiens
aaagtgttacaacaagacgaa

SEQ ID NO: 5970 - RNA, 21 nt, RNAi
aguguuacaacaagacgaauu

SEQ ID NO: 5971 - RNA, 21 nt, RNAi
uuucacaauguuguucugcuu

SEQ ID NO: 5972 - DNA, 21 bp, Homo sapiens
aagtgttacaacaagacgaag

SEQ ID NO: 5973 - RNA, 21 nt, RNAi
guguuacaacaagacgaaguu

SEQ ID NO: 5974 - RNA, 21 nt, RNAi
uucacaauguuguucugcuuc

SEQ ID NO: 5975 - DNA, 21 bp, Homo sapiens
catgatctacctgcagacgtt

SEQ ID NO: 5976 - RNA, 21 nt, RNAi
ugaucuaccugcagacguuuu

SEQ ID NO: 5977 - RNA, 21 nt, RNAi
uuacuagauggacgucugcaa

SEQ ID NO: 5978 - DNA, 21 bp, Homo sapiens
cagaactcgcaacagtccttc

SEQ ID NO: 5979 - RNA, 21 nt, RNAi
gaacucgcaacaguccuucuu

SEQ ID NO: 5980 - RNA, 21 nt, RNAi
uucuugagcguugucaggaag

SEQ ID NO: 5981 - DNA, 21 bp, Homo sapiens
cactaaagcgagtgagctgga

SEQ ID NO: 5982 - RNA, 21 nt, RNAi
cuaaagcgagugagcuggauu

SEQ ID NO: 5983 - RNA, 21 nt, RNAi
uugauuucgcucacucgaccu

SEQ ID NO: 5984 - DNA, 21 bp, Homo sapiens
caaagtgcctgagctctacga

SEQ ID NO: 5985 - RNA, 21 nt, RNAi
aagugccugagcucuacgauu

SEQ ID NO: 5986 - RNA, 21 nt, RNAi
uuuucacggacucgagaugcu

SEQ ID NO: 5987 - DNA, 21 bp, Homo sapiens
caaggatccaacgaccaagaa

SEQ ID NO: 5988 - RNA, 21 nt, RNAi
aggauccaacgaccaagaauu

SEQ ID NO: 5989 - RNA, 21 nt, RNAi
uuuccuagguugcugguucuu

SEQ ID NO: 5990 - DNA, 21 bp, Homo sapiens
caacgaccaagaactctctgg

SEQ ID NO: 5991 - RNA, 21 nt, RNAi
acgaccaagaacucucugguu

SEQ ID NO: 5992 - RNA, 21 nt, RNAi
uuugcugguucuugagagacc

SEQ ID NO: 5993 - DNA, 21 bp, Homo sapiens
catgacttgctgaagcacact

SEQ ID NO: 5994 - RNA, 21 nt, RNAi
ugacuugcugaagcacacuuu

SEQ ID NO: 5995 - RNA, 21 nt, RNAi
uuacugaacgacuucguguga

SEQ ID NO: 5996 - DNA, 21 bp, Homo sapiens
catcaatgaggagatcacacc

SEQ ID NO: 5997 - RNA, 21 nt, RNAi
ucaaugaggagaucacaccuu

SEQ ID NO: 5998 - RNA, 21 nt, RNAi
uuaguuacuccucuagugugg

SEQ ID NO: 5999 - DNA, 21 bp, Homo sapiens
caaatggtacattccgctcac

SEQ ID NO: 6000 - RNA, 21 nt, RNAi
aaugguacauuccgcucacuu

SEQ ID NO: 6001 - RNA, 21 nt, RNAi
uuuuaccauguaaggcgagug

SEQ ID NO: 6002 - DNA, 21 bp, Homo sapiens
caacggcaagagttacacgtt

SEQ ID NO: 6003 - RNA, 21 nt, RNAi
acggcaagaguuacacguuuu

SEQ ID NO: 6004 - RNA, 21 nt, RNAi
uuugccguucucaaugugcaa

SEQ ID NO: 6005 - DNA, 21 bp, Homo sapiens
caagagttacacgttcctgat

SEQ ID NO: 6006 - RNA, 21 nt, RNAi
agaguuacacguuccugauuu

SEQ ID NO: 6007 - RNA, 21 nt, RNAi
uuucucaaugugcaaggacua

SEQ ID NO: 6008 - DNA, 21 bp, Homo sapiens
cagatgctgaccaactcgtgt

SEQ ID NO: 6009 - RNA, 21 nt, RNAi
gaugcugaccaacucguguuu

SEQ ID NO: 6010 - RNA, 21 nt, RNAi
uucuacgacugguugagcaca

SEQ ID NO: 6011 - DNA, 21 bp, Homo sapiens
caactcgtgtgtgaaactcca

SEQ ID NO: 6012 - RNA, 21 nt, RNAi
acucgugugugaaacuccauu

SEQ ID NO: 6013 - RNA, 21 nt, RNAi
uuugagcacacacuuugaggu

SEQ ID NO: 6014 - DNA, 21 bp, Homo sapiens
cagcattccgctgaccatcaa

SEQ ID NO: 6015 - RNA, 21 nt, RNAi
gcauuccgcugaccaucaauu

SEQ ID NO: 6016 - RNA, 21 nt, RNAi
uucguaaggcgacugguaguu

SEQ ID NO: 6017 - DNA, 21 bp, Homo sapiens
cattccgctgaccatcaataa

SEQ ID NO: 6018 - RNA, 21 nt, RNAi
uuccgcugaccaucaauaauu

SEQ ID NO: 6019 - RNA, 21 nt, RNAi
uuaaggcgacugguaguuauu

SEQ ID NO: 6020 - DNA, 21 bp, Homo sapiens
cagccactggatttaagcaga

SEQ ID NO: 6021 - RNA, 21 nt, RNAi
gccacuggauuuaagcagauu

SEQ ID NO: 6022 - RNA, 21 nt, RNAi
uucggugaccuaaauucgucu

SEQ ID NO: 6023 - DNA, 21 bp, Homo sapiens
caataacaaggatgtgtcggt

SEQ ID NO: 6024 - RNA, 21 nt, RNAi
auaacaaggaugugucgguuu

SEQ ID NO: 6025 - RNA, 21 nt, RNAi
uuuauuguuccuacacagcca

SEQ ID NO: 6026 - DNA, 21 bp, Homo sapiens
gatctacctgcagacgttgct

SEQ ID NO: 6027 - RNA, 21 nt, RNAi
ucuaccugcagacguugcuuu

SEQ ID NO: 6028 - RNA, 21 nt, RNAi
uuagauggacgucugcaacga

SEQ ID NO: 6029 - DNA, 21 bp, Homo sapiens
gaacgtcgagtttcaccacga

SEQ ID NO: 6030 - RNA, 21 nt, RNAi
acgucgaguuucaccacgauu

SEQ ID NO: 6031 - RNA, 21 nt, RNAi
uuugcagcucaaaguggugcu

SEQ ID NO: 6032 - DNA, 21 bp, Homo sapiens
gaaggtcaacgacaaagaggt

SEQ ID NO: 6033 - RNA, 21 nt, RNAi
aggucaacgacaaagagguuu

SEQ ID NO: 6034 - RNA, 21 nt, RNAi
uuuccaguugcuguuucucca

SEQ ID NO: 6035 - DNA, 21 bp, Homo sapiens
gactgcagctccaatgagaac

SEQ ID NO: 6036 - RNA, 21 nt, RNAi
cugcagcuccaaugagaacuu

SEQ ID NO: 6037 - RNA, 21 nt, RNAi
uugacgucgagguuacucuug

SEQ ID NO: 6038 - DNA, 21 bp, Homo sapiens
gagtccactaaagcgagtgag

SEQ ID NO: 6039 - RNA, 21 nt, RNAi
guccacuaaagcgagugaguu

SEQ ID NO: 6040 - RNA, 21 nt, RNAi
uucaggugauuucgcucacuc

SEQ ID NO: 6041 - DNA, 21 bp, Homo sapiens
gatccaacgaccaagaactct

SEQ ID NO: 6042 - RNA, 21 nt, RNAi
uccaacgaccaagaacucuuu

SEQ ID NO: 6043 - RNA, 21 nt, RNAi
uuagguugcugguucuugaga

SEQ ID NO: 6044 - DNA, 21 bp, Homo sapiens
gacttgctgaagcacactcct

SEQ ID NO: 6045 - RNA, 21 nt, RNAi
cuugcugaagcacacuccuuu

SEQ ID NO: 6046 - RNA, 21 nt, RNAi
uugaacgacuucgugugagga

SEQ ID NO: 6047 - DNA, 21 bp, Homo sapiens
gagttacacgttcctgatctc

SEQ ID NO: 6048 - RNA, 21 nt, RNAi
guuacacguuccugaucucuu

SEQ ID NO: 6049 - RNA, 21 nt, RNAi
uucaaugugcaaggacuagag

SEQ ID NO: 6050 - DNA, 21 bp, Homo sapiens
gatgctgaccaactcgtgtgt

SEQ ID NO: 6051 - RNA, 21 nt, RNAi
ugcugaccaacucguguguuu

SEQ ID NO: 6052 - RNA, 21 nt, RNAi
uuacgacugguugagcacaca

SEQ ID NO: 6053 - DNA, 21 bp, Homo sapiens
gaccaactcgtgtgtgaaact

SEQ ID NO: 6054 - RNA, 21 nt, RNAi
ccaacucgugugugaaacuuu

SEQ ID NO: 6055 - RNA, 21 nt, RNAi
uugguugagcacacacuuuga

SEQ ID NO: 6056 - DNA, 21 bp, Homo sapiens
gagttcaaatctgtactgcac

SEQ ID NO: 6057 - RNA, 21 nt, RNAi
guucaaaucuguacugcacuu

SEQ ID NO: 6058 - RNA, 21 nt, RNAi
uucaaguuuagacaugacgug

SEQ ID NO: 6059 - DNA, 21 bp, Homo sapiens
gaataaagcaaagacgcgcgt

SEQ ID NO: 6060 - RNA, 21 nt, RNAi
auaaagcaaagacgcgcguuu

SEQ ID NO: 6061 - RNA, 21 nt, RNAi
uuuauuucguuucugcgcgca

SEQ ID NO: 6062 - DNA, 21 bp, Homo sapiens
gaacgaggaatttgagataga

SEQ ID NO: 6063 - RNA, 21 nt, RNAi
acgaggaauuugagauagauu

SEQ ID NO: 6064 - RNA, 21 nt, RNAi
uuugcuccuuaaacucuaucu

SEQ ID NO: 6065 - DNA, 21 bp, Homo sapiens
gaggaatttgagatagagctg

SEQ ID NO: 6066 - RNA, 21 nt, RNAi
ggaauuugagauagagcuguu

SEQ ID NO: 6067 - RNA, 21 nt, RNAi
uuccuuaaacucuaucucgac

SEQ ID NO: 6068 - DNA, 21 bp, Homo sapiens
aaaggcctgcagcaggacgag

SEQ ID NO: 6069 - RNA, 21 nt, RNAi
aggccugcagcaggacgaguu

SEQ ID NO: 6070 - RNA, 21 nt, RNAi
uuuccggacgucguccugcuc

SEQ ID NO: 6071 - DNA, 21 bp, Homo sapiens
aaatgtacaacctttaaggca

SEQ ID NO: 6072 - RNA, 21 nt, RNAi
auguacaaccuuuaaggcauu

SEQ ID NO: 6073 - RNA, 21 nt, RNAi
uuuacauguuggaaauuccgu

SEQ ID NO: 6074 - DNA, 21 bp, Homo sapiens
aatgtacaacctttaaggcaa

SEQ ID NO: 6075 - RNA, 21 nt, RNAi
uguacaaccuuuaaggcaauu

SEQ ID NO: 6076 - RNA, 21 nt, RNAi
uuacauguuggaaauuccguu

SEQ ID NO: 6077 - DNA, 21 bp, Homo sapiens
aagaatctgcctgtaacaata

SEQ ID NO: 6078 - RNA, 21 nt, RNAi
gaaucugccuguaacaauauu

SEQ ID NO: 6079 - RNA, 21 nt, RNAi
uucuuagacggacauuguuau

SEQ ID NO: 6080 - DNA, 21 bp, Homo sapiens
aatctgcctgtaacaatactc

SEQ ID NO: 6081 - RNA, 21 nt, RNAi
ucugccuguaacaauacucuu

SEQ ID NO: 6082 - RNA, 21 nt, RNAi
uuagacggacauuguuaugag

SEQ ID NO: 6083 - DNA, 21 bp, Homo sapiens
aacaatactcttcagcagcag

SEQ ID NO: 6084 - RNA, 21 nt, RNAi
caauacucuucagcagcaguu

SEQ ID NO: 6085 - RNA, 21 nt, RNAi
uuguuaugagaagucgucguc

SEQ ID NO: 6086 - DNA, 21 bp, Homo sapiens
aatactcttcagcagcagaaa

SEQ ID NO: 6087 - RNA, 21 nt, RNAi
uacucuucagcagcagaaauu

SEQ ID NO: 6088 - RNA, 21 nt, RNAi
uuaugagaagucgucgucuuu

SEQ ID NO: 6089 - DNA, 21 bp, Homo sapiens
aaggagagtaatatgtcaacg

SEQ ID NO: 6090 - RNA, 21 nt, RNAi
ggagaguaauaugucaacguu

SEQ ID NO: 6091 - RNA, 21 nt, RNAi
uuccucucauuauacaguugc

SEQ ID NO: 6092 - DNA, 21 bp, Homo sapiens
aacgttattagaaagagctgt

SEQ ID NO: 6093 - RNA, 21 nt, RNAi
cguuauuagaaagagcuguuu

SEQ ID NO: 6094 - RNA, 21 nt, RNAi
uugcaauaaucuuucucgaca

SEQ ID NO: 6095 - DNA, 21 bp, Homo sapiens
aaagagctgtagaagcactac

SEQ ID NO: 6096 - RNA, 21 nt, RNAi
agagcuguagaagcacuacuu

SEQ ID NO: 6097 - RNA, 21 nt, RNAi
uuucucgacaucuucgugaug

SEQ ID NO: 6098 - DNA, 21 bp, Homo sapiens
aagagctgtagaagcactaca

SEQ ID NO: 6099 - RNA, 21 nt, RNAi
gagcuguagaagcacuacauu

SEQ ID NO: 6100 - RNA, 21 nt, RNAi
uucucgacaucuucgugaugu

SEQ ID NO: 6101 - DNA, 21 bp, Homo sapiens
aacgatattatagtgatcctc

SEQ ID NO: 6102 - RNA, 21 nt, RNAi
cgauauuauagugauccucuu

SEQ ID NO: 6103 - RNA, 21 nt, RNAi
uugcuauaauaucacuaggag

SEQ ID NO: 6104 - DNA, 21 bp, Homo sapiens
aatgagcctttggatatgtac

SEQ ID NO: 6105 - RNA, 21 nt, RNAi
ugagccuuuggauauguacuu

SEQ ID NO: 6106 - RNA, 21 nt, RNAi
uuacucggaaaccuauacaug

SEQ ID NO: 6107 - DNA, 21 bp, Homo sapiens
aaactttaggaaagcagatgc

SEQ ID NO: 6108 - RNA, 21 nt, RNAi
acuuuaggaaagcagaugcuu

SEQ ID NO: 6109 - RNA, 21 nt, RNAi
uuugaaauccuuucgucuacg

SEQ ID NO: 6110 - DNA, 21 bp, Homo sapiens
aactttaggaaagcagatgcg

SEQ ID NO: 6111 - RNA, 21 nt, RNAi
cuuuaggaaagcagaugcguu

SEQ ID NO: 6112 - RNA, 21 nt, RNAi
uugaaauccuuucgucuacgc

SEQ ID NO: 6113 - DNA, 21 bp, Homo sapiens
aaagcagatgcgatatttcag

SEQ ID NO: 6114 - RNA, 21 nt, RNAi
agcagaugcgauauuucaguu

SEQ ID NO: 6115 - RNA, 21 nt, RNAi
uuucgucuacgcuauaaaguc

SEQ ID NO: 6116 - DNA, 21 bp, Homo sapiens
aagcagatgcgatatttcagg

SEQ ID NO: 6117 - RNA, 21 nt, RNAi
gcagaugcgauauuucagguu

SEQ ID NO: 6118 - RNA, 21 nt, RNAi
uucgucuacgcuauaaagucc

SEQ ID NO: 6119 - DNA, 21 bp, Homo sapiens
aacagaaggctgaaccactag

SEQ ID NO: 6120 - RNA, 21 nt, RNAi
cagaaggcugaaccacuaguu

SEQ ID NO: 6121 - RNA, 21 nt, RNAi
uugucuuccgacuuggugauc

SEQ ID NO: 6122 - DNA, 21 bp, Homo sapiens
aaggctgaaccactagaaaga

SEQ ID NO: 6123 - RNA, 21 nt, RNAi
ggcugaaccacuagaaagauu

SEQ ID NO: 6124 - RNA, 21 nt, RNAi
uuccgacuuggugaucuuucu

SEQ ID NO: 6125 - DNA, 21 bp, Homo sapiens
aaccactagaaagactacagt

SEQ ID NO: 6126 - RNA, 21 nt, RNAi
ccacuagaaagacuacaguuu

SEQ ID NO: 6127 - RNA, 21 nt, RNAi
uuggugaucuuucugauguca

SEQ ID NO: 6128 - DNA, 21 bp, Homo sapiens
aattccaagctcgagtgtctc

SEQ ID NO: 6129 - RNA, 21 nt, RNAi
uuccaagcucgagugucucuu

SEQ ID NO: 6130 - RNA, 21 nt, RNAi
uuaagguucgagcucacagag

SEQ ID NO: 6131 - DNA, 21 bp, Homo sapiens
aagctcgagtgtctcggcaaa

SEQ ID NO: 6132 - RNA, 21 nt, RNAi
gcucgagugucucggcaaauu

SEQ ID NO: 6133 - RNA, 21 nt, RNAi
uucgagcucacagagccguuu

SEQ ID NO: 6134 - DNA, 21 bp, Homo sapiens
aaactctgttggcacttgaga

SEQ ID NO: 6135 - RNA, 21 nt, RNAi
acucuguuggcacuugagauu

SEQ ID NO: 6136 - RNA, 21 nt, RNAi
uuugagacaaccgugaacucu

SEQ ID NO: 6137 - DNA, 21 bp, Homo sapiens
aactctgttggcacttgagaa

SEQ ID NO: 6138 - RNA, 21 nt, RNAi
cucuguuggcacuugagaauu

SEQ ID NO: 6139 - RNA, 21 nt, RNAi
uugagacaaccgugaacucuu

SEQ ID NO: 6140 - DNA, 21 bp, Homo sapiens
aaagaagaagaggaggaagtt

SEQ ID NO: 6141 - RNA, 21 nt, RNAi
agaagaagaggaggaaguuuu

SEQ ID NO: 6142 - RNA, 21 nt, RNAi
uuucuucuucuccuccuucaa

SEQ ID NO: 6143 - DNA, 21 bp, Homo sapiens
aagaagaagaggaggaagttt

SEQ ID NO: 6144 - RNA, 21 nt, RNAi
gaagaagaggaggaaguuuuu

SEQ ID NO: 6145 - RNA, 21 nt, RNAi
uucuucuucuccuccuucaaa

SEQ ID NO: 6146 - DNA, 21 bp, Homo sapiens
aacgaagcacactagctgaac

SEQ ID NO: 6147 - RNA, 21 nt, RNAi
cgaagcacacuagcugaacuu

SEQ ID NO: 6148 - RNA, 21 nt, RNAi
uugcuucgugugaucgacuug

SEQ ID NO: 6149 - DNA, 21 bp, Homo sapiens
aagcacactagctgaactaaa

SEQ ID NO: 6150 - RNA, 21 nt, RNAi
gcacacuagcugaacuaaauu

SEQ ID NO: 6151 - RNA, 21 nt, RNAi
uucgugugaucgacuugauuu

SEQ ID NO: 6152 - DNA, 21 bp, Homo sapiens
aaagacagcaagagctccaat

SEQ ID NO: 6153 - RNA, 21 nt, RNAi
agacagcaagagcuccaauuu

SEQ ID NO: 6154 - RNA, 21 nt, RNAi
uuucugucguucucgagguua

SEQ ID NO: 6155 - DNA, 21 bp, Homo sapiens
aagacagcaagagctccaatc

SEQ ID NO: 6156 - RNA, 21 nt, RNAi
gacagcaagagcuccaaucuu

SEQ ID NO: 6157 - RNA, 21 nt, RNAi
uucugucguucucgagguuag

SEQ ID NO: 6158 - DNA, 21 bp, Homo sapiens
aagagctccaatcatccgtgt

SEQ ID NO: 6159 - RNA, 21 nt, RNAi
gagcuccaaucauccguguuu

SEQ ID NO: 6160 - RNA, 21 nt, RNAi
uucucgagguuaguaggcaca

SEQ ID NO: 6161 - DNA, 21 bp, Homo sapiens
aatcatccgtgtaggaggtgc

SEQ ID NO: 6162 - RNA, 21 nt, RNAi
ucauccguguaggaggugcuu

SEQ ID NO: 6163 - RNA, 21 nt, RNAi
uuaguaggcacauccuccacg

SEQ ID NO: 6164 - DNA, 21 bp, Homo sapiens
aaggctccaagccagaacaga

SEQ ID NO: 6165 - RNA, 21 nt, RNAi
ggcuccaagccagaacagauu

SEQ ID NO: 6166 - RNA, 21 nt, RNAi
uuccgagguucggucuugucu

SEQ ID NO: 6167 - DNA, 21 bp, Homo sapiens
aagccagaacagaggactcca

SEQ ID NO: 6168 - RNA, 21 nt, RNAi
gccagaacagaggacuccauu

SEQ ID NO: 6169 - RNA, 21 nt, RNAi
uucggucuugucuccugaggu

SEQ ID NO: 6170 - DNA, 21 bp, Homo sapiens
aaatccatttcctcaacagat

SEQ ID NO: 6171 - RNA, 21 nt, RNAi
auccauuuccucaacagauuu

SEQ ID NO: 6172 - RNA, 21 nt, RNAi
uuuagguaaaggaguugucua

SEQ ID NO: 6173 - DNA, 21 bp, Homo sapiens
aatccatttcctcaacagatg

SEQ ID NO: 6174 - RNA, 21 nt, RNAi
uccauuuccucaacagauguu

SEQ ID NO: 6175 - RNA, 21 nt, RNAi
uuagguaaaggaguugucuac

SEQ ID NO: 6176 - DNA, 21 bp, Homo sapiens
aaatgctgatgaggcttctac

SEQ ID NO: 6177 - RNA, 21 nt, RNAi
augcugaugaggcuucuacuu

SEQ ID NO: 6178 - RNA, 21 nt, RNAi
uuuacgacuacuccgaagaug

SEQ ID NO: 6179 - DNA, 21 bp, Homo sapiens
aatgctgatgaggcttctaca

SEQ ID NO: 6180 - RNA, 21 nt, RNAi
ugcugaugaggcuucuacauu

SEQ ID NO: 6181 - RNA, 21 nt, RNAi
uuacgacuacuccgaagaugu

SEQ ID NO: 6182 - DNA, 21 bp, Homo sapiens
aagcctacagtccagccatgg

SEQ ID NO: 6183 - RNA, 21 nt, RNAi
gccuacaguccagccaugguu

SEQ ID NO: 6184 - RNA, 21 nt, RNAi
uucggaugucaggucgguacc

SEQ ID NO: 6185 - DNA, 21 bp, Homo sapiens
aaagagaatgagctgcaagca

SEQ ID NO: 6186 - RNA, 21 nt, RNAi
agagaaugagcugcaagcauu

SEQ ID NO: 6187 - RNA, 21 nt, RNAi
uuucucuuacucgacguucgu

SEQ ID NO: 6188 - DNA, 21 bp, Homo sapiens
aagagaatgagctgcaagcag

SEQ ID NO: 6189 - RNA, 21 nt, RNAi
gagaaugagcugcaagcaguu

SEQ ID NO: 6190 - RNA, 21 nt, RNAi
uucucuuacucgacguucguc

SEQ ID NO: 6191 - DNA, 21 bp, Homo sapiens
aacacaggcaggtccttggaa

SEQ ID NO: 6192 - RNA, 21 nt, RNAi
cacaggcagguccuuggaauu

SEQ ID NO: 6193 - RNA, 21 nt, RNAi
uuguguccguccaggaaccuu

SEQ ID NO: 6194 - DNA, 21 bp, Homo sapiens
aacacaggcctcgtggcaata

SEQ ID NO: 6195 - RNA, 21 nt, RNAi
cacaggccucguggcaauauu

SEQ ID NO: 6196 - RNA, 21 nt, RNAi
uuguguccggagcaccguuau

SEQ ID NO: 6197 - DNA, 21 bp, Homo sapiens
aatacagcttcactgatagct

SEQ ID NO: 6198 - RNA, 21 nt, RNAi
uacagcuucacugauagcuuu

SEQ ID NO: 6199 - RNA, 21 nt, RNAi
uuaugucgaagugacuaucga

SEQ ID NO: 6200 - DNA, 21 bp, Homo sapiens
aagagactgcacaacagccag

SEQ ID NO: 6201 - RNA, 21 nt, RNAi
gagacugcacaacagccaguu

SEQ ID NO: 6202 - RNA, 21 nt, RNAi
uucucugacguguugucgguc

SEQ ID NO: 6203 - DNA, 21 bp, Homo sapiens
aacagccagttatgacaccat

SEQ ID NO: 6204 - RNA, 21 nt, RNAi
cagccaguuaugacaccauuu

SEQ ID NO: 6205 - RNA, 21 nt, RNAi
uugucggucaauacuguggua

SEQ ID NO: 6206 - DNA, 21 bp, Homo sapiens
aacctagtataaaccacatcc

SEQ ID NO: 6207 - RNA, 21 nt, RNAi
ccuaguauaaaccacauccuu

SEQ ID NO: 6208 - RNA, 21 nt, RNAi
uuggaucauauuugguguagg

SEQ ID NO: 6209 - DNA, 21 bp, Homo sapiens
aaaccacatcctaagcaccag

SEQ ID NO: 6210 - RNA, 21 nt, RNAi
accacauccuaagcaccaguu

SEQ ID NO: 6211 - RNA, 21 nt, RNAi
uuugguguaggauucgugguc

SEQ ID NO: 6212 - DNA, 21 bp, Homo sapiens
aaccacatcctaagcaccaga

SEQ ID NO: 6213 - RNA, 21 nt, RNAi
ccacauccuaagcaccagauu

SEQ ID NO: 6214 - RNA, 21 nt, RNAi
uugguguaggauucguggucu

SEQ ID NO: 6215 - DNA, 21 bp, Homo sapiens
aagcaccagaaagcctggaaa

SEQ ID NO: 6216 - RNA, 21 nt, RNAi
gcaccagaaagccuggaaauu

SEQ ID NO: 6217 - RNA, 21 nt, RNAi
uucguggucuuucggaccuuu

SEQ ID NO: 6218 - DNA, 21 bp, Homo sapiens
aaagcctggaaaggaagaagg

SEQ ID NO: 6219 - RNA, 21 nt, RNAi
agccuggaaaggaagaagguu

SEQ ID NO: 6220 - RNA, 21 nt, RNAi
uuucggaccuuuccuucuucc

SEQ ID NO: 6221 - DNA, 21 bp, Homo sapiens
aagcctggaaaggaagaagga

SEQ ID NO: 6222 - RNA, 21 nt, RNAi
gccuggaaaggaagaaggauu

SEQ ID NO: 6223 - RNA, 21 nt, RNAi
uucggaccuuuccuucuuccu

SEQ ID NO: 6224 - DNA, 21 bp, Homo sapiens
aaaggaagaaggagattctct

SEQ ID NO: 6225 - RNA, 21 nt, RNAi
aggaagaaggagauucucuuu

SEQ ID NO: 6226 - RNA, 21 nt, RNAi
uuuccuucuuccucuaagaga

SEQ ID NO: 6227 - DNA, 21 bp, Homo sapiens
aaggaagaaggagattctcta

SEQ ID NO: 6228 - RNA, 21 nt, RNAi
ggaagaaggagauucucuauu

SEQ ID NO: 6229 - RNA, 21 nt, RNAi
uuccuucuuccucuaagagau

SEQ ID NO: 6230 - DNA, 21 bp, Homo sapiens
aagaaggagattctctacaaa

SEQ ID NO: 6231 - RNA, 21 nt, RNAi
gaaggagauucucuacaaauu

SEQ ID NO: 6232 - RNA, 21 nt, RNAi
uucuuccucuaagagauguuu

SEQ ID NO: 6233 - DNA, 21 bp, Homo sapiens
aagcgtctgaggagaagaaag

SEQ ID NO: 6234 - RNA, 21 nt, RNAi
gcgucugaggagaagaaaguu

SEQ ID NO: 6235 - RNA, 21 nt, RNAi
uucgcagacuccucuucuuuc

SEQ ID NO: 6236 - DNA, 21 bp, Homo sapiens
aagatgatgtattgtaaggag

SEQ ID NO: 6237 - RNA, 21 nt, RNAi
gaugauguauuguaaggaguu

SEQ ID NO: 6238 - RNA, 21 nt, RNAi
uucuacuacauaacauuccuc

SEQ ID NO: 6239 - DNA, 21 bp, Homo sapiens
aaggagaagatttatgcagga

SEQ ID NO: 6240 - RNA, 21 nt, RNAi
ggagaagauuuaugcaggauu

SEQ ID NO: 6241 - RNA, 21 nt, RNAi
uuccucuucuaaauacguccu

SEQ ID NO: 6242 - DNA, 21 bp, Homo sapiens
aagccgagctattgaccagtg

SEQ ID NO: 6243 - RNA, 21 nt, RNAi
gccgagcuauugaccaguguu

SEQ ID NO: 6244 - RNA, 21 nt, RNAi
uucggcucgauaacuggucac

SEQ ID NO: 6245 - DNA, 21 bp, Homo sapiens
aagagagcagaaatgcagaaa

SEQ ID NO: 6246 - RNA, 21 nt, RNAi
gagagcagaaaugcagaaauu

SEQ ID NO: 6247 - RNA, 21 nt, RNAi
uucucucgucuuuacgucuuu

SEQ ID NO: 6248 - DNA, 21 bp, Homo sapiens
aaatgcagaaacagattgaag

SEQ ID NO: 6249 - RNA, 21 nt, RNAi
augcagaaacagauugaaguu

SEQ ID NO: 6250 - RNA, 21 nt, RNAi
uuuacgucuuugucuaacuuc

SEQ ID NO: 6251 - DNA, 21 bp, Homo sapiens
aatgcagaaacagattgaaga

SEQ ID NO: 6252 - RNA, 21 nt, RNAi
ugcagaaacagauugaagauu

SEQ ID NO: 6253 - RNA, 21 nt, RNAi
uuacgucuuugucuaacuucu

SEQ ID NO: 6254 - DNA, 21 bp, Homo sapiens
aaacagattgaagagatggag

SEQ ID NO: 6255 - RNA, 21 nt, RNAi
acagauugaagagauggaguu

SEQ ID NO: 6256 - RNA, 21 nt, RNAi
uuugucuaacuucucuaccuc

SEQ ID NO: 6257 - DNA, 21 bp, Homo sapiens
aacagattgaagagatggaga

SEQ ID NO: 6258 - RNA, 21 nt, RNAi
cagauugaagagauggagauu

SEQ ID NO: 6259 - RNA, 21 nt, RNAi
uugucuaacuucucuaccucu

SEQ ID NO: 6260 - DNA, 21 bp, Homo sapiens
aagagatggagaagaagctaa

SEQ ID NO: 6261 - RNA, 21 nt, RNAi
gagauggagaagaagcuaauu

SEQ ID NO: 6262 - RNA, 21 nt, RNAi
uucucuaccucuucuucgauu

SEQ ID NO: 6263 - DNA, 21 bp, Homo sapiens
aaagaaatccaaactactcag

SEQ ID NO: 6264 - RNA, 21 nt, RNAi
agaaauccaaacuacucaguu

SEQ ID NO: 6265 - RNA, 21 nt, RNAi
uuucuuuagguuugaugaguc

SEQ ID NO: 6266 - DNA, 21 bp, Homo sapiens
aagaaatccaaactactcagc

SEQ ID NO: 6267 - RNA, 21 nt, RNAi
gaaauccaaacuacucagcuu

SEQ ID NO: 6268 - RNA, 21 nt, RNAi
uucuuuagguuugaugagucg

SEQ ID NO: 6269 - DNA, 21 bp, Homo sapiens
aaatccaaactactcagcaag

SEQ ID NO: 6270 - RNA, 21 nt, RNAi
auccaaacuacucagcaaguu

SEQ ID NO: 6271 - RNA, 21 nt, RNAi
uuuagguuugaugagucguuc

SEQ ID NO: 6272 - DNA, 21 bp, Homo sapiens
aatccaaactactcagcaaga

SEQ ID NO: 6273 - RNA, 21 nt, RNAi
uccaaacuacucagcaagauu

SEQ ID NO: 6274 - RNA, 21 nt, RNAi
uuagguuugaugagucguucu

SEQ ID NO: 6275 - DNA, 21 bp, Homo sapiens
aaactactcagcaagaaagaa

SEQ ID NO: 6276 - RNA, 21 nt, RNAi
acuacucagcaagaaagaauu

SEQ ID NO: 6277 - RNA, 21 nt, RNAi
uuugaugagucguucuuucuu

SEQ ID NO: 6278 - DNA, 21 bp, Homo sapiens
aactactcagcaagaaagaac

SEQ ID NO: 6279 - RNA, 21 nt, RNAi
cuacucagcaagaaagaacuu

SEQ ID NO: 6280 - RNA, 21 nt, RNAi
uugaugagucguucuuucuug

SEQ ID NO: 6281 - DNA, 21 bp, Homo sapiens
aagaaagaacaggtgatcagc

SEQ ID NO: 6282 - RNA, 21 nt, RNAi
gaaagaacaggugaucagcuu

SEQ ID NO: 6283 - RNA, 21 nt, RNAi
uucuuucuuguccacuagucg

SEQ ID NO: 6284 - DNA, 21 bp, Homo sapiens
aaagaacaggtgatcagcaag

SEQ ID NO: 6285 - RNA, 21 nt, RNAi
agaacaggugaucagcaaguu

SEQ ID NO: 6286 - RNA, 21 nt, RNAi
uuucuuguccacuagucguuc

SEQ ID NO: 6287 - DNA, 21 bp, Homo sapiens
aagaacaggtgatcagcaaga

SEQ ID NO: 6288 - RNA, 21 nt, RNAi
gaacaggugaucagcaagauu

SEQ ID NO: 6289 - RNA, 21 nt, RNAi
uucuuguccacuagucguucu

SEQ ID NO: 6290 - DNA, 21 bp, Homo sapiens
aacaggtgatcagcaagaaga

SEQ ID NO: 6291 - RNA, 21 nt, RNAi
caggugaucagcaagaagauu

SEQ ID NO: 6292 - RNA, 21 nt, RNAi
uuguccacuagucguucuucu

SEQ ID NO: 6293 - DNA, 21 bp, Homo sapiens
aagaagagacgatgcctacaa

SEQ ID NO: 6294 - RNA, 21 nt, RNAi
gaagagacgaugccuacaauu

SEQ ID NO: 6295 - RNA, 21 nt, RNAi
uucuucucugcuacggauguu

SEQ ID NO: 6296 - DNA, 21 bp, Homo sapiens
aagagacgatgcctacaaagg

SEQ ID NO: 6297 - RNA, 21 nt, RNAi
gagacgaugccuacaaagguu

SEQ ID NO: 6298 - RNA, 21 nt, RNAi
uucucugcuacggauguuucc

SEQ ID NO: 6299 - DNA, 21 bp, Homo sapiens
aaaggagacaactaaactgca

SEQ ID NO: 6300 - RNA, 21 nt, RNAi
aggagacaacuaaacugcauu

SEQ ID NO: 6301 - RNA, 21 nt, RNAi
uuuccucuguugauuugacgu

SEQ ID NO: 6302 - DNA, 21 bp, Homo sapiens
aaggagacaactaaactgcaa

SEQ ID NO: 6303 - RNA, 21 nt, RNAi
ggagacaacuaaacugcaauu

SEQ ID NO: 6304 - RNA, 21 nt, RNAi
uuccucuguugauuugacguu

SEQ ID NO: 6305 - DNA, 21 bp, Homo sapiens
aactaaactgcaaattgcttc

SEQ ID NO: 6306 - RNA, 21 nt, RNAi
cuaaacugcaaauugcuucuu

SEQ ID NO: 6307 - RNA, 21 nt, RNAi
uugauuugacguuuaacgaag

SEQ ID NO: 6308 - DNA, 21 bp, Homo sapiens
aaactgcaaattgcttccgag

SEQ ID NO: 6309 - RNA, 21 nt, RNAi
acugcaaauugcuuccgaguu

SEQ ID NO: 6310 - RNA, 21 nt, RNAi
uuugacguuuaacgaaggcuc

SEQ ID NO: 6311 - DNA, 21 bp, Homo sapiens
aactgcaaattgcttccgagt

SEQ ID NO: 6312 - RNA, 21 nt, RNAi
cugcaaauugcuuccgaguuu

SEQ ID NO: 6313 - RNA, 21 nt, RNAi
uugacguuuaacgaaggcuca

SEQ ID NO: 6314 - DNA, 21 bp, Homo sapiens
aaattgcttccgagtctcaga

SEQ ID NO: 6315 - RNA, 21 nt, RNAi
auugcuuccgagucucagauu

SEQ ID NO: 6316 - RNA, 21 nt, RNAi
uuuaacgaaggcucagagucu

SEQ ID NO: 6317 - DNA, 21 bp, Homo sapiens
aattgcttccgagtctcagaa

SEQ ID NO: 6318 - RNA, 21 nt, RNAi
uugcuuccgagucucagaauu

SEQ ID NO: 6319 - RNA, 21 nt, RNAi
uuaacgaaggcucagagucuu

SEQ ID NO: 6320 - DNA, 21 bp, Homo sapiens
aaataccaggaatgactctat

SEQ ID NO: 6321 - RNA, 21 nt, RNAi
auaccaggaaugacucuauuu

SEQ ID NO: 6322 - RNA, 21 nt, RNAi
uuuaugguccuuacugagaua

SEQ ID NO: 6323 - DNA, 21 bp, Homo sapiens
aataccaggaatgactctatc

SEQ ID NO: 6324 - RNA, 21 nt, RNAi
uaccaggaaugacucuaucuu

SEQ ID NO: 6325 - RNA, 21 nt, RNAi
uuaugguccuuacugagauag

SEQ ID NO: 6326 - DNA, 21 bp, Homo sapiens
aatgactctatccagttctgt

SEQ ID NO: 6327 - RNA, 21 nt, RNAi
ugacucuauccaguucuguuu

SEQ ID NO: 6328 - RNA, 21 nt, RNAi
uuacugagauaggucaagaca

SEQ ID NO: 6329 - DNA, 21 bp, Homo sapiens
aagtaaactgttgtgccagag

SEQ ID NO: 6330 - RNA, 21 nt, RNAi
guaaacuguugugccagaguu

SEQ ID NO: 6331 - RNA, 21 nt, RNAi
uucauuugacaacacggucuc

SEQ ID NO: 6332 - DNA, 21 bp, Homo sapiens
aaactgttgtgccagagaaac

SEQ ID NO: 6333 - RNA, 21 nt, RNAi
acuguugugccagagaaacuu

SEQ ID NO: 6334 - RNA, 21 nt, RNAi
uuugacaacacggucucuuug

SEQ ID NO: 6335 - DNA, 21 bp, Homo sapiens
aactgttgtgccagagaaact

SEQ ID NO: 6336 - RNA, 21 nt, RNAi
cuguugugccagagaaacuuu

SEQ ID NO: 6337 - RNA, 21 nt, RNAi
uugacaacacggucucuuuga

SEQ ID NO: 6338 - DNA, 21 bp, Homo sapiens
aaacttcacttgcggagaaca

SEQ ID NO: 6339 - RNA, 21 nt, RNAi
acuucacuugcggagaacauu

SEQ ID NO: 6340 - RNA, 21 nt, RNAi
uuugaagugaacgccucuugu

SEQ ID NO: 6341 - DNA, 21 bp, Homo sapiens
aacttcacttgcggagaacat

SEQ ID NO: 6342 - RNA, 21 nt, RNAi
cuucacuugcggagaacauuu

SEQ ID NO: 6343 - RNA, 21 nt, RNAi
uugaagugaacgccucuugua

SEQ ID NO: 6344 - DNA, 21 bp, Homo sapiens
aacatttggcaggaacaacct

SEQ ID NO: 6345 - RNA, 21 nt, RNAi
cauuuggcaggaacaaccuuu

SEQ ID NO: 6346 - RNA, 21 nt, RNAi
uuguaaaccguccuuguugga

SEQ ID NO: 6347 - DNA, 21 bp, Homo sapiens
aacaacctcattctaaaggtc

SEQ ID NO: 6348 - RNA, 21 nt, RNAi
caaccucauucuaaaggucuu

SEQ ID NO: 6349 - RNA, 21 nt, RNAi
uuguuggaguaagauuuccag

SEQ ID NO: 6350 - DNA, 21 bp, Homo sapiens
aaacctcagaaagcatcacct

SEQ ID NO: 6351 - RNA, 21 nt, RNAi
accucagaaagcaucaccuuu

SEQ ID NO: 6352 - RNA, 21 nt, RNAi
uuuggagucuuucguagugga

SEQ ID NO: 6353 - DNA, 21 bp, Homo sapiens
aacctcagaaagcatcacctc

SEQ ID NO: 6354 - RNA, 21 nt, RNAi
ccucagaaagcaucaccucuu

SEQ ID NO: 6355 - RNA, 21 nt, RNAi
uuggagucuuucguaguggag

SEQ ID NO: 6356 - DNA, 21 bp, Homo sapiens
aaagcatcacctcaaatgaag

SEQ ID NO: 6357 - RNA, 21 nt, RNAi
agcaucaccucaaaugaaguu

SEQ ID NO: 6358 - RNA, 21 nt, RNAi
uuucguaguggaguuuacuuc

SEQ ID NO: 6359 - DNA, 21 bp, Homo sapiens
aagcatcacctcaaatgaaga

SEQ ID NO: 6360 - RNA, 21 nt, RNAi
gcaucaccucaaaugaagauu

SEQ ID NO: 6361 - RNA, 21 nt, RNAi
uucguaguggaguuuacuucu

SEQ ID NO: 6362 - DNA, 21 bp, Homo sapiens
aaatgaagatgtgtctccaga

SEQ ID NO: 6363 - RNA, 21 nt, RNAi
augaagaugugucuccagauu

SEQ ID NO: 6364 - RNA, 21 nt, RNAi
uuuacuucuacacagaggucu

SEQ ID NO: 6365 - DNA, 21 bp, Homo sapiens
aatgaagatgtgtctccagat

SEQ ID NO: 6366 - RNA, 21 nt, RNAi
ugaagaugugucuccagauuu

SEQ ID NO: 6367 - RNA, 21 nt, RNAi
uuacuucuacacagaggucua

SEQ ID NO: 6368 - DNA, 21 bp, Homo sapiens
aagatgtgtctccagatgttt

SEQ ID NO: 6369 - RNA, 21 nt, RNAi
gaugugucuccagauguuuuu

SEQ ID NO: 6370 - RNA, 21 nt, RNAi
uucuacacagaggucuacaaa

SEQ ID NO: 6371 - DNA, 21 bp, Homo sapiens
aagacacttgtgactttgcca

SEQ ID NO: 6372 - RNA, 21 nt, RNAi
gacacuugugacuuugccauu

SEQ ID NO: 6373 - RNA, 21 nt, RNAi
uucugugaacacugaaacggu

SEQ ID NO: 6374 - DNA, 21 bp, Homo sapiens
aagatctagatgtaaagacct

SEQ ID NO: 6375 - RNA, 21 nt, RNAi
gaucuagauguaaagaccuuu

SEQ ID NO: 6376 - RNA, 21 nt, RNAi
uucuagaucuacauuucugga

SEQ ID NO: 6377 - DNA, 21 bp, Homo sapiens
aaagacctctgaggaccagca

SEQ ID NO: 6378 - RNA, 21 nt, RNAi
agaccucugaggaccagcauu

SEQ ID NO: 6379 - RNA, 21 nt, RNAi
uuucuggagacuccuggucgu

SEQ ID NO: 6380 - DNA, 21 bp, Homo sapiens
aagacctctgaggaccagcag

SEQ ID NO: 6381 - RNA, 21 nt, RNAi
gaccucugaggaccagcaguu

SEQ ID NO: 6382 - RNA, 21 nt, RNAi
uucuggagacuccuggucguc

SEQ ID NO: 6383 - DNA, 21 bp, Homo sapiens
aattattgaagacagtcgtga

SEQ ID NO: 6384 - RNA, 21 nt, RNAi
uuauugaagacagucgugauu

SEQ ID NO: 6385 - RNA, 21 nt, RNAi
uuaauaacuucugucagcacu

SEQ ID NO: 6386 - DNA, 21 bp, Homo sapiens
aagacagtcgtgaagccacac

SEQ ID NO: 6387 - RNA, 21 nt, RNAi
gacagucgugaagccacacuu

SEQ ID NO: 6388 - RNA, 21 nt, RNAi
uucugucagcacuucggugug

SEQ ID NO: 6389 - DNA, 21 bp, Homo sapiens
aagccacacactcctctggct

SEQ ID NO: 6390 - RNA, 21 nt, RNAi
gccacacacuccucuggcuuu

SEQ ID NO: 6391 - RNA, 21 nt, RNAi
uucggugugugaggagaccga

SEQ ID NO: 6392 - DNA, 21 bp, Homo sapiens
aagcacctcctccatcaaatg

SEQ ID NO: 6393 - RNA, 21 nt, RNAi
gcaccuccuccaucaaauguu

SEQ ID NO: 6394 - RNA, 21 nt, RNAi
uucguggaggagguaguuuac

SEQ ID NO: 6395 - DNA, 21 bp, Homo sapiens
aaatgtcttcaaattcctgag

SEQ ID NO: 6396 - RNA, 21 nt, RNAi
augucuucaaauuccugaguu

SEQ ID NO: 6397 - RNA, 21 nt, RNAi
uuuacagaaguuuaaggacuc

SEQ ID NO: 6398 - DNA, 21 bp, Homo sapiens
aatgtcttcaaattcctgaga

SEQ ID NO: 6399 - RNA, 21 nt, RNAi
ugucuucaaauuccugagauu

SEQ ID NO: 6400 - RNA, 21 nt, RNAi
uuacagaaguuuaaggacucu

SEQ ID NO: 6401 - DNA, 21 bp, Homo sapiens
aaattcctgagaaactagaac

SEQ ID NO: 6402 - RNA, 21 nt, RNAi
auuccugagaaacuagaacuu

SEQ ID NO: 6403 - RNA, 21 nt, RNAi
uuuaaggacucuuugaucuug

SEQ ID NO: 6404 - DNA, 21 bp, Homo sapiens
aattcctgagaaactagaact

SEQ ID NO: 6405 - RNA, 21 nt, RNAi
uuccugagaaacuagaacuuu

SEQ ID NO: 6406 - RNA, 21 nt, RNAi
uuaaggacucuuugaucuuga

SEQ ID NO: 6407 - DNA, 21 bp, Homo sapiens
aacttactaatgagacttcag

SEQ ID NO: 6408 - RNA, 21 nt, RNAi
cuuacuaaugagacuucaguu

SEQ ID NO: 6409 - RNA, 21 nt, RNAi
uugaaugauuacucugaaguc

SEQ ID NO: 6410 - DNA, 21 bp, Homo sapiens
aagtgcctctgcagagttgtg

SEQ ID NO: 6411 - RNA, 21 nt, RNAi
gugccucugcagaguuguguu

SEQ ID NO: 6412 - RNA, 21 nt, RNAi
uucacggagacgucucaacac

SEQ ID NO: 6413 - DNA, 21 bp, Homo sapiens
aagacagaccaatgcctaagt

SEQ ID NO: 6414 - RNA, 21 nt, RNAi
gacagaccaaugccuaaguuu

SEQ ID NO: 6415 - RNA, 21 nt, RNAi
uucugucugguuacggauuca

SEQ ID NO: 6416 - DNA, 21 bp, Homo sapiens
aatgcctaagttggaaattga

SEQ ID NO: 6417 - RNA, 21 nt, RNAi
ugccuaaguuggaaauugauu

SEQ ID NO: 6418 - RNA, 21 nt, RNAi
uuacggauucaaccuuuaacu

SEQ ID NO: 6419 - DNA, 21 bp, Homo sapiens
aagttggaaattgagaaggaa

SEQ ID NO: 6420 - RNA, 21 nt, RNAi
guuggaaauugagaaggaauu

SEQ ID NO: 6421 - RNA, 21 nt, RNAi
uucaaccuuuaacucuuccuu

SEQ ID NO: 6422 - DNA, 21 bp, Homo sapiens
aacgagaatacctaatatgtg

SEQ ID NO: 6423 - RNA, 21 nt, RNAi
cgagaauaccuaauauguguu

SEQ ID NO: 6424 - RNA, 21 nt, RNAi
uugcucuuauggauuauacac

SEQ ID NO: 6425 - DNA, 21 bp, Homo sapiens
aagaaactctgcagaattaac

SEQ ID NO: 6426 - RNA, 21 nt, RNAi
gaaacucugcagaauuaacuu

SEQ ID NO: 6427 - RNA, 21 nt, RNAi
uucuuugagacgucuuaauug

SEQ ID NO: 6428 - DNA, 21 bp, Homo sapiens
aaactctgcagaattaacagt

SEQ ID NO: 6429 - RNA, 21 nt, RNAi
acucugcagaauuaacaguuu

SEQ ID NO: 6430 - RNA, 21 nt, RNAi
uuugagacgucuuaauuguca

SEQ ID NO: 6431 - DNA, 21 bp, Homo sapiens
aactctgcagaattaacagta

SEQ ID NO: 6432 - RNA, 21 nt, RNAi
cucugcagaauuaacaguauu

SEQ ID NO: 6433 - RNA, 21 nt, RNAi
uugagacgucuuaauugucau

SEQ ID NO: 6434 - DNA, 21 bp, Homo sapiens
aataaaggtatcttctcaacc

SEQ ID NO: 6435 - RNA, 21 nt, RNAi
uaaagguaucuucucaaccuu

SEQ ID NO: 6436 - RNA, 21 nt, RNAi
uuauuuccauagaagaguugg

SEQ ID NO: 6437 - DNA, 21 bp, Homo sapiens
aaaggtatcttctcaacctgt

SEQ ID NO: 6438 - RNA, 21 nt, RNAi
agguaucuucucaaccuguuu

SEQ ID NO: 6439 - RNA, 21 nt, RNAi
uuuccauagaagaguuggaca

SEQ ID NO: 6440 - DNA, 21 bp, Homo sapiens
aaggtatcttctcaacctgtc

SEQ ID NO: 6441 - RNA, 21 nt, RNAi
gguaucuucucaaccugucuu

SEQ ID NO: 6442 - RNA, 21 nt, RNAi
uuccauagaagaguuggacag

SEQ ID NO: 6443 - DNA, 21 bp, Homo sapiens
aacctcaagttaaaggaacgt

SEQ ID NO: 6444 - RNA, 21 nt, RNAi
ccucaaguuaaaggaacguuu

SEQ ID NO: 6445 - RNA, 21 nt, RNAi
uuggaguucaauuuccuugca

SEQ ID NO: 6446 - DNA, 21 bp, Homo sapiens
aatatcaagatggctgtattg

SEQ ID NO: 6447 - RNA, 21 nt, RNAi
uaucaagauggcuguauuguu

SEQ ID NO: 6448 - RNA, 21 nt, RNAi
uuauaguucuaccgacauaac

SEQ ID NO: 6449 - DNA, 21 bp, Homo sapiens
aagatggctgtattgtttggc

SEQ ID NO: 6450 - RNA, 21 nt, RNAi
gauggcuguauuguuuggcuu

SEQ ID NO: 6451 - RNA, 21 nt, RNAi
uucuaccgacauaacaaaccg

SEQ ID NO: 6452 - DNA, 21 bp, Homo sapiens
aatagtggagatgctacacaa

SEQ ID NO: 6453 - RNA, 21 nt, RNAi
uaguggagaugcuacacaauu

SEQ ID NO: 6454 - RNA, 21 nt, RNAi
uuaucaccucuacgauguguu

SEQ ID NO: 6455 - DNA, 21 bp, Homo sapiens
aaagcagaaatagtccatggt

SEQ ID NO: 6456 - RNA, 21 nt, RNAi
agcagaaauaguccaugguuu

SEQ ID NO: 6457 - RNA, 21 nt, RNAi
uuucgucuuuaucagguacca

SEQ ID NO: 6458 - DNA, 21 bp, Homo sapiens
aagcagaaatagtccatggtg

SEQ ID NO: 6459 - RNA, 21 nt, RNAi
gcagaaauaguccaugguguu

SEQ ID NO: 6460 - RNA, 21 nt, RNAi
uucgucuuuaucagguaccac

SEQ ID NO: 6461 - DNA, 21 bp, Homo sapiens
aaatagtccatggtgacttga

SEQ ID NO: 6462 - RNA, 21 nt, RNAi
auaguccauggugacuugauu

SEQ ID NO: 6463 - RNA, 21 nt, RNAi
uuuaucagguaccacugaacu

SEQ ID NO: 6464 - DNA, 21 bp, Homo sapiens
aatagtccatggtgacttgag

SEQ ID NO: 6465 - RNA, 21 nt, RNAi
uaguccauggugacuugaguu

SEQ ID NO: 6466 - RNA, 21 nt, RNAi
uuaucagguaccacugaacuc

SEQ ID NO: 6467 - DNA, 21 bp, Homo sapiens
aaggtgtctgattctcagaaa

SEQ ID NO: 6468 - RNA, 21 nt, RNAi
ggugucugauucucagaaauu

SEQ ID NO: 6469 - RNA, 21 nt, RNAi
uuccacagacuaagagucuuu

SEQ ID NO: 6470 - DNA, 21 bp, Homo sapiens
aacaagaacaatcaagctttg

SEQ ID NO: 6471 - RNA, 21 nt, RNAi
caagaacaaucaagcuuuguu

SEQ ID NO: 6472 - RNA, 21 nt, RNAi
uuguucuuguuaguucgaaac

SEQ ID NO: 6473 - DNA, 21 bp, Homo sapiens
aagaacaatcaagctttgaag

SEQ ID NO: 6474 - RNA, 21 nt, RNAi
gaacaaucaagcuuugaaguu

SEQ ID NO: 6475 - RNA, 21 nt, RNAi
uucuuguuaguucgaaacuuc

SEQ ID NO: 6476 - DNA, 21 bp, Homo sapiens
aatcaagctttgaagatagtg

SEQ ID NO: 6477 - RNA, 21 nt, RNAi
ucaagcuuugaagauaguguu

SEQ ID NO: 6478 - RNA, 21 nt, RNAi
uuaguucgaaacuucuaucac

SEQ ID NO: 6479 - DNA, 21 bp, Homo sapiens
aagctttgaagatagtggact

SEQ ID NO: 6480 - RNA, 21 nt, RNAi
gcuuugaagauaguggacuuu

SEQ ID NO: 6481 - RNA, 21 nt, RNAi
uucgaaacuucuaucaccuga

SEQ ID NO: 6482 - DNA, 21 bp, Homo sapiens
aaagatcctggctaactgttc

SEQ ID NO: 6483 - RNA, 21 nt, RNAi
agauccuggcuaacuguucuu

SEQ ID NO: 6484 - RNA, 21 nt, RNAi
uuucuaggaccgauugacaag

SEQ ID NO: 6485 - DNA, 21 bp, Homo sapiens
aagatcctggctaactgttct

SEQ ID NO: 6486 - RNA, 21 nt, RNAi
gauccuggcuaacuguucuuu

SEQ ID NO: 6487 - RNA, 21 nt, RNAi
uucuaggaccgauugacaaga

SEQ ID NO: 6488 - DNA, 21 bp, Homo sapiens
aaggaacacctacaggtcttc

SEQ ID NO: 6489 - RNA, 21 nt, RNAi
ggaacaccuacaggucuucuu

SEQ ID NO: 6490 - RNA, 21 nt, RNAi
uuccuuguggauguccagaag

SEQ ID NO: 6491 - DNA, 21 bp, Homo sapiens
aaagatggtgaattgtggaat

SEQ ID NO: 6492 - RNA, 21 nt, RNAi
agauggugaauuguggaauuu

SEQ ID NO: 6493 - RNA, 21 nt, RNAi
uuucuaccacuuaacaccuua

SEQ ID NO: 6494 - DNA, 21 bp, Homo sapiens
aagatggtgaattgtggaata

SEQ ID NO: 6495 - RNA, 21 nt, RNAi
gauggugaauuguggaauauu

SEQ ID NO: 6496 - RNA, 21 nt, RNAi
uucuaccacuuaacaccuuau

SEQ ID NO: 6497 - DNA, 21 bp, Homo sapiens
aaattctttgtgcggattctg

SEQ ID NO: 6498 - RNA, 21 nt, RNAi
auucuuugugcggauucuguu

SEQ ID NO: 6499 - RNA, 21 nt, RNAi
uuuaagaaacacgccuaagac

SEQ ID NO: 6500 - DNA, 21 bp, Homo sapiens
aattctttgtgcggattctga

SEQ ID NO: 6501 - RNA, 21 nt, RNAi
uucuuugugcggauucugauu

SEQ ID NO: 6502 - RNA, 21 nt, RNAi
uuaagaaacacgccuaagacu

SEQ ID NO: 6503 - DNA, 21 bp, Homo sapiens
aatgccaatgatgaggccaca

SEQ ID NO: 6504 - RNA, 21 nt, RNAi
ugccaaugaugaggccacauu

SEQ ID NO: 6505 - RNA, 21 nt, RNAi
uuacgguuacuacuccggugu

SEQ ID NO: 6506 - DNA, 21 bp, Homo sapiens
aatgatgaggccacagtgtct

SEQ ID NO: 6507 - RNA, 21 nt, RNAi
ugaugaggccacagugucuuu

SEQ ID NO: 6508 - RNA, 21 nt, RNAi
uuacuacuccggugucacaga

SEQ ID NO: 6509 - DNA, 21 bp, Homo sapiens
aaagtcacctgaacaaagcct

SEQ ID NO: 6510 - RNA, 21 nt, RNAi
agucaccugaacaaagccuuu

SEQ ID NO: 6511 - RNA, 21 nt, RNAi
uuucaguggacuuguuucgga

SEQ ID NO: 6512 - DNA, 21 bp, Homo sapiens
aagtcacctgaacaaagcctt

SEQ ID NO: 6513 - RNA, 21 nt, RNAi
gucaccugaacaaagccuuuu

SEQ ID NO: 6514 - RNA, 21 nt, RNAi
uucaguggacuuguuucggaa

SEQ ID NO: 6515 - DNA, 21 bp, Homo sapiens
aacaaagccttatggaaggta

SEQ ID NO: 6516 - RNA, 21 nt, RNAi
caaagccuuauggaagguauu

SEQ ID NO: 6517 - RNA, 21 nt, RNAi
uuguuucggaauaccuuccau

SEQ ID NO: 6518 - DNA, 21 bp, Homo sapiens
aatcaagtctcacagattgct

SEQ ID NO: 6519 - RNA, 21 nt, RNAi
ucaagucucacagauugcuuu

SEQ ID NO: 6520 - RNA, 21 nt, RNAi
uuaguucagagugucuaacga

SEQ ID NO: 6521 - DNA, 21 bp, Homo sapiens
aagtctcacagattgctgcct

SEQ ID NO: 6522 - RNA, 21 nt, RNAi
gucucacagauugcugccuuu

SEQ ID NO: 6523 - RNA, 21 nt, RNAi
uucagagugucuaacgacgga

SEQ ID NO: 6524 - DNA, 21 bp, Homo sapiens
aatggttgtattgtggaacac

SEQ ID NO: 6525 - RNA, 21 nt, RNAi
ugguuguauuguggaacacuu

SEQ ID NO: 6526 - RNA, 21 nt, RNAi
uuaccaacauaacaccuugug

SEQ ID NO: 6527 - DNA, 21 bp, Homo sapiens
aacactgaaactgtatgtgct

SEQ ID NO: 6528 - RNA, 21 nt, RNAi
cacugaaacuguaugugcuuu

SEQ ID NO: 6529 - RNA, 21 nt, RNAi
uugugacuuugacauacacga

SEQ ID NO: 6530 - DNA, 21 bp, Homo sapiens
aaacagactcattacaaatgg

SEQ ID NO: 6531 - RNA, 21 nt, RNAi
acagacucauuacaaaugguu

SEQ ID NO: 6532 - RNA, 21 nt, RNAi
uuugucugaguaauguuuacc

SEQ ID NO: 6533 - DNA, 21 bp, Homo sapiens
aacagactcattacaaatggt

SEQ ID NO: 6534 - RNA, 21 nt, RNAi
cagacucauuacaaaugguuu

SEQ ID NO: 6535 - RNA, 21 nt, RNAi
uugucugaguaauguuuacca

SEQ ID NO: 6536 - DNA, 21 bp, Homo sapiens
aaatgttctcttatgatcacc

SEQ ID NO: 6537 - RNA, 21 nt, RNAi
auguucucuuaugaucaccuu

SEQ ID NO: 6538 - RNA, 21 nt, RNAi
uuuacaagagaauacuagugg

SEQ ID NO: 6539 - DNA, 21 bp, Homo sapiens
aatgttctcttatgatcacca

SEQ ID NO: 6540 - RNA, 21 nt, RNAi
uguucucuuaugaucaccauu

SEQ ID NO: 6541 - RNA, 21 nt, RNAi
uuacaagagaauacuaguggu

SEQ ID NO: 6542 - DNA, 21 bp, Homo sapiens
cagaggaaaggcctgcagcag

SEQ ID NO: 6543 - RNA, 21 nt, RNAi
gaggaaaggccugcagcaguu

SEQ ID NO: 6544 - RNA, 21 nt, RNAi
uucuccuuuccggacgucguc

SEQ ID NO: 6545 - DNA, 21 bp, Homo sapiens
cactggcacaagaatctgcct

SEQ ID NO: 6546 - RNA, 21 nt, RNAi
cuggcacaagaaucugccuuu

SEQ ID NO: 6547 - RNA, 21 nt, RNAi
uugaccguguucuuagacgga

SEQ ID NO: 6548 - DNA, 21 bp, Homo sapiens
cacaagaatctgcctgtaaca

SEQ ID NO: 6549 - RNA, 21 nt, RNAi
caagaaucugccuguaacauu

SEQ ID NO: 6550 - RNA, 21 nt, RNAi
uuguucuuagacggacauugu

SEQ ID NO: 6551 - DNA, 21 bp, Homo sapiens
caagaatctgcctgtaacaat

SEQ ID NO: 6552 - RNA, 21 nt, RNAi
agaaucugccuguaacaauuu

SEQ ID NO: 6553 - RNA, 21 nt, RNAi
uuucuuagacggacauuguua

SEQ ID NO: 6554 - DNA, 21 bp, Homo sapiens
caatactcttcagcagcagaa

SEQ ID NO: 6555 - RNA, 21 nt, RNAi
auacucuucagcagcagaauu

SEQ ID NO: 6556 - RNA, 21 nt, RNAi
uuuaugagaagucgucgucuu

SEQ ID NO: 6557 - DNA, 21 bp, Homo sapiens
cagctggacagagcagaacta

SEQ ID NO: 6558 - RNA, 21 nt, RNAi
gcuggacagagcagaacuauu

SEQ ID NO: 6559 - RNA, 21 nt, RNAi
uucgaccugucucgucuugau

SEQ ID NO: 6560 - DNA, 21 bp, Homo sapiens
cagagcagaactatcctcaag

SEQ ID NO: 6561 - RNA, 21 nt, RNAi
gagcagaacuauccucaaguu

SEQ ID NO: 6562 - RNA, 21 nt, RNAi
uucucgucuugauaggaguuc

SEQ ID NO: 6563 - DNA, 21 bp, Homo sapiens
caacgttattagaaagagctg

SEQ ID NO: 6564 - RNA, 21 nt, RNAi
acguuauuagaaagagcuguu

SEQ ID NO: 6565 - RNA, 21 nt, RNAi
uuugcaauaaucuuucucgac

SEQ ID NO: 6566 - DNA, 21 bp, Homo sapiens
caatctctggcttaaattagg

SEQ ID NO: 6567 - RNA, 21 nt, RNAi
aucucuggcuuaaauuagguu

SEQ ID NO: 6568 - RNA, 21 nt, RNAi
uuuagagaccgaauuuaaucc

SEQ ID NO: 6569 - DNA, 21 bp, Homo sapiens
caatgagcctttggatatgta

SEQ ID NO: 6570 - RNA, 21 nt, RNAi
augagccuuuggauauguauu

SEQ ID NO: 6571 - RNA, 21 nt, RNAi
uuuacucggaaaccuauacau

SEQ ID NO: 6572 - DNA, 21 bp, Homo sapiens
cagttacttgcacaaccaagg

SEQ ID NO: 6573 - RNA, 21 nt, RNAi
guuacuugcacaaccaagguu

SEQ ID NO: 6574 - RNA, 21 nt, RNAi
uucaaugaacguguugguucc

SEQ ID NO: 6575 - DNA, 21 bp, Homo sapiens
cacttgctcagttctatatct

SEQ ID NO: 6576 - RNA, 21 nt, RNAi
cuugcucaguucuauaucuuu

SEQ ID NO: 6577 - RNA, 21 nt, RNAi
uugaacgagucaagauauaga

SEQ ID NO: 6578 - DNA, 21 bp, Homo sapiens
cagaagaatatgaagctagag

SEQ ID NO: 6579 - RNA, 21 nt, RNAi
gaagaauaugaagcuagaguu

SEQ ID NO: 6580 - RNA, 21 nt, RNAi
uucuucuuauacuucgaucuc

SEQ ID NO: 6581 - DNA, 21 bp, Homo sapiens
cagatgcgatatttcaggaag

SEQ ID NO: 6582 - RNA, 21 nt, RNAi
gaugcgauauuucaggaaguu

SEQ ID NO: 6583 - RNA, 21 nt, RNAi
uucuacgcuauaaaguccuuc

SEQ ID NO: 6584 - DNA, 21 bp, Homo sapiens
caacagaaggctgaaccacta

SEQ ID NO: 6585 - RNA, 21 nt, RNAi
acagaaggcugaaccacuauu

SEQ ID NO: 6586 - RNA, 21 nt, RNAi
uuugucuuccgacuuggugau

SEQ ID NO: 6587 - DNA, 21 bp, Homo sapiens
cagaaggctgaaccactagaa

SEQ ID NO: 6588 - RNA, 21 nt, RNAi
gaaggcugaaccacuagaauu

SEQ ID NO: 6589 - RNA, 21 nt, RNAi
uucuuccgacuuggugaucuu

SEQ ID NO: 6590 - DNA, 21 bp, Homo sapiens
cagcaccgacaattccaagct

SEQ ID NO: 6591 - RNA, 21 nt, RNAi
gcaccgacaauuccaagcuuu

SEQ ID NO: 6592 - RNA, 21 nt, RNAi
uucguggcuguuaagguucga

SEQ ID NO: 6593 - DNA, 21 bp, Homo sapiens
caccgacaattccaagctcga

SEQ ID NO: 6594 - RNA, 21 nt, RNAi
ccgacaauuccaagcucgauu

SEQ ID NO: 6595 - RNA, 21 nt, RNAi
uuggcuguuaagguucgagcu

SEQ ID NO: 6596 - DNA, 21 bp, Homo sapiens
caattccaagctcgagtgtct

SEQ ID NO: 6597 - RNA, 21 nt, RNAi
auuccaagcucgagugucuuu

SEQ ID NO: 6598 - RNA, 21 nt, RNAi
uuuaagguucgagcucacaga

SEQ ID NO: 6599 - DNA, 21 bp, Homo sapiens
caagctcgagtgtctcggcaa

SEQ ID NO: 6600 - RNA, 21 nt, RNAi
agcucgagugucucggcaauu

SEQ ID NO: 6601 - RNA, 21 nt, RNAi
uuucgagcucacagagccguu

SEQ ID NO: 6602 - DNA, 21 bp, Homo sapiens
caaactctgttggcacttgag

SEQ ID NO: 6603 - RNA, 21 nt, RNAi
aacucuguuggcacuugaguu

SEQ ID NO: 6604 - RNA, 21 nt, RNAi
uuuugagacaaccgugaacuc

SEQ ID NO: 6605 - DNA, 21 bp, Homo sapiens
cacttgagaaagaagaagagg

SEQ ID NO: 6606 - RNA, 21 nt, RNAi
cuugagaaagaagaagagguu

SEQ ID NO: 6607 - RNA, 21 nt, RNAi
uugaacucuuucuucuucucc

SEQ ID NO: 6608 - DNA, 21 bp, Homo sapiens
cacaacgaagcacactagctg

SEQ ID NO: 6609 - RNA, 21 nt, RNAi
caacgaagcacacuagcuguu

SEQ ID NO: 6610 - RNA, 21 nt, RNAi
uuguugcuucgugugaucgac

SEQ ID NO: 6611 - DNA, 21 bp, Homo sapiens
caacgaagcacactagctgaa

SEQ ID NO: 6612 - RNA, 21 nt, RNAi
acgaagcacacuagcugaauu

SEQ ID NO: 6613 - RNA, 21 nt, RNAi
uuugcuucgugugaucgacuu

SEQ ID NO: 6614 - DNA, 21 bp, Homo sapiens
cacactagctgaactaaagag

SEQ ID NO: 6615 - RNA, 21 nt, RNAi
cacuagcugaacuaaagaguu

SEQ ID NO: 6616 - RNA, 21 nt, RNAi
uugugaucgacuugauuucuc

SEQ ID NO: 6617 - DNA, 21 bp, Homo sapiens
cactagctgaactaaagagca

SEQ ID NO: 6618 - RNA, 21 nt, RNAi
cuagcugaacuaaagagcauu

SEQ ID NO: 6619 - RNA, 21 nt, RNAi
uugaucgacuugauuucucgu

SEQ ID NO: 6620 - DNA, 21 bp, Homo sapiens
cagcaagagctccaatcatcc

SEQ ID NO: 6621 - RNA, 21 nt, RNAi
gcaagagcuccaaucauccuu

SEQ ID NO: 6622 - RNA, 21 nt, RNAi
uucguucucgagguuaguagg

SEQ ID NO: 6623 - DNA, 21 bp, Homo sapiens
caagagctccaatcatccgtg

SEQ ID NO: 6624 - RNA, 21 nt, RNAi
agagcuccaaucauccguguu

SEQ ID NO: 6625 - RNA, 21 nt, RNAi
uuucucgagguuaguaggcac

SEQ ID NO: 6626 - DNA, 21 bp, Homo sapiens
caatcatccgtgtaggaggtg

SEQ ID NO: 6627 - RNA, 21 nt, RNAi
aucauccguguaggagguguu

SEQ ID NO: 6628 - RNA, 21 nt, RNAi
uuuaguaggcacauccuccac

SEQ ID NO: 6629 - DNA, 21 bp, Homo sapiens
catccgtgtaggaggtgctct

SEQ ID NO: 6630 - RNA, 21 nt, RNAi
uccguguaggaggugcucuuu

SEQ ID NO: 6631 - RNA, 21 nt, RNAi
uuaggcacauccuccacgaga

SEQ ID NO: 6632 - DNA, 21 bp, Homo sapiens
caaggctccaagccagaacag

SEQ ID NO: 6633 - RNA, 21 nt, RNAi
aggcuccaagccagaacaguu

SEQ ID NO: 6634 - RNA, 21 nt, RNAi
uuuccgagguucggucuuguc

SEQ ID NO: 6635 - DNA, 21 bp, Homo sapiens
caagccagaacagaggactcc

SEQ ID NO: 6636 - RNA, 21 nt, RNAi
agccagaacagaggacuccuu

SEQ ID NO: 6637 - RNA, 21 nt, RNAi
uuucggucuugucuccugagg

SEQ ID NO: 6638 - DNA, 21 bp, Homo sapiens
catttcctcaacagatgcaaa

SEQ ID NO: 6639 - RNA, 21 nt, RNAi
uuuccucaacagaugcaaauu

SEQ ID NO: 6640 - RNA, 21 nt, RNAi
uuaaaggaguugucuacguuu

SEQ ID NO: 6641 - DNA, 21 bp, Homo sapiens
cagcagagttgtctaagccta

SEQ ID NO: 6642 - RNA, 21 nt, RNAi
gcagaguugucuaagccuauu

SEQ ID NO: 6643 - RNA, 21 nt, RNAi
uucgucucaacagauucggau

SEQ ID NO: 6644 - DNA, 21 bp, Homo sapiens
cagagttgtctaagcctacag

SEQ ID NO: 6645 - RNA, 21 nt, RNAi
gaguugucuaagccuacaguu

SEQ ID NO: 6646 - RNA, 21 nt, RNAi
uucucaacagauucggauguc

SEQ ID NO: 6647 - DNA, 21 bp, Homo sapiens
cagtccagccatggatagcac

SEQ ID NO: 6648 - RNA, 21 nt, RNAi
guccagccauggauagcacuu

SEQ ID NO: 6649 - RNA, 21 nt, RNAi
uucaggucgguaccuaucgug

SEQ ID NO: 6650 - DNA, 21 bp, Homo sapiens
caaagagaatgagctgcaagc

SEQ ID NO: 6651 - RNA, 21 nt, RNAi
aagagaaugagcugcaagcuu

SEQ ID NO: 6652 - RNA, 21 nt, RNAi
uuuucucuuacucgacguucg

SEQ ID NO: 6653 - DNA, 21 bp, Homo sapiens
cacaggcaggtccttggaaca

SEQ ID NO: 6654 - RNA, 21 nt, RNAi
caggcagguccuuggaacauu

SEQ ID NO: 6655 - RNA, 21 nt, RNAi
uuguccguccaggaaccuugu

SEQ ID NO: 6656 - DNA, 21 bp, Homo sapiens
caggcaggtccttggaacaca

SEQ ID NO: 6657 - RNA, 21 nt, RNAi
ggcagguccuuggaacacauu

SEQ ID NO: 6658 - RNA, 21 nt, RNAi
uuccguccaggaaccuugugu

SEQ ID NO: 6659 - DNA, 21 bp, Homo sapiens
caggtccttggaacacaggcc

SEQ ID NO: 6660 - RNA, 21 nt, RNAi
gguccuuggaacacaggccuu

SEQ ID NO: 6661 - RNA, 21 nt, RNAi
uuccaggaaccuuguguccgg

SEQ ID NO: 6662 - DNA, 21 bp, Homo sapiens
cacaggcctcgtggcaataca

SEQ ID NO: 6663 - RNA, 21 nt, RNAi
caggccucguggcaauacauu

SEQ ID NO: 6664 - RNA, 21 nt, RNAi
uuguccggagcaccguuaugu

SEQ ID NO: 6665 - DNA, 21 bp, Homo sapiens
caggcctcgtggcaatacagc

SEQ ID NO: 6666 - RNA, 21 nt, RNAi
ggccucguggcaauacagcuu

SEQ ID NO: 6667 - RNA, 21 nt, RNAi
uuccggagcaccguuaugucg

SEQ ID NO: 6668 - DNA, 21 bp, Homo sapiens
caatacagcttcactgatagc

SEQ ID NO: 6669 - RNA, 21 nt, RNAi
auacagcuucacugauagcuu

SEQ ID NO: 6670 - RNA, 21 nt, RNAi
uuuaugucgaagugacuaucg

SEQ ID NO: 6671 - DNA, 21 bp, Homo sapiens
cagcttcactgatagctgtac

SEQ ID NO: 6672 - RNA, 21 nt, RNAi
gcuucacugauagcuguacuu

SEQ ID NO: 6673 - RNA, 21 nt, RNAi
uucgaagugacuaucgacaug

SEQ ID NO: 6674 - DNA, 21 bp, Homo sapiens
cagtttcactccatatgtgga

SEQ ID NO: 6675 - RNA, 21 nt, RNAi
guuucacuccauauguggauu

SEQ ID NO: 6676 - RNA, 21 nt, RNAi
uucaaagugagguauacaccu

SEQ ID NO: 6677 - DNA, 21 bp, Homo sapiens
cactccatatgtggaagagac

SEQ ID NO: 6678 - RNA, 21 nt, RNAi
cuccauauguggaagagacuu

SEQ ID NO: 6679 - RNA, 21 nt, RNAi
uugagguauacaccuucucug

SEQ ID NO: 6680 - DNA, 21 bp, Homo sapiens
catatgtggaagagactgcac

SEQ ID NO: 6681 - RNA, 21 nt, RNAi
uauguggaagagacugcacuu

SEQ ID NO: 6682 - RNA, 21 nt, RNAi
uuauacaccuucucugacgug

SEQ ID NO: 6683 - DNA, 21 bp, Homo sapiens
cacaacagccagttatgacac

SEQ ID NO: 6684 - RNA, 21 nt, RNAi
caacagccaguuaugacacuu

SEQ ID NO: 6685 - RNA, 21 nt, RNAi
uuguugucggucaauacugug

SEQ ID NO: 6686 - DNA, 21 bp, Homo sapiens
caacagccagttatgacacca

SEQ ID NO: 6687 - RNA, 21 nt, RNAi
acagccaguuaugacaccauu

SEQ ID NO: 6688 - RNA, 21 nt, RNAi
uuugucggucaauacuguggu

SEQ ID NO: 6689 - DNA, 21 bp, Homo sapiens
cagccagttatgacaccatgt

SEQ ID NO: 6690 - RNA, 21 nt, RNAi
gccaguuaugacaccauguuu

SEQ ID NO: 6691 - RNA, 21 nt, RNAi
uucggucaauacugugguaca

SEQ ID NO: 6692 - DNA, 21 bp, Homo sapiens
cacatcctaagcaccagaaag

SEQ ID NO: 6693 - RNA, 21 nt, RNAi
cauccuaagcaccagaaaguu

SEQ ID NO: 6694 - RNA, 21 nt, RNAi
uuguaggauucguggucuuuc

SEQ ID NO: 6695 - DNA, 21 bp, Homo sapiens
catcctaagcaccagaaagcc

SEQ ID NO: 6696 - RNA, 21 nt, RNAi
uccuaagcaccagaaagccuu

SEQ ID NO: 6697 - RNA, 21 nt, RNAi
uuaggauucguggucuuucgg

SEQ ID NO: 6698 - DNA, 21 bp, Homo sapiens
caccagaaagcctggaaagga

SEQ ID NO: 6699 - RNA, 21 nt, RNAi
ccagaaagccuggaaaggauu

SEQ ID NO: 6700 - RNA, 21 nt, RNAi
uuggucuuucggaccuuuccu

SEQ ID NO: 6701 - DNA, 21 bp, Homo sapiens
cagaaagcctggaaaggaaga

SEQ ID NO: 6702 - RNA, 21 nt, RNAi
gaaagccuggaaaggaagauu

SEQ ID NO: 6703 - RNA, 21 nt, RNAi
uucuuucggaccuuuccuucu

SEQ ID NO: 6704 - DNA, 21 bp, Homo sapiens
cagagccatcagcaagcgtct

SEQ ID NO: 6705 - RNA, 21 nt, RNAi
gagccaucagcaagcgucuuu

SEQ ID NO: 6706 - RNA, 21 nt, RNAi
uucucgguagucguucgcaga

SEQ ID NO: 6707 - DNA, 21 bp, Homo sapiens
catcagcaagcgtctgaggag

SEQ ID NO: 6708 - RNA, 21 nt, RNAi
ucagcaagcgucugaggaguu

SEQ ID NO: 6709 - RNA, 21 nt, RNAi
uuagucguucgcagacuccuc

SEQ ID NO: 6710 - DNA, 21 bp, Homo sapiens
cagcaagcgtctgaggagaag

SEQ ID NO: 6711 - RNA, 21 nt, RNAi
gcaagcgucugaggagaaguu

SEQ ID NO: 6712 - RNA, 21 nt, RNAi
uucguucgcagacuccucuuc

SEQ ID NO: 6713 - DNA, 21 bp, Homo sapiens
caagcgtctgaggagaagaaa

SEQ ID NO: 6714 - RNA, 21 nt, RNAi
agcgucugaggagaagaaauu

SEQ ID NO: 6715 - RNA, 21 nt, RNAi
uuucgcagacuccucuucuuu

SEQ ID NO: 6716 - DNA, 21 bp, Homo sapiens
cagtgcagagaagagagcaga

SEQ ID NO: 6717 - RNA, 21 nt, RNAi
gugcagagaagagagcagauu

SEQ ID NO: 6718 - RNA, 21 nt, RNAi
uucacgucucuucucucgucu

SEQ ID NO: 6719 - DNA, 21 bp, Homo sapiens
cagagaagagagcagaaatgc

SEQ ID NO: 6720 - RNA, 21 nt, RNAi
gagaagagagcagaaaugcuu

SEQ ID NO: 6721 - RNA, 21 nt, RNAi
uucucuucucucgucuuuacg

SEQ ID NO: 6722 - DNA, 21 bp, Homo sapiens
cagaaatgcagaaacagattg

SEQ ID NO: 6723 - RNA, 21 nt, RNAi
gaaaugcagaaacagauuguu

SEQ ID NO: 6724 - RNA, 21 nt, RNAi
uucuuuacgucuuugucuaac

SEQ ID NO: 6725 - DNA, 21 bp, Homo sapiens
cagaaacagattgaagagatg

SEQ ID NO: 6726 - RNA, 21 nt, RNAi
gaaacagauugaagagauguu

SEQ ID NO: 6727 - RNA, 21 nt, RNAi
uucuuugucuaacuucucuac

SEQ ID NO: 6728 - DNA, 21 bp, Homo sapiens
cagattgaagagatggagaag

SEQ ID NO: 6729 - RNA, 21 nt, RNAi
gauugaagagauggagaaguu

SEQ ID NO: 6730 - RNA, 21 nt, RNAi
uucuaacuucucuaccucuuc

SEQ ID NO: 6731 - DNA, 21 bp, Homo sapiens
caaactactcagcaagaaaga

SEQ ID NO: 6732 - RNA, 21 nt, RNAi
aacuacucagcaagaaagauu

SEQ ID NO: 6733 - RNA, 21 nt, RNAi
uuuugaugagucguucuuucu

SEQ ID NO: 6734 - DNA, 21 bp, Homo sapiens
cagcaagaaagaacaggtgat

SEQ ID NO: 6735 - RNA, 21 nt, RNAi
gcaagaaagaacaggugauuu

SEQ ID NO: 6736 - RNA, 21 nt, RNAi
uucguucuuucuuguccacua

SEQ ID NO: 6737 - DNA, 21 bp, Homo sapiens
caagaaagaacaggtgatcag

SEQ ID NO: 6738 - RNA, 21 nt, RNAi
agaaagaacaggugaucaguu

SEQ ID NO: 6739 - RNA, 21 nt, RNAi
uuucuuucuuguccacuaguc

SEQ ID NO: 6740 - DNA, 21 bp, Homo sapiens
caggtgatcagcaagaagaga

SEQ ID NO: 6741 - RNA, 21 nt, RNAi
ggugaucagcaagaagagauu

SEQ ID NO: 6742 - RNA, 21 nt, RNAi
uuccacuagucguucuucucu

SEQ ID NO: 6743 - DNA, 21 bp, Homo sapiens
cagcaagaagagacgatgcct

SEQ ID NO: 6744 - RNA, 21 nt, RNAi
gcaagaagagacgaugccuuu

SEQ ID NO: 6745 - RNA, 21 nt, RNAi
uucguucuucucugcuacgga

SEQ ID NO: 6746 - DNA, 21 bp, Homo sapiens
caagaagagacgatgcctaca

SEQ ID NO: 6747 - RNA, 21 nt, RNAi
agaagagacgaugccuacauu

SEQ ID NO: 6748 - RNA, 21 nt, RNAi
uuucuucucugcuacggaugu

SEQ ID NO: 6749 - DNA, 21 bp, Homo sapiens
caaaggagacaactaaactgc

SEQ ID NO: 6750 - RNA, 21 nt, RNAi
aaggagacaacuaaacugcuu

SEQ ID NO: 6751 - RNA, 21 nt, RNAi
uuuuccucuguugauuugacg

SEQ ID NO: 6752 - DNA, 21 bp, Homo sapiens
caactaaactgcaaattgctt

SEQ ID NO: 6753 - RNA, 21 nt, RNAi
acuaaacugcaaauugcuuuu

SEQ ID NO: 6754 - RNA, 21 nt, RNAi
uuugauuugacguuuaacgaa

SEQ ID NO: 6755 - DNA, 21 bp, Homo sapiens
caaattgcttccgagtctcag

SEQ ID NO: 6756 - RNA, 21 nt, RNAi
aauugcuuccgagucucaguu

SEQ ID NO: 6757 - RNA, 21 nt, RNAi
uuuuaacgaaggcucagaguc

SEQ ID NO: 6758 - DNA, 21 bp, Homo sapiens
caggaatgactctatccagtt

SEQ ID NO: 6759 - RNA, 21 nt, RNAi
ggaaugacucuauccaguuuu

SEQ ID NO: 6760 - RNA, 21 nt, RNAi
uuccuuacugagauaggucaa

SEQ ID NO: 6761 - DNA, 21 bp, Homo sapiens
cagttctgtttgtcaagtaaa

SEQ ID NO: 6762 - RNA, 21 nt, RNAi
guucuguuugucaaguaaauu

SEQ ID NO: 6763 - RNA, 21 nt, RNAi
uucaagacaaacaguucauuu

SEQ ID NO: 6764 - DNA, 21 bp, Homo sapiens
caagtaaactgttgtgccaga

SEQ ID NO: 6765 - RNA, 21 nt, RNAi
aguaaacuguugugccagauu

SEQ ID NO: 6766 - RNA, 21 nt, RNAi
uuucauuugacaacacggucu

SEQ ID NO: 6767 - DNA, 21 bp, Homo sapiens
cagagaaacttcacttgcgga

SEQ ID NO: 6768 - RNA, 21 nt, RNAi
gagaaacuucacuugcggauu

SEQ ID NO: 6769 - RNA, 21 nt, RNAi
uucucuuugaagugaacgccu

SEQ ID NO: 6770 - DNA, 21 bp, Homo sapiens
cacttgcggagaacatttggc

SEQ ID NO: 6771 - RNA, 21 nt, RNAi
cuugcggagaacauuuggcuu

SEQ ID NO: 6772 - RNA, 21 nt, RNAi
uugaacgccucuuguaaaccg

SEQ ID NO: 6773 - DNA, 21 bp, Homo sapiens
catttggcaggaacaacctca

SEQ ID NO: 6774 - RNA, 21 nt, RNAi
uuuggcaggaacaaccucauu

SEQ ID NO: 6775 - RNA, 21 nt, RNAi
uuaaaccguccuuguuggagu

SEQ ID NO: 6776 - DNA, 21 bp, Homo sapiens
caggaacaacctcattctaaa

SEQ ID NO: 6777 - RNA, 21 nt, RNAi
ggaacaaccucauucuaaauu

SEQ ID NO: 6778 - RNA, 21 nt, RNAi
uuccuuguuggaguaagauuu

SEQ ID NO: 6779 - DNA, 21 bp, Homo sapiens
cagaaagcatcacctcaaatg

SEQ ID NO: 6780 - RNA, 21 nt, RNAi
gaaagcaucaccucaaauguu

SEQ ID NO: 6781 - RNA, 21 nt, RNAi
uucuuucguaguggaguuuac

SEQ ID NO: 6782 - DNA, 21 bp, Homo sapiens
catcacctcaaatgaagatgt

SEQ ID NO: 6783 - RNA, 21 nt, RNAi
ucaccucaaaugaagauguuu

SEQ ID NO: 6784 - RNA, 21 nt, RNAi
uuaguggaguuuacuucuaca

SEQ ID NO: 6785 - DNA, 21 bp, Homo sapiens
cacctcaaatgaagatgtgtc

SEQ ID NO: 6786 - RNA, 21 nt, RNAi
ccucaaaugaagaugugucuu

SEQ ID NO: 6787 - RNA, 21 nt, RNAi
uuggaguuuacuucuacacag

SEQ ID NO: 6788 - DNA, 21 bp, Homo sapiens
caaatgaagatgtgtctccag

SEQ ID NO: 6789 - RNA, 21 nt, RNAi
aaugaagaugugucuccaguu

SEQ ID NO: 6790 - RNA, 21 nt, RNAi
uuuuacuucuacacagagguc

SEQ ID NO: 6791 - DNA, 21 bp, Homo sapiens
cattatcacaggcttcagaaa

SEQ ID NO: 6792 - RNA, 21 nt, RNAi
uuaucacaggcuucagaaauu

SEQ ID NO: 6793 - RNA, 21 nt, RNAi
uuaauaguguccgaagucuuu

SEQ ID NO: 6794 - DNA, 21 bp, Homo sapiens
cacaggcttcagaaatgtaac

SEQ ID NO: 6795 - RNA, 21 nt, RNAi
caggcuucagaaauguaacuu

SEQ ID NO: 6796 - RNA, 21 nt, RNAi
uuguccgaagucuuuacauug

SEQ ID NO: 6797 - DNA, 21 bp, Homo sapiens
caggcttcagaaatgtaacaa

SEQ ID NO: 6798 - RNA, 21 nt, RNAi
ggcuucagaaauguaacaauu

SEQ ID NO: 6799 - RNA, 21 nt, RNAi
uuccgaagucuuuacauuguu

SEQ ID NO: 6800 - DNA, 21 bp, Homo sapiens
cagaaatgtaacaatttgtcc

SEQ ID NO: 6801 - RNA, 21 nt, RNAi
gaaauguaacaauuuguccuu

SEQ ID NO: 6802 - RNA, 21 nt, RNAi
uucuuuacauuguuaaacagg

SEQ ID NO: 6803 - DNA, 21 bp, Homo sapiens
cagaagacacttgtgactttg

SEQ ID NO: 6804 - RNA, 21 nt, RNAi
gaagacacuugugacuuuguu

SEQ ID NO: 6805 - RNA, 21 nt, RNAi
uucuucugugaacacugaaac

SEQ ID NO: 6806 - DNA, 21 bp, Homo sapiens
cacttgtgactttgccagagc

SEQ ID NO: 6807 - RNA, 21 nt, RNAi
cuugugacuuugccagagcuu

SEQ ID NO: 6808 - RNA, 21 nt, RNAi
uugaacacugaaacggucucg

SEQ ID NO: 6809 - DNA, 21 bp, Homo sapiens
catgagataatgtccttgaag

SEQ ID NO: 6810 - RNA, 21 nt, RNAi
ugagauaauguccuugaaguu

SEQ ID NO: 6811 - RNA, 21 nt, RNAi
uuacucuauuacaggaacuuc

SEQ ID NO: 6812 - DNA, 21 bp, Homo sapiens
cagcagacagcttgtggcact

SEQ ID NO: 6813 - RNA, 21 nt, RNAi
gcagacagcuuguggcacuuu

SEQ ID NO: 6814 - RNA, 21 nt, RNAi
uucgucugucgaacaccguga

SEQ ID NO: 6815 - DNA, 21 bp, Homo sapiens
cagacagcttgtggcactatc

SEQ ID NO: 6816 - RNA, 21 nt, RNAi
gacagcuuguggcacuaucuu

SEQ ID NO: 6817 - RNA, 21 nt, RNAi
uucugucgaacaccgugauag

SEQ ID NO: 6818 - DNA, 21 bp, Homo sapiens
cagcttgtggcactatctaca

SEQ ID NO: 6819 - RNA, 21 nt, RNAi
gcuuguggcacuaucuacauu

SEQ ID NO: 6820 - RNA, 21 nt, RNAi
uucgaacaccgugauagaugu

SEQ ID NO: 6821 - DNA, 21 bp, Homo sapiens
cactatctacagtcagactct

SEQ ID NO: 6822 - RNA, 21 nt, RNAi
cuaucuacagucagacucuuu

SEQ ID NO: 6823 - RNA, 21 nt, RNAi
uugauagaugucagucugaga

SEQ ID NO: 6824 - DNA, 21 bp, Homo sapiens
cagtcagactctcagcatcaa

SEQ ID NO: 6825 - RNA, 21 nt, RNAi
gucagacucucagcaucaauu

SEQ ID NO: 6826 - RNA, 21 nt, RNAi
uucagucugagagucguaguu

SEQ ID NO: 6827 - DNA, 21 bp, Homo sapiens
cagactctcagcatcaagaag

SEQ ID NO: 6828 - RNA, 21 nt, RNAi
gacucucagcaucaagaaguu

SEQ ID NO: 6829 - RNA, 21 nt, RNAi
uucugagagucguaguucuuc

SEQ ID NO: 6830 - DNA, 21 bp, Homo sapiens
caattattgaagacagtcgtg

SEQ ID NO: 6831 - RNA, 21 nt, RNAi
auuauugaagacagucguguu

SEQ ID NO: 6832 - RNA, 21 nt, RNAi
uuuaauaacuucugucagcac

SEQ ID NO: 6833 - DNA, 21 bp, Homo sapiens
cagtcgtgaagccacacactc

SEQ ID NO: 6834 - RNA, 21 nt, RNAi
gucgugaagccacacacucuu

SEQ ID NO: 6835 - RNA, 21 nt, RNAi
uucagcacuucggugugugag

SEQ ID NO: 6836 - DNA, 21 bp, Homo sapiens
cacacactcctctggcttctc

SEQ ID NO: 6837 - RNA, 21 nt, RNAi
cacacuccucuggcuucucuu

SEQ ID NO: 6838 - RNA, 21 nt, RNAi
uugugugaggagaccgaagag

SEQ ID NO: 6839 - DNA, 21 bp, Homo sapiens
cacactcctctggcttctctg

SEQ ID NO: 6840 - RNA, 21 nt, RNAi
cacuccucuggcuucucuguu

SEQ ID NO: 6841 - RNA, 21 nt, RNAi
uugugaggagaccgaagagac

SEQ ID NO: 6842 - DNA, 21 bp, Homo sapiens
cactcctctggcttctctggt

SEQ ID NO: 6843 - RNA, 21 nt, RNAi
cuccucuggcuucucugguuu

SEQ ID NO: 6844 - RNA, 21 nt, RNAi
uugaggagaccgaagagacca

SEQ ID NO: 6845 - DNA, 21 bp, Homo sapiens
caagcacctcctccatcaaat

SEQ ID NO: 6846 - RNA, 21 nt, RNAi
agcaccuccuccaucaaauuu

SEQ ID NO: 6847 - RNA, 21 nt, RNAi
uuucguggaggagguaguuua

SEQ ID NO: 6848 - DNA, 21 bp, Homo sapiens
cacctcctccatcaaatgtct

SEQ ID NO: 6849 - RNA, 21 nt, RNAi
ccuccuccaucaaaugucuuu

SEQ ID NO: 6850 - RNA, 21 nt, RNAi
uuggaggagguaguuuacaga

SEQ ID NO: 6851 - DNA, 21 bp, Homo sapiens
catcaaatgtcttcaaattcc

SEQ ID NO: 6852 - RNA, 21 nt, RNAi
ucaaaugucuucaaauuccuu

SEQ ID NO: 6853 - RNA, 21 nt, RNAi
uuaguuuacagaaguuuaagg

SEQ ID NO: 6854 - DNA, 21 bp, Homo sapiens
caaatgtcttcaaattcctga

SEQ ID NO: 6855 - RNA, 21 nt, RNAi
aaugucuucaaauuccugauu

SEQ ID NO: 6856 - RNA, 21 nt, RNAi
uuuuacagaaguuuaaggacu

SEQ ID NO: 6857 - DNA, 21 bp, Homo sapiens
caaattcctgagaaactagaa

SEQ ID NO: 6858 - RNA, 21 nt, RNAi
aauuccugagaaacuagaauu

SEQ ID NO: 6859 - RNA, 21 nt, RNAi
uuuuaaggacucuuugaucuu

SEQ ID NO: 6860 - DNA, 21 bp, Homo sapiens
cagtcaccatggtgttcacag

SEQ ID NO: 6861 - RNA, 21 nt, RNAi
gucaccaugguguucacaguu

SEQ ID NO: 6862 - RNA, 21 nt, RNAi
uucagugguaccacaaguguc

SEQ ID NO: 6863 - DNA, 21 bp, Homo sapiens
caccatggtgttcacagtatc

SEQ ID NO: 6864 - RNA, 21 nt, RNAi
ccaugguguucacaguaucuu

SEQ ID NO: 6865 - RNA, 21 nt, RNAi
uugguaccacaagugucauag

SEQ ID NO: 6866 - DNA, 21 bp, Homo sapiens
catggtgttcacagtatcgca

SEQ ID NO: 6867 - RNA, 21 nt, RNAi
ugguguucacaguaucgcauu

SEQ ID NO: 6868 - RNA, 21 nt, RNAi
uuaccacaagugucauagcgu

SEQ ID NO: 6869 - DNA, 21 bp, Homo sapiens
cacagtatcgcagacagctac

SEQ ID NO: 6870 - RNA, 21 nt, RNAi
caguaucgcagacagcuacuu

SEQ ID NO: 6871 - RNA, 21 nt, RNAi
uugucauagcgucugucgaug

SEQ ID NO: 6872 - DNA, 21 bp, Homo sapiens
cagtatcgcagacagctactg

SEQ ID NO: 6873 - RNA, 21 nt, RNAi
guaucgcagacagcuacuguu

SEQ ID NO: 6874 - RNA, 21 nt, RNAi
uucauagcgucugucgaugac

SEQ ID NO: 6875 - DNA, 21 bp, Homo sapiens
cagagttaagtgcctctgcag

SEQ ID NO: 6876 - RNA, 21 nt, RNAi
gaguuaagugccucugcaguu

SEQ ID NO: 6877 - RNA, 21 nt, RNAi
uucucaauucacggagacguc

SEQ ID NO: 6878 - DNA, 21 bp, Homo sapiens
cagagttgtgtatagaagaca

SEQ ID NO: 6879 - RNA, 21 nt, RNAi
gaguuguguauagaagacauu

SEQ ID NO: 6880 - RNA, 21 nt, RNAi
uucucaacacauaucuucugu

SEQ ID NO: 6881 - DNA, 21 bp, Homo sapiens
cagaccaatgcctaagttgga

SEQ ID NO: 6882 - RNA, 21 nt, RNAi
gaccaaugccuaaguuggauu

SEQ ID NO: 6883 - RNA, 21 nt, RNAi
uucugguuacggauucaaccu

SEQ ID NO: 6884 - DNA, 21 bp, Homo sapiens
caatgcctaagttggaaattg

SEQ ID NO: 6885 - RNA, 21 nt, RNAi
augccuaaguuggaaauuguu

SEQ ID NO: 6886 - RNA, 21 nt, RNAi
uuuacggauucaaccuuuaac

SEQ ID NO: 6887 - DNA, 21 bp, Homo sapiens
caagaaactctgcagaattaa

SEQ ID NO: 6888 - RNA, 21 nt, RNAi
agaaacucugcagaauuaauu

SEQ ID NO: 6889 - RNA, 21 nt, RNAi
uuucuuugagacgucuuaauu

SEQ ID NO: 6890 - DNA, 21 bp, Homo sapiens
cagtaataaaggtatcttctc

SEQ ID NO: 6891 - RNA, 21 nt, RNAi
guaauaaagguaucuucucuu

SEQ ID NO: 6892 - RNA, 21 nt, RNAi
uucauuauuuccauagaagag

SEQ ID NO: 6893 - DNA, 21 bp, Homo sapiens
caacctcaagttaaaggaacg

SEQ ID NO: 6894 - RNA, 21 nt, RNAi
accucaaguuaaaggaacguu

SEQ ID NO: 6895 - RNA, 21 nt, RNAi
uuuggaguucaauuuccuugc

SEQ ID NO: 6896 - DNA, 21 bp, Homo sapiens
cagctgttatcaatatcaaga

SEQ ID NO: 6897 - RNA, 21 nt, RNAi
gcuguuaucaauaucaagauu

SEQ ID NO: 6898 - RNA, 21 nt, RNAi
uucgacaauaguuauaguucu

SEQ ID NO: 6899 - DNA, 21 bp, Homo sapiens
caatatcaagatggctgtatt

SEQ ID NO: 6900 - RNA, 21 nt, RNAi
auaucaagauggcuguauuuu

SEQ ID NO: 6901 - RNA, 21 nt, RNAi
uuuauaguucuaccgacauaa

SEQ ID NO: 6902 - DNA, 21 bp, Homo sapiens
caagatggctgtattgtttgg

SEQ ID NO: 6903 - RNA, 21 nt, RNAi
agauggcuguauuguuugguu

SEQ ID NO: 6904 - RNA, 21 nt, RNAi
uuucuaccgacauaacaaacc

SEQ ID NO: 6905 - DNA, 21 bp, Homo sapiens
caccaatatataaactgcttc

SEQ ID NO: 6906 - RNA, 21 nt, RNAi
ccaauauauaaacugcuucuu

SEQ ID NO: 6907 - RNA, 21 nt, RNAi
uugguuauauauuugacgaag

SEQ ID NO: 6908 - DNA, 21 bp, Homo sapiens
caatatataaactgcttcacc

SEQ ID NO: 6909 - RNA, 21 nt, RNAi
auauauaaacugcuucaccuu

SEQ ID NO: 6910 - RNA, 21 nt, RNAi
uuuauauauuugacgaagugg

SEQ ID NO: 6911 - DNA, 21 bp, Homo sapiens
caggatcttctccaacacagt

SEQ ID NO: 6912 - RNA, 21 nt, RNAi
ggaucuucuccaacacaguuu

SEQ ID NO: 6913 - RNA, 21 nt, RNAi
uuccuagaagagguuguguca

SEQ ID NO: 6914 - DNA, 21 bp, Homo sapiens
caacacagtgaatatattacc

SEQ ID NO: 6915 - RNA, 21 nt, RNAi
acacagugaauauauuaccuu

SEQ ID NO: 6916 - RNA, 21 nt, RNAi
uuugugucacuuauauaaugg

SEQ ID NO: 6917 - DNA, 21 bp, Homo sapiens
caatagtggagatgctacaca

SEQ ID NO: 6918 - RNA, 21 nt, RNAi
auaguggagaugcuacacauu

SEQ ID NO: 6919 - RNA, 21 nt, RNAi
uuuaucaccucuacgaugugu

SEQ ID NO: 6920 - DNA, 21 bp, Homo sapiens
cacaaagcagaaatagtccat

SEQ ID NO: 6921 - RNA, 21 nt, RNAi
caaagcagaaauaguccauuu

SEQ ID NO: 6922 - RNA, 21 nt, RNAi
uuguuucgucuuuaucaggua

SEQ ID NO: 6923 - DNA, 21 bp, Homo sapiens
caaagcagaaatagtccatgg

SEQ ID NO: 6924 - RNA, 21 nt, RNAi
aagcagaaauaguccaugguu

SEQ ID NO: 6925 - RNA, 21 nt, RNAi
uuuucgucuuuaucagguacc

SEQ ID NO: 6926 - DNA, 21 bp, Homo sapiens
cagaaatagtccatggtgact

SEQ ID NO: 6927 - RNA, 21 nt, RNAi
gaaauaguccauggugacuuu

SEQ ID NO: 6928 - RNA, 21 nt, RNAi
uucuuuaucagguaccacuga

SEQ ID NO: 6929 - DNA, 21 bp, Homo sapiens
catggtgacttgagtccaagg

SEQ ID NO: 6930 - RNA, 21 nt, RNAi
uggugacuugaguccaagguu

SEQ ID NO: 6931 - RNA, 21 nt, RNAi
uuaccacugaacucagguucc

SEQ ID NO: 6932 - DNA, 21 bp, Homo sapiens
caaggtgtctgattctcagaa

SEQ ID NO: 6933 - RNA, 21 nt, RNAi
aggugucugauucucagaauu

SEQ ID NO: 6934 - RNA, 21 nt, RNAi
uuuccacagacuaagagucuu

SEQ ID NO: 6935 - DNA, 21 bp, Homo sapiens
cagaaacagaatccacgatcc

SEQ ID NO: 6936 - RNA, 21 nt, RNAi
gaaacagaauccacgauccuu

SEQ ID NO: 6937 - RNA, 21 nt, RNAi
uucuuugucuuaggugcuagg

SEQ ID NO: 6938 - DNA, 21 bp, Homo sapiens
caagaacaatcaagctttgaa

SEQ ID NO: 6939 - RNA, 21 nt, RNAi
agaacaaucaagcuuugaauu

SEQ ID NO: 6940 - RNA, 21 nt, RNAi
uuucuuguuaguucgaaacuu

SEQ ID NO: 6941 - DNA, 21 bp, Homo sapiens
caatcaagctttgaagatagt

SEQ ID NO: 6942 - RNA, 21 nt, RNAi
aucaagcuuugaagauaguuu

SEQ ID NO: 6943 - RNA, 21 nt, RNAi
uuuaguucgaaacuucuauca

SEQ ID NO: 6944 - DNA, 21 bp, Homo sapiens
caagctttgaagatagtggac

SEQ ID NO: 6945 - RNA, 21 nt, RNAi
agcuuugaagauaguggacuu

SEQ ID NO: 6946 - RNA, 21 nt, RNAi
uuucgaaacuucuaucaccug

SEQ ID NO: 6947 - DNA, 21 bp, Homo sapiens
cagcggctttcggactgtaca

SEQ ID NO: 6948 - RNA, 21 nt, RNAi
gcggcuuucggacuguacauu

SEQ ID NO: 6949 - RNA, 21 nt, RNAi
uucgccgaaagccugacaugu

SEQ ID NO: 6950 - DNA, 21 bp, Homo sapiens
caggtagacctgtttggtata

SEQ ID NO: 6951 - RNA, 21 nt, RNAi
gguagaccuguuugguauauu

SEQ ID NO: 6952 - RNA, 21 nt, RNAi
uuccaucuggacaaaccauau

SEQ ID NO: 6953 - DNA, 21 bp, Homo sapiens
cacatttactattgttcaagg

SEQ ID NO: 6954 - RNA, 21 nt, RNAi
cauuuacuauuguucaagguu

SEQ ID NO: 6955 - RNA, 21 nt, RNAi
uuguaaaugauaacaaguucc

SEQ ID NO: 6956 - DNA, 21 bp, Homo sapiens
caaggaacacctacaggtctt

SEQ ID NO: 6957 - RNA, 21 nt, RNAi
aggaacaccuacaggucuuuu

SEQ ID NO: 6958 - RNA, 21 nt, RNAi
uuuccuuguggauguccagaa

SEQ ID NO: 6959 - DNA, 21 bp, Homo sapiens
caatgatgaggccacagtgtc

SEQ ID NO: 6960 - RNA, 21 nt, RNAi
augaugaggccacagugucuu

SEQ ID NO: 6961 - RNA, 21 nt, RNAi
uuuacuacuccggugucacag

SEQ ID NO: 6962 - DNA, 21 bp, Homo sapiens
cactacattccaaagtcacct

SEQ ID NO: 6963 - RNA, 21 nt, RNAi
cuacauuccaaagucaccuuu

SEQ ID NO: 6964 - RNA, 21 nt, RNAi
uugauguaagguuucagugga

SEQ ID NO: 6965 - DNA, 21 bp, Homo sapiens
cattccaaagtcacctgaaca

SEQ ID NO: 6966 - RNA, 21 nt, RNAi
uuccaaagucaccugaacauu

SEQ ID NO: 6967 - RNA, 21 nt, RNAi
uuaagguuucaguggacuugu

SEQ ID NO: 6968 - DNA, 21 bp, Homo sapiens
caaagtcacctgaacaaagcc

SEQ ID NO: 6969 - RNA, 21 nt, RNAi
aagucaccugaacaaagccuu

SEQ ID NO: 6970 - RNA, 21 nt, RNAi
uuuucaguggacuuguuucgg

SEQ ID NO: 6971 - DNA, 21 bp, Homo sapiens
cacctgaacaaagccttatgg

SEQ ID NO: 6972 - RNA, 21 nt, RNAi
ccugaacaaagccuuaugguu

SEQ ID NO: 6973 - RNA, 21 nt, RNAi
uuggacuuguuucggaauacc

SEQ ID NO: 6974 - DNA, 21 bp, Homo sapiens
caaagccttatggaaggtagg

SEQ ID NO: 6975 - RNA, 21 nt, RNAi
aagccuuauggaagguagguu

SEQ ID NO: 6976 - RNA, 21 nt, RNAi
uuuucggaauaccuuccaucc

SEQ ID NO: 6977 - DNA, 21 bp, Homo sapiens
cagtgagctaggcaatcaagt

SEQ ID NO: 6978 - RNA, 21 nt, RNAi
gugagcuaggcaaucaaguuu

SEQ ID NO: 6979 - RNA, 21 nt, RNAi
uucacucgauccguuaguuca

SEQ ID NO: 6980 - DNA, 21 bp, Homo sapiens
caatcaagtctcacagattgc

SEQ ID NO: 6981 - RNA, 21 nt, RNAi
aucaagucucacagauugcuu

SEQ ID NO: 6982 - RNA, 21 nt, RNAi
uuuaguucagagugucuaacg

SEQ ID NO: 6983 - DNA, 21 bp, Homo sapiens
caagtctcacagattgctgcc

SEQ ID NO: 6984 - RNA, 21 nt, RNAi
agucucacagauugcugccuu

SEQ ID NO: 6985 - RNA, 21 nt, RNAi
uuucagagugucuaacgacgg

SEQ ID NO: 6986 - DNA, 21 bp, Homo sapiens
cacagattgctgcctcagagc

SEQ ID NO: 6987 - RNA, 21 nt, RNAi
cagauugcugccucagagcuu

SEQ ID NO: 6988 - RNA, 21 nt, RNAi
uugucuaacgacggagucucg

SEQ ID NO: 6989 - DNA, 21 bp, Homo sapiens
cagattgctgcctcagagcaa

SEQ ID NO: 6990 - RNA, 21 nt, RNAi
gauugcugccucagagcaauu

SEQ ID NO: 6991 - RNA, 21 nt, RNAi
uucuaacgacggagucucguu

SEQ ID NO: 6992 - DNA, 21 bp, Homo sapiens
cagagcaatggttgtattgtg

SEQ ID NO: 6993 - RNA, 21 nt, RNAi
gagcaaugguuguauuguguu

SEQ ID NO: 6994 - RNA, 21 nt, RNAi
uucucguuaccaacauaacac

SEQ ID NO: 6995 - DNA, 21 bp, Homo sapiens
caatggttgtattgtggaaca

SEQ ID NO: 6996 - RNA, 21 nt, RNAi
augguuguauuguggaacauu

SEQ ID NO: 6997 - RNA, 21 nt, RNAi
uuuaccaacauaacaccuugu

SEQ ID NO: 6998 - DNA, 21 bp, Homo sapiens
cactgaaactgtatgtgctgt

SEQ ID NO: 6999 - RNA, 21 nt, RNAi
cugaaacuguaugugcuguuu

SEQ ID NO: 7000 - RNA, 21 nt, RNAi
uugacuuugacauacacgaca

SEQ ID NO: 7001 - DNA, 21 bp, Homo sapiens
cacatttagatgcactaccat

SEQ ID NO: 7002 - RNA, 21 nt, RNAi
cauuuagaugcacuaccauuu

SEQ ID NO: 7003 - RNA, 21 nt, RNAi
uuguaaaucuacgugauggua

SEQ ID NO: 7004 - DNA, 21 bp, Homo sapiens
catttagatgcactaccattg

SEQ ID NO: 7005 - RNA, 21 nt, RNAi
uuuagaugcacuaccauuguu

SEQ ID NO: 7006 - RNA, 21 nt, RNAi
uuaaaucuacgugaugguaac

SEQ ID NO: 7007 - DNA, 21 bp, Homo sapiens
cactaccattgctgttctact

SEQ ID NO: 7008 - RNA, 21 nt, RNAi
cuaccauugcuguucuacuuu

SEQ ID NO: 7009 - RNA, 21 nt, RNAi
uugaugguaacgacaagauga

SEQ ID NO: 7010 - DNA, 21 bp, Homo sapiens
cagtgatatacttactcatgg

SEQ ID NO: 7011 - RNA, 21 nt, RNAi
gugauauacuuacucaugguu

SEQ ID NO: 7012 - RNA, 21 nt, RNAi
uucacuauaugaaugaguacc

SEQ ID NO: 7013 - DNA, 21 bp, Homo sapiens
cagactcattacaaatggtta

SEQ ID NO: 7014 - RNA, 21 nt, RNAi
gacucauuacaaaugguuauu

SEQ ID NO: 7015 - RNA, 21 nt, RNAi
uucugaguaauguuuaccaau

SEQ ID NO: 7016 - DNA, 21 bp, Homo sapiens
cattacaaatggttaccttgt

SEQ ID NO: 7017 - RNA, 21 nt, RNAi
uuacaaaugguuaccuuguuu

SEQ ID NO: 7018 - RNA, 21 nt, RNAi
uuaauguuuaccaauggaaca

SEQ ID NO: 7019 - DNA, 21 bp, Homo sapiens
gagtcgtgtgcgtgccttggt

SEQ ID NO: 7020 - RNA, 21 nt, RNAi
gucgugugcgugccuugguuu

SEQ ID NO: 7021 - RNA, 21 nt, RNAi
uucagcacacgcacggaacca

SEQ ID NO: 7022 - DNA, 21 bp, Homo sapiens
gaggaaaggcctgcagcagga

SEQ ID NO: 7023 - RNA, 21 nt, RNAi
ggaaaggccugcagcaggauu

SEQ ID NO: 7024 - RNA, 21 nt, RNAi
uuccuuuccggacgucguccu

SEQ ID NO: 7025 - DNA, 21 bp, Homo sapiens
gaaaggcctgcagcaggacga

SEQ ID NO: 7026 - RNA, 21 nt, RNAi
aaggccugcagcaggacgauu

SEQ ID NO: 7027 - RNA, 21 nt, RNAi
uuuuccggacgucguccugcu

SEQ ID NO: 7028 - DNA, 21 bp, Homo sapiens
gacgaggacctgagccaggaa

SEQ ID NO: 7029 - RNA, 21 nt, RNAi
cgaggaccugagccaggaauu

SEQ ID NO: 7030 - RNA, 21 nt, RNAi
uugcuccuggacucgguccuu

SEQ ID NO: 7031 - DNA, 21 bp, Homo sapiens
gaggacctgagccaggaatgc

SEQ ID NO: 7032 - RNA, 21 nt, RNAi
ggaccugagccaggaaugcuu

SEQ ID NO: 7033 - RNA, 21 nt, RNAi
uuccuggacucgguccuuacg

SEQ ID NO: 7034 - DNA, 21 bp, Homo sapiens
gacctgagccaggaatgcagg

SEQ ID NO: 7035 - RNA, 21 nt, RNAi
ccugagccaggaaugcagguu

SEQ ID NO: 7036 - RNA, 21 nt, RNAi
uuggacucgguccuuacgucc

SEQ ID NO: 7037 - DNA, 21 bp, Homo sapiens
gagccaggaatgcaggatggc

SEQ ID NO: 7038 - RNA, 21 nt, RNAi
gccaggaaugcaggauggcuu

SEQ ID NO: 7039 - RNA, 21 nt, RNAi
uucgguccuuacguccuaccg

SEQ ID NO: 7040 - DNA, 21 bp, Homo sapiens
gagcactggcacaagaatctg

SEQ ID NO: 7041 - RNA, 21 nt, RNAi
gcacuggcacaagaaucuguu

SEQ ID NO: 7042 - RNA, 21 nt, RNAi
uucgugaccguguucuuagac

SEQ ID NO: 7043 - DNA, 21 bp, Homo sapiens
gaatctgcctgtaacaatact

SEQ ID NO: 7044 - RNA, 21 nt, RNAi
aucugccuguaacaauacuuu

SEQ ID NO: 7045 - RNA, 21 nt, RNAi
uuuagacggacauuguuauga

SEQ ID NO: 7046 - DNA, 21 bp, Homo sapiens
gataggtatatcagctggaca

SEQ ID NO: 7047 - RNA, 21 nt, RNAi
uagguauaucagcuggacauu

SEQ ID NO: 7048 - RNA, 21 nt, RNAi
uuauccauauagucgaccugu

SEQ ID NO: 7049 - DNA, 21 bp, Homo sapiens
gacagagcagaactatcctca

SEQ ID NO: 7050 - RNA, 21 nt, RNAi
cagagcagaacuauccucauu

SEQ ID NO: 7051 - RNA, 21 nt, RNAi
uugucucgucuugauaggagu

SEQ ID NO: 7052 - DNA, 21 bp, Homo sapiens
gagcagaactatcctcaaggt

SEQ ID NO: 7053 - RNA, 21 nt, RNAi
gcagaacuauccucaagguuu

SEQ ID NO: 7054 - RNA, 21 nt, RNAi
uucgucuugauaggaguucca

SEQ ID NO: 7055 - DNA, 21 bp, Homo sapiens
gaaggagagtaatatgtcaac

SEQ ID NO: 7056 - RNA, 21 nt, RNAi
aggagaguaauaugucaacuu

SEQ ID NO: 7057 - RNA, 21 nt, RNAi
uuuccucucauuauacaguug

SEQ ID NO: 7058 - DNA, 21 bp, Homo sapiens
gagagtaatatgtcaacgtta

SEQ ID NO: 7059 - RNA, 21 nt, RNAi
gaguaauaugucaacguuauu

SEQ ID NO: 7060 - RNA, 21 nt, RNAi
uucucauuauacaguugcaau

SEQ ID NO: 7061 - DNA, 21 bp, Homo sapiens
gaaagagctgtagaagcacta

SEQ ID NO: 7062 - RNA, 21 nt, RNAi
aagagcuguagaagcacuauu

SEQ ID NO: 7063 - RNA, 21 nt, RNAi
uuuucucgacaucuucgugau

SEQ ID NO: 7064 - DNA, 21 bp, Homo sapiens
gagctgtagaagcactacaag

SEQ ID NO: 7065 - RNA, 21 nt, RNAi
gcuguagaagcacuacaaguu

SEQ ID NO: 7066 - RNA, 21 nt, RNAi
uucgacaucuucgugauguuc

SEQ ID NO: 7067 - DNA, 21 bp, Homo sapiens
gatattatagtgatcctcgat

SEQ ID NO: 7068 - RNA, 21 nt, RNAi
uauuauagugauccucgauuu

SEQ ID NO: 7069 - RNA, 21 nt, RNAi
uuauaauaucacuaggagcua

SEQ ID NO: 7070 - DNA, 21 bp, Homo sapiens
gatcctcgatttctcaatctc

SEQ ID NO: 7071 - RNA, 21 nt, RNAi
uccucgauuucucaaucucuu

SEQ ID NO: 7072 - RNA, 21 nt, RNAi
uuaggagcuaaagaguuagag

SEQ ID NO: 7073 - DNA, 21 bp, Homo sapiens
gatttctcaatctctggctta

SEQ ID NO: 7074 - RNA, 21 nt, RNAi
uuucucaaucucuggcuuauu

SEQ ID NO: 7075 - RNA, 21 nt, RNAi
uuaaagaguuagagaccgaau

SEQ ID NO: 7076 - DNA, 21 bp, Homo sapiens
gagcctttggatatgtacagt

SEQ ID NO: 7077 - RNA, 21 nt, RNAi
gccuuuggauauguacaguuu

SEQ ID NO: 7078 - RNA, 21 nt, RNAi
uucggaaaccuauacauguca

SEQ ID NO: 7079 - DNA, 21 bp, Homo sapiens
gatatgtacagttacttgcac

SEQ ID NO: 7080 - RNA, 21 nt, RNAi
uauguacaguuacuugcacuu

SEQ ID NO: 7081 - RNA, 21 nt, RNAi
uuauacaugucaaugaacgug

SEQ ID NO: 7082 - DNA, 21 bp, Homo sapiens
gattggtgtttcacttgctca

SEQ ID NO: 7083 - RNA, 21 nt, RNAi
uugguguuucacuugcucauu

SEQ ID NO: 7084 - RNA, 21 nt, RNAi
uuaaccacaaagugaacgagu

SEQ ID NO: 7085 - DNA, 21 bp, Homo sapiens
gaagaatatgaagctagagaa

SEQ ID NO: 7086 - RNA, 21 nt, RNAi
agaauaugaagcuagagaauu

SEQ ID NO: 7087 - RNA, 21 nt, RNAi
uuucuuauacuucgaucucuu

SEQ ID NO: 7088 - DNA, 21 bp, Homo sapiens
gaaagcagatgcgatatttca

SEQ ID NO: 7089 - RNA, 21 nt, RNAi
aagcagaugcgauauuucauu

SEQ ID NO: 7090 - RNA, 21 nt, RNAi
uuuucgucuacgcuauaaagu

SEQ ID NO: 7091 - DNA, 21 bp, Homo sapiens
gattcaacagaaggctgaacc

SEQ ID NO: 7092 - RNA, 21 nt, RNAi
uucaacagaaggcugaaccuu

SEQ ID NO: 7093 - RNA, 21 nt, RNAi
uuaaguugucuuccgacuugg

SEQ ID NO: 7094 - DNA, 21 bp, Homo sapiens
gaaggctgaaccactagaaag

SEQ ID NO: 7095 - RNA, 21 nt, RNAi
aggcugaaccacuagaaaguu

SEQ ID NO: 7096 - RNA, 21 nt, RNAi
uuuccgacuuggugaucuuuc

SEQ ID NO: 7097 - DNA, 21 bp, Homo sapiens
gaaccactagaaagactacag

SEQ ID NO: 7098 - RNA, 21 nt, RNAi
accacuagaaagacuacaguu

SEQ ID NO: 7099 - RNA, 21 nt, RNAi
uuuggugaucuuucugauguc

SEQ ID NO: 7100 - DNA, 21 bp, Homo sapiens
gacaattccaagctcgagtgt

SEQ ID NO: 7101 - RNA, 21 nt, RNAi
caauuccaagcucgaguguuu

SEQ ID NO: 7102 - RNA, 21 nt, RNAi
uuguuaagguucgagcucaca

SEQ ID NO: 7103 - DNA, 21 bp, Homo sapiens
gagtgtctcggcaaactctgt

SEQ ID NO: 7104 - RNA, 21 nt, RNAi
gugucucggcaaacucuguuu

SEQ ID NO: 7105 - RNA, 21 nt, RNAi
uucacagagccguuugagaca

SEQ ID NO: 7106 - DNA, 21 bp, Homo sapiens
gagaaagaagaagaggaggaa

SEQ ID NO: 7107 - RNA, 21 nt, RNAi
gaaagaagaagaggaggaauu

SEQ ID NO: 7108 - RNA, 21 nt, RNAi
uucuuucuucuucuccuccuu

SEQ ID NO: 7109 - DNA, 21 bp, Homo sapiens
gaaagaagaagaggaggaagt

SEQ ID NO: 7110 - RNA, 21 nt, RNAi
aagaagaagaggaggaaguuu

SEQ ID NO: 7111 - RNA, 21 nt, RNAi
uuuucuucuucuccuccuuca

SEQ ID NO: 7112 - DNA, 21 bp, Homo sapiens
gagtcttctgtaccacaacga

SEQ ID NO: 7113 - RNA, 21 nt, RNAi
gucuucuguaccacaacgauu

SEQ ID NO: 7114 - RNA, 21 nt, RNAi
uucagaagacaugguguugcu

SEQ ID NO: 7115 - DNA, 21 bp, Homo sapiens
gaagcacactagctgaactaa

SEQ ID NO: 7116 - RNA, 21 nt, RNAi
agcacacuagcugaacuaauu

SEQ ID NO: 7117 - RNA, 21 nt, RNAi
uuucgugugaucgacuugauu

SEQ ID NO: 7118 - DNA, 21 bp, Homo sapiens
gacagcaagagctccaatcat

SEQ ID NO: 7119 - RNA, 21 nt, RNAi
cagcaagagcuccaaucauuu

SEQ ID NO: 7120 - RNA, 21 nt, RNAi
uugucguucucgagguuagua

SEQ ID NO: 7121 - DNA, 21 bp, Homo sapiens
gagctccaatcatccgtgtag

SEQ ID NO: 7122 - RNA, 21 nt, RNAi
gcuccaaucauccguguaguu

SEQ ID NO: 7123 - RNA, 21 nt, RNAi
uucgagguuaguaggcacauc

SEQ ID NO: 7124 - DNA, 21 bp, Homo sapiens
gaggtgctctcaaggctccaa

SEQ ID NO: 7125 - RNA, 21 nt, RNAi
ggugcucucaaggcuccaauu

SEQ ID NO: 7126 - RNA, 21 nt, RNAi
uuccacgagaguuccgagguu

SEQ ID NO: 7127 - DNA, 21 bp, Homo sapiens
gatgaggcttctacagcagag

SEQ ID NO: 7128 - RNA, 21 nt, RNAi
ugaggcuucuacagcagaguu

SEQ ID NO: 7129 - RNA, 21 nt, RNAi
uuacuccgaagaugucgucuc

SEQ ID NO: 7130 - DNA, 21 bp, Homo sapiens
gaggcttctacagcagagttg

SEQ ID NO: 7131 - RNA, 21 nt, RNAi
ggcuucuacagcagaguuguu

SEQ ID NO: 7132 - RNA, 21 nt, RNAi
uuccgaagaugucgucucaac

SEQ ID NO: 7133 - DNA, 21 bp, Homo sapiens
gagttgtctaagcctacagtc

SEQ ID NO: 7134 - RNA, 21 nt, RNAi
guugucuaagccuacagucuu

SEQ ID NO: 7135 - RNA, 21 nt, RNAi
uucaacagauucggaugucag

SEQ ID NO: 7136 - DNA, 21 bp, Homo sapiens
gagaatgagctgcaagcaggc

SEQ ID NO: 7137 - RNA, 21 nt, RNAi
gaaugagcugcaagcaggcuu

SEQ ID NO: 7138 - RNA, 21 nt, RNAi
uucuuacucgacguucguccg

SEQ ID NO: 7139 - DNA, 21 bp, Homo sapiens
gaacacaggcaggtccttgga

SEQ ID NO: 7140 - RNA, 21 nt, RNAi
acacaggcagguccuuggauu

SEQ ID NO: 7141 - RNA, 21 nt, RNAi
uuuguguccguccaggaaccu

SEQ ID NO: 7142 - DNA, 21 bp, Homo sapiens
gaacacaggcctcgtggcaat

SEQ ID NO: 7143 - RNA, 21 nt, RNAi
acacaggccucguggcaauuu

SEQ ID NO: 7144 - RNA, 21 nt, RNAi
uuuguguccggagcaccguua

SEQ ID NO: 7145 - DNA, 21 bp, Homo sapiens
gaagagactgcacaacagcca

SEQ ID NO: 7146 - RNA, 21 nt, RNAi
agagacugcacaacagccauu

SEQ ID NO: 7147 - RNA, 21 nt, RNAi
uuucucugacguguugucggu

SEQ ID NO: 7148 - DNA, 21 bp, Homo sapiens
gagactgcacaacagccagtt

SEQ ID NO: 7149 - RNA, 21 nt, RNAi
gacugcacaacagccaguuuu

SEQ ID NO: 7150 - RNA, 21 nt, RNAi
uucugacguguugucggucaa

SEQ ID NO: 7151 - DNA, 21 bp, Homo sapiens
gactgcacaacagccagttat

SEQ ID NO: 7152 - RNA, 21 nt, RNAi
cugcacaacagccaguuauuu

SEQ ID NO: 7153 - RNA, 21 nt, RNAi
uugacguguugucggucaaua

SEQ ID NO: 7154 - DNA, 21 bp, Homo sapiens
gaacctagtataaaccacatc

SEQ ID NO: 7155 - RNA, 21 nt, RNAi
accuaguauaaaccacaucuu

SEQ ID NO: 7156 - RNA, 21 nt, RNAi
uuuggaucauauuugguguag

SEQ ID NO: 7157 - DNA, 21 bp, Homo sapiens
gaaagcctggaaaggaagaag

SEQ ID NO: 7158 - RNA, 21 nt, RNAi
aagccuggaaaggaagaaguu

SEQ ID NO: 7159 - RNA, 21 nt, RNAi
uuuucggaccuuuccuucuuc

SEQ ID NO: 7160 - DNA, 21 bp, Homo sapiens
gaaaggaagaaggagattctc

SEQ ID NO: 7161 - RNA, 21 nt, RNAi
aaggaagaaggagauucucuu

SEQ ID NO: 7162 - RNA, 21 nt, RNAi
uuuuccuucuuccucuaagag

SEQ ID NO: 7163 - DNA, 21 bp, Homo sapiens
gaagaaggagattctctacaa

SEQ ID NO: 7164 - RNA, 21 nt, RNAi
agaaggagauucucuacaauu

SEQ ID NO: 7165 - RNA, 21 nt, RNAi
uuucuuccucuaagagauguu

SEQ ID NO: 7166 - DNA, 21 bp, Homo sapiens
gaaggagattctctacaaagg

SEQ ID NO: 7167 - RNA, 21 nt, RNAi
aggagauucucuacaaagguu

SEQ ID NO: 7168 - RNA, 21 nt, RNAi
uuuccucuaagagauguuucc

SEQ ID NO: 7169 - DNA, 21 bp, Homo sapiens
gagccatcagcaagcgtctga

SEQ ID NO: 7170 - RNA, 21 nt, RNAi
gccaucagcaagcgucugauu

SEQ ID NO: 7171 - RNA, 21 nt, RNAi
uucgguagucguucgcagacu

SEQ ID NO: 7172 - DNA, 21 bp, Homo sapiens
gaggagaagaaagagaagatg

SEQ ID NO: 7173 - RNA, 21 nt, RNAi
ggagaagaaagagaagauguu

SEQ ID NO: 7174 - RNA, 21 nt, RNAi
uuccucuucuuucucuucuac

SEQ ID NO: 7175 - DNA, 21 bp, Homo sapiens
gagaagaaagagaagatgatg

SEQ ID NO: 7176 - RNA, 21 nt, RNAi
gaagaaagagaagaugauguu

SEQ ID NO: 7177 - RNA, 21 nt, RNAi
uucuucuuucucuucuacuac

SEQ ID NO: 7178 - DNA, 21 bp, Homo sapiens
gaagaaagagaagatgatgta

SEQ ID NO: 7179 - RNA, 21 nt, RNAi
agaaagagaagaugauguauu

SEQ ID NO: 7180 - RNA, 21 nt, RNAi
uuucuuucucuucuacuacau

SEQ ID NO: 7181 - DNA, 21 bp, Homo sapiens
gaaagagaagatgatgtattg

SEQ ID NO: 7182 - RNA, 21 nt, RNAi
aagagaagaugauguauuguu

SEQ ID NO: 7183 - RNA, 21 nt, RNAi
uuuucucuucuacuacauaac

SEQ ID NO: 7184 - DNA, 21 bp, Homo sapiens
gagaagatgatgtattgtaag

SEQ ID NO: 7185 - RNA, 21 nt, RNAi
gaagaugauguauuguaaguu

SEQ ID NO: 7186 - RNA, 21 nt, RNAi
uucuucuacuacauaacauuc

SEQ ID NO: 7187 - DNA, 21 bp, Homo sapiens
gaagatgatgtattgtaagga

SEQ ID NO: 7188 - RNA, 21 nt, RNAi
agaugauguauuguaaggauu

SEQ ID NO: 7189 - RNA, 21 nt, RNAi
uuucuacuacauaacauuccu

SEQ ID NO: 7190 - DNA, 21 bp, Homo sapiens
gatgatgtattgtaaggagaa

SEQ ID NO: 7191 - RNA, 21 nt, RNAi
ugauguauuguaaggagaauu

SEQ ID NO: 7192 - RNA, 21 nt, RNAi
uuacuacauaacauuccucuu

SEQ ID NO: 7193 - DNA, 21 bp, Homo sapiens
gatgtattgtaaggagaagat

SEQ ID NO: 7194 - RNA, 21 nt, RNAi
uguauuguaaggagaagauuu

SEQ ID NO: 7195 - RNA, 21 nt, RNAi
uuacauaacauuccucuucua

SEQ ID NO: 7196 - DNA, 21 bp, Homo sapiens
gagaagatttatgcaggagta

SEQ ID NO: 7197 - RNA, 21 nt, RNAi
gaagauuuaugcaggaguauu

SEQ ID NO: 7198 - RNA, 21 nt, RNAi
uucuucuaaauacguccucau

SEQ ID NO: 7199 - DNA, 21 bp, Homo sapiens
gaagatttatgcaggagtagg

SEQ ID NO: 7200 - RNA, 21 nt, RNAi
agauuuaugcaggaguagguu

SEQ ID NO: 7201 - RNA, 21 nt, RNAi
uuucuaaauacguccucaucc

SEQ ID NO: 7202 - DNA, 21 bp, Homo sapiens
gaagccgagctattgaccagt

SEQ ID NO: 7203 - RNA, 21 nt, RNAi
agccgagcuauugaccaguuu

SEQ ID NO: 7204 - RNA, 21 nt, RNAi
uuucggcucgauaacugguca

SEQ ID NO: 7205 - DNA, 21 bp, Homo sapiens
gagctattgaccagtgcagag

SEQ ID NO: 7206 - RNA, 21 nt, RNAi
gcuauugaccagugcagaguu

SEQ ID NO: 7207 - RNA, 21 nt, RNAi
uucgauaacuggucacgucuc

SEQ ID NO: 7208 - DNA, 21 bp, Homo sapiens
gaccagtgcagagaagagagc

SEQ ID NO: 7209 - RNA, 21 nt, RNAi
ccagugcagagaagagagcuu

SEQ ID NO: 7210 - RNA, 21 nt, RNAi
uuggucacgucucuucucucg

SEQ ID NO: 7211 - DNA, 21 bp, Homo sapiens
gagaagagagcagaaatgcag

SEQ ID NO: 7212 - RNA, 21 nt, RNAi
gaagagagcagaaaugcaguu

SEQ ID NO: 7213 - RNA, 21 nt, RNAi
uucuucucucgucuuuacguc

SEQ ID NO: 7214 - DNA, 21 bp, Homo sapiens
gaagagagcagaaatgcagaa

SEQ ID NO: 7215 - RNA, 21 nt, RNAi
agagagcagaaaugcagaauu

SEQ ID NO: 7216 - RNA, 21 nt, RNAi
uuucucucgucuuuacgucuu

SEQ ID NO: 7217 - DNA, 21 bp, Homo sapiens
gagagcagaaatgcagaaaca

SEQ ID NO: 7218 - RNA, 21 nt, RNAi
gagcagaaaugcagaaacauu

SEQ ID NO: 7219 - RNA, 21 nt, RNAi
uucucgucuuuacgucuuugu

SEQ ID NO: 7220 - DNA, 21 bp, Homo sapiens
gagcagaaatgcagaaacaga

SEQ ID NO: 7221 - RNA, 21 nt, RNAi
gcagaaaugcagaaacagauu

SEQ ID NO: 7222 - RNA, 21 nt, RNAi
uucgucuuuacgucuuugucu

SEQ ID NO: 7223 - DNA, 21 bp, Homo sapiens
gaaatgcagaaacagattgaa

SEQ ID NO: 7224 - RNA, 21 nt, RNAi
aaugcagaaacagauugaauu

SEQ ID NO: 7225 - RNA, 21 nt, RNAi
uuuuacgucuuugucuaacuu

SEQ ID NO: 7226 - DNA, 21 bp, Homo sapiens
gaaacagattgaagagatgga

SEQ ID NO: 7227 - RNA, 21 nt, RNAi
aacagauugaagagauggauu

SEQ ID NO: 7228 - RNA, 21 nt, RNAi
uuuugucuaacuucucuaccu

SEQ ID NO: 7229 - DNA, 21 bp, Homo sapiens
gattgaagagatggagaagaa

SEQ ID NO: 7230 - RNA, 21 nt, RNAi
uugaagagauggagaagaauu

SEQ ID NO: 7231 - RNA, 21 nt, RNAi
uuaacuucucuaccucuucuu

SEQ ID NO: 7232 - DNA, 21 bp, Homo sapiens
gaagagatggagaagaagcta

SEQ ID NO: 7233 - RNA, 21 nt, RNAi
agagauggagaagaagcuauu

SEQ ID NO: 7234 - RNA, 21 nt, RNAi
uuucucuaccucuucuucgau

SEQ ID NO: 7235 - DNA, 21 bp, Homo sapiens
gaaatccaaactactcagcaa

SEQ ID NO: 7236 - RNA, 21 nt, RNAi
aauccaaacuacucagcaauu

SEQ ID NO: 7237 - RNA, 21 nt, RNAi
uuuuagguuugaugagucguu

SEQ ID NO: 7238 - DNA, 21 bp, Homo sapiens
gaaagaacaggtgatcagcaa

SEQ ID NO: 7239 - RNA, 21 nt, RNAi
aagaacaggugaucagcaauu

SEQ ID NO: 7240 - RNA, 21 nt, RNAi
uuuucuuguccacuagucguu

SEQ ID NO: 7241 - DNA, 21 bp, Homo sapiens
gaacaggtgatcagcaagaag

SEQ ID NO: 7242 - RNA, 21 nt, RNAi
acaggugaucagcaagaaguu

SEQ ID NO: 7243 - RNA, 21 nt, RNAi
uuuguccacuagucguucuuc

SEQ ID NO: 7244 - DNA, 21 bp, Homo sapiens
gatcagcaagaagagacgatg

SEQ ID NO: 7245 - RNA, 21 nt, RNAi
ucagcaagaagagacgauguu

SEQ ID NO: 7246 - RNA, 21 nt, RNAi
uuagucguucuucucugcuac

SEQ ID NO: 7247 - DNA, 21 bp, Homo sapiens
gaagagacgatgcctacaaag

SEQ ID NO: 7248 - RNA, 21 nt, RNAi
agagacgaugccuacaaaguu

SEQ ID NO: 7249 - RNA, 21 nt, RNAi
uuucucugcuacggauguuuc

SEQ ID NO: 7250 - DNA, 21 bp, Homo sapiens
gagacgatgcctacaaaggag

SEQ ID NO: 7251 - RNA, 21 nt, RNAi
gacgaugccuacaaaggaguu

SEQ ID NO: 7252 - RNA, 21 nt, RNAi
uucugcuacggauguuuccuc

SEQ ID NO: 7253 - DNA, 21 bp, Homo sapiens
gacgatgcctacaaaggagac

SEQ ID NO: 7254 - RNA, 21 nt, RNAi
cgaugccuacaaaggagacuu

SEQ ID NO: 7255 - RNA, 21 nt, RNAi
uugcuacggauguuuccucug

SEQ ID NO: 7256 - DNA, 21 bp, Homo sapiens
gatgcctacaaaggagacaac

SEQ ID NO: 7257 - RNA, 21 nt, RNAi
ugccuacaaaggagacaacuu

SEQ ID NO: 7258 - RNA, 21 nt, RNAi
uuacggauguuuccucuguug

SEQ ID NO: 7259 - DNA, 21 bp, Homo sapiens
gagacaactaaactgcaaatt

SEQ ID NO: 7260 - RNA, 21 nt, RNAi
gacaacuaaacugcaaauuuu

SEQ ID NO: 7261 - RNA, 21 nt, RNAi
uucuguugauuugacguuuaa

SEQ ID NO: 7262 - DNA, 21 bp, Homo sapiens
gacaactaaactgcaaattgc

SEQ ID NO: 7263 - RNA, 21 nt, RNAi
caacuaaacugcaaauugcuu

SEQ ID NO: 7264 - RNA, 21 nt, RNAi
uuguugauuugacguuuaacg

SEQ ID NO: 7265 - DNA, 21 bp, Homo sapiens
gaatgactctatccagttctg

SEQ ID NO: 7266 - RNA, 21 nt, RNAi
augacucuauccaguucuguu

SEQ ID NO: 7267 - RNA, 21 nt, RNAi
uuuacugagauaggucaagac

SEQ ID NO: 7268 - DNA, 21 bp, Homo sapiens
gactctatccagttctgtttg

SEQ ID NO: 7269 - RNA, 21 nt, RNAi
cucuauccaguucuguuuguu

SEQ ID NO: 7270 - RNA, 21 nt, RNAi
uugagauaggucaagacaaac

SEQ ID NO: 7271 - DNA, 21 bp, Homo sapiens
gagaaacttcacttgcggaga

SEQ ID NO: 7272 - RNA, 21 nt, RNAi
gaaacuucacuugcggagauu

SEQ ID NO: 7273 - RNA, 21 nt, RNAi
uucuuugaagugaacgccucu

SEQ ID NO: 7274 - DNA, 21 bp, Homo sapiens
gaaacttcacttgcggagaac

SEQ ID NO: 7275 - RNA, 21 nt, RNAi
aacuucacuugcggagaacuu

SEQ ID NO: 7276 - RNA, 21 nt, RNAi
uuuugaagugaacgccucuug

SEQ ID NO: 7277 - DNA, 21 bp, Homo sapiens
gagaacatttggcaggaacaa

SEQ ID NO: 7278 - RNA, 21 nt, RNAi
gaacauuuggcaggaacaauu

SEQ ID NO: 7279 - RNA, 21 nt, RNAi
uucuuguaaaccguccuuguu

SEQ ID NO: 7280 - DNA, 21 bp, Homo sapiens
gaacatttggcaggaacaacc

SEQ ID NO: 7281 - RNA, 21 nt, RNAi
acauuuggcaggaacaaccuu

SEQ ID NO: 7282 - RNA, 21 nt, RNAi
uuuguaaaccguccuuguugg

SEQ ID NO: 7283 - DNA, 21 bp, Homo sapiens
gaacaacctcattctaaaggt

SEQ ID NO: 7284 - RNA, 21 nt, RNAi
acaaccucauucuaaagguuu

SEQ ID NO: 7285 - RNA, 21 nt, RNAi
uuuguuggaguaagauuucca

SEQ ID NO: 7286 - DNA, 21 bp, Homo sapiens
gatgagtttcttctttcagaa

SEQ ID NO: 7287 - RNA, 21 nt, RNAi
ugaguuucuucuuucagaauu

SEQ ID NO: 7288 - RNA, 21 nt, RNAi
uuacucaaagaagaaagucuu

SEQ ID NO: 7289 - DNA, 21 bp, Homo sapiens
gaaagcatcacctcaaatgaa

SEQ ID NO: 7290 - RNA, 21 nt, RNAi
aagcaucaccucaaaugaauu

SEQ ID NO: 7291 - RNA, 21 nt, RNAi
uuuucguaguggaguuuacuu

SEQ ID NO: 7292 - DNA, 21 bp, Homo sapiens
gaagatgtgtctccagatgtt

SEQ ID NO: 7293 - RNA, 21 nt, RNAi
agaugugucuccagauguuuu

SEQ ID NO: 7294 - RNA, 21 nt, RNAi
uuucuacacagaggucuacaa

SEQ ID NO: 7295 - DNA, 21 bp, Homo sapiens
gatgtgtctccagatgtttgt

SEQ ID NO: 7296 - RNA, 21 nt, RNAi
ugugucuccagauguuuguuu

SEQ ID NO: 7297 - RNA, 21 nt, RNAi
uuacacagaggucuacaaaca

SEQ ID NO: 7298 - DNA, 21 bp, Homo sapiens
gagcgaggatgccattatcac

SEQ ID NO: 7299 - RNA, 21 nt, RNAi
gcgaggaugccauuaucacuu

SEQ ID NO: 7300 - RNA, 21 nt, RNAi
uucgcuccuacgguaauagug

SEQ ID NO: 7301 - DNA, 21 bp, Homo sapiens
gaggatgccattatcacaggc

SEQ ID NO: 7302 - RNA, 21 nt, RNAi
ggaugccauuaucacaggcuu

SEQ ID NO: 7303 - RNA, 21 nt, RNAi
uuccuacgguaauaguguccg

SEQ ID NO: 7304 - DNA, 21 bp, Homo sapiens
gatgccattatcacaggcttc

SEQ ID NO: 7305 - RNA, 21 nt, RNAi
ugccauuaucacaggcuucuu

SEQ ID NO: 7306 - RNA, 21 nt, RNAi
uuacgguaauaguguccgaag

SEQ ID NO: 7307 - DNA, 21 bp, Homo sapiens
gaagacacttgtgactttgcc

SEQ ID NO: 7308 - RNA, 21 nt, RNAi
agacacuugugacuuugccuu

SEQ ID NO: 7309 - RNA, 21 nt, RNAi
uuucugugaacacugaaacgg

SEQ ID NO: 7310 - DNA, 21 bp, Homo sapiens
gacacttgtgactttgccaga

SEQ ID NO: 7311 - RNA, 21 nt, RNAi
cacuugugacuuugccagauu

SEQ ID NO: 7312 - RNA, 21 nt, RNAi
uugugaacacugaaacggucu

SEQ ID NO: 7313 - DNA, 21 bp, Homo sapiens
gactttgccagagcagctcgt

SEQ ID NO: 7314 - RNA, 21 nt, RNAi
cuuugccagagcagcucguuu

SEQ ID NO: 7315 - RNA, 21 nt, RNAi
uugaaacggucucgucgagca

SEQ ID NO: 7316 - DNA, 21 bp, Homo sapiens
gagataatgtccttgaaggat

SEQ ID NO: 7317 - RNA, 21 nt, RNAi
gauaauguccuugaaggauuu

SEQ ID NO: 7318 - RNA, 21 nt, RNAi
uucuauuacaggaacuuccua

SEQ ID NO: 7319 - DNA, 21 bp, Homo sapiens
gataatgtccttgaaggatct

SEQ ID NO: 7320 - RNA, 21 nt, RNAi
uaauguccuugaaggaucuuu

SEQ ID NO: 7321 - RNA, 21 nt, RNAi
uuauuacaggaacuuccuaga

SEQ ID NO: 7322 - DNA, 21 bp, Homo sapiens
gatcctgagagactgttaccg

SEQ ID NO: 7323 - RNA, 21 nt, RNAi
uccugagagacuguuaccguu

SEQ ID NO: 7324 - RNA, 21 nt, RNAi
uuaggacucucugacaauggc

SEQ ID NO: 7325 - DNA, 21 bp, Homo sapiens
gagagactgttaccggaagaa

SEQ ID NO: 7326 - RNA, 21 nt, RNAi
gagacuguuaccggaagaauu

SEQ ID NO: 7327 - RNA, 21 nt, RNAi
uucucugacaauggccuucuu

SEQ ID NO: 7328 - DNA, 21 bp, Homo sapiens
gagactgttaccggaagaaga

SEQ ID NO: 7329 - RNA, 21 nt, RNAi
gacuguuaccggaagaagauu

SEQ ID NO: 7330 - RNA, 21 nt, RNAi
uucugacaauggccuucuucu

SEQ ID NO: 7331 - DNA, 21 bp, Homo sapiens
gactgttaccggaagaagatc

SEQ ID NO: 7332 - RNA, 21 nt, RNAi
cuguuaccggaagaagaucuu

SEQ ID NO: 7333 - RNA, 21 nt, RNAi
uugacaauggccuucuucuag

SEQ ID NO: 7334 - DNA, 21 bp, Homo sapiens
gaagaagatctagatgtaaag

SEQ ID NO: 7335 - RNA, 21 nt, RNAi
agaagaucuagauguaaaguu

SEQ ID NO: 7336 - RNA, 21 nt, RNAi
uuucuucuagaucuacauuuc

SEQ ID NO: 7337 - DNA, 21 bp, Homo sapiens
gaagatctagatgtaaagacc

SEQ ID NO: 7338 - RNA, 21 nt, RNAi
agaucuagauguaaagaccuu

SEQ ID NO: 7339 - RNA, 21 nt, RNAi
uuucuagaucuacauuucugg

SEQ ID NO: 7340 - DNA, 21 bp, Homo sapiens
gatctagatgtaaagacctct

SEQ ID NO: 7341 - RNA, 21 nt, RNAi
ucuagauguaaagaccucuuu

SEQ ID NO: 7342 - RNA, 21 nt, RNAi
uuagaucuacauuucuggaga

SEQ ID NO: 7343 - DNA, 21 bp, Homo sapiens
gatgtaaagacctctgaggac

SEQ ID NO: 7344 - RNA, 21 nt, RNAi
uguaaagaccucugaggacuu

SEQ ID NO: 7345 - RNA, 21 nt, RNAi
uuacauuucuggagacuccug

SEQ ID NO: 7346 - DNA, 21 bp, Homo sapiens
gacctctgaggaccagcagac

SEQ ID NO: 7347 - RNA, 21 nt, RNAi
ccucugaggaccagcagacuu

SEQ ID NO: 7348 - RNA, 21 nt, RNAi
uuggagacuccuggucgucug

SEQ ID NO: 7349 - DNA, 21 bp, Homo sapiens
gaggaccagcagacagcttgt

SEQ ID NO: 7350 - RNA, 21 nt, RNAi
ggaccagcagacagcuuguuu

SEQ ID NO: 7351 - RNA, 21 nt, RNAi
uuccuggucgucugucgaaca

SEQ ID NO: 7352 - DNA, 21 bp, Homo sapiens
gaccagcagacagcttgtggc

SEQ ID NO: 7353 - RNA, 21 nt, RNAi
ccagcagacagcuuguggcuu

SEQ ID NO: 7354 - RNA, 21 nt, RNAi
uuggucgucugucgaacaccg

SEQ ID NO: 7355 - DNA, 21 bp, Homo sapiens
gacagcttgtggcactatcta

SEQ ID NO: 7356 - RNA, 21 nt, RNAi
cagcuuguggcacuaucuauu

SEQ ID NO: 7357 - RNA, 21 nt, RNAi
uugucgaacaccgugauagau

SEQ ID NO: 7358 - DNA, 21 bp, Homo sapiens
gactctcagcatcaagaagct

SEQ ID NO: 7359 - RNA, 21 nt, RNAi
cucucagcaucaagaagcuuu

SEQ ID NO: 7360 - RNA, 21 nt, RNAi
uugagagucguaguucuucga

SEQ ID NO: 7361 - DNA, 21 bp, Homo sapiens
gaagacagtcgtgaagccaca

SEQ ID NO: 7362 - RNA, 21 nt, RNAi
agacagucgugaagccacauu

SEQ ID NO: 7363 - RNA, 21 nt, RNAi
uuucugucagcacuucggugu

SEQ ID NO: 7364 - DNA, 21 bp, Homo sapiens
gacagtcgtgaagccacacac

SEQ ID NO: 7365 - RNA, 21 nt, RNAi
cagucgugaagccacacacuu

SEQ ID NO: 7366 - RNA, 21 nt, RNAi
uugucagcacuucggugugug

SEQ ID NO: 7367 - DNA, 21 bp, Homo sapiens
gaagccacacactcctctggc

SEQ ID NO: 7368 - RNA, 21 nt, RNAi
agccacacacuccucuggcuu

SEQ ID NO: 7369 - RNA, 21 nt, RNAi
uuucggugugugaggagaccg

SEQ ID NO: 7370 - DNA, 21 bp, Homo sapiens
gaacttactaatgagacttca

SEQ ID NO: 7371 - RNA, 21 nt, RNAi
acuuacuaaugagacuucauu

SEQ ID NO: 7372 - RNA, 21 nt, RNAi
uuugaaugauuacucugaagu

SEQ ID NO: 7373 - DNA, 21 bp, Homo sapiens
gagttaagtgcctctgcagag

SEQ ID NO: 7374 - RNA, 21 nt, RNAi
guuaagugccucugcagaguu

SEQ ID NO: 7375 - RNA, 21 nt, RNAi
uucaauucacggagacgucuc

SEQ ID NO: 7376 - DNA, 21 bp, Homo sapiens
gagttgtgtatagaagacaga

SEQ ID NO: 7377 - RNA, 21 nt, RNAi
guuguguauagaagacagauu

SEQ ID NO: 7378 - RNA, 21 nt, RNAi
uucaacacauaucuucugucu

SEQ ID NO: 7379 - DNA, 21 bp, Homo sapiens
gaagacagaccaatgcctaag

SEQ ID NO: 7380 - RNA, 21 nt, RNAi
agacagaccaaugccuaaguu

SEQ ID NO: 7381 - RNA, 21 nt, RNAi
uuucugucugguuacggauuc

SEQ ID NO: 7382 - DNA, 21 bp, Homo sapiens
gacagaccaatgcctaagttg

SEQ ID NO: 7383 - RNA, 21 nt, RNAi
cagaccaaugccuaaguuguu

SEQ ID NO: 7384 - RNA, 21 nt, RNAi
uugucugguuacggauucaac

SEQ ID NO: 7385 - DNA, 21 bp, Homo sapiens
gaccaatgcctaagttggaaa

SEQ ID NO: 7386 - RNA, 21 nt, RNAi
ccaaugccuaaguuggaaauu

SEQ ID NO: 7387 - RNA, 21 nt, RNAi
uugguuacggauucaaccuuu

SEQ ID NO: 7388 - DNA, 21 bp, Homo sapiens
gagaaggaaattgaattaggt

SEQ ID NO: 7389 - RNA, 21 nt, RNAi
gaaggaaauugaauuagguuu

SEQ ID NO: 7390 - RNA, 21 nt, RNAi
uucuuccuuuaacuuaaucca

SEQ ID NO: 7391 - DNA, 21 bp, Homo sapiens
gaattaggtaatgaggattac

SEQ ID NO: 7392 - RNA, 21 nt, RNAi
auuagguaaugaggauuacuu

SEQ ID NO: 7393 - RNA, 21 nt, RNAi
uuuaauccauuacuccuaaug

SEQ ID NO: 7394 - DNA, 21 bp, Homo sapiens
gaggattactgcattaaacga

SEQ ID NO: 7395 - RNA, 21 nt, RNAi
ggauuacugcauuaaacgauu

SEQ ID NO: 7396 - RNA, 21 nt, RNAi
uuccuaaugacguaauuugcu

SEQ ID NO: 7397 - DNA, 21 bp, Homo sapiens
gattactgcattaaacgagaa

SEQ ID NO: 7398 - RNA, 21 nt, RNAi
uuacugcauuaaacgagaauu

SEQ ID NO: 7399 - RNA, 21 nt, RNAi
uuaaugacguaauuugcucuu

SEQ ID NO: 7400 - DNA, 21 bp, Homo sapiens
gagaatacctaatatgtgaag

SEQ ID NO: 7401 - RNA, 21 nt, RNAi
gaauaccuaauaugugaaguu

SEQ ID NO: 7402 - RNA, 21 nt, RNAi
uucuuauggauuauacacuuc

SEQ ID NO: 7403 - DNA, 21 bp, Homo sapiens
gaagattacaagttattctgg

SEQ ID NO: 7404 - RNA, 21 nt, RNAi
agauuacaaguuauucugguu

SEQ ID NO: 7405 - RNA, 21 nt, RNAi
uuucuaauguucaauaagacc

SEQ ID NO: 7406 - DNA, 21 bp, Homo sapiens
gaaactctgcagaattaacag

SEQ ID NO: 7407 - RNA, 21 nt, RNAi
aacucugcagaauuaacaguu

SEQ ID NO: 7408 - RNA, 21 nt, RNAi
uuuugagacgucuuaauuguc

SEQ ID NO: 7409 - DNA, 21 bp, Homo sapiens
gatggctgtattgtttggcac

SEQ ID NO: 7410 - RNA, 21 nt, RNAi
uggcuguauuguuuggcacuu

SEQ ID NO: 7411 - RNA, 21 nt, RNAi
uuaccgacauaacaaaccgug

SEQ ID NO: 7412 - DNA, 21 bp, Homo sapiens
gatcttctccaacacagtgaa

SEQ ID NO: 7413 - RNA, 21 nt, RNAi
ucuucuccaacacagugaauu

SEQ ID NO: 7414 - RNA, 21 nt, RNAi
uuagaagagguugugucacuu

SEQ ID NO: 7415 - DNA, 21 bp, Homo sapiens
gacaatagtggagatgctaca

SEQ ID NO: 7416 - RNA, 21 nt, RNAi
caauaguggagaugcuacauu

SEQ ID NO: 7417 - RNA, 21 nt, RNAi
uuguuaucaccucuacgaugu

SEQ ID NO: 7418 - DNA, 21 bp, Homo sapiens
gagatgctacacaaagcagaa

SEQ ID NO: 7419 - RNA, 21 nt, RNAi
gaugcuacacaaagcagaauu

SEQ ID NO: 7420 - RNA, 21 nt, RNAi
uucuacgauguguuucgucuu

SEQ ID NO: 7421 - DNA, 21 bp, Homo sapiens
gatgctacacaaagcagaaat

SEQ ID NO: 7422 - RNA, 21 nt, RNAi
ugcuacacaaagcagaaauuu

SEQ ID NO: 7423 - RNA, 21 nt, RNAi
uuacgauguguuucgucuuua

SEQ ID NO: 7424 - DNA, 21 bp, Homo sapiens
gaaatagtccatggtgacttg

SEQ ID NO: 7425 - RNA, 21 nt, RNAi
aauaguccauggugacuuguu

SEQ ID NO: 7426 - RNA, 21 nt, RNAi
uuuuaucagguaccacugaac

SEQ ID NO: 7427 - DNA, 21 bp, Homo sapiens
gacttgagtccaaggtgtctg

SEQ ID NO: 7428 - RNA, 21 nt, RNAi
cuugaguccaaggugucuguu

SEQ ID NO: 7429 - RNA, 21 nt, RNAi
uugaacucagguuccacagac

SEQ ID NO: 7430 - DNA, 21 bp, Homo sapiens
gagtccaaggtgtctgattct

SEQ ID NO: 7431 - RNA, 21 nt, RNAi
guccaaggugucugauucuuu

SEQ ID NO: 7432 - RNA, 21 nt, RNAi
uucagguuccacagacuaaga

SEQ ID NO: 7433 - DNA, 21 bp, Homo sapiens
gattctcagaaacagaatcca

SEQ ID NO: 7434 - RNA, 21 nt, RNAi
uucucagaaacagaauccauu

SEQ ID NO: 7435 - RNA, 21 nt, RNAi
uuaagagucuuugucuuaggu

SEQ ID NO: 7436 - DNA, 21 bp, Homo sapiens
gaacaatcaagctttgaagat

SEQ ID NO: 7437 - RNA, 21 nt, RNAi
acaaucaagcuuugaagauuu

SEQ ID NO: 7438 - RNA, 21 nt, RNAi
uuuguuaguucgaaacuucua

SEQ ID NO: 7439 - DNA, 21 bp, Homo sapiens
gactgtacagatcctggaagg

SEQ ID NO: 7440 - RNA, 21 nt, RNAi
cuguacagauccuggaagguu

SEQ ID NO: 7441 - RNA, 21 nt, RNAi
uugacaugucuaggaccuucc

SEQ ID NO: 7442 - DNA, 21 bp, Homo sapiens
gatcctggctaactgttcttc

SEQ ID NO: 7443 - RNA, 21 nt, RNAi
uccuggcuaacuguucuucuu

SEQ ID NO: 7444 - RNA, 21 nt, RNAi
uuaggaccgauugacaagaag

SEQ ID NO: 7445 - DNA, 21 bp, Homo sapiens
gacctgtttggtatagcagat

SEQ ID NO: 7446 - RNA, 21 nt, RNAi
ccuguuugguauagcagauuu

SEQ ID NO: 7447 - RNA, 21 nt, RNAi
uuggacaaaccauaucgucua

SEQ ID NO: 7448 - DNA, 21 bp, Homo sapiens
gaacacctacaggtcttctgg

SEQ ID NO: 7449 - RNA, 21 nt, RNAi
acaccuacaggucuucugguu

SEQ ID NO: 7450 - RNA, 21 nt, RNAi
uuuguggauguccagaagacc

SEQ ID NO: 7451 - DNA, 21 bp, Homo sapiens
gatggtgaattgtggaataaa

SEQ ID NO: 7452 - RNA, 21 nt, RNAi
uggugaauuguggaauaaauu

SEQ ID NO: 7453 - RNA, 21 nt, RNAi
uuaccacuuaacaccuuauuu

SEQ ID NO: 7454 - DNA, 21 bp, Homo sapiens
gaataaattctttgtgcggat

SEQ ID NO: 7455 - RNA, 21 nt, RNAi
auaaauucuuugugcggauuu

SEQ ID NO: 7456 - RNA, 21 nt, RNAi
uuuauuuaagaaacacgccua

SEQ ID NO: 7457 - DNA, 21 bp, Homo sapiens
gattctgaatgccaatgatga

SEQ ID NO: 7458 - RNA, 21 nt, RNAi
uucugaaugccaaugaugauu

SEQ ID NO: 7459 - RNA, 21 nt, RNAi
uuaagacuuacgguuacuacu

SEQ ID NO: 7460 - DNA, 21 bp, Homo sapiens
gaatgccaatgatgaggccac

SEQ ID NO: 7461 - RNA, 21 nt, RNAi
augccaaugaugaggccacuu

SEQ ID NO: 7462 - RNA, 21 nt, RNAi
uuuacgguuacuacuccggug

SEQ ID NO: 7463 - DNA, 21 bp, Homo sapiens
gatgaggccacagtgtctgtt

SEQ ID NO: 7464 - RNA, 21 nt, RNAi
ugaggccacagugucuguuuu

SEQ ID NO: 7465 - RNA, 21 nt, RNAi
uuacuccggugucacagacaa

SEQ ID NO: 7466 - DNA, 21 bp, Homo sapiens
gaggccacagtgtctgttctt

SEQ ID NO: 7467 - RNA, 21 nt, RNAi
ggccacagugucuguucuuuu

SEQ ID NO: 7468 - RNA, 21 nt, RNAi
uuccggugucacagacaagaa

SEQ ID NO: 7469 - DNA, 21 bp, Homo sapiens
gagcttgcagcagaaatgaat

SEQ ID NO: 7470 - RNA, 21 nt, RNAi
gcuugcagcagaaaugaauuu

SEQ ID NO: 7471 - RNA, 21 nt, RNAi
uucgaacgucgucuuuacuua

SEQ ID NO: 7472 - DNA, 21 bp, Homo sapiens
gacactacattccaaagtcac

SEQ ID NO: 7473 - RNA, 21 nt, RNAi
cacuacauuccaaagucacuu

SEQ ID NO: 7474 - RNA, 21 nt, RNAi
uugugauguaagguuucagug

SEQ ID NO: 7475 - DNA, 21 bp, Homo sapiens
gaacaaagccttatggaaggt

SEQ ID NO: 7476 - RNA, 21 nt, RNAi
acaaagccuuauggaagguuu

SEQ ID NO: 7477 - RNA, 21 nt, RNAi
uuuguuucggaauaccuucca

SEQ ID NO: 7478 - DNA, 21 bp, Homo sapiens
gagctaggcaatcaagtctca

SEQ ID NO: 7479 - RNA, 21 nt, RNAi
gcuaggcaaucaagucucauu

SEQ ID NO: 7480 - RNA, 21 nt, RNAi
uucgauccguuaguucagagu

SEQ ID NO: 7481 - DNA, 21 bp, Homo sapiens
gattgctgcctcagagcaatg

SEQ ID NO: 7482 - RNA, 21 nt, RNAi
uugcugccucagagcaauguu

SEQ ID NO: 7483 - RNA, 21 nt, RNAi
uuaacgacggagucucguuac

SEQ ID NO: 7484 - DNA, 21 bp, Homo sapiens
gagcaatggttgtattgtgga

SEQ ID NO: 7485 - RNA, 21 nt, RNAi
gcaaugguuguauuguggauu

SEQ ID NO: 7486 - RNA, 21 nt, RNAi
uucguuaccaacauaacaccu

SEQ ID NO: 7487 - DNA, 21 bp, Homo sapiens
gaacactgaaactgtatgtgc

SEQ ID NO: 7488 - RNA, 21 nt, RNAi
acacugaaacuguaugugcuu

SEQ ID NO: 7489 - RNA, 21 nt, RNAi
uuugugacuuugacauacacg

SEQ ID NO: 7490 - DNA, 21 bp, Homo sapiens
gaaactgtatgtgctgtaatt

SEQ ID NO: 7491 - RNA, 21 nt, RNAi
aacuguaugugcuguaauuuu

SEQ ID NO: 7492 - RNA, 21 nt, RNAi
uuuugacauacacgacauuaa

SEQ ID NO: 7493 - DNA, 21 bp, Homo sapiens
gacacatttagatgcactacc

SEQ ID NO: 7494 - RNA, 21 nt, RNAi
cacauuuagaugcacuaccuu

SEQ ID NO: 7495 - RNA, 21 nt, RNAi
uuguguaaaucuacgugaugg

SEQ ID NO: 7496 - DNA, 21 bp, Homo sapiens
gatgcactaccattgctgttc

SEQ ID NO: 7497 - RNA, 21 nt, RNAi
ugcacuaccauugcuguucuu

SEQ ID NO: 7498 - RNA, 21 nt, RNAi
uuacgugaugguaacgacaag

SEQ ID NO: 7499 - DNA, 21 bp, Homo sapiens
gatatacttactcatggcctt

SEQ ID NO: 7500 - RNA, 21 nt, RNAi
uauacuuacucauggccuuuu

SEQ ID NO: 7501 - RNA, 21 nt, RNAi
uuauaugaaugaguaccggaa

SEQ ID NO: 7502 - DNA, 21 bp, Homo sapiens
gactcattacaaatggttacc

SEQ ID NO: 7503 - RNA, 21 nt, RNAi
cucauuacaaaugguuaccuu

SEQ ID NO: 7504 - RNA, 21 nt, RNAi
uugaguaauguuuaccaaugg

SEQ ID NO: 7505 - DNA, 21 bp, Homo sapiens
taacaatactcttcagcagca

SEQ ID NO: 7506 - RNA, 21 nt, RNAi
acaauacucuucagcagcauu

SEQ ID NO: 7507 - RNA, 21 nt, RNAi
uuuguuaugagaagucgucgu

SEQ ID NO: 7508 - DNA, 21 bp, Homo sapiens
tactcttcagcagcagaaacg

SEQ ID NO: 7509 - RNA, 21 nt, RNAi
cucuucagcagcagaaacguu

SEQ ID NO: 7510 - RNA, 21 nt, RNAi
uugagaagucgucgucuuugc

SEQ ID NO: 7511 - DNA, 21 bp, Homo sapiens
taggtatatcagctggacaga

SEQ ID NO: 7512 - RNA, 21 nt, RNAi
gguauaucagcuggacagauu

SEQ ID NO: 7513 - RNA, 21 nt, RNAi
uuccauauagucgaccugucu

SEQ ID NO: 7514 - DNA, 21 bp, Homo sapiens
tatatcagctggacagagcag

SEQ ID NO: 7515 - RNA, 21 nt, RNAi
uaucagcuggacagagcaguu

SEQ ID NO: 7516 - RNA, 21 nt, RNAi
uuauagucgaccugucucguc

SEQ ID NO: 7517 - DNA, 21 bp, Homo sapiens
tatcagctggacagagcagaa

SEQ ID NO: 7518 - RNA, 21 nt, RNAi
ucagcuggacagagcagaauu

SEQ ID NO: 7519 - RNA, 21 nt, RNAi
uuagucgaccugucucgucuu

SEQ ID NO: 7520 - DNA, 21 bp, Homo sapiens
tattagaaagagctgtagaag

SEQ ID NO: 7521 - RNA, 21 nt, RNAi
uuagaaagagcuguagaaguu

SEQ ID NO: 7522 - RNA, 21 nt, RNAi
uuaaucuuucucgacaucuuc

SEQ ID NO: 7523 - DNA, 21 bp, Homo sapiens
tagaaagagctgtagaagcac

SEQ ID NO: 7524 - RNA, 21 nt, RNAi
gaaagagcuguagaagcacuu

SEQ ID NO: 7525 - RNA, 21 nt, RNAi
uucuuucucgacaucuucgug

SEQ ID NO: 7526 - DNA, 21 bp, Homo sapiens
tagaagcactacaaggagaaa

SEQ ID NO: 7527 - RNA, 21 nt, RNAi
gaagcacuacaaggagaaauu

SEQ ID NO: 7528 - RNA, 21 nt, RNAi
uucuucgugauguuccucuuu

SEQ ID NO: 7529 - DNA, 21 bp, Homo sapiens
tatagtgatcctcgatttctc

SEQ ID NO: 7530 - RNA, 21 nt, RNAi
uagugauccucgauuucucuu

SEQ ID NO: 7531 - RNA, 21 nt, RNAi
uuaucacuaggagcuaaagag

SEQ ID NO: 7532 - DNA, 21 bp, Homo sapiens
tagtgatcctcgatttctcaa

SEQ ID NO: 7533 - RNA, 21 nt, RNAi
gugauccucgauuucucaauu

SEQ ID NO: 7534 - RNA, 21 nt, RNAi
uucacuaggagcuaaagaguu

SEQ ID NO: 7535 - DNA, 21 bp, Homo sapiens
tatgcaatgagcctttggata

SEQ ID NO: 7536 - RNA, 21 nt, RNAi
ugcaaugagccuuuggauauu

SEQ ID NO: 7537 - RNA, 21 nt, RNAi
uuacguuacucggaaaccuau

SEQ ID NO: 7538 - DNA, 21 bp, Homo sapiens
tatgtacagttacttgcacaa

SEQ ID NO: 7539 - RNA, 21 nt, RNAi
uguacaguuacuugcacaauu

SEQ ID NO: 7540 - RNA, 21 nt, RNAi
uuacaugucaaugaacguguu

SEQ ID NO: 7541 - DNA, 21 bp, Homo sapiens
tacagttacttgcacaaccaa

SEQ ID NO: 7542 - RNA, 21 nt, RNAi
caguuacuugcacaaccaauu

SEQ ID NO: 7543 - RNA, 21 nt, RNAi
uugucaaugaacguguugguu

SEQ ID NO: 7544 - DNA, 21 bp, Homo sapiens
taggaaagcagatgcgatatt

SEQ ID NO: 7545 - RNA, 21 nt, RNAi
ggaaagcagaugcgauauuuu

SEQ ID NO: 7546 - RNA, 21 nt, RNAi
uuccuuucgucuacgcuauaa

SEQ ID NO: 7547 - DNA, 21 bp, Homo sapiens
taccacaacgaagcacactag

SEQ ID NO: 7548 - RNA, 21 nt, RNAi
ccacaacgaagcacacuaguu

SEQ ID NO: 7549 - RNA, 21 nt, RNAi
uugguguugcuucgugugauc

SEQ ID NO: 7550 - DNA, 21 bp, Homo sapiens
tagctgaactaaagagcaaag

SEQ ID NO: 7551 - RNA, 21 nt, RNAi
gcugaacuaaagagcaaaguu

SEQ ID NO: 7552 - RNA, 21 nt, RNAi
uucgacuugauuucucguuuc

SEQ ID NO: 7553 - DNA, 21 bp, Homo sapiens
taggaggtgctctcaaggctc

SEQ ID NO: 7554 - RNA, 21 nt, RNAi
ggaggugcucucaaggcucuu

SEQ ID NO: 7555 - RNA, 21 nt, RNAi
uuccuccacgagaguuccgag

SEQ ID NO: 7556 - DNA, 21 bp, Homo sapiens
tacagcagagttgtctaagcc

SEQ ID NO: 7557 - RNA, 21 nt, RNAi
cagcagaguugucuaagccuu

SEQ ID NO: 7558 - RNA, 21 nt, RNAi
uugucgucucaacagauucgg

SEQ ID NO: 7559 - DNA, 21 bp, Homo sapiens
taagcctacagtccagccatg

SEQ ID NO: 7560 - RNA, 21 nt, RNAi
agccuacaguccagccauguu

SEQ ID NO: 7561 - RNA, 21 nt, RNAi
uuucggaugucaggucgguac

SEQ ID NO: 7562 - DNA, 21 bp, Homo sapiens
tacagtccagccatggatagc

SEQ ID NO: 7563 - RNA, 21 nt, RNAi
caguccagccauggauagcuu

SEQ ID NO: 7564 - RNA, 21 nt, RNAi
uugucaggucgguaccuaucg

SEQ ID NO: 7565 - DNA, 21 bp, Homo sapiens
tacagcttcactgatagctgt

SEQ ID NO: 7566 - RNA, 21 nt, RNAi
cagcuucacugauagcuguuu

SEQ ID NO: 7567 - RNA, 21 nt, RNAi
uugucgaagugacuaucgaca

SEQ ID NO: 7568 - DNA, 21 bp, Homo sapiens
tatgtggaagagactgcacaa

SEQ ID NO: 7569 - RNA, 21 nt, RNAi
uguggaagagacugcacaauu

SEQ ID NO: 7570 - RNA, 21 nt, RNAi
uuacaccuucucugacguguu

SEQ ID NO: 7571 - DNA, 21 bp, Homo sapiens
tagtataaaccacatcctaag

SEQ ID NO: 7572 - RNA, 21 nt, RNAi
guauaaaccacauccuaaguu

SEQ ID NO: 7573 - RNA, 21 nt, RNAi
uucauauuugguguaggauuc

SEQ ID NO: 7574 - DNA, 21 bp, Homo sapiens
tataaaccacatcctaagcac

SEQ ID NO: 7575 - RNA, 21 nt, RNAi
uaaaccacauccuaagcacuu

SEQ ID NO: 7576 - RNA, 21 nt, RNAi
uuauuugguguaggauucgug

SEQ ID NO: 7577 - DNA, 21 bp, Homo sapiens
taaaccacatcctaagcacca

SEQ ID NO: 7578 - RNA, 21 nt, RNAi
aaccacauccuaagcaccauu

SEQ ID NO: 7579 - RNA, 21 nt, RNAi
uuuugguguaggauucguggu

SEQ ID NO: 7580 - DNA, 21 bp, Homo sapiens
taagcaccagaaagcctggaa

SEQ ID NO: 7581 - RNA, 21 nt, RNAi
agcaccagaaagccuggaauu

SEQ ID NO: 7582 - RNA, 21 nt, RNAi
uuucguggucuuucggaccuu

SEQ ID NO: 7583 - DNA, 21 bp, Homo sapiens
taaggagaagatttatgcagg

SEQ ID NO: 7584 - RNA, 21 nt, RNAi
aggagaagauuuaugcagguu

SEQ ID NO: 7585 - RNA, 21 nt, RNAi
uuuccucuucuaaauacgucc

SEQ ID NO: 7586 - DNA, 21 bp, Homo sapiens
tattgaccagtgcagagaaga

SEQ ID NO: 7587 - RNA, 21 nt, RNAi
uugaccagugcagagaagauu

SEQ ID NO: 7588 - RNA, 21 nt, RNAi
uuaacuggucacgucucuucu

SEQ ID NO: 7589 - DNA, 21 bp, Homo sapiens
tactcagcaagaaagaacagg

SEQ ID NO: 7590 - RNA, 21 nt, RNAi
cucagcaagaaagaacagguu

SEQ ID NO: 7591 - RNA, 21 nt, RNAi
uugagucguucuuucuugucc

SEQ ID NO: 7592 - DNA, 21 bp, Homo sapiens
tacaaaggagacaactaaact

SEQ ID NO: 7593 - RNA, 21 nt, RNAi
caaaggagacaacuaaacuuu

SEQ ID NO: 7594 - RNA, 21 nt, RNAi
uuguuuccucuguugauuuga

SEQ ID NO: 7595 - DNA, 21 bp, Homo sapiens
taaactgcaaattgcttccga

SEQ ID NO: 7596 - RNA, 21 nt, RNAi
aacugcaaauugcuuccgauu

SEQ ID NO: 7597 - RNA, 21 nt, RNAi
uuuugacguuuaacgaaggcu

SEQ ID NO: 7598 - DNA, 21 bp, Homo sapiens
taccaggaatgactctatcca

SEQ ID NO: 7599 - RNA, 21 nt, RNAi
ccaggaaugacucuauccauu

SEQ ID NO: 7600 - RNA, 21 nt, RNAi
uugguccuuacugagauaggu

SEQ ID NO: 7601 - DNA, 21 bp, Homo sapiens
tatccagttctgtttgtcaag

SEQ ID NO: 7602 - RNA, 21 nt, RNAi
uccaguucuguuugucaaguu

SEQ ID NO: 7603 - RNA, 21 nt, RNAi
uuaggucaagacaaacaguuc

SEQ ID NO: 7604 - DNA, 21 bp, Homo sapiens
taaactgttgtgccagagaaa

SEQ ID NO: 7605 - RNA, 21 nt, RNAi
aacuguugugccagagaaauu

SEQ ID NO: 7606 - RNA, 21 nt, RNAi
uuuugacaacacggucucuuu

SEQ ID NO: 7607 - DNA, 21 bp, Homo sapiens
tatcacaggcttcagaaatgt

SEQ ID NO: 7608 - RNA, 21 nt, RNAi
ucacaggcuucagaaauguuu

SEQ ID NO: 7609 - RNA, 21 nt, RNAi
uuaguguccgaagucuuuaca

SEQ ID NO: 7610 - DNA, 21 bp, Homo sapiens
taatgtccttgaaggatctcc

SEQ ID NO: 7611 - RNA, 21 nt, RNAi
auguccuugaaggaucuccuu

SEQ ID NO: 7612 - RNA, 21 nt, RNAi
uuuacaggaacuuccuagagg

SEQ ID NO: 7613 - DNA, 21 bp, Homo sapiens
taccggaagaagatctagatg

SEQ ID NO: 7614 - RNA, 21 nt, RNAi
ccggaagaagaucuagauguu

SEQ ID NO: 7615 - RNA, 21 nt, RNAi
uuggccuucuucuagaucuac

SEQ ID NO: 7616 - DNA, 21 bp, Homo sapiens
tagatgtaaagacctctgagg

SEQ ID NO: 7617 - RNA, 21 nt, RNAi
gauguaaagaccucugagguu

SEQ ID NO: 7618 - RNA, 21 nt, RNAi
uucuacauuucuggagacucc

SEQ ID NO: 7619 - DNA, 21 bp, Homo sapiens
taaagacctctgaggaccagc

SEQ ID NO: 7620 - RNA, 21 nt, RNAi
aagaccucugaggaccagcuu

SEQ ID NO: 7621 - RNA, 21 nt, RNAi
uuuucuggagacuccuggucg

SEQ ID NO: 7622 - DNA, 21 bp, Homo sapiens
tatctacagtcagactctcag

SEQ ID NO: 7623 - RNA, 21 nt, RNAi
ucuacagucagacucucaguu

SEQ ID NO: 7624 - RNA, 21 nt, RNAi
uuagaugucagucugagaguc

SEQ ID NO: 7625 - DNA, 21 bp, Homo sapiens
tacagtcagactctcagcatc

SEQ ID NO: 7626 - RNA, 21 nt, RNAi
cagucagacucucagcaucuu

SEQ ID NO: 7627 - RNA, 21 nt, RNAi
uugucagucugagagucguag

SEQ ID NO: 7628 - DNA, 21 bp, Homo sapiens
tattgaagacagtcgtgaagc

SEQ ID NO: 7629 - RNA, 21 nt, RNAi
uugaagacagucgugaagcuu

SEQ ID NO: 7630 - RNA, 21 nt, RNAi
uuaacuucugucagcacuucg

SEQ ID NO: 7631 - DNA, 21 bp, Homo sapiens
tactcagtcaccatggtgttc

SEQ ID NO: 7632 - RNA, 21 nt, RNAi
cucagucaccaugguguucuu

SEQ ID NO: 7633 - RNA, 21 nt, RNAi
uugagucagugguaccacaag

SEQ ID NO: 7634 - DNA, 21 bp, Homo sapiens
tatcgcagacagctactgaag

SEQ ID NO: 7635 - RNA, 21 nt, RNAi
ucgcagacagcuacugaaguu

SEQ ID NO: 7636 - RNA, 21 nt, RNAi
uuagcgucugucgaugacuuc

SEQ ID NO: 7637 - DNA, 21 bp, Homo sapiens
taccagagttaagtgcctctg

SEQ ID NO: 7638 - RNA, 21 nt, RNAi
ccagaguuaagugccucuguu

SEQ ID NO: 7639 - RNA, 21 nt, RNAi
uuggucucaauucacggagac

SEQ ID NO: 7640 - DNA, 21 bp, Homo sapiens
taagtgcctctgcagagttgt

SEQ ID NO: 7641 - RNA, 21 nt, RNAi
agugccucugcagaguuguuu

SEQ ID NO: 7642 - RNA, 21 nt, RNAi
uuucacggagacgucucaaca

SEQ ID NO: 7643 - DNA, 21 bp, Homo sapiens
tatagaagacagaccaatgcc

SEQ ID NO: 7644 - RNA, 21 nt, RNAi
uagaagacagaccaaugccuu

SEQ ID NO: 7645 - RNA, 21 nt, RNAi
uuaucuucugucugguuacgg

SEQ ID NO: 7646 - DNA, 21 bp, Homo sapiens
tagaagacagaccaatgccta

SEQ ID NO: 7647 - RNA, 21 nt, RNAi
gaagacagaccaaugccuauu

SEQ ID NO: 7648 - RNA, 21 nt, RNAi
uucuucugucugguuacggau

SEQ ID NO: 7649 - DNA, 21 bp, Homo sapiens
taagttggaaattgagaagga

SEQ ID NO: 7650 - RNA, 21 nt, RNAi
aguuggaaauugagaaggauu

SEQ ID NO: 7651 - RNA, 21 nt, RNAi
uuucaaccuuuaacucuuccu

SEQ ID NO: 7652 - DNA, 21 bp, Homo sapiens
taggtaatgaggattactgca

SEQ ID NO: 7653 - RNA, 21 nt, RNAi
gguaaugaggauuacugcauu

SEQ ID NO: 7654 - RNA, 21 nt, RNAi
uuccauuacuccuaaugacgu

SEQ ID NO: 7655 - DNA, 21 bp, Homo sapiens
tactgcattaaacgagaatac

SEQ ID NO: 7656 - RNA, 21 nt, RNAi
cugcauuaaacgagaauacuu

SEQ ID NO: 7657 - RNA, 21 nt, RNAi
uugacguaauuugcucuuaug

SEQ ID NO: 7658 - DNA, 21 bp, Homo sapiens
taaaggtatcttctcaacctg

SEQ ID NO: 7659 - RNA, 21 nt, RNAi
aagguaucuucucaaccuguu

SEQ ID NO: 7660 - RNA, 21 nt, RNAi
uuuuccauagaagaguuggac

SEQ ID NO: 7661 - DNA, 21 bp, Homo sapiens
tatcaacctcaagttaaagga

SEQ ID NO: 7662 - RNA, 21 nt, RNAi
ucaaccucaaguuaaaggauu

SEQ ID NO: 7663 - RNA, 21 nt, RNAi
uuaguuggaguucaauuuccu

SEQ ID NO: 7664 - DNA, 21 bp, Homo sapiens
tatcaatatcaagatggctgt

SEQ ID NO: 7665 - RNA, 21 nt, RNAi
ucaauaucaagauggcuguuu

SEQ ID NO: 7666 - RNA, 21 nt, RNAi
uuaguuauaguucuaccgaca

SEQ ID NO: 7667 - DNA, 21 bp, Homo sapiens
tatcaagatggctgtattgtt

SEQ ID NO: 7668 - RNA, 21 nt, RNAi
ucaagauggcuguauuguuuu

SEQ ID NO: 7669 - RNA, 21 nt, RNAi
uuaguucuaccgacauaacaa

SEQ ID NO: 7670 - DNA, 21 bp, Homo sapiens
tagtggagatgctacacaaag

SEQ ID NO: 7671 - RNA, 21 nt, RNAi
guggagaugcuacacaaaguu

SEQ ID NO: 7672 - RNA, 21 nt, RNAi
uucaccucuacgauguguuuc

SEQ ID NO: 7673 - DNA, 21 bp, Homo sapiens
tacacaaagcagaaatagtcc

SEQ ID NO: 7674 - RNA, 21 nt, RNAi
cacaaagcagaaauaguccuu

SEQ ID NO: 7675 - RNA, 21 nt, RNAi
uuguguuucgucuuuaucagg

SEQ ID NO: 7676 - DNA, 21 bp, Homo sapiens
tagtccatggtgacttgagtc

SEQ ID NO: 7677 - RNA, 21 nt, RNAi
guccauggugacuugagucuu

SEQ ID NO: 7678 - RNA, 21 nt, RNAi
uucagguaccacugaacucag

SEQ ID NO: 7679 - DNA, 21 bp, Homo sapiens
tacagatcctggaaggacaaa

SEQ ID NO: 7680 - RNA, 21 nt, RNAi
cagauccuggaaggacaaauu

SEQ ID NO: 7681 - RNA, 21 nt, RNAi
uugucuaggaccuuccuguuu

SEQ ID NO: 7682 - DNA, 21 bp, Homo sapiens
taccaggtagacctgtttggt

SEQ ID NO: 7683 - RNA, 21 nt, RNAi
ccagguagaccuguuugguuu

SEQ ID NO: 7684 - RNA, 21 nt, RNAi
uugguccaucuggacaaacca

SEQ ID NO: 7685 - DNA, 21 bp, Homo sapiens
tagacctgtttggtatagcag

SEQ ID NO: 7686 - RNA, 21 nt, RNAi
gaccuguuugguauagcaguu

SEQ ID NO: 7687 - RNA, 21 nt, RNAi
uucuggacaaaccauaucguc

SEQ ID NO: 7688 - DNA, 21 bp, Homo sapiens
tagcagatttagcacatttac

SEQ ID NO: 7689 - RNA, 21 nt, RNAi
gcagauuuagcacauuuacuu

SEQ ID NO: 7690 - RNA, 21 nt, RNAi
uucgucuaaaucguguaaaug

SEQ ID NO: 7691 - DNA, 21 bp, Homo sapiens
tactattgttcaaggaacacc

SEQ ID NO: 7692 - RNA, 21 nt, RNAi
cuauuguucaaggaacaccuu

SEQ ID NO: 7693 - RNA, 21 nt, RNAi
uugauaacaaguuccuugugg

SEQ ID NO: 7694 - DNA, 21 bp, Homo sapiens
tattgttcaaggaacacctac

SEQ ID NO: 7695 - RNA, 21 nt, RNAi
uuguucaaggaacaccuacuu

SEQ ID NO: 7696 - RNA, 21 nt, RNAi
uuaacaaguuccuuguggaug

SEQ ID NO: 7697 - DNA, 21 bp, Homo sapiens
taaattctttgtgcggattct

SEQ ID NO: 7698 - RNA, 21 nt, RNAi
aauucuuugugcggauucuuu

SEQ ID NO: 7699 - RNA, 21 nt, RNAi
uuuuaagaaacacgccuaaga

SEQ ID NO: 7700 - DNA, 21 bp, Homo sapiens
tacattccaaagtcacctgaa

SEQ ID NO: 7701 - RNA, 21 nt, RNAi
cauuccaaagucaccugaauu

SEQ ID NO: 7702 - RNA, 21 nt, RNAi
uuguaagguuucaguggacuu

SEQ ID NO: 7703 - DNA, 21 bp, Homo sapiens
taggcaatcaagtctcacaga

SEQ ID NO: 7704 - RNA, 21 nt, RNAi
ggcaaucaagucucacagauu

SEQ ID NO: 7705 - RNA, 21 nt, RNAi
uuccguuaguucagagugucu

SEQ ID NO: 7706 - DNA, 21 bp, Homo sapiens
tattgtggaacactgaaactg

SEQ ID NO: 7707 - RNA, 21 nt, RNAi
uuguggaacacugaaacuguu

SEQ ID NO: 7708 - RNA, 21 nt, RNAi
uuaacaccuugugacuuugac

SEQ ID NO: 7709 - DNA, 21 bp, Homo sapiens
taggacacatttagatgcact

SEQ ID NO: 7710 - RNA, 21 nt, RNAi
ggacacauuuagaugcacuuu

SEQ ID NO: 7711 - RNA, 21 nt, RNAi
uuccuguguaaaucuacguga

SEQ ID NO: 7712 - DNA, 21 bp, Homo sapiens
tagatgcactaccattgctgt

SEQ ID NO: 7713 - RNA, 21 nt, RNAi
gaugcacuaccauugcuguuu

SEQ ID NO: 7714 - RNA, 21 nt, RNAi
uucuacgugaugguaacgaca

SEQ ID NO: 7715 - DNA, 21 bp, Homo sapiens
tatacttactcatggccttgt

SEQ ID NO: 7716 - RNA, 21 nt, RNAi
uacuuacucauggccuuguuu

SEQ ID NO: 7717 - RNA, 21 nt, RNAi
uuaugaaugaguaccggaaca

SEQ ID NO: 7718 - DNA, 21 bp, Homo sapiens
tacttactcatggccttgtct

SEQ ID NO: 7719 - RNA, 21 nt, RNAi
cuuacucauggccuugucuuu

SEQ ID NO: 7720 - RNA, 21 nt, RNAi
uugaaugaguaccggaacaga

SEQ ID NO: 7721 - DNA, 21 bp, Homo sapiens
tactcatggccttgtctaact

SEQ ID NO: 7722 - RNA, 21 nt, RNAi
cucauggccuugucuaacuuu

SEQ ID NO: 7723 - RNA, 21 nt, RNAi
uugaguaccggaacagauuga

SEQ ID NO: 7724 - DNA, 21 bp, Homo sapiens
aagaatctgcctgtaacaata

SEQ ID NO: 7725 - RNA, 21 nt, RNAi
gaaucugccuguaacaauauu

SEQ ID NO: 7726 - RNA, 21 nt, RNAi
uucuuagacggacauuguuau

SEQ ID NO: 7727 - DNA, 21 bp, Homo sapiens
aaggagagtaatatgtcaacg

SEQ ID NO: 7728 - RNA, 21 nt, RNAi
ggagaguaauaugucaacguu

SEQ ID NO: 7729 - RNA, 21 nt, RNAi
uuccucucauuauacaguugc

SEQ ID NO: 7730 - DNA, 21 bp, Homo sapiens
aacgatattatagtgatcctc

SEQ ID NO: 7731 - RNA, 21 nt, RNAi
cgauauuauagugauccucuu

SEQ ID NO: 7732 - RNA, 21 nt, RNAi
uugcuauaauaucacuaggag

SEQ ID NO: 7733 - DNA, 21 bp, Homo sapiens
aaagcagatgcgatatttcag

SEQ ID NO: 7734 - RNA, 21 nt, RNAi
agcagaugcgauauuucaguu

SEQ ID NO: 7735 - RNA, 21 nt, RNAi
uuucgucuacgcuauaaaguc

SEQ ID NO: 7736 - DNA, 21 bp, Homo sapiens
aagcagatgcgatatttcagg

SEQ ID NO: 7737 - RNA, 21 nt, RNAi
gcagaugcgauauuucagguu

SEQ ID NO: 7738 - RNA, 21 nt, RNAi
uucgucuacgcuauaaagucc

SEQ ID NO: 7739 - DNA, 21 bp, Homo sapiens
aacagaaggctgaaccactag

SEQ ID NO: 7740 - RNA, 21 nt, RNAi
cagaaggcugaaccacuaguu

SEQ ID NO: 7741 - RNA, 21 nt, RNAi
uugucuuccgacuuggugauc

SEQ ID NO: 7742 - DNA, 21 bp, Homo sapiens
aattccaagctcgagtgtctc

SEQ ID NO: 7743 - RNA, 21 nt, RNAi
uuccaagcucgagugucucuu

SEQ ID NO: 7744 - RNA, 21 nt, RNAi
uuaagguucgagcucacagag

SEQ ID NO: 7745 - DNA, 21 bp, Homo sapiens
aacgaagcacactagctgaac

SEQ ID NO: 7746 - RNA, 21 nt, RNAi
cgaagcacacuagcugaacuu

SEQ ID NO: 7747 - RNA, 21 nt, RNAi
uugcuucgugugaucgacuug

SEQ ID NO: 7748 - DNA, 21 bp, Homo sapiens
aagcacactagctgaactaaa

SEQ ID NO: 7749 - RNA, 21 nt, RNAi
gcacacuagcugaacuaaauu

SEQ ID NO: 7750 - RNA, 21 nt, RNAi
uucgugugaucgacuugauuu

SEQ ID NO: 7751 - DNA, 21 bp, Homo sapiens
aagagctccaatcatccgtgt

SEQ ID NO: 7752 - RNA, 21 nt, RNAi
gagcuccaaucauccguguuu

SEQ ID NO: 7753 - RNA, 21 nt, RNAi
uucucgagguuaguaggcaca

SEQ ID NO: 7754 - DNA, 21 bp, Homo sapiens
aacagccagttatgacaccat

SEQ ID NO: 7755 - RNA, 21 nt, RNAi
cagccaguuaugacaccauuu

SEQ ID NO: 7756 - RNA, 21 nt, RNAi
uugucggucaauacuguggua

SEQ ID NO: 7757 - DNA, 21 bp, Homo sapiens
aacctagtataaaccacatcc

SEQ ID NO: 7758 - RNA, 21 nt, RNAi
ccuaguauaaaccacauccuu

SEQ ID NO: 7759 - RNA, 21 nt, RNAi
uuggaucauauuugguguagg

SEQ ID NO: 7760 - DNA, 21 bp, Homo sapiens
aaggagaagatttatgcagga

SEQ ID NO: 7761 - RNA, 21 nt, RNAi
ggagaagauuuaugcaggauu

SEQ ID NO: 7762 - RNA, 21 nt, RNAi
uuccucuucuaaauacguccu

SEQ ID NO: 7763 - DNA, 21 bp, Homo sapiens
aatccaaactactcagcaaga

SEQ ID NO: 7764 - RNA, 21 nt, RNAi
uccaaacuacucagcaagauu

SEQ ID NO: 7765 - RNA, 21 nt, RNAi
uuagguuugaugagucguucu

SEQ ID NO: 7766 - DNA, 21 bp, Homo sapiens
aaagaacaggtgatcagcaag

SEQ ID NO: 7767 - RNA, 21 nt, RNAi
agaacaggugaucagcaaguu

SEQ ID NO: 7768 - RNA, 21 nt, RNAi
uuucuuguccacuagucguuc

SEQ ID NO: 7769 - DNA, 21 bp, Homo sapiens
aagaagagacgatgcctacaa

SEQ ID NO: 7770 - RNA, 21 nt, RNAi
gaagagacgaugccuacaauu

SEQ ID NO: 7771 - RNA, 21 nt, RNAi
uucuucucugcuacggauguu

SEQ ID NO: 7772 - DNA, 21 bp, Homo sapiens
aaaggagacaactaaactgca

SEQ ID NO: 7773 - RNA, 21 nt, RNAi
aggagacaacuaaacugcauu

SEQ ID NO: 7774 - RNA, 21 nt, RNAi
uuuccucuguugauuugacgu

SEQ ID NO: 7775 - DNA, 21 bp, Homo sapiens
aaggagacaactaaactgcaa

SEQ ID NO: 7776 - RNA, 21 nt, RNAi
ggagacaacuaaacugcaauu

SEQ ID NO: 7777 - RNA, 21 nt, RNAi
uuccucuguugauuugacguu

SEQ ID NO: 7778 - DNA, 21 bp, Homo sapiens
aaattgcttccgagtctcaga

SEQ ID NO: 7779 - RNA, 21 nt, RNAi
auugcuuccgagucucagauu

SEQ ID NO: 7780 - RNA, 21 nt, RNAi
uuuaacgaaggcucagagucu

SEQ ID NO: 7781 - DNA, 21 bp, Homo sapiens
aattgcttccgagtctcagaa

SEQ ID NO: 7782 - RNA, 21 nt, RNAi
uugcuuccgagucucagaauu

SEQ ID NO: 7783 - RNA, 21 nt, RNAi
uuaacgaaggcucagagucuu

SEQ ID NO: 7784 - DNA, 21 bp, Homo sapiens
aataccaggaatgactctatc

SEQ ID NO: 7785 - RNA, 21 nt, RNAi
uaccaggaaugacucuaucuu

SEQ ID NO: 7786 - RNA, 21 nt, RNAi
uuaugguccuuacugagauag

SEQ ID NO: 7787 - DNA, 21 bp, Homo sapiens
aatgactctatccagttctgt

SEQ ID NO: 7788 - RNA, 21 nt, RNAi
ugacucuauccaguucuguuu

SEQ ID NO: 7789 - RNA, 21 nt, RNAi
uuacugagauaggucaagaca

SEQ ID NO: 7790 - DNA, 21 bp, Homo sapiens
aaacttcacttgcggagaaca

SEQ ID NO: 7791 - RNA, 21 nt, RNAi
acuucacuugcggagaacauu

SEQ ID NO: 7792 - RNA, 21 nt, RNAi
uuugaagugaacgccucuugu

SEQ ID NO: 7793 - DNA, 21 bp, Homo sapiens
aacttcacttgcggagaacat

SEQ ID NO: 7794 - RNA, 21 nt, RNAi
cuucacuugcggagaacauuu

SEQ ID NO: 7795 - RNA, 21 nt, RNAi
uugaagugaacgccucuugua

SEQ ID NO: 7796 - DNA, 21 bp, Homo sapiens
aacaacctcattctaaaggtc

SEQ ID NO: 7797 - RNA, 21 nt, RNAi
caaccucauucuaaaggucuu

SEQ ID NO: 7798 - RNA, 21 nt, RNAi
uuguuggaguaagauuuccag

SEQ ID NO: 7799 - DNA, 21 bp, Homo sapiens
aagatctagatgtaaagacct

SEQ ID NO: 7800 - RNA, 21 nt, RNAi
gaucuagauguaaagaccuuu

SEQ ID NO: 7801 - RNA, 21 nt, RNAi
uucuagaucuacauuucugga

SEQ ID NO: 7802 - DNA, 21 bp, Homo sapiens
aattattgaagacagtcgtga

SEQ ID NO: 7803 - RNA, 21 nt, RNAi
uuauugaagacagucgugauu

SEQ ID NO: 7804 - RNA, 21 nt, RNAi
uuaauaacuucugucagcacu

SEQ ID NO: 7805 - DNA, 21 bp, Homo sapiens
aagacagaccaatgcctaagt

SEQ ID NO: 7806 - RNA, 21 nt, RNAi
gacagaccaaugccuaaguuu

SEQ ID NO: 7807 - RNA, 21 nt, RNAi
uucugucugguuacggauuca

SEQ ID NO: 7808 - DNA, 21 bp, Homo sapiens
aacgagaatacctaatatgtg

SEQ ID NO: 7809 - RNA, 21 nt, RNAi
cgagaauaccuaauauguguu

SEQ ID NO: 7810 - RNA, 21 nt, RNAi
uugcucuuauggauuauacac

SEQ ID NO: 7811 - DNA, 21 bp, Homo sapiens
aatatcaagatggctgtattg

SEQ ID NO: 7812 - RNA, 21 nt, RNAi
uaucaagauggcuguauuguu

SEQ ID NO: 7813 - RNA, 21 nt, RNAi
uuauaguucuaccgacauaac

SEQ ID NO: 7814 - DNA, 21 bp, Homo sapiens
aagcagaaatagtccatggtg

SEQ ID NO: 7815 - RNA, 21 nt, RNAi
gcagaaauaguccaugguguu

SEQ ID NO: 7816 - RNA, 21 nt, RNAi
uucgucuuuaucagguaccac

SEQ ID NO: 7817 - DNA, 21 bp, Homo sapiens
aaggaacacctacaggtcttc

SEQ ID NO: 7818 - RNA, 21 nt, RNAi
ggaacaccuacaggucuucuu

SEQ ID NO: 7819 - RNA, 21 nt, RNAi
uuccuuguggauguccagaag

SEQ ID NO: 7820 - DNA, 21 bp, Homo sapiens
aagatggtgaattgtggaata

SEQ ID NO: 7821 - RNA, 21 nt, RNAi
gauggugaauuguggaauauu

SEQ ID NO: 7822 - RNA, 21 nt, RNAi
uucuaccacuuaacaccuuau

SEQ ID NO: 7823 - DNA, 21 bp, Homo sapiens
caagaatctgcctgtaacaat

SEQ ID NO: 7824 - RNA, 21 nt, RNAi
agaaucugccuguaacaauuu

SEQ ID NO: 7825 - RNA, 21 nt, RNAi
uuucuuagacggacauuguua

SEQ ID NO: 7826 - DNA, 21 bp, Homo sapiens
cagttacttgcacaaccaagg

SEQ ID NO: 7827 - RNA, 21 nt, RNAi
guuacuugcacaaccaagguu

SEQ ID NO: 7828 - RNA, 21 nt, RNAi
uucaaugaacguguugguucc

SEQ ID NO: 7829 - DNA, 21 bp, Homo sapiens
caacagaaggctgaaccacta

SEQ ID NO: 7830 - RNA, 21 nt, RNAi
acagaaggcugaaccacuauu

SEQ ID NO: 7831 - RNA, 21 nt, RNAi
uuugucuuccgacuuggugau

SEQ ID NO: 7832 - DNA, 21 bp, Homo sapiens
cagaaggctgaaccactagaa

SEQ ID NO: 7833 - RNA, 21 nt, RNAi
gaaggcugaaccacuagaauu

SEQ ID NO: 7834 - RNA, 21 nt, RNAi
uucuuccgacuuggugaucuu

SEQ ID NO: 7835 - DNA, 21 bp, Homo sapiens
cagcaccgacaattccaagct

SEQ ID NO: 7836 - RNA, 21 nt, RNAi
gcaccgacaauuccaagcuuu

SEQ ID NO: 7837 - RNA, 21 nt, RNAi
uucguggcuguuaagguucga

SEQ ID NO: 7838 - DNA, 21 bp, Homo sapiens
caattccaagctcgagtgtct

SEQ ID NO: 7839 - RNA, 21 nt, RNAi
auuccaagcucgagugucuuu

SEQ ID NO: 7840 - RNA, 21 nt, RNAi
uuuaagguucgagcucacaga

SEQ ID NO: 7841 - DNA, 21 bp, Homo sapiens
cacaacgaagcacactagctg

SEQ ID NO: 7842 - RNA, 21 nt, RNAi
caacgaagcacacuagcuguu

SEQ ID NO: 7843 - RNA, 21 nt, RNAi
uuguugcuucgugugaucgac

SEQ ID NO: 7844 - DNA, 21 bp, Homo sapiens
caacgaagcacactagctgaa

SEQ ID NO: 7845 - RNA, 21 nt, RNAi
acgaagcacacuagcugaauu

SEQ ID NO: 7846 - RNA, 21 nt, RNAi
uuugcuucgugugaucgacuu

SEQ ID NO: 7847 - DNA, 21 bp, Homo sapiens
caatcatccgtgtaggaggtg

SEQ ID NO: 7848 - RNA, 21 nt, RNAi
aucauccguguaggagguguu

SEQ ID NO: 7849 - RNA, 21 nt, RNAi
uuuaguaggcacauccuccac

SEQ ID NO: 7850 - DNA, 21 bp, Homo sapiens
cagcagagttgtctaagccta

SEQ ID NO: 7851 - RNA, 21 nt, RNAi
gcagaguugucuaagccuauu

SEQ ID NO: 7852 - RNA, 21 nt, RNAi
uucgucucaacagauucggau

SEQ ID NO: 7853 - DNA, 21 bp, Homo sapiens
cagagttgtctaagcctacag

SEQ ID NO: 7854 - RNA, 21 nt, RNAi
gaguugucuaagccuacaguu

SEQ ID NO: 7855 - RNA, 21 nt, RNAi
uucucaacagauucggauguc

SEQ ID NO: 7856 - DNA, 21 bp, Homo sapiens
cagtttcactccatatgtgga

SEQ ID NO: 7857 - RNA, 21 nt, RNAi
guuucacuccauauguggauu

SEQ ID NO: 7858 - RNA, 21 nt, RNAi
uucaaagugagguauacaccu

SEQ ID NO: 7859 - DNA, 21 bp, Homo sapiens
cacaacagccagttatgacac

SEQ ID NO: 7860 - RNA, 21 nt, RNAi
caacagccaguuaugacacuu

SEQ ID NO: 7861 - RNA, 21 nt, RNAi
uuguugucggucaauacugug

SEQ ID NO: 7862 - DNA, 21 bp, Homo sapiens
caacagccagttatgacacca

SEQ ID NO: 7863 - RNA, 21 nt, RNAi
acagccaguuaugacaccauu

SEQ ID NO: 7864 - RNA, 21 nt, RNAi
uuugucggucaauacuguggu

SEQ ID NO: 7865 - DNA, 21 bp, Homo sapiens
caaactactcagcaagaaaga

SEQ ID NO: 7866 - RNA, 21 nt, RNAi
aacuacucagcaagaaagauu

SEQ ID NO: 7867 - RNA, 21 nt, RNAi
uuuugaugagucguucuuucu

SEQ ID NO: 7868 - DNA, 21 bp, Homo sapiens
caagaagagacgatgcctaca

SEQ ID NO: 7869 - RNA, 21 nt, RNAi
agaagagacgaugccuacauu

SEQ ID NO: 7870 - RNA, 21 nt, RNAi
uuucuucucugcuacggaugu

SEQ ID NO: 7871 - DNA, 21 bp, Homo sapiens
caaaggagacaactaaactgc

SEQ ID NO: 7872 - RNA, 21 nt, RNAi
aaggagacaacuaaacugcuu

SEQ ID NO: 7873 - RNA, 21 nt, RNAi
uuuuccucuguugauuugacg

SEQ ID NO: 7874 - DNA, 21 bp, Homo sapiens
caaattgcttccgagtctcag

SEQ ID NO: 7875 - RNA, 21 nt, RNAi
aauugcuuccgagucucaguu

SEQ ID NO: 7876 - RNA, 21 nt, RNAi
uuuuaacgaaggcucagaguc

SEQ ID NO: 7877 - DNA, 21 bp, Homo sapiens
caggaatgactctatccagtt

SEQ ID NO: 7878 - RNA, 21 nt, RNAi
ggaaugacucuauccaguuuu

SEQ ID NO: 7879 - RNA, 21 nt, RNAi
uuccuuacugagauaggucaa

SEQ ID NO: 7880 - DNA, 21 bp, Homo sapiens
cacttgcggagaacatttggc

SEQ ID NO: 7881 - RNA, 21 nt, RNAi
cuugcggagaacauuuggcuu

SEQ ID NO: 7882 - RNA, 21 nt, RNAi
uugaacgccucuuguaaaccg

SEQ ID NO: 7883 - DNA, 21 bp, Homo sapiens
cactatctacagtcagactct

SEQ ID NO: 7884 - RNA, 21 nt, RNAi
cuaucuacagucagacucuuu

SEQ ID NO: 7885 - RNA, 21 nt, RNAi
uugauagaugucagucugaga

SEQ ID NO: 7886 - DNA, 21 bp, Homo sapiens
caattattgaagacagtcgtg

SEQ ID NO: 7887 - RNA, 21 nt, RNAi
auuauugaagacagucguguu

SEQ ID NO: 7888 - RNA, 21 nt, RNAi
uuuaauaacuucugucagcac

SEQ ID NO: 7889 - DNA, 21 bp, Homo sapiens
catggtgttcacagtatcgca

SEQ ID NO: 7890 - RNA, 21 nt, RNAi
ugguguucacaguaucgcauu

SEQ ID NO: 7891 - RNA, 21 nt, RNAi
uuaccacaagugucauagcgu

SEQ ID NO: 7892 - DNA, 21 bp, Homo sapiens
cacagtatcgcagacagctac

SEQ ID NO: 7893 - RNA, 21 nt, RNAi
caguaucgcagacagcuacuu

SEQ ID NO: 7894 - RNA, 21 nt, RNAi
uugucauagcgucugucgaug

SEQ ID NO: 7895 - DNA, 21 bp, Homo sapiens
cagtatcgcagacagctactg

SEQ ID NO: 7896 - RNA, 21 nt, RNAi
guaucgcagacagcuacuguu

SEQ ID NO: 7897 - RNA, 21 nt, RNAi
uucauagcgucugucgaugac

SEQ ID NO: 7898 - DNA, 21 bp, Homo sapiens
cagagttaagtgcctctgcag

SEQ ID NO: 7899 - RNA, 21 nt, RNAi
gaguuaagugccucugcaguu

SEQ ID NO: 7900 - RNA, 21 nt, RNAi
uucucaauucacggagacguc

SEQ ID NO: 7901 - DNA, 21 bp, Homo sapiens
caagatggctgtattgtttgg

SEQ ID NO: 7902 - RNA, 21 nt, RNAi
agauggcuguauuguuugguu

SEQ ID NO: 7903 - RNA, 21 nt, RNAi
uuucuaccgacauaacaaacc

SEQ ID NO: 7904 - DNA, 21 bp, Homo sapiens
cagaaatagtccatggtgact

SEQ ID NO: 7905 - RNA, 21 nt, RNAi
gaaauaguccauggugacuuu

SEQ ID NO: 7906 - RNA, 21 nt, RNAi
uucuuuaucagguaccacuga

SEQ ID NO: 7907 - DNA, 21 bp, Homo sapiens
cagaaacagaatccacgatcc

SEQ ID NO: 7908 - RNA, 21 nt, RNAi
gaaacagaauccacgauccuu

SEQ ID NO: 7909 - RNA, 21 nt, RNAi
uucuuugucuuaggugcuagg

SEQ ID NO: 7910 - DNA, 21 bp, Homo sapiens
caggtagacctgtttggtata

SEQ ID NO: 7911 - RNA, 21 nt, RNAi
gguagaccuguuugguauauu

SEQ ID NO: 7912 - RNA, 21 nt, RNAi
uuccaucuggacaaaccauau

SEQ ID NO: 7913 - DNA, 21 bp, Homo sapiens
caaggaacacctacaggtctt

SEQ ID NO: 7914 - RNA, 21 nt, RNAi
aggaacaccuacaggucuuuu

SEQ ID NO: 7915 - RNA, 21 nt, RNAi
uuuccuuguggauguccagaa

SEQ ID NO: 7916 - DNA, 21 bp, Homo sapiens
gacagagcagaactatcctca

SEQ ID NO: 7917 - RNA, 21 nt, RNAi
cagagcagaacuauccucauu

SEQ ID NO: 7918 - RNA, 21 nt, RNAi
uugucucgucuugauaggagu

SEQ ID NO: 7919 - DNA, 21 bp, Homo sapiens
gaaggagagtaatatgtcaac

SEQ ID NO: 7920 - RNA, 21 nt, RNAi
aggagaguaauaugucaacuu

SEQ ID NO: 7921 - RNA, 21 nt, RNAi
uuuccucucauuauacaguug

SEQ ID NO: 7922 - DNA, 21 bp, Homo sapiens
gatcctcgatttctcaatctc

SEQ ID NO: 7923 - RNA, 21 nt, RNAi
uccucgauuucucaaucucuu

SEQ ID NO: 7924 - RNA, 21 nt, RNAi
uuaggagcuaaagaguuagag

SEQ ID NO: 7925 - DNA, 21 bp, Homo sapiens
gatatgtacagttacttgcac

SEQ ID NO: 7926 - RNA, 21 nt, RNAi
uauguacaguuacuugcacuu

SEQ ID NO: 7927 - RNA, 21 nt, RNAi
uuauacaugucaaugaacgug

SEQ ID NO: 7928 - DNA, 21 bp, Homo sapiens
gaaagcagatgcgatatttca

SEQ ID NO: 7929 - RNA, 21 nt, RNAi
aagcagaugcgauauuucauu

SEQ ID NO: 7930 - RNA, 21 nt, RNAi
uuuucgucuacgcuauaaagu

SEQ ID NO: 7931 - DNA, 21 bp, Homo sapiens
gaagcacactagctgaactaa

SEQ ID NO: 7932 - RNA, 21 nt, RNAi
agcacacuagcugaacuaauu

SEQ ID NO: 7933 - RNA, 21 nt, RNAi
uuucgugugaucgacuugauu

SEQ ID NO: 7934 - DNA, 21 bp, Homo sapiens
gagctccaatcatccgtgtag

SEQ ID NO: 7935 - RNA, 21 nt, RNAi
gcuccaaucauccguguaguu

SEQ ID NO: 7936 - RNA, 21 nt, RNAi
uucgagguuaguaggcacauc

SEQ ID NO: 7937 - DNA, 21 bp, Homo sapiens
gagttgtctaagcctacagtc

SEQ ID NO: 7938 - RNA, 21 nt, RNAi
guugucuaagccuacagucuu

SEQ ID NO: 7939 - RNA, 21 nt, RNAi
uucaacagauucggaugucag

SEQ ID NO: 7940 - DNA, 21 bp, Homo sapiens
gaacctagtataaaccacatc

SEQ ID NO: 7941 - RNA, 21 nt, RNAi
accuaguauaaaccacaucuu

SEQ ID NO: 7942 - RNA, 21 nt, RNAi
uuuggaucauauuugguguag

SEQ ID NO: 7943 - DNA, 21 bp, Homo sapiens
gaagatttatgcaggagtagg

SEQ ID NO: 7944 - RNA, 21 nt, RNAi
agauuuaugcaggaguagguu

SEQ ID NO: 7945 - RNA, 21 nt, RNAi
uuucuaaauacguccucaucc

SEQ ID NO: 7946 - DNA, 21 bp, Homo sapiens
gaaagaacaggtgatcagcaa

SEQ ID NO: 7947 - RNA, 21 nt, RNAi
aagaacaggugaucagcaauu

SEQ ID NO: 7948 - RNA, 21 nt, RNAi
uuuucuuguccacuagucguu

SEQ ID NO: 7949 - DNA, 21 bp, Homo sapiens
gaatgactctatccagttctg

SEQ ID NO: 7950 - RNA, 21 nt, RNAi
augacucuauccaguucuguu

SEQ ID NO: 7951 - RNA, 21 nt, RNAi
uuuacugagauaggucaagac

SEQ ID NO: 7952 - DNA, 21 bp, Homo sapiens
gactctatccagttctgtttg

SEQ ID NO: 7953 - RNA, 21 nt, RNAi
cucuauccaguucuguuuguu

SEQ ID NO: 7954 - RNA, 21 nt, RNAi
uugagauaggucaagacaaac

SEQ ID NO: 7955 - DNA, 21 bp, Homo sapiens
gagaaacttcacttgcggaga

SEQ ID NO: 7956 - RNA, 21 nt, RNAi
gaaacuucacuugcggagauu

SEQ ID NO: 7957 - RNA, 21 nt, RNAi
uucuuugaagugaacgccucu

SEQ ID NO: 7958 - DNA, 21 bp, Homo sapiens
gaaacttcacttgcggagaac

SEQ ID NO: 7959 - RNA, 21 nt, RNAi
aacuucacuugcggagaacuu

SEQ ID NO: 7960 - RNA, 21 nt, RNAi
uuuugaagugaacgccucuug

SEQ ID NO: 7961 - DNA, 21 bp, Homo sapiens
gagagactgttaccggaagaa

SEQ ID NO: 7962 - RNA, 21 nt, RNAi
gagacuguuaccggaagaauu

SEQ ID NO: 7963 - RNA, 21 nt, RNAi
uucucugacaauggccuucuu

SEQ ID NO: 7964 - DNA, 21 bp, Homo sapiens
gagactgttaccggaagaaga

SEQ ID NO: 7965 - RNA, 21 nt, RNAi
gacuguuaccggaagaagauu

SEQ ID NO: 7966 - RNA, 21 nt, RNAi
uucugacaauggccuucuucu

SEQ ID NO: 7967 - DNA, 21 bp, Homo sapiens
gatctagatgtaaagacctct

SEQ ID NO: 7968 - RNA, 21 nt, RNAi
ucuagauguaaagaccucuuu

SEQ ID NO: 7969 - RNA, 21 nt, RNAi
uuagaucuacauuucuggaga

SEQ ID NO: 7970 - DNA, 21 bp, Homo sapiens
gatgtaaagacctctgaggac

SEQ ID NO: 7971 - RNA, 21 nt, RNAi
uguaaagaccucugaggacuu

SEQ ID NO: 7972 - RNA, 21 nt, RNAi
uuacauuucuggagacuccug

SEQ ID NO: 7973 - DNA, 21 bp, Homo sapiens
gaagacagaccaatgcctaag

SEQ ID NO: 7974 - RNA, 21 nt, RNAi
agacagaccaaugccuaaguu

SEQ ID NO: 7975 - RNA, 21 nt, RNAi
uuucugucugguuacggauuc

SEQ ID NO: 7976 - DNA, 21 bp, Homo sapiens
gacagaccaatgcctaagttg

SEQ ID NO: 7977 - RNA, 21 nt, RNAi
cagaccaaugccuaaguuguu

SEQ ID NO: 7978 - RNA, 21 nt, RNAi
uugucugguuacggauucaac

SEQ ID NO: 7979 - DNA, 21 bp, Homo sapiens
gacctgtttggtatagcagat

SEQ ID NO: 7980 - RNA, 21 nt, RNAi
ccuguuugguauagcagauuu

SEQ ID NO: 7981 - RNA, 21 nt, RNAi
uuggacaaaccauaucgucua

SEQ ID NO: 7982 - DNA, 21 bp, Homo sapiens
tagaagcactacaaggagaaa

SEQ ID NO: 7983 - RNA, 21 nt, RNAi
gaagcacuacaaggagaaauu

SEQ ID NO: 7984 - RNA, 21 nt, RNAi
uucuucgugauguuccucuuu

SEQ ID NO: 7985 - DNA, 21 bp, Homo sapiens
tatagtgatcctcgatttctc

SEQ ID NO: 7986 - RNA, 21 nt, RNAi
uagugauccucgauuucucuu

SEQ ID NO: 7987 - RNA, 21 nt, RNAi
uuaucacuaggagcuaaagag

SEQ ID NO: 7988 - DNA, 21 bp, Homo sapiens
tagtgatcctcgatttctcaa

SEQ ID NO: 7989 - RNA, 21 nt, RNAi
gugauccucgauuucucaauu

SEQ ID NO: 7990 - RNA, 21 nt, RNAi
uucacuaggagcuaaagaguu

SEQ ID NO: 7991 - DNA, 21 bp, Homo sapiens
tatgtacagttacttgcacaa

SEQ ID NO: 7992 - RNA, 21 nt, RNAi
uguacaguuacuugcacaauu

SEQ ID NO: 7993 - RNA, 21 nt, RNAi
uuacaugucaaugaacguguu

SEQ ID NO: 7994 - DNA, 21 bp, Homo sapiens
tacagttacttgcacaaccaa

SEQ ID NO: 7995 - RNA, 21 nt, RNAi
caguuacuugcacaaccaauu

SEQ ID NO: 7996 - RNA, 21 nt, RNAi
uugucaaugaacguguugguu

SEQ ID NO: 7997 - DNA, 21 bp, Homo sapiens
taggaaagcagatgcgatatt

SEQ ID NO: 7998 - RNA, 21 nt, RNAi
ggaaagcagaugcgauauuuu

SEQ ID NO: 7999 - RNA, 21 nt, RNAi
uuccuuucgucuacgcuauaa

SEQ ID NO: 8000 - DNA, 21 bp, Homo sapiens
taccacaacgaagcacactag

SEQ ID NO: 8001 - RNA, 21 nt, RNAi
ccacaacgaagcacacuaguu

SEQ ID NO: 8002 - RNA, 21 nt, RNAi
uugguguugcuucgugugauc

SEQ ID NO: 8003 - DNA, 21 bp, Homo sapiens
tacagcagagttgtctaagcc

SEQ ID NO: 8004 - RNA, 21 nt, RNAi
cagcagaguugucuaagccuu

SEQ ID NO: 8005 - RNA, 21 nt, RNAi
uugucgucucaacagauucgg

SEQ ID NO: 8006 - DNA, 21 bp, Homo sapiens
taaggagaagatttatgcagg

SEQ ID NO: 8007 - RNA, 21 nt, RNAi
aggagaagauuuaugcagguu

SEQ ID NO: 8008 - RNA, 21 nt, RNAi
uuuccucuucuaaauacgucc

SEQ ID NO: 8009 - DNA, 21 bp, Homo sapiens
taccaggaatgactctatcca

SEQ ID NO: 8010 - RNA, 21 nt, RNAi
ccaggaaugacucuauccauu

SEQ ID NO: 8011 - RNA, 21 nt, RNAi
uugguccuuacugagauaggu

SEQ ID NO: 8012 - DNA, 21 bp, Homo sapiens
taccggaagaagatctagatg

SEQ ID NO: 8013 - RNA, 21 nt, RNAi
ccggaagaagaucuagauguu

SEQ ID NO: 8014 - RNA, 21 nt, RNAi
uuggccuucuucuagaucuac

SEQ ID NO: 8015 - DNA, 21 bp, Homo sapiens
tagatgtaaagacctctgagg

SEQ ID NO: 8016 - RNA, 21 nt, RNAi
gauguaaagaccucugagguu

SEQ ID NO: 8017 - RNA, 21 nt, RNAi
uucuacauuucuggagacucc

SEQ ID NO: 8018 - DNA, 21 bp, Homo sapiens
tatctacagtcagactctcag

SEQ ID NO: 8019 - RNA, 21 nt, RNAi
ucuacagucagacucucaguu

SEQ ID NO: 8020 - RNA, 21 nt, RNAi
uuagaugucagucugagaguc

SEQ ID NO: 8021 - DNA, 21 bp, Homo sapiens
tatcgcagacagctactgaag

SEQ ID NO: 8022 - RNA, 21 nt, RNAi
ucgcagacagcuacugaaguu

SEQ ID NO: 8023 - RNA, 21 nt, RNAi
uuagcgucugucgaugacuuc

SEQ ID NO: 8024 - DNA, 21 bp, Homo sapiens
tatcaagatggctgtattgtt

SEQ ID NO: 8025 - RNA, 21 nt, RNAi
ucaagauggcuguauuguuuu

SEQ ID NO: 8026 - RNA, 21 nt, RNAi
uuaguucuaccgacauaacaa

SEQ ID NO: 8027 - DNA, 21 bp, Homo sapiens
tagacctgtttggtatagcag

SEQ ID NO: 8028 - RNA, 21 nt, RNAi
gaccuguuugguauagcaguu

SEQ ID NO: 8029 - RNA, 21 nt, RNAi
uucuggacaaaccauaucguc

SEQ ID NO: 8030 - DNA, 21 bp, Homo sapiens
aaagctggctcttggaaattg

SEQ ID NO: 8031 - RNA, 21 nt, RNAi
agcuggcucuuggaaauuguu

SEQ ID NO: 8032 - RNA, 21 nt, RNAi
uuucgaccgagaaccuuuaac

SEQ ID NO: 8033 - DNA, 21 bp, Homo sapiens
aagctggctcttggaaattga

SEQ ID NO: 8034 - RNA, 21 nt, RNAi
gcuggcucuuggaaauugauu

SEQ ID NO: 8035 - RNA, 21 nt, RNAi
uucgaccgagaaccuuuaacu

SEQ ID NO: 8036 - DNA, 21 bp, Homo sapiens
aaattgagcggagagcgacgc

SEQ ID NO: 8037 - RNA, 21 nt, RNAi
auugagcggagagcgacgcuu

SEQ ID NO: 8038 - RNA, 21 nt, RNAi
uuuaacucgccucucgcugcg

SEQ ID NO: 8039 - DNA, 21 bp, Homo sapiens
aattgagcggagagcgacgcg

SEQ ID NO: 8040 - RNA, 21 nt, RNAi
uugagcggagagcgacgcguu

SEQ ID NO: 8041 - RNA, 21 nt, RNAi
uuaacucgccucucgcugcgc

SEQ ID NO: 8042 - DNA, 21 bp, Homo sapiens
aaattggagaaggtacctatg

SEQ ID NO: 8043 - RNA, 21 nt, RNAi
auuggagaagguaccuauguu

SEQ ID NO: 8044 - RNA, 21 nt, RNAi
uuuaaccucuuccauggauac

SEQ ID NO: 8045 - DNA, 21 bp, Homo sapiens
aattggagaaggtacctatgg

SEQ ID NO: 8046 - RNA, 21 nt, RNAi
uuggagaagguaccuaugguu

SEQ ID NO: 8047 - RNA, 21 nt, RNAi
uuaaccucuuccauggauacc

SEQ ID NO: 8048 - DNA, 21 bp, Homo sapiens
aaggtacctatggagttgtgt

SEQ ID NO: 8049 - RNA, 21 nt, RNAi
gguaccuauggaguuguguuu

SEQ ID NO: 8050 - RNA, 21 nt, RNAi
uuccauggauaccucaacaca

SEQ ID NO: 8051 - DNA, 21 bp, Homo sapiens
aaactacaggtcaagtggtag

SEQ ID NO: 8052 - RNA, 21 nt, RNAi
acuacaggucaagugguaguu

SEQ ID NO: 8053 - RNA, 21 nt, RNAi
uuugauguccaguucaccauc

SEQ ID NO: 8054 - DNA, 21 bp, Homo sapiens
aactacaggtcaagtggtagc

SEQ ID NO: 8055 - RNA, 21 nt, RNAi
cuacaggucaagugguagcuu

SEQ ID NO: 8056 - RNA, 21 nt, RNAi
uugauguccaguucaccaucg

SEQ ID NO: 8057 - DNA, 21 bp, Homo sapiens
aaatcagactagaaagtgaag

SEQ ID NO: 8058 - RNA, 21 nt, RNAi
aucagacuagaaagugaaguu

SEQ ID NO: 8059 - RNA, 21 nt, RNAi
uuuagucugaucuuucacuuc

SEQ ID NO: 8060 - DNA, 21 bp, Homo sapiens
aatcagactagaaagtgaaga

SEQ ID NO: 8061 - RNA, 21 nt, RNAi
ucagacuagaaagugaagauu

SEQ ID NO: 8062 - RNA, 21 nt, RNAi
uuagucugaucuuucacuucu

SEQ ID NO: 8063 - DNA, 21 bp, Homo sapiens
aaaggaacttcgtcatccaaa

SEQ ID NO: 8064 - RNA, 21 nt, RNAi
aggaacuucgucauccaaauu

SEQ ID NO: 8065 - RNA, 21 nt, RNAi
uuuccuugaagcaguagguuu

SEQ ID NO: 8066 - DNA, 21 bp, Homo sapiens
aaggaacttcgtcatccaaat

SEQ ID NO: 8067 - RNA, 21 nt, RNAi
ggaacuucgucauccaaauuu

SEQ ID NO: 8068 - RNA, 21 nt, RNAi
uuccuugaagcaguagguuua

SEQ ID NO: 8069 - DNA, 21 bp, Homo sapiens
aacttcgtcatccaaatatag

SEQ ID NO: 8070 - RNA, 21 nt, RNAi
cuucgucauccaaauauaguu

SEQ ID NO: 8071 - RNA, 21 nt, RNAi
uugaagcaguagguuuauauc

SEQ ID NO: 8072 - DNA, 21 bp, Homo sapiens
aaatatagtcagtcttcagga

SEQ ID NO: 8073 - RNA, 21 nt, RNAi
auauagucagucuucaggauu

SEQ ID NO: 8074 - RNA, 21 nt, RNAi
uuuauaucagucagaaguccu

SEQ ID NO: 8075 - DNA, 21 bp, Homo sapiens
aatatagtcagtcttcaggat

SEQ ID NO: 8076 - RNA, 21 nt, RNAi
uauagucagucuucaggauuu

SEQ ID NO: 8077 - RNA, 21 nt, RNAi
uuauaucagucagaaguccua

SEQ ID NO: 8078 - DNA, 21 bp, Homo sapiens
aagagttcttcacagagactt

SEQ ID NO: 8079 - RNA, 21 nt, RNAi
gaguucuucacagagacuuuu

SEQ ID NO: 8080 - RNA, 21 nt, RNAi
uucucaagaagugucucugaa

SEQ ID NO: 8081 - DNA, 21 bp, Homo sapiens
aaaggaacaattaaactggct

SEQ ID NO: 8082 - RNA, 21 nt, RNAi
aggaacaauuaaacuggcuuu

SEQ ID NO: 8083 - RNA, 21 nt, RNAi
uuuccuuguuaauuugaccga

SEQ ID NO: 8084 - DNA, 21 bp, Homo sapiens
aaggaacaattaaactggctg

SEQ ID NO: 8085 - RNA, 21 nt, RNAi
ggaacaauuaaacuggcuguu

SEQ ID NO: 8086 - RNA, 21 nt, RNAi
uuccuuguuaauuugaccgac

SEQ ID NO: 8087 - DNA, 21 bp, Homo sapiens
aacactctggtacagatctcc

SEQ ID NO: 8088 - RNA, 21 nt, RNAi
cacucugguacagaucuccuu

SEQ ID NO: 8089 - RNA, 21 nt, RNAi
uugugagaccaugucuagagg

SEQ ID NO: 8090 - DNA, 21 bp, Homo sapiens
aactccagttgacatttggag

SEQ ID NO: 8091 - RNA, 21 nt, RNAi
cuccaguugacauuuggaguu

SEQ ID NO: 8092 - RNA, 21 nt, RNAi
uugaggucaacuguaaaccuc

SEQ ID NO: 8093 - DNA, 21 bp, Homo sapiens
aactagcaactaagaaaccac

SEQ ID NO: 8094 - RNA, 21 nt, RNAi
cuagcaacuaagaaaccacuu

SEQ ID NO: 8095 - RNA, 21 nt, RNAi
uugaucguugauucuuuggug

SEQ ID NO: 8096 - DNA, 21 bp, Homo sapiens
aaattgatcaactcttcagga

SEQ ID NO: 8097 - RNA, 21 nt, RNAi
auugaucaacucuucaggauu

SEQ ID NO: 8098 - RNA, 21 nt, RNAi
uuuaacuaguugagaaguccu

SEQ ID NO: 8099 - DNA, 21 bp, Homo sapiens
aattgatcaactcttcaggat

SEQ ID NO: 8100 - RNA, 21 nt, RNAi
uugaucaacucuucaggauuu

SEQ ID NO: 8101 - RNA, 21 nt, RNAi
uuaacuaguugagaaguccua

SEQ ID NO: 8102 - DNA, 21 bp, Homo sapiens
aataatgaagtgtggccagaa

SEQ ID NO: 8103 - RNA, 21 nt, RNAi
uaaugaaguguggccagaauu

SEQ ID NO: 8104 - RNA, 21 nt, RNAi
uuauuacuucacaccggucuu

SEQ ID NO: 8105 - DNA, 21 bp, Homo sapiens
aatgaagtgtggccagaagtg

SEQ ID NO: 8106 - RNA, 21 nt, RNAi
ugaaguguggccagaaguguu

SEQ ID NO: 8107 - RNA, 21 nt, RNAi
uuacuucacaccggucuucac

SEQ ID NO: 8108 - DNA, 21 bp, Homo sapiens
aagtgtggccagaagtggaat

SEQ ID NO: 8109 - RNA, 21 nt, RNAi
guguggccagaaguggaauuu

SEQ ID NO: 8110 - RNA, 21 nt, RNAi
uucacaccggucuucaccuua

SEQ ID NO: 8111 - DNA, 21 bp, Homo sapiens
aagtggaatctttacaggact

SEQ ID NO: 8112 - RNA, 21 nt, RNAi
guggaaucuuuacaggacuuu

SEQ ID NO: 8113 - RNA, 21 nt, RNAi
uucaccuuagaaauguccuga

SEQ ID NO: 8114 - DNA, 21 bp, Homo sapiens
aaatggaaaccaggaagccta

SEQ ID NO: 8115 - RNA, 21 nt, RNAi
auggaaaccaggaagccuauu

SEQ ID NO: 8116 - RNA, 21 nt, RNAi
uuuaccuuugguccuucggau

SEQ ID NO: 8117 - DNA, 21 bp, Homo sapiens
aatggaaaccaggaagcctag

SEQ ID NO: 8118 - RNA, 21 nt, RNAi
uggaaaccaggaagccuaguu

SEQ ID NO: 8119 - RNA, 21 nt, RNAi
uuaccuuugguccuucggauc

SEQ ID NO: 8120 - DNA, 21 bp, Homo sapiens
aaaccaggaagcctagcatcc

SEQ ID NO: 8121 - RNA, 21 nt, RNAi
accaggaagccuagcauccuu

SEQ ID NO: 8122 - RNA, 21 nt, RNAi
uuugguccuucggaucguagg

SEQ ID NO: 8123 - DNA, 21 bp, Homo sapiens
aaatggcttggatttgctctc

SEQ ID NO: 8124 - RNA, 21 nt, RNAi
auggcuuggauuugcucucuu

SEQ ID NO: 8125 - RNA, 21 nt, RNAi
uuuaccgaaccuaaacgagag

SEQ ID NO: 8126 - DNA, 21 bp, Homo sapiens
aatggcttggatttgctctcg

SEQ ID NO: 8127 - RNA, 21 nt, RNAi
uggcuuggauuugcucucguu

SEQ ID NO: 8128 - RNA, 21 nt, RNAi
uuaccgaaccuaaacgagagc

SEQ ID NO: 8129 - DNA, 21 bp, Homo sapiens
aatgttaatctatgatccagc

SEQ ID NO: 8130 - RNA, 21 nt, RNAi
uguuaaucuaugauccagcuu

SEQ ID NO: 8131 - RNA, 21 nt, RNAi
uuacaauuagauacuaggucg

SEQ ID NO: 8132 - DNA, 21 bp, Homo sapiens
aatctatgatccagccaaacg

SEQ ID NO: 8133 - RNA, 21 nt, RNAi
ucuaugauccagccaaacguu

SEQ ID NO: 8134 - RNA, 21 nt, RNAi
uuagauacuaggucgguuugc

SEQ ID NO: 8135 - DNA, 21 bp, Homo sapiens
aaatggcactgaatcatccat

SEQ ID NO: 8136 - RNA, 21 nt, RNAi
auggcacugaaucauccauuu

SEQ ID NO: 8137 - RNA, 21 nt, RNAi
uuuaccgugacuuaguaggua

SEQ ID NO: 8138 - DNA, 21 bp, Homo sapiens
aatggcactgaatcatccata

SEQ ID NO: 8139 - RNA, 21 nt, RNAi
uggcacugaaucauccauauu

SEQ ID NO: 8140 - RNA, 21 nt, RNAi
uuaccgugacuuaguagguau

SEQ ID NO: 8141 - DNA, 21 bp, Homo sapiens
aagaagatgtagctttctgac

SEQ ID NO: 8142 - RNA, 21 nt, RNAi
gaagauguagcuuucugacuu

SEQ ID NO: 8143 - RNA, 21 nt, RNAi
uucuucuacaucgaaagacug

SEQ ID NO: 8144 - DNA, 21 bp, Homo sapiens
aagatgtagctttctgacaaa

SEQ ID NO: 8145 - RNA, 21 nt, RNAi
gauguagcuuucugacaaauu

SEQ ID NO: 8146 - RNA, 21 nt, RNAi
uucuacaucgaaagacuguuu

SEQ ID NO: 8147 - DNA, 21 bp, Homo sapiens
aaacttcagctgtacttcgtc

SEQ ID NO: 8148 - RNA, 21 nt, RNAi
acuucagcuguacuucgucuu

SEQ ID NO: 8149 - RNA, 21 nt, RNAi
uuugaagucgacaugaagcag

SEQ ID NO: 8150 - DNA, 21 bp, Homo sapiens
aacttcagctgtacttcgtct

SEQ ID NO: 8151 - RNA, 21 nt, RNAi
cuucagcuguacuucgucuuu

SEQ ID NO: 8152 - RNA, 21 nt, RNAi
uugaagucgacaugaagcaga

SEQ ID NO: 8153 - DNA, 21 bp, Homo sapiens
cacttggcttcaaagctggct

SEQ ID NO: 8154 - RNA, 21 nt, RNAi
cuuggcuucaaagcuggcuuu

SEQ ID NO: 8155 - RNA, 21 nt, RNAi
uugaaccgaaguuucgaccga

SEQ ID NO: 8156 - DNA, 21 bp, Homo sapiens
caaagctggctcttggaaatt

SEQ ID NO: 8157 - RNA, 21 nt, RNAi
aagcuggcucuuggaaauuuu

SEQ ID NO: 8158 - RNA, 21 nt, RNAi
uuuucgaccgagaaccuuuaa

SEQ ID NO: 8159 - DNA, 21 bp, Homo sapiens
cattgactaactatggaagat

SEQ ID NO: 8160 - RNA, 21 nt, RNAi
uugacuaacuauggaagauuu

SEQ ID NO: 8161 - RNA, 21 nt, RNAi
uuaacugauugauaccuucua

SEQ ID NO: 8162 - DNA, 21 bp, Homo sapiens
caggtcaagtggtagccatga

SEQ ID NO: 8163 - RNA, 21 nt, RNAi
ggucaagugguagccaugauu

SEQ ID NO: 8164 - RNA, 21 nt, RNAi
uuccaguucaccaucgguacu

SEQ ID NO: 8165 - DNA, 21 bp, Homo sapiens
cagactagaaagtgaagagga

SEQ ID NO: 8166 - RNA, 21 nt, RNAi
gacuagaaagugaagaggauu

SEQ ID NO: 8167 - RNA, 21 nt, RNAi
uucugaucuuucacuucuccu

SEQ ID NO: 8168 - DNA, 21 bp, Homo sapiens
catccaaatatagtcagtctt

SEQ ID NO: 8169 - RNA, 21 nt, RNAi
uccaaauauagucagucuuuu

SEQ ID NO: 8170 - RNA, 21 nt, RNAi
uuagguuuauaucagucagaa

SEQ ID NO: 8171 - DNA, 21 bp, Homo sapiens
caaatatagtcagtcttcagg

SEQ ID NO: 8172 - RNA, 21 nt, RNAi
aauauagucagucuucagguu

SEQ ID NO: 8173 - RNA, 21 nt, RNAi
uuuuauaucagucagaagucc

SEQ ID NO: 8174 - DNA, 21 bp, Homo sapiens
cagtcttcaggatgtgcttat

SEQ ID NO: 8175 - RNA, 21 nt, RNAi
gucuucaggaugugcuuauuu

SEQ ID NO: 8176 - RNA, 21 nt, RNAi
uucagaaguccuacacgaaua

SEQ ID NO: 8177 - DNA, 21 bp, Homo sapiens
caggatgtgcttatgcaggat

SEQ ID NO: 8178 - RNA, 21 nt, RNAi
ggaugugcuuaugcaggauuu

SEQ ID NO: 8179 - RNA, 21 nt, RNAi
uuccuacacgaauacguccua

SEQ ID NO: 8180 - DNA, 21 bp, Homo sapiens
caggattccaggttatatctc

SEQ ID NO: 8181 - RNA, 21 nt, RNAi
ggauuccagguuauaucucuu

SEQ ID NO: 8182 - RNA, 21 nt, RNAi
uuccuaagguccaauauagag

SEQ ID NO: 8183 - DNA, 21 bp, Homo sapiens
caggttatatctcatctttga

SEQ ID NO: 8184 - RNA, 21 nt, RNAi
gguuauaucucaucuuugauu

SEQ ID NO: 8185 - RNA, 21 nt, RNAi
uuccaauauagaguagaaacu

SEQ ID NO: 8186 - DNA, 21 bp, Homo sapiens
catctttgagtttctttccat

SEQ ID NO: 8187 - RNA, 21 nt, RNAi
ucuuugaguuucuuuccauuu

SEQ ID NO: 8188 - RNA, 21 nt, RNAi
uuagaaacucaaagaaaggua

SEQ ID NO: 8189 - DNA, 21 bp, Homo sapiens
catggatctgaagaaatactt

SEQ ID NO: 8190 - RNA, 21 nt, RNAi
uggaucugaagaaauacuuuu

SEQ ID NO: 8191 - RNA, 21 nt, RNAi
uuaccuagacuucuuuaugaa

SEQ ID NO: 8192 - DNA, 21 bp, Homo sapiens
cagtacatggattcttcactt

SEQ ID NO: 8193 - RNA, 21 nt, RNAi
guacauggauucuucacuuuu

SEQ ID NO: 8194 - RNA, 21 nt, RNAi
uucauguaccuaagaagugaa

SEQ ID NO: 8195 - DNA, 21 bp, Homo sapiens
catggattcttcacttgttaa

SEQ ID NO: 8196 - RNA, 21 nt, RNAi
uggauucuucacuuguuaauu

SEQ ID NO: 8197 - RNA, 21 nt, RNAi
uuaccuaagaagugaacaauu

SEQ ID NO: 8198 - DNA, 21 bp, Homo sapiens
cactctagaagagttcttcac

SEQ ID NO: 8199 - RNA, 21 nt, RNAi
cucuagaagaguucuucacuu

SEQ ID NO: 8200 - RNA, 21 nt, RNAi
uugagaucuucucaagaagug

SEQ ID NO: 8201 - DNA, 21 bp, Homo sapiens
caaaggaacaattaaactggc

SEQ ID NO: 8202 - RNA, 21 nt, RNAi
aaggaacaauuaaacuggcuu

SEQ ID NO: 8203 - RNA, 21 nt, RNAi
uuuuccuuguuaauuugaccg

SEQ ID NO: 8204 - DNA, 21 bp, Homo sapiens
cagagtatatacacatgaggt

SEQ ID NO: 8205 - RNA, 21 nt, RNAi
gaguauauacacaugagguuu

SEQ ID NO: 8206 - RNA, 21 nt, RNAi
uucucauauauguguacucca

SEQ ID NO: 8207 - DNA, 21 bp, Homo sapiens
cacatgaggtagtaacactct

SEQ ID NO: 8208 - RNA, 21 nt, RNAi
caugagguaguaacacucuuu

SEQ ID NO: 8209 - RNA, 21 nt, RNAi
uuguacuccaucauugugaga

SEQ ID NO: 8210 - DNA, 21 bp, Homo sapiens
catgaggtagtaacactctgg

SEQ ID NO: 8211 - RNA, 21 nt, RNAi
ugagguaguaacacucugguu

SEQ ID NO: 8212 - RNA, 21 nt, RNAi
uuacuccaucauugugagacc

SEQ ID NO: 8213 - DNA, 21 bp, Homo sapiens
cactctggtacagatctccag

SEQ ID NO: 8214 - RNA, 21 nt, RNAi
cucugguacagaucuccaguu

SEQ ID NO: 8215 - RNA, 21 nt, RNAi
uugagaccaugucuagagguc

SEQ ID NO: 8216 - DNA, 21 bp, Homo sapiens
cagatctccagaagtattgct

SEQ ID NO: 8217 - RNA, 21 nt, RNAi
gaucuccagaaguauugcuuu

SEQ ID NO: 8218 - RNA, 21 nt, RNAi
uucuagaggucuucauaacga

SEQ ID NO: 8219 - DNA, 21 bp, Homo sapiens
cagctcgttactcaactccag

SEQ ID NO: 8220 - RNA, 21 nt, RNAi
gcucguuacucaacuccaguu

SEQ ID NO: 8221 - RNA, 21 nt, RNAi
uucgagcaaugaguugagguc

SEQ ID NO: 8222 - DNA, 21 bp, Homo sapiens
caactccagttgacatttgga

SEQ ID NO: 8223 - RNA, 21 nt, RNAi
acuccaguugacauuuggauu

SEQ ID NO: 8224 - RNA, 21 nt, RNAi
uuugaggucaacuguaaaccu

SEQ ID NO: 8225 - DNA, 21 bp, Homo sapiens
cagttgacatttggagtatag

SEQ ID NO: 8226 - RNA, 21 nt, RNAi
guugacauuuggaguauaguu

SEQ ID NO: 8227 - RNA, 21 nt, RNAi
uucaacuguaaaccucauauc

SEQ ID NO: 8228 - DNA, 21 bp, Homo sapiens
catttggagtataggcaccat

SEQ ID NO: 8229 - RNA, 21 nt, RNAi
uuuggaguauaggcaccauuu

SEQ ID NO: 8230 - RNA, 21 nt, RNAi
uuaaaccucauauccguggua

SEQ ID NO: 8231 - DNA, 21 bp, Homo sapiens
caccatatttgctgaactagc

SEQ ID NO: 8232 - RNA, 21 nt, RNAi
ccauauuugcugaacuagcuu

SEQ ID NO: 8233 - RNA, 21 nt, RNAi
uugguauaaacgacuugaucg

SEQ ID NO: 8234 - DNA, 21 bp, Homo sapiens
catatttgctgaactagcaac

SEQ ID NO: 8235 - RNA, 21 nt, RNAi
uauuugcugaacuagcaacuu

SEQ ID NO: 8236 - RNA, 21 nt, RNAi
uuauaaacgacuugaucguug

SEQ ID NO: 8237 - DNA, 21 bp, Homo sapiens
cagaaattgatcaactcttca

SEQ ID NO: 8238 - RNA, 21 nt, RNAi
gaaauugaucaacucuucauu

SEQ ID NO: 8239 - RNA, 21 nt, RNAi
uucuuuaacuaguugagaagu

SEQ ID NO: 8240 - DNA, 21 bp, Homo sapiens
caataatgaagtgtggccaga

SEQ ID NO: 8241 - RNA, 21 nt, RNAi
auaaugaaguguggccagauu

SEQ ID NO: 8242 - RNA, 21 nt, RNAi
uuuauuacuucacaccggucu

SEQ ID NO: 8243 - DNA, 21 bp, Homo sapiens
cagaagtggaatctttacagg

SEQ ID NO: 8244 - RNA, 21 nt, RNAi
gaaguggaaucuuuacagguu

SEQ ID NO: 8245 - RNA, 21 nt, RNAi
uucuucaccuuagaaaugucc

SEQ ID NO: 8246 - DNA, 21 bp, Homo sapiens
caaatggaaaccaggaagcct

SEQ ID NO: 8247 - RNA, 21 nt, RNAi
aauggaaaccaggaagccuuu

SEQ ID NO: 8248 - RNA, 21 nt, RNAi
uuuuaccuuugguccuucgga

SEQ ID NO: 8249 - DNA, 21 bp, Homo sapiens
cagccaaacgaatttctggca

SEQ ID NO: 8250 - RNA, 21 nt, RNAi
gccaaacgaauuucuggcauu

SEQ ID NO: 8251 - RNA, 21 nt, RNAi
uucgguuugcuuaaagaccgu

SEQ ID NO: 8252 - DNA, 21 bp, Homo sapiens
cagattaagaagatgtagctt

SEQ ID NO: 8253 - RNA, 21 nt, RNAi
gauuaagaagauguagcuuuu

SEQ ID NO: 8254 - RNA, 21 nt, RNAi
uucuaauucuucuacaucgaa

SEQ ID NO: 8255 - DNA, 21 bp, Homo sapiens
caaacttcagctgtacttcgt

SEQ ID NO: 8256 - RNA, 21 nt, RNAi
aacuucagcuguacuucguuu

SEQ ID NO: 8257 - RNA, 21 nt, RNAi
uuuugaagucgacaugaagca

SEQ ID NO: 8258 - DNA, 21 bp, Homo sapiens
cagctgtacttcgtcttctaa

SEQ ID NO: 8259 - RNA, 21 nt, RNAi
gcuguacuucgucuucuaauu

SEQ ID NO: 8260 - RNA, 21 nt, RNAi
uucgacaugaagcagaagauu

SEQ ID NO: 8261 - DNA, 21 bp, Homo sapiens
gaaattgagcggagagcgacg

SEQ ID NO: 8262 - RNA, 21 nt, RNAi
aauugagcggagagcgacguu

SEQ ID NO: 8263 - RNA, 21 nt, RNAi
uuuuaacucgccucucgcugc

SEQ ID NO: 8264 - DNA, 21 bp, Homo sapiens
gagagcgacgcggttgttgta

SEQ ID NO: 8265 - RNA, 21 nt, RNAi
gagcgacgcgguuguuguauu

SEQ ID NO: 8266 - RNA, 21 nt, RNAi
uucucgcugcgccaacaacau

SEQ ID NO: 8267 - DNA, 21 bp, Homo sapiens
gagcgacgcggttgttgtagc

SEQ ID NO: 8268 - RNA, 21 nt, RNAi
gcgacgcgguuguuguagcuu

SEQ ID NO: 8269 - RNA, 21 nt, RNAi
uucgcugcgccaacaacaucg

SEQ ID NO: 8270 - DNA, 21 bp, Homo sapiens
gacgcggttgttgtagctgcc

SEQ ID NO: 8271 - RNA, 21 nt, RNAi
cgcgguuguuguagcugccuu

SEQ ID NO: 8272 - RNA, 21 nt, RNAi
uugcgccaacaacaucgacgg

SEQ ID NO: 8273 - DNA, 21 bp, Homo sapiens
gagaaggtacctatggagttg

SEQ ID NO: 8274 - RNA, 21 nt, RNAi
gaagguaccuauggaguuguu

SEQ ID NO: 8275 - RNA, 21 nt, RNAi
uucuuccauggauaccucaac

SEQ ID NO: 8276 - DNA, 21 bp, Homo sapiens
gaaggtacctatggagttgtg

SEQ ID NO: 8277 - RNA, 21 nt, RNAi
agguaccuauggaguuguguu

SEQ ID NO: 8278 - RNA, 21 nt, RNAi
uuuccauggauaccucaacac

SEQ ID NO: 8279 - DNA, 21 bp, Homo sapiens
gactagaaagtgaagaggaag

SEQ ID NO: 8280 - RNA, 21 nt, RNAi
cuagaaagugaagaggaaguu

SEQ ID NO: 8281 - RNA, 21 nt, RNAi
uugaucuuucacuucuccuuc

SEQ ID NO: 8282 - DNA, 21 bp, Homo sapiens
gaacttcgtcatccaaatata

SEQ ID NO: 8283 - RNA, 21 nt, RNAi
acuucgucauccaaauauauu

SEQ ID NO: 8284 - RNA, 21 nt, RNAi
uuugaagcaguagguuuauau

SEQ ID NO: 8285 - DNA, 21 bp, Homo sapiens
gatgtgcttatgcaggattcc

SEQ ID NO: 8286 - RNA, 21 nt, RNAi
ugugcuuaugcaggauuccuu

SEQ ID NO: 8287 - RNA, 21 nt, RNAi
uuacacgaauacguccuaagg

SEQ ID NO: 8288 - DNA, 21 bp, Homo sapiens
gattccaggttatatctcatc

SEQ ID NO: 8289 - RNA, 21 nt, RNAi
uuccagguuauaucucaucuu

SEQ ID NO: 8290 - RNA, 21 nt, RNAi
uuaagguccaauauagaguag

SEQ ID NO: 8291 - DNA, 21 bp, Homo sapiens
gagtttctttccatggatctg

SEQ ID NO: 8292 - RNA, 21 nt, RNAi
guuucuuuccauggaucuguu

SEQ ID NO: 8293 - RNA, 21 nt, RNAi
uucaaagaaagguaccuagac

SEQ ID NO: 8294 - DNA, 21 bp, Homo sapiens
gatctgaagaaatacttggat

SEQ ID NO: 8295 - RNA, 21 nt, RNAi
ucugaagaaauacuuggauuu

SEQ ID NO: 8296 - RNA, 21 nt, RNAi
uuagacuucuuuaugaaccua

SEQ ID NO: 8297 - DNA, 21 bp, Homo sapiens
gattcttcacttgttaagagt

SEQ ID NO: 8298 - RNA, 21 nt, RNAi
uucuucacuuguuaagaguuu

SEQ ID NO: 8299 - RNA, 21 nt, RNAi
uuaagaagugaacaauucuca

SEQ ID NO: 8300 - DNA, 21 bp, Homo sapiens
gaagagttcttcacagagact

SEQ ID NO: 8301 - RNA, 21 nt, RNAi
agaguucuucacagagacuuu

SEQ ID NO: 8302 - RNA, 21 nt, RNAi
uuucucaagaagugucucuga

SEQ ID NO: 8303 - DNA, 21 bp, Homo sapiens
gagttcttcacagagacttaa

SEQ ID NO: 8304 - RNA, 21 nt, RNAi
guucuucacagagacuuaauu

SEQ ID NO: 8305 - RNA, 21 nt, RNAi
uucaagaagugucucugaauu

SEQ ID NO: 8306 - DNA, 21 bp, Homo sapiens
gattgatgacaaaggaacaat

SEQ ID NO: 8307 - RNA, 21 nt, RNAi
uugaugacaaaggaacaauuu

SEQ ID NO: 8308 - RNA, 21 nt, RNAi
uuaacuacuguuuccuuguua

SEQ ID NO: 8309 - DNA, 21 bp, Homo sapiens
gacaaaggaacaattaaactg

SEQ ID NO: 8310 - RNA, 21 nt, RNAi
caaaggaacaauuaaacuguu

SEQ ID NO: 8311 - RNA, 21 nt, RNAi
uuguuuccuuguuaauuugac

SEQ ID NO: 8312 - DNA, 21 bp, Homo sapiens
gaacaattaaactggctgatt

SEQ ID NO: 8313 - RNA, 21 nt, RNAi
acaauuaaacuggcugauuuu

SEQ ID NO: 8314 - RNA, 21 nt, RNAi
uuuguuaauuugaccgacuaa

SEQ ID NO: 8315 - DNA, 21 bp, Homo sapiens
gagtatatacacatgaggtag

SEQ ID NO: 8316 - RNA, 21 nt, RNAi
guauauacacaugagguaguu

SEQ ID NO: 8317 - RNA, 21 nt, RNAi
uucauauauguguacuccauc

SEQ ID NO: 8318 - DNA, 21 bp, Homo sapiens
gaggtagtaacactctggtac

SEQ ID NO: 8319 - RNA, 21 nt, RNAi
gguaguaacacucugguacuu

SEQ ID NO: 8320 - RNA, 21 nt, RNAi
uuccaucauugugagaccaug

SEQ ID NO: 8321 - DNA, 21 bp, Homo sapiens
gatctccagaagtattgctgg

SEQ ID NO: 8322 - RNA, 21 nt, RNAi
ucuccagaaguauugcugguu

SEQ ID NO: 8323 - RNA, 21 nt, RNAi
uuagaggucuucauaacgacc

SEQ ID NO: 8324 - DNA, 21 bp, Homo sapiens
gacatttggagtataggcacc

SEQ ID NO: 8325 - RNA, 21 nt, RNAi
cauuuggaguauaggcaccuu

SEQ ID NO: 8326 - RNA, 21 nt, RNAi
uuguaaaccucauauccgugg

SEQ ID NO: 8327 - DNA, 21 bp, Homo sapiens
gagtataggcaccatatttgc

SEQ ID NO: 8328 - RNA, 21 nt, RNAi
guauaggcaccauauuugcuu

SEQ ID NO: 8329 - RNA, 21 nt, RNAi
uucauauccgugguauaaacg

SEQ ID NO: 8330 - DNA, 21 bp, Homo sapiens
gaactagcaactaagaaacca

SEQ ID NO: 8331 - RNA, 21 nt, RNAi
acuagcaacuaagaaaccauu

SEQ ID NO: 8332 - RNA, 21 nt, RNAi
uuugaucguugauucuuuggu

SEQ ID NO: 8333 - DNA, 21 bp, Homo sapiens
gattcagaaattgatcaactc

SEQ ID NO: 8334 - RNA, 21 nt, RNAi
uucagaaauugaucaacucuu

SEQ ID NO: 8335 - RNA, 21 nt, RNAi
uuaagucuuuaacuaguugag

SEQ ID NO: 8336 - DNA, 21 bp, Homo sapiens
gaaattgatcaactcttcagg

SEQ ID NO: 8337 - RNA, 21 nt, RNAi
aauugaucaacucuucagguu

SEQ ID NO: 8338 - RNA, 21 nt, RNAi
uuuuaacuaguugagaagucc

SEQ ID NO: 8339 - DNA, 21 bp, Homo sapiens
gaagtgtggccagaagtggaa

SEQ ID NO: 8340 - RNA, 21 nt, RNAi
aguguggccagaaguggaauu

SEQ ID NO: 8341 - RNA, 21 nt, RNAi
uuucacaccggucuucaccuu

SEQ ID NO: 8342 - DNA, 21 bp, Homo sapiens
gaagtggaatctttacaggac

SEQ ID NO: 8343 - RNA, 21 nt, RNAi
aguggaaucuuuacaggacuu

SEQ ID NO: 8344 - RNA, 21 nt, RNAi
uuucaccuuagaaauguccug

SEQ ID NO: 8345 - DNA, 21 bp, Homo sapiens
gaatctttacaggactataag

SEQ ID NO: 8346 - RNA, 21 nt, RNAi
aucuuuacaggacuauaaguu

SEQ ID NO: 8347 - RNA, 21 nt, RNAi
uuuagaaauguccugauauuc

SEQ ID NO: 8348 - DNA, 21 bp, Homo sapiens
gaaaccaggaagcctagcatc

SEQ ID NO: 8349 - RNA, 21 nt, RNAi
aaccaggaagccuagcaucuu

SEQ ID NO: 8350 - RNA, 21 nt, RNAi
uuuugguccuucggaucguag

SEQ ID NO: 8351 - DNA, 21 bp, Homo sapiens
gatccagccaaacgaatttct

SEQ ID NO: 8352 - RNA, 21 nt, RNAi
uccagccaaacgaauuucuuu

SEQ ID NO: 8353 - RNA, 21 nt, RNAi
uuaggucgguuugcuuaaaga

SEQ ID NO: 8354 - DNA, 21 bp, Homo sapiens
gatttggacaatcagattaag

SEQ ID NO: 8355 - RNA, 21 nt, RNAi
uuuggacaaucagauuaaguu

SEQ ID NO: 8356 - RNA, 21 nt, RNAi
uuaaaccuguuagucuaauuc

SEQ ID NO: 8357 - DNA, 21 bp, Homo sapiens
gacaatcagattaagaagatg

SEQ ID NO: 8358 - RNA, 21 nt, RNAi
caaucagauuaagaagauguu

SEQ ID NO: 8359 - RNA, 21 nt, RNAi
uuguuagucuaauucuucuac

SEQ ID NO: 8360 - DNA, 21 bp, Homo sapiens
gattaagaagatgtagctttc

SEQ ID NO: 8361 - RNA, 21 nt, RNAi
uuaagaagauguagcuuucuu

SEQ ID NO: 8362 - RNA, 21 nt, RNAi
uuaauucuucuacaucgaaag

SEQ ID NO: 8363 - DNA, 21 bp, Homo sapiens
gaagatgtagctttctgacaa

SEQ ID NO: 8364 - RNA, 21 nt, RNAi
agauguagcuuucugacaauu

SEQ ID NO: 8365 - RNA, 21 nt, RNAi
uuucuacaucgaaagacuguu

SEQ ID NO: 8366 - DNA, 21 bp, Homo sapiens
tacctatggagttgtgtataa

SEQ ID NO: 8367 - RNA, 21 nt, RNAi
ccuauggaguuguguauaauu

SEQ ID NO: 8368 - RNA, 21 nt, RNAi
uuggauaccucaacacauauu

SEQ ID NO: 8369 - DNA, 21 bp, Homo sapiens
tacaggtcaagtggtagccat

SEQ ID NO: 8370 - RNA, 21 nt, RNAi
caggucaagugguagccauuu

SEQ ID NO: 8371 - RNA, 21 nt, RNAi
uuguccaguucaccaucggua

SEQ ID NO: 8372 - DNA, 21 bp, Homo sapiens
tattaaaggaacttcgtcatc

SEQ ID NO: 8373 - RNA, 21 nt, RNAi
uuaaaggaacuucgucaucuu

SEQ ID NO: 8374 - RNA, 21 nt, RNAi
uuaauuuccuugaagcaguag

SEQ ID NO: 8375 - DNA, 21 bp, Homo sapiens
taaaggaacttcgtcatccaa

SEQ ID NO: 8376 - RNA, 21 nt, RNAi
aaggaacuucgucauccaauu

SEQ ID NO: 8377 - RNA, 21 nt, RNAi
uuuuccuugaagcaguagguu

SEQ ID NO: 8378 - DNA, 21 bp, Homo sapiens
tatagtcagtcttcaggatgt

SEQ ID NO: 8379 - RNA, 21 nt, RNAi
uagucagucuucaggauguuu

SEQ ID NO: 8380 - RNA, 21 nt, RNAi
uuaucagucagaaguccuaca

SEQ ID NO: 8381 - DNA, 21 bp, Homo sapiens
tagtcagtcttcaggatgtgc

SEQ ID NO: 8382 - RNA, 21 nt, RNAi
gucagucuucaggaugugcuu

SEQ ID NO: 8383 - RNA, 21 nt, RNAi
uucagucagaaguccuacacg

SEQ ID NO: 8384 - DNA, 21 bp, Homo sapiens
tatgcaggattccaggttata

SEQ ID NO: 8385 - RNA, 21 nt, RNAi
ugcaggauuccagguuauauu

SEQ ID NO: 8386 - RNA, 21 nt, RNAi
uuacguccuaagguccaauau

SEQ ID NO: 8387 - DNA, 21 bp, Homo sapiens
tacatggattcttcacttgtt

SEQ ID NO: 8388 - RNA, 21 nt, RNAi
cauggauucuucacuuguuuu

SEQ ID NO: 8389 - RNA, 21 nt, RNAi
uuguaccuaagaagugaacaa

SEQ ID NO: 8390 - DNA, 21 bp, Homo sapiens
tagaagagttcttcacagaga

SEQ ID NO: 8391 - RNA, 21 nt, RNAi
gaagaguucuucacagagauu

SEQ ID NO: 8392 - RNA, 21 nt, RNAi
uucuucucaagaagugucucu

SEQ ID NO: 8393 - DNA, 21 bp, Homo sapiens
tacctatcagagtatatacac

SEQ ID NO: 8394 - RNA, 21 nt, RNAi
ccuaucagaguauauacacuu

SEQ ID NO: 8395 - RNA, 21 nt, RNAi
uuggauagucucauauaugug

SEQ ID NO: 8396 - DNA, 21 bp, Homo sapiens
tatacacatgaggtagtaaca

SEQ ID NO: 8397 - RNA, 21 nt, RNAi
uacacaugagguaguaacauu

SEQ ID NO: 8398 - RNA, 21 nt, RNAi
uuauguguacuccaucauugu

SEQ ID NO: 8399 - DNA, 21 bp, Homo sapiens
tacacatgaggtagtaacact

SEQ ID NO: 8400 - RNA, 21 nt, RNAi
cacaugagguaguaacacuuu

SEQ ID NO: 8401 - RNA, 21 nt, RNAi
uuguguacuccaucauuguga

SEQ ID NO: 8402 - DNA, 21 bp, Homo sapiens
tagtaacactctggtacagat

SEQ ID NO: 8403 - RNA, 21 nt, RNAi
guaacacucugguacagauuu

SEQ ID NO: 8404 - RNA, 21 nt, RNAi
uucauugugagaccaugucua

SEQ ID NO: 8405 - DNA, 21 bp, Homo sapiens
taacactctggtacagatctc

SEQ ID NO: 8406 - RNA, 21 nt, RNAi
acacucugguacagaucucuu

SEQ ID NO: 8407 - RNA, 21 nt, RNAi
uuugugagaccaugucuagag

SEQ ID NO: 8408 - DNA, 21 bp, Homo sapiens
tacagatctccagaagtattg

SEQ ID NO: 8409 - RNA, 21 nt, RNAi
cagaucuccagaaguauuguu

SEQ ID NO: 8410 - RNA, 21 nt, RNAi
uugucuagaggucuucauaac

SEQ ID NO: 8411 - DNA, 21 bp, Homo sapiens
tactcaactccagttgacatt

SEQ ID NO: 8412 - RNA, 21 nt, RNAi
cucaacuccaguugacauuuu

SEQ ID NO: 8413 - RNA, 21 nt, RNAi
uugaguugaggucaacuguaa

SEQ ID NO: 8414 - DNA, 21 bp, Homo sapiens
tataggcaccatatttgctga

SEQ ID NO: 8415 - RNA, 21 nt, RNAi
uaggcaccauauuugcugauu

SEQ ID NO: 8416 - RNA, 21 nt, RNAi
uuauccgugguauaaacgacu

SEQ ID NO: 8417 - DNA, 21 bp, Homo sapiens
taggcaccatatttgctgaac

SEQ ID NO: 8418 - RNA, 21 nt, RNAi
ggcaccauauuugcugaacuu

SEQ ID NO: 8419 - RNA, 21 nt, RNAi
uuccgugguauaaacgacuug

SEQ ID NO: 8420 - DNA, 21 bp, Homo sapiens
tatttgctgaactagcaacta

SEQ ID NO: 8421 - RNA, 21 nt, RNAi
uuugcugaacuagcaacuauu

SEQ ID NO: 8422 - RNA, 21 nt, RNAi
uuaaacgacuugaucguugau

SEQ ID NO: 8423 - DNA, 21 bp, Homo sapiens
tagcaactaagaaaccacttt

SEQ ID NO: 8424 - RNA, 21 nt, RNAi
gcaacuaagaaaccacuuuuu

SEQ ID NO: 8425 - RNA, 21 nt, RNAi
uucguugauucuuuggugaaa

SEQ ID NO: 8426 - DNA, 21 bp, Homo sapiens
taatgaagtgtggccagaagt

SEQ ID NO: 8427 - RNA, 21 nt, RNAi
augaaguguggccagaaguuu

SEQ ID NO: 8428 - RNA, 21 nt, RNAi
uuuacuucacaccggucuuca

SEQ ID NO: 8429 - DNA, 21 bp, Homo sapiens
taatctatgatccagccaaac

SEQ ID NO: 8430 - RNA, 21 nt, RNAi
aucuaugauccagccaaacuu

SEQ ID NO: 8431 - RNA, 21 nt, RNAi
uuuagauacuaggucgguuug

SEQ ID NO: 8432 - DNA, 21 bp, Homo sapiens
tatgatccagccaaacgaatt

SEQ ID NO: 8433 - RNA, 21 nt, RNAi
ugauccagccaaacgaauuuu

SEQ ID NO: 8434 - RNA, 21 nt, RNAi
uuacuaggucgguuugcuuaa

SEQ ID NO: 8435 - DNA, 21 bp, Homo sapiens
taagaagatgtagctttctga

SEQ ID NO: 8436 - RNA, 21 nt, RNAi
agaagauguagcuuucugauu

SEQ ID NO: 8437 - RNA, 21 nt, RNAi
uuucuucuacaucgaaagacu

SEQ ID NO: 8438 - DNA, 21 bp, Homo sapiens
tatgtcaacagatagttgtgt

SEQ ID NO: 8439 - RNA, 21 nt, RNAi
ugucaacagauaguuguguuu

SEQ ID NO: 8440 - RNA, 21 nt, RNAi
uuacaguugucuaucaacaca

SEQ ID NO: 8441 - DNA, 21 bp, Homo sapiens
tatcaaacttcagctgtactt

SEQ ID NO: 8442 - RNA, 21 nt, RNAi
ucaaacuucagcuguacuuuu

SEQ ID NO: 8443 - RNA, 21 nt, RNAi
uuaguuugaagucgacaugaa

SEQ ID NO: 8444 - DNA, 21 bp, Homo sapiens
aaaggaacttcgtcatccaaa

SEQ ID NO: 8445 - RNA, 21 nt, RNAi
aggaacuucgucauccaaauu

SEQ ID NO: 8446 - RNA, 21 nt, RNAi
uuuccuugaagcaguagguuu

SEQ ID NO: 8447 - DNA, 21 bp, Homo sapiens
aaggaacttcgtcatccaaat

SEQ ID NO: 8448 - RNA, 21 nt, RNAi
ggaacuucgucauccaaauuu

SEQ ID NO: 8449 - RNA, 21 nt, RNAi
uuccuugaagcaguagguuua

SEQ ID NO: 8450 - DNA, 21 bp, Homo sapiens
aacttcgtcatccaaatatag

SEQ ID NO: 8451 - RNA, 21 nt, RNAi
cuucgucauccaaauauaguu

SEQ ID NO: 8452 - RNA, 21 nt, RNAi
uugaagcaguagguuuauauc

SEQ ID NO: 8453 - DNA, 21 bp, Homo sapiens
aacactctggtacagatctcc

SEQ ID NO: 8454 - RNA, 21 nt, RNAi
cacucugguacagaucuccuu

SEQ ID NO: 8455 - RNA, 21 nt, RNAi
uugugagaccaugucuagagg

SEQ ID NO: 8456 - DNA, 21 bp, Homo sapiens
aactagcaactaagaaaccac

SEQ ID NO: 8457 - RNA, 21 nt, RNAi
cuagcaacuaagaaaccacuu

SEQ ID NO: 8458 - RNA, 21 nt, RNAi
uugaucguugauucuuuggug

SEQ ID NO: 8459 - DNA, 21 bp, Homo sapiens
aatgttaatctatgatccagc

SEQ ID NO: 8460 - RNA, 21 nt, RNAi
uguuaaucuaugauccagcuu

SEQ ID NO: 8461 - RNA, 21 nt, RNAi
uuacaauuagauacuaggucg

SEQ ID NO: 8462 - DNA, 21 bp, Homo sapiens
cagagtatatacacatgaggt

SEQ ID NO: 8463 - RNA, 21 nt, RNAi
gaguauauacacaugagguuu

SEQ ID NO: 8464 - RNA, 21 nt, RNAi
uucucauauauguguacucca

SEQ ID NO: 8465 - DNA, 21 bp, Homo sapiens
cagttgacatttggagtatag

SEQ ID NO: 8466 - RNA, 21 nt, RNAi
guugacauuuggaguauaguu

SEQ ID NO: 8467 - RNA, 21 nt, RNAi
uucaacuguaaaccucauauc

SEQ ID NO: 8468 - DNA, 21 bp, Homo sapiens
catttggagtataggcaccat

SEQ ID NO: 8469 - RNA, 21 nt, RNAi
uuuggaguauaggcaccauuu

SEQ ID NO: 8470 - RNA, 21 nt, RNAi
uuaaaccucauauccguggua

SEQ ID NO: 8471 - DNA, 21 bp, Homo sapiens
gatgtgcttatgcaggattcc

SEQ ID NO: 8472 - RNA, 21 nt, RNAi
ugugcuuaugcaggauuccuu

SEQ ID NO: 8473 - RNA, 21 nt, RNAi
uuacacgaauacguccuaagg

SEQ ID NO: 8474 - DNA, 21 bp, Homo sapiens
gagtatatacacatgaggtag

SEQ ID NO: 8475 - RNA, 21 nt, RNAi
guauauacacaugagguaguu

SEQ ID NO: 8476 - RNA, 21 nt, RNAi
uucauauauguguacuccauc

SEQ ID NO: 8477 - DNA, 21 bp, Homo sapiens
gaggtagtaacactctggtac

SEQ ID NO: 8478 - RNA, 21 nt, RNAi
gguaguaacacucugguacuu

SEQ ID NO: 8479 - RNA, 21 nt, RNAi
uuccaucauugugagaccaug

SEQ ID NO: 8480 - DNA, 21 bp, Homo sapiens
gacatttggagtataggcacc

SEQ ID NO: 8481 - RNA, 21 nt, RNAi
cauuuggaguauaggcaccuu

SEQ ID NO: 8482 - RNA, 21 nt, RNAi
uuguaaaccucauauccgugg

SEQ ID NO: 8483 - DNA, 21 bp, Homo sapiens
gaactagcaactaagaaacca

SEQ ID NO: 8484 - RNA, 21 nt, RNAi
acuagcaacuaagaaaccauu

SEQ ID NO: 8485 - RNA, 21 nt, RNAi
uuugaucguugauucuuuggu

SEQ ID NO: 8486 - DNA, 21 bp, Homo sapiens
tatacacatgaggtagtaaca

SEQ ID NO: 8487 - RNA, 21 nt, RNAi
uacacaugagguaguaacauu

SEQ ID NO: 8488 - RNA, 21 nt, RNAi
uuauguguacuccaucauugu

SEQ ID NO: 8489 - DNA, 21 bp, Homo sapiens
tacacatgaggtagtaacact

SEQ ID NO: 8490 - RNA, 21 nt, RNAi
cacaugagguaguaacacuuu

SEQ ID NO: 8491 - RNA, 21 nt, RNAi
uuguguacuccaucauuguga

SEQ ID NO: 8492 - DNA, 21 bp, Homo sapiens
tagtaacactctggtacagat

SEQ ID NO: 8493 - RNA, 21 nt, RNAi
guaacacucugguacagauuu

SEQ ID NO: 8494 - RNA, 21 nt, RNAi
uucauugugagaccaugucua

SEQ ID NO: 8495 - DNA, 21 bp, Homo sapiens
taacactctggtacagatctc

SEQ ID NO: 8496 - RNA, 21 nt, RNAi
acacucugguacagaucucuu

SEQ ID NO: 8497 - RNA, 21 nt, RNAi
uuugugagaccaugucuagag

SEQ ID NO: 8498 - DNA, 21 bp, Homo sapiens
taggcaccatatttgctgaac

SEQ ID NO: 8499 - RNA, 21 nt, RNAi
ggcaccauauuugcugaacuu

SEQ ID NO: 8500 - RNA, 21 nt, RNAi
uuccgugguauaaacgacuug

SEQ ID NO: 8501 - DNA, 21 bp, Homo sapiens
aaaggactcttggaaagtgaa

SEQ ID NO: 8502 - RNA, 21 nt, RNAi
aggacucuuggaaagugaauu

SEQ ID NO: 8503 - RNA, 21 nt, RNAi
uuuccugagaaccuuucacuu

SEQ ID NO: 8504 - DNA, 21 bp, Homo sapiens
aaggactcttggaaagtgaaa

SEQ ID NO: 8505 - RNA, 21 nt, RNAi
ggacucuuggaaagugaaauu

SEQ ID NO: 8506 - RNA, 21 nt, RNAi
uuccugagaaccuuucacuuu

SEQ ID NO: 8507 - DNA, 21 bp, Homo sapiens
aaagaaacgaaggaaggaaca

SEQ ID NO: 8508 - RNA, 21 nt, RNAi
agaaacgaaggaaggaacauu

SEQ ID NO: 8509 - RNA, 21 nt, RNAi
uuucuuugcuuccuuccuugu

SEQ ID NO: 8510 - DNA, 21 bp, Homo sapiens
aagaaacgaaggaaggaacaa

SEQ ID NO: 8511 - RNA, 21 nt, RNAi
gaaacgaaggaaggaacaauu

SEQ ID NO: 8512 - RNA, 21 nt, RNAi
uucuuugcuuccuuccuuguu

SEQ ID NO: 8513 - DNA, 21 bp, Homo sapiens
aaacgaaggaaggaacaagag

SEQ ID NO: 8514 - RNA, 21 nt, RNAi
acgaaggaaggaacaagaguu

SEQ ID NO: 8515 - RNA, 21 nt, RNAi
uuugcuuccuuccuuguucuc

SEQ ID NO: 8516 - DNA, 21 bp, Homo sapiens
aacgaaggaaggaacaagagg

SEQ ID NO: 8517 - RNA, 21 nt, RNAi
cgaaggaaggaacaagagguu

SEQ ID NO: 8518 - RNA, 21 nt, RNAi
uugcuuccuuccuuguucucc

SEQ ID NO: 8519 - DNA, 21 bp, Homo sapiens
aaggaaggaacaagaggagaa

SEQ ID NO: 8520 - RNA, 21 nt, RNAi
ggaaggaacaagaggagaauu

SEQ ID NO: 8521 - RNA, 21 nt, RNAi
uuccuuccuuguucuccucuu

SEQ ID NO: 8522 - DNA, 21 bp, Homo sapiens
aaggaacaagaggagaaagca

SEQ ID NO: 8523 - RNA, 21 nt, RNAi
ggaacaagaggagaaagcauu

SEQ ID NO: 8524 - RNA, 21 nt, RNAi
uuccuuguucuccucuuucgu

SEQ ID NO: 8525 - DNA, 21 bp, Homo sapiens
aacaagaggagaaagcagaga

SEQ ID NO: 8526 - RNA, 21 nt, RNAi
caagaggagaaagcagagauu

SEQ ID NO: 8527 - RNA, 21 nt, RNAi
uuguucuccucuuucgucucu

SEQ ID NO: 8528 - DNA, 21 bp, Homo sapiens
aagaggagaaagcagagataa

SEQ ID NO: 8529 - RNA, 21 nt, RNAi
gaggagaaagcagagauaauu

SEQ ID NO: 8530 - RNA, 21 nt, RNAi
uucuccucuuucgucucuauu

SEQ ID NO: 8531 - DNA, 21 bp, Homo sapiens
aagagaagactctatggaaga

SEQ ID NO: 8532 - RNA, 21 nt, RNAi
gagaagacucuauggaagauu

SEQ ID NO: 8533 - RNA, 21 nt, RNAi
uucucuucugagauaccuucu

SEQ ID NO: 8534 - DNA, 21 bp, Homo sapiens
aagactctatggaagacagag

SEQ ID NO: 8535 - RNA, 21 nt, RNAi
gacucuauggaagacagaguu

SEQ ID NO: 8536 - RNA, 21 nt, RNAi
uucugagauaccuucugucuc

SEQ ID NO: 8537 - DNA, 21 bp, Homo sapiens
aagacagaggagaagaagatg

SEQ ID NO: 8538 - RNA, 21 nt, RNAi
gacagaggagaagaagauguu

SEQ ID NO: 8539 - RNA, 21 nt, RNAi
uucugucuccucuucuucuac

SEQ ID NO: 8540 - DNA, 21 bp, Homo sapiens
aagaagatgattctttggcca

SEQ ID NO: 8541 - RNA, 21 nt, RNAi
gaagaugauucuuuggccauu

SEQ ID NO: 8542 - RNA, 21 nt, RNAi
uucuucuacuaagaaaccggu

SEQ ID NO: 8543 - DNA, 21 bp, Homo sapiens
aagatgattctttggccatca

SEQ ID NO: 8544 - RNA, 21 nt, RNAi
gaugauucuuuggccaucauu

SEQ ID NO: 8545 - RNA, 21 nt, RNAi
uucuacuaagaaaccgguagu

SEQ ID NO: 8546 - DNA, 21 bp, Homo sapiens
aaagagaaacgtaggcatcgt

SEQ ID NO: 8547 - RNA, 21 nt, RNAi
agagaaacguaggcaucguuu

SEQ ID NO: 8548 - RNA, 21 nt, RNAi
uuucucuuugcauccguagca

SEQ ID NO: 8549 - DNA, 21 bp, Homo sapiens
aagagaaacgtaggcatcgta

SEQ ID NO: 8550 - RNA, 21 nt, RNAi
gagaaacguaggcaucguauu

SEQ ID NO: 8551 - RNA, 21 nt, RNAi
uucucuuugcauccguagcau

SEQ ID NO: 8552 - DNA, 21 bp, Homo sapiens
aaacgtaggcatcgtagccat

SEQ ID NO: 8553 - RNA, 21 nt, RNAi
acguaggcaucguagccauuu

SEQ ID NO: 8554 - RNA, 21 nt, RNAi
uuugcauccguagcaucggua

SEQ ID NO: 8555 - DNA, 21 bp, Homo sapiens
aacgtaggcatcgtagccatt

SEQ ID NO: 8556 - RNA, 21 nt, RNAi
cguaggcaucguagccauuuu

SEQ ID NO: 8557 - RNA, 21 nt, RNAi
uugcauccguagcaucgguaa

SEQ ID NO: 8558 - DNA, 21 bp, Homo sapiens
aagcatgctagagtgaaagaa

SEQ ID NO: 8559 - RNA, 21 nt, RNAi
gcaugcuagagugaaagaauu

SEQ ID NO: 8560 - RNA, 21 nt, RNAi
uucguacgaucucacuuucuu

SEQ ID NO: 8561 - DNA, 21 bp, Homo sapiens
aaagaaagagagcacgaacgt

SEQ ID NO: 8562 - RNA, 21 nt, RNAi
agaaagagagcacgaacguuu

SEQ ID NO: 8563 - RNA, 21 nt, RNAi
uuucuuucucucgugcuugca

SEQ ID NO: 8564 - DNA, 21 bp, Homo sapiens
aagaaagagagcacgaacgtc

SEQ ID NO: 8565 - RNA, 21 nt, RNAi
gaaagagagcacgaacgucuu

SEQ ID NO: 8566 - RNA, 21 nt, RNAi
uucuuucucucgugcuugcag

SEQ ID NO: 8567 - DNA, 21 bp, Homo sapiens
aaagagagcacgaacgtcgga

SEQ ID NO: 8568 - RNA, 21 nt, RNAi
agagagcacgaacgucggauu

SEQ ID NO: 8569 - RNA, 21 nt, RNAi
uuucucucgugcuugcagccu

SEQ ID NO: 8570 - DNA, 21 bp, Homo sapiens
aagagagcacgaacgtcggaa

SEQ ID NO: 8571 - RNA, 21 nt, RNAi
gagagcacgaacgucggaauu

SEQ ID NO: 8572 - RNA, 21 nt, RNAi
uucucucgugcuugcagccuu

SEQ ID NO: 8573 - DNA, 21 bp, Homo sapiens
aacgtcggaaacgacatcgag

SEQ ID NO: 8574 - RNA, 21 nt, RNAi
cgucggaaacgacaucgaguu

SEQ ID NO: 8575 - RNA, 21 nt, RNAi
uugcagccuuugcuguagcuc

SEQ ID NO: 8576 - DNA, 21 bp, Homo sapiens
aaacgacatcgagaagaacag

SEQ ID NO: 8577 - RNA, 21 nt, RNAi
acgacaucgagaagaacaguu

SEQ ID NO: 8578 - RNA, 21 nt, RNAi
uuugcuguagcucuucuuguc

SEQ ID NO: 8579 - DNA, 21 bp, Homo sapiens
aacgacatcgagaagaacagg

SEQ ID NO: 8580 - RNA, 21 nt, RNAi
cgacaucgagaagaacagguu

SEQ ID NO: 8581 - RNA, 21 nt, RNAi
uugcuguagcucuucuugucc

SEQ ID NO: 8582 - DNA, 21 bp, Homo sapiens
aagaacaggataaagctcgcc

SEQ ID NO: 8583 - RNA, 21 nt, RNAi
gaacaggauaaagcucgccuu

SEQ ID NO: 8584 - RNA, 21 nt, RNAi
uucuuguccuauuucgagcgg

SEQ ID NO: 8585 - DNA, 21 bp, Homo sapiens
aagtgtctgcacatcaccgaa

SEQ ID NO: 8586 - RNA, 21 nt, RNAi
gugucugcacaucaccgaauu

SEQ ID NO: 8587 - RNA, 21 nt, RNAi
uucacagacguguaguggcuu

SEQ ID NO: 8588 - DNA, 21 bp, Homo sapiens
aacgatgagagaggactacag

SEQ ID NO: 8589 - RNA, 21 nt, RNAi
cgaugagagaggacuacaguu

SEQ ID NO: 8590 - RNA, 21 nt, RNAi
uugcuacucucuccugauguc

SEQ ID NO: 8591 - DNA, 21 bp, Homo sapiens
aaagtgaaagccagccactgg

SEQ ID NO: 8592 - RNA, 21 nt, RNAi
agugaaagccagccacugguu

SEQ ID NO: 8593 - RNA, 21 nt, RNAi
uuucacuuucggucggugacc

SEQ ID NO: 8594 - DNA, 21 bp, Homo sapiens
aagtgaaagccagccactgga

SEQ ID NO: 8595 - RNA, 21 nt, RNAi
gugaaagccagccacuggauu

SEQ ID NO: 8596 - RNA, 21 nt, RNAi
uucacuuucggucggugaccu

SEQ ID NO: 8597 - DNA, 21 bp, Homo sapiens
aaagccagccactggagtcgc

SEQ ID NO: 8598 - RNA, 21 nt, RNAi
agccagccacuggagucgcuu

SEQ ID NO: 8599 - RNA, 21 nt, RNAi
uuucggucggugaccucagcg

SEQ ID NO: 8600 - DNA, 21 bp, Homo sapiens
aagccagccactggagtcgca

SEQ ID NO: 8601 - RNA, 21 nt, RNAi
gccagccacuggagucgcauu

SEQ ID NO: 8602 - RNA, 21 nt, RNAi
uucggucggugaccucagcgu

SEQ ID NO: 8603 - DNA, 21 bp, Homo sapiens
aatcaggctcaggttctgagg

SEQ ID NO: 8604 - RNA, 21 nt, RNAi
ucaggcucagguucugagguu

SEQ ID NO: 8605 - RNA, 21 nt, RNAi
uuaguccgaguccaagacucc

SEQ ID NO: 8606 - DNA, 21 bp, Homo sapiens
aagaagaggaggaggaggaag

SEQ ID NO: 8607 - RNA, 21 nt, RNAi
gaagaggaggaggaggaaguu

SEQ ID NO: 8608 - RNA, 21 nt, RNAi
uucuucuccuccuccuccuuc

SEQ ID NO: 8609 - DNA, 21 bp, Homo sapiens
aagaggaggaggaggaagagg

SEQ ID NO: 8610 - RNA, 21 nt, RNAi
gaggaggaggaggaagagguu

SEQ ID NO: 8611 - RNA, 21 nt, RNAi
uucuccuccuccuccuucucc

SEQ ID NO: 8612 - DNA, 21 bp, Homo sapiens
aagaatcagaggaggaggagg

SEQ ID NO: 8613 - RNA, 21 nt, RNAi
gaaucagaggaggaggagguu

SEQ ID NO: 8614 - RNA, 21 nt, RNAi
uucuuagucuccuccuccucc

SEQ ID NO: 8615 - DNA, 21 bp, Homo sapiens
aatcagaggaggaggaggagg

SEQ ID NO: 8616 - RNA, 21 nt, RNAi
ucagaggaggaggaggagguu

SEQ ID NO: 8617 - RNA, 21 nt, RNAi
uuagucuccuccuccuccucc

SEQ ID NO: 8618 - DNA, 21 bp, Homo sapiens
aagaggaagaggaggaggagg

SEQ ID NO: 8619 - RNA, 21 nt, RNAi
gaggaagaggaggaggagguu

SEQ ID NO: 8620 - RNA, 21 nt, RNAi
uucuccuucuccuccuccucc

SEQ ID NO: 8621 - DNA, 21 bp, Homo sapiens
aagaggaggaggaggagaccg

SEQ ID NO: 8622 - RNA, 21 nt, RNAi
gaggaggaggaggagaccguu

SEQ ID NO: 8623 - RNA, 21 nt, RNAi
uucuccuccuccuccucuggc

SEQ ID NO: 8624 - DNA, 21 bp, Homo sapiens
aactctgaggaggcatcagag

SEQ ID NO: 8625 - RNA, 21 nt, RNAi
cucugaggaggcaucagaguu

SEQ ID NO: 8626 - RNA, 21 nt, RNAi
uugagacuccuccguagucuc

SEQ ID NO: 8627 - DNA, 21 bp, Homo sapiens
aagaagtaagtgaggaagaaa

SEQ ID NO: 8628 - RNA, 21 nt, RNAi
gaaguaagugaggaagaaauu

SEQ ID NO: 8629 - RNA, 21 nt, RNAi
uucuucauucacuccuucuuu

SEQ ID NO: 8630 - DNA, 21 bp, Homo sapiens
aagtaagtgaggaagaaatga

SEQ ID NO: 8631 - RNA, 21 nt, RNAi
guaagugaggaagaaaugauu

SEQ ID NO: 8632 - RNA, 21 nt, RNAi
uucauucacuccuucuuuacu

SEQ ID NO: 8633 - DNA, 21 bp, Homo sapiens
aagtgaggaagaaatgagtga

SEQ ID NO: 8634 - RNA, 21 nt, RNAi
gugaggaagaaaugagugauu

SEQ ID NO: 8635 - RNA, 21 nt, RNAi
uucacuccuucuuuacucacu

SEQ ID NO: 8636 - DNA, 21 bp, Homo sapiens
aagaaatgagtgaagatgaag

SEQ ID NO: 8637 - RNA, 21 nt, RNAi
gaaaugagugaagaugaaguu

SEQ ID NO: 8638 - RNA, 21 nt, RNAi
uucuuuacucacuucuacuuc

SEQ ID NO: 8639 - DNA, 21 bp, Homo sapiens
aaatgagtgaagatgaagaac

SEQ ID NO: 8640 - RNA, 21 nt, RNAi
augagugaagaugaagaacuu

SEQ ID NO: 8641 - RNA, 21 nt, RNAi
uuuacucacuucuacuucuug

SEQ ID NO: 8642 - DNA, 21 bp, Homo sapiens
aatgagtgaagatgaagaacg

SEQ ID NO: 8643 - RNA, 21 nt, RNAi
ugagugaagaugaagaacguu

SEQ ID NO: 8644 - RNA, 21 nt, RNAi
uuacucacuucuacuucuugc

SEQ ID NO: 8645 - DNA, 21 bp, Homo sapiens
aaaccacctcttggttgttcc

SEQ ID NO: 8646 - RNA, 21 nt, RNAi
accaccucuugguuguuccuu

SEQ ID NO: 8647 - RNA, 21 nt, RNAi
uuugguggagaaccaacaagg

SEQ ID NO: 8648 - DNA, 21 bp, Homo sapiens
aaccacctcttggttgttcca

SEQ ID NO: 8649 - RNA, 21 nt, RNAi
ccaccucuugguuguuccauu

SEQ ID NO: 8650 - RNA, 21 nt, RNAi
uugguggagaaccaacaaggu

SEQ ID NO: 8651 - DNA, 21 bp, Homo sapiens
aagaagcagaggaagaagtgg

SEQ ID NO: 8652 - RNA, 21 nt, RNAi
gaagcagaggaagaagugguu

SEQ ID NO: 8653 - RNA, 21 nt, RNAi
uucuucgucuccuucuucacc

SEQ ID NO: 8654 - DNA, 21 bp, Homo sapiens
aaacagatgaaattgtggctc

SEQ ID NO: 8655 - RNA, 21 nt, RNAi
acagaugaaauuguggcucuu

SEQ ID NO: 8656 - RNA, 21 nt, RNAi
uuugucuacuuuaacaccgag

SEQ ID NO: 8657 - DNA, 21 bp, Homo sapiens
aacagatgaaattgtggctct

SEQ ID NO: 8658 - RNA, 21 nt, RNAi
cagaugaaauuguggcucuuu

SEQ ID NO: 8659 - RNA, 21 nt, RNAi
uugucuacuuuaacaccgaga

SEQ ID NO: 8660 - DNA, 21 bp, Homo sapiens
aaattgtggctctaaagcggc

SEQ ID NO: 8661 - RNA, 21 nt, RNAi
auuguggcucuaaagcggcuu

SEQ ID NO: 8662 - RNA, 21 nt, RNAi
uuuaacaccgagauuucgccg

SEQ ID NO: 8663 - DNA, 21 bp, Homo sapiens
aattgtggctctaaagcggct

SEQ ID NO: 8664 - RNA, 21 nt, RNAi
uuguggcucuaaagcggcuuu

SEQ ID NO: 8665 - RNA, 21 nt, RNAi
uuaacaccgagauuucgccga

SEQ ID NO: 8666 - DNA, 21 bp, Homo sapiens
aaagcggctgaagatggagaa

SEQ ID NO: 8667 - RNA, 21 nt, RNAi
agcggcugaagauggagaauu

SEQ ID NO: 8668 - RNA, 21 nt, RNAi
uuucgccgacuucuaccucuu

SEQ ID NO: 8669 - DNA, 21 bp, Homo sapiens
aagcggctgaagatggagaag

SEQ ID NO: 8670 - RNA, 21 nt, RNAi
gcggcugaagauggagaaguu

SEQ ID NO: 8671 - RNA, 21 nt, RNAi
uucgccgacuucuaccucuuc

SEQ ID NO: 8672 - DNA, 21 bp, Homo sapiens
aagatggagaaggagaaggag

SEQ ID NO: 8673 - RNA, 21 nt, RNAi
gauggagaaggagaaggaguu

SEQ ID NO: 8674 - RNA, 21 nt, RNAi
uucuaccucuuccucuuccuc

SEQ ID NO: 8675 - DNA, 21 bp, Homo sapiens
aacatcgtcaccgttagagag

SEQ ID NO: 8676 - RNA, 21 nt, RNAi
caucgucaccguuagagaguu

SEQ ID NO: 8677 - RNA, 21 nt, RNAi
uuguagcaguggcaaucucuc

SEQ ID NO: 8678 - DNA, 21 bp, Homo sapiens
aacatggacaagatctacatc

SEQ ID NO: 8679 - RNA, 21 nt, RNAi
cauggacaagaucuacaucuu

SEQ ID NO: 8680 - RNA, 21 nt, RNAi
uuguaccuguucuagauguag

SEQ ID NO: 8681 - DNA, 21 bp, Homo sapiens
aagatctacatcgtgatgaac

SEQ ID NO: 8682 - RNA, 21 nt, RNAi
gaucuacaucgugaugaacuu

SEQ ID NO: 8683 - RNA, 21 nt, RNAi
uucuagauguagcacuacuug

SEQ ID NO: 8684 - DNA, 21 bp, Homo sapiens
aactatgtggagcacgacctc

SEQ ID NO: 8685 - RNA, 21 nt, RNAi
cuauguggagcacgaccucuu

SEQ ID NO: 8686 - RNA, 21 nt, RNAi
uugauacaccucgugcuggag

SEQ ID NO: 8687 - DNA, 21 bp, Homo sapiens
aagagcctgatggagaccatg

SEQ ID NO: 8688 - RNA, 21 nt, RNAi
gagccugauggagaccauguu

SEQ ID NO: 8689 - RNA, 21 nt, RNAi
uucucggacuaccucugguac

SEQ ID NO: 8690 - DNA, 21 bp, Homo sapiens
aaacacctgcacgacaactgg

SEQ ID NO: 8691 - RNA, 21 nt, RNAi
acaccugcacgacaacugguu

SEQ ID NO: 8692 - RNA, 21 nt, RNAi
uuuguggacgugcuguugacc

SEQ ID NO: 8693 - DNA, 21 bp, Homo sapiens
aacacctgcacgacaactgga

SEQ ID NO: 8694 - RNA, 21 nt, RNAi
caccugcacgacaacuggauu

SEQ ID NO: 8695 - RNA, 21 nt, RNAi
uuguggacgugcuguugaccu

SEQ ID NO: 8696 - DNA, 21 bp, Homo sapiens
aactggatcctgcaccgtgac

SEQ ID NO: 8697 - RNA, 21 nt, RNAi
cuggauccugcaccgugacuu

SEQ ID NO: 8698 - RNA, 21 nt, RNAi
uugaccuaggacguggcacug

SEQ ID NO: 8699 - DNA, 21 bp, Homo sapiens
aagacgtccaacctgctgctg

SEQ ID NO: 8700 - RNA, 21 nt, RNAi
gacguccaaccugcugcuguu

SEQ ID NO: 8701 - RNA, 21 nt, RNAi
uucugcagguuggacgacgac

SEQ ID NO: 8702 - DNA, 21 bp, Homo sapiens
aaggaatactccacggccgtg

SEQ ID NO: 8703 - RNA, 21 nt, RNAi
ggaauacuccacggccguguu

SEQ ID NO: 8704 - RNA, 21 nt, RNAi
uuccuuaugaggugccggcac

SEQ ID NO: 8705 - DNA, 21 bp, Homo sapiens
aatactccacggccgtggaca

SEQ ID NO: 8706 - RNA, 21 nt, RNAi
uacuccacggccguggacauu

SEQ ID NO: 8707 - RNA, 21 nt, RNAi
uuaugaggugccggcaccugu

SEQ ID NO: 8708 - DNA, 21 bp, Homo sapiens
aagtcagaaatcgatcagatc

SEQ ID NO: 8709 - RNA, 21 nt, RNAi
gucagaaaucgaucagaucuu

SEQ ID NO: 8710 - RNA, 21 nt, RNAi
uucagucuuuagcuagucuag

SEQ ID NO: 8711 - DNA, 21 bp, Homo sapiens
aaatcgatcagatcaacaagg

SEQ ID NO: 8712 - RNA, 21 nt, RNAi
aucgaucagaucaacaagguu

SEQ ID NO: 8713 - RNA, 21 nt, RNAi
uuuagcuagucuaguuguucc

SEQ ID NO: 8714 - DNA, 21 bp, Homo sapiens
aatcgatcagatcaacaaggt

SEQ ID NO: 8715 - RNA, 21 nt, RNAi
ucgaucagaucaacaagguuu

SEQ ID NO: 8716 - RNA, 21 nt, RNAi
uuagcuagucuaguuguucca

SEQ ID NO: 8717 - DNA, 21 bp, Homo sapiens
aacaaggtgttcaaggatctg

SEQ ID NO: 8718 - RNA, 21 nt, RNAi
caagguguucaaggaucuguu

SEQ ID NO: 8719 - RNA, 21 nt, RNAi
uuguuccacaaguuccuagac

SEQ ID NO: 8720 - DNA, 21 bp, Homo sapiens
aagaagatgaccttcagcgag

SEQ ID NO: 8721 - RNA, 21 nt, RNAi
gaagaugaccuucagcgaguu

SEQ ID NO: 8722 - RNA, 21 nt, RNAi
uucuucuacuggaagucgcuc

SEQ ID NO: 8723 - DNA, 21 bp, Homo sapiens
aagatgaccttcagcgagcac

SEQ ID NO: 8724 - RNA, 21 nt, RNAi
gaugaccuucagcgagcacuu

SEQ ID NO: 8725 - RNA, 21 nt, RNAi
uucuacuggaagucgcucgug

SEQ ID NO: 8726 - DNA, 21 bp, Homo sapiens
aacaacctccgcaagcgcttc

SEQ ID NO: 8727 - RNA, 21 nt, RNAi
caaccuccgcaagcgcuucuu

SEQ ID NO: 8728 - RNA, 21 nt, RNAi
uuguuggaggcguucgcgaag

SEQ ID NO: 8729 - DNA, 21 bp, Homo sapiens
aacaagttcctgacctacttc

SEQ ID NO: 8730 - RNA, 21 nt, RNAi
caaguuccugaccuacuucuu

SEQ ID NO: 8731 - RNA, 21 nt, RNAi
uuguucaaggacuggaugaag

SEQ ID NO: 8732 - DNA, 21 bp, Homo sapiens
aagcatgagtatttccgcgag

SEQ ID NO: 8733 - RNA, 21 nt, RNAi
gcaugaguauuuccgcgaguu

SEQ ID NO: 8734 - RNA, 21 nt, RNAi
uucguacucauaaaggcgcuc

SEQ ID NO: 8735 - DNA, 21 bp, Homo sapiens
aagagcgagcagcagcgtgtg

SEQ ID NO: 8736 - RNA, 21 nt, RNAi
gagcgagcagcagcguguguu

SEQ ID NO: 8737 - RNA, 21 nt, RNAi
uucucgcucgucgucgcacac

SEQ ID NO: 8738 - DNA, 21 bp, Homo sapiens
aagttctgaaggtcagagtgg

SEQ ID NO: 8739 - RNA, 21 nt, RNAi
guucugaaggucagagugguu

SEQ ID NO: 8740 - RNA, 21 nt, RNAi
uucaagacuuccagucucacc

SEQ ID NO: 8741 - DNA, 21 bp, Homo sapiens
caagaggagaaagcagagata

SEQ ID NO: 8742 - RNA, 21 nt, RNAi
agaggagaaagcagagauauu

SEQ ID NO: 8743 - RNA, 21 nt, RNAi
uuucuccucuuucgucucuau

SEQ ID NO: 8744 - DNA, 21 bp, Homo sapiens
caccgcatggagatcacaata

SEQ ID NO: 8745 - RNA, 21 nt, RNAi
ccgcauggagaucacaauauu

SEQ ID NO: 8746 - RNA, 21 nt, RNAi
uuggcguaccucuaguguuau

SEQ ID NO: 8747 - DNA, 21 bp, Homo sapiens
catggagatcacaataaggaa

SEQ ID NO: 8748 - RNA, 21 nt, RNAi
uggagaucacaauaaggaauu

SEQ ID NO: 8749 - RNA, 21 nt, RNAi
uuaccucuaguguuauuccuu

SEQ ID NO: 8750 - DNA, 21 bp, Homo sapiens
cagaggagaagaagatgattc

SEQ ID NO: 8751 - RNA, 21 nt, RNAi
gaggagaagaagaugauucuu

SEQ ID NO: 8752 - RNA, 21 nt, RNAi
uucuccucuucuucuacuaag

SEQ ID NO: 8753 - DNA, 21 bp, Homo sapiens
cagcaaatgtctcggaaagaa

SEQ ID NO: 8754 - RNA, 21 nt, RNAi
gcaaaugucucggaaagaauu

SEQ ID NO: 8755 - RNA, 21 nt, RNAi
uucguuuacagagccuuucuu

SEQ ID NO: 8756 - DNA, 21 bp, Homo sapiens
catcgtagccattcagcagaa

SEQ ID NO: 8757 - RNA, 21 nt, RNAi
ucguagccauucagcagaauu

SEQ ID NO: 8758 - RNA, 21 nt, RNAi
uuagcaucgguaagucgucuu

SEQ ID NO: 8759 - DNA, 21 bp, Homo sapiens
cacgaacgtcggaaacgacat

SEQ ID NO: 8760 - RNA, 21 nt, RNAi
cgaacgucggaaacgacauuu

SEQ ID NO: 8761 - RNA, 21 nt, RNAi
uugcuugcagccuuugcugua

SEQ ID NO: 8762 - DNA, 21 bp, Homo sapiens
catcgagaagaacaggataaa

SEQ ID NO: 8763 - RNA, 21 nt, RNAi
ucgagaagaacaggauaaauu

SEQ ID NO: 8764 - RNA, 21 nt, RNAi
uuagcucuucuuguccuauuu

SEQ ID NO: 8765 - DNA, 21 bp, Homo sapiens
cacatcaccgaacgatgagag

SEQ ID NO: 8766 - RNA, 21 nt, RNAi
caucaccgaacgaugagaguu

SEQ ID NO: 8767 - RNA, 21 nt, RNAi
uuguaguggcuugcuacucuc

SEQ ID NO: 8768 - DNA, 21 bp, Homo sapiens
catcaccgaacgatgagagag

SEQ ID NO: 8769 - RNA, 21 nt, RNAi
ucaccgaacgaugagagaguu

SEQ ID NO: 8770 - RNA, 21 nt, RNAi
uuaguggcuugcuacucucuc

SEQ ID NO: 8771 - DNA, 21 bp, Homo sapiens
caccgaacgatgagagaggac

SEQ ID NO: 8772 - RNA, 21 nt, RNAi
ccgaacgaugagagaggacuu

SEQ ID NO: 8773 - RNA, 21 nt, RNAi
uuggcuugcuacucucuccug

SEQ ID NO: 8774 - DNA, 21 bp, Homo sapiens
cagcgacaaagtgaaagccag

SEQ ID NO: 8775 - RNA, 21 nt, RNAi
gcgacaaagugaaagccaguu

SEQ ID NO: 8776 - RNA, 21 nt, RNAi
uucgcuguuucacuuucgguc

SEQ ID NO: 8777 - DNA, 21 bp, Homo sapiens
caaagtgaaagccagccactg

SEQ ID NO: 8778 - RNA, 21 nt, RNAi
aagugaaagccagccacuguu

SEQ ID NO: 8779 - RNA, 21 nt, RNAi
uuuucacuuucggucggugac

SEQ ID NO: 8780 - DNA, 21 bp, Homo sapiens
caggacatcagcgacagcgag

SEQ ID NO: 8781 - RNA, 21 nt, RNAi
ggacaucagcgacagcgaguu

SEQ ID NO: 8782 - RNA, 21 nt, RNAi
uuccuguagucgcugucgcuc

SEQ ID NO: 8783 - DNA, 21 bp, Homo sapiens
catcagcgacagcgagaggaa

SEQ ID NO: 8784 - RNA, 21 nt, RNAi
ucagcgacagcgagaggaauu

SEQ ID NO: 8785 - RNA, 21 nt, RNAi
uuagucgcugucgcucuccuu

SEQ ID NO: 8786 - DNA, 21 bp, Homo sapiens
cagcgacagcgagaggaagac

SEQ ID NO: 8787 - RNA, 21 nt, RNAi
gcgacagcgagaggaagacuu

SEQ ID NO: 8788 - RNA, 21 nt, RNAi
uucgcugucgcucuccuucug

SEQ ID NO: 8789 - DNA, 21 bp, Homo sapiens
cagcgagaggaagaccagctc

SEQ ID NO: 8790 - RNA, 21 nt, RNAi
gcgagaggaagaccagcucuu

SEQ ID NO: 8791 - RNA, 21 nt, RNAi
uucgcucuccuucuggucgag

SEQ ID NO: 8792 - DNA, 21 bp, Homo sapiens
cagcagaatcaggctcaggtt

SEQ ID NO: 8793 - RNA, 21 nt, RNAi
gcagaaucaggcucagguuuu

SEQ ID NO: 8794 - RNA, 21 nt, RNAi
uucgucuuaguccgaguccaa

SEQ ID NO: 8795 - DNA, 21 bp, Homo sapiens
cagaatcaggctcaggttctg

SEQ ID NO: 8796 - RNA, 21 nt, RNAi
gaaucaggcucagguucuguu

SEQ ID NO: 8797 - RNA, 21 nt, RNAi
uucuuaguccgaguccaagac

SEQ ID NO: 8798 - DNA, 21 bp, Homo sapiens
caggctcaggttctgaggaag

SEQ ID NO: 8799 - RNA, 21 nt, RNAi
ggcucagguucugaggaaguu

SEQ ID NO: 8800 - RNA, 21 nt, RNAi
uuccgaguccaagacuccuuc

SEQ ID NO: 8801 - DNA, 21 bp, Homo sapiens
caggttctgaggaagaagagg

SEQ ID NO: 8802 - RNA, 21 nt, RNAi
gguucugaggaagaagagguu

SEQ ID NO: 8803 - RNA, 21 nt, RNAi
uuccaagacuccuucuucucc

SEQ ID NO: 8804 - DNA, 21 bp, Homo sapiens
caccagtgaagaatcagagga

SEQ ID NO: 8805 - RNA, 21 nt, RNAi
ccagugaagaaucagaggauu

SEQ ID NO: 8806 - RNA, 21 nt, RNAi
uuggucacuucuuagucuccu

SEQ ID NO: 8807 - DNA, 21 bp, Homo sapiens
cagtgaagaatcagaggagga

SEQ ID NO: 8808 - RNA, 21 nt, RNAi
gugaagaaucagaggaggauu

SEQ ID NO: 8809 - RNA, 21 nt, RNAi
uucacuucuuagucuccuccu

SEQ ID NO: 8810 - DNA, 21 bp, Homo sapiens
cagaggaggaggaggaggaag

SEQ ID NO: 8811 - RNA, 21 nt, RNAi
gaggaggaggaggaggaaguu

SEQ ID NO: 8812 - RNA, 21 nt, RNAi
uucuccuccuccuccuccuuc

SEQ ID NO: 8813 - DNA, 21 bp, Homo sapiens
cagcaactctgaggaggcatc

SEQ ID NO: 8814 - RNA, 21 nt, RNAi
gcaacucugaggaggcaucuu

SEQ ID NO: 8815 - RNA, 21 nt, RNAi
uucguugagacuccuccguag

SEQ ID NO: 8816 - DNA, 21 bp, Homo sapiens
caactctgaggaggcatcaga

SEQ ID NO: 8817 - RNA, 21 nt, RNAi
acucugaggaggcaucagauu

SEQ ID NO: 8818 - RNA, 21 nt, RNAi
uuugagacuccuccguagucu

SEQ ID NO: 8819 - DNA, 21 bp, Homo sapiens
catcagagcagtctgccgaag

SEQ ID NO: 8820 - RNA, 21 nt, RNAi
ucagagcagucugccgaaguu

SEQ ID NO: 8821 - RNA, 21 nt, RNAi
uuagucucgucagacggcuuc

SEQ ID NO: 8822 - DNA, 21 bp, Homo sapiens
cagagcagtctgccgaagaag

SEQ ID NO: 8823 - RNA, 21 nt, RNAi
gagcagucugccgaagaaguu

SEQ ID NO: 8824 - RNA, 21 nt, RNAi
uucucgucagacggcuucuuc

SEQ ID NO: 8825 - DNA, 21 bp, Homo sapiens
cagtctgccgaagaagtaagt

SEQ ID NO: 8826 - RNA, 21 nt, RNAi
gucugccgaagaaguaaguuu

SEQ ID NO: 8827 - RNA, 21 nt, RNAi
uucagacggcuucuucauuca

SEQ ID NO: 8828 - DNA, 21 bp, Homo sapiens
cacctcttggttgttccagag

SEQ ID NO: 8829 - RNA, 21 nt, RNAi
ccucuugguuguuccagaguu

SEQ ID NO: 8830 - RNA, 21 nt, RNAi
uuggagaaccaacaaggucuc

SEQ ID NO: 8831 - DNA, 21 bp, Homo sapiens
cagagtcacggttcgaccgag

SEQ ID NO: 8832 - RNA, 21 nt, RNAi
gagucacgguucgaccgaguu

SEQ ID NO: 8833 - RNA, 21 nt, RNAi
uucucagugccaagcuggcuc

SEQ ID NO: 8834 - DNA, 21 bp, Homo sapiens
cacggttcgaccgagattccg

SEQ ID NO: 8835 - RNA, 21 nt, RNAi
cgguucgaccgagauuccguu

SEQ ID NO: 8836 - RNA, 21 nt, RNAi
uugccaagcuggcucuaaggc

SEQ ID NO: 8837 - DNA, 21 bp, Homo sapiens
catcgagctcaagcaggagct

SEQ ID NO: 8838 - RNA, 21 nt, RNAi
ucgagcucaagcaggagcuuu

SEQ ID NO: 8839 - RNA, 21 nt, RNAi
uuagcucgaguucguccucga

SEQ ID NO: 8840 - DNA, 21 bp, Homo sapiens
cagtgcctgaacaggatcgag

SEQ ID NO: 8841 - RNA, 21 nt, RNAi
gugccugaacaggaucgaguu

SEQ ID NO: 8842 - RNA, 21 nt, RNAi
uucacggacuuguccuagcuc

SEQ ID NO: 8843 - DNA, 21 bp, Homo sapiens
cacctatggagtggtctacag

SEQ ID NO: 8844 - RNA, 21 nt, RNAi
ccuauggaguggucuacaguu

SEQ ID NO: 8845 - RNA, 21 nt, RNAi
uuggauaccucaccagauguc

SEQ ID NO: 8846 - DNA, 21 bp, Homo sapiens
cagatgaaattgtggctctaa

SEQ ID NO: 8847 - RNA, 21 nt, RNAi
gaugaaauuguggcucuaauu

SEQ ID NO: 8848 - RNA, 21 nt, RNAi
uucuacuuuaacaccgagauu

SEQ ID NO: 8849 - DNA, 21 bp, Homo sapiens
caacatcgtcaccgttagaga

SEQ ID NO: 8850 - RNA, 21 nt, RNAi
acaucgucaccguuagagauu

SEQ ID NO: 8851 - RNA, 21 nt, RNAi
uuuguagcaguggcaaucucu

SEQ ID NO: 8852 - DNA, 21 bp, Homo sapiens
catcgtcaccgttagagagat

SEQ ID NO: 8853 - RNA, 21 nt, RNAi
ucgucaccguuagagagauuu

SEQ ID NO: 8854 - RNA, 21 nt, RNAi
uuagcaguggcaaucucucua

SEQ ID NO: 8855 - DNA, 21 bp, Homo sapiens
caccgttagagagattgtggt

SEQ ID NO: 8856 - RNA, 21 nt, RNAi
ccguuagagagauugugguuu

SEQ ID NO: 8857 - RNA, 21 nt, RNAi
uuggcaaucucucuaacacca

SEQ ID NO: 8858 - DNA, 21 bp, Homo sapiens
cagcaacatggacaagatcta

SEQ ID NO: 8859 - RNA, 21 nt, RNAi
gcaacauggacaagaucuauu

SEQ ID NO: 8860 - RNA, 21 nt, RNAi
uucguuguaccuguucuagau

SEQ ID NO: 8861 - DNA, 21 bp, Homo sapiens
caacatggacaagatctacat

SEQ ID NO: 8862 - RNA, 21 nt, RNAi
acauggacaagaucuacauuu

SEQ ID NO: 8863 - RNA, 21 nt, RNAi
uuuguaccuguucuagaugua

SEQ ID NO: 8864 - DNA, 21 bp, Homo sapiens
catggacaagatctacatcgt

SEQ ID NO: 8865 - RNA, 21 nt, RNAi
uggacaagaucuacaucguuu

SEQ ID NO: 8866 - RNA, 21 nt, RNAi
uuaccuguucuagauguagca

SEQ ID NO: 8867 - DNA, 21 bp, Homo sapiens
caagatctacatcgtgatgaa

SEQ ID NO: 8868 - RNA, 21 nt, RNAi
agaucuacaucgugaugaauu

SEQ ID NO: 8869 - RNA, 21 nt, RNAi
uuucuagauguagcacuacuu

SEQ ID NO: 8870 - DNA, 21 bp, Homo sapiens
catcgtgatgaactatgtgga

SEQ ID NO: 8871 - RNA, 21 nt, RNAi
ucgugaugaacuauguggauu

SEQ ID NO: 8872 - RNA, 21 nt, RNAi
uuagcacuacuugauacaccu

SEQ ID NO: 8873 - DNA, 21 bp, Homo sapiens
cacgacctcaagagcctgatg

SEQ ID NO: 8874 - RNA, 21 nt, RNAi
cgaccucaagagccugauguu

SEQ ID NO: 8875 - RNA, 21 nt, RNAi
uugcuggaguucucggacuac

SEQ ID NO: 8876 - DNA, 21 bp, Homo sapiens
caagagcctgatggagaccat

SEQ ID NO: 8877 - RNA, 21 nt, RNAi
agagccugauggagaccauuu

SEQ ID NO: 8878 - RNA, 21 nt, RNAi
uuucucggacuaccucuggua

SEQ ID NO: 8879 - DNA, 21 bp, Homo sapiens
cacctgcacgacaactggatc

SEQ ID NO: 8880 - RNA, 21 nt, RNAi
ccugcacgacaacuggaucuu

SEQ ID NO: 8881 - RNA, 21 nt, RNAi
uuggacgugcuguugaccuag

SEQ ID NO: 8882 - DNA, 21 bp, Homo sapiens
cacgacaactggatcctgcac

SEQ ID NO: 8883 - RNA, 21 nt, RNAi
cgacaacuggauccugcacuu

SEQ ID NO: 8884 - RNA, 21 nt, RNAi
uugcuguugaccuaggacgug

SEQ ID NO: 8885 - DNA, 21 bp, Homo sapiens
caactggatcctgcaccgtga

SEQ ID NO: 8886 - RNA, 21 nt, RNAi
acuggauccugcaccgugauu

SEQ ID NO: 8887 - RNA, 21 nt, RNAi
uuugaccuaggacguggcacu

SEQ ID NO: 8888 - DNA, 21 bp, Homo sapiens
caccgtgacctcaagacgtcc

SEQ ID NO: 8889 - RNA, 21 nt, RNAi
ccgugaccucaagacguccuu

SEQ ID NO: 8890 - RNA, 21 nt, RNAi
uuggcacuggaguucugcagg

SEQ ID NO: 8891 - DNA, 21 bp, Homo sapiens
caagacgtccaacctgctgct

SEQ ID NO: 8892 - RNA, 21 nt, RNAi
agacguccaaccugcugcuuu

SEQ ID NO: 8893 - RNA, 21 nt, RNAi
uuucugcagguuggacgacga

SEQ ID NO: 8894 - DNA, 21 bp, Homo sapiens
cagagctgctgcttggtgcca

SEQ ID NO: 8895 - RNA, 21 nt, RNAi
gagcugcugcuuggugccauu

SEQ ID NO: 8896 - RNA, 21 nt, RNAi
uucucgacgacgaaccacggu

SEQ ID NO: 8897 - DNA, 21 bp, Homo sapiens
caaggaatactccacggccgt

SEQ ID NO: 8898 - RNA, 21 nt, RNAi
aggaauacuccacggccguuu

SEQ ID NO: 8899 - RNA, 21 nt, RNAi
uuuccuuaugaggugccggca

SEQ ID NO: 8900 - DNA, 21 bp, Homo sapiens
cagaaatcgatcagatcaaca

SEQ ID NO: 8901 - RNA, 21 nt, RNAi
gaaaucgaucagaucaacauu

SEQ ID NO: 8902 - RNA, 21 nt, RNAi
uucuuuagcuagucuaguugu

SEQ ID NO: 8903 - DNA, 21 bp, Homo sapiens
cagatcaacaaggtgttcaag

SEQ ID NO: 8904 - RNA, 21 nt, RNAi
gaucaacaagguguucaaguu

SEQ ID NO: 8905 - RNA, 21 nt, RNAi
uucuaguuguuccacaaguuc

SEQ ID NO: 8906 - DNA, 21 bp, Homo sapiens
caacaaggtgttcaaggatct

SEQ ID NO: 8907 - RNA, 21 nt, RNAi
acaagguguucaaggaucuuu

SEQ ID NO: 8908 - RNA, 21 nt, RNAi
uuuguuccacaaguuccuaga

SEQ ID NO: 8909 - DNA, 21 bp, Homo sapiens
cagcagtcaagaagatgacct

SEQ ID NO: 8910 - RNA, 21 nt, RNAi
gcagucaagaagaugaccuuu

SEQ ID NO: 8911 - RNA, 21 nt, RNAi
uucgucaguucuucuacugga

SEQ ID NO: 8912 - DNA, 21 bp, Homo sapiens
cagtcaagaagatgaccttca

SEQ ID NO: 8913 - RNA, 21 nt, RNAi
gucaagaagaugaccuucauu

SEQ ID NO: 8914 - RNA, 21 nt, RNAi
uucaguucuucuacuggaagu

SEQ ID NO: 8915 - DNA, 21 bp, Homo sapiens
caagaagatgaccttcagcga

SEQ ID NO: 8916 - RNA, 21 nt, RNAi
agaagaugaccuucagcgauu

SEQ ID NO: 8917 - RNA, 21 nt, RNAi
uuucuucuacuggaagucgcu

SEQ ID NO: 8918 - DNA, 21 bp, Homo sapiens
caacaacctccgcaagcgctt

SEQ ID NO: 8919 - RNA, 21 nt, RNAi
acaaccuccgcaagcgcuuuu

SEQ ID NO: 8920 - RNA, 21 nt, RNAi
uuuguuggaggcguucgcgaa

SEQ ID NO: 8921 - DNA, 21 bp, Homo sapiens
catgaacaagttcctgaccta

SEQ ID NO: 8922 - RNA, 21 nt, RNAi
ugaacaaguuccugaccuauu

SEQ ID NO: 8923 - RNA, 21 nt, RNAi
uuacuuguucaaggacuggau

SEQ ID NO: 8924 - DNA, 21 bp, Homo sapiens
caagcatgagtatttccgcga

SEQ ID NO: 8925 - RNA, 21 nt, RNAi
agcaugaguauuuccgcgauu

SEQ ID NO: 8926 - RNA, 21 nt, RNAi
uuucguacucauaaaggcgcu

SEQ ID NO: 8927 - DNA, 21 bp, Homo sapiens
catgagtatttccgcgagacc

SEQ ID NO: 8928 - RNA, 21 nt, RNAi
ugaguauuuccgcgagaccuu

SEQ ID NO: 8929 - RNA, 21 nt, RNAi
uuacucauaaaggcgcucugg

SEQ ID NO: 8930 - DNA, 21 bp, Homo sapiens
caagagcgagcagcagcgtgt

SEQ ID NO: 8931 - RNA, 21 nt, RNAi
agagcgagcagcagcguguuu

SEQ ID NO: 8932 - RNA, 21 nt, RNAi
uuucucgcucgucgucgcaca

SEQ ID NO: 8933 - DNA, 21 bp, Homo sapiens
caccttaccaccacgaaccag

SEQ ID NO: 8934 - RNA, 21 nt, RNAi
ccuuaccaccacgaaccaguu

SEQ ID NO: 8935 - RNA, 21 nt, RNAi
uuggaaugguggugcuugguc

SEQ ID NO: 8936 - DNA, 21 bp, Homo sapiens
cagcctcaagttctgaaggtc

SEQ ID NO: 8937 - RNA, 21 nt, RNAi
gccucaaguucugaaggucuu

SEQ ID NO: 8938 - RNA, 21 nt, RNAi
uucggaguucaagacuuccag

SEQ ID NO: 8939 - DNA, 21 bp, Homo sapiens
caagttctgaaggtcagagtg

SEQ ID NO: 8940 - RNA, 21 nt, RNAi
aguucugaaggucagaguguu

SEQ ID NO: 8941 - RNA, 21 nt, RNAi
uuucaagacuuccagucucac

SEQ ID NO: 8942 - DNA, 21 bp, Homo sapiens
gaaacgaaggaaggaacaaga

SEQ ID NO: 8943 - RNA, 21 nt, RNAi
aacgaaggaaggaacaagauu

SEQ ID NO: 8944 - RNA, 21 nt, RNAi
uuuugcuuccuuccuuguucu

SEQ ID NO: 8945 - DNA, 21 bp, Homo sapiens
gaaggaaggaacaagaggaga

SEQ ID NO: 8946 - RNA, 21 nt, RNAi
aggaaggaacaagaggagauu

SEQ ID NO: 8947 - RNA, 21 nt, RNAi
uuuccuuccuuguucuccucu

SEQ ID NO: 8948 - DNA, 21 bp, Homo sapiens
gaaggaacaagaggagaaagc

SEQ ID NO: 8949 - RNA, 21 nt, RNAi
aggaacaagaggagaaagcuu

SEQ ID NO: 8950 - RNA, 21 nt, RNAi
uuuccuuguucuccucuuucg

SEQ ID NO: 8951 - DNA, 21 bp, Homo sapiens
gaacaagaggagaaagcagag

SEQ ID NO: 8952 - RNA, 21 nt, RNAi
acaagaggagaaagcagaguu

SEQ ID NO: 8953 - RNA, 21 nt, RNAi
uuuguucuccucuuucgucuc

SEQ ID NO: 8954 - DNA, 21 bp, Homo sapiens
gagctgagagatcaccgcatg

SEQ ID NO: 8955 - RNA, 21 nt, RNAi
gcugagagaucaccgcauguu

SEQ ID NO: 8956 - RNA, 21 nt, RNAi
uucgacucucuaguggcguac

SEQ ID NO: 8957 - DNA, 21 bp, Homo sapiens
gagagatcaccgcatggagat

SEQ ID NO: 8958 - RNA, 21 nt, RNAi
gagaucaccgcauggagauuu

SEQ ID NO: 8959 - RNA, 21 nt, RNAi
uucucuaguggcguaccucua

SEQ ID NO: 8960 - DNA, 21 bp, Homo sapiens
gagatcaccgcatggagatca

SEQ ID NO: 8961 - RNA, 21 nt, RNAi
gaucaccgcauggagaucauu

SEQ ID NO: 8962 - RNA, 21 nt, RNAi
uucuaguggcguaccucuagu

SEQ ID NO: 8963 - DNA, 21 bp, Homo sapiens
gatcaccgcatggagatcaca

SEQ ID NO: 8964 - RNA, 21 nt, RNAi
ucaccgcauggagaucacauu

SEQ ID NO: 8965 - RNA, 21 nt, RNAi
uuaguggcguaccucuagugu

SEQ ID NO: 8966 - DNA, 21 bp, Homo sapiens
gagatcacaataaggaactcc

SEQ ID NO: 8967 - RNA, 21 nt, RNAi
gaucacaauaaggaacuccuu

SEQ ID NO: 8968 - RNA, 21 nt, RNAi
uucuaguguuauuccuugagg

SEQ ID NO: 8969 - DNA, 21 bp, Homo sapiens
gaagagaagactctatggaag

SEQ ID NO: 8970 - RNA, 21 nt, RNAi
agagaagacucuauggaaguu

SEQ ID NO: 8971 - RNA, 21 nt, RNAi
uuucucuucugagauaccuuc

SEQ ID NO: 8972 - DNA, 21 bp, Homo sapiens
gagaagactctatggaagaca

SEQ ID NO: 8973 - RNA, 21 nt, RNAi
gaagacucuauggaagacauu

SEQ ID NO: 8974 - RNA, 21 nt, RNAi
uucuucugagauaccuucugu

SEQ ID NO: 8975 - DNA, 21 bp, Homo sapiens
gaagactctatggaagacaga

SEQ ID NO: 8976 - RNA, 21 nt, RNAi
agacucuauggaagacagauu

SEQ ID NO: 8977 - RNA, 21 nt, RNAi
uuucugagauaccuucugucu

SEQ ID NO: 8978 - DNA, 21 bp, Homo sapiens
gactctatggaagacagagga

SEQ ID NO: 8979 - RNA, 21 nt, RNAi
cucuauggaagacagaggauu

SEQ ID NO: 8980 - RNA, 21 nt, RNAi
uugagauaccuucugucuccu

SEQ ID NO: 8981 - DNA, 21 bp, Homo sapiens
gaagacagaggagaagaagat

SEQ ID NO: 8982 - RNA, 21 nt, RNAi
agacagaggagaagaagauuu

SEQ ID NO: 8983 - RNA, 21 nt, RNAi
uuucugucuccucuucuucua

SEQ ID NO: 8984 - DNA, 21 bp, Homo sapiens
gacagaggagaagaagatgat

SEQ ID NO: 8985 - RNA, 21 nt, RNAi
cagaggagaagaagaugauuu

SEQ ID NO: 8986 - RNA, 21 nt, RNAi
uugucuccucuucuucuacua

SEQ ID NO: 8987 - DNA, 21 bp, Homo sapiens
gaggagaagaagatgattctt

SEQ ID NO: 8988 - RNA, 21 nt, RNAi
ggagaagaagaugauucuuuu

SEQ ID NO: 8989 - RNA, 21 nt, RNAi
uuccucuucuucuacuaagaa

SEQ ID NO: 8990 - DNA, 21 bp, Homo sapiens
gagaagaagatgattctttgg

SEQ ID NO: 8991 - RNA, 21 nt, RNAi
gaagaagaugauucuuugguu

SEQ ID NO: 8992 - RNA, 21 nt, RNAi
uucuucuucuacuaagaaacc

SEQ ID NO: 8993 - DNA, 21 bp, Homo sapiens
gaagaagatgattctttggcc

SEQ ID NO: 8994 - RNA, 21 nt, RNAi
agaagaugauucuuuggccuu

SEQ ID NO: 8995 - RNA, 21 nt, RNAi
uuucuucuacuaagaaaccgg

SEQ ID NO: 8996 - DNA, 21 bp, Homo sapiens
gaagatgattctttggccatc

SEQ ID NO: 8997 - RNA, 21 nt, RNAi
agaugauucuuuggccaucuu

SEQ ID NO: 8998 - RNA, 21 nt, RNAi
uuucuacuaagaaaccgguag

SEQ ID NO: 8999 - DNA, 21 bp, Homo sapiens
gatgattctttggccatcaaa

SEQ ID NO: 9000 - RNA, 21 nt, RNAi
ugauucuuuggccaucaaauu

SEQ ID NO: 9001 - RNA, 21 nt, RNAi
uuacuaagaaaccgguaguuu

SEQ ID NO: 9002 - DNA, 21 bp, Homo sapiens
gattctttggccatcaaacca

SEQ ID NO: 9003 - RNA, 21 nt, RNAi
uucuuuggccaucaaaccauu

SEQ ID NO: 9004 - RNA, 21 nt, RNAi
uuaagaaaccgguaguuuggu

SEQ ID NO: 9005 - DNA, 21 bp, Homo sapiens
gagaaacgtaggcatcgtagc

SEQ ID NO: 9006 - RNA, 21 nt, RNAi
gaaacguaggcaucguagcuu

SEQ ID NO: 9007 - RNA, 21 nt, RNAi
uucuuugcauccguagcaucg

SEQ ID NO: 9008 - DNA, 21 bp, Homo sapiens
gaaacgtaggcatcgtagcca

SEQ ID NO: 9009 - RNA, 21 nt, RNAi
aacguaggcaucguagccauu

SEQ ID NO: 9010 - RNA, 21 nt, RNAi
uuuugcauccguagcaucggu

SEQ ID NO: 9011 - DNA, 21 bp, Homo sapiens
gaagcatgctagagtgaaaga

SEQ ID NO: 9012 - RNA, 21 nt, RNAi
agcaugcuagagugaaagauu

SEQ ID NO: 9013 - RNA, 21 nt, RNAi
uuucguacgaucucacuuucu

SEQ ID NO: 9014 - DNA, 21 bp, Homo sapiens
gaaagagagcacgaacgtcgg

SEQ ID NO: 9015 - RNA, 21 nt, RNAi
aagagagcacgaacgucgguu

SEQ ID NO: 9016 - RNA, 21 nt, RNAi
uuuucucucgugcuugcagcc

SEQ ID NO: 9017 - DNA, 21 bp, Homo sapiens
gagagcacgaacgtcggaaac

SEQ ID NO: 9018 - RNA, 21 nt, RNAi
gagcacgaacgucggaaacuu

SEQ ID NO: 9019 - RNA, 21 nt, RNAi
uucucgugcuugcagccuuug

SEQ ID NO: 9020 - DNA, 21 bp, Homo sapiens
gagcacgaacgtcggaaacga

SEQ ID NO: 9021 - RNA, 21 nt, RNAi
gcacgaacgucggaaacgauu

SEQ ID NO: 9022 - RNA, 21 nt, RNAi
uucgugcuugcagccuuugcu

SEQ ID NO: 9023 - DNA, 21 bp, Homo sapiens
gaacgtcggaaacgacatcga

SEQ ID NO: 9024 - RNA, 21 nt, RNAi
acgucggaaacgacaucgauu

SEQ ID NO: 9025 - RNA, 21 nt, RNAi
uuugcagccuuugcuguagcu

SEQ ID NO: 9026 - DNA, 21 bp, Homo sapiens
gaaacgacatcgagaagaaca

SEQ ID NO: 9027 - RNA, 21 nt, RNAi
aacgacaucgagaagaacauu

SEQ ID NO: 9028 - RNA, 21 nt, RNAi
uuuugcuguagcucuucuugu

SEQ ID NO: 9029 - DNA, 21 bp, Homo sapiens
gacatcgagaagaacaggata

SEQ ID NO: 9030 - RNA, 21 nt, RNAi
caucgagaagaacaggauauu

SEQ ID NO: 9031 - RNA, 21 nt, RNAi
uuguagcucuucuuguccuau

SEQ ID NO: 9032 - DNA, 21 bp, Homo sapiens
gagaagaacaggataaagctc

SEQ ID NO: 9033 - RNA, 21 nt, RNAi
gaagaacaggauaaagcucuu

SEQ ID NO: 9034 - RNA, 21 nt, RNAi
uucuucuuguccuauuucgag

SEQ ID NO: 9035 - DNA, 21 bp, Homo sapiens
gaagaacaggataaagctcgc

SEQ ID NO: 9036 - RNA, 21 nt, RNAi
agaacaggauaaagcucgcuu

SEQ ID NO: 9037 - RNA, 21 nt, RNAi
uuucuuguccuauuucgagcg

SEQ ID NO: 9038 - DNA, 21 bp, Homo sapiens
gaacaggataaagctcgccgg

SEQ ID NO: 9039 - RNA, 21 nt, RNAi
acaggauaaagcucgccgguu

SEQ ID NO: 9040 - RNA, 21 nt, RNAi
uuuguccuauuucgagcggcc

SEQ ID NO: 9041 - DNA, 21 bp, Homo sapiens
gagcattccaggagagaaagg

SEQ ID NO: 9042 - RNA, 21 nt, RNAi
gcauuccaggagagaaagguu

SEQ ID NO: 9043 - RNA, 21 nt, RNAi
uucguaagguccucucuuucc

SEQ ID NO: 9044 - DNA, 21 bp, Homo sapiens
gaccgcttggagcagttagaa

SEQ ID NO: 9045 - RNA, 21 nt, RNAi
ccgcuuggagcaguuagaauu

SEQ ID NO: 9046 - RNA, 21 nt, RNAi
uuggcgaaccucgucaaucuu

SEQ ID NO: 9047 - DNA, 21 bp, Homo sapiens
gagcagttagaaaggaagcgg

SEQ ID NO: 9048 - RNA, 21 nt, RNAi
gcaguuagaaaggaagcgguu

SEQ ID NO: 9049 - RNA, 21 nt, RNAi
uucgucaaucuuuccuucgcc

SEQ ID NO: 9050 - DNA, 21 bp, Homo sapiens
gaagtgtctgcacatcaccga

SEQ ID NO: 9051 - RNA, 21 nt, RNAi
agugucugcacaucaccgauu

SEQ ID NO: 9052 - RNA, 21 nt, RNAi
uuucacagacguguaguggcu

SEQ ID NO: 9053 - DNA, 21 bp, Homo sapiens
gaacgatgagagaggactaca

SEQ ID NO: 9054 - RNA, 21 nt, RNAi
acgaugagagaggacuacauu

SEQ ID NO: 9055 - RNA, 21 nt, RNAi
uuugcuacucucuccugaugu

SEQ ID NO: 9056 - DNA, 21 bp, Homo sapiens
gatgagagaggactacagcga

SEQ ID NO: 9057 - RNA, 21 nt, RNAi
ugagagaggacuacagcgauu

SEQ ID NO: 9058 - RNA, 21 nt, RNAi
uuacucucuccugaugucgcu

SEQ ID NO: 9059 - DNA, 21 bp, Homo sapiens
gagagaggactacagcgacaa

SEQ ID NO: 9060 - RNA, 21 nt, RNAi
gagaggacuacagcgacaauu

SEQ ID NO: 9061 - RNA, 21 nt, RNAi
uucucuccugaugucgcuguu

SEQ ID NO: 9062 - DNA, 21 bp, Homo sapiens
gagaggactacagcgacaaag

SEQ ID NO: 9063 - RNA, 21 nt, RNAi
gaggacuacagcgacaaaguu

SEQ ID NO: 9064 - RNA, 21 nt, RNAi
uucuccugaugucgcuguuuc

SEQ ID NO: 9065 - DNA, 21 bp, Homo sapiens
gaggactacagcgacaaagtg

SEQ ID NO: 9066 - RNA, 21 nt, RNAi
ggacuacagcgacaaaguguu

SEQ ID NO: 9067 - RNA, 21 nt, RNAi
uuccugaugucgcuguuucac

SEQ ID NO: 9068 - DNA, 21 bp, Homo sapiens
gactacagcgacaaagtgaaa

SEQ ID NO: 9069 - RNA, 21 nt, RNAi
cuacagcgacaaagugaaauu

SEQ ID NO: 9070 - RNA, 21 nt, RNAi
uugaugucgcuguuucacuuu

SEQ ID NO: 9071 - DNA, 21 bp, Homo sapiens
gacaaagtgaaagccagccac

SEQ ID NO: 9072 - RNA, 21 nt, RNAi
caaagugaaagccagccacuu

SEQ ID NO: 9073 - RNA, 21 nt, RNAi
uuguuucacuuucggucggug

SEQ ID NO: 9074 - DNA, 21 bp, Homo sapiens
gaaagccagccactggagtcg

SEQ ID NO: 9075 - RNA, 21 nt, RNAi
aagccagccacuggagucguu

SEQ ID NO: 9076 - RNA, 21 nt, RNAi
uuuucggucggugaccucagc

SEQ ID NO: 9077 - DNA, 21 bp, Homo sapiens
gacctgctgtccgacttacag

SEQ ID NO: 9078 - RNA, 21 nt, RNAi
ccugcuguccgacuuacaguu

SEQ ID NO: 9079 - RNA, 21 nt, RNAi
uuggacgacaggcugaauguc

SEQ ID NO: 9080 - DNA, 21 bp, Homo sapiens
gacttacaggacatcagcgac

SEQ ID NO: 9081 - RNA, 21 nt, RNAi
cuuacaggacaucagcgacuu

SEQ ID NO: 9082 - RNA, 21 nt, RNAi
uugaauguccuguagucgcug

SEQ ID NO: 9083 - DNA, 21 bp, Homo sapiens
gacatcagcgacagcgagagg

SEQ ID NO: 9084 - RNA, 21 nt, RNAi
caucagcgacagcgagagguu

SEQ ID NO: 9085 - RNA, 21 nt, RNAi
uuguagucgcugucgcucucc

SEQ ID NO: 9086 - DNA, 21 bp, Homo sapiens
gacagcgagaggaagaccagc

SEQ ID NO: 9087 - RNA, 21 nt, RNAi
cagcgagaggaagaccagcuu

SEQ ID NO: 9088 - RNA, 21 nt, RNAi
uugucgcucuccuucuggucg

SEQ ID NO: 9089 - DNA, 21 bp, Homo sapiens
gagtcctcgtcagcagaatca

SEQ ID NO: 9090 - RNA, 21 nt, RNAi
guccucgucagcagaaucauu

SEQ ID NO: 9091 - RNA, 21 nt, RNAi
uucaggagcagucgucuuagu

SEQ ID NO: 9092 - DNA, 21 bp, Homo sapiens
gaatcaggctcaggttctgag

SEQ ID NO: 9093 - RNA, 21 nt, RNAi
aucaggcucagguucugaguu

SEQ ID NO: 9094 - RNA, 21 nt, RNAi
uuuaguccgaguccaagacuc

SEQ ID NO: 9095 - DNA, 21 bp, Homo sapiens
gaggaagaagaggaggaggag

SEQ ID NO: 9096 - RNA, 21 nt, RNAi
ggaagaagaggaggaggaguu

SEQ ID NO: 9097 - RNA, 21 nt, RNAi
uuccuucuucuccuccuccuc

SEQ ID NO: 9098 - DNA, 21 bp, Homo sapiens
gaagaagaggaggaggaggaa

SEQ ID NO: 9099 - RNA, 21 nt, RNAi
agaagaggaggaggaggaauu

SEQ ID NO: 9100 - RNA, 21 nt, RNAi
uuucuucuccuccuccuccuu

SEQ ID NO: 9101 - DNA, 21 bp, Homo sapiens
gaagaggaggaggaggaagag

SEQ ID NO: 9102 - RNA, 21 nt, RNAi
agaggaggaggaggaagaguu

SEQ ID NO: 9103 - RNA, 21 nt, RNAi
uuucuccuccuccuccuucuc

SEQ ID NO: 9104 - DNA, 21 bp, Homo sapiens
gaggaggaggaggaagaggag

SEQ ID NO: 9105 - RNA, 21 nt, RNAi
ggaggaggaggaagaggaguu

SEQ ID NO: 9106 - RNA, 21 nt, RNAi
uuccuccuccuccuucuccuc

SEQ ID NO: 9107 - DNA, 21 bp, Homo sapiens
gaggaggaggaagaggaggag

SEQ ID NO: 9108 - RNA, 21 nt, RNAi
ggaggaggaagaggaggaguu

SEQ ID NO: 9109 - RNA, 21 nt, RNAi
uuccuccuccuucuccuccuc

SEQ ID NO: 9110 - DNA, 21 bp, Homo sapiens
gaggaggaagaggaggaggag

SEQ ID NO: 9111 - RNA, 21 nt, RNAi
ggaggaagaggaggaggaguu

SEQ ID NO: 9112 - RNA, 21 nt, RNAi
uuccuccuucuccuccuccuc

SEQ ID NO: 9113 - DNA, 21 bp, Homo sapiens
gaggaagaggaggaggaggaa

SEQ ID NO: 9114 - RNA, 21 nt, RNAi
ggaagaggaggaggaggaauu

SEQ ID NO: 9115 - RNA, 21 nt, RNAi
uuccuucuccuccuccuccuu

SEQ ID NO: 9116 - DNA, 21 bp, Homo sapiens
gagcaccagtgaagaatcaga

SEQ ID NO: 9117 - RNA, 21 nt, RNAi
gcaccagugaagaaucagauu

SEQ ID NO: 9118 - RNA, 21 nt, RNAi
uucguggucacuucuuagucu

SEQ ID NO: 9119 - DNA, 21 bp, Homo sapiens
gaagaatcagaggaggaggag

SEQ ID NO: 9120 - RNA, 21 nt, RNAi
agaaucagaggaggaggaguu

SEQ ID NO: 9121 - RNA, 21 nt, RNAi
uuucuuagucuccuccuccuc

SEQ ID NO: 9122 - DNA, 21 bp, Homo sapiens
gaatcagaggaggaggaggag

SEQ ID NO: 9123 - RNA, 21 nt, RNAi
aucagaggaggaggaggaguu

SEQ ID NO: 9124 - RNA, 21 nt, RNAi
uuuagucuccuccuccuccuc

SEQ ID NO: 9125 - DNA, 21 bp, Homo sapiens
gaggaggaggaggaggaagag

SEQ ID NO: 9126 - RNA, 21 nt, RNAi
ggaggaggaggaggaagaguu

SEQ ID NO: 9127 - RNA, 21 nt, RNAi
uuccuccuccuccuccuucuc

SEQ ID NO: 9128 - DNA, 21 bp, Homo sapiens
gaggaggaggaggaagaggaa

SEQ ID NO: 9129 - RNA, 21 nt, RNAi
ggaggaggaggaagaggaauu

SEQ ID NO: 9130 - RNA, 21 nt, RNAi
uuccuccuccuccuucuccuu

SEQ ID NO: 9131 - DNA, 21 bp, Homo sapiens
gaggaggaggaagaggaagag

SEQ ID NO: 9132 - RNA, 21 nt, RNAi
ggaggaggaagaggaagaguu

SEQ ID NO: 9133 - RNA, 21 nt, RNAi
uuccuccuccuucuccuucuc

SEQ ID NO: 9134 - DNA, 21 bp, Homo sapiens
gaggaggaagaggaagaggag

SEQ ID NO: 9135 - RNA, 21 nt, RNAi
ggaggaagaggaagaggaguu

SEQ ID NO: 9136 - RNA, 21 nt, RNAi
uuccuccuucuccuucuccuc

SEQ ID NO: 9137 - DNA, 21 bp, Homo sapiens
gaggaagaggaagaggaggag

SEQ ID NO: 9138 - RNA, 21 nt, RNAi
ggaagaggaagaggaggaguu

SEQ ID NO: 9139 - RNA, 21 nt, RNAi
uuccuucuccuucuccuccuc

SEQ ID NO: 9140 - DNA, 21 bp, Homo sapiens
gaagaggaagaggaggaggag

SEQ ID NO: 9141 - RNA, 21 nt, RNAi
agaggaagaggaggaggaguu

SEQ ID NO: 9142 - RNA, 21 nt, RNAi
uuucuccuucuccuccuccuc

SEQ ID NO: 9143 - DNA, 21 bp, Homo sapiens
gaggaagaggaggaggaggag

SEQ ID NO: 9144 - RNA, 21 nt, RNAi
ggaagaggaggaggaggaguu

SEQ ID NO: 9145 - RNA, 21 nt, RNAi
uuccuucuccuccuccuccuc

SEQ ID NO: 9146 - DNA, 21 bp, Homo sapiens
gaagaggaggaggaggagacc

SEQ ID NO: 9147 - RNA, 21 nt, RNAi
agaggaggaggaggagaccuu

SEQ ID NO: 9148 - RNA, 21 nt, RNAi
uuucuccuccuccuccucugg

SEQ ID NO: 9149 - DNA, 21 bp, Homo sapiens
gaggagaccggcagcaactct

SEQ ID NO: 9150 - RNA, 21 nt, RNAi
ggagaccggcagcaacucuuu

SEQ ID NO: 9151 - RNA, 21 nt, RNAi
uuccucuggccgucguugaga

SEQ ID NO: 9152 - DNA, 21 bp, Homo sapiens
gagaccggcagcaactctgag

SEQ ID NO: 9153 - RNA, 21 nt, RNAi
gaccggcagcaacucugaguu

SEQ ID NO: 9154 - RNA, 21 nt, RNAi
uucuggccgucguugagacuc

SEQ ID NO: 9155 - DNA, 21 bp, Homo sapiens
gaccggcagcaactctgagga

SEQ ID NO: 9156 - RNA, 21 nt, RNAi
ccggcagcaacucugaggauu

SEQ ID NO: 9157 - RNA, 21 nt, RNAi
uuggccgucguugagacuccu

SEQ ID NO: 9158 - DNA, 21 bp, Homo sapiens
gaggaggcatcagagcagtct

SEQ ID NO: 9159 - RNA, 21 nt, RNAi
ggaggcaucagagcagucuuu

SEQ ID NO: 9160 - RNA, 21 nt, RNAi
uuccuccguagucucgucaga

SEQ ID NO: 9161 - DNA, 21 bp, Homo sapiens
gaggcatcagagcagtctgcc

SEQ ID NO: 9162 - RNA, 21 nt, RNAi
ggcaucagagcagucugccuu

SEQ ID NO: 9163 - RNA, 21 nt, RNAi
uuccguagucucgucagacgg

SEQ ID NO: 9164 - DNA, 21 bp, Homo sapiens
gagcagtctgccgaagaagta

SEQ ID NO: 9165 - RNA, 21 nt, RNAi
gcagucugccgaagaaguauu

SEQ ID NO: 9166 - RNA, 21 nt, RNAi
uucgucagacggcuucuucau

SEQ ID NO: 9167 - DNA, 21 bp, Homo sapiens
gaagaagtaagtgaggaagaa

SEQ ID NO: 9168 - RNA, 21 nt, RNAi
agaaguaagugaggaagaauu

SEQ ID NO: 9169 - RNA, 21 nt, RNAi
uuucuucauucacuccuucuu

SEQ ID NO: 9170 - DNA, 21 bp, Homo sapiens
gaagtaagtgaggaagaaatg

SEQ ID NO: 9171 - RNA, 21 nt, RNAi
aguaagugaggaagaaauguu

SEQ ID NO: 9172 - RNA, 21 nt, RNAi
uuucauucacuccuucuuuac

SEQ ID NO: 9173 - DNA, 21 bp, Homo sapiens
gaggaagaaatgagtgaagat

SEQ ID NO: 9174 - RNA, 21 nt, RNAi
ggaagaaaugagugaagauuu

SEQ ID NO: 9175 - RNA, 21 nt, RNAi
uuccuucuuuacucacuucua

SEQ ID NO: 9176 - DNA, 21 bp, Homo sapiens
gaagaaatgagtgaagatgaa

SEQ ID NO: 9177 - RNA, 21 nt, RNAi
agaaaugagugaagaugaauu

SEQ ID NO: 9178 - RNA, 21 nt, RNAi
uuucuuuacucacuucuacuu

SEQ ID NO: 9179 - DNA, 21 bp, Homo sapiens
gaaatgagtgaagatgaagaa

SEQ ID NO: 9180 - RNA, 21 nt, RNAi
aaugagugaagaugaagaauu

SEQ ID NO: 9181 - RNA, 21 nt, RNAi
uuuuacucacuucuacuucuu

SEQ ID NO: 9182 - DNA, 21 bp, Homo sapiens
gagtgaagatgaagaacgaga

SEQ ID NO: 9183 - RNA, 21 nt, RNAi
gugaagaugaagaacgagauu

SEQ ID NO: 9184 - RNA, 21 nt, RNAi
uucacuucuacuucuugcucu

SEQ ID NO: 9185 - DNA, 21 bp, Homo sapiens
gagtcacggttcgaccgagat

SEQ ID NO: 9186 - RNA, 21 nt, RNAi
gucacgguucgaccgagauuu

SEQ ID NO: 9187 - RNA, 21 nt, RNAi
uucagugccaagcuggcucua

SEQ ID NO: 9188 - DNA, 21 bp, Homo sapiens
gagagtgaagaagcagaggaa

SEQ ID NO: 9189 - RNA, 21 nt, RNAi
gagugaagaagcagaggaauu

SEQ ID NO: 9190 - RNA, 21 nt, RNAi
uucucacuucuucgucuccuu

SEQ ID NO: 9191 - DNA, 21 bp, Homo sapiens
gagtgaagaagcagaggaaga

SEQ ID NO: 9192 - RNA, 21 nt, RNAi
gugaagaagcagaggaagauu

SEQ ID NO: 9193 - RNA, 21 nt, RNAi
uucacuucuucgucuccuucu

SEQ ID NO: 9194 - DNA, 21 bp, Homo sapiens
gaagaagcagaggaagaagtg

SEQ ID NO: 9195 - RNA, 21 nt, RNAi
agaagcagaggaagaaguguu

SEQ ID NO: 9196 - RNA, 21 nt, RNAi
uuucuucgucuccuucuucac

SEQ ID NO: 9197 - DNA, 21 bp, Homo sapiens
gagcgtcgaggagttccagtg

SEQ ID NO: 9198 - RNA, 21 nt, RNAi
gcgucgaggaguuccaguguu

SEQ ID NO: 9199 - RNA, 21 nt, RNAi
uucgcagcuccucaaggucac

SEQ ID NO: 9200 - DNA, 21 bp, Homo sapiens
gaggagttccagtgcctgaac

SEQ ID NO: 9201 - RNA, 21 nt, RNAi
ggaguuccagugccugaacuu

SEQ ID NO: 9202 - RNA, 21 nt, RNAi
uuccucaaggucacggacuug

SEQ ID NO: 9203 - DNA, 21 bp, Homo sapiens
gagttccagtgcctgaacagg

SEQ ID NO: 9204 - RNA, 21 nt, RNAi
guuccagugccugaacagguu

SEQ ID NO: 9205 - RNA, 21 nt, RNAi
uucaaggucacggacuugucc

SEQ ID NO: 9206 - DNA, 21 bp, Homo sapiens
gatgaaattgtggctctaaag

SEQ ID NO: 9207 - RNA, 21 nt, RNAi
ugaaauuguggcucuaaaguu

SEQ ID NO: 9208 - RNA, 21 nt, RNAi
uuacuuuaacaccgagauuuc

SEQ ID NO: 9209 - DNA, 21 bp, Homo sapiens
gaaattgtggctctaaagcgg

SEQ ID NO: 9210 - RNA, 21 nt, RNAi
aauuguggcucuaaagcgguu

SEQ ID NO: 9211 - RNA, 21 nt, RNAi
uuuuaacaccgagauuucgcc

SEQ ID NO: 9212 - DNA, 21 bp, Homo sapiens
gaagatggagaaggagaagga

SEQ ID NO: 9213 - RNA, 21 nt, RNAi
agauggagaaggagaaggauu

SEQ ID NO: 9214 - RNA, 21 nt, RNAi
uuucuaccucuuccucuuccu

SEQ ID NO: 9215 - DNA, 21 bp, Homo sapiens
gagatcaacaccatcctcaag

SEQ ID NO: 9216 - RNA, 21 nt, RNAi
gaucaacaccauccucaaguu

SEQ ID NO: 9217 - RNA, 21 nt, RNAi
uucuaguugugguaggaguuc

SEQ ID NO: 9218 - DNA, 21 bp, Homo sapiens
gatcaacaccatcctcaaggc

SEQ ID NO: 9219 - RNA, 21 nt, RNAi
ucaacaccauccucaaggcuu

SEQ ID NO: 9220 - RNA, 21 nt, RNAi
uuaguugugguaggaguuccg

SEQ ID NO: 9221 - DNA, 21 bp, Homo sapiens
gacaagatctacatcgtgatg

SEQ ID NO: 9222 - RNA, 21 nt, RNAi
caagaucuacaucgugauguu

SEQ ID NO: 9223 - RNA, 21 nt, RNAi
uuguucuagauguagcacuac

SEQ ID NO: 9224 - DNA, 21 bp, Homo sapiens
gatctacatcgtgatgaacta

SEQ ID NO: 9225 - RNA, 21 nt, RNAi
ucuacaucgugaugaacuauu

SEQ ID NO: 9226 - RNA, 21 nt, RNAi
uuagauguagcacuacuugau

SEQ ID NO: 9227 - DNA, 21 bp, Homo sapiens
gatgaactatgtggagcacga

SEQ ID NO: 9228 - RNA, 21 nt, RNAi
ugaacuauguggagcacgauu

SEQ ID NO: 9229 - RNA, 21 nt, RNAi
uuacuugauacaccucgugcu

SEQ ID NO: 9230 - DNA, 21 bp, Homo sapiens
gaactatgtggagcacgacct

SEQ ID NO: 9231 - RNA, 21 nt, RNAi
acuauguggagcacgaccuuu

SEQ ID NO: 9232 - RNA, 21 nt, RNAi
uuugauacaccucgugcugga

SEQ ID NO: 9233 - DNA, 21 bp, Homo sapiens
gagcacgacctcaagagcctg

SEQ ID NO: 9234 - RNA, 21 nt, RNAi
gcacgaccucaagagccuguu

SEQ ID NO: 9235 - RNA, 21 nt, RNAi
uucgugcuggaguucucggac

SEQ ID NO: 9236 - DNA, 21 bp, Homo sapiens
gacctcaagagcctgatggag

SEQ ID NO: 9237 - RNA, 21 nt, RNAi
ccucaagagccugauggaguu

SEQ ID NO: 9238 - RNA, 21 nt, RNAi
uuggaguucucggacuaccuc

SEQ ID NO: 9239 - DNA, 21 bp, Homo sapiens
gagcctgatggagaccatgaa

SEQ ID NO: 9240 - RNA, 21 nt, RNAi
gccugauggagaccaugaauu

SEQ ID NO: 9241 - RNA, 21 nt, RNAi
uucggacuaccucugguacuu

SEQ ID NO: 9242 - DNA, 21 bp, Homo sapiens
gatggagaccatgaaacagcc

SEQ ID NO: 9243 - RNA, 21 nt, RNAi
uggagaccaugaaacagccuu

SEQ ID NO: 9244 - RNA, 21 nt, RNAi
uuaccucugguacuuugucgg

SEQ ID NO: 9245 - DNA, 21 bp, Homo sapiens
gatgatccagctgctgcgtgg

SEQ ID NO: 9246 - RNA, 21 nt, RNAi
ugauccagcugcugcgugguu

SEQ ID NO: 9247 - RNA, 21 nt, RNAi
uuacuaggucgacgacgcacc

SEQ ID NO: 9248 - DNA, 21 bp, Homo sapiens
gaaacacctgcacgacaactg

SEQ ID NO: 9249 - RNA, 21 nt, RNAi
aacaccugcacgacaacuguu

SEQ ID NO: 9250 - RNA, 21 nt, RNAi
uuuuguggacgugcuguugac

SEQ ID NO: 9251 - DNA, 21 bp, Homo sapiens
gacaactggatcctgcaccgt

SEQ ID NO: 9252 - RNA, 21 nt, RNAi
caacuggauccugcaccguuu

SEQ ID NO: 9253 - RNA, 21 nt, RNAi
uuguugaccuaggacguggca

SEQ ID NO: 9254 - DNA, 21 bp, Homo sapiens
gatcctgcaccgtgacctcaa

SEQ ID NO: 9255 - RNA, 21 nt, RNAi
uccugcaccgugaccucaauu

SEQ ID NO: 9256 - RNA, 21 nt, RNAi
uuaggacguggcacuggaguu

SEQ ID NO: 9257 - DNA, 21 bp, Homo sapiens
gacctcaagacgtccaacctg

SEQ ID NO: 9258 - RNA, 21 nt, RNAi
ccucaagacguccaaccuguu

SEQ ID NO: 9259 - RNA, 21 nt, RNAi
uuggaguucugcagguuggac

SEQ ID NO: 9260 - DNA, 21 bp, Homo sapiens
gacgtccaacctgctgctgag

SEQ ID NO: 9261 - RNA, 21 nt, RNAi
cguccaaccugcugcugaguu

SEQ ID NO: 9262 - RNA, 21 nt, RNAi
uugcagguuggacgacgacuc

SEQ ID NO: 9263 - DNA, 21 bp, Homo sapiens
gagctgctgcttggtgccaag

SEQ ID NO: 9264 - RNA, 21 nt, RNAi
gcugcugcuuggugccaaguu

SEQ ID NO: 9265 - RNA, 21 nt, RNAi
uucgacgacgaaccacgguuc

SEQ ID NO: 9266 - DNA, 21 bp, Homo sapiens
gaatactccacggccgtggac

SEQ ID NO: 9267 - RNA, 21 nt, RNAi
auacuccacggccguggacuu

SEQ ID NO: 9268 - RNA, 21 nt, RNAi
uuuaugaggugccggcaccug

SEQ ID NO: 9269 - DNA, 21 bp, Homo sapiens
gagctgctgactcagaagcct

SEQ ID NO: 9270 - RNA, 21 nt, RNAi
gcugcugacucagaagccuuu

SEQ ID NO: 9271 - RNA, 21 nt, RNAi
uucgacgacugagucuucgga

SEQ ID NO: 9272 - DNA, 21 bp, Homo sapiens
gaagtcagaaatcgatcagat

SEQ ID NO: 9273 - RNA, 21 nt, RNAi
agucagaaaucgaucagauuu

SEQ ID NO: 9274 - RNA, 21 nt, RNAi
uuucagucuuuagcuagucua

SEQ ID NO: 9275 - DNA, 21 bp, Homo sapiens
gaaatcgatcagatcaacaag

SEQ ID NO: 9276 - RNA, 21 nt, RNAi
aaucgaucagaucaacaaguu

SEQ ID NO: 9277 - RNA, 21 nt, RNAi
uuuuagcuagucuaguuguuc

SEQ ID NO: 9278 - DNA, 21 bp, Homo sapiens
gatcagatcaacaaggtgttc

SEQ ID NO: 9279 - RNA, 21 nt, RNAi
ucagaucaacaagguguucuu

SEQ ID NO: 9280 - RNA, 21 nt, RNAi
uuagucuaguuguuccacaag

SEQ ID NO: 9281 - DNA, 21 bp, Homo sapiens
gatcaacaaggtgttcaagga

SEQ ID NO: 9282 - RNA, 21 nt, RNAi
ucaacaagguguucaaggauu

SEQ ID NO: 9283 - RNA, 21 nt, RNAi
uuaguuguuccacaaguuccu

SEQ ID NO: 9284 - DNA, 21 bp, Homo sapiens
gaagatgaccttcagcgagca

SEQ ID NO: 9285 - RNA, 21 nt, RNAi
agaugaccuucagcgagcauu

SEQ ID NO: 9286 - RNA, 21 nt, RNAi
uuucuacuggaagucgcucgu

SEQ ID NO: 9287 - DNA, 21 bp, Homo sapiens
gacctcatgaacaagttcctg

SEQ ID NO: 9288 - RNA, 21 nt, RNAi
ccucaugaacaaguuccuguu

SEQ ID NO: 9289 - RNA, 21 nt, RNAi
uuggaguacuuguucaaggac

SEQ ID NO: 9290 - DNA, 21 bp, Homo sapiens
gaacaagttcctgacctactt

SEQ ID NO: 9291 - RNA, 21 nt, RNAi
acaaguuccugaccuacuuuu

SEQ ID NO: 9292 - RNA, 21 nt, RNAi
uuuguucaaggacuggaugaa

SEQ ID NO: 9293 - DNA, 21 bp, Homo sapiens
gaggaggatcagcgctgagga

SEQ ID NO: 9294 - RNA, 21 nt, RNAi
ggaggaucagcgcugaggauu

SEQ ID NO: 9295 - RNA, 21 nt, RNAi
uuccuccuagucgcgacuccu

SEQ ID NO: 9296 - DNA, 21 bp, Homo sapiens
gaggacggcctcaagcatgag

SEQ ID NO: 9297 - RNA, 21 nt, RNAi
ggacggccucaagcaugaguu

SEQ ID NO: 9298 - RNA, 21 nt, RNAi
uuccugccggaguucguacuc

SEQ ID NO: 9299 - DNA, 21 bp, Homo sapiens
gacggcctcaagcatgagtat

SEQ ID NO: 9300 - RNA, 21 nt, RNAi
cggccucaagcaugaguauuu

SEQ ID NO: 9301 - RNA, 21 nt, RNAi
uugccggaguucguacucaua

SEQ ID NO: 9302 - DNA, 21 bp, Homo sapiens
gagcgagcagcagcgtgtgaa

SEQ ID NO: 9303 - RNA, 21 nt, RNAi
gcgagcagcagcgugugaauu

SEQ ID NO: 9304 - RNA, 21 nt, RNAi
uucgcucgucgucgcacacuu

SEQ ID NO: 9305 - DNA, 21 bp, Homo sapiens
gacgacgacctgaaggagacg

SEQ ID NO: 9306 - RNA, 21 nt, RNAi
cgacgaccugaaggagacguu

SEQ ID NO: 9307 - RNA, 21 nt, RNAi
uugcugcuggacuuccucugc

SEQ ID NO: 9308 - DNA, 21 bp, Homo sapiens
tacaggaagtgacgatacttt

SEQ ID NO: 9309 - RNA, 21 nt, RNAi
caggaagugacgauacuuuuu

SEQ ID NO: 9310 - RNA, 21 nt, RNAi
uuguccuucacugcuaugaaa

SEQ ID NO: 9311 - DNA, 21 bp, Homo sapiens
tatagaagagaagactctatg

SEQ ID NO: 9312 - RNA, 21 nt, RNAi
uagaagagaagacucuauguu

SEQ ID NO: 9313 - RNA, 21 nt, RNAi
uuaucuucucuucugagauac

SEQ ID NO: 9314 - DNA, 21 bp, Homo sapiens
tagaagagaagactctatgga

SEQ ID NO: 9315 - RNA, 21 nt, RNAi
gaagagaagacucuauggauu

SEQ ID NO: 9316 - RNA, 21 nt, RNAi
uucuucucuucugagauaccu

SEQ ID NO: 9317 - DNA, 21 bp, Homo sapiens
tatggaagacagaggagaaga

SEQ ID NO: 9318 - RNA, 21 nt, RNAi
uggaagacagaggagaagauu

SEQ ID NO: 9319 - RNA, 21 nt, RNAi
uuaccuucugucuccucuucu

SEQ ID NO: 9320 - DNA, 21 bp, Homo sapiens
taggcatcgtagccattcagc

SEQ ID NO: 9321 - RNA, 21 nt, RNAi
ggcaucguagccauucagcuu

SEQ ID NO: 9322 - RNA, 21 nt, RNAi
uuccguagcaucgguaagucg

SEQ ID NO: 9323 - DNA, 21 bp, Homo sapiens
tacagcgacaaagtgaaagcc

SEQ ID NO: 9324 - RNA, 21 nt, RNAi
cagcgacaaagugaaagccuu

SEQ ID NO: 9325 - RNA, 21 nt, RNAi
uugucgcuguuucacuuucgg

SEQ ID NO: 9326 - DNA, 21 bp, Homo sapiens
tacaggacatcagcgacagcg

SEQ ID NO: 9327 - RNA, 21 nt, RNAi
caggacaucagcgacagcguu

SEQ ID NO: 9328 - RNA, 21 nt, RNAi
uuguccuguagucgcugucgc

SEQ ID NO: 9329 - DNA, 21 bp, Homo sapiens
taagtgaggaagaaatgagtg

SEQ ID NO: 9330 - RNA, 21 nt, RNAi
agugaggaagaaaugaguguu

SEQ ID NO: 9331 - RNA, 21 nt, RNAi
uuucacuccuucuuuacucac

SEQ ID NO: 9332 - DNA, 21 bp, Homo sapiens
tatggagtggtctacagagca

SEQ ID NO: 9333 - RNA, 21 nt, RNAi
uggaguggucuacagagcauu

SEQ ID NO: 9334 - RNA, 21 nt, RNAi
uuaccucaccagaugucucgu

SEQ ID NO: 9335 - DNA, 21 bp, Homo sapiens
taaagcggctgaagatggaga

SEQ ID NO: 9336 - RNA, 21 nt, RNAi
aagcggcugaagauggagauu

SEQ ID NO: 9337 - RNA, 21 nt, RNAi
uuuucgccgacuucuaccucu

SEQ ID NO: 9338 - DNA, 21 bp, Homo sapiens
tacatcgtgatgaactatgtg

SEQ ID NO: 9339 - RNA, 21 nt, RNAi
caucgugaugaacuauguguu

SEQ ID NO: 9340 - RNA, 21 nt, RNAi
uuguagcacuacuugauacac

SEQ ID NO: 9341 - DNA, 21 bp, Homo sapiens
tatgtggagcacgacctcaag

SEQ ID NO: 9342 - RNA, 21 nt, RNAi
uguggagcacgaccucaaguu

SEQ ID NO: 9343 - RNA, 21 nt, RNAi
uuacaccucgugcuggaguuc

SEQ ID NO: 9344 - DNA, 21 bp, Homo sapiens
tactccacggccgtggacatg

SEQ ID NO: 9345 - RNA, 21 nt, RNAi
cuccacggccguggacauguu

SEQ ID NO: 9346 - RNA, 21 nt, RNAi
uugaggugccggcaccuguac

SEQ ID NO: 9347 - DNA, 21 bp, Homo sapiens
tacaacaacctccgcaagcgc

SEQ ID NO: 9348 - RNA, 21 nt, RNAi
caacaaccuccgcaagcgcuu

SEQ ID NO: 9349 - RNA, 21 nt, RNAi
uuguuguuggaggcguucgcg

SEQ ID NO: 9350 - DNA, 21 bp, Homo sapiens
aattggcttgtgatggaggcg

SEQ ID NO: 9351 - RNA, 21 nt, RNAi
uuggcuugugauggaggcguu

SEQ ID NO: 9352 - RNA, 21 nt, RNAi
uuaaccgaacacuaccuccgc

SEQ ID NO: 9353 - DNA, 21 bp, Homo sapiens
aagctttatgaagctgtacca

SEQ ID NO: 9354 - RNA, 21 nt, RNAi
gcuuuaugaagcuguaccauu

SEQ ID NO: 9355 - RNA, 21 nt, RNAi
uucgaaauacuucgacauggu

SEQ ID NO: 9356 - DNA, 21 bp, Homo sapiens
aagctgtaccacagcttagta

SEQ ID NO: 9357 - RNA, 21 nt, RNAi
gcuguaccacagcuuaguauu

SEQ ID NO: 9358 - RNA, 21 nt, RNAi
uucgacauggugucgaaucau

SEQ ID NO: 9359 - DNA, 21 bp, Homo sapiens
aatgtgtttaagattgaggac

SEQ ID NO: 9360 - RNA, 21 nt, RNAi
uguguuuaagauugaggacuu

SEQ ID NO: 9361 - RNA, 21 nt, RNAi
uuacacaaauucuaacuccug

SEQ ID NO: 9362 - DNA, 21 bp, Homo sapiens
aaattggagaaggcactttca

SEQ ID NO: 9363 - RNA, 21 nt, RNAi
auuggagaaggcacuuucauu

SEQ ID NO: 9364 - RNA, 21 nt, RNAi
uuuaaccucuuccgugaaagu

SEQ ID NO: 9365 - DNA, 21 bp, Homo sapiens
aattggagaaggcactttcag

SEQ ID NO: 9366 - RNA, 21 nt, RNAi
uuggagaaggcacuuucaguu

SEQ ID NO: 9367 - RNA, 21 nt, RNAi
uuaaccucuuccgugaaaguc

SEQ ID NO: 9368 - DNA, 21 bp, Homo sapiens
aaggcactttcagctctgttt

SEQ ID NO: 9369 - RNA, 21 nt, RNAi
ggcacuuucagcucuguuuuu

SEQ ID NO: 9370 - RNA, 21 nt, RNAi
uuccgugaaagucgagacaaa

SEQ ID NO: 9371 - DNA, 21 bp, Homo sapiens
aaacacttgattccaacaagt

SEQ ID NO: 9372 - RNA, 21 nt, RNAi
acacuugauuccaacaaguuu

SEQ ID NO: 9373 - RNA, 21 nt, RNAi
uuugugaacuaagguuguuca

SEQ ID NO: 9374 - DNA, 21 bp, Homo sapiens
aacacttgattccaacaagtc

SEQ ID NO: 9375 - RNA, 21 nt, RNAi
cacuugauuccaacaagucuu

SEQ ID NO: 9376 - RNA, 21 nt, RNAi
uugugaacuaagguuguucag

SEQ ID NO: 9377 - DNA, 21 bp, Homo sapiens
aagtcatcctataagaattgc

SEQ ID NO: 9378 - RNA, 21 nt, RNAi
gucauccuauaagaauugcuu

SEQ ID NO: 9379 - RNA, 21 nt, RNAi
uucaguaggauauucuuaacg

SEQ ID NO: 9380 - DNA, 21 bp, Homo sapiens
aagaattgcagctgaacttca

SEQ ID NO: 9381 - RNA, 21 nt, RNAi
gaauugcagcugaacuucauu

SEQ ID NO: 9382 - RNA, 21 nt, RNAi
uucuuaacgucgacuugaagu

SEQ ID NO: 9383 - DNA, 21 bp, Homo sapiens
aattgcagctgaacttcagtg

SEQ ID NO: 9384 - RNA, 21 nt, RNAi
uugcagcugaacuucaguguu

SEQ ID NO: 9385 - RNA, 21 nt, RNAi
uuaacgucgacuugaagucac

SEQ ID NO: 9386 - DNA, 21 bp, Homo sapiens
aacttcagtgcctaacagtgg

SEQ ID NO: 9387 - RNA, 21 nt, RNAi
cuucagugccuaacagugguu

SEQ ID NO: 9388 - RNA, 21 nt, RNAi
uugaagucacggauugucacc

SEQ ID NO: 9389 - DNA, 21 bp, Homo sapiens
aatactgctttaggaagaatg

SEQ ID NO: 9390 - RNA, 21 nt, RNAi
uacugcuuuaggaagaauguu

SEQ ID NO: 9391 - RNA, 21 nt, RNAi
uuaugacgaaauccuucuuac

SEQ ID NO: 9392 - DNA, 21 bp, Homo sapiens
aaagctttgaaacgcattcat

SEQ ID NO: 9393 - RNA, 21 nt, RNAi
agcuuugaaacgcauucauuu

SEQ ID NO: 9394 - RNA, 21 nt, RNAi
uuucgaaacuuugcguaagua

SEQ ID NO: 9395 - DNA, 21 bp, Homo sapiens
aagctttgaaacgcattcatc

SEQ ID NO: 9396 - RNA, 21 nt, RNAi
gcuuugaaacgcauucaucuu

SEQ ID NO: 9397 - RNA, 21 nt, RNAi
uucgaaacuuugcguaaguag

SEQ ID NO: 9398 - DNA, 21 bp, Homo sapiens
aaacgcattcatcagtttggt

SEQ ID NO: 9399 - RNA, 21 nt, RNAi
acgcauucaucaguuugguuu

SEQ ID NO: 9400 - RNA, 21 nt, RNAi
uuugcguaaguagucaaacca

SEQ ID NO: 9401 - DNA, 21 bp, Homo sapiens
aacgcattcatcagtttggta

SEQ ID NO: 9402 - RNA, 21 nt, RNAi
cgcauucaucaguuugguauu

SEQ ID NO: 9403 - RNA, 21 nt, RNAi
uugcguaaguagucaaaccau

SEQ ID NO: 9404 - DNA, 21 bp, Homo sapiens
aaagtatgccttggtagactt

SEQ ID NO: 9405 - RNA, 21 nt, RNAi
aguaugccuugguagacuuuu

SEQ ID NO: 9406 - RNA, 21 nt, RNAi
uuucauacggaaccaucugaa

SEQ ID NO: 9407 - DNA, 21 bp, Homo sapiens
aagtatgccttggtagacttt

SEQ ID NO: 9408 - RNA, 21 nt, RNAi
guaugccuugguagacuuuuu

SEQ ID NO: 9409 - RNA, 21 nt, RNAi
uucauacggaaccaucugaaa

SEQ ID NO: 9410 - DNA, 21 bp, Homo sapiens
aaatttgtccagtctgaagct

SEQ ID NO: 9411 - RNA, 21 nt, RNAi
auuuguccagucugaagcuuu

SEQ ID NO: 9412 - RNA, 21 nt, RNAi
uuuaaacaggucagacuucga

SEQ ID NO: 9413 - DNA, 21 bp, Homo sapiens
aatttgtccagtctgaagctc

SEQ ID NO: 9414 - RNA, 21 nt, RNAi
uuuguccagucugaagcucuu

SEQ ID NO: 9415 - RNA, 21 nt, RNAi
uuaaacaggucagacuucgag

SEQ ID NO: 9416 - DNA, 21 bp, Homo sapiens
aagctcagcaggaaaggtgtt

SEQ ID NO: 9417 - RNA, 21 nt, RNAi
gcucagcaggaaagguguuuu

SEQ ID NO: 9418 - RNA, 21 nt, RNAi
uucgagucguccuuuccacaa

SEQ ID NO: 9419 - DNA, 21 bp, Homo sapiens
aatcacaggaaacaagattcc

SEQ ID NO: 9420 - RNA, 21 nt, RNAi
ucacaggaaacaagauuccuu

SEQ ID NO: 9421 - RNA, 21 nt, RNAi
uuaguguccuuuguucuaagg

SEQ ID NO: 9422 - DNA, 21 bp, Homo sapiens
aaacaagattccactgagtgg

SEQ ID NO: 9423 - RNA, 21 nt, RNAi
acaagauuccacugagugguu

SEQ ID NO: 9424 - RNA, 21 nt, RNAi
uuuguucuaaggugacucacc

SEQ ID NO: 9425 - DNA, 21 bp, Homo sapiens
aacaagattccactgagtggc

SEQ ID NO: 9426 - RNA, 21 nt, RNAi
caagauuccacugaguggcuu

SEQ ID NO: 9427 - RNA, 21 nt, RNAi
uuguucuaaggugacucaccg

SEQ ID NO: 9428 - DNA, 21 bp, Homo sapiens
aaggagctggatcagcagtcc

SEQ ID NO: 9429 - RNA, 21 nt, RNAi
ggagcuggaucagcaguccuu

SEQ ID NO: 9430 - RNA, 21 nt, RNAi
uuccucgaccuagucgucagg

SEQ ID NO: 9431 - DNA, 21 bp, Homo sapiens
aatttcaatatacacagctcc

SEQ ID NO: 9432 - RNA, 21 nt, RNAi
uuucaauauacacagcuccuu

SEQ ID NO: 9433 - RNA, 21 nt, RNAi
uuaaaguuauaugugucgagg

SEQ ID NO: 9434 - DNA, 21 bp, Homo sapiens
aatatacacagctccatttca

SEQ ID NO: 9435 - RNA, 21 nt, RNAi
uauacacagcuccauuucauu

SEQ ID NO: 9436 - RNA, 21 nt, RNAi
uuauaugugucgagguaaagu

SEQ ID NO: 9437 - DNA, 21 bp, Homo sapiens
aaactcatgaagcagtcaaag

SEQ ID NO: 9438 - RNA, 21 nt, RNAi
acucaugaagcagucaaaguu

SEQ ID NO: 9439 - RNA, 21 nt, RNAi
uuugaguacuucgucaguuuc

SEQ ID NO: 9440 - DNA, 21 bp, Homo sapiens
aactcatgaagcagtcaaaga

SEQ ID NO: 9441 - RNA, 21 nt, RNAi
cucaugaagcagucaaagauu

SEQ ID NO: 9442 - RNA, 21 nt, RNAi
uugaguacuucgucaguuucu

SEQ ID NO: 9443 - DNA, 21 bp, Homo sapiens
aagcagtcaaagactgtggat

SEQ ID NO: 9444 - RNA, 21 nt, RNAi
gcagucaaagacuguggauuu

SEQ ID NO: 9445 - RNA, 21 nt, RNAi
uucgucaguuucugacaccua

SEQ ID NO: 9446 - DNA, 21 bp, Homo sapiens
aaagactgtggatgtactgtc

SEQ ID NO: 9447 - RNA, 21 nt, RNAi
agacuguggauguacugucuu

SEQ ID NO: 9448 - RNA, 21 nt, RNAi
uuucugacaccuacaugacag

SEQ ID NO: 9449 - DNA, 21 bp, Homo sapiens
aagactgtggatgtactgtct

SEQ ID NO: 9450 - RNA, 21 nt, RNAi
gacuguggauguacugucuuu

SEQ ID NO: 9451 - RNA, 21 nt, RNAi
uucugacaccuacaugacaga

SEQ ID NO: 9452 - DNA, 21 bp, Homo sapiens
aaagaaggctatttctacgaa

SEQ ID NO: 9453 - RNA, 21 nt, RNAi
agaaggcuauuucuacgaauu

SEQ ID NO: 9454 - RNA, 21 nt, RNAi
uuucuuccgauaaagaugcuu

SEQ ID NO: 9455 - DNA, 21 bp, Homo sapiens
aagaaggctatttctacgaaa

SEQ ID NO: 9456 - RNA, 21 nt, RNAi
gaaggcuauuucuacgaaauu

SEQ ID NO: 9457 - RNA, 21 nt, RNAi
uucuuccgauaaagaugcuuu

SEQ ID NO: 9458 - DNA, 21 bp, Homo sapiens
aaggctatttctacgaaagtt

SEQ ID NO: 9459 - RNA, 21 nt, RNAi
ggcuauuucuacgaaaguuuu

SEQ ID NO: 9460 - RNA, 21 nt, RNAi
uuccgauaaagaugcuuucaa

SEQ ID NO: 9461 - DNA, 21 bp, Homo sapiens
aaagttatgaatagtgctgtg

SEQ ID NO: 9462 - RNA, 21 nt, RNAi
aguuaugaauagugcuguguu

SEQ ID NO: 9463 - RNA, 21 nt, RNAi
uuucaauacuuaucacgacac

SEQ ID NO: 9464 - DNA, 21 bp, Homo sapiens
aagttatgaatagtgctgtga

SEQ ID NO: 9465 - RNA, 21 nt, RNAi
guuaugaauagugcugugauu

SEQ ID NO: 9466 - RNA, 21 nt, RNAi
uucaauacuuaucacgacacu

SEQ ID NO: 9467 - DNA, 21 bp, Homo sapiens
aatagtgctgtgatgaggaaa

SEQ ID NO: 9468 - RNA, 21 nt, RNAi
uagugcugugaugaggaaauu

SEQ ID NO: 9469 - RNA, 21 nt, RNAi
uuaucacgacacuacuccuuu

SEQ ID NO: 9470 - DNA, 21 bp, Homo sapiens
aatcaaactacagcaattgac

SEQ ID NO: 9471 - RNA, 21 nt, RNAi
ucaaacuacagcaauugacuu

SEQ ID NO: 9472 - RNA, 21 nt, RNAi
uuaguuugaugucguuaacug

SEQ ID NO: 9473 - DNA, 21 bp, Homo sapiens
aaactacagcaattgacatgt

SEQ ID NO: 9474 - RNA, 21 nt, RNAi
acuacagcaauugacauguuu

SEQ ID NO: 9475 - RNA, 21 nt, RNAi
uuugaugucguuaacuguaca

SEQ ID NO: 9476 - DNA, 21 bp, Homo sapiens
aactacagcaattgacatgtg

SEQ ID NO: 9477 - RNA, 21 nt, RNAi
cuacagcaauugacauguguu

SEQ ID NO: 9478 - RNA, 21 nt, RNAi
uugaugucguuaacuguacac

SEQ ID NO: 9479 - DNA, 21 bp, Homo sapiens
aattgacatgtggtctgcagg

SEQ ID NO: 9480 - RNA, 21 nt, RNAi
uugacauguggucugcagguu

SEQ ID NO: 9481 - RNA, 21 nt, RNAi
uuaacuguacaccagacgucc

SEQ ID NO: 9482 - DNA, 21 bp, Homo sapiens
aagcaagtgatgatttaactg

SEQ ID NO: 9483 - RNA, 21 nt, RNAi
gcaagugaugauuuaacuguu

SEQ ID NO: 9484 - RNA, 21 nt, RNAi
uucguucacuacuaaauugac

SEQ ID NO: 9485 - DNA, 21 bp, Homo sapiens
aaagaagttccagcacaagac

SEQ ID NO: 9486 - RNA, 21 nt, RNAi
agaaguuccagcacaagacuu

SEQ ID NO: 9487 - RNA, 21 nt, RNAi
uuucuucaaggucguguucug

SEQ ID NO: 9488 - DNA, 21 bp, Homo sapiens
aagaagttccagcacaagact

SEQ ID NO: 9489 - RNA, 21 nt, RNAi
gaaguuccagcacaagacuuu

SEQ ID NO: 9490 - RNA, 21 nt, RNAi
uucuucaaggucguguucuga

SEQ ID NO: 9491 - DNA, 21 bp, Homo sapiens
aagttccagcacaagacttga

SEQ ID NO: 9492 - RNA, 21 nt, RNAi
guuccagcacaagacuugauu

SEQ ID NO: 9493 - RNA, 21 nt, RNAi
uucaaggucguguucugaacu

SEQ ID NO: 9494 - DNA, 21 bp, Homo sapiens
aaactctgtgagagactcagg

SEQ ID NO: 9495 - RNA, 21 nt, RNAi
acucugugagagacucagguu

SEQ ID NO: 9496 - RNA, 21 nt, RNAi
uuugagacacucucugagucc

SEQ ID NO: 9497 - DNA, 21 bp, Homo sapiens
aaccagctatttcagagaaga

SEQ ID NO: 9498 - RNA, 21 nt, RNAi
ccagcuauuucagagaagauu

SEQ ID NO: 9499 - RNA, 21 nt, RNAi
uuggucgauaaagucucuucu

SEQ ID NO: 9500 - DNA, 21 bp, Homo sapiens
aagactgaccataaagcttct

SEQ ID NO: 9501 - RNA, 21 nt, RNAi
gacugaccauaaagcuucuuu

SEQ ID NO: 9502 - RNA, 21 nt, RNAi
uucugacugguauuucgaaga

SEQ ID NO: 9503 - DNA, 21 bp, Homo sapiens
aaagcttcttgcctcgttcaa

SEQ ID NO: 9504 - RNA, 21 nt, RNAi
agcuucuugccucguucaauu

SEQ ID NO: 9505 - RNA, 21 nt, RNAi
uuucgaagaacggagcaaguu

SEQ ID NO: 9506 - DNA, 21 bp, Homo sapiens
aagcttcttgcctcgttcaaa

SEQ ID NO: 9507 - RNA, 21 nt, RNAi
gcuucuugccucguucaaauu

SEQ ID NO: 9508 - RNA, 21 nt, RNAi
uucgaagaacggagcaaguuu

SEQ ID NO: 9509 - DNA, 21 bp, Homo sapiens
aaacacctccaggacaatact

SEQ ID NO: 9510 - RNA, 21 nt, RNAi
acaccuccaggacaauacuuu

SEQ ID NO: 9511 - RNA, 21 nt, RNAi
uuuguggagguccuguuauga

SEQ ID NO: 9512 - DNA, 21 bp, Homo sapiens
aacacctccaggacaatactc

SEQ ID NO: 9513 - RNA, 21 nt, RNAi
caccuccaggacaauacucuu

SEQ ID NO: 9514 - RNA, 21 nt, RNAi
uuguggagguccuguuaugag

SEQ ID NO: 9515 - DNA, 21 bp, Homo sapiens
aataccaatttagaaggctgg

SEQ ID NO: 9516 - RNA, 21 nt, RNAi
uaccaauuuagaaggcugguu

SEQ ID NO: 9517 - RNA, 21 nt, RNAi
uuaugguuaaaucuuccgacc

SEQ ID NO: 9518 - DNA, 21 bp, Homo sapiens
aatttagaaggctggaatgag

SEQ ID NO: 9519 - RNA, 21 nt, RNAi
uuuagaaggcuggaaugaguu

SEQ ID NO: 9520 - RNA, 21 nt, RNAi
uuaaaucuuccgaccuuacuc

SEQ ID NO: 9521 - DNA, 21 bp, Homo sapiens
aaggctggaatgaggtacctg

SEQ ID NO: 9522 - RNA, 21 nt, RNAi
ggcuggaaugagguaccuguu

SEQ ID NO: 9523 - RNA, 21 nt, RNAi
uuccgaccuuacuccauggac

SEQ ID NO: 9524 - DNA, 21 bp, Homo sapiens
aatgaggtacctgatgaagct

SEQ ID NO: 9525 - RNA, 21 nt, RNAi
ugagguaccugaugaagcuuu

SEQ ID NO: 9526 - RNA, 21 nt, RNAi
uuacuccauggacuacuucga

SEQ ID NO: 9527 - DNA, 21 bp, Homo sapiens
aagcttatgacctgcttgata

SEQ ID NO: 9528 - RNA, 21 nt, RNAi
gcuuaugaccugcuugauauu

SEQ ID NO: 9529 - RNA, 21 nt, RNAi
uucgaauacuggacgaacuau

SEQ ID NO: 9530 - DNA, 21 bp, Homo sapiens
aacttctagatctaaatccag

SEQ ID NO: 9531 - RNA, 21 nt, RNAi
cuucuagaucuaaauccaguu

SEQ ID NO: 9532 - RNA, 21 nt, RNAi
uugaagaucuagauuuagguc

SEQ ID NO: 9533 - DNA, 21 bp, Homo sapiens
aaatccagcttcaagaataac

SEQ ID NO: 9534 - RNA, 21 nt, RNAi
auccagcuucaagaauaacuu

SEQ ID NO: 9535 - RNA, 21 nt, RNAi
uuuaggucgaaguucuuauug

SEQ ID NO: 9536 - DNA, 21 bp, Homo sapiens
aatccagcttcaagaataaca

SEQ ID NO: 9537 - RNA, 21 nt, RNAi
uccagcuucaagaauaacauu

SEQ ID NO: 9538 - RNA, 21 nt, RNAi
uuaggucgaaguucuuauugu

SEQ ID NO: 9539 - DNA, 21 bp, Homo sapiens
aagaataacagcagaagaagc

SEQ ID NO: 9540 - RNA, 21 nt, RNAi
gaauaacagcagaagaagcuu

SEQ ID NO: 9541 - RNA, 21 nt, RNAi
uucuuauugucgucuucuucg

SEQ ID NO: 9542 - DNA, 21 bp, Homo sapiens
aataacagcagaagaagcttt

SEQ ID NO: 9543 - RNA, 21 nt, RNAi
uaacagcagaagaagcuuuuu

SEQ ID NO: 9544 - RNA, 21 nt, RNAi
uuauugucgucuucuucgaaa

SEQ ID NO: 9545 - DNA, 21 bp, Homo sapiens
aacagcagaagaagctttgtt

SEQ ID NO: 9546 - RNA, 21 nt, RNAi
cagcagaagaagcuuuguuuu

SEQ ID NO: 9547 - RNA, 21 nt, RNAi
uugucgucuucuucgaaacaa

SEQ ID NO: 9548 - DNA, 21 bp, Homo sapiens
aagaagctttgttgcatccat

SEQ ID NO: 9549 - RNA, 21 nt, RNAi
gaagcuuuguugcauccauuu

SEQ ID NO: 9550 - RNA, 21 nt, RNAi
uucuucgaaacaacguaggua

SEQ ID NO: 9551 - DNA, 21 bp, Homo sapiens
aatagccacaagttcttgttt

SEQ ID NO: 9552 - RNA, 21 nt, RNAi
uagccacaaguucuuguuuuu

SEQ ID NO: 9553 - RNA, 21 nt, RNAi
uuaucgguguucaagaacaaa

SEQ ID NO: 9554 - DNA, 21 bp, Homo sapiens
aagttcttgtttagagaccag

SEQ ID NO: 9555 - RNA, 21 nt, RNAi
guucuuguuuagagaccaguu

SEQ ID NO: 9556 - RNA, 21 nt, RNAi
uucaagaacaaaucucugguc

SEQ ID NO: 9557 - DNA, 21 bp, Homo sapiens
aacaacatgatcttctttgag

SEQ ID NO: 9558 - RNA, 21 nt, RNAi
caacaugaucuucuuugaguu

SEQ ID NO: 9559 - RNA, 21 nt, RNAi
uuguuguacuagaagaaacuc

SEQ ID NO: 9560 - DNA, 21 bp, Homo sapiens
aattacctttcactgacatac

SEQ ID NO: 9561 - RNA, 21 nt, RNAi
uuaccuuucacugacauacuu

SEQ ID NO: 9562 - RNA, 21 nt, RNAi
uuaauggaaagugacuguaug

SEQ ID NO: 9563 - DNA, 21 bp, Homo sapiens
aaattaacagatgtgatgagg

SEQ ID NO: 9564 - RNA, 21 nt, RNAi
auuaacagaugugaugagguu

SEQ ID NO: 9565 - RNA, 21 nt, RNAi
uuuaauugucuacacuacucc

SEQ ID NO: 9566 - DNA, 21 bp, Homo sapiens
aattaacagatgtgatgagga

SEQ ID NO: 9567 - RNA, 21 nt, RNAi
uuaacagaugugaugaggauu

SEQ ID NO: 9568 - RNA, 21 nt, RNAi
uuaauugucuacacuacuccu

SEQ ID NO: 9569 - DNA, 21 bp, Homo sapiens
aacagatgtgatgaggattaa

SEQ ID NO: 9570 - RNA, 21 nt, RNAi
cagaugugaugaggauuaauu

SEQ ID NO: 9571 - RNA, 21 nt, RNAi
uugucuacacuacuccuaauu

SEQ ID NO: 9572 - DNA, 21 bp, Homo sapiens
aaactcaacctggtgctggtg

SEQ ID NO: 9573 - RNA, 21 nt, RNAi
acucaaccuggugcugguguu

SEQ ID NO: 9574 - RNA, 21 nt, RNAi
uuugaguuggaccacgaccac

SEQ ID NO: 9575 - DNA, 21 bp, Homo sapiens
aactcaacctggtgctggtgc

SEQ ID NO: 9576 - RNA, 21 nt, RNAi
cucaaccuggugcuggugcuu

SEQ ID NO: 9577 - RNA, 21 nt, RNAi
uugaguuggaccacgaccacg

SEQ ID NO: 9578 - DNA, 21 bp, Homo sapiens
aacctggtgctggtgctctta

SEQ ID NO: 9579 - RNA, 21 nt, RNAi
ccuggugcuggugcucuuauu

SEQ ID NO: 9580 - RNA, 21 nt, RNAi
uuggaccacgaccacgagaau

SEQ ID NO: 9581 - DNA, 21 bp, Homo sapiens
aaacaatgaggaaatgttggt

SEQ ID NO: 9582 - RNA, 21 nt, RNAi
acaaugaggaaauguugguuu

SEQ ID NO: 9583 - RNA, 21 nt, RNAi
uuuguuacuccuuuacaacca

SEQ ID NO: 9584 - DNA, 21 bp, Homo sapiens
aacaatgaggaaatgttggtc

SEQ ID NO: 9585 - RNA, 21 nt, RNAi
caaugaggaaauguuggucuu

SEQ ID NO: 9586 - RNA, 21 nt, RNAi
uuguuacuccuuuacaaccag

SEQ ID NO: 9587 - DNA, 21 bp, Homo sapiens
aatgaggaaatgttggtcatg

SEQ ID NO: 9588 - RNA, 21 nt, RNAi
ugaggaaauguuggucauguu

SEQ ID NO: 9589 - RNA, 21 nt, RNAi
uuacuccuuuacaaccaguac

SEQ ID NO: 9590 - DNA, 21 bp, Homo sapiens
aaacacttcatgaaagcattc

SEQ ID NO: 9591 - RNA, 21 nt, RNAi
acacuucaugaaagcauucuu

SEQ ID NO: 9592 - RNA, 21 nt, RNAi
uuugugaaguacuuucguaag

SEQ ID NO: 9593 - DNA, 21 bp, Homo sapiens
aacacttcatgaaagcattct

SEQ ID NO: 9594 - RNA, 21 nt, RNAi
cacuucaugaaagcauucuuu

SEQ ID NO: 9595 - RNA, 21 nt, RNAi
uugugaaguacuuucguaaga

SEQ ID NO: 9596 - DNA, 21 bp, Homo sapiens
aaagcattctggtgtgaattg

SEQ ID NO: 9597 - RNA, 21 nt, RNAi
agcauucuggugugaauuguu

SEQ ID NO: 9598 - RNA, 21 nt, RNAi
uuucguaagaccacacuuaac

SEQ ID NO: 9599 - DNA, 21 bp, Homo sapiens
aagcattctggtgtgaattgc

SEQ ID NO: 9600 - RNA, 21 nt, RNAi
gcauucuggugugaauugcuu

SEQ ID NO: 9601 - RNA, 21 nt, RNAi
uucguaagaccacacuuaacg

SEQ ID NO: 9602 - DNA, 21 bp, Homo sapiens
aaacattctcctcggaaatta

SEQ ID NO: 9603 - RNA, 21 nt, RNAi
acauucuccucggaaauuauu

SEQ ID NO: 9604 - RNA, 21 nt, RNAi
uuuguaagaggagccuuuaau

SEQ ID NO: 9605 - DNA, 21 bp, Homo sapiens
aacattctcctcggaaattac

SEQ ID NO: 9606 - RNA, 21 nt, RNAi
cauucuccucggaaauuacuu

SEQ ID NO: 9607 - RNA, 21 nt, RNAi
uuguaagaggagccuuuaaug

SEQ ID NO: 9608 - DNA, 21 bp, Homo sapiens
aaattacatggtgctgaccac

SEQ ID NO: 9609 - RNA, 21 nt, RNAi
auuacauggugcugaccacuu

SEQ ID NO: 9610 - RNA, 21 nt, RNAi
uuuaauguaccacgacuggug

SEQ ID NO: 9611 - DNA, 21 bp, Homo sapiens
aattacatggtgctgaccaca

SEQ ID NO: 9612 - RNA, 21 nt, RNAi
uuacauggugcugaccacauu

SEQ ID NO: 9613 - RNA, 21 nt, RNAi
uuaauguaccacgacuggugu

SEQ ID NO: 9614 - DNA, 21 bp, Homo sapiens
aagctgcaggaccaaggtgaa

SEQ ID NO: 9615 - RNA, 21 nt, RNAi
gcugcaggaccaaggugaauu

SEQ ID NO: 9616 - RNA, 21 nt, RNAi
uucgacguccugguuccacuu

SEQ ID NO: 9617 - DNA, 21 bp, Homo sapiens
aaggtgaagattgatagtcca

SEQ ID NO: 9618 - RNA, 21 nt, RNAi
ggugaagauugauaguccauu

SEQ ID NO: 9619 - RNA, 21 nt, RNAi
uuccacuucuaacuaucaggu

SEQ ID NO: 9620 - DNA, 21 bp, Homo sapiens
aagattgatagtccaaatgct

SEQ ID NO: 9621 - RNA, 21 nt, RNAi
gauugauaguccaaaugcuuu

SEQ ID NO: 9622 - RNA, 21 nt, RNAi
uucuaacuaucagguuuacga

SEQ ID NO: 9623 - DNA, 21 bp, Homo sapiens
aattaggtagctgctgaaagg

SEQ ID NO: 9624 - RNA, 21 nt, RNAi
uuagguagcugcugaaagguu

SEQ ID NO: 9625 - RNA, 21 nt, RNAi
uuaauccaucgacgacuuucc

SEQ ID NO: 9626 - DNA, 21 bp, Homo sapiens
aaagtgaatacagaattgacg

SEQ ID NO: 9627 - RNA, 21 nt, RNAi
agugaauacagaauugacguu

SEQ ID NO: 9628 - RNA, 21 nt, RNAi
uuucacuuaugucuuaacugc

SEQ ID NO: 9629 - DNA, 21 bp, Homo sapiens
aagtgaatacagaattgacgg

SEQ ID NO: 9630 - RNA, 21 nt, RNAi
gugaauacagaauugacgguu

SEQ ID NO: 9631 - RNA, 21 nt, RNAi
uucacuuaugucuuaacugcc

SEQ ID NO: 9632 - DNA, 21 bp, Homo sapiens
aattgacggtattattggaga

SEQ ID NO: 9633 - RNA, 21 nt, RNAi
uugacgguauuauuggagauu

SEQ ID NO: 9634 - RNA, 21 nt, RNAi
uuaacugccauaauaaccucu

SEQ ID NO: 9635 - DNA, 21 bp, Homo sapiens
aagacagataatgaagtaggc

SEQ ID NO: 9636 - RNA, 21 nt, RNAi
gacagauaaugaaguaggcuu

SEQ ID NO: 9637 - RNA, 21 nt, RNAi
uucugucuauuacuucauccg

SEQ ID NO: 9638 - DNA, 21 bp, Homo sapiens
aatgaagtaggcaaagagaaa

SEQ ID NO: 9639 - RNA, 21 nt, RNAi
ugaaguaggcaaagagaaauu

SEQ ID NO: 9640 - RNA, 21 nt, RNAi
uuacuucauccguuucucuuu

SEQ ID NO: 9641 - DNA, 21 bp, Homo sapiens
aatgacagcatatcaaacttc

SEQ ID NO: 9642 - RNA, 21 nt, RNAi
ugacagcauaucaaacuucuu

SEQ ID NO: 9643 - RNA, 21 nt, RNAi
uuacugucguauaguuugaag

SEQ ID NO: 9644 - DNA, 21 bp, Homo sapiens
aatctgtttggtaagtatagg

SEQ ID NO: 9645 - RNA, 21 nt, RNAi
ucuguuugguaaguauagguu

SEQ ID NO: 9646 - RNA, 21 nt, RNAi
uuagacaaaccauucauaucc

SEQ ID NO: 9647 - DNA, 21 bp, Homo sapiens
aaaccattaccattgatctgt

SEQ ID NO: 9648 - RNA, 21 nt, RNAi
accauuaccauugaucuguuu

SEQ ID NO: 9649 - RNA, 21 nt, RNAi
uuugguaaugguaacuagaca

SEQ ID NO: 9650 - DNA, 21 bp, Homo sapiens
aaccattaccattgatctgtc

SEQ ID NO: 9651 - RNA, 21 nt, RNAi
ccauuaccauugaucugucuu

SEQ ID NO: 9652 - RNA, 21 nt, RNAi
uugguaaugguaacuagacag

SEQ ID NO: 9653 - DNA, 21 bp, Homo sapiens
catctcaattggcttgtgatg

SEQ ID NO: 9654 - RNA, 21 nt, RNAi
ucucaauuggcuugugauguu

SEQ ID NO: 9655 - RNA, 21 nt, RNAi
uuagaguuaaccgaacacuac

SEQ ID NO: 9656 - DNA, 21 bp, Homo sapiens
caattggcttgtgatggaggc

SEQ ID NO: 9657 - RNA, 21 nt, RNAi
auuggcuugugauggaggcuu

SEQ ID NO: 9658 - RNA, 21 nt, RNAi
uuuaaccgaacacuaccuccg

SEQ ID NO: 9659 - DNA, 21 bp, Homo sapiens
cagatggatgagccaatggct

SEQ ID NO: 9660 - RNA, 21 nt, RNAi
gauggaugagccaauggcuuu

SEQ ID NO: 9661 - RNA, 21 nt, RNAi
uucuaccuacucgguuaccga

SEQ ID NO: 9662 - DNA, 21 bp, Homo sapiens
cagcgtgaccggtttcaggct

SEQ ID NO: 9663 - RNA, 21 nt, RNAi
gcgugaccgguuucaggcuuu

SEQ ID NO: 9664 - RNA, 21 nt, RNAi
uucgcacuggccaaaguccga

SEQ ID NO: 9665 - DNA, 21 bp, Homo sapiens
cacagcttagtaatgtgttta

SEQ ID NO: 9666 - RNA, 21 nt, RNAi
cagcuuaguaauguguuuauu

SEQ ID NO: 9667 - RNA, 21 nt, RNAi
uugucgaaucauuacacaaau

SEQ ID NO: 9668 - DNA, 21 bp, Homo sapiens
cagcttagtaatgtgtttaag

SEQ ID NO: 9669 - RNA, 21 nt, RNAi
gcuuaguaauguguuuaaguu

SEQ ID NO: 9670 - RNA, 21 nt, RNAi
uucgaaucauuacacaaauuc

SEQ ID NO: 9671 - DNA, 21 bp, Homo sapiens
cactttcagctctgtttattt

SEQ ID NO: 9672 - RNA, 21 nt, RNAi
cuuucagcucuguuuauuuuu

SEQ ID NO: 9673 - RNA, 21 nt, RNAi
uugaaagucgagacaaauaaa

SEQ ID NO: 9674 - DNA, 21 bp, Homo sapiens
cagctctgtttatttggccac

SEQ ID NO: 9675 - RNA, 21 nt, RNAi
gcucuguuuauuuggccacuu

SEQ ID NO: 9676 - RNA, 21 nt, RNAi
uucgagacaaauaaaccggug

SEQ ID NO: 9677 - DNA, 21 bp, Homo sapiens
cacagcacagttacaagtagg

SEQ ID NO: 9678 - RNA, 21 nt, RNAi
cagcacaguuacaaguagguu

SEQ ID NO: 9679 - RNA, 21 nt, RNAi
uugucgugucaauguucaucc

SEQ ID NO: 9680 - DNA, 21 bp, Homo sapiens
cagcacagttacaagtaggac

SEQ ID NO: 9681 - RNA, 21 nt, RNAi
gcacaguuacaaguaggacuu

SEQ ID NO: 9682 - RNA, 21 nt, RNAi
uucgugucaauguucauccug

SEQ ID NO: 9683 - DNA, 21 bp, Homo sapiens
cacagttacaagtaggacctg

SEQ ID NO: 9684 - RNA, 21 nt, RNAi
caguuacaaguaggaccuguu

SEQ ID NO: 9685 - RNA, 21 nt, RNAi
uugucaauguucauccuggac

SEQ ID NO: 9686 - DNA, 21 bp, Homo sapiens
cagttacaagtaggacctgaa

SEQ ID NO: 9687 - RNA, 21 nt, RNAi
guuacaaguaggaccugaauu

SEQ ID NO: 9688 - RNA, 21 nt, RNAi
uucaauguucauccuggacuu

SEQ ID NO: 9689 - DNA, 21 bp, Homo sapiens
caagtaggacctgaagagaaa

SEQ ID NO: 9690 - RNA, 21 nt, RNAi
aguaggaccugaagagaaauu

SEQ ID NO: 9691 - RNA, 21 nt, RNAi
uuucauccuggacuucucuuu

SEQ ID NO: 9692 - DNA, 21 bp, Homo sapiens
cacttgattccaacaagtcat

SEQ ID NO: 9693 - RNA, 21 nt, RNAi
cuugauuccaacaagucauuu

SEQ ID NO: 9694 - RNA, 21 nt, RNAi
uugaacuaagguuguucagua

SEQ ID NO: 9695 - DNA, 21 bp, Homo sapiens
caacaagtcatcctataagaa

SEQ ID NO: 9696 - RNA, 21 nt, RNAi
acaagucauccuauaagaauu

SEQ ID NO: 9697 - RNA, 21 nt, RNAi
uuuguucaguaggauauucuu

SEQ ID NO: 9698 - DNA, 21 bp, Homo sapiens
caagtcatcctataagaattg

SEQ ID NO: 9699 - RNA, 21 nt, RNAi
agucauccuauaagaauuguu

SEQ ID NO: 9700 - RNA, 21 nt, RNAi
uuucaguaggauauucuuaac

SEQ ID NO: 9701 - DNA, 21 bp, Homo sapiens
catcctataagaattgcagct

SEQ ID NO: 9702 - RNA, 21 nt, RNAi
uccuauaagaauugcagcuuu

SEQ ID NO: 9703 - RNA, 21 nt, RNAi
uuaggauauucuuaacgucga

SEQ ID NO: 9704 - DNA, 21 bp, Homo sapiens
cagctgaacttcagtgcctaa

SEQ ID NO: 9705 - RNA, 21 nt, RNAi
gcugaacuucagugccuaauu

SEQ ID NO: 9706 - RNA, 21 nt, RNAi
uucgacuugaagucacggauu

SEQ ID NO: 9707 - DNA, 21 bp, Homo sapiens
catgtagttattgctatgcca

SEQ ID NO: 9708 - RNA, 21 nt, RNAi
uguaguuauugcuaugccauu

SEQ ID NO: 9709 - RNA, 21 nt, RNAi
uuacaucaauaacgauacggu

SEQ ID NO: 9710 - DNA, 21 bp, Homo sapiens
catatctggagcatgagtcgt

SEQ ID NO: 9711 - RNA, 21 nt, RNAi
uaucuggagcaugagucguuu

SEQ ID NO: 9712 - RNA, 21 nt, RNAi
uuauagaccucguacucagca

SEQ ID NO: 9713 - DNA, 21 bp, Homo sapiens
cattctgaattctctttcctt

SEQ ID NO: 9714 - RNA, 21 nt, RNAi
uucugaauucucuuuccuuuu

SEQ ID NO: 9715 - RNA, 21 nt, RNAi
uuaagacuuaagagaaaggaa

SEQ ID NO: 9716 - DNA, 21 bp, Homo sapiens
caaagctttgaaacgcattca

SEQ ID NO: 9717 - RNA, 21 nt, RNAi
aagcuuugaaacgcauucauu

SEQ ID NO: 9718 - RNA, 21 nt, RNAi
uuuucgaaacuuugcguaagu

SEQ ID NO: 9719 - DNA, 21 bp, Homo sapiens
cattcatcagtttggtattgt

SEQ ID NO: 9720 - RNA, 21 nt, RNAi
uucaucaguuugguauuguuu

SEQ ID NO: 9721 - RNA, 21 nt, RNAi
uuaaguagucaaaccauaaca

SEQ ID NO: 9722 - DNA, 21 bp, Homo sapiens
catcagtttggtattgttcac

SEQ ID NO: 9723 - RNA, 21 nt, RNAi
ucaguuugguauuguucacuu

SEQ ID NO: 9724 - RNA, 21 nt, RNAi
uuagucaaaccauaacaagug

SEQ ID NO: 9725 - DNA, 21 bp, Homo sapiens
cagtttggtattgttcaccgt

SEQ ID NO: 9726 - RNA, 21 nt, RNAi
guuugguauuguucaccguuu

SEQ ID NO: 9727 - RNA, 21 nt, RNAi
uucaaaccauaacaaguggca

SEQ ID NO: 9728 - DNA, 21 bp, Homo sapiens
cagtctgaagctcagcaggaa

SEQ ID NO: 9729 - RNA, 21 nt, RNAi
gucugaagcucagcaggaauu

SEQ ID NO: 9730 - RNA, 21 nt, RNAi
uucagacuucgagucguccuu

SEQ ID NO: 9731 - DNA, 21 bp, Homo sapiens
cagcaggaaaggtgttcacaa

SEQ ID NO: 9732 - RNA, 21 nt, RNAi
gcaggaaagguguucacaauu

SEQ ID NO: 9733 - RNA, 21 nt, RNAi
uucguccuuuccacaaguguu

SEQ ID NO: 9734 - DNA, 21 bp, Homo sapiens
cacataatcacaggaaacaag

SEQ ID NO: 9735 - RNA, 21 nt, RNAi
cauaaucacaggaaacaaguu

SEQ ID NO: 9736 - RNA, 21 nt, RNAi
uuguauuaguguccuuuguuc

SEQ ID NO: 9737 - DNA, 21 bp, Homo sapiens
cataatcacaggaaacaagat

SEQ ID NO: 9738 - RNA, 21 nt, RNAi
uaaucacaggaaacaagauuu

SEQ ID NO: 9739 - RNA, 21 nt, RNAi
uuauuaguguccuuuguucua

SEQ ID NO: 9740 - DNA, 21 bp, Homo sapiens
cacaggaaacaagattccact

SEQ ID NO: 9741 - RNA, 21 nt, RNAi
caggaaacaagauuccacuuu

SEQ ID NO: 9742 - RNA, 21 nt, RNAi
uuguccuuuguucuaagguga

SEQ ID NO: 9743 - DNA, 21 bp, Homo sapiens
caggaaacaagattccactga

SEQ ID NO: 9744 - RNA, 21 nt, RNAi
ggaaacaagauuccacugauu

SEQ ID NO: 9745 - RNA, 21 nt, RNAi
uuccuuuguucuaaggugacu

SEQ ID NO: 9746 - DNA, 21 bp, Homo sapiens
cagtacctaaggagctggatc

SEQ ID NO: 9747 - RNA, 21 nt, RNAi
guaccuaaggagcuggaucuu

SEQ ID NO: 9748 - RNA, 21 nt, RNAi
uucauggauuccucgaccuag

SEQ ID NO: 9749 - DNA, 21 bp, Homo sapiens
cacaaatgcacaaattcagat

SEQ ID NO: 9750 - RNA, 21 nt, RNAi
caaaugcacaaauucagauuu

SEQ ID NO: 9751 - RNA, 21 nt, RNAi
uuguuuacguguuuaagucua

SEQ ID NO: 9752 - DNA, 21 bp, Homo sapiens
caatatacacagctccatttc

SEQ ID NO: 9753 - RNA, 21 nt, RNAi
auauacacagcuccauuucuu

SEQ ID NO: 9754 - RNA, 21 nt, RNAi
uuuauaugugucgagguaaag

SEQ ID NO: 9755 - DNA, 21 bp, Homo sapiens
cacagctccatttcacatgag

SEQ ID NO: 9756 - RNA, 21 nt, RNAi
cagcuccauuucacaugaguu

SEQ ID NO: 9757 - RNA, 21 nt, RNAi
uugucgagguaaaguguacuc

SEQ ID NO: 9758 - DNA, 21 bp, Homo sapiens
cagctccatttcacatgagag

SEQ ID NO: 9759 - RNA, 21 nt, RNAi
gcuccauuucacaugagaguu

SEQ ID NO: 9760 - RNA, 21 nt, RNAi
uucgagguaaaguguacucuc

SEQ ID NO: 9761 - DNA, 21 bp, Homo sapiens
cagtgaaactcatgaagcagt

SEQ ID NO: 9762 - RNA, 21 nt, RNAi
gugaaacucaugaagcaguuu

SEQ ID NO: 9763 - RNA, 21 nt, RNAi
uucacuuugaguacuucguca

SEQ ID NO: 9764 - DNA, 21 bp, Homo sapiens
catgaagcagtcaaagactgt

SEQ ID NO: 9765 - RNA, 21 nt, RNAi
ugaagcagucaaagacuguuu

SEQ ID NO: 9766 - RNA, 21 nt, RNAi
uuacuucgucaguuucugaca

SEQ ID NO: 9767 - DNA, 21 bp, Homo sapiens
cagtcaaagactgtggatgta

SEQ ID NO: 9768 - RNA, 21 nt, RNAi
gucaaagacuguggauguauu

SEQ ID NO: 9769 - RNA, 21 nt, RNAi
uucaguuucugacaccuacau

SEQ ID NO: 9770 - DNA, 21 bp, Homo sapiens
caaagactgtggatgtactgt

SEQ ID NO: 9771 - RNA, 21 nt, RNAi
aagacuguggauguacuguuu

SEQ ID NO: 9772 - RNA, 21 nt, RNAi
uuuucugacaccuacaugaca

SEQ ID NO: 9773 - DNA, 21 bp, Homo sapiens
cagctagcctgacctgtgact

SEQ ID NO: 9774 - RNA, 21 nt, RNAi
gcuagccugaccugugacuuu

SEQ ID NO: 9775 - RNA, 21 nt, RNAi
uucgaucggacuggacacuga

SEQ ID NO: 9776 - DNA, 21 bp, Homo sapiens
caggtacaccaggattcagag

SEQ ID NO: 9777 - RNA, 21 nt, RNAi
gguacaccaggauucagaguu

SEQ ID NO: 9778 - RNA, 21 nt, RNAi
uuccaugugguccuaagucuc

SEQ ID NO: 9779 - DNA, 21 bp, Homo sapiens
caccaggattcagagcaccag

SEQ ID NO: 9780 - RNA, 21 nt, RNAi
ccaggauucagagcaccaguu

SEQ ID NO: 9781 - RNA, 21 nt, RNAi
uugguccuaagucucgugguc

SEQ ID NO: 9782 - DNA, 21 bp, Homo sapiens
caggattcagagcaccagagg

SEQ ID NO: 9783 - RNA, 21 nt, RNAi
ggauucagagcaccagagguu

SEQ ID NO: 9784 - RNA, 21 nt, RNAi
uuccuaagucucguggucucc

SEQ ID NO: 9785 - DNA, 21 bp, Homo sapiens
cagagcaccagaggtcttgac

SEQ ID NO: 9786 - RNA, 21 nt, RNAi
gagcaccagaggucuugacuu

SEQ ID NO: 9787 - RNA, 21 nt, RNAi
uucucguggucuccagaacug

SEQ ID NO: 9788 - DNA, 21 bp, Homo sapiens
caccagaggtcttgacaaagt

SEQ ID NO: 9789 - RNA, 21 nt, RNAi
ccagaggucuugacaaaguuu

SEQ ID NO: 9790 - RNA, 21 nt, RNAi
uuggucuccagaacuguuuca

SEQ ID NO: 9791 - DNA, 21 bp, Homo sapiens
cagaggtcttgacaaagtgcc

SEQ ID NO: 9792 - RNA, 21 nt, RNAi
gaggucuugacaaagugccuu

SEQ ID NO: 9793 - RNA, 21 nt, RNAi
uucuccagaacuguuucacgg

SEQ ID NO: 9794 - DNA, 21 bp, Homo sapiens
caatcaaactacagcaattga

SEQ ID NO: 9795 - RNA, 21 nt, RNAi
aucaaacuacagcaauugauu

SEQ ID NO: 9796 - RNA, 21 nt, RNAi
uuuaguuugaugucguuaacu

SEQ ID NO: 9797 - DNA, 21 bp, Homo sapiens
caaactacagcaattgacatg

SEQ ID NO: 9798 - RNA, 21 nt, RNAi
aacuacagcaauugacauguu

SEQ ID NO: 9799 - RNA, 21 nt, RNAi
uuuugaugucguuaacuguac

SEQ ID NO: 9800 - DNA, 21 bp, Homo sapiens
cagcaattgacatgtggtctg

SEQ ID NO: 9801 - RNA, 21 nt, RNAi
gcaauugacauguggucuguu

SEQ ID NO: 9802 - RNA, 21 nt, RNAi
uucguuaacuguacaccagac

SEQ ID NO: 9803 - DNA, 21 bp, Homo sapiens
caattgacatgtggtctgcag

SEQ ID NO: 9804 - RNA, 21 nt, RNAi
auugacauguggucugcaguu

SEQ ID NO: 9805 - RNA, 21 nt, RNAi
uuuaacuguacaccagacguc

SEQ ID NO: 9806 - DNA, 21 bp, Homo sapiens
catgtggtctgcaggtgtcat

SEQ ID NO: 9807 - RNA, 21 nt, RNAi
uguggucugcaggugucauuu

SEQ ID NO: 9808 - RNA, 21 nt, RNAi
uuacaccagacguccacagua

SEQ ID NO: 9809 - DNA, 21 bp, Homo sapiens
caggtgtcatatttctttctt

SEQ ID NO: 9810 - RNA, 21 nt, RNAi
ggugucauauuucuuucuuuu

SEQ ID NO: 9811 - RNA, 21 nt, RNAi
uuccacaguauaaagaaagaa

SEQ ID NO: 9812 - DNA, 21 bp, Homo sapiens
caagtgatgatttaactgctt

SEQ ID NO: 9813 - RNA, 21 nt, RNAi
agugaugauuuaacugcuuuu

SEQ ID NO: 9814 - RNA, 21 nt, RNAi
uuucacuacuaaauugacgaa

SEQ ID NO: 9815 - DNA, 21 bp, Homo sapiens
cagagaaactatccaagctgc

SEQ ID NO: 9816 - RNA, 21 nt, RNAi
gagaaacuauccaagcugcuu

SEQ ID NO: 9817 - RNA, 21 nt, RNAi
uucucuuugauagguucgacg

SEQ ID NO: 9818 - DNA, 21 bp, Homo sapiens
caaagaagttccagcacaaga

SEQ ID NO: 9819 - RNA, 21 nt, RNAi
aagaaguuccagcacaagauu

SEQ ID NO: 9820 - RNA, 21 nt, RNAi
uuuucuucaaggucguguucu

SEQ ID NO: 9821 - DNA, 21 bp, Homo sapiens
catgcttctcatcaaccagct

SEQ ID NO: 9822 - RNA, 21 nt, RNAi
ugcuucucaucaaccagcuuu

SEQ ID NO: 9823 - RNA, 21 nt, RNAi
uuacgaagaguaguuggucga

SEQ ID NO: 9824 - DNA, 21 bp, Homo sapiens
catcaaccagctatttcagag

SEQ ID NO: 9825 - RNA, 21 nt, RNAi
ucaaccagcuauuucagaguu

SEQ ID NO: 9826 - RNA, 21 nt, RNAi
uuaguuggucgauaaagucuc

SEQ ID NO: 9827 - DNA, 21 bp, Homo sapiens
caaccagctatttcagagaag

SEQ ID NO: 9828 - RNA, 21 nt, RNAi
accagcuauuucagagaaguu

SEQ ID NO: 9829 - RNA, 21 nt, RNAi
uuuggucgauaaagucucuuc

SEQ ID NO: 9830 - DNA, 21 bp, Homo sapiens
cagctatttcagagaagactg

SEQ ID NO: 9831 - RNA, 21 nt, RNAi
gcuauuucagagaagacuguu

SEQ ID NO: 9832 - RNA, 21 nt, RNAi
uucgauaaagucucuucugac

SEQ ID NO: 9833 - DNA, 21 bp, Homo sapiens
cagagaagactgaccataaag

SEQ ID NO: 9834 - RNA, 21 nt, RNAi
gagaagacugaccauaaaguu

SEQ ID NO: 9835 - RNA, 21 nt, RNAi
uucucuucugacugguauuuc

SEQ ID NO: 9836 - DNA, 21 bp, Homo sapiens
cataaagcttcttgcctcgtt

SEQ ID NO: 9837 - RNA, 21 nt, RNAi
uaaagcuucuugccucguuuu

SEQ ID NO: 9838 - RNA, 21 nt, RNAi
uuauuucgaagaacggagcaa

SEQ ID NO: 9839 - DNA, 21 bp, Homo sapiens
caaacacctccaggacaatac

SEQ ID NO: 9840 - RNA, 21 nt, RNAi
aacaccuccaggacaauacuu

SEQ ID NO: 9841 - RNA, 21 nt, RNAi
uuuuguggagguccuguuaug

SEQ ID NO: 9842 - DNA, 21 bp, Homo sapiens
cacctccaggacaatactcag

SEQ ID NO: 9843 - RNA, 21 nt, RNAi
ccuccaggacaauacucaguu

SEQ ID NO: 9844 - RNA, 21 nt, RNAi
uuggagguccuguuaugaguc

SEQ ID NO: 9845 - DNA, 21 bp, Homo sapiens
caatttagaaggctggaatga

SEQ ID NO: 9846 - RNA, 21 nt, RNAi
auuuagaaggcuggaaugauu

SEQ ID NO: 9847 - RNA, 21 nt, RNAi
uuuaaaucuuccgaccuuacu

SEQ ID NO: 9848 - DNA, 21 bp, Homo sapiens
cagcttcaagaataacagcag

SEQ ID NO: 9849 - RNA, 21 nt, RNAi
gcuucaagaauaacagcaguu

SEQ ID NO: 9850 - RNA, 21 nt, RNAi
uucgaaguucuuauugucguc

SEQ ID NO: 9851 - DNA, 21 bp, Homo sapiens
caagaataacagcagaagaag

SEQ ID NO: 9852 - RNA, 21 nt, RNAi
agaauaacagcagaagaaguu

SEQ ID NO: 9853 - RNA, 21 nt, RNAi
uuucuuauugucgucuucuuc

SEQ ID NO: 9854 - DNA, 21 bp, Homo sapiens
cagcagaagaagctttgttgc

SEQ ID NO: 9855 - RNA, 21 nt, RNAi
gcagaagaagcuuuguugcuu

SEQ ID NO: 9856 - RNA, 21 nt, RNAi
uucgucuucuucgaaacaacg

SEQ ID NO: 9857 - DNA, 21 bp, Homo sapiens
cagaagaagctttgttgcatc

SEQ ID NO: 9858 - RNA, 21 nt, RNAi
gaagaagcuuuguugcaucuu

SEQ ID NO: 9859 - RNA, 21 nt, RNAi
uucuucuucgaaacaacguag

SEQ ID NO: 9860 - DNA, 21 bp, Homo sapiens
cacaagttcttgtttagagac

SEQ ID NO: 9861 - RNA, 21 nt, RNAi
caaguucuuguuuagagacuu

SEQ ID NO: 9862 - RNA, 21 nt, RNAi
uuguucaagaacaaaucucug

SEQ ID NO: 9863 - DNA, 21 bp, Homo sapiens
caagttcttgtttagagacca

SEQ ID NO: 9864 - RNA, 21 nt, RNAi
aguucuuguuuagagaccauu

SEQ ID NO: 9865 - RNA, 21 nt, RNAi
uuucaagaacaaaucucuggu

SEQ ID NO: 9866 - DNA, 21 bp, Homo sapiens
caacatgatcttctttgagtt

SEQ ID NO: 9867 - RNA, 21 nt, RNAi
acaugaucuucuuugaguuuu

SEQ ID NO: 9868 - RNA, 21 nt, RNAi
uuuguacuagaagaaacucaa

SEQ ID NO: 9869 - DNA, 21 bp, Homo sapiens
cagatgtgatgaggattaaat

SEQ ID NO: 9870 - RNA, 21 nt, RNAi
gaugugaugaggauuaaauuu

SEQ ID NO: 9871 - RNA, 21 nt, RNAi
uucuacacuacuccuaauuua

SEQ ID NO: 9872 - DNA, 21 bp, Homo sapiens
caacctggtgctggtgctctt

SEQ ID NO: 9873 - RNA, 21 nt, RNAi
accuggugcuggugcucuuuu

SEQ ID NO: 9874 - RNA, 21 nt, RNAi
uuuggaccacgaccacgagaa

SEQ ID NO: 9875 - DNA, 21 bp, Homo sapiens
caatgaggaaatgttggtcat

SEQ ID NO: 9876 - RNA, 21 nt, RNAi
augaggaaauguuggucauuu

SEQ ID NO: 9877 - RNA, 21 nt, RNAi
uuuacuccuuuacaaccagua

SEQ ID NO: 9878 - DNA, 21 bp, Homo sapiens
cacttcatgaaagcattctgg

SEQ ID NO: 9879 - RNA, 21 nt, RNAi
cuucaugaaagcauucugguu

SEQ ID NO: 9880 - RNA, 21 nt, RNAi
uugaaguacuuucguaagacc

SEQ ID NO: 9881 - DNA, 21 bp, Homo sapiens
catgaaagcattctggtgtga

SEQ ID NO: 9882 - RNA, 21 nt, RNAi
ugaaagcauucuggugugauu

SEQ ID NO: 9883 - RNA, 21 nt, RNAi
uuacuuucguaagaccacacu

SEQ ID NO: 9884 - DNA, 21 bp, Homo sapiens
cattctggtgtgaattgccat

SEQ ID NO: 9885 - RNA, 21 nt, RNAi
uucuggugugaauugccauuu

SEQ ID NO: 9886 - RNA, 21 nt, RNAi
uuaagaccacacuuaacggua

SEQ ID NO: 9887 - DNA, 21 bp, Homo sapiens
cattctcctcggaaattacat

SEQ ID NO: 9888 - RNA, 21 nt, RNAi
uucuccucggaaauuacauuu

SEQ ID NO: 9889 - RNA, 21 nt, RNAi
uuaagaggagccuuuaaugua

SEQ ID NO: 9890 - DNA, 21 bp, Homo sapiens
catggtgctgaccacaaagtt

SEQ ID NO: 9891 - RNA, 21 nt, RNAi
uggugcugaccacaaaguuuu

SEQ ID NO: 9892 - RNA, 21 nt, RNAi
uuaccacgacugguguuucaa

SEQ ID NO: 9893 - DNA, 21 bp, Homo sapiens
caggaccaaggtgaagattga

SEQ ID NO: 9894 - RNA, 21 nt, RNAi
ggaccaaggugaagauugauu

SEQ ID NO: 9895 - RNA, 21 nt, RNAi
uuccugguuccacuucuaacu

SEQ ID NO: 9896 - DNA, 21 bp, Homo sapiens
caaggtgaagattgatagtcc

SEQ ID NO: 9897 - RNA, 21 nt, RNAi
aggugaagauugauaguccuu

SEQ ID NO: 9898 - RNA, 21 nt, RNAi
uuuccacuucuaacuaucagg

SEQ ID NO: 9899 - DNA, 21 bp, Homo sapiens
cagaattgacggtattattgg

SEQ ID NO: 9900 - RNA, 21 nt, RNAi
gaauugacgguauuauugguu

SEQ ID NO: 9901 - RNA, 21 nt, RNAi
uucuuaacugccauaauaacc

SEQ ID NO: 9902 - DNA, 21 bp, Homo sapiens
catccagatctctgtatcctg

SEQ ID NO: 9903 - RNA, 21 nt, RNAi
uccagaucucuguauccuguu

SEQ ID NO: 9904 - RNA, 21 nt, RNAi
uuaggucuagagacauaggac

SEQ ID NO: 9905 - DNA, 21 bp, Homo sapiens
cagataatgaagtaggcaaag

SEQ ID NO: 9906 - RNA, 21 nt, RNAi
gauaaugaaguaggcaaaguu

SEQ ID NO: 9907 - RNA, 21 nt, RNAi
uucuauuacuucauccguuuc

SEQ ID NO: 9908 - DNA, 21 bp, Homo sapiens
caatgacagcatatcaaactt

SEQ ID NO: 9909 - RNA, 21 nt, RNAi
augacagcauaucaaacuuuu

SEQ ID NO: 9910 - RNA, 21 nt, RNAi
uuuacugucguauaguuugaa

SEQ ID NO: 9911 - DNA, 21 bp, Homo sapiens
cagcatatcaaacttcctatg

SEQ ID NO: 9912 - RNA, 21 nt, RNAi
gcauaucaaacuuccuauguu

SEQ ID NO: 9913 - RNA, 21 nt, RNAi
uucguauaguuugaaggauac

SEQ ID NO: 9914 - DNA, 21 bp, Homo sapiens
cattgataggtcagtatatct

SEQ ID NO: 9915 - RNA, 21 nt, RNAi
uugauaggucaguauaucuuu

SEQ ID NO: 9916 - RNA, 21 nt, RNAi
uuaacuauccagucauauaga

SEQ ID NO: 9917 - DNA, 21 bp, Homo sapiens
cagtatatctacctaatctgt

SEQ ID NO: 9918 - RNA, 21 nt, RNAi
guauaucuaccuaaucuguuu

SEQ ID NO: 9919 - RNA, 21 nt, RNAi
uucauauagauggauuagaca

SEQ ID NO: 9920 - DNA, 21 bp, Homo sapiens
cattaccattgatctgtctta

SEQ ID NO: 9921 - RNA, 21 nt, RNAi
uuaccauugaucugucuuauu

SEQ ID NO: 9922 - RNA, 21 nt, RNAi
uuaaugguaacuagacagaau

SEQ ID NO: 9923 - DNA, 21 bp, Homo sapiens
cattgatctgtcttatgccat

SEQ ID NO: 9924 - RNA, 21 nt, RNAi
uugaucugucuuaugccauuu

SEQ ID NO: 9925 - RNA, 21 nt, RNAi
uuaacuagacagaauacggua

SEQ ID NO: 9926 - DNA, 21 bp, Homo sapiens
gatctcttggagacggcgacc

SEQ ID NO: 9927 - RNA, 21 nt, RNAi
ucucuuggagacggcgaccuu

SEQ ID NO: 9928 - RNA, 21 nt, RNAi
uuagagaaccucugccgcugg

SEQ ID NO: 9929 - DNA, 21 bp, Homo sapiens
gagccacagaagtcgtactcc

SEQ ID NO: 9930 - RNA, 21 nt, RNAi
gccacagaagucguacuccuu

SEQ ID NO: 9931 - RNA, 21 nt, RNAi
uucggugucuucagcaugagg

SEQ ID NO: 9932 - DNA, 21 bp, Homo sapiens
gattcagatggatgagccaat

SEQ ID NO: 9933 - RNA, 21 nt, RNAi
uucagauggaugagccaauuu

SEQ ID NO: 9934 - RNA, 21 nt, RNAi
uuaagucuaccuacucgguua

SEQ ID NO: 9935 - DNA, 21 bp, Homo sapiens
gatggatgagccaatggcttt

SEQ ID NO: 9936 - RNA, 21 nt, RNAi
uggaugagccaauggcuuuuu

SEQ ID NO: 9937 - RNA, 21 nt, RNAi
uuaccuacucgguuaccgaaa

SEQ ID NO: 9938 - DNA, 21 bp, Homo sapiens
gaccggtttcaggctgaaggc

SEQ ID NO: 9939 - RNA, 21 nt, RNAi
ccgguuucaggcugaaggcuu

SEQ ID NO: 9940 - RNA, 21 nt, RNAi
uuggccaaaguccgacuuccg

SEQ ID NO: 9941 - DNA, 21 bp, Homo sapiens
gagaagctttatgaagctgta

SEQ ID NO: 9942 - RNA, 21 nt, RNAi
gaagcuuuaugaagcuguauu

SEQ ID NO: 9943 - RNA, 21 nt, RNAi
uucuucgaaauacuucgacau

SEQ ID NO: 9944 - DNA, 21 bp, Homo sapiens
gaagctttatgaagctgtacc

SEQ ID NO: 9945 - RNA, 21 nt, RNAi
agcuuuaugaagcuguaccuu

SEQ ID NO: 9946 - RNA, 21 nt, RNAi
uuucgaaauacuucgacaugg

SEQ ID NO: 9947 - DNA, 21 bp, Homo sapiens
gaagctgtaccacagcttagt

SEQ ID NO: 9948 - RNA, 21 nt, RNAi
agcuguaccacagcuuaguuu

SEQ ID NO: 9949 - RNA, 21 nt, RNAi
uuucgacauggugucgaauca

SEQ ID NO: 9950 - DNA, 21 bp, Homo sapiens
gagaaggcactttcagctctg

SEQ ID NO: 9951 - RNA, 21 nt, RNAi
gaaggcacuuucagcucuguu

SEQ ID NO: 9952 - RNA, 21 nt, RNAi
uucuuccgugaaagucgagac

SEQ ID NO: 9953 - DNA, 21 bp, Homo sapiens
gaaggcactttcagctctgtt

SEQ ID NO: 9954 - RNA, 21 nt, RNAi
aggcacuuucagcucuguuuu

SEQ ID NO: 9955 - RNA, 21 nt, RNAi
uuuccgugaaagucgagacaa

SEQ ID NO: 9956 - DNA, 21 bp, Homo sapiens
gattccaacaagtcatcctat

SEQ ID NO: 9957 - RNA, 21 nt, RNAi
uuccaacaagucauccuauuu

SEQ ID NO: 9958 - RNA, 21 nt, RNAi
uuaagguuguucaguaggaua

SEQ ID NO: 9959 - DNA, 21 bp, Homo sapiens
gaattgcagctgaacttcagt

SEQ ID NO: 9960 - RNA, 21 nt, RNAi
auugcagcugaacuucaguuu

SEQ ID NO: 9961 - RNA, 21 nt, RNAi
uuuaacgucgacuugaaguca

SEQ ID NO: 9962 - DNA, 21 bp, Homo sapiens
gaacttcagtgcctaacagtg

SEQ ID NO: 9963 - RNA, 21 nt, RNAi
acuucagugccuaacaguguu

SEQ ID NO: 9964 - RNA, 21 nt, RNAi
uuugaagucacggauugucac

SEQ ID NO: 9965 - DNA, 21 bp, Homo sapiens
gagttaaatactgctttagga

SEQ ID NO: 9966 - RNA, 21 nt, RNAi
guuaaauacugcuuuaggauu

SEQ ID NO: 9967 - RNA, 21 nt, RNAi
uucaauuuaugacgaaauccu

SEQ ID NO: 9968 - DNA, 21 bp, Homo sapiens
gaatgatcatgtagttattgc

SEQ ID NO: 9969 - RNA, 21 nt, RNAi
augaucauguaguuauugcuu

SEQ ID NO: 9970 - RNA, 21 nt, RNAi
uuuacuaguacaucaauaacg

SEQ ID NO: 9971 - DNA, 21 bp, Homo sapiens
gatcatgtagttattgctatg

SEQ ID NO: 9972 - RNA, 21 nt, RNAi
ucauguaguuauugcuauguu

SEQ ID NO: 9973 - RNA, 21 nt, RNAi
uuaguacaucaauaacgauac

SEQ ID NO: 9974 - DNA, 21 bp, Homo sapiens
gacattctgaattctctttcc

SEQ ID NO: 9975 - RNA, 21 nt, RNAi
cauucugaauucucuuuccuu

SEQ ID NO: 9976 - RNA, 21 nt, RNAi
uuguaagacuuaagagaaagg

SEQ ID NO: 9977 - DNA, 21 bp, Homo sapiens
gaattctctttcctttcaaga

SEQ ID NO: 9978 - RNA, 21 nt, RNAi
auucucuuuccuuucaagauu

SEQ ID NO: 9979 - RNA, 21 nt, RNAi
uuuaagagaaaggaaaguucu

SEQ ID NO: 9980 - DNA, 21 bp, Homo sapiens
gaaacgcattcatcagtttgg

SEQ ID NO: 9981 - RNA, 21 nt, RNAi
aacgcauucaucaguuugguu

SEQ ID NO: 9982 - RNA, 21 nt, RNAi
uuuugcguaaguagucaaacc

SEQ ID NO: 9983 - DNA, 21 bp, Homo sapiens
gagcttcttaaatttgtccag

SEQ ID NO: 9984 - RNA, 21 nt, RNAi
gcuucuuaaauuuguccaguu

SEQ ID NO: 9985 - RNA, 21 nt, RNAi
uucgaagaauuuaaacagguc

SEQ ID NO: 9986 - DNA, 21 bp, Homo sapiens
gaagctcagcaggaaaggtgt

SEQ ID NO: 9987 - RNA, 21 nt, RNAi
agcucagcaggaaagguguuu

SEQ ID NO: 9988 - RNA, 21 nt, RNAi
uuucgagucguccuuuccaca

SEQ ID NO: 9989 - DNA, 21 bp, Homo sapiens
gaaacaagattccactgagtg

SEQ ID NO: 9990 - RNA, 21 nt, RNAi
aacaagauuccacugaguguu

SEQ ID NO: 9991 - RNA, 21 nt, RNAi
uuuuguucuaaggugacucac

SEQ ID NO: 9992 - DNA, 21 bp, Homo sapiens
gagctggatcagcagtccacc

SEQ ID NO: 9993 - RNA, 21 nt, RNAi
gcuggaucagcaguccaccuu

SEQ ID NO: 9994 - RNA, 21 nt, RNAi
uucgaccuagucgucaggugg

SEQ ID NO: 9995 - DNA, 21 bp, Homo sapiens
gatctgtaggcctttctgtcc

SEQ ID NO: 9996 - RNA, 21 nt, RNAi
ucuguaggccuuucuguccuu

SEQ ID NO: 9997 - RNA, 21 nt, RNAi
uuagacauccggaaagacagg

SEQ ID NO: 9998 - DNA, 21 bp, Homo sapiens
gaaactcatgaagcagtcaaa

SEQ ID NO: 9999 - RNA, 21 nt, RNAi
aacucaugaagcagucaaauu

SEQ ID NO: 10000 - RNA, 21 nt, RNAi
uuuugaguacuucgucaguuu

SEQ ID NO: 10001 - DNA, 21 bp, Homo sapiens
gaagcagtcaaagactgtgga

SEQ ID NO: 10002 - RNA, 21 nt, RNAi
agcagucaaagacuguggauu

SEQ ID NO: 10003 - RNA, 21 nt, RNAi
uuucgucaguuucugacaccu

SEQ ID NO: 10004 - DNA, 21 bp, Homo sapiens
gactgtggatgtactgtctag

SEQ ID NO: 10005 - RNA, 21 nt, RNAi
cuguggauguacugucuaguu

SEQ ID NO: 10006 - RNA, 21 nt, RNAi
uugacaccuacaugacagauc

SEQ ID NO: 10007 - DNA, 21 bp, Homo sapiens
gatgtactgtctagaaagtta

SEQ ID NO: 10008 - RNA, 21 nt, RNAi
uguacugucuagaaaguuauu

SEQ ID NO: 10009 - RNA, 21 nt, RNAi
uuacaugacagaucuuucaau

SEQ ID NO: 10010 - DNA, 21 bp, Homo sapiens
gaaggctatttctacgaaagt

SEQ ID NO: 10011 - RNA, 21 nt, RNAi
aggcuauuucuacgaaaguuu

SEQ ID NO: 10012 - RNA, 21 nt, RNAi
uuuccgauaaagaugcuuuca

SEQ ID NO: 10013 - DNA, 21 bp, Homo sapiens
gaaagttatgaatagtgctgt

SEQ ID NO: 10014 - RNA, 21 nt, RNAi
aaguuaugaauagugcuguuu

SEQ ID NO: 10015 - RNA, 21 nt, RNAi
uuuucaauacuuaucacgaca

SEQ ID NO: 10016 - DNA, 21 bp, Homo sapiens
gaatagtgctgtgatgaggaa

SEQ ID NO: 10017 - RNA, 21 nt, RNAi
auagugcugugaugaggaauu

SEQ ID NO: 10018 - RNA, 21 nt, RNAi
uuuaucacgacacuacuccuu

SEQ ID NO: 10019 - DNA, 21 bp, Homo sapiens
gacctgtgactgctatgcaac

SEQ ID NO: 10020 - RNA, 21 nt, RNAi
ccugugacugcuaugcaacuu

SEQ ID NO: 10021 - RNA, 21 nt, RNAi
uuggacacugacgauacguug

SEQ ID NO: 10022 - DNA, 21 bp, Homo sapiens
gactgctatgcaacagataaa

SEQ ID NO: 10023 - RNA, 21 nt, RNAi
cugcuaugcaacagauaaauu

SEQ ID NO: 10024 - RNA, 21 nt, RNAi
uugacgauacguugucuauuu

SEQ ID NO: 10025 - DNA, 21 bp, Homo sapiens
gattcagagcaccagaggtct

SEQ ID NO: 10026 - RNA, 21 nt, RNAi
uucagagcaccagaggucuuu

SEQ ID NO: 10027 - RNA, 21 nt, RNAi
uuaagucucguggucuccaga

SEQ ID NO: 10028 - DNA, 21 bp, Homo sapiens
gagcaccagaggtcttgacaa

SEQ ID NO: 10029 - RNA, 21 nt, RNAi
gcaccagaggucuugacaauu

SEQ ID NO: 10030 - RNA, 21 nt, RNAi
uucguggucuccagaacuguu

SEQ ID NO: 10031 - DNA, 21 bp, Homo sapiens
gacatgtggtctgcaggtgtc

SEQ ID NO: 10032 - RNA, 21 nt, RNAi
cauguggucugcaggugucuu

SEQ ID NO: 10033 - RNA, 21 nt, RNAi
uuguacaccagacguccacag

SEQ ID NO: 10034 - DNA, 21 bp, Homo sapiens
gatgatttaactgctttggcc

SEQ ID NO: 10035 - RNA, 21 nt, RNAi
ugauuuaacugcuuuggccuu

SEQ ID NO: 10036 - RNA, 21 nt, RNAi
uuacuaaauugacgaaaccgg

SEQ ID NO: 10037 - DNA, 21 bp, Homo sapiens
gatccagagaaactatccaag

SEQ ID NO: 10038 - RNA, 21 nt, RNAi
uccagagaaacuauccaaguu

SEQ ID NO: 10039 - RNA, 21 nt, RNAi
uuaggucucuuugauagguuc

SEQ ID NO: 10040 - DNA, 21 bp, Homo sapiens
gagaaactatccaagctgcta

SEQ ID NO: 10041 - RNA, 21 nt, RNAi
gaaacuauccaagcugcuauu

SEQ ID NO: 10042 - RNA, 21 nt, RNAi
uucuuugauagguucgacgau

SEQ ID NO: 10043 - DNA, 21 bp, Homo sapiens
gaaactatccaagctgctaaa

SEQ ID NO: 10044 - RNA, 21 nt, RNAi
aacuauccaagcugcuaaauu

SEQ ID NO: 10045 - RNA, 21 nt, RNAi
uuuugauagguucgacgauuu

SEQ ID NO: 10046 - DNA, 21 bp, Homo sapiens
gaagttccagcacaagacttg

SEQ ID NO: 10047 - RNA, 21 nt, RNAi
aguuccagcacaagacuuguu

SEQ ID NO: 10048 - RNA, 21 nt, RNAi
uuucaaggucguguucugaac

SEQ ID NO: 10049 - DNA, 21 bp, Homo sapiens
gagaagactgaccataaagct

SEQ ID NO: 10050 - RNA, 21 nt, RNAi
gaagacugaccauaaagcuuu

SEQ ID NO: 10051 - RNA, 21 nt, RNAi
uucuucugacugguauuucga

SEQ ID NO: 10052 - DNA, 21 bp, Homo sapiens
gaagactgaccataaagcttc

SEQ ID NO: 10053 - RNA, 21 nt, RNAi
agacugaccauaaagcuucuu

SEQ ID NO: 10054 - RNA, 21 nt, RNAi
uuucugacugguauuucgaag

SEQ ID NO: 10055 - DNA, 21 bp, Homo sapiens
gactgaccataaagcttcttg

SEQ ID NO: 10056 - RNA, 21 nt, RNAi
cugaccauaaagcuucuuguu

SEQ ID NO: 10057 - RNA, 21 nt, RNAi
uugacugguauuucgaagaac

SEQ ID NO: 10058 - DNA, 21 bp, Homo sapiens
gaccataaagcttcttgcctc

SEQ ID NO: 10059 - RNA, 21 nt, RNAi
ccauaaagcuucuugccucuu

SEQ ID NO: 10060 - RNA, 21 nt, RNAi
uugguauuucgaagaacggag

SEQ ID NO: 10061 - DNA, 21 bp, Homo sapiens
gatagtaatagctgtgagcat

SEQ ID NO: 10062 - RNA, 21 nt, RNAi
uaguaauagcugugagcauuu

SEQ ID NO: 10063 - RNA, 21 nt, RNAi
uuaucauuaucgacacucgua

SEQ ID NO: 10064 - DNA, 21 bp, Homo sapiens
gaaggctggaatgaggtacct

SEQ ID NO: 10065 - RNA, 21 nt, RNAi
aggcuggaaugagguaccuuu

SEQ ID NO: 10066 - RNA, 21 nt, RNAi
uuuccgaccuuacuccaugga

SEQ ID NO: 10067 - DNA, 21 bp, Homo sapiens
gaatgaggtacctgatgaagc

SEQ ID NO: 10068 - RNA, 21 nt, RNAi
augagguaccugaugaagcuu

SEQ ID NO: 10069 - RNA, 21 nt, RNAi
uuuacuccauggacuacuucg

SEQ ID NO: 10070 - DNA, 21 bp, Homo sapiens
gaggtacctgatgaagcttat

SEQ ID NO: 10071 - RNA, 21 nt, RNAi
gguaccugaugaagcuuauuu

SEQ ID NO: 10072 - RNA, 21 nt, RNAi
uuccauggacuacuucgaaua

SEQ ID NO: 10073 - DNA, 21 bp, Homo sapiens
gatgaagcttatgacctgctt

SEQ ID NO: 10074 - RNA, 21 nt, RNAi
ugaagcuuaugaccugcuuuu

SEQ ID NO: 10075 - RNA, 21 nt, RNAi
uuacuucgaauacuggacgaa

SEQ ID NO: 10076 - DNA, 21 bp, Homo sapiens
gaagcttatgacctgcttgat

SEQ ID NO: 10077 - RNA, 21 nt, RNAi
agcuuaugaccugcuugauuu

SEQ ID NO: 10078 - RNA, 21 nt, RNAi
uuucgaauacuggacgaacua

SEQ ID NO: 10079 - DNA, 21 bp, Homo sapiens
gacctgcttgataaacttcta

SEQ ID NO: 10080 - RNA, 21 nt, RNAi
ccugcuugauaaacuucuauu

SEQ ID NO: 10081 - RNA, 21 nt, RNAi
uuggacgaacuauuugaagau

SEQ ID NO: 10082 - DNA, 21 bp, Homo sapiens
gatctaaatccagcttcaaga

SEQ ID NO: 10083 - RNA, 21 nt, RNAi
ucuaaauccagcuucaagauu

SEQ ID NO: 10084 - RNA, 21 nt, RNAi
uuagauuuaggucgaaguucu

SEQ ID NO: 10085 - DNA, 21 bp, Homo sapiens
gaataacagcagaagaagctt

SEQ ID NO: 10086 - RNA, 21 nt, RNAi
auaacagcagaagaagcuuuu

SEQ ID NO: 10087 - RNA, 21 nt, RNAi
uuuauugucgucuucuucgaa

SEQ ID NO: 10088 - DNA, 21 bp, Homo sapiens
gaagaagctttgttgcatcca

SEQ ID NO: 10089 - RNA, 21 nt, RNAi
agaagcuuuguugcauccauu

SEQ ID NO: 10090 - RNA, 21 nt, RNAi
uuucuucgaaacaacguaggu

SEQ ID NO: 10091 - DNA, 21 bp, Homo sapiens
gaagctttgttgcatccattt

SEQ ID NO: 10092 - RNA, 21 nt, RNAi
agcuuuguugcauccauuuuu

SEQ ID NO: 10093 - RNA, 21 nt, RNAi
uuucgaaacaacguagguaaa

SEQ ID NO: 10094 - DNA, 21 bp, Homo sapiens
gatatgagcttgtgataatgg

SEQ ID NO: 10095 - RNA, 21 nt, RNAi
uaugagcuugugauaaugguu

SEQ ID NO: 10096 - RNA, 21 nt, RNAi
uuauacucgaacacuauuacc

SEQ ID NO: 10097 - DNA, 21 bp, Homo sapiens
gagcttgtgataatggatctt

SEQ ID NO: 10098 - RNA, 21 nt, RNAi
gcuugugauaauggaucuuuu

SEQ ID NO: 10099 - RNA, 21 nt, RNAi
uucgaacacuauuaccuagaa

SEQ ID NO: 10100 - DNA, 21 bp, Homo sapiens
gaatactttgtaatagccaca

SEQ ID NO: 10101 - RNA, 21 nt, RNAi
auacuuuguaauagccacauu

SEQ ID NO: 10102 - RNA, 21 nt, RNAi
uuuaugaaacauuaucggugu

SEQ ID NO: 10103 - DNA, 21 bp, Homo sapiens
gagaccagagcaggattaata

SEQ ID NO: 10104 - RNA, 21 nt, RNAi
gaccagagcaggauuaauauu

SEQ ID NO: 10105 - RNA, 21 nt, RNAi
uucuggucucguccuaauuau

SEQ ID NO: 10106 - DNA, 21 bp, Homo sapiens
gaccagagcaggattaataat

SEQ ID NO: 10107 - RNA, 21 nt, RNAi
ccagagcaggauuaauaauuu

SEQ ID NO: 10108 - RNA, 21 nt, RNAi
uuggucucguccuaauuauua

SEQ ID NO: 10109 - DNA, 21 bp, Homo sapiens
gactaacaacatgatcttctt

SEQ ID NO: 10110 - RNA, 21 nt, RNAi
cuaacaacaugaucuucuuuu

SEQ ID NO: 10111 - RNA, 21 nt, RNAi
uugauuguuguacuagaagaa

SEQ ID NO: 10112 - DNA, 21 bp, Homo sapiens
gatcttctttgagttaaacct

SEQ ID NO: 10113 - RNA, 21 nt, RNAi
ucuucuuugaguuaaaccuuu

SEQ ID NO: 10114 - RNA, 21 nt, RNAi
uuagaagaaacucaauuugga

SEQ ID NO: 10115 - DNA, 21 bp, Homo sapiens
gagttaaacctacctaagtag

SEQ ID NO: 10116 - RNA, 21 nt, RNAi
guuaaaccuaccuaaguaguu

SEQ ID NO: 10117 - RNA, 21 nt, RNAi
uucaauuuggauggauucauc

SEQ ID NO: 10118 - DNA, 21 bp, Homo sapiens
gatgtgatgaggattaaatga

SEQ ID NO: 10119 - RNA, 21 nt, RNAi
ugugaugaggauuaaaugauu

SEQ ID NO: 10120 - RNA, 21 nt, RNAi
uuacacuacuccuaauuuacu

SEQ ID NO: 10121 - DNA, 21 bp, Homo sapiens
gagttatgagctaggtatagt

SEQ ID NO: 10122 - RNA, 21 nt, RNAi
guuaugagcuagguauaguuu

SEQ ID NO: 10123 - RNA, 21 nt, RNAi
uucaauacucgauccauauca

SEQ ID NO: 10124 - DNA, 21 bp, Homo sapiens
gaaactcaacctggtgctggt

SEQ ID NO: 10125 - RNA, 21 nt, RNAi
aacucaaccuggugcugguuu

SEQ ID NO: 10126 - RNA, 21 nt, RNAi
uuuugaguuggaccacgacca

SEQ ID NO: 10127 - DNA, 21 bp, Homo sapiens
gaaagcattctggtgtgaatt

SEQ ID NO: 10128 - RNA, 21 nt, RNAi
aagcauucuggugugaauuuu

SEQ ID NO: 10129 - RNA, 21 nt, RNAi
uuuucguaagaccacacuuaa

SEQ ID NO: 10130 - DNA, 21 bp, Homo sapiens
gaaattacatggtgctgacca

SEQ ID NO: 10131 - RNA, 21 nt, RNAi
aauuacauggugcugaccauu

SEQ ID NO: 10132 - RNA, 21 nt, RNAi
uuuuaauguaccacgacuggu

SEQ ID NO: 10133 - DNA, 21 bp, Homo sapiens
gaccacaaagtttctggatgt

SEQ ID NO: 10134 - RNA, 21 nt, RNAi
ccacaaaguuucuggauguuu

SEQ ID NO: 10135 - RNA, 21 nt, RNAi
uugguguuucaaagaccuaca

SEQ ID NO: 10136 - DNA, 21 bp, Homo sapiens
gaagctgcaggaccaaggtga

SEQ ID NO: 10137 - RNA, 21 nt, RNAi
agcugcaggaccaaggugauu

SEQ ID NO: 10138 - RNA, 21 nt, RNAi
uuucgacguccugguuccacu

SEQ ID NO: 10139 - DNA, 21 bp, Homo sapiens
gaccaaggtgaagattgatag

SEQ ID NO: 10140 - RNA, 21 nt, RNAi
ccaaggugaagauugauaguu

SEQ ID NO: 10141 - RNA, 21 nt, RNAi
uugguuccacuucuaacuauc

SEQ ID NO: 10142 - DNA, 21 bp, Homo sapiens
gaagattgatagtccaaatgc

SEQ ID NO: 10143 - RNA, 21 nt, RNAi
agauugauaguccaaaugcuu

SEQ ID NO: 10144 - RNA, 21 nt, RNAi
uuucuaacuaucagguuuacg

SEQ ID NO: 10145 - DNA, 21 bp, Homo sapiens
gattgatagtccaaatgcttt

SEQ ID NO: 10146 - RNA, 21 nt, RNAi
uugauaguccaaaugcuuuuu

SEQ ID NO: 10147 - RNA, 21 nt, RNAi
uuaacuaucagguuuacgaaa

SEQ ID NO: 10148 - DNA, 21 bp, Homo sapiens
gatataattaggtagctgctg

SEQ ID NO: 10149 - RNA, 21 nt, RNAi
uauaauuagguagcugcuguu

SEQ ID NO: 10150 - RNA, 21 nt, RNAi
uuauauuaauccaucgacgac

SEQ ID NO: 10151 - DNA, 21 bp, Homo sapiens
gaatacagaattgacggtatt

SEQ ID NO: 10152 - RNA, 21 nt, RNAi
auacagaauugacgguauuuu

SEQ ID NO: 10153 - RNA, 21 nt, RNAi
uuuaugucuuaacugccauaa

SEQ ID NO: 10154 - DNA, 21 bp, Homo sapiens
gaattgacggtattattggag

SEQ ID NO: 10155 - RNA, 21 nt, RNAi
auugacgguauuauuggaguu

SEQ ID NO: 10156 - RNA, 21 nt, RNAi
uuuaacugccauaauaaccuc

SEQ ID NO: 10157 - DNA, 21 bp, Homo sapiens
gagccatccagatctctgtat

SEQ ID NO: 10158 - RNA, 21 nt, RNAi
gccauccagaucucuguauuu

SEQ ID NO: 10159 - RNA, 21 nt, RNAi
uucgguaggucuagagacaua

SEQ ID NO: 10160 - DNA, 21 bp, Homo sapiens
gaagacagataatgaagtagg

SEQ ID NO: 10161 - RNA, 21 nt, RNAi
agacagauaaugaaguagguu

SEQ ID NO: 10162 - RNA, 21 nt, RNAi
uuucugucuauuacuucaucc

SEQ ID NO: 10163 - DNA, 21 bp, Homo sapiens
gacagataatgaagtaggcaa

SEQ ID NO: 10164 - RNA, 21 nt, RNAi
cagauaaugaaguaggcaauu

SEQ ID NO: 10165 - RNA, 21 nt, RNAi
uugucuauuacuucauccguu

SEQ ID NO: 10166 - DNA, 21 bp, Homo sapiens
gataatgaagtaggcaaagag

SEQ ID NO: 10167 - RNA, 21 nt, RNAi
uaaugaaguaggcaaagaguu

SEQ ID NO: 10168 - RNA, 21 nt, RNAi
uuauuacuucauccguuucuc

SEQ ID NO: 10169 - DNA, 21 bp, Homo sapiens
gaggtttatattcagaaatgg

SEQ ID NO: 10170 - RNA, 21 nt, RNAi
gguuuauauucagaaaugguu

SEQ ID NO: 10171 - RNA, 21 nt, RNAi
uuccaaauauaagucuuuacc

SEQ ID NO: 10172 - DNA, 21 bp, Homo sapiens
gacagcatatcaaacttccta

SEQ ID NO: 10173 - RNA, 21 nt, RNAi
cagcauaucaaacuuccuauu

SEQ ID NO: 10174 - RNA, 21 nt, RNAi
uugucguauaguuugaaggau

SEQ ID NO: 10175 - DNA, 21 bp, Homo sapiens
gagcattgataggtcagtata

SEQ ID NO: 10176 - RNA, 21 nt, RNAi
gcauugauaggucaguauauu

SEQ ID NO: 10177 - RNA, 21 nt, RNAi
uucguaacuauccagucauau

SEQ ID NO: 10178 - DNA, 21 bp, Homo sapiens
gataggtcagtatatctacct

SEQ ID NO: 10179 - RNA, 21 nt, RNAi
uaggucaguauaucuaccuuu

SEQ ID NO: 10180 - RNA, 21 nt, RNAi
uuauccagucauauagaugga

SEQ ID NO: 10181 - DNA, 21 bp, Homo sapiens
gatctgtcttatgccataatc

SEQ ID NO: 10182 - RNA, 21 nt, RNAi
ucugucuuaugccauaaucuu

SEQ ID NO: 10183 - RNA, 21 nt, RNAi
uuagacagaauacgguauuag

SEQ ID NO: 10184 - DNA, 21 bp, Homo sapiens
tattgagaagctttatgaagc

SEQ ID NO: 10185 - RNA, 21 nt, RNAi
uugagaagcuuuaugaagcuu

SEQ ID NO: 10186 - RNA, 21 nt, RNAi
uuaacucuucgaaauacuucg

SEQ ID NO: 10187 - DNA, 21 bp, Homo sapiens
tatgaagctgtaccacagctt

SEQ ID NO: 10188 - RNA, 21 nt, RNAi
ugaagcuguaccacagcuuuu

SEQ ID NO: 10189 - RNA, 21 nt, RNAi
uuacuucgacauggugucgaa

SEQ ID NO: 10190 - DNA, 21 bp, Homo sapiens
taccacagcttagtaatgtgt

SEQ ID NO: 10191 - RNA, 21 nt, RNAi
ccacagcuuaguaauguguuu

SEQ ID NO: 10192 - RNA, 21 nt, RNAi
uuggugucgaaucauuacaca

SEQ ID NO: 10193 - DNA, 21 bp, Homo sapiens
tatttggccacagcacagtta

SEQ ID NO: 10194 - RNA, 21 nt, RNAi
uuuggccacagcacaguuauu

SEQ ID NO: 10195 - RNA, 21 nt, RNAi
uuaaaccggugucgugucaau

SEQ ID NO: 10196 - DNA, 21 bp, Homo sapiens
tacaagtaggacctgaagaga

SEQ ID NO: 10197 - RNA, 21 nt, RNAi
caaguaggaccugaagagauu

SEQ ID NO: 10198 - RNA, 21 nt, RNAi
uuguucauccuggacuucucu

SEQ ID NO: 10199 - DNA, 21 bp, Homo sapiens
tataagaattgcagctgaact

SEQ ID NO: 10200 - RNA, 21 nt, RNAi
uaagaauugcagcugaacuuu

SEQ ID NO: 10201 - RNA, 21 nt, RNAi
uuauucuuaacgucgacuuga

SEQ ID NO: 10202 - DNA, 21 bp, Homo sapiens
taagaattgcagctgaacttc

SEQ ID NO: 10203 - RNA, 21 nt, RNAi
agaauugcagcugaacuucuu

SEQ ID NO: 10204 - RNA, 21 nt, RNAi
uuucuuaacgucgacuugaag

SEQ ID NO: 10205 - DNA, 21 bp, Homo sapiens
tactgctttaggaagaatgat

SEQ ID NO: 10206 - RNA, 21 nt, RNAi
cugcuuuaggaagaaugauuu

SEQ ID NO: 10207 - RNA, 21 nt, RNAi
uugacgaaauccuucuuacua

SEQ ID NO: 10208 - DNA, 21 bp, Homo sapiens
taggaagaatgatcatgtagt

SEQ ID NO: 10209 - RNA, 21 nt, RNAi
ggaagaaugaucauguaguuu

SEQ ID NO: 10210 - RNA, 21 nt, RNAi
uuccuucuuacuaguacauca

SEQ ID NO: 10211 - DNA, 21 bp, Homo sapiens
tagttattgctatgccatatc

SEQ ID NO: 10212 - RNA, 21 nt, RNAi
guuauugcuaugccauaucuu

SEQ ID NO: 10213 - RNA, 21 nt, RNAi
uucaauaacgauacgguauag

SEQ ID NO: 10214 - DNA, 21 bp, Homo sapiens
tattgctatgccatatctgga

SEQ ID NO: 10215 - RNA, 21 nt, RNAi
uugcuaugccauaucuggauu

SEQ ID NO: 10216 - RNA, 21 nt, RNAi
uuaacgauacgguauagaccu

SEQ ID NO: 10217 - DNA, 21 bp, Homo sapiens
tatgccatatctggagcatga

SEQ ID NO: 10218 - RNA, 21 nt, RNAi
ugccauaucuggagcaugauu

SEQ ID NO: 10219 - RNA, 21 nt, RNAi
uuacgguauagaccucguacu

SEQ ID NO: 10220 - DNA, 21 bp, Homo sapiens
tatctggagcatgagtcgttt

SEQ ID NO: 10221 - RNA, 21 nt, RNAi
ucuggagcaugagucguuuuu

SEQ ID NO: 10222 - RNA, 21 nt, RNAi
uuagaccucguacucagcaaa

SEQ ID NO: 10223 - DNA, 21 bp, Homo sapiens
tatgcttaatctgttcaaagc

SEQ ID NO: 10224 - RNA, 21 nt, RNAi
ugcuuaaucuguucaaagcuu

SEQ ID NO: 10225 - RNA, 21 nt, RNAi
uuacgaauuagacaaguuucg

SEQ ID NO: 10226 - DNA, 21 bp, Homo sapiens
tattgttcaccgtgatgttaa

SEQ ID NO: 10227 - RNA, 21 nt, RNAi
uuguucaccgugauguuaauu

SEQ ID NO: 10228 - RNA, 21 nt, RNAi
uuaacaaguggcacuacaauu

SEQ ID NO: 10229 - DNA, 21 bp, Homo sapiens
tatgccttggtagactttggt

SEQ ID NO: 10230 - RNA, 21 nt, RNAi
ugccuugguagacuuugguuu

SEQ ID NO: 10231 - RNA, 21 nt, RNAi
uuacggaaccaucugaaacca

SEQ ID NO: 10232 - DNA, 21 bp, Homo sapiens
tagagcttcttaaatttgtcc

SEQ ID NO: 10233 - RNA, 21 nt, RNAi
gagcuucuuaaauuuguccuu

SEQ ID NO: 10234 - RNA, 21 nt, RNAi
uucucgaagaauuuaaacagg

SEQ ID NO: 10235 - DNA, 21 bp, Homo sapiens
taaatttgtccagtctgaagc

SEQ ID NO: 10236 - RNA, 21 nt, RNAi
aauuuguccagucugaagcuu

SEQ ID NO: 10237 - RNA, 21 nt, RNAi
uuuuaaacaggucagacuucg

SEQ ID NO: 10238 - DNA, 21 bp, Homo sapiens
taatcacaggaaacaagattc

SEQ ID NO: 10239 - RNA, 21 nt, RNAi
aucacaggaaacaagauucuu

SEQ ID NO: 10240 - RNA, 21 nt, RNAi
uuuaguguccuuuguucuaag

SEQ ID NO: 10241 - DNA, 21 bp, Homo sapiens
tacctaaggagctggatcagc

SEQ ID NO: 10242 - RNA, 21 nt, RNAi
ccuaaggagcuggaucagcuu

SEQ ID NO: 10243 - RNA, 21 nt, RNAi
uuggauuccucgaccuagucg

SEQ ID NO: 10244 - DNA, 21 bp, Homo sapiens
taaggagctggatcagcagtc

SEQ ID NO: 10245 - RNA, 21 nt, RNAi
aggagcuggaucagcagucuu

SEQ ID NO: 10246 - RNA, 21 nt, RNAi
uuuccucgaccuagucgucag

SEQ ID NO: 10247 - DNA, 21 bp, Homo sapiens
tacacaaatgcacaaattcag

SEQ ID NO: 10248 - RNA, 21 nt, RNAi
cacaaaugcacaaauucaguu

SEQ ID NO: 10249 - RNA, 21 nt, RNAi
uuguguuuacguguuuaaguc

SEQ ID NO: 10250 - DNA, 21 bp, Homo sapiens
taggcctttctgtccagcgct

SEQ ID NO: 10251 - RNA, 21 nt, RNAi
ggccuuucuguccagcgcuuu

SEQ ID NO: 10252 - RNA, 21 nt, RNAi
uuccggaaagacaggucgcga

SEQ ID NO: 10253 - DNA, 21 bp, Homo sapiens
tatacacagctccatttcaca

SEQ ID NO: 10254 - RNA, 21 nt, RNAi
uacacagcuccauuucacauu

SEQ ID NO: 10255 - RNA, 21 nt, RNAi
uuaugugucgagguaaagugu

SEQ ID NO: 10256 - DNA, 21 bp, Homo sapiens
tacacagctccatttcacatg

SEQ ID NO: 10257 - RNA, 21 nt, RNAi
cacagcuccauuucacauguu

SEQ ID NO: 10258 - RNA, 21 nt, RNAi
uugugucgagguaaaguguac

SEQ ID NO: 10259 - DNA, 21 bp, Homo sapiens
tactgtctagaaagttagcaa

SEQ ID NO: 10260 - RNA, 21 nt, RNAi
cugucuagaaaguuagcaauu

SEQ ID NO: 10261 - RNA, 21 nt, RNAi
uugacagaucuuucaaucguu

SEQ ID NO: 10262 - DNA, 21 bp, Homo sapiens
tacgaaagttatgaatagtgc

SEQ ID NO: 10263 - RNA, 21 nt, RNAi
cgaaaguuaugaauagugcuu

SEQ ID NO: 10264 - RNA, 21 nt, RNAi
uugcuuucaauacuuaucacg

SEQ ID NO: 10265 - DNA, 21 bp, Homo sapiens
tatgaatagtgctgtgatgag

SEQ ID NO: 10266 - RNA, 21 nt, RNAi
ugaauagugcugugaugaguu

SEQ ID NO: 10267 - RNA, 21 nt, RNAi
uuacuuaucacgacacuacuc

SEQ ID NO: 10268 - DNA, 21 bp, Homo sapiens
tagcctgacctgtgactgcta

SEQ ID NO: 10269 - RNA, 21 nt, RNAi
gccugaccugugacugcuauu

SEQ ID NO: 10270 - RNA, 21 nt, RNAi
uucggacuggacacugacgau

SEQ ID NO: 10271 - DNA, 21 bp, Homo sapiens
tagtatttgcctttcaaggcg

SEQ ID NO: 10272 - RNA, 21 nt, RNAi
guauuugccuuucaaggcguu

SEQ ID NO: 10273 - RNA, 21 nt, RNAi
uucauaaacggaaaguuccgc

SEQ ID NO: 10274 - DNA, 21 bp, Homo sapiens
tatttgcctttcaaggcgtca

SEQ ID NO: 10275 - RNA, 21 nt, RNAi
uuugccuuucaaggcgucauu

SEQ ID NO: 10276 - RNA, 21 nt, RNAi
uuaaacggaaaguuccgcagu

SEQ ID NO: 10277 - DNA, 21 bp, Homo sapiens
tacaccaggattcagagcacc

SEQ ID NO: 10278 - RNA, 21 nt, RNAi
caccaggauucagagcaccuu

SEQ ID NO: 10279 - RNA, 21 nt, RNAi
uugugguccuaagucucgugg

SEQ ID NO: 10280 - DNA, 21 bp, Homo sapiens
tacagcaattgacatgtggtc

SEQ ID NO: 10281 - RNA, 21 nt, RNAi
cagcaauugacauguggucuu

SEQ ID NO: 10282 - RNA, 21 nt, RNAi
uugucguuaacuguacaccag

SEQ ID NO: 10283 - DNA, 21 bp, Homo sapiens
tatgtagcaaagaagttccag

SEQ ID NO: 10284 - RNA, 21 nt, RNAi
uguagcaaagaaguuccaguu

SEQ ID NO: 10285 - RNA, 21 nt, RNAi
uuacaucguuucuucaagguc

SEQ ID NO: 10286 - DNA, 21 bp, Homo sapiens
tagcaaagaagttccagcaca

SEQ ID NO: 10287 - RNA, 21 nt, RNAi
gcaaagaaguuccagcacauu

SEQ ID NO: 10288 - RNA, 21 nt, RNAi
uucguuucuucaaggucgugu

SEQ ID NO: 10289 - DNA, 21 bp, Homo sapiens
tatttcagagaagactgacca

SEQ ID NO: 10290 - RNA, 21 nt, RNAi
uuucagagaagacugaccauu

SEQ ID NO: 10291 - RNA, 21 nt, RNAi
uuaaagucucuucugacuggu

SEQ ID NO: 10292 - DNA, 21 bp, Homo sapiens
taaagcttcttgcctcgttca

SEQ ID NO: 10293 - RNA, 21 nt, RNAi
aagcuucuugccucguucauu

SEQ ID NO: 10294 - RNA, 21 nt, RNAi
uuuucgaagaacggagcaagu

SEQ ID NO: 10295 - DNA, 21 bp, Homo sapiens
tagtaatagctgtgagcattg

SEQ ID NO: 10296 - RNA, 21 nt, RNAi
guaauagcugugagcauuguu

SEQ ID NO: 10297 - RNA, 21 nt, RNAi
uucauuaucgacacucguaac

SEQ ID NO: 10298 - DNA, 21 bp, Homo sapiens
taatagctgtgagcattgttt

SEQ ID NO: 10299 - RNA, 21 nt, RNAi
auagcugugagcauuguuuuu

SEQ ID NO: 10300 - RNA, 21 nt, RNAi
uuuaucgacacucguaacaaa

SEQ ID NO: 10301 - DNA, 21 bp, Homo sapiens
taataccaatttagaaggctg

SEQ ID NO: 10302 - RNA, 21 nt, RNAi
auaccaauuuagaaggcuguu

SEQ ID NO: 10303 - RNA, 21 nt, RNAi
uuuaugguuaaaucuuccgac

SEQ ID NO: 10304 - DNA, 21 bp, Homo sapiens
taccaatttagaaggctggaa

SEQ ID NO: 10305 - RNA, 21 nt, RNAi
ccaauuuagaaggcuggaauu

SEQ ID NO: 10306 - RNA, 21 nt, RNAi
uugguuaaaucuuccgaccuu

SEQ ID NO: 10307 - DNA, 21 bp, Homo sapiens
tagaaggctggaatgaggtac

SEQ ID NO: 10308 - RNA, 21 nt, RNAi
gaaggcuggaaugagguacuu

SEQ ID NO: 10309 - RNA, 21 nt, RNAi
uucuuccgaccuuacuccaug

SEQ ID NO: 10310 - DNA, 21 bp, Homo sapiens
tacctgatgaagcttatgacc

SEQ ID NO: 10311 - RNA, 21 nt, RNAi
ccugaugaagcuuaugaccuu

SEQ ID NO: 10312 - RNA, 21 nt, RNAi
uuggacuacuucgaauacugg

SEQ ID NO: 10313 - DNA, 21 bp, Homo sapiens
tatgacctgcttgataaactt

SEQ ID NO: 10314 - RNA, 21 nt, RNAi
ugaccugcuugauaaacuuuu

SEQ ID NO: 10315 - RNA, 21 nt, RNAi
uuacuggacgaacuauuugaa

SEQ ID NO: 10316 - DNA, 21 bp, Homo sapiens
tagatctaaatccagcttcaa

SEQ ID NO: 10317 - RNA, 21 nt, RNAi
gaucuaaauccagcuucaauu

SEQ ID NO: 10318 - RNA, 21 nt, RNAi
uucuagauuuaggucgaaguu

SEQ ID NO: 10319 - DNA, 21 bp, Homo sapiens
taacagcagaagaagctttgt

SEQ ID NO: 10320 - RNA, 21 nt, RNAi
acagcagaagaagcuuuguuu

SEQ ID NO: 10321 - RNA, 21 nt, RNAi
uuugucgucuucuucgaaaca

SEQ ID NO: 10322 - DNA, 21 bp, Homo sapiens
tatgagcttgtgataatggat

SEQ ID NO: 10323 - RNA, 21 nt, RNAi
ugagcuugugauaauggauuu

SEQ ID NO: 10324 - RNA, 21 nt, RNAi
uuacucgaacacuauuaccua

SEQ ID NO: 10325 - DNA, 21 bp, Homo sapiens
tactttgtaatagccacaagt

SEQ ID NO: 10326 - RNA, 21 nt, RNAi
cuuuguaauagccacaaguuu

SEQ ID NO: 10327 - RNA, 21 nt, RNAi
uugaaacauuaucgguguuca

SEQ ID NO: 10328 - DNA, 21 bp, Homo sapiens
taatagccacaagttcttgtt

SEQ ID NO: 10329 - RNA, 21 nt, RNAi
auagccacaaguucuuguuuu

SEQ ID NO: 10330 - RNA, 21 nt, RNAi
uuuaucgguguucaagaacaa

SEQ ID NO: 10331 - DNA, 21 bp, Homo sapiens
tagccacaagttcttgtttag

SEQ ID NO: 10332 - RNA, 21 nt, RNAi
gccacaaguucuuguuuaguu

SEQ ID NO: 10333 - RNA, 21 nt, RNAi
uucgguguucaagaacaaauc

SEQ ID NO: 10334 - DNA, 21 bp, Homo sapiens
tagagaccagagcaggattaa

SEQ ID NO: 10335 - RNA, 21 nt, RNAi
gagaccagagcaggauuaauu

SEQ ID NO: 10336 - RNA, 21 nt, RNAi
uucucuggucucguccuaauu

SEQ ID NO: 10337 - DNA, 21 bp, Homo sapiens
tagtgtttggtggcacattct

SEQ ID NO: 10338 - RNA, 21 nt, RNAi
guguuugguggcacauucuuu

SEQ ID NO: 10339 - RNA, 21 nt, RNAi
uucacaaaccaccguguaaga

SEQ ID NO: 10340 - DNA, 21 bp, Homo sapiens
tacctttcactgacatacaga

SEQ ID NO: 10341 - RNA, 21 nt, RNAi
ccuuucacugacauacagauu

SEQ ID NO: 10342 - RNA, 21 nt, RNAi
uuggaaagugacuguaugucu

SEQ ID NO: 10343 - DNA, 21 bp, Homo sapiens
taacagatgtgatgaggatta

SEQ ID NO: 10344 - RNA, 21 nt, RNAi
acagaugugaugaggauuauu

SEQ ID NO: 10345 - RNA, 21 nt, RNAi
uuugucuacacuacuccuaau

SEQ ID NO: 10346 - DNA, 21 bp, Homo sapiens
tagagttatgagctaggtata

SEQ ID NO: 10347 - RNA, 21 nt, RNAi
gaguuaugagcuagguauauu

SEQ ID NO: 10348 - RNA, 21 nt, RNAi
uucucaauacucgauccauau

SEQ ID NO: 10349 - DNA, 21 bp, Homo sapiens
tatgagctaggtatagtttgg

SEQ ID NO: 10350 - RNA, 21 nt, RNAi
ugagcuagguauaguuugguu

SEQ ID NO: 10351 - RNA, 21 nt, RNAi
uuacucgauccauaucaaacc

SEQ ID NO: 10352 - DNA, 21 bp, Homo sapiens
tagaggtacatattaggcctt

SEQ ID NO: 10353 - RNA, 21 nt, RNAi
gagguacauauuaggccuuuu

SEQ ID NO: 10354 - RNA, 21 nt, RNAi
uucuccauguauaauccggaa

SEQ ID NO: 10355 - DNA, 21 bp, Homo sapiens
tacatggtgctgaccacaaag

SEQ ID NO: 10356 - RNA, 21 nt, RNAi
cauggugcugaccacaaaguu

SEQ ID NO: 10357 - RNA, 21 nt, RNAi
uuguaccacgacugguguuuc

SEQ ID NO: 10358 - DNA, 21 bp, Homo sapiens
tattgtacgtgtttacagttg

SEQ ID NO: 10359 - RNA, 21 nt, RNAi
uuguacguguuuacaguuguu

SEQ ID NO: 10360 - RNA, 21 nt, RNAi
uuaacaugcacaaaugucaac

SEQ ID NO: 10361 - DNA, 21 bp, Homo sapiens
tacatacactggttgataaag

SEQ ID NO: 10362 - RNA, 21 nt, RNAi
cauacacugguugauaaaguu

SEQ ID NO: 10363 - RNA, 21 nt, RNAi
uuguaugugaccaacuauuuc

SEQ ID NO: 10364 - DNA, 21 bp, Homo sapiens
tagatataattaggtagctgc

SEQ ID NO: 10365 - RNA, 21 nt, RNAi
gauauaauuagguagcugcuu

SEQ ID NO: 10366 - RNA, 21 nt, RNAi
uucuauauuaauccaucgacg

SEQ ID NO: 10367 - DNA, 21 bp, Homo sapiens
tataattaggtagctgctgaa

SEQ ID NO: 10368 - RNA, 21 nt, RNAi
uaauuagguagcugcugaauu

SEQ ID NO: 10369 - RNA, 21 nt, RNAi
uuauuaauccaucgacgacuu

SEQ ID NO: 10370 - DNA, 21 bp, Homo sapiens
taattaggtagctgctgaaag

SEQ ID NO: 10371 - RNA, 21 nt, RNAi
auuagguagcugcugaaaguu

SEQ ID NO: 10372 - RNA, 21 nt, RNAi
uuuaauccaucgacgacuuuc

SEQ ID NO: 10373 - DNA, 21 bp, Homo sapiens
taggtagctgctgaaaggaaa

SEQ ID NO: 10374 - RNA, 21 nt, RNAi
gguagcugcugaaaggaaauu

SEQ ID NO: 10375 - RNA, 21 nt, RNAi
uuccaucgacgacuuuccuuu

SEQ ID NO: 10376 - DNA, 21 bp, Homo sapiens
tagagccatccagatctctgt

SEQ ID NO: 10377 - RNA, 21 nt, RNAi
gagccauccagaucucuguuu

SEQ ID NO: 10378 - RNA, 21 nt, RNAi
uucucgguaggucuagagaca

SEQ ID NO: 10379 - DNA, 21 bp, Homo sapiens
taatgaagtaggcaaagagaa

SEQ ID NO: 10380 - RNA, 21 nt, RNAi
augaaguaggcaaagagaauu

SEQ ID NO: 10381 - RNA, 21 nt, RNAi
uuuacuucauccguuucucuu

SEQ ID NO: 10382 - DNA, 21 bp, Homo sapiens
taggtcagtatatctacctaa

SEQ ID NO: 10383 - RNA, 21 nt, RNAi
ggucaguauaucuaccuaauu

SEQ ID NO: 10384 - RNA, 21 nt, RNAi
uuccagucauauagauggauu

SEQ ID NO: 10385 - DNA, 21 bp, Homo sapiens
tatctacctaatctgtttggt

SEQ ID NO: 10386 - RNA, 21 nt, RNAi
ucuaccuaaucuguuugguuu

SEQ ID NO: 10387 - RNA, 21 nt, RNAi
uuagauggauuagacaaacca

SEQ ID NO: 10388 - DNA, 21 bp, Homo sapiens
tacctaatctgtttggtaagt

SEQ ID NO: 10389 - RNA, 21 nt, RNAi
ccuaaucuguuugguaaguuu

SEQ ID NO: 10390 - RNA, 21 nt, RNAi
uuggauuagacaaaccauuca

SEQ ID NO: 10391 - DNA, 21 bp, Homo sapiens
taaaccattaccattgatctg

SEQ ID NO: 10392 - RNA, 21 nt, RNAi
aaccauuaccauugaucuguu

SEQ ID NO: 10393 - RNA, 21 nt, RNAi
uuuugguaaugguaacuagac

SEQ ID NO: 10394 - DNA, 21 bp, Homo sapiens
taccattgatctgtcttatgc

SEQ ID NO: 10395 - RNA, 21 nt, RNAi
ccauugaucugucuuaugcuu

SEQ ID NO: 10396 - RNA, 21 nt, RNAi
uugguaacuagacagaauacg

SEQ ID NO: 10397 - DNA, 21 bp, Homo sapiens
aatgtgtttaagattgaggac

SEQ ID NO: 10398 - RNA, 21 nt, RNAi
uguguuuaagauugaggacuu

SEQ ID NO: 10399 - RNA, 21 nt, RNAi
uuacacaaauucuaacuccug

SEQ ID NO: 10400 - DNA, 21 bp, Homo sapiens
aagtcatcctataagaattgc

SEQ ID NO: 10401 - RNA, 21 nt, RNAi
gucauccuauaagaauugcuu

SEQ ID NO: 10402 - RNA, 21 nt, RNAi
uucaguaggauauucuuaacg

SEQ ID NO: 10403 - DNA, 21 bp, Homo sapiens
aacttcagtgcctaacagtgg

SEQ ID NO: 10404 - RNA, 21 nt, RNAi
cuucagugccuaacagugguu

SEQ ID NO: 10405 - RNA, 21 nt, RNAi
uugaagucacggauugucacc

SEQ ID NO: 10406 - DNA, 21 bp, Homo sapiens
aaagtatgccttggtagactt

SEQ ID NO: 10407 - RNA, 21 nt, RNAi
aguaugccuugguagacuuuu

SEQ ID NO: 10408 - RNA, 21 nt, RNAi
uuucauacggaaccaucugaa

SEQ ID NO: 10409 - DNA, 21 bp, Homo sapiens
aagtatgccttggtagacttt

SEQ ID NO: 10410 - RNA, 21 nt, RNAi
guaugccuugguagacuuuuu

SEQ ID NO: 10411 - RNA, 21 nt, RNAi
uucauacggaaccaucugaaa

SEQ ID NO: 10412 - DNA, 21 bp, Homo sapiens
aaggctatttctacgaaagtt

SEQ ID NO: 10413 - RNA, 21 nt, RNAi
ggcuauuucuacgaaaguuuu

SEQ ID NO: 10414 - RNA, 21 nt, RNAi
uuccgauaaagaugcuuucaa

SEQ ID NO: 10415 - DNA, 21 bp, Homo sapiens
aagcaagtgatgatttaactg

SEQ ID NO: 10416 - RNA, 21 nt, RNAi
gcaagugaugauuuaacuguu

SEQ ID NO: 10417 - RNA, 21 nt, RNAi
uucguucacuacuaaauugac

SEQ ID NO: 10418 - DNA, 21 bp, Homo sapiens
cacttgattccaacaagtcat

SEQ ID NO: 10419 - RNA, 21 nt, RNAi
cuugauuccaacaagucauuu

SEQ ID NO: 10420 - RNA, 21 nt, RNAi
uugaacuaagguuguucagua

SEQ ID NO: 10421 - DNA, 21 bp, Homo sapiens
catcctataagaattgcagct

SEQ ID NO: 10422 - RNA, 21 nt, RNAi
uccuauaagaauugcagcuuu

SEQ ID NO: 10423 - RNA, 21 nt, RNAi
uuaggauauucuuaacgucga

SEQ ID NO: 10424 - DNA, 21 bp, Homo sapiens
caaagactgtggatgtactgt

SEQ ID NO: 10425 - RNA, 21 nt, RNAi
aagacuguggauguacuguuu

SEQ ID NO: 10426 - RNA, 21 nt, RNAi
uuuucugacaccuacaugaca

SEQ ID NO: 10427 - DNA, 21 bp, Homo sapiens
caggtacaccaggattcagag

SEQ ID NO: 10428 - RNA, 21 nt, RNAi
gguacaccaggauucagaguu

SEQ ID NO: 10429 - RNA, 21 nt, RNAi
uuccaugugguccuaagucuc

SEQ ID NO: 10430 - DNA, 21 bp, Homo sapiens
cagaggtcttgacaaagtgcc

SEQ ID NO: 10431 - RNA, 21 nt, RNAi
gaggucuugacaaagugccuu

SEQ ID NO: 10432 - RNA, 21 nt, RNAi
uucuccagaacuguuucacgg

SEQ ID NO: 10433 - DNA, 21 bp, Homo sapiens
gaacttcagtgcctaacagtg

SEQ ID NO: 10434 - RNA, 21 nt, RNAi
acuucagugccuaacaguguu

SEQ ID NO: 10435 - RNA, 21 nt, RNAi
uuugaagucacggauugucac

SEQ ID NO: 10436 - DNA, 21 bp, Homo sapiens
gaaggctatttctacgaaagt

SEQ ID NO: 10437 - RNA, 21 nt, RNAi
aggcuauuucuacgaaaguuu

SEQ ID NO: 10438 - RNA, 21 nt, RNAi
uuuccgauaaagaugcuuuca

SEQ ID NO: 10439 - DNA, 21 bp, Homo sapiens
gactgaccataaagcttcttg

SEQ ID NO: 10440 - RNA, 21 nt, RNAi
cugaccauaaagcuucuuguu

SEQ ID NO: 10441 - RNA, 21 nt, RNAi
uugacugguauuucgaagaac

SEQ ID NO: 10442 - DNA, 21 bp, Homo sapiens
gatagtaatagctgtgagcat

SEQ ID NO: 10443 - RNA, 21 nt, RNAi
uaguaauagcugugagcauuu

SEQ ID NO: 10444 - RNA, 21 nt, RNAi
uuaucauuaucgacacucgua

SEQ ID NO: 10445 - DNA, 21 bp, Homo sapiens
gacctgcttgataaacttcta

SEQ ID NO: 10446 - RNA, 21 nt, RNAi
ccugcuugauaaacuucuauu

SEQ ID NO: 10447 - RNA, 21 nt, RNAi
uuggacgaacuauuugaagau

SEQ ID NO: 10448 - DNA, 21 bp, Homo sapiens
taccacagcttagtaatgtgt

SEQ ID NO: 10449 - RNA, 21 nt, RNAi
ccacagcuuaguaauguguuu

SEQ ID NO: 10450 - RNA, 21 nt, RNAi
uuggugucgaaucauuacaca

SEQ ID NO: 10451 - DNA, 21 bp, Homo sapiens
taggaagaatgatcatgtagt

SEQ ID NO: 10452 - RNA, 21 nt, RNAi
ggaagaaugaucauguaguuu

SEQ ID NO: 10453 - RNA, 21 nt, RNAi
uuccuucuuacuaguacauca

SEQ ID NO: 10454 - DNA, 21 bp, Homo sapiens
tattgctatgccatatctgga

SEQ ID NO: 10455 - RNA, 21 nt, RNAi
uugcuaugccauaucuggauu

SEQ ID NO: 10456 - RNA, 21 nt, RNAi
uuaacgauacgguauagaccu

SEQ ID NO: 10457 - DNA, 21 bp, Homo sapiens
tatctggagcatgagtcgttt

SEQ ID NO: 10458 - RNA, 21 nt, RNAi
ucuggagcaugagucguuuuu

SEQ ID NO: 10459 - RNA, 21 nt, RNAi
uuagaccucguacucagcaaa

SEQ ID NO: 10460 - DNA, 21 bp, Homo sapiens
tatgccttggtagactttggt

SEQ ID NO: 10461 - RNA, 21 nt, RNAi
ugccuugguagacuuugguuu

SEQ ID NO: 10462 - RNA, 21 nt, RNAi
uuacggaaccaucugaaacca

SEQ ID NO: 10463 - DNA, 21 bp, Homo sapiens
tagtaatagctgtgagcattg

SEQ ID NO: 10464 - RNA, 21 nt, RNAi
guaauagcugugagcauuguu

SEQ ID NO: 10465 - RNA, 21 nt, RNAi
uucauuaucgacacucguaac

SEQ ID NO: 10466 - DNA, 21 bp, Homo sapiens
taatagctgtgagcattgttt

SEQ ID NO: 10467 - RNA, 21 nt, RNAi
auagcugugagcauuguuuuu

SEQ ID NO: 10468 - RNA, 21 nt, RNAi
uuuaucgacacucguaacaaa

SEQ ID NO: 10469 - DNA, 21 bp, Homo sapiens
aacattgtttcaagttggcca

SEQ ID NO: 10470 - RNA, 21 nt, RNAi
cauuguuucaaguuggccauu

SEQ ID NO: 10471 - RNA, 21 nt, RNAi
uuguaacaaaguucaaccggu

SEQ ID NO: 10472 - DNA, 21 bp, Homo sapiens
aagttggccaaattgacaaga

SEQ ID NO: 10473 - RNA, 21 nt, RNAi
guuggccaaauugacaagauu

SEQ ID NO: 10474 - RNA, 21 nt, RNAi
uucaaccgguuuaacuguucu

SEQ ID NO: 10475 - DNA, 21 bp, Homo sapiens
aaattgacaagagcgagaggt

SEQ ID NO: 10476 - RNA, 21 nt, RNAi
auugacaagagcgagagguuu

SEQ ID NO: 10477 - RNA, 21 nt, RNAi
uuuaacuguucucgcucucca

SEQ ID NO: 10478 - DNA, 21 bp, Homo sapiens
aattgacaagagcgagaggta

SEQ ID NO: 10479 - RNA, 21 nt, RNAi
uugacaagagcgagagguauu

SEQ ID NO: 10480 - RNA, 21 nt, RNAi
uuaacuguucucgcucuccau

SEQ ID NO: 10481 - DNA, 21 bp, Homo sapiens
aagagcgagaggtatactgcg

SEQ ID NO: 10482 - RNA, 21 nt, RNAi
gagcgagagguauacugcguu

SEQ ID NO: 10483 - RNA, 21 nt, RNAi
uucucgcucuccauaugacgc

SEQ ID NO: 10484 - DNA, 21 bp, Homo sapiens
aaagccagaaacaagttgacg

SEQ ID NO: 10485 - RNA, 21 nt, RNAi
agccagaaacaaguugacguu

SEQ ID NO: 10486 - RNA, 21 nt, RNAi
uuucggucuuuguucaacugc

SEQ ID NO: 10487 - DNA, 21 bp, Homo sapiens
aagccagaaacaagttgacgg

SEQ ID NO: 10488 - RNA, 21 nt, RNAi
gccagaaacaaguugacgguu

SEQ ID NO: 10489 - RNA, 21 nt, RNAi
uucggucuuuguucaacugcc

SEQ ID NO: 10490 - DNA, 21 bp, Homo sapiens
aaatccgcctggacactgaga

SEQ ID NO: 10491 - RNA, 21 nt, RNAi
auccgccuggacacugagauu

SEQ ID NO: 10492 - RNA, 21 nt, RNAi
uuuaggcggaccugugacucu

SEQ ID NO: 10493 - DNA, 21 bp, Homo sapiens
aatccgcctggacactgagac

SEQ ID NO: 10494 - RNA, 21 nt, RNAi
uccgccuggacacugagacuu

SEQ ID NO: 10495 - RNA, 21 nt, RNAi
uuaggcggaccugugacucug

SEQ ID NO: 10496 - DNA, 21 bp, Homo sapiens
aaggagcttaaccatcctaat

SEQ ID NO: 10497 - RNA, 21 nt, RNAi
ggagcuuaaccauccuaauuu

SEQ ID NO: 10498 - RNA, 21 nt, RNAi
uuccucgaauugguaggauua

SEQ ID NO: 10499 - DNA, 21 bp, Homo sapiens
aaccatcctaatattgtcaag

SEQ ID NO: 10500 - RNA, 21 nt, RNAi
ccauccuaauauugucaaguu

SEQ ID NO: 10501 - RNA, 21 nt, RNAi
uugguaggauuauaacaguuc

SEQ ID NO: 10502 - DNA, 21 bp, Homo sapiens
aatattgtcaagctgctggat

SEQ ID NO: 10503 - RNA, 21 nt, RNAi
uauugucaagcugcuggauuu

SEQ ID NO: 10504 - RNA, 21 nt, RNAi
uuauaacaguucgacgaccua

SEQ ID NO: 10505 - DNA, 21 bp, Homo sapiens
aagctgctggatgtcattcac

SEQ ID NO: 10506 - RNA, 21 nt, RNAi
gcugcuggaugucauucacuu

SEQ ID NO: 10507 - RNA, 21 nt, RNAi
uucgacgaccuacaguaagug

SEQ ID NO: 10508 - DNA, 21 bp, Homo sapiens
aatttctgcaccaagatctca

SEQ ID NO: 10509 - RNA, 21 nt, RNAi
uuucugcaccaagaucucauu

SEQ ID NO: 10510 - RNA, 21 nt, RNAi
uuaaagacgugguucuagagu

SEQ ID NO: 10511 - DNA, 21 bp, Homo sapiens
aagatctcaagaaattcatgg

SEQ ID NO: 10512 - RNA, 21 nt, RNAi
gaucucaagaaauucaugguu

SEQ ID NO: 10513 - RNA, 21 nt, RNAi
uucuagaguucuuuaaguacc

SEQ ID NO: 10514 - DNA, 21 bp, Homo sapiens
aagaaattcatggatgcctct

SEQ ID NO: 10515 - RNA, 21 nt, RNAi
gaaauucauggaugccucuuu

SEQ ID NO: 10516 - RNA, 21 nt, RNAi
uucuuuaaguaccuacggaga

SEQ ID NO: 10517 - DNA, 21 bp, Homo sapiens
aaattcatggatgcctctgct

SEQ ID NO: 10518 - RNA, 21 nt, RNAi
auucauggaugccucugcuuu

SEQ ID NO: 10519 - RNA, 21 nt, RNAi
uuuaaguaccuacggagacga

SEQ ID NO: 10520 - DNA, 21 bp, Homo sapiens
aattcatggatgcctctgctc

SEQ ID NO: 10521 - RNA, 21 nt, RNAi
uucauggaugccucugcucuu

SEQ ID NO: 10522 - RNA, 21 nt, RNAi
uuaaguaccuacggagacgag

SEQ ID NO: 10523 - DNA, 21 bp, Homo sapiens
aagagctatctgttccagctg

SEQ ID NO: 10524 - RNA, 21 nt, RNAi
gagcuaucuguuccagcuguu

SEQ ID NO: 10525 - RNA, 21 nt, RNAi
uucucgauagacaaggucgac

SEQ ID NO: 10526 - DNA, 21 bp, Homo sapiens
aaacctcagaatctgcttatt

SEQ ID NO: 10527 - RNA, 21 nt, RNAi
accucagaaucugcuuauuuu

SEQ ID NO: 10528 - RNA, 21 nt, RNAi
uuuggagucuuagacgaauaa

SEQ ID NO: 10529 - DNA, 21 bp, Homo sapiens
aacctcagaatctgcttatta

SEQ ID NO: 10530 - RNA, 21 nt, RNAi
ccucagaaucugcuuauuauu

SEQ ID NO: 10531 - RNA, 21 nt, RNAi
uuggagucuuagacgaauaau

SEQ ID NO: 10532 - DNA, 21 bp, Homo sapiens
aatctgcttattaacacagag

SEQ ID NO: 10533 - RNA, 21 nt, RNAi
ucugcuuauuaacacagaguu

SEQ ID NO: 10534 - RNA, 21 nt, RNAi
uuagacgaauaauugugucuc

SEQ ID NO: 10535 - DNA, 21 bp, Homo sapiens
aagctagcagactttggacta

SEQ ID NO: 10536 - RNA, 21 nt, RNAi
gcuagcagacuuuggacuauu

SEQ ID NO: 10537 - RNA, 21 nt, RNAi
uucgaucgucugaaaccugau

SEQ ID NO: 10538 - DNA, 21 bp, Homo sapiens
aaatattattccacagctgtg

SEQ ID NO: 10539 - RNA, 21 nt, RNAi
auauuauuccacagcuguguu

SEQ ID NO: 10540 - RNA, 21 nt, RNAi
uuuauaauaaggugucgacac

SEQ ID NO: 10541 - DNA, 21 bp, Homo sapiens
aatattattccacagctgtgg

SEQ ID NO: 10542 - RNA, 21 nt, RNAi
uauuauuccacagcugugguu

SEQ ID NO: 10543 - RNA, 21 nt, RNAi
uuauaauaaggugucgacacc

SEQ ID NO: 10544 - DNA, 21 bp, Homo sapiens
aagatggacggagcttgttat

SEQ ID NO: 10545 - RNA, 21 nt, RNAi
gauggacggagcuuguuauuu

SEQ ID NO: 10546 - RNA, 21 nt, RNAi
uucuaccugccucgaacaaua

SEQ ID NO: 10547 - DNA, 21 bp, Homo sapiens
aacaagcggatttcggccaag

SEQ ID NO: 10548 - RNA, 21 nt, RNAi
caagcggauuucggccaaguu

SEQ ID NO: 10549 - RNA, 21 nt, RNAi
uuguucgccuaaagccgguuc

SEQ ID NO: 10550 - DNA, 21 bp, Homo sapiens
aagcggatttcggccaaggca

SEQ ID NO: 10551 - RNA, 21 nt, RNAi
gcggauuucggccaaggcauu

SEQ ID NO: 10552 - RNA, 21 nt, RNAi
uucgccuaaagccgguuccgu

SEQ ID NO: 10553 - DNA, 21 bp, Homo sapiens
aacttgccttaaacactcacc

SEQ ID NO: 10554 - RNA, 21 nt, RNAi
cuugccuuaaacacucaccuu

SEQ ID NO: 10555 - RNA, 21 nt, RNAi
uugaacggaauuugugagugg

SEQ ID NO: 10556 - DNA, 21 bp, Homo sapiens
aaacactcaccttctagtctt

SEQ ID NO: 10557 - RNA, 21 nt, RNAi
acacucaccuucuagucuuuu

SEQ ID NO: 10558 - RNA, 21 nt, RNAi
uuugugaguggaagaucagaa

SEQ ID NO: 10559 - DNA, 21 bp, Homo sapiens
aacactcaccttctagtcttg

SEQ ID NO: 10560 - RNA, 21 nt, RNAi
cacucaccuucuagucuuguu

SEQ ID NO: 10561 - RNA, 21 nt, RNAi
uugugaguggaagaucagaac

SEQ ID NO: 10562 - DNA, 21 bp, Homo sapiens
aagtttcagtattagatgcac

SEQ ID NO: 10563 - RNA, 21 nt, RNAi
guuucaguauuagaugcacuu

SEQ ID NO: 10564 - RNA, 21 nt, RNAi
uucaaagucauaaucuacgug

SEQ ID NO: 10565 - DNA, 21 bp, Homo sapiens
aaagccttcctacacgttaga

SEQ ID NO: 10566 - RNA, 21 nt, RNAi
agccuuccuacacguuagauu

SEQ ID NO: 10567 - RNA, 21 nt, RNAi
uuucggaaggaugugcaaucu

SEQ ID NO: 10568 - DNA, 21 bp, Homo sapiens
aagccttcctacacgttagat

SEQ ID NO: 10569 - RNA, 21 nt, RNAi
gccuuccuacacguuagauuu

SEQ ID NO: 10570 - RNA, 21 nt, RNAi
uucggaaggaugugcaaucua

SEQ ID NO: 10571 - DNA, 21 bp, Homo sapiens
aagcctcctgctgccacaatg

SEQ ID NO: 10572 - RNA, 21 nt, RNAi
gccuccugcugccacaauguu

SEQ ID NO: 10573 - RNA, 21 nt, RNAi
uucggaggacgacgguguuac

SEQ ID NO: 10574 - DNA, 21 bp, Homo sapiens
aatctattgcttcaccatggc

SEQ ID NO: 10575 - RNA, 21 nt, RNAi
ucuauugcuucaccauggcuu

SEQ ID NO: 10576 - RNA, 21 nt, RNAi
uuagauaacgaagugguaccg

SEQ ID NO: 10577 - DNA, 21 bp, Homo sapiens
caacattgtttcaagttggcc

SEQ ID NO: 10578 - RNA, 21 nt, RNAi
acauuguuucaaguuggccuu

SEQ ID NO: 10579 - RNA, 21 nt, RNAi
uuuguaacaaaguucaaccgg

SEQ ID NO: 10580 - DNA, 21 bp, Homo sapiens
cattgtttcaagttggccaaa

SEQ ID NO: 10581 - RNA, 21 nt, RNAi
uuguuucaaguuggccaaauu

SEQ ID NO: 10582 - RNA, 21 nt, RNAi
uuaacaaaguucaaccgguuu

SEQ ID NO: 10583 - DNA, 21 bp, Homo sapiens
caagttggccaaattgacaag

SEQ ID NO: 10584 - RNA, 21 nt, RNAi
aguuggccaaauugacaaguu

SEQ ID NO: 10585 - RNA, 21 nt, RNAi
uuucaaccgguuuaacuguuc

SEQ ID NO: 10586 - DNA, 21 bp, Homo sapiens
caaattgacaagagcgagagg

SEQ ID NO: 10587 - RNA, 21 nt, RNAi
aauugacaagagcgagagguu

SEQ ID NO: 10588 - RNA, 21 nt, RNAi
uuuuaacuguucucgcucucc

SEQ ID NO: 10589 - DNA, 21 bp, Homo sapiens
caagagcgagaggtatactgc

SEQ ID NO: 10590 - RNA, 21 nt, RNAi
agagcgagagguauacugcuu

SEQ ID NO: 10591 - RNA, 21 nt, RNAi
uuucucgcucuccauaugacg

SEQ ID NO: 10592 - DNA, 21 bp, Homo sapiens
cacgtacggagttgtgtacaa

SEQ ID NO: 10593 - RNA, 21 nt, RNAi
cguacggaguuguguacaauu

SEQ ID NO: 10594 - RNA, 21 nt, RNAi
uugcaugccucaacacauguu

SEQ ID NO: 10595 - DNA, 21 bp, Homo sapiens
caaagccagaaacaagttgac

SEQ ID NO: 10596 - RNA, 21 nt, RNAi
aagccagaaacaaguugacuu

SEQ ID NO: 10597 - RNA, 21 nt, RNAi
uuuucggucuuuguucaacug

SEQ ID NO: 10598 - DNA, 21 bp, Homo sapiens
cagtactgccatccgagagat

SEQ ID NO: 10599 - RNA, 21 nt, RNAi
guacugccauccgagagauuu

SEQ ID NO: 10600 - RNA, 21 nt, RNAi
uucaugacgguaggcucucua

SEQ ID NO: 10601 - DNA, 21 bp, Homo sapiens
catccgagagatctctctgct

SEQ ID NO: 10602 - RNA, 21 nt, RNAi
uccgagagaucucucugcuuu

SEQ ID NO: 10603 - RNA, 21 nt, RNAi
uuaggcucucuagagagacga

SEQ ID NO: 10604 - DNA, 21 bp, Homo sapiens
catcctaatattgtcaagctg

SEQ ID NO: 10605 - RNA, 21 nt, RNAi
uccuaauauugucaagcuguu

SEQ ID NO: 10606 - RNA, 21 nt, RNAi
uuaggauuauaacaguucgac

SEQ ID NO: 10607 - DNA, 21 bp, Homo sapiens
caagctgctggatgtcattca

SEQ ID NO: 10608 - RNA, 21 nt, RNAi
agcugcuggaugucauucauu

SEQ ID NO: 10609 - RNA, 21 nt, RNAi
uuucgacgaccuacaguaagu

SEQ ID NO: 10610 - DNA, 21 bp, Homo sapiens
caccaagatctcaagaaattc

SEQ ID NO: 10611 - RNA, 21 nt, RNAi
ccaagaucucaagaaauucuu

SEQ ID NO: 10612 - RNA, 21 nt, RNAi
uugguucuagaguucuuuaag

SEQ ID NO: 10613 - DNA, 21 bp, Homo sapiens
caagatctcaagaaattcatg

SEQ ID NO: 10614 - RNA, 21 nt, RNAi
agaucucaagaaauucauguu

SEQ ID NO: 10615 - RNA, 21 nt, RNAi
uuucuagaguucuuuaaguac

SEQ ID NO: 10616 - DNA, 21 bp, Homo sapiens
caagaaattcatggatgcctc

SEQ ID NO: 10617 - RNA, 21 nt, RNAi
agaaauucauggaugccucuu

SEQ ID NO: 10618 - RNA, 21 nt, RNAi
uuucuuuaaguaccuacggag

SEQ ID NO: 10619 - DNA, 21 bp, Homo sapiens
catggatgcctctgctctcac

SEQ ID NO: 10620 - RNA, 21 nt, RNAi
uggaugccucugcucucacuu

SEQ ID NO: 10621 - RNA, 21 nt, RNAi
uuaccuacggagacgagagug

SEQ ID NO: 10622 - DNA, 21 bp, Homo sapiens
catcaagagctatctgttcca

SEQ ID NO: 10623 - RNA, 21 nt, RNAi
ucaagagcuaucuguuccauu

SEQ ID NO: 10624 - RNA, 21 nt, RNAi
uuaguucucgauagacaaggu

SEQ ID NO: 10625 - DNA, 21 bp, Homo sapiens
caagagctatctgttccagct

SEQ ID NO: 10626 - RNA, 21 nt, RNAi
agagcuaucuguuccagcuuu

SEQ ID NO: 10627 - RNA, 21 nt, RNAi
uuucucgauagacaaggucga

SEQ ID NO: 10628 - DNA, 21 bp, Homo sapiens
caccgagaccttaaacctcag

SEQ ID NO: 10629 - RNA, 21 nt, RNAi
ccgagaccuuaaaccucaguu

SEQ ID NO: 10630 - RNA, 21 nt, RNAi
uuggcucuggaauuuggaguc

SEQ ID NO: 10631 - DNA, 21 bp, Homo sapiens
cagaatctgcttattaacaca

SEQ ID NO: 10632 - RNA, 21 nt, RNAi
gaaucugcuuauuaacacauu

SEQ ID NO: 10633 - RNA, 21 nt, RNAi
uucuuagacgaauaauugugu

SEQ ID NO: 10634 - DNA, 21 bp, Homo sapiens
catcaagctagcagactttgg

SEQ ID NO: 10635 - RNA, 21 nt, RNAi
ucaagcuagcagacuuugguu

SEQ ID NO: 10636 - RNA, 21 nt, RNAi
uuaguucgaucgucugaaacc

SEQ ID NO: 10637 - DNA, 21 bp, Homo sapiens
caagctagcagactttggact

SEQ ID NO: 10638 - RNA, 21 nt, RNAi
agcuagcagacuuuggacuuu

SEQ ID NO: 10639 - RNA, 21 nt, RNAi
uuucgaucgucugaaaccuga

SEQ ID NO: 10640 - DNA, 21 bp, Homo sapiens
cagactttggactagccagag

SEQ ID NO: 10641 - RNA, 21 nt, RNAi
gacuuuggacuagccagaguu

SEQ ID NO: 10642 - RNA, 21 nt, RNAi
uucugaaaccugaucggucuc

SEQ ID NO: 10643 - DNA, 21 bp, Homo sapiens
caaatattattccacagctgt

SEQ ID NO: 10644 - RNA, 21 nt, RNAi
aauauuauuccacagcuguuu

SEQ ID NO: 10645 - RNA, 21 nt, RNAi
uuuuauaauaaggugucgaca

SEQ ID NO: 10646 - DNA, 21 bp, Homo sapiens
cacagctgtggacatctggag

SEQ ID NO: 10647 - RNA, 21 nt, RNAi
cagcuguggacaucuggaguu

SEQ ID NO: 10648 - RNA, 21 nt, RNAi
uugucgacaccuguagaccuc

SEQ ID NO: 10649 - DNA, 21 bp, Homo sapiens
cagctgtggacatctggagcc

SEQ ID NO: 10650 - RNA, 21 nt, RNAi
gcuguggacaucuggagccuu

SEQ ID NO: 10651 - RNA, 21 nt, RNAi
uucgacaccuguagaccucgg

SEQ ID NO: 10652 - DNA, 21 bp, Homo sapiens
catctttgctgagatggtgac

SEQ ID NO: 10653 - RNA, 21 nt, RNAi
ucuuugcugagauggugacuu

SEQ ID NO: 10654 - RNA, 21 nt, RNAi
uuagaaacgacucuaccacug

SEQ ID NO: 10655 - DNA, 21 bp, Homo sapiens
cagctcttccggatctttcgg

SEQ ID NO: 10656 - RNA, 21 nt, RNAi
gcucuuccggaucuuucgguu

SEQ ID NO: 10657 - RNA, 21 nt, RNAi
uucgagaaggccuagaaagcc

SEQ ID NO: 10658 - DNA, 21 bp, Homo sapiens
cagatgaggtggtgtggccag

SEQ ID NO: 10659 - RNA, 21 nt, RNAi
gaugaggugguguggccaguu

SEQ ID NO: 10660 - RNA, 21 nt, RNAi
uucuacuccaccacaccgguc

SEQ ID NO: 10661 - DNA, 21 bp, Homo sapiens
caggagttacttctatgcctg

SEQ ID NO: 10662 - RNA, 21 nt, RNAi
ggaguuacuucuaugccuguu

SEQ ID NO: 10663 - RNA, 21 nt, RNAi
uuccucaaugaagauacggac

SEQ ID NO: 10664 - DNA, 21 bp, Homo sapiens
caagcggatttcggccaaggc

SEQ ID NO: 10665 - RNA, 21 nt, RNAi
agcggauuucggccaaggcuu

SEQ ID NO: 10666 - RNA, 21 nt, RNAi
uuucgccuaaagccgguuccg

SEQ ID NO: 10667 - DNA, 21 bp, Homo sapiens
caggatgtgaccaagccagta

SEQ ID NO: 10668 - RNA, 21 nt, RNAi
ggaugugaccaagccaguauu

SEQ ID NO: 10669 - RNA, 21 nt, RNAi
uuccuacacugguucggucau

SEQ ID NO: 10670 - DNA, 21 bp, Homo sapiens
catcttcgactctgatagcct

SEQ ID NO: 10671 - RNA, 21 nt, RNAi
ucuucgacucugauagccuuu

SEQ ID NO: 10672 - RNA, 21 nt, RNAi
uuagaagcugagacuaucgga

SEQ ID NO: 10673 - DNA, 21 bp, Homo sapiens
cactcaccttctagtcttggc

SEQ ID NO: 10674 - RNA, 21 nt, RNAi
cucaccuucuagucuuggcuu

SEQ ID NO: 10675 - RNA, 21 nt, RNAi
uugaguggaagaucagaaccg

SEQ ID NO: 10676 - DNA, 21 bp, Homo sapiens
caccttctagtcttggccagc

SEQ ID NO: 10677 - RNA, 21 nt, RNAi
ccuucuagucuuggccagcuu

SEQ ID NO: 10678 - RNA, 21 nt, RNAi
uuggaagaucagaaccggucg

SEQ ID NO: 10679 - DNA, 21 bp, Homo sapiens
cagtattagatgcacttaagt

SEQ ID NO: 10680 - RNA, 21 nt, RNAi
guauuagaugcacuuaaguuu

SEQ ID NO: 10681 - RNA, 21 nt, RNAi
uucauaaucuacgugaauuca

SEQ ID NO: 10682 - DNA, 21 bp, Homo sapiens
cacttaagttagcctccacca

SEQ ID NO: 10683 - RNA, 21 nt, RNAi
cuuaaguuagccuccaccauu

SEQ ID NO: 10684 - RNA, 21 nt, RNAi
uugaauucaaucggagguggu

SEQ ID NO: 10685 - DNA, 21 bp, Homo sapiens
cacgttagatttgccgtacca

SEQ ID NO: 10686 - RNA, 21 nt, RNAi
cguuagauuugccguaccauu

SEQ ID NO: 10687 - RNA, 21 nt, RNAi
uugcaaucuaaacggcauggu

SEQ ID NO: 10688 - DNA, 21 bp, Homo sapiens
caagcctcctgctgccacaat

SEQ ID NO: 10689 - RNA, 21 nt, RNAi
agccuccugcugccacaauuu

SEQ ID NO: 10690 - RNA, 21 nt, RNAi
uuucggaggacgacgguguua

SEQ ID NO: 10691 - DNA, 21 bp, Homo sapiens
cacaatgtttataaaggccaa

SEQ ID NO: 10692 - RNA, 21 nt, RNAi
caauguuuauaaaggccaauu

SEQ ID NO: 10693 - RNA, 21 nt, RNAi
uuguuacaaauauuuccgguu

SEQ ID NO: 10694 - DNA, 21 bp, Homo sapiens
cattccaatctattgcttcac

SEQ ID NO: 10695 - RNA, 21 nt, RNAi
uuccaaucuauugcuucacuu

SEQ ID NO: 10696 - RNA, 21 nt, RNAi
uuaagguuagauaacgaagug

SEQ ID NO: 10697 - DNA, 21 bp, Homo sapiens
caatctattgcttcaccatgg

SEQ ID NO: 10698 - RNA, 21 nt, RNAi
aucuauugcuucaccaugguu

SEQ ID NO: 10699 - RNA, 21 nt, RNAi
uuuagauaacgaagugguacc

SEQ ID NO: 10700 - DNA, 21 bp, Homo sapiens
caccatggccttatgaggcag

SEQ ID NO: 10701 - RNA, 21 nt, RNAi
ccauggccuuaugaggcaguu

SEQ ID NO: 10702 - RNA, 21 nt, RNAi
uugguaccggaauacuccguc

SEQ ID NO: 10703 - DNA, 21 bp, Homo sapiens
catggccttatgaggcaggtg

SEQ ID NO: 10704 - RNA, 21 nt, RNAi
uggccuuaugaggcagguguu

SEQ ID NO: 10705 - RNA, 21 nt, RNAi
uuaccggaauacuccguccac

SEQ ID NO: 10706 - DNA, 21 bp, Homo sapiens
caggtgagagatgtttgaatt

SEQ ID NO: 10707 - RNA, 21 nt, RNAi
ggugagagauguuugaauuuu

SEQ ID NO: 10708 - RNA, 21 nt, RNAi
uuccacucucuacaaacuuaa

SEQ ID NO: 10709 - DNA, 21 bp, Homo sapiens
caggttatatccaatagtaga

SEQ ID NO: 10710 - RNA, 21 nt, RNAi
gguuauauccaauaguagauu

SEQ ID NO: 10711 - RNA, 21 nt, RNAi
uuccaauauagguuaucaucu

SEQ ID NO: 10712 - DNA, 21 bp, Homo sapiens
gaggcggcaacattgtttcaa

SEQ ID NO: 10713 - RNA, 21 nt, RNAi
ggcggcaacauuguuucaauu

SEQ ID NO: 10714 - RNA, 21 nt, RNAi
uuccgccguuguaacaaaguu

SEQ ID NO: 10715 - DNA, 21 bp, Homo sapiens
gacaagagcgagaggtatact

SEQ ID NO: 10716 - RNA, 21 nt, RNAi
caagagcgagagguauacuuu

SEQ ID NO: 10717 - RNA, 21 nt, RNAi
uuguucucgcucuccauauga

SEQ ID NO: 10718 - DNA, 21 bp, Homo sapiens
gagcgagaggtatactgcgtt

SEQ ID NO: 10719 - RNA, 21 nt, RNAi
gcgagagguauacugcguuuu

SEQ ID NO: 10720 - RNA, 21 nt, RNAi
uucgcucuccauaugacgcaa

SEQ ID NO: 10721 - DNA, 21 bp, Homo sapiens
gagaggtatactgcgttccat

SEQ ID NO: 10722 - RNA, 21 nt, RNAi
gagguauacugcguuccauuu

SEQ ID NO: 10723 - RNA, 21 nt, RNAi
uucuccauaugacgcaaggua

SEQ ID NO: 10724 - DNA, 21 bp, Homo sapiens
gaggtatactgcgttccatcc

SEQ ID NO: 10725 - RNA, 21 nt, RNAi
gguauacugcguuccauccuu

SEQ ID NO: 10726 - RNA, 21 nt, RNAi
uuccauaugacgcaagguagg

SEQ ID NO: 10727 - DNA, 21 bp, Homo sapiens
gactcgctggcgcttcatgga

SEQ ID NO: 10728 - RNA, 21 nt, RNAi
cucgcuggcgcuucauggauu

SEQ ID NO: 10729 - RNA, 21 nt, RNAi
uugagcgaccgcgaaguaccu

SEQ ID NO: 10730 - DNA, 21 bp, Homo sapiens
gagttgtgtacaaagccagaa

SEQ ID NO: 10731 - RNA, 21 nt, RNAi
guuguguacaaagccagaauu

SEQ ID NO: 10732 - RNA, 21 nt, RNAi
uucaacacauguuucggucuu

SEQ ID NO: 10733 - DNA, 21 bp, Homo sapiens
gagaggtggtggcgcttaaga

SEQ ID NO: 10734 - RNA, 21 nt, RNAi
gaggugguggcgcuuaagauu

SEQ ID NO: 10735 - RNA, 21 nt, RNAi
uucuccaccaccgcgaauucu

SEQ ID NO: 10736 - DNA, 21 bp, Homo sapiens
gaggtggtggcgcttaagaaa

SEQ ID NO: 10737 - RNA, 21 nt, RNAi
ggugguggcgcuuaagaaauu

SEQ ID NO: 10738 - RNA, 21 nt, RNAi
uuccaccaccgcgaauucuuu

SEQ ID NO: 10739 - DNA, 21 bp, Homo sapiens
gagagatctctctgcttaagg

SEQ ID NO: 10740 - RNA, 21 nt, RNAi
gagaucucucugcuuaagguu

SEQ ID NO: 10741 - RNA, 21 nt, RNAi
uucucuagagagacgaauucc

SEQ ID NO: 10742 - DNA, 21 bp, Homo sapiens
gagatctctctgcttaaggag

SEQ ID NO: 10743 - RNA, 21 nt, RNAi
gaucucucugcuuaaggaguu

SEQ ID NO: 10744 - RNA, 21 nt, RNAi
uucuagagagacgaauuccuc

SEQ ID NO: 10745 - DNA, 21 bp, Homo sapiens
gatctctctgcttaaggagct

SEQ ID NO: 10746 - RNA, 21 nt, RNAi
ucucucugcuuaaggagcuuu

SEQ ID NO: 10747 - RNA, 21 nt, RNAi
uuagagagacgaauuccucga

SEQ ID NO: 10748 - DNA, 21 bp, Homo sapiens
gagcttaaccatcctaatatt

SEQ ID NO: 10749 - RNA, 21 nt, RNAi
gcuuaaccauccuaauauuuu

SEQ ID NO: 10750 - RNA, 21 nt, RNAi
uucgaauugguaggauuauaa

SEQ ID NO: 10751 - DNA, 21 bp, Homo sapiens
gaatttctgcaccaagatctc

SEQ ID NO: 10752 - RNA, 21 nt, RNAi
auuucugcaccaagaucucuu

SEQ ID NO: 10753 - RNA, 21 nt, RNAi
uuuaaagacgugguucuagag

SEQ ID NO: 10754 - DNA, 21 bp, Homo sapiens
gatctcaagaaattcatggat

SEQ ID NO: 10755 - RNA, 21 nt, RNAi
ucucaagaaauucauggauuu

SEQ ID NO: 10756 - RNA, 21 nt, RNAi
uuagaguucuuuaaguaccua

SEQ ID NO: 10757 - DNA, 21 bp, Homo sapiens
gaaattcatggatgcctctgc

SEQ ID NO: 10758 - RNA, 21 nt, RNAi
aauucauggaugccucugcuu

SEQ ID NO: 10759 - RNA, 21 nt, RNAi
uuuuaaguaccuacggagacg

SEQ ID NO: 10760 - DNA, 21 bp, Homo sapiens
gatgcctctgctctcactggc

SEQ ID NO: 10761 - RNA, 21 nt, RNAi
ugccucugcucucacuggcuu

SEQ ID NO: 10762 - RNA, 21 nt, RNAi
uuacggagacgagagugaccg

SEQ ID NO: 10763 - DNA, 21 bp, Homo sapiens
gagctatctgttccagctgct

SEQ ID NO: 10764 - RNA, 21 nt, RNAi
gcuaucuguuccagcugcuuu

SEQ ID NO: 10765 - RNA, 21 nt, RNAi
uucgauagacaaggucgacga

SEQ ID NO: 10766 - DNA, 21 bp, Homo sapiens
gagaccttaaacctcagaatc

SEQ ID NO: 10767 - RNA, 21 nt, RNAi
gaccuuaaaccucagaaucuu

SEQ ID NO: 10768 - RNA, 21 nt, RNAi
uucuggaauuuggagucuuag

SEQ ID NO: 10769 - DNA, 21 bp, Homo sapiens
gaccttaaacctcagaatctg

SEQ ID NO: 10770 - RNA, 21 nt, RNAi
ccuuaaaccucagaaucuguu

SEQ ID NO: 10771 - RNA, 21 nt, RNAi
uuggaauuuggagucuuagac

SEQ ID NO: 10772 - DNA, 21 bp, Homo sapiens
gaatctgcttattaacacaga

SEQ ID NO: 10773 - RNA, 21 nt, RNAi
aucugcuuauuaacacagauu

SEQ ID NO: 10774 - RNA, 21 nt, RNAi
uuuagacgaauaauugugucu

SEQ ID NO: 10775 - DNA, 21 bp, Homo sapiens
gactttggactagccagagct

SEQ ID NO: 10776 - RNA, 21 nt, RNAi
cuuuggacuagccagagcuuu

SEQ ID NO: 10777 - RNA, 21 nt, RNAi
uugaaaccugaucggucucga

SEQ ID NO: 10778 - DNA, 21 bp, Homo sapiens
gagctcctgaaatcctcctgg

SEQ ID NO: 10779 - RNA, 21 nt, RNAi
gcuccugaaauccuccugguu

SEQ ID NO: 10780 - RNA, 21 nt, RNAi
uucgaggacuuuaggaggacc

SEQ ID NO: 10781 - DNA, 21 bp, Homo sapiens
gagattctgagattgaccagc

SEQ ID NO: 10782 - RNA, 21 nt, RNAi
gauucugagauugaccagcuu

SEQ ID NO: 10783 - RNA, 21 nt, RNAi
uucuaagacucuaacuggucg

SEQ ID NO: 10784 - DNA, 21 bp, Homo sapiens
gattctgagattgaccagctc

SEQ ID NO: 10785 - RNA, 21 nt, RNAi
uucugagauugaccagcucuu

SEQ ID NO: 10786 - RNA, 21 nt, RNAi
uuaagacucuaacuggucgag

SEQ ID NO: 10787 - DNA, 21 bp, Homo sapiens
gagattgaccagctcttccgg

SEQ ID NO: 10788 - RNA, 21 nt, RNAi
gauugaccagcucuuccgguu

SEQ ID NO: 10789 - RNA, 21 nt, RNAi
uucuaacuggucgagaaggcc

SEQ ID NO: 10790 - DNA, 21 bp, Homo sapiens
gattgaccagctcttccggat

SEQ ID NO: 10791 - RNA, 21 nt, RNAi
uugaccagcucuuccggauuu

SEQ ID NO: 10792 - RNA, 21 nt, RNAi
uuaacuggucgagaaggccua

SEQ ID NO: 10793 - DNA, 21 bp, Homo sapiens
gaccagctcttccggatcttt

SEQ ID NO: 10794 - RNA, 21 nt, RNAi
ccagcucuuccggaucuuuuu

SEQ ID NO: 10795 - RNA, 21 nt, RNAi
uuggucgagaaggccuagaaa

SEQ ID NO: 10796 - DNA, 21 bp, Homo sapiens
gatgaggtggtgtggccagga

SEQ ID NO: 10797 - RNA, 21 nt, RNAi
ugaggugguguggccaggauu

SEQ ID NO: 10798 - RNA, 21 nt, RNAi
uuacuccaccacaccgguccu

SEQ ID NO: 10799 - DNA, 21 bp, Homo sapiens
gaggtggtgtggccaggagtt

SEQ ID NO: 10800 - RNA, 21 nt, RNAi
ggugguguggccaggaguuuu

SEQ ID NO: 10801 - RNA, 21 nt, RNAi
uuccaccacaccgguccucaa

SEQ ID NO: 10802 - DNA, 21 bp, Homo sapiens
gagttacttctatgcctgatt

SEQ ID NO: 10803 - RNA, 21 nt, RNAi
guuacuucuaugccugauuuu

SEQ ID NO: 10804 - RNA, 21 nt, RNAi
uucaaugaagauacggacuaa

SEQ ID NO: 10805 - DNA, 21 bp, Homo sapiens
gatgaagatggacggagcttg

SEQ ID NO: 10806 - RNA, 21 nt, RNAi
ugaagauggacggagcuuguu

SEQ ID NO: 10807 - RNA, 21 nt, RNAi
uuacuucuaccugccucgaac

SEQ ID NO: 10808 - DNA, 21 bp, Homo sapiens
gaagatggacggagcttgtta

SEQ ID NO: 10809 - RNA, 21 nt, RNAi
agauggacggagcuuguuauu

SEQ ID NO: 10810 - RNA, 21 nt, RNAi
uuucuaccugccucgaacaau

SEQ ID NO: 10811 - DNA, 21 bp, Homo sapiens
gatggacggagcttgttatcg

SEQ ID NO: 10812 - RNA, 21 nt, RNAi
uggacggagcuuguuaucguu

SEQ ID NO: 10813 - RNA, 21 nt, RNAi
uuaccugccucgaacaauagc

SEQ ID NO: 10814 - DNA, 21 bp, Homo sapiens
gacggagcttgttatcgcaaa

SEQ ID NO: 10815 - RNA, 21 nt, RNAi
cggagcuuguuaucgcaaauu

SEQ ID NO: 10816 - RNA, 21 nt, RNAi
uugccucgaacaauagcguuu

SEQ ID NO: 10817 - DNA, 21 bp, Homo sapiens
gagcttgttatcgcaaatgct

SEQ ID NO: 10818 - RNA, 21 nt, RNAi
gcuuguuaucgcaaaugcuuu

SEQ ID NO: 10819 - RNA, 21 nt, RNAi
uucgaacaauagcguuuacga

SEQ ID NO: 10820 - DNA, 21 bp, Homo sapiens
gactctgatagccttcttgaa

SEQ ID NO: 10821 - RNA, 21 nt, RNAi
cucugauagccuucuugaauu

SEQ ID NO: 10822 - RNA, 21 nt, RNAi
uugagacuaucggaagaacuu

SEQ ID NO: 10823 - DNA, 21 bp, Homo sapiens
gaacttgccttaaacactcac

SEQ ID NO: 10824 - RNA, 21 nt, RNAi
acuugccuuaaacacucacuu

SEQ ID NO: 10825 - RNA, 21 nt, RNAi
uuugaacggaauuugugagug

SEQ ID NO: 10826 - DNA, 21 bp, Homo sapiens
gaaaggaagtttcagtattag

SEQ ID NO: 10827 - RNA, 21 nt, RNAi
aaggaaguuucaguauuaguu

SEQ ID NO: 10828 - RNA, 21 nt, RNAi
uuuuccuucaaagucauaauc

SEQ ID NO: 10829 - DNA, 21 bp, Homo sapiens
gaagtttcagtattagatgca

SEQ ID NO: 10830 - RNA, 21 nt, RNAi
aguuucaguauuagaugcauu

SEQ ID NO: 10831 - RNA, 21 nt, RNAi
uuucaaagucauaaucuacgu

SEQ ID NO: 10832 - DNA, 21 bp, Homo sapiens
gatgcacttaagttagcctcc

SEQ ID NO: 10833 - RNA, 21 nt, RNAi
ugcacuuaaguuagccuccuu

SEQ ID NO: 10834 - RNA, 21 nt, RNAi
uuacgugaauucaaucggagg

SEQ ID NO: 10835 - DNA, 21 bp, Homo sapiens
gatttgccgtaccaatctctg

SEQ ID NO: 10836 - RNA, 21 nt, RNAi
uuugccguaccaaucucuguu

SEQ ID NO: 10837 - RNA, 21 nt, RNAi
uuaaacggcaugguuagagac

SEQ ID NO: 10838 - DNA, 21 bp, Homo sapiens
gattgtgcttcattccaatct

SEQ ID NO: 10839 - RNA, 21 nt, RNAi
uugugcuucauuccaaucuuu

SEQ ID NO: 10840 - RNA, 21 nt, RNAi
uuaacacgaaguaagguuaga

SEQ ID NO: 10841 - DNA, 21 bp, Homo sapiens
gaggcaggtgagagatgtttg

SEQ ID NO: 10842 - RNA, 21 nt, RNAi
ggcaggugagagauguuuguu

SEQ ID NO: 10843 - RNA, 21 nt, RNAi
uuccguccacucucuacaaac

SEQ ID NO: 10844 - DNA, 21 bp, Homo sapiens
gatttgttgccatgtgcacct

SEQ ID NO: 10845 - RNA, 21 nt, RNAi
uuuguugccaugugcaccuuu

SEQ ID NO: 10846 - RNA, 21 nt, RNAi
uuaaacaacgguacacgugga

SEQ ID NO: 10847 - DNA, 21 bp, Homo sapiens
gagtgctcttgctattaacgt

SEQ ID NO: 10848 - RNA, 21 nt, RNAi
gugcucuugcuauuaacguuu

SEQ ID NO: 10849 - RNA, 21 nt, RNAi
uucacgagaacgauaauugca

SEQ ID NO: 10850 - DNA, 21 bp, Homo sapiens
tacggagttgtgtacaaagcc

SEQ ID NO: 10851 - RNA, 21 nt, RNAi
cggaguuguguacaaagccuu

SEQ ID NO: 10852 - RNA, 21 nt, RNAi
uugccucaacacauguuucgg

SEQ ID NO: 10853 - DNA, 21 bp, Homo sapiens
tacaaagccagaaacaagttg

SEQ ID NO: 10854 - RNA, 21 nt, RNAi
caaagccagaaacaaguuguu

SEQ ID NO: 10855 - RNA, 21 nt, RNAi
uuguuucggucuuuguucaac

SEQ ID NO: 10856 - DNA, 21 bp, Homo sapiens
tactgccatccgagagatctc

SEQ ID NO: 10857 - RNA, 21 nt, RNAi
cugccauccgagagaucucuu

SEQ ID NO: 10858 - RNA, 21 nt, RNAi
uugacgguaggcucucuagag

SEQ ID NO: 10859 - DNA, 21 bp, Homo sapiens
taaggagcttaaccatcctaa

SEQ ID NO: 10860 - RNA, 21 nt, RNAi
aggagcuuaaccauccuaauu

SEQ ID NO: 10861 - RNA, 21 nt, RNAi
uuuccucgaauugguaggauu

SEQ ID NO: 10862 - DNA, 21 bp, Homo sapiens
taatattgtcaagctgctgga

SEQ ID NO: 10863 - RNA, 21 nt, RNAi
auauugucaagcugcuggauu

SEQ ID NO: 10864 - RNA, 21 nt, RNAi
uuuauaacaguucgacgaccu

SEQ ID NO: 10865 - DNA, 21 bp, Homo sapiens
tattgtcaagctgctggatgt

SEQ ID NO: 10866 - RNA, 21 nt, RNAi
uugucaagcugcuggauguuu

SEQ ID NO: 10867 - RNA, 21 nt, RNAi
uuaacaguucgacgaccuaca

SEQ ID NO: 10868 - DNA, 21 bp, Homo sapiens
tatctgttccagctgctccag

SEQ ID NO: 10869 - RNA, 21 nt, RNAi
ucuguuccagcugcuccaguu

SEQ ID NO: 10870 - RNA, 21 nt, RNAi
uuagacaaggucgacgagguc

SEQ ID NO: 10871 - DNA, 21 bp, Homo sapiens
tagctttctgccattctcatc

SEQ ID NO: 10872 - RNA, 21 nt, RNAi
gcuuucugccauucucaucuu

SEQ ID NO: 10873 - RNA, 21 nt, RNAi
uucgaaagacgguaagaguag

SEQ ID NO: 10874 - DNA, 21 bp, Homo sapiens
taaacctcagaatctgcttat

SEQ ID NO: 10875 - RNA, 21 nt, RNAi
aaccucagaaucugcuuauuu

SEQ ID NO: 10876 - RNA, 21 nt, RNAi
uuuuggagucuuagacgaaua

SEQ ID NO: 10877 - DNA, 21 bp, Homo sapiens
tagcagactttggactagcca

SEQ ID NO: 10878 - RNA, 21 nt, RNAi
gcagacuuuggacuagccauu

SEQ ID NO: 10879 - RNA, 21 nt, RNAi
uucgucugaaaccugaucggu

SEQ ID NO: 10880 - DNA, 21 bp, Homo sapiens
taccgagctcctgaaatcctc

SEQ ID NO: 10881 - RNA, 21 nt, RNAi
ccgagcuccugaaauccucuu

SEQ ID NO: 10882 - RNA, 21 nt, RNAi
uuggcucgaggacuuuaggag

SEQ ID NO: 10883 - DNA, 21 bp, Homo sapiens
tattattccacagctgtggac

SEQ ID NO: 10884 - RNA, 21 nt, RNAi
uuauuccacagcuguggacuu

SEQ ID NO: 10885 - RNA, 21 nt, RNAi
uuaauaaggugucgacaccug

SEQ ID NO: 10886 - DNA, 21 bp, Homo sapiens
tattccacagctgtggacatc

SEQ ID NO: 10887 - RNA, 21 nt, RNAi
uuccacagcuguggacaucuu

SEQ ID NO: 10888 - RNA, 21 nt, RNAi
uuaaggugucgacaccuguag

SEQ ID NO: 10889 - DNA, 21 bp, Homo sapiens
tacttctatgcctgattacaa

SEQ ID NO: 10890 - RNA, 21 nt, RNAi
cuucuaugccugauuacaauu

SEQ ID NO: 10891 - RNA, 21 nt, RNAi
uugaagauacggacuaauguu

SEQ ID NO: 10892 - DNA, 21 bp, Homo sapiens
tatgcctgattacaagccaag

SEQ ID NO: 10893 - RNA, 21 nt, RNAi
ugccugauuacaagccaaguu

SEQ ID NO: 10894 - RNA, 21 nt, RNAi
uuacggacuaauguucgguuc

SEQ ID NO: 10895 - DNA, 21 bp, Homo sapiens
tatcgcaaatgctgcactacg

SEQ ID NO: 10896 - RNA, 21 nt, RNAi
ucgcaaaugcugcacuacguu

SEQ ID NO: 10897 - RNA, 21 nt, RNAi
uuagcguuuacgacgugaugc

SEQ ID NO: 10898 - DNA, 21 bp, Homo sapiens
taacaagcggatttcggccaa

SEQ ID NO: 10899 - RNA, 21 nt, RNAi
acaagcggauuucggccaauu

SEQ ID NO: 10900 - RNA, 21 nt, RNAi
uuuguucgccuaaagccgguu

SEQ ID NO: 10901 - DNA, 21 bp, Homo sapiens
taaacactcaccttctagtct

SEQ ID NO: 10902 - RNA, 21 nt, RNAi
aacacucaccuucuagucuuu

SEQ ID NO: 10903 - RNA, 21 nt, RNAi
uuuugugaguggaagaucaga

SEQ ID NO: 10904 - DNA, 21 bp, Homo sapiens
tagtcttggccagccaactct

SEQ ID NO: 10905 - RNA, 21 nt, RNAi
gucuuggccagccaacucuuu

SEQ ID NO: 10906 - RNA, 21 nt, RNAi
uucagaaccggucgguugaga

SEQ ID NO: 10907 - DNA, 21 bp, Homo sapiens
tagatgcacttaagttagcct

SEQ ID NO: 10908 - RNA, 21 nt, RNAi
gaugcacuuaaguuagccuuu

SEQ ID NO: 10909 - RNA, 21 nt, RNAi
uucuacgugaauucaaucgga

SEQ ID NO: 10910 - DNA, 21 bp, Homo sapiens
tacacgttagatttgccgtac

SEQ ID NO: 10911 - RNA, 21 nt, RNAi
cacguuagauuugccguacuu

SEQ ID NO: 10912 - RNA, 21 nt, RNAi
uugugcaaucuaaacggcaug

SEQ ID NO: 10913 - DNA, 21 bp, Homo sapiens
tagatttgccgtaccaatctc

SEQ ID NO: 10914 - RNA, 21 nt, RNAi
gauuugccguaccaaucucuu

SEQ ID NO: 10915 - RNA, 21 nt, RNAi
uucuaaacggcaugguuagag

SEQ ID NO: 10916 - DNA, 21 bp, Homo sapiens
tataaaggccaaatgatagcg

SEQ ID NO: 10917 - RNA, 21 nt, RNAi
uaaaggccaaaugauagcguu

SEQ ID NO: 10918 - RNA, 21 nt, RNAi
uuauuuccgguuuacuaucgc

SEQ ID NO: 10919 - DNA, 21 bp, Homo sapiens
tagatccaatcagtttatacc

SEQ ID NO: 10920 - RNA, 21 nt, RNAi
gauccaaucaguuuauaccuu

SEQ ID NO: 10921 - RNA, 21 nt, RNAi
uucuagguuagucaaauaugg

SEQ ID NO: 10922 - DNA, 21 bp, Homo sapiens
tattgcttcaccatggcctta

SEQ ID NO: 10923 - RNA, 21 nt, RNAi
uugcuucaccauggccuuauu

SEQ ID NO: 10924 - RNA, 21 nt, RNAi
uuaacgaagugguaccggaau

SEQ ID NO: 10925 - DNA, 21 bp, Homo sapiens
tatgaggcaggtgagagatgt

SEQ ID NO: 10926 - RNA, 21 nt, RNAi
ugaggcaggugagagauguuu

SEQ ID NO: 10927 - RNA, 21 nt, RNAi
uuacuccguccacucucuaca

SEQ ID NO: 10928 - DNA, 21 bp, Homo sapiens
tattcttagttgttcagttgc

SEQ ID NO: 10929 - RNA, 21 nt, RNAi
uucuuaguuguucaguugcuu

SEQ ID NO: 10930 - RNA, 21 nt, RNAi
uuaagaaucaacaagucaacg

SEQ ID NO: 10931 - DNA, 21 bp, Homo sapiens
tagttgttcagttgccaagga

SEQ ID NO: 10932 - RNA, 21 nt, RNAi
guuguucaguugccaaggauu

SEQ ID NO: 10933 - RNA, 21 nt, RNAi
uucaacaagucaacgguuccu

SEQ ID NO: 10934 - DNA, 21 bp, Homo sapiens
tatatccaatagtagagttgg

SEQ ID NO: 10935 - RNA, 21 nt, RNAi
uauccaauaguagaguugguu

SEQ ID NO: 10936 - RNA, 21 nt, RNAi
uuauagguuaucaucucaacc

SEQ ID NO: 10937 - DNA, 21 bp, Homo sapiens
tatccaatagtagagttggct

SEQ ID NO: 10938 - RNA, 21 nt, RNAi
uccaauaguagaguuggcuuu

SEQ ID NO: 10939 - RNA, 21 nt, RNAi
uuagguuaucaucucaaccga

SEQ ID NO: 10940 - DNA, 21 bp, Homo sapiens
aaggagcttaaccatcctaat

SEQ ID NO: 10941 - RNA, 21 nt, RNAi
ggagcuuaaccauccuaauuu

SEQ ID NO: 10942 - RNA, 21 nt, RNAi
uuccucgaauugguaggauua

SEQ ID NO: 10943 - DNA, 21 bp, Homo sapiens
aaacctcagaatctgcttatt

SEQ ID NO: 10944 - RNA, 21 nt, RNAi
accucagaaucugcuuauuuu

SEQ ID NO: 10945 - RNA, 21 nt, RNAi
uuuggagucuuagacgaauaa

SEQ ID NO: 10946 - DNA, 21 bp, Homo sapiens
aagatggacggagcttgttat

SEQ ID NO: 10947 - RNA, 21 nt, RNAi
gauggacggagcuuguuauuu

SEQ ID NO: 10948 - RNA, 21 nt, RNAi
uucuaccugccucgaacaaua

SEQ ID NO: 10949 - DNA, 21 bp, Homo sapiens
catcctaatattgtcaagctg

SEQ ID NO: 10950 - RNA, 21 nt, RNAi
uccuaauauugucaagcuguu

SEQ ID NO: 10951 - RNA, 21 nt, RNAi
uuaggauuauaacaguucgac

SEQ ID NO: 10952 - DNA, 21 bp, Homo sapiens
caagaaattcatggatgcctc

SEQ ID NO: 10953 - RNA, 21 nt, RNAi
agaaauucauggaugccucuu

SEQ ID NO: 10954 - RNA, 21 nt, RNAi
uuucuuuaaguaccuacggag

SEQ ID NO: 10955 - DNA, 21 bp, Homo sapiens
catcaagctagcagactttgg

SEQ ID NO: 10956 - RNA, 21 nt, RNAi
ucaagcuagcagacuuugguu

SEQ ID NO: 10957 - RNA, 21 nt, RNAi
uuaguucgaucgucugaaacc

SEQ ID NO: 10958 - DNA, 21 bp, Homo sapiens
gagatctctctgcttaaggag

SEQ ID NO: 10959 - RNA, 21 nt, RNAi
gaucucucugcuuaaggaguu

SEQ ID NO: 10960 - RNA, 21 nt, RNAi
uucuagagagacgaauuccuc

SEQ ID NO: 10961 - DNA, 21 bp, Homo sapiens
gaccagctcttccggatcttt

SEQ ID NO: 10962 - RNA, 21 nt, RNAi
ccagcucuuccggaucuuuuu

SEQ ID NO: 10963 - RNA, 21 nt, RNAi
uuggucgagaaggccuagaaa

SEQ ID NO: 10964 - DNA, 21 bp, Homo sapiens
gagttacttctatgcctgatt

SEQ ID NO: 10965 - RNA, 21 nt, RNAi
guuacuucuaugccugauuuu

SEQ ID NO: 10966 - RNA, 21 nt, RNAi
uucaaugaagauacggacuaa

SEQ ID NO: 10967 - DNA, 21 bp, Homo sapiens
gaagatggacggagcttgtta

SEQ ID NO: 10968 - RNA, 21 nt, RNAi
agauggacggagcuuguuauu

SEQ ID NO: 10969 - RNA, 21 nt, RNAi
uuucuaccugccucgaacaau

SEQ ID NO: 10970 - DNA, 21 bp, Homo sapiens
gatggacggagcttgttatcg

SEQ ID NO: 10971 - RNA, 21 nt, RNAi
uggacggagcuuguuaucguu

SEQ ID NO: 10972 - RNA, 21 nt, RNAi
uuaccugccucgaacaauagc

SEQ ID NO: 10973 - DNA, 21 bp, Homo sapiens
gacggagcttgttatcgcaaa

SEQ ID NO: 10974 - RNA, 21 nt, RNAi
cggagcuuguuaucgcaaauu

SEQ ID NO: 10975 - RNA, 21 nt, RNAi
uugccucgaacaauagcguuu

SEQ ID NO: 10976 - DNA, 21 bp, Homo sapiens
gagcttgttatcgcaaatgct

SEQ ID NO: 10977 - RNA, 21 nt, RNAi
gcuuguuaucgcaaaugcuuu

SEQ ID NO: 10978 - RNA, 21 nt, RNAi
uucgaacaauagcguuuacga

SEQ ID NO: 10979 - DNA, 21 bp, Homo sapiens
taaggagcttaaccatcctaa

SEQ ID NO: 10980 - RNA, 21 nt, RNAi
aggagcuuaaccauccuaauu

SEQ ID NO: 10981 - RNA, 21 nt, RNAi
uuuccucgaauugguaggauu

SEQ ID NO: 10982 - DNA, 21 bp, Homo sapiens
taaacctcagaatctgcttat

SEQ ID NO: 10983 - RNA, 21 nt, RNAi
aaccucagaaucugcuuauuu

SEQ ID NO: 10984 - RNA, 21 nt, RNAi
uuuuggagucuuagacgaaua

SEQ ID NO: 10985 - DNA, 21 bp, Homo sapiens
tacttctatgcctgattacaa

SEQ ID NO: 10986 - RNA, 21 nt, RNAi
cuucuaugccugauuacaauu

SEQ ID NO: 10987 - RNA, 21 nt, RNAi
uugaagauacggacuaauguu

SEQ ID NO: 10988 - DNA, 21 bp, Homo sapiens
aatggctacctctcgatatga

SEQ ID NO: 10989 - RNA, 21 nt, RNAi
uggcuaccucucgauaugauu

SEQ ID NO: 10990 - RNA, 21 nt, RNAi
uuaccgauggagagcuauacu

SEQ ID NO: 10991 - DNA, 21 bp, Homo sapiens
aaattggtgtcggtgcctatg

SEQ ID NO: 10992 - RNA, 21 nt, RNAi
auuggugucggugccuauguu

SEQ ID NO: 10993 - RNA, 21 nt, RNAi
uuuaaccacagccacggauac

SEQ ID NO: 10994 - DNA, 21 bp, Homo sapiens
aattggtgtcggtgcctatgg

SEQ ID NO: 10995 - RNA, 21 nt, RNAi
uuggugucggugccuaugguu

SEQ ID NO: 10996 - RNA, 21 nt, RNAi
uuaaccacagccacggauacc

SEQ ID NO: 10997 - DNA, 21 bp, Homo sapiens
aatggaggaggaggtggagga

SEQ ID NO: 10998 - RNA, 21 nt, RNAi
uggaggaggagguggaggauu

SEQ ID NO: 10999 - RNA, 21 nt, RNAi
uuaccuccuccuccaccuccu

SEQ ID NO: 11000 - DNA, 21 bp, Homo sapiens
aatgttgtccggctgatggac

SEQ ID NO: 11001 - RNA, 21 nt, RNAi
uguuguccggcugauggacuu

SEQ ID NO: 11002 - RNA, 21 nt, RNAi
uuacaacaggccgacuaccug

SEQ ID NO: 11003 - DNA, 21 bp, Homo sapiens
aaggacatatctggacaaggc

SEQ ID NO: 11004 - RNA, 21 nt, RNAi
ggacauaucuggacaaggcuu

SEQ ID NO: 11005 - RNA, 21 nt, RNAi
uuccuguauagaccuguuccg

SEQ ID NO: 11006 - DNA, 21 bp, Homo sapiens
aaacgatcaaggatctgatgc

SEQ ID NO: 11007 - RNA, 21 nt, RNAi
acgaucaaggaucugaugcuu

SEQ ID NO: 11008 - RNA, 21 nt, RNAi
uuugcuaguuccuagacuacg

SEQ ID NO: 11009 - DNA, 21 bp, Homo sapiens
aacgatcaaggatctgatgcg

SEQ ID NO: 11010 - RNA, 21 nt, RNAi
cgaucaaggaucugaugcguu

SEQ ID NO: 11011 - RNA, 21 nt, RNAi
uugcuaguuccuagacuacgc

SEQ ID NO: 11012 - DNA, 21 bp, Homo sapiens
aaggatctgatgcgccagttt

SEQ ID NO: 11013 - RNA, 21 nt, RNAi
ggaucugaugcgccaguuuuu

SEQ ID NO: 11014 - RNA, 21 nt, RNAi
uuccuagacuacgcggucaaa

SEQ ID NO: 11015 - DNA, 21 bp, Homo sapiens
aagaggcctagatttccttca

SEQ ID NO: 11016 - RNA, 21 nt, RNAi
gaggccuagauuuccuucauu

SEQ ID NO: 11017 - RNA, 21 nt, RNAi
uucuccggaucuaaaggaagu

SEQ ID NO: 11018 - DNA, 21 bp, Homo sapiens
aattgcatcgttcaccgagat

SEQ ID NO: 11019 - RNA, 21 nt, RNAi
uugcaucguucaccgagauuu

SEQ ID NO: 11020 - RNA, 21 nt, RNAi
uuaacguagcaaguggcucua

SEQ ID NO: 11021 - DNA, 21 bp, Homo sapiens
aagccagagaacattctggtg

SEQ ID NO: 11022 - RNA, 21 nt, RNAi
gccagagaacauucugguguu

SEQ ID NO: 11023 - RNA, 21 nt, RNAi
uucggucucuuguaagaccac

SEQ ID NO: 11024 - DNA, 21 bp, Homo sapiens
aacattctggtgacaagtggt

SEQ ID NO: 11025 - RNA, 21 nt, RNAi
cauucuggugacaagugguuu

SEQ ID NO: 11026 - RNA, 21 nt, RNAi
uuguaagaccacuguucacca

SEQ ID NO: 11027 - DNA, 21 bp, Homo sapiens
aagtggtggaacagtcaagct

SEQ ID NO: 11028 - RNA, 21 nt, RNAi
gugguggaacagucaagcuuu

SEQ ID NO: 11029 - RNA, 21 nt, RNAi
uucaccaccuugucaguucga

SEQ ID NO: 11030 - DNA, 21 bp, Homo sapiens
aacagtcaagctggctgactt

SEQ ID NO: 11031 - RNA, 21 nt, RNAi
cagucaagcuggcugacuuuu

SEQ ID NO: 11032 - RNA, 21 nt, RNAi
uugucaguucgaccgacugaa

SEQ ID NO: 11033 - DNA, 21 bp, Homo sapiens
aagctggctgactttggcctg

SEQ ID NO: 11034 - RNA, 21 nt, RNAi
gcuggcugacuuuggccuguu

SEQ ID NO: 11035 - RNA, 21 nt, RNAi
uucgaccgacugaaaccggac

SEQ ID NO: 11036 - DNA, 21 bp, Homo sapiens
aatctacagctaccagatggc

SEQ ID NO: 11037 - RNA, 21 nt, RNAi
ucuacagcuaccagauggcuu

SEQ ID NO: 11038 - RNA, 21 nt, RNAi
uuagaugucgauggucuaccg

SEQ ID NO: 11039 - DNA, 21 bp, Homo sapiens
aagttcttctgcagtccacat

SEQ ID NO: 11040 - RNA, 21 nt, RNAi
guucuucugcaguccacauuu

SEQ ID NO: 11041 - RNA, 21 nt, RNAi
uucaagaagacgucaggugua

SEQ ID NO: 11042 - DNA, 21 bp, Homo sapiens
aacacctgtggacatgtggag

SEQ ID NO: 11043 - RNA, 21 nt, RNAi
caccuguggacauguggaguu

SEQ ID NO: 11044 - RNA, 21 nt, RNAi
uuguggacaccuguacaccuc

SEQ ID NO: 11045 - DNA, 21 bp, Homo sapiens
aaagcctctcttctgtggaaa

SEQ ID NO: 11046 - RNA, 21 nt, RNAi
agccucucuucuguggaaauu

SEQ ID NO: 11047 - RNA, 21 nt, RNAi
uuucggagagaagacaccuuu

SEQ ID NO: 11048 - DNA, 21 bp, Homo sapiens
aagcctctcttctgtggaaac

SEQ ID NO: 11049 - RNA, 21 nt, RNAi
gccucucuucuguggaaacuu

SEQ ID NO: 11050 - RNA, 21 nt, RNAi
uucggagagaagacaccuuug

SEQ ID NO: 11051 - DNA, 21 bp, Homo sapiens
aaactctgaagccgaccagtt

SEQ ID NO: 11052 - RNA, 21 nt, RNAi
acucugaagccgaccaguuuu

SEQ ID NO: 11053 - RNA, 21 nt, RNAi
uuugagacuucggcuggucaa

SEQ ID NO: 11054 - DNA, 21 bp, Homo sapiens
aactctgaagccgaccagttg

SEQ ID NO: 11055 - RNA, 21 nt, RNAi
cucugaagccgaccaguuguu

SEQ ID NO: 11056 - RNA, 21 nt, RNAi
uugagacuucggcuggucaac

SEQ ID NO: 11057 - DNA, 21 bp, Homo sapiens
aagcgaatctctgcctttcga

SEQ ID NO: 11058 - RNA, 21 nt, RNAi
gcgaaucucugccuuucgauu

SEQ ID NO: 11059 - RNA, 21 nt, RNAi
uucgcuuagagacggaaagcu

SEQ ID NO: 11060 - DNA, 21 bp, Homo sapiens
aatctctgcctttcgagctct

SEQ ID NO: 11061 - RNA, 21 nt, RNAi
ucucugccuuucgagcucuuu

SEQ ID NO: 11062 - RNA, 21 nt, RNAi
uuagagacggaaagcucgaga

SEQ ID NO: 11063 - DNA, 21 bp, Homo sapiens
aaggatgaaggtaatccggag

SEQ ID NO: 11064 - RNA, 21 nt, RNAi
ggaugaagguaauccggaguu

SEQ ID NO: 11065 - RNA, 21 nt, RNAi
uuccuacuuccauuaggccuc

SEQ ID NO: 11066 - DNA, 21 bp, Homo sapiens
aaggtaatccggagtgagcaa

SEQ ID NO: 11067 - RNA, 21 nt, RNAi
gguaauccggagugagcaauu

SEQ ID NO: 11068 - RNA, 21 nt, RNAi
uuccauuaggccucacucguu

SEQ ID NO: 11069 - DNA, 21 bp, Homo sapiens
aatccggagtgagcaatggag

SEQ ID NO: 11070 - RNA, 21 nt, RNAi
uccggagugagcaauggaguu

SEQ ID NO: 11071 - RNA, 21 nt, RNAi
uuaggccucacucguuaccuc

SEQ ID NO: 11072 - DNA, 21 bp, Homo sapiens
aatggagtggctgccatggaa

SEQ ID NO: 11073 - RNA, 21 nt, RNAi
uggaguggcugccauggaauu

SEQ ID NO: 11074 - RNA, 21 nt, RNAi
uuaccucaccgacgguaccuu

SEQ ID NO: 11075 - DNA, 21 bp, Homo sapiens
aatctttgcctttatctctga

SEQ ID NO: 11076 - RNA, 21 nt, RNAi
ucuuugccuuuaucucugauu

SEQ ID NO: 11077 - RNA, 21 nt, RNAi
uuagaaacggaaauagagacu

SEQ ID NO: 11078 - DNA, 21 bp, Homo sapiens
cagtggctgaaattggtgtcg

SEQ ID NO: 11079 - RNA, 21 nt, RNAi
guggcugaaauuggugucguu

SEQ ID NO: 11080 - RNA, 21 nt, RNAi
uucaccgacuuuaaccacagc

SEQ ID NO: 11081 - DNA, 21 bp, Homo sapiens
cacagtggccactttgtggcc

SEQ ID NO: 11082 - RNA, 21 nt, RNAi
caguggccacuuuguggccuu

SEQ ID NO: 11083 - RNA, 21 nt, RNAi
uugucaccggugaaacaccgg

SEQ ID NO: 11084 - DNA, 21 bp, Homo sapiens
caatggaggaggaggtggagg

SEQ ID NO: 11085 - RNA, 21 nt, RNAi
auggaggaggagguggagguu

SEQ ID NO: 11086 - RNA, 21 nt, RNAi
uuuaccuccuccuccaccucc

SEQ ID NO: 11087 - DNA, 21 bp, Homo sapiens
catcagcacagttcgtgaggt

SEQ ID NO: 11088 - RNA, 21 nt, RNAi
ucagcacaguucgugagguuu

SEQ ID NO: 11089 - RNA, 21 nt, RNAi
uuagucgugucaagcacucca

SEQ ID NO: 11090 - DNA, 21 bp, Homo sapiens
cagcacagttcgtgaggtggc

SEQ ID NO: 11091 - RNA, 21 nt, RNAi
gcacaguucgugagguggcuu

SEQ ID NO: 11092 - RNA, 21 nt, RNAi
uucgugucaagcacuccaccg

SEQ ID NO: 11093 - DNA, 21 bp, Homo sapiens
cacagttcgtgaggtggcttt

SEQ ID NO: 11094 - RNA, 21 nt, RNAi
caguucgugagguggcuuuuu

SEQ ID NO: 11095 - RNA, 21 nt, RNAi
uugucaagcacuccaccgaaa

SEQ ID NO: 11096 - DNA, 21 bp, Homo sapiens
cagttcgtgaggtggctttac

SEQ ID NO: 11097 - RNA, 21 nt, RNAi
guucgugagguggcuuuacuu

SEQ ID NO: 11098 - RNA, 21 nt, RNAi
uucaagcacuccaccgaaaug

SEQ ID NO: 11099 - DNA, 21 bp, Homo sapiens
caatgttgtccggctgatgga

SEQ ID NO: 11100 - RNA, 21 nt, RNAi
auguuguccggcugauggauu

SEQ ID NO: 11101 - RNA, 21 nt, RNAi
uuuacaacaggccgacuaccu

SEQ ID NO: 11102 - DNA, 21 bp, Homo sapiens
catgtagaccaggacctaagg

SEQ ID NO: 11103 - RNA, 21 nt, RNAi
uguagaccaggaccuaagguu

SEQ ID NO: 11104 - RNA, 21 nt, RNAi
uuacaucugguccuggauucc

SEQ ID NO: 11105 - DNA, 21 bp, Homo sapiens
caggacctaaggacatatctg

SEQ ID NO: 11106 - RNA, 21 nt, RNAi
ggaccuaaggacauaucuguu

SEQ ID NO: 11107 - RNA, 21 nt, RNAi
uuccuggauuccuguauagac

SEQ ID NO: 11108 - DNA, 21 bp, Homo sapiens
caccaggcttgccagccgaaa

SEQ ID NO: 11109 - RNA, 21 nt, RNAi
ccaggcuugccagccgaaauu

SEQ ID NO: 11110 - RNA, 21 nt, RNAi
uugguccgaacggucggcuuu

SEQ ID NO: 11111 - DNA, 21 bp, Homo sapiens
caggcttgccagccgaaacga

SEQ ID NO: 11112 - RNA, 21 nt, RNAi
ggcuugccagccgaaacgauu

SEQ ID NO: 11113 - RNA, 21 nt, RNAi
uuccgaacggucggcuuugcu

SEQ ID NO: 11114 - DNA, 21 bp, Homo sapiens
cagccgaaacgatcaaggatc

SEQ ID NO: 11115 - RNA, 21 nt, RNAi
gccgaaacgaucaaggaucuu

SEQ ID NO: 11116 - RNA, 21 nt, RNAi
uucggcuuugcuaguuccuag

SEQ ID NO: 11117 - DNA, 21 bp, Homo sapiens
caaggatctgatgcgccagtt

SEQ ID NO: 11118 - RNA, 21 nt, RNAi
aggaucugaugcgccaguuuu

SEQ ID NO: 11119 - RNA, 21 nt, RNAi
uuuccuagacuacgcggucaa

SEQ ID NO: 11120 - DNA, 21 bp, Homo sapiens
cagtttctaagaggcctagat

SEQ ID NO: 11121 - RNA, 21 nt, RNAi
guuucuaagaggccuagauuu

SEQ ID NO: 11122 - RNA, 21 nt, RNAi
uucaaagauucuccggaucua

SEQ ID NO: 11123 - DNA, 21 bp, Homo sapiens
catgccaattgcatcgttcac

SEQ ID NO: 11124 - RNA, 21 nt, RNAi
ugccaauugcaucguucacuu

SEQ ID NO: 11125 - RNA, 21 nt, RNAi
uuacgguuaacguagcaagug

SEQ ID NO: 11126 - DNA, 21 bp, Homo sapiens
caattgcatcgttcaccgaga

SEQ ID NO: 11127 - RNA, 21 nt, RNAi
auugcaucguucaccgagauu

SEQ ID NO: 11128 - RNA, 21 nt, RNAi
uuuaacguagcaaguggcucu

SEQ ID NO: 11129 - DNA, 21 bp, Homo sapiens
catcgttcaccgagatctgaa

SEQ ID NO: 11130 - RNA, 21 nt, RNAi
ucguucaccgagaucugaauu

SEQ ID NO: 11131 - RNA, 21 nt, RNAi
uuagcaaguggcucuagacuu

SEQ ID NO: 11132 - DNA, 21 bp, Homo sapiens
caccgagatctgaagccagag

SEQ ID NO: 11133 - RNA, 21 nt, RNAi
ccgagaucugaagccagaguu

SEQ ID NO: 11134 - RNA, 21 nt, RNAi
uuggcucuagacuucggucuc

SEQ ID NO: 11135 - DNA, 21 bp, Homo sapiens
cagagaacattctggtgacaa

SEQ ID NO: 11136 - RNA, 21 nt, RNAi
gagaacauucuggugacaauu

SEQ ID NO: 11137 - RNA, 21 nt, RNAi
uucucuuguaagaccacuguu

SEQ ID NO: 11138 - DNA, 21 bp, Homo sapiens
cattctggtgacaagtggtgg

SEQ ID NO: 11139 - RNA, 21 nt, RNAi
uucuggugacaaguggugguu

SEQ ID NO: 11140 - RNA, 21 nt, RNAi
uuaagaccacuguucaccacc

SEQ ID NO: 11141 - DNA, 21 bp, Homo sapiens
caagtggtggaacagtcaagc

SEQ ID NO: 11142 - RNA, 21 nt, RNAi
agugguggaacagucaagcuu

SEQ ID NO: 11143 - RNA, 21 nt, RNAi
uuucaccaccuugucaguucg

SEQ ID NO: 11144 - DNA, 21 bp, Homo sapiens
cagtcaagctggctgactttg

SEQ ID NO: 11145 - RNA, 21 nt, RNAi
gucaagcuggcugacuuuguu

SEQ ID NO: 11146 - RNA, 21 nt, RNAi
uucaguucgaccgacugaaac

SEQ ID NO: 11147 - DNA, 21 bp, Homo sapiens
caagctggctgactttggcct

SEQ ID NO: 11148 - RNA, 21 nt, RNAi
agcuggcugacuuuggccuuu

SEQ ID NO: 11149 - RNA, 21 nt, RNAi
uuucgaccgacugaaaccgga

SEQ ID NO: 11150 - DNA, 21 bp, Homo sapiens
cagaatctacagctaccagat

SEQ ID NO: 11151 - RNA, 21 nt, RNAi
gaaucuacagcuaccagauuu

SEQ ID NO: 11152 - RNA, 21 nt, RNAi
uucuuagaugucgauggucua

SEQ ID NO: 11153 - DNA, 21 bp, Homo sapiens
cagctaccagatggcacttac

SEQ ID NO: 11154 - RNA, 21 nt, RNAi
gcuaccagauggcacuuacuu

SEQ ID NO: 11155 - RNA, 21 nt, RNAi
uucgauggucuaccgugaaug

SEQ ID NO: 11156 - DNA, 21 bp, Homo sapiens
cagtccacatatgcaacacct

SEQ ID NO: 11157 - RNA, 21 nt, RNAi
guccacauaugcaacaccuuu

SEQ ID NO: 11158 - RNA, 21 nt, RNAi
uucagguguauacguugugga

SEQ ID NO: 11159 - DNA, 21 bp, Homo sapiens
cacatatgcaacacctgtgga

SEQ ID NO: 11160 - RNA, 21 nt, RNAi
cauaugcaacaccuguggauu

SEQ ID NO: 11161 - RNA, 21 nt, RNAi
uuguauacguuguggacaccu

SEQ ID NO: 11162 - DNA, 21 bp, Homo sapiens
catatgcaacacctgtggaca

SEQ ID NO: 11163 - RNA, 21 nt, RNAi
uaugcaacaccuguggacauu

SEQ ID NO: 11164 - RNA, 21 nt, RNAi
uuauacguuguggacaccugu

SEQ ID NO: 11165 - DNA, 21 bp, Homo sapiens
caacacctgtggacatgtgga

SEQ ID NO: 11166 - RNA, 21 nt, RNAi
acaccuguggacauguggauu

SEQ ID NO: 11167 - RNA, 21 nt, RNAi
uuuguggacaccuguacaccu

SEQ ID NO: 11168 - DNA, 21 bp, Homo sapiens
cacctgtggacatgtggagtg

SEQ ID NO: 11169 - RNA, 21 nt, RNAi
ccuguggacauguggaguguu

SEQ ID NO: 11170 - RNA, 21 nt, RNAi
uuggacaccuguacaccucac

SEQ ID NO: 11171 - DNA, 21 bp, Homo sapiens
catgtggagtgttggctgtat

SEQ ID NO: 11172 - RNA, 21 nt, RNAi
uguggaguguuggcuguauuu

SEQ ID NO: 11173 - RNA, 21 nt, RNAi
uuacaccucacaaccgacaua

SEQ ID NO: 11174 - DNA, 21 bp, Homo sapiens
cagagatgtttcgtcgaaagc

SEQ ID NO: 11175 - RNA, 21 nt, RNAi
gagauguuucgucgaaagcuu

SEQ ID NO: 11176 - RNA, 21 nt, RNAi
uucucuacaaagcagcuuucg

SEQ ID NO: 11177 - DNA, 21 bp, Homo sapiens
cagaggatgactggcctcgag

SEQ ID NO: 11178 - RNA, 21 nt, RNAi
gaggaugacuggccucgaguu

SEQ ID NO: 11179 - RNA, 21 nt, RNAi
uucuccuacugaccggagcuc

SEQ ID NO: 11180 - DNA, 21 bp, Homo sapiens
cagtgcagtcggtggtacctg

SEQ ID NO: 11181 - RNA, 21 nt, RNAi
gugcagucggugguaccuguu

SEQ ID NO: 11182 - RNA, 21 nt, RNAi
uucacgucagccaccauggac

SEQ ID NO: 11183 - DNA, 21 bp, Homo sapiens
cagtcggtggtacctgagatg

SEQ ID NO: 11184 - RNA, 21 nt, RNAi
gucggugguaccugagauguu

SEQ ID NO: 11185 - RNA, 21 nt, RNAi
uucagccaccauggacucuac

SEQ ID NO: 11186 - DNA, 21 bp, Homo sapiens
cacagctgctgctggaaatgc

SEQ ID NO: 11187 - RNA, 21 nt, RNAi
cagcugcugcuggaaaugcuu

SEQ ID NO: 11188 - RNA, 21 nt, RNAi
uugucgacgacgaccuuuacg

SEQ ID NO: 11189 - DNA, 21 bp, Homo sapiens
cagctgctgctggaaatgctg

SEQ ID NO: 11190 - RNA, 21 nt, RNAi
gcugcugcuggaaaugcuguu

SEQ ID NO: 11191 - RNA, 21 nt, RNAi
uucgacgacgaccuuuacgac

SEQ ID NO: 11192 - DNA, 21 bp, Homo sapiens
cacacaagcgaatctctgcct

SEQ ID NO: 11193 - RNA, 21 nt, RNAi
cacaagcgaaucucugccuuu

SEQ ID NO: 11194 - RNA, 21 nt, RNAi
uuguguucgcuuagagacgga

SEQ ID NO: 11195 - DNA, 21 bp, Homo sapiens
cacaagcgaatctctgccttt

SEQ ID NO: 11196 - RNA, 21 nt, RNAi
caagcgaaucucugccuuuuu

SEQ ID NO: 11197 - RNA, 21 nt, RNAi
uuguucgcuuagagacggaaa

SEQ ID NO: 11198 - DNA, 21 bp, Homo sapiens
caagcgaatctctgcctttcg

SEQ ID NO: 11199 - RNA, 21 nt, RNAi
agcgaaucucugccuuucguu

SEQ ID NO: 11200 - RNA, 21 nt, RNAi
uuucgcuuagagacggaaagc

SEQ ID NO: 11201 - DNA, 21 bp, Homo sapiens
cagcactcttatctacataag

SEQ ID NO: 11202 - RNA, 21 nt, RNAi
gcacucuuaucuacauaaguu

SEQ ID NO: 11203 - RNA, 21 nt, RNAi
uucgugagaauagauguauuc

SEQ ID NO: 11204 - DNA, 21 bp, Homo sapiens
cactcttatctacataaggat

SEQ ID NO: 11205 - RNA, 21 nt, RNAi
cucuuaucuacauaaggauuu

SEQ ID NO: 11206 - RNA, 21 nt, RNAi
uugagaauagauguauuccua

SEQ ID NO: 11207 - DNA, 21 bp, Homo sapiens
cataaggatgaaggtaatccg

SEQ ID NO: 11208 - RNA, 21 nt, RNAi
uaaggaugaagguaauccguu

SEQ ID NO: 11209 - RNA, 21 nt, RNAi
uuauuccuacuuccauuaggc

SEQ ID NO: 11210 - DNA, 21 bp, Homo sapiens
caatggagtggctgccatgga

SEQ ID NO: 11211 - RNA, 21 nt, RNAi
auggaguggcugccauggauu

SEQ ID NO: 11212 - RNA, 21 nt, RNAi
uuuaccucaccgacgguaccu

SEQ ID NO: 11213 - DNA, 21 bp, Homo sapiens
caatctttgcctttatctctg

SEQ ID NO: 11214 - RNA, 21 nt, RNAi
aucuuugccuuuaucucuguu

SEQ ID NO: 11215 - RNA, 21 nt, RNAi
uuuagaaacggaaauagagac

SEQ ID NO: 11216 - DNA, 21 bp, Homo sapiens
catctttctacagagattact

SEQ ID NO: 11217 - RNA, 21 nt, RNAi
ucuuucuacagagauuacuuu

SEQ ID NO: 11218 - RNA, 21 nt, RNAi
uuagaaagaugucucuaauga

SEQ ID NO: 11219 - DNA, 21 bp, Homo sapiens
cagagattactttgctgcctt

SEQ ID NO: 11220 - RNA, 21 nt, RNAi
gagauuacuuugcugccuuuu

SEQ ID NO: 11221 - RNA, 21 nt, RNAi
uucucuaaugaaacgacggaa

SEQ ID NO: 11222 - DNA, 21 bp, Homo sapiens
gatctgagaatggctacctct

SEQ ID NO: 11223 - RNA, 21 nt, RNAi
ucugagaauggcuaccucuuu

SEQ ID NO: 11224 - RNA, 21 nt, RNAi
uuagacucuuaccgauggaga

SEQ ID NO: 11225 - DNA, 21 bp, Homo sapiens
gagaatggctacctctcgata

SEQ ID NO: 11226 - RNA, 21 nt, RNAi
gaauggcuaccucucgauauu

SEQ ID NO: 11227 - RNA, 21 nt, RNAi
uucuuaccgauggagagcuau

SEQ ID NO: 11228 - DNA, 21 bp, Homo sapiens
gaatggctacctctcgatatg

SEQ ID NO: 11229 - RNA, 21 nt, RNAi
auggcuaccucucgauauguu

SEQ ID NO: 11230 - RNA, 21 nt, RNAi
uuuaccgauggagagcuauac

SEQ ID NO: 11231 - DNA, 21 bp, Homo sapiens
gatatgagccagtggctgaaa

SEQ ID NO: 11232 - RNA, 21 nt, RNAi
uaugagccaguggcugaaauu

SEQ ID NO: 11233 - RNA, 21 nt, RNAi
uuauacucggucaccgacuuu

SEQ ID NO: 11234 - DNA, 21 bp, Homo sapiens
gagccagtggctgaaattggt

SEQ ID NO: 11235 - RNA, 21 nt, RNAi
gccaguggcugaaauugguuu

SEQ ID NO: 11236 - RNA, 21 nt, RNAi
uucggucaccgacuuuaacca

SEQ ID NO: 11237 - DNA, 21 bp, Homo sapiens
gaaattggtgtcggtgcctat

SEQ ID NO: 11238 - RNA, 21 nt, RNAi
aauuggugucggugccuauuu

SEQ ID NO: 11239 - RNA, 21 nt, RNAi
uuuuaaccacagccacggaua

SEQ ID NO: 11240 - DNA, 21 bp, Homo sapiens
gaggtggctttactgaggcga

SEQ ID NO: 11241 - RNA, 21 nt, RNAi
gguggcuuuacugaggcgauu

SEQ ID NO: 11242 - RNA, 21 nt, RNAi
uuccaccgaaaugacuccgcu

SEQ ID NO: 11243 - DNA, 21 bp, Homo sapiens
gatggacgtctgtgccacatc

SEQ ID NO: 11244 - RNA, 21 nt, RNAi
uggacgucugugccacaucuu

SEQ ID NO: 11245 - RNA, 21 nt, RNAi
uuaccugcagacacgguguag

SEQ ID NO: 11246 - DNA, 21 bp, Homo sapiens
gagcatgtagaccaggaccta

SEQ ID NO: 11247 - RNA, 21 nt, RNAi
gcauguagaccaggaccuauu

SEQ ID NO: 11248 - RNA, 21 nt, RNAi
uucguacaucugguccuggau

SEQ ID NO: 11249 - DNA, 21 bp, Homo sapiens
gaccaggacctaaggacatat

SEQ ID NO: 11250 - RNA, 21 nt, RNAi
ccaggaccuaaggacauauuu

SEQ ID NO: 11251 - RNA, 21 nt, RNAi
uugguccuggauuccuguaua

SEQ ID NO: 11252 - DNA, 21 bp, Homo sapiens
gacctaaggacatatctggac

SEQ ID NO: 11253 - RNA, 21 nt, RNAi
ccuaaggacauaucuggacuu

SEQ ID NO: 11254 - RNA, 21 nt, RNAi
uuggauuccuguauagaccug

SEQ ID NO: 11255 - DNA, 21 bp, Homo sapiens
gacatatctggacaaggcacc

SEQ ID NO: 11256 - RNA, 21 nt, RNAi
cauaucuggacaaggcaccuu

SEQ ID NO: 11257 - RNA, 21 nt, RNAi
uuguauagaccuguuccgugg

SEQ ID NO: 11258 - DNA, 21 bp, Homo sapiens
gaaacgatcaaggatctgatg

SEQ ID NO: 11259 - RNA, 21 nt, RNAi
aacgaucaaggaucugauguu

SEQ ID NO: 11260 - RNA, 21 nt, RNAi
uuuugcuaguuccuagacuac

SEQ ID NO: 11261 - DNA, 21 bp, Homo sapiens
gatcaaggatctgatgcgcca

SEQ ID NO: 11262 - RNA, 21 nt, RNAi
ucaaggaucugaugcgccauu

SEQ ID NO: 11263 - RNA, 21 nt, RNAi
uuaguuccuagacuacgcggu

SEQ ID NO: 11264 - DNA, 21 bp, Homo sapiens
gatctgatgcgccagtttcta

SEQ ID NO: 11265 - RNA, 21 nt, RNAi
ucugaugcgccaguuucuauu

SEQ ID NO: 11266 - RNA, 21 nt, RNAi
uuagacuacgcggucaaagau

SEQ ID NO: 11267 - DNA, 21 bp, Homo sapiens
gatgcgccagtttctaagagg

SEQ ID NO: 11268 - RNA, 21 nt, RNAi
ugcgccaguuucuaagagguu

SEQ ID NO: 11269 - RNA, 21 nt, RNAi
uuacgcggucaaagauucucc

SEQ ID NO: 11270 - DNA, 21 bp, Homo sapiens
gaggcctagatttccttcatg

SEQ ID NO: 11271 - RNA, 21 nt, RNAi
ggccuagauuuccuucauguu

SEQ ID NO: 11272 - RNA, 21 nt, RNAi
uuccggaucuaaaggaaguac

SEQ ID NO: 11273 - DNA, 21 bp, Homo sapiens
gatttccttcatgccaattgc

SEQ ID NO: 11274 - RNA, 21 nt, RNAi
uuuccuucaugccaauugcuu

SEQ ID NO: 11275 - RNA, 21 nt, RNAi
uuaaaggaaguacgguuaacg

SEQ ID NO: 11276 - DNA, 21 bp, Homo sapiens
gagatctgaagccagagaaca

SEQ ID NO: 11277 - RNA, 21 nt, RNAi
gaucugaagccagagaacauu

SEQ ID NO: 11278 - RNA, 21 nt, RNAi
uucuagacuucggucucuugu

SEQ ID NO: 11279 - DNA, 21 bp, Homo sapiens
gatctgaagccagagaacatt

SEQ ID NO: 11280 - RNA, 21 nt, RNAi
ucugaagccagagaacauuuu

SEQ ID NO: 11281 - RNA, 21 nt, RNAi
uuagacuucggucucuuguaa

SEQ ID NO: 11282 - DNA, 21 bp, Homo sapiens
gaagccagagaacattctggt

SEQ ID NO: 11283 - RNA, 21 nt, RNAi
agccagagaacauucugguuu

SEQ ID NO: 11284 - RNA, 21 nt, RNAi
uuucggucucuuguaagacca

SEQ ID NO: 11285 - DNA, 21 bp, Homo sapiens
gagaacattctggtgacaagt

SEQ ID NO: 11286 - RNA, 21 nt, RNAi
gaacauucuggugacaaguuu

SEQ ID NO: 11287 - RNA, 21 nt, RNAi
uucuuguaagaccacuguuca

SEQ ID NO: 11288 - DNA, 21 bp, Homo sapiens
gaacattctggtgacaagtgg

SEQ ID NO: 11289 - RNA, 21 nt, RNAi
acauucuggugacaagugguu

SEQ ID NO: 11290 - RNA, 21 nt, RNAi
uuuguaagaccacuguucacc

SEQ ID NO: 11291 - DNA, 21 bp, Homo sapiens
gacaagtggtggaacagtcaa

SEQ ID NO: 11292 - RNA, 21 nt, RNAi
caagugguggaacagucaauu

SEQ ID NO: 11293 - RNA, 21 nt, RNAi
uuguucaccaccuugucaguu

SEQ ID NO: 11294 - DNA, 21 bp, Homo sapiens
gaacagtcaagctggctgact

SEQ ID NO: 11295 - RNA, 21 nt, RNAi
acagucaagcuggcugacuuu

SEQ ID NO: 11296 - RNA, 21 nt, RNAi
uuugucaguucgaccgacuga

SEQ ID NO: 11297 - DNA, 21 bp, Homo sapiens
gactttggcctggccagaatc

SEQ ID NO: 11298 - RNA, 21 nt, RNAi
cuuuggccuggccagaaucuu

SEQ ID NO: 11299 - RNA, 21 nt, RNAi
uugaaaccggaccggucuuag

SEQ ID NO: 11300 - DNA, 21 bp, Homo sapiens
gaatctacagctaccagatgg

SEQ ID NO: 11301 - RNA, 21 nt, RNAi
aucuacagcuaccagaugguu

SEQ ID NO: 11302 - RNA, 21 nt, RNAi
uuuagaugucgauggucuacc

SEQ ID NO: 11303 - DNA, 21 bp, Homo sapiens
gaagttcttctgcagtccaca

SEQ ID NO: 11304 - RNA, 21 nt, RNAi
aguucuucugcaguccacauu

SEQ ID NO: 11305 - RNA, 21 nt, RNAi
uuucaagaagacgucaggugu

SEQ ID NO: 11306 - DNA, 21 bp, Homo sapiens
gacatgtggagtgttggctgt

SEQ ID NO: 11307 - RNA, 21 nt, RNAi
cauguggaguguuggcuguuu

SEQ ID NO: 11308 - RNA, 21 nt, RNAi
uuguacaccucacaaccgaca

SEQ ID NO: 11309 - DNA, 21 bp, Homo sapiens
gagtgttggctgtatctttgc

SEQ ID NO: 11310 - RNA, 21 nt, RNAi
guguuggcuguaucuuugcuu

SEQ ID NO: 11311 - RNA, 21 nt, RNAi
uucacaaccgacauagaaacg

SEQ ID NO: 11312 - DNA, 21 bp, Homo sapiens
gagatgtttcgtcgaaagcct

SEQ ID NO: 11313 - RNA, 21 nt, RNAi
gauguuucgucgaaagccuuu

SEQ ID NO: 11314 - RNA, 21 nt, RNAi
uucuacaaagcagcuuucgga

SEQ ID NO: 11315 - DNA, 21 bp, Homo sapiens
gatgtttcgtcgaaagcctct

SEQ ID NO: 11316 - RNA, 21 nt, RNAi
uguuucgucgaaagccucuuu

SEQ ID NO: 11317 - RNA, 21 nt, RNAi
uuacaaagcagcuuucggaga

SEQ ID NO: 11318 - DNA, 21 bp, Homo sapiens
gaaagcctctcttctgtggaa

SEQ ID NO: 11319 - RNA, 21 nt, RNAi
aagccucucuucuguggaauu

SEQ ID NO: 11320 - RNA, 21 nt, RNAi
uuuucggagagaagacaccuu

SEQ ID NO: 11321 - DNA, 21 bp, Homo sapiens
gaaactctgaagccgaccagt

SEQ ID NO: 11322 - RNA, 21 nt, RNAi
aacucugaagccgaccaguuu

SEQ ID NO: 11323 - RNA, 21 nt, RNAi
uuuugagacuucggcugguca

SEQ ID NO: 11324 - DNA, 21 bp, Homo sapiens
gaggatgactggcctcgagat

SEQ ID NO: 11325 - RNA, 21 nt, RNAi
ggaugacuggccucgagauuu

SEQ ID NO: 11326 - RNA, 21 nt, RNAi
uuccuacugaccggagcucua

SEQ ID NO: 11327 - DNA, 21 bp, Homo sapiens
gatgactggcctcgagatgta

SEQ ID NO: 11328 - RNA, 21 nt, RNAi
ugacuggccucgagauguauu

SEQ ID NO: 11329 - RNA, 21 nt, RNAi
uuacugaccggagcucuacau

SEQ ID NO: 11330 - DNA, 21 bp, Homo sapiens
gactggcctcgagatgtatcc

SEQ ID NO: 11331 - RNA, 21 nt, RNAi
cuggccucgagauguauccuu

SEQ ID NO: 11332 - RNA, 21 nt, RNAi
uugaccggagcucuacauagg

SEQ ID NO: 11333 - DNA, 21 bp, Homo sapiens
gagcacagctgctgctggaaa

SEQ ID NO: 11334 - RNA, 21 nt, RNAi
gcacagcugcugcuggaaauu

SEQ ID NO: 11335 - RNA, 21 nt, RNAi
uucgugucgacgacgaccuuu

SEQ ID NO: 11336 - DNA, 21 bp, Homo sapiens
gaatctctgcctttcgagctc

SEQ ID NO: 11337 - RNA, 21 nt, RNAi
aucucugccuuucgagcucuu

SEQ ID NO: 11338 - RNA, 21 nt, RNAi
uuuagagacggaaagcucgag

SEQ ID NO: 11339 - DNA, 21 bp, Homo sapiens
gagctctgcagcactcttatc

SEQ ID NO: 11340 - RNA, 21 nt, RNAi
gcucugcagcacucuuaucuu

SEQ ID NO: 11341 - RNA, 21 nt, RNAi
uucgagacgucgugagaauag

SEQ ID NO: 11342 - DNA, 21 bp, Homo sapiens
gatgaaggtaatccggagtga

SEQ ID NO: 11343 - RNA, 21 nt, RNAi
ugaagguaauccggagugauu

SEQ ID NO: 11344 - RNA, 21 nt, RNAi
uuacuuccauuaggccucacu

SEQ ID NO: 11345 - DNA, 21 bp, Homo sapiens
gaaggtaatccggagtgagca

SEQ ID NO: 11346 - RNA, 21 nt, RNAi
agguaauccggagugagcauu

SEQ ID NO: 11347 - RNA, 21 nt, RNAi
uuuccauuaggccucacucgu

SEQ ID NO: 11348 - DNA, 21 bp, Homo sapiens
gagtgagcaatggagtggctg

SEQ ID NO: 11349 - RNA, 21 nt, RNAi
gugagcaauggaguggcuguu

SEQ ID NO: 11350 - RNA, 21 nt, RNAi
uucacucguuaccucaccgac

SEQ ID NO: 11351 - DNA, 21 bp, Homo sapiens
gagcaatggagtggctgccat

SEQ ID NO: 11352 - RNA, 21 nt, RNAi
gcaauggaguggcugccauuu

SEQ ID NO: 11353 - RNA, 21 nt, RNAi
uucguuaccucaccgacggua

SEQ ID NO: 11354 - DNA, 21 bp, Homo sapiens
gagtggctgccatggaaggaa

SEQ ID NO: 11355 - RNA, 21 nt, RNAi
guggcugccauggaaggaauu

SEQ ID NO: 11356 - RNA, 21 nt, RNAi
uucaccgacgguaccuuccuu

SEQ ID NO: 11357 - DNA, 21 bp, Homo sapiens
gagattactttgctgccttaa

SEQ ID NO: 11358 - RNA, 21 nt, RNAi
gauuacuuugcugccuuaauu

SEQ ID NO: 11359 - RNA, 21 nt, RNAi
uucuaaugaaacgacggaauu

SEQ ID NO: 11360 - DNA, 21 bp, Homo sapiens
gattactttgctgccttaatg

SEQ ID NO: 11361 - RNA, 21 nt, RNAi
uuacuuugcugccuuaauguu

SEQ ID NO: 11362 - RNA, 21 nt, RNAi
uuaaugaaacgacggaauuac

SEQ ID NO: 11363 - DNA, 21 bp, Homo sapiens
gaggcttctccttctccttcc

SEQ ID NO: 11364 - RNA, 21 nt, RNAi
ggcuucuccuucuccuuccuu

SEQ ID NO: 11365 - RNA, 21 nt, RNAi
uuccgaagaggaagaggaagg

SEQ ID NO: 11366 - DNA, 21 bp, Homo sapiens
tagcttgcggcctgtgtctat

SEQ ID NO: 11367 - RNA, 21 nt, RNAi
gcuugcggccugugucuauuu

SEQ ID NO: 11368 - RNA, 21 nt, RNAi
uucgaacgccggacacagaua

SEQ ID NO: 11369 - DNA, 21 bp, Homo sapiens
tacctctcgatatgagccagt

SEQ ID NO: 11370 - RNA, 21 nt, RNAi
ccucucgauaugagccaguuu

SEQ ID NO: 11371 - RNA, 21 nt, RNAi
uuggagagcuauacucgguca

SEQ ID NO: 11372 - DNA, 21 bp, Homo sapiens
tatgagccagtggctgaaatt

SEQ ID NO: 11373 - RNA, 21 nt, RNAi
ugagccaguggcugaaauuuu

SEQ ID NO: 11374 - RNA, 21 nt, RNAi
uuacucggucaccgacuuuaa

SEQ ID NO: 11375 - DNA, 21 bp, Homo sapiens
tactgaggcgactggaggctt

SEQ ID NO: 11376 - RNA, 21 nt, RNAi
cugaggcgacuggaggcuuuu

SEQ ID NO: 11377 - RNA, 21 nt, RNAi
uugacuccgcugaccuccgaa

SEQ ID NO: 11378 - DNA, 21 bp, Homo sapiens
tagaccaggacctaaggacat

SEQ ID NO: 11379 - RNA, 21 nt, RNAi
gaccaggaccuaaggacauuu

SEQ ID NO: 11380 - RNA, 21 nt, RNAi
uucugguccuggauuccugua

SEQ ID NO: 11381 - DNA, 21 bp, Homo sapiens
taaggacatatctggacaagg

SEQ ID NO: 11382 - RNA, 21 nt, RNAi
aggacauaucuggacaagguu

SEQ ID NO: 11383 - RNA, 21 nt, RNAi
uuuccuguauagaccuguucc

SEQ ID NO: 11384 - DNA, 21 bp, Homo sapiens
taagaggcctagatttccttc

SEQ ID NO: 11385 - RNA, 21 nt, RNAi
agaggccuagauuuccuucuu

SEQ ID NO: 11386 - RNA, 21 nt, RNAi
uuucuccggaucuaaaggaag

SEQ ID NO: 11387 - DNA, 21 bp, Homo sapiens
tagatttccttcatgccaatt

SEQ ID NO: 11388 - RNA, 21 nt, RNAi
gauuuccuucaugccaauuuu

SEQ ID NO: 11389 - RNA, 21 nt, RNAi
uucuaaaggaaguacgguuaa

SEQ ID NO: 11390 - DNA, 21 bp, Homo sapiens
tacagctaccagatggcactt

SEQ ID NO: 11391 - RNA, 21 nt, RNAi
cagcuaccagauggcacuuuu

SEQ ID NO: 11392 - RNA, 21 nt, RNAi
uugucgauggucuaccgugaa

SEQ ID NO: 11393 - DNA, 21 bp, Homo sapiens
tacactctggtaccgagctcc

SEQ ID NO: 11394 - RNA, 21 nt, RNAi
cacucugguaccgagcuccuu

SEQ ID NO: 11395 - RNA, 21 nt, RNAi
uugugagaccauggcucgagg

SEQ ID NO: 11396 - DNA, 21 bp, Homo sapiens
tatgcaacacctgtggacatg

SEQ ID NO: 11397 - RNA, 21 nt, RNAi
ugcaacaccuguggacauguu

SEQ ID NO: 11398 - RNA, 21 nt, RNAi
uuacguuguggacaccuguac

SEQ ID NO: 11399 - DNA, 21 bp, Homo sapiens
tatctttgcagagatgtttcg

SEQ ID NO: 11400 - RNA, 21 nt, RNAi
ucuuugcagagauguuucguu

SEQ ID NO: 11401 - RNA, 21 nt, RNAi
uuagaaacgucucuacaaagc

SEQ ID NO: 11402 - DNA, 21 bp, Homo sapiens
tacctgagatggaggagtcgg

SEQ ID NO: 11403 - RNA, 21 nt, RNAi
ccugagauggaggagucgguu

SEQ ID NO: 11404 - RNA, 21 nt, RNAi
uuggacucuaccuccucagcc

SEQ ID NO: 11405 - DNA, 21 bp, Homo sapiens
tatctacataaggatgaaggt

SEQ ID NO: 11406 - RNA, 21 nt, RNAi
ucuacauaaggaugaagguuu

SEQ ID NO: 11407 - RNA, 21 nt, RNAi
uuagauguauuccuacuucca

SEQ ID NO: 11408 - DNA, 21 bp, Homo sapiens
tacataaggatgaaggtaatc

SEQ ID NO: 11409 - RNA, 21 nt, RNAi
cauaaggaugaagguaaucuu

SEQ ID NO: 11410 - RNA, 21 nt, RNAi
uuguauuccuacuuccauuag

SEQ ID NO: 11411 - DNA, 21 bp, Homo sapiens
taaggatgaaggtaatccgga

SEQ ID NO: 11412 - RNA, 21 nt, RNAi
aggaugaagguaauccggauu

SEQ ID NO: 11413 - RNA, 21 nt, RNAi
uuuccuacuuccauuaggccu

SEQ ID NO: 11414 - DNA, 21 bp, Homo sapiens
taatccggagtgagcaatgga

SEQ ID NO: 11415 - RNA, 21 nt, RNAi
auccggagugagcaauggauu

SEQ ID NO: 11416 - RNA, 21 nt, RNAi
uuuaggccucacucguuaccu

SEQ ID NO: 11417 - DNA, 21 bp, Homo sapiens
tacagagattactttgctgcc

SEQ ID NO: 11418 - RNA, 21 nt, RNAi
cagagauuacuuugcugccuu

SEQ ID NO: 11419 - RNA, 21 nt, RNAi
uugucucuaaugaaacgacgg

SEQ ID NO: 11420 - DNA, 21 bp, Homo sapiens
tactttgctgccttaatgaca

SEQ ID NO: 11421 - RNA, 21 nt, RNAi
cuuugcugccuuaaugacauu

SEQ ID NO: 11422 - RNA, 21 nt, RNAi
uugaaacgacggaauuacugu

SEQ ID NO: 11423 - DNA, 21 bp, Homo sapiens
aaacgatcaaggatctgatgc

SEQ ID NO: 11424 - RNA, 21 nt, RNAi
acgaucaaggaucugaugcuu

SEQ ID NO: 11425 - RNA, 21 nt, RNAi
uuugcuaguuccuagacuacg

SEQ ID NO: 11426 - DNA, 21 bp, Homo sapiens
aacgatcaaggatctgatgcg

SEQ ID NO: 11427 - RNA, 21 nt, RNAi
cgaucaaggaucugaugcguu

SEQ ID NO: 11428 - RNA, 21 nt, RNAi
uugcuaguuccuagacuacgc

SEQ ID NO: 11429 - DNA, 21 bp, Homo sapiens
aaggatctgatgcgccagttt

SEQ ID NO: 11430 - RNA, 21 nt, RNAi
ggaucugaugcgccaguuuuu

SEQ ID NO: 11431 - RNA, 21 nt, RNAi
uuccuagacuacgcggucaaa

SEQ ID NO: 11432 - DNA, 21 bp, Homo sapiens
aattgcatcgttcaccgagat

SEQ ID NO: 11433 - RNA, 21 nt, RNAi
uugcaucguucaccgagauuu

SEQ ID NO: 11434 - RNA, 21 nt, RNAi
uuaacguagcaaguggcucua

SEQ ID NO: 11435 - DNA, 21 bp, Homo sapiens
aaactctgaagccgaccagtt

SEQ ID NO: 11436 - RNA, 21 nt, RNAi
acucugaagccgaccaguuuu

SEQ ID NO: 11437 - RNA, 21 nt, RNAi
uuugagacuucggcuggucaa

SEQ ID NO: 11438 - DNA, 21 bp, Homo sapiens
catcagcacagttcgtgaggt

SEQ ID NO: 11439 - RNA, 21 nt, RNAi
ucagcacaguucgugagguuu

SEQ ID NO: 11440 - RNA, 21 nt, RNAi
uuagucgugucaagcacucca

SEQ ID NO: 11441 - DNA, 21 bp, Homo sapiens
cacagttcgtgaggtggcttt

SEQ ID NO: 11442 - RNA, 21 nt, RNAi
caguucgugagguggcuuuuu

SEQ ID NO: 11443 - RNA, 21 nt, RNAi
uugucaagcacuccaccgaaa

SEQ ID NO: 11444 - DNA, 21 bp, Homo sapiens
caggacctaaggacatatctg

SEQ ID NO: 11445 - RNA, 21 nt, RNAi
ggaccuaaggacauaucuguu

SEQ ID NO: 11446 - RNA, 21 nt, RNAi
uuccuggauuccuguauagac

SEQ ID NO: 11447 - DNA, 21 bp, Homo sapiens
cagccgaaacgatcaaggatc

SEQ ID NO: 11448 - RNA, 21 nt, RNAi
gccgaaacgaucaaggaucuu

SEQ ID NO: 11449 - RNA, 21 nt, RNAi
uucggcuuugcuaguuccuag

SEQ ID NO: 11450 - DNA, 21 bp, Homo sapiens
caaggatctgatgcgccagtt

SEQ ID NO: 11451 - RNA, 21 nt, RNAi
aggaucugaugcgccaguuuu

SEQ ID NO: 11452 - RNA, 21 nt, RNAi
uuuccuagacuacgcggucaa

SEQ ID NO: 11453 - DNA, 21 bp, Homo sapiens
catgccaattgcatcgttcac

SEQ ID NO: 11454 - RNA, 21 nt, RNAi
ugccaauugcaucguucacuu

SEQ ID NO: 11455 - RNA, 21 nt, RNAi
uuacgguuaacguagcaagug

SEQ ID NO: 11456 - DNA, 21 bp, Homo sapiens
caattgcatcgttcaccgaga

SEQ ID NO: 11457 - RNA, 21 nt, RNAi
auugcaucguucaccgagauu

SEQ ID NO: 11458 - RNA, 21 nt, RNAi
uuuaacguagcaaguggcucu

SEQ ID NO: 11459 - DNA, 21 bp, Homo sapiens
cagaatctacagctaccagat

SEQ ID NO: 11460 - RNA, 21 nt, RNAi
gaaucuacagcuaccagauuu

SEQ ID NO: 11461 - RNA, 21 nt, RNAi
uucuuagaugucgauggucua

SEQ ID NO: 11462 - DNA, 21 bp, Homo sapiens
gaaacgatcaaggatctgatg

SEQ ID NO: 11463 - RNA, 21 nt, RNAi
aacgaucaaggaucugauguu

SEQ ID NO: 11464 - RNA, 21 nt, RNAi
uuuugcuaguuccuagacuac

SEQ ID NO: 11465 - DNA, 21 bp, Homo sapiens
gatcaaggatctgatgcgcca

SEQ ID NO: 11466 - RNA, 21 nt, RNAi
ucaaggaucugaugcgccauu

SEQ ID NO: 11467 - RNA, 21 nt, RNAi
uuaguuccuagacuacgcggu

SEQ ID NO: 11468 - DNA, 21 bp, Homo sapiens
gatctgatgcgccagtttcta

SEQ ID NO: 11469 - RNA, 21 nt, RNAi
ucugaugcgccaguuucuauu

SEQ ID NO: 11470 - RNA, 21 nt, RNAi
uuagacuacgcggucaaagau

SEQ ID NO: 11471 - DNA, 21 bp, Homo sapiens
gaaactctgaagccgaccagt

SEQ ID NO: 11472 - RNA, 21 nt, RNAi
aacucugaagccgaccaguuu

SEQ ID NO: 11473 - RNA, 21 nt, RNAi
uuuugagacuucggcugguca

SEQ ID NO: 11474 - DNA, 21 bp, Homo sapiens
tatgcaacacctgtggacatg

SEQ ID NO: 11475 - RNA, 21 nt, RNAi
ugcaacaccuguggacauguu

SEQ ID NO: 11476 - RNA, 21 nt, RNAi
uuacguuguggacaccuguac

SEQ ID NO: 11477 - DNA, 21 bp, Homo sapiens
aaggcacctacggaactgtgt

SEQ ID NO: 11478 - RNA, 21 nt, RNAi
ggcaccuacggaacuguguuu

SEQ ID NO: 11479 - RNA, 21 nt, RNAi
uuccguggaugccuugacaca

SEQ ID NO: 11480 - DNA, 21 bp, Homo sapiens
aaggagctgaagcacaagaac

SEQ ID NO: 11481 - RNA, 21 nt, RNAi
ggagcugaagcacaagaacuu

SEQ ID NO: 11482 - RNA, 21 nt, RNAi
uuccucgacuucguguucuug

SEQ ID NO: 11483 - DNA, 21 bp, Homo sapiens
aagcacaagaacatcgtcagg

SEQ ID NO: 11484 - RNA, 21 nt, RNAi
gcacaagaacaucgucagguu

SEQ ID NO: 11485 - RNA, 21 nt, RNAi
uucguguucuuguagcagucc

SEQ ID NO: 11486 - DNA, 21 bp, Homo sapiens
aagaacatcgtcaggcttcat

SEQ ID NO: 11487 - RNA, 21 nt, RNAi
gaacaucgucaggcuucauuu

SEQ ID NO: 11488 - RNA, 21 nt, RNAi
uucuuguagcaguccgaagua

SEQ ID NO: 11489 - DNA, 21 bp, Homo sapiens
aacatcgtcaggcttcatgac

SEQ ID NO: 11490 - RNA, 21 nt, RNAi
caucgucaggcuucaugacuu

SEQ ID NO: 11491 - RNA, 21 nt, RNAi
uuguagcaguccgaaguacug

SEQ ID NO: 11492 - DNA, 21 bp, Homo sapiens
aattctgtgaccaggacctga

SEQ ID NO: 11493 - RNA, 21 nt, RNAi
uucugugaccaggaccugauu

SEQ ID NO: 11494 - RNA, 21 nt, RNAi
uuaagacacugguccuggacu

SEQ ID NO: 11495 - DNA, 21 bp, Homo sapiens
aatggtgacctcgatcctgag

SEQ ID NO: 11496 - RNA, 21 nt, RNAi
uggugaccucgauccugaguu

SEQ ID NO: 11497 - RNA, 21 nt, RNAi
uuaccacuggagcuaggacuc

SEQ ID NO: 11498 - DNA, 21 bp, Homo sapiens
aaagtcattcctcttccagct

SEQ ID NO: 11499 - RNA, 21 nt, RNAi
agucauuccucuuccagcuuu

SEQ ID NO: 11500 - RNA, 21 nt, RNAi
uuucaguaaggagaaggucga

SEQ ID NO: 11501 - DNA, 21 bp, Homo sapiens
aagtcattcctcttccagcta

SEQ ID NO: 11502 - RNA, 21 nt, RNAi
gucauuccucuuccagcuauu

SEQ ID NO: 11503 - RNA, 21 nt, RNAi
uucaguaaggagaaggucgau

SEQ ID NO: 11504 - DNA, 21 bp, Homo sapiens
aacctgctaataaacaggaat

SEQ ID NO: 11505 - RNA, 21 nt, RNAi
ccugcuaauaaacaggaauuu

SEQ ID NO: 11506 - RNA, 21 nt, RNAi
uuggacgauuauuuguccuua

SEQ ID NO: 11507 - DNA, 21 bp, Homo sapiens
aagctgtactccacgtccatc

SEQ ID NO: 11508 - RNA, 21 nt, RNAi
gcuguacuccacguccaucuu

SEQ ID NO: 11509 - RNA, 21 nt, RNAi
uucgacaugaggugcagguag

SEQ ID NO: 11510 - DNA, 21 bp, Homo sapiens
aatgatgtcgatgaccagttg

SEQ ID NO: 11511 - RNA, 21 nt, RNAi
ugaugucgaugaccaguuguu

SEQ ID NO: 11512 - RNA, 21 nt, RNAi
uuacuacagcuacuggucaac

SEQ ID NO: 11513 - DNA, 21 bp, Homo sapiens
aagaggatcttccgactgctg

SEQ ID NO: 11514 - RNA, 21 nt, RNAi
gaggaucuuccgacugcuguu

SEQ ID NO: 11515 - RNA, 21 nt, RNAi
uucuccuagaaggcugacgac

SEQ ID NO: 11516 - DNA, 21 bp, Homo sapiens
cagaaatacgagaaactggaa

SEQ ID NO: 11517 - RNA, 21 nt, RNAi
gaaauacgagaaacuggaauu

SEQ ID NO: 11518 - RNA, 21 nt, RNAi
uucuuuaugcucuuugaccuu

SEQ ID NO: 11519 - DNA, 21 bp, Homo sapiens
cacctacggaactgtgttcaa

SEQ ID NO: 11520 - RNA, 21 nt, RNAi
ccuacggaacuguguucaauu

SEQ ID NO: 11521 - RNA, 21 nt, RNAi
uuggaugccuugacacaaguu

SEQ ID NO: 11522 - DNA, 21 bp, Homo sapiens
catgagatcgtggctctgaaa

SEQ ID NO: 11523 - RNA, 21 nt, RNAi
ugagaucguggcucugaaauu

SEQ ID NO: 11524 - RNA, 21 nt, RNAi
uuacucuagcaccgagacuuu

SEQ ID NO: 11525 - DNA, 21 bp, Homo sapiens
caaggagctgaagcacaagaa

SEQ ID NO: 11526 - RNA, 21 nt, RNAi
aggagcugaagcacaagaauu

SEQ ID NO: 11527 - RNA, 21 nt, RNAi
uuuccucgacuucguguucuu

SEQ ID NO: 11528 - DNA, 21 bp, Homo sapiens
cacaagaacatcgtcaggctt

SEQ ID NO: 11529 - RNA, 21 nt, RNAi
caagaacaucgucaggcuuuu

SEQ ID NO: 11530 - RNA, 21 nt, RNAi
uuguucuuguagcaguccgaa

SEQ ID NO: 11531 - DNA, 21 bp, Homo sapiens
caagaacatcgtcaggcttca

SEQ ID NO: 11532 - RNA, 21 nt, RNAi
agaacaucgucaggcuucauu

SEQ ID NO: 11533 - RNA, 21 nt, RNAi
uuucuuguagcaguccgaagu

SEQ ID NO: 11534 - DNA, 21 bp, Homo sapiens
catcgtcaggcttcatgacgt

SEQ ID NO: 11535 - RNA, 21 nt, RNAi
ucgucaggcuucaugacguuu

SEQ ID NO: 11536 - RNA, 21 nt, RNAi
uuagcaguccgaaguacugca

SEQ ID NO: 11537 - DNA, 21 bp, Homo sapiens
caggcttcatgacgtcctgca

SEQ ID NO: 11538 - RNA, 21 nt, RNAi
ggcuucaugacguccugcauu

SEQ ID NO: 11539 - RNA, 21 nt, RNAi
uuccgaaguacugcaggacgu

SEQ ID NO: 11540 - DNA, 21 bp, Homo sapiens
catgacgtcctgcacagcgac

SEQ ID NO: 11541 - RNA, 21 nt, RNAi
ugacguccugcacagcgacuu

SEQ ID NO: 11542 - RNA, 21 nt, RNAi
uuacugcaggacgugucgcug

SEQ ID NO: 11543 - DNA, 21 bp, Homo sapiens
cacagcgacaagaagctgact

SEQ ID NO: 11544 - RNA, 21 nt, RNAi
cagcgacaagaagcugacuuu

SEQ ID NO: 11545 - RNA, 21 nt, RNAi
uugucgcuguucuucgacuga

SEQ ID NO: 11546 - DNA, 21 bp, Homo sapiens
cagcgacaagaagctgacttt

SEQ ID NO: 11547 - RNA, 21 nt, RNAi
gcgacaagaagcugacuuuuu

SEQ ID NO: 11548 - RNA, 21 nt, RNAi
uucgcuguucuucgacugaaa

SEQ ID NO: 11549 - DNA, 21 bp, Homo sapiens
cagttgcaatggtgacctcga

SEQ ID NO: 11550 - RNA, 21 nt, RNAi
guugcaauggugaccucgauu

SEQ ID NO: 11551 - RNA, 21 nt, RNAi
uucaacguuaccacuggagcu

SEQ ID NO: 11552 - DNA, 21 bp, Homo sapiens
caatggtgacctcgatcctga

SEQ ID NO: 11553 - RNA, 21 nt, RNAi
auggugaccucgauccugauu

SEQ ID NO: 11554 - RNA, 21 nt, RNAi
uuuaccacuggagcuaggacu

SEQ ID NO: 11555 - DNA, 21 bp, Homo sapiens
cattcctcttccagctactaa

SEQ ID NO: 11556 - RNA, 21 nt, RNAi
uuccucuuccagcuacuaauu

SEQ ID NO: 11557 - RNA, 21 nt, RNAi
uuaaggagaaggucgaugauu

SEQ ID NO: 11558 - DNA, 21 bp, Homo sapiens
catagccgcaatgtgctacac

SEQ ID NO: 11559 - RNA, 21 nt, RNAi
uagccgcaaugugcuacacuu

SEQ ID NO: 11560 - RNA, 21 nt, RNAi
uuaucggcguuacacgaugug

SEQ ID NO: 11561 - DNA, 21 bp, Homo sapiens
cagaacctgctaataaacagg

SEQ ID NO: 11562 - RNA, 21 nt, RNAi
gaaccugcuaauaaacagguu

SEQ ID NO: 11563 - RNA, 21 nt, RNAi
uucuuggacgauuauuugucc

SEQ ID NO: 11564 - DNA, 21 bp, Homo sapiens
cagctgaggtggtcacactgt

SEQ ID NO: 11565 - RNA, 21 nt, RNAi
gcugagguggucacacuguuu

SEQ ID NO: 11566 - RNA, 21 nt, RNAi
uucgacuccaccagugugaca

SEQ ID NO: 11567 - DNA, 21 bp, Homo sapiens
caagctgtactccacgtccat

SEQ ID NO: 11568 - RNA, 21 nt, RNAi
agcuguacuccacguccauuu

SEQ ID NO: 11569 - RNA, 21 nt, RNAi
uuucgacaugaggugcaggua

SEQ ID NO: 11570 - DNA, 21 bp, Homo sapiens
cacgtccatcgacatgtggtc

SEQ ID NO: 11571 - RNA, 21 nt, RNAi
cguccaucgacauguggucuu

SEQ ID NO: 11572 - RNA, 21 nt, RNAi
uugcagguagcuguacaccag

SEQ ID NO: 11573 - DNA, 21 bp, Homo sapiens
catcgacatgtggtcagccgg

SEQ ID NO: 11574 - RNA, 21 nt, RNAi
ucgacauguggucagccgguu

SEQ ID NO: 11575 - RNA, 21 nt, RNAi
uuagcuguacaccagucggcc

SEQ ID NO: 11576 - DNA, 21 bp, Homo sapiens
catgtggtcagccggctgcat

SEQ ID NO: 11577 - RNA, 21 nt, RNAi
uguggucagccggcugcauuu

SEQ ID NO: 11578 - RNA, 21 nt, RNAi
uuacaccagucggccgacgua

SEQ ID NO: 11579 - DNA, 21 bp, Homo sapiens
cagccggctgcatctttgcag

SEQ ID NO: 11580 - RNA, 21 nt, RNAi
gccggcugcaucuuugcaguu

SEQ ID NO: 11581 - RNA, 21 nt, RNAi
uucggccgacguagaaacguc

SEQ ID NO: 11582 - DNA, 21 bp, Homo sapiens
catctttgcagagctggccaa

SEQ ID NO: 11583 - RNA, 21 nt, RNAi
ucuuugcagagcuggccaauu

SEQ ID NO: 11584 - RNA, 21 nt, RNAi
uuagaaacgucucgaccgguu

SEQ ID NO: 11585 - DNA, 21 bp, Homo sapiens
caatgatgtcgatgaccagtt

SEQ ID NO: 11586 - RNA, 21 nt, RNAi
augaugucgaugaccaguuuu

SEQ ID NO: 11587 - RNA, 21 nt, RNAi
uuuacuacagcuacuggucaa

SEQ ID NO: 11588 - DNA, 21 bp, Homo sapiens
cagttgaagaggatcttccga

SEQ ID NO: 11589 - RNA, 21 nt, RNAi
guugaagaggaucuuccgauu

SEQ ID NO: 11590 - RNA, 21 nt, RNAi
uucaacuucuccuagaaggcu

SEQ ID NO: 11591 - DNA, 21 bp, Homo sapiens
caagctgccagactataagcc

SEQ ID NO: 11592 - RNA, 21 nt, RNAi
agcugccagacuauaagccuu

SEQ ID NO: 11593 - RNA, 21 nt, RNAi
uuucgacggucugauauucgg

SEQ ID NO: 11594 - DNA, 21 bp, Homo sapiens
cagaaccttctgaagtgtaac

SEQ ID NO: 11595 - RNA, 21 nt, RNAi
gaaccuucugaaguguaacuu

SEQ ID NO: 11596 - RNA, 21 nt, RNAi
uucuuggaagacuucacauug

SEQ ID NO: 11597 - DNA, 21 bp, Homo sapiens
cagcgtatctcagcagaagag

SEQ ID NO: 11598 - RNA, 21 nt, RNAi
gcguaucucagcagaagaguu

SEQ ID NO: 11599 - RNA, 21 nt, RNAi
uucgcauagagucgucuucuc

SEQ ID NO: 11600 - DNA, 21 bp, Homo sapiens
gatgcagaaatacgagaaact

SEQ ID NO: 11601 - RNA, 21 nt, RNAi
ugcagaaauacgagaaacuuu

SEQ ID NO: 11602 - RNA, 21 nt, RNAi
uuacgucuuuaugcucuuuga

SEQ ID NO: 11603 - DNA, 21 bp, Homo sapiens
gaaggcacctacggaactgtg

SEQ ID NO: 11604 - RNA, 21 nt, RNAi
aggcaccuacggaacuguguu

SEQ ID NO: 11605 - RNA, 21 nt, RNAi
uuuccguggaugccuugacac

SEQ ID NO: 11606 - DNA, 21 bp, Homo sapiens
gagactcatgagatcgtggct

SEQ ID NO: 11607 - RNA, 21 nt, RNAi
gacucaugagaucguggcuuu

SEQ ID NO: 11608 - RNA, 21 nt, RNAi
uucugaguacucuagcaccga

SEQ ID NO: 11609 - DNA, 21 bp, Homo sapiens
gactcatgagatcgtggctct

SEQ ID NO: 11610 - RNA, 21 nt, RNAi
cucaugagaucguggcucuuu

SEQ ID NO: 11611 - RNA, 21 nt, RNAi
uugaguacucuagcaccgaga

SEQ ID NO: 11612 - DNA, 21 bp, Homo sapiens
gagatcgtggctctgaaacgg

SEQ ID NO: 11613 - RNA, 21 nt, RNAi
gaucguggcucugaaacgguu

SEQ ID NO: 11614 - RNA, 21 nt, RNAi
uucuagcaccgagacuuugcc

SEQ ID NO: 11615 - DNA, 21 bp, Homo sapiens
gaggctggatgacgatgatga

SEQ ID NO: 11616 - RNA, 21 nt, RNAi
ggcuggaugacgaugaugauu

SEQ ID NO: 11617 - RNA, 21 nt, RNAi
uuccgaccuacugcuacuacu

SEQ ID NO: 11618 - DNA, 21 bp, Homo sapiens
gagatctgcctactcaaggag

SEQ ID NO: 11619 - RNA, 21 nt, RNAi
gaucugccuacucaaggaguu

SEQ ID NO: 11620 - RNA, 21 nt, RNAi
uucuagacggaugaguuccuc

SEQ ID NO: 11621 - DNA, 21 bp, Homo sapiens
gatctgcctactcaaggagct

SEQ ID NO: 11622 - RNA, 21 nt, RNAi
ucugccuacucaaggagcuuu

SEQ ID NO: 11623 - RNA, 21 nt, RNAi
uuagacggaugaguuccucga

SEQ ID NO: 11624 - DNA, 21 bp, Homo sapiens
gagctgaagcacaagaacatc

SEQ ID NO: 11625 - RNA, 21 nt, RNAi
gcugaagcacaagaacaucuu

SEQ ID NO: 11626 - RNA, 21 nt, RNAi
uucgacuucguguucuuguag

SEQ ID NO: 11627 - DNA, 21 bp, Homo sapiens
gaagcacaagaacatcgtcag

SEQ ID NO: 11628 - RNA, 21 nt, RNAi
agcacaagaacaucgucaguu

SEQ ID NO: 11629 - RNA, 21 nt, RNAi
uuucguguucuuguagcaguc

SEQ ID NO: 11630 - DNA, 21 bp, Homo sapiens
gaacatcgtcaggcttcatga

SEQ ID NO: 11631 - RNA, 21 nt, RNAi
acaucgucaggcuucaugauu

SEQ ID NO: 11632 - RNA, 21 nt, RNAi
uuuguagcaguccgaaguacu

SEQ ID NO: 11633 - DNA, 21 bp, Homo sapiens
gacgtcctgcacagcgacaag

SEQ ID NO: 11634 - RNA, 21 nt, RNAi
cguccugcacagcgacaaguu

SEQ ID NO: 11635 - RNA, 21 nt, RNAi
uugcaggacgugucgcuguuc

SEQ ID NO: 11636 - DNA, 21 bp, Homo sapiens
gacaagaagctgactttggtt

SEQ ID NO: 11637 - RNA, 21 nt, RNAi
caagaagcugacuuugguuuu

SEQ ID NO: 11638 - RNA, 21 nt, RNAi
uuguucuucgacugaaaccaa

SEQ ID NO: 11639 - DNA, 21 bp, Homo sapiens
gaattctgtgaccaggacctg

SEQ ID NO: 11640 - RNA, 21 nt, RNAi
auucugugaccaggaccuguu

SEQ ID NO: 11641 - RNA, 21 nt, RNAi
uuuaagacacugguccuggac

SEQ ID NO: 11642 - DNA, 21 bp, Homo sapiens
gaccaggacctgaagaagtat

SEQ ID NO: 11643 - RNA, 21 nt, RNAi
ccaggaccugaagaaguauuu

SEQ ID NO: 11644 - RNA, 21 nt, RNAi
uugguccuggacuucuucaua

SEQ ID NO: 11645 - DNA, 21 bp, Homo sapiens
gacagttgcaatggtgacctc

SEQ ID NO: 11646 - RNA, 21 nt, RNAi
caguugcaauggugaccucuu

SEQ ID NO: 11647 - RNA, 21 nt, RNAi
uugucaacguuaccacuggag

SEQ ID NO: 11648 - DNA, 21 bp, Homo sapiens
gacctcgatcctgagattgta

SEQ ID NO: 11649 - RNA, 21 nt, RNAi
ccucgauccugagauuguauu

SEQ ID NO: 11650 - RNA, 21 nt, RNAi
uuggagcuaggacucuaacau

SEQ ID NO: 11651 - DNA, 21 bp, Homo sapiens
gatcctgagattgtaaagtca

SEQ ID NO: 11652 - RNA, 21 nt, RNAi
uccugagauuguaaagucauu

SEQ ID NO: 11653 - RNA, 21 nt, RNAi
uuaggacucuaacauuucagu

SEQ ID NO: 11654 - DNA, 21 bp, Homo sapiens
gagattgtaaagtcattcctc

SEQ ID NO: 11655 - RNA, 21 nt, RNAi
gauuguaaagucauuccucuu

SEQ ID NO: 11656 - RNA, 21 nt, RNAi
uucuaacauuucaguaaggag

SEQ ID NO: 11657 - DNA, 21 bp, Homo sapiens
gattgtaaagtcattcctctt

SEQ ID NO: 11658 - RNA, 21 nt, RNAi
uuguaaagucauuccucuuuu

SEQ ID NO: 11659 - RNA, 21 nt, RNAi
uuaacauuucaguaaggagaa

SEQ ID NO: 11660 - DNA, 21 bp, Homo sapiens
gattctgtcatagccgcaatg

SEQ ID NO: 11661 - RNA, 21 nt, RNAi
uucugucauagccgcaauguu

SEQ ID NO: 11662 - RNA, 21 nt, RNAi
uuaagacaguaucggcguuac

SEQ ID NO: 11663 - DNA, 21 bp, Homo sapiens
gaacctgctaataaacaggaa

SEQ ID NO: 11664 - RNA, 21 nt, RNAi
accugcuaauaaacaggaauu

SEQ ID NO: 11665 - RNA, 21 nt, RNAi
uuuggacgauuauuuguccuu

SEQ ID NO: 11666 - DNA, 21 bp, Homo sapiens
gaggtggtcacactgtggtac

SEQ ID NO: 11667 - RNA, 21 nt, RNAi
gguggucacacugugguacuu

SEQ ID NO: 11668 - RNA, 21 nt, RNAi
uuccaccagugugacaccaug

SEQ ID NO: 11669 - DNA, 21 bp, Homo sapiens
gatgtcgatgaccagttgaag

SEQ ID NO: 11670 - RNA, 21 nt, RNAi
ugucgaugaccaguugaaguu

SEQ ID NO: 11671 - RNA, 21 nt, RNAi
uuacagcuacuggucaacuuc

SEQ ID NO: 11672 - DNA, 21 bp, Homo sapiens
gatgaccagttgaagaggatc

SEQ ID NO: 11673 - RNA, 21 nt, RNAi
ugaccaguugaagaggaucuu

SEQ ID NO: 11674 - RNA, 21 nt, RNAi
uuacuggucaacuucuccuag

SEQ ID NO: 11675 - DNA, 21 bp, Homo sapiens
gaccagttgaagaggatcttc

SEQ ID NO: 11676 - RNA, 21 nt, RNAi
ccaguugaagaggaucuucuu

SEQ ID NO: 11677 - RNA, 21 nt, RNAi
uuggucaacuucuccuagaag

SEQ ID NO: 11678 - DNA, 21 bp, Homo sapiens
gaagaggatcttccgactgct

SEQ ID NO: 11679 - RNA, 21 nt, RNAi
agaggaucuuccgacugcuuu

SEQ ID NO: 11680 - RNA, 21 nt, RNAi
uuucuccuagaaggcugacga

SEQ ID NO: 11681 - DNA, 21 bp, Homo sapiens
gaccaagctgccagactataa

SEQ ID NO: 11682 - RNA, 21 nt, RNAi
ccaagcugccagacuauaauu

SEQ ID NO: 11683 - RNA, 21 nt, RNAi
uugguucgacggucugauauu

SEQ ID NO: 11684 - DNA, 21 bp, Homo sapiens
gatctgctgcagaaccttctg

SEQ ID NO: 11685 - RNA, 21 nt, RNAi
ucugcugcagaaccuucuguu

SEQ ID NO: 11686 - RNA, 21 nt, RNAi
uuagacgacgucuuggaagac

SEQ ID NO: 11687 - DNA, 21 bp, Homo sapiens
tacggaactgtgttcaaggcc

SEQ ID NO: 11688 - RNA, 21 nt, RNAi
cggaacuguguucaaggccuu

SEQ ID NO: 11689 - RNA, 21 nt, RNAi
uugccuugacacaaguuccgg

SEQ ID NO: 11690 - DNA, 21 bp, Homo sapiens
tactcaaggagctgaagcaca

SEQ ID NO: 11691 - RNA, 21 nt, RNAi
cucaaggagcugaagcacauu

SEQ ID NO: 11692 - RNA, 21 nt, RNAi
uugaguuccucgacuucgugu

SEQ ID NO: 11693 - DNA, 21 bp, Homo sapiens
taaagtcattcctcttccagc

SEQ ID NO: 11694 - RNA, 21 nt, RNAi
aagucauuccucuuccagcuu

SEQ ID NO: 11695 - RNA, 21 nt, RNAi
uuuucaguaaggagaaggucg

SEQ ID NO: 11696 - DNA, 21 bp, Homo sapiens
tagccgcaatgtgctacacag

SEQ ID NO: 11697 - RNA, 21 nt, RNAi
gccgcaaugugcuacacaguu

SEQ ID NO: 11698 - RNA, 21 nt, RNAi
uucggcguuacacgauguguc

SEQ ID NO: 11699 - DNA, 21 bp, Homo sapiens
tactcagctgaggtggtcaca

SEQ ID NO: 11700 - RNA, 21 nt, RNAi
cucagcugagguggucacauu

SEQ ID NO: 11701 - RNA, 21 nt, RNAi
uugagucgacuccaccagugu

SEQ ID NO: 11702 - DNA, 21 bp, Homo sapiens
tactccacgtccatcgacatg

SEQ ID NO: 11703 - RNA, 21 nt, RNAi
cuccacguccaucgacauguu

SEQ ID NO: 11704 - RNA, 21 nt, RNAi
uugaggugcagguagcuguac

SEQ ID NO: 11705 - DNA, 21 bp, Homo sapiens
tatgaccaagctgccagacta

SEQ ID NO: 11706 - RNA, 21 nt, RNAi
ugaccaagcugccagacuauu

SEQ ID NO: 11707 - RNA, 21 nt, RNAi
uuacugguucgacggucugau

SEQ ID NO: 11708 - DNA, 21 bp, Homo sapiens
tacttctccgacttctgtccg

SEQ ID NO: 11709 - RNA, 21 nt, RNAi
cuucuccgacuucuguccguu

SEQ ID NO: 11710 - RNA, 21 nt, RNAi
uugaagaggcugaagacaggc

SEQ ID NO: 11711 - DNA, 21 bp, Homo sapiens
aaggccacgctgtttgaggat

SEQ ID NO: 11712 - RNA, 21 nt, RNAi
ggccacgcuguuugaggauuu

SEQ ID NO: 11713 - RNA, 21 nt, RNAi
uuccggugcgacaaacuccua

SEQ ID NO: 11714 - DNA, 21 bp, Homo sapiens
aacagcaagaacgccaaggac

SEQ ID NO: 11715 - RNA, 21 nt, RNAi
cagcaagaacgccaaggacuu

SEQ ID NO: 11716 - RNA, 21 nt, RNAi
uugucguucuugcgguuccug

SEQ ID NO: 11717 - DNA, 21 bp, Homo sapiens
aagaacgccaaggacaagaac

SEQ ID NO: 11718 - RNA, 21 nt, RNAi
gaacgccaaggacaagaacuu

SEQ ID NO: 11719 - RNA, 21 nt, RNAi
uucuugcgguuccuguucuug

SEQ ID NO: 11720 - DNA, 21 bp, Homo sapiens
aacgccaaggacaagaacctg

SEQ ID NO: 11721 - RNA, 21 nt, RNAi
cgccaaggacaagaaccuguu

SEQ ID NO: 11722 - RNA, 21 nt, RNAi
uugcgguuccuguucuuggac

SEQ ID NO: 11723 - DNA, 21 bp, Homo sapiens
aaggacaagaacctgaagcgc

SEQ ID NO: 11724 - RNA, 21 nt, RNAi
ggacaagaaccugaagcgcuu

SEQ ID NO: 11725 - RNA, 21 nt, RNAi
uuccuguucuuggacuucgcg

SEQ ID NO: 11726 - DNA, 21 bp, Homo sapiens
aagaacctgaagcgccactcc

SEQ ID NO: 11727 - RNA, 21 nt, RNAi
gaaccugaagcgccacuccuu

SEQ ID NO: 11728 - RNA, 21 nt, RNAi
uucuuggacuucgcggugagg

SEQ ID NO: 11729 - DNA, 21 bp, Homo sapiens
aacctgaagcgccactccatc

SEQ ID NO: 11730 - RNA, 21 nt, RNAi
ccugaagcgccacuccaucuu

SEQ ID NO: 11731 - RNA, 21 nt, RNAi
uuggacuucgcggugagguag

SEQ ID NO: 11732 - DNA, 21 bp, Homo sapiens
aagcgccactccatcatctcc

SEQ ID NO: 11733 - RNA, 21 nt, RNAi
gcgccacuccaucaucuccuu

SEQ ID NO: 11734 - RNA, 21 nt, RNAi
uucgcggugagguaguagagg

SEQ ID NO: 11735 - DNA, 21 bp, Homo sapiens
aagagaatcgtggccgtgtcg

SEQ ID NO: 11736 - RNA, 21 nt, RNAi
gagaaucguggccgugucguu

SEQ ID NO: 11737 - RNA, 21 nt, RNAi
uucucuuagcaccggcacagc

SEQ ID NO: 11738 - DNA, 21 bp, Homo sapiens
aatcgtggccgtgtcggccaa

SEQ ID NO: 11739 - RNA, 21 nt, RNAi
ucguggccgugucggccaauu

SEQ ID NO: 11740 - RNA, 21 nt, RNAi
uuagcaccggcacagccgguu

SEQ ID NO: 11741 - DNA, 21 bp, Homo sapiens
aagaagaagaactccaagaag

SEQ ID NO: 11742 - RNA, 21 nt, RNAi
gaagaagaacuccaagaaguu

SEQ ID NO: 11743 - RNA, 21 nt, RNAi
uucuucuucuugagguucuuc

SEQ ID NO: 11744 - DNA, 21 bp, Homo sapiens
aagaagaactccaagaaggtg

SEQ ID NO: 11745 - RNA, 21 nt, RNAi
gaagaacuccaagaagguguu

SEQ ID NO: 11746 - RNA, 21 nt, RNAi
uucuucuugagguucuuccac

SEQ ID NO: 11747 - DNA, 21 bp, Homo sapiens
aagaactccaagaaggtgcag

SEQ ID NO: 11748 - RNA, 21 nt, RNAi
gaacuccaagaaggugcaguu

SEQ ID NO: 11749 - RNA, 21 nt, RNAi
uucuugagguucuuccacguc

SEQ ID NO: 11750 - DNA, 21 bp, Homo sapiens
aactccaagaaggtgcagcct

SEQ ID NO: 11751 - RNA, 21 nt, RNAi
cuccaagaaggugcagccuuu

SEQ ID NO: 11752 - RNA, 21 nt, RNAi
uugagguucuuccacgucgga

SEQ ID NO: 11753 - DNA, 21 bp, Homo sapiens
aagaaggtgcagcctaacagc

SEQ ID NO: 11754 - RNA, 21 nt, RNAi
gaaggugcagccuaacagcuu

SEQ ID NO: 11755 - RNA, 21 nt, RNAi
uucuuccacgucggauugucg

SEQ ID NO: 11756 - DNA, 21 bp, Homo sapiens
aaggtgcagcctaacagcagc

SEQ ID NO: 11757 - RNA, 21 nt, RNAi
ggugcagccuaacagcagcuu

SEQ ID NO: 11758 - RNA, 21 nt, RNAi
uuccacgucggauugucgucg

SEQ ID NO: 11759 - DNA, 21 bp, Homo sapiens
aacagcagctaccagaacaac

SEQ ID NO: 11760 - RNA, 21 nt, RNAi
cagcagcuaccagaacaacuu

SEQ ID NO: 11761 - RNA, 21 nt, RNAi
uugucgucgauggucuuguug

SEQ ID NO: 11762 - DNA, 21 bp, Homo sapiens
aacaacatcacgcacctcaac

SEQ ID NO: 11763 - RNA, 21 nt, RNAi
caacaucacgcaccucaacuu

SEQ ID NO: 11764 - RNA, 21 nt, RNAi
uuguuguagugcguggaguug

SEQ ID NO: 11765 - DNA, 21 bp, Homo sapiens
aacatcacgcacctcaacaat

SEQ ID NO: 11766 - RNA, 21 nt, RNAi
caucacgcaccucaacaauuu

SEQ ID NO: 11767 - RNA, 21 nt, RNAi
uuguagugcguggaguuguua

SEQ ID NO: 11768 - DNA, 21 bp, Homo sapiens
aacaatgagaacctgaagaag

SEQ ID NO: 11769 - RNA, 21 nt, RNAi
caaugagaaccugaagaaguu

SEQ ID NO: 11770 - RNA, 21 nt, RNAi
uuguuacucuuggacuucuuc

SEQ ID NO: 11771 - DNA, 21 bp, Homo sapiens
aatgagaacctgaagaagtcg

SEQ ID NO: 11772 - RNA, 21 nt, RNAi
ugagaaccugaagaagucguu

SEQ ID NO: 11773 - RNA, 21 nt, RNAi
uuacucuuggacuucuucagc

SEQ ID NO: 11774 - DNA, 21 bp, Homo sapiens
aacctgaagaagtcgctgtcg

SEQ ID NO: 11775 - RNA, 21 nt, RNAi
ccugaagaagucgcugucguu

SEQ ID NO: 11776 - RNA, 21 nt, RNAi
uuggacuucuucagcgacagc

SEQ ID NO: 11777 - DNA, 21 bp, Homo sapiens
aagaagtcgctgtcgtgcgcc

SEQ ID NO: 11778 - RNA, 21 nt, RNAi
gaagucgcugucgugcgccuu

SEQ ID NO: 11779 - RNA, 21 nt, RNAi
uucuucagcgacagcacgcgg

SEQ ID NO: 11780 - DNA, 21 bp, Homo sapiens
aagtcgctgtcgtgcgccaac

SEQ ID NO: 11781 - RNA, 21 nt, RNAi
gucgcugucgugcgccaacuu

SEQ ID NO: 11782 - RNA, 21 nt, RNAi
uucagcgacagcacgcgguug

SEQ ID NO: 11783 - DNA, 21 bp, Homo sapiens
aacgtggtcttcctctacatg

SEQ ID NO: 11784 - RNA, 21 nt, RNAi
cguggucuuccucuacauguu

SEQ ID NO: 11785 - RNA, 21 nt, RNAi
uugcaccagaaggagauguac

SEQ ID NO: 11786 - DNA, 21 bp, Homo sapiens
aacctcatgagctcaaagatg

SEQ ID NO: 11787 - RNA, 21 nt, RNAi
ccucaugagcucaaagauguu

SEQ ID NO: 11788 - RNA, 21 nt, RNAi
uuggaguacucgaguuucuac

SEQ ID NO: 11789 - DNA, 21 bp, Homo sapiens
aaagatgctgcagataaatgc

SEQ ID NO: 11790 - RNA, 21 nt, RNAi
agaugcugcagauaaaugcuu

SEQ ID NO: 11791 - RNA, 21 nt, RNAi
uuucuacgacgucuauuuacg

SEQ ID NO: 11792 - DNA, 21 bp, Homo sapiens
aagatgctgcagataaatgcc

SEQ ID NO: 11793 - RNA, 21 nt, RNAi
gaugcugcagauaaaugccuu

SEQ ID NO: 11794 - RNA, 21 nt, RNAi
uucuacgacgucuauuuacgg

SEQ ID NO: 11795 - DNA, 21 bp, Homo sapiens
aagaacgagagcggccaggag

SEQ ID NO: 11796 - RNA, 21 nt, RNAi
gaacgagagcggccaggaguu

SEQ ID NO: 11797 - RNA, 21 nt, RNAi
uucuugcucucgccgguccuc

SEQ ID NO: 11798 - DNA, 21 bp, Homo sapiens
aagaagcggctcctcctaggc

SEQ ID NO: 11799 - RNA, 21 nt, RNAi
gaagcggcuccuccuaggcuu

SEQ ID NO: 11800 - RNA, 21 nt, RNAi
uucuucgccgaggaggauccg

SEQ ID NO: 11801 - DNA, 21 bp, Homo sapiens
cacgctgtttgaggatggcgc

SEQ ID NO: 11802 - RNA, 21 nt, RNAi
cgcuguuugaggauggcgcuu

SEQ ID NO: 11803 - RNA, 21 nt, RNAi
uugcgacaaacuccuaccgcg

SEQ ID NO: 11804 - DNA, 21 bp, Homo sapiens
cactatacggccgtacagaac

SEQ ID NO: 11805 - RNA, 21 nt, RNAi
cuauacggccguacagaacuu

SEQ ID NO: 11806 - RNA, 21 nt, RNAi
uugauaugccggcaugucuug

SEQ ID NO: 11807 - DNA, 21 bp, Homo sapiens
cagaacagcaagaacgccaag

SEQ ID NO: 11808 - RNA, 21 nt, RNAi
gaacagcaagaacgccaaguu

SEQ ID NO: 11809 - RNA, 21 nt, RNAi
uucuugucguucuugcgguuc

SEQ ID NO: 11810 - DNA, 21 bp, Homo sapiens
cagcaagaacgccaaggacaa

SEQ ID NO: 11811 - RNA, 21 nt, RNAi
gcaagaacgccaaggacaauu

SEQ ID NO: 11812 - RNA, 21 nt, RNAi
uucguucuugcgguuccuguu

SEQ ID NO: 11813 - DNA, 21 bp, Homo sapiens
caagaacgccaaggacaagaa

SEQ ID NO: 11814 - RNA, 21 nt, RNAi
agaacgccaaggacaagaauu

SEQ ID NO: 11815 - RNA, 21 nt, RNAi
uuucuugcgguuccuguucuu

SEQ ID NO: 11816 - DNA, 21 bp, Homo sapiens
caaggacaagaacctgaagcg

SEQ ID NO: 11817 - RNA, 21 nt, RNAi
aggacaagaaccugaagcguu

SEQ ID NO: 11818 - RNA, 21 nt, RNAi
uuuccuguucuuggacuucgc

SEQ ID NO: 11819 - DNA, 21 bp, Homo sapiens
caagaacctgaagcgccactc

SEQ ID NO: 11820 - RNA, 21 nt, RNAi
agaaccugaagcgccacucuu

SEQ ID NO: 11821 - RNA, 21 nt, RNAi
uuucuuggacuucgcggugag

SEQ ID NO: 11822 - DNA, 21 bp, Homo sapiens
cactccatcatctccgtgctg

SEQ ID NO: 11823 - RNA, 21 nt, RNAi
cuccaucaucuccgugcuguu

SEQ ID NO: 11824 - RNA, 21 nt, RNAi
uugagguaguagaggcacgac

SEQ ID NO: 11825 - DNA, 21 bp, Homo sapiens
catcatctccgtgctgccttg

SEQ ID NO: 11826 - RNA, 21 nt, RNAi
ucaucuccgugcugccuuguu

SEQ ID NO: 11827 - RNA, 21 nt, RNAi
uuaguagaggcacgacggaac

SEQ ID NO: 11828 - DNA, 21 bp, Homo sapiens
catctccgtgctgccttggaa

SEQ ID NO: 11829 - RNA, 21 nt, RNAi
ucuccgugcugccuuggaauu

SEQ ID NO: 11830 - RNA, 21 nt, RNAi
uuagaggcacgacggaaccuu

SEQ ID NO: 11831 - DNA, 21 bp, Homo sapiens
caagaagaagaactccaagaa

SEQ ID NO: 11832 - RNA, 21 nt, RNAi
agaagaagaacuccaagaauu

SEQ ID NO: 11833 - RNA, 21 nt, RNAi
uuucuucuucuugagguucuu

SEQ ID NO: 11834 - DNA, 21 bp, Homo sapiens
caagaaggtgcagcctaacag

SEQ ID NO: 11835 - RNA, 21 nt, RNAi
agaaggugcagccuaacaguu

SEQ ID NO: 11836 - RNA, 21 nt, RNAi
uuucuuccacgucggauuguc

SEQ ID NO: 11837 - DNA, 21 bp, Homo sapiens
cagcctaacagcagctaccag

SEQ ID NO: 11838 - RNA, 21 nt, RNAi
gccuaacagcagcuaccaguu

SEQ ID NO: 11839 - RNA, 21 nt, RNAi
uucggauugucgucgaugguc

SEQ ID NO: 11840 - DNA, 21 bp, Homo sapiens
cagcagctaccagaacaacat

SEQ ID NO: 11841 - RNA, 21 nt, RNAi
gcagcuaccagaacaacauuu

SEQ ID NO: 11842 - RNA, 21 nt, RNAi
uucgucgauggucuuguugua

SEQ ID NO: 11843 - DNA, 21 bp, Homo sapiens
cagctaccagaacaacatcac

SEQ ID NO: 11844 - RNA, 21 nt, RNAi
gcuaccagaacaacaucacuu

SEQ ID NO: 11845 - RNA, 21 nt, RNAi
uucgauggucuuguuguagug

SEQ ID NO: 11846 - DNA, 21 bp, Homo sapiens
cagaacaacatcacgcacctc

SEQ ID NO: 11847 - RNA, 21 nt, RNAi
gaacaacaucacgcaccucuu

SEQ ID NO: 11848 - RNA, 21 nt, RNAi
uucuuguuguagugcguggag

SEQ ID NO: 11849 - DNA, 21 bp, Homo sapiens
caacatcacgcacctcaacaa

SEQ ID NO: 11850 - RNA, 21 nt, RNAi
acaucacgcaccucaacaauu

SEQ ID NO: 11851 - RNA, 21 nt, RNAi
uuuguagugcguggaguuguu

SEQ ID NO: 11852 - DNA, 21 bp, Homo sapiens
catcacgcacctcaacaatga

SEQ ID NO: 11853 - RNA, 21 nt, RNAi
ucacgcaccucaacaaugauu

SEQ ID NO: 11854 - RNA, 21 nt, RNAi
uuagugcguggaguuguuacu

SEQ ID NO: 11855 - DNA, 21 bp, Homo sapiens
cacgcacctcaacaatgagaa

SEQ ID NO: 11856 - RNA, 21 nt, RNAi
cgcaccucaacaaugagaauu

SEQ ID NO: 11857 - RNA, 21 nt, RNAi
uugcguggaguuguuacucuu

SEQ ID NO: 11858 - DNA, 21 bp, Homo sapiens
cacctcaacaatgagaacctg

SEQ ID NO: 11859 - RNA, 21 nt, RNAi
ccucaacaaugagaaccuguu

SEQ ID NO: 11860 - RNA, 21 nt, RNAi
uuggaguuguuacucuuggac

SEQ ID NO: 11861 - DNA, 21 bp, Homo sapiens
caacaatgagaacctgaagaa

SEQ ID NO: 11862 - RNA, 21 nt, RNAi
acaaugagaaccugaagaauu

SEQ ID NO: 11863 - RNA, 21 nt, RNAi
uuuguuacucuuggacuucuu

SEQ ID NO: 11864 - DNA, 21 bp, Homo sapiens
caatgagaacctgaagaagtc

SEQ ID NO: 11865 - RNA, 21 nt, RNAi
augagaaccugaagaagucuu

SEQ ID NO: 11866 - RNA, 21 nt, RNAi
uuuacucuuggacuucuucag

SEQ ID NO: 11867 - DNA, 21 bp, Homo sapiens
caccagtgagctgcttcgctg

SEQ ID NO: 11868 - RNA, 21 nt, RNAi
ccagugagcugcuucgcuguu

SEQ ID NO: 11869 - RNA, 21 nt, RNAi
uuggucacucgacgaagcgac

SEQ ID NO: 11870 - DNA, 21 bp, Homo sapiens
cagtgagctgcttcgctgcct

SEQ ID NO: 11871 - RNA, 21 nt, RNAi
gugagcugcuucgcugccuuu

SEQ ID NO: 11872 - RNA, 21 nt, RNAi
uucacucgacgaagcgacgga

SEQ ID NO: 11873 - DNA, 21 bp, Homo sapiens
caacgtggtcttcctctacat

SEQ ID NO: 11874 - RNA, 21 nt, RNAi
acguggucuuccucuacauuu

SEQ ID NO: 11875 - RNA, 21 nt, RNAi
uuugcaccagaaggagaugua

SEQ ID NO: 11876 - DNA, 21 bp, Homo sapiens
catgcctgtacctctcctact

SEQ ID NO: 11877 - RNA, 21 nt, RNAi
ugccuguaccucuccuacuuu

SEQ ID NO: 11878 - RNA, 21 nt, RNAi
uuacggacauggagaggauga

SEQ ID NO: 11879 - DNA, 21 bp, Homo sapiens
catcaacctcatgagctcaaa

SEQ ID NO: 11880 - RNA, 21 nt, RNAi
ucaaccucaugagcucaaauu

SEQ ID NO: 11881 - RNA, 21 nt, RNAi
uuaguuggaguacucgaguuu

SEQ ID NO: 11882 - DNA, 21 bp, Homo sapiens
caacctcatgagctcaaagat

SEQ ID NO: 11883 - RNA, 21 nt, RNAi
accucaugagcucaaagauuu

SEQ ID NO: 11884 - RNA, 21 nt, RNAi
uuuggaguacucgaguuucua

SEQ ID NO: 11885 - DNA, 21 bp, Homo sapiens
catgagctcaaagatgctgca

SEQ ID NO: 11886 - RNA, 21 nt, RNAi
ugagcucaaagaugcugcauu

SEQ ID NO: 11887 - RNA, 21 nt, RNAi
uuacucgaguuucuacgacgu

SEQ ID NO: 11888 - DNA, 21 bp, Homo sapiens
caaagatgctgcagataaatg

SEQ ID NO: 11889 - RNA, 21 nt, RNAi
aagaugcugcagauaaauguu

SEQ ID NO: 11890 - RNA, 21 nt, RNAi
uuuucuacgacgucuauuuac

SEQ ID NO: 11891 - DNA, 21 bp, Homo sapiens
cacactacttcacacaggtct

SEQ ID NO: 11892 - RNA, 21 nt, RNAi
cacuacuucacacaggucuuu

SEQ ID NO: 11893 - RNA, 21 nt, RNAi
uugugaugaaguguguccaga

SEQ ID NO: 11894 - DNA, 21 bp, Homo sapiens
cactacttcacacaggtcttc

SEQ ID NO: 11895 - RNA, 21 nt, RNAi
cuacuucacacaggucuucuu

SEQ ID NO: 11896 - RNA, 21 nt, RNAi
uugaugaaguguguccagaag

SEQ ID NO: 11897 - DNA, 21 bp, Homo sapiens
cacacaggtcttctccgacct

SEQ ID NO: 11898 - RNA, 21 nt, RNAi
cacaggucuucuccgaccuuu

SEQ ID NO: 11899 - RNA, 21 nt, RNAi
uuguguccagaagaggcugga

SEQ ID NO: 11900 - DNA, 21 bp, Homo sapiens
cacaggtcttctccgacctga

SEQ ID NO: 11901 - RNA, 21 nt, RNAi
caggucuucuccgaccugauu

SEQ ID NO: 11902 - RNA, 21 nt, RNAi
uuguccagaagaggcuggacu

SEQ ID NO: 11903 - DNA, 21 bp, Homo sapiens
caggtcttctccgacctgaag

SEQ ID NO: 11904 - RNA, 21 nt, RNAi
ggucuucuccgaccugaaguu

SEQ ID NO: 11905 - RNA, 21 nt, RNAi
uuccagaagaggcuggacuuc

SEQ ID NO: 11906 - DNA, 21 bp, Homo sapiens
caggaggacaagaagcggctc

SEQ ID NO: 11907 - RNA, 21 nt, RNAi
ggaggacaagaagcggcucuu

SEQ ID NO: 11908 - RNA, 21 nt, RNAi
uuccuccuguucuucgccgag

SEQ ID NO: 11909 - DNA, 21 bp, Homo sapiens
caagaagcggctcctcctagg

SEQ ID NO: 11910 - RNA, 21 nt, RNAi
agaagcggcuccuccuagguu

SEQ ID NO: 11911 - RNA, 21 nt, RNAi
uuucuucgccgaggaggaucc

SEQ ID NO: 11912 - DNA, 21 bp, Homo sapiens
cactgtagcctgcgtcatggc

SEQ ID NO: 11913 - RNA, 21 nt, RNAi
cuguagccugcgucauggcuu

SEQ ID NO: 11914 - RNA, 21 nt, RNAi
uugacaucggacgcaguaccg

SEQ ID NO: 11915 - DNA, 21 bp, Homo sapiens
catggctcaaggattcaatgc

SEQ ID NO: 11916 - RNA, 21 nt, RNAi
uggcucaaggauucaaugcuu

SEQ ID NO: 11917 - RNA, 21 nt, RNAi
uuaccgaguuccuaaguuacg

SEQ ID NO: 11918 - DNA, 21 bp, Homo sapiens
gaaggccacgctgtttgagga

SEQ ID NO: 11919 - RNA, 21 nt, RNAi
aggccacgcuguuugaggauu

SEQ ID NO: 11920 - RNA, 21 nt, RNAi
uuuccggugcgacaaacuccu

SEQ ID NO: 11921 - DNA, 21 bp, Homo sapiens
gaacagcaagaacgccaagga

SEQ ID NO: 11922 - RNA, 21 nt, RNAi
acagcaagaacgccaaggauu

SEQ ID NO: 11923 - RNA, 21 nt, RNAi
uuugucguucuugcgguuccu

SEQ ID NO: 11924 - DNA, 21 bp, Homo sapiens
gaacgccaaggacaagaacct

SEQ ID NO: 11925 - RNA, 21 nt, RNAi
acgccaaggacaagaaccuuu

SEQ ID NO: 11926 - RNA, 21 nt, RNAi
uuugcgguuccuguucuugga

SEQ ID NO: 11927 - DNA, 21 bp, Homo sapiens
gacaagaacctgaagcgccac

SEQ ID NO: 11928 - RNA, 21 nt, RNAi
caagaaccugaagcgccacuu

SEQ ID NO: 11929 - RNA, 21 nt, RNAi
uuguucuuggacuucgcggug

SEQ ID NO: 11930 - DNA, 21 bp, Homo sapiens
gaacctgaagcgccactccat

SEQ ID NO: 11931 - RNA, 21 nt, RNAi
accugaagcgccacuccauuu

SEQ ID NO: 11932 - RNA, 21 nt, RNAi
uuuggacuucgcggugaggua

SEQ ID NO: 11933 - DNA, 21 bp, Homo sapiens
gaagcgccactccatcatctc

SEQ ID NO: 11934 - RNA, 21 nt, RNAi
agcgccacuccaucaucucuu

SEQ ID NO: 11935 - RNA, 21 nt, RNAi
uuucgcggugagguaguagag

SEQ ID NO: 11936 - DNA, 21 bp, Homo sapiens
gaagagaatcgtggccgtgtc

SEQ ID NO: 11937 - RNA, 21 nt, RNAi
agagaaucguggccgugucuu

SEQ ID NO: 11938 - RNA, 21 nt, RNAi
uuucucuuagcaccggcacag

SEQ ID NO: 11939 - DNA, 21 bp, Homo sapiens
gaagaagaactccaagaaggt

SEQ ID NO: 11940 - RNA, 21 nt, RNAi
agaagaacuccaagaagguuu

SEQ ID NO: 11941 - RNA, 21 nt, RNAi
uuucuucuugagguucuucca

SEQ ID NO: 11942 - DNA, 21 bp, Homo sapiens
gaagaactccaagaaggtgca

SEQ ID NO: 11943 - RNA, 21 nt, RNAi
agaacuccaagaaggugcauu

SEQ ID NO: 11944 - RNA, 21 nt, RNAi
uuucuugagguucuuccacgu

SEQ ID NO: 11945 - DNA, 21 bp, Homo sapiens
gaactccaagaaggtgcagcc

SEQ ID NO: 11946 - RNA, 21 nt, RNAi
acuccaagaaggugcagccuu

SEQ ID NO: 11947 - RNA, 21 nt, RNAi
uuugagguucuuccacgucgg

SEQ ID NO: 11948 - DNA, 21 bp, Homo sapiens
gaaggtgcagcctaacagcag

SEQ ID NO: 11949 - RNA, 21 nt, RNAi
aggugcagccuaacagcaguu

SEQ ID NO: 11950 - RNA, 21 nt, RNAi
uuuccacgucggauugucguc

SEQ ID NO: 11951 - DNA, 21 bp, Homo sapiens
gaacaacatcacgcacctcaa

SEQ ID NO: 11952 - RNA, 21 nt, RNAi
acaacaucacgcaccucaauu

SEQ ID NO: 11953 - RNA, 21 nt, RNAi
uuuguuguagugcguggaguu

SEQ ID NO: 11954 - DNA, 21 bp, Homo sapiens
gagaacctgaagaagtcgctg

SEQ ID NO: 11955 - RNA, 21 nt, RNAi
gaaccugaagaagucgcuguu

SEQ ID NO: 11956 - RNA, 21 nt, RNAi
uucuuggacuucuucagcgac

SEQ ID NO: 11957 - DNA, 21 bp, Homo sapiens
gaacctgaagaagtcgctgtc

SEQ ID NO: 11958 - RNA, 21 nt, RNAi
accugaagaagucgcugucuu

SEQ ID NO: 11959 - RNA, 21 nt, RNAi
uuuggacuucuucagcgacag

SEQ ID NO: 11960 - DNA, 21 bp, Homo sapiens
gaagaagtcgctgtcgtgcgc

SEQ ID NO: 11961 - RNA, 21 nt, RNAi
agaagucgcugucgugcgcuu

SEQ ID NO: 11962 - RNA, 21 nt, RNAi
uuucuucagcgacagcacgcg

SEQ ID NO: 11963 - DNA, 21 bp, Homo sapiens
gaagtcgctgtcgtgcgccaa

SEQ ID NO: 11964 - RNA, 21 nt, RNAi
agucgcugucgugcgccaauu

SEQ ID NO: 11965 - RNA, 21 nt, RNAi
uuucagcgacagcacgcgguu

SEQ ID NO: 11966 - DNA, 21 bp, Homo sapiens
gatgttatctcctccgaggtg

SEQ ID NO: 11967 - RNA, 21 nt, RNAi
uguuaucuccuccgagguguu

SEQ ID NO: 11968 - RNA, 21 nt, RNAi
uuacaauagaggaggcuccac

SEQ ID NO: 11969 - DNA, 21 bp, Homo sapiens
gacatgcctgtacctctccta

SEQ ID NO: 11970 - RNA, 21 nt, RNAi
caugccuguaccucuccuauu

SEQ ID NO: 11971 - RNA, 21 nt, RNAi
uuguacggacauggagaggau

SEQ ID NO: 11972 - DNA, 21 bp, Homo sapiens
gagagctgcaaggaggccttt

SEQ ID NO: 11973 - RNA, 21 nt, RNAi
gagcugcaaggaggccuuuuu

SEQ ID NO: 11974 - RNA, 21 nt, RNAi
uucucgacguuccuccggaaa

SEQ ID NO: 11975 - DNA, 21 bp, Homo sapiens
gaccgttgcctctctgtcatc

SEQ ID NO: 11976 - RNA, 21 nt, RNAi
ccguugccucucugucaucuu

SEQ ID NO: 11977 - RNA, 21 nt, RNAi
uuggcaacggagagacaguag

SEQ ID NO: 11978 - DNA, 21 bp, Homo sapiens
gagctcaaagatgctgcagat

SEQ ID NO: 11979 - RNA, 21 nt, RNAi
gcucaaagaugcugcagauuu

SEQ ID NO: 11980 - RNA, 21 nt, RNAi
uucgaguuucuacgacgucua

SEQ ID NO: 11981 - DNA, 21 bp, Homo sapiens
gatgctgcagataaatgccga

SEQ ID NO: 11982 - RNA, 21 nt, RNAi
ugcugcagauaaaugccgauu

SEQ ID NO: 11983 - RNA, 21 nt, RNAi
uuacgacgucuauuuacggcu

SEQ ID NO: 11984 - DNA, 21 bp, Homo sapiens
gacctgaagaacgagagcggc

SEQ ID NO: 11985 - RNA, 21 nt, RNAi
ccugaagaacgagagcggcuu

SEQ ID NO: 11986 - RNA, 21 nt, RNAi
uuggacuucuugcucucgccg

SEQ ID NO: 11987 - DNA, 21 bp, Homo sapiens
gaagaacgagagcggccagga

SEQ ID NO: 11988 - RNA, 21 nt, RNAi
agaacgagagcggccaggauu

SEQ ID NO: 11989 - RNA, 21 nt, RNAi
uuucuugcucucgccgguccu

SEQ ID NO: 11990 - DNA, 21 bp, Homo sapiens
gagcggccaggaggacaagaa

SEQ ID NO: 11991 - RNA, 21 nt, RNAi
gcggccaggaggacaagaauu

SEQ ID NO: 11992 - RNA, 21 nt, RNAi
uucgccgguccuccuguucuu

SEQ ID NO: 11993 - DNA, 21 bp, Homo sapiens
gaggacaagaagcggctcctc

SEQ ID NO: 11994 - RNA, 21 nt, RNAi
ggacaagaagcggcuccucuu

SEQ ID NO: 11995 - RNA, 21 nt, RNAi
uuccuguucuucgccgaggag

SEQ ID NO: 11996 - DNA, 21 bp, Homo sapiens
gacaagaagcggctcctccta

SEQ ID NO: 11997 - RNA, 21 nt, RNAi
caagaagcggcuccuccuauu

SEQ ID NO: 11998 - RNA, 21 nt, RNAi
uuguucuucgccgaggaggau

SEQ ID NO: 11999 - DNA, 21 bp, Homo sapiens
gatcggtgagcactgtagcct

SEQ ID NO: 12000 - RNA, 21 nt, RNAi
ucggugagcacuguagccuuu

SEQ ID NO: 12001 - RNA, 21 nt, RNAi
uuagccacucgugacaucgga

SEQ ID NO: 12002 - DNA, 21 bp, Homo sapiens
gagcactgtagcctgcgtcat

SEQ ID NO: 12003 - RNA, 21 nt, RNAi
gcacuguagccugcgucauuu

SEQ ID NO: 12004 - RNA, 21 nt, RNAi
uucgugacaucggacgcagua

SEQ ID NO: 12005 - DNA, 21 bp, Homo sapiens
taccggaaggccacgctgttt

SEQ ID NO: 12006 - RNA, 21 nt, RNAi
ccggaaggccacgcuguuuuu

SEQ ID NO: 12007 - RNA, 21 nt, RNAi
uuggccuuccggugcgacaaa

SEQ ID NO: 12008 - DNA, 21 bp, Homo sapiens
tatacggccgtacagaacagc

SEQ ID NO: 12009 - RNA, 21 nt, RNAi
uacggccguacagaacagcuu

SEQ ID NO: 12010 - RNA, 21 nt, RNAi
uuaugccggcaugucuugucg

SEQ ID NO: 12011 - DNA, 21 bp, Homo sapiens
tacggccgtacagaacagcaa

SEQ ID NO: 12012 - RNA, 21 nt, RNAi
cggccguacagaacagcaauu

SEQ ID NO: 12013 - RNA, 21 nt, RNAi
uugccggcaugucuugucguu

SEQ ID NO: 12014 - DNA, 21 bp, Homo sapiens
tacagaacagcaagaacgcca

SEQ ID NO: 12015 - RNA, 21 nt, RNAi
cagaacagcaagaacgccauu

SEQ ID NO: 12016 - RNA, 21 nt, RNAi
uugucuugucguucuugcggu

SEQ ID NO: 12017 - DNA, 21 bp, Homo sapiens
taacagcagctaccagaacaa

SEQ ID NO: 12018 - RNA, 21 nt, RNAi
acagcagcuaccagaacaauu

SEQ ID NO: 12019 - RNA, 21 nt, RNAi
uuugucgucgauggucuuguu

SEQ ID NO: 12020 - DNA, 21 bp, Homo sapiens
taccagaacaacatcacgcac

SEQ ID NO: 12021 - RNA, 21 nt, RNAi
ccagaacaacaucacgcacuu

SEQ ID NO: 12022 - RNA, 21 nt, RNAi
uuggucuuguuguagugcgug

SEQ ID NO: 12023 - DNA, 21 bp, Homo sapiens
taccgcctgaagcacctgtcc

SEQ ID NO: 12024 - RNA, 21 nt, RNAi
ccgccugaagcaccuguccuu

SEQ ID NO: 12025 - RNA, 21 nt, RNAi
uuggcggacuucguggacagg

SEQ ID NO: 12026 - DNA, 21 bp, Homo sapiens
tacctctcctactcctacatg

SEQ ID NO: 12027 - RNA, 21 nt, RNAi
ccucuccuacuccuacauguu

SEQ ID NO: 12028 - RNA, 21 nt, RNAi
uuggagaggaugaggauguac

SEQ ID NO: 12029 - DNA, 21 bp, Homo sapiens
tacttcacacaggtcttctcc

SEQ ID NO: 12030 - RNA, 21 nt, RNAi
cuucacacaggucuucuccuu

SEQ ID NO: 12031 - RNA, 21 nt, RNAi
uugaaguguguccagaagagg

SEQ ID NO: 12032 - DNA, 21 bp, Homo sapiens
taggcctggatcggtgagcac

SEQ ID NO: 12033 - RNA, 21 nt, RNAi
ggccuggaucggugagcacuu

SEQ ID NO: 12034 - RNA, 21 nt, RNAi
uuccggaccuagccacucgug

SEQ ID NO: 12035 - DNA, 21 bp, Homo sapiens
tagcctgcgtcatggctcaag

SEQ ID NO: 12036 - RNA, 21 nt, RNAi
gccugcgucauggcucaaguu

SEQ ID NO: 12037 - RNA, 21 nt, RNAi
uucggacgcaguaccgaguuc

SEQ ID NO: 12038 - DNA, 21 bp, Homo sapiens
caagaaggtgcagcctaacag

SEQ ID NO: 12039 - RNA, 21 nt, RNAi
agaaggugcagccuaacaguu

SEQ ID NO: 12040 - RNA, 21 nt, RNAi
uuucuuccacgucggauuguc

SEQ ID NO: 12041 - DNA, 21 bp, Homo sapiens
cagcagctaccagaacaacat

SEQ ID NO: 12042 - RNA, 21 nt, RNAi
gcagcuaccagaacaacauuu

SEQ ID NO: 12043 - RNA, 21 nt, RNAi
uucgucgauggucuuguugua

SEQ ID NO: 12044 - DNA, 21 bp, Homo sapiens
aaggtagctttaaattcgtgt

SEQ ID NO: 12045 - RNA, 21 nt, RNAi
gguagcuuuaaauucguguuu

SEQ ID NO: 12046 - RNA, 21 nt, RNAi
uuccaucgaaauuuaagcaca

SEQ ID NO: 12047 - DNA, 21 bp, Homo sapiens
aaagcgttatgagaagctgga

SEQ ID NO: 12048 - RNA, 21 nt, RNAi
agcguuaugagaagcuggauu

SEQ ID NO: 12049 - RNA, 21 nt, RNAi
uuucgcaauacucuucgaccu

SEQ ID NO: 12050 - DNA, 21 bp, Homo sapiens
aagcgttatgagaagctggac

SEQ ID NO: 12051 - RNA, 21 nt, RNAi
gcguuaugagaagcuggacuu

SEQ ID NO: 12052 - RNA, 21 nt, RNAi
uucgcaauacucuucgaccug

SEQ ID NO: 12053 - DNA, 21 bp, Homo sapiens
aaggccagagataagaatacc

SEQ ID NO: 12054 - RNA, 21 nt, RNAi
ggccagagauaagaauaccuu

SEQ ID NO: 12055 - RNA, 21 nt, RNAi
uuccggucucuauucuuaugg

SEQ ID NO: 12056 - DNA, 21 bp, Homo sapiens
aagaataccaaccaaattgtc

SEQ ID NO: 12057 - RNA, 21 nt, RNAi
gaauaccaaccaaauugucuu

SEQ ID NO: 12058 - RNA, 21 nt, RNAi
uucuuaugguugguuuaacag

SEQ ID NO: 12059 - DNA, 21 bp, Homo sapiens
aataccaaccaaattgtcgcc

SEQ ID NO: 12060 - RNA, 21 nt, RNAi
uaccaaccaaauugucgccuu

SEQ ID NO: 12061 - RNA, 21 nt, RNAi
uuaugguugguuuaacagcgg

SEQ ID NO: 12062 - DNA, 21 bp, Homo sapiens
aaccaaattgtcgccattaag

SEQ ID NO: 12063 - RNA, 21 nt, RNAi
ccaaauugucgccauuaaguu

SEQ ID NO: 12064 - RNA, 21 nt, RNAi
uugguuuaacagcgguaauuc

SEQ ID NO: 12065 - DNA, 21 bp, Homo sapiens
aatcaaacttggacatagatc

SEQ ID NO: 12066 - RNA, 21 nt, RNAi
ucaaacuuggacauagaucuu

SEQ ID NO: 12067 - RNA, 21 nt, RNAi
uuaguuugaaccuguaucuag

SEQ ID NO: 12068 - DNA, 21 bp, Homo sapiens
aaacttggacatagatcagaa

SEQ ID NO: 12069 - RNA, 21 nt, RNAi
acuuggacauagaucagaauu

SEQ ID NO: 12070 - RNA, 21 nt, RNAi
uuugaaccuguaucuagucuu

SEQ ID NO: 12071 - DNA, 21 bp, Homo sapiens
aacttggacatagatcagaag

SEQ ID NO: 12072 - RNA, 21 nt, RNAi
cuuggacauagaucagaaguu

SEQ ID NO: 12073 - RNA, 21 nt, RNAi
uugaaccuguaucuagucuuc

SEQ ID NO: 12074 - DNA, 21 bp, Homo sapiens
aagatggtataaatagaaccg

SEQ ID NO: 12075 - RNA, 21 nt, RNAi
gaugguauaaauagaaccguu

SEQ ID NO: 12076 - RNA, 21 nt, RNAi
uucuaccauauuuaucuuggc

SEQ ID NO: 12077 - DNA, 21 bp, Homo sapiens
aaatagaaccgccttaagaga

SEQ ID NO: 12078 - RNA, 21 nt, RNAi
auagaaccgccuuaagagauu

SEQ ID NO: 12079 - RNA, 21 nt, RNAi
uuuaucuuggcggaauucucu

SEQ ID NO: 12080 - DNA, 21 bp, Homo sapiens
aatagaaccgccttaagagag

SEQ ID NO: 12081 - RNA, 21 nt, RNAi
uagaaccgccuuaagagaguu

SEQ ID NO: 12082 - RNA, 21 nt, RNAi
uuaucuuggcggaauucucuc

SEQ ID NO: 12083 - DNA, 21 bp, Homo sapiens
aaccgccttaagagagataaa

SEQ ID NO: 12084 - RNA, 21 nt, RNAi
ccgccuuaagagagauaaauu

SEQ ID NO: 12085 - RNA, 21 nt, RNAi
uuggcggaauucucucuauuu

SEQ ID NO: 12086 - DNA, 21 bp, Homo sapiens
aattattacaggagctaagtc

SEQ ID NO: 12087 - RNA, 21 nt, RNAi
uuauuacaggagcuaagucuu

SEQ ID NO: 12088 - RNA, 21 nt, RNAi
uuaauaauguccucgauucag

SEQ ID NO: 12089 - DNA, 21 bp, Homo sapiens
aattggtctccttgatgcttt

SEQ ID NO: 12090 - RNA, 21 nt, RNAi
uuggucuccuugaugcuuuuu

SEQ ID NO: 12091 - RNA, 21 nt, RNAi
uuaaccagaggaacuacgaaa

SEQ ID NO: 12092 - DNA, 21 bp, Homo sapiens
aaaggataatagtcttgtgct

SEQ ID NO: 12093 - RNA, 21 nt, RNAi
aggauaauagucuugugcuuu

SEQ ID NO: 12094 - RNA, 21 nt, RNAi
uuuccuauuaucagaacacga

SEQ ID NO: 12095 - DNA, 21 bp, Homo sapiens
aaggataatagtcttgtgctg

SEQ ID NO: 12096 - RNA, 21 nt, RNAi
ggauaauagucuugugcuguu

SEQ ID NO: 12097 - RNA, 21 nt, RNAi
uuccuauuaucagaacacgac

SEQ ID NO: 12098 - DNA, 21 bp, Homo sapiens
aatagtcttgtgctgacacca

SEQ ID NO: 12099 - RNA, 21 nt, RNAi
uagucuugugcugacaccauu

SEQ ID NO: 12100 - RNA, 21 nt, RNAi
uuaucagaacacgacuguggu

SEQ ID NO: 12101 - DNA, 21 bp, Homo sapiens
aaagcctacatgttgatgact

SEQ ID NO: 12102 - RNA, 21 nt, RNAi
agccuacauguugaugacuuu

SEQ ID NO: 12103 - RNA, 21 nt, RNAi
uuucggauguacaacuacuga

SEQ ID NO: 12104 - DNA, 21 bp, Homo sapiens
aagcctacatgttgatgactc

SEQ ID NO: 12105 - RNA, 21 nt, RNAi
gccuacauguugaugacucuu

SEQ ID NO: 12106 - RNA, 21 nt, RNAi
uucggauguacaacuacugag

SEQ ID NO: 12107 - DNA, 21 bp, Homo sapiens
aaaccaaacaacttgttgcta

SEQ ID NO: 12108 - RNA, 21 nt, RNAi
accaaacaacuuguugcuauu

SEQ ID NO: 12109 - RNA, 21 nt, RNAi
uuugguuuguugaacaacgau

SEQ ID NO: 12110 - DNA, 21 bp, Homo sapiens
aaccaaacaacttgttgctag

SEQ ID NO: 12111 - RNA, 21 nt, RNAi
ccaaacaacuuguugcuaguu

SEQ ID NO: 12112 - RNA, 21 nt, RNAi
uugguuuguugaacaacgauc

SEQ ID NO: 12113 - DNA, 21 bp, Homo sapiens
aaacaacttgttgctagatga

SEQ ID NO: 12114 - RNA, 21 nt, RNAi
acaacuuguugcuagaugauu

SEQ ID NO: 12115 - RNA, 21 nt, RNAi
uuuguugaacaacgaucuacu

SEQ ID NO: 12116 - DNA, 21 bp, Homo sapiens
aacaacttgttgctagatgaa

SEQ ID NO: 12117 - RNA, 21 nt, RNAi
caacuuguugcuagaugaauu

SEQ ID NO: 12118 - RNA, 21 nt, RNAi
uuguugaacaacgaucuacuu

SEQ ID NO: 12119 - DNA, 21 bp, Homo sapiens
aatagagcttatacacatcag

SEQ ID NO: 12120 - RNA, 21 nt, RNAi
uagagcuuauacacaucaguu

SEQ ID NO: 12121 - RNA, 21 nt, RNAi
uuaucucgaauauguguaguc

SEQ ID NO: 12122 - DNA, 21 bp, Homo sapiens
aactgaggaacagtggccgga

SEQ ID NO: 12123 - RNA, 21 nt, RNAi
cugaggaacaguggccggauu

SEQ ID NO: 12124 - RNA, 21 nt, RNAi
uugacuccuugucaccggccu

SEQ ID NO: 12125 - DNA, 21 bp, Homo sapiens
aacagtggccggacatgtgta

SEQ ID NO: 12126 - RNA, 21 nt, RNAi
caguggccggacauguguauu

SEQ ID NO: 12127 - RNA, 21 nt, RNAi
uugucaccggccuguacacau

SEQ ID NO: 12128 - DNA, 21 bp, Homo sapiens
aatacctttgcatcacatctt

SEQ ID NO: 12129 - RNA, 21 nt, RNAi
uaccuuugcaucacaucuuuu

SEQ ID NO: 12130 - RNA, 21 nt, RNAi
uuauggaaacguaguguagaa

SEQ ID NO: 12131 - DNA, 21 bp, Homo sapiens
aatccatgtgctcgaattacg

SEQ ID NO: 12132 - RNA, 21 nt, RNAi
uccaugugcucgaauuacguu

SEQ ID NO: 12133 - RNA, 21 nt, RNAi
uuagguacacgagcuuaaugc

SEQ ID NO: 12134 - DNA, 21 bp, Homo sapiens
aattacggccacacaggcact

SEQ ID NO: 12135 - RNA, 21 nt, RNAi
uuacggccacacaggcacuuu

SEQ ID NO: 12136 - RNA, 21 nt, RNAi
uuaaugccgguguguccguga

SEQ ID NO: 12137 - DNA, 21 bp, Homo sapiens
aagtatttcagtaatcggcca

SEQ ID NO: 12138 - RNA, 21 nt, RNAi
guauuucaguaaucggccauu

SEQ ID NO: 12139 - RNA, 21 nt, RNAi
uucauaaagucauuagccggu

SEQ ID NO: 12140 - DNA, 21 bp, Homo sapiens
aacacctggatgtcagctgcc

SEQ ID NO: 12141 - RNA, 21 nt, RNAi
caccuggaugucagcugccuu

SEQ ID NO: 12142 - RNA, 21 nt, RNAi
uuguggaccuacagucgacgg

SEQ ID NO: 12143 - DNA, 21 bp, Homo sapiens
aagaccaaactgtccagtgga

SEQ ID NO: 12144 - RNA, 21 nt, RNAi
gaccaaacuguccaguggauu

SEQ ID NO: 12145 - RNA, 21 nt, RNAi
uucugguuugacaggucaccu

SEQ ID NO: 12146 - DNA, 21 bp, Homo sapiens
aaactgtccagtggaaacctt

SEQ ID NO: 12147 - RNA, 21 nt, RNAi
acuguccaguggaaaccuuuu

SEQ ID NO: 12148 - RNA, 21 nt, RNAi
uuugacaggucaccuuuggaa

SEQ ID NO: 12149 - DNA, 21 bp, Homo sapiens
aactgtccagtggaaacctta

SEQ ID NO: 12150 - RNA, 21 nt, RNAi
cuguccaguggaaaccuuauu

SEQ ID NO: 12151 - RNA, 21 nt, RNAi
uugacaggucaccuuuggaau

SEQ ID NO: 12152 - DNA, 21 bp, Homo sapiens
aaaccttaaaggagcaatcaa

SEQ ID NO: 12153 - RNA, 21 nt, RNAi
accuuaaaggagcaaucaauu

SEQ ID NO: 12154 - RNA, 21 nt, RNAi
uuuggaauuuccucguuaguu

SEQ ID NO: 12155 - DNA, 21 bp, Homo sapiens
aaccttaaaggagcaatcaaa

SEQ ID NO: 12156 - RNA, 21 nt, RNAi
ccuuaaaggagcaaucaaauu

SEQ ID NO: 12157 - RNA, 21 nt, RNAi
uuggaauuuccucguuaguuu

SEQ ID NO: 12158 - DNA, 21 bp, Homo sapiens
aaaggagcaatcaaatccagc

SEQ ID NO: 12159 - RNA, 21 nt, RNAi
aggagcaaucaaauccagcuu

SEQ ID NO: 12160 - RNA, 21 nt, RNAi
uuuccucguuaguuuaggucg

SEQ ID NO: 12161 - DNA, 21 bp, Homo sapiens
aaggagcaatcaaatccagct

SEQ ID NO: 12162 - RNA, 21 nt, RNAi
ggagcaaucaaauccagcuuu

SEQ ID NO: 12163 - RNA, 21 nt, RNAi
uuccucguuaguuuaggucga

SEQ ID NO: 12164 - DNA, 21 bp, Homo sapiens
aatcaaatccagctttggcaa

SEQ ID NO: 12165 - RNA, 21 nt, RNAi
ucaaauccagcuuuggcaauu

SEQ ID NO: 12166 - RNA, 21 nt, RNAi
uuaguuuaggucgaaaccguu

SEQ ID NO: 12167 - DNA, 21 bp, Homo sapiens
aaatccagctttggcaataaa

SEQ ID NO: 12168 - RNA, 21 nt, RNAi
auccagcuuuggcaauaaauu

SEQ ID NO: 12169 - RNA, 21 nt, RNAi
uuuaggucgaaaccguuauuu

SEQ ID NO: 12170 - DNA, 21 bp, Homo sapiens
aaagaacagaggccttagaac

SEQ ID NO: 12171 - RNA, 21 nt, RNAi
agaacagaggccuuagaacuu

SEQ ID NO: 12172 - RNA, 21 nt, RNAi
uuucuugucuccggaaucuug

SEQ ID NO: 12173 - DNA, 21 bp, Homo sapiens
aagaacagaggccttagaaca

SEQ ID NO: 12174 - RNA, 21 nt, RNAi
gaacagaggccuuagaacauu

SEQ ID NO: 12175 - RNA, 21 nt, RNAi
uucuugucuccggaaucuugu

SEQ ID NO: 12176 - DNA, 21 bp, Homo sapiens
aacagaggccttagaacaagg

SEQ ID NO: 12177 - RNA, 21 nt, RNAi
cagaggccuuagaacaagguu

SEQ ID NO: 12178 - RNA, 21 nt, RNAi
uugucuccggaaucuuguucc

SEQ ID NO: 12179 - DNA, 21 bp, Homo sapiens
aaagagaacactggacaacat

SEQ ID NO: 12180 - RNA, 21 nt, RNAi
agagaacacuggacaacauuu

SEQ ID NO: 12181 - RNA, 21 nt, RNAi
uuucucuugugaccuguugua

SEQ ID NO: 12182 - DNA, 21 bp, Homo sapiens
aagagaacactggacaacatt

SEQ ID NO: 12183 - RNA, 21 nt, RNAi
gagaacacuggacaacauuuu

SEQ ID NO: 12184 - RNA, 21 nt, RNAi
uucucuugugaccuguuguaa

SEQ ID NO: 12185 - DNA, 21 bp, Homo sapiens
aagtaaatgctgtagaagtga

SEQ ID NO: 12186 - RNA, 21 nt, RNAi
guaaaugcuguagaagugauu

SEQ ID NO: 12187 - RNA, 21 nt, RNAi
uucauuuacgacaucuucacu

SEQ ID NO: 12188 - DNA, 21 bp, Homo sapiens
aaatgctgtagaagtgagttt

SEQ ID NO: 12189 - RNA, 21 nt, RNAi
augcuguagaagugaguuuuu

SEQ ID NO: 12190 - RNA, 21 nt, RNAi
uuuacgacaucuucacucaaa

SEQ ID NO: 12191 - DNA, 21 bp, Homo sapiens
aatgctgtagaagtgagtttg

SEQ ID NO: 12192 - RNA, 21 nt, RNAi
ugcuguagaagugaguuuguu

SEQ ID NO: 12193 - RNA, 21 nt, RNAi
uuacgacaucuucacucaaac

SEQ ID NO: 12194 - DNA, 21 bp, Homo sapiens
caaagcgttatgagaagctgg

SEQ ID NO: 12195 - RNA, 21 nt, RNAi
aagcguuaugagaagcugguu

SEQ ID NO: 12196 - RNA, 21 nt, RNAi
uuuucgcaauacucuucgacc

SEQ ID NO: 12197 - DNA, 21 bp, Homo sapiens
cagtttgccaccgtttacaag

SEQ ID NO: 12198 - RNA, 21 nt, RNAi
guuugccaccguuuacaaguu

SEQ ID NO: 12199 - RNA, 21 nt, RNAi
uucaaacgguggcaaauguuc

SEQ ID NO: 12200 - DNA, 21 bp, Homo sapiens
caccgtttacaaggccagaga

SEQ ID NO: 12201 - RNA, 21 nt, RNAi
ccguuuacaaggccagagauu

SEQ ID NO: 12202 - RNA, 21 nt, RNAi
uuggcaaauguuccggucucu

SEQ ID NO: 12203 - DNA, 21 bp, Homo sapiens
caaggccagagataagaatac

SEQ ID NO: 12204 - RNA, 21 nt, RNAi
aggccagagauaagaauacuu

SEQ ID NO: 12205 - RNA, 21 nt, RNAi
uuuccggucucuauucuuaug

SEQ ID NO: 12206 - DNA, 21 bp, Homo sapiens
cagagataagaataccaacca

SEQ ID NO: 12207 - RNA, 21 nt, RNAi
gagauaagaauaccaaccauu

SEQ ID NO: 12208 - RNA, 21 nt, RNAi
uucucuauucuuaugguuggu

SEQ ID NO: 12209 - DNA, 21 bp, Homo sapiens
caaccaaattgtcgccattaa

SEQ ID NO: 12210 - RNA, 21 nt, RNAi
accaaauugucgccauuaauu

SEQ ID NO: 12211 - RNA, 21 nt, RNAi
uuugguuuaacagcgguaauu

SEQ ID NO: 12212 - DNA, 21 bp, Homo sapiens
caaattgtcgccattaagaaa

SEQ ID NO: 12213 - RNA, 21 nt, RNAi
aauugucgccauuaagaaauu

SEQ ID NO: 12214 - RNA, 21 nt, RNAi
uuuuaacagcgguaauucuuu

SEQ ID NO: 12215 - DNA, 21 bp, Homo sapiens
caaacttggacatagatcaga

SEQ ID NO: 12216 - RNA, 21 nt, RNAi
aacuuggacauagaucagauu

SEQ ID NO: 12217 - RNA, 21 nt, RNAi
uuuugaaccuguaucuagucu

SEQ ID NO: 12218 - DNA, 21 bp, Homo sapiens
catagatcagaagctaaagat

SEQ ID NO: 12219 - RNA, 21 nt, RNAi
uagaucagaagcuaaagauuu

SEQ ID NO: 12220 - RNA, 21 nt, RNAi
uuaucuagucuucgauuucua

SEQ ID NO: 12221 - DNA, 21 bp, Homo sapiens
cagaagctaaagatggtataa

SEQ ID NO: 12222 - RNA, 21 nt, RNAi
gaagcuaaagaugguauaauu

SEQ ID NO: 12223 - RNA, 21 nt, RNAi
uucuucgauuucuaccauauu

SEQ ID NO: 12224 - DNA, 21 bp, Homo sapiens
caggagctaagtcatccaaat

SEQ ID NO: 12225 - RNA, 21 nt, RNAi
ggagcuaagucauccaaauuu

SEQ ID NO: 12226 - RNA, 21 nt, RNAi
uuccucgauucaguagguuua

SEQ ID NO: 12227 - DNA, 21 bp, Homo sapiens
catccaaatataattggtctc

SEQ ID NO: 12228 - RNA, 21 nt, RNAi
uccaaauauaauuggucucuu

SEQ ID NO: 12229 - RNA, 21 nt, RNAi
uuagguuuauauuaaccagag

SEQ ID NO: 12230 - DNA, 21 bp, Homo sapiens
caaatataattggtctccttg

SEQ ID NO: 12231 - RNA, 21 nt, RNAi
aauauaauuggucuccuuguu

SEQ ID NO: 12232 - RNA, 21 nt, RNAi
uuuuauauuaaccagaggaac

SEQ ID NO: 12233 - DNA, 21 bp, Homo sapiens
caccatcacacatcaaagcct

SEQ ID NO: 12234 - RNA, 21 nt, RNAi
ccaucacacaucaaagccuuu

SEQ ID NO: 12235 - RNA, 21 nt, RNAi
uugguaguguguaguuucgga

SEQ ID NO: 12236 - DNA, 21 bp, Homo sapiens
catcacacatcaaagcctaca

SEQ ID NO: 12237 - RNA, 21 nt, RNAi
ucacacaucaaagccuacauu

SEQ ID NO: 12238 - RNA, 21 nt, RNAi
uuaguguguaguuucggaugu

SEQ ID NO: 12239 - DNA, 21 bp, Homo sapiens
cacacatcaaagcctacatgt

SEQ ID NO: 12240 - RNA, 21 nt, RNAi
cacaucaaagccuacauguuu

SEQ ID NO: 12241 - RNA, 21 nt, RNAi
uuguguaguuucggauguaca

SEQ ID NO: 12242 - DNA, 21 bp, Homo sapiens
cacatcaaagcctacatgttg

SEQ ID NO: 12243 - RNA, 21 nt, RNAi
caucaaagccuacauguuguu

SEQ ID NO: 12244 - RNA, 21 nt, RNAi
uuguaguuucggauguacaac

SEQ ID NO: 12245 - DNA, 21 bp, Homo sapiens
catcaaagcctacatgttgat

SEQ ID NO: 12246 - RNA, 21 nt, RNAi
ucaaagccuacauguugauuu

SEQ ID NO: 12247 - RNA, 21 nt, RNAi
uuaguuucggauguacaacua

SEQ ID NO: 12248 - DNA, 21 bp, Homo sapiens
caaagcctacatgttgatgac

SEQ ID NO: 12249 - RNA, 21 nt, RNAi
aagccuacauguugaugacuu

SEQ ID NO: 12250 - RNA, 21 nt, RNAi
uuuucggauguacaacuacug

SEQ ID NO: 12251 - DNA, 21 bp, Homo sapiens
catgttgatgactcttcaagg

SEQ ID NO: 12252 - RNA, 21 nt, RNAi
uguugaugacucuucaagguu

SEQ ID NO: 12253 - RNA, 21 nt, RNAi
uuacaacuacugagaaguucc

SEQ ID NO: 12254 - DNA, 21 bp, Homo sapiens
catcaacattggatcctacat

SEQ ID NO: 12255 - RNA, 21 nt, RNAi
ucaacauuggauccuacauuu

SEQ ID NO: 12256 - RNA, 21 nt, RNAi
uuaguuguaaccuaggaugua

SEQ ID NO: 12257 - DNA, 21 bp, Homo sapiens
caacattggatcctacatagg

SEQ ID NO: 12258 - RNA, 21 nt, RNAi
acauuggauccuacauagguu

SEQ ID NO: 12259 - RNA, 21 nt, RNAi
uuuguaaccuaggauguaucc

SEQ ID NO: 12260 - DNA, 21 bp, Homo sapiens
caaacaacttgttgctagatg

SEQ ID NO: 12261 - RNA, 21 nt, RNAi
aacaacuuguugcuagauguu

SEQ ID NO: 12262 - RNA, 21 nt, RNAi
uuuuguugaacaacgaucuac

SEQ ID NO: 12263 - DNA, 21 bp, Homo sapiens
caatagagcttatacacatca

SEQ ID NO: 12264 - RNA, 21 nt, RNAi
auagagcuuauacacaucauu

SEQ ID NO: 12265 - RNA, 21 nt, RNAi
uuuaucucgaauauguguagu

SEQ ID NO: 12266 - DNA, 21 bp, Homo sapiens
cacatcaggttgtaaccaggt

SEQ ID NO: 12267 - RNA, 21 nt, RNAi
caucagguuguaaccagguuu

SEQ ID NO: 12268 - RNA, 21 nt, RNAi
uuguaguccaacauuggucca

SEQ ID NO: 12269 - DNA, 21 bp, Homo sapiens
catcaggttgtaaccaggtgg

SEQ ID NO: 12270 - RNA, 21 nt, RNAi
ucagguuguaaccaggugguu

SEQ ID NO: 12271 - RNA, 21 nt, RNAi
uuaguccaacauugguccacc

SEQ ID NO: 12272 - DNA, 21 bp, Homo sapiens
caggttgtaaccaggtggtat

SEQ ID NO: 12273 - RNA, 21 nt, RNAi
gguuguaaccaggugguauuu

SEQ ID NO: 12274 - RNA, 21 nt, RNAi
uuccaacauugguccaccaua

SEQ ID NO: 12275 - DNA, 21 bp, Homo sapiens
caggagattcagaccttgatc

SEQ ID NO: 12276 - RNA, 21 nt, RNAi
ggagauucagaccuugaucuu

SEQ ID NO: 12277 - RNA, 21 nt, RNAi
uuccucuaagucuggaacuag

SEQ ID NO: 12278 - DNA, 21 bp, Homo sapiens
cagaccttgatcagctaacaa

SEQ ID NO: 12279 - RNA, 21 nt, RNAi
gaccuugaucagcuaacaauu

SEQ ID NO: 12280 - RNA, 21 nt, RNAi
uucuggaacuagucgauuguu

SEQ ID NO: 12281 - DNA, 21 bp, Homo sapiens
cacaccaactgaggaacagtg

SEQ ID NO: 12282 - RNA, 21 nt, RNAi
caccaacugaggaacaguguu

SEQ ID NO: 12283 - RNA, 21 nt, RNAi
uugugguugacuccuugucac

SEQ ID NO: 12284 - DNA, 21 bp, Homo sapiens
caccaactgaggaacagtggc

SEQ ID NO: 12285 - RNA, 21 nt, RNAi
ccaacugaggaacaguggcuu

SEQ ID NO: 12286 - RNA, 21 nt, RNAi
uugguugacuccuugucaccg

SEQ ID NO: 12287 - DNA, 21 bp, Homo sapiens
caactgaggaacagtggccgg

SEQ ID NO: 12288 - RNA, 21 nt, RNAi
acugaggaacaguggccgguu

SEQ ID NO: 12289 - RNA, 21 nt, RNAi
uuugacuccuugucaccggcc

SEQ ID NO: 12290 - DNA, 21 bp, Homo sapiens
cagtggccggacatgtgtagt

SEQ ID NO: 12291 - RNA, 21 nt, RNAi
guggccggacauguguaguuu

SEQ ID NO: 12292 - RNA, 21 nt, RNAi
uucaccggccuguacacauca

SEQ ID NO: 12293 - DNA, 21 bp, Homo sapiens
catgtgtagtcttccagatta

SEQ ID NO: 12294 - RNA, 21 nt, RNAi
uguguagucuuccagauuauu

SEQ ID NO: 12295 - RNA, 21 nt, RNAi
uuacacaucagaaggucuaau

SEQ ID NO: 12296 - DNA, 21 bp, Homo sapiens
catcacatcttcagtgcagca

SEQ ID NO: 12297 - RNA, 21 nt, RNAi
ucacaucuucagugcagcauu

SEQ ID NO: 12298 - RNA, 21 nt, RNAi
uuaguguagaagucacgucgu

SEQ ID NO: 12299 - DNA, 21 bp, Homo sapiens
cacatcttcagtgcagcagga

SEQ ID NO: 12300 - RNA, 21 nt, RNAi
caucuucagugcagcaggauu

SEQ ID NO: 12301 - RNA, 21 nt, RNAi
uuguagaagucacgucguccu

SEQ ID NO: 12302 - DNA, 21 bp, Homo sapiens
catcttcagtgcagcaggaga

SEQ ID NO: 12303 - RNA, 21 nt, RNAi
ucuucagugcagcaggagauu

SEQ ID NO: 12304 - RNA, 21 nt, RNAi
uuagaagucacgucguccucu

SEQ ID NO: 12305 - DNA, 21 bp, Homo sapiens
cagtgcagcaggagacgactt

SEQ ID NO: 12306 - RNA, 21 nt, RNAi
gugcagcaggagacgacuuuu

SEQ ID NO: 12307 - RNA, 21 nt, RNAi
uucacgucguccucugcugaa

SEQ ID NO: 12308 - DNA, 21 bp, Homo sapiens
cagcaggagacgacttactag

SEQ ID NO: 12309 - RNA, 21 nt, RNAi
gcaggagacgacuuacuaguu

SEQ ID NO: 12310 - RNA, 21 nt, RNAi
uucguccucugcugaaugauc

SEQ ID NO: 12311 - DNA, 21 bp, Homo sapiens
caggagacgacttactagatc

SEQ ID NO: 12312 - RNA, 21 nt, RNAi
ggagacgacuuacuagaucuu

SEQ ID NO: 12313 - RNA, 21 nt, RNAi
uuccucugcugaaugaucuag

SEQ ID NO: 12314 - DNA, 21 bp, Homo sapiens
catgtgctcgaattacggcca

SEQ ID NO: 12315 - RNA, 21 nt, RNAi
ugugcucgaauuacggccauu

SEQ ID NO: 12316 - RNA, 21 nt, RNAi
uuacacgagcuuaaugccggu

SEQ ID NO: 12317 - DNA, 21 bp, Homo sapiens
caacacctggatgtcagctgc

SEQ ID NO: 12318 - RNA, 21 nt, RNAi
acaccuggaugucagcugcuu

SEQ ID NO: 12319 - RNA, 21 nt, RNAi
uuuguggaccuacagucgacg

SEQ ID NO: 12320 - DNA, 21 bp, Homo sapiens
cacctggatgtcagctgccaa

SEQ ID NO: 12321 - RNA, 21 nt, RNAi
ccuggaugucagcugccaauu

SEQ ID NO: 12322 - RNA, 21 nt, RNAi
uuggaccuacagucgacgguu

SEQ ID NO: 12323 - DNA, 21 bp, Homo sapiens
cagctgccaagaccaaactgt

SEQ ID NO: 12324 - RNA, 21 nt, RNAi
gcugccaagaccaaacuguuu

SEQ ID NO: 12325 - RNA, 21 nt, RNAi
uucgacgguucugguuugaca

SEQ ID NO: 12326 - DNA, 21 bp, Homo sapiens
caagaccaaactgtccagtgg

SEQ ID NO: 12327 - RNA, 21 nt, RNAi
agaccaaacuguccagugguu

SEQ ID NO: 12328 - RNA, 21 nt, RNAi
uuucugguuugacaggucacc

SEQ ID NO: 12329 - DNA, 21 bp, Homo sapiens
caaactgtccagtggaaacct

SEQ ID NO: 12330 - RNA, 21 nt, RNAi
aacuguccaguggaaaccuuu

SEQ ID NO: 12331 - RNA, 21 nt, RNAi
uuuugacaggucaccuuugga

SEQ ID NO: 12332 - DNA, 21 bp, Homo sapiens
cagtggaaaccttaaaggagc

SEQ ID NO: 12333 - RNA, 21 nt, RNAi
guggaaaccuuaaaggagcuu

SEQ ID NO: 12334 - RNA, 21 nt, RNAi
uucaccuuuggaauuuccucg

SEQ ID NO: 12335 - DNA, 21 bp, Homo sapiens
caatcaaatccagctttggca

SEQ ID NO: 12336 - RNA, 21 nt, RNAi
aucaaauccagcuuuggcauu

SEQ ID NO: 12337 - RNA, 21 nt, RNAi
uuuaguuuaggucgaaaccgu

SEQ ID NO: 12338 - DNA, 21 bp, Homo sapiens
caaatccagctttggcaataa

SEQ ID NO: 12339 - RNA, 21 nt, RNAi
aauccagcuuuggcaauaauu

SEQ ID NO: 12340 - RNA, 21 nt, RNAi
uuuuaggucgaaaccguuauu

SEQ ID NO: 12341 - DNA, 21 bp, Homo sapiens
cagaggccttagaacaaggag

SEQ ID NO: 12342 - RNA, 21 nt, RNAi
gaggccuuagaacaaggaguu

SEQ ID NO: 12343 - RNA, 21 nt, RNAi
uucuccggaaucuuguuccuc

SEQ ID NO: 12344 - DNA, 21 bp, Homo sapiens
gaggctttaaggtagctttaa

SEQ ID NO: 12345 - RNA, 21 nt, RNAi
ggcuuuaagguagcuuuaauu

SEQ ID NO: 12346 - RNA, 21 nt, RNAi
uuccgaaauuccaucgaaauu

SEQ ID NO: 12347 - DNA, 21 bp, Homo sapiens
gatggctctggacgtgaagtc

SEQ ID NO: 12348 - RNA, 21 nt, RNAi
uggcucuggacgugaagucuu

SEQ ID NO: 12349 - RNA, 21 nt, RNAi
uuaccgagaccugcacuucag

SEQ ID NO: 12350 - DNA, 21 bp, Homo sapiens
gacagtttgccaccgtttaca

SEQ ID NO: 12351 - RNA, 21 nt, RNAi
caguuugccaccguuuacauu

SEQ ID NO: 12352 - RNA, 21 nt, RNAi
uugucaaacgguggcaaaugu

SEQ ID NO: 12353 - DNA, 21 bp, Homo sapiens
gagataagaataccaaccaaa

SEQ ID NO: 12354 - RNA, 21 nt, RNAi
gauaagaauaccaaccaaauu

SEQ ID NO: 12355 - RNA, 21 nt, RNAi
uucuauucuuaugguugguuu

SEQ ID NO: 12356 - DNA, 21 bp, Homo sapiens
gaataccaaccaaattgtcgc

SEQ ID NO: 12357 - RNA, 21 nt, RNAi
auaccaaccaaauugucgcuu

SEQ ID NO: 12358 - RNA, 21 nt, RNAi
uuuaugguugguuuaacagcg

SEQ ID NO: 12359 - DNA, 21 bp, Homo sapiens
gacatagatcagaagctaaag

SEQ ID NO: 12360 - RNA, 21 nt, RNAi
cauagaucagaagcuaaaguu

SEQ ID NO: 12361 - RNA, 21 nt, RNAi
uuguaucuagucuucgauuuc

SEQ ID NO: 12362 - DNA, 21 bp, Homo sapiens
gatcagaagctaaagatggta

SEQ ID NO: 12363 - RNA, 21 nt, RNAi
ucagaagcuaaagaugguauu

SEQ ID NO: 12364 - RNA, 21 nt, RNAi
uuagucuucgauuucuaccau

SEQ ID NO: 12365 - DNA, 21 bp, Homo sapiens
gatggtataaatagaaccgcc

SEQ ID NO: 12366 - RNA, 21 nt, RNAi
ugguauaaauagaaccgccuu

SEQ ID NO: 12367 - RNA, 21 nt, RNAi
uuaccauauuuaucuuggcgg

SEQ ID NO: 12368 - DNA, 21 bp, Homo sapiens
gaaccgccttaagagagataa

SEQ ID NO: 12369 - RNA, 21 nt, RNAi
accgccuuaagagagauaauu

SEQ ID NO: 12370 - RNA, 21 nt, RNAi
uuuggcggaauucucucuauu

SEQ ID NO: 12371 - DNA, 21 bp, Homo sapiens
gagctaagtcatccaaatata

SEQ ID NO: 12372 - RNA, 21 nt, RNAi
gcuaagucauccaaauauauu

SEQ ID NO: 12373 - RNA, 21 nt, RNAi
uucgauucaguagguuuauau

SEQ ID NO: 12374 - DNA, 21 bp, Homo sapiens
gaaactgatctagaggttata

SEQ ID NO: 12375 - RNA, 21 nt, RNAi
aacugaucuagagguuauauu

SEQ ID NO: 12376 - RNA, 21 nt, RNAi
uuuugacuagaucuccaauau

SEQ ID NO: 12377 - DNA, 21 bp, Homo sapiens
gataatagtcttgtgctgaca

SEQ ID NO: 12378 - RNA, 21 nt, RNAi
uaauagucuugugcugacauu

SEQ ID NO: 12379 - RNA, 21 nt, RNAi
uuauuaucagaacacgacugu

SEQ ID NO: 12380 - DNA, 21 bp, Homo sapiens
gacaccatcacacatcaaagc

SEQ ID NO: 12381 - RNA, 21 nt, RNAi
caccaucacacaucaaagcuu

SEQ ID NO: 12382 - RNA, 21 nt, RNAi
uugugguaguguguaguuucg

SEQ ID NO: 12383 - DNA, 21 bp, Homo sapiens
gatgactcttcaaggattaga

SEQ ID NO: 12384 - RNA, 21 nt, RNAi
ugacucuucaaggauuagauu

SEQ ID NO: 12385 - RNA, 21 nt, RNAi
uuacugagaaguuccuaaucu

SEQ ID NO: 12386 - DNA, 21 bp, Homo sapiens
gactcttcaaggattagaata

SEQ ID NO: 12387 - RNA, 21 nt, RNAi
cucuucaaggauuagaauauu

SEQ ID NO: 12388 - RNA, 21 nt, RNAi
uugagaaguuccuaaucuuau

SEQ ID NO: 12389 - DNA, 21 bp, Homo sapiens
gatctgaaaccaaacaacttg

SEQ ID NO: 12390 - RNA, 21 nt, RNAi
ucugaaaccaaacaacuuguu

SEQ ID NO: 12391 - RNA, 21 nt, RNAi
uuagacuuugguuuguugaac

SEQ ID NO: 12392 - DNA, 21 bp, Homo sapiens
gaaaccaaacaacttgttgct

SEQ ID NO: 12393 - RNA, 21 nt, RNAi
aaccaaacaacuuguugcuuu

SEQ ID NO: 12394 - RNA, 21 nt, RNAi
uuuugguuuguugaacaacga

SEQ ID NO: 12395 - DNA, 21 bp, Homo sapiens
gagcttatacacatcaggttg

SEQ ID NO: 12396 - RNA, 21 nt, RNAi
gcuuauacacaucagguuguu

SEQ ID NO: 12397 - RNA, 21 nt, RNAi
uucgaauauguguaguccaac

SEQ ID NO: 12398 - DNA, 21 bp, Homo sapiens
gagttactatttggagctagg

SEQ ID NO: 12399 - RNA, 21 nt, RNAi
guuacuauuuggagcuagguu

SEQ ID NO: 12400 - RNA, 21 nt, RNAi
uucaaugauaaaccucgaucc

SEQ ID NO: 12401 - DNA, 21 bp, Homo sapiens
gagctaggatgtatggtgtag

SEQ ID NO: 12402 - RNA, 21 nt, RNAi
gcuaggauguaugguguaguu

SEQ ID NO: 12403 - RNA, 21 nt, RNAi
uucgauccuacauaccacauc

SEQ ID NO: 12404 - DNA, 21 bp, Homo sapiens
gatgtatggtgtaggtgtgga

SEQ ID NO: 12405 - RNA, 21 nt, RNAi
uguaugguguagguguggauu

SEQ ID NO: 12406 - RNA, 21 nt, RNAi
uuacauaccacauccacaccu

SEQ ID NO: 12407 - DNA, 21 bp, Homo sapiens
gagattcagaccttgatcagc

SEQ ID NO: 12408 - RNA, 21 nt, RNAi
gauucagaccuugaucagcuu

SEQ ID NO: 12409 - RNA, 21 nt, RNAi
uucuaagucuggaacuagucg

SEQ ID NO: 12410 - DNA, 21 bp, Homo sapiens
gattcagaccttgatcagcta

SEQ ID NO: 12411 - RNA, 21 nt, RNAi
uucagaccuugaucagcuauu

SEQ ID NO: 12412 - RNA, 21 nt, RNAi
uuaagucuggaacuagucgau

SEQ ID NO: 12413 - DNA, 21 bp, Homo sapiens
gaccttgatcagctaacaaga

SEQ ID NO: 12414 - RNA, 21 nt, RNAi
ccuugaucagcuaacaagauu

SEQ ID NO: 12415 - RNA, 21 nt, RNAi
uuggaacuagucgauuguucu

SEQ ID NO: 12416 - DNA, 21 bp, Homo sapiens
gaggaacagtggccggacatg

SEQ ID NO: 12417 - RNA, 21 nt, RNAi
ggaacaguggccggacauguu

SEQ ID NO: 12418 - RNA, 21 nt, RNAi
uuccuugucaccggccuguac

SEQ ID NO: 12419 - DNA, 21 bp, Homo sapiens
gaacagtggccggacatgtgt

SEQ ID NO: 12420 - RNA, 21 nt, RNAi
acaguggccggacauguguuu

SEQ ID NO: 12421 - RNA, 21 nt, RNAi
uuugucaccggccuguacaca

SEQ ID NO: 12422 - DNA, 21 bp, Homo sapiens
gacatgtgtagtcttccagat

SEQ ID NO: 12423 - RNA, 21 nt, RNAi
cauguguagucuuccagauuu

SEQ ID NO: 12424 - RNA, 21 nt, RNAi
uuguacacaucagaaggucua

SEQ ID NO: 12425 - DNA, 21 bp, Homo sapiens
gaatacctttgcatcacatct

SEQ ID NO: 12426 - RNA, 21 nt, RNAi
auaccuuugcaucacaucuuu

SEQ ID NO: 12427 - RNA, 21 nt, RNAi
uuuauggaaacguaguguaga

SEQ ID NO: 12428 - DNA, 21 bp, Homo sapiens
gagacgacttactagatctca

SEQ ID NO: 12429 - RNA, 21 nt, RNAi
gacgacuuacuagaucucauu

SEQ ID NO: 12430 - RNA, 21 nt, RNAi
uucugcugaaugaucuagagu

SEQ ID NO: 12431 - DNA, 21 bp, Homo sapiens
gacgacttactagatctcata

SEQ ID NO: 12432 - RNA, 21 nt, RNAi
cgacuuacuagaucucauauu

SEQ ID NO: 12433 - RNA, 21 nt, RNAi
uugcugaaugaucuagaguau

SEQ ID NO: 12434 - DNA, 21 bp, Homo sapiens
gacttactagatctcatacaa

SEQ ID NO: 12435 - RNA, 21 nt, RNAi
cuuacuagaucucauacaauu

SEQ ID NO: 12436 - RNA, 21 nt, RNAi
uugaaugaucuagaguauguu

SEQ ID NO: 12437 - DNA, 21 bp, Homo sapiens
gatctcatacaaggcttattc

SEQ ID NO: 12438 - RNA, 21 nt, RNAi
ucucauacaaggcuuauucuu

SEQ ID NO: 12439 - RNA, 21 nt, RNAi
uuagaguauguuccgaauaag

SEQ ID NO: 12440 - DNA, 21 bp, Homo sapiens
gaattacggccacacaggcac

SEQ ID NO: 12441 - RNA, 21 nt, RNAi
auuacggccacacaggcacuu

SEQ ID NO: 12442 - RNA, 21 nt, RNAi
uuuaaugccgguguguccgug

SEQ ID NO: 12443 - DNA, 21 bp, Homo sapiens
gaagtatttcagtaatcggcc

SEQ ID NO: 12444 - RNA, 21 nt, RNAi
aguauuucaguaaucggccuu

SEQ ID NO: 12445 - RNA, 21 nt, RNAi
uuucauaaagucauuagccgg

SEQ ID NO: 12446 - DNA, 21 bp, Homo sapiens
gatgtcagctgccaagaccaa

SEQ ID NO: 12447 - RNA, 21 nt, RNAi
ugucagcugccaagaccaauu

SEQ ID NO: 12448 - RNA, 21 nt, RNAi
uuacagucgacgguucugguu

SEQ ID NO: 12449 - DNA, 21 bp, Homo sapiens
gaccaaactgtccagtggaaa

SEQ ID NO: 12450 - RNA, 21 nt, RNAi
ccaaacuguccaguggaaauu

SEQ ID NO: 12451 - RNA, 21 nt, RNAi
uugguuugacaggucaccuuu

SEQ ID NO: 12452 - DNA, 21 bp, Homo sapiens
gaaaccttaaaggagcaatca

SEQ ID NO: 12453 - RNA, 21 nt, RNAi
aaccuuaaaggagcaaucauu

SEQ ID NO: 12454 - RNA, 21 nt, RNAi
uuuuggaauuuccucguuagu

SEQ ID NO: 12455 - DNA, 21 bp, Homo sapiens
gagcaatcaaatccagctttg

SEQ ID NO: 12456 - RNA, 21 nt, RNAi
gcaaucaaauccagcuuuguu

SEQ ID NO: 12457 - RNA, 21 nt, RNAi
uucguuaguuuaggucgaaac

SEQ ID NO: 12458 - DNA, 21 bp, Homo sapiens
gaacagaggccttagaacaag

SEQ ID NO: 12459 - RNA, 21 nt, RNAi
acagaggccuuagaacaaguu

SEQ ID NO: 12460 - RNA, 21 nt, RNAi
uuugucuccggaaucuuguuc

SEQ ID NO: 12461 - DNA, 21 bp, Homo sapiens
gaggccttagaacaaggagga

SEQ ID NO: 12462 - RNA, 21 nt, RNAi
ggccuuagaacaaggaggauu

SEQ ID NO: 12463 - RNA, 21 nt, RNAi
uuccggaaucuuguuccuccu

SEQ ID NO: 12464 - DNA, 21 bp, Homo sapiens
taaggtagctttaaattcgtg

SEQ ID NO: 12465 - RNA, 21 nt, RNAi
agguagcuuuaaauucguguu

SEQ ID NO: 12466 - RNA, 21 nt, RNAi
uuuccaucgaaauuuaagcac

SEQ ID NO: 12467 - DNA, 21 bp, Homo sapiens
tagctttaaattcgtgttgtc

SEQ ID NO: 12468 - RNA, 21 nt, RNAi
gcuuuaaauucguguugucuu

SEQ ID NO: 12469 - RNA, 21 nt, RNAi
uucgaaauuuaagcacaacag

SEQ ID NO: 12470 - DNA, 21 bp, Homo sapiens
tatgagaagctggacttcctt

SEQ ID NO: 12471 - RNA, 21 nt, RNAi
ugagaagcuggacuuccuuuu

SEQ ID NO: 12472 - RNA, 21 nt, RNAi
uuacucuucgaccugaaggaa

SEQ ID NO: 12473 - DNA, 21 bp, Homo sapiens
tacaaggccagagataagaat

SEQ ID NO: 12474 - RNA, 21 nt, RNAi
caaggccagagauaagaauuu

SEQ ID NO: 12475 - RNA, 21 nt, RNAi
uuguuccggucucuauucuua

SEQ ID NO: 12476 - DNA, 21 bp, Homo sapiens
taccaaccaaattgtcgccat

SEQ ID NO: 12477 - RNA, 21 nt, RNAi
ccaaccaaauugucgccauuu

SEQ ID NO: 12478 - RNA, 21 nt, RNAi
uugguugguuuaacagcggua

SEQ ID NO: 12479 - DNA, 21 bp, Homo sapiens
tagatcagaagctaaagatgg

SEQ ID NO: 12480 - RNA, 21 nt, RNAi
gaucagaagcuaaagaugguu

SEQ ID NO: 12481 - RNA, 21 nt, RNAi
uucuagucuucgauuucuacc

SEQ ID NO: 12482 - DNA, 21 bp, Homo sapiens
tataaatagaaccgccttaag

SEQ ID NO: 12483 - RNA, 21 nt, RNAi
uaaauagaaccgccuuaaguu

SEQ ID NO: 12484 - RNA, 21 nt, RNAi
uuauuuaucuuggcggaauuc

SEQ ID NO: 12485 - DNA, 21 bp, Homo sapiens
taaatagaaccgccttaagag

SEQ ID NO: 12486 - RNA, 21 nt, RNAi
aauagaaccgccuuaagaguu

SEQ ID NO: 12487 - RNA, 21 nt, RNAi
uuuuaucuuggcggaauucuc

SEQ ID NO: 12488 - DNA, 21 bp, Homo sapiens
tagaaccgccttaagagagat

SEQ ID NO: 12489 - RNA, 21 nt, RNAi
gaaccgccuuaagagagauuu

SEQ ID NO: 12490 - RNA, 21 nt, RNAi
uucuuggcggaauucucucua

SEQ ID NO: 12491 - DNA, 21 bp, Homo sapiens
tattacaggagctaagtcatc

SEQ ID NO: 12492 - RNA, 21 nt, RNAi
uuacaggagcuaagucaucuu

SEQ ID NO: 12493 - RNA, 21 nt, RNAi
uuaauguccucgauucaguag

SEQ ID NO: 12494 - DNA, 21 bp, Homo sapiens
tacaggagctaagtcatccaa

SEQ ID NO: 12495 - RNA, 21 nt, RNAi
caggagcuaagucauccaauu

SEQ ID NO: 12496 - RNA, 21 nt, RNAi
uuguccucgauucaguagguu

SEQ ID NO: 12497 - DNA, 21 bp, Homo sapiens
tataattggtctccttgatgc

SEQ ID NO: 12498 - RNA, 21 nt, RNAi
uaauuggucuccuugaugcuu

SEQ ID NO: 12499 - RNA, 21 nt, RNAi
uuauuaaccagaggaacuacg

SEQ ID NO: 12500 - DNA, 21 bp, Homo sapiens
taattggtctccttgatgctt

SEQ ID NO: 12501 - RNA, 21 nt, RNAi
auuggucuccuugaugcuuuu

SEQ ID NO: 12502 - RNA, 21 nt, RNAi
uuuaaccagaggaacuacgaa

SEQ ID NO: 12503 - DNA, 21 bp, Homo sapiens
tatggaaactgatctagaggt

SEQ ID NO: 12504 - RNA, 21 nt, RNAi
uggaaacugaucuagagguuu

SEQ ID NO: 12505 - RNA, 21 nt, RNAi
uuaccuuugacuagaucucca

SEQ ID NO: 12506 - DNA, 21 bp, Homo sapiens
taaaggataatagtcttgtgc

SEQ ID NO: 12507 - RNA, 21 nt, RNAi
aaggauaauagucuugugcuu

SEQ ID NO: 12508 - RNA, 21 nt, RNAi
uuuuccuauuaucagaacacg

SEQ ID NO: 12509 - DNA, 21 bp, Homo sapiens
taatagtcttgtgctgacacc

SEQ ID NO: 12510 - RNA, 21 nt, RNAi
auagucuugugcugacaccuu

SEQ ID NO: 12511 - RNA, 21 nt, RNAi
uuuaucagaacacgacugugg

SEQ ID NO: 12512 - DNA, 21 bp, Homo sapiens
tagtcttgtgctgacaccatc

SEQ ID NO: 12513 - RNA, 21 nt, RNAi
gucuugugcugacaccaucuu

SEQ ID NO: 12514 - RNA, 21 nt, RNAi
uucagaacacgacugugguag

SEQ ID NO: 12515 - DNA, 21 bp, Homo sapiens
tacatgttgatgactcttcaa

SEQ ID NO: 12516 - RNA, 21 nt, RNAi
cauguugaugacucuucaauu

SEQ ID NO: 12517 - RNA, 21 nt, RNAi
uuguacaacuacugagaaguu

SEQ ID NO: 12518 - DNA, 21 bp, Homo sapiens
tacatcaacattggatcctac

SEQ ID NO: 12519 - RNA, 21 nt, RNAi
caucaacauuggauccuacuu

SEQ ID NO: 12520 - RNA, 21 nt, RNAi
uuguaguuguaaccuaggaug

SEQ ID NO: 12521 - DNA, 21 bp, Homo sapiens
tagagcttatacacatcaggt

SEQ ID NO: 12522 - RNA, 21 nt, RNAi
gagcuuauacacaucagguuu

SEQ ID NO: 12523 - RNA, 21 nt, RNAi
uucucgaauauguguagucca

SEQ ID NO: 12524 - DNA, 21 bp, Homo sapiens
tatacacatcaggttgtaacc

SEQ ID NO: 12525 - RNA, 21 nt, RNAi
uacacaucagguuguaaccuu

SEQ ID NO: 12526 - RNA, 21 nt, RNAi
uuauguguaguccaacauugg

SEQ ID NO: 12527 - DNA, 21 bp, Homo sapiens
tacacatcaggttgtaaccag

SEQ ID NO: 12528 - RNA, 21 nt, RNAi
cacaucagguuguaaccaguu

SEQ ID NO: 12529 - RNA, 21 nt, RNAi
uuguguaguccaacauugguc

SEQ ID NO: 12530 - DNA, 21 bp, Homo sapiens
tactatttggagctaggatgt

SEQ ID NO: 12531 - RNA, 21 nt, RNAi
cuauuuggagcuaggauguuu

SEQ ID NO: 12532 - RNA, 21 nt, RNAi
uugauaaaccucgauccuaca

SEQ ID NO: 12533 - DNA, 21 bp, Homo sapiens
tatttggagctaggatgtatg

SEQ ID NO: 12534 - RNA, 21 nt, RNAi
uuuggagcuaggauguauguu

SEQ ID NO: 12535 - RNA, 21 nt, RNAi
uuaaaccucgauccuacauac

SEQ ID NO: 12536 - DNA, 21 bp, Homo sapiens
taggatgtatggtgtaggtgt

SEQ ID NO: 12537 - RNA, 21 nt, RNAi
ggauguaugguguagguguuu

SEQ ID NO: 12538 - RNA, 21 nt, RNAi
uuccuacauaccacauccaca

SEQ ID NO: 12539 - DNA, 21 bp, Homo sapiens
tatggtgtaggtgtggacatg

SEQ ID NO: 12540 - RNA, 21 nt, RNAi
ugguguagguguggacauguu

SEQ ID NO: 12541 - RNA, 21 nt, RNAi
uuaccacauccacaccuguac

SEQ ID NO: 12542 - DNA, 21 bp, Homo sapiens
tagtcttccagattatgtgac

SEQ ID NO: 12543 - RNA, 21 nt, RNAi
gucuuccagauuaugugacuu

SEQ ID NO: 12544 - RNA, 21 nt, RNAi
uucagaaggucuaauacacug

SEQ ID NO: 12545 - DNA, 21 bp, Homo sapiens
tacctttgcatcacatcttca

SEQ ID NO: 12546 - RNA, 21 nt, RNAi
ccuuugcaucacaucuucauu

SEQ ID NO: 12547 - RNA, 21 nt, RNAi
uuggaaacguaguguagaagu

SEQ ID NO: 12548 - DNA, 21 bp, Homo sapiens
tactagatctcatacaaggct

SEQ ID NO: 12549 - RNA, 21 nt, RNAi
cuagaucucauacaaggcuuu

SEQ ID NO: 12550 - RNA, 21 nt, RNAi
uugaucuagaguauguuccga

SEQ ID NO: 12551 - DNA, 21 bp, Homo sapiens
tagatctcatacaaggcttat

SEQ ID NO: 12552 - RNA, 21 nt, RNAi
gaucucauacaaggcuuauuu

SEQ ID NO: 12553 - RNA, 21 nt, RNAi
uucuagaguauguuccgaaua

SEQ ID NO: 12554 - DNA, 21 bp, Homo sapiens
tatttaatccatgtgctcgaa

SEQ ID NO: 12555 - RNA, 21 nt, RNAi
uuuaauccaugugcucgaauu

SEQ ID NO: 12556 - RNA, 21 nt, RNAi
uuaaauuagguacacgagcuu

SEQ ID NO: 12557 - DNA, 21 bp, Homo sapiens
taatccatgtgctcgaattac

SEQ ID NO: 12558 - RNA, 21 nt, RNAi
auccaugugcucgaauuacuu

SEQ ID NO: 12559 - RNA, 21 nt, RNAi
uuuagguacacgagcuuaaug

SEQ ID NO: 12560 - DNA, 21 bp, Homo sapiens
tacggccacacaggcactgaa

SEQ ID NO: 12561 - RNA, 21 nt, RNAi
cggccacacaggcacugaauu

SEQ ID NO: 12562 - RNA, 21 nt, RNAi
uugccgguguguccgugacuu

SEQ ID NO: 12563 - DNA, 21 bp, Homo sapiens
taaaggagcaatcaaatccag

SEQ ID NO: 12564 - RNA, 21 nt, RNAi
aaggagcaaucaaauccaguu

SEQ ID NO: 12565 - RNA, 21 nt, RNAi
uuuuccucguuaguuuagguc

SEQ ID NO: 12566 - DNA, 21 bp, Homo sapiens
taaagagaacactggacaaca

SEQ ID NO: 12567 - RNA, 21 nt, RNAi
aagagaacacuggacaacauu

SEQ ID NO: 12568 - RNA, 21 nt, RNAi
uuuucucuugugaccuguugu

SEQ ID NO: 12569 - DNA, 21 bp, Homo sapiens
taagtaaatgctgtagaagtg

SEQ ID NO: 12570 - RNA, 21 nt, RNAi
aguaaaugcuguagaaguguu

SEQ ID NO: 12571 - RNA, 21 nt, RNAi
uuucauuuacgacaucuucac

SEQ ID NO: 12572 - DNA, 21 bp, Homo sapiens
taaatgctgtagaagtgagtt

SEQ ID NO: 12573 - RNA, 21 nt, RNAi
aaugcuguagaagugaguuuu

SEQ ID NO: 12574 - RNA, 21 nt, RNAi
uuuuacgacaucuucacucaa

SEQ ID NO: 12575 - DNA, 21 bp, Homo sapiens
aaccaaattgtcgccattaag

SEQ ID NO: 12576 - RNA, 21 nt, RNAi
ccaaauugucgccauuaaguu

SEQ ID NO: 12577 - RNA, 21 nt, RNAi
uugguuuaacagcgguaauuc

SEQ ID NO: 12578 - DNA, 21 bp, Homo sapiens
aatcaaacttggacatagatc

SEQ ID NO: 12579 - RNA, 21 nt, RNAi
ucaaacuuggacauagaucuu

SEQ ID NO: 12580 - RNA, 21 nt, RNAi
uuaguuugaaccuguaucuag

SEQ ID NO: 12581 - DNA, 21 bp, Homo sapiens
aaatagaaccgccttaagaga

SEQ ID NO: 12582 - RNA, 21 nt, RNAi
auagaaccgccuuaagagauu

SEQ ID NO: 12583 - RNA, 21 nt, RNAi
uuuaucuuggcggaauucucu

SEQ ID NO: 12584 - DNA, 21 bp, Homo sapiens
aatagaaccgccttaagagag

SEQ ID NO: 12585 - RNA, 21 nt, RNAi
uagaaccgccuuaagagaguu

SEQ ID NO: 12586 - RNA, 21 nt, RNAi
uuaucuuggcggaauucucuc

SEQ ID NO: 12587 - DNA, 21 bp, Homo sapiens
aaccgccttaagagagataaa

SEQ ID NO: 12588 - RNA, 21 nt, RNAi
ccgccuuaagagagauaaauu

SEQ ID NO: 12589 - RNA, 21 nt, RNAi
uuggcggaauucucucuauuu

SEQ ID NO: 12590 - DNA, 21 bp, Homo sapiens
aattattacaggagctaagtc

SEQ ID NO: 12591 - RNA, 21 nt, RNAi
uuauuacaggagcuaagucuu

SEQ ID NO: 12592 - RNA, 21 nt, RNAi
uuaauaauguccucgauucag

SEQ ID NO: 12593 - DNA, 21 bp, Homo sapiens
aaagcctacatgttgatgact

SEQ ID NO: 12594 - RNA, 21 nt, RNAi
agccuacauguugaugacuuu

SEQ ID NO: 12595 - RNA, 21 nt, RNAi
uuucggauguacaacuacuga

SEQ ID NO: 12596 - DNA, 21 bp, Homo sapiens
aagcctacatgttgatgactc

SEQ ID NO: 12597 - RNA, 21 nt, RNAi
gccuacauguugaugacucuu

SEQ ID NO: 12598 - RNA, 21 nt, RNAi
uucggauguacaacuacugag

SEQ ID NO: 12599 - DNA, 21 bp, Homo sapiens
aacaacttgttgctagatgaa

SEQ ID NO: 12600 - RNA, 21 nt, RNAi
caacuuguugcuagaugaauu

SEQ ID NO: 12601 - RNA, 21 nt, RNAi
uuguugaacaacgaucuacuu

SEQ ID NO: 12602 - DNA, 21 bp, Homo sapiens
aatacctttgcatcacatctt

SEQ ID NO: 12603 - RNA, 21 nt, RNAi
uaccuuugcaucacaucuuuu

SEQ ID NO: 12604 - RNA, 21 nt, RNAi
uuauggaaacguaguguagaa

SEQ ID NO: 12605 - DNA, 21 bp, Homo sapiens
aatccatgtgctcgaattacg

SEQ ID NO: 12606 - RNA, 21 nt, RNAi
uccaugugcucgaauuacguu

SEQ ID NO: 12607 - RNA, 21 nt, RNAi
uuagguacacgagcuuaaugc

SEQ ID NO: 12608 - DNA, 21 bp, Homo sapiens
aaaccttaaaggagcaatcaa

SEQ ID NO: 12609 - RNA, 21 nt, RNAi
accuuaaaggagcaaucaauu

SEQ ID NO: 12610 - RNA, 21 nt, RNAi
uuuggaauuuccucguuaguu

SEQ ID NO: 12611 - DNA, 21 bp, Homo sapiens
aaccttaaaggagcaatcaaa

SEQ ID NO: 12612 - RNA, 21 nt, RNAi
ccuuaaaggagcaaucaaauu

SEQ ID NO: 12613 - RNA, 21 nt, RNAi
uuggaauuuccucguuaguuu

SEQ ID NO: 12614 - DNA, 21 bp, Homo sapiens
caaccaaattgtcgccattaa

SEQ ID NO: 12615 - RNA, 21 nt, RNAi
accaaauugucgccauuaauu

SEQ ID NO: 12616 - RNA, 21 nt, RNAi
uuugguuuaacagcgguaauu

SEQ ID NO: 12617 - DNA, 21 bp, Homo sapiens
caggagctaagtcatccaaat

SEQ ID NO: 12618 - RNA, 21 nt, RNAi
ggagcuaagucauccaaauuu

SEQ ID NO: 12619 - RNA, 21 nt, RNAi
uuccucgauucaguagguuua

SEQ ID NO: 12620 - DNA, 21 bp, Homo sapiens
caaagcctacatgttgatgac

SEQ ID NO: 12621 - RNA, 21 nt, RNAi
aagccuacauguugaugacuu

SEQ ID NO: 12622 - RNA, 21 nt, RNAi
uuuucggauguacaacuacug

SEQ ID NO: 12623 - DNA, 21 bp, Homo sapiens
catgttgatgactcttcaagg

SEQ ID NO: 12624 - RNA, 21 nt, RNAi
uguugaugacucuucaagguu

SEQ ID NO: 12625 - RNA, 21 nt, RNAi
uuacaacuacugagaaguucc

SEQ ID NO: 12626 - DNA, 21 bp, Homo sapiens
catcaacattggatcctacat

SEQ ID NO: 12627 - RNA, 21 nt, RNAi
ucaacauuggauccuacauuu

SEQ ID NO: 12628 - RNA, 21 nt, RNAi
uuaguuguaaccuaggaugua

SEQ ID NO: 12629 - DNA, 21 bp, Homo sapiens
caacattggatcctacatagg

SEQ ID NO: 12630 - RNA, 21 nt, RNAi
acauuggauccuacauagguu

SEQ ID NO: 12631 - RNA, 21 nt, RNAi
uuuguaaccuaggauguaucc

SEQ ID NO: 12632 - DNA, 21 bp, Homo sapiens
cagaccttgatcagctaacaa

SEQ ID NO: 12633 - RNA, 21 nt, RNAi
gaccuugaucagcuaacaauu

SEQ ID NO: 12634 - RNA, 21 nt, RNAi
uucuggaacuagucgauuguu

SEQ ID NO: 12635 - DNA, 21 bp, Homo sapiens
catgtgtagtcttccagatta

SEQ ID NO: 12636 - RNA, 21 nt, RNAi
uguguagucuuccagauuauu

SEQ ID NO: 12637 - RNA, 21 nt, RNAi
uuacacaucagaaggucuaau

SEQ ID NO: 12638 - DNA, 21 bp, Homo sapiens
cagcaggagacgacttactag

SEQ ID NO: 12639 - RNA, 21 nt, RNAi
gcaggagacgacuuacuaguu

SEQ ID NO: 12640 - RNA, 21 nt, RNAi
uucguccucugcugaaugauc

SEQ ID NO: 12641 - DNA, 21 bp, Homo sapiens
caggagacgacttactagatc

SEQ ID NO: 12642 - RNA, 21 nt, RNAi
ggagacgacuuacuagaucuu

SEQ ID NO: 12643 - RNA, 21 nt, RNAi
uuccucugcugaaugaucuag

SEQ ID NO: 12644 - DNA, 21 bp, Homo sapiens
catgtgctcgaattacggcca

SEQ ID NO: 12645 - RNA, 21 nt, RNAi
ugugcucgaauuacggccauu

SEQ ID NO: 12646 - RNA, 21 nt, RNAi
uuacacgagcuuaaugccggu

SEQ ID NO: 12647 - DNA, 21 bp, Homo sapiens
gacatagatcagaagctaaag

SEQ ID NO: 12648 - RNA, 21 nt, RNAi
cauagaucagaagcuaaaguu

SEQ ID NO: 12649 - RNA, 21 nt, RNAi
uuguaucuagucuucgauuuc

SEQ ID NO: 12650 - DNA, 21 bp, Homo sapiens
gaaccgccttaagagagataa

SEQ ID NO: 12651 - RNA, 21 nt, RNAi
accgccuuaagagagauaauu

SEQ ID NO: 12652 - RNA, 21 nt, RNAi
uuuggcggaauucucucuauu

SEQ ID NO: 12653 - DNA, 21 bp, Homo sapiens
gagctaggatgtatggtgtag

SEQ ID NO: 12654 - RNA, 21 nt, RNAi
gcuaggauguaugguguaguu

SEQ ID NO: 12655 - RNA, 21 nt, RNAi
uucgauccuacauaccacauc

SEQ ID NO: 12656 - DNA, 21 bp, Homo sapiens
gatgtatggtgtaggtgtgga

SEQ ID NO: 12657 - RNA, 21 nt, RNAi
uguaugguguagguguggauu

SEQ ID NO: 12658 - RNA, 21 nt, RNAi
uuacauaccacauccacaccu

SEQ ID NO: 12659 - DNA, 21 bp, Homo sapiens
gaccttgatcagctaacaaga

SEQ ID NO: 12660 - RNA, 21 nt, RNAi
ccuugaucagcuaacaagauu

SEQ ID NO: 12661 - RNA, 21 nt, RNAi
uuggaacuagucgauuguucu

SEQ ID NO: 12662 - DNA, 21 bp, Homo sapiens
gacatgtgtagtcttccagat

SEQ ID NO: 12663 - RNA, 21 nt, RNAi
cauguguagucuuccagauuu

SEQ ID NO: 12664 - RNA, 21 nt, RNAi
uuguacacaucagaaggucua

SEQ ID NO: 12665 - DNA, 21 bp, Homo sapiens
gaatacctttgcatcacatct

SEQ ID NO: 12666 - RNA, 21 nt, RNAi
auaccuuugcaucacaucuuu

SEQ ID NO: 12667 - RNA, 21 nt, RNAi
uuuauggaaacguaguguaga

SEQ ID NO: 12668 - DNA, 21 bp, Homo sapiens
gagacgacttactagatctca

SEQ ID NO: 12669 - RNA, 21 nt, RNAi
gacgacuuacuagaucucauu

SEQ ID NO: 12670 - RNA, 21 nt, RNAi
uucugcugaaugaucuagagu

SEQ ID NO: 12671 - DNA, 21 bp, Homo sapiens
gacgacttactagatctcata

SEQ ID NO: 12672 - RNA, 21 nt, RNAi
cgacuuacuagaucucauauu

SEQ ID NO: 12673 - RNA, 21 nt, RNAi
uugcugaaugaucuagaguau

SEQ ID NO: 12674 - DNA, 21 bp, Homo sapiens
gatctcatacaaggcttattc

SEQ ID NO: 12675 - RNA, 21 nt, RNAi
ucucauacaaggcuuauucuu

SEQ ID NO: 12676 - RNA, 21 nt, RNAi
uuagaguauguuccgaauaag

SEQ ID NO: 12677 - DNA, 21 bp, Homo sapiens
gaagtatttcagtaatcggcc

SEQ ID NO: 12678 - RNA, 21 nt, RNAi
aguauuucaguaaucggccuu

SEQ ID NO: 12679 - RNA, 21 nt, RNAi
uuucauaaagucauuagccgg

SEQ ID NO: 12680 - DNA, 21 bp, Homo sapiens
gaaaccttaaaggagcaatca

SEQ ID NO: 12681 - RNA, 21 nt, RNAi
aaccuuaaaggagcaaucauu

SEQ ID NO: 12682 - RNA, 21 nt, RNAi
uuuuggaauuuccucguuagu

SEQ ID NO: 12683 - DNA, 21 bp, Homo sapiens
taccaaccaaattgtcgccat

SEQ ID NO: 12684 - RNA, 21 nt, RNAi
ccaaccaaauugucgccauuu

SEQ ID NO: 12685 - RNA, 21 nt, RNAi
uugguugguuuaacagcggua

SEQ ID NO: 12686 - DNA, 21 bp, Homo sapiens
taaatagaaccgccttaagag

SEQ ID NO: 12687 - RNA, 21 nt, RNAi
aauagaaccgccuuaagaguu

SEQ ID NO: 12688 - RNA, 21 nt, RNAi
uuuuaucuuggcggaauucuc

SEQ ID NO: 12689 - DNA, 21 bp, Homo sapiens
tagaaccgccttaagagagat

SEQ ID NO: 12690 - RNA, 21 nt, RNAi
gaaccgccuuaagagagauuu

SEQ ID NO: 12691 - RNA, 21 nt, RNAi
uucuuggcggaauucucucua

SEQ ID NO: 12692 - DNA, 21 bp, Homo sapiens
tattacaggagctaagtcatc

SEQ ID NO: 12693 - RNA, 21 nt, RNAi
uuacaggagcuaagucaucuu

SEQ ID NO: 12694 - RNA, 21 nt, RNAi
uuaauguccucgauucaguag

SEQ ID NO: 12695 - DNA, 21 bp, Homo sapiens
tacaggagctaagtcatccaa

SEQ ID NO: 12696 - RNA, 21 nt, RNAi
caggagcuaagucauccaauu

SEQ ID NO: 12697 - RNA, 21 nt, RNAi
uuguccucgauucaguagguu

SEQ ID NO: 12698 - DNA, 21 bp, Homo sapiens
taaaggataatagtcttgtgc

SEQ ID NO: 12699 - RNA, 21 nt, RNAi
aaggauaauagucuugugcuu

SEQ ID NO: 12700 - RNA, 21 nt, RNAi
uuuuccuauuaucagaacacg

SEQ ID NO: 12701 - DNA, 21 bp, Homo sapiens
tagtcttgtgctgacaccatc

SEQ ID NO: 12702 - RNA, 21 nt, RNAi
gucuugugcugacaccaucuu

SEQ ID NO: 12703 - RNA, 21 nt, RNAi
uucagaacacgacugugguag

SEQ ID NO: 12704 - DNA, 21 bp, Homo sapiens
tacatgttgatgactcttcaa

SEQ ID NO: 12705 - RNA, 21 nt, RNAi
cauguugaugacucuucaauu

SEQ ID NO: 12706 - RNA, 21 nt, RNAi
uuguacaacuacugagaaguu

SEQ ID NO: 12707 - DNA, 21 bp, Homo sapiens
tacatcaacattggatcctac

SEQ ID NO: 12708 - RNA, 21 nt, RNAi
caucaacauuggauccuacuu

SEQ ID NO: 12709 - RNA, 21 nt, RNAi
uuguaguuguaaccuaggaug

SEQ ID NO: 12710 - DNA, 21 bp, Homo sapiens
tatacacatcaggttgtaacc

SEQ ID NO: 12711 - RNA, 21 nt, RNAi
uacacaucagguuguaaccuu

SEQ ID NO: 12712 - RNA, 21 nt, RNAi
uuauguguaguccaacauugg

SEQ ID NO: 12713 - DNA, 21 bp, Homo sapiens
tacacatcaggttgtaaccag

SEQ ID NO: 12714 - RNA, 21 nt, RNAi
cacaucagguuguaaccaguu

SEQ ID NO: 12715 - RNA, 21 nt, RNAi
uuguguaguccaacauugguc

SEQ ID NO: 12716 - DNA, 21 bp, Homo sapiens
taggatgtatggtgtaggtgt

SEQ ID NO: 12717 - RNA, 21 nt, RNAi
ggauguaugguguagguguuu

SEQ ID NO: 12718 - RNA, 21 nt, RNAi
uuccuacauaccacauccaca

SEQ ID NO: 12719 - DNA, 21 bp, Homo sapiens
tactagatctcatacaaggct

SEQ ID NO: 12720 - RNA, 21 nt, RNAi
cuagaucucauacaaggcuuu

SEQ ID NO: 12721 - RNA, 21 nt, RNAi
uugaucuagaguauguuccga

SEQ ID NO: 12722 - DNA, 21 bp, Homo sapiens
tagatctcatacaaggcttat

SEQ ID NO: 12723 - RNA, 21 nt, RNAi
gaucucauacaaggcuuauuu

SEQ ID NO: 12724 - RNA, 21 nt, RNAi
uucuagaguauguuccgaaua

SEQ ID NO: 12725 - DNA, 21 bp, Homo sapiens
tatttaatccatgtgctcgaa

SEQ ID NO: 12726 - RNA, 21 nt, RNAi
uuuaauccaugugcucgaauu

SEQ ID NO: 12727 - RNA, 21 nt, RNAi
uuaaauuagguacacgagcuu

SEQ ID NO: 12728 - DNA, 21 bp, Homo sapiens
taatccatgtgctcgaattac

SEQ ID NO: 12729 - RNA, 21 nt, RNAi
auccaugugcucgaauuacuu

SEQ ID NO: 12730 - RNA, 21 nt, RNAi
uuuagguacacgagcuuaaug

SEQ ID NO: 12731 - DNA, 21 bp, Homo sapiens
aatttcaaccttcggtgtgct

SEQ ID NO: 12732 - RNA, 21 nt, RNAi
uuucaaccuucggugugcuuu

SEQ ID NO: 12733 - RNA, 21 nt, RNAi
uuaaaguuggaagccacacga

SEQ ID NO: 12734 - DNA, 21 bp, Homo sapiens
aaatgccgaggtgctcggtgg

SEQ ID NO: 12735 - RNA, 21 nt, RNAi
augccgaggugcucggugguu

SEQ ID NO: 12736 - RNA, 21 nt, RNAi
uuuacggcuccacgagccacc

SEQ ID NO: 12737 - DNA, 21 bp, Homo sapiens
aatgccgaggtgctcggtgga

SEQ ID NO: 12738 - RNA, 21 nt, RNAi
ugccgaggugcucgguggauu

SEQ ID NO: 12739 - RNA, 21 nt, RNAi
uuacggcuccacgagccaccu

SEQ ID NO: 12740 - DNA, 21 bp, Homo sapiens
aaggtgcctatggagaagttc

SEQ ID NO: 12741 - RNA, 21 nt, RNAi
ggugccuauggagaaguucuu

SEQ ID NO: 12742 - RNA, 21 nt, RNAi
uuccacggauaccucuucaag

SEQ ID NO: 12743 - DNA, 21 bp, Homo sapiens
aagttcaacttgctgtgaata

SEQ ID NO: 12744 - RNA, 21 nt, RNAi
guucaacuugcugugaauauu

SEQ ID NO: 12745 - RNA, 21 nt, RNAi
uucaaguugaacgacacuuau

SEQ ID NO: 12746 - DNA, 21 bp, Homo sapiens
aacttgctgtgaatagagtaa

SEQ ID NO: 12747 - RNA, 21 nt, RNAi
cuugcugugaauagaguaauu

SEQ ID NO: 12748 - RNA, 21 nt, RNAi
uugaacgacacuuaucucauu

SEQ ID NO: 12749 - DNA, 21 bp, Homo sapiens
aatagagtaactgaagaagca

SEQ ID NO: 12750 - RNA, 21 nt, RNAi
uagaguaacugaagaagcauu

SEQ ID NO: 12751 - RNA, 21 nt, RNAi
uuaucucauugacuucuucgu

SEQ ID NO: 12752 - DNA, 21 bp, Homo sapiens
aactgaagaagcagtcgcagt

SEQ ID NO: 12753 - RNA, 21 nt, RNAi
cugaagaagcagucgcaguuu

SEQ ID NO: 12754 - RNA, 21 nt, RNAi
uugacuucuucgucagcguca

SEQ ID NO: 12755 - DNA, 21 bp, Homo sapiens
aagaagcagtcgcagtgaaga

SEQ ID NO: 12756 - RNA, 21 nt, RNAi
gaagcagucgcagugaagauu

SEQ ID NO: 12757 - RNA, 21 nt, RNAi
uucuucgucagcgucacuucu

SEQ ID NO: 12758 - DNA, 21 bp, Homo sapiens
aagcagtcgcagtgaagattg

SEQ ID NO: 12759 - RNA, 21 nt, RNAi
gcagucgcagugaagauuguu

SEQ ID NO: 12760 - RNA, 21 nt, RNAi
uucgucagcgucacuucuaac

SEQ ID NO: 12761 - DNA, 21 bp, Homo sapiens
aagattgtagatatgaagcgt

SEQ ID NO: 12762 - RNA, 21 nt, RNAi
gauuguagauaugaagcguuu

SEQ ID NO: 12763 - RNA, 21 nt, RNAi
uucuaacaucuauacuucgca

SEQ ID NO: 12764 - DNA, 21 bp, Homo sapiens
aagcgtgccgtagactgtcca

SEQ ID NO: 12765 - RNA, 21 nt, RNAi
gcgugccguagacuguccauu

SEQ ID NO: 12766 - RNA, 21 nt, RNAi
uucgcacggcaucugacaggu

SEQ ID NO: 12767 - DNA, 21 bp, Homo sapiens
aaattctatggtcacaggaga

SEQ ID NO: 12768 - RNA, 21 nt, RNAi
auucuauggucacaggagauu

SEQ ID NO: 12769 - RNA, 21 nt, RNAi
uuuaagauaccaguguccucu

SEQ ID NO: 12770 - DNA, 21 bp, Homo sapiens
aattctatggtcacaggagag

SEQ ID NO: 12771 - RNA, 21 nt, RNAi
uucuauggucacaggagaguu

SEQ ID NO: 12772 - RNA, 21 nt, RNAi
uuaagauaccaguguccucuc

SEQ ID NO: 12773 - DNA, 21 bp, Homo sapiens
aatagagccagacataggcat

SEQ ID NO: 12774 - RNA, 21 nt, RNAi
uagagccagacauaggcauuu

SEQ ID NO: 12775 - RNA, 21 nt, RNAi
uuaucucggucuguauccgua

SEQ ID NO: 12776 - DNA, 21 bp, Homo sapiens
aaccagatgctcagagattct

SEQ ID NO: 12777 - RNA, 21 nt, RNAi
ccagaugcucagagauucuuu

SEQ ID NO: 12778 - RNA, 21 nt, RNAi
uuggucuacgagucucuaaga

SEQ ID NO: 12779 - DNA, 21 bp, Homo sapiens
aaatcttctgttggatgaaag

SEQ ID NO: 12780 - RNA, 21 nt, RNAi
aucuucuguuggaugaaaguu

SEQ ID NO: 12781 - RNA, 21 nt, RNAi
uuuagaagacaaccuacuuuc

SEQ ID NO: 12782 - DNA, 21 bp, Homo sapiens
aatcttctgttggatgaaagg

SEQ ID NO: 12783 - RNA, 21 nt, RNAi
ucuucuguuggaugaaagguu

SEQ ID NO: 12784 - RNA, 21 nt, RNAi
uuagaagacaaccuacuuucc

SEQ ID NO: 12785 - DNA, 21 bp, Homo sapiens
aaatctcagactttggcttgg

SEQ ID NO: 12786 - RNA, 21 nt, RNAi
aucucagacuuuggcuugguu

SEQ ID NO: 12787 - RNA, 21 nt, RNAi
uuuagagucugaaaccgaacc

SEQ ID NO: 12788 - DNA, 21 bp, Homo sapiens
aatctcagactttggcttggc

SEQ ID NO: 12789 - RNA, 21 nt, RNAi
ucucagacuuuggcuuggcuu

SEQ ID NO: 12790 - RNA, 21 nt, RNAi
uuagagucugaaaccgaaccg

SEQ ID NO: 12791 - DNA, 21 bp, Homo sapiens
aataatcgtgagcgtttgttg

SEQ ID NO: 12792 - RNA, 21 nt, RNAi
uaaucgugagcguuuguuguu

SEQ ID NO: 12793 - RNA, 21 nt, RNAi
uuauuagcacucgcaaacaac

SEQ ID NO: 12794 - DNA, 21 bp, Homo sapiens
aatcgtgagcgtttgttgaac

SEQ ID NO: 12795 - RNA, 21 nt, RNAi
ucgugagcguuuguugaacuu

SEQ ID NO: 12796 - RNA, 21 nt, RNAi
uuagcacucgcaaacaacuug

SEQ ID NO: 12797 - DNA, 21 bp, Homo sapiens
aacaagatgtgtggtacttta

SEQ ID NO: 12798 - RNA, 21 nt, RNAi
caagaugugugguacuuuauu

SEQ ID NO: 12799 - RNA, 21 nt, RNAi
uuguucuacacaccaugaaau

SEQ ID NO: 12800 - DNA, 21 bp, Homo sapiens
aagatgtgtggtactttacca

SEQ ID NO: 12801 - RNA, 21 nt, RNAi
gaugugugguacuuuaccauu

SEQ ID NO: 12802 - RNA, 21 nt, RNAi
uucuacacaccaugaaauggu

SEQ ID NO: 12803 - DNA, 21 bp, Homo sapiens
aacttctgaagagaagagaat

SEQ ID NO: 12804 - RNA, 21 nt, RNAi
cuucugaagagaagagaauuu

SEQ ID NO: 12805 - RNA, 21 nt, RNAi
uugaagacuucucuucucuua

SEQ ID NO: 12806 - DNA, 21 bp, Homo sapiens
aagagaagagaatttcatgca

SEQ ID NO: 12807 - RNA, 21 nt, RNAi
gagaagagaauuucaugcauu

SEQ ID NO: 12808 - RNA, 21 nt, RNAi
uucucuucucuuaaaguacgu

SEQ ID NO: 12809 - DNA, 21 bp, Homo sapiens
aagagaatttcatgcagaacc

SEQ ID NO: 12810 - RNA, 21 nt, RNAi
gagaauuucaugcagaaccuu

SEQ ID NO: 12811 - RNA, 21 nt, RNAi
uucucuuaaaguacgucuugg

SEQ ID NO: 12812 - DNA, 21 bp, Homo sapiens
aatttcatgcagaaccagttg

SEQ ID NO: 12813 - RNA, 21 nt, RNAi
uuucaugcagaaccaguuguu

SEQ ID NO: 12814 - RNA, 21 nt, RNAi
uuaaaguacgucuuggucaac

SEQ ID NO: 12815 - DNA, 21 bp, Homo sapiens
aaccagttgatgtttggtcct

SEQ ID NO: 12816 - RNA, 21 nt, RNAi
ccaguugauguuugguccuuu

SEQ ID NO: 12817 - RNA, 21 nt, RNAi
uuggucaacuacaaaccagga

SEQ ID NO: 12818 - DNA, 21 bp, Homo sapiens
aatagtacttactgcaatgct

SEQ ID NO: 12819 - RNA, 21 nt, RNAi
uaguacuuacugcaaugcuuu

SEQ ID NO: 12820 - RNA, 21 nt, RNAi
uuaucaugaaugacguuacga

SEQ ID NO: 12821 - DNA, 21 bp, Homo sapiens
aatgctcgctggagaattgcc

SEQ ID NO: 12822 - RNA, 21 nt, RNAi
ugcucgcuggagaauugccuu

SEQ ID NO: 12823 - RNA, 21 nt, RNAi
uuacgagcgaccucuuaacgg

SEQ ID NO: 12824 - DNA, 21 bp, Homo sapiens
aaatcgattctgctcctctag

SEQ ID NO: 12825 - RNA, 21 nt, RNAi
aucgauucugcuccucuaguu

SEQ ID NO: 12826 - RNA, 21 nt, RNAi
uuuagcuaagacgaggagauc

SEQ ID NO: 12827 - DNA, 21 bp, Homo sapiens
aatcgattctgctcctctagc

SEQ ID NO: 12828 - RNA, 21 nt, RNAi
ucgauucugcuccucuagcuu

SEQ ID NO: 12829 - RNA, 21 nt, RNAi
uuagcuaagacgaggagaucg

SEQ ID NO: 12830 - DNA, 21 bp, Homo sapiens
aatcttagttgagaatccatc

SEQ ID NO: 12831 - RNA, 21 nt, RNAi
ucuuaguugagaauccaucuu

SEQ ID NO: 12832 - RNA, 21 nt, RNAi
uuagaaucaacucuuagguag

SEQ ID NO: 12833 - DNA, 21 bp, Homo sapiens
aatccatcagcaagaattacc

SEQ ID NO: 12834 - RNA, 21 nt, RNAi
uccaucagcaagaauuaccuu

SEQ ID NO: 12835 - RNA, 21 nt, RNAi
uuagguagucguucuuaaugg

SEQ ID NO: 12836 - DNA, 21 bp, Homo sapiens
aagaattaccattccagacat

SEQ ID NO: 12837 - RNA, 21 nt, RNAi
gaauuaccauuccagacauuu

SEQ ID NO: 12838 - RNA, 21 nt, RNAi
uucuuaaugguaaggucugua

SEQ ID NO: 12839 - DNA, 21 bp, Homo sapiens
aattaccattccagacatcaa

SEQ ID NO: 12840 - RNA, 21 nt, RNAi
uuaccauuccagacaucaauu

SEQ ID NO: 12841 - RNA, 21 nt, RNAi
uuaaugguaaggucuguaguu

SEQ ID NO: 12842 - DNA, 21 bp, Homo sapiens
aagatagatggtacaacaaac

SEQ ID NO: 12843 - RNA, 21 nt, RNAi
gauagaugguacaacaaacuu

SEQ ID NO: 12844 - RNA, 21 nt, RNAi
uucuaucuaccauguuguuug

SEQ ID NO: 12845 - DNA, 21 bp, Homo sapiens
aagcacattcaatccaatttg

SEQ ID NO: 12846 - RNA, 21 nt, RNAi
gcacauucaauccaauuuguu

SEQ ID NO: 12847 - RNA, 21 nt, RNAi
uucguguaaguuagguuaaac

SEQ ID NO: 12848 - DNA, 21 bp, Homo sapiens
aatccaatttggacttctctc

SEQ ID NO: 12849 - RNA, 21 nt, RNAi
uccaauuuggacuucucucuu

SEQ ID NO: 12850 - RNA, 21 nt, RNAi
uuagguuaaaccugaagagag

SEQ ID NO: 12851 - DNA, 21 bp, Homo sapiens
aatttggacttctctccagta

SEQ ID NO: 12852 - RNA, 21 nt, RNAi
uuuggacuucucuccaguauu

SEQ ID NO: 12853 - RNA, 21 nt, RNAi
uuaaaccugaagagaggucau

SEQ ID NO: 12854 - DNA, 21 bp, Homo sapiens
aaacagtgcttctagtgaaga

SEQ ID NO: 12855 - RNA, 21 nt, RNAi
acagugcuucuagugaagauu

SEQ ID NO: 12856 - RNA, 21 nt, RNAi
uuugucacgaagaucacuucu

SEQ ID NO: 12857 - DNA, 21 bp, Homo sapiens
aacagtgcttctagtgaagaa

SEQ ID NO: 12858 - RNA, 21 nt, RNAi
cagugcuucuagugaagaauu

SEQ ID NO: 12859 - RNA, 21 nt, RNAi
uugucacgaagaucacuucuu

SEQ ID NO: 12860 - DNA, 21 bp, Homo sapiens
aaatgtgaagtactccagttc

SEQ ID NO: 12861 - RNA, 21 nt, RNAi
augugaaguacuccaguucuu

SEQ ID NO: 12862 - RNA, 21 nt, RNAi
uuuacacuucaugaggucaag

SEQ ID NO: 12863 - DNA, 21 bp, Homo sapiens
aatgtgaagtactccagttct

SEQ ID NO: 12864 - RNA, 21 nt, RNAi
ugugaaguacuccaguucuuu

SEQ ID NO: 12865 - RNA, 21 nt, RNAi
uuacacuucaugaggucaaga

SEQ ID NO: 12866 - DNA, 21 bp, Homo sapiens
aagtactccagttctcagcca

SEQ ID NO: 12867 - RNA, 21 nt, RNAi
guacuccaguucucagccauu

SEQ ID NO: 12868 - RNA, 21 nt, RNAi
uucaugaggucaagagucggu

SEQ ID NO: 12869 - DNA, 21 bp, Homo sapiens
aatagtcagttacttggcacc

SEQ ID NO: 12870 - RNA, 21 nt, RNAi
uagucaguuacuuggcaccuu

SEQ ID NO: 12871 - RNA, 21 nt, RNAi
uuaucagucaaugaaccgugg

SEQ ID NO: 12872 - DNA, 21 bp, Homo sapiens
aagaatgacacgattctttac

SEQ ID NO: 12873 - RNA, 21 nt, RNAi
gaaugacacgauucuuuacuu

SEQ ID NO: 12874 - RNA, 21 nt, RNAi
uucuuacugugcuaagaaaug

SEQ ID NO: 12875 - DNA, 21 bp, Homo sapiens
aatgacacgattctttaccaa

SEQ ID NO: 12876 - RNA, 21 nt, RNAi
ugacacgauucuuuaccaauu

SEQ ID NO: 12877 - RNA, 21 nt, RNAi
uuacugugcuaagaaaugguu

SEQ ID NO: 12878 - DNA, 21 bp, Homo sapiens
aaattggatgcagacaaatct

SEQ ID NO: 12879 - RNA, 21 nt, RNAi
auuggaugcagacaaaucuuu

SEQ ID NO: 12880 - RNA, 21 nt, RNAi
uuuaaccuacgucuguuuaga

SEQ ID NO: 12881 - DNA, 21 bp, Homo sapiens
aattggatgcagacaaatctt

SEQ ID NO: 12882 - RNA, 21 nt, RNAi
uuggaugcagacaaaucuuuu

SEQ ID NO: 12883 - RNA, 21 nt, RNAi
uuaaccuacgucuguuuagaa

SEQ ID NO: 12884 - DNA, 21 bp, Homo sapiens
aatcttatcaatgcctgaaag

SEQ ID NO: 12885 - RNA, 21 nt, RNAi
ucuuaucaaugccugaaaguu

SEQ ID NO: 12886 - RNA, 21 nt, RNAi
uuagaauaguuacggacuuuc

SEQ ID NO: 12887 - DNA, 21 bp, Homo sapiens
aatgcctgaaagagacttgtg

SEQ ID NO: 12888 - RNA, 21 nt, RNAi
ugccugaaagagacuuguguu

SEQ ID NO: 12889 - RNA, 21 nt, RNAi
uuacggacuuucucugaacac

SEQ ID NO: 12890 - DNA, 21 bp, Homo sapiens
aaagagacttgtgagaagttg

SEQ ID NO: 12891 - RNA, 21 nt, RNAi
agagacuugugagaaguuguu

SEQ ID NO: 12892 - RNA, 21 nt, RNAi
uuucucugaacacucuucaac

SEQ ID NO: 12893 - DNA, 21 bp, Homo sapiens
aagagacttgtgagaagttgg

SEQ ID NO: 12894 - RNA, 21 nt, RNAi
gagacuugugagaaguugguu

SEQ ID NO: 12895 - RNA, 21 nt, RNAi
uucucugaacacucuucaacc

SEQ ID NO: 12896 - DNA, 21 bp, Homo sapiens
aagttgtatgaatcaggttac

SEQ ID NO: 12897 - RNA, 21 nt, RNAi
guuguaugaaucagguuacuu

SEQ ID NO: 12898 - RNA, 21 nt, RNAi
uucaacauacuuaguccaaug

SEQ ID NO: 12899 - DNA, 21 bp, Homo sapiens
aacaactgataggagaaacaa

SEQ ID NO: 12900 - RNA, 21 nt, RNAi
caacugauaggagaaacaauu

SEQ ID NO: 12901 - RNA, 21 nt, RNAi
uuguugacuauccucuuuguu

SEQ ID NO: 12902 - DNA, 21 bp, Homo sapiens
aaatattggttgacttccggc

SEQ ID NO: 12903 - RNA, 21 nt, RNAi
auauugguugacuuccggcuu

SEQ ID NO: 12904 - RNA, 21 nt, RNAi
uuuauaaccaacugaaggccg

SEQ ID NO: 12905 - DNA, 21 bp, Homo sapiens
aatattggttgacttccggct

SEQ ID NO: 12906 - RNA, 21 nt, RNAi
uauugguugacuuccggcuuu

SEQ ID NO: 12907 - RNA, 21 nt, RNAi
uuauaaccaacugaaggccga

SEQ ID NO: 12908 - DNA, 21 bp, Homo sapiens
aagagacacttcctgaagatt

SEQ ID NO: 12909 - RNA, 21 nt, RNAi
gagacacuuccugaagauuuu

SEQ ID NO: 12910 - RNA, 21 nt, RNAi
uucucugugaaggacuucuaa

SEQ ID NO: 12911 - DNA, 21 bp, Homo sapiens
aagctgattgatattgtgagc

SEQ ID NO: 12912 - RNA, 21 nt, RNAi
gcugauugauauugugagcuu

SEQ ID NO: 12913 - RNA, 21 nt, RNAi
uucgacuaacuauaacacucg

SEQ ID NO: 12914 - DNA, 21 bp, Homo sapiens
aaggtttggcttcctgccaca

SEQ ID NO: 12915 - RNA, 21 nt, RNAi
gguuuggcuuccugccacauu

SEQ ID NO: 12916 - RNA, 21 nt, RNAi
uuccaaaccgaaggacggugu

SEQ ID NO: 12917 - DNA, 21 bp, Homo sapiens
aatcctggtgaatatagtgct

SEQ ID NO: 12918 - RNA, 21 nt, RNAi
uccuggugaauauagugcuuu

SEQ ID NO: 12919 - RNA, 21 nt, RNAi
uuaggaccacuuauaucacga

SEQ ID NO: 12920 - DNA, 21 bp, Homo sapiens
aatatagtgctgctatgttga

SEQ ID NO: 12921 - RNA, 21 nt, RNAi
uauagugcugcuauguugauu

SEQ ID NO: 12922 - RNA, 21 nt, RNAi
uuauaucacgacgauacaacu

SEQ ID NO: 12923 - DNA, 21 bp, Homo sapiens
aagattatcctgtcctgcaaa

SEQ ID NO: 12924 - RNA, 21 nt, RNAi
gauuauccuguccugcaaauu

SEQ ID NO: 12925 - RNA, 21 nt, RNAi
uucuaauaggacaggacguuu

SEQ ID NO: 12926 - DNA, 21 bp, Homo sapiens
aaactgcaaatagtagttcct

SEQ ID NO: 12927 - RNA, 21 nt, RNAi
acugcaaauaguaguuccuuu

SEQ ID NO: 12928 - RNA, 21 nt, RNAi
uuugacguuuaucaucaagga

SEQ ID NO: 12929 - DNA, 21 bp, Homo sapiens
aactgcaaatagtagttcctg

SEQ ID NO: 12930 - RNA, 21 nt, RNAi
cugcaaauaguaguuccuguu

SEQ ID NO: 12931 - RNA, 21 nt, RNAi
uugacguuuaucaucaaggac

SEQ ID NO: 12932 - DNA, 21 bp, Homo sapiens
aaatagtagttcctgaagtgt

SEQ ID NO: 12933 - RNA, 21 nt, RNAi
auaguaguuccugaaguguuu

SEQ ID NO: 12934 - RNA, 21 nt, RNAi
uuuaucaucaaggacuucaca

SEQ ID NO: 12935 - DNA, 21 bp, Homo sapiens
aatagtagttcctgaagtgtt

SEQ ID NO: 12936 - RNA, 21 nt, RNAi
uaguaguuccugaaguguuuu

SEQ ID NO: 12937 - RNA, 21 nt, RNAi
uuaucaucaaggacuucacaa

SEQ ID NO: 12938 - DNA, 21 bp, Homo sapiens
aatttgaaactcatctggtgg

SEQ ID NO: 12939 - RNA, 21 nt, RNAi
uuugaaacucaucuggugguu

SEQ ID NO: 12940 - RNA, 21 nt, RNAi
uuaaacuuugaguagaccacc

SEQ ID NO: 12941 - DNA, 21 bp, Homo sapiens
aaactcatctggtggaaacca

SEQ ID NO: 12942 - RNA, 21 nt, RNAi
acucaucugguggaaaccauu

SEQ ID NO: 12943 - RNA, 21 nt, RNAi
uuugaguagaccaccuuuggu

SEQ ID NO: 12944 - DNA, 21 bp, Homo sapiens
aactcatctggtggaaaccaa

SEQ ID NO: 12945 - RNA, 21 nt, RNAi
cucaucugguggaaaccaauu

SEQ ID NO: 12946 - RNA, 21 nt, RNAi
uugaguagaccaccuuugguu

SEQ ID NO: 12947 - DNA, 21 bp, Homo sapiens
cagtcgttcgccggaaagcat

SEQ ID NO: 12948 - RNA, 21 nt, RNAi
gucguucgccggaaagcauuu

SEQ ID NO: 12949 - RNA, 21 nt, RNAi
uucagcaagcggccuuucgua

SEQ ID NO: 12950 - DNA, 21 bp, Homo sapiens
cacctcatcataacaacaatt

SEQ ID NO: 12951 - RNA, 21 nt, RNAi
ccucaucauaacaacaauuuu

SEQ ID NO: 12952 - RNA, 21 nt, RNAi
uuggaguaguauuguuguuaa

SEQ ID NO: 12953 - DNA, 21 bp, Homo sapiens
cagaatttcaaccttcggtgt

SEQ ID NO: 12954 - RNA, 21 nt, RNAi
gaauuucaaccuucgguguuu

SEQ ID NO: 12955 - RNA, 21 nt, RNAi
uucuuaaaguuggaagccaca

SEQ ID NO: 12956 - DNA, 21 bp, Homo sapiens
caacttgctgtgaatagagta

SEQ ID NO: 12957 - RNA, 21 nt, RNAi
acuugcugugaauagaguauu

SEQ ID NO: 12958 - RNA, 21 nt, RNAi
uuugaacgacacuuaucucau

SEQ ID NO: 12959 - DNA, 21 bp, Homo sapiens
cagtcgcagtgaagattgtag

SEQ ID NO: 12960 - RNA, 21 nt, RNAi
gucgcagugaagauuguaguu

SEQ ID NO: 12961 - RNA, 21 nt, RNAi
uucagcgucacuucuaacauc

SEQ ID NO: 12962 - DNA, 21 bp, Homo sapiens
cagtgaagattgtagatatga

SEQ ID NO: 12963 - RNA, 21 nt, RNAi
gugaagauuguagauaugauu

SEQ ID NO: 12964 - RNA, 21 nt, RNAi
uucacuucuaacaucuauacu

SEQ ID NO: 12965 - DNA, 21 bp, Homo sapiens
cacaggagagaaggcaatatc

SEQ ID NO: 12966 - RNA, 21 nt, RNAi
caggagagaaggcaauaucuu

SEQ ID NO: 12967 - RNA, 21 nt, RNAi
uuguccucucuuccguuauag

SEQ ID NO: 12968 - DNA, 21 bp, Homo sapiens
caggagagaaggcaatatcca

SEQ ID NO: 12969 - RNA, 21 nt, RNAi
ggagagaaggcaauauccauu

SEQ ID NO: 12970 - RNA, 21 nt, RNAi
uuccucucuuccguuauaggu

SEQ ID NO: 12971 - DNA, 21 bp, Homo sapiens
cagaatagagccagacatagg

SEQ ID NO: 12972 - RNA, 21 nt, RNAi
gaauagagccagacauagguu

SEQ ID NO: 12973 - RNA, 21 nt, RNAi
uucuuaucucggucuguaucc

SEQ ID NO: 12974 - DNA, 21 bp, Homo sapiens
cagacataggcatgcctgaac

SEQ ID NO: 12975 - RNA, 21 nt, RNAi
gacauaggcaugccugaacuu

SEQ ID NO: 12976 - RNA, 21 nt, RNAi
uucuguauccguacggacuug

SEQ ID NO: 12977 - DNA, 21 bp, Homo sapiens
cataggcatgcctgaaccaga

SEQ ID NO: 12978 - RNA, 21 nt, RNAi
uaggcaugccugaaccagauu

SEQ ID NO: 12979 - RNA, 21 nt, RNAi
uuauccguacggacuuggucu

SEQ ID NO: 12980 - DNA, 21 bp, Homo sapiens
catgcctgaaccagatgctca

SEQ ID NO: 12981 - RNA, 21 nt, RNAi
ugccugaaccagaugcucauu

SEQ ID NO: 12982 - RNA, 21 nt, RNAi
uuacggacuuggucuacgagu

SEQ ID NO: 12983 - DNA, 21 bp, Homo sapiens
cagatgctcagagattcttcc

SEQ ID NO: 12984 - RNA, 21 nt, RNAi
gaugcucagagauucuuccuu

SEQ ID NO: 12985 - RNA, 21 nt, RNAi
uucuacgagucucuaagaagg

SEQ ID NO: 12986 - DNA, 21 bp, Homo sapiens
cagagattcttccatcaactc

SEQ ID NO: 12987 - RNA, 21 nt, RNAi
gagauucuuccaucaacucuu

SEQ ID NO: 12988 - RNA, 21 nt, RNAi
uucucuaagaagguaguugag

SEQ ID NO: 12989 - DNA, 21 bp, Homo sapiens
catggtattggaataactcac

SEQ ID NO: 12990 - RNA, 21 nt, RNAi
ugguauuggaauaacucacuu

SEQ ID NO: 12991 - RNA, 21 nt, RNAi
uuaccauaaccuuauugagug

SEQ ID NO: 12992 - DNA, 21 bp, Homo sapiens
cagactttggcttggcaacag

SEQ ID NO: 12993 - RNA, 21 nt, RNAi
gacuuuggcuuggcaacaguu

SEQ ID NO: 12994 - RNA, 21 nt, RNAi
uucugaaaccgaaccguuguc

SEQ ID NO: 12995 - DNA, 21 bp, Homo sapiens
caagatgtgtggtactttacc

SEQ ID NO: 12996 - RNA, 21 nt, RNAi
agaugugugguacuuuaccuu

SEQ ID NO: 12997 - RNA, 21 nt, RNAi
uuucuacacaccaugaaaugg

SEQ ID NO: 12998 - DNA, 21 bp, Homo sapiens
catatgttgctccagaacttc

SEQ ID NO: 12999 - RNA, 21 nt, RNAi
uauguugcuccagaacuucuu

SEQ ID NO: 13000 - RNA, 21 nt, RNAi
uuauacaacgaggucuugaag

SEQ ID NO: 13001 - DNA, 21 bp, Homo sapiens
cagaacttctgaagagaagag

SEQ ID NO: 13002 - RNA, 21 nt, RNAi
gaacuucugaagagaagaguu

SEQ ID NO: 13003 - RNA, 21 nt, RNAi
uucuugaagacuucucuucuc

SEQ ID NO: 13004 - DNA, 21 bp, Homo sapiens
catgcagaaccagttgatgtt

SEQ ID NO: 13005 - RNA, 21 nt, RNAi
ugcagaaccaguugauguuuu

SEQ ID NO: 13006 - RNA, 21 nt, RNAi
uuacgucuuggucaacuacaa

SEQ ID NO: 13007 - DNA, 21 bp, Homo sapiens
cagaaccagttgatgtttggt

SEQ ID NO: 13008 - RNA, 21 nt, RNAi
gaaccaguugauguuugguuu

SEQ ID NO: 13009 - RNA, 21 nt, RNAi
uucuuggucaacuacaaacca

SEQ ID NO: 13010 - DNA, 21 bp, Homo sapiens
cagttgatgtttggtcctgtg

SEQ ID NO: 13011 - RNA, 21 nt, RNAi
guugauguuugguccuguguu

SEQ ID NO: 13012 - RNA, 21 nt, RNAi
uucaacuacaaaccaggacac

SEQ ID NO: 13013 - DNA, 21 bp, Homo sapiens
caatgctcgctggagaattgc

SEQ ID NO: 13014 - RNA, 21 nt, RNAi
augcucgcuggagaauugcuu

SEQ ID NO: 13015 - RNA, 21 nt, RNAi
uuuacgagcgaccucuuaacg

SEQ ID NO: 13016 - DNA, 21 bp, Homo sapiens
cagtgacagctgtcaggagta

SEQ ID NO: 13017 - RNA, 21 nt, RNAi
gugacagcugucaggaguauu

SEQ ID NO: 13018 - RNA, 21 nt, RNAi
uucacugucgacaguccucau

SEQ ID NO: 13019 - DNA, 21 bp, Homo sapiens
cagctgtcaggagtattctga

SEQ ID NO: 13020 - RNA, 21 nt, RNAi
gcugucaggaguauucugauu

SEQ ID NO: 13021 - RNA, 21 nt, RNAi
uucgacaguccucauaagacu

SEQ ID NO: 13022 - DNA, 21 bp, Homo sapiens
caggagtattctgactggaaa

SEQ ID NO: 13023 - RNA, 21 nt, RNAi
ggaguauucugacuggaaauu

SEQ ID NO: 13024 - RNA, 21 nt, RNAi
uuccucauaagacugaccuuu

SEQ ID NO: 13025 - DNA, 21 bp, Homo sapiens
catcagcaagaattaccattc

SEQ ID NO: 13026 - RNA, 21 nt, RNAi
ucagcaagaauuaccauucuu

SEQ ID NO: 13027 - RNA, 21 nt, RNAi
uuagucguucuuaaugguaag

SEQ ID NO: 13028 - DNA, 21 bp, Homo sapiens
cagcaagaattaccattccag

SEQ ID NO: 13029 - RNA, 21 nt, RNAi
gcaagaauuaccauuccaguu

SEQ ID NO: 13030 - RNA, 21 nt, RNAi
uucguucuuaaugguaagguc

SEQ ID NO: 13031 - DNA, 21 bp, Homo sapiens
caagaattaccattccagaca

SEQ ID NO: 13032 - RNA, 21 nt, RNAi
agaauuaccauuccagacauu

SEQ ID NO: 13033 - RNA, 21 nt, RNAi
uuucuuaaugguaaggucugu

SEQ ID NO: 13034 - DNA, 21 bp, Homo sapiens
cacttcaggtggtgtgtcaga

SEQ ID NO: 13035 - RNA, 21 nt, RNAi
cuucagguggugugucagauu

SEQ ID NO: 13036 - RNA, 21 nt, RNAi
uugaaguccaccacacagucu

SEQ ID NO: 13037 - DNA, 21 bp, Homo sapiens
caggtggtgtgtcagagtctc

SEQ ID NO: 13038 - RNA, 21 nt, RNAi
gguggugugucagagucucuu

SEQ ID NO: 13039 - RNA, 21 nt, RNAi
uuccaccacacagucucagag

SEQ ID NO: 13040 - DNA, 21 bp, Homo sapiens
cacattcaatccaatttggac

SEQ ID NO: 13041 - RNA, 21 nt, RNAi
cauucaauccaauuuggacuu

SEQ ID NO: 13042 - RNA, 21 nt, RNAi
uuguaaguuagguuaaaccug

SEQ ID NO: 13043 - DNA, 21 bp, Homo sapiens
cattcaatccaatttggactt

SEQ ID NO: 13044 - RNA, 21 nt, RNAi
uucaauccaauuuggacuuuu

SEQ ID NO: 13045 - RNA, 21 nt, RNAi
uuaaguuagguuaaaccugaa

SEQ ID NO: 13046 - DNA, 21 bp, Homo sapiens
caatccaatttggacttctct

SEQ ID NO: 13047 - RNA, 21 nt, RNAi
auccaauuuggacuucucuuu

SEQ ID NO: 13048 - RNA, 21 nt, RNAi
uuuagguuaaaccugaagaga

SEQ ID NO: 13049 - DNA, 21 bp, Homo sapiens
caatttggacttctctccagt

SEQ ID NO: 13050 - RNA, 21 nt, RNAi
auuuggacuucucuccaguuu

SEQ ID NO: 13051 - RNA, 21 nt, RNAi
uuuaaaccugaagagagguca

SEQ ID NO: 13052 - DNA, 21 bp, Homo sapiens
cagtaaacagtgcttctagtg

SEQ ID NO: 13053 - RNA, 21 nt, RNAi
guaaacagugcuucuaguguu

SEQ ID NO: 13054 - RNA, 21 nt, RNAi
uucauuugucacgaagaucac

SEQ ID NO: 13055 - DNA, 21 bp, Homo sapiens
cattgataaattggtacaagg

SEQ ID NO: 13056 - RNA, 21 nt, RNAi
uugauaaauugguacaagguu

SEQ ID NO: 13057 - RNA, 21 nt, RNAi
uuaacuauuuaaccauguucc

SEQ ID NO: 13058 - DNA, 21 bp, Homo sapiens
cacatgtcctgatcatatgct

SEQ ID NO: 13059 - RNA, 21 nt, RNAi
cauguccugaucauaugcuuu

SEQ ID NO: 13060 - RNA, 21 nt, RNAi
uuguacaggacuaguauacga

SEQ ID NO: 13061 - DNA, 21 bp, Homo sapiens
catgtcctgatcatatgcttt

SEQ ID NO: 13062 - RNA, 21 nt, RNAi
uguccugaucauaugcuuuuu

SEQ ID NO: 13063 - RNA, 21 nt, RNAi
uuacaggacuaguauacgaaa

SEQ ID NO: 13064 - DNA, 21 bp, Homo sapiens
cacgattctttaccaaattgg

SEQ ID NO: 13065 - RNA, 21 nt, RNAi
cgauucuuuaccaaauugguu

SEQ ID NO: 13066 - RNA, 21 nt, RNAi
uugcuaagaaaugguuuaacc

SEQ ID NO: 13067 - DNA, 21 bp, Homo sapiens
caaattggatgcagacaaatc

SEQ ID NO: 13068 - RNA, 21 nt, RNAi
aauuggaugcagacaaaucuu

SEQ ID NO: 13069 - RNA, 21 nt, RNAi
uuuuaaccuacgucuguuuag

SEQ ID NO: 13070 - DNA, 21 bp, Homo sapiens
cagacaaatcttatcaatgcc

SEQ ID NO: 13071 - RNA, 21 nt, RNAi
gacaaaucuuaucaaugccuu

SEQ ID NO: 13072 - RNA, 21 nt, RNAi
uucuguuuagaauaguuacgg

SEQ ID NO: 13073 - DNA, 21 bp, Homo sapiens
caaatcttatcaatgcctgaa

SEQ ID NO: 13074 - RNA, 21 nt, RNAi
aaucuuaucaaugccugaauu

SEQ ID NO: 13075 - RNA, 21 nt, RNAi
uuuuagaauaguuacggacuu

SEQ ID NO: 13076 - DNA, 21 bp, Homo sapiens
caatgcctgaaagagacttgt

SEQ ID NO: 13077 - RNA, 21 nt, RNAi
augccugaaagagacuuguuu

SEQ ID NO: 13078 - RNA, 21 nt, RNAi
uuuacggacuuucucugaaca

SEQ ID NO: 13079 - DNA, 21 bp, Homo sapiens
caggttactatatcaacaact

SEQ ID NO: 13080 - RNA, 21 nt, RNAi
gguuacuauaucaacaacuuu

SEQ ID NO: 13081 - RNA, 21 nt, RNAi
uuccaaugauauaguuguuga

SEQ ID NO: 13082 - DNA, 21 bp, Homo sapiens
caacaactgataggagaaaca

SEQ ID NO: 13083 - RNA, 21 nt, RNAi
acaacugauaggagaaacauu

SEQ ID NO: 13084 - RNA, 21 nt, RNAi
uuuguugacuauccucuuugu

SEQ ID NO: 13085 - DNA, 21 bp, Homo sapiens
caactgataggagaaacaata

SEQ ID NO: 13086 - RNA, 21 nt, RNAi
acugauaggagaaacaauauu

SEQ ID NO: 13087 - RNA, 21 nt, RNAi
uuugacuauccucuuuguuau

SEQ ID NO: 13088 - DNA, 21 bp, Homo sapiens
caagagacacttcctgaagat

SEQ ID NO: 13089 - RNA, 21 nt, RNAi
agagacacuuccugaagauuu

SEQ ID NO: 13090 - RNA, 21 nt, RNAi
uuucucugugaaggacuucua

SEQ ID NO: 13091 - DNA, 21 bp, Homo sapiens
cagccagaaggtttggcttcc

SEQ ID NO: 13092 - RNA, 21 nt, RNAi
gccagaagguuuggcuuccuu

SEQ ID NO: 13093 - RNA, 21 nt, RNAi
uucggucuuccaaaccgaagg

SEQ ID NO: 13094 - DNA, 21 bp, Homo sapiens
cagaaggtttggcttcctgcc

SEQ ID NO: 13095 - RNA, 21 nt, RNAi
gaagguuuggcuuccugccuu

SEQ ID NO: 13096 - RNA, 21 nt, RNAi
uucuuccaaaccgaaggacgg

SEQ ID NO: 13097 - DNA, 21 bp, Homo sapiens
cacatgatcggaccatcggct

SEQ ID NO: 13098 - RNA, 21 nt, RNAi
caugaucggaccaucggcuuu

SEQ ID NO: 13099 - RNA, 21 nt, RNAi
uuguacuagccugguagccga

SEQ ID NO: 13100 - DNA, 21 bp, Homo sapiens
catgatcggaccatcggctct

SEQ ID NO: 13101 - RNA, 21 nt, RNAi
ugaucggaccaucggcucuuu

SEQ ID NO: 13102 - RNA, 21 nt, RNAi
uuacuagccugguagccgaga

SEQ ID NO: 13103 - DNA, 21 bp, Homo sapiens
cattattcttcctagagaaga

SEQ ID NO: 13104 - RNA, 21 nt, RNAi
uuauucuuccuagagaagauu

SEQ ID NO: 13105 - RNA, 21 nt, RNAi
uuaauaagaaggaucucuucu

SEQ ID NO: 13106 - DNA, 21 bp, Homo sapiens
caaactgcaaatagtagttcc

SEQ ID NO: 13107 - RNA, 21 nt, RNAi
aacugcaaauaguaguuccuu

SEQ ID NO: 13108 - RNA, 21 nt, RNAi
uuuugacguuuaucaucaagg

SEQ ID NO: 13109 - DNA, 21 bp, Homo sapiens
caaatagtagttcctgaagtg

SEQ ID NO: 13110 - RNA, 21 nt, RNAi
aauaguaguuccugaaguguu

SEQ ID NO: 13111 - RNA, 21 nt, RNAi
uuuuaucaucaaggacuucac

SEQ ID NO: 13112 - DNA, 21 bp, Homo sapiens
catgtgtgtttagtatctgaa

SEQ ID NO: 13113 - RNA, 21 nt, RNAi
uguguguuuaguaucugaauu

SEQ ID NO: 13114 - RNA, 21 nt, RNAi
uuacacacaaaucauagacuu

SEQ ID NO: 13115 - DNA, 21 bp, Homo sapiens
catctggtggaaaccaagttt

SEQ ID NO: 13116 - RNA, 21 nt, RNAi
ucugguggaaaccaaguuuuu

SEQ ID NO: 13117 - RNA, 21 nt, RNAi
uuagaccaccuuugguucaaa

SEQ ID NO: 13118 - DNA, 21 bp, Homo sapiens
gaatttcaaccttcggtgtgc

SEQ ID NO: 13119 - RNA, 21 nt, RNAi
auuucaaccuucggugugcuu

SEQ ID NO: 13120 - RNA, 21 nt, RNAi
uuuaaaguuggaagccacacg

SEQ ID NO: 13121 - DNA, 21 bp, Homo sapiens
gagtggcgattgtgatttaca

SEQ ID NO: 13122 - RNA, 21 nt, RNAi
guggcgauugugauuuacauu

SEQ ID NO: 13123 - RNA, 21 nt, RNAi
uucaccgcuaacacuaaaugu

SEQ ID NO: 13124 - DNA, 21 bp, Homo sapiens
gattgtgatttacacgacaaa

SEQ ID NO: 13125 - RNA, 21 nt, RNAi
uugugauuuacacgacaaauu

SEQ ID NO: 13126 - RNA, 21 nt, RNAi
uuaacacuaaaugugcuguuu

SEQ ID NO: 13127 - DNA, 21 bp, Homo sapiens
gaggtgctcggtggagtcatg

SEQ ID NO: 13128 - RNA, 21 nt, RNAi
ggugcucgguggagucauguu

SEQ ID NO: 13129 - RNA, 21 nt, RNAi
uuccacgagccaccucaguac

SEQ ID NO: 13130 - DNA, 21 bp, Homo sapiens
gagaaggtgcctatggagaag

SEQ ID NO: 13131 - RNA, 21 nt, RNAi
gaaggugccuauggagaaguu

SEQ ID NO: 13132 - RNA, 21 nt, RNAi
uucuuccacggauaccucuuc

SEQ ID NO: 13133 - DNA, 21 bp, Homo sapiens
gaaggtgcctatggagaagtt

SEQ ID NO: 13134 - RNA, 21 nt, RNAi
aggugccuauggagaaguuuu

SEQ ID NO: 13135 - RNA, 21 nt, RNAi
uuuccacggauaccucuucaa

SEQ ID NO: 13136 - DNA, 21 bp, Homo sapiens
gagaagttcaacttgctgtga

SEQ ID NO: 13137 - RNA, 21 nt, RNAi
gaaguucaacuugcugugauu

SEQ ID NO: 13138 - RNA, 21 nt, RNAi
uucuucaaguugaacgacacu

SEQ ID NO: 13139 - DNA, 21 bp, Homo sapiens
gaagttcaacttgctgtgaat

SEQ ID NO: 13140 - RNA, 21 nt, RNAi
aguucaacuugcugugaauuu

SEQ ID NO: 13141 - RNA, 21 nt, RNAi
uuucaaguugaacgacacuua

SEQ ID NO: 13142 - DNA, 21 bp, Homo sapiens
gaatagagtaactgaagaagc

SEQ ID NO: 13143 - RNA, 21 nt, RNAi
auagaguaacugaagaagcuu

SEQ ID NO: 13144 - RNA, 21 nt, RNAi
uuuaucucauugacuucuucg

SEQ ID NO: 13145 - DNA, 21 bp, Homo sapiens
gagtaactgaagaagcagtcg

SEQ ID NO: 13146 - RNA, 21 nt, RNAi
guaacugaagaagcagucguu

SEQ ID NO: 13147 - RNA, 21 nt, RNAi
uucauugacuucuucgucagc

SEQ ID NO: 13148 - DNA, 21 bp, Homo sapiens
gaagaagcagtcgcagtgaag

SEQ ID NO: 13149 - RNA, 21 nt, RNAi
agaagcagucgcagugaaguu

SEQ ID NO: 13150 - RNA, 21 nt, RNAi
uuucuucgucagcgucacuuc

SEQ ID NO: 13151 - DNA, 21 bp, Homo sapiens
gaagcagtcgcagtgaagatt

SEQ ID NO: 13152 - RNA, 21 nt, RNAi
agcagucgcagugaagauuuu

SEQ ID NO: 13153 - RNA, 21 nt, RNAi
uuucgucagcgucacuucuaa

SEQ ID NO: 13154 - DNA, 21 bp, Homo sapiens
gaagattgtagatatgaagcg

SEQ ID NO: 13155 - RNA, 21 nt, RNAi
agauuguagauaugaagcguu

SEQ ID NO: 13156 - RNA, 21 nt, RNAi
uuucuaacaucuauacuucgc

SEQ ID NO: 13157 - DNA, 21 bp, Homo sapiens
gattgtagatatgaagcgtgc

SEQ ID NO: 13158 - RNA, 21 nt, RNAi
uuguagauaugaagcgugcuu

SEQ ID NO: 13159 - RNA, 21 nt, RNAi
uuaacaucuauacuucgcacg

SEQ ID NO: 13160 - DNA, 21 bp, Homo sapiens
gatatgaagcgtgccgtagac

SEQ ID NO: 13161 - RNA, 21 nt, RNAi
uaugaagcgugccguagacuu

SEQ ID NO: 13162 - RNA, 21 nt, RNAi
uuauacuucgcacggcaucug

SEQ ID NO: 13163 - DNA, 21 bp, Homo sapiens
gaagcgtgccgtagactgtcc

SEQ ID NO: 13164 - RNA, 21 nt, RNAi
agcgugccguagacuguccuu

SEQ ID NO: 13165 - RNA, 21 nt, RNAi
uuucgcacggcaucugacagg

SEQ ID NO: 13166 - DNA, 21 bp, Homo sapiens
gagagaaggcaatatccaata

SEQ ID NO: 13167 - RNA, 21 nt, RNAi
gagaaggcaauauccaauauu

SEQ ID NO: 13168 - RNA, 21 nt, RNAi
uucucuuccguuauagguuau

SEQ ID NO: 13169 - DNA, 21 bp, Homo sapiens
gagaaggcaatatccaatatt

SEQ ID NO: 13170 - RNA, 21 nt, RNAi
gaaggcaauauccaauauuuu

SEQ ID NO: 13171 - RNA, 21 nt, RNAi
uucuuccguuauagguuauaa

SEQ ID NO: 13172 - DNA, 21 bp, Homo sapiens
gagtactgtagtggaggagag

SEQ ID NO: 13173 - RNA, 21 nt, RNAi
guacuguaguggaggagaguu

SEQ ID NO: 13174 - RNA, 21 nt, RNAi
uucaugacaucaccuccucuc

SEQ ID NO: 13175 - DNA, 21 bp, Homo sapiens
gacagaatagagccagacata

SEQ ID NO: 13176 - RNA, 21 nt, RNAi
cagaauagagccagacauauu

SEQ ID NO: 13177 - RNA, 21 nt, RNAi
uugucuuaucucggucuguau

SEQ ID NO: 13178 - DNA, 21 bp, Homo sapiens
gaatagagccagacataggca

SEQ ID NO: 13179 - RNA, 21 nt, RNAi
auagagccagacauaggcauu

SEQ ID NO: 13180 - RNA, 21 nt, RNAi
uuuaucucggucuguauccgu

SEQ ID NO: 13181 - DNA, 21 bp, Homo sapiens
gagccagacataggcatgcct

SEQ ID NO: 13182 - RNA, 21 nt, RNAi
gccagacauaggcaugccuuu

SEQ ID NO: 13183 - RNA, 21 nt, RNAi
uucggucuguauccguacgga

SEQ ID NO: 13184 - DNA, 21 bp, Homo sapiens
gacataggcatgcctgaacca

SEQ ID NO: 13185 - RNA, 21 nt, RNAi
cauaggcaugccugaaccauu

SEQ ID NO: 13186 - RNA, 21 nt, RNAi
uuguauccguacggacuuggu

SEQ ID NO: 13187 - DNA, 21 bp, Homo sapiens
gaaccagatgctcagagattc

SEQ ID NO: 13188 - RNA, 21 nt, RNAi
accagaugcucagagauucuu

SEQ ID NO: 13189 - RNA, 21 nt, RNAi
uuuggucuacgagucucuaag

SEQ ID NO: 13190 - DNA, 21 bp, Homo sapiens
gatgctcagagattcttccat

SEQ ID NO: 13191 - RNA, 21 nt, RNAi
ugcucagagauucuuccauuu

SEQ ID NO: 13192 - RNA, 21 nt, RNAi
uuacgagucucuaagaaggua

SEQ ID NO: 13193 - DNA, 21 bp, Homo sapiens
gagattcttccatcaactcat

SEQ ID NO: 13194 - RNA, 21 nt, RNAi
gauucuuccaucaacucauuu

SEQ ID NO: 13195 - RNA, 21 nt, RNAi
uucuaagaagguaguugagua

SEQ ID NO: 13196 - DNA, 21 bp, Homo sapiens
gattcttccatcaactcatgg

SEQ ID NO: 13197 - RNA, 21 nt, RNAi
uucuuccaucaacucaugguu

SEQ ID NO: 13198 - RNA, 21 nt, RNAi
uuaagaagguaguugaguacc

SEQ ID NO: 13199 - DNA, 21 bp, Homo sapiens
gactttggcttggcaacagta

SEQ ID NO: 13200 - RNA, 21 nt, RNAi
cuuuggcuuggcaacaguauu

SEQ ID NO: 13201 - RNA, 21 nt, RNAi
uugaaaccgaaccguugucau

SEQ ID NO: 13202 - DNA, 21 bp, Homo sapiens
gagcgtttgttgaacaagatg

SEQ ID NO: 13203 - RNA, 21 nt, RNAi
gcguuuguugaacaagauguu

SEQ ID NO: 13204 - RNA, 21 nt, RNAi
uucgcaaacaacuuguucuac

SEQ ID NO: 13205 - DNA, 21 bp, Homo sapiens
gaacaagatgtgtggtacttt

SEQ ID NO: 13206 - RNA, 21 nt, RNAi
acaagaugugugguacuuuuu

SEQ ID NO: 13207 - RNA, 21 nt, RNAi
uuuguucuacacaccaugaaa

SEQ ID NO: 13208 - DNA, 21 bp, Homo sapiens
gatgtgtggtactttaccata

SEQ ID NO: 13209 - RNA, 21 nt, RNAi
ugugugguacuuuaccauauu

SEQ ID NO: 13210 - RNA, 21 nt, RNAi
uuacacaccaugaaaugguau

SEQ ID NO: 13211 - DNA, 21 bp, Homo sapiens
gaacttctgaagagaagagaa

SEQ ID NO: 13212 - RNA, 21 nt, RNAi
acuucugaagagaagagaauu

SEQ ID NO: 13213 - RNA, 21 nt, RNAi
uuugaagacuucucuucucuu

SEQ ID NO: 13214 - DNA, 21 bp, Homo sapiens
gaagagaagagaatttcatgc

SEQ ID NO: 13215 - RNA, 21 nt, RNAi
agagaagagaauuucaugcuu

SEQ ID NO: 13216 - RNA, 21 nt, RNAi
uuucucuucucuuaaaguacg

SEQ ID NO: 13217 - DNA, 21 bp, Homo sapiens
gagaagagaatttcatgcaga

SEQ ID NO: 13218 - RNA, 21 nt, RNAi
gaagagaauuucaugcagauu

SEQ ID NO: 13219 - RNA, 21 nt, RNAi
uucuucucuuaaaguacgucu

SEQ ID NO: 13220 - DNA, 21 bp, Homo sapiens
gaagagaatttcatgcagaac

SEQ ID NO: 13221 - RNA, 21 nt, RNAi
agagaauuucaugcagaacuu

SEQ ID NO: 13222 - RNA, 21 nt, RNAi
uuucucuuaaaguacgucuug

SEQ ID NO: 13223 - DNA, 21 bp, Homo sapiens
gagaatttcatgcagaaccag

SEQ ID NO: 13224 - RNA, 21 nt, RNAi
gaauuucaugcagaaccaguu

SEQ ID NO: 13225 - RNA, 21 nt, RNAi
uucuuaaaguacgucuugguc

SEQ ID NO: 13226 - DNA, 21 bp, Homo sapiens
gaatttcatgcagaaccagtt

SEQ ID NO: 13227 - RNA, 21 nt, RNAi
auuucaugcagaaccaguuuu

SEQ ID NO: 13228 - RNA, 21 nt, RNAi
uuuaaaguacgucuuggucaa

SEQ ID NO: 13229 - DNA, 21 bp, Homo sapiens
gaaccagttgatgtttggtcc

SEQ ID NO: 13230 - RNA, 21 nt, RNAi
accaguugauguuugguccuu

SEQ ID NO: 13231 - RNA, 21 nt, RNAi
uuuggucaacuacaaaccagg

SEQ ID NO: 13232 - DNA, 21 bp, Homo sapiens
gatgtttggtcctgtggaata

SEQ ID NO: 13233 - RNA, 21 nt, RNAi
uguuugguccuguggaauauu

SEQ ID NO: 13234 - RNA, 21 nt, RNAi
uuacaaaccaggacaccuuau

SEQ ID NO: 13235 - DNA, 21 bp, Homo sapiens
gaatagtacttactgcaatgc

SEQ ID NO: 13236 - RNA, 21 nt, RNAi
auaguacuuacugcaaugcuu

SEQ ID NO: 13237 - RNA, 21 nt, RNAi
uuuaucaugaaugacguuacg

SEQ ID NO: 13238 - DNA, 21 bp, Homo sapiens
gacagctgtcaggagtattct

SEQ ID NO: 13239 - RNA, 21 nt, RNAi
cagcugucaggaguauucuuu

SEQ ID NO: 13240 - RNA, 21 nt, RNAi
uugucgacaguccucauaaga

SEQ ID NO: 13241 - DNA, 21 bp, Homo sapiens
gagtattctgactggaaagaa

SEQ ID NO: 13242 - RNA, 21 nt, RNAi
guauucugacuggaaagaauu

SEQ ID NO: 13243 - RNA, 21 nt, RNAi
uucauaagacugaccuuucuu

SEQ ID NO: 13244 - DNA, 21 bp, Homo sapiens
gattctgctcctctagctctg

SEQ ID NO: 13245 - RNA, 21 nt, RNAi
uucugcuccucuagcucuguu

SEQ ID NO: 13246 - RNA, 21 nt, RNAi
uuaagacgaggagaucgagac

SEQ ID NO: 13247 - DNA, 21 bp, Homo sapiens
gagaatccatcagcaagaatt

SEQ ID NO: 13248 - RNA, 21 nt, RNAi
gaauccaucagcaagaauuuu

SEQ ID NO: 13249 - RNA, 21 nt, RNAi
uucuuagguagucguucuuaa

SEQ ID NO: 13250 - DNA, 21 bp, Homo sapiens
gaatccatcagcaagaattac

SEQ ID NO: 13251 - RNA, 21 nt, RNAi
auccaucagcaagaauuacuu

SEQ ID NO: 13252 - RNA, 21 nt, RNAi
uuuagguagucguucuuaaug

SEQ ID NO: 13253 - DNA, 21 bp, Homo sapiens
gaattaccattccagacatca

SEQ ID NO: 13254 - RNA, 21 nt, RNAi
auuaccauuccagacaucauu

SEQ ID NO: 13255 - RNA, 21 nt, RNAi
uuuaaugguaaggucuguagu

SEQ ID NO: 13256 - DNA, 21 bp, Homo sapiens
gagtcacttcaggtggtgtgt

SEQ ID NO: 13257 - RNA, 21 nt, RNAi
gucacuucaggugguguguuu

SEQ ID NO: 13258 - RNA, 21 nt, RNAi
uucagugaaguccaccacaca

SEQ ID NO: 13259 - DNA, 21 bp, Homo sapiens
gacttctctccagtaaacagt

SEQ ID NO: 13260 - RNA, 21 nt, RNAi
cuucucuccaguaaacaguuu

SEQ ID NO: 13261 - RNA, 21 nt, RNAi
uugaagagaggucauuuguca

SEQ ID NO: 13262 - DNA, 21 bp, Homo sapiens
gaagtactccagttctcagcc

SEQ ID NO: 13263 - RNA, 21 nt, RNAi
aguacuccaguucucagccuu

SEQ ID NO: 13264 - RNA, 21 nt, RNAi
uuucaugaggucaagagucgg

SEQ ID NO: 13265 - DNA, 21 bp, Homo sapiens
gaatagtcagttacttggcac

SEQ ID NO: 13266 - RNA, 21 nt, RNAi
auagucaguuacuuggcacuu

SEQ ID NO: 13267 - RNA, 21 nt, RNAi
uuuaucagucaaugaaccgug

SEQ ID NO: 13268 - DNA, 21 bp, Homo sapiens
gaatgacacgattctttacca

SEQ ID NO: 13269 - RNA, 21 nt, RNAi
augacacgauucuuuaccauu

SEQ ID NO: 13270 - RNA, 21 nt, RNAi
uuuacugugcuaagaaauggu

SEQ ID NO: 13271 - DNA, 21 bp, Homo sapiens
gacacgattctttaccaaatt

SEQ ID NO: 13272 - RNA, 21 nt, RNAi
cacgauucuuuaccaaauuuu

SEQ ID NO: 13273 - RNA, 21 nt, RNAi
uugugcuaagaaaugguuuaa

SEQ ID NO: 13274 - DNA, 21 bp, Homo sapiens
gattctttaccaaattggatg

SEQ ID NO: 13275 - RNA, 21 nt, RNAi
uucuuuaccaaauuggauguu

SEQ ID NO: 13276 - RNA, 21 nt, RNAi
uuaagaaaugguuuaaccuac

SEQ ID NO: 13277 - DNA, 21 bp, Homo sapiens
gatgcagacaaatcttatcaa

SEQ ID NO: 13278 - RNA, 21 nt, RNAi
ugcagacaaaucuuaucaauu

SEQ ID NO: 13279 - RNA, 21 nt, RNAi
uuacgucuguuuagaauaguu

SEQ ID NO: 13280 - DNA, 21 bp, Homo sapiens
gacaaatcttatcaatgcctg

SEQ ID NO: 13281 - RNA, 21 nt, RNAi
caaaucuuaucaaugccuguu

SEQ ID NO: 13282 - RNA, 21 nt, RNAi
uuguuuagaauaguuacggac

SEQ ID NO: 13283 - DNA, 21 bp, Homo sapiens
gaaagagacttgtgagaagtt

SEQ ID NO: 13284 - RNA, 21 nt, RNAi
aagagacuugugagaaguuuu

SEQ ID NO: 13285 - RNA, 21 nt, RNAi
uuuucucugaacacucuucaa

SEQ ID NO: 13286 - DNA, 21 bp, Homo sapiens
gaatcaggttactatatcaac

SEQ ID NO: 13287 - RNA, 21 nt, RNAi
aucagguuacuauaucaacuu

SEQ ID NO: 13288 - RNA, 21 nt, RNAi
uuuaguccaaugauauaguug

SEQ ID NO: 13289 - DNA, 21 bp, Homo sapiens
gataggagaaacaataaactc

SEQ ID NO: 13290 - RNA, 21 nt, RNAi
uaggagaaacaauaaacucuu

SEQ ID NO: 13291 - RNA, 21 nt, RNAi
uuauccucuuuguuauuugag

SEQ ID NO: 13292 - DNA, 21 bp, Homo sapiens
gatggattggagttcaagaga

SEQ ID NO: 13293 - RNA, 21 nt, RNAi
uggauuggaguucaagagauu

SEQ ID NO: 13294 - RNA, 21 nt, RNAi
uuaccuaaccucaaguucucu

SEQ ID NO: 13295 - DNA, 21 bp, Homo sapiens
gattggagttcaagagacact

SEQ ID NO: 13296 - RNA, 21 nt, RNAi
uuggaguucaagagacacuuu

SEQ ID NO: 13297 - RNA, 21 nt, RNAi
uuaaccucaaguucucuguga

SEQ ID NO: 13298 - DNA, 21 bp, Homo sapiens
gagttcaagagacacttcctg

SEQ ID NO: 13299 - RNA, 21 nt, RNAi
guucaagagacacuuccuguu

SEQ ID NO: 13300 - RNA, 21 nt, RNAi
uucaaguucucugugaaggac

SEQ ID NO: 13301 - DNA, 21 bp, Homo sapiens
gagacacttcctgaagattaa

SEQ ID NO: 13302 - RNA, 21 nt, RNAi
gacacuuccugaagauuaauu

SEQ ID NO: 13303 - RNA, 21 nt, RNAi
uucugugaaggacuucuaauu

SEQ ID NO: 13304 - DNA, 21 bp, Homo sapiens
gacacttcctgaagattaaag

SEQ ID NO: 13305 - RNA, 21 nt, RNAi
cacuuccugaagauuaaaguu

SEQ ID NO: 13306 - RNA, 21 nt, RNAi
uugugaaggacuucuaauuuc

SEQ ID NO: 13307 - DNA, 21 bp, Homo sapiens
gaagctgattgatattgtgag

SEQ ID NO: 13308 - RNA, 21 nt, RNAi
agcugauugauauugugaguu

SEQ ID NO: 13309 - RNA, 21 nt, RNAi
uuucgacuaacuauaacacuc

SEQ ID NO: 13310 - DNA, 21 bp, Homo sapiens
gattgatattgtgagcagcca

SEQ ID NO: 13311 - RNA, 21 nt, RNAi
uugauauugugagcagccauu

SEQ ID NO: 13312 - RNA, 21 nt, RNAi
uuaacuauaacacucgucggu

SEQ ID NO: 13313 - DNA, 21 bp, Homo sapiens
gatattgtgagcagccagaag

SEQ ID NO: 13314 - RNA, 21 nt, RNAi
uauugugagcagccagaaguu

SEQ ID NO: 13315 - RNA, 21 nt, RNAi
uuauaacacucgucggucuuc

SEQ ID NO: 13316 - DNA, 21 bp, Homo sapiens
gagcagccagaaggtttggct

SEQ ID NO: 13317 - RNA, 21 nt, RNAi
gcagccagaagguuuggcuuu

SEQ ID NO: 13318 - RNA, 21 nt, RNAi
uucgucggucuuccaaaccga

SEQ ID NO: 13319 - DNA, 21 bp, Homo sapiens
gaaggtttggcttcctgccac

SEQ ID NO: 13320 - RNA, 21 nt, RNAi
agguuuggcuuccugccacuu

SEQ ID NO: 13321 - RNA, 21 nt, RNAi
uuuccaaaccgaaggacggug

SEQ ID NO: 13322 - DNA, 21 bp, Homo sapiens
gaatcctggtgaatatagtgc

SEQ ID NO: 13323 - RNA, 21 nt, RNAi
auccuggugaauauagugcuu

SEQ ID NO: 13324 - RNA, 21 nt, RNAi
uuuaggaccacuuauaucacg

SEQ ID NO: 13325 - DNA, 21 bp, Homo sapiens
gaatatagtgctgctatgttg

SEQ ID NO: 13326 - RNA, 21 nt, RNAi
auauagugcugcuauguuguu

SEQ ID NO: 13327 - RNA, 21 nt, RNAi
uuuauaucacgacgauacaac

SEQ ID NO: 13328 - DNA, 21 bp, Homo sapiens
gacattattcttcctagagaa

SEQ ID NO: 13329 - RNA, 21 nt, RNAi
cauuauucuuccuagagaauu

SEQ ID NO: 13330 - RNA, 21 nt, RNAi
uuguaauaagaaggaucucuu

SEQ ID NO: 13331 - DNA, 21 bp, Homo sapiens
gagaagattatcctgtcctgc

SEQ ID NO: 13332 - RNA, 21 nt, RNAi
gaagauuauccuguccugcuu

SEQ ID NO: 13333 - RNA, 21 nt, RNAi
uucuucuaauaggacaggacg

SEQ ID NO: 13334 - DNA, 21 bp, Homo sapiens
gaagattatcctgtcctgcaa

SEQ ID NO: 13335 - RNA, 21 nt, RNAi
agauuauccuguccugcaauu

SEQ ID NO: 13336 - RNA, 21 nt, RNAi
uuucuaauaggacaggacguu

SEQ ID NO: 13337 - DNA, 21 bp, Homo sapiens
gattatcctgtcctgcaaact

SEQ ID NO: 13338 - RNA, 21 nt, RNAi
uuauccuguccugcaaacuuu

SEQ ID NO: 13339 - RNA, 21 nt, RNAi
uuaauaggacaggacguuuga

SEQ ID NO: 13340 - DNA, 21 bp, Homo sapiens
gaatttgaaactcatctggtg

SEQ ID NO: 13341 - RNA, 21 nt, RNAi
auuugaaacucaucugguguu

SEQ ID NO: 13342 - RNA, 21 nt, RNAi
uuuaaacuuugaguagaccac

SEQ ID NO: 13343 - DNA, 21 bp, Homo sapiens
gaaactcatctggtggaaacc

SEQ ID NO: 13344 - RNA, 21 nt, RNAi
aacucaucugguggaaaccuu

SEQ ID NO: 13345 - RNA, 21 nt, RNAi
uuuugaguagaccaccuuugg

SEQ ID NO: 13346 - DNA, 21 bp, Homo sapiens
tatggagaagttcaacttgct

SEQ ID NO: 13347 - RNA, 21 nt, RNAi
uggagaaguucaacuugcuuu

SEQ ID NO: 13348 - RNA, 21 nt, RNAi
uuaccucuucaaguugaacga

SEQ ID NO: 13349 - DNA, 21 bp, Homo sapiens
tagagtaactgaagaagcagt

SEQ ID NO: 13350 - RNA, 21 nt, RNAi
gaguaacugaagaagcaguuu

SEQ ID NO: 13351 - RNA, 21 nt, RNAi
uucucauugacuucuucguca

SEQ ID NO: 13352 - DNA, 21 bp, Homo sapiens
taactgaagaagcagtcgcag

SEQ ID NO: 13353 - RNA, 21 nt, RNAi
acugaagaagcagucgcaguu

SEQ ID NO: 13354 - RNA, 21 nt, RNAi
uuugacuucuucgucagcguc

SEQ ID NO: 13355 - DNA, 21 bp, Homo sapiens
tagatatgaagcgtgccgtag

SEQ ID NO: 13356 - RNA, 21 nt, RNAi
gauaugaagcgugccguaguu

SEQ ID NO: 13357 - RNA, 21 nt, RNAi
uucuauacuucgcacggcauc

SEQ ID NO: 13358 - DNA, 21 bp, Homo sapiens
tatgaagcgtgccgtagactg

SEQ ID NO: 13359 - RNA, 21 nt, RNAi
ugaagcgugccguagacuguu

SEQ ID NO: 13360 - RNA, 21 nt, RNAi
uuacuucgcacggcaucugac

SEQ ID NO: 13361 - DNA, 21 bp, Homo sapiens
tatggtcacaggagagaaggc

SEQ ID NO: 13362 - RNA, 21 nt, RNAi
uggucacaggagagaaggcuu

SEQ ID NO: 13363 - RNA, 21 nt, RNAi
uuaccaguguccucucuuccg

SEQ ID NO: 13364 - DNA, 21 bp, Homo sapiens
tatttctggagtactgtagtg

SEQ ID NO: 13365 - RNA, 21 nt, RNAi
uuucuggaguacuguaguguu

SEQ ID NO: 13366 - RNA, 21 nt, RNAi
uuaaagaccucaugacaucac

SEQ ID NO: 13367 - DNA, 21 bp, Homo sapiens
tactgtagtggaggagagctt

SEQ ID NO: 13368 - RNA, 21 nt, RNAi
cuguaguggaggagagcuuuu

SEQ ID NO: 13369 - RNA, 21 nt, RNAi
uugacaucaccuccucucgaa

SEQ ID NO: 13370 - DNA, 21 bp, Homo sapiens
tagagccagacataggcatgc

SEQ ID NO: 13371 - RNA, 21 nt, RNAi
gagccagacauaggcaugcuu

SEQ ID NO: 13372 - RNA, 21 nt, RNAi
uucucggucuguauccguacg

SEQ ID NO: 13373 - DNA, 21 bp, Homo sapiens
taggcatgcctgaaccagatg

SEQ ID NO: 13374 - RNA, 21 nt, RNAi
ggcaugccugaaccagauguu

SEQ ID NO: 13375 - RNA, 21 nt, RNAi
uuccguacggacuuggucuac

SEQ ID NO: 13376 - DNA, 21 bp, Homo sapiens
tatctgcatggtattggaata

SEQ ID NO: 13377 - RNA, 21 nt, RNAi
ucugcaugguauuggaauauu

SEQ ID NO: 13378 - RNA, 21 nt, RNAi
uuagacguaccauaaccuuau

SEQ ID NO: 13379 - DNA, 21 bp, Homo sapiens
tataataatcgtgagcgtttg

SEQ ID NO: 13380 - RNA, 21 nt, RNAi
uaauaaucgugagcguuuguu

SEQ ID NO: 13381 - RNA, 21 nt, RNAi
uuauuauuagcacucgcaaac

SEQ ID NO: 13382 - DNA, 21 bp, Homo sapiens
taataatcgtgagcgtttgtt

SEQ ID NO: 13383 - RNA, 21 nt, RNAi
auaaucgugagcguuuguuuu

SEQ ID NO: 13384 - RNA, 21 nt, RNAi
uuuauuagcacucgcaaacaa

SEQ ID NO: 13385 - DNA, 21 bp, Homo sapiens
taatcgtgagcgtttgttgaa

SEQ ID NO: 13386 - RNA, 21 nt, RNAi
aucgugagcguuuguugaauu

SEQ ID NO: 13387 - RNA, 21 nt, RNAi
uuuagcacucgcaaacaacuu

SEQ ID NO: 13388 - DNA, 21 bp, Homo sapiens
tactttaccatatgttgctcc

SEQ ID NO: 13389 - RNA, 21 nt, RNAi
cuuuaccauauguugcuccuu

SEQ ID NO: 13390 - RNA, 21 nt, RNAi
uugaaaugguauacaacgagg

SEQ ID NO: 13391 - DNA, 21 bp, Homo sapiens
taccatatgttgctccagaac

SEQ ID NO: 13392 - RNA, 21 nt, RNAi
ccauauguugcuccagaacuu

SEQ ID NO: 13393 - RNA, 21 nt, RNAi
uugguauacaacgaggucuug

SEQ ID NO: 13394 - DNA, 21 bp, Homo sapiens
tatgttgctccagaacttctg

SEQ ID NO: 13395 - RNA, 21 nt, RNAi
uguugcuccagaacuucuguu

SEQ ID NO: 13396 - RNA, 21 nt, RNAi
uuacaacgaggucuugaagac

SEQ ID NO: 13397 - DNA, 21 bp, Homo sapiens
tagtacttactgcaatgctcg

SEQ ID NO: 13398 - RNA, 21 nt, RNAi
guacuuacugcaaugcucguu

SEQ ID NO: 13399 - RNA, 21 nt, RNAi
uucaugaaugacguuacgagc

SEQ ID NO: 13400 - DNA, 21 bp, Homo sapiens
tacttactgcaatgctcgctg

SEQ ID NO: 13401 - RNA, 21 nt, RNAi
cuuacugcaaugcucgcuguu

SEQ ID NO: 13402 - RNA, 21 nt, RNAi
uugaaugacguuacgagcgac

SEQ ID NO: 13403 - DNA, 21 bp, Homo sapiens
tactgcaatgctcgctggaga

SEQ ID NO: 13404 - RNA, 21 nt, RNAi
cugcaaugcucgcuggagauu

SEQ ID NO: 13405 - RNA, 21 nt, RNAi
uugacguuacgagcgaccucu

SEQ ID NO: 13406 - DNA, 21 bp, Homo sapiens
tagttgagaatccatcagcaa

SEQ ID NO: 13407 - RNA, 21 nt, RNAi
guugagaauccaucagcaauu

SEQ ID NO: 13408 - RNA, 21 nt, RNAi
uucaacucuuagguagucguu

SEQ ID NO: 13409 - DNA, 21 bp, Homo sapiens
taaacagtgcttctagtgaag

SEQ ID NO: 13410 - RNA, 21 nt, RNAi
aacagugcuucuagugaaguu

SEQ ID NO: 13411 - RNA, 21 nt, RNAi
uuuugucacgaagaucacuuc

SEQ ID NO: 13412 - DNA, 21 bp, Homo sapiens
tactccagttctcagccagaa

SEQ ID NO: 13413 - RNA, 21 nt, RNAi
cuccaguucucagccagaauu

SEQ ID NO: 13414 - RNA, 21 nt, RNAi
uugaggucaagagucggucuu

SEQ ID NO: 13415 - DNA, 21 bp, Homo sapiens
taccaaattggatgcagacaa

SEQ ID NO: 13416 - RNA, 21 nt, RNAi
ccaaauuggaugcagacaauu

SEQ ID NO: 13417 - RNA, 21 nt, RNAi
uugguuuaaccuacgucuguu

SEQ ID NO: 13418 - DNA, 21 bp, Homo sapiens
tatcaatgcctgaaagagact

SEQ ID NO: 13419 - RNA, 21 nt, RNAi
ucaaugccugaaagagacuuu

SEQ ID NO: 13420 - RNA, 21 nt, RNAi
uuaguuacggacuuucucuga

SEQ ID NO: 13421 - DNA, 21 bp, Homo sapiens
tatatcaacaactgataggag

SEQ ID NO: 13422 - RNA, 21 nt, RNAi
uaucaacaacugauaggaguu

SEQ ID NO: 13423 - RNA, 21 nt, RNAi
uuauaguuguugacuauccuc

SEQ ID NO: 13424 - DNA, 21 bp, Homo sapiens
tatcaacaactgataggagaa

SEQ ID NO: 13425 - RNA, 21 nt, RNAi
ucaacaacugauaggagaauu

SEQ ID NO: 13426 - RNA, 21 nt, RNAi
uuaguuguugacuauccucuu

SEQ ID NO: 13427 - DNA, 21 bp, Homo sapiens
tattggttgacttccggcttt

SEQ ID NO: 13428 - RNA, 21 nt, RNAi
uugguugacuuccggcuuuuu

SEQ ID NO: 13429 - RNA, 21 nt, RNAi
uuaaccaacugaaggccgaaa

SEQ ID NO: 13430 - DNA, 21 bp, Homo sapiens
tattgtgagcagccagaaggt

SEQ ID NO: 13431 - RNA, 21 nt, RNAi
uugugagcagccagaagguuu

SEQ ID NO: 13432 - RNA, 21 nt, RNAi
uuaacacucgucggucuucca

SEQ ID NO: 13433 - DNA, 21 bp, Homo sapiens
tatagtgctgctatgttgaca

SEQ ID NO: 13434 - RNA, 21 nt, RNAi
uagugcugcuauguugacauu

SEQ ID NO: 13435 - RNA, 21 nt, RNAi
uuaucacgacgauacaacugu

SEQ ID NO: 13436 - DNA, 21 bp, Homo sapiens
tagtgctgctatgttgacatt

SEQ ID NO: 13437 - RNA, 21 nt, RNAi
gugcugcuauguugacauuuu

SEQ ID NO: 13438 - RNA, 21 nt, RNAi
uucacgacgauacaacuguaa

SEQ ID NO: 13439 - DNA, 21 bp, Homo sapiens
tagagaagattatcctgtcct

SEQ ID NO: 13440 - RNA, 21 nt, RNAi
gagaagauuauccuguccuuu

SEQ ID NO: 13441 - RNA, 21 nt, RNAi
uucucuucuaauaggacagga

SEQ ID NO: 13442 - DNA, 21 bp, Homo sapiens
tatcctgtcctgcaaactgca

SEQ ID NO: 13443 - RNA, 21 nt, RNAi
uccuguccugcaaacugcauu

SEQ ID NO: 13444 - RNA, 21 nt, RNAi
uuaggacaggacguuugacgu

SEQ ID NO: 13445 - DNA, 21 bp, Homo sapiens
tagtagttcctgaagtgttca

SEQ ID NO: 13446 - RNA, 21 nt, RNAi
guaguuccugaaguguucauu

SEQ ID NO: 13447 - RNA, 21 nt, RNAi
uucaucaaggacuucacaagu

SEQ ID NO: 13448 - DNA, 21 bp, Homo sapiens
tagttcctgaagtgttcactt

SEQ ID NO: 13449 - RNA, 21 nt, RNAi
guuccugaaguguucacuuuu

SEQ ID NO: 13450 - RNA, 21 nt, RNAi
uucaaggacuucacaagugaa

SEQ ID NO: 13451 - DNA, 21 bp, Homo sapiens
aaattctatggtcacaggaga

SEQ ID NO: 13452 - RNA, 21 nt, RNAi
auucuauggucacaggagauu

SEQ ID NO: 13453 - RNA, 21 nt, RNAi
uuuaagauaccaguguccucu

SEQ ID NO: 13454 - DNA, 21 bp, Homo sapiens
aataatcgtgagcgtttgttg

SEQ ID NO: 13455 - RNA, 21 nt, RNAi
uaaucgugagcguuuguuguu

SEQ ID NO: 13456 - RNA, 21 nt, RNAi
uuauuagcacucgcaaacaac

SEQ ID NO: 13457 - DNA, 21 bp, Homo sapiens
aacaagatgtgtggtacttta

SEQ ID NO: 13458 - RNA, 21 nt, RNAi
caagaugugugguacuuuauu

SEQ ID NO: 13459 - RNA, 21 nt, RNAi
uuguucuacacaccaugaaau

SEQ ID NO: 13460 - DNA, 21 bp, Homo sapiens
aatttcatgcagaaccagttg

SEQ ID NO: 13461 - RNA, 21 nt, RNAi
uuucaugcagaaccaguuguu

SEQ ID NO: 13462 - RNA, 21 nt, RNAi
uuaaaguacgucuuggucaac

SEQ ID NO: 13463 - DNA, 21 bp, Homo sapiens
aaccagttgatgtttggtcct

SEQ ID NO: 13464 - RNA, 21 nt, RNAi
ccaguugauguuugguccuuu

SEQ ID NO: 13465 - RNA, 21 nt, RNAi
uuggucaacuacaaaccagga

SEQ ID NO: 13466 - DNA, 21 bp, Homo sapiens
aaatcgattctgctcctctag

SEQ ID NO: 13467 - RNA, 21 nt, RNAi
aucgauucugcuccucuaguu

SEQ ID NO: 13468 - RNA, 21 nt, RNAi
uuuagcuaagacgaggagauc

SEQ ID NO: 13469 - DNA, 21 bp, Homo sapiens
aatcttagttgagaatccatc

SEQ ID NO: 13470 - RNA, 21 nt, RNAi
ucuuaguugagaauccaucuu

SEQ ID NO: 13471 - RNA, 21 nt, RNAi
uuagaaucaacucuuagguag

SEQ ID NO: 13472 - DNA, 21 bp, Homo sapiens
aagaattaccattccagacat

SEQ ID NO: 13473 - RNA, 21 nt, RNAi
gaauuaccauuccagacauuu

SEQ ID NO: 13474 - RNA, 21 nt, RNAi
uucuuaaugguaaggucugua

SEQ ID NO: 13475 - DNA, 21 bp, Homo sapiens
aattaccattccagacatcaa

SEQ ID NO: 13476 - RNA, 21 nt, RNAi
uuaccauuccagacaucaauu

SEQ ID NO: 13477 - RNA, 21 nt, RNAi
uuaaugguaaggucuguaguu

SEQ ID NO: 13478 - DNA, 21 bp, Homo sapiens
aagcacattcaatccaatttg

SEQ ID NO: 13479 - RNA, 21 nt, RNAi
gcacauucaauccaauuuguu

SEQ ID NO: 13480 - RNA, 21 nt, RNAi
uucguguaaguuagguuaaac

SEQ ID NO: 13481 - DNA, 21 bp, Homo sapiens
aaatgtgaagtactccagttc

SEQ ID NO: 13482 - RNA, 21 nt, RNAi
augugaaguacuccaguucuu

SEQ ID NO: 13483 - RNA, 21 nt, RNAi
uuuacacuucaugaggucaag

SEQ ID NO: 13484 - DNA, 21 bp, Homo sapiens
aatgtgaagtactccagttct

SEQ ID NO: 13485 - RNA, 21 nt, RNAi
ugugaaguacuccaguucuuu

SEQ ID NO: 13486 - RNA, 21 nt, RNAi
uuacacuucaugaggucaaga

SEQ ID NO: 13487 - DNA, 21 bp, Homo sapiens
aatagtcagttacttggcacc

SEQ ID NO: 13488 - RNA, 21 nt, RNAi
uagucaguuacuuggcaccuu

SEQ ID NO: 13489 - RNA, 21 nt, RNAi
uuaucagucaaugaaccgugg

SEQ ID NO: 13490 - DNA, 21 bp, Homo sapiens
aagaatgacacgattctttac

SEQ ID NO: 13491 - RNA, 21 nt, RNAi
gaaugacacgauucuuuacuu

SEQ ID NO: 13492 - RNA, 21 nt, RNAi
uucuuacugugcuaagaaaug

SEQ ID NO: 13493 - DNA, 21 bp, Homo sapiens
aatcttatcaatgcctgaaag

SEQ ID NO: 13494 - RNA, 21 nt, RNAi
ucuuaucaaugccugaaaguu

SEQ ID NO: 13495 - RNA, 21 nt, RNAi
uuagaauaguuacggacuuuc

SEQ ID NO: 13496 - DNA, 21 bp, Homo sapiens
aagagacttgtgagaagttgg

SEQ ID NO: 13497 - RNA, 21 nt, RNAi
gagacuugugagaaguugguu

SEQ ID NO: 13498 - RNA, 21 nt, RNAi
uucucugaacacucuucaacc

SEQ ID NO: 13499 - DNA, 21 bp, Homo sapiens
aagttgtatgaatcaggttac

SEQ ID NO: 13500 - RNA, 21 nt, RNAi
guuguaugaaucagguuacuu

SEQ ID NO: 13501 - RNA, 21 nt, RNAi
uucaacauacuuaguccaaug

SEQ ID NO: 13502 - DNA, 21 bp, Homo sapiens
aaatattggttgacttccggc

SEQ ID NO: 13503 - RNA, 21 nt, RNAi
auauugguugacuuccggcuu

SEQ ID NO: 13504 - RNA, 21 nt, RNAi
uuuauaaccaacugaaggccg

SEQ ID NO: 13505 - DNA, 21 bp, Homo sapiens
aatattggttgacttccggct

SEQ ID NO: 13506 - RNA, 21 nt, RNAi
uauugguugacuuccggcuuu

SEQ ID NO: 13507 - RNA, 21 nt, RNAi
uuauaaccaacugaaggccga

SEQ ID NO: 13508 - DNA, 21 bp, Homo sapiens
cagttgatgtttggtcctgtg

SEQ ID NO: 13509 - RNA, 21 nt, RNAi
guugauguuugguccuguguu

SEQ ID NO: 13510 - RNA, 21 nt, RNAi
uucaacuacaaaccaggacac

SEQ ID NO: 13511 - DNA, 21 bp, Homo sapiens
caatgctcgctggagaattgc

SEQ ID NO: 13512 - RNA, 21 nt, RNAi
augcucgcuggagaauugcuu

SEQ ID NO: 13513 - RNA, 21 nt, RNAi
uuuacgagcgaccucuuaacg

SEQ ID NO: 13514 - DNA, 21 bp, Homo sapiens
cagctgtcaggagtattctga

SEQ ID NO: 13515 - RNA, 21 nt, RNAi
gcugucaggaguauucugauu

SEQ ID NO: 13516 - RNA, 21 nt, RNAi
uucgacaguccucauaagacu

SEQ ID NO: 13517 - DNA, 21 bp, Homo sapiens
cagcaagaattaccattccag

SEQ ID NO: 13518 - RNA, 21 nt, RNAi
gcaagaauuaccauuccaguu

SEQ ID NO: 13519 - RNA, 21 nt, RNAi
uucguucuuaaugguaagguc

SEQ ID NO: 13520 - DNA, 21 bp, Homo sapiens
caagaattaccattccagaca

SEQ ID NO: 13521 - RNA, 21 nt, RNAi
agaauuaccauuccagacauu

SEQ ID NO: 13522 - RNA, 21 nt, RNAi
uuucuuaaugguaaggucugu

SEQ ID NO: 13523 - DNA, 21 bp, Homo sapiens
cagtaaacagtgcttctagtg

SEQ ID NO: 13524 - RNA, 21 nt, RNAi
guaaacagugcuucuaguguu

SEQ ID NO: 13525 - RNA, 21 nt, RNAi
uucauuugucacgaagaucac

SEQ ID NO: 13526 - DNA, 21 bp, Homo sapiens
gagagaaggcaatatccaata

SEQ ID NO: 13527 - RNA, 21 nt, RNAi
gagaaggcaauauccaauauu

SEQ ID NO: 13528 - RNA, 21 nt, RNAi
uucucuuccguuauagguuau

SEQ ID NO: 13529 - DNA, 21 bp, Homo sapiens
gaacaagatgtgtggtacttt

SEQ ID NO: 13530 - RNA, 21 nt, RNAi
acaagaugugugguacuuuuu

SEQ ID NO: 13531 - RNA, 21 nt, RNAi
uuuguucuacacaccaugaaa

SEQ ID NO: 13532 - DNA, 21 bp, Homo sapiens
gaatttcatgcagaaccagtt

SEQ ID NO: 13533 - RNA, 21 nt, RNAi
auuucaugcagaaccaguuuu

SEQ ID NO: 13534 - RNA, 21 nt, RNAi
uuuaaaguacgucuuggucaa

SEQ ID NO: 13535 - DNA, 21 bp, Homo sapiens
gaaccagttgatgtttggtcc

SEQ ID NO: 13536 - RNA, 21 nt, RNAi
accaguugauguuugguccuu

SEQ ID NO: 13537 - RNA, 21 nt, RNAi
uuuggucaacuacaaaccagg

SEQ ID NO: 13538 - DNA, 21 bp, Homo sapiens
gacagctgtcaggagtattct

SEQ ID NO: 13539 - RNA, 21 nt, RNAi
cagcugucaggaguauucuuu

SEQ ID NO: 13540 - RNA, 21 nt, RNAi
uugucgacaguccucauaaga

SEQ ID NO: 13541 - DNA, 21 bp, Homo sapiens
gaatccatcagcaagaattac

SEQ ID NO: 13542 - RNA, 21 nt, RNAi
auccaucagcaagaauuacuu

SEQ ID NO: 13543 - RNA, 21 nt, RNAi
uuuagguagucguucuuaaug

SEQ ID NO: 13544 - DNA, 21 bp, Homo sapiens
gaattaccattccagacatca

SEQ ID NO: 13545 - RNA, 21 nt, RNAi
auuaccauuccagacaucauu

SEQ ID NO: 13546 - RNA, 21 nt, RNAi
uuuaaugguaaggucuguagu

SEQ ID NO: 13547 - DNA, 21 bp, Homo sapiens
gaatagtcagttacttggcac

SEQ ID NO: 13548 - RNA, 21 nt, RNAi
auagucaguuacuuggcacuu

SEQ ID NO: 13549 - RNA, 21 nt, RNAi
uuuaucagucaaugaaccgug

SEQ ID NO: 13550 - DNA, 21 bp, Homo sapiens
gaaagagacttgtgagaagtt

SEQ ID NO: 13551 - RNA, 21 nt, RNAi
aagagacuugugagaaguuuu

SEQ ID NO: 13552 - RNA, 21 nt, RNAi
uuuucucugaacacucuucaa

SEQ ID NO: 13553 - DNA, 21 bp, Homo sapiens
tataataatcgtgagcgtttg

SEQ ID NO: 13554 - RNA, 21 nt, RNAi
uaauaaucgugagcguuuguu

SEQ ID NO: 13555 - RNA, 21 nt, RNAi
uuauuauuagcacucgcaaac

SEQ ID NO: 13556 - DNA, 21 bp, Homo sapiens
taataatcgtgagcgtttgtt

SEQ ID NO: 13557 - RNA, 21 nt, RNAi
auaaucgugagcguuuguuuu

SEQ ID NO: 13558 - RNA, 21 nt, RNAi
uuuauuagcacucgcaaacaa

SEQ ID NO: 13559 - DNA, 21 bp, Homo sapiens
taccatatgttgctccagaac

SEQ ID NO: 13560 - RNA, 21 nt, RNAi
ccauauguugcuccagaacuu

SEQ ID NO: 13561 - RNA, 21 nt, RNAi
uugguauacaacgaggucuug

SEQ ID NO: 13562 - DNA, 21 bp, Homo sapiens
tagtacttactgcaatgctcg

SEQ ID NO: 13563 - RNA, 21 nt, RNAi
guacuuacugcaaugcucguu

SEQ ID NO: 13564 - RNA, 21 nt, RNAi
uucaugaaugacguuacgagc

SEQ ID NO: 13565 - DNA, 21 bp, Homo sapiens
tacttactgcaatgctcgctg

SEQ ID NO: 13566 - RNA, 21 nt, RNAi
cuuacugcaaugcucgcuguu

SEQ ID NO: 13567 - RNA, 21 nt, RNAi
uugaaugacguuacgagcgac

SEQ ID NO: 13568 - DNA, 21 bp, Homo sapiens
tatcaatgcctgaaagagact

SEQ ID NO: 13569 - RNA, 21 nt, RNAi
ucaaugccugaaagagacuuu

SEQ ID NO: 13570 - RNA, 21 nt, RNAi
uuaguuacggacuuucucuga

SEQ ID NO: 13571 - DNA, 21 bp, Homo sapiens
tatcaacaactgataggagaa

SEQ ID NO: 13572 - RNA, 21 nt, RNAi
ucaacaacugauaggagaauu

SEQ ID NO: 13573 - RNA, 21 nt, RNAi
uuaguuguugacuauccucuu

SEQ ID NO: 13574 - DNA, 21 bp, Homo sapiens
tattggttgacttccggcttt

SEQ ID NO: 13575 - RNA, 21 nt, RNAi
uugguugacuuccggcuuuuu

SEQ ID NO: 13576 - RNA, 21 nt, RNAi
uuaaccaacugaaggccgaaa

SEQ ID NO: 13577 - DNA, 21 bp, Homo sapiens
aaggagcacaaggctgagatt

SEQ ID NO: 13578 - RNA, 21 nt, RNAi
ggagcacaaggcugagauuuu

SEQ ID NO: 13579 - RNA, 21 nt, RNAi
uuccucguguuccgacucuaa

SEQ ID NO: 13580 - DNA, 21 bp, Homo sapiens
aaggctgagattctcgctctg

SEQ ID NO: 13581 - RNA, 21 nt, RNAi
ggcugagauucucgcucuguu

SEQ ID NO: 13582 - RNA, 21 nt, RNAi
uuccgacucuaagagcgagac

SEQ ID NO: 13583 - DNA, 21 bp, Homo sapiens
aaagagcagaagctgaaggcc

SEQ ID NO: 13584 - RNA, 21 nt, RNAi
agagcagaagcugaaggccuu

SEQ ID NO: 13585 - RNA, 21 nt, RNAi
uuucucgucuucgacuuccgg

SEQ ID NO: 13586 - DNA, 21 bp, Homo sapiens
aagagcagaagctgaaggccg

SEQ ID NO: 13587 - RNA, 21 nt, RNAi
gagcagaagcugaaggccguu

SEQ ID NO: 13588 - RNA, 21 nt, RNAi
uucucgucuucgacuuccggc

SEQ ID NO: 13589 - DNA, 21 bp, Homo sapiens
aagctgaaggccgagagcctc

SEQ ID NO: 13590 - RNA, 21 nt, RNAi
gcugaaggccgagagccucuu

SEQ ID NO: 13591 - RNA, 21 nt, RNAi
uucgacuuccggcucucggag

SEQ ID NO: 13592 - DNA, 21 bp, Homo sapiens
aaggccgagagcctctctgac

SEQ ID NO: 13593 - RNA, 21 nt, RNAi
ggccgagagccucucugacuu

SEQ ID NO: 13594 - RNA, 21 nt, RNAi
uuccggcucucggagagacug

SEQ ID NO: 13595 - DNA, 21 bp, Homo sapiens
aagctcaatgacctggagaag

SEQ ID NO: 13596 - RNA, 21 nt, RNAi
gcucaaugaccuggagaaguu

SEQ ID NO: 13597 - RNA, 21 nt, RNAi
uucgaguuacuggaccucuuc

SEQ ID NO: 13598 - DNA, 21 bp, Homo sapiens
aatgacctggagaagaagcat

SEQ ID NO: 13599 - RNA, 21 nt, RNAi
ugaccuggagaagaagcauuu

SEQ ID NO: 13600 - RNA, 21 nt, RNAi
uuacuggaccucuucuucgua

SEQ ID NO: 13601 - DNA, 21 bp, Homo sapiens
aagaagcatgctatgcttgaa

SEQ ID NO: 13602 - RNA, 21 nt, RNAi
gaagcaugcuaugcuugaauu

SEQ ID NO: 13603 - RNA, 21 nt, RNAi
uucuucguacgauacgaacuu

SEQ ID NO: 13604 - DNA, 21 bp, Homo sapiens
aagcatgctatgcttgaaatg

SEQ ID NO: 13605 - RNA, 21 nt, RNAi
gcaugcuaugcuugaaauguu

SEQ ID NO: 13606 - RNA, 21 nt, RNAi
uucguacgauacgaacuuuac

SEQ ID NO: 13607 - DNA, 21 bp, Homo sapiens
aagcttacagcagaagctgga

SEQ ID NO: 13608 - RNA, 21 nt, RNAi
gcuuacagcagaagcuggauu

SEQ ID NO: 13609 - RNA, 21 nt, RNAi
uucgaaugucgucuucgaccu

SEQ ID NO: 13610 - DNA, 21 bp, Homo sapiens
aagctggagactgaacgagag

SEQ ID NO: 13611 - RNA, 21 nt, RNAi
gcuggagacugaacgagaguu

SEQ ID NO: 13612 - RNA, 21 nt, RNAi
uucgaccucugacuugcucuc

SEQ ID NO: 13613 - DNA, 21 bp, Homo sapiens
aacgagagctcaaacagaggc

SEQ ID NO: 13614 - RNA, 21 nt, RNAi
cgagagcucaaacagaggcuu

SEQ ID NO: 13615 - RNA, 21 nt, RNAi
uugcucucgaguuugucuccg

SEQ ID NO: 13616 - DNA, 21 bp, Homo sapiens
aaacagaggcttctggaagag

SEQ ID NO: 13617 - RNA, 21 nt, RNAi
acagaggcuucuggaagaguu

SEQ ID NO: 13618 - RNA, 21 nt, RNAi
uuugucuccgaagaccuucuc

SEQ ID NO: 13619 - DNA, 21 bp, Homo sapiens
aacagaggcttctggaagagc

SEQ ID NO: 13620 - RNA, 21 nt, RNAi
cagaggcuucuggaagagcuu

SEQ ID NO: 13621 - RNA, 21 nt, RNAi
uugucuccgaagaccuucucg

SEQ ID NO: 13622 - DNA, 21 bp, Homo sapiens
aagagcaagccaaattacagc

SEQ ID NO: 13623 - RNA, 21 nt, RNAi
gagcaagccaaauuacagcuu

SEQ ID NO: 13624 - RNA, 21 nt, RNAi
uucucguucgguuuaaugucg

SEQ ID NO: 13625 - DNA, 21 bp, Homo sapiens
aagccaaattacagcagcaga

SEQ ID NO: 13626 - RNA, 21 nt, RNAi
gccaaauuacagcagcagauu

SEQ ID NO: 13627 - RNA, 21 nt, RNAi
uucgguuuaaugucgucgucu

SEQ ID NO: 13628 - DNA, 21 bp, Homo sapiens
aaattacagcagcagatggac

SEQ ID NO: 13629 - RNA, 21 nt, RNAi
auuacagcagcagauggacuu

SEQ ID NO: 13630 - RNA, 21 nt, RNAi
uuuaaugucgucgucuaccug

SEQ ID NO: 13631 - DNA, 21 bp, Homo sapiens
aattacagcagcagatggacc

SEQ ID NO: 13632 - RNA, 21 nt, RNAi
uuacagcagcagauggaccuu

SEQ ID NO: 13633 - RNA, 21 nt, RNAi
uuaaugucgucgucuaccugg

SEQ ID NO: 13634 - DNA, 21 bp, Homo sapiens
aaggactgcaagaagctctag

SEQ ID NO: 13635 - RNA, 21 nt, RNAi
ggacugcaagaagcucuaguu

SEQ ID NO: 13636 - RNA, 21 nt, RNAi
uuccugacguucuucgagauc

SEQ ID NO: 13637 - DNA, 21 bp, Homo sapiens
aagacagaaagaagtgacttg

SEQ ID NO: 13638 - RNA, 21 nt, RNAi
gacagaaagaagugacuuguu

SEQ ID NO: 13639 - RNA, 21 nt, RNAi
uucugucuuucuucacugaac

SEQ ID NO: 13640 - DNA, 21 bp, Homo sapiens
aaagaagtgacttggagtatc

SEQ ID NO: 13641 - RNA, 21 nt, RNAi
agaagugacuuggaguaucuu

SEQ ID NO: 13642 - RNA, 21 nt, RNAi
uuucuucacugaaccucauag

SEQ ID NO: 13643 - DNA, 21 bp, Homo sapiens
aagaagtgacttggagtatca

SEQ ID NO: 13644 - RNA, 21 nt, RNAi
gaagugacuuggaguaucauu

SEQ ID NO: 13645 - RNA, 21 nt, RNAi
uucuucacugaaccucauagu

SEQ ID NO: 13646 - DNA, 21 bp, Homo sapiens
aagtgacttggagtatcagct

SEQ ID NO: 13647 - RNA, 21 nt, RNAi
gugacuuggaguaucagcuuu

SEQ ID NO: 13648 - RNA, 21 nt, RNAi
uucacugaaccucauagucga

SEQ ID NO: 13649 - DNA, 21 bp, Homo sapiens
aaacattcaggttctctattc

SEQ ID NO: 13650 - RNA, 21 nt, RNAi
acauucagguucucuauucuu

SEQ ID NO: 13651 - RNA, 21 nt, RNAi
uuuguaaguccaagagauaag

SEQ ID NO: 13652 - DNA, 21 bp, Homo sapiens
aacattcaggttctctattct

SEQ ID NO: 13653 - RNA, 21 nt, RNAi
cauucagguucucuauucuuu

SEQ ID NO: 13654 - RNA, 21 nt, RNAi
uuguaaguccaagagauaaga

SEQ ID NO: 13655 - DNA, 21 bp, Homo sapiens
aaatggaaggcactatttctc

SEQ ID NO: 13656 - RNA, 21 nt, RNAi
auggaaggcacuauuucucuu

SEQ ID NO: 13657 - RNA, 21 nt, RNAi
uuuaccuuccgugauaaagag

SEQ ID NO: 13658 - DNA, 21 bp, Homo sapiens
aatggaaggcactatttctca

SEQ ID NO: 13659 - RNA, 21 nt, RNAi
uggaaggcacuauuucucauu

SEQ ID NO: 13660 - RNA, 21 nt, RNAi
uuaccuuccgugauaaagagu

SEQ ID NO: 13661 - DNA, 21 bp, Homo sapiens
aaggcactatttctcaacaaa

SEQ ID NO: 13662 - RNA, 21 nt, RNAi
ggcacuauuucucaacaaauu

SEQ ID NO: 13663 - RNA, 21 nt, RNAi
uuccgugauaaagaguuguuu

SEQ ID NO: 13664 - DNA, 21 bp, Homo sapiens
aaaggttcctctgcagtacaa

SEQ ID NO: 13665 - RNA, 21 nt, RNAi
agguuccucugcaguacaauu

SEQ ID NO: 13666 - RNA, 21 nt, RNAi
uuuccaaggagacgucauguu

SEQ ID NO: 13667 - DNA, 21 bp, Homo sapiens
aaggttcctctgcagtacaat

SEQ ID NO: 13668 - RNA, 21 nt, RNAi
gguuccucugcaguacaauuu

SEQ ID NO: 13669 - RNA, 21 nt, RNAi
uuccaaggagacgucauguua

SEQ ID NO: 13670 - DNA, 21 bp, Homo sapiens
aaggagaaagctcgctgtgca

SEQ ID NO: 13671 - RNA, 21 nt, RNAi
ggagaaagcucgcugugcauu

SEQ ID NO: 13672 - RNA, 21 nt, RNAi
uuccucuuucgagcgacacgu

SEQ ID NO: 13673 - DNA, 21 bp, Homo sapiens
aaagctcgctgtgcagagcta

SEQ ID NO: 13674 - RNA, 21 nt, RNAi
agcucgcugugcagagcuauu

SEQ ID NO: 13675 - RNA, 21 nt, RNAi
uuucgagcgacacgucucgau

SEQ ID NO: 13676 - DNA, 21 bp, Homo sapiens
aagctcgctgtgcagagctag

SEQ ID NO: 13677 - RNA, 21 nt, RNAi
gcucgcugugcagagcuaguu

SEQ ID NO: 13678 - RNA, 21 nt, RNAi
uucgagcgacacgucucgauc

SEQ ID NO: 13679 - DNA, 21 bp, Homo sapiens
aaaggagtcttcaactccaga

SEQ ID NO: 13680 - RNA, 21 nt, RNAi
aggagucuucaacuccagauu

SEQ ID NO: 13681 - RNA, 21 nt, RNAi
uuuccucagaaguugaggucu

SEQ ID NO: 13682 - DNA, 21 bp, Homo sapiens
aaggagtcttcaactccagag

SEQ ID NO: 13683 - RNA, 21 nt, RNAi
ggagucuucaacuccagaguu

SEQ ID NO: 13684 - RNA, 21 nt, RNAi
uuccucagaaguugaggucuc

SEQ ID NO: 13685 - DNA, 21 bp, Homo sapiens
aactccagaggaatttagtcg

SEQ ID NO: 13686 - RNA, 21 nt, RNAi
cuccagaggaauuuagucguu

SEQ ID NO: 13687 - RNA, 21 nt, RNAi
uugaggucuccuuaaaucagc

SEQ ID NO: 13688 - DNA, 21 bp, Homo sapiens
aatttagtcggcgtcttaagg

SEQ ID NO: 13689 - RNA, 21 nt, RNAi
uuuagucggcgucuuaagguu

SEQ ID NO: 13690 - RNA, 21 nt, RNAi
uuaaaucagccgcagaauucc

SEQ ID NO: 13691 - DNA, 21 bp, Homo sapiens
aaggaacgcatgcaccacaat

SEQ ID NO: 13692 - RNA, 21 nt, RNAi
ggaacgcaugcaccacaauuu

SEQ ID NO: 13693 - RNA, 21 nt, RNAi
uuccuugcguacgugguguua

SEQ ID NO: 13694 - DNA, 21 bp, Homo sapiens
aacgcatgcaccacaatattc

SEQ ID NO: 13695 - RNA, 21 nt, RNAi
cgcaugcaccacaauauucuu

SEQ ID NO: 13696 - RNA, 21 nt, RNAi
uugcguacgugguguuauaag

SEQ ID NO: 13697 - DNA, 21 bp, Homo sapiens
aatattcctcaccgattcaac

SEQ ID NO: 13698 - RNA, 21 nt, RNAi
uauuccucaccgauucaacuu

SEQ ID NO: 13699 - RNA, 21 nt, RNAi
uuauaaggaguggcuaaguug

SEQ ID NO: 13700 - DNA, 21 bp, Homo sapiens
aacgtaggactgaacatgcga

SEQ ID NO: 13701 - RNA, 21 nt, RNAi
cguaggacugaacaugcgauu

SEQ ID NO: 13702 - RNA, 21 nt, RNAi
uugcauccugacuuguacgcu

SEQ ID NO: 13703 - DNA, 21 bp, Homo sapiens
aacatgcgagccacaaagtgt

SEQ ID NO: 13704 - RNA, 21 nt, RNAi
caugcgagccacaaaguguuu

SEQ ID NO: 13705 - RNA, 21 nt, RNAi
uuguacgcucgguguuucaca

SEQ ID NO: 13706 - DNA, 21 bp, Homo sapiens
aaagtgtgctgtgtgtctgga

SEQ ID NO: 13707 - RNA, 21 nt, RNAi
agugugcugugugucuggauu

SEQ ID NO: 13708 - RNA, 21 nt, RNAi
uuucacacgacacacagaccu

SEQ ID NO: 13709 - DNA, 21 bp, Homo sapiens
aagtgtgctgtgtgtctggat

SEQ ID NO: 13710 - RNA, 21 nt, RNAi
gugugcugugugucuggauuu

SEQ ID NO: 13711 - RNA, 21 nt, RNAi
uucacacgacacacagaccua

SEQ ID NO: 13712 - DNA, 21 bp, Homo sapiens
aaatgtctcgaatgtcaggtg

SEQ ID NO: 13713 - RNA, 21 nt, RNAi
augucucgaaugucagguguu

SEQ ID NO: 13714 - RNA, 21 nt, RNAi
uuuacagagcuuacaguccac

SEQ ID NO: 13715 - DNA, 21 bp, Homo sapiens
aatgtctcgaatgtcaggtga

SEQ ID NO: 13716 - RNA, 21 nt, RNAi
ugucucgaaugucaggugauu

SEQ ID NO: 13717 - RNA, 21 nt, RNAi
uuacagagcuuacaguccacu

SEQ ID NO: 13718 - DNA, 21 bp, Homo sapiens
aatgtcaggtgatgtgtcacc

SEQ ID NO: 13719 - RNA, 21 nt, RNAi
ugucaggugaugugucaccuu

SEQ ID NO: 13720 - RNA, 21 nt, RNAi
uuacaguccacuacacagugg

SEQ ID NO: 13721 - DNA, 21 bp, Homo sapiens
aagtgctccacgtgcttgcca

SEQ ID NO: 13722 - RNA, 21 nt, RNAi
gugcuccacgugcuugccauu

SEQ ID NO: 13723 - RNA, 21 nt, RNAi
uucacgaggugcacgaacggu

SEQ ID NO: 13724 - DNA, 21 bp, Homo sapiens
aatatgccacacacttcaccg

SEQ ID NO: 13725 - RNA, 21 nt, RNAi
uaugccacacacuucaccguu

SEQ ID NO: 13726 - RNA, 21 nt, RNAi
uuauacggugugugaaguggc

SEQ ID NO: 13727 - DNA, 21 bp, Homo sapiens
aataacaaacgaggacagcaa

SEQ ID NO: 13728 - RNA, 21 nt, RNAi
uaacaaacgaggacagcaauu

SEQ ID NO: 13729 - RNA, 21 nt, RNAi
uuauuguuugcuccugucguu

SEQ ID NO: 13730 - DNA, 21 bp, Homo sapiens
aacaaacgaggacagcaaggc

SEQ ID NO: 13731 - RNA, 21 nt, RNAi
caaacgaggacagcaaggcuu

SEQ ID NO: 13732 - RNA, 21 nt, RNAi
uuguuugcuccugucguuccg

SEQ ID NO: 13733 - DNA, 21 bp, Homo sapiens
aaacgaggacagcaaggctgg

SEQ ID NO: 13734 - RNA, 21 nt, RNAi
acgaggacagcaaggcugguu

SEQ ID NO: 13735 - RNA, 21 nt, RNAi
uuugcuccugucguuccgacc

SEQ ID NO: 13736 - DNA, 21 bp, Homo sapiens
aagtcctcatttatgacaatg

SEQ ID NO: 13737 - RNA, 21 nt, RNAi
guccucauuuaugacaauguu

SEQ ID NO: 13738 - RNA, 21 nt, RNAi
uucaggaguaaauacuguuac

SEQ ID NO: 13739 - DNA, 21 bp, Homo sapiens
aatgaagccagagaagctgga

SEQ ID NO: 13740 - RNA, 21 nt, RNAi
ugaagccagagaagcuggauu

SEQ ID NO: 13741 - RNA, 21 nt, RNAi
uuacuucggucucuucgaccu

SEQ ID NO: 13742 - DNA, 21 bp, Homo sapiens
aagccagagaagctggacaga

SEQ ID NO: 13743 - RNA, 21 nt, RNAi
gccagagaagcuggacagauu

SEQ ID NO: 13744 - RNA, 21 nt, RNAi
uucggucucuucgaccugucu

SEQ ID NO: 13745 - DNA, 21 bp, Homo sapiens
aagaatttgagctgtgccttc

SEQ ID NO: 13746 - RNA, 21 nt, RNAi
gaauuugagcugugccuucuu

SEQ ID NO: 13747 - RNA, 21 nt, RNAi
uucuuaaacucgacacggaag

SEQ ID NO: 13748 - DNA, 21 bp, Homo sapiens
aactcgcaaatacagccaaag

SEQ ID NO: 13749 - RNA, 21 nt, RNAi
cucgcaaauacagccaaaguu

SEQ ID NO: 13750 - RNA, 21 nt, RNAi
uugagcguuuaugucgguuuc

SEQ ID NO: 13751 - DNA, 21 bp, Homo sapiens
aaatacagccaaagcagatgt

SEQ ID NO: 13752 - RNA, 21 nt, RNAi
auacagccaaagcagauguuu

SEQ ID NO: 13753 - RNA, 21 nt, RNAi
uuuaugucgguuucgucuaca

SEQ ID NO: 13754 - DNA, 21 bp, Homo sapiens
aatacagccaaagcagatgtc

SEQ ID NO: 13755 - RNA, 21 nt, RNAi
uacagccaaagcagaugucuu

SEQ ID NO: 13756 - RNA, 21 nt, RNAi
uuaugucgguuucgucuacag

SEQ ID NO: 13757 - DNA, 21 bp, Homo sapiens
aaagcagaagctgatgctaaa

SEQ ID NO: 13758 - RNA, 21 nt, RNAi
agcagaagcugaugcuaaauu

SEQ ID NO: 13759 - RNA, 21 nt, RNAi
uuucgucuucgacuacgauuu

SEQ ID NO: 13760 - DNA, 21 bp, Homo sapiens
aagcagaagctgatgctaaac

SEQ ID NO: 13761 - RNA, 21 nt, RNAi
gcagaagcugaugcuaaacuu

SEQ ID NO: 13762 - RNA, 21 nt, RNAi
uucgucuucgacuacgauuug

SEQ ID NO: 13763 - DNA, 21 bp, Homo sapiens
aagctgatgctaaactgcttg

SEQ ID NO: 13764 - RNA, 21 nt, RNAi
gcugaugcuaaacugcuuguu

SEQ ID NO: 13765 - RNA, 21 nt, RNAi
uucgacuacgauuugacgaac

SEQ ID NO: 13766 - DNA, 21 bp, Homo sapiens
aaactggaaggtgatgaccgt

SEQ ID NO: 13767 - RNA, 21 nt, RNAi
acuggaaggugaugaccguuu

SEQ ID NO: 13768 - RNA, 21 nt, RNAi
uuugaccuuccacuacuggca

SEQ ID NO: 13769 - DNA, 21 bp, Homo sapiens
aactggaaggtgatgaccgtc

SEQ ID NO: 13770 - RNA, 21 nt, RNAi
cuggaaggugaugaccgucuu

SEQ ID NO: 13771 - RNA, 21 nt, RNAi
uugaccuuccacuacuggcag

SEQ ID NO: 13772 - DNA, 21 bp, Homo sapiens
aaggtgatgaccgtctagaca

SEQ ID NO: 13773 - RNA, 21 nt, RNAi
ggugaugaccgucuagacauu

SEQ ID NO: 13774 - RNA, 21 nt, RNAi
uuccacuacuggcagaucugu

SEQ ID NO: 13775 - DNA, 21 bp, Homo sapiens
aattggagcagtcttccaaat

SEQ ID NO: 13776 - RNA, 21 nt, RNAi
uuggagcagucuuccaaauuu

SEQ ID NO: 13777 - RNA, 21 nt, RNAi
uuaaccucgucagaagguuua

SEQ ID NO: 13778 - DNA, 21 bp, Homo sapiens
aaggacctggagaagctactc

SEQ ID NO: 13779 - RNA, 21 nt, RNAi
ggaccuggagaagcuacucuu

SEQ ID NO: 13780 - RNA, 21 nt, RNAi
uuccuggaccucuucgaugag

SEQ ID NO: 13781 - DNA, 21 bp, Homo sapiens
aagctactcatgatagcagga

SEQ ID NO: 13782 - RNA, 21 nt, RNAi
gcuacucaugauagcaggauu

SEQ ID NO: 13783 - RNA, 21 nt, RNAi
uucgaugaguacuaucguccu

SEQ ID NO: 13784 - DNA, 21 bp, Homo sapiens
aaagtcgtcattctccgctac

SEQ ID NO: 13785 - RNA, 21 nt, RNAi
agucgucauucuccgcuacuu

SEQ ID NO: 13786 - RNA, 21 nt, RNAi
uuucagcaguaagaggcgaug

SEQ ID NO: 13787 - DNA, 21 bp, Homo sapiens
aagtcgtcattctccgctaca

SEQ ID NO: 13788 - RNA, 21 nt, RNAi
gucgucauucuccgcuacauu

SEQ ID NO: 13789 - RNA, 21 nt, RNAi
uucagcaguaagaggcgaugu

SEQ ID NO: 13790 - DNA, 21 bp, Homo sapiens
aaacctcagcaaatactgcat

SEQ ID NO: 13791 - RNA, 21 nt, RNAi
accucagcaaauacugcauuu

SEQ ID NO: 13792 - RNA, 21 nt, RNAi
uuuggagucguuuaugacgua

SEQ ID NO: 13793 - DNA, 21 bp, Homo sapiens
aacctcagcaaatactgcatc

SEQ ID NO: 13794 - RNA, 21 nt, RNAi
ccucagcaaauacugcaucuu

SEQ ID NO: 13795 - RNA, 21 nt, RNAi
uuggagucguuuaugacguag

SEQ ID NO: 13796 - DNA, 21 bp, Homo sapiens
aaatactgcatccggaaagag

SEQ ID NO: 13797 - RNA, 21 nt, RNAi
auacugcauccggaaagaguu

SEQ ID NO: 13798 - RNA, 21 nt, RNAi
uuuaugacguaggccuuucuc

SEQ ID NO: 13799 - DNA, 21 bp, Homo sapiens
aatactgcatccggaaagaga

SEQ ID NO: 13800 - RNA, 21 nt, RNAi
uacugcauccggaaagagauu

SEQ ID NO: 13801 - RNA, 21 nt, RNAi
uuaugacguaggccuuucucu

SEQ ID NO: 13802 - DNA, 21 bp, Homo sapiens
aaagagatagagacctcagag

SEQ ID NO: 13803 - RNA, 21 nt, RNAi
agagauagagaccucagaguu

SEQ ID NO: 13804 - RNA, 21 nt, RNAi
uuucucuaucucuggagucuc

SEQ ID NO: 13805 - DNA, 21 bp, Homo sapiens
aagagatagagacctcagagc

SEQ ID NO: 13806 - RNA, 21 nt, RNAi
gagauagagaccucagagcuu

SEQ ID NO: 13807 - RNA, 21 nt, RNAi
uucucuaucucuggagucucg

SEQ ID NO: 13808 - DNA, 21 bp, Homo sapiens
aattacagtatcctcattgga

SEQ ID NO: 13809 - RNA, 21 nt, RNAi
uuacaguauccucauuggauu

SEQ ID NO: 13810 - RNA, 21 nt, RNAi
uuaaugucauaggaguaaccu

SEQ ID NO: 13811 - DNA, 21 bp, Homo sapiens
aaattctacgaaatcgacatg

SEQ ID NO: 13812 - RNA, 21 nt, RNAi
auucuacgaaaucgacauguu

SEQ ID NO: 13813 - RNA, 21 nt, RNAi
uuuaagaugcuuuagcuguac

SEQ ID NO: 13814 - DNA, 21 bp, Homo sapiens
aattctacgaaatcgacatga

SEQ ID NO: 13815 - RNA, 21 nt, RNAi
uucuacgaaaucgacaugauu

SEQ ID NO: 13816 - RNA, 21 nt, RNAi
uuaagaugcuuuagcuguacu

SEQ ID NO: 13817 - DNA, 21 bp, Homo sapiens
aaatcgacatgaagcagtaca

SEQ ID NO: 13818 - RNA, 21 nt, RNAi
aucgacaugaagcaguacauu

SEQ ID NO: 13819 - RNA, 21 nt, RNAi
uuuagcuguacuucgucaugu

SEQ ID NO: 13820 - DNA, 21 bp, Homo sapiens
aatcgacatgaagcagtacac

SEQ ID NO: 13821 - RNA, 21 nt, RNAi
ucgacaugaagcaguacacuu

SEQ ID NO: 13822 - RNA, 21 nt, RNAi
uuagcuguacuucgucaugug

SEQ ID NO: 13823 - DNA, 21 bp, Homo sapiens
aagcagtacacgctcgaggaa

SEQ ID NO: 13824 - RNA, 21 nt, RNAi
gcaguacacgcucgaggaauu

SEQ ID NO: 13825 - RNA, 21 nt, RNAi
uucgucaugugcgagcuccuu

SEQ ID NO: 13826 - DNA, 21 bp, Homo sapiens
aattcctggataagaatgacc

SEQ ID NO: 13827 - RNA, 21 nt, RNAi
uuccuggauaagaaugaccuu

SEQ ID NO: 13828 - RNA, 21 nt, RNAi
uuaaggaccuauucuuacugg

SEQ ID NO: 13829 - DNA, 21 bp, Homo sapiens
aagaatgaccattccttggca

SEQ ID NO: 13830 - RNA, 21 nt, RNAi
gaaugaccauuccuuggcauu

SEQ ID NO: 13831 - RNA, 21 nt, RNAi
uucuuacugguaaggaaccgu

SEQ ID NO: 13832 - DNA, 21 bp, Homo sapiens
aatgaccattccttggcacct

SEQ ID NO: 13833 - RNA, 21 nt, RNAi
ugaccauuccuuggcaccuuu

SEQ ID NO: 13834 - RNA, 21 nt, RNAi
uuacugguaaggaaccgugga

SEQ ID NO: 13835 - DNA, 21 bp, Homo sapiens
aatcgtgcaggtgaacagcgc

SEQ ID NO: 13836 - RNA, 21 nt, RNAi
ucgugcaggugaacagcgcuu

SEQ ID NO: 13837 - RNA, 21 nt, RNAi
uuagcacguccacuugucgcg

SEQ ID NO: 13838 - DNA, 21 bp, Homo sapiens
aatttggagtgttcgtggatt

SEQ ID NO: 13839 - RNA, 21 nt, RNAi
uuuggaguguucguggauuuu

SEQ ID NO: 13840 - RNA, 21 nt, RNAi
uuaaaccucacaagcaccuaa

SEQ ID NO: 13841 - DNA, 21 bp, Homo sapiens
aagacgtagccgcacagacga

SEQ ID NO: 13842 - RNA, 21 nt, RNAi
gacguagccgcacagacgauu

SEQ ID NO: 13843 - RNA, 21 nt, RNAi
uucugcaucggcgugucugcu

SEQ ID NO: 13844 - DNA, 21 bp, Homo sapiens
aagtggagtcgcttacctttg

SEQ ID NO: 13845 - RNA, 21 nt, RNAi
guggagucgcuuaccuuuguu

SEQ ID NO: 13846 - RNA, 21 nt, RNAi
uucaccucagcgaauggaaac

SEQ ID NO: 13847 - DNA, 21 bp, Homo sapiens
aactcactcgaagtaattgag

SEQ ID NO: 13848 - RNA, 21 nt, RNAi
cucacucgaaguaauugaguu

SEQ ID NO: 13849 - RNA, 21 nt, RNAi
uugagugagcuucauuaacuc

SEQ ID NO: 13850 - DNA, 21 bp, Homo sapiens
aagtaattgagatccaggcac

SEQ ID NO: 13851 - RNA, 21 nt, RNAi
guaauugagauccaggcacuu

SEQ ID NO: 13852 - RNA, 21 nt, RNAi
uucauuaacucuagguccgug

SEQ ID NO: 13853 - DNA, 21 bp, Homo sapiens
aattgagatccaggcacgctc

SEQ ID NO: 13854 - RNA, 21 nt, RNAi
uugagauccaggcacgcucuu

SEQ ID NO: 13855 - RNA, 21 nt, RNAi
uuaacucuagguccgugcgag

SEQ ID NO: 13856 - DNA, 21 bp, Homo sapiens
aaacctcgtgaaggagtccgg

SEQ ID NO: 13857 - RNA, 21 nt, RNAi
accucgugaaggaguccgguu

SEQ ID NO: 13858 - RNA, 21 nt, RNAi
uuuggagcacuuccucaggcc

SEQ ID NO: 13859 - DNA, 21 bp, Homo sapiens
aacctcgtgaaggagtccggc

SEQ ID NO: 13860 - RNA, 21 nt, RNAi
ccucgugaaggaguccggcuu

SEQ ID NO: 13861 - RNA, 21 nt, RNAi
uuggagcacuuccucaggccg

SEQ ID NO: 13862 - DNA, 21 bp, Homo sapiens
aaggagtccggcactgaacac

SEQ ID NO: 13863 - RNA, 21 nt, RNAi
ggaguccggcacugaacacuu

SEQ ID NO: 13864 - RNA, 21 nt, RNAi
uuccucaggccgugacuugug

SEQ ID NO: 13865 - DNA, 21 bp, Homo sapiens
aacgagcacatcaccaagcgc

SEQ ID NO: 13866 - RNA, 21 nt, RNAi
cgagcacaucaccaagcgcuu

SEQ ID NO: 13867 - RNA, 21 nt, RNAi
uugcucguguagugguucgcg

SEQ ID NO: 13868 - DNA, 21 bp, Homo sapiens
aaaccaactcctcatcttgat

SEQ ID NO: 13869 - RNA, 21 nt, RNAi
accaacuccucaucuugauuu

SEQ ID NO: 13870 - RNA, 21 nt, RNAi
uuugguugaggaguagaacua

SEQ ID NO: 13871 - DNA, 21 bp, Homo sapiens
aaccaactcctcatcttgatc

SEQ ID NO: 13872 - RNA, 21 nt, RNAi
ccaacuccucaucuugaucuu

SEQ ID NO: 13873 - RNA, 21 nt, RNAi
uugguugaggaguagaacuag

SEQ ID NO: 13874 - DNA, 21 bp, Homo sapiens
aactcctcatcttgatctgca

SEQ ID NO: 13875 - RNA, 21 nt, RNAi
cuccucaucuugaucugcauu

SEQ ID NO: 13876 - RNA, 21 nt, RNAi
uugaggaguagaacuagacgu

SEQ ID NO: 13877 - DNA, 21 bp, Homo sapiens
aaacaccaaacacactatgga

SEQ ID NO: 13878 - RNA, 21 nt, RNAi
acaccaaacacacuauggauu

SEQ ID NO: 13879 - RNA, 21 nt, RNAi
uuugugguuugugugauaccu

SEQ ID NO: 13880 - DNA, 21 bp, Homo sapiens
aacaccaaacacactatggaa

SEQ ID NO: 13881 - RNA, 21 nt, RNAi
caccaaacacacuauggaauu

SEQ ID NO: 13882 - RNA, 21 nt, RNAi
uugugguuugugugauaccuu

SEQ ID NO: 13883 - DNA, 21 bp, Homo sapiens
aaacacactatggaactctgc

SEQ ID NO: 13884 - RNA, 21 nt, RNAi
acacacuauggaacucugcuu

SEQ ID NO: 13885 - RNA, 21 nt, RNAi
uuugugugauaccuugagacg

SEQ ID NO: 13886 - DNA, 21 bp, Homo sapiens
aacacactatggaactctgct

SEQ ID NO: 13887 - RNA, 21 nt, RNAi
cacacuauggaacucugcuuu

SEQ ID NO: 13888 - RNA, 21 nt, RNAi
uugugugauaccuugagacga

SEQ ID NO: 13889 - DNA, 21 bp, Homo sapiens
aactacaacatggttagaatc

SEQ ID NO: 13890 - RNA, 21 nt, RNAi
cuacaacaugguuagaaucuu

SEQ ID NO: 13891 - RNA, 21 nt, RNAi
uugauguuguaccaaucuuag

SEQ ID NO: 13892 - DNA, 21 bp, Homo sapiens
aagatcctaggattggttggt

SEQ ID NO: 13893 - RNA, 21 nt, RNAi
gauccuaggauugguugguuu

SEQ ID NO: 13894 - RNA, 21 nt, RNAi
uucuaggauccuaaccaacca

SEQ ID NO: 13895 - DNA, 21 bp, Homo sapiens
aatagatttgaatagcgacgt

SEQ ID NO: 13896 - RNA, 21 nt, RNAi
uagauuugaauagcgacguuu

SEQ ID NO: 13897 - RNA, 21 nt, RNAi
uuaucuaaacuuaucgcugca

SEQ ID NO: 13898 - DNA, 21 bp, Homo sapiens
aatagcgacgtatttcctgtt

SEQ ID NO: 13899 - RNA, 21 nt, RNAi
uagcgacguauuuccuguuuu

SEQ ID NO: 13900 - RNA, 21 nt, RNAi
uuaucgcugcauaaaggacaa

SEQ ID NO: 13901 - DNA, 21 bp, Homo sapiens
aagtaggttcatccttgttcc

SEQ ID NO: 13902 - RNA, 21 nt, RNAi
guagguucauccuuguuccuu

SEQ ID NO: 13903 - RNA, 21 nt, RNAi
uucauccaaguaggaacaagg

SEQ ID NO: 13904 - DNA, 21 bp, Homo sapiens
aaagcatgcaatagacttgct

SEQ ID NO: 13905 - RNA, 21 nt, RNAi
agcaugcaauagacuugcuuu

SEQ ID NO: 13906 - RNA, 21 nt, RNAi
uuucguacguuaucugaacga

SEQ ID NO: 13907 - DNA, 21 bp, Homo sapiens
aagcatgcaatagacttgctc

SEQ ID NO: 13908 - RNA, 21 nt, RNAi
gcaugcaauagacuugcucuu

SEQ ID NO: 13909 - RNA, 21 nt, RNAi
uucguacguuaucugaacgag

SEQ ID NO: 13910 - DNA, 21 bp, Homo sapiens
aactggccaccacaagctgca

SEQ ID NO: 13911 - RNA, 21 nt, RNAi
cuggccaccacaagcugcauu

SEQ ID NO: 13912 - RNA, 21 nt, RNAi
uugaccggugguguucgacgu

SEQ ID NO: 13913 - DNA, 21 bp, Homo sapiens
aagctgcagtctgtagcactg

SEQ ID NO: 13914 - RNA, 21 nt, RNAi
gcugcagucuguagcacuguu

SEQ ID NO: 13915 - RNA, 21 nt, RNAi
uucgacgucagacaucgugac

SEQ ID NO: 13916 - DNA, 21 bp, Homo sapiens
aaacgctcaagccttacgacc

SEQ ID NO: 13917 - RNA, 21 nt, RNAi
acgcucaagccuuacgaccuu

SEQ ID NO: 13918 - RNA, 21 nt, RNAi
uuugcgaguucggaaugcugg

SEQ ID NO: 13919 - DNA, 21 bp, Homo sapiens
aacgctcaagccttacgacca

SEQ ID NO: 13920 - RNA, 21 nt, RNAi
cgcucaagccuuacgaccauu

SEQ ID NO: 13921 - RNA, 21 nt, RNAi
uugcgaguucggaaugcuggu

SEQ ID NO: 13922 - DNA, 21 bp, Homo sapiens
aagccttacgaccagagaagg

SEQ ID NO: 13923 - RNA, 21 nt, RNAi
gccuuacgaccagagaagguu

SEQ ID NO: 13924 - RNA, 21 nt, RNAi
uucggaaugcuggucucuucc

SEQ ID NO: 13925 - DNA, 21 bp, Homo sapiens
aaggatttcagcaaaccacca

SEQ ID NO: 13926 - RNA, 21 nt, RNAi
ggauuucagcaaaccaccauu

SEQ ID NO: 13927 - RNA, 21 nt, RNAi
uuccuaaagucguuugguggu

SEQ ID NO: 13928 - DNA, 21 bp, Homo sapiens
aaactgtgactttccaaatga

SEQ ID NO: 13929 - RNA, 21 nt, RNAi
acugugacuuuccaaaugauu

SEQ ID NO: 13930 - RNA, 21 nt, RNAi
uuugacacugaaagguuuacu

SEQ ID NO: 13931 - DNA, 21 bp, Homo sapiens
aactgtgactttccaaatgag

SEQ ID NO: 13932 - RNA, 21 nt, RNAi
cugugacuuuccaaaugaguu

SEQ ID NO: 13933 - RNA, 21 nt, RNAi
uugacacugaaagguuuacuc

SEQ ID NO: 13934 - DNA, 21 bp, Homo sapiens
aagaccaggaagtttgagaaa

SEQ ID NO: 13935 - RNA, 21 nt, RNAi
gaccaggaaguuugagaaauu

SEQ ID NO: 13936 - RNA, 21 nt, RNAi
uucugguccuucaaacucuuu

SEQ ID NO: 13937 - DNA, 21 bp, Homo sapiens
aagtttgagaaagcagccgca

SEQ ID NO: 13938 - RNA, 21 nt, RNAi
guuugagaaagcagccgcauu

SEQ ID NO: 13939 - RNA, 21 nt, RNAi
uucaaacucuuucgucggcgu

SEQ ID NO: 13940 - DNA, 21 bp, Homo sapiens
aaagcagccgcagctcaactc

SEQ ID NO: 13941 - RNA, 21 nt, RNAi
agcagccgcagcucaacucuu

SEQ ID NO: 13942 - RNA, 21 nt, RNAi
uuucgucggcgucgaguugag

SEQ ID NO: 13943 - DNA, 21 bp, Homo sapiens
aagcagccgcagctcaactct

SEQ ID NO: 13944 - RNA, 21 nt, RNAi
gcagccgcagcucaacucuuu

SEQ ID NO: 13945 - RNA, 21 nt, RNAi
uucgucggcgucgaguugaga

SEQ ID NO: 13946 - DNA, 21 bp, Homo sapiens
aactcttccagctccgccagg

SEQ ID NO: 13947 - RNA, 21 nt, RNAi
cucuuccagcuccgccagguu

SEQ ID NO: 13948 - RNA, 21 nt, RNAi
uugagaaggucgaggcggucc

SEQ ID NO: 13949 - DNA, 21 bp, Homo sapiens
aagtccttaggtgcagtgcgg

SEQ ID NO: 13950 - RNA, 21 nt, RNAi
guccuuaggugcagugcgguu

SEQ ID NO: 13951 - RNA, 21 nt, RNAi
uucaggaauccacgucacgcc

SEQ ID NO: 13952 - DNA, 21 bp, Homo sapiens
aaattcctggcaactggtaca

SEQ ID NO: 13953 - RNA, 21 nt, RNAi
auuccuggcaacugguacauu

SEQ ID NO: 13954 - RNA, 21 nt, RNAi
uuuaaggaccguugaccaugu

SEQ ID NO: 13955 - DNA, 21 bp, Homo sapiens
aattcctggcaactggtacag

SEQ ID NO: 13956 - RNA, 21 nt, RNAi
uuccuggcaacugguacaguu

SEQ ID NO: 13957 - RNA, 21 nt, RNAi
uuaaggaccguugaccauguc

SEQ ID NO: 13958 - DNA, 21 bp, Homo sapiens
aactggtacagaaccaaccta

SEQ ID NO: 13959 - RNA, 21 nt, RNAi
cugguacagaaccaaccuauu

SEQ ID NO: 13960 - RNA, 21 nt, RNAi
uugaccaugucuugguuggau

SEQ ID NO: 13961 - DNA, 21 bp, Homo sapiens
aaccaacctagaggctttgca

SEQ ID NO: 13962 - RNA, 21 nt, RNAi
ccaaccuagaggcuuugcauu

SEQ ID NO: 13963 - RNA, 21 nt, RNAi
uugguuggaucuccgaaacgu

SEQ ID NO: 13964 - DNA, 21 bp, Homo sapiens
aacctagaggctttgcagttg

SEQ ID NO: 13965 - RNA, 21 nt, RNAi
ccuagaggcuuugcaguuguu

SEQ ID NO: 13966 - RNA, 21 nt, RNAi
uuggaucuccgaaacgucaac

SEQ ID NO: 13967 - DNA, 21 bp, Homo sapiens
aactgtgtccacagttcagat

SEQ ID NO: 13968 - RNA, 21 nt, RNAi
cuguguccacaguucagauuu

SEQ ID NO: 13969 - RNA, 21 nt, RNAi
uugacacaggugucaagucua

SEQ ID NO: 13970 - DNA, 21 bp, Homo sapiens
aacctaagtgctttcttgttt

SEQ ID NO: 13971 - RNA, 21 nt, RNAi
ccuaagugcuuucuuguuuuu

SEQ ID NO: 13972 - RNA, 21 nt, RNAi
uuggauucacgaaagaacaaa

SEQ ID NO: 13973 - DNA, 21 bp, Homo sapiens
aagtgctttcttgtttgaaac

SEQ ID NO: 13974 - RNA, 21 nt, RNAi
gugcuuucuuguuugaaacuu

SEQ ID NO: 13975 - RNA, 21 nt, RNAi
uucacgaaagaacaaacuuug

SEQ ID NO: 13976 - DNA, 21 bp, Homo sapiens
aaacgcctacaaacctccatg

SEQ ID NO: 13977 - RNA, 21 nt, RNAi
acgccuacaaaccuccauguu

SEQ ID NO: 13978 - RNA, 21 nt, RNAi
uuugcggauguuuggagguac

SEQ ID NO: 13979 - DNA, 21 bp, Homo sapiens
aacgcctacaaacctccatgt

SEQ ID NO: 13980 - RNA, 21 nt, RNAi
cgccuacaaaccuccauguuu

SEQ ID NO: 13981 - RNA, 21 nt, RNAi
uugcggauguuuggagguaca

SEQ ID NO: 13982 - DNA, 21 bp, Homo sapiens
aaacctccatgtggtagctcc

SEQ ID NO: 13983 - RNA, 21 nt, RNAi
accuccaugugguagcuccuu

SEQ ID NO: 13984 - RNA, 21 nt, RNAi
uuuggagguacaccaucgagg

SEQ ID NO: 13985 - DNA, 21 bp, Homo sapiens
aacctccatgtggtagctcct

SEQ ID NO: 13986 - RNA, 21 nt, RNAi
ccuccaugugguagcuccuuu

SEQ ID NO: 13987 - RNA, 21 nt, RNAi
uuggagguacaccaucgagga

SEQ ID NO: 13988 - DNA, 21 bp, Homo sapiens
aaatgtcctgctgtggcgttt

SEQ ID NO: 13989 - RNA, 21 nt, RNAi
auguccugcuguggcguuuuu

SEQ ID NO: 13990 - RNA, 21 nt, RNAi
uuuacaggacgacaccgcaaa

SEQ ID NO: 13991 - DNA, 21 bp, Homo sapiens
aactgctttctgctatataga

SEQ ID NO: 13992 - RNA, 21 nt, RNAi
cugcuuucugcuauauagauu

SEQ ID NO: 13993 - RNA, 21 nt, RNAi
uugacgaaagacgauauaucu

SEQ ID NO: 13994 - DNA, 21 bp, Homo sapiens
aatggtggtagttgtggacag

SEQ ID NO: 13995 - RNA, 21 nt, RNAi
uggugguaguuguggacaguu

SEQ ID NO: 13996 - RNA, 21 nt, RNAi
uuaccaccaucaacaccuguc

SEQ ID NO: 13997 - DNA, 21 bp, Homo sapiens
aagatgccagcaggatatacc

SEQ ID NO: 13998 - RNA, 21 nt, RNAi
gaugccagcaggauauaccuu

SEQ ID NO: 13999 - RNA, 21 nt, RNAi
uucuacggucguccuauaugg

SEQ ID NO: 14000 - DNA, 21 bp, Homo sapiens
aatcaagattctaggtctcca

SEQ ID NO: 14001 - RNA, 21 nt, RNAi
ucaagauucuaggucuccauu

SEQ ID NO: 14002 - RNA, 21 nt, RNAi
uuaguucuaagauccagaggu

SEQ ID NO: 14003 - DNA, 21 bp, Homo sapiens
aacgaggaagagaacacaagg

SEQ ID NO: 14004 - RNA, 21 nt, RNAi
cgaggaagagaacacaagguu

SEQ ID NO: 14005 - RNA, 21 nt, RNAi
uugcuccuucucuuguguucc

SEQ ID NO: 14006 - DNA, 21 bp, Homo sapiens
aagagaacacaaggaatgatt

SEQ ID NO: 14007 - RNA, 21 nt, RNAi
gagaacacaaggaaugauuuu

SEQ ID NO: 14008 - RNA, 21 nt, RNAi
uucucuuguguuccuuacuaa

SEQ ID NO: 14009 - DNA, 21 bp, Homo sapiens
aacacaaggaatgattcaaga

SEQ ID NO: 14010 - RNA, 21 nt, RNAi
cacaaggaaugauucaagauu

SEQ ID NO: 14011 - RNA, 21 nt, RNAi
uuguguuccuuacuaaguucu

SEQ ID NO: 14012 - DNA, 21 bp, Homo sapiens
aaggaatgattcaagatccac

SEQ ID NO: 14013 - RNA, 21 nt, RNAi
ggaaugauucaagauccacuu

SEQ ID NO: 14014 - RNA, 21 nt, RNAi
uuccuuacuaaguucuaggug

SEQ ID NO: 14015 - DNA, 21 bp, Homo sapiens
aatgattcaagatccaccttg

SEQ ID NO: 14016 - RNA, 21 nt, RNAi
ugauucaagauccaccuuguu

SEQ ID NO: 14017 - RNA, 21 nt, RNAi
uuacuaaguucuagguggaac

SEQ ID NO: 14018 - DNA, 21 bp, Homo sapiens
aagatccaccttgagaggaat

SEQ ID NO: 14019 - RNA, 21 nt, RNAi
gauccaccuugagaggaauuu

SEQ ID NO: 14020 - RNA, 21 nt, RNAi
uucuagguggaacucuccuua

SEQ ID NO: 14021 - DNA, 21 bp, Homo sapiens
cagtgaaggagcacaaggctg

SEQ ID NO: 14022 - RNA, 21 nt, RNAi
gugaaggagcacaaggcuguu

SEQ ID NO: 14023 - RNA, 21 nt, RNAi
uucacuuccucguguuccgac

SEQ ID NO: 14024 - DNA, 21 bp, Homo sapiens
cacaaggctgagattctcgct

SEQ ID NO: 14025 - RNA, 21 nt, RNAi
caaggcugagauucucgcuuu

SEQ ID NO: 14026 - RNA, 21 nt, RNAi
uuguuccgacucuaagagcga

SEQ ID NO: 14027 - DNA, 21 bp, Homo sapiens
caaggctgagattctcgctct

SEQ ID NO: 14028 - RNA, 21 nt, RNAi
aggcugagauucucgcucuuu

SEQ ID NO: 14029 - RNA, 21 nt, RNAi
uuuccgacucuaagagcgaga

SEQ ID NO: 14030 - DNA, 21 bp, Homo sapiens
cagcaggctctcaaagagcag

SEQ ID NO: 14031 - RNA, 21 nt, RNAi
gcaggcucucaaagagcaguu

SEQ ID NO: 14032 - RNA, 21 nt, RNAi
uucguccgagaguuucucguc

SEQ ID NO: 14033 - DNA, 21 bp, Homo sapiens
caggctctcaaagagcagaag

SEQ ID NO: 14034 - RNA, 21 nt, RNAi
ggcucucaaagagcagaaguu

SEQ ID NO: 14035 - RNA, 21 nt, RNAi
uuccgagaguuucucgucuuc

SEQ ID NO: 14036 - DNA, 21 bp, Homo sapiens
caaagagcagaagctgaaggc

SEQ ID NO: 14037 - RNA, 21 nt, RNAi
aagagcagaagcugaaggcuu

SEQ ID NO: 14038 - RNA, 21 nt, RNAi
uuuucucgucuucgacuuccg

SEQ ID NO: 14039 - DNA, 21 bp, Homo sapiens
cagaagctgaaggccgagagc

SEQ ID NO: 14040 - RNA, 21 nt, RNAi
gaagcugaaggccgagagcuu

SEQ ID NO: 14041 - RNA, 21 nt, RNAi
uucuucgacuuccggcucucg

SEQ ID NO: 14042 - DNA, 21 bp, Homo sapiens
caagctcaatgacctggagaa

SEQ ID NO: 14043 - RNA, 21 nt, RNAi
agcucaaugaccuggagaauu

SEQ ID NO: 14044 - RNA, 21 nt, RNAi
uuucgaguuacuggaccucuu

SEQ ID NO: 14045 - DNA, 21 bp, Homo sapiens
caatgacctggagaagaagca

SEQ ID NO: 14046 - RNA, 21 nt, RNAi
augaccuggagaagaagcauu

SEQ ID NO: 14047 - RNA, 21 nt, RNAi
uuuacuggaccucuucuucgu

SEQ ID NO: 14048 - DNA, 21 bp, Homo sapiens
catgctatgcttgaaatgaat

SEQ ID NO: 14049 - RNA, 21 nt, RNAi
ugcuaugcuugaaaugaauuu

SEQ ID NO: 14050 - RNA, 21 nt, RNAi
uuacgauacgaacuuuacuua

SEQ ID NO: 14051 - DNA, 21 bp, Homo sapiens
cagcagaagctggagactgaa

SEQ ID NO: 14052 - RNA, 21 nt, RNAi
gcagaagcuggagacugaauu

SEQ ID NO: 14053 - RNA, 21 nt, RNAi
uucgucuucgaccucugacuu

SEQ ID NO: 14054 - DNA, 21 bp, Homo sapiens
cagaagctggagactgaacga

SEQ ID NO: 14055 - RNA, 21 nt, RNAi
gaagcuggagacugaacgauu

SEQ ID NO: 14056 - RNA, 21 nt, RNAi
uucuucgaccucugacuugcu

SEQ ID NO: 14057 - DNA, 21 bp, Homo sapiens
caaacagaggcttctggaaga

SEQ ID NO: 14058 - RNA, 21 nt, RNAi
aacagaggcuucuggaagauu

SEQ ID NO: 14059 - RNA, 21 nt, RNAi
uuuugucuccgaagaccuucu

SEQ ID NO: 14060 - DNA, 21 bp, Homo sapiens
cagaggcttctggaagagcaa

SEQ ID NO: 14061 - RNA, 21 nt, RNAi
gaggcuucuggaagagcaauu

SEQ ID NO: 14062 - RNA, 21 nt, RNAi
uucuccgaagaccuucucguu

SEQ ID NO: 14063 - DNA, 21 bp, Homo sapiens
caagccaaattacagcagcag

SEQ ID NO: 14064 - RNA, 21 nt, RNAi
agccaaauuacagcagcaguu

SEQ ID NO: 14065 - RNA, 21 nt, RNAi
uuucgguuuaaugucgucguc

SEQ ID NO: 14066 - DNA, 21 bp, Homo sapiens
caaattacagcagcagatgga

SEQ ID NO: 14067 - RNA, 21 nt, RNAi
aauuacagcagcagauggauu

SEQ ID NO: 14068 - RNA, 21 nt, RNAi
uuuuaaugucgucgucuaccu

SEQ ID NO: 14069 - DNA, 21 bp, Homo sapiens
cagcagcagatggacctgcag

SEQ ID NO: 14070 - RNA, 21 nt, RNAi
gcagcagauggaccugcaguu

SEQ ID NO: 14071 - RNA, 21 nt, RNAi
uucgucgucuaccuggacguc

SEQ ID NO: 14072 - DNA, 21 bp, Homo sapiens
cagcagatggacctgcagaaa

SEQ ID NO: 14073 - RNA, 21 nt, RNAi
gcagauggaccugcagaaauu

SEQ ID NO: 14074 - RNA, 21 nt, RNAi
uucgucuaccuggacgucuuu

SEQ ID NO: 14075 - DNA, 21 bp, Homo sapiens
caaggactgcaagaagctcta

SEQ ID NO: 14076 - RNA, 21 nt, RNAi
aggacugcaagaagcucuauu

SEQ ID NO: 14077 - RNA, 21 nt, RNAi
uuuccugacguucuucgagau

SEQ ID NO: 14078 - DNA, 21 bp, Homo sapiens
cagaaagaagtgacttggagt

SEQ ID NO: 14079 - RNA, 21 nt, RNAi
gaaagaagugacuuggaguuu

SEQ ID NO: 14080 - RNA, 21 nt, RNAi
uucuuucuucacugaaccuca

SEQ ID NO: 14081 - DNA, 21 bp, Homo sapiens
cattcaggttctctattctca

SEQ ID NO: 14082 - RNA, 21 nt, RNAi
uucagguucucuauucucauu

SEQ ID NO: 14083 - RNA, 21 nt, RNAi
uuaaguccaagagauaagagu

SEQ ID NO: 14084 - DNA, 21 bp, Homo sapiens
caggttctctattctcatgaa

SEQ ID NO: 14085 - RNA, 21 nt, RNAi
gguucucuauucucaugaauu

SEQ ID NO: 14086 - RNA, 21 nt, RNAi
uuccaagagauaagaguacuu

SEQ ID NO: 14087 - DNA, 21 bp, Homo sapiens
cactatttctcaacaaaccaa

SEQ ID NO: 14088 - RNA, 21 nt, RNAi
cuauuucucaacaaaccaauu

SEQ ID NO: 14089 - RNA, 21 nt, RNAi
uugauaaagaguuguuugguu

SEQ ID NO: 14090 - DNA, 21 bp, Homo sapiens
caacaaaccaaactcattgat

SEQ ID NO: 14091 - RNA, 21 nt, RNAi
acaaaccaaacucauugauuu

SEQ ID NO: 14092 - RNA, 21 nt, RNAi
uuuguuugguuugaguaacua

SEQ ID NO: 14093 - DNA, 21 bp, Homo sapiens
cagtacaatgagctgaagctg

SEQ ID NO: 14094 - RNA, 21 nt, RNAi
guacaaugagcugaagcuguu

SEQ ID NO: 14095 - RNA, 21 nt, RNAi
uucauguuacucgacuucgac

SEQ ID NO: 14096 - DNA, 21 bp, Homo sapiens
caccgcaaagcaacggaccac

SEQ ID NO: 14097 - RNA, 21 nt, RNAi
ccgcaaagcaacggaccacuu

SEQ ID NO: 14098 - RNA, 21 nt, RNAi
uuggcguuucguugccuggug

SEQ ID NO: 14099 - DNA, 21 bp, Homo sapiens
cagatcgccatgtccgccatc

SEQ ID NO: 14100 - RNA, 21 nt, RNAi
gaucgccauguccgccaucuu

SEQ ID NO: 14101 - RNA, 21 nt, RNAi
uucuagcgguacaggcgguag

SEQ ID NO: 14102 - DNA, 21 bp, Homo sapiens
catccagccgcagaaaggagt

SEQ ID NO: 14103 - RNA, 21 nt, RNAi
uccagccgcagaaaggaguuu

SEQ ID NO: 14104 - RNA, 21 nt, RNAi
uuaggucggcgucuuuccuca

SEQ ID NO: 14105 - DNA, 21 bp, Homo sapiens
cagccgcagaaaggagtcttc

SEQ ID NO: 14106 - RNA, 21 nt, RNAi
gccgcagaaaggagucuucuu

SEQ ID NO: 14107 - RNA, 21 nt, RNAi
uucggcgucuuuccucagaag

SEQ ID NO: 14108 - DNA, 21 bp, Homo sapiens
cagaaaggagtcttcaactcc

SEQ ID NO: 14109 - RNA, 21 nt, RNAi
gaaaggagucuucaacuccuu

SEQ ID NO: 14110 - RNA, 21 nt, RNAi
uucuuuccucagaaguugagg

SEQ ID NO: 14111 - DNA, 21 bp, Homo sapiens
caactccagaggaatttagtc

SEQ ID NO: 14112 - RNA, 21 nt, RNAi
acuccagaggaauuuagucuu

SEQ ID NO: 14113 - RNA, 21 nt, RNAi
uuugaggucuccuuaaaucag

SEQ ID NO: 14114 - DNA, 21 bp, Homo sapiens
cagaggaatttagtcggcgtc

SEQ ID NO: 14115 - RNA, 21 nt, RNAi
gaggaauuuagucggcgucuu

SEQ ID NO: 14116 - RNA, 21 nt, RNAi
uucuccuuaaaucagccgcag

SEQ ID NO: 14117 - DNA, 21 bp, Homo sapiens
catgcaccacaatattcctca

SEQ ID NO: 14118 - RNA, 21 nt, RNAi
ugcaccacaauauuccucauu

SEQ ID NO: 14119 - RNA, 21 nt, RNAi
uuacgugguguuauaaggagu

SEQ ID NO: 14120 - DNA, 21 bp, Homo sapiens
caccacaatattcctcaccga

SEQ ID NO: 14121 - RNA, 21 nt, RNAi
ccacaauauuccucaccgauu

SEQ ID NO: 14122 - RNA, 21 nt, RNAi
uugguguuauaaggaguggcu

SEQ ID NO: 14123 - DNA, 21 bp, Homo sapiens
cacaatattcctcaccgattc

SEQ ID NO: 14124 - RNA, 21 nt, RNAi
caauauuccucaccgauucuu

SEQ ID NO: 14125 - RNA, 21 nt, RNAi
uuguuauaaggaguggcuaag

SEQ ID NO: 14126 - DNA, 21 bp, Homo sapiens
caatattcctcaccgattcaa

SEQ ID NO: 14127 - RNA, 21 nt, RNAi
auauuccucaccgauucaauu

SEQ ID NO: 14128 - RNA, 21 nt, RNAi
uuuauaaggaguggcuaaguu

SEQ ID NO: 14129 - DNA, 21 bp, Homo sapiens
caccgattcaacgtaggactg

SEQ ID NO: 14130 - RNA, 21 nt, RNAi
ccgauucaacguaggacuguu

SEQ ID NO: 14131 - RNA, 21 nt, RNAi
uuggcuaaguugcauccugac

SEQ ID NO: 14132 - DNA, 21 bp, Homo sapiens
caacgtaggactgaacatgcg

SEQ ID NO: 14133 - RNA, 21 nt, RNAi
acguaggacugaacaugcguu

SEQ ID NO: 14134 - RNA, 21 nt, RNAi
uuugcauccugacuuguacgc

SEQ ID NO: 14135 - DNA, 21 bp, Homo sapiens
catgcgagccacaaagtgtgc

SEQ ID NO: 14136 - RNA, 21 nt, RNAi
ugcgagccacaaagugugcuu

SEQ ID NO: 14137 - RNA, 21 nt, RNAi
uuacgcucgguguuucacacg

SEQ ID NO: 14138 - DNA, 21 bp, Homo sapiens
cacaaagtgtgctgtgtgtct

SEQ ID NO: 14139 - RNA, 21 nt, RNAi
caaagugugcugugugucuuu

SEQ ID NO: 14140 - RNA, 21 nt, RNAi
uuguuucacacgacacacaga

SEQ ID NO: 14141 - DNA, 21 bp, Homo sapiens
caaagtgtgctgtgtgtctgg

SEQ ID NO: 14142 - RNA, 21 nt, RNAi
aagugugcugugugucugguu

SEQ ID NO: 14143 - RNA, 21 nt, RNAi
uuuucacacgacacacagacc

SEQ ID NO: 14144 - DNA, 21 bp, Homo sapiens
cactttggacgccaggcatcc

SEQ ID NO: 14145 - RNA, 21 nt, RNAi
cuuuggacgccaggcauccuu

SEQ ID NO: 14146 - RNA, 21 nt, RNAi
uugaaaccugcgguccguagg

SEQ ID NO: 14147 - DNA, 21 bp, Homo sapiens
caggcatccaaatgtctcgaa

SEQ ID NO: 14148 - RNA, 21 nt, RNAi
ggcauccaaaugucucgaauu

SEQ ID NO: 14149 - RNA, 21 nt, RNAi
uuccguagguuuacagagcuu

SEQ ID NO: 14150 - DNA, 21 bp, Homo sapiens
catccaaatgtctcgaatgtc

SEQ ID NO: 14151 - RNA, 21 nt, RNAi
uccaaaugucucgaaugucuu

SEQ ID NO: 14152 - RNA, 21 nt, RNAi
uuagguuuacagagcuuacag

SEQ ID NO: 14153 - DNA, 21 bp, Homo sapiens
caaatgtctcgaatgtcaggt

SEQ ID NO: 14154 - RNA, 21 nt, RNAi
aaugucucgaaugucagguuu

SEQ ID NO: 14155 - RNA, 21 nt, RNAi
uuuuacagagcuuacagucca

SEQ ID NO: 14156 - DNA, 21 bp, Homo sapiens
caagtgctccacgtgcttgcc

SEQ ID NO: 14157 - RNA, 21 nt, RNAi
agugcuccacgugcuugccuu

SEQ ID NO: 14158 - RNA, 21 nt, RNAi
uuucacgaggugcacgaacgg

SEQ ID NO: 14159 - DNA, 21 bp, Homo sapiens
cacacacttcaccgaggcctt

SEQ ID NO: 14160 - RNA, 21 nt, RNAi
cacacuucaccgaggccuuuu

SEQ ID NO: 14161 - RNA, 21 nt, RNAi
uugugugaaguggcuccggaa

SEQ ID NO: 14162 - DNA, 21 bp, Homo sapiens
cacacttcaccgaggccttct

SEQ ID NO: 14163 - RNA, 21 nt, RNAi
cacuucaccgaggccuucuuu

SEQ ID NO: 14164 - RNA, 21 nt, RNAi
uugugaaguggcuccggaaga

SEQ ID NO: 14165 - DNA, 21 bp, Homo sapiens
cacttcaccgaggccttctgc

SEQ ID NO: 14166 - RNA, 21 nt, RNAi
cuucaccgaggccuucugcuu

SEQ ID NO: 14167 - RNA, 21 nt, RNAi
uugaaguggcuccggaagacg

SEQ ID NO: 14168 - DNA, 21 bp, Homo sapiens
caggtctccagaccaaggagc

SEQ ID NO: 14169 - RNA, 21 nt, RNAi
ggucuccagaccaaggagcuu

SEQ ID NO: 14170 - RNA, 21 nt, RNAi
uuccagaggucugguuccucg

SEQ ID NO: 14171 - DNA, 21 bp, Homo sapiens
cagcagcagcttgcacctgga

SEQ ID NO: 14172 - RNA, 21 nt, RNAi
gcagcagcuugcaccuggauu

SEQ ID NO: 14173 - RNA, 21 nt, RNAi
uucgucgucgaacguggaccu

SEQ ID NO: 14174 - DNA, 21 bp, Homo sapiens
cagcagcttgcacctggaagg

SEQ ID NO: 14175 - RNA, 21 nt, RNAi
gcagcuugcaccuggaagguu

SEQ ID NO: 14176 - RNA, 21 nt, RNAi
uucgucgaacguggaccuucc

SEQ ID NO: 14177 - DNA, 21 bp, Homo sapiens
caggaataacaaacgaggaca

SEQ ID NO: 14178 - RNA, 21 nt, RNAi
ggaauaacaaacgaggacauu

SEQ ID NO: 14179 - RNA, 21 nt, RNAi
uuccuuauuguuugcuccugu

SEQ ID NO: 14180 - DNA, 21 bp, Homo sapiens
caaacgaggacagcaaggctg

SEQ ID NO: 14181 - RNA, 21 nt, RNAi
aacgaggacagcaaggcuguu

SEQ ID NO: 14182 - RNA, 21 nt, RNAi
uuuugcuccugucguuccgac

SEQ ID NO: 14183 - DNA, 21 bp, Homo sapiens
caggaagtacattgtcctgga

SEQ ID NO: 14184 - RNA, 21 nt, RNAi
ggaaguacauuguccuggauu

SEQ ID NO: 14185 - RNA, 21 nt, RNAi
uuccuucauguaacaggaccu

SEQ ID NO: 14186 - DNA, 21 bp, Homo sapiens
catttatgacaatgaagccag

SEQ ID NO: 14187 - RNA, 21 nt, RNAi
uuuaugacaaugaagccaguu

SEQ ID NO: 14188 - RNA, 21 nt, RNAi
uuaaauacuguuacuucgguc

SEQ ID NO: 14189 - DNA, 21 bp, Homo sapiens
caatgaagccagagaagctgg

SEQ ID NO: 14190 - RNA, 21 nt, RNAi
augaagccagagaagcugguu

SEQ ID NO: 14191 - RNA, 21 nt, RNAi
uuuacuucggucucuucgacc

SEQ ID NO: 14192 - DNA, 21 bp, Homo sapiens
cagagaagctggacagaggcc

SEQ ID NO: 14193 - RNA, 21 nt, RNAi
gagaagcuggacagaggccuu

SEQ ID NO: 14194 - RNA, 21 nt, RNAi
uucucuucgaccugucuccgg

SEQ ID NO: 14195 - DNA, 21 bp, Homo sapiens
cagaggccggtggaagaattt

SEQ ID NO: 14196 - RNA, 21 nt, RNAi
gaggccgguggaagaauuuuu

SEQ ID NO: 14197 - RNA, 21 nt, RNAi
uucuccggccaccuucuuaaa

SEQ ID NO: 14198 - DNA, 21 bp, Homo sapiens
catggtgccgttggtgcttcc

SEQ ID NO: 14199 - RNA, 21 nt, RNAi
uggugccguuggugcuuccuu

SEQ ID NO: 14200 - RNA, 21 nt, RNAi
uuaccacggcaaccacgaagg

SEQ ID NO: 14201 - DNA, 21 bp, Homo sapiens
caaatacagccaaagcagatg

SEQ ID NO: 14202 - RNA, 21 nt, RNAi
aauacagccaaagcagauguu

SEQ ID NO: 14203 - RNA, 21 nt, RNAi
uuuuaugucgguuucgucuac

SEQ ID NO: 14204 - DNA, 21 bp, Homo sapiens
catacatactgaagatggaat

SEQ ID NO: 14205 - RNA, 21 nt, RNAi
uacauacugaagauggaauuu

SEQ ID NO: 14206 - RNA, 21 nt, RNAi
uuauguaugacuucuaccuua

SEQ ID NO: 14207 - DNA, 21 bp, Homo sapiens
catactgaagatggaatctca

SEQ ID NO: 14208 - RNA, 21 nt, RNAi
uacugaagauggaaucucauu

SEQ ID NO: 14209 - RNA, 21 nt, RNAi
uuaugacuucuaccuuagagu

SEQ ID NO: 14210 - DNA, 21 bp, Homo sapiens
caccgccttagaatcagttgt

SEQ ID NO: 14211 - RNA, 21 nt, RNAi
ccgccuuagaaucaguuguuu

SEQ ID NO: 14212 - RNA, 21 nt, RNAi
uuggcggaaucuuagucaaca

SEQ ID NO: 14213 - DNA, 21 bp, Homo sapiens
cagaagctgatgctaaactgc

SEQ ID NO: 14214 - RNA, 21 nt, RNAi
gaagcugaugcuaaacugcuu

SEQ ID NO: 14215 - RNA, 21 nt, RNAi
uucuucgacuacgauuugacg

SEQ ID NO: 14216 - DNA, 21 bp, Homo sapiens
cagtgaccaggtggtgttggt

SEQ ID NO: 14217 - RNA, 21 nt, RNAi
gugaccaggugguguugguuu

SEQ ID NO: 14218 - RNA, 21 nt, RNAi
uucacugguccaccacaacca

SEQ ID NO: 14219 - DNA, 21 bp, Homo sapiens
caggaattggagcagtcttcc

SEQ ID NO: 14220 - RNA, 21 nt, RNAi
ggaauuggagcagucuuccuu

SEQ ID NO: 14221 - RNA, 21 nt, RNAi
uuccuuaaccucgucagaagg

SEQ ID NO: 14222 - DNA, 21 bp, Homo sapiens
caaggacctggagaagctact

SEQ ID NO: 14223 - RNA, 21 nt, RNAi
aggaccuggagaagcuacuuu

SEQ ID NO: 14224 - RNA, 21 nt, RNAi
uuuccuggaccucuucgauga

SEQ ID NO: 14225 - DNA, 21 bp, Homo sapiens
catgatagcaggagaagagcg

SEQ ID NO: 14226 - RNA, 21 nt, RNAi
ugauagcaggagaagagcguu

SEQ ID NO: 14227 - RNA, 21 nt, RNAi
uuacuaucguccucuucucgc

SEQ ID NO: 14228 - DNA, 21 bp, Homo sapiens
cactgtgtcttgtggacgtga

SEQ ID NO: 14229 - RNA, 21 nt, RNAi
cugugucuuguggacgugauu

SEQ ID NO: 14230 - RNA, 21 nt, RNAi
uugacacagaacaccugcacu

SEQ ID NO: 14231 - DNA, 21 bp, Homo sapiens
cagcaaagtcgtcattctccg

SEQ ID NO: 14232 - RNA, 21 nt, RNAi
gcaaagucgucauucuccguu

SEQ ID NO: 14233 - RNA, 21 nt, RNAi
uucguuucagcaguaagaggc

SEQ ID NO: 14234 - DNA, 21 bp, Homo sapiens
caaagtcgtcattctccgcta

SEQ ID NO: 14235 - RNA, 21 nt, RNAi
aagucgucauucuccgcuauu

SEQ ID NO: 14236 - RNA, 21 nt, RNAi
uuuucagcaguaagaggcgau

SEQ ID NO: 14237 - DNA, 21 bp, Homo sapiens
cagcaaatactgcatccggaa

SEQ ID NO: 14238 - RNA, 21 nt, RNAi
gcaaauacugcauccggaauu

SEQ ID NO: 14239 - RNA, 21 nt, RNAi
uucguuuaugacguaggccuu

SEQ ID NO: 14240 - DNA, 21 bp, Homo sapiens
caaatactgcatccggaaaga

SEQ ID NO: 14241 - RNA, 21 nt, RNAi
aauacugcauccggaaagauu

SEQ ID NO: 14242 - RNA, 21 nt, RNAi
uuuuaugacguaggccuuucu

SEQ ID NO: 14243 - DNA, 21 bp, Homo sapiens
catccggaaagagatagagac

SEQ ID NO: 14244 - RNA, 21 nt, RNAi
uccggaaagagauagagacuu

SEQ ID NO: 14245 - RNA, 21 nt, RNAi
uuaggccuuucucuaucucug

SEQ ID NO: 14246 - DNA, 21 bp, Homo sapiens
cagctgtatccacttcaccaa

SEQ ID NO: 14247 - RNA, 21 nt, RNAi
gcuguauccacuucaccaauu

SEQ ID NO: 14248 - RNA, 21 nt, RNAi
uucgacauaggugaagugguu

SEQ ID NO: 14249 - DNA, 21 bp, Homo sapiens
cacttcaccaattacagtatc

SEQ ID NO: 14250 - RNA, 21 nt, RNAi
cuucaccaauuacaguaucuu

SEQ ID NO: 14251 - RNA, 21 nt, RNAi
uugaagugguuaaugucauag

SEQ ID NO: 14252 - DNA, 21 bp, Homo sapiens
caccaattacagtatcctcat

SEQ ID NO: 14253 - RNA, 21 nt, RNAi
ccaauuacaguauccucauuu

SEQ ID NO: 14254 - RNA, 21 nt, RNAi
uugguuaaugucauaggagua

SEQ ID NO: 14255 - DNA, 21 bp, Homo sapiens
caattacagtatcctcattgg

SEQ ID NO: 14256 - RNA, 21 nt, RNAi
auuacaguauccucauugguu

SEQ ID NO: 14257 - RNA, 21 nt, RNAi
uuuaaugucauaggaguaacc

SEQ ID NO: 14258 - DNA, 21 bp, Homo sapiens
cagtatcctcattggaaccaa

SEQ ID NO: 14259 - RNA, 21 nt, RNAi
guauccucauuggaaccaauu

SEQ ID NO: 14260 - RNA, 21 nt, RNAi
uucauaggaguaaccuugguu

SEQ ID NO: 14261 - DNA, 21 bp, Homo sapiens
catgaagcagtacacgctcga

SEQ ID NO: 14262 - RNA, 21 nt, RNAi
ugaagcaguacacgcucgauu

SEQ ID NO: 14263 - RNA, 21 nt, RNAi
uuacuucgucaugugcgagcu

SEQ ID NO: 14264 - DNA, 21 bp, Homo sapiens
cagtacacgctcgaggaattc

SEQ ID NO: 14265 - RNA, 21 nt, RNAi
guacacgcucgaggaauucuu

SEQ ID NO: 14266 - RNA, 21 nt, RNAi
uucaugugcgagcuccuuaag

SEQ ID NO: 14267 - DNA, 21 bp, Homo sapiens
cacgctcgaggaattcctgga

SEQ ID NO: 14268 - RNA, 21 nt, RNAi
cgcucgaggaauuccuggauu

SEQ ID NO: 14269 - RNA, 21 nt, RNAi
uugcgagcuccuuaaggaccu

SEQ ID NO: 14270 - DNA, 21 bp, Homo sapiens
cattccttggcacctgctgtg

SEQ ID NO: 14271 - RNA, 21 nt, RNAi
uuccuuggcaccugcuguguu

SEQ ID NO: 14272 - RNA, 21 nt, RNAi
uuaaggaaccguggacgacac

SEQ ID NO: 14273 - DNA, 21 bp, Homo sapiens
cacctgctgtgtttgccgcct

SEQ ID NO: 14274 - RNA, 21 nt, RNAi
ccugcuguguuugccgccuuu

SEQ ID NO: 14275 - RNA, 21 nt, RNAi
uuggacgacacaaacggcgga

SEQ ID NO: 14276 - DNA, 21 bp, Homo sapiens
caatcgtgcaggtgaacagcg

SEQ ID NO: 14277 - RNA, 21 nt, RNAi
aucgugcaggugaacagcguu

SEQ ID NO: 14278 - RNA, 21 nt, RNAi
uuuagcacguccacuugucgc

SEQ ID NO: 14279 - DNA, 21 bp, Homo sapiens
cagcgagaggagtacttgctg

SEQ ID NO: 14280 - RNA, 21 nt, RNAi
gcgagaggaguacuugcuguu

SEQ ID NO: 14281 - RNA, 21 nt, RNAi
uucgcucuccucaugaacgac

SEQ ID NO: 14282 - DNA, 21 bp, Homo sapiens
cacgaatttggagtgttcgtg

SEQ ID NO: 14283 - RNA, 21 nt, RNAi
cgaauuuggaguguucguguu

SEQ ID NO: 14284 - RNA, 21 nt, RNAi
uugcuuaaaccucacaagcac

SEQ ID NO: 14285 - DNA, 21 bp, Homo sapiens
cacagacgatctcaagtggag

SEQ ID NO: 14286 - RNA, 21 nt, RNAi
cagacgaucucaaguggaguu

SEQ ID NO: 14287 - RNA, 21 nt, RNAi
uugucugcuagaguucaccuc

SEQ ID NO: 14288 - DNA, 21 bp, Homo sapiens
cagacgatctcaagtggagtc

SEQ ID NO: 14289 - RNA, 21 nt, RNAi
gacgaucucaaguggagucuu

SEQ ID NO: 14290 - RNA, 21 nt, RNAi
uucugcuagaguucaccucag

SEQ ID NO: 14291 - DNA, 21 bp, Homo sapiens
caagtggagtcgcttaccttt

SEQ ID NO: 14292 - RNA, 21 nt, RNAi
aguggagucgcuuaccuuuuu

SEQ ID NO: 14293 - RNA, 21 nt, RNAi
uuucaccucagcgaauggaaa

SEQ ID NO: 14294 - DNA, 21 bp, Homo sapiens
cacttcaactcactcgaagta

SEQ ID NO: 14295 - RNA, 21 nt, RNAi
cuucaacucacucgaaguauu

SEQ ID NO: 14296 - RNA, 21 nt, RNAi
uugaaguugagugagcuucau

SEQ ID NO: 14297 - DNA, 21 bp, Homo sapiens
caactcactcgaagtaattga

SEQ ID NO: 14298 - RNA, 21 nt, RNAi
acucacucgaaguaauugauu

SEQ ID NO: 14299 - RNA, 21 nt, RNAi
uuugagugagcuucauuaacu

SEQ ID NO: 14300 - DNA, 21 bp, Homo sapiens
cactcgaagtaattgagatcc

SEQ ID NO: 14301 - RNA, 21 nt, RNAi
cucgaaguaauugagauccuu

SEQ ID NO: 14302 - RNA, 21 nt, RNAi
uugagcuucauuaacucuagg

SEQ ID NO: 14303 - DNA, 21 bp, Homo sapiens
catttcctcaggagcgattta

SEQ ID NO: 14304 - RNA, 21 nt, RNAi
uuuccucaggagcgauuuauu

SEQ ID NO: 14305 - RNA, 21 nt, RNAi
uuaaaggaguccucgcuaaau

SEQ ID NO: 14306 - DNA, 21 bp, Homo sapiens
caggagcgatttacttggcgt

SEQ ID NO: 14307 - RNA, 21 nt, RNAi
ggagcgauuuacuuggcguuu

SEQ ID NO: 14308 - RNA, 21 nt, RNAi
uuccucgcuaaaugaaccgca

SEQ ID NO: 14309 - DNA, 21 bp, Homo sapiens
cacgtacaacgagcacatcac

SEQ ID NO: 14310 - RNA, 21 nt, RNAi
cguacaacgagcacaucacuu

SEQ ID NO: 14311 - RNA, 21 nt, RNAi
uugcauguugcucguguagug

SEQ ID NO: 14312 - DNA, 21 bp, Homo sapiens
caacgagcacatcaccaagcg

SEQ ID NO: 14313 - RNA, 21 nt, RNAi
acgagcacaucaccaagcguu

SEQ ID NO: 14314 - RNA, 21 nt, RNAi
uuugcucguguagugguucgc

SEQ ID NO: 14315 - DNA, 21 bp, Homo sapiens
cagtcttcagtataaatctca

SEQ ID NO: 14316 - RNA, 21 nt, RNAi
gucuucaguauaaaucucauu

SEQ ID NO: 14317 - RNA, 21 nt, RNAi
uucagaagucauauuuagagu

SEQ ID NO: 14318 - DNA, 21 bp, Homo sapiens
cagtataaatctcagccagaa

SEQ ID NO: 14319 - RNA, 21 nt, RNAi
guauaaaucucagccagaauu

SEQ ID NO: 14320 - RNA, 21 nt, RNAi
uucauauuuagagucggucuu

SEQ ID NO: 14321 - DNA, 21 bp, Homo sapiens
caactcctcatcttgatctgc

SEQ ID NO: 14322 - RNA, 21 nt, RNAi
acuccucaucuugaucugcuu

SEQ ID NO: 14323 - RNA, 21 nt, RNAi
uuugaggaguagaacuagacg

SEQ ID NO: 14324 - DNA, 21 bp, Homo sapiens
caccaaacacactatggaact

SEQ ID NO: 14325 - RNA, 21 nt, RNAi
ccaaacacacuauggaacuuu

SEQ ID NO: 14326 - RNA, 21 nt, RNAi
uugguuugugugauaccuuga

SEQ ID NO: 14327 - DNA, 21 bp, Homo sapiens
caaacacactatggaactctg

SEQ ID NO: 14328 - RNA, 21 nt, RNAi
aacacacuauggaacucuguu

SEQ ID NO: 14329 - RNA, 21 nt, RNAi
uuuugugugauaccuugagac

SEQ ID NO: 14330 - DNA, 21 bp, Homo sapiens
cacactatggaactctgctga

SEQ ID NO: 14331 - RNA, 21 nt, RNAi
cacuauggaacucugcugauu

SEQ ID NO: 14332 - RNA, 21 nt, RNAi
uugugauaccuugagacgacu

SEQ ID NO: 14333 - DNA, 21 bp, Homo sapiens
cactatggaactctgctgatg

SEQ ID NO: 14334 - RNA, 21 nt, RNAi
cuauggaacucugcugauguu

SEQ ID NO: 14335 - RNA, 21 nt, RNAi
uugauaccuugagacgacuac

SEQ ID NO: 14336 - DNA, 21 bp, Homo sapiens
cagtcatctctttgcactttg

SEQ ID NO: 14337 - RNA, 21 nt, RNAi
gucaucucuuugcacuuuguu

SEQ ID NO: 14338 - RNA, 21 nt, RNAi
uucaguagagaaacgugaaac

SEQ ID NO: 14339 - DNA, 21 bp, Homo sapiens
catctctttgcactttgttac

SEQ ID NO: 14340 - RNA, 21 nt, RNAi
ucucuuugcacuuuguuacuu

SEQ ID NO: 14341 - RNA, 21 nt, RNAi
uuagagaaacgugaaacaaug

SEQ ID NO: 14342 - DNA, 21 bp, Homo sapiens
cactttgttactctttcaaag

SEQ ID NO: 14343 - RNA, 21 nt, RNAi
cuuuguuacucuuucaaaguu

SEQ ID NO: 14344 - RNA, 21 nt, RNAi
uugaaacaaugagaaaguuuc

SEQ ID NO: 14345 - DNA, 21 bp, Homo sapiens
cagttagttcatcaaaggaaa

SEQ ID NO: 14346 - RNA, 21 nt, RNAi
guuaguucaucaaaggaaauu

SEQ ID NO: 14347 - RNA, 21 nt, RNAi
uucaaucaaguaguuuccuuu

SEQ ID NO: 14348 - DNA, 21 bp, Homo sapiens
caacatggttagaatcctaat

SEQ ID NO: 14349 - RNA, 21 nt, RNAi
acaugguuagaauccuaauuu

SEQ ID NO: 14350 - RNA, 21 nt, RNAi
uuuguaccaaucuuaggauua

SEQ ID NO: 14351 - DNA, 21 bp, Homo sapiens
catggttagaatcctaattag

SEQ ID NO: 14352 - RNA, 21 nt, RNAi
ugguuagaauccuaauuaguu

SEQ ID NO: 14353 - RNA, 21 nt, RNAi
uuaccaaucuuaggauuaauc

SEQ ID NO: 14354 - DNA, 21 bp, Homo sapiens
cacatcatcaggtctttgcca

SEQ ID NO: 14355 - RNA, 21 nt, RNAi
caucaucaggucuuugccauu

SEQ ID NO: 14356 - RNA, 21 nt, RNAi
uuguaguaguccagaaacggu

SEQ ID NO: 14357 - DNA, 21 bp, Homo sapiens
catcatcaggtctttgccacc

SEQ ID NO: 14358 - RNA, 21 nt, RNAi
ucaucaggucuuugccaccuu

SEQ ID NO: 14359 - RNA, 21 nt, RNAi
uuaguaguccagaaacggugg

SEQ ID NO: 14360 - DNA, 21 bp, Homo sapiens
catcaggtctttgccaccgag

SEQ ID NO: 14361 - RNA, 21 nt, RNAi
ucaggucuuugccaccgaguu

SEQ ID NO: 14362 - RNA, 21 nt, RNAi
uuaguccagaaacgguggcuc

SEQ ID NO: 14363 - DNA, 21 bp, Homo sapiens
caggtctttgccaccgaggca

SEQ ID NO: 14364 - RNA, 21 nt, RNAi
ggucuuugccaccgaggcauu

SEQ ID NO: 14365 - RNA, 21 nt, RNAi
uuccagaaacgguggcuccgu

SEQ ID NO: 14366 - DNA, 21 bp, Homo sapiens
caccgaggcatagtgtagaac

SEQ ID NO: 14367 - RNA, 21 nt, RNAi
ccgaggcauaguguagaacuu

SEQ ID NO: 14368 - RNA, 21 nt, RNAi
uuggcuccguaucacaucuug

SEQ ID NO: 14369 - DNA, 21 bp, Homo sapiens
cagccaagtaggttcatcctt

SEQ ID NO: 14370 - RNA, 21 nt, RNAi
gccaaguagguucauccuuuu

SEQ ID NO: 14371 - RNA, 21 nt, RNAi
uucgguucauccaaguaggaa

SEQ ID NO: 14372 - DNA, 21 bp, Homo sapiens
caagtaggttcatccttgttc

SEQ ID NO: 14373 - RNA, 21 nt, RNAi
aguagguucauccuuguucuu

SEQ ID NO: 14374 - RNA, 21 nt, RNAi
uuucauccaaguaggaacaag

SEQ ID NO: 14375 - DNA, 21 bp, Homo sapiens
catccttgttcctgttcattc

SEQ ID NO: 14376 - RNA, 21 nt, RNAi
uccuuguuccuguucauucuu

SEQ ID NO: 14377 - RNA, 21 nt, RNAi
uuaggaacaaggacaaguaag

SEQ ID NO: 14378 - DNA, 21 bp, Homo sapiens
catcgtagccaaatgtttact

SEQ ID NO: 14379 - RNA, 21 nt, RNAi
ucguagccaaauguuuacuuu

SEQ ID NO: 14380 - RNA, 21 nt, RNAi
uuagcaucgguuuacaaauga

SEQ ID NO: 14381 - DNA, 21 bp, Homo sapiens
caccagctgagaatgtatgga

SEQ ID NO: 14382 - RNA, 21 nt, RNAi
ccagcugagaauguauggauu

SEQ ID NO: 14383 - RNA, 21 nt, RNAi
uuggucgacucuuacauaccu

SEQ ID NO: 14384 - DNA, 21 bp, Homo sapiens
cagctgagaatgtatggaggt

SEQ ID NO: 14385 - RNA, 21 nt, RNAi
gcugagaauguauggagguuu

SEQ ID NO: 14386 - RNA, 21 nt, RNAi
uucgacucuuacauaccucca

SEQ ID NO: 14387 - DNA, 21 bp, Homo sapiens
cagctcggaggcagtgacttg

SEQ ID NO: 14388 - RNA, 21 nt, RNAi
gcucggaggcagugacuuguu

SEQ ID NO: 14389 - RNA, 21 nt, RNAi
uucgagccuccgucacugaac

SEQ ID NO: 14390 - DNA, 21 bp, Homo sapiens
catatagctttggccaggaaa

SEQ ID NO: 14391 - RNA, 21 nt, RNAi
uauagcuuuggccaggaaauu

SEQ ID NO: 14392 - RNA, 21 nt, RNAi
uuauaucgaaaccgguccuuu

SEQ ID NO: 14393 - DNA, 21 bp, Homo sapiens
caggaaagcatgcaatagact

SEQ ID NO: 14394 - RNA, 21 nt, RNAi
ggaaagcaugcaauagacuuu

SEQ ID NO: 14395 - RNA, 21 nt, RNAi
uuccuuucguacguuaucuga

SEQ ID NO: 14396 - DNA, 21 bp, Homo sapiens
catgcaatagacttgctcgga

SEQ ID NO: 14397 - RNA, 21 nt, RNAi
ugcaauagacuugcucggauu

SEQ ID NO: 14398 - RNA, 21 nt, RNAi
uuacguuaucugaacgagccu

SEQ ID NO: 14399 - DNA, 21 bp, Homo sapiens
cacttccttgtctgtgacggc

SEQ ID NO: 14400 - RNA, 21 nt, RNAi
cuuccuugucugugacggcuu

SEQ ID NO: 14401 - RNA, 21 nt, RNAi
uugaaggaacagacacugccg

SEQ ID NO: 14402 - DNA, 21 bp, Homo sapiens
catggcagttcactgcatgtg

SEQ ID NO: 14403 - RNA, 21 nt, RNAi
uggcaguucacugcauguguu

SEQ ID NO: 14404 - RNA, 21 nt, RNAi
uuaccgucaagugacguacac

SEQ ID NO: 14405 - DNA, 21 bp, Homo sapiens
cagttcactgcatgtgctgcc

SEQ ID NO: 14406 - RNA, 21 nt, RNAi
guucacugcaugugcugccuu

SEQ ID NO: 14407 - RNA, 21 nt, RNAi
uucaagugacguacacgacgg

SEQ ID NO: 14408 - DNA, 21 bp, Homo sapiens
catagctcctgccaaatcgag

SEQ ID NO: 14409 - RNA, 21 nt, RNAi
uagcuccugccaaaucgaguu

SEQ ID NO: 14410 - RNA, 21 nt, RNAi
uuaucgaggacgguuuagcuc

SEQ ID NO: 14411 - DNA, 21 bp, Homo sapiens
caccacaagctgcagtctgta

SEQ ID NO: 14412 - RNA, 21 nt, RNAi
ccacaagcugcagucuguauu

SEQ ID NO: 14413 - RNA, 21 nt, RNAi
uugguguucgacgucagacau

SEQ ID NO: 14414 - DNA, 21 bp, Homo sapiens
cacaagctgcagtctgtagca

SEQ ID NO: 14415 - RNA, 21 nt, RNAi
caagcugcagucuguagcauu

SEQ ID NO: 14416 - RNA, 21 nt, RNAi
uuguucgacgucagacaucgu

SEQ ID NO: 14417 - DNA, 21 bp, Homo sapiens
caagctgcagtctgtagcact

SEQ ID NO: 14418 - RNA, 21 nt, RNAi
agcugcagucuguagcacuuu

SEQ ID NO: 14419 - RNA, 21 nt, RNAi
uuucgacgucagacaucguga

SEQ ID NO: 14420 - DNA, 21 bp, Homo sapiens
cagtctgtagcactgaacaaa

SEQ ID NO: 14421 - RNA, 21 nt, RNAi
gucuguagcacugaacaaauu

SEQ ID NO: 14422 - RNA, 21 nt, RNAi
uucagacaucgugacuuguuu

SEQ ID NO: 14423 - DNA, 21 bp, Homo sapiens
caagccttacgaccagagaag

SEQ ID NO: 14424 - RNA, 21 nt, RNAi
agccuuacgaccagagaaguu

SEQ ID NO: 14425 - RNA, 21 nt, RNAi
uuucggaaugcuggucucuuc

SEQ ID NO: 14426 - DNA, 21 bp, Homo sapiens
cagagaaggatttcagcaaac

SEQ ID NO: 14427 - RNA, 21 nt, RNAi
gagaaggauuucagcaaacuu

SEQ ID NO: 14428 - RNA, 21 nt, RNAi
uucucuuccuaaagucguuug

SEQ ID NO: 14429 - DNA, 21 bp, Homo sapiens
cagaggatgactctgttcaca

SEQ ID NO: 14430 - RNA, 21 nt, RNAi
gaggaugacucuguucacauu

SEQ ID NO: 14431 - RNA, 21 nt, RNAi
uucuccuacugagacaagugu

SEQ ID NO: 14432 - DNA, 21 bp, Homo sapiens
cacgaaactgtgactttccaa

SEQ ID NO: 14433 - RNA, 21 nt, RNAi
cgaaacugugacuuuccaauu

SEQ ID NO: 14434 - RNA, 21 nt, RNAi
uugcuuugacacugaaagguu

SEQ ID NO: 14435 - DNA, 21 bp, Homo sapiens
caggaagtttgagaaagcagc

SEQ ID NO: 14436 - RNA, 21 nt, RNAi
ggaaguuugagaaagcagcuu

SEQ ID NO: 14437 - RNA, 21 nt, RNAi
uuccuucaaacucuuucgucg

SEQ ID NO: 14438 - DNA, 21 bp, Homo sapiens
cagccgcagctcaactcttcc

SEQ ID NO: 14439 - RNA, 21 nt, RNAi
gccgcagcucaacucuuccuu

SEQ ID NO: 14440 - RNA, 21 nt, RNAi
uucggcgucgaguugagaagg

SEQ ID NO: 14441 - DNA, 21 bp, Homo sapiens
cagctcaactcttccagctcc

SEQ ID NO: 14442 - RNA, 21 nt, RNAi
gcucaacucuuccagcuccuu

SEQ ID NO: 14443 - RNA, 21 nt, RNAi
uucgaguugagaaggucgagg

SEQ ID NO: 14444 - DNA, 21 bp, Homo sapiens
caactcttccagctccgccag

SEQ ID NO: 14445 - RNA, 21 nt, RNAi
acucuuccagcuccgccaguu

SEQ ID NO: 14446 - RNA, 21 nt, RNAi
uuugagaaggucgaggcgguc

SEQ ID NO: 14447 - DNA, 21 bp, Homo sapiens
caactggtacagaaccaacct

SEQ ID NO: 14448 - RNA, 21 nt, RNAi
acugguacagaaccaaccuuu

SEQ ID NO: 14449 - RNA, 21 nt, RNAi
uuugaccaugucuugguugga

SEQ ID NO: 14450 - DNA, 21 bp, Homo sapiens
cagaaccaacctagaggcttt

SEQ ID NO: 14451 - RNA, 21 nt, RNAi
gaaccaaccuagaggcuuuuu

SEQ ID NO: 14452 - RNA, 21 nt, RNAi
uucuugguuggaucuccgaaa

SEQ ID NO: 14453 - DNA, 21 bp, Homo sapiens
caacctagaggctttgcagtt

SEQ ID NO: 14454 - RNA, 21 nt, RNAi
accuagaggcuuugcaguuuu

SEQ ID NO: 14455 - RNA, 21 nt, RNAi
uuuggaucuccgaaacgucaa

SEQ ID NO: 14456 - DNA, 21 bp, Homo sapiens
cagttggcaagctaactcgcg

SEQ ID NO: 14457 - RNA, 21 nt, RNAi
guuggcaagcuaacucgcguu

SEQ ID NO: 14458 - RNA, 21 nt, RNAi
uucaaccguucgauugagcgc

SEQ ID NO: 14459 - DNA, 21 bp, Homo sapiens
cacaaggcatctgttgctttg

SEQ ID NO: 14460 - RNA, 21 nt, RNAi
caaggcaucuguugcuuuguu

SEQ ID NO: 14461 - RNA, 21 nt, RNAi
uuguuccguagacaacgaaac

SEQ ID NO: 14462 - DNA, 21 bp, Homo sapiens
caggcacctcctaggtaggct

SEQ ID NO: 14463 - RNA, 21 nt, RNAi
ggcaccuccuagguaggcuuu

SEQ ID NO: 14464 - RNA, 21 nt, RNAi
uuccguggaggauccauccga

SEQ ID NO: 14465 - DNA, 21 bp, Homo sapiens
cacctcctaggtaggctcaaa

SEQ ID NO: 14466 - RNA, 21 nt, RNAi
ccuccuagguaggcucaaauu

SEQ ID NO: 14467 - RNA, 21 nt, RNAi
uuggaggauccauccgaguuu

SEQ ID NO: 14468 - DNA, 21 bp, Homo sapiens
caccgcagcaggtgaacatga

SEQ ID NO: 14469 - RNA, 21 nt, RNAi
ccgcagcaggugaacaugauu

SEQ ID NO: 14470 - RNA, 21 nt, RNAi
uuggcgucguccacuuguacu

SEQ ID NO: 14471 - DNA, 21 bp, Homo sapiens
cagcaggtgaacatgaccgtg

SEQ ID NO: 14472 - RNA, 21 nt, RNAi
gcaggugaacaugaccguguu

SEQ ID NO: 14473 - RNA, 21 nt, RNAi
uucguccacuuguacuggcac

SEQ ID NO: 14474 - DNA, 21 bp, Homo sapiens
caggtgaacatgaccgtgttt

SEQ ID NO: 14475 - RNA, 21 nt, RNAi
ggugaacaugaccguguuuuu

SEQ ID NO: 14476 - RNA, 21 nt, RNAi
uuccacuuguacuggcacaaa

SEQ ID NO: 14477 - DNA, 21 bp, Homo sapiens
caactgtgtccacagttcaga

SEQ ID NO: 14478 - RNA, 21 nt, RNAi
acuguguccacaguucagauu

SEQ ID NO: 14479 - RNA, 21 nt, RNAi
uuugacacaggugucaagucu

SEQ ID NO: 14480 - DNA, 21 bp, Homo sapiens
cagattgcaacctggcctgca

SEQ ID NO: 14481 - RNA, 21 nt, RNAi
gauugcaaccuggccugcauu

SEQ ID NO: 14482 - RNA, 21 nt, RNAi
uucuaacguuggaccggacgu

SEQ ID NO: 14483 - DNA, 21 bp, Homo sapiens
cagctccttcctgctcgtgtc

SEQ ID NO: 14484 - RNA, 21 nt, RNAi
gcuccuuccugcucgugucuu

SEQ ID NO: 14485 - RNA, 21 nt, RNAi
uucgaggaaggacgagcacag

SEQ ID NO: 14486 - DNA, 21 bp, Homo sapiens
caaacctccatgtggtagctc

SEQ ID NO: 14487 - RNA, 21 nt, RNAi
aaccuccaugugguagcucuu

SEQ ID NO: 14488 - RNA, 21 nt, RNAi
uuuuggagguacaccaucgag

SEQ ID NO: 14489 - DNA, 21 bp, Homo sapiens
catgtggtagctcctttggca

SEQ ID NO: 14490 - RNA, 21 nt, RNAi
ugugguagcuccuuuggcauu

SEQ ID NO: 14491 - RNA, 21 nt, RNAi
uuacaccaucgaggaaaccgu

SEQ ID NO: 14492 - DNA, 21 bp, Homo sapiens
caaatgtcctgctgtggcgtt

SEQ ID NO: 14493 - RNA, 21 nt, RNAi
aauguccugcuguggcguuuu

SEQ ID NO: 14494 - RNA, 21 nt, RNAi
uuuuacaggacgacaccgcaa

SEQ ID NO: 14495 - DNA, 21 bp, Homo sapiens
cagatttgattgaatgtttgc

SEQ ID NO: 14496 - RNA, 21 nt, RNAi
gauuugauugaauguuugcuu

SEQ ID NO: 14497 - RNA, 21 nt, RNAi
uucuaaacuaacuuacaaacg

SEQ ID NO: 14498 - DNA, 21 bp, Homo sapiens
cacagtatttggaaaggtcac

SEQ ID NO: 14499 - RNA, 21 nt, RNAi
caguauuuggaaaggucacuu

SEQ ID NO: 14500 - RNA, 21 nt, RNAi
uugucauaaaccuuuccagug

SEQ ID NO: 14501 - DNA, 21 bp, Homo sapiens
cagtatttggaaaggtcactg

SEQ ID NO: 14502 - RNA, 21 nt, RNAi
guauuuggaaaggucacuguu

SEQ ID NO: 14503 - RNA, 21 nt, RNAi
uucauaaaccuuuccagugac

SEQ ID NO: 14504 - DNA, 21 bp, Homo sapiens
cagtcttggcatttcatttag

SEQ ID NO: 14505 - RNA, 21 nt, RNAi
gucuuggcauuucauuuaguu

SEQ ID NO: 14506 - RNA, 21 nt, RNAi
uucagaaccguaaaguaaauc

SEQ ID NO: 14507 - DNA, 21 bp, Homo sapiens
catttcatttaggatctccat

SEQ ID NO: 14508 - RNA, 21 nt, RNAi
uuucauuuaggaucuccauuu

SEQ ID NO: 14509 - RNA, 21 nt, RNAi
uuaaaguaaauccuagaggua

SEQ ID NO: 14510 - DNA, 21 bp, Homo sapiens
catttaggatctccatgagaa

SEQ ID NO: 14511 - RNA, 21 nt, RNAi
uuuaggaucuccaugagaauu

SEQ ID NO: 14512 - RNA, 21 nt, RNAi
uuaaauccuagagguacucuu

SEQ ID NO: 14513 - DNA, 21 bp, Homo sapiens
catctgtgaactgctttctgc

SEQ ID NO: 14514 - RNA, 21 nt, RNAi
ucugugaacugcuuucugcuu

SEQ ID NO: 14515 - RNA, 21 nt, RNAi
uuagacacuugacgaaagacg

SEQ ID NO: 14516 - DNA, 21 bp, Homo sapiens
caatggtggtagttgtggaca

SEQ ID NO: 14517 - RNA, 21 nt, RNAi
auggugguaguuguggacauu

SEQ ID NO: 14518 - RNA, 21 nt, RNAi
uuuaccaccaucaacaccugu

SEQ ID NO: 14519 - DNA, 21 bp, Homo sapiens
caccaagatgccagcaggata

SEQ ID NO: 14520 - RNA, 21 nt, RNAi
ccaagaugccagcaggauauu

SEQ ID NO: 14521 - RNA, 21 nt, RNAi
uugguucuacggucguccuau

SEQ ID NO: 14522 - DNA, 21 bp, Homo sapiens
caagatgccagcaggatatac

SEQ ID NO: 14523 - RNA, 21 nt, RNAi
agaugccagcaggauauacuu

SEQ ID NO: 14524 - RNA, 21 nt, RNAi
uuucuacggucguccuauaug

SEQ ID NO: 14525 - DNA, 21 bp, Homo sapiens
cagcaggatataccgtaacac

SEQ ID NO: 14526 - RNA, 21 nt, RNAi
gcaggauauaccguaacacuu

SEQ ID NO: 14527 - RNA, 21 nt, RNAi
uucguccuauauggcauugug

SEQ ID NO: 14528 - DNA, 21 bp, Homo sapiens
caggatataccgtaacacgaa

SEQ ID NO: 14529 - RNA, 21 nt, RNAi
ggauauaccguaacacgaauu

SEQ ID NO: 14530 - RNA, 21 nt, RNAi
uuccuauauggcauugugcuu

SEQ ID NO: 14531 - DNA, 21 bp, Homo sapiens
catcaatcaagattctaggtc

SEQ ID NO: 14532 - RNA, 21 nt, RNAi
ucaaucaagauucuaggucuu

SEQ ID NO: 14533 - RNA, 21 nt, RNAi
uuaguuaguucuaagauccag

SEQ ID NO: 14534 - DNA, 21 bp, Homo sapiens
caatcaagattctaggtctcc

SEQ ID NO: 14535 - RNA, 21 nt, RNAi
aucaagauucuaggucuccuu

SEQ ID NO: 14536 - RNA, 21 nt, RNAi
uuuaguucuaagauccagagg

SEQ ID NO: 14537 - DNA, 21 bp, Homo sapiens
cagaacgaggaagagaacaca

SEQ ID NO: 14538 - RNA, 21 nt, RNAi
gaacgaggaagagaacacauu

SEQ ID NO: 14539 - RNA, 21 nt, RNAi
uucuugcuccuucucuugugu

SEQ ID NO: 14540 - DNA, 21 bp, Homo sapiens
cacaaggaatgattcaagatc

SEQ ID NO: 14541 - RNA, 21 nt, RNAi
caaggaaugauucaagaucuu

SEQ ID NO: 14542 - RNA, 21 nt, RNAi
uuguuccuuacuaaguucuag

SEQ ID NO: 14543 - DNA, 21 bp, Homo sapiens
caaggaatgattcaagatcca

SEQ ID NO: 14544 - RNA, 21 nt, RNAi
aggaaugauucaagauccauu

SEQ ID NO: 14545 - RNA, 21 nt, RNAi
uuuccuuacuaaguucuaggu

SEQ ID NO: 14546 - DNA, 21 bp, Homo sapiens
caagatccaccttgagaggaa

SEQ ID NO: 14547 - RNA, 21 nt, RNAi
agauccaccuugagaggaauu

SEQ ID NO: 14548 - RNA, 21 nt, RNAi
uuucuagguggaacucuccuu

SEQ ID NO: 14549 - DNA, 21 bp, Homo sapiens
caccttgagaggaatgaactt

SEQ ID NO: 14550 - RNA, 21 nt, RNAi
ccuugagaggaaugaacuuuu

SEQ ID NO: 14551 - RNA, 21 nt, RNAi
uuggaacucuccuuacuugaa

SEQ ID NO: 14552 - DNA, 21 bp, Homo sapiens
gagagccgatcagcggatcac

SEQ ID NO: 14553 - RNA, 21 nt, RNAi
gagccgaucagcggaucacuu

SEQ ID NO: 14554 - RNA, 21 nt, RNAi
uucucggcuagucgccuagug

SEQ ID NO: 14555 - DNA, 21 bp, Homo sapiens
gatcagcggatcaccgagtct

SEQ ID NO: 14556 - RNA, 21 nt, RNAi
ucagcggaucaccgagucuuu

SEQ ID NO: 14557 - RNA, 21 nt, RNAi
uuagucgccuaguggcucaga

SEQ ID NO: 14558 - DNA, 21 bp, Homo sapiens
gatcaccgagtctcgccaggt

SEQ ID NO: 14559 - RNA, 21 nt, RNAi
ucaccgagucucgccagguuu

SEQ ID NO: 14560 - RNA, 21 nt, RNAi
uuaguggcucagagcggucca

SEQ ID NO: 14561 - DNA, 21 bp, Homo sapiens
gagctggcagtgaaggagcac

SEQ ID NO: 14562 - RNA, 21 nt, RNAi
gcuggcagugaaggagcacuu

SEQ ID NO: 14563 - RNA, 21 nt, RNAi
uucgaccgucacuuccucgug

SEQ ID NO: 14564 - DNA, 21 bp, Homo sapiens
gaaggagcacaaggctgagat

SEQ ID NO: 14565 - RNA, 21 nt, RNAi
aggagcacaaggcugagauuu

SEQ ID NO: 14566 - RNA, 21 nt, RNAi
uuuccucguguuccgacucua

SEQ ID NO: 14567 - DNA, 21 bp, Homo sapiens
gagcacaaggctgagattctc

SEQ ID NO: 14568 - RNA, 21 nt, RNAi
gcacaaggcugagauucucuu

SEQ ID NO: 14569 - RNA, 21 nt, RNAi
uucguguuccgacucuaagag

SEQ ID NO: 14570 - DNA, 21 bp, Homo sapiens
gagattctcgctctgcagcag

SEQ ID NO: 14571 - RNA, 21 nt, RNAi
gauucucgcucugcagcaguu

SEQ ID NO: 14572 - RNA, 21 nt, RNAi
uucuaagagcgagacgucguc

SEQ ID NO: 14573 - DNA, 21 bp, Homo sapiens
gattctcgctctgcagcaggc

SEQ ID NO: 14574 - RNA, 21 nt, RNAi
uucucgcucugcagcaggcuu

SEQ ID NO: 14575 - RNA, 21 nt, RNAi
uuaagagcgagacgucguccg

SEQ ID NO: 14576 - DNA, 21 bp, Homo sapiens
gagcagaagctgaaggccgag

SEQ ID NO: 14577 - RNA, 21 nt, RNAi
gcagaagcugaaggccgaguu

SEQ ID NO: 14578 - RNA, 21 nt, RNAi
uucgucuucgacuuccggcuc

SEQ ID NO: 14579 - DNA, 21 bp, Homo sapiens
gaagctgaaggccgagagcct

SEQ ID NO: 14580 - RNA, 21 nt, RNAi
agcugaaggccgagagccuuu

SEQ ID NO: 14581 - RNA, 21 nt, RNAi
uuucgacuuccggcucucgga

SEQ ID NO: 14582 - DNA, 21 bp, Homo sapiens
gaaggccgagagcctctctga

SEQ ID NO: 14583 - RNA, 21 nt, RNAi
aggccgagagccucucugauu

SEQ ID NO: 14584 - RNA, 21 nt, RNAi
uuuccggcucucggagagacu

SEQ ID NO: 14585 - DNA, 21 bp, Homo sapiens
gagagcctctctgacaagctc

SEQ ID NO: 14586 - RNA, 21 nt, RNAi
gagccucucugacaagcucuu

SEQ ID NO: 14587 - RNA, 21 nt, RNAi
uucucggagagacuguucgag

SEQ ID NO: 14588 - DNA, 21 bp, Homo sapiens
gagcctctctgacaagctcaa

SEQ ID NO: 14589 - RNA, 21 nt, RNAi
gccucucugacaagcucaauu

SEQ ID NO: 14590 - RNA, 21 nt, RNAi
uucggagagacuguucgaguu

SEQ ID NO: 14591 - DNA, 21 bp, Homo sapiens
gacaagctcaatgacctggag

SEQ ID NO: 14592 - RNA, 21 nt, RNAi
caagcucaaugaccuggaguu

SEQ ID NO: 14593 - RNA, 21 nt, RNAi
uuguucgaguuacuggaccuc

SEQ ID NO: 14594 - DNA, 21 bp, Homo sapiens
gacctggagaagaagcatgct

SEQ ID NO: 14595 - RNA, 21 nt, RNAi
ccuggagaagaagcaugcuuu

SEQ ID NO: 14596 - RNA, 21 nt, RNAi
uuggaccucuucuucguacga

SEQ ID NO: 14597 - DNA, 21 bp, Homo sapiens
gagaagaagcatgctatgctt

SEQ ID NO: 14598 - RNA, 21 nt, RNAi
gaagaagcaugcuaugcuuuu

SEQ ID NO: 14599 - RNA, 21 nt, RNAi
uucuucuucguacgauacgaa

SEQ ID NO: 14600 - DNA, 21 bp, Homo sapiens
gaagaagcatgctatgcttga

SEQ ID NO: 14601 - RNA, 21 nt, RNAi
agaagcaugcuaugcuugauu

SEQ ID NO: 14602 - RNA, 21 nt, RNAi
uuucuucguacgauacgaacu

SEQ ID NO: 14603 - DNA, 21 bp, Homo sapiens
gaagcatgctatgcttgaaat

SEQ ID NO: 14604 - RNA, 21 nt, RNAi
agcaugcuaugcuugaaauuu

SEQ ID NO: 14605 - RNA, 21 nt, RNAi
uuucguacgauacgaacuuua

SEQ ID NO: 14606 - DNA, 21 bp, Homo sapiens
gaagcttacagcagaagctgg

SEQ ID NO: 14607 - RNA, 21 nt, RNAi
agcuuacagcagaagcugguu

SEQ ID NO: 14608 - RNA, 21 nt, RNAi
uuucgaaugucgucuucgacc

SEQ ID NO: 14609 - DNA, 21 bp, Homo sapiens
gaagctggagactgaacgaga

SEQ ID NO: 14610 - RNA, 21 nt, RNAi
agcuggagacugaacgagauu

SEQ ID NO: 14611 - RNA, 21 nt, RNAi
uuucgaccucugacuugcucu

SEQ ID NO: 14612 - DNA, 21 bp, Homo sapiens
gagactgaacgagagctcaaa

SEQ ID NO: 14613 - RNA, 21 nt, RNAi
gacugaacgagagcucaaauu

SEQ ID NO: 14614 - RNA, 21 nt, RNAi
uucugacuugcucucgaguuu

SEQ ID NO: 14615 - DNA, 21 bp, Homo sapiens
gactgaacgagagctcaaaca

SEQ ID NO: 14616 - RNA, 21 nt, RNAi
cugaacgagagcucaaacauu

SEQ ID NO: 14617 - RNA, 21 nt, RNAi
uugacuugcucucgaguuugu

SEQ ID NO: 14618 - DNA, 21 bp, Homo sapiens
gaacgagagctcaaacagagg

SEQ ID NO: 14619 - RNA, 21 nt, RNAi
acgagagcucaaacagagguu

SEQ ID NO: 14620 - RNA, 21 nt, RNAi
uuugcucucgaguuugucucc

SEQ ID NO: 14621 - DNA, 21 bp, Homo sapiens
gagagctcaaacagaggcttc

SEQ ID NO: 14622 - RNA, 21 nt, RNAi
gagcucaaacagaggcuucuu

SEQ ID NO: 14623 - RNA, 21 nt, RNAi
uucucgaguuugucuccgaag

SEQ ID NO: 14624 - DNA, 21 bp, Homo sapiens
gagctcaaacagaggcttctg

SEQ ID NO: 14625 - RNA, 21 nt, RNAi
gcucaaacagaggcuucuguu

SEQ ID NO: 14626 - RNA, 21 nt, RNAi
uucgaguuugucuccgaagac

SEQ ID NO: 14627 - DNA, 21 bp, Homo sapiens
gaggcttctggaagagcaagc

SEQ ID NO: 14628 - RNA, 21 nt, RNAi
ggcuucuggaagagcaagcuu

SEQ ID NO: 14629 - RNA, 21 nt, RNAi
uuccgaagaccuucucguucg

SEQ ID NO: 14630 - DNA, 21 bp, Homo sapiens
gaagagcaagccaaattacag

SEQ ID NO: 14631 - RNA, 21 nt, RNAi
agagcaagccaaauuacaguu

SEQ ID NO: 14632 - RNA, 21 nt, RNAi
uuucucguucgguuuaauguc

SEQ ID NO: 14633 - DNA, 21 bp, Homo sapiens
gagcaagccaaattacagcag

SEQ ID NO: 14634 - RNA, 21 nt, RNAi
gcaagccaaauuacagcaguu

SEQ ID NO: 14635 - RNA, 21 nt, RNAi
uucguucgguuuaaugucguc

SEQ ID NO: 14636 - DNA, 21 bp, Homo sapiens
gactcaaggactgcaagaagc

SEQ ID NO: 14637 - RNA, 21 nt, RNAi
cucaaggacugcaagaagcuu

SEQ ID NO: 14638 - RNA, 21 nt, RNAi
uugaguuccugacguucuucg

SEQ ID NO: 14639 - DNA, 21 bp, Homo sapiens
gactgcaagaagctctagatc

SEQ ID NO: 14640 - RNA, 21 nt, RNAi
cugcaagaagcucuagaucuu

SEQ ID NO: 14641 - RNA, 21 nt, RNAi
uugacguucuucgagaucuag

SEQ ID NO: 14642 - DNA, 21 bp, Homo sapiens
gatctactgaagacagaaaga

SEQ ID NO: 14643 - RNA, 21 nt, RNAi
ucuacugaagacagaaagauu

SEQ ID NO: 14644 - RNA, 21 nt, RNAi
uuagaugacuucugucuuucu

SEQ ID NO: 14645 - DNA, 21 bp, Homo sapiens
gaagacagaaagaagtgactt

SEQ ID NO: 14646 - RNA, 21 nt, RNAi
agacagaaagaagugacuuuu

SEQ ID NO: 14647 - RNA, 21 nt, RNAi
uuucugucuuucuucacugaa

SEQ ID NO: 14648 - DNA, 21 bp, Homo sapiens
gacagaaagaagtgacttgga

SEQ ID NO: 14649 - RNA, 21 nt, RNAi
cagaaagaagugacuuggauu

SEQ ID NO: 14650 - RNA, 21 nt, RNAi
uugucuuucuucacugaaccu

SEQ ID NO: 14651 - DNA, 21 bp, Homo sapiens
gaaagaagtgacttggagtat

SEQ ID NO: 14652 - RNA, 21 nt, RNAi
aagaagugacuuggaguauuu

SEQ ID NO: 14653 - RNA, 21 nt, RNAi
uuuucuucacugaaccucaua

SEQ ID NO: 14654 - DNA, 21 bp, Homo sapiens
gaagtgacttggagtatcagc

SEQ ID NO: 14655 - RNA, 21 nt, RNAi
agugacuuggaguaucagcuu

SEQ ID NO: 14656 - RNA, 21 nt, RNAi
uuucacugaaccucauagucg

SEQ ID NO: 14657 - DNA, 21 bp, Homo sapiens
gacttggagtatcagctggaa

SEQ ID NO: 14658 - RNA, 21 nt, RNAi
cuuggaguaucagcuggaauu

SEQ ID NO: 14659 - RNA, 21 nt, RNAi
uugaaccucauagucgaccuu

SEQ ID NO: 14660 - DNA, 21 bp, Homo sapiens
gaaggcactatttctcaacaa

SEQ ID NO: 14661 - RNA, 21 nt, RNAi
aggcacuauuucucaacaauu

SEQ ID NO: 14662 - RNA, 21 nt, RNAi
uuuccgugauaaagaguuguu

SEQ ID NO: 14663 - DNA, 21 bp, Homo sapiens
gagaaggagaaagctcgctgt

SEQ ID NO: 14664 - RNA, 21 nt, RNAi
gaaggagaaagcucgcuguuu

SEQ ID NO: 14665 - RNA, 21 nt, RNAi
uucuuccucuuucgagcgaca

SEQ ID NO: 14666 - DNA, 21 bp, Homo sapiens
gaaggagaaagctcgctgtgc

SEQ ID NO: 14667 - RNA, 21 nt, RNAi
aggagaaagcucgcugugcuu

SEQ ID NO: 14668 - RNA, 21 nt, RNAi
uuuccucuuucgagcgacacg

SEQ ID NO: 14669 - DNA, 21 bp, Homo sapiens
gagaaagctcgctgtgcagag

SEQ ID NO: 14670 - RNA, 21 nt, RNAi
gaaagcucgcugugcagaguu

SEQ ID NO: 14671 - RNA, 21 nt, RNAi
uucuuucgagcgacacgucuc

SEQ ID NO: 14672 - DNA, 21 bp, Homo sapiens
gaaagctcgctgtgcagagct

SEQ ID NO: 14673 - RNA, 21 nt, RNAi
aagcucgcugugcagagcuuu

SEQ ID NO: 14674 - RNA, 21 nt, RNAi
uuuucgagcgacacgucucga

SEQ ID NO: 14675 - DNA, 21 bp, Homo sapiens
gaggcagcagatcgccatgtc

SEQ ID NO: 14676 - RNA, 21 nt, RNAi
ggcagcagaucgccaugucuu

SEQ ID NO: 14677 - RNA, 21 nt, RNAi
uuccgucgucuagcgguacag

SEQ ID NO: 14678 - DNA, 21 bp, Homo sapiens
gatcgccatgtccgccatcgt

SEQ ID NO: 14679 - RNA, 21 nt, RNAi
ucgccauguccgccaucguuu

SEQ ID NO: 14680 - RNA, 21 nt, RNAi
uuagcgguacaggcgguagca

SEQ ID NO: 14681 - DNA, 21 bp, Homo sapiens
gaaaggagtcttcaactccag

SEQ ID NO: 14682 - RNA, 21 nt, RNAi
aaggagucuucaacuccaguu

SEQ ID NO: 14683 - RNA, 21 nt, RNAi
uuuuccucagaaguugagguc

SEQ ID NO: 14684 - DNA, 21 bp, Homo sapiens
gagtcttcaactccagaggaa

SEQ ID NO: 14685 - RNA, 21 nt, RNAi
gucuucaacuccagaggaauu

SEQ ID NO: 14686 - RNA, 21 nt, RNAi
uucagaaguugaggucuccuu

SEQ ID NO: 14687 - DNA, 21 bp, Homo sapiens
gaggaatttagtcggcgtctt

SEQ ID NO: 14688 - RNA, 21 nt, RNAi
ggaauuuagucggcgucuuuu

SEQ ID NO: 14689 - RNA, 21 nt, RNAi
uuccuuaaaucagccgcagaa

SEQ ID NO: 14690 - DNA, 21 bp, Homo sapiens
gaatttagtcggcgtcttaag

SEQ ID NO: 14691 - RNA, 21 nt, RNAi
auuuagucggcgucuuaaguu

SEQ ID NO: 14692 - RNA, 21 nt, RNAi
uuuaaaucagccgcagaauuc

SEQ ID NO: 14693 - DNA, 21 bp, Homo sapiens
gaacgcatgcaccacaatatt

SEQ ID NO: 14694 - RNA, 21 nt, RNAi
acgcaugcaccacaauauuuu

SEQ ID NO: 14695 - RNA, 21 nt, RNAi
uuugcguacgugguguuauaa

SEQ ID NO: 14696 - DNA, 21 bp, Homo sapiens
gattcaacgtaggactgaaca

SEQ ID NO: 14697 - RNA, 21 nt, RNAi
uucaacguaggacugaacauu

SEQ ID NO: 14698 - RNA, 21 nt, RNAi
uuaaguugcauccugacuugu

SEQ ID NO: 14699 - DNA, 21 bp, Homo sapiens
gactgaacatgcgagccacaa

SEQ ID NO: 14700 - RNA, 21 nt, RNAi
cugaacaugcgagccacaauu

SEQ ID NO: 14701 - RNA, 21 nt, RNAi
uugacuuguacgcucgguguu

SEQ ID NO: 14702 - DNA, 21 bp, Homo sapiens
gaacatgcgagccacaaagtg

SEQ ID NO: 14703 - RNA, 21 nt, RNAi
acaugcgagccacaaaguguu

SEQ ID NO: 14704 - RNA, 21 nt, RNAi
uuuguacgcucgguguuucac

SEQ ID NO: 14705 - DNA, 21 bp, Homo sapiens
gagccacaaagtgtgctgtgt

SEQ ID NO: 14706 - RNA, 21 nt, RNAi
gccacaaagugugcuguguuu

SEQ ID NO: 14707 - RNA, 21 nt, RNAi
uucgguguuucacacgacaca

SEQ ID NO: 14708 - DNA, 21 bp, Homo sapiens
gataccgtgcactttggacgc

SEQ ID NO: 14709 - RNA, 21 nt, RNAi
uaccgugcacuuuggacgcuu

SEQ ID NO: 14710 - RNA, 21 nt, RNAi
uuauggcacgugaaaccugcg

SEQ ID NO: 14711 - DNA, 21 bp, Homo sapiens
gacgccaggcatccaaatgtc

SEQ ID NO: 14712 - RNA, 21 nt, RNAi
cgccaggcauccaaaugucuu

SEQ ID NO: 14713 - RNA, 21 nt, RNAi
uugcgguccguagguuuacag

SEQ ID NO: 14714 - DNA, 21 bp, Homo sapiens
gaatgtcaggtgatgtgtcac

SEQ ID NO: 14715 - RNA, 21 nt, RNAi
augucaggugaugugucacuu

SEQ ID NO: 14716 - RNA, 21 nt, RNAi
uuuacaguccacuacacagug

SEQ ID NO: 14717 - DNA, 21 bp, Homo sapiens
gaatatgccacacacttcacc

SEQ ID NO: 14718 - RNA, 21 nt, RNAi
auaugccacacacuucaccuu

SEQ ID NO: 14719 - RNA, 21 nt, RNAi
uuuauacggugugugaagugg

SEQ ID NO: 14720 - DNA, 21 bp, Homo sapiens
gaggccttctgccgtgacaaa

SEQ ID NO: 14721 - RNA, 21 nt, RNAi
ggccuucugccgugacaaauu

SEQ ID NO: 14722 - RNA, 21 nt, RNAi
uuccggaagacggcacuguuu

SEQ ID NO: 14723 - DNA, 21 bp, Homo sapiens
gaataacaaacgaggacagca

SEQ ID NO: 14724 - RNA, 21 nt, RNAi
auaacaaacgaggacagcauu

SEQ ID NO: 14725 - RNA, 21 nt, RNAi
uuuauuguuugcuccugucgu

SEQ ID NO: 14726 - DNA, 21 bp, Homo sapiens
gacaggaagtacattgtcctg

SEQ ID NO: 14727 - RNA, 21 nt, RNAi
caggaaguacauuguccuguu

SEQ ID NO: 14728 - RNA, 21 nt, RNAi
uuguccuucauguaacaggac

SEQ ID NO: 14729 - DNA, 21 bp, Homo sapiens
gacaatgaagccagagaagct

SEQ ID NO: 14730 - RNA, 21 nt, RNAi
caaugaagccagagaagcuuu

SEQ ID NO: 14731 - RNA, 21 nt, RNAi
uuguuacuucggucucuucga

SEQ ID NO: 14732 - DNA, 21 bp, Homo sapiens
gaagccagagaagctggacag

SEQ ID NO: 14733 - RNA, 21 nt, RNAi
agccagagaagcuggacaguu

SEQ ID NO: 14734 - RNA, 21 nt, RNAi
uuucggucucuucgaccuguc

SEQ ID NO: 14735 - DNA, 21 bp, Homo sapiens
gacagaggccggtggaagaat

SEQ ID NO: 14736 - RNA, 21 nt, RNAi
cagaggccgguggaagaauuu

SEQ ID NO: 14737 - RNA, 21 nt, RNAi
uugucuccggccaccuucuua

SEQ ID NO: 14738 - DNA, 21 bp, Homo sapiens
gaggccggtggaagaatttga

SEQ ID NO: 14739 - RNA, 21 nt, RNAi
ggccgguggaagaauuugauu

SEQ ID NO: 14740 - RNA, 21 nt, RNAi
uuccggccaccuucuuaaacu

SEQ ID NO: 14741 - DNA, 21 bp, Homo sapiens
gaagaatttgagctgtgcctt

SEQ ID NO: 14742 - RNA, 21 nt, RNAi
agaauuugagcugugccuuuu

SEQ ID NO: 14743 - RNA, 21 nt, RNAi
uuucuuaaacucgacacggaa

SEQ ID NO: 14744 - DNA, 21 bp, Homo sapiens
gatgtatctattcatggtgcc

SEQ ID NO: 14745 - RNA, 21 nt, RNAi
uguaucuauucauggugccuu

SEQ ID NO: 14746 - RNA, 21 nt, RNAi
uuacauagauaaguaccacgg

SEQ ID NO: 14747 - DNA, 21 bp, Homo sapiens
gaactcgcaaatacagccaaa

SEQ ID NO: 14748 - RNA, 21 nt, RNAi
acucgcaaauacagccaaauu

SEQ ID NO: 14749 - RNA, 21 nt, RNAi
uuugagcguuuaugucgguuu

SEQ ID NO: 14750 - DNA, 21 bp, Homo sapiens
gaagctgatgctaaactgctt

SEQ ID NO: 14751 - RNA, 21 nt, RNAi
agcugaugcuaaacugcuuuu

SEQ ID NO: 14752 - RNA, 21 nt, RNAi
uuucgacuacgauuugacgaa

SEQ ID NO: 14753 - DNA, 21 bp, Homo sapiens
gatgctaaactgcttggaaac

SEQ ID NO: 14754 - RNA, 21 nt, RNAi
ugcuaaacugcuuggaaacuu

SEQ ID NO: 14755 - RNA, 21 nt, RNAi
uuacgauuugacgaaccuuug

SEQ ID NO: 14756 - DNA, 21 bp, Homo sapiens
gaaactggaaggtgatgaccg

SEQ ID NO: 14757 - RNA, 21 nt, RNAi
aacuggaaggugaugaccguu

SEQ ID NO: 14758 - RNA, 21 nt, RNAi
uuuugaccuuccacuacuggc

SEQ ID NO: 14759 - DNA, 21 bp, Homo sapiens
gaaggtgatgaccgtctagac

SEQ ID NO: 14760 - RNA, 21 nt, RNAi
aggugaugaccgucuagacuu

SEQ ID NO: 14761 - RNA, 21 nt, RNAi
uuuccacuacuggcagaucug

SEQ ID NO: 14762 - DNA, 21 bp, Homo sapiens
gatgaccgtctagacatgaac

SEQ ID NO: 14763 - RNA, 21 nt, RNAi
ugaccgucuagacaugaacuu

SEQ ID NO: 14764 - RNA, 21 nt, RNAi
uuacuggcagaucuguacuug

SEQ ID NO: 14765 - DNA, 21 bp, Homo sapiens
gaccgtctagacatgaactgc

SEQ ID NO: 14766 - RNA, 21 nt, RNAi
ccgucuagacaugaacugcuu

SEQ ID NO: 14767 - RNA, 21 nt, RNAi
uuggcagaucuguacuugacg

SEQ ID NO: 14768 - DNA, 21 bp, Homo sapiens
gaattggagcagtcttccaaa

SEQ ID NO: 14769 - RNA, 21 nt, RNAi
auuggagcagucuuccaaauu

SEQ ID NO: 14770 - RNA, 21 nt, RNAi
uuuaaccucgucagaagguuu

SEQ ID NO: 14771 - DNA, 21 bp, Homo sapiens
gagcagtcttccaaatttata

SEQ ID NO: 14772 - RNA, 21 nt, RNAi
gcagucuuccaaauuuauauu

SEQ ID NO: 14773 - RNA, 21 nt, RNAi
uucgucagaagguuuaaauau

SEQ ID NO: 14774 - DNA, 21 bp, Homo sapiens
gacctggagaagctactcatg

SEQ ID NO: 14775 - RNA, 21 nt, RNAi
ccuggagaagcuacucauguu

SEQ ID NO: 14776 - RNA, 21 nt, RNAi
uuggaccucuucgaugaguac

SEQ ID NO: 14777 - DNA, 21 bp, Homo sapiens
gagaagctactcatgatagca

SEQ ID NO: 14778 - RNA, 21 nt, RNAi
gaagcuacucaugauagcauu

SEQ ID NO: 14779 - RNA, 21 nt, RNAi
uucuucgaugaguacuaucgu

SEQ ID NO: 14780 - DNA, 21 bp, Homo sapiens
gaagctactcatgatagcagg

SEQ ID NO: 14781 - RNA, 21 nt, RNAi
agcuacucaugauagcagguu

SEQ ID NO: 14782 - RNA, 21 nt, RNAi
uuucgaugaguacuaucgucc

SEQ ID NO: 14783 - DNA, 21 bp, Homo sapiens
gacgtgaagaaagtgaaacag

SEQ ID NO: 14784 - RNA, 21 nt, RNAi
cgugaagaaagugaaacaguu

SEQ ID NO: 14785 - RNA, 21 nt, RNAi
uugcacuucuuucacuuuguc

SEQ ID NO: 14786 - DNA, 21 bp, Homo sapiens
gaaagagatagagacctcaga

SEQ ID NO: 14787 - RNA, 21 nt, RNAi
aagagauagagaccucagauu

SEQ ID NO: 14788 - RNA, 21 nt, RNAi
uuuucucuaucucuggagucu

SEQ ID NO: 14789 - DNA, 21 bp, Homo sapiens
gaaatcgacatgaagcagtac

SEQ ID NO: 14790 - RNA, 21 nt, RNAi
aaucgacaugaagcaguacuu

SEQ ID NO: 14791 - RNA, 21 nt, RNAi
uuuuagcuguacuucgucaug

SEQ ID NO: 14792 - DNA, 21 bp, Homo sapiens
gacatgaagcagtacacgctc

SEQ ID NO: 14793 - RNA, 21 nt, RNAi
caugaagcaguacacgcucuu

SEQ ID NO: 14794 - RNA, 21 nt, RNAi
uuguacuucgucaugugcgag

SEQ ID NO: 14795 - DNA, 21 bp, Homo sapiens
gaagcagtacacgctcgagga

SEQ ID NO: 14796 - RNA, 21 nt, RNAi
agcaguacacgcucgaggauu

SEQ ID NO: 14797 - RNA, 21 nt, RNAi
uuucgucaugugcgagcuccu

SEQ ID NO: 14798 - DNA, 21 bp, Homo sapiens
gaggaattcctggataagaat

SEQ ID NO: 14799 - RNA, 21 nt, RNAi
ggaauuccuggauaagaauuu

SEQ ID NO: 14800 - RNA, 21 nt, RNAi
uuccuuaaggaccuauucuua

SEQ ID NO: 14801 - DNA, 21 bp, Homo sapiens
gaattcctggataagaatgac

SEQ ID NO: 14802 - RNA, 21 nt, RNAi
auuccuggauaagaaugacuu

SEQ ID NO: 14803 - RNA, 21 nt, RNAi
uuuaaggaccuauucuuacug

SEQ ID NO: 14804 - DNA, 21 bp, Homo sapiens
gataagaatgaccattccttg

SEQ ID NO: 14805 - RNA, 21 nt, RNAi
uaagaaugaccauuccuuguu

SEQ ID NO: 14806 - RNA, 21 nt, RNAi
uuauucuuacugguaaggaac

SEQ ID NO: 14807 - DNA, 21 bp, Homo sapiens
gaatgaccattccttggcacc

SEQ ID NO: 14808 - RNA, 21 nt, RNAi
augaccauuccuuggcaccuu

SEQ ID NO: 14809 - RNA, 21 nt, RNAi
uuuacugguaaggaaccgugg

SEQ ID NO: 14810 - DNA, 21 bp, Homo sapiens
gaccattccttggcacctgct

SEQ ID NO: 14811 - RNA, 21 nt, RNAi
ccauuccuuggcaccugcuuu

SEQ ID NO: 14812 - RNA, 21 nt, RNAi
uugguaaggaaccguggacga

SEQ ID NO: 14813 - DNA, 21 bp, Homo sapiens
gagaggagtacttgctgtgtt

SEQ ID NO: 14814 - RNA, 21 nt, RNAi
gaggaguacuugcuguguuuu

SEQ ID NO: 14815 - RNA, 21 nt, RNAi
uucuccucaugaacgacacaa

SEQ ID NO: 14816 - DNA, 21 bp, Homo sapiens
gaggagtacttgctgtgtttc

SEQ ID NO: 14817 - RNA, 21 nt, RNAi
ggaguacuugcuguguuucuu

SEQ ID NO: 14818 - RNA, 21 nt, RNAi
uuccucaugaacgacacaaag

SEQ ID NO: 14819 - DNA, 21 bp, Homo sapiens
gagtacttgctgtgtttccac

SEQ ID NO: 14820 - RNA, 21 nt, RNAi
guacuugcuguguuuccacuu

SEQ ID NO: 14821 - RNA, 21 nt, RNAi
uucaugaacgacacaaaggug

SEQ ID NO: 14822 - DNA, 21 bp, Homo sapiens
gaatttggagtgttcgtggat

SEQ ID NO: 14823 - RNA, 21 nt, RNAi
auuuggaguguucguggauuu

SEQ ID NO: 14824 - RNA, 21 nt, RNAi
uuuaaaccucacaagcaccua

SEQ ID NO: 14825 - DNA, 21 bp, Homo sapiens
gagtgttcgtggattcttacg

SEQ ID NO: 14826 - RNA, 21 nt, RNAi
guguucguggauucuuacguu

SEQ ID NO: 14827 - RNA, 21 nt, RNAi
uucacaagcaccuaagaaugc

SEQ ID NO: 14828 - DNA, 21 bp, Homo sapiens
gattcttacggaagacgtagc

SEQ ID NO: 14829 - RNA, 21 nt, RNAi
uucuuacggaagacguagcuu

SEQ ID NO: 14830 - RNA, 21 nt, RNAi
uuaagaaugccuucugcaucg

SEQ ID NO: 14831 - DNA, 21 bp, Homo sapiens
gaagacgtagccgcacagacg

SEQ ID NO: 14832 - RNA, 21 nt, RNAi
agacguagccgcacagacguu

SEQ ID NO: 14833 - RNA, 21 nt, RNAi
uuucugcaucggcgugucugc

SEQ ID NO: 14834 - DNA, 21 bp, Homo sapiens
gacgtagccgcacagacgatc

SEQ ID NO: 14835 - RNA, 21 nt, RNAi
cguagccgcacagacgaucuu

SEQ ID NO: 14836 - RNA, 21 nt, RNAi
uugcaucggcgugucugcuag

SEQ ID NO: 14837 - DNA, 21 bp, Homo sapiens
gacgatctcaagtggagtcgc

SEQ ID NO: 14838 - RNA, 21 nt, RNAi
cgaucucaaguggagucgcuu

SEQ ID NO: 14839 - RNA, 21 nt, RNAi
uugcuagaguucaccucagcg

SEQ ID NO: 14840 - DNA, 21 bp, Homo sapiens
gatctcaagtggagtcgctta

SEQ ID NO: 14841 - RNA, 21 nt, RNAi
ucucaaguggagucgcuuauu

SEQ ID NO: 14842 - RNA, 21 nt, RNAi
uuagaguucaccucagcgaau

SEQ ID NO: 14843 - DNA, 21 bp, Homo sapiens
gagtcgcttacctttggcctt

SEQ ID NO: 14844 - RNA, 21 nt, RNAi
gucgcuuaccuuuggccuuuu

SEQ ID NO: 14845 - RNA, 21 nt, RNAi
uucagcgaauggaaaccggaa

SEQ ID NO: 14846 - DNA, 21 bp, Homo sapiens
gaagtaattgagatccaggca

SEQ ID NO: 14847 - RNA, 21 nt, RNAi
aguaauugagauccaggcauu

SEQ ID NO: 14848 - RNA, 21 nt, RNAi
uuucauuaacucuagguccgu

SEQ ID NO: 14849 - DNA, 21 bp, Homo sapiens
gagatccaggcacgctcctca

SEQ ID NO: 14850 - RNA, 21 nt, RNAi
gauccaggcacgcuccucauu

SEQ ID NO: 14851 - RNA, 21 nt, RNAi
uucuagguccgugcgaggagu

SEQ ID NO: 14852 - DNA, 21 bp, Homo sapiens
gagcgatttacttggcgtcct

SEQ ID NO: 14853 - RNA, 21 nt, RNAi
gcgauuuacuuggcguccuuu

SEQ ID NO: 14854 - RNA, 21 nt, RNAi
uucgcuaaaugaaccgcagga

SEQ ID NO: 14855 - DNA, 21 bp, Homo sapiens
gatttacttggcgtcctcata

SEQ ID NO: 14856 - RNA, 21 nt, RNAi
uuuacuuggcguccucauauu

SEQ ID NO: 14857 - RNA, 21 nt, RNAi
uuaaaugaaccgcaggaguau

SEQ ID NO: 14858 - DNA, 21 bp, Homo sapiens
gaaacctcgtgaaggagtccg

SEQ ID NO: 14859 - RNA, 21 nt, RNAi
aaccucgugaaggaguccguu

SEQ ID NO: 14860 - RNA, 21 nt, RNAi
uuuuggagcacuuccucaggc

SEQ ID NO: 14861 - DNA, 21 bp, Homo sapiens
gaaggagtccggcactgaaca

SEQ ID NO: 14862 - RNA, 21 nt, RNAi
aggaguccggcacugaacauu

SEQ ID NO: 14863 - RNA, 21 nt, RNAi
uuuccucaggccgugacuugu

SEQ ID NO: 14864 - DNA, 21 bp, Homo sapiens
gagtccggcactgaacaccac

SEQ ID NO: 14865 - RNA, 21 nt, RNAi
guccggcacugaacaccacuu

SEQ ID NO: 14866 - RNA, 21 nt, RNAi
uucaggccgugacuuguggug

SEQ ID NO: 14867 - DNA, 21 bp, Homo sapiens
gagcacatcaccaagcgcgtg

SEQ ID NO: 14868 - RNA, 21 nt, RNAi
gcacaucaccaagcgcguguu

SEQ ID NO: 14869 - RNA, 21 nt, RNAi
uucguguagugguucgcgcac

SEQ ID NO: 14870 - DNA, 21 bp, Homo sapiens
gatgctcagcacgcggagaga

SEQ ID NO: 14871 - RNA, 21 nt, RNAi
ugcucagcacgcggagagauu

SEQ ID NO: 14872 - RNA, 21 nt, RNAi
uuacgagucgugcgccucucu

SEQ ID NO: 14873 - DNA, 21 bp, Homo sapiens
gaggctgtttgaagacagcag

SEQ ID NO: 14874 - RNA, 21 nt, RNAi
ggcuguuugaagacagcaguu

SEQ ID NO: 14875 - RNA, 21 nt, RNAi
uuccgacaaacuucugucguc

SEQ ID NO: 14876 - DNA, 21 bp, Homo sapiens
gaccagtcttcagtataaatc

SEQ ID NO: 14877 - RNA, 21 nt, RNAi
ccagucuucaguauaaaucuu

SEQ ID NO: 14878 - RNA, 21 nt, RNAi
uuggucagaagucauauuuag

SEQ ID NO: 14879 - DNA, 21 bp, Homo sapiens
gaggctcttcggagctgtcag

SEQ ID NO: 14880 - RNA, 21 nt, RNAi
ggcucuucggagcugucaguu

SEQ ID NO: 14881 - RNA, 21 nt, RNAi
uuccgagaagccucgacaguc

SEQ ID NO: 14882 - DNA, 21 bp, Homo sapiens
gatgctaactacaacatggtt

SEQ ID NO: 14883 - RNA, 21 nt, RNAi
ugcuaacuacaacaugguuuu

SEQ ID NO: 14884 - RNA, 21 nt, RNAi
uuacgauugauguuguaccaa

SEQ ID NO: 14885 - DNA, 21 bp, Homo sapiens
gatcctaggattggttggttt

SEQ ID NO: 14886 - RNA, 21 nt, RNAi
uccuaggauugguugguuuuu

SEQ ID NO: 14887 - RNA, 21 nt, RNAi
uuaggauccuaaccaaccaaa

SEQ ID NO: 14888 - DNA, 21 bp, Homo sapiens
gatttgaatagcgacgtattt

SEQ ID NO: 14889 - RNA, 21 nt, RNAi
uuugaauagcgacguauuuuu

SEQ ID NO: 14890 - RNA, 21 nt, RNAi
uuaaacuuaucgcugcauaaa

SEQ ID NO: 14891 - DNA, 21 bp, Homo sapiens
gaatagcgacgtatttcctgt

SEQ ID NO: 14892 - RNA, 21 nt, RNAi
auagcgacguauuuccuguuu

SEQ ID NO: 14893 - RNA, 21 nt, RNAi
uuuaucgcugcauaaaggaca

SEQ ID NO: 14894 - DNA, 21 bp, Homo sapiens
gacgtatttcctgttgtagtc

SEQ ID NO: 14895 - RNA, 21 nt, RNAi
cguauuuccuguuguagucuu

SEQ ID NO: 14896 - RNA, 21 nt, RNAi
uugcauaaaggacaacaucag

SEQ ID NO: 14897 - DNA, 21 bp, Homo sapiens
gaccacatcatcaggtctttg

SEQ ID NO: 14898 - RNA, 21 nt, RNAi
ccacaucaucaggucuuuguu

SEQ ID NO: 14899 - RNA, 21 nt, RNAi
uugguguaguaguccagaaac

SEQ ID NO: 14900 - DNA, 21 bp, Homo sapiens
gaggcatagtgtagaacagtc

SEQ ID NO: 14901 - RNA, 21 nt, RNAi
ggcauaguguagaacagucuu

SEQ ID NO: 14902 - RNA, 21 nt, RNAi
uuccguaucacaucuugucag

SEQ ID NO: 14903 - DNA, 21 bp, Homo sapiens
gacatcgtagccaaatgttta

SEQ ID NO: 14904 - RNA, 21 nt, RNAi
caucguagccaaauguuuauu

SEQ ID NO: 14905 - RNA, 21 nt, RNAi
uuguagcaucgguuuacaaau

SEQ ID NO: 14906 - DNA, 21 bp, Homo sapiens
gagaatgtatggaggtcatcg

SEQ ID NO: 14907 - RNA, 21 nt, RNAi
gaauguauggaggucaucguu

SEQ ID NO: 14908 - RNA, 21 nt, RNAi
uucuuacauaccuccaguagc

SEQ ID NO: 14909 - DNA, 21 bp, Homo sapiens
gacctcgagacgctttccttc

SEQ ID NO: 14910 - RNA, 21 nt, RNAi
ccucgagacgcuuuccuucuu

SEQ ID NO: 14911 - RNA, 21 nt, RNAi
uuggagcucugcgaaaggaag

SEQ ID NO: 14912 - DNA, 21 bp, Homo sapiens
gaaagcatgcaatagacttgc

SEQ ID NO: 14913 - RNA, 21 nt, RNAi
aagcaugcaauagacuugcuu

SEQ ID NO: 14914 - RNA, 21 nt, RNAi
uuuucguacguuaucugaacg

SEQ ID NO: 14915 - DNA, 21 bp, Homo sapiens
gagttctgcatggcagttcac

SEQ ID NO: 14916 - RNA, 21 nt, RNAi
guucugcauggcaguucacuu

SEQ ID NO: 14917 - RNA, 21 nt, RNAi
uucaagacguaccgucaagug

SEQ ID NO: 14918 - DNA, 21 bp, Homo sapiens
gacgacttgccgactaactgg

SEQ ID NO: 14919 - RNA, 21 nt, RNAi
cgacuugccgacuaacugguu

SEQ ID NO: 14920 - RNA, 21 nt, RNAi
uugcugaacggcugauugacc

SEQ ID NO: 14921 - DNA, 21 bp, Homo sapiens
gacttgccgactaactggcca

SEQ ID NO: 14922 - RNA, 21 nt, RNAi
cuugccgacuaacuggccauu

SEQ ID NO: 14923 - RNA, 21 nt, RNAi
uugaacggcugauugaccggu

SEQ ID NO: 14924 - DNA, 21 bp, Homo sapiens
gactaactggccaccacaagc

SEQ ID NO: 14925 - RNA, 21 nt, RNAi
cuaacuggccaccacaagcuu

SEQ ID NO: 14926 - RNA, 21 nt, RNAi
uugauugaccggugguguucg

SEQ ID NO: 14927 - DNA, 21 bp, Homo sapiens
gaccagagaaggatttcagca

SEQ ID NO: 14928 - RNA, 21 nt, RNAi
ccagagaaggauuucagcauu

SEQ ID NO: 14929 - RNA, 21 nt, RNAi
uuggucucuuccuaaagucgu

SEQ ID NO: 14930 - DNA, 21 bp, Homo sapiens
gagaaggatttcagcaaacca

SEQ ID NO: 14931 - RNA, 21 nt, RNAi
gaaggauuucagcaaaccauu

SEQ ID NO: 14932 - RNA, 21 nt, RNAi
uucuuccuaaagucguuuggu

SEQ ID NO: 14933 - DNA, 21 bp, Homo sapiens
gaaggatttcagcaaaccacc

SEQ ID NO: 14934 - RNA, 21 nt, RNAi
aggauuucagcaaaccaccuu

SEQ ID NO: 14935 - RNA, 21 nt, RNAi
uuuccuaaagucguuuggugg

SEQ ID NO: 14936 - DNA, 21 bp, Homo sapiens
gatttcagcaaaccaccacct

SEQ ID NO: 14937 - RNA, 21 nt, RNAi
uuucagcaaaccaccaccuuu

SEQ ID NO: 14938 - RNA, 21 nt, RNAi
uuaaagucguuugguggugga

SEQ ID NO: 14939 - DNA, 21 bp, Homo sapiens
gaggatgactctgttcacacc

SEQ ID NO: 14940 - RNA, 21 nt, RNAi
ggaugacucuguucacaccuu

SEQ ID NO: 14941 - RNA, 21 nt, RNAi
uuccuacugagacaagugugg

SEQ ID NO: 14942 - DNA, 21 bp, Homo sapiens
gaaactgtgactttccaaatg

SEQ ID NO: 14943 - RNA, 21 nt, RNAi
aacugugacuuuccaaauguu

SEQ ID NO: 14944 - RNA, 21 nt, RNAi
uuuugacacugaaagguuuac

SEQ ID NO: 14945 - DNA, 21 bp, Homo sapiens
gactttccaaatgagcctttc

SEQ ID NO: 14946 - RNA, 21 nt, RNAi
cuuuccaaaugagccuuucuu

SEQ ID NO: 14947 - RNA, 21 nt, RNAi
uugaaagguuuacucggaaag

SEQ ID NO: 14948 - DNA, 21 bp, Homo sapiens
gacctaagaccaggaagtttg

SEQ ID NO: 14949 - RNA, 21 nt, RNAi
ccuaagaccaggaaguuuguu

SEQ ID NO: 14950 - RNA, 21 nt, RNAi
uuggauucugguccuucaaac

SEQ ID NO: 14951 - DNA, 21 bp, Homo sapiens
gaccaggaagtttgagaaagc

SEQ ID NO: 14952 - RNA, 21 nt, RNAi
ccaggaaguuugagaaagcuu

SEQ ID NO: 14953 - RNA, 21 nt, RNAi
uugguccuucaaacucuuucg

SEQ ID NO: 14954 - DNA, 21 bp, Homo sapiens
gaagtttgagaaagcagccgc

SEQ ID NO: 14955 - RNA, 21 nt, RNAi
aguuugagaaagcagccgcuu

SEQ ID NO: 14956 - RNA, 21 nt, RNAi
uuucaaacucuuucgucggcg

SEQ ID NO: 14957 - DNA, 21 bp, Homo sapiens
gagaaagcagccgcagctcaa

SEQ ID NO: 14958 - RNA, 21 nt, RNAi
gaaagcagccgcagcucaauu

SEQ ID NO: 14959 - RNA, 21 nt, RNAi
uucuuucgucggcgucgaguu

SEQ ID NO: 14960 - DNA, 21 bp, Homo sapiens
gaaagcagccgcagctcaact

SEQ ID NO: 14961 - RNA, 21 nt, RNAi
aagcagccgcagcucaacuuu

SEQ ID NO: 14962 - RNA, 21 nt, RNAi
uuuucgucggcgucgaguuga

SEQ ID NO: 14963 - DNA, 21 bp, Homo sapiens
gaagtccttaggtgcagtgcg

SEQ ID NO: 14964 - RNA, 21 nt, RNAi
aguccuuaggugcagugcguu

SEQ ID NO: 14965 - RNA, 21 nt, RNAi
uuucaggaauccacgucacgc

SEQ ID NO: 14966 - DNA, 21 bp, Homo sapiens
gagtacgaaattcctggcaac

SEQ ID NO: 14967 - RNA, 21 nt, RNAi
guacgaaauuccuggcaacuu

SEQ ID NO: 14968 - RNA, 21 nt, RNAi
uucaugcuuuaaggaccguug

SEQ ID NO: 14969 - DNA, 21 bp, Homo sapiens
gaaattcctggcaactggtac

SEQ ID NO: 14970 - RNA, 21 nt, RNAi
aauuccuggcaacugguacuu

SEQ ID NO: 14971 - RNA, 21 nt, RNAi
uuuuaaggaccguugaccaug

SEQ ID NO: 14972 - DNA, 21 bp, Homo sapiens
gaaccaacctagaggctttgc

SEQ ID NO: 14973 - RNA, 21 nt, RNAi
accaaccuagaggcuuugcuu

SEQ ID NO: 14974 - RNA, 21 nt, RNAi
uuugguuggaucuccgaaacg

SEQ ID NO: 14975 - DNA, 21 bp, Homo sapiens
gaggctttgcagttggcaagc

SEQ ID NO: 14976 - RNA, 21 nt, RNAi
ggcuuugcaguuggcaagcuu

SEQ ID NO: 14977 - RNA, 21 nt, RNAi
uuccgaaacgucaaccguucg

SEQ ID NO: 14978 - DNA, 21 bp, Homo sapiens
gattgcaacctggcctgcatc

SEQ ID NO: 14979 - RNA, 21 nt, RNAi
uugcaaccuggccugcaucuu

SEQ ID NO: 14980 - RNA, 21 nt, RNAi
uuaacguuggaccggacguag

SEQ ID NO: 14981 - DNA, 21 bp, Homo sapiens
gaaacgcctacaaacctccat

SEQ ID NO: 14982 - RNA, 21 nt, RNAi
aacgccuacaaaccuccauuu

SEQ ID NO: 14983 - RNA, 21 nt, RNAi
uuuugcggauguuuggaggua

SEQ ID NO: 14984 - DNA, 21 bp, Homo sapiens
gatttgattgaatgtttgctg

SEQ ID NO: 14985 - RNA, 21 nt, RNAi
uuugauugaauguuugcuguu

SEQ ID NO: 14986 - RNA, 21 nt, RNAi
uuaaacuaacuuacaaacgac

SEQ ID NO: 14987 - DNA, 21 bp, Homo sapiens
gattgaatgtttgctgaagtt

SEQ ID NO: 14988 - RNA, 21 nt, RNAi
uugaauguuugcugaaguuuu

SEQ ID NO: 14989 - RNA, 21 nt, RNAi
uuaacuuacaaacgacuucaa

SEQ ID NO: 14990 - DNA, 21 bp, Homo sapiens
gaactgctttctgctatatag

SEQ ID NO: 14991 - RNA, 21 nt, RNAi
acugcuuucugcuauauaguu

SEQ ID NO: 14992 - RNA, 21 nt, RNAi
uuugacgaaagacgauauauc

SEQ ID NO: 14993 - DNA, 21 bp, Homo sapiens
gaggaaattgaattggtttct

SEQ ID NO: 14994 - RNA, 21 nt, RNAi
ggaaauugaauugguuucuuu

SEQ ID NO: 14995 - RNA, 21 nt, RNAi
uuccuuuaacuuaaccaaaga

SEQ ID NO: 14996 - DNA, 21 bp, Homo sapiens
gacagccatcttcactggagg

SEQ ID NO: 14997 - RNA, 21 nt, RNAi
cagccaucuucacuggagguu

SEQ ID NO: 14998 - RNA, 21 nt, RNAi
uugucgguagaagugaccucc

SEQ ID NO: 14999 - DNA, 21 bp, Homo sapiens
gagctccgtgtgaccaccaag

SEQ ID NO: 15000 - RNA, 21 nt, RNAi
gcuccgugugaccaccaaguu

SEQ ID NO: 15001 - RNA, 21 nt, RNAi
uucgaggcacacuggugguuc

SEQ ID NO: 15002 - DNA, 21 bp, Homo sapiens
gaccaccaagatgccagcagg

SEQ ID NO: 15003 - RNA, 21 nt, RNAi
ccaccaagaugccagcagguu

SEQ ID NO: 15004 - RNA, 21 nt, RNAi
uuggugguucuacggucgucc

SEQ ID NO: 15005 - DNA, 21 bp, Homo sapiens
gatgccagcaggatataccgt

SEQ ID NO: 15006 - RNA, 21 nt, RNAi
ugccagcaggauauaccguuu

SEQ ID NO: 15007 - RNA, 21 nt, RNAi
uuacggucguccuauauggca

SEQ ID NO: 15008 - DNA, 21 bp, Homo sapiens
gatataccgtaacacgaaatt

SEQ ID NO: 15009 - RNA, 21 nt, RNAi
uauaccguaacacgaaauuuu

SEQ ID NO: 15010 - RNA, 21 nt, RNAi
uuauauggcauugugcuuuaa

SEQ ID NO: 15011 - DNA, 21 bp, Homo sapiens
gaacgaggaagagaacacaag

SEQ ID NO: 15012 - RNA, 21 nt, RNAi
acgaggaagagaacacaaguu

SEQ ID NO: 15013 - RNA, 21 nt, RNAi
uuugcuccuucucuuguguuc

SEQ ID NO: 15014 - DNA, 21 bp, Homo sapiens
gaggaagagaacacaaggaat

SEQ ID NO: 15015 - RNA, 21 nt, RNAi
ggaagagaacacaaggaauuu

SEQ ID NO: 15016 - RNA, 21 nt, RNAi
uuccuucucuuguguuccuua

SEQ ID NO: 15017 - DNA, 21 bp, Homo sapiens
gaagagaacacaaggaatgat

SEQ ID NO: 15018 - RNA, 21 nt, RNAi
agagaacacaaggaaugauuu

SEQ ID NO: 15019 - RNA, 21 nt, RNAi
uuucucuuguguuccuuacua

SEQ ID NO: 15020 - DNA, 21 bp, Homo sapiens
gagaacacaaggaatgattca

SEQ ID NO: 15021 - RNA, 21 nt, RNAi
gaacacaaggaaugauucauu

SEQ ID NO: 15022 - RNA, 21 nt, RNAi
uucuuguguuccuuacuaagu

SEQ ID NO: 15023 - DNA, 21 bp, Homo sapiens
gaacacaaggaatgattcaag

SEQ ID NO: 15024 - RNA, 21 nt, RNAi
acacaaggaaugauucaaguu

SEQ ID NO: 15025 - RNA, 21 nt, RNAi
uuuguguuccuuacuaaguuc

SEQ ID NO: 15026 - DNA, 21 bp, Homo sapiens
gaatgattcaagatccacctt

SEQ ID NO: 15027 - RNA, 21 nt, RNAi
augauucaagauccaccuuuu

SEQ ID NO: 15028 - RNA, 21 nt, RNAi
uuuacuaaguucuagguggaa

SEQ ID NO: 15029 - DNA, 21 bp, Homo sapiens
gattcaagatccaccttgaga

SEQ ID NO: 15030 - RNA, 21 nt, RNAi
uucaagauccaccuugagauu

SEQ ID NO: 15031 - RNA, 21 nt, RNAi
uuaaguucuagguggaacucu

SEQ ID NO: 15032 - DNA, 21 bp, Homo sapiens
gatccaccttgagaggaatga

SEQ ID NO: 15033 - RNA, 21 nt, RNAi
uccaccuugagaggaaugauu

SEQ ID NO: 15034 - RNA, 21 nt, RNAi
uuagguggaacucuccuuacu

SEQ ID NO: 15035 - DNA, 21 bp, Homo sapiens
gagaggaatgaactttgttgt

SEQ ID NO: 15036 - RNA, 21 nt, RNAi
gaggaaugaacuuuguuguuu

SEQ ID NO: 15037 - RNA, 21 nt, RNAi
uucuccuuacuugaaacaaca

SEQ ID NO: 15038 - DNA, 21 bp, Homo sapiens
gaggaatgaactttgttgttg

SEQ ID NO: 15039 - RNA, 21 nt, RNAi
ggaaugaacuuuguuguuguu

SEQ ID NO: 15040 - RNA, 21 nt, RNAi
uuccuuacuugaaacaacaac

SEQ ID NO: 15041 - DNA, 21 bp, Homo sapiens
gaatgaactttgttgttgaac

SEQ ID NO: 15042 - RNA, 21 nt, RNAi
augaacuuuguuguugaacuu

SEQ ID NO: 15043 - RNA, 21 nt, RNAi
uuuacuugaaacaacaacuug

SEQ ID NO: 15044 - DNA, 21 bp, Homo sapiens
tacagcagaagctggagactg

SEQ ID NO: 15045 - RNA, 21 nt, RNAi
cagcagaagcuggagacuguu

SEQ ID NO: 15046 - RNA, 21 nt, RNAi
uugucgucuucgaccucugac

SEQ ID NO: 15047 - DNA, 21 bp, Homo sapiens
tacagcagcagatggacctgc

SEQ ID NO: 15048 - RNA, 21 nt, RNAi
cagcagcagauggaccugcuu

SEQ ID NO: 15049 - RNA, 21 nt, RNAi
uugucgucgucuaccuggacg

SEQ ID NO: 15050 - DNA, 21 bp, Homo sapiens
tactgaagacagaaagaagtg

SEQ ID NO: 15051 - RNA, 21 nt, RNAi
cugaagacagaaagaaguguu

SEQ ID NO: 15052 - RNA, 21 nt, RNAi
uugacuucugucuuucuucac

SEQ ID NO: 15053 - DNA, 21 bp, Homo sapiens
tacaatgagctgaagctggcc

SEQ ID NO: 15054 - RNA, 21 nt, RNAi
caaugagcugaagcuggccuu

SEQ ID NO: 15055 - RNA, 21 nt, RNAi
uuguuacucgacuucgaccgg

SEQ ID NO: 15056 - DNA, 21 bp, Homo sapiens
tagtcggcgtcttaaggaacg

SEQ ID NO: 15057 - RNA, 21 nt, RNAi
gucggcgucuuaaggaacguu

SEQ ID NO: 15058 - RNA, 21 nt, RNAi
uucagccgcagaauuccuugc

SEQ ID NO: 15059 - DNA, 21 bp, Homo sapiens
taaggaacgcatgcaccacaa

SEQ ID NO: 15060 - RNA, 21 nt, RNAi
aggaacgcaugcaccacaauu

SEQ ID NO: 15061 - RNA, 21 nt, RNAi
uuuccuugcguacgugguguu

SEQ ID NO: 15062 - DNA, 21 bp, Homo sapiens
tattcctcaccgattcaacgt

SEQ ID NO: 15063 - RNA, 21 nt, RNAi
uuccucaccgauucaacguuu

SEQ ID NO: 15064 - RNA, 21 nt, RNAi
uuaaggaguggcuaaguugca

SEQ ID NO: 15065 - DNA, 21 bp, Homo sapiens
taggactgaacatgcgagcca

SEQ ID NO: 15066 - RNA, 21 nt, RNAi
ggacugaacaugcgagccauu

SEQ ID NO: 15067 - RNA, 21 nt, RNAi
uuccugacuuguacgcucggu

SEQ ID NO: 15068 - DNA, 21 bp, Homo sapiens
taccgtgcactttggacgcca

SEQ ID NO: 15069 - RNA, 21 nt, RNAi
ccgugcacuuuggacgccauu

SEQ ID NO: 15070 - RNA, 21 nt, RNAi
uuggcacgugaaaccugcggu

SEQ ID NO: 15071 - DNA, 21 bp, Homo sapiens
tatgccacacacttcaccgag

SEQ ID NO: 15072 - RNA, 21 nt, RNAi
ugccacacacuucaccgaguu

SEQ ID NO: 15073 - RNA, 21 nt, RNAi
uuacggugugugaaguggcuc

SEQ ID NO: 15074 - DNA, 21 bp, Homo sapiens
taacaaacgaggacagcaagg

SEQ ID NO: 15075 - RNA, 21 nt, RNAi
acaaacgaggacagcaagguu

SEQ ID NO: 15076 - RNA, 21 nt, RNAi
uuuguuugcuccugucguucc

SEQ ID NO: 15077 - DNA, 21 bp, Homo sapiens
tatgacaatgaagccagagaa

SEQ ID NO: 15078 - RNA, 21 nt, RNAi
ugacaaugaagccagagaauu

SEQ ID NO: 15079 - RNA, 21 nt, RNAi
uuacuguuacuucggucucuu

SEQ ID NO: 15080 - DNA, 21 bp, Homo sapiens
tatctattcatggtgccgttg

SEQ ID NO: 15081 - RNA, 21 nt, RNAi
ucuauucauggugccguuguu

SEQ ID NO: 15082 - RNA, 21 nt, RNAi
uuagauaaguaccacggcaac

SEQ ID NO: 15083 - DNA, 21 bp, Homo sapiens
tattcatggtgccgttggtgc

SEQ ID NO: 15084 - RNA, 21 nt, RNAi
uucauggugccguuggugcuu

SEQ ID NO: 15085 - RNA, 21 nt, RNAi
uuaaguaccacggcaaccacg

SEQ ID NO: 15086 - DNA, 21 bp, Homo sapiens
tacatactgaagatggaatct

SEQ ID NO: 15087 - RNA, 21 nt, RNAi
cauacugaagauggaaucuuu

SEQ ID NO: 15088 - RNA, 21 nt, RNAi
uuguaugacuucuaccuuaga

SEQ ID NO: 15089 - DNA, 21 bp, Homo sapiens
tactgaagatggaatctcacc

SEQ ID NO: 15090 - RNA, 21 nt, RNAi
cugaagauggaaucucaccuu

SEQ ID NO: 15091 - RNA, 21 nt, RNAi
uugacuucuaccuuagagugg

SEQ ID NO: 15092 - DNA, 21 bp, Homo sapiens
tagaatcagttgtcgcaggtg

SEQ ID NO: 15093 - RNA, 21 nt, RNAi
gaaucaguugucgcagguguu

SEQ ID NO: 15094 - RNA, 21 nt, RNAi
uucuuagucaacagcguccac

SEQ ID NO: 15095 - DNA, 21 bp, Homo sapiens
tagacatgaactgcacgctgc

SEQ ID NO: 15096 - RNA, 21 nt, RNAi
gacaugaacugcacgcugcuu

SEQ ID NO: 15097 - RNA, 21 nt, RNAi
uucuguacuugacgugcgacg

SEQ ID NO: 15098 - DNA, 21 bp, Homo sapiens
tatattatcaaggacctggag

SEQ ID NO: 15099 - RNA, 21 nt, RNAi
uauuaucaaggaccuggaguu

SEQ ID NO: 15100 - RNA, 21 nt, RNAi
uuauaauaguuccuggaccuc

SEQ ID NO: 15101 - DNA, 21 bp, Homo sapiens
tattatcaaggacctggagaa

SEQ ID NO: 15102 - RNA, 21 nt, RNAi
uuaucaaggaccuggagaauu

SEQ ID NO: 15103 - RNA, 21 nt, RNAi
uuaauaguuccuggaccucuu

SEQ ID NO: 15104 - DNA, 21 bp, Homo sapiens
tatcaaggacctggagaagct

SEQ ID NO: 15105 - RNA, 21 nt, RNAi
ucaaggaccuggagaagcuuu

SEQ ID NO: 15106 - RNA, 21 nt, RNAi
uuaguuccuggaccucuucga

SEQ ID NO: 15107 - DNA, 21 bp, Homo sapiens
tactcatgatagcaggagaag

SEQ ID NO: 15108 - RNA, 21 nt, RNAi
cucaugauagcaggagaaguu

SEQ ID NO: 15109 - RNA, 21 nt, RNAi
uugaguacuaucguccucuuc

SEQ ID NO: 15110 - DNA, 21 bp, Homo sapiens
tactgcatccggaaagagata

SEQ ID NO: 15111 - RNA, 21 nt, RNAi
cugcauccggaaagagauauu

SEQ ID NO: 15112 - RNA, 21 nt, RNAi
uugacguaggccuuucucuau

SEQ ID NO: 15113 - DNA, 21 bp, Homo sapiens
tatccacttcaccaattacag

SEQ ID NO: 15114 - RNA, 21 nt, RNAi
uccacuucaccaauuacaguu

SEQ ID NO: 15115 - RNA, 21 nt, RNAi
uuaggugaagugguuaauguc

SEQ ID NO: 15116 - DNA, 21 bp, Homo sapiens
tacagtatcctcattggaacc

SEQ ID NO: 15117 - RNA, 21 nt, RNAi
caguauccucauuggaaccuu

SEQ ID NO: 15118 - RNA, 21 nt, RNAi
uugucauaggaguaaccuugg

SEQ ID NO: 15119 - DNA, 21 bp, Homo sapiens
tatcctcattggaaccaataa

SEQ ID NO: 15120 - RNA, 21 nt, RNAi
uccucauuggaaccaauaauu

SEQ ID NO: 15121 - RNA, 21 nt, RNAi
uuaggaguaaccuugguuauu

SEQ ID NO: 15122 - DNA, 21 bp, Homo sapiens
tacgaaatcgacatgaagcag

SEQ ID NO: 15123 - RNA, 21 nt, RNAi
cgaaaucgacaugaagcaguu

SEQ ID NO: 15124 - RNA, 21 nt, RNAi
uugcuuuagcuguacuucguc

SEQ ID NO: 15125 - DNA, 21 bp, Homo sapiens
tacacgctcgaggaattcctg

SEQ ID NO: 15126 - RNA, 21 nt, RNAi
cacgcucgaggaauuccuguu

SEQ ID NO: 15127 - RNA, 21 nt, RNAi
uugugcgagcuccuuaaggac

SEQ ID NO: 15128 - DNA, 21 bp, Homo sapiens
taagaatgaccattccttggc

SEQ ID NO: 15129 - RNA, 21 nt, RNAi
agaaugaccauuccuuggcuu

SEQ ID NO: 15130 - RNA, 21 nt, RNAi
uuucuuacugguaaggaaccg

SEQ ID NO: 15131 - DNA, 21 bp, Homo sapiens
tacttgctgtgtttccacgaa

SEQ ID NO: 15132 - RNA, 21 nt, RNAi
cuugcuguguuuccacgaauu

SEQ ID NO: 15133 - RNA, 21 nt, RNAi
uugaacgacacaaaggugcuu

SEQ ID NO: 15134 - DNA, 21 bp, Homo sapiens
tacggaagacgtagccgcaca

SEQ ID NO: 15135 - RNA, 21 nt, RNAi
cggaagacguagccgcacauu

SEQ ID NO: 15136 - RNA, 21 nt, RNAi
uugccuucugcaucggcgugu

SEQ ID NO: 15137 - DNA, 21 bp, Homo sapiens
tagccgcacagacgatctcaa

SEQ ID NO: 15138 - RNA, 21 nt, RNAi
gccgcacagacgaucucaauu

SEQ ID NO: 15139 - RNA, 21 nt, RNAi
uucggcgugucugcuagaguu

SEQ ID NO: 15140 - DNA, 21 bp, Homo sapiens
tacctttggcctttgcctaca

SEQ ID NO: 15141 - RNA, 21 nt, RNAi
ccuuuggccuuugccuacauu

SEQ ID NO: 15142 - RNA, 21 nt, RNAi
uuggaaaccggaaacggaugu

SEQ ID NO: 15143 - DNA, 21 bp, Homo sapiens
taattgagatccaggcacgct

SEQ ID NO: 15144 - RNA, 21 nt, RNAi
auugagauccaggcacgcuuu

SEQ ID NO: 15145 - RNA, 21 nt, RNAi
uuuaacucuagguccgugcga

SEQ ID NO: 15146 - DNA, 21 bp, Homo sapiens
tacttggcgtcctcataccag

SEQ ID NO: 15147 - RNA, 21 nt, RNAi
cuuggcguccucauaccaguu

SEQ ID NO: 15148 - RNA, 21 nt, RNAi
uugaaccgcaggaguaugguc

SEQ ID NO: 15149 - DNA, 21 bp, Homo sapiens
tacaacgagcacatcaccaag

SEQ ID NO: 15150 - RNA, 21 nt, RNAi
caacgagcacaucaccaaguu

SEQ ID NO: 15151 - RNA, 21 nt, RNAi
uuguugcucguguagugguuc

SEQ ID NO: 15152 - DNA, 21 bp, Homo sapiens
tactctttcaaagcattcaca

SEQ ID NO: 15153 - RNA, 21 nt, RNAi
cucuuucaaagcauucacauu

SEQ ID NO: 15154 - RNA, 21 nt, RNAi
uugagaaaguuucguaagugu

SEQ ID NO: 15155 - DNA, 21 bp, Homo sapiens
tacctagctctagcctgtacc

SEQ ID NO: 15156 - RNA, 21 nt, RNAi
ccuagcucuagccuguaccuu

SEQ ID NO: 15157 - RNA, 21 nt, RNAi
uuggaucgagaucggacaugg

SEQ ID NO: 15158 - DNA, 21 bp, Homo sapiens
tagctctagcctgtaccagtt

SEQ ID NO: 15159 - RNA, 21 nt, RNAi
gcucuagccuguaccaguuuu

SEQ ID NO: 15160 - RNA, 21 nt, RNAi
uucgagaucggacauggucaa

SEQ ID NO: 15161 - DNA, 21 bp, Homo sapiens
tagcctgtaccagttagttca

SEQ ID NO: 15162 - RNA, 21 nt, RNAi
gccuguaccaguuaguucauu

SEQ ID NO: 15163 - RNA, 21 nt, RNAi
uucggacauggucaaucaagu

SEQ ID NO: 15164 - DNA, 21 bp, Homo sapiens
taccagttagttcatcaaagg

SEQ ID NO: 15165 - RNA, 21 nt, RNAi
ccaguuaguucaucaaagguu

SEQ ID NO: 15166 - RNA, 21 nt, RNAi
uuggucaaucaaguaguuucc

SEQ ID NO: 15167 - DNA, 21 bp, Homo sapiens
tagttcatcaaaggaaaccaa

SEQ ID NO: 15168 - RNA, 21 nt, RNAi
guucaucaaaggaaaccaauu

SEQ ID NO: 15169 - RNA, 21 nt, RNAi
uucaaguaguuuccuuugguu

SEQ ID NO: 15170 - DNA, 21 bp, Homo sapiens
tacaacatggttagaatccta

SEQ ID NO: 15171 - RNA, 21 nt, RNAi
caacaugguuagaauccuauu

SEQ ID NO: 15172 - RNA, 21 nt, RNAi
uuguuguaccaaucuuaggau

SEQ ID NO: 15173 - DNA, 21 bp, Homo sapiens
tagctactttaagatcctagg

SEQ ID NO: 15174 - RNA, 21 nt, RNAi
gcuacuuuaagauccuagguu

SEQ ID NO: 15175 - RNA, 21 nt, RNAi
uucgaugaaauucuaggaucc

SEQ ID NO: 15176 - DNA, 21 bp, Homo sapiens
tactttaagatcctaggattg

SEQ ID NO: 15177 - RNA, 21 nt, RNAi
cuuuaagauccuaggauuguu

SEQ ID NO: 15178 - RNA, 21 nt, RNAi
uugaaauucuaggauccuaac

SEQ ID NO: 15179 - DNA, 21 bp, Homo sapiens
taagatcctaggattggttgg

SEQ ID NO: 15180 - RNA, 21 nt, RNAi
agauccuaggauugguugguu

SEQ ID NO: 15181 - RNA, 21 nt, RNAi
uuucuaggauccuaaccaacc

SEQ ID NO: 15182 - DNA, 21 bp, Homo sapiens
taatagatttgaatagcgacg

SEQ ID NO: 15183 - RNA, 21 nt, RNAi
auagauuugaauagcgacguu

SEQ ID NO: 15184 - RNA, 21 nt, RNAi
uuuaucuaaacuuaucgcugc

SEQ ID NO: 15185 - DNA, 21 bp, Homo sapiens
tagatttgaatagcgacgtat

SEQ ID NO: 15186 - RNA, 21 nt, RNAi
gauuugaauagcgacguauuu

SEQ ID NO: 15187 - RNA, 21 nt, RNAi
uucuaaacuuaucgcugcaua

SEQ ID NO: 15188 - DNA, 21 bp, Homo sapiens
tagcgacgtatttcctgttgt

SEQ ID NO: 15189 - RNA, 21 nt, RNAi
gcgacguauuuccuguuguuu

SEQ ID NO: 15190 - RNA, 21 nt, RNAi
uucgcugcauaaaggacaaca

SEQ ID NO: 15191 - DNA, 21 bp, Homo sapiens
tagctcgaccacatcatcagg

SEQ ID NO: 15192 - RNA, 21 nt, RNAi
gcucgaccacaucaucagguu

SEQ ID NO: 15193 - RNA, 21 nt, RNAi
uucgagcugguguaguagucc

SEQ ID NO: 15194 - DNA, 21 bp, Homo sapiens
taggttcatccttgttcctgt

SEQ ID NO: 15195 - RNA, 21 nt, RNAi
gguucauccuuguuccuguuu

SEQ ID NO: 15196 - RNA, 21 nt, RNAi
uuccaaguaggaacaaggaca

SEQ ID NO: 15197 - DNA, 21 bp, Homo sapiens
tatagctttggccaggaaagc

SEQ ID NO: 15198 - RNA, 21 nt, RNAi
uagcuuuggccaggaaagcuu

SEQ ID NO: 15199 - RNA, 21 nt, RNAi
uuaucgaaaccgguccuuucg

SEQ ID NO: 15200 - DNA, 21 bp, Homo sapiens
tagctttggccaggaaagcat

SEQ ID NO: 15201 - RNA, 21 nt, RNAi
gcuuuggccaggaaagcauuu

SEQ ID NO: 15202 - RNA, 21 nt, RNAi
uucgaaaccgguccuuucgua

SEQ ID NO: 15203 - DNA, 21 bp, Homo sapiens
tagctcctgccaaatcgagac

SEQ ID NO: 15204 - RNA, 21 nt, RNAi
gcuccugccaaaucgagacuu

SEQ ID NO: 15205 - RNA, 21 nt, RNAi
uucgaggacgguuuagcucug

SEQ ID NO: 15206 - DNA, 21 bp, Homo sapiens
taactggccaccacaagctgc

SEQ ID NO: 15207 - RNA, 21 nt, RNAi
acuggccaccacaagcugcuu

SEQ ID NO: 15208 - RNA, 21 nt, RNAi
uuugaccggugguguucgacg

SEQ ID NO: 15209 - DNA, 21 bp, Homo sapiens
tacgaccagagaaggatttca

SEQ ID NO: 15210 - RNA, 21 nt, RNAi
cgaccagagaaggauuucauu

SEQ ID NO: 15211 - RNA, 21 nt, RNAi
uugcuggucucuuccuaaagu

SEQ ID NO: 15212 - DNA, 21 bp, Homo sapiens
tagacctaagaccaggaagtt

SEQ ID NO: 15213 - RNA, 21 nt, RNAi
gaccuaagaccaggaaguuuu

SEQ ID NO: 15214 - RNA, 21 nt, RNAi
uucuggauucugguccuucaa

SEQ ID NO: 15215 - DNA, 21 bp, Homo sapiens
taagaccaggaagtttgagaa

SEQ ID NO: 15216 - RNA, 21 nt, RNAi
agaccaggaaguuugagaauu

SEQ ID NO: 15217 - RNA, 21 nt, RNAi
uuucugguccuucaaacucuu

SEQ ID NO: 15218 - DNA, 21 bp, Homo sapiens
tattagagtacgaaattcctg

SEQ ID NO: 15219 - RNA, 21 nt, RNAi
uuagaguacgaaauuccuguu

SEQ ID NO: 15220 - RNA, 21 nt, RNAi
uuaaucucaugcuuuaaggac

SEQ ID NO: 15221 - DNA, 21 bp, Homo sapiens
tagagtacgaaattcctggca

SEQ ID NO: 15222 - RNA, 21 nt, RNAi
gaguacgaaauuccuggcauu

SEQ ID NO: 15223 - RNA, 21 nt, RNAi
uucucaugcuuuaaggaccgu

SEQ ID NO: 15224 - DNA, 21 bp, Homo sapiens
tacgaaattcctggcaactgg

SEQ ID NO: 15225 - RNA, 21 nt, RNAi
cgaaauuccuggcaacugguu

SEQ ID NO: 15226 - RNA, 21 nt, RNAi
uugcuuuaaggaccguugacc

SEQ ID NO: 15227 - DNA, 21 bp, Homo sapiens
tacagaaccaacctagaggct

SEQ ID NO: 15228 - RNA, 21 nt, RNAi
cagaaccaaccuagaggcuuu

SEQ ID NO: 15229 - RNA, 21 nt, RNAi
uugucuugguuggaucuccga

SEQ ID NO: 15230 - DNA, 21 bp, Homo sapiens
tagaggctttgcagttggcaa

SEQ ID NO: 15231 - RNA, 21 nt, RNAi
gaggcuuugcaguuggcaauu

SEQ ID NO: 15232 - RNA, 21 nt, RNAi
uucuccgaaacgucaaccguu

SEQ ID NO: 15233 - DNA, 21 bp, Homo sapiens
taggtaggctcaaaggtagac

SEQ ID NO: 15234 - RNA, 21 nt, RNAi
gguaggcucaaagguagacuu

SEQ ID NO: 15235 - RNA, 21 nt, RNAi
uuccauccgaguuuccaucug

SEQ ID NO: 15236 - DNA, 21 bp, Homo sapiens
taacctaagtgctttcttgtt

SEQ ID NO: 15237 - RNA, 21 nt, RNAi
accuaagugcuuucuuguuuu

SEQ ID NO: 15238 - RNA, 21 nt, RNAi
uuuggauucacgaaagaacaa

SEQ ID NO: 15239 - DNA, 21 bp, Homo sapiens
tacaaacctccatgtggtagc

SEQ ID NO: 15240 - RNA, 21 nt, RNAi
caaaccuccaugugguagcuu

SEQ ID NO: 15241 - RNA, 21 nt, RNAi
uuguuuggagguacaccaucg

SEQ ID NO: 15242 - DNA, 21 bp, Homo sapiens
tagctcctttggcaaatgtcc

SEQ ID NO: 15243 - RNA, 21 nt, RNAi
gcuccuuuggcaaauguccuu

SEQ ID NO: 15244 - RNA, 21 nt, RNAi
uucgaggaaaccguuuacagg

SEQ ID NO: 15245 - DNA, 21 bp, Homo sapiens
tatgtgttgcttggagtctgt

SEQ ID NO: 15246 - RNA, 21 nt, RNAi
uguguugcuuggagucuguuu

SEQ ID NO: 15247 - RNA, 21 nt, RNAi
uuacacaacgaaccucagaca

SEQ ID NO: 15248 - DNA, 21 bp, Homo sapiens
tatttggaaaggtcactgaaa

SEQ ID NO: 15249 - RNA, 21 nt, RNAi
uuuggaaaggucacugaaauu

SEQ ID NO: 15250 - RNA, 21 nt, RNAi
uuaaaccuuuccagugacuuu

SEQ ID NO: 15251 - DNA, 21 bp, Homo sapiens
taggatctccatgagaaatgg

SEQ ID NO: 15252 - RNA, 21 nt, RNAi
ggaucuccaugagaaaugguu

SEQ ID NO: 15253 - RNA, 21 nt, RNAi
uuccuagagguacucuuuacc

SEQ ID NO: 15254 - DNA, 21 bp, Homo sapiens
tatattgtgtgtctcatctgt

SEQ ID NO: 15255 - RNA, 21 nt, RNAi
uauugugugucucaucuguuu

SEQ ID NO: 15256 - RNA, 21 nt, RNAi
uuauaacacacagaguagaca

SEQ ID NO: 15257 - DNA, 21 bp, Homo sapiens
tattgtgtgtctcatctgtga

SEQ ID NO: 15258 - RNA, 21 nt, RNAi
uugugugucucaucugugauu

SEQ ID NO: 15259 - RNA, 21 nt, RNAi
uuaacacacagaguagacacu

SEQ ID NO: 15260 - DNA, 21 bp, Homo sapiens
tagttgtggacagccatcttc

SEQ ID NO: 15261 - RNA, 21 nt, RNAi
guuguggacagccaucuucuu

SEQ ID NO: 15262 - RNA, 21 nt, RNAi
uucaacaccugucgguagaag

SEQ ID NO: 15263 - DNA, 21 bp, Homo sapiens
tataccgtaacacgaaattgc

SEQ ID NO: 15264 - RNA, 21 nt, RNAi
uaccguaacacgaaauugcuu

SEQ ID NO: 15265 - RNA, 21 nt, RNAi
uuauggcauugugcuuuaacg

SEQ ID NO: 15266 - DNA, 21 bp, Homo sapiens
taccgtaacacgaaattgctg

SEQ ID NO: 15267 - RNA, 21 nt, RNAi
ccguaacacgaaauugcuguu

SEQ ID NO: 15268 - RNA, 21 nt, RNAi
uuggcauugugcuuuaacgac

SEQ ID NO: 15269 - DNA, 21 bp, Homo sapiens
taacacgaaattgctgtcaaa

SEQ ID NO: 15270 - RNA, 21 nt, RNAi
acacgaaauugcugucaaauu

SEQ ID NO: 15271 - RNA, 21 nt, RNAi
uuugugcuuuaacgacaguuu

SEQ ID NO: 15272 - DNA, 21 bp, Homo sapiens
tagcatcaatcaagattctag

SEQ ID NO: 15273 - RNA, 21 nt, RNAi
gcaucaaucaagauucuaguu

SEQ ID NO: 15274 - RNA, 21 nt, RNAi
uucguaguuaguucuaagauc

SEQ ID NO: 15275 - DNA, 21 bp, Homo sapiens
tattcagaacgaggaagagaa

SEQ ID NO: 15276 - RNA, 21 nt, RNAi
uucagaacgaggaagagaauu

SEQ ID NO: 15277 - RNA, 21 nt, RNAi
uuaagucuugcuccuucucuu

SEQ ID NO: 15278 - DNA, 21 bp, Homo sapiens
aaggttcctctgcagtacaat

SEQ ID NO: 15279 - RNA, 21 nt, RNAi
gguuccucugcaguacaauuu

SEQ ID NO: 15280 - RNA, 21 nt, RNAi
uuccaaggagacgucauguua

SEQ ID NO: 15281 - DNA, 21 bp, Homo sapiens
aatttagtcggcgtcttaagg

SEQ ID NO: 15282 - RNA, 21 nt, RNAi
uuuagucggcgucuuaagguu

SEQ ID NO: 15283 - RNA, 21 nt, RNAi
uuaaaucagccgcagaauucc

SEQ ID NO: 15284 - DNA, 21 bp, Homo sapiens
aacatgcgagccacaaagtgt

SEQ ID NO: 15285 - RNA, 21 nt, RNAi
caugcgagccacaaaguguuu

SEQ ID NO: 15286 - RNA, 21 nt, RNAi
uuguacgcucgguguuucaca

SEQ ID NO: 15287 - DNA, 21 bp, Homo sapiens
aaatgtctcgaatgtcaggtg

SEQ ID NO: 15288 - RNA, 21 nt, RNAi
augucucgaaugucagguguu

SEQ ID NO: 15289 - RNA, 21 nt, RNAi
uuuacagagcuuacaguccac

SEQ ID NO: 15290 - DNA, 21 bp, Homo sapiens
aatgtctcgaatgtcaggtga

SEQ ID NO: 15291 - RNA, 21 nt, RNAi
ugucucgaaugucaggugauu

SEQ ID NO: 15292 - RNA, 21 nt, RNAi
uuacagagcuuacaguccacu

SEQ ID NO: 15293 - DNA, 21 bp, Homo sapiens
aataacaaacgaggacagcaa

SEQ ID NO: 15294 - RNA, 21 nt, RNAi
uaacaaacgaggacagcaauu

SEQ ID NO: 15295 - RNA, 21 nt, RNAi
uuauuguuugcuccugucguu

SEQ ID NO: 15296 - DNA, 21 bp, Homo sapiens
aaactggaaggtgatgaccgt

SEQ ID NO: 15297 - RNA, 21 nt, RNAi
acuggaaggugaugaccguuu

SEQ ID NO: 15298 - RNA, 21 nt, RNAi
uuugaccuuccacuacuggca

SEQ ID NO: 15299 - DNA, 21 bp, Homo sapiens
aaggtgatgaccgtctagaca

SEQ ID NO: 15300 - RNA, 21 nt, RNAi
ggugaugaccgucuagacauu

SEQ ID NO: 15301 - RNA, 21 nt, RNAi
uuccacuacuggcagaucugu

SEQ ID NO: 15302 - DNA, 21 bp, Homo sapiens
aagctactcatgatagcagga

SEQ ID NO: 15303 - RNA, 21 nt, RNAi
gcuacucaugauagcaggauu

SEQ ID NO: 15304 - RNA, 21 nt, RNAi
uucgaugaguacuaucguccu

SEQ ID NO: 15305 - DNA, 21 bp, Homo sapiens
aaagtcgtcattctccgctac

SEQ ID NO: 15306 - RNA, 21 nt, RNAi
agucgucauucuccgcuacuu

SEQ ID NO: 15307 - RNA, 21 nt, RNAi
uuucagcaguaagaggcgaug

SEQ ID NO: 15308 - DNA, 21 bp, Homo sapiens
aagtcgtcattctccgctaca

SEQ ID NO: 15309 - RNA, 21 nt, RNAi
gucgucauucuccgcuacauu

SEQ ID NO: 15310 - RNA, 21 nt, RNAi
uucagcaguaagaggcgaugu

SEQ ID NO: 15311 - DNA, 21 bp, Homo sapiens
aaatactgcatccggaaagag

SEQ ID NO: 15312 - RNA, 21 nt, RNAi
auacugcauccggaaagaguu

SEQ ID NO: 15313 - RNA, 21 nt, RNAi
uuuaugacguaggccuuucuc

SEQ ID NO: 15314 - DNA, 21 bp, Homo sapiens
aatactgcatccggaaagaga

SEQ ID NO: 15315 - RNA, 21 nt, RNAi
uacugcauccggaaagagauu

SEQ ID NO: 15316 - RNA, 21 nt, RNAi
uuaugacguaggccuuucucu

SEQ ID NO: 15317 - DNA, 21 bp, Homo sapiens
aaattctacgaaatcgacatg

SEQ ID NO: 15318 - RNA, 21 nt, RNAi
auucuacgaaaucgacauguu

SEQ ID NO: 15319 - RNA, 21 nt, RNAi
uuuaagaugcuuuagcuguac

SEQ ID NO: 15320 - DNA, 21 bp, Homo sapiens
aattctacgaaatcgacatga

SEQ ID NO: 15321 - RNA, 21 nt, RNAi
uucuacgaaaucgacaugauu

SEQ ID NO: 15322 - RNA, 21 nt, RNAi
uuaagaugcuuuagcuguacu

SEQ ID NO: 15323 - DNA, 21 bp, Homo sapiens
aatcgacatgaagcagtacac

SEQ ID NO: 15324 - RNA, 21 nt, RNAi
ucgacaugaagcaguacacuu

SEQ ID NO: 15325 - RNA, 21 nt, RNAi
uuagcuguacuucgucaugug

SEQ ID NO: 15326 - DNA, 21 bp, Homo sapiens
aactcactcgaagtaattgag

SEQ ID NO: 15327 - RNA, 21 nt, RNAi
cucacucgaaguaauugaguu

SEQ ID NO: 15328 - RNA, 21 nt, RNAi
uugagugagcuucauuaacuc

SEQ ID NO: 15329 - DNA, 21 bp, Homo sapiens
cagaggaatttagtcggcgtc

SEQ ID NO: 15330 - RNA, 21 nt, RNAi
gaggaauuuagucggcgucuu

SEQ ID NO: 15331 - RNA, 21 nt, RNAi
uucuccuuaaaucagccgcag

SEQ ID NO: 15332 - DNA, 21 bp, Homo sapiens
caccacaatattcctcaccga

SEQ ID NO: 15333 - RNA, 21 nt, RNAi
ccacaauauuccucaccgauu

SEQ ID NO: 15334 - RNA, 21 nt, RNAi
uugguguuauaaggaguggcu

SEQ ID NO: 15335 - DNA, 21 bp, Homo sapiens
caccgattcaacgtaggactg

SEQ ID NO: 15336 - RNA, 21 nt, RNAi
ccgauucaacguaggacuguu

SEQ ID NO: 15337 - RNA, 21 nt, RNAi
uuggcuaaguugcauccugac

SEQ ID NO: 15338 - DNA, 21 bp, Homo sapiens
catccaaatgtctcgaatgtc

SEQ ID NO: 15339 - RNA, 21 nt, RNAi
uccaaaugucucgaaugucuu

SEQ ID NO: 15340 - RNA, 21 nt, RNAi
uuagguuuacagagcuuacag

SEQ ID NO: 15341 - DNA, 21 bp, Homo sapiens
caaatgtctcgaatgtcaggt

SEQ ID NO: 15342 - RNA, 21 nt, RNAi
aaugucucgaaugucagguuu

SEQ ID NO: 15343 - RNA, 21 nt, RNAi
uuuuacagagcuuacagucca

SEQ ID NO: 15344 - DNA, 21 bp, Homo sapiens
caggaataacaaacgaggaca

SEQ ID NO: 15345 - RNA, 21 nt, RNAi
ggaauaacaaacgaggacauu

SEQ ID NO: 15346 - RNA, 21 nt, RNAi
uuccuuauuguuugcuccugu

SEQ ID NO: 15347 - DNA, 21 bp, Homo sapiens
caccgccttagaatcagttgt

SEQ ID NO: 15348 - RNA, 21 nt, RNAi
ccgccuuagaaucaguuguuu

SEQ ID NO: 15349 - RNA, 21 nt, RNAi
uuggcggaaucuuagucaaca

SEQ ID NO: 15350 - DNA, 21 bp, Homo sapiens
catgatagcaggagaagagcg

SEQ ID NO: 15351 - RNA, 21 nt, RNAi
ugauagcaggagaagagcguu

SEQ ID NO: 15352 - RNA, 21 nt, RNAi
uuacuaucguccucuucucgc

SEQ ID NO: 15353 - DNA, 21 bp, Homo sapiens
cagcaaagtcgtcattctccg

SEQ ID NO: 15354 - RNA, 21 nt, RNAi
gcaaagucgucauucuccguu

SEQ ID NO: 15355 - RNA, 21 nt, RNAi
uucguuucagcaguaagaggc

SEQ ID NO: 15356 - DNA, 21 bp, Homo sapiens
caaagtcgtcattctccgcta

SEQ ID NO: 15357 - RNA, 21 nt, RNAi
aagucgucauucuccgcuauu

SEQ ID NO: 15358 - RNA, 21 nt, RNAi
uuuucagcaguaagaggcgau

SEQ ID NO: 15359 - DNA, 21 bp, Homo sapiens
caaatactgcatccggaaaga

SEQ ID NO: 15360 - RNA, 21 nt, RNAi
aauacugcauccggaaagauu

SEQ ID NO: 15361 - RNA, 21 nt, RNAi
uuuuaugacguaggccuuucu

SEQ ID NO: 15362 - DNA, 21 bp, Homo sapiens
caccaattacagtatcctcat

SEQ ID NO: 15363 - RNA, 21 nt, RNAi
ccaauuacaguauccucauuu

SEQ ID NO: 15364 - RNA, 21 nt, RNAi
uugguuaaugucauaggagua

SEQ ID NO: 15365 - DNA, 21 bp, Homo sapiens
cagtatcctcattggaaccaa

SEQ ID NO: 15366 - RNA, 21 nt, RNAi
guauccucauuggaaccaauu

SEQ ID NO: 15367 - RNA, 21 nt, RNAi
uucauaggaguaaccuugguu

SEQ ID NO: 15368 - DNA, 21 bp, Homo sapiens
catgaagcagtacacgctcga

SEQ ID NO: 15369 - RNA, 21 nt, RNAi
ugaagcaguacacgcucgauu

SEQ ID NO: 15370 - RNA, 21 nt, RNAi
uuacuucgucaugugcgagcu

SEQ ID NO: 15371 - DNA, 21 bp, Homo sapiens
cagtacacgctcgaggaattc

SEQ ID NO: 15372 - RNA, 21 nt, RNAi
guacacgcucgaggaauucuu

SEQ ID NO: 15373 - RNA, 21 nt, RNAi
uucaugugcgagcuccuuaag

SEQ ID NO: 15374 - DNA, 21 bp, Homo sapiens
caactcactcgaagtaattga

SEQ ID NO: 15375 - RNA, 21 nt, RNAi
acucacucgaaguaauugauu

SEQ ID NO: 15376 - RNA, 21 nt, RNAi
uuugagugagcuucauuaacu

SEQ ID NO: 15377 - DNA, 21 bp, Homo sapiens
catttcctcaggagcgattta

SEQ ID NO: 15378 - RNA, 21 nt, RNAi
uuuccucaggagcgauuuauu

SEQ ID NO: 15379 - RNA, 21 nt, RNAi
uuaaaggaguccucgcuaaau

SEQ ID NO: 15380 - DNA, 21 bp, Homo sapiens
caggagcgatttacttggcgt

SEQ ID NO: 15381 - RNA, 21 nt, RNAi
ggagcgauuuacuuggcguuu

SEQ ID NO: 15382 - RNA, 21 nt, RNAi
uuccucgcuaaaugaaccgca

SEQ ID NO: 15383 - DNA, 21 bp, Homo sapiens
cacgtacaacgagcacatcac

SEQ ID NO: 15384 - RNA, 21 nt, RNAi
cguacaacgagcacaucacuu

SEQ ID NO: 15385 - RNA, 21 nt, RNAi
uugcauguugcucguguagug

SEQ ID NO: 15386 - DNA, 21 bp, Homo sapiens
gaggaatttagtcggcgtctt

SEQ ID NO: 15387 - RNA, 21 nt, RNAi
ggaauuuagucggcgucuuuu

SEQ ID NO: 15388 - RNA, 21 nt, RNAi
uuccuuaaaucagccgcagaa

SEQ ID NO: 15389 - DNA, 21 bp, Homo sapiens
gaatttagtcggcgtcttaag

SEQ ID NO: 15390 - RNA, 21 nt, RNAi
auuuagucggcgucuuaaguu

SEQ ID NO: 15391 - RNA, 21 nt, RNAi
uuuaaaucagccgcagaauuc

SEQ ID NO: 15392 - DNA, 21 bp, Homo sapiens
gattcaacgtaggactgaaca

SEQ ID NO: 15393 - RNA, 21 nt, RNAi
uucaacguaggacugaacauu

SEQ ID NO: 15394 - RNA, 21 nt, RNAi
uuaaguugcauccugacuugu

SEQ ID NO: 15395 - DNA, 21 bp, Homo sapiens
gactgaacatgcgagccacaa

SEQ ID NO: 15396 - RNA, 21 nt, RNAi
cugaacaugcgagccacaauu

SEQ ID NO: 15397 - RNA, 21 nt, RNAi
uugacuuguacgcucgguguu

SEQ ID NO: 15398 - DNA, 21 bp, Homo sapiens
gaacatgcgagccacaaagtg

SEQ ID NO: 15399 - RNA, 21 nt, RNAi
acaugcgagccacaaaguguu

SEQ ID NO: 15400 - RNA, 21 nt, RNAi
uuuguacgcucgguguuucac

SEQ ID NO: 15401 - DNA, 21 bp, Homo sapiens
gaataacaaacgaggacagca

SEQ ID NO: 15402 - RNA, 21 nt, RNAi
auaacaaacgaggacagcauu

SEQ ID NO: 15403 - RNA, 21 nt, RNAi
uuuauuguuugcuccugucgu

SEQ ID NO: 15404 - DNA, 21 bp, Homo sapiens
gaaactggaaggtgatgaccg

SEQ ID NO: 15405 - RNA, 21 nt, RNAi
aacuggaaggugaugaccguu

SEQ ID NO: 15406 - RNA, 21 nt, RNAi
uuuugaccuuccacuacuggc

SEQ ID NO: 15407 - DNA, 21 bp, Homo sapiens
gaaggtgatgaccgtctagac

SEQ ID NO: 15408 - RNA, 21 nt, RNAi
aggugaugaccgucuagacuu

SEQ ID NO: 15409 - RNA, 21 nt, RNAi
uuuccacuacuggcagaucug

SEQ ID NO: 15410 - DNA, 21 bp, Homo sapiens
gatgaccgtctagacatgaac

SEQ ID NO: 15411 - RNA, 21 nt, RNAi
ugaccgucuagacaugaacuu

SEQ ID NO: 15412 - RNA, 21 nt, RNAi
uuacuggcagaucuguacuug

SEQ ID NO: 15413 - DNA, 21 bp, Homo sapiens
gaccgtctagacatgaactgc

SEQ ID NO: 15414 - RNA, 21 nt, RNAi
ccgucuagacaugaacugcuu

SEQ ID NO: 15415 - RNA, 21 nt, RNAi
uuggcagaucuguacuugacg

SEQ ID NO: 15416 - DNA, 21 bp, Homo sapiens
gacatgaagcagtacacgctc

SEQ ID NO: 15417 - RNA, 21 nt, RNAi
caugaagcaguacacgcucuu

SEQ ID NO: 15418 - RNA, 21 nt, RNAi
uuguacuucgucaugugcgag

SEQ ID NO: 15419 - DNA, 21 bp, Homo sapiens
gagcgatttacttggcgtcct

SEQ ID NO: 15420 - RNA, 21 nt, RNAi
gcgauuuacuuggcguccuuu

SEQ ID NO: 15421 - RNA, 21 nt, RNAi
uucgcuaaaugaaccgcagga

SEQ ID NO: 15422 - DNA, 21 bp, Homo sapiens
gatttacttggcgtcctcata

SEQ ID NO: 15423 - RNA, 21 nt, RNAi
uuuacuuggcguccucauauu

SEQ ID NO: 15424 - RNA, 21 nt, RNAi
uuaaaugaaccgcaggaguau

SEQ ID NO: 15425 - DNA, 21 bp, Homo sapiens
taaggaacgcatgcaccacaa

SEQ ID NO: 15426 - RNA, 21 nt, RNAi
aggaacgcaugcaccacaauu

SEQ ID NO: 15427 - RNA, 21 nt, RNAi
uuuccuugcguacgugguguu

SEQ ID NO: 15428 - DNA, 21 bp, Homo sapiens
tattcctcaccgattcaacgt

SEQ ID NO: 15429 - RNA, 21 nt, RNAi
uuccucaccgauucaacguuu

SEQ ID NO: 15430 - RNA, 21 nt, RNAi
uuaaggaguggcuaaguugca

SEQ ID NO: 15431 - DNA, 21 bp, Homo sapiens
taacaaacgaggacagcaagg

SEQ ID NO: 15432 - RNA, 21 nt, RNAi
acaaacgaggacagcaagguu

SEQ ID NO: 15433 - RNA, 21 nt, RNAi
uuuguuugcuccugucguucc

SEQ ID NO: 15434 - DNA, 21 bp, Homo sapiens
tatctattcatggtgccgttg

SEQ ID NO: 15435 - RNA, 21 nt, RNAi
ucuauucauggugccguuguu

SEQ ID NO: 15436 - RNA, 21 nt, RNAi
uuagauaaguaccacggcaac

SEQ ID NO: 15437 - DNA, 21 bp, Homo sapiens
taattgagatccaggcacgct

SEQ ID NO: 15438 - RNA, 21 nt, RNAi
auugagauccaggcacgcuuu

SEQ ID NO: 15439 - RNA, 21 nt, RNAi
uuuaacucuagguccgugcga

SEQ ID NO: 15440 - DNA, 21 bp, Homo sapiens
tacaacgagcacatcaccaag

SEQ ID NO: 15441 - RNA, 21 nt, RNAi
caacgagcacaucaccaaguu

SEQ ID NO: 15442 - RNA, 21 nt, RNAi
uuguugcucguguagugguuc

SEQ ID NO: 15443 - DNA, 21 bp, Homo sapiens
aagcagatctactactcggac

SEQ ID NO: 15444 - RNA, 21 nt, RNAi
gcagaucuacuacucggacuu

SEQ ID NO: 15445 - RNA, 21 nt, RNAi
uucgucuagaugaugagccug

SEQ ID NO: 15446 - DNA, 21 bp, Homo sapiens
aagtacttcgacgaacactac

SEQ ID NO: 15447 - RNA, 21 nt, RNAi
guacuucgacgaacacuacuu

SEQ ID NO: 15448 - RNA, 21 nt, RNAi
uucaugaagcugcuugugaug

SEQ ID NO: 15449 - DNA, 21 bp, Homo sapiens
aacactacgagtaccggcatg

SEQ ID NO: 15450 - RNA, 21 nt, RNAi
cacuacgaguaccggcauguu

SEQ ID NO: 15451 - RNA, 21 nt, RNAi
uugugaugcucauggccguac

SEQ ID NO: 15452 - DNA, 21 bp, Homo sapiens
aactttccaaacaagtaccta

SEQ ID NO: 15453 - RNA, 21 nt, RNAi
cuuuccaaacaaguaccuauu

SEQ ID NO: 15454 - RNA, 21 nt, RNAi
uugaaagguuuguucauggau

SEQ ID NO: 15455 - DNA, 21 bp, Homo sapiens
aaactcatctgatgtctgaag

SEQ ID NO: 15456 - RNA, 21 nt, RNAi
acucaucugaugucugaaguu

SEQ ID NO: 15457 - RNA, 21 nt, RNAi
uuugaguagacuacagacuuc

SEQ ID NO: 15458 - DNA, 21 bp, Homo sapiens
aactcatctgatgtctgaaga

SEQ ID NO: 15459 - RNA, 21 nt, RNAi
cucaucugaugucugaagauu

SEQ ID NO: 15460 - RNA, 21 nt, RNAi
uugaguagacuacagacuucu

SEQ ID NO: 15461 - DNA, 21 bp, Homo sapiens
aagaggagtggaggagacttg

SEQ ID NO: 15462 - RNA, 21 nt, RNAi
gaggaguggaggagacuuguu

SEQ ID NO: 15463 - RNA, 21 nt, RNAi
uucuccucaccuccucugaac

SEQ ID NO: 15464 - DNA, 21 bp, Homo sapiens
aaggtagtattcagtgaatac

SEQ ID NO: 15465 - RNA, 21 nt, RNAi
gguaguauucagugaauacuu

SEQ ID NO: 15466 - RNA, 21 nt, RNAi
uuccaucauaagucacuuaug

SEQ ID NO: 15467 - DNA, 21 bp, Homo sapiens
aaatctttcatccatacctgt

SEQ ID NO: 15468 - RNA, 21 nt, RNAi
aucuuucauccauaccuguuu

SEQ ID NO: 15469 - RNA, 21 nt, RNAi
uuuagaaaguagguauggaca

SEQ ID NO: 15470 - DNA, 21 bp, Homo sapiens
aatctttcatccatacctgtg

SEQ ID NO: 15471 - RNA, 21 nt, RNAi
ucuuucauccauaccuguguu

SEQ ID NO: 15472 - RNA, 21 nt, RNAi
uuagaaaguagguauggacac

SEQ ID NO: 15473 - DNA, 21 bp, Homo sapiens
aacagagctcagttaaatgca

SEQ ID NO: 15474 - RNA, 21 nt, RNAi
cagagcucaguuaaaugcauu

SEQ ID NO: 15475 - RNA, 21 nt, RNAi
uugucucgagucaauuuacgu

SEQ ID NO: 15476 - DNA, 21 bp, Homo sapiens
aaatgcaactgcaagtaggtt

SEQ ID NO: 15477 - RNA, 21 nt, RNAi
augcaacugcaaguagguuuu

SEQ ID NO: 15478 - RNA, 21 nt, RNAi
uuuacguugacguucauccaa

SEQ ID NO: 15479 - DNA, 21 bp, Homo sapiens
aatgcaactgcaagtaggtta

SEQ ID NO: 15480 - RNA, 21 nt, RNAi
ugcaacugcaaguagguuauu

SEQ ID NO: 15481 - RNA, 21 nt, RNAi
uuacguugacguucauccaau

SEQ ID NO: 15482 - DNA, 21 bp, Homo sapiens
aactgcaagtaggttactgta

SEQ ID NO: 15483 - RNA, 21 nt, RNAi
cugcaaguagguuacuguauu

SEQ ID NO: 15484 - RNA, 21 nt, RNAi
uugacguucauccaaugacau

SEQ ID NO: 15485 - DNA, 21 bp, Homo sapiens
aagtaggttactgtaagatgt

SEQ ID NO: 15486 - RNA, 21 nt, RNAi
guagguuacuguaagauguuu

SEQ ID NO: 15487 - RNA, 21 nt, RNAi
uucauccaaugacauucuaca

SEQ ID NO: 15488 - DNA, 21 bp, Homo sapiens
aagtgcctgtttgagtttact

SEQ ID NO: 15489 - RNA, 21 nt, RNAi
gugccuguuugaguuuacuuu

SEQ ID NO: 15490 - RNA, 21 nt, RNAi
uucacggacaaacucaaauga

SEQ ID NO: 15491 - DNA, 21 bp, Homo sapiens
cacaagcagatctactactcg

SEQ ID NO: 15492 - RNA, 21 nt, RNAi
caagcagaucuacuacucguu

SEQ ID NO: 15493 - RNA, 21 nt, RNAi
uuguucgucuagaugaugagc

SEQ ID NO: 15494 - DNA, 21 bp, Homo sapiens
caagcagatctactactcgga

SEQ ID NO: 15495 - RNA, 21 nt, RNAi
agcagaucuacuacucggauu

SEQ ID NO: 15496 - RNA, 21 nt, RNAi
uuucgucuagaugaugagccu

SEQ ID NO: 15497 - DNA, 21 bp, Homo sapiens
cagatctactactcggacaag

SEQ ID NO: 15498 - RNA, 21 nt, RNAi
gaucuacuacucggacaaguu

SEQ ID NO: 15499 - RNA, 21 nt, RNAi
uucuagaugaugagccuguuc

SEQ ID NO: 15500 - DNA, 21 bp, Homo sapiens
caagtacttcgacgaacacta

SEQ ID NO: 15501 - RNA, 21 nt, RNAi
aguacuucgacgaacacuauu

SEQ ID NO: 15502 - RNA, 21 nt, RNAi
uuucaugaagcugcuugugau

SEQ ID NO: 15503 - DNA, 21 bp, Homo sapiens
cactacgagtaccggcatgtt

SEQ ID NO: 15504 - RNA, 21 nt, RNAi
cuacgaguaccggcauguuuu

SEQ ID NO: 15505 - RNA, 21 nt, RNAi
uugaugcucauggccguacaa

SEQ ID NO: 15506 - DNA, 21 bp, Homo sapiens
cagagaactttccaaacaagt

SEQ ID NO: 15507 - RNA, 21 nt, RNAi
gagaacuuuccaaacaaguuu

SEQ ID NO: 15508 - RNA, 21 nt, RNAi
uucucuugaaagguuuguuca

SEQ ID NO: 15509 - DNA, 21 bp, Homo sapiens
catctgatgtctgaagaggag

SEQ ID NO: 15510 - RNA, 21 nt, RNAi
ucugaugucugaagaggaguu

SEQ ID NO: 15511 - RNA, 21 nt, RNAi
uuagacuacagacuucuccuc

SEQ ID NO: 15512 - DNA, 21 bp, Homo sapiens
cattacatgattcatgagcca

SEQ ID NO: 15513 - RNA, 21 nt, RNAi
uuacaugauucaugagccauu

SEQ ID NO: 15514 - RNA, 21 nt, RNAi
uuaauguacuaaguacucggu

SEQ ID NO: 15515 - DNA, 21 bp, Homo sapiens
catgattcatgagccagaacc

SEQ ID NO: 15516 - RNA, 21 nt, RNAi
ugauucaugagccagaaccuu

SEQ ID NO: 15517 - RNA, 21 nt, RNAi
uuacuaaguacucggucuugg

SEQ ID NO: 15518 - DNA, 21 bp, Homo sapiens
catgagccagaaccacatatt

SEQ ID NO: 15519 - RNA, 21 nt, RNAi
ugagccagaaccacauauuuu

SEQ ID NO: 15520 - RNA, 21 nt, RNAi
uuacucggucuugguguauaa

SEQ ID NO: 15521 - DNA, 21 bp, Homo sapiens
cagaaccacatattcttctct

SEQ ID NO: 15522 - RNA, 21 nt, RNAi
gaaccacauauucuucucuuu

SEQ ID NO: 15523 - RNA, 21 nt, RNAi
uucuugguguauaagaagaga

SEQ ID NO: 15524 - DNA, 21 bp, Homo sapiens
cacatattcttctctttagac

SEQ ID NO: 15525 - RNA, 21 nt, RNAi
cauauucuucucuuuagacuu

SEQ ID NO: 15526 - RNA, 21 nt, RNAi
uuguauaagaagagaaaucug

SEQ ID NO: 15527 - DNA, 21 bp, Homo sapiens
catattcttctctttagacga

SEQ ID NO: 15528 - RNA, 21 nt, RNAi
uauucuucucuuuagacgauu

SEQ ID NO: 15529 - RNA, 21 nt, RNAi
uuauaagaagagaaaucugcu

SEQ ID NO: 15530 - DNA, 21 bp, Homo sapiens
cagtgaatacttgagaaatgt

SEQ ID NO: 15531 - RNA, 21 nt, RNAi
gugaauacuugagaaauguuu

SEQ ID NO: 15532 - RNA, 21 nt, RNAi
uucacuuaugaacucuuuaca

SEQ ID NO: 15533 - DNA, 21 bp, Homo sapiens
caaatctttcatccatacctg

SEQ ID NO: 15534 - RNA, 21 nt, RNAi
aaucuuucauccauaccuguu

SEQ ID NO: 15535 - RNA, 21 nt, RNAi
uuuuagaaaguagguauggac

SEQ ID NO: 15536 - DNA, 21 bp, Homo sapiens
catccatacctgtgcatgagc

SEQ ID NO: 15537 - RNA, 21 nt, RNAi
uccauaccugugcaugagcuu

SEQ ID NO: 15538 - RNA, 21 nt, RNAi
uuagguauggacacguacucg

SEQ ID NO: 15539 - DNA, 21 bp, Homo sapiens
catacctgtgcatgagctgta

SEQ ID NO: 15540 - RNA, 21 nt, RNAi
uaccugugcaugagcuguauu

SEQ ID NO: 15541 - RNA, 21 nt, RNAi
uuauggacacguacucgacau

SEQ ID NO: 15542 - DNA, 21 bp, Homo sapiens
catgagctgtattcttcacag

SEQ ID NO: 15543 - RNA, 21 nt, RNAi
ugagcuguauucuucacaguu

SEQ ID NO: 15544 - RNA, 21 nt, RNAi
uuacucgacauaagaaguguc

SEQ ID NO: 15545 - DNA, 21 bp, Homo sapiens
cacagcaacagagctcagtta

SEQ ID NO: 15546 - RNA, 21 nt, RNAi
cagcaacagagcucaguuauu

SEQ ID NO: 15547 - RNA, 21 nt, RNAi
uugucguugucucgagucaau

SEQ ID NO: 15548 - DNA, 21 bp, Homo sapiens
cagcaacagagctcagttaaa

SEQ ID NO: 15549 - RNA, 21 nt, RNAi
gcaacagagcucaguuaaauu

SEQ ID NO: 15550 - RNA, 21 nt, RNAi
uucguugucucgagucaauuu

SEQ ID NO: 15551 - DNA, 21 bp, Homo sapiens
caacagagctcagttaaatgc

SEQ ID NO: 15552 - RNA, 21 nt, RNAi
acagagcucaguuaaaugcuu

SEQ ID NO: 15553 - RNA, 21 nt, RNAi
uuugucucgagucaauuuacg

SEQ ID NO: 15554 - DNA, 21 bp, Homo sapiens
cagagctcagttaaatgcaac

SEQ ID NO: 15555 - RNA, 21 nt, RNAi
gagcucaguuaaaugcaacuu

SEQ ID NO: 15556 - RNA, 21 nt, RNAi
uucucgagucaauuuacguug

SEQ ID NO: 15557 - DNA, 21 bp, Homo sapiens
cagttaaatgcaactgcaagt

SEQ ID NO: 15558 - RNA, 21 nt, RNAi
guuaaaugcaacugcaaguuu

SEQ ID NO: 15559 - RNA, 21 nt, RNAi
uucaauuuacguugacguuca

SEQ ID NO: 15560 - DNA, 21 bp, Homo sapiens
caactgcaagtaggttactgt

SEQ ID NO: 15561 - RNA, 21 nt, RNAi
acugcaaguagguuacuguuu

SEQ ID NO: 15562 - RNA, 21 nt, RNAi
uuugacguucauccaaugaca

SEQ ID NO: 15563 - DNA, 21 bp, Homo sapiens
caagtaggttactgtaagatg

SEQ ID NO: 15564 - RNA, 21 nt, RNAi
aguagguuacuguaagauguu

SEQ ID NO: 15565 - RNA, 21 nt, RNAi
uuucauccaaugacauucuac

SEQ ID NO: 15566 - DNA, 21 bp, Homo sapiens
gatctactactcggacaagta

SEQ ID NO: 15567 - RNA, 21 nt, RNAi
ucuacuacucggacaaguauu

SEQ ID NO: 15568 - RNA, 21 nt, RNAi
uuagaugaugagccuguucau

SEQ ID NO: 15569 - DNA, 21 bp, Homo sapiens
gacaagtacttcgacgaacac

SEQ ID NO: 15570 - RNA, 21 nt, RNAi
caaguacuucgacgaacacuu

SEQ ID NO: 15571 - RNA, 21 nt, RNAi
uuguucaugaagcugcuugug

SEQ ID NO: 15572 - DNA, 21 bp, Homo sapiens
gacgaacactacgagtaccgg

SEQ ID NO: 15573 - RNA, 21 nt, RNAi
cgaacacuacgaguaccgguu

SEQ ID NO: 15574 - RNA, 21 nt, RNAi
uugcuugugaugcucauggcc

SEQ ID NO: 15575 - DNA, 21 bp, Homo sapiens
gaacactacgagtaccggcat

SEQ ID NO: 15576 - RNA, 21 nt, RNAi
acacuacgaguaccggcauuu

SEQ ID NO: 15577 - RNA, 21 nt, RNAi
uuugugaugcucauggccgua

SEQ ID NO: 15578 - DNA, 21 bp, Homo sapiens
gagtaccggcatgttatgtta

SEQ ID NO: 15579 - RNA, 21 nt, RNAi
guaccggcauguuauguuauu

SEQ ID NO: 15580 - RNA, 21 nt, RNAi
uucauggccguacaauacaau

SEQ ID NO: 15581 - DNA, 21 bp, Homo sapiens
gagaactttccaaacaagtac

SEQ ID NO: 15582 - RNA, 21 nt, RNAi
gaacuuuccaaacaaguacuu

SEQ ID NO: 15583 - RNA, 21 nt, RNAi
uucuugaaagguuuguucaug

SEQ ID NO: 15584 - DNA, 21 bp, Homo sapiens
gaactttccaaacaagtacct

SEQ ID NO: 15585 - RNA, 21 nt, RNAi
acuuuccaaacaaguaccuuu

SEQ ID NO: 15586 - RNA, 21 nt, RNAi
uuugaaagguuuguucaugga

SEQ ID NO: 15587 - DNA, 21 bp, Homo sapiens
gatgtctgaagaggagtggag

SEQ ID NO: 15588 - RNA, 21 nt, RNAi
ugucugaagaggaguggaguu

SEQ ID NO: 15589 - RNA, 21 nt, RNAi
uuacagacuucuccucaccuc

SEQ ID NO: 15590 - DNA, 21 bp, Homo sapiens
gaagaggagtggaggagactt

SEQ ID NO: 15591 - RNA, 21 nt, RNAi
agaggaguggaggagacuuuu

SEQ ID NO: 15592 - RNA, 21 nt, RNAi
uuucuccucaccuccucugaa

SEQ ID NO: 15593 - DNA, 21 bp, Homo sapiens
gaggagtggaggagacttggt

SEQ ID NO: 15594 - RNA, 21 nt, RNAi
ggaguggaggagacuugguuu

SEQ ID NO: 15595 - RNA, 21 nt, RNAi
uuccucaccuccucugaacca

SEQ ID NO: 15596 - DNA, 21 bp, Homo sapiens
gagtggaggagacttggtgtc

SEQ ID NO: 15597 - RNA, 21 nt, RNAi
guggaggagacuuggugucuu

SEQ ID NO: 15598 - RNA, 21 nt, RNAi
uucaccuccucugaaccacag

SEQ ID NO: 15599 - DNA, 21 bp, Homo sapiens
gaggagacttggtgtccaaca

SEQ ID NO: 15600 - RNA, 21 nt, RNAi
ggagacuugguguccaacauu

SEQ ID NO: 15601 - RNA, 21 nt, RNAi
uuccucugaaccacagguugu

SEQ ID NO: 15602 - DNA, 21 bp, Homo sapiens
gagacttggtgtccaacagag

SEQ ID NO: 15603 - RNA, 21 nt, RNAi
gacuugguguccaacagaguu

SEQ ID NO: 15604 - RNA, 21 nt, RNAi
uucugaaccacagguugucuc

SEQ ID NO: 15605 - DNA, 21 bp, Homo sapiens
gacttggtgtccaacagagtc

SEQ ID NO: 15606 - RNA, 21 nt, RNAi
cuugguguccaacagagucuu

SEQ ID NO: 15607 - RNA, 21 nt, RNAi
uugaaccacagguugucucag

SEQ ID NO: 15608 - DNA, 21 bp, Homo sapiens
gattcatgagccagaaccaca

SEQ ID NO: 15609 - RNA, 21 nt, RNAi
uucaugagccagaaccacauu

SEQ ID NO: 15610 - RNA, 21 nt, RNAi
uuaaguacucggucuuggugu

SEQ ID NO: 15611 - DNA, 21 bp, Homo sapiens
gagccagaaccacatattctt

SEQ ID NO: 15612 - RNA, 21 nt, RNAi
gccagaaccacauauucuuuu

SEQ ID NO: 15613 - RNA, 21 nt, RNAi
uucggucuugguguauaagaa

SEQ ID NO: 15614 - DNA, 21 bp, Homo sapiens
gaaccacatattcttctcttt

SEQ ID NO: 15615 - RNA, 21 nt, RNAi
accacauauucuucucuuuuu

SEQ ID NO: 15616 - RNA, 21 nt, RNAi
uuugguguauaagaagagaaa

SEQ ID NO: 15617 - DNA, 21 bp, Homo sapiens
gagctgtattcttcacagcaa

SEQ ID NO: 15618 - RNA, 21 nt, RNAi
gcuguauucuucacagcaauu

SEQ ID NO: 15619 - RNA, 21 nt, RNAi
uucgacauaagaagugucguu

SEQ ID NO: 15620 - DNA, 21 bp, Homo sapiens
gagctcagttaaatgcaactg

SEQ ID NO: 15621 - RNA, 21 nt, RNAi
gcucaguuaaaugcaacuguu

SEQ ID NO: 15622 - RNA, 21 nt, RNAi
uucgagucaauuuacguugac

SEQ ID NO: 15623 - DNA, 21 bp, Homo sapiens
gagtttactgaaacagtttac

SEQ ID NO: 15624 - RNA, 21 nt, RNAi
guuuacugaaacaguuuacuu

SEQ ID NO: 15625 - RNA, 21 nt, RNAi
uucaaaugacuuugucaaaug

SEQ ID NO: 15626 - DNA, 21 bp, Homo sapiens
tactactcggacaagtacttc

SEQ ID NO: 15627 - RNA, 21 nt, RNAi
cuacucggacaaguacuucuu

SEQ ID NO: 15628 - RNA, 21 nt, RNAi
uugaugagccuguucaugaag

SEQ ID NO: 15629 - DNA, 21 bp, Homo sapiens
tactcggacaagtacttcgac

SEQ ID NO: 15630 - RNA, 21 nt, RNAi
cucggacaaguacuucgacuu

SEQ ID NO: 15631 - RNA, 21 nt, RNAi
uugagccuguucaugaagcug

SEQ ID NO: 15632 - DNA, 21 bp, Homo sapiens
tacttcgacgaacactacgag

SEQ ID NO: 15633 - RNA, 21 nt, RNAi
cuucgacgaacacuacgaguu

SEQ ID NO: 15634 - RNA, 21 nt, RNAi
uugaagcugcuugugaugcuc

SEQ ID NO: 15635 - DNA, 21 bp, Homo sapiens
tacgagtaccggcatgttatg

SEQ ID NO: 15636 - RNA, 21 nt, RNAi
cgaguaccggcauguuauguu

SEQ ID NO: 15637 - RNA, 21 nt, RNAi
uugcucauggccguacaauac

SEQ ID NO: 15638 - DNA, 21 bp, Homo sapiens
tacatgattcatgagccagaa

SEQ ID NO: 15639 - RNA, 21 nt, RNAi
caugauucaugagccagaauu

SEQ ID NO: 15640 - RNA, 21 nt, RNAi
uuguacuaaguacucggucuu

SEQ ID NO: 15641 - DNA, 21 bp, Homo sapiens
tattcttctctttagacgacc

SEQ ID NO: 15642 - RNA, 21 nt, RNAi
uucuucucuuuagacgaccuu

SEQ ID NO: 15643 - RNA, 21 nt, RNAi
uuaagaagagaaaucugcugg

SEQ ID NO: 15644 - DNA, 21 bp, Homo sapiens
tacaaatctttcatccatacc

SEQ ID NO: 15645 - RNA, 21 nt, RNAi
caaaucuuucauccauaccuu

SEQ ID NO: 15646 - RNA, 21 nt, RNAi
uuguuuagaaaguagguaugg

SEQ ID NO: 15647 - DNA, 21 bp, Homo sapiens
tacctgtgcatgagctgtatt

SEQ ID NO: 15648 - RNA, 21 nt, RNAi
ccugugcaugagcuguauuuu

SEQ ID NO: 15649 - RNA, 21 nt, RNAi
uuggacacguacucgacauaa

SEQ ID NO: 15650 - DNA, 21 bp, Homo sapiens
tattcttcacagcaacagagc

SEQ ID NO: 15651 - RNA, 21 nt, RNAi
uucuucacagcaacagagcuu

SEQ ID NO: 15652 - RNA, 21 nt, RNAi
uuaagaagugucguugucucg

SEQ ID NO: 15653 - DNA, 21 bp, Homo sapiens
taaatgcaactgcaagtaggt

SEQ ID NO: 15654 - RNA, 21 nt, RNAi
aaugcaacugcaaguagguuu

SEQ ID NO: 15655 - RNA, 21 nt, RNAi
uuuuacguugacguucaucca

SEQ ID NO: 15656 - DNA, 21 bp, Homo sapiens
taagtgcctgtttgagtttac

SEQ ID NO: 15657 - RNA, 21 nt, RNAi
agugccuguuugaguuuacuu

SEQ ID NO: 15658 - RNA, 21 nt, RNAi
uuucacggacaaacucaaaug

SEQ ID NO: 15659 - DNA, 21 bp, Homo sapiens
aaacaggtctgaaacaaggtc

SEQ ID NO: 15660 - RNA, 21 nt, RNAi
acaggucugaaacaaggucuu

SEQ ID NO: 15661 - RNA, 21 nt, RNAi
uuuguccagacuuuguuccag

SEQ ID NO: 15662 - DNA, 21 bp, Homo sapiens
aacaggtctgaaacaaggtct

SEQ ID NO: 15663 - RNA, 21 nt, RNAi
caggucugaaacaaggucuuu

SEQ ID NO: 15664 - RNA, 21 nt, RNAi
uuguccagacuuuguuccaga

SEQ ID NO: 15665 - DNA, 21 bp, Homo sapiens
aacacagtgactgccagatct

SEQ ID NO: 15666 - RNA, 21 nt, RNAi
cacagugacugccagaucuuu

SEQ ID NO: 15667 - RNA, 21 nt, RNAi
uugugucacugacggucuaga

SEQ ID NO: 15668 - DNA, 21 bp, Homo sapiens
aaacatcaagtccagctttgt

SEQ ID NO: 15669 - RNA, 21 nt, RNAi
acaucaaguccagcuuuguuu

SEQ ID NO: 15670 - RNA, 21 nt, RNAi
uuuguaguucaggucgaaaca

SEQ ID NO: 15671 - DNA, 21 bp, Homo sapiens
aacatcaagtccagctttgtc

SEQ ID NO: 15672 - RNA, 21 nt, RNAi
caucaaguccagcuuugucuu

SEQ ID NO: 15673 - RNA, 21 nt, RNAi
uuguaguucaggucgaaacag

SEQ ID NO: 15674 - DNA, 21 bp, Homo sapiens
aagtccagctttgtccgccaa

SEQ ID NO: 15675 - RNA, 21 nt, RNAi
guccagcuuuguccgccaauu

SEQ ID NO: 15676 - RNA, 21 nt, RNAi
uucaggucgaaacaggcgguu

SEQ ID NO: 15677 - DNA, 21 bp, Homo sapiens
aatacacacagacctcgagaa

SEQ ID NO: 15678 - RNA, 21 nt, RNAi
uacacacagaccucgagaauu

SEQ ID NO: 15679 - RNA, 21 nt, RNAi
uuaugugugucuggagcucuu

SEQ ID NO: 15680 - DNA, 21 bp, Homo sapiens
aaatcaagatgactaccagct

SEQ ID NO: 15681 - RNA, 21 nt, RNAi
aucaagaugacuaccagcuuu

SEQ ID NO: 15682 - RNA, 21 nt, RNAi
uuuaguucuacugauggucga

SEQ ID NO: 15683 - DNA, 21 bp, Homo sapiens
aatcaagatgactaccagctg

SEQ ID NO: 15684 - RNA, 21 nt, RNAi
ucaagaugacuaccagcuguu

SEQ ID NO: 15685 - RNA, 21 nt, RNAi
uuaguucuacugauggucgac

SEQ ID NO: 15686 - DNA, 21 bp, Homo sapiens
aagatgactaccagctggttc

SEQ ID NO: 15687 - RNA, 21 nt, RNAi
gaugacuaccagcugguucuu

SEQ ID NO: 15688 - RNA, 21 nt, RNAi
uucuacugauggucgaccaag

SEQ ID NO: 15689 - DNA, 21 bp, Homo sapiens
aaattaggccgaggtaaatac

SEQ ID NO: 15690 - RNA, 21 nt, RNAi
auuaggccgagguaaauacuu

SEQ ID NO: 15691 - RNA, 21 nt, RNAi
uuuaauccggcuccauuuaug

SEQ ID NO: 15692 - DNA, 21 bp, Homo sapiens
aattaggccgaggtaaataca

SEQ ID NO: 15693 - RNA, 21 nt, RNAi
uuaggccgagguaaauacauu

SEQ ID NO: 15694 - RNA, 21 nt, RNAi
uuaauccggcuccauuuaugu

SEQ ID NO: 15695 - DNA, 21 bp, Homo sapiens
aagtatttgaagccatcaaca

SEQ ID NO: 15696 - RNA, 21 nt, RNAi
guauuugaagccaucaacauu

SEQ ID NO: 15697 - RNA, 21 nt, RNAi
uucauaaacuucgguaguugu

SEQ ID NO: 15698 - DNA, 21 bp, Homo sapiens
aagccatcaacatcacaaata

SEQ ID NO: 15699 - RNA, 21 nt, RNAi
gccaucaacaucacaaauauu

SEQ ID NO: 15700 - RNA, 21 nt, RNAi
uucgguaguuguaguguuuau

SEQ ID NO: 15701 - DNA, 21 bp, Homo sapiens
aacatcatcacactggcagac

SEQ ID NO: 15702 - RNA, 21 nt, RNAi
caucaucacacuggcagacuu

SEQ ID NO: 15703 - RNA, 21 nt, RNAi
uuguaguagugugaccgucug

SEQ ID NO: 15704 - DNA, 21 bp, Homo sapiens
aacacgtaaacaacacagact

SEQ ID NO: 15705 - RNA, 21 nt, RNAi
cacguaaacaacacagacuuu

SEQ ID NO: 15706 - RNA, 21 nt, RNAi
uugugcauuuguugugucuga

SEQ ID NO: 15707 - DNA, 21 bp, Homo sapiens
aaacaacacagacttcaagca

SEQ ID NO: 15708 - RNA, 21 nt, RNAi
acaacacagacuucaagcauu

SEQ ID NO: 15709 - RNA, 21 nt, RNAi
uuuguugugucugaaguucgu

SEQ ID NO: 15710 - DNA, 21 bp, Homo sapiens
aacaacacagacttcaagcaa

SEQ ID NO: 15711 - RNA, 21 nt, RNAi
caacacagacuucaagcaauu

SEQ ID NO: 15712 - RNA, 21 nt, RNAi
uuguugugucugaaguucguu

SEQ ID NO: 15713 - DNA, 21 bp, Homo sapiens
aacacagacttcaagcaattg

SEQ ID NO: 15714 - RNA, 21 nt, RNAi
cacagacuucaagcaauuguu

SEQ ID NO: 15715 - RNA, 21 nt, RNAi
uugugucugaaguucguuaac

SEQ ID NO: 15716 - DNA, 21 bp, Homo sapiens
aagcaattgtaccagacgtta

SEQ ID NO: 15717 - RNA, 21 nt, RNAi
gcaauuguaccagacguuauu

SEQ ID NO: 15718 - RNA, 21 nt, RNAi
uucguuaacauggucugcaau

SEQ ID NO: 15719 - DNA, 21 bp, Homo sapiens
aattgtaccagacgttaacag

SEQ ID NO: 15720 - RNA, 21 nt, RNAi
uuguaccagacguuaacaguu

SEQ ID NO: 15721 - RNA, 21 nt, RNAi
uuaacauggucugcaauuguc

SEQ ID NO: 15722 - DNA, 21 bp, Homo sapiens
aattatgcacagagatgtcaa

SEQ ID NO: 15723 - RNA, 21 nt, RNAi
uuaugcacagagaugucaauu

SEQ ID NO: 15724 - RNA, 21 nt, RNAi
uuaauacgugucucuacaguu

SEQ ID NO: 15725 - DNA, 21 bp, Homo sapiens
aatgtcatgattgatcatgag

SEQ ID NO: 15726 - RNA, 21 nt, RNAi
ugucaugauugaucaugaguu

SEQ ID NO: 15727 - RNA, 21 nt, RNAi
uuacaguacuaacuaguacuc

SEQ ID NO: 15728 - DNA, 21 bp, Homo sapiens
aaagctacgactaatagactg

SEQ ID NO: 15729 - RNA, 21 nt, RNAi
agcuacgacuaauagacuguu

SEQ ID NO: 15730 - RNA, 21 nt, RNAi
uuucgaugcugauuaucugac

SEQ ID NO: 15731 - DNA, 21 bp, Homo sapiens
aagctacgactaatagactgg

SEQ ID NO: 15732 - RNA, 21 nt, RNAi
gcuacgacuaauagacugguu

SEQ ID NO: 15733 - RNA, 21 nt, RNAi
uucgaugcugauuaucugacc

SEQ ID NO: 15734 - DNA, 21 bp, Homo sapiens
aagaatataatgtccgagttg

SEQ ID NO: 15735 - RNA, 21 nt, RNAi
gaauauaauguccgaguuguu

SEQ ID NO: 15736 - RNA, 21 nt, RNAi
uucuuauauuacaggcucaac

SEQ ID NO: 15737 - DNA, 21 bp, Homo sapiens
aatataatgtccgagttgctt

SEQ ID NO: 15738 - RNA, 21 nt, RNAi
uauaauguccgaguugcuuuu

SEQ ID NO: 15739 - RNA, 21 nt, RNAi
uuauauuacaggcucaacgaa

SEQ ID NO: 15740 - DNA, 21 bp, Homo sapiens
aaaggtcctgagctacttgta

SEQ ID NO: 15741 - RNA, 21 nt, RNAi
agguccugagcuacuuguauu

SEQ ID NO: 15742 - RNA, 21 nt, RNAi
uuuccaggacucgaugaacau

SEQ ID NO: 15743 - DNA, 21 bp, Homo sapiens
aaggtcctgagctacttgtag

SEQ ID NO: 15744 - RNA, 21 nt, RNAi
gguccugagcuacuuguaguu

SEQ ID NO: 15745 - RNA, 21 nt, RNAi
uuccaggacucgaugaacauc

SEQ ID NO: 15746 - DNA, 21 bp, Homo sapiens
aagtatgatctttcggaagga

SEQ ID NO: 15747 - RNA, 21 nt, RNAi
guaugaucuuucggaaggauu

SEQ ID NO: 15748 - RNA, 21 nt, RNAi
uucauacuagaaagccuuccu

SEQ ID NO: 15749 - DNA, 21 bp, Homo sapiens
aattatgatcagttggtgagg

SEQ ID NO: 15750 - RNA, 21 nt, RNAi
uuaugaucaguuggugagguu

SEQ ID NO: 15751 - RNA, 21 nt, RNAi
uuaauacuagucaaccacucc

SEQ ID NO: 15752 - DNA, 21 bp, Homo sapiens
aacattgaattagatccacgt

SEQ ID NO: 15753 - RNA, 21 nt, RNAi
cauugaauuagauccacguuu

SEQ ID NO: 15754 - RNA, 21 nt, RNAi
uuguaacuuaaucuaggugca

SEQ ID NO: 15755 - DNA, 21 bp, Homo sapiens
aattagatccacgtttcaatg

SEQ ID NO: 15756 - RNA, 21 nt, RNAi
uuagauccacguuucaauguu

SEQ ID NO: 15757 - RNA, 21 nt, RNAi
uuaaucuaggugcaaaguuac

SEQ ID NO: 15758 - DNA, 21 bp, Homo sapiens
aacgctttgtccacagtgaaa

SEQ ID NO: 15759 - RNA, 21 nt, RNAi
cgcuuuguccacagugaaauu

SEQ ID NO: 15760 - RNA, 21 nt, RNAi
uugcgaaacaggugucacuuu

SEQ ID NO: 15761 - DNA, 21 bp, Homo sapiens
aaactgctgcgatatgaccac

SEQ ID NO: 15762 - RNA, 21 nt, RNAi
acugcugcgauaugaccacuu

SEQ ID NO: 15763 - RNA, 21 nt, RNAi
uuugacgacgcuauacuggug

SEQ ID NO: 15764 - DNA, 21 bp, Homo sapiens
aactgctgcgatatgaccacc

SEQ ID NO: 15765 - RNA, 21 nt, RNAi
cugcugcgauaugaccaccuu

SEQ ID NO: 15766 - RNA, 21 nt, RNAi
uugacgacgcuauacuggugg

SEQ ID NO: 15767 - DNA, 21 bp, Homo sapiens
aaacacttcagaagcaccgtg

SEQ ID NO: 15768 - RNA, 21 nt, RNAi
acacuucagaagcaccguguu

SEQ ID NO: 15769 - RNA, 21 nt, RNAi
uuugugaagucuucguggcac

SEQ ID NO: 15770 - DNA, 21 bp, Homo sapiens
aacacttcagaagcaccgtgt

SEQ ID NO: 15771 - RNA, 21 nt, RNAi
cacuucagaagcaccguguuu

SEQ ID NO: 15772 - RNA, 21 nt, RNAi
uugugaagucuucguggcaca

SEQ ID NO: 15773 - DNA, 21 bp, Homo sapiens
aagcaccgtgtctgaaccgtt

SEQ ID NO: 15774 - RNA, 21 nt, RNAi
gcaccgugucugaaccguuuu

SEQ ID NO: 15775 - RNA, 21 nt, RNAi
uucguggcacagacuuggcaa

SEQ ID NO: 15776 - DNA, 21 bp, Homo sapiens
aaccgttgcttgtggatttat

SEQ ID NO: 15777 - RNA, 21 nt, RNAi
ccguugcuuguggauuuauuu

SEQ ID NO: 15778 - RNA, 21 nt, RNAi
uuggcaacgaacaccuaaaua

SEQ ID NO: 15779 - DNA, 21 bp, Homo sapiens
aaattacctgcaggtggaata

SEQ ID NO: 15780 - RNA, 21 nt, RNAi
auuaccugcagguggaauauu

SEQ ID NO: 15781 - RNA, 21 nt, RNAi
uuuaauggacguccaccuuau

SEQ ID NO: 15782 - DNA, 21 bp, Homo sapiens
aattacctgcaggtggaatat

SEQ ID NO: 15783 - RNA, 21 nt, RNAi
uuaccugcagguggaauauuu

SEQ ID NO: 15784 - RNA, 21 nt, RNAi
uuaauggacguccaccuuaua

SEQ ID NO: 15785 - DNA, 21 bp, Homo sapiens
aaagaacaaagataaaccagc

SEQ ID NO: 15786 - RNA, 21 nt, RNAi
agaacaaagauaaaccagcuu

SEQ ID NO: 15787 - RNA, 21 nt, RNAi
uuucuuguuucuauuuggucg

SEQ ID NO: 15788 - DNA, 21 bp, Homo sapiens
aagaacaaagataaaccagcc

SEQ ID NO: 15789 - RNA, 21 nt, RNAi
gaacaaagauaaaccagccuu

SEQ ID NO: 15790 - RNA, 21 nt, RNAi
uucuuguuucuauuuggucgg

SEQ ID NO: 15791 - DNA, 21 bp, Homo sapiens
aacaaagataaaccagcctca

SEQ ID NO: 15792 - RNA, 21 nt, RNAi
caaagauaaaccagccucauu

SEQ ID NO: 15793 - RNA, 21 nt, RNAi
uuguuucuauuuggucggagu

SEQ ID NO: 15794 - DNA, 21 bp, Homo sapiens
aaagataaaccagcctcaatc

SEQ ID NO: 15795 - RNA, 21 nt, RNAi
agauaaaccagccucaaucuu

SEQ ID NO: 15796 - RNA, 21 nt, RNAi
uuucuauuuggucggaguuag

SEQ ID NO: 15797 - DNA, 21 bp, Homo sapiens
aagataaaccagcctcaatcc

SEQ ID NO: 15798 - RNA, 21 nt, RNAi
gauaaaccagccucaauccuu

SEQ ID NO: 15799 - RNA, 21 nt, RNAi
uucuauuuggucggaguuagg

SEQ ID NO: 15800 - DNA, 21 bp, Homo sapiens
aagaaaggaaggaaggaaaga

SEQ ID NO: 15801 - RNA, 21 nt, RNAi
gaaaggaaggaaggaaagauu

SEQ ID NO: 15802 - RNA, 21 nt, RNAi
uucuuuccuuccuuccuuucu

SEQ ID NO: 15803 - DNA, 21 bp, Homo sapiens
aaaggaaggaaggaaagaagg

SEQ ID NO: 15804 - RNA, 21 nt, RNAi
aggaaggaaggaaagaagguu

SEQ ID NO: 15805 - RNA, 21 nt, RNAi
uuuccuuccuuccuuucuucc

SEQ ID NO: 15806 - DNA, 21 bp, Homo sapiens
aaggaaggaaggaaagaagga

SEQ ID NO: 15807 - RNA, 21 nt, RNAi
ggaaggaaggaaagaaggauu

SEQ ID NO: 15808 - RNA, 21 nt, RNAi
uuccuuccuuccuuucuuccu

SEQ ID NO: 15809 - DNA, 21 bp, Homo sapiens
aatctataggagcagtggact

SEQ ID NO: 15810 - RNA, 21 nt, RNAi
ucuauaggagcaguggacuuu

SEQ ID NO: 15811 - RNA, 21 nt, RNAi
uuagauauccucgucaccuga

SEQ ID NO: 15812 - DNA, 21 bp, Homo sapiens
aagtgtgtcttagttacatca

SEQ ID NO: 15813 - RNA, 21 nt, RNAi
gugugucuuaguuacaucauu

SEQ ID NO: 15814 - RNA, 21 nt, RNAi
uucacacagaaucaauguagu

SEQ ID NO: 15815 - DNA, 21 bp, Homo sapiens
aacttctgttcagtaagaatc

SEQ ID NO: 15816 - RNA, 21 nt, RNAi
cuucuguucaguaagaaucuu

SEQ ID NO: 15817 - RNA, 21 nt, RNAi
uugaagacaagucauucuuag

SEQ ID NO: 15818 - DNA, 21 bp, Homo sapiens
aagaatcatgtcttactgatc

SEQ ID NO: 15819 - RNA, 21 nt, RNAi
gaaucaugucuuacugaucuu

SEQ ID NO: 15820 - RNA, 21 nt, RNAi
uucuuaguacagaaugacuag

SEQ ID NO: 15821 - DNA, 21 bp, Homo sapiens
aacatgctgtgctccatagct

SEQ ID NO: 15822 - RNA, 21 nt, RNAi
caugcugugcuccauagcuuu

SEQ ID NO: 15823 - RNA, 21 nt, RNAi
uuguacgacacgagguaucga

SEQ ID NO: 15824 - DNA, 21 bp, Homo sapiens
caggtctgaaacaaggtctta

SEQ ID NO: 15825 - RNA, 21 nt, RNAi
ggucugaaacaaggucuuauu

SEQ ID NO: 15826 - RNA, 21 nt, RNAi
uuccagacuuuguuccagaau

SEQ ID NO: 15827 - DNA, 21 bp, Homo sapiens
cagctgcttctgaacacagtg

SEQ ID NO: 15828 - RNA, 21 nt, RNAi
gcugcuucugaacacaguguu

SEQ ID NO: 15829 - RNA, 21 nt, RNAi
uucgacgaagacuugugucac

SEQ ID NO: 15830 - DNA, 21 bp, Homo sapiens
cacagtgactgccagatctcc

SEQ ID NO: 15831 - RNA, 21 nt, RNAi
cagugacugccagaucuccuu

SEQ ID NO: 15832 - RNA, 21 nt, RNAi
uugucacugacggucuagagg

SEQ ID NO: 15833 - DNA, 21 bp, Homo sapiens
cagtgactgccagatctccaa

SEQ ID NO: 15834 - RNA, 21 nt, RNAi
gugacugccagaucuccaauu

SEQ ID NO: 15835 - RNA, 21 nt, RNAi
uucacugacggucuagagguu

SEQ ID NO: 15836 - DNA, 21 bp, Homo sapiens
cagatctccaaacatcaagtc

SEQ ID NO: 15837 - RNA, 21 nt, RNAi
gaucuccaaacaucaagucuu

SEQ ID NO: 15838 - RNA, 21 nt, RNAi
uucuagagguuuguaguucag

SEQ ID NO: 15839 - DNA, 21 bp, Homo sapiens
caaacatcaagtccagctttg

SEQ ID NO: 15840 - RNA, 21 nt, RNAi
aacaucaaguccagcuuuguu

SEQ ID NO: 15841 - RNA, 21 nt, RNAi
uuuuguaguucaggucgaaac

SEQ ID NO: 15842 - DNA, 21 bp, Homo sapiens
catcaagtccagctttgtccg

SEQ ID NO: 15843 - RNA, 21 nt, RNAi
ucaaguccagcuuuguccguu

SEQ ID NO: 15844 - RNA, 21 nt, RNAi
uuaguucaggucgaaacaggc

SEQ ID NO: 15845 - DNA, 21 bp, Homo sapiens
caagtccagctttgtccgcca

SEQ ID NO: 15846 - RNA, 21 nt, RNAi
aguccagcuuuguccgccauu

SEQ ID NO: 15847 - RNA, 21 nt, RNAi
uuucaggucgaaacaggcggu

SEQ ID NO: 15848 - DNA, 21 bp, Homo sapiens
cagctttgtccgccaacctgt

SEQ ID NO: 15849 - RNA, 21 nt, RNAi
gcuuuguccgccaaccuguuu

SEQ ID NO: 15850 - RNA, 21 nt, RNAi
uucgaaacaggcgguuggaca

SEQ ID NO: 15851 - DNA, 21 bp, Homo sapiens
cagagtttacacagatgttaa

SEQ ID NO: 15852 - RNA, 21 nt, RNAi
gaguuuacacagauguuaauu

SEQ ID NO: 15853 - RNA, 21 nt, RNAi
uucucaaaugugucuacaauu

SEQ ID NO: 15854 - DNA, 21 bp, Homo sapiens
cacagatgttaatacacacag

SEQ ID NO: 15855 - RNA, 21 nt, RNAi
cagauguuaauacacacaguu

SEQ ID NO: 15856 - RNA, 21 nt, RNAi
uugucuacaauuauguguguc

SEQ ID NO: 15857 - DNA, 21 bp, Homo sapiens
cagatgttaatacacacagac

SEQ ID NO: 15858 - RNA, 21 nt, RNAi
gauguuaauacacacagacuu

SEQ ID NO: 15859 - RNA, 21 nt, RNAi
uucuacaauuaugugugucug

SEQ ID NO: 15860 - DNA, 21 bp, Homo sapiens
cacacagacctcgagaatact

SEQ ID NO: 15861 - RNA, 21 nt, RNAi
cacagaccucgagaauacuuu

SEQ ID NO: 15862 - RNA, 21 nt, RNAi
uugugucuggagcucuuauga

SEQ ID NO: 15863 - DNA, 21 bp, Homo sapiens
cacagacctcgagaatactgg

SEQ ID NO: 15864 - RNA, 21 nt, RNAi
cagaccucgagaauacugguu

SEQ ID NO: 15865 - RNA, 21 nt, RNAi
uugucuggagcucuuaugacc

SEQ ID NO: 15866 - DNA, 21 bp, Homo sapiens
caagatgactaccagctggtt

SEQ ID NO: 15867 - RNA, 21 nt, RNAi
agaugacuaccagcugguuuu

SEQ ID NO: 15868 - RNA, 21 nt, RNAi
uuucuacugauggucgaccaa

SEQ ID NO: 15869 - DNA, 21 bp, Homo sapiens
cagtgaagtatttgaagccat

SEQ ID NO: 15870 - RNA, 21 nt, RNAi
gugaaguauuugaagccauuu

SEQ ID NO: 15871 - RNA, 21 nt, RNAi
uucacuucauaaacuucggua

SEQ ID NO: 15872 - DNA, 21 bp, Homo sapiens
caacatcatcacactggcaga

SEQ ID NO: 15873 - RNA, 21 nt, RNAi
acaucaucacacuggcagauu

SEQ ID NO: 15874 - RNA, 21 nt, RNAi
uuuguaguagugugaccgucu

SEQ ID NO: 15875 - DNA, 21 bp, Homo sapiens
catcatcacactggcagacat

SEQ ID NO: 15876 - RNA, 21 nt, RNAi
ucaucacacuggcagacauuu

SEQ ID NO: 15877 - RNA, 21 nt, RNAi
uuaguagugugaccgucugua

SEQ ID NO: 15878 - DNA, 21 bp, Homo sapiens
catcacactggcagacattgt

SEQ ID NO: 15879 - RNA, 21 nt, RNAi
ucacacuggcagacauuguuu

SEQ ID NO: 15880 - RNA, 21 nt, RNAi
uuagugugaccgucuguaaca

SEQ ID NO: 15881 - DNA, 21 bp, Homo sapiens
cacactggcagacattgtaaa

SEQ ID NO: 15882 - RNA, 21 nt, RNAi
cacuggcagacauuguaaauu

SEQ ID NO: 15883 - RNA, 21 nt, RNAi
uugugaccgucuguaacauuu

SEQ ID NO: 15884 - DNA, 21 bp, Homo sapiens
cacgtaaacaacacagacttc

SEQ ID NO: 15885 - RNA, 21 nt, RNAi
cguaaacaacacagacuucuu

SEQ ID NO: 15886 - RNA, 21 nt, RNAi
uugcauuuguugugucugaag

SEQ ID NO: 15887 - DNA, 21 bp, Homo sapiens
caacacagacttcaagcaatt

SEQ ID NO: 15888 - RNA, 21 nt, RNAi
acacagacuucaagcaauuuu

SEQ ID NO: 15889 - RNA, 21 nt, RNAi
uuugugucugaaguucguuaa

SEQ ID NO: 15890 - DNA, 21 bp, Homo sapiens
cacagacttcaagcaattgta

SEQ ID NO: 15891 - RNA, 21 nt, RNAi
cagacuucaagcaauuguauu

SEQ ID NO: 15892 - RNA, 21 nt, RNAi
uugucugaaguucguuaacau

SEQ ID NO: 15893 - DNA, 21 bp, Homo sapiens
cagacttcaagcaattgtacc

SEQ ID NO: 15894 - RNA, 21 nt, RNAi
gacuucaagcaauuguaccuu

SEQ ID NO: 15895 - RNA, 21 nt, RNAi
uucugaaguucguuaacaugg

SEQ ID NO: 15896 - DNA, 21 bp, Homo sapiens
caagcaattgtaccagacgtt

SEQ ID NO: 15897 - RNA, 21 nt, RNAi
agcaauuguaccagacguuuu

SEQ ID NO: 15898 - RNA, 21 nt, RNAi
uuucguuaacauggucugcaa

SEQ ID NO: 15899 - DNA, 21 bp, Homo sapiens
caattgtaccagacgttaaca

SEQ ID NO: 15900 - RNA, 21 nt, RNAi
auuguaccagacguuaacauu

SEQ ID NO: 15901 - RNA, 21 nt, RNAi
uuuaacauggucugcaauugu

SEQ ID NO: 15902 - DNA, 21 bp, Homo sapiens
cagacgttaacagactatgat

SEQ ID NO: 15903 - RNA, 21 nt, RNAi
gacguuaacagacuaugauuu

SEQ ID NO: 15904 - RNA, 21 nt, RNAi
uucugcaauugucugauacua

SEQ ID NO: 15905 - DNA, 21 bp, Homo sapiens
catgtatgagattctgaaggc

SEQ ID NO: 15906 - RNA, 21 nt, RNAi
uguaugagauucugaaggcuu

SEQ ID NO: 15907 - RNA, 21 nt, RNAi
uuacauacucuaagacuuccg

SEQ ID NO: 15908 - DNA, 21 bp, Homo sapiens
catgattgatcatgagcacag

SEQ ID NO: 15909 - RNA, 21 nt, RNAi
ugauugaucaugagcacaguu

SEQ ID NO: 15910 - RNA, 21 nt, RNAi
uuacuaacuaguacucguguc

SEQ ID NO: 15911 - DNA, 21 bp, Homo sapiens
catgagcacagaaagctacga

SEQ ID NO: 15912 - RNA, 21 nt, RNAi
ugagcacagaaagcuacgauu

SEQ ID NO: 15913 - RNA, 21 nt, RNAi
uuacucgugucuuucgaugcu

SEQ ID NO: 15914 - DNA, 21 bp, Homo sapiens
cacagaaagctacgactaata

SEQ ID NO: 15915 - RNA, 21 nt, RNAi
cagaaagcuacgacuaauauu

SEQ ID NO: 15916 - RNA, 21 nt, RNAi
uugucuuucgaugcugauuau

SEQ ID NO: 15917 - DNA, 21 bp, Homo sapiens
cagaaagctacgactaataga

SEQ ID NO: 15918 - RNA, 21 nt, RNAi
gaaagcuacgacuaauagauu

SEQ ID NO: 15919 - RNA, 21 nt, RNAi
uucuuucgaugcugauuaucu

SEQ ID NO: 15920 - DNA, 21 bp, Homo sapiens
catcctggccaagaatataat

SEQ ID NO: 15921 - RNA, 21 nt, RNAi
uccuggccaagaauauaauuu

SEQ ID NO: 15922 - RNA, 21 nt, RNAi
uuaggaccgguucuuauauua

SEQ ID NO: 15923 - DNA, 21 bp, Homo sapiens
caagaatataatgtccgagtt

SEQ ID NO: 15924 - RNA, 21 nt, RNAi
agaauauaauguccgaguuuu

SEQ ID NO: 15925 - RNA, 21 nt, RNAi
uuucuuauauuacaggcucaa

SEQ ID NO: 15926 - DNA, 21 bp, Homo sapiens
caaaggtcctgagctacttgt

SEQ ID NO: 15927 - RNA, 21 nt, RNAi
aagguccugagcuacuuguuu

SEQ ID NO: 15928 - RNA, 21 nt, RNAi
uuuuccaggacucgaugaaca

SEQ ID NO: 15929 - DNA, 21 bp, Homo sapiens
cagatgtacgattatagtttg

SEQ ID NO: 15930 - RNA, 21 nt, RNAi
gauguacgauuauaguuuguu

SEQ ID NO: 15931 - RNA, 21 nt, RNAi
uucuacaugcuaauaucaaac

SEQ ID NO: 15932 - DNA, 21 bp, Homo sapiens
caagtatgatctttcggaagg

SEQ ID NO: 15933 - RNA, 21 nt, RNAi
aguaugaucuuucggaagguu

SEQ ID NO: 15934 - RNA, 21 nt, RNAi
uuucauacuagaaagccuucc

SEQ ID NO: 15935 - DNA, 21 bp, Homo sapiens
catggacatgacaattatgat

SEQ ID NO: 15936 - RNA, 21 nt, RNAi
uggacaugacaauuaugauuu

SEQ ID NO: 15937 - RNA, 21 nt, RNAi
uuaccuguacuguuaauacua

SEQ ID NO: 15938 - DNA, 21 bp, Homo sapiens
catgacaattatgatcagttg

SEQ ID NO: 15939 - RNA, 21 nt, RNAi
ugacaauuaugaucaguuguu

SEQ ID NO: 15940 - RNA, 21 nt, RNAi
uuacuguuaauacuagucaac

SEQ ID NO: 15941 - DNA, 21 bp, Homo sapiens
caattatgatcagttggtgag

SEQ ID NO: 15942 - RNA, 21 nt, RNAi
auuaugaucaguuggugaguu

SEQ ID NO: 15943 - RNA, 21 nt, RNAi
uuuaauacuagucaaccacuc

SEQ ID NO: 15944 - DNA, 21 bp, Homo sapiens
cagttggtgaggatagccaag

SEQ ID NO: 15945 - RNA, 21 nt, RNAi
guuggugaggauagccaaguu

SEQ ID NO: 15946 - RNA, 21 nt, RNAi
uucaaccacuccuaucgguuc

SEQ ID NO: 15947 - DNA, 21 bp, Homo sapiens
caacattgaattagatccacg

SEQ ID NO: 15948 - RNA, 21 nt, RNAi
acauugaauuagauccacguu

SEQ ID NO: 15949 - RNA, 21 nt, RNAi
uuuguaacuuaaucuaggugc

SEQ ID NO: 15950 - DNA, 21 bp, Homo sapiens
cattgaattagatccacgttt

SEQ ID NO: 15951 - RNA, 21 nt, RNAi
uugaauuagauccacguuuuu

SEQ ID NO: 15952 - RNA, 21 nt, RNAi
uuaacuuaaucuaggugcaaa

SEQ ID NO: 15953 - DNA, 21 bp, Homo sapiens
cacgtttcaatgatatcttgg

SEQ ID NO: 15954 - RNA, 21 nt, RNAi
cguuucaaugauaucuugguu

SEQ ID NO: 15955 - RNA, 21 nt, RNAi
uugcaaaguuacuauagaacc

SEQ ID NO: 15956 - DNA, 21 bp, Homo sapiens
cagacactctcgaaagcgatg

SEQ ID NO: 15957 - RNA, 21 nt, RNAi
gacacucucgaaagcgauguu

SEQ ID NO: 15958 - RNA, 21 nt, RNAi
uucugugagagcuuucgcuac

SEQ ID NO: 15959 - DNA, 21 bp, Homo sapiens
caaactgctgcgatatgacca

SEQ ID NO: 15960 - RNA, 21 nt, RNAi
aacugcugcgauaugaccauu

SEQ ID NO: 15961 - RNA, 21 nt, RNAi
uuuugacgacgcuauacuggu

SEQ ID NO: 15962 - DNA, 21 bp, Homo sapiens
caccagtcacggcttactgca

SEQ ID NO: 15963 - RNA, 21 nt, RNAi
ccagucacggcuuacugcauu

SEQ ID NO: 15964 - RNA, 21 nt, RNAi
uuggucagugccgaaugacgu

SEQ ID NO: 15965 - DNA, 21 bp, Homo sapiens
cagtcacggcttactgcaaga

SEQ ID NO: 15966 - RNA, 21 nt, RNAi
gucacggcuuacugcaagauu

SEQ ID NO: 15967 - RNA, 21 nt, RNAi
uucagugccgaaugacguucu

SEQ ID NO: 15968 - DNA, 21 bp, Homo sapiens
cacggcttactgcaagagagg

SEQ ID NO: 15969 - RNA, 21 nt, RNAi
cggcuuacugcaagagagguu

SEQ ID NO: 15970 - RNA, 21 nt, RNAi
uugccgaaugacguucucucc

SEQ ID NO: 15971 - DNA, 21 bp, Homo sapiens
caagagaggcaatggagcacc

SEQ ID NO: 15972 - RNA, 21 nt, RNAi
agagaggcaauggagcaccuu

SEQ ID NO: 15973 - RNA, 21 nt, RNAi
uuucucuccguuaccucgugg

SEQ ID NO: 15974 - DNA, 21 bp, Homo sapiens
cactgttgtgaaggaccaggc

SEQ ID NO: 15975 - RNA, 21 nt, RNAi
cuguugugaaggaccaggcuu

SEQ ID NO: 15976 - RNA, 21 nt, RNAi
uugacaacacuuccugguccg

SEQ ID NO: 15977 - DNA, 21 bp, Homo sapiens
cagcagcgccaatatgatgtc

SEQ ID NO: 15978 - RNA, 21 nt, RNAi
gcagcgccaauaugaugucuu

SEQ ID NO: 15979 - RNA, 21 nt, RNAi
uucgucgcgguuauacuacag

SEQ ID NO: 15980 - DNA, 21 bp, Homo sapiens
cagcgccaatatgatgtcagg

SEQ ID NO: 15981 - RNA, 21 nt, RNAi
gcgccaauaugaugucagguu

SEQ ID NO: 15982 - RNA, 21 nt, RNAi
uucgcgguuauacuacagucc

SEQ ID NO: 15983 - DNA, 21 bp, Homo sapiens
caggctcaccagtgattgctg

SEQ ID NO: 15984 - RNA, 21 nt, RNAi
ggcucaccagugauugcuguu

SEQ ID NO: 15985 - RNA, 21 nt, RNAi
uuccgaguggucacuaacgac

SEQ ID NO: 15986 - DNA, 21 bp, Homo sapiens
caccagtgattgctgctgcca

SEQ ID NO: 15987 - RNA, 21 nt, RNAi
ccagugauugcugcugccauu

SEQ ID NO: 15988 - RNA, 21 nt, RNAi
uuggucacuaacgacgacggu

SEQ ID NO: 15989 - DNA, 21 bp, Homo sapiens
cagtgattgctgctgccaacc

SEQ ID NO: 15990 - RNA, 21 nt, RNAi
gugauugcugcugccaaccuu

SEQ ID NO: 15991 - RNA, 21 nt, RNAi
uucacuaacgacgacgguugg

SEQ ID NO: 15992 - DNA, 21 bp, Homo sapiens
cacttcagaagcaccgtgtct

SEQ ID NO: 15993 - RNA, 21 nt, RNAi
cuucagaagcaccgugucuuu

SEQ ID NO: 15994 - RNA, 21 nt, RNAi
uugaagucuucguggcacaga

SEQ ID NO: 15995 - DNA, 21 bp, Homo sapiens
cagaagcaccgtgtctgaacc

SEQ ID NO: 15996 - RNA, 21 nt, RNAi
gaagcaccgugucugaaccuu

SEQ ID NO: 15997 - RNA, 21 nt, RNAi
uucuucguggcacagacuugg

SEQ ID NO: 15998 - DNA, 21 bp, Homo sapiens
caccgtgtctgaaccgttgct

SEQ ID NO: 15999 - RNA, 21 nt, RNAi
ccgugucugaaccguugcuuu

SEQ ID NO: 16000 - RNA, 21 nt, RNAi
uuggcacagacuuggcaacga

SEQ ID NO: 16001 - DNA, 21 bp, Homo sapiens
caggtggaatatttcatggac

SEQ ID NO: 16002 - RNA, 21 nt, RNAi
gguggaauauuucauggacuu

SEQ ID NO: 16003 - RNA, 21 nt, RNAi
uuccaccuuauaaaguaccug

SEQ ID NO: 16004 - DNA, 21 bp, Homo sapiens
caaatttagttcctcatcaca

SEQ ID NO: 16005 - RNA, 21 nt, RNAi
aauuuaguuccucaucacauu

SEQ ID NO: 16006 - RNA, 21 nt, RNAi
uuuuaaaucaaggaguagugu

SEQ ID NO: 16007 - DNA, 21 bp, Homo sapiens
caaagataaaccagcctcaat

SEQ ID NO: 16008 - RNA, 21 nt, RNAi
aagauaaaccagccucaauuu

SEQ ID NO: 16009 - RNA, 21 nt, RNAi
uuuucuauuuggucggaguua

SEQ ID NO: 16010 - DNA, 21 bp, Homo sapiens
catttaggtggagacttcttc

SEQ ID NO: 16011 - RNA, 21 nt, RNAi
uuuagguggagacuucuucuu

SEQ ID NO: 16012 - RNA, 21 nt, RNAi
uuaaauccaccucugaagaag

SEQ ID NO: 16013 - DNA, 21 bp, Homo sapiens
caccattgttcctccaccgtc

SEQ ID NO: 16014 - RNA, 21 nt, RNAi
ccauuguuccuccaccgucuu

SEQ ID NO: 16015 - RNA, 21 nt, RNAi
uugguaacaaggagguggcag

SEQ ID NO: 16016 - DNA, 21 bp, Homo sapiens
caggaagaaaggaaggaagga

SEQ ID NO: 16017 - RNA, 21 nt, RNAi
ggaagaaaggaaggaaggauu

SEQ ID NO: 16018 - RNA, 21 nt, RNAi
uuccuucuuuccuuccuuccu

SEQ ID NO: 16019 - DNA, 21 bp, Homo sapiens
caatctataggagcagtggac

SEQ ID NO: 16020 - RNA, 21 nt, RNAi
aucuauaggagcaguggacuu

SEQ ID NO: 16021 - RNA, 21 nt, RNAi
uuuagauauccucgucaccug

SEQ ID NO: 16022 - DNA, 21 bp, Homo sapiens
cagtggactgcttgctggtcg

SEQ ID NO: 16023 - RNA, 21 nt, RNAi
guggacugcuugcuggucguu

SEQ ID NO: 16024 - RNA, 21 nt, RNAi
uucaccugacgaacgaccagc

SEQ ID NO: 16025 - DNA, 21 bp, Homo sapiens
catcactttactccataagcg

SEQ ID NO: 16026 - RNA, 21 nt, RNAi
ucacuuuacuccauaagcguu

SEQ ID NO: 16027 - RNA, 21 nt, RNAi
uuagugaaaugagguauucgc

SEQ ID NO: 16028 - DNA, 21 bp, Homo sapiens
cactttactccataagcgctt

SEQ ID NO: 16029 - RNA, 21 nt, RNAi
cuuuacuccauaagcgcuuuu

SEQ ID NO: 16030 - RNA, 21 nt, RNAi
uugaaaugagguauucgcgaa

SEQ ID NO: 16031 - DNA, 21 bp, Homo sapiens
cagtaagaatcatgtcttact

SEQ ID NO: 16032 - RNA, 21 nt, RNAi
guaagaaucaugucuuacuuu

SEQ ID NO: 16033 - RNA, 21 nt, RNAi
uucauucuuaguacagaauga

SEQ ID NO: 16034 - DNA, 21 bp, Homo sapiens
caggctccttaccttggtctt

SEQ ID NO: 16035 - RNA, 21 nt, RNAi
ggcuccuuaccuuggucuuuu

SEQ ID NO: 16036 - RNA, 21 nt, RNAi
uuccgaggaauggaaccagaa

SEQ ID NO: 16037 - DNA, 21 bp, Homo sapiens
caacatgctgtgctccatagc

SEQ ID NO: 16038 - RNA, 21 nt, RNAi
acaugcugugcuccauagcuu

SEQ ID NO: 16039 - RNA, 21 nt, RNAi
uuuguacgacacgagguaucg

SEQ ID NO: 16040 - DNA, 21 bp, Homo sapiens
catgctgtgctccatagctgg

SEQ ID NO: 16041 - RNA, 21 nt, RNAi
ugcugugcuccauagcugguu

SEQ ID NO: 16042 - RNA, 21 nt, RNAi
uuacgacacgagguaucgacc

SEQ ID NO: 16043 - DNA, 21 bp, Homo sapiens
gaacacagtgactgccagatc

SEQ ID NO: 16044 - RNA, 21 nt, RNAi
acacagugacugccagaucuu

SEQ ID NO: 16045 - RNA, 21 nt, RNAi
uuugugucacugacggucuag

SEQ ID NO: 16046 - DNA, 21 bp, Homo sapiens
gactgccagatctccaaacat

SEQ ID NO: 16047 - RNA, 21 nt, RNAi
cugccagaucuccaaacauuu

SEQ ID NO: 16048 - RNA, 21 nt, RNAi
uugacggucuagagguuugua

SEQ ID NO: 16049 - DNA, 21 bp, Homo sapiens
gatctccaaacatcaagtcca

SEQ ID NO: 16050 - RNA, 21 nt, RNAi
ucuccaaacaucaaguccauu

SEQ ID NO: 16051 - RNA, 21 nt, RNAi
uuagagguuuguaguucaggu

SEQ ID NO: 16052 - DNA, 21 bp, Homo sapiens
gatgttaatacacacagacct

SEQ ID NO: 16053 - RNA, 21 nt, RNAi
uguuaauacacacagaccuuu

SEQ ID NO: 16054 - RNA, 21 nt, RNAi
uuacaauuaugugugucugga

SEQ ID NO: 16055 - DNA, 21 bp, Homo sapiens
gattacgagtcacatgtggtg

SEQ ID NO: 16056 - RNA, 21 nt, RNAi
uuacgagucacaugugguguu

SEQ ID NO: 16057 - RNA, 21 nt, RNAi
uuaaugcucaguguacaccac

SEQ ID NO: 16058 - DNA, 21 bp, Homo sapiens
gagtcacatgtggtggaatgg

SEQ ID NO: 16059 - RNA, 21 nt, RNAi
gucacaugugguggaaugguu

SEQ ID NO: 16060 - RNA, 21 nt, RNAi
uucaguguacaccaccuuacc

SEQ ID NO: 16061 - DNA, 21 bp, Homo sapiens
gaaatcaagatgactaccagc

SEQ ID NO: 16062 - RNA, 21 nt, RNAi
aaucaagaugacuaccagcuu

SEQ ID NO: 16063 - RNA, 21 nt, RNAi
uuuuaguucuacugauggucg

SEQ ID NO: 16064 - DNA, 21 bp, Homo sapiens
gatgactaccagctggttcga

SEQ ID NO: 16065 - RNA, 21 nt, RNAi
ugacuaccagcugguucgauu

SEQ ID NO: 16066 - RNA, 21 nt, RNAi
uuacugauggucgaccaagcu

SEQ ID NO: 16067 - DNA, 21 bp, Homo sapiens
gaggtaaatacagtgaagtat

SEQ ID NO: 16068 - RNA, 21 nt, RNAi
gguaaauacagugaaguauuu

SEQ ID NO: 16069 - RNA, 21 nt, RNAi
uuccauuuaugucacuucaua

SEQ ID NO: 16070 - DNA, 21 bp, Homo sapiens
gaagtatttgaagccatcaac

SEQ ID NO: 16071 - RNA, 21 nt, RNAi
aguauuugaagccaucaacuu

SEQ ID NO: 16072 - RNA, 21 nt, RNAi
uuucauaaacuucgguaguug

SEQ ID NO: 16073 - DNA, 21 bp, Homo sapiens
gaagccatcaacatcacaaat

SEQ ID NO: 16074 - RNA, 21 nt, RNAi
agccaucaacaucacaaauuu

SEQ ID NO: 16075 - RNA, 21 nt, RNAi
uuucgguaguuguaguguuua

SEQ ID NO: 16076 - DNA, 21 bp, Homo sapiens
gaacacgtaaacaacacagac

SEQ ID NO: 16077 - RNA, 21 nt, RNAi
acacguaaacaacacagacuu

SEQ ID NO: 16078 - RNA, 21 nt, RNAi
uuugugcauuuguugugucug

SEQ ID NO: 16079 - DNA, 21 bp, Homo sapiens
gacttcaagcaattgtaccag

SEQ ID NO: 16080 - RNA, 21 nt, RNAi
cuucaagcaauuguaccaguu

SEQ ID NO: 16081 - RNA, 21 nt, RNAi
uugaaguucguuaacaugguc

SEQ ID NO: 16082 - DNA, 21 bp, Homo sapiens
gacgttaacagactatgatat

SEQ ID NO: 16083 - RNA, 21 nt, RNAi
cguuaacagacuaugauauuu

SEQ ID NO: 16084 - RNA, 21 nt, RNAi
uugcaauugucugauacuaua

SEQ ID NO: 16085 - DNA, 21 bp, Homo sapiens
gaattatgcacagagatgtca

SEQ ID NO: 16086 - RNA, 21 nt, RNAi
auuaugcacagagaugucauu

SEQ ID NO: 16087 - RNA, 21 nt, RNAi
uuuaauacgugucucuacagu

SEQ ID NO: 16088 - DNA, 21 bp, Homo sapiens
gattgatcatgagcacagaaa

SEQ ID NO: 16089 - RNA, 21 nt, RNAi
uugaucaugagcacagaaauu

SEQ ID NO: 16090 - RNA, 21 nt, RNAi
uuaacuaguacucgugucuuu

SEQ ID NO: 16091 - DNA, 21 bp, Homo sapiens
gatcatgagcacagaaagcta

SEQ ID NO: 16092 - RNA, 21 nt, RNAi
ucaugagcacagaaagcuauu

SEQ ID NO: 16093 - RNA, 21 nt, RNAi
uuaguacucgugucuuucgau

SEQ ID NO: 16094 - DNA, 21 bp, Homo sapiens
gagcacagaaagctacgacta

SEQ ID NO: 16095 - RNA, 21 nt, RNAi
gcacagaaagcuacgacuauu

SEQ ID NO: 16096 - RNA, 21 nt, RNAi
uucgugucuuucgaugcugau

SEQ ID NO: 16097 - DNA, 21 bp, Homo sapiens
gaaagctacgactaatagact

SEQ ID NO: 16098 - RNA, 21 nt, RNAi
aagcuacgacuaauagacuuu

SEQ ID NO: 16099 - RNA, 21 nt, RNAi
uuuucgaugcugauuaucuga

SEQ ID NO: 16100 - DNA, 21 bp, Homo sapiens
gaatataatgtccgagttgct

SEQ ID NO: 16101 - RNA, 21 nt, RNAi
auauaauguccgaguugcuuu

SEQ ID NO: 16102 - RNA, 21 nt, RNAi
uuuauauuacaggcucaacga

SEQ ID NO: 16103 - DNA, 21 bp, Homo sapiens
gatacttcaaaggtcctgagc

SEQ ID NO: 16104 - RNA, 21 nt, RNAi
uacuucaaagguccugagcuu

SEQ ID NO: 16105 - RNA, 21 nt, RNAi
uuaugaaguuuccaggacucg

SEQ ID NO: 16106 - DNA, 21 bp, Homo sapiens
gagctacttgtagactatcag

SEQ ID NO: 16107 - RNA, 21 nt, RNAi
gcuacuuguagacuaucaguu

SEQ ID NO: 16108 - RNA, 21 nt, RNAi
uucgaugaacaucugauaguc

SEQ ID NO: 16109 - DNA, 21 bp, Homo sapiens
gactatcagatgtacgattat

SEQ ID NO: 16110 - RNA, 21 nt, RNAi
cuaucagauguacgauuauuu

SEQ ID NO: 16111 - RNA, 21 nt, RNAi
uugauagucuacaugcuaaua

SEQ ID NO: 16112 - DNA, 21 bp, Homo sapiens
gatgtacgattatagtttgga

SEQ ID NO: 16113 - RNA, 21 nt, RNAi
uguacgauuauaguuuggauu

SEQ ID NO: 16114 - RNA, 21 nt, RNAi
uuacaugcuaauaucaaaccu

SEQ ID NO: 16115 - DNA, 21 bp, Homo sapiens
gattatagtttggatatgtgg

SEQ ID NO: 16116 - RNA, 21 nt, RNAi
uuauaguuuggauaugugguu

SEQ ID NO: 16117 - RNA, 21 nt, RNAi
uuaauaucaaaccuauacacc

SEQ ID NO: 16118 - DNA, 21 bp, Homo sapiens
gatctttcggaaggagccatt

SEQ ID NO: 16119 - RNA, 21 nt, RNAi
ucuuucggaaggagccauuuu

SEQ ID NO: 16120 - RNA, 21 nt, RNAi
uuagaaagccuuccucgguaa

SEQ ID NO: 16121 - DNA, 21 bp, Homo sapiens
gacatgacaattatgatcagt

SEQ ID NO: 16122 - RNA, 21 nt, RNAi
caugacaauuaugaucaguuu

SEQ ID NO: 16123 - RNA, 21 nt, RNAi
uuguacuguuaauacuaguca

SEQ ID NO: 16124 - DNA, 21 bp, Homo sapiens
gacaattatgatcagttggtg

SEQ ID NO: 16125 - RNA, 21 nt, RNAi
caauuaugaucaguugguguu

SEQ ID NO: 16126 - RNA, 21 nt, RNAi
uuguuaauacuagucaaccac

SEQ ID NO: 16127 - DNA, 21 bp, Homo sapiens
gatcagttggtgaggatagcc

SEQ ID NO: 16128 - RNA, 21 nt, RNAi
ucaguuggugaggauagccuu

SEQ ID NO: 16129 - RNA, 21 nt, RNAi
uuagucaaccacuccuaucgg

SEQ ID NO: 16130 - DNA, 21 bp, Homo sapiens
gaattagatccacgtttcaat

SEQ ID NO: 16131 - RNA, 21 nt, RNAi
auuagauccacguuucaauuu

SEQ ID NO: 16132 - RNA, 21 nt, RNAi
uuuaaucuaggugcaaaguua

SEQ ID NO: 16133 - DNA, 21 bp, Homo sapiens
gatccacgtttcaatgatatc

SEQ ID NO: 16134 - RNA, 21 nt, RNAi
uccacguuucaaugauaucuu

SEQ ID NO: 16135 - RNA, 21 nt, RNAi
uuaggugcaaaguuacuauag

SEQ ID NO: 16136 - DNA, 21 bp, Homo sapiens
gaacgctttgtccacagtgaa

SEQ ID NO: 16137 - RNA, 21 nt, RNAi
acgcuuuguccacagugaauu

SEQ ID NO: 16138 - RNA, 21 nt, RNAi
uuugcgaaacaggugucacuu

SEQ ID NO: 16139 - DNA, 21 bp, Homo sapiens
gaggccttggatttcctggac

SEQ ID NO: 16140 - RNA, 21 nt, RNAi
ggccuuggauuuccuggacuu

SEQ ID NO: 16141 - RNA, 21 nt, RNAi
uuccggaaccuaaaggaccug

SEQ ID NO: 16142 - DNA, 21 bp, Homo sapiens
gatttcctggacaaactgctg

SEQ ID NO: 16143 - RNA, 21 nt, RNAi
uuuccuggacaaacugcuguu

SEQ ID NO: 16144 - RNA, 21 nt, RNAi
uuaaaggaccuguuugacgac

SEQ ID NO: 16145 - DNA, 21 bp, Homo sapiens
gacaaactgctgcgatatgac

SEQ ID NO: 16146 - RNA, 21 nt, RNAi
caaacugcugcgauaugacuu

SEQ ID NO: 16147 - RNA, 21 nt, RNAi
uuguuugacgacgcuauacug

SEQ ID NO: 16148 - DNA, 21 bp, Homo sapiens
gatatgaccaccagtcacggc

SEQ ID NO: 16149 - RNA, 21 nt, RNAi
uaugaccaccagucacggcuu

SEQ ID NO: 16150 - RNA, 21 nt, RNAi
uuauacugguggucagugccg

SEQ ID NO: 16151 - DNA, 21 bp, Homo sapiens
gaccaccagtcacggcttact

SEQ ID NO: 16152 - RNA, 21 nt, RNAi
ccaccagucacggcuuacuuu

SEQ ID NO: 16153 - RNA, 21 nt, RNAi
uugguggucagugccgaauga

SEQ ID NO: 16154 - DNA, 21 bp, Homo sapiens
gaaacacttcagaagcaccgt

SEQ ID NO: 16155 - RNA, 21 nt, RNAi
aacacuucagaagcaccguuu

SEQ ID NO: 16156 - RNA, 21 nt, RNAi
uuuugugaagucuucguggca

SEQ ID NO: 16157 - DNA, 21 bp, Homo sapiens
gaagcaccgtgtctgaaccgt

SEQ ID NO: 16158 - RNA, 21 nt, RNAi
agcaccgugucugaaccguuu

SEQ ID NO: 16159 - RNA, 21 nt, RNAi
uuucguggcacagacuuggca

SEQ ID NO: 16160 - DNA, 21 bp, Homo sapiens
gaaccgttgcttgtggattta

SEQ ID NO: 16161 - RNA, 21 nt, RNAi
accguugcuuguggauuuauu

SEQ ID NO: 16162 - RNA, 21 nt, RNAi
uuuggcaacgaacaccuaaau

SEQ ID NO: 16163 - DNA, 21 bp, Homo sapiens
gaacaaagataaaccagcctc

SEQ ID NO: 16164 - RNA, 21 nt, RNAi
acaaagauaaaccagccucuu

SEQ ID NO: 16165 - RNA, 21 nt, RNAi
uuuguuucuauuuggucggag

SEQ ID NO: 16166 - DNA, 21 bp, Homo sapiens
gaggcaggaagaaaggaagga

SEQ ID NO: 16167 - RNA, 21 nt, RNAi
ggcaggaagaaaggaaggauu

SEQ ID NO: 16168 - RNA, 21 nt, RNAi
uuccguccuucuuuccuuccu

SEQ ID NO: 16169 - DNA, 21 bp, Homo sapiens
gaagaaaggaaggaaggaaag

SEQ ID NO: 16170 - RNA, 21 nt, RNAi
agaaaggaaggaaggaaaguu

SEQ ID NO: 16171 - RNA, 21 nt, RNAi
uuucuuuccuuccuuccuuuc

SEQ ID NO: 16172 - DNA, 21 bp, Homo sapiens
gaaaggaaggaaggaaagaag

SEQ ID NO: 16173 - RNA, 21 nt, RNAi
aaggaaggaaggaaagaaguu

SEQ ID NO: 16174 - RNA, 21 nt, RNAi
uuuuccuuccuuccuuucuuc

SEQ ID NO: 16175 - DNA, 21 bp, Homo sapiens
gaaggaaggaaagaaggaagg

SEQ ID NO: 16176 - RNA, 21 nt, RNAi
aggaaggaaagaaggaagguu

SEQ ID NO: 16177 - RNA, 21 nt, RNAi
uuuccuuccuuucuuccuucc

SEQ ID NO: 16178 - DNA, 21 bp, Homo sapiens
gagcagtggactgcttgctgg

SEQ ID NO: 16179 - RNA, 21 nt, RNAi
gcaguggacugcuugcugguu

SEQ ID NO: 16180 - RNA, 21 nt, RNAi
uucgucaccugacgaacgacc

SEQ ID NO: 16181 - DNA, 21 bp, Homo sapiens
gactgcttgctggtcgcttac

SEQ ID NO: 16182 - RNA, 21 nt, RNAi
cugcuugcuggucgcuuacuu

SEQ ID NO: 16183 - RNA, 21 nt, RNAi
uugacgaacgaccagcgaaug

SEQ ID NO: 16184 - DNA, 21 bp, Homo sapiens
gaagtgtgtcttagttacatc

SEQ ID NO: 16185 - RNA, 21 nt, RNAi
agugugucuuaguuacaucuu

SEQ ID NO: 16186 - RNA, 21 nt, RNAi
uuucacacagaaucaauguag

SEQ ID NO: 16187 - DNA, 21 bp, Homo sapiens
gaatcatgtcttactgatcta

SEQ ID NO: 16188 - RNA, 21 nt, RNAi
aucaugucuuacugaucuauu

SEQ ID NO: 16189 - RNA, 21 nt, RNAi
uuuaguacagaaugacuagau

SEQ ID NO: 16190 - DNA, 21 bp, Homo sapiens
tacacagatgttaatacacac

SEQ ID NO: 16191 - RNA, 21 nt, RNAi
cacagauguuaauacacacuu

SEQ ID NO: 16192 - RNA, 21 nt, RNAi
uugugucuacaauuaugugug

SEQ ID NO: 16193 - DNA, 21 bp, Homo sapiens
taatacacacagacctcgaga

SEQ ID NO: 16194 - RNA, 21 nt, RNAi
auacacacagaccucgagauu

SEQ ID NO: 16195 - RNA, 21 nt, RNAi
uuuaugugugucuggagcucu

SEQ ID NO: 16196 - DNA, 21 bp, Homo sapiens
tacacacagacctcgagaata

SEQ ID NO: 16197 - RNA, 21 nt, RNAi
cacacagaccucgagaauauu

SEQ ID NO: 16198 - RNA, 21 nt, RNAi
uugugugucuggagcucuuau

SEQ ID NO: 16199 - DNA, 21 bp, Homo sapiens
tacgagtcacatgtggtggaa

SEQ ID NO: 16200 - RNA, 21 nt, RNAi
cgagucacaugugguggaauu

SEQ ID NO: 16201 - RNA, 21 nt, RNAi
uugcucaguguacaccaccuu

SEQ ID NO: 16202 - DNA, 21 bp, Homo sapiens
taggccgaggtaaatacagtg

SEQ ID NO: 16203 - RNA, 21 nt, RNAi
ggccgagguaaauacaguguu

SEQ ID NO: 16204 - RNA, 21 nt, RNAi
uuccggcuccauuuaugucac

SEQ ID NO: 16205 - DNA, 21 bp, Homo sapiens
tacagtgaagtatttgaagcc

SEQ ID NO: 16206 - RNA, 21 nt, RNAi
cagugaaguauuugaagccuu

SEQ ID NO: 16207 - RNA, 21 nt, RNAi
uugucacuucauaaacuucgg

SEQ ID NO: 16208 - DNA, 21 bp, Homo sapiens
tatttgaagccatcaacatca

SEQ ID NO: 16209 - RNA, 21 nt, RNAi
uuugaagccaucaacaucauu

SEQ ID NO: 16210 - RNA, 21 nt, RNAi
uuaaacuucgguaguuguagu

SEQ ID NO: 16211 - DNA, 21 bp, Homo sapiens
taaacaacacagacttcaagc

SEQ ID NO: 16212 - RNA, 21 nt, RNAi
aacaacacagacuucaagcuu

SEQ ID NO: 16213 - RNA, 21 nt, RNAi
uuuuguugugucugaaguucg

SEQ ID NO: 16214 - DNA, 21 bp, Homo sapiens
taccagacgttaacagactat

SEQ ID NO: 16215 - RNA, 21 nt, RNAi
ccagacguuaacagacuauuu

SEQ ID NO: 16216 - RNA, 21 nt, RNAi
uuggucugcaauugucugaua

SEQ ID NO: 16217 - DNA, 21 bp, Homo sapiens
tacatgtatgagattctgaag

SEQ ID NO: 16218 - RNA, 21 nt, RNAi
cauguaugagauucugaaguu

SEQ ID NO: 16219 - RNA, 21 nt, RNAi
uuguacauacucuaagacuuc

SEQ ID NO: 16220 - DNA, 21 bp, Homo sapiens
tatgcacagagatgtcaagcc

SEQ ID NO: 16221 - RNA, 21 nt, RNAi
ugcacagagaugucaagccuu

SEQ ID NO: 16222 - RNA, 21 nt, RNAi
uuacgugucucuacaguucgg

SEQ ID NO: 16223 - DNA, 21 bp, Homo sapiens
tatcatcctggccaagaatat

SEQ ID NO: 16224 - RNA, 21 nt, RNAi
ucauccuggccaagaauauuu

SEQ ID NO: 16225 - RNA, 21 nt, RNAi
uuaguaggaccgguucuuaua

SEQ ID NO: 16226 - DNA, 21 bp, Homo sapiens
tataatgtccgagttgcttcc

SEQ ID NO: 16227 - RNA, 21 nt, RNAi
uaauguccgaguugcuuccuu

SEQ ID NO: 16228 - RNA, 21 nt, RNAi
uuauuacaggcucaacgaagg

SEQ ID NO: 16229 - DNA, 21 bp, Homo sapiens
tacttcaaaggtcctgagcta

SEQ ID NO: 16230 - RNA, 21 nt, RNAi
cuucaaagguccugagcuauu

SEQ ID NO: 16231 - RNA, 21 nt, RNAi
uugaaguuuccaggacucgau

SEQ ID NO: 16232 - DNA, 21 bp, Homo sapiens
tacttgtagactatcagatgt

SEQ ID NO: 16233 - RNA, 21 nt, RNAi
cuuguagacuaucagauguuu

SEQ ID NO: 16234 - RNA, 21 nt, RNAi
uugaacaucugauagucuaca

SEQ ID NO: 16235 - DNA, 21 bp, Homo sapiens
tagactatcagatgtacgatt

SEQ ID NO: 16236 - RNA, 21 nt, RNAi
gacuaucagauguacgauuuu

SEQ ID NO: 16237 - RNA, 21 nt, RNAi
uucugauagucuacaugcuaa

SEQ ID NO: 16238 - DNA, 21 bp, Homo sapiens
tatagtttggatatgtggagt

SEQ ID NO: 16239 - RNA, 21 nt, RNAi
uaguuuggauauguggaguuu

SEQ ID NO: 16240 - RNA, 21 nt, RNAi
uuaucaaaccuauacaccuca

SEQ ID NO: 16241 - DNA, 21 bp, Homo sapiens
tagtttggatatgtggagttt

SEQ ID NO: 16242 - RNA, 21 nt, RNAi
guuuggauauguggaguuuuu

SEQ ID NO: 16243 - RNA, 21 nt, RNAi
uucaaaccuauacaccucaaa

SEQ ID NO: 16244 - DNA, 21 bp, Homo sapiens
tatgctggcaagtatgatctt

SEQ ID NO: 16245 - RNA, 21 nt, RNAi
ugcuggcaaguaugaucuuuu

SEQ ID NO: 16246 - RNA, 21 nt, RNAi
uuacgaccguucauacuagaa

SEQ ID NO: 16247 - DNA, 21 bp, Homo sapiens
tatgatctttcggaaggagcc

SEQ ID NO: 16248 - RNA, 21 nt, RNAi
ugaucuuucggaaggagccuu

SEQ ID NO: 16249 - RNA, 21 nt, RNAi
uuacuagaaagccuuccucgg

SEQ ID NO: 16250 - DNA, 21 bp, Homo sapiens
tatgatcagttggtgaggata

SEQ ID NO: 16251 - RNA, 21 nt, RNAi
ugaucaguuggugaggauauu

SEQ ID NO: 16252 - RNA, 21 nt, RNAi
uuacuagucaaccacuccuau

SEQ ID NO: 16253 - DNA, 21 bp, Homo sapiens
tagatccacgtttcaatgata

SEQ ID NO: 16254 - RNA, 21 nt, RNAi
gauccacguuucaaugauauu

SEQ ID NO: 16255 - RNA, 21 nt, RNAi
uucuaggugcaaaguuacuau

SEQ ID NO: 16256 - DNA, 21 bp, Homo sapiens
tatgaccaccagtcacggctt

SEQ ID NO: 16257 - RNA, 21 nt, RNAi
ugaccaccagucacggcuuuu

SEQ ID NO: 16258 - RNA, 21 nt, RNAi
uuacugguggucagugccgaa

SEQ ID NO: 16259 - DNA, 21 bp, Homo sapiens
tactgcaagagaggcaatgga

SEQ ID NO: 16260 - RNA, 21 nt, RNAi
cugcaagagaggcaauggauu

SEQ ID NO: 16261 - RNA, 21 nt, RNAi
uugacguucucuccguuaccu

SEQ ID NO: 16262 - DNA, 21 bp, Homo sapiens
tatttctacactgttgtgaag

SEQ ID NO: 16263 - RNA, 21 nt, RNAi
uuucuacacuguugugaaguu

SEQ ID NO: 16264 - RNA, 21 nt, RNAi
uuaaagaugugacaacacuuc

SEQ ID NO: 16265 - DNA, 21 bp, Homo sapiens
tacactgttgtgaaggaccag

SEQ ID NO: 16266 - RNA, 21 nt, RNAi
cacuguugugaaggaccaguu

SEQ ID NO: 16267 - RNA, 21 nt, RNAi
uugugacaacacuuccugguc

SEQ ID NO: 16268 - DNA, 21 bp, Homo sapiens
tatctgtctcctgatgcctga

SEQ ID NO: 16269 - RNA, 21 nt, RNAi
ucugucuccugaugccugauu

SEQ ID NO: 16270 - RNA, 21 nt, RNAi
uuagacagaggacuacggacu

SEQ ID NO: 16271 - DNA, 21 bp, Homo sapiens
tacctgcaggtggaatatttc

SEQ ID NO: 16272 - RNA, 21 nt, RNAi
ccugcagguggaauauuucuu

SEQ ID NO: 16273 - RNA, 21 nt, RNAi
uuggacguccaccuuauaaag

SEQ ID NO: 16274 - DNA, 21 bp, Homo sapiens
tatctcgtgctcttctccaga

SEQ ID NO: 16275 - RNA, 21 nt, RNAi
ucucgugcucuucuccagauu

SEQ ID NO: 16276 - RNA, 21 nt, RNAi
uuagagcacgagaagaggucu

SEQ ID NO: 16277 - DNA, 21 bp, Homo sapiens
tataggagcagtggactgctt

SEQ ID NO: 16278 - RNA, 21 nt, RNAi
uaggagcaguggacugcuuuu

SEQ ID NO: 16279 - RNA, 21 nt, RNAi
uuauccucgucaccugacgaa

SEQ ID NO: 16280 - DNA, 21 bp, Homo sapiens
taggagcagtggactgcttgc

SEQ ID NO: 16281 - RNA, 21 nt, RNAi
ggagcaguggacugcuugcuu

SEQ ID NO: 16282 - RNA, 21 nt, RNAi
uuccucgucaccugacgaacg

SEQ ID NO: 16283 - DNA, 21 bp, Homo sapiens
tacatcactttactccataag

SEQ ID NO: 16284 - RNA, 21 nt, RNAi
caucacuuuacuccauaaguu

SEQ ID NO: 16285 - RNA, 21 nt, RNAi
uuguagugaaaugagguauuc

SEQ ID NO: 16286 - DNA, 21 bp, Homo sapiens
tactccataagcgcttcagtg

SEQ ID NO: 16287 - RNA, 21 nt, RNAi
cuccauaagcgcuucaguguu

SEQ ID NO: 16288 - RNA, 21 nt, RNAi
uugagguauucgcgaagucac

SEQ ID NO: 16289 - DNA, 21 bp, Homo sapiens
tatcctagtggctcttgtgga

SEQ ID NO: 16290 - RNA, 21 nt, RNAi
uccuaguggcucuuguggauu

SEQ ID NO: 16291 - RNA, 21 nt, RNAi
uuaggaucaccgagaacaccu

SEQ ID NO: 16292 - DNA, 21 bp, Homo sapiens
tagtggctcttgtggaagtgt

SEQ ID NO: 16293 - RNA, 21 nt, RNAi
guggcucuuguggaaguguuu

SEQ ID NO: 16294 - RNA, 21 nt, RNAi
uucaccgagaacaccuucaca

SEQ ID NO: 16295 - DNA, 21 bp, Homo sapiens
taccagacgttaacagactat

SEQ ID NO: 16296 - RNA, 21 nt, RNAi
ccagacguuaacagacuauuu

SEQ ID NO: 16297 - RNA, 21 nt, RNAi
uuggucugcaauugucugaua

SEQ ID NO: 16298 - DNA, 21 bp, Homo sapiens
aagaagcggttggagttggat

SEQ ID NO: 16299 - RNA, 21 nt, RNAi
gaagcgguuggaguuggauuu

SEQ ID NO: 16300 - RNA, 21 nt, RNAi
uucuucgccaaccucaaccua

SEQ ID NO: 16301 - DNA, 21 bp, Homo sapiens
aagcggttggagttggatgac

SEQ ID NO: 16302 - RNA, 21 nt, RNAi
gcgguuggaguuggaugacuu

SEQ ID NO: 16303 - RNA, 21 nt, RNAi
uucgccaaccucaaccuacug

SEQ ID NO: 16304 - DNA, 21 bp, Homo sapiens
aactgctgtggccactgcctc

SEQ ID NO: 16305 - RNA, 21 nt, RNAi
cugcuguggccacugccucuu

SEQ ID NO: 16306 - RNA, 21 nt, RNAi
uugacgacaccggugacggag

SEQ ID NO: 16307 - DNA, 21 bp, Homo sapiens
aagctgtgtcgctttgtcttc

SEQ ID NO: 16308 - RNA, 21 nt, RNAi
gcugugucgcuuugucuucuu

SEQ ID NO: 16309 - RNA, 21 nt, RNAi
uucgacacagcgaaacagaag

SEQ ID NO: 16310 - DNA, 21 bp, Homo sapiens
aagaagctggtgctggagaac

SEQ ID NO: 16311 - RNA, 21 nt, RNAi
gaagcuggugcuggagaacuu

SEQ ID NO: 16312 - RNA, 21 nt, RNAi
uucuucgaccacgaccucuug

SEQ ID NO: 16313 - DNA, 21 bp, Homo sapiens
aagctggtgctggagaacctg

SEQ ID NO: 16314 - RNA, 21 nt, RNAi
gcuggugcuggagaaccuguu

SEQ ID NO: 16315 - RNA, 21 nt, RNAi
uucgaccacgaccucuuggac

SEQ ID NO: 16316 - DNA, 21 bp, Homo sapiens
aacctggaggactcctgcgtg

SEQ ID NO: 16317 - RNA, 21 nt, RNAi
ccuggaggacuccugcguguu

SEQ ID NO: 16318 - RNA, 21 nt, RNAi
uuggaccuccugaggacgcac

SEQ ID NO: 16319 - DNA, 21 bp, Homo sapiens
aaggcagccgatgtctggagc

SEQ ID NO: 16320 - RNA, 21 nt, RNAi
ggcagccgaugucuggagcuu

SEQ ID NO: 16321 - RNA, 21 nt, RNAi
uuccgucggcuacagaccucg

SEQ ID NO: 16322 - DNA, 21 bp, Homo sapiens
aacggctcacagccacaggca

SEQ ID NO: 16323 - RNA, 21 nt, RNAi
cggcucacagccacaggcauu

SEQ ID NO: 16324 - RNA, 21 nt, RNAi
uugccgagugucgguguccgu

SEQ ID NO: 16325 - DNA, 21 bp, Homo sapiens
aagtggttctgtatggctagg

SEQ ID NO: 16326 - RNA, 21 nt, RNAi
gugguucuguauggcuagguu

SEQ ID NO: 16327 - RNA, 21 nt, RNAi
uucaccaagacauaccgaucc

SEQ ID NO: 16328 - DNA, 21 bp, Homo sapiens
aagccttctcctgcctctgaa

SEQ ID NO: 16329 - RNA, 21 nt, RNAi
gccuucuccugccucugaauu

SEQ ID NO: 16330 - RNA, 21 nt, RNAi
uucggaagaggacggagacuu

SEQ ID NO: 16331 - DNA, 21 bp, Homo sapiens
aactgagccaaaccttcagtg

SEQ ID NO: 16332 - RNA, 21 nt, RNAi
cugagccaaaccuucaguguu

SEQ ID NO: 16333 - RNA, 21 nt, RNAi
uugacucgguuuggaagucac

SEQ ID NO: 16334 - DNA, 21 bp, Homo sapiens
aaaccttcagtgccttccaga

SEQ ID NO: 16335 - RNA, 21 nt, RNAi
accuucagugccuuccagauu

SEQ ID NO: 16336 - RNA, 21 nt, RNAi
uuuggaagucacggaaggucu

SEQ ID NO: 16337 - DNA, 21 bp, Homo sapiens
aaccttcagtgccttccagaa

SEQ ID NO: 16338 - RNA, 21 nt, RNAi
ccuucagugccuuccagaauu

SEQ ID NO: 16339 - RNA, 21 nt, RNAi
uuggaagucacggaaggucuu

SEQ ID NO: 16340 - DNA, 21 bp, Homo sapiens
aaaggcagaagcctgtgtgga

SEQ ID NO: 16341 - RNA, 21 nt, RNAi
aggcagaagccuguguggauu

SEQ ID NO: 16342 - RNA, 21 nt, RNAi
uuuccgucuucggacacaccu

SEQ ID NO: 16343 - DNA, 21 bp, Homo sapiens
aaggcagaagcctgtgtggag

SEQ ID NO: 16344 - RNA, 21 nt, RNAi
ggcagaagccuguguggaguu

SEQ ID NO: 16345 - RNA, 21 nt, RNAi
uuccgucuucggacacaccuc

SEQ ID NO: 16346 - DNA, 21 bp, Homo sapiens
aagcctgtgtggagtgtgctg

SEQ ID NO: 16347 - RNA, 21 nt, RNAi
gccuguguggagugugcuguu

SEQ ID NO: 16348 - RNA, 21 nt, RNAi
uucggacacaccucacacgac

SEQ ID NO: 16349 - DNA, 21 bp, Homo sapiens
aaactggcatccttgagctga

SEQ ID NO: 16350 - RNA, 21 nt, RNAi
acuggcauccuugagcugauu

SEQ ID NO: 16351 - RNA, 21 nt, RNAi
uuugaccguaggaacucgacu

SEQ ID NO: 16352 - DNA, 21 bp, Homo sapiens
aactggcatccttgagctgac

SEQ ID NO: 16353 - RNA, 21 nt, RNAi
cuggcauccuugagcugacuu

SEQ ID NO: 16354 - RNA, 21 nt, RNAi
uugaccguaggaacucgacug

SEQ ID NO: 16355 - DNA, 21 bp, Homo sapiens
aaacaaaccagctgcctttgt

SEQ ID NO: 16356 - RNA, 21 nt, RNAi
acaaaccagcugccuuuguuu

SEQ ID NO: 16357 - RNA, 21 nt, RNAi
uuuguuuggucgacggaaaca

SEQ ID NO: 16358 - DNA, 21 bp, Homo sapiens
aacaaaccagctgcctttgta

SEQ ID NO: 16359 - RNA, 21 nt, RNAi
caaaccagcugccuuuguauu

SEQ ID NO: 16360 - RNA, 21 nt, RNAi
uuguuuggucgacggaaacau

SEQ ID NO: 16361 - DNA, 21 bp, Homo sapiens
aaaccagctgcctttgtatct

SEQ ID NO: 16362 - RNA, 21 nt, RNAi
accagcugccuuuguaucuuu

SEQ ID NO: 16363 - RNA, 21 nt, RNAi
uuuggucgacggaaacauaga

SEQ ID NO: 16364 - DNA, 21 bp, Homo sapiens
aaccagctgcctttgtatctt

SEQ ID NO: 16365 - RNA, 21 nt, RNAi
ccagcugccuuuguaucuuuu

SEQ ID NO: 16366 - RNA, 21 nt, RNAi
uuggucgacggaaacauagaa

SEQ ID NO: 16367 - DNA, 21 bp, Homo sapiens
aagagattctccttccaggcc

SEQ ID NO: 16368 - RNA, 21 nt, RNAi
gagauucuccuuccaggccuu

SEQ ID NO: 16369 - RNA, 21 nt, RNAi
uucucuaagaggaagguccgg

SEQ ID NO: 16370 - DNA, 21 bp, Homo sapiens
aagaatccaaactatgaggct

SEQ ID NO: 16371 - RNA, 21 nt, RNAi
gaauccaaacuaugaggcuuu

SEQ ID NO: 16372 - RNA, 21 nt, RNAi
uucuuagguuugauacuccga

SEQ ID NO: 16373 - DNA, 21 bp, Homo sapiens
aatccaaactatgaggctagt

SEQ ID NO: 16374 - RNA, 21 nt, RNAi
uccaaacuaugaggcuaguuu

SEQ ID NO: 16375 - RNA, 21 nt, RNAi
uuagguuugauacuccgauca

SEQ ID NO: 16376 - DNA, 21 bp, Homo sapiens
aaactatgaggctagttcttg

SEQ ID NO: 16377 - RNA, 21 nt, RNAi
acuaugaggcuaguucuuguu

SEQ ID NO: 16378 - RNA, 21 nt, RNAi
uuugauacuccgaucaagaac

SEQ ID NO: 16379 - DNA, 21 bp, Homo sapiens
aactatgaggctagttcttgt

SEQ ID NO: 16380 - RNA, 21 nt, RNAi
cuaugaggcuaguucuuguuu

SEQ ID NO: 16381 - RNA, 21 nt, RNAi
uugauacuccgaucaagaaca

SEQ ID NO: 16382 - DNA, 21 bp, Homo sapiens
aactcaagactgttctggaat

SEQ ID NO: 16383 - RNA, 21 nt, RNAi
cucaagacuguucuggaauuu

SEQ ID NO: 16384 - RNA, 21 nt, RNAi
uugaguucugacaagaccuua

SEQ ID NO: 16385 - DNA, 21 bp, Homo sapiens
cacgagactcgcagcggaagt

SEQ ID NO: 16386 - RNA, 21 nt, RNAi
cgagacucgcagcggaaguuu

SEQ ID NO: 16387 - RNA, 21 nt, RNAi
uugcucugagcgucgccuuca

SEQ ID NO: 16388 - DNA, 21 bp, Homo sapiens
caggaagaagcggttggagtt

SEQ ID NO: 16389 - RNA, 21 nt, RNAi
ggaagaagcgguuggaguuuu

SEQ ID NO: 16390 - RNA, 21 nt, RNAi
uuccuucuucgccaaccucaa

SEQ ID NO: 16391 - DNA, 21 bp, Homo sapiens
caacttagataccgagcgtcc

SEQ ID NO: 16392 - RNA, 21 nt, RNAi
acuuagauaccgagcguccuu

SEQ ID NO: 16393 - RNA, 21 nt, RNAi
uuugaaucuauggcucgcagg

SEQ ID NO: 16394 - DNA, 21 bp, Homo sapiens
cacctactgctccagatcgtg

SEQ ID NO: 16395 - RNA, 21 nt, RNAi
ccuacugcuccagaucguguu

SEQ ID NO: 16396 - RNA, 21 nt, RNAi
uuggaugacgaggucuagcac

SEQ ID NO: 16397 - DNA, 21 bp, Homo sapiens
cagatcgtgcaactgctgtgg

SEQ ID NO: 16398 - RNA, 21 nt, RNAi
gaucgugcaacugcugugguu

SEQ ID NO: 16399 - RNA, 21 nt, RNAi
uucuagcacguugacgacacc

SEQ ID NO: 16400 - DNA, 21 bp, Homo sapiens
caactgctgtggccactgcct

SEQ ID NO: 16401 - RNA, 21 nt, RNAi
acugcuguggccacugccuuu

SEQ ID NO: 16402 - RNA, 21 nt, RNAi
uuugacgacaccggugacgga

SEQ ID NO: 16403 - DNA, 21 bp, Homo sapiens
caggcactgagtatacctgca

SEQ ID NO: 16404 - RNA, 21 nt, RNAi
ggcacugaguauaccugcauu

SEQ ID NO: 16405 - RNA, 21 nt, RNAi
uuccgugacucauauggacgu

SEQ ID NO: 16406 - DNA, 21 bp, Homo sapiens
cactgagtatacctgcaaggt

SEQ ID NO: 16407 - RNA, 21 nt, RNAi
cugaguauaccugcaagguuu

SEQ ID NO: 16408 - RNA, 21 nt, RNAi
uugacucauauggacguucca

SEQ ID NO: 16409 - DNA, 21 bp, Homo sapiens
cactgaggtcctggctggtac

SEQ ID NO: 16410 - RNA, 21 nt, RNAi
cugagguccuggcugguacuu

SEQ ID NO: 16411 - RNA, 21 nt, RNAi
uugacuccaggaccgaccaug

SEQ ID NO: 16412 - DNA, 21 bp, Homo sapiens
catgcacagcctggtgcgaag

SEQ ID NO: 16413 - RNA, 21 nt, RNAi
ugcacagccuggugcgaaguu

SEQ ID NO: 16414 - RNA, 21 nt, RNAi
uuacgugucggaccacgcuuc

SEQ ID NO: 16415 - DNA, 21 bp, Homo sapiens
cactgtcaccagcacggtctg

SEQ ID NO: 16416 - RNA, 21 nt, RNAi
cugucaccagcacggucuguu

SEQ ID NO: 16417 - RNA, 21 nt, RNAi
uugacaguggucgugccagac

SEQ ID NO: 16418 - DNA, 21 bp, Homo sapiens
cacggtctggtcctgcgtgat

SEQ ID NO: 16419 - RNA, 21 nt, RNAi
cggucugguccugcgugauuu

SEQ ID NO: 16420 - RNA, 21 nt, RNAi
uugccagaccaggacgcacua

SEQ ID NO: 16421 - DNA, 21 bp, Homo sapiens
caagctgtgtcgctttgtctt

SEQ ID NO: 16422 - RNA, 21 nt, RNAi
agcugugucgcuuugucuuuu

SEQ ID NO: 16423 - RNA, 21 nt, RNAi
uuucgacacagcgaaacagaa

SEQ ID NO: 16424 - DNA, 21 bp, Homo sapiens
caaggcagccgatgtctggag

SEQ ID NO: 16425 - RNA, 21 nt, RNAi
aggcagccgaugucuggaguu

SEQ ID NO: 16426 - RNA, 21 nt, RNAi
uuuccgucggcuacagaccuc

SEQ ID NO: 16427 - DNA, 21 bp, Homo sapiens
cagctgaacggctcacagcca

SEQ ID NO: 16428 - RNA, 21 nt, RNAi
gcugaacggcucacagccauu

SEQ ID NO: 16429 - RNA, 21 nt, RNAi
uucgacuugccgagugucggu

SEQ ID NO: 16430 - DNA, 21 bp, Homo sapiens
cacagccacaggcatcctcct

SEQ ID NO: 16431 - RNA, 21 nt, RNAi
cagccacaggcauccuccuuu

SEQ ID NO: 16432 - RNA, 21 nt, RNAi
uugucgguguccguaggagga

SEQ ID NO: 16433 - DNA, 21 bp, Homo sapiens
cagagaagtggttctgtatgg

SEQ ID NO: 16434 - RNA, 21 nt, RNAi
gagaagugguucuguaugguu

SEQ ID NO: 16435 - RNA, 21 nt, RNAi
uucucuucaccaagacauacc

SEQ ID NO: 16436 - DNA, 21 bp, Homo sapiens
cacgctcagctgccaacagtg

SEQ ID NO: 16437 - RNA, 21 nt, RNAi
cgcucagcugccaacaguguu

SEQ ID NO: 16438 - RNA, 21 nt, RNAi
uugcgagucgacgguugucac

SEQ ID NO: 16439 - DNA, 21 bp, Homo sapiens
cagctgccaacagtggattga

SEQ ID NO: 16440 - RNA, 21 nt, RNAi
gcugccaacaguggauugauu

SEQ ID NO: 16441 - RNA, 21 nt, RNAi
uucgacgguugucaccuaacu

SEQ ID NO: 16442 - DNA, 21 bp, Homo sapiens
caagccttctcctgcctctga

SEQ ID NO: 16443 - RNA, 21 nt, RNAi
agccuucuccugccucugauu

SEQ ID NO: 16444 - RNA, 21 nt, RNAi
uuucggaagaggacggagacu

SEQ ID NO: 16445 - DNA, 21 bp, Homo sapiens
caaaccttcagtgccttccag

SEQ ID NO: 16446 - RNA, 21 nt, RNAi
aaccuucagugccuuccaguu

SEQ ID NO: 16447 - RNA, 21 nt, RNAi
uuuuggaagucacggaagguc

SEQ ID NO: 16448 - DNA, 21 bp, Homo sapiens
cagaagcctgtgtggagtgtg

SEQ ID NO: 16449 - RNA, 21 nt, RNAi
gaagccuguguggaguguguu

SEQ ID NO: 16450 - RNA, 21 nt, RNAi
uucuucggacacaccucacac

SEQ ID NO: 16451 - DNA, 21 bp, Homo sapiens
cacatctgctttgttccacac

SEQ ID NO: 16452 - RNA, 21 nt, RNAi
caucugcuuuguuccacacuu

SEQ ID NO: 16453 - RNA, 21 nt, RNAi
uuguagacgaaacaaggugug

SEQ ID NO: 16454 - DNA, 21 bp, Homo sapiens
catctgctttgttccacacac

SEQ ID NO: 16455 - RNA, 21 nt, RNAi
ucugcuuuguuccacacacuu

SEQ ID NO: 16456 - RNA, 21 nt, RNAi
uuagacgaaacaaggugugug

SEQ ID NO: 16457 - DNA, 21 bp, Homo sapiens
cacacacatgcagttcctgct

SEQ ID NO: 16458 - RNA, 21 nt, RNAi
cacacaugcaguuccugcuuu

SEQ ID NO: 16459 - RNA, 21 nt, RNAi
uuguguguacgucaaggacga

SEQ ID NO: 16460 - DNA, 21 bp, Homo sapiens
cacacatgcagttcctgcttg

SEQ ID NO: 16461 - RNA, 21 nt, RNAi
cacaugcaguuccugcuuguu

SEQ ID NO: 16462 - RNA, 21 nt, RNAi
uuguguacgucaaggacgaac

SEQ ID NO: 16463 - DNA, 21 bp, Homo sapiens
cagcagtgagcaaaggagaca

SEQ ID NO: 16464 - RNA, 21 nt, RNAi
gcagugagcaaaggagacauu

SEQ ID NO: 16465 - RNA, 21 nt, RNAi
uucgucacucguuuccucugu

SEQ ID NO: 16466 - DNA, 21 bp, Homo sapiens
cagtgagcaaaggagacaata

SEQ ID NO: 16467 - RNA, 21 nt, RNAi
gugagcaaaggagacaauauu

SEQ ID NO: 16468 - RNA, 21 nt, RNAi
uucacucguuuccucuguuau

SEQ ID NO: 16469 - DNA, 21 bp, Homo sapiens
cacagagatgacaaactggca

SEQ ID NO: 16470 - RNA, 21 nt, RNAi
cagagaugacaaacuggcauu

SEQ ID NO: 16471 - RNA, 21 nt, RNAi
uugucucuacuguuugaccgu

SEQ ID NO: 16472 - DNA, 21 bp, Homo sapiens
cagagatgacaaactggcatc

SEQ ID NO: 16473 - RNA, 21 nt, RNAi
gagaugacaaacuggcaucuu

SEQ ID NO: 16474 - RNA, 21 nt, RNAi
uucucuacuguuugaccguag

SEQ ID NO: 16475 - DNA, 21 bp, Homo sapiens
caaactggcatccttgagctg

SEQ ID NO: 16476 - RNA, 21 nt, RNAi
aacuggcauccuugagcuguu

SEQ ID NO: 16477 - RNA, 21 nt, RNAi
uuuugaccguaggaacucgac

SEQ ID NO: 16478 - DNA, 21 bp, Homo sapiens
catccttgagctgacaacact

SEQ ID NO: 16479 - RNA, 21 nt, RNAi
uccuugagcugacaacacuuu

SEQ ID NO: 16480 - RNA, 21 nt, RNAi
uuaggaacucgacuguuguga

SEQ ID NO: 16481 - DNA, 21 bp, Homo sapiens
catgaccataggtcactgtct

SEQ ID NO: 16482 - RNA, 21 nt, RNAi
ugaccauaggucacugucuuu

SEQ ID NO: 16483 - RNA, 21 nt, RNAi
uuacugguauccagugacaga

SEQ ID NO: 16484 - DNA, 21 bp, Homo sapiens
cataggtcactgtctacactg

SEQ ID NO: 16485 - RNA, 21 nt, RNAi
uaggucacugucuacacuguu

SEQ ID NO: 16486 - RNA, 21 nt, RNAi
uuauccagugacagaugugac

SEQ ID NO: 16487 - DNA, 21 bp, Homo sapiens
cactttgtaccagtgtcggcc

SEQ ID NO: 16488 - RNA, 21 nt, RNAi
cuuuguaccagugucggccuu

SEQ ID NO: 16489 - RNA, 21 nt, RNAi
uugaaacauggucacagccgg

SEQ ID NO: 16490 - DNA, 21 bp, Homo sapiens
cagtgtcggcctccactgatg

SEQ ID NO: 16491 - RNA, 21 nt, RNAi
gugucggccuccacugauguu

SEQ ID NO: 16492 - RNA, 21 nt, RNAi
uucacagccggaggugacuac

SEQ ID NO: 16493 - DNA, 21 bp, Homo sapiens
cactgatgctggtgctcaggc

SEQ ID NO: 16494 - RNA, 21 nt, RNAi
cugaugcuggugcucaggcuu

SEQ ID NO: 16495 - RNA, 21 nt, RNAi
uugacuacgaccacgaguccg

SEQ ID NO: 16496 - DNA, 21 bp, Homo sapiens
caggcacctctgtccaaggac

SEQ ID NO: 16497 - RNA, 21 nt, RNAi
ggcaccucuguccaaggacuu

SEQ ID NO: 16498 - RNA, 21 nt, RNAi
uuccguggagacagguuccug

SEQ ID NO: 16499 - DNA, 21 bp, Homo sapiens
cacctctgtccaaggacaatc

SEQ ID NO: 16500 - RNA, 21 nt, RNAi
ccucuguccaaggacaaucuu

SEQ ID NO: 16501 - RNA, 21 nt, RNAi
uuggagacagguuccuguuag

SEQ ID NO: 16502 - DNA, 21 bp, Homo sapiens
cacaaacaaaccagctgcctt

SEQ ID NO: 16503 - RNA, 21 nt, RNAi
caaacaaaccagcugccuuuu

SEQ ID NO: 16504 - RNA, 21 nt, RNAi
uuguuuguuuggucgacggaa

SEQ ID NO: 16505 - DNA, 21 bp, Homo sapiens
caaacaaaccagctgcctttg

SEQ ID NO: 16506 - RNA, 21 nt, RNAi
aacaaaccagcugccuuuguu

SEQ ID NO: 16507 - RNA, 21 nt, RNAi
uuuuguuuggucgacggaaac

SEQ ID NO: 16508 - DNA, 21 bp, Homo sapiens
caaaccagctgcctttgtatc

SEQ ID NO: 16509 - RNA, 21 nt, RNAi
aaccagcugccuuuguaucuu

SEQ ID NO: 16510 - RNA, 21 nt, RNAi
uuuuggucgacggaaacauag

SEQ ID NO: 16511 - DNA, 21 bp, Homo sapiens
cagctgcctttgtatcttgta

SEQ ID NO: 16512 - RNA, 21 nt, RNAi
gcugccuuuguaucuuguauu

SEQ ID NO: 16513 - RNA, 21 nt, RNAi
uucgacggaaacauagaacau

SEQ ID NO: 16514 - DNA, 21 bp, Homo sapiens
cagcatctctgtcctcttgat

SEQ ID NO: 16515 - RNA, 21 nt, RNAi
gcaucucuguccucuugauuu

SEQ ID NO: 16516 - RNA, 21 nt, RNAi
uucguagagacaggagaacua

SEQ ID NO: 16517 - DNA, 21 bp, Homo sapiens
catctctgtcctcttgattaa

SEQ ID NO: 16518 - RNA, 21 nt, RNAi
ucucuguccucuugauuaauu

SEQ ID NO: 16519 - RNA, 21 nt, RNAi
uuagagacaggagaacuaauu

SEQ ID NO: 16520 - DNA, 21 bp, Homo sapiens
cagagataagaatccaaacta

SEQ ID NO: 16521 - RNA, 21 nt, RNAi
gagauaagaauccaaacuauu

SEQ ID NO: 16522 - RNA, 21 nt, RNAi
uucucuauucuuagguuugau

SEQ ID NO: 16523 - DNA, 21 bp, Homo sapiens
caaactatgaggctagttctt

SEQ ID NO: 16524 - RNA, 21 nt, RNAi
aacuaugaggcuaguucuuuu

SEQ ID NO: 16525 - RNA, 21 nt, RNAi
uuuugauacuccgaucaagaa

SEQ ID NO: 16526 - DNA, 21 bp, Homo sapiens
caagactgttctggaatgagg

SEQ ID NO: 16527 - RNA, 21 nt, RNAi
agacuguucuggaaugagguu

SEQ ID NO: 16528 - RNA, 21 nt, RNAi
uuucugacaagaccuuacucc

SEQ ID NO: 16529 - DNA, 21 bp, Homo sapiens
catgagtatgtatgtttacct

SEQ ID NO: 16530 - RNA, 21 nt, RNAi
ugaguauguauguuuaccuuu

SEQ ID NO: 16531 - RNA, 21 nt, RNAi
uuacucauacauacaaaugga

SEQ ID NO: 16532 - DNA, 21 bp, Homo sapiens
gattagctccggtttgcatca

SEQ ID NO: 16533 - RNA, 21 nt, RNAi
uuagcuccgguuugcaucauu

SEQ ID NO: 16534 - RNA, 21 nt, RNAi
uuaaucgaggccaaacguagu

SEQ ID NO: 16535 - DNA, 21 bp, Homo sapiens
gattagctccggtttgcatca

SEQ ID NO: 16536 - RNA, 21 nt, RNAi
uuagcuccgguuugcaucauu

SEQ ID NO: 16537 - RNA, 21 nt, RNAi
uuaaucgaggccaaacguagu

SEQ ID NO: 16538 - DNA, 21 bp, Homo sapiens
gagactcgcagcggaagtgga

SEQ ID NO: 16539 - RNA, 21 nt, RNAi
gacucgcagcggaaguggauu

SEQ ID NO: 16540 - RNA, 21 nt, RNAi
uucugagcgucgccuucaccu

SEQ ID NO: 16541 - DNA, 21 bp, Homo sapiens
gaagaagcggttggagttgga

SEQ ID NO: 16542 - RNA, 21 nt, RNAi
agaagcgguuggaguuggauu

SEQ ID NO: 16543 - RNA, 21 nt, RNAi
uuucuucgccaaccucaaccu

SEQ ID NO: 16544 - DNA, 21 bp, Homo sapiens
gaagcggttggagttggatga

SEQ ID NO: 16545 - RNA, 21 nt, RNAi
agcgguuggaguuggaugauu

SEQ ID NO: 16546 - RNA, 21 nt, RNAi
uuucgccaaccucaaccuacu

SEQ ID NO: 16547 - DNA, 21 bp, Homo sapiens
gagttggatgacaacttagat

SEQ ID NO: 16548 - RNA, 21 nt, RNAi
guuggaugacaacuuagauuu

SEQ ID NO: 16549 - RNA, 21 nt, RNAi
uucaaccuacuguugaaucua

SEQ ID NO: 16550 - DNA, 21 bp, Homo sapiens
gatgacaacttagataccgag

SEQ ID NO: 16551 - RNA, 21 nt, RNAi
ugacaacuuagauaccgaguu

SEQ ID NO: 16552 - RNA, 21 nt, RNAi
uuacuguugaaucuauggcuc

SEQ ID NO: 16553 - DNA, 21 bp, Homo sapiens
gacaacttagataccgagcgt

SEQ ID NO: 16554 - RNA, 21 nt, RNAi
caacuuagauaccgagcguuu

SEQ ID NO: 16555 - RNA, 21 nt, RNAi
uuguugaaucuauggcucgca

SEQ ID NO: 16556 - DNA, 21 bp, Homo sapiens
gatcgtgcaactgctgtggcc

SEQ ID NO: 16557 - RNA, 21 nt, RNAi
ucgugcaacugcuguggccuu

SEQ ID NO: 16558 - RNA, 21 nt, RNAi
uuagcacguugacgacaccgg

SEQ ID NO: 16559 - DNA, 21 bp, Homo sapiens
gagtatacctgcaaggtgtac

SEQ ID NO: 16560 - RNA, 21 nt, RNAi
guauaccugcaagguguacuu

SEQ ID NO: 16561 - RNA, 21 nt, RNAi
uucauauggacguuccacaug

SEQ ID NO: 16562 - DNA, 21 bp, Homo sapiens
gacatgcacagcctggtgcga

SEQ ID NO: 16563 - RNA, 21 nt, RNAi
caugcacagccuggugcgauu

SEQ ID NO: 16564 - RNA, 21 nt, RNAi
uuguacgugucggaccacgcu

SEQ ID NO: 16565 - DNA, 21 bp, Homo sapiens
gatctcaagctgtgtcgcttt

SEQ ID NO: 16566 - RNA, 21 nt, RNAi
ucucaagcugugucgcuuuuu

SEQ ID NO: 16567 - RNA, 21 nt, RNAi
uuagaguucgacacagcgaaa

SEQ ID NO: 16568 - DNA, 21 bp, Homo sapiens
gaccgtgagaggaagaagctg

SEQ ID NO: 16569 - RNA, 21 nt, RNAi
ccgugagaggaagaagcuguu

SEQ ID NO: 16570 - RNA, 21 nt, RNAi
uuggcacucuccuucuucgac

SEQ ID NO: 16571 - DNA, 21 bp, Homo sapiens
gagaggaagaagctggtgctg

SEQ ID NO: 16572 - RNA, 21 nt, RNAi
gaggaagaagcuggugcuguu

SEQ ID NO: 16573 - RNA, 21 nt, RNAi
uucuccuucuucgaccacgac

SEQ ID NO: 16574 - DNA, 21 bp, Homo sapiens
gaggaagaagctggtgctgga

SEQ ID NO: 16575 - RNA, 21 nt, RNAi
ggaagaagcuggugcuggauu

SEQ ID NO: 16576 - RNA, 21 nt, RNAi
uuccuucuucgaccacgaccu

SEQ ID NO: 16577 - DNA, 21 bp, Homo sapiens
gaagaagctggtgctggagaa

SEQ ID NO: 16578 - RNA, 21 nt, RNAi
agaagcuggugcuggagaauu

SEQ ID NO: 16579 - RNA, 21 nt, RNAi
uuucuucgaccacgaccucuu

SEQ ID NO: 16580 - DNA, 21 bp, Homo sapiens
gaagctggtgctggagaacct

SEQ ID NO: 16581 - RNA, 21 nt, RNAi
agcuggugcuggagaaccuuu

SEQ ID NO: 16582 - RNA, 21 nt, RNAi
uuucgaccacgaccucuugga

SEQ ID NO: 16583 - DNA, 21 bp, Homo sapiens
gagaacctggaggactcctgc

SEQ ID NO: 16584 - RNA, 21 nt, RNAi
gaaccuggaggacuccugcuu

SEQ ID NO: 16585 - RNA, 21 nt, RNAi
uucuuggaccuccugaggacg

SEQ ID NO: 16586 - DNA, 21 bp, Homo sapiens
gaacctggaggactcctgcgt

SEQ ID NO: 16587 - RNA, 21 nt, RNAi
accuggaggacuccugcguuu

SEQ ID NO: 16588 - RNA, 21 nt, RNAi
uuuggaccuccugaggacgca

SEQ ID NO: 16589 - DNA, 21 bp, Homo sapiens
gaggactcctgcgtgctgact

SEQ ID NO: 16590 - RNA, 21 nt, RNAi
ggacuccugcgugcugacuuu

SEQ ID NO: 16591 - RNA, 21 nt, RNAi
uuccugaggacgcacgacuga

SEQ ID NO: 16592 - DNA, 21 bp, Homo sapiens
gacctgagatactcagctcac

SEQ ID NO: 16593 - RNA, 21 nt, RNAi
ccugagauacucagcucacuu

SEQ ID NO: 16594 - RNA, 21 nt, RNAi
uuggacucuaugagucgagug

SEQ ID NO: 16595 - DNA, 21 bp, Homo sapiens
gagccagctgaacggctcaca

SEQ ID NO: 16596 - RNA, 21 nt, RNAi
gccagcugaacggcucacauu

SEQ ID NO: 16597 - RNA, 21 nt, RNAi
uucggucgacuugccgagugu

SEQ ID NO: 16598 - DNA, 21 bp, Homo sapiens
gagacagagaagtggttctgt

SEQ ID NO: 16599 - RNA, 21 nt, RNAi
gacagagaagugguucuguuu

SEQ ID NO: 16600 - RNA, 21 nt, RNAi
uucugucucuucaccaagaca

SEQ ID NO: 16601 - DNA, 21 bp, Homo sapiens
gacagagaagtggttctgtat

SEQ ID NO: 16602 - RNA, 21 nt, RNAi
cagagaagugguucuguauuu

SEQ ID NO: 16603 - RNA, 21 nt, RNAi
uugucucuucaccaagacaua

SEQ ID NO: 16604 - DNA, 21 bp, Homo sapiens
gagaagtggttctgtatggct

SEQ ID NO: 16605 - RNA, 21 nt, RNAi
gaagugguucuguauggcuuu

SEQ ID NO: 16606 - RNA, 21 nt, RNAi
uucuucaccaagacauaccga

SEQ ID NO: 16607 - DNA, 21 bp, Homo sapiens
gaagtggttctgtatggctag

SEQ ID NO: 16608 - RNA, 21 nt, RNAi
agugguucuguauggcuaguu

SEQ ID NO: 16609 - RNA, 21 nt, RNAi
uuucaccaagacauaccgauc

SEQ ID NO: 16610 - DNA, 21 bp, Homo sapiens
gaactgagccaaaccttcagt

SEQ ID NO: 16611 - RNA, 21 nt, RNAi
acugagccaaaccuucaguuu

SEQ ID NO: 16612 - RNA, 21 nt, RNAi
uuugacucgguuuggaaguca

SEQ ID NO: 16613 - DNA, 21 bp, Homo sapiens
gagccaaaccttcagtgcctt

SEQ ID NO: 16614 - RNA, 21 nt, RNAi
gccaaaccuucagugccuuuu

SEQ ID NO: 16615 - RNA, 21 nt, RNAi
uucgguuuggaagucacggaa

SEQ ID NO: 16616 - DNA, 21 bp, Homo sapiens
gagaaaggcagaagcctgtgt

SEQ ID NO: 16617 - RNA, 21 nt, RNAi
gaaaggcagaagccuguguuu

SEQ ID NO: 16618 - RNA, 21 nt, RNAi
uucuuuccgucuucggacaca

SEQ ID NO: 16619 - DNA, 21 bp, Homo sapiens
gaaaggcagaagcctgtgtgg

SEQ ID NO: 16620 - RNA, 21 nt, RNAi
aaggcagaagccugugugguu

SEQ ID NO: 16621 - RNA, 21 nt, RNAi
uuuuccgucuucggacacacc

SEQ ID NO: 16622 - DNA, 21 bp, Homo sapiens
gaagcctgtgtggagtgtgct

SEQ ID NO: 16623 - RNA, 21 nt, RNAi
agccuguguggagugugcuuu

SEQ ID NO: 16624 - RNA, 21 nt, RNAi
uuucggacacaccucacacga

SEQ ID NO: 16625 - DNA, 21 bp, Homo sapiens
gagtgtgctgtgtacacatct

SEQ ID NO: 16626 - RNA, 21 nt, RNAi
gugugcuguguacacaucuuu

SEQ ID NO: 16627 - RNA, 21 nt, RNAi
uucacacgacacauguguaga

SEQ ID NO: 16628 - DNA, 21 bp, Homo sapiens
gagtacagcagtgagcaaagg

SEQ ID NO: 16629 - RNA, 21 nt, RNAi
guacagcagugagcaaagguu

SEQ ID NO: 16630 - RNA, 21 nt, RNAi
uucaugucgucacucguuucc

SEQ ID NO: 16631 - DNA, 21 bp, Homo sapiens
gagcaaaggagacaatattcc

SEQ ID NO: 16632 - RNA, 21 nt, RNAi
gcaaaggagacaauauuccuu

SEQ ID NO: 16633 - RNA, 21 nt, RNAi
uucguuuccucuguuauaagg

SEQ ID NO: 16634 - DNA, 21 bp, Homo sapiens
gagatgacaaactggcatcct

SEQ ID NO: 16635 - RNA, 21 nt, RNAi
gaugacaaacuggcauccuuu

SEQ ID NO: 16636 - RNA, 21 nt, RNAi
uucuacuguuugaccguagga

SEQ ID NO: 16637 - DNA, 21 bp, Homo sapiens
gatgacaaactggcatccttg

SEQ ID NO: 16638 - RNA, 21 nt, RNAi
ugacaaacuggcauccuuguu

SEQ ID NO: 16639 - RNA, 21 nt, RNAi
uuacuguuugaccguaggaac

SEQ ID NO: 16640 - DNA, 21 bp, Homo sapiens
gacaaactggcatccttgagc

SEQ ID NO: 16641 - RNA, 21 nt, RNAi
caaacuggcauccuugagcuu

SEQ ID NO: 16642 - RNA, 21 nt, RNAi
uuguuugaccguaggaacucg

SEQ ID NO: 16643 - DNA, 21 bp, Homo sapiens
gaccataggtcactgtctaca

SEQ ID NO: 16644 - RNA, 21 nt, RNAi
ccauaggucacugucuacauu

SEQ ID NO: 16645 - RNA, 21 nt, RNAi
uugguauccagugacagaugu

SEQ ID NO: 16646 - DNA, 21 bp, Homo sapiens
gatgctggtgctcaggcacct

SEQ ID NO: 16647 - RNA, 21 nt, RNAi
ugcuggugcucaggcaccuuu

SEQ ID NO: 16648 - RNA, 21 nt, RNAi
uuacgaccacgaguccgugga

SEQ ID NO: 16649 - DNA, 21 bp, Homo sapiens
gattaagagattctccttcca

SEQ ID NO: 16650 - RNA, 21 nt, RNAi
uuaagagauucuccuuccauu

SEQ ID NO: 16651 - RNA, 21 nt, RNAi
uuaauucucuaagaggaaggu

SEQ ID NO: 16652 - DNA, 21 bp, Homo sapiens
gagattctccttccaggccta

SEQ ID NO: 16653 - RNA, 21 nt, RNAi
gauucuccuuccaggccuauu

SEQ ID NO: 16654 - RNA, 21 nt, RNAi
uucuaagaggaagguccggau

SEQ ID NO: 16655 - DNA, 21 bp, Homo sapiens
gattctccttccaggcctaag

SEQ ID NO: 16656 - RNA, 21 nt, RNAi
uucuccuuccaggccuaaguu

SEQ ID NO: 16657 - RNA, 21 nt, RNAi
uuaagaggaagguccggauuc

SEQ ID NO: 16658 - DNA, 21 bp, Homo sapiens
gagataagaatccaaactatg

SEQ ID NO: 16659 - RNA, 21 nt, RNAi
gauaagaauccaaacuauguu

SEQ ID NO: 16660 - RNA, 21 nt, RNAi
uucuauucuuagguuugauac

SEQ ID NO: 16661 - DNA, 21 bp, Homo sapiens
gataagaatccaaactatgag

SEQ ID NO: 16662 - RNA, 21 nt, RNAi
uaagaauccaaacuaugaguu

SEQ ID NO: 16663 - RNA, 21 nt, RNAi
uuauucuuagguuugauacuc

SEQ ID NO: 16664 - DNA, 21 bp, Homo sapiens
gaatccaaactatgaggctag

SEQ ID NO: 16665 - RNA, 21 nt, RNAi
auccaaacuaugaggcuaguu

SEQ ID NO: 16666 - RNA, 21 nt, RNAi
uuuagguuugauacuccgauc

SEQ ID NO: 16667 - DNA, 21 bp, Homo sapiens
gaggctagttcttgtctaact

SEQ ID NO: 16668 - RNA, 21 nt, RNAi
ggcuaguucuugucuaacuuu

SEQ ID NO: 16669 - RNA, 21 nt, RNAi
uuccgaucaagaacagauuga

SEQ ID NO: 16670 - DNA, 21 bp, Homo sapiens
gacctgagcaccaaggttgag

SEQ ID NO: 16671 - RNA, 21 nt, RNAi
ccugagcaccaagguugaguu

SEQ ID NO: 16672 - RNA, 21 nt, RNAi
uuggacucgugguuccaacuc

SEQ ID NO: 16673 - DNA, 21 bp, Homo sapiens
gataccatgagtatgtatgtt

SEQ ID NO: 16674 - RNA, 21 nt, RNAi
uaccaugaguauguauguuuu

SEQ ID NO: 16675 - RNA, 21 nt, RNAi
uuaugguacucauacauacaa

SEQ ID NO: 16676 - DNA, 21 bp, Homo sapiens
gagtatgtatgtttacctgtg

SEQ ID NO: 16677 - RNA, 21 nt, RNAi
guauguauguuuaccuguguu

SEQ ID NO: 16678 - RNA, 21 nt, RNAi
uucauacauacaaauggacac

SEQ ID NO: 16679 - DNA, 21 bp, Homo sapiens
tactgctccagatcgtgcaac

SEQ ID NO: 16680 - RNA, 21 nt, RNAi
cugcuccagaucgugcaacuu

SEQ ID NO: 16681 - RNA, 21 nt, RNAi
uugacgaggucuagcacguug

SEQ ID NO: 16682 - DNA, 21 bp, Homo sapiens
tacaggcactgagtatacctg

SEQ ID NO: 16683 - RNA, 21 nt, RNAi
caggcacugaguauaccuguu

SEQ ID NO: 16684 - RNA, 21 nt, RNAi
uuguccgugacucauauggac

SEQ ID NO: 16685 - DNA, 21 bp, Homo sapiens
tactacacgctcagctgccaa

SEQ ID NO: 16686 - RNA, 21 nt, RNAi
cuacacgcucagcugccaauu

SEQ ID NO: 16687 - RNA, 21 nt, RNAi
uugaugugcgagucgacgguu

SEQ ID NO: 16688 - DNA, 21 bp, Homo sapiens
tacacgctcagctgccaacag

SEQ ID NO: 16689 - RNA, 21 nt, RNAi
cacgcucagcugccaacaguu

SEQ ID NO: 16690 - RNA, 21 nt, RNAi
uugugcgagucgacgguuguc

SEQ ID NO: 16691 - DNA, 21 bp, Homo sapiens
tagctccaagccttctcctgc

SEQ ID NO: 16692 - RNA, 21 nt, RNAi
gcuccaagccuucuccugcuu

SEQ ID NO: 16693 - RNA, 21 nt, RNAi
uucgagguucggaagaggacg

SEQ ID NO: 16694 - DNA, 21 bp, Homo sapiens
tacacatctgctttgttccac

SEQ ID NO: 16695 - RNA, 21 nt, RNAi
cacaucugcuuuguuccacuu

SEQ ID NO: 16696 - RNA, 21 nt, RNAi
uuguguagacgaaacaaggug

SEQ ID NO: 16697 - DNA, 21 bp, Homo sapiens
tacagcagtgagcaaaggaga

SEQ ID NO: 16698 - RNA, 21 nt, RNAi
cagcagugagcaaaggagauu

SEQ ID NO: 16699 - RNA, 21 nt, RNAi
uugucgucacucguuuccucu

SEQ ID NO: 16700 - DNA, 21 bp, Homo sapiens
tacactttgtaccagtgtcgg

SEQ ID NO: 16701 - RNA, 21 nt, RNAi
cacuuuguaccagugucgguu

SEQ ID NO: 16702 - RNA, 21 nt, RNAi
uugugaaacauggucacagcc

SEQ ID NO: 16703 - DNA, 21 bp, Homo sapiens
taccagtgtcggcctccactg

SEQ ID NO: 16704 - RNA, 21 nt, RNAi
ccagugucggccuccacuguu

SEQ ID NO: 16705 - RNA, 21 nt, RNAi
uuggucacagccggaggugac

SEQ ID NO: 16706 - DNA, 21 bp, Homo sapiens
taagagattctccttccaggc

SEQ ID NO: 16707 - RNA, 21 nt, RNAi
agagauucuccuuccaggcuu

SEQ ID NO: 16708 - RNA, 21 nt, RNAi
uuucucuaagaggaagguccg

SEQ ID NO: 16709 - DNA, 21 bp, Homo sapiens
taagaatccaaactatgaggc

SEQ ID NO: 16710 - RNA, 21 nt, RNAi
agaauccaaacuaugaggcuu

SEQ ID NO: 16711 - RNA, 21 nt, RNAi
uuucuuagguuugauacuccg

SEQ ID NO: 16712 - DNA, 21 bp, Homo sapiens
tatgaggctagttcttgtcta

SEQ ID NO: 16713 - RNA, 21 nt, RNAi
ugaggcuaguucuugucuauu

SEQ ID NO: 16714 - RNA, 21 nt, RNAi
uuacuccgaucaagaacagau

SEQ ID NO: 16715 - DNA, 21 bp, Homo sapiens
tagttcttgtctaactcaaga

SEQ ID NO: 16716 - RNA, 21 nt, RNAi
guucuugucuaacucaagauu

SEQ ID NO: 16717 - RNA, 21 nt, RNAi
uucaagaacagauugaguucu

SEQ ID NO: 16718 - DNA, 21 bp, Homo sapiens
taactcaagactgttctggaa

SEQ ID NO: 16719 - RNA, 21 nt, RNAi
acucaagacuguucuggaauu

SEQ ID NO: 16720 - RNA, 21 nt, RNAi
uuugaguucugacaagaccuu

SEQ ID NO: 16721 - DNA, 21 bp, Homo sapiens
tatgtatgtttacctgtgcct

SEQ ID NO: 16722 - RNA, 21 nt, RNAi
uguauguuuaccugugccuuu

SEQ ID NO: 16723 - RNA, 21 nt, RNAi
uuacauacaaauggacacgga

SEQ ID NO: 16724 - DNA, 21 bp, Homo sapiens
tatgtttacctgtgcctaata

SEQ ID NO: 16725 - RNA, 21 nt, RNAi
uguuuaccugugccuaauauu

SEQ ID NO: 16726 - RNA, 21 nt, RNAi
uuacaaauggacacggauuau

SEQ ID NO: 16727 - DNA, 21 bp, Homo sapiens
tacctgtgcctaataaaggag

SEQ ID NO: 16728 - RNA, 21 nt, RNAi
ccugugccuaauaaaggaguu

SEQ ID NO: 16729 - RNA, 21 nt, RNAi
uuggacacggauuauuuccuc

SEQ ID NO: 16730 - DNA, 21 bp, Homo sapiens
aagctgtgtcgctttgtcttc

SEQ ID NO: 16731 - RNA, 21 nt, RNAi
gcugugucgcuuugucuucuu

SEQ ID NO: 16732 - RNA, 21 nt, RNAi
uucgacacagcgaaacagaag

SEQ ID NO: 16733 - DNA, 21 bp, Homo sapiens
caggcactgagtatacctgca

SEQ ID NO: 16734 - RNA, 21 nt, RNAi
ggcacugaguauaccugcauu

SEQ ID NO: 16735 - RNA, 21 nt, RNAi
uuccgugacucauauggacgu

SEQ ID NO: 16736 - DNA, 21 bp, Homo sapiens
gagtatacctgcaaggtgtac

SEQ ID NO: 16737 - RNA, 21 nt, RNAi
guauaccugcaagguguacuu

SEQ ID NO: 16738 - RNA, 21 nt, RNAi
uucauauggacguuccacaug

SEQ ID NO: 16739 - DNA, 21 bp, Homo sapiens
gatctcaagctgtgtcgcttt

SEQ ID NO: 16740 - RNA, 21 nt, RNAi
ucucaagcugugucgcuuuuu

SEQ ID NO: 16741 - RNA, 21 nt, RNAi
uuagaguucgacacagcgaaa

SEQ ID NO: 16742 - DNA, 21 bp, Homo sapiens
aagaaacgctaatggactcca

SEQ ID NO: 16743 - RNA, 21 nt, RNAi
gaaacgcuaauggacuccauu

SEQ ID NO: 16744 - RNA, 21 nt, RNAi
uucuuugcgauuaccugaggu

SEQ ID NO: 16745 - DNA, 21 bp, Homo sapiens
aaacgctaatggactccacta

SEQ ID NO: 16746 - RNA, 21 nt, RNAi
acgcuaauggacuccacuauu

SEQ ID NO: 16747 - RNA, 21 nt, RNAi
uuugcgauuaccugaggugau

SEQ ID NO: 16748 - DNA, 21 bp, Homo sapiens
aacgctaatggactccactac

SEQ ID NO: 16749 - RNA, 21 nt, RNAi
cgcuaauggacuccacuacuu

SEQ ID NO: 16750 - RNA, 21 nt, RNAi
uugcgauuaccugaggugaug

SEQ ID NO: 16751 - DNA, 21 bp, Homo sapiens
aatggactccactacagcgac

SEQ ID NO: 16752 - RNA, 21 nt, RNAi
uggacuccacuacagcgacuu

SEQ ID NO: 16753 - RNA, 21 nt, RNAi
uuaccugaggugaugucgcug

SEQ ID NO: 16754 - DNA, 21 bp, Homo sapiens
aagaggtgagtggctacgatg

SEQ ID NO: 16755 - RNA, 21 nt, RNAi
gaggugaguggcuacgauguu

SEQ ID NO: 16756 - RNA, 21 nt, RNAi
uucuccacucaccgaugcuac

SEQ ID NO: 16757 - DNA, 21 bp, Homo sapiens
aacatgaacacgatccgcacg

SEQ ID NO: 16758 - RNA, 21 nt, RNAi
caugaacacgauccgcacguu

SEQ ID NO: 16759 - RNA, 21 nt, RNAi
uuguacuugugcuaggcgugc

SEQ ID NO: 16760 - DNA, 21 bp, Homo sapiens
aacacgatccgcacgtaccag

SEQ ID NO: 16761 - RNA, 21 nt, RNAi
cacgauccgcacguaccaguu

SEQ ID NO: 16762 - RNA, 21 nt, RNAi
uugugcuaggcgugcaugguc

SEQ ID NO: 16763 - DNA, 21 bp, Homo sapiens
aacgtgtttgagtcaagccag

SEQ ID NO: 16764 - RNA, 21 nt, RNAi
cguguuugagucaagccaguu

SEQ ID NO: 16765 - RNA, 21 nt, RNAi
uugcacaaacucaguucgguc

SEQ ID NO: 16766 - DNA, 21 bp, Homo sapiens
aagccagaacaactggctacg

SEQ ID NO: 16767 - RNA, 21 nt, RNAi
gccagaacaacuggcuacguu

SEQ ID NO: 16768 - RNA, 21 nt, RNAi
uucggucuuguugaccgaugc

SEQ ID NO: 16769 - DNA, 21 bp, Homo sapiens
aacaactggctacggaccaag

SEQ ID NO: 16770 - RNA, 21 nt, RNAi
caacuggcuacggaccaaguu

SEQ ID NO: 16771 - RNA, 21 nt, RNAi
uuguugaccgaugccugguuc

SEQ ID NO: 16772 - DNA, 21 bp, Homo sapiens
aactggctacggaccaagttt

SEQ ID NO: 16773 - RNA, 21 nt, RNAi
cuggcuacggaccaaguuuuu

SEQ ID NO: 16774 - RNA, 21 nt, RNAi
uugaccgaugccugguucaaa

SEQ ID NO: 16775 - DNA, 21 bp, Homo sapiens
aaggagaccttcaacctctat

SEQ ID NO: 16776 - RNA, 21 nt, RNAi
ggagaccuucaaccucuauuu

SEQ ID NO: 16777 - RNA, 21 nt, RNAi
uuccucuggaaguuggagaua

SEQ ID NO: 16778 - DNA, 21 bp, Homo sapiens
aacctctattactatgaggct

SEQ ID NO: 16779 - RNA, 21 nt, RNAi
ccucuauuacuaugaggcuuu

SEQ ID NO: 16780 - RNA, 21 nt, RNAi
uuggagauaaugauacuccga

SEQ ID NO: 16781 - DNA, 21 bp, Homo sapiens
aactggatggagaatccatgg

SEQ ID NO: 16782 - RNA, 21 nt, RNAi
cuggauggagaauccaugguu

SEQ ID NO: 16783 - RNA, 21 nt, RNAi
uugaccuaccucuuagguacc

SEQ ID NO: 16784 - DNA, 21 bp, Homo sapiens
aaggtggataccattgcagcc

SEQ ID NO: 16785 - RNA, 21 nt, RNAi
gguggauaccauugcagccuu

SEQ ID NO: 16786 - RNA, 21 nt, RNAi
uuccaccuaugguaacgucgg

SEQ ID NO: 16787 - DNA, 21 bp, Homo sapiens
aaatcaacaccgaggtgcgga

SEQ ID NO: 16788 - RNA, 21 nt, RNAi
aucaacaccgaggugcggauu

SEQ ID NO: 16789 - RNA, 21 nt, RNAi
uuuaguuguggcuccacgccu

SEQ ID NO: 16790 - DNA, 21 bp, Homo sapiens
aatcaacaccgaggtgcggag

SEQ ID NO: 16791 - RNA, 21 nt, RNAi
ucaacaccgaggugcggaguu

SEQ ID NO: 16792 - RNA, 21 nt, RNAi
uuaguuguggcuccacgccuc

SEQ ID NO: 16793 - DNA, 21 bp, Homo sapiens
aacaccgaggtgcggagcttc

SEQ ID NO: 16794 - RNA, 21 nt, RNAi
caccgaggugcggagcuucuu

SEQ ID NO: 16795 - RNA, 21 nt, RNAi
uuguggcuccacgccucgaag

SEQ ID NO: 16796 - DNA, 21 bp, Homo sapiens
aatggcgccatcttccaggaa

SEQ ID NO: 16797 - RNA, 21 nt, RNAi
uggcgccaucuuccaggaauu

SEQ ID NO: 16798 - RNA, 21 nt, RNAi
uuaccgcgguagaagguccuu

SEQ ID NO: 16799 - DNA, 21 bp, Homo sapiens
aatgcggaagaggtggatgta

SEQ ID NO: 16800 - RNA, 21 nt, RNAi
ugcggaagagguggauguauu

SEQ ID NO: 16801 - RNA, 21 nt, RNAi
uuacgccuucuccaccuacau

SEQ ID NO: 16802 - DNA, 21 bp, Homo sapiens
aaagcaggcttcgaggccgtt

SEQ ID NO: 16803 - RNA, 21 nt, RNAi
agcaggcuucgaggccguuuu

SEQ ID NO: 16804 - RNA, 21 nt, RNAi
uuucguccgaagcuccggcaa

SEQ ID NO: 16805 - DNA, 21 bp, Homo sapiens
aagcaggcttcgaggccgttg

SEQ ID NO: 16806 - RNA, 21 nt, RNAi
gcaggcuucgaggccguuguu

SEQ ID NO: 16807 - RNA, 21 nt, RNAi
uucguccgaagcuccggcaac

SEQ ID NO: 16808 - DNA, 21 bp, Homo sapiens
aatggcaccgtctgccgaggt

SEQ ID NO: 16809 - RNA, 21 nt, RNAi
uggcaccgucugccgagguuu

SEQ ID NO: 16810 - RNA, 21 nt, RNAi
uuaccguggcagacggcucca

SEQ ID NO: 16811 - DNA, 21 bp, Homo sapiens
aacagccggaccacttctgaa

SEQ ID NO: 16812 - RNA, 21 nt, RNAi
cagccggaccacuucugaauu

SEQ ID NO: 16813 - RNA, 21 nt, RNAi
uugucggccuggugaagacuu

SEQ ID NO: 16814 - DNA, 21 bp, Homo sapiens
aactgtgtctgccgcaatggc

SEQ ID NO: 16815 - RNA, 21 nt, RNAi
cugugucugccgcaauggcuu

SEQ ID NO: 16816 - RNA, 21 nt, RNAi
uugacacagacggcguuaccg

SEQ ID NO: 16817 - DNA, 21 bp, Homo sapiens
aatggctactacagagcagac

SEQ ID NO: 16818 - RNA, 21 nt, RNAi
uggcuacuacagagcagacuu

SEQ ID NO: 16819 - RNA, 21 nt, RNAi
uuaccgaugaugucucgucug

SEQ ID NO: 16820 - DNA, 21 bp, Homo sapiens
aacatcatctgcaagagctgt

SEQ ID NO: 16821 - RNA, 21 nt, RNAi
caucaucugcaagagcuguuu

SEQ ID NO: 16822 - RNA, 21 nt, RNAi
uuguaguagacguucucgaca

SEQ ID NO: 16823 - DNA, 21 bp, Homo sapiens
aatgtacagtacgcaccacgc

SEQ ID NO: 16824 - RNA, 21 nt, RNAi
uguacaguacgcaccacgcuu

SEQ ID NO: 16825 - RNA, 21 nt, RNAi
uuacaugucaugcguggugcg

SEQ ID NO: 16826 - DNA, 21 bp, Homo sapiens
aacggcgttactgaccagagc

SEQ ID NO: 16827 - RNA, 21 nt, RNAi
cggcguuacugaccagagcuu

SEQ ID NO: 16828 - RNA, 21 nt, RNAi
uugccgcaaugacuggucucg

SEQ ID NO: 16829 - DNA, 21 bp, Homo sapiens
aacatcaccaccaaccaggca

SEQ ID NO: 16830 - RNA, 21 nt, RNAi
caucaccaccaaccaggcauu

SEQ ID NO: 16831 - RNA, 21 nt, RNAi
uuguaguggugguugguccgu

SEQ ID NO: 16832 - DNA, 21 bp, Homo sapiens
aaccaggcagctccatcggca

SEQ ID NO: 16833 - RNA, 21 nt, RNAi
ccaggcagcuccaucggcauu

SEQ ID NO: 16834 - RNA, 21 nt, RNAi
uugguccgucgagguagccgu

SEQ ID NO: 16835 - DNA, 21 bp, Homo sapiens
aatggcgtgatcctggactat

SEQ ID NO: 16836 - RNA, 21 nt, RNAi
uggcgugauccuggacuauuu

SEQ ID NO: 16837 - RNA, 21 nt, RNAi
uuaccgcacuaggaccugaua

SEQ ID NO: 16838 - DNA, 21 bp, Homo sapiens
aaggagctcagtgagtacaac

SEQ ID NO: 16839 - RNA, 21 nt, RNAi
ggagcucagugaguacaacuu

SEQ ID NO: 16840 - RNA, 21 nt, RNAi
uuccucgagucacucauguug

SEQ ID NO: 16841 - DNA, 21 bp, Homo sapiens
aagatgtacttccagaccatg

SEQ ID NO: 16842 - RNA, 21 nt, RNAi
gauguacuuccagaccauguu

SEQ ID NO: 16843 - RNA, 21 nt, RNAi
uucuacaugaaggucugguac

SEQ ID NO: 16844 - DNA, 21 bp, Homo sapiens
aagccgagtaccagacaagca

SEQ ID NO: 16845 - RNA, 21 nt, RNAi
gccgaguaccagacaagcauu

SEQ ID NO: 16846 - RNA, 21 nt, RNAi
uucggcucauggucuguucgu

SEQ ID NO: 16847 - DNA, 21 bp, Homo sapiens
aagcatccaggagaagttgcc

SEQ ID NO: 16848 - RNA, 21 nt, RNAi
gcauccaggagaaguugccuu

SEQ ID NO: 16849 - RNA, 21 nt, RNAi
uucguagguccucuucaacgg

SEQ ID NO: 16850 - DNA, 21 bp, Homo sapiens
aagttgccactcatcatcggc

SEQ ID NO: 16851 - RNA, 21 nt, RNAi
guugccacucaucaucggcuu

SEQ ID NO: 16852 - RNA, 21 nt, RNAi
uucaacggugaguaguagccg

SEQ ID NO: 16853 - DNA, 21 bp, Homo sapiens
aagctgcaacactacaccagt

SEQ ID NO: 16854 - RNA, 21 nt, RNAi
gcugcaacacuacaccaguuu

SEQ ID NO: 16855 - RNA, 21 nt, RNAi
uucgacguugugaugugguca

SEQ ID NO: 16856 - DNA, 21 bp, Homo sapiens
aacactacaccagtggccaca

SEQ ID NO: 16857 - RNA, 21 nt, RNAi
cacuacaccaguggccacauu

SEQ ID NO: 16858 - RNA, 21 nt, RNAi
uugugauguggucaccggugu

SEQ ID NO: 16859 - DNA, 21 bp, Homo sapiens
aagatctacatcgatcctttc

SEQ ID NO: 16860 - RNA, 21 nt, RNAi
gaucuacaucgauccuuucuu

SEQ ID NO: 16861 - RNA, 21 nt, RNAi
uucuagauguagcuaggaaag

SEQ ID NO: 16862 - DNA, 21 bp, Homo sapiens
aaggaaattgacatctcctgt

SEQ ID NO: 16863 - RNA, 21 nt, RNAi
ggaaauugacaucuccuguuu

SEQ ID NO: 16864 - RNA, 21 nt, RNAi
uuccuuuaacuguagaggaca

SEQ ID NO: 16865 - DNA, 21 bp, Homo sapiens
aaattgacatctcctgtgtca

SEQ ID NO: 16866 - RNA, 21 nt, RNAi
auugacaucuccugugucauu

SEQ ID NO: 16867 - RNA, 21 nt, RNAi
uuuaacuguagaggacacagu

SEQ ID NO: 16868 - DNA, 21 bp, Homo sapiens
aattgacatctcctgtgtcaa

SEQ ID NO: 16869 - RNA, 21 nt, RNAi
uugacaucuccugugucaauu

SEQ ID NO: 16870 - RNA, 21 nt, RNAi
uuaacuguagaggacacaguu

SEQ ID NO: 16871 - DNA, 21 bp, Homo sapiens
aaattgagcaggtgatcggag

SEQ ID NO: 16872 - RNA, 21 nt, RNAi
auugagcaggugaucggaguu

SEQ ID NO: 16873 - RNA, 21 nt, RNAi
uuuaacucguccacuagccuc

SEQ ID NO: 16874 - DNA, 21 bp, Homo sapiens
aattgagcaggtgatcggagc

SEQ ID NO: 16875 - RNA, 21 nt, RNAi
uugagcaggugaucggagcuu

SEQ ID NO: 16876 - RNA, 21 nt, RNAi
uuaacucguccacuagccucg

SEQ ID NO: 16877 - DNA, 21 bp, Homo sapiens
aagctgccaggcaagagagag

SEQ ID NO: 16878 - RNA, 21 nt, RNAi
gcugccaggcaagagagaguu

SEQ ID NO: 16879 - RNA, 21 nt, RNAi
uucgacgguccguucucucuc

SEQ ID NO: 16880 - DNA, 21 bp, Homo sapiens
aagagagagatctttgtggcc

SEQ ID NO: 16881 - RNA, 21 nt, RNAi
gagagagaucuuuguggccuu

SEQ ID NO: 16882 - RNA, 21 nt, RNAi
uucucucucuagaaacaccgg

SEQ ID NO: 16883 - DNA, 21 bp, Homo sapiens
aagagcacacctgtgatgatc

SEQ ID NO: 16884 - RNA, 21 nt, RNAi
gagcacaccugugaugaucuu

SEQ ID NO: 16885 - RNA, 21 nt, RNAi
uucucguguggacacuacuag

SEQ ID NO: 16886 - DNA, 21 bp, Homo sapiens
aagtacctggcagacatgaac

SEQ ID NO: 16887 - RNA, 21 nt, RNAi
guaccuggcagacaugaacuu

SEQ ID NO: 16888 - RNA, 21 nt, RNAi
uucauggaccgucuguacuug

SEQ ID NO: 16889 - DNA, 21 bp, Homo sapiens
aactatgttcaccgtgacctg

SEQ ID NO: 16890 - RNA, 21 nt, RNAi
cuauguucaccgugaccuguu

SEQ ID NO: 16891 - RNA, 21 nt, RNAi
uugauacaaguggcacuggac

SEQ ID NO: 16892 - DNA, 21 bp, Homo sapiens
aacatcctcgtcaacagcaac

SEQ ID NO: 16893 - RNA, 21 nt, RNAi
cauccucgucaacagcaacuu

SEQ ID NO: 16894 - RNA, 21 nt, RNAi
uuguaggagcaguugucguug

SEQ ID NO: 16895 - DNA, 21 bp, Homo sapiens
aacagcaacctggtctgcaag

SEQ ID NO: 16896 - RNA, 21 nt, RNAi
cagcaaccuggucugcaaguu

SEQ ID NO: 16897 - RNA, 21 nt, RNAi
uugucguuggaccagacguuc

SEQ ID NO: 16898 - DNA, 21 bp, Homo sapiens
aacctggtctgcaaggtgtcg

SEQ ID NO: 16899 - RNA, 21 nt, RNAi
ccuggucugcaaggugucguu

SEQ ID NO: 16900 - RNA, 21 nt, RNAi
uuggaccagacguuccacagc

SEQ ID NO: 16901 - DNA, 21 bp, Homo sapiens
aagccatccagtaccggaagt

SEQ ID NO: 16902 - RNA, 21 nt, RNAi
gccauccaguaccggaaguuu

SEQ ID NO: 16903 - RNA, 21 nt, RNAi
uucgguaggucauggccuuca

SEQ ID NO: 16904 - DNA, 21 bp, Homo sapiens
aagttcacctcggccagtgat

SEQ ID NO: 16905 - RNA, 21 nt, RNAi
guucaccucggccagugauuu

SEQ ID NO: 16906 - RNA, 21 nt, RNAi
uucaaguggagccggucacua

SEQ ID NO: 16907 - DNA, 21 bp, Homo sapiens
aaccaggatgtaatcaatgcc

SEQ ID NO: 16908 - RNA, 21 nt, RNAi
ccaggauguaaucaaugccuu

SEQ ID NO: 16909 - RNA, 21 nt, RNAi
uugguccuacauuaguuacgg

SEQ ID NO: 16910 - DNA, 21 bp, Homo sapiens
aatcaatgccattgagcagga

SEQ ID NO: 16911 - RNA, 21 nt, RNAi
ucaaugccauugagcaggauu

SEQ ID NO: 16912 - RNA, 21 nt, RNAi
uuaguuacgguaacucguccu

SEQ ID NO: 16913 - DNA, 21 bp, Homo sapiens
aatgccattgagcaggactat

SEQ ID NO: 16914 - RNA, 21 nt, RNAi
ugccauugagcaggacuauuu

SEQ ID NO: 16915 - RNA, 21 nt, RNAi
uuacgguaacucguccugaua

SEQ ID NO: 16916 - DNA, 21 bp, Homo sapiens
aactcatgctggactgttggc

SEQ ID NO: 16917 - RNA, 21 nt, RNAi
cucaugcuggacuguuggcuu

SEQ ID NO: 16918 - RNA, 21 nt, RNAi
uugaguacgaccugacaaccg

SEQ ID NO: 16919 - DNA, 21 bp, Homo sapiens
aagttcggccaaattgtcaac

SEQ ID NO: 16920 - RNA, 21 nt, RNAi
guucggccaaauugucaacuu

SEQ ID NO: 16921 - RNA, 21 nt, RNAi
uucaagccgguuuaacaguug

SEQ ID NO: 16922 - DNA, 21 bp, Homo sapiens
aaattgtcaacacgctagaca

SEQ ID NO: 16923 - RNA, 21 nt, RNAi
auugucaacacgcuagacauu

SEQ ID NO: 16924 - RNA, 21 nt, RNAi
uuuaacaguugugcgaucugu

SEQ ID NO: 16925 - DNA, 21 bp, Homo sapiens
aattgtcaacacgctagacaa

SEQ ID NO: 16926 - RNA, 21 nt, RNAi
uugucaacacgcuagacaauu

SEQ ID NO: 16927 - RNA, 21 nt, RNAi
uuaacaguugugcgaucuguu

SEQ ID NO: 16928 - DNA, 21 bp, Homo sapiens
aacacgctagacaagatgatc

SEQ ID NO: 16929 - RNA, 21 nt, RNAi
cacgcuagacaagaugaucuu

SEQ ID NO: 16930 - RNA, 21 nt, RNAi
uugugcgaucuguucuacuag

SEQ ID NO: 16931 - DNA, 21 bp, Homo sapiens
aacagcctcaaagccatggcg

SEQ ID NO: 16932 - RNA, 21 nt, RNAi
cagccucaaagccauggcguu

SEQ ID NO: 16933 - RNA, 21 nt, RNAi
uugucggaguuucgguaccgc

SEQ ID NO: 16934 - DNA, 21 bp, Homo sapiens
aacacggtggacgagtggctg

SEQ ID NO: 16935 - RNA, 21 nt, RNAi
cacgguggacgaguggcuguu

SEQ ID NO: 16936 - RNA, 21 nt, RNAi
uugugccaccugcucaccgac

SEQ ID NO: 16937 - DNA, 21 bp, Homo sapiens
aaggagagcttcgccaatgcc

SEQ ID NO: 16938 - RNA, 21 nt, RNAi
ggagagcuucgccaaugccuu

SEQ ID NO: 16939 - RNA, 21 nt, RNAi
uuccucucgaagcgguuacgg

SEQ ID NO: 16940 - DNA, 21 bp, Homo sapiens
aatgccggcttcacctccttt

SEQ ID NO: 16941 - RNA, 21 nt, RNAi
ugccggcuucaccuccuuuuu

SEQ ID NO: 16942 - RNA, 21 nt, RNAi
uuacggccgaaguggaggaaa

SEQ ID NO: 16943 - DNA, 21 bp, Homo sapiens
aaatcctgaacagtatccagg

SEQ ID NO: 16944 - RNA, 21 nt, RNAi
auccugaacaguauccagguu

SEQ ID NO: 16945 - RNA, 21 nt, RNAi
uuuaggacuugucauaggucc

SEQ ID NO: 16946 - DNA, 21 bp, Homo sapiens
aatcctgaacagtatccaggt

SEQ ID NO: 16947 - RNA, 21 nt, RNAi
uccugaacaguauccagguuu

SEQ ID NO: 16948 - RNA, 21 nt, RNAi
uuaggacuugucauaggucca

SEQ ID NO: 16949 - DNA, 21 bp, Homo sapiens
aacagtatccaggtgatgcgg

SEQ ID NO: 16950 - RNA, 21 nt, RNAi
caguauccaggugaugcgguu

SEQ ID NO: 16951 - RNA, 21 nt, RNAi
uugucauagguccacuacgcc

SEQ ID NO: 16952 - DNA, 21 bp, Homo sapiens
aaccagattcagtctgtggag

SEQ ID NO: 16953 - RNA, 21 nt, RNAi
ccagauucagucuguggaguu

SEQ ID NO: 16954 - RNA, 21 nt, RNAi
uuggucuaagucagacaccuc

SEQ ID NO: 16955 - DNA, 21 bp, Homo sapiens
aagaaccaagcggtgccagcc

SEQ ID NO: 16956 - RNA, 21 nt, RNAi
gaaccaagcggugccagccuu

SEQ ID NO: 16957 - RNA, 21 nt, RNAi
uucuugguucgccacggucgg

SEQ ID NO: 16958 - DNA, 21 bp, Homo sapiens
aaacatgcaactcaaacgacg

SEQ ID NO: 16959 - RNA, 21 nt, RNAi
acaugcaacucaaacgacguu

SEQ ID NO: 16960 - RNA, 21 nt, RNAi
uuuguacguugaguuugcugc

SEQ ID NO: 16961 - DNA, 21 bp, Homo sapiens
aacatgcaactcaaacgacgg

SEQ ID NO: 16962 - RNA, 21 nt, RNAi
caugcaacucaaacgacgguu

SEQ ID NO: 16963 - RNA, 21 nt, RNAi
uuguacguugaguuugcugcc

SEQ ID NO: 16964 - DNA, 21 bp, Homo sapiens
aaagaggattctcataaggaa

SEQ ID NO: 16965 - RNA, 21 nt, RNAi
agaggauucucauaaggaauu

SEQ ID NO: 16966 - RNA, 21 nt, RNAi
uuucuccuaagaguauuccuu

SEQ ID NO: 16967 - DNA, 21 bp, Homo sapiens
aagaggattctcataaggaaa

SEQ ID NO: 16968 - RNA, 21 nt, RNAi
gaggauucucauaaggaaauu

SEQ ID NO: 16969 - RNA, 21 nt, RNAi
uucuccuaagaguauuccuuu

SEQ ID NO: 16970 - DNA, 21 bp, Homo sapiens
aaggaaagcaatgactgttct

SEQ ID NO: 16971 - RNA, 21 nt, RNAi
ggaaagcaaugacuguucuuu

SEQ ID NO: 16972 - RNA, 21 nt, RNAi
uuccuuucguuacugacaaga

SEQ ID NO: 16973 - DNA, 21 bp, Homo sapiens
aaagcaatgactgttcttgcg

SEQ ID NO: 16974 - RNA, 21 nt, RNAi
agcaaugacuguucuugcguu

SEQ ID NO: 16975 - RNA, 21 nt, RNAi
uuucguuacugacaagaacgc

SEQ ID NO: 16976 - DNA, 21 bp, Homo sapiens
aagcaatgactgttcttgcgg

SEQ ID NO: 16977 - RNA, 21 nt, RNAi
gcaaugacuguucuugcgguu

SEQ ID NO: 16978 - RNA, 21 nt, RNAi
uucguuacugacaagaacgcc

SEQ ID NO: 16979 - DNA, 21 bp, Homo sapiens
aaagcagtttctctccaactc

SEQ ID NO: 16980 - RNA, 21 nt, RNAi
agcaguuucucuccaacucuu

SEQ ID NO: 16981 - RNA, 21 nt, RNAi
uuucgucaaagagagguugag

SEQ ID NO: 16982 - DNA, 21 bp, Homo sapiens
aagcagtttctctccaactcc

SEQ ID NO: 16983 - RNA, 21 nt, RNAi
gcaguuucucuccaacuccuu

SEQ ID NO: 16984 - RNA, 21 nt, RNAi
uucgucaaagagagguugagg

SEQ ID NO: 16985 - DNA, 21 bp, Homo sapiens
aaggtgacctggccagagcca

SEQ ID NO: 16986 - RNA, 21 nt, RNAi
ggugaccuggccagagccauu

SEQ ID NO: 16987 - RNA, 21 nt, RNAi
uuccacuggaccggucucggu

SEQ ID NO: 16988 - DNA, 21 bp, Homo sapiens
aacaaccaagcgcctggagga

SEQ ID NO: 16989 - RNA, 21 nt, RNAi
caaccaagcgccuggaggauu

SEQ ID NO: 16990 - RNA, 21 nt, RNAi
uuguugguucgcggaccuccu

SEQ ID NO: 16991 - DNA, 21 bp, Homo sapiens
aaatctattcctgccaccact

SEQ ID NO: 16992 - RNA, 21 nt, RNAi
aucuauuccugccaccacuuu

SEQ ID NO: 16993 - RNA, 21 nt, RNAi
uuuagauaaggacggugguga

SEQ ID NO: 16994 - DNA, 21 bp, Homo sapiens
aatctattcctgccaccactg

SEQ ID NO: 16995 - RNA, 21 nt, RNAi
ucuauuccugccaccacuguu

SEQ ID NO: 16996 - RNA, 21 nt, RNAi
uuagauaaggacgguggugac

SEQ ID NO: 16997 - DNA, 21 bp, Homo sapiens
aaactccaatgaaagacactg

SEQ ID NO: 16998 - RNA, 21 nt, RNAi
acuccaaugaaagacacuguu

SEQ ID NO: 16999 - RNA, 21 nt, RNAi
uuugagguuacuuucugugac

SEQ ID NO: 17000 - DNA, 21 bp, Homo sapiens
aactccaatgaaagacactgt

SEQ ID NO: 17001 - RNA, 21 nt, RNAi
cuccaaugaaagacacuguuu

SEQ ID NO: 17002 - RNA, 21 nt, RNAi
uugagguuacuuucugugaca

SEQ ID NO: 17003 - DNA, 21 bp, Homo sapiens
aatgaaagacactgtttctcc

SEQ ID NO: 17004 - RNA, 21 nt, RNAi
ugaaagacacuguuucuccuu

SEQ ID NO: 17005 - RNA, 21 nt, RNAi
uuacuuucugugacaaagagg

SEQ ID NO: 17006 - DNA, 21 bp, Homo sapiens
aaagacactgtttctcctgtt

SEQ ID NO: 17007 - RNA, 21 nt, RNAi
agacacuguuucuccuguuuu

SEQ ID NO: 17008 - RNA, 21 nt, RNAi
uuucugugacaaagaggacaa

SEQ ID NO: 17009 - DNA, 21 bp, Homo sapiens
aagacactgtttctcctgttg

SEQ ID NO: 17010 - RNA, 21 nt, RNAi
gacacuguuucuccuguuguu

SEQ ID NO: 17011 - RNA, 21 nt, RNAi
uucugugacaaagaggacaac

SEQ ID NO: 17012 - DNA, 21 bp, Homo sapiens
aaaggtcagccttcctgagga

SEQ ID NO: 17013 - RNA, 21 nt, RNAi
aggucagccuuccugaggauu

SEQ ID NO: 17014 - RNA, 21 nt, RNAi
uuuccagucggaaggacuccu

SEQ ID NO: 17015 - DNA, 21 bp, Homo sapiens
aaggtcagccttcctgaggat

SEQ ID NO: 17016 - RNA, 21 nt, RNAi
ggucagccuuccugaggauuu

SEQ ID NO: 17017 - RNA, 21 nt, RNAi
uuccagucggaaggacuccua

SEQ ID NO: 17018 - DNA, 21 bp, Homo sapiens
aatgacaatgaagtgacactt

SEQ ID NO: 17019 - RNA, 21 nt, RNAi
ugacaaugaagugacacuuuu

SEQ ID NO: 17020 - RNA, 21 nt, RNAi
uuacuguuacuucacugugaa

SEQ ID NO: 17021 - DNA, 21 bp, Homo sapiens
aatgaagtgacactttgacat

SEQ ID NO: 17022 - RNA, 21 nt, RNAi
ugaagugacacuuugacauuu

SEQ ID NO: 17023 - RNA, 21 nt, RNAi
uuacuucacugugaaacugua

SEQ ID NO: 17024 - DNA, 21 bp, Homo sapiens
aagtgacactttgacatttcc

SEQ ID NO: 17025 - RNA, 21 nt, RNAi
gugacacuuugacauuuccuu

SEQ ID NO: 17026 - RNA, 21 nt, RNAi
uucacugugaaacuguaaagg

SEQ ID NO: 17027 - DNA, 21 bp, Homo sapiens
aagaaggtgctttctgcttac

SEQ ID NO: 17028 - RNA, 21 nt, RNAi
gaaggugcuuucugcuuacuu

SEQ ID NO: 17029 - RNA, 21 nt, RNAi
uucuuccacgaaagacgaaug

SEQ ID NO: 17030 - DNA, 21 bp, Homo sapiens
aaggtgctttctgcttactga

SEQ ID NO: 17031 - RNA, 21 nt, RNAi
ggugcuuucugcuuacugauu

SEQ ID NO: 17032 - RNA, 21 nt, RNAi
uuccacgaaagacgaaugacu

SEQ ID NO: 17033 - DNA, 21 bp, Homo sapiens
aaaccaggctgcatcggaggc

SEQ ID NO: 17034 - RNA, 21 nt, RNAi
accaggcugcaucggaggcuu

SEQ ID NO: 17035 - RNA, 21 nt, RNAi
uuugguccgacguagccuccg

SEQ ID NO: 17036 - DNA, 21 bp, Homo sapiens
aagcagagcaatcagttagtg

SEQ ID NO: 17037 - RNA, 21 nt, RNAi
gcagagcaaucaguuaguguu

SEQ ID NO: 17038 - RNA, 21 nt, RNAi
uucgucucguuagucaaucac

SEQ ID NO: 17039 - DNA, 21 bp, Homo sapiens
aataaacatacgtgtgcatgt

SEQ ID NO: 17040 - RNA, 21 nt, RNAi
uaaacauacgugugcauguuu

SEQ ID NO: 17041 - RNA, 21 nt, RNAi
uuauuuguaugcacacguaca

SEQ ID NO: 17042 - DNA, 21 bp, Homo sapiens
aaacatacgtgtgcatgtgtc

SEQ ID NO: 17043 - RNA, 21 nt, RNAi
acauacgugugcaugugucuu

SEQ ID NO: 17044 - RNA, 21 nt, RNAi
uuuguaugcacacguacacag

SEQ ID NO: 17045 - DNA, 21 bp, Homo sapiens
aacatacgtgtgcatgtgtct

SEQ ID NO: 17046 - RNA, 21 nt, RNAi
cauacgugugcaugugucuuu

SEQ ID NO: 17047 - RNA, 21 nt, RNAi
uuguaugcacacguacacaga

SEQ ID NO: 17048 - DNA, 21 bp, Homo sapiens
aattgccacactgtctttcac

SEQ ID NO: 17049 - RNA, 21 nt, RNAi
uugccacacugucuuucacuu

SEQ ID NO: 17050 - RNA, 21 nt, RNAi
uuaacggugugacagaaagug

SEQ ID NO: 17051 - DNA, 21 bp, Homo sapiens
aactaatttacactcctacca

SEQ ID NO: 17052 - RNA, 21 nt, RNAi
cuaauuuacacuccuaccauu

SEQ ID NO: 17053 - RNA, 21 nt, RNAi
uugauuaaaugugaggauggu

SEQ ID NO: 17054 - DNA, 21 bp, Homo sapiens
aatttacactcctaccaacag

SEQ ID NO: 17055 - RNA, 21 nt, RNAi
uuuacacuccuaccaacaguu

SEQ ID NO: 17056 - RNA, 21 nt, RNAi
uuaaaugugaggaugguuguc

SEQ ID NO: 17057 - DNA, 21 bp, Homo sapiens
aaagtcttcctgtttctccac

SEQ ID NO: 17058 - RNA, 21 nt, RNAi
agucuuccuguuucuccacuu

SEQ ID NO: 17059 - RNA, 21 nt, RNAi
uuucagaaggacaaagaggug

SEQ ID NO: 17060 - DNA, 21 bp, Homo sapiens
aagtcttcctgtttctccaca

SEQ ID NO: 17061 - RNA, 21 nt, RNAi
gucuuccuguuucuccacauu

SEQ ID NO: 17062 - RNA, 21 nt, RNAi
uucagaaggacaaagaggugu

SEQ ID NO: 17063 - DNA, 21 bp, Homo sapiens
aatgattgccattctaactgg

SEQ ID NO: 17064 - RNA, 21 nt, RNAi
ugauugccauucuaacugguu

SEQ ID NO: 17065 - RNA, 21 nt, RNAi
uuacuaacgguaagauugacc

SEQ ID NO: 17066 - DNA, 21 bp, Homo sapiens
aactggtgtgagatggtatct

SEQ ID NO: 17067 - RNA, 21 nt, RNAi
cuggugugagaugguaucuuu

SEQ ID NO: 17068 - RNA, 21 nt, RNAi
uugaccacacucuaccauaga

SEQ ID NO: 17069 - DNA, 21 bp, Homo sapiens
aatgaccagtgaagatgagct

SEQ ID NO: 17070 - RNA, 21 nt, RNAi
ugaccagugaagaugagcuuu

SEQ ID NO: 17071 - RNA, 21 nt, RNAi
uuacuggucacuucuacucga

SEQ ID NO: 17072 - DNA, 21 bp, Homo sapiens
aagtgtctgttcataaccttc

SEQ ID NO: 17073 - RNA, 21 nt, RNAi
gugucuguucauaaccuucuu

SEQ ID NO: 17074 - RNA, 21 nt, RNAi
uucacagacaaguauuggaag

SEQ ID NO: 17075 - DNA, 21 bp, Homo sapiens
aaagcatgaagacaagattag

SEQ ID NO: 17076 - RNA, 21 nt, RNAi
agcaugaagacaagauuaguu

SEQ ID NO: 17077 - RNA, 21 nt, RNAi
uuucguacuucuguucuaauc

SEQ ID NO: 17078 - DNA, 21 bp, Homo sapiens
aagcatgaagacaagattaga

SEQ ID NO: 17079 - RNA, 21 nt, RNAi
gcaugaagacaagauuagauu

SEQ ID NO: 17080 - RNA, 21 nt, RNAi
uucguacuucuguucuaaucu

SEQ ID NO: 17081 - DNA, 21 bp, Homo sapiens
aaaggaacaaacaaagcgtcc

SEQ ID NO: 17082 - RNA, 21 nt, RNAi
aggaacaaacaaagcguccuu

SEQ ID NO: 17083 - RNA, 21 nt, RNAi
uuuccuuguuuguuucgcagg

SEQ ID NO: 17084 - DNA, 21 bp, Homo sapiens
aaggaacaaacaaagcgtcca

SEQ ID NO: 17085 - RNA, 21 nt, RNAi
ggaacaaacaaagcguccauu

SEQ ID NO: 17086 - RNA, 21 nt, RNAi
uuccuuguuuguuucgcaggu

SEQ ID NO: 17087 - DNA, 21 bp, Homo sapiens
aacaaacaaagcgtccaagaa

SEQ ID NO: 17088 - RNA, 21 nt, RNAi
caaacaaagcguccaagaauu

SEQ ID NO: 17089 - RNA, 21 nt, RNAi
uuguuuguuucgcagguucuu

SEQ ID NO: 17090 - DNA, 21 bp, Homo sapiens
aaacaaagcgtccaagaaata

SEQ ID NO: 17091 - RNA, 21 nt, RNAi
acaaagcguccaagaaauauu

SEQ ID NO: 17092 - RNA, 21 nt, RNAi
uuuguuucgcagguucuuuau

SEQ ID NO: 17093 - DNA, 21 bp, Homo sapiens
aacaaagcgtccaagaaatat

SEQ ID NO: 17094 - RNA, 21 nt, RNAi
caaagcguccaagaaauauuu

SEQ ID NO: 17095 - RNA, 21 nt, RNAi
uuguuucgcagguucuuuaua

SEQ ID NO: 17096 - DNA, 21 bp, Homo sapiens
aagaacaaacttacgtttgac

SEQ ID NO: 17097 - RNA, 21 nt, RNAi
gaacaaacuuacguuugacuu

SEQ ID NO: 17098 - RNA, 21 nt, RNAi
uucuuguuugaaugcaaacug

SEQ ID NO: 17099 - DNA, 21 bp, Homo sapiens
aacaaacttacgtttgactgg

SEQ ID NO: 17100 - RNA, 21 nt, RNAi
caaacuuacguuugacugguu

SEQ ID NO: 17101 - RNA, 21 nt, RNAi
uuguuugaaugcaaacugacc

SEQ ID NO: 17102 - DNA, 21 bp, Homo sapiens
aaacttacgtttgactggtgt

SEQ ID NO: 17103 - RNA, 21 nt, RNAi
acuuacguuugacugguguuu

SEQ ID NO: 17104 - RNA, 21 nt, RNAi
uuugaaugcaaacugaccaca

SEQ ID NO: 17105 - DNA, 21 bp, Homo sapiens
aacttacgtttgactggtgtg

SEQ ID NO: 17106 - RNA, 21 nt, RNAi
cuuacguuugacugguguguu

SEQ ID NO: 17107 - RNA, 21 nt, RNAi
uugaaugcaaacugaccacac

SEQ ID NO: 17108 - DNA, 21 bp, Homo sapiens
aacactcttcaggatattatc

SEQ ID NO: 17109 - RNA, 21 nt, RNAi
cacucuucaggauauuaucuu

SEQ ID NO: 17110 - RNA, 21 nt, RNAi
uugugagaaguccuauaauag

SEQ ID NO: 17111 - DNA, 21 bp, Homo sapiens
aacttctccaacctagcaaga

SEQ ID NO: 17112 - RNA, 21 nt, RNAi
cuucuccaaccuagcaagauu

SEQ ID NO: 17113 - RNA, 21 nt, RNAi
uugaagagguuggaucguucu

SEQ ID NO: 17114 - DNA, 21 bp, Homo sapiens
aacctagcaagacagaccaac

SEQ ID NO: 17115 - RNA, 21 nt, RNAi
ccuagcaagacagaccaacuu

SEQ ID NO: 17116 - RNA, 21 nt, RNAi
uuggaucguucugucugguug

SEQ ID NO: 17117 - DNA, 21 bp, Homo sapiens
aagacagaccaacgttcaaat

SEQ ID NO: 17118 - RNA, 21 nt, RNAi
gacagaccaacguucaaauuu

SEQ ID NO: 17119 - RNA, 21 nt, RNAi
uucugucugguugcaaguuua

SEQ ID NO: 17120 - DNA, 21 bp, Homo sapiens
aattcaggaaatacagagaac

SEQ ID NO: 17121 - RNA, 21 nt, RNAi
uucaggaaauacagagaacuu

SEQ ID NO: 17122 - RNA, 21 nt, RNAi
uuaaguccuuuaugucucuug

SEQ ID NO: 17123 - DNA, 21 bp, Homo sapiens
aaagatatttctcgagaagag

SEQ ID NO: 17124 - RNA, 21 nt, RNAi
agauauuucucgagaagaguu

SEQ ID NO: 17125 - RNA, 21 nt, RNAi
uuucuauaaagagcucuucuc

SEQ ID NO: 17126 - DNA, 21 bp, Homo sapiens
aagatatttctcgagaagagc

SEQ ID NO: 17127 - RNA, 21 nt, RNAi
gauauuucucgagaagagcuu

SEQ ID NO: 17128 - RNA, 21 nt, RNAi
uucuauaaagagcucuucucg

SEQ ID NO: 17129 - DNA, 21 bp, Homo sapiens
aattgtcagattcaccaaggt

SEQ ID NO: 17130 - RNA, 21 nt, RNAi
uugucagauucaccaagguuu

SEQ ID NO: 17131 - RNA, 21 nt, RNAi
uuaacagucuaagugguucca

SEQ ID NO: 17132 - DNA, 21 bp, Homo sapiens
aaaggtcaggttactcacaaa

SEQ ID NO: 17133 - RNA, 21 nt, RNAi
aggucagguuacucacaaauu

SEQ ID NO: 17134 - RNA, 21 nt, RNAi
uuuccaguccaaugaguguuu

SEQ ID NO: 17135 - DNA, 21 bp, Homo sapiens
aacagcagatctctctgcaga

SEQ ID NO: 17136 - RNA, 21 nt, RNAi
cagcagaucucucugcagauu

SEQ ID NO: 17137 - RNA, 21 nt, RNAi
uugucgucuagagagacgucu

SEQ ID NO: 17138 - DNA, 21 bp, Homo sapiens
aatccagaatttcatatccag

SEQ ID NO: 17139 - RNA, 21 nt, RNAi
uccagaauuucauauccaguu

SEQ ID NO: 17140 - RNA, 21 nt, RNAi
uuaggucuuaaaguauagguc

SEQ ID NO: 17141 - DNA, 21 bp, Homo sapiens
aatttcatatccagccaaact

SEQ ID NO: 17142 - RNA, 21 nt, RNAi
uuucauauccagccaaacuuu

SEQ ID NO: 17143 - RNA, 21 nt, RNAi
uuaaaguauaggucgguuuga

SEQ ID NO: 17144 - DNA, 21 bp, Homo sapiens
aactaagcttcataagcaaag

SEQ ID NO: 17145 - RNA, 21 nt, RNAi
cuaagcuucauaagcaaaguu

SEQ ID NO: 17146 - RNA, 21 nt, RNAi
uugauucgaaguauucguuuc

SEQ ID NO: 17147 - DNA, 21 bp, Homo sapiens
aagcttcataagcaaaggaga

SEQ ID NO: 17148 - RNA, 21 nt, RNAi
gcuucauaagcaaaggagauu

SEQ ID NO: 17149 - RNA, 21 nt, RNAi
uucgaaguauucguuuccucu

SEQ ID NO: 17150 - DNA, 21 bp, Homo sapiens
aaatcctttacagacaagcaa

SEQ ID NO: 17151 - RNA, 21 nt, RNAi
auccuuuacagacaagcaauu

SEQ ID NO: 17152 - RNA, 21 nt, RNAi
uuuaggaaaugucuguucguu

SEQ ID NO: 17153 - DNA, 21 bp, Homo sapiens
aatcctttacagacaagcaaa

SEQ ID NO: 17154 - RNA, 21 nt, RNAi
uccuuuacagacaagcaaauu

SEQ ID NO: 17155 - RNA, 21 nt, RNAi
uuaggaaaugucuguucguuu

SEQ ID NO: 17156 - DNA, 21 bp, Homo sapiens
aagacatcctgaaggaagcac

SEQ ID NO: 17157 - RNA, 21 nt, RNAi
gacauccugaaggaagcacuu

SEQ ID NO: 17158 - RNA, 21 nt, RNAi
uucuguaggacuuccuucgug

SEQ ID NO: 17159 - DNA, 21 bp, Homo sapiens
aaggaagcactaaatatggaa

SEQ ID NO: 17160 - RNA, 21 nt, RNAi
ggaagcacuaaauauggaauu

SEQ ID NO: 17161 - RNA, 21 nt, RNAi
uuccuucgugauuuauaccuu

SEQ ID NO: 17162 - DNA, 21 bp, Homo sapiens
aaactggtgccagccactgca

SEQ ID NO: 17163 - RNA, 21 nt, RNAi
acuggugccagccacugcauu

SEQ ID NO: 17164 - RNA, 21 nt, RNAi
uuugaccacggucggugacgu

SEQ ID NO: 17165 - DNA, 21 bp, Homo sapiens
aactggtgccagccactgcaa

SEQ ID NO: 17166 - RNA, 21 nt, RNAi
cuggugccagccacugcaauu

SEQ ID NO: 17167 - RNA, 21 nt, RNAi
uugaccacggucggugacguu

SEQ ID NO: 17168 - DNA, 21 bp, Homo sapiens
aaataccaaattgtagagacc

SEQ ID NO: 17169 - RNA, 21 nt, RNAi
auaccaaauuguagagaccuu

SEQ ID NO: 17170 - RNA, 21 nt, RNAi
uuuaugguuuaacaucucugg

SEQ ID NO: 17171 - DNA, 21 bp, Homo sapiens
aataccaaattgtagagacca

SEQ ID NO: 17172 - RNA, 21 nt, RNAi
uaccaaauuguagagaccauu

SEQ ID NO: 17173 - RNA, 21 nt, RNAi
uuaugguuuaacaucucuggu

SEQ ID NO: 17174 - DNA, 21 bp, Homo sapiens
aaattgtagagaccattgaca

SEQ ID NO: 17175 - RNA, 21 nt, RNAi
auuguagagaccauugacauu

SEQ ID NO: 17176 - RNA, 21 nt, RNAi
uuuaacaucucugguaacugu

SEQ ID NO: 17177 - DNA, 21 bp, Homo sapiens
aattgtagagaccattgacac

SEQ ID NO: 17178 - RNA, 21 nt, RNAi
uuguagagaccauugacacuu

SEQ ID NO: 17179 - RNA, 21 nt, RNAi
uuaacaucucugguaacugug

SEQ ID NO: 17180 - DNA, 21 bp, Homo sapiens
aagaaaccgtgtcaactaatg

SEQ ID NO: 17181 - RNA, 21 nt, RNAi
gaaaccgugucaacuaauguu

SEQ ID NO: 17182 - RNA, 21 nt, RNAi
uucuuuggcacaguugauuac

SEQ ID NO: 17183 - DNA, 21 bp, Homo sapiens
aaccagctagtatcataatga

SEQ ID NO: 17184 - RNA, 21 nt, RNAi
ccagcuaguaucauaaugauu

SEQ ID NO: 17185 - RNA, 21 nt, RNAi
uuggucgaucauaguauuacu

SEQ ID NO: 17186 - DNA, 21 bp, Homo sapiens
aatgacaggatcagattcaca

SEQ ID NO: 17187 - RNA, 21 nt, RNAi
ugacaggaucagauucacauu

SEQ ID NO: 17188 - RNA, 21 nt, RNAi
uuacuguccuagucuaagugu

SEQ ID NO: 17189 - DNA, 21 bp, Homo sapiens
aaagacgcagactggcaaatt

SEQ ID NO: 17190 - RNA, 21 nt, RNAi
agacgcagacuggcaaauuuu

SEQ ID NO: 17191 - RNA, 21 nt, RNAi
uuucugcgucugaccguuuaa

SEQ ID NO: 17192 - DNA, 21 bp, Homo sapiens
aagacgcagactggcaaattg

SEQ ID NO: 17193 - RNA, 21 nt, RNAi
gacgcagacuggcaaauuguu

SEQ ID NO: 17194 - RNA, 21 nt, RNAi
uucugcgucugaccguuuaac

SEQ ID NO: 17195 - DNA, 21 bp, Homo sapiens
aattggttaaagagtcaagac

SEQ ID NO: 17196 - RNA, 21 nt, RNAi
uugguuaaagagucaagacuu

SEQ ID NO: 17197 - RNA, 21 nt, RNAi
uuaaccaauuucucaguucug

SEQ ID NO: 17198 - DNA, 21 bp, Homo sapiens
aaagagtcaagactcattggt

SEQ ID NO: 17199 - RNA, 21 nt, RNAi
agagucaagacucauugguuu

SEQ ID NO: 17200 - RNA, 21 nt, RNAi
uuucucaguucugaguaacca

SEQ ID NO: 17201 - DNA, 21 bp, Homo sapiens
aagagtcaagactcattggtg

SEQ ID NO: 17202 - RNA, 21 nt, RNAi
gagucaagacucauugguguu

SEQ ID NO: 17203 - RNA, 21 nt, RNAi
uucucaguucugaguaaccac

SEQ ID NO: 17204 - DNA, 21 bp, Homo sapiens
aagactcattggtgtgccgta

SEQ ID NO: 17205 - RNA, 21 nt, RNAi
gacucauuggugugccguauu

SEQ ID NO: 17206 - RNA, 21 nt, RNAi
uucugaguaaccacacggcau

SEQ ID NO: 17207 - DNA, 21 bp, Homo sapiens
aaagacacacataggctcaga

SEQ ID NO: 17208 - RNA, 21 nt, RNAi
agacacacauaggcucagauu

SEQ ID NO: 17209 - RNA, 21 nt, RNAi
uuucuguguguauccgagucu

SEQ ID NO: 17210 - DNA, 21 bp, Homo sapiens
aagacacacataggctcagag

SEQ ID NO: 17211 - RNA, 21 nt, RNAi
gacacacauaggcucagaguu

SEQ ID NO: 17212 - RNA, 21 nt, RNAi
uucuguguguauccgagucuc

SEQ ID NO: 17213 - DNA, 21 bp, Homo sapiens
cactacagcgactgctgagct

SEQ ID NO: 17214 - RNA, 21 nt, RNAi
cuacagcgacugcugagcuuu

SEQ ID NO: 17215 - RNA, 21 nt, RNAi
uugaugucgcugacgacucga

SEQ ID NO: 17216 - DNA, 21 bp, Homo sapiens
catgaacacgatccgcacgta

SEQ ID NO: 17217 - RNA, 21 nt, RNAi
ugaacacgauccgcacguauu

SEQ ID NO: 17218 - RNA, 21 nt, RNAi
uuacuugugcuaggcgugcau

SEQ ID NO: 17219 - DNA, 21 bp, Homo sapiens
cacgatccgcacgtaccaggt

SEQ ID NO: 17220 - RNA, 21 nt, RNAi
cgauccgcacguaccagguuu

SEQ ID NO: 17221 - RNA, 21 nt, RNAi
uugcuaggcgugcauggucca

SEQ ID NO: 17222 - DNA, 21 bp, Homo sapiens
cacgtaccaggtgtgcaacgt

SEQ ID NO: 17223 - RNA, 21 nt, RNAi
cguaccaggugugcaacguuu

SEQ ID NO: 17224 - RNA, 21 nt, RNAi
uugcaugguccacacguugca

SEQ ID NO: 17225 - DNA, 21 bp, Homo sapiens
caggtgtgcaacgtgtttgag

SEQ ID NO: 17226 - RNA, 21 nt, RNAi
ggugugcaacguguuugaguu

SEQ ID NO: 17227 - RNA, 21 nt, RNAi
uuccacacguugcacaaacuc

SEQ ID NO: 17228 - DNA, 21 bp, Homo sapiens
caacgtgtttgagtcaagcca

SEQ ID NO: 17229 - RNA, 21 nt, RNAi
acguguuugagucaagccauu

SEQ ID NO: 17230 - RNA, 21 nt, RNAi
uuugcacaaacucaguucggu

SEQ ID NO: 17231 - DNA, 21 bp, Homo sapiens
caagccagaacaactggctac

SEQ ID NO: 17232 - RNA, 21 nt, RNAi
agccagaacaacuggcuacuu

SEQ ID NO: 17233 - RNA, 21 nt, RNAi
uuucggucuuguugaccgaug

SEQ ID NO: 17234 - DNA, 21 bp, Homo sapiens
cagaacaactggctacggacc

SEQ ID NO: 17235 - RNA, 21 nt, RNAi
gaacaacuggcuacggaccuu

SEQ ID NO: 17236 - RNA, 21 nt, RNAi
uucuuguugaccgaugccugg

SEQ ID NO: 17237 - DNA, 21 bp, Homo sapiens
caactggctacggaccaagtt

SEQ ID NO: 17238 - RNA, 21 nt, RNAi
acuggcuacggaccaaguuuu

SEQ ID NO: 17239 - RNA, 21 nt, RNAi
uuugaccgaugccugguucaa

SEQ ID NO: 17240 - DNA, 21 bp, Homo sapiens
caccgcatccacgtggagatg

SEQ ID NO: 17241 - RNA, 21 nt, RNAi
ccgcauccacguggagauguu

SEQ ID NO: 17242 - RNA, 21 nt, RNAi
uuggcguaggugcaccucuac

SEQ ID NO: 17243 - DNA, 21 bp, Homo sapiens
catccacgtggagatgaagtt

SEQ ID NO: 17244 - RNA, 21 nt, RNAi
uccacguggagaugaaguuuu

SEQ ID NO: 17245 - RNA, 21 nt, RNAi
uuaggugcaccucuacuucaa

SEQ ID NO: 17246 - DNA, 21 bp, Homo sapiens
caaggagaccttcaacctcta

SEQ ID NO: 17247 - RNA, 21 nt, RNAi
aggagaccuucaaccucuauu

SEQ ID NO: 17248 - RNA, 21 nt, RNAi
uuuccucuggaaguuggagau

SEQ ID NO: 17249 - DNA, 21 bp, Homo sapiens
caacctctattactatgaggc

SEQ ID NO: 17250 - RNA, 21 nt, RNAi
accucuauuacuaugaggcuu

SEQ ID NO: 17251 - RNA, 21 nt, RNAi
uuuggagauaaugauacuccg

SEQ ID NO: 17252 - DNA, 21 bp, Homo sapiens
caactggatggagaatccatg

SEQ ID NO: 17253 - RNA, 21 nt, RNAi
acuggauggagaauccauguu

SEQ ID NO: 17254 - RNA, 21 nt, RNAi
uuugaccuaccucuuagguac

SEQ ID NO: 17255 - DNA, 21 bp, Homo sapiens
cattgcagccgacgagagctt

SEQ ID NO: 17256 - RNA, 21 nt, RNAi
uugcagccgacgagagcuuuu

SEQ ID NO: 17257 - RNA, 21 nt, RNAi
uuaacgucggcugcucucgaa

SEQ ID NO: 17258 - DNA, 21 bp, Homo sapiens
caacaccgaggtgcggagctt

SEQ ID NO: 17259 - RNA, 21 nt, RNAi
acaccgaggugcggagcuuuu

SEQ ID NO: 17260 - RNA, 21 nt, RNAi
uuuguggcuccacgccucgaa

SEQ ID NO: 17261 - DNA, 21 bp, Homo sapiens
cagcggcttctacctggcctt

SEQ ID NO: 17262 - RNA, 21 nt, RNAi
gcggcuucuaccuggccuuuu

SEQ ID NO: 17263 - RNA, 21 nt, RNAi
uucgccgaagauggaccggaa

SEQ ID NO: 17264 - DNA, 21 bp, Homo sapiens
caggactatggcggctgcatg

SEQ ID NO: 17265 - RNA, 21 nt, RNAi
ggacuauggcggcugcauguu

SEQ ID NO: 17266 - RNA, 21 nt, RNAi
uuccugauaccgccgacguac

SEQ ID NO: 17267 - DNA, 21 bp, Homo sapiens
catcgccgtgcgtgtcttcta

SEQ ID NO: 17268 - RNA, 21 nt, RNAi
ucgccgugcgugucuucuauu

SEQ ID NO: 17269 - RNA, 21 nt, RNAi
uuagcggcacgcacagaagau

SEQ ID NO: 17270 - DNA, 21 bp, Homo sapiens
catcatccagaatggcgccat

SEQ ID NO: 17271 - RNA, 21 nt, RNAi
ucauccagaauggcgccauuu

SEQ ID NO: 17272 - RNA, 21 nt, RNAi
uuaguaggucuuaccgcggua

SEQ ID NO: 17273 - DNA, 21 bp, Homo sapiens
catccagaatggcgccatctt

SEQ ID NO: 17274 - RNA, 21 nt, RNAi
uccagaauggcgccaucuuuu

SEQ ID NO: 17275 - RNA, 21 nt, RNAi
uuaggucuuaccgcgguagaa

SEQ ID NO: 17276 - DNA, 21 bp, Homo sapiens
cagaatggcgccatcttccag

SEQ ID NO: 17277 - RNA, 21 nt, RNAi
gaauggcgccaucuuccaguu

SEQ ID NO: 17278 - RNA, 21 nt, RNAi
uucuuaccgcgguagaagguc

SEQ ID NO: 17279 - DNA, 21 bp, Homo sapiens
cagctgcatcgccaatgcgga

SEQ ID NO: 17280 - RNA, 21 nt, RNAi
gcugcaucgccaaugcggauu

SEQ ID NO: 17281 - RNA, 21 nt, RNAi
uucgacguagcgguuacgccu

SEQ ID NO: 17282 - DNA, 21 bp, Homo sapiens
catcgccaatgcggaagaggt

SEQ ID NO: 17283 - RNA, 21 nt, RNAi
ucgccaaugcggaagagguuu

SEQ ID NO: 17284 - RNA, 21 nt, RNAi
uuagcgguuacgccuucucca

SEQ ID NO: 17285 - DNA, 21 bp, Homo sapiens
caatgcggaagaggtggatgt

SEQ ID NO: 17286 - RNA, 21 nt, RNAi
augcggaagagguggauguuu

SEQ ID NO: 17287 - RNA, 21 nt, RNAi
uuuacgccuucuccaccuaca

SEQ ID NO: 17288 - DNA, 21 bp, Homo sapiens
catcaagctctactgtaacgg

SEQ ID NO: 17289 - RNA, 21 nt, RNAi
ucaagcucuacuguaacgguu

SEQ ID NO: 17290 - RNA, 21 nt, RNAi
uuaguucgagaugacauugcc

SEQ ID NO: 17291 - DNA, 21 bp, Homo sapiens
catgtgcaaagcaggcttcga

SEQ ID NO: 17292 - RNA, 21 nt, RNAi
ugugcaaagcaggcuucgauu

SEQ ID NO: 17293 - RNA, 21 nt, RNAi
uuacacguuucguccgaagcu

SEQ ID NO: 17294 - DNA, 21 bp, Homo sapiens
caaagcaggcttcgaggccgt

SEQ ID NO: 17295 - RNA, 21 nt, RNAi
aagcaggcuucgaggccguuu

SEQ ID NO: 17296 - RNA, 21 nt, RNAi
uuuucguccgaagcuccggca

SEQ ID NO: 17297 - DNA, 21 bp, Homo sapiens
caggcttcgaggccgttgaga

SEQ ID NO: 17298 - RNA, 21 nt, RNAi
ggcuucgaggccguugagauu

SEQ ID NO: 17299 - RNA, 21 nt, RNAi
uuccgaagcuccggcaacucu

SEQ ID NO: 17300 - DNA, 21 bp, Homo sapiens
catcaacagccggaccacttc

SEQ ID NO: 17301 - RNA, 21 nt, RNAi
ucaacagccggaccacuucuu

SEQ ID NO: 17302 - RNA, 21 nt, RNAi
uuaguugucggccuggugaag

SEQ ID NO: 17303 - DNA, 21 bp, Homo sapiens
caacagccggaccacttctga

SEQ ID NO: 17304 - RNA, 21 nt, RNAi
acagccggaccacuucugauu

SEQ ID NO: 17305 - RNA, 21 nt, RNAi
uuugucggccuggugaagacu

SEQ ID NO: 17306 - DNA, 21 bp, Homo sapiens
cagccggaccacttctgaagg

SEQ ID NO: 17307 - RNA, 21 nt, RNAi
gccggaccacuucugaagguu

SEQ ID NO: 17308 - RNA, 21 nt, RNAi
uucggccuggugaagacuucc

SEQ ID NO: 17309 - DNA, 21 bp, Homo sapiens
caccaactgtgtctgccgcaa

SEQ ID NO: 17310 - RNA, 21 nt, RNAi
ccaacugugucugccgcaauu

SEQ ID NO: 17311 - RNA, 21 nt, RNAi
uugguugacacagacggcguu

SEQ ID NO: 17312 - DNA, 21 bp, Homo sapiens
caactgtgtctgccgcaatgg

SEQ ID NO: 17313 - RNA, 21 nt, RNAi
acugugucugccgcaaugguu

SEQ ID NO: 17314 - RNA, 21 nt, RNAi
uuugacacagacggcguuacc

SEQ ID NO: 17315 - DNA, 21 bp, Homo sapiens
caatggctactacagagcaga

SEQ ID NO: 17316 - RNA, 21 nt, RNAi
auggcuacuacagagcagauu

SEQ ID NO: 17317 - RNA, 21 nt, RNAi
uuuaccgaugaugucucgucu

SEQ ID NO: 17318 - DNA, 21 bp, Homo sapiens
caggctgtgatttccagtgtc

SEQ ID NO: 17319 - RNA, 21 nt, RNAi
ggcugugauuuccagugucuu

SEQ ID NO: 17320 - RNA, 21 nt, RNAi
uuccgacacuaaaggucacag

SEQ ID NO: 17321 - DNA, 21 bp, Homo sapiens
caacatcatctgcaagagctg

SEQ ID NO: 17322 - RNA, 21 nt, RNAi
acaucaucugcaagagcuguu

SEQ ID NO: 17323 - RNA, 21 nt, RNAi
uuuguaguagacguucucgac

SEQ ID NO: 17324 - DNA, 21 bp, Homo sapiens
catcatctgcaagagctgtgg

SEQ ID NO: 17325 - RNA, 21 nt, RNAi
ucaucugcaagagcugugguu

SEQ ID NO: 17326 - RNA, 21 nt, RNAi
uuaguagacguucucgacacc

SEQ ID NO: 17327 - DNA, 21 bp, Homo sapiens
catctgcaagagctgtggctc

SEQ ID NO: 17328 - RNA, 21 nt, RNAi
ucugcaagagcuguggcucuu

SEQ ID NO: 17329 - RNA, 21 nt, RNAi
uuagacguucucgacaccgag

SEQ ID NO: 17330 - DNA, 21 bp, Homo sapiens
caatgtacagtacgcaccacg

SEQ ID NO: 17331 - RNA, 21 nt, RNAi
auguacaguacgcaccacguu

SEQ ID NO: 17332 - RNA, 21 nt, RNAi
uuuacaugucaugcguggugc

SEQ ID NO: 17333 - DNA, 21 bp, Homo sapiens
cagtacgcaccacgccagcta

SEQ ID NO: 17334 - RNA, 21 nt, RNAi
guacgcaccacgccagcuauu

SEQ ID NO: 17335 - RNA, 21 nt, RNAi
uucaugcguggugcggucgau

SEQ ID NO: 17336 - DNA, 21 bp, Homo sapiens
cacgcatttacatcagtgacc

SEQ ID NO: 17337 - RNA, 21 nt, RNAi
cgcauuuacaucagugaccuu

SEQ ID NO: 17338 - RNA, 21 nt, RNAi
uugcguaaauguagucacugg

SEQ ID NO: 17339 - DNA, 21 bp, Homo sapiens
catttacatcagtgacctgct

SEQ ID NO: 17340 - RNA, 21 nt, RNAi
uuuacaucagugaccugcuuu

SEQ ID NO: 17341 - RNA, 21 nt, RNAi
uuaaauguagucacuggacga

SEQ ID NO: 17342 - DNA, 21 bp, Homo sapiens
cagtacaccttcgagatccag

SEQ ID NO: 17343 - RNA, 21 nt, RNAi
guacaccuucgagauccaguu

SEQ ID NO: 17344 - RNA, 21 nt, RNAi
uucauguggaagcucuagguc

SEQ ID NO: 17345 - DNA, 21 bp, Homo sapiens
caccttcgagatccaggctgt

SEQ ID NO: 17346 - RNA, 21 nt, RNAi
ccuucgagauccaggcuguuu

SEQ ID NO: 17347 - RNA, 21 nt, RNAi
uuggaagcucuagguccgaca

SEQ ID NO: 17348 - DNA, 21 bp, Homo sapiens
caggctgtgaacggcgttact

SEQ ID NO: 17349 - RNA, 21 nt, RNAi
ggcugugaacggcguuacuuu

SEQ ID NO: 17350 - RNA, 21 nt, RNAi
uuccgacacuugccgcaauga

SEQ ID NO: 17351 - DNA, 21 bp, Homo sapiens
cagttcgcctctgtgaacatc

SEQ ID NO: 17352 - RNA, 21 nt, RNAi
guucgccucugugaacaucuu

SEQ ID NO: 17353 - RNA, 21 nt, RNAi
uucaagcggagacacuuguag

SEQ ID NO: 17354 - DNA, 21 bp, Homo sapiens
catcaccaccaaccaggcagc

SEQ ID NO: 17355 - RNA, 21 nt, RNAi
ucaccaccaaccaggcagcuu

SEQ ID NO: 17356 - RNA, 21 nt, RNAi
uuaguggugguugguccgucg

SEQ ID NO: 17357 - DNA, 21 bp, Homo sapiens
caccaaccaggcagctccatc

SEQ ID NO: 17358 - RNA, 21 nt, RNAi
ccaaccaggcagcuccaucuu

SEQ ID NO: 17359 - RNA, 21 nt, RNAi
uugguugguccgucgagguag

SEQ ID NO: 17360 - DNA, 21 bp, Homo sapiens
cagctccatcggcagtgtcca

SEQ ID NO: 17361 - RNA, 21 nt, RNAi
gcuccaucggcaguguccauu

SEQ ID NO: 17362 - RNA, 21 nt, RNAi
uucgagguagccgucacaggu

SEQ ID NO: 17363 - DNA, 21 bp, Homo sapiens
catcggcagtgtccatcatgc

SEQ ID NO: 17364 - RNA, 21 nt, RNAi
ucggcaguguccaucaugcuu

SEQ ID NO: 17365 - RNA, 21 nt, RNAi
uuagccgucacagguaguacg

SEQ ID NO: 17366 - DNA, 21 bp, Homo sapiens
cagtgtccatcatgcatcagg

SEQ ID NO: 17367 - RNA, 21 nt, RNAi
guguccaucaugcaucagguu

SEQ ID NO: 17368 - RNA, 21 nt, RNAi
uucacagguaguacguagucc

SEQ ID NO: 17369 - DNA, 21 bp, Homo sapiens
catcatgcatcaggtgagccg

SEQ ID NO: 17370 - RNA, 21 nt, RNAi
ucaugcaucaggugagccguu

SEQ ID NO: 17371 - RNA, 21 nt, RNAi
uuaguacguaguccacucggc

SEQ ID NO: 17372 - DNA, 21 bp, Homo sapiens
catgcatcaggtgagccgcac

SEQ ID NO: 17373 - RNA, 21 nt, RNAi
ugcaucaggugagccgcacuu

SEQ ID NO: 17374 - RNA, 21 nt, RNAi
uuacguaguccacucggcgug

SEQ ID NO: 17375 - DNA, 21 bp, Homo sapiens
caatggcgtgatcctggacta

SEQ ID NO: 17376 - RNA, 21 nt, RNAi
auggcgugauccuggacuauu

SEQ ID NO: 17377 - RNA, 21 nt, RNAi
uuuaccgcacuaggaccugau

SEQ ID NO: 17378 - DNA, 21 bp, Homo sapiens
cagtactatgagaaggagctc

SEQ ID NO: 17379 - RNA, 21 nt, RNAi
guacuaugagaaggagcucuu

SEQ ID NO: 17380 - RNA, 21 nt, RNAi
uucaugauacucuuccucgag

SEQ ID NO: 17381 - DNA, 21 bp, Homo sapiens
cagtgagtacaacgccacagc

SEQ ID NO: 17382 - RNA, 21 nt, RNAi
gugaguacaacgccacagcuu

SEQ ID NO: 17383 - RNA, 21 nt, RNAi
uucacucauguugcggugucg

SEQ ID NO: 17384 - DNA, 21 bp, Homo sapiens
caccaacacggtcaccgtgca

SEQ ID NO: 17385 - RNA, 21 nt, RNAi
ccaacacggucaccgugcauu

SEQ ID NO: 17386 - RNA, 21 nt, RNAi
uugguugugccaguggcacgu

SEQ ID NO: 17387 - DNA, 21 bp, Homo sapiens
catctatgtcttccaggtgcg

SEQ ID NO: 17388 - RNA, 21 nt, RNAi
ucuaugucuuccaggugcguu

SEQ ID NO: 17389 - RNA, 21 nt, RNAi
uuagauacagaagguccacgc

SEQ ID NO: 17390 - DNA, 21 bp, Homo sapiens
cagcggcaagatgtacttcca

SEQ ID NO: 17391 - RNA, 21 nt, RNAi
gcggcaagauguacuuccauu

SEQ ID NO: 17392 - RNA, 21 nt, RNAi
uucgccguucuacaugaaggu

SEQ ID NO: 17393 - DNA, 21 bp, Homo sapiens
caagatgtacttccagaccat

SEQ ID NO: 17394 - RNA, 21 nt, RNAi
agauguacuuccagaccauuu

SEQ ID NO: 17395 - RNA, 21 nt, RNAi
uuucuacaugaaggucuggua

SEQ ID NO: 17396 - DNA, 21 bp, Homo sapiens
cagaccatgacagaagccgag

SEQ ID NO: 17397 - RNA, 21 nt, RNAi
gaccaugacagaagccgaguu

SEQ ID NO: 17398 - RNA, 21 nt, RNAi
uucugguacugucuucggcuc

SEQ ID NO: 17399 - DNA, 21 bp, Homo sapiens
catgacagaagccgagtacca

SEQ ID NO: 17400 - RNA, 21 nt, RNAi
ugacagaagccgaguaccauu

SEQ ID NO: 17401 - RNA, 21 nt, RNAi
uuacugucuucggcucauggu

SEQ ID NO: 17402 - DNA, 21 bp, Homo sapiens
cagaagccgagtaccagacaa

SEQ ID NO: 17403 - RNA, 21 nt, RNAi
gaagccgaguaccagacaauu

SEQ ID NO: 17404 - RNA, 21 nt, RNAi
uucuucggcucauggucuguu

SEQ ID NO: 17405 - DNA, 21 bp, Homo sapiens
cagacaagcatccaggagaag

SEQ ID NO: 17406 - RNA, 21 nt, RNAi
gacaagcauccaggagaaguu

SEQ ID NO: 17407 - RNA, 21 nt, RNAi
uucuguucguagguccucuuc

SEQ ID NO: 17408 - DNA, 21 bp, Homo sapiens
caagcatccaggagaagttgc

SEQ ID NO: 17409 - RNA, 21 nt, RNAi
agcauccaggagaaguugcuu

SEQ ID NO: 17410 - RNA, 21 nt, RNAi
uuucguagguccucuucaacg

SEQ ID NO: 17411 - DNA, 21 bp, Homo sapiens
catccaggagaagttgccact

SEQ ID NO: 17412 - RNA, 21 nt, RNAi
uccaggagaaguugccacuuu

SEQ ID NO: 17413 - RNA, 21 nt, RNAi
uuagguccucuucaacgguga

SEQ ID NO: 17414 - DNA, 21 bp, Homo sapiens
caggagaagttgccactcatc

SEQ ID NO: 17415 - RNA, 21 nt, RNAi
ggagaaguugccacucaucuu

SEQ ID NO: 17416 - RNA, 21 nt, RNAi
uuccucuucaacggugaguag

SEQ ID NO: 17417 - DNA, 21 bp, Homo sapiens
cactcatcatcggctcctcgg

SEQ ID NO: 17418 - RNA, 21 nt, RNAi
cucaucaucggcuccucgguu

SEQ ID NO: 17419 - RNA, 21 nt, RNAi
uugaguaguagccgaggagcc

SEQ ID NO: 17420 - DNA, 21 bp, Homo sapiens
cattgctgtggttgtcatcgc

SEQ ID NO: 17421 - RNA, 21 nt, RNAi
uugcugugguugucaucgcuu

SEQ ID NO: 17422 - RNA, 21 nt, RNAi
uuaacgacaccaacaguagcg

SEQ ID NO: 17423 - DNA, 21 bp, Homo sapiens
catcgccatcgtgtgtaacag

SEQ ID NO: 17424 - RNA, 21 nt, RNAi
ucgccaucguguguaacaguu

SEQ ID NO: 17425 - RNA, 21 nt, RNAi
uuagcgguagcacacauuguc

SEQ ID NO: 17426 - DNA, 21 bp, Homo sapiens
catcgtgtgtaacagaagacg

SEQ ID NO: 17427 - RNA, 21 nt, RNAi
ucguguguaacagaagacguu

SEQ ID NO: 17428 - RNA, 21 nt, RNAi
uuagcacacauugucuucugc

SEQ ID NO: 17429 - DNA, 21 bp, Homo sapiens
cacggacaagctgcaacacta

SEQ ID NO: 17430 - RNA, 21 nt, RNAi
cggacaagcugcaacacuauu

SEQ ID NO: 17431 - RNA, 21 nt, RNAi
uugccuguucgacguugugau

SEQ ID NO: 17432 - DNA, 21 bp, Homo sapiens
caagctgcaacactacaccag

SEQ ID NO: 17433 - RNA, 21 nt, RNAi
agcugcaacacuacaccaguu

SEQ ID NO: 17434 - RNA, 21 nt, RNAi
uuucgacguugugaugugguc

SEQ ID NO: 17435 - DNA, 21 bp, Homo sapiens
caacactacaccagtggccac

SEQ ID NO: 17436 - RNA, 21 nt, RNAi
acacuacaccaguggccacuu

SEQ ID NO: 17437 - RNA, 21 nt, RNAi
uuugugauguggucaccggug

SEQ ID NO: 17438 - DNA, 21 bp, Homo sapiens
cactacaccagtggccacatg

SEQ ID NO: 17439 - RNA, 21 nt, RNAi
cuacaccaguggccacauguu

SEQ ID NO: 17440 - RNA, 21 nt, RNAi
uugauguggucaccgguguac

SEQ ID NO: 17441 - DNA, 21 bp, Homo sapiens
caggcatgaagatctacatcg

SEQ ID NO: 17442 - RNA, 21 nt, RNAi
ggcaugaagaucuacaucguu

SEQ ID NO: 17443 - RNA, 21 nt, RNAi
uuccguacuucuagauguagc

SEQ ID NO: 17444 - DNA, 21 bp, Homo sapiens
catgaagatctacatcgatcc

SEQ ID NO: 17445 - RNA, 21 nt, RNAi
ugaagaucuacaucgauccuu

SEQ ID NO: 17446 - RNA, 21 nt, RNAi
uuacuucuagauguagcuagg

SEQ ID NO: 17447 - DNA, 21 bp, Homo sapiens
catcgatcctttcacctacga

SEQ ID NO: 17448 - RNA, 21 nt, RNAi
ucgauccuuucaccuacgauu

SEQ ID NO: 17449 - RNA, 21 nt, RNAi
uuagcuaggaaaguggaugcu

SEQ ID NO: 17450 - DNA, 21 bp, Homo sapiens
caaggaaattgacatctcctg

SEQ ID NO: 17451 - RNA, 21 nt, RNAi
aggaaauugacaucuccuguu

SEQ ID NO: 17452 - RNA, 21 nt, RNAi
uuuccuuuaacuguagaggac

SEQ ID NO: 17453 - DNA, 21 bp, Homo sapiens
cacctgaagctgccaggcaag

SEQ ID NO: 17454 - RNA, 21 nt, RNAi
ccugaagcugccaggcaaguu

SEQ ID NO: 17455 - RNA, 21 nt, RNAi
uuggacuucgacgguccguuc

SEQ ID NO: 17456 - DNA, 21 bp, Homo sapiens
caggcaagagagagatctttg

SEQ ID NO: 17457 - RNA, 21 nt, RNAi
ggcaagagagagaucuuuguu

SEQ ID NO: 17458 - RNA, 21 nt, RNAi
uuccguucucucucuagaaac

SEQ ID NO: 17459 - DNA, 21 bp, Homo sapiens
caagagagagatctttgtggc

SEQ ID NO: 17460 - RNA, 21 nt, RNAi
agagagagaucuuuguggcuu

SEQ ID NO: 17461 - RNA, 21 nt, RNAi
uuucucucucuagaaacaccg

SEQ ID NO: 17462 - DNA, 21 bp, Homo sapiens
caagagcacacctgtgatgat

SEQ ID NO: 17463 - RNA, 21 nt, RNAi
agagcacaccugugaugauuu

SEQ ID NO: 17464 - RNA, 21 nt, RNAi
uuucucguguggacacuacua

SEQ ID NO: 17465 - DNA, 21 bp, Homo sapiens
cacacctgtgatgatcatcac

SEQ ID NO: 17466 - RNA, 21 nt, RNAi
caccugugaugaucaucacuu

SEQ ID NO: 17467 - RNA, 21 nt, RNAi
uuguggacacuacuaguagug

SEQ ID NO: 17468 - DNA, 21 bp, Homo sapiens
cacctgtgatgatcatcaccg

SEQ ID NO: 17469 - RNA, 21 nt, RNAi
ccugugaugaucaucaccguu

SEQ ID NO: 17470 - RNA, 21 nt, RNAi
uuggacacuacuaguaguggc

SEQ ID NO: 17471 - DNA, 21 bp, Homo sapiens
catcaccgagttcatggagaa

SEQ ID NO: 17472 - RNA, 21 nt, RNAi
ucaccgaguucauggagaauu

SEQ ID NO: 17473 - RNA, 21 nt, RNAi
uuaguggcucaaguaccucuu

SEQ ID NO: 17474 - DNA, 21 bp, Homo sapiens
caccgagttcatggagaatgg

SEQ ID NO: 17475 - RNA, 21 nt, RNAi
ccgaguucauggagaaugguu

SEQ ID NO: 17476 - RNA, 21 nt, RNAi
uuggcucaaguaccucuuacc

SEQ ID NO: 17477 - DNA, 21 bp, Homo sapiens
cagttcacagtcatccagctg

SEQ ID NO: 17478 - RNA, 21 nt, RNAi
guucacagucauccagcuguu

SEQ ID NO: 17479 - RNA, 21 nt, RNAi
uucaagugucaguaggucgac

SEQ ID NO: 17480 - DNA, 21 bp, Homo sapiens
catcgcagctggcatgaagta

SEQ ID NO: 17481 - RNA, 21 nt, RNAi
ucgcagcuggcaugaaguauu

SEQ ID NO: 17482 - RNA, 21 nt, RNAi
uuagcgucgaccguacuucau

SEQ ID NO: 17483 - DNA, 21 bp, Homo sapiens
cagctggcatgaagtacctgg

SEQ ID NO: 17484 - RNA, 21 nt, RNAi
gcuggcaugaaguaccugguu

SEQ ID NO: 17485 - RNA, 21 nt, RNAi
uucgaccguacuucauggacc

SEQ ID NO: 17486 - DNA, 21 bp, Homo sapiens
catgaagtacctggcagacat

SEQ ID NO: 17487 - RNA, 21 nt, RNAi
ugaaguaccuggcagacauuu

SEQ ID NO: 17488 - RNA, 21 nt, RNAi
uuacuucauggaccgucugua

SEQ ID NO: 17489 - DNA, 21 bp, Homo sapiens
cagacatgaactatgttcacc

SEQ ID NO: 17490 - RNA, 21 nt, RNAi
gacaugaacuauguucaccuu

SEQ ID NO: 17491 - RNA, 21 nt, RNAi
uucuguacuugauacaagugg

SEQ ID NO: 17492 - DNA, 21 bp, Homo sapiens
catgaactatgttcaccgtga

SEQ ID NO: 17493 - RNA, 21 nt, RNAi
ugaacuauguucaccgugauu

SEQ ID NO: 17494 - RNA, 21 nt, RNAi
uuacuugauacaaguggcacu

SEQ ID NO: 17495 - DNA, 21 bp, Homo sapiens
caacatcctcgtcaacagcaa

SEQ ID NO: 17496 - RNA, 21 nt, RNAi
acauccucgucaacagcaauu

SEQ ID NO: 17497 - RNA, 21 nt, RNAi
uuuguaggagcaguugucguu

SEQ ID NO: 17498 - DNA, 21 bp, Homo sapiens
catcctcgtcaacagcaacct

SEQ ID NO: 17499 - RNA, 21 nt, RNAi
uccucgucaacagcaaccuuu

SEQ ID NO: 17500 - RNA, 21 nt, RNAi
uuaggagcaguugucguugga

SEQ ID NO: 17501 - DNA, 21 bp, Homo sapiens
caacagcaacctggtctgcaa

SEQ ID NO: 17502 - RNA, 21 nt, RNAi
acagcaaccuggucugcaauu

SEQ ID NO: 17503 - RNA, 21 nt, RNAi
uuugucguuggaccagacguu

SEQ ID NO: 17504 - DNA, 21 bp, Homo sapiens
cagcaacctggtctgcaaggt

SEQ ID NO: 17505 - RNA, 21 nt, RNAi
gcaaccuggucugcaagguuu

SEQ ID NO: 17506 - RNA, 21 nt, RNAi
uucguuggaccagacguucca

SEQ ID NO: 17507 - DNA, 21 bp, Homo sapiens
caacctggtctgcaaggtgtc

SEQ ID NO: 17508 - RNA, 21 nt, RNAi
accuggucugcaaggugucuu

SEQ ID NO: 17509 - RNA, 21 nt, RNAi
uuuggaccagacguuccacag

SEQ ID NO: 17510 - DNA, 21 bp, Homo sapiens
cacgctttctagaggacgata

SEQ ID NO: 17511 - RNA, 21 nt, RNAi
cgcuuucuagaggacgauauu

SEQ ID NO: 17512 - RNA, 21 nt, RNAi
uugcgaaagaucuccugcuau

SEQ ID NO: 17513 - DNA, 21 bp, Homo sapiens
catccagtaccggaagttcac

SEQ ID NO: 17514 - RNA, 21 nt, RNAi
uccaguaccggaaguucacuu

SEQ ID NO: 17515 - RNA, 21 nt, RNAi
uuaggucauggccuucaagug

SEQ ID NO: 17516 - DNA, 21 bp, Homo sapiens
cagtaccggaagttcacctcg

SEQ ID NO: 17517 - RNA, 21 nt, RNAi
guaccggaaguucaccucguu

SEQ ID NO: 17518 - RNA, 21 nt, RNAi
uucauggccuucaaguggagc

SEQ ID NO: 17519 - DNA, 21 bp, Homo sapiens
cacctcggccagtgatgtgtg

SEQ ID NO: 17520 - RNA, 21 nt, RNAi
ccucggccagugauguguguu

SEQ ID NO: 17521 - RNA, 21 nt, RNAi
uuggagccggucacuacacac

SEQ ID NO: 17522 - DNA, 21 bp, Homo sapiens
cagtgatgtgtggagctacgg

SEQ ID NO: 17523 - RNA, 21 nt, RNAi
gugauguguggagcuacgguu

SEQ ID NO: 17524 - RNA, 21 nt, RNAi
uucacuacacaccucgaugcc

SEQ ID NO: 17525 - DNA, 21 bp, Homo sapiens
catgaccaaccaggatgtaat

SEQ ID NO: 17526 - RNA, 21 nt, RNAi
ugaccaaccaggauguaauuu

SEQ ID NO: 17527 - RNA, 21 nt, RNAi
uuacugguugguccuacauua

SEQ ID NO: 17528 - DNA, 21 bp, Homo sapiens
caaccaggatgtaatcaatgc

SEQ ID NO: 17529 - RNA, 21 nt, RNAi
accaggauguaaucaaugcuu

SEQ ID NO: 17530 - RNA, 21 nt, RNAi
uuugguccuacauuaguuacg

SEQ ID NO: 17531 - DNA, 21 bp, Homo sapiens
caggatgtaatcaatgccatt

SEQ ID NO: 17532 - RNA, 21 nt, RNAi
ggauguaaucaaugccauuuu

SEQ ID NO: 17533 - RNA, 21 nt, RNAi
uuccuacauuaguuacgguaa

SEQ ID NO: 17534 - DNA, 21 bp, Homo sapiens
caatgccattgagcaggacta

SEQ ID NO: 17535 - RNA, 21 nt, RNAi
augccauugagcaggacuauu

SEQ ID NO: 17536 - RNA, 21 nt, RNAi
uuuacgguaacucguccugau

SEQ ID NO: 17537 - DNA, 21 bp, Homo sapiens
cattgagcaggactatcggct

SEQ ID NO: 17538 - RNA, 21 nt, RNAi
uugagcaggacuaucggcuuu

SEQ ID NO: 17539 - RNA, 21 nt, RNAi
uuaacucguccugauagccga

SEQ ID NO: 17540 - DNA, 21 bp, Homo sapiens
caccaactcatgctggactgt

SEQ ID NO: 17541 - RNA, 21 nt, RNAi
ccaacucaugcuggacuguuu

SEQ ID NO: 17542 - RNA, 21 nt, RNAi
uugguugaguacgaccugaca

SEQ ID NO: 17543 - DNA, 21 bp, Homo sapiens
caactcatgctggactgttgg

SEQ ID NO: 17544 - RNA, 21 nt, RNAi
acucaugcuggacuguugguu

SEQ ID NO: 17545 - RNA, 21 nt, RNAi
uuugaguacgaccugacaacc

SEQ ID NO: 17546 - DNA, 21 bp, Homo sapiens
catgctggactgttggcagaa

SEQ ID NO: 17547 - RNA, 21 nt, RNAi
ugcuggacuguuggcagaauu

SEQ ID NO: 17548 - RNA, 21 nt, RNAi
uuacgaccugacaaccgucuu

SEQ ID NO: 17549 - DNA, 21 bp, Homo sapiens
caagttcggccaaattgtcaa

SEQ ID NO: 17550 - RNA, 21 nt, RNAi
aguucggccaaauugucaauu

SEQ ID NO: 17551 - RNA, 21 nt, RNAi
uuucaagccgguuuaacaguu

SEQ ID NO: 17552 - DNA, 21 bp, Homo sapiens
caaattgtcaacacgctagac

SEQ ID NO: 17553 - RNA, 21 nt, RNAi
aauugucaacacgcuagacuu

SEQ ID NO: 17554 - RNA, 21 nt, RNAi
uuuuaacaguugugcgaucug

SEQ ID NO: 17555 - DNA, 21 bp, Homo sapiens
caacacgctagacaagatgat

SEQ ID NO: 17556 - RNA, 21 nt, RNAi
acacgcuagacaagaugauuu

SEQ ID NO: 17557 - RNA, 21 nt, RNAi
uuugugcgaucuguucuacua

SEQ ID NO: 17558 - DNA, 21 bp, Homo sapiens
cacgctagacaagatgatccg

SEQ ID NO: 17559 - RNA, 21 nt, RNAi
cgcuagacaagaugauccguu

SEQ ID NO: 17560 - RNA, 21 nt, RNAi
uugcgaucuguucuacuaggc

SEQ ID NO: 17561 - DNA, 21 bp, Homo sapiens
caacagcctcaaagccatggc

SEQ ID NO: 17562 - RNA, 21 nt, RNAi
acagccucaaagccauggcuu

SEQ ID NO: 17563 - RNA, 21 nt, RNAi
uuugucggaguuucgguaccg

SEQ ID NO: 17564 - DNA, 21 bp, Homo sapiens
catcaacctgccgctgctgga

SEQ ID NO: 17565 - RNA, 21 nt, RNAi
ucaaccugccgcugcuggauu

SEQ ID NO: 17566 - RNA, 21 nt, RNAi
uuaguuggacggcgacgaccu

SEQ ID NO: 17567 - DNA, 21 bp, Homo sapiens
caccagctttaacacggtgga

SEQ ID NO: 17568 - RNA, 21 nt, RNAi
ccagcuuuaacacgguggauu

SEQ ID NO: 17569 - RNA, 21 nt, RNAi
uuggucgaaauugugccaccu

SEQ ID NO: 17570 - DNA, 21 bp, Homo sapiens
cagctttaacacggtggacga

SEQ ID NO: 17571 - RNA, 21 nt, RNAi
gcuuuaacacgguggacgauu

SEQ ID NO: 17572 - RNA, 21 nt, RNAi
uucgaaauugugccaccugcu

SEQ ID NO: 17573 - DNA, 21 bp, Homo sapiens
cagtacaaggagagcttcgcc

SEQ ID NO: 17574 - RNA, 21 nt, RNAi
guacaaggagagcuucgccuu

SEQ ID NO: 17575 - RNA, 21 nt, RNAi
uucauguuccucucgaagcgg

SEQ ID NO: 17576 - DNA, 21 bp, Homo sapiens
caaggagagcttcgccaatgc

SEQ ID NO: 17577 - RNA, 21 nt, RNAi
aggagagcuucgccaaugcuu

SEQ ID NO: 17578 - RNA, 21 nt, RNAi
uuuccucucgaagcgguuacg

SEQ ID NO: 17579 - DNA, 21 bp, Homo sapiens
caatgccggcttcacctcctt

SEQ ID NO: 17580 - RNA, 21 nt, RNAi
augccggcuucaccuccuuuu

SEQ ID NO: 17581 - RNA, 21 nt, RNAi
uuuacggccgaaguggaggaa

SEQ ID NO: 17582 - DNA, 21 bp, Homo sapiens
cacctcctttgacgtcgtgtc

SEQ ID NO: 17583 - RNA, 21 nt, RNAi
ccuccuuugacgucgugucuu

SEQ ID NO: 17584 - RNA, 21 nt, RNAi
uuggaggaaacugcagcacag

SEQ ID NO: 17585 - DNA, 21 bp, Homo sapiens
cagatgatgatggaggacatt

SEQ ID NO: 17586 - RNA, 21 nt, RNAi
gaugaugauggaggacauuuu

SEQ ID NO: 17587 - RNA, 21 nt, RNAi
uucuacuacuaccuccuguaa

SEQ ID NO: 17588 - DNA, 21 bp, Homo sapiens
cactttggctggccaccagaa

SEQ ID NO: 17589 - RNA, 21 nt, RNAi
cuuuggcuggccaccagaauu

SEQ ID NO: 17590 - RNA, 21 nt, RNAi
uugaaaccgaccgguggucuu

SEQ ID NO: 17591 - DNA, 21 bp, Homo sapiens
cagatgaaccagattcagtct

SEQ ID NO: 17592 - RNA, 21 nt, RNAi
gaugaaccagauucagucuuu

SEQ ID NO: 17593 - RNA, 21 nt, RNAi
uucuacuuggucuaagucaga

SEQ ID NO: 17594 - DNA, 21 bp, Homo sapiens
cagattcagtctgtggaggtt

SEQ ID NO: 17595 - RNA, 21 nt, RNAi
gauucagucuguggagguuuu

SEQ ID NO: 17596 - RNA, 21 nt, RNAi
uucuaagucagacaccuccaa

SEQ ID NO: 17597 - DNA, 21 bp, Homo sapiens
cagtctgtggaggtttgacat

SEQ ID NO: 17598 - RNA, 21 nt, RNAi
gucuguggagguuugacauuu

SEQ ID NO: 17599 - RNA, 21 nt, RNAi
uucagacaccuccaaacugua

SEQ ID NO: 17600 - DNA, 21 bp, Homo sapiens
cattcacctgcctcggctcac

SEQ ID NO: 17601 - RNA, 21 nt, RNAi
uucaccugccucggcucacuu

SEQ ID NO: 17602 - RNA, 21 nt, RNAi
uuaaguggacggagccgagug

SEQ ID NO: 17603 - DNA, 21 bp, Homo sapiens
cagccacgagacgtcaccaag

SEQ ID NO: 17604 - RNA, 21 nt, RNAi
gccacgagacgucaccaaguu

SEQ ID NO: 17605 - RNA, 21 nt, RNAi
uucggugcucugcagugguuc

SEQ ID NO: 17606 - DNA, 21 bp, Homo sapiens
catgcaactcaaacgacggaa

SEQ ID NO: 17607 - RNA, 21 nt, RNAi
ugcaacucaaacgacggaauu

SEQ ID NO: 17608 - RNA, 21 nt, RNAi
uuacguugaguuugcugccuu

SEQ ID NO: 17609 - DNA, 21 bp, Homo sapiens
cataaggaaagcaatgactgt

SEQ ID NO: 17610 - RNA, 21 nt, RNAi
uaaggaaagcaaugacuguuu

SEQ ID NO: 17611 - RNA, 21 nt, RNAi
uuauuccuuucguuacugaca

SEQ ID NO: 17612 - DNA, 21 bp, Homo sapiens
catgcgatgtgtccaatcgga

SEQ ID NO: 17613 - RNA, 21 nt, RNAi
ugcgauguguccaaucggauu

SEQ ID NO: 17614 - RNA, 21 nt, RNAi
uuacgcuacacagguuagccu

SEQ ID NO: 17615 - DNA, 21 bp, Homo sapiens
cagagccaagaaacactttca

SEQ ID NO: 17616 - RNA, 21 nt, RNAi
gagccaagaaacacuuucauu

SEQ ID NO: 17617 - RNA, 21 nt, RNAi
uucucgguucuuugugaaagu

SEQ ID NO: 17618 - DNA, 21 bp, Homo sapiens
cactcaacaaccaagcgcctg

SEQ ID NO: 17619 - RNA, 21 nt, RNAi
cucaacaaccaagcgccuguu

SEQ ID NO: 17620 - RNA, 21 nt, RNAi
uugaguuguugguucgcggac

SEQ ID NO: 17621 - DNA, 21 bp, Homo sapiens
caacaaccaagcgcctggagg

SEQ ID NO: 17622 - RNA, 21 nt, RNAi
acaaccaagcgccuggagguu

SEQ ID NO: 17623 - RNA, 21 nt, RNAi
uuuguugguucgcggaccucc

SEQ ID NO: 17624 - DNA, 21 bp, Homo sapiens
caatgaaagacactgtttctc

SEQ ID NO: 17625 - RNA, 21 nt, RNAi
augaaagacacuguuucucuu

SEQ ID NO: 17626 - RNA, 21 nt, RNAi
uuuacuuucugugacaaagag

SEQ ID NO: 17627 - DNA, 21 bp, Homo sapiens
cactgtttctcctgttggctc

SEQ ID NO: 17628 - RNA, 21 nt, RNAi
cuguuucuccuguuggcucuu

SEQ ID NO: 17629 - RNA, 21 nt, RNAi
uugacaaagaggacaaccgag

SEQ ID NO: 17630 - DNA, 21 bp, Homo sapiens
cagaaaggtcagccttcctga

SEQ ID NO: 17631 - RNA, 21 nt, RNAi
gaaaggucagccuuccugauu

SEQ ID NO: 17632 - RNA, 21 nt, RNAi
uucuuuccagucggaaggacu

SEQ ID NO: 17633 - DNA, 21 bp, Homo sapiens
caggtctgcagctccaggtac

SEQ ID NO: 17634 - RNA, 21 nt, RNAi
ggucugcagcuccagguacuu

SEQ ID NO: 17635 - RNA, 21 nt, RNAi
uuccagacgucgagguccaug

SEQ ID NO: 17636 - DNA, 21 bp, Homo sapiens
cagctccaggtacatatcacg

SEQ ID NO: 17637 - RNA, 21 nt, RNAi
gcuccagguacauaucacguu

SEQ ID NO: 17638 - RNA, 21 nt, RNAi
uucgagguccauguauagugc

SEQ ID NO: 17639 - DNA, 21 bp, Homo sapiens
caggtacatatcacgcgcaca

SEQ ID NO: 17640 - RNA, 21 nt, RNAi
gguacauaucacgcgcacauu

SEQ ID NO: 17641 - RNA, 21 nt, RNAi
uuccauguauagugcgcgugu

SEQ ID NO: 17642 - DNA, 21 bp, Homo sapiens
catatcacgcgcacagcctgg

SEQ ID NO: 17643 - RNA, 21 nt, RNAi
uaucacgcgcacagccugguu

SEQ ID NO: 17644 - RNA, 21 nt, RNAi
uuauagugcgcgugucggacc

SEQ ID NO: 17645 - DNA, 21 bp, Homo sapiens
caatgaagtgacactttgaca

SEQ ID NO: 17646 - RNA, 21 nt, RNAi
augaagugacacuuugacauu

SEQ ID NO: 17647 - RNA, 21 nt, RNAi
uuuacuucacugugaaacugu

SEQ ID NO: 17648 - DNA, 21 bp, Homo sapiens
cactttgacatttcctacctt

SEQ ID NO: 17649 - RNA, 21 nt, RNAi
cuuugacauuuccuaccuuuu

SEQ ID NO: 17650 - RNA, 21 nt, RNAi
uugaaacuguaaaggauggaa

SEQ ID NO: 17651 - DNA, 21 bp, Homo sapiens
caggaagaaggtgctttctgc

SEQ ID NO: 17652 - RNA, 21 nt, RNAi
ggaagaaggugcuuucugcuu

SEQ ID NO: 17653 - RNA, 21 nt, RNAi
uuccuucuuccacgaaagacg

SEQ ID NO: 17654 - DNA, 21 bp, Homo sapiens
cattcagagactggagtgaga

SEQ ID NO: 17655 - RNA, 21 nt, RNAi
uucagagacuggagugagauu

SEQ ID NO: 17656 - RNA, 21 nt, RNAi
uuaagucucugaccucacucu

SEQ ID NO: 17657 - DNA, 21 bp, Homo sapiens
cagagactggagtgagatttg

SEQ ID NO: 17658 - RNA, 21 nt, RNAi
gagacuggagugagauuuguu

SEQ ID NO: 17659 - RNA, 21 nt, RNAi
uucucugaccucacucuaaac

SEQ ID NO: 17660 - DNA, 21 bp, Homo sapiens
cactccaggactgttgatgaa

SEQ ID NO: 17661 - RNA, 21 nt, RNAi
cuccaggacuguugaugaauu

SEQ ID NO: 17662 - RNA, 21 nt, RNAi
uugagguccugacaacuacuu

SEQ ID NO: 17663 - DNA, 21 bp, Homo sapiens
caagcagagcaatcagttagt

SEQ ID NO: 17664 - RNA, 21 nt, RNAi
agcagagcaaucaguuaguuu

SEQ ID NO: 17665 - RNA, 21 nt, RNAi
uuucgucucguuagucaauca

SEQ ID NO: 17666 - DNA, 21 bp, Homo sapiens
cagagcaatcagttagtgaat

SEQ ID NO: 17667 - RNA, 21 nt, RNAi
gagcaaucaguuagugaauuu

SEQ ID NO: 17668 - RNA, 21 nt, RNAi
uucucguuagucaaucacuua

SEQ ID NO: 17669 - DNA, 21 bp, Homo sapiens
caatcagttagtgaattggaa

SEQ ID NO: 17670 - RNA, 21 nt, RNAi
aucaguuagugaauuggaauu

SEQ ID NO: 17671 - RNA, 21 nt, RNAi
uuuagucaaucacuuaaccuu

SEQ ID NO: 17672 - DNA, 21 bp, Homo sapiens
cagttagtgaattggaattcc

SEQ ID NO: 17673 - RNA, 21 nt, RNAi
guuagugaauuggaauuccuu

SEQ ID NO: 17674 - RNA, 21 nt, RNAi
uucaaucacuuaaccuuaagg

SEQ ID NO: 17675 - DNA, 21 bp, Homo sapiens
caagtctttgctattgtgaat

SEQ ID NO: 17676 - RNA, 21 nt, RNAi
agucuuugcuauugugaauuu

SEQ ID NO: 17677 - RNA, 21 nt, RNAi
uuucagaaacgauaacacuua

SEQ ID NO: 17678 - DNA, 21 bp, Homo sapiens
caataaacatacgtgtgcatg

SEQ ID NO: 17679 - RNA, 21 nt, RNAi
auaaacauacgugugcauguu

SEQ ID NO: 17680 - RNA, 21 nt, RNAi
uuuauuuguaugcacacguac

SEQ ID NO: 17681 - DNA, 21 bp, Homo sapiens
catacgtgtgcatgtgtcttt

SEQ ID NO: 17682 - RNA, 21 nt, RNAi
uacgugugcaugugucuuuuu

SEQ ID NO: 17683 - RNA, 21 nt, RNAi
uuaugcacacguacacagaaa

SEQ ID NO: 17684 - DNA, 21 bp, Homo sapiens
cacactgtctttcacaatggt

SEQ ID NO: 17685 - RNA, 21 nt, RNAi
cacugucuuucacaaugguuu

SEQ ID NO: 17686 - RNA, 21 nt, RNAi
uugugacagaaaguguuacca

SEQ ID NO: 17687 - DNA, 21 bp, Homo sapiens
cactgtctttcacaatggttg

SEQ ID NO: 17688 - RNA, 21 nt, RNAi
cugucuuucacaaugguuguu

SEQ ID NO: 17689 - RNA, 21 nt, RNAi
uugacagaaaguguuaccaac

SEQ ID NO: 17690 - DNA, 21 bp, Homo sapiens
cactcctaccaacagtgtaaa

SEQ ID NO: 17691 - RNA, 21 nt, RNAi
cuccuaccaacaguguaaauu

SEQ ID NO: 17692 - RNA, 21 nt, RNAi
uugaggaugguugucacauuu

SEQ ID NO: 17693 - DNA, 21 bp, Homo sapiens
cacatcctctccagcatctgt

SEQ ID NO: 17694 - RNA, 21 nt, RNAi
cauccucuccagcaucuguuu

SEQ ID NO: 17695 - RNA, 21 nt, RNAi
uuguaggagaggucguagaca

SEQ ID NO: 17696 - DNA, 21 bp, Homo sapiens
catcctctccagcatctgttg

SEQ ID NO: 17697 - RNA, 21 nt, RNAi
uccucuccagcaucuguuguu

SEQ ID NO: 17698 - RNA, 21 nt, RNAi
uuaggagaggucguagacaac

SEQ ID NO: 17699 - DNA, 21 bp, Homo sapiens
cagcatctgttgtttcctgac

SEQ ID NO: 17700 - RNA, 21 nt, RNAi
gcaucuguuguuuccugacuu

SEQ ID NO: 17701 - RNA, 21 nt, RNAi
uucguagacaacaaaggacug

SEQ ID NO: 17702 - DNA, 21 bp, Homo sapiens
catctgttgtttcctgacttt

SEQ ID NO: 17703 - RNA, 21 nt, RNAi
ucuguuguuuccugacuuuuu

SEQ ID NO: 17704 - RNA, 21 nt, RNAi
uuagacaacaaaggacugaaa

SEQ ID NO: 17705 - DNA, 21 bp, Homo sapiens
cattctaactggtgtgagatg

SEQ ID NO: 17706 - RNA, 21 nt, RNAi
uucuaacuggugugagauguu

SEQ ID NO: 17707 - RNA, 21 nt, RNAi
uuaagauugaccacacucuac

SEQ ID NO: 17708 - DNA, 21 bp, Homo sapiens
catttctctaatgaccagtga

SEQ ID NO: 17709 - RNA, 21 nt, RNAi
uuucucuaaugaccagugauu

SEQ ID NO: 17710 - RNA, 21 nt, RNAi
uuaaagagauuacuggucacu

SEQ ID NO: 17711 - DNA, 21 bp, Homo sapiens
catatgtttgttggccacatg

SEQ ID NO: 17712 - RNA, 21 nt, RNAi
uauguuuguuggccacauguu

SEQ ID NO: 17713 - RNA, 21 nt, RNAi
uuauacaaacaaccgguguac

SEQ ID NO: 17714 - DNA, 21 bp, Homo sapiens
catgaagacaagattagaaga

SEQ ID NO: 17715 - RNA, 21 nt, RNAi
ugaagacaagauuagaagauu

SEQ ID NO: 17716 - RNA, 21 nt, RNAi
uuacuucuguucuaaucuucu

SEQ ID NO: 17717 - DNA, 21 bp, Homo sapiens
caaacaaagcgtccaagaaat

SEQ ID NO: 17718 - RNA, 21 nt, RNAi
aacaaagcguccaagaaauuu

SEQ ID NO: 17719 - RNA, 21 nt, RNAi
uuuuguuucgcagguucuuua

SEQ ID NO: 17720 - DNA, 21 bp, Homo sapiens
caaagcgtccaagaaatatgg

SEQ ID NO: 17721 - RNA, 21 nt, RNAi
aagcguccaagaaauaugguu

SEQ ID NO: 17722 - RNA, 21 nt, RNAi
uuuucgcagguucuuuauacc

SEQ ID NO: 17723 - DNA, 21 bp, Homo sapiens
caagaacaaacttacgtttga

SEQ ID NO: 17724 - RNA, 21 nt, RNAi
agaacaaacuuacguuugauu

SEQ ID NO: 17725 - RNA, 21 nt, RNAi
uuucuuguuugaaugcaaacu

SEQ ID NO: 17726 - DNA, 21 bp, Homo sapiens
caaacttacgtttgactggtg

SEQ ID NO: 17727 - RNA, 21 nt, RNAi
aacuuacguuugacugguguu

SEQ ID NO: 17728 - RNA, 21 nt, RNAi
uuuugaaugcaaacugaccac

SEQ ID NO: 17729 - DNA, 21 bp, Homo sapiens
cactcttcaggatattatcca

SEQ ID NO: 17730 - RNA, 21 nt, RNAi
cucuucaggauauuauccauu

SEQ ID NO: 17731 - RNA, 21 nt, RNAi
uugagaaguccuauaauaggu

SEQ ID NO: 17732 - DNA, 21 bp, Homo sapiens
caggatattatccaggagaac

SEQ ID NO: 17733 - RNA, 21 nt, RNAi
ggauauuauccaggagaacuu

SEQ ID NO: 17734 - RNA, 21 nt, RNAi
uuccuauaauagguccucuug

SEQ ID NO: 17735 - DNA, 21 bp, Homo sapiens
caggagaacttctccaaccta

SEQ ID NO: 17736 - RNA, 21 nt, RNAi
ggagaacuucuccaaccuauu

SEQ ID NO: 17737 - RNA, 21 nt, RNAi
uuccucuugaagagguuggau

SEQ ID NO: 17738 - DNA, 21 bp, Homo sapiens
caacctagcaagacagaccaa

SEQ ID NO: 17739 - RNA, 21 nt, RNAi
accuagcaagacagaccaauu

SEQ ID NO: 17740 - RNA, 21 nt, RNAi
uuuggaucguucugucugguu

SEQ ID NO: 17741 - DNA, 21 bp, Homo sapiens
caagacagaccaacgttcaaa

SEQ ID NO: 17742 - RNA, 21 nt, RNAi
agacagaccaacguucaaauu

SEQ ID NO: 17743 - RNA, 21 nt, RNAi
uuucugucugguugcaaguuu

SEQ ID NO: 17744 - DNA, 21 bp, Homo sapiens
cagaccaacgttcaaattcag

SEQ ID NO: 17745 - RNA, 21 nt, RNAi
gaccaacguucaaauucaguu

SEQ ID NO: 17746 - RNA, 21 nt, RNAi
uucugguugcaaguuuaaguc

SEQ ID NO: 17747 - DNA, 21 bp, Homo sapiens
caacgttcaaattcaggaaat

SEQ ID NO: 17748 - RNA, 21 nt, RNAi
acguucaaauucaggaaauuu

SEQ ID NO: 17749 - RNA, 21 nt, RNAi
uuugcaaguuuaaguccuuua

SEQ ID NO: 17750 - DNA, 21 bp, Homo sapiens
caaattcaggaaatacagaga

SEQ ID NO: 17751 - RNA, 21 nt, RNAi
aauucaggaaauacagagauu

SEQ ID NO: 17752 - RNA, 21 nt, RNAi
uuuuaaguccuuuaugucucu

SEQ ID NO: 17753 - DNA, 21 bp, Homo sapiens
caaagatatttctcgagaaga

SEQ ID NO: 17754 - RNA, 21 nt, RNAi
aagauauuucucgagaagauu

SEQ ID NO: 17755 - RNA, 21 nt, RNAi
uuuucuauaaagagcucuucu

SEQ ID NO: 17756 - DNA, 21 bp, Homo sapiens
cacataattgtcagattcacc

SEQ ID NO: 17757 - RNA, 21 nt, RNAi
cauaauugucagauucaccuu

SEQ ID NO: 17758 - RNA, 21 nt, RNAi
uuguauuaacagucuaagugg

SEQ ID NO: 17759 - DNA, 21 bp, Homo sapiens
cataattgtcagattcaccaa

SEQ ID NO: 17760 - RNA, 21 nt, RNAi
uaauugucagauucaccaauu

SEQ ID NO: 17761 - RNA, 21 nt, RNAi
uuauuaacagucuaagugguu

SEQ ID NO: 17762 - DNA, 21 bp, Homo sapiens
cagattcaccaaggttgaaat

SEQ ID NO: 17763 - RNA, 21 nt, RNAi
gauucaccaagguugaaauuu

SEQ ID NO: 17764 - RNA, 21 nt, RNAi
uucuaagugguuccaacuuua

SEQ ID NO: 17765 - DNA, 21 bp, Homo sapiens
caccaaggttgaaatgaagga

SEQ ID NO: 17766 - RNA, 21 nt, RNAi
ccaagguugaaaugaaggauu

SEQ ID NO: 17767 - RNA, 21 nt, RNAi
uugguuccaacuuuacuuccu

SEQ ID NO: 17768 - DNA, 21 bp, Homo sapiens
cagccagagagaaaggtcagg

SEQ ID NO: 17769 - RNA, 21 nt, RNAi
gccagagagaaaggucagguu

SEQ ID NO: 17770 - RNA, 21 nt, RNAi
uucggucucucuuuccagucc

SEQ ID NO: 17771 - DNA, 21 bp, Homo sapiens
cagagagaaaggtcaggttac

SEQ ID NO: 17772 - RNA, 21 nt, RNAi
gagagaaaggucagguuacuu

SEQ ID NO: 17773 - RNA, 21 nt, RNAi
uucucucuuuccaguccaaug

SEQ ID NO: 17774 - DNA, 21 bp, Homo sapiens
catcagactaacagcagatct

SEQ ID NO: 17775 - RNA, 21 nt, RNAi
ucagacuaacagcagaucuuu

SEQ ID NO: 17776 - RNA, 21 nt, RNAi
uuagucugauugucgucuaga

SEQ ID NO: 17777 - DNA, 21 bp, Homo sapiens
cagactaacagcagatctctc

SEQ ID NO: 17778 - RNA, 21 nt, RNAi
gacuaacagcagaucucucuu

SEQ ID NO: 17779 - RNA, 21 nt, RNAi
uucugauugucgucuagagag

SEQ ID NO: 17780 - DNA, 21 bp, Homo sapiens
cagcagatctctctgcagaaa

SEQ ID NO: 17781 - RNA, 21 nt, RNAi
gcagaucucucugcagaaauu

SEQ ID NO: 17782 - RNA, 21 nt, RNAi
uucgucuagagagacgucuuu

SEQ ID NO: 17783 - DNA, 21 bp, Homo sapiens
caatccagaatttcatatcca

SEQ ID NO: 17784 - RNA, 21 nt, RNAi
auccagaauuucauauccauu

SEQ ID NO: 17785 - RNA, 21 nt, RNAi
uuuaggucuuaaaguauaggu

SEQ ID NO: 17786 - DNA, 21 bp, Homo sapiens
cagaatttcatatccagccaa

SEQ ID NO: 17787 - RNA, 21 nt, RNAi
gaauuucauauccagccaauu

SEQ ID NO: 17788 - RNA, 21 nt, RNAi
uucuuaaaguauaggucgguu

SEQ ID NO: 17789 - DNA, 21 bp, Homo sapiens
catatccagccaaactaagct

SEQ ID NO: 17790 - RNA, 21 nt, RNAi
uauccagccaaacuaagcuuu

SEQ ID NO: 17791 - RNA, 21 nt, RNAi
uuauaggucgguuugauucga

SEQ ID NO: 17792 - DNA, 21 bp, Homo sapiens
cagccaaactaagcttcataa

SEQ ID NO: 17793 - RNA, 21 nt, RNAi
gccaaacuaagcuucauaauu

SEQ ID NO: 17794 - RNA, 21 nt, RNAi
uucgguuugauucgaaguauu

SEQ ID NO: 17795 - DNA, 21 bp, Homo sapiens
caaactaagcttcataagcaa

SEQ ID NO: 17796 - RNA, 21 nt, RNAi
aacuaagcuucauaagcaauu

SEQ ID NO: 17797 - RNA, 21 nt, RNAi
uuuugauucgaaguauucguu

SEQ ID NO: 17798 - DNA, 21 bp, Homo sapiens
caccaccaggcctgccttaca

SEQ ID NO: 17799 - RNA, 21 nt, RNAi
ccaccaggccugccuuacauu

SEQ ID NO: 17800 - RNA, 21 nt, RNAi
uuggugguccggacggaaugu

SEQ ID NO: 17801 - DNA, 21 bp, Homo sapiens
caccaggcctgccttacaaga

SEQ ID NO: 17802 - RNA, 21 nt, RNAi
ccaggccugccuuacaagauu

SEQ ID NO: 17803 - RNA, 21 nt, RNAi
uugguccggacggaauguucu

SEQ ID NO: 17804 - DNA, 21 bp, Homo sapiens
caggcctgccttacaagacat

SEQ ID NO: 17805 - RNA, 21 nt, RNAi
ggccugccuuacaagacauuu

SEQ ID NO: 17806 - RNA, 21 nt, RNAi
uuccggacggaauguucugua

SEQ ID NO: 17807 - DNA, 21 bp, Homo sapiens
caagacatcctgaaggaagca

SEQ ID NO: 17808 - RNA, 21 nt, RNAi
agacauccugaaggaagcauu

SEQ ID NO: 17809 - RNA, 21 nt, RNAi
uuucuguaggacuuccuucgu

SEQ ID NO: 17810 - DNA, 21 bp, Homo sapiens
catcctgaaggaagcactaaa

SEQ ID NO: 17811 - RNA, 21 nt, RNAi
uccugaaggaagcacuaaauu

SEQ ID NO: 17812 - RNA, 21 nt, RNAi
uuaggacuuccuucgugauuu

SEQ ID NO: 17813 - DNA, 21 bp, Homo sapiens
caaattgtagagaccattgac

SEQ ID NO: 17814 - RNA, 21 nt, RNAi
aauuguagagaccauugacuu

SEQ ID NO: 17815 - RNA, 21 nt, RNAi
uuuuaacaucucugguaacug

SEQ ID NO: 17816 - DNA, 21 bp, Homo sapiens
cattgacactatgaagaaacc

SEQ ID NO: 17817 - RNA, 21 nt, RNAi
uugacacuaugaagaaaccuu

SEQ ID NO: 17818 - RNA, 21 nt, RNAi
uuaacugugauacuucuuugg

SEQ ID NO: 17819 - DNA, 21 bp, Homo sapiens
cactatgaagaaaccgtgtca

SEQ ID NO: 17820 - RNA, 21 nt, RNAi
cuaugaagaaaccgugucauu

SEQ ID NO: 17821 - RNA, 21 nt, RNAi
uugauacuucuuuggcacagu

SEQ ID NO: 17822 - DNA, 21 bp, Homo sapiens
cagctagtatcataatgacag

SEQ ID NO: 17823 - RNA, 21 nt, RNAi
gcuaguaucauaaugacaguu

SEQ ID NO: 17824 - RNA, 21 nt, RNAi
uucgaucauaguauuacuguc

SEQ ID NO: 17825 - DNA, 21 bp, Homo sapiens
cataatgacaggatcagattc

SEQ ID NO: 17826 - RNA, 21 nt, RNAi
uaaugacaggaucagauucuu

SEQ ID NO: 17827 - RNA, 21 nt, RNAi
uuauuacuguccuagucuaag

SEQ ID NO: 17828 - DNA, 21 bp, Homo sapiens
caggatcagattcacacataa

SEQ ID NO: 17829 - RNA, 21 nt, RNAi
ggaucagauucacacauaauu

SEQ ID NO: 17830 - RNA, 21 nt, RNAi
uuccuagucuaaguguguauu

SEQ ID NO: 17831 - DNA, 21 bp, Homo sapiens
cagactggcaaattggttaaa

SEQ ID NO: 17832 - RNA, 21 nt, RNAi
gacuggcaaauugguuaaauu

SEQ ID NO: 17833 - RNA, 21 nt, RNAi
uucugaccguuuaaccaauuu

SEQ ID NO: 17834 - DNA, 21 bp, Homo sapiens
caaattggttaaagagtcaag

SEQ ID NO: 17835 - RNA, 21 nt, RNAi
aauugguuaaagagucaaguu

SEQ ID NO: 17836 - RNA, 21 nt, RNAi
uuuuaaccaauuucucaguuc

SEQ ID NO: 17837 - DNA, 21 bp, Homo sapiens
caagactcattggtgtgccgt

SEQ ID NO: 17838 - RNA, 21 nt, RNAi
agacucauuggugugccguuu

SEQ ID NO: 17839 - RNA, 21 nt, RNAi
uuucugaguaaccacacggca

SEQ ID NO: 17840 - DNA, 21 bp, Homo sapiens
cattggtgtgccgtattcagg

SEQ ID NO: 17841 - RNA, 21 nt, RNAi
uuggugugccguauucagguu

SEQ ID NO: 17842 - RNA, 21 nt, RNAi
uuaaccacacggcauaagucc

SEQ ID NO: 17843 - DNA, 21 bp, Homo sapiens
catctcacgtgcaaagacaca

SEQ ID NO: 17844 - RNA, 21 nt, RNAi
ucucacgugcaaagacacauu

SEQ ID NO: 17845 - RNA, 21 nt, RNAi
uuagagugcacguuucugugu

SEQ ID NO: 17846 - DNA, 21 bp, Homo sapiens
cacgtgcaaagacacacatag

SEQ ID NO: 17847 - RNA, 21 nt, RNAi
cgugcaaagacacacauaguu

SEQ ID NO: 17848 - RNA, 21 nt, RNAi
uugcacguuucuguguguauc

SEQ ID NO: 17849 - DNA, 21 bp, Homo sapiens
caaagacacacataggctcag

SEQ ID NO: 17850 - RNA, 21 nt, RNAi
aagacacacauaggcucaguu

SEQ ID NO: 17851 - RNA, 21 nt, RNAi
uuuucuguguguauccgaguc

SEQ ID NO: 17852 - DNA, 21 bp, Homo sapiens
cacacataggctcagagtaaa

SEQ ID NO: 17853 - RNA, 21 nt, RNAi
cacauaggcucagaguaaauu

SEQ ID NO: 17854 - RNA, 21 nt, RNAi
uuguguauccgagucucauuu

SEQ ID NO: 17855 - DNA, 21 bp, Homo sapiens
gaagaaacgctaatggactcc

SEQ ID NO: 17856 - RNA, 21 nt, RNAi
agaaacgcuaauggacuccuu

SEQ ID NO: 17857 - RNA, 21 nt, RNAi
uuucuuugcgauuaccugagg

SEQ ID NO: 17858 - DNA, 21 bp, Homo sapiens
gaaacgctaatggactccact

SEQ ID NO: 17859 - RNA, 21 nt, RNAi
aacgcuaauggacuccacuuu

SEQ ID NO: 17860 - RNA, 21 nt, RNAi
uuuugcgauuaccugagguga

SEQ ID NO: 17861 - DNA, 21 bp, Homo sapiens
gactccactacagcgactgct

SEQ ID NO: 17862 - RNA, 21 nt, RNAi
cuccacuacagcgacugcuuu

SEQ ID NO: 17863 - RNA, 21 nt, RNAi
uugaggugaugucgcugacga

SEQ ID NO: 17864 - DNA, 21 bp, Homo sapiens
gatggtgcatcctccatcagg

SEQ ID NO: 17865 - RNA, 21 nt, RNAi
uggugcauccuccaucagguu

SEQ ID NO: 17866 - RNA, 21 nt, RNAi
uuaccacguaggagguagucc

SEQ ID NO: 17867 - DNA, 21 bp, Homo sapiens
gaagaggtgagtggctacgat

SEQ ID NO: 17868 - RNA, 21 nt, RNAi
agaggugaguggcuacgauuu

SEQ ID NO: 17869 - RNA, 21 nt, RNAi
uuucuccacucaccgaugcua

SEQ ID NO: 17870 - DNA, 21 bp, Homo sapiens
gaggtgagtggctacgatgag

SEQ ID NO: 17871 - RNA, 21 nt, RNAi
ggugaguggcuacgaugaguu

SEQ ID NO: 17872 - RNA, 21 nt, RNAi
uuccacucaccgaugcuacuc

SEQ ID NO: 17873 - DNA, 21 bp, Homo sapiens
gagtggctacgatgagaacat

SEQ ID NO: 17874 - RNA, 21 nt, RNAi
guggcuacgaugagaacauuu

SEQ ID NO: 17875 - RNA, 21 nt, RNAi
uucaccgaugcuacucuugua

SEQ ID NO: 17876 - DNA, 21 bp, Homo sapiens
gatgagaacatgaacacgatc

SEQ ID NO: 17877 - RNA, 21 nt, RNAi
ugagaacaugaacacgaucuu

SEQ ID NO: 17878 - RNA, 21 nt, RNAi
uuacucuuguacuugugcuag

SEQ ID NO: 17879 - DNA, 21 bp, Homo sapiens
gagaacatgaacacgatccgc

SEQ ID NO: 17880 - RNA, 21 nt, RNAi
gaacaugaacacgauccgcuu

SEQ ID NO: 17881 - RNA, 21 nt, RNAi
uucuuguacuugugcuaggcg

SEQ ID NO: 17882 - DNA, 21 bp, Homo sapiens
gaacatgaacacgatccgcac

SEQ ID NO: 17883 - RNA, 21 nt, RNAi
acaugaacacgauccgcacuu

SEQ ID NO: 17884 - RNA, 21 nt, RNAi
uuuguacuugugcuaggcgug

SEQ ID NO: 17885 - DNA, 21 bp, Homo sapiens
gaacacgatccgcacgtacca

SEQ ID NO: 17886 - RNA, 21 nt, RNAi
acacgauccgcacguaccauu

SEQ ID NO: 17887 - RNA, 21 nt, RNAi
uuugugcuaggcgugcauggu

SEQ ID NO: 17888 - DNA, 21 bp, Homo sapiens
gatccgcacgtaccaggtgtg

SEQ ID NO: 17889 - RNA, 21 nt, RNAi
uccgcacguaccagguguguu

SEQ ID NO: 17890 - RNA, 21 nt, RNAi
uuaggcgugcaugguccacac

SEQ ID NO: 17891 - DNA, 21 bp, Homo sapiens
gagtcaagccagaacaactgg

SEQ ID NO: 17892 - RNA, 21 nt, RNAi
gucaagccagaacaacugguu

SEQ ID NO: 17893 - RNA, 21 nt, RNAi
uucaguucggucuuguugacc

SEQ ID NO: 17894 - DNA, 21 bp, Homo sapiens
gaacaactggctacggaccaa

SEQ ID NO: 17895 - RNA, 21 nt, RNAi
acaacuggcuacggaccaauu

SEQ ID NO: 17896 - RNA, 21 nt, RNAi
uuuguugaccgaugccugguu

SEQ ID NO: 17897 - DNA, 21 bp, Homo sapiens
gagaccttcaacctctattac

SEQ ID NO: 17898 - RNA, 21 nt, RNAi
gaccuucaaccucuauuacuu

SEQ ID NO: 17899 - RNA, 21 nt, RNAi
uucuggaaguuggagauaaug

SEQ ID NO: 17900 - DNA, 21 bp, Homo sapiens
gaccttcaacctctattacta

SEQ ID NO: 17901 - RNA, 21 nt, RNAi
ccuucaaccucuauuacuauu

SEQ ID NO: 17902 - RNA, 21 nt, RNAi
uuggaaguuggagauaaugau

SEQ ID NO: 17903 - DNA, 21 bp, Homo sapiens
gaggctgactttgactcggcc

SEQ ID NO: 17904 - RNA, 21 nt, RNAi
ggcugacuuugacucggccuu

SEQ ID NO: 17905 - RNA, 21 nt, RNAi
uuccgacugaaacugagccgg

SEQ ID NO: 17906 - DNA, 21 bp, Homo sapiens
gactttgactcggccaccaag

SEQ ID NO: 17907 - RNA, 21 nt, RNAi
cuuugacucggccaccaaguu

SEQ ID NO: 17908 - RNA, 21 nt, RNAi
uugaaacugagccggugguuc

SEQ ID NO: 17909 - DNA, 21 bp, Homo sapiens
gactcggccaccaagaccttc

SEQ ID NO: 17910 - RNA, 21 nt, RNAi
cucggccaccaagaccuucuu

SEQ ID NO: 17911 - RNA, 21 nt, RNAi
uugagccggugguucuggaag

SEQ ID NO: 17912 - DNA, 21 bp, Homo sapiens
gaaggtggataccattgcagc

SEQ ID NO: 17913 - RNA, 21 nt, RNAi
agguggauaccauugcagcuu

SEQ ID NO: 17914 - RNA, 21 nt, RNAi
uuuccaccuaugguaacgucg

SEQ ID NO: 17915 - DNA, 21 bp, Homo sapiens
gataccattgcagccgacgag

SEQ ID NO: 17916 - RNA, 21 nt, RNAi
uaccauugcagccgacgaguu

SEQ ID NO: 17917 - RNA, 21 nt, RNAi
uuaugguaacgucggcugcuc

SEQ ID NO: 17918 - DNA, 21 bp, Homo sapiens
gactatggcggctgcatgtcc

SEQ ID NO: 17919 - RNA, 21 nt, RNAi
cuauggcggcugcauguccuu

SEQ ID NO: 17920 - RNA, 21 nt, RNAi
uugauaccgccgacguacagg

SEQ ID NO: 17921 - DNA, 21 bp, Homo sapiens
gaatggcgccatcttccagga

SEQ ID NO: 17922 - RNA, 21 nt, RNAi
auggcgccaucuuccaggauu

SEQ ID NO: 17923 - RNA, 21 nt, RNAi
uuuaccgcgguagaagguccu

SEQ ID NO: 17924 - DNA, 21 bp, Homo sapiens
gagagcacatcgctggtggct

SEQ ID NO: 17925 - RNA, 21 nt, RNAi
gagcacaucgcugguggcuuu

SEQ ID NO: 17926 - RNA, 21 nt, RNAi
uucucguguagcgaccaccga

SEQ ID NO: 17927 - DNA, 21 bp, Homo sapiens
gaggccgttgagaatggcacc

SEQ ID NO: 17928 - RNA, 21 nt, RNAi
ggccguugagaauggcaccuu

SEQ ID NO: 17929 - RNA, 21 nt, RNAi
uuccggcaacucuuaccgugg

SEQ ID NO: 17930 - DNA, 21 bp, Homo sapiens
gagaatggcaccgtctgccga

SEQ ID NO: 17931 - RNA, 21 nt, RNAi
gaauggcaccgucugccgauu

SEQ ID NO: 17932 - RNA, 21 nt, RNAi
uucuuaccguggcagacggcu

SEQ ID NO: 17933 - DNA, 21 bp, Homo sapiens
gactttcaaggccaaccaagg

SEQ ID NO: 17934 - RNA, 21 nt, RNAi
cuuucaaggccaaccaagguu

SEQ ID NO: 17935 - RNA, 21 nt, RNAi
uugaaaguuccgguugguucc

SEQ ID NO: 17936 - DNA, 21 bp, Homo sapiens
gatttccagtgtcaatgagac

SEQ ID NO: 17937 - RNA, 21 nt, RNAi
uuuccagugucaaugagacuu

SEQ ID NO: 17938 - RNA, 21 nt, RNAi
uuaaaggucacaguuacucug

SEQ ID NO: 17939 - DNA, 21 bp, Homo sapiens
gagaggacctcgtctacaaca

SEQ ID NO: 17940 - RNA, 21 nt, RNAi
gaggaccucgucuacaacauu

SEQ ID NO: 17941 - RNA, 21 nt, RNAi
uucuccuggagcagauguugu

SEQ ID NO: 17942 - DNA, 21 bp, Homo sapiens
gaggacctcgtctacaacatc

SEQ ID NO: 17943 - RNA, 21 nt, RNAi
ggaccucgucuacaacaucuu

SEQ ID NO: 17944 - RNA, 21 nt, RNAi
uuccuggagcagauguuguag

SEQ ID NO: 17945 - DNA, 21 bp, Homo sapiens
gacctcgtctacaacatcatc

SEQ ID NO: 17946 - RNA, 21 nt, RNAi
ccucgucuacaacaucaucuu

SEQ ID NO: 17947 - RNA, 21 nt, RNAi
uuggagcagauguuguaguag

SEQ ID NO: 17948 - DNA, 21 bp, Homo sapiens
gacaatgtacagtacgcacca

SEQ ID NO: 17949 - RNA, 21 nt, RNAi
caauguacaguacgcaccauu

SEQ ID NO: 17950 - RNA, 21 nt, RNAi
uuguuacaugucaugcguggu

SEQ ID NO: 17951 - DNA, 21 bp, Homo sapiens
gaccgagccacgcatttacat

SEQ ID NO: 17952 - RNA, 21 nt, RNAi
ccgagccacgcauuuacauuu

SEQ ID NO: 17953 - RNA, 21 nt, RNAi
uuggcucggugcguaaaugua

SEQ ID NO: 17954 - DNA, 21 bp, Homo sapiens
gagccacgcatttacatcagt

SEQ ID NO: 17955 - RNA, 21 nt, RNAi
gccacgcauuuacaucaguuu

SEQ ID NO: 17956 - RNA, 21 nt, RNAi
uucggugcguaaauguaguca

SEQ ID NO: 17957 - DNA, 21 bp, Homo sapiens
gagatccaggctgtgaacggc

SEQ ID NO: 17958 - RNA, 21 nt, RNAi
gauccaggcugugaacggcuu

SEQ ID NO: 17959 - RNA, 21 nt, RNAi
uucuagguccgacacuugccg

SEQ ID NO: 17960 - DNA, 21 bp, Homo sapiens
gatccaggctgtgaacggcgt

SEQ ID NO: 17961 - RNA, 21 nt, RNAi
uccaggcugugaacggcguuu

SEQ ID NO: 17962 - RNA, 21 nt, RNAi
uuagguccgacacuugccgca

SEQ ID NO: 17963 - DNA, 21 bp, Homo sapiens
gaacggcgttactgaccagag

SEQ ID NO: 17964 - RNA, 21 nt, RNAi
acggcguuacugaccagaguu

SEQ ID NO: 17965 - RNA, 21 nt, RNAi
uuugccgcaaugacuggucuc

SEQ ID NO: 17966 - DNA, 21 bp, Homo sapiens
gaacatcaccaccaaccaggc

SEQ ID NO: 17967 - RNA, 21 nt, RNAi
acaucaccaccaaccaggcuu

SEQ ID NO: 17968 - RNA, 21 nt, RNAi
uuuguaguggugguugguccg

SEQ ID NO: 17969 - DNA, 21 bp, Homo sapiens
gatcctggactatgagctgca

SEQ ID NO: 17970 - RNA, 21 nt, RNAi
uccuggacuaugagcugcauu

SEQ ID NO: 17971 - RNA, 21 nt, RNAi
uuaggaccugauacucgacgu

SEQ ID NO: 17972 - DNA, 21 bp, Homo sapiens
gactatgagctgcagtactat

SEQ ID NO: 17973 - RNA, 21 nt, RNAi
cuaugagcugcaguacuauuu

SEQ ID NO: 17974 - RNA, 21 nt, RNAi
uugauacucgacgucaugaua

SEQ ID NO: 17975 - DNA, 21 bp, Homo sapiens
gagctgcagtactatgagaag

SEQ ID NO: 17976 - RNA, 21 nt, RNAi
gcugcaguacuaugagaaguu

SEQ ID NO: 17977 - RNA, 21 nt, RNAi
uucgacgucaugauacucuuc

SEQ ID NO: 17978 - DNA, 21 bp, Homo sapiens
gagaaggagctcagtgagtac

SEQ ID NO: 17979 - RNA, 21 nt, RNAi
gaaggagcucagugaguacuu

SEQ ID NO: 17980 - RNA, 21 nt, RNAi
uucuuccucgagucacucaug

SEQ ID NO: 17981 - DNA, 21 bp, Homo sapiens
gaaggagctcagtgagtacaa

SEQ ID NO: 17982 - RNA, 21 nt, RNAi
aggagcucagugaguacaauu

SEQ ID NO: 17983 - RNA, 21 nt, RNAi
uuuccucgagucacucauguu

SEQ ID NO: 17984 - DNA, 21 bp, Homo sapiens
gagctcagtgagtacaacgcc

SEQ ID NO: 17985 - RNA, 21 nt, RNAi
gcucagugaguacaacgccuu

SEQ ID NO: 17986 - RNA, 21 nt, RNAi
uucgagucacucauguugcgg

SEQ ID NO: 17987 - DNA, 21 bp, Homo sapiens
gagtacaacgccacagccata

SEQ ID NO: 17988 - RNA, 21 nt, RNAi
guacaacgccacagccauauu

SEQ ID NO: 17989 - RNA, 21 nt, RNAi
uucauguugcggugucgguau

SEQ ID NO: 17990 - DNA, 21 bp, Homo sapiens
gatgtacttccagaccatgac

SEQ ID NO: 17991 - RNA, 21 nt, RNAi
uguacuuccagaccaugacuu

SEQ ID NO: 17992 - RNA, 21 nt, RNAi
uuacaugaaggucugguacug

SEQ ID NO: 17993 - DNA, 21 bp, Homo sapiens
gaccatgacagaagccgagta

SEQ ID NO: 17994 - RNA, 21 nt, RNAi
ccaugacagaagccgaguauu

SEQ ID NO: 17995 - RNA, 21 nt, RNAi
uugguacugucuucggcucau

SEQ ID NO: 17996 - DNA, 21 bp, Homo sapiens
gacagaagccgagtaccagac

SEQ ID NO: 17997 - RNA, 21 nt, RNAi
cagaagccgaguaccagacuu

SEQ ID NO: 17998 - RNA, 21 nt, RNAi
uugucuucggcucauggucug

SEQ ID NO: 17999 - DNA, 21 bp, Homo sapiens
gaagccgagtaccagacaagc

SEQ ID NO: 18000 - RNA, 21 nt, RNAi
agccgaguaccagacaagcuu

SEQ ID NO: 18001 - RNA, 21 nt, RNAi
uuucggcucauggucuguucg

SEQ ID NO: 18002 - DNA, 21 bp, Homo sapiens
gagtaccagacaagcatccag

SEQ ID NO: 18003 - RNA, 21 nt, RNAi
guaccagacaagcauccaguu

SEQ ID NO: 18004 - RNA, 21 nt, RNAi
uucauggucuguucguagguc

SEQ ID NO: 18005 - DNA, 21 bp, Homo sapiens
gacaagcatccaggagaagtt

SEQ ID NO: 18006 - RNA, 21 nt, RNAi
caagcauccaggagaaguuuu

SEQ ID NO: 18007 - RNA, 21 nt, RNAi
uuguucguagguccucuucaa

SEQ ID NO: 18008 - DNA, 21 bp, Homo sapiens
gagaagttgccactcatcatc

SEQ ID NO: 18009 - RNA, 21 nt, RNAi
gaaguugccacucaucaucuu

SEQ ID NO: 18010 - RNA, 21 nt, RNAi
uucuucaacggugaguaguag

SEQ ID NO: 18011 - DNA, 21 bp, Homo sapiens
gaagttgccactcatcatcgg

SEQ ID NO: 18012 - RNA, 21 nt, RNAi
aguugccacucaucaucgguu

SEQ ID NO: 18013 - RNA, 21 nt, RNAi
uuucaacggugaguaguagcc

SEQ ID NO: 18014 - DNA, 21 bp, Homo sapiens
gagcgtgctgactcggagtac

SEQ ID NO: 18015 - RNA, 21 nt, RNAi
gcgugcugacucggaguacuu

SEQ ID NO: 18016 - RNA, 21 nt, RNAi
uucgcacgacugagccucaug

SEQ ID NO: 18017 - DNA, 21 bp, Homo sapiens
gactcggagtacacggacaag

SEQ ID NO: 18018 - RNA, 21 nt, RNAi
cucggaguacacggacaaguu

SEQ ID NO: 18019 - RNA, 21 nt, RNAi
uugagccucaugugccuguuc

SEQ ID NO: 18020 - DNA, 21 bp, Homo sapiens
gagtacacggacaagctgcaa

SEQ ID NO: 18021 - RNA, 21 nt, RNAi
guacacggacaagcugcaauu

SEQ ID NO: 18022 - RNA, 21 nt, RNAi
uucaugugccuguucgacguu

SEQ ID NO: 18023 - DNA, 21 bp, Homo sapiens
gacaagctgcaacactacacc

SEQ ID NO: 18024 - RNA, 21 nt, RNAi
caagcugcaacacuacaccuu

SEQ ID NO: 18025 - RNA, 21 nt, RNAi
uuguucgacguugugaugugg

SEQ ID NO: 18026 - DNA, 21 bp, Homo sapiens
gaagatctacatcgatccttt

SEQ ID NO: 18027 - RNA, 21 nt, RNAi
agaucuacaucgauccuuuuu

SEQ ID NO: 18028 - RNA, 21 nt, RNAi
uuucuagauguagcuaggaaa

SEQ ID NO: 18029 - DNA, 21 bp, Homo sapiens
gatctacatcgatcctttcac

SEQ ID NO: 18030 - RNA, 21 nt, RNAi
ucuacaucgauccuuucacuu

SEQ ID NO: 18031 - RNA, 21 nt, RNAi
uuagauguagcuaggaaagug

SEQ ID NO: 18032 - DNA, 21 bp, Homo sapiens
gatcctttcacctacgaggac

SEQ ID NO: 18033 - RNA, 21 nt, RNAi
uccuuucaccuacgaggacuu

SEQ ID NO: 18034 - RNA, 21 nt, RNAi
uuaggaaaguggaugcuccug

SEQ ID NO: 18035 - DNA, 21 bp, Homo sapiens
gagtttgccaaggaaattgac

SEQ ID NO: 18036 - RNA, 21 nt, RNAi
guuugccaaggaaauugacuu

SEQ ID NO: 18037 - RNA, 21 nt, RNAi
uucaaacgguuccuuuaacug

SEQ ID NO: 18038 - DNA, 21 bp, Homo sapiens
gaaattgacatctcctgtgtc

SEQ ID NO: 18039 - RNA, 21 nt, RNAi
aauugacaucuccugugucuu

SEQ ID NO: 18040 - RNA, 21 nt, RNAi
uuuuaacuguagaggacacag

SEQ ID NO: 18041 - DNA, 21 bp, Homo sapiens
gagtttggcgaggtctgcagt

SEQ ID NO: 18042 - RNA, 21 nt, RNAi
guuuggcgaggucugcaguuu

SEQ ID NO: 18043 - RNA, 21 nt, RNAi
uucaaaccgcuccagacguca

SEQ ID NO: 18044 - DNA, 21 bp, Homo sapiens
gaagctgccaggcaagagaga

SEQ ID NO: 18045 - RNA, 21 nt, RNAi
agcugccaggcaagagagauu

SEQ ID NO: 18046 - RNA, 21 nt, RNAi
uuucgacgguccguucucucu

SEQ ID NO: 18047 - DNA, 21 bp, Homo sapiens
gagagagatctttgtggccat

SEQ ID NO: 18048 - RNA, 21 nt, RNAi
gagagaucuuuguggccauuu

SEQ ID NO: 18049 - RNA, 21 nt, RNAi
uucucucuagaaacaccggua

SEQ ID NO: 18050 - DNA, 21 bp, Homo sapiens
gagagatctttgtggccatca

SEQ ID NO: 18051 - RNA, 21 nt, RNAi
gagaucuuuguggccaucauu

SEQ ID NO: 18052 - RNA, 21 nt, RNAi
uucucuagaaacaccgguagu

SEQ ID NO: 18053 - DNA, 21 bp, Homo sapiens
gagatctttgtggccatcaag

SEQ ID NO: 18054 - RNA, 21 nt, RNAi
gaucuuuguggccaucaaguu

SEQ ID NO: 18055 - RNA, 21 nt, RNAi
uucuagaaacaccgguaguuc

SEQ ID NO: 18056 - DNA, 21 bp, Homo sapiens
gatctttgtggccatcaagac

SEQ ID NO: 18057 - RNA, 21 nt, RNAi
ucuuuguggccaucaagacuu

SEQ ID NO: 18058 - RNA, 21 nt, RNAi
uuagaaacaccgguaguucug

SEQ ID NO: 18059 - DNA, 21 bp, Homo sapiens
gacttcctgagcgaagcctcc

SEQ ID NO: 18060 - RNA, 21 nt, RNAi
cuuccugagcgaagccuccuu

SEQ ID NO: 18061 - RNA, 21 nt, RNAi
uugaaggacucgcuucggagg

SEQ ID NO: 18062 - DNA, 21 bp, Homo sapiens
gaccaagagcacacctgtgat

SEQ ID NO: 18063 - RNA, 21 nt, RNAi
ccaagagcacaccugugauuu

SEQ ID NO: 18064 - RNA, 21 nt, RNAi
uugguucucguguggacacua

SEQ ID NO: 18065 - DNA, 21 bp, Homo sapiens
gagcacacctgtgatgatcat

SEQ ID NO: 18066 - RNA, 21 nt, RNAi
gcacaccugugaugaucauuu

SEQ ID NO: 18067 - RNA, 21 nt, RNAi
uucguguggacacuacuagua

SEQ ID NO: 18068 - DNA, 21 bp, Homo sapiens
gatgatcatcaccgagttcat

SEQ ID NO: 18069 - RNA, 21 nt, RNAi
ugaucaucaccgaguucauuu

SEQ ID NO: 18070 - RNA, 21 nt, RNAi
uuacuaguaguggcucaagua

SEQ ID NO: 18071 - DNA, 21 bp, Homo sapiens
gatcatcaccgagttcatgga

SEQ ID NO: 18072 - RNA, 21 nt, RNAi
ucaucaccgaguucauggauu

SEQ ID NO: 18073 - RNA, 21 nt, RNAi
uuaguaguggcucaaguaccu

SEQ ID NO: 18074 - DNA, 21 bp, Homo sapiens
gagttcatggagaatggctcc

SEQ ID NO: 18075 - RNA, 21 nt, RNAi
guucauggagaauggcuccuu

SEQ ID NO: 18076 - RNA, 21 nt, RNAi
uucaaguaccucuuaccgagg

SEQ ID NO: 18077 - DNA, 21 bp, Homo sapiens
gaagtacctggcagacatgaa

SEQ ID NO: 18078 - RNA, 21 nt, RNAi
aguaccuggcagacaugaauu

SEQ ID NO: 18079 - RNA, 21 nt, RNAi
uuucauggaccgucuguacuu

SEQ ID NO: 18080 - DNA, 21 bp, Homo sapiens
gacatgaactatgttcaccgt

SEQ ID NO: 18081 - RNA, 21 nt, RNAi
caugaacuauguucaccguuu

SEQ ID NO: 18082 - RNA, 21 nt, RNAi
uuguacuugauacaaguggca

SEQ ID NO: 18083 - DNA, 21 bp, Homo sapiens
gaactatgttcaccgtgacct

SEQ ID NO: 18084 - RNA, 21 nt, RNAi
acuauguucaccgugaccuuu

SEQ ID NO: 18085 - RNA, 21 nt, RNAi
uuugauacaaguggcacugga

SEQ ID NO: 18086 - DNA, 21 bp, Homo sapiens
gaagccatccagtaccggaag

SEQ ID NO: 18087 - RNA, 21 nt, RNAi
agccauccaguaccggaaguu

SEQ ID NO: 18088 - RNA, 21 nt, RNAi
uuucgguaggucauggccuuc

SEQ ID NO: 18089 - DNA, 21 bp, Homo sapiens
gaagttcacctcggccagtga

SEQ ID NO: 18090 - RNA, 21 nt, RNAi
aguucaccucggccagugauu

SEQ ID NO: 18091 - RNA, 21 nt, RNAi
uuucaaguggagccggucacu

SEQ ID NO: 18092 - DNA, 21 bp, Homo sapiens
gatgtgtggagctacggcatt

SEQ ID NO: 18093 - RNA, 21 nt, RNAi
uguguggagcuacggcauuuu

SEQ ID NO: 18094 - RNA, 21 nt, RNAi
uuacacaccucgaugccguaa

SEQ ID NO: 18095 - DNA, 21 bp, Homo sapiens
gagctacggcattgtcatgtg

SEQ ID NO: 18096 - RNA, 21 nt, RNAi
gcuacggcauugucauguguu

SEQ ID NO: 18097 - RNA, 21 nt, RNAi
uucgaugccguaacaguacac

SEQ ID NO: 18098 - DNA, 21 bp, Homo sapiens
gacatgaccaaccaggatgta

SEQ ID NO: 18099 - RNA, 21 nt, RNAi
caugaccaaccaggauguauu

SEQ ID NO: 18100 - RNA, 21 nt, RNAi
uuguacugguugguccuacau

SEQ ID NO: 18101 - DNA, 21 bp, Homo sapiens
gaccaaccaggatgtaatcaa

SEQ ID NO: 18102 - RNA, 21 nt, RNAi
ccaaccaggauguaaucaauu

SEQ ID NO: 18103 - RNA, 21 nt, RNAi
uugguugguccuacauuaguu

SEQ ID NO: 18104 - DNA, 21 bp, Homo sapiens
gatgtaatcaatgccattgag

SEQ ID NO: 18105 - RNA, 21 nt, RNAi
uguaaucaaugccauugaguu

SEQ ID NO: 18106 - RNA, 21 nt, RNAi
uuacauuaguuacgguaacuc

SEQ ID NO: 18107 - DNA, 21 bp, Homo sapiens
gagcaggactatcggctgcca

SEQ ID NO: 18108 - RNA, 21 nt, RNAi
gcaggacuaucggcugccauu

SEQ ID NO: 18109 - RNA, 21 nt, RNAi
uucguccugauagccgacggu

SEQ ID NO: 18110 - DNA, 21 bp, Homo sapiens
gactgttggcagaaggaccgc

SEQ ID NO: 18111 - RNA, 21 nt, RNAi
cuguuggcagaaggaccgcuu

SEQ ID NO: 18112 - RNA, 21 nt, RNAi
uugacaaccgucuuccuggcg

SEQ ID NO: 18113 - DNA, 21 bp, Homo sapiens
gactacaccagctttaacacg

SEQ ID NO: 18114 - RNA, 21 nt, RNAi
cuacaccagcuuuaacacguu

SEQ ID NO: 18115 - RNA, 21 nt, RNAi
uugauguggucgaaauugugc

SEQ ID NO: 18116 - DNA, 21 bp, Homo sapiens
gagtggctggaggccatcaag

SEQ ID NO: 18117 - RNA, 21 nt, RNAi
guggcuggaggccaucaaguu

SEQ ID NO: 18118 - RNA, 21 nt, RNAi
uucaccgaccuccgguaguuc

SEQ ID NO: 18119 - DNA, 21 bp, Homo sapiens
gagcttcgccaatgccggctt

SEQ ID NO: 18120 - RNA, 21 nt, RNAi
gcuucgccaaugccggcuuuu

SEQ ID NO: 18121 - RNA, 21 nt, RNAi
uucgaagcgguuacggccgaa

SEQ ID NO: 18122 - DNA, 21 bp, Homo sapiens
gacgtcgtgtctcagatgatg

SEQ ID NO: 18123 - RNA, 21 nt, RNAi
cgucgugucucagaugauguu

SEQ ID NO: 18124 - RNA, 21 nt, RNAi
uugcagcacagagucuacuac

SEQ ID NO: 18125 - DNA, 21 bp, Homo sapiens
gatgatgatggaggacattct

SEQ ID NO: 18126 - RNA, 21 nt, RNAi
ugaugauggaggacauucuuu

SEQ ID NO: 18127 - RNA, 21 nt, RNAi
uuacuacuaccuccuguaaga

SEQ ID NO: 18128 - DNA, 21 bp, Homo sapiens
gatgatggaggacattctccg

SEQ ID NO: 18129 - RNA, 21 nt, RNAi
ugauggaggacauucuccguu

SEQ ID NO: 18130 - RNA, 21 nt, RNAi
uuacuaccuccuguaagaggc

SEQ ID NO: 18131 - DNA, 21 bp, Homo sapiens
gaacagtatccaggtgatgcg

SEQ ID NO: 18132 - RNA, 21 nt, RNAi
acaguauccaggugaugcguu

SEQ ID NO: 18133 - RNA, 21 nt, RNAi
uuugucauagguccacuacgc

SEQ ID NO: 18134 - DNA, 21 bp, Homo sapiens
gatgaaccagattcagtctgt

SEQ ID NO: 18135 - RNA, 21 nt, RNAi
ugaaccagauucagucuguuu

SEQ ID NO: 18136 - RNA, 21 nt, RNAi
uuacuuggucuaagucagaca

SEQ ID NO: 18137 - DNA, 21 bp, Homo sapiens
gaaccagattcagtctgtgga

SEQ ID NO: 18138 - RNA, 21 nt, RNAi
accagauucagucuguggauu

SEQ ID NO: 18139 - RNA, 21 nt, RNAi
uuuggucuaagucagacaccu

SEQ ID NO: 18140 - DNA, 21 bp, Homo sapiens
gattcagtctgtggaggtttg

SEQ ID NO: 18141 - RNA, 21 nt, RNAi
uucagucuguggagguuuguu

SEQ ID NO: 18142 - RNA, 21 nt, RNAi
uuaagucagacaccuccaaac

SEQ ID NO: 18143 - DNA, 21 bp, Homo sapiens
gaggtttgacattcacctgcc

SEQ ID NO: 18144 - RNA, 21 nt, RNAi
gguuugacauucaccugccuu

SEQ ID NO: 18145 - RNA, 21 nt, RNAi
uuccaaacuguaaguggacgg

SEQ ID NO: 18146 - DNA, 21 bp, Homo sapiens
gacattcacctgcctcggctc

SEQ ID NO: 18147 - RNA, 21 nt, RNAi
cauucaccugccucggcucuu

SEQ ID NO: 18148 - RNA, 21 nt, RNAi
uuguaaguggacggagccgag

SEQ ID NO: 18149 - DNA, 21 bp, Homo sapiens
gaagaaccaagcggtgccagc

SEQ ID NO: 18150 - RNA, 21 nt, RNAi
agaaccaagcggugccagcuu

SEQ ID NO: 18151 - RNA, 21 nt, RNAi
uuucuugguucgccacggucg

SEQ ID NO: 18152 - DNA, 21 bp, Homo sapiens
gaggattctcataaggaaagc

SEQ ID NO: 18153 - RNA, 21 nt, RNAi
ggauucucauaaggaaagcuu

SEQ ID NO: 18154 - RNA, 21 nt, RNAi
uuccuaagaguauuccuuucg

SEQ ID NO: 18155 - DNA, 21 bp, Homo sapiens
gattctcataaggaaagcaat

SEQ ID NO: 18156 - RNA, 21 nt, RNAi
uucucauaaggaaagcaauuu

SEQ ID NO: 18157 - RNA, 21 nt, RNAi
uuaagaguauuccuuucguua

SEQ ID NO: 18158 - DNA, 21 bp, Homo sapiens
gaaagcaatgactgttcttgc

SEQ ID NO: 18159 - RNA, 21 nt, RNAi
aagcaaugacuguucuugcuu

SEQ ID NO: 18160 - RNA, 21 nt, RNAi
uuuucguuacugacaagaacg

SEQ ID NO: 18161 - DNA, 21 bp, Homo sapiens
gagattcatgcgatgtgtcca

SEQ ID NO: 18162 - RNA, 21 nt, RNAi
gauucaugcgauguguccauu

SEQ ID NO: 18163 - RNA, 21 nt, RNAi
uucuaaguacgcuacacaggu

SEQ ID NO: 18164 - DNA, 21 bp, Homo sapiens
gattcatgcgatgtgtccaat

SEQ ID NO: 18165 - RNA, 21 nt, RNAi
uucaugcgauguguccaauuu

SEQ ID NO: 18166 - RNA, 21 nt, RNAi
uuaaguacgcuacacagguua

SEQ ID NO: 18167 - DNA, 21 bp, Homo sapiens
gatgtgtccaatcggagacaa

SEQ ID NO: 18168 - RNA, 21 nt, RNAi
uguguccaaucggagacaauu

SEQ ID NO: 18169 - RNA, 21 nt, RNAi
uuacacagguuagccucuguu

SEQ ID NO: 18170 - DNA, 21 bp, Homo sapiens
gacctggccagagccaagaaa

SEQ ID NO: 18171 - RNA, 21 nt, RNAi
ccuggccagagccaagaaauu

SEQ ID NO: 18172 - RNA, 21 nt, RNAi
uuggaccggucucgguucuuu

SEQ ID NO: 18173 - DNA, 21 bp, Homo sapiens
gagccaagaaacactttcaga

SEQ ID NO: 18174 - RNA, 21 nt, RNAi
gccaagaaacacuuucagauu

SEQ ID NO: 18175 - RNA, 21 nt, RNAi
uucgguucuuugugaaagucu

SEQ ID NO: 18176 - DNA, 21 bp, Homo sapiens
gacagatggacagacagccac

SEQ ID NO: 18177 - RNA, 21 nt, RNAi
cagauggacagacagccacuu

SEQ ID NO: 18178 - RNA, 21 nt, RNAi
uugucuaccugucugucggug

SEQ ID NO: 18179 - DNA, 21 bp, Homo sapiens
gaaactccaatgaaagacact

SEQ ID NO: 18180 - RNA, 21 nt, RNAi
aacuccaaugaaagacacuuu

SEQ ID NO: 18181 - RNA, 21 nt, RNAi
uuuugagguuacuuucuguga

SEQ ID NO: 18182 - DNA, 21 bp, Homo sapiens
gaaagacactgtttctcctgt

SEQ ID NO: 18183 - RNA, 21 nt, RNAi
aagacacuguuucuccuguuu

SEQ ID NO: 18184 - RNA, 21 nt, RNAi
uuuucugugacaaagaggaca

SEQ ID NO: 18185 - DNA, 21 bp, Homo sapiens
gacactgtttctcctgttggc

SEQ ID NO: 18186 - RNA, 21 nt, RNAi
cacuguuucuccuguuggcuu

SEQ ID NO: 18187 - RNA, 21 nt, RNAi
uugugacaaagaggacaaccg

SEQ ID NO: 18188 - DNA, 21 bp, Homo sapiens
gaaaggtcagccttcctgagg

SEQ ID NO: 18189 - RNA, 21 nt, RNAi
aaggucagccuuccugagguu

SEQ ID NO: 18190 - RNA, 21 nt, RNAi
uuuuccagucggaaggacucc

SEQ ID NO: 18191 - DNA, 21 bp, Homo sapiens
gaggactgatactgcagtgac

SEQ ID NO: 18192 - RNA, 21 nt, RNAi
ggacugauacugcagugacuu

SEQ ID NO: 18193 - RNA, 21 nt, RNAi
uuccugacuaugacgucacug

SEQ ID NO: 18194 - DNA, 21 bp, Homo sapiens
gactgatactgcagtgactgc

SEQ ID NO: 18195 - RNA, 21 nt, RNAi
cugauacugcagugacugcuu

SEQ ID NO: 18196 - RNA, 21 nt, RNAi
uugacuaugacgucacugacg

SEQ ID NO: 18197 - DNA, 21 bp, Homo sapiens
gatactgcagtgactgccgtc

SEQ ID NO: 18198 - RNA, 21 nt, RNAi
uacugcagugacugccgucuu

SEQ ID NO: 18199 - RNA, 21 nt, RNAi
uuaugacgucacugacggcag

SEQ ID NO: 18200 - DNA, 21 bp, Homo sapiens
gacaatgaagtgacactttga

SEQ ID NO: 18201 - RNA, 21 nt, RNAi
caaugaagugacacuuugauu

SEQ ID NO: 18202 - RNA, 21 nt, RNAi
uuguuacuucacugugaaacu

SEQ ID NO: 18203 - DNA, 21 bp, Homo sapiens
gaagtgacactttgacatttc

SEQ ID NO: 18204 - RNA, 21 nt, RNAi
agugacacuuugacauuucuu

SEQ ID NO: 18205 - RNA, 21 nt, RNAi
uuucacugugaaacuguaaag

SEQ ID NO: 18206 - DNA, 21 bp, Homo sapiens
gacactttgacatttcctacc

SEQ ID NO: 18207 - RNA, 21 nt, RNAi
cacuuugacauuuccuaccuu

SEQ ID NO: 18208 - RNA, 21 nt, RNAi
uugugaaacuguaaaggaugg

SEQ ID NO: 18209 - DNA, 21 bp, Homo sapiens
gaggacttgatccttctccag

SEQ ID NO: 18210 - RNA, 21 nt, RNAi
ggacuugauccuucuccaguu

SEQ ID NO: 18211 - RNA, 21 nt, RNAi
uuccugaacuaggaagagguc

SEQ ID NO: 18212 - DNA, 21 bp, Homo sapiens
gacttgatccttctccaggaa

SEQ ID NO: 18213 - RNA, 21 nt, RNAi
cuugauccuucuccaggaauu

SEQ ID NO: 18214 - RNA, 21 nt, RNAi
uugaacuaggaagagguccuu

SEQ ID NO: 18215 - DNA, 21 bp, Homo sapiens
gatccttctccaggaagaagg

SEQ ID NO: 18216 - RNA, 21 nt, RNAi
uccuucuccaggaagaagguu

SEQ ID NO: 18217 - RNA, 21 nt, RNAi
uuaggaagagguccuucuucc

SEQ ID NO: 18218 - DNA, 21 bp, Homo sapiens
gaagaaggtgctttctgctta

SEQ ID NO: 18219 - RNA, 21 nt, RNAi
agaaggugcuuucugcuuauu

SEQ ID NO: 18220 - RNA, 21 nt, RNAi
uuucuuccacgaaagacgaau

SEQ ID NO: 18221 - DNA, 21 bp, Homo sapiens
gaaggtgctttctgcttactg

SEQ ID NO: 18222 - RNA, 21 nt, RNAi
aggugcuuucugcuuacuguu

SEQ ID NO: 18223 - RNA, 21 nt, RNAi
uuuccacgaaagacgaaugac

SEQ ID NO: 18224 - DNA, 21 bp, Homo sapiens
gacttaggcaatacaccaagg

SEQ ID NO: 18225 - RNA, 21 nt, RNAi
cuuaggcaauacaccaagguu

SEQ ID NO: 18226 - RNA, 21 nt, RNAi
uugaauccguuaugugguucc

SEQ ID NO: 18227 - DNA, 21 bp, Homo sapiens
gacagattgaggaggaagtgg

SEQ ID NO: 18228 - RNA, 21 nt, RNAi
cagauugaggaggaagugguu

SEQ ID NO: 18229 - RNA, 21 nt, RNAi
uugucuaacuccuccuucacc

SEQ ID NO: 18230 - DNA, 21 bp, Homo sapiens
gagcctaaaccaggctgcatc

SEQ ID NO: 18231 - RNA, 21 nt, RNAi
gccuaaaccaggcugcaucuu

SEQ ID NO: 18232 - RNA, 21 nt, RNAi
uucggauuugguccgacguag

SEQ ID NO: 18233 - DNA, 21 bp, Homo sapiens
gagagaaagtgtgtgatttct

SEQ ID NO: 18234 - RNA, 21 nt, RNAi
gagaaagugugugauuucuuu

SEQ ID NO: 18235 - RNA, 21 nt, RNAi
uucucuuucacacacuaaaga

SEQ ID NO: 18236 - DNA, 21 bp, Homo sapiens
gagaaagtgtgtgatttctct

SEQ ID NO: 18237 - RNA, 21 nt, RNAi
gaaagugugugauuucucuuu

SEQ ID NO: 18238 - RNA, 21 nt, RNAi
uucuuucacacacuaaagaga

SEQ ID NO: 18239 - DNA, 21 bp, Homo sapiens
gaaagtgtgtgatttctctcc

SEQ ID NO: 18240 - RNA, 21 nt, RNAi
aagugugugauuucucuccuu

SEQ ID NO: 18241 - RNA, 21 nt, RNAi
uuuucacacacuaaagagagg

SEQ ID NO: 18242 - DNA, 21 bp, Homo sapiens
gagcaatcagttagtgaattg

SEQ ID NO: 18243 - RNA, 21 nt, RNAi
gcaaucaguuagugaauuguu

SEQ ID NO: 18244 - RNA, 21 nt, RNAi
uucguuagucaaucacuuaac

SEQ ID NO: 18245 - DNA, 21 bp, Homo sapiens
gaatagtgctgcaataaacat

SEQ ID NO: 18246 - RNA, 21 nt, RNAi
auagugcugcaauaaacauuu

SEQ ID NO: 18247 - RNA, 21 nt, RNAi
uuuaucacgacguuauuugua

SEQ ID NO: 18248 - DNA, 21 bp, Homo sapiens
gaatgatctataatcctctgg

SEQ ID NO: 18249 - RNA, 21 nt, RNAi
augaucuauaauccucugguu

SEQ ID NO: 18250 - RNA, 21 nt, RNAi
uuuacuagauauuaggagacc

SEQ ID NO: 18251 - DNA, 21 bp, Homo sapiens
gatccttgaggaattgccaca

SEQ ID NO: 18252 - RNA, 21 nt, RNAi
uccuugaggaauugccacauu

SEQ ID NO: 18253 - RNA, 21 nt, RNAi
uuaggaacuccuuaacggugu

SEQ ID NO: 18254 - DNA, 21 bp, Homo sapiens
gaggaattgccacactgtctt

SEQ ID NO: 18255 - RNA, 21 nt, RNAi
ggaauugccacacugucuuuu

SEQ ID NO: 18256 - RNA, 21 nt, RNAi
uuccuuaacggugugacagaa

SEQ ID NO: 18257 - DNA, 21 bp, Homo sapiens
gaattgccacactgtctttca

SEQ ID NO: 18258 - RNA, 21 nt, RNAi
auugccacacugucuuucauu

SEQ ID NO: 18259 - RNA, 21 nt, RNAi
uuuaacggugugacagaaagu

SEQ ID NO: 18260 - DNA, 21 bp, Homo sapiens
gaactaatttacactcctacc

SEQ ID NO: 18261 - RNA, 21 nt, RNAi
acuaauuuacacuccuaccuu

SEQ ID NO: 18262 - RNA, 21 nt, RNAi
uuugauuaaaugugaggaugg

SEQ ID NO: 18263 - DNA, 21 bp, Homo sapiens
gattgccattctaactggtgt

SEQ ID NO: 18264 - RNA, 21 nt, RNAi
uugccauucuaacugguguuu

SEQ ID NO: 18265 - RNA, 21 nt, RNAi
uuaacgguaagauugaccaca

SEQ ID NO: 18266 - DNA, 21 bp, Homo sapiens
gatttgcatttctctaatgac

SEQ ID NO: 18267 - RNA, 21 nt, RNAi
uuugcauuucucuaaugacuu

SEQ ID NO: 18268 - RNA, 21 nt, RNAi
uuaaacguaaagagauuacug

SEQ ID NO: 18269 - DNA, 21 bp, Homo sapiens
gagaagtgtctgttcataacc

SEQ ID NO: 18270 - RNA, 21 nt, RNAi
gaagugucuguucauaaccuu

SEQ ID NO: 18271 - RNA, 21 nt, RNAi
uucuucacagacaaguauugg

SEQ ID NO: 18272 - DNA, 21 bp, Homo sapiens
gaagtgtctgttcataacctt

SEQ ID NO: 18273 - RNA, 21 nt, RNAi
agugucuguucauaaccuuuu

SEQ ID NO: 18274 - RNA, 21 nt, RNAi
uuucacagacaaguauuggaa

SEQ ID NO: 18275 - DNA, 21 bp, Homo sapiens
gaaataaagcatgaagacaag

SEQ ID NO: 18276 - RNA, 21 nt, RNAi
aauaaagcaugaagacaaguu

SEQ ID NO: 18277 - RNA, 21 nt, RNAi
uuuuauuucguacuucuguuc

SEQ ID NO: 18278 - DNA, 21 bp, Homo sapiens
gaacaaacaaagcgtccaaga

SEQ ID NO: 18279 - RNA, 21 nt, RNAi
acaaacaaagcguccaagauu

SEQ ID NO: 18280 - RNA, 21 nt, RNAi
uuuguuuguuucgcagguucu

SEQ ID NO: 18281 - DNA, 21 bp, Homo sapiens
gactatgtgacaagaacaaac

SEQ ID NO: 18282 - RNA, 21 nt, RNAi
cuaugugacaagaacaaacuu

SEQ ID NO: 18283 - RNA, 21 nt, RNAi
uugauacacuguucuuguuug

SEQ ID NO: 18284 - DNA, 21 bp, Homo sapiens
gacaagaacaaacttacgttt

SEQ ID NO: 18285 - RNA, 21 nt, RNAi
caagaacaaacuuacguuuuu

SEQ ID NO: 18286 - RNA, 21 nt, RNAi
uuguucuuguuugaaugcaaa

SEQ ID NO: 18287 - DNA, 21 bp, Homo sapiens
gaacaaacttacgtttgactg

SEQ ID NO: 18288 - RNA, 21 nt, RNAi
acaaacuuacguuugacuguu

SEQ ID NO: 18289 - RNA, 21 nt, RNAi
uuuguuugaaugcaaacugac

SEQ ID NO: 18290 - DNA, 21 bp, Homo sapiens
gagaatgaaaccaagttggaa

SEQ ID NO: 18291 - RNA, 21 nt, RNAi
gaaugaaaccaaguuggaauu

SEQ ID NO: 18292 - RNA, 21 nt, RNAi
uucuuacuuugguucaaccuu

SEQ ID NO: 18293 - DNA, 21 bp, Homo sapiens
gatattatccaggagaacttc

SEQ ID NO: 18294 - RNA, 21 nt, RNAi
uauuauccaggagaacuucuu

SEQ ID NO: 18295 - RNA, 21 nt, RNAi
uuauaauagguccucuugaag

SEQ ID NO: 18296 - DNA, 21 bp, Homo sapiens
gagaacttctccaacctagca

SEQ ID NO: 18297 - RNA, 21 nt, RNAi
gaacuucuccaaccuagcauu

SEQ ID NO: 18298 - RNA, 21 nt, RNAi
uucuugaagagguuggaucgu

SEQ ID NO: 18299 - DNA, 21 bp, Homo sapiens
gaacttctccaacctagcaag

SEQ ID NO: 18300 - RNA, 21 nt, RNAi
acuucuccaaccuagcaaguu

SEQ ID NO: 18301 - RNA, 21 nt, RNAi
uuugaagagguuggaucguuc

SEQ ID NO: 18302 - DNA, 21 bp, Homo sapiens
gacagaccaacgttcaaattc

SEQ ID NO: 18303 - RNA, 21 nt, RNAi
cagaccaacguucaaauucuu

SEQ ID NO: 18304 - RNA, 21 nt, RNAi
uugucugguugcaaguuuaag

SEQ ID NO: 18305 - DNA, 21 bp, Homo sapiens
gaccaacgttcaaattcagga

SEQ ID NO: 18306 - RNA, 21 nt, RNAi
ccaacguucaaauucaggauu

SEQ ID NO: 18307 - RNA, 21 nt, RNAi
uugguugcaaguuuaaguccu

SEQ ID NO: 18308 - DNA, 21 bp, Homo sapiens
gatatttctcgagaagagcaa

SEQ ID NO: 18309 - RNA, 21 nt, RNAi
uauuucucgagaagagcaauu

SEQ ID NO: 18310 - RNA, 21 nt, RNAi
uuauaaagagcucuucucguu

SEQ ID NO: 18311 - DNA, 21 bp, Homo sapiens
gaagacacataattgtcagat

SEQ ID NO: 18312 - RNA, 21 nt, RNAi
agacacauaauugucagauuu

SEQ ID NO: 18313 - RNA, 21 nt, RNAi
uuucuguguauuaacagucua

SEQ ID NO: 18314 - DNA, 21 bp, Homo sapiens
gacacataattgtcagattca

SEQ ID NO: 18315 - RNA, 21 nt, RNAi
cacauaauugucagauucauu

SEQ ID NO: 18316 - RNA, 21 nt, RNAi
uuguguauuaacagucuaagu

SEQ ID NO: 18317 - DNA, 21 bp, Homo sapiens
gattcaccaaggttgaaatga

SEQ ID NO: 18318 - RNA, 21 nt, RNAi
uucaccaagguugaaaugauu

SEQ ID NO: 18319 - RNA, 21 nt, RNAi
uuaagugguuccaacuuuacu

SEQ ID NO: 18320 - DNA, 21 bp, Homo sapiens
gagagaaaggtcaggttactc

SEQ ID NO: 18321 - RNA, 21 nt, RNAi
gagaaaggucagguuacucuu

SEQ ID NO: 18322 - RNA, 21 nt, RNAi
uucucuuuccaguccaaugag

SEQ ID NO: 18323 - DNA, 21 bp, Homo sapiens
gagaaaggtcaggttactcac

SEQ ID NO: 18324 - RNA, 21 nt, RNAi
gaaaggucagguuacucacuu

SEQ ID NO: 18325 - RNA, 21 nt, RNAi
uucuuuccaguccaaugagug

SEQ ID NO: 18326 - DNA, 21 bp, Homo sapiens
gaaaggtcaggttactcacaa

SEQ ID NO: 18327 - RNA, 21 nt, RNAi
aaggucagguuacucacaauu

SEQ ID NO: 18328 - RNA, 21 nt, RNAi
uuuuccaguccaaugaguguu

SEQ ID NO: 18329 - DNA, 21 bp, Homo sapiens
gactaacagcagatctctctg

SEQ ID NO: 18330 - RNA, 21 nt, RNAi
cuaacagcagaucucucuguu

SEQ ID NO: 18331 - RNA, 21 nt, RNAi
uugauugucgucuagagagac

SEQ ID NO: 18332 - DNA, 21 bp, Homo sapiens
gaccaatattcaacattcaca

SEQ ID NO: 18333 - RNA, 21 nt, RNAi
ccaauauucaacauucacauu

SEQ ID NO: 18334 - RNA, 21 nt, RNAi
uugguuauaaguuguaagugu

SEQ ID NO: 18335 - DNA, 21 bp, Homo sapiens
gaatttcatatccagccaaac

SEQ ID NO: 18336 - RNA, 21 nt, RNAi
auuucauauccagccaaacuu

SEQ ID NO: 18337 - RNA, 21 nt, RNAi
uuuaaaguauaggucgguuug

SEQ ID NO: 18338 - DNA, 21 bp, Homo sapiens
gacatcctgaaggaagcacta

SEQ ID NO: 18339 - RNA, 21 nt, RNAi
cauccugaaggaagcacuauu

SEQ ID NO: 18340 - RNA, 21 nt, RNAi
uuguaggacuuccuucgugau

SEQ ID NO: 18341 - DNA, 21 bp, Homo sapiens
gaaggaagcactaaatatgga

SEQ ID NO: 18342 - RNA, 21 nt, RNAi
aggaagcacuaaauauggauu

SEQ ID NO: 18343 - RNA, 21 nt, RNAi
uuuccuucgugauuuauaccu

SEQ ID NO: 18344 - DNA, 21 bp, Homo sapiens
gagaccattgacactatgaag

SEQ ID NO: 18345 - RNA, 21 nt, RNAi
gaccauugacacuaugaaguu

SEQ ID NO: 18346 - RNA, 21 nt, RNAi
uucugguaacugugauacuuc

SEQ ID NO: 18347 - DNA, 21 bp, Homo sapiens
gaccattgacactatgaagaa

SEQ ID NO: 18348 - RNA, 21 nt, RNAi
ccauugacacuaugaagaauu

SEQ ID NO: 18349 - RNA, 21 nt, RNAi
uugguaacugugauacuucuu

SEQ ID NO: 18350 - DNA, 21 bp, Homo sapiens
gacactatgaagaaaccgtgt

SEQ ID NO: 18351 - RNA, 21 nt, RNAi
cacuaugaagaaaccguguuu

SEQ ID NO: 18352 - RNA, 21 nt, RNAi
uugugauacuucuuuggcaca

SEQ ID NO: 18353 - DNA, 21 bp, Homo sapiens
gaagaaaccgtgtcaactaat

SEQ ID NO: 18354 - RNA, 21 nt, RNAi
agaaaccgugucaacuaauuu

SEQ ID NO: 18355 - RNA, 21 nt, RNAi
uuucuuuggcacaguugauua

SEQ ID NO: 18356 - DNA, 21 bp, Homo sapiens
gacaggatcagattcacacat

SEQ ID NO: 18357 - RNA, 21 nt, RNAi
caggaucagauucacacauuu

SEQ ID NO: 18358 - RNA, 21 nt, RNAi
uuguccuagucuaagugugua

SEQ ID NO: 18359 - DNA, 21 bp, Homo sapiens
gatcagattcacacataacaa

SEQ ID NO: 18360 - RNA, 21 nt, RNAi
ucagauucacacauaacaauu

SEQ ID NO: 18361 - RNA, 21 nt, RNAi
uuagucuaaguguguauuguu

SEQ ID NO: 18362 - DNA, 21 bp, Homo sapiens
gacgcagactggcaaattggt

SEQ ID NO: 18363 - RNA, 21 nt, RNAi
cgcagacuggcaaauugguuu

SEQ ID NO: 18364 - RNA, 21 nt, RNAi
uugcgucugaccguuuaacca

SEQ ID NO: 18365 - DNA, 21 bp, Homo sapiens
gactggcaaattggttaaaga

SEQ ID NO: 18366 - RNA, 21 nt, RNAi
cuggcaaauugguuaaagauu

SEQ ID NO: 18367 - RNA, 21 nt, RNAi
uugaccguuuaaccaauuucu

SEQ ID NO: 18368 - DNA, 21 bp, Homo sapiens
gagtcaagactcattggtgtg

SEQ ID NO: 18369 - RNA, 21 nt, RNAi
gucaagacucauugguguguu

SEQ ID NO: 18370 - RNA, 21 nt, RNAi
uucaguucugaguaaccacac

SEQ ID NO: 18371 - DNA, 21 bp, Homo sapiens
gactcattggtgtgccgtatt

SEQ ID NO: 18372 - RNA, 21 nt, RNAi
cucauuggugugccguauuuu

SEQ ID NO: 18373 - RNA, 21 nt, RNAi
uugaguaaccacacggcauaa

SEQ ID NO: 18374 - DNA, 21 bp, Homo sapiens
gacacacataggctcagagta

SEQ ID NO: 18375 - RNA, 21 nt, RNAi
cacacauaggcucagaguauu

SEQ ID NO: 18376 - RNA, 21 nt, RNAi
uuguguguauccgagucucau

SEQ ID NO: 18377 - DNA, 21 bp, Homo sapiens
taatggactccactacagcga

SEQ ID NO: 18378 - RNA, 21 nt, RNAi
auggacuccacuacagcgauu

SEQ ID NO: 18379 - RNA, 21 nt, RNAi
uuuaccugaggugaugucgcu

SEQ ID NO: 18380 - DNA, 21 bp, Homo sapiens
tacgatgagaacatgaacacg

SEQ ID NO: 18381 - RNA, 21 nt, RNAi
cgaugagaacaugaacacguu

SEQ ID NO: 18382 - RNA, 21 nt, RNAi
uugcuacucuuguacuugugc

SEQ ID NO: 18383 - DNA, 21 bp, Homo sapiens
taccaggtgtgcaacgtgttt

SEQ ID NO: 18384 - RNA, 21 nt, RNAi
ccaggugugcaacguguuuuu

SEQ ID NO: 18385 - RNA, 21 nt, RNAi
uugguccacacguugcacaaa

SEQ ID NO: 18386 - DNA, 21 bp, Homo sapiens
tacggaccaagtttatccggc

SEQ ID NO: 18387 - RNA, 21 nt, RNAi
cggaccaaguuuauccggcuu

SEQ ID NO: 18388 - RNA, 21 nt, RNAi
uugccugguucaaauaggccg

SEQ ID NO: 18389 - DNA, 21 bp, Homo sapiens
tattactatgaggctgacttt

SEQ ID NO: 18390 - RNA, 21 nt, RNAi
uuacuaugaggcugacuuuuu

SEQ ID NO: 18391 - RNA, 21 nt, RNAi
uuaaugauacuccgacugaaa

SEQ ID NO: 18392 - DNA, 21 bp, Homo sapiens
tactatgaggctgactttgac

SEQ ID NO: 18393 - RNA, 21 nt, RNAi
cuaugaggcugacuuugacuu

SEQ ID NO: 18394 - RNA, 21 nt, RNAi
uugauacuccgacugaaacug

SEQ ID NO: 18395 - DNA, 21 bp, Homo sapiens
tatgaggctgactttgactcg

SEQ ID NO: 18396 - RNA, 21 nt, RNAi
ugaggcugacuuugacucguu

SEQ ID NO: 18397 - RNA, 21 nt, RNAi
uuacuccgacugaaacugagc

SEQ ID NO: 18398 - DNA, 21 bp, Homo sapiens
taccattgcagccgacgagag

SEQ ID NO: 18399 - RNA, 21 nt, RNAi
ccauugcagccgacgagaguu

SEQ ID NO: 18400 - RNA, 21 nt, RNAi
uugguaacgucggcugcucuc

SEQ ID NO: 18401 - DNA, 21 bp, Homo sapiens
tacctggccttccaggactat

SEQ ID NO: 18402 - RNA, 21 nt, RNAi
ccuggccuuccaggacuauuu

SEQ ID NO: 18403 - RNA, 21 nt, RNAi
uuggaccggaagguccugaua

SEQ ID NO: 18404 - DNA, 21 bp, Homo sapiens
tactacagagcagacctggac

SEQ ID NO: 18405 - RNA, 21 nt, RNAi
cuacagagcagaccuggacuu

SEQ ID NO: 18406 - RNA, 21 nt, RNAi
uugaugucucgucuggaccug

SEQ ID NO: 18407 - DNA, 21 bp, Homo sapiens
tacaacatcatctgcaagagc

SEQ ID NO: 18408 - RNA, 21 nt, RNAi
caacaucaucugcaagagcuu

SEQ ID NO: 18409 - RNA, 21 nt, RNAi
uuguuguaguagacguucucg

SEQ ID NO: 18410 - DNA, 21 bp, Homo sapiens
tacagtacgcaccacgccagc

SEQ ID NO: 18411 - RNA, 21 nt, RNAi
caguacgcaccacgccagcuu

SEQ ID NO: 18412 - RNA, 21 nt, RNAi
uugucaugcguggugcggucg

SEQ ID NO: 18413 - DNA, 21 bp, Homo sapiens
tacatcagtgacctgctggcc

SEQ ID NO: 18414 - RNA, 21 nt, RNAi
caucagugaccugcuggccuu

SEQ ID NO: 18415 - RNA, 21 nt, RNAi
uuguagucacuggacgaccgg

SEQ ID NO: 18416 - DNA, 21 bp, Homo sapiens
tacaccttcgagatccaggct

SEQ ID NO: 18417 - RNA, 21 nt, RNAi
caccuucgagauccaggcuuu

SEQ ID NO: 18418 - RNA, 21 nt, RNAi
uuguggaagcucuagguccga

SEQ ID NO: 18419 - DNA, 21 bp, Homo sapiens
tatgagctgcagtactatgag

SEQ ID NO: 18420 - RNA, 21 nt, RNAi
ugagcugcaguacuaugaguu

SEQ ID NO: 18421 - RNA, 21 nt, RNAi
uuacucgacgucaugauacuc

SEQ ID NO: 18422 - DNA, 21 bp, Homo sapiens
tactatgagaaggagctcagt

SEQ ID NO: 18423 - RNA, 21 nt, RNAi
cuaugagaaggagcucaguuu

SEQ ID NO: 18424 - RNA, 21 nt, RNAi
uugauacucuuccucgaguca

SEQ ID NO: 18425 - DNA, 21 bp, Homo sapiens
tatgagaaggagctcagtgag

SEQ ID NO: 18426 - RNA, 21 nt, RNAi
ugagaaggagcucagugaguu

SEQ ID NO: 18427 - RNA, 21 nt, RNAi
uuacucuuccucgagucacuc

SEQ ID NO: 18428 - DNA, 21 bp, Homo sapiens
tacagcggcaagatgtacttc

SEQ ID NO: 18429 - RNA, 21 nt, RNAi
cagcggcaagauguacuucuu

SEQ ID NO: 18430 - RNA, 21 nt, RNAi
uugucgccguucuacaugaag

SEQ ID NO: 18431 - DNA, 21 bp, Homo sapiens
tacttccagaccatgacagaa

SEQ ID NO: 18432 - RNA, 21 nt, RNAi
cuuccagaccaugacagaauu

SEQ ID NO: 18433 - RNA, 21 nt, RNAi
uugaaggucugguacugucuu

SEQ ID NO: 18434 - DNA, 21 bp, Homo sapiens
taccagacaagcatccaggag

SEQ ID NO: 18435 - RNA, 21 nt, RNAi
ccagacaagcauccaggaguu

SEQ ID NO: 18436 - RNA, 21 nt, RNAi
uuggucuguucguagguccuc

SEQ ID NO: 18437 - DNA, 21 bp, Homo sapiens
tacacggacaagctgcaacac

SEQ ID NO: 18438 - RNA, 21 nt, RNAi
cacggacaagcugcaacacuu

SEQ ID NO: 18439 - RNA, 21 nt, RNAi
uugugccuguucgacguugug

SEQ ID NO: 18440 - DNA, 21 bp, Homo sapiens
tacaccagtggccacatgacc

SEQ ID NO: 18441 - RNA, 21 nt, RNAi
caccaguggccacaugaccuu

SEQ ID NO: 18442 - RNA, 21 nt, RNAi
uuguggucaccgguguacugg

SEQ ID NO: 18443 - DNA, 21 bp, Homo sapiens
tacatcgatcctttcacctac

SEQ ID NO: 18444 - RNA, 21 nt, RNAi
caucgauccuuucaccuacuu

SEQ ID NO: 18445 - RNA, 21 nt, RNAi
uuguagcuaggaaaguggaug

SEQ ID NO: 18446 - DNA, 21 bp, Homo sapiens
tacctggcagacatgaactat

SEQ ID NO: 18447 - RNA, 21 nt, RNAi
ccuggcagacaugaacuauuu

SEQ ID NO: 18448 - RNA, 21 nt, RNAi
uuggaccgucuguacuugaua

SEQ ID NO: 18449 - DNA, 21 bp, Homo sapiens
tatgttcaccgtgacctggct

SEQ ID NO: 18450 - RNA, 21 nt, RNAi
uguucaccgugaccuggcuuu

SEQ ID NO: 18451 - RNA, 21 nt, RNAi
uuacaaguggcacuggaccga

SEQ ID NO: 18452 - DNA, 21 bp, Homo sapiens
tagaggacgatacctcagacc

SEQ ID NO: 18453 - RNA, 21 nt, RNAi
gaggacgauaccucagaccuu

SEQ ID NO: 18454 - RNA, 21 nt, RNAi
uucuccugcuauggagucugg

SEQ ID NO: 18455 - DNA, 21 bp, Homo sapiens
taccggaagttcacctcggcc

SEQ ID NO: 18456 - RNA, 21 nt, RNAi
ccggaaguucaccucggccuu

SEQ ID NO: 18457 - RNA, 21 nt, RNAi
uuggccuucaaguggagccgg

SEQ ID NO: 18458 - DNA, 21 bp, Homo sapiens
taatcaatgccattgagcagg

SEQ ID NO: 18459 - RNA, 21 nt, RNAi
aucaaugccauugagcagguu

SEQ ID NO: 18460 - RNA, 21 nt, RNAi
uuuaguuacgguaacucgucc

SEQ ID NO: 18461 - DNA, 21 bp, Homo sapiens
tagacaagatgatccgcaatc

SEQ ID NO: 18462 - RNA, 21 nt, RNAi
gacaagaugauccgcaaucuu

SEQ ID NO: 18463 - RNA, 21 nt, RNAi
uucuguucuacuaggcguuag

SEQ ID NO: 18464 - DNA, 21 bp, Homo sapiens
tacaccagctttaacacggtg

SEQ ID NO: 18465 - RNA, 21 nt, RNAi
caccagcuuuaacacgguguu

SEQ ID NO: 18466 - RNA, 21 nt, RNAi
uuguggucgaaauugugccac

SEQ ID NO: 18467 - DNA, 21 bp, Homo sapiens
taacacggtggacgagtggct

SEQ ID NO: 18468 - RNA, 21 nt, RNAi
acacgguggacgaguggcuuu

SEQ ID NO: 18469 - RNA, 21 nt, RNAi
uuugugccaccugcucaccga

SEQ ID NO: 18470 - DNA, 21 bp, Homo sapiens
tacaaggagagcttcgccaat

SEQ ID NO: 18471 - RNA, 21 nt, RNAi
caaggagagcuucgccaauuu

SEQ ID NO: 18472 - RNA, 21 nt, RNAi
uuguuccucucgaagcgguua

SEQ ID NO: 18473 - DNA, 21 bp, Homo sapiens
taaagaggattctcataagga

SEQ ID NO: 18474 - RNA, 21 nt, RNAi
aagaggauucucauaaggauu

SEQ ID NO: 18475 - RNA, 21 nt, RNAi
uuuucuccuaagaguauuccu

SEQ ID NO: 18476 - DNA, 21 bp, Homo sapiens
taaggaaagcaatgactgttc

SEQ ID NO: 18477 - RNA, 21 nt, RNAi
aggaaagcaaugacuguucuu

SEQ ID NO: 18478 - RNA, 21 nt, RNAi
uuuccuuucguuacugacaag

SEQ ID NO: 18479 - DNA, 21 bp, Homo sapiens
taggcctcactcaacaaccaa

SEQ ID NO: 18480 - RNA, 21 nt, RNAi
ggccucacucaacaaccaauu

SEQ ID NO: 18481 - RNA, 21 nt, RNAi
uuccggagugaguuguugguu

SEQ ID NO: 18482 - DNA, 21 bp, Homo sapiens
tagaaactccaatgaaagaca

SEQ ID NO: 18483 - RNA, 21 nt, RNAi
gaaacuccaaugaaagacauu

SEQ ID NO: 18484 - RNA, 21 nt, RNAi
uucuuugagguuacuuucugu

SEQ ID NO: 18485 - DNA, 21 bp, Homo sapiens
tacatatcacgcgcacagcct

SEQ ID NO: 18486 - RNA, 21 nt, RNAi
cauaucacgcgcacagccuuu

SEQ ID NO: 18487 - RNA, 21 nt, RNAi
uuguauagugcgcgugucgga

SEQ ID NO: 18488 - DNA, 21 bp, Homo sapiens
tatcacgcgcacagcctggca

SEQ ID NO: 18489 - RNA, 21 nt, RNAi
ucacgcgcacagccuggcauu

SEQ ID NO: 18490 - RNA, 21 nt, RNAi
uuagugcgcgugucggaccgu

SEQ ID NO: 18491 - DNA, 21 bp, Homo sapiens
tactgcagtgactgccgtcag

SEQ ID NO: 18492 - RNA, 21 nt, RNAi
cugcagugacugccgucaguu

SEQ ID NO: 18493 - RNA, 21 nt, RNAi
uugacgucacugacggcaguc

SEQ ID NO: 18494 - DNA, 21 bp, Homo sapiens
tacagcaattcctggactcgg

SEQ ID NO: 18495 - RNA, 21 nt, RNAi
cagcaauuccuggacucgguu

SEQ ID NO: 18496 - RNA, 21 nt, RNAi
uugucguuaaggaccugagcc

SEQ ID NO: 18497 - DNA, 21 bp, Homo sapiens
taatgacaatgaagtgacact

SEQ ID NO: 18498 - RNA, 21 nt, RNAi
augacaaugaagugacacuuu

SEQ ID NO: 18499 - RNA, 21 nt, RNAi
uuuacuguuacuucacuguga

SEQ ID NO: 18500 - DNA, 21 bp, Homo sapiens
tactgacttaggcaatacacc

SEQ ID NO: 18501 - RNA, 21 nt, RNAi
cugacuuaggcaauacaccuu

SEQ ID NO: 18502 - RNA, 21 nt, RNAi
uugacugaauccguuaugugg

SEQ ID NO: 18503 - DNA, 21 bp, Homo sapiens
taaaccaggctgcatcggagg

SEQ ID NO: 18504 - RNA, 21 nt, RNAi
aaccaggcugcaucggagguu

SEQ ID NO: 18505 - RNA, 21 nt, RNAi
uuuugguccgacguagccucc

SEQ ID NO: 18506 - DNA, 21 bp, Homo sapiens
tattgtgaatagtgctgcaat

SEQ ID NO: 18507 - RNA, 21 nt, RNAi
uugugaauagugcugcaauuu

SEQ ID NO: 18508 - RNA, 21 nt, RNAi
uuaacacuuaucacgacguua

SEQ ID NO: 18509 - DNA, 21 bp, Homo sapiens
tagtgctgcaataaacatacg

SEQ ID NO: 18510 - RNA, 21 nt, RNAi
gugcugcaauaaacauacguu

SEQ ID NO: 18511 - RNA, 21 nt, RNAi
uucacgacguuauuuguaugc

SEQ ID NO: 18512 - DNA, 21 bp, Homo sapiens
taaacatacgtgtgcatgtgt

SEQ ID NO: 18513 - RNA, 21 nt, RNAi
aacauacgugugcauguguuu

SEQ ID NO: 18514 - RNA, 21 nt, RNAi
uuuuguaugcacacguacaca

SEQ ID NO: 18515 - DNA, 21 bp, Homo sapiens
tacgtgtgcatgtgtctttat

SEQ ID NO: 18516 - RNA, 21 nt, RNAi
cgugugcaugugucuuuauuu

SEQ ID NO: 18517 - RNA, 21 nt, RNAi
uugcacacguacacagaaaua

SEQ ID NO: 18518 - DNA, 21 bp, Homo sapiens
tagatccttgaggaattgcca

SEQ ID NO: 18519 - RNA, 21 nt, RNAi
gauccuugaggaauugccauu

SEQ ID NO: 18520 - RNA, 21 nt, RNAi
uucuaggaacuccuuaacggu

SEQ ID NO: 18521 - DNA, 21 bp, Homo sapiens
taatttacactcctaccaaca

SEQ ID NO: 18522 - RNA, 21 nt, RNAi
auuuacacuccuaccaacauu

SEQ ID NO: 18523 - RNA, 21 nt, RNAi
uuuaaaugugaggaugguugu

SEQ ID NO: 18524 - DNA, 21 bp, Homo sapiens
tacactcctaccaacagtgta

SEQ ID NO: 18525 - RNA, 21 nt, RNAi
cacuccuaccaacaguguauu

SEQ ID NO: 18526 - RNA, 21 nt, RNAi
uugugaggaugguugucacau

SEQ ID NO: 18527 - DNA, 21 bp, Homo sapiens
taatgattgccattctaactg

SEQ ID NO: 18528 - RNA, 21 nt, RNAi
augauugccauucuaacuguu

SEQ ID NO: 18529 - RNA, 21 nt, RNAi
uuuacuaacgguaagauugac

SEQ ID NO: 18530 - DNA, 21 bp, Homo sapiens
taactggtgtgagatggtatc

SEQ ID NO: 18531 - RNA, 21 nt, RNAi
acuggugugagaugguaucuu

SEQ ID NO: 18532 - RNA, 21 nt, RNAi
uuugaccacacucuaccauag

SEQ ID NO: 18533 - DNA, 21 bp, Homo sapiens
taatgaccagtgaagatgagc

SEQ ID NO: 18534 - RNA, 21 nt, RNAi
augaccagugaagaugagcuu

SEQ ID NO: 18535 - RNA, 21 nt, RNAi
uuuacuggucacuucuacucg

SEQ ID NO: 18536 - DNA, 21 bp, Homo sapiens
tatgtttgttggccacatgtt

SEQ ID NO: 18537 - RNA, 21 nt, RNAi
uguuuguuggccacauguuuu

SEQ ID NO: 18538 - RNA, 21 nt, RNAi
uuacaaacaaccgguguacaa

SEQ ID NO: 18539 - DNA, 21 bp, Homo sapiens
tacgtttgactggtgtgctga

SEQ ID NO: 18540 - RNA, 21 nt, RNAi
cguuugacuggugugcugauu

SEQ ID NO: 18541 - RNA, 21 nt, RNAi
uugcaaacugaccacacgacu

SEQ ID NO: 18542 - DNA, 21 bp, Homo sapiens
tattatccaggagaacttctc

SEQ ID NO: 18543 - RNA, 21 nt, RNAi
uuauccaggagaacuucucuu

SEQ ID NO: 18544 - RNA, 21 nt, RNAi
uuaauagguccucuugaagag

SEQ ID NO: 18545 - DNA, 21 bp, Homo sapiens
tatccaggagaacttctccaa

SEQ ID NO: 18546 - RNA, 21 nt, RNAi
uccaggagaacuucuccaauu

SEQ ID NO: 18547 - RNA, 21 nt, RNAi
uuagguccucuugaagagguu

SEQ ID NO: 18548 - DNA, 21 bp, Homo sapiens
tagcaagacagaccaacgttc

SEQ ID NO: 18549 - RNA, 21 nt, RNAi
gcaagacagaccaacguucuu

SEQ ID NO: 18550 - RNA, 21 nt, RNAi
uucguucugucugguugcaag

SEQ ID NO: 18551 - DNA, 21 bp, Homo sapiens
tatttctcgagaagagcaacc

SEQ ID NO: 18552 - RNA, 21 nt, RNAi
uuucucgagaagagcaaccuu

SEQ ID NO: 18553 - RNA, 21 nt, RNAi
uuaaagagcucuucucguugg

SEQ ID NO: 18554 - DNA, 21 bp, Homo sapiens
taattgtcagattcaccaagg

SEQ ID NO: 18555 - RNA, 21 nt, RNAi
auugucagauucaccaagguu

SEQ ID NO: 18556 - RNA, 21 nt, RNAi
uuuaacagucuaagugguucc

SEQ ID NO: 18557 - DNA, 21 bp, Homo sapiens
taacagcagatctctctgcag

SEQ ID NO: 18558 - RNA, 21 nt, RNAi
acagcagaucucucugcaguu

SEQ ID NO: 18559 - RNA, 21 nt, RNAi
uuugucgucuagagagacguc

SEQ ID NO: 18560 - DNA, 21 bp, Homo sapiens
tatccagccaaactaagcttc

SEQ ID NO: 18561 - RNA, 21 nt, RNAi
uccagccaaacuaagcuucuu

SEQ ID NO: 18562 - RNA, 21 nt, RNAi
uuaggucgguuugauucgaag

SEQ ID NO: 18563 - DNA, 21 bp, Homo sapiens
taagcttcataagcaaaggag

SEQ ID NO: 18564 - RNA, 21 nt, RNAi
agcuucauaagcaaaggaguu

SEQ ID NO: 18565 - RNA, 21 nt, RNAi
uuucgaaguauucguuuccuc

SEQ ID NO: 18566 - DNA, 21 bp, Homo sapiens
tacaagacatcctgaaggaag

SEQ ID NO: 18567 - RNA, 21 nt, RNAi
caagacauccugaaggaaguu

SEQ ID NO: 18568 - RNA, 21 nt, RNAi
uuguucuguaggacuuccuuc

SEQ ID NO: 18569 - DNA, 21 bp, Homo sapiens
taccaaattgtagagaccatt

SEQ ID NO: 18570 - RNA, 21 nt, RNAi
ccaaauuguagagaccauuuu

SEQ ID NO: 18571 - RNA, 21 nt, RNAi
uugguuuaacaucucugguaa

SEQ ID NO: 18572 - DNA, 21 bp, Homo sapiens
tagagaccattgacactatga

SEQ ID NO: 18573 - RNA, 21 nt, RNAi
gagaccauugacacuaugauu

SEQ ID NO: 18574 - RNA, 21 nt, RNAi
uucucugguaacugugauacu

SEQ ID NO: 18575 - DNA, 21 bp, Homo sapiens
tatgaagaaaccgtgtcaact

SEQ ID NO: 18576 - RNA, 21 nt, RNAi
ugaagaaaccgugucaacuuu

SEQ ID NO: 18577 - RNA, 21 nt, RNAi
uuacuucuuuggcacaguuga

SEQ ID NO: 18578 - DNA, 21 bp, Homo sapiens
taaccagctagtatcataatg

SEQ ID NO: 18579 - RNA, 21 nt, RNAi
accagcuaguaucauaauguu

SEQ ID NO: 18580 - RNA, 21 nt, RNAi
uuuggucgaucauaguauuac

SEQ ID NO: 18581 - DNA, 21 bp, Homo sapiens
tagtatcataatgacaggatc

SEQ ID NO: 18582 - RNA, 21 nt, RNAi
guaucauaaugacaggaucuu

SEQ ID NO: 18583 - RNA, 21 nt, RNAi
uucauaguauuacuguccuag

SEQ ID NO: 18584 - DNA, 21 bp, Homo sapiens
tatcataatgacaggatcaga

SEQ ID NO: 18585 - RNA, 21 nt, RNAi
ucauaaugacaggaucagauu

SEQ ID NO: 18586 - RNA, 21 nt, RNAi
uuaguauuacuguccuagucu

SEQ ID NO: 18587 - DNA, 21 bp, Homo sapiens
taatgacaggatcagattcac

SEQ ID NO: 18588 - RNA, 21 nt, RNAi
augacaggaucagauucacuu

SEQ ID NO: 18589 - RNA, 21 nt, RNAi
uuuacuguccuagucuaagug

SEQ ID NO: 18590 - DNA, 21 bp, Homo sapiens
taaagagtcaagactcattgg

SEQ ID NO: 18591 - RNA, 21 nt, RNAi
aagagucaagacucauugguu

SEQ ID NO: 18592 - RNA, 21 nt, RNAi
uuuucucaguucugaguaacc

SEQ ID NO: 18593 - DNA, 21 bp, Homo sapiens
aacgtgtttgagtcaagccag

SEQ ID NO: 18594 - RNA, 21 nt, RNAi
cguguuugagucaagccaguu

SEQ ID NO: 18595 - RNA, 21 nt, RNAi
uugcacaaacucaguucgguc

SEQ ID NO: 18596 - DNA, 21 bp, Homo sapiens
aactggctacggaccaagttt

SEQ ID NO: 18597 - RNA, 21 nt, RNAi
cuggcuacggaccaaguuuuu

SEQ ID NO: 18598 - RNA, 21 nt, RNAi
uugaccgaugccugguucaaa

SEQ ID NO: 18599 - DNA, 21 bp, Homo sapiens
aacctctattactatgaggct

SEQ ID NO: 18600 - RNA, 21 nt, RNAi
ccucuauuacuaugaggcuuu

SEQ ID NO: 18601 - RNA, 21 nt, RNAi
uuggagauaaugauacuccga

SEQ ID NO: 18602 - DNA, 21 bp, Homo sapiens
aagatctacatcgatcctttc

SEQ ID NO: 18603 - RNA, 21 nt, RNAi
gaucuacaucgauccuuucuu

SEQ ID NO: 18604 - RNA, 21 nt, RNAi
uucuagauguagcuaggaaag

SEQ ID NO: 18605 - DNA, 21 bp, Homo sapiens
aaccaggatgtaatcaatgcc

SEQ ID NO: 18606 - RNA, 21 nt, RNAi
ccaggauguaaucaaugccuu

SEQ ID NO: 18607 - RNA, 21 nt, RNAi
uugguccuacauuaguuacgg

SEQ ID NO: 18608 - DNA, 21 bp, Homo sapiens
aagttcggccaaattgtcaac

SEQ ID NO: 18609 - RNA, 21 nt, RNAi
guucggccaaauugucaacuu

SEQ ID NO: 18610 - RNA, 21 nt, RNAi
uucaagccgguuuaacaguug

SEQ ID NO: 18611 - DNA, 21 bp, Homo sapiens
aaattgtcaacacgctagaca

SEQ ID NO: 18612 - RNA, 21 nt, RNAi
auugucaacacgcuagacauu

SEQ ID NO: 18613 - RNA, 21 nt, RNAi
uuuaacaguugugcgaucugu

SEQ ID NO: 18614 - DNA, 21 bp, Homo sapiens
aattgtcaacacgctagacaa

SEQ ID NO: 18615 - RNA, 21 nt, RNAi
uugucaacacgcuagacaauu

SEQ ID NO: 18616 - RNA, 21 nt, RNAi
uuaacaguugugcgaucuguu

SEQ ID NO: 18617 - DNA, 21 bp, Homo sapiens
aacacgctagacaagatgatc

SEQ ID NO: 18618 - RNA, 21 nt, RNAi
cacgcuagacaagaugaucuu

SEQ ID NO: 18619 - RNA, 21 nt, RNAi
uugugcgaucuguucuacuag

SEQ ID NO: 18620 - DNA, 21 bp, Homo sapiens
catgaacacgatccgcacgta

SEQ ID NO: 18621 - RNA, 21 nt, RNAi
ugaacacgauccgcacguauu

SEQ ID NO: 18622 - RNA, 21 nt, RNAi
uuacuugugcuaggcgugcau

SEQ ID NO: 18623 - DNA, 21 bp, Homo sapiens
caacgtgtttgagtcaagcca

SEQ ID NO: 18624 - RNA, 21 nt, RNAi
acguguuugagucaagccauu

SEQ ID NO: 18625 - RNA, 21 nt, RNAi
uuugcacaaacucaguucggu

SEQ ID NO: 18626 - DNA, 21 bp, Homo sapiens
caactggctacggaccaagtt

SEQ ID NO: 18627 - RNA, 21 nt, RNAi
acuggcuacggaccaaguuuu

SEQ ID NO: 18628 - RNA, 21 nt, RNAi
uuugaccgaugccugguucaa

SEQ ID NO: 18629 - DNA, 21 bp, Homo sapiens
caacctctattactatgaggc

SEQ ID NO: 18630 - RNA, 21 nt, RNAi
accucuauuacuaugaggcuu

SEQ ID NO: 18631 - RNA, 21 nt, RNAi
uuuggagauaaugauacuccg

SEQ ID NO: 18632 - DNA, 21 bp, Homo sapiens
caatgtacagtacgcaccacg

SEQ ID NO: 18633 - RNA, 21 nt, RNAi
auguacaguacgcaccacguu

SEQ ID NO: 18634 - RNA, 21 nt, RNAi
uuuacaugucaugcguggugc

SEQ ID NO: 18635 - DNA, 21 bp, Homo sapiens
cacgcatttacatcagtgacc

SEQ ID NO: 18636 - RNA, 21 nt, RNAi
cgcauuuacaucagugaccuu

SEQ ID NO: 18637 - RNA, 21 nt, RNAi
uugcguaaauguagucacugg

SEQ ID NO: 18638 - DNA, 21 bp, Homo sapiens
catgacagaagccgagtacca

SEQ ID NO: 18639 - RNA, 21 nt, RNAi
ugacagaagccgaguaccauu

SEQ ID NO: 18640 - RNA, 21 nt, RNAi
uuacugucuucggcucauggu

SEQ ID NO: 18641 - DNA, 21 bp, Homo sapiens
caggagaagttgccactcatc

SEQ ID NO: 18642 - RNA, 21 nt, RNAi
ggagaaguugccacucaucuu

SEQ ID NO: 18643 - RNA, 21 nt, RNAi
uuccucuucaacggugaguag

SEQ ID NO: 18644 - DNA, 21 bp, Homo sapiens
catcgccatcgtgtgtaacag

SEQ ID NO: 18645 - RNA, 21 nt, RNAi
ucgccaucguguguaacaguu

SEQ ID NO: 18646 - RNA, 21 nt, RNAi
uuagcgguagcacacauuguc

SEQ ID NO: 18647 - DNA, 21 bp, Homo sapiens
catcgtgtgtaacagaagacg

SEQ ID NO: 18648 - RNA, 21 nt, RNAi
ucguguguaacagaagacguu

SEQ ID NO: 18649 - RNA, 21 nt, RNAi
uuagcacacauugucuucugc

SEQ ID NO: 18650 - DNA, 21 bp, Homo sapiens
cacggacaagctgcaacacta

SEQ ID NO: 18651 - RNA, 21 nt, RNAi
cggacaagcugcaacacuauu

SEQ ID NO: 18652 - RNA, 21 nt, RNAi
uugccuguucgacguugugau

SEQ ID NO: 18653 - DNA, 21 bp, Homo sapiens
cacgctttctagaggacgata

SEQ ID NO: 18654 - RNA, 21 nt, RNAi
cgcuuucuagaggacgauauu

SEQ ID NO: 18655 - RNA, 21 nt, RNAi
uugcgaaagaucuccugcuau

SEQ ID NO: 18656 - DNA, 21 bp, Homo sapiens
catgaccaaccaggatgtaat

SEQ ID NO: 18657 - RNA, 21 nt, RNAi
ugaccaaccaggauguaauuu

SEQ ID NO: 18658 - RNA, 21 nt, RNAi
uuacugguugguccuacauua

SEQ ID NO: 18659 - DNA, 21 bp, Homo sapiens
caaccaggatgtaatcaatgc

SEQ ID NO: 18660 - RNA, 21 nt, RNAi
accaggauguaaucaaugcuu

SEQ ID NO: 18661 - RNA, 21 nt, RNAi
uuugguccuacauuaguuacg

SEQ ID NO: 18662 - DNA, 21 bp, Homo sapiens
cattgagcaggactatcggct

SEQ ID NO: 18663 - RNA, 21 nt, RNAi
uugagcaggacuaucggcuuu

SEQ ID NO: 18664 - RNA, 21 nt, RNAi
uuaacucguccugauagccga

SEQ ID NO: 18665 - DNA, 21 bp, Homo sapiens
caagttcggccaaattgtcaa

SEQ ID NO: 18666 - RNA, 21 nt, RNAi
aguucggccaaauugucaauu

SEQ ID NO: 18667 - RNA, 21 nt, RNAi
uuucaagccgguuuaacaguu

SEQ ID NO: 18668 - DNA, 21 bp, Homo sapiens
caaattgtcaacacgctagac

SEQ ID NO: 18669 - RNA, 21 nt, RNAi
aauugucaacacgcuagacuu

SEQ ID NO: 18670 - RNA, 21 nt, RNAi
uuuuaacaguugugcgaucug

SEQ ID NO: 18671 - DNA, 21 bp, Homo sapiens
caacacgctagacaagatgat

SEQ ID NO: 18672 - RNA, 21 nt, RNAi
acacgcuagacaagaugauuu

SEQ ID NO: 18673 - RNA, 21 nt, RNAi
uuugugcgaucuguucuacua

SEQ ID NO: 18674 - DNA, 21 bp, Homo sapiens
cacgctagacaagatgatccg

SEQ ID NO: 18675 - RNA, 21 nt, RNAi
cgcuagacaagaugauccguu

SEQ ID NO: 18676 - RNA, 21 nt, RNAi
uugcgaucuguucuacuaggc

SEQ ID NO: 18677 - DNA, 21 bp, Homo sapiens
caccagctttaacacggtgga

SEQ ID NO: 18678 - RNA, 21 nt, RNAi
ccagcuuuaacacgguggauu

SEQ ID NO: 18679 - RNA, 21 nt, RNAi
uuggucgaaauugugccaccu

SEQ ID NO: 18680 - DNA, 21 bp, Homo sapiens
cagctttaacacggtggacga

SEQ ID NO: 18681 - RNA, 21 nt, RNAi
gcuuuaacacgguggacgauu

SEQ ID NO: 18682 - RNA, 21 nt, RNAi
uucgaaauugugccaccugcu

SEQ ID NO: 18683 - DNA, 21 bp, Homo sapiens
gagaacatgaacacgatccgc

SEQ ID NO: 18684 - RNA, 21 nt, RNAi
gaacaugaacacgauccgcuu

SEQ ID NO: 18685 - RNA, 21 nt, RNAi
uucuuguacuugugcuaggcg

SEQ ID NO: 18686 - DNA, 21 bp, Homo sapiens
gaacatgaacacgatccgcac

SEQ ID NO: 18687 - RNA, 21 nt, RNAi
acaugaacacgauccgcacuu

SEQ ID NO: 18688 - RNA, 21 nt, RNAi
uuuguacuugugcuaggcgug

SEQ ID NO: 18689 - DNA, 21 bp, Homo sapiens
gaacaactggctacggaccaa

SEQ ID NO: 18690 - RNA, 21 nt, RNAi
acaacuggcuacggaccaauu

SEQ ID NO: 18691 - RNA, 21 nt, RNAi
uuuguugaccgaugccugguu

SEQ ID NO: 18692 - DNA, 21 bp, Homo sapiens
gagaggacctcgtctacaaca

SEQ ID NO: 18693 - RNA, 21 nt, RNAi
gaggaccucgucuacaacauu

SEQ ID NO: 18694 - RNA, 21 nt, RNAi
uucuccuggagcagauguugu

SEQ ID NO: 18695 - DNA, 21 bp, Homo sapiens
gaggacctcgtctacaacatc

SEQ ID NO: 18696 - RNA, 21 nt, RNAi
ggaccucgucuacaacaucuu

SEQ ID NO: 18697 - RNA, 21 nt, RNAi
uuccuggagcagauguuguag

SEQ ID NO: 18698 - DNA, 21 bp, Homo sapiens
gacctcgtctacaacatcatc

SEQ ID NO: 18699 - RNA, 21 nt, RNAi
ccucgucuacaacaucaucuu

SEQ ID NO: 18700 - RNA, 21 nt, RNAi
uuggagcagauguuguaguag

SEQ ID NO: 18701 - DNA, 21 bp, Homo sapiens
gacaatgtacagtacgcacca

SEQ ID NO: 18702 - RNA, 21 nt, RNAi
caauguacaguacgcaccauu

SEQ ID NO: 18703 - RNA, 21 nt, RNAi
uuguuacaugucaugcguggu

SEQ ID NO: 18704 - DNA, 21 bp, Homo sapiens
gaccgagccacgcatttacat

SEQ ID NO: 18705 - RNA, 21 nt, RNAi
ccgagccacgcauuuacauuu

SEQ ID NO: 18706 - RNA, 21 nt, RNAi
uuggcucggugcguaaaugua

SEQ ID NO: 18707 - DNA, 21 bp, Homo sapiens
gagccacgcatttacatcagt

SEQ ID NO: 18708 - RNA, 21 nt, RNAi
gccacgcauuuacaucaguuu

SEQ ID NO: 18709 - RNA, 21 nt, RNAi
uucggugcguaaauguaguca

SEQ ID NO: 18710 - DNA, 21 bp, Homo sapiens
gagaagttgccactcatcatc

SEQ ID NO: 18711 - RNA, 21 nt, RNAi
gaaguugccacucaucaucuu

SEQ ID NO: 18712 - RNA, 21 nt, RNAi
uucuucaacggugaguaguag

SEQ ID NO: 18713 - DNA, 21 bp, Homo sapiens
gaagttgccactcatcatcgg

SEQ ID NO: 18714 - RNA, 21 nt, RNAi
aguugccacucaucaucgguu

SEQ ID NO: 18715 - RNA, 21 nt, RNAi
uuucaacggugaguaguagcc

SEQ ID NO: 18716 - DNA, 21 bp, Homo sapiens
gagtacacggacaagctgcaa

SEQ ID NO: 18717 - RNA, 21 nt, RNAi
guacacggacaagcugcaauu

SEQ ID NO: 18718 - RNA, 21 nt, RNAi
uucaugugccuguucgacguu

SEQ ID NO: 18719 - DNA, 21 bp, Homo sapiens
gaagatctacatcgatccttt

SEQ ID NO: 18720 - RNA, 21 nt, RNAi
agaucuacaucgauccuuuuu

SEQ ID NO: 18721 - RNA, 21 nt, RNAi
uuucuagauguagcuaggaaa

SEQ ID NO: 18722 - DNA, 21 bp, Homo sapiens
gatctacatcgatcctttcac

SEQ ID NO: 18723 - RNA, 21 nt, RNAi
ucuacaucgauccuuucacuu

SEQ ID NO: 18724 - RNA, 21 nt, RNAi
uuagauguagcuaggaaagug

SEQ ID NO: 18725 - DNA, 21 bp, Homo sapiens
gatcctttcacctacgaggac

SEQ ID NO: 18726 - RNA, 21 nt, RNAi
uccuuucaccuacgaggacuu

SEQ ID NO: 18727 - RNA, 21 nt, RNAi
uuaggaaaguggaugcuccug

SEQ ID NO: 18728 - DNA, 21 bp, Homo sapiens
gatgtgtggagctacggcatt

SEQ ID NO: 18729 - RNA, 21 nt, RNAi
uguguggagcuacggcauuuu

SEQ ID NO: 18730 - RNA, 21 nt, RNAi
uuacacaccucgaugccguaa

SEQ ID NO: 18731 - DNA, 21 bp, Homo sapiens
gaccaaccaggatgtaatcaa

SEQ ID NO: 18732 - RNA, 21 nt, RNAi
ccaaccaggauguaaucaauu

SEQ ID NO: 18733 - RNA, 21 nt, RNAi
uugguugguccuacauuaguu

SEQ ID NO: 18734 - DNA, 21 bp, Homo sapiens
tacagcggcaagatgtacttc

SEQ ID NO: 18735 - RNA, 21 nt, RNAi
cagcggcaagauguacuucuu

SEQ ID NO: 18736 - RNA, 21 nt, RNAi
uugucgccguucuacaugaag

SEQ ID NO: 18737 - DNA, 21 bp, Homo sapiens
tacaccagctttaacacggtg

SEQ ID NO: 18738 - RNA, 21 nt, RNAi
caccagcuuuaacacgguguu

SEQ ID NO: 18739 - RNA, 21 nt, RNAi
uuguggucgaaauugugccac

SEQ ID NO: 18740 - DNA, 21 bp, Homo sapiens
tacaaggagagcttcgccaat

SEQ ID NO: 18741 - RNA, 21 nt, RNAi
caaggagagcuucgccaauuu

SEQ ID NO: 18742 - RNA, 21 nt, RNAi
uuguuccucucgaagcgguua

SEQ ID NO: 18743 - DNA, 21 bp, Homo sapiens
aattctcgagctcgtcgaccg

SEQ ID NO: 18744 - RNA, 21 nt, RNAi
uucucgagcucgucgaccguu

SEQ ID NO: 18745 - RNA, 21 nt, RNAi
uuaagagcucgagcagcuggc

SEQ ID NO: 18746 - DNA, 21 bp, Homo sapiens
aagtgtgcaccggcacagaca

SEQ ID NO: 18747 - RNA, 21 nt, RNAi
gugugcaccggcacagacauu

SEQ ID NO: 18748 - RNA, 21 nt, RNAi
uucacacguggccgugucugu

SEQ ID NO: 18749 - DNA, 21 bp, Homo sapiens
aaacctggaactcacctacct

SEQ ID NO: 18750 - RNA, 21 nt, RNAi
accuggaacucaccuaccuuu

SEQ ID NO: 18751 - RNA, 21 nt, RNAi
uuuggaccuugaguggaugga

SEQ ID NO: 18752 - DNA, 21 bp, Homo sapiens
aacctggaactcacctacctg

SEQ ID NO: 18753 - RNA, 21 nt, RNAi
ccuggaacucaccuaccuguu

SEQ ID NO: 18754 - RNA, 21 nt, RNAi
uuggaccuugaguggauggac

SEQ ID NO: 18755 - DNA, 21 bp, Homo sapiens
aatgccagcctgtccttcctg

SEQ ID NO: 18756 - RNA, 21 nt, RNAi
ugccagccuguccuuccuguu

SEQ ID NO: 18757 - RNA, 21 nt, RNAi
uuacggucggacaggaaggac

SEQ ID NO: 18758 - DNA, 21 bp, Homo sapiens
aagcctcacagagatcttgaa

SEQ ID NO: 18759 - RNA, 21 nt, RNAi
gccucacagagaucuugaauu

SEQ ID NO: 18760 - RNA, 21 nt, RNAi
uucggagugucucuagaacuu

SEQ ID NO: 18761 - DNA, 21 bp, Homo sapiens
aaggacatcttccacaagaac

SEQ ID NO: 18762 - RNA, 21 nt, RNAi
ggacaucuuccacaagaacuu

SEQ ID NO: 18763 - RNA, 21 nt, RNAi
uuccuguagaagguguucuug

SEQ ID NO: 18764 - DNA, 21 bp, Homo sapiens
aagaacaaccagctggctctc

SEQ ID NO: 18765 - RNA, 21 nt, RNAi
gaacaaccagcuggcucucuu

SEQ ID NO: 18766 - RNA, 21 nt, RNAi
uucuuguuggucgaccgagag

SEQ ID NO: 18767 - DNA, 21 bp, Homo sapiens
aacaaccagctggctctcaca

SEQ ID NO: 18768 - RNA, 21 nt, RNAi
caaccagcuggcucucacauu

SEQ ID NO: 18769 - RNA, 21 nt, RNAi
uuguuggucgaccgagagugu

SEQ ID NO: 18770 - DNA, 21 bp, Homo sapiens
aaccagctggctctcacactg

SEQ ID NO: 18771 - RNA, 21 nt, RNAi
ccagcuggcucucacacuguu

SEQ ID NO: 18772 - RNA, 21 nt, RNAi
uuggucgaccgagagugugac

SEQ ID NO: 18773 - DNA, 21 bp, Homo sapiens
aagcactctgactgcctggcc

SEQ ID NO: 18774 - RNA, 21 nt, RNAi
gcacucugacugccuggccuu

SEQ ID NO: 18775 - RNA, 21 nt, RNAi
uucgugagacugacggaccgg

SEQ ID NO: 18776 - DNA, 21 bp, Homo sapiens
aaccacagtggcatctgtgag

SEQ ID NO: 18777 - RNA, 21 nt, RNAi
ccacaguggcaucugugaguu

SEQ ID NO: 18778 - RNA, 21 nt, RNAi
uuggugucaccguagacacuc

SEQ ID NO: 18779 - DNA, 21 bp, Homo sapiens
aacacagacacgtttgagtcc

SEQ ID NO: 18780 - RNA, 21 nt, RNAi
cacagacacguuugaguccuu

SEQ ID NO: 18781 - RNA, 21 nt, RNAi
uugugucugugcaaacucagg

SEQ ID NO: 18782 - DNA, 21 bp, Homo sapiens
aactacctttctacggacgtg

SEQ ID NO: 18783 - RNA, 21 nt, RNAi
cuaccuuucuacggacguguu

SEQ ID NO: 18784 - RNA, 21 nt, RNAi
uugauggaaagaugccugcac

SEQ ID NO: 18785 - DNA, 21 bp, Homo sapiens
aaccaagaggtgacagcagag

SEQ ID NO: 18786 - RNA, 21 nt, RNAi
ccaagaggugacagcagaguu

SEQ ID NO: 18787 - RNA, 21 nt, RNAi
uugguucuccacugucgucuc

SEQ ID NO: 18788 - DNA, 21 bp, Homo sapiens
aagaggtgacagcagaggatg

SEQ ID NO: 18789 - RNA, 21 nt, RNAi
gaggugacagcagaggauguu

SEQ ID NO: 18790 - RNA, 21 nt, RNAi
uucuccacugucgucuccuac

SEQ ID NO: 18791 - DNA, 21 bp, Homo sapiens
aacacagcggtgtgagaagtg

SEQ ID NO: 18792 - RNA, 21 nt, RNAi
cacagcggugugagaaguguu

SEQ ID NO: 18793 - RNA, 21 nt, RNAi
uugugucgccacacucuucac

SEQ ID NO: 18794 - DNA, 21 bp, Homo sapiens
aatatccaggagtttgctggc

SEQ ID NO: 18795 - RNA, 21 nt, RNAi
uauccaggaguuugcuggcuu

SEQ ID NO: 18796 - RNA, 21 nt, RNAi
uuauagguccucaaacgaccg

SEQ ID NO: 18797 - DNA, 21 bp, Homo sapiens
aagtgtttgagactctggaag

SEQ ID NO: 18798 - RNA, 21 nt, RNAi
guguuugagacucuggaaguu

SEQ ID NO: 18799 - RNA, 21 nt, RNAi
uucacaaacucugagaccuuc

SEQ ID NO: 18800 - DNA, 21 bp, Homo sapiens
aagagatcacaggttacctat

SEQ ID NO: 18801 - RNA, 21 nt, RNAi
gagaucacagguuaccuauuu

SEQ ID NO: 18802 - RNA, 21 nt, RNAi
uucucuaguguccaauggaua

SEQ ID NO: 18803 - DNA, 21 bp, Homo sapiens
aattctgcacaatggcgccta

SEQ ID NO: 18804 - RNA, 21 nt, RNAi
uucugcacaauggcgccuauu

SEQ ID NO: 18805 - RNA, 21 nt, RNAi
uuaagacguguuaccgcggau

SEQ ID NO: 18806 - DNA, 21 bp, Homo sapiens
aatggcgcctactcgctgacc

SEQ ID NO: 18807 - RNA, 21 nt, RNAi
uggcgccuacucgcugaccuu

SEQ ID NO: 18808 - RNA, 21 nt, RNAi
uuaccgcggaugagcgacugg

SEQ ID NO: 18809 - DNA, 21 bp, Homo sapiens
aagctctgctccacactgcca

SEQ ID NO: 18810 - RNA, 21 nt, RNAi
gcucugcuccacacugccauu

SEQ ID NO: 18811 - RNA, 21 nt, RNAi
uucgagacgaggugugacggu

SEQ ID NO: 18812 - DNA, 21 bp, Homo sapiens
aaccggccagaggacgagtgt

SEQ ID NO: 18813 - RNA, 21 nt, RNAi
ccggccagaggacgaguguuu

SEQ ID NO: 18814 - RNA, 21 nt, RNAi
uuggccggucuccugcucaca

SEQ ID NO: 18815 - DNA, 21 bp, Homo sapiens
aactgcagccagttccttcgg

SEQ ID NO: 18816 - RNA, 21 nt, RNAi
cugcagccaguuccuucgguu

SEQ ID NO: 18817 - RNA, 21 nt, RNAi
uugacgucggucaaggaagcc

SEQ ID NO: 18818 - DNA, 21 bp, Homo sapiens
aatgccaggcactgtttgccg

SEQ ID NO: 18819 - RNA, 21 nt, RNAi
ugccaggcacuguuugccguu

SEQ ID NO: 18820 - RNA, 21 nt, RNAi
uuacgguccgugacaaacggc

SEQ ID NO: 18821 - DNA, 21 bp, Homo sapiens
aaacctgacctctcctacatg

SEQ ID NO: 18822 - RNA, 21 nt, RNAi
accugaccucuccuacauguu

SEQ ID NO: 18823 - RNA, 21 nt, RNAi
uuuggacuggagaggauguac

SEQ ID NO: 18824 - DNA, 21 bp, Homo sapiens
aacctgacctctcctacatgc

SEQ ID NO: 18825 - RNA, 21 nt, RNAi
ccugaccucuccuacaugcuu

SEQ ID NO: 18826 - RNA, 21 nt, RNAi
uuggacuggagaggauguacg

SEQ ID NO: 18827 - DNA, 21 bp, Homo sapiens
aagcgacggcagcagaagatc

SEQ ID NO: 18828 - RNA, 21 nt, RNAi
gcgacggcagcagaagaucuu

SEQ ID NO: 18829 - RNA, 21 nt, RNAi
uucgcugccgucgucuucuag

SEQ ID NO: 18830 - DNA, 21 bp, Homo sapiens
aagatccggaagtacacgatg

SEQ ID NO: 18831 - RNA, 21 nt, RNAi
gauccggaaguacacgauguu

SEQ ID NO: 18832 - RNA, 21 nt, RNAi
uucuaggccuucaugugcuac

SEQ ID NO: 18833 - DNA, 21 bp, Homo sapiens
aagtacacgatgcggagactg

SEQ ID NO: 18834 - RNA, 21 nt, RNAi
guacacgaugcggagacuguu

SEQ ID NO: 18835 - RNA, 21 nt, RNAi
uucaugugcuacgccucugac

SEQ ID NO: 18836 - DNA, 21 bp, Homo sapiens
aaccaggcgcagatgcggatc

SEQ ID NO: 18837 - RNA, 21 nt, RNAi
ccaggcgcagaugcggaucuu

SEQ ID NO: 18838 - RNA, 21 nt, RNAi
uugguccgcgucuacgccuag

SEQ ID NO: 18839 - DNA, 21 bp, Homo sapiens
aaagagacggagctgaggaag

SEQ ID NO: 18840 - RNA, 21 nt, RNAi
agagacggagcugaggaaguu

SEQ ID NO: 18841 - RNA, 21 nt, RNAi
uuucucugccucgacuccuuc

SEQ ID NO: 18842 - DNA, 21 bp, Homo sapiens
aagagacggagctgaggaagg

SEQ ID NO: 18843 - RNA, 21 nt, RNAi
gagacggagcugaggaagguu

SEQ ID NO: 18844 - RNA, 21 nt, RNAi
uucucugccucgacuccuucc

SEQ ID NO: 18845 - DNA, 21 bp, Homo sapiens
aaggtgaaggtgcttggatct

SEQ ID NO: 18846 - RNA, 21 nt, RNAi
ggugaaggugcuuggaucuuu

SEQ ID NO: 18847 - RNA, 21 nt, RNAi
uuccacuuccacgaaccuaga

SEQ ID NO: 18848 - DNA, 21 bp, Homo sapiens
aaggtgcttggatctggcgct

SEQ ID NO: 18849 - RNA, 21 nt, RNAi
ggugcuuggaucuggcgcuuu

SEQ ID NO: 18850 - RNA, 21 nt, RNAi
uuccacgaaccuagaccgcga

SEQ ID NO: 18851 - DNA, 21 bp, Homo sapiens
aaattccagtggccatcaaag

SEQ ID NO: 18852 - RNA, 21 nt, RNAi
auuccaguggccaucaaaguu

SEQ ID NO: 18853 - RNA, 21 nt, RNAi
uuuaaggucaccgguaguuuc

SEQ ID NO: 18854 - DNA, 21 bp, Homo sapiens
aattccagtggccatcaaagt

SEQ ID NO: 18855 - RNA, 21 nt, RNAi
uuccaguggccaucaaaguuu

SEQ ID NO: 18856 - RNA, 21 nt, RNAi
uuaaggucaccgguaguuuca

SEQ ID NO: 18857 - DNA, 21 bp, Homo sapiens
aagccaacaaagaaatcttag

SEQ ID NO: 18858 - RNA, 21 nt, RNAi
gccaacaaagaaaucuuaguu

SEQ ID NO: 18859 - RNA, 21 nt, RNAi
uucgguuguuucuuuagaauc

SEQ ID NO: 18860 - DNA, 21 bp, Homo sapiens
aaagaaatcttagacgaagca

SEQ ID NO: 18861 - RNA, 21 nt, RNAi
agaaaucuuagacgaagcauu

SEQ ID NO: 18862 - RNA, 21 nt, RNAi
uuucuuuagaaucugcuucgu

SEQ ID NO: 18863 - DNA, 21 bp, Homo sapiens
aagaaatcttagacgaagcat

SEQ ID NO: 18864 - RNA, 21 nt, RNAi
gaaaucuuagacgaagcauuu

SEQ ID NO: 18865 - RNA, 21 nt, RNAi
uucuuuagaaucugcuucgua

SEQ ID NO: 18866 - DNA, 21 bp, Homo sapiens
aaatcttagacgaagcatacg

SEQ ID NO: 18867 - RNA, 21 nt, RNAi
aucuuagacgaagcauacguu

SEQ ID NO: 18868 - RNA, 21 nt, RNAi
uuuagaaucugcuucguaugc

SEQ ID NO: 18869 - DNA, 21 bp, Homo sapiens
aatcttagacgaagcatacgt

SEQ ID NO: 18870 - RNA, 21 nt, RNAi
ucuuagacgaagcauacguuu

SEQ ID NO: 18871 - RNA, 21 nt, RNAi
uuagaaucugcuucguaugca

SEQ ID NO: 18872 - DNA, 21 bp, Homo sapiens
aagcatacgtgatggctggtg

SEQ ID NO: 18873 - RNA, 21 nt, RNAi
gcauacgugauggcugguguu

SEQ ID NO: 18874 - RNA, 21 nt, RNAi
uucguaugcacuaccgaccac

SEQ ID NO: 18875 - DNA, 21 bp, Homo sapiens
aactggtgtatgcagattgcc

SEQ ID NO: 18876 - RNA, 21 nt, RNAi
cugguguaugcagauugccuu

SEQ ID NO: 18877 - RNA, 21 nt, RNAi
uugaccacauacgucuaacgg

SEQ ID NO: 18878 - DNA, 21 bp, Homo sapiens
aagtggatggcgctggagtcc

SEQ ID NO: 18879 - RNA, 21 nt, RNAi
guggauggcgcuggaguccuu

SEQ ID NO: 18880 - RNA, 21 nt, RNAi
uucaccuaccgcgaccucagg

SEQ ID NO: 18881 - DNA, 21 bp, Homo sapiens
aaatgttggatgattgactct

SEQ ID NO: 18882 - RNA, 21 nt, RNAi
auguuggaugauugacucuuu

SEQ ID NO: 18883 - RNA, 21 nt, RNAi
uuuacaaccuacuaacugaga

SEQ ID NO: 18884 - DNA, 21 bp, Homo sapiens
aatgttggatgattgactctg

SEQ ID NO: 18885 - RNA, 21 nt, RNAi
uguuggaugauugacucuguu

SEQ ID NO: 18886 - RNA, 21 nt, RNAi
uuacaaccuacuaacugagac

SEQ ID NO: 18887 - DNA, 21 bp, Homo sapiens
aatatgtgaaccagccagatg

SEQ ID NO: 18888 - RNA, 21 nt, RNAi
uaugugaaccagccagauguu

SEQ ID NO: 18889 - RNA, 21 nt, RNAi
uuauacacuuggucggucuac

SEQ ID NO: 18890 - DNA, 21 bp, Homo sapiens
aaccagaaggccaagtccgca

SEQ ID NO: 18891 - RNA, 21 nt, RNAi
ccagaaggccaaguccgcauu

SEQ ID NO: 18892 - RNA, 21 nt, RNAi
uuggucuuccgguucaggcgu

SEQ ID NO: 18893 - DNA, 21 bp, Homo sapiens
aaggccaagtccgcagaagcc

SEQ ID NO: 18894 - RNA, 21 nt, RNAi
ggccaaguccgcagaagccuu

SEQ ID NO: 18895 - RNA, 21 nt, RNAi
uuccgguucaggcgucuucgg

SEQ ID NO: 18896 - DNA, 21 bp, Homo sapiens
aaggcctgacttctgctggca

SEQ ID NO: 18897 - RNA, 21 nt, RNAi
ggccugacuucugcuggcauu

SEQ ID NO: 18898 - RNA, 21 nt, RNAi
uuccggacugaagacgaccgu

SEQ ID NO: 18899 - DNA, 21 bp, Homo sapiens
aacctgccatgccaggaacct

SEQ ID NO: 18900 - RNA, 21 nt, RNAi
ccugccaugccaggaaccuuu

SEQ ID NO: 18901 - RNA, 21 nt, RNAi
uuggacgguacgguccuugga

SEQ ID NO: 18902 - DNA, 21 bp, Homo sapiens
aacctgtcctaaggaaccttc

SEQ ID NO: 18903 - RNA, 21 nt, RNAi
ccuguccuaaggaaccuucuu

SEQ ID NO: 18904 - RNA, 21 nt, RNAi
uuggacaggauuccuuggaag

SEQ ID NO: 18905 - DNA, 21 bp, Homo sapiens
aaggaaccttccttcctgctt

SEQ ID NO: 18906 - RNA, 21 nt, RNAi
ggaaccuuccuuccugcuuuu

SEQ ID NO: 18907 - RNA, 21 nt, RNAi
uuccuuggaaggaaggacgaa

SEQ ID NO: 18908 - DNA, 21 bp, Homo sapiens
aaccttccttcctgcttgagt

SEQ ID NO: 18909 - RNA, 21 nt, RNAi
ccuuccuuccugcuugaguuu

SEQ ID NO: 18910 - RNA, 21 nt, RNAi
uuggaaggaaggacgaacuca

SEQ ID NO: 18911 - DNA, 21 bp, Homo sapiens
aaggaacagcaatggtgtcag

SEQ ID NO: 18912 - RNA, 21 nt, RNAi
ggaacagcaauggugucaguu

SEQ ID NO: 18913 - RNA, 21 nt, RNAi
uuccuugucguuaccacaguc

SEQ ID NO: 18914 - DNA, 21 bp, Homo sapiens
aacagcaatggtgtcagtatc

SEQ ID NO: 18915 - RNA, 21 nt, RNAi
cagcaauggugucaguaucuu

SEQ ID NO: 18916 - RNA, 21 nt, RNAi
uugucguuaccacagucauag

SEQ ID NO: 18917 - DNA, 21 bp, Homo sapiens
aatggtgtcagtatccaggct

SEQ ID NO: 18918 - RNA, 21 nt, RNAi
uggugucaguauccaggcuuu

SEQ ID NO: 18919 - RNA, 21 nt, RNAi
uuaccacagucauagguccga

SEQ ID NO: 18920 - DNA, 21 bp, Homo sapiens
cagtgagcaccatggagctgg

SEQ ID NO: 18921 - RNA, 21 nt, RNAi
gugagcaccauggagcugguu

SEQ ID NO: 18922 - RNA, 21 nt, RNAi
uucacucgugguaccucgacc

SEQ ID NO: 18923 - DNA, 21 bp, Homo sapiens
caagtgtgcaccggcacagac

SEQ ID NO: 18924 - RNA, 21 nt, RNAi
agugugcaccggcacagacuu

SEQ ID NO: 18925 - RNA, 21 nt, RNAi
uuucacacguggccgugucug

SEQ ID NO: 18926 - DNA, 21 bp, Homo sapiens
caccggcacagacatgaagct

SEQ ID NO: 18927 - RNA, 21 nt, RNAi
ccggcacagacaugaagcuuu

SEQ ID NO: 18928 - RNA, 21 nt, RNAi
uuggccgugucuguacuucga

SEQ ID NO: 18929 - DNA, 21 bp, Homo sapiens
cacagacatgaagctgcggct

SEQ ID NO: 18930 - RNA, 21 nt, RNAi
cagacaugaagcugcggcuuu

SEQ ID NO: 18931 - RNA, 21 nt, RNAi
uugucuguacuucgacgccga

SEQ ID NO: 18932 - DNA, 21 bp, Homo sapiens
cagacatgaagctgcggctcc

SEQ ID NO: 18933 - RNA, 21 nt, RNAi
gacaugaagcugcggcuccuu

SEQ ID NO: 18934 - RNA, 21 nt, RNAi
uucuguacuucgacgccgagg

SEQ ID NO: 18935 - DNA, 21 bp, Homo sapiens
catgctccgccacctctacca

SEQ ID NO: 18936 - RNA, 21 nt, RNAi
ugcuccgccaccucuaccauu

SEQ ID NO: 18937 - RNA, 21 nt, RNAi
uuacgaggcgguggagauggu

SEQ ID NO: 18938 - DNA, 21 bp, Homo sapiens
caccaatgccagcctgtcctt

SEQ ID NO: 18939 - RNA, 21 nt, RNAi
ccaaugccagccuguccuuuu

SEQ ID NO: 18940 - RNA, 21 nt, RNAi
uugguuacggucggacaggaa

SEQ ID NO: 18941 - DNA, 21 bp, Homo sapiens
caatgccagcctgtccttcct

SEQ ID NO: 18942 - RNA, 21 nt, RNAi
augccagccuguccuuccuuu

SEQ ID NO: 18943 - RNA, 21 nt, RNAi
uuuacggucggacaggaagga

SEQ ID NO: 18944 - DNA, 21 bp, Homo sapiens
cagcctgtccttcctgcagga

SEQ ID NO: 18945 - RNA, 21 nt, RNAi
gccuguccuuccugcaggauu

SEQ ID NO: 18946 - RNA, 21 nt, RNAi
uucggacaggaaggacguccu

SEQ ID NO: 18947 - DNA, 21 bp, Homo sapiens
caggatatccaggaggtgcag

SEQ ID NO: 18948 - RNA, 21 nt, RNAi
ggauauccaggaggugcaguu

SEQ ID NO: 18949 - RNA, 21 nt, RNAi
uuccuauagguccuccacguc

SEQ ID NO: 18950 - DNA, 21 bp, Homo sapiens
catcgctcacaaccaagtgag

SEQ ID NO: 18951 - RNA, 21 nt, RNAi
ucgcucacaaccaagugaguu

SEQ ID NO: 18952 - RNA, 21 nt, RNAi
uuagcgaguguugguucacuc

SEQ ID NO: 18953 - DNA, 21 bp, Homo sapiens
cacaaccaagtgaggcaggtc

SEQ ID NO: 18954 - RNA, 21 nt, RNAi
caaccaagugaggcaggucuu

SEQ ID NO: 18955 - RNA, 21 nt, RNAi
uuguugguucacuccguccag

SEQ ID NO: 18956 - DNA, 21 bp, Homo sapiens
cactgcagaggctgcggattg

SEQ ID NO: 18957 - RNA, 21 nt, RNAi
cugcagaggcugcggauuguu

SEQ ID NO: 18958 - RNA, 21 nt, RNAi
uugacgucuccgacgccuaac

SEQ ID NO: 18959 - DNA, 21 bp, Homo sapiens
cagaggctgcggattgtgcga

SEQ ID NO: 18960 - RNA, 21 nt, RNAi
gaggcugcggauugugcgauu

SEQ ID NO: 18961 - RNA, 21 nt, RNAi
uucuccgacgccuaacacgcu

SEQ ID NO: 18962 - DNA, 21 bp, Homo sapiens
cagctctttgaggacaactat

SEQ ID NO: 18963 - RNA, 21 nt, RNAi
gcucuuugaggacaacuauuu

SEQ ID NO: 18964 - RNA, 21 nt, RNAi
uucgagaaacuccuguugaua

SEQ ID NO: 18965 - DNA, 21 bp, Homo sapiens
cagcttcgaagcctcacagag

SEQ ID NO: 18966 - RNA, 21 nt, RNAi
gcuucgaagccucacagaguu

SEQ ID NO: 18967 - RNA, 21 nt, RNAi
uucgaagcuucggagugucuc

SEQ ID NO: 18968 - DNA, 21 bp, Homo sapiens
cacagagatcttgaaaggagg

SEQ ID NO: 18969 - RNA, 21 nt, RNAi
cagagaucuugaaaggagguu

SEQ ID NO: 18970 - RNA, 21 nt, RNAi
uugucucuagaacuuuccucc

SEQ ID NO: 18971 - DNA, 21 bp, Homo sapiens
cagctctgctaccaggacacg

SEQ ID NO: 18972 - RNA, 21 nt, RNAi
gcucugcuaccaggacacguu

SEQ ID NO: 18973 - RNA, 21 nt, RNAi
uucgagacgaugguccugugc

SEQ ID NO: 18974 - DNA, 21 bp, Homo sapiens
catcttccacaagaacaacca

SEQ ID NO: 18975 - RNA, 21 nt, RNAi
ucuuccacaagaacaaccauu

SEQ ID NO: 18976 - RNA, 21 nt, RNAi
uuagaagguguucuuguuggu

SEQ ID NO: 18977 - DNA, 21 bp, Homo sapiens
cacaagaacaaccagctggct

SEQ ID NO: 18978 - RNA, 21 nt, RNAi
caagaacaaccagcuggcuuu

SEQ ID NO: 18979 - RNA, 21 nt, RNAi
uuguucuuguuggucgaccga

SEQ ID NO: 18980 - DNA, 21 bp, Homo sapiens
caagaacaaccagctggctct

SEQ ID NO: 18981 - RNA, 21 nt, RNAi
agaacaaccagcuggcucuuu

SEQ ID NO: 18982 - RNA, 21 nt, RNAi
uuucuuguuggucgaccgaga

SEQ ID NO: 18983 - DNA, 21 bp, Homo sapiens
caaccagctggctctcacact

SEQ ID NO: 18984 - RNA, 21 nt, RNAi
accagcuggcucucacacuuu

SEQ ID NO: 18985 - RNA, 21 nt, RNAi
uuuggucgaccgagaguguga

SEQ ID NO: 18986 - DNA, 21 bp, Homo sapiens
cagctggctctcacactgata

SEQ ID NO: 18987 - RNA, 21 nt, RNAi
gcuggcucucacacugauauu

SEQ ID NO: 18988 - RNA, 21 nt, RNAi
uucgaccgagagugugacuau

SEQ ID NO: 18989 - DNA, 21 bp, Homo sapiens
cacactgatagacaccaaccg

SEQ ID NO: 18990 - RNA, 21 nt, RNAi
cacugauagacaccaaccguu

SEQ ID NO: 18991 - RNA, 21 nt, RNAi
uugugacuaucugugguuggc

SEQ ID NO: 18992 - DNA, 21 bp, Homo sapiens
cactgatagacaccaaccgct

SEQ ID NO: 18993 - RNA, 21 nt, RNAi
cugauagacaccaaccgcuuu

SEQ ID NO: 18994 - RNA, 21 nt, RNAi
uugacuaucugugguuggcga

SEQ ID NO: 18995 - DNA, 21 bp, Homo sapiens
cactgactgctgccatgagca

SEQ ID NO: 18996 - RNA, 21 nt, RNAi
cugacugcugccaugagcauu

SEQ ID NO: 18997 - RNA, 21 nt, RNAi
uugacugacgacgguacucgu

SEQ ID NO: 18998 - DNA, 21 bp, Homo sapiens
caagcactctgactgcctggc

SEQ ID NO: 18999 - RNA, 21 nt, RNAi
agcacucugacugccuggcuu

SEQ ID NO: 19000 - RNA, 21 nt, RNAi
uuucgugagacugacggaccg

SEQ ID NO: 19001 - DNA, 21 bp, Homo sapiens
cacttcaaccacagtggcatc

SEQ ID NO: 19002 - RNA, 21 nt, RNAi
cuucaaccacaguggcaucuu

SEQ ID NO: 19003 - RNA, 21 nt, RNAi
uugaaguuggugucaccguag

SEQ ID NO: 19004 - DNA, 21 bp, Homo sapiens
caaccacagtggcatctgtga

SEQ ID NO: 19005 - RNA, 21 nt, RNAi
accacaguggcaucugugauu

SEQ ID NO: 19006 - RNA, 21 nt, RNAi
uuuggugucaccguagacacu

SEQ ID NO: 19007 - DNA, 21 bp, Homo sapiens
cacagtggcatctgtgagctg

SEQ ID NO: 19008 - RNA, 21 nt, RNAi
caguggcaucugugagcuguu

SEQ ID NO: 19009 - RNA, 21 nt, RNAi
uugucaccguagacacucgac

SEQ ID NO: 19010 - DNA, 21 bp, Homo sapiens
cagtggcatctgtgagctgca

SEQ ID NO: 19011 - RNA, 21 nt, RNAi
guggcaucugugagcugcauu

SEQ ID NO: 19012 - RNA, 21 nt, RNAi
uucaccguagacacucgacgu

SEQ ID NO: 19013 - DNA, 21 bp, Homo sapiens
cacctacaacacagacacgtt

SEQ ID NO: 19014 - RNA, 21 nt, RNAi
ccuacaacacagacacguuuu

SEQ ID NO: 19015 - RNA, 21 nt, RNAi
uuggauguugugucugugcaa

SEQ ID NO: 19016 - DNA, 21 bp, Homo sapiens
caacacagacacgtttgagtc

SEQ ID NO: 19017 - RNA, 21 nt, RNAi
acacagacacguuugagucuu

SEQ ID NO: 19018 - RNA, 21 nt, RNAi
uuugugucugugcaaacucag

SEQ ID NO: 19019 - DNA, 21 bp, Homo sapiens
cacagacacgtttgagtccat

SEQ ID NO: 19020 - RNA, 21 nt, RNAi
cagacacguuugaguccauuu

SEQ ID NO: 19021 - RNA, 21 nt, RNAi
uugucugugcaaacucaggua

SEQ ID NO: 19022 - DNA, 21 bp, Homo sapiens
cagacacgtttgagtccatgc

SEQ ID NO: 19023 - RNA, 21 nt, RNAi
gacacguuugaguccaugcuu

SEQ ID NO: 19024 - RNA, 21 nt, RNAi
uucugugcaaacucagguacg

SEQ ID NO: 19025 - DNA, 21 bp, Homo sapiens
cagctgtgtgactgcctgtcc

SEQ ID NO: 19026 - RNA, 21 nt, RNAi
gcugugugacugccuguccuu

SEQ ID NO: 19027 - RNA, 21 nt, RNAi
uucgacacacugacggacagg

SEQ ID NO: 19028 - DNA, 21 bp, Homo sapiens
caactacctttctacggacgt

SEQ ID NO: 19029 - RNA, 21 nt, RNAi
acuaccuuucuacggacguuu

SEQ ID NO: 19030 - RNA, 21 nt, RNAi
uuugauggaaagaugccugca

SEQ ID NO: 19031 - DNA, 21 bp, Homo sapiens
cacaaccaagaggtgacagca

SEQ ID NO: 19032 - RNA, 21 nt, RNAi
caaccaagaggugacagcauu

SEQ ID NO: 19033 - RNA, 21 nt, RNAi
uuguugguucuccacugucgu

SEQ ID NO: 19034 - DNA, 21 bp, Homo sapiens
caaccaagaggtgacagcaga

SEQ ID NO: 19035 - RNA, 21 nt, RNAi
accaagaggugacagcagauu

SEQ ID NO: 19036 - RNA, 21 nt, RNAi
uuugguucuccacugucgucu

SEQ ID NO: 19037 - DNA, 21 bp, Homo sapiens
caagaggtgacagcagaggat

SEQ ID NO: 19038 - RNA, 21 nt, RNAi
agaggugacagcagaggauuu

SEQ ID NO: 19039 - RNA, 21 nt, RNAi
uuucuccacugucgucuccua

SEQ ID NO: 19040 - DNA, 21 bp, Homo sapiens
cagcagaggatggaacacagc

SEQ ID NO: 19041 - RNA, 21 nt, RNAi
gcagaggauggaacacagcuu

SEQ ID NO: 19042 - RNA, 21 nt, RNAi
uucgucuccuaccuugugucg

SEQ ID NO: 19043 - DNA, 21 bp, Homo sapiens
cagaggatggaacacagcggt

SEQ ID NO: 19044 - RNA, 21 nt, RNAi
gaggauggaacacagcgguuu

SEQ ID NO: 19045 - RNA, 21 nt, RNAi
uucuccuaccuugugucgcca

SEQ ID NO: 19046 - DNA, 21 bp, Homo sapiens
cacagcggtgtgagaagtgca

SEQ ID NO: 19047 - RNA, 21 nt, RNAi
cagcggugugagaagugcauu

SEQ ID NO: 19048 - RNA, 21 nt, RNAi
uugucgccacacucuucacgu

SEQ ID NO: 19049 - DNA, 21 bp, Homo sapiens
cagcggtgtgagaagtgcagc

SEQ ID NO: 19050 - RNA, 21 nt, RNAi
gcggugugagaagugcagcuu

SEQ ID NO: 19051 - RNA, 21 nt, RNAi
uucgccacacucuucacgucg

SEQ ID NO: 19052 - DNA, 21 bp, Homo sapiens
catggagcacttgcgagaggt

SEQ ID NO: 19053 - RNA, 21 nt, RNAi
uggagcacuugcgagagguuu

SEQ ID NO: 19054 - RNA, 21 nt, RNAi
uuaccucgugaacgcucucca

SEQ ID NO: 19055 - DNA, 21 bp, Homo sapiens
cagttaccagtgccaatatcc

SEQ ID NO: 19056 - RNA, 21 nt, RNAi
guuaccagugccaauauccuu

SEQ ID NO: 19057 - RNA, 21 nt, RNAi
uucaauggucacgguuauagg

SEQ ID NO: 19058 - DNA, 21 bp, Homo sapiens
cagtgccaatatccaggagtt

SEQ ID NO: 19059 - RNA, 21 nt, RNAi
gugccaauauccaggaguuuu

SEQ ID NO: 19060 - RNA, 21 nt, RNAi
uucacgguuauagguccucaa

SEQ ID NO: 19061 - DNA, 21 bp, Homo sapiens
caatatccaggagtttgctgg

SEQ ID NO: 19062 - RNA, 21 nt, RNAi
auauccaggaguuugcugguu

SEQ ID NO: 19063 - RNA, 21 nt, RNAi
uuuauagguccucaaacgacc

SEQ ID NO: 19064 - DNA, 21 bp, Homo sapiens
caggagtttgctggctgcaag

SEQ ID NO: 19065 - RNA, 21 nt, RNAi
ggaguuugcuggcugcaaguu

SEQ ID NO: 19066 - RNA, 21 nt, RNAi
uuccucaaacgaccgacguuc

SEQ ID NO: 19067 - DNA, 21 bp, Homo sapiens
catttctgccggagagctttg

SEQ ID NO: 19068 - RNA, 21 nt, RNAi
uuucugccggagagcuuuguu

SEQ ID NO: 19069 - RNA, 21 nt, RNAi
uuaaagacggccucucgaaac

SEQ ID NO: 19070 - DNA, 21 bp, Homo sapiens
cagccagagcagctccaagtg

SEQ ID NO: 19071 - RNA, 21 nt, RNAi
gccagagcagcuccaaguguu

SEQ ID NO: 19072 - RNA, 21 nt, RNAi
uucggucucgucgagguucac

SEQ ID NO: 19073 - DNA, 21 bp, Homo sapiens
cagagcagctccaagtgtttg

SEQ ID NO: 19074 - RNA, 21 nt, RNAi
gagcagcuccaaguguuuguu

SEQ ID NO: 19075 - RNA, 21 nt, RNAi
uucucgucgagguucacaaac

SEQ ID NO: 19076 - DNA, 21 bp, Homo sapiens
cagctccaagtgtttgagact

SEQ ID NO: 19077 - RNA, 21 nt, RNAi
gcuccaaguguuugagacuuu

SEQ ID NO: 19078 - RNA, 21 nt, RNAi
uucgagguucacaaacucuga

SEQ ID NO: 19079 - DNA, 21 bp, Homo sapiens
caagtgtttgagactctggaa

SEQ ID NO: 19080 - RNA, 21 nt, RNAi
aguguuugagacucuggaauu

SEQ ID NO: 19081 - RNA, 21 nt, RNAi
uuucacaaacucugagaccuu

SEQ ID NO: 19082 - DNA, 21 bp, Homo sapiens
cacaggttacctatacatctc

SEQ ID NO: 19083 - RNA, 21 nt, RNAi
cagguuaccuauacaucucuu

SEQ ID NO: 19084 - RNA, 21 nt, RNAi
uuguccaauggauauguagag

SEQ ID NO: 19085 - DNA, 21 bp, Homo sapiens
caggttacctatacatctcag

SEQ ID NO: 19086 - RNA, 21 nt, RNAi
gguuaccuauacaucucaguu

SEQ ID NO: 19087 - RNA, 21 nt, RNAi
uuccaauggauauguagaguc

SEQ ID NO: 19088 - DNA, 21 bp, Homo sapiens
catctcagcatggccggacag

SEQ ID NO: 19089 - RNA, 21 nt, RNAi
ucucagcauggccggacaguu

SEQ ID NO: 19090 - RNA, 21 nt, RNAi
uuagagucguaccggccuguc

SEQ ID NO: 19091 - DNA, 21 bp, Homo sapiens
cagcgtcttccagaacctgca

SEQ ID NO: 19092 - RNA, 21 nt, RNAi
gcgucuuccagaaccugcauu

SEQ ID NO: 19093 - RNA, 21 nt, RNAi
uucgcagaaggucuuggacgu

SEQ ID NO: 19094 - DNA, 21 bp, Homo sapiens
cagaacctgcaagtaatccgg

SEQ ID NO: 19095 - RNA, 21 nt, RNAi
gaaccugcaaguaauccgguu

SEQ ID NO: 19096 - RNA, 21 nt, RNAi
uucuuggacguucauuaggcc

SEQ ID NO: 19097 - DNA, 21 bp, Homo sapiens
cacaatggcgcctactcgctg

SEQ ID NO: 19098 - RNA, 21 nt, RNAi
caauggcgccuacucgcuguu

SEQ ID NO: 19099 - RNA, 21 nt, RNAi
uuguuaccgcggaugagcgac

SEQ ID NO: 19100 - DNA, 21 bp, Homo sapiens
caatggcgcctactcgctgac

SEQ ID NO: 19101 - RNA, 21 nt, RNAi
auggcgccuacucgcugacuu

SEQ ID NO: 19102 - RNA, 21 nt, RNAi
uuuaccgcggaugagcgacug

SEQ ID NO: 19103 - DNA, 21 bp, Homo sapiens
cacctctgcttcgtgcacacg

SEQ ID NO: 19104 - RNA, 21 nt, RNAi
ccucugcuucgugcacacguu

SEQ ID NO: 19105 - RNA, 21 nt, RNAi
uuggagacgaagcacgugugc

SEQ ID NO: 19106 - DNA, 21 bp, Homo sapiens
caccaagctctgctccacact

SEQ ID NO: 19107 - RNA, 21 nt, RNAi
ccaagcucugcuccacacuuu

SEQ ID NO: 19108 - RNA, 21 nt, RNAi
uugguucgagacgagguguga

SEQ ID NO: 19109 - DNA, 21 bp, Homo sapiens
caagctctgctccacactgcc

SEQ ID NO: 19110 - RNA, 21 nt, RNAi
agcucugcuccacacugccuu

SEQ ID NO: 19111 - RNA, 21 nt, RNAi
uuucgagacgaggugugacgg

SEQ ID NO: 19112 - DNA, 21 bp, Homo sapiens
cagtgtgtcaactgcagccag

SEQ ID NO: 19113 - RNA, 21 nt, RNAi
gugugucaacugcagccaguu

SEQ ID NO: 19114 - RNA, 21 nt, RNAi
uucacacaguugacgucgguc

SEQ ID NO: 19115 - DNA, 21 bp, Homo sapiens
caactgcagccagttccttcg

SEQ ID NO: 19116 - RNA, 21 nt, RNAi
acugcagccaguuccuucguu

SEQ ID NO: 19117 - RNA, 21 nt, RNAi
uuugacgucggucaaggaagc

SEQ ID NO: 19118 - DNA, 21 bp, Homo sapiens
caggagtgcgtggaggaatgc

SEQ ID NO: 19119 - RNA, 21 nt, RNAi
ggagugcguggaggaaugcuu

SEQ ID NO: 19120 - RNA, 21 nt, RNAi
uuccucacgcaccuccuuacg

SEQ ID NO: 19121 - DNA, 21 bp, Homo sapiens
caggcactgtttgccgtgcca

SEQ ID NO: 19122 - RNA, 21 nt, RNAi
ggcacuguuugccgugccauu

SEQ ID NO: 19123 - RNA, 21 nt, RNAi
uuccgugacaaacggcacggu

SEQ ID NO: 19124 - DNA, 21 bp, Homo sapiens
cagaatggctcagtgacctgt

SEQ ID NO: 19125 - RNA, 21 nt, RNAi
gaauggcucagugaccuguuu

SEQ ID NO: 19126 - RNA, 21 nt, RNAi
uucuuaccgagucacuggaca

SEQ ID NO: 19127 - DNA, 21 bp, Homo sapiens
cagcggtgtgaaacctgacct

SEQ ID NO: 19128 - RNA, 21 nt, RNAi
gcggugugaaaccugaccuuu

SEQ ID NO: 19129 - RNA, 21 nt, RNAi
uucgccacacuuuggacugga

SEQ ID NO: 19130 - DNA, 21 bp, Homo sapiens
catctggaagtttccagatga

SEQ ID NO: 19131 - RNA, 21 nt, RNAi
ucuggaaguuuccagaugauu

SEQ ID NO: 19132 - RNA, 21 nt, RNAi
uuagaccuucaaaggucuacu

SEQ ID NO: 19133 - DNA, 21 bp, Homo sapiens
cactcctgtgtggacctggat

SEQ ID NO: 19134 - RNA, 21 nt, RNAi
cuccuguguggaccuggauuu

SEQ ID NO: 19135 - RNA, 21 nt, RNAi
uugaggacacaccuggaccua

SEQ ID NO: 19136 - DNA, 21 bp, Homo sapiens
catcgtctctgcggtggttgg

SEQ ID NO: 19137 - RNA, 21 nt, RNAi
ucgucucugcggugguugguu

SEQ ID NO: 19138 - RNA, 21 nt, RNAi
uuagcagagacgccaccaacc

SEQ ID NO: 19139 - DNA, 21 bp, Homo sapiens
cattctgctggtcgtggtctt

SEQ ID NO: 19140 - RNA, 21 nt, RNAi
uucugcuggucguggucuuuu

SEQ ID NO: 19141 - RNA, 21 nt, RNAi
uuaagacgaccagcaccagaa

SEQ ID NO: 19142 - DNA, 21 bp, Homo sapiens
catcaagcgacggcagcagaa

SEQ ID NO: 19143 - RNA, 21 nt, RNAi
ucaagcgacggcagcagaauu

SEQ ID NO: 19144 - RNA, 21 nt, RNAi
uuaguucgcugccgucgucuu

SEQ ID NO: 19145 - DNA, 21 bp, Homo sapiens
caagcgacggcagcagaagat

SEQ ID NO: 19146 - RNA, 21 nt, RNAi
agcgacggcagcagaagauuu

SEQ ID NO: 19147 - RNA, 21 nt, RNAi
uuucgcugccgucgucuucua

SEQ ID NO: 19148 - DNA, 21 bp, Homo sapiens
cagcagaagatccggaagtac

SEQ ID NO: 19149 - RNA, 21 nt, RNAi
gcagaagauccggaaguacuu

SEQ ID NO: 19150 - RNA, 21 nt, RNAi
uucgucuucuaggccuucaug

SEQ ID NO: 19151 - DNA, 21 bp, Homo sapiens
cagaagatccggaagtacacg

SEQ ID NO: 19152 - RNA, 21 nt, RNAi
gaagauccggaaguacacguu

SEQ ID NO: 19153 - RNA, 21 nt, RNAi
uucuucuaggccuucaugugc

SEQ ID NO: 19154 - DNA, 21 bp, Homo sapiens
cacgatgcggagactgctgca

SEQ ID NO: 19155 - RNA, 21 nt, RNAi
cgaugcggagacugcugcauu

SEQ ID NO: 19156 - RNA, 21 nt, RNAi
uugcuacgccucugacgacgu

SEQ ID NO: 19157 - DNA, 21 bp, Homo sapiens
caggaaacggagctggtggag

SEQ ID NO: 19158 - RNA, 21 nt, RNAi
ggaaacggagcugguggaguu

SEQ ID NO: 19159 - RNA, 21 nt, RNAi
uuccuuugccucgaccaccuc

SEQ ID NO: 19160 - DNA, 21 bp, Homo sapiens
caaccaggcgcagatgcggat

SEQ ID NO: 19161 - RNA, 21 nt, RNAi
accaggcgcagaugcggauuu

SEQ ID NO: 19162 - RNA, 21 nt, RNAi
uuugguccgcgucuacgccua

SEQ ID NO: 19163 - DNA, 21 bp, Homo sapiens
cagatgcggatcctgaaagag

SEQ ID NO: 19164 - RNA, 21 nt, RNAi
gaugcggauccugaaagaguu

SEQ ID NO: 19165 - RNA, 21 nt, RNAi
uucuacgccuaggacuuucuc

SEQ ID NO: 19166 - DNA, 21 bp, Homo sapiens
cagtggccatcaaagtgttga

SEQ ID NO: 19167 - RNA, 21 nt, RNAi
guggccaucaaaguguugauu

SEQ ID NO: 19168 - RNA, 21 nt, RNAi
uucaccgguaguuucacaacu

SEQ ID NO: 19169 - DNA, 21 bp, Homo sapiens
caaagccaacaaagaaatctt

SEQ ID NO: 19170 - RNA, 21 nt, RNAi
aagccaacaaagaaaucuuuu

SEQ ID NO: 19171 - RNA, 21 nt, RNAi
uuuucgguuguuucuuuagaa

SEQ ID NO: 19172 - DNA, 21 bp, Homo sapiens
caacaaagaaatcttagacga

SEQ ID NO: 19173 - RNA, 21 nt, RNAi
acaaagaaaucuuagacgauu

SEQ ID NO: 19174 - RNA, 21 nt, RNAi
uuuguuucuuuagaaucugcu

SEQ ID NO: 19175 - DNA, 21 bp, Homo sapiens
caaagaaatcttagacgaagc

SEQ ID NO: 19176 - RNA, 21 nt, RNAi
aagaaaucuuagacgaagcuu

SEQ ID NO: 19177 - RNA, 21 nt, RNAi
uuuucuuuagaaucugcuucg

SEQ ID NO: 19178 - DNA, 21 bp, Homo sapiens
catacgtgatggctggtgtgg

SEQ ID NO: 19179 - RNA, 21 nt, RNAi
uacgugauggcuggugugguu

SEQ ID NO: 19180 - RNA, 21 nt, RNAi
uuaugcacuaccgaccacacc

SEQ ID NO: 19181 - DNA, 21 bp, Homo sapiens
catctgcctgacatccacggt

SEQ ID NO: 19182 - RNA, 21 nt, RNAi
ucugccugacauccacgguuu

SEQ ID NO: 19183 - RNA, 21 nt, RNAi
uuagacggacuguaggugcca

SEQ ID NO: 19184 - DNA, 21 bp, Homo sapiens
catccacggtgcagctggtga

SEQ ID NO: 19185 - RNA, 21 nt, RNAi
uccacggugcagcuggugauu

SEQ ID NO: 19186 - RNA, 21 nt, RNAi
uuaggugccacgucgaccacu

SEQ ID NO: 19187 - DNA, 21 bp, Homo sapiens
cacggtgcagctggtgacaca

SEQ ID NO: 19188 - RNA, 21 nt, RNAi
cggugcagcuggugacacauu

SEQ ID NO: 19189 - RNA, 21 nt, RNAi
uugccacgucgaccacugugu

SEQ ID NO: 19190 - DNA, 21 bp, Homo sapiens
cagctggtgacacagcttatg

SEQ ID NO: 19191 - RNA, 21 nt, RNAi
gcuggugacacagcuuauguu

SEQ ID NO: 19192 - RNA, 21 nt, RNAi
uucgaccacugugucgaauac

SEQ ID NO: 19193 - DNA, 21 bp, Homo sapiens
caggacctgctgaactggtgt

SEQ ID NO: 19194 - RNA, 21 nt, RNAi
ggaccugcugaacugguguuu

SEQ ID NO: 19195 - RNA, 21 nt, RNAi
uuccuggacgacuugaccaca

SEQ ID NO: 19196 - DNA, 21 bp, Homo sapiens
cattgacgagacagagtacca

SEQ ID NO: 19197 - RNA, 21 nt, RNAi
uugacgagacagaguaccauu

SEQ ID NO: 19198 - RNA, 21 nt, RNAi
uuaacugcucugucucauggu

SEQ ID NO: 19199 - DNA, 21 bp, Homo sapiens
catcaagtggatggcgctgga

SEQ ID NO: 19200 - RNA, 21 nt, RNAi
ucaaguggauggcgcuggauu

SEQ ID NO: 19201 - RNA, 21 nt, RNAi
uuaguucaccuaccgcgaccu

SEQ ID NO: 19202 - DNA, 21 bp, Homo sapiens
caagtggatggcgctggagtc

SEQ ID NO: 19203 - RNA, 21 nt, RNAi
aguggauggcgcuggagucuu

SEQ ID NO: 19204 - RNA, 21 nt, RNAi
uuucaccuaccgcgaccucag

SEQ ID NO: 19205 - DNA, 21 bp, Homo sapiens
caccagagtgatgtgtggagt

SEQ ID NO: 19206 - RNA, 21 nt, RNAi
ccagagugauguguggaguuu

SEQ ID NO: 19207 - RNA, 21 nt, RNAi
uuggucucacuacacaccuca

SEQ ID NO: 19208 - DNA, 21 bp, Homo sapiens
cagagtgatgtgtggagttat

SEQ ID NO: 19209 - RNA, 21 nt, RNAi
gagugauguguggaguuauuu

SEQ ID NO: 19210 - RNA, 21 nt, RNAi
uucucacuacacaccucaaua

SEQ ID NO: 19211 - DNA, 21 bp, Homo sapiens
catctgcaccattgatgtcta

SEQ ID NO: 19212 - RNA, 21 nt, RNAi
ucugcaccauugaugucuauu

SEQ ID NO: 19213 - RNA, 21 nt, RNAi
uuagacgugguaacuacagau

SEQ ID NO: 19214 - DNA, 21 bp, Homo sapiens
caccattgatgtctacatgat

SEQ ID NO: 19215 - RNA, 21 nt, RNAi
ccauugaugucuacaugauuu

SEQ ID NO: 19216 - RNA, 21 nt, RNAi
uugguaacuacagauguacua

SEQ ID NO: 19217 - DNA, 21 bp, Homo sapiens
cattgatgtctacatgatcat

SEQ ID NO: 19218 - RNA, 21 nt, RNAi
uugaugucuacaugaucauuu

SEQ ID NO: 19219 - RNA, 21 nt, RNAi
uuaacuacagauguacuagua

SEQ ID NO: 19220 - DNA, 21 bp, Homo sapiens
catgatcatggtcaaatgttg

SEQ ID NO: 19221 - RNA, 21 nt, RNAi
ugaucauggucaaauguuguu

SEQ ID NO: 19222 - RNA, 21 nt, RNAi
uuacuaguaccaguuuacaac

SEQ ID NO: 19223 - DNA, 21 bp, Homo sapiens
catggtcaaatgttggatgat

SEQ ID NO: 19224 - RNA, 21 nt, RNAi
uggucaaauguuggaugauuu

SEQ ID NO: 19225 - RNA, 21 nt, RNAi
uuaccaguuuacaaccuacua

SEQ ID NO: 19226 - DNA, 21 bp, Homo sapiens
caaatgttggatgattgactc

SEQ ID NO: 19227 - RNA, 21 nt, RNAi
aauguuggaugauugacucuu

SEQ ID NO: 19228 - RNA, 21 nt, RNAi
uuuuacaaccuacuaacugag

SEQ ID NO: 19229 - DNA, 21 bp, Homo sapiens
cagcgctttgtggtcatccag

SEQ ID NO: 19230 - RNA, 21 nt, RNAi
gcgcuuuguggucauccaguu

SEQ ID NO: 19231 - RNA, 21 nt, RNAi
uucgcgaaacaccaguagguc

SEQ ID NO: 19232 - DNA, 21 bp, Homo sapiens
cagcaccttctaccgctcact

SEQ ID NO: 19233 - RNA, 21 nt, RNAi
gcaccuucuaccgcucacuuu

SEQ ID NO: 19234 - RNA, 21 nt, RNAi
uucguggaagauggcgaguga

SEQ ID NO: 19235 - DNA, 21 bp, Homo sapiens
caccttctaccgctcactgct

SEQ ID NO: 19236 - RNA, 21 nt, RNAi
ccuucuaccgcucacugcuuu

SEQ ID NO: 19237 - RNA, 21 nt, RNAi
uuggaagauggcgagugacga

SEQ ID NO: 19238 - DNA, 21 bp, Homo sapiens
cactgctggaggacgatgaca

SEQ ID NO: 19239 - RNA, 21 nt, RNAi
cugcuggaggacgaugacauu

SEQ ID NO: 19240 - RNA, 21 nt, RNAi
uugacgaccuccugcuacugu

SEQ ID NO: 19241 - DNA, 21 bp, Homo sapiens
cacaggcaccgcagctcatct

SEQ ID NO: 19242 - RNA, 21 nt, RNAi
caggcaccgcagcucaucuuu

SEQ ID NO: 19243 - RNA, 21 nt, RNAi
uuguccguggcgucgaguaga

SEQ ID NO: 19244 - DNA, 21 bp, Homo sapiens
caggcaccgcagctcatctac

SEQ ID NO: 19245 - RNA, 21 nt, RNAi
ggcaccgcagcucaucuacuu

SEQ ID NO: 19246 - RNA, 21 nt, RNAi
uuccguggcgucgaguagaug

SEQ ID NO: 19247 - DNA, 21 bp, Homo sapiens
caccgcagctcatctaccagg

SEQ ID NO: 19248 - RNA, 21 nt, RNAi
ccgcagcucaucuaccagguu

SEQ ID NO: 19249 - RNA, 21 nt, RNAi
uuggcgucgaguagauggucc

SEQ ID NO: 19250 - DNA, 21 bp, Homo sapiens
cagctcatctaccaggagtgg

SEQ ID NO: 19251 - RNA, 21 nt, RNAi
gcucaucuaccaggagugguu

SEQ ID NO: 19252 - RNA, 21 nt, RNAi
uucgaguagaugguccucacc

SEQ ID NO: 19253 - DNA, 21 bp, Homo sapiens
catctaccaggagtggcggtg

SEQ ID NO: 19254 - RNA, 21 nt, RNAi
ucuaccaggaguggcgguguu

SEQ ID NO: 19255 - RNA, 21 nt, RNAi
uuagaugguccucaccgccac

SEQ ID NO: 19256 - DNA, 21 bp, Homo sapiens
cagcctgaatatgtgaaccag

SEQ ID NO: 19257 - RNA, 21 nt, RNAi
gccugaauaugugaaccaguu

SEQ ID NO: 19258 - RNA, 21 nt, RNAi
uucggacuuauacacuugguc

SEQ ID NO: 19259 - DNA, 21 bp, Homo sapiens
cagccttcgacaacctctatt

SEQ ID NO: 19260 - RNA, 21 nt, RNAi
gccuucgacaaccucuauuuu

SEQ ID NO: 19261 - RNA, 21 nt, RNAi
uucggaagcuguuggagauaa

SEQ ID NO: 19262 - DNA, 21 bp, Homo sapiens
cagtgtgaaccagaaggccaa

SEQ ID NO: 19263 - RNA, 21 nt, RNAi
gugugaaccagaaggccaauu

SEQ ID NO: 19264 - RNA, 21 nt, RNAi
uucacacuuggucuuccgguu

SEQ ID NO: 19265 - DNA, 21 bp, Homo sapiens
cagaaggccaagtccgcagaa

SEQ ID NO: 19266 - RNA, 21 nt, RNAi
gaaggccaaguccgcagaauu

SEQ ID NO: 19267 - RNA, 21 nt, RNAi
uucuuccgguucaggcgucuu

SEQ ID NO: 19268 - DNA, 21 bp, Homo sapiens
catgccaggaacctgtcctaa

SEQ ID NO: 19269 - RNA, 21 nt, RNAi
ugccaggaaccuguccuaauu

SEQ ID NO: 19270 - RNA, 21 nt, RNAi
uuacgguccuuggacaggauu

SEQ ID NO: 19271 - DNA, 21 bp, Homo sapiens
caggaacctgtcctaaggaac

SEQ ID NO: 19272 - RNA, 21 nt, RNAi
ggaaccuguccuaaggaacuu

SEQ ID NO: 19273 - RNA, 21 nt, RNAi
uuccuuggacaggauuccuug

SEQ ID NO: 19274 - DNA, 21 bp, Homo sapiens
cagcctcgttggaagaggaac

SEQ ID NO: 19275 - RNA, 21 nt, RNAi
gccucguuggaagaggaacuu

SEQ ID NO: 19276 - RNA, 21 nt, RNAi
uucggagcaaccuucuccuug

SEQ ID NO: 19277 - DNA, 21 bp, Homo sapiens
catgaggaaggaacagcaatg

SEQ ID NO: 19278 - RNA, 21 nt, RNAi
ugaggaaggaacagcaauguu

SEQ ID NO: 19279 - RNA, 21 nt, RNAi
uuacuccuuccuugucguuac

SEQ ID NO: 19280 - DNA, 21 bp, Homo sapiens
cagcaatggtgtcagtatcca

SEQ ID NO: 19281 - RNA, 21 nt, RNAi
gcaauggugucaguauccauu

SEQ ID NO: 19282 - RNA, 21 nt, RNAi
uucguuaccacagucauaggu

SEQ ID NO: 19283 - DNA, 21 bp, Homo sapiens
caatggtgtcagtatccaggc

SEQ ID NO: 19284 - RNA, 21 nt, RNAi
auggugucaguauccaggcuu

SEQ ID NO: 19285 - RNA, 21 nt, RNAi
uuuaccacagucauagguccg

SEQ ID NO: 19286 - DNA, 21 bp, Homo sapiens
cagtatccaggctttgtacag

SEQ ID NO: 19287 - RNA, 21 nt, RNAi
guauccaggcuuuguacaguu

SEQ ID NO: 19288 - RNA, 21 nt, RNAi
uucauagguccgaaacauguc

SEQ ID NO: 19289 - DNA, 21 bp, Homo sapiens
caggctttgtacagagtgctt

SEQ ID NO: 19290 - RNA, 21 nt, RNAi
ggcuuuguacagagugcuuuu

SEQ ID NO: 19291 - RNA, 21 nt, RNAi
uuccgaaacaugucucacgaa

SEQ ID NO: 19292 - DNA, 21 bp, Homo sapiens
cactttgtccatttgcaaata

SEQ ID NO: 19293 - RNA, 21 nt, RNAi
cuuuguccauuugcaaauauu

SEQ ID NO: 19294 - RNA, 21 nt, RNAi
uugaaacagguaaacguuuau

SEQ ID NO: 19295 - DNA, 21 bp, Homo sapiens
gacatgctccgccacctctac

SEQ ID NO: 19296 - RNA, 21 nt, RNAi
caugcuccgccaccucuacuu

SEQ ID NO: 19297 - RNA, 21 nt, RNAi
uuguacgaggcgguggagaug

SEQ ID NO: 19298 - DNA, 21 bp, Homo sapiens
gaaacctggaactcacctacc

SEQ ID NO: 19299 - RNA, 21 nt, RNAi
aaccuggaacucaccuaccuu

SEQ ID NO: 19300 - RNA, 21 nt, RNAi
uuuuggaccuugaguggaugg

SEQ ID NO: 19301 - DNA, 21 bp, Homo sapiens
gagctgcagcttcgaagcctc

SEQ ID NO: 19302 - RNA, 21 nt, RNAi
gcugcagcuucgaagccucuu

SEQ ID NO: 19303 - RNA, 21 nt, RNAi
uucgacgucgaagcuucggag

SEQ ID NO: 19304 - DNA, 21 bp, Homo sapiens
gaagcctcacagagatcttga

SEQ ID NO: 19305 - RNA, 21 nt, RNAi
agccucacagagaucuugauu

SEQ ID NO: 19306 - RNA, 21 nt, RNAi
uuucggagugucucuagaacu

SEQ ID NO: 19307 - DNA, 21 bp, Homo sapiens
gaaggacatcttccacaagaa

SEQ ID NO: 19308 - RNA, 21 nt, RNAi
aggacaucuuccacaagaauu

SEQ ID NO: 19309 - RNA, 21 nt, RNAi
uuuccuguagaagguguucuu

SEQ ID NO: 19310 - DNA, 21 bp, Homo sapiens
gacatcttccacaagaacaac

SEQ ID NO: 19311 - RNA, 21 nt, RNAi
caucuuccacaagaacaacuu

SEQ ID NO: 19312 - RNA, 21 nt, RNAi
uuguagaagguguucuuguug

SEQ ID NO: 19313 - DNA, 21 bp, Homo sapiens
gaacaaccagctggctctcac

SEQ ID NO: 19314 - RNA, 21 nt, RNAi
acaaccagcuggcucucacuu

SEQ ID NO: 19315 - RNA, 21 nt, RNAi
uuuguuggucgaccgagagug

SEQ ID NO: 19316 - DNA, 21 bp, Homo sapiens
gatagacaccaaccgctctcg

SEQ ID NO: 19317 - RNA, 21 nt, RNAi
uagacaccaaccgcucucguu

SEQ ID NO: 19318 - RNA, 21 nt, RNAi
uuaucugugguuggcgagagc

SEQ ID NO: 19319 - DNA, 21 bp, Homo sapiens
gagagagttctgaggattgtc

SEQ ID NO: 19320 - RNA, 21 nt, RNAi
gagaguucugaggauugucuu

SEQ ID NO: 19321 - RNA, 21 nt, RNAi
uucucucaagacuccuaacag

SEQ ID NO: 19322 - DNA, 21 bp, Homo sapiens
gagagttctgaggattgtcag

SEQ ID NO: 19323 - RNA, 21 nt, RNAi
gaguucugaggauugucaguu

SEQ ID NO: 19324 - RNA, 21 nt, RNAi
uucucaagacuccuaacaguc

SEQ ID NO: 19325 - DNA, 21 bp, Homo sapiens
gagttctgaggattgtcagag

SEQ ID NO: 19326 - RNA, 21 nt, RNAi
guucugaggauugucagaguu

SEQ ID NO: 19327 - RNA, 21 nt, RNAi
uucaagacuccuaacagucuc

SEQ ID NO: 19328 - DNA, 21 bp, Homo sapiens
gaggattgtcagagcctgacg

SEQ ID NO: 19329 - RNA, 21 nt, RNAi
ggauugucagagccugacguu

SEQ ID NO: 19330 - RNA, 21 nt, RNAi
uuccuaacagucucggacugc

SEQ ID NO: 19331 - DNA, 21 bp, Homo sapiens
gattgtcagagcctgacgcgc

SEQ ID NO: 19332 - RNA, 21 nt, RNAi
uugucagagccugacgcgcuu

SEQ ID NO: 19333 - RNA, 21 nt, RNAi
uuaacagucucggacugcgcg

SEQ ID NO: 19334 - DNA, 21 bp, Homo sapiens
gactgctgccatgagcagtgt

SEQ ID NO: 19335 - RNA, 21 nt, RNAi
cugcugccaugagcaguguuu

SEQ ID NO: 19336 - RNA, 21 nt, RNAi
uugacgacgguacucgucaca

SEQ ID NO: 19337 - DNA, 21 bp, Homo sapiens
gaggtgacagcagaggatgga

SEQ ID NO: 19338 - RNA, 21 nt, RNAi
ggugacagcagaggauggauu

SEQ ID NO: 19339 - RNA, 21 nt, RNAi
uuccacugucgucuccuaccu

SEQ ID NO: 19340 - DNA, 21 bp, Homo sapiens
gacagcagaggatggaacaca

SEQ ID NO: 19341 - RNA, 21 nt, RNAi
cagcagaggauggaacacauu

SEQ ID NO: 19342 - RNA, 21 nt, RNAi
uugucgucuccuaccuugugu

SEQ ID NO: 19343 - DNA, 21 bp, Homo sapiens
gaggatggaacacagcggtgt

SEQ ID NO: 19344 - RNA, 21 nt, RNAi
ggauggaacacagcgguguuu

SEQ ID NO: 19345 - RNA, 21 nt, RNAi
uuccuaccuugugucgccaca

SEQ ID NO: 19346 - DNA, 21 bp, Homo sapiens
gatggaacacagcggtgtgag

SEQ ID NO: 19347 - RNA, 21 nt, RNAi
uggaacacagcggugugaguu

SEQ ID NO: 19348 - RNA, 21 nt, RNAi
uuaccuugugucgccacacuc

SEQ ID NO: 19349 - DNA, 21 bp, Homo sapiens
gaacacagcggtgtgagaagt

SEQ ID NO: 19350 - RNA, 21 nt, RNAi
acacagcggugugagaaguuu

SEQ ID NO: 19351 - RNA, 21 nt, RNAi
uuugugucgccacacucuuca

SEQ ID NO: 19352 - DNA, 21 bp, Homo sapiens
gagcacttgcgagaggtgagg

SEQ ID NO: 19353 - RNA, 21 nt, RNAi
gcacuugcgagaggugagguu

SEQ ID NO: 19354 - RNA, 21 nt, RNAi
uucgugaacgcucuccacucc

SEQ ID NO: 19355 - DNA, 21 bp, Homo sapiens
gagtttgctggctgcaagaag

SEQ ID NO: 19356 - RNA, 21 nt, RNAi
guuugcuggcugcaagaaguu

SEQ ID NO: 19357 - RNA, 21 nt, RNAi
uucaaacgaccgacguucuuc

SEQ ID NO: 19358 - DNA, 21 bp, Homo sapiens
gagcctggcatttctgccgga

SEQ ID NO: 19359 - RNA, 21 nt, RNAi
gccuggcauuucugccggauu

SEQ ID NO: 19360 - RNA, 21 nt, RNAi
uucggaccguaaagacggccu

SEQ ID NO: 19361 - DNA, 21 bp, Homo sapiens
gagcagctccaagtgtttgag

SEQ ID NO: 19362 - RNA, 21 nt, RNAi
gcagcuccaaguguuugaguu

SEQ ID NO: 19363 - RNA, 21 nt, RNAi
uucgucgagguucacaaacuc

SEQ ID NO: 19364 - DNA, 21 bp, Homo sapiens
gagactctggaagagatcaca

SEQ ID NO: 19365 - RNA, 21 nt, RNAi
gacucuggaagagaucacauu

SEQ ID NO: 19366 - RNA, 21 nt, RNAi
uucugagaccuucucuagugu

SEQ ID NO: 19367 - DNA, 21 bp, Homo sapiens
gactctggaagagatcacagg

SEQ ID NO: 19368 - RNA, 21 nt, RNAi
cucuggaagagaucacagguu

SEQ ID NO: 19369 - RNA, 21 nt, RNAi
uugagaccuucucuagugucc

SEQ ID NO: 19370 - DNA, 21 bp, Homo sapiens
gaagagatcacaggttaccta

SEQ ID NO: 19371 - RNA, 21 nt, RNAi
agagaucacagguuaccuauu

SEQ ID NO: 19372 - RNA, 21 nt, RNAi
uuucucuaguguccaauggau

SEQ ID NO: 19373 - DNA, 21 bp, Homo sapiens
gagatcacaggttacctatac

SEQ ID NO: 19374 - RNA, 21 nt, RNAi
gaucacagguuaccuauacuu

SEQ ID NO: 19375 - RNA, 21 nt, RNAi
uucuaguguccaauggauaug

SEQ ID NO: 19376 - DNA, 21 bp, Homo sapiens
gatcacaggttacctatacat

SEQ ID NO: 19377 - RNA, 21 nt, RNAi
ucacagguuaccuauacauuu

SEQ ID NO: 19378 - RNA, 21 nt, RNAi
uuaguguccaauggauaugua

SEQ ID NO: 19379 - DNA, 21 bp, Homo sapiens
gacctcagcgtcttccagaac

SEQ ID NO: 19380 - RNA, 21 nt, RNAi
ccucagcgucuuccagaacuu

SEQ ID NO: 19381 - RNA, 21 nt, RNAi
uuggagucgcagaaggucuug

SEQ ID NO: 19382 - DNA, 21 bp, Homo sapiens
gacgaattctgcacaatggcg

SEQ ID NO: 19383 - RNA, 21 nt, RNAi
cgaauucugcacaauggcguu

SEQ ID NO: 19384 - RNA, 21 nt, RNAi
uugcuuaagacguguuaccgc

SEQ ID NO: 19385 - DNA, 21 bp, Homo sapiens
gaattctgcacaatggcgcct

SEQ ID NO: 19386 - RNA, 21 nt, RNAi
auucugcacaauggcgccuuu

SEQ ID NO: 19387 - RNA, 21 nt, RNAi
uuuaagacguguuaccgcgga

SEQ ID NO: 19388 - DNA, 21 bp, Homo sapiens
gagtgcgtggaggaatgccga

SEQ ID NO: 19389 - RNA, 21 nt, RNAi
gugcguggaggaaugccgauu

SEQ ID NO: 19390 - RNA, 21 nt, RNAi
uucacgcaccuccuuacggcu

SEQ ID NO: 19391 - DNA, 21 bp, Homo sapiens
gaggaatgccgagtactgcag

SEQ ID NO: 19392 - RNA, 21 nt, RNAi
ggaaugccgaguacugcaguu

SEQ ID NO: 19393 - RNA, 21 nt, RNAi
uuccuuacggcucaugacguc

SEQ ID NO: 19394 - DNA, 21 bp, Homo sapiens
gagtatgtgaatgccaggcac

SEQ ID NO: 19395 - RNA, 21 nt, RNAi
guaugugaaugccaggcacuu

SEQ ID NO: 19396 - RNA, 21 nt, RNAi
uucauacacuuacgguccgug

SEQ ID NO: 19397 - DNA, 21 bp, Homo sapiens
gaatgccaggcactgtttgcc

SEQ ID NO: 19398 - RNA, 21 nt, RNAi
augccaggcacuguuugccuu

SEQ ID NO: 19399 - RNA, 21 nt, RNAi
uuuacgguccgugacaaacgg

SEQ ID NO: 19400 - DNA, 21 bp, Homo sapiens
gaatggctcagtgacctgttt

SEQ ID NO: 19401 - RNA, 21 nt, RNAi
auggcucagugaccuguuuuu

SEQ ID NO: 19402 - RNA, 21 nt, RNAi
uuuaccgagucacuggacaaa

SEQ ID NO: 19403 - DNA, 21 bp, Homo sapiens
gaaacctgacctctcctacat

SEQ ID NO: 19404 - RNA, 21 nt, RNAi
aaccugaccucuccuacauuu

SEQ ID NO: 19405 - RNA, 21 nt, RNAi
uuuuggacuggagaggaugua

SEQ ID NO: 19406 - DNA, 21 bp, Homo sapiens
gacgtccatcgtctctgcggt

SEQ ID NO: 19407 - RNA, 21 nt, RNAi
cguccaucgucucugcgguuu

SEQ ID NO: 19408 - RNA, 21 nt, RNAi
uugcagguagcagagacgcca

SEQ ID NO: 19409 - DNA, 21 bp, Homo sapiens
gatcctcatcaagcgacggca

SEQ ID NO: 19410 - RNA, 21 nt, RNAi
uccucaucaagcgacggcauu

SEQ ID NO: 19411 - RNA, 21 nt, RNAi
uuaggaguaguucgcugccgu

SEQ ID NO: 19412 - DNA, 21 bp, Homo sapiens
gacggcagcagaagatccgga

SEQ ID NO: 19413 - RNA, 21 nt, RNAi
cggcagcagaagauccggauu

SEQ ID NO: 19414 - RNA, 21 nt, RNAi
uugccgucgucuucuaggccu

SEQ ID NO: 19415 - DNA, 21 bp, Homo sapiens
gaagatccggaagtacacgat

SEQ ID NO: 19416 - RNA, 21 nt, RNAi
agauccggaaguacacgauuu

SEQ ID NO: 19417 - RNA, 21 nt, RNAi
uuucuaggccuucaugugcua

SEQ ID NO: 19418 - DNA, 21 bp, Homo sapiens
gatccggaagtacacgatgcg

SEQ ID NO: 19419 - RNA, 21 nt, RNAi
uccggaaguacacgaugcguu

SEQ ID NO: 19420 - RNA, 21 nt, RNAi
uuaggccuucaugugcuacgc

SEQ ID NO: 19421 - DNA, 21 bp, Homo sapiens
gaagtacacgatgcggagact

SEQ ID NO: 19422 - RNA, 21 nt, RNAi
aguacacgaugcggagacuuu

SEQ ID NO: 19423 - RNA, 21 nt, RNAi
uuucaugugcuacgccucuga

SEQ ID NO: 19424 - DNA, 21 bp, Homo sapiens
gatgcggagactgctgcagga

SEQ ID NO: 19425 - RNA, 21 nt, RNAi
ugcggagacugcugcaggauu

SEQ ID NO: 19426 - RNA, 21 nt, RNAi
uuacgccucugacgacguccu

SEQ ID NO: 19427 - DNA, 21 bp, Homo sapiens
gagactgctgcaggaaacgga

SEQ ID NO: 19428 - RNA, 21 nt, RNAi
gacugcugcaggaaacggauu

SEQ ID NO: 19429 - RNA, 21 nt, RNAi
uucugacgacguccuuugccu

SEQ ID NO: 19430 - DNA, 21 bp, Homo sapiens
gactgctgcaggaaacggagc

SEQ ID NO: 19431 - RNA, 21 nt, RNAi
cugcugcaggaaacggagcuu

SEQ ID NO: 19432 - RNA, 21 nt, RNAi
uugacgacguccuuugccucg

SEQ ID NO: 19433 - DNA, 21 bp, Homo sapiens
gatgcggatcctgaaagagac

SEQ ID NO: 19434 - RNA, 21 nt, RNAi
ugcggauccugaaagagacuu

SEQ ID NO: 19435 - RNA, 21 nt, RNAi
uuacgccuaggacuuucucug

SEQ ID NO: 19436 - DNA, 21 bp, Homo sapiens
gatcctgaaagagacggagct

SEQ ID NO: 19437 - RNA, 21 nt, RNAi
uccugaaagagacggagcuuu

SEQ ID NO: 19438 - RNA, 21 nt, RNAi
uuaggacuuucucugccucga

SEQ ID NO: 19439 - DNA, 21 bp, Homo sapiens
gaaagagacggagctgaggaa

SEQ ID NO: 19440 - RNA, 21 nt, RNAi
aagagacggagcugaggaauu

SEQ ID NO: 19441 - RNA, 21 nt, RNAi
uuuucucugccucgacuccuu

SEQ ID NO: 19442 - DNA, 21 bp, Homo sapiens
gagacggagctgaggaaggtg

SEQ ID NO: 19443 - RNA, 21 nt, RNAi
gacggagcugaggaagguguu

SEQ ID NO: 19444 - RNA, 21 nt, RNAi
uucugccucgacuccuuccac

SEQ ID NO: 19445 - DNA, 21 bp, Homo sapiens
gacggagctgaggaaggtgaa

SEQ ID NO: 19446 - RNA, 21 nt, RNAi
cggagcugaggaaggugaauu

SEQ ID NO: 19447 - RNA, 21 nt, RNAi
uugccucgacuccuuccacuu

SEQ ID NO: 19448 - DNA, 21 bp, Homo sapiens
gagctgaggaaggtgaaggtg

SEQ ID NO: 19449 - RNA, 21 nt, RNAi
gcugaggaaggugaagguguu

SEQ ID NO: 19450 - RNA, 21 nt, RNAi
uucgacuccuuccacuuccac

SEQ ID NO: 19451 - DNA, 21 bp, Homo sapiens
gaggaaggtgaaggtgcttgg

SEQ ID NO: 19452 - RNA, 21 nt, RNAi
ggaaggugaaggugcuugguu

SEQ ID NO: 19453 - RNA, 21 nt, RNAi
uuccuuccacuuccacgaacc

SEQ ID NO: 19454 - DNA, 21 bp, Homo sapiens
gaaggtgaaggtgcttggatc

SEQ ID NO: 19455 - RNA, 21 nt, RNAi
aggugaaggugcuuggaucuu

SEQ ID NO: 19456 - RNA, 21 nt, RNAi
uuuccacuuccacgaaccuag

SEQ ID NO: 19457 - DNA, 21 bp, Homo sapiens
gaaggtgcttggatctggcgc

SEQ ID NO: 19458 - RNA, 21 nt, RNAi
aggugcuuggaucuggcgcuu

SEQ ID NO: 19459 - RNA, 21 nt, RNAi
uuuccacgaaccuagaccgcg

SEQ ID NO: 19460 - DNA, 21 bp, Homo sapiens
gaaatcttagacgaagcatac

SEQ ID NO: 19461 - RNA, 21 nt, RNAi
aaucuuagacgaagcauacuu

SEQ ID NO: 19462 - RNA, 21 nt, RNAi
uuuuagaaucugcuucguaug

SEQ ID NO: 19463 - DNA, 21 bp, Homo sapiens
gacgaagcatacgtgatggct

SEQ ID NO: 19464 - RNA, 21 nt, RNAi
cgaagcauacgugauggcuuu

SEQ ID NO: 19465 - RNA, 21 nt, RNAi
uugcuucguaugcacuaccga

SEQ ID NO: 19466 - DNA, 21 bp, Homo sapiens
gaagcatacgtgatggctggt

SEQ ID NO: 19467 - RNA, 21 nt, RNAi
agcauacgugauggcugguuu

SEQ ID NO: 19468 - RNA, 21 nt, RNAi
uuucguaugcacuaccgacca

SEQ ID NO: 19469 - DNA, 21 bp, Homo sapiens
gacatccacggtgcagctggt

SEQ ID NO: 19470 - RNA, 21 nt, RNAi
cauccacggugcagcugguuu

SEQ ID NO: 19471 - RNA, 21 nt, RNAi
uuguaggugccacgucgacca

SEQ ID NO: 19472 - DNA, 21 bp, Homo sapiens
gacctgctgaactggtgtatg

SEQ ID NO: 19473 - RNA, 21 nt, RNAi
ccugcugaacugguguauguu

SEQ ID NO: 19474 - RNA, 21 nt, RNAi
uuggacgacuugaccacauac

SEQ ID NO: 19475 - DNA, 21 bp, Homo sapiens
gaactggtgtatgcagattgc

SEQ ID NO: 19476 - RNA, 21 nt, RNAi
acugguguaugcagauugcuu

SEQ ID NO: 19477 - RNA, 21 nt, RNAi
uuugaccacauacgucuaacg

SEQ ID NO: 19478 - DNA, 21 bp, Homo sapiens
gatgagctacctggaggatgt

SEQ ID NO: 19479 - RNA, 21 nt, RNAi
ugagcuaccuggaggauguuu

SEQ ID NO: 19480 - RNA, 21 nt, RNAi
uuacucgauggaccuccuaca

SEQ ID NO: 19481 - DNA, 21 bp, Homo sapiens
gagctacctggaggatgtgcg

SEQ ID NO: 19482 - RNA, 21 nt, RNAi
gcuaccuggaggaugugcguu

SEQ ID NO: 19483 - RNA, 21 nt, RNAi
uucgauggaccuccuacacgc

SEQ ID NO: 19484 - DNA, 21 bp, Homo sapiens
gaggatgtgcggctcgtacac

SEQ ID NO: 19485 - RNA, 21 nt, RNAi
ggaugugcggcucguacacuu

SEQ ID NO: 19486 - RNA, 21 nt, RNAi
uuccuacacgccgagcaugug

SEQ ID NO: 19487 - DNA, 21 bp, Homo sapiens
gatgtgcggctcgtacacagg

SEQ ID NO: 19488 - RNA, 21 nt, RNAi
ugugcggcucguacacagguu

SEQ ID NO: 19489 - RNA, 21 nt, RNAi
uuacacgccgagcaugugucc

SEQ ID NO: 19490 - DNA, 21 bp, Homo sapiens
gaacgtgctggtcaagagtcc

SEQ ID NO: 19491 - RNA, 21 nt, RNAi
acgugcuggucaagaguccuu

SEQ ID NO: 19492 - RNA, 21 nt, RNAi
uuugcacgaccaguucucagg

SEQ ID NO: 19493 - DNA, 21 bp, Homo sapiens
gacattgacgagacagagtac

SEQ ID NO: 19494 - RNA, 21 nt, RNAi
cauugacgagacagaguacuu

SEQ ID NO: 19495 - RNA, 21 nt, RNAi
uuguaacugcucugucucaug

SEQ ID NO: 19496 - DNA, 21 bp, Homo sapiens
gacgagacagagtaccatgca

SEQ ID NO: 19497 - RNA, 21 nt, RNAi
cgagacagaguaccaugcauu

SEQ ID NO: 19498 - RNA, 21 nt, RNAi
uugcucugucucaugguacgu

SEQ ID NO: 19499 - DNA, 21 bp, Homo sapiens
gagacagagtaccatgcagat

SEQ ID NO: 19500 - RNA, 21 nt, RNAi
gacagaguaccaugcagauuu

SEQ ID NO: 19501 - RNA, 21 nt, RNAi
uucugucucaugguacgucua

SEQ ID NO: 19502 - DNA, 21 bp, Homo sapiens
gacagagtaccatgcagatgg

SEQ ID NO: 19503 - RNA, 21 nt, RNAi
cagaguaccaugcagaugguu

SEQ ID NO: 19504 - RNA, 21 nt, RNAi
uugucucaugguacgucuacc

SEQ ID NO: 19505 - DNA, 21 bp, Homo sapiens
gatggcgctggagtccattct

SEQ ID NO: 19506 - RNA, 21 nt, RNAi
uggcgcuggaguccauucuuu

SEQ ID NO: 19507 - RNA, 21 nt, RNAi
uuaccgcgaccucagguaaga

SEQ ID NO: 19508 - DNA, 21 bp, Homo sapiens
gagtgatgtgtggagttatgg

SEQ ID NO: 19509 - RNA, 21 nt, RNAi
gugauguguggaguuaugguu

SEQ ID NO: 19510 - RNA, 21 nt, RNAi
uucacuacacaccucaauacc

SEQ ID NO: 19511 - DNA, 21 bp, Homo sapiens
gatgtgtggagttatggtgtg

SEQ ID NO: 19512 - RNA, 21 nt, RNAi
uguguggaguuaugguguguu

SEQ ID NO: 19513 - RNA, 21 nt, RNAi
uuacacaccucaauaccacac

SEQ ID NO: 19514 - DNA, 21 bp, Homo sapiens
gagttatggtgtgactgtgtg

SEQ ID NO: 19515 - RNA, 21 nt, RNAi
guuauggugugacuguguguu

SEQ ID NO: 19516 - RNA, 21 nt, RNAi
uucaauaccacacugacacac

SEQ ID NO: 19517 - DNA, 21 bp, Homo sapiens
gatgtctacatgatcatggtc

SEQ ID NO: 19518 - RNA, 21 nt, RNAi
ugucuacaugaucauggucuu

SEQ ID NO: 19519 - RNA, 21 nt, RNAi
uuacagauguacuaguaccag

SEQ ID NO: 19520 - DNA, 21 bp, Homo sapiens
gatcatggtcaaatgttggat

SEQ ID NO: 19521 - RNA, 21 nt, RNAi
ucauggucaaauguuggauuu

SEQ ID NO: 19522 - RNA, 21 nt, RNAi
uuaguaccaguuuacaaccua

SEQ ID NO: 19523 - DNA, 21 bp, Homo sapiens
gatgattgactctgaatgtcg

SEQ ID NO: 19524 - RNA, 21 nt, RNAi
ugauugacucugaaugucguu

SEQ ID NO: 19525 - RNA, 21 nt, RNAi
uuacuaacugagacuuacagc

SEQ ID NO: 19526 - DNA, 21 bp, Homo sapiens
gattgactctgaatgtcggcc

SEQ ID NO: 19527 - RNA, 21 nt, RNAi
uugacucugaaugucggccuu

SEQ ID NO: 19528 - RNA, 21 nt, RNAi
uuaacugagacuuacagccgg

SEQ ID NO: 19529 - DNA, 21 bp, Homo sapiens
gactctgaatgtcggccaaga

SEQ ID NO: 19530 - RNA, 21 nt, RNAi
cucugaaugucggccaagauu

SEQ ID NO: 19531 - RNA, 21 nt, RNAi
uugagacuuacagccgguucu

SEQ ID NO: 19532 - DNA, 21 bp, Homo sapiens
gaatgtcggccaagattccgg

SEQ ID NO: 19533 - RNA, 21 nt, RNAi
augucggccaagauuccgguu

SEQ ID NO: 19534 - RNA, 21 nt, RNAi
uuuacagccgguucuaaggcc

SEQ ID NO: 19535 - DNA, 21 bp, Homo sapiens
gagttggtgtctgaattctcc

SEQ ID NO: 19536 - RNA, 21 nt, RNAi
guuggugucugaauucuccuu

SEQ ID NO: 19537 - RNA, 21 nt, RNAi
uucaaccacagacuuaagagg

SEQ ID NO: 19538 - DNA, 21 bp, Homo sapiens
gacagcaccttctaccgctca

SEQ ID NO: 19539 - RNA, 21 nt, RNAi
cagcaccuucuaccgcucauu

SEQ ID NO: 19540 - RNA, 21 nt, RNAi
uugucguggaagauggcgagu

SEQ ID NO: 19541 - DNA, 21 bp, Homo sapiens
gacctggtggatgctgaggag

SEQ ID NO: 19542 - RNA, 21 nt, RNAi
ccugguggaugcugaggaguu

SEQ ID NO: 19543 - RNA, 21 nt, RNAi
uuggaccaccuacgacuccuc

SEQ ID NO: 19544 - DNA, 21 bp, Homo sapiens
gatgctgaggagtatctggta

SEQ ID NO: 19545 - RNA, 21 nt, RNAi
ugcugaggaguaucugguauu

SEQ ID NO: 19546 - RNA, 21 nt, RNAi
uuacgacuccucauagaccau

SEQ ID NO: 19547 - DNA, 21 bp, Homo sapiens
gatgtatttgatggtgacctg

SEQ ID NO: 19548 - RNA, 21 nt, RNAi
uguauuugauggugaccuguu

SEQ ID NO: 19549 - RNA, 21 nt, RNAi
uuacauaaacuaccacuggac

SEQ ID NO: 19550 - DNA, 21 bp, Homo sapiens
gagactgatggctacgttgcc

SEQ ID NO: 19551 - RNA, 21 nt, RNAi
gacugauggcuacguugccuu

SEQ ID NO: 19552 - RNA, 21 nt, RNAi
uucugacuaccgaugcaacgg

SEQ ID NO: 19553 - DNA, 21 bp, Homo sapiens
gaatatgtgaaccagccagat

SEQ ID NO: 19554 - RNA, 21 nt, RNAi
auaugugaaccagccagauuu

SEQ ID NO: 19555 - RNA, 21 nt, RNAi
uuuauacacuuggucggucua

SEQ ID NO: 19556 - DNA, 21 bp, Homo sapiens
gaaccagccagatgttcggcc

SEQ ID NO: 19557 - RNA, 21 nt, RNAi
accagccagauguucggccuu

SEQ ID NO: 19558 - RNA, 21 nt, RNAi
uuuggucggucuacaagccgg

SEQ ID NO: 19559 - DNA, 21 bp, Homo sapiens
gacgtgccagtgtgaaccaga

SEQ ID NO: 19560 - RNA, 21 nt, RNAi
cgugccagugugaaccagauu

SEQ ID NO: 19561 - RNA, 21 nt, RNAi
uugcacggucacacuuggucu

SEQ ID NO: 19562 - DNA, 21 bp, Homo sapiens
gaaccagaaggccaagtccgc

SEQ ID NO: 19563 - RNA, 21 nt, RNAi
accagaaggccaaguccgcuu

SEQ ID NO: 19564 - RNA, 21 nt, RNAi
uuuggucuuccgguucaggcg

SEQ ID NO: 19565 - DNA, 21 bp, Homo sapiens
gaaggccaagtccgcagaagc

SEQ ID NO: 19566 - RNA, 21 nt, RNAi
aggccaaguccgcagaagcuu

SEQ ID NO: 19567 - RNA, 21 nt, RNAi
uuuccgguucaggcgucuucg

SEQ ID NO: 19568 - DNA, 21 bp, Homo sapiens
gaaggcctgacttctgctggc

SEQ ID NO: 19569 - RNA, 21 nt, RNAi
aggccugacuucugcuggcuu

SEQ ID NO: 19570 - RNA, 21 nt, RNAi
uuuccggacugaagacgaccg

SEQ ID NO: 19571 - DNA, 21 bp, Homo sapiens
gacttctgctggcatcaagag

SEQ ID NO: 19572 - RNA, 21 nt, RNAi
cuucugcuggcaucaagaguu

SEQ ID NO: 19573 - RNA, 21 nt, RNAi
uugaagacgaccguaguucuc

SEQ ID NO: 19574 - DNA, 21 bp, Homo sapiens
gaacctgccatgccaggaacc

SEQ ID NO: 19575 - RNA, 21 nt, RNAi
accugccaugccaggaaccuu

SEQ ID NO: 19576 - RNA, 21 nt, RNAi
uuuggacgguacgguccuugg

SEQ ID NO: 19577 - DNA, 21 bp, Homo sapiens
gaacctgtcctaaggaacctt

SEQ ID NO: 19578 - RNA, 21 nt, RNAi
accuguccuaaggaaccuuuu

SEQ ID NO: 19579 - RNA, 21 nt, RNAi
uuuggacaggauuccuuggaa

SEQ ID NO: 19580 - DNA, 21 bp, Homo sapiens
gaaccttccttcctgcttgag

SEQ ID NO: 19581 - RNA, 21 nt, RNAi
accuuccuuccugcuugaguu

SEQ ID NO: 19582 - RNA, 21 nt, RNAi
uuuggaaggaaggacgaacuc

SEQ ID NO: 19583 - DNA, 21 bp, Homo sapiens
gagtctttgtggattctgagg

SEQ ID NO: 19584 - RNA, 21 nt, RNAi
gucuuuguggauucugagguu

SEQ ID NO: 19585 - RNA, 21 nt, RNAi
uucagaaacaccuaagacucc

SEQ ID NO: 19586 - DNA, 21 bp, Homo sapiens
gaggaaggaacagcaatggtg

SEQ ID NO: 19587 - RNA, 21 nt, RNAi
ggaaggaacagcaaugguguu

SEQ ID NO: 19588 - RNA, 21 nt, RNAi
uuccuuccuugucguuaccac

SEQ ID NO: 19589 - DNA, 21 bp, Homo sapiens
gaaggaacagcaatggtgtca

SEQ ID NO: 19590 - RNA, 21 nt, RNAi
aggaacagcaauggugucauu

SEQ ID NO: 19591 - RNA, 21 nt, RNAi
uuuccuugucguuaccacagu

SEQ ID NO: 19592 - DNA, 21 bp, Homo sapiens
gaacagcaatggtgtcagtat

SEQ ID NO: 19593 - RNA, 21 nt, RNAi
acagcaauggugucaguauuu

SEQ ID NO: 19594 - RNA, 21 nt, RNAi
uuugucguuaccacagucaua

SEQ ID NO: 19595 - DNA, 21 bp, Homo sapiens
tacgtgctcatcgctcacaac

SEQ ID NO: 19596 - RNA, 21 nt, RNAi
cgugcucaucgcucacaacuu

SEQ ID NO: 19597 - RNA, 21 nt, RNAi
uugcacgaguagcgaguguug

SEQ ID NO: 19598 - DNA, 21 bp, Homo sapiens
tacaacacagacacgtttgag

SEQ ID NO: 19599 - RNA, 21 nt, RNAi
caacacagacacguuugaguu

SEQ ID NO: 19600 - RNA, 21 nt, RNAi
uuguugugucugugcaaacuc

SEQ ID NO: 19601 - DNA, 21 bp, Homo sapiens
tacaactacctttctacggac

SEQ ID NO: 19602 - RNA, 21 nt, RNAi
caacuaccuuucuacggacuu

SEQ ID NO: 19603 - RNA, 21 nt, RNAi
uuguugauggaaagaugccug

SEQ ID NO: 19604 - DNA, 21 bp, Homo sapiens
taccagtgccaatatccagga

SEQ ID NO: 19605 - RNA, 21 nt, RNAi
ccagugccaauauccaggauu

SEQ ID NO: 19606 - RNA, 21 nt, RNAi
uuggucacgguuauagguccu

SEQ ID NO: 19607 - DNA, 21 bp, Homo sapiens
tatccaggagtttgctggctg

SEQ ID NO: 19608 - RNA, 21 nt, RNAi
uccaggaguuugcuggcuguu

SEQ ID NO: 19609 - RNA, 21 nt, RNAi
uuagguccucaaacgaccgac

SEQ ID NO: 19610 - DNA, 21 bp, Homo sapiens
tacctatacatctcagcatgg

SEQ ID NO: 19611 - RNA, 21 nt, RNAi
ccuauacaucucagcaugguu

SEQ ID NO: 19612 - RNA, 21 nt, RNAi
uuggauauguagagucguacc

SEQ ID NO: 19613 - DNA, 21 bp, Homo sapiens
tatacatctcagcatggccgg

SEQ ID NO: 19614 - RNA, 21 nt, RNAi
uacaucucagcauggccgguu

SEQ ID NO: 19615 - RNA, 21 nt, RNAi
uuauguagagucguaccggcc

SEQ ID NO: 19616 - DNA, 21 bp, Homo sapiens
tacatctcagcatggccggac

SEQ ID NO: 19617 - RNA, 21 nt, RNAi
caucucagcauggccggacuu

SEQ ID NO: 19618 - RNA, 21 nt, RNAi
uuguagagucguaccggccug

SEQ ID NO: 19619 - DNA, 21 bp, Homo sapiens
tatgtgaatgccaggcactgt

SEQ ID NO: 19620 - RNA, 21 nt, RNAi
ugugaaugccaggcacuguuu

SEQ ID NO: 19621 - RNA, 21 nt, RNAi
uuacacuuacgguccgugaca

SEQ ID NO: 19622 - DNA, 21 bp, Homo sapiens
tacacgatgcggagactgctg

SEQ ID NO: 19623 - RNA, 21 nt, RNAi
cacgaugcggagacugcuguu

SEQ ID NO: 19624 - RNA, 21 nt, RNAi
uugugcuacgccucugacgac

SEQ ID NO: 19625 - DNA, 21 bp, Homo sapiens
tagacgaagcatacgtgatgg

SEQ ID NO: 19626 - RNA, 21 nt, RNAi
gacgaagcauacgugaugguu

SEQ ID NO: 19627 - RNA, 21 nt, RNAi
uucugcuucguaugcacuacc

SEQ ID NO: 19628 - DNA, 21 bp, Homo sapiens
tatggctgcctcttagaccat

SEQ ID NO: 19629 - RNA, 21 nt, RNAi
uggcugccucuuagaccauuu

SEQ ID NO: 19630 - RNA, 21 nt, RNAi
uuaccgacggagaaucuggua

SEQ ID NO: 19631 - DNA, 21 bp, Homo sapiens
tacctggaggatgtgcggctc

SEQ ID NO: 19632 - RNA, 21 nt, RNAi
ccuggaggaugugcggcucuu

SEQ ID NO: 19633 - RNA, 21 nt, RNAi
uuggaccuccuacacgccgag

SEQ ID NO: 19634 - DNA, 21 bp, Homo sapiens
tacatgatcatggtcaaatgt

SEQ ID NO: 19635 - RNA, 21 nt, RNAi
caugaucauggucaaauguuu

SEQ ID NO: 19636 - RNA, 21 nt, RNAi
uuguacuaguaccaguuuaca

SEQ ID NO: 19637 - DNA, 21 bp, Homo sapiens
taccgctcactgctggaggac

SEQ ID NO: 19638 - RNA, 21 nt, RNAi
ccgcucacugcuggaggacuu

SEQ ID NO: 19639 - RNA, 21 nt, RNAi
uuggcgagugacgaccuccug

SEQ ID NO: 19640 - DNA, 21 bp, Homo sapiens
tacagcggtacagtgaggacc

SEQ ID NO: 19641 - RNA, 21 nt, RNAi
cagcgguacagugaggaccuu

SEQ ID NO: 19642 - RNA, 21 nt, RNAi
uugucgccaugucacuccugg

SEQ ID NO: 19643 - DNA, 21 bp, Homo sapiens
tatgtgaaccagccagatgtt

SEQ ID NO: 19644 - RNA, 21 nt, RNAi
ugugaaccagccagauguuuu

SEQ ID NO: 19645 - RNA, 21 nt, RNAi
uuacacuuggucggucuacaa

SEQ ID NO: 19646 - DNA, 21 bp, Homo sapiens
taaggaaccttccttcctgct

SEQ ID NO: 19647 - RNA, 21 nt, RNAi
aggaaccuuccuuccugcuuu

SEQ ID NO: 19648 - RNA, 21 nt, RNAi
uuuccuuggaaggaaggacga

SEQ ID NO: 19649 - DNA, 21 bp, Homo sapiens
tatccaggctttgtacagagt

SEQ ID NO: 19650 - RNA, 21 nt, RNAi
uccaggcuuuguacagaguuu

SEQ ID NO: 19651 - RNA, 21 nt, RNAi
uuagguccgaaacaugucuca

SEQ ID NO: 19652 - DNA, 21 bp, Homo sapiens
aactacctttctacggacgtg

SEQ ID NO: 19653 - RNA, 21 nt, RNAi
cuaccuuucuacggacguguu

SEQ ID NO: 19654 - RNA, 21 nt, RNAi
uugauggaaagaugccugcac

SEQ ID NO: 19655 - DNA, 21 bp, Homo sapiens
aattctgcacaatggcgccta

SEQ ID NO: 19656 - RNA, 21 nt, RNAi
uucugcacaauggcgccuauu

SEQ ID NO: 19657 - RNA, 21 nt, RNAi
uuaagacguguuaccgcggau

SEQ ID NO: 19658 - DNA, 21 bp, Homo sapiens
aagatccggaagtacacgatg

SEQ ID NO: 19659 - RNA, 21 nt, RNAi
gauccggaaguacacgauguu

SEQ ID NO: 19660 - RNA, 21 nt, RNAi
uucuaggccuucaugugcuac

SEQ ID NO: 19661 - DNA, 21 bp, Homo sapiens
aaagaaatcttagacgaagca

SEQ ID NO: 19662 - RNA, 21 nt, RNAi
agaaaucuuagacgaagcauu

SEQ ID NO: 19663 - RNA, 21 nt, RNAi
uuucuuuagaaucugcuucgu

SEQ ID NO: 19664 - DNA, 21 bp, Homo sapiens
cacactgatagacaccaaccg

SEQ ID NO: 19665 - RNA, 21 nt, RNAi
cacugauagacaccaaccguu

SEQ ID NO: 19666 - RNA, 21 nt, RNAi
uugugacuaucugugguuggc

SEQ ID NO: 19667 - DNA, 21 bp, Homo sapiens
cactgatagacaccaaccgct

SEQ ID NO: 19668 - RNA, 21 nt, RNAi
cugauagacaccaaccgcuuu

SEQ ID NO: 19669 - RNA, 21 nt, RNAi
uugacuaucugugguuggcga

SEQ ID NO: 19670 - DNA, 21 bp, Homo sapiens
cagacacgtttgagtccatgc

SEQ ID NO: 19671 - RNA, 21 nt, RNAi
gacacguuugaguccaugcuu

SEQ ID NO: 19672 - RNA, 21 nt, RNAi
uucugugcaaacucagguacg

SEQ ID NO: 19673 - DNA, 21 bp, Homo sapiens
caactacctttctacggacgt

SEQ ID NO: 19674 - RNA, 21 nt, RNAi
acuaccuuucuacggacguuu

SEQ ID NO: 19675 - RNA, 21 nt, RNAi
uuugauggaaagaugccugca

SEQ ID NO: 19676 - DNA, 21 bp, Homo sapiens
cagttaccagtgccaatatcc

SEQ ID NO: 19677 - RNA, 21 nt, RNAi
guuaccagugccaauauccuu

SEQ ID NO: 19678 - RNA, 21 nt, RNAi
uucaauggucacgguuauagg

SEQ ID NO: 19679 - DNA, 21 bp, Homo sapiens
catttctgccggagagctttg

SEQ ID NO: 19680 - RNA, 21 nt, RNAi
uuucugccggagagcuuuguu

SEQ ID NO: 19681 - RNA, 21 nt, RNAi
uuaaagacggccucucgaaac

SEQ ID NO: 19682 - DNA, 21 bp, Homo sapiens
cacaggttacctatacatctc

SEQ ID NO: 19683 - RNA, 21 nt, RNAi
cagguuaccuauacaucucuu

SEQ ID NO: 19684 - RNA, 21 nt, RNAi
uuguccaauggauauguagag

SEQ ID NO: 19685 - DNA, 21 bp, Homo sapiens
caggttacctatacatctcag

SEQ ID NO: 19686 - RNA, 21 nt, RNAi
gguuaccuauacaucucaguu

SEQ ID NO: 19687 - RNA, 21 nt, RNAi
uuccaauggauauguagaguc

SEQ ID NO: 19688 - DNA, 21 bp, Homo sapiens
cagatgcggatcctgaaagag

SEQ ID NO: 19689 - RNA, 21 nt, RNAi
gaugcggauccugaaagaguu

SEQ ID NO: 19690 - RNA, 21 nt, RNAi
uucuacgccuaggacuuucuc

SEQ ID NO: 19691 - DNA, 21 bp, Homo sapiens
caaagaaatcttagacgaagc

SEQ ID NO: 19692 - RNA, 21 nt, RNAi
aagaaaucuuagacgaagcuu

SEQ ID NO: 19693 - RNA, 21 nt, RNAi
uuuucuuuagaaucugcuucg

SEQ ID NO: 19694 - DNA, 21 bp, Homo sapiens
cagccttcgacaacctctatt

SEQ ID NO: 19695 - RNA, 21 nt, RNAi
gccuucgacaaccucuauuuu

SEQ ID NO: 19696 - RNA, 21 nt, RNAi
uucggaagcuguuggagauaa

SEQ ID NO: 19697 - DNA, 21 bp, Homo sapiens
gagagagttctgaggattgtc

SEQ ID NO: 19698 - RNA, 21 nt, RNAi
gagaguucugaggauugucuu

SEQ ID NO: 19699 - RNA, 21 nt, RNAi
uucucucaagacuccuaacag

SEQ ID NO: 19700 - DNA, 21 bp, Homo sapiens
gagagttctgaggattgtcag

SEQ ID NO: 19701 - RNA, 21 nt, RNAi
gaguucugaggauugucaguu

SEQ ID NO: 19702 - RNA, 21 nt, RNAi
uucucaagacuccuaacaguc

SEQ ID NO: 19703 - DNA, 21 bp, Homo sapiens
gaacacagcggtgtgagaagt

SEQ ID NO: 19704 - RNA, 21 nt, RNAi
acacagcggugugagaaguuu

SEQ ID NO: 19705 - RNA, 21 nt, RNAi
uuugugucgccacacucuuca

SEQ ID NO: 19706 - DNA, 21 bp, Homo sapiens
gatcacaggttacctatacat

SEQ ID NO: 19707 - RNA, 21 nt, RNAi
ucacagguuaccuauacauuu

SEQ ID NO: 19708 - RNA, 21 nt, RNAi
uuaguguccaauggauaugua

SEQ ID NO: 19709 - DNA, 21 bp, Homo sapiens
gaattctgcacaatggcgcct

SEQ ID NO: 19710 - RNA, 21 nt, RNAi
auucugcacaauggcgccuuu

SEQ ID NO: 19711 - RNA, 21 nt, RNAi
uuuaagacguguuaccgcgga

SEQ ID NO: 19712 - DNA, 21 bp, Homo sapiens
gaagtacacgatgcggagact

SEQ ID NO: 19713 - RNA, 21 nt, RNAi
aguacacgaugcggagacuuu

SEQ ID NO: 19714 - RNA, 21 nt, RNAi
uuucaugugcuacgccucuga

SEQ ID NO: 19715 - DNA, 21 bp, Homo sapiens
gatcctgaaagagacggagct

SEQ ID NO: 19716 - RNA, 21 nt, RNAi
uccugaaagagacggagcuuu

SEQ ID NO: 19717 - RNA, 21 nt, RNAi
uuaggacuuucucugccucga

SEQ ID NO: 19718 - DNA, 21 bp, Homo sapiens
gaaggtgaaggtgcttggatc

SEQ ID NO: 19719 - RNA, 21 nt, RNAi
aggugaaggugcuuggaucuu

SEQ ID NO: 19720 - RNA, 21 nt, RNAi
uuuccacuuccacgaaccuag

SEQ ID NO: 19721 - DNA, 21 bp, Homo sapiens
gacgaagcatacgtgatggct

SEQ ID NO: 19722 - RNA, 21 nt, RNAi
cgaagcauacgugauggcuuu

SEQ ID NO: 19723 - RNA, 21 nt, RNAi
uugcuucguaugcacuaccga

SEQ ID NO: 19724 - DNA, 21 bp, Homo sapiens
gacattgacgagacagagtac

SEQ ID NO: 19725 - RNA, 21 nt, RNAi
cauugacgagacagaguacuu

SEQ ID NO: 19726 - RNA, 21 nt, RNAi
uuguaacugcucugucucaug

SEQ ID NO: 19727 - DNA, 21 bp, Homo sapiens
gactctgaatgtcggccaaga

SEQ ID NO: 19728 - RNA, 21 nt, RNAi
cucugaaugucggccaagauu

SEQ ID NO: 19729 - RNA, 21 nt, RNAi
uugagacuuacagccgguucu

SEQ ID NO: 19730 - DNA, 21 bp, Homo sapiens
gagttggtgtctgaattctcc

SEQ ID NO: 19731 - RNA, 21 nt, RNAi
guuggugucugaauucuccuu

SEQ ID NO: 19732 - RNA, 21 nt, RNAi
uucaaccacagacuuaagagg

SEQ ID NO: 19733 - DNA, 21 bp, Homo sapiens
tagacgaagcatacgtgatgg

SEQ ID NO: 19734 - RNA, 21 nt, RNAi
gacgaagcauacgugaugguu

SEQ ID NO: 19735 - RNA, 21 nt, RNAi
uucugcuucguaugcacuacc

SEQ ID NO: 19736 - DNA, 21 bp, Homo sapiens
aatttgcaacctccgctgccg

SEQ ID NO: 19737 - RNA, 21 nt, RNAi
uuugcaaccuccgcugccguu

SEQ ID NO: 19738 - RNA, 21 nt, RNAi
uuaaacguuggaggcgacggc

SEQ ID NO: 19739 - DNA, 21 bp, Homo sapiens
aattcgccagcggttcaggtg

SEQ ID NO: 19740 - RNA, 21 nt, RNAi
uucgccagcgguucagguguu

SEQ ID NO: 19741 - RNA, 21 nt, RNAi
uuaagcggucgccaaguccac

SEQ ID NO: 19742 - DNA, 21 bp, Homo sapiens
aacgacgctctgcaggtgctg

SEQ ID NO: 19743 - RNA, 21 nt, RNAi
cgacgcucugcaggugcuguu

SEQ ID NO: 19744 - RNA, 21 nt, RNAi
uugcugcgagacguccacgac

SEQ ID NO: 19745 - DNA, 21 bp, Homo sapiens
aactctcaggcagtgtgtcct

SEQ ID NO: 19746 - RNA, 21 nt, RNAi
cucucaggcaguguguccuuu

SEQ ID NO: 19747 - RNA, 21 nt, RNAi
uugagaguccgucacacagga

SEQ ID NO: 19748 - DNA, 21 bp, Homo sapiens
aatggcctgagtgtgaccggc

SEQ ID NO: 19749 - RNA, 21 nt, RNAi
uggccugagugugaccggcuu

SEQ ID NO: 19750 - RNA, 21 nt, RNAi
uuaccggacucacacuggccg

SEQ ID NO: 19751 - DNA, 21 bp, Homo sapiens
aaccaataccagacactgtac

SEQ ID NO: 19752 - RNA, 21 nt, RNAi
ccaauaccagacacuguacuu

SEQ ID NO: 19753 - RNA, 21 nt, RNAi
uugguuauggucugugacaug

SEQ ID NO: 19754 - DNA, 21 bp, Homo sapiens
aataccagacactgtacaagc

SEQ ID NO: 19755 - RNA, 21 nt, RNAi
uaccagacacuguacaagcuu

SEQ ID NO: 19756 - RNA, 21 nt, RNAi
uuauggucugugacauguucg

SEQ ID NO: 19757 - DNA, 21 bp, Homo sapiens
aagctctacgagaggtgtgag

SEQ ID NO: 19758 - RNA, 21 nt, RNAi
gcucuacgagaggugugaguu

SEQ ID NO: 19759 - RNA, 21 nt, RNAi
uucgagaugcucuccacacuc

SEQ ID NO: 19760 - DNA, 21 bp, Homo sapiens
aaccttgagattgtgctcacg

SEQ ID NO: 19761 - RNA, 21 nt, RNAi
ccuugagauugugcucacguu

SEQ ID NO: 19762 - RNA, 21 nt, RNAi
uuggaacucuaacacgagugc

SEQ ID NO: 19763 - DNA, 21 bp, Homo sapiens
aatgccgacctctccttcctg

SEQ ID NO: 19764 - RNA, 21 nt, RNAi
ugccgaccucuccuuccuguu

SEQ ID NO: 19765 - RNA, 21 nt, RNAi
uuacggcuggagaggaaggac

SEQ ID NO: 19766 - DNA, 21 bp, Homo sapiens
aagtgacaggctatgtcctcg

SEQ ID NO: 19767 - RNA, 21 nt, RNAi
gugacaggcuauguccucguu

SEQ ID NO: 19768 - RNA, 21 nt, RNAi
uucacuguccgauacaggagc

SEQ ID NO: 19769 - DNA, 21 bp, Homo sapiens
aatgaattctctactctacca

SEQ ID NO: 19770 - RNA, 21 nt, RNAi
ugaauucucuacucuaccauu

SEQ ID NO: 19771 - RNA, 21 nt, RNAi
uuacuuaagagaugagauggu

SEQ ID NO: 19772 - DNA, 21 bp, Homo sapiens
aattctctactctaccattgc

SEQ ID NO: 19773 - RNA, 21 nt, RNAi
uucucuacucuaccauugcuu

SEQ ID NO: 19774 - RNA, 21 nt, RNAi
uuaagagaugagaugguaacg

SEQ ID NO: 19775 - DNA, 21 bp, Homo sapiens
aagtttgccatcttcgtcatg

SEQ ID NO: 19776 - RNA, 21 nt, RNAi
guuugccaucuucgucauguu

SEQ ID NO: 19777 - RNA, 21 nt, RNAi
uucaaacgguagaagcaguac

SEQ ID NO: 19778 - DNA, 21 bp, Homo sapiens
aactataacaccaactccagc

SEQ ID NO: 19779 - RNA, 21 nt, RNAi
cuauaacaccaacuccagcuu

SEQ ID NO: 19780 - RNA, 21 nt, RNAi
uugauauugugguugaggucg

SEQ ID NO: 19781 - DNA, 21 bp, Homo sapiens
aacaccaactccagccacgct

SEQ ID NO: 19782 - RNA, 21 nt, RNAi
caccaacuccagccacgcuuu

SEQ ID NO: 19783 - RNA, 21 nt, RNAi
uugugguugaggucggugcga

SEQ ID NO: 19784 - DNA, 21 bp, Homo sapiens
aagaacgataagctttgtcac

SEQ ID NO: 19785 - RNA, 21 nt, RNAi
gaacgauaagcuuugucacuu

SEQ ID NO: 19786 - RNA, 21 nt, RNAi
uucuugcuauucgaaacagug

SEQ ID NO: 19787 - DNA, 21 bp, Homo sapiens
aacgataagctttgtcacatg

SEQ ID NO: 19788 - RNA, 21 nt, RNAi
cgauaagcuuugucacauguu

SEQ ID NO: 19789 - RNA, 21 nt, RNAi
uugcuauucgaaacaguguac

SEQ ID NO: 19790 - DNA, 21 bp, Homo sapiens
aagctttgtcacatggacaca

SEQ ID NO: 19791 - RNA, 21 nt, RNAi
gcuuugucacauggacacauu

SEQ ID NO: 19792 - RNA, 21 nt, RNAi
uucgaaacaguguaccugugu

SEQ ID NO: 19793 - DNA, 21 bp, Homo sapiens
aaggacaatggcagaagctgt

SEQ ID NO: 19794 - RNA, 21 nt, RNAi
ggacaauggcagaagcuguuu

SEQ ID NO: 19795 - RNA, 21 nt, RNAi
uuccuguuaccgucuucgaca

SEQ ID NO: 19796 - DNA, 21 bp, Homo sapiens
aagactgccagacattgacca

SEQ ID NO: 19797 - RNA, 21 nt, RNAi
gacugccagacauugaccauu

SEQ ID NO: 19798 - RNA, 21 nt, RNAi
uucugacggucuguaacuggu

SEQ ID NO: 19799 - DNA, 21 bp, Homo sapiens
aagaccatctgtgctcctcag

SEQ ID NO: 19800 - RNA, 21 nt, RNAi
gaccaucugugcuccucaguu

SEQ ID NO: 19801 - RNA, 21 nt, RNAi
uucugguagacacgaggaguc

SEQ ID NO: 19802 - DNA, 21 bp, Homo sapiens
aaccagtgctgccatgatgag

SEQ ID NO: 19803 - RNA, 21 nt, RNAi
ccagugcugccaugaugaguu

SEQ ID NO: 19804 - RNA, 21 nt, RNAi
uuggucacgacgguacuacuc

SEQ ID NO: 19805 - DNA, 21 bp, Homo sapiens
aatgacagtggagcctgtgta

SEQ ID NO: 19806 - RNA, 21 nt, RNAi
ugacaguggagccuguguauu

SEQ ID NO: 19807 - RNA, 21 nt, RNAi
uuacugucaccucggacacau

SEQ ID NO: 19808 - DNA, 21 bp, Homo sapiens
aacaagctaactttccagctg

SEQ ID NO: 19809 - RNA, 21 nt, RNAi
caagcuaacuuuccagcuguu

SEQ ID NO: 19810 - RNA, 21 nt, RNAi
uuguucgauugaaaggucgac

SEQ ID NO: 19811 - DNA, 21 bp, Homo sapiens
aagctaactttccagctggaa

SEQ ID NO: 19812 - RNA, 21 nt, RNAi
gcuaacuuuccagcuggaauu

SEQ ID NO: 19813 - RNA, 21 nt, RNAi
uucgauugaaaggucgaccuu

SEQ ID NO: 19814 - DNA, 21 bp, Homo sapiens
aagtatcagtatggaggagtt

SEQ ID NO: 19815 - RNA, 21 nt, RNAi
guaucaguauggaggaguuuu

SEQ ID NO: 19816 - RNA, 21 nt, RNAi
uucauagucauaccuccucaa

SEQ ID NO: 19817 - DNA, 21 bp, Homo sapiens
aactttgtggtggatcaaaca

SEQ ID NO: 19818 - RNA, 21 nt, RNAi
cuuugugguggaucaaacauu

SEQ ID NO: 19819 - RNA, 21 nt, RNAi
uugaaacaccaccuaguuugu

SEQ ID NO: 19820 - DNA, 21 bp, Homo sapiens
aacattgatggatttgtgaac

SEQ ID NO: 19821 - RNA, 21 nt, RNAi
cauugauggauuugugaacuu

SEQ ID NO: 19822 - RNA, 21 nt, RNAi
uuguaacuaccuaaacacuug

SEQ ID NO: 19823 - DNA, 21 bp, Homo sapiens
aacctggactttctgatcacc

SEQ ID NO: 19824 - RNA, 21 nt, RNAi
ccuggacuuucugaucaccuu

SEQ ID NO: 19825 - RNA, 21 nt, RNAi
uuggaccugaaagacuagugg

SEQ ID NO: 19826 - DNA, 21 bp, Homo sapiens
aagctcaatgtcttccggaca

SEQ ID NO: 19827 - RNA, 21 nt, RNAi
gcucaaugucuuccggacauu

SEQ ID NO: 19828 - RNA, 21 nt, RNAi
uucgaguuacagaaggccugu

SEQ ID NO: 19829 - DNA, 21 bp, Homo sapiens
aatgtcttccggacagtacgg

SEQ ID NO: 19830 - RNA, 21 nt, RNAi
ugucuuccggacaguacgguu

SEQ ID NO: 19831 - RNA, 21 nt, RNAi
uuacagaaggccugucaugcc

SEQ ID NO: 19832 - DNA, 21 bp, Homo sapiens
aatttgacaaccattggaggc

SEQ ID NO: 19833 - RNA, 21 nt, RNAi
uuugacaaccauuggaggcuu

SEQ ID NO: 19834 - RNA, 21 nt, RNAi
uuaaacuguugguaaccuccg

SEQ ID NO: 19835 - DNA, 21 bp, Homo sapiens
aaccattggaggcagaagcct

SEQ ID NO: 19836 - RNA, 21 nt, RNAi
ccauuggaggcagaagccuuu

SEQ ID NO: 19837 - RNA, 21 nt, RNAi
uugguaaccuccgucuucgga

SEQ ID NO: 19838 - DNA, 21 bp, Homo sapiens
aagaacttgaatgtcacatct

SEQ ID NO: 19839 - RNA, 21 nt, RNAi
gaacuugaaugucacaucuuu

SEQ ID NO: 19840 - RNA, 21 nt, RNAi
uucuugaacuuacaguguaga

SEQ ID NO: 19841 - DNA, 21 bp, Homo sapiens
aacttgaatgtcacatctctg

SEQ ID NO: 19842 - RNA, 21 nt, RNAi
cuugaaugucacaucucuguu

SEQ ID NO: 19843 - RNA, 21 nt, RNAi
uugaacuuacaguguagagac

SEQ ID NO: 19844 - DNA, 21 bp, Homo sapiens
aagtgccaataggcagctctg

SEQ ID NO: 19845 - RNA, 21 nt, RNAi
gugccaauaggcagcucuguu

SEQ ID NO: 19846 - RNA, 21 nt, RNAi
uucacgguuauccgucgagac

SEQ ID NO: 19847 - DNA, 21 bp, Homo sapiens
aataggcagctctgctaccac

SEQ ID NO: 19848 - RNA, 21 nt, RNAi
uaggcagcucugcuaccacuu

SEQ ID NO: 19849 - RNA, 21 nt, RNAi
uuauccgucgagacgauggug

SEQ ID NO: 19850 - DNA, 21 bp, Homo sapiens
aactggaccaaggtgcttcgg

SEQ ID NO: 19851 - RNA, 21 nt, RNAi
cuggaccaaggugcuucgguu

SEQ ID NO: 19852 - RNA, 21 nt, RNAi
uugaccugguuccacgaagcc

SEQ ID NO: 19853 - DNA, 21 bp, Homo sapiens
aagagcgactagacatcaagc

SEQ ID NO: 19854 - RNA, 21 nt, RNAi
gagcgacuagacaucaagcuu

SEQ ID NO: 19855 - RNA, 21 nt, RNAi
uucucgcugaucuguaguucg

SEQ ID NO: 19856 - DNA, 21 bp, Homo sapiens
aaattatagccgaggaggtgt

SEQ ID NO: 19857 - RNA, 21 nt, RNAi
auuauagccgaggagguguuu

SEQ ID NO: 19858 - RNA, 21 nt, RNAi
uuuaauaucggcuccuccaca

SEQ ID NO: 19859 - DNA, 21 bp, Homo sapiens
aattatagccgaggaggtgtc

SEQ ID NO: 19860 - RNA, 21 nt, RNAi
uuauagccgaggaggugucuu

SEQ ID NO: 19861 - RNA, 21 nt, RNAi
uuaauaucggcuccuccacag

SEQ ID NO: 19862 - DNA, 21 bp, Homo sapiens
aaaggaccagagcttcaagac

SEQ ID NO: 19863 - RNA, 21 nt, RNAi
aggaccagagcuucaagacuu

SEQ ID NO: 19864 - RNA, 21 nt, RNAi
uuuccuggucucgaaguucug

SEQ ID NO: 19865 - DNA, 21 bp, Homo sapiens
aaggaccagagcttcaagact

SEQ ID NO: 19866 - RNA, 21 nt, RNAi
ggaccagagcuucaagacuuu

SEQ ID NO: 19867 - RNA, 21 nt, RNAi
uuccuggucucgaaguucuga

SEQ ID NO: 19868 - DNA, 21 bp, Homo sapiens
aagactgtttaggacaaacac

SEQ ID NO: 19869 - RNA, 21 nt, RNAi
gacuguuuaggacaaacacuu

SEQ ID NO: 19870 - RNA, 21 nt, RNAi
uucugacaaauccuguuugug

SEQ ID NO: 19871 - DNA, 21 bp, Homo sapiens
aaacactggtgctgatcggca

SEQ ID NO: 19872 - RNA, 21 nt, RNAi
acacuggugcugaucggcauu

SEQ ID NO: 19873 - RNA, 21 nt, RNAi
uuugugaccacgacuagccgu

SEQ ID NO: 19874 - DNA, 21 bp, Homo sapiens
aacactggtgctgatcggcaa

SEQ ID NO: 19875 - RNA, 21 nt, RNAi
cacuggugcugaucggcaauu

SEQ ID NO: 19876 - RNA, 21 nt, RNAi
uugugaccacgacuagccguu

SEQ ID NO: 19877 - DNA, 21 bp, Homo sapiens
aatggctttgacagtgatagc

SEQ ID NO: 19878 - RNA, 21 nt, RNAi
uggcuuugacagugauagcuu

SEQ ID NO: 19879 - RNA, 21 nt, RNAi
uuaccgaaacugucacuaucg

SEQ ID NO: 19880 - DNA, 21 bp, Homo sapiens
aaggctaacaaagtcttggcc

SEQ ID NO: 19881 - RNA, 21 nt, RNAi
ggcuaacaaagucuuggccuu

SEQ ID NO: 19882 - RNA, 21 nt, RNAi
uuccgauuguuucagaaccgg

SEQ ID NO: 19883 - DNA, 21 bp, Homo sapiens
aacaaagtcttggccagaatc

SEQ ID NO: 19884 - RNA, 21 nt, RNAi
caaagucuuggccagaaucuu

SEQ ID NO: 19885 - RNA, 21 nt, RNAi
uuguuucagaaccggucuuag

SEQ ID NO: 19886 - DNA, 21 bp, Homo sapiens
aaagtcttggccagaatcttc

SEQ ID NO: 19887 - RNA, 21 nt, RNAi
agucuuggccagaaucuucuu

SEQ ID NO: 19888 - RNA, 21 nt, RNAi
uuucagaaccggucuuagaag

SEQ ID NO: 19889 - DNA, 21 bp, Homo sapiens
aagtcttggccagaatcttca

SEQ ID NO: 19890 - RNA, 21 nt, RNAi
gucuuggccagaaucuucauu

SEQ ID NO: 19891 - RNA, 21 nt, RNAi
uucagaaccggucuuagaagu

SEQ ID NO: 19892 - DNA, 21 bp, Homo sapiens
aatcttcaaagagacagagct

SEQ ID NO: 19893 - RNA, 21 nt, RNAi
ucuucaaagagacagagcuuu

SEQ ID NO: 19894 - RNA, 21 nt, RNAi
uuagaaguuucucugucucga

SEQ ID NO: 19895 - DNA, 21 bp, Homo sapiens
aaagagacagagctaaggaag

SEQ ID NO: 19896 - RNA, 21 nt, RNAi
agagacagagcuaaggaaguu

SEQ ID NO: 19897 - RNA, 21 nt, RNAi
uuucucugucucgauuccuuc

SEQ ID NO: 19898 - DNA, 21 bp, Homo sapiens
aagagacagagctaaggaagc

SEQ ID NO: 19899 - RNA, 21 nt, RNAi
gagacagagcuaaggaagcuu

SEQ ID NO: 19900 - RNA, 21 nt, RNAi
uucucugucucgauuccuucg

SEQ ID NO: 19901 - DNA, 21 bp, Homo sapiens
aaggaagcttaaagtgcttgg

SEQ ID NO: 19902 - RNA, 21 nt, RNAi
ggaagcuuaaagugcuugguu

SEQ ID NO: 19903 - RNA, 21 nt, RNAi
uuccuucgaauuucacgaacc

SEQ ID NO: 19904 - DNA, 21 bp, Homo sapiens
aagcttaaagtgcttggctcg

SEQ ID NO: 19905 - RNA, 21 nt, RNAi
gcuuaaagugcuuggcucguu

SEQ ID NO: 19906 - RNA, 21 nt, RNAi
uucgaauuucacgaaccgagc

SEQ ID NO: 19907 - DNA, 21 bp, Homo sapiens
aactgtgcacaaaggagtgtg

SEQ ID NO: 19908 - RNA, 21 nt, RNAi
cugugcacaaaggaguguguu

SEQ ID NO: 19909 - RNA, 21 nt, RNAi
uugacacguguuuccucacac

SEQ ID NO: 19910 - DNA, 21 bp, Homo sapiens
aatcaatcaagattccagtct

SEQ ID NO: 19911 - RNA, 21 nt, RNAi
ucaaucaagauuccagucuuu

SEQ ID NO: 19912 - RNA, 21 nt, RNAi
uuaguuaguucuaaggucaga

SEQ ID NO: 19913 - DNA, 21 bp, Homo sapiens
aatcaagattccagtctgcat

SEQ ID NO: 19914 - RNA, 21 nt, RNAi
ucaagauuccagucugcauuu

SEQ ID NO: 19915 - RNA, 21 nt, RNAi
uuaguucuaaggucagacgua

SEQ ID NO: 19916 - DNA, 21 bp, Homo sapiens
aagattccagtctgcattaaa

SEQ ID NO: 19917 - RNA, 21 nt, RNAi
gauuccagucugcauuaaauu

SEQ ID NO: 19918 - RNA, 21 nt, RNAi
uucuaaggucagacguaauuu

SEQ ID NO: 19919 - DNA, 21 bp, Homo sapiens
aaagtcattgaggacaagagt

SEQ ID NO: 19920 - RNA, 21 nt, RNAi
agucauugaggacaagaguuu

SEQ ID NO: 19921 - RNA, 21 nt, RNAi
uuucaguaacuccuguucuca

SEQ ID NO: 19922 - DNA, 21 bp, Homo sapiens
aagtcattgaggacaagagtg

SEQ ID NO: 19923 - RNA, 21 nt, RNAi
gucauugaggacaagaguguu

SEQ ID NO: 19924 - RNA, 21 nt, RNAi
uucaguaacuccuguucucac

SEQ ID NO: 19925 - DNA, 21 bp, Homo sapiens
aagctgtgacagatcatatgc

SEQ ID NO: 19926 - RNA, 21 nt, RNAi
gcugugacagaucauaugcuu

SEQ ID NO: 19927 - RNA, 21 nt, RNAi
uucgacacugucuaguauacg

SEQ ID NO: 19928 - DNA, 21 bp, Homo sapiens
aatgtactaccttgaggaaca

SEQ ID NO: 19929 - RNA, 21 nt, RNAi
uguacuaccuugaggaacauu

SEQ ID NO: 19930 - RNA, 21 nt, RNAi
uuacaugauggaacuccuugu

SEQ ID NO: 19931 - DNA, 21 bp, Homo sapiens
aacatggtatggtgcatagaa

SEQ ID NO: 19932 - RNA, 21 nt, RNAi
caugguauggugcauagaauu

SEQ ID NO: 19933 - RNA, 21 nt, RNAi
uuguaccauaccacguaucuu

SEQ ID NO: 19934 - DNA, 21 bp, Homo sapiens
aaacgtgctactcaagtcacc

SEQ ID NO: 19935 - RNA, 21 nt, RNAi
acgugcuacucaagucaccuu

SEQ ID NO: 19936 - RNA, 21 nt, RNAi
uuugcacgaugaguucagugg

SEQ ID NO: 19937 - DNA, 21 bp, Homo sapiens
aagcagctgctatacagtgag

SEQ ID NO: 19938 - RNA, 21 nt, RNAi
gcagcugcuauacagugaguu

SEQ ID NO: 19939 - RNA, 21 nt, RNAi
uucgucgacgauaugucacuc

SEQ ID NO: 19940 - DNA, 21 bp, Homo sapiens
aagactccaattaagtggatg

SEQ ID NO: 19941 - RNA, 21 nt, RNAi
gacuccaauuaaguggauguu

SEQ ID NO: 19942 - RNA, 21 nt, RNAi
uucugagguuaauucaccuac

SEQ ID NO: 19943 - DNA, 21 bp, Homo sapiens
aaatacacacaccagagtgat

SEQ ID NO: 19944 - RNA, 21 nt, RNAi
auacacacaccagagugauuu

SEQ ID NO: 19945 - RNA, 21 nt, RNAi
uuuauguguguggucucacua

SEQ ID NO: 19946 - DNA, 21 bp, Homo sapiens
aatacacacaccagagtgatg

SEQ ID NO: 19947 - RNA, 21 nt, RNAi
uacacacaccagagugauguu

SEQ ID NO: 19948 - RNA, 21 nt, RNAi
uuauguguguggucucacuac

SEQ ID NO: 19949 - DNA, 21 bp, Homo sapiens
aagtaccagacctgctagaga

SEQ ID NO: 19950 - RNA, 21 nt, RNAi
guaccagaccugcuagagauu

SEQ ID NO: 19951 - RNA, 21 nt, RNAi
uucauggucuggacgaucucu

SEQ ID NO: 19952 - DNA, 21 bp, Homo sapiens
aattgatgtctacatggtgat

SEQ ID NO: 19953 - RNA, 21 nt, RNAi
uugaugucuacauggugauuu

SEQ ID NO: 19954 - RNA, 21 nt, RNAi
uuaacuacagauguaccacua

SEQ ID NO: 19955 - DNA, 21 bp, Homo sapiens
aagtgttggatgattgatgag

SEQ ID NO: 19956 - RNA, 21 nt, RNAi
guguuggaugauugaugaguu

SEQ ID NO: 19957 - RNA, 21 nt, RNAi
uucacaaccuacuaacuacuc

SEQ ID NO: 19958 - DNA, 21 bp, Homo sapiens
aacctttaaagaactagccaa

SEQ ID NO: 19959 - RNA, 21 nt, RNAi
ccuuuaaagaacuagccaauu

SEQ ID NO: 19960 - RNA, 21 nt, RNAi
uuggaaauuucuugaucgguu

SEQ ID NO: 19961 - DNA, 21 bp, Homo sapiens
aaagaactagccaatgagttc

SEQ ID NO: 19962 - RNA, 21 nt, RNAi
agaacuagccaaugaguucuu

SEQ ID NO: 19963 - RNA, 21 nt, RNAi
uuucuugaucgguuacucaag

SEQ ID NO: 19964 - DNA, 21 bp, Homo sapiens
aagaactagccaatgagttca

SEQ ID NO: 19965 - RNA, 21 nt, RNAi
gaacuagccaaugaguucauu

SEQ ID NO: 19966 - RNA, 21 nt, RNAi
uucuugaucgguuacucaagu

SEQ ID NO: 19967 - DNA, 21 bp, Homo sapiens
aactagccaatgagttcacca

SEQ ID NO: 19968 - RNA, 21 nt, RNAi
cuagccaaugaguucaccauu

SEQ ID NO: 19969 - RNA, 21 nt, RNAi
uugaucgguuacucaaguggu

SEQ ID NO: 19970 - DNA, 21 bp, Homo sapiens
aatgagttcaccaggatggcc

SEQ ID NO: 19971 - RNA, 21 nt, RNAi
ugaguucaccaggauggccuu

SEQ ID NO: 19972 - RNA, 21 nt, RNAi
uuacucaagugguccuaccgg

SEQ ID NO: 19973 - DNA, 21 bp, Homo sapiens
aaacaagaagctagaggaagt

SEQ ID NO: 19974 - RNA, 21 nt, RNAi
acaagaagcuagaggaaguuu

SEQ ID NO: 19975 - RNA, 21 nt, RNAi
uuuguucuucgaucuccuuca

SEQ ID NO: 19976 - DNA, 21 bp, Homo sapiens
aacaagaagctagaggaagta

SEQ ID NO: 19977 - RNA, 21 nt, RNAi
caagaagcuagaggaaguauu

SEQ ID NO: 19978 - RNA, 21 nt, RNAi
uuguucuucgaucuccuucau

SEQ ID NO: 19979 - DNA, 21 bp, Homo sapiens
aagaagctagaggaagtagag

SEQ ID NO: 19980 - RNA, 21 nt, RNAi
gaagcuagaggaaguagaguu

SEQ ID NO: 19981 - RNA, 21 nt, RNAi
uucuucgaucuccuucaucuc

SEQ ID NO: 19982 - DNA, 21 bp, Homo sapiens
aagctagaggaagtagagctg

SEQ ID NO: 19983 - RNA, 21 nt, RNAi
gcuagaggaaguagagcuguu

SEQ ID NO: 19984 - RNA, 21 nt, RNAi
uucgaucuccuucaucucgac

SEQ ID NO: 19985 - DNA, 21 bp, Homo sapiens
aagtagagctggagccagaac

SEQ ID NO: 19986 - RNA, 21 nt, RNAi
guagagcuggagccagaacuu

SEQ ID NO: 19987 - RNA, 21 nt, RNAi
uucaucucgaccucggucuug

SEQ ID NO: 19988 - DNA, 21 bp, Homo sapiens
aactagacctagacctagact

SEQ ID NO: 19989 - RNA, 21 nt, RNAi
cuagaccuagaccuagacuuu

SEQ ID NO: 19990 - RNA, 21 nt, RNAi
uugaucuggaucuggaucuga

SEQ ID NO: 19991 - DNA, 21 bp, Homo sapiens
aagcagaggaggacaacctgg

SEQ ID NO: 19992 - RNA, 21 nt, RNAi
gcagaggaggacaaccugguu

SEQ ID NO: 19993 - RNA, 21 nt, RNAi
uucgucuccuccuguuggacc

SEQ ID NO: 19994 - DNA, 21 bp, Homo sapiens
aacctggcaaccaccacactg

SEQ ID NO: 19995 - RNA, 21 nt, RNAi
ccuggcaaccaccacacuguu

SEQ ID NO: 19996 - RNA, 21 nt, RNAi
uuggaccguugguggugugac

SEQ ID NO: 19997 - DNA, 21 bp, Homo sapiens
aacacttaatcggccacgtgg

SEQ ID NO: 19998 - RNA, 21 nt, RNAi
cacuuaaucggccacgugguu

SEQ ID NO: 19999 - RNA, 21 nt, RNAi
uugugaauuagccggugcacc

SEQ ID NO: 20000 - DNA, 21 bp, Homo sapiens
aagtccatcatctggatacat

SEQ ID NO: 20001 - RNA, 21 nt, RNAi
guccaucaucuggauacauuu

SEQ ID NO: 20002 - RNA, 21 nt, RNAi
uucagguaguagaccuaugua

SEQ ID NO: 20003 - DNA, 21 bp, Homo sapiens
aacaggctctgaggctgagct

SEQ ID NO: 20004 - RNA, 21 nt, RNAi
caggcucugaggcugagcuuu

SEQ ID NO: 20005 - RNA, 21 nt, RNAi
uuguccgagacuccgacucga

SEQ ID NO: 20006 - DNA, 21 bp, Homo sapiens
aaagtgtcaatgtgtagaagc

SEQ ID NO: 20007 - RNA, 21 nt, RNAi
agugucaauguguagaagcuu

SEQ ID NO: 20008 - RNA, 21 nt, RNAi
uuucacaguuacacaucuucg

SEQ ID NO: 20009 - DNA, 21 bp, Homo sapiens
aagtgtcaatgtgtagaagcc

SEQ ID NO: 20010 - RNA, 21 nt, RNAi
gugucaauguguagaagccuu

SEQ ID NO: 20011 - RNA, 21 nt, RNAi
uucacaguuacacaucuucgg

SEQ ID NO: 20012 - DNA, 21 bp, Homo sapiens
aatgtgtagaagccggagcag

SEQ ID NO: 20013 - RNA, 21 nt, RNAi
uguguagaagccggagcaguu

SEQ ID NO: 20014 - RNA, 21 nt, RNAi
uuacacaucuucggccucguc

SEQ ID NO: 20015 - DNA, 21 bp, Homo sapiens
aagaggatgtcaacggttatg

SEQ ID NO: 20016 - RNA, 21 nt, RNAi
gaggaugucaacgguuauguu

SEQ ID NO: 20017 - RNA, 21 nt, RNAi
uucuccuacaguugccaauac

SEQ ID NO: 20018 - DNA, 21 bp, Homo sapiens
aacggttatgtcatgccagat

SEQ ID NO: 20019 - RNA, 21 nt, RNAi
cgguuaugucaugccagauuu

SEQ ID NO: 20020 - RNA, 21 nt, RNAi
uugccaauacaguacggucua

SEQ ID NO: 20021 - DNA, 21 bp, Homo sapiens
aagaagaagatgaagatgagg

SEQ ID NO: 20022 - RNA, 21 nt, RNAi
gaagaagaugaagaugagguu

SEQ ID NO: 20023 - RNA, 21 nt, RNAi
uucuucuucuacuucuacucc

SEQ ID NO: 20024 - DNA, 21 bp, Homo sapiens
aagaagatgaagatgaggagt

SEQ ID NO: 20025 - RNA, 21 nt, RNAi
gaagaugaagaugaggaguuu

SEQ ID NO: 20026 - RNA, 21 nt, RNAi
uucuucuacuucuacuccuca

SEQ ID NO: 20027 - DNA, 21 bp, Homo sapiens
aagatgaagatgaggagtatg

SEQ ID NO: 20028 - RNA, 21 nt, RNAi
gaugaagaugaggaguauguu

SEQ ID NO: 20029 - RNA, 21 nt, RNAi
uucuacuucuacuccucauac

SEQ ID NO: 20030 - DNA, 21 bp, Homo sapiens
aagatgaggagtatgaataca

SEQ ID NO: 20031 - RNA, 21 nt, RNAi
gaugaggaguaugaauacauu

SEQ ID NO: 20032 - RNA, 21 nt, RNAi
uucuacuccucauacuuaugu

SEQ ID NO: 20033 - DNA, 21 bp, Homo sapiens
aatacatgaaccggaggagaa

SEQ ID NO: 20034 - RNA, 21 nt, RNAi
uacaugaaccggaggagaauu

SEQ ID NO: 20035 - RNA, 21 nt, RNAi
uuauguacuuggccuccucuu

SEQ ID NO: 20036 - DNA, 21 bp, Homo sapiens
aaccggaggagaaggcacagt

SEQ ID NO: 20037 - RNA, 21 nt, RNAi
ccggaggagaaggcacaguuu

SEQ ID NO: 20038 - RNA, 21 nt, RNAi
uuggccuccucuuccguguca

SEQ ID NO: 20039 - DNA, 21 bp, Homo sapiens
aaggcacagtccacctcatcc

SEQ ID NO: 20040 - RNA, 21 nt, RNAi
ggcacaguccaccucauccuu

SEQ ID NO: 20041 - RNA, 21 nt, RNAi
uuccgugucagguggaguagg

SEQ ID NO: 20042 - DNA, 21 bp, Homo sapiens
aactccagatgaagactatga

SEQ ID NO: 20043 - RNA, 21 nt, RNAi
cuccagaugaagacuaugauu

SEQ ID NO: 20044 - RNA, 21 nt, RNAi
uugaggucuacuucugauacu

SEQ ID NO: 20045 - DNA, 21 bp, Homo sapiens
aatatatgaatcggcaacgag

SEQ ID NO: 20046 - RNA, 21 nt, RNAi
uauaugaaucggcaacgaguu

SEQ ID NO: 20047 - RNA, 21 nt, RNAi
uuauauacuuagccguugcuc

SEQ ID NO: 20048 - DNA, 21 bp, Homo sapiens
aatcggcaacgagatggaggt

SEQ ID NO: 20049 - RNA, 21 nt, RNAi
ucggcaacgagauggagguuu

SEQ ID NO: 20050 - RNA, 21 nt, RNAi
uuagccguugcucuaccucca

SEQ ID NO: 20051 - DNA, 21 bp, Homo sapiens
aacgagatggaggtggtcctg

SEQ ID NO: 20052 - RNA, 21 nt, RNAi
cgagauggaggugguccuguu

SEQ ID NO: 20053 - RNA, 21 nt, RNAi
uugcucuaccuccaccaggac

SEQ ID NO: 20054 - DNA, 21 bp, Homo sapiens
aaactctacgtagcttagagg

SEQ ID NO: 20055 - RNA, 21 nt, RNAi
acucuacguagcuuagagguu

SEQ ID NO: 20056 - RNA, 21 nt, RNAi
uuugagaugcaucgaaucucc

SEQ ID NO: 20057 - DNA, 21 bp, Homo sapiens
aactctacgtagcttagaggc

SEQ ID NO: 20058 - RNA, 21 nt, RNAi
cucuacguagcuuagaggcuu

SEQ ID NO: 20059 - RNA, 21 nt, RNAi
uugagaugcaucgaaucuccg

SEQ ID NO: 20060 - DNA, 21 bp, Homo sapiens
aatggcagctagtgcctttag

SEQ ID NO: 20061 - RNA, 21 nt, RNAi
uggcagcuagugccuuuaguu

SEQ ID NO: 20062 - RNA, 21 nt, RNAi
uuaccgucgaucacggaaauc

SEQ ID NO: 20063 - DNA, 21 bp, Homo sapiens
aattccattcaatctttggag

SEQ ID NO: 20064 - RNA, 21 nt, RNAi
uuccauucaaucuuuggaguu

SEQ ID NO: 20065 - RNA, 21 nt, RNAi
uuaagguaaguuagaaaccuc

SEQ ID NO: 20066 - DNA, 21 bp, Homo sapiens
aaattcttatggtatgtagcc

SEQ ID NO: 20067 - RNA, 21 nt, RNAi
auucuuaugguauguagccuu

SEQ ID NO: 20068 - RNA, 21 nt, RNAi
uuuaagaauaccauacaucgg

SEQ ID NO: 20069 - DNA, 21 bp, Homo sapiens
aattcttatggtatgtagcca

SEQ ID NO: 20070 - RNA, 21 nt, RNAi
uucuuaugguauguagccauu

SEQ ID NO: 20071 - RNA, 21 nt, RNAi
uuaagaauaccauacaucggu

SEQ ID NO: 20072 - DNA, 21 bp, Homo sapiens
aactaggctcttatgtgtgcc

SEQ ID NO: 20073 - RNA, 21 nt, RNAi
cuaggcucuuaugugugccuu

SEQ ID NO: 20074 - RNA, 21 nt, RNAi
uugauccgagaauacacacgg

SEQ ID NO: 20075 - DNA, 21 bp, Homo sapiens
aaacctagcagaggaaagtgt

SEQ ID NO: 20076 - RNA, 21 nt, RNAi
accuagcagaggaaaguguuu

SEQ ID NO: 20077 - RNA, 21 nt, RNAi
uuuggaucgucuccuuucaca

SEQ ID NO: 20078 - DNA, 21 bp, Homo sapiens
aacctagcagaggaaagtgta

SEQ ID NO: 20079 - RNA, 21 nt, RNAi
ccuagcagaggaaaguguauu

SEQ ID NO: 20080 - RNA, 21 nt, RNAi
uuggaucgucuccuuucacau

SEQ ID NO: 20081 - DNA, 21 bp, Homo sapiens
aaatctgtgaagaaagaggtt

SEQ ID NO: 20082 - RNA, 21 nt, RNAi
aucugugaagaaagagguuuu

SEQ ID NO: 20083 - RNA, 21 nt, RNAi
uuuagacacuucuuucuccaa

SEQ ID NO: 20084 - DNA, 21 bp, Homo sapiens
aatctgtgaagaaagaggtta

SEQ ID NO: 20085 - RNA, 21 nt, RNAi
ucugugaagaaagagguuauu

SEQ ID NO: 20086 - RNA, 21 nt, RNAi
uuagacacuucuuucuccaau

SEQ ID NO: 20087 - DNA, 21 bp, Homo sapiens
aagaaagaggttaggagtaga

SEQ ID NO: 20088 - RNA, 21 nt, RNAi
gaaagagguuaggaguagauu

SEQ ID NO: 20089 - RNA, 21 nt, RNAi
uucuuucuccaauccucaucu

SEQ ID NO: 20090 - DNA, 21 bp, Homo sapiens
aaagaggttaggagtagatat

SEQ ID NO: 20091 - RNA, 21 nt, RNAi
agagguuaggaguagauauuu

SEQ ID NO: 20092 - RNA, 21 nt, RNAi
uuucuccaauccucaucuaua

SEQ ID NO: 20093 - DNA, 21 bp, Homo sapiens
aagaggttaggagtagatatt

SEQ ID NO: 20094 - RNA, 21 nt, RNAi
gagguuaggaguagauauuuu

SEQ ID NO: 20095 - RNA, 21 nt, RNAi
uucuccaauccucaucuauaa

SEQ ID NO: 20096 - DNA, 21 bp, Homo sapiens
aattcagcacttaactatgag

SEQ ID NO: 20097 - RNA, 21 nt, RNAi
uucagcacuuaacuaugaguu

SEQ ID NO: 20098 - RNA, 21 nt, RNAi
uuaagucgugaauugauacuc

SEQ ID NO: 20099 - DNA, 21 bp, Homo sapiens
aactatgagccaggcatcata

SEQ ID NO: 20100 - RNA, 21 nt, RNAi
cuaugagccaggcaucauauu

SEQ ID NO: 20101 - RNA, 21 nt, RNAi
uugauacucgguccguaguau

SEQ ID NO: 20102 - DNA, 21 bp, Homo sapiens
aaacttcacctacattatctc

SEQ ID NO: 20103 - RNA, 21 nt, RNAi
acuucaccuacauuaucucuu

SEQ ID NO: 20104 - RNA, 21 nt, RNAi
uuugaaguggauguaauagag

SEQ ID NO: 20105 - DNA, 21 bp, Homo sapiens
aacttcacctacattatctca

SEQ ID NO: 20106 - RNA, 21 nt, RNAi
cuucaccuacauuaucucauu

SEQ ID NO: 20107 - RNA, 21 nt, RNAi
uugaaguggauguaauagagu

SEQ ID NO: 20108 - DNA, 21 bp, Homo sapiens
aaggattacctgaggcaagga

SEQ ID NO: 20109 - RNA, 21 nt, RNAi
ggauuaccugaggcaaggauu

SEQ ID NO: 20110 - RNA, 21 nt, RNAi
uuccuaauggacuccguuccu

SEQ ID NO: 20111 - DNA, 21 bp, Homo sapiens
aaggagtttgagaccagctta

SEQ ID NO: 20112 - RNA, 21 nt, RNAi
ggaguuugagaccagcuuauu

SEQ ID NO: 20113 - RNA, 21 nt, RNAi
uuccucaaacucuggucgaau

SEQ ID NO: 20114 - DNA, 21 bp, Homo sapiens
caatttgcaacctccgctgcc

SEQ ID NO: 20115 - RNA, 21 nt, RNAi
auuugcaaccuccgcugccuu

SEQ ID NO: 20116 - RNA, 21 nt, RNAi
uuuaaacguuggaggcgacgg

SEQ ID NO: 20117 - DNA, 21 bp, Homo sapiens
cagcagccaccaattcgccag

SEQ ID NO: 20118 - RNA, 21 nt, RNAi
gcagccaccaauucgccaguu

SEQ ID NO: 20119 - RNA, 21 nt, RNAi
uucgucggugguuaagcgguc

SEQ ID NO: 20120 - DNA, 21 bp, Homo sapiens
caccaattcgccagcggttca

SEQ ID NO: 20121 - RNA, 21 nt, RNAi
ccaauucgccagcgguucauu

SEQ ID NO: 20122 - RNA, 21 nt, RNAi
uugguuaagcggucgccaagu

SEQ ID NO: 20123 - DNA, 21 bp, Homo sapiens
caattcgccagcggttcaggt

SEQ ID NO: 20124 - RNA, 21 nt, RNAi
auucgccagcgguucagguuu

SEQ ID NO: 20125 - RNA, 21 nt, RNAi
uuuaagcggucgccaagucca

SEQ ID NO: 20126 - DNA, 21 bp, Homo sapiens
cagcggttcaggtggctcttg

SEQ ID NO: 20127 - RNA, 21 nt, RNAi
gcgguucagguggcucuuguu

SEQ ID NO: 20128 - RNA, 21 nt, RNAi
uucgccaaguccaccgagaac

SEQ ID NO: 20129 - DNA, 21 bp, Homo sapiens
caggtggctcttgcctcgatg

SEQ ID NO: 20130 - RNA, 21 nt, RNAi
gguggcucuugccucgauguu

SEQ ID NO: 20131 - RNA, 21 nt, RNAi
uuccaccgagaacggagcuac

SEQ ID NO: 20132 - DNA, 21 bp, Homo sapiens
caactctcaggcagtgtgtcc

SEQ ID NO: 20133 - RNA, 21 nt, RNAi
acucucaggcaguguguccuu

SEQ ID NO: 20134 - RNA, 21 nt, RNAi
uuugagaguccgucacacagg

SEQ ID NO: 20135 - DNA, 21 bp, Homo sapiens
caataccagacactgtacaag

SEQ ID NO: 20136 - RNA, 21 nt, RNAi
auaccagacacuguacaaguu

SEQ ID NO: 20137 - RNA, 21 nt, RNAi
uuuauggucugugacauguuc

SEQ ID NO: 20138 - DNA, 21 bp, Homo sapiens
cagacactgtacaagctctac

SEQ ID NO: 20139 - RNA, 21 nt, RNAi
gacacuguacaagcucuacuu

SEQ ID NO: 20140 - RNA, 21 nt, RNAi
uucugugacauguucgagaug

SEQ ID NO: 20141 - DNA, 21 bp, Homo sapiens
cactgtacaagctctacgaga

SEQ ID NO: 20142 - RNA, 21 nt, RNAi
cuguacaagcucuacgagauu

SEQ ID NO: 20143 - RNA, 21 nt, RNAi
uugacauguucgagaugcucu

SEQ ID NO: 20144 - DNA, 21 bp, Homo sapiens
caagctctacgagaggtgtga

SEQ ID NO: 20145 - RNA, 21 nt, RNAi
agcucuacgagaggugugauu

SEQ ID NO: 20146 - RNA, 21 nt, RNAi
uuucgagaugcucuccacacu

SEQ ID NO: 20147 - DNA, 21 bp, Homo sapiens
cacaatgccgacctctccttc

SEQ ID NO: 20148 - RNA, 21 nt, RNAi
caaugccgaccucuccuucuu

SEQ ID NO: 20149 - RNA, 21 nt, RNAi
uuguuacggcuggagaggaag

SEQ ID NO: 20150 - DNA, 21 bp, Homo sapiens
caatgccgacctctccttcct

SEQ ID NO: 20151 - RNA, 21 nt, RNAi
augccgaccucuccuuccuuu

SEQ ID NO: 20152 - RNA, 21 nt, RNAi
uuuacggcuggagaggaagga

SEQ ID NO: 20153 - DNA, 21 bp, Homo sapiens
cagtggattcgagaagtgaca

SEQ ID NO: 20154 - RNA, 21 nt, RNAi
guggauucgagaagugacauu

SEQ ID NO: 20155 - RNA, 21 nt, RNAi
uucaccuaagcucuucacugu

SEQ ID NO: 20156 - DNA, 21 bp, Homo sapiens
caggctatgtcctcgtggcca

SEQ ID NO: 20157 - RNA, 21 nt, RNAi
ggcuauguccucguggccauu

SEQ ID NO: 20158 - RNA, 21 nt, RNAi
uuccgauacaggagcaccggu

SEQ ID NO: 20159 - DNA, 21 bp, Homo sapiens
catgaatgaattctctactct

SEQ ID NO: 20160 - RNA, 21 nt, RNAi
ugaaugaauucucuacucuuu

SEQ ID NO: 20161 - RNA, 21 nt, RNAi
uuacuuacuuaagagaugaga

SEQ ID NO: 20162 - DNA, 21 bp, Homo sapiens
catcttcgtcatgttgaacta

SEQ ID NO: 20163 - RNA, 21 nt, RNAi
ucuucgucauguugaacuauu

SEQ ID NO: 20164 - RNA, 21 nt, RNAi
uuagaagcaguacaacuugau

SEQ ID NO: 20165 - DNA, 21 bp, Homo sapiens
catgttgaactataacaccaa

SEQ ID NO: 20166 - RNA, 21 nt, RNAi
uguugaacuauaacaccaauu

SEQ ID NO: 20167 - RNA, 21 nt, RNAi
uuacaacuugauauugugguu

SEQ ID NO: 20168 - DNA, 21 bp, Homo sapiens
caccaactccagccacgctct

SEQ ID NO: 20169 - RNA, 21 nt, RNAi
ccaacuccagccacgcucuuu

SEQ ID NO: 20170 - RNA, 21 nt, RNAi
uugguugaggucggugcgaga

SEQ ID NO: 20171 - DNA, 21 bp, Homo sapiens
cagctccgcttgactcagctc

SEQ ID NO: 20172 - RNA, 21 nt, RNAi
gcuccgcuugacucagcucuu

SEQ ID NO: 20173 - RNA, 21 nt, RNAi
uucgaggcgaacugagucgag

SEQ ID NO: 20174 - DNA, 21 bp, Homo sapiens
cagctcaccgagattctgtca

SEQ ID NO: 20175 - RNA, 21 nt, RNAi
gcucaccgagauucugucauu

SEQ ID NO: 20176 - RNA, 21 nt, RNAi
uucgaguggcucuaagacagu

SEQ ID NO: 20177 - DNA, 21 bp, Homo sapiens
cacatggacacaattgactgg

SEQ ID NO: 20178 - RNA, 21 nt, RNAi
cauggacacaauugacugguu

SEQ ID NO: 20179 - RNA, 21 nt, RNAi
uuguaccuguguuaacugacc

SEQ ID NO: 20180 - DNA, 21 bp, Homo sapiens
catggacacaattgactggag

SEQ ID NO: 20181 - RNA, 21 nt, RNAi
uggacacaauugacuggaguu

SEQ ID NO: 20182 - RNA, 21 nt, RNAi
uuaccuguguuaacugaccuc

SEQ ID NO: 20183 - DNA, 21 bp, Homo sapiens
cagaagactgccagacattga

SEQ ID NO: 20184 - RNA, 21 nt, RNAi
gaagacugccagacauugauu

SEQ ID NO: 20185 - RNA, 21 nt, RNAi
uucuucugacggucuguaacu

SEQ ID NO: 20186 - DNA, 21 bp, Homo sapiens
cagacattgaccaagaccatc

SEQ ID NO: 20187 - RNA, 21 nt, RNAi
gacauugaccaagaccaucuu

SEQ ID NO: 20188 - RNA, 21 nt, RNAi
uucuguaacugguucugguag

SEQ ID NO: 20189 - DNA, 21 bp, Homo sapiens
cattgaccaagaccatctgtg

SEQ ID NO: 20190 - RNA, 21 nt, RNAi
uugaccaagaccaucuguguu

SEQ ID NO: 20191 - RNA, 21 nt, RNAi
uuaacugguucugguagacac

SEQ ID NO: 20192 - DNA, 21 bp, Homo sapiens
caagaccatctgtgctcctca

SEQ ID NO: 20193 - RNA, 21 nt, RNAi
agaccaucugugcuccucauu

SEQ ID NO: 20194 - RNA, 21 nt, RNAi
uuucugguagacacgaggagu

SEQ ID NO: 20195 - DNA, 21 bp, Homo sapiens
catctgtgctcctcagtgtaa

SEQ ID NO: 20196 - RNA, 21 nt, RNAi
ucugugcuccucaguguaauu

SEQ ID NO: 20197 - RNA, 21 nt, RNAi
uuagacacgaggagucacauu

SEQ ID NO: 20198 - DNA, 21 bp, Homo sapiens
cagtgtaatggtcactgcttt

SEQ ID NO: 20199 - RNA, 21 nt, RNAi
guguaauggucacugcuuuuu

SEQ ID NO: 20200 - RNA, 21 nt, RNAi
uucacauuaccagugacgaaa

SEQ ID NO: 20201 - DNA, 21 bp, Homo sapiens
caaccagtgctgccatgatga

SEQ ID NO: 20202 - RNA, 21 nt, RNAi
accagugcugccaugaugauu

SEQ ID NO: 20203 - RNA, 21 nt, RNAi
uuuggucacgacgguacuacu

SEQ ID NO: 20204 - DNA, 21 bp, Homo sapiens
cagtgctgccatgatgagtgt

SEQ ID NO: 20205 - RNA, 21 nt, RNAi
gugcugccaugaugaguguuu

SEQ ID NO: 20206 - RNA, 21 nt, RNAi
uucacgacgguacuacucaca

SEQ ID NO: 20207 - DNA, 21 bp, Homo sapiens
caggacacagactgctttgcc

SEQ ID NO: 20208 - RNA, 21 nt, RNAi
ggacacagacugcuuugccuu

SEQ ID NO: 20209 - RNA, 21 nt, RNAi
uuccugugucugacgaaacgg

SEQ ID NO: 20210 - DNA, 21 bp, Homo sapiens
cacagactgctttgcctgccg

SEQ ID NO: 20211 - RNA, 21 nt, RNAi
cagacugcuuugccugccguu

SEQ ID NO: 20212 - RNA, 21 nt, RNAi
uugucugacgaaacggacggc

SEQ ID NO: 20213 - DNA, 21 bp, Homo sapiens
cacttcaatgacagtggagcc

SEQ ID NO: 20214 - RNA, 21 nt, RNAi
cuucaaugacaguggagccuu

SEQ ID NO: 20215 - RNA, 21 nt, RNAi
uugaaguuacugucaccucgg

SEQ ID NO: 20216 - DNA, 21 bp, Homo sapiens
caatgacagtggagcctgtgt

SEQ ID NO: 20217 - RNA, 21 nt, RNAi
augacaguggagccuguguuu

SEQ ID NO: 20218 - RNA, 21 nt, RNAi
uuuacugucaccucggacaca

SEQ ID NO: 20219 - DNA, 21 bp, Homo sapiens
cagtggagcctgtgtacctcg

SEQ ID NO: 20220 - RNA, 21 nt, RNAi
guggagccuguguaccucguu

SEQ ID NO: 20221 - RNA, 21 nt, RNAi
uucaccucggacacauggagc

SEQ ID NO: 20222 - DNA, 21 bp, Homo sapiens
cacagcctcttgtctacaaca

SEQ ID NO: 20223 - RNA, 21 nt, RNAi
cagccucuugucuacaacauu

SEQ ID NO: 20224 - RNA, 21 nt, RNAi
uugucggagaacagauguugu

SEQ ID NO: 20225 - DNA, 21 bp, Homo sapiens
cagcctcttgtctacaacaag

SEQ ID NO: 20226 - RNA, 21 nt, RNAi
gccucuugucuacaacaaguu

SEQ ID NO: 20227 - RNA, 21 nt, RNAi
uucggagaacagauguuguuc

SEQ ID NO: 20228 - DNA, 21 bp, Homo sapiens
caacaagctaactttccagct

SEQ ID NO: 20229 - RNA, 21 nt, RNAi
acaagcuaacuuuccagcuuu

SEQ ID NO: 20230 - RNA, 21 nt, RNAi
uuuguucgauugaaaggucga

SEQ ID NO: 20231 - DNA, 21 bp, Homo sapiens
caagctaactttccagctgga

SEQ ID NO: 20232 - RNA, 21 nt, RNAi
agcuaacuuuccagcuggauu

SEQ ID NO: 20233 - RNA, 21 nt, RNAi
uuucgauugaaaggucgaccu

SEQ ID NO: 20234 - DNA, 21 bp, Homo sapiens
cacaccaagtatcagtatgga

SEQ ID NO: 20235 - RNA, 21 nt, RNAi
caccaaguaucaguauggauu

SEQ ID NO: 20236 - RNA, 21 nt, RNAi
uugugguucauagucauaccu

SEQ ID NO: 20237 - DNA, 21 bp, Homo sapiens
caccaagtatcagtatggagg

SEQ ID NO: 20238 - RNA, 21 nt, RNAi
ccaaguaucaguauggagguu

SEQ ID NO: 20239 - RNA, 21 nt, RNAi
uugguucauagucauaccucc

SEQ ID NO: 20240 - DNA, 21 bp, Homo sapiens
caagtatcagtatggaggagt

SEQ ID NO: 20241 - RNA, 21 nt, RNAi
aguaucaguauggaggaguuu

SEQ ID NO: 20242 - RNA, 21 nt, RNAi
uuucauagucauaccuccuca

SEQ ID NO: 20243 - DNA, 21 bp, Homo sapiens
cagtatggaggagtttgtgta

SEQ ID NO: 20244 - RNA, 21 nt, RNAi
guauggaggaguuuguguauu

SEQ ID NO: 20245 - RNA, 21 nt, RNAi
uucauaccuccucaaacacau

SEQ ID NO: 20246 - DNA, 21 bp, Homo sapiens
cataactttgtggtggatcaa

SEQ ID NO: 20247 - RNA, 21 nt, RNAi
uaacuuugugguggaucaauu

SEQ ID NO: 20248 - RNA, 21 nt, RNAi
uuauugaaacaccaccuaguu

SEQ ID NO: 20249 - DNA, 21 bp, Homo sapiens
caagatgtgtgagccttgtgg

SEQ ID NO: 20250 - RNA, 21 nt, RNAi
agaugugugagccuugugguu

SEQ ID NO: 20251 - RNA, 21 nt, RNAi
uuucuacacacucggaacacc

SEQ ID NO: 20252 - DNA, 21 bp, Homo sapiens
cagactgtggactcgagcaac

SEQ ID NO: 20253 - RNA, 21 nt, RNAi
gacuguggacucgagcaacuu

SEQ ID NO: 20254 - RNA, 21 nt, RNAi
uucugacaccugagcucguug

SEQ ID NO: 20255 - DNA, 21 bp, Homo sapiens
caacattgatggatttgtgaa

SEQ ID NO: 20256 - RNA, 21 nt, RNAi
acauugauggauuugugaauu

SEQ ID NO: 20257 - RNA, 21 nt, RNAi
uuuguaacuaccuaaacacuu

SEQ ID NO: 20258 - DNA, 21 bp, Homo sapiens
cattgatggatttgtgaactg

SEQ ID NO: 20259 - RNA, 21 nt, RNAi
uugauggauuugugaacuguu

SEQ ID NO: 20260 - RNA, 21 nt, RNAi
uuaacuaccuaaacacuugac

SEQ ID NO: 20261 - DNA, 21 bp, Homo sapiens
caacctggactttctgatcac

SEQ ID NO: 20262 - RNA, 21 nt, RNAi
accuggacuuucugaucacuu

SEQ ID NO: 20263 - RNA, 21 nt, RNAi
uuuggaccugaaagacuagug

SEQ ID NO: 20264 - DNA, 21 bp, Homo sapiens
cagagaagctcaatgtcttcc

SEQ ID NO: 20265 - RNA, 21 nt, RNAi
gagaagcucaaugucuuccuu

SEQ ID NO: 20266 - RNA, 21 nt, RNAi
uucucuucgaguuacagaagg

SEQ ID NO: 20267 - DNA, 21 bp, Homo sapiens
caatgtcttccggacagtacg

SEQ ID NO: 20268 - RNA, 21 nt, RNAi
augucuuccggacaguacguu

SEQ ID NO: 20269 - RNA, 21 nt, RNAi
uuuacagaaggccugucaugc

SEQ ID NO: 20270 - DNA, 21 bp, Homo sapiens
cacaggttacctgaacatcca

SEQ ID NO: 20271 - RNA, 21 nt, RNAi
cagguuaccugaacauccauu

SEQ ID NO: 20272 - RNA, 21 nt, RNAi
uuguccaauggacuuguaggu

SEQ ID NO: 20273 - DNA, 21 bp, Homo sapiens
caggttacctgaacatccagt

SEQ ID NO: 20274 - RNA, 21 nt, RNAi
gguuaccugaacauccaguuu

SEQ ID NO: 20275 - RNA, 21 nt, RNAi
uuccaauggacuuguagguca

SEQ ID NO: 20276 - DNA, 21 bp, Homo sapiens
cacatgcacaacttcagtgtt

SEQ ID NO: 20277 - RNA, 21 nt, RNAi
caugcacaacuucaguguuuu

SEQ ID NO: 20278 - RNA, 21 nt, RNAi
uuguacguguugaagucacaa

SEQ ID NO: 20279 - DNA, 21 bp, Homo sapiens
caatttgacaaccattggagg

SEQ ID NO: 20280 - RNA, 21 nt, RNAi
auuugacaaccauuggagguu

SEQ ID NO: 20281 - RNA, 21 nt, RNAi
uuuaaacuguugguaaccucc

SEQ ID NO: 20282 - DNA, 21 bp, Homo sapiens
caaccattggaggcagaagcc

SEQ ID NO: 20283 - RNA, 21 nt, RNAi
accauuggaggcagaagccuu

SEQ ID NO: 20284 - RNA, 21 nt, RNAi
uuugguaaccuccgucuucgg

SEQ ID NO: 20285 - DNA, 21 bp, Homo sapiens
cattggaggcagaagcctcta

SEQ ID NO: 20286 - RNA, 21 nt, RNAi
uuggaggcagaagccucuauu

SEQ ID NO: 20287 - RNA, 21 nt, RNAi
uuaaccuccgucuucggagau

SEQ ID NO: 20288 - DNA, 21 bp, Homo sapiens
cattgttgatcatgaagaact

SEQ ID NO: 20289 - RNA, 21 nt, RNAi
uuguugaucaugaagaacuuu

SEQ ID NO: 20290 - RNA, 21 nt, RNAi
uuaacaacuaguacuucuuga

SEQ ID NO: 20291 - DNA, 21 bp, Homo sapiens
catgaagaacttgaatgtcac

SEQ ID NO: 20292 - RNA, 21 nt, RNAi
ugaagaacuugaaugucacuu

SEQ ID NO: 20293 - RNA, 21 nt, RNAi
uuacuucuugaacuuacagug

SEQ ID NO: 20294 - DNA, 21 bp, Homo sapiens
caataggcagctctgctacca

SEQ ID NO: 20295 - RNA, 21 nt, RNAi
auaggcagcucugcuaccauu

SEQ ID NO: 20296 - RNA, 21 nt, RNAi
uuuauccgucgagacgauggu

SEQ ID NO: 20297 - DNA, 21 bp, Homo sapiens
cagctctgctaccaccactct

SEQ ID NO: 20298 - RNA, 21 nt, RNAi
gcucugcuaccaccacucuuu

SEQ ID NO: 20299 - RNA, 21 nt, RNAi
uucgagacgaugguggugaga

SEQ ID NO: 20300 - DNA, 21 bp, Homo sapiens
caccactctttgaactggacc

SEQ ID NO: 20301 - RNA, 21 nt, RNAi
ccacucuuugaacuggaccuu

SEQ ID NO: 20302 - RNA, 21 nt, RNAi
uuggugagaaacuugaccugg

SEQ ID NO: 20303 - DNA, 21 bp, Homo sapiens
cactctttgaactggaccaag

SEQ ID NO: 20304 - RNA, 21 nt, RNAi
cucuuugaacuggaccaaguu

SEQ ID NO: 20305 - RNA, 21 nt, RNAi
uugagaaacuugaccugguuc

SEQ ID NO: 20306 - DNA, 21 bp, Homo sapiens
cagtgcttgtcctgtcgaaat

SEQ ID NO: 20307 - RNA, 21 nt, RNAi
gugcuuguccugucgaaauuu

SEQ ID NO: 20308 - RNA, 21 nt, RNAi
uucacgaacaggacagcuuua

SEQ ID NO: 20309 - DNA, 21 bp, Homo sapiens
catgaggccgaatgcttctcc

SEQ ID NO: 20310 - RNA, 21 nt, RNAi
ugaggccgaaugcuucuccuu

SEQ ID NO: 20311 - RNA, 21 nt, RNAi
uuacuccggcuuacgaagagg

SEQ ID NO: 20312 - DNA, 21 bp, Homo sapiens
cactgccacatgcaatggctc

SEQ ID NO: 20313 - RNA, 21 nt, RNAi
cugccacaugcaauggcucuu

SEQ ID NO: 20314 - RNA, 21 nt, RNAi
uugacgguguacguuaccgag

SEQ ID NO: 20315 - DNA, 21 bp, Homo sapiens
catggagtcctaggtgccaag

SEQ ID NO: 20316 - RNA, 21 nt, RNAi
uggaguccuaggugccaaguu

SEQ ID NO: 20317 - RNA, 21 nt, RNAi
uuaccucaggauccacgguuc

SEQ ID NO: 20318 - DNA, 21 bp, Homo sapiens
cagatgttcagaatgaatgtc

SEQ ID NO: 20319 - RNA, 21 nt, RNAi
gauguucagaaugaaugucuu

SEQ ID NO: 20320 - RNA, 21 nt, RNAi
uucuacaagucuuacuuacag

SEQ ID NO: 20321 - DNA, 21 bp, Homo sapiens
cagagcttcaagactgtttag

SEQ ID NO: 20322 - RNA, 21 nt, RNAi
gagcuucaagacuguuuaguu

SEQ ID NO: 20323 - RNA, 21 nt, RNAi
uucucgaaguucugacaaauc

SEQ ID NO: 20324 - DNA, 21 bp, Homo sapiens
caagactgtttaggacaaaca

SEQ ID NO: 20325 - RNA, 21 nt, RNAi
agacuguuuaggacaaacauu

SEQ ID NO: 20326 - RNA, 21 nt, RNAi
uuucugacaaauccuguuugu

SEQ ID NO: 20327 - DNA, 21 bp, Homo sapiens
caaacactggtgctgatcggc

SEQ ID NO: 20328 - RNA, 21 nt, RNAi
aacacuggugcugaucggcuu

SEQ ID NO: 20329 - RNA, 21 nt, RNAi
uuuugugaccacgacuagccg

SEQ ID NO: 20330 - DNA, 21 bp, Homo sapiens
catctgacaatggctttgaca

SEQ ID NO: 20331 - RNA, 21 nt, RNAi
ucugacaauggcuuugacauu

SEQ ID NO: 20332 - RNA, 21 nt, RNAi
uuagacuguuaccgaaacugu

SEQ ID NO: 20333 - DNA, 21 bp, Homo sapiens
caatggctttgacagtgatag

SEQ ID NO: 20334 - RNA, 21 nt, RNAi
auggcuuugacagugauaguu

SEQ ID NO: 20335 - RNA, 21 nt, RNAi
uuuaccgaaacugucacuauc

SEQ ID NO: 20336 - DNA, 21 bp, Homo sapiens
cagtgatagcaggattggtag

SEQ ID NO: 20337 - RNA, 21 nt, RNAi
gugauagcaggauugguaguu

SEQ ID NO: 20338 - RNA, 21 nt, RNAi
uucacuaucguccuaaccauc

SEQ ID NO: 20339 - DNA, 21 bp, Homo sapiens
cagtgagaaggctaacaaagt

SEQ ID NO: 20340 - RNA, 21 nt, RNAi
gugagaaggcuaacaaaguuu

SEQ ID NO: 20341 - RNA, 21 nt, RNAi
uucacucuuccgauuguuuca

SEQ ID NO: 20342 - DNA, 21 bp, Homo sapiens
caaagtcttggccagaatctt

SEQ ID NO: 20343 - RNA, 21 nt, RNAi
aagucuuggccagaaucuuuu

SEQ ID NO: 20344 - RNA, 21 nt, RNAi
uuuucagaaccggucuuagaa

SEQ ID NO: 20345 - DNA, 21 bp, Homo sapiens
cagaatcttcaaagagacaga

SEQ ID NO: 20346 - RNA, 21 nt, RNAi
gaaucuucaaagagacagauu

SEQ ID NO: 20347 - RNA, 21 nt, RNAi
uucuuagaaguuucucugucu

SEQ ID NO: 20348 - DNA, 21 bp, Homo sapiens
caaagagacagagctaaggaa

SEQ ID NO: 20349 - RNA, 21 nt, RNAi
aagagacagagcuaaggaauu

SEQ ID NO: 20350 - RNA, 21 nt, RNAi
uuuucucugucucgauuccuu

SEQ ID NO: 20351 - DNA, 21 bp, Homo sapiens
cagagctaaggaagcttaaag

SEQ ID NO: 20352 - RNA, 21 nt, RNAi
gagcuaaggaagcuuaaaguu

SEQ ID NO: 20353 - RNA, 21 nt, RNAi
uucucgauuccuucgaauuuc

SEQ ID NO: 20354 - DNA, 21 bp, Homo sapiens
caatcaagattccagtctgca

SEQ ID NO: 20355 - RNA, 21 nt, RNAi
aucaagauuccagucugcauu

SEQ ID NO: 20356 - RNA, 21 nt, RNAi
uuuaguucuaaggucagacgu

SEQ ID NO: 20357 - DNA, 21 bp, Homo sapiens
caagattccagtctgcattaa

SEQ ID NO: 20358 - RNA, 21 nt, RNAi
agauuccagucugcauuaauu

SEQ ID NO: 20359 - RNA, 21 nt, RNAi
uuucuaaggucagacguaauu

SEQ ID NO: 20360 - DNA, 21 bp, Homo sapiens
cagtctgcattaaagtcattg

SEQ ID NO: 20361 - RNA, 21 nt, RNAi
gucugcauuaaagucauuguu

SEQ ID NO: 20362 - RNA, 21 nt, RNAi
uucagacguaauuucaguaac

SEQ ID NO: 20363 - DNA, 21 bp, Homo sapiens
cattaaagtcattgaggacaa

SEQ ID NO: 20364 - RNA, 21 nt, RNAi
uuaaagucauugaggacaauu

SEQ ID NO: 20365 - RNA, 21 nt, RNAi
uuaauuucaguaacuccuguu

SEQ ID NO: 20366 - DNA, 21 bp, Homo sapiens
cattgaggacaagagtggacg

SEQ ID NO: 20367 - RNA, 21 nt, RNAi
uugaggacaagaguggacguu

SEQ ID NO: 20368 - RNA, 21 nt, RNAi
uuaacuccuguucucaccugc

SEQ ID NO: 20369 - DNA, 21 bp, Homo sapiens
caagagtggacggcagagttt

SEQ ID NO: 20370 - RNA, 21 nt, RNAi
agaguggacggcagaguuuuu

SEQ ID NO: 20371 - RNA, 21 nt, RNAi
uuucucaccugccgucucaaa

SEQ ID NO: 20372 - DNA, 21 bp, Homo sapiens
caagctgtgacagatcatatg

SEQ ID NO: 20373 - RNA, 21 nt, RNAi
agcugugacagaucauauguu

SEQ ID NO: 20374 - RNA, 21 nt, RNAi
uuucgacacugucuaguauac

SEQ ID NO: 20375 - DNA, 21 bp, Homo sapiens
cagatcatatgctggccattg

SEQ ID NO: 20376 - RNA, 21 nt, RNAi
gaucauaugcuggccauuguu

SEQ ID NO: 20377 - RNA, 21 nt, RNAi
uucuaguauacgaccgguaac

SEQ ID NO: 20378 - DNA, 21 bp, Homo sapiens
catatgctggccattggcagc

SEQ ID NO: 20379 - RNA, 21 nt, RNAi
uaugcuggccauuggcagcuu

SEQ ID NO: 20380 - RNA, 21 nt, RNAi
uuauacgaccgguaaccgucg

SEQ ID NO: 20381 - DNA, 21 bp, Homo sapiens
cattggcagcctggaccatgc

SEQ ID NO: 20382 - RNA, 21 nt, RNAi
uuggcagccuggaccaugcuu

SEQ ID NO: 20383 - RNA, 21 nt, RNAi
uuaaccgucggaccugguacg

SEQ ID NO: 20384 - DNA, 21 bp, Homo sapiens
catctctgcagcttgtcactc

SEQ ID NO: 20385 - RNA, 21 nt, RNAi
ucucugcagcuugucacucuu

SEQ ID NO: 20386 - RNA, 21 nt, RNAi
uuagagacgucgaacagugag

SEQ ID NO: 20387 - DNA, 21 bp, Homo sapiens
cagcttgtcactcaatatttg

SEQ ID NO: 20388 - RNA, 21 nt, RNAi
gcuugucacucaauauuuguu

SEQ ID NO: 20389 - RNA, 21 nt, RNAi
uucgaacagugaguuauaaac

SEQ ID NO: 20390 - DNA, 21 bp, Homo sapiens
catggtatggtgcatagaaac

SEQ ID NO: 20391 - RNA, 21 nt, RNAi
ugguauggugcauagaaacuu

SEQ ID NO: 20392 - RNA, 21 nt, RNAi
uuaccauaccacguaucuuug

SEQ ID NO: 20393 - DNA, 21 bp, Homo sapiens
cagtcaggttcaggtggcaga

SEQ ID NO: 20394 - RNA, 21 nt, RNAi
gucagguucagguggcagauu

SEQ ID NO: 20395 - RNA, 21 nt, RNAi
uucaguccaaguccaccgucu

SEQ ID NO: 20396 - DNA, 21 bp, Homo sapiens
cagctgctatacagtgaggcc

SEQ ID NO: 20397 - RNA, 21 nt, RNAi
gcugcuauacagugaggccuu

SEQ ID NO: 20398 - RNA, 21 nt, RNAi
uucgacgauaugucacuccgg

SEQ ID NO: 20399 - DNA, 21 bp, Homo sapiens
cagtgaggccaagactccaat

SEQ ID NO: 20400 - RNA, 21 nt, RNAi
gugaggccaagacuccaauuu

SEQ ID NO: 20401 - RNA, 21 nt, RNAi
uucacuccgguucugagguua

SEQ ID NO: 20402 - DNA, 21 bp, Homo sapiens
caagactccaattaagtggat

SEQ ID NO: 20403 - RNA, 21 nt, RNAi
agacuccaauuaaguggauuu

SEQ ID NO: 20404 - RNA, 21 nt, RNAi
uuucugagguuaauucaccua

SEQ ID NO: 20405 - DNA, 21 bp, Homo sapiens
cacacaccagagtgatgtctg

SEQ ID NO: 20406 - RNA, 21 nt, RNAi
cacaccagagugaugucuguu

SEQ ID NO: 20407 - RNA, 21 nt, RNAi
uuguguggucucacuacagac

SEQ ID NO: 20408 - DNA, 21 bp, Homo sapiens
cacaccagagtgatgtctgga

SEQ ID NO: 20409 - RNA, 21 nt, RNAi
caccagagugaugucuggauu

SEQ ID NO: 20410 - RNA, 21 nt, RNAi
uuguggucucacuacagaccu

SEQ ID NO: 20411 - DNA, 21 bp, Homo sapiens
caccagagtgatgtctggagc

SEQ ID NO: 20412 - RNA, 21 nt, RNAi
ccagagugaugucuggagcuu

SEQ ID NO: 20413 - RNA, 21 nt, RNAi
uuggucucacuacagaccucg

SEQ ID NO: 20414 - DNA, 21 bp, Homo sapiens
cagagtgatgtctggagctat

SEQ ID NO: 20415 - RNA, 21 nt, RNAi
gagugaugucuggagcuauuu

SEQ ID NO: 20416 - RNA, 21 nt, RNAi
uucucacuacagaccucgaua

SEQ ID NO: 20417 - DNA, 21 bp, Homo sapiens
cagatctgcacaattgatgtc

SEQ ID NO: 20418 - RNA, 21 nt, RNAi
gaucugcacaauugaugucuu

SEQ ID NO: 20419 - RNA, 21 nt, RNAi
uucuagacguguuaacuacag

SEQ ID NO: 20420 - DNA, 21 bp, Homo sapiens
cacaattgatgtctacatggt

SEQ ID NO: 20421 - RNA, 21 nt, RNAi
caauugaugucuacaugguuu

SEQ ID NO: 20422 - RNA, 21 nt, RNAi
uuguuaacuacagauguacca

SEQ ID NO: 20423 - DNA, 21 bp, Homo sapiens
caattgatgtctacatggtga

SEQ ID NO: 20424 - RNA, 21 nt, RNAi
auugaugucuacauggugauu

SEQ ID NO: 20425 - RNA, 21 nt, RNAi
uuuaacuacagauguaccacu

SEQ ID NO: 20426 - DNA, 21 bp, Homo sapiens
catggtgatggtcaagtgttg

SEQ ID NO: 20427 - RNA, 21 nt, RNAi
uggugauggucaaguguuguu

SEQ ID NO: 20428 - RNA, 21 nt, RNAi
uuaccacuaccaguucacaac

SEQ ID NO: 20429 - DNA, 21 bp, Homo sapiens
caagtgttggatgattgatga

SEQ ID NO: 20430 - RNA, 21 nt, RNAi
aguguuggaugauugaugauu

SEQ ID NO: 20431 - RNA, 21 nt, RNAi
uuucacaaccuacuaacuacu

SEQ ID NO: 20432 - DNA, 21 bp, Homo sapiens
caacctttaaagaactagcca

SEQ ID NO: 20433 - RNA, 21 nt, RNAi
accuuuaaagaacuagccauu

SEQ ID NO: 20434 - RNA, 21 nt, RNAi
uuuggaaauuucuugaucggu

SEQ ID NO: 20435 - DNA, 21 bp, Homo sapiens
caatgagttcaccaggatggc

SEQ ID NO: 20436 - RNA, 21 nt, RNAi
augaguucaccaggauggcuu

SEQ ID NO: 20437 - RNA, 21 nt, RNAi
uuuacucaagugguccuaccg

SEQ ID NO: 20438 - DNA, 21 bp, Homo sapiens
caccacggtatctggtcataa

SEQ ID NO: 20439 - RNA, 21 nt, RNAi
ccacgguaucuggucauaauu

SEQ ID NO: 20440 - RNA, 21 nt, RNAi
uuggugccauagaccaguauu

SEQ ID NO: 20441 - DNA, 21 bp, Homo sapiens
cacggtatctggtcataaaga

SEQ ID NO: 20442 - RNA, 21 nt, RNAi
cgguaucuggucauaaagauu

SEQ ID NO: 20443 - RNA, 21 nt, RNAi
uugccauagaccaguauuucu

SEQ ID NO: 20444 - DNA, 21 bp, Homo sapiens
catggtctgacaaacaagaag

SEQ ID NO: 20445 - RNA, 21 nt, RNAi
uggucugacaaacaagaaguu

SEQ ID NO: 20446 - RNA, 21 nt, RNAi
uuaccagacuguuuguucuuc

SEQ ID NO: 20447 - DNA, 21 bp, Homo sapiens
caaacaagaagctagaggaag

SEQ ID NO: 20448 - RNA, 21 nt, RNAi
aacaagaagcuagaggaaguu

SEQ ID NO: 20449 - RNA, 21 nt, RNAi
uuuuguucuucgaucuccuuc

SEQ ID NO: 20450 - DNA, 21 bp, Homo sapiens
caagaagctagaggaagtaga

SEQ ID NO: 20451 - RNA, 21 nt, RNAi
agaagcuagaggaaguagauu

SEQ ID NO: 20452 - RNA, 21 nt, RNAi
uuucuucgaucuccuucaucu

SEQ ID NO: 20453 - DNA, 21 bp, Homo sapiens
cagaactagacctagacctag

SEQ ID NO: 20454 - RNA, 21 nt, RNAi
gaacuagaccuagaccuaguu

SEQ ID NO: 20455 - RNA, 21 nt, RNAi
uucuugaucuggaucuggauc

SEQ ID NO: 20456 - DNA, 21 bp, Homo sapiens
cagaggaggacaacctggcaa

SEQ ID NO: 20457 - RNA, 21 nt, RNAi
gaggaggacaaccuggcaauu

SEQ ID NO: 20458 - RNA, 21 nt, RNAi
uucuccuccuguuggaccguu

SEQ ID NO: 20459 - DNA, 21 bp, Homo sapiens
caacctggcaaccaccacact

SEQ ID NO: 20460 - RNA, 21 nt, RNAi
accuggcaaccaccacacuuu

SEQ ID NO: 20461 - RNA, 21 nt, RNAi
uuuggaccguuggugguguga

SEQ ID NO: 20462 - DNA, 21 bp, Homo sapiens
cagcctaccagttggaacact

SEQ ID NO: 20463 - RNA, 21 nt, RNAi
gccuaccaguuggaacacuuu

SEQ ID NO: 20464 - RNA, 21 nt, RNAi
uucggauggucaaccuuguga

SEQ ID NO: 20465 - DNA, 21 bp, Homo sapiens
cagttggaacacttaatcggc

SEQ ID NO: 20466 - RNA, 21 nt, RNAi
guuggaacacuuaaucggcuu

SEQ ID NO: 20467 - RNA, 21 nt, RNAi
uucaaccuugugaauuagccg

SEQ ID NO: 20468 - DNA, 21 bp, Homo sapiens
catgtaacaggctctgaggct

SEQ ID NO: 20469 - RNA, 21 nt, RNAi
uguaacaggcucugaggcuuu

SEQ ID NO: 20470 - RNA, 21 nt, RNAi
uuacauuguccgagacuccga

SEQ ID NO: 20471 - DNA, 21 bp, Homo sapiens
caggagaaagtgtcaatgtgt

SEQ ID NO: 20472 - RNA, 21 nt, RNAi
ggagaaagugucaauguguuu

SEQ ID NO: 20473 - RNA, 21 nt, RNAi
uuccucuuucacaguuacaca

SEQ ID NO: 20474 - DNA, 21 bp, Homo sapiens
caatgtgtagaagccggagca

SEQ ID NO: 20475 - RNA, 21 nt, RNAi
auguguagaagccggagcauu

SEQ ID NO: 20476 - RNA, 21 nt, RNAi
uuuacacaucuucggccucgu

SEQ ID NO: 20477 - DNA, 21 bp, Homo sapiens
cagcgccacagtctgctgact

SEQ ID NO: 20478 - RNA, 21 nt, RNAi
gcgccacagucugcugacuuu

SEQ ID NO: 20479 - RNA, 21 nt, RNAi
uucgcggugucagacgacuga

SEQ ID NO: 20480 - DNA, 21 bp, Homo sapiens
cacagtctgctgactcctgtt

SEQ ID NO: 20481 - RNA, 21 nt, RNAi
cagucugcugacuccuguuuu

SEQ ID NO: 20482 - RNA, 21 nt, RNAi
uugucagacgacugaggacaa

SEQ ID NO: 20483 - DNA, 21 bp, Homo sapiens
cagtctgctgactcctgttac

SEQ ID NO: 20484 - RNA, 21 nt, RNAi
gucugcugacuccuguuacuu

SEQ ID NO: 20485 - RNA, 21 nt, RNAi
uucagacgacugaggacaaug

SEQ ID NO: 20486 - DNA, 21 bp, Homo sapiens
caacggttatgtcatgccaga

SEQ ID NO: 20487 - RNA, 21 nt, RNAi
acgguuaugucaugccagauu

SEQ ID NO: 20488 - RNA, 21 nt, RNAi
uuugccaauacaguacggucu

SEQ ID NO: 20489 - DNA, 21 bp, Homo sapiens
catgccagatacacacctcaa

SEQ ID NO: 20490 - RNA, 21 nt, RNAi
ugccagauacacaccucaauu

SEQ ID NO: 20491 - RNA, 21 nt, RNAi
uuacggucuauguguggaguu

SEQ ID NO: 20492 - DNA, 21 bp, Homo sapiens
cagatacacacctcaaaggta

SEQ ID NO: 20493 - RNA, 21 nt, RNAi
gauacacaccucaaagguauu

SEQ ID NO: 20494 - RNA, 21 nt, RNAi
uucuauguguggaguuuccau

SEQ ID NO: 20495 - DNA, 21 bp, Homo sapiens
catgaaccggaggagaaggca

SEQ ID NO: 20496 - RNA, 21 nt, RNAi
ugaaccggaggagaaggcauu

SEQ ID NO: 20497 - RNA, 21 nt, RNAi
uuacuuggccuccucuuccgu

SEQ ID NO: 20498 - DNA, 21 bp, Homo sapiens
cagacctcagtgcctctctgg

SEQ ID NO: 20499 - RNA, 21 nt, RNAi
gaccucagugccucucugguu

SEQ ID NO: 20500 - RNA, 21 nt, RNAi
uucuggagucacggagagacc

SEQ ID NO: 20501 - DNA, 21 bp, Homo sapiens
cactgcaggcacaactccaga

SEQ ID NO: 20502 - RNA, 21 nt, RNAi
cugcaggcacaacuccagauu

SEQ ID NO: 20503 - RNA, 21 nt, RNAi
uugacguccguguugaggucu

SEQ ID NO: 20504 - DNA, 21 bp, Homo sapiens
caggcacaactccagatgaag

SEQ ID NO: 20505 - RNA, 21 nt, RNAi
ggcacaacuccagaugaaguu

SEQ ID NO: 20506 - RNA, 21 nt, RNAi
uuccguguugaggucuacuuc

SEQ ID NO: 20507 - DNA, 21 bp, Homo sapiens
cacaactccagatgaagacta

SEQ ID NO: 20508 - RNA, 21 nt, RNAi
caacuccagaugaagacuauu

SEQ ID NO: 20509 - RNA, 21 nt, RNAi
uuguugaggucuacuucugau

SEQ ID NO: 20510 - DNA, 21 bp, Homo sapiens
caactccagatgaagactatg

SEQ ID NO: 20511 - RNA, 21 nt, RNAi
acuccagaugaagacuauguu

SEQ ID NO: 20512 - RNA, 21 nt, RNAi
uuugaggucuacuucugauac

SEQ ID NO: 20513 - DNA, 21 bp, Homo sapiens
caacgagatggaggtggtcct

SEQ ID NO: 20514 - RNA, 21 nt, RNAi
acgagauggaggugguccuuu

SEQ ID NO: 20515 - RNA, 21 nt, RNAi
uuugcucuaccuccaccagga

SEQ ID NO: 20516 - DNA, 21 bp, Homo sapiens
cagactctgcctttgataacc

SEQ ID NO: 20517 - RNA, 21 nt, RNAi
gacucugccuuugauaaccuu

SEQ ID NO: 20518 - RNA, 21 nt, RNAi
uucugagacggaaacuauugg

SEQ ID NO: 20519 - DNA, 21 bp, Homo sapiens
cagagaacgtaactcctgctc

SEQ ID NO: 20520 - RNA, 21 nt, RNAi
gagaacguaacuccugcucuu

SEQ ID NO: 20521 - RNA, 21 nt, RNAi
uucucuugcauugaggacgag

SEQ ID NO: 20522 - DNA, 21 bp, Homo sapiens
catttaatggcagctagtgcc

SEQ ID NO: 20523 - RNA, 21 nt, RNAi
uuuaauggcagcuagugccuu

SEQ ID NO: 20524 - RNA, 21 nt, RNAi
uuaaauuaccgucgaucacgg

SEQ ID NO: 20525 - DNA, 21 bp, Homo sapiens
cagacaattccattcaatctt

SEQ ID NO: 20526 - RNA, 21 nt, RNAi
gacaauuccauucaaucuuuu

SEQ ID NO: 20527 - RNA, 21 nt, RNAi
uucuguuaagguaaguuagaa

SEQ ID NO: 20528 - DNA, 21 bp, Homo sapiens
caattccattcaatctttgga

SEQ ID NO: 20529 - RNA, 21 nt, RNAi
auuccauucaaucuuuggauu

SEQ ID NO: 20530 - RNA, 21 nt, RNAi
uuuaagguaaguuagaaaccu

SEQ ID NO: 20531 - DNA, 21 bp, Homo sapiens
cattcaatctttggaggcttt

SEQ ID NO: 20532 - RNA, 21 nt, RNAi
uucaaucuuuggaggcuuuuu

SEQ ID NO: 20533 - RNA, 21 nt, RNAi
uuaaguuagaaaccuccgaaa

SEQ ID NO: 20534 - DNA, 21 bp, Homo sapiens
cagctgtgcactttcttctct

SEQ ID NO: 20535 - RNA, 21 nt, RNAi
gcugugcacuuucuucucuuu

SEQ ID NO: 20536 - RNA, 21 nt, RNAi
uucgacacgugaaagaagaga

SEQ ID NO: 20537 - DNA, 21 bp, Homo sapiens
cattcctcagcttcttcacag

SEQ ID NO: 20538 - RNA, 21 nt, RNAi
uuccucagcuucuucacaguu

SEQ ID NO: 20539 - RNA, 21 nt, RNAi
uuaaggagucgaagaaguguc

SEQ ID NO: 20540 - DNA, 21 bp, Homo sapiens
cagcttcttcacaggcactcc

SEQ ID NO: 20541 - RNA, 21 nt, RNAi
gcuucuucacaggcacuccuu

SEQ ID NO: 20542 - RNA, 21 nt, RNAi
uucgaagaaguguccgugagg

SEQ ID NO: 20543 - DNA, 21 bp, Homo sapiens
cacaggcactcctggagatat

SEQ ID NO: 20544 - RNA, 21 nt, RNAi
caggcacuccuggagauauuu

SEQ ID NO: 20545 - RNA, 21 nt, RNAi
uuguccgugaggaccucuaua

SEQ ID NO: 20546 - DNA, 21 bp, Homo sapiens
caggcactcctggagatatga

SEQ ID NO: 20547 - RNA, 21 nt, RNAi
ggcacuccuggagauaugauu

SEQ ID NO: 20548 - RNA, 21 nt, RNAi
uuccgugaggaccucuauacu

SEQ ID NO: 20549 - DNA, 21 bp, Homo sapiens
cactcctggagatatgaagga

SEQ ID NO: 20550 - RNA, 21 nt, RNAi
cuccuggagauaugaaggauu

SEQ ID NO: 20551 - RNA, 21 nt, RNAi
uugaggaccucuauacuuccu

SEQ ID NO: 20552 - DNA, 21 bp, Homo sapiens
caggctcttgactacttggaa

SEQ ID NO: 20553 - RNA, 21 nt, RNAi
ggcucuugacuacuuggaauu

SEQ ID NO: 20554 - RNA, 21 nt, RNAi
uuccgagaacugaugaaccuu

SEQ ID NO: 20555 - DNA, 21 bp, Homo sapiens
catcagactgtcaagaagagg

SEQ ID NO: 20556 - RNA, 21 nt, RNAi
ucagacugucaagaagagguu

SEQ ID NO: 20557 - RNA, 21 nt, RNAi
uuagucugacaguucuucucc

SEQ ID NO: 20558 - DNA, 21 bp, Homo sapiens
cagactgtcaagaagaggaaa

SEQ ID NO: 20559 - RNA, 21 nt, RNAi
gacugucaagaagaggaaauu

SEQ ID NO: 20560 - RNA, 21 nt, RNAi
uucugacaguucuucuccuuu

SEQ ID NO: 20561 - DNA, 21 bp, Homo sapiens
cagcacttaactatgagccag

SEQ ID NO: 20562 - RNA, 21 nt, RNAi
gcacuuaacuaugagccaguu

SEQ ID NO: 20563 - RNA, 21 nt, RNAi
uucgugaauugauacucgguc

SEQ ID NO: 20564 - DNA, 21 bp, Homo sapiens
cacttaactatgagccaggca

SEQ ID NO: 20565 - RNA, 21 nt, RNAi
cuuaacuaugagccaggcauu

SEQ ID NO: 20566 - RNA, 21 nt, RNAi
uugaauugauacucgguccgu

SEQ ID NO: 20567 - DNA, 21 bp, Homo sapiens
caggcatcatactaaacttca

SEQ ID NO: 20568 - RNA, 21 nt, RNAi
ggcaucauacuaaacuucauu

SEQ ID NO: 20569 - RNA, 21 nt, RNAi
uuccguaguaugauuugaagu

SEQ ID NO: 20570 - DNA, 21 bp, Homo sapiens
catcatactaaacttcaccta

SEQ ID NO: 20571 - RNA, 21 nt, RNAi
ucauacuaaacuucaccuauu

SEQ ID NO: 20572 - RNA, 21 nt, RNAi
uuaguaugauuugaaguggau

SEQ ID NO: 20573 - DNA, 21 bp, Homo sapiens
catactaaacttcacctacat

SEQ ID NO: 20574 - RNA, 21 nt, RNAi
uacuaaacuucaccuacauuu

SEQ ID NO: 20575 - RNA, 21 nt, RNAi
uuaugauuugaaguggaugua

SEQ ID NO: 20576 - DNA, 21 bp, Homo sapiens
cacctacattatctcacttag

SEQ ID NO: 20577 - RNA, 21 nt, RNAi
ccuacauuaucucacuuaguu

SEQ ID NO: 20578 - RNA, 21 nt, RNAi
uuggauguaauagagugaauc

SEQ ID NO: 20579 - DNA, 21 bp, Homo sapiens
cattatctcacttagtccttt

SEQ ID NO: 20580 - RNA, 21 nt, RNAi
uuaucucacuuaguccuuuuu

SEQ ID NO: 20581 - RNA, 21 nt, RNAi
uuaauagagugaaucaggaaa

SEQ ID NO: 20582 - DNA, 21 bp, Homo sapiens
cacttagtcctttatcatcct

SEQ ID NO: 20583 - RNA, 21 nt, RNAi
cuuaguccuuuaucauccuuu

SEQ ID NO: 20584 - RNA, 21 nt, RNAi
uugaaucaggaaauaguagga

SEQ ID NO: 20585 - DNA, 21 bp, Homo sapiens
catggtggctcatgcctgtaa

SEQ ID NO: 20586 - RNA, 21 nt, RNAi
ugguggcucaugccuguaauu

SEQ ID NO: 20587 - RNA, 21 nt, RNAi
uuaccaccgaguacggacauu

SEQ ID NO: 20588 - DNA, 21 bp, Homo sapiens
catgcctgtaatctcagcact

SEQ ID NO: 20589 - RNA, 21 nt, RNAi
ugccuguaaucucagcacuuu

SEQ ID NO: 20590 - RNA, 21 nt, RNAi
uuacggacauuagagucguga

SEQ ID NO: 20591 - DNA, 21 bp, Homo sapiens
cagaaggattacctgaggcaa

SEQ ID NO: 20592 - RNA, 21 nt, RNAi
gaaggauuaccugaggcaauu

SEQ ID NO: 20593 - RNA, 21 nt, RNAi
uucuuccuaauggacuccguu

SEQ ID NO: 20594 - DNA, 21 bp, Homo sapiens
caaggagtttgagaccagctt

SEQ ID NO: 20595 - RNA, 21 nt, RNAi
aggaguuugagaccagcuuuu

SEQ ID NO: 20596 - RNA, 21 nt, RNAi
uuuccucaaacucuggucgaa

SEQ ID NO: 20597 - DNA, 21 bp, Homo sapiens
cagcttagccaacatagtaag

SEQ ID NO: 20598 - RNA, 21 nt, RNAi
gcuuagccaacauaguaaguu

SEQ ID NO: 20599 - RNA, 21 nt, RNAi
uucgaaucgguuguaucauuc

SEQ ID NO: 20600 - DNA, 21 bp, Homo sapiens
gattgcaatttgcaacctccg

SEQ ID NO: 20601 - RNA, 21 nt, RNAi
uugcaauuugcaaccuccguu

SEQ ID NO: 20602 - RNA, 21 nt, RNAi
uuaacguuaaacguuggaggc

SEQ ID NO: 20603 - DNA, 21 bp, Homo sapiens
gaacgacgctctgcaggtgct

SEQ ID NO: 20604 - RNA, 21 nt, RNAi
acgacgcucugcaggugcuuu

SEQ ID NO: 20605 - RNA, 21 nt, RNAi
uuugcugcgagacguccacga

SEQ ID NO: 20606 - DNA, 21 bp, Homo sapiens
gactctgaatggcctgagtgt

SEQ ID NO: 20607 - RNA, 21 nt, RNAi
cucugaauggccugaguguuu

SEQ ID NO: 20608 - RNA, 21 nt, RNAi
uugagacuuaccggacucaca

SEQ ID NO: 20609 - DNA, 21 bp, Homo sapiens
gaatggcctgagtgtgaccgg

SEQ ID NO: 20610 - RNA, 21 nt, RNAi
auggccugagugugaccgguu

SEQ ID NO: 20611 - RNA, 21 nt, RNAi
uuuaccggacucacacuggcc

SEQ ID NO: 20612 - DNA, 21 bp, Homo sapiens
gagtgtgaccggcgatgctga

SEQ ID NO: 20613 - RNA, 21 nt, RNAi
gugugaccggcgaugcugauu

SEQ ID NO: 20614 - RNA, 21 nt, RNAi
uucacacuggccgcuacgacu

SEQ ID NO: 20615 - DNA, 21 bp, Homo sapiens
gaccggcgatgctgagaacca

SEQ ID NO: 20616 - RNA, 21 nt, RNAi
ccggcgaugcugagaaccauu

SEQ ID NO: 20617 - RNA, 21 nt, RNAi
uuggccgcuacgacucuuggu

SEQ ID NO: 20618 - DNA, 21 bp, Homo sapiens
gatgctgagaaccaataccag

SEQ ID NO: 20619 - RNA, 21 nt, RNAi
ugcugagaaccaauaccaguu

SEQ ID NO: 20620 - RNA, 21 nt, RNAi
uuacgacucuugguuaugguc

SEQ ID NO: 20621 - DNA, 21 bp, Homo sapiens
gagaaccaataccagacactg

SEQ ID NO: 20622 - RNA, 21 nt, RNAi
gaaccaauaccagacacuguu

SEQ ID NO: 20623 - RNA, 21 nt, RNAi
uucuugguuauggucugugac

SEQ ID NO: 20624 - DNA, 21 bp, Homo sapiens
gaaccaataccagacactgta

SEQ ID NO: 20625 - RNA, 21 nt, RNAi
accaauaccagacacuguauu

SEQ ID NO: 20626 - RNA, 21 nt, RNAi
uuugguuauggucugugacau

SEQ ID NO: 20627 - DNA, 21 bp, Homo sapiens
gacactgtacaagctctacga

SEQ ID NO: 20628 - RNA, 21 nt, RNAi
cacuguacaagcucuacgauu

SEQ ID NO: 20629 - RNA, 21 nt, RNAi
uugugacauguucgagaugcu

SEQ ID NO: 20630 - DNA, 21 bp, Homo sapiens
gagaggtgtgaggtggtgatg

SEQ ID NO: 20631 - RNA, 21 nt, RNAi
gaggugugagguggugauguu

SEQ ID NO: 20632 - RNA, 21 nt, RNAi
uucuccacacuccaccacuac

SEQ ID NO: 20633 - DNA, 21 bp, Homo sapiens
gaaccttgagattgtgctcac

SEQ ID NO: 20634 - RNA, 21 nt, RNAi
accuugagauugugcucacuu

SEQ ID NO: 20635 - RNA, 21 nt, RNAi
uuuggaacucuaacacgagug

SEQ ID NO: 20636 - DNA, 21 bp, Homo sapiens
gacacaatgccgacctctcct

SEQ ID NO: 20637 - RNA, 21 nt, RNAi
cacaaugccgaccucuccuuu

SEQ ID NO: 20638 - RNA, 21 nt, RNAi
uuguguuacggcuggagagga

SEQ ID NO: 20639 - DNA, 21 bp, Homo sapiens
gacctctccttcctgcagtgg

SEQ ID NO: 20640 - RNA, 21 nt, RNAi
ccucuccuuccugcagugguu

SEQ ID NO: 20641 - RNA, 21 nt, RNAi
uuggagaggaaggacgucacc

SEQ ID NO: 20642 - DNA, 21 bp, Homo sapiens
gattcgagaagtgacaggcta

SEQ ID NO: 20643 - RNA, 21 nt, RNAi
uucgagaagugacaggcuauu

SEQ ID NO: 20644 - RNA, 21 nt, RNAi
uuaagcucuucacuguccgau

SEQ ID NO: 20645 - DNA, 21 bp, Homo sapiens
gagaagtgacaggctatgtcc

SEQ ID NO: 20646 - RNA, 21 nt, RNAi
gaagugacaggcuauguccuu

SEQ ID NO: 20647 - RNA, 21 nt, RNAi
uucuucacuguccgauacagg

SEQ ID NO: 20648 - DNA, 21 bp, Homo sapiens
gaagtgacaggctatgtcctc

SEQ ID NO: 20649 - RNA, 21 nt, RNAi
agugacaggcuauguccucuu

SEQ ID NO: 20650 - RNA, 21 nt, RNAi
uuucacuguccgauacaggag

SEQ ID NO: 20651 - DNA, 21 bp, Homo sapiens
gacaggctatgtcctcgtggc

SEQ ID NO: 20652 - RNA, 21 nt, RNAi
caggcuauguccucguggcuu

SEQ ID NO: 20653 - RNA, 21 nt, RNAi
uuguccgauacaggagcaccg

SEQ ID NO: 20654 - DNA, 21 bp, Homo sapiens
gaatgaattctctactctacc

SEQ ID NO: 20655 - RNA, 21 nt, RNAi
augaauucucuacucuaccuu

SEQ ID NO: 20656 - RNA, 21 nt, RNAi
uuuacuuaagagaugagaugg

SEQ ID NO: 20657 - DNA, 21 bp, Homo sapiens
gaattctctactctaccattg

SEQ ID NO: 20658 - RNA, 21 nt, RNAi
auucucuacucuaccauuguu

SEQ ID NO: 20659 - RNA, 21 nt, RNAi
uuuaagagaugagaugguaac

SEQ ID NO: 20660 - DNA, 21 bp, Homo sapiens
gaagtttgccatcttcgtcat

SEQ ID NO: 20661 - RNA, 21 nt, RNAi
aguuugccaucuucgucauuu

SEQ ID NO: 20662 - RNA, 21 nt, RNAi
uuucaaacgguagaagcagua

SEQ ID NO: 20663 - DNA, 21 bp, Homo sapiens
gaactataacaccaactccag

SEQ ID NO: 20664 - RNA, 21 nt, RNAi
acuauaacaccaacuccaguu

SEQ ID NO: 20665 - RNA, 21 nt, RNAi
uuugauauugugguugagguc

SEQ ID NO: 20666 - DNA, 21 bp, Homo sapiens
gactcagctcaccgagattct

SEQ ID NO: 20667 - RNA, 21 nt, RNAi
cucagcucaccgagauucuuu

SEQ ID NO: 20668 - RNA, 21 nt, RNAi
uugagucgaguggcucuaaga

SEQ ID NO: 20669 - DNA, 21 bp, Homo sapiens
gagaagaacgataagctttgt

SEQ ID NO: 20670 - RNA, 21 nt, RNAi
gaagaacgauaagcuuuguuu

SEQ ID NO: 20671 - RNA, 21 nt, RNAi
uucuucuugcuauucgaaaca

SEQ ID NO: 20672 - DNA, 21 bp, Homo sapiens
gaagaacgataagctttgtca

SEQ ID NO: 20673 - RNA, 21 nt, RNAi
agaacgauaagcuuugucauu

SEQ ID NO: 20674 - RNA, 21 nt, RNAi
uuucuugcuauucgaaacagu

SEQ ID NO: 20675 - DNA, 21 bp, Homo sapiens
gaacgataagctttgtcacat

SEQ ID NO: 20676 - RNA, 21 nt, RNAi
acgauaagcuuugucacauuu

SEQ ID NO: 20677 - RNA, 21 nt, RNAi
uuugcuauucgaaacagugua

SEQ ID NO: 20678 - DNA, 21 bp, Homo sapiens
gataagctttgtcacatggac

SEQ ID NO: 20679 - RNA, 21 nt, RNAi
uaagcuuugucacauggacuu

SEQ ID NO: 20680 - RNA, 21 nt, RNAi
uuauucgaaacaguguaccug

SEQ ID NO: 20681 - DNA, 21 bp, Homo sapiens
gaccgagatgctgagatagtg

SEQ ID NO: 20682 - RNA, 21 nt, RNAi
ccgagaugcugagauaguguu

SEQ ID NO: 20683 - RNA, 21 nt, RNAi
uuggcucuacgacucuaucac

SEQ ID NO: 20684 - DNA, 21 bp, Homo sapiens
gagatgctgagatagtggtga

SEQ ID NO: 20685 - RNA, 21 nt, RNAi
gaugcugagauaguggugauu

SEQ ID NO: 20686 - RNA, 21 nt, RNAi
uucuacgacucuaucaccacu

SEQ ID NO: 20687 - DNA, 21 bp, Homo sapiens
gatgctgagatagtggtgaag

SEQ ID NO: 20688 - RNA, 21 nt, RNAi
ugcugagauaguggugaaguu

SEQ ID NO: 20689 - RNA, 21 nt, RNAi
uuacgacucuaucaccacuuc

SEQ ID NO: 20690 - DNA, 21 bp, Homo sapiens
gagatagtggtgaaggacaat

SEQ ID NO: 20691 - RNA, 21 nt, RNAi
gauaguggugaaggacaauuu

SEQ ID NO: 20692 - RNA, 21 nt, RNAi
uucuaucaccacuuccuguua

SEQ ID NO: 20693 - DNA, 21 bp, Homo sapiens
gatagtggtgaaggacaatgg

SEQ ID NO: 20694 - RNA, 21 nt, RNAi
uaguggugaaggacaaugguu

SEQ ID NO: 20695 - RNA, 21 nt, RNAi
uuaucaccacuuccuguuacc

SEQ ID NO: 20696 - DNA, 21 bp, Homo sapiens
gaaggacaatggcagaagctg

SEQ ID NO: 20697 - RNA, 21 nt, RNAi
aggacaauggcagaagcuguu

SEQ ID NO: 20698 - RNA, 21 nt, RNAi
uuuccuguuaccgucuucgac

SEQ ID NO: 20699 - DNA, 21 bp, Homo sapiens
gatcagaagactgccagacat

SEQ ID NO: 20700 - RNA, 21 nt, RNAi
ucagaagacugccagacauuu

SEQ ID NO: 20701 - RNA, 21 nt, RNAi
uuagucuucugacggucugua

SEQ ID NO: 20702 - DNA, 21 bp, Homo sapiens
gaagactgccagacattgacc

SEQ ID NO: 20703 - RNA, 21 nt, RNAi
agacugccagacauugaccuu

SEQ ID NO: 20704 - RNA, 21 nt, RNAi
uuucugacggucuguaacugg

SEQ ID NO: 20705 - DNA, 21 bp, Homo sapiens
gactgccagacattgaccaag

SEQ ID NO: 20706 - RNA, 21 nt, RNAi
cugccagacauugaccaaguu

SEQ ID NO: 20707 - RNA, 21 nt, RNAi
uugacggucuguaacugguuc

SEQ ID NO: 20708 - DNA, 21 bp, Homo sapiens
gacattgaccaagaccatctg

SEQ ID NO: 20709 - RNA, 21 nt, RNAi
cauugaccaagaccaucuguu

SEQ ID NO: 20710 - RNA, 21 nt, RNAi
uuguaacugguucugguagac

SEQ ID NO: 20711 - DNA, 21 bp, Homo sapiens
gaccaagaccatctgtgctcc

SEQ ID NO: 20712 - RNA, 21 nt, RNAi
ccaagaccaucugugcuccuu

SEQ ID NO: 20713 - RNA, 21 nt, RNAi
uugguucugguagacacgagg

SEQ ID NO: 20714 - DNA, 21 bp, Homo sapiens
gaccatctgtgctcctcagtg

SEQ ID NO: 20715 - RNA, 21 nt, RNAi
ccaucugugcuccucaguguu

SEQ ID NO: 20716 - RNA, 21 nt, RNAi
uugguagacacgaggagucac

SEQ ID NO: 20717 - DNA, 21 bp, Homo sapiens
gacacagactgctttgcctgc

SEQ ID NO: 20718 - RNA, 21 nt, RNAi
cacagacugcuuugccugcuu

SEQ ID NO: 20719 - RNA, 21 nt, RNAi
uugugucugacgaaacggacg

SEQ ID NO: 20720 - DNA, 21 bp, Homo sapiens
gacagtggagcctgtgtacct

SEQ ID NO: 20721 - RNA, 21 nt, RNAi
caguggagccuguguaccuuu

SEQ ID NO: 20722 - RNA, 21 nt, RNAi
uugucaccucggacacaugga

SEQ ID NO: 20723 - DNA, 21 bp, Homo sapiens
gagcctgtgtacctcgctgtc

SEQ ID NO: 20724 - RNA, 21 nt, RNAi
gccuguguaccucgcugucuu

SEQ ID NO: 20725 - RNA, 21 nt, RNAi
uucggacacauggagcgacag

SEQ ID NO: 20726 - DNA, 21 bp, Homo sapiens
gaggagtttgtgtagccagct

SEQ ID NO: 20727 - RNA, 21 nt, RNAi
ggaguuuguguagccagcuuu

SEQ ID NO: 20728 - RNA, 21 nt, RNAi
uuccucaaacacaucggucga

SEQ ID NO: 20729 - DNA, 21 bp, Homo sapiens
gagtttgtgtagccagctgtc

SEQ ID NO: 20730 - RNA, 21 nt, RNAi
guuuguguagccagcugucuu

SEQ ID NO: 20731 - RNA, 21 nt, RNAi
uucaaacacaucggucgacag

SEQ ID NO: 20732 - DNA, 21 bp, Homo sapiens
gatcaaacatcctgtgtcagg

SEQ ID NO: 20733 - RNA, 21 nt, RNAi
ucaaacauccugugucagguu

SEQ ID NO: 20734 - RNA, 21 nt, RNAi
uuaguuuguaggacacagucc

SEQ ID NO: 20735 - DNA, 21 bp, Homo sapiens
gacaagatggaagtagataaa

SEQ ID NO: 20736 - RNA, 21 nt, RNAi
caagauggaaguagauaaauu

SEQ ID NO: 20737 - RNA, 21 nt, RNAi
uuguucuaccuucaucuauuu

SEQ ID NO: 20738 - DNA, 21 bp, Homo sapiens
gagccgcttccagactgtgga

SEQ ID NO: 20739 - RNA, 21 nt, RNAi
gccgcuuccagacuguggauu

SEQ ID NO: 20740 - RNA, 21 nt, RNAi
uucggcgaaggucugacaccu

SEQ ID NO: 20741 - DNA, 21 bp, Homo sapiens
gactgtggactcgagcaacat

SEQ ID NO: 20742 - RNA, 21 nt, RNAi
cuguggacucgagcaacauuu

SEQ ID NO: 20743 - RNA, 21 nt, RNAi
uugacaccugagcucguugua

SEQ ID NO: 20744 - DNA, 21 bp, Homo sapiens
gactcgagcaacattgatgga

SEQ ID NO: 20745 - RNA, 21 nt, RNAi
cucgagcaacauugauggauu

SEQ ID NO: 20746 - RNA, 21 nt, RNAi
uugagcucguuguaacuaccu

SEQ ID NO: 20747 - DNA, 21 bp, Homo sapiens
gagcaacattgatggatttgt

SEQ ID NO: 20748 - RNA, 21 nt, RNAi
gcaacauugauggauuuguuu

SEQ ID NO: 20749 - RNA, 21 nt, RNAi
uucguuguaacuaccuaaaca

SEQ ID NO: 20750 - DNA, 21 bp, Homo sapiens
gatggatttgtgaactgcacc

SEQ ID NO: 20751 - RNA, 21 nt, RNAi
uggauuugugaacugcaccuu

SEQ ID NO: 20752 - RNA, 21 nt, RNAi
uuaccuaaacacuugacgugg

SEQ ID NO: 20753 - DNA, 21 bp, Homo sapiens
gatttgtgaactgcaccaaga

SEQ ID NO: 20754 - RNA, 21 nt, RNAi
uuugugaacugcaccaagauu

SEQ ID NO: 20755 - RNA, 21 nt, RNAi
uuaaacacuugacgugguucu

SEQ ID NO: 20756 - DNA, 21 bp, Homo sapiens
gactttctgatcaccggcctc

SEQ ID NO: 20757 - RNA, 21 nt, RNAi
cuuucugaucaccggccucuu

SEQ ID NO: 20758 - RNA, 21 nt, RNAi
uugaaagacuaguggccggag

SEQ ID NO: 20759 - DNA, 21 bp, Homo sapiens
gatcaccggcctcaatggaga

SEQ ID NO: 20760 - RNA, 21 nt, RNAi
ucaccggccucaauggagauu

SEQ ID NO: 20761 - RNA, 21 nt, RNAi
uuaguggccggaguuaccucu

SEQ ID NO: 20762 - DNA, 21 bp, Homo sapiens
gagaagctcaatgtcttccgg

SEQ ID NO: 20763 - RNA, 21 nt, RNAi
gaagcucaaugucuuccgguu

SEQ ID NO: 20764 - RNA, 21 nt, RNAi
uucuucgaguuacagaaggcc

SEQ ID NO: 20765 - DNA, 21 bp, Homo sapiens
gaagctcaatgtcttccggac

SEQ ID NO: 20766 - RNA, 21 nt, RNAi
agcucaaugucuuccggacuu

SEQ ID NO: 20767 - RNA, 21 nt, RNAi
uuucgaguuacagaaggccug

SEQ ID NO: 20768 - DNA, 21 bp, Homo sapiens
gagatcacaggttacctgaac

SEQ ID NO: 20769 - RNA, 21 nt, RNAi
gaucacagguuaccugaacuu

SEQ ID NO: 20770 - RNA, 21 nt, RNAi
uucuaguguccaauggacuug

SEQ ID NO: 20771 - DNA, 21 bp, Homo sapiens
gatcacaggttacctgaacat

SEQ ID NO: 20772 - RNA, 21 nt, RNAi
ucacagguuaccugaacauuu

SEQ ID NO: 20773 - RNA, 21 nt, RNAi
uuaguguccaauggacuugua

SEQ ID NO: 20774 - DNA, 21 bp, Homo sapiens
gacaaccattggaggcagaag

SEQ ID NO: 20775 - RNA, 21 nt, RNAi
caaccauuggaggcagaaguu

SEQ ID NO: 20776 - RNA, 21 nt, RNAi
uuguugguaaccuccgucuuc

SEQ ID NO: 20777 - DNA, 21 bp, Homo sapiens
gaggcagaagcctctacaacc

SEQ ID NO: 20778 - RNA, 21 nt, RNAi
ggcagaagccucuacaaccuu

SEQ ID NO: 20779 - RNA, 21 nt, RNAi
uuccgucuucggagauguugg

SEQ ID NO: 20780 - DNA, 21 bp, Homo sapiens
gatcatgaagaacttgaatgt

SEQ ID NO: 20781 - RNA, 21 nt, RNAi
ucaugaagaacuugaauguuu

SEQ ID NO: 20782 - RNA, 21 nt, RNAi
uuaguacuucuugaacuuaca

SEQ ID NO: 20783 - DNA, 21 bp, Homo sapiens
gaagaacttgaatgtcacatc

SEQ ID NO: 20784 - RNA, 21 nt, RNAi
agaacuugaaugucacaucuu

SEQ ID NO: 20785 - RNA, 21 nt, RNAi
uuucuugaacuuacaguguag

SEQ ID NO: 20786 - DNA, 21 bp, Homo sapiens
gaacttgaatgtcacatctct

SEQ ID NO: 20787 - RNA, 21 nt, RNAi
acuugaaugucacaucucuuu

SEQ ID NO: 20788 - RNA, 21 nt, RNAi
uuugaacuuacaguguagaga

SEQ ID NO: 20789 - DNA, 21 bp, Homo sapiens
gaactggaccaaggtgcttcg

SEQ ID NO: 20790 - RNA, 21 nt, RNAi
acuggaccaaggugcuucguu

SEQ ID NO: 20791 - RNA, 21 nt, RNAi
uuugaccugguuccacgaagc

SEQ ID NO: 20792 - DNA, 21 bp, Homo sapiens
gaagagcgactagacatcaag

SEQ ID NO: 20793 - RNA, 21 nt, RNAi
agagcgacuagacaucaaguu

SEQ ID NO: 20794 - RNA, 21 nt, RNAi
uuucucgcugaucuguaguuc

SEQ ID NO: 20795 - DNA, 21 bp, Homo sapiens
gagcgactagacatcaagcat

SEQ ID NO: 20796 - RNA, 21 nt, RNAi
gcgacuagacaucaagcauuu

SEQ ID NO: 20797 - RNA, 21 nt, RNAi
uucgcugaucuguaguucgua

SEQ ID NO: 20798 - DNA, 21 bp, Homo sapiens
gactagacatcaagcataatc

SEQ ID NO: 20799 - RNA, 21 nt, RNAi
cuagacaucaagcauaaucuu

SEQ ID NO: 20800 - RNA, 21 nt, RNAi
uugaucuguaguucguauuag

SEQ ID NO: 20801 - DNA, 21 bp, Homo sapiens
gacatcaagcataatcggccg

SEQ ID NO: 20802 - RNA, 21 nt, RNAi
caucaagcauaaucggccguu

SEQ ID NO: 20803 - RNA, 21 nt, RNAi
uuguaguucguauuagccggc

SEQ ID NO: 20804 - DNA, 21 bp, Homo sapiens
gaaattatagccgaggaggtg

SEQ ID NO: 20805 - RNA, 21 nt, RNAi
aauuauagccgaggagguguu

SEQ ID NO: 20806 - RNA, 21 nt, RNAi
uuuuaauaucggcuccuccac

SEQ ID NO: 20807 - DNA, 21 bp, Homo sapiens
gaggccgaatgcttctcctgc

SEQ ID NO: 20808 - RNA, 21 nt, RNAi
ggccgaaugcuucuccugcuu

SEQ ID NO: 20809 - RNA, 21 nt, RNAi
uuccggcuuacgaagaggacg

SEQ ID NO: 20810 - DNA, 21 bp, Homo sapiens
gatacttgtgctcaatgtgcc

SEQ ID NO: 20811 - RNA, 21 nt, RNAi
uacuugugcucaaugugccuu

SEQ ID NO: 20812 - RNA, 21 nt, RNAi
uuaugaacacgaguuacacgg

SEQ ID NO: 20813 - DNA, 21 bp, Homo sapiens
gatgttcagaatgaatgtcgg

SEQ ID NO: 20814 - RNA, 21 nt, RNAi
uguucagaaugaaugucgguu

SEQ ID NO: 20815 - RNA, 21 nt, RNAi
uuacaagucuuacuuacagcc

SEQ ID NO: 20816 - DNA, 21 bp, Homo sapiens
gaccagagcttcaagactgtt

SEQ ID NO: 20817 - RNA, 21 nt, RNAi
ccagagcuucaagacuguuuu

SEQ ID NO: 20818 - RNA, 21 nt, RNAi
uuggucucgaaguucugacaa

SEQ ID NO: 20819 - DNA, 21 bp, Homo sapiens
gagcttcaagactgtttagga

SEQ ID NO: 20820 - RNA, 21 nt, RNAi
gcuucaagacuguuuaggauu

SEQ ID NO: 20821 - RNA, 21 nt, RNAi
uucgaaguucugacaaauccu

SEQ ID NO: 20822 - DNA, 21 bp, Homo sapiens
gactgtttaggacaaacactg

SEQ ID NO: 20823 - RNA, 21 nt, RNAi
cuguuuaggacaaacacuguu

SEQ ID NO: 20824 - RNA, 21 nt, RNAi
uugacaaauccuguuugugac

SEQ ID NO: 20825 - DNA, 21 bp, Homo sapiens
gacaaacactggtgctgatcg

SEQ ID NO: 20826 - RNA, 21 nt, RNAi
caaacacuggugcugaucguu

SEQ ID NO: 20827 - RNA, 21 nt, RNAi
uuguuugugaccacgacuagc

SEQ ID NO: 20828 - DNA, 21 bp, Homo sapiens
gacaatggctttgacagtgat

SEQ ID NO: 20829 - RNA, 21 nt, RNAi
caauggcuuugacagugauuu

SEQ ID NO: 20830 - RNA, 21 nt, RNAi
uuguuaccgaaacugucacua

SEQ ID NO: 20831 - DNA, 21 bp, Homo sapiens
gacagtgatagcaggattggt

SEQ ID NO: 20832 - RNA, 21 nt, RNAi
cagugauagcaggauugguuu

SEQ ID NO: 20833 - RNA, 21 nt, RNAi
uugucacuaucguccuaacca

SEQ ID NO: 20834 - DNA, 21 bp, Homo sapiens
gatagcaggattggtagtgat

SEQ ID NO: 20835 - RNA, 21 nt, RNAi
uagcaggauugguagugauuu

SEQ ID NO: 20836 - RNA, 21 nt, RNAi
uuaucguccuaaccaucacua

SEQ ID NO: 20837 - DNA, 21 bp, Homo sapiens
gagagcatagagcctctggac

SEQ ID NO: 20838 - RNA, 21 nt, RNAi
gagcauagagccucuggacuu

SEQ ID NO: 20839 - RNA, 21 nt, RNAi
uucucguaucucggagaccug

SEQ ID NO: 20840 - DNA, 21 bp, Homo sapiens
gagaaggctaacaaagtcttg

SEQ ID NO: 20841 - RNA, 21 nt, RNAi
gaaggcuaacaaagucuuguu

SEQ ID NO: 20842 - RNA, 21 nt, RNAi
uucuuccgauuguuucagaac

SEQ ID NO: 20843 - DNA, 21 bp, Homo sapiens
gaaggctaacaaagtcttggc

SEQ ID NO: 20844 - RNA, 21 nt, RNAi
aggcuaacaaagucuuggcuu

SEQ ID NO: 20845 - RNA, 21 nt, RNAi
uuuccgauuguuucagaaccg

SEQ ID NO: 20846 - DNA, 21 bp, Homo sapiens
gaatcttcaaagagacagagc

SEQ ID NO: 20847 - RNA, 21 nt, RNAi
aucuucaaagagacagagcuu

SEQ ID NO: 20848 - RNA, 21 nt, RNAi
uuuagaaguuucucugucucg

SEQ ID NO: 20849 - DNA, 21 bp, Homo sapiens
gagacagagctaaggaagctt

SEQ ID NO: 20850 - RNA, 21 nt, RNAi
gacagagcuaaggaagcuuuu

SEQ ID NO: 20851 - RNA, 21 nt, RNAi
uucugucucgauuccuucgaa

SEQ ID NO: 20852 - DNA, 21 bp, Homo sapiens
gacagagctaaggaagcttaa

SEQ ID NO: 20853 - RNA, 21 nt, RNAi
cagagcuaaggaagcuuaauu

SEQ ID NO: 20854 - RNA, 21 nt, RNAi
uugucucgauuccuucgaauu

SEQ ID NO: 20855 - DNA, 21 bp, Homo sapiens
gagctaaggaagcttaaagtg

SEQ ID NO: 20856 - RNA, 21 nt, RNAi
gcuaaggaagcuuaaaguguu

SEQ ID NO: 20857 - RNA, 21 nt, RNAi
uucgauuccuucgaauuucac

SEQ ID NO: 20858 - DNA, 21 bp, Homo sapiens
gaagcttaaagtgcttggctc

SEQ ID NO: 20859 - RNA, 21 nt, RNAi
agcuuaaagugcuuggcucuu

SEQ ID NO: 20860 - RNA, 21 nt, RNAi
uuucgaauuucacgaaccgag

SEQ ID NO: 20861 - DNA, 21 bp, Homo sapiens
gaactgtgcacaaaggagtgt

SEQ ID NO: 20862 - RNA, 21 nt, RNAi
acugugcacaaaggaguguuu

SEQ ID NO: 20863 - RNA, 21 nt, RNAi
uuugacacguguuuccucaca

SEQ ID NO: 20864 - DNA, 21 bp, Homo sapiens
gaatcaatcaagattccagtc

SEQ ID NO: 20865 - RNA, 21 nt, RNAi
aucaaucaagauuccagucuu

SEQ ID NO: 20866 - RNA, 21 nt, RNAi
uuuaguuaguucuaaggucag

SEQ ID NO: 20867 - DNA, 21 bp, Homo sapiens
gattccagtctgcattaaagt

SEQ ID NO: 20868 - RNA, 21 nt, RNAi
uuccagucugcauuaaaguuu

SEQ ID NO: 20869 - RNA, 21 nt, RNAi
uuaaggucagacguaauuuca

SEQ ID NO: 20870 - DNA, 21 bp, Homo sapiens
gaggacaagagtggacggcag

SEQ ID NO: 20871 - RNA, 21 nt, RNAi
ggacaagaguggacggcaguu

SEQ ID NO: 20872 - RNA, 21 nt, RNAi
uuccuguucucaccugccguc

SEQ ID NO: 20873 - DNA, 21 bp, Homo sapiens
gacaagagtggacggcagagt

SEQ ID NO: 20874 - RNA, 21 nt, RNAi
caagaguggacggcagaguuu

SEQ ID NO: 20875 - RNA, 21 nt, RNAi
uuguucucaccugccgucuca

SEQ ID NO: 20876 - DNA, 21 bp, Homo sapiens
gacagatcatatgctggccat

SEQ ID NO: 20877 - RNA, 21 nt, RNAi
cagaucauaugcuggccauuu

SEQ ID NO: 20878 - RNA, 21 nt, RNAi
uugucuaguauacgaccggua

SEQ ID NO: 20879 - DNA, 21 bp, Homo sapiens
gatcatatgctggccattggc

SEQ ID NO: 20880 - RNA, 21 nt, RNAi
ucauaugcuggccauuggcuu

SEQ ID NO: 20881 - RNA, 21 nt, RNAi
uuaguauacgaccgguaaccg

SEQ ID NO: 20882 - DNA, 21 bp, Homo sapiens
gatcatgtgagacaacaccgg

SEQ ID NO: 20883 - RNA, 21 nt, RNAi
ucaugugagacaacaccgguu

SEQ ID NO: 20884 - RNA, 21 nt, RNAi
uuaguacacucuguuguggcc

SEQ ID NO: 20885 - DNA, 21 bp, Homo sapiens
gaatgtactaccttgaggaac

SEQ ID NO: 20886 - RNA, 21 nt, RNAi
auguacuaccuugaggaacuu

SEQ ID NO: 20887 - RNA, 21 nt, RNAi
uuuacaugauggaacuccuug

SEQ ID NO: 20888 - DNA, 21 bp, Homo sapiens
gaggaacatggtatggtgcat

SEQ ID NO: 20889 - RNA, 21 nt, RNAi
ggaacaugguauggugcauuu

SEQ ID NO: 20890 - RNA, 21 nt, RNAi
uuccuuguaccauaccacgua

SEQ ID NO: 20891 - DNA, 21 bp, Homo sapiens
gaacatggtatggtgcataga

SEQ ID NO: 20892 - RNA, 21 nt, RNAi
acaugguauggugcauagauu

SEQ ID NO: 20893 - RNA, 21 nt, RNAi
uuuguaccauaccacguaucu

SEQ ID NO: 20894 - DNA, 21 bp, Homo sapiens
gaaacgtgctactcaagtcac

SEQ ID NO: 20895 - RNA, 21 nt, RNAi
aacgugcuacucaagucacuu

SEQ ID NO: 20896 - RNA, 21 nt, RNAi
uuuugcacgaugaguucagug

SEQ ID NO: 20897 - DNA, 21 bp, Homo sapiens
gacctgctgcctcctgatgat

SEQ ID NO: 20898 - RNA, 21 nt, RNAi
ccugcugccuccugaugauuu

SEQ ID NO: 20899 - RNA, 21 nt, RNAi
uuggacgacggaggacuacua

SEQ ID NO: 20900 - DNA, 21 bp, Homo sapiens
gatgataagcagctgctatac

SEQ ID NO: 20901 - RNA, 21 nt, RNAi
ugauaagcagcugcuauacuu

SEQ ID NO: 20902 - RNA, 21 nt, RNAi
uuacuauucgucgacgauaug

SEQ ID NO: 20903 - DNA, 21 bp, Homo sapiens
gataagcagctgctatacagt

SEQ ID NO: 20904 - RNA, 21 nt, RNAi
uaagcagcugcuauacaguuu

SEQ ID NO: 20905 - RNA, 21 nt, RNAi
uuauucgucgacgauauguca

SEQ ID NO: 20906 - DNA, 21 bp, Homo sapiens
gaggccaagactccaattaag

SEQ ID NO: 20907 - RNA, 21 nt, RNAi
ggccaagacuccaauuaaguu

SEQ ID NO: 20908 - RNA, 21 nt, RNAi
uuccgguucugagguuaauuc

SEQ ID NO: 20909 - DNA, 21 bp, Homo sapiens
gactccaattaagtggatggc

SEQ ID NO: 20910 - RNA, 21 nt, RNAi
cuccaauuaaguggauggcuu

SEQ ID NO: 20911 - RNA, 21 nt, RNAi
uugagguuaauucaccuaccg

SEQ ID NO: 20912 - DNA, 21 bp, Homo sapiens
gaaatacacacaccagagtga

SEQ ID NO: 20913 - RNA, 21 nt, RNAi
aauacacacaccagagugauu

SEQ ID NO: 20914 - RNA, 21 nt, RNAi
uuuuauguguguggucucacu

SEQ ID NO: 20915 - DNA, 21 bp, Homo sapiens
gagtgatgtctggagctatgg

SEQ ID NO: 20916 - RNA, 21 nt, RNAi
gugaugucuggagcuaugguu

SEQ ID NO: 20917 - RNA, 21 nt, RNAi
uucacuacagaccucgauacc

SEQ ID NO: 20918 - DNA, 21 bp, Homo sapiens
gatgtctggagctatggtgtg

SEQ ID NO: 20919 - RNA, 21 nt, RNAi
ugucuggagcuaugguguguu

SEQ ID NO: 20920 - RNA, 21 nt, RNAi
uuacagaccucgauaccacac

SEQ ID NO: 20921 - DNA, 21 bp, Homo sapiens
gagctatggtgtgacagtttg

SEQ ID NO: 20922 - RNA, 21 nt, RNAi
gcuauggugugacaguuuguu

SEQ ID NO: 20923 - RNA, 21 nt, RNAi
uucgauaccacacugucaaac

SEQ ID NO: 20924 - DNA, 21 bp, Homo sapiens
gattggctgaagtaccagacc

SEQ ID NO: 20925 - RNA, 21 nt, RNAi
uuggcugaaguaccagaccuu

SEQ ID NO: 20926 - RNA, 21 nt, RNAi
uuaaccgacuucauggucugg

SEQ ID NO: 20927 - DNA, 21 bp, Homo sapiens
gaagtaccagacctgctagag

SEQ ID NO: 20928 - RNA, 21 nt, RNAi
aguaccagaccugcuagaguu

SEQ ID NO: 20929 - RNA, 21 nt, RNAi
uuucauggucuggacgaucuc

SEQ ID NO: 20930 - DNA, 21 bp, Homo sapiens
gatctgcacaattgatgtcta

SEQ ID NO: 20931 - RNA, 21 nt, RNAi
ucugcacaauugaugucuauu

SEQ ID NO: 20932 - RNA, 21 nt, RNAi
uuagacguguuaacuacagau

SEQ ID NO: 20933 - DNA, 21 bp, Homo sapiens
gatgtctacatggtgatggtc

SEQ ID NO: 20934 - RNA, 21 nt, RNAi
ugucuacauggugauggucuu

SEQ ID NO: 20935 - RNA, 21 nt, RNAi
uuacagauguaccacuaccag

SEQ ID NO: 20936 - DNA, 21 bp, Homo sapiens
gatggtcaagtgttggatgat

SEQ ID NO: 20937 - RNA, 21 nt, RNAi
uggucaaguguuggaugauuu

SEQ ID NO: 20938 - RNA, 21 nt, RNAi
uuaccaguucacaaccuacua

SEQ ID NO: 20939 - DNA, 21 bp, Homo sapiens
gatgattgatgagaacattcg

SEQ ID NO: 20940 - RNA, 21 nt, RNAi
ugauugaugagaacauucguu

SEQ ID NO: 20941 - RNA, 21 nt, RNAi
uuacuaacuacucuuguaagc

SEQ ID NO: 20942 - DNA, 21 bp, Homo sapiens
gaactagccaatgagttcacc

SEQ ID NO: 20943 - RNA, 21 nt, RNAi
acuagccaaugaguucaccuu

SEQ ID NO: 20944 - RNA, 21 nt, RNAi
uuugaucgguuacucaagugg

SEQ ID NO: 20945 - DNA, 21 bp, Homo sapiens
gacaaacaagaagctagagga

SEQ ID NO: 20946 - RNA, 21 nt, RNAi
caaacaagaagcuagaggauu

SEQ ID NO: 20947 - RNA, 21 nt, RNAi
uuguuuguucuucgaucuccu

SEQ ID NO: 20948 - DNA, 21 bp, Homo sapiens
gaagctagaggaagtagagct

SEQ ID NO: 20949 - RNA, 21 nt, RNAi
agcuagaggaaguagagcuuu

SEQ ID NO: 20950 - RNA, 21 nt, RNAi
uuucgaucuccuucaucucga

SEQ ID NO: 20951 - DNA, 21 bp, Homo sapiens
gaggaagtagagctggagcca

SEQ ID NO: 20952 - RNA, 21 nt, RNAi
ggaaguagagcuggagccauu

SEQ ID NO: 20953 - RNA, 21 nt, RNAi
uuccuucaucucgaccucggu

SEQ ID NO: 20954 - DNA, 21 bp, Homo sapiens
gaagtagagctggagccagaa

SEQ ID NO: 20955 - RNA, 21 nt, RNAi
aguagagcuggagccagaauu

SEQ ID NO: 20956 - RNA, 21 nt, RNAi
uuucaucucgaccucggucuu

SEQ ID NO: 20957 - DNA, 21 bp, Homo sapiens
gagctggagccagaactagac

SEQ ID NO: 20958 - RNA, 21 nt, RNAi
gcuggagccagaacuagacuu

SEQ ID NO: 20959 - RNA, 21 nt, RNAi
uucgaccucggucuugaucug

SEQ ID NO: 20960 - DNA, 21 bp, Homo sapiens
gagccagaactagacctagac

SEQ ID NO: 20961 - RNA, 21 nt, RNAi
gccagaacuagaccuagacuu

SEQ ID NO: 20962 - RNA, 21 nt, RNAi
uucggucuugaucuggaucug

SEQ ID NO: 20963 - DNA, 21 bp, Homo sapiens
gaactagacctagacctagac

SEQ ID NO: 20964 - RNA, 21 nt, RNAi
acuagaccuagaccuagacuu

SEQ ID NO: 20965 - RNA, 21 nt, RNAi
uuugaucuggaucuggaucug

SEQ ID NO: 20966 - DNA, 21 bp, Homo sapiens
gacctagacctagacttggaa

SEQ ID NO: 20967 - RNA, 21 nt, RNAi
ccuagaccuagacuuggaauu

SEQ ID NO: 20968 - RNA, 21 nt, RNAi
uuggaucuggaucugaaccuu

SEQ ID NO: 20969 - DNA, 21 bp, Homo sapiens
gacctagacttggaagcagag

SEQ ID NO: 20970 - RNA, 21 nt, RNAi
ccuagacuuggaagcagaguu

SEQ ID NO: 20971 - RNA, 21 nt, RNAi
uuggaucugaaccuucgucuc

SEQ ID NO: 20972 - DNA, 21 bp, Homo sapiens
gacttggaagcagaggaggac

SEQ ID NO: 20973 - RNA, 21 nt, RNAi
cuuggaagcagaggaggacuu

SEQ ID NO: 20974 - RNA, 21 nt, RNAi
uugaaccuucgucuccuccug

SEQ ID NO: 20975 - DNA, 21 bp, Homo sapiens
gaagcagaggaggacaacctg

SEQ ID NO: 20976 - RNA, 21 nt, RNAi
agcagaggaggacaaccuguu

SEQ ID NO: 20977 - RNA, 21 nt, RNAi
uuucgucuccuccuguuggac

SEQ ID NO: 20978 - DNA, 21 bp, Homo sapiens
gaggaggacaacctggcaacc

SEQ ID NO: 20979 - RNA, 21 nt, RNAi
ggaggacaaccuggcaaccuu

SEQ ID NO: 20980 - RNA, 21 nt, RNAi
uuccuccuguuggaccguugg

SEQ ID NO: 20981 - DNA, 21 bp, Homo sapiens
gaggacaacctggcaaccacc

SEQ ID NO: 20982 - RNA, 21 nt, RNAi
ggacaaccuggcaaccaccuu

SEQ ID NO: 20983 - RNA, 21 nt, RNAi
uuccuguuggaccguuggugg

SEQ ID NO: 20984 - DNA, 21 bp, Homo sapiens
gacaacctggcaaccaccaca

SEQ ID NO: 20985 - RNA, 21 nt, RNAi
caaccuggcaaccaccacauu

SEQ ID NO: 20986 - RNA, 21 nt, RNAi
uuguuggaccguugguggugu

SEQ ID NO: 20987 - DNA, 21 bp, Homo sapiens
gaacacttaatcggccacgtg

SEQ ID NO: 20988 - RNA, 21 nt, RNAi
acacuuaaucggccacguguu

SEQ ID NO: 20989 - RNA, 21 nt, RNAi
uuugugaauuagccggugcac

SEQ ID NO: 20990 - DNA, 21 bp, Homo sapiens
gatgcctggcatcagagtcat

SEQ ID NO: 20991 - RNA, 21 nt, RNAi
ugccuggcaucagagucauuu

SEQ ID NO: 20992 - RNA, 21 nt, RNAi
uuacggaccguagucucagua

SEQ ID NO: 20993 - DNA, 21 bp, Homo sapiens
gaggctgagctccaggagaaa

SEQ ID NO: 20994 - RNA, 21 nt, RNAi
ggcugagcuccaggagaaauu

SEQ ID NO: 20995 - RNA, 21 nt, RNAi
uuccgacucgagguccucuuu

SEQ ID NO: 20996 - DNA, 21 bp, Homo sapiens
gagctccaggagaaagtgtca

SEQ ID NO: 20997 - RNA, 21 nt, RNAi
gcuccaggagaaagugucauu

SEQ ID NO: 20998 - RNA, 21 nt, RNAi
uucgagguccucuuucacagu

SEQ ID NO: 20999 - DNA, 21 bp, Homo sapiens
gagaaagtgtcaatgtgtaga

SEQ ID NO: 21000 - RNA, 21 nt, RNAi
gaaagugucaauguguagauu

SEQ ID NO: 21001 - RNA, 21 nt, RNAi
uucuuucacaguuacacaucu

SEQ ID NO: 21002 - DNA, 21 bp, Homo sapiens
gaaagtgtcaatgtgtagaag

SEQ ID NO: 21003 - RNA, 21 nt, RNAi
aagugucaauguguagaaguu

SEQ ID NO: 21004 - RNA, 21 nt, RNAi
uuuucacaguuacacaucuuc

SEQ ID NO: 21005 - DNA, 21 bp, Homo sapiens
gaggaagaggatgtcaacggt

SEQ ID NO: 21006 - RNA, 21 nt, RNAi
ggaagaggaugucaacgguuu

SEQ ID NO: 21007 - RNA, 21 nt, RNAi
uuccuucuccuacaguugcca

SEQ ID NO: 21008 - DNA, 21 bp, Homo sapiens
gaagaggatgtcaacggttat

SEQ ID NO: 21009 - RNA, 21 nt, RNAi
agaggaugucaacgguuauuu

SEQ ID NO: 21010 - RNA, 21 nt, RNAi
uuucuccuacaguugccaaua

SEQ ID NO: 21011 - DNA, 21 bp, Homo sapiens
gaggatgtcaacggttatgtc

SEQ ID NO: 21012 - RNA, 21 nt, RNAi
ggaugucaacgguuaugucuu

SEQ ID NO: 21013 - RNA, 21 nt, RNAi
uuccuacaguugccaauacag

SEQ ID NO: 21014 - DNA, 21 bp, Homo sapiens
gatgtcaacggttatgtcatg

SEQ ID NO: 21015 - RNA, 21 nt, RNAi
ugucaacgguuaugucauguu

SEQ ID NO: 21016 - RNA, 21 nt, RNAi
uuacaguugccaauacaguac

SEQ ID NO: 21017 - DNA, 21 bp, Homo sapiens
gatacacacctcaaaggtact

SEQ ID NO: 21018 - RNA, 21 nt, RNAi
uacacaccucaaagguacuuu

SEQ ID NO: 21019 - RNA, 21 nt, RNAi
uuauguguggaguuuccauga

SEQ ID NO: 21020 - DNA, 21 bp, Homo sapiens
gaagaagaagatgaagatgag

SEQ ID NO: 21021 - RNA, 21 nt, RNAi
agaagaagaugaagaugaguu

SEQ ID NO: 21022 - RNA, 21 nt, RNAi
uuucuucuucuacuucuacuc

SEQ ID NO: 21023 - DNA, 21 bp, Homo sapiens
gaagaagatgaagatgaggag

SEQ ID NO: 21024 - RNA, 21 nt, RNAi
agaagaugaagaugaggaguu

SEQ ID NO: 21025 - RNA, 21 nt, RNAi
uuucuucuacuucuacuccuc

SEQ ID NO: 21026 - DNA, 21 bp, Homo sapiens
gaagatgaagatgaggagtat

SEQ ID NO: 21027 - RNA, 21 nt, RNAi
agaugaagaugaggaguauuu

SEQ ID NO: 21028 - RNA, 21 nt, RNAi
uuucuacuucuacuccucaua

SEQ ID NO: 21029 - DNA, 21 bp, Homo sapiens
gatgaagatgaggagtatgaa

SEQ ID NO: 21030 - RNA, 21 nt, RNAi
ugaagaugaggaguaugaauu

SEQ ID NO: 21031 - RNA, 21 nt, RNAi
uuacuucuacuccucauacuu

SEQ ID NO: 21032 - DNA, 21 bp, Homo sapiens
gaagatgaggagtatgaatac

SEQ ID NO: 21033 - RNA, 21 nt, RNAi
agaugaggaguaugaauacuu

SEQ ID NO: 21034 - RNA, 21 nt, RNAi
uuucuacuccucauacuuaug

SEQ ID NO: 21035 - DNA, 21 bp, Homo sapiens
gatgaggagtatgaatacatg

SEQ ID NO: 21036 - RNA, 21 nt, RNAi
ugaggaguaugaauacauguu

SEQ ID NO: 21037 - RNA, 21 nt, RNAi
uuacuccucauacuuauguac

SEQ ID NO: 21038 - DNA, 21 bp, Homo sapiens
gaggagtatgaatacatgaac

SEQ ID NO: 21039 - RNA, 21 nt, RNAi
ggaguaugaauacaugaacuu

SEQ ID NO: 21040 - RNA, 21 nt, RNAi
uuccucauacuuauguacuug

SEQ ID NO: 21041 - DNA, 21 bp, Homo sapiens
gagtatgaatacatgaaccgg

SEQ ID NO: 21042 - RNA, 21 nt, RNAi
guaugaauacaugaaccgguu

SEQ ID NO: 21043 - RNA, 21 nt, RNAi
uucauacuuauguacuuggcc

SEQ ID NO: 21044 - DNA, 21 bp, Homo sapiens
gaatacatgaaccggaggaga

SEQ ID NO: 21045 - RNA, 21 nt, RNAi
auacaugaaccggaggagauu

SEQ ID NO: 21046 - RNA, 21 nt, RNAi
uuuauguacuuggccuccucu

SEQ ID NO: 21047 - DNA, 21 bp, Homo sapiens
gaaccggaggagaaggcacag

SEQ ID NO: 21048 - RNA, 21 nt, RNAi
accggaggagaaggcacaguu

SEQ ID NO: 21049 - RNA, 21 nt, RNAi
uuuggccuccucuuccguguc

SEQ ID NO: 21050 - DNA, 21 bp, Homo sapiens
gaggagaaggcacagtccacc

SEQ ID NO: 21051 - RNA, 21 nt, RNAi
ggagaaggcacaguccaccuu

SEQ ID NO: 21052 - RNA, 21 nt, RNAi
uuccucuuccgugucaggugg

SEQ ID NO: 21053 - DNA, 21 bp, Homo sapiens
gagaaggcacagtccacctca

SEQ ID NO: 21054 - RNA, 21 nt, RNAi
gaaggcacaguccaccucauu

SEQ ID NO: 21055 - RNA, 21 nt, RNAi
uucuuccgugucagguggagu

SEQ ID NO: 21056 - DNA, 21 bp, Homo sapiens
gaaggcacagtccacctcatc

SEQ ID NO: 21057 - RNA, 21 nt, RNAi
aggcacaguccaccucaucuu

SEQ ID NO: 21058 - RNA, 21 nt, RNAi
uuuccgugucagguggaguag

SEQ ID NO: 21059 - DNA, 21 bp, Homo sapiens
gactatgaatatatgaatcgg

SEQ ID NO: 21060 - RNA, 21 nt, RNAi
cuaugaauauaugaaucgguu

SEQ ID NO: 21061 - RNA, 21 nt, RNAi
uugauacuuauauacuuagcc

SEQ ID NO: 21062 - DNA, 21 bp, Homo sapiens
gaatatatgaatcggcaacga

SEQ ID NO: 21063 - RNA, 21 nt, RNAi
auauaugaaucggcaacgauu

SEQ ID NO: 21064 - RNA, 21 nt, RNAi
uuuauauacuuagccguugcu

SEQ ID NO: 21065 - DNA, 21 bp, Homo sapiens
gaatcggcaacgagatggagg

SEQ ID NO: 21066 - RNA, 21 nt, RNAi
aucggcaacgagauggagguu

SEQ ID NO: 21067 - RNA, 21 nt, RNAi
uuuagccguugcucuaccucc

SEQ ID NO: 21068 - DNA, 21 bp, Homo sapiens
gaggctacagactctgccttt

SEQ ID NO: 21069 - RNA, 21 nt, RNAi
ggcuacagacucugccuuuuu

SEQ ID NO: 21070 - RNA, 21 nt, RNAi
uuccgaugucugagacggaaa

SEQ ID NO: 21071 - DNA, 21 bp, Homo sapiens
gattactggcatagcaggctt

SEQ ID NO: 21072 - RNA, 21 nt, RNAi
uuacuggcauagcaggcuuuu

SEQ ID NO: 21073 - RNA, 21 nt, RNAi
uuaaugaccguaucguccgaa

SEQ ID NO: 21074 - DNA, 21 bp, Homo sapiens
gagcatttaatggcagctagt

SEQ ID NO: 21075 - RNA, 21 nt, RNAi
gcauuuaauggcagcuaguuu

SEQ ID NO: 21076 - RNA, 21 nt, RNAi
uucguaaauuaccgucgauca

SEQ ID NO: 21077 - DNA, 21 bp, Homo sapiens
gacaattccattcaatctttg

SEQ ID NO: 21078 - RNA, 21 nt, RNAi
caauuccauucaaucuuuguu

SEQ ID NO: 21079 - RNA, 21 nt, RNAi
uuguuaagguaaguuagaaac

SEQ ID NO: 21080 - DNA, 21 bp, Homo sapiens
gagatatgaaggattactctc

SEQ ID NO: 21081 - RNA, 21 nt, RNAi
gauaugaaggauuacucucuu

SEQ ID NO: 21082 - RNA, 21 nt, RNAi
uucuauacuuccuaaugagag

SEQ ID NO: 21083 - DNA, 21 bp, Homo sapiens
gatatgaaggattactctcca

SEQ ID NO: 21084 - RNA, 21 nt, RNAi
uaugaaggauuacucuccauu

SEQ ID NO: 21085 - RNA, 21 nt, RNAi
uuauacuuccuaaugagaggu

SEQ ID NO: 21086 - DNA, 21 bp, Homo sapiens
gaaggattactctccatatcc

SEQ ID NO: 21087 - RNA, 21 nt, RNAi
aggauuacucuccauauccuu

SEQ ID NO: 21088 - RNA, 21 nt, RNAi
uuuccuaaugagagguauagg

SEQ ID NO: 21089 - DNA, 21 bp, Homo sapiens
gactacttggaactaggctct

SEQ ID NO: 21090 - RNA, 21 nt, RNAi
cuacuuggaacuaggcucuuu

SEQ ID NO: 21091 - RNA, 21 nt, RNAi
uugaugaaccuugauccgaga

SEQ ID NO: 21092 - DNA, 21 bp, Homo sapiens
gaactaggctcttatgtgtgc

SEQ ID NO: 21093 - RNA, 21 nt, RNAi
acuaggcucuuaugugugcuu

SEQ ID NO: 21094 - RNA, 21 nt, RNAi
uuugauccgagaauacacacg

SEQ ID NO: 21095 - DNA, 21 bp, Homo sapiens
gactgtcaagaagaggaaagg

SEQ ID NO: 21096 - RNA, 21 nt, RNAi
cugucaagaagaggaaagguu

SEQ ID NO: 21097 - RNA, 21 nt, RNAi
uugacaguucuucuccuuucc

SEQ ID NO: 21098 - DNA, 21 bp, Homo sapiens
gaggaaacctagcagaggaaa

SEQ ID NO: 21099 - RNA, 21 nt, RNAi
ggaaaccuagcagaggaaauu

SEQ ID NO: 21100 - RNA, 21 nt, RNAi
uuccuuuggaucgucuccuuu

SEQ ID NO: 21101 - DNA, 21 bp, Homo sapiens
gaaacctagcagaggaaagtg

SEQ ID NO: 21102 - RNA, 21 nt, RNAi
aaccuagcagaggaaaguguu

SEQ ID NO: 21103 - RNA, 21 nt, RNAi
uuuuggaucgucuccuuucac

SEQ ID NO: 21104 - DNA, 21 bp, Homo sapiens
gaagaaagaggttaggagtag

SEQ ID NO: 21105 - RNA, 21 nt, RNAi
agaaagagguuaggaguaguu

SEQ ID NO: 21106 - RNA, 21 nt, RNAi
uuucuuucuccaauccucauc

SEQ ID NO: 21107 - DNA, 21 bp, Homo sapiens
gaaagaggttaggagtagata

SEQ ID NO: 21108 - RNA, 21 nt, RNAi
aagagguuaggaguagauauu

SEQ ID NO: 21109 - RNA, 21 nt, RNAi
uuuucuccaauccucaucuau

SEQ ID NO: 21110 - DNA, 21 bp, Homo sapiens
gaggttaggagtagatattga

SEQ ID NO: 21111 - RNA, 21 nt, RNAi
gguuaggaguagauauugauu

SEQ ID NO: 21112 - RNA, 21 nt, RNAi
uuccaauccucaucuauaacu

SEQ ID NO: 21113 - DNA, 21 bp, Homo sapiens
gagccaggcatcatactaaac

SEQ ID NO: 21114 - RNA, 21 nt, RNAi
gccaggcaucauacuaaacuu

SEQ ID NO: 21115 - RNA, 21 nt, RNAi
uucgguccguaguaugauuug

SEQ ID NO: 21116 - DNA, 21 bp, Homo sapiens
gaggctgaggcagaaggatta

SEQ ID NO: 21117 - RNA, 21 nt, RNAi
ggcugaggcagaaggauuauu

SEQ ID NO: 21118 - RNA, 21 nt, RNAi
uuccgacuccgucuuccuaau

SEQ ID NO: 21119 - DNA, 21 bp, Homo sapiens
gaggcagaaggattacctgag

SEQ ID NO: 21120 - RNA, 21 nt, RNAi
ggcagaaggauuaccugaguu

SEQ ID NO: 21121 - RNA, 21 nt, RNAi
uuccgucuuccuaauggacuc

SEQ ID NO: 21122 - DNA, 21 bp, Homo sapiens
gaaggattacctgaggcaagg

SEQ ID NO: 21123 - RNA, 21 nt, RNAi
aggauuaccugaggcaagguu

SEQ ID NO: 21124 - RNA, 21 nt, RNAi
uuuccuaauggacuccguucc

SEQ ID NO: 21125 - DNA, 21 bp, Homo sapiens
gattacctgaggcaaggagtt

SEQ ID NO: 21126 - RNA, 21 nt, RNAi
uuaccugaggcaaggaguuuu

SEQ ID NO: 21127 - RNA, 21 nt, RNAi
uuaauggacuccguuccucaa

SEQ ID NO: 21128 - DNA, 21 bp, Homo sapiens
gaggcaaggagtttgagacca

SEQ ID NO: 21129 - RNA, 21 nt, RNAi
ggcaaggaguuugagaccauu

SEQ ID NO: 21130 - RNA, 21 nt, RNAi
uuccguuccucaaacucuggu

SEQ ID NO: 21131 - DNA, 21 bp, Homo sapiens
gagtttgagaccagcttagcc

SEQ ID NO: 21132 - RNA, 21 nt, RNAi
guuugagaccagcuuagccuu

SEQ ID NO: 21133 - RNA, 21 nt, RNAi
uucaaacucuggucgaaucgg

SEQ ID NO: 21134 - DNA, 21 bp, Homo sapiens
gagaccagcttagccaacata

SEQ ID NO: 21135 - RNA, 21 nt, RNAi
gaccagcuuagccaacauauu

SEQ ID NO: 21136 - RNA, 21 nt, RNAi
uucuggucgaaucgguuguau

SEQ ID NO: 21137 - DNA, 21 bp, Homo sapiens
gaccagcttagccaacatagt

SEQ ID NO: 21138 - RNA, 21 nt, RNAi
ccagcuuagccaacauaguuu

SEQ ID NO: 21139 - RNA, 21 nt, RNAi
uuggucgaaucgguuguauca

SEQ ID NO: 21140 - DNA, 21 bp, Homo sapiens
taccagacactgtacaagctc

SEQ ID NO: 21141 - RNA, 21 nt, RNAi
ccagacacuguacaagcucuu

SEQ ID NO: 21142 - RNA, 21 nt, RNAi
uuggucugugacauguucgag

SEQ ID NO: 21143 - DNA, 21 bp, Homo sapiens
tacaagctctacgagaggtgt

SEQ ID NO: 21144 - RNA, 21 nt, RNAi
caagcucuacgagagguguuu

SEQ ID NO: 21145 - RNA, 21 nt, RNAi
uuguucgagaugcucuccaca

SEQ ID NO: 21146 - DNA, 21 bp, Homo sapiens
tacgagaggtgtgaggtggtg

SEQ ID NO: 21147 - RNA, 21 nt, RNAi
cgagaggugugaggugguguu

SEQ ID NO: 21148 - RNA, 21 nt, RNAi
uugcucuccacacuccaccac

SEQ ID NO: 21149 - DNA, 21 bp, Homo sapiens
tatgtcctcgtggccatgaat

SEQ ID NO: 21150 - RNA, 21 nt, RNAi
uguccucguggccaugaauuu

SEQ ID NO: 21151 - RNA, 21 nt, RNAi
uuacaggagcaccgguacuua

SEQ ID NO: 21152 - DNA, 21 bp, Homo sapiens
tataacaccaactccagccac

SEQ ID NO: 21153 - RNA, 21 nt, RNAi
uaacaccaacuccagccacuu

SEQ ID NO: 21154 - RNA, 21 nt, RNAi
uuauugugguugaggucggug

SEQ ID NO: 21155 - DNA, 21 bp, Homo sapiens
taacaccaactccagccacgc

SEQ ID NO: 21156 - RNA, 21 nt, RNAi
acaccaacuccagccacgcuu

SEQ ID NO: 21157 - RNA, 21 nt, RNAi
uuugugguugaggucggugcg

SEQ ID NO: 21158 - DNA, 21 bp, Homo sapiens
tattgagaagaacgataagct

SEQ ID NO: 21159 - RNA, 21 nt, RNAi
uugagaagaacgauaagcuuu

SEQ ID NO: 21160 - RNA, 21 nt, RNAi
uuaacucuucuugcuauucga

SEQ ID NO: 21161 - DNA, 21 bp, Homo sapiens
taagctttgtcacatggacac

SEQ ID NO: 21162 - RNA, 21 nt, RNAi
agcuuugucacauggacacuu

SEQ ID NO: 21163 - RNA, 21 nt, RNAi
uuucgaaacaguguaccugug

SEQ ID NO: 21164 - DNA, 21 bp, Homo sapiens
tagtggtgaaggacaatggca

SEQ ID NO: 21165 - RNA, 21 nt, RNAi
guggugaaggacaauggcauu

SEQ ID NO: 21166 - RNA, 21 nt, RNAi
uucaccacuuccuguuaccgu

SEQ ID NO: 21167 - DNA, 21 bp, Homo sapiens
tacctcgctgtccacagcctc

SEQ ID NO: 21168 - RNA, 21 nt, RNAi
ccucgcuguccacagccucuu

SEQ ID NO: 21169 - RNA, 21 nt, RNAi
uuggagcgacaggugucggag

SEQ ID NO: 21170 - DNA, 21 bp, Homo sapiens
tacaacaagctaactttccag

SEQ ID NO: 21171 - RNA, 21 nt, RNAi
caacaagcuaacuuuccaguu

SEQ ID NO: 21172 - RNA, 21 nt, RNAi
uuguuguucgauugaaagguc

SEQ ID NO: 21173 - DNA, 21 bp, Homo sapiens
tatcagtatggaggagtttgt

SEQ ID NO: 21174 - RNA, 21 nt, RNAi
ucaguauggaggaguuuguuu

SEQ ID NO: 21175 - RNA, 21 nt, RNAi
uuagucauaccuccucaaaca

SEQ ID NO: 21176 - DNA, 21 bp, Homo sapiens
tatggaggagtttgtgtagcc

SEQ ID NO: 21177 - RNA, 21 nt, RNAi
uggaggaguuuguguagccuu

SEQ ID NO: 21178 - RNA, 21 nt, RNAi
uuaccuccucaaacacaucgg

SEQ ID NO: 21179 - DNA, 21 bp, Homo sapiens
taactttgtggtggatcaaac

SEQ ID NO: 21180 - RNA, 21 nt, RNAi
acuuugugguggaucaaacuu

SEQ ID NO: 21181 - RNA, 21 nt, RNAi
uuugaaacaccaccuaguuug

SEQ ID NO: 21182 - DNA, 21 bp, Homo sapiens
tacctgaacatccagtcctgg

SEQ ID NO: 21183 - RNA, 21 nt, RNAi
ccugaacauccaguccugguu

SEQ ID NO: 21184 - RNA, 21 nt, RNAi
uuggacuuguaggucaggacc

SEQ ID NO: 21185 - DNA, 21 bp, Homo sapiens
tatataagtgccaataggcag

SEQ ID NO: 21186 - RNA, 21 nt, RNAi
uauaagugccaauaggcaguu

SEQ ID NO: 21187 - RNA, 21 nt, RNAi
uuauauucacgguuauccguc

SEQ ID NO: 21188 - DNA, 21 bp, Homo sapiens
tataagtgccaataggcagct

SEQ ID NO: 21189 - RNA, 21 nt, RNAi
uaagugccaauaggcagcuuu

SEQ ID NO: 21190 - RNA, 21 nt, RNAi
uuauucacgguuauccgucga

SEQ ID NO: 21191 - DNA, 21 bp, Homo sapiens
taagtgccaataggcagctct

SEQ ID NO: 21192 - RNA, 21 nt, RNAi
agugccaauaggcagcucuuu

SEQ ID NO: 21193 - RNA, 21 nt, RNAi
uuucacgguuauccgucgaga

SEQ ID NO: 21194 - DNA, 21 bp, Homo sapiens
taggcagctctgctaccacca

SEQ ID NO: 21195 - RNA, 21 nt, RNAi
ggcagcucugcuaccaccauu

SEQ ID NO: 21196 - RNA, 21 nt, RNAi
uuccgucgagacgaugguggu

SEQ ID NO: 21197 - DNA, 21 bp, Homo sapiens
taccaccactctttgaactgg

SEQ ID NO: 21198 - RNA, 21 nt, RNAi
ccaccacucuuugaacugguu

SEQ ID NO: 21199 - RNA, 21 nt, RNAi
uugguggugagaaacuugacc

SEQ ID NO: 21200 - DNA, 21 bp, Homo sapiens
tacggaagagcgactagacat

SEQ ID NO: 21201 - RNA, 21 nt, RNAi
cggaagagcgacuagacauuu

SEQ ID NO: 21202 - RNA, 21 nt, RNAi
uugccuucucgcugaucugua

SEQ ID NO: 21203 - DNA, 21 bp, Homo sapiens
tagacatcaagcataatcggc

SEQ ID NO: 21204 - RNA, 21 nt, RNAi
gacaucaagcauaaucggcuu

SEQ ID NO: 21205 - RNA, 21 nt, RNAi
uucuguaguucguauuagccg

SEQ ID NO: 21206 - DNA, 21 bp, Homo sapiens
tatagccgaggaggtgtctgt

SEQ ID NO: 21207 - RNA, 21 nt, RNAi
uagccgaggaggugucuguuu

SEQ ID NO: 21208 - RNA, 21 nt, RNAi
uuaucggcuccuccacagaca

SEQ ID NO: 21209 - DNA, 21 bp, Homo sapiens
tagccgaggaggtgtctgtgt

SEQ ID NO: 21210 - RNA, 21 nt, RNAi
gccgaggaggugucuguguuu

SEQ ID NO: 21211 - RNA, 21 nt, RNAi
uucggcuccuccacagacaca

SEQ ID NO: 21212 - DNA, 21 bp, Homo sapiens
taaaggaccagagcttcaaga

SEQ ID NO: 21213 - RNA, 21 nt, RNAi
aaggaccagagcuucaagauu

SEQ ID NO: 21214 - RNA, 21 nt, RNAi
uuuuccuggucucgaaguucu

SEQ ID NO: 21215 - DNA, 21 bp, Homo sapiens
taggacaaacactggtgctga

SEQ ID NO: 21216 - RNA, 21 nt, RNAi
ggacaaacacuggugcugauu

SEQ ID NO: 21217 - RNA, 21 nt, RNAi
uuccuguuugugaccacgacu

SEQ ID NO: 21218 - DNA, 21 bp, Homo sapiens
tagcaggattggtagtgattt

SEQ ID NO: 21219 - RNA, 21 nt, RNAi
gcaggauugguagugauuuuu

SEQ ID NO: 21220 - RNA, 21 nt, RNAi
uucguccuaaccaucacuaaa

SEQ ID NO: 21221 - DNA, 21 bp, Homo sapiens
tatgaggcgatacttggaacg

SEQ ID NO: 21222 - RNA, 21 nt, RNAi
ugaggcgauacuuggaacguu

SEQ ID NO: 21223 - RNA, 21 nt, RNAi
uuacuccgcuaugaaccuugc

SEQ ID NO: 21224 - DNA, 21 bp, Homo sapiens
taacaaagtcttggccagaat

SEQ ID NO: 21225 - RNA, 21 nt, RNAi
acaaagucuuggccagaauuu

SEQ ID NO: 21226 - RNA, 21 nt, RNAi
uuuguuucagaaccggucuua

SEQ ID NO: 21227 - DNA, 21 bp, Homo sapiens
taaggaagcttaaagtgcttg

SEQ ID NO: 21228 - RNA, 21 nt, RNAi
aggaagcuuaaagugcuuguu

SEQ ID NO: 21229 - RNA, 21 nt, RNAi
uuuccuucgaauuucacgaac

SEQ ID NO: 21230 - DNA, 21 bp, Homo sapiens
taaagtcattgaggacaagag

SEQ ID NO: 21231 - RNA, 21 nt, RNAi
aagucauugaggacaagaguu

SEQ ID NO: 21232 - RNA, 21 nt, RNAi
uuuucaguaacuccuguucuc

SEQ ID NO: 21233 - DNA, 21 bp, Homo sapiens
tatgctggccattggcagcct

SEQ ID NO: 21234 - RNA, 21 nt, RNAi
ugcuggccauuggcagccuuu

SEQ ID NO: 21235 - RNA, 21 nt, RNAi
uuacgaccgguaaccgucgga

SEQ ID NO: 21236 - DNA, 21 bp, Homo sapiens
tactaccttgaggaacatggt

SEQ ID NO: 21237 - RNA, 21 nt, RNAi
cuaccuugaggaacaugguuu

SEQ ID NO: 21238 - RNA, 21 nt, RNAi
uugauggaacuccuuguacca

SEQ ID NO: 21239 - DNA, 21 bp, Homo sapiens
taccttgaggaacatggtatg

SEQ ID NO: 21240 - RNA, 21 nt, RNAi
ccuugaggaacaugguauguu

SEQ ID NO: 21241 - RNA, 21 nt, RNAi
uuggaacuccuuguaccauac

SEQ ID NO: 21242 - DNA, 21 bp, Homo sapiens
tatggtgcatagaaacctggc

SEQ ID NO: 21243 - RNA, 21 nt, RNAi
uggugcauagaaaccuggcuu

SEQ ID NO: 21244 - RNA, 21 nt, RNAi
uuaccacguaucuuuggaccg

SEQ ID NO: 21245 - DNA, 21 bp, Homo sapiens
taagcagctgctatacagtga

SEQ ID NO: 21246 - RNA, 21 nt, RNAi
agcagcugcuauacagugauu

SEQ ID NO: 21247 - RNA, 21 nt, RNAi
uuucgucgacgauaugucacu

SEQ ID NO: 21248 - DNA, 21 bp, Homo sapiens
tatacagtgaggccaagactc

SEQ ID NO: 21249 - RNA, 21 nt, RNAi
uacagugaggccaagacucuu

SEQ ID NO: 21250 - RNA, 21 nt, RNAi
uuaugucacuccgguucugag

SEQ ID NO: 21251 - DNA, 21 bp, Homo sapiens
tacagtgaggccaagactcca

SEQ ID NO: 21252 - RNA, 21 nt, RNAi
cagugaggccaagacuccauu

SEQ ID NO: 21253 - RNA, 21 nt, RNAi
uugucacuccgguucugaggu

SEQ ID NO: 21254 - DNA, 21 bp, Homo sapiens
tacacacaccagagtgatgtc

SEQ ID NO: 21255 - RNA, 21 nt, RNAi
cacacaccagagugaugucuu

SEQ ID NO: 21256 - RNA, 21 nt, RNAi
uuguguguggucucacuacag

SEQ ID NO: 21257 - DNA, 21 bp, Homo sapiens
tacgattggctgaagtaccag

SEQ ID NO: 21258 - RNA, 21 nt, RNAi
cgauuggcugaaguaccaguu

SEQ ID NO: 21259 - RNA, 21 nt, RNAi
uugcuaaccgacuucaugguc

SEQ ID NO: 21260 - DNA, 21 bp, Homo sapiens
taccagacctgctagagaagg

SEQ ID NO: 21261 - RNA, 21 nt, RNAi
ccagaccugcuagagaagguu

SEQ ID NO: 21262 - RNA, 21 nt, RNAi
uuggucuggacgaucucuucc

SEQ ID NO: 21263 - DNA, 21 bp, Homo sapiens
tacatggtgatggtcaagtgt

SEQ ID NO: 21264 - RNA, 21 nt, RNAi
cauggugauggucaaguguuu

SEQ ID NO: 21265 - RNA, 21 nt, RNAi
uuguaccacuaccaguucaca

SEQ ID NO: 21266 - DNA, 21 bp, Homo sapiens
taaagaactagccaatgagtt

SEQ ID NO: 21267 - RNA, 21 nt, RNAi
aagaacuagccaaugaguuuu

SEQ ID NO: 21268 - RNA, 21 nt, RNAi
uuuucuugaucgguuacucaa

SEQ ID NO: 21269 - DNA, 21 bp, Homo sapiens
tagccaatgagttcaccagga

SEQ ID NO: 21270 - RNA, 21 nt, RNAi
gccaaugaguucaccaggauu

SEQ ID NO: 21271 - RNA, 21 nt, RNAi
uucgguuacucaagugguccu

SEQ ID NO: 21272 - DNA, 21 bp, Homo sapiens
tatctggtcataaagagagag

SEQ ID NO: 21273 - RNA, 21 nt, RNAi
ucuggucauaaagagagaguu

SEQ ID NO: 21274 - RNA, 21 nt, RNAi
uuagaccaguauuucucucuc

SEQ ID NO: 21275 - DNA, 21 bp, Homo sapiens
tagaggaagtagagctggagc

SEQ ID NO: 21276 - RNA, 21 nt, RNAi
gaggaaguagagcuggagcuu

SEQ ID NO: 21277 - RNA, 21 nt, RNAi
uucuccuucaucucgaccucg

SEQ ID NO: 21278 - DNA, 21 bp, Homo sapiens
tagagctggagccagaactag

SEQ ID NO: 21279 - RNA, 21 nt, RNAi
gagcuggagccagaacuaguu

SEQ ID NO: 21280 - RNA, 21 nt, RNAi
uucucgaccucggucuugauc

SEQ ID NO: 21281 - DNA, 21 bp, Homo sapiens
tagacctagacctagacttgg

SEQ ID NO: 21282 - RNA, 21 nt, RNAi
gaccuagaccuagacuugguu

SEQ ID NO: 21283 - RNA, 21 nt, RNAi
uucuggaucuggaucugaacc

SEQ ID NO: 21284 - DNA, 21 bp, Homo sapiens
tagacctagacttggaagcag

SEQ ID NO: 21285 - RNA, 21 nt, RNAi
gaccuagacuuggaagcaguu

SEQ ID NO: 21286 - RNA, 21 nt, RNAi
uucuggaucugaaccuucguc

SEQ ID NO: 21287 - DNA, 21 bp, Homo sapiens
tagacttggaagcagaggagg

SEQ ID NO: 21288 - RNA, 21 nt, RNAi
gacuuggaagcagaggagguu

SEQ ID NO: 21289 - RNA, 21 nt, RNAi
uucugaaccuucgucuccucc

SEQ ID NO: 21290 - DNA, 21 bp, Homo sapiens
taccagttggaacacttaatc

SEQ ID NO: 21291 - RNA, 21 nt, RNAi
ccaguuggaacacuuaaucuu

SEQ ID NO: 21292 - RNA, 21 nt, RNAi
uuggucaaccuugugaauuag

SEQ ID NO: 21293 - DNA, 21 bp, Homo sapiens
taagtccatcatctggataca

SEQ ID NO: 21294 - RNA, 21 nt, RNAi
aguccaucaucuggauacauu

SEQ ID NO: 21295 - RNA, 21 nt, RNAi
uuucagguaguagaccuaugu

SEQ ID NO: 21296 - DNA, 21 bp, Homo sapiens
taacaggctctgaggctgagc

SEQ ID NO: 21297 - RNA, 21 nt, RNAi
acaggcucugaggcugagcuu

SEQ ID NO: 21298 - RNA, 21 nt, RNAi
uuuguccgagacuccgacucg

SEQ ID NO: 21299 - DNA, 21 bp, Homo sapiens
tagaggaagaggatgtcaacg

SEQ ID NO: 21300 - RNA, 21 nt, RNAi
gaggaagaggaugucaacguu

SEQ ID NO: 21301 - RNA, 21 nt, RNAi
uucuccuucuccuacaguugc

SEQ ID NO: 21302 - DNA, 21 bp, Homo sapiens
tatgtcatgccagatacacac

SEQ ID NO: 21303 - RNA, 21 nt, RNAi
ugucaugccagauacacacuu

SEQ ID NO: 21304 - RNA, 21 nt, RNAi
uuacaguacggucuaugugug

SEQ ID NO: 21305 - DNA, 21 bp, Homo sapiens
tacacacctcaaaggtactcc

SEQ ID NO: 21306 - RNA, 21 nt, RNAi
cacaccucaaagguacuccuu

SEQ ID NO: 21307 - RNA, 21 nt, RNAi
uuguguggaguuuccaugagg

SEQ ID NO: 21308 - DNA, 21 bp, Homo sapiens
tactgaagaagaagatgaaga

SEQ ID NO: 21309 - RNA, 21 nt, RNAi
cugaagaagaagaugaagauu

SEQ ID NO: 21310 - RNA, 21 nt, RNAi
uugacuucuucuucuacuucu

SEQ ID NO: 21311 - DNA, 21 bp, Homo sapiens
tatgaatacatgaaccggagg

SEQ ID NO: 21312 - RNA, 21 nt, RNAi
ugaauacaugaaccggagguu

SEQ ID NO: 21313 - RNA, 21 nt, RNAi
uuacuuauguacuuggccucc

SEQ ID NO: 21314 - DNA, 21 bp, Homo sapiens
tacatgaaccggaggagaagg

SEQ ID NO: 21315 - RNA, 21 nt, RNAi
caugaaccggaggagaagguu

SEQ ID NO: 21316 - RNA, 21 nt, RNAi
uuguacuuggccuccucuucc

SEQ ID NO: 21317 - DNA, 21 bp, Homo sapiens
tatatgaatcggcaacgagat

SEQ ID NO: 21318 - RNA, 21 nt, RNAi
uaugaaucggcaacgagauuu

SEQ ID NO: 21319 - RNA, 21 nt, RNAi
uuauacuuagccguugcucua

SEQ ID NO: 21320 - DNA, 21 bp, Homo sapiens
tatgaatcggcaacgagatgg

SEQ ID NO: 21321 - RNA, 21 nt, RNAi
ugaaucggcaacgagaugguu

SEQ ID NO: 21322 - RNA, 21 nt, RNAi
uuacuuagccguugcucuacc

SEQ ID NO: 21323 - DNA, 21 bp, Homo sapiens
tacgtagcttagaggctacag

SEQ ID NO: 21324 - RNA, 21 nt, RNAi
cguagcuuagaggcuacaguu

SEQ ID NO: 21325 - RNA, 21 nt, RNAi
uugcaucgaaucuccgauguc

SEQ ID NO: 21326 - DNA, 21 bp, Homo sapiens
tagcttagaggctacagactc

SEQ ID NO: 21327 - RNA, 21 nt, RNAi
gcuuagaggcuacagacucuu

SEQ ID NO: 21328 - RNA, 21 nt, RNAi
uucgaaucuccgaugucugag

SEQ ID NO: 21329 - DNA, 21 bp, Homo sapiens
tagaggctacagactctgcct

SEQ ID NO: 21330 - RNA, 21 nt, RNAi
gaggcuacagacucugccuuu

SEQ ID NO: 21331 - RNA, 21 nt, RNAi
uucuccgaugucugagacgga

SEQ ID NO: 21332 - DNA, 21 bp, Homo sapiens
tacagactctgcctttgataa

SEQ ID NO: 21333 - RNA, 21 nt, RNAi
cagacucugccuuugauaauu

SEQ ID NO: 21334 - RNA, 21 nt, RNAi
uugucugagacggaaacuauu

SEQ ID NO: 21335 - DNA, 21 bp, Homo sapiens
taatggcagctagtgccttta

SEQ ID NO: 21336 - RNA, 21 nt, RNAi
auggcagcuagugccuuuauu

SEQ ID NO: 21337 - RNA, 21 nt, RNAi
uuuaccgucgaucacggaaau

SEQ ID NO: 21338 - DNA, 21 bp, Homo sapiens
tatggtatgtagccagctgtg

SEQ ID NO: 21339 - RNA, 21 nt, RNAi
ugguauguagccagcuguguu

SEQ ID NO: 21340 - RNA, 21 nt, RNAi
uuaccauacaucggucgacac

SEQ ID NO: 21341 - DNA, 21 bp, Homo sapiens
tatgtagccagctgtgcactt

SEQ ID NO: 21342 - RNA, 21 nt, RNAi
uguagccagcugugcacuuuu

SEQ ID NO: 21343 - RNA, 21 nt, RNAi
uuacaucggucgacacgugaa

SEQ ID NO: 21344 - DNA, 21 bp, Homo sapiens
tagccagctgtgcactttctt

SEQ ID NO: 21345 - RNA, 21 nt, RNAi
gccagcugugcacuuucuuuu

SEQ ID NO: 21346 - RNA, 21 nt, RNAi
uucggucgacacgugaaagaa

SEQ ID NO: 21347 - DNA, 21 bp, Homo sapiens
tatgaaggattactctccata

SEQ ID NO: 21348 - RNA, 21 nt, RNAi
ugaaggauuacucuccauauu

SEQ ID NO: 21349 - RNA, 21 nt, RNAi
uuacuuccuaaugagagguau

SEQ ID NO: 21350 - DNA, 21 bp, Homo sapiens
tacttggaactaggctcttat

SEQ ID NO: 21351 - RNA, 21 nt, RNAi
cuuggaacuaggcucuuauuu

SEQ ID NO: 21352 - RNA, 21 nt, RNAi
uugaaccuugauccgagaaua

SEQ ID NO: 21353 - DNA, 21 bp, Homo sapiens
taggctcttatgtgtgccttt

SEQ ID NO: 21354 - RNA, 21 nt, RNAi
ggcucuuaugugugccuuuuu

SEQ ID NO: 21355 - RNA, 21 nt, RNAi
uuccgagaauacacacggaaa

SEQ ID NO: 21356 - DNA, 21 bp, Homo sapiens
tagcagaggaaagtgtaattt

SEQ ID NO: 21357 - RNA, 21 nt, RNAi
gcagaggaaaguguaauuuuu

SEQ ID NO: 21358 - RNA, 21 nt, RNAi
uucgucuccuuucacauuaaa

SEQ ID NO: 21359 - DNA, 21 bp, Homo sapiens
taactatgagccaggcatcat

SEQ ID NO: 21360 - RNA, 21 nt, RNAi
acuaugagccaggcaucauuu

SEQ ID NO: 21361 - RNA, 21 nt, RNAi
uuugauacucgguccguagua

SEQ ID NO: 21362 - DNA, 21 bp, Homo sapiens
tatgagccaggcatcatacta

SEQ ID NO: 21363 - RNA, 21 nt, RNAi
ugagccaggcaucauacuauu

SEQ ID NO: 21364 - RNA, 21 nt, RNAi
uuacucgguccguaguaugau

SEQ ID NO: 21365 - DNA, 21 bp, Homo sapiens
tacattatctcacttagtcct

SEQ ID NO: 21366 - RNA, 21 nt, RNAi
cauuaucucacuuaguccuuu

SEQ ID NO: 21367 - RNA, 21 nt, RNAi
uuguaauagagugaaucagga

SEQ ID NO: 21368 - DNA, 21 bp, Homo sapiens
tatctcacttagtcctttatc

SEQ ID NO: 21369 - RNA, 21 nt, RNAi
ucucacuuaguccuuuaucuu

SEQ ID NO: 21370 - RNA, 21 nt, RNAi
uuagagugaaucaggaaauag

SEQ ID NO: 21371 - DNA, 21 bp, Homo sapiens
tacctgaggcaaggagtttga

SEQ ID NO: 21372 - RNA, 21 nt, RNAi
ccugaggcaaggaguuugauu

SEQ ID NO: 21373 - RNA, 21 nt, RNAi
uuggacuccguuccucaaacu

SEQ ID NO: 21374 - DNA, 21 bp, Homo sapiens
aatgaattctctactctacca

SEQ ID NO: 21375 - RNA, 21 nt, RNAi
ugaauucucuacucuaccauu

SEQ ID NO: 21376 - RNA, 21 nt, RNAi
uuacuuaagagaugagauggu

SEQ ID NO: 21377 - DNA, 21 bp, Homo sapiens
aagtttgccatcttcgtcatg

SEQ ID NO: 21378 - RNA, 21 nt, RNAi
guuugccaucuucgucauguu

SEQ ID NO: 21379 - RNA, 21 nt, RNAi
uucaaacgguagaagcaguac

SEQ ID NO: 21380 - DNA, 21 bp, Homo sapiens
aactttgtggtggatcaaaca

SEQ ID NO: 21381 - RNA, 21 nt, RNAi
cuuugugguggaucaaacauu

SEQ ID NO: 21382 - RNA, 21 nt, RNAi
uugaaacaccaccuaguuugu

SEQ ID NO: 21383 - DNA, 21 bp, Homo sapiens
aagctcaatgtcttccggaca

SEQ ID NO: 21384 - RNA, 21 nt, RNAi
gcucaaugucuuccggacauu

SEQ ID NO: 21385 - RNA, 21 nt, RNAi
uucgaguuacagaaggccugu

SEQ ID NO: 21386 - DNA, 21 bp, Homo sapiens
aatttgacaaccattggaggc

SEQ ID NO: 21387 - RNA, 21 nt, RNAi
uuugacaaccauuggaggcuu

SEQ ID NO: 21388 - RNA, 21 nt, RNAi
uuaaacuguugguaaccuccg

SEQ ID NO: 21389 - DNA, 21 bp, Homo sapiens
aacttgaatgtcacatctctg

SEQ ID NO: 21390 - RNA, 21 nt, RNAi
cuugaaugucacaucucuguu

SEQ ID NO: 21391 - RNA, 21 nt, RNAi
uugaacuuacaguguagagac

SEQ ID NO: 21392 - DNA, 21 bp, Homo sapiens
aagagcgactagacatcaagc

SEQ ID NO: 21393 - RNA, 21 nt, RNAi
gagcgacuagacaucaagcuu

SEQ ID NO: 21394 - RNA, 21 nt, RNAi
uucucgcugaucuguaguucg

SEQ ID NO: 21395 - DNA, 21 bp, Homo sapiens
aaattatagccgaggaggtgt

SEQ ID NO: 21396 - RNA, 21 nt, RNAi
auuauagccgaggagguguuu

SEQ ID NO: 21397 - RNA, 21 nt, RNAi
uuuaauaucggcuccuccaca

SEQ ID NO: 21398 - DNA, 21 bp, Homo sapiens
aattatagccgaggaggtgtc

SEQ ID NO: 21399 - RNA, 21 nt, RNAi
uuauagccgaggaggugucuu

SEQ ID NO: 21400 - RNA, 21 nt, RNAi
uuaauaucggcuccuccacag

SEQ ID NO: 21401 - DNA, 21 bp, Homo sapiens
aaaggaccagagcttcaagac

SEQ ID NO: 21402 - RNA, 21 nt, RNAi
aggaccagagcuucaagacuu

SEQ ID NO: 21403 - RNA, 21 nt, RNAi
uuuccuggucucgaaguucug

SEQ ID NO: 21404 - DNA, 21 bp, Homo sapiens
aaggaccagagcttcaagact

SEQ ID NO: 21405 - RNA, 21 nt, RNAi
ggaccagagcuucaagacuuu

SEQ ID NO: 21406 - RNA, 21 nt, RNAi
uuccuggucucgaaguucuga

SEQ ID NO: 21407 - DNA, 21 bp, Homo sapiens
aaggctaacaaagtcttggcc

SEQ ID NO: 21408 - RNA, 21 nt, RNAi
ggcuaacaaagucuuggccuu

SEQ ID NO: 21409 - RNA, 21 nt, RNAi
uuccgauuguuucagaaccgg

SEQ ID NO: 21410 - DNA, 21 bp, Homo sapiens
aagctgtgacagatcatatgc

SEQ ID NO: 21411 - RNA, 21 nt, RNAi
gcugugacagaucauaugcuu

SEQ ID NO: 21412 - RNA, 21 nt, RNAi
uucgacacugucuaguauacg

SEQ ID NO: 21413 - DNA, 21 bp, Homo sapiens
aaacgtgctactcaagtcacc

SEQ ID NO: 21414 - RNA, 21 nt, RNAi
acgugcuacucaagucaccuu

SEQ ID NO: 21415 - RNA, 21 nt, RNAi
uuugcacgaugaguucagugg

SEQ ID NO: 21416 - DNA, 21 bp, Homo sapiens
aagactccaattaagtggatg

SEQ ID NO: 21417 - RNA, 21 nt, RNAi
gacuccaauuaaguggauguu

SEQ ID NO: 21418 - RNA, 21 nt, RNAi
uucugagguuaauucaccuac

SEQ ID NO: 21419 - DNA, 21 bp, Homo sapiens
aactagccaatgagttcacca

SEQ ID NO: 21420 - RNA, 21 nt, RNAi
cuagccaaugaguucaccauu

SEQ ID NO: 21421 - RNA, 21 nt, RNAi
uugaucgguuacucaaguggu

SEQ ID NO: 21422 - DNA, 21 bp, Homo sapiens
aagaagctagaggaagtagag

SEQ ID NO: 21423 - RNA, 21 nt, RNAi
gaagcuagaggaaguagaguu

SEQ ID NO: 21424 - RNA, 21 nt, RNAi
uucuucgaucuccuucaucuc

SEQ ID NO: 21425 - DNA, 21 bp, Homo sapiens
aaagtgtcaatgtgtagaagc

SEQ ID NO: 21426 - RNA, 21 nt, RNAi
agugucaauguguagaagcuu

SEQ ID NO: 21427 - RNA, 21 nt, RNAi
uuucacaguuacacaucuucg

SEQ ID NO: 21428 - DNA, 21 bp, Homo sapiens
aagtgtcaatgtgtagaagcc

SEQ ID NO: 21429 - RNA, 21 nt, RNAi
gugucaauguguagaagccuu

SEQ ID NO: 21430 - RNA, 21 nt, RNAi
uucacaguuacacaucuucgg

SEQ ID NO: 21431 - DNA, 21 bp, Homo sapiens
aagaggatgtcaacggttatg

SEQ ID NO: 21432 - RNA, 21 nt, RNAi
gaggaugucaacgguuauguu

SEQ ID NO: 21433 - RNA, 21 nt, RNAi
uucuccuacaguugccaauac

SEQ ID NO: 21434 - DNA, 21 bp, Homo sapiens
aatacatgaaccggaggagaa

SEQ ID NO: 21435 - RNA, 21 nt, RNAi
uacaugaaccggaggagaauu

SEQ ID NO: 21436 - RNA, 21 nt, RNAi
uuauguacuuggccuccucuu

SEQ ID NO: 21437 - DNA, 21 bp, Homo sapiens
catcttcgtcatgttgaacta

SEQ ID NO: 21438 - RNA, 21 nt, RNAi
ucuucgucauguugaacuauu

SEQ ID NO: 21439 - RNA, 21 nt, RNAi
uuagaagcaguacaacuugau

SEQ ID NO: 21440 - DNA, 21 bp, Homo sapiens
cagctcaccgagattctgtca

SEQ ID NO: 21441 - RNA, 21 nt, RNAi
gcucaccgagauucugucauu

SEQ ID NO: 21442 - RNA, 21 nt, RNAi
uucgaguggcucuaagacagu

SEQ ID NO: 21443 - DNA, 21 bp, Homo sapiens
cagaagactgccagacattga

SEQ ID NO: 21444 - RNA, 21 nt, RNAi
gaagacugccagacauugauu

SEQ ID NO: 21445 - RNA, 21 nt, RNAi
uucuucugacggucuguaacu

SEQ ID NO: 21446 - DNA, 21 bp, Homo sapiens
cagtgtaatggtcactgcttt

SEQ ID NO: 21447 - RNA, 21 nt, RNAi
guguaauggucacugcuuuuu

SEQ ID NO: 21448 - RNA, 21 nt, RNAi
uucacauuaccagugacgaaa

SEQ ID NO: 21449 - DNA, 21 bp, Homo sapiens
caagtatcagtatggaggagt

SEQ ID NO: 21450 - RNA, 21 nt, RNAi
aguaucaguauggaggaguuu

SEQ ID NO: 21451 - RNA, 21 nt, RNAi
uuucauagucauaccuccuca

SEQ ID NO: 21452 - DNA, 21 bp, Homo sapiens
cataactttgtggtggatcaa

SEQ ID NO: 21453 - RNA, 21 nt, RNAi
uaacuuugugguggaucaauu

SEQ ID NO: 21454 - RNA, 21 nt, RNAi
uuauugaaacaccaccuaguu

SEQ ID NO: 21455 - DNA, 21 bp, Homo sapiens
caatgtcttccggacagtacg

SEQ ID NO: 21456 - RNA, 21 nt, RNAi
augucuuccggacaguacguu

SEQ ID NO: 21457 - RNA, 21 nt, RNAi
uuuacagaaggccugucaugc

SEQ ID NO: 21458 - DNA, 21 bp, Homo sapiens
caatttgacaaccattggagg

SEQ ID NO: 21459 - RNA, 21 nt, RNAi
auuugacaaccauuggagguu

SEQ ID NO: 21460 - RNA, 21 nt, RNAi
uuuaaacuguugguaaccucc

SEQ ID NO: 21461 - DNA, 21 bp, Homo sapiens
cagtgcttgtcctgtcgaaat

SEQ ID NO: 21462 - RNA, 21 nt, RNAi
gugcuuguccugucgaaauuu

SEQ ID NO: 21463 - RNA, 21 nt, RNAi
uucacgaacaggacagcuuua

SEQ ID NO: 21464 - DNA, 21 bp, Homo sapiens
cagtctgcattaaagtcattg

SEQ ID NO: 21465 - RNA, 21 nt, RNAi
gucugcauuaaagucauuguu

SEQ ID NO: 21466 - RNA, 21 nt, RNAi
uucagacguaauuucaguaac

SEQ ID NO: 21467 - DNA, 21 bp, Homo sapiens
catggtatggtgcatagaaac

SEQ ID NO: 21468 - RNA, 21 nt, RNAi
ugguauggugcauagaaacuu

SEQ ID NO: 21469 - RNA, 21 nt, RNAi
uuaccauaccacguaucuuug

SEQ ID NO: 21470 - DNA, 21 bp, Homo sapiens
cagtgaggccaagactccaat

SEQ ID NO: 21471 - RNA, 21 nt, RNAi
gugaggccaagacuccaauuu

SEQ ID NO: 21472 - RNA, 21 nt, RNAi
uucacuccgguucugagguua

SEQ ID NO: 21473 - DNA, 21 bp, Homo sapiens
caagactccaattaagtggat

SEQ ID NO: 21474 - RNA, 21 nt, RNAi
agacuccaauuaaguggauuu

SEQ ID NO: 21475 - RNA, 21 nt, RNAi
uuucugagguuaauucaccua

SEQ ID NO: 21476 - DNA, 21 bp, Homo sapiens
cagatctgcacaattgatgtc

SEQ ID NO: 21477 - RNA, 21 nt, RNAi
gaucugcacaauugaugucuu

SEQ ID NO: 21478 - RNA, 21 nt, RNAi
uucuagacguguuaacuacag

SEQ ID NO: 21479 - DNA, 21 bp, Homo sapiens
caccacggtatctggtcataa

SEQ ID NO: 21480 - RNA, 21 nt, RNAi
ccacgguaucuggucauaauu

SEQ ID NO: 21481 - RNA, 21 nt, RNAi
uuggugccauagaccaguauu

SEQ ID NO: 21482 - DNA, 21 bp, Homo sapiens
cacggtatctggtcataaaga

SEQ ID NO: 21483 - RNA, 21 nt, RNAi
cgguaucuggucauaaagauu

SEQ ID NO: 21484 - RNA, 21 nt, RNAi
uugccauagaccaguauuucu

SEQ ID NO: 21485 - DNA, 21 bp, Homo sapiens
catggtctgacaaacaagaag

SEQ ID NO: 21486 - RNA, 21 nt, RNAi
uggucugacaaacaagaaguu

SEQ ID NO: 21487 - RNA, 21 nt, RNAi
uuaccagacuguuuguucuuc

SEQ ID NO: 21488 - DNA, 21 bp, Homo sapiens
cagttggaacacttaatcggc

SEQ ID NO: 21489 - RNA, 21 nt, RNAi
guuggaacacuuaaucggcuu

SEQ ID NO: 21490 - RNA, 21 nt, RNAi
uucaaccuugugaauuagccg

SEQ ID NO: 21491 - DNA, 21 bp, Homo sapiens
caatgtgtagaagccggagca

SEQ ID NO: 21492 - RNA, 21 nt, RNAi
auguguagaagccggagcauu

SEQ ID NO: 21493 - RNA, 21 nt, RNAi
uuuacacaucuucggccucgu

SEQ ID NO: 21494 - DNA, 21 bp, Homo sapiens
gaagtttgccatcttcgtcat

SEQ ID NO: 21495 - RNA, 21 nt, RNAi
aguuugccaucuucgucauuu

SEQ ID NO: 21496 - RNA, 21 nt, RNAi
uuucaaacgguagaagcagua

SEQ ID NO: 21497 - DNA, 21 bp, Homo sapiens
gactcagctcaccgagattct

SEQ ID NO: 21498 - RNA, 21 nt, RNAi
cucagcucaccgagauucuuu

SEQ ID NO: 21499 - RNA, 21 nt, RNAi
uugagucgaguggcucuaaga

SEQ ID NO: 21500 - DNA, 21 bp, Homo sapiens
gaagactgccagacattgacc

SEQ ID NO: 21501 - RNA, 21 nt, RNAi
agacugccagacauugaccuu

SEQ ID NO: 21502 - RNA, 21 nt, RNAi
uuucugacggucuguaacugg

SEQ ID NO: 21503 - DNA, 21 bp, Homo sapiens
gacattgaccaagaccatctg

SEQ ID NO: 21504 - RNA, 21 nt, RNAi
cauugaccaagaccaucuguu

SEQ ID NO: 21505 - RNA, 21 nt, RNAi
uuguaacugguucugguagac

SEQ ID NO: 21506 - DNA, 21 bp, Homo sapiens
gatggatttgtgaactgcacc

SEQ ID NO: 21507 - RNA, 21 nt, RNAi
uggauuugugaacugcaccuu

SEQ ID NO: 21508 - RNA, 21 nt, RNAi
uuaccuaaacacuugacgugg

SEQ ID NO: 21509 - DNA, 21 bp, Homo sapiens
gatttgtgaactgcaccaaga

SEQ ID NO: 21510 - RNA, 21 nt, RNAi
uuugugaacugcaccaagauu

SEQ ID NO: 21511 - RNA, 21 nt, RNAi
uuaaacacuugacgugguucu

SEQ ID NO: 21512 - DNA, 21 bp, Homo sapiens
gagaagctcaatgtcttccgg

SEQ ID NO: 21513 - RNA, 21 nt, RNAi
gaagcucaaugucuuccgguu

SEQ ID NO: 21514 - RNA, 21 nt, RNAi
uucuucgaguuacagaaggcc

SEQ ID NO: 21515 - DNA, 21 bp, Homo sapiens
gaagctcaatgtcttccggac

SEQ ID NO: 21516 - RNA, 21 nt, RNAi
agcucaaugucuuccggacuu

SEQ ID NO: 21517 - RNA, 21 nt, RNAi
uuucgaguuacagaaggccug

SEQ ID NO: 21518 - DNA, 21 bp, Homo sapiens
gaacttgaatgtcacatctct

SEQ ID NO: 21519 - RNA, 21 nt, RNAi
acuugaaugucacaucucuuu

SEQ ID NO: 21520 - RNA, 21 nt, RNAi
uuugaacuuacaguguagaga

SEQ ID NO: 21521 - DNA, 21 bp, Homo sapiens
gaagagcgactagacatcaag

SEQ ID NO: 21522 - RNA, 21 nt, RNAi
agagcgacuagacaucaaguu

SEQ ID NO: 21523 - RNA, 21 nt, RNAi
uuucucgcugaucuguaguuc

SEQ ID NO: 21524 - DNA, 21 bp, Homo sapiens
gagcgactagacatcaagcat

SEQ ID NO: 21525 - RNA, 21 nt, RNAi
gcgacuagacaucaagcauuu

SEQ ID NO: 21526 - RNA, 21 nt, RNAi
uucgcugaucuguaguucgua

SEQ ID NO: 21527 - DNA, 21 bp, Homo sapiens
gactagacatcaagcataatc

SEQ ID NO: 21528 - RNA, 21 nt, RNAi
cuagacaucaagcauaaucuu

SEQ ID NO: 21529 - RNA, 21 nt, RNAi
uugaucuguaguucguauuag

SEQ ID NO: 21530 - DNA, 21 bp, Homo sapiens
gacatcaagcataatcggccg

SEQ ID NO: 21531 - RNA, 21 nt, RNAi
caucaagcauaaucggccguu

SEQ ID NO: 21532 - RNA, 21 nt, RNAi
uuguaguucguauuagccggc

SEQ ID NO: 21533 - DNA, 21 bp, Homo sapiens
gaaattatagccgaggaggtg

SEQ ID NO: 21534 - RNA, 21 nt, RNAi
aauuauagccgaggagguguu

SEQ ID NO: 21535 - RNA, 21 nt, RNAi
uuuuaauaucggcuccuccac

SEQ ID NO: 21536 - DNA, 21 bp, Homo sapiens
gatacttgtgctcaatgtgcc

SEQ ID NO: 21537 - RNA, 21 nt, RNAi
uacuugugcucaaugugccuu

SEQ ID NO: 21538 - RNA, 21 nt, RNAi
uuaugaacacgaguuacacgg

SEQ ID NO: 21539 - DNA, 21 bp, Homo sapiens
gaaggctaacaaagtcttggc

SEQ ID NO: 21540 - RNA, 21 nt, RNAi
aggcuaacaaagucuuggcuu

SEQ ID NO: 21541 - RNA, 21 nt, RNAi
uuuccgauuguuucagaaccg

SEQ ID NO: 21542 - DNA, 21 bp, Homo sapiens
gattccagtctgcattaaagt

SEQ ID NO: 21543 - RNA, 21 nt, RNAi
uuccagucugcauuaaaguuu

SEQ ID NO: 21544 - RNA, 21 nt, RNAi
uuaaggucagacguaauuuca

SEQ ID NO: 21545 - DNA, 21 bp, Homo sapiens
gaaacgtgctactcaagtcac

SEQ ID NO: 21546 - RNA, 21 nt, RNAi
aacgugcuacucaagucacuu

SEQ ID NO: 21547 - RNA, 21 nt, RNAi
uuuugcacgaugaguucagug

SEQ ID NO: 21548 - DNA, 21 bp, Homo sapiens
gaggccaagactccaattaag

SEQ ID NO: 21549 - RNA, 21 nt, RNAi
ggccaagacuccaauuaaguu

SEQ ID NO: 21550 - RNA, 21 nt, RNAi
uuccgguucugagguuaauuc

SEQ ID NO: 21551 - DNA, 21 bp, Homo sapiens
gattggctgaagtaccagacc

SEQ ID NO: 21552 - RNA, 21 nt, RNAi
uuggcugaaguaccagaccuu

SEQ ID NO: 21553 - RNA, 21 nt, RNAi
uuaaccgacuucauggucugg

SEQ ID NO: 21554 - DNA, 21 bp, Homo sapiens
gaactagccaatgagttcacc

SEQ ID NO: 21555 - RNA, 21 nt, RNAi
acuagccaaugaguucaccuu

SEQ ID NO: 21556 - RNA, 21 nt, RNAi
uuugaucgguuacucaagugg

SEQ ID NO: 21557 - DNA, 21 bp, Homo sapiens
gaacacttaatcggccacgtg

SEQ ID NO: 21558 - RNA, 21 nt, RNAi
acacuuaaucggccacguguu

SEQ ID NO: 21559 - RNA, 21 nt, RNAi
uuugugaauuagccggugcac

SEQ ID NO: 21560 - DNA, 21 bp, Homo sapiens
gaagaggatgtcaacggttat

SEQ ID NO: 21561 - RNA, 21 nt, RNAi
agaggaugucaacgguuauuu

SEQ ID NO: 21562 - RNA, 21 nt, RNAi
uuucuccuacaguugccaaua

SEQ ID NO: 21563 - DNA, 21 bp, Homo sapiens
gaggatgtcaacggttatgtc

SEQ ID NO: 21564 - RNA, 21 nt, RNAi
ggaugucaacgguuaugucuu

SEQ ID NO: 21565 - RNA, 21 nt, RNAi
uuccuacaguugccaauacag

SEQ ID NO: 21566 - DNA, 21 bp, Homo sapiens
gatgtcaacggttatgtcatg

SEQ ID NO: 21567 - RNA, 21 nt, RNAi
ugucaacgguuaugucauguu

SEQ ID NO: 21568 - RNA, 21 nt, RNAi
uuacaguugccaauacaguac

SEQ ID NO: 21569 - DNA, 21 bp, Homo sapiens
gatacacacctcaaaggtact

SEQ ID NO: 21570 - RNA, 21 nt, RNAi
uacacaccucaaagguacuuu

SEQ ID NO: 21571 - RNA, 21 nt, RNAi
uuauguguggaguuuccauga

SEQ ID NO: 21572 - DNA, 21 bp, Homo sapiens
gagtatgaatacatgaaccgg

SEQ ID NO: 21573 - RNA, 21 nt, RNAi
guaugaauacaugaaccgguu

SEQ ID NO: 21574 - RNA, 21 nt, RNAi
uucauacuuauguacuuggcc

SEQ ID NO: 21575 - DNA, 21 bp, Homo sapiens
gaatacatgaaccggaggaga

SEQ ID NO: 21576 - RNA, 21 nt, RNAi
auacaugaaccggaggagauu

SEQ ID NO: 21577 - RNA, 21 nt, RNAi
uuuauguacuuggccuccucu

SEQ ID NO: 21578 - DNA, 21 bp, Homo sapiens
tacaagctctacgagaggtgt

SEQ ID NO: 21579 - RNA, 21 nt, RNAi
caagcucuacgagagguguuu

SEQ ID NO: 21580 - RNA, 21 nt, RNAi
uuguucgagaugcucuccaca

SEQ ID NO: 21581 - DNA, 21 bp, Homo sapiens
tattgagaagaacgataagct

SEQ ID NO: 21582 - RNA, 21 nt, RNAi
uugagaagaacgauaagcuuu

SEQ ID NO: 21583 - RNA, 21 nt, RNAi
uuaacucuucuugcuauucga

SEQ ID NO: 21584 - DNA, 21 bp, Homo sapiens
tatcagtatggaggagtttgt

SEQ ID NO: 21585 - RNA, 21 nt, RNAi
ucaguauggaggaguuuguuu

SEQ ID NO: 21586 - RNA, 21 nt, RNAi
uuagucauaccuccucaaaca

SEQ ID NO: 21587 - DNA, 21 bp, Homo sapiens
taactttgtggtggatcaaac

SEQ ID NO: 21588 - RNA, 21 nt, RNAi
acuuugugguggaucaaacuu

SEQ ID NO: 21589 - RNA, 21 nt, RNAi
uuugaaacaccaccuaguuug

SEQ ID NO: 21590 - DNA, 21 bp, Homo sapiens
tacggaagagcgactagacat

SEQ ID NO: 21591 - RNA, 21 nt, RNAi
cggaagagcgacuagacauuu

SEQ ID NO: 21592 - RNA, 21 nt, RNAi
uugccuucucgcugaucugua

SEQ ID NO: 21593 - DNA, 21 bp, Homo sapiens
tagacatcaagcataatcggc

SEQ ID NO: 21594 - RNA, 21 nt, RNAi
gacaucaagcauaaucggcuu

SEQ ID NO: 21595 - RNA, 21 nt, RNAi
uucuguaguucguauuagccg

SEQ ID NO: 21596 - DNA, 21 bp, Homo sapiens
taaaggaccagagcttcaaga

SEQ ID NO: 21597 - RNA, 21 nt, RNAi
aaggaccagagcuucaagauu

SEQ ID NO: 21598 - RNA, 21 nt, RNAi
uuuuccuggucucgaaguucu

SEQ ID NO: 21599 - DNA, 21 bp, Homo sapiens
tatgaggcgatacttggaacg

SEQ ID NO: 21600 - RNA, 21 nt, RNAi
ugaggcgauacuuggaacguu

SEQ ID NO: 21601 - RNA, 21 nt, RNAi
uuacuccgcuaugaaccuugc

SEQ ID NO: 21602 - DNA, 21 bp, Homo sapiens
tactaccttgaggaacatggt

SEQ ID NO: 21603 - RNA, 21 nt, RNAi
cuaccuugaggaacaugguuu

SEQ ID NO: 21604 - RNA, 21 nt, RNAi
uugauggaacuccuuguacca

SEQ ID NO: 21605 - DNA, 21 bp, Homo sapiens
tatggtgcatagaaacctggc

SEQ ID NO: 21606 - RNA, 21 nt, RNAi
uggugcauagaaaccuggcuu

SEQ ID NO: 21607 - RNA, 21 nt, RNAi
uuaccacguaucuuuggaccg

SEQ ID NO: 21608 - DNA, 21 bp, Homo sapiens
taaagaactagccaatgagtt

SEQ ID NO: 21609 - RNA, 21 nt, RNAi
aagaacuagccaaugaguuuu

SEQ ID NO: 21610 - RNA, 21 nt, RNAi
uuuucuugaucgguuacucaa

SEQ ID NO: 21611 - DNA, 21 bp, Homo sapiens
tatgtcatgccagatacacac

SEQ ID NO: 21612 - RNA, 21 nt, RNAi
ugucaugccagauacacacuu

SEQ ID NO: 21613 - RNA, 21 nt, RNAi
uuacaguacggucuaugugug

SEQ ID NO: 21614 - DNA, 21 bp, Homo sapiens
tacacacctcaaaggtactcc

SEQ ID NO: 21615 - RNA, 21 nt, RNAi
cacaccucaaagguacuccuu

SEQ ID NO: 21616 - RNA, 21 nt, RNAi
uuguguggaguuuccaugagg

SEQ ID NO: 21617 - DNA, 21 bp, Homo sapiens
tatgaatacatgaaccggagg

SEQ ID NO: 21618 - RNA, 21 nt, RNAi
ugaauacaugaaccggagguu

SEQ ID NO: 21619 - RNA, 21 nt, RNAi
uuacuuauguacuuggccucc

SEQ ID NO: 21620 - DNA, 21 bp, Homo sapiens
tatgaatcggcaacgagatgg

SEQ ID NO: 21621 - RNA, 21 nt, RNAi
ugaaucggcaacgagaugguu

SEQ ID NO: 21622 - RNA, 21 nt, RNAi
uuacuuagccguugcucuacc

SEQ ID NO: 21623 - DNA, 21 bp, Homo sapiens
aaagcgctggaagctgcgagc

SEQ ID NO: 21624 - RNA, 21 nt, RNAi
agcgcuggaagcugcgagcuu

SEQ ID NO: 21625 - RNA, 21 nt, RNAi
uuucgcgaccuucgacgcucg

SEQ ID NO: 21626 - DNA, 21 bp, Homo sapiens
aagcgctggaagctgcgagct

SEQ ID NO: 21627 - RNA, 21 nt, RNAi
gcgcuggaagcugcgagcuuu

SEQ ID NO: 21628 - RNA, 21 nt, RNAi
uucgcgaccuucgacgcucga

SEQ ID NO: 21629 - DNA, 21 bp, Homo sapiens
aagcgacaggaggagccaagg

SEQ ID NO: 21630 - RNA, 21 nt, RNAi
gcgacaggaggagccaagguu

SEQ ID NO: 21631 - RNA, 21 nt, RNAi
uucgcuguccuccucgguucc

SEQ ID NO: 21632 - DNA, 21 bp, Homo sapiens
aaggacaccaggatggtccac

SEQ ID NO: 21633 - RNA, 21 nt, RNAi
ggacaccaggaugguccacuu

SEQ ID NO: 21634 - RNA, 21 nt, RNAi
uuccugugguccuaccaggug

SEQ ID NO: 21635 - DNA, 21 bp, Homo sapiens
aagaatatgagagagtcctgc

SEQ ID NO: 21636 - RNA, 21 nt, RNAi
gaauaugagagaguccugcuu

SEQ ID NO: 21637 - RNA, 21 nt, RNAi
uucuuauacucucucaggacg

SEQ ID NO: 21638 - DNA, 21 bp, Homo sapiens
aatatgagagagtcctgctgt

SEQ ID NO: 21639 - RNA, 21 nt, RNAi
uaugagagaguccugcuguuu

SEQ ID NO: 21640 - RNA, 21 nt, RNAi
uuauacucucucaggacgaca

SEQ ID NO: 21641 - DNA, 21 bp, Homo sapiens
aacagacaggctggagagaac

SEQ ID NO: 21642 - RNA, 21 nt, RNAi
cagacaggcuggagagaacuu

SEQ ID NO: 21643 - RNA, 21 nt, RNAi
uugucuguccgaccucucuug

SEQ ID NO: 21644 - DNA, 21 bp, Homo sapiens
aactagatcaagccggaagag

SEQ ID NO: 21645 - RNA, 21 nt, RNAi
cuagaucaagccggaagaguu

SEQ ID NO: 21646 - RNA, 21 nt, RNAi
uugaucuaguucggccuucuc

SEQ ID NO: 21647 - DNA, 21 bp, Homo sapiens
aagccggaagagcaaacatca

SEQ ID NO: 21648 - RNA, 21 nt, RNAi
gccggaagagcaaacaucauu

SEQ ID NO: 21649 - RNA, 21 nt, RNAi
uucggccuucucguuuguagu

SEQ ID NO: 21650 - DNA, 21 bp, Homo sapiens
aagagcaaacatcaggaggca

SEQ ID NO: 21651 - RNA, 21 nt, RNAi
gagcaaacaucaggaggcauu

SEQ ID NO: 21652 - RNA, 21 nt, RNAi
uucucguuuguaguccuccgu

SEQ ID NO: 21653 - DNA, 21 bp, Homo sapiens
aaacatcaggaggcaacggaa

SEQ ID NO: 21654 - RNA, 21 nt, RNAi
acaucaggaggcaacggaauu

SEQ ID NO: 21655 - RNA, 21 nt, RNAi
uuuguaguccuccguugccuu

SEQ ID NO: 21656 - DNA, 21 bp, Homo sapiens
aacatcaggaggcaacggaaa

SEQ ID NO: 21657 - RNA, 21 nt, RNAi
caucaggaggcaacggaaauu

SEQ ID NO: 21658 - RNA, 21 nt, RNAi
uuguaguccuccguugccuuu

SEQ ID NO: 21659 - DNA, 21 bp, Homo sapiens
aacggaaacctctctcctcca

SEQ ID NO: 21660 - RNA, 21 nt, RNAi
cggaaaccucucuccuccauu

SEQ ID NO: 21661 - RNA, 21 nt, RNAi
uugccuuuggagagaggaggu

SEQ ID NO: 21662 - DNA, 21 bp, Homo sapiens
aaattgtgactgatgtgtcag

SEQ ID NO: 21663 - RNA, 21 nt, RNAi
auugugacugaugugucaguu

SEQ ID NO: 21664 - RNA, 21 nt, RNAi
uuuaacacugacuacacaguc

SEQ ID NO: 21665 - DNA, 21 bp, Homo sapiens
aattgtgactgatgtgtcaga

SEQ ID NO: 21666 - RNA, 21 nt, RNAi
uugugacugaugugucagauu

SEQ ID NO: 21667 - RNA, 21 nt, RNAi
uuaacacugacuacacagucu

SEQ ID NO: 21668 - DNA, 21 bp, Homo sapiens
aatgttcaaaccggcctgtca

SEQ ID NO: 21669 - RNA, 21 nt, RNAi
uguucaaaccggccugucauu

SEQ ID NO: 21670 - RNA, 21 nt, RNAi
uuacaaguuuggccggacagu

SEQ ID NO: 21671 - DNA, 21 bp, Homo sapiens
aaaccggcctgtcatgaacag

SEQ ID NO: 21672 - RNA, 21 nt, RNAi
accggccugucaugaacaguu

SEQ ID NO: 21673 - RNA, 21 nt, RNAi
uuuggccggacaguacuuguc

SEQ ID NO: 21674 - DNA, 21 bp, Homo sapiens
aaccggcctgtcatgaacaga

SEQ ID NO: 21675 - RNA, 21 nt, RNAi
ccggccugucaugaacagauu

SEQ ID NO: 21676 - RNA, 21 nt, RNAi
uuggccggacaguacuugucu

SEQ ID NO: 21677 - DNA, 21 bp, Homo sapiens
aacagaacaagtggtgctccg

SEQ ID NO: 21678 - RNA, 21 nt, RNAi
cagaacaaguggugcuccguu

SEQ ID NO: 21679 - RNA, 21 nt, RNAi
uugucuuguucaccacgaggc

SEQ ID NO: 21680 - DNA, 21 bp, Homo sapiens
aacaagtggtgctccgtcctc

SEQ ID NO: 21681 - RNA, 21 nt, RNAi
caaguggugcuccguccucuu

SEQ ID NO: 21682 - RNA, 21 nt, RNAi
uuguucaccacgaggcaggag

SEQ ID NO: 21683 - DNA, 21 bp, Homo sapiens
aagtggtgctccgtcctcttg

SEQ ID NO: 21684 - RNA, 21 nt, RNAi
guggugcuccguccucuuguu

SEQ ID NO: 21685 - RNA, 21 nt, RNAi
uucaccacgaggcaggagaac

SEQ ID NO: 21686 - DNA, 21 bp, Homo sapiens
aaactgcaacgctgtgagaag

SEQ ID NO: 21687 - RNA, 21 nt, RNAi
acugcaacgcugugagaaguu

SEQ ID NO: 21688 - RNA, 21 nt, RNAi
uuugacguugcgacacucuuc

SEQ ID NO: 21689 - DNA, 21 bp, Homo sapiens
aactgcaacgctgtgagaaga

SEQ ID NO: 21690 - RNA, 21 nt, RNAi
cugcaacgcugugagaagauu

SEQ ID NO: 21691 - RNA, 21 nt, RNAi
uugacguugcgacacucuucu

SEQ ID NO: 21692 - DNA, 21 bp, Homo sapiens
aagtgtttcaaacaattgctg

SEQ ID NO: 21693 - RNA, 21 nt, RNAi
guguuucaaacaauugcuguu

SEQ ID NO: 21694 - RNA, 21 nt, RNAi
uucacaaaguuuguuaacgac

SEQ ID NO: 21695 - DNA, 21 bp, Homo sapiens
aaacaattgctgatcacacac

SEQ ID NO: 21696 - RNA, 21 nt, RNAi
acaauugcugaucacacacuu

SEQ ID NO: 21697 - RNA, 21 nt, RNAi
uuuguuaacgacuagugugug

SEQ ID NO: 21698 - DNA, 21 bp, Homo sapiens
aacaattgctgatcacacacc

SEQ ID NO: 21699 - RNA, 21 nt, RNAi
caauugcugaucacacaccuu

SEQ ID NO: 21700 - RNA, 21 nt, RNAi
uuguuaacgacuagugugugg

SEQ ID NO: 21701 - DNA, 21 bp, Homo sapiens
aaatcattgctattgaaggac

SEQ ID NO: 21702 - RNA, 21 nt, RNAi
aucauugcuauugaaggacuu

SEQ ID NO: 21703 - RNA, 21 nt, RNAi
uuuaguaacgauaacuuccug

SEQ ID NO: 21704 - DNA, 21 bp, Homo sapiens
aatcattgctattgaaggacc

SEQ ID NO: 21705 - RNA, 21 nt, RNAi
ucauugcuauugaaggaccuu

SEQ ID NO: 21706 - RNA, 21 nt, RNAi
uuaguaacgauaacuuccugg

SEQ ID NO: 21707 - DNA, 21 bp, Homo sapiens
aaggaccagatttagtcaatg

SEQ ID NO: 21708 - RNA, 21 nt, RNAi
ggaccagauuuagucaauguu

SEQ ID NO: 21709 - RNA, 21 nt, RNAi
uuccuggucuaaaucaguuac

SEQ ID NO: 21710 - DNA, 21 bp, Homo sapiens
aaacctttgaggaaatcctgc

SEQ ID NO: 21711 - RNA, 21 nt, RNAi
accuuugaggaaauccugcuu

SEQ ID NO: 21712 - RNA, 21 nt, RNAi
uuuggaaacuccuuuaggacg

SEQ ID NO: 21713 - DNA, 21 bp, Homo sapiens
aacctttgaggaaatcctgcc

SEQ ID NO: 21714 - RNA, 21 nt, RNAi
ccuuugaggaaauccugccuu

SEQ ID NO: 21715 - RNA, 21 nt, RNAi
uuggaaacuccuuuaggacgg

SEQ ID NO: 21716 - DNA, 21 bp, Homo sapiens
aaatcctgccagagatcatca

SEQ ID NO: 21717 - RNA, 21 nt, RNAi
auccugccagagaucaucauu

SEQ ID NO: 21718 - RNA, 21 nt, RNAi
uuuaggacggucucuaguagu

SEQ ID NO: 21719 - DNA, 21 bp, Homo sapiens
aatcctgccagagatcatcat

SEQ ID NO: 21720 - RNA, 21 nt, RNAi
uccugccagagaucaucauuu

SEQ ID NO: 21721 - RNA, 21 nt, RNAi
uuaggacggucucuaguagua

SEQ ID NO: 21722 - DNA, 21 bp, Homo sapiens
aaagagttgagcctcttatcc

SEQ ID NO: 21723 - RNA, 21 nt, RNAi
agaguugagccucuuauccuu

SEQ ID NO: 21724 - RNA, 21 nt, RNAi
uuucucaacucggagaauagg

SEQ ID NO: 21725 - DNA, 21 bp, Homo sapiens
aagagttgagcctcttatccg

SEQ ID NO: 21726 - RNA, 21 nt, RNAi
gaguugagccucuuauccguu

SEQ ID NO: 21727 - RNA, 21 nt, RNAi
uucucaacucggagaauaggc

SEQ ID NO: 21728 - DNA, 21 bp, Homo sapiens
aagtgtgcaaccgcacagaag

SEQ ID NO: 21729 - RNA, 21 nt, RNAi
gugugcaaccgcacagaaguu

SEQ ID NO: 21730 - RNA, 21 nt, RNAi
uucacacguuggcgugucuuc

SEQ ID NO: 21731 - DNA, 21 bp, Homo sapiens
aaccgcacagaaggctttatc

SEQ ID NO: 21732 - RNA, 21 nt, RNAi
ccgcacagaaggcuuuaucuu

SEQ ID NO: 21733 - RNA, 21 nt, RNAi
uuggcgugucuuccgaaauag

SEQ ID NO: 21734 - DNA, 21 bp, Homo sapiens
aactcagtgcactgtgtccag

SEQ ID NO: 21735 - RNA, 21 nt, RNAi
cucagugcacuguguccaguu

SEQ ID NO: 21736 - RNA, 21 nt, RNAi
uugagucacgugacacagguc

SEQ ID NO: 21737 - DNA, 21 bp, Homo sapiens
aattcaaccaaaggctctgca

SEQ ID NO: 21738 - RNA, 21 nt, RNAi
uucaaccaaaggcucugcauu

SEQ ID NO: 21739 - RNA, 21 nt, RNAi
uuaaguugguuuccgagacgu

SEQ ID NO: 21740 - DNA, 21 bp, Homo sapiens
aaccaaaggctctgcaaatga

SEQ ID NO: 21741 - RNA, 21 nt, RNAi
ccaaaggcucugcaaaugauu

SEQ ID NO: 21742 - RNA, 21 nt, RNAi
uugguuuccgagacguuuacu

SEQ ID NO: 21743 - DNA, 21 bp, Homo sapiens
aaaggctctgcaaatgaccgg

SEQ ID NO: 21744 - RNA, 21 nt, RNAi
aggcucugcaaaugaccgguu

SEQ ID NO: 21745 - RNA, 21 nt, RNAi
uuuccgagacguuuacuggcc

SEQ ID NO: 21746 - DNA, 21 bp, Homo sapiens
aaggctctgcaaatgaccggc

SEQ ID NO: 21747 - RNA, 21 nt, RNAi
ggcucugcaaaugaccggcuu

SEQ ID NO: 21748 - RNA, 21 nt, RNAi
uuccgagacguuuacuggccg

SEQ ID NO: 21749 - DNA, 21 bp, Homo sapiens
aaagacgaccagctcttcatt

SEQ ID NO: 21750 - RNA, 21 nt, RNAi
agacgaccagcucuucauuuu

SEQ ID NO: 21751 - RNA, 21 nt, RNAi
uuucugcuggucgagaaguaa

SEQ ID NO: 21752 - DNA, 21 bp, Homo sapiens
aagacgaccagctcttcattg

SEQ ID NO: 21753 - RNA, 21 nt, RNAi
gacgaccagcucuucauuguu

SEQ ID NO: 21754 - RNA, 21 nt, RNAi
uucugcuggucgagaaguaac

SEQ ID NO: 21755 - DNA, 21 bp, Homo sapiens
aaatgcgaaccaagttgtctt

SEQ ID NO: 21756 - RNA, 21 nt, RNAi
augcgaaccaaguugucuuuu

SEQ ID NO: 21757 - RNA, 21 nt, RNAi
uuuacgcuugguucaacagaa

SEQ ID NO: 21758 - DNA, 21 bp, Homo sapiens
aatgcgaaccaagttgtcttc

SEQ ID NO: 21759 - RNA, 21 nt, RNAi
ugcgaaccaaguugucuucuu

SEQ ID NO: 21760 - RNA, 21 nt, RNAi
uuacgcuugguucaacagaag

SEQ ID NO: 21761 - DNA, 21 bp, Homo sapiens
aaccaagttgtcttccttggc

SEQ ID NO: 21762 - RNA, 21 nt, RNAi
ccaaguugucuuccuuggcuu

SEQ ID NO: 21763 - RNA, 21 nt, RNAi
uugguucaacagaaggaaccg

SEQ ID NO: 21764 - DNA, 21 bp, Homo sapiens
aagttgtcttccttggctact

SEQ ID NO: 21765 - RNA, 21 nt, RNAi
guugucuuccuuggcuacuuu

SEQ ID NO: 21766 - RNA, 21 nt, RNAi
uucaacagaaggaaccgauga

SEQ ID NO: 21767 - DNA, 21 bp, Homo sapiens
aaagagcattctacaccagct

SEQ ID NO: 21768 - RNA, 21 nt, RNAi
agagcauucuacaccagcuuu

SEQ ID NO: 21769 - RNA, 21 nt, RNAi
uuucucguaagauguggucga

SEQ ID NO: 21770 - DNA, 21 bp, Homo sapiens
aagagcattctacaccagctc

SEQ ID NO: 21771 - RNA, 21 nt, RNAi
gagcauucuacaccagcucuu

SEQ ID NO: 21772 - RNA, 21 nt, RNAi
uucucguaagauguggucgag

SEQ ID NO: 21773 - DNA, 21 bp, Homo sapiens
aagtgagcatcattgactaca

SEQ ID NO: 21774 - RNA, 21 nt, RNAi
gugagcaucauugacuacauu

SEQ ID NO: 21775 - RNA, 21 nt, RNAi
uucacucguaguaacugaugu

SEQ ID NO: 21776 - DNA, 21 bp, Homo sapiens
aagaaggagaataacaaccgc

SEQ ID NO: 21777 - RNA, 21 nt, RNAi
gaaggagaauaacaaccgcuu

SEQ ID NO: 21778 - RNA, 21 nt, RNAi
uucuuccucuuauuguuggcg

SEQ ID NO: 21779 - DNA, 21 bp, Homo sapiens
aaggagaataacaaccgctgg

SEQ ID NO: 21780 - RNA, 21 nt, RNAi
ggagaauaacaaccgcugguu

SEQ ID NO: 21781 - RNA, 21 nt, RNAi
uuccucuuauuguuggcgacc

SEQ ID NO: 21782 - DNA, 21 bp, Homo sapiens
aatgtgctctggttacattac

SEQ ID NO: 21783 - RNA, 21 nt, RNAi
ugugcucugguuacauuacuu

SEQ ID NO: 21784 - RNA, 21 nt, RNAi
uuacacgagaccaauguaaug

SEQ ID NO: 21785 - DNA, 21 bp, Homo sapiens
aagatgctgaaacaaatgacc

SEQ ID NO: 21786 - RNA, 21 nt, RNAi
gaugcugaaacaaaugaccuu

SEQ ID NO: 21787 - RNA, 21 nt, RNAi
uucuacgacuuuguuuacugg

SEQ ID NO: 21788 - DNA, 21 bp, Homo sapiens
aaacaaatgaccttcaagact

SEQ ID NO: 21789 - RNA, 21 nt, RNAi
acaaaugaccuucaagacuuu

SEQ ID NO: 21790 - RNA, 21 nt, RNAi
uuuguuuacuggaaguucuga

SEQ ID NO: 21791 - DNA, 21 bp, Homo sapiens
aacaaatgaccttcaagacta

SEQ ID NO: 21792 - RNA, 21 nt, RNAi
caaaugaccuucaagacuauu

SEQ ID NO: 21793 - RNA, 21 nt, RNAi
uuguuuacuggaaguucugau

SEQ ID NO: 21794 - DNA, 21 bp, Homo sapiens
aatgaccttcaagactaaatg

SEQ ID NO: 21795 - RNA, 21 nt, RNAi
ugaccuucaagacuaaauguu

SEQ ID NO: 21796 - RNA, 21 nt, RNAi
uuacuggaaguucugauuuac

SEQ ID NO: 21797 - DNA, 21 bp, Homo sapiens
aagactaaatgtaacactcct

SEQ ID NO: 21798 - RNA, 21 nt, RNAi
gacuaaauguaacacuccuuu

SEQ ID NO: 21799 - RNA, 21 nt, RNAi
uucugauuuacauugugagga

SEQ ID NO: 21800 - DNA, 21 bp, Homo sapiens
aaatgtaacactcctgccatg

SEQ ID NO: 21801 - RNA, 21 nt, RNAi
auguaacacuccugccauguu

SEQ ID NO: 21802 - RNA, 21 nt, RNAi
uuuacauugugaggacgguac

SEQ ID NO: 21803 - DNA, 21 bp, Homo sapiens
aatgtaacactcctgccatga

SEQ ID NO: 21804 - RNA, 21 nt, RNAi
uguaacacuccugccaugauu

SEQ ID NO: 21805 - RNA, 21 nt, RNAi
uuacauugugaggacgguacu

SEQ ID NO: 21806 - DNA, 21 bp, Homo sapiens
aacactcctgccatgaagcaa

SEQ ID NO: 21807 - RNA, 21 nt, RNAi
cacuccugccaugaagcaauu

SEQ ID NO: 21808 - RNA, 21 nt, RNAi
uugugaggacgguacuucguu

SEQ ID NO: 21809 - DNA, 21 bp, Homo sapiens
aaatccaggagttccacagga

SEQ ID NO: 21810 - RNA, 21 nt, RNAi
auccaggaguuccacaggauu

SEQ ID NO: 21811 - RNA, 21 nt, RNAi
uuuagguccucaagguguccu

SEQ ID NO: 21812 - DNA, 21 bp, Homo sapiens
aatccaggagttccacaggac

SEQ ID NO: 21813 - RNA, 21 nt, RNAi
uccaggaguuccacaggacuu

SEQ ID NO: 21814 - RNA, 21 nt, RNAi
uuagguccucaagguguccug

SEQ ID NO: 21815 - DNA, 21 bp, Homo sapiens
aatgctgaacttcagctctgc

SEQ ID NO: 21816 - RNA, 21 nt, RNAi
ugcugaacuucagcucugcuu

SEQ ID NO: 21817 - RNA, 21 nt, RNAi
uuacgacuugaagucgagacg

SEQ ID NO: 21818 - DNA, 21 bp, Homo sapiens
aacttcagctctgccactgac

SEQ ID NO: 21819 - RNA, 21 nt, RNAi
cuucagcucugccacugacuu

SEQ ID NO: 21820 - RNA, 21 nt, RNAi
uugaagucgagacggugacug

SEQ ID NO: 21821 - DNA, 21 bp, Homo sapiens
aagctaaatgtatcttactgc

SEQ ID NO: 21822 - RNA, 21 nt, RNAi
gcuaaauguaucuuacugcuu

SEQ ID NO: 21823 - RNA, 21 nt, RNAi
uucgauuuacauagaaugacg

SEQ ID NO: 21824 - DNA, 21 bp, Homo sapiens
aaatgagaggagactggtctt

SEQ ID NO: 21825 - RNA, 21 nt, RNAi
augagaggagacuggucuuuu

SEQ ID NO: 21826 - RNA, 21 nt, RNAi
uuuacucuccucugaccagaa

SEQ ID NO: 21827 - DNA, 21 bp, Homo sapiens
aatgagaggagactggtcttg

SEQ ID NO: 21828 - RNA, 21 nt, RNAi
ugagaggagacuggucuuguu

SEQ ID NO: 21829 - RNA, 21 nt, RNAi
uuacucuccucugaccagaac

SEQ ID NO: 21830 - DNA, 21 bp, Homo sapiens
aagcctctggtgctgtttcaa

SEQ ID NO: 21831 - RNA, 21 nt, RNAi
gccucuggugcuguuucaauu

SEQ ID NO: 21832 - RNA, 21 nt, RNAi
uucggagaccacgacaaaguu

SEQ ID NO: 21833 - DNA, 21 bp, Homo sapiens
aagagttcatatctagcctgg

SEQ ID NO: 21834 - RNA, 21 nt, RNAi
gaguucauaucuagccugguu

SEQ ID NO: 21835 - RNA, 21 nt, RNAi
uucucaaguauagaucggacc

SEQ ID NO: 21836 - DNA, 21 bp, Homo sapiens
caggaccggaggcgtttcttc

SEQ ID NO: 21837 - RNA, 21 nt, RNAi
ggaccggaggcguuucuucuu

SEQ ID NO: 21838 - RNA, 21 nt, RNAi
uuccuggccuccgcaaagaag

SEQ ID NO: 21839 - DNA, 21 bp, Homo sapiens
cagtccgacgatcctgacgat

SEQ ID NO: 21840 - RNA, 21 nt, RNAi
guccgacgauccugacgauuu

SEQ ID NO: 21841 - RNA, 21 nt, RNAi
uucaggcugcuaggacugcua

SEQ ID NO: 21842 - DNA, 21 bp, Homo sapiens
caaagcgctggaagctgcgag

SEQ ID NO: 21843 - RNA, 21 nt, RNAi
aagcgcuggaagcugcgaguu

SEQ ID NO: 21844 - RNA, 21 nt, RNAi
uuuucgcgaccuucgacgcuc

SEQ ID NO: 21845 - DNA, 21 bp, Homo sapiens
cagtgtcatctcgatcggcac

SEQ ID NO: 21846 - RNA, 21 nt, RNAi
gugucaucucgaucggcacuu

SEQ ID NO: 21847 - RNA, 21 nt, RNAi
uucacaguagagcuagccgug

SEQ ID NO: 21848 - DNA, 21 bp, Homo sapiens
caggaggaagcgacaggagga

SEQ ID NO: 21849 - RNA, 21 nt, RNAi
ggaggaagcgacaggaggauu

SEQ ID NO: 21850 - RNA, 21 nt, RNAi
uuccuccuucgcuguccuccu

SEQ ID NO: 21851 - DNA, 21 bp, Homo sapiens
caggaggagccaaggacacca

SEQ ID NO: 21852 - RNA, 21 nt, RNAi
ggaggagccaaggacaccauu

SEQ ID NO: 21853 - RNA, 21 nt, RNAi
uuccuccucgguuccuguggu

SEQ ID NO: 21854 - DNA, 21 bp, Homo sapiens
caaggacaccaggatggtcca

SEQ ID NO: 21855 - RNA, 21 nt, RNAi
aggacaccaggaugguccauu

SEQ ID NO: 21856 - RNA, 21 nt, RNAi
uuuccugugguccuaccaggu

SEQ ID NO: 21857 - DNA, 21 bp, Homo sapiens
caccaggatggtccaccaaac

SEQ ID NO: 21858 - RNA, 21 nt, RNAi
ccaggaugguccaccaaacuu

SEQ ID NO: 21859 - RNA, 21 nt, RNAi
uugguccuaccaggugguuug

SEQ ID NO: 21860 - DNA, 21 bp, Homo sapiens
cagcctcaggtcagttctctt

SEQ ID NO: 21861 - RNA, 21 nt, RNAi
gccucaggucaguucucuuuu

SEQ ID NO: 21862 - RNA, 21 nt, RNAi
uucggaguccagucaagagaa

SEQ ID NO: 21863 - DNA, 21 bp, Homo sapiens
caggtcagttctctttggcct

SEQ ID NO: 21864 - RNA, 21 nt, RNAi
ggucaguucucuuuggccuuu

SEQ ID NO: 21865 - RNA, 21 nt, RNAi
uuccagucaagagaaaccgga

SEQ ID NO: 21866 - DNA, 21 bp, Homo sapiens
cagttctctttggccttatga

SEQ ID NO: 21867 - RNA, 21 nt, RNAi
guucucuuuggccuuaugauu

SEQ ID NO: 21868 - RNA, 21 nt, RNAi
uucaagagaaaccggaauacu

SEQ ID NO: 21869 - DNA, 21 bp, Homo sapiens
caggtctgtcaagcacaggca

SEQ ID NO: 21870 - RNA, 21 nt, RNAi
ggucugucaagcacaggcauu

SEQ ID NO: 21871 - RNA, 21 nt, RNAi
uuccagacaguucguguccgu

SEQ ID NO: 21872 - DNA, 21 bp, Homo sapiens
cacaggccaggactcttgtca

SEQ ID NO: 21873 - RNA, 21 nt, RNAi
caggccaggacucuugucauu

SEQ ID NO: 21874 - RNA, 21 nt, RNAi
uuguccgguccugagaacagu

SEQ ID NO: 21875 - DNA, 21 bp, Homo sapiens
caggccaggactcttgtcaag

SEQ ID NO: 21876 - RNA, 21 nt, RNAi
ggccaggacucuugucaaguu

SEQ ID NO: 21877 - RNA, 21 nt, RNAi
uuccgguccugagaacaguuc

SEQ ID NO: 21878 - DNA, 21 bp, Homo sapiens
caggactcttgtcaagagaga

SEQ ID NO: 21879 - RNA, 21 nt, RNAi
ggacucuugucaagagagauu

SEQ ID NO: 21880 - RNA, 21 nt, RNAi
uuccugagaacaguucucucu

SEQ ID NO: 21881 - DNA, 21 bp, Homo sapiens
cagacaggctggagagaacta

SEQ ID NO: 21882 - RNA, 21 nt, RNAi
gacaggcuggagagaacuauu

SEQ ID NO: 21883 - RNA, 21 nt, RNAi
uucuguccgaccucucuugau

SEQ ID NO: 21884 - DNA, 21 bp, Homo sapiens
caggctggagagaactagatc

SEQ ID NO: 21885 - RNA, 21 nt, RNAi
ggcuggagagaacuagaucuu

SEQ ID NO: 21886 - RNA, 21 nt, RNAi
uuccgaccucucuugaucuag

SEQ ID NO: 21887 - DNA, 21 bp, Homo sapiens
caagccggaagagcaaacatc

SEQ ID NO: 21888 - RNA, 21 nt, RNAi
agccggaagagcaaacaucuu

SEQ ID NO: 21889 - RNA, 21 nt, RNAi
uuucggccuucucguuuguag

SEQ ID NO: 21890 - DNA, 21 bp, Homo sapiens
caaacatcaggaggcaacgga

SEQ ID NO: 21891 - RNA, 21 nt, RNAi
aacaucaggaggcaacggauu

SEQ ID NO: 21892 - RNA, 21 nt, RNAi
uuuuguaguccuccguugccu

SEQ ID NO: 21893 - DNA, 21 bp, Homo sapiens
catcaggaggcaacggaaacc

SEQ ID NO: 21894 - RNA, 21 nt, RNAi
ucaggaggcaacggaaaccuu

SEQ ID NO: 21895 - RNA, 21 nt, RNAi
uuaguccuccguugccuuugg

SEQ ID NO: 21896 - DNA, 21 bp, Homo sapiens
caggaggcaacggaaacctct

SEQ ID NO: 21897 - RNA, 21 nt, RNAi
ggaggcaacggaaaccucuuu

SEQ ID NO: 21898 - RNA, 21 nt, RNAi
uuccuccguugccuuuggaga

SEQ ID NO: 21899 - DNA, 21 bp, Homo sapiens
caacggaaacctctctcctcc

SEQ ID NO: 21900 - RNA, 21 nt, RNAi
acggaaaccucucuccuccuu

SEQ ID NO: 21901 - RNA, 21 nt, RNAi
uuugccuuuggagagaggagg

SEQ ID NO: 21902 - DNA, 21 bp, Homo sapiens
caggacctgactcctttacag

SEQ ID NO: 21903 - RNA, 21 nt, RNAi
ggaccugacuccuuuacaguu

SEQ ID NO: 21904 - RNA, 21 nt, RNAi
uuccuggacugaggaaauguc

SEQ ID NO: 21905 - DNA, 21 bp, Homo sapiens
cagaggtctgcagcatctata

SEQ ID NO: 21906 - RNA, 21 nt, RNAi
gaggucugcagcaucuauauu

SEQ ID NO: 21907 - RNA, 21 nt, RNAi
uucuccagacgucguagauau

SEQ ID NO: 21908 - DNA, 21 bp, Homo sapiens
cagcatctataccactgccac

SEQ ID NO: 21909 - RNA, 21 nt, RNAi
gcaucuauaccacugccacuu

SEQ ID NO: 21910 - RNA, 21 nt, RNAi
uucguagauauggugacggug

SEQ ID NO: 21911 - DNA, 21 bp, Homo sapiens
catctataccactgccacttc

SEQ ID NO: 21912 - RNA, 21 nt, RNAi
ucuauaccacugccacuucuu

SEQ ID NO: 21913 - RNA, 21 nt, RNAi
uuagauauggugacggugaag

SEQ ID NO: 21914 - DNA, 21 bp, Homo sapiens
cactgccacttctctctctgg

SEQ ID NO: 21915 - RNA, 21 nt, RNAi
cugccacuucucucucugguu

SEQ ID NO: 21916 - RNA, 21 nt, RNAi
uugacggugaagagagagacc

SEQ ID NO: 21917 - DNA, 21 bp, Homo sapiens
cagaatgttcaaaccggcctg

SEQ ID NO: 21918 - RNA, 21 nt, RNAi
gaauguucaaaccggccuguu

SEQ ID NO: 21919 - RNA, 21 nt, RNAi
uucuuacaaguuuggccggac

SEQ ID NO: 21920 - DNA, 21 bp, Homo sapiens
caaaccggcctgtcatgaaca

SEQ ID NO: 21921 - RNA, 21 nt, RNAi
aaccggccugucaugaacauu

SEQ ID NO: 21922 - RNA, 21 nt, RNAi
uuuuggccggacaguacuugu

SEQ ID NO: 21923 - DNA, 21 bp, Homo sapiens
catgaacagaacaagtggtgc

SEQ ID NO: 21924 - RNA, 21 nt, RNAi
ugaacagaacaaguggugcuu

SEQ ID NO: 21925 - RNA, 21 nt, RNAi
uuacuugucuuguucaccacg

SEQ ID NO: 21926 - DNA, 21 bp, Homo sapiens
cagaacaagtggtgctccgtc

SEQ ID NO: 21927 - RNA, 21 nt, RNAi
gaacaaguggugcuccgucuu

SEQ ID NO: 21928 - RNA, 21 nt, RNAi
uucuuguucaccacgaggcag

SEQ ID NO: 21929 - DNA, 21 bp, Homo sapiens
caagtggtgctccgtcctctt

SEQ ID NO: 21930 - RNA, 21 nt, RNAi
aguggugcuccguccucuuuu

SEQ ID NO: 21931 - RNA, 21 nt, RNAi
uuucaccacgaggcaggagaa

SEQ ID NO: 21932 - DNA, 21 bp, Homo sapiens
cactcctcctctatgtatttg

SEQ ID NO: 21933 - RNA, 21 nt, RNAi
cuccuccucuauguauuuguu

SEQ ID NO: 21934 - RNA, 21 nt, RNAi
uugaggaggagauacauaaac

SEQ ID NO: 21935 - DNA, 21 bp, Homo sapiens
caaacaattgctgatcacaca

SEQ ID NO: 21936 - RNA, 21 nt, RNAi
aacaauugcugaucacacauu

SEQ ID NO: 21937 - RNA, 21 nt, RNAi
uuuuguuaacgacuagugugu

SEQ ID NO: 21938 - DNA, 21 bp, Homo sapiens
cattgctattgaaggaccaga

SEQ ID NO: 21939 - RNA, 21 nt, RNAi
uugcuauugaaggaccagauu

SEQ ID NO: 21940 - RNA, 21 nt, RNAi
uuaacgauaacuuccuggucu

SEQ ID NO: 21941 - DNA, 21 bp, Homo sapiens
cagagatcatcatctccaaag

SEQ ID NO: 21942 - RNA, 21 nt, RNAi
gagaucaucaucuccaaaguu

SEQ ID NO: 21943 - RNA, 21 nt, RNAi
uucucuaguaguagagguuuc

SEQ ID NO: 21944 - DNA, 21 bp, Homo sapiens
catcatctccaaagagttgag

SEQ ID NO: 21945 - RNA, 21 nt, RNAi
ucaucuccaaagaguugaguu

SEQ ID NO: 21946 - RNA, 21 nt, RNAi
uuaguagagguuucucaacuc

SEQ ID NO: 21947 - DNA, 21 bp, Homo sapiens
catctccaaagagttgagcct

SEQ ID NO: 21948 - RNA, 21 nt, RNAi
ucuccaaagaguugagccuuu

SEQ ID NO: 21949 - RNA, 21 nt, RNAi
uuagagguuucucaacucgga

SEQ ID NO: 21950 - DNA, 21 bp, Homo sapiens
caaagagttgagcctcttatc

SEQ ID NO: 21951 - RNA, 21 nt, RNAi
aagaguugagccucuuaucuu

SEQ ID NO: 21952 - RNA, 21 nt, RNAi
uuuucucaacucggagaauag

SEQ ID NO: 21953 - DNA, 21 bp, Homo sapiens
caaccgcacagaaggctttat

SEQ ID NO: 21954 - RNA, 21 nt, RNAi
accgcacagaaggcuuuauuu

SEQ ID NO: 21955 - RNA, 21 nt, RNAi
uuuggcgugucuuccgaaaua

SEQ ID NO: 21956 - DNA, 21 bp, Homo sapiens
cactataattcaaccaaaggc

SEQ ID NO: 21957 - RNA, 21 nt, RNAi
cuauaauucaaccaaaggcuu

SEQ ID NO: 21958 - RNA, 21 nt, RNAi
uugauauuaaguugguuuccg

SEQ ID NO: 21959 - DNA, 21 bp, Homo sapiens
caaccaaaggctctgcaaatg

SEQ ID NO: 21960 - RNA, 21 nt, RNAi
accaaaggcucugcaaauguu

SEQ ID NO: 21961 - RNA, 21 nt, RNAi
uuugguuuccgagacguuuac

SEQ ID NO: 21962 - DNA, 21 bp, Homo sapiens
caaaggctctgcaaatgaccg

SEQ ID NO: 21963 - RNA, 21 nt, RNAi
aaggcucugcaaaugaccguu

SEQ ID NO: 21964 - RNA, 21 nt, RNAi
uuuuccgagacguuuacuggc

SEQ ID NO: 21965 - DNA, 21 bp, Homo sapiens
cagctcttcattgtgctggaa

SEQ ID NO: 21966 - RNA, 21 nt, RNAi
gcucuucauugugcuggaauu

SEQ ID NO: 21967 - RNA, 21 nt, RNAi
uucgagaaguaacacgaccuu

SEQ ID NO: 21968 - DNA, 21 bp, Homo sapiens
cattgtgctggaatttgagtt

SEQ ID NO: 21969 - RNA, 21 nt, RNAi
uugugcuggaauuugaguuuu

SEQ ID NO: 21970 - RNA, 21 nt, RNAi
uuaacacgaccuuaaacucaa

SEQ ID NO: 21971 - DNA, 21 bp, Homo sapiens
caaatgcgaaccaagttgtct

SEQ ID NO: 21972 - RNA, 21 nt, RNAi
aaugcgaaccaaguugucuuu

SEQ ID NO: 21973 - RNA, 21 nt, RNAi
uuuuacgcuugguucaacaga

SEQ ID NO: 21974 - DNA, 21 bp, Homo sapiens
caagttgtcttccttggctac

SEQ ID NO: 21975 - RNA, 21 nt, RNAi
aguugucuuccuuggcuacuu

SEQ ID NO: 21976 - RNA, 21 nt, RNAi
uuucaacagaaggaaccgaug

SEQ ID NO: 21977 - DNA, 21 bp, Homo sapiens
caaagagcattctacaccagc

SEQ ID NO: 21978 - RNA, 21 nt, RNAi
aagagcauucuacaccagcuu

SEQ ID NO: 21979 - RNA, 21 nt, RNAi
uuuucucguaagauguggucg

SEQ ID NO: 21980 - DNA, 21 bp, Homo sapiens
cattctacaccagctcacagc

SEQ ID NO: 21981 - RNA, 21 nt, RNAi
uucuacaccagcucacagcuu

SEQ ID NO: 21982 - RNA, 21 nt, RNAi
uuaagauguggucgagugucg

SEQ ID NO: 21983 - DNA, 21 bp, Homo sapiens
cagtggcagaggcatcactgc

SEQ ID NO: 21984 - RNA, 21 nt, RNAi
guggcagaggcaucacugcuu

SEQ ID NO: 21985 - RNA, 21 nt, RNAi
uucaccgucuccguagugacg

SEQ ID NO: 21986 - DNA, 21 bp, Homo sapiens
cagaggcatcactgcgctttg

SEQ ID NO: 21987 - RNA, 21 nt, RNAi
gaggcaucacugcgcuuuguu

SEQ ID NO: 21988 - RNA, 21 nt, RNAi
uucuccguagugacgcgaaac

SEQ ID NO: 21989 - DNA, 21 bp, Homo sapiens
catcactgcgctttgagcacc

SEQ ID NO: 21990 - RNA, 21 nt, RNAi
ucacugcgcuuugagcaccuu

SEQ ID NO: 21991 - RNA, 21 nt, RNAi
uuagugacgcgaaacucgugg

SEQ ID NO: 21992 - DNA, 21 bp, Homo sapiens
cactgcgctttgagcaccgag

SEQ ID NO: 21993 - RNA, 21 nt, RNAi
cugcgcuuugagcaccgaguu

SEQ ID NO: 21994 - RNA, 21 nt, RNAi
uugacgcgaaacucguggcuc

SEQ ID NO: 21995 - DNA, 21 bp, Homo sapiens
caagtgagcatcattgactac

SEQ ID NO: 21996 - RNA, 21 nt, RNAi
agugagcaucauugacuacuu

SEQ ID NO: 21997 - RNA, 21 nt, RNAi
uuucacucguaguaacugaug

SEQ ID NO: 21998 - DNA, 21 bp, Homo sapiens
catggatgaggacctgtttac

SEQ ID NO: 21999 - RNA, 21 nt, RNAi
uggaugaggaccuguuuacuu

SEQ ID NO: 22000 - RNA, 21 nt, RNAi
uuaccuacuccuggacaaaug

SEQ ID NO: 22001 - DNA, 21 bp, Homo sapiens
cagtttgacatctacaggctc

SEQ ID NO: 22002 - RNA, 21 nt, RNAi
guuugacaucuacaggcucuu

SEQ ID NO: 22003 - RNA, 21 nt, RNAi
uucaaacuguagauguccgag

SEQ ID NO: 22004 - DNA, 21 bp, Homo sapiens
catctacaggctcatgaagaa

SEQ ID NO: 22005 - RNA, 21 nt, RNAi
ucuacaggcucaugaagaauu

SEQ ID NO: 22006 - RNA, 21 nt, RNAi
uuagauguccgaguacuucuu

SEQ ID NO: 22007 - DNA, 21 bp, Homo sapiens
caggctcatgaagaaggagaa

SEQ ID NO: 22008 - RNA, 21 nt, RNAi
ggcucaugaagaaggagaauu

SEQ ID NO: 22009 - RNA, 21 nt, RNAi
uuccgaguacuucuuccucuu

SEQ ID NO: 22010 - DNA, 21 bp, Homo sapiens
catgaagaaggagaataacaa

SEQ ID NO: 22011 - RNA, 21 nt, RNAi
ugaagaaggagaauaacaauu

SEQ ID NO: 22012 - RNA, 21 nt, RNAi
uuacuucuuccucuuauuguu

SEQ ID NO: 22013 - DNA, 21 bp, Homo sapiens
cattacctgacagacaagatg

SEQ ID NO: 22014 - RNA, 21 nt, RNAi
uuaccugacagacaagauguu

SEQ ID NO: 22015 - RNA, 21 nt, RNAi
uuaauggacugucuguucuac

SEQ ID NO: 22016 - DNA, 21 bp, Homo sapiens
cagacaagatgctgaaacaaa

SEQ ID NO: 22017 - RNA, 21 nt, RNAi
gacaagaugcugaaacaaauu

SEQ ID NO: 22018 - RNA, 21 nt, RNAi
uucuguucuacgacuuuguuu

SEQ ID NO: 22019 - DNA, 21 bp, Homo sapiens
caagatgctgaaacaaatgac

SEQ ID NO: 22020 - RNA, 21 nt, RNAi
agaugcugaaacaaaugacuu

SEQ ID NO: 22021 - RNA, 21 nt, RNAi
uuucuacgacuuuguuuacug

SEQ ID NO: 22022 - DNA, 21 bp, Homo sapiens
caaatgaccttcaagactaaa

SEQ ID NO: 22023 - RNA, 21 nt, RNAi
aaugaccuucaagacuaaauu

SEQ ID NO: 22024 - RNA, 21 nt, RNAi
uuuuacuggaaguucugauuu

SEQ ID NO: 22025 - DNA, 21 bp, Homo sapiens
caagactaaatgtaacactcc

SEQ ID NO: 22026 - RNA, 21 nt, RNAi
agacuaaauguaacacuccuu

SEQ ID NO: 22027 - RNA, 21 nt, RNAi
uuucugauuuacauugugagg

SEQ ID NO: 22028 - DNA, 21 bp, Homo sapiens
cactcctgccatgaagcaaat

SEQ ID NO: 22029 - RNA, 21 nt, RNAi
cuccugccaugaagcaaauuu

SEQ ID NO: 22030 - RNA, 21 nt, RNAi
uugaggacgguacuucguuua

SEQ ID NO: 22031 - DNA, 21 bp, Homo sapiens
caggagttccacaggacaatg

SEQ ID NO: 22032 - RNA, 21 nt, RNAi
ggaguuccacaggacaauguu

SEQ ID NO: 22033 - RNA, 21 nt, RNAi
uuccucaagguguccuguuac

SEQ ID NO: 22034 - DNA, 21 bp, Homo sapiens
cacaggacaatgctgaacttc

SEQ ID NO: 22035 - RNA, 21 nt, RNAi
caggacaaugcugaacuucuu

SEQ ID NO: 22036 - RNA, 21 nt, RNAi
uuguccuguuacgacuugaag

SEQ ID NO: 22037 - DNA, 21 bp, Homo sapiens
caggacaatgctgaacttcag

SEQ ID NO: 22038 - RNA, 21 nt, RNAi
ggacaaugcugaacuucaguu

SEQ ID NO: 22039 - RNA, 21 nt, RNAi
uuccuguuacgacuugaaguc

SEQ ID NO: 22040 - DNA, 21 bp, Homo sapiens
caatgctgaacttcagctctg

SEQ ID NO: 22041 - RNA, 21 nt, RNAi
augcugaacuucagcucuguu

SEQ ID NO: 22042 - RNA, 21 nt, RNAi
uuuacgacuugaagucgagac

SEQ ID NO: 22043 - DNA, 21 bp, Homo sapiens
cagctctgccactgacttgct

SEQ ID NO: 22044 - RNA, 21 nt, RNAi
gcucugccacugacuugcuuu

SEQ ID NO: 22045 - RNA, 21 nt, RNAi
uucgagacggugacugaacga

SEQ ID NO: 22046 - DNA, 21 bp, Homo sapiens
cactgacttgctctgccagca

SEQ ID NO: 22047 - RNA, 21 nt, RNAi
cugacuugcucugccagcauu

SEQ ID NO: 22048 - RNA, 21 nt, RNAi
uugacugaacgagacggucgu

SEQ ID NO: 22049 - DNA, 21 bp, Homo sapiens
cagcacagtctgtttaagtaa

SEQ ID NO: 22050 - RNA, 21 nt, RNAi
gcacagucuguuuaaguaauu

SEQ ID NO: 22051 - RNA, 21 nt, RNAi
uucgugucagacaaauucauu

SEQ ID NO: 22052 - DNA, 21 bp, Homo sapiens
cacagtctgtttaagtaagct

SEQ ID NO: 22053 - RNA, 21 nt, RNAi
cagucuguuuaaguaagcuuu

SEQ ID NO: 22054 - RNA, 21 nt, RNAi
uugucagacaaauucauucga

SEQ ID NO: 22055 - DNA, 21 bp, Homo sapiens
cagtctgtttaagtaagctaa

SEQ ID NO: 22056 - RNA, 21 nt, RNAi
gucuguuuaaguaagcuaauu

SEQ ID NO: 22057 - RNA, 21 nt, RNAi
uucagacaaauucauucgauu

SEQ ID NO: 22058 - DNA, 21 bp, Homo sapiens
cattctcacaggtttccagtc

SEQ ID NO: 22059 - RNA, 21 nt, RNAi
uucucacagguuuccagucuu

SEQ ID NO: 22060 - RNA, 21 nt, RNAi
uuaagaguguccaaaggucag

SEQ ID NO: 22061 - DNA, 21 bp, Homo sapiens
cacaggtttccagtcagcttt

SEQ ID NO: 22062 - RNA, 21 nt, RNAi
cagguuuccagucagcuuuuu

SEQ ID NO: 22063 - RNA, 21 nt, RNAi
uuguccaaaggucagucgaaa

SEQ ID NO: 22064 - DNA, 21 bp, Homo sapiens
caagagttcatatctagcctg

SEQ ID NO: 22065 - RNA, 21 nt, RNAi
agaguucauaucuagccuguu

SEQ ID NO: 22066 - RNA, 21 nt, RNAi
uuucucaaguauagaucggac

SEQ ID NO: 22067 - DNA, 21 bp, Homo sapiens
catatctagcctggtcaacat

SEQ ID NO: 22068 - RNA, 21 nt, RNAi
uaucuagccuggucaacauuu

SEQ ID NO: 22069 - RNA, 21 nt, RNAi
uuauagaucggaccaguugua

SEQ ID NO: 22070 - DNA, 21 bp, Homo sapiens
gaccggaggcgtttcttcaac

SEQ ID NO: 22071 - RNA, 21 nt, RNAi
ccggaggcguuucuucaacuu

SEQ ID NO: 22072 - RNA, 21 nt, RNAi
uuggccuccgcaaagaaguug

SEQ ID NO: 22073 - DNA, 21 bp, Homo sapiens
gaggcgtttcttcaacagcag

SEQ ID NO: 22074 - RNA, 21 nt, RNAi
ggcguuucuucaacagcaguu

SEQ ID NO: 22075 - RNA, 21 nt, RNAi
uuccgcaaagaaguugucguc

SEQ ID NO: 22076 - DNA, 21 bp, Homo sapiens
gacagtgtcatctcgatcggc

SEQ ID NO: 22077 - RNA, 21 nt, RNAi
cagugucaucucgaucggcuu

SEQ ID NO: 22078 - RNA, 21 nt, RNAi
uugucacaguagagcuagccg

SEQ ID NO: 22079 - DNA, 21 bp, Homo sapiens
gaagcgacaggaggagccaag

SEQ ID NO: 22080 - RNA, 21 nt, RNAi
agcgacaggaggagccaaguu

SEQ ID NO: 22081 - RNA, 21 nt, RNAi
uuucgcuguccuccucgguuc

SEQ ID NO: 22082 - DNA, 21 bp, Homo sapiens
gacaggaggagccaaggacac

SEQ ID NO: 22083 - RNA, 21 nt, RNAi
caggaggagccaaggacacuu

SEQ ID NO: 22084 - RNA, 21 nt, RNAi
uuguccuccucgguuccugug

SEQ ID NO: 22085 - DNA, 21 bp, Homo sapiens
gaggagccaaggacaccagga

SEQ ID NO: 22086 - RNA, 21 nt, RNAi
ggagccaaggacaccaggauu

SEQ ID NO: 22087 - RNA, 21 nt, RNAi
uuccucgguuccugugguccu

SEQ ID NO: 22088 - DNA, 21 bp, Homo sapiens
gagccaaggacaccaggatgg

SEQ ID NO: 22089 - RNA, 21 nt, RNAi
gccaaggacaccaggaugguu

SEQ ID NO: 22090 - RNA, 21 nt, RNAi
uucgguuccugugguccuacc

SEQ ID NO: 22091 - DNA, 21 bp, Homo sapiens
gacaccaggatggtccaccaa

SEQ ID NO: 22092 - RNA, 21 nt, RNAi
caccaggaugguccaccaauu

SEQ ID NO: 22093 - RNA, 21 nt, RNAi
uugugguccuaccaggugguu

SEQ ID NO: 22094 - DNA, 21 bp, Homo sapiens
gaagaatatgagagagtcctg

SEQ ID NO: 22095 - RNA, 21 nt, RNAi
agaauaugagagaguccuguu

SEQ ID NO: 22096 - RNA, 21 nt, RNAi
uuucuuauacucucucaggac

SEQ ID NO: 22097 - DNA, 21 bp, Homo sapiens
gaatatgagagagtcctgctg

SEQ ID NO: 22098 - RNA, 21 nt, RNAi
auaugagagaguccugcuguu

SEQ ID NO: 22099 - RNA, 21 nt, RNAi
uuuauacucucucaggacgac

SEQ ID NO: 22100 - DNA, 21 bp, Homo sapiens
gagagagcatcaggaggccag

SEQ ID NO: 22101 - RNA, 21 nt, RNAi
gagagcaucaggaggccaguu

SEQ ID NO: 22102 - RNA, 21 nt, RNAi
uucucucguaguccuccgguc

SEQ ID NO: 22103 - DNA, 21 bp, Homo sapiens
gagagcatcaggaggccagtg

SEQ ID NO: 22104 - RNA, 21 nt, RNAi
gagcaucaggaggccaguguu

SEQ ID NO: 22105 - RNA, 21 nt, RNAi
uucucguaguccuccggucac

SEQ ID NO: 22106 - DNA, 21 bp, Homo sapiens
gagcatcaggaggccagtgtt

SEQ ID NO: 22107 - RNA, 21 nt, RNAi
gcaucaggaggccaguguuuu

SEQ ID NO: 22108 - RNA, 21 nt, RNAi
uucguaguccuccggucacaa

SEQ ID NO: 22109 - DNA, 21 bp, Homo sapiens
gaacagacaggctggagagaa

SEQ ID NO: 22110 - RNA, 21 nt, RNAi
acagacaggcuggagagaauu

SEQ ID NO: 22111 - RNA, 21 nt, RNAi
uuugucuguccgaccucucuu

SEQ ID NO: 22112 - DNA, 21 bp, Homo sapiens
gacaggctggagagaactaga

SEQ ID NO: 22113 - RNA, 21 nt, RNAi
caggcuggagagaacuagauu

SEQ ID NO: 22114 - RNA, 21 nt, RNAi
uuguccgaccucucuugaucu

SEQ ID NO: 22115 - DNA, 21 bp, Homo sapiens
gagagaactagatcaagccgg

SEQ ID NO: 22116 - RNA, 21 nt, RNAi
gagaacuagaucaagccgguu

SEQ ID NO: 22117 - RNA, 21 nt, RNAi
uucucuugaucuaguucggcc

SEQ ID NO: 22118 - DNA, 21 bp, Homo sapiens
gagaactagatcaagccggaa

SEQ ID NO: 22119 - RNA, 21 nt, RNAi
gaacuagaucaagccggaauu

SEQ ID NO: 22120 - RNA, 21 nt, RNAi
uucuugaucuaguucggccuu

SEQ ID NO: 22121 - DNA, 21 bp, Homo sapiens
gaactagatcaagccggaaga

SEQ ID NO: 22122 - RNA, 21 nt, RNAi
acuagaucaagccggaagauu

SEQ ID NO: 22123 - RNA, 21 nt, RNAi
uuugaucuaguucggccuucu

SEQ ID NO: 22124 - DNA, 21 bp, Homo sapiens
gatcaagccggaagagcaaac

SEQ ID NO: 22125 - RNA, 21 nt, RNAi
ucaagccggaagagcaaacuu

SEQ ID NO: 22126 - RNA, 21 nt, RNAi
uuaguucggccuucucguuug

SEQ ID NO: 22127 - DNA, 21 bp, Homo sapiens
gaagagcaaacatcaggaggc

SEQ ID NO: 22128 - RNA, 21 nt, RNAi
agagcaaacaucaggaggcuu

SEQ ID NO: 22129 - RNA, 21 nt, RNAi
uuucucguuuguaguccuccg

SEQ ID NO: 22130 - DNA, 21 bp, Homo sapiens
gagcaaacatcaggaggcaac

SEQ ID NO: 22131 - RNA, 21 nt, RNAi
gcaaacaucaggaggcaacuu

SEQ ID NO: 22132 - RNA, 21 nt, RNAi
uucguuuguaguccuccguug

SEQ ID NO: 22133 - DNA, 21 bp, Homo sapiens
gaggcaacggaaacctctctc

SEQ ID NO: 22134 - RNA, 21 nt, RNAi
ggcaacggaaaccucucucuu

SEQ ID NO: 22135 - RNA, 21 nt, RNAi
uuccguugccuuuggagagag

SEQ ID NO: 22136 - DNA, 21 bp, Homo sapiens
gaaacctctctcctccattcc

SEQ ID NO: 22137 - RNA, 21 nt, RNAi
aaccucucuccuccauuccuu

SEQ ID NO: 22138 - RNA, 21 nt, RNAi
uuuuggagagaggagguaagg

SEQ ID NO: 22139 - DNA, 21 bp, Homo sapiens
gacctgactcctttacagaat

SEQ ID NO: 22140 - RNA, 21 nt, RNAi
ccugacuccuuuacagaauuu

SEQ ID NO: 22141 - RNA, 21 nt, RNAi
uuggacugaggaaaugucuua

SEQ ID NO: 22142 - DNA, 21 bp, Homo sapiens
gactcctttacagaatgcctg

SEQ ID NO: 22143 - RNA, 21 nt, RNAi
cuccuuuacagaaugccuguu

SEQ ID NO: 22144 - RNA, 21 nt, RNAi
uugaggaaaugucuuacggac

SEQ ID NO: 22145 - DNA, 21 bp, Homo sapiens
gactgatgtgtcagaggtctg

SEQ ID NO: 22146 - RNA, 21 nt, RNAi
cugaugugucagaggucuguu

SEQ ID NO: 22147 - RNA, 21 nt, RNAi
uugacuacacagucuccagac

SEQ ID NO: 22148 - DNA, 21 bp, Homo sapiens
gatgtgtcagaggtctgcagc

SEQ ID NO: 22149 - RNA, 21 nt, RNAi
ugugucagaggucugcagcuu

SEQ ID NO: 22150 - RNA, 21 nt, RNAi
uuacacagucuccagacgucg

SEQ ID NO: 22151 - DNA, 21 bp, Homo sapiens
gaggtctgcagcatctatacc

SEQ ID NO: 22152 - RNA, 21 nt, RNAi
ggucugcagcaucuauaccuu

SEQ ID NO: 22153 - RNA, 21 nt, RNAi
uuccagacgucguagauaugg

SEQ ID NO: 22154 - DNA, 21 bp, Homo sapiens
gaatgttcaaaccggcctgtc

SEQ ID NO: 22155 - RNA, 21 nt, RNAi
auguucaaaccggccugucuu

SEQ ID NO: 22156 - RNA, 21 nt, RNAi
uuuacaaguuuggccggacag

SEQ ID NO: 22157 - DNA, 21 bp, Homo sapiens
gaacagaacaagtggtgctcc

SEQ ID NO: 22158 - RNA, 21 nt, RNAi
acagaacaaguggugcuccuu

SEQ ID NO: 22159 - RNA, 21 nt, RNAi
uuugucuuguucaccacgagg

SEQ ID NO: 22160 - DNA, 21 bp, Homo sapiens
gaacaagtggtgctccgtcct

SEQ ID NO: 22161 - RNA, 21 nt, RNAi
acaaguggugcuccguccuuu

SEQ ID NO: 22162 - RNA, 21 nt, RNAi
uuuguucaccacgaggcagga

SEQ ID NO: 22163 - DNA, 21 bp, Homo sapiens
gaagtgtttcaaacaattgct

SEQ ID NO: 22164 - RNA, 21 nt, RNAi
aguguuucaaacaauugcuuu

SEQ ID NO: 22165 - RNA, 21 nt, RNAi
uuucacaaaguuuguuaacga

SEQ ID NO: 22166 - DNA, 21 bp, Homo sapiens
gaaggaccagatttagtcaat

SEQ ID NO: 22167 - RNA, 21 nt, RNAi
aggaccagauuuagucaauuu

SEQ ID NO: 22168 - RNA, 21 nt, RNAi
uuuccuggucuaaaucaguua

SEQ ID NO: 22169 - DNA, 21 bp, Homo sapiens
gaccagatttagtcaatggat

SEQ ID NO: 22170 - RNA, 21 nt, RNAi
ccagauuuagucaauggauuu

SEQ ID NO: 22171 - RNA, 21 nt, RNAi
uuggucuaaaucaguuaccua

SEQ ID NO: 22172 - DNA, 21 bp, Homo sapiens
gaggaaatcctgccagagatc

SEQ ID NO: 22173 - RNA, 21 nt, RNAi
ggaaauccugccagagaucuu

SEQ ID NO: 22174 - RNA, 21 nt, RNAi
uuccuuuaggacggucucuag

SEQ ID NO: 22175 - DNA, 21 bp, Homo sapiens
gaaatcctgccagagatcatc

SEQ ID NO: 22176 - RNA, 21 nt, RNAi
aauccugccagagaucaucuu

SEQ ID NO: 22177 - RNA, 21 nt, RNAi
uuuuaggacggucucuaguag

SEQ ID NO: 22178 - DNA, 21 bp, Homo sapiens
gagatcatcatctccaaagag

SEQ ID NO: 22179 - RNA, 21 nt, RNAi
gaucaucaucuccaaagaguu

SEQ ID NO: 22180 - RNA, 21 nt, RNAi
uucuaguaguagagguuucuc

SEQ ID NO: 22181 - DNA, 21 bp, Homo sapiens
gatcatcatctccaaagagtt

SEQ ID NO: 22182 - RNA, 21 nt, RNAi
ucaucaucuccaaagaguuuu

SEQ ID NO: 22183 - RNA, 21 nt, RNAi
uuaguaguagagguuucucaa

SEQ ID NO: 22184 - DNA, 21 bp, Homo sapiens
gagttgagcctcttatccggt

SEQ ID NO: 22185 - RNA, 21 nt, RNAi
guugagccucuuauccgguuu

SEQ ID NO: 22186 - RNA, 21 nt, RNAi
uucaacucggagaauaggcca

SEQ ID NO: 22187 - DNA, 21 bp, Homo sapiens
gagcctcttatccggtgaagt

SEQ ID NO: 22188 - RNA, 21 nt, RNAi
gccucuuauccggugaaguuu

SEQ ID NO: 22189 - RNA, 21 nt, RNAi
uucggagaauaggccacuuca

SEQ ID NO: 22190 - DNA, 21 bp, Homo sapiens
gaagtgtgcaaccgcacagaa

SEQ ID NO: 22191 - RNA, 21 nt, RNAi
agugugcaaccgcacagaauu

SEQ ID NO: 22192 - RNA, 21 nt, RNAi
uuucacacguuggcgugucuu

SEQ ID NO: 22193 - DNA, 21 bp, Homo sapiens
gaactcagtgcactgtgtcca

SEQ ID NO: 22194 - RNA, 21 nt, RNAi
acucagugcacuguguccauu

SEQ ID NO: 22195 - RNA, 21 nt, RNAi
uuugagucacgugacacaggu

SEQ ID NO: 22196 - DNA, 21 bp, Homo sapiens
gacgaccagctcttcattgtg

SEQ ID NO: 22197 - RNA, 21 nt, RNAi
cgaccagcucuucauuguguu

SEQ ID NO: 22198 - RNA, 21 nt, RNAi
uugcuggucgagaaguaacac

SEQ ID NO: 22199 - DNA, 21 bp, Homo sapiens
gaccagctcttcattgtgctg

SEQ ID NO: 22200 - RNA, 21 nt, RNAi
ccagcucuucauugugcuguu

SEQ ID NO: 22201 - RNA, 21 nt, RNAi
uuggucgagaaguaacacgac

SEQ ID NO: 22202 - DNA, 21 bp, Homo sapiens
gattgacttagagcaaatgcg

SEQ ID NO: 22203 - RNA, 21 nt, RNAi
uugacuuagagcaaaugcguu

SEQ ID NO: 22204 - RNA, 21 nt, RNAi
uuaacugaaucucguuuacgc

SEQ ID NO: 22205 - DNA, 21 bp, Homo sapiens
gacttagagcaaatgcgaacc

SEQ ID NO: 22206 - RNA, 21 nt, RNAi
cuuagagcaaaugcgaaccuu

SEQ ID NO: 22207 - RNA, 21 nt, RNAi
uugaaucucguuuacgcuugg

SEQ ID NO: 22208 - DNA, 21 bp, Homo sapiens
gagcaaatgcgaaccaagttg

SEQ ID NO: 22209 - RNA, 21 nt, RNAi
gcaaaugcgaaccaaguuguu

SEQ ID NO: 22210 - RNA, 21 nt, RNAi
uucguuuacgcuugguucaac

SEQ ID NO: 22211 - DNA, 21 bp, Homo sapiens
gaaccaagttgtcttccttgg

SEQ ID NO: 22212 - RNA, 21 nt, RNAi
accaaguugucuuccuugguu

SEQ ID NO: 22213 - RNA, 21 nt, RNAi
uuugguucaacagaaggaacc

SEQ ID NO: 22214 - DNA, 21 bp, Homo sapiens
gagcattctacaccagctcac

SEQ ID NO: 22215 - RNA, 21 nt, RNAi
gcauucuacaccagcucacuu

SEQ ID NO: 22216 - RNA, 21 nt, RNAi
uucguaagauguggucgagug

SEQ ID NO: 22217 - DNA, 21 bp, Homo sapiens
gaggcatcactgcgctttgag

SEQ ID NO: 22218 - RNA, 21 nt, RNAi
ggcaucacugcgcuuugaguu

SEQ ID NO: 22219 - RNA, 21 nt, RNAi
uuccguagugacgcgaaacuc

SEQ ID NO: 22220 - DNA, 21 bp, Homo sapiens
gagcaccgagacttacactgg

SEQ ID NO: 22221 - RNA, 21 nt, RNAi
gcaccgagacuuacacugguu

SEQ ID NO: 22222 - RNA, 21 nt, RNAi
uucguggcucugaaugugacc

SEQ ID NO: 22223 - DNA, 21 bp, Homo sapiens
gacgtttccatggatgaggac

SEQ ID NO: 22224 - RNA, 21 nt, RNAi
cguuuccauggaugaggacuu

SEQ ID NO: 22225 - RNA, 21 nt, RNAi
uugcaaagguaccuacuccug

SEQ ID NO: 22226 - DNA, 21 bp, Homo sapiens
gatgaggacctgtttaccggt

SEQ ID NO: 22227 - RNA, 21 nt, RNAi
ugaggaccuguuuaccgguuu

SEQ ID NO: 22228 - RNA, 21 nt, RNAi
uuacuccuggacaaauggcca

SEQ ID NO: 22229 - DNA, 21 bp, Homo sapiens
gaggacctgtttaccggtgac

SEQ ID NO: 22230 - RNA, 21 nt, RNAi
ggaccuguuuaccggugacuu

SEQ ID NO: 22231 - RNA, 21 nt, RNAi
uuccuggacaaauggccacug

SEQ ID NO: 22232 - DNA, 21 bp, Homo sapiens
gacctgtttaccggtgacggt

SEQ ID NO: 22233 - RNA, 21 nt, RNAi
ccuguuuaccggugacgguuu

SEQ ID NO: 22234 - RNA, 21 nt, RNAi
uuggacaaauggccacugcca

SEQ ID NO: 22235 - DNA, 21 bp, Homo sapiens
gacggtgactaccagtttgac

SEQ ID NO: 22236 - RNA, 21 nt, RNAi
cggugacuaccaguuugacuu

SEQ ID NO: 22237 - RNA, 21 nt, RNAi
uugccacugauggucaaacug

SEQ ID NO: 22238 - DNA, 21 bp, Homo sapiens
gactaccagtttgacatctac

SEQ ID NO: 22239 - RNA, 21 nt, RNAi
cuaccaguuugacaucuacuu

SEQ ID NO: 22240 - RNA, 21 nt, RNAi
uugauggucaaacuguagaug

SEQ ID NO: 22241 - DNA, 21 bp, Homo sapiens
gacatctacaggctcatgaag

SEQ ID NO: 22242 - RNA, 21 nt, RNAi
caucuacaggcucaugaaguu

SEQ ID NO: 22243 - RNA, 21 nt, RNAi
uuguagauguccgaguacuuc

SEQ ID NO: 22244 - DNA, 21 bp, Homo sapiens
gaagaaggagaataacaaccg

SEQ ID NO: 22245 - RNA, 21 nt, RNAi
agaaggagaauaacaaccguu

SEQ ID NO: 22246 - RNA, 21 nt, RNAi
uuucuuccucuuauuguuggc

SEQ ID NO: 22247 - DNA, 21 bp, Homo sapiens
gaaggagaataacaaccgctg

SEQ ID NO: 22248 - RNA, 21 nt, RNAi
aggagaauaacaaccgcuguu

SEQ ID NO: 22249 - RNA, 21 nt, RNAi
uuuccucuuauuguuggcgac

SEQ ID NO: 22250 - DNA, 21 bp, Homo sapiens
gacagacaagatgctgaaaca

SEQ ID NO: 22251 - RNA, 21 nt, RNAi
cagacaagaugcugaaacauu

SEQ ID NO: 22252 - RNA, 21 nt, RNAi
uugucuguucuacgacuuugu

SEQ ID NO: 22253 - DNA, 21 bp, Homo sapiens
gacaagatgctgaaacaaatg

SEQ ID NO: 22254 - RNA, 21 nt, RNAi
caagaugcugaaacaaauguu

SEQ ID NO: 22255 - RNA, 21 nt, RNAi
uuguucuacgacuuuguuuac

SEQ ID NO: 22256 - DNA, 21 bp, Homo sapiens
gatgctgaaacaaatgacctt

SEQ ID NO: 22257 - RNA, 21 nt, RNAi
ugcugaaacaaaugaccuuuu

SEQ ID NO: 22258 - RNA, 21 nt, RNAi
uuacgacuuuguuuacuggaa

SEQ ID NO: 22259 - DNA, 21 bp, Homo sapiens
gaaacaaatgaccttcaagac

SEQ ID NO: 22260 - RNA, 21 nt, RNAi
aacaaaugaccuucaagacuu

SEQ ID NO: 22261 - RNA, 21 nt, RNAi
uuuuguuuacuggaaguucug

SEQ ID NO: 22262 - DNA, 21 bp, Homo sapiens
gaccttcaagactaaatgtaa

SEQ ID NO: 22263 - RNA, 21 nt, RNAi
ccuucaagacuaaauguaauu

SEQ ID NO: 22264 - RNA, 21 nt, RNAi
uuggaaguucugauuuacauu

SEQ ID NO: 22265 - DNA, 21 bp, Homo sapiens
gactaaatgtaacactcctgc

SEQ ID NO: 22266 - RNA, 21 nt, RNAi
cuaaauguaacacuccugcuu

SEQ ID NO: 22267 - RNA, 21 nt, RNAi
uugauuuacauugugaggacg

SEQ ID NO: 22268 - DNA, 21 bp, Homo sapiens
gagttccacaggacaatgctg

SEQ ID NO: 22269 - RNA, 21 nt, RNAi
guuccacaggacaaugcuguu

SEQ ID NO: 22270 - RNA, 21 nt, RNAi
uucaagguguccuguuacgac

SEQ ID NO: 22271 - DNA, 21 bp, Homo sapiens
gacaatgctgaacttcagctc

SEQ ID NO: 22272 - RNA, 21 nt, RNAi
caaugcugaacuucagcucuu

SEQ ID NO: 22273 - RNA, 21 nt, RNAi
uuguuacgacuugaagucgag

SEQ ID NO: 22274 - DNA, 21 bp, Homo sapiens
gaacttcagctctgccactga

SEQ ID NO: 22275 - RNA, 21 nt, RNAi
acuucagcucugccacugauu

SEQ ID NO: 22276 - RNA, 21 nt, RNAi
uuugaagucgagacggugacu

SEQ ID NO: 22277 - DNA, 21 bp, Homo sapiens
gacttgctctgccagcacagt

SEQ ID NO: 22278 - RNA, 21 nt, RNAi
cuugcucugccagcacaguuu

SEQ ID NO: 22279 - RNA, 21 nt, RNAi
uugaacgagacggucguguca

SEQ ID NO: 22280 - DNA, 21 bp, Homo sapiens
gaaatgagaggagactggtct

SEQ ID NO: 22281 - RNA, 21 nt, RNAi
aaugagaggagacuggucuuu

SEQ ID NO: 22282 - RNA, 21 nt, RNAi
uuuuacucuccucugaccaga

SEQ ID NO: 22283 - DNA, 21 bp, Homo sapiens
gagaggagactggtcttgaag

SEQ ID NO: 22284 - RNA, 21 nt, RNAi
gaggagacuggucuugaaguu

SEQ ID NO: 22285 - RNA, 21 nt, RNAi
uucuccucugaccagaacuuc

SEQ ID NO: 22286 - DNA, 21 bp, Homo sapiens
gaggagactggtcttgaagcc

SEQ ID NO: 22287 - RNA, 21 nt, RNAi
ggagacuggucuugaagccuu

SEQ ID NO: 22288 - RNA, 21 nt, RNAi
uuccucugaccagaacuucgg

SEQ ID NO: 22289 - DNA, 21 bp, Homo sapiens
gagactggtcttgaagcctct

SEQ ID NO: 22290 - RNA, 21 nt, RNAi
gacuggucuugaagccucuuu

SEQ ID NO: 22291 - RNA, 21 nt, RNAi
uucugaccagaacuucggaga

SEQ ID NO: 22292 - DNA, 21 bp, Homo sapiens
gactggtcttgaagcctctgg

SEQ ID NO: 22293 - RNA, 21 nt, RNAi
cuggucuugaagccucugguu

SEQ ID NO: 22294 - RNA, 21 nt, RNAi
uugaccagaacuucggagacc

SEQ ID NO: 22295 - DNA, 21 bp, Homo sapiens
gaagcctctggtgctgtttca

SEQ ID NO: 22296 - RNA, 21 nt, RNAi
agccucuggugcuguuucauu

SEQ ID NO: 22297 - RNA, 21 nt, RNAi
uuucggagaccacgacaaagu

SEQ ID NO: 22298 - DNA, 21 bp, Homo sapiens
gaggcaggaggatcgcttgag

SEQ ID NO: 22299 - RNA, 21 nt, RNAi
ggcaggaggaucgcuugaguu

SEQ ID NO: 22300 - RNA, 21 nt, RNAi
uuccguccuccuagcgaacuc

SEQ ID NO: 22301 - DNA, 21 bp, Homo sapiens
gagttcatatctagcctggtc

SEQ ID NO: 22302 - RNA, 21 nt, RNAi
guucauaucuagccuggucuu

SEQ ID NO: 22303 - RNA, 21 nt, RNAi
uucaaguauagaucggaccag

SEQ ID NO: 22304 - DNA, 21 bp, Homo sapiens
tatgagagagtcctgctgtaa

SEQ ID NO: 22305 - RNA, 21 nt, RNAi
ugagagaguccugcuguaauu

SEQ ID NO: 22306 - RNA, 21 nt, RNAi
uuacucucucaggacgacauu

SEQ ID NO: 22307 - DNA, 21 bp, Homo sapiens
tagatcaagccggaagagcaa

SEQ ID NO: 22308 - RNA, 21 nt, RNAi
gaucaagccggaagagcaauu

SEQ ID NO: 22309 - RNA, 21 nt, RNAi
uucuaguucggccuucucguu

SEQ ID NO: 22310 - DNA, 21 bp, Homo sapiens
tataccactgccacttctctc

SEQ ID NO: 22311 - RNA, 21 nt, RNAi
uaccacugccacuucucucuu

SEQ ID NO: 22312 - RNA, 21 nt, RNAi
uuauggugacggugaagagag

SEQ ID NO: 22313 - DNA, 21 bp, Homo sapiens
taccactgccacttctctctc

SEQ ID NO: 22314 - RNA, 21 nt, RNAi
ccacugccacuucucucucuu

SEQ ID NO: 22315 - RNA, 21 nt, RNAi
uuggugacggugaagagagag

SEQ ID NO: 22316 - DNA, 21 bp, Homo sapiens
tatcagaatgttcaaaccggc

SEQ ID NO: 22317 - RNA, 21 nt, RNAi
ucagaauguucaaaccggcuu

SEQ ID NO: 22318 - RNA, 21 nt, RNAi
uuagucuuacaaguuuggccg

SEQ ID NO: 22319 - DNA, 21 bp, Homo sapiens
tattgaaggaccagatttagt

SEQ ID NO: 22320 - RNA, 21 nt, RNAi
uugaaggaccagauuuaguuu

SEQ ID NO: 22321 - RNA, 21 nt, RNAi
uuaacuuccuggucuaaauca

SEQ ID NO: 22322 - DNA, 21 bp, Homo sapiens
tatccggtgaagtgtgcaacc

SEQ ID NO: 22323 - RNA, 21 nt, RNAi
uccggugaagugugcaaccuu

SEQ ID NO: 22324 - RNA, 21 nt, RNAi
uuaggccacuucacacguugg

SEQ ID NO: 22325 - DNA, 21 bp, Homo sapiens
tataattcaaccaaaggctct

SEQ ID NO: 22326 - RNA, 21 nt, RNAi
uaauucaaccaaaggcucuuu

SEQ ID NO: 22327 - RNA, 21 nt, RNAi
uuauuaaguugguuuccgaga

SEQ ID NO: 22328 - DNA, 21 bp, Homo sapiens
taattcaaccaaaggctctgc

SEQ ID NO: 22329 - RNA, 21 nt, RNAi
auucaaccaaaggcucugcuu

SEQ ID NO: 22330 - RNA, 21 nt, RNAi
uuuaaguugguuuccgagacg

SEQ ID NO: 22331 - DNA, 21 bp, Homo sapiens
taaagacgaccagctcttcat

SEQ ID NO: 22332 - RNA, 21 nt, RNAi
aagacgaccagcucuucauuu

SEQ ID NO: 22333 - RNA, 21 nt, RNAi
uuuucugcuggucgagaagua

SEQ ID NO: 22334 - DNA, 21 bp, Homo sapiens
tagagcaaatgcgaaccaagt

SEQ ID NO: 22335 - RNA, 21 nt, RNAi
gagcaaaugcgaaccaaguuu

SEQ ID NO: 22336 - RNA, 21 nt, RNAi
uucucguuuacgcuugguuca

SEQ ID NO: 22337 - DNA, 21 bp, Homo sapiens
tactgcaaagagcattctaca

SEQ ID NO: 22338 - RNA, 21 nt, RNAi
cugcaaagagcauucuacauu

SEQ ID NO: 22339 - RNA, 21 nt, RNAi
uugacguuucucguaagaugu

SEQ ID NO: 22340 - DNA, 21 bp, Homo sapiens
taccggtgacggtgactacca

SEQ ID NO: 22341 - RNA, 21 nt, RNAi
ccggugacggugacuaccauu

SEQ ID NO: 22342 - RNA, 21 nt, RNAi
uuggccacugccacugauggu

SEQ ID NO: 22343 - DNA, 21 bp, Homo sapiens
taccagtttgacatctacagg

SEQ ID NO: 22344 - RNA, 21 nt, RNAi
ccaguuugacaucuacagguu

SEQ ID NO: 22345 - RNA, 21 nt, RNAi
uuggucaaacuguagaugucc

SEQ ID NO: 22346 - DNA, 21 bp, Homo sapiens
tacaggctcatgaagaaggag

SEQ ID NO: 22347 - RNA, 21 nt, RNAi
caggcucaugaagaaggaguu

SEQ ID NO: 22348 - RNA, 21 nt, RNAi
uuguccgaguacuucuuccuc

SEQ ID NO: 22349 - DNA, 21 bp, Homo sapiens
tatagtaatgtgctctggtta

SEQ ID NO: 22350 - RNA, 21 nt, RNAi
uaguaaugugcucugguuauu

SEQ ID NO: 22351 - RNA, 21 nt, RNAi
uuaucauuacacgagaccaau

SEQ ID NO: 22352 - DNA, 21 bp, Homo sapiens
tagtaatgtgctctggttaca

SEQ ID NO: 22353 - RNA, 21 nt, RNAi
guaaugugcucugguuacauu

SEQ ID NO: 22354 - RNA, 21 nt, RNAi
uucauuacacgagaccaaugu

SEQ ID NO: 22355 - DNA, 21 bp, Homo sapiens
taatgtgctctggttacatta

SEQ ID NO: 22356 - RNA, 21 nt, RNAi
augugcucugguuacauuauu

SEQ ID NO: 22357 - RNA, 21 nt, RNAi
uuuacacgagaccaauguaau

SEQ ID NO: 22358 - DNA, 21 bp, Homo sapiens
tacattacctgacagacaaga

SEQ ID NO: 22359 - RNA, 21 nt, RNAi
cauuaccugacagacaagauu

SEQ ID NO: 22360 - RNA, 21 nt, RNAi
uuguaauggacugucuguucu

SEQ ID NO: 22361 - DNA, 21 bp, Homo sapiens
tacctgacagacaagatgctg

SEQ ID NO: 22362 - RNA, 21 nt, RNAi
ccugacagacaagaugcuguu

SEQ ID NO: 22363 - RNA, 21 nt, RNAi
uuggacugucuguucuacgac

SEQ ID NO: 22364 - DNA, 21 bp, Homo sapiens
taaatgtaacactcctgccat

SEQ ID NO: 22365 - RNA, 21 nt, RNAi
aauguaacacuccugccauuu

SEQ ID NO: 22366 - RNA, 21 nt, RNAi
uuuuacauugugaggacggua

SEQ ID NO: 22367 - DNA, 21 bp, Homo sapiens
taacactcctgccatgaagca

SEQ ID NO: 22368 - RNA, 21 nt, RNAi
acacuccugccaugaagcauu

SEQ ID NO: 22369 - RNA, 21 nt, RNAi
uuugugaggacgguacuucgu

SEQ ID NO: 22370 - DNA, 21 bp, Homo sapiens
tatctagcctggtcaacatag

SEQ ID NO: 22371 - RNA, 21 nt, RNAi
ucuagccuggucaacauaguu

SEQ ID NO: 22372 - RNA, 21 nt, RNAi
uuagaucggaccaguuguauc

SEQ ID NO: 22373 - DNA, 21 bp, Homo sapiens
tagcctggtcaacatagcaag

SEQ ID NO: 22374 - RNA, 21 nt, RNAi
gccuggucaacauagcaaguu

SEQ ID NO: 22375 - RNA, 21 nt, RNAi
uucggaccaguuguaucguuc

SEQ ID NO: 22376 - DNA, 21 bp, Homo sapiens
aactagatcaagccggaagag

SEQ ID NO: 22377 - RNA, 21 nt, RNAi
cuagaucaagccggaagaguu

SEQ ID NO: 22378 - RNA, 21 nt, RNAi
uugaucuaguucggccuucuc

SEQ ID NO: 22379 - DNA, 21 bp, Homo sapiens
aagccggaagagcaaacatca

SEQ ID NO: 22380 - RNA, 21 nt, RNAi
gccggaagagcaaacaucauu

SEQ ID NO: 22381 - RNA, 21 nt, RNAi
uucggccuucucguuuguagu

SEQ ID NO: 22382 - DNA, 21 bp, Homo sapiens
aatgttcaaaccggcctgtca

SEQ ID NO: 22383 - RNA, 21 nt, RNAi
uguucaaaccggccugucauu

SEQ ID NO: 22384 - RNA, 21 nt, RNAi
uuacaaguuuggccggacagu

SEQ ID NO: 22385 - DNA, 21 bp, Homo sapiens
aaggaccagatttagtcaatg

SEQ ID NO: 22386 - RNA, 21 nt, RNAi
ggaccagauuuagucaauguu

SEQ ID NO: 22387 - RNA, 21 nt, RNAi
uuccuggucuaaaucaguuac

SEQ ID NO: 22388 - DNA, 21 bp, Homo sapiens
aaatcctgccagagatcatca

SEQ ID NO: 22389 - RNA, 21 nt, RNAi
auccugccagagaucaucauu

SEQ ID NO: 22390 - RNA, 21 nt, RNAi
uuuaggacggucucuaguagu

SEQ ID NO: 22391 - DNA, 21 bp, Homo sapiens
aatcctgccagagatcatcat

SEQ ID NO: 22392 - RNA, 21 nt, RNAi
uccugccagagaucaucauuu

SEQ ID NO: 22393 - RNA, 21 nt, RNAi
uuaggacggucucuaguagua

SEQ ID NO: 22394 - DNA, 21 bp, Homo sapiens
aaagagttgagcctcttatcc

SEQ ID NO: 22395 - RNA, 21 nt, RNAi
agaguugagccucuuauccuu

SEQ ID NO: 22396 - RNA, 21 nt, RNAi
uuucucaacucggagaauagg

SEQ ID NO: 22397 - DNA, 21 bp, Homo sapiens
aagagttgagcctcttatccg

SEQ ID NO: 22398 - RNA, 21 nt, RNAi
gaguugagccucuuauccguu

SEQ ID NO: 22399 - RNA, 21 nt, RNAi
uucucaacucggagaauaggc

SEQ ID NO: 22400 - DNA, 21 bp, Homo sapiens
aattcaaccaaaggctctgca

SEQ ID NO: 22401 - RNA, 21 nt, RNAi
uucaaccaaaggcucugcauu

SEQ ID NO: 22402 - RNA, 21 nt, RNAi
uuaaguugguuuccgagacgu

SEQ ID NO: 22403 - DNA, 21 bp, Homo sapiens
aagtgagcatcattgactaca

SEQ ID NO: 22404 - RNA, 21 nt, RNAi
gugagcaucauugacuacauu

SEQ ID NO: 22405 - RNA, 21 nt, RNAi
uucacucguaguaacugaugu

SEQ ID NO: 22406 - DNA, 21 bp, Homo sapiens
aaggagaataacaaccgctgg

SEQ ID NO: 22407 - RNA, 21 nt, RNAi
ggagaauaacaaccgcugguu

SEQ ID NO: 22408 - RNA, 21 nt, RNAi
uuccucuuauuguuggcgacc

SEQ ID NO: 22409 - DNA, 21 bp, Homo sapiens
caagccggaagagcaaacatc

SEQ ID NO: 22410 - RNA, 21 nt, RNAi
agccggaagagcaaacaucuu

SEQ ID NO: 22411 - RNA, 21 nt, RNAi
uuucggccuucucguuuguag

SEQ ID NO: 22412 - DNA, 21 bp, Homo sapiens
cagaatgttcaaaccggcctg

SEQ ID NO: 22413 - RNA, 21 nt, RNAi
gaauguucaaaccggccuguu

SEQ ID NO: 22414 - RNA, 21 nt, RNAi
uucuuacaaguuuggccggac

SEQ ID NO: 22415 - DNA, 21 bp, Homo sapiens
caaaccggcctgtcatgaaca

SEQ ID NO: 22416 - RNA, 21 nt, RNAi
aaccggccugucaugaacauu

SEQ ID NO: 22417 - RNA, 21 nt, RNAi
uuuuggccggacaguacuugu

SEQ ID NO: 22418 - DNA, 21 bp, Homo sapiens
catgaacagaacaagtggtgc

SEQ ID NO: 22419 - RNA, 21 nt, RNAi
ugaacagaacaaguggugcuu

SEQ ID NO: 22420 - RNA, 21 nt, RNAi
uuacuugucuuguucaccacg

SEQ ID NO: 22421 - DNA, 21 bp, Homo sapiens
caaacaattgctgatcacaca

SEQ ID NO: 22422 - RNA, 21 nt, RNAi
aacaauugcugaucacacauu

SEQ ID NO: 22423 - RNA, 21 nt, RNAi
uuuuguuaacgacuagugugu

SEQ ID NO: 22424 - DNA, 21 bp, Homo sapiens
caaatgcgaaccaagttgtct

SEQ ID NO: 22425 - RNA, 21 nt, RNAi
aaugcgaaccaaguugucuuu

SEQ ID NO: 22426 - RNA, 21 nt, RNAi
uuuuacgcuugguucaacaga

SEQ ID NO: 22427 - DNA, 21 bp, Homo sapiens
caagtgagcatcattgactac

SEQ ID NO: 22428 - RNA, 21 nt, RNAi
agugagcaucauugacuacuu

SEQ ID NO: 22429 - RNA, 21 nt, RNAi
uuucacucguaguaacugaug

SEQ ID NO: 22430 - DNA, 21 bp, Homo sapiens
gagagaactagatcaagccgg

SEQ ID NO: 22431 - RNA, 21 nt, RNAi
gagaacuagaucaagccgguu

SEQ ID NO: 22432 - RNA, 21 nt, RNAi
uucucuugaucuaguucggcc

SEQ ID NO: 22433 - DNA, 21 bp, Homo sapiens
gagaactagatcaagccggaa

SEQ ID NO: 22434 - RNA, 21 nt, RNAi
gaacuagaucaagccggaauu

SEQ ID NO: 22435 - RNA, 21 nt, RNAi
uucuugaucuaguucggccuu

SEQ ID NO: 22436 - DNA, 21 bp, Homo sapiens
gaactagatcaagccggaaga

SEQ ID NO: 22437 - RNA, 21 nt, RNAi
acuagaucaagccggaagauu

SEQ ID NO: 22438 - RNA, 21 nt, RNAi
uuugaucuaguucggccuucu

SEQ ID NO: 22439 - DNA, 21 bp, Homo sapiens
gatcaagccggaagagcaaac

SEQ ID NO: 22440 - RNA, 21 nt, RNAi
ucaagccggaagagcaaacuu

SEQ ID NO: 22441 - RNA, 21 nt, RNAi
uuaguucggccuucucguuug

SEQ ID NO: 22442 - DNA, 21 bp, Homo sapiens
gaatgttcaaaccggcctgtc

SEQ ID NO: 22443 - RNA, 21 nt, RNAi
auguucaaaccggccugucuu

SEQ ID NO: 22444 - RNA, 21 nt, RNAi
uuuacaaguuuggccggacag

SEQ ID NO: 22445 - DNA, 21 bp, Homo sapiens
gaacagaacaagtggtgctcc

SEQ ID NO: 22446 - RNA, 21 nt, RNAi
acagaacaaguggugcuccuu

SEQ ID NO: 22447 - RNA, 21 nt, RNAi
uuugucuuguucaccacgagg

SEQ ID NO: 22448 - DNA, 21 bp, Homo sapiens
gaaggaccagatttagtcaat

SEQ ID NO: 22449 - RNA, 21 nt, RNAi
aggaccagauuuagucaauuu

SEQ ID NO: 22450 - RNA, 21 nt, RNAi
uuuccuggucuaaaucaguua

SEQ ID NO: 22451 - DNA, 21 bp, Homo sapiens
gaccagatttagtcaatggat

SEQ ID NO: 22452 - RNA, 21 nt, RNAi
ccagauuuagucaauggauuu

SEQ ID NO: 22453 - RNA, 21 nt, RNAi
uuggucuaaaucaguuaccua

SEQ ID NO: 22454 - DNA, 21 bp, Homo sapiens
gaggaaatcctgccagagatc

SEQ ID NO: 22455 - RNA, 21 nt, RNAi
ggaaauccugccagagaucuu

SEQ ID NO: 22456 - RNA, 21 nt, RNAi
uuccuuuaggacggucucuag

SEQ ID NO: 22457 - DNA, 21 bp, Homo sapiens
gaaatcctgccagagatcatc

SEQ ID NO: 22458 - RNA, 21 nt, RNAi
aauccugccagagaucaucuu

SEQ ID NO: 22459 - RNA, 21 nt, RNAi
uuuuaggacggucucuaguag

SEQ ID NO: 22460 - DNA, 21 bp, Homo sapiens
gagttgagcctcttatccggt

SEQ ID NO: 22461 - RNA, 21 nt, RNAi
guugagccucuuauccgguuu

SEQ ID NO: 22462 - RNA, 21 nt, RNAi
uucaacucggagaauaggcca

SEQ ID NO: 22463 - DNA, 21 bp, Homo sapiens
gagcctcttatccggtgaagt

SEQ ID NO: 22464 - RNA, 21 nt, RNAi
gccucuuauccggugaaguuu

SEQ ID NO: 22465 - RNA, 21 nt, RNAi
uucggagaauaggccacuuca

SEQ ID NO: 22466 - DNA, 21 bp, Homo sapiens
gattgacttagagcaaatgcg

SEQ ID NO: 22467 - RNA, 21 nt, RNAi
uugacuuagagcaaaugcguu

SEQ ID NO: 22468 - RNA, 21 nt, RNAi
uuaacugaaucucguuuacgc

SEQ ID NO: 22469 - DNA, 21 bp, Homo sapiens
gagcaaatgcgaaccaagttg

SEQ ID NO: 22470 - RNA, 21 nt, RNAi
gcaaaugcgaaccaaguuguu

SEQ ID NO: 22471 - RNA, 21 nt, RNAi
uucguuuacgcuugguucaac

SEQ ID NO: 22472 - DNA, 21 bp, Homo sapiens
gatgaggacctgtttaccggt

SEQ ID NO: 22473 - RNA, 21 nt, RNAi
ugaggaccuguuuaccgguuu

SEQ ID NO: 22474 - RNA, 21 nt, RNAi
uuacuccuggacaaauggcca

SEQ ID NO: 22475 - DNA, 21 bp, Homo sapiens
gacatctacaggctcatgaag

SEQ ID NO: 22476 - RNA, 21 nt, RNAi
caucuacaggcucaugaaguu

SEQ ID NO: 22477 - RNA, 21 nt, RNAi
uuguagauguccgaguacuuc

SEQ ID NO: 22478 - DNA, 21 bp, Homo sapiens
tagatcaagccggaagagcaa

SEQ ID NO: 22479 - RNA, 21 nt, RNAi
gaucaagccggaagagcaauu

SEQ ID NO: 22480 - RNA, 21 nt, RNAi
uucuaguucggccuucucguu

SEQ ID NO: 22481 - DNA, 21 bp, Homo sapiens
taattcaaccaaaggctctgc

SEQ ID NO: 22482 - RNA, 21 nt, RNAi
auucaaccaaaggcucugcuu

SEQ ID NO: 22483 - RNA, 21 nt, RNAi
uuuaaguugguuuccgagacg

SEQ ID NO: 22484 - DNA, 21 bp, Homo sapiens
taaagacgaccagctcttcat

SEQ ID NO: 22485 - RNA, 21 nt, RNAi
aagacgaccagcucuucauuu

SEQ ID NO: 22486 - RNA, 21 nt, RNAi
uuuucugcuggucgagaagua

SEQ ID NO: 22487 - DNA, 21 bp, Homo sapiens
tagagcaaatgcgaaccaagt

SEQ ID NO: 22488 - RNA, 21 nt, RNAi
gagcaaaugcgaaccaaguuu

SEQ ID NO: 22489 - RNA, 21 nt, RNAi
uucucguuuacgcuugguuca

SEQ ID NO: 22490 - DNA, 21 bp, Homo sapiens
aaatatccgtgccgatctgtc

SEQ ID NO: 22491 - RNA, 21 nt, RNAi
auauccgugccgaucugucuu

SEQ ID NO: 22492 - RNA, 21 nt, RNAi
uuuauaggcacggcuagacag

SEQ ID NO: 22493 - DNA, 21 bp, Homo sapiens
aatatccgtgccgatctgtct

SEQ ID NO: 22494 - RNA, 21 nt, RNAi
uauccgugccgaucugucuuu

SEQ ID NO: 22495 - RNA, 21 nt, RNAi
uuauaggcacggcuagacaga

SEQ ID NO: 22496 - DNA, 21 bp, Homo sapiens
aaggagaaatatatcgcttgt

SEQ ID NO: 22497 - RNA, 21 nt, RNAi
ggagaaauauaucgcuuguuu

SEQ ID NO: 22498 - RNA, 21 nt, RNAi
uuccucuuuauauagcgaaca

SEQ ID NO: 22499 - DNA, 21 bp, Homo sapiens
aaagccaagaggacgaagtct

SEQ ID NO: 22500 - RNA, 21 nt, RNAi
agccaagaggacgaagucuuu

SEQ ID NO: 22501 - RNA, 21 nt, RNAi
uuucgguucuccugcuucaga

SEQ ID NO: 22502 - DNA, 21 bp, Homo sapiens
aagccaagaggacgaagtctt

SEQ ID NO: 22503 - RNA, 21 nt, RNAi
gccaagaggacgaagucuuuu

SEQ ID NO: 22504 - RNA, 21 nt, RNAi
uucgguucuccugcuucagaa

SEQ ID NO: 22505 - DNA, 21 bp, Homo sapiens
aacttaatgctgcatttatcg

SEQ ID NO: 22506 - RNA, 21 nt, RNAi
cuuaaugcugcauuuaucguu

SEQ ID NO: 22507 - RNA, 21 nt, RNAi
uugaauuacgacguaaauagc

SEQ ID NO: 22508 - DNA, 21 bp, Homo sapiens
aatgctgcatttatcgttaac

SEQ ID NO: 22509 - RNA, 21 nt, RNAi
ugcugcauuuaucguuaacuu

SEQ ID NO: 22510 - RNA, 21 nt, RNAi
uuacgacguaaauagcaauug

SEQ ID NO: 22511 - DNA, 21 bp, Homo sapiens
aaaggtgattcgcgaagagag

SEQ ID NO: 22512 - RNA, 21 nt, RNAi
aggugauucgcgaagagaguu

SEQ ID NO: 22513 - RNA, 21 nt, RNAi
uuuccacuaagcgcuucucuc

SEQ ID NO: 22514 - DNA, 21 bp, Homo sapiens
aaggtgattcgcgaagagagt

SEQ ID NO: 22515 - RNA, 21 nt, RNAi
ggugauucgcgaagagaguuu

SEQ ID NO: 22516 - RNA, 21 nt, RNAi
uuccacuaagcgcuucucuca

SEQ ID NO: 22517 - DNA, 21 bp, Homo sapiens
aaccacctcctttgcggagag

SEQ ID NO: 22518 - RNA, 21 nt, RNAi
ccaccuccuuugcggagaguu

SEQ ID NO: 22519 - RNA, 21 nt, RNAi
uugguggaggaaacgccucuc

SEQ ID NO: 22520 - DNA, 21 bp, Homo sapiens
aagccggtgcagcagccttca

SEQ ID NO: 22521 - RNA, 21 nt, RNAi
gccggugcagcagccuucauu

SEQ ID NO: 22522 - RNA, 21 nt, RNAi
uucggccacgucgucggaagu

SEQ ID NO: 22523 - DNA, 21 bp, Homo sapiens
aaagttagcagagacaaggac

SEQ ID NO: 22524 - RNA, 21 nt, RNAi
aguuagcagagacaaggacuu

SEQ ID NO: 22525 - RNA, 21 nt, RNAi
uuucaaucgucucuguuccug

SEQ ID NO: 22526 - DNA, 21 bp, Homo sapiens
aagttagcagagacaaggacg

SEQ ID NO: 22527 - RNA, 21 nt, RNAi
guuagcagagacaaggacguu

SEQ ID NO: 22528 - RNA, 21 nt, RNAi
uucaaucgucucuguuccugc

SEQ ID NO: 22529 - DNA, 21 bp, Homo sapiens
aaggacggcagcaaggtgaca

SEQ ID NO: 22530 - RNA, 21 nt, RNAi
ggacggcagcaaggugacauu

SEQ ID NO: 22531 - RNA, 21 nt, RNAi
uuccugccgucguuccacugu

SEQ ID NO: 22532 - DNA, 21 bp, Homo sapiens
aaggtgacaacagtggtggca

SEQ ID NO: 22533 - RNA, 21 nt, RNAi
ggugacaacagugguggcauu

SEQ ID NO: 22534 - RNA, 21 nt, RNAi
uuccacuguugucaccaccgu

SEQ ID NO: 22535 - DNA, 21 bp, Homo sapiens
aacagtggtggcaactcctgg

SEQ ID NO: 22536 - RNA, 21 nt, RNAi
cagugguggcaacuccugguu

SEQ ID NO: 22537 - RNA, 21 nt, RNAi
uugucaccaccguugaggacc

SEQ ID NO: 22538 - DNA, 21 bp, Homo sapiens
aagaagtcagctatacagaca

SEQ ID NO: 22539 - RNA, 21 nt, RNAi
gaagucagcuauacagacauu

SEQ ID NO: 22540 - RNA, 21 nt, RNAi
uucuucagucgauaugucugu

SEQ ID NO: 22541 - DNA, 21 bp, Homo sapiens
aagtcagctatacagacacta

SEQ ID NO: 22542 - RNA, 21 nt, RNAi
gucagcuauacagacacuauu

SEQ ID NO: 22543 - RNA, 21 nt, RNAi
uucagucgauaugucugugau

SEQ ID NO: 22544 - DNA, 21 bp, Homo sapiens
aaagtgattggaaatggatca

SEQ ID NO: 22545 - RNA, 21 nt, RNAi
agugauuggaaauggaucauu

SEQ ID NO: 22546 - RNA, 21 nt, RNAi
uuucacuaaccuuuaccuagu

SEQ ID NO: 22547 - DNA, 21 bp, Homo sapiens
aagtgattggaaatggatcat

SEQ ID NO: 22548 - RNA, 21 nt, RNAi
gugauuggaaauggaucauuu

SEQ ID NO: 22549 - RNA, 21 nt, RNAi
uucacuaaccuuuaccuagua

SEQ ID NO: 22550 - DNA, 21 bp, Homo sapiens
aaatggatcatttggtgtggt

SEQ ID NO: 22551 - RNA, 21 nt, RNAi
auggaucauuuggugugguuu

SEQ ID NO: 22552 - RNA, 21 nt, RNAi
uuuaccuaguaaaccacacca

SEQ ID NO: 22553 - DNA, 21 bp, Homo sapiens
aatggatcatttggtgtggta

SEQ ID NO: 22554 - RNA, 21 nt, RNAi
uggaucauuuggugugguauu

SEQ ID NO: 22555 - RNA, 21 nt, RNAi
uuaccuaguaaaccacaccau

SEQ ID NO: 22556 - DNA, 21 bp, Homo sapiens
aagccaaactttgtgattcag

SEQ ID NO: 22557 - RNA, 21 nt, RNAi
gccaaacuuugugauucaguu

SEQ ID NO: 22558 - RNA, 21 nt, RNAi
uucgguuugaaacacuaaguc

SEQ ID NO: 22559 - DNA, 21 bp, Homo sapiens
aaactttgtgattcaggagaa

SEQ ID NO: 22560 - RNA, 21 nt, RNAi
acuuugugauucaggagaauu

SEQ ID NO: 22561 - RNA, 21 nt, RNAi
uuugaaacacuaaguccucuu

SEQ ID NO: 22562 - DNA, 21 bp, Homo sapiens
aactttgtgattcaggagaac

SEQ ID NO: 22563 - RNA, 21 nt, RNAi
cuuugugauucaggagaacuu

SEQ ID NO: 22564 - RNA, 21 nt, RNAi
uugaaacacuaaguccucuug

SEQ ID NO: 22565 - DNA, 21 bp, Homo sapiens
aactggtcgccatcaagaaag

SEQ ID NO: 22566 - RNA, 21 nt, RNAi
cuggucgccaucaagaaaguu

SEQ ID NO: 22567 - RNA, 21 nt, RNAi
uugaccagcgguaguucuuuc

SEQ ID NO: 22568 - DNA, 21 bp, Homo sapiens
aagaaagtattgcaggacaag

SEQ ID NO: 22569 - RNA, 21 nt, RNAi
gaaaguauugcaggacaaguu

SEQ ID NO: 22570 - RNA, 21 nt, RNAi
uucuuucauaacguccuguuc

SEQ ID NO: 22571 - DNA, 21 bp, Homo sapiens
aaagtattgcaggacaagaga

SEQ ID NO: 22572 - RNA, 21 nt, RNAi
aguauugcaggacaagagauu

SEQ ID NO: 22573 - RNA, 21 nt, RNAi
uuucauaacguccuguucucu

SEQ ID NO: 22574 - DNA, 21 bp, Homo sapiens
aagtattgcaggacaagagat

SEQ ID NO: 22575 - RNA, 21 nt, RNAi
guauugcaggacaagagauuu

SEQ ID NO: 22576 - RNA, 21 nt, RNAi
uucauaacguccuguucucua

SEQ ID NO: 22577 - DNA, 21 bp, Homo sapiens
aagagatttaagaatcgagag

SEQ ID NO: 22578 - RNA, 21 nt, RNAi
gagauuuaagaaucgagaguu

SEQ ID NO: 22579 - RNA, 21 nt, RNAi
uucucuaaauucuuagcucuc

SEQ ID NO: 22580 - DNA, 21 bp, Homo sapiens
aagaatcgagagctccagatc

SEQ ID NO: 22581 - RNA, 21 nt, RNAi
gaaucgagagcuccagaucuu

SEQ ID NO: 22582 - RNA, 21 nt, RNAi
uucuuagcucucgaggucuag

SEQ ID NO: 22583 - DNA, 21 bp, Homo sapiens
aatcgagagctccagatcatg

SEQ ID NO: 22584 - RNA, 21 nt, RNAi
ucgagagcuccagaucauguu

SEQ ID NO: 22585 - RNA, 21 nt, RNAi
uuagcucucgaggucuaguac

SEQ ID NO: 22586 - DNA, 21 bp, Homo sapiens
aaagctagatcactgtaacat

SEQ ID NO: 22587 - RNA, 21 nt, RNAi
agcuagaucacuguaacauuu

SEQ ID NO: 22588 - RNA, 21 nt, RNAi
uuucgaucuagugacauugua

SEQ ID NO: 22589 - DNA, 21 bp, Homo sapiens
aagctagatcactgtaacata

SEQ ID NO: 22590 - RNA, 21 nt, RNAi
gcuagaucacuguaacauauu

SEQ ID NO: 22591 - RNA, 21 nt, RNAi
uucgaucuagugacauuguau

SEQ ID NO: 22592 - DNA, 21 bp, Homo sapiens
aacatagtccgattgcgttat

SEQ ID NO: 22593 - RNA, 21 nt, RNAi
cauaguccgauugcguuauuu

SEQ ID NO: 22594 - RNA, 21 nt, RNAi
uuguaucaggcuaacgcaaua

SEQ ID NO: 22595 - DNA, 21 bp, Homo sapiens
aagaaagatgaggtctatctt

SEQ ID NO: 22596 - RNA, 21 nt, RNAi
gaaagaugaggucuaucuuuu

SEQ ID NO: 22597 - RNA, 21 nt, RNAi
uucuuucuacuccagauagaa

SEQ ID NO: 22598 - DNA, 21 bp, Homo sapiens
aagatgaggtctatcttaatc

SEQ ID NO: 22599 - RNA, 21 nt, RNAi
gaugaggucuaucuuaaucuu

SEQ ID NO: 22600 - RNA, 21 nt, RNAi
uucuacuccagauagaauuag

SEQ ID NO: 22601 - DNA, 21 bp, Homo sapiens
aatctggtgctggactatgtt

SEQ ID NO: 22602 - RNA, 21 nt, RNAi
ucuggugcuggacuauguuuu

SEQ ID NO: 22603 - RNA, 21 nt, RNAi
uuagaccacgaccugauacaa

SEQ ID NO: 22604 - DNA, 21 bp, Homo sapiens
aaacagtatacagagttgcca

SEQ ID NO: 22605 - RNA, 21 nt, RNAi
acaguauacagaguugccauu

SEQ ID NO: 22606 - RNA, 21 nt, RNAi
uuugucauaugucucaacggu

SEQ ID NO: 22607 - DNA, 21 bp, Homo sapiens
aacagtatacagagttgccag

SEQ ID NO: 22608 - RNA, 21 nt, RNAi
caguauacagaguugccaguu

SEQ ID NO: 22609 - RNA, 21 nt, RNAi
uugucauaugucucaacgguc

SEQ ID NO: 22610 - DNA, 21 bp, Homo sapiens
aagttgtatatgtatcagctg

SEQ ID NO: 22611 - RNA, 21 nt, RNAi
guuguauauguaucagcuguu

SEQ ID NO: 22612 - RNA, 21 nt, RNAi
uucaacauauacauagucgac

SEQ ID NO: 22613 - DNA, 21 bp, Homo sapiens
aagtttagcctatatccattc

SEQ ID NO: 22614 - RNA, 21 nt, RNAi
guuuagccuauauccauucuu

SEQ ID NO: 22615 - RNA, 21 nt, RNAi
uucaaaucggauauagguaag

SEQ ID NO: 22616 - DNA, 21 bp, Homo sapiens
aaaccgcagaacctcttgttg

SEQ ID NO: 22617 - RNA, 21 nt, RNAi
accgcagaaccucuuguuguu

SEQ ID NO: 22618 - RNA, 21 nt, RNAi
uuuggcgucuuggagaacaac

SEQ ID NO: 22619 - DNA, 21 bp, Homo sapiens
aaccgcagaacctcttgttgg

SEQ ID NO: 22620 - RNA, 21 nt, RNAi
ccgcagaaccucuuguugguu

SEQ ID NO: 22621 - RNA, 21 nt, RNAi
uuggcgucuuggagaacaacc

SEQ ID NO: 22622 - DNA, 21 bp, Homo sapiens
aacctcttgttggatcctgat

SEQ ID NO: 22623 - RNA, 21 nt, RNAi
ccucuuguuggauccugauuu

SEQ ID NO: 22624 - RNA, 21 nt, RNAi
uuggagaacaaccuaggacua

SEQ ID NO: 22625 - DNA, 21 bp, Homo sapiens
aaactctgtgactttggaagt

SEQ ID NO: 22626 - RNA, 21 nt, RNAi
acucugugacuuuggaaguuu

SEQ ID NO: 22627 - RNA, 21 nt, RNAi
uuugagacacugaaaccuuca

SEQ ID NO: 22628 - DNA, 21 bp, Homo sapiens
aactctgtgactttggaagtg

SEQ ID NO: 22629 - RNA, 21 nt, RNAi
cucugugacuuuggaaguguu

SEQ ID NO: 22630 - RNA, 21 nt, RNAi
uugagacacugaaaccuucac

SEQ ID NO: 22631 - DNA, 21 bp, Homo sapiens
aagtgcaaagcagctggtccg

SEQ ID NO: 22632 - RNA, 21 nt, RNAi
gugcaaagcagcugguccguu

SEQ ID NO: 22633 - RNA, 21 nt, RNAi
uucacguuucgucgaccaggc

SEQ ID NO: 22634 - DNA, 21 bp, Homo sapiens
aaagcagctggtccgaggaga

SEQ ID NO: 22635 - RNA, 21 nt, RNAi
agcagcugguccgaggagauu

SEQ ID NO: 22636 - RNA, 21 nt, RNAi
uuucgucgaccaggcuccucu

SEQ ID NO: 22637 - DNA, 21 bp, Homo sapiens
aagcagctggtccgaggagaa

SEQ ID NO: 22638 - RNA, 21 nt, RNAi
gcagcugguccgaggagaauu

SEQ ID NO: 22639 - RNA, 21 nt, RNAi
uucgucgaccaggcuccucuu

SEQ ID NO: 22640 - DNA, 21 bp, Homo sapiens
aaattaaggcacatccttgga

SEQ ID NO: 22641 - RNA, 21 nt, RNAi
auuaaggcacauccuuggauu

SEQ ID NO: 22642 - RNA, 21 nt, RNAi
uuuaauuccguguaggaaccu

SEQ ID NO: 22643 - DNA, 21 bp, Homo sapiens
aattaaggcacatccttggac

SEQ ID NO: 22644 - RNA, 21 nt, RNAi
uuaaggcacauccuuggacuu

SEQ ID NO: 22645 - RNA, 21 nt, RNAi
uuaauuccguguaggaaccug

SEQ ID NO: 22646 - DNA, 21 bp, Homo sapiens
aaggcacatccttggactaag

SEQ ID NO: 22647 - RNA, 21 nt, RNAi
ggcacauccuuggacuaaguu

SEQ ID NO: 22648 - RNA, 21 nt, RNAi
uuccguguaggaaccugauuc

SEQ ID NO: 22649 - DNA, 21 bp, Homo sapiens
aaggattcgtcaggaacagga

SEQ ID NO: 22650 - RNA, 21 nt, RNAi
ggauucgucaggaacaggauu

SEQ ID NO: 22651 - RNA, 21 nt, RNAi
uuccuaagcaguccuuguccu

SEQ ID NO: 22652 - DNA, 21 bp, Homo sapiens
aacaggacatttcacctcagg

SEQ ID NO: 22653 - RNA, 21 nt, RNAi
caggacauuucaccucagguu

SEQ ID NO: 22654 - RNA, 21 nt, RNAi
uuguccuguaaaguggagucc

SEQ ID NO: 22655 - DNA, 21 bp, Homo sapiens
aactccaccggaggcaattgc

SEQ ID NO: 22656 - RNA, 21 nt, RNAi
cuccaccggaggcaauugcuu

SEQ ID NO: 22657 - RNA, 21 nt, RNAi
uugagguggccuccguuaacg

SEQ ID NO: 22658 - DNA, 21 bp, Homo sapiens
aattgcactgtgtagccgtct

SEQ ID NO: 22659 - RNA, 21 nt, RNAi
uugcacuguguagccgucuuu

SEQ ID NO: 22660 - RNA, 21 nt, RNAi
uuaacgugacacaucggcaga

SEQ ID NO: 22661 - DNA, 21 bp, Homo sapiens
aacaccactggaagcttgtgc

SEQ ID NO: 22662 - RNA, 21 nt, RNAi
caccacuggaagcuugugcuu

SEQ ID NO: 22663 - RNA, 21 nt, RNAi
uuguggugaccuucgaacacg

SEQ ID NO: 22664 - DNA, 21 bp, Homo sapiens
aaatgtcaaactaccaaatgg

SEQ ID NO: 22665 - RNA, 21 nt, RNAi
augucaaacuaccaaaugguu

SEQ ID NO: 22666 - RNA, 21 nt, RNAi
uuuacaguuugaugguuuacc

SEQ ID NO: 22667 - DNA, 21 bp, Homo sapiens
aacttcaccactcaagaactg

SEQ ID NO: 22668 - RNA, 21 nt, RNAi
cuucaccacucaagaacuguu

SEQ ID NO: 22669 - RNA, 21 nt, RNAi
uugaaguggugaguucuugac

SEQ ID NO: 22670 - DNA, 21 bp, Homo sapiens
aagaactgtcaagtaatccac

SEQ ID NO: 22671 - RNA, 21 nt, RNAi
gaacugucaaguaauccacuu

SEQ ID NO: 22672 - RNA, 21 nt, RNAi
uucuugacaguucauuaggug

SEQ ID NO: 22673 - DNA, 21 bp, Homo sapiens
aactgtcaagtaatccacctc

SEQ ID NO: 22674 - RNA, 21 nt, RNAi
cugucaaguaauccaccucuu

SEQ ID NO: 22675 - RNA, 21 nt, RNAi
uugacaguucauuagguggag

SEQ ID NO: 22676 - DNA, 21 bp, Homo sapiens
aagtaatccacctctggctac

SEQ ID NO: 22677 - RNA, 21 nt, RNAi
guaauccaccucuggcuacuu

SEQ ID NO: 22678 - RNA, 21 nt, RNAi
uucauuagguggagaccgaug

SEQ ID NO: 22679 - DNA, 21 bp, Homo sapiens
aatccacctctggctaccatc

SEQ ID NO: 22680 - RNA, 21 nt, RNAi
uccaccucuggcuaccaucuu

SEQ ID NO: 22681 - RNA, 21 nt, RNAi
uuagguggagaccgaugguag

SEQ ID NO: 22682 - DNA, 21 bp, Homo sapiens
aaatgccacagcagcgtcaga

SEQ ID NO: 22683 - RNA, 21 nt, RNAi
augccacagcagcgucagauu

SEQ ID NO: 22684 - RNA, 21 nt, RNAi
uuuacggugucgucgcagucu

SEQ ID NO: 22685 - DNA, 21 bp, Homo sapiens
aatgccacagcagcgtcagat

SEQ ID NO: 22686 - RNA, 21 nt, RNAi
ugccacagcagcgucagauuu

SEQ ID NO: 22687 - RNA, 21 nt, RNAi
uuacggugucgucgcagucua

SEQ ID NO: 22688 - DNA, 21 bp, Homo sapiens
aatactggagaccgtggacag

SEQ ID NO: 22689 - RNA, 21 nt, RNAi
uacuggagaccguggacaguu

SEQ ID NO: 22690 - RNA, 21 nt, RNAi
uuaugaccucuggcaccuguc

SEQ ID NO: 22691 - DNA, 21 bp, Homo sapiens
aataatgctgcttctgcatca

SEQ ID NO: 22692 - RNA, 21 nt, RNAi
uaaugcugcuucugcaucauu

SEQ ID NO: 22693 - RNA, 21 nt, RNAi
uuauuacgacgaagacguagu

SEQ ID NO: 22694 - DNA, 21 bp, Homo sapiens
aatgctgcttctgcatcagct

SEQ ID NO: 22695 - RNA, 21 nt, RNAi
ugcugcuucugcaucagcuuu

SEQ ID NO: 22696 - RNA, 21 nt, RNAi
uuacgacgaagacguagucga

SEQ ID NO: 22697 - DNA, 21 bp, Homo sapiens
aaaccaccagttacttgagtg

SEQ ID NO: 22698 - RNA, 21 nt, RNAi
accaccaguuacuugaguguu

SEQ ID NO: 22699 - RNA, 21 nt, RNAi
uuugguggucaaugaacucac

SEQ ID NO: 22700 - DNA, 21 bp, Homo sapiens
aaccaccagttacttgagtgt

SEQ ID NO: 22701 - RNA, 21 nt, RNAi
ccaccaguuacuugaguguuu

SEQ ID NO: 22702 - RNA, 21 nt, RNAi
uugguggucaaugaacucaca

SEQ ID NO: 22703 - DNA, 21 bp, Homo sapiens
aacactggtcacgtttggaaa

SEQ ID NO: 22704 - RNA, 21 nt, RNAi
cacuggucacguuuggaaauu

SEQ ID NO: 22705 - RNA, 21 nt, RNAi
uugugaccagugcaaaccuuu

SEQ ID NO: 22706 - DNA, 21 bp, Homo sapiens
catttatcgttaacctaacac

SEQ ID NO: 22707 - RNA, 21 nt, RNAi
uuuaucguuaaccuaacacuu

SEQ ID NO: 22708 - RNA, 21 nt, RNAi
uuaaauagcaauuggauugug

SEQ ID NO: 22709 - DNA, 21 bp, Homo sapiens
cagaaccacctcctttgcgga

SEQ ID NO: 22710 - RNA, 21 nt, RNAi
gaaccaccuccuuugcggauu

SEQ ID NO: 22711 - RNA, 21 nt, RNAi
uucuugguggaggaaacgccu

SEQ ID NO: 22712 - DNA, 21 bp, Homo sapiens
cacctcctttgcggagagctg

SEQ ID NO: 22713 - RNA, 21 nt, RNAi
ccuccuuugcggagagcuguu

SEQ ID NO: 22714 - RNA, 21 nt, RNAi
uuggaggaaacgccucucgac

SEQ ID NO: 22715 - DNA, 21 bp, Homo sapiens
cagcatgaaagttagcagaga

SEQ ID NO: 22716 - RNA, 21 nt, RNAi
gcaugaaaguuagcagagauu

SEQ ID NO: 22717 - RNA, 21 nt, RNAi
uucguacuuucaaucgucucu

SEQ ID NO: 22718 - DNA, 21 bp, Homo sapiens
catgaaagttagcagagacaa

SEQ ID NO: 22719 - RNA, 21 nt, RNAi
ugaaaguuagcagagacaauu

SEQ ID NO: 22720 - RNA, 21 nt, RNAi
uuacuuucaaucgucucuguu

SEQ ID NO: 22721 - DNA, 21 bp, Homo sapiens
cagagacaaggacggcagcaa

SEQ ID NO: 22722 - RNA, 21 nt, RNAi
gagacaaggacggcagcaauu

SEQ ID NO: 22723 - RNA, 21 nt, RNAi
uucucuguuccugccgucguu

SEQ ID NO: 22724 - DNA, 21 bp, Homo sapiens
caaggacggcagcaaggtgac

SEQ ID NO: 22725 - RNA, 21 nt, RNAi
aggacggcagcaaggugacuu

SEQ ID NO: 22726 - RNA, 21 nt, RNAi
uuuccugccgucguuccacug

SEQ ID NO: 22727 - DNA, 21 bp, Homo sapiens
cagcaaggtgacaacagtggt

SEQ ID NO: 22728 - RNA, 21 nt, RNAi
gcaaggugacaacagugguuu

SEQ ID NO: 22729 - RNA, 21 nt, RNAi
uucguuccacuguugucacca

SEQ ID NO: 22730 - DNA, 21 bp, Homo sapiens
caaggtgacaacagtggtggc

SEQ ID NO: 22731 - RNA, 21 nt, RNAi
aggugacaacagugguggcuu

SEQ ID NO: 22732 - RNA, 21 nt, RNAi
uuuccacuguugucaccaccg

SEQ ID NO: 22733 - DNA, 21 bp, Homo sapiens
caacagtggtggcaactcctg

SEQ ID NO: 22734 - RNA, 21 nt, RNAi
acagugguggcaacuccuguu

SEQ ID NO: 22735 - RNA, 21 nt, RNAi
uuugucaccaccguugaggac

SEQ ID NO: 22736 - DNA, 21 bp, Homo sapiens
cagacaggccacaagaagtca

SEQ ID NO: 22737 - RNA, 21 nt, RNAi
gacaggccacaagaagucauu

SEQ ID NO: 22738 - RNA, 21 nt, RNAi
uucuguccgguguucuucagu

SEQ ID NO: 22739 - DNA, 21 bp, Homo sapiens
caggccacaagaagtcagcta

SEQ ID NO: 22740 - RNA, 21 nt, RNAi
ggccacaagaagucagcuauu

SEQ ID NO: 22741 - RNA, 21 nt, RNAi
uuccgguguucuucagucgau

SEQ ID NO: 22742 - DNA, 21 bp, Homo sapiens
cacaagaagtcagctatacag

SEQ ID NO: 22743 - RNA, 21 nt, RNAi
caagaagucagcuauacaguu

SEQ ID NO: 22744 - RNA, 21 nt, RNAi
uuguucuucagucgauauguc

SEQ ID NO: 22745 - DNA, 21 bp, Homo sapiens
caagaagtcagctatacagac

SEQ ID NO: 22746 - RNA, 21 nt, RNAi
agaagucagcuauacagacuu

SEQ ID NO: 22747 - RNA, 21 nt, RNAi
uuucuucagucgauaugucug

SEQ ID NO: 22748 - DNA, 21 bp, Homo sapiens
cagctatacagacactaaagt

SEQ ID NO: 22749 - RNA, 21 nt, RNAi
gcuauacagacacuaaaguuu

SEQ ID NO: 22750 - RNA, 21 nt, RNAi
uucgauaugucugugauuuca

SEQ ID NO: 22751 - DNA, 21 bp, Homo sapiens
cagacactaaagtgattggaa

SEQ ID NO: 22752 - RNA, 21 nt, RNAi
gacacuaaagugauuggaauu

SEQ ID NO: 22753 - RNA, 21 nt, RNAi
uucugugauuucacuaaccuu

SEQ ID NO: 22754 - DNA, 21 bp, Homo sapiens
cactaaagtgattggaaatgg

SEQ ID NO: 22755 - RNA, 21 nt, RNAi
cuaaagugauuggaaaugguu

SEQ ID NO: 22756 - RNA, 21 nt, RNAi
uugauuucacuaaccuuuacc

SEQ ID NO: 22757 - DNA, 21 bp, Homo sapiens
catttggtgtggtatatcaag

SEQ ID NO: 22758 - RNA, 21 nt, RNAi
uuuggugugguauaucaaguu

SEQ ID NO: 22759 - RNA, 21 nt, RNAi
uuaaaccacaccauauaguuc

SEQ ID NO: 22760 - DNA, 21 bp, Homo sapiens
caagccaaactttgtgattca

SEQ ID NO: 22761 - RNA, 21 nt, RNAi
agccaaacuuugugauucauu

SEQ ID NO: 22762 - RNA, 21 nt, RNAi
uuucgguuugaaacacuaagu

SEQ ID NO: 22763 - DNA, 21 bp, Homo sapiens
caaactttgtgattcaggaga

SEQ ID NO: 22764 - RNA, 21 nt, RNAi
aacuuugugauucaggagauu

SEQ ID NO: 22765 - RNA, 21 nt, RNAi
uuuugaaacacuaaguccucu

SEQ ID NO: 22766 - DNA, 21 bp, Homo sapiens
caggagaactggtcgccatca

SEQ ID NO: 22767 - RNA, 21 nt, RNAi
ggagaacuggucgccaucauu

SEQ ID NO: 22768 - RNA, 21 nt, RNAi
uuccucuugaccagcgguagu

SEQ ID NO: 22769 - DNA, 21 bp, Homo sapiens
catcaagaaagtattgcagga

SEQ ID NO: 22770 - RNA, 21 nt, RNAi
ucaagaaaguauugcaggauu

SEQ ID NO: 22771 - RNA, 21 nt, RNAi
uuaguucuuucauaacguccu

SEQ ID NO: 22772 - DNA, 21 bp, Homo sapiens
caagaaagtattgcaggacaa

SEQ ID NO: 22773 - RNA, 21 nt, RNAi
agaaaguauugcaggacaauu

SEQ ID NO: 22774 - RNA, 21 nt, RNAi
uuucuuucauaacguccuguu

SEQ ID NO: 22775 - DNA, 21 bp, Homo sapiens
caggacaagagatttaagaat

SEQ ID NO: 22776 - RNA, 21 nt, RNAi
ggacaagagauuuaagaauuu

SEQ ID NO: 22777 - RNA, 21 nt, RNAi
uuccuguucucuaaauucuua

SEQ ID NO: 22778 - DNA, 21 bp, Homo sapiens
caagagatttaagaatcgaga

SEQ ID NO: 22779 - RNA, 21 nt, RNAi
agagauuuaagaaucgagauu

SEQ ID NO: 22780 - RNA, 21 nt, RNAi
uuucucuaaauucuuagcucu

SEQ ID NO: 22781 - DNA, 21 bp, Homo sapiens
cagatcatgagaaagctagat

SEQ ID NO: 22782 - RNA, 21 nt, RNAi
gaucaugagaaagcuagauuu

SEQ ID NO: 22783 - RNA, 21 nt, RNAi
uucuaguacucuuucgaucua

SEQ ID NO: 22784 - DNA, 21 bp, Homo sapiens
catgagaaagctagatcactg

SEQ ID NO: 22785 - RNA, 21 nt, RNAi
ugagaaagcuagaucacuguu

SEQ ID NO: 22786 - RNA, 21 nt, RNAi
uuacucuuucgaucuagugac

SEQ ID NO: 22787 - DNA, 21 bp, Homo sapiens
cactgtaacatagtccgattg

SEQ ID NO: 22788 - RNA, 21 nt, RNAi
cuguaacauaguccgauuguu

SEQ ID NO: 22789 - RNA, 21 nt, RNAi
uugacauuguaucaggcuaac

SEQ ID NO: 22790 - DNA, 21 bp, Homo sapiens
catagtccgattgcgttattt

SEQ ID NO: 22791 - RNA, 21 nt, RNAi
uaguccgauugcguuauuuuu

SEQ ID NO: 22792 - RNA, 21 nt, RNAi
uuaucaggcuaacgcaauaaa

SEQ ID NO: 22793 - DNA, 21 bp, Homo sapiens
cagtggtgagaagaaagatga

SEQ ID NO: 22794 - RNA, 21 nt, RNAi
guggugagaagaaagaugauu

SEQ ID NO: 22795 - RNA, 21 nt, RNAi
uucaccacucuucuuucuacu

SEQ ID NO: 22796 - DNA, 21 bp, Homo sapiens
cagtatacagagttgccagac

SEQ ID NO: 22797 - RNA, 21 nt, RNAi
guauacagaguugccagacuu

SEQ ID NO: 22798 - RNA, 21 nt, RNAi
uucauaugucucaacggucug

SEQ ID NO: 22799 - DNA, 21 bp, Homo sapiens
cagagttgccagacactatag

SEQ ID NO: 22800 - RNA, 21 nt, RNAi
gaguugccagacacuauaguu

SEQ ID NO: 22801 - RNA, 21 nt, RNAi
uucucaacggucugugauauc

SEQ ID NO: 22802 - DNA, 21 bp, Homo sapiens
cagacactatagtcgagccaa

SEQ ID NO: 22803 - RNA, 21 nt, RNAi
gacacuauagucgagccaauu

SEQ ID NO: 22804 - RNA, 21 nt, RNAi
uucugugauaucagcucgguu

SEQ ID NO: 22805 - DNA, 21 bp, Homo sapiens
cactatagtcgagccaaacag

SEQ ID NO: 22806 - RNA, 21 nt, RNAi
cuauagucgagccaaacaguu

SEQ ID NO: 22807 - RNA, 21 nt, RNAi
uugauaucagcucgguuuguc

SEQ ID NO: 22808 - DNA, 21 bp, Homo sapiens
caagttgtatatgtatcagct

SEQ ID NO: 22809 - RNA, 21 nt, RNAi
aguuguauauguaucagcuuu

SEQ ID NO: 22810 - RNA, 21 nt, RNAi
uuucaacauauacauagucga

SEQ ID NO: 22811 - DNA, 21 bp, Homo sapiens
cagctgttccgaagtttagcc

SEQ ID NO: 22812 - RNA, 21 nt, RNAi
gcuguuccgaaguuuagccuu

SEQ ID NO: 22813 - RNA, 21 nt, RNAi
uucgacaaggcuucaaaucgg

SEQ ID NO: 22814 - DNA, 21 bp, Homo sapiens
cattcctttggaatctgccat

SEQ ID NO: 22815 - RNA, 21 nt, RNAi
uuccuuuggaaucugccauuu

SEQ ID NO: 22816 - RNA, 21 nt, RNAi
uuaaggaaaccuuagacggua

SEQ ID NO: 22817 - DNA, 21 bp, Homo sapiens
cagaacctcttgttggatcct

SEQ ID NO: 22818 - RNA, 21 nt, RNAi
gaaccucuuguuggauccuuu

SEQ ID NO: 22819 - RNA, 21 nt, RNAi
uucuuggagaacaaccuagga

SEQ ID NO: 22820 - DNA, 21 bp, Homo sapiens
caaagcagctggtccgaggag

SEQ ID NO: 22821 - RNA, 21 nt, RNAi
aagcagcugguccgaggaguu

SEQ ID NO: 22822 - RNA, 21 nt, RNAi
uuuucgucgaccaggcuccuc

SEQ ID NO: 22823 - DNA, 21 bp, Homo sapiens
caatgtttcgtatatctgttc

SEQ ID NO: 22824 - RNA, 21 nt, RNAi
auguuucguauaucuguucuu

SEQ ID NO: 22825 - RNA, 21 nt, RNAi
uuuacaaagcauauagacaag

SEQ ID NO: 22826 - DNA, 21 bp, Homo sapiens
caccagagttgatctttggag

SEQ ID NO: 22827 - RNA, 21 nt, RNAi
ccagaguugaucuuuggaguu

SEQ ID NO: 22828 - RNA, 21 nt, RNAi
uuggucucaacuagaaaccuc

SEQ ID NO: 22829 - DNA, 21 bp, Homo sapiens
cagagttgatctttggagcca

SEQ ID NO: 22830 - RNA, 21 nt, RNAi
gaguugaucuuuggagccauu

SEQ ID NO: 22831 - RNA, 21 nt, RNAi
uucucaacuagaaaccucggu

SEQ ID NO: 22832 - DNA, 21 bp, Homo sapiens
cactgattatacctctagtat

SEQ ID NO: 22833 - RNA, 21 nt, RNAi
cugauuauaccucuaguauuu

SEQ ID NO: 22834 - RNA, 21 nt, RNAi
uugacuaauauggagaucaua

SEQ ID NO: 22835 - DNA, 21 bp, Homo sapiens
cagttggtagaaataatcaag

SEQ ID NO: 22836 - RNA, 21 nt, RNAi
guugguagaaauaaucaaguu

SEQ ID NO: 22837 - RNA, 21 nt, RNAi
uucaaccaucuuuauuaguuc

SEQ ID NO: 22838 - DNA, 21 bp, Homo sapiens
caaattaaggcacatccttgg

SEQ ID NO: 22839 - RNA, 21 nt, RNAi
aauuaaggcacauccuugguu

SEQ ID NO: 22840 - RNA, 21 nt, RNAi
uuuuaauuccguguaggaacc

SEQ ID NO: 22841 - DNA, 21 bp, Homo sapiens
cacatccttggactaaggatt

SEQ ID NO: 22842 - RNA, 21 nt, RNAi
cauccuuggacuaaggauuuu

SEQ ID NO: 22843 - RNA, 21 nt, RNAi
uuguaggaaccugauuccuaa

SEQ ID NO: 22844 - DNA, 21 bp, Homo sapiens
catccttggactaaggattcg

SEQ ID NO: 22845 - RNA, 21 nt, RNAi
uccuuggacuaaggauucguu

SEQ ID NO: 22846 - RNA, 21 nt, RNAi
uuaggaaccugauuccuaagc

SEQ ID NO: 22847 - DNA, 21 bp, Homo sapiens
caggaacaggacatttcacct

SEQ ID NO: 22848 - RNA, 21 nt, RNAi
ggaacaggacauuucaccuuu

SEQ ID NO: 22849 - RNA, 21 nt, RNAi
uuccuuguccuguaaagugga

SEQ ID NO: 22850 - DNA, 21 bp, Homo sapiens
caggacatttcacctcaggag

SEQ ID NO: 22851 - RNA, 21 nt, RNAi
ggacauuucaccucaggaguu

SEQ ID NO: 22852 - RNA, 21 nt, RNAi
uuccuguaaaguggaguccuc

SEQ ID NO: 22853 - DNA, 21 bp, Homo sapiens
catttcacctcaggagtgcgg

SEQ ID NO: 22854 - RNA, 21 nt, RNAi
uuucaccucaggagugcgguu

SEQ ID NO: 22855 - RNA, 21 nt, RNAi
uuaaaguggaguccucacgcc

SEQ ID NO: 22856 - DNA, 21 bp, Homo sapiens
caccggaggcaattgcactgt

SEQ ID NO: 22857 - RNA, 21 nt, RNAi
ccggaggcaauugcacuguuu

SEQ ID NO: 22858 - RNA, 21 nt, RNAi
uuggccuccguuaacgugaca

SEQ ID NO: 22859 - DNA, 21 bp, Homo sapiens
caattgcactgtgtagccgtc

SEQ ID NO: 22860 - RNA, 21 nt, RNAi
auugcacuguguagccgucuu

SEQ ID NO: 22861 - RNA, 21 nt, RNAi
uuuaacgugacacaucggcag

SEQ ID NO: 22862 - DNA, 21 bp, Homo sapiens
cactgtgtagccgtctgctgg

SEQ ID NO: 22863 - RNA, 21 nt, RNAi
cuguguagccgucugcugguu

SEQ ID NO: 22864 - RNA, 21 nt, RNAi
uugacacaucggcagacgacc

SEQ ID NO: 22865 - DNA, 21 bp, Homo sapiens
caccactggaagcttgtgcac

SEQ ID NO: 22866 - RNA, 21 nt, RNAi
ccacuggaagcuugugcacuu

SEQ ID NO: 22867 - RNA, 21 nt, RNAi
uuggugaccuucgaacacgug

SEQ ID NO: 22868 - DNA, 21 bp, Homo sapiens
cactggaagcttgtgcacatt

SEQ ID NO: 22869 - RNA, 21 nt, RNAi
cuggaagcuugugcacauuuu

SEQ ID NO: 22870 - RNA, 21 nt, RNAi
uugaccuucgaacacguguaa

SEQ ID NO: 22871 - DNA, 21 bp, Homo sapiens
caaatgtcaaactaccaaatg

SEQ ID NO: 22872 - RNA, 21 nt, RNAi
aaugucaaacuaccaaauguu

SEQ ID NO: 22873 - RNA, 21 nt, RNAi
uuuuacaguuugaugguuuac

SEQ ID NO: 22874 - DNA, 21 bp, Homo sapiens
cacacctgcactcttcaactt

SEQ ID NO: 22875 - RNA, 21 nt, RNAi
caccugcacucuucaacuuuu

SEQ ID NO: 22876 - RNA, 21 nt, RNAi
uuguggacgugagaaguugaa

SEQ ID NO: 22877 - DNA, 21 bp, Homo sapiens
cacctgcactcttcaacttca

SEQ ID NO: 22878 - RNA, 21 nt, RNAi
ccugcacucuucaacuucauu

SEQ ID NO: 22879 - RNA, 21 nt, RNAi
uuggacgugagaaguugaagu

SEQ ID NO: 22880 - DNA, 21 bp, Homo sapiens
cactcttcaacttcaccactc

SEQ ID NO: 22881 - RNA, 21 nt, RNAi
cucuucaacuucaccacucuu

SEQ ID NO: 22882 - RNA, 21 nt, RNAi
uugagaaguugaaguggugag

SEQ ID NO: 22883 - DNA, 21 bp, Homo sapiens
caacttcaccactcaagaact

SEQ ID NO: 22884 - RNA, 21 nt, RNAi
acuucaccacucaagaacuuu

SEQ ID NO: 22885 - RNA, 21 nt, RNAi
uuugaaguggugaguucuuga

SEQ ID NO: 22886 - DNA, 21 bp, Homo sapiens
caccactcaagaactgtcaag

SEQ ID NO: 22887 - RNA, 21 nt, RNAi
ccacucaagaacugucaaguu

SEQ ID NO: 22888 - RNA, 21 nt, RNAi
uuggugaguucuugacaguuc

SEQ ID NO: 22889 - DNA, 21 bp, Homo sapiens
cactcaagaactgtcaagtaa

SEQ ID NO: 22890 - RNA, 21 nt, RNAi
cucaagaacugucaaguaauu

SEQ ID NO: 22891 - RNA, 21 nt, RNAi
uugaguucuugacaguucauu

SEQ ID NO: 22892 - DNA, 21 bp, Homo sapiens
caagaactgtcaagtaatcca

SEQ ID NO: 22893 - RNA, 21 nt, RNAi
agaacugucaaguaauccauu

SEQ ID NO: 22894 - RNA, 21 nt, RNAi
uuucuugacaguucauuaggu

SEQ ID NO: 22895 - DNA, 21 bp, Homo sapiens
caagtaatccacctctggcta

SEQ ID NO: 22896 - RNA, 21 nt, RNAi
aguaauccaccucuggcuauu

SEQ ID NO: 22897 - RNA, 21 nt, RNAi
uuucauuagguggagaccgau

SEQ ID NO: 22898 - DNA, 21 bp, Homo sapiens
cacctctggctaccatcctta

SEQ ID NO: 22899 - RNA, 21 nt, RNAi
ccucuggcuaccauccuuauu

SEQ ID NO: 22900 - RNA, 21 nt, RNAi
uuggagaccgaugguaggaau

SEQ ID NO: 22901 - DNA, 21 bp, Homo sapiens
catccttattcctcctcatgc

SEQ ID NO: 22902 - RNA, 21 nt, RNAi
uccuuauuccuccucaugcuu

SEQ ID NO: 22903 - RNA, 21 nt, RNAi
uuaggaauaaggaggaguacg

SEQ ID NO: 22904 - DNA, 21 bp, Homo sapiens
catgctcggattcaagcagct

SEQ ID NO: 22905 - RNA, 21 nt, RNAi
ugcucggauucaagcagcuuu

SEQ ID NO: 22906 - RNA, 21 nt, RNAi
uuacgagccuaaguucgucga

SEQ ID NO: 22907 - DNA, 21 bp, Homo sapiens
cacaaatgccacagcagcgtc

SEQ ID NO: 22908 - RNA, 21 nt, RNAi
caaaugccacagcagcgucuu

SEQ ID NO: 22909 - RNA, 21 nt, RNAi
uuguuuacggugucgucgcag

SEQ ID NO: 22910 - DNA, 21 bp, Homo sapiens
caaatgccacagcagcgtcag

SEQ ID NO: 22911 - RNA, 21 nt, RNAi
aaugccacagcagcgucaguu

SEQ ID NO: 22912 - RNA, 21 nt, RNAi
uuuuacggugucgucgcaguc

SEQ ID NO: 22913 - DNA, 21 bp, Homo sapiens
cacagcagcgtcagatgctaa

SEQ ID NO: 22914 - RNA, 21 nt, RNAi
cagcagcgucagaugcuaauu

SEQ ID NO: 22915 - RNA, 21 nt, RNAi
uugucgucgcagucuacgauu

SEQ ID NO: 22916 - DNA, 21 bp, Homo sapiens
cagcagcgtcagatgctaata

SEQ ID NO: 22917 - RNA, 21 nt, RNAi
gcagcgucagaugcuaauauu

SEQ ID NO: 22918 - RNA, 21 nt, RNAi
uucgucgcagucuacgauuau

SEQ ID NO: 22919 - DNA, 21 bp, Homo sapiens
cagcgtcagatgctaatactg

SEQ ID NO: 22920 - RNA, 21 nt, RNAi
gcgucagaugcuaauacuguu

SEQ ID NO: 22921 - RNA, 21 nt, RNAi
uucgcagucuacgauuaugac

SEQ ID NO: 22922 - DNA, 21 bp, Homo sapiens
cagatgctaatactggagacc

SEQ ID NO: 22923 - RNA, 21 nt, RNAi
gaugcuaauacuggagaccuu

SEQ ID NO: 22924 - RNA, 21 nt, RNAi
uucuacgauuaugaccucugg

SEQ ID NO: 22925 - DNA, 21 bp, Homo sapiens
cagaccaataatgctgcttct

SEQ ID NO: 22926 - RNA, 21 nt, RNAi
gaccaauaaugcugcuucuuu

SEQ ID NO: 22927 - RNA, 21 nt, RNAi
uucugguuauuacgacgaaga

SEQ ID NO: 22928 - DNA, 21 bp, Homo sapiens
caataatgctgcttctgcatc

SEQ ID NO: 22929 - RNA, 21 nt, RNAi
auaaugcugcuucugcaucuu

SEQ ID NO: 22930 - RNA, 21 nt, RNAi
uuuauuacgacgaagacguag

SEQ ID NO: 22931 - DNA, 21 bp, Homo sapiens
catcagcttccaactccacct

SEQ ID NO: 22932 - RNA, 21 nt, RNAi
ucagcuuccaacuccaccuuu

SEQ ID NO: 22933 - RNA, 21 nt, RNAi
uuagucgaagguugaggugga

SEQ ID NO: 22934 - DNA, 21 bp, Homo sapiens
cagcttccaactccacctgaa

SEQ ID NO: 22935 - RNA, 21 nt, RNAi
gcuuccaacuccaccugaauu

SEQ ID NO: 22936 - RNA, 21 nt, RNAi
uucgaagguugagguggacuu

SEQ ID NO: 22937 - DNA, 21 bp, Homo sapiens
caccagttacttgagtgtcac

SEQ ID NO: 22938 - RNA, 21 nt, RNAi
ccaguuacuugagugucacuu

SEQ ID NO: 22939 - RNA, 21 nt, RNAi
uuggucaaugaacucacagug

SEQ ID NO: 22940 - DNA, 21 bp, Homo sapiens
cagttacttgagtgtcactca

SEQ ID NO: 22941 - RNA, 21 nt, RNAi
guuacuugagugucacucauu

SEQ ID NO: 22942 - RNA, 21 nt, RNAi
uucaaugaacucacagugagu

SEQ ID NO: 22943 - DNA, 21 bp, Homo sapiens
cactcagcaacactggtcacg

SEQ ID NO: 22944 - RNA, 21 nt, RNAi
cucagcaacacuggucacguu

SEQ ID NO: 22945 - RNA, 21 nt, RNAi
uugagucguugugaccagugc

SEQ ID NO: 22946 - DNA, 21 bp, Homo sapiens
cagcaacactggtcacgtttg

SEQ ID NO: 22947 - RNA, 21 nt, RNAi
gcaacacuggucacguuuguu

SEQ ID NO: 22948 - RNA, 21 nt, RNAi
uucguugugaccagugcaaac

SEQ ID NO: 22949 - DNA, 21 bp, Homo sapiens
caacactggtcacgtttggaa

SEQ ID NO: 22950 - RNA, 21 nt, RNAi
acacuggucacguuuggaauu

SEQ ID NO: 22951 - RNA, 21 nt, RNAi
uuugugaccagugcaaaccuu

SEQ ID NO: 22952 - DNA, 21 bp, Homo sapiens
cactggtcacgtttggaaaga

SEQ ID NO: 22953 - RNA, 21 nt, RNAi
cuggucacguuuggaaagauu

SEQ ID NO: 22954 - RNA, 21 nt, RNAi
uugaccagugcaaaccuuucu

SEQ ID NO: 22955 - DNA, 21 bp, Homo sapiens
gatctgtcttgaaggagaaat

SEQ ID NO: 22956 - RNA, 21 nt, RNAi
ucugucuugaaggagaaauuu

SEQ ID NO: 22957 - RNA, 21 nt, RNAi
uuagacagaacuuccucuuua

SEQ ID NO: 22958 - DNA, 21 bp, Homo sapiens
gaaggagaaatatatcgcttg

SEQ ID NO: 22959 - RNA, 21 nt, RNAi
aggagaaauauaucgcuuguu

SEQ ID NO: 22960 - RNA, 21 nt, RNAi
uuuccucuuuauauagcgaac

SEQ ID NO: 22961 - DNA, 21 bp, Homo sapiens
gagaacttaatgctgcattta

SEQ ID NO: 22962 - RNA, 21 nt, RNAi
gaacuuaaugcugcauuuauu

SEQ ID NO: 22963 - RNA, 21 nt, RNAi
uucuugaauuacgacguaaau

SEQ ID NO: 22964 - DNA, 21 bp, Homo sapiens
gaacttaatgctgcatttatc

SEQ ID NO: 22965 - RNA, 21 nt, RNAi
acuuaaugcugcauuuaucuu

SEQ ID NO: 22966 - RNA, 21 nt, RNAi
uuugaauuacgacguaaauag

SEQ ID NO: 22967 - DNA, 21 bp, Homo sapiens
gattcgcgaagagagtgatca

SEQ ID NO: 22968 - RNA, 21 nt, RNAi
uucgcgaagagagugaucauu

SEQ ID NO: 22969 - RNA, 21 nt, RNAi
uuaagcgcuucucucacuagu

SEQ ID NO: 22970 - DNA, 21 bp, Homo sapiens
gaagagagtgatcatgtcagg

SEQ ID NO: 22971 - RNA, 21 nt, RNAi
agagagugaucaugucagguu

SEQ ID NO: 22972 - RNA, 21 nt, RNAi
uuucucucacuaguacagucc

SEQ ID NO: 22973 - DNA, 21 bp, Homo sapiens
gaaccacctcctttgcggaga

SEQ ID NO: 22974 - RNA, 21 nt, RNAi
accaccuccuuugcggagauu

SEQ ID NO: 22975 - RNA, 21 nt, RNAi
uuugguggaggaaacgccucu

SEQ ID NO: 22976 - DNA, 21 bp, Homo sapiens
gaaagttagcagagacaagga

SEQ ID NO: 22977 - RNA, 21 nt, RNAi
aaguuagcagagacaaggauu

SEQ ID NO: 22978 - RNA, 21 nt, RNAi
uuuucaaucgucucuguuccu

SEQ ID NO: 22979 - DNA, 21 bp, Homo sapiens
gagacaaggacggcagcaagg

SEQ ID NO: 22980 - RNA, 21 nt, RNAi
gacaaggacggcagcaagguu

SEQ ID NO: 22981 - RNA, 21 nt, RNAi
uucuguuccugccgucguucc

SEQ ID NO: 22982 - DNA, 21 bp, Homo sapiens
gacaaggacggcagcaaggtg

SEQ ID NO: 22983 - RNA, 21 nt, RNAi
caaggacggcagcaagguguu

SEQ ID NO: 22984 - RNA, 21 nt, RNAi
uuguuccugccgucguuccac

SEQ ID NO: 22985 - DNA, 21 bp, Homo sapiens
gacggcagcaaggtgacaaca

SEQ ID NO: 22986 - RNA, 21 nt, RNAi
cggcagcaaggugacaacauu

SEQ ID NO: 22987 - RNA, 21 nt, RNAi
uugccgucguuccacuguugu

SEQ ID NO: 22988 - DNA, 21 bp, Homo sapiens
gacaacagtggtggcaactcc

SEQ ID NO: 22989 - RNA, 21 nt, RNAi
caacagugguggcaacuccuu

SEQ ID NO: 22990 - RNA, 21 nt, RNAi
uuguugucaccaccguugagg

SEQ ID NO: 22991 - DNA, 21 bp, Homo sapiens
gacaggccacaagaagtcagc

SEQ ID NO: 22992 - RNA, 21 nt, RNAi
caggccacaagaagucagcuu

SEQ ID NO: 22993 - RNA, 21 nt, RNAi
uuguccgguguucuucagucg

SEQ ID NO: 22994 - DNA, 21 bp, Homo sapiens
gaagtcagctatacagacact

SEQ ID NO: 22995 - RNA, 21 nt, RNAi
agucagcuauacagacacuuu

SEQ ID NO: 22996 - RNA, 21 nt, RNAi
uuucagucgauaugucuguga

SEQ ID NO: 22997 - DNA, 21 bp, Homo sapiens
gacactaaagtgattggaaat

SEQ ID NO: 22998 - RNA, 21 nt, RNAi
cacuaaagugauuggaaauuu

SEQ ID NO: 22999 - RNA, 21 nt, RNAi
uugugauuucacuaaccuuua

SEQ ID NO: 23000 - DNA, 21 bp, Homo sapiens
gattggaaatggatcatttgg

SEQ ID NO: 23001 - RNA, 21 nt, RNAi
uuggaaauggaucauuugguu

SEQ ID NO: 23002 - RNA, 21 nt, RNAi
uuaaccuuuaccuaguaaacc

SEQ ID NO: 23003 - DNA, 21 bp, Homo sapiens
gaaatggatcatttggtgtgg

SEQ ID NO: 23004 - RNA, 21 nt, RNAi
aauggaucauuuggugugguu

SEQ ID NO: 23005 - RNA, 21 nt, RNAi
uuuuaccuaguaaaccacacc

SEQ ID NO: 23006 - DNA, 21 bp, Homo sapiens
gatcatttggtgtggtatatc

SEQ ID NO: 23007 - RNA, 21 nt, RNAi
ucauuuggugugguauaucuu

SEQ ID NO: 23008 - RNA, 21 nt, RNAi
uuaguaaaccacaccauauag

SEQ ID NO: 23009 - DNA, 21 bp, Homo sapiens
gattcaggagaactggtcgcc

SEQ ID NO: 23010 - RNA, 21 nt, RNAi
uucaggagaacuggucgccuu

SEQ ID NO: 23011 - RNA, 21 nt, RNAi
uuaaguccucuugaccagcgg

SEQ ID NO: 23012 - DNA, 21 bp, Homo sapiens
gagaactggtcgccatcaaga

SEQ ID NO: 23013 - RNA, 21 nt, RNAi
gaacuggucgccaucaagauu

SEQ ID NO: 23014 - RNA, 21 nt, RNAi
uucuugaccagcgguaguucu

SEQ ID NO: 23015 - DNA, 21 bp, Homo sapiens
gaactggtcgccatcaagaaa

SEQ ID NO: 23016 - RNA, 21 nt, RNAi
acuggucgccaucaagaaauu

SEQ ID NO: 23017 - RNA, 21 nt, RNAi
uuugaccagcgguaguucuuu

SEQ ID NO: 23018 - DNA, 21 bp, Homo sapiens
gaaagtattgcaggacaagag

SEQ ID NO: 23019 - RNA, 21 nt, RNAi
aaguauugcaggacaagaguu

SEQ ID NO: 23020 - RNA, 21 nt, RNAi
uuuucauaacguccuguucuc

SEQ ID NO: 23021 - DNA, 21 bp, Homo sapiens
gacaagagatttaagaatcga

SEQ ID NO: 23022 - RNA, 21 nt, RNAi
caagagauuuaagaaucgauu

SEQ ID NO: 23023 - RNA, 21 nt, RNAi
uuguucucuaaauucuuagcu

SEQ ID NO: 23024 - DNA, 21 bp, Homo sapiens
gagatttaagaatcgagagct

SEQ ID NO: 23025 - RNA, 21 nt, RNAi
gauuuaagaaucgagagcuuu

SEQ ID NO: 23026 - RNA, 21 nt, RNAi
uucuaaauucuuagcucucga

SEQ ID NO: 23027 - DNA, 21 bp, Homo sapiens
gatttaagaatcgagagctcc

SEQ ID NO: 23028 - RNA, 21 nt, RNAi
uuuaagaaucgagagcuccuu

SEQ ID NO: 23029 - RNA, 21 nt, RNAi
uuaaauucuuagcucucgagg

SEQ ID NO: 23030 - DNA, 21 bp, Homo sapiens
gaatcgagagctccagatcat

SEQ ID NO: 23031 - RNA, 21 nt, RNAi
aucgagagcuccagaucauuu

SEQ ID NO: 23032 - RNA, 21 nt, RNAi
uuuagcucucgaggucuagua

SEQ ID NO: 23033 - DNA, 21 bp, Homo sapiens
gagagctccagatcatgagaa

SEQ ID NO: 23034 - RNA, 21 nt, RNAi
gagcuccagaucaugagaauu

SEQ ID NO: 23035 - RNA, 21 nt, RNAi
uucucgaggucuaguacucuu

SEQ ID NO: 23036 - DNA, 21 bp, Homo sapiens
gagctccagatcatgagaaag

SEQ ID NO: 23037 - RNA, 21 nt, RNAi
gcuccagaucaugagaaaguu

SEQ ID NO: 23038 - RNA, 21 nt, RNAi
uucgaggucuaguacucuuuc

SEQ ID NO: 23039 - DNA, 21 bp, Homo sapiens
gatcatgagaaagctagatca

SEQ ID NO: 23040 - RNA, 21 nt, RNAi
ucaugagaaagcuagaucauu

SEQ ID NO: 23041 - RNA, 21 nt, RNAi
uuaguacucuuucgaucuagu

SEQ ID NO: 23042 - DNA, 21 bp, Homo sapiens
gagaaagctagatcactgtaa

SEQ ID NO: 23043 - RNA, 21 nt, RNAi
gaaagcuagaucacuguaauu

SEQ ID NO: 23044 - RNA, 21 nt, RNAi
uucuuucgaucuagugacauu

SEQ ID NO: 23045 - DNA, 21 bp, Homo sapiens
gaaagctagatcactgtaaca

SEQ ID NO: 23046 - RNA, 21 nt, RNAi
aagcuagaucacuguaacauu

SEQ ID NO: 23047 - RNA, 21 nt, RNAi
uuuucgaucuagugacauugu

SEQ ID NO: 23048 - DNA, 21 bp, Homo sapiens
gatcactgtaacatagtccga

SEQ ID NO: 23049 - RNA, 21 nt, RNAi
ucacuguaacauaguccgauu

SEQ ID NO: 23050 - RNA, 21 nt, RNAi
uuagugacauuguaucaggcu

SEQ ID NO: 23051 - DNA, 21 bp, Homo sapiens
gattgcgttatttcttctact

SEQ ID NO: 23052 - RNA, 21 nt, RNAi
uugcguuauuucuucuacuuu

SEQ ID NO: 23053 - RNA, 21 nt, RNAi
uuaacgcaauaaagaagauga

SEQ ID NO: 23054 - DNA, 21 bp, Homo sapiens
gagaagaaagatgaggtctat

SEQ ID NO: 23055 - RNA, 21 nt, RNAi
gaagaaagaugaggucuauuu

SEQ ID NO: 23056 - RNA, 21 nt, RNAi
uucuucuuucuacuccagaua

SEQ ID NO: 23057 - DNA, 21 bp, Homo sapiens
gaagaaagatgaggtctatct

SEQ ID NO: 23058 - RNA, 21 nt, RNAi
agaaagaugaggucuaucuuu

SEQ ID NO: 23059 - RNA, 21 nt, RNAi
uuucuuucuacuccagauaga

SEQ ID NO: 23060 - DNA, 21 bp, Homo sapiens
gaaagatgaggtctatcttaa

SEQ ID NO: 23061 - RNA, 21 nt, RNAi
aagaugaggucuaucuuaauu

SEQ ID NO: 23062 - RNA, 21 nt, RNAi
uuuucuacuccagauagaauu

SEQ ID NO: 23063 - DNA, 21 bp, Homo sapiens
gatgaggtctatcttaatctg

SEQ ID NO: 23064 - RNA, 21 nt, RNAi
ugaggucuaucuuaaucuguu

SEQ ID NO: 23065 - RNA, 21 nt, RNAi
uuacuccagauagaauuagac

SEQ ID NO: 23066 - DNA, 21 bp, Homo sapiens
gaggtctatcttaatctggtg

SEQ ID NO: 23067 - RNA, 21 nt, RNAi
ggucuaucuuaaucugguguu

SEQ ID NO: 23068 - RNA, 21 nt, RNAi
uuccagauagaauuagaccac

SEQ ID NO: 23069 - DNA, 21 bp, Homo sapiens
gactatgttccggaaacagta

SEQ ID NO: 23070 - RNA, 21 nt, RNAi
cuauguuccggaaacaguauu

SEQ ID NO: 23071 - RNA, 21 nt, RNAi
uugauacaaggccuuugucau

SEQ ID NO: 23072 - DNA, 21 bp, Homo sapiens
gaaacagtatacagagttgcc

SEQ ID NO: 23073 - RNA, 21 nt, RNAi
aacaguauacagaguugccuu

SEQ ID NO: 23074 - RNA, 21 nt, RNAi
uuuugucauaugucucaacgg

SEQ ID NO: 23075 - DNA, 21 bp, Homo sapiens
gagttgccagacactatagtc

SEQ ID NO: 23076 - RNA, 21 nt, RNAi
guugccagacacuauagucuu

SEQ ID NO: 23077 - RNA, 21 nt, RNAi
uucaacggucugugauaucag

SEQ ID NO: 23078 - DNA, 21 bp, Homo sapiens
gacactatagtcgagccaaac

SEQ ID NO: 23079 - RNA, 21 nt, RNAi
cacuauagucgagccaaacuu

SEQ ID NO: 23080 - RNA, 21 nt, RNAi
uugugauaucagcucgguuug

SEQ ID NO: 23081 - DNA, 21 bp, Homo sapiens
gaagtttagcctatatccatt

SEQ ID NO: 23082 - RNA, 21 nt, RNAi
aguuuagccuauauccauuuu

SEQ ID NO: 23083 - RNA, 21 nt, RNAi
uuucaaaucggauauagguaa

SEQ ID NO: 23084 - DNA, 21 bp, Homo sapiens
gatattaaaccgcagaacctc

SEQ ID NO: 23085 - RNA, 21 nt, RNAi
uauuaaaccgcagaaccucuu

SEQ ID NO: 23086 - RNA, 21 nt, RNAi
uuauaauuuggcgucuuggag

SEQ ID NO: 23087 - DNA, 21 bp, Homo sapiens
gaacctcttgttggatcctga

SEQ ID NO: 23088 - RNA, 21 nt, RNAi
accucuuguuggauccugauu

SEQ ID NO: 23089 - RNA, 21 nt, RNAi
uuuggagaacaaccuaggacu

SEQ ID NO: 23090 - DNA, 21 bp, Homo sapiens
gatcctgatactgctgtatta

SEQ ID NO: 23091 - RNA, 21 nt, RNAi
uccugauacugcuguauuauu

SEQ ID NO: 23092 - RNA, 21 nt, RNAi
uuaggacuaugacgacauaau

SEQ ID NO: 23093 - DNA, 21 bp, Homo sapiens
gactttggaagtgcaaagcag

SEQ ID NO: 23094 - RNA, 21 nt, RNAi
cuuuggaagugcaaagcaguu

SEQ ID NO: 23095 - RNA, 21 nt, RNAi
uugaaaccuucacguuucguc

SEQ ID NO: 23096 - DNA, 21 bp, Homo sapiens
gaagtgcaaagcagctggtcc

SEQ ID NO: 23097 - RNA, 21 nt, RNAi
agugcaaagcagcugguccuu

SEQ ID NO: 23098 - RNA, 21 nt, RNAi
uuucacguuucgucgaccagg

SEQ ID NO: 23099 - DNA, 21 bp, Homo sapiens
gagttgatctttggagccact

SEQ ID NO: 23100 - RNA, 21 nt, RNAi
guugaucuuuggagccacuuu

SEQ ID NO: 23101 - RNA, 21 nt, RNAi
uucaacuagaaaccucgguga

SEQ ID NO: 23102 - DNA, 21 bp, Homo sapiens
gatctttggagccactgatta

SEQ ID NO: 23103 - RNA, 21 nt, RNAi
ucuuuggagccacugauuauu

SEQ ID NO: 23104 - RNA, 21 nt, RNAi
uuagaaaccucggugacuaau

SEQ ID NO: 23105 - DNA, 21 bp, Homo sapiens
gagccactgattatacctcta

SEQ ID NO: 23106 - RNA, 21 nt, RNAi
gccacugauuauaccucuauu

SEQ ID NO: 23107 - RNA, 21 nt, RNAi
uucggugacuaauauggagau

SEQ ID NO: 23108 - DNA, 21 bp, Homo sapiens
gatgtatggtctgctggctgt

SEQ ID NO: 23109 - RNA, 21 nt, RNAi
uguauggucugcuggcuguuu

SEQ ID NO: 23110 - RNA, 21 nt, RNAi
uuacauaccagacgaccgaca

SEQ ID NO: 23111 - DNA, 21 bp, Homo sapiens
gagctgttactaggacaacca

SEQ ID NO: 23112 - RNA, 21 nt, RNAi
gcuguuacuaggacaaccauu

SEQ ID NO: 23113 - RNA, 21 nt, RNAi
uucgacaaugauccuguuggu

SEQ ID NO: 23114 - DNA, 21 bp, Homo sapiens
gatagtggtgtggatcagttg

SEQ ID NO: 23115 - RNA, 21 nt, RNAi
uagugguguggaucaguuguu

SEQ ID NO: 23116 - RNA, 21 nt, RNAi
uuaucaccacaccuagucaac

SEQ ID NO: 23117 - DNA, 21 bp, Homo sapiens
gatcagttggtagaaataatc

SEQ ID NO: 23118 - RNA, 21 nt, RNAi
ucaguugguagaaauaaucuu

SEQ ID NO: 23119 - RNA, 21 nt, RNAi
uuagucaaccaucuuuauuag

SEQ ID NO: 23120 - DNA, 21 bp, Homo sapiens
gagcaaatcagagaaatgaac

SEQ ID NO: 23121 - RNA, 21 nt, RNAi
gcaaaucagagaaaugaacuu

SEQ ID NO: 23122 - RNA, 21 nt, RNAi
uucguuuagucucuuuacuug

SEQ ID NO: 23123 - DNA, 21 bp, Homo sapiens
gactaaggattcgtcaggaac

SEQ ID NO: 23124 - RNA, 21 nt, RNAi
cuaaggauucgucaggaacuu

SEQ ID NO: 23125 - RNA, 21 nt, RNAi
uugauuccuaagcaguccuug

SEQ ID NO: 23126 - DNA, 21 bp, Homo sapiens
gattcgtcaggaacaggacat

SEQ ID NO: 23127 - RNA, 21 nt, RNAi
uucgucaggaacaggacauuu

SEQ ID NO: 23128 - RNA, 21 nt, RNAi
uuaagcaguccuuguccugua

SEQ ID NO: 23129 - DNA, 21 bp, Homo sapiens
gaacaggacatttcacctcag

SEQ ID NO: 23130 - RNA, 21 nt, RNAi
acaggacauuucaccucaguu

SEQ ID NO: 23131 - RNA, 21 nt, RNAi
uuuguccuguaaaguggaguc

SEQ ID NO: 23132 - DNA, 21 bp, Homo sapiens
gacatttcacctcaggagtgc

SEQ ID NO: 23133 - RNA, 21 nt, RNAi
cauuucaccucaggagugcuu

SEQ ID NO: 23134 - RNA, 21 nt, RNAi
uuguaaaguggaguccucacg

SEQ ID NO: 23135 - DNA, 21 bp, Homo sapiens
gaactccaccggaggcaattg

SEQ ID NO: 23136 - RNA, 21 nt, RNAi
acuccaccggaggcaauuguu

SEQ ID NO: 23137 - RNA, 21 nt, RNAi
uuugagguggccuccguuaac

SEQ ID NO: 23138 - DNA, 21 bp, Homo sapiens
gaggcaattgcactgtgtagc

SEQ ID NO: 23139 - RNA, 21 nt, RNAi
ggcaauugcacuguguagcuu

SEQ ID NO: 23140 - RNA, 21 nt, RNAi
uuccguuaacgugacacaucg

SEQ ID NO: 23141 - DNA, 21 bp, Homo sapiens
gactaacaccactggaagctt

SEQ ID NO: 23142 - RNA, 21 nt, RNAi
cuaacaccacuggaagcuuuu

SEQ ID NO: 23143 - RNA, 21 nt, RNAi
uugauuguggugaccuucgaa

SEQ ID NO: 23144 - DNA, 21 bp, Homo sapiens
gaagcttgtgcacattcattt

SEQ ID NO: 23145 - RNA, 21 nt, RNAi
agcuugugcacauucauuuuu

SEQ ID NO: 23146 - RNA, 21 nt, RNAi
uuucgaacacguguaaguaaa

SEQ ID NO: 23147 - DNA, 21 bp, Homo sapiens
gagacacacctgcactcttca

SEQ ID NO: 23148 - RNA, 21 nt, RNAi
gacacaccugcacucuucauu

SEQ ID NO: 23149 - RNA, 21 nt, RNAi
uucuguguggacgugagaagu

SEQ ID NO: 23150 - DNA, 21 bp, Homo sapiens
gacacacctgcactcttcaac

SEQ ID NO: 23151 - RNA, 21 nt, RNAi
cacaccugcacucuucaacuu

SEQ ID NO: 23152 - RNA, 21 nt, RNAi
uuguguggacgugagaaguug

SEQ ID NO: 23153 - DNA, 21 bp, Homo sapiens
gaactgtcaagtaatccacct

SEQ ID NO: 23154 - RNA, 21 nt, RNAi
acugucaaguaauccaccuuu

SEQ ID NO: 23155 - RNA, 21 nt, RNAi
uuugacaguucauuaggugga

SEQ ID NO: 23156 - DNA, 21 bp, Homo sapiens
gattcaagcagctgcttcaac

SEQ ID NO: 23157 - RNA, 21 nt, RNAi
uucaagcagcugcuucaacuu

SEQ ID NO: 23158 - RNA, 21 nt, RNAi
uuaaguucgucgacgaaguug

SEQ ID NO: 23159 - DNA, 21 bp, Homo sapiens
gatgctaatactggagaccgt

SEQ ID NO: 23160 - RNA, 21 nt, RNAi
ugcuaauacuggagaccguuu

SEQ ID NO: 23161 - RNA, 21 nt, RNAi
uuacgauuaugaccucuggca

SEQ ID NO: 23162 - DNA, 21 bp, Homo sapiens
gagaccgtggacagaccaata

SEQ ID NO: 23163 - RNA, 21 nt, RNAi
gaccguggacagaccaauauu

SEQ ID NO: 23164 - RNA, 21 nt, RNAi
uucuggcaccugucugguuau

SEQ ID NO: 23165 - DNA, 21 bp, Homo sapiens
gaccgtggacagaccaataat

SEQ ID NO: 23166 - RNA, 21 nt, RNAi
ccguggacagaccaauaauuu

SEQ ID NO: 23167 - RNA, 21 nt, RNAi
uuggcaccugucugguuauua

SEQ ID NO: 23168 - DNA, 21 bp, Homo sapiens
gacagaccaataatgctgctt

SEQ ID NO: 23169 - RNA, 21 nt, RNAi
cagaccaauaaugcugcuuuu

SEQ ID NO: 23170 - RNA, 21 nt, RNAi
uugucugguuauuacgacgaa

SEQ ID NO: 23171 - DNA, 21 bp, Homo sapiens
gaccaataatgctgcttctgc

SEQ ID NO: 23172 - RNA, 21 nt, RNAi
ccaauaaugcugcuucugcuu

SEQ ID NO: 23173 - RNA, 21 nt, RNAi
uugguuauuacgacgaagacg

SEQ ID NO: 23174 - DNA, 21 bp, Homo sapiens
gagcagccagctgcacaggaa

SEQ ID NO: 23175 - RNA, 21 nt, RNAi
gcagccagcugcacaggaauu

SEQ ID NO: 23176 - RNA, 21 nt, RNAi
uucgucggucgacguguccuu

SEQ ID NO: 23177 - DNA, 21 bp, Homo sapiens
gagtgtcactcagcaacactg

SEQ ID NO: 23178 - RNA, 21 nt, RNAi
gugucacucagcaacacuguu

SEQ ID NO: 23179 - RNA, 21 nt, RNAi
uucacagugagucguugugac

SEQ ID NO: 23180 - DNA, 21 bp, Homo sapiens
tatatgttaaatatccgtgcc

SEQ ID NO: 23181 - RNA, 21 nt, RNAi
uauguuaaauauccgugccuu

SEQ ID NO: 23182 - RNA, 21 nt, RNAi
uuauacaauuuauaggcacgg

SEQ ID NO: 23183 - DNA, 21 bp, Homo sapiens
tatgttaaatatccgtgccga

SEQ ID NO: 23184 - RNA, 21 nt, RNAi
uguuaaauauccgugccgauu

SEQ ID NO: 23185 - RNA, 21 nt, RNAi
uuacaauuuauaggcacggcu

SEQ ID NO: 23186 - DNA, 21 bp, Homo sapiens
taaatatccgtgccgatctgt

SEQ ID NO: 23187 - RNA, 21 nt, RNAi
aauauccgugccgaucuguuu

SEQ ID NO: 23188 - RNA, 21 nt, RNAi
uuuuauaggcacggcuagaca

SEQ ID NO: 23189 - DNA, 21 bp, Homo sapiens
tatccgtgccgatctgtcttg

SEQ ID NO: 23190 - RNA, 21 nt, RNAi
uccgugccgaucugucuuguu

SEQ ID NO: 23191 - RNA, 21 nt, RNAi
uuaggcacggcuagacagaac

SEQ ID NO: 23192 - DNA, 21 bp, Homo sapiens
tagcagagacaaggacggcag

SEQ ID NO: 23193 - RNA, 21 nt, RNAi
gcagagacaaggacggcaguu

SEQ ID NO: 23194 - RNA, 21 nt, RNAi
uucgucucuguuccugccguc

SEQ ID NO: 23195 - DNA, 21 bp, Homo sapiens
tacagacactaaagtgattgg

SEQ ID NO: 23196 - RNA, 21 nt, RNAi
cagacacuaaagugauugguu

SEQ ID NO: 23197 - RNA, 21 nt, RNAi
uugucugugauuucacuaacc

SEQ ID NO: 23198 - DNA, 21 bp, Homo sapiens
taaagtgattggaaatggatc

SEQ ID NO: 23199 - RNA, 21 nt, RNAi
aagugauuggaaauggaucuu

SEQ ID NO: 23200 - RNA, 21 nt, RNAi
uuuucacuaaccuuuaccuag

SEQ ID NO: 23201 - DNA, 21 bp, Homo sapiens
tatatcaagccaaactttgtg

SEQ ID NO: 23202 - RNA, 21 nt, RNAi
uaucaagccaaacuuuguguu

SEQ ID NO: 23203 - RNA, 21 nt, RNAi
uuauaguucgguuugaaacac

SEQ ID NO: 23204 - DNA, 21 bp, Homo sapiens
tatcaagccaaactttgtgat

SEQ ID NO: 23205 - RNA, 21 nt, RNAi
ucaagccaaacuuugugauuu

SEQ ID NO: 23206 - RNA, 21 nt, RNAi
uuaguucgguuugaaacacua

SEQ ID NO: 23207 - DNA, 21 bp, Homo sapiens
tattgcaggacaagagattta

SEQ ID NO: 23208 - RNA, 21 nt, RNAi
uugcaggacaagagauuuauu

SEQ ID NO: 23209 - RNA, 21 nt, RNAi
uuaacguccuguucucuaaau

SEQ ID NO: 23210 - DNA, 21 bp, Homo sapiens
taagaatcgagagctccagat

SEQ ID NO: 23211 - RNA, 21 nt, RNAi
agaaucgagagcuccagauuu

SEQ ID NO: 23212 - RNA, 21 nt, RNAi
uuucuuagcucucgaggucua

SEQ ID NO: 23213 - DNA, 21 bp, Homo sapiens
tagatcactgtaacatagtcc

SEQ ID NO: 23214 - RNA, 21 nt, RNAi
gaucacuguaacauaguccuu

SEQ ID NO: 23215 - RNA, 21 nt, RNAi
uucuagugacauuguaucagg

SEQ ID NO: 23216 - DNA, 21 bp, Homo sapiens
taacatagtccgattgcgtta

SEQ ID NO: 23217 - RNA, 21 nt, RNAi
acauaguccgauugcguuauu

SEQ ID NO: 23218 - RNA, 21 nt, RNAi
uuuguaucaggcuaacgcaau

SEQ ID NO: 23219 - DNA, 21 bp, Homo sapiens
tagtccgattgcgttatttct

SEQ ID NO: 23220 - RNA, 21 nt, RNAi
guccgauugcguuauuucuuu

SEQ ID NO: 23221 - RNA, 21 nt, RNAi
uucaggcuaacgcaauaaaga

SEQ ID NO: 23222 - DNA, 21 bp, Homo sapiens
tatttcttctactccagtggt

SEQ ID NO: 23223 - RNA, 21 nt, RNAi
uuucuucuacuccagugguuu

SEQ ID NO: 23224 - RNA, 21 nt, RNAi
uuaaagaagaugaggucacca

SEQ ID NO: 23225 - DNA, 21 bp, Homo sapiens
tactccagtggtgagaagaaa

SEQ ID NO: 23226 - RNA, 21 nt, RNAi
cuccaguggugagaagaaauu

SEQ ID NO: 23227 - RNA, 21 nt, RNAi
uugaggucaccacucuucuuu

SEQ ID NO: 23228 - DNA, 21 bp, Homo sapiens
tatcttaatctggtgctggac

SEQ ID NO: 23229 - RNA, 21 nt, RNAi
ucuuaaucuggugcuggacuu

SEQ ID NO: 23230 - RNA, 21 nt, RNAi
uuagaauuagaccacgaccug

SEQ ID NO: 23231 - DNA, 21 bp, Homo sapiens
taatctggtgctggactatgt

SEQ ID NO: 23232 - RNA, 21 nt, RNAi
aucuggugcuggacuauguuu

SEQ ID NO: 23233 - RNA, 21 nt, RNAi
uuuagaccacgaccugauaca

SEQ ID NO: 23234 - DNA, 21 bp, Homo sapiens
tatgttccggaaacagtatac

SEQ ID NO: 23235 - RNA, 21 nt, RNAi
uguuccggaaacaguauacuu

SEQ ID NO: 23236 - RNA, 21 nt, RNAi
uuacaaggccuuugucauaug

SEQ ID NO: 23237 - DNA, 21 bp, Homo sapiens
tatacagagttgccagacact

SEQ ID NO: 23238 - RNA, 21 nt, RNAi
uacagaguugccagacacuuu

SEQ ID NO: 23239 - RNA, 21 nt, RNAi
uuaugucucaacggucuguga

SEQ ID NO: 23240 - DNA, 21 bp, Homo sapiens
tacagagttgccagacactat

SEQ ID NO: 23241 - RNA, 21 nt, RNAi
cagaguugccagacacuauuu

SEQ ID NO: 23242 - RNA, 21 nt, RNAi
uugucucaacggucugugaua

SEQ ID NO: 23243 - DNA, 21 bp, Homo sapiens
tatagtcgagccaaacagacg

SEQ ID NO: 23244 - RNA, 21 nt, RNAi
uagucgagccaaacagacguu

SEQ ID NO: 23245 - RNA, 21 nt, RNAi
uuaucagcucgguuugucugc

SEQ ID NO: 23246 - DNA, 21 bp, Homo sapiens
tagtcgagccaaacagacgct

SEQ ID NO: 23247 - RNA, 21 nt, RNAi
gucgagccaaacagacgcuuu

SEQ ID NO: 23248 - RNA, 21 nt, RNAi
uucagcucgguuugucugcga

SEQ ID NO: 23249 - DNA, 21 bp, Homo sapiens
tatatgtatcagctgttccga

SEQ ID NO: 23250 - RNA, 21 nt, RNAi
uauguaucagcuguuccgauu

SEQ ID NO: 23251 - RNA, 21 nt, RNAi
uuauacauagucgacaaggcu

SEQ ID NO: 23252 - DNA, 21 bp, Homo sapiens
tatgtatcagctgttccgaag

SEQ ID NO: 23253 - RNA, 21 nt, RNAi
uguaucagcuguuccgaaguu

SEQ ID NO: 23254 - RNA, 21 nt, RNAi
uuacauagucgacaaggcuuc

SEQ ID NO: 23255 - DNA, 21 bp, Homo sapiens
tatcagctgttccgaagttta

SEQ ID NO: 23256 - RNA, 21 nt, RNAi
ucagcuguuccgaaguuuauu

SEQ ID NO: 23257 - RNA, 21 nt, RNAi
uuagucgacaaggcuucaaau

SEQ ID NO: 23258 - DNA, 21 bp, Homo sapiens
tagcctatatccattcctttg

SEQ ID NO: 23259 - RNA, 21 nt, RNAi
gccuauauccauuccuuuguu

SEQ ID NO: 23260 - RNA, 21 nt, RNAi
uucggauauagguaaggaaac

SEQ ID NO: 23261 - DNA, 21 bp, Homo sapiens
tatatccattcctttggaatc

SEQ ID NO: 23262 - RNA, 21 nt, RNAi
uauccauuccuuuggaaucuu

SEQ ID NO: 23263 - RNA, 21 nt, RNAi
uuauagguaaggaaaccuuag

SEQ ID NO: 23264 - DNA, 21 bp, Homo sapiens
tatccattcctttggaatctg

SEQ ID NO: 23265 - RNA, 21 nt, RNAi
uccauuccuuuggaaucuguu

SEQ ID NO: 23266 - RNA, 21 nt, RNAi
uuagguaaggaaaccuuagac

SEQ ID NO: 23267 - DNA, 21 bp, Homo sapiens
tattaaaccgcagaacctctt

SEQ ID NO: 23268 - RNA, 21 nt, RNAi
uuaaaccgcagaaccucuuuu

SEQ ID NO: 23269 - RNA, 21 nt, RNAi
uuaauuuggcgucuuggagaa

SEQ ID NO: 23270 - DNA, 21 bp, Homo sapiens
taaaccgcagaacctcttgtt

SEQ ID NO: 23271 - RNA, 21 nt, RNAi
aaccgcagaaccucuuguuuu

SEQ ID NO: 23272 - RNA, 21 nt, RNAi
uuuuggcgucuuggagaacaa

SEQ ID NO: 23273 - DNA, 21 bp, Homo sapiens
tatatctgttctcggtactat

SEQ ID NO: 23274 - RNA, 21 nt, RNAi
uaucuguucucgguacuauuu

SEQ ID NO: 23275 - RNA, 21 nt, RNAi
uuauagacaagagccaugaua

SEQ ID NO: 23276 - DNA, 21 bp, Homo sapiens
tatctgttctcggtactatag

SEQ ID NO: 23277 - RNA, 21 nt, RNAi
ucuguucucgguacuauaguu

SEQ ID NO: 23278 - RNA, 21 nt, RNAi
uuagacaagagccaugauauc

SEQ ID NO: 23279 - DNA, 21 bp, Homo sapiens
tacctctagtatagatgtatg

SEQ ID NO: 23280 - RNA, 21 nt, RNAi
ccucuaguauagauguauguu

SEQ ID NO: 23281 - RNA, 21 nt, RNAi
uuggagaucauaucuacauac

SEQ ID NO: 23282 - DNA, 21 bp, Homo sapiens
tagtatagatgtatggtctgc

SEQ ID NO: 23283 - RNA, 21 nt, RNAi
guauagauguauggucugcuu

SEQ ID NO: 23284 - RNA, 21 nt, RNAi
uucauaucuacauaccagacg

SEQ ID NO: 23285 - DNA, 21 bp, Homo sapiens
tatagatgtatggtctgctgg

SEQ ID NO: 23286 - RNA, 21 nt, RNAi
uagauguauggucugcugguu

SEQ ID NO: 23287 - RNA, 21 nt, RNAi
uuaucuacauaccagacgacc

SEQ ID NO: 23288 - DNA, 21 bp, Homo sapiens
tagatgtatggtctgctggct

SEQ ID NO: 23289 - RNA, 21 nt, RNAi
gauguauggucugcuggcuuu

SEQ ID NO: 23290 - RNA, 21 nt, RNAi
uucuacauaccagacgaccga

SEQ ID NO: 23291 - DNA, 21 bp, Homo sapiens
tatggtctgctggctgtgtgt

SEQ ID NO: 23292 - RNA, 21 nt, RNAi
uggucugcuggcuguguguuu

SEQ ID NO: 23293 - RNA, 21 nt, RNAi
uuaccagacgaccgacacaca

SEQ ID NO: 23294 - DNA, 21 bp, Homo sapiens
tactaggacaaccaatatttc

SEQ ID NO: 23295 - RNA, 21 nt, RNAi
cuaggacaaccaauauuucuu

SEQ ID NO: 23296 - RNA, 21 nt, RNAi
uugauccuguugguuauaaag

SEQ ID NO: 23297 - DNA, 21 bp, Homo sapiens
taggacaaccaatatttccag

SEQ ID NO: 23298 - RNA, 21 nt, RNAi
ggacaaccaauauuuccaguu

SEQ ID NO: 23299 - RNA, 21 nt, RNAi
uuccuguugguuauaaagguc

SEQ ID NO: 23300 - DNA, 21 bp, Homo sapiens
tagtggtgtggatcagttggt

SEQ ID NO: 23301 - RNA, 21 nt, RNAi
gugguguggaucaguugguuu

SEQ ID NO: 23302 - RNA, 21 nt, RNAi
uucaccacaccuagucaacca

SEQ ID NO: 23303 - DNA, 21 bp, Homo sapiens
tagaaataatcaaggtcctgg

SEQ ID NO: 23304 - RNA, 21 nt, RNAi
gaaauaaucaagguccugguu

SEQ ID NO: 23305 - RNA, 21 nt, RNAi
uucuuuauuaguuccaggacc

SEQ ID NO: 23306 - DNA, 21 bp, Homo sapiens
taaggcacatccttggactaa

SEQ ID NO: 23307 - RNA, 21 nt, RNAi
aggcacauccuuggacuaauu

SEQ ID NO: 23308 - RNA, 21 nt, RNAi
uuuccguguaggaaccugauu

SEQ ID NO: 23309 - DNA, 21 bp, Homo sapiens
taaggattcgtcaggaacagg

SEQ ID NO: 23310 - RNA, 21 nt, RNAi
aggauucgucaggaacagguu

SEQ ID NO: 23311 - RNA, 21 nt, RNAi
uuuccuaagcaguccuugucc

SEQ ID NO: 23312 - DNA, 21 bp, Homo sapiens
tagccgtctgctggagtatac

SEQ ID NO: 23313 - RNA, 21 nt, RNAi
gccgucugcuggaguauacuu

SEQ ID NO: 23314 - RNA, 21 nt, RNAi
uucggcagacgaccucauaug

SEQ ID NO: 23315 - DNA, 21 bp, Homo sapiens
taacaccactggaagcttgtg

SEQ ID NO: 23316 - RNA, 21 nt, RNAi
acaccacuggaagcuuguguu

SEQ ID NO: 23317 - RNA, 21 nt, RNAi
uuuguggugaccuucgaacac

SEQ ID NO: 23318 - DNA, 21 bp, Homo sapiens
taatccacctctggctaccat

SEQ ID NO: 23319 - RNA, 21 nt, RNAi
auccaccucuggcuaccauuu

SEQ ID NO: 23320 - RNA, 21 nt, RNAi
uuuagguggagaccgauggua

SEQ ID NO: 23321 - DNA, 21 bp, Homo sapiens
taccatccttattcctcctca

SEQ ID NO: 23322 - RNA, 21 nt, RNAi
ccauccuuauuccuccucauu

SEQ ID NO: 23323 - RNA, 21 nt, RNAi
uugguaggaauaaggaggagu

SEQ ID NO: 23324 - DNA, 21 bp, Homo sapiens
tattcctcctcatgctcggat

SEQ ID NO: 23325 - RNA, 21 nt, RNAi
uuccuccucaugcucggauuu

SEQ ID NO: 23326 - RNA, 21 nt, RNAi
uuaaggaggaguacgagccua

SEQ ID NO: 23327 - DNA, 21 bp, Homo sapiens
taatactggagaccgtggaca

SEQ ID NO: 23328 - RNA, 21 nt, RNAi
auacuggagaccguggacauu

SEQ ID NO: 23329 - RNA, 21 nt, RNAi
uuuaugaccucuggcaccugu

SEQ ID NO: 23330 - DNA, 21 bp, Homo sapiens
tactggagaccgtggacagac

SEQ ID NO: 23331 - RNA, 21 nt, RNAi
cuggagaccguggacagacuu

SEQ ID NO: 23332 - RNA, 21 nt, RNAi
uugaccucuggcaccugucug

SEQ ID NO: 23333 - DNA, 21 bp, Homo sapiens
taatgctgcttctgcatcagc

SEQ ID NO: 23334 - RNA, 21 nt, RNAi
augcugcuucugcaucagcuu

SEQ ID NO: 23335 - RNA, 21 nt, RNAi
uuuacgacgaagacguagucg

SEQ ID NO: 23336 - DNA, 21 bp, Homo sapiens
tacttgagtgtcactcagcaa

SEQ ID NO: 23337 - RNA, 21 nt, RNAi
cuugagugucacucagcaauu

SEQ ID NO: 23338 - RNA, 21 nt, RNAi
uugaacucacagugagucguu

SEQ ID NO: 23339 - DNA, 21 bp, Homo sapiens
aactggtcgccatcaagaaag

SEQ ID NO: 23340 - RNA, 21 nt, RNAi
cuggucgccaucaagaaaguu

SEQ ID NO: 23341 - RNA, 21 nt, RNAi
uugaccagcgguaguucuuuc

SEQ ID NO: 23342 - DNA, 21 bp, Homo sapiens
aagaaagtattgcaggacaag

SEQ ID NO: 23343 - RNA, 21 nt, RNAi
gaaaguauugcaggacaaguu

SEQ ID NO: 23344 - RNA, 21 nt, RNAi
uucuuucauaacguccuguuc

SEQ ID NO: 23345 - DNA, 21 bp, Homo sapiens
aagagatttaagaatcgagag

SEQ ID NO: 23346 - RNA, 21 nt, RNAi
gagauuuaagaaucgagaguu

SEQ ID NO: 23347 - RNA, 21 nt, RNAi
uucucuaaauucuuagcucuc

SEQ ID NO: 23348 - DNA, 21 bp, Homo sapiens
aagaatcgagagctccagatc

SEQ ID NO: 23349 - RNA, 21 nt, RNAi
gaaucgagagcuccagaucuu

SEQ ID NO: 23350 - RNA, 21 nt, RNAi
uucuuagcucucgaggucuag

SEQ ID NO: 23351 - DNA, 21 bp, Homo sapiens
aatcgagagctccagatcatg

SEQ ID NO: 23352 - RNA, 21 nt, RNAi
ucgagagcuccagaucauguu

SEQ ID NO: 23353 - RNA, 21 nt, RNAi
uuagcucucgaggucuaguac

SEQ ID NO: 23354 - DNA, 21 bp, Homo sapiens
aaagctagatcactgtaacat

SEQ ID NO: 23355 - RNA, 21 nt, RNAi
agcuagaucacuguaacauuu

SEQ ID NO: 23356 - RNA, 21 nt, RNAi
uuucgaucuagugacauugua

SEQ ID NO: 23357 - DNA, 21 bp, Homo sapiens
aagctagatcactgtaacata

SEQ ID NO: 23358 - RNA, 21 nt, RNAi
gcuagaucacuguaacauauu

SEQ ID NO: 23359 - RNA, 21 nt, RNAi
uucgaucuagugacauuguau

SEQ ID NO: 23360 - DNA, 21 bp, Homo sapiens
aacatagtccgattgcgttat

SEQ ID NO: 23361 - RNA, 21 nt, RNAi
cauaguccgauugcguuauuu

SEQ ID NO: 23362 - RNA, 21 nt, RNAi
uuguaucaggcuaacgcaaua

SEQ ID NO: 23363 - DNA, 21 bp, Homo sapiens
aagatgaggtctatcttaatc

SEQ ID NO: 23364 - RNA, 21 nt, RNAi
gaugaggucuaucuuaaucuu

SEQ ID NO: 23365 - RNA, 21 nt, RNAi
uucuacuccagauagaauuag

SEQ ID NO: 23366 - DNA, 21 bp, Homo sapiens
aatctggtgctggactatgtt

SEQ ID NO: 23367 - RNA, 21 nt, RNAi
ucuggugcuggacuauguuuu

SEQ ID NO: 23368 - RNA, 21 nt, RNAi
uuagaccacgaccugauacaa

SEQ ID NO: 23369 - DNA, 21 bp, Homo sapiens
aagtttagcctatatccattc

SEQ ID NO: 23370 - RNA, 21 nt, RNAi
guuuagccuauauccauucuu

SEQ ID NO: 23371 - RNA, 21 nt, RNAi
uucaaaucggauauagguaag

SEQ ID NO: 23372 - DNA, 21 bp, Homo sapiens
aaaccgcagaacctcttgttg

SEQ ID NO: 23373 - RNA, 21 nt, RNAi
accgcagaaccucuuguuguu

SEQ ID NO: 23374 - RNA, 21 nt, RNAi
uuuggcgucuuggagaacaac

SEQ ID NO: 23375 - DNA, 21 bp, Homo sapiens
aaggcacatccttggactaag

SEQ ID NO: 23376 - RNA, 21 nt, RNAi
ggcacauccuuggacuaaguu

SEQ ID NO: 23377 - RNA, 21 nt, RNAi
uuccguguaggaaccugauuc

SEQ ID NO: 23378 - DNA, 21 bp, Homo sapiens
aaggattcgtcaggaacagga

SEQ ID NO: 23379 - RNA, 21 nt, RNAi
ggauucgucaggaacaggauu

SEQ ID NO: 23380 - RNA, 21 nt, RNAi
uuccuaagcaguccuuguccu

SEQ ID NO: 23381 - DNA, 21 bp, Homo sapiens
aacaggacatttcacctcagg

SEQ ID NO: 23382 - RNA, 21 nt, RNAi
caggacauuucaccucagguu

SEQ ID NO: 23383 - RNA, 21 nt, RNAi
uuguccuguaaaguggagucc

SEQ ID NO: 23384 - DNA, 21 bp, Homo sapiens
aattgcactgtgtagccgtct

SEQ ID NO: 23385 - RNA, 21 nt, RNAi
uugcacuguguagccgucuuu

SEQ ID NO: 23386 - RNA, 21 nt, RNAi
uuaacgugacacaucggcaga

SEQ ID NO: 23387 - DNA, 21 bp, Homo sapiens
aaatgtcaaactaccaaatgg

SEQ ID NO: 23388 - RNA, 21 nt, RNAi
augucaaacuaccaaaugguu

SEQ ID NO: 23389 - RNA, 21 nt, RNAi
uuuacaguuugaugguuuacc

SEQ ID NO: 23390 - DNA, 21 bp, Homo sapiens
aagtaatccacctctggctac

SEQ ID NO: 23391 - RNA, 21 nt, RNAi
guaauccaccucuggcuacuu

SEQ ID NO: 23392 - RNA, 21 nt, RNAi
uucauuagguggagaccgaug

SEQ ID NO: 23393 - DNA, 21 bp, Homo sapiens
cagacaggccacaagaagtca

SEQ ID NO: 23394 - RNA, 21 nt, RNAi
gacaggccacaagaagucauu

SEQ ID NO: 23395 - RNA, 21 nt, RNAi
uucuguccgguguucuucagu

SEQ ID NO: 23396 - DNA, 21 bp, Homo sapiens
cacaagaagtcagctatacag

SEQ ID NO: 23397 - RNA, 21 nt, RNAi
caagaagucagcuauacaguu

SEQ ID NO: 23398 - RNA, 21 nt, RNAi
uuguucuucagucgauauguc

SEQ ID NO: 23399 - DNA, 21 bp, Homo sapiens
caagaagtcagctatacagac

SEQ ID NO: 23400 - RNA, 21 nt, RNAi
agaagucagcuauacagacuu

SEQ ID NO: 23401 - RNA, 21 nt, RNAi
uuucuucagucgauaugucug

SEQ ID NO: 23402 - DNA, 21 bp, Homo sapiens
cagacactaaagtgattggaa

SEQ ID NO: 23403 - RNA, 21 nt, RNAi
gacacuaaagugauuggaauu

SEQ ID NO: 23404 - RNA, 21 nt, RNAi
uucugugauuucacuaaccuu

SEQ ID NO: 23405 - DNA, 21 bp, Homo sapiens
catcaagaaagtattgcagga

SEQ ID NO: 23406 - RNA, 21 nt, RNAi
ucaagaaaguauugcaggauu

SEQ ID NO: 23407 - RNA, 21 nt, RNAi
uuaguucuuucauaacguccu

SEQ ID NO: 23408 - DNA, 21 bp, Homo sapiens
caagaaagtattgcaggacaa

SEQ ID NO: 23409 - RNA, 21 nt, RNAi
agaaaguauugcaggacaauu

SEQ ID NO: 23410 - RNA, 21 nt, RNAi
uuucuuucauaacguccuguu

SEQ ID NO: 23411 - DNA, 21 bp, Homo sapiens
catgagaaagctagatcactg

SEQ ID NO: 23412 - RNA, 21 nt, RNAi
ugagaaagcuagaucacuguu

SEQ ID NO: 23413 - RNA, 21 nt, RNAi
uuacucuuucgaucuagugac

SEQ ID NO: 23414 - DNA, 21 bp, Homo sapiens
cactgtaacatagtccgattg

SEQ ID NO: 23415 - RNA, 21 nt, RNAi
cuguaacauaguccgauuguu

SEQ ID NO: 23416 - RNA, 21 nt, RNAi
uugacauuguaucaggcuaac

SEQ ID NO: 23417 - DNA, 21 bp, Homo sapiens
catagtccgattgcgttattt

SEQ ID NO: 23418 - RNA, 21 nt, RNAi
uaguccgauugcguuauuuuu

SEQ ID NO: 23419 - RNA, 21 nt, RNAi
uuaucaggcuaacgcaauaaa

SEQ ID NO: 23420 - DNA, 21 bp, Homo sapiens
cagtatacagagttgccagac

SEQ ID NO: 23421 - RNA, 21 nt, RNAi
guauacagaguugccagacuu

SEQ ID NO: 23422 - RNA, 21 nt, RNAi
uucauaugucucaacggucug

SEQ ID NO: 23423 - DNA, 21 bp, Homo sapiens
cagacactatagtcgagccaa

SEQ ID NO: 23424 - RNA, 21 nt, RNAi
gacacuauagucgagccaauu

SEQ ID NO: 23425 - RNA, 21 nt, RNAi
uucugugauaucagcucgguu

SEQ ID NO: 23426 - DNA, 21 bp, Homo sapiens
cactatagtcgagccaaacag

SEQ ID NO: 23427 - RNA, 21 nt, RNAi
cuauagucgagccaaacaguu

SEQ ID NO: 23428 - RNA, 21 nt, RNAi
uugauaucagcucgguuuguc

SEQ ID NO: 23429 - DNA, 21 bp, Homo sapiens
caggacatttcacctcaggag

SEQ ID NO: 23430 - RNA, 21 nt, RNAi
ggacauuucaccucaggaguu

SEQ ID NO: 23431 - RNA, 21 nt, RNAi
uuccuguaaaguggaguccuc

SEQ ID NO: 23432 - DNA, 21 bp, Homo sapiens
caattgcactgtgtagccgtc

SEQ ID NO: 23433 - RNA, 21 nt, RNAi
auugcacuguguagccgucuu

SEQ ID NO: 23434 - RNA, 21 nt, RNAi
uuuaacgugacacaucggcag

SEQ ID NO: 23435 - DNA, 21 bp, Homo sapiens
cacacctgcactcttcaactt

SEQ ID NO: 23436 - RNA, 21 nt, RNAi
caccugcacucuucaacuuuu

SEQ ID NO: 23437 - RNA, 21 nt, RNAi
uuguggacgugagaaguugaa

SEQ ID NO: 23438 - DNA, 21 bp, Homo sapiens
caccactcaagaactgtcaag

SEQ ID NO: 23439 - RNA, 21 nt, RNAi
ccacucaagaacugucaaguu

SEQ ID NO: 23440 - RNA, 21 nt, RNAi
uuggugaguucuugacaguuc

SEQ ID NO: 23441 - DNA, 21 bp, Homo sapiens
cactcaagaactgtcaagtaa

SEQ ID NO: 23442 - RNA, 21 nt, RNAi
cucaagaacugucaaguaauu

SEQ ID NO: 23443 - RNA, 21 nt, RNAi
uugaguucuugacaguucauu

SEQ ID NO: 23444 - DNA, 21 bp, Homo sapiens
caagtaatccacctctggcta

SEQ ID NO: 23445 - RNA, 21 nt, RNAi
aguaauccaccucuggcuauu

SEQ ID NO: 23446 - RNA, 21 nt, RNAi
uuucauuagguggagaccgau

SEQ ID NO: 23447 - DNA, 21 bp, Homo sapiens
cacctctggctaccatcctta

SEQ ID NO: 23448 - RNA, 21 nt, RNAi
ccucuggcuaccauccuuauu

SEQ ID NO: 23449 - RNA, 21 nt, RNAi
uuggagaccgaugguaggaau

SEQ ID NO: 23450 - DNA, 21 bp, Homo sapiens
gaactggtcgccatcaagaaa

SEQ ID NO: 23451 - RNA, 21 nt, RNAi
acuggucgccaucaagaaauu

SEQ ID NO: 23452 - RNA, 21 nt, RNAi
uuugaccagcgguaguucuuu

SEQ ID NO: 23453 - DNA, 21 bp, Homo sapiens
gagatttaagaatcgagagct

SEQ ID NO: 23454 - RNA, 21 nt, RNAi
gauuuaagaaucgagagcuuu

SEQ ID NO: 23455 - RNA, 21 nt, RNAi
uucuaaauucuuagcucucga

SEQ ID NO: 23456 - DNA, 21 bp, Homo sapiens
gatttaagaatcgagagctcc

SEQ ID NO: 23457 - RNA, 21 nt, RNAi
uuuaagaaucgagagcuccuu

SEQ ID NO: 23458 - RNA, 21 nt, RNAi
uuaaauucuuagcucucgagg

SEQ ID NO: 23459 - DNA, 21 bp, Homo sapiens
gaatcgagagctccagatcat

SEQ ID NO: 23460 - RNA, 21 nt, RNAi
aucgagagcuccagaucauuu

SEQ ID NO: 23461 - RNA, 21 nt, RNAi
uuuagcucucgaggucuagua

SEQ ID NO: 23462 - DNA, 21 bp, Homo sapiens
gagaaagctagatcactgtaa

SEQ ID NO: 23463 - RNA, 21 nt, RNAi
gaaagcuagaucacuguaauu

SEQ ID NO: 23464 - RNA, 21 nt, RNAi
uucuuucgaucuagugacauu

SEQ ID NO: 23465 - DNA, 21 bp, Homo sapiens
gaaagctagatcactgtaaca

SEQ ID NO: 23466 - RNA, 21 nt, RNAi
aagcuagaucacuguaacauu

SEQ ID NO: 23467 - RNA, 21 nt, RNAi
uuuucgaucuagugacauugu

SEQ ID NO: 23468 - DNA, 21 bp, Homo sapiens
gaagaaagatgaggtctatct

SEQ ID NO: 23469 - RNA, 21 nt, RNAi
agaaagaugaggucuaucuuu

SEQ ID NO: 23470 - RNA, 21 nt, RNAi
uuucuuucuacuccagauaga

SEQ ID NO: 23471 - DNA, 21 bp, Homo sapiens
gatgaggtctatcttaatctg

SEQ ID NO: 23472 - RNA, 21 nt, RNAi
ugaggucuaucuuaaucuguu

SEQ ID NO: 23473 - RNA, 21 nt, RNAi
uuacuccagauagaauuagac

SEQ ID NO: 23474 - DNA, 21 bp, Homo sapiens
gacactatagtcgagccaaac

SEQ ID NO: 23475 - RNA, 21 nt, RNAi
cacuauagucgagccaaacuu

SEQ ID NO: 23476 - RNA, 21 nt, RNAi
uugugauaucagcucgguuug

SEQ ID NO: 23477 - DNA, 21 bp, Homo sapiens
gatattaaaccgcagaacctc

SEQ ID NO: 23478 - RNA, 21 nt, RNAi
uauuaaaccgcagaaccucuu

SEQ ID NO: 23479 - RNA, 21 nt, RNAi
uuauaauuuggcgucuuggag

SEQ ID NO: 23480 - DNA, 21 bp, Homo sapiens
gagccactgattatacctcta

SEQ ID NO: 23481 - RNA, 21 nt, RNAi
gccacugauuauaccucuauu

SEQ ID NO: 23482 - RNA, 21 nt, RNAi
uucggugacuaauauggagau

SEQ ID NO: 23483 - DNA, 21 bp, Homo sapiens
gagctgttactaggacaacca

SEQ ID NO: 23484 - RNA, 21 nt, RNAi
gcuguuacuaggacaaccauu

SEQ ID NO: 23485 - RNA, 21 nt, RNAi
uucgacaaugauccuguuggu

SEQ ID NO: 23486 - DNA, 21 bp, Homo sapiens
gactaaggattcgtcaggaac

SEQ ID NO: 23487 - RNA, 21 nt, RNAi
cuaaggauucgucaggaacuu

SEQ ID NO: 23488 - RNA, 21 nt, RNAi
uugauuccuaagcaguccuug

SEQ ID NO: 23489 - DNA, 21 bp, Homo sapiens
gacatttcacctcaggagtgc

SEQ ID NO: 23490 - RNA, 21 nt, RNAi
cauuucaccucaggagugcuu

SEQ ID NO: 23491 - RNA, 21 nt, RNAi
uuguaaaguggaguccucacg

SEQ ID NO: 23492 - DNA, 21 bp, Homo sapiens
gaggcaattgcactgtgtagc

SEQ ID NO: 23493 - RNA, 21 nt, RNAi
ggcaauugcacuguguagcuu

SEQ ID NO: 23494 - RNA, 21 nt, RNAi
uuccguuaacgugacacaucg

SEQ ID NO: 23495 - DNA, 21 bp, Homo sapiens
gactaacaccactggaagctt

SEQ ID NO: 23496 - RNA, 21 nt, RNAi
cuaacaccacuggaagcuuuu

SEQ ID NO: 23497 - RNA, 21 nt, RNAi
uugauuguggugaccuucgaa

SEQ ID NO: 23498 - DNA, 21 bp, Homo sapiens
tacagacactaaagtgattgg

SEQ ID NO: 23499 - RNA, 21 nt, RNAi
cagacacuaaagugauugguu

SEQ ID NO: 23500 - RNA, 21 nt, RNAi
uugucugugauuucacuaacc

SEQ ID NO: 23501 - DNA, 21 bp, Homo sapiens
taagaatcgagagctccagat

SEQ ID NO: 23502 - RNA, 21 nt, RNAi
agaaucgagagcuccagauuu

SEQ ID NO: 23503 - RNA, 21 nt, RNAi
uuucuuagcucucgaggucua

SEQ ID NO: 23504 - DNA, 21 bp, Homo sapiens
taacatagtccgattgcgtta

SEQ ID NO: 23505 - RNA, 21 nt, RNAi
acauaguccgauugcguuauu

SEQ ID NO: 23506 - RNA, 21 nt, RNAi
uuuguaucaggcuaacgcaau

SEQ ID NO: 23507 - DNA, 21 bp, Homo sapiens
tagtccgattgcgttatttct

SEQ ID NO: 23508 - RNA, 21 nt, RNAi
guccgauugcguuauuucuuu

SEQ ID NO: 23509 - RNA, 21 nt, RNAi
uucaggcuaacgcaauaaaga

SEQ ID NO: 23510 - DNA, 21 bp, Homo sapiens
tatagtcgagccaaacagacg

SEQ ID NO: 23511 - RNA, 21 nt, RNAi
uagucgagccaaacagacguu

SEQ ID NO: 23512 - RNA, 21 nt, RNAi
uuaucagcucgguuugucugc

SEQ ID NO: 23513 - DNA, 21 bp, Homo sapiens
tatgtatcagctgttccgaag

SEQ ID NO: 23514 - RNA, 21 nt, RNAi
uguaucagcuguuccgaaguu

SEQ ID NO: 23515 - RNA, 21 nt, RNAi
uuacauagucgacaaggcuuc

SEQ ID NO: 23516 - DNA, 21 bp, Homo sapiens
tattaaaccgcagaacctctt

SEQ ID NO: 23517 - RNA, 21 nt, RNAi
uuaaaccgcagaaccucuuuu

SEQ ID NO: 23518 - RNA, 21 nt, RNAi
uuaauuuggcgucuuggagaa

SEQ ID NO: 23519 - DNA, 21 bp, Homo sapiens
taaaccgcagaacctcttgtt

SEQ ID NO: 23520 - RNA, 21 nt, RNAi
aaccgcagaaccucuuguuuu

SEQ ID NO: 23521 - RNA, 21 nt, RNAi
uuuuggcgucuuggagaacaa

SEQ ID NO: 23522 - DNA, 21 bp, Homo sapiens
tatatctgttctcggtactat

SEQ ID NO: 23523 - RNA, 21 nt, RNAi
uaucuguucucgguacuauuu

SEQ ID NO: 23524 - RNA, 21 nt, RNAi
uuauagacaagagccaugaua

SEQ ID NO: 23525 - DNA, 21 bp, Homo sapiens
tatctgttctcggtactatag

SEQ ID NO: 23526 - RNA, 21 nt, RNAi
ucuguucucgguacuauaguu

SEQ ID NO: 23527 - RNA, 21 nt, RNAi
uuagacaagagccaugauauc

SEQ ID NO: 23528 - DNA, 21 bp, Homo sapiens
tactaggacaaccaatatttc

SEQ ID NO: 23529 - RNA, 21 nt, RNAi
cuaggacaaccaauauuucuu

SEQ ID NO: 23530 - RNA, 21 nt, RNAi
uugauccuguugguuauaaag

SEQ ID NO: 23531 - DNA, 21 bp, Homo sapiens
taaggattcgtcaggaacagg

SEQ ID NO: 23532 - RNA, 21 nt, RNAi
aggauucgucaggaacagguu

SEQ ID NO: 23533 - RNA, 21 nt, RNAi
uuuccuaagcaguccuugucc

SEQ ID NO: 23534 - DNA, 21 bp, Homo sapiens
aagttgccatcctcagcctcc

SEQ ID NO: 23535 - RNA, 21 nt, RNAi
guugccauccucagccuccuu

SEQ ID NO: 23536 - RNA, 21 nt, RNAi
uucaacgguaggagucggagg

SEQ ID NO: 23537 - DNA, 21 bp, Homo sapiens
aacttctcggaggagctcaag

SEQ ID NO: 23538 - RNA, 21 nt, RNAi
cuucucggaggagcucaaguu

SEQ ID NO: 23539 - RNA, 21 nt, RNAi
uugaagagccuccucgaguuc

SEQ ID NO: 23540 - DNA, 21 bp, Homo sapiens
aacacggtgtatgctgtgaag

SEQ ID NO: 23541 - RNA, 21 nt, RNAi
cacgguguaugcugugaaguu

SEQ ID NO: 23542 - RNA, 21 nt, RNAi
uugugccacauacgacacuuc

SEQ ID NO: 23543 - DNA, 21 bp, Homo sapiens
aagaggctgaaggagaacgct

SEQ ID NO: 23544 - RNA, 21 nt, RNAi
gaggcugaaggagaacgcuuu

SEQ ID NO: 23545 - RNA, 21 nt, RNAi
uucuccgacuuccucuugcga

SEQ ID NO: 23546 - DNA, 21 bp, Homo sapiens
aaggagaacgctgacctggag

SEQ ID NO: 23547 - RNA, 21 nt, RNAi
ggagaacgcugaccuggaguu

SEQ ID NO: 23548 - RNA, 21 nt, RNAi
uuccucuugcgacuggaccuc

SEQ ID NO: 23549 - DNA, 21 bp, Homo sapiens
aacgctgacctggagtggact

SEQ ID NO: 23550 - RNA, 21 nt, RNAi
cgcugaccuggaguggacuuu

SEQ ID NO: 23551 - RNA, 21 nt, RNAi
uugcgacuggaccucaccuga

SEQ ID NO: 23552 - DNA, 21 bp, Homo sapiens
aagcagagcttcctgaccgag

SEQ ID NO: 23553 - RNA, 21 nt, RNAi
gcagagcuuccugaccgaguu

SEQ ID NO: 23554 - RNA, 21 nt, RNAi
uucgucucgaaggacuggcuc

SEQ ID NO: 23555 - DNA, 21 bp, Homo sapiens
aaacattgtggactttgctgg

SEQ ID NO: 23556 - RNA, 21 nt, RNAi
acauuguggacuuugcugguu

SEQ ID NO: 23557 - RNA, 21 nt, RNAi
uuuguaacaccugaaacgacc

SEQ ID NO: 23558 - DNA, 21 bp, Homo sapiens
aacattgtggactttgctggc

SEQ ID NO: 23559 - RNA, 21 nt, RNAi
cauuguggacuuugcuggcuu

SEQ ID NO: 23560 - RNA, 21 nt, RNAi
uuguaacaccugaaacgaccg

SEQ ID NO: 23561 - DNA, 21 bp, Homo sapiens
aacggcttctactgcctggtg

SEQ ID NO: 23562 - RNA, 21 nt, RNAi
cggcuucuacugccugguguu

SEQ ID NO: 23563 - RNA, 21 nt, RNAi
uugccgaagaugacggaccac

SEQ ID NO: 23564 - DNA, 21 bp, Homo sapiens
aattcagtttctacatcagga

SEQ ID NO: 23565 - RNA, 21 nt, RNAi
uucaguuucuacaucaggauu

SEQ ID NO: 23566 - RNA, 21 nt, RNAi
uuaagucaaagauguaguccu

SEQ ID NO: 23567 - DNA, 21 bp, Homo sapiens
aagagttccaacgtccttctg

SEQ ID NO: 23568 - RNA, 21 nt, RNAi
gaguuccaacguccuucuguu

SEQ ID NO: 23569 - RNA, 21 nt, RNAi
uucucaagguugcaggaagac

SEQ ID NO: 23570 - DNA, 21 bp, Homo sapiens
aacgtccttctggatgagagg

SEQ ID NO: 23571 - RNA, 21 nt, RNAi
cguccuucuggaugagagguu

SEQ ID NO: 23572 - RNA, 21 nt, RNAi
uugcaggaagaccuacucucc

SEQ ID NO: 23573 - DNA, 21 bp, Homo sapiens
aaggctggctgtggacacgga

SEQ ID NO: 23574 - RNA, 21 nt, RNAi
ggcuggcuguggacacggauu

SEQ ID NO: 23575 - RNA, 21 nt, RNAi
uuccgaccgacaccugugccu

SEQ ID NO: 23576 - DNA, 21 bp, Homo sapiens
aagtatctgaaagacctggtg

SEQ ID NO: 23577 - RNA, 21 nt, RNAi
guaucugaaagaccugguguu

SEQ ID NO: 23578 - RNA, 21 nt, RNAi
uucauagacuuucuggaccac

SEQ ID NO: 23579 - DNA, 21 bp, Homo sapiens
aaagacctggtggaagaggag

SEQ ID NO: 23580 - RNA, 21 nt, RNAi
agaccugguggaagaggaguu

SEQ ID NO: 23581 - RNA, 21 nt, RNAi
uuucuggaccaccuucuccuc

SEQ ID NO: 23582 - DNA, 21 bp, Homo sapiens
aagacctggtggaagaggagg

SEQ ID NO: 23583 - RNA, 21 nt, RNAi
gaccugguggaagaggagguu

SEQ ID NO: 23584 - RNA, 21 nt, RNAi
uucuggaccaccuucuccucc

SEQ ID NO: 23585 - DNA, 21 bp, Homo sapiens
aagaggaggctgaggaggctg

SEQ ID NO: 23586 - RNA, 21 nt, RNAi
gaggaggcugaggaggcuguu

SEQ ID NO: 23587 - RNA, 21 nt, RNAi
uucuccuccgacuccuccgac

SEQ ID NO: 23588 - DNA, 21 bp, Homo sapiens
aagcaggtctggctgcagatg

SEQ ID NO: 23589 - RNA, 21 nt, RNAi
gcaggucuggcugcagauguu

SEQ ID NO: 23590 - RNA, 21 nt, RNAi
uucguccagaccgacgucuac

SEQ ID NO: 23591 - DNA, 21 bp, Homo sapiens
aactcctacgtgtccagcact

SEQ ID NO: 23592 - RNA, 21 nt, RNAi
cuccuacguguccagcacuuu

SEQ ID NO: 23593 - RNA, 21 nt, RNAi
uugaggaugcacaggucguga

SEQ ID NO: 23594 - DNA, 21 bp, Homo sapiens
aagatggtccagaagctggcc

SEQ ID NO: 23595 - RNA, 21 nt, RNAi
gaugguccagaagcuggccuu

SEQ ID NO: 23596 - RNA, 21 nt, RNAi
uucuaccaggucuucgaccgg

SEQ ID NO: 23597 - DNA, 21 bp, Homo sapiens
aaagtgatgaatttcagagct

SEQ ID NO: 23598 - RNA, 21 nt, RNAi
agugaugaauuucagagcuuu

SEQ ID NO: 23599 - RNA, 21 nt, RNAi
uuucacuacuuaaagucucga

SEQ ID NO: 23600 - DNA, 21 bp, Homo sapiens
aagtgatgaatttcagagctg

SEQ ID NO: 23601 - RNA, 21 nt, RNAi
gugaugaauuucagagcuguu

SEQ ID NO: 23602 - RNA, 21 nt, RNAi
uucacuacuuaaagucucgac

SEQ ID NO: 23603 - DNA, 21 bp, Homo sapiens
aatttcagagctgatgtgttc

SEQ ID NO: 23604 - RNA, 21 nt, RNAi
uuucagagcugauguguucuu

SEQ ID NO: 23605 - RNA, 21 nt, RNAi
uuaaagucucgacuacacaag

SEQ ID NO: 23606 - DNA, 21 bp, Homo sapiens
aaatccggaagtcaaagttct

SEQ ID NO: 23607 - RNA, 21 nt, RNAi
auccggaagucaaaguucuuu

SEQ ID NO: 23608 - RNA, 21 nt, RNAi
uuuaggccuucaguuucaaga

SEQ ID NO: 23609 - DNA, 21 bp, Homo sapiens
aatccggaagtcaaagttctc

SEQ ID NO: 23610 - RNA, 21 nt, RNAi
uccggaagucaaaguucucuu

SEQ ID NO: 23611 - RNA, 21 nt, RNAi
uuaggccuucaguuucaagag

SEQ ID NO: 23612 - DNA, 21 bp, Homo sapiens
aagtcaaagttctcatggtca

SEQ ID NO: 23613 - RNA, 21 nt, RNAi
gucaaaguucucauggucauu

SEQ ID NO: 23614 - RNA, 21 nt, RNAi
uucaguuucaagaguaccagu

SEQ ID NO: 23615 - DNA, 21 bp, Homo sapiens
aaagttctcatggtcagaagt

SEQ ID NO: 23616 - RNA, 21 nt, RNAi
aguucucauggucagaaguuu

SEQ ID NO: 23617 - RNA, 21 nt, RNAi
uuucaagaguaccagucuuca

SEQ ID NO: 23618 - DNA, 21 bp, Homo sapiens
aagttctcatggtcagaagtt

SEQ ID NO: 23619 - RNA, 21 nt, RNAi
guucucauggucagaaguuuu

SEQ ID NO: 23620 - RNA, 21 nt, RNAi
uucaagaguaccagucuucaa

SEQ ID NO: 23621 - DNA, 21 bp, Homo sapiens
aagttctcatggtgcacgagt

SEQ ID NO: 23622 - RNA, 21 nt, RNAi
guucucauggugcacgaguuu

SEQ ID NO: 23623 - RNA, 21 nt, RNAi
uucaagaguaccacgugcuca

SEQ ID NO: 23624 - DNA, 21 bp, Homo sapiens
aaggaaggctggcatcatcca

SEQ ID NO: 23625 - RNA, 21 nt, RNAi
ggaaggcuggcaucauccauu

SEQ ID NO: 23626 - RNA, 21 nt, RNAi
uuccuuccgaccguaguaggu

SEQ ID NO: 23627 - DNA, 21 bp, Homo sapiens
aaggctggcatcatccagtga

SEQ ID NO: 23628 - RNA, 21 nt, RNAi
ggcuggcaucauccagugauu

SEQ ID NO: 23629 - RNA, 21 nt, RNAi
uuccgaccguaguaggucacu

SEQ ID NO: 23630 - DNA, 21 bp, Homo sapiens
aaggcaggaggatcgctggag

SEQ ID NO: 23631 - RNA, 21 nt, RNAi
ggcaggaggaucgcuggaguu

SEQ ID NO: 23632 - RNA, 21 nt, RNAi
uuccguccuccuagcgaccuc

SEQ ID NO: 23633 - DNA, 21 bp, Homo sapiens
aaactattagcctggcgtggt

SEQ ID NO: 23634 - RNA, 21 nt, RNAi
acuauuagccuggcgugguuu

SEQ ID NO: 23635 - RNA, 21 nt, RNAi
uuugauaaucggaccgcacca

SEQ ID NO: 23636 - DNA, 21 bp, Homo sapiens
aactattagcctggcgtggta

SEQ ID NO: 23637 - RNA, 21 nt, RNAi
cuauuagccuggcgugguauu

SEQ ID NO: 23638 - RNA, 21 nt, RNAi
uugauaaucggaccgcaccau

SEQ ID NO: 23639 - DNA, 21 bp, Homo sapiens
aagtaggaggatcatttatgc

SEQ ID NO: 23640 - RNA, 21 nt, RNAi
guaggaggaucauuuaugcuu

SEQ ID NO: 23641 - RNA, 21 nt, RNAi
uucauccuccuaguaaauacg

SEQ ID NO: 23642 - DNA, 21 bp, Homo sapiens
aaagtgaagtatggctgtaag

SEQ ID NO: 23643 - RNA, 21 nt, RNAi
agugaaguauggcuguaaguu

SEQ ID NO: 23644 - RNA, 21 nt, RNAi
uuucacuucauaccgacauuc

SEQ ID NO: 23645 - DNA, 21 bp, Homo sapiens
aagtgaagtatggctgtaagt

SEQ ID NO: 23646 - RNA, 21 nt, RNAi
gugaaguauggcuguaaguuu

SEQ ID NO: 23647 - RNA, 21 nt, RNAi
uucacuucauaccgacauuca

SEQ ID NO: 23648 - DNA, 21 bp, Homo sapiens
aagtatggctgtaagtctcat

SEQ ID NO: 23649 - RNA, 21 nt, RNAi
guauggcuguaagucucauuu

SEQ ID NO: 23650 - RNA, 21 nt, RNAi
uucauaccgacauucagagua

SEQ ID NO: 23651 - DNA, 21 bp, Homo sapiens
aagtctcatggttcagtccta

SEQ ID NO: 23652 - RNA, 21 nt, RNAi
gucucaugguucaguccuauu

SEQ ID NO: 23653 - RNA, 21 nt, RNAi
uucagaguaccaagucaggau

SEQ ID NO: 23654 - DNA, 21 bp, Homo sapiens
aagaagcgagaattctgagat

SEQ ID NO: 23655 - RNA, 21 nt, RNAi
gaagcgagaauucugagauuu

SEQ ID NO: 23656 - RNA, 21 nt, RNAi
uucuucgcucuuaagacucua

SEQ ID NO: 23657 - DNA, 21 bp, Homo sapiens
aagcgagaattctgagatcct

SEQ ID NO: 23658 - RNA, 21 nt, RNAi
gcgagaauucugagauccuuu

SEQ ID NO: 23659 - RNA, 21 nt, RNAi
uucgcucuuaagacucuagga

SEQ ID NO: 23660 - DNA, 21 bp, Homo sapiens
aattctgagatcctccagaaa

SEQ ID NO: 23661 - RNA, 21 nt, RNAi
uucugagauccuccagaaauu

SEQ ID NO: 23662 - RNA, 21 nt, RNAi
uuaagacucuaggaggucuuu

SEQ ID NO: 23663 - DNA, 21 bp, Homo sapiens
aatgtggtggcctgcaagcca

SEQ ID NO: 23664 - RNA, 21 nt, RNAi
ugugguggccugcaagccauu

SEQ ID NO: 23665 - RNA, 21 nt, RNAi
uuacaccaccggacguucggu

SEQ ID NO: 23666 - DNA, 21 bp, Homo sapiens
aaagacatgtatcacatgtct

SEQ ID NO: 23667 - RNA, 21 nt, RNAi
agacauguaucacaugucuuu

SEQ ID NO: 23668 - RNA, 21 nt, RNAi
uuucuguacauaguguacaga

SEQ ID NO: 23669 - DNA, 21 bp, Homo sapiens
aagacatgtatcacatgtctt

SEQ ID NO: 23670 - RNA, 21 nt, RNAi
gacauguaucacaugucuuuu

SEQ ID NO: 23671 - RNA, 21 nt, RNAi
uucuguacauaguguacagaa

SEQ ID NO: 23672 - DNA, 21 bp, Homo sapiens
aagcaagtcaggtttcatgta

SEQ ID NO: 23673 - RNA, 21 nt, RNAi
gcaagucagguuucauguauu

SEQ ID NO: 23674 - RNA, 21 nt, RNAi
uucguucaguccaaaguacau

SEQ ID NO: 23675 - DNA, 21 bp, Homo sapiens
aagtcaggtttcatgtaaccg

SEQ ID NO: 23676 - RNA, 21 nt, RNAi
gucagguuucauguaaccguu

SEQ ID NO: 23677 - RNA, 21 nt, RNAi
uucaguccaaaguacauuggc

SEQ ID NO: 23678 - DNA, 21 bp, Homo sapiens
aaccgagtgtcctcttgcgtg

SEQ ID NO: 23679 - RNA, 21 nt, RNAi
ccgaguguccucuugcguguu

SEQ ID NO: 23680 - RNA, 21 nt, RNAi
uuggcucacaggagaacgcac

SEQ ID NO: 23681 - DNA, 21 bp, Homo sapiens
cagcacttcttgtacgaggtg

SEQ ID NO: 23682 - RNA, 21 nt, RNAi
gcacuucuuguacgagguguu

SEQ ID NO: 23683 - RNA, 21 nt, RNAi
uucgugaagaacaugcuccac

SEQ ID NO: 23684 - DNA, 21 bp, Homo sapiens
cacttcttgtacgaggtgccg

SEQ ID NO: 23685 - RNA, 21 nt, RNAi
cuucuuguacgaggugccguu

SEQ ID NO: 23686 - RNA, 21 nt, RNAi
uugaagaacaugcuccacggc

SEQ ID NO: 23687 - DNA, 21 bp, Homo sapiens
catgtgccgcttctacaaagt

SEQ ID NO: 23688 - RNA, 21 nt, RNAi
ugugccgcuucuacaaaguuu

SEQ ID NO: 23689 - RNA, 21 nt, RNAi
uuacacggcgaagauguuuca

SEQ ID NO: 23690 - DNA, 21 bp, Homo sapiens
cacatcctcacgcacctgcag

SEQ ID NO: 23691 - RNA, 21 nt, RNAi
cauccucacgcaccugcaguu

SEQ ID NO: 23692 - RNA, 21 nt, RNAi
uuguaggagugcguggacguc

SEQ ID NO: 23693 - DNA, 21 bp, Homo sapiens
catcctcacgcacctgcagct

SEQ ID NO: 23694 - RNA, 21 nt, RNAi
uccucacgcaccugcagcuuu

SEQ ID NO: 23695 - RNA, 21 nt, RNAi
uuaggagugcguggacgucga

SEQ ID NO: 23696 - DNA, 21 bp, Homo sapiens
catcctcagcctccaccttcc

SEQ ID NO: 23697 - RNA, 21 nt, RNAi
uccucagccuccaccuuccuu

SEQ ID NO: 23698 - RNA, 21 nt, RNAi
uuaggagucggagguggaagg

SEQ ID NO: 23699 - DNA, 21 bp, Homo sapiens
cacaacttctcggaggagctc

SEQ ID NO: 23700 - RNA, 21 nt, RNAi
caacuucucggaggagcucuu

SEQ ID NO: 23701 - RNA, 21 nt, RNAi
uuguugaagagccuccucgag

SEQ ID NO: 23702 - DNA, 21 bp, Homo sapiens
caacttctcggaggagctcaa

SEQ ID NO: 23703 - RNA, 21 nt, RNAi
acuucucggaggagcucaauu

SEQ ID NO: 23704 - RNA, 21 nt, RNAi
uuugaagagccuccucgaguu

SEQ ID NO: 23705 - DNA, 21 bp, Homo sapiens
cacggtgtatgctgtgaagag

SEQ ID NO: 23706 - RNA, 21 nt, RNAi
cgguguaugcugugaagaguu

SEQ ID NO: 23707 - RNA, 21 nt, RNAi
uugccacauacgacacuucuc

SEQ ID NO: 23708 - DNA, 21 bp, Homo sapiens
cagtgaagcagagcttcctga

SEQ ID NO: 23709 - RNA, 21 nt, RNAi
gugaagcagagcuuccugauu

SEQ ID NO: 23710 - RNA, 21 nt, RNAi
uucacuucgucucgaaggacu

SEQ ID NO: 23711 - DNA, 21 bp, Homo sapiens
cagagcttcctgaccgaggtg

SEQ ID NO: 23712 - RNA, 21 nt, RNAi
gagcuuccugaccgagguguu

SEQ ID NO: 23713 - RNA, 21 nt, RNAi
uucucgaaggacuggcuccac

SEQ ID NO: 23714 - DNA, 21 bp, Homo sapiens
cagctgtccaggtttcgtcac

SEQ ID NO: 23715 - RNA, 21 nt, RNAi
gcuguccagguuucgucacuu

SEQ ID NO: 23716 - RNA, 21 nt, RNAi
uucgacagguccaaagcagug

SEQ ID NO: 23717 - DNA, 21 bp, Homo sapiens
caaacattgtggactttgctg

SEQ ID NO: 23718 - RNA, 21 nt, RNAi
aacauuguggacuuugcuguu

SEQ ID NO: 23719 - RNA, 21 nt, RNAi
uuuuguaacaccugaaacgac

SEQ ID NO: 23720 - DNA, 21 bp, Homo sapiens
cattgtggactttgctggcta

SEQ ID NO: 23721 - RNA, 21 nt, RNAi
uuguggacuuugcuggcuauu

SEQ ID NO: 23722 - RNA, 21 nt, RNAi
uuaacaccugaaacgaccgau

SEQ ID NO: 23723 - DNA, 21 bp, Homo sapiens
cagaacggcttctactgcctg

SEQ ID NO: 23724 - RNA, 21 nt, RNAi
gaacggcuucuacugccuguu

SEQ ID NO: 23725 - RNA, 21 nt, RNAi
uucuugccgaagaugacggac

SEQ ID NO: 23726 - DNA, 21 bp, Homo sapiens
cagcgactggacatccttctg

SEQ ID NO: 23727 - RNA, 21 nt, RNAi
gcgacuggacauccuucuguu

SEQ ID NO: 23728 - RNA, 21 nt, RNAi
uucgcugaccuguaggaagac

SEQ ID NO: 23729 - DNA, 21 bp, Homo sapiens
caattcagtttctacatcagg

SEQ ID NO: 23730 - RNA, 21 nt, RNAi
auucaguuucuacaucagguu

SEQ ID NO: 23731 - RNA, 21 nt, RNAi
uuuaagucaaagauguagucc

SEQ ID NO: 23732 - DNA, 21 bp, Homo sapiens
cagtttctacatcaggacagc

SEQ ID NO: 23733 - RNA, 21 nt, RNAi
guuucuacaucaggacagcuu

SEQ ID NO: 23734 - RNA, 21 nt, RNAi
uucaaagauguaguccugucg

SEQ ID NO: 23735 - DNA, 21 bp, Homo sapiens
cagcctcatccatggagacat

SEQ ID NO: 23736 - RNA, 21 nt, RNAi
gccucauccauggagacauuu

SEQ ID NO: 23737 - RNA, 21 nt, RNAi
uucggaguagguaccucugua

SEQ ID NO: 23738 - DNA, 21 bp, Homo sapiens
catccatggagacatcaagag

SEQ ID NO: 23739 - RNA, 21 nt, RNAi
uccauggagacaucaagaguu

SEQ ID NO: 23740 - RNA, 21 nt, RNAi
uuagguaccucuguaguucuc

SEQ ID NO: 23741 - DNA, 21 bp, Homo sapiens
catggagacatcaagagttcc

SEQ ID NO: 23742 - RNA, 21 nt, RNAi
uggagacaucaagaguuccuu

SEQ ID NO: 23743 - RNA, 21 nt, RNAi
uuaccucuguaguucucaagg

SEQ ID NO: 23744 - DNA, 21 bp, Homo sapiens
catcaagagttccaacgtcct

SEQ ID NO: 23745 - RNA, 21 nt, RNAi
ucaagaguuccaacguccuuu

SEQ ID NO: 23746 - RNA, 21 nt, RNAi
uuaguucucaagguugcagga

SEQ ID NO: 23747 - DNA, 21 bp, Homo sapiens
caagagttccaacgtccttct

SEQ ID NO: 23748 - RNA, 21 nt, RNAi
agaguuccaacguccuucuuu

SEQ ID NO: 23749 - RNA, 21 nt, RNAi
uuucucaagguugcaggaaga

SEQ ID NO: 23750 - DNA, 21 bp, Homo sapiens
caacgtccttctggatgagag

SEQ ID NO: 23751 - RNA, 21 nt, RNAi
acguccuucuggaugagaguu

SEQ ID NO: 23752 - RNA, 21 nt, RNAi
uuugcaggaagaccuacucuc

SEQ ID NO: 23753 - DNA, 21 bp, Homo sapiens
cacggacaccttcagctttgg

SEQ ID NO: 23754 - RNA, 21 nt, RNAi
cggacaccuucagcuuugguu

SEQ ID NO: 23755 - RNA, 21 nt, RNAi
uugccuguggaagucgaaacc

SEQ ID NO: 23756 - DNA, 21 bp, Homo sapiens
cacggtgccaggaccaagtat

SEQ ID NO: 23757 - RNA, 21 nt, RNAi
cggugccaggaccaaguauuu

SEQ ID NO: 23758 - RNA, 21 nt, RNAi
uugccacgguccugguucaua

SEQ ID NO: 23759 - DNA, 21 bp, Homo sapiens
caggaccaagtatctgaaaga

SEQ ID NO: 23760 - RNA, 21 nt, RNAi
ggaccaaguaucugaaagauu

SEQ ID NO: 23761 - RNA, 21 nt, RNAi
uuccugguucauagacuuucu

SEQ ID NO: 23762 - DNA, 21 bp, Homo sapiens
caagtatctgaaagacctggt

SEQ ID NO: 23763 - RNA, 21 nt, RNAi
aguaucugaaagaccugguuu

SEQ ID NO: 23764 - RNA, 21 nt, RNAi
uuucauagacuuucuggacca

SEQ ID NO: 23765 - DNA, 21 bp, Homo sapiens
cagagcacactgcaagcaggt

SEQ ID NO: 23766 - RNA, 21 nt, RNAi
gagcacacugcaagcagguuu

SEQ ID NO: 23767 - RNA, 21 nt, RNAi
uucucgugugacguucgucca

SEQ ID NO: 23768 - DNA, 21 bp, Homo sapiens
cacactgcaagcaggtctggc

SEQ ID NO: 23769 - RNA, 21 nt, RNAi
cacugcaagcaggucuggcuu

SEQ ID NO: 23770 - RNA, 21 nt, RNAi
uugugacguucguccagaccg

SEQ ID NO: 23771 - DNA, 21 bp, Homo sapiens
cactgcaagcaggtctggctg

SEQ ID NO: 23772 - RNA, 21 nt, RNAi
cugcaagcaggucuggcuguu

SEQ ID NO: 23773 - RNA, 21 nt, RNAi
uugacguucguccagaccgac

SEQ ID NO: 23774 - DNA, 21 bp, Homo sapiens
caagcaggtctggctgcagat

SEQ ID NO: 23775 - RNA, 21 nt, RNAi
agcaggucuggcugcagauuu

SEQ ID NO: 23776 - RNA, 21 nt, RNAi
uuucguccagaccgacgucua

SEQ ID NO: 23777 - DNA, 21 bp, Homo sapiens
caggtctggctgcagatgcct

SEQ ID NO: 23778 - RNA, 21 nt, RNAi
ggucuggcugcagaugccuuu

SEQ ID NO: 23779 - RNA, 21 nt, RNAi
uuccagaccgacgucuacgga

SEQ ID NO: 23780 - DNA, 21 bp, Homo sapiens
catcgccatgcagatctacaa

SEQ ID NO: 23781 - RNA, 21 nt, RNAi
ucgccaugcagaucuacaauu

SEQ ID NO: 23782 - RNA, 21 nt, RNAi
uuagcgguacgucuagauguu

SEQ ID NO: 23783 - DNA, 21 bp, Homo sapiens
catgcagatctacaagaagca

SEQ ID NO: 23784 - RNA, 21 nt, RNAi
ugcagaucuacaagaagcauu

SEQ ID NO: 23785 - RNA, 21 nt, RNAi
uuacgucuagauguucuucgu

SEQ ID NO: 23786 - DNA, 21 bp, Homo sapiens
cagatctacaagaagcacctg

SEQ ID NO: 23787 - RNA, 21 nt, RNAi
gaucuacaagaagcaccuguu

SEQ ID NO: 23788 - RNA, 21 nt, RNAi
uucuagauguucuucguggac

SEQ ID NO: 23789 - DNA, 21 bp, Homo sapiens
caggtgtacgagaggctagag

SEQ ID NO: 23790 - RNA, 21 nt, RNAi
gguguacgagaggcuagaguu

SEQ ID NO: 23791 - RNA, 21 nt, RNAi
uuccacaugcucuccgaucuc

SEQ ID NO: 23792 - DNA, 21 bp, Homo sapiens
caggagaactcctacgtgtcc

SEQ ID NO: 23793 - RNA, 21 nt, RNAi
ggagaacuccuacguguccuu

SEQ ID NO: 23794 - RNA, 21 nt, RNAi
uuccucuugaggaugcacagg

SEQ ID NO: 23795 - DNA, 21 bp, Homo sapiens
cagcagagcagctgcagagag

SEQ ID NO: 23796 - RNA, 21 nt, RNAi
gcagagcagcugcagagaguu

SEQ ID NO: 23797 - RNA, 21 nt, RNAi
uucgucucgucgacgucucuc

SEQ ID NO: 23798 - DNA, 21 bp, Homo sapiens
cacggcaggagaatcgagctg

SEQ ID NO: 23799 - RNA, 21 nt, RNAi
cggcaggagaaucgagcuguu

SEQ ID NO: 23800 - RNA, 21 nt, RNAi
uugccguccucuuagcucgac

SEQ ID NO: 23801 - DNA, 21 bp, Homo sapiens
cagctctgcatcatcgtcgtc

SEQ ID NO: 23802 - RNA, 21 nt, RNAi
gcucugcaucaucgucgucuu

SEQ ID NO: 23803 - RNA, 21 nt, RNAi
uucgagacguaguagcagcag

SEQ ID NO: 23804 - DNA, 21 bp, Homo sapiens
catcatcgtcgtcagagccac

SEQ ID NO: 23805 - RNA, 21 nt, RNAi
ucaucgucgucagagccacuu

SEQ ID NO: 23806 - RNA, 21 nt, RNAi
uuaguagcagcagucucggug

SEQ ID NO: 23807 - DNA, 21 bp, Homo sapiens
cagagccaccgcagattatca

SEQ ID NO: 23808 - RNA, 21 nt, RNAi
gagccaccgcagauuaucauu

SEQ ID NO: 23809 - RNA, 21 nt, RNAi
uucucgguggcgucuaauagu

SEQ ID NO: 23810 - DNA, 21 bp, Homo sapiens
caccgcagattatcatcaacc

SEQ ID NO: 23811 - RNA, 21 nt, RNAi
ccgcagauuaucaucaaccuu

SEQ ID NO: 23812 - RNA, 21 nt, RNAi
uuggcgucuaauaguaguugg

SEQ ID NO: 23813 - DNA, 21 bp, Homo sapiens
cagaagatggtccagaagctg

SEQ ID NO: 23814 - RNA, 21 nt, RNAi
gaagaugguccagaagcuguu

SEQ ID NO: 23815 - RNA, 21 nt, RNAi
uucuucuaccaggucuucgac

SEQ ID NO: 23816 - DNA, 21 bp, Homo sapiens
cagagctgatgtgttcacctg

SEQ ID NO: 23817 - RNA, 21 nt, RNAi
gagcugauguguucaccuguu

SEQ ID NO: 23818 - RNA, 21 nt, RNAi
uucucgacuacacaaguggac

SEQ ID NO: 23819 - DNA, 21 bp, Homo sapiens
caaatccggaagtcaaagttc

SEQ ID NO: 23820 - RNA, 21 nt, RNAi
aauccggaagucaaaguucuu

SEQ ID NO: 23821 - RNA, 21 nt, RNAi
uuuuaggccuucaguuucaag

SEQ ID NO: 23822 - DNA, 21 bp, Homo sapiens
caaagttctcatggtcagaag

SEQ ID NO: 23823 - RNA, 21 nt, RNAi
aaguucucauggucagaaguu

SEQ ID NO: 23824 - RNA, 21 nt, RNAi
uuuucaagaguaccagucuuc

SEQ ID NO: 23825 - DNA, 21 bp, Homo sapiens
catggtcagaagttctcatgg

SEQ ID NO: 23826 - RNA, 21 nt, RNAi
uggucagaaguucucaugguu

SEQ ID NO: 23827 - RNA, 21 nt, RNAi
uuaccagucuucaagaguacc

SEQ ID NO: 23828 - DNA, 21 bp, Homo sapiens
cagaagttctcatggtgcacg

SEQ ID NO: 23829 - RNA, 21 nt, RNAi
gaaguucucauggugcacguu

SEQ ID NO: 23830 - RNA, 21 nt, RNAi
uucuucaagaguaccacgugc

SEQ ID NO: 23831 - DNA, 21 bp, Homo sapiens
catggtgcacgagtcctcagc

SEQ ID NO: 23832 - RNA, 21 nt, RNAi
uggugcacgaguccucagcuu

SEQ ID NO: 23833 - RNA, 21 nt, RNAi
uuaccacgugcucaggagucg

SEQ ID NO: 23834 - DNA, 21 bp, Homo sapiens
cacgagtcctcagcactctgc

SEQ ID NO: 23835 - RNA, 21 nt, RNAi
cgaguccucagcacucugcuu

SEQ ID NO: 23836 - RNA, 21 nt, RNAi
uugcucaggagucgugagacg

SEQ ID NO: 23837 - DNA, 21 bp, Homo sapiens
cataggcaggcagagtggaac

SEQ ID NO: 23838 - RNA, 21 nt, RNAi
uaggcaggcagaguggaacuu

SEQ ID NO: 23839 - RNA, 21 nt, RNAi
uuauccguccgucucaccuug

SEQ ID NO: 23840 - DNA, 21 bp, Homo sapiens
caaggaaggctggcatcatcc

SEQ ID NO: 23841 - RNA, 21 nt, RNAi
aggaaggcuggcaucauccuu

SEQ ID NO: 23842 - RNA, 21 nt, RNAi
uuuccuuccgaccguaguagg

SEQ ID NO: 23843 - DNA, 21 bp, Homo sapiens
catcatccagtgaggaggctg

SEQ ID NO: 23844 - RNA, 21 nt, RNAi
ucauccagugaggaggcuguu

SEQ ID NO: 23845 - RNA, 21 nt, RNAi
uuaguaggucacuccuccgac

SEQ ID NO: 23846 - DNA, 21 bp, Homo sapiens
catctctttggacagtggcca

SEQ ID NO: 23847 - RNA, 21 nt, RNAi
ucucuuuggacaguggccauu

SEQ ID NO: 23848 - RNA, 21 nt, RNAi
uuagagaaaccugucaccggu

SEQ ID NO: 23849 - DNA, 21 bp, Homo sapiens
caaggcaggaggatcgctgga

SEQ ID NO: 23850 - RNA, 21 nt, RNAi
aggcaggaggaucgcuggauu

SEQ ID NO: 23851 - RNA, 21 nt, RNAi
uuuccguccuccuagcgaccu

SEQ ID NO: 23852 - DNA, 21 bp, Homo sapiens
cagtaggtcaagaccagccag

SEQ ID NO: 23853 - RNA, 21 nt, RNAi
guaggucaagaccagccaguu

SEQ ID NO: 23854 - RNA, 21 nt, RNAi
uucauccaguucuggucgguc

SEQ ID NO: 23855 - DNA, 21 bp, Homo sapiens
cagtgagtcatgattgtatga

SEQ ID NO: 23856 - RNA, 21 nt, RNAi
gugagucaugauuguaugauu

SEQ ID NO: 23857 - RNA, 21 nt, RNAi
uucacucaguacuaacauacu

SEQ ID NO: 23858 - DNA, 21 bp, Homo sapiens
catgattgtatgactgcactc

SEQ ID NO: 23859 - RNA, 21 nt, RNAi
ugauuguaugacugcacucuu

SEQ ID NO: 23860 - RNA, 21 nt, RNAi
uuacuaacauacugacgugag

SEQ ID NO: 23861 - DNA, 21 bp, Homo sapiens
catggttcagtcctagcaaga

SEQ ID NO: 23862 - RNA, 21 nt, RNAi
ugguucaguccuagcaagauu

SEQ ID NO: 23863 - RNA, 21 nt, RNAi
uuaccaagucaggaucguucu

SEQ ID NO: 23864 - DNA, 21 bp, Homo sapiens
cagtcctagcaagaagcgaga

SEQ ID NO: 23865 - RNA, 21 nt, RNAi
guccuagcaagaagcgagauu

SEQ ID NO: 23866 - RNA, 21 nt, RNAi
uucaggaucguucuucgcucu

SEQ ID NO: 23867 - DNA, 21 bp, Homo sapiens
caagaagcgagaattctgaga

SEQ ID NO: 23868 - RNA, 21 nt, RNAi
agaagcgagaauucugagauu

SEQ ID NO: 23869 - RNA, 21 nt, RNAi
uuucuucgcucuuaagacucu

SEQ ID NO: 23870 - DNA, 21 bp, Homo sapiens
cagtgtcttcaggctttactg

SEQ ID NO: 23871 - RNA, 21 nt, RNAi
gugucuucaggcuuuacuguu

SEQ ID NO: 23872 - RNA, 21 nt, RNAi
uucacagaaguccgaaaugac

SEQ ID NO: 23873 - DNA, 21 bp, Homo sapiens
caggcactgattgtggcagag

SEQ ID NO: 23874 - RNA, 21 nt, RNAi
ggcacugauuguggcagaguu

SEQ ID NO: 23875 - RNA, 21 nt, RNAi
uuccgugacuaacaccgucuc

SEQ ID NO: 23876 - DNA, 21 bp, Homo sapiens
catgtatcacatgtcttcaga

SEQ ID NO: 23877 - RNA, 21 nt, RNAi
uguaucacaugucuucagauu

SEQ ID NO: 23878 - RNA, 21 nt, RNAi
uuacauaguguacagaagucu

SEQ ID NO: 23879 - DNA, 21 bp, Homo sapiens
cacatgtcttcagaagcaagt

SEQ ID NO: 23880 - RNA, 21 nt, RNAi
caugucuucagaagcaaguuu

SEQ ID NO: 23881 - RNA, 21 nt, RNAi
uuguacagaagucuucguuca

SEQ ID NO: 23882 - DNA, 21 bp, Homo sapiens
catgtcttcagaagcaagtca

SEQ ID NO: 23883 - RNA, 21 nt, RNAi
ugucuucagaagcaagucauu

SEQ ID NO: 23884 - RNA, 21 nt, RNAi
uuacagaagucuucguucagu

SEQ ID NO: 23885 - DNA, 21 bp, Homo sapiens
cagaagcaagtcaggtttcat

SEQ ID NO: 23886 - RNA, 21 nt, RNAi
gaagcaagucagguuucauuu

SEQ ID NO: 23887 - RNA, 21 nt, RNAi
uucuucguucaguccaaagua

SEQ ID NO: 23888 - DNA, 21 bp, Homo sapiens
caagtcaggtttcatgtaacc

SEQ ID NO: 23889 - RNA, 21 nt, RNAi
agucagguuucauguaaccuu

SEQ ID NO: 23890 - RNA, 21 nt, RNAi
uuucaguccaaaguacauugg

SEQ ID NO: 23891 - DNA, 21 bp, Homo sapiens
caggtttcatgtaaccgagtg

SEQ ID NO: 23892 - RNA, 21 nt, RNAi
gguuucauguaaccgaguguu

SEQ ID NO: 23893 - RNA, 21 nt, RNAi
uuccaaaguacauuggcucac

SEQ ID NO: 23894 - DNA, 21 bp, Homo sapiens
catgtaaccgagtgtcctctt

SEQ ID NO: 23895 - RNA, 21 nt, RNAi
uguaaccgaguguccucuuuu

SEQ ID NO: 23896 - RNA, 21 nt, RNAi
uuacauuggcucacaggagaa

SEQ ID NO: 23897 - DNA, 21 bp, Homo sapiens
cagccgtgagtcacactacat

SEQ ID NO: 23898 - RNA, 21 nt, RNAi
gccgugagucacacuacauuu

SEQ ID NO: 23899 - RNA, 21 nt, RNAi
uucggcacucagugugaugua

SEQ ID NO: 23900 - DNA, 21 bp, Homo sapiens
cattggtgacgtccaggttgt

SEQ ID NO: 23901 - RNA, 21 nt, RNAi
uuggugacguccagguuguuu

SEQ ID NO: 23902 - RNA, 21 nt, RNAi
uuaaccacugcagguccaaca

SEQ ID NO: 23903 - DNA, 21 bp, Homo sapiens
caggttgtccttgagtaataa

SEQ ID NO: 23904 - RNA, 21 nt, RNAi
gguuguccuugaguaauaauu

SEQ ID NO: 23905 - RNA, 21 nt, RNAi
uuccaacaggaacucauuauu

SEQ ID NO: 23906 - DNA, 21 bp, Homo sapiens
gacctcgtgcacatcctcacg

SEQ ID NO: 23907 - RNA, 21 nt, RNAi
ccucgugcacauccucacguu

SEQ ID NO: 23908 - RNA, 21 nt, RNAi
uuggagcacguguaggagugc

SEQ ID NO: 23909 - DNA, 21 bp, Homo sapiens
gacatcatcacagcctggcac

SEQ ID NO: 23910 - RNA, 21 nt, RNAi
caucaucacagccuggcacuu

SEQ ID NO: 23911 - RNA, 21 nt, RNAi
uuguaguagugucggaccgug

SEQ ID NO: 23912 - DNA, 21 bp, Homo sapiens
gaagttgccatcctcagcctc

SEQ ID NO: 23913 - RNA, 21 nt, RNAi
aguugccauccucagccucuu

SEQ ID NO: 23914 - RNA, 21 nt, RNAi
uuucaacgguaggagucggag

SEQ ID NO: 23915 - DNA, 21 bp, Homo sapiens
gatgaggaacacggtgtatgc

SEQ ID NO: 23916 - RNA, 21 nt, RNAi
ugaggaacacgguguaugcuu

SEQ ID NO: 23917 - RNA, 21 nt, RNAi
uuacuccuugugccacauacg

SEQ ID NO: 23918 - DNA, 21 bp, Homo sapiens
gaggaacacggtgtatgctgt

SEQ ID NO: 23919 - RNA, 21 nt, RNAi
ggaacacgguguaugcuguuu

SEQ ID NO: 23920 - RNA, 21 nt, RNAi
uuccuugugccacauacgaca

SEQ ID NO: 23921 - DNA, 21 bp, Homo sapiens
gaacacggtgtatgctgtgaa

SEQ ID NO: 23922 - RNA, 21 nt, RNAi
acacgguguaugcugugaauu

SEQ ID NO: 23923 - RNA, 21 nt, RNAi
uuugugccacauacgacacuu

SEQ ID NO: 23924 - DNA, 21 bp, Homo sapiens
gaagaggctgaaggagaacgc

SEQ ID NO: 23925 - RNA, 21 nt, RNAi
agaggcugaaggagaacgcuu

SEQ ID NO: 23926 - RNA, 21 nt, RNAi
uuucuccgacuuccucuugcg

SEQ ID NO: 23927 - DNA, 21 bp, Homo sapiens
gaggctgaaggagaacgctga

SEQ ID NO: 23928 - RNA, 21 nt, RNAi
ggcugaaggagaacgcugauu

SEQ ID NO: 23929 - RNA, 21 nt, RNAi
uuccgacuuccucuugcgacu

SEQ ID NO: 23930 - DNA, 21 bp, Homo sapiens
gaaggagaacgctgacctgga

SEQ ID NO: 23931 - RNA, 21 nt, RNAi
aggagaacgcugaccuggauu

SEQ ID NO: 23932 - RNA, 21 nt, RNAi
uuuccucuugcgacuggaccu

SEQ ID NO: 23933 - DNA, 21 bp, Homo sapiens
gagaacgctgacctggagtgg

SEQ ID NO: 23934 - RNA, 21 nt, RNAi
gaacgcugaccuggagugguu

SEQ ID NO: 23935 - RNA, 21 nt, RNAi
uucuugcgacuggaccucacc

SEQ ID NO: 23936 - DNA, 21 bp, Homo sapiens
gaacgctgacctggagtggac

SEQ ID NO: 23937 - RNA, 21 nt, RNAi
acgcugaccuggaguggacuu

SEQ ID NO: 23938 - RNA, 21 nt, RNAi
uuugcgacuggaccucaccug

SEQ ID NO: 23939 - DNA, 21 bp, Homo sapiens
gacctggagtggactgcagtg

SEQ ID NO: 23940 - RNA, 21 nt, RNAi
ccuggaguggacugcaguguu

SEQ ID NO: 23941 - RNA, 21 nt, RNAi
uuggaccucaccugacgucac

SEQ ID NO: 23942 - DNA, 21 bp, Homo sapiens
gagtggactgcagtgaagcag

SEQ ID NO: 23943 - RNA, 21 nt, RNAi
guggacugcagugaagcaguu

SEQ ID NO: 23944 - RNA, 21 nt, RNAi
uucaccugacgucacuucguc

SEQ ID NO: 23945 - DNA, 21 bp, Homo sapiens
gactgcagtgaagcagagctt

SEQ ID NO: 23946 - RNA, 21 nt, RNAi
cugcagugaagcagagcuuuu

SEQ ID NO: 23947 - RNA, 21 nt, RNAi
uugacgucacuucgucucgaa

SEQ ID NO: 23948 - DNA, 21 bp, Homo sapiens
gaagcagagcttcctgaccga

SEQ ID NO: 23949 - RNA, 21 nt, RNAi
agcagagcuuccugaccgauu

SEQ ID NO: 23950 - RNA, 21 nt, RNAi
uuucgucucgaaggacuggcu

SEQ ID NO: 23951 - DNA, 21 bp, Homo sapiens
gagcttcctgaccgaggtgga

SEQ ID NO: 23952 - RNA, 21 nt, RNAi
gcuuccugaccgagguggauu

SEQ ID NO: 23953 - RNA, 21 nt, RNAi
uucgaaggacuggcuccaccu

SEQ ID NO: 23954 - DNA, 21 bp, Homo sapiens
gagcagctgtccaggtttcgt

SEQ ID NO: 23955 - RNA, 21 nt, RNAi
gcagcuguccagguuucguuu

SEQ ID NO: 23956 - RNA, 21 nt, RNAi
uucgucgacagguccaaagca

SEQ ID NO: 23957 - DNA, 21 bp, Homo sapiens
gactttgctggctactgtgct

SEQ ID NO: 23958 - RNA, 21 nt, RNAi
cuuugcuggcuacugugcuuu

SEQ ID NO: 23959 - RNA, 21 nt, RNAi
uugaaacgaccgaugacacga

SEQ ID NO: 23960 - DNA, 21 bp, Homo sapiens
gaacggcttctactgcctggt

SEQ ID NO: 23961 - RNA, 21 nt, RNAi
acggcuucuacugccugguuu

SEQ ID NO: 23962 - RNA, 21 nt, RNAi
uuugccgaagaugacggacca

SEQ ID NO: 23963 - DNA, 21 bp, Homo sapiens
gagacatcaagagttccaacg

SEQ ID NO: 23964 - RNA, 21 nt, RNAi
gacaucaagaguuccaacguu

SEQ ID NO: 23965 - RNA, 21 nt, RNAi
uucuguaguucucaagguugc

SEQ ID NO: 23966 - DNA, 21 bp, Homo sapiens
gacatcaagagttccaacgtc

SEQ ID NO: 23967 - RNA, 21 nt, RNAi
caucaagaguuccaacgucuu

SEQ ID NO: 23968 - RNA, 21 nt, RNAi
uuguaguucucaagguugcag

SEQ ID NO: 23969 - DNA, 21 bp, Homo sapiens
gagttccaacgtccttctgga

SEQ ID NO: 23970 - RNA, 21 nt, RNAi
guuccaacguccuucuggauu

SEQ ID NO: 23971 - RNA, 21 nt, RNAi
uucaagguugcaggaagaccu

SEQ ID NO: 23972 - DNA, 21 bp, Homo sapiens
gacacggacaccttcagcttt

SEQ ID NO: 23973 - RNA, 21 nt, RNAi
cacggacaccuucagcuuuuu

SEQ ID NO: 23974 - RNA, 21 nt, RNAi
uugugccuguggaagucgaaa

SEQ ID NO: 23975 - DNA, 21 bp, Homo sapiens
gagaccttggctggtcagagg

SEQ ID NO: 23976 - RNA, 21 nt, RNAi
gaccuuggcuggucagagguu

SEQ ID NO: 23977 - RNA, 21 nt, RNAi
uucuggaaccgaccagucucc

SEQ ID NO: 23978 - DNA, 21 bp, Homo sapiens
gaccaagtatctgaaagacct

SEQ ID NO: 23979 - RNA, 21 nt, RNAi
ccaaguaucugaaagaccuuu

SEQ ID NO: 23980 - RNA, 21 nt, RNAi
uugguucauagacuuucugga

SEQ ID NO: 23981 - DNA, 21 bp, Homo sapiens
gaaagacctggtggaagagga

SEQ ID NO: 23982 - RNA, 21 nt, RNAi
aagaccugguggaagaggauu

SEQ ID NO: 23983 - RNA, 21 nt, RNAi
uuuucuggaccaccuucuccu

SEQ ID NO: 23984 - DNA, 21 bp, Homo sapiens
gacctggtggaagaggaggct

SEQ ID NO: 23985 - RNA, 21 nt, RNAi
ccugguggaagaggaggcuuu

SEQ ID NO: 23986 - RNA, 21 nt, RNAi
uuggaccaccuucuccuccga

SEQ ID NO: 23987 - DNA, 21 bp, Homo sapiens
gaagaggaggctgaggaggct

SEQ ID NO: 23988 - RNA, 21 nt, RNAi
agaggaggcugaggaggcuuu

SEQ ID NO: 23989 - RNA, 21 nt, RNAi
uuucuccuccgacuccuccga

SEQ ID NO: 23990 - DNA, 21 bp, Homo sapiens
gaggaggctggagtggctttg

SEQ ID NO: 23991 - RNA, 21 nt, RNAi
ggaggcuggaguggcuuuguu

SEQ ID NO: 23992 - RNA, 21 nt, RNAi
uuccuccgaccucaccgaaac

SEQ ID NO: 23993 - DNA, 21 bp, Homo sapiens
gaggctggagtggctttgaga

SEQ ID NO: 23994 - RNA, 21 nt, RNAi
ggcuggaguggcuuugagauu

SEQ ID NO: 23995 - RNA, 21 nt, RNAi
uuccgaccucaccgaaacucu

SEQ ID NO: 23996 - DNA, 21 bp, Homo sapiens
gagcacactgcaagcaggtct

SEQ ID NO: 23997 - RNA, 21 nt, RNAi
gcacacugcaagcaggucuuu

SEQ ID NO: 23998 - RNA, 21 nt, RNAi
uucgugugacguucguccaga

SEQ ID NO: 23999 - DNA, 21 bp, Homo sapiens
gatctacaagaagcacctgga

SEQ ID NO: 24000 - RNA, 21 nt, RNAi
ucuacaagaagcaccuggauu

SEQ ID NO: 24001 - RNA, 21 nt, RNAi
uuagauguucuucguggaccu

SEQ ID NO: 24002 - DNA, 21 bp, Homo sapiens
gagaggctagagaagctgcag

SEQ ID NO: 24003 - RNA, 21 nt, RNAi
gaggcuagagaagcugcaguu

SEQ ID NO: 24004 - RNA, 21 nt, RNAi
uucuccgaucucuucgacguc

SEQ ID NO: 24005 - DNA, 21 bp, Homo sapiens
gaggctagagaagctgcaggc

SEQ ID NO: 24006 - RNA, 21 nt, RNAi
ggcuagagaagcugcaggcuu

SEQ ID NO: 24007 - RNA, 21 nt, RNAi
uuccgaucucuucgacguccg

SEQ ID NO: 24008 - DNA, 21 bp, Homo sapiens
gagaagctgcaggcagtggtg

SEQ ID NO: 24009 - RNA, 21 nt, RNAi
gaagcugcaggcagugguguu

SEQ ID NO: 24010 - RNA, 21 nt, RNAi
uucuucgacguccgucaccac

SEQ ID NO: 24011 - DNA, 21 bp, Homo sapiens
gagaactcctacgtgtccagc

SEQ ID NO: 24012 - RNA, 21 nt, RNAi
gaacuccuacguguccagcuu

SEQ ID NO: 24013 - RNA, 21 nt, RNAi
uucuugaggaugcacaggucg

SEQ ID NO: 24014 - DNA, 21 bp, Homo sapiens
gaactcctacgtgtccagcac

SEQ ID NO: 24015 - RNA, 21 nt, RNAi
acuccuacguguccagcacuu

SEQ ID NO: 24016 - RNA, 21 nt, RNAi
uuugaggaugcacaggucgug

SEQ ID NO: 24017 - DNA, 21 bp, Homo sapiens
gagagtgacgagagcctaggc

SEQ ID NO: 24018 - RNA, 21 nt, RNAi
gagugacgagagccuaggcuu

SEQ ID NO: 24019 - RNA, 21 nt, RNAi
uucucacugcucucggauccg

SEQ ID NO: 24020 - DNA, 21 bp, Homo sapiens
gacacggcaggagaatcgagc

SEQ ID NO: 24021 - RNA, 21 nt, RNAi
cacggcaggagaaucgagcuu

SEQ ID NO: 24022 - RNA, 21 nt, RNAi
uugugccguccucuuagcucg

SEQ ID NO: 24023 - DNA, 21 bp, Homo sapiens
gagccaccgcagattatcatc

SEQ ID NO: 24024 - RNA, 21 nt, RNAi
gccaccgcagauuaucaucuu

SEQ ID NO: 24025 - RNA, 21 nt, RNAi
uucgguggcgucuaauaguag

SEQ ID NO: 24026 - DNA, 21 bp, Homo sapiens
gacagaagatggtccagaagc

SEQ ID NO: 24027 - RNA, 21 nt, RNAi
cagaagaugguccagaagcuu

SEQ ID NO: 24028 - RNA, 21 nt, RNAi
uugucuucuaccaggucuucg

SEQ ID NO: 24029 - DNA, 21 bp, Homo sapiens
gaagatggtccagaagctggc

SEQ ID NO: 24030 - RNA, 21 nt, RNAi
agaugguccagaagcuggcuu

SEQ ID NO: 24031 - RNA, 21 nt, RNAi
uuucuaccaggucuucgaccg

SEQ ID NO: 24032 - DNA, 21 bp, Homo sapiens
gaagaaagtgatgaatttcag

SEQ ID NO: 24033 - RNA, 21 nt, RNAi
agaaagugaugaauuucaguu

SEQ ID NO: 24034 - RNA, 21 nt, RNAi
uuucuuucacuacuuaaaguc

SEQ ID NO: 24035 - DNA, 21 bp, Homo sapiens
gaaagtgatgaatttcagagc

SEQ ID NO: 24036 - RNA, 21 nt, RNAi
aagugaugaauuucagagcuu

SEQ ID NO: 24037 - RNA, 21 nt, RNAi
uuuucacuacuuaaagucucg

SEQ ID NO: 24038 - DNA, 21 bp, Homo sapiens
gatgaatttcagagctgatgt

SEQ ID NO: 24039 - RNA, 21 nt, RNAi
ugaauuucagagcugauguuu

SEQ ID NO: 24040 - RNA, 21 nt, RNAi
uuacuuaaagucucgacuaca

SEQ ID NO: 24041 - DNA, 21 bp, Homo sapiens
gaatttcagagctgatgtgtt

SEQ ID NO: 24042 - RNA, 21 nt, RNAi
auuucagagcugauguguuuu

SEQ ID NO: 24043 - RNA, 21 nt, RNAi
uuuaaagucucgacuacacaa

SEQ ID NO: 24044 - DNA, 21 bp, Homo sapiens
gaagtcaaagttctcatggtc

SEQ ID NO: 24045 - RNA, 21 nt, RNAi
agucaaaguucucauggucuu

SEQ ID NO: 24046 - RNA, 21 nt, RNAi
uuucaguuucaagaguaccag

SEQ ID NO: 24047 - DNA, 21 bp, Homo sapiens
gaagttctcatggtgcacgag

SEQ ID NO: 24048 - RNA, 21 nt, RNAi
aguucucauggugcacgaguu

SEQ ID NO: 24049 - RNA, 21 nt, RNAi
uuucaagaguaccacgugcuc

SEQ ID NO: 24050 - DNA, 21 bp, Homo sapiens
gaaggctggcatcatccagtg

SEQ ID NO: 24051 - RNA, 21 nt, RNAi
aggcuggcaucauccaguguu

SEQ ID NO: 24052 - RNA, 21 nt, RNAi
uuuccgaccguaguaggucac

SEQ ID NO: 24053 - DNA, 21 bp, Homo sapiens
gaggctgaagtaggaggatca

SEQ ID NO: 24054 - RNA, 21 nt, RNAi
ggcugaaguaggaggaucauu

SEQ ID NO: 24055 - RNA, 21 nt, RNAi
uuccgacuucauccuccuagu

SEQ ID NO: 24056 - DNA, 21 bp, Homo sapiens
gaagtaggaggatcatttatg

SEQ ID NO: 24057 - RNA, 21 nt, RNAi
aguaggaggaucauuuauguu

SEQ ID NO: 24058 - RNA, 21 nt, RNAi
uuucauccuccuaguaaauac

SEQ ID NO: 24059 - DNA, 21 bp, Homo sapiens
gaggtcgaggctgcagtgagt

SEQ ID NO: 24060 - RNA, 21 nt, RNAi
ggucgaggcugcagugaguuu

SEQ ID NO: 24061 - RNA, 21 nt, RNAi
uuccagcuccgacgucacuca

SEQ ID NO: 24062 - DNA, 21 bp, Homo sapiens
gaggctgcagtgagtcatgat

SEQ ID NO: 24063 - RNA, 21 nt, RNAi
ggcugcagugagucaugauuu

SEQ ID NO: 24064 - RNA, 21 nt, RNAi
uuccgacgucacucaguacua

SEQ ID NO: 24065 - DNA, 21 bp, Homo sapiens
gagtcatgattgtatgactgc

SEQ ID NO: 24066 - RNA, 21 nt, RNAi
gucaugauuguaugacugcuu

SEQ ID NO: 24067 - RNA, 21 nt, RNAi
uucaguacuaacauacugacg

SEQ ID NO: 24068 - DNA, 21 bp, Homo sapiens
gattgtatgactgcactccag

SEQ ID NO: 24069 - RNA, 21 nt, RNAi
uuguaugacugcacuccaguu

SEQ ID NO: 24070 - RNA, 21 nt, RNAi
uuaacauacugacgugagguc

SEQ ID NO: 24071 - DNA, 21 bp, Homo sapiens
gaagtatggctgtaagtctca

SEQ ID NO: 24072 - RNA, 21 nt, RNAi
aguauggcuguaagucucauu

SEQ ID NO: 24073 - RNA, 21 nt, RNAi
uuucauaccgacauucagagu

SEQ ID NO: 24074 - DNA, 21 bp, Homo sapiens
gaagcgagaattctgagatcc

SEQ ID NO: 24075 - RNA, 21 nt, RNAi
agcgagaauucugagauccuu

SEQ ID NO: 24076 - RNA, 21 nt, RNAi
uuucgcucuuaagacucuagg

SEQ ID NO: 24077 - DNA, 21 bp, Homo sapiens
gagaattctgagatcctccag

SEQ ID NO: 24078 - RNA, 21 nt, RNAi
gaauucugagauccuccaguu

SEQ ID NO: 24079 - RNA, 21 nt, RNAi
uucuuaagacucuaggagguc

SEQ ID NO: 24080 - DNA, 21 bp, Homo sapiens
gaattctgagatcctccagaa

SEQ ID NO: 24081 - RNA, 21 nt, RNAi
auucugagauccuccagaauu

SEQ ID NO: 24082 - RNA, 21 nt, RNAi
uuuaagacucuaggaggucuu

SEQ ID NO: 24083 - DNA, 21 bp, Homo sapiens
gagatcctccagaaagtcgag

SEQ ID NO: 24084 - RNA, 21 nt, RNAi
gauccuccagaaagucgaguu

SEQ ID NO: 24085 - RNA, 21 nt, RNAi
uucuaggaggucuuucagcuc

SEQ ID NO: 24086 - DNA, 21 bp, Homo sapiens
gatcctccagaaagtcgagca

SEQ ID NO: 24087 - RNA, 21 nt, RNAi
uccuccagaaagucgagcauu

SEQ ID NO: 24088 - RNA, 21 nt, RNAi
uuaggaggucuuucagcucgu

SEQ ID NO: 24089 - DNA, 21 bp, Homo sapiens
gacctgcgagctggcctaatg

SEQ ID NO: 24090 - RNA, 21 nt, RNAi
ccugcgagcuggccuaauguu

SEQ ID NO: 24091 - RNA, 21 nt, RNAi
uuggacgcucgaccggauuac

SEQ ID NO: 24092 - DNA, 21 bp, Homo sapiens
gagctggcctaatgtggtggc

SEQ ID NO: 24093 - RNA, 21 nt, RNAi
gcuggccuaaugugguggcuu

SEQ ID NO: 24094 - RNA, 21 nt, RNAi
uucgaccggauuacaccaccg

SEQ ID NO: 24095 - DNA, 21 bp, Homo sapiens
gaggccacaagctcagcctca

SEQ ID NO: 24096 - RNA, 21 nt, RNAi
ggccacaagcucagccucauu

SEQ ID NO: 24097 - RNA, 21 nt, RNAi
uuccgguguucgagucggagu

SEQ ID NO: 24098 - DNA, 21 bp, Homo sapiens
gacatgtatcacatgtcttca

SEQ ID NO: 24099 - RNA, 21 nt, RNAi
cauguaucacaugucuucauu

SEQ ID NO: 24100 - RNA, 21 nt, RNAi
uuguacauaguguacagaagu

SEQ ID NO: 24101 - DNA, 21 bp, Homo sapiens
gaagcaagtcaggtttcatgt

SEQ ID NO: 24102 - RNA, 21 nt, RNAi
agcaagucagguuucauguuu

SEQ ID NO: 24103 - RNA, 21 nt, RNAi
uuucguucaguccaaaguaca

SEQ ID NO: 24104 - DNA, 21 bp, Homo sapiens
gagtgtcctcttgcgtgtcca

SEQ ID NO: 24105 - RNA, 21 nt, RNAi
guguccucuugcguguccauu

SEQ ID NO: 24106 - RNA, 21 nt, RNAi
uucacaggagaacgcacaggu

SEQ ID NO: 24107 - DNA, 21 bp, Homo sapiens
gacgtccaggttgtccttgag

SEQ ID NO: 24108 - RNA, 21 nt, RNAi
cguccagguuguccuugaguu

SEQ ID NO: 24109 - RNA, 21 nt, RNAi
uugcagguccaacaggaacuc

SEQ ID NO: 24110 - DNA, 21 bp, Homo sapiens
tatgctgtgaagaggctgaag

SEQ ID NO: 24111 - RNA, 21 nt, RNAi
ugcugugaagaggcugaaguu

SEQ ID NO: 24112 - RNA, 21 nt, RNAi
uuacgacacuucuccgacuuc

SEQ ID NO: 24113 - DNA, 21 bp, Homo sapiens
tactgtgctcagaacggcttc

SEQ ID NO: 24114 - RNA, 21 nt, RNAi
cugugcucagaacggcuucuu

SEQ ID NO: 24115 - RNA, 21 nt, RNAi
uugacacgagucuugccgaag

SEQ ID NO: 24116 - DNA, 21 bp, Homo sapiens
tactgcctggtgtacggcttc

SEQ ID NO: 24117 - RNA, 21 nt, RNAi
cugccugguguacggcuucuu

SEQ ID NO: 24118 - RNA, 21 nt, RNAi
uugacggaccacaugccgaag

SEQ ID NO: 24119 - DNA, 21 bp, Homo sapiens
tagtgctagagaccttggctg

SEQ ID NO: 24120 - RNA, 21 nt, RNAi
gugcuagagaccuuggcuguu

SEQ ID NO: 24121 - RNA, 21 nt, RNAi
uucacgaucucuggaaccgac

SEQ ID NO: 24122 - DNA, 21 bp, Homo sapiens
tagagaccttggctggtcaga

SEQ ID NO: 24123 - RNA, 21 nt, RNAi
gagaccuuggcuggucagauu

SEQ ID NO: 24124 - RNA, 21 nt, RNAi
uucucuggaaccgaccagucu

SEQ ID NO: 24125 - DNA, 21 bp, Homo sapiens
tatctgaaagacctggtggaa

SEQ ID NO: 24126 - RNA, 21 nt, RNAi
ucugaaagaccugguggaauu

SEQ ID NO: 24127 - RNA, 21 nt, RNAi
uuagacuuucuggaccaccuu

SEQ ID NO: 24128 - DNA, 21 bp, Homo sapiens
tacgagaggctagagaagctg

SEQ ID NO: 24129 - RNA, 21 nt, RNAi
cgagaggcuagagaagcuguu

SEQ ID NO: 24130 - RNA, 21 nt, RNAi
uugcucuccgaucucuucgac

SEQ ID NO: 24131 - DNA, 21 bp, Homo sapiens
tagagaagctgcaggcagtgg

SEQ ID NO: 24132 - RNA, 21 nt, RNAi
gagaagcugcaggcagugguu

SEQ ID NO: 24133 - RNA, 21 nt, RNAi
uucucuucgacguccgucacc

SEQ ID NO: 24134 - DNA, 21 bp, Homo sapiens
tacgtgtccagcactggcaga

SEQ ID NO: 24135 - RNA, 21 nt, RNAi
cguguccagcacuggcagauu

SEQ ID NO: 24136 - RNA, 21 nt, RNAi
uugcacaggucgugaccgucu

SEQ ID NO: 24137 - DNA, 21 bp, Homo sapiens
tacctgcttacaatttggaaa

SEQ ID NO: 24138 - RNA, 21 nt, RNAi
ccugcuuacaauuuggaaauu

SEQ ID NO: 24139 - RNA, 21 nt, RNAi
uuggacgaauguuaaaccuuu

SEQ ID NO: 24140 - DNA, 21 bp, Homo sapiens
taaactattagcctggcgtgg

SEQ ID NO: 24141 - RNA, 21 nt, RNAi
aacuauuagccuggcgugguu

SEQ ID NO: 24142 - RNA, 21 nt, RNAi
uuuugauaaucggaccgcacc

SEQ ID NO: 24143 - DNA, 21 bp, Homo sapiens
tattagcctggcgtggtagcg

SEQ ID NO: 24144 - RNA, 21 nt, RNAi
uuagccuggcgugguagcguu

SEQ ID NO: 24145 - RNA, 21 nt, RNAi
uuaaucggaccgcaccaucgc

SEQ ID NO: 24146 - DNA, 21 bp, Homo sapiens
taggaggatcatttatgcttg

SEQ ID NO: 24147 - RNA, 21 nt, RNAi
ggaggaucauuuaugcuuguu

SEQ ID NO: 24148 - RNA, 21 nt, RNAi
uuccuccuaguaaauacgaac

SEQ ID NO: 24149 - DNA, 21 bp, Homo sapiens
tatgactgcactccagcctgg

SEQ ID NO: 24150 - RNA, 21 nt, RNAi
ugacugcacuccagccugguu

SEQ ID NO: 24151 - RNA, 21 nt, RNAi
uuacugacgugaggucggacc

SEQ ID NO: 24152 - DNA, 21 bp, Homo sapiens
tatggctgtaagtctcatggt

SEQ ID NO: 24153 - RNA, 21 nt, RNAi
uggcuguaagucucaugguuu

SEQ ID NO: 24154 - RNA, 21 nt, RNAi
uuaccgacauucagaguacca

SEQ ID NO: 24155 - DNA, 21 bp, Homo sapiens
taagtctcatggttcagtcct

SEQ ID NO: 24156 - RNA, 21 nt, RNAi
agucucaugguucaguccuuu

SEQ ID NO: 24157 - RNA, 21 nt, RNAi
uuucagaguaccaagucagga

SEQ ID NO: 24158 - DNA, 21 bp, Homo sapiens
tagcaagaagcgagaattctg

SEQ ID NO: 24159 - RNA, 21 nt, RNAi
gcaagaagcgagaauucuguu

SEQ ID NO: 24160 - RNA, 21 nt, RNAi
uucguucuucgcucuuaagac

SEQ ID NO: 24161 - DNA, 21 bp, Homo sapiens
taatgtggtggcctgcaagcc

SEQ ID NO: 24162 - RNA, 21 nt, RNAi
augugguggccugcaagccuu

SEQ ID NO: 24163 - RNA, 21 nt, RNAi
uuuacaccaccggacguucgg

SEQ ID NO: 24164 - DNA, 21 bp, Homo sapiens
tatcacatgtcttcagaagca

SEQ ID NO: 24165 - RNA, 21 nt, RNAi
ucacaugucuucagaagcauu

SEQ ID NO: 24166 - RNA, 21 nt, RNAi
uuaguguacagaagucuucgu

SEQ ID NO: 24167 - DNA, 21 bp, Homo sapiens
taaccgagtgtcctcttgcgt

SEQ ID NO: 24168 - RNA, 21 nt, RNAi
accgaguguccucuugcguuu

SEQ ID NO: 24169 - RNA, 21 nt, RNAi
uuuggcucacaggagaacgca

SEQ ID NO: 24170 - DNA, 21 bp, Homo sapiens
tagcacaggcttcacagtgat

SEQ ID NO: 24171 - RNA, 21 nt, RNAi
gcacaggcuucacagugauuu

SEQ ID NO: 24172 - RNA, 21 nt, RNAi
uucguguccgaagugucacua

SEQ ID NO: 24173 - DNA, 21 bp, Homo sapiens
aagagttccaacgtccttctg

SEQ ID NO: 24174 - RNA, 21 nt, RNAi
gaguuccaacguccuucuguu

SEQ ID NO: 24175 - RNA, 21 nt, RNAi
uucucaagguugcaggaagac

SEQ ID NO: 24176 - DNA, 21 bp, Homo sapiens
catgtgccgcttctacaaagt

SEQ ID NO: 24177 - RNA, 21 nt, RNAi
ugugccgcuucuacaaaguuu

SEQ ID NO: 24178 - RNA, 21 nt, RNAi
uuacacggcgaagauguuuca

SEQ ID NO: 24179 - DNA, 21 bp, Homo sapiens
catcaagagttccaacgtcct

SEQ ID NO: 24180 - RNA, 21 nt, RNAi
ucaagaguuccaacguccuuu

SEQ ID NO: 24181 - RNA, 21 nt, RNAi
uuaguucucaagguugcagga

SEQ ID NO: 24182 - DNA, 21 bp, Homo sapiens
caagagttccaacgtccttct

SEQ ID NO: 24183 - RNA, 21 nt, RNAi
agaguuccaacguccuucuuu

SEQ ID NO: 24184 - RNA, 21 nt, RNAi
uuucucaagguugcaggaaga

SEQ ID NO: 24185 - DNA, 21 bp, Homo sapiens
caagtatctgaaagacctggt

SEQ ID NO: 24186 - RNA, 21 nt, RNAi
aguaucugaaagaccugguuu

SEQ ID NO: 24187 - RNA, 21 nt, RNAi
uuucauagacuuucuggacca

SEQ ID NO: 24188 - DNA, 21 bp, Homo sapiens
cagagccaccgcagattatca

SEQ ID NO: 24189 - RNA, 21 nt, RNAi
gagccaccgcagauuaucauu

SEQ ID NO: 24190 - RNA, 21 nt, RNAi
uucucgguggcgucuaauagu

SEQ ID NO: 24191 - DNA, 21 bp, Homo sapiens
gatgaggaacacggtgtatgc

SEQ ID NO: 24192 - RNA, 21 nt, RNAi
ugaggaacacgguguaugcuu

SEQ ID NO: 24193 - RNA, 21 nt, RNAi
uuacuccuugugccacauacg

SEQ ID NO: 24194 - DNA, 21 bp, Homo sapiens
gaggaacacggtgtatgctgt

SEQ ID NO: 24195 - RNA, 21 nt, RNAi
ggaacacgguguaugcuguuu

SEQ ID NO: 24196 - RNA, 21 nt, RNAi
uuccuugugccacauacgaca

SEQ ID NO: 24197 - DNA, 21 bp, Homo sapiens
gaacacggtgtatgctgtgaa

SEQ ID NO: 24198 - RNA, 21 nt, RNAi
acacgguguaugcugugaauu

SEQ ID NO: 24199 - RNA, 21 nt, RNAi
uuugugccacauacgacacuu

SEQ ID NO: 24200 - DNA, 21 bp, Homo sapiens
gagacatcaagagttccaacg

SEQ ID NO: 24201 - RNA, 21 nt, RNAi
gacaucaagaguuccaacguu

SEQ ID NO: 24202 - RNA, 21 nt, RNAi
uucuguaguucucaagguugc

SEQ ID NO: 24203 - DNA, 21 bp, Homo sapiens
gacatcaagagttccaacgtc

SEQ ID NO: 24204 - RNA, 21 nt, RNAi
caucaagaguuccaacgucuu

SEQ ID NO: 24205 - RNA, 21 nt, RNAi
uuguaguucucaagguugcag

SEQ ID NO: 24206 - DNA, 21 bp, Homo sapiens
gagttccaacgtccttctgga

SEQ ID NO: 24207 - RNA, 21 nt, RNAi
guuccaacguccuucuggauu

SEQ ID NO: 24208 - RNA, 21 nt, RNAi
uucaagguugcaggaagaccu

SEQ ID NO: 24209 - DNA, 21 bp, Homo sapiens
gaccaagtatctgaaagacct

SEQ ID NO: 24210 - RNA, 21 nt, RNAi
ccaaguaucugaaagaccuuu

SEQ ID NO: 24211 - RNA, 21 nt, RNAi
uugguucauagacuuucugga

SEQ ID NO: 24212 - DNA, 21 bp, Homo sapiens
gagccaccgcagattatcatc

SEQ ID NO: 24213 - RNA, 21 nt, RNAi
gccaccgcagauuaucaucuu

SEQ ID NO: 24214 - RNA, 21 nt, RNAi
uucgguggcgucuaauaguag

SEQ ID NO: 24215 - DNA, 21 bp, Homo sapiens
aaagattcttaggaacgccgt

SEQ ID NO: 24216 - RNA, 21 nt, RNAi
agauucuuaggaacgccguuu

SEQ ID NO: 24217 - RNA, 21 nt, RNAi
uuucuaagaauccuugcggca

SEQ ID NO: 24218 - DNA, 21 bp, Homo sapiens
aagattcttaggaacgccgta

SEQ ID NO: 24219 - RNA, 21 nt, RNAi
gauucuuaggaacgccguauu

SEQ ID NO: 24220 - RNA, 21 nt, RNAi
uucuaagaauccuugcggcau

SEQ ID NO: 24221 - DNA, 21 bp, Homo sapiens
aaataaacttgcaagaggact

SEQ ID NO: 24222 - RNA, 21 nt, RNAi
auaaacuugcaagaggacuuu

SEQ ID NO: 24223 - RNA, 21 nt, RNAi
uuuauuugaacguucuccuga

SEQ ID NO: 24224 - DNA, 21 bp, Homo sapiens
aataaacttgcaagaggacta

SEQ ID NO: 24225 - RNA, 21 nt, RNAi
uaaacuugcaagaggacuauu

SEQ ID NO: 24226 - RNA, 21 nt, RNAi
uuauuugaacguucuccugau

SEQ ID NO: 24227 - DNA, 21 bp, Homo sapiens
aaacttgcaagaggactatga

SEQ ID NO: 24228 - RNA, 21 nt, RNAi
acuugcaagaggacuaugauu

SEQ ID NO: 24229 - RNA, 21 nt, RNAi
uuugaacguucuccugauacu

SEQ ID NO: 24230 - DNA, 21 bp, Homo sapiens
aacttgcaagaggactatgaa

SEQ ID NO: 24231 - RNA, 21 nt, RNAi
cuugcaagaggacuaugaauu

SEQ ID NO: 24232 - RNA, 21 nt, RNAi
uugaacguucuccugauacuu

SEQ ID NO: 24233 - DNA, 21 bp, Homo sapiens
aaaggtcaaacttgcctgcca

SEQ ID NO: 24234 - RNA, 21 nt, RNAi
aggucaaacuugccugccauu

SEQ ID NO: 24235 - RNA, 21 nt, RNAi
uuuccaguuugaacggacggu

SEQ ID NO: 24236 - DNA, 21 bp, Homo sapiens
aaggtcaaacttgcctgccat

SEQ ID NO: 24237 - RNA, 21 nt, RNAi
ggucaaacuugccugccauuu

SEQ ID NO: 24238 - RNA, 21 nt, RNAi
uuccaguuugaacggacggua

SEQ ID NO: 24239 - DNA, 21 bp, Homo sapiens
aaacttgcctgccatatcctt

SEQ ID NO: 24240 - RNA, 21 nt, RNAi
acuugccugccauauccuuuu

SEQ ID NO: 24241 - RNA, 21 nt, RNAi
uuugaacggacgguauaggaa

SEQ ID NO: 24242 - DNA, 21 bp, Homo sapiens
aacttgcctgccatatcctta

SEQ ID NO: 24243 - RNA, 21 nt, RNAi
cuugccugccauauccuuauu

SEQ ID NO: 24244 - RNA, 21 nt, RNAi
uugaacggacgguauaggaau

SEQ ID NO: 24245 - DNA, 21 bp, Homo sapiens
aaacggagattgaggccttga

SEQ ID NO: 24246 - RNA, 21 nt, RNAi
acggagauugaggccuugauu

SEQ ID NO: 24247 - RNA, 21 nt, RNAi
uuugccucuaacuccggaacu

SEQ ID NO: 24248 - DNA, 21 bp, Homo sapiens
aacggagattgaggccttgaa

SEQ ID NO: 24249 - RNA, 21 nt, RNAi
cggagauugaggccuugaauu

SEQ ID NO: 24250 - RNA, 21 nt, RNAi
uugccucuaacuccggaacuu

SEQ ID NO: 24251 - DNA, 21 bp, Homo sapiens
aagaacctgagacatcagcat

SEQ ID NO: 24252 - RNA, 21 nt, RNAi
gaaccugagacaucagcauuu

SEQ ID NO: 24253 - RNA, 21 nt, RNAi
uucuuggacucuguagucgua

SEQ ID NO: 24254 - DNA, 21 bp, Homo sapiens
aacctgagacatcagcatata

SEQ ID NO: 24255 - RNA, 21 nt, RNAi
ccugagacaucagcauauauu

SEQ ID NO: 24256 - RNA, 21 nt, RNAi
uuggacucuguagucguauau

SEQ ID NO: 24257 - DNA, 21 bp, Homo sapiens
aactctaccatgtgctagaga

SEQ ID NO: 24258 - RNA, 21 nt, RNAi
cucuaccaugugcuagagauu

SEQ ID NO: 24259 - RNA, 21 nt, RNAi
uugagaugguacacgaucucu

SEQ ID NO: 24260 - DNA, 21 bp, Homo sapiens
aaagctgattgactttggtct

SEQ ID NO: 24261 - RNA, 21 nt, RNAi
agcugauugacuuuggucuuu

SEQ ID NO: 24262 - RNA, 21 nt, RNAi
uuucgacuaacugaaaccaga

SEQ ID NO: 24263 - DNA, 21 bp, Homo sapiens
aagctgattgactttggtctc

SEQ ID NO: 24264 - RNA, 21 nt, RNAi
gcugauugacuuuggucucuu

SEQ ID NO: 24265 - RNA, 21 nt, RNAi
uucgacuaacugaaaccagag

SEQ ID NO: 24266 - DNA, 21 bp, Homo sapiens
aacaaggattaccatctacag

SEQ ID NO: 24267 - RNA, 21 nt, RNAi
caaggauuaccaucuacaguu

SEQ ID NO: 24268 - RNA, 21 nt, RNAi
uuguuccuaaugguagauguc

SEQ ID NO: 24269 - DNA, 21 bp, Homo sapiens
aaggattaccatctacagaca

SEQ ID NO: 24270 - RNA, 21 nt, RNAi
ggauuaccaucuacagacauu

SEQ ID NO: 24271 - RNA, 21 nt, RNAi
uuccuaaugguagaugucugu

SEQ ID NO: 24272 - DNA, 21 bp, Homo sapiens
aaggcaaatcatatcttggat

SEQ ID NO: 24273 - RNA, 21 nt, RNAi
ggcaaaucauaucuuggauuu

SEQ ID NO: 24274 - RNA, 21 nt, RNAi
uuccguuuaguauagaaccua

SEQ ID NO: 24275 - DNA, 21 bp, Homo sapiens
aaatcatatcttggatcagag

SEQ ID NO: 24276 - RNA, 21 nt, RNAi
aucauaucuuggaucagaguu

SEQ ID NO: 24277 - RNA, 21 nt, RNAi
uuuaguauagaaccuagucuc

SEQ ID NO: 24278 - DNA, 21 bp, Homo sapiens
aatcatatcttggatcagagg

SEQ ID NO: 24279 - RNA, 21 nt, RNAi
ucauaucuuggaucagagguu

SEQ ID NO: 24280 - RNA, 21 nt, RNAi
uuaguauagaaccuagucucc

SEQ ID NO: 24281 - DNA, 21 bp, Homo sapiens
aacaaatgctgcaggtggacc

SEQ ID NO: 24282 - RNA, 21 nt, RNAi
caaaugcugcagguggaccuu

SEQ ID NO: 24283 - RNA, 21 nt, RNAi
uuguuuacgacguccaccugg

SEQ ID NO: 24284 - DNA, 21 bp, Homo sapiens
aagattacaactatcctgttg

SEQ ID NO: 24285 - RNA, 21 nt, RNAi
gauuacaacuauccuguuguu

SEQ ID NO: 24286 - RNA, 21 nt, RNAi
uucuaauguugauaggacaac

SEQ ID NO: 24287 - DNA, 21 bp, Homo sapiens
aactatcctgttgagtggcaa

SEQ ID NO: 24288 - RNA, 21 nt, RNAi
cuauccuguugaguggcaauu

SEQ ID NO: 24289 - RNA, 21 nt, RNAi
uugauaggacaacucaccguu

SEQ ID NO: 24290 - DNA, 21 bp, Homo sapiens
aacagaactttctgtacatca

SEQ ID NO: 24291 - RNA, 21 nt, RNAi
cagaacuuucuguacaucauu

SEQ ID NO: 24292 - RNA, 21 nt, RNAi
uugucuugaaagacauguagu

SEQ ID NO: 24293 - DNA, 21 bp, Homo sapiens
aactttctgtacatcacagaa

SEQ ID NO: 24294 - RNA, 21 nt, RNAi
cuuucuguacaucacagaauu

SEQ ID NO: 24295 - RNA, 21 nt, RNAi
uugaaagacauguagugucuu

SEQ ID NO: 24296 - DNA, 21 bp, Homo sapiens
aaacaacaggcaaacaatgga

SEQ ID NO: 24297 - RNA, 21 nt, RNAi
acaacaggcaaacaauggauu

SEQ ID NO: 24298 - RNA, 21 nt, RNAi
uuuguuguccguuuguuaccu

SEQ ID NO: 24299 - DNA, 21 bp, Homo sapiens
aacaacaggcaaacaatggag

SEQ ID NO: 24300 - RNA, 21 nt, RNAi
caacaggcaaacaauggaguu

SEQ ID NO: 24301 - RNA, 21 nt, RNAi
uuguuguccguuuguuaccuc

SEQ ID NO: 24302 - DNA, 21 bp, Homo sapiens
aacaggcaaacaatggaggat

SEQ ID NO: 24303 - RNA, 21 nt, RNAi
caggcaaacaauggaggauuu

SEQ ID NO: 24304 - RNA, 21 nt, RNAi
uuguccguuuguuaccuccua

SEQ ID NO: 24305 - DNA, 21 bp, Homo sapiens
aatttcactgtggcagtatga

SEQ ID NO: 24306 - RNA, 21 nt, RNAi
uuucacuguggcaguaugauu

SEQ ID NO: 24307 - RNA, 21 nt, RNAi
uuaaagugacaccgucauacu

SEQ ID NO: 24308 - DNA, 21 bp, Homo sapiens
aaaccagttcgtttaaggctt

SEQ ID NO: 24309 - RNA, 21 nt, RNAi
accaguucguuuaaggcuuuu

SEQ ID NO: 24310 - RNA, 21 nt, RNAi
uuuggucaagcaaauuccgaa

SEQ ID NO: 24311 - DNA, 21 bp, Homo sapiens
aaccagttcgtttaaggcttt

SEQ ID NO: 24312 - RNA, 21 nt, RNAi
ccaguucguuuaaggcuuuuu

SEQ ID NO: 24313 - RNA, 21 nt, RNAi
uuggucaagcaaauuccgaaa

SEQ ID NO: 24314 - DNA, 21 bp, Homo sapiens
aaggctttcttctttctcctg

SEQ ID NO: 24315 - RNA, 21 nt, RNAi
ggcuuucuucuuucuccuguu

SEQ ID NO: 24316 - RNA, 21 nt, RNAi
uuccgaaagaagaaagaggac

SEQ ID NO: 24317 - DNA, 21 bp, Homo sapiens
aagtcaaataattggagtctg

SEQ ID NO: 24318 - RNA, 21 nt, RNAi
gucaaauaauuggagucuguu

SEQ ID NO: 24319 - RNA, 21 nt, RNAi
uucaguuuauuaaccucagac

SEQ ID NO: 24320 - DNA, 21 bp, Homo sapiens
aaataattggagtctggaaga

SEQ ID NO: 24321 - RNA, 21 nt, RNAi
auaauuggagucuggaagauu

SEQ ID NO: 24322 - RNA, 21 nt, RNAi
uuuauuaaccucagaccuucu

SEQ ID NO: 24323 - DNA, 21 bp, Homo sapiens
aataattggagtctggaagat

SEQ ID NO: 24324 - RNA, 21 nt, RNAi
uaauuggagucuggaagauuu

SEQ ID NO: 24325 - RNA, 21 nt, RNAi
uuauuaaccucagaccuucua

SEQ ID NO: 24326 - DNA, 21 bp, Homo sapiens
aattggagtctggaagatgtg

SEQ ID NO: 24327 - RNA, 21 nt, RNAi
uuggagucuggaagauguguu

SEQ ID NO: 24328 - RNA, 21 nt, RNAi
uuaaccucagaccuucuacac

SEQ ID NO: 24329 - DNA, 21 bp, Homo sapiens
aagatgtgaccgcaagtgata

SEQ ID NO: 24330 - RNA, 21 nt, RNAi
gaugugaccgcaagugauauu

SEQ ID NO: 24331 - RNA, 21 nt, RNAi
uucuacacuggcguucacuau

SEQ ID NO: 24332 - DNA, 21 bp, Homo sapiens
aatagactatgattggtgtga

SEQ ID NO: 24333 - RNA, 21 nt, RNAi
uagacuaugauuggugugauu

SEQ ID NO: 24334 - RNA, 21 nt, RNAi
uuaucugauacuaaccacacu

SEQ ID NO: 24335 - DNA, 21 bp, Homo sapiens
aagatgatttatcaacaggtg

SEQ ID NO: 24336 - RNA, 21 nt, RNAi
gaugauuuaucaacagguguu

SEQ ID NO: 24337 - RNA, 21 nt, RNAi
uucuacuaaauaguuguccac

SEQ ID NO: 24338 - DNA, 21 bp, Homo sapiens
aacatcacagtttaccaagta

SEQ ID NO: 24339 - RNA, 21 nt, RNAi
caucacaguuuaccaaguauu

SEQ ID NO: 24340 - RNA, 21 nt, RNAi
uuguagugucaaaugguucau

SEQ ID NO: 24341 - DNA, 21 bp, Homo sapiens
aagtactggacagaatcaaat

SEQ ID NO: 24342 - RNA, 21 nt, RNAi
guacuggacagaaucaaauuu

SEQ ID NO: 24343 - RNA, 21 nt, RNAi
uucaugaccugucuuaguuua

SEQ ID NO: 24344 - DNA, 21 bp, Homo sapiens
aaatcattaactccagcctta

SEQ ID NO: 24345 - RNA, 21 nt, RNAi
aucauuaacuccagccuuauu

SEQ ID NO: 24346 - RNA, 21 nt, RNAi
uuuaguaauugaggucggaau

SEQ ID NO: 24347 - DNA, 21 bp, Homo sapiens
aatcattaactccagccttat

SEQ ID NO: 24348 - RNA, 21 nt, RNAi
ucauuaacuccagccuuauuu

SEQ ID NO: 24349 - RNA, 21 nt, RNAi
uuaguaauugaggucggaaua

SEQ ID NO: 24350 - DNA, 21 bp, Homo sapiens
aactccagccttatgcagaac

SEQ ID NO: 24351 - RNA, 21 nt, RNAi
cuccagccuuaugcagaacuu

SEQ ID NO: 24352 - RNA, 21 nt, RNAi
uugaggucggaauacgucuug

SEQ ID NO: 24353 - DNA, 21 bp, Homo sapiens
aagtctgctgtaaagaatgaa

SEQ ID NO: 24354 - RNA, 21 nt, RNAi
gucugcuguaaagaaugaauu

SEQ ID NO: 24355 - RNA, 21 nt, RNAi
uucagacgacauuucuuacuu

SEQ ID NO: 24356 - DNA, 21 bp, Homo sapiens
aagagtactttatgtttcctg

SEQ ID NO: 24357 - RNA, 21 nt, RNAi
gaguacuuuauguuuccuguu

SEQ ID NO: 24358 - RNA, 21 nt, RNAi
uucucaugaaauacaaaggac

SEQ ID NO: 24359 - DNA, 21 bp, Homo sapiens
aagactccagttaataagaac

SEQ ID NO: 24360 - RNA, 21 nt, RNAi
gacuccaguuaauaagaacuu

SEQ ID NO: 24361 - RNA, 21 nt, RNAi
uucugaggucaauuauucuug

SEQ ID NO: 24362 - DNA, 21 bp, Homo sapiens
aataagaaccagcataagaga

SEQ ID NO: 24363 - RNA, 21 nt, RNAi
uaagaaccagcauaagagauu

SEQ ID NO: 24364 - RNA, 21 nt, RNAi
uuauucuuggucguauucucu

SEQ ID NO: 24365 - DNA, 21 bp, Homo sapiens
aagaaccagcataagagagaa

SEQ ID NO: 24366 - RNA, 21 nt, RNAi
gaaccagcauaagagagaauu

SEQ ID NO: 24367 - RNA, 21 nt, RNAi
uucuuggucguauucucucuu

SEQ ID NO: 24368 - DNA, 21 bp, Homo sapiens
aaccagcataagagagaaata

SEQ ID NO: 24369 - RNA, 21 nt, RNAi
ccagcauaagagagaaauauu

SEQ ID NO: 24370 - RNA, 21 nt, RNAi
uuggucguauucucucuuuau

SEQ ID NO: 24371 - DNA, 21 bp, Homo sapiens
aagagagaaatactcactacg

SEQ ID NO: 24372 - RNA, 21 nt, RNAi
gagagaaauacucacuacguu

SEQ ID NO: 24373 - RNA, 21 nt, RNAi
uucucucuuuaugagugaugc

SEQ ID NO: 24374 - DNA, 21 bp, Homo sapiens
aaatactcactacgccaaatc

SEQ ID NO: 24375 - RNA, 21 nt, RNAi
auacucacuacgccaaaucuu

SEQ ID NO: 24376 - RNA, 21 nt, RNAi
uuuaugagugaugcgguuuag

SEQ ID NO: 24377 - DNA, 21 bp, Homo sapiens
aatactcactacgccaaatcg

SEQ ID NO: 24378 - RNA, 21 nt, RNAi
uacucacuacgccaaaucguu

SEQ ID NO: 24379 - RNA, 21 nt, RNAi
uuaugagugaugcgguuuagc

SEQ ID NO: 24380 - DNA, 21 bp, Homo sapiens
aaagctagaaaccagtgcctg

SEQ ID NO: 24381 - RNA, 21 nt, RNAi
agcuagaaaccagugccuguu

SEQ ID NO: 24382 - RNA, 21 nt, RNAi
uuucgaucuuuggucacggac

SEQ ID NO: 24383 - DNA, 21 bp, Homo sapiens
aagctagaaaccagtgcctga

SEQ ID NO: 24384 - RNA, 21 nt, RNAi
gcuagaaaccagugccugauu

SEQ ID NO: 24385 - RNA, 21 nt, RNAi
uucgaucuuuggucacggacu

SEQ ID NO: 24386 - DNA, 21 bp, Homo sapiens
aaaccagtgcctgaaagaaac

SEQ ID NO: 24387 - RNA, 21 nt, RNAi
accagugccugaaagaaacuu

SEQ ID NO: 24388 - RNA, 21 nt, RNAi
uuuggucacggacuuucuuug

SEQ ID NO: 24389 - DNA, 21 bp, Homo sapiens
aaccagtgcctgaaagaaact

SEQ ID NO: 24390 - RNA, 21 nt, RNAi
ccagugccugaaagaaacuuu

SEQ ID NO: 24391 - RNA, 21 nt, RNAi
uuggucacggacuuucuuuga

SEQ ID NO: 24392 - DNA, 21 bp, Homo sapiens
aataccagtaaattcaacagg

SEQ ID NO: 24393 - RNA, 21 nt, RNAi
uaccaguaaauucaacagguu

SEQ ID NO: 24394 - RNA, 21 nt, RNAi
uuauggucauuuaaguugucc

SEQ ID NO: 24395 - DNA, 21 bp, Homo sapiens
aaattcaacaggaacagacaa

SEQ ID NO: 24396 - RNA, 21 nt, RNAi
auucaacaggaacagacaauu

SEQ ID NO: 24397 - RNA, 21 nt, RNAi
uuuaaguuguccuugucuguu

SEQ ID NO: 24398 - DNA, 21 bp, Homo sapiens
aattcaacaggaacagacaag

SEQ ID NO: 24399 - RNA, 21 nt, RNAi
uucaacaggaacagacaaguu

SEQ ID NO: 24400 - RNA, 21 nt, RNAi
uuaaguuguccuugucuguuc

SEQ ID NO: 24401 - DNA, 21 bp, Homo sapiens
aacaggaacagacaagttaat

SEQ ID NO: 24402 - RNA, 21 nt, RNAi
caggaacagacaaguuaauuu

SEQ ID NO: 24403 - RNA, 21 nt, RNAi
uuguccuugucuguucaauua

SEQ ID NO: 24404 - DNA, 21 bp, Homo sapiens
aacagacaagttaatgacagg

SEQ ID NO: 24405 - RNA, 21 nt, RNAi
cagacaaguuaaugacagguu

SEQ ID NO: 24406 - RNA, 21 nt, RNAi
uugucuguucaauuacugucc

SEQ ID NO: 24407 - DNA, 21 bp, Homo sapiens
aagttaatgacaggtgtcatt

SEQ ID NO: 24408 - RNA, 21 nt, RNAi
guuaaugacaggugucauuuu

SEQ ID NO: 24409 - RNA, 21 nt, RNAi
uucaauuacuguccacaguaa

SEQ ID NO: 24410 - DNA, 21 bp, Homo sapiens
aattggatctcaaccaagcac

SEQ ID NO: 24411 - RNA, 21 nt, RNAi
uuggaucucaaccaagcacuu

SEQ ID NO: 24412 - RNA, 21 nt, RNAi
uuaaccuagaguugguucgug

SEQ ID NO: 24413 - DNA, 21 bp, Homo sapiens
aaccaagcacatatggaggag

SEQ ID NO: 24414 - RNA, 21 nt, RNAi
ccaagcacauauggaggaguu

SEQ ID NO: 24415 - RNA, 21 nt, RNAi
uugguucguguauaccuccuc

SEQ ID NO: 24416 - DNA, 21 bp, Homo sapiens
aagcacatatggaggagactc

SEQ ID NO: 24417 - RNA, 21 nt, RNAi
gcacauauggaggagacucuu

SEQ ID NO: 24418 - RNA, 21 nt, RNAi
uucguguauaccuccucugag

SEQ ID NO: 24419 - DNA, 21 bp, Homo sapiens
aaggttatcactgtgctcacc

SEQ ID NO: 24420 - RNA, 21 nt, RNAi
gguuaucacugugcucaccuu

SEQ ID NO: 24421 - RNA, 21 nt, RNAi
uuccaauagugacacgagugg

SEQ ID NO: 24422 - DNA, 21 bp, Homo sapiens
aaagcttcactataatgtgac

SEQ ID NO: 24423 - RNA, 21 nt, RNAi
agcuucacuauaaugugacuu

SEQ ID NO: 24424 - RNA, 21 nt, RNAi
uuucgaagugauauuacacug

SEQ ID NO: 24425 - DNA, 21 bp, Homo sapiens
aagcttcactataatgtgact

SEQ ID NO: 24426 - RNA, 21 nt, RNAi
gcuucacuauaaugugacuuu

SEQ ID NO: 24427 - RNA, 21 nt, RNAi
uucgaagugauauuacacuga

SEQ ID NO: 24428 - DNA, 21 bp, Homo sapiens
aactagattagtgaatccaga

SEQ ID NO: 24429 - RNA, 21 nt, RNAi
cuagauuagugaauccagauu

SEQ ID NO: 24430 - RNA, 21 nt, RNAi
uugaucuaaucacuuaggucu

SEQ ID NO: 24431 - DNA, 21 bp, Homo sapiens
aatccagatcaactgttgaat

SEQ ID NO: 24432 - RNA, 21 nt, RNAi
uccagaucaacuguugaauuu

SEQ ID NO: 24433 - RNA, 21 nt, RNAi
uuaggucuaguugacaacuua

SEQ ID NO: 24434 - DNA, 21 bp, Homo sapiens
aaagaagcatgttgactttgt

SEQ ID NO: 24435 - RNA, 21 nt, RNAi
agaagcauguugacuuuguuu

SEQ ID NO: 24436 - RNA, 21 nt, RNAi
uuucuucguacaacugaaaca

SEQ ID NO: 24437 - DNA, 21 bp, Homo sapiens
aagaagcatgttgactttgta

SEQ ID NO: 24438 - RNA, 21 nt, RNAi
gaagcauguugacuuuguauu

SEQ ID NO: 24439 - RNA, 21 nt, RNAi
uucuucguacaacugaaacau

SEQ ID NO: 24440 - DNA, 21 bp, Homo sapiens
aagcatgttgactttgtacaa

SEQ ID NO: 24441 - RNA, 21 nt, RNAi
gcauguugacuuuguacaauu

SEQ ID NO: 24442 - RNA, 21 nt, RNAi
uucguacaacugaaacauguu

SEQ ID NO: 24443 - DNA, 21 bp, Homo sapiens
aagtgtcaaacacagtcagat

SEQ ID NO: 24444 - RNA, 21 nt, RNAi
gugucaaacacagucagauuu

SEQ ID NO: 24445 - RNA, 21 nt, RNAi
uucacaguuugugucagucua

SEQ ID NO: 24446 - DNA, 21 bp, Homo sapiens
aatttgaattagaagtgtgcc

SEQ ID NO: 24447 - RNA, 21 nt, RNAi
uuugaauuagaagugugccuu

SEQ ID NO: 24448 - RNA, 21 nt, RNAi
uuaaacuuaaucuucacacgg

SEQ ID NO: 24449 - DNA, 21 bp, Homo sapiens
aattagaagtgtgccagcttc

SEQ ID NO: 24450 - RNA, 21 nt, RNAi
uuagaagugugccagcuucuu

SEQ ID NO: 24451 - RNA, 21 nt, RNAi
uuaaucuucacacggucgaag

SEQ ID NO: 24452 - DNA, 21 bp, Homo sapiens
aaagattagtggaagacatcc

SEQ ID NO: 24453 - RNA, 21 nt, RNAi
agauuaguggaagacauccuu

SEQ ID NO: 24454 - RNA, 21 nt, RNAi
uuucuaaucaccuucuguagg

SEQ ID NO: 24455 - DNA, 21 bp, Homo sapiens
aagattagtggaagacatcct

SEQ ID NO: 24456 - RNA, 21 nt, RNAi
gauuaguggaagacauccuuu

SEQ ID NO: 24457 - RNA, 21 nt, RNAi
uucuaaucaccuucuguagga

SEQ ID NO: 24458 - DNA, 21 bp, Homo sapiens
aagacatcctatctagctgca

SEQ ID NO: 24459 - RNA, 21 nt, RNAi
gacauccuaucuagcugcauu

SEQ ID NO: 24460 - RNA, 21 nt, RNAi
uucuguaggauagaucgacgu

SEQ ID NO: 24461 - DNA, 21 bp, Homo sapiens
aattgatggattcttccatcc

SEQ ID NO: 24462 - RNA, 21 nt, RNAi
uugauggauucuuccauccuu

SEQ ID NO: 24463 - RNA, 21 nt, RNAi
uuaacuaccuaagaagguagg

SEQ ID NO: 24464 - DNA, 21 bp, Homo sapiens
aaagactgttatgatcgcttt

SEQ ID NO: 24465 - RNA, 21 nt, RNAi
agacuguuaugaucgcuuuuu

SEQ ID NO: 24466 - RNA, 21 nt, RNAi
uuucugacaauacuagcgaaa

SEQ ID NO: 24467 - DNA, 21 bp, Homo sapiens
aagactgttatgatcgctttg

SEQ ID NO: 24468 - RNA, 21 nt, RNAi
gacuguuaugaucgcuuuguu

SEQ ID NO: 24469 - RNA, 21 nt, RNAi
uucugacaauacuagcgaaac

SEQ ID NO: 24470 - DNA, 21 bp, Homo sapiens
aaagttcattggaactaccaa

SEQ ID NO: 24471 - RNA, 21 nt, RNAi
aguucauuggaacuaccaauu

SEQ ID NO: 24472 - RNA, 21 nt, RNAi
uuucaaguaaccuugaugguu

SEQ ID NO: 24473 - DNA, 21 bp, Homo sapiens
aagttcattggaactaccaac

SEQ ID NO: 24474 - RNA, 21 nt, RNAi
guucauuggaacuaccaacuu

SEQ ID NO: 24475 - RNA, 21 nt, RNAi
uucaaguaaccuugaugguug

SEQ ID NO: 24476 - DNA, 21 bp, Homo sapiens
aaagagctatcttaagaccaa

SEQ ID NO: 24477 - RNA, 21 nt, RNAi
agagcuaucuuaagaccaauu

SEQ ID NO: 24478 - RNA, 21 nt, RNAi
uuucucgauagaauucugguu

SEQ ID NO: 24479 - DNA, 21 bp, Homo sapiens
aagagctatcttaagaccaat

SEQ ID NO: 24480 - RNA, 21 nt, RNAi
gagcuaucuuaagaccaauuu

SEQ ID NO: 24481 - RNA, 21 nt, RNAi
uucucgauagaauucugguua

SEQ ID NO: 24482 - DNA, 21 bp, Homo sapiens
aagctcttaactatgtctctt

SEQ ID NO: 24483 - RNA, 21 nt, RNAi
gcucuuaacuaugucucuuuu

SEQ ID NO: 24484 - RNA, 21 nt, RNAi
uucgagaauugauacagagaa

SEQ ID NO: 24485 - DNA, 21 bp, Homo sapiens
caaataaacttgcaagaggac

SEQ ID NO: 24486 - RNA, 21 nt, RNAi
aauaaacuugcaagaggacuu

SEQ ID NO: 24487 - RNA, 21 nt, RNAi
uuuuauuugaacguucuccug

SEQ ID NO: 24488 - DNA, 21 bp, Homo sapiens
caagaggactatgaaagatta

SEQ ID NO: 24489 - RNA, 21 nt, RNAi
agaggacuaugaaagauuauu

SEQ ID NO: 24490 - RNA, 21 nt, RNAi
uuucuccugauacuuucuaau

SEQ ID NO: 24491 - DNA, 21 bp, Homo sapiens
caggtggctttgcaaaggtca

SEQ ID NO: 24492 - RNA, 21 nt, RNAi
gguggcuuugcaaaggucauu

SEQ ID NO: 24493 - RNA, 21 nt, RNAi
uuccaccgaaacguuuccagu

SEQ ID NO: 24494 - DNA, 21 bp, Homo sapiens
caaaggtcaaacttgcctgcc

SEQ ID NO: 24495 - RNA, 21 nt, RNAi
aaggucaaacuugccugccuu

SEQ ID NO: 24496 - RNA, 21 nt, RNAi
uuuuccaguuugaacggacgg

SEQ ID NO: 24497 - DNA, 21 bp, Homo sapiens
caaacttgcctgccatatcct

SEQ ID NO: 24498 - RNA, 21 nt, RNAi
aacuugccugccauauccuuu

SEQ ID NO: 24499 - RNA, 21 nt, RNAi
uuuugaacggacgguauagga

SEQ ID NO: 24500 - DNA, 21 bp, Homo sapiens
catatccttactggagagatg

SEQ ID NO: 24501 - RNA, 21 nt, RNAi
uauccuuacuggagagauguu

SEQ ID NO: 24502 - RNA, 21 nt, RNAi
uuauaggaaugaccucucuac

SEQ ID NO: 24503 - DNA, 21 bp, Homo sapiens
catcagcatatatgtcaactc

SEQ ID NO: 24504 - RNA, 21 nt, RNAi
ucagcauauaugucaacucuu

SEQ ID NO: 24505 - RNA, 21 nt, RNAi
uuagucguauauacaguugag

SEQ ID NO: 24506 - DNA, 21 bp, Homo sapiens
cagcatatatgtcaactctac

SEQ ID NO: 24507 - RNA, 21 nt, RNAi
gcauauaugucaacucuacuu

SEQ ID NO: 24508 - RNA, 21 nt, RNAi
uucguauauacaguugagaug

SEQ ID NO: 24509 - DNA, 21 bp, Homo sapiens
catatatgtcaactctaccat

SEQ ID NO: 24510 - RNA, 21 nt, RNAi
uauaugucaacucuaccauuu

SEQ ID NO: 24511 - RNA, 21 nt, RNAi
uuauauacaguugagauggua

SEQ ID NO: 24512 - DNA, 21 bp, Homo sapiens
caactctaccatgtgctagag

SEQ ID NO: 24513 - RNA, 21 nt, RNAi
acucuaccaugugcuagaguu

SEQ ID NO: 24514 - RNA, 21 nt, RNAi
uuugagaugguacacgaucuc

SEQ ID NO: 24515 - DNA, 21 bp, Homo sapiens
catgtgctagagacagccaac

SEQ ID NO: 24516 - RNA, 21 nt, RNAi
ugugcuagagacagccaacuu

SEQ ID NO: 24517 - RNA, 21 nt, RNAi
uuacacgaucucugucgguug

SEQ ID NO: 24518 - DNA, 21 bp, Homo sapiens
caggatcgcctgtcagaagag

SEQ ID NO: 24519 - RNA, 21 nt, RNAi
ggaucgccugucagaagaguu

SEQ ID NO: 24520 - RNA, 21 nt, RNAi
uuccuagcggacagucuucuc

SEQ ID NO: 24521 - DNA, 21 bp, Homo sapiens
cagatagtatctgctgttgct

SEQ ID NO: 24522 - RNA, 21 nt, RNAi
gauaguaucugcuguugcuuu

SEQ ID NO: 24523 - RNA, 21 nt, RNAi
uucuaucauagacgacaacga

SEQ ID NO: 24524 - DNA, 21 bp, Homo sapiens
caaggattaccatctacagac

SEQ ID NO: 24525 - RNA, 21 nt, RNAi
aggauuaccaucuacagacuu

SEQ ID NO: 24526 - RNA, 21 nt, RNAi
uuuccuaaugguagaugucug

SEQ ID NO: 24527 - DNA, 21 bp, Homo sapiens
cagcacctgagttaatacaag

SEQ ID NO: 24528 - RNA, 21 nt, RNAi
gcaccugaguuaauacaaguu

SEQ ID NO: 24529 - RNA, 21 nt, RNAi
uucguggacucaauuauguuc

SEQ ID NO: 24530 - DNA, 21 bp, Homo sapiens
cacctgagttaatacaaggca

SEQ ID NO: 24531 - RNA, 21 nt, RNAi
ccugaguuaauacaaggcauu

SEQ ID NO: 24532 - RNA, 21 nt, RNAi
uuggacucaauuauguuccgu

SEQ ID NO: 24533 - DNA, 21 bp, Homo sapiens
caaggcaaatcatatcttgga

SEQ ID NO: 24534 - RNA, 21 nt, RNAi
aggcaaaucauaucuuggauu

SEQ ID NO: 24535 - RNA, 21 nt, RNAi
uuuccguuuaguauagaaccu

SEQ ID NO: 24536 - DNA, 21 bp, Homo sapiens
caaatcatatcttggatcaga

SEQ ID NO: 24537 - RNA, 21 nt, RNAi
aaucauaucuuggaucagauu

SEQ ID NO: 24538 - RNA, 21 nt, RNAi
uuuuaguauagaaccuagucu

SEQ ID NO: 24539 - DNA, 21 bp, Homo sapiens
catatcttggatcagaggcag

SEQ ID NO: 24540 - RNA, 21 nt, RNAi
uaucuuggaucagaggcaguu

SEQ ID NO: 24541 - RNA, 21 nt, RNAi
uuauagaaccuagucuccguc

SEQ ID NO: 24542 - DNA, 21 bp, Homo sapiens
cagaggcagatgtttggagca

SEQ ID NO: 24543 - RNA, 21 nt, RNAi
gaggcagauguuuggagcauu

SEQ ID NO: 24544 - RNA, 21 nt, RNAi
uucuccgucuacaaaccucgu

SEQ ID NO: 24545 - DNA, 21 bp, Homo sapiens
caagaagattatgagaggaaa

SEQ ID NO: 24546 - RNA, 21 nt, RNAi
agaagauuaugagaggaaauu

SEQ ID NO: 24547 - RNA, 21 nt, RNAi
uuucuucuaauacucuccuuu

SEQ ID NO: 24548 - DNA, 21 bp, Homo sapiens
cagtagcattctgcttcttca

SEQ ID NO: 24549 - RNA, 21 nt, RNAi
guagcauucugcuucuucauu

SEQ ID NO: 24550 - RNA, 21 nt, RNAi
uucaucguaagacgaagaagu

SEQ ID NO: 24551 - DNA, 21 bp, Homo sapiens
cattctgcttcttcaacaaat

SEQ ID NO: 24552 - RNA, 21 nt, RNAi
uucugcuucuucaacaaauuu

SEQ ID NO: 24553 - RNA, 21 nt, RNAi
uuaagacgaagaaguuguuua

SEQ ID NO: 24554 - DNA, 21 bp, Homo sapiens
caacaaatgctgcaggtggac

SEQ ID NO: 24555 - RNA, 21 nt, RNAi
acaaaugcugcagguggacuu

SEQ ID NO: 24556 - RNA, 21 nt, RNAi
uuuguuuacgacguccaccug

SEQ ID NO: 24557 - DNA, 21 bp, Homo sapiens
caaagaaacggatttctatga

SEQ ID NO: 24558 - RNA, 21 nt, RNAi
aagaaacggauuucuaugauu

SEQ ID NO: 24559 - RNA, 21 nt, RNAi
uuuucuuugccuaaagauacu

SEQ ID NO: 24560 - DNA, 21 bp, Homo sapiens
catgcaagattacaactatcc

SEQ ID NO: 24561 - RNA, 21 nt, RNAi
ugcaagauuacaacuauccuu

SEQ ID NO: 24562 - RNA, 21 nt, RNAi
uuacguucuaauguugauagg

SEQ ID NO: 24563 - DNA, 21 bp, Homo sapiens
caagattacaactatcctgtt

SEQ ID NO: 24564 - RNA, 21 nt, RNAi
agauuacaacuauccuguuuu

SEQ ID NO: 24565 - RNA, 21 nt, RNAi
uuucuaauguugauaggacaa

SEQ ID NO: 24566 - DNA, 21 bp, Homo sapiens
caactatcctgttgagtggca

SEQ ID NO: 24567 - RNA, 21 nt, RNAi
acuauccuguugaguggcauu

SEQ ID NO: 24568 - RNA, 21 nt, RNAi
uuugauaggacaacucaccgu

SEQ ID NO: 24569 - DNA, 21 bp, Homo sapiens
cacctcgatgatgattgcgta

SEQ ID NO: 24570 - RNA, 21 nt, RNAi
ccucgaugaugauugcguauu

SEQ ID NO: 24571 - RNA, 21 nt, RNAi
uuggagcuacuacuaacgcau

SEQ ID NO: 24572 - DNA, 21 bp, Homo sapiens
cagaactttctgtacatcaca

SEQ ID NO: 24573 - RNA, 21 nt, RNAi
gaacuuucuguacaucacauu

SEQ ID NO: 24574 - RNA, 21 nt, RNAi
uucuugaaagacauguagugu

SEQ ID NO: 24575 - DNA, 21 bp, Homo sapiens
catcacagaaacaacaggcaa

SEQ ID NO: 24576 - RNA, 21 nt, RNAi
ucacagaaacaacaggcaauu

SEQ ID NO: 24577 - RNA, 21 nt, RNAi
uuagugucuuuguuguccguu

SEQ ID NO: 24578 - DNA, 21 bp, Homo sapiens
cacagaaacaacaggcaaaca

SEQ ID NO: 24579 - RNA, 21 nt, RNAi
cagaaacaacaggcaaacauu

SEQ ID NO: 24580 - RNA, 21 nt, RNAi
uugucuuuguuguccguuugu

SEQ ID NO: 24581 - DNA, 21 bp, Homo sapiens
cagaaacaacaggcaaacaat

SEQ ID NO: 24582 - RNA, 21 nt, RNAi
gaaacaacaggcaaacaauuu

SEQ ID NO: 24583 - RNA, 21 nt, RNAi
uucuuuguuguccguuuguua

SEQ ID NO: 24584 - DNA, 21 bp, Homo sapiens
caacaggcaaacaatggagga

SEQ ID NO: 24585 - RNA, 21 nt, RNAi
acaggcaaacaauggaggauu

SEQ ID NO: 24586 - RNA, 21 nt, RNAi
uuuguccguuuguuaccuccu

SEQ ID NO: 24587 - DNA, 21 bp, Homo sapiens
caggcaaacaatggaggattt

SEQ ID NO: 24588 - RNA, 21 nt, RNAi
ggcaaacaauggaggauuuuu

SEQ ID NO: 24589 - RNA, 21 nt, RNAi
uuccguuuguuaccuccuaaa

SEQ ID NO: 24590 - DNA, 21 bp, Homo sapiens
caatggaggatttaatttcac

SEQ ID NO: 24591 - RNA, 21 nt, RNAi
auggaggauuuaauuucacuu

SEQ ID NO: 24592 - RNA, 21 nt, RNAi
uuuaccuccuaaauuaaagug

SEQ ID NO: 24593 - DNA, 21 bp, Homo sapiens
cactgtggcagtatgatcacc

SEQ ID NO: 24594 - RNA, 21 nt, RNAi
cuguggcaguaugaucaccuu

SEQ ID NO: 24595 - RNA, 21 nt, RNAi
uugacaccgucauacuagugg

SEQ ID NO: 24596 - DNA, 21 bp, Homo sapiens
cagtatgatcacctcacggct

SEQ ID NO: 24597 - RNA, 21 nt, RNAi
guaugaucaccucacggcuuu

SEQ ID NO: 24598 - RNA, 21 nt, RNAi
uucauacuaguggagugccga

SEQ ID NO: 24599 - DNA, 21 bp, Homo sapiens
cacctcacggctacctatctt

SEQ ID NO: 24600 - RNA, 21 nt, RNAi
ccucacggcuaccuaucuuuu

SEQ ID NO: 24601 - RNA, 21 nt, RNAi
uuggagugccgauggauagaa

SEQ ID NO: 24602 - DNA, 21 bp, Homo sapiens
cacggctacctatcttctgct

SEQ ID NO: 24603 - RNA, 21 nt, RNAi
cggcuaccuaucuucugcuuu

SEQ ID NO: 24604 - RNA, 21 nt, RNAi
uugccgauggauagaagacga

SEQ ID NO: 24605 - DNA, 21 bp, Homo sapiens
cagttcgtttaaggctttctt

SEQ ID NO: 24606 - RNA, 21 nt, RNAi
guucguuuaaggcuuucuuuu

SEQ ID NO: 24607 - RNA, 21 nt, RNAi
uucaagcaaauuccgaaagaa

SEQ ID NO: 24608 - DNA, 21 bp, Homo sapiens
cattcacagacatcaagtcaa

SEQ ID NO: 24609 - RNA, 21 nt, RNAi
uucacagacaucaagucaauu

SEQ ID NO: 24610 - RNA, 21 nt, RNAi
uuaagugucuguaguucaguu

SEQ ID NO: 24611 - DNA, 21 bp, Homo sapiens
cacagacatcaagtcaaataa

SEQ ID NO: 24612 - RNA, 21 nt, RNAi
cagacaucaagucaaauaauu

SEQ ID NO: 24613 - RNA, 21 nt, RNAi
uugucuguaguucaguuuauu

SEQ ID NO: 24614 - DNA, 21 bp, Homo sapiens
catcaagtcaaataattggag

SEQ ID NO: 24615 - RNA, 21 nt, RNAi
ucaagucaaauaauuggaguu

SEQ ID NO: 24616 - RNA, 21 nt, RNAi
uuaguucaguuuauuaaccuc

SEQ ID NO: 24617 - DNA, 21 bp, Homo sapiens
caagtcaaataattggagtct

SEQ ID NO: 24618 - RNA, 21 nt, RNAi
agucaaauaauuggagucuuu

SEQ ID NO: 24619 - RNA, 21 nt, RNAi
uuucaguuuauuaaccucaga

SEQ ID NO: 24620 - DNA, 21 bp, Homo sapiens
caaataattggagtctggaag

SEQ ID NO: 24621 - RNA, 21 nt, RNAi
aauaauuggagucuggaaguu

SEQ ID NO: 24622 - RNA, 21 nt, RNAi
uuuuauuaaccucagaccuuc

SEQ ID NO: 24623 - DNA, 21 bp, Homo sapiens
catcacagtttaccaagtact

SEQ ID NO: 24624 - RNA, 21 nt, RNAi
ucacaguuuaccaaguacuuu

SEQ ID NO: 24625 - RNA, 21 nt, RNAi
uuagugucaaaugguucauga

SEQ ID NO: 24626 - DNA, 21 bp, Homo sapiens
cacagtttaccaagtactgga

SEQ ID NO: 24627 - RNA, 21 nt, RNAi
caguuuaccaaguacuggauu

SEQ ID NO: 24628 - RNA, 21 nt, RNAi
uugucaaaugguucaugaccu

SEQ ID NO: 24629 - DNA, 21 bp, Homo sapiens
cagtttaccaagtactggaca

SEQ ID NO: 24630 - RNA, 21 nt, RNAi
guuuaccaaguacuggacauu

SEQ ID NO: 24631 - RNA, 21 nt, RNAi
uucaaaugguucaugaccugu

SEQ ID NO: 24632 - DNA, 21 bp, Homo sapiens
caagtactggacagaatcaaa

SEQ ID NO: 24633 - RNA, 21 nt, RNAi
aguacuggacagaaucaaauu

SEQ ID NO: 24634 - RNA, 21 nt, RNAi
uuucaugaccugucuuaguuu

SEQ ID NO: 24635 - DNA, 21 bp, Homo sapiens
cattaactccagccttatgca

SEQ ID NO: 24636 - RNA, 21 nt, RNAi
uuaacuccagccuuaugcauu

SEQ ID NO: 24637 - RNA, 21 nt, RNAi
uuaauugaggucggaauacgu

SEQ ID NO: 24638 - DNA, 21 bp, Homo sapiens
cagccttatgcagaacacctg

SEQ ID NO: 24639 - RNA, 21 nt, RNAi
gccuuaugcagaacaccuguu

SEQ ID NO: 24640 - RNA, 21 nt, RNAi
uucggaauacgucuuguggac

SEQ ID NO: 24641 - DNA, 21 bp, Homo sapiens
cagaacacctgcaaataaatt

SEQ ID NO: 24642 - RNA, 21 nt, RNAi
gaacaccugcaaauaaauuuu

SEQ ID NO: 24643 - RNA, 21 nt, RNAi
uucuuguggacguuuauuuaa

SEQ ID NO: 24644 - DNA, 21 bp, Homo sapiens
caaagactccagttaataaga

SEQ ID NO: 24645 - RNA, 21 nt, RNAi
aagacuccaguuaauaagauu

SEQ ID NO: 24646 - RNA, 21 nt, RNAi
uuuucugaggucaauuauucu

SEQ ID NO: 24647 - DNA, 21 bp, Homo sapiens
cagttaataagaaccagcata

SEQ ID NO: 24648 - RNA, 21 nt, RNAi
guuaauaagaaccagcauauu

SEQ ID NO: 24649 - RNA, 21 nt, RNAi
uucaauuauucuuggucguau

SEQ ID NO: 24650 - DNA, 21 bp, Homo sapiens
cagcataagagagaaatactc

SEQ ID NO: 24651 - RNA, 21 nt, RNAi
gcauaagagagaaauacucuu

SEQ ID NO: 24652 - RNA, 21 nt, RNAi
uucguauucucucuuuaugag

SEQ ID NO: 24653 - DNA, 21 bp, Homo sapiens
cataagagagaaatactcact

SEQ ID NO: 24654 - RNA, 21 nt, RNAi
uaagagagaaauacucacuuu

SEQ ID NO: 24655 - RNA, 21 nt, RNAi
uuauucucucuuuaugaguga

SEQ ID NO: 24656 - DNA, 21 bp, Homo sapiens
cactacgccaaatcgttacac

SEQ ID NO: 24657 - RNA, 21 nt, RNAi
cuacgccaaaucguuacacuu

SEQ ID NO: 24658 - RNA, 21 nt, RNAi
uugaugcgguuuagcaaugug

SEQ ID NO: 24659 - DNA, 21 bp, Homo sapiens
cagtgcctgaaagaaactcca

SEQ ID NO: 24660 - RNA, 21 nt, RNAi
gugccugaaagaaacuccauu

SEQ ID NO: 24661 - RNA, 21 nt, RNAi
uucacggacuuucuuugaggu

SEQ ID NO: 24662 - DNA, 21 bp, Homo sapiens
cagtaaattcaacaggaacag

SEQ ID NO: 24663 - RNA, 21 nt, RNAi
guaaauucaacaggaacaguu

SEQ ID NO: 24664 - RNA, 21 nt, RNAi
uucauuuaaguuguccuuguc

SEQ ID NO: 24665 - DNA, 21 bp, Homo sapiens
caacaggaacagacaagttaa

SEQ ID NO: 24666 - RNA, 21 nt, RNAi
acaggaacagacaaguuaauu

SEQ ID NO: 24667 - RNA, 21 nt, RNAi
uuuguccuugucuguucaauu

SEQ ID NO: 24668 - DNA, 21 bp, Homo sapiens
caggaacagacaagttaatga

SEQ ID NO: 24669 - RNA, 21 nt, RNAi
ggaacagacaaguuaaugauu

SEQ ID NO: 24670 - RNA, 21 nt, RNAi
uuccuugucuguucaauuacu

SEQ ID NO: 24671 - DNA, 21 bp, Homo sapiens
cagacaagttaatgacaggtg

SEQ ID NO: 24672 - RNA, 21 nt, RNAi
gacaaguuaaugacagguguu

SEQ ID NO: 24673 - RNA, 21 nt, RNAi
uucuguucaauuacuguccac

SEQ ID NO: 24674 - DNA, 21 bp, Homo sapiens
caagttaatgacaggtgtcat

SEQ ID NO: 24675 - RNA, 21 nt, RNAi
aguuaaugacaggugucauuu

SEQ ID NO: 24676 - RNA, 21 nt, RNAi
uuucaauuacuguccacagua

SEQ ID NO: 24677 - DNA, 21 bp, Homo sapiens
cagtggaattggatctcaacc

SEQ ID NO: 24678 - RNA, 21 nt, RNAi
guggaauuggaucucaaccuu

SEQ ID NO: 24679 - RNA, 21 nt, RNAi
uucaccuuaaccuagaguugg

SEQ ID NO: 24680 - DNA, 21 bp, Homo sapiens
caaccaagcacatatggagga

SEQ ID NO: 24681 - RNA, 21 nt, RNAi
accaagcacauauggaggauu

SEQ ID NO: 24682 - RNA, 21 nt, RNAi
uuugguucguguauaccuccu

SEQ ID NO: 24683 - DNA, 21 bp, Homo sapiens
caagcacatatggaggagact

SEQ ID NO: 24684 - RNA, 21 nt, RNAi
agcacauauggaggagacuuu

SEQ ID NO: 24685 - RNA, 21 nt, RNAi
uuucguguauaccuccucuga

SEQ ID NO: 24686 - DNA, 21 bp, Homo sapiens
cacatatggaggagactccaa

SEQ ID NO: 24687 - RNA, 21 nt, RNAi
cauauggaggagacuccaauu

SEQ ID NO: 24688 - RNA, 21 nt, RNAi
uuguauaccuccucugagguu

SEQ ID NO: 24689 - DNA, 21 bp, Homo sapiens
cactgtgctcaccaggagcaa

SEQ ID NO: 24690 - RNA, 21 nt, RNAi
cugugcucaccaggagcaauu

SEQ ID NO: 24691 - RNA, 21 nt, RNAi
uugacacgagugguccucguu

SEQ ID NO: 24692 - DNA, 21 bp, Homo sapiens
cagaagactaaagcttcacta

SEQ ID NO: 24693 - RNA, 21 nt, RNAi
gaagacuaaagcuucacuauu

SEQ ID NO: 24694 - RNA, 21 nt, RNAi
uucuucugauuucgaagugau

SEQ ID NO: 24695 - DNA, 21 bp, Homo sapiens
cactataatgtgactacaact

SEQ ID NO: 24696 - RNA, 21 nt, RNAi
cuauaaugugacuacaacuuu

SEQ ID NO: 24697 - RNA, 21 nt, RNAi
uugauauuacacugauguuga

SEQ ID NO: 24698 - DNA, 21 bp, Homo sapiens
caactagattagtgaatccag

SEQ ID NO: 24699 - RNA, 21 nt, RNAi
acuagauuagugaauccaguu

SEQ ID NO: 24700 - RNA, 21 nt, RNAi
uuugaucuaaucacuuagguc

SEQ ID NO: 24701 - DNA, 21 bp, Homo sapiens
cagatcaactgttgaatgaaa

SEQ ID NO: 24702 - RNA, 21 nt, RNAi
gaucaacuguugaaugaaauu

SEQ ID NO: 24703 - RNA, 21 nt, RNAi
uucuaguugacaacuuacuuu

SEQ ID NO: 24704 - DNA, 21 bp, Homo sapiens
caaagaagcatgttgactttg

SEQ ID NO: 24705 - RNA, 21 nt, RNAi
aagaagcauguugacuuuguu

SEQ ID NO: 24706 - RNA, 21 nt, RNAi
uuuucuucguacaacugaaac

SEQ ID NO: 24707 - DNA, 21 bp, Homo sapiens
cactgaagtgtcaaacacagt

SEQ ID NO: 24708 - RNA, 21 nt, RNAi
cugaagugucaaacacaguuu

SEQ ID NO: 24709 - RNA, 21 nt, RNAi
uugacuucacaguuuguguca

SEQ ID NO: 24710 - DNA, 21 bp, Homo sapiens
caatttgaattagaagtgtgc

SEQ ID NO: 24711 - RNA, 21 nt, RNAi
auuugaauuagaagugugcuu

SEQ ID NO: 24712 - RNA, 21 nt, RNAi
uuuaaacuuaaucuucacacg

SEQ ID NO: 24713 - DNA, 21 bp, Homo sapiens
catcctatctagctgcaaggt

SEQ ID NO: 24714 - RNA, 21 nt, RNAi
uccuaucuagcugcaagguuu

SEQ ID NO: 24715 - RNA, 21 nt, RNAi
uuaggauagaucgacguucca

SEQ ID NO: 24716 - DNA, 21 bp, Homo sapiens
caaggtataattgatggattc

SEQ ID NO: 24717 - RNA, 21 nt, RNAi
agguauaauugauggauucuu

SEQ ID NO: 24718 - RNA, 21 nt, RNAi
uuuccauauuaacuaccuaag

SEQ ID NO: 24719 - DNA, 21 bp, Homo sapiens
catcctgccggatgagtgtgg

SEQ ID NO: 24720 - RNA, 21 nt, RNAi
uccugccggaugagugugguu

SEQ ID NO: 24721 - RNA, 21 nt, RNAi
uuaggacggccuacucacacc

SEQ ID NO: 24722 - DNA, 21 bp, Homo sapiens
cagcctacataaagactgtta

SEQ ID NO: 24723 - RNA, 21 nt, RNAi
gccuacauaaagacuguuauu

SEQ ID NO: 24724 - RNA, 21 nt, RNAi
uucggauguauuucugacaau

SEQ ID NO: 24725 - DNA, 21 bp, Homo sapiens
cataaagactgttatgatcgc

SEQ ID NO: 24726 - RNA, 21 nt, RNAi
uaaagacuguuaugaucgcuu

SEQ ID NO: 24727 - RNA, 21 nt, RNAi
uuauuucugacaauacuagcg

SEQ ID NO: 24728 - DNA, 21 bp, Homo sapiens
cattggaactaccaacttgtt

SEQ ID NO: 24729 - RNA, 21 nt, RNAi
uuggaacuaccaacuuguuuu

SEQ ID NO: 24730 - RNA, 21 nt, RNAi
uuaaccuugaugguugaacaa

SEQ ID NO: 24731 - DNA, 21 bp, Homo sapiens
caacttgtttctaaagagcta

SEQ ID NO: 24732 - RNA, 21 nt, RNAi
acuuguuucuaaagagcuauu

SEQ ID NO: 24733 - RNA, 21 nt, RNAi
uuugaacaaagauuucucgau

SEQ ID NO: 24734 - DNA, 21 bp, Homo sapiens
catctgtcattatgttactgt

SEQ ID NO: 24735 - RNA, 21 nt, RNAi
ucugucauuauguuacuguuu

SEQ ID NO: 24736 - RNA, 21 nt, RNAi
uuagacaguaauacaaugaca

SEQ ID NO: 24737 - DNA, 21 bp, Homo sapiens
cacttccatatgtgaatgtaa

SEQ ID NO: 24738 - RNA, 21 nt, RNAi
cuuccauaugugaauguaauu

SEQ ID NO: 24739 - RNA, 21 nt, RNAi
uugaagguauacacuuacauu

SEQ ID NO: 24740 - DNA, 21 bp, Homo sapiens
catatgtgaatgtaagctctt

SEQ ID NO: 24741 - RNA, 21 nt, RNAi
uaugugaauguaagcucuuuu

SEQ ID NO: 24742 - RNA, 21 nt, RNAi
uuauacacuuacauucgagaa

SEQ ID NO: 24743 - DNA, 21 bp, Homo sapiens
gattcttaggaacgccgtacc

SEQ ID NO: 24744 - RNA, 21 nt, RNAi
uucuuaggaacgccguaccuu

SEQ ID NO: 24745 - RNA, 21 nt, RNAi
uuaagaauccuugcggcaugg

SEQ ID NO: 24746 - DNA, 21 bp, Homo sapiens
gaggactatgaaagattatga

SEQ ID NO: 24747 - RNA, 21 nt, RNAi
ggacuaugaaagauuaugauu

SEQ ID NO: 24748 - RNA, 21 nt, RNAi
uuccugauacuuucuaauacu

SEQ ID NO: 24749 - DNA, 21 bp, Homo sapiens
gacaggtggctttgcaaaggt

SEQ ID NO: 24750 - RNA, 21 nt, RNAi
cagguggcuuugcaaagguuu

SEQ ID NO: 24751 - RNA, 21 nt, RNAi
uuguccaccgaaacguuucca

SEQ ID NO: 24752 - DNA, 21 bp, Homo sapiens
gagattgaggccttgaagaac

SEQ ID NO: 24753 - RNA, 21 nt, RNAi
gauugaggccuugaagaacuu

SEQ ID NO: 24754 - RNA, 21 nt, RNAi
uucuaacuccggaacuucuug

SEQ ID NO: 24755 - DNA, 21 bp, Homo sapiens
gattgaggccttgaagaacct

SEQ ID NO: 24756 - RNA, 21 nt, RNAi
uugaggccuugaagaaccuuu

SEQ ID NO: 24757 - RNA, 21 nt, RNAi
uuaacuccggaacuucuugga

SEQ ID NO: 24758 - DNA, 21 bp, Homo sapiens
gaggccttgaagaacctgaga

SEQ ID NO: 24759 - RNA, 21 nt, RNAi
ggccuugaagaaccugagauu

SEQ ID NO: 24760 - RNA, 21 nt, RNAi
uuccggaacuucuuggacucu

SEQ ID NO: 24761 - DNA, 21 bp, Homo sapiens
gaagaacctgagacatcagca

SEQ ID NO: 24762 - RNA, 21 nt, RNAi
agaaccugagacaucagcauu

SEQ ID NO: 24763 - RNA, 21 nt, RNAi
uuucuuggacucuguagucgu

SEQ ID NO: 24764 - DNA, 21 bp, Homo sapiens
gaacctgagacatcagcatat

SEQ ID NO: 24765 - RNA, 21 nt, RNAi
accugagacaucagcauauuu

SEQ ID NO: 24766 - RNA, 21 nt, RNAi
uuuggacucuguagucguaua

SEQ ID NO: 24767 - DNA, 21 bp, Homo sapiens
gagacatcagcatatatgtca

SEQ ID NO: 24768 - RNA, 21 nt, RNAi
gacaucagcauauaugucauu

SEQ ID NO: 24769 - RNA, 21 nt, RNAi
uucuguagucguauauacagu

SEQ ID NO: 24770 - DNA, 21 bp, Homo sapiens
gacatcagcatatatgtcaac

SEQ ID NO: 24771 - RNA, 21 nt, RNAi
caucagcauauaugucaacuu

SEQ ID NO: 24772 - RNA, 21 nt, RNAi
uuguagucguauauacaguug

SEQ ID NO: 24773 - DNA, 21 bp, Homo sapiens
gaggagagctgtttgactata

SEQ ID NO: 24774 - RNA, 21 nt, RNAi
ggagagcuguuugacuauauu

SEQ ID NO: 24775 - RNA, 21 nt, RNAi
uuccucucgacaaacugauau

SEQ ID NO: 24776 - DNA, 21 bp, Homo sapiens
gagagctgtttgactatataa

SEQ ID NO: 24777 - RNA, 21 nt, RNAi
gagcuguuugacuauauaauu

SEQ ID NO: 24778 - RNA, 21 nt, RNAi
uucucgacaaacugauauauu

SEQ ID NO: 24779 - DNA, 21 bp, Homo sapiens
gatcgcctgtcagaagaggag

SEQ ID NO: 24780 - RNA, 21 nt, RNAi
ucgccugucagaagaggaguu

SEQ ID NO: 24781 - RNA, 21 nt, RNAi
uuagcggacagucuucuccuc

SEQ ID NO: 24782 - DNA, 21 bp, Homo sapiens
gatagtatctgctgttgctta

SEQ ID NO: 24783 - RNA, 21 nt, RNAi
uaguaucugcuguugcuuauu

SEQ ID NO: 24784 - RNA, 21 nt, RNAi
uuaucauagacgacaacgaau

SEQ ID NO: 24785 - DNA, 21 bp, Homo sapiens
gattgactttggtctctgtgc

SEQ ID NO: 24786 - RNA, 21 nt, RNAi
uugacuuuggucucugugcuu

SEQ ID NO: 24787 - RNA, 21 nt, RNAi
uuaacugaaaccagagacacg

SEQ ID NO: 24788 - DNA, 21 bp, Homo sapiens
gattaccatctacagacatgc

SEQ ID NO: 24789 - RNA, 21 nt, RNAi
uuaccaucuacagacaugcuu

SEQ ID NO: 24790 - RNA, 21 nt, RNAi
uuaaugguagaugucuguacg

SEQ ID NO: 24791 - DNA, 21 bp, Homo sapiens
gagtctggcttatgcagcacc

SEQ ID NO: 24792 - RNA, 21 nt, RNAi
gucuggcuuaugcagcaccuu

SEQ ID NO: 24793 - RNA, 21 nt, RNAi
uucagaccgaauacgucgugg

SEQ ID NO: 24794 - DNA, 21 bp, Homo sapiens
gagttaatacaaggcaaatca

SEQ ID NO: 24795 - RNA, 21 nt, RNAi
guuaauacaaggcaaaucauu

SEQ ID NO: 24796 - RNA, 21 nt, RNAi
uucaauuauguuccguuuagu

SEQ ID NO: 24797 - DNA, 21 bp, Homo sapiens
gatcagaggcagatgtttgga

SEQ ID NO: 24798 - RNA, 21 nt, RNAi
ucagaggcagauguuuggauu

SEQ ID NO: 24799 - RNA, 21 nt, RNAi
uuagucuccgucuacaaaccu

SEQ ID NO: 24800 - DNA, 21 bp, Homo sapiens
gaggcagatgtttggagcatg

SEQ ID NO: 24801 - RNA, 21 nt, RNAi
ggcagauguuuggagcauguu

SEQ ID NO: 24802 - RNA, 21 nt, RNAi
uuccgucuacaaaccucguac

SEQ ID NO: 24803 - DNA, 21 bp, Homo sapiens
gatttctaccatttgatgatg

SEQ ID NO: 24804 - RNA, 21 nt, RNAi
uuucuaccauuugaugauguu

SEQ ID NO: 24805 - RNA, 21 nt, RNAi
uuaaagaugguaaacuacuac

SEQ ID NO: 24806 - DNA, 21 bp, Homo sapiens
gatgatgataatgtaatggct

SEQ ID NO: 24807 - RNA, 21 nt, RNAi
ugaugauaauguaauggcuuu

SEQ ID NO: 24808 - RNA, 21 nt, RNAi
uuacuacuauuacauuaccga

SEQ ID NO: 24809 - DNA, 21 bp, Homo sapiens
gatcatgcaagattacaacta

SEQ ID NO: 24810 - RNA, 21 nt, RNAi
ucaugcaagauuacaacuauu

SEQ ID NO: 24811 - RNA, 21 nt, RNAi
uuaguacguucuaauguugau

SEQ ID NO: 24812 - DNA, 21 bp, Homo sapiens
gattacaactatcctgttgag

SEQ ID NO: 24813 - RNA, 21 nt, RNAi
uuacaacuauccuguugaguu

SEQ ID NO: 24814 - RNA, 21 nt, RNAi
uuaauguugauaggacaacuc

SEQ ID NO: 24815 - DNA, 21 bp, Homo sapiens
gagtggcaaagcaagaatcct

SEQ ID NO: 24816 - RNA, 21 nt, RNAi
guggcaaagcaagaauccuuu

SEQ ID NO: 24817 - RNA, 21 nt, RNAi
uucaccguuucguucuuagga

SEQ ID NO: 24818 - DNA, 21 bp, Homo sapiens
gatgatgattgcgtaacagaa

SEQ ID NO: 24819 - RNA, 21 nt, RNAi
ugaugauugcguaacagaauu

SEQ ID NO: 24820 - RNA, 21 nt, RNAi
uuacuacuaacgcauugucuu

SEQ ID NO: 24821 - DNA, 21 bp, Homo sapiens
gatgattgcgtaacagaactt

SEQ ID NO: 24822 - RNA, 21 nt, RNAi
ugauugcguaacagaacuuuu

SEQ ID NO: 24823 - RNA, 21 nt, RNAi
uuacuaacgcauugucuugaa

SEQ ID NO: 24824 - DNA, 21 bp, Homo sapiens
gattgcgtaacagaactttct

SEQ ID NO: 24825 - RNA, 21 nt, RNAi
uugcguaacagaacuuucuuu

SEQ ID NO: 24826 - RNA, 21 nt, RNAi
uuaacgcauugucuugaaaga

SEQ ID NO: 24827 - DNA, 21 bp, Homo sapiens
gaactttctgtacatcacaga

SEQ ID NO: 24828 - RNA, 21 nt, RNAi
acuuucuguacaucacagauu

SEQ ID NO: 24829 - RNA, 21 nt, RNAi
uuugaaagacauguagugucu

SEQ ID NO: 24830 - DNA, 21 bp, Homo sapiens
gaaacaacaggcaaacaatgg

SEQ ID NO: 24831 - RNA, 21 nt, RNAi
aacaacaggcaaacaaugguu

SEQ ID NO: 24832 - RNA, 21 nt, RNAi
uuuuguuguccguuuguuacc

SEQ ID NO: 24833 - DNA, 21 bp, Homo sapiens
gaggatttaatttcactgtgg

SEQ ID NO: 24834 - RNA, 21 nt, RNAi
ggauuuaauuucacugugguu

SEQ ID NO: 24835 - RNA, 21 nt, RNAi
uuccuaaauuaaagugacacc

SEQ ID NO: 24836 - DNA, 21 bp, Homo sapiens
gatttaatttcactgtggcag

SEQ ID NO: 24837 - RNA, 21 nt, RNAi
uuuaauuucacuguggcaguu

SEQ ID NO: 24838 - RNA, 21 nt, RNAi
uuaaauuaaagugacaccguc

SEQ ID NO: 24839 - DNA, 21 bp, Homo sapiens
gatcacctcacggctacctat

SEQ ID NO: 24840 - RNA, 21 nt, RNAi
ucaccucacggcuaccuauuu

SEQ ID NO: 24841 - RNA, 21 nt, RNAi
uuaguggagugccgauggaua

SEQ ID NO: 24842 - DNA, 21 bp, Homo sapiens
gacatcaagtcaaataattgg

SEQ ID NO: 24843 - RNA, 21 nt, RNAi
caucaagucaaauaauugguu

SEQ ID NO: 24844 - RNA, 21 nt, RNAi
uuguaguucaguuuauuaacc

SEQ ID NO: 24845 - DNA, 21 bp, Homo sapiens
gagtctggaagatgtgaccgc

SEQ ID NO: 24846 - RNA, 21 nt, RNAi
gucuggaagaugugaccgcuu

SEQ ID NO: 24847 - RNA, 21 nt, RNAi
uucagaccuucuacacuggcg

SEQ ID NO: 24848 - DNA, 21 bp, Homo sapiens
gaagatgtgaccgcaagtgat

SEQ ID NO: 24849 - RNA, 21 nt, RNAi
agaugugaccgcaagugauuu

SEQ ID NO: 24850 - RNA, 21 nt, RNAi
uuucuacacuggcguucacua

SEQ ID NO: 24851 - DNA, 21 bp, Homo sapiens
gatgtgaccgcaagtgataaa

SEQ ID NO: 24852 - RNA, 21 nt, RNAi
ugugaccgcaagugauaaauu

SEQ ID NO: 24853 - RNA, 21 nt, RNAi
uuacacuggcguucacuauuu

SEQ ID NO: 24854 - DNA, 21 bp, Homo sapiens
gactatgattggtgtgaagat

SEQ ID NO: 24855 - RNA, 21 nt, RNAi
cuaugauuggugugaagauuu

SEQ ID NO: 24856 - RNA, 21 nt, RNAi
uugauacuaaccacacuucua

SEQ ID NO: 24857 - DNA, 21 bp, Homo sapiens
gattggtgtgaagatgattta

SEQ ID NO: 24858 - RNA, 21 nt, RNAi
uuggugugaagaugauuuauu

SEQ ID NO: 24859 - RNA, 21 nt, RNAi
uuaaccacacuucuacuaaau

SEQ ID NO: 24860 - DNA, 21 bp, Homo sapiens
gaagatgatttatcaacaggt

SEQ ID NO: 24861 - RNA, 21 nt, RNAi
agaugauuuaucaacagguuu

SEQ ID NO: 24862 - RNA, 21 nt, RNAi
uuucuacuaaauaguugucca

SEQ ID NO: 24863 - DNA, 21 bp, Homo sapiens
gatgatttatcaacaggtgct

SEQ ID NO: 24864 - RNA, 21 nt, RNAi
ugauuuaucaacaggugcuuu

SEQ ID NO: 24865 - RNA, 21 nt, RNAi
uuacuaaauaguuguccacga

SEQ ID NO: 24866 - DNA, 21 bp, Homo sapiens
gatttatcaacaggtgctgct

SEQ ID NO: 24867 - RNA, 21 nt, RNAi
uuuaucaacaggugcugcuuu

SEQ ID NO: 24868 - RNA, 21 nt, RNAi
uuaaauaguuguccacgacga

SEQ ID NO: 24869 - DNA, 21 bp, Homo sapiens
gaacatcacagtttaccaagt

SEQ ID NO: 24870 - RNA, 21 nt, RNAi
acaucacaguuuaccaaguuu

SEQ ID NO: 24871 - RNA, 21 nt, RNAi
uuuguagugucaaaugguuca

SEQ ID NO: 24872 - DNA, 21 bp, Homo sapiens
gaagagtactttatgtttcct

SEQ ID NO: 24873 - RNA, 21 nt, RNAi
agaguacuuuauguuuccuuu

SEQ ID NO: 24874 - RNA, 21 nt, RNAi
uuucucaugaaauacaaagga

SEQ ID NO: 24875 - DNA, 21 bp, Homo sapiens
gagtactttatgtttcctgag

SEQ ID NO: 24876 - RNA, 21 nt, RNAi
guacuuuauguuuccugaguu

SEQ ID NO: 24877 - RNA, 21 nt, RNAi
uucaugaaauacaaaggacuc

SEQ ID NO: 24878 - DNA, 21 bp, Homo sapiens
gagccaaagactccagttaat

SEQ ID NO: 24879 - RNA, 21 nt, RNAi
gccaaagacuccaguuaauuu

SEQ ID NO: 24880 - RNA, 21 nt, RNAi
uucgguuucugaggucaauua

SEQ ID NO: 24881 - DNA, 21 bp, Homo sapiens
gactccagttaataagaacca

SEQ ID NO: 24882 - RNA, 21 nt, RNAi
cuccaguuaauaagaaccauu

SEQ ID NO: 24883 - RNA, 21 nt, RNAi
uugaggucaauuauucuuggu

SEQ ID NO: 24884 - DNA, 21 bp, Homo sapiens
gaaccagcataagagagaaat

SEQ ID NO: 24885 - RNA, 21 nt, RNAi
accagcauaagagagaaauuu

SEQ ID NO: 24886 - RNA, 21 nt, RNAi
uuuggucguauucucucuuua

SEQ ID NO: 24887 - DNA, 21 bp, Homo sapiens
gagagaaatactcactacgcc

SEQ ID NO: 24888 - RNA, 21 nt, RNAi
gagaaauacucacuacgccuu

SEQ ID NO: 24889 - RNA, 21 nt, RNAi
uucucuuuaugagugaugcgg

SEQ ID NO: 24890 - DNA, 21 bp, Homo sapiens
gagaaatactcactacgccaa

SEQ ID NO: 24891 - RNA, 21 nt, RNAi
gaaauacucacuacgccaauu

SEQ ID NO: 24892 - RNA, 21 nt, RNAi
uucuuuaugagugaugcgguu

SEQ ID NO: 24893 - DNA, 21 bp, Homo sapiens
gaaatactcactacgccaaat

SEQ ID NO: 24894 - RNA, 21 nt, RNAi
aauacucacuacgccaaauuu

SEQ ID NO: 24895 - RNA, 21 nt, RNAi
uuuuaugagugaugcgguuua

SEQ ID NO: 24896 - DNA, 21 bp, Homo sapiens
gaaaccagtgcctgaaagaaa

SEQ ID NO: 24897 - RNA, 21 nt, RNAi
aaccagugccugaaagaaauu

SEQ ID NO: 24898 - RNA, 21 nt, RNAi
uuuuggucacggacuuucuuu

SEQ ID NO: 24899 - DNA, 21 bp, Homo sapiens
gaacagacaagttaatgacag

SEQ ID NO: 24900 - RNA, 21 nt, RNAi
acagacaaguuaaugacaguu

SEQ ID NO: 24901 - RNA, 21 nt, RNAi
uuugucuguucaauuacuguc

SEQ ID NO: 24902 - DNA, 21 bp, Homo sapiens
gacaagttaatgacaggtgtc

SEQ ID NO: 24903 - RNA, 21 nt, RNAi
caaguuaaugacaggugucuu

SEQ ID NO: 24904 - RNA, 21 nt, RNAi
uuguucaauuacuguccacag

SEQ ID NO: 24905 - DNA, 21 bp, Homo sapiens
gaattggatctcaaccaagca

SEQ ID NO: 24906 - RNA, 21 nt, RNAi
auuggaucucaaccaagcauu

SEQ ID NO: 24907 - RNA, 21 nt, RNAi
uuuaaccuagaguugguucgu

SEQ ID NO: 24908 - DNA, 21 bp, Homo sapiens
gatctcaaccaagcacatatg

SEQ ID NO: 24909 - RNA, 21 nt, RNAi
ucucaaccaagcacauauguu

SEQ ID NO: 24910 - RNA, 21 nt, RNAi
uuagaguugguucguguauac

SEQ ID NO: 24911 - DNA, 21 bp, Homo sapiens
gataaggttatcactgtgctc

SEQ ID NO: 24912 - RNA, 21 nt, RNAi
uaagguuaucacugugcucuu

SEQ ID NO: 24913 - RNA, 21 nt, RNAi
uuauuccaauagugacacgag

SEQ ID NO: 24914 - DNA, 21 bp, Homo sapiens
gaagactaaagcttcactata

SEQ ID NO: 24915 - RNA, 21 nt, RNAi
agacuaaagcuucacuauauu

SEQ ID NO: 24916 - RNA, 21 nt, RNAi
uuucugauuucgaagugauau

SEQ ID NO: 24917 - DNA, 21 bp, Homo sapiens
gactaaagcttcactataatg

SEQ ID NO: 24918 - RNA, 21 nt, RNAi
cuaaagcuucacuauaauguu

SEQ ID NO: 24919 - RNA, 21 nt, RNAi
uugauuucgaagugauauuac

SEQ ID NO: 24920 - DNA, 21 bp, Homo sapiens
gactacaactagattagtgaa

SEQ ID NO: 24921 - RNA, 21 nt, RNAi
cuacaacuagauuagugaauu

SEQ ID NO: 24922 - RNA, 21 nt, RNAi
uugauguugaucuaaucacuu

SEQ ID NO: 24923 - DNA, 21 bp, Homo sapiens
gattagtgaatccagatcaac

SEQ ID NO: 24924 - RNA, 21 nt, RNAi
uuagugaauccagaucaacuu

SEQ ID NO: 24925 - RNA, 21 nt, RNAi
uuaaucacuuaggucuaguug

SEQ ID NO: 24926 - DNA, 21 bp, Homo sapiens
gaatccagatcaactgttgaa

SEQ ID NO: 24927 - RNA, 21 nt, RNAi
auccagaucaacuguugaauu

SEQ ID NO: 24928 - RNA, 21 nt, RNAi
uuuaggucuaguugacaacuu

SEQ ID NO: 24929 - DNA, 21 bp, Homo sapiens
gaagcatgttgactttgtaca

SEQ ID NO: 24930 - RNA, 21 nt, RNAi
agcauguugacuuuguacauu

SEQ ID NO: 24931 - RNA, 21 nt, RNAi
uuucguacaacugaaacaugu

SEQ ID NO: 24932 - DNA, 21 bp, Homo sapiens
gaagtgtcaaacacagtcaga

SEQ ID NO: 24933 - RNA, 21 nt, RNAi
agugucaaacacagucagauu

SEQ ID NO: 24934 - RNA, 21 nt, RNAi
uuucacaguuugugucagucu

SEQ ID NO: 24935 - DNA, 21 bp, Homo sapiens
gaaagtgacaatgcaatttga

SEQ ID NO: 24936 - RNA, 21 nt, RNAi
aagugacaaugcaauuugauu

SEQ ID NO: 24937 - RNA, 21 nt, RNAi
uuuucacuguuacguuaaacu

SEQ ID NO: 24938 - DNA, 21 bp, Homo sapiens
gaattagaagtgtgccagctt

SEQ ID NO: 24939 - RNA, 21 nt, RNAi
auuagaagugugccagcuuuu

SEQ ID NO: 24940 - RNA, 21 nt, RNAi
uuuaaucuucacacggucgaa

SEQ ID NO: 24941 - DNA, 21 bp, Homo sapiens
gattagtggaagacatcctat

SEQ ID NO: 24942 - RNA, 21 nt, RNAi
uuaguggaagacauccuauuu

SEQ ID NO: 24943 - RNA, 21 nt, RNAi
uuaaucaccuucuguaggaua

SEQ ID NO: 24944 - DNA, 21 bp, Homo sapiens
gaagacatcctatctagctgc

SEQ ID NO: 24945 - RNA, 21 nt, RNAi
agacauccuaucuagcugcuu

SEQ ID NO: 24946 - RNA, 21 nt, RNAi
uuucuguaggauagaucgacg

SEQ ID NO: 24947 - DNA, 21 bp, Homo sapiens
gacatcctatctagctgcaag

SEQ ID NO: 24948 - RNA, 21 nt, RNAi
cauccuaucuagcugcaaguu

SEQ ID NO: 24949 - RNA, 21 nt, RNAi
uuguaggauagaucgacguuc

SEQ ID NO: 24950 - DNA, 21 bp, Homo sapiens
gatggattcttccatcctgcc

SEQ ID NO: 24951 - RNA, 21 nt, RNAi
uggauucuuccauccugccuu

SEQ ID NO: 24952 - RNA, 21 nt, RNAi
uuaccuaagaagguaggacgg

SEQ ID NO: 24953 - DNA, 21 bp, Homo sapiens
gattcttccatcctgccggat

SEQ ID NO: 24954 - RNA, 21 nt, RNAi
uucuuccauccugccggauuu

SEQ ID NO: 24955 - RNA, 21 nt, RNAi
uuaagaagguaggacggccua

SEQ ID NO: 24956 - DNA, 21 bp, Homo sapiens
gatacagcctacataaagact

SEQ ID NO: 24957 - RNA, 21 nt, RNAi
uacagccuacauaaagacuuu

SEQ ID NO: 24958 - RNA, 21 nt, RNAi
uuaugucggauguauuucuga

SEQ ID NO: 24959 - DNA, 21 bp, Homo sapiens
gactgttatgatcgctttgat

SEQ ID NO: 24960 - RNA, 21 nt, RNAi
cuguuaugaucgcuuugauuu

SEQ ID NO: 24961 - RNA, 21 nt, RNAi
uugacaauacuagcgaaacua

SEQ ID NO: 24962 - DNA, 21 bp, Homo sapiens
gaactaccaacttgtttctaa

SEQ ID NO: 24963 - RNA, 21 nt, RNAi
acuaccaacuuguuucuaauu

SEQ ID NO: 24964 - RNA, 21 nt, RNAi
uuugaugguugaacaaagauu

SEQ ID NO: 24965 - DNA, 21 bp, Homo sapiens
gagctatcttaagaccaatat

SEQ ID NO: 24966 - RNA, 21 nt, RNAi
gcuaucuuaagaccaauauuu

SEQ ID NO: 24967 - RNA, 21 nt, RNAi
uucgauagaauucugguuaua

SEQ ID NO: 24968 - DNA, 21 bp, Homo sapiens
gactttcttagattcacttcc

SEQ ID NO: 24969 - RNA, 21 nt, RNAi
cuuucuuagauucacuuccuu

SEQ ID NO: 24970 - RNA, 21 nt, RNAi
uugaaagaaucuaagugaagg

SEQ ID NO: 24971 - DNA, 21 bp, Homo sapiens
gattcacttccatatgtgaat

SEQ ID NO: 24972 - RNA, 21 nt, RNAi
uucacuuccauaugugaauuu

SEQ ID NO: 24973 - RNA, 21 nt, RNAi
uuaagugaagguauacacuua

SEQ ID NO: 24974 - DNA, 21 bp, Homo sapiens
gaatgtaagctcttaactatg

SEQ ID NO: 24975 - RNA, 21 nt, RNAi
auguaagcucuuaacuauguu

SEQ ID NO: 24976 - RNA, 21 nt, RNAi
uuuacauucgagaauugauac

SEQ ID NO: 24977 - DNA, 21 bp, Homo sapiens
taccagccgcgtctctcagga

SEQ ID NO: 24978 - RNA, 21 nt, RNAi
ccagccgcgucucucaggauu

SEQ ID NO: 24979 - RNA, 21 nt, RNAi
uuggucggcgcagagaguccu

SEQ ID NO: 24980 - DNA, 21 bp, Homo sapiens
taaacttgcaagaggactatg

SEQ ID NO: 24981 - RNA, 21 nt, RNAi
aacuugcaagaggacuauguu

SEQ ID NO: 24982 - RNA, 21 nt, RNAi
uuuugaacguucuccugauac

SEQ ID NO: 24983 - DNA, 21 bp, Homo sapiens
tatccttactggagagatggt

SEQ ID NO: 24984 - RNA, 21 nt, RNAi
uccuuacuggagagaugguuu

SEQ ID NO: 24985 - RNA, 21 nt, RNAi
uuaggaaugaccucucuacca

SEQ ID NO: 24986 - DNA, 21 bp, Homo sapiens
tactggagagatggtagctat

SEQ ID NO: 24987 - RNA, 21 nt, RNAi
cuggagagaugguagcuauuu

SEQ ID NO: 24988 - RNA, 21 nt, RNAi
uugaccucucuaccaucgaua

SEQ ID NO: 24989 - DNA, 21 bp, Homo sapiens
tatatgtcaactctaccatgt

SEQ ID NO: 24990 - RNA, 21 nt, RNAi
uaugucaacucuaccauguuu

SEQ ID NO: 24991 - RNA, 21 nt, RNAi
uuauacaguugagaugguaca

SEQ ID NO: 24992 - DNA, 21 bp, Homo sapiens
tatgtcaactctaccatgtgc

SEQ ID NO: 24993 - RNA, 21 nt, RNAi
ugucaacucuaccaugugcuu

SEQ ID NO: 24994 - RNA, 21 nt, RNAi
uuacaguugagaugguacacg

SEQ ID NO: 24995 - DNA, 21 bp, Homo sapiens
taccatgtgctagagacagcc

SEQ ID NO: 24996 - RNA, 21 nt, RNAi
ccaugugcuagagacagccuu

SEQ ID NO: 24997 - RNA, 21 nt, RNAi
uugguacacgaucucugucgg

SEQ ID NO: 24998 - DNA, 21 bp, Homo sapiens
tattcatggttcttgagtact

SEQ ID NO: 24999 - RNA, 21 nt, RNAi
uucaugguucuugaguacuuu

SEQ ID NO: 25000 - RNA, 21 nt, RNAi
uuaaguaccaagaacucauga

SEQ ID NO: 25001 - DNA, 21 bp, Homo sapiens
tagtatctgctgttgcttatg

SEQ ID NO: 25002 - RNA, 21 nt, RNAi
guaucugcuguugcuuauguu

SEQ ID NO: 25003 - RNA, 21 nt, RNAi
uucauagacgacaacgaauac

SEQ ID NO: 25004 - DNA, 21 bp, Homo sapiens
tatctgctgttgcttatgtgc

SEQ ID NO: 25005 - RNA, 21 nt, RNAi
ucugcuguugcuuaugugcuu

SEQ ID NO: 25006 - RNA, 21 nt, RNAi
uuagacgacaacgaauacacg

SEQ ID NO: 25007 - DNA, 21 bp, Homo sapiens
taaagctgattgactttggtc

SEQ ID NO: 25008 - RNA, 21 nt, RNAi
aagcugauugacuuuggucuu

SEQ ID NO: 25009 - RNA, 21 nt, RNAi
uuuucgacuaacugaaaccag

SEQ ID NO: 25010 - DNA, 21 bp, Homo sapiens
taacaaggattaccatctaca

SEQ ID NO: 25011 - RNA, 21 nt, RNAi
acaaggauuaccaucuacauu

SEQ ID NO: 25012 - RNA, 21 nt, RNAi
uuuguuccuaaugguagaugu

SEQ ID NO: 25013 - DNA, 21 bp, Homo sapiens
taccatctacagacatgctgt

SEQ ID NO: 25014 - RNA, 21 nt, RNAi
ccaucuacagacaugcuguuu

SEQ ID NO: 25015 - RNA, 21 nt, RNAi
uugguagaugucuguacgaca

SEQ ID NO: 25016 - DNA, 21 bp, Homo sapiens
tatgcagcacctgagttaata

SEQ ID NO: 25017 - RNA, 21 nt, RNAi
ugcagcaccugaguuaauauu

SEQ ID NO: 25018 - RNA, 21 nt, RNAi
uuacgucguggacucaauuau

SEQ ID NO: 25019 - DNA, 21 bp, Homo sapiens
tacaaggcaaatcatatcttg

SEQ ID NO: 25020 - RNA, 21 nt, RNAi
caaggcaaaucauaucuuguu

SEQ ID NO: 25021 - RNA, 21 nt, RNAi
uuguuccguuuaguauagaac

SEQ ID NO: 25022 - DNA, 21 bp, Homo sapiens
tatcttggatcagaggcagat

SEQ ID NO: 25023 - RNA, 21 nt, RNAi
ucuuggaucagaggcagauuu

SEQ ID NO: 25024 - RNA, 21 nt, RNAi
uuagaaccuagucuccgucua

SEQ ID NO: 25025 - DNA, 21 bp, Homo sapiens
tatgtgtggatttctaccatt

SEQ ID NO: 25026 - RNA, 21 nt, RNAi
uguguggauuucuaccauuuu

SEQ ID NO: 25027 - RNA, 21 nt, RNAi
uuacacaccuaaagaugguaa

SEQ ID NO: 25028 - DNA, 21 bp, Homo sapiens
tacaagaagattatgagagga

SEQ ID NO: 25029 - RNA, 21 nt, RNAi
caagaagauuaugagaggauu

SEQ ID NO: 25030 - RNA, 21 nt, RNAi
uuguucuucuaauacucuccu

SEQ ID NO: 25031 - DNA, 21 bp, Homo sapiens
tagcattctgcttcttcaaca

SEQ ID NO: 25032 - RNA, 21 nt, RNAi
gcauucugcuucuucaacauu

SEQ ID NO: 25033 - RNA, 21 nt, RNAi
uucguaagacgaagaaguugu

SEQ ID NO: 25034 - DNA, 21 bp, Homo sapiens
tacaactatcctgttgagtgg

SEQ ID NO: 25035 - RNA, 21 nt, RNAi
caacuauccuguugagugguu

SEQ ID NO: 25036 - RNA, 21 nt, RNAi
uuguugauaggacaacucacc

SEQ ID NO: 25037 - DNA, 21 bp, Homo sapiens
tatcctgttgagtggcaaagc

SEQ ID NO: 25038 - RNA, 21 nt, RNAi
uccuguugaguggcaaagcuu

SEQ ID NO: 25039 - RNA, 21 nt, RNAi
uuaggacaacucaccguuucg

SEQ ID NO: 25040 - DNA, 21 bp, Homo sapiens
tattcacctcgatgatgattg

SEQ ID NO: 25041 - RNA, 21 nt, RNAi
uucaccucgaugaugauuguu

SEQ ID NO: 25042 - RNA, 21 nt, RNAi
uuaaguggagcuacuacuaac

SEQ ID NO: 25043 - DNA, 21 bp, Homo sapiens
taacagaactttctgtacatc

SEQ ID NO: 25044 - RNA, 21 nt, RNAi
acagaacuuucuguacaucuu

SEQ ID NO: 25045 - RNA, 21 nt, RNAi
uuugucuugaaagacauguag

SEQ ID NO: 25046 - DNA, 21 bp, Homo sapiens
tacatcacagaaacaacaggc

SEQ ID NO: 25047 - RNA, 21 nt, RNAi
caucacagaaacaacaggcuu

SEQ ID NO: 25048 - RNA, 21 nt, RNAi
uuguagugucuuuguuguccg

SEQ ID NO: 25049 - DNA, 21 bp, Homo sapiens
taatttcactgtggcagtatg

SEQ ID NO: 25050 - RNA, 21 nt, RNAi
auuucacuguggcaguauguu

SEQ ID NO: 25051 - RNA, 21 nt, RNAi
uuuaaagugacaccgucauac

SEQ ID NO: 25052 - DNA, 21 bp, Homo sapiens
tatgatcacctcacggctacc

SEQ ID NO: 25053 - RNA, 21 nt, RNAi
ugaucaccucacggcuaccuu

SEQ ID NO: 25054 - RNA, 21 nt, RNAi
uuacuaguggagugccgaugg

SEQ ID NO: 25055 - DNA, 21 bp, Homo sapiens
tacctatcttctgcttctagc

SEQ ID NO: 25056 - RNA, 21 nt, RNAi
ccuaucuucugcuucuagcuu

SEQ ID NO: 25057 - RNA, 21 nt, RNAi
uuggauagaagacgaagaucg

SEQ ID NO: 25058 - DNA, 21 bp, Homo sapiens
tatcttctgcttctagccaag

SEQ ID NO: 25059 - RNA, 21 nt, RNAi
ucuucugcuucuagccaaguu

SEQ ID NO: 25060 - RNA, 21 nt, RNAi
uuagaagacgaagaucgguuc

SEQ ID NO: 25061 - DNA, 21 bp, Homo sapiens
taaggctttcttctttctcct

SEQ ID NO: 25062 - RNA, 21 nt, RNAi
aggcuuucuucuuucuccuuu

SEQ ID NO: 25063 - RNA, 21 nt, RNAi
uuuccgaaagaagaaagagga

SEQ ID NO: 25064 - DNA, 21 bp, Homo sapiens
taattggagtctggaagatgt

SEQ ID NO: 25065 - RNA, 21 nt, RNAi
auuggagucuggaagauguuu

SEQ ID NO: 25066 - RNA, 21 nt, RNAi
uuuaaccucagaccuucuaca

SEQ ID NO: 25067 - DNA, 21 bp, Homo sapiens
taatagactatgattggtgtg

SEQ ID NO: 25068 - RNA, 21 nt, RNAi
auagacuaugauugguguguu

SEQ ID NO: 25069 - RNA, 21 nt, RNAi
uuuaucugauacuaaccacac

SEQ ID NO: 25070 - DNA, 21 bp, Homo sapiens
tagactatgattggtgtgaag

SEQ ID NO: 25071 - RNA, 21 nt, RNAi
gacuaugauuggugugaaguu

SEQ ID NO: 25072 - RNA, 21 nt, RNAi
uucugauacuaaccacacuuc

SEQ ID NO: 25073 - DNA, 21 bp, Homo sapiens
tatgattggtgtgaagatgat

SEQ ID NO: 25074 - RNA, 21 nt, RNAi
ugauuggugugaagaugauuu

SEQ ID NO: 25075 - RNA, 21 nt, RNAi
uuacuaaccacacuucuacua

SEQ ID NO: 25076 - DNA, 21 bp, Homo sapiens
tatcaacaggtgctgctactc

SEQ ID NO: 25077 - RNA, 21 nt, RNAi
ucaacaggugcugcuacucuu

SEQ ID NO: 25078 - RNA, 21 nt, RNAi
uuaguuguccacgacgaugag

SEQ ID NO: 25079 - DNA, 21 bp, Homo sapiens
taccaagtactggacagaatc

SEQ ID NO: 25080 - RNA, 21 nt, RNAi
ccaaguacuggacagaaucuu

SEQ ID NO: 25081 - RNA, 21 nt, RNAi
uugguucaugaccugucuuag

SEQ ID NO: 25082 - DNA, 21 bp, Homo sapiens
taaatcattaactccagcctt

SEQ ID NO: 25083 - RNA, 21 nt, RNAi
aaucauuaacuccagccuuuu

SEQ ID NO: 25084 - RNA, 21 nt, RNAi
uuuuaguaauugaggucggaa

SEQ ID NO: 25085 - DNA, 21 bp, Homo sapiens
taactccagccttatgcagaa

SEQ ID NO: 25086 - RNA, 21 nt, RNAi
acuccagccuuaugcagaauu

SEQ ID NO: 25087 - RNA, 21 nt, RNAi
uuugaggucggaauacgucuu

SEQ ID NO: 25088 - DNA, 21 bp, Homo sapiens
tatgcagaacacctgcaaata

SEQ ID NO: 25089 - RNA, 21 nt, RNAi
ugcagaacaccugcaaauauu

SEQ ID NO: 25090 - RNA, 21 nt, RNAi
uuacgucuuguggacguuuau

SEQ ID NO: 25091 - DNA, 21 bp, Homo sapiens
tatatactcctaagtctgctg

SEQ ID NO: 25092 - RNA, 21 nt, RNAi
uauacuccuaagucugcuguu

SEQ ID NO: 25093 - RNA, 21 nt, RNAi
uuauaugaggauucagacgac

SEQ ID NO: 25094 - DNA, 21 bp, Homo sapiens
tatactcctaagtctgctgta

SEQ ID NO: 25095 - RNA, 21 nt, RNAi
uacuccuaagucugcuguauu

SEQ ID NO: 25096 - RNA, 21 nt, RNAi
uuaugaggauucagacgacau

SEQ ID NO: 25097 - DNA, 21 bp, Homo sapiens
tactcctaagtctgctgtaaa

SEQ ID NO: 25098 - RNA, 21 nt, RNAi
cuccuaagucugcuguaaauu

SEQ ID NO: 25099 - RNA, 21 nt, RNAi
uugaggauucagacgacauuu

SEQ ID NO: 25100 - DNA, 21 bp, Homo sapiens
taagtctgctgtaaagaatga

SEQ ID NO: 25101 - RNA, 21 nt, RNAi
agucugcuguaaagaaugauu

SEQ ID NO: 25102 - RNA, 21 nt, RNAi
uuucagacgacauuucuuacu

SEQ ID NO: 25103 - DNA, 21 bp, Homo sapiens
tactttatgtttcctgagcca

SEQ ID NO: 25104 - RNA, 21 nt, RNAi
cuuuauguuuccugagccauu

SEQ ID NO: 25105 - RNA, 21 nt, RNAi
uugaaauacaaaggacucggu

SEQ ID NO: 25106 - DNA, 21 bp, Homo sapiens
tatgtttcctgagccaaagac

SEQ ID NO: 25107 - RNA, 21 nt, RNAi
uguuuccugagccaaagacuu

SEQ ID NO: 25108 - RNA, 21 nt, RNAi
uuacaaaggacucgguuucug

SEQ ID NO: 25109 - DNA, 21 bp, Homo sapiens
taataagaaccagcataagag

SEQ ID NO: 25110 - RNA, 21 nt, RNAi
auaagaaccagcauaagaguu

SEQ ID NO: 25111 - RNA, 21 nt, RNAi
uuuauucuuggucguauucuc

SEQ ID NO: 25112 - DNA, 21 bp, Homo sapiens
taagaaccagcataagagaga

SEQ ID NO: 25113 - RNA, 21 nt, RNAi
agaaccagcauaagagagauu

SEQ ID NO: 25114 - RNA, 21 nt, RNAi
uuucuuggucguauucucucu

SEQ ID NO: 25115 - DNA, 21 bp, Homo sapiens
taagagagaaatactcactac

SEQ ID NO: 25116 - RNA, 21 nt, RNAi
agagagaaauacucacuacuu

SEQ ID NO: 25117 - RNA, 21 nt, RNAi
uuucucucuuuaugagugaug

SEQ ID NO: 25118 - DNA, 21 bp, Homo sapiens
tactcactacgccaaatcgtt

SEQ ID NO: 25119 - RNA, 21 nt, RNAi
cucacuacgccaaaucguuuu

SEQ ID NO: 25120 - RNA, 21 nt, RNAi
uugagugaugcgguuuagcaa

SEQ ID NO: 25121 - DNA, 21 bp, Homo sapiens
tacgccaaatcgttacactac

SEQ ID NO: 25122 - RNA, 21 nt, RNAi
cgccaaaucguuacacuacuu

SEQ ID NO: 25123 - RNA, 21 nt, RNAi
uugcgguuuagcaaugugaug

SEQ ID NO: 25124 - DNA, 21 bp, Homo sapiens
tagaaaccagtgcctgaaaga

SEQ ID NO: 25125 - RNA, 21 nt, RNAi
gaaaccagugccugaaagauu

SEQ ID NO: 25126 - RNA, 21 nt, RNAi
uucuuuggucacggacuuucu

SEQ ID NO: 25127 - DNA, 21 bp, Homo sapiens
taccagtaaattcaacaggaa

SEQ ID NO: 25128 - RNA, 21 nt, RNAi
ccaguaaauucaacaggaauu

SEQ ID NO: 25129 - RNA, 21 nt, RNAi
uuggucauuuaaguuguccuu

SEQ ID NO: 25130 - DNA, 21 bp, Homo sapiens
taaattcaacaggaacagaca

SEQ ID NO: 25131 - RNA, 21 nt, RNAi
aauucaacaggaacagacauu

SEQ ID NO: 25132 - RNA, 21 nt, RNAi
uuuuaaguuguccuugucugu

SEQ ID NO: 25133 - DNA, 21 bp, Homo sapiens
taatgacaggtgtcattagcc

SEQ ID NO: 25134 - RNA, 21 nt, RNAi
augacaggugucauuagccuu

SEQ ID NO: 25135 - RNA, 21 nt, RNAi
uuuacuguccacaguaaucgg

SEQ ID NO: 25136 - DNA, 21 bp, Homo sapiens
taaggttatcactgtgctcac

SEQ ID NO: 25137 - RNA, 21 nt, RNAi
agguuaucacugugcucacuu

SEQ ID NO: 25138 - RNA, 21 nt, RNAi
uuuccaauagugacacgagug

SEQ ID NO: 25139 - DNA, 21 bp, Homo sapiens
tatcactgtgctcaccaggag

SEQ ID NO: 25140 - RNA, 21 nt, RNAi
ucacugugcucaccaggaguu

SEQ ID NO: 25141 - RNA, 21 nt, RNAi
uuagugacacgagugguccuc

SEQ ID NO: 25142 - DNA, 21 bp, Homo sapiens
tacaactagattagtgaatcc

SEQ ID NO: 25143 - RNA, 21 nt, RNAi
caacuagauuagugaauccuu

SEQ ID NO: 25144 - RNA, 21 nt, RNAi
uuguugaucuaaucacuuagg

SEQ ID NO: 25145 - DNA, 21 bp, Homo sapiens
tagattagtgaatccagatca

SEQ ID NO: 25146 - RNA, 21 nt, RNAi
gauuagugaauccagaucauu

SEQ ID NO: 25147 - RNA, 21 nt, RNAi
uucuaaucacuuaggucuagu

SEQ ID NO: 25148 - DNA, 21 bp, Homo sapiens
tagtgaatccagatcaactgt

SEQ ID NO: 25149 - RNA, 21 nt, RNAi
gugaauccagaucaacuguuu

SEQ ID NO: 25150 - RNA, 21 nt, RNAi
uucacuuaggucuaguugaca

SEQ ID NO: 25151 - DNA, 21 bp, Homo sapiens
tattcttccaaagaagcatgt

SEQ ID NO: 25152 - RNA, 21 nt, RNAi
uucuuccaaagaagcauguuu

SEQ ID NO: 25153 - RNA, 21 nt, RNAi
uuaagaagguuucuucguaca

SEQ ID NO: 25154 - DNA, 21 bp, Homo sapiens
tatacactgaagtgtcaaaca

SEQ ID NO: 25155 - RNA, 21 nt, RNAi
uacacugaagugucaaacauu

SEQ ID NO: 25156 - RNA, 21 nt, RNAi
uuaugugacuucacaguuugu

SEQ ID NO: 25157 - DNA, 21 bp, Homo sapiens
tacactgaagtgtcaaacaca

SEQ ID NO: 25158 - RNA, 21 nt, RNAi
cacugaagugucaaacacauu

SEQ ID NO: 25159 - RNA, 21 nt, RNAi
uugugacuucacaguuugugu

SEQ ID NO: 25160 - DNA, 21 bp, Homo sapiens
tagaagtgtgccagcttcaaa

SEQ ID NO: 25161 - RNA, 21 nt, RNAi
gaagugugccagcuucaaauu

SEQ ID NO: 25162 - RNA, 21 nt, RNAi
uucuucacacggucgaaguuu

SEQ ID NO: 25163 - DNA, 21 bp, Homo sapiens
tatcaggaggcagcggcttaa

SEQ ID NO: 25164 - RNA, 21 nt, RNAi
ucaggaggcagcggcuuaauu

SEQ ID NO: 25165 - RNA, 21 nt, RNAi
uuaguccuccgucgccgaauu

SEQ ID NO: 25166 - DNA, 21 bp, Homo sapiens
tagtggaagacatcctatcta

SEQ ID NO: 25167 - RNA, 21 nt, RNAi
guggaagacauccuaucuauu

SEQ ID NO: 25168 - RNA, 21 nt, RNAi
uucaccuucuguaggauagau

SEQ ID NO: 25169 - DNA, 21 bp, Homo sapiens
tatctagctgcaaggtataat

SEQ ID NO: 25170 - RNA, 21 nt, RNAi
ucuagcugcaagguauaauuu

SEQ ID NO: 25171 - RNA, 21 nt, RNAi
uuagaucgacguuccauauua

SEQ ID NO: 25172 - DNA, 21 bp, Homo sapiens
tagctgcaaggtataattgat

SEQ ID NO: 25173 - RNA, 21 nt, RNAi
gcugcaagguauaauugauuu

SEQ ID NO: 25174 - RNA, 21 nt, RNAi
uucgacguuccauauuaacua

SEQ ID NO: 25175 - DNA, 21 bp, Homo sapiens
taattgatggattcttccatc

SEQ ID NO: 25176 - RNA, 21 nt, RNAi
auugauggauucuuccaucuu

SEQ ID NO: 25177 - RNA, 21 nt, RNAi
uuuaacuaccuaagaagguag

SEQ ID NO: 25178 - DNA, 21 bp, Homo sapiens
tacagcctacataaagactgt

SEQ ID NO: 25179 - RNA, 21 nt, RNAi
cagccuacauaaagacuguuu

SEQ ID NO: 25180 - RNA, 21 nt, RNAi
uugucggauguauuucugaca

SEQ ID NO: 25181 - DNA, 21 bp, Homo sapiens
taaagactgttatgatcgctt

SEQ ID NO: 25182 - RNA, 21 nt, RNAi
aagacuguuaugaucgcuuuu

SEQ ID NO: 25183 - RNA, 21 nt, RNAi
uuuucugacaauacuagcgaa

SEQ ID NO: 25184 - DNA, 21 bp, Homo sapiens
taaagttcattggaactacca

SEQ ID NO: 25185 - RNA, 21 nt, RNAi
aaguucauuggaacuaccauu

SEQ ID NO: 25186 - RNA, 21 nt, RNAi
uuuucaaguaaccuugauggu

SEQ ID NO: 25187 - DNA, 21 bp, Homo sapiens
taccaacttgtttctaaagag

SEQ ID NO: 25188 - RNA, 21 nt, RNAi
ccaacuuguuucuaaagaguu

SEQ ID NO: 25189 - RNA, 21 nt, RNAi
uugguugaacaaagauuucuc

SEQ ID NO: 25190 - DNA, 21 bp, Homo sapiens
taaagagctatcttaagacca

SEQ ID NO: 25191 - RNA, 21 nt, RNAi
aagagcuaucuuaagaccauu

SEQ ID NO: 25192 - RNA, 21 nt, RNAi
uuuucucgauagaauucuggu

SEQ ID NO: 25193 - DNA, 21 bp, Homo sapiens
tagattcacttccatatgtga

SEQ ID NO: 25194 - RNA, 21 nt, RNAi
gauucacuuccauaugugauu

SEQ ID NO: 25195 - RNA, 21 nt, RNAi
uucuaagugaagguauacacu

SEQ ID NO: 25196 - DNA, 21 bp, Homo sapiens
taagctcttaactatgtctct

SEQ ID NO: 25197 - RNA, 21 nt, RNAi
agcucuuaacuaugucucuuu

SEQ ID NO: 25198 - RNA, 21 nt, RNAi
uuucgagaauugauacagaga

SEQ ID NO: 25199 - DNA, 21 bp, Homo sapiens
aacaaggattaccatctacag

SEQ ID NO: 25200 - RNA, 21 nt, RNAi
caaggauuaccaucuacaguu

SEQ ID NO: 25201 - RNA, 21 nt, RNAi
uuguuccuaaugguagauguc

SEQ ID NO: 25202 - DNA, 21 bp, Homo sapiens
aaggattaccatctacagaca

SEQ ID NO: 25203 - RNA, 21 nt, RNAi
ggauuaccaucuacagacauu

SEQ ID NO: 25204 - RNA, 21 nt, RNAi
uuccuaaugguagaugucugu

SEQ ID NO: 25205 - DNA, 21 bp, Homo sapiens
aaaccagttcgtttaaggctt

SEQ ID NO: 25206 - RNA, 21 nt, RNAi
accaguucguuuaaggcuuuu

SEQ ID NO: 25207 - RNA, 21 nt, RNAi
uuuggucaagcaaauuccgaa

SEQ ID NO: 25208 - DNA, 21 bp, Homo sapiens
aaccagttcgtttaaggcttt

SEQ ID NO: 25209 - RNA, 21 nt, RNAi
ccaguucguuuaaggcuuuuu

SEQ ID NO: 25210 - RNA, 21 nt, RNAi
uuggucaagcaaauuccgaaa

SEQ ID NO: 25211 - DNA, 21 bp, Homo sapiens
aagtcaaataattggagtctg

SEQ ID NO: 25212 - RNA, 21 nt, RNAi
gucaaauaauuggagucuguu

SEQ ID NO: 25213 - RNA, 21 nt, RNAi
uucaguuuauuaaccucagac

SEQ ID NO: 25214 - DNA, 21 bp, Homo sapiens
aagatgatttatcaacaggtg

SEQ ID NO: 25215 - RNA, 21 nt, RNAi
gaugauuuaucaacagguguu

SEQ ID NO: 25216 - RNA, 21 nt, RNAi
uucuacuaaauaguuguccac

SEQ ID NO: 25217 - DNA, 21 bp, Homo sapiens
aagtactggacagaatcaaat

SEQ ID NO: 25218 - RNA, 21 nt, RNAi
guacuggacagaaucaaauuu

SEQ ID NO: 25219 - RNA, 21 nt, RNAi
uucaugaccugucuuaguuua

SEQ ID NO: 25220 - DNA, 21 bp, Homo sapiens
aaatactcactacgccaaatc

SEQ ID NO: 25221 - RNA, 21 nt, RNAi
auacucacuacgccaaaucuu

SEQ ID NO: 25222 - RNA, 21 nt, RNAi
uuuaugagugaugcgguuuag

SEQ ID NO: 25223 - DNA, 21 bp, Homo sapiens
aatactcactacgccaaatcg

SEQ ID NO: 25224 - RNA, 21 nt, RNAi
uacucacuacgccaaaucguu

SEQ ID NO: 25225 - RNA, 21 nt, RNAi
uuaugagugaugcgguuuagc

SEQ ID NO: 25226 - DNA, 21 bp, Homo sapiens
aaaccagtgcctgaaagaaac

SEQ ID NO: 25227 - RNA, 21 nt, RNAi
accagugccugaaagaaacuu

SEQ ID NO: 25228 - RNA, 21 nt, RNAi
uuuggucacggacuuucuuug

SEQ ID NO: 25229 - DNA, 21 bp, Homo sapiens
aaccagtgcctgaaagaaact

SEQ ID NO: 25230 - RNA, 21 nt, RNAi
ccagugccugaaagaaacuuu

SEQ ID NO: 25231 - RNA, 21 nt, RNAi
uuggucacggacuuucuuuga

SEQ ID NO: 25232 - DNA, 21 bp, Homo sapiens
aactagattagtgaatccaga

SEQ ID NO: 25233 - RNA, 21 nt, RNAi
cuagauuagugaauccagauu

SEQ ID NO: 25234 - RNA, 21 nt, RNAi
uugaucuaaucacuuaggucu

SEQ ID NO: 25235 - DNA, 21 bp, Homo sapiens
aagtgtcaaacacagtcagat

SEQ ID NO: 25236 - RNA, 21 nt, RNAi
gugucaaacacagucagauuu

SEQ ID NO: 25237 - RNA, 21 nt, RNAi
uucacaguuugugucagucua

SEQ ID NO: 25238 - DNA, 21 bp, Homo sapiens
catcagcatatatgtcaactc

SEQ ID NO: 25239 - RNA, 21 nt, RNAi
ucagcauauaugucaacucuu

SEQ ID NO: 25240 - RNA, 21 nt, RNAi
uuagucguauauacaguugag

SEQ ID NO: 25241 - DNA, 21 bp, Homo sapiens
cagcatatatgtcaactctac

SEQ ID NO: 25242 - RNA, 21 nt, RNAi
gcauauaugucaacucuacuu

SEQ ID NO: 25243 - RNA, 21 nt, RNAi
uucguauauacaguugagaug

SEQ ID NO: 25244 - DNA, 21 bp, Homo sapiens
caaggattaccatctacagac

SEQ ID NO: 25245 - RNA, 21 nt, RNAi
aggauuaccaucuacagacuu

SEQ ID NO: 25246 - RNA, 21 nt, RNAi
uuuccuaaugguagaugucug

SEQ ID NO: 25247 - DNA, 21 bp, Homo sapiens
cagcacctgagttaatacaag

SEQ ID NO: 25248 - RNA, 21 nt, RNAi
gcaccugaguuaauacaaguu

SEQ ID NO: 25249 - RNA, 21 nt, RNAi
uucguggacucaauuauguuc

SEQ ID NO: 25250 - DNA, 21 bp, Homo sapiens
cacctgagttaatacaaggca

SEQ ID NO: 25251 - RNA, 21 nt, RNAi
ccugaguuaauacaaggcauu

SEQ ID NO: 25252 - RNA, 21 nt, RNAi
uuggacucaauuauguuccgu

SEQ ID NO: 25253 - DNA, 21 bp, Homo sapiens
cactgtggcagtatgatcacc

SEQ ID NO: 25254 - RNA, 21 nt, RNAi
cuguggcaguaugaucaccuu

SEQ ID NO: 25255 - RNA, 21 nt, RNAi
uugacaccgucauacuagugg

SEQ ID NO: 25256 - DNA, 21 bp, Homo sapiens
cacctcacggctacctatctt

SEQ ID NO: 25257 - RNA, 21 nt, RNAi
ccucacggcuaccuaucuuuu

SEQ ID NO: 25258 - RNA, 21 nt, RNAi
uuggagugccgauggauagaa

SEQ ID NO: 25259 - DNA, 21 bp, Homo sapiens
cacggctacctatcttctgct

SEQ ID NO: 25260 - RNA, 21 nt, RNAi
cggcuaccuaucuucugcuuu

SEQ ID NO: 25261 - RNA, 21 nt, RNAi
uugccgauggauagaagacga

SEQ ID NO: 25262 - DNA, 21 bp, Homo sapiens
cagttcgtttaaggctttctt

SEQ ID NO: 25263 - RNA, 21 nt, RNAi
guucguuuaaggcuuucuuuu

SEQ ID NO: 25264 - RNA, 21 nt, RNAi
uucaagcaaauuccgaaagaa

SEQ ID NO: 25265 - DNA, 21 bp, Homo sapiens
cacagtttaccaagtactgga

SEQ ID NO: 25266 - RNA, 21 nt, RNAi
caguuuaccaaguacuggauu

SEQ ID NO: 25267 - RNA, 21 nt, RNAi
uugucaaaugguucaugaccu

SEQ ID NO: 25268 - DNA, 21 bp, Homo sapiens
cagtttaccaagtactggaca

SEQ ID NO: 25269 - RNA, 21 nt, RNAi
guuuaccaaguacuggacauu

SEQ ID NO: 25270 - RNA, 21 nt, RNAi
uucaaaugguucaugaccugu

SEQ ID NO: 25271 - DNA, 21 bp, Homo sapiens
caagtactggacagaatcaaa

SEQ ID NO: 25272 - RNA, 21 nt, RNAi
aguacuggacagaaucaaauu

SEQ ID NO: 25273 - RNA, 21 nt, RNAi
uuucaugaccugucuuaguuu

SEQ ID NO: 25274 - DNA, 21 bp, Homo sapiens
cagccttatgcagaacacctg

SEQ ID NO: 25275 - RNA, 21 nt, RNAi
gccuuaugcagaacaccuguu

SEQ ID NO: 25276 - RNA, 21 nt, RNAi
uucggaauacgucuuguggac

SEQ ID NO: 25277 - DNA, 21 bp, Homo sapiens
cactacgccaaatcgttacac

SEQ ID NO: 25278 - RNA, 21 nt, RNAi
cuacgccaaaucguuacacuu

SEQ ID NO: 25279 - RNA, 21 nt, RNAi
uugaugcgguuuagcaaugug

SEQ ID NO: 25280 - DNA, 21 bp, Homo sapiens
caggaacagacaagttaatga

SEQ ID NO: 25281 - RNA, 21 nt, RNAi
ggaacagacaaguuaaugauu

SEQ ID NO: 25282 - RNA, 21 nt, RNAi
uuccuugucuguucaauuacu

SEQ ID NO: 25283 - DNA, 21 bp, Homo sapiens
caactagattagtgaatccag

SEQ ID NO: 25284 - RNA, 21 nt, RNAi
acuagauuagugaauccaguu

SEQ ID NO: 25285 - RNA, 21 nt, RNAi
uuugaucuaaucacuuagguc

SEQ ID NO: 25286 - DNA, 21 bp, Homo sapiens
gaagaacctgagacatcagca

SEQ ID NO: 25287 - RNA, 21 nt, RNAi
agaaccugagacaucagcauu

SEQ ID NO: 25288 - RNA, 21 nt, RNAi
uuucuuggacucuguagucgu

SEQ ID NO: 25289 - DNA, 21 bp, Homo sapiens
gattaccatctacagacatgc

SEQ ID NO: 25290 - RNA, 21 nt, RNAi
uuaccaucuacagacaugcuu

SEQ ID NO: 25291 - RNA, 21 nt, RNAi
uuaaugguagaugucuguacg

SEQ ID NO: 25292 - DNA, 21 bp, Homo sapiens
gattacaactatcctgttgag

SEQ ID NO: 25293 - RNA, 21 nt, RNAi
uuacaacuauccuguugaguu

SEQ ID NO: 25294 - RNA, 21 nt, RNAi
uuaauguugauaggacaacuc

SEQ ID NO: 25295 - DNA, 21 bp, Homo sapiens
gatgatgattgcgtaacagaa

SEQ ID NO: 25296 - RNA, 21 nt, RNAi
ugaugauugcguaacagaauu

SEQ ID NO: 25297 - RNA, 21 nt, RNAi
uuacuacuaacgcauugucuu

SEQ ID NO: 25298 - DNA, 21 bp, Homo sapiens
gatgattgcgtaacagaactt

SEQ ID NO: 25299 - RNA, 21 nt, RNAi
ugauugcguaacagaacuuuu

SEQ ID NO: 25300 - RNA, 21 nt, RNAi
uuacuaacgcauugucuugaa

SEQ ID NO: 25301 - DNA, 21 bp, Homo sapiens
gatcacctcacggctacctat

SEQ ID NO: 25302 - RNA, 21 nt, RNAi
ucaccucacggcuaccuauuu

SEQ ID NO: 25303 - RNA, 21 nt, RNAi
uuaguggagugccgauggaua

SEQ ID NO: 25304 - DNA, 21 bp, Homo sapiens
gatgatttatcaacaggtgct

SEQ ID NO: 25305 - RNA, 21 nt, RNAi
ugauuuaucaacaggugcuuu

SEQ ID NO: 25306 - RNA, 21 nt, RNAi
uuacuaaauaguuguccacga

SEQ ID NO: 25307 - DNA, 21 bp, Homo sapiens
gagaaatactcactacgccaa

SEQ ID NO: 25308 - RNA, 21 nt, RNAi
gaaauacucacuacgccaauu

SEQ ID NO: 25309 - RNA, 21 nt, RNAi
uucuuuaugagugaugcgguu

SEQ ID NO: 25310 - DNA, 21 bp, Homo sapiens
gaaatactcactacgccaaat

SEQ ID NO: 25311 - RNA, 21 nt, RNAi
aauacucacuacgccaaauuu

SEQ ID NO: 25312 - RNA, 21 nt, RNAi
uuuuaugagugaugcgguuua

SEQ ID NO: 25313 - DNA, 21 bp, Homo sapiens
gaaaccagtgcctgaaagaaa

SEQ ID NO: 25314 - RNA, 21 nt, RNAi
aaccagugccugaaagaaauu

SEQ ID NO: 25315 - RNA, 21 nt, RNAi
uuuuggucacggacuuucuuu

SEQ ID NO: 25316 - DNA, 21 bp, Homo sapiens
gacaagttaatgacaggtgtc

SEQ ID NO: 25317 - RNA, 21 nt, RNAi
caaguuaaugacaggugucuu

SEQ ID NO: 25318 - RNA, 21 nt, RNAi
uuguucaauuacuguccacag

SEQ ID NO: 25319 - DNA, 21 bp, Homo sapiens
gaagtgtcaaacacagtcaga

SEQ ID NO: 25320 - RNA, 21 nt, RNAi
agugucaaacacagucagauu

SEQ ID NO: 25321 - RNA, 21 nt, RNAi
uuucacaguuugugucagucu

SEQ ID NO: 25322 - DNA, 21 bp, Homo sapiens
tatatgtcaactctaccatgt

SEQ ID NO: 25323 - RNA, 21 nt, RNAi
uaugucaacucuaccauguuu

SEQ ID NO: 25324 - RNA, 21 nt, RNAi
uuauacaguugagaugguaca

SEQ ID NO: 25325 - DNA, 21 bp, Homo sapiens
tatgtcaactctaccatgtgc

SEQ ID NO: 25326 - RNA, 21 nt, RNAi
ugucaacucuaccaugugcuu

SEQ ID NO: 25327 - RNA, 21 nt, RNAi
uuacaguugagaugguacacg

SEQ ID NO: 25328 - DNA, 21 bp, Homo sapiens
taacaaggattaccatctaca

SEQ ID NO: 25329 - RNA, 21 nt, RNAi
acaaggauuaccaucuacauu

SEQ ID NO: 25330 - RNA, 21 nt, RNAi
uuuguuccuaaugguagaugu

SEQ ID NO: 25331 - DNA, 21 bp, Homo sapiens
tattcacctcgatgatgattg

SEQ ID NO: 25332 - RNA, 21 nt, RNAi
uucaccucgaugaugauuguu

SEQ ID NO: 25333 - RNA, 21 nt, RNAi
uuaaguggagcuacuacuaac

SEQ ID NO: 25334 - DNA, 21 bp, Homo sapiens
tacctatcttctgcttctagc

SEQ ID NO: 25335 - RNA, 21 nt, RNAi
ccuaucuucugcuucuagcuu

SEQ ID NO: 25336 - RNA, 21 nt, RNAi
uuggauagaagacgaagaucg

SEQ ID NO: 25337 - DNA, 21 bp, Homo sapiens
taccaagtactggacagaatc

SEQ ID NO: 25338 - RNA, 21 nt, RNAi
ccaaguacuggacagaaucuu

SEQ ID NO: 25339 - RNA, 21 nt, RNAi
uugguucaugaccugucuuag

SEQ ID NO: 25340 - DNA, 21 bp, Homo sapiens
tatactcctaagtctgctgta

SEQ ID NO: 25341 - RNA, 21 nt, RNAi
uacuccuaagucugcuguauu

SEQ ID NO: 25342 - RNA, 21 nt, RNAi
uuaugaggauucagacgacau

SEQ ID NO: 25343 - DNA, 21 bp, Homo sapiens
tactcctaagtctgctgtaaa

SEQ ID NO: 25344 - RNA, 21 nt, RNAi
cuccuaagucugcuguaaauu

SEQ ID NO: 25345 - RNA, 21 nt, RNAi
uugaggauucagacgacauuu

SEQ ID NO: 25346 - DNA, 21 bp, Homo sapiens
tactcactacgccaaatcgtt

SEQ ID NO: 25347 - RNA, 21 nt, RNAi
cucacuacgccaaaucguuuu

SEQ ID NO: 25348 - RNA, 21 nt, RNAi
uugagugaugcgguuuagcaa

SEQ ID NO: 25349 - DNA, 21 bp, Homo sapiens
tacgccaaatcgttacactac

SEQ ID NO: 25350 - RNA, 21 nt, RNAi
cgccaaaucguuacacuacuu

SEQ ID NO: 25351 - RNA, 21 nt, RNAi
uugcgguuuagcaaugugaug

SEQ ID NO: 25352 - DNA, 21 bp, Homo sapiens
tacaactagattagtgaatcc

SEQ ID NO: 25353 - RNA, 21 nt, RNAi
caacuagauuagugaauccuu

SEQ ID NO: 25354 - RNA, 21 nt, RNAi
uuguugaucuaaucacuuagg

SEQ ID NO: 25355 - DNA, 21 bp, Homo sapiens
tagtgaatccagatcaactgt

SEQ ID NO: 25356 - RNA, 21 nt, RNAi
gugaauccagaucaacuguuu

SEQ ID NO: 25357 - RNA, 21 nt, RNAi
uucacuuaggucuaguugaca

SEQ ID NO: 25358 - DNA, 21 bp, Homo sapiens
tagaagtgtgccagcttcaaa

SEQ ID NO: 25359 - RNA, 21 nt, RNAi
gaagugugccagcuucaaauu

SEQ ID NO: 25360 - RNA, 21 nt, RNAi
uucuucacacggucgaaguuu

SEQ ID NO: 25361 - DNA, 21 bp, Homo sapiens
aaagccatcaaggaaacttcc

SEQ ID NO: 25362 - RNA, 21 nt, RNAi
agccaucaaggaaacuuccuu

SEQ ID NO: 25363 - RNA, 21 nt, RNAi
uuucgguaguuccuuugaagg

SEQ ID NO: 25364 - DNA, 21 bp, Homo sapiens
aagccatcaaggaaacttcca

SEQ ID NO: 25365 - RNA, 21 nt, RNAi
gccaucaaggaaacuuccauu

SEQ ID NO: 25366 - RNA, 21 nt, RNAi
uucgguaguuccuuugaaggu

SEQ ID NO: 25367 - DNA, 21 bp, Homo sapiens
aatacagtatcaattggactc

SEQ ID NO: 25368 - RNA, 21 nt, RNAi
uacaguaucaauuggacucuu

SEQ ID NO: 25369 - RNA, 21 nt, RNAi
uuaugucauaguuaaccugag

SEQ ID NO: 25370 - DNA, 21 bp, Homo sapiens
aattagtggtccagttagagt

SEQ ID NO: 25371 - RNA, 21 nt, RNAi
uuagugguccaguuagaguuu

SEQ ID NO: 25372 - RNA, 21 nt, RNAi
uuaaucaccaggucaaucuca

SEQ ID NO: 25373 - DNA, 21 bp, Homo sapiens
aaagaaatctactcaagaacg

SEQ ID NO: 25374 - RNA, 21 nt, RNAi
agaaaucuacucaagaacguu

SEQ ID NO: 25375 - RNA, 21 nt, RNAi
uuucuuuagaugaguucuugc

SEQ ID NO: 25376 - DNA, 21 bp, Homo sapiens
aagaaatctactcaagaacgg

SEQ ID NO: 25377 - RNA, 21 nt, RNAi
gaaaucuacucaagaacgguu

SEQ ID NO: 25378 - RNA, 21 nt, RNAi
uucuuuagaugaguucuugcc

SEQ ID NO: 25379 - DNA, 21 bp, Homo sapiens
aaatctactcaagaacggttt

SEQ ID NO: 25380 - RNA, 21 nt, RNAi
aucuacucaagaacgguuuuu

SEQ ID NO: 25381 - RNA, 21 nt, RNAi
uuuagaugaguucuugccaaa

SEQ ID NO: 25382 - DNA, 21 bp, Homo sapiens
aatctactcaagaacggtttg

SEQ ID NO: 25383 - RNA, 21 nt, RNAi
ucuacucaagaacgguuuguu

SEQ ID NO: 25384 - RNA, 21 nt, RNAi
uuagaugaguucuugccaaac

SEQ ID NO: 25385 - DNA, 21 bp, Homo sapiens
aaattcttcttgatcgtccaa

SEQ ID NO: 25386 - RNA, 21 nt, RNAi
auucuucuugaucguccaauu

SEQ ID NO: 25387 - RNA, 21 nt, RNAi
uuuaagaagaacuagcagguu

SEQ ID NO: 25388 - DNA, 21 bp, Homo sapiens
aattcttcttgatcgtccaaa

SEQ ID NO: 25389 - RNA, 21 nt, RNAi
uucuucuugaucguccaaauu

SEQ ID NO: 25390 - RNA, 21 nt, RNAi
uuaagaagaacuagcagguuu

SEQ ID NO: 25391 - DNA, 21 bp, Homo sapiens
aaagctagaaatgaggtacgt

SEQ ID NO: 25392 - RNA, 21 nt, RNAi
agcuagaaaugagguacguuu

SEQ ID NO: 25393 - RNA, 21 nt, RNAi
uuucgaucuuuacuccaugca

SEQ ID NO: 25394 - DNA, 21 bp, Homo sapiens
aagctagaaatgaggtacgtc

SEQ ID NO: 25395 - RNA, 21 nt, RNAi
gcuagaaaugagguacgucuu

SEQ ID NO: 25396 - RNA, 21 nt, RNAi
uucgaucuuuacuccaugcag

SEQ ID NO: 25397 - DNA, 21 bp, Homo sapiens
aaatgaggtacgtctgcacat

SEQ ID NO: 25398 - RNA, 21 nt, RNAi
augagguacgucugcacauuu

SEQ ID NO: 25399 - RNA, 21 nt, RNAi
uuuacuccaugcagacgugua

SEQ ID NO: 25400 - DNA, 21 bp, Homo sapiens
aatgaggtacgtctgcacatg

SEQ ID NO: 25401 - RNA, 21 nt, RNAi
ugagguacgucugcacauguu

SEQ ID NO: 25402 - RNA, 21 nt, RNAi
uuacuccaugcagacguguac

SEQ ID NO: 25403 - DNA, 21 bp, Homo sapiens
aagtgtttgctaacagtgtcc

SEQ ID NO: 25404 - RNA, 21 nt, RNAi
guguuugcuaacaguguccuu

SEQ ID NO: 25405 - RNA, 21 nt, RNAi
uucacaaacgauugucacagg

SEQ ID NO: 25406 - DNA, 21 bp, Homo sapiens
aattgtaatggagatgatgga

SEQ ID NO: 25407 - RNA, 21 nt, RNAi
uuguaauggagaugauggauu

SEQ ID NO: 25408 - RNA, 21 nt, RNAi
uuaacauuaccucuacuaccu

SEQ ID NO: 25409 - DNA, 21 bp, Homo sapiens
aatcagccagcaccggcactt

SEQ ID NO: 25410 - RNA, 21 nt, RNAi
ucagccagcaccggcacuuuu

SEQ ID NO: 25411 - RNA, 21 nt, RNAi
uuagucggucguggccgugaa

SEQ ID NO: 25412 - DNA, 21 bp, Homo sapiens
aagcaagccagccaagtaaca

SEQ ID NO: 25413 - RNA, 21 nt, RNAi
gcaagccagccaaguaacauu

SEQ ID NO: 25414 - RNA, 21 nt, RNAi
uucguucggucgguucauugu

SEQ ID NO: 25415 - DNA, 21 bp, Homo sapiens
aagccagccaagtaacaaagc

SEQ ID NO: 25416 - RNA, 21 nt, RNAi
gccagccaaguaacaaagcuu

SEQ ID NO: 25417 - RNA, 21 nt, RNAi
uucggucgguucauuguuucg

SEQ ID NO: 25418 - DNA, 21 bp, Homo sapiens
aagtaacaaagcagatagctt

SEQ ID NO: 25419 - RNA, 21 nt, RNAi
guaacaaagcagauagcuuuu

SEQ ID NO: 25420 - RNA, 21 nt, RNAi
uucauuguuucgucuaucgaa

SEQ ID NO: 25421 - DNA, 21 bp, Homo sapiens
aacaaagcagatagctttggc

SEQ ID NO: 25422 - RNA, 21 nt, RNAi
caaagcagauagcuuuggcuu

SEQ ID NO: 25423 - RNA, 21 nt, RNAi
uuguuucgucuaucgaaaccg

SEQ ID NO: 25424 - DNA, 21 bp, Homo sapiens
aaagcagatagctttggctct

SEQ ID NO: 25425 - RNA, 21 nt, RNAi
agcagauagcuuuggcucuuu

SEQ ID NO: 25426 - RNA, 21 nt, RNAi
uuucgucuaucgaaaccgaga

SEQ ID NO: 25427 - DNA, 21 bp, Homo sapiens
aagcagatagctttggctctg

SEQ ID NO: 25428 - RNA, 21 nt, RNAi
gcagauagcuuuggcucuguu

SEQ ID NO: 25429 - RNA, 21 nt, RNAi
uucgucuaucgaaaccgagac

SEQ ID NO: 25430 - DNA, 21 bp, Homo sapiens
aaacattgcgcacagagacct

SEQ ID NO: 25431 - RNA, 21 nt, RNAi
acauugcgcacagagaccuuu

SEQ ID NO: 25432 - RNA, 21 nt, RNAi
uuuguaacgcgugucucugga

SEQ ID NO: 25433 - DNA, 21 bp, Homo sapiens
aacattgcgcacagagacctc

SEQ ID NO: 25434 - RNA, 21 nt, RNAi
cauugcgcacagagaccucuu

SEQ ID NO: 25435 - RNA, 21 nt, RNAi
uuguaacgcgugucucuggag

SEQ ID NO: 25436 - DNA, 21 bp, Homo sapiens
aaggataactctttggatgcc

SEQ ID NO: 25437 - RNA, 21 nt, RNAi
ggauaacucuuuggaugccuu

SEQ ID NO: 25438 - RNA, 21 nt, RNAi
uuccuauugagaaaccuacgg

SEQ ID NO: 25439 - DNA, 21 bp, Homo sapiens
aagttgtgtgactttggattt

SEQ ID NO: 25440 - RNA, 21 nt, RNAi
guugugugacuuuggauuuuu

SEQ ID NO: 25441 - RNA, 21 nt, RNAi
uucaacacacugaaaccuaaa

SEQ ID NO: 25442 - DNA, 21 bp, Homo sapiens
aagattgaccaaggtgacttg

SEQ ID NO: 25443 - RNA, 21 nt, RNAi
gauugaccaaggugacuuguu

SEQ ID NO: 25444 - RNA, 21 nt, RNAi
uucuaacugguuccacugaac

SEQ ID NO: 25445 - DNA, 21 bp, Homo sapiens
aaagaaggcatcagaaggaga

SEQ ID NO: 25446 - RNA, 21 nt, RNAi
agaaggcaucagaaggagauu

SEQ ID NO: 25447 - RNA, 21 nt, RNAi
uuucuuccguagucuuccucu

SEQ ID NO: 25448 - DNA, 21 bp, Homo sapiens
aagaaggcatcagaaggagaa

SEQ ID NO: 25449 - RNA, 21 nt, RNAi
gaaggcaucagaaggagaauu

SEQ ID NO: 25450 - RNA, 21 nt, RNAi
uucuuccguagucuuccucuu

SEQ ID NO: 25451 - DNA, 21 bp, Homo sapiens
aaggcatcagaaggagaaatc

SEQ ID NO: 25452 - RNA, 21 nt, RNAi
ggcaucagaaggagaaaucuu

SEQ ID NO: 25453 - RNA, 21 nt, RNAi
uuccguagucuuccucuuuag

SEQ ID NO: 25454 - DNA, 21 bp, Homo sapiens
aaggagaaatctggcatcata

SEQ ID NO: 25455 - RNA, 21 nt, RNAi
ggagaaaucuggcaucauauu

SEQ ID NO: 25456 - RNA, 21 nt, RNAi
uuccucuuuagaccguaguau

SEQ ID NO: 25457 - DNA, 21 bp, Homo sapiens
aaatctggcatcatacctacc

SEQ ID NO: 25458 - RNA, 21 nt, RNAi
aucuggcaucauaccuaccuu

SEQ ID NO: 25459 - RNA, 21 nt, RNAi
uuuagaccguaguauggaugg

SEQ ID NO: 25460 - DNA, 21 bp, Homo sapiens
aatctggcatcatacctacct

SEQ ID NO: 25461 - RNA, 21 nt, RNAi
ucuggcaucauaccuaccuuu

SEQ ID NO: 25462 - RNA, 21 nt, RNAi
uuagaccguaguauggaugga

SEQ ID NO: 25463 - DNA, 21 bp, Homo sapiens
aacaagagctgtgacttgtgg

SEQ ID NO: 25464 - RNA, 21 nt, RNAi
caagagcugugacuugugguu

SEQ ID NO: 25465 - RNA, 21 nt, RNAi
uuguucucgacacugaacacc

SEQ ID NO: 25466 - DNA, 21 bp, Homo sapiens
aagagctgtgacttgtggtcc

SEQ ID NO: 25467 - RNA, 21 nt, RNAi
gagcugugacuugugguccuu

SEQ ID NO: 25468 - RNA, 21 nt, RNAi
uucucgacacugaacaccagg

SEQ ID NO: 25469 - DNA, 21 bp, Homo sapiens
aaacaccacagccggactatc

SEQ ID NO: 25470 - RNA, 21 nt, RNAi
acaccacagccggacuaucuu

SEQ ID NO: 25471 - RNA, 21 nt, RNAi
uuuguggugucggccugauag

SEQ ID NO: 25472 - DNA, 21 bp, Homo sapiens
aacaccacagccggactatcc

SEQ ID NO: 25473 - RNA, 21 nt, RNAi
caccacagccggacuauccuu

SEQ ID NO: 25474 - RNA, 21 nt, RNAi
uuguggugucggccugauagg

SEQ ID NO: 25475 - DNA, 21 bp, Homo sapiens
aaaggatatgcgaagaaagat

SEQ ID NO: 25476 - RNA, 21 nt, RNAi
aggauaugcgaagaaagauuu

SEQ ID NO: 25477 - RNA, 21 nt, RNAi
uuuccuauacgcuucuuucua

SEQ ID NO: 25478 - DNA, 21 bp, Homo sapiens
aaggatatgcgaagaaagatc

SEQ ID NO: 25479 - RNA, 21 nt, RNAi
ggauaugcgaagaaagaucuu

SEQ ID NO: 25480 - RNA, 21 nt, RNAi
uuccuauacgcuucuuucuag

SEQ ID NO: 25481 - DNA, 21 bp, Homo sapiens
aagaaagatcatgacaggcag

SEQ ID NO: 25482 - RNA, 21 nt, RNAi
gaaagaucaugacaggcaguu

SEQ ID NO: 25483 - RNA, 21 nt, RNAi
uucuuucuaguacuguccguc

SEQ ID NO: 25484 - DNA, 21 bp, Homo sapiens
aaagatcatgacaggcagttt

SEQ ID NO: 25485 - RNA, 21 nt, RNAi
agaucaugacaggcaguuuuu

SEQ ID NO: 25486 - RNA, 21 nt, RNAi
uuucuaguacuguccgucaaa

SEQ ID NO: 25487 - DNA, 21 bp, Homo sapiens
aagagtggagtcagatctcag

SEQ ID NO: 25488 - RNA, 21 nt, RNAi
gaguggagucagaucucaguu

SEQ ID NO: 25489 - RNA, 21 nt, RNAi
uucucaccucagucuagaguc

SEQ ID NO: 25490 - DNA, 21 bp, Homo sapiens
aaagatgttgtgaggaagctc

SEQ ID NO: 25491 - RNA, 21 nt, RNAi
agauguugugaggaagcucuu

SEQ ID NO: 25492 - RNA, 21 nt, RNAi
uuucuacaacacuccuucgag

SEQ ID NO: 25493 - DNA, 21 bp, Homo sapiens
aagatgttgtgaggaagctcc

SEQ ID NO: 25494 - RNA, 21 nt, RNAi
gauguugugaggaagcuccuu

SEQ ID NO: 25495 - RNA, 21 nt, RNAi
uucuacaacacuccuucgagg

SEQ ID NO: 25496 - DNA, 21 bp, Homo sapiens
aagctcctgaaggtcaaaccg

SEQ ID NO: 25497 - RNA, 21 nt, RNAi
gcuccugaaggucaaaccguu

SEQ ID NO: 25498 - RNA, 21 nt, RNAi
uucgaggacuuccaguuuggc

SEQ ID NO: 25499 - DNA, 21 bp, Homo sapiens
aaggtcaaaccggaggagaga

SEQ ID NO: 25500 - RNA, 21 nt, RNAi
ggucaaaccggaggagagauu

SEQ ID NO: 25501 - RNA, 21 nt, RNAi
uuccaguuuggccuccucucu

SEQ ID NO: 25502 - DNA, 21 bp, Homo sapiens
aaaccggaggagagactcacc

SEQ ID NO: 25503 - RNA, 21 nt, RNAi
accggaggagagacucaccuu

SEQ ID NO: 25504 - RNA, 21 nt, RNAi
uuuggccuccucucugagugg

SEQ ID NO: 25505 - DNA, 21 bp, Homo sapiens
aaccggaggagagactcacca

SEQ ID NO: 25506 - RNA, 21 nt, RNAi
ccggaggagagacucaccauu

SEQ ID NO: 25507 - RNA, 21 nt, RNAi
uuggccuccucucugaguggu

SEQ ID NO: 25508 - DNA, 21 bp, Homo sapiens
aatgtgctgccttctgctcag

SEQ ID NO: 25509 - RNA, 21 nt, RNAi
ugugcugccuucugcucaguu

SEQ ID NO: 25510 - RNA, 21 nt, RNAi
uuacacgacggaagacgaguc

SEQ ID NO: 25511 - DNA, 21 bp, Homo sapiens
aaggcagtggttgcaggaatc

SEQ ID NO: 25512 - RNA, 21 nt, RNAi
ggcagugguugcaggaaucuu

SEQ ID NO: 25513 - RNA, 21 nt, RNAi
uuccgucaccaacguccuuag

SEQ ID NO: 25514 - DNA, 21 bp, Homo sapiens
aatccagcaggctcacgcgga

SEQ ID NO: 25515 - RNA, 21 nt, RNAi
uccagcaggcucacgcggauu

SEQ ID NO: 25516 - RNA, 21 nt, RNAi
uuaggucguccgagugcgccu

SEQ ID NO: 25517 - DNA, 21 bp, Homo sapiens
aacagttggccaacatgagaa

SEQ ID NO: 25518 - RNA, 21 nt, RNAi
caguuggccaacaugagaauu

SEQ ID NO: 25519 - RNA, 21 nt, RNAi
uugucaaccgguuguacucuu

SEQ ID NO: 25520 - DNA, 21 bp, Homo sapiens
aacatgagaatccaggatctg

SEQ ID NO: 25521 - RNA, 21 nt, RNAi
caugagaauccaggaucuguu

SEQ ID NO: 25522 - RNA, 21 nt, RNAi
uuguacucuuagguccuagac

SEQ ID NO: 25523 - DNA, 21 bp, Homo sapiens
aatccaggatctgaaagtcag

SEQ ID NO: 25524 - RNA, 21 nt, RNAi
uccaggaucugaaagucaguu

SEQ ID NO: 25525 - RNA, 21 nt, RNAi
uuagguccuagacuuucaguc

SEQ ID NO: 25526 - DNA, 21 bp, Homo sapiens
aagaggaagttacttggcacc

SEQ ID NO: 25527 - RNA, 21 nt, RNAi
gaggaaguuacuuggcaccuu

SEQ ID NO: 25528 - RNA, 21 nt, RNAi
uucuccuucaaugaaccgugg

SEQ ID NO: 25529 - DNA, 21 bp, Homo sapiens
aagttacttggcaccaagcca

SEQ ID NO: 25530 - RNA, 21 nt, RNAi
guuacuuggcaccaagccauu

SEQ ID NO: 25531 - RNA, 21 nt, RNAi
uucaaugaaccgugguucggu

SEQ ID NO: 25532 - DNA, 21 bp, Homo sapiens
aagccaaaggacagtgtctat

SEQ ID NO: 25533 - RNA, 21 nt, RNAi
gccaaaggacagugucuauuu

SEQ ID NO: 25534 - RNA, 21 nt, RNAi
uucgguuuccugucacagaua

SEQ ID NO: 25535 - DNA, 21 bp, Homo sapiens
aaaggacagtgtctatatcca

SEQ ID NO: 25536 - RNA, 21 nt, RNAi
aggacagugucuauauccauu

SEQ ID NO: 25537 - RNA, 21 nt, RNAi
uuuccugucacagauauaggu

SEQ ID NO: 25538 - DNA, 21 bp, Homo sapiens
aaggacagtgtctatatccac

SEQ ID NO: 25539 - RNA, 21 nt, RNAi
ggacagugucuauauccacuu

SEQ ID NO: 25540 - RNA, 21 nt, RNAi
uuccugucacagauauaggug

SEQ ID NO: 25541 - DNA, 21 bp, Homo sapiens
aatggagccgaggattccaat

SEQ ID NO: 25542 - RNA, 21 nt, RNAi
uggagccgaggauuccaauuu

SEQ ID NO: 25543 - RNA, 21 nt, RNAi
uuaccucggcuccuaagguua

SEQ ID NO: 25544 - DNA, 21 bp, Homo sapiens
aaactccgagatgtgattgct

SEQ ID NO: 25545 - RNA, 21 nt, RNAi
acuccgagaugugauugcuuu

SEQ ID NO: 25546 - RNA, 21 nt, RNAi
uuugaggcucuacacuaacga

SEQ ID NO: 25547 - DNA, 21 bp, Homo sapiens
aactccgagatgtgattgctc

SEQ ID NO: 25548 - RNA, 21 nt, RNAi
cuccgagaugugauugcucuu

SEQ ID NO: 25549 - RNA, 21 nt, RNAi
uugaggcucuacacuaacgag

SEQ ID NO: 25550 - DNA, 21 bp, Homo sapiens
aagatgagaaactgaatgaag

SEQ ID NO: 25551 - RNA, 21 nt, RNAi
gaugagaaacugaaugaaguu

SEQ ID NO: 25552 - RNA, 21 nt, RNAi
uucuacucuuugacuuacuuc

SEQ ID NO: 25553 - DNA, 21 bp, Homo sapiens
aaactgaatgaagtaatgcag

SEQ ID NO: 25554 - RNA, 21 nt, RNAi
acugaaugaaguaaugcaguu

SEQ ID NO: 25555 - RNA, 21 nt, RNAi
uuugacuuacuucauuacguc

SEQ ID NO: 25556 - DNA, 21 bp, Homo sapiens
aactgaatgaagtaatgcagg

SEQ ID NO: 25557 - RNA, 21 nt, RNAi
cugaaugaaguaaugcagguu

SEQ ID NO: 25558 - RNA, 21 nt, RNAi
uugacuuacuucauuacgucc

SEQ ID NO: 25559 - DNA, 21 bp, Homo sapiens
aatgaagtaatgcaggaggct

SEQ ID NO: 25560 - RNA, 21 nt, RNAi
ugaaguaaugcaggaggcuuu

SEQ ID NO: 25561 - RNA, 21 nt, RNAi
uuacuucauuacguccuccga

SEQ ID NO: 25562 - DNA, 21 bp, Homo sapiens
aagtaatgcaggaggcttgga

SEQ ID NO: 25563 - RNA, 21 nt, RNAi
guaaugcaggaggcuuggauu

SEQ ID NO: 25564 - RNA, 21 nt, RNAi
uucauuacguccuccgaaccu

SEQ ID NO: 25565 - DNA, 21 bp, Homo sapiens
aatgcaggaggcttggaagta

SEQ ID NO: 25566 - RNA, 21 nt, RNAi
ugcaggaggcuuggaaguauu

SEQ ID NO: 25567 - RNA, 21 nt, RNAi
uuacguccuccgaaccuucau

SEQ ID NO: 25568 - DNA, 21 bp, Homo sapiens
aatgcaaactcctaagagata

SEQ ID NO: 25569 - RNA, 21 nt, RNAi
ugcaaacuccuaagagauauu

SEQ ID NO: 25570 - RNA, 21 nt, RNAi
uuacguuugaggauucucuau

SEQ ID NO: 25571 - DNA, 21 bp, Homo sapiens
aaactcctaagagatactctg

SEQ ID NO: 25572 - RNA, 21 nt, RNAi
acuccuaagagauacucuguu

SEQ ID NO: 25573 - RNA, 21 nt, RNAi
uuugaggauucucuaugagac

SEQ ID NO: 25574 - DNA, 21 bp, Homo sapiens
aactcctaagagatactctgc

SEQ ID NO: 25575 - RNA, 21 nt, RNAi
cuccuaagagauacucugcuu

SEQ ID NO: 25576 - RNA, 21 nt, RNAi
uugaggauucucuaugagacg

SEQ ID NO: 25577 - DNA, 21 bp, Homo sapiens
aagagatactctgcagagctt

SEQ ID NO: 25578 - RNA, 21 nt, RNAi
gagauacucugcagagcuuuu

SEQ ID NO: 25579 - RNA, 21 nt, RNAi
uucucuaugagacgucucgaa

SEQ ID NO: 25580 - DNA, 21 bp, Homo sapiens
aatggtcgtggattcacagat

SEQ ID NO: 25581 - RNA, 21 nt, RNAi
uggucguggauucacagauuu

SEQ ID NO: 25582 - RNA, 21 nt, RNAi
uuaccagcaccuaagugucua

SEQ ID NO: 25583 - DNA, 21 bp, Homo sapiens
aaactggcagaaattgtgaag

SEQ ID NO: 25584 - RNA, 21 nt, RNAi
acuggcagaaauugugaaguu

SEQ ID NO: 25585 - RNA, 21 nt, RNAi
uuugaccgucuuuaacacuuc

SEQ ID NO: 25586 - DNA, 21 bp, Homo sapiens
aactggcagaaattgtgaagc

SEQ ID NO: 25587 - RNA, 21 nt, RNAi
cuggcagaaauugugaagcuu

SEQ ID NO: 25588 - RNA, 21 nt, RNAi
uugaccgucuuuaacacuucg

SEQ ID NO: 25589 - DNA, 21 bp, Homo sapiens
aaattgtgaagcaggtgatag

SEQ ID NO: 25590 - RNA, 21 nt, RNAi
auugugaagcaggugauaguu

SEQ ID NO: 25591 - RNA, 21 nt, RNAi
uuuaacacuucguccacuauc

SEQ ID NO: 25592 - DNA, 21 bp, Homo sapiens
aattgtgaagcaggtgataga

SEQ ID NO: 25593 - RNA, 21 nt, RNAi
uugugaagcaggugauagauu

SEQ ID NO: 25594 - RNA, 21 nt, RNAi
uuaacacuucguccacuaucu

SEQ ID NO: 25595 - DNA, 21 bp, Homo sapiens
aagcaggtgatagaagagcaa

SEQ ID NO: 25596 - RNA, 21 nt, RNAi
gcaggugauagaagagcaauu

SEQ ID NO: 25597 - RNA, 21 nt, RNAi
uucguccacuaucuucucguu

SEQ ID NO: 25598 - DNA, 21 bp, Homo sapiens
aataatgacagcttcagactt

SEQ ID NO: 25599 - RNA, 21 nt, RNAi
uaaugacagcuucagacuuuu

SEQ ID NO: 25600 - RNA, 21 nt, RNAi
uuauuacugucgaagucugaa

SEQ ID NO: 25601 - DNA, 21 bp, Homo sapiens
aatgacagcttcagactttgt

SEQ ID NO: 25602 - RNA, 21 nt, RNAi
ugacagcuucagacuuuguuu

SEQ ID NO: 25603 - RNA, 21 nt, RNAi
uuacugucgaagucugaaaca

SEQ ID NO: 25604 - DNA, 21 bp, Homo sapiens
aaagctgctgtatagatttag

SEQ ID NO: 25605 - RNA, 21 nt, RNAi
agcugcuguauagauuuaguu

SEQ ID NO: 25606 - RNA, 21 nt, RNAi
uuucgacgacauaucuaaauc

SEQ ID NO: 25607 - DNA, 21 bp, Homo sapiens
aagctgctgtatagatttagg

SEQ ID NO: 25608 - RNA, 21 nt, RNAi
gcugcuguauagauuuagguu

SEQ ID NO: 25609 - RNA, 21 nt, RNAi
uucgacgacauaucuaaaucc

SEQ ID NO: 25610 - DNA, 21 bp, Homo sapiens
aaagctcagttctagagacat

SEQ ID NO: 25611 - RNA, 21 nt, RNAi
agcucaguucuagagacauuu

SEQ ID NO: 25612 - RNA, 21 nt, RNAi
uuucgagucaagaucucugua

SEQ ID NO: 25613 - DNA, 21 bp, Homo sapiens
aagctcagttctagagacata

SEQ ID NO: 25614 - RNA, 21 nt, RNAi
gcucaguucuagagacauauu

SEQ ID NO: 25615 - RNA, 21 nt, RNAi
uucgagucaagaucucuguau

SEQ ID NO: 25616 - DNA, 21 bp, Homo sapiens
aagatgacagatgatgctgtc

SEQ ID NO: 25617 - RNA, 21 nt, RNAi
gaugacagaugaugcugucuu

SEQ ID NO: 25618 - RNA, 21 nt, RNAi
uucuacugucuacuacgacag

SEQ ID NO: 25619 - DNA, 21 bp, Homo sapiens
aaatcacttgccagcagtaga

SEQ ID NO: 25620 - RNA, 21 nt, RNAi
aucacuugccagcaguagauu

SEQ ID NO: 25621 - RNA, 21 nt, RNAi
uuuagugaacggucgucaucu

SEQ ID NO: 25622 - DNA, 21 bp, Homo sapiens
aatcacttgccagcagtagaa

SEQ ID NO: 25623 - RNA, 21 nt, RNAi
ucacuugccagcaguagaauu

SEQ ID NO: 25624 - RNA, 21 nt, RNAi
uuagugaacggucgucaucuu

SEQ ID NO: 25625 - DNA, 21 bp, Homo sapiens
aaaggaccgactataccgacc

SEQ ID NO: 25626 - RNA, 21 nt, RNAi
aggaccgacuauaccgaccuu

SEQ ID NO: 25627 - RNA, 21 nt, RNAi
uuuccuggcugauauggcugg

SEQ ID NO: 25628 - DNA, 21 bp, Homo sapiens
aaggaccgactataccgacct

SEQ ID NO: 25629 - RNA, 21 nt, RNAi
ggaccgacuauaccgaccuuu

SEQ ID NO: 25630 - RNA, 21 nt, RNAi
uuccuggcugauauggcugga

SEQ ID NO: 25631 - DNA, 21 bp, Homo sapiens
aaacagttgaatcaaggactc

SEQ ID NO: 25632 - RNA, 21 nt, RNAi
acaguugaaucaaggacucuu

SEQ ID NO: 25633 - RNA, 21 nt, RNAi
uuugucaacuuaguuccugag

SEQ ID NO: 25634 - DNA, 21 bp, Homo sapiens
aacagttgaatcaaggactct

SEQ ID NO: 25635 - RNA, 21 nt, RNAi
caguugaaucaaggacucuuu

SEQ ID NO: 25636 - RNA, 21 nt, RNAi
uugucaacuuaguuccugaga

SEQ ID NO: 25637 - DNA, 21 bp, Homo sapiens
cactgagtatgtcggaggaga

SEQ ID NO: 25638 - RNA, 21 nt, RNAi
cugaguaugucggaggagauu

SEQ ID NO: 25639 - RNA, 21 nt, RNAi
uugacucauacagccuccucu

SEQ ID NO: 25640 - DNA, 21 bp, Homo sapiens
catggacaaagccatcaagga

SEQ ID NO: 25641 - RNA, 21 nt, RNAi
uggacaaagccaucaaggauu

SEQ ID NO: 25642 - RNA, 21 nt, RNAi
uuaccuguuucgguaguuccu

SEQ ID NO: 25643 - DNA, 21 bp, Homo sapiens
caaagccatcaaggaaacttc

SEQ ID NO: 25644 - RNA, 21 nt, RNAi
aagccaucaaggaaacuucuu

SEQ ID NO: 25645 - RNA, 21 nt, RNAi
uuuucgguaguuccuuugaag

SEQ ID NO: 25646 - DNA, 21 bp, Homo sapiens
cagtatcaattggactcagaa

SEQ ID NO: 25647 - RNA, 21 nt, RNAi
guaucaauuggacucagaauu

SEQ ID NO: 25648 - RNA, 21 nt, RNAi
uucauaguuaaccugagucuu

SEQ ID NO: 25649 - DNA, 21 bp, Homo sapiens
cagttagagtctgtgtaaaga

SEQ ID NO: 25650 - RNA, 21 nt, RNAi
guuagagucuguguaaagauu

SEQ ID NO: 25651 - RNA, 21 nt, RNAi
uucaaucucagacacauuucu

SEQ ID NO: 25652 - DNA, 21 bp, Homo sapiens
caagaacggtttgcgctgaaa

SEQ ID NO: 25653 - RNA, 21 nt, RNAi
agaacgguuugcgcugaaauu

SEQ ID NO: 25654 - RNA, 21 nt, RNAi
uuucuugccaaacgcgacuuu

SEQ ID NO: 25655 - DNA, 21 bp, Homo sapiens
cacatgatgtgtgccacacac

SEQ ID NO: 25656 - RNA, 21 nt, RNAi
caugaugugugccacacacuu

SEQ ID NO: 25657 - RNA, 21 nt, RNAi
uuguacuacacacggugugug

SEQ ID NO: 25658 - DNA, 21 bp, Homo sapiens
cagattattgaagtgtttgct

SEQ ID NO: 25659 - RNA, 21 nt, RNAi
gauuauugaaguguuugcuuu

SEQ ID NO: 25660 - RNA, 21 nt, RNAi
uucuaauaacuucacaaacga

SEQ ID NO: 25661 - DNA, 21 bp, Homo sapiens
cacagaatcagccagcaccgg

SEQ ID NO: 25662 - RNA, 21 nt, RNAi
cagaaucagccagcaccgguu

SEQ ID NO: 25663 - RNA, 21 nt, RNAi
uugucuuagucggucguggcc

SEQ ID NO: 25664 - DNA, 21 bp, Homo sapiens
cagaatcagccagcaccggca

SEQ ID NO: 25665 - RNA, 21 nt, RNAi
gaaucagccagcaccggcauu

SEQ ID NO: 25666 - RNA, 21 nt, RNAi
uucuuagucggucguggccgu

SEQ ID NO: 25667 - DNA, 21 bp, Homo sapiens
cagccagcaccggcactttac

SEQ ID NO: 25668 - RNA, 21 nt, RNAi
gccagcaccggcacuuuacuu

SEQ ID NO: 25669 - RNA, 21 nt, RNAi
uucggucguggccgugaaaug

SEQ ID NO: 25670 - DNA, 21 bp, Homo sapiens
cagcaccggcactttacagag

SEQ ID NO: 25671 - RNA, 21 nt, RNAi
gcaccggcacuuuacagaguu

SEQ ID NO: 25672 - RNA, 21 nt, RNAi
uucguggccgugaaaugucuc

SEQ ID NO: 25673 - DNA, 21 bp, Homo sapiens
caccggcactttacagagaag

SEQ ID NO: 25674 - RNA, 21 nt, RNAi
ccggcacuuuacagagaaguu

SEQ ID NO: 25675 - RNA, 21 nt, RNAi
uuggccgugaaaugucucuuc

SEQ ID NO: 25676 - DNA, 21 bp, Homo sapiens
cactttacagagaagcaagcc

SEQ ID NO: 25677 - RNA, 21 nt, RNAi
cuuuacagagaagcaagccuu

SEQ ID NO: 25678 - RNA, 21 nt, RNAi
uugaaaugucucuucguucgg

SEQ ID NO: 25679 - DNA, 21 bp, Homo sapiens
cagagaagcaagccagccaag

SEQ ID NO: 25680 - RNA, 21 nt, RNAi
gagaagcaagccagccaaguu

SEQ ID NO: 25681 - RNA, 21 nt, RNAi
uucucuucguucggucgguuc

SEQ ID NO: 25682 - DNA, 21 bp, Homo sapiens
caagccagccaagtaacaaag

SEQ ID NO: 25683 - RNA, 21 nt, RNAi
agccagccaaguaacaaaguu

SEQ ID NO: 25684 - RNA, 21 nt, RNAi
uuucggucgguucauuguuuc

SEQ ID NO: 25685 - DNA, 21 bp, Homo sapiens
cagccaagtaacaaagcagat

SEQ ID NO: 25686 - RNA, 21 nt, RNAi
gccaaguaacaaagcagauuu

SEQ ID NO: 25687 - RNA, 21 nt, RNAi
uucgguucauuguuucgucua

SEQ ID NO: 25688 - DNA, 21 bp, Homo sapiens
caagtaacaaagcagatagct

SEQ ID NO: 25689 - RNA, 21 nt, RNAi
aguaacaaagcagauagcuuu

SEQ ID NO: 25690 - RNA, 21 nt, RNAi
uuucauuguuucgucuaucga

SEQ ID NO: 25691 - DNA, 21 bp, Homo sapiens
caaagcagatagctttggctc

SEQ ID NO: 25692 - RNA, 21 nt, RNAi
aagcagauagcuuuggcucuu

SEQ ID NO: 25693 - RNA, 21 nt, RNAi
uuuucgucuaucgaaaccgag

SEQ ID NO: 25694 - DNA, 21 bp, Homo sapiens
cagatagctttggctctgcgg

SEQ ID NO: 25695 - RNA, 21 nt, RNAi
gauagcuuuggcucugcgguu

SEQ ID NO: 25696 - RNA, 21 nt, RNAi
uucuaucgaaaccgagacgcc

SEQ ID NO: 25697 - DNA, 21 bp, Homo sapiens
cactgtcacttgttaaacatt

SEQ ID NO: 25698 - RNA, 21 nt, RNAi
cugucacuuguuaaacauuuu

SEQ ID NO: 25699 - RNA, 21 nt, RNAi
uugacagugaacaauuuguaa

SEQ ID NO: 25700 - DNA, 21 bp, Homo sapiens
cacttgttaaacattgcgcac

SEQ ID NO: 25701 - RNA, 21 nt, RNAi
cuuguuaaacauugcgcacuu

SEQ ID NO: 25702 - RNA, 21 nt, RNAi
uugaacaauuuguaacgcgug

SEQ ID NO: 25703 - DNA, 21 bp, Homo sapiens
cattgcgcacagagacctcaa

SEQ ID NO: 25704 - RNA, 21 nt, RNAi
uugcgcacagagaccucaauu

SEQ ID NO: 25705 - RNA, 21 nt, RNAi
uuaacgcgugucucuggaguu

SEQ ID NO: 25706 - DNA, 21 bp, Homo sapiens
cacagagacctcaagcctgaa

SEQ ID NO: 25707 - RNA, 21 nt, RNAi
cagagaccucaagccugaauu

SEQ ID NO: 25708 - RNA, 21 nt, RNAi
uugucucuggaguucggacuu

SEQ ID NO: 25709 - DNA, 21 bp, Homo sapiens
cagtgaagttgtgtgactttg

SEQ ID NO: 25710 - RNA, 21 nt, RNAi
gugaaguugugugacuuuguu

SEQ ID NO: 25711 - RNA, 21 nt, RNAi
uucacuucaacacacugaaac

SEQ ID NO: 25712 - DNA, 21 bp, Homo sapiens
caagattgaccaaggtgactt

SEQ ID NO: 25713 - RNA, 21 nt, RNAi
agauugaccaaggugacuuuu

SEQ ID NO: 25714 - RNA, 21 nt, RNAi
uuucuaacugguuccacugaa

SEQ ID NO: 25715 - DNA, 21 bp, Homo sapiens
caggtactggaggcgcaaaga

SEQ ID NO: 25716 - RNA, 21 nt, RNAi
gguacuggaggcgcaaagauu

SEQ ID NO: 25717 - RNA, 21 nt, RNAi
uuccaugaccuccgcguuucu

SEQ ID NO: 25718 - DNA, 21 bp, Homo sapiens
caaagaaggcatcagaaggag

SEQ ID NO: 25719 - RNA, 21 nt, RNAi
aagaaggcaucagaaggaguu

SEQ ID NO: 25720 - RNA, 21 nt, RNAi
uuuucuuccguagucuuccuc

SEQ ID NO: 25721 - DNA, 21 bp, Homo sapiens
catcagaaggagaaatctggc

SEQ ID NO: 25722 - RNA, 21 nt, RNAi
ucagaaggagaaaucuggcuu

SEQ ID NO: 25723 - RNA, 21 nt, RNAi
uuagucuuccucuuuagaccg

SEQ ID NO: 25724 - DNA, 21 bp, Homo sapiens
cagaaggagaaatctggcatc

SEQ ID NO: 25725 - RNA, 21 nt, RNAi
gaaggagaaaucuggcaucuu

SEQ ID NO: 25726 - RNA, 21 nt, RNAi
uucuuccucuuuagaccguag

SEQ ID NO: 25727 - DNA, 21 bp, Homo sapiens
catcatacctacctcaccgac

SEQ ID NO: 25728 - RNA, 21 nt, RNAi
ucauaccuaccucaccgacuu

SEQ ID NO: 25729 - RNA, 21 nt, RNAi
uuaguauggauggaguggcug

SEQ ID NO: 25730 - DNA, 21 bp, Homo sapiens
catacctacctcaccgacgcc

SEQ ID NO: 25731 - RNA, 21 nt, RNAi
uaccuaccucaccgacgccuu

SEQ ID NO: 25732 - RNA, 21 nt, RNAi
uuauggauggaguggcugcgg

SEQ ID NO: 25733 - DNA, 21 bp, Homo sapiens
cacttacaacaagagctgtga

SEQ ID NO: 25734 - RNA, 21 nt, RNAi
cuuacaacaagagcugugauu

SEQ ID NO: 25735 - RNA, 21 nt, RNAi
uugaauguuguucucgacacu

SEQ ID NO: 25736 - DNA, 21 bp, Homo sapiens
caacaagagctgtgacttgtg

SEQ ID NO: 25737 - RNA, 21 nt, RNAi
acaagagcugugacuuguguu

SEQ ID NO: 25738 - RNA, 21 nt, RNAi
uuuguucucgacacugaacac

SEQ ID NO: 25739 - DNA, 21 bp, Homo sapiens
caagagctgtgacttgtggtc

SEQ ID NO: 25740 - RNA, 21 nt, RNAi
agagcugugacuuguggucuu

SEQ ID NO: 25741 - RNA, 21 nt, RNAi
uuucucgacacugaacaccag

SEQ ID NO: 25742 - DNA, 21 bp, Homo sapiens
caaacaccacagccggactat

SEQ ID NO: 25743 - RNA, 21 nt, RNAi
aacaccacagccggacuauuu

SEQ ID NO: 25744 - RNA, 21 nt, RNAi
uuuuguggugucggccugaua

SEQ ID NO: 25745 - DNA, 21 bp, Homo sapiens
caaaggatatgcgaagaaaga

SEQ ID NO: 25746 - RNA, 21 nt, RNAi
aaggauaugcgaagaaagauu

SEQ ID NO: 25747 - RNA, 21 nt, RNAi
uuuuccuauacgcuucuuucu

SEQ ID NO: 25748 - DNA, 21 bp, Homo sapiens
cagaggaagagtggagtcaga

SEQ ID NO: 25749 - RNA, 21 nt, RNAi
gaggaagaguggagucagauu

SEQ ID NO: 25750 - RNA, 21 nt, RNAi
uucuccuucucaccucagucu

SEQ ID NO: 25751 - DNA, 21 bp, Homo sapiens
cagatctcagagatggccaaa

SEQ ID NO: 25752 - RNA, 21 nt, RNAi
gaucucagagauggccaaauu

SEQ ID NO: 25753 - RNA, 21 nt, RNAi
uucuagagucucuaccgguuu

SEQ ID NO: 25754 - DNA, 21 bp, Homo sapiens
cagagatggccaaagatgttg

SEQ ID NO: 25755 - RNA, 21 nt, RNAi
gagauggccaaagauguuguu

SEQ ID NO: 25756 - RNA, 21 nt, RNAi
uucucuaccgguuucuacaac

SEQ ID NO: 25757 - DNA, 21 bp, Homo sapiens
caaagatgttgtgaggaagct

SEQ ID NO: 25758 - RNA, 21 nt, RNAi
aagauguugugaggaagcuuu

SEQ ID NO: 25759 - RNA, 21 nt, RNAi
uuuucuacaacacuccuucga

SEQ ID NO: 25760 - DNA, 21 bp, Homo sapiens
caaaccggaggagagactcac

SEQ ID NO: 25761 - RNA, 21 nt, RNAi
aaccggaggagagacucacuu

SEQ ID NO: 25762 - RNA, 21 nt, RNAi
uuuuggccuccucucugagug

SEQ ID NO: 25763 - DNA, 21 bp, Homo sapiens
cagctgatgatggacaaggca

SEQ ID NO: 25764 - RNA, 21 nt, RNAi
gcugaugauggacaaggcauu

SEQ ID NO: 25765 - RNA, 21 nt, RNAi
uucgacuacuaccuguuccgu

SEQ ID NO: 25766 - DNA, 21 bp, Homo sapiens
caaggcagtggttgcaggaat

SEQ ID NO: 25767 - RNA, 21 nt, RNAi
aggcagugguugcaggaauuu

SEQ ID NO: 25768 - RNA, 21 nt, RNAi
uuuccgucaccaacguccuua

SEQ ID NO: 25769 - DNA, 21 bp, Homo sapiens
cagtggttgcaggaatccagc

SEQ ID NO: 25770 - RNA, 21 nt, RNAi
gugguugcaggaauccagcuu

SEQ ID NO: 25771 - RNA, 21 nt, RNAi
uucaccaacguccuuaggucg

SEQ ID NO: 25772 - DNA, 21 bp, Homo sapiens
caggaatccagcaggctcacg

SEQ ID NO: 25773 - RNA, 21 nt, RNAi
ggaauccagcaggcucacguu

SEQ ID NO: 25774 - RNA, 21 nt, RNAi
uuccuuaggucguccgagugc

SEQ ID NO: 25775 - DNA, 21 bp, Homo sapiens
caggctcacgcggaacagttg

SEQ ID NO: 25776 - RNA, 21 nt, RNAi
ggcucacgcggaacaguuguu

SEQ ID NO: 25777 - RNA, 21 nt, RNAi
uuccgagugcgccuugucaac

SEQ ID NO: 25778 - DNA, 21 bp, Homo sapiens
cacgcggaacagttggccaac

SEQ ID NO: 25779 - RNA, 21 nt, RNAi
cgcggaacaguuggccaacuu

SEQ ID NO: 25780 - RNA, 21 nt, RNAi
uugcgccuugucaaccgguug

SEQ ID NO: 25781 - DNA, 21 bp, Homo sapiens
cagttggccaacatgagaatc

SEQ ID NO: 25782 - RNA, 21 nt, RNAi
guuggccaacaugagaaucuu

SEQ ID NO: 25783 - RNA, 21 nt, RNAi
uucaaccgguuguacucuuag

SEQ ID NO: 25784 - DNA, 21 bp, Homo sapiens
caacatgagaatccaggatct

SEQ ID NO: 25785 - RNA, 21 nt, RNAi
acaugagaauccaggaucuuu

SEQ ID NO: 25786 - RNA, 21 nt, RNAi
uuuguacucuuagguccuaga

SEQ ID NO: 25787 - DNA, 21 bp, Homo sapiens
catgagaatccaggatctgaa

SEQ ID NO: 25788 - RNA, 21 nt, RNAi
ugagaauccaggaucugaauu

SEQ ID NO: 25789 - RNA, 21 nt, RNAi
uuacucuuagguccuagacuu

SEQ ID NO: 25790 - DNA, 21 bp, Homo sapiens
caggatctgaaagtcagcctc

SEQ ID NO: 25791 - RNA, 21 nt, RNAi
ggaucugaaagucagccucuu

SEQ ID NO: 25792 - RNA, 21 nt, RNAi
uuccuagacuuucagucggag

SEQ ID NO: 25793 - DNA, 21 bp, Homo sapiens
cattctgcggaagaggaagtt

SEQ ID NO: 25794 - RNA, 21 nt, RNAi
uucugcggaagaggaaguuuu

SEQ ID NO: 25795 - RNA, 21 nt, RNAi
uuaagacgccuucuccuucaa

SEQ ID NO: 25796 - DNA, 21 bp, Homo sapiens
caccaagccaaaggacagtgt

SEQ ID NO: 25797 - RNA, 21 nt, RNAi
ccaagccaaaggacaguguuu

SEQ ID NO: 25798 - RNA, 21 nt, RNAi
uugguucgguuuccugucaca

SEQ ID NO: 25799 - DNA, 21 bp, Homo sapiens
caagccaaaggacagtgtcta

SEQ ID NO: 25800 - RNA, 21 nt, RNAi
agccaaaggacagugucuauu

SEQ ID NO: 25801 - RNA, 21 nt, RNAi
uuucgguuuccugucacagau

SEQ ID NO: 25802 - DNA, 21 bp, Homo sapiens
caaaggacagtgtctatatcc

SEQ ID NO: 25803 - RNA, 21 nt, RNAi
aaggacagugucuauauccuu

SEQ ID NO: 25804 - RNA, 21 nt, RNAi
uuuuccugucacagauauagg

SEQ ID NO: 25805 - DNA, 21 bp, Homo sapiens
cagtgtctatatccacgacca

SEQ ID NO: 25806 - RNA, 21 nt, RNAi
gugucuauauccacgaccauu

SEQ ID NO: 25807 - RNA, 21 nt, RNAi
uucacagauauaggugcuggu

SEQ ID NO: 25808 - DNA, 21 bp, Homo sapiens
cacgaccatgagaatggagcc

SEQ ID NO: 25809 - RNA, 21 nt, RNAi
cgaccaugagaauggagccuu

SEQ ID NO: 25810 - RNA, 21 nt, RNAi
uugcugguacucuuaccucgg

SEQ ID NO: 25811 - DNA, 21 bp, Homo sapiens
catgagaatggagccgaggat

SEQ ID NO: 25812 - RNA, 21 nt, RNAi
ugagaauggagccgaggauuu

SEQ ID NO: 25813 - RNA, 21 nt, RNAi
uuacucuuaccucggcuccua

SEQ ID NO: 25814 - DNA, 21 bp, Homo sapiens
caggctggagagaatgaagat

SEQ ID NO: 25815 - RNA, 21 nt, RNAi
ggcuggagagaaugaagauuu

SEQ ID NO: 25816 - RNA, 21 nt, RNAi
uuccgaccucucuuacuucua

SEQ ID NO: 25817 - DNA, 21 bp, Homo sapiens
caggaggcttggaagtataac

SEQ ID NO: 25818 - RNA, 21 nt, RNAi
ggaggcuuggaaguauaacuu

SEQ ID NO: 25819 - RNA, 21 nt, RNAi
uuccuccgaaccuucauauug

SEQ ID NO: 25820 - DNA, 21 bp, Homo sapiens
caaactcctaagagatactct

SEQ ID NO: 25821 - RNA, 21 nt, RNAi
aacuccuaagagauacucuuu

SEQ ID NO: 25822 - RNA, 21 nt, RNAi
uuuugaggauucucuaugaga

SEQ ID NO: 25823 - DNA, 21 bp, Homo sapiens
cagagcttcagctggaatggt

SEQ ID NO: 25824 - RNA, 21 nt, RNAi
gagcuucagcuggaaugguuu

SEQ ID NO: 25825 - RNA, 21 nt, RNAi
uucucgaagucgaccuuacca

SEQ ID NO: 25826 - DNA, 21 bp, Homo sapiens
cagctggaatggtcgtggatt

SEQ ID NO: 25827 - RNA, 21 nt, RNAi
gcuggaauggucguggauuuu

SEQ ID NO: 25828 - RNA, 21 nt, RNAi
uucgaccuuaccagcaccuaa

SEQ ID NO: 25829 - DNA, 21 bp, Homo sapiens
cacagataaagtagatcgact

SEQ ID NO: 25830 - RNA, 21 nt, RNAi
cagauaaaguagaucgacuuu

SEQ ID NO: 25831 - RNA, 21 nt, RNAi
uugucuauuucaucuagcuga

SEQ ID NO: 25832 - DNA, 21 bp, Homo sapiens
cagataaagtagatcgactaa

SEQ ID NO: 25833 - RNA, 21 nt, RNAi
gauaaaguagaucgacuaauu

SEQ ID NO: 25834 - RNA, 21 nt, RNAi
uucuauuucaucuagcugauu

SEQ ID NO: 25835 - DNA, 21 bp, Homo sapiens
cagaaattgtgaagcaggtga

SEQ ID NO: 25836 - RNA, 21 nt, RNAi
gaaauugugaagcaggugauu

SEQ ID NO: 25837 - RNA, 21 nt, RNAi
uucuuuaacacuucguccacu

SEQ ID NO: 25838 - DNA, 21 bp, Homo sapiens
caggtgatagaagagcaaacc

SEQ ID NO: 25839 - RNA, 21 nt, RNAi
ggugauagaagagcaaaccuu

SEQ ID NO: 25840 - RNA, 21 nt, RNAi
uuccacuaucuucucguuugg

SEQ ID NO: 25841 - DNA, 21 bp, Homo sapiens
caataatgacagcttcagact

SEQ ID NO: 25842 - RNA, 21 nt, RNAi
auaaugacagcuucagacuuu

SEQ ID NO: 25843 - RNA, 21 nt, RNAi
uuuauuacugucgaagucuga

SEQ ID NO: 25844 - DNA, 21 bp, Homo sapiens
catttccacattgattaaagc

SEQ ID NO: 25845 - RNA, 21 nt, RNAi
uuuccacauugauuaaagcuu

SEQ ID NO: 25846 - RNA, 21 nt, RNAi
uuaaagguguaacuaauuucg

SEQ ID NO: 25847 - DNA, 21 bp, Homo sapiens
cacattgattaaagctgctgt

SEQ ID NO: 25848 - RNA, 21 nt, RNAi
cauugauuaaagcugcuguuu

SEQ ID NO: 25849 - RNA, 21 nt, RNAi
uuguaacuaauuucgacgaca

SEQ ID NO: 25850 - DNA, 21 bp, Homo sapiens
cattgattaaagctgctgtat

SEQ ID NO: 25851 - RNA, 21 nt, RNAi
uugauuaaagcugcuguauuu

SEQ ID NO: 25852 - RNA, 21 nt, RNAi
uuaacuaauuucgacgacaua

SEQ ID NO: 25853 - DNA, 21 bp, Homo sapiens
cagttctagagacatactatt

SEQ ID NO: 25854 - RNA, 21 nt, RNAi
guucuagagacauacuauuuu

SEQ ID NO: 25855 - RNA, 21 nt, RNAi
uucaagaucucuguaugauaa

SEQ ID NO: 25856 - DNA, 21 bp, Homo sapiens
catactattactttaggactg

SEQ ID NO: 25857 - RNA, 21 nt, RNAi
uacuauuacuuuaggacuguu

SEQ ID NO: 25858 - RNA, 21 nt, RNAi
uuaugauaaugaaauccugac

SEQ ID NO: 25859 - DNA, 21 bp, Homo sapiens
cagatgatgctgtcaagcaat

SEQ ID NO: 25860 - RNA, 21 nt, RNAi
gaugaugcugucaagcaauuu

SEQ ID NO: 25861 - RNA, 21 nt, RNAi
uucuacuacgacaguucguua

SEQ ID NO: 25862 - DNA, 21 bp, Homo sapiens
cagttgaatcaaggactctgg

SEQ ID NO: 25863 - RNA, 21 nt, RNAi
guugaaucaaggacucugguu

SEQ ID NO: 25864 - RNA, 21 nt, RNAi
uucaacuuaguuccugagacc

SEQ ID NO: 25865 - DNA, 21 bp, Homo sapiens
gagtatgtcggaggagagcga

SEQ ID NO: 25866 - RNA, 21 nt, RNAi
guaugucggaggagagcgauu

SEQ ID NO: 25867 - RNA, 21 nt, RNAi
uucauacagccuccucucgcu

SEQ ID NO: 25868 - DNA, 21 bp, Homo sapiens
gaggagagcgacatggacaaa

SEQ ID NO: 25869 - RNA, 21 nt, RNAi
ggagagcgacauggacaaauu

SEQ ID NO: 25870 - RNA, 21 nt, RNAi
uuccucucgcuguaccuguuu

SEQ ID NO: 25871 - DNA, 21 bp, Homo sapiens
gagagcgacatggacaaagcc

SEQ ID NO: 25872 - RNA, 21 nt, RNAi
gagcgacauggacaaagccuu

SEQ ID NO: 25873 - RNA, 21 nt, RNAi
uucucgcuguaccuguuucgg

SEQ ID NO: 25874 - DNA, 21 bp, Homo sapiens
gagcgacatggacaaagccat

SEQ ID NO: 25875 - RNA, 21 nt, RNAi
gcgacauggacaaagccauuu

SEQ ID NO: 25876 - RNA, 21 nt, RNAi
uucgcuguaccuguuucggua

SEQ ID NO: 25877 - DNA, 21 bp, Homo sapiens
gacatggacaaagccatcaag

SEQ ID NO: 25878 - RNA, 21 nt, RNAi
cauggacaaagccaucaaguu

SEQ ID NO: 25879 - RNA, 21 nt, RNAi
uuguaccuguuucgguaguuc

SEQ ID NO: 25880 - DNA, 21 bp, Homo sapiens
gacaaagccatcaaggaaact

SEQ ID NO: 25881 - RNA, 21 nt, RNAi
caaagccaucaaggaaacuuu

SEQ ID NO: 25882 - RNA, 21 nt, RNAi
uuguuucgguaguuccuuuga

SEQ ID NO: 25883 - DNA, 21 bp, Homo sapiens
gaagaatacagtatcaattgg

SEQ ID NO: 25884 - RNA, 21 nt, RNAi
agaauacaguaucaauugguu

SEQ ID NO: 25885 - RNA, 21 nt, RNAi
uuucuuaugucauaguuaacc

SEQ ID NO: 25886 - DNA, 21 bp, Homo sapiens
gaatacagtatcaattggact

SEQ ID NO: 25887 - RNA, 21 nt, RNAi
auacaguaucaauuggacuuu

SEQ ID NO: 25888 - RNA, 21 nt, RNAi
uuuaugucauaguuaaccuga

SEQ ID NO: 25889 - DNA, 21 bp, Homo sapiens
gagctggaattagtggtccag

SEQ ID NO: 25890 - RNA, 21 nt, RNAi
gcuggaauuagugguccaguu

SEQ ID NO: 25891 - RNA, 21 nt, RNAi
uucgaccuuaaucaccagguc

SEQ ID NO: 25892 - DNA, 21 bp, Homo sapiens
gaattagtggtccagttagag

SEQ ID NO: 25893 - RNA, 21 nt, RNAi
auuagugguccaguuagaguu

SEQ ID NO: 25894 - RNA, 21 nt, RNAi
uuuaaucaccaggucaaucuc

SEQ ID NO: 25895 - DNA, 21 bp, Homo sapiens
gagtctgtgtaaagaaatcta

SEQ ID NO: 25896 - RNA, 21 nt, RNAi
gucuguguaaagaaaucuauu

SEQ ID NO: 25897 - RNA, 21 nt, RNAi
uucagacacauuucuuuagau

SEQ ID NO: 25898 - DNA, 21 bp, Homo sapiens
gaaatctactcaagaacggtt

SEQ ID NO: 25899 - RNA, 21 nt, RNAi
aaucuacucaagaacgguuuu

SEQ ID NO: 25900 - RNA, 21 nt, RNAi
uuuuagaugaguucuugccaa

SEQ ID NO: 25901 - DNA, 21 bp, Homo sapiens
gaaatgaggtacgtctgcaca

SEQ ID NO: 25902 - RNA, 21 nt, RNAi
aaugagguacgucugcacauu

SEQ ID NO: 25903 - RNA, 21 nt, RNAi
uuuuacuccaugcagacgugu

SEQ ID NO: 25904 - DNA, 21 bp, Homo sapiens
gaggtacgtctgcacatgatg

SEQ ID NO: 25905 - RNA, 21 nt, RNAi
gguacgucugcacaugauguu

SEQ ID NO: 25906 - RNA, 21 nt, RNAi
uuccaugcagacguguacuac

SEQ ID NO: 25907 - DNA, 21 bp, Homo sapiens
gaagtgtttgctaacagtgtc

SEQ ID NO: 25908 - RNA, 21 nt, RNAi
aguguuugcuaacagugucuu

SEQ ID NO: 25909 - RNA, 21 nt, RNAi
uuucacaaacgauugucacag

SEQ ID NO: 25910 - DNA, 21 bp, Homo sapiens
gactcttaattgtaatggaga

SEQ ID NO: 25911 - RNA, 21 nt, RNAi
cucuuaauuguaauggagauu

SEQ ID NO: 25912 - RNA, 21 nt, RNAi
uugagaauuaacauuaccucu

SEQ ID NO: 25913 - DNA, 21 bp, Homo sapiens
gagagctatttcacagaatca

SEQ ID NO: 25914 - RNA, 21 nt, RNAi
gagcuauuucacagaaucauu

SEQ ID NO: 25915 - RNA, 21 nt, RNAi
uucucgauaaagugucuuagu

SEQ ID NO: 25916 - DNA, 21 bp, Homo sapiens
gagctatttcacagaatcagc

SEQ ID NO: 25917 - RNA, 21 nt, RNAi
gcuauuucacagaaucagcuu

SEQ ID NO: 25918 - RNA, 21 nt, RNAi
uucgauaaagugucuuagucg

SEQ ID NO: 25919 - DNA, 21 bp, Homo sapiens
gaatcagccagcaccggcact

SEQ ID NO: 25920 - RNA, 21 nt, RNAi
aucagccagcaccggcacuuu

SEQ ID NO: 25921 - RNA, 21 nt, RNAi
uuuagucggucguggccguga

SEQ ID NO: 25922 - DNA, 21 bp, Homo sapiens
gagaagcaagccagccaagta

SEQ ID NO: 25923 - RNA, 21 nt, RNAi
gaagcaagccagccaaguauu

SEQ ID NO: 25924 - RNA, 21 nt, RNAi
uucuucguucggucgguucau

SEQ ID NO: 25925 - DNA, 21 bp, Homo sapiens
gaagcaagccagccaagtaac

SEQ ID NO: 25926 - RNA, 21 nt, RNAi
agcaagccagccaaguaacuu

SEQ ID NO: 25927 - RNA, 21 nt, RNAi
uuucguucggucgguucauug

SEQ ID NO: 25928 - DNA, 21 bp, Homo sapiens
gatagctttggctctgcggca

SEQ ID NO: 25929 - RNA, 21 nt, RNAi
uagcuuuggcucugcggcauu

SEQ ID NO: 25930 - RNA, 21 nt, RNAi
uuaucgaaaccgagacgccgu

SEQ ID NO: 25931 - DNA, 21 bp, Homo sapiens
gaagttgtgtgactttggatt

SEQ ID NO: 25932 - RNA, 21 nt, RNAi
aguugugugacuuuggauuuu

SEQ ID NO: 25933 - RNA, 21 nt, RNAi
uuucaacacacugaaaccuaa

SEQ ID NO: 25934 - DNA, 21 bp, Homo sapiens
gactttggatttgccaagatt

SEQ ID NO: 25935 - RNA, 21 nt, RNAi
cuuuggauuugccaagauuuu

SEQ ID NO: 25936 - RNA, 21 nt, RNAi
uugaaaccuaaacgguucuaa

SEQ ID NO: 25937 - DNA, 21 bp, Homo sapiens
gatttgccaagattgaccaag

SEQ ID NO: 25938 - RNA, 21 nt, RNAi
uuugccaagauugaccaaguu

SEQ ID NO: 25939 - RNA, 21 nt, RNAi
uuaaacgguucuaacugguuc

SEQ ID NO: 25940 - DNA, 21 bp, Homo sapiens
gattgaccaaggtgacttgat

SEQ ID NO: 25941 - RNA, 21 nt, RNAi
uugaccaaggugacuugauuu

SEQ ID NO: 25942 - RNA, 21 nt, RNAi
uuaacugguuccacugaacua

SEQ ID NO: 25943 - DNA, 21 bp, Homo sapiens
gaccaaggtgacttgatgaca

SEQ ID NO: 25944 - RNA, 21 nt, RNAi
ccaaggugacuugaugacauu

SEQ ID NO: 25945 - RNA, 21 nt, RNAi
uugguuccacugaacuacugu

SEQ ID NO: 25946 - DNA, 21 bp, Homo sapiens
gaggcgcaaagaaggcatcag

SEQ ID NO: 25947 - RNA, 21 nt, RNAi
ggcgcaaagaaggcaucaguu

SEQ ID NO: 25948 - RNA, 21 nt, RNAi
uuccgcguuucuuccguaguc

SEQ ID NO: 25949 - DNA, 21 bp, Homo sapiens
gaaggcatcagaaggagaaat

SEQ ID NO: 25950 - RNA, 21 nt, RNAi
aggcaucagaaggagaaauuu

SEQ ID NO: 25951 - RNA, 21 nt, RNAi
uuuccguagucuuccucuuua

SEQ ID NO: 25952 - DNA, 21 bp, Homo sapiens
gaaggagaaatctggcatcat

SEQ ID NO: 25953 - RNA, 21 nt, RNAi
aggagaaaucuggcaucauuu

SEQ ID NO: 25954 - RNA, 21 nt, RNAi
uuuccucuuuagaccguagua

SEQ ID NO: 25955 - DNA, 21 bp, Homo sapiens
gagaaatctggcatcatacct

SEQ ID NO: 25956 - RNA, 21 nt, RNAi
gaaaucuggcaucauaccuuu

SEQ ID NO: 25957 - RNA, 21 nt, RNAi
uucuuuagaccguaguaugga

SEQ ID NO: 25958 - DNA, 21 bp, Homo sapiens
gaaatctggcatcatacctac

SEQ ID NO: 25959 - RNA, 21 nt, RNAi
aaucuggcaucauaccuacuu

SEQ ID NO: 25960 - RNA, 21 nt, RNAi
uuuuagaccguaguauggaug

SEQ ID NO: 25961 - DNA, 21 bp, Homo sapiens
gattatctatgtgatgctgtg

SEQ ID NO: 25962 - RNA, 21 nt, RNAi
uuaucuaugugaugcuguguu

SEQ ID NO: 25963 - RNA, 21 nt, RNAi
uuaauagauacacuacgacac

SEQ ID NO: 25964 - DNA, 21 bp, Homo sapiens
gatatgcgaagaaagatcatg

SEQ ID NO: 25965 - RNA, 21 nt, RNAi
uaugcgaagaaagaucauguu

SEQ ID NO: 25966 - RNA, 21 nt, RNAi
uuauacgcuucuuucuaguac

SEQ ID NO: 25967 - DNA, 21 bp, Homo sapiens
gaagaaagatcatgacaggca

SEQ ID NO: 25968 - RNA, 21 nt, RNAi
agaaagaucaugacaggcauu

SEQ ID NO: 25969 - RNA, 21 nt, RNAi
uuucuuucuaguacuguccgu

SEQ ID NO: 25970 - DNA, 21 bp, Homo sapiens
gaaagatcatgacaggcagtt

SEQ ID NO: 25971 - RNA, 21 nt, RNAi
aagaucaugacaggcaguuuu

SEQ ID NO: 25972 - RNA, 21 nt, RNAi
uuuucuaguacuguccgucaa

SEQ ID NO: 25973 - DNA, 21 bp, Homo sapiens
gaggaagagtggagtcagatc

SEQ ID NO: 25974 - RNA, 21 nt, RNAi
ggaagaguggagucagaucuu

SEQ ID NO: 25975 - RNA, 21 nt, RNAi
uuccuucucaccucagucuag

SEQ ID NO: 25976 - DNA, 21 bp, Homo sapiens
gaagagtggagtcagatctca

SEQ ID NO: 25977 - RNA, 21 nt, RNAi
agaguggagucagaucucauu

SEQ ID NO: 25978 - RNA, 21 nt, RNAi
uuucucaccucagucuagagu

SEQ ID NO: 25979 - DNA, 21 bp, Homo sapiens
gagtggagtcagatctcagag

SEQ ID NO: 25980 - RNA, 21 nt, RNAi
guggagucagaucucagaguu

SEQ ID NO: 25981 - RNA, 21 nt, RNAi
uucaccucagucuagagucuc

SEQ ID NO: 25982 - DNA, 21 bp, Homo sapiens
gagtcagatctcagagatggc

SEQ ID NO: 25983 - RNA, 21 nt, RNAi
gucagaucucagagauggcuu

SEQ ID NO: 25984 - RNA, 21 nt, RNAi
uucagucuagagucucuaccg

SEQ ID NO: 25985 - DNA, 21 bp, Homo sapiens
gatctcagagatggccaaaga

SEQ ID NO: 25986 - RNA, 21 nt, RNAi
ucucagagauggccaaagauu

SEQ ID NO: 25987 - RNA, 21 nt, RNAi
uuagagucucuaccgguuucu

SEQ ID NO: 25988 - DNA, 21 bp, Homo sapiens
gagatggccaaagatgttgtg

SEQ ID NO: 25989 - RNA, 21 nt, RNAi
gauggccaaagauguuguguu

SEQ ID NO: 25990 - RNA, 21 nt, RNAi
uucuaccgguuucuacaacac

SEQ ID NO: 25991 - DNA, 21 bp, Homo sapiens
gatggccaaagatgttgtgag

SEQ ID NO: 25992 - RNA, 21 nt, RNAi
uggccaaagauguugugaguu

SEQ ID NO: 25993 - RNA, 21 nt, RNAi
uuaccgguuucuacaacacuc

SEQ ID NO: 25994 - DNA, 21 bp, Homo sapiens
gatgttgtgaggaagctcctg

SEQ ID NO: 25995 - RNA, 21 nt, RNAi
uguugugaggaagcuccuguu

SEQ ID NO: 25996 - RNA, 21 nt, RNAi
uuacaacacuccuucgaggac

SEQ ID NO: 25997 - DNA, 21 bp, Homo sapiens
gaggaagctcctgaaggtcaa

SEQ ID NO: 25998 - RNA, 21 nt, RNAi
ggaagcuccugaaggucaauu

SEQ ID NO: 25999 - RNA, 21 nt, RNAi
uuccuucgaggacuuccaguu

SEQ ID NO: 26000 - DNA, 21 bp, Homo sapiens
gaagctcctgaaggtcaaacc

SEQ ID NO: 26001 - RNA, 21 nt, RNAi
agcuccugaaggucaaaccuu

SEQ ID NO: 26002 - RNA, 21 nt, RNAi
uuucgaggacuuccaguuugg

SEQ ID NO: 26003 - DNA, 21 bp, Homo sapiens
gaaggtcaaaccggaggagag

SEQ ID NO: 26004 - RNA, 21 nt, RNAi
aggucaaaccggaggagaguu

SEQ ID NO: 26005 - RNA, 21 nt, RNAi
uuuccaguuuggccuccucuc

SEQ ID NO: 26006 - DNA, 21 bp, Homo sapiens
gaggagagactcaccatcgag

SEQ ID NO: 26007 - RNA, 21 nt, RNAi
ggagagacucaccaucgaguu

SEQ ID NO: 26008 - RNA, 21 nt, RNAi
uuccucucugagugguagcuc

SEQ ID NO: 26009 - DNA, 21 bp, Homo sapiens
gataatgtgctgccttctgct

SEQ ID NO: 26010 - RNA, 21 nt, RNAi
uaaugugcugccuucugcuuu

SEQ ID NO: 26011 - RNA, 21 nt, RNAi
uuauuacacgacggaagacga

SEQ ID NO: 26012 - DNA, 21 bp, Homo sapiens
gatgatggacaaggcagtggt

SEQ ID NO: 26013 - RNA, 21 nt, RNAi
ugauggacaaggcagugguuu

SEQ ID NO: 26014 - RNA, 21 nt, RNAi
uuacuaccuguuccgucacca

SEQ ID NO: 26015 - DNA, 21 bp, Homo sapiens
gatggacaaggcagtggttgc

SEQ ID NO: 26016 - RNA, 21 nt, RNAi
uggacaaggcagugguugcuu

SEQ ID NO: 26017 - RNA, 21 nt, RNAi
uuaccuguuccgucaccaacg

SEQ ID NO: 26018 - DNA, 21 bp, Homo sapiens
gacaaggcagtggttgcagga

SEQ ID NO: 26019 - RNA, 21 nt, RNAi
caaggcagugguugcaggauu

SEQ ID NO: 26020 - RNA, 21 nt, RNAi
uuguuccgucaccaacguccu

SEQ ID NO: 26021 - DNA, 21 bp, Homo sapiens
gaacagttggccaacatgaga

SEQ ID NO: 26022 - RNA, 21 nt, RNAi
acaguuggccaacaugagauu

SEQ ID NO: 26023 - RNA, 21 nt, RNAi
uuugucaaccgguuguacucu

SEQ ID NO: 26024 - DNA, 21 bp, Homo sapiens
gagaatccaggatctgaaagt

SEQ ID NO: 26025 - RNA, 21 nt, RNAi
gaauccaggaucugaaaguuu

SEQ ID NO: 26026 - RNA, 21 nt, RNAi
uucuuagguccuagacuuuca

SEQ ID NO: 26027 - DNA, 21 bp, Homo sapiens
gaatccaggatctgaaagtca

SEQ ID NO: 26028 - RNA, 21 nt, RNAi
auccaggaucugaaagucauu

SEQ ID NO: 26029 - RNA, 21 nt, RNAi
uuuagguccuagacuuucagu

SEQ ID NO: 26030 - DNA, 21 bp, Homo sapiens
gatctgaaagtcagcctcaaa

SEQ ID NO: 26031 - RNA, 21 nt, RNAi
ucugaaagucagccucaaauu

SEQ ID NO: 26032 - RNA, 21 nt, RNAi
uuagacuuucagucggaguuu

SEQ ID NO: 26033 - DNA, 21 bp, Homo sapiens
gaagaggaagttacttggcac

SEQ ID NO: 26034 - RNA, 21 nt, RNAi
agaggaaguuacuuggcacuu

SEQ ID NO: 26035 - RNA, 21 nt, RNAi
uuucuccuucaaugaaccgug

SEQ ID NO: 26036 - DNA, 21 bp, Homo sapiens
gaggaagttacttggcaccaa

SEQ ID NO: 26037 - RNA, 21 nt, RNAi
ggaaguuacuuggcaccaauu

SEQ ID NO: 26038 - RNA, 21 nt, RNAi
uuccuucaaugaaccgugguu

SEQ ID NO: 26039 - DNA, 21 bp, Homo sapiens
gaagttacttggcaccaagcc

SEQ ID NO: 26040 - RNA, 21 nt, RNAi
aguuacuuggcaccaagccuu

SEQ ID NO: 26041 - RNA, 21 nt, RNAi
uuucaaugaaccgugguucgg

SEQ ID NO: 26042 - DNA, 21 bp, Homo sapiens
gacagtgtctatatccacgac

SEQ ID NO: 26043 - RNA, 21 nt, RNAi
cagugucuauauccacgacuu

SEQ ID NO: 26044 - RNA, 21 nt, RNAi
uugucacagauauaggugcug

SEQ ID NO: 26045 - DNA, 21 bp, Homo sapiens
gaccatgagaatggagccgag

SEQ ID NO: 26046 - RNA, 21 nt, RNAi
ccaugagaauggagccgaguu

SEQ ID NO: 26047 - RNA, 21 nt, RNAi
uugguacucuuaccucggcuc

SEQ ID NO: 26048 - DNA, 21 bp, Homo sapiens
gagaatggagccgaggattcc

SEQ ID NO: 26049 - RNA, 21 nt, RNAi
gaauggagccgaggauuccuu

SEQ ID NO: 26050 - RNA, 21 nt, RNAi
uucuuaccucggcuccuaagg

SEQ ID NO: 26051 - DNA, 21 bp, Homo sapiens
gaatggagccgaggattccaa

SEQ ID NO: 26052 - RNA, 21 nt, RNAi
auggagccgaggauuccaauu

SEQ ID NO: 26053 - RNA, 21 nt, RNAi
uuuaccucggcuccuaagguu

SEQ ID NO: 26054 - DNA, 21 bp, Homo sapiens
gagccgaggattccaatgttg

SEQ ID NO: 26055 - RNA, 21 nt, RNAi
gccgaggauuccaauguuguu

SEQ ID NO: 26056 - RNA, 21 nt, RNAi
uucggcuccuaagguuacaac

SEQ ID NO: 26057 - DNA, 21 bp, Homo sapiens
gaggattccaatgttgccttg

SEQ ID NO: 26058 - RNA, 21 nt, RNAi
ggauuccaauguugccuuguu

SEQ ID NO: 26059 - RNA, 21 nt, RNAi
uuccuaagguuacaacggaac

SEQ ID NO: 26060 - DNA, 21 bp, Homo sapiens
gattccaatgttgccttggaa

SEQ ID NO: 26061 - RNA, 21 nt, RNAi
uuccaauguugccuuggaauu

SEQ ID NO: 26062 - RNA, 21 nt, RNAi
uuaagguuacaacggaaccuu

SEQ ID NO: 26063 - DNA, 21 bp, Homo sapiens
gagatgtgattgctcagtgta

SEQ ID NO: 26064 - RNA, 21 nt, RNAi
gaugugauugcucaguguauu

SEQ ID NO: 26065 - RNA, 21 nt, RNAi
uucuacacuaacgagucacau

SEQ ID NO: 26066 - DNA, 21 bp, Homo sapiens
gatgtgattgctcagtgtatt

SEQ ID NO: 26067 - RNA, 21 nt, RNAi
ugugauugcucaguguauuuu

SEQ ID NO: 26068 - RNA, 21 nt, RNAi
uuacacuaacgagucacauaa

SEQ ID NO: 26069 - DNA, 21 bp, Homo sapiens
gagagaatgaagatgagaaac

SEQ ID NO: 26070 - RNA, 21 nt, RNAi
gagaaugaagaugagaaacuu

SEQ ID NO: 26071 - RNA, 21 nt, RNAi
uucucuuacuucuacucuuug

SEQ ID NO: 26072 - DNA, 21 bp, Homo sapiens
gagaatgaagatgagaaactg

SEQ ID NO: 26073 - RNA, 21 nt, RNAi
gaaugaagaugagaaacuguu

SEQ ID NO: 26074 - RNA, 21 nt, RNAi
uucuuacuucuacucuuugac

SEQ ID NO: 26075 - DNA, 21 bp, Homo sapiens
gaatgaagatgagaaactgaa

SEQ ID NO: 26076 - RNA, 21 nt, RNAi
augaagaugagaaacugaauu

SEQ ID NO: 26077 - RNA, 21 nt, RNAi
uuuacuucuacucuuugacuu

SEQ ID NO: 26078 - DNA, 21 bp, Homo sapiens
gaagatgagaaactgaatgaa

SEQ ID NO: 26079 - RNA, 21 nt, RNAi
agaugagaaacugaaugaauu

SEQ ID NO: 26080 - RNA, 21 nt, RNAi
uuucuacucuuugacuuacuu

SEQ ID NO: 26081 - DNA, 21 bp, Homo sapiens
gatgagaaactgaatgaagta

SEQ ID NO: 26082 - RNA, 21 nt, RNAi
ugagaaacugaaugaaguauu

SEQ ID NO: 26083 - RNA, 21 nt, RNAi
uuacucuuugacuuacuucau

SEQ ID NO: 26084 - DNA, 21 bp, Homo sapiens
gagaaactgaatgaagtaatg

SEQ ID NO: 26085 - RNA, 21 nt, RNAi
gaaacugaaugaaguaauguu

SEQ ID NO: 26086 - RNA, 21 nt, RNAi
uucuuugacuuacuucauuac

SEQ ID NO: 26087 - DNA, 21 bp, Homo sapiens
gaaactgaatgaagtaatgca

SEQ ID NO: 26088 - RNA, 21 nt, RNAi
aacugaaugaaguaaugcauu

SEQ ID NO: 26089 - RNA, 21 nt, RNAi
uuuugacuuacuucauuacgu

SEQ ID NO: 26090 - DNA, 21 bp, Homo sapiens
gaatgaagtaatgcaggaggc

SEQ ID NO: 26091 - RNA, 21 nt, RNAi
augaaguaaugcaggaggcuu

SEQ ID NO: 26092 - RNA, 21 nt, RNAi
uuuacuucauuacguccuccg

SEQ ID NO: 26093 - DNA, 21 bp, Homo sapiens
gaagtaatgcaggaggcttgg

SEQ ID NO: 26094 - RNA, 21 nt, RNAi
aguaaugcaggaggcuugguu

SEQ ID NO: 26095 - RNA, 21 nt, RNAi
uuucauuacguccuccgaacc

SEQ ID NO: 26096 - DNA, 21 bp, Homo sapiens
gaggcttggaagtataaccgg

SEQ ID NO: 26097 - RNA, 21 nt, RNAi
ggcuuggaaguauaaccgguu

SEQ ID NO: 26098 - RNA, 21 nt, RNAi
uuccgaaccuucauauuggcc

SEQ ID NO: 26099 - DNA, 21 bp, Homo sapiens
gaatgcaaactcctaagagat

SEQ ID NO: 26100 - RNA, 21 nt, RNAi
augcaaacuccuaagagauuu

SEQ ID NO: 26101 - RNA, 21 nt, RNAi
uuuacguuugaggauucucua

SEQ ID NO: 26102 - DNA, 21 bp, Homo sapiens
gagatactctgcagagcttca

SEQ ID NO: 26103 - RNA, 21 nt, RNAi
gauacucugcagagcuucauu

SEQ ID NO: 26104 - RNA, 21 nt, RNAi
uucuaugagacgucucgaagu

SEQ ID NO: 26105 - DNA, 21 bp, Homo sapiens
gatactctgcagagcttcagc

SEQ ID NO: 26106 - RNA, 21 nt, RNAi
uacucugcagagcuucagcuu

SEQ ID NO: 26107 - RNA, 21 nt, RNAi
uuaugagacgucucgaagucg

SEQ ID NO: 26108 - DNA, 21 bp, Homo sapiens
gagcttcagctggaatggtcg

SEQ ID NO: 26109 - RNA, 21 nt, RNAi
gcuucagcuggaauggucguu

SEQ ID NO: 26110 - RNA, 21 nt, RNAi
uucgaagucgaccuuaccagc

SEQ ID NO: 26111 - DNA, 21 bp, Homo sapiens
gaatggtcgtggattcacaga

SEQ ID NO: 26112 - RNA, 21 nt, RNAi
auggucguggauucacagauu

SEQ ID NO: 26113 - RNA, 21 nt, RNAi
uuuaccagcaccuaagugucu

SEQ ID NO: 26114 - DNA, 21 bp, Homo sapiens
gattcacagataaagtagatc

SEQ ID NO: 26115 - RNA, 21 nt, RNAi
uucacagauaaaguagaucuu

SEQ ID NO: 26116 - RNA, 21 nt, RNAi
uuaagugucuauuucaucuag

SEQ ID NO: 26117 - DNA, 21 bp, Homo sapiens
gaaattgtgaagcaggtgata

SEQ ID NO: 26118 - RNA, 21 nt, RNAi
aauugugaagcaggugauauu

SEQ ID NO: 26119 - RNA, 21 nt, RNAi
uuuuaacacuucguccacuau

SEQ ID NO: 26120 - DNA, 21 bp, Homo sapiens
gaagcaggtgatagaagagca

SEQ ID NO: 26121 - RNA, 21 nt, RNAi
agcaggugauagaagagcauu

SEQ ID NO: 26122 - RNA, 21 nt, RNAi
uuucguccacuaucuucucgu

SEQ ID NO: 26123 - DNA, 21 bp, Homo sapiens
gatagaagagcaaaccacgtc

SEQ ID NO: 26124 - RNA, 21 nt, RNAi
uagaagagcaaaccacgucuu

SEQ ID NO: 26125 - RNA, 21 nt, RNAi
uuaucuucucguuuggugcag

SEQ ID NO: 26126 - DNA, 21 bp, Homo sapiens
gattaaagctgctgtatagat

SEQ ID NO: 26127 - RNA, 21 nt, RNAi
uuaaagcugcuguauagauuu

SEQ ID NO: 26128 - RNA, 21 nt, RNAi
uuaauuucgacgacauaucua

SEQ ID NO: 26129 - DNA, 21 bp, Homo sapiens
gagacatactattactttagg

SEQ ID NO: 26130 - RNA, 21 nt, RNAi
gacauacuauuacuuuagguu

SEQ ID NO: 26131 - RNA, 21 nt, RNAi
uucuguaugauaaugaaaucc

SEQ ID NO: 26132 - DNA, 21 bp, Homo sapiens
gacatactattactttaggac

SEQ ID NO: 26133 - RNA, 21 nt, RNAi
cauacuauuacuuuaggacuu

SEQ ID NO: 26134 - RNA, 21 nt, RNAi
uuguaugauaaugaaauccug

SEQ ID NO: 26135 - DNA, 21 bp, Homo sapiens
gactgtgtagttgtatatttg

SEQ ID NO: 26136 - RNA, 21 nt, RNAi
cuguguaguuguauauuuguu

SEQ ID NO: 26137 - RNA, 21 nt, RNAi
uugacacaucaacauauaaac

SEQ ID NO: 26138 - DNA, 21 bp, Homo sapiens
gatgacagatgatgctgtcaa

SEQ ID NO: 26139 - RNA, 21 nt, RNAi
ugacagaugaugcugucaauu

SEQ ID NO: 26140 - RNA, 21 nt, RNAi
uuacugucuacuacgacaguu

SEQ ID NO: 26141 - DNA, 21 bp, Homo sapiens
gacagatgatgctgtcaagca

SEQ ID NO: 26142 - RNA, 21 nt, RNAi
cagaugaugcugucaagcauu

SEQ ID NO: 26143 - RNA, 21 nt, RNAi
uugucuacuacgacaguucgu

SEQ ID NO: 26144 - DNA, 21 bp, Homo sapiens
gatgatgctgtcaagcaatat

SEQ ID NO: 26145 - RNA, 21 nt, RNAi
ugaugcugucaagcaauauuu

SEQ ID NO: 26146 - RNA, 21 nt, RNAi
uuacuacgacaguucguuaua

SEQ ID NO: 26147 - DNA, 21 bp, Homo sapiens
gatgctgtcaagcaatattgt

SEQ ID NO: 26148 - RNA, 21 nt, RNAi
ugcugucaagcaauauuguuu

SEQ ID NO: 26149 - RNA, 21 nt, RNAi
uuacgacaguucguuauaaca

SEQ ID NO: 26150 - DNA, 21 bp, Homo sapiens
gaccgactataccgacctttc

SEQ ID NO: 26151 - RNA, 21 nt, RNAi
ccgacuauaccgaccuuucuu

SEQ ID NO: 26152 - RNA, 21 nt, RNAi
uuggcugauauggcuggaaag

SEQ ID NO: 26153 - DNA, 21 bp, Homo sapiens
gactataccgacctttctgat

SEQ ID NO: 26154 - RNA, 21 nt, RNAi
cuauaccgaccuuucugauuu

SEQ ID NO: 26155 - RNA, 21 nt, RNAi
uugauauggcuggaaagacua

SEQ ID NO: 26156 - DNA, 21 bp, Homo sapiens
gacctttctgattagtaaaca

SEQ ID NO: 26157 - RNA, 21 nt, RNAi
ccuuucugauuaguaaacauu

SEQ ID NO: 26158 - RNA, 21 nt, RNAi
uuggaaagacuaaucauuugu

SEQ ID NO: 26159 - DNA, 21 bp, Homo sapiens
tatgtcggaggagagcgacat

SEQ ID NO: 26160 - RNA, 21 nt, RNAi
ugucggaggagagcgacauuu

SEQ ID NO: 26161 - RNA, 21 nt, RNAi
uuacagccuccucucgcugua

SEQ ID NO: 26162 - DNA, 21 bp, Homo sapiens
tacagtatcaattggactcag

SEQ ID NO: 26163 - RNA, 21 nt, RNAi
caguaucaauuggacucaguu

SEQ ID NO: 26164 - RNA, 21 nt, RNAi
uugucauaguuaaccugaguc

SEQ ID NO: 26165 - DNA, 21 bp, Homo sapiens
tatcaattggactcagaagct

SEQ ID NO: 26166 - RNA, 21 nt, RNAi
ucaauuggacucagaagcuuu

SEQ ID NO: 26167 - RNA, 21 nt, RNAi
uuaguuaaccugagucuucga

SEQ ID NO: 26168 - DNA, 21 bp, Homo sapiens
tagtggtccagttagagtctg

SEQ ID NO: 26169 - RNA, 21 nt, RNAi
gugguccaguuagagucuguu

SEQ ID NO: 26170 - RNA, 21 nt, RNAi
uucaccaggucaaucucagac

SEQ ID NO: 26171 - DNA, 21 bp, Homo sapiens
tagagtctgtgtaaagaaatc

SEQ ID NO: 26172 - RNA, 21 nt, RNAi
gagucuguguaaagaaaucuu

SEQ ID NO: 26173 - RNA, 21 nt, RNAi
uucucagacacauuucuuuag

SEQ ID NO: 26174 - DNA, 21 bp, Homo sapiens
tactcaagaacggtttgcgct

SEQ ID NO: 26175 - RNA, 21 nt, RNAi
cucaagaacgguuugcgcuuu

SEQ ID NO: 26176 - RNA, 21 nt, RNAi
uugaguucuugccaaacgcga

SEQ ID NO: 26177 - DNA, 21 bp, Homo sapiens
tagaaatgaggtacgtctgca

SEQ ID NO: 26178 - RNA, 21 nt, RNAi
gaaaugagguacgucugcauu

SEQ ID NO: 26179 - RNA, 21 nt, RNAi
uucuuuacuccaugcagacgu

SEQ ID NO: 26180 - DNA, 21 bp, Homo sapiens
tacgtctgcacatgatgtgtg

SEQ ID NO: 26181 - RNA, 21 nt, RNAi
cgucugcacaugauguguguu

SEQ ID NO: 26182 - RNA, 21 nt, RNAi
uugcagacguguacuacacac

SEQ ID NO: 26183 - DNA, 21 bp, Homo sapiens
tattgaagtgtttgctaacag

SEQ ID NO: 26184 - RNA, 21 nt, RNAi
uugaaguguuugcuaacaguu

SEQ ID NO: 26185 - RNA, 21 nt, RNAi
uuaacuucacaaacgauuguc

SEQ ID NO: 26186 - DNA, 21 bp, Homo sapiens
taattgtaatggagatgatgg

SEQ ID NO: 26187 - RNA, 21 nt, RNAi
auuguaauggagaugaugguu

SEQ ID NO: 26188 - RNA, 21 nt, RNAi
uuuaacauuaccucuacuacc

SEQ ID NO: 26189 - DNA, 21 bp, Homo sapiens
tatttcacagaatcagccagc

SEQ ID NO: 26190 - RNA, 21 nt, RNAi
uuucacagaaucagccagcuu

SEQ ID NO: 26191 - RNA, 21 nt, RNAi
uuaaagugucuuagucggucg

SEQ ID NO: 26192 - DNA, 21 bp, Homo sapiens
tacagagaagcaagccagcca

SEQ ID NO: 26193 - RNA, 21 nt, RNAi
cagagaagcaagccagccauu

SEQ ID NO: 26194 - RNA, 21 nt, RNAi
uugucucuucguucggucggu

SEQ ID NO: 26195 - DNA, 21 bp, Homo sapiens
taacaaagcagatagctttgg

SEQ ID NO: 26196 - RNA, 21 nt, RNAi
acaaagcagauagcuuugguu

SEQ ID NO: 26197 - RNA, 21 nt, RNAi
uuuguuucgucuaucgaaacc

SEQ ID NO: 26198 - DNA, 21 bp, Homo sapiens
tagctttggctctgcggcact

SEQ ID NO: 26199 - RNA, 21 nt, RNAi
gcuuuggcucugcggcacuuu

SEQ ID NO: 26200 - RNA, 21 nt, RNAi
uucgaaaccgagacgccguga

SEQ ID NO: 26201 - DNA, 21 bp, Homo sapiens
taaacattgcgcacagagacc

SEQ ID NO: 26202 - RNA, 21 nt, RNAi
aacauugcgcacagagaccuu

SEQ ID NO: 26203 - RNA, 21 nt, RNAi
uuuuguaacgcgugucucugg

SEQ ID NO: 26204 - DNA, 21 bp, Homo sapiens
taaggataactctttggatgc

SEQ ID NO: 26205 - RNA, 21 nt, RNAi
aggauaacucuuuggaugcuu

SEQ ID NO: 26206 - RNA, 21 nt, RNAi
uuuccuauugagaaaccuacg

SEQ ID NO: 26207 - DNA, 21 bp, Homo sapiens
tactggaggcgcaaagaaggc

SEQ ID NO: 26208 - RNA, 21 nt, RNAi
cuggaggcgcaaagaaggcuu

SEQ ID NO: 26209 - RNA, 21 nt, RNAi
uugaccuccgcguuucuuccg

SEQ ID NO: 26210 - DNA, 21 bp, Homo sapiens
tacacttacaacaagagctgt

SEQ ID NO: 26211 - RNA, 21 nt, RNAi
cacuuacaacaagagcuguuu

SEQ ID NO: 26212 - RNA, 21 nt, RNAi
uugugaauguuguucucgaca

SEQ ID NO: 26213 - DNA, 21 bp, Homo sapiens
tacaacaagagctgtgacttg

SEQ ID NO: 26214 - RNA, 21 nt, RNAi
caacaagagcugugacuuguu

SEQ ID NO: 26215 - RNA, 21 nt, RNAi
uuguuguucucgacacugaac

SEQ ID NO: 26216 - DNA, 21 bp, Homo sapiens
tatctatgtgatgctgtgcgg

SEQ ID NO: 26217 - RNA, 21 nt, RNAi
ucuaugugaugcugugcgguu

SEQ ID NO: 26218 - RNA, 21 nt, RNAi
uuagauacacuacgacacgcc

SEQ ID NO: 26219 - DNA, 21 bp, Homo sapiens
tatgtgatgctgtgcggatac

SEQ ID NO: 26220 - RNA, 21 nt, RNAi
ugugaugcugugcggauacuu

SEQ ID NO: 26221 - RNA, 21 nt, RNAi
uuacacuacgacacgccuaug

SEQ ID NO: 26222 - DNA, 21 bp, Homo sapiens
tactccaaacaccacagccgg

SEQ ID NO: 26223 - RNA, 21 nt, RNAi
cuccaaacaccacagccgguu

SEQ ID NO: 26224 - RNA, 21 nt, RNAi
uugagguuuguggugucggcc

SEQ ID NO: 26225 - DNA, 21 bp, Homo sapiens
tatgcgaagaaagatcatgac

SEQ ID NO: 26226 - RNA, 21 nt, RNAi
ugcgaagaaagaucaugacuu

SEQ ID NO: 26227 - RNA, 21 nt, RNAi
uuacgcuucuuucuaguacug

SEQ ID NO: 26228 - DNA, 21 bp, Homo sapiens
taatgtgctgccttctgctca

SEQ ID NO: 26229 - RNA, 21 nt, RNAi
augugcugccuucugcucauu

SEQ ID NO: 26230 - RNA, 21 nt, RNAi
uuuacacgacggaagacgagu

SEQ ID NO: 26231 - DNA, 21 bp, Homo sapiens
tacttggcaccaagccaaagg

SEQ ID NO: 26232 - RNA, 21 nt, RNAi
cuuggcaccaagccaaagguu

SEQ ID NO: 26233 - RNA, 21 nt, RNAi
uugaaccgugguucgguuucc

SEQ ID NO: 26234 - DNA, 21 bp, Homo sapiens
tatatccacgaccatgagaat

SEQ ID NO: 26235 - RNA, 21 nt, RNAi
uauccacgaccaugagaauuu

SEQ ID NO: 26236 - RNA, 21 nt, RNAi
uuauaggugcugguacucuua

SEQ ID NO: 26237 - DNA, 21 bp, Homo sapiens
tatccacgaccatgagaatgg

SEQ ID NO: 26238 - RNA, 21 nt, RNAi
uccacgaccaugagaaugguu

SEQ ID NO: 26239 - RNA, 21 nt, RNAi
uuaggugcugguacucuuacc

SEQ ID NO: 26240 - DNA, 21 bp, Homo sapiens
taatgcaggaggcttggaagt

SEQ ID NO: 26241 - RNA, 21 nt, RNAi
augcaggaggcuuggaaguuu

SEQ ID NO: 26242 - RNA, 21 nt, RNAi
uuuacguccuccgaaccuuca

SEQ ID NO: 26243 - DNA, 21 bp, Homo sapiens
taagagatactctgcagagct

SEQ ID NO: 26244 - RNA, 21 nt, RNAi
agagauacucugcagagcuuu

SEQ ID NO: 26245 - RNA, 21 nt, RNAi
uuucucuaugagacgucucga

SEQ ID NO: 26246 - DNA, 21 bp, Homo sapiens
tactctgcagagcttcagctg

SEQ ID NO: 26247 - RNA, 21 nt, RNAi
cucugcagagcuucagcuguu

SEQ ID NO: 26248 - RNA, 21 nt, RNAi
uugagacgucucgaagucgac

SEQ ID NO: 26249 - DNA, 21 bp, Homo sapiens
taatgacagcttcagactttg

SEQ ID NO: 26250 - RNA, 21 nt, RNAi
augacagcuucagacuuuguu

SEQ ID NO: 26251 - RNA, 21 nt, RNAi
uuuacugucgaagucugaaac

SEQ ID NO: 26252 - DNA, 21 bp, Homo sapiens
tactattactttaggactgtg

SEQ ID NO: 26253 - RNA, 21 nt, RNAi
cuauuacuuuaggacuguguu

SEQ ID NO: 26254 - RNA, 21 nt, RNAi
uugauaaugaaauccugacac

SEQ ID NO: 26255 - DNA, 21 bp, Homo sapiens
tattactttaggactgtgtag

SEQ ID NO: 26256 - RNA, 21 nt, RNAi
uuacuuuaggacuguguaguu

SEQ ID NO: 26257 - RNA, 21 nt, RNAi
uuaaugaaauccugacacauc

SEQ ID NO: 26258 - DNA, 21 bp, Homo sapiens
tactttaggactgtgtagttg

SEQ ID NO: 26259 - RNA, 21 nt, RNAi
cuuuaggacuguguaguuguu

SEQ ID NO: 26260 - RNA, 21 nt, RNAi
uugaaauccugacacaucaac

SEQ ID NO: 26261 - DNA, 21 bp, Homo sapiens
taggactgtgtagttgtatat

SEQ ID NO: 26262 - RNA, 21 nt, RNAi
ggacuguguaguuguauauuu

SEQ ID NO: 26263 - RNA, 21 nt, RNAi
uuccugacacaucaacauaua

SEQ ID NO: 26264 - DNA, 21 bp, Homo sapiens
taagatgacagatgatgctgt

SEQ ID NO: 26265 - RNA, 21 nt, RNAi
agaugacagaugaugcuguuu

SEQ ID NO: 26266 - RNA, 21 nt, RNAi
uuucuacugucuacuacgaca

SEQ ID NO: 26267 - DNA, 21 bp, Homo sapiens
tataccgacctttctgattag

SEQ ID NO: 26268 - RNA, 21 nt, RNAi
uaccgaccuuucugauuaguu

SEQ ID NO: 26269 - RNA, 21 nt, RNAi
uuauggcuggaaagacuaauc

SEQ ID NO: 26270 - DNA, 21 bp, Homo sapiens
taccgacctttctgattagta

SEQ ID NO: 26271 - RNA, 21 nt, RNAi
ccgaccuuucugauuaguauu

SEQ ID NO: 26272 - RNA, 21 nt, RNAi
uuggcuggaaagacuaaucau

SEQ ID NO: 26273 - DNA, 21 bp, Homo sapiens
tagtaaacagttgaatcaagg

SEQ ID NO: 26274 - RNA, 21 nt, RNAi
guaaacaguugaaucaagguu

SEQ ID NO: 26275 - RNA, 21 nt, RNAi
uucauuugucaacuuaguucc

SEQ ID NO: 26276 - DNA, 21 bp, Homo sapiens
taaacagttgaatcaaggact

SEQ ID NO: 26277 - RNA, 21 nt, RNAi
aacaguugaaucaaggacuuu

SEQ ID NO: 26278 - RNA, 21 nt, RNAi
uuuugucaacuuaguuccuga

SEQ ID NO: 26279 - DNA, 21 bp, Homo sapiens
aaatctactcaagaacggttt

SEQ ID NO: 26280 - RNA, 21 nt, RNAi
aucuacucaagaacgguuuuu

SEQ ID NO: 26281 - RNA, 21 nt, RNAi
uuuagaugaguucuugccaaa

SEQ ID NO: 26282 - DNA, 21 bp, Homo sapiens
aatctactcaagaacggtttg

SEQ ID NO: 26283 - RNA, 21 nt, RNAi
ucuacucaagaacgguuuguu

SEQ ID NO: 26284 - RNA, 21 nt, RNAi
uuagaugaguucuugccaaac

SEQ ID NO: 26285 - DNA, 21 bp, Homo sapiens
aaattcttcttgatcgtccaa

SEQ ID NO: 26286 - RNA, 21 nt, RNAi
auucuucuugaucguccaauu

SEQ ID NO: 26287 - RNA, 21 nt, RNAi
uuuaagaagaacuagcagguu

SEQ ID NO: 26288 - DNA, 21 bp, Homo sapiens
aattcttcttgatcgtccaaa

SEQ ID NO: 26289 - RNA, 21 nt, RNAi
uucuucuugaucguccaaauu

SEQ ID NO: 26290 - RNA, 21 nt, RNAi
uuaagaagaacuagcagguuu

SEQ ID NO: 26291 - DNA, 21 bp, Homo sapiens
aaagctagaaatgaggtacgt

SEQ ID NO: 26292 - RNA, 21 nt, RNAi
agcuagaaaugagguacguuu

SEQ ID NO: 26293 - RNA, 21 nt, RNAi
uuucgaucuuuacuccaugca

SEQ ID NO: 26294 - DNA, 21 bp, Homo sapiens
aaatgaggtacgtctgcacat

SEQ ID NO: 26295 - RNA, 21 nt, RNAi
augagguacgucugcacauuu

SEQ ID NO: 26296 - RNA, 21 nt, RNAi
uuuacuccaugcagacgugua

SEQ ID NO: 26297 - DNA, 21 bp, Homo sapiens
aatgaggtacgtctgcacatg

SEQ ID NO: 26298 - RNA, 21 nt, RNAi
ugagguacgucugcacauguu

SEQ ID NO: 26299 - RNA, 21 nt, RNAi
uuacuccaugcagacguguac

SEQ ID NO: 26300 - DNA, 21 bp, Homo sapiens
aagccagccaagtaacaaagc

SEQ ID NO: 26301 - RNA, 21 nt, RNAi
gccagccaaguaacaaagcuu

SEQ ID NO: 26302 - RNA, 21 nt, RNAi
uucggucgguucauuguuucg

SEQ ID NO: 26303 - DNA, 21 bp, Homo sapiens
aagtaacaaagcagatagctt

SEQ ID NO: 26304 - RNA, 21 nt, RNAi
guaacaaagcagauagcuuuu

SEQ ID NO: 26305 - RNA, 21 nt, RNAi
uucauuguuucgucuaucgaa

SEQ ID NO: 26306 - DNA, 21 bp, Homo sapiens
aaacattgcgcacagagacct

SEQ ID NO: 26307 - RNA, 21 nt, RNAi
acauugcgcacagagaccuuu

SEQ ID NO: 26308 - RNA, 21 nt, RNAi
uuuguaacgcgugucucugga

SEQ ID NO: 26309 - DNA, 21 bp, Homo sapiens
aagattgaccaaggtgacttg

SEQ ID NO: 26310 - RNA, 21 nt, RNAi
gauugaccaaggugacuuguu

SEQ ID NO: 26311 - RNA, 21 nt, RNAi
uucuaacugguuccacugaac

SEQ ID NO: 26312 - DNA, 21 bp, Homo sapiens
aaatctggcatcatacctacc

SEQ ID NO: 26313 - RNA, 21 nt, RNAi
aucuggcaucauaccuaccuu

SEQ ID NO: 26314 - RNA, 21 nt, RNAi
uuuagaccguaguauggaugg

SEQ ID NO: 26315 - DNA, 21 bp, Homo sapiens
aatctggcatcatacctacct

SEQ ID NO: 26316 - RNA, 21 nt, RNAi
ucuggcaucauaccuaccuuu

SEQ ID NO: 26317 - RNA, 21 nt, RNAi
uuagaccguaguauggaugga

SEQ ID NO: 26318 - DNA, 21 bp, Homo sapiens
aaaggatatgcgaagaaagat

SEQ ID NO: 26319 - RNA, 21 nt, RNAi
aggauaugcgaagaaagauuu

SEQ ID NO: 26320 - RNA, 21 nt, RNAi
uuuccuauacgcuucuuucua

SEQ ID NO: 26321 - DNA, 21 bp, Homo sapiens
aaggatatgcgaagaaagatc

SEQ ID NO: 26322 - RNA, 21 nt, RNAi
ggauaugcgaagaaagaucuu

SEQ ID NO: 26323 - RNA, 21 nt, RNAi
uuccuauacgcuucuuucuag

SEQ ID NO: 26324 - DNA, 21 bp, Homo sapiens
aaggacagtgtctatatccac

SEQ ID NO: 26325 - RNA, 21 nt, RNAi
ggacagugucuauauccacuu

SEQ ID NO: 26326 - RNA, 21 nt, RNAi
uuccugucacagauauaggug

SEQ ID NO: 26327 - DNA, 21 bp, Homo sapiens
aatggagccgaggattccaat

SEQ ID NO: 26328 - RNA, 21 nt, RNAi
uggagccgaggauuccaauuu

SEQ ID NO: 26329 - RNA, 21 nt, RNAi
uuaccucggcuccuaagguua

SEQ ID NO: 26330 - DNA, 21 bp, Homo sapiens
aaactccgagatgtgattgct

SEQ ID NO: 26331 - RNA, 21 nt, RNAi
acuccgagaugugauugcuuu

SEQ ID NO: 26332 - RNA, 21 nt, RNAi
uuugaggcucuacacuaacga

SEQ ID NO: 26333 - DNA, 21 bp, Homo sapiens
aactccgagatgtgattgctc

SEQ ID NO: 26334 - RNA, 21 nt, RNAi
cuccgagaugugauugcucuu

SEQ ID NO: 26335 - RNA, 21 nt, RNAi
uugaggcucuacacuaacgag

SEQ ID NO: 26336 - DNA, 21 bp, Homo sapiens
aactcctaagagatactctgc

SEQ ID NO: 26337 - RNA, 21 nt, RNAi
cuccuaagagauacucugcuu

SEQ ID NO: 26338 - RNA, 21 nt, RNAi
uugaggauucucuaugagacg

SEQ ID NO: 26339 - DNA, 21 bp, Homo sapiens
aatggtcgtggattcacagat

SEQ ID NO: 26340 - RNA, 21 nt, RNAi
uggucguggauucacagauuu

SEQ ID NO: 26341 - RNA, 21 nt, RNAi
uuaccagcaccuaagugucua

SEQ ID NO: 26342 - DNA, 21 bp, Homo sapiens
caagaacggtttgcgctgaaa

SEQ ID NO: 26343 - RNA, 21 nt, RNAi
agaacgguuugcgcugaaauu

SEQ ID NO: 26344 - RNA, 21 nt, RNAi
uuucuugccaaacgcgacuuu

SEQ ID NO: 26345 - DNA, 21 bp, Homo sapiens
caagccagccaagtaacaaag

SEQ ID NO: 26346 - RNA, 21 nt, RNAi
agccagccaaguaacaaaguu

SEQ ID NO: 26347 - RNA, 21 nt, RNAi
uuucggucgguucauuguuuc

SEQ ID NO: 26348 - DNA, 21 bp, Homo sapiens
cagccaagtaacaaagcagat

SEQ ID NO: 26349 - RNA, 21 nt, RNAi
gccaaguaacaaagcagauuu

SEQ ID NO: 26350 - RNA, 21 nt, RNAi
uucgguucauuguuucgucua

SEQ ID NO: 26351 - DNA, 21 bp, Homo sapiens
caagtaacaaagcagatagct

SEQ ID NO: 26352 - RNA, 21 nt, RNAi
aguaacaaagcagauagcuuu

SEQ ID NO: 26353 - RNA, 21 nt, RNAi
uuucauuguuucgucuaucga

SEQ ID NO: 26354 - DNA, 21 bp, Homo sapiens
cattgcgcacagagacctcaa

SEQ ID NO: 26355 - RNA, 21 nt, RNAi
uugcgcacagagaccucaauu

SEQ ID NO: 26356 - RNA, 21 nt, RNAi
uuaacgcgugucucuggaguu

SEQ ID NO: 26357 - DNA, 21 bp, Homo sapiens
caagattgaccaaggtgactt

SEQ ID NO: 26358 - RNA, 21 nt, RNAi
agauugaccaaggugacuuuu

SEQ ID NO: 26359 - RNA, 21 nt, RNAi
uuucuaacugguuccacugaa

SEQ ID NO: 26360 - DNA, 21 bp, Homo sapiens
cacttacaacaagagctgtga

SEQ ID NO: 26361 - RNA, 21 nt, RNAi
cuuacaacaagagcugugauu

SEQ ID NO: 26362 - RNA, 21 nt, RNAi
uugaauguuguucucgacacu

SEQ ID NO: 26363 - DNA, 21 bp, Homo sapiens
caaaggatatgcgaagaaaga

SEQ ID NO: 26364 - RNA, 21 nt, RNAi
aaggauaugcgaagaaagauu

SEQ ID NO: 26365 - RNA, 21 nt, RNAi
uuuuccuauacgcuucuuucu

SEQ ID NO: 26366 - DNA, 21 bp, Homo sapiens
cagaggaagagtggagtcaga

SEQ ID NO: 26367 - RNA, 21 nt, RNAi
gaggaagaguggagucagauu

SEQ ID NO: 26368 - RNA, 21 nt, RNAi
uucuccuucucaccucagucu

SEQ ID NO: 26369 - DNA, 21 bp, Homo sapiens
cagagatggccaaagatgttg

SEQ ID NO: 26370 - RNA, 21 nt, RNAi
gagauggccaaagauguuguu

SEQ ID NO: 26371 - RNA, 21 nt, RNAi
uucucuaccgguuucuacaac

SEQ ID NO: 26372 - DNA, 21 bp, Homo sapiens
cagtgtctatatccacgacca

SEQ ID NO: 26373 - RNA, 21 nt, RNAi
gugucuauauccacgaccauu

SEQ ID NO: 26374 - RNA, 21 nt, RNAi
uucacagauauaggugcuggu

SEQ ID NO: 26375 - DNA, 21 bp, Homo sapiens
caggaggcttggaagtataac

SEQ ID NO: 26376 - RNA, 21 nt, RNAi
ggaggcuuggaaguauaacuu

SEQ ID NO: 26377 - RNA, 21 nt, RNAi
uuccuccgaaccuucauauug

SEQ ID NO: 26378 - DNA, 21 bp, Homo sapiens
cagctggaatggtcgtggatt

SEQ ID NO: 26379 - RNA, 21 nt, RNAi
gcuggaauggucguggauuuu

SEQ ID NO: 26380 - RNA, 21 nt, RNAi
uucgaccuuaccagcaccuaa

SEQ ID NO: 26381 - DNA, 21 bp, Homo sapiens
gaaatctactcaagaacggtt

SEQ ID NO: 26382 - RNA, 21 nt, RNAi
aaucuacucaagaacgguuuu

SEQ ID NO: 26383 - RNA, 21 nt, RNAi
uuuuagaugaguucuugccaa

SEQ ID NO: 26384 - DNA, 21 bp, Homo sapiens
gaaatgaggtacgtctgcaca

SEQ ID NO: 26385 - RNA, 21 nt, RNAi
aaugagguacgucugcacauu

SEQ ID NO: 26386 - RNA, 21 nt, RNAi
uuuuacuccaugcagacgugu

SEQ ID NO: 26387 - DNA, 21 bp, Homo sapiens
gaggtacgtctgcacatgatg

SEQ ID NO: 26388 - RNA, 21 nt, RNAi
gguacgucugcacaugauguu

SEQ ID NO: 26389 - RNA, 21 nt, RNAi
uuccaugcagacguguacuac

SEQ ID NO: 26390 - DNA, 21 bp, Homo sapiens
gatttgccaagattgaccaag

SEQ ID NO: 26391 - RNA, 21 nt, RNAi
uuugccaagauugaccaaguu

SEQ ID NO: 26392 - RNA, 21 nt, RNAi
uuaaacgguucuaacugguuc

SEQ ID NO: 26393 - DNA, 21 bp, Homo sapiens
gaaatctggcatcatacctac

SEQ ID NO: 26394 - RNA, 21 nt, RNAi
aaucuggcaucauaccuacuu

SEQ ID NO: 26395 - RNA, 21 nt, RNAi
uuuuagaccguaguauggaug

SEQ ID NO: 26396 - DNA, 21 bp, Homo sapiens
gatatgcgaagaaagatcatg

SEQ ID NO: 26397 - RNA, 21 nt, RNAi
uaugcgaagaaagaucauguu

SEQ ID NO: 26398 - RNA, 21 nt, RNAi
uuauacgcuucuuucuaguac

SEQ ID NO: 26399 - DNA, 21 bp, Homo sapiens
gaagaaagatcatgacaggca

SEQ ID NO: 26400 - RNA, 21 nt, RNAi
agaaagaucaugacaggcauu

SEQ ID NO: 26401 - RNA, 21 nt, RNAi
uuucuuucuaguacuguccgu

SEQ ID NO: 26402 - DNA, 21 bp, Homo sapiens
gagtggagtcagatctcagag

SEQ ID NO: 26403 - RNA, 21 nt, RNAi
guggagucagaucucagaguu

SEQ ID NO: 26404 - RNA, 21 nt, RNAi
uucaccucagucuagagucuc

SEQ ID NO: 26405 - DNA, 21 bp, Homo sapiens
gaggaagttacttggcaccaa

SEQ ID NO: 26406 - RNA, 21 nt, RNAi
ggaaguuacuuggcaccaauu

SEQ ID NO: 26407 - RNA, 21 nt, RNAi
uuccuucaaugaaccgugguu

SEQ ID NO: 26408 - DNA, 21 bp, Homo sapiens
gacagtgtctatatccacgac

SEQ ID NO: 26409 - RNA, 21 nt, RNAi
cagugucuauauccacgacuu

SEQ ID NO: 26410 - RNA, 21 nt, RNAi
uugucacagauauaggugcug

SEQ ID NO: 26411 - DNA, 21 bp, Homo sapiens
gaatggagccgaggattccaa

SEQ ID NO: 26412 - RNA, 21 nt, RNAi
auggagccgaggauuccaauu

SEQ ID NO: 26413 - RNA, 21 nt, RNAi
uuuaccucggcuccuaagguu

SEQ ID NO: 26414 - DNA, 21 bp, Homo sapiens
gagatgtgattgctcagtgta

SEQ ID NO: 26415 - RNA, 21 nt, RNAi
gaugugauugcucaguguauu

SEQ ID NO: 26416 - RNA, 21 nt, RNAi
uucuacacuaacgagucacau

SEQ ID NO: 26417 - DNA, 21 bp, Homo sapiens
gatgtgattgctcagtgtatt

SEQ ID NO: 26418 - RNA, 21 nt, RNAi
ugugauugcucaguguauuuu

SEQ ID NO: 26419 - RNA, 21 nt, RNAi
uuacacuaacgagucacauaa

SEQ ID NO: 26420 - DNA, 21 bp, Homo sapiens
gaggcttggaagtataaccgg

SEQ ID NO: 26421 - RNA, 21 nt, RNAi
ggcuuggaaguauaaccgguu

SEQ ID NO: 26422 - RNA, 21 nt, RNAi
uuccgaaccuucauauuggcc

SEQ ID NO: 26423 - DNA, 21 bp, Homo sapiens
gaatggtcgtggattcacaga

SEQ ID NO: 26424 - RNA, 21 nt, RNAi
auggucguggauucacagauu

SEQ ID NO: 26425 - RNA, 21 nt, RNAi
uuuaccagcaccuaagugucu

SEQ ID NO: 26426 - DNA, 21 bp, Homo sapiens
tactcaagaacggtttgcgct

SEQ ID NO: 26427 - RNA, 21 nt, RNAi
cucaagaacgguuugcgcuuu

SEQ ID NO: 26428 - RNA, 21 nt, RNAi
uugaguucuugccaaacgcga

SEQ ID NO: 26429 - DNA, 21 bp, Homo sapiens
taaacattgcgcacagagacc

SEQ ID NO: 26430 - RNA, 21 nt, RNAi
aacauugcgcacagagaccuu

SEQ ID NO: 26431 - RNA, 21 nt, RNAi
uuuuguaacgcgugucucugg

SEQ ID NO: 26432 - DNA, 21 bp, Homo sapiens
tacacttacaacaagagctgt

SEQ ID NO: 26433 - RNA, 21 nt, RNAi
cacuuacaacaagagcuguuu

SEQ ID NO: 26434 - RNA, 21 nt, RNAi
uugugaauguuguucucgaca

SEQ ID NO: 26435 - DNA, 21 bp, Homo sapiens
tatgtgatgctgtgcggatac

SEQ ID NO: 26436 - RNA, 21 nt, RNAi
ugugaugcugugcggauacuu

SEQ ID NO: 26437 - RNA, 21 nt, RNAi
uuacacuacgacacgccuaug

SEQ ID NO: 26438 - DNA, 21 bp, Homo sapiens
taatgtgctgccttctgctca

SEQ ID NO: 26439 - RNA, 21 nt, RNAi
augugcugccuucugcucauu

SEQ ID NO: 26440 - RNA, 21 nt, RNAi
uuuacacgacggaagacgagu

SEQ ID NO: 26441 - DNA, 21 bp, Homo sapiens
tatatccacgaccatgagaat

SEQ ID NO: 26442 - RNA, 21 nt, RNAi
uauccacgaccaugagaauuu

SEQ ID NO: 26443 - RNA, 21 nt, RNAi
uuauaggugcugguacucuua

SEQ ID NO: 26444 - DNA, 21 bp, Homo sapiens
tatccacgaccatgagaatgg

SEQ ID NO: 26445 - RNA, 21 nt, RNAi
uccacgaccaugagaaugguu

SEQ ID NO: 26446 - RNA, 21 nt, RNAi
uuaggugcugguacucuuacc

SEQ ID NO: 26447 - DNA, 21 bp, Homo sapiens
aagcaggacgtcaacaagacc

SEQ ID NO: 26448 - RNA, 21 nt, RNAi
gcaggacgucaacaagaccuu

SEQ ID NO: 26449 - RNA, 21 nt, RNAi
uucguccugcaguuguucugg

SEQ ID NO: 26450 - DNA, 21 bp, Homo sapiens
aaggtggccatcaagaagctg

SEQ ID NO: 26451 - RNA, 21 nt, RNAi
gguggccaucaagaagcuguu

SEQ ID NO: 26452 - RNA, 21 nt, RNAi
uuccaccgguaguucuucgac

SEQ ID NO: 26453 - DNA, 21 bp, Homo sapiens
aagcacatgcagcatgagaac

SEQ ID NO: 26454 - RNA, 21 nt, RNAi
gcacaugcagcaugagaacuu

SEQ ID NO: 26455 - RNA, 21 nt, RNAi
uucguguacgucguacucuug

SEQ ID NO: 26456 - DNA, 21 bp, Homo sapiens
aacttctatgacttctacctg

SEQ ID NO: 26457 - RNA, 21 nt, RNAi
cuucuaugacuucuaccuguu

SEQ ID NO: 26458 - RNA, 21 nt, RNAi
uugaagauacugaagauggac

SEQ ID NO: 26459 - DNA, 21 bp, Homo sapiens
aagatccagtacctggtgtat

SEQ ID NO: 26460 - RNA, 21 nt, RNAi
gauccaguaccugguguauuu

SEQ ID NO: 26461 - RNA, 21 nt, RNAi
uucuaggucauggaccacaua

SEQ ID NO: 26462 - DNA, 21 bp, Homo sapiens
aaaggccttaagtacatccac

SEQ ID NO: 26463 - RNA, 21 nt, RNAi
aggccuuaaguacauccacuu

SEQ ID NO: 26464 - RNA, 21 nt, RNAi
uuuccggaauucauguaggug

SEQ ID NO: 26465 - DNA, 21 bp, Homo sapiens
aaggccttaagtacatccact

SEQ ID NO: 26466 - RNA, 21 nt, RNAi
ggccuuaaguacauccacuuu

SEQ ID NO: 26467 - RNA, 21 nt, RNAi
uuccggaauucauguagguga

SEQ ID NO: 26468 - DNA, 21 bp, Homo sapiens
aagccaggcaacctggctgtg

SEQ ID NO: 26469 - RNA, 21 nt, RNAi
gccaggcaaccuggcuguguu

SEQ ID NO: 26470 - RNA, 21 nt, RNAi
uucgguccguuggaccgacac

SEQ ID NO: 26471 - DNA, 21 bp, Homo sapiens
aacctggctgtgaatgaggac

SEQ ID NO: 26472 - RNA, 21 nt, RNAi
ccuggcugugaaugaggacuu

SEQ ID NO: 26473 - RNA, 21 nt, RNAi
uuggaccgacacuuacuccug

SEQ ID NO: 26474 - DNA, 21 bp, Homo sapiens
aatgaggactgtgaactgaag

SEQ ID NO: 26475 - RNA, 21 nt, RNAi
ugaggacugugaacugaaguu

SEQ ID NO: 26476 - RNA, 21 nt, RNAi
uuacuccugacacuugacuuc

SEQ ID NO: 26477 - DNA, 21 bp, Homo sapiens
aaccagacagtggacatctgg

SEQ ID NO: 26478 - RNA, 21 nt, RNAi
ccagacaguggacaucugguu

SEQ ID NO: 26479 - RNA, 21 nt, RNAi
uuggucugucaccuguagacc

SEQ ID NO: 26480 - DNA, 21 bp, Homo sapiens
aaagattacctggaccagctg

SEQ ID NO: 26481 - RNA, 21 nt, RNAi
agauuaccuggaccagcuguu

SEQ ID NO: 26482 - RNA, 21 nt, RNAi
uuucuaauggaccuggucgac

SEQ ID NO: 26483 - DNA, 21 bp, Homo sapiens
aagattacctggaccagctga

SEQ ID NO: 26484 - RNA, 21 nt, RNAi
gauuaccuggaccagcugauu

SEQ ID NO: 26485 - RNA, 21 nt, RNAi
uucuaauggaccuggucgacu

SEQ ID NO: 26486 - DNA, 21 bp, Homo sapiens
aagctgaacgacaaagcggcc

SEQ ID NO: 26487 - RNA, 21 nt, RNAi
gcugaacgacaaagcggccuu

SEQ ID NO: 26488 - RNA, 21 nt, RNAi
uucgacuugcuguuucgccgg

SEQ ID NO: 26489 - DNA, 21 bp, Homo sapiens
aacgacaaagcggccaaatcc

SEQ ID NO: 26490 - RNA, 21 nt, RNAi
cgacaaagcggccaaauccuu

SEQ ID NO: 26491 - RNA, 21 nt, RNAi
uugcuguuucgccgguuuagg

SEQ ID NO: 26492 - DNA, 21 bp, Homo sapiens
aaagcggccaaatcctacatc

SEQ ID NO: 26493 - RNA, 21 nt, RNAi
agcggccaaauccuacaucuu

SEQ ID NO: 26494 - RNA, 21 nt, RNAi
uuucgccgguuuaggauguag

SEQ ID NO: 26495 - DNA, 21 bp, Homo sapiens
aagcggccaaatcctacatcc

SEQ ID NO: 26496 - RNA, 21 nt, RNAi
gcggccaaauccuacauccuu

SEQ ID NO: 26497 - RNA, 21 nt, RNAi
uucgccgguuuaggauguagg

SEQ ID NO: 26498 - DNA, 21 bp, Homo sapiens
aaggatttcactcagctgttc

SEQ ID NO: 26499 - RNA, 21 nt, RNAi
ggauuucacucagcuguucuu

SEQ ID NO: 26500 - RNA, 21 nt, RNAi
uuccuaaagugagucgacaag

SEQ ID NO: 26501 - DNA, 21 bp, Homo sapiens
aagatgctggagctagacgtg

SEQ ID NO: 26502 - RNA, 21 nt, RNAi
gaugcuggagcuagacguguu

SEQ ID NO: 26503 - RNA, 21 nt, RNAi
uucuacgaccucgaucugcac

SEQ ID NO: 26504 - DNA, 21 bp, Homo sapiens
aacacgagaaactcacagtgg

SEQ ID NO: 26505 - RNA, 21 nt, RNAi
cacgagaaacucacagugguu

SEQ ID NO: 26506 - RNA, 21 nt, RNAi
uugugcucuuugagugucacc

SEQ ID NO: 26507 - DNA, 21 bp, Homo sapiens
aaactcacagtggatgaatgg

SEQ ID NO: 26508 - RNA, 21 nt, RNAi
acucacaguggaugaaugguu

SEQ ID NO: 26509 - RNA, 21 nt, RNAi
uuugagugucaccuacuuacc

SEQ ID NO: 26510 - DNA, 21 bp, Homo sapiens
aactcacagtggatgaatgga

SEQ ID NO: 26511 - RNA, 21 nt, RNAi
cucacaguggaugaauggauu

SEQ ID NO: 26512 - RNA, 21 nt, RNAi
uugagugucaccuacuuaccu

SEQ ID NO: 26513 - DNA, 21 bp, Homo sapiens
aatggaagcagcacatctaca

SEQ ID NO: 26514 - RNA, 21 nt, RNAi
uggaagcagcacaucuacauu

SEQ ID NO: 26515 - RNA, 21 nt, RNAi
uuaccuucgucguguagaugu

SEQ ID NO: 26516 - DNA, 21 bp, Homo sapiens
aagcagcacatctacaaggag

SEQ ID NO: 26517 - RNA, 21 nt, RNAi
gcagcacaucuacaaggaguu

SEQ ID NO: 26518 - RNA, 21 nt, RNAi
uucgucguguagauguuccuc

SEQ ID NO: 26519 - DNA, 21 bp, Homo sapiens
aaggagattgtgaacttcagc

SEQ ID NO: 26520 - RNA, 21 nt, RNAi
ggagauugugaacuucagcuu

SEQ ID NO: 26521 - RNA, 21 nt, RNAi
uuccucuaacacuugaagucg

SEQ ID NO: 26522 - DNA, 21 bp, Homo sapiens
aaggaccagtatttgtcacta

SEQ ID NO: 26523 - RNA, 21 nt, RNAi
ggaccaguauuugucacuauu

SEQ ID NO: 26524 - RNA, 21 nt, RNAi
uuccuggucauaaacagugau

SEQ ID NO: 26525 - DNA, 21 bp, Homo sapiens
aatacagcctttcaagcagag

SEQ ID NO: 26526 - RNA, 21 nt, RNAi
uacagccuuucaagcagaguu

SEQ ID NO: 26527 - RNA, 21 nt, RNAi
uuaugucggaaaguucgucuc

SEQ ID NO: 26528 - DNA, 21 bp, Homo sapiens
aaactagctctgatcctaaca

SEQ ID NO: 26529 - RNA, 21 nt, RNAi
acuagcucugauccuaacauu

SEQ ID NO: 26530 - RNA, 21 nt, RNAi
uuugaucgagacuaggauugu

SEQ ID NO: 26531 - DNA, 21 bp, Homo sapiens
aactagctctgatcctaacag

SEQ ID NO: 26532 - RNA, 21 nt, RNAi
cuagcucugauccuaacaguu

SEQ ID NO: 26533 - RNA, 21 nt, RNAi
uugaucgagacuaggauuguc

SEQ ID NO: 26534 - DNA, 21 bp, Homo sapiens
aacaggccacgttaaactgcc

SEQ ID NO: 26535 - RNA, 21 nt, RNAi
caggccacguuaaacugccuu

SEQ ID NO: 26536 - RNA, 21 nt, RNAi
uuguccggugcaauuugacgg

SEQ ID NO: 26537 - DNA, 21 bp, Homo sapiens
aacgaattaccacaaacctgg

SEQ ID NO: 26538 - RNA, 21 nt, RNAi
cgaauuaccacaaaccugguu

SEQ ID NO: 26539 - RNA, 21 nt, RNAi
uugcuuaaugguguuuggacc

SEQ ID NO: 26540 - DNA, 21 bp, Homo sapiens
aattaccacaaacctggtgga

SEQ ID NO: 26541 - RNA, 21 nt, RNAi
uuaccacaaaccugguggauu

SEQ ID NO: 26542 - RNA, 21 nt, RNAi
uuaaugguguuuggaccaccu

SEQ ID NO: 26543 - DNA, 21 bp, Homo sapiens
aaacctggtggattgaaacag

SEQ ID NO: 26544 - RNA, 21 nt, RNAi
accugguggauugaaacaguu

SEQ ID NO: 26545 - RNA, 21 nt, RNAi
uuuggaccaccuaacuuuguc

SEQ ID NO: 26546 - DNA, 21 bp, Homo sapiens
aacctggtggattgaaacagc

SEQ ID NO: 26547 - RNA, 21 nt, RNAi
ccugguggauugaaacagcuu

SEQ ID NO: 26548 - RNA, 21 nt, RNAi
uuggaccaccuaacuuugucg

SEQ ID NO: 26549 - DNA, 21 bp, Homo sapiens
aagaatccttccttggctctt

SEQ ID NO: 26550 - RNA, 21 nt, RNAi
gaauccuuccuuggcucuuuu

SEQ ID NO: 26551 - RNA, 21 nt, RNAi
uucuuaggaaggaaccgagaa

SEQ ID NO: 26552 - DNA, 21 bp, Homo sapiens
aacaacagtcattggatttag

SEQ ID NO: 26553 - RNA, 21 nt, RNAi
caacagucauuggauuuaguu

SEQ ID NO: 26554 - RNA, 21 nt, RNAi
uuguugucaguaaccuaaauc

SEQ ID NO: 26555 - DNA, 21 bp, Homo sapiens
aatcctgtgtgatcttatctt

SEQ ID NO: 26556 - RNA, 21 nt, RNAi
uccugugugaucuuaucuuuu

SEQ ID NO: 26557 - RNA, 21 nt, RNAi
uuaggacacacuagaauagaa

SEQ ID NO: 26558 - DNA, 21 bp, Homo sapiens
aaacctgcaaatactctagtt

SEQ ID NO: 26559 - RNA, 21 nt, RNAi
accugcaaauacucuaguuuu

SEQ ID NO: 26560 - RNA, 21 nt, RNAi
uuuggacguuuaugagaucaa

SEQ ID NO: 26561 - DNA, 21 bp, Homo sapiens
aacctgcaaatactctagttc

SEQ ID NO: 26562 - RNA, 21 nt, RNAi
ccugcaaauacucuaguucuu

SEQ ID NO: 26563 - RNA, 21 nt, RNAi
uuggacguuuaugagaucaag

SEQ ID NO: 26564 - DNA, 21 bp, Homo sapiens
aaataaagtcacattctcagg

SEQ ID NO: 26565 - RNA, 21 nt, RNAi
auaaagucacauucucagguu

SEQ ID NO: 26566 - RNA, 21 nt, RNAi
uuuauuucaguguaagagucc

SEQ ID NO: 26567 - DNA, 21 bp, Homo sapiens
aataaagtcacattctcaggt

SEQ ID NO: 26568 - RNA, 21 nt, RNAi
uaaagucacauucucagguuu

SEQ ID NO: 26569 - RNA, 21 nt, RNAi
uuauuucaguguaagagucca

SEQ ID NO: 26570 - DNA, 21 bp, Homo sapiens
aaagtcacattctcaggttcc

SEQ ID NO: 26571 - RNA, 21 nt, RNAi
agucacauucucagguuccuu

SEQ ID NO: 26572 - RNA, 21 nt, RNAi
uuucaguguaagaguccaagg

SEQ ID NO: 26573 - DNA, 21 bp, Homo sapiens
aagtcacattctcaggttcca

SEQ ID NO: 26574 - RNA, 21 nt, RNAi
gucacauucucagguuccauu

SEQ ID NO: 26575 - RNA, 21 nt, RNAi
uucaguguaagaguccaaggu

SEQ ID NO: 26576 - DNA, 21 bp, Homo sapiens
caagcaggacgtcaacaagac

SEQ ID NO: 26577 - RNA, 21 nt, RNAi
agcaggacgucaacaagacuu

SEQ ID NO: 26578 - RNA, 21 nt, RNAi
uuucguccugcaguuguucug

SEQ ID NO: 26579 - DNA, 21 bp, Homo sapiens
caggacgtcaacaagaccgcc

SEQ ID NO: 26580 - RNA, 21 nt, RNAi
ggacgucaacaagaccgccuu

SEQ ID NO: 26581 - RNA, 21 nt, RNAi
uuccugcaguuguucuggcgg

SEQ ID NO: 26582 - DNA, 21 bp, Homo sapiens
catcaagaagctgagccgacc

SEQ ID NO: 26583 - RNA, 21 nt, RNAi
ucaagaagcugagccgaccuu

SEQ ID NO: 26584 - RNA, 21 nt, RNAi
uuaguucuucgacucggcugg

SEQ ID NO: 26585 - DNA, 21 bp, Homo sapiens
cagtccgagatcttcgccaag

SEQ ID NO: 26586 - RNA, 21 nt, RNAi
guccgagaucuucgccaaguu

SEQ ID NO: 26587 - RNA, 21 nt, RNAi
uucaggcucuagaagcgguuc

SEQ ID NO: 26588 - DNA, 21 bp, Homo sapiens
cacatgcagcatgagaacgtc

SEQ ID NO: 26589 - RNA, 21 nt, RNAi
caugcagcaugagaacgucuu

SEQ ID NO: 26590 - RNA, 21 nt, RNAi
uuguacgucguacucuugcag

SEQ ID NO: 26591 - DNA, 21 bp, Homo sapiens
catgcagcatgagaacgtcat

SEQ ID NO: 26592 - RNA, 21 nt, RNAi
ugcagcaugagaacgucauuu

SEQ ID NO: 26593 - RNA, 21 nt, RNAi
uuacgucguacucuugcagua

SEQ ID NO: 26594 - DNA, 21 bp, Homo sapiens
caacttctatgacttctacct

SEQ ID NO: 26595 - RNA, 21 nt, RNAi
acuucuaugacuucuaccuuu

SEQ ID NO: 26596 - RNA, 21 nt, RNAi
uuugaagauacugaagaugga

SEQ ID NO: 26597 - DNA, 21 bp, Homo sapiens
catgcagacggatctgcagaa

SEQ ID NO: 26598 - RNA, 21 nt, RNAi
ugcagacggaucugcagaauu

SEQ ID NO: 26599 - RNA, 21 nt, RNAi
uuacgucugccuagacgucuu

SEQ ID NO: 26600 - DNA, 21 bp, Homo sapiens
cagacggatctgcagaagatc

SEQ ID NO: 26601 - RNA, 21 nt, RNAi
gacggaucugcagaagaucuu

SEQ ID NO: 26602 - RNA, 21 nt, RNAi
uucugccuagacgucuucuag

SEQ ID NO: 26603 - DNA, 21 bp, Homo sapiens
cagtgaggagaagatccagta

SEQ ID NO: 26604 - RNA, 21 nt, RNAi
gugaggagaagauccaguauu

SEQ ID NO: 26605 - RNA, 21 nt, RNAi
uucacuccucuucuaggucau

SEQ ID NO: 26606 - DNA, 21 bp, Homo sapiens
cagtacctggtgtatcagatg

SEQ ID NO: 26607 - RNA, 21 nt, RNAi
guaccugguguaucagauguu

SEQ ID NO: 26608 - RNA, 21 nt, RNAi
uucauggaccacauagucuac

SEQ ID NO: 26609 - DNA, 21 bp, Homo sapiens
cagatgctcaaaggccttaag

SEQ ID NO: 26610 - RNA, 21 nt, RNAi
gaugcucaaaggccuuaaguu

SEQ ID NO: 26611 - RNA, 21 nt, RNAi
uucuacgaguuuccggaauuc

SEQ ID NO: 26612 - DNA, 21 bp, Homo sapiens
caaaggccttaagtacatcca

SEQ ID NO: 26613 - RNA, 21 nt, RNAi
aaggccuuaaguacauccauu

SEQ ID NO: 26614 - RNA, 21 nt, RNAi
uuuuccggaauucauguaggu

SEQ ID NO: 26615 - DNA, 21 bp, Homo sapiens
caggcaacctggctgtgaatg

SEQ ID NO: 26616 - RNA, 21 nt, RNAi
ggcaaccuggcugugaauguu

SEQ ID NO: 26617 - RNA, 21 nt, RNAi
uuccguuggaccgacacuuac

SEQ ID NO: 26618 - DNA, 21 bp, Homo sapiens
caacctggctgtgaatgagga

SEQ ID NO: 26619 - RNA, 21 nt, RNAi
accuggcugugaaugaggauu

SEQ ID NO: 26620 - RNA, 21 nt, RNAi
uuuggaccgacacuuacuccu

SEQ ID NO: 26621 - DNA, 21 bp, Homo sapiens
catgcagacgccgagatgact

SEQ ID NO: 26622 - RNA, 21 nt, RNAi
ugcagacgccgagaugacuuu

SEQ ID NO: 26623 - RNA, 21 nt, RNAi
uuacgucugcggcucuacuga

SEQ ID NO: 26624 - DNA, 21 bp, Homo sapiens
cagacgccgagatgactggct

SEQ ID NO: 26625 - RNA, 21 nt, RNAi
gacgccgagaugacuggcuuu

SEQ ID NO: 26626 - RNA, 21 nt, RNAi
uucugcggcucuacugaccga

SEQ ID NO: 26627 - DNA, 21 bp, Homo sapiens
cagctggatgcactacaacca

SEQ ID NO: 26628 - RNA, 21 nt, RNAi
gcuggaugcacuacaaccauu

SEQ ID NO: 26629 - RNA, 21 nt, RNAi
uucgaccuacgugauguuggu

SEQ ID NO: 26630 - DNA, 21 bp, Homo sapiens
cactacaaccagacagtggac

SEQ ID NO: 26631 - RNA, 21 nt, RNAi
cuacaaccagacaguggacuu

SEQ ID NO: 26632 - RNA, 21 nt, RNAi
uugauguuggucugucaccug

SEQ ID NO: 26633 - DNA, 21 bp, Homo sapiens
caaccagacagtggacatctg

SEQ ID NO: 26634 - RNA, 21 nt, RNAi
accagacaguggacaucuguu

SEQ ID NO: 26635 - RNA, 21 nt, RNAi
uuuggucugucaccuguagac

SEQ ID NO: 26636 - DNA, 21 bp, Homo sapiens
cagacagtggacatctggtct

SEQ ID NO: 26637 - RNA, 21 nt, RNAi
gacaguggacaucuggucuuu

SEQ ID NO: 26638 - RNA, 21 nt, RNAi
uucugucaccuguagaccaga

SEQ ID NO: 26639 - DNA, 21 bp, Homo sapiens
cagtggacatctggtctgtgg

SEQ ID NO: 26640 - RNA, 21 nt, RNAi
guggacaucuggucugugguu

SEQ ID NO: 26641 - RNA, 21 nt, RNAi
uucaccuguagaccagacacc

SEQ ID NO: 26642 - DNA, 21 bp, Homo sapiens
catggcagagatgctgacagg

SEQ ID NO: 26643 - RNA, 21 nt, RNAi
uggcagagaugcugacagguu

SEQ ID NO: 26644 - RNA, 21 nt, RNAi
uuaccgucucuacgacugucc

SEQ ID NO: 26645 - DNA, 21 bp, Homo sapiens
cacggagtttgtgcagaagct

SEQ ID NO: 26646 - RNA, 21 nt, RNAi
cggaguuugugcagaagcuuu

SEQ ID NO: 26647 - RNA, 21 nt, RNAi
uugccucaaacacgucuucga

SEQ ID NO: 26648 - DNA, 21 bp, Homo sapiens
cagaagctgaacgacaaagcg

SEQ ID NO: 26649 - RNA, 21 nt, RNAi
gaagcugaacgacaaagcguu

SEQ ID NO: 26650 - RNA, 21 nt, RNAi
uucuucgacuugcuguuucgc

SEQ ID NO: 26651 - DNA, 21 bp, Homo sapiens
caaagcggccaaatcctacat

SEQ ID NO: 26652 - RNA, 21 nt, RNAi
aagcggccaaauccuacauuu

SEQ ID NO: 26653 - RNA, 21 nt, RNAi
uuuucgccgguuuaggaugua

SEQ ID NO: 26654 - DNA, 21 bp, Homo sapiens
caggaaggatttcactcagct

SEQ ID NO: 26655 - RNA, 21 nt, RNAi
ggaaggauuucacucagcuuu

SEQ ID NO: 26656 - RNA, 21 nt, RNAi
uuccuuccuaaagugagucga

SEQ ID NO: 26657 - DNA, 21 bp, Homo sapiens
cagcagccgtttgatgattcc

SEQ ID NO: 26658 - RNA, 21 nt, RNAi
gcagccguuugaugauuccuu

SEQ ID NO: 26659 - RNA, 21 nt, RNAi
uucgucggcaaacuacuaagg

SEQ ID NO: 26660 - DNA, 21 bp, Homo sapiens
cagccgtttgatgattcctta

SEQ ID NO: 26661 - RNA, 21 nt, RNAi
gccguuugaugauuccuuauu

SEQ ID NO: 26662 - RNA, 21 nt, RNAi
uucggcaaacuacuaaggaau

SEQ ID NO: 26663 - DNA, 21 bp, Homo sapiens
cacgagaaactcacagtggat

SEQ ID NO: 26664 - RNA, 21 nt, RNAi
cgagaaacucacaguggauuu

SEQ ID NO: 26665 - RNA, 21 nt, RNAi
uugcucuuugagugucaccua

SEQ ID NO: 26666 - DNA, 21 bp, Homo sapiens
cacagtggatgaatggaagca

SEQ ID NO: 26667 - RNA, 21 nt, RNAi
caguggaugaauggaagcauu

SEQ ID NO: 26668 - RNA, 21 nt, RNAi
uugucaccuacuuaccuucgu

SEQ ID NO: 26669 - DNA, 21 bp, Homo sapiens
cagtggatgaatggaagcagc

SEQ ID NO: 26670 - RNA, 21 nt, RNAi
guggaugaauggaagcagcuu

SEQ ID NO: 26671 - RNA, 21 nt, RNAi
uucaccuacuuaccuucgucg

SEQ ID NO: 26672 - DNA, 21 bp, Homo sapiens
cagcacatctacaaggagatt

SEQ ID NO: 26673 - RNA, 21 nt, RNAi
gcacaucuacaaggagauuuu

SEQ ID NO: 26674 - RNA, 21 nt, RNAi
uucguguagauguuccucuaa

SEQ ID NO: 26675 - DNA, 21 bp, Homo sapiens
cacatctacaaggagattgtg

SEQ ID NO: 26676 - RNA, 21 nt, RNAi
caucuacaaggagauuguguu

SEQ ID NO: 26677 - RNA, 21 nt, RNAi
uuguagauguuccucuaacac

SEQ ID NO: 26678 - DNA, 21 bp, Homo sapiens
catctacaaggagattgtgaa

SEQ ID NO: 26679 - RNA, 21 nt, RNAi
ucuacaaggagauugugaauu

SEQ ID NO: 26680 - RNA, 21 nt, RNAi
uuagauguuccucuaacacuu

SEQ ID NO: 26681 - DNA, 21 bp, Homo sapiens
caaggagattgtgaacttcag

SEQ ID NO: 26682 - RNA, 21 nt, RNAi
aggagauugugaacuucaguu

SEQ ID NO: 26683 - RNA, 21 nt, RNAi
uuuccucuaacacuugaaguc

SEQ ID NO: 26684 - DNA, 21 bp, Homo sapiens
catcttgcatggcaccaccgg

SEQ ID NO: 26685 - RNA, 21 nt, RNAi
ucuugcauggcaccaccgguu

SEQ ID NO: 26686 - RNA, 21 nt, RNAi
uuagaacguaccgugguggcc

SEQ ID NO: 26687 - DNA, 21 bp, Homo sapiens
caaggaccagtatttgtcact

SEQ ID NO: 26688 - RNA, 21 nt, RNAi
aggaccaguauuugucacuuu

SEQ ID NO: 26689 - RNA, 21 nt, RNAi
uuuccuggucauaaacaguga

SEQ ID NO: 26690 - DNA, 21 bp, Homo sapiens
cagtatttgtcactaccaaac

SEQ ID NO: 26691 - RNA, 21 nt, RNAi
guauuugucacuaccaaacuu

SEQ ID NO: 26692 - RNA, 21 nt, RNAi
uucauaaacagugaugguuug

SEQ ID NO: 26693 - DNA, 21 bp, Homo sapiens
cagcctttcaagcagaggaca

SEQ ID NO: 26694 - RNA, 21 nt, RNAi
gccuuucaagcagaggacauu

SEQ ID NO: 26695 - RNA, 21 nt, RNAi
uucggaaaguucgucuccugu

SEQ ID NO: 26696 - DNA, 21 bp, Homo sapiens
cagaattcaaagatgtcggtt

SEQ ID NO: 26697 - RNA, 21 nt, RNAi
gaauucaaagaugucgguuuu

SEQ ID NO: 26698 - RNA, 21 nt, RNAi
uucuuaaguuucuacagccaa

SEQ ID NO: 26699 - DNA, 21 bp, Homo sapiens
catctggagaatcgcctgcag

SEQ ID NO: 26700 - RNA, 21 nt, RNAi
ucuggagaaucgccugcaguu

SEQ ID NO: 26701 - RNA, 21 nt, RNAi
uuagaccucuuagcggacguc

SEQ ID NO: 26702 - DNA, 21 bp, Homo sapiens
cagtgatgctgtgttggtttc

SEQ ID NO: 26703 - RNA, 21 nt, RNAi
gugaugcuguguugguuucuu

SEQ ID NO: 26704 - RNA, 21 nt, RNAi
uucacuacgacacaaccaaag

SEQ ID NO: 26705 - DNA, 21 bp, Homo sapiens
cacaaacctggtggattgaaa

SEQ ID NO: 26706 - RNA, 21 nt, RNAi
caaaccugguggauugaaauu

SEQ ID NO: 26707 - RNA, 21 nt, RNAi
uuguuuggaccaccuaacuuu

SEQ ID NO: 26708 - DNA, 21 bp, Homo sapiens
caaacctggtggattgaaaca

SEQ ID NO: 26709 - RNA, 21 nt, RNAi
aaccugguggauugaaacauu

SEQ ID NO: 26710 - RNA, 21 nt, RNAi
uuuuggaccaccuaacuuugu

SEQ ID NO: 26711 - DNA, 21 bp, Homo sapiens
cagttctggaggctggaaatc

SEQ ID NO: 26712 - RNA, 21 nt, RNAi
guucuggaggcuggaaaucuu

SEQ ID NO: 26713 - RNA, 21 nt, RNAi
uucaagaccuccgaccuuuag

SEQ ID NO: 26714 - DNA, 21 bp, Homo sapiens
cagcttattgctgcatcactc

SEQ ID NO: 26715 - RNA, 21 nt, RNAi
gcuuauugcugcaucacucuu

SEQ ID NO: 26716 - RNA, 21 nt, RNAi
uucgaauaacgacguagugag

SEQ ID NO: 26717 - DNA, 21 bp, Homo sapiens
catcactccagtctctgtctc

SEQ ID NO: 26718 - RNA, 21 nt, RNAi
ucacuccagucucugucucuu

SEQ ID NO: 26719 - RNA, 21 nt, RNAi
uuagugaggucagagacagag

SEQ ID NO: 26720 - DNA, 21 bp, Homo sapiens
cactccagtctctgtctcttc

SEQ ID NO: 26721 - RNA, 21 nt, RNAi
cuccagucucugucucuucuu

SEQ ID NO: 26722 - RNA, 21 nt, RNAi
uugaggucagagacagagaag

SEQ ID NO: 26723 - DNA, 21 bp, Homo sapiens
cagtctctgtctcttctgttc

SEQ ID NO: 26724 - RNA, 21 nt, RNAi
gucucugucucuucuguucuu

SEQ ID NO: 26725 - RNA, 21 nt, RNAi
uucagagacagagaagacaag

SEQ ID NO: 26726 - DNA, 21 bp, Homo sapiens
caaataaagtcacattctcag

SEQ ID NO: 26727 - RNA, 21 nt, RNAi
aauaaagucacauucucaguu

SEQ ID NO: 26728 - RNA, 21 nt, RNAi
uuuuauuucaguguaagaguc

SEQ ID NO: 26729 - DNA, 21 bp, Homo sapiens
cacattctcaggttccaggtg

SEQ ID NO: 26730 - RNA, 21 nt, RNAi
cauucucagguuccagguguu

SEQ ID NO: 26731 - RNA, 21 nt, RNAi
uuguaagaguccaagguccac

SEQ ID NO: 26732 - DNA, 21 bp, Homo sapiens
cattctcaggttccaggtgga

SEQ ID NO: 26733 - RNA, 21 nt, RNAi
uucucagguuccagguggauu

SEQ ID NO: 26734 - RNA, 21 nt, RNAi
uuaagaguccaagguccaccu

SEQ ID NO: 26735 - DNA, 21 bp, Homo sapiens
gacgtcaacaagaccgcctgg

SEQ ID NO: 26736 - RNA, 21 nt, RNAi
cgucaacaagaccgccugguu

SEQ ID NO: 26737 - RNA, 21 nt, RNAi
uugcaguuguucuggcggacc

SEQ ID NO: 26738 - DNA, 21 bp, Homo sapiens
gagaaggtggccatcaagaag

SEQ ID NO: 26739 - RNA, 21 nt, RNAi
gaagguggccaucaagaaguu

SEQ ID NO: 26740 - RNA, 21 nt, RNAi
uucuuccaccgguaguucuuc

SEQ ID NO: 26741 - DNA, 21 bp, Homo sapiens
gaaggtggccatcaagaagct

SEQ ID NO: 26742 - RNA, 21 nt, RNAi
agguggccaucaagaagcuuu

SEQ ID NO: 26743 - RNA, 21 nt, RNAi
uuuccaccgguaguucuucga

SEQ ID NO: 26744 - DNA, 21 bp, Homo sapiens
gagctgctgctgctgaagcac

SEQ ID NO: 26745 - RNA, 21 nt, RNAi
gcugcugcugcugaagcacuu

SEQ ID NO: 26746 - RNA, 21 nt, RNAi
uucgacgacgacgacuucgug

SEQ ID NO: 26747 - DNA, 21 bp, Homo sapiens
gaagcacatgcagcatgagaa

SEQ ID NO: 26748 - RNA, 21 nt, RNAi
agcacaugcagcaugagaauu

SEQ ID NO: 26749 - RNA, 21 nt, RNAi
uuucguguacgucguacucuu

SEQ ID NO: 26750 - DNA, 21 bp, Homo sapiens
gacggatctgcagaagatcat

SEQ ID NO: 26751 - RNA, 21 nt, RNAi
cggaucugcagaagaucauuu

SEQ ID NO: 26752 - RNA, 21 nt, RNAi
uugccuagacgucuucuagua

SEQ ID NO: 26753 - DNA, 21 bp, Homo sapiens
gatggagttcagtgaggagaa

SEQ ID NO: 26754 - RNA, 21 nt, RNAi
uggaguucagugaggagaauu

SEQ ID NO: 26755 - RNA, 21 nt, RNAi
uuaccucaagucacuccucuu

SEQ ID NO: 26756 - DNA, 21 bp, Homo sapiens
gagttcagtgaggagaagatc

SEQ ID NO: 26757 - RNA, 21 nt, RNAi
guucagugaggagaagaucuu

SEQ ID NO: 26758 - RNA, 21 nt, RNAi
uucaagucacuccucuucuag

SEQ ID NO: 26759 - DNA, 21 bp, Homo sapiens
gaggagaagatccagtacctg

SEQ ID NO: 26760 - RNA, 21 nt, RNAi
ggagaagauccaguaccuguu

SEQ ID NO: 26761 - RNA, 21 nt, RNAi
uuccucuucuaggucauggac

SEQ ID NO: 26762 - DNA, 21 bp, Homo sapiens
gagaagatccagtacctggtg

SEQ ID NO: 26763 - RNA, 21 nt, RNAi
gaagauccaguaccugguguu

SEQ ID NO: 26764 - RNA, 21 nt, RNAi
uucuucuaggucauggaccac

SEQ ID NO: 26765 - DNA, 21 bp, Homo sapiens
gaagatccagtacctggtgta

SEQ ID NO: 26766 - RNA, 21 nt, RNAi
agauccaguaccugguguauu

SEQ ID NO: 26767 - RNA, 21 nt, RNAi
uuucuaggucauggaccacau

SEQ ID NO: 26768 - DNA, 21 bp, Homo sapiens
gatccagtacctggtgtatca

SEQ ID NO: 26769 - RNA, 21 nt, RNAi
uccaguaccugguguaucauu

SEQ ID NO: 26770 - RNA, 21 nt, RNAi
uuaggucauggaccacauagu

SEQ ID NO: 26771 - DNA, 21 bp, Homo sapiens
gatgctcaaaggccttaagta

SEQ ID NO: 26772 - RNA, 21 nt, RNAi
ugcucaaaggccuuaaguauu

SEQ ID NO: 26773 - RNA, 21 nt, RNAi
uuacgaguuuccggaauucau

SEQ ID NO: 26774 - DNA, 21 bp, Homo sapiens
gacctgaagccaggcaacctg

SEQ ID NO: 26775 - RNA, 21 nt, RNAi
ccugaagccaggcaaccuguu

SEQ ID NO: 26776 - RNA, 21 nt, RNAi
uuggacuucgguccguuggac

SEQ ID NO: 26777 - DNA, 21 bp, Homo sapiens
gaagccaggcaacctggctgt

SEQ ID NO: 26778 - RNA, 21 nt, RNAi
agccaggcaaccuggcuguuu

SEQ ID NO: 26779 - RNA, 21 nt, RNAi
uuucgguccguuggaccgaca

SEQ ID NO: 26780 - DNA, 21 bp, Homo sapiens
gaatgaggactgtgaactgaa

SEQ ID NO: 26781 - RNA, 21 nt, RNAi
augaggacugugaacugaauu

SEQ ID NO: 26782 - RNA, 21 nt, RNAi
uuuacuccugacacuugacuu

SEQ ID NO: 26783 - DNA, 21 bp, Homo sapiens
gaggactgtgaactgaagatt

SEQ ID NO: 26784 - RNA, 21 nt, RNAi
ggacugugaacugaagauuuu

SEQ ID NO: 26785 - RNA, 21 nt, RNAi
uuccugacacuugacuucuaa

SEQ ID NO: 26786 - DNA, 21 bp, Homo sapiens
gactgtgaactgaagattctg

SEQ ID NO: 26787 - RNA, 21 nt, RNAi
cugugaacugaagauucuguu

SEQ ID NO: 26788 - RNA, 21 nt, RNAi
uugacacuugacuucuaagac

SEQ ID NO: 26789 - DNA, 21 bp, Homo sapiens
gacatgcagacgccgagatga

SEQ ID NO: 26790 - RNA, 21 nt, RNAi
caugcagacgccgagaugauu

SEQ ID NO: 26791 - RNA, 21 nt, RNAi
uuguacgucugcggcucuacu

SEQ ID NO: 26792 - DNA, 21 bp, Homo sapiens
gacgccgagatgactggctac

SEQ ID NO: 26793 - RNA, 21 nt, RNAi
cgccgagaugacuggcuacuu

SEQ ID NO: 26794 - RNA, 21 nt, RNAi
uugcggcucuacugaccgaug

SEQ ID NO: 26795 - DNA, 21 bp, Homo sapiens
gagatgactggctacgtggtg

SEQ ID NO: 26796 - RNA, 21 nt, RNAi
gaugacuggcuacgugguguu

SEQ ID NO: 26797 - RNA, 21 nt, RNAi
uucuacugaccgaugcaccac

SEQ ID NO: 26798 - DNA, 21 bp, Homo sapiens
gatgactggctacgtggtgac

SEQ ID NO: 26799 - RNA, 21 nt, RNAi
ugacuggcuacguggugacuu

SEQ ID NO: 26800 - RNA, 21 nt, RNAi
uuacugaccgaugcaccacug

SEQ ID NO: 26801 - DNA, 21 bp, Homo sapiens
gaggtgatcctcagctggatg

SEQ ID NO: 26802 - RNA, 21 nt, RNAi
ggugauccucagcuggauguu

SEQ ID NO: 26803 - RNA, 21 nt, RNAi
uuccacuaggagucgaccuac

SEQ ID NO: 26804 - DNA, 21 bp, Homo sapiens
gatcctcagctggatgcacta

SEQ ID NO: 26805 - RNA, 21 nt, RNAi
uccucagcuggaugcacuauu

SEQ ID NO: 26806 - RNA, 21 nt, RNAi
uuaggagucgaccuacgugau

SEQ ID NO: 26807 - DNA, 21 bp, Homo sapiens
gatgcactacaaccagacagt

SEQ ID NO: 26808 - RNA, 21 nt, RNAi
ugcacuacaaccagacaguuu

SEQ ID NO: 26809 - RNA, 21 nt, RNAi
uuacgugauguuggucuguca

SEQ ID NO: 26810 - DNA, 21 bp, Homo sapiens
gacagtggacatctggtctgt

SEQ ID NO: 26811 - RNA, 21 nt, RNAi
caguggacaucuggucuguuu

SEQ ID NO: 26812 - RNA, 21 nt, RNAi
uugucaccuguagaccagaca

SEQ ID NO: 26813 - DNA, 21 bp, Homo sapiens
gaaagattacctggaccagct

SEQ ID NO: 26814 - RNA, 21 nt, RNAi
aagauuaccuggaccagcuuu

SEQ ID NO: 26815 - RNA, 21 nt, RNAi
uuuucuaauggaccuggucga

SEQ ID NO: 26816 - DNA, 21 bp, Homo sapiens
gattacctggaccagctgacc

SEQ ID NO: 26817 - RNA, 21 nt, RNAi
uuaccuggaccagcugaccuu

SEQ ID NO: 26818 - RNA, 21 nt, RNAi
uuaauggaccuggucgacugg

SEQ ID NO: 26819 - DNA, 21 bp, Homo sapiens
gagtttgtgcagaagctgaac

SEQ ID NO: 26820 - RNA, 21 nt, RNAi
guuugugcagaagcugaacuu

SEQ ID NO: 26821 - RNA, 21 nt, RNAi
uucaaacacgucuucgacuug

SEQ ID NO: 26822 - DNA, 21 bp, Homo sapiens
gaagctgaacgacaaagcggc

SEQ ID NO: 26823 - RNA, 21 nt, RNAi
agcugaacgacaaagcggcuu

SEQ ID NO: 26824 - RNA, 21 nt, RNAi
uuucgacuugcuguuucgccg

SEQ ID NO: 26825 - DNA, 21 bp, Homo sapiens
gaacgacaaagcggccaaatc

SEQ ID NO: 26826 - RNA, 21 nt, RNAi
acgacaaagcggccaaaucuu

SEQ ID NO: 26827 - RNA, 21 nt, RNAi
uuugcuguuucgccgguuuag

SEQ ID NO: 26828 - DNA, 21 bp, Homo sapiens
gacaaagcggccaaatcctac

SEQ ID NO: 26829 - RNA, 21 nt, RNAi
caaagcggccaaauccuacuu

SEQ ID NO: 26830 - RNA, 21 nt, RNAi
uuguuucgccgguuuaggaug

SEQ ID NO: 26831 - DNA, 21 bp, Homo sapiens
gaaggatttcactcagctgtt

SEQ ID NO: 26832 - RNA, 21 nt, RNAi
aggauuucacucagcuguuuu

SEQ ID NO: 26833 - RNA, 21 nt, RNAi
uuuccuaaagugagucgacaa

SEQ ID NO: 26834 - DNA, 21 bp, Homo sapiens
gacctgctggagaagatgctg

SEQ ID NO: 26835 - RNA, 21 nt, RNAi
ccugcuggagaagaugcuguu

SEQ ID NO: 26836 - RNA, 21 nt, RNAi
uuggacgaccucuucuacgac

SEQ ID NO: 26837 - DNA, 21 bp, Homo sapiens
gagaagatgctggagctagac

SEQ ID NO: 26838 - RNA, 21 nt, RNAi
gaagaugcuggagcuagacuu

SEQ ID NO: 26839 - RNA, 21 nt, RNAi
uucuucuacgaccucgaucug

SEQ ID NO: 26840 - DNA, 21 bp, Homo sapiens
gaagatgctggagctagacgt

SEQ ID NO: 26841 - RNA, 21 nt, RNAi
agaugcuggagcuagacguuu

SEQ ID NO: 26842 - RNA, 21 nt, RNAi
uuucuacgaccucgaucugca

SEQ ID NO: 26843 - DNA, 21 bp, Homo sapiens
gatgctggagctagacgtgga

SEQ ID NO: 26844 - RNA, 21 nt, RNAi
ugcuggagcuagacguggauu

SEQ ID NO: 26845 - RNA, 21 nt, RNAi
uuacgaccucgaucugcaccu

SEQ ID NO: 26846 - DNA, 21 bp, Homo sapiens
gagctagacgtggacaagcgc

SEQ ID NO: 26847 - RNA, 21 nt, RNAi
gcuagacguggacaagcgcuu

SEQ ID NO: 26848 - RNA, 21 nt, RNAi
uucgaucugcaccuguucgcg

SEQ ID NO: 26849 - DNA, 21 bp, Homo sapiens
gatgattccttagaacacgag

SEQ ID NO: 26850 - RNA, 21 nt, RNAi
ugauuccuuagaacacgaguu

SEQ ID NO: 26851 - RNA, 21 nt, RNAi
uuacuaaggaaucuugugcuc

SEQ ID NO: 26852 - DNA, 21 bp, Homo sapiens
gattccttagaacacgagaaa

SEQ ID NO: 26853 - RNA, 21 nt, RNAi
uuccuuagaacacgagaaauu

SEQ ID NO: 26854 - RNA, 21 nt, RNAi
uuaaggaaucuugugcucuuu

SEQ ID NO: 26855 - DNA, 21 bp, Homo sapiens
gaacacgagaaactcacagtg

SEQ ID NO: 26856 - RNA, 21 nt, RNAi
acacgagaaacucacaguguu

SEQ ID NO: 26857 - RNA, 21 nt, RNAi
uuugugcucuuugagugucac

SEQ ID NO: 26858 - DNA, 21 bp, Homo sapiens
gagaaactcacagtggatgaa

SEQ ID NO: 26859 - RNA, 21 nt, RNAi
gaaacucacaguggaugaauu

SEQ ID NO: 26860 - RNA, 21 nt, RNAi
uucuuugagugucaccuacuu

SEQ ID NO: 26861 - DNA, 21 bp, Homo sapiens
gaaactcacagtggatgaatg

SEQ ID NO: 26862 - RNA, 21 nt, RNAi
aacucacaguggaugaauguu

SEQ ID NO: 26863 - RNA, 21 nt, RNAi
uuuugagugucaccuacuuac

SEQ ID NO: 26864 - DNA, 21 bp, Homo sapiens
gatgaatggaagcagcacatc

SEQ ID NO: 26865 - RNA, 21 nt, RNAi
ugaauggaagcagcacaucuu

SEQ ID NO: 26866 - RNA, 21 nt, RNAi
uuacuuaccuucgucguguag

SEQ ID NO: 26867 - DNA, 21 bp, Homo sapiens
gaatggaagcagcacatctac

SEQ ID NO: 26868 - RNA, 21 nt, RNAi
auggaagcagcacaucuacuu

SEQ ID NO: 26869 - RNA, 21 nt, RNAi
uuuaccuucgucguguagaug

SEQ ID NO: 26870 - DNA, 21 bp, Homo sapiens
gaagcagcacatctacaagga

SEQ ID NO: 26871 - RNA, 21 nt, RNAi
agcagcacaucuacaaggauu

SEQ ID NO: 26872 - RNA, 21 nt, RNAi
uuucgucguguagauguuccu

SEQ ID NO: 26873 - DNA, 21 bp, Homo sapiens
gactcatcttgcatggcacca

SEQ ID NO: 26874 - RNA, 21 nt, RNAi
cucaucuugcauggcaccauu

SEQ ID NO: 26875 - RNA, 21 nt, RNAi
uugaguagaacguaccguggu

SEQ ID NO: 26876 - DNA, 21 bp, Homo sapiens
gaccagtatttgtcactacca

SEQ ID NO: 26877 - RNA, 21 nt, RNAi
ccaguauuugucacuaccauu

SEQ ID NO: 26878 - RNA, 21 nt, RNAi
uuggucauaaacagugauggu

SEQ ID NO: 26879 - DNA, 21 bp, Homo sapiens
gaatacagcctttcaagcaga

SEQ ID NO: 26880 - RNA, 21 nt, RNAi
auacagccuuucaagcagauu

SEQ ID NO: 26881 - RNA, 21 nt, RNAi
uuuaugucggaaaguucgucu

SEQ ID NO: 26882 - DNA, 21 bp, Homo sapiens
gatgcagaattcaaagatgtc

SEQ ID NO: 26883 - RNA, 21 nt, RNAi
ugcagaauucaaagaugucuu

SEQ ID NO: 26884 - RNA, 21 nt, RNAi
uuacgucuuaaguuucuacag

SEQ ID NO: 26885 - DNA, 21 bp, Homo sapiens
gaattcaaagatgtcggttgg

SEQ ID NO: 26886 - RNA, 21 nt, RNAi
auucaaagaugucgguugguu

SEQ ID NO: 26887 - RNA, 21 nt, RNAi
uuuaaguuucuacagccaacc

SEQ ID NO: 26888 - DNA, 21 bp, Homo sapiens
gagaaactagctctgatccta

SEQ ID NO: 26889 - RNA, 21 nt, RNAi
gaaacuagcucugauccuauu

SEQ ID NO: 26890 - RNA, 21 nt, RNAi
uucuuugaucgagacuaggau

SEQ ID NO: 26891 - DNA, 21 bp, Homo sapiens
gaaactagctctgatcctaac

SEQ ID NO: 26892 - RNA, 21 nt, RNAi
aacuagcucugauccuaacuu

SEQ ID NO: 26893 - RNA, 21 nt, RNAi
uuuugaucgagacuaggauug

SEQ ID NO: 26894 - DNA, 21 bp, Homo sapiens
gatcctaacaggccacgttaa

SEQ ID NO: 26895 - RNA, 21 nt, RNAi
uccuaacaggccacguuaauu

SEQ ID NO: 26896 - RNA, 21 nt, RNAi
uuaggauuguccggugcaauu

SEQ ID NO: 26897 - DNA, 21 bp, Homo sapiens
gatgctgtgttggtttcctag

SEQ ID NO: 26898 - RNA, 21 nt, RNAi
ugcuguguugguuuccuaguu

SEQ ID NO: 26899 - RNA, 21 nt, RNAi
uuacgacacaaccaaaggauc

SEQ ID NO: 26900 - DNA, 21 bp, Homo sapiens
gatgctctaacgaattaccac

SEQ ID NO: 26901 - RNA, 21 nt, RNAi
ugcucuaacgaauuaccacuu

SEQ ID NO: 26902 - RNA, 21 nt, RNAi
uuacgagauugcuuaauggug

SEQ ID NO: 26903 - DNA, 21 bp, Homo sapiens
gaattaccacaaacctggtgg

SEQ ID NO: 26904 - RNA, 21 nt, RNAi
auuaccacaaaccuggugguu

SEQ ID NO: 26905 - RNA, 21 nt, RNAi
uuuaaugguguuuggaccacc

SEQ ID NO: 26906 - DNA, 21 bp, Homo sapiens
gattgaaacagcagaacttga

SEQ ID NO: 26907 - RNA, 21 nt, RNAi
uugaaacagcagaacuugauu

SEQ ID NO: 26908 - RNA, 21 nt, RNAi
uuaacuuugucgucuugaacu

SEQ ID NO: 26909 - DNA, 21 bp, Homo sapiens
gaaacagcagaacttgattcc

SEQ ID NO: 26910 - RNA, 21 nt, RNAi
aacagcagaacuugauuccuu

SEQ ID NO: 26911 - RNA, 21 nt, RNAi
uuuugucgucuugaacuaagg

SEQ ID NO: 26912 - DNA, 21 bp, Homo sapiens
gaagaatccttccttggctct

SEQ ID NO: 26913 - RNA, 21 nt, RNAi
agaauccuuccuuggcucuuu

SEQ ID NO: 26914 - RNA, 21 nt, RNAi
uuucuuaggaaggaaccgaga

SEQ ID NO: 26915 - DNA, 21 bp, Homo sapiens
tacaagcaggacgtcaacaag

SEQ ID NO: 26916 - RNA, 21 nt, RNAi
caagcaggacgucaacaaguu

SEQ ID NO: 26917 - RNA, 21 nt, RNAi
uuguucguccugcaguuguuc

SEQ ID NO: 26918 - DNA, 21 bp, Homo sapiens
tatgacttctacctggtgatg

SEQ ID NO: 26919 - RNA, 21 nt, RNAi
ugacuucuaccuggugauguu

SEQ ID NO: 26920 - RNA, 21 nt, RNAi
uuacugaagauggaccacuac

SEQ ID NO: 26921 - DNA, 21 bp, Homo sapiens
tacctggtgtatcagatgctc

SEQ ID NO: 26922 - RNA, 21 nt, RNAi
ccugguguaucagaugcucuu

SEQ ID NO: 26923 - RNA, 21 nt, RNAi
uuggaccacauagucuacgag

SEQ ID NO: 26924 - DNA, 21 bp, Homo sapiens
tatcagatgctcaaaggcctt

SEQ ID NO: 26925 - RNA, 21 nt, RNAi
ucagaugcucaaaggccuuuu

SEQ ID NO: 26926 - RNA, 21 nt, RNAi
uuagucuacgaguuuccggaa

SEQ ID NO: 26927 - DNA, 21 bp, Homo sapiens
taagtacatccactctgctgg

SEQ ID NO: 26928 - RNA, 21 nt, RNAi
aguacauccacucugcugguu

SEQ ID NO: 26929 - RNA, 21 nt, RNAi
uuucauguaggugagacgacc

SEQ ID NO: 26930 - DNA, 21 bp, Homo sapiens
tacaaccagacagtggacatc

SEQ ID NO: 26931 - RNA, 21 nt, RNAi
caaccagacaguggacaucuu

SEQ ID NO: 26932 - RNA, 21 nt, RNAi
uuguuggucugucaccuguag

SEQ ID NO: 26933 - DNA, 21 bp, Homo sapiens
tatcatggcagagatgctgac

SEQ ID NO: 26934 - RNA, 21 nt, RNAi
ucauggcagagaugcugacuu

SEQ ID NO: 26935 - RNA, 21 nt, RNAi
uuaguaccgucucuacgacug

SEQ ID NO: 26936 - DNA, 21 bp, Homo sapiens
tagacgtggacaagcgcctga

SEQ ID NO: 26937 - RNA, 21 nt, RNAi
gacguggacaagcgccugauu

SEQ ID NO: 26938 - RNA, 21 nt, RNAi
uucugcaccuguucgcggacu

SEQ ID NO: 26939 - DNA, 21 bp, Homo sapiens
tagaacacgagaaactcacag

SEQ ID NO: 26940 - RNA, 21 nt, RNAi
gaacacgagaaacucacaguu

SEQ ID NO: 26941 - RNA, 21 nt, RNAi
uucuugugcucuuugaguguc

SEQ ID NO: 26942 - DNA, 21 bp, Homo sapiens
tacaaggagattgtgaacttc

SEQ ID NO: 26943 - RNA, 21 nt, RNAi
caaggagauugugaacuucuu

SEQ ID NO: 26944 - RNA, 21 nt, RNAi
uuguuccucuaacacuugaag

SEQ ID NO: 26945 - DNA, 21 bp, Homo sapiens
tatttgtcactaccaaactca

SEQ ID NO: 26946 - RNA, 21 nt, RNAi
uuugucacuaccaaacucauu

SEQ ID NO: 26947 - RNA, 21 nt, RNAi
uuaaacagugaugguuugagu

SEQ ID NO: 26948 - DNA, 21 bp, Homo sapiens
tacagcctttcaagcagagga

SEQ ID NO: 26949 - RNA, 21 nt, RNAi
cagccuuucaagcagaggauu

SEQ ID NO: 26950 - RNA, 21 nt, RNAi
uugucggaaaguucgucuccu

SEQ ID NO: 26951 - DNA, 21 bp, Homo sapiens
tagtagatgcagaattcaaag

SEQ ID NO: 26952 - RNA, 21 nt, RNAi
guagaugcagaauucaaaguu

SEQ ID NO: 26953 - RNA, 21 nt, RNAi
uucaucuacgucuuaaguuuc

SEQ ID NO: 26954 - DNA, 21 bp, Homo sapiens
tagatgcagaattcaaagatg

SEQ ID NO: 26955 - RNA, 21 nt, RNAi
gaugcagaauucaaagauguu

SEQ ID NO: 26956 - RNA, 21 nt, RNAi
uucuacgucuuaaguuucuac

SEQ ID NO: 26957 - DNA, 21 bp, Homo sapiens
tagctctgatcctaacaggcc

SEQ ID NO: 26958 - RNA, 21 nt, RNAi
gcucugauccuaacaggccuu

SEQ ID NO: 26959 - RNA, 21 nt, RNAi
uucgagacuaggauuguccgg

SEQ ID NO: 26960 - DNA, 21 bp, Homo sapiens
taacaggccacgttaaactgc

SEQ ID NO: 26961 - RNA, 21 nt, RNAi
acaggccacguuaaacugcuu

SEQ ID NO: 26962 - RNA, 21 nt, RNAi
uuuguccggugcaauuugacg

SEQ ID NO: 26963 - DNA, 21 bp, Homo sapiens
tatggcagtgatgctgtgttg

SEQ ID NO: 26964 - RNA, 21 nt, RNAi
uggcagugaugcuguguuguu

SEQ ID NO: 26965 - RNA, 21 nt, RNAi
uuaccgucacuacgacacaac

SEQ ID NO: 26966 - DNA, 21 bp, Homo sapiens
taacgaattaccacaaacctg

SEQ ID NO: 26967 - RNA, 21 nt, RNAi
acgaauuaccacaaaccuguu

SEQ ID NO: 26968 - RNA, 21 nt, RNAi
uuugcuuaaugguguuuggac

SEQ ID NO: 26969 - DNA, 21 bp, Homo sapiens
taccacaaacctggtggattg

SEQ ID NO: 26970 - RNA, 21 nt, RNAi
ccacaaaccugguggauuguu

SEQ ID NO: 26971 - RNA, 21 nt, RNAi
uugguguuuggaccaccuaac

SEQ ID NO: 26972 - DNA, 21 bp, Homo sapiens
tacagttctggaggctggaaa

SEQ ID NO: 26973 - RNA, 21 nt, RNAi
caguucuggaggcuggaaauu

SEQ ID NO: 26974 - RNA, 21 nt, RNAi
uugucaagaccuccgaccuuu

SEQ ID NO: 26975 - DNA, 21 bp, Homo sapiens
tattgctgcatcactccagtc

SEQ ID NO: 26976 - RNA, 21 nt, RNAi
uugcugcaucacuccagucuu

SEQ ID NO: 26977 - RNA, 21 nt, RNAi
uuaacgacguagugaggucag

SEQ ID NO: 26978 - DNA, 21 bp, Homo sapiens
taatcctgtgtgatcttatct

SEQ ID NO: 26979 - RNA, 21 nt, RNAi
auccugugugaucuuaucuuu

SEQ ID NO: 26980 - RNA, 21 nt, RNAi
uuuaggacacacuagaauaga

SEQ ID NO: 26981 - DNA, 21 bp, Homo sapiens
taaacctgcaaatactctagt

SEQ ID NO: 26982 - RNA, 21 nt, RNAi
aaccugcaaauacucuaguuu

SEQ ID NO: 26983 - RNA, 21 nt, RNAi
uuuuggacguuuaugagauca

SEQ ID NO: 26984 - DNA, 21 bp, Homo sapiens
taaagtcacattctcaggttc

SEQ ID NO: 26985 - RNA, 21 nt, RNAi
aagucacauucucagguucuu

SEQ ID NO: 26986 - RNA, 21 nt, RNAi
uuuucaguguaagaguccaag

SEQ ID NO: 26987 - DNA, 21 bp, Homo sapiens
aaaggccttaagtacatccac

SEQ ID NO: 26988 - RNA, 21 nt, RNAi
aggccuuaaguacauccacuu

SEQ ID NO: 26989 - RNA, 21 nt, RNAi
uuuccggaauucauguaggug

SEQ ID NO: 26990 - DNA, 21 bp, Homo sapiens
aaagattacctggaccagctg

SEQ ID NO: 26991 - RNA, 21 nt, RNAi
agauuaccuggaccagcuguu

SEQ ID NO: 26992 - RNA, 21 nt, RNAi
uuucuaauggaccuggucgac

SEQ ID NO: 26993 - DNA, 21 bp, Homo sapiens
aaagcggccaaatcctacatc

SEQ ID NO: 26994 - RNA, 21 nt, RNAi
agcggccaaauccuacaucuu

SEQ ID NO: 26995 - RNA, 21 nt, RNAi
uuucgccgguuuaggauguag

SEQ ID NO: 26996 - DNA, 21 bp, Homo sapiens
catgcagcatgagaacgtcat

SEQ ID NO: 26997 - RNA, 21 nt, RNAi
ugcagcaugagaacgucauuu

SEQ ID NO: 26998 - RNA, 21 nt, RNAi
uuacgucguacucuugcagua

SEQ ID NO: 26999 - DNA, 21 bp, Homo sapiens
caaaggccttaagtacatcca

SEQ ID NO: 27000 - RNA, 21 nt, RNAi
aaggccuuaaguacauccauu

SEQ ID NO: 27001 - RNA, 21 nt, RNAi
uuuuccggaauucauguaggu

SEQ ID NO: 27002 - DNA, 21 bp, Homo sapiens
cagctggatgcactacaacca

SEQ ID NO: 27003 - RNA, 21 nt, RNAi
gcuggaugcacuacaaccauu

SEQ ID NO: 27004 - RNA, 21 nt, RNAi
uucgaccuacgugauguuggu

SEQ ID NO: 27005 - DNA, 21 bp, Homo sapiens
caaagcggccaaatcctacat

SEQ ID NO: 27006 - RNA, 21 nt, RNAi
aagcggccaaauccuacauuu

SEQ ID NO: 27007 - RNA, 21 nt, RNAi
uuuucgccgguuuaggaugua

SEQ ID NO: 27008 - DNA, 21 bp, Homo sapiens
gatgctcaaaggccttaagta

SEQ ID NO: 27009 - RNA, 21 nt, RNAi
ugcucaaaggccuuaaguauu

SEQ ID NO: 27010 - RNA, 21 nt, RNAi
uuacgaguuuccggaauucau

SEQ ID NO: 27011 - DNA, 21 bp, Homo sapiens
gacagtggacatctggtctgt

SEQ ID NO: 27012 - RNA, 21 nt, RNAi
caguggacaucuggucuguuu

SEQ ID NO: 27013 - RNA, 21 nt, RNAi
uugucaccuguagaccagaca

SEQ ID NO: 27014 - DNA, 21 bp, Homo sapiens
gaaagattacctggaccagct

SEQ ID NO: 27015 - RNA, 21 nt, RNAi
aagauuaccuggaccagcuuu

SEQ ID NO: 27016 - RNA, 21 nt, RNAi
uuuucuaauggaccuggucga

SEQ ID NO: 27017 - DNA, 21 bp, Homo sapiens
gaacgacaaagcggccaaatc

SEQ ID NO: 27018 - RNA, 21 nt, RNAi
acgacaaagcggccaaaucuu

SEQ ID NO: 27019 - RNA, 21 nt, RNAi
uuugcuguuucgccgguuuag

SEQ ID NO: 27020 - DNA, 21 bp, Homo sapiens
gacaaagcggccaaatcctac

SEQ ID NO: 27021 - RNA, 21 nt, RNAi
caaagcggccaaauccuacuu

SEQ ID NO: 27022 - RNA, 21 nt, RNAi
uuguuucgccgguuuaggaug

SEQ ID NO: 27023 - DNA, 21 bp, Homo sapiens
gattccttagaacacgagaaa

SEQ ID NO: 27024 - RNA, 21 nt, RNAi
uuccuuagaacacgagaaauu

SEQ ID NO: 27025 - RNA, 21 nt, RNAi
uuaaggaaucuugugcucuuu

SEQ ID NO: 27026 - DNA, 21 bp, Homo sapiens
gaaactcacagtggatgaatg

SEQ ID NO: 27027 - RNA, 21 nt, RNAi
aacucacaguggaugaauguu

SEQ ID NO: 27028 - RNA, 21 nt, RNAi
uuuugagugucaccuacuuac

SEQ ID NO: 27029 - DNA, 21 bp, Homo sapiens
aagtgttgtacaccattggca

SEQ ID NO: 27030 - RNA, 21 nt, RNAi
guguuguacaccauuggcauu

SEQ ID NO: 27031 - RNA, 21 nt, RNAi
uucacaacaugugguaaccgu

SEQ ID NO: 27032 - DNA, 21 bp, Homo sapiens
aagatccggaggaagagtgat

SEQ ID NO: 27033 - RNA, 21 nt, RNAi
gauccggaggaagagugauuu

SEQ ID NO: 27034 - RNA, 21 nt, RNAi
uucuaggccuccuucucacua

SEQ ID NO: 27035 - DNA, 21 bp, Homo sapiens
aagagtgatggcaagatatta

SEQ ID NO: 27036 - RNA, 21 nt, RNAi
gagugauggcaagauauuauu

SEQ ID NO: 27037 - RNA, 21 nt, RNAi
uucucacuaccguucuauaau

SEQ ID NO: 27038 - DNA, 21 bp, Homo sapiens
aaagaacttgactatggctcc

SEQ ID NO: 27039 - RNA, 21 nt, RNAi
agaacuugacuauggcuccuu

SEQ ID NO: 27040 - RNA, 21 nt, RNAi
uuucuugaacugauaccgagg

SEQ ID NO: 27041 - DNA, 21 bp, Homo sapiens
aagaacttgactatggctcca

SEQ ID NO: 27042 - RNA, 21 nt, RNAi
gaacuugacuauggcuccauu

SEQ ID NO: 27043 - RNA, 21 nt, RNAi
uucuugaacugauaccgaggu

SEQ ID NO: 27044 - DNA, 21 bp, Homo sapiens
aacttgactatggctccatga

SEQ ID NO: 27045 - RNA, 21 nt, RNAi
cuugacuauggcuccaugauu

SEQ ID NO: 27046 - RNA, 21 nt, RNAi
uugaacugauaccgagguacu

SEQ ID NO: 27047 - DNA, 21 bp, Homo sapiens
aagctgagaaacagatgcttg

SEQ ID NO: 27048 - RNA, 21 nt, RNAi
gcugagaaacagaugcuuguu

SEQ ID NO: 27049 - RNA, 21 nt, RNAi
uucgacucuuugucuacgaac

SEQ ID NO: 27050 - DNA, 21 bp, Homo sapiens
aaacagatgcttgtttctgaa

SEQ ID NO: 27051 - RNA, 21 nt, RNAi
acagaugcuuguuucugaauu

SEQ ID NO: 27052 - RNA, 21 nt, RNAi
uuugucuacgaacaaagacuu

SEQ ID NO: 27053 - DNA, 21 bp, Homo sapiens
aacagatgcttgtttctgaag

SEQ ID NO: 27054 - RNA, 21 nt, RNAi
cagaugcuuguuucugaaguu

SEQ ID NO: 27055 - RNA, 21 nt, RNAi
uugucuacgaacaaagacuuc

SEQ ID NO: 27056 - DNA, 21 bp, Homo sapiens
aagtgaatttgcttcgtgaac

SEQ ID NO: 27057 - RNA, 21 nt, RNAi
gugaauuugcuucgugaacuu

SEQ ID NO: 27058 - RNA, 21 nt, RNAi
uucacuuaaacgaagcacuug

SEQ ID NO: 27059 - DNA, 21 bp, Homo sapiens
aatttgcttcgtgaactgaaa

SEQ ID NO: 27060 - RNA, 21 nt, RNAi
uuugcuucgugaacugaaauu

SEQ ID NO: 27061 - RNA, 21 nt, RNAi
uuaaacgaagcacuugacuuu

SEQ ID NO: 27062 - DNA, 21 bp, Homo sapiens
aactgaaacatccaaacatcg

SEQ ID NO: 27063 - RNA, 21 nt, RNAi
cugaaacauccaaacaucguu

SEQ ID NO: 27064 - RNA, 21 nt, RNAi
uugacuuuguagguuuguagc

SEQ ID NO: 27065 - DNA, 21 bp, Homo sapiens
aaacatccaaacatcgttcgt

SEQ ID NO: 27066 - RNA, 21 nt, RNAi
acauccaaacaucguucguuu

SEQ ID NO: 27067 - RNA, 21 nt, RNAi
uuuguagguuuguagcaagca

SEQ ID NO: 27068 - DNA, 21 bp, Homo sapiens
aacatccaaacatcgttcgtt

SEQ ID NO: 27069 - RNA, 21 nt, RNAi
cauccaaacaucguucguuuu

SEQ ID NO: 27070 - RNA, 21 nt, RNAi
uuguagguuuguagcaagcaa

SEQ ID NO: 27071 - DNA, 21 bp, Homo sapiens
aaacatcgttcgttactatga

SEQ ID NO: 27072 - RNA, 21 nt, RNAi
acaucguucguuacuaugauu

SEQ ID NO: 27073 - RNA, 21 nt, RNAi
uuuguagcaagcaaugauacu

SEQ ID NO: 27074 - DNA, 21 bp, Homo sapiens
aacatcgttcgttactatgat

SEQ ID NO: 27075 - RNA, 21 nt, RNAi
caucguucguuacuaugauuu

SEQ ID NO: 27076 - RNA, 21 nt, RNAi
uuguagcaagcaaugauacua

SEQ ID NO: 27077 - DNA, 21 bp, Homo sapiens
aacactgtacattgtaatgga

SEQ ID NO: 27078 - RNA, 21 nt, RNAi
cacuguacauuguaauggauu

SEQ ID NO: 27079 - RNA, 21 nt, RNAi
uugugacauguaacauuaccu

SEQ ID NO: 27080 - DNA, 21 bp, Homo sapiens
aatggaatattgtgaaggagg

SEQ ID NO: 27081 - RNA, 21 nt, RNAi
uggaauauugugaaggagguu

SEQ ID NO: 27082 - RNA, 21 nt, RNAi
uuaccuuauaacacuuccucc

SEQ ID NO: 27083 - DNA, 21 bp, Homo sapiens
aaccaaggaaaggcaatactt

SEQ ID NO: 27084 - RNA, 21 nt, RNAi
ccaaggaaaggcaauacuuuu

SEQ ID NO: 27085 - RNA, 21 nt, RNAi
uugguuccuuuccguuaugaa

SEQ ID NO: 27086 - DNA, 21 bp, Homo sapiens
aaggaaaggcaatacttagat

SEQ ID NO: 27087 - RNA, 21 nt, RNAi
ggaaaggcaauacuuagauuu

SEQ ID NO: 27088 - RNA, 21 nt, RNAi
uuccuuuccguuaugaaucua

SEQ ID NO: 27089 - DNA, 21 bp, Homo sapiens
aaaggcaatacttagatgaag

SEQ ID NO: 27090 - RNA, 21 nt, RNAi
aggcaauacuuagaugaaguu

SEQ ID NO: 27091 - RNA, 21 nt, RNAi
uuuccguuaugaaucuacuuc

SEQ ID NO: 27092 - DNA, 21 bp, Homo sapiens
aaggcaatacttagatgaaga

SEQ ID NO: 27093 - RNA, 21 nt, RNAi
ggcaauacuuagaugaagauu

SEQ ID NO: 27094 - RNA, 21 nt, RNAi
uuccguuaugaaucuacuucu

SEQ ID NO: 27095 - DNA, 21 bp, Homo sapiens
aagagtttgttcttcgagtga

SEQ ID NO: 27096 - RNA, 21 nt, RNAi
gaguuuguucuucgagugauu

SEQ ID NO: 27097 - RNA, 21 nt, RNAi
uucucaaacaagaagcucacu

SEQ ID NO: 27098 - DNA, 21 bp, Homo sapiens
aaggaatgccacagacgaagt

SEQ ID NO: 27099 - RNA, 21 nt, RNAi
ggaaugccacagacgaaguuu

SEQ ID NO: 27100 - RNA, 21 nt, RNAi
uuccuuacggugucugcuuca

SEQ ID NO: 27101 - DNA, 21 bp, Homo sapiens
aatgccacagacgaagtgatg

SEQ ID NO: 27102 - RNA, 21 nt, RNAi
ugccacagacgaagugauguu

SEQ ID NO: 27103 - RNA, 21 nt, RNAi
uuacggugucugcuucacuac

SEQ ID NO: 27104 - DNA, 21 bp, Homo sapiens
aagtgatggtggtcataccgt

SEQ ID NO: 27105 - RNA, 21 nt, RNAi
gugaugguggucauaccguuu

SEQ ID NO: 27106 - RNA, 21 nt, RNAi
uucacuaccaccaguauggca

SEQ ID NO: 27107 - DNA, 21 bp, Homo sapiens
aaacgtcaagcttggagactt

SEQ ID NO: 27108 - RNA, 21 nt, RNAi
acgucaagcuuggagacuuuu

SEQ ID NO: 27109 - RNA, 21 nt, RNAi
uuugcaguucgaaccucugaa

SEQ ID NO: 27110 - DNA, 21 bp, Homo sapiens
aacgtcaagcttggagacttt

SEQ ID NO: 27111 - RNA, 21 nt, RNAi
cgucaagcuuggagacuuuuu

SEQ ID NO: 27112 - RNA, 21 nt, RNAi
uugcaguucgaaccucugaaa

SEQ ID NO: 27113 - DNA, 21 bp, Homo sapiens
aatattaaaccatgacacgag

SEQ ID NO: 27114 - RNA, 21 nt, RNAi
uauuaaaccaugacacgaguu

SEQ ID NO: 27115 - RNA, 21 nt, RNAi
uuauaauuugguacugugcuc

SEQ ID NO: 27116 - DNA, 21 bp, Homo sapiens
aaacatttgttggcacacctt

SEQ ID NO: 27117 - RNA, 21 nt, RNAi
acauuuguuggcacaccuuuu

SEQ ID NO: 27118 - RNA, 21 nt, RNAi
uuuguaaacaaccguguggaa

SEQ ID NO: 27119 - DNA, 21 bp, Homo sapiens
aacatttgttggcacacctta

SEQ ID NO: 27120 - RNA, 21 nt, RNAi
cauuuguuggcacaccuuauu

SEQ ID NO: 27121 - RNA, 21 nt, RNAi
uuguaaacaaccguguggaau

SEQ ID NO: 27122 - DNA, 21 bp, Homo sapiens
aacaaatgaatcgcatgtcct

SEQ ID NO: 27123 - RNA, 21 nt, RNAi
caaaugaaucgcauguccuuu

SEQ ID NO: 27124 - RNA, 21 nt, RNAi
uuguuuacuuagcguacagga

SEQ ID NO: 27125 - DNA, 21 bp, Homo sapiens
aaatgaatcgcatgtcctaca

SEQ ID NO: 27126 - RNA, 21 nt, RNAi
augaaucgcauguccuacauu

SEQ ID NO: 27127 - RNA, 21 nt, RNAi
uuuacuuagcguacaggaugu

SEQ ID NO: 27128 - DNA, 21 bp, Homo sapiens
aatgaatcgcatgtcctacaa

SEQ ID NO: 27129 - RNA, 21 nt, RNAi
ugaaucgcauguccuacaauu

SEQ ID NO: 27130 - RNA, 21 nt, RNAi
uuacuuagcguacaggauguu

SEQ ID NO: 27131 - DNA, 21 bp, Homo sapiens
aatcgcatgtcctacaatgag

SEQ ID NO: 27132 - RNA, 21 nt, RNAi
ucgcauguccuacaaugaguu

SEQ ID NO: 27133 - RNA, 21 nt, RNAi
uuagcguacaggauguuacuc

SEQ ID NO: 27134 - DNA, 21 bp, Homo sapiens
aatgagaaatcagatatctgg

SEQ ID NO: 27135 - RNA, 21 nt, RNAi
ugagaaaucagauaucugguu

SEQ ID NO: 27136 - RNA, 21 nt, RNAi
uuacucuuuagucuauagacc

SEQ ID NO: 27137 - DNA, 21 bp, Homo sapiens
aaatcagatatctggtcattg

SEQ ID NO: 27138 - RNA, 21 nt, RNAi
aucagauaucuggucauuguu

SEQ ID NO: 27139 - RNA, 21 nt, RNAi
uuuagucuauagaccaguaac

SEQ ID NO: 27140 - DNA, 21 bp, Homo sapiens
aatcagatatctggtcattgg

SEQ ID NO: 27141 - RNA, 21 nt, RNAi
ucagauaucuggucauugguu

SEQ ID NO: 27142 - RNA, 21 nt, RNAi
uuagucuauagaccaguaacc

SEQ ID NO: 27143 - DNA, 21 bp, Homo sapiens
aatgcctccatttacagcttt

SEQ ID NO: 27144 - RNA, 21 nt, RNAi
ugccuccauuuacagcuuuuu

SEQ ID NO: 27145 - RNA, 21 nt, RNAi
uuacggagguaaaugucgaaa

SEQ ID NO: 27146 - DNA, 21 bp, Homo sapiens
aaatcagagaaggcaaattca

SEQ ID NO: 27147 - RNA, 21 nt, RNAi
aucagagaaggcaaauucauu

SEQ ID NO: 27148 - RNA, 21 nt, RNAi
uuuagucucuuccguuuaagu

SEQ ID NO: 27149 - DNA, 21 bp, Homo sapiens
aatcagagaaggcaaattcag

SEQ ID NO: 27150 - RNA, 21 nt, RNAi
ucagagaaggcaaauucaguu

SEQ ID NO: 27151 - RNA, 21 nt, RNAi
uuagucucuuccguuuaaguc

SEQ ID NO: 27152 - DNA, 21 bp, Homo sapiens
aaggcaaattcaggcgaattc

SEQ ID NO: 27153 - RNA, 21 nt, RNAi
ggcaaauucaggcgaauucuu

SEQ ID NO: 27154 - RNA, 21 nt, RNAi
uuccguuuaaguccgcuuaag

SEQ ID NO: 27155 - DNA, 21 bp, Homo sapiens
aaattcaggcgaattccatac

SEQ ID NO: 27156 - RNA, 21 nt, RNAi
auucaggcgaauuccauacuu

SEQ ID NO: 27157 - RNA, 21 nt, RNAi
uuuaaguccgcuuaagguaug

SEQ ID NO: 27158 - DNA, 21 bp, Homo sapiens
aattcaggcgaattccatacc

SEQ ID NO: 27159 - RNA, 21 nt, RNAi
uucaggcgaauuccauaccuu

SEQ ID NO: 27160 - RNA, 21 nt, RNAi
uuaaguccgcuuaagguaugg

SEQ ID NO: 27161 - DNA, 21 bp, Homo sapiens
aattccataccgttactctga

SEQ ID NO: 27162 - RNA, 21 nt, RNAi
uuccauaccguuacucugauu

SEQ ID NO: 27163 - RNA, 21 nt, RNAi
uuaagguauggcaaugagacu

SEQ ID NO: 27164 - DNA, 21 bp, Homo sapiens
aaacttaaaggattaccatcg

SEQ ID NO: 27165 - RNA, 21 nt, RNAi
acuuaaaggauuaccaucguu

SEQ ID NO: 27166 - RNA, 21 nt, RNAi
uuugaauuuccuaaugguagc

SEQ ID NO: 27167 - DNA, 21 bp, Homo sapiens
aacttaaaggattaccatcga

SEQ ID NO: 27168 - RNA, 21 nt, RNAi
cuuaaaggauuaccaucgauu

SEQ ID NO: 27169 - RNA, 21 nt, RNAi
uugaauuuccuaaugguagcu

SEQ ID NO: 27170 - DNA, 21 bp, Homo sapiens
aaaggattaccatcgaccttc

SEQ ID NO: 27171 - RNA, 21 nt, RNAi
aggauuaccaucgaccuucuu

SEQ ID NO: 27172 - RNA, 21 nt, RNAi
uuuccuaaugguagcuggaag

SEQ ID NO: 27173 - DNA, 21 bp, Homo sapiens
aaggattaccatcgaccttct

SEQ ID NO: 27174 - RNA, 21 nt, RNAi
ggauuaccaucgaccuucuuu

SEQ ID NO: 27175 - RNA, 21 nt, RNAi
uuccuaaugguagcuggaaga

SEQ ID NO: 27176 - DNA, 21 bp, Homo sapiens
aatagcagatttggttgcaga

SEQ ID NO: 27177 - RNA, 21 nt, RNAi
uagcagauuugguugcagauu

SEQ ID NO: 27178 - RNA, 21 nt, RNAi
uuaucgucuaaaccaacgucu

SEQ ID NO: 27179 - DNA, 21 bp, Homo sapiens
aagaagaaatcttgagagaag

SEQ ID NO: 27180 - RNA, 21 nt, RNAi
gaagaaaucuugagagaaguu

SEQ ID NO: 27181 - RNA, 21 nt, RNAi
uucuucuuuagaacucucuuc

SEQ ID NO: 27182 - DNA, 21 bp, Homo sapiens
aagaaatcttgagagaagagg

SEQ ID NO: 27183 - RNA, 21 nt, RNAi
gaaaucuugagagaagagguu

SEQ ID NO: 27184 - RNA, 21 nt, RNAi
uucuuuagaacucucuucucc

SEQ ID NO: 27185 - DNA, 21 bp, Homo sapiens
aactgaaggaaattcagttac

SEQ ID NO: 27186 - RNA, 21 nt, RNAi
cugaaggaaauucaguuacuu

SEQ ID NO: 27187 - RNA, 21 nt, RNAi
uugacuuccuuuaagucaaug

SEQ ID NO: 27188 - DNA, 21 bp, Homo sapiens
aaggaaattcagttacaggag

SEQ ID NO: 27189 - RNA, 21 nt, RNAi
ggaaauucaguuacaggaguu

SEQ ID NO: 27190 - RNA, 21 nt, RNAi
uuccuuuaagucaauguccuc

SEQ ID NO: 27191 - DNA, 21 bp, Homo sapiens
aaattcagttacaggagcgag

SEQ ID NO: 27192 - RNA, 21 nt, RNAi
auucaguuacaggagcgaguu

SEQ ID NO: 27193 - RNA, 21 nt, RNAi
uuuaagucaauguccucgcuc

SEQ ID NO: 27194 - DNA, 21 bp, Homo sapiens
aattcagttacaggagcgaga

SEQ ID NO: 27195 - RNA, 21 nt, RNAi
uucaguuacaggagcgagauu

SEQ ID NO: 27196 - RNA, 21 nt, RNAi
uuaagucaauguccucgcucu

SEQ ID NO: 27197 - DNA, 21 bp, Homo sapiens
aaagcaagagaagaaagattg

SEQ ID NO: 27198 - RNA, 21 nt, RNAi
agcaagagaagaaagauuguu

SEQ ID NO: 27199 - RNA, 21 nt, RNAi
uuucguucucuucuuucuaac

SEQ ID NO: 27200 - DNA, 21 bp, Homo sapiens
aagcaagagaagaaagattgg

SEQ ID NO: 27201 - RNA, 21 nt, RNAi
gcaagagaagaaagauugguu

SEQ ID NO: 27202 - RNA, 21 nt, RNAi
uucguucucuucuuucuaacc

SEQ ID NO: 27203 - DNA, 21 bp, Homo sapiens
aagagaagaaagattggagca

SEQ ID NO: 27204 - RNA, 21 nt, RNAi
gagaagaaagauuggagcauu

SEQ ID NO: 27205 - RNA, 21 nt, RNAi
uucucuucuuucuaaccucgu

SEQ ID NO: 27206 - DNA, 21 bp, Homo sapiens
aagaaagattggagcagaaag

SEQ ID NO: 27207 - RNA, 21 nt, RNAi
gaaagauuggagcagaaaguu

SEQ ID NO: 27208 - RNA, 21 nt, RNAi
uucuuucuaaccucgucuuuc

SEQ ID NO: 27209 - DNA, 21 bp, Homo sapiens
aaagattggagcagaaagaac

SEQ ID NO: 27210 - RNA, 21 nt, RNAi
agauuggagcagaaagaacuu

SEQ ID NO: 27211 - RNA, 21 nt, RNAi
uuucuaaccucgucuuucuug

SEQ ID NO: 27212 - DNA, 21 bp, Homo sapiens
aagattggagcagaaagaaca

SEQ ID NO: 27213 - RNA, 21 nt, RNAi
gauuggagcagaaagaacauu

SEQ ID NO: 27214 - RNA, 21 nt, RNAi
uucuaaccucgucuuucuugu

SEQ ID NO: 27215 - DNA, 21 bp, Homo sapiens
aaagaacaggagctttgtgtt

SEQ ID NO: 27216 - RNA, 21 nt, RNAi
agaacaggagcuuuguguuuu

SEQ ID NO: 27217 - RNA, 21 nt, RNAi
uuucuuguccucgaaacacaa

SEQ ID NO: 27218 - DNA, 21 bp, Homo sapiens
aagaacaggagctttgtgttc

SEQ ID NO: 27219 - RNA, 21 nt, RNAi
gaacaggagcuuuguguucuu

SEQ ID NO: 27220 - RNA, 21 nt, RNAi
uucuuguccucgaaacacaag

SEQ ID NO: 27221 - DNA, 21 bp, Homo sapiens
aacaggagctttgtgttcgtg

SEQ ID NO: 27222 - RNA, 21 nt, RNAi
caggagcuuuguguucguguu

SEQ ID NO: 27223 - RNA, 21 nt, RNAi
uuguccucgaaacacaagcac

SEQ ID NO: 27224 - DNA, 21 bp, Homo sapiens
aaatctgttgaagaactacag

SEQ ID NO: 27225 - RNA, 21 nt, RNAi
aucuguugaagaacuacaguu

SEQ ID NO: 27226 - RNA, 21 nt, RNAi
uuuagacaacuucuugauguc

SEQ ID NO: 27227 - DNA, 21 bp, Homo sapiens
aatctgttgaagaactacagc

SEQ ID NO: 27228 - RNA, 21 nt, RNAi
ucuguugaagaacuacagcuu

SEQ ID NO: 27229 - RNA, 21 nt, RNAi
uuagacaacuucuugaugucg

SEQ ID NO: 27230 - DNA, 21 bp, Homo sapiens
aagaactacagcttgctaaag

SEQ ID NO: 27231 - RNA, 21 nt, RNAi
gaacuacagcuugcuaaaguu

SEQ ID NO: 27232 - RNA, 21 nt, RNAi
uucuugaugucgaacgauuuc

SEQ ID NO: 27233 - DNA, 21 bp, Homo sapiens
aactacagcttgctaaaggaa

SEQ ID NO: 27234 - RNA, 21 nt, RNAi
cuacagcuugcuaaaggaauu

SEQ ID NO: 27235 - RNA, 21 nt, RNAi
uugaugucgaacgauuuccuu

SEQ ID NO: 27236 - DNA, 21 bp, Homo sapiens
aaaggaacggaagttcctgtc

SEQ ID NO: 27237 - RNA, 21 nt, RNAi
aggaacggaaguuccugucuu

SEQ ID NO: 27238 - RNA, 21 nt, RNAi
uuuccuugccuucaaggacag

SEQ ID NO: 27239 - DNA, 21 bp, Homo sapiens
aaggaacggaagttcctgtct

SEQ ID NO: 27240 - RNA, 21 nt, RNAi
ggaacggaaguuccugucuuu

SEQ ID NO: 27241 - RNA, 21 nt, RNAi
uuccuugccuucaaggacaga

SEQ ID NO: 27242 - DNA, 21 bp, Homo sapiens
aacggaagttcctgtctctgg

SEQ ID NO: 27243 - RNA, 21 nt, RNAi
cggaaguuccugucucugguu

SEQ ID NO: 27244 - RNA, 21 nt, RNAi
uugccuucaaggacagagacc

SEQ ID NO: 27245 - DNA, 21 bp, Homo sapiens
aagttcctgtctctggcaagt

SEQ ID NO: 27246 - RNA, 21 nt, RNAi
guuccugucucuggcaaguuu

SEQ ID NO: 27247 - RNA, 21 nt, RNAi
uucaaggacagagaccguuca

SEQ ID NO: 27248 - DNA, 21 bp, Homo sapiens
aacttcttaatcttccatcct

SEQ ID NO: 27249 - RNA, 21 nt, RNAi
cuucuuaaucuuccauccuuu

SEQ ID NO: 27250 - RNA, 21 nt, RNAi
uugaagaauuagaagguagga

SEQ ID NO: 27251 - DNA, 21 bp, Homo sapiens
aatcttccatcctcagtaatt

SEQ ID NO: 27252 - RNA, 21 nt, RNAi
ucuuccauccucaguaauuuu

SEQ ID NO: 27253 - RNA, 21 nt, RNAi
uuagaagguaggagucauuaa

SEQ ID NO: 27254 - DNA, 21 bp, Homo sapiens
aagtaaagagaacatcatgag

SEQ ID NO: 27255 - RNA, 21 nt, RNAi
guaaagagaacaucaugaguu

SEQ ID NO: 27256 - RNA, 21 nt, RNAi
uucauuucucuuguaguacuc

SEQ ID NO: 27257 - DNA, 21 bp, Homo sapiens
aaagagaacatcatgaggagt

SEQ ID NO: 27258 - RNA, 21 nt, RNAi
agagaacaucaugaggaguuu

SEQ ID NO: 27259 - RNA, 21 nt, RNAi
uuucucuuguaguacuccuca

SEQ ID NO: 27260 - DNA, 21 bp, Homo sapiens
aagagaacatcatgaggagtg

SEQ ID NO: 27261 - RNA, 21 nt, RNAi
gagaacaucaugaggaguguu

SEQ ID NO: 27262 - RNA, 21 nt, RNAi
uucucuuguaguacuccucac

SEQ ID NO: 27263 - DNA, 21 bp, Homo sapiens
aacatcatgaggagtgagaat

SEQ ID NO: 27264 - RNA, 21 nt, RNAi
caucaugaggagugagaauuu

SEQ ID NO: 27265 - RNA, 21 nt, RNAi
uuguaguacuccucacucuua

SEQ ID NO: 27266 - DNA, 21 bp, Homo sapiens
aattctgagagtcagctcaca

SEQ ID NO: 27267 - RNA, 21 nt, RNAi
uucugagagucagcucacauu

SEQ ID NO: 27268 - RNA, 21 nt, RNAi
uuaagacucucagucgagugu

SEQ ID NO: 27269 - DNA, 21 bp, Homo sapiens
aagtccaagtgcaaggacctg

SEQ ID NO: 27270 - RNA, 21 nt, RNAi
guccaagugcaaggaccuguu

SEQ ID NO: 27271 - RNA, 21 nt, RNAi
uucagguucacguuccuggac

SEQ ID NO: 27272 - DNA, 21 bp, Homo sapiens
aagtgcaaggacctgaagaaa

SEQ ID NO: 27273 - RNA, 21 nt, RNAi
gugcaaggaccugaagaaauu

SEQ ID NO: 27274 - RNA, 21 nt, RNAi
uucacguuccuggacuucuuu

SEQ ID NO: 27275 - DNA, 21 bp, Homo sapiens
aagactgatattcaaatgctg

SEQ ID NO: 27276 - RNA, 21 nt, RNAi
gacugauauucaaaugcuguu

SEQ ID NO: 27277 - RNA, 21 nt, RNAi
uucugacuauaaguuuacgac

SEQ ID NO: 27278 - DNA, 21 bp, Homo sapiens
aaatgctgtagtgttgaatac

SEQ ID NO: 27279 - RNA, 21 nt, RNAi
augcuguaguguugaauacuu

SEQ ID NO: 27280 - RNA, 21 nt, RNAi
uuuacgacaucacaacuuaug

SEQ ID NO: 27281 - DNA, 21 bp, Homo sapiens
aatgctgtagtgttgaatact

SEQ ID NO: 27282 - RNA, 21 nt, RNAi
ugcuguaguguugaauacuuu

SEQ ID NO: 27283 - RNA, 21 nt, RNAi
uuacgacaucacaacuuauga

SEQ ID NO: 27284 - DNA, 21 bp, Homo sapiens
aaagaatactttcttggttgg

SEQ ID NO: 27285 - RNA, 21 nt, RNAi
agaauacuuucuugguugguu

SEQ ID NO: 27286 - RNA, 21 nt, RNAi
uuucuuaugaaagaaccaacc

SEQ ID NO: 27287 - DNA, 21 bp, Homo sapiens
aatcctgtgtgtgattactag

SEQ ID NO: 27288 - RNA, 21 nt, RNAi
uccugugugugauuacuaguu

SEQ ID NO: 27289 - RNA, 21 nt, RNAi
uuaggacacacacuaaugauc

SEQ ID NO: 27290 - DNA, 21 bp, Homo sapiens
aacatgagatgtgacattcta

SEQ ID NO: 27291 - RNA, 21 nt, RNAi
caugagaugugacauucuauu

SEQ ID NO: 27292 - RNA, 21 nt, RNAi
uuguacucuacacuguaagau

SEQ ID NO: 27293 - DNA, 21 bp, Homo sapiens
aagagtagcactcactgaata

SEQ ID NO: 27294 - RNA, 21 nt, RNAi
gaguagcacucacugaauauu

SEQ ID NO: 27295 - RNA, 21 nt, RNAi
uucucaucgugagugacuuau

SEQ ID NO: 27296 - DNA, 21 bp, Homo sapiens
aaatgactgagtggtatgctt

SEQ ID NO: 27297 - RNA, 21 nt, RNAi
augacugagugguaugcuuuu

SEQ ID NO: 27298 - RNA, 21 nt, RNAi
uuuacugacucaccauacgaa

SEQ ID NO: 27299 - DNA, 21 bp, Homo sapiens
aatgactgagtggtatgctta

SEQ ID NO: 27300 - RNA, 21 nt, RNAi
ugacugagugguaugcuuauu

SEQ ID NO: 27301 - RNA, 21 nt, RNAi
uuacugacucaccauacgaau

SEQ ID NO: 27302 - DNA, 21 bp, Homo sapiens
aataccatgacatcttgctta

SEQ ID NO: 27303 - RNA, 21 nt, RNAi
uaccaugacaucuugcuuauu

SEQ ID NO: 27304 - RNA, 21 nt, RNAi
uuaugguacuguagaacgaau

SEQ ID NO: 27305 - DNA, 21 bp, Homo sapiens
aaatattccattgctctgtag

SEQ ID NO: 27306 - RNA, 21 nt, RNAi
auauuccauugcucuguaguu

SEQ ID NO: 27307 - RNA, 21 nt, RNAi
uuuauaagguaacgagacauc

SEQ ID NO: 27308 - DNA, 21 bp, Homo sapiens
aatattccattgctctgtagt

SEQ ID NO: 27309 - RNA, 21 nt, RNAi
uauuccauugcucuguaguuu

SEQ ID NO: 27310 - RNA, 21 nt, RNAi
uuauaagguaacgagacauca

SEQ ID NO: 27311 - DNA, 21 bp, Homo sapiens
aattcatcactgtgatgtttg

SEQ ID NO: 27312 - RNA, 21 nt, RNAi
uucaucacugugauguuuguu

SEQ ID NO: 27313 - RNA, 21 nt, RNAi
uuaaguagugacacuacaaac

SEQ ID NO: 27314 - DNA, 21 bp, Homo sapiens
aacagaatatgagctgtctgt

SEQ ID NO: 27315 - RNA, 21 nt, RNAi
cagaauaugagcugucuguuu

SEQ ID NO: 27316 - RNA, 21 nt, RNAi
uugucuuauacucgacagaca

SEQ ID NO: 27317 - DNA, 21 bp, Homo sapiens
aatatgagctgtctgtcattt

SEQ ID NO: 27318 - RNA, 21 nt, RNAi
uaugagcugucugucauuuuu

SEQ ID NO: 27319 - RNA, 21 nt, RNAi
uuauacucgacagacaguaaa

SEQ ID NO: 27320 - DNA, 21 bp, Homo sapiens
caccattggcacaggctccta

SEQ ID NO: 27321 - RNA, 21 nt, RNAi
ccauuggcacaggcuccuauu

SEQ ID NO: 27322 - RNA, 21 nt, RNAi
uugguaaccguguccgaggau

SEQ ID NO: 27323 - DNA, 21 bp, Homo sapiens
cattggcacaggctcctacgg

SEQ ID NO: 27324 - RNA, 21 nt, RNAi
uuggcacaggcuccuacgguu

SEQ ID NO: 27325 - RNA, 21 nt, RNAi
uuaaccguguccgaggaugcc

SEQ ID NO: 27326 - DNA, 21 bp, Homo sapiens
cagaagatccggaggaagagt

SEQ ID NO: 27327 - RNA, 21 nt, RNAi
gaagauccggaggaagaguuu

SEQ ID NO: 27328 - RNA, 21 nt, RNAi
uucuucuaggccuccuucuca

SEQ ID NO: 27329 - DNA, 21 bp, Homo sapiens
catgacagaagctgagaaaca

SEQ ID NO: 27330 - RNA, 21 nt, RNAi
ugacagaagcugagaaacauu

SEQ ID NO: 27331 - RNA, 21 nt, RNAi
uuacugucuucgacucuuugu

SEQ ID NO: 27332 - DNA, 21 bp, Homo sapiens
cagaagctgagaaacagatgc

SEQ ID NO: 27333 - RNA, 21 nt, RNAi
gaagcugagaaacagaugcuu

SEQ ID NO: 27334 - RNA, 21 nt, RNAi
uucuucgacucuuugucuacg

SEQ ID NO: 27335 - DNA, 21 bp, Homo sapiens
cagatgcttgtttctgaagtg

SEQ ID NO: 27336 - RNA, 21 nt, RNAi
gaugcuuguuucugaaguguu

SEQ ID NO: 27337 - RNA, 21 nt, RNAi
uucuacgaacaaagacuucac

SEQ ID NO: 27338 - DNA, 21 bp, Homo sapiens
catccaaacatcgttcgttac

SEQ ID NO: 27339 - RNA, 21 nt, RNAi
uccaaacaucguucguuacuu

SEQ ID NO: 27340 - RNA, 21 nt, RNAi
uuagguuuguagcaagcaaug

SEQ ID NO: 27341 - DNA, 21 bp, Homo sapiens
caaacatcgttcgttactatg

SEQ ID NO: 27342 - RNA, 21 nt, RNAi
aacaucguucguuacuauguu

SEQ ID NO: 27343 - RNA, 21 nt, RNAi
uuuuguagcaagcaaugauac

SEQ ID NO: 27344 - DNA, 21 bp, Homo sapiens
catcgttcgttactatgatcg

SEQ ID NO: 27345 - RNA, 21 nt, RNAi
ucguucguuacuaugaucguu

SEQ ID NO: 27346 - RNA, 21 nt, RNAi
uuagcaagcaaugauacuagc

SEQ ID NO: 27347 - DNA, 21 bp, Homo sapiens
caatacaacactgtacattgt

SEQ ID NO: 27348 - RNA, 21 nt, RNAi
auacaacacuguacauuguuu

SEQ ID NO: 27349 - RNA, 21 nt, RNAi
uuuauguugugacauguaaca

SEQ ID NO: 27350 - DNA, 21 bp, Homo sapiens
caacactgtacattgtaatgg

SEQ ID NO: 27351 - RNA, 21 nt, RNAi
acacuguacauuguaaugguu

SEQ ID NO: 27352 - RNA, 21 nt, RNAi
uuugugacauguaacauuacc

SEQ ID NO: 27353 - DNA, 21 bp, Homo sapiens
cactgtacattgtaatggaat

SEQ ID NO: 27354 - RNA, 21 nt, RNAi
cuguacauuguaauggaauuu

SEQ ID NO: 27355 - RNA, 21 nt, RNAi
uugacauguaacauuaccuua

SEQ ID NO: 27356 - DNA, 21 bp, Homo sapiens
caaggaaaggcaatacttaga

SEQ ID NO: 27357 - RNA, 21 nt, RNAi
aggaaaggcaauacuuagauu

SEQ ID NO: 27358 - RNA, 21 nt, RNAi
uuuccuuuccguuaugaaucu

SEQ ID NO: 27359 - DNA, 21 bp, Homo sapiens
cacagacgaagtgatggtggt

SEQ ID NO: 27360 - RNA, 21 nt, RNAi
cagacgaagugauggugguuu

SEQ ID NO: 27361 - RNA, 21 nt, RNAi
uugucugcuucacuaccacca

SEQ ID NO: 27362 - DNA, 21 bp, Homo sapiens
cagacgaagtgatggtggtca

SEQ ID NO: 27363 - RNA, 21 nt, RNAi
gacgaagugaugguggucauu

SEQ ID NO: 27364 - RNA, 21 nt, RNAi
uucugcuucacuaccaccagu

SEQ ID NO: 27365 - DNA, 21 bp, Homo sapiens
catttgttggcacaccttatt

SEQ ID NO: 27366 - RNA, 21 nt, RNAi
uuuguuggcacaccuuauuuu

SEQ ID NO: 27367 - RNA, 21 nt, RNAi
uuaaacaaccguguggaauaa

SEQ ID NO: 27368 - DNA, 21 bp, Homo sapiens
cacaccttattacatgtctcc

SEQ ID NO: 27369 - RNA, 21 nt, RNAi
caccuuauuacaugucuccuu

SEQ ID NO: 27370 - RNA, 21 nt, RNAi
uuguggaauaauguacagagg

SEQ ID NO: 27371 - DNA, 21 bp, Homo sapiens
caccttattacatgtctcctg

SEQ ID NO: 27372 - RNA, 21 nt, RNAi
ccuuauuacaugucuccuguu

SEQ ID NO: 27373 - RNA, 21 nt, RNAi
uuggaauaauguacagaggac

SEQ ID NO: 27374 - DNA, 21 bp, Homo sapiens
catgtctcctgaacaaatgaa

SEQ ID NO: 27375 - RNA, 21 nt, RNAi
ugucuccugaacaaaugaauu

SEQ ID NO: 27376 - RNA, 21 nt, RNAi
uuacagaggacuuguuuacuu

SEQ ID NO: 27377 - DNA, 21 bp, Homo sapiens
caaatgaatcgcatgtcctac

SEQ ID NO: 27378 - RNA, 21 nt, RNAi
aaugaaucgcauguccuacuu

SEQ ID NO: 27379 - RNA, 21 nt, RNAi
uuuuacuuagcguacaggaug

SEQ ID NO: 27380 - DNA, 21 bp, Homo sapiens
catgtcctacaatgagaaatc

SEQ ID NO: 27381 - RNA, 21 nt, RNAi
uguccuacaaugagaaaucuu

SEQ ID NO: 27382 - RNA, 21 nt, RNAi
uuacaggauguuacucuuuag

SEQ ID NO: 27383 - DNA, 21 bp, Homo sapiens
caatgagaaatcagatatctg

SEQ ID NO: 27384 - RNA, 21 nt, RNAi
augagaaaucagauaucuguu

SEQ ID NO: 27385 - RNA, 21 nt, RNAi
uuuacucuuuagucuauagac

SEQ ID NO: 27386 - DNA, 21 bp, Homo sapiens
cattaatgcctccatttacag

SEQ ID NO: 27387 - RNA, 21 nt, RNAi
uuaaugccuccauuuacaguu

SEQ ID NO: 27388 - RNA, 21 nt, RNAi
uuaauuacggagguaaauguc

SEQ ID NO: 27389 - DNA, 21 bp, Homo sapiens
cagagaaggcaaattcaggcg

SEQ ID NO: 27390 - RNA, 21 nt, RNAi
gagaaggcaaauucaggcguu

SEQ ID NO: 27391 - RNA, 21 nt, RNAi
uucucuuccguuuaaguccgc

SEQ ID NO: 27392 - DNA, 21 bp, Homo sapiens
caaattcaggcgaattccata

SEQ ID NO: 27393 - RNA, 21 nt, RNAi
aauucaggcgaauuccauauu

SEQ ID NO: 27394 - RNA, 21 nt, RNAi
uuuuaaguccgcuuaagguau

SEQ ID NO: 27395 - DNA, 21 bp, Homo sapiens
caggcgaattccataccgtta

SEQ ID NO: 27396 - RNA, 21 nt, RNAi
ggcgaauuccauaccguuauu

SEQ ID NO: 27397 - RNA, 21 nt, RNAi
uuccgcuuaagguauggcaau

SEQ ID NO: 27398 - DNA, 21 bp, Homo sapiens
cataccgttactctgatgaat

SEQ ID NO: 27399 - RNA, 21 nt, RNAi
uaccguuacucugaugaauuu

SEQ ID NO: 27400 - RNA, 21 nt, RNAi
uuauggcaaugagacuacuua

SEQ ID NO: 27401 - DNA, 21 bp, Homo sapiens
catcgaccttctgttgaagaa

SEQ ID NO: 27402 - RNA, 21 nt, RNAi
ucgaccuucuguugaagaauu

SEQ ID NO: 27403 - RNA, 21 nt, RNAi
uuagcuggaagacaacuucuu

SEQ ID NO: 27404 - DNA, 21 bp, Homo sapiens
cagatttggttgcagacgagc

SEQ ID NO: 27405 - RNA, 21 nt, RNAi
gauuugguugcagacgagcuu

SEQ ID NO: 27406 - RNA, 21 nt, RNAi
uucuaaaccaacgucugcucg

SEQ ID NO: 27407 - DNA, 21 bp, Homo sapiens
cagacgagcaaagaagaaatc

SEQ ID NO: 27408 - RNA, 21 nt, RNAi
gacgagcaaagaagaaaucuu

SEQ ID NO: 27409 - RNA, 21 nt, RNAi
uucugcucguuucuucuuuag

SEQ ID NO: 27410 - DNA, 21 bp, Homo sapiens
caaagaagaaatcttgagaga

SEQ ID NO: 27411 - RNA, 21 nt, RNAi
aagaagaaaucuugagagauu

SEQ ID NO: 27412 - RNA, 21 nt, RNAi
uuuucuucuuuagaacucucu

SEQ ID NO: 27413 - DNA, 21 bp, Homo sapiens
cagttacaggagcgagagcga

SEQ ID NO: 27414 - RNA, 21 nt, RNAi
guuacaggagcgagagcgauu

SEQ ID NO: 27415 - RNA, 21 nt, RNAi
uucaauguccucgcucucgcu

SEQ ID NO: 27416 - DNA, 21 bp, Homo sapiens
caaagcaagagaagaaagatt

SEQ ID NO: 27417 - RNA, 21 nt, RNAi
aagcaagagaagaaagauuuu

SEQ ID NO: 27418 - RNA, 21 nt, RNAi
uuuucguucucuucuuucuaa

SEQ ID NO: 27419 - DNA, 21 bp, Homo sapiens
caagagaagaaagattggagc

SEQ ID NO: 27420 - RNA, 21 nt, RNAi
agagaagaaagauuggagcuu

SEQ ID NO: 27421 - RNA, 21 nt, RNAi
uuucucuucuuucuaaccucg

SEQ ID NO: 27422 - DNA, 21 bp, Homo sapiens
cagaaagaacaggagctttgt

SEQ ID NO: 27423 - RNA, 21 nt, RNAi
gaaagaacaggagcuuuguuu

SEQ ID NO: 27424 - RNA, 21 nt, RNAi
uucuuucuuguccucgaaaca

SEQ ID NO: 27425 - DNA, 21 bp, Homo sapiens
caggagctttgtgttcgtgag

SEQ ID NO: 27426 - RNA, 21 nt, RNAi
ggagcuuuguguucgugaguu

SEQ ID NO: 27427 - RNA, 21 nt, RNAi
uuccucgaaacacaagcacuc

SEQ ID NO: 27428 - DNA, 21 bp, Homo sapiens
cagaggacaaactggctagag

SEQ ID NO: 27429 - RNA, 21 nt, RNAi
gaggacaaacuggcuagaguu

SEQ ID NO: 27430 - RNA, 21 nt, RNAi
uucuccuguuugaccgaucuc

SEQ ID NO: 27431 - DNA, 21 bp, Homo sapiens
cagcttgctaaaggaacggaa

SEQ ID NO: 27432 - RNA, 21 nt, RNAi
gcuugcuaaaggaacggaauu

SEQ ID NO: 27433 - RNA, 21 nt, RNAi
uucgaacgauuuccuugccuu

SEQ ID NO: 27434 - DNA, 21 bp, Homo sapiens
caagtaatccagaacttctta

SEQ ID NO: 27435 - RNA, 21 nt, RNAi
aguaauccagaacuucuuauu

SEQ ID NO: 27436 - RNA, 21 nt, RNAi
uuucauuaggucuugaagaau

SEQ ID NO: 27437 - DNA, 21 bp, Homo sapiens
cagaacttcttaatcttccat

SEQ ID NO: 27438 - RNA, 21 nt, RNAi
gaacuucuuaaucuuccauuu

SEQ ID NO: 27439 - RNA, 21 nt, RNAi
uucuugaagaauuagaaggua

SEQ ID NO: 27440 - DNA, 21 bp, Homo sapiens
catcctcagtaattaagaaga

SEQ ID NO: 27441 - RNA, 21 nt, RNAi
uccucaguaauuaagaagauu

SEQ ID NO: 27442 - RNA, 21 nt, RNAi
uuaggagucauuaauucuucu

SEQ ID NO: 27443 - DNA, 21 bp, Homo sapiens
catcatgaggagtgagaattc

SEQ ID NO: 27444 - RNA, 21 nt, RNAi
ucaugaggagugagaauucuu

SEQ ID NO: 27445 - RNA, 21 nt, RNAi
uuaguacuccucacucuuaag

SEQ ID NO: 27446 - DNA, 21 bp, Homo sapiens
catgaggagtgagaattctga

SEQ ID NO: 27447 - RNA, 21 nt, RNAi
ugaggagugagaauucugauu

SEQ ID NO: 27448 - RNA, 21 nt, RNAi
uuacuccucacucuuaagacu

SEQ ID NO: 27449 - DNA, 21 bp, Homo sapiens
cagctcacatctaagtccaag

SEQ ID NO: 27450 - RNA, 21 nt, RNAi
gcucacaucuaaguccaaguu

SEQ ID NO: 27451 - RNA, 21 nt, RNAi
uucgaguguagauucagguuc

SEQ ID NO: 27452 - DNA, 21 bp, Homo sapiens
cacatctaagtccaagtgcaa

SEQ ID NO: 27453 - RNA, 21 nt, RNAi
caucuaaguccaagugcaauu

SEQ ID NO: 27454 - RNA, 21 nt, RNAi
uuguagauucagguucacguu

SEQ ID NO: 27455 - DNA, 21 bp, Homo sapiens
catctaagtccaagtgcaagg

SEQ ID NO: 27456 - RNA, 21 nt, RNAi
ucuaaguccaagugcaagguu

SEQ ID NO: 27457 - RNA, 21 nt, RNAi
uuagauucagguucacguucc

SEQ ID NO: 27458 - DNA, 21 bp, Homo sapiens
caagtgcaaggacctgaagaa

SEQ ID NO: 27459 - RNA, 21 nt, RNAi
agugcaaggaccugaagaauu

SEQ ID NO: 27460 - RNA, 21 nt, RNAi
uuucacguuccuggacuucuu

SEQ ID NO: 27461 - DNA, 21 bp, Homo sapiens
catgcgctagccaggtagaga

SEQ ID NO: 27462 - RNA, 21 nt, RNAi
ugcgcuagccagguagagauu

SEQ ID NO: 27463 - RNA, 21 nt, RNAi
uuacgcgaucgguccaucucu

SEQ ID NO: 27464 - DNA, 21 bp, Homo sapiens
caggtagagagacacagagct

SEQ ID NO: 27465 - RNA, 21 nt, RNAi
gguagagagacacagagcuuu

SEQ ID NO: 27466 - RNA, 21 nt, RNAi
uuccaucucucugugucucga

SEQ ID NO: 27467 - DNA, 21 bp, Homo sapiens
cacagagctgtgtacaggatg

SEQ ID NO: 27468 - RNA, 21 nt, RNAi
cagagcuguguacaggauguu

SEQ ID NO: 27469 - RNA, 21 nt, RNAi
uugucucgacacauguccuac

SEQ ID NO: 27470 - DNA, 21 bp, Homo sapiens
cagagctgtgtacaggatgta

SEQ ID NO: 27471 - RNA, 21 nt, RNAi
gagcuguguacaggauguauu

SEQ ID NO: 27472 - RNA, 21 nt, RNAi
uucucgacacauguccuacau

SEQ ID NO: 27473 - DNA, 21 bp, Homo sapiens
caggatgtaatattaccaacc

SEQ ID NO: 27474 - RNA, 21 nt, RNAi
ggauguaauauuaccaaccuu

SEQ ID NO: 27475 - RNA, 21 nt, RNAi
uuccuacauuauaaugguugg

SEQ ID NO: 27476 - DNA, 21 bp, Homo sapiens
caaatgctgtagtgttgaata

SEQ ID NO: 27477 - RNA, 21 nt, RNAi
aaugcuguaguguugaauauu

SEQ ID NO: 27478 - RNA, 21 nt, RNAi
uuuuacgacaucacaacuuau

SEQ ID NO: 27479 - DNA, 21 bp, Homo sapiens
catgagccatgcctttctgta

SEQ ID NO: 27480 - RNA, 21 nt, RNAi
ugagccaugccuuucuguauu

SEQ ID NO: 27481 - RNA, 21 nt, RNAi
uuacucgguacggaaagacau

SEQ ID NO: 27482 - DNA, 21 bp, Homo sapiens
catgcctttctgtatagtaca

SEQ ID NO: 27483 - RNA, 21 nt, RNAi
ugccuuucuguauaguacauu

SEQ ID NO: 27484 - RNA, 21 nt, RNAi
uuacggaaagacauaucaugu

SEQ ID NO: 27485 - DNA, 21 bp, Homo sapiens
cacatgatatttcggaattgg

SEQ ID NO: 27486 - RNA, 21 nt, RNAi
caugauauuucggaauugguu

SEQ ID NO: 27487 - RNA, 21 nt, RNAi
uuguacuauaaagccuuaacc

SEQ ID NO: 27488 - DNA, 21 bp, Homo sapiens
catgatatttcggaattggtt

SEQ ID NO: 27489 - RNA, 21 nt, RNAi
ugauauuucggaauugguuuu

SEQ ID NO: 27490 - RNA, 21 nt, RNAi
uuacuauaaagccuuaaccaa

SEQ ID NO: 27491 - DNA, 21 bp, Homo sapiens
catgagatgtgacattctaaa

SEQ ID NO: 27492 - RNA, 21 nt, RNAi
ugagaugugacauucuaaauu

SEQ ID NO: 27493 - RNA, 21 nt, RNAi
uuacucuacacuguaagauuu

SEQ ID NO: 27494 - DNA, 21 bp, Homo sapiens
caggaagagtagcactcactg

SEQ ID NO: 27495 - RNA, 21 nt, RNAi
ggaagaguagcacucacuguu

SEQ ID NO: 27496 - RNA, 21 nt, RNAi
uuccuucucaucgugagugac

SEQ ID NO: 27497 - DNA, 21 bp, Homo sapiens
cagttagatgcaatttggtca

SEQ ID NO: 27498 - RNA, 21 nt, RNAi
guuagaugcaauuuggucauu

SEQ ID NO: 27499 - RNA, 21 nt, RNAi
uucaaucuacguuaaaccagu

SEQ ID NO: 27500 - DNA, 21 bp, Homo sapiens
cattaataccatgacatcttg

SEQ ID NO: 27501 - RNA, 21 nt, RNAi
uuaauaccaugacaucuuguu

SEQ ID NO: 27502 - RNA, 21 nt, RNAi
uuaauuaugguacuguagaac

SEQ ID NO: 27503 - DNA, 21 bp, Homo sapiens
cattgctctgtagttcaaatc

SEQ ID NO: 27504 - RNA, 21 nt, RNAi
uugcucuguaguucaaaucuu

SEQ ID NO: 27505 - RNA, 21 nt, RNAi
uuaacgagacaucaaguuuag

SEQ ID NO: 27506 - DNA, 21 bp, Homo sapiens
caaatctgttagctttgtgaa

SEQ ID NO: 27507 - RNA, 21 nt, RNAi
aaucuguuagcuuugugaauu

SEQ ID NO: 27508 - RNA, 21 nt, RNAi
uuuuagacaaucgaaacacuu

SEQ ID NO: 27509 - DNA, 21 bp, Homo sapiens
catcactgtgatgtttgtatt

SEQ ID NO: 27510 - RNA, 21 nt, RNAi
ucacugugauguuuguauuuu

SEQ ID NO: 27511 - RNA, 21 nt, RNAi
uuagugacacuacaaacauaa

SEQ ID NO: 27512 - DNA, 21 bp, Homo sapiens
cactgtgatgtttgtattctt

SEQ ID NO: 27513 - RNA, 21 nt, RNAi
cugugauguuuguauucuuuu

SEQ ID NO: 27514 - RNA, 21 nt, RNAi
uugacacuacaaacauaagaa

SEQ ID NO: 27515 - DNA, 21 bp, Homo sapiens
cagaatatgagctgtctgtca

SEQ ID NO: 27516 - RNA, 21 nt, RNAi
gaauaugagcugucugucauu

SEQ ID NO: 27517 - RNA, 21 nt, RNAi
uucuuauacucgacagacagu

SEQ ID NO: 27518 - DNA, 21 bp, Homo sapiens
gaggactatgaagtgttgtac

SEQ ID NO: 27519 - RNA, 21 nt, RNAi
ggacuaugaaguguuguacuu

SEQ ID NO: 27520 - RNA, 21 nt, RNAi
uuccugauacuucacaacaug

SEQ ID NO: 27521 - DNA, 21 bp, Homo sapiens
gactatgaagtgttgtacacc

SEQ ID NO: 27522 - RNA, 21 nt, RNAi
cuaugaaguguuguacaccuu

SEQ ID NO: 27523 - RNA, 21 nt, RNAi
uugauacuucacaacaugugg

SEQ ID NO: 27524 - DNA, 21 bp, Homo sapiens
gaagtgttgtacaccattggc

SEQ ID NO: 27525 - RNA, 21 nt, RNAi
aguguuguacaccauuggcuu

SEQ ID NO: 27526 - RNA, 21 nt, RNAi
uuucacaacaugugguaaccg

SEQ ID NO: 27527 - DNA, 21 bp, Homo sapiens
gaagatccggaggaagagtga

SEQ ID NO: 27528 - RNA, 21 nt, RNAi
agauccggaggaagagugauu

SEQ ID NO: 27529 - RNA, 21 nt, RNAi
uuucuaggccuccuucucacu

SEQ ID NO: 27530 - DNA, 21 bp, Homo sapiens
gatccggaggaagagtgatgg

SEQ ID NO: 27531 - RNA, 21 nt, RNAi
uccggaggaagagugaugguu

SEQ ID NO: 27532 - RNA, 21 nt, RNAi
uuaggccuccuucucacuacc

SEQ ID NO: 27533 - DNA, 21 bp, Homo sapiens
gaggaagagtgatggcaagat

SEQ ID NO: 27534 - RNA, 21 nt, RNAi
ggaagagugauggcaagauuu

SEQ ID NO: 27535 - RNA, 21 nt, RNAi
uuccuucucacuaccguucua

SEQ ID NO: 27536 - DNA, 21 bp, Homo sapiens
gaagagtgatggcaagatatt

SEQ ID NO: 27537 - RNA, 21 nt, RNAi
agagugauggcaagauauuuu

SEQ ID NO: 27538 - RNA, 21 nt, RNAi
uuucucacuaccguucuauaa

SEQ ID NO: 27539 - DNA, 21 bp, Homo sapiens
gagtgatggcaagatattagt

SEQ ID NO: 27540 - RNA, 21 nt, RNAi
gugauggcaagauauuaguuu

SEQ ID NO: 27541 - RNA, 21 nt, RNAi
uucacuaccguucuauaauca

SEQ ID NO: 27542 - DNA, 21 bp, Homo sapiens
gatggcaagatattagtttgg

SEQ ID NO: 27543 - RNA, 21 nt, RNAi
uggcaagauauuaguuugguu

SEQ ID NO: 27544 - RNA, 21 nt, RNAi
uuaccguucuauaaucaaacc

SEQ ID NO: 27545 - DNA, 21 bp, Homo sapiens
gaaagaacttgactatggctc

SEQ ID NO: 27546 - RNA, 21 nt, RNAi
aagaacuugacuauggcucuu

SEQ ID NO: 27547 - RNA, 21 nt, RNAi
uuuucuugaacugauaccgag

SEQ ID NO: 27548 - DNA, 21 bp, Homo sapiens
gaacttgactatggctccatg

SEQ ID NO: 27549 - RNA, 21 nt, RNAi
acuugacuauggcuccauguu

SEQ ID NO: 27550 - RNA, 21 nt, RNAi
uuugaacugauaccgagguac

SEQ ID NO: 27551 - DNA, 21 bp, Homo sapiens
gactatggctccatgacagaa

SEQ ID NO: 27552 - RNA, 21 nt, RNAi
cuauggcuccaugacagaauu

SEQ ID NO: 27553 - RNA, 21 nt, RNAi
uugauaccgagguacugucuu

SEQ ID NO: 27554 - DNA, 21 bp, Homo sapiens
gacagaagctgagaaacagat

SEQ ID NO: 27555 - RNA, 21 nt, RNAi
cagaagcugagaaacagauuu

SEQ ID NO: 27556 - RNA, 21 nt, RNAi
uugucuucgacucuuugucua

SEQ ID NO: 27557 - DNA, 21 bp, Homo sapiens
gaagctgagaaacagatgctt

SEQ ID NO: 27558 - RNA, 21 nt, RNAi
agcugagaaacagaugcuuuu

SEQ ID NO: 27559 - RNA, 21 nt, RNAi
uuucgacucuuugucuacgaa

SEQ ID NO: 27560 - DNA, 21 bp, Homo sapiens
gagaaacagatgcttgtttct

SEQ ID NO: 27561 - RNA, 21 nt, RNAi
gaaacagaugcuuguuucuuu

SEQ ID NO: 27562 - RNA, 21 nt, RNAi
uucuuugucuacgaacaaaga

SEQ ID NO: 27563 - DNA, 21 bp, Homo sapiens
gaaacagatgcttgtttctga

SEQ ID NO: 27564 - RNA, 21 nt, RNAi
aacagaugcuuguuucugauu

SEQ ID NO: 27565 - RNA, 21 nt, RNAi
uuuugucuacgaacaaagacu

SEQ ID NO: 27566 - DNA, 21 bp, Homo sapiens
gatgcttgtttctgaagtgaa

SEQ ID NO: 27567 - RNA, 21 nt, RNAi
ugcuuguuucugaagugaauu

SEQ ID NO: 27568 - RNA, 21 nt, RNAi
uuacgaacaaagacuucacuu

SEQ ID NO: 27569 - DNA, 21 bp, Homo sapiens
gaagtgaatttgcttcgtgaa

SEQ ID NO: 27570 - RNA, 21 nt, RNAi
agugaauuugcuucgugaauu

SEQ ID NO: 27571 - RNA, 21 nt, RNAi
uuucacuuaaacgaagcacuu

SEQ ID NO: 27572 - DNA, 21 bp, Homo sapiens
gaatttgcttcgtgaactgaa

SEQ ID NO: 27573 - RNA, 21 nt, RNAi
auuugcuucgugaacugaauu

SEQ ID NO: 27574 - RNA, 21 nt, RNAi
uuuaaacgaagcacuugacuu

SEQ ID NO: 27575 - DNA, 21 bp, Homo sapiens
gaactgaaacatccaaacatc

SEQ ID NO: 27576 - RNA, 21 nt, RNAi
acugaaacauccaaacaucuu

SEQ ID NO: 27577 - RNA, 21 nt, RNAi
uuugacuuuguagguuuguag

SEQ ID NO: 27578 - DNA, 21 bp, Homo sapiens
gaaacatccaaacatcgttcg

SEQ ID NO: 27579 - RNA, 21 nt, RNAi
aacauccaaacaucguucguu

SEQ ID NO: 27580 - RNA, 21 nt, RNAi
uuuuguagguuuguagcaagc

SEQ ID NO: 27581 - DNA, 21 bp, Homo sapiens
gatcggattattgaccggacc

SEQ ID NO: 27582 - RNA, 21 nt, RNAi
ucggauuauugaccggaccuu

SEQ ID NO: 27583 - RNA, 21 nt, RNAi
uuagccuaauaacuggccugg

SEQ ID NO: 27584 - DNA, 21 bp, Homo sapiens
gattattgaccggaccaatac

SEQ ID NO: 27585 - RNA, 21 nt, RNAi
uuauugaccggaccaauacuu

SEQ ID NO: 27586 - RNA, 21 nt, RNAi
uuaauaacuggccugguuaug

SEQ ID NO: 27587 - DNA, 21 bp, Homo sapiens
gaccggaccaatacaacactg

SEQ ID NO: 27588 - RNA, 21 nt, RNAi
ccggaccaauacaacacuguu

SEQ ID NO: 27589 - RNA, 21 nt, RNAi
uuggccugguuauguugugac

SEQ ID NO: 27590 - DNA, 21 bp, Homo sapiens
gaccaatacaacactgtacat

SEQ ID NO: 27591 - RNA, 21 nt, RNAi
ccaauacaacacuguacauuu

SEQ ID NO: 27592 - RNA, 21 nt, RNAi
uugguuauguugugacaugua

SEQ ID NO: 27593 - DNA, 21 bp, Homo sapiens
gatctggctagtgtaattaca

SEQ ID NO: 27594 - RNA, 21 nt, RNAi
ucuggcuaguguaauuacauu

SEQ ID NO: 27595 - RNA, 21 nt, RNAi
uuagaccgaucacauuaaugu

SEQ ID NO: 27596 - DNA, 21 bp, Homo sapiens
gaaccaaggaaaggcaatact

SEQ ID NO: 27597 - RNA, 21 nt, RNAi
accaaggaaaggcaauacuuu

SEQ ID NO: 27598 - RNA, 21 nt, RNAi
uuugguuccuuuccguuauga

SEQ ID NO: 27599 - DNA, 21 bp, Homo sapiens
gaaaggcaatacttagatgaa

SEQ ID NO: 27600 - RNA, 21 nt, RNAi
aaggcaauacuuagaugaauu

SEQ ID NO: 27601 - RNA, 21 nt, RNAi
uuuuccguuaugaaucuacuu

SEQ ID NO: 27602 - DNA, 21 bp, Homo sapiens
gatgaagagtttgttcttcga

SEQ ID NO: 27603 - RNA, 21 nt, RNAi
ugaagaguuuguucuucgauu

SEQ ID NO: 27604 - RNA, 21 nt, RNAi
uuacuucucaaacaagaagcu

SEQ ID NO: 27605 - DNA, 21 bp, Homo sapiens
gaagagtttgttcttcgagtg

SEQ ID NO: 27606 - RNA, 21 nt, RNAi
agaguuuguucuucgaguguu

SEQ ID NO: 27607 - RNA, 21 nt, RNAi
uuucucaaacaagaagcucac

SEQ ID NO: 27608 - DNA, 21 bp, Homo sapiens
gagtttgttcttcgagtgatg

SEQ ID NO: 27609 - RNA, 21 nt, RNAi
guuuguucuucgagugauguu

SEQ ID NO: 27610 - RNA, 21 nt, RNAi
uucaaacaagaagcucacuac

SEQ ID NO: 27611 - DNA, 21 bp, Homo sapiens
gagtgatgactcagttgactc

SEQ ID NO: 27612 - RNA, 21 nt, RNAi
gugaugacucaguugacucuu

SEQ ID NO: 27613 - RNA, 21 nt, RNAi
uucacuacugagucaacugag

SEQ ID NO: 27614 - DNA, 21 bp, Homo sapiens
gatgactcagttgactctggc

SEQ ID NO: 27615 - RNA, 21 nt, RNAi
ugacucaguugacucuggcuu

SEQ ID NO: 27616 - RNA, 21 nt, RNAi
uuacugagucaacugagaccg

SEQ ID NO: 27617 - DNA, 21 bp, Homo sapiens
gaaggaatgccacagacgaag

SEQ ID NO: 27618 - RNA, 21 nt, RNAi
aggaaugccacagacgaaguu

SEQ ID NO: 27619 - RNA, 21 nt, RNAi
uuuccuuacggugucugcuuc

SEQ ID NO: 27620 - DNA, 21 bp, Homo sapiens
gaatgccacagacgaagtgat

SEQ ID NO: 27621 - RNA, 21 nt, RNAi
augccacagacgaagugauuu

SEQ ID NO: 27622 - RNA, 21 nt, RNAi
uuuacggugucugcuucacua

SEQ ID NO: 27623 - DNA, 21 bp, Homo sapiens
gacgaagtgatggtggtcata

SEQ ID NO: 27624 - RNA, 21 nt, RNAi
cgaagugaugguggucauauu

SEQ ID NO: 27625 - RNA, 21 nt, RNAi
uugcuucacuaccaccaguau

SEQ ID NO: 27626 - DNA, 21 bp, Homo sapiens
gaagtgatggtggtcataccg

SEQ ID NO: 27627 - RNA, 21 nt, RNAi
agugaugguggucauaccguu

SEQ ID NO: 27628 - RNA, 21 nt, RNAi
uuucacuaccaccaguauggc

SEQ ID NO: 27629 - DNA, 21 bp, Homo sapiens
gatggtggtcataccgtattg

SEQ ID NO: 27630 - RNA, 21 nt, RNAi
ugguggucauaccguauuguu

SEQ ID NO: 27631 - RNA, 21 nt, RNAi
uuaccaccaguauggcauaac

SEQ ID NO: 27632 - DNA, 21 bp, Homo sapiens
gatcttaaaccagccaatgtt

SEQ ID NO: 27633 - RNA, 21 nt, RNAi
ucuuaaaccagccaauguuuu

SEQ ID NO: 27634 - RNA, 21 nt, RNAi
uuagaauuuggucgguuacaa

SEQ ID NO: 27635 - DNA, 21 bp, Homo sapiens
gaatattaaaccatgacacga

SEQ ID NO: 27636 - RNA, 21 nt, RNAi
auauuaaaccaugacacgauu

SEQ ID NO: 27637 - RNA, 21 nt, RNAi
uuuauaauuugguacugugcu

SEQ ID NO: 27638 - DNA, 21 bp, Homo sapiens
gaacaaatgaatcgcatgtcc

SEQ ID NO: 27639 - RNA, 21 nt, RNAi
acaaaugaaucgcauguccuu

SEQ ID NO: 27640 - RNA, 21 nt, RNAi
uuuguuuacuuagcguacagg

SEQ ID NO: 27641 - DNA, 21 bp, Homo sapiens
gaatcgcatgtcctacaatga

SEQ ID NO: 27642 - RNA, 21 nt, RNAi
aucgcauguccuacaaugauu

SEQ ID NO: 27643 - RNA, 21 nt, RNAi
uuuagcguacaggauguuacu

SEQ ID NO: 27644 - DNA, 21 bp, Homo sapiens
gagaaatcagatatctggtca

SEQ ID NO: 27645 - RNA, 21 nt, RNAi
gaaaucagauaucuggucauu

SEQ ID NO: 27646 - RNA, 21 nt, RNAi
uucuuuagucuauagaccagu

SEQ ID NO: 27647 - DNA, 21 bp, Homo sapiens
gaaatcagatatctggtcatt

SEQ ID NO: 27648 - RNA, 21 nt, RNAi
aaucagauaucuggucauuuu

SEQ ID NO: 27649 - RNA, 21 nt, RNAi
uuuuagucuauagaccaguaa

SEQ ID NO: 27650 - DNA, 21 bp, Homo sapiens
gagttatgtgcattaatgcct

SEQ ID NO: 27651 - RNA, 21 nt, RNAi
guuaugugcauuaaugccuuu

SEQ ID NO: 27652 - RNA, 21 nt, RNAi
uucaauacacguaauuacgga

SEQ ID NO: 27653 - DNA, 21 bp, Homo sapiens
gagaaggcaaattcaggcgaa

SEQ ID NO: 27654 - RNA, 21 nt, RNAi
gaaggcaaauucaggcgaauu

SEQ ID NO: 27655 - RNA, 21 nt, RNAi
uucuuccguuuaaguccgcuu

SEQ ID NO: 27656 - DNA, 21 bp, Homo sapiens
gaaggcaaattcaggcgaatt

SEQ ID NO: 27657 - RNA, 21 nt, RNAi
aggcaaauucaggcgaauuuu

SEQ ID NO: 27658 - RNA, 21 nt, RNAi
uuuccguuuaaguccgcuuaa

SEQ ID NO: 27659 - DNA, 21 bp, Homo sapiens
gaattccataccgttactctg

SEQ ID NO: 27660 - RNA, 21 nt, RNAi
auuccauaccguuacucuguu

SEQ ID NO: 27661 - RNA, 21 nt, RNAi
uuuaagguauggcaaugagac

SEQ ID NO: 27662 - DNA, 21 bp, Homo sapiens
gaggatgttaaacttaaagga

SEQ ID NO: 27663 - RNA, 21 nt, RNAi
ggauguuaaacuuaaaggauu

SEQ ID NO: 27664 - RNA, 21 nt, RNAi
uuccuacaauuugaauuuccu

SEQ ID NO: 27665 - DNA, 21 bp, Homo sapiens
gattaccatcgaccttctgtt

SEQ ID NO: 27666 - RNA, 21 nt, RNAi
uuaccaucgaccuucuguuuu

SEQ ID NO: 27667 - RNA, 21 nt, RNAi
uuaaugguagcuggaagacaa

SEQ ID NO: 27668 - DNA, 21 bp, Homo sapiens
gaccttctgttgaagaaattc

SEQ ID NO: 27669 - RNA, 21 nt, RNAi
ccuucuguugaagaaauucuu

SEQ ID NO: 27670 - RNA, 21 nt, RNAi
uuggaagacaacuucuuuaag

SEQ ID NO: 27671 - DNA, 21 bp, Homo sapiens
gatttggttgcagacgagcaa

SEQ ID NO: 27672 - RNA, 21 nt, RNAi
uuugguugcagacgagcaauu

SEQ ID NO: 27673 - RNA, 21 nt, RNAi
uuaaaccaacgucugcucguu

SEQ ID NO: 27674 - DNA, 21 bp, Homo sapiens
gacgagcaaagaagaaatctt

SEQ ID NO: 27675 - RNA, 21 nt, RNAi
cgagcaaagaagaaaucuuuu

SEQ ID NO: 27676 - RNA, 21 nt, RNAi
uugcucguuucuucuuuagaa

SEQ ID NO: 27677 - DNA, 21 bp, Homo sapiens
gagcaaagaagaaatcttgag

SEQ ID NO: 27678 - RNA, 21 nt, RNAi
gcaaagaagaaaucuugaguu

SEQ ID NO: 27679 - RNA, 21 nt, RNAi
uucguuucuucuuuagaacuc

SEQ ID NO: 27680 - DNA, 21 bp, Homo sapiens
gaagaaatcttgagagaagag

SEQ ID NO: 27681 - RNA, 21 nt, RNAi
agaaaucuugagagaagaguu

SEQ ID NO: 27682 - RNA, 21 nt, RNAi
uuucuuuagaacucucuucuc

SEQ ID NO: 27683 - DNA, 21 bp, Homo sapiens
gacaattaggagagccagaaa

SEQ ID NO: 27684 - RNA, 21 nt, RNAi
caauuaggagagccagaaauu

SEQ ID NO: 27685 - RNA, 21 nt, RNAi
uuguuaauccucucggucuuu

SEQ ID NO: 27686 - DNA, 21 bp, Homo sapiens
gagtgagctgaaactgaagga

SEQ ID NO: 27687 - RNA, 21 nt, RNAi
gugagcugaaacugaaggauu

SEQ ID NO: 27688 - RNA, 21 nt, RNAi
uucacucgacuuugacuuccu

SEQ ID NO: 27689 - DNA, 21 bp, Homo sapiens
gagctgaaactgaaggaaatt

SEQ ID NO: 27690 - RNA, 21 nt, RNAi
gcugaaacugaaggaaauuuu

SEQ ID NO: 27691 - RNA, 21 nt, RNAi
uucgacuuugacuuccuuuaa

SEQ ID NO: 27692 - DNA, 21 bp, Homo sapiens
gaaactgaaggaaattcagtt

SEQ ID NO: 27693 - RNA, 21 nt, RNAi
aacugaaggaaauucaguuuu

SEQ ID NO: 27694 - RNA, 21 nt, RNAi
uuuugacuuccuuuaagucaa

SEQ ID NO: 27695 - DNA, 21 bp, Homo sapiens
gaaggaaattcagttacagga

SEQ ID NO: 27696 - RNA, 21 nt, RNAi
aggaaauucaguuacaggauu

SEQ ID NO: 27697 - RNA, 21 nt, RNAi
uuuccuuuaagucaauguccu

SEQ ID NO: 27698 - DNA, 21 bp, Homo sapiens
gaaattcagttacaggagcga

SEQ ID NO: 27699 - RNA, 21 nt, RNAi
aauucaguuacaggagcgauu

SEQ ID NO: 27700 - RNA, 21 nt, RNAi
uuuuaagucaauguccucgcu

SEQ ID NO: 27701 - DNA, 21 bp, Homo sapiens
gagcgagagcgagctctcaaa

SEQ ID NO: 27702 - RNA, 21 nt, RNAi
gcgagagcgagcucucaaauu

SEQ ID NO: 27703 - RNA, 21 nt, RNAi
uucgcucucgcucgagaguuu

SEQ ID NO: 27704 - DNA, 21 bp, Homo sapiens
gagagcgagctctcaaagcaa

SEQ ID NO: 27705 - RNA, 21 nt, RNAi
gagcgagcucucaaagcaauu

SEQ ID NO: 27706 - RNA, 21 nt, RNAi
uucucgcucgagaguuucguu

SEQ ID NO: 27707 - DNA, 21 bp, Homo sapiens
gagcgagctctcaaagcaaga

SEQ ID NO: 27708 - RNA, 21 nt, RNAi
gcgagcucucaaagcaagauu

SEQ ID NO: 27709 - RNA, 21 nt, RNAi
uucgcucgagaguuucguucu

SEQ ID NO: 27710 - DNA, 21 bp, Homo sapiens
gagctctcaaagcaagagaag

SEQ ID NO: 27711 - RNA, 21 nt, RNAi
gcucucaaagcaagagaaguu

SEQ ID NO: 27712 - RNA, 21 nt, RNAi
uucgagaguuucguucucuuc

SEQ ID NO: 27713 - DNA, 21 bp, Homo sapiens
gagaagaaagattggagcaga

SEQ ID NO: 27714 - RNA, 21 nt, RNAi
gaagaaagauuggagcagauu

SEQ ID NO: 27715 - RNA, 21 nt, RNAi
uucuucuuucuaaccucgucu

SEQ ID NO: 27716 - DNA, 21 bp, Homo sapiens
gaagaaagattggagcagaaa

SEQ ID NO: 27717 - RNA, 21 nt, RNAi
agaaagauuggagcagaaauu

SEQ ID NO: 27718 - RNA, 21 nt, RNAi
uuucuuucuaaccucgucuuu

SEQ ID NO: 27719 - DNA, 21 bp, Homo sapiens
gaaagattggagcagaaagaa

SEQ ID NO: 27720 - RNA, 21 nt, RNAi
aagauuggagcagaaagaauu

SEQ ID NO: 27721 - RNA, 21 nt, RNAi
uuuucuaaccucgucuuucuu

SEQ ID NO: 27722 - DNA, 21 bp, Homo sapiens
gattggagcagaaagaacagg

SEQ ID NO: 27723 - RNA, 21 nt, RNAi
uuggagcagaaagaacagguu

SEQ ID NO: 27724 - RNA, 21 nt, RNAi
uuaaccucgucuuucuugucc

SEQ ID NO: 27725 - DNA, 21 bp, Homo sapiens
gagcagaaagaacaggagctt

SEQ ID NO: 27726 - RNA, 21 nt, RNAi
gcagaaagaacaggagcuuuu

SEQ ID NO: 27727 - RNA, 21 nt, RNAi
uucgucuuucuuguccucgaa

SEQ ID NO: 27728 - DNA, 21 bp, Homo sapiens
gaaagaacaggagctttgtgt

SEQ ID NO: 27729 - RNA, 21 nt, RNAi
aagaacaggagcuuuguguuu

SEQ ID NO: 27730 - RNA, 21 nt, RNAi
uuuucuuguccucgaaacaca

SEQ ID NO: 27731 - DNA, 21 bp, Homo sapiens
gaacaggagctttgtgttcgt

SEQ ID NO: 27732 - RNA, 21 nt, RNAi
acaggagcuuuguguucguuu

SEQ ID NO: 27733 - RNA, 21 nt, RNAi
uuuguccucgaaacacaagca

SEQ ID NO: 27734 - DNA, 21 bp, Homo sapiens
gagctttgtgttcgtgagaga

SEQ ID NO: 27735 - RNA, 21 nt, RNAi
gcuuuguguucgugagagauu

SEQ ID NO: 27736 - RNA, 21 nt, RNAi
uucgaaacacaagcacucucu

SEQ ID NO: 27737 - DNA, 21 bp, Homo sapiens
gagagactagcagaggacaaa

SEQ ID NO: 27738 - RNA, 21 nt, RNAi
gagacuagcagaggacaaauu

SEQ ID NO: 27739 - RNA, 21 nt, RNAi
uucucugaucgucuccuguuu

SEQ ID NO: 27740 - DNA, 21 bp, Homo sapiens
gagactagcagaggacaaact

SEQ ID NO: 27741 - RNA, 21 nt, RNAi
gacuagcagaggacaaacuuu

SEQ ID NO: 27742 - RNA, 21 nt, RNAi
uucugaucgucuccuguuuga

SEQ ID NO: 27743 - DNA, 21 bp, Homo sapiens
gactagcagaggacaaactgg

SEQ ID NO: 27744 - RNA, 21 nt, RNAi
cuagcagaggacaaacugguu

SEQ ID NO: 27745 - RNA, 21 nt, RNAi
uugaucgucuccuguuugacc

SEQ ID NO: 27746 - DNA, 21 bp, Homo sapiens
gaggacaaactggctagagca

SEQ ID NO: 27747 - RNA, 21 nt, RNAi
ggacaaacuggcuagagcauu

SEQ ID NO: 27748 - RNA, 21 nt, RNAi
uuccuguuugaccgaucucgu

SEQ ID NO: 27749 - DNA, 21 bp, Homo sapiens
gacaaactggctagagcagaa

SEQ ID NO: 27750 - RNA, 21 nt, RNAi
caaacuggcuagagcagaauu

SEQ ID NO: 27751 - RNA, 21 nt, RNAi
uuguuugaccgaucucgucuu

SEQ ID NO: 27752 - DNA, 21 bp, Homo sapiens
gaagaactacagcttgctaaa

SEQ ID NO: 27753 - RNA, 21 nt, RNAi
agaacuacagcuugcuaaauu

SEQ ID NO: 27754 - RNA, 21 nt, RNAi
uuucuugaugucgaacgauuu

SEQ ID NO: 27755 - DNA, 21 bp, Homo sapiens
gaactacagcttgctaaagga

SEQ ID NO: 27756 - RNA, 21 nt, RNAi
acuacagcuugcuaaaggauu

SEQ ID NO: 27757 - RNA, 21 nt, RNAi
uuugaugucgaacgauuuccu

SEQ ID NO: 27758 - DNA, 21 bp, Homo sapiens
gaacggaagttcctgtctctg

SEQ ID NO: 27759 - RNA, 21 nt, RNAi
acggaaguuccugucucuguu

SEQ ID NO: 27760 - RNA, 21 nt, RNAi
uuugccuucaaggacagagac

SEQ ID NO: 27761 - DNA, 21 bp, Homo sapiens
gaagttcctgtctctggcaag

SEQ ID NO: 27762 - RNA, 21 nt, RNAi
aguuccugucucuggcaaguu

SEQ ID NO: 27763 - RNA, 21 nt, RNAi
uuucaaggacagagaccguuc

SEQ ID NO: 27764 - DNA, 21 bp, Homo sapiens
gaacttcttaatcttccatcc

SEQ ID NO: 27765 - RNA, 21 nt, RNAi
acuucuuaaucuuccauccuu

SEQ ID NO: 27766 - RNA, 21 nt, RNAi
uuugaagaauuagaagguagg

SEQ ID NO: 27767 - DNA, 21 bp, Homo sapiens
gaagaaagttcatttcagtgg

SEQ ID NO: 27768 - RNA, 21 nt, RNAi
agaaaguucauuucagugguu

SEQ ID NO: 27769 - RNA, 21 nt, RNAi
uuucuuucaaguaaagucacc

SEQ ID NO: 27770 - DNA, 21 bp, Homo sapiens
gaaagtaaagagaacatcatg

SEQ ID NO: 27771 - RNA, 21 nt, RNAi
aaguaaagagaacaucauguu

SEQ ID NO: 27772 - RNA, 21 nt, RNAi
uuuucauuucucuuguaguac

SEQ ID NO: 27773 - DNA, 21 bp, Homo sapiens
gagaacatcatgaggagtgag

SEQ ID NO: 27774 - RNA, 21 nt, RNAi
gaacaucaugaggagugaguu

SEQ ID NO: 27775 - RNA, 21 nt, RNAi
uucuuguaguacuccucacuc

SEQ ID NO: 27776 - DNA, 21 bp, Homo sapiens
gaacatcatgaggagtgagaa

SEQ ID NO: 27777 - RNA, 21 nt, RNAi
acaucaugaggagugagaauu

SEQ ID NO: 27778 - RNA, 21 nt, RNAi
uuuguaguacuccucacucuu

SEQ ID NO: 27779 - DNA, 21 bp, Homo sapiens
gaggagtgagaattctgagag

SEQ ID NO: 27780 - RNA, 21 nt, RNAi
ggagugagaauucugagaguu

SEQ ID NO: 27781 - RNA, 21 nt, RNAi
uuccucacucuuaagacucuc

SEQ ID NO: 27782 - DNA, 21 bp, Homo sapiens
gagtgagaattctgagagtca

SEQ ID NO: 27783 - RNA, 21 nt, RNAi
gugagaauucugagagucauu

SEQ ID NO: 27784 - RNA, 21 nt, RNAi
uucacucuuaagacucucagu

SEQ ID NO: 27785 - DNA, 21 bp, Homo sapiens
gagaattctgagagtcagctc

SEQ ID NO: 27786 - RNA, 21 nt, RNAi
gaauucugagagucagcucuu

SEQ ID NO: 27787 - RNA, 21 nt, RNAi
uucuuaagacucucagucgag

SEQ ID NO: 27788 - DNA, 21 bp, Homo sapiens
gaattctgagagtcagctcac

SEQ ID NO: 27789 - RNA, 21 nt, RNAi
auucugagagucagcucacuu

SEQ ID NO: 27790 - RNA, 21 nt, RNAi
uuuaagacucucagucgagug

SEQ ID NO: 27791 - DNA, 21 bp, Homo sapiens
gagagtcagctcacatctaag

SEQ ID NO: 27792 - RNA, 21 nt, RNAi
gagucagcucacaucuaaguu

SEQ ID NO: 27793 - RNA, 21 nt, RNAi
uucucagucgaguguagauuc

SEQ ID NO: 27794 - DNA, 21 bp, Homo sapiens
gagtcagctcacatctaagtc

SEQ ID NO: 27795 - RNA, 21 nt, RNAi
gucagcucacaucuaagucuu

SEQ ID NO: 27796 - RNA, 21 nt, RNAi
uucagucgaguguagauucag

SEQ ID NO: 27797 - DNA, 21 bp, Homo sapiens
gagagacacagagctgtgtac

SEQ ID NO: 27798 - RNA, 21 nt, RNAi
gagacacagagcuguguacuu

SEQ ID NO: 27799 - RNA, 21 nt, RNAi
uucucugugucucgacacaug

SEQ ID NO: 27800 - DNA, 21 bp, Homo sapiens
gagacacagagctgtgtacag

SEQ ID NO: 27801 - RNA, 21 nt, RNAi
gacacagagcuguguacaguu

SEQ ID NO: 27802 - RNA, 21 nt, RNAi
uucugugucucgacacauguc

SEQ ID NO: 27803 - DNA, 21 bp, Homo sapiens
gacacagagctgtgtacagga

SEQ ID NO: 27804 - RNA, 21 nt, RNAi
cacagagcuguguacaggauu

SEQ ID NO: 27805 - RNA, 21 nt, RNAi
uugugucucgacacauguccu

SEQ ID NO: 27806 - DNA, 21 bp, Homo sapiens
gagctgtgtacaggatgtaat

SEQ ID NO: 27807 - RNA, 21 nt, RNAi
gcuguguacaggauguaauuu

SEQ ID NO: 27808 - RNA, 21 nt, RNAi
uucgacacauguccuacauua

SEQ ID NO: 27809 - DNA, 21 bp, Homo sapiens
gactgatattcaaatgctgta

SEQ ID NO: 27810 - RNA, 21 nt, RNAi
cugauauucaaaugcuguauu

SEQ ID NO: 27811 - RNA, 21 nt, RNAi
uugacuauaaguuuacgacau

SEQ ID NO: 27812 - DNA, 21 bp, Homo sapiens
gatattcaaatgctgtagtgt

SEQ ID NO: 27813 - RNA, 21 nt, RNAi
uauucaaaugcuguaguguuu

SEQ ID NO: 27814 - RNA, 21 nt, RNAi
uuauaaguuuacgacaucaca

SEQ ID NO: 27815 - DNA, 21 bp, Homo sapiens
gagccatgcctttctgtatag

SEQ ID NO: 27816 - RNA, 21 nt, RNAi
gccaugccuuucuguauaguu

SEQ ID NO: 27817 - RNA, 21 nt, RNAi
uucgguacggaaagacauauc

SEQ ID NO: 27818 - DNA, 21 bp, Homo sapiens
gattactagtaggaacatgag

SEQ ID NO: 27819 - RNA, 21 nt, RNAi
uuacuaguaggaacaugaguu

SEQ ID NO: 27820 - RNA, 21 nt, RNAi
uuaaugaucauccuuguacuc

SEQ ID NO: 27821 - DNA, 21 bp, Homo sapiens
gaacatgagatgtgacattct

SEQ ID NO: 27822 - RNA, 21 nt, RNAi
acaugagaugugacauucuuu

SEQ ID NO: 27823 - RNA, 21 nt, RNAi
uuuguacucuacacuguaaga

SEQ ID NO: 27824 - DNA, 21 bp, Homo sapiens
gagatgtgacattctaaatct

SEQ ID NO: 27825 - RNA, 21 nt, RNAi
gaugugacauucuaaaucuuu

SEQ ID NO: 27826 - RNA, 21 nt, RNAi
uucuacacuguaagauuuaga

SEQ ID NO: 27827 - DNA, 21 bp, Homo sapiens
gatgtgacattctaaatcttg

SEQ ID NO: 27828 - RNA, 21 nt, RNAi
ugugacauucuaaaucuuguu

SEQ ID NO: 27829 - RNA, 21 nt, RNAi
uuacacuguaagauuuagaac

SEQ ID NO: 27830 - DNA, 21 bp, Homo sapiens
gaagagtagcactcactgaat

SEQ ID NO: 27831 - RNA, 21 nt, RNAi
agaguagcacucacugaauuu

SEQ ID NO: 27832 - RNA, 21 nt, RNAi
uuucucaucgugagugacuua

SEQ ID NO: 27833 - DNA, 21 bp, Homo sapiens
gagtagcactcactgaatagt

SEQ ID NO: 27834 - RNA, 21 nt, RNAi
guagcacucacugaauaguuu

SEQ ID NO: 27835 - RNA, 21 nt, RNAi
uucaucgugagugacuuauca

SEQ ID NO: 27836 - DNA, 21 bp, Homo sapiens
gactgagtggtatgcttacaa

SEQ ID NO: 27837 - RNA, 21 nt, RNAi
cugagugguaugcuuacaauu

SEQ ID NO: 27838 - RNA, 21 nt, RNAi
uugacucaccauacgaauguu

SEQ ID NO: 27839 - DNA, 21 bp, Homo sapiens
gagtggtatgcttacaattgt

SEQ ID NO: 27840 - RNA, 21 nt, RNAi
gugguaugcuuacaauuguuu

SEQ ID NO: 27841 - RNA, 21 nt, RNAi
uucaccauacgaauguuaaca

SEQ ID NO: 27842 - DNA, 21 bp, Homo sapiens
gaatatgagctgtctgtcatt

SEQ ID NO: 27843 - RNA, 21 nt, RNAi
auaugagcugucugucauuuu

SEQ ID NO: 27844 - RNA, 21 nt, RNAi
uuuauacucgacagacaguaa

SEQ ID NO: 27845 - DNA, 21 bp, Homo sapiens
gagctgtctgtcatttaccta

SEQ ID NO: 27846 - RNA, 21 nt, RNAi
gcugucugucauuuaccuauu

SEQ ID NO: 27847 - RNA, 21 nt, RNAi
uucgacagacaguaaauggau

SEQ ID NO: 27848 - DNA, 21 bp, Homo sapiens
tatgaagtgttgtacaccatt

SEQ ID NO: 27849 - RNA, 21 nt, RNAi
ugaaguguuguacaccauuuu

SEQ ID NO: 27850 - RNA, 21 nt, RNAi
uuacuucacaacaugugguaa

SEQ ID NO: 27851 - DNA, 21 bp, Homo sapiens
tacaccattggcacaggctcc

SEQ ID NO: 27852 - RNA, 21 nt, RNAi
caccauuggcacaggcuccuu

SEQ ID NO: 27853 - RNA, 21 nt, RNAi
uugugguaaccguguccgagg

SEQ ID NO: 27854 - DNA, 21 bp, Homo sapiens
tagtttggaaagaacttgact

SEQ ID NO: 27855 - RNA, 21 nt, RNAi
guuuggaaagaacuugacuuu

SEQ ID NO: 27856 - RNA, 21 nt, RNAi
uucaaaccuuucuugaacuga

SEQ ID NO: 27857 - DNA, 21 bp, Homo sapiens
tatggctccatgacagaagct

SEQ ID NO: 27858 - RNA, 21 nt, RNAi
uggcuccaugacagaagcuuu

SEQ ID NO: 27859 - RNA, 21 nt, RNAi
uuaccgagguacugucuucga

SEQ ID NO: 27860 - DNA, 21 bp, Homo sapiens
tactatgatcggattattgac

SEQ ID NO: 27861 - RNA, 21 nt, RNAi
cuaugaucggauuauugacuu

SEQ ID NO: 27862 - RNA, 21 nt, RNAi
uugauacuagccuaauaacug

SEQ ID NO: 27863 - DNA, 21 bp, Homo sapiens
tatgatcggattattgaccgg

SEQ ID NO: 27864 - RNA, 21 nt, RNAi
ugaucggauuauugaccgguu

SEQ ID NO: 27865 - RNA, 21 nt, RNAi
uuacuagccuaauaacuggcc

SEQ ID NO: 27866 - DNA, 21 bp, Homo sapiens
tattgaccggaccaatacaac

SEQ ID NO: 27867 - RNA, 21 nt, RNAi
uugaccggaccaauacaacuu

SEQ ID NO: 27868 - RNA, 21 nt, RNAi
uuaacuggccugguuauguug

SEQ ID NO: 27869 - DNA, 21 bp, Homo sapiens
taatggaatattgtgaaggag

SEQ ID NO: 27870 - RNA, 21 nt, RNAi
auggaauauugugaaggaguu

SEQ ID NO: 27871 - RNA, 21 nt, RNAi
uuuaccuuauaacacuuccuc

SEQ ID NO: 27872 - DNA, 21 bp, Homo sapiens
tagatgaagagtttgttcttc

SEQ ID NO: 27873 - RNA, 21 nt, RNAi
gaugaagaguuuguucuucuu

SEQ ID NO: 27874 - RNA, 21 nt, RNAi
uucuacuucucaaacaagaag

SEQ ID NO: 27875 - DNA, 21 bp, Homo sapiens
tattaaaccatgacacgagtt

SEQ ID NO: 27876 - RNA, 21 nt, RNAi
uuaaaccaugacacgaguuuu

SEQ ID NO: 27877 - RNA, 21 nt, RNAi
uuaauuugguacugugcucaa

SEQ ID NO: 27878 - DNA, 21 bp, Homo sapiens
tattacatgtctcctgaacaa

SEQ ID NO: 27879 - RNA, 21 nt, RNAi
uuacaugucuccugaacaauu

SEQ ID NO: 27880 - RNA, 21 nt, RNAi
uuaauguacagaggacuuguu

SEQ ID NO: 27881 - DNA, 21 bp, Homo sapiens
tacatgtctcctgaacaaatg

SEQ ID NO: 27882 - RNA, 21 nt, RNAi
caugucuccugaacaaauguu

SEQ ID NO: 27883 - RNA, 21 nt, RNAi
uuguacagaggacuuguuuac

SEQ ID NO: 27884 - DNA, 21 bp, Homo sapiens
tatgtgcattaatgcctccat

SEQ ID NO: 27885 - RNA, 21 nt, RNAi
ugugcauuaaugccuccauuu

SEQ ID NO: 27886 - RNA, 21 nt, RNAi
uuacacguaauuacggaggua

SEQ ID NO: 27887 - DNA, 21 bp, Homo sapiens
taatgcctccatttacagctt

SEQ ID NO: 27888 - RNA, 21 nt, RNAi
augccuccauuuacagcuuuu

SEQ ID NO: 27889 - RNA, 21 nt, RNAi
uuuacggagguaaaugucgaa

SEQ ID NO: 27890 - DNA, 21 bp, Homo sapiens
tagccagaaagaactcgctgg

SEQ ID NO: 27891 - RNA, 21 nt, RNAi
gccagaaagaacucgcugguu

SEQ ID NO: 27892 - RNA, 21 nt, RNAi
uucggucuuucuugagcgacc

SEQ ID NO: 27893 - DNA, 21 bp, Homo sapiens
taccgttactctgatgaattg

SEQ ID NO: 27894 - RNA, 21 nt, RNAi
ccguuacucugaugaauuguu

SEQ ID NO: 27895 - RNA, 21 nt, RNAi
uuggcaaugagacuacuuaac

SEQ ID NO: 27896 - DNA, 21 bp, Homo sapiens
taaaggattaccatcgacctt

SEQ ID NO: 27897 - RNA, 21 nt, RNAi
aaggauuaccaucgaccuuuu

SEQ ID NO: 27898 - RNA, 21 nt, RNAi
uuuuccuaaugguagcuggaa

SEQ ID NO: 27899 - DNA, 21 bp, Homo sapiens
taccatcgaccttctgttgaa

SEQ ID NO: 27900 - RNA, 21 nt, RNAi
ccaucgaccuucuguugaauu

SEQ ID NO: 27901 - RNA, 21 nt, RNAi
uugguagcuggaagacaacuu

SEQ ID NO: 27902 - DNA, 21 bp, Homo sapiens
taatagcagatttggttgcag

SEQ ID NO: 27903 - RNA, 21 nt, RNAi
auagcagauuugguugcaguu

SEQ ID NO: 27904 - RNA, 21 nt, RNAi
uuuaucgucuaaaccaacguc

SEQ ID NO: 27905 - DNA, 21 bp, Homo sapiens
tagcagatttggttgcagacg

SEQ ID NO: 27906 - RNA, 21 nt, RNAi
gcagauuugguugcagacguu

SEQ ID NO: 27907 - RNA, 21 nt, RNAi
uucgucuaaaccaacgucugc

SEQ ID NO: 27908 - DNA, 21 bp, Homo sapiens
tattgagtgagctgaaactga

SEQ ID NO: 27909 - RNA, 21 nt, RNAi
uugagugagcugaaacugauu

SEQ ID NO: 27910 - RNA, 21 nt, RNAi
uuaacucacucgacuuugacu

SEQ ID NO: 27911 - DNA, 21 bp, Homo sapiens
tacaggagcgagagcgagctc

SEQ ID NO: 27912 - RNA, 21 nt, RNAi
caggagcgagagcgagcucuu

SEQ ID NO: 27913 - RNA, 21 nt, RNAi
uuguccucgcucucgcucgag

SEQ ID NO: 27914 - DNA, 21 bp, Homo sapiens
tagcagaggacaaactggcta

SEQ ID NO: 27915 - RNA, 21 nt, RNAi
gcagaggacaaacuggcuauu

SEQ ID NO: 27916 - RNA, 21 nt, RNAi
uucgucuccuguuugaccgau

SEQ ID NO: 27917 - DNA, 21 bp, Homo sapiens
tacagcttgctaaaggaacgg

SEQ ID NO: 27918 - RNA, 21 nt, RNAi
cagcuugcuaaaggaacgguu

SEQ ID NO: 27919 - RNA, 21 nt, RNAi
uugucgaacgauuuccuugcc

SEQ ID NO: 27920 - DNA, 21 bp, Homo sapiens
taaaggaacggaagttcctgt

SEQ ID NO: 27921 - RNA, 21 nt, RNAi
aaggaacggaaguuccuguuu

SEQ ID NO: 27922 - RNA, 21 nt, RNAi
uuuuccuugccuucaaggaca

SEQ ID NO: 27923 - DNA, 21 bp, Homo sapiens
taatcttccatcctcagtaat

SEQ ID NO: 27924 - RNA, 21 nt, RNAi
aucuuccauccucaguaauuu

SEQ ID NO: 27925 - RNA, 21 nt, RNAi
uuuagaagguaggagucauua

SEQ ID NO: 27926 - DNA, 21 bp, Homo sapiens
taaagagaacatcatgaggag

SEQ ID NO: 27927 - RNA, 21 nt, RNAi
aagagaacaucaugaggaguu

SEQ ID NO: 27928 - RNA, 21 nt, RNAi
uuuucucuuguaguacuccuc

SEQ ID NO: 27929 - DNA, 21 bp, Homo sapiens
taagtccaagtgcaaggacct

SEQ ID NO: 27930 - RNA, 21 nt, RNAi
aguccaagugcaaggaccuuu

SEQ ID NO: 27931 - RNA, 21 nt, RNAi
uuucagguucacguuccugga

SEQ ID NO: 27932 - DNA, 21 bp, Homo sapiens
tagccaggtagagagacacag

SEQ ID NO: 27933 - RNA, 21 nt, RNAi
gccagguagagagacacaguu

SEQ ID NO: 27934 - RNA, 21 nt, RNAi
uucgguccaucucucuguguc

SEQ ID NO: 27935 - DNA, 21 bp, Homo sapiens
tagagagacacagagctgtgt

SEQ ID NO: 27936 - RNA, 21 nt, RNAi
gagagacacagagcuguguuu

SEQ ID NO: 27937 - RNA, 21 nt, RNAi
uucucucugugucucgacaca

SEQ ID NO: 27938 - DNA, 21 bp, Homo sapiens
taccaacctttaaagactgat

SEQ ID NO: 27939 - RNA, 21 nt, RNAi
ccaaccuuuaaagacugauuu

SEQ ID NO: 27940 - RNA, 21 nt, RNAi
uugguuggaaauuucugacua

SEQ ID NO: 27941 - DNA, 21 bp, Homo sapiens
tattcaaatgctgtagtgttg

SEQ ID NO: 27942 - RNA, 21 nt, RNAi
uucaaaugcuguaguguuguu

SEQ ID NO: 27943 - RNA, 21 nt, RNAi
uuaaguuuacgacaucacaac

SEQ ID NO: 27944 - DNA, 21 bp, Homo sapiens
tagtacacatgatatttcgga

SEQ ID NO: 27945 - RNA, 21 nt, RNAi
guacacaugauauuucggauu

SEQ ID NO: 27946 - RNA, 21 nt, RNAi
uucauguguacuauaaagccu

SEQ ID NO: 27947 - DNA, 21 bp, Homo sapiens
tactgttcttcagcaactatt

SEQ ID NO: 27948 - RNA, 21 nt, RNAi
cuguucuucagcaacuauuuu

SEQ ID NO: 27949 - RNA, 21 nt, RNAi
uugacaagaagucguugauaa

SEQ ID NO: 27950 - DNA, 21 bp, Homo sapiens
taatcctgtgtgtgattacta

SEQ ID NO: 27951 - RNA, 21 nt, RNAi
auccugugugugauuacuauu

SEQ ID NO: 27952 - RNA, 21 nt, RNAi
uuuaggacacacacuaaugau

SEQ ID NO: 27953 - DNA, 21 bp, Homo sapiens
tactagtaggaacatgagatg

SEQ ID NO: 27954 - RNA, 21 nt, RNAi
cuaguaggaacaugagauguu

SEQ ID NO: 27955 - RNA, 21 nt, RNAi
uugaucauccuuguacucuac

SEQ ID NO: 27956 - DNA, 21 bp, Homo sapiens
tagtaggaacatgagatgtga

SEQ ID NO: 27957 - RNA, 21 nt, RNAi
guaggaacaugagaugugauu

SEQ ID NO: 27958 - RNA, 21 nt, RNAi
uucauccuuguacucuacacu

SEQ ID NO: 27959 - DNA, 21 bp, Homo sapiens
taggaacatgagatgtgacat

SEQ ID NO: 27960 - RNA, 21 nt, RNAi
ggaacaugagaugugacauuu

SEQ ID NO: 27961 - RNA, 21 nt, RNAi
uuccuuguacucuacacugua

SEQ ID NO: 27962 - DNA, 21 bp, Homo sapiens
tatttatgcaggaagagtagc

SEQ ID NO: 27963 - RNA, 21 nt, RNAi
uuuaugcaggaagaguagcuu

SEQ ID NO: 27964 - RNA, 21 nt, RNAi
uuaaauacguccuucucaucg

SEQ ID NO: 27965 - DNA, 21 bp, Homo sapiens
tatgcaggaagagtagcactc

SEQ ID NO: 27966 - RNA, 21 nt, RNAi
ugcaggaagaguagcacucuu

SEQ ID NO: 27967 - RNA, 21 nt, RNAi
uuacguccuucucaucgugag

SEQ ID NO: 27968 - DNA, 21 bp, Homo sapiens
taaatgactgagtggtatgct

SEQ ID NO: 27969 - RNA, 21 nt, RNAi
aaugacugagugguaugcuuu

SEQ ID NO: 27970 - RNA, 21 nt, RNAi
uuuuacugacucaccauacga

SEQ ID NO: 27971 - DNA, 21 bp, Homo sapiens
tatgcttacaattgtcatgtc

SEQ ID NO: 27972 - RNA, 21 nt, RNAi
ugcuuacaauugucaugucuu

SEQ ID NO: 27973 - RNA, 21 nt, RNAi
uuacgaauguuaacaguacag

SEQ ID NO: 27974 - DNA, 21 bp, Homo sapiens
taataccatgacatcttgctt

SEQ ID NO: 27975 - RNA, 21 nt, RNAi
auaccaugacaucuugcuuuu

SEQ ID NO: 27976 - RNA, 21 nt, RNAi
uuuaugguacuguagaacgaa

SEQ ID NO: 27977 - DNA, 21 bp, Homo sapiens
taccatgacatcttgcttata

SEQ ID NO: 27978 - RNA, 21 nt, RNAi
ccaugacaucuugcuuauauu

SEQ ID NO: 27979 - RNA, 21 nt, RNAi
uugguacuguagaacgaauau

SEQ ID NO: 27980 - DNA, 21 bp, Homo sapiens
tattccattgctctgtagttc

SEQ ID NO: 27981 - RNA, 21 nt, RNAi
uuccauugcucuguaguucuu

SEQ ID NO: 27982 - RNA, 21 nt, RNAi
uuaagguaacgagacaucaag

SEQ ID NO: 27983 - DNA, 21 bp, Homo sapiens
taacagaatatgagctgtctg

SEQ ID NO: 27984 - RNA, 21 nt, RNAi
acagaauaugagcugucuguu

SEQ ID NO: 27985 - RNA, 21 nt, RNAi
uuugucuuauacucgacagac

SEQ ID NO: 27986 - DNA, 21 bp, Homo sapiens
tatgagctgtctgtcatttac

SEQ ID NO: 27987 - RNA, 21 nt, RNAi
ugagcugucugucauuuacuu

SEQ ID NO: 27988 - RNA, 21 nt, RNAi
uuacucgacagacaguaaaug

SEQ ID NO: 27989 - DNA, 21 bp, Homo sapiens
aagagtgatggcaagatatta

SEQ ID NO: 27990 - RNA, 21 nt, RNAi
gagugauggcaagauauuauu

SEQ ID NO: 27991 - RNA, 21 nt, RNAi
uucucacuaccguucuauaau

SEQ ID NO: 27992 - DNA, 21 bp, Homo sapiens
aaagaacttgactatggctcc

SEQ ID NO: 27993 - RNA, 21 nt, RNAi
agaacuugacuauggcuccuu

SEQ ID NO: 27994 - RNA, 21 nt, RNAi
uuucuugaacugauaccgagg

SEQ ID NO: 27995 - DNA, 21 bp, Homo sapiens
aacttgactatggctccatga

SEQ ID NO: 27996 - RNA, 21 nt, RNAi
cuugacuauggcuccaugauu

SEQ ID NO: 27997 - RNA, 21 nt, RNAi
uugaacugauaccgagguacu

SEQ ID NO: 27998 - DNA, 21 bp, Homo sapiens
aagtgaatttgcttcgtgaac

SEQ ID NO: 27999 - RNA, 21 nt, RNAi
gugaauuugcuucgugaacuu

SEQ ID NO: 28000 - RNA, 21 nt, RNAi
uucacuuaaacgaagcacuug

SEQ ID NO: 28001 - DNA, 21 bp, Homo sapiens
aatttgcttcgtgaactgaaa

SEQ ID NO: 28002 - RNA, 21 nt, RNAi
uuugcuucgugaacugaaauu

SEQ ID NO: 28003 - RNA, 21 nt, RNAi
uuaaacgaagcacuugacuuu

SEQ ID NO: 28004 - DNA, 21 bp, Homo sapiens
aaacatcgttcgttactatga

SEQ ID NO: 28005 - RNA, 21 nt, RNAi
acaucguucguuacuaugauu

SEQ ID NO: 28006 - RNA, 21 nt, RNAi
uuuguagcaagcaaugauacu

SEQ ID NO: 28007 - DNA, 21 bp, Homo sapiens
aacatcgttcgttactatgat

SEQ ID NO: 28008 - RNA, 21 nt, RNAi
caucguucguuacuaugauuu

SEQ ID NO: 28009 - RNA, 21 nt, RNAi
uuguagcaagcaaugauacua

SEQ ID NO: 28010 - DNA, 21 bp, Homo sapiens
aaggaatgccacagacgaagt

SEQ ID NO: 28011 - RNA, 21 nt, RNAi
ggaaugccacagacgaaguuu

SEQ ID NO: 28012 - RNA, 21 nt, RNAi
uuccuuacggugucugcuuca

SEQ ID NO: 28013 - DNA, 21 bp, Homo sapiens
aatgccacagacgaagtgatg

SEQ ID NO: 28014 - RNA, 21 nt, RNAi
ugccacagacgaagugauguu

SEQ ID NO: 28015 - RNA, 21 nt, RNAi
uuacggugucugcuucacuac

SEQ ID NO: 28016 - DNA, 21 bp, Homo sapiens
aagtgatggtggtcataccgt

SEQ ID NO: 28017 - RNA, 21 nt, RNAi
gugaugguggucauaccguuu

SEQ ID NO: 28018 - RNA, 21 nt, RNAi
uucacuaccaccaguauggca

SEQ ID NO: 28019 - DNA, 21 bp, Homo sapiens
aacgtcaagcttggagacttt

SEQ ID NO: 28020 - RNA, 21 nt, RNAi
cgucaagcuuggagacuuuuu

SEQ ID NO: 28021 - RNA, 21 nt, RNAi
uugcaguucgaaccucugaaa

SEQ ID NO: 28022 - DNA, 21 bp, Homo sapiens
aacaaatgaatcgcatgtcct

SEQ ID NO: 28023 - RNA, 21 nt, RNAi
caaaugaaucgcauguccuuu

SEQ ID NO: 28024 - RNA, 21 nt, RNAi
uuguuuacuuagcguacagga

SEQ ID NO: 28025 - DNA, 21 bp, Homo sapiens
aattccataccgttactctga

SEQ ID NO: 28026 - RNA, 21 nt, RNAi
uuccauaccguuacucugauu

SEQ ID NO: 28027 - RNA, 21 nt, RNAi
uuaagguauggcaaugagacu

SEQ ID NO: 28028 - DNA, 21 bp, Homo sapiens
aaaggattaccatcgaccttc

SEQ ID NO: 28029 - RNA, 21 nt, RNAi
aggauuaccaucgaccuucuu

SEQ ID NO: 28030 - RNA, 21 nt, RNAi
uuuccuaaugguagcuggaag

SEQ ID NO: 28031 - DNA, 21 bp, Homo sapiens
aaggattaccatcgaccttct

SEQ ID NO: 28032 - RNA, 21 nt, RNAi
ggauuaccaucgaccuucuuu

SEQ ID NO: 28033 - RNA, 21 nt, RNAi
uuccuaaugguagcuggaaga

SEQ ID NO: 28034 - DNA, 21 bp, Homo sapiens
aaattcagttacaggagcgag

SEQ ID NO: 28035 - RNA, 21 nt, RNAi
auucaguuacaggagcgaguu

SEQ ID NO: 28036 - RNA, 21 nt, RNAi
uuuaagucaauguccucgcuc

SEQ ID NO: 28037 - DNA, 21 bp, Homo sapiens
aattcagttacaggagcgaga

SEQ ID NO: 28038 - RNA, 21 nt, RNAi
uucaguuacaggagcgagauu

SEQ ID NO: 28039 - RNA, 21 nt, RNAi
uuaagucaauguccucgcucu

SEQ ID NO: 28040 - DNA, 21 bp, Homo sapiens
aatctgttgaagaactacagc

SEQ ID NO: 28041 - RNA, 21 nt, RNAi
ucuguugaagaacuacagcuu

SEQ ID NO: 28042 - RNA, 21 nt, RNAi
uuagacaacuucuugaugucg

SEQ ID NO: 28043 - DNA, 21 bp, Homo sapiens
aactacagcttgctaaaggaa

SEQ ID NO: 28044 - RNA, 21 nt, RNAi
cuacagcuugcuaaaggaauu

SEQ ID NO: 28045 - RNA, 21 nt, RNAi
uugaugucgaacgauuuccuu

SEQ ID NO: 28046 - DNA, 21 bp, Homo sapiens
caaacatcgttcgttactatg

SEQ ID NO: 28047 - RNA, 21 nt, RNAi
aacaucguucguuacuauguu

SEQ ID NO: 28048 - RNA, 21 nt, RNAi
uuuuguagcaagcaaugauac

SEQ ID NO: 28049 - DNA, 21 bp, Homo sapiens
cacagacgaagtgatggtggt

SEQ ID NO: 28050 - RNA, 21 nt, RNAi
cagacgaagugauggugguuu

SEQ ID NO: 28051 - RNA, 21 nt, RNAi
uugucugcuucacuaccacca

SEQ ID NO: 28052 - DNA, 21 bp, Homo sapiens
catgtctcctgaacaaatgaa

SEQ ID NO: 28053 - RNA, 21 nt, RNAi
ugucuccugaacaaaugaauu

SEQ ID NO: 28054 - RNA, 21 nt, RNAi
uuacagaggacuuguuuacuu

SEQ ID NO: 28055 - DNA, 21 bp, Homo sapiens
caaatgaatcgcatgtcctac

SEQ ID NO: 28056 - RNA, 21 nt, RNAi
aaugaaucgcauguccuacuu

SEQ ID NO: 28057 - RNA, 21 nt, RNAi
uuuuacuuagcguacaggaug

SEQ ID NO: 28058 - DNA, 21 bp, Homo sapiens
caggcgaattccataccgtta

SEQ ID NO: 28059 - RNA, 21 nt, RNAi
ggcgaauuccauaccguuauu

SEQ ID NO: 28060 - RNA, 21 nt, RNAi
uuccgcuuaagguauggcaau

SEQ ID NO: 28061 - DNA, 21 bp, Homo sapiens
cataccgttactctgatgaat

SEQ ID NO: 28062 - RNA, 21 nt, RNAi
uaccguuacucugaugaauuu

SEQ ID NO: 28063 - RNA, 21 nt, RNAi
uuauggcaaugagacuacuua

SEQ ID NO: 28064 - DNA, 21 bp, Homo sapiens
cagcttgctaaaggaacggaa

SEQ ID NO: 28065 - RNA, 21 nt, RNAi
gcuugcuaaaggaacggaauu

SEQ ID NO: 28066 - RNA, 21 nt, RNAi
uucgaacgauuuccuugccuu

SEQ ID NO: 28067 - DNA, 21 bp, Homo sapiens
cagctcacatctaagtccaag

SEQ ID NO: 28068 - RNA, 21 nt, RNAi
gcucacaucuaaguccaaguu

SEQ ID NO: 28069 - RNA, 21 nt, RNAi
uucgaguguagauucagguuc

SEQ ID NO: 28070 - DNA, 21 bp, Homo sapiens
catctaagtccaagtgcaagg

SEQ ID NO: 28071 - RNA, 21 nt, RNAi
ucuaaguccaagugcaagguu

SEQ ID NO: 28072 - RNA, 21 nt, RNAi
uuagauucagguucacguucc

SEQ ID NO: 28073 - DNA, 21 bp, Homo sapiens
gaggaagagtgatggcaagat

SEQ ID NO: 28074 - RNA, 21 nt, RNAi
ggaagagugauggcaagauuu

SEQ ID NO: 28075 - RNA, 21 nt, RNAi
uuccuucucacuaccguucua

SEQ ID NO: 28076 - DNA, 21 bp, Homo sapiens
gaagagtgatggcaagatatt

SEQ ID NO: 28077 - RNA, 21 nt, RNAi
agagugauggcaagauauuuu

SEQ ID NO: 28078 - RNA, 21 nt, RNAi
uuucucacuaccguucuauaa

SEQ ID NO: 28079 - DNA, 21 bp, Homo sapiens
gagtgatggcaagatattagt

SEQ ID NO: 28080 - RNA, 21 nt, RNAi
gugauggcaagauauuaguuu

SEQ ID NO: 28081 - RNA, 21 nt, RNAi
uucacuaccguucuauaauca

SEQ ID NO: 28082 - DNA, 21 bp, Homo sapiens
gaaagaacttgactatggctc

SEQ ID NO: 28083 - RNA, 21 nt, RNAi
aagaacuugacuauggcucuu

SEQ ID NO: 28084 - RNA, 21 nt, RNAi
uuuucuugaacugauaccgag

SEQ ID NO: 28085 - DNA, 21 bp, Homo sapiens
gaacttgactatggctccatg

SEQ ID NO: 28086 - RNA, 21 nt, RNAi
acuugacuauggcuccauguu

SEQ ID NO: 28087 - RNA, 21 nt, RNAi
uuugaacugauaccgagguac

SEQ ID NO: 28088 - DNA, 21 bp, Homo sapiens
gactatggctccatgacagaa

SEQ ID NO: 28089 - RNA, 21 nt, RNAi
cuauggcuccaugacagaauu

SEQ ID NO: 28090 - RNA, 21 nt, RNAi
uugauaccgagguacugucuu

SEQ ID NO: 28091 - DNA, 21 bp, Homo sapiens
gaagtgaatttgcttcgtgaa

SEQ ID NO: 28092 - RNA, 21 nt, RNAi
agugaauuugcuucgugaauu

SEQ ID NO: 28093 - RNA, 21 nt, RNAi
uuucacuuaaacgaagcacuu

SEQ ID NO: 28094 - DNA, 21 bp, Homo sapiens
gaatttgcttcgtgaactgaa

SEQ ID NO: 28095 - RNA, 21 nt, RNAi
auuugcuucgugaacugaauu

SEQ ID NO: 28096 - RNA, 21 nt, RNAi
uuuaaacgaagcacuugacuu

SEQ ID NO: 28097 - DNA, 21 bp, Homo sapiens
gaaggaatgccacagacgaag

SEQ ID NO: 28098 - RNA, 21 nt, RNAi
aggaaugccacagacgaaguu

SEQ ID NO: 28099 - RNA, 21 nt, RNAi
uuuccuuacggugucugcuuc

SEQ ID NO: 28100 - DNA, 21 bp, Homo sapiens
gaatgccacagacgaagtgat

SEQ ID NO: 28101 - RNA, 21 nt, RNAi
augccacagacgaagugauuu

SEQ ID NO: 28102 - RNA, 21 nt, RNAi
uuuacggugucugcuucacua

SEQ ID NO: 28103 - DNA, 21 bp, Homo sapiens
gaagtgatggtggtcataccg

SEQ ID NO: 28104 - RNA, 21 nt, RNAi
agugaugguggucauaccguu

SEQ ID NO: 28105 - RNA, 21 nt, RNAi
uuucacuaccaccaguauggc

SEQ ID NO: 28106 - DNA, 21 bp, Homo sapiens
gaacaaatgaatcgcatgtcc

SEQ ID NO: 28107 - RNA, 21 nt, RNAi
acaaaugaaucgcauguccuu

SEQ ID NO: 28108 - RNA, 21 nt, RNAi
uuuguuuacuuagcguacagg

SEQ ID NO: 28109 - DNA, 21 bp, Homo sapiens
gagaaggcaaattcaggcgaa

SEQ ID NO: 28110 - RNA, 21 nt, RNAi
gaaggcaaauucaggcgaauu

SEQ ID NO: 28111 - RNA, 21 nt, RNAi
uucuuccguuuaaguccgcuu

SEQ ID NO: 28112 - DNA, 21 bp, Homo sapiens
gaattccataccgttactctg

SEQ ID NO: 28113 - RNA, 21 nt, RNAi
auuccauaccguuacucuguu

SEQ ID NO: 28114 - RNA, 21 nt, RNAi
uuuaagguauggcaaugagac

SEQ ID NO: 28115 - DNA, 21 bp, Homo sapiens
gattaccatcgaccttctgtt

SEQ ID NO: 28116 - RNA, 21 nt, RNAi
uuaccaucgaccuucuguuuu

SEQ ID NO: 28117 - RNA, 21 nt, RNAi
uuaaugguagcuggaagacaa

SEQ ID NO: 28118 - DNA, 21 bp, Homo sapiens
gatttggttgcagacgagcaa

SEQ ID NO: 28119 - RNA, 21 nt, RNAi
uuugguugcagacgagcaauu

SEQ ID NO: 28120 - RNA, 21 nt, RNAi
uuaaaccaacgucugcucguu

SEQ ID NO: 28121 - DNA, 21 bp, Homo sapiens
gaaattcagttacaggagcga

SEQ ID NO: 28122 - RNA, 21 nt, RNAi
aauucaguuacaggagcgauu

SEQ ID NO: 28123 - RNA, 21 nt, RNAi
uuuuaagucaauguccucgcu

SEQ ID NO: 28124 - DNA, 21 bp, Homo sapiens
gagcgagctctcaaagcaaga

SEQ ID NO: 28125 - RNA, 21 nt, RNAi
gcgagcucucaaagcaagauu

SEQ ID NO: 28126 - RNA, 21 nt, RNAi
uucgcucgagaguuucguucu

SEQ ID NO: 28127 - DNA, 21 bp, Homo sapiens
gagctttgtgttcgtgagaga

SEQ ID NO: 28128 - RNA, 21 nt, RNAi
gcuuuguguucgugagagauu

SEQ ID NO: 28129 - RNA, 21 nt, RNAi
uucgaaacacaagcacucucu

SEQ ID NO: 28130 - DNA, 21 bp, Homo sapiens
gagagactagcagaggacaaa

SEQ ID NO: 28131 - RNA, 21 nt, RNAi
gagacuagcagaggacaaauu

SEQ ID NO: 28132 - RNA, 21 nt, RNAi
uucucugaucgucuccuguuu

SEQ ID NO: 28133 - DNA, 21 bp, Homo sapiens
gaactacagcttgctaaagga

SEQ ID NO: 28134 - RNA, 21 nt, RNAi
acuacagcuugcuaaaggauu

SEQ ID NO: 28135 - RNA, 21 nt, RNAi
uuugaugucgaacgauuuccu

SEQ ID NO: 28136 - DNA, 21 bp, Homo sapiens
gaacggaagttcctgtctctg

SEQ ID NO: 28137 - RNA, 21 nt, RNAi
acggaaguuccugucucuguu

SEQ ID NO: 28138 - RNA, 21 nt, RNAi
uuugccuucaaggacagagac

SEQ ID NO: 28139 - DNA, 21 bp, Homo sapiens
gagaacatcatgaggagtgag

SEQ ID NO: 28140 - RNA, 21 nt, RNAi
gaacaucaugaggagugaguu

SEQ ID NO: 28141 - RNA, 21 nt, RNAi
uucuuguaguacuccucacuc

SEQ ID NO: 28142 - DNA, 21 bp, Homo sapiens
gaattctgagagtcagctcac

SEQ ID NO: 28143 - RNA, 21 nt, RNAi
auucugagagucagcucacuu

SEQ ID NO: 28144 - RNA, 21 nt, RNAi
uuuaagacucucagucgagug

SEQ ID NO: 28145 - DNA, 21 bp, Homo sapiens
gagagtcagctcacatctaag

SEQ ID NO: 28146 - RNA, 21 nt, RNAi
gagucagcucacaucuaaguu

SEQ ID NO: 28147 - RNA, 21 nt, RNAi
uucucagucgaguguagauuc

SEQ ID NO: 28148 - DNA, 21 bp, Homo sapiens
gagtcagctcacatctaagtc

SEQ ID NO: 28149 - RNA, 21 nt, RNAi
gucagcucacaucuaagucuu

SEQ ID NO: 28150 - RNA, 21 nt, RNAi
uucagucgaguguagauucag

SEQ ID NO: 28151 - DNA, 21 bp, Homo sapiens
tactatgatcggattattgac

SEQ ID NO: 28152 - RNA, 21 nt, RNAi
cuaugaucggauuauugacuu

SEQ ID NO: 28153 - RNA, 21 nt, RNAi
uugauacuagccuaauaacug

SEQ ID NO: 28154 - DNA, 21 bp, Homo sapiens
tattaaaccatgacacgagtt

SEQ ID NO: 28155 - RNA, 21 nt, RNAi
uuaaaccaugacacgaguuuu

SEQ ID NO: 28156 - RNA, 21 nt, RNAi
uuaauuugguacugugcucaa

SEQ ID NO: 28157 - DNA, 21 bp, Homo sapiens
taaaggattaccatcgacctt

SEQ ID NO: 28158 - RNA, 21 nt, RNAi
aaggauuaccaucgaccuuuu

SEQ ID NO: 28159 - RNA, 21 nt, RNAi
uuuuccuaaugguagcuggaa

SEQ ID NO: 28160 - DNA, 21 bp, Homo sapiens
tacagcttgctaaaggaacgg

SEQ ID NO: 28161 - RNA, 21 nt, RNAi
cagcuugcuaaaggaacgguu

SEQ ID NO: 28162 - RNA, 21 nt, RNAi
uugucgaacgauuuccuugcc

SEQ ID NO: 28163 - DNA, 21 bp, Homo sapiens
aacttcgagcaccgcgtgcac

SEQ ID NO: 28164 - RNA, 21 nt, RNAi
cuucgagcaccgcgugcacuu

SEQ ID NO: 28165 - RNA, 21 nt, RNAi
uugaagcucguggcgcacgug

SEQ ID NO: 28166 - DNA, 21 bp, Homo sapiens
aacatgtcggtgacacgctcc

SEQ ID NO: 28167 - RNA, 21 nt, RNAi
caugucggugacacgcuccuu

SEQ ID NO: 28168 - RNA, 21 nt, RNAi
uuguacagccacugugcgagg

SEQ ID NO: 28169 - DNA, 21 bp, Homo sapiens
aacttcatcaagattggcgag

SEQ ID NO: 28170 - RNA, 21 nt, RNAi
cuucaucaagauuggcgaguu

SEQ ID NO: 28171 - RNA, 21 nt, RNAi
uugaaguaguucuaaccgcuc

SEQ ID NO: 28172 - DNA, 21 bp, Homo sapiens
aagctggtggccgtcaagaag

SEQ ID NO: 28173 - RNA, 21 nt, RNAi
gcugguggccgucaagaaguu

SEQ ID NO: 28174 - RNA, 21 nt, RNAi
uucgaccaccggcaguucuuc

SEQ ID NO: 28175 - DNA, 21 bp, Homo sapiens
aagaagatggacctgcgcaag

SEQ ID NO: 28176 - RNA, 21 nt, RNAi
gaagauggaccugcgcaaguu

SEQ ID NO: 28177 - RNA, 21 nt, RNAi
uucuucuaccuggacgcguuc

SEQ ID NO: 28178 - DNA, 21 bp, Homo sapiens
aagatggacctgcgcaagcag

SEQ ID NO: 28179 - RNA, 21 nt, RNAi
gauggaccugcgcaagcaguu

SEQ ID NO: 28180 - RNA, 21 nt, RNAi
uucuaccuggacgcguucguc

SEQ ID NO: 28181 - DNA, 21 bp, Homo sapiens
aacgaggtggtaatcatgagg

SEQ ID NO: 28182 - RNA, 21 nt, RNAi
cgaggugguaaucaugagguu

SEQ ID NO: 28183 - RNA, 21 nt, RNAi
uugcuccaccauuaguacucc

SEQ ID NO: 28184 - DNA, 21 bp, Homo sapiens
aatgtggtggagatgtacaac

SEQ ID NO: 28185 - RNA, 21 nt, RNAi
ugugguggagauguacaacuu

SEQ ID NO: 28186 - RNA, 21 nt, RNAi
uuacaccaccucuacauguug

SEQ ID NO: 28187 - DNA, 21 bp, Homo sapiens
aagagcgactcgatcctgctg

SEQ ID NO: 28188 - RNA, 21 nt, RNAi
gagcgacucgauccugcuguu

SEQ ID NO: 28189 - RNA, 21 nt, RNAi
uucucgcugagcuaggacgac

SEQ ID NO: 28190 - DNA, 21 bp, Homo sapiens
aaggaagtcgctggtcggcac

SEQ ID NO: 28191 - RNA, 21 nt, RNAi
ggaagucgcuggucggcacuu

SEQ ID NO: 28192 - RNA, 21 nt, RNAi
uuccuucagcgaccagccgug

SEQ ID NO: 28193 - DNA, 21 bp, Homo sapiens
aatggtgattgagatggtgga

SEQ ID NO: 28194 - RNA, 21 nt, RNAi
uggugauugagaugguggauu

SEQ ID NO: 28195 - RNA, 21 nt, RNAi
uuaccacuaacucuaccaccu

SEQ ID NO: 28196 - DNA, 21 bp, Homo sapiens
aaagccatgaagatgattcgg

SEQ ID NO: 28197 - RNA, 21 nt, RNAi
agccaugaagaugauucgguu

SEQ ID NO: 28198 - RNA, 21 nt, RNAi
uuucgguacuucuacuaagcc

SEQ ID NO: 28199 - DNA, 21 bp, Homo sapiens
aagaacctgcacaaggtgtcg

SEQ ID NO: 28200 - RNA, 21 nt, RNAi
gaaccugcacaaggugucguu

SEQ ID NO: 28201 - RNA, 21 nt, RNAi
uucuuggacguguuccacagc

SEQ ID NO: 28202 - DNA, 21 bp, Homo sapiens
aacctgcacaaggtgtcgcca

SEQ ID NO: 28203 - RNA, 21 nt, RNAi
ccugcacaaggugucgccauu

SEQ ID NO: 28204 - RNA, 21 nt, RNAi
uuggacguguuccacagcggu

SEQ ID NO: 28205 - DNA, 21 bp, Homo sapiens
aacactaagaggtgaacatgt

SEQ ID NO: 28206 - RNA, 21 nt, RNAi
cacuaagaggugaacauguuu

SEQ ID NO: 28207 - RNA, 21 nt, RNAi
uugugauucuccacuuguaca

SEQ ID NO: 28208 - DNA, 21 bp, Homo sapiens
aagaggtgaacatgtatgagt

SEQ ID NO: 28209 - RNA, 21 nt, RNAi
gaggugaacauguaugaguuu

SEQ ID NO: 28210 - RNA, 21 nt, RNAi
uucuccacuuguacauacuca

SEQ ID NO: 28211 - DNA, 21 bp, Homo sapiens
aacatgtatgagtgtgtgcac

SEQ ID NO: 28212 - RNA, 21 nt, RNAi
cauguaugagugugugcacuu

SEQ ID NO: 28213 - RNA, 21 nt, RNAi
uuguacauacucacacacgug

SEQ ID NO: 28214 - DNA, 21 bp, Homo sapiens
aatgtccgaagagtggccttt

SEQ ID NO: 28215 - RNA, 21 nt, RNAi
uguccgaagaguggccuuuuu

SEQ ID NO: 28216 - RNA, 21 nt, RNAi
uuacaggcuucucaccggaaa

SEQ ID NO: 28217 - DNA, 21 bp, Homo sapiens
aaatgactactgcacctggac

SEQ ID NO: 28218 - RNA, 21 nt, RNAi
augacuacugcaccuggacuu

SEQ ID NO: 28219 - RNA, 21 nt, RNAi
uuuacugaugacguggaccug

SEQ ID NO: 28220 - DNA, 21 bp, Homo sapiens
aatgactactgcacctggaca

SEQ ID NO: 28221 - RNA, 21 nt, RNAi
ugacuacugcaccuggacauu

SEQ ID NO: 28222 - RNA, 21 nt, RNAi
uuacugaugacguggaccugu

SEQ ID NO: 28223 - DNA, 21 bp, Homo sapiens
aaccactgcctgaagaaccag

SEQ ID NO: 28224 - RNA, 21 nt, RNAi
ccacugccugaagaaccaguu

SEQ ID NO: 28225 - RNA, 21 nt, RNAi
uuggugacggacuucuugguc

SEQ ID NO: 28226 - DNA, 21 bp, Homo sapiens
cagtgtggtggaattcgtccg

SEQ ID NO: 28227 - RNA, 21 nt, RNAi
gugugguggaauucguccguu

SEQ ID NO: 28228 - RNA, 21 nt, RNAi
uucacaccaccuuaagcaggc

SEQ ID NO: 28229 - DNA, 21 bp, Homo sapiens
caacttcgagcaccgcgtgca

SEQ ID NO: 28230 - RNA, 21 nt, RNAi
acuucgagcaccgcgugcauu

SEQ ID NO: 28231 - RNA, 21 nt, RNAi
uuugaagcucguggcgcacgu

SEQ ID NO: 28232 - DNA, 21 bp, Homo sapiens
cagcacgagcagaagttcacg

SEQ ID NO: 28233 - RNA, 21 nt, RNAi
gcacgagcagaaguucacguu

SEQ ID NO: 28234 - RNA, 21 nt, RNAi
uucgugcucgucuucaagugc

SEQ ID NO: 28235 - DNA, 21 bp, Homo sapiens
cagtggcagagcctgatcgag

SEQ ID NO: 28236 - RNA, 21 nt, RNAi
guggcagagccugaucgaguu

SEQ ID NO: 28237 - RNA, 21 nt, RNAi
uucaccgucucggacuagcuc

SEQ ID NO: 28238 - DNA, 21 bp, Homo sapiens
cagagcctgatcgaggagtcg

SEQ ID NO: 28239 - RNA, 21 nt, RNAi
gagccugaucgaggagucguu

SEQ ID NO: 28240 - RNA, 21 nt, RNAi
uucucggacuagcuccucagc

SEQ ID NO: 28241 - DNA, 21 bp, Homo sapiens
cagcaaaggtgccaaagatgg

SEQ ID NO: 28242 - RNA, 21 nt, RNAi
gcaaaggugccaaagaugguu

SEQ ID NO: 28243 - RNA, 21 nt, RNAi
uucguuuccacgguuucuacc

SEQ ID NO: 28244 - DNA, 21 bp, Homo sapiens
cacgctgctgctggacgagtt

SEQ ID NO: 28245 - RNA, 21 nt, RNAi
cgcugcugcuggacgaguuuu

SEQ ID NO: 28246 - RNA, 21 nt, RNAi
uugcgacgacgaccugcucaa

SEQ ID NO: 28247 - DNA, 21 bp, Homo sapiens
catgtcggtgacacgctccaa

SEQ ID NO: 28248 - RNA, 21 nt, RNAi
ugucggugacacgcuccaauu

SEQ ID NO: 28249 - RNA, 21 nt, RNAi
uuacagccacugugcgagguu

SEQ ID NO: 28250 - DNA, 21 bp, Homo sapiens
caacttcatcaagattggcga

SEQ ID NO: 28251 - RNA, 21 nt, RNAi
acuucaucaagauuggcgauu

SEQ ID NO: 28252 - RNA, 21 nt, RNAi
uuugaaguaguucuaaccgcu

SEQ ID NO: 28253 - DNA, 21 bp, Homo sapiens
catcgtgtgcatcgccaccgt

SEQ ID NO: 28254 - RNA, 21 nt, RNAi
ucgugugcaucgccaccguuu

SEQ ID NO: 28255 - RNA, 21 nt, RNAi
uuagcacacguagcgguggca

SEQ ID NO: 28256 - DNA, 21 bp, Homo sapiens
caagctggtggccgtcaagaa

SEQ ID NO: 28257 - RNA, 21 nt, RNAi
agcugguggccgucaagaauu

SEQ ID NO: 28258 - RNA, 21 nt, RNAi
uuucgaccaccggcaguucuu

SEQ ID NO: 28259 - DNA, 21 bp, Homo sapiens
caagaagatggacctgcgcaa

SEQ ID NO: 28260 - RNA, 21 nt, RNAi
agaagauggaccugcgcaauu

SEQ ID NO: 28261 - RNA, 21 nt, RNAi
uuucuucuaccuggacgcguu

SEQ ID NO: 28262 - DNA, 21 bp, Homo sapiens
caacgaggtggtaatcatgag

SEQ ID NO: 28263 - RNA, 21 nt, RNAi
acgaggugguaaucaugaguu

SEQ ID NO: 28264 - RNA, 21 nt, RNAi
uuugcuccaccauuaguacuc

SEQ ID NO: 28265 - DNA, 21 bp, Homo sapiens
cagcacgagaatgtggtggag

SEQ ID NO: 28266 - RNA, 21 nt, RNAi
gcacgagaaugugguggaguu

SEQ ID NO: 28267 - RNA, 21 nt, RNAi
uucgugcucuuacaccaccuc

SEQ ID NO: 28268 - DNA, 21 bp, Homo sapiens
cacgagaatgtggtggagatg

SEQ ID NO: 28269 - RNA, 21 nt, RNAi
cgagaaugugguggagauguu

SEQ ID NO: 28270 - RNA, 21 nt, RNAi
uugcucuuacaccaccucuac

SEQ ID NO: 28271 - DNA, 21 bp, Homo sapiens
catggagttcctggaaggagg

SEQ ID NO: 28272 - RNA, 21 nt, RNAi
uggaguuccuggaaggagguu

SEQ ID NO: 28273 - RNA, 21 nt, RNAi
uuaccucaaggaccuuccucc

SEQ ID NO: 28274 - DNA, 21 bp, Homo sapiens
cacaccaggatgaacgaggag

SEQ ID NO: 28275 - RNA, 21 nt, RNAi
caccaggaugaacgaggaguu

SEQ ID NO: 28276 - RNA, 21 nt, RNAi
uugugguccuacuugcuccuc

SEQ ID NO: 28277 - DNA, 21 bp, Homo sapiens
caccaggatgaacgaggagca

SEQ ID NO: 28278 - RNA, 21 nt, RNAi
ccaggaugaacgaggagcauu

SEQ ID NO: 28279 - RNA, 21 nt, RNAi
uugguccuacuugcuccucgu

SEQ ID NO: 28280 - DNA, 21 bp, Homo sapiens
caggatgaacgaggagcagat

SEQ ID NO: 28281 - RNA, 21 nt, RNAi
ggaugaacgaggagcagauuu

SEQ ID NO: 28282 - RNA, 21 nt, RNAi
uuccuacuugcuccucgucua

SEQ ID NO: 28283 - DNA, 21 bp, Homo sapiens
catcaagagcgactcgatcct

SEQ ID NO: 28284 - RNA, 21 nt, RNAi
ucaagagcgacucgauccuuu

SEQ ID NO: 28285 - RNA, 21 nt, RNAi
uuaguucucgcugagcuagga

SEQ ID NO: 28286 - DNA, 21 bp, Homo sapiens
caagagcgactcgatcctgct

SEQ ID NO: 28287 - RNA, 21 nt, RNAi
agagcgacucgauccugcuuu

SEQ ID NO: 28288 - RNA, 21 nt, RNAi
uuucucgcugagcuaggacga

SEQ ID NO: 28289 - DNA, 21 bp, Homo sapiens
cagaggtagacatctggtcgc

SEQ ID NO: 28290 - RNA, 21 nt, RNAi
gagguagacaucuggucgcuu

SEQ ID NO: 28291 - RNA, 21 nt, RNAi
uucuccaucuguagaccagcg

SEQ ID NO: 28292 - DNA, 21 bp, Homo sapiens
caaagccatgaagatgattcg

SEQ ID NO: 28293 - RNA, 21 nt, RNAi
aagccaugaagaugauucguu

SEQ ID NO: 28294 - RNA, 21 nt, RNAi
uuuucgguacuucuacuaagc

SEQ ID NO: 28295 - DNA, 21 bp, Homo sapiens
cagaaccgcaccagatgaggc

SEQ ID NO: 28296 - RNA, 21 nt, RNAi
gaaccgcaccagaugaggcuu

SEQ ID NO: 28297 - RNA, 21 nt, RNAi
uucuuggcguggucuacuccg

SEQ ID NO: 28298 - DNA, 21 bp, Homo sapiens
catgttcttctgtctccagga

SEQ ID NO: 28299 - RNA, 21 nt, RNAi
uguucuucugucuccaggauu

SEQ ID NO: 28300 - RNA, 21 nt, RNAi
uuacaagaagacagagguccu

SEQ ID NO: 28301 - DNA, 21 bp, Homo sapiens
catcactggaagtctgcagtg

SEQ ID NO: 28302 - RNA, 21 nt, RNAi
ucacuggaagucugcaguguu

SEQ ID NO: 28303 - RNA, 21 nt, RNAi
uuagugaccuucagacgucac

SEQ ID NO: 28304 - DNA, 21 bp, Homo sapiens
cactaagaggtgaacatgtat

SEQ ID NO: 28305 - RNA, 21 nt, RNAi
cuaagaggugaacauguauuu

SEQ ID NO: 28306 - RNA, 21 nt, RNAi
uugauucuccacuuguacaua

SEQ ID NO: 28307 - DNA, 21 bp, Homo sapiens
catgtatgagtgtgtgcacgc

SEQ ID NO: 28308 - RNA, 21 nt, RNAi
uguaugagugugugcacgcuu

SEQ ID NO: 28309 - RNA, 21 nt, RNAi
uuacauacucacacacgugcg

SEQ ID NO: 28310 - DNA, 21 bp, Homo sapiens
cacgcgtgtgagtgtgcatgt

SEQ ID NO: 28311 - RNA, 21 nt, RNAi
cgcgugugagugugcauguuu

SEQ ID NO: 28312 - RNA, 21 nt, RNAi
uugcgcacacucacacguaca

SEQ ID NO: 28313 - DNA, 21 bp, Homo sapiens
catgtgtgtgtgtgtgcaaag

SEQ ID NO: 28314 - RNA, 21 nt, RNAi
ugugugugugugugcaaaguu

SEQ ID NO: 28315 - RNA, 21 nt, RNAi
uuacacacacacacacguuuc

SEQ ID NO: 28316 - DNA, 21 bp, Homo sapiens
catgaatgtccgaagagtggc

SEQ ID NO: 28317 - RNA, 21 nt, RNAi
ugaauguccgaagaguggcuu

SEQ ID NO: 28318 - RNA, 21 nt, RNAi
uuacuuacaggcuucucaccg

SEQ ID NO: 28319 - DNA, 21 bp, Homo sapiens
cagcaaatgactactgcacct

SEQ ID NO: 28320 - RNA, 21 nt, RNAi
gcaaaugacuacugcaccuuu

SEQ ID NO: 28321 - RNA, 21 nt, RNAi
uucguuuacugaugacgugga

SEQ ID NO: 28322 - DNA, 21 bp, Homo sapiens
caaatgactactgcacctgga

SEQ ID NO: 28323 - RNA, 21 nt, RNAi
aaugacuacugcaccuggauu

SEQ ID NO: 28324 - RNA, 21 nt, RNAi
uuuuacugaugacguggaccu

SEQ ID NO: 28325 - DNA, 21 bp, Homo sapiens
cacctggacagcctcctcttt

SEQ ID NO: 28326 - RNA, 21 nt, RNAi
ccuggacagccuccucuuuuu

SEQ ID NO: 28327 - RNA, 21 nt, RNAi
uuggaccugucggaggagaaa

SEQ ID NO: 28328 - DNA, 21 bp, Homo sapiens
cagaaccactgcctgaagaac

SEQ ID NO: 28329 - RNA, 21 nt, RNAi
gaaccacugccugaagaacuu

SEQ ID NO: 28330 - RNA, 21 nt, RNAi
uucuuggugacggacuucuug

SEQ ID NO: 28331 - DNA, 21 bp, Homo sapiens
cactgcctgaagaaccaggtt

SEQ ID NO: 28332 - RNA, 21 nt, RNAi
cugccugaagaaccagguuuu

SEQ ID NO: 28333 - RNA, 21 nt, RNAi
uugacggacuucuugguccaa

SEQ ID NO: 28334 - DNA, 21 bp, Homo sapiens
gagttccaggtcgagcagtta

SEQ ID NO: 28335 - RNA, 21 nt, RNAi
guuccaggucgagcaguuauu

SEQ ID NO: 28336 - RNA, 21 nt, RNAi
uucaagguccagcucgucaau

SEQ ID NO: 28337 - DNA, 21 bp, Homo sapiens
gaggagtggtcacctgcctga

SEQ ID NO: 28338 - RNA, 21 nt, RNAi
ggaguggucaccugccugauu

SEQ ID NO: 28339 - RNA, 21 nt, RNAi
uuccucaccaguggacggacu

SEQ ID NO: 28340 - DNA, 21 bp, Homo sapiens
gaccagcacgagcagaagttc

SEQ ID NO: 28341 - RNA, 21 nt, RNAi
ccagcacgagcagaaguucuu

SEQ ID NO: 28342 - RNA, 21 nt, RNAi
uuggucgugcucgucuucaag

SEQ ID NO: 28343 - DNA, 21 bp, Homo sapiens
gacgagtttgagaacatgtcg

SEQ ID NO: 28344 - RNA, 21 nt, RNAi
cgaguuugagaacaugucguu

SEQ ID NO: 28345 - RNA, 21 nt, RNAi
uugcucaaacucuuguacagc

SEQ ID NO: 28346 - DNA, 21 bp, Homo sapiens
gagtttgagaacatgtcggtg

SEQ ID NO: 28347 - RNA, 21 nt, RNAi
guuugagaacaugucgguguu

SEQ ID NO: 28348 - RNA, 21 nt, RNAi
uucaaacucuuguacagccac

SEQ ID NO: 28349 - DNA, 21 bp, Homo sapiens
gagaacatgtcggtgacacgc

SEQ ID NO: 28350 - RNA, 21 nt, RNAi
gaacaugucggugacacgcuu

SEQ ID NO: 28351 - RNA, 21 nt, RNAi
uucuuguacagccacugugcg

SEQ ID NO: 28352 - DNA, 21 bp, Homo sapiens
gaacatgtcggtgacacgctc

SEQ ID NO: 28353 - RNA, 21 nt, RNAi
acaugucggugacacgcucuu

SEQ ID NO: 28354 - RNA, 21 nt, RNAi
uuuguacagccacugugcgag

SEQ ID NO: 28355 - DNA, 21 bp, Homo sapiens
gacaacttcatcaagattggc

SEQ ID NO: 28356 - RNA, 21 nt, RNAi
caacuucaucaagauuggcuu

SEQ ID NO: 28357 - RNA, 21 nt, RNAi
uuguugaaguaguucuaaccg

SEQ ID NO: 28358 - DNA, 21 bp, Homo sapiens
gaagatggacctgcgcaagca

SEQ ID NO: 28359 - RNA, 21 nt, RNAi
agauggaccugcgcaagcauu

SEQ ID NO: 28360 - RNA, 21 nt, RNAi
uuucuaccuggacgcguucgu

SEQ ID NO: 28361 - DNA, 21 bp, Homo sapiens
gatggacctgcgcaagcagca

SEQ ID NO: 28362 - RNA, 21 nt, RNAi
uggaccugcgcaagcagcauu

SEQ ID NO: 28363 - RNA, 21 nt, RNAi
uuaccuggacgcguucgucgu

SEQ ID NO: 28364 - DNA, 21 bp, Homo sapiens
gaggcgcgagctgctcttcaa

SEQ ID NO: 28365 - RNA, 21 nt, RNAi
ggcgcgagcugcucuucaauu

SEQ ID NO: 28366 - RNA, 21 nt, RNAi
uuccgcgcucgacgagaaguu

SEQ ID NO: 28367 - DNA, 21 bp, Homo sapiens
gagctgctcttcaacgaggtg

SEQ ID NO: 28368 - RNA, 21 nt, RNAi
gcugcucuucaacgagguguu

SEQ ID NO: 28369 - RNA, 21 nt, RNAi
uucgacgagaaguugcuccac

SEQ ID NO: 28370 - DNA, 21 bp, Homo sapiens
gactaccagcacgagaatgtg

SEQ ID NO: 28371 - RNA, 21 nt, RNAi
cuaccagcacgagaauguguu

SEQ ID NO: 28372 - RNA, 21 nt, RNAi
uugauggucgugcucuuacac

SEQ ID NO: 28373 - DNA, 21 bp, Homo sapiens
gagaatgtggtggagatgtac

SEQ ID NO: 28374 - RNA, 21 nt, RNAi
gaaugugguggagauguacuu

SEQ ID NO: 28375 - RNA, 21 nt, RNAi
uucuuacaccaccucuacaug

SEQ ID NO: 28376 - DNA, 21 bp, Homo sapiens
gaatgtggtggagatgtacaa

SEQ ID NO: 28377 - RNA, 21 nt, RNAi
augugguggagauguacaauu

SEQ ID NO: 28378 - RNA, 21 nt, RNAi
uuuacaccaccucuacauguu

SEQ ID NO: 28379 - DNA, 21 bp, Homo sapiens
gagatgtacaacagctacctg

SEQ ID NO: 28380 - RNA, 21 nt, RNAi
gauguacaacagcuaccuguu

SEQ ID NO: 28381 - RNA, 21 nt, RNAi
uucuacauguugucgauggac

SEQ ID NO: 28382 - DNA, 21 bp, Homo sapiens
gatgtacaacagctacctggt

SEQ ID NO: 28383 - RNA, 21 nt, RNAi
uguacaacagcuaccugguuu

SEQ ID NO: 28384 - RNA, 21 nt, RNAi
uuacauguugucgauggacca

SEQ ID NO: 28385 - DNA, 21 bp, Homo sapiens
gatgaacgaggagcagatcgc

SEQ ID NO: 28386 - RNA, 21 nt, RNAi
ugaacgaggagcagaucgcuu

SEQ ID NO: 28387 - RNA, 21 nt, RNAi
uuacuugcuccucgucuagcg

SEQ ID NO: 28388 - DNA, 21 bp, Homo sapiens
gacatcaagagcgactcgatc

SEQ ID NO: 28389 - RNA, 21 nt, RNAi
caucaagagcgacucgaucuu

SEQ ID NO: 28390 - RNA, 21 nt, RNAi
uuguaguucucgcugagcuag

SEQ ID NO: 28391 - DNA, 21 bp, Homo sapiens
gagcgactcgatcctgctgac

SEQ ID NO: 28392 - RNA, 21 nt, RNAi
gcgacucgauccugcugacuu

SEQ ID NO: 28393 - RNA, 21 nt, RNAi
uucgcugagcuaggacgacug

SEQ ID NO: 28394 - DNA, 21 bp, Homo sapiens
gaaggaagtcgctggtcggca

SEQ ID NO: 28395 - RNA, 21 nt, RNAi
aggaagucgcuggucggcauu

SEQ ID NO: 28396 - RNA, 21 nt, RNAi
uuuccuucagcgaccagccgu

SEQ ID NO: 28397 - DNA, 21 bp, Homo sapiens
gaggtagacatctggtcgctg

SEQ ID NO: 28398 - RNA, 21 nt, RNAi
gguagacaucuggucgcuguu

SEQ ID NO: 28399 - RNA, 21 nt, RNAi
uuccaucuguagaccagcgac

SEQ ID NO: 28400 - DNA, 21 bp, Homo sapiens
gataatggtgattgagatggt

SEQ ID NO: 28401 - RNA, 21 nt, RNAi
uaauggugauugagaugguuu

SEQ ID NO: 28402 - RNA, 21 nt, RNAi
uuauuaccacuaacucuacca

SEQ ID NO: 28403 - DNA, 21 bp, Homo sapiens
gattgagatggtggacggaga

SEQ ID NO: 28404 - RNA, 21 nt, RNAi
uugagaugguggacggagauu

SEQ ID NO: 28405 - RNA, 21 nt, RNAi
uuaacucuaccaccugccucu

SEQ ID NO: 28406 - DNA, 21 bp, Homo sapiens
gactgaagaacctgcacaagg

SEQ ID NO: 28407 - RNA, 21 nt, RNAi
cugaagaaccugcacaagguu

SEQ ID NO: 28408 - RNA, 21 nt, RNAi
uugacuucuuggacguguucc

SEQ ID NO: 28409 - DNA, 21 bp, Homo sapiens
gaagaacctgcacaaggtgtc

SEQ ID NO: 28410 - RNA, 21 nt, RNAi
agaaccugcacaaggugucuu

SEQ ID NO: 28411 - RNA, 21 nt, RNAi
uuucuuggacguguuccacag

SEQ ID NO: 28412 - DNA, 21 bp, Homo sapiens
gaacctgcacaaggtgtcgcc

SEQ ID NO: 28413 - RNA, 21 nt, RNAi
accugcacaaggugucgccuu

SEQ ID NO: 28414 - RNA, 21 nt, RNAi
uuuggacguguuccacagcgg

SEQ ID NO: 28415 - DNA, 21 bp, Homo sapiens
gagagaacactaagaggtgaa

SEQ ID NO: 28416 - RNA, 21 nt, RNAi
gagaacacuaagaggugaauu

SEQ ID NO: 28417 - RNA, 21 nt, RNAi
uucucuugugauucuccacuu

SEQ ID NO: 28418 - DNA, 21 bp, Homo sapiens
gagaacactaagaggtgaaca

SEQ ID NO: 28419 - RNA, 21 nt, RNAi
gaacacuaagaggugaacauu

SEQ ID NO: 28420 - RNA, 21 nt, RNAi
uucuugugauucuccacuugu

SEQ ID NO: 28421 - DNA, 21 bp, Homo sapiens
gaacactaagaggtgaacatg

SEQ ID NO: 28422 - RNA, 21 nt, RNAi
acacuaagaggugaacauguu

SEQ ID NO: 28423 - RNA, 21 nt, RNAi
uuugugauucuccacuuguac

SEQ ID NO: 28424 - DNA, 21 bp, Homo sapiens
gaggtgaacatgtatgagtgt

SEQ ID NO: 28425 - RNA, 21 nt, RNAi
ggugaacauguaugaguguuu

SEQ ID NO: 28426 - RNA, 21 nt, RNAi
uuccacuuguacauacucaca

SEQ ID NO: 28427 - DNA, 21 bp, Homo sapiens
gaacatgtatgagtgtgtgca

SEQ ID NO: 28428 - RNA, 21 nt, RNAi
acauguaugagugugugcauu

SEQ ID NO: 28429 - RNA, 21 nt, RNAi
uuuguacauacucacacacgu

SEQ ID NO: 28430 - DNA, 21 bp, Homo sapiens
gagtgtgtgcacgcgtgtgag

SEQ ID NO: 28431 - RNA, 21 nt, RNAi
gugugugcacgcgugugaguu

SEQ ID NO: 28432 - RNA, 21 nt, RNAi
uucacacacgugcgcacacuc

SEQ ID NO: 28433 - DNA, 21 bp, Homo sapiens
gagtgtgcatgtgtgtgtgtg

SEQ ID NO: 28434 - RNA, 21 nt, RNAi
gugugcauguguguguguguu

SEQ ID NO: 28435 - RNA, 21 nt, RNAi
uucacacguacacacacacac

SEQ ID NO: 28436 - DNA, 21 bp, Homo sapiens
gatcatgaatgtccgaagagt

SEQ ID NO: 28437 - RNA, 21 nt, RNAi
ucaugaauguccgaagaguuu

SEQ ID NO: 28438 - RNA, 21 nt, RNAi
uuaguacuuacaggcuucuca

SEQ ID NO: 28439 - DNA, 21 bp, Homo sapiens
gaatgtccgaagagtggcctt

SEQ ID NO: 28440 - RNA, 21 nt, RNAi
auguccgaagaguggccuuuu

SEQ ID NO: 28441 - RNA, 21 nt, RNAi
uuuacaggcuucucaccggaa

SEQ ID NO: 28442 - DNA, 21 bp, Homo sapiens
gactactgcacctggacagcc

SEQ ID NO: 28443 - RNA, 21 nt, RNAi
cuacugcaccuggacagccuu

SEQ ID NO: 28444 - RNA, 21 nt, RNAi
uugaugacguggaccugucgg

SEQ ID NO: 28445 - DNA, 21 bp, Homo sapiens
gaaccactgcctgaagaacca

SEQ ID NO: 28446 - RNA, 21 nt, RNAi
accacugccugaagaaccauu

SEQ ID NO: 28447 - RNA, 21 nt, RNAi
uuuggugacggacuucuuggu

SEQ ID NO: 28448 - DNA, 21 bp, Homo sapiens
tagaggagtggtcacctgcct

SEQ ID NO: 28449 - RNA, 21 nt, RNAi
gaggaguggucaccugccuuu

SEQ ID NO: 28450 - RNA, 21 nt, RNAi
uucuccucaccaguggacgga

SEQ ID NO: 28451 - DNA, 21 bp, Homo sapiens
tacctggacaacttcatcaag

SEQ ID NO: 28452 - RNA, 21 nt, RNAi
ccuggacaacuucaucaaguu

SEQ ID NO: 28453 - RNA, 21 nt, RNAi
uuggaccuguugaaguaguuc

SEQ ID NO: 28454 - DNA, 21 bp, Homo sapiens
taccagcacgagaatgtggtg

SEQ ID NO: 28455 - RNA, 21 nt, RNAi
ccagcacgagaaugugguguu

SEQ ID NO: 28456 - RNA, 21 nt, RNAi
uuggucgugcucuuacaccac

SEQ ID NO: 28457 - DNA, 21 bp, Homo sapiens
taatggtgattgagatggtgg

SEQ ID NO: 28458 - RNA, 21 nt, RNAi
auggugauugagauggugguu

SEQ ID NO: 28459 - RNA, 21 nt, RNAi
uuuaccacuaacucuaccacc

SEQ ID NO: 28460 - DNA, 21 bp, Homo sapiens
taagaggtgaacatgtatgag

SEQ ID NO: 28461 - RNA, 21 nt, RNAi
agaggugaacauguaugaguu

SEQ ID NO: 28462 - RNA, 21 nt, RNAi
uuucuccacuuguacauacuc

SEQ ID NO: 28463 - DNA, 21 bp, Homo sapiens
tatgagtgtgtgcacgcgtgt

SEQ ID NO: 28464 - RNA, 21 nt, RNAi
ugagugugugcacgcguguuu

SEQ ID NO: 28465 - RNA, 21 nt, RNAi
uuacucacacacgugcgcaca

SEQ ID NO: 28466 - DNA, 21 bp, Homo sapiens
tactgcacctggacagcctcc

SEQ ID NO: 28467 - RNA, 21 nt, RNAi
cugcaccuggacagccuccuu

SEQ ID NO: 28468 - RNA, 21 nt, RNAi
uugacguggaccugucggagg

SEQ ID NO: 28469 - DNA, 21 bp, Homo sapiens
aacttcatcaagattggcgag

SEQ ID NO: 28470 - RNA, 21 nt, RNAi
cuucaucaagauuggcgaguu

SEQ ID NO: 28471 - RNA, 21 nt, RNAi
uugaaguaguucuaaccgcuc

SEQ ID NO: 28472 - DNA, 21 bp, Homo sapiens
cagcaaaggtgccaaagatgg

SEQ ID NO: 28473 - RNA, 21 nt, RNAi
gcaaaggugccaaagaugguu

SEQ ID NO: 28474 - RNA, 21 nt, RNAi
uucguuuccacgguuucuacc

SEQ ID NO: 28475 - DNA, 21 bp, Homo sapiens
caacttcatcaagattggcga

SEQ ID NO: 28476 - RNA, 21 nt, RNAi
acuucaucaagauuggcgauu

SEQ ID NO: 28477 - RNA, 21 nt, RNAi
uuugaaguaguucuaaccgcu

SEQ ID NO: 28478 - DNA, 21 bp, Homo sapiens
catcaagagcgactcgatcct

SEQ ID NO: 28479 - RNA, 21 nt, RNAi
ucaagagcgacucgauccuuu

SEQ ID NO: 28480 - RNA, 21 nt, RNAi
uuaguucucgcugagcuagga

SEQ ID NO: 28481 - DNA, 21 bp, Homo sapiens
gagatgtacaacagctacctg

SEQ ID NO: 28482 - RNA, 21 nt, RNAi
gauguacaacagcuaccuguu

SEQ ID NO: 28483 - RNA, 21 nt, RNAi
uucuacauguugucgauggac

SEQ ID NO: 28484 - DNA, 21 bp, Homo sapiens
gacatcaagagcgactcgatc

SEQ ID NO: 28485 - RNA, 21 nt, RNAi
caucaagagcgacucgaucuu

SEQ ID NO: 28486 - RNA, 21 nt, RNAi
uuguaguucucgcugagcuag

SEQ ID NO: 28487 - DNA, 21 bp, Homo sapiens
aaccatggctgaagactactg

SEQ ID NO: 28488 - RNA, 21 nt, RNAi
ccauggcugaagacuacuguu

SEQ ID NO: 28489 - RNA, 21 nt, RNAi
uugguaccgacuucugaugac

SEQ ID NO: 28490 - DNA, 21 bp, Homo sapiens
aacaggaggagaaggaggtcg

SEQ ID NO: 28491 - RNA, 21 nt, RNAi
caggaggagaaggaggucguu

SEQ ID NO: 28492 - RNA, 21 nt, RNAi
uuguccuccucuuccuccagc

SEQ ID NO: 28493 - DNA, 21 bp, Homo sapiens
aagaagatcaaacggcagctg

SEQ ID NO: 28494 - RNA, 21 nt, RNAi
gaagaucaaacggcagcuguu

SEQ ID NO: 28495 - RNA, 21 nt, RNAi
uucuucuaguuugccgucgac

SEQ ID NO: 28496 - DNA, 21 bp, Homo sapiens
aagatcaaacggcagctgtca

SEQ ID NO: 28497 - RNA, 21 nt, RNAi
gaucaaacggcagcugucauu

SEQ ID NO: 28498 - RNA, 21 nt, RNAi
uucuaguuugccgucgacagu

SEQ ID NO: 28499 - DNA, 21 bp, Homo sapiens
aaacggcagctgtcaatgaca

SEQ ID NO: 28500 - RNA, 21 nt, RNAi
acggcagcugucaaugacauu

SEQ ID NO: 28501 - RNA, 21 nt, RNAi
uuugccgucgacaguuacugu

SEQ ID NO: 28502 - DNA, 21 bp, Homo sapiens
aacggcagctgtcaatgacac

SEQ ID NO: 28503 - RNA, 21 nt, RNAi
cggcagcugucaaugacacuu

SEQ ID NO: 28504 - RNA, 21 nt, RNAi
uugccgucgacaguuacugug

SEQ ID NO: 28505 - DNA, 21 bp, Homo sapiens
aatgacactccgaggtggccg

SEQ ID NO: 28506 - RNA, 21 nt, RNAi
ugacacuccgagguggccguu

SEQ ID NO: 28507 - RNA, 21 nt, RNAi
uuacugugaggcuccaccggc

SEQ ID NO: 28508 - DNA, 21 bp, Homo sapiens
aagatctccactgaggacatc

SEQ ID NO: 28509 - RNA, 21 nt, RNAi
gaucuccacugaggacaucuu

SEQ ID NO: 28510 - RNA, 21 nt, RNAi
uucuagaggugacuccuguag

SEQ ID NO: 28511 - DNA, 21 bp, Homo sapiens
aacaagcgcctatcactacca

SEQ ID NO: 28512 - RNA, 21 nt, RNAi
caagcgccuaucacuaccauu

SEQ ID NO: 28513 - RNA, 21 nt, RNAi
uuguucgcggauagugauggu

SEQ ID NO: 28514 - DNA, 21 bp, Homo sapiens
aagcgcctatcactaccagct

SEQ ID NO: 28515 - RNA, 21 nt, RNAi
gcgccuaucacuaccagcuuu

SEQ ID NO: 28516 - RNA, 21 nt, RNAi
uucgcggauagugauggucga

SEQ ID NO: 28517 - DNA, 21 bp, Homo sapiens
aaactggagacctacattaag

SEQ ID NO: 28518 - RNA, 21 nt, RNAi
acuggagaccuacauuaaguu

SEQ ID NO: 28519 - RNA, 21 nt, RNAi
uuugaccucuggauguaauuc

SEQ ID NO: 28520 - DNA, 21 bp, Homo sapiens
aactggagacctacattaagc

SEQ ID NO: 28521 - RNA, 21 nt, RNAi
cuggagaccuacauuaagcuu

SEQ ID NO: 28522 - RNA, 21 nt, RNAi
uugaccucuggauguaauucg

SEQ ID NO: 28523 - DNA, 21 bp, Homo sapiens
aaagcaagctcacagacaacc

SEQ ID NO: 28524 - RNA, 21 nt, RNAi
agcaagcucacagacaaccuu

SEQ ID NO: 28525 - RNA, 21 nt, RNAi
uuucguucgagugucuguugg

SEQ ID NO: 28526 - DNA, 21 bp, Homo sapiens
aagcaagctcacagacaacct

SEQ ID NO: 28527 - RNA, 21 nt, RNAi
gcaagcucacagacaaccuuu

SEQ ID NO: 28528 - RNA, 21 nt, RNAi
uucguucgagugucuguugga

SEQ ID NO: 28529 - DNA, 21 bp, Homo sapiens
aagctcacagacaaccttgtg

SEQ ID NO: 28530 - RNA, 21 nt, RNAi
gcucacagacaaccuuguguu

SEQ ID NO: 28531 - RNA, 21 nt, RNAi
uucgagugucuguuggaacac

SEQ ID NO: 28532 - DNA, 21 bp, Homo sapiens
aaccttgtggcactcaaggag

SEQ ID NO: 28533 - RNA, 21 nt, RNAi
ccuuguggcacucaaggaguu

SEQ ID NO: 28534 - RNA, 21 nt, RNAi
uuggaacaccgugaguuccuc

SEQ ID NO: 28535 - DNA, 21 bp, Homo sapiens
aaggagatcagactggaacat

SEQ ID NO: 28536 - RNA, 21 nt, RNAi
ggagaucagacuggaacauuu

SEQ ID NO: 28537 - RNA, 21 nt, RNAi
uuccucuagucugaccuugua

SEQ ID NO: 28538 - DNA, 21 bp, Homo sapiens
aaggacctcaaacacgccaac

SEQ ID NO: 28539 - RNA, 21 nt, RNAi
ggaccucaaacacgccaacuu

SEQ ID NO: 28540 - RNA, 21 nt, RNAi
uuccuggaguuugugcgguug

SEQ ID NO: 28541 - DNA, 21 bp, Homo sapiens
aaacacgccaacatcgttacg

SEQ ID NO: 28542 - RNA, 21 nt, RNAi
acacgccaacaucguuacguu

SEQ ID NO: 28543 - RNA, 21 nt, RNAi
uuugugcgguuguagcaaugc

SEQ ID NO: 28544 - DNA, 21 bp, Homo sapiens
aacacgccaacatcgttacgc

SEQ ID NO: 28545 - RNA, 21 nt, RNAi
cacgccaacaucguuacgcuu

SEQ ID NO: 28546 - RNA, 21 nt, RNAi
uugugcgguuguagcaaugcg

SEQ ID NO: 28547 - DNA, 21 bp, Homo sapiens
aacatcgttacgctacatgac

SEQ ID NO: 28548 - RNA, 21 nt, RNAi
caucguuacgcuacaugacuu

SEQ ID NO: 28549 - RNA, 21 nt, RNAi
uuguagcaaugcgauguacug

SEQ ID NO: 28550 - DNA, 21 bp, Homo sapiens
aaggacctgaagcagtacctg

SEQ ID NO: 28551 - RNA, 21 nt, RNAi
ggaccugaagcaguaccuguu

SEQ ID NO: 28552 - RNA, 21 nt, RNAi
uuccuggacuucgucauggac

SEQ ID NO: 28553 - DNA, 21 bp, Homo sapiens
aagcagtacctggatgactgt

SEQ ID NO: 28554 - RNA, 21 nt, RNAi
gcaguaccuggaugacuguuu

SEQ ID NO: 28555 - RNA, 21 nt, RNAi
uucgucauggaccuacugaca

SEQ ID NO: 28556 - DNA, 21 bp, Homo sapiens
aacatcatcaacatgcacaac

SEQ ID NO: 28557 - RNA, 21 nt, RNAi
caucaucaacaugcacaacuu

SEQ ID NO: 28558 - RNA, 21 nt, RNAi
uuguaguaguuguacguguug

SEQ ID NO: 28559 - DNA, 21 bp, Homo sapiens
aacatgcacaacgtgaaactg

SEQ ID NO: 28560 - RNA, 21 nt, RNAi
caugcacaacgugaaacuguu

SEQ ID NO: 28561 - RNA, 21 nt, RNAi
uuguacguguugcacuuugac

SEQ ID NO: 28562 - DNA, 21 bp, Homo sapiens
aacgtgaaactgttcctgttc

SEQ ID NO: 28563 - RNA, 21 nt, RNAi
cgugaaacuguuccuguucuu

SEQ ID NO: 28564 - RNA, 21 nt, RNAi
uugcacuuugacaaggacaag

SEQ ID NO: 28565 - DNA, 21 bp, Homo sapiens
aaactgttcctgttccagctg

SEQ ID NO: 28566 - RNA, 21 nt, RNAi
acuguuccuguuccagcuguu

SEQ ID NO: 28567 - RNA, 21 nt, RNAi
uuugacaaggacaaggucgac

SEQ ID NO: 28568 - DNA, 21 bp, Homo sapiens
aactgttcctgttccagctgc

SEQ ID NO: 28569 - RNA, 21 nt, RNAi
cuguuccuguuccagcugcuu

SEQ ID NO: 28570 - RNA, 21 nt, RNAi
uugacaaggacaaggucgacg

SEQ ID NO: 28571 - DNA, 21 bp, Homo sapiens
aaggtgctacaccgagacctc

SEQ ID NO: 28572 - RNA, 21 nt, RNAi
ggugcuacaccgagaccucuu

SEQ ID NO: 28573 - RNA, 21 nt, RNAi
uuccacgauguggcucuggag

SEQ ID NO: 28574 - DNA, 21 bp, Homo sapiens
aacctgctcatcaacgagagg

SEQ ID NO: 28575 - RNA, 21 nt, RNAi
ccugcucaucaacgagagguu

SEQ ID NO: 28576 - RNA, 21 nt, RNAi
uuggacgaguaguugcucucc

SEQ ID NO: 28577 - DNA, 21 bp, Homo sapiens
aagctggctgactttggcctg

SEQ ID NO: 28578 - RNA, 21 nt, RNAi
gcuggcugacuuuggccuguu

SEQ ID NO: 28579 - RNA, 21 nt, RNAi
uucgaccgacugaaaccggac

SEQ ID NO: 28580 - DNA, 21 bp, Homo sapiens
aacaaagacatactccaatga

SEQ ID NO: 28581 - RNA, 21 nt, RNAi
caaagacauacuccaaugauu

SEQ ID NO: 28582 - RNA, 21 nt, RNAi
uuguuucuguaugagguuacu

SEQ ID NO: 28583 - DNA, 21 bp, Homo sapiens
aaagacatactccaatgaggt

SEQ ID NO: 28584 - RNA, 21 nt, RNAi
agacauacuccaaugagguuu

SEQ ID NO: 28585 - RNA, 21 nt, RNAi
uuucuguaugagguuacucca

SEQ ID NO: 28586 - DNA, 21 bp, Homo sapiens
aagacatactccaatgaggtg

SEQ ID NO: 28587 - RNA, 21 nt, RNAi
gacauacuccaaugagguguu

SEQ ID NO: 28588 - RNA, 21 nt, RNAi
uucuguaugagguuacuccac

SEQ ID NO: 28589 - DNA, 21 bp, Homo sapiens
aatgaggtggtgacactgtgg

SEQ ID NO: 28590 - RNA, 21 nt, RNAi
ugagguggugacacugugguu

SEQ ID NO: 28591 - RNA, 21 nt, RNAi
uuacuccaccacugugacacc

SEQ ID NO: 28592 - DNA, 21 bp, Homo sapiens
aacagctacacttcatcttcc

SEQ ID NO: 28593 - RNA, 21 nt, RNAi
cagcuacacuucaucuuccuu

SEQ ID NO: 28594 - RNA, 21 nt, RNAi
uugucgaugugaaguagaagg

SEQ ID NO: 28595 - DNA, 21 bp, Homo sapiens
aactgaggagacgtggccagg

SEQ ID NO: 28596 - RNA, 21 nt, RNAi
cugaggagacguggccagguu

SEQ ID NO: 28597 - RNA, 21 nt, RNAi
uugacuccucugcaccggucc

SEQ ID NO: 28598 - DNA, 21 bp, Homo sapiens
aacgaggagttcaagacatac

SEQ ID NO: 28599 - RNA, 21 nt, RNAi
cgaggaguucaagacauacuu

SEQ ID NO: 28600 - RNA, 21 nt, RNAi
uugcuccucaaguucuguaug

SEQ ID NO: 28601 - DNA, 21 bp, Homo sapiens
aaatcggatctccgcagagga

SEQ ID NO: 28602 - RNA, 21 nt, RNAi
aucggaucuccgcagaggauu

SEQ ID NO: 28603 - RNA, 21 nt, RNAi
uuuagccuagaggcgucuccu

SEQ ID NO: 28604 - DNA, 21 bp, Homo sapiens
aatcggatctccgcagaggat

SEQ ID NO: 28605 - RNA, 21 nt, RNAi
ucggaucuccgcagaggauuu

SEQ ID NO: 28606 - RNA, 21 nt, RNAi
uuagccuagaggcgucuccua

SEQ ID NO: 28607 - DNA, 21 bp, Homo sapiens
aaacatccattcttcctcagt

SEQ ID NO: 28608 - RNA, 21 nt, RNAi
acauccauucuuccucaguuu

SEQ ID NO: 28609 - RNA, 21 nt, RNAi
uuuguagguaagaaggaguca

SEQ ID NO: 28610 - DNA, 21 bp, Homo sapiens
aacatccattcttcctcagtc

SEQ ID NO: 28611 - RNA, 21 nt, RNAi
cauccauucuuccucagucuu

SEQ ID NO: 28612 - RNA, 21 nt, RNAi
uuguagguaagaaggagucag

SEQ ID NO: 28613 - DNA, 21 bp, Homo sapiens
aaacttcctgacactacttcc

SEQ ID NO: 28614 - RNA, 21 nt, RNAi
acuuccugacacuacuuccuu

SEQ ID NO: 28615 - RNA, 21 nt, RNAi
uuugaaggacugugaugaagg

SEQ ID NO: 28616 - DNA, 21 bp, Homo sapiens
aacttcctgacactacttcca

SEQ ID NO: 28617 - RNA, 21 nt, RNAi
cuuccugacacuacuuccauu

SEQ ID NO: 28618 - RNA, 21 nt, RNAi
uugaaggacugugaugaaggu

SEQ ID NO: 28619 - DNA, 21 bp, Homo sapiens
aaaggaggccagccttcggtc

SEQ ID NO: 28620 - RNA, 21 nt, RNAi
aggaggccagccuucggucuu

SEQ ID NO: 28621 - RNA, 21 nt, RNAi
uuuccuccggucggaagccag

SEQ ID NO: 28622 - DNA, 21 bp, Homo sapiens
aaggaggccagccttcggtct

SEQ ID NO: 28623 - RNA, 21 nt, RNAi
ggaggccagccuucggucuuu

SEQ ID NO: 28624 - RNA, 21 nt, RNAi
uuccuccggucggaagccaga

SEQ ID NO: 28625 - DNA, 21 bp, Homo sapiens
aacaaagctctcatcactcct

SEQ ID NO: 28626 - RNA, 21 nt, RNAi
caaagcucucaucacuccuuu

SEQ ID NO: 28627 - RNA, 21 nt, RNAi
uuguuucgagaguagugagga

SEQ ID NO: 28628 - DNA, 21 bp, Homo sapiens
aaagctctcatcactccttca

SEQ ID NO: 28629 - RNA, 21 nt, RNAi
agcucucaucacuccuucauu

SEQ ID NO: 28630 - RNA, 21 nt, RNAi
uuucgagaguagugaggaagu

SEQ ID NO: 28631 - DNA, 21 bp, Homo sapiens
aagctctcatcactccttcac

SEQ ID NO: 28632 - RNA, 21 nt, RNAi
gcucucaucacuccuucacuu

SEQ ID NO: 28633 - RNA, 21 nt, RNAi
uucgagaguagugaggaagug

SEQ ID NO: 28634 - DNA, 21 bp, Homo sapiens
aagatggtgacaatgccttga

SEQ ID NO: 28635 - RNA, 21 nt, RNAi
gauggugacaaugccuugauu

SEQ ID NO: 28636 - RNA, 21 nt, RNAi
uucuaccacuguuacggaacu

SEQ ID NO: 28637 - DNA, 21 bp, Homo sapiens
aatgccttgagtctgaggcat

SEQ ID NO: 28638 - RNA, 21 nt, RNAi
ugccuugagucugaggcauuu

SEQ ID NO: 28639 - RNA, 21 nt, RNAi
uuacggaacucagacuccgua

SEQ ID NO: 28640 - DNA, 21 bp, Homo sapiens
aatatctctgtatacagactg

SEQ ID NO: 28641 - RNA, 21 nt, RNAi
uaucucuguauacagacuguu

SEQ ID NO: 28642 - RNA, 21 nt, RNAi
uuauagagacauaugucugac

SEQ ID NO: 28643 - DNA, 21 bp, Homo sapiens
aaagcatgccacagccactcg

SEQ ID NO: 28644 - RNA, 21 nt, RNAi
agcaugccacagccacucguu

SEQ ID NO: 28645 - RNA, 21 nt, RNAi
uuucguacggugucggugagc

SEQ ID NO: 28646 - DNA, 21 bp, Homo sapiens
aagcatgccacagccactcgc

SEQ ID NO: 28647 - RNA, 21 nt, RNAi
gcaugccacagccacucgcuu

SEQ ID NO: 28648 - RNA, 21 nt, RNAi
uucguacggugucggugagcg

SEQ ID NO: 28649 - DNA, 21 bp, Homo sapiens
aactgaccagctcagcgagga

SEQ ID NO: 28650 - RNA, 21 nt, RNAi
cugaccagcucagcgaggauu

SEQ ID NO: 28651 - RNA, 21 nt, RNAi
uugacuggucgagucgcuccu

SEQ ID NO: 28652 - DNA, 21 bp, Homo sapiens
aatgtgcatatgtgcacaagc

SEQ ID NO: 28653 - RNA, 21 nt, RNAi
ugugcauaugugcacaagcuu

SEQ ID NO: 28654 - RNA, 21 nt, RNAi
uuacacguauacacguguucg

SEQ ID NO: 28655 - DNA, 21 bp, Homo sapiens
aatgcaccataatcgctgtat

SEQ ID NO: 28656 - RNA, 21 nt, RNAi
ugcaccauaaucgcuguauuu

SEQ ID NO: 28657 - RNA, 21 nt, RNAi
uuacgugguauuagcgacaua

SEQ ID NO: 28658 - DNA, 21 bp, Homo sapiens
cagcaaccatggctgaagact

SEQ ID NO: 28659 - RNA, 21 nt, RNAi
gcaaccauggcugaagacuuu

SEQ ID NO: 28660 - RNA, 21 nt, RNAi
uucguugguaccgacuucuga

SEQ ID NO: 28661 - DNA, 21 bp, Homo sapiens
caaccatggctgaagactact

SEQ ID NO: 28662 - RNA, 21 nt, RNAi
accauggcugaagacuacuuu

SEQ ID NO: 28663 - RNA, 21 nt, RNAi
uuugguaccgacuucugauga

SEQ ID NO: 28664 - DNA, 21 bp, Homo sapiens
catggatcggatgaagaagat

SEQ ID NO: 28665 - RNA, 21 nt, RNAi
uggaucggaugaagaagauuu

SEQ ID NO: 28666 - RNA, 21 nt, RNAi
uuaccuagccuacuucuucua

SEQ ID NO: 28667 - DNA, 21 bp, Homo sapiens
caaacggcagctgtcaatgac

SEQ ID NO: 28668 - RNA, 21 nt, RNAi
aacggcagcugucaaugacuu

SEQ ID NO: 28669 - RNA, 21 nt, RNAi
uuuugccgucgacaguuacug

SEQ ID NO: 28670 - DNA, 21 bp, Homo sapiens
cagctgtcaatgacactccga

SEQ ID NO: 28671 - RNA, 21 nt, RNAi
gcugucaaugacacuccgauu

SEQ ID NO: 28672 - RNA, 21 nt, RNAi
uucgacaguuacugugaggcu

SEQ ID NO: 28673 - DNA, 21 bp, Homo sapiens
caatgacactccgaggtggcc

SEQ ID NO: 28674 - RNA, 21 nt, RNAi
augacacuccgagguggccuu

SEQ ID NO: 28675 - RNA, 21 nt, RNAi
uuuacugugaggcuccaccgg

SEQ ID NO: 28676 - DNA, 21 bp, Homo sapiens
catagacaagaccaatggtgc

SEQ ID NO: 28677 - RNA, 21 nt, RNAi
uagacaagaccaauggugcuu

SEQ ID NO: 28678 - RNA, 21 nt, RNAi
uuaucuguucugguuaccacg

SEQ ID NO: 28679 - DNA, 21 bp, Homo sapiens
cagataggcctggatgagagt

SEQ ID NO: 28680 - RNA, 21 nt, RNAi
gauaggccuggaugagaguuu

SEQ ID NO: 28681 - RNA, 21 nt, RNAi
uucuauccggaccuacucuca

SEQ ID NO: 28682 - DNA, 21 bp, Homo sapiens
cactcagctctgcaccagaga

SEQ ID NO: 28683 - RNA, 21 nt, RNAi
cucagcucugcaccagagauu

SEQ ID NO: 28684 - RNA, 21 nt, RNAi
uugagucgagacguggucucu

SEQ ID NO: 28685 - DNA, 21 bp, Homo sapiens
cagctctgcaccagagattgt

SEQ ID NO: 28686 - RNA, 21 nt, RNAi
gcucugcaccagagauuguuu

SEQ ID NO: 28687 - RNA, 21 nt, RNAi
uucgagacguggucucuaaca

SEQ ID NO: 28688 - DNA, 21 bp, Homo sapiens
caccagagattgtgcacgagg

SEQ ID NO: 28689 - RNA, 21 nt, RNAi
ccagagauugugcacgagguu

SEQ ID NO: 28690 - RNA, 21 nt, RNAi
uuggucucuaacacgugcucc

SEQ ID NO: 28691 - DNA, 21 bp, Homo sapiens
cagagattgtgcacgaggact

SEQ ID NO: 28692 - RNA, 21 nt, RNAi
gagauugugcacgaggacuuu

SEQ ID NO: 28693 - RNA, 21 nt, RNAi
uucucuaacacgugcuccuga

SEQ ID NO: 28694 - DNA, 21 bp, Homo sapiens
cacgtcctcggatgaggtgca

SEQ ID NO: 28695 - RNA, 21 nt, RNAi
cguccucggaugaggugcauu

SEQ ID NO: 28696 - RNA, 21 nt, RNAi
uugcaggagccuacuccacgu

SEQ ID NO: 28697 - DNA, 21 bp, Homo sapiens
cagtctccagtgagagtgcgt

SEQ ID NO: 28698 - RNA, 21 nt, RNAi
gucuccagugagagugcguuu

SEQ ID NO: 28699 - RNA, 21 nt, RNAi
uucagaggucacucucacgca

SEQ ID NO: 28700 - DNA, 21 bp, Homo sapiens
cagtgagagtgcgtatgcgca

SEQ ID NO: 28701 - RNA, 21 nt, RNAi
gugagagugcguaugcgcauu

SEQ ID NO: 28702 - RNA, 21 nt, RNAi
uucacucucacgcauacgcgu

SEQ ID NO: 28703 - DNA, 21 bp, Homo sapiens
cacgcaagatctccactgagg

SEQ ID NO: 28704 - RNA, 21 nt, RNAi
cgcaagaucuccacugagguu

SEQ ID NO: 28705 - RNA, 21 nt, RNAi
uugcguucuagaggugacucc

SEQ ID NO: 28706 - DNA, 21 bp, Homo sapiens
caagatctccactgaggacat

SEQ ID NO: 28707 - RNA, 21 nt, RNAi
agaucuccacugaggacauuu

SEQ ID NO: 28708 - RNA, 21 nt, RNAi
uuucuagaggugacuccugua

SEQ ID NO: 28709 - DNA, 21 bp, Homo sapiens
cactgaggacatcaacaagcg

SEQ ID NO: 28710 - RNA, 21 nt, RNAi
cugaggacaucaacaagcguu

SEQ ID NO: 28711 - RNA, 21 nt, RNAi
uugacuccuguaguuguucgc

SEQ ID NO: 28712 - DNA, 21 bp, Homo sapiens
catcaacaagcgcctatcact

SEQ ID NO: 28713 - RNA, 21 nt, RNAi
ucaacaagcgccuaucacuuu

SEQ ID NO: 28714 - RNA, 21 nt, RNAi
uuaguuguucgcggauaguga

SEQ ID NO: 28715 - DNA, 21 bp, Homo sapiens
caacaagcgcctatcactacc

SEQ ID NO: 28716 - RNA, 21 nt, RNAi
acaagcgccuaucacuaccuu

SEQ ID NO: 28717 - RNA, 21 nt, RNAi
uuuguucgcggauagugaugg

SEQ ID NO: 28718 - DNA, 21 bp, Homo sapiens
caagcgcctatcactaccagc

SEQ ID NO: 28719 - RNA, 21 nt, RNAi
agcgccuaucacuaccagcuu

SEQ ID NO: 28720 - RNA, 21 nt, RNAi
uuucgcggauagugauggucg

SEQ ID NO: 28721 - DNA, 21 bp, Homo sapiens
cactaccagctgacatccggc

SEQ ID NO: 28722 - RNA, 21 nt, RNAi
cuaccagcugacauccggcuu

SEQ ID NO: 28723 - RNA, 21 nt, RNAi
uugauggucgacuguaggccg

SEQ ID NO: 28724 - DNA, 21 bp, Homo sapiens
cagcctatctgagattggctt

SEQ ID NO: 28725 - RNA, 21 nt, RNAi
gccuaucugagauuggcuuuu

SEQ ID NO: 28726 - RNA, 21 nt, RNAi
uucggauagacucuaaccgaa

SEQ ID NO: 28727 - DNA, 21 bp, Homo sapiens
caagctcacagacaaccttgt

SEQ ID NO: 28728 - RNA, 21 nt, RNAi
agcucacagacaaccuuguuu

SEQ ID NO: 28729 - RNA, 21 nt, RNAi
uuucgagugucuguuggaaca

SEQ ID NO: 28730 - DNA, 21 bp, Homo sapiens
cacagacaaccttgtggcact

SEQ ID NO: 28731 - RNA, 21 nt, RNAi
cagacaaccuuguggcacuuu

SEQ ID NO: 28732 - RNA, 21 nt, RNAi
uugucuguuggaacaccguga

SEQ ID NO: 28733 - DNA, 21 bp, Homo sapiens
cagacaaccttgtggcactca

SEQ ID NO: 28734 - RNA, 21 nt, RNAi
gacaaccuuguggcacucauu

SEQ ID NO: 28735 - RNA, 21 nt, RNAi
uucuguuggaacaccgugagu

SEQ ID NO: 28736 - DNA, 21 bp, Homo sapiens
caaccttgtggcactcaagga

SEQ ID NO: 28737 - RNA, 21 nt, RNAi
accuuguggcacucaaggauu

SEQ ID NO: 28738 - RNA, 21 nt, RNAi
uuuggaacaccgugaguuccu

SEQ ID NO: 28739 - DNA, 21 bp, Homo sapiens
cactcaaggagatcagactgg

SEQ ID NO: 28740 - RNA, 21 nt, RNAi
cucaaggagaucagacugguu

SEQ ID NO: 28741 - RNA, 21 nt, RNAi
uugaguuccucuagucugacc

SEQ ID NO: 28742 - DNA, 21 bp, Homo sapiens
caaggagatcagactggaaca

SEQ ID NO: 28743 - RNA, 21 nt, RNAi
aggagaucagacuggaacauu

SEQ ID NO: 28744 - RNA, 21 nt, RNAi
uuuccucuagucugaccuugu

SEQ ID NO: 28745 - DNA, 21 bp, Homo sapiens
caaggacctcaaacacgccaa

SEQ ID NO: 28746 - RNA, 21 nt, RNAi
aggaccucaaacacgccaauu

SEQ ID NO: 28747 - RNA, 21 nt, RNAi
uuuccuggaguuugugcgguu

SEQ ID NO: 28748 - DNA, 21 bp, Homo sapiens
caaacacgccaacatcgttac

SEQ ID NO: 28749 - RNA, 21 nt, RNAi
aacacgccaacaucguuacuu

SEQ ID NO: 28750 - RNA, 21 nt, RNAi
uuuugugcgguuguagcaaug

SEQ ID NO: 28751 - DNA, 21 bp, Homo sapiens
cacgccaacatcgttacgcta

SEQ ID NO: 28752 - RNA, 21 nt, RNAi
cgccaacaucguuacgcuauu

SEQ ID NO: 28753 - RNA, 21 nt, RNAi
uugcgguuguagcaaugcgau

SEQ ID NO: 28754 - DNA, 21 bp, Homo sapiens
caacatcgttacgctacatga

SEQ ID NO: 28755 - RNA, 21 nt, RNAi
acaucguuacgcuacaugauu

SEQ ID NO: 28756 - RNA, 21 nt, RNAi
uuuguagcaaugcgauguacu

SEQ ID NO: 28757 - DNA, 21 bp, Homo sapiens
catcgttacgctacatgacat

SEQ ID NO: 28758 - RNA, 21 nt, RNAi
ucguuacgcuacaugacauuu

SEQ ID NO: 28759 - RNA, 21 nt, RNAi
uuagcaaugcgauguacugua

SEQ ID NO: 28760 - DNA, 21 bp, Homo sapiens
catgacattatccacacggag

SEQ ID NO: 28761 - RNA, 21 nt, RNAi
ugacauuauccacacggaguu

SEQ ID NO: 28762 - RNA, 21 nt, RNAi
uuacuguaauaggugugccuc

SEQ ID NO: 28763 - DNA, 21 bp, Homo sapiens
cattatccacacggagaagtc

SEQ ID NO: 28764 - RNA, 21 nt, RNAi
uuauccacacggagaagucuu

SEQ ID NO: 28765 - RNA, 21 nt, RNAi
uuaauaggugugccucuucag

SEQ ID NO: 28766 - DNA, 21 bp, Homo sapiens
caaggacctgaagcagtacct

SEQ ID NO: 28767 - RNA, 21 nt, RNAi
aggaccugaagcaguaccuuu

SEQ ID NO: 28768 - RNA, 21 nt, RNAi
uuuccuggacuucgucaugga

SEQ ID NO: 28769 - DNA, 21 bp, Homo sapiens
catcatcaacatgcacaacgt

SEQ ID NO: 28770 - RNA, 21 nt, RNAi
ucaucaacaugcacaacguuu

SEQ ID NO: 28771 - RNA, 21 nt, RNAi
uuaguaguuguacguguugca

SEQ ID NO: 28772 - DNA, 21 bp, Homo sapiens
catcaacatgcacaacgtgaa

SEQ ID NO: 28773 - RNA, 21 nt, RNAi
ucaacaugcacaacgugaauu

SEQ ID NO: 28774 - RNA, 21 nt, RNAi
uuaguuguacguguugcacuu

SEQ ID NO: 28775 - DNA, 21 bp, Homo sapiens
caacatgcacaacgtgaaact

SEQ ID NO: 28776 - RNA, 21 nt, RNAi
acaugcacaacgugaaacuuu

SEQ ID NO: 28777 - RNA, 21 nt, RNAi
uuuguacguguugcacuuuga

SEQ ID NO: 28778 - DNA, 21 bp, Homo sapiens
catgcacaacgtgaaactgtt

SEQ ID NO: 28779 - RNA, 21 nt, RNAi
ugcacaacgugaaacuguuuu

SEQ ID NO: 28780 - RNA, 21 nt, RNAi
uuacguguugcacuuugacaa

SEQ ID NO: 28781 - DNA, 21 bp, Homo sapiens
cacaacgtgaaactgttcctg

SEQ ID NO: 28782 - RNA, 21 nt, RNAi
caacgugaaacuguuccuguu

SEQ ID NO: 28783 - RNA, 21 nt, RNAi
uuguugcacuuugacaaggac

SEQ ID NO: 28784 - DNA, 21 bp, Homo sapiens
caacgtgaaactgttcctgtt

SEQ ID NO: 28785 - RNA, 21 nt, RNAi
acgugaaacuguuccuguuuu

SEQ ID NO: 28786 - RNA, 21 nt, RNAi
uuugcacuuugacaaggacaa

SEQ ID NO: 28787 - DNA, 21 bp, Homo sapiens
caccggcagaaggtgctacac

SEQ ID NO: 28788 - RNA, 21 nt, RNAi
ccggcagaaggugcuacacuu

SEQ ID NO: 28789 - RNA, 21 nt, RNAi
uuggccgucuuccacgaugug

SEQ ID NO: 28790 - DNA, 21 bp, Homo sapiens
cagaaggtgctacaccgagac

SEQ ID NO: 28791 - RNA, 21 nt, RNAi
gaaggugcuacaccgagacuu

SEQ ID NO: 28792 - RNA, 21 nt, RNAi
uucuuccacgauguggcucug

SEQ ID NO: 28793 - DNA, 21 bp, Homo sapiens
cagaacctgctcatcaacgag

SEQ ID NO: 28794 - RNA, 21 nt, RNAi
gaaccugcucaucaacgaguu

SEQ ID NO: 28795 - RNA, 21 nt, RNAi
uucuuggacgaguaguugcuc

SEQ ID NO: 28796 - DNA, 21 bp, Homo sapiens
caagctggctgactttggcct

SEQ ID NO: 28797 - RNA, 21 nt, RNAi
agcuggcugacuuuggccuuu

SEQ ID NO: 28798 - RNA, 21 nt, RNAi
uuucgaccgacugaaaccgga

SEQ ID NO: 28799 - DNA, 21 bp, Homo sapiens
caacaaagacatactccaatg

SEQ ID NO: 28800 - RNA, 21 nt, RNAi
acaaagacauacuccaauguu

SEQ ID NO: 28801 - RNA, 21 nt, RNAi
uuuguuucuguaugagguuac

SEQ ID NO: 28802 - DNA, 21 bp, Homo sapiens
caaagacatactccaatgagg

SEQ ID NO: 28803 - RNA, 21 nt, RNAi
aagacauacuccaaugagguu

SEQ ID NO: 28804 - RNA, 21 nt, RNAi
uuuucuguaugagguuacucc

SEQ ID NO: 28805 - DNA, 21 bp, Homo sapiens
catactccaatgaggtggtga

SEQ ID NO: 28806 - RNA, 21 nt, RNAi
uacuccaaugagguggugauu

SEQ ID NO: 28807 - RNA, 21 nt, RNAi
uuaugagguuacuccaccacu

SEQ ID NO: 28808 - DNA, 21 bp, Homo sapiens
caatgaggtggtgacactgtg

SEQ ID NO: 28809 - RNA, 21 nt, RNAi
augagguggugacacuguguu

SEQ ID NO: 28810 - RNA, 21 nt, RNAi
uuuacuccaccacugugacac

SEQ ID NO: 28811 - DNA, 21 bp, Homo sapiens
cacggactactccactcagat

SEQ ID NO: 28812 - RNA, 21 nt, RNAi
cggacuacuccacucagauuu

SEQ ID NO: 28813 - RNA, 21 nt, RNAi
uugccugaugaggugagucua

SEQ ID NO: 28814 - DNA, 21 bp, Homo sapiens
catcttctatgagatggccac

SEQ ID NO: 28815 - RNA, 21 nt, RNAi
ucuucuaugagauggccacuu

SEQ ID NO: 28816 - RNA, 21 nt, RNAi
uuagaagauacucuaccggug

SEQ ID NO: 28817 - DNA, 21 bp, Homo sapiens
cacggtggaggaacagctaca

SEQ ID NO: 28818 - RNA, 21 nt, RNAi
cgguggaggaacagcuacauu

SEQ ID NO: 28819 - RNA, 21 nt, RNAi
uugccaccuccuugucgaugu

SEQ ID NO: 28820 - DNA, 21 bp, Homo sapiens
cagctacacttcatcttccgt

SEQ ID NO: 28821 - RNA, 21 nt, RNAi
gcuacacuucaucuuccguuu

SEQ ID NO: 28822 - RNA, 21 nt, RNAi
uucgaugugaaguagaaggca

SEQ ID NO: 28823 - DNA, 21 bp, Homo sapiens
cacttcatcttccgtatctta

SEQ ID NO: 28824 - RNA, 21 nt, RNAi
cuucaucuuccguaucuuauu

SEQ ID NO: 28825 - RNA, 21 nt, RNAi
uugaaguagaaggcauagaau

SEQ ID NO: 28826 - DNA, 21 bp, Homo sapiens
catcttccgtatcttaggaac

SEQ ID NO: 28827 - RNA, 21 nt, RNAi
ucuuccguaucuuaggaacuu

SEQ ID NO: 28828 - RNA, 21 nt, RNAi
uuagaaggcauagaauccuug

SEQ ID NO: 28829 - DNA, 21 bp, Homo sapiens
caactgaggagacgtggccag

SEQ ID NO: 28830 - RNA, 21 nt, RNAi
acugaggagacguggccaguu

SEQ ID NO: 28831 - RNA, 21 nt, RNAi
uuugacuccucugcaccgguc

SEQ ID NO: 28832 - DNA, 21 bp, Homo sapiens
caggcatcctgtccaacgagg

SEQ ID NO: 28833 - RNA, 21 nt, RNAi
ggcauccuguccaacgagguu

SEQ ID NO: 28834 - RNA, 21 nt, RNAi
uuccguaggacagguugcucc

SEQ ID NO: 28835 - DNA, 21 bp, Homo sapiens
catcctgtccaacgaggagtt

SEQ ID NO: 28836 - RNA, 21 nt, RNAi
uccuguccaacgaggaguuuu

SEQ ID NO: 28837 - RNA, 21 nt, RNAi
uuaggacagguugcuccucaa

SEQ ID NO: 28838 - DNA, 21 bp, Homo sapiens
caacgaggagttcaagacata

SEQ ID NO: 28839 - RNA, 21 nt, RNAi
acgaggaguucaagacauauu

SEQ ID NO: 28840 - RNA, 21 nt, RNAi
uuugcuccucaaguucuguau

SEQ ID NO: 28841 - DNA, 21 bp, Homo sapiens
caccaagctgttgcagtttga

SEQ ID NO: 28842 - RNA, 21 nt, RNAi
ccaagcuguugcaguuugauu

SEQ ID NO: 28843 - RNA, 21 nt, RNAi
uugguucgacaacgucaaacu

SEQ ID NO: 28844 - DNA, 21 bp, Homo sapiens
cagaggatgccatgaaacatc

SEQ ID NO: 28845 - RNA, 21 nt, RNAi
gaggaugccaugaaacaucuu

SEQ ID NO: 28846 - RNA, 21 nt, RNAi
uucuccuacgguacuuuguag

SEQ ID NO: 28847 - DNA, 21 bp, Homo sapiens
catgaaacatccattcttcct

SEQ ID NO: 28848 - RNA, 21 nt, RNAi
ugaaacauccauucuuccuuu

SEQ ID NO: 28849 - RNA, 21 nt, RNAi
uuacuuuguagguaagaagga

SEQ ID NO: 28850 - DNA, 21 bp, Homo sapiens
catccattcttcctcagtctg

SEQ ID NO: 28851 - RNA, 21 nt, RNAi
uccauucuuccucagucuguu

SEQ ID NO: 28852 - RNA, 21 nt, RNAi
uuagguaagaaggagucagac

SEQ ID NO: 28853 - DNA, 21 bp, Homo sapiens
cacaaacttcctgacactact

SEQ ID NO: 28854 - RNA, 21 nt, RNAi
caaacuuccugacacuacuuu

SEQ ID NO: 28855 - RNA, 21 nt, RNAi
uuguuugaaggacugugauga

SEQ ID NO: 28856 - DNA, 21 bp, Homo sapiens
caaacttcctgacactacttc

SEQ ID NO: 28857 - RNA, 21 nt, RNAi
aacuuccugacacuacuucuu

SEQ ID NO: 28858 - RNA, 21 nt, RNAi
uuuugaaggacugugaugaag

SEQ ID NO: 28859 - DNA, 21 bp, Homo sapiens
cactacttccatatttgcact

SEQ ID NO: 28860 - RNA, 21 nt, RNAi
cuacuuccauauuugcacuuu

SEQ ID NO: 28861 - RNA, 21 nt, RNAi
uugaugaagguauaaacguga

SEQ ID NO: 28862 - DNA, 21 bp, Homo sapiens
catatttgcactaaaggagat

SEQ ID NO: 28863 - RNA, 21 nt, RNAi
uauuugcacuaaaggagauuu

SEQ ID NO: 28864 - RNA, 21 nt, RNAi
uuauaaacgugauuuccucua

SEQ ID NO: 28865 - DNA, 21 bp, Homo sapiens
cactaaaggagattcagctac

SEQ ID NO: 28866 - RNA, 21 nt, RNAi
cuaaaggagauucagcuacuu

SEQ ID NO: 28867 - RNA, 21 nt, RNAi
uugauuuccucuaagucgaug

SEQ ID NO: 28868 - DNA, 21 bp, Homo sapiens
cagccttcggtcttcgtcgat

SEQ ID NO: 28869 - RNA, 21 nt, RNAi
gccuucggucuucgucgauuu

SEQ ID NO: 28870 - RNA, 21 nt, RNAi
uucggaagccagaagcagcua

SEQ ID NO: 28871 - DNA, 21 bp, Homo sapiens
cagctttccgcgtggtggaca

SEQ ID NO: 28872 - RNA, 21 nt, RNAi
gcuuuccgcgugguggacauu

SEQ ID NO: 28873 - RNA, 21 nt, RNAi
uucgaaaggcgcaccaccugu

SEQ ID NO: 28874 - DNA, 21 bp, Homo sapiens
caccgagttctaagccacaga

SEQ ID NO: 28875 - RNA, 21 nt, RNAi
ccgaguucuaagccacagauu

SEQ ID NO: 28876 - RNA, 21 nt, RNAi
uuggcucaagauucggugucu

SEQ ID NO: 28877 - DNA, 21 bp, Homo sapiens
caaagctctcatcactccttc

SEQ ID NO: 28878 - RNA, 21 nt, RNAi
aagcucucaucacuccuucuu

SEQ ID NO: 28879 - RNA, 21 nt, RNAi
uuuucgagaguagugaggaag

SEQ ID NO: 28880 - DNA, 21 bp, Homo sapiens
catcactccttcacttggtct

SEQ ID NO: 28881 - RNA, 21 nt, RNAi
ucacuccuucacuuggucuuu

SEQ ID NO: 28882 - RNA, 21 nt, RNAi
uuagugaggaagugaaccaga

SEQ ID NO: 28883 - DNA, 21 bp, Homo sapiens
cactccttcacttggtctgtc

SEQ ID NO: 28884 - RNA, 21 nt, RNAi
cuccuucacuuggucugucuu

SEQ ID NO: 28885 - RNA, 21 nt, RNAi
uugaggaagugaaccagacag

SEQ ID NO: 28886 - DNA, 21 bp, Homo sapiens
cacttggtctgtctgtctctg

SEQ ID NO: 28887 - RNA, 21 nt, RNAi
cuuggucugucugucucuguu

SEQ ID NO: 28888 - RNA, 21 nt, RNAi
uugaaccagacagacagagac

SEQ ID NO: 28889 - DNA, 21 bp, Homo sapiens
cacactgaggccaggtctacc

SEQ ID NO: 28890 - RNA, 21 nt, RNAi
cacugaggccaggucuaccuu

SEQ ID NO: 28891 - RNA, 21 nt, RNAi
uugugacuccgguccagaugg

SEQ ID NO: 28892 - DNA, 21 bp, Homo sapiens
cagacaagatggtgacaatgc

SEQ ID NO: 28893 - RNA, 21 nt, RNAi
gacaagauggugacaaugcuu

SEQ ID NO: 28894 - RNA, 21 nt, RNAi
uucuguucuaccacuguuacg

SEQ ID NO: 28895 - DNA, 21 bp, Homo sapiens
caagatggtgacaatgccttg

SEQ ID NO: 28896 - RNA, 21 nt, RNAi
agauggugacaaugccuuguu

SEQ ID NO: 28897 - RNA, 21 nt, RNAi
uuucuaccacuguuacggaac

SEQ ID NO: 28898 - DNA, 21 bp, Homo sapiens
caatgccttgagtctgaggca

SEQ ID NO: 28899 - RNA, 21 nt, RNAi
augccuugagucugaggcauu

SEQ ID NO: 28900 - RNA, 21 nt, RNAi
uuuacggaacucagacuccgu

SEQ ID NO: 28901 - DNA, 21 bp, Homo sapiens
catcctctgcctgctttcctg

SEQ ID NO: 28902 - RNA, 21 nt, RNAi
uccucugccugcuuuccuguu

SEQ ID NO: 28903 - RNA, 21 nt, RNAi
uuaggagacggacgaaaggac

SEQ ID NO: 28904 - DNA, 21 bp, Homo sapiens
cacctgcctcatattgtgtgg

SEQ ID NO: 28905 - RNA, 21 nt, RNAi
ccugccucauauugugugguu

SEQ ID NO: 28906 - RNA, 21 nt, RNAi
uuggacggaguauaacacacc

SEQ ID NO: 28907 - DNA, 21 bp, Homo sapiens
caatatctctgtatacagact

SEQ ID NO: 28908 - RNA, 21 nt, RNAi
auaucucuguauacagacuuu

SEQ ID NO: 28909 - RNA, 21 nt, RNAi
uuuauagagacauaugucuga

SEQ ID NO: 28910 - DNA, 21 bp, Homo sapiens
catgccacagccactcgcctt

SEQ ID NO: 28911 - RNA, 21 nt, RNAi
ugccacagccacucgccuuuu

SEQ ID NO: 28912 - RNA, 21 nt, RNAi
uuacggugucggugagcggaa

SEQ ID NO: 28913 - DNA, 21 bp, Homo sapiens
cacagccactcgccttcctac

SEQ ID NO: 28914 - RNA, 21 nt, RNAi
cagccacucgccuuccuacuu

SEQ ID NO: 28915 - RNA, 21 nt, RNAi
uugucggugagcggaaggaug

SEQ ID NO: 28916 - DNA, 21 bp, Homo sapiens
cactctttctctcctgcagtc

SEQ ID NO: 28917 - RNA, 21 nt, RNAi
cucuuucucuccugcagucuu

SEQ ID NO: 28918 - RNA, 21 nt, RNAi
uugagaaagagaggacgucag

SEQ ID NO: 28919 - DNA, 21 bp, Homo sapiens
caggaactgaccagctcagcg

SEQ ID NO: 28920 - RNA, 21 nt, RNAi
ggaacugaccagcucagcguu

SEQ ID NO: 28921 - RNA, 21 nt, RNAi
uuccuugacuggucgagucgc

SEQ ID NO: 28922 - DNA, 21 bp, Homo sapiens
cagctcagcgaggagccataa

SEQ ID NO: 28923 - RNA, 21 nt, RNAi
gcucagcgaggagccauaauu

SEQ ID NO: 28924 - RNA, 21 nt, RNAi
uucgagucgcuccucgguauu

SEQ ID NO: 28925 - DNA, 21 bp, Homo sapiens
cagcgaggagccataatgtgc

SEQ ID NO: 28926 - RNA, 21 nt, RNAi
gcgaggagccauaaugugcuu

SEQ ID NO: 28927 - RNA, 21 nt, RNAi
uucgcuccucgguauuacacg

SEQ ID NO: 28928 - DNA, 21 bp, Homo sapiens
cataatgtgcatatgtgcaca

SEQ ID NO: 28929 - RNA, 21 nt, RNAi
uaaugugcauaugugcacauu

SEQ ID NO: 28930 - RNA, 21 nt, RNAi
uuauuacacguauacacgugu

SEQ ID NO: 28931 - DNA, 21 bp, Homo sapiens
caccataatcgctgtatgaaa

SEQ ID NO: 28932 - RNA, 21 nt, RNAi
ccauaaucgcuguaugaaauu

SEQ ID NO: 28933 - RNA, 21 nt, RNAi
uugguauuagcgacauacuuu

SEQ ID NO: 28934 - DNA, 21 bp, Homo sapiens
gagcactcggattcaagccgg

SEQ ID NO: 28935 - RNA, 21 nt, RNAi
gcacucggauucaagccgguu

SEQ ID NO: 28936 - RNA, 21 nt, RNAi
uucgugagccuaaguucggcc

SEQ ID NO: 28937 - DNA, 21 bp, Homo sapiens
gaacaggaggagaaggaggtc

SEQ ID NO: 28938 - RNA, 21 nt, RNAi
acaggaggagaaggaggucuu

SEQ ID NO: 28939 - RNA, 21 nt, RNAi
uuuguccuccucuuccuccag

SEQ ID NO: 28940 - DNA, 21 bp, Homo sapiens
gatcgccatggatcggatgaa

SEQ ID NO: 28941 - RNA, 21 nt, RNAi
ucgccauggaucggaugaauu

SEQ ID NO: 28942 - RNA, 21 nt, RNAi
uuagcgguaccuagccuacuu

SEQ ID NO: 28943 - DNA, 21 bp, Homo sapiens
gatcggatgaagaagatcaaa

SEQ ID NO: 28944 - RNA, 21 nt, RNAi
ucggaugaagaagaucaaauu

SEQ ID NO: 28945 - RNA, 21 nt, RNAi
uuagccuacuucuucuaguuu

SEQ ID NO: 28946 - DNA, 21 bp, Homo sapiens
gatgaagaagatcaaacggca

SEQ ID NO: 28947 - RNA, 21 nt, RNAi
ugaagaagaucaaacggcauu

SEQ ID NO: 28948 - RNA, 21 nt, RNAi
uuacuucuucuaguuugccgu

SEQ ID NO: 28949 - DNA, 21 bp, Homo sapiens
gaagaagatcaaacggcagct

SEQ ID NO: 28950 - RNA, 21 nt, RNAi
agaagaucaaacggcagcuuu

SEQ ID NO: 28951 - RNA, 21 nt, RNAi
uuucuucuaguuugccgucga

SEQ ID NO: 28952 - DNA, 21 bp, Homo sapiens
gaagatcaaacggcagctgtc

SEQ ID NO: 28953 - RNA, 21 nt, RNAi
agaucaaacggcagcugucuu

SEQ ID NO: 28954 - RNA, 21 nt, RNAi
uuucuaguuugccgucgacag

SEQ ID NO: 28955 - DNA, 21 bp, Homo sapiens
gatcaaacggcagctgtcaat

SEQ ID NO: 28956 - RNA, 21 nt, RNAi
ucaaacggcagcugucaauuu

SEQ ID NO: 28957 - RNA, 21 nt, RNAi
uuaguuugccgucgacaguua

SEQ ID NO: 28958 - DNA, 21 bp, Homo sapiens
gaggtggccgaggcatagaca

SEQ ID NO: 28959 - RNA, 21 nt, RNAi
gguggccgaggcauagacauu

SEQ ID NO: 28960 - RNA, 21 nt, RNAi
uuccaccggcuccguaucugu

SEQ ID NO: 28961 - DNA, 21 bp, Homo sapiens
gaggcatagacaagaccaatg

SEQ ID NO: 28962 - RNA, 21 nt, RNAi
ggcauagacaagaccaauguu

SEQ ID NO: 28963 - RNA, 21 nt, RNAi
uuccguaucuguucugguuac

SEQ ID NO: 28964 - DNA, 21 bp, Homo sapiens
gagcagataggcctggatgag

SEQ ID NO: 28965 - RNA, 21 nt, RNAi
gcagauaggccuggaugaguu

SEQ ID NO: 28966 - RNA, 21 nt, RNAi
uucgucuauccggaccuacuc

SEQ ID NO: 28967 - DNA, 21 bp, Homo sapiens
gataggcctggatgagagtgg

SEQ ID NO: 28968 - RNA, 21 nt, RNAi
uaggccuggaugagagugguu

SEQ ID NO: 28969 - RNA, 21 nt, RNAi
uuauccggaccuacucucacc

SEQ ID NO: 28970 - DNA, 21 bp, Homo sapiens
gatgagagtggtggtggtggc

SEQ ID NO: 28971 - RNA, 21 nt, RNAi
ugagagugguggugguggcuu

SEQ ID NO: 28972 - RNA, 21 nt, RNAi
uuacucucaccaccaccaccg

SEQ ID NO: 28973 - DNA, 21 bp, Homo sapiens
gagattgtgcacgaggacttg

SEQ ID NO: 28974 - RNA, 21 nt, RNAi
gauugugcacgaggacuuguu

SEQ ID NO: 28975 - RNA, 21 nt, RNAi
uucuaacacgugcuccugaac

SEQ ID NO: 28976 - DNA, 21 bp, Homo sapiens
gattgtgcacgaggacttgaa

SEQ ID NO: 28977 - RNA, 21 nt, RNAi
uugugcacgaggacuugaauu

SEQ ID NO: 28978 - RNA, 21 nt, RNAi
uuaacacgugcuccugaacuu

SEQ ID NO: 28979 - DNA, 21 bp, Homo sapiens
gagagtgaccaggcttcagcc

SEQ ID NO: 28980 - RNA, 21 nt, RNAi
gagugaccaggcuucagccuu

SEQ ID NO: 28981 - RNA, 21 nt, RNAi
uucucacugguccgaagucgg

SEQ ID NO: 28982 - DNA, 21 bp, Homo sapiens
gagtgaccaggcttcagccac

SEQ ID NO: 28983 - RNA, 21 nt, RNAi
gugaccaggcuucagccacuu

SEQ ID NO: 28984 - RNA, 21 nt, RNAi
uucacugguccgaagucggug

SEQ ID NO: 28985 - DNA, 21 bp, Homo sapiens
gatgaggtgcagtctccagtg

SEQ ID NO: 28986 - RNA, 21 nt, RNAi
ugaggugcagucuccaguguu

SEQ ID NO: 28987 - RNA, 21 nt, RNAi
uuacuccacgucagaggucac

SEQ ID NO: 28988 - DNA, 21 bp, Homo sapiens
gaggtgcagtctccagtgaga

SEQ ID NO: 28989 - RNA, 21 nt, RNAi
ggugcagucuccagugagauu

SEQ ID NO: 28990 - RNA, 21 nt, RNAi
uuccacgucagaggucacucu

SEQ ID NO: 28991 - DNA, 21 bp, Homo sapiens
gagagtgcgtatgcgcaacca

SEQ ID NO: 28992 - RNA, 21 nt, RNAi
gagugcguaugcgcaaccauu

SEQ ID NO: 28993 - RNA, 21 nt, RNAi
uucucacgcauacgcguuggu

SEQ ID NO: 28994 - DNA, 21 bp, Homo sapiens
gagtgcgtatgcgcaaccatc

SEQ ID NO: 28995 - RNA, 21 nt, RNAi
gugcguaugcgcaaccaucuu

SEQ ID NO: 28996 - RNA, 21 nt, RNAi
uucacgcauacgcguugguag

SEQ ID NO: 28997 - DNA, 21 bp, Homo sapiens
gatctccactgaggacatcaa

SEQ ID NO: 28998 - RNA, 21 nt, RNAi
ucuccacugaggacaucaauu

SEQ ID NO: 28999 - RNA, 21 nt, RNAi
uuagaggugacuccuguaguu

SEQ ID NO: 29000 - DNA, 21 bp, Homo sapiens
gaggacatcaacaagcgccta

SEQ ID NO: 29001 - RNA, 21 nt, RNAi
ggacaucaacaagcgccuauu

SEQ ID NO: 29002 - RNA, 21 nt, RNAi
uuccuguaguuguucgcggau

SEQ ID NO: 29003 - DNA, 21 bp, Homo sapiens
gacatcaacaagcgcctatca

SEQ ID NO: 29004 - RNA, 21 nt, RNAi
caucaacaagcgccuaucauu

SEQ ID NO: 29005 - RNA, 21 nt, RNAi
uuguaguuguucgcggauagu

SEQ ID NO: 29006 - DNA, 21 bp, Homo sapiens
gaaactggagacctacattaa

SEQ ID NO: 29007 - RNA, 21 nt, RNAi
aacuggagaccuacauuaauu

SEQ ID NO: 29008 - RNA, 21 nt, RNAi
uuuugaccucuggauguaauu

SEQ ID NO: 29009 - DNA, 21 bp, Homo sapiens
gagacctacattaagctggac

SEQ ID NO: 29010 - RNA, 21 nt, RNAi
gaccuacauuaagcuggacuu

SEQ ID NO: 29011 - RNA, 21 nt, RNAi
uucuggauguaauucgaccug

SEQ ID NO: 29012 - DNA, 21 bp, Homo sapiens
gacctacattaagctggacaa

SEQ ID NO: 29013 - RNA, 21 nt, RNAi
ccuacauuaagcuggacaauu

SEQ ID NO: 29014 - RNA, 21 nt, RNAi
uuggauguaauucgaccuguu

SEQ ID NO: 29015 - DNA, 21 bp, Homo sapiens
gacaaccttgtggcactcaag

SEQ ID NO: 29016 - RNA, 21 nt, RNAi
caaccuuguggcacucaaguu

SEQ ID NO: 29017 - RNA, 21 nt, RNAi
uuguuggaacaccgugaguuc

SEQ ID NO: 29018 - DNA, 21 bp, Homo sapiens
gagatcagactggaacatgaa

SEQ ID NO: 29019 - RNA, 21 nt, RNAi
gaucagacuggaacaugaauu

SEQ ID NO: 29020 - RNA, 21 nt, RNAi
uucuagucugaccuuguacuu

SEQ ID NO: 29021 - DNA, 21 bp, Homo sapiens
gatcagactggaacatgaaga

SEQ ID NO: 29022 - RNA, 21 nt, RNAi
ucagacuggaacaugaagauu

SEQ ID NO: 29023 - RNA, 21 nt, RNAi
uuagucugaccuuguacuucu

SEQ ID NO: 29024 - DNA, 21 bp, Homo sapiens
gacctcaaacacgccaacatc

SEQ ID NO: 29025 - RNA, 21 nt, RNAi
ccucaaacacgccaacaucuu

SEQ ID NO: 29026 - RNA, 21 nt, RNAi
uuggaguuugugcgguuguag

SEQ ID NO: 29027 - DNA, 21 bp, Homo sapiens
gacattatccacacggagaag

SEQ ID NO: 29028 - RNA, 21 nt, RNAi
cauuauccacacggagaaguu

SEQ ID NO: 29029 - RNA, 21 nt, RNAi
uuguaauaggugugccucuuc

SEQ ID NO: 29030 - DNA, 21 bp, Homo sapiens
gagtacctggacaaggacctg

SEQ ID NO: 29031 - RNA, 21 nt, RNAi
guaccuggacaaggaccuguu

SEQ ID NO: 29032 - RNA, 21 nt, RNAi
uucauggaccuguuccuggac

SEQ ID NO: 29033 - DNA, 21 bp, Homo sapiens
gacaaggacctgaagcagtac

SEQ ID NO: 29034 - RNA, 21 nt, RNAi
caaggaccugaagcaguacuu

SEQ ID NO: 29035 - RNA, 21 nt, RNAi
uuguuccuggacuucgucaug

SEQ ID NO: 29036 - DNA, 21 bp, Homo sapiens
gacctgaagcagtacctggat

SEQ ID NO: 29037 - RNA, 21 nt, RNAi
ccugaagcaguaccuggauuu

SEQ ID NO: 29038 - RNA, 21 nt, RNAi
uuggacuucgucauggaccua

SEQ ID NO: 29039 - DNA, 21 bp, Homo sapiens
gaagcagtacctggatgactg

SEQ ID NO: 29040 - RNA, 21 nt, RNAi
agcaguaccuggaugacuguu

SEQ ID NO: 29041 - RNA, 21 nt, RNAi
uuucgucauggaccuacugac

SEQ ID NO: 29042 - DNA, 21 bp, Homo sapiens
gaacatcatcaacatgcacaa

SEQ ID NO: 29043 - RNA, 21 nt, RNAi
acaucaucaacaugcacaauu

SEQ ID NO: 29044 - RNA, 21 nt, RNAi
uuuguaguaguuguacguguu

SEQ ID NO: 29045 - DNA, 21 bp, Homo sapiens
gaaactgttcctgttccagct

SEQ ID NO: 29046 - RNA, 21 nt, RNAi
aacuguuccuguuccagcuuu

SEQ ID NO: 29047 - RNA, 21 nt, RNAi
uuuugacaaggacaaggucga

SEQ ID NO: 29048 - DNA, 21 bp, Homo sapiens
gaaggtgctacaccgagacct

SEQ ID NO: 29049 - RNA, 21 nt, RNAi
aggugcuacaccgagaccuuu

SEQ ID NO: 29050 - RNA, 21 nt, RNAi
uuuccacgauguggcucugga

SEQ ID NO: 29051 - DNA, 21 bp, Homo sapiens
gaacctgctcatcaacgagag

SEQ ID NO: 29052 - RNA, 21 nt, RNAi
accugcucaucaacgagaguu

SEQ ID NO: 29053 - RNA, 21 nt, RNAi
uuuggacgaguaguugcucuc

SEQ ID NO: 29054 - DNA, 21 bp, Homo sapiens
gagagctcaagctggctgact

SEQ ID NO: 29055 - RNA, 21 nt, RNAi
gagcucaagcuggcugacuuu

SEQ ID NO: 29056 - RNA, 21 nt, RNAi
uucucgaguucgaccgacuga

SEQ ID NO: 29057 - DNA, 21 bp, Homo sapiens
gagctcaagctggctgacttt

SEQ ID NO: 29058 - RNA, 21 nt, RNAi
gcucaagcuggcugacuuuuu

SEQ ID NO: 29059 - RNA, 21 nt, RNAi
uucgaguucgaccgacugaaa

SEQ ID NO: 29060 - DNA, 21 bp, Homo sapiens
gacatactccaatgaggtggt

SEQ ID NO: 29061 - RNA, 21 nt, RNAi
cauacuccaaugaggugguuu

SEQ ID NO: 29062 - RNA, 21 nt, RNAi
uuguaugagguuacuccacca

SEQ ID NO: 29063 - DNA, 21 bp, Homo sapiens
gaggtggtgacactgtggtac

SEQ ID NO: 29064 - RNA, 21 nt, RNAi
gguggugacacugugguacuu

SEQ ID NO: 29065 - RNA, 21 nt, RNAi
uuccaccacugugacaccaug

SEQ ID NO: 29066 - DNA, 21 bp, Homo sapiens
gactactccactcagattgac

SEQ ID NO: 29067 - RNA, 21 nt, RNAi
cuacuccacucagauugacuu

SEQ ID NO: 29068 - RNA, 21 nt, RNAi
uugaugaggugagucuaacug

SEQ ID NO: 29069 - DNA, 21 bp, Homo sapiens
gaggaacagctacacttcatc

SEQ ID NO: 29070 - RNA, 21 nt, RNAi
ggaacagcuacacuucaucuu

SEQ ID NO: 29071 - RNA, 21 nt, RNAi
uuccuugucgaugugaaguag

SEQ ID NO: 29072 - DNA, 21 bp, Homo sapiens
gaacagctacacttcatcttc

SEQ ID NO: 29073 - RNA, 21 nt, RNAi
acagcuacacuucaucuucuu

SEQ ID NO: 29074 - RNA, 21 nt, RNAi
uuugucgaugugaaguagaag

SEQ ID NO: 29075 - DNA, 21 bp, Homo sapiens
gaggagttcaagacatacaac

SEQ ID NO: 29076 - RNA, 21 nt, RNAi
ggaguucaagacauacaacuu

SEQ ID NO: 29077 - RNA, 21 nt, RNAi
uuccucaaguucuguauguug

SEQ ID NO: 29078 - DNA, 21 bp, Homo sapiens
gagttcaagacatacaactac

SEQ ID NO: 29079 - RNA, 21 nt, RNAi
guucaagacauacaacuacuu

SEQ ID NO: 29080 - RNA, 21 nt, RNAi
uucaaguucuguauguugaug

SEQ ID NO: 29081 - DNA, 21 bp, Homo sapiens
gacctcctcaccaagctgttg

SEQ ID NO: 29082 - RNA, 21 nt, RNAi
ccuccucaccaagcuguuguu

SEQ ID NO: 29083 - RNA, 21 nt, RNAi
uuggaggagugguucgacaac

SEQ ID NO: 29084 - DNA, 21 bp, Homo sapiens
gaaatcggatctccgcagagg

SEQ ID NO: 29085 - RNA, 21 nt, RNAi
aaucggaucuccgcagagguu

SEQ ID NO: 29086 - RNA, 21 nt, RNAi
uuuuagccuagaggcgucucc

SEQ ID NO: 29087 - DNA, 21 bp, Homo sapiens
gatctccgcagaggatgccat

SEQ ID NO: 29088 - RNA, 21 nt, RNAi
ucuccgcagaggaugccauuu

SEQ ID NO: 29089 - RNA, 21 nt, RNAi
uuagaggcgucuccuacggua

SEQ ID NO: 29090 - DNA, 21 bp, Homo sapiens
gaggatgccatgaaacatcca

SEQ ID NO: 29091 - RNA, 21 nt, RNAi
ggaugccaugaaacauccauu

SEQ ID NO: 29092 - RNA, 21 nt, RNAi
uuccuacgguacuuuguaggu

SEQ ID NO: 29093 - DNA, 21 bp, Homo sapiens
gatgccatgaaacatccattc

SEQ ID NO: 29094 - RNA, 21 nt, RNAi
ugccaugaaacauccauucuu

SEQ ID NO: 29095 - RNA, 21 nt, RNAi
uuacgguacuuuguagguaag

SEQ ID NO: 29096 - DNA, 21 bp, Homo sapiens
gaaacatccattcttcctcag

SEQ ID NO: 29097 - RNA, 21 nt, RNAi
aacauccauucuuccucaguu

SEQ ID NO: 29098 - RNA, 21 nt, RNAi
uuuuguagguaagaaggaguc

SEQ ID NO: 29099 - DNA, 21 bp, Homo sapiens
gagcggatccacaaacttcct

SEQ ID NO: 29100 - RNA, 21 nt, RNAi
gcggauccacaaacuuccuuu

SEQ ID NO: 29101 - RNA, 21 nt, RNAi
uucgccuagguguuugaagga

SEQ ID NO: 29102 - DNA, 21 bp, Homo sapiens
gatccacaaacttcctgacac

SEQ ID NO: 29103 - RNA, 21 nt, RNAi
uccacaaacuuccugacacuu

SEQ ID NO: 29104 - RNA, 21 nt, RNAi
uuagguguuugaaggacugug

SEQ ID NO: 29105 - DNA, 21 bp, Homo sapiens
gacactacttccatatttgca

SEQ ID NO: 29106 - RNA, 21 nt, RNAi
cacuacuuccauauuugcauu

SEQ ID NO: 29107 - RNA, 21 nt, RNAi
uugugaugaagguauaaacgu

SEQ ID NO: 29108 - DNA, 21 bp, Homo sapiens
gactcaggcaggccagctttc

SEQ ID NO: 29109 - RNA, 21 nt, RNAi
cucaggcaggccagcuuucuu

SEQ ID NO: 29110 - RNA, 21 nt, RNAi
uugaguccguccggucgaaag

SEQ ID NO: 29111 - DNA, 21 bp, Homo sapiens
gacaccgagttctaagccaca

SEQ ID NO: 29112 - RNA, 21 nt, RNAi
caccgaguucuaagccacauu

SEQ ID NO: 29113 - RNA, 21 nt, RNAi
uuguggcucaagauucggugu

SEQ ID NO: 29114 - DNA, 21 bp, Homo sapiens
gagttctaagccacagaccga

SEQ ID NO: 29115 - RNA, 21 nt, RNAi
guucuaagccacagaccgauu

SEQ ID NO: 29116 - RNA, 21 nt, RNAi
uucaagauucggugucuggcu

SEQ ID NO: 29117 - DNA, 21 bp, Homo sapiens
gatctcgactcagacaagatg

SEQ ID NO: 29118 - RNA, 21 nt, RNAi
ucucgacucagacaagauguu

SEQ ID NO: 29119 - RNA, 21 nt, RNAi
uuagagcugagucuguucuac

SEQ ID NO: 29120 - DNA, 21 bp, Homo sapiens
gactcagacaagatggtgaca

SEQ ID NO: 29121 - RNA, 21 nt, RNAi
cucagacaagauggugacauu

SEQ ID NO: 29122 - RNA, 21 nt, RNAi
uugagucuguucuaccacugu

SEQ ID NO: 29123 - DNA, 21 bp, Homo sapiens
gacaagatggtgacaatgcct

SEQ ID NO: 29124 - RNA, 21 nt, RNAi
caagauggugacaaugccuuu

SEQ ID NO: 29125 - RNA, 21 nt, RNAi
uuguucuaccacuguuacgga

SEQ ID NO: 29126 - DNA, 21 bp, Homo sapiens
gatggtgacaatgccttgagt

SEQ ID NO: 29127 - RNA, 21 nt, RNAi
uggugacaaugccuugaguuu

SEQ ID NO: 29128 - RNA, 21 nt, RNAi
uuaccacuguuacggaacuca

SEQ ID NO: 29129 - DNA, 21 bp, Homo sapiens
gacaatgccttgagtctgagg

SEQ ID NO: 29130 - RNA, 21 nt, RNAi
caaugccuugagucugagguu

SEQ ID NO: 29131 - RNA, 21 nt, RNAi
uuguuacggaacucagacucc

SEQ ID NO: 29132 - DNA, 21 bp, Homo sapiens
gagtctgaggcatcctctgcc

SEQ ID NO: 29133 - RNA, 21 nt, RNAi
gucugaggcauccucugccuu

SEQ ID NO: 29134 - RNA, 21 nt, RNAi
uucagacuccguaggagacgg

SEQ ID NO: 29135 - DNA, 21 bp, Homo sapiens
gaggcatcctctgcctgcttt

SEQ ID NO: 29136 - RNA, 21 nt, RNAi
ggcauccucugccugcuuuuu

SEQ ID NO: 29137 - RNA, 21 nt, RNAi
uuccguaggagacggacgaaa

SEQ ID NO: 29138 - DNA, 21 bp, Homo sapiens
gaaagcatgccacagccactc

SEQ ID NO: 29139 - RNA, 21 nt, RNAi
aagcaugccacagccacucuu

SEQ ID NO: 29140 - RNA, 21 nt, RNAi
uuuucguacggugucggugag

SEQ ID NO: 29141 - DNA, 21 bp, Homo sapiens
gaactgaccagctcagcgagg

SEQ ID NO: 29142 - RNA, 21 nt, RNAi
acugaccagcucagcgagguu

SEQ ID NO: 29143 - RNA, 21 nt, RNAi
uuugacuggucgagucgcucc

SEQ ID NO: 29144 - DNA, 21 bp, Homo sapiens
gaggagccataatgtgcatat

SEQ ID NO: 29145 - RNA, 21 nt, RNAi
ggagccauaaugugcauauuu

SEQ ID NO: 29146 - RNA, 21 nt, RNAi
uuccucgguauuacacguaua

SEQ ID NO: 29147 - DNA, 21 bp, Homo sapiens
gagccataatgtgcatatgtg

SEQ ID NO: 29148 - RNA, 21 nt, RNAi
gccauaaugugcauauguguu

SEQ ID NO: 29149 - RNA, 21 nt, RNAi
uucgguauuacacguauacac

SEQ ID NO: 29150 - DNA, 21 bp, Homo sapiens
gaatgcaccataatcgctgta

SEQ ID NO: 29151 - RNA, 21 nt, RNAi
augcaccauaaucgcuguauu

SEQ ID NO: 29152 - RNA, 21 nt, RNAi
uuuacgugguauuagcgacau

SEQ ID NO: 29153 - DNA, 21 bp, Homo sapiens
taggcctggatgagagtggtg

SEQ ID NO: 29154 - RNA, 21 nt, RNAi
ggccuggaugagagugguguu

SEQ ID NO: 29155 - RNA, 21 nt, RNAi
uuccggaccuacucucaccac

SEQ ID NO: 29156 - DNA, 21 bp, Homo sapiens
tatcactaccagctgacatcc

SEQ ID NO: 29157 - RNA, 21 nt, RNAi
ucacuaccagcugacauccuu

SEQ ID NO: 29158 - RNA, 21 nt, RNAi
uuagugauggucgacuguagg

SEQ ID NO: 29159 - DNA, 21 bp, Homo sapiens
taccagctgacatccggctgc

SEQ ID NO: 29160 - RNA, 21 nt, RNAi
ccagcugacauccggcugcuu

SEQ ID NO: 29161 - RNA, 21 nt, RNAi
uuggucgacuguaggccgacg

SEQ ID NO: 29162 - DNA, 21 bp, Homo sapiens
tacattaagctggacaaactg

SEQ ID NO: 29163 - RNA, 21 nt, RNAi
cauuaagcuggacaaacuguu

SEQ ID NO: 29164 - RNA, 21 nt, RNAi
uuguaauucgaccuguuugac

SEQ ID NO: 29165 - DNA, 21 bp, Homo sapiens
tacctatgccaccgtctacaa

SEQ ID NO: 29166 - RNA, 21 nt, RNAi
ccuaugccaccgucuacaauu

SEQ ID NO: 29167 - RNA, 21 nt, RNAi
uuggauacgguggcagauguu

SEQ ID NO: 29168 - DNA, 21 bp, Homo sapiens
tatgccaccgtctacaaaggc

SEQ ID NO: 29169 - RNA, 21 nt, RNAi
ugccaccgucuacaaaggcuu

SEQ ID NO: 29170 - RNA, 21 nt, RNAi
uuacgguggcagauguuuccg

SEQ ID NO: 29171 - DNA, 21 bp, Homo sapiens
tacgctacatgacattatcca

SEQ ID NO: 29172 - RNA, 21 nt, RNAi
cgcuacaugacauuauccauu

SEQ ID NO: 29173 - RNA, 21 nt, RNAi
uugcgauguacuguaauaggu

SEQ ID NO: 29174 - DNA, 21 bp, Homo sapiens
tacatgacattatccacacgg

SEQ ID NO: 29175 - RNA, 21 nt, RNAi
caugacauuauccacacgguu

SEQ ID NO: 29176 - RNA, 21 nt, RNAi
uuguacuguaauaggugugcc

SEQ ID NO: 29177 - DNA, 21 bp, Homo sapiens
tacctggacaaggacctgaag

SEQ ID NO: 29178 - RNA, 21 nt, RNAi
ccuggacaaggaccugaaguu

SEQ ID NO: 29179 - RNA, 21 nt, RNAi
uuggaccuguuccuggacuuc

SEQ ID NO: 29180 - DNA, 21 bp, Homo sapiens
tactgccaccggcagaaggtg

SEQ ID NO: 29181 - RNA, 21 nt, RNAi
cugccaccggcagaagguguu

SEQ ID NO: 29182 - RNA, 21 nt, RNAi
uugacgguggccgucuuccac

SEQ ID NO: 29183 - DNA, 21 bp, Homo sapiens
tactccaatgaggtggtgaca

SEQ ID NO: 29184 - RNA, 21 nt, RNAi
cuccaaugagguggugacauu

SEQ ID NO: 29185 - RNA, 21 nt, RNAi
uugagguuacuccaccacugu

SEQ ID NO: 29186 - DNA, 21 bp, Homo sapiens
tactccactcagattgacatg

SEQ ID NO: 29187 - RNA, 21 nt, RNAi
cuccacucagauugacauguu

SEQ ID NO: 29188 - RNA, 21 nt, RNAi
uugaggugagucuaacuguac

SEQ ID NO: 29189 - DNA, 21 bp, Homo sapiens
tatgagatggccacaggccgt

SEQ ID NO: 29190 - RNA, 21 nt, RNAi
ugagauggccacaggccguuu

SEQ ID NO: 29191 - RNA, 21 nt, RNAi
uuacucuaccgguguccggca

SEQ ID NO: 29192 - DNA, 21 bp, Homo sapiens
tacacttcatcttccgtatct

SEQ ID NO: 29193 - RNA, 21 nt, RNAi
cacuucaucuuccguaucuuu

SEQ ID NO: 29194 - RNA, 21 nt, RNAi
uugugaaguagaaggcauaga

SEQ ID NO: 29195 - DNA, 21 bp, Homo sapiens
tatttgcactaaaggagattc

SEQ ID NO: 29196 - RNA, 21 nt, RNAi
uuugcacuaaaggagauucuu

SEQ ID NO: 29197 - RNA, 21 nt, RNAi
uuaaacgugauuuccucuaag

SEQ ID NO: 29198 - DNA, 21 bp, Homo sapiens
taaaggagattcagctacaaa

SEQ ID NO: 29199 - RNA, 21 nt, RNAi
aaggagauucagcuacaaauu

SEQ ID NO: 29200 - RNA, 21 nt, RNAi
uuuuccucuaagucgauguuu

SEQ ID NO: 29201 - DNA, 21 bp, Homo sapiens
tactctctgcctacctgcctg

SEQ ID NO: 29202 - RNA, 21 nt, RNAi
cucucugccuaccugccuguu

SEQ ID NO: 29203 - RNA, 21 nt, RNAi
uugagagacggauggacggac

SEQ ID NO: 29204 - DNA, 21 bp, Homo sapiens
tacctgcctgagccatgttca

SEQ ID NO: 29205 - RNA, 21 nt, RNAi
ccugccugagccauguucauu

SEQ ID NO: 29206 - RNA, 21 nt, RNAi
uuggacggacucgguacaagu

SEQ ID NO: 29207 - DNA, 21 bp, Homo sapiens
taacaaagctctcatcactcc

SEQ ID NO: 29208 - RNA, 21 nt, RNAi
acaaagcucucaucacuccuu

SEQ ID NO: 29209 - RNA, 21 nt, RNAi
uuuguuucgagaguagugagg

SEQ ID NO: 29210 - DNA, 21 bp, Homo sapiens
tagttgccggtggacagcatg

SEQ ID NO: 29211 - RNA, 21 nt, RNAi
guugccgguggacagcauguu

SEQ ID NO: 29212 - RNA, 21 nt, RNAi
uucaacggccaccugucguac

SEQ ID NO: 29213 - DNA, 21 bp, Homo sapiens
tatctctgtatacagactggc

SEQ ID NO: 29214 - RNA, 21 nt, RNAi
ucucuguauacagacuggcuu

SEQ ID NO: 29215 - RNA, 21 nt, RNAi
uuagagacauaugucugaccg

SEQ ID NO: 29216 - DNA, 21 bp, Homo sapiens
taatgtgcatatgtgcacaag

SEQ ID NO: 29217 - RNA, 21 nt, RNAi
augugcauaugugcacaaguu

SEQ ID NO: 29218 - RNA, 21 nt, RNAi
uuuacacguauacacguguuc

SEQ ID NO: 29219 - DNA, 21 bp, Homo sapiens
aacaagcgcctatcactacca

SEQ ID NO: 29220 - RNA, 21 nt, RNAi
caagcgccuaucacuaccauu

SEQ ID NO: 29221 - RNA, 21 nt, RNAi
uuguucgcggauagugauggu

SEQ ID NO: 29222 - DNA, 21 bp, Homo sapiens
aaggagatcagactggaacat

SEQ ID NO: 29223 - RNA, 21 nt, RNAi
ggagaucagacuggaacauuu

SEQ ID NO: 29224 - RNA, 21 nt, RNAi
uuccucuagucugaccuugua

SEQ ID NO: 29225 - DNA, 21 bp, Homo sapiens
aacatcgttacgctacatgac

SEQ ID NO: 29226 - RNA, 21 nt, RNAi
caucguuacgcuacaugacuu

SEQ ID NO: 29227 - RNA, 21 nt, RNAi
uuguagcaaugcgauguacug

SEQ ID NO: 29228 - DNA, 21 bp, Homo sapiens
aacatgcacaacgtgaaactg

SEQ ID NO: 29229 - RNA, 21 nt, RNAi
caugcacaacgugaaacuguu

SEQ ID NO: 29230 - RNA, 21 nt, RNAi
uuguacguguugcacuuugac

SEQ ID NO: 29231 - DNA, 21 bp, Homo sapiens
aacgtgaaactgttcctgttc

SEQ ID NO: 29232 - RNA, 21 nt, RNAi
cgugaaacuguuccuguucuu

SEQ ID NO: 29233 - RNA, 21 nt, RNAi
uugcacuuugacaaggacaag

SEQ ID NO: 29234 - DNA, 21 bp, Homo sapiens
cagagattgtgcacgaggact

SEQ ID NO: 29235 - RNA, 21 nt, RNAi
gagauugugcacgaggacuuu

SEQ ID NO: 29236 - RNA, 21 nt, RNAi
uucucuaacacgugcuccuga

SEQ ID NO: 29237 - DNA, 21 bp, Homo sapiens
catcaacaagcgcctatcact

SEQ ID NO: 29238 - RNA, 21 nt, RNAi
ucaacaagcgccuaucacuuu

SEQ ID NO: 29239 - RNA, 21 nt, RNAi
uuaguuguucgcggauaguga

SEQ ID NO: 29240 - DNA, 21 bp, Homo sapiens
caacaagcgcctatcactacc

SEQ ID NO: 29241 - RNA, 21 nt, RNAi
acaagcgccuaucacuaccuu

SEQ ID NO: 29242 - RNA, 21 nt, RNAi
uuuguucgcggauagugaugg

SEQ ID NO: 29243 - DNA, 21 bp, Homo sapiens
cagcctatctgagattggctt

SEQ ID NO: 29244 - RNA, 21 nt, RNAi
gccuaucugagauuggcuuuu

SEQ ID NO: 29245 - RNA, 21 nt, RNAi
uucggauagacucuaaccgaa

SEQ ID NO: 29246 - DNA, 21 bp, Homo sapiens
cagacaaccttgtggcactca

SEQ ID NO: 29247 - RNA, 21 nt, RNAi
gacaaccuuguggcacucauu

SEQ ID NO: 29248 - RNA, 21 nt, RNAi
uucuguuggaacaccgugagu

SEQ ID NO: 29249 - DNA, 21 bp, Homo sapiens
caaggagatcagactggaaca

SEQ ID NO: 29250 - RNA, 21 nt, RNAi
aggagaucagacuggaacauu

SEQ ID NO: 29251 - RNA, 21 nt, RNAi
uuuccucuagucugaccuugu

SEQ ID NO: 29252 - DNA, 21 bp, Homo sapiens
cacgccaacatcgttacgcta

SEQ ID NO: 29253 - RNA, 21 nt, RNAi
cgccaacaucguuacgcuauu

SEQ ID NO: 29254 - RNA, 21 nt, RNAi
uugcgguuguagcaaugcgau

SEQ ID NO: 29255 - DNA, 21 bp, Homo sapiens
caacatcgttacgctacatga

SEQ ID NO: 29256 - RNA, 21 nt, RNAi
acaucguuacgcuacaugauu

SEQ ID NO: 29257 - RNA, 21 nt, RNAi
uuuguagcaaugcgauguacu

SEQ ID NO: 29258 - DNA, 21 bp, Homo sapiens
catgacattatccacacggag

SEQ ID NO: 29259 - RNA, 21 nt, RNAi
ugacauuauccacacggaguu

SEQ ID NO: 29260 - RNA, 21 nt, RNAi
uuacuguaauaggugugccuc

SEQ ID NO: 29261 - DNA, 21 bp, Homo sapiens
catcaacatgcacaacgtgaa

SEQ ID NO: 29262 - RNA, 21 nt, RNAi
ucaacaugcacaacgugaauu

SEQ ID NO: 29263 - RNA, 21 nt, RNAi
uuaguuguacguguugcacuu

SEQ ID NO: 29264 - DNA, 21 bp, Homo sapiens
caacatgcacaacgtgaaact

SEQ ID NO: 29265 - RNA, 21 nt, RNAi
acaugcacaacgugaaacuuu

SEQ ID NO: 29266 - RNA, 21 nt, RNAi
uuuguacguguugcacuuuga

SEQ ID NO: 29267 - DNA, 21 bp, Homo sapiens
catgcacaacgtgaaactgtt

SEQ ID NO: 29268 - RNA, 21 nt, RNAi
ugcacaacgugaaacuguuuu

SEQ ID NO: 29269 - RNA, 21 nt, RNAi
uuacguguugcacuuugacaa

SEQ ID NO: 29270 - DNA, 21 bp, Homo sapiens
cacaacgtgaaactgttcctg

SEQ ID NO: 29271 - RNA, 21 nt, RNAi
caacgugaaacuguuccuguu

SEQ ID NO: 29272 - RNA, 21 nt, RNAi
uuguugcacuuugacaaggac

SEQ ID NO: 29273 - DNA, 21 bp, Homo sapiens
caacgtgaaactgttcctgtt

SEQ ID NO: 29274 - RNA, 21 nt, RNAi
acgugaaacuguuccuguuuu

SEQ ID NO: 29275 - RNA, 21 nt, RNAi
uuugcacuuugacaaggacaa

SEQ ID NO: 29276 - DNA, 21 bp, Homo sapiens
cacggactactccactcagat

SEQ ID NO: 29277 - RNA, 21 nt, RNAi
cggacuacuccacucagauuu

SEQ ID NO: 29278 - RNA, 21 nt, RNAi
uugccugaugaggugagucua

SEQ ID NO: 29279 - DNA, 21 bp, Homo sapiens
cagctacacttcatcttccgt

SEQ ID NO: 29280 - RNA, 21 nt, RNAi
gcuacacuucaucuuccguuu

SEQ ID NO: 29281 - RNA, 21 nt, RNAi
uucgaugugaaguagaaggca

SEQ ID NO: 29282 - DNA, 21 bp, Homo sapiens
cacttcatcttccgtatctta

SEQ ID NO: 29283 - RNA, 21 nt, RNAi
cuucaucuuccguaucuuauu

SEQ ID NO: 29284 - RNA, 21 nt, RNAi
uugaaguagaaggcauagaau

SEQ ID NO: 29285 - DNA, 21 bp, Homo sapiens
catcttccgtatcttaggaac

SEQ ID NO: 29286 - RNA, 21 nt, RNAi
ucuuccguaucuuaggaacuu

SEQ ID NO: 29287 - RNA, 21 nt, RNAi
uuagaaggcauagaauccuug

SEQ ID NO: 29288 - DNA, 21 bp, Homo sapiens
caccaagctgttgcagtttga

SEQ ID NO: 29289 - RNA, 21 nt, RNAi
ccaagcuguugcaguuugauu

SEQ ID NO: 29290 - RNA, 21 nt, RNAi
uugguucgacaacgucaaacu

SEQ ID NO: 29291 - DNA, 21 bp, Homo sapiens
cactacttccatatttgcact

SEQ ID NO: 29292 - RNA, 21 nt, RNAi
cuacuuccauauuugcacuuu

SEQ ID NO: 29293 - RNA, 21 nt, RNAi
uugaugaagguauaaacguga

SEQ ID NO: 29294 - DNA, 21 bp, Homo sapiens
gagattgtgcacgaggacttg

SEQ ID NO: 29295 - RNA, 21 nt, RNAi
gauugugcacgaggacuuguu

SEQ ID NO: 29296 - RNA, 21 nt, RNAi
uucuaacacgugcuccugaac

SEQ ID NO: 29297 - DNA, 21 bp, Homo sapiens
gagatcagactggaacatgaa

SEQ ID NO: 29298 - RNA, 21 nt, RNAi
gaucagacuggaacaugaauu

SEQ ID NO: 29299 - RNA, 21 nt, RNAi
uucuagucugaccuuguacuu

SEQ ID NO: 29300 - DNA, 21 bp, Homo sapiens
gatcagactggaacatgaaga

SEQ ID NO: 29301 - RNA, 21 nt, RNAi
ucagacuggaacaugaagauu

SEQ ID NO: 29302 - RNA, 21 nt, RNAi
uuagucugaccuuguacuucu

SEQ ID NO: 29303 - DNA, 21 bp, Homo sapiens
gacctcaaacacgccaacatc

SEQ ID NO: 29304 - RNA, 21 nt, RNAi
ccucaaacacgccaacaucuu

SEQ ID NO: 29305 - RNA, 21 nt, RNAi
uuggaguuugugcgguuguag

SEQ ID NO: 29306 - DNA, 21 bp, Homo sapiens
gaggagttcaagacatacaac

SEQ ID NO: 29307 - RNA, 21 nt, RNAi
ggaguucaagacauacaacuu

SEQ ID NO: 29308 - RNA, 21 nt, RNAi
uuccucaaguucuguauguug

SEQ ID NO: 29309 - DNA, 21 bp, Homo sapiens
gagcggatccacaaacttcct

SEQ ID NO: 29310 - RNA, 21 nt, RNAi
gcggauccacaaacuuccuuu

SEQ ID NO: 29311 - RNA, 21 nt, RNAi
uucgccuagguguuugaagga

SEQ ID NO: 29312 - DNA, 21 bp, Homo sapiens
gacactacttccatatttgca

SEQ ID NO: 29313 - RNA, 21 nt, RNAi
cacuacuuccauauuugcauu

SEQ ID NO: 29314 - RNA, 21 nt, RNAi
uugugaugaagguauaaacgu

SEQ ID NO: 29315 - DNA, 21 bp, Homo sapiens
tacctatgccaccgtctacaa

SEQ ID NO: 29316 - RNA, 21 nt, RNAi
ccuaugccaccgucuacaauu

SEQ ID NO: 29317 - RNA, 21 nt, RNAi
uuggauacgguggcagauguu

SEQ ID NO: 29318 - DNA, 21 bp, Homo sapiens
tacacttcatcttccgtatct

SEQ ID NO: 29319 - RNA, 21 nt, RNAi
cacuucaucuuccguaucuuu

SEQ ID NO: 29320 - RNA, 21 nt, RNAi
uugugaaguagaaggcauaga

SEQ ID NO: 29321 - DNA, 21 bp, Homo sapiens
taaaggagattcagctacaaa

SEQ ID NO: 29322 - RNA, 21 nt, RNAi
aaggagauucagcuacaaauu

SEQ ID NO: 29323 - RNA, 21 nt, RNAi
uuuuccucuaagucgauguuu

SEQ ID NO: 29324 - DNA, 21 bp, Homo sapiens
aagcagatcgagcgctactcg

SEQ ID NO: 29325 - RNA, 21 nt, RNAi
gcagaucgagcgcuacucguu

SEQ ID NO: 29326 - RNA, 21 nt, RNAi
uucgucuagcucgcgaugagc

SEQ ID NO: 29327 - DNA, 21 bp, Homo sapiens
aaaggaacttcctgtgcggct

SEQ ID NO: 29328 - RNA, 21 nt, RNAi
aggaacuuccugugcggcuuu

SEQ ID NO: 29329 - RNA, 21 nt, RNAi
uuuccuugaaggacacgccga

SEQ ID NO: 29330 - DNA, 21 bp, Homo sapiens
aaggaacttcctgtgcggctg

SEQ ID NO: 29331 - RNA, 21 nt, RNAi
ggaacuuccugugcggcuguu

SEQ ID NO: 29332 - RNA, 21 nt, RNAi
uuccuugaaggacacgccgac

SEQ ID NO: 29333 - DNA, 21 bp, Homo sapiens
aacttcctgtgcggctggcta

SEQ ID NO: 29334 - RNA, 21 nt, RNAi
cuuccugugcggcuggcuauu

SEQ ID NO: 29335 - RNA, 21 nt, RNAi
uugaaggacacgccgaccgau

SEQ ID NO: 29336 - DNA, 21 bp, Homo sapiens
aagttaatcttctgccggata

SEQ ID NO: 29337 - RNA, 21 nt, RNAi
guuaaucuucugccggauauu

SEQ ID NO: 29338 - RNA, 21 nt, RNAi
uucaauuagaagacggccuau

SEQ ID NO: 29339 - DNA, 21 bp, Homo sapiens
aatcttctgccggataattta

SEQ ID NO: 29340 - RNA, 21 nt, RNAi
ucuucugccggauaauuuauu

SEQ ID NO: 29341 - RNA, 21 nt, RNAi
uuagaagacggccuauuaaau

SEQ ID NO: 29342 - DNA, 21 bp, Homo sapiens
aagtcagaaatagacacaatg

SEQ ID NO: 29343 - RNA, 21 nt, RNAi
gucagaaauagacacaauguu

SEQ ID NO: 29344 - RNA, 21 nt, RNAi
uucagucuuuaucuguguuac

SEQ ID NO: 29345 - DNA, 21 bp, Homo sapiens
aaatagacacaatgatgtggt

SEQ ID NO: 29346 - RNA, 21 nt, RNAi
auagacacaaugaugugguuu

SEQ ID NO: 29347 - RNA, 21 nt, RNAi
uuuaucuguguuacuacacca

SEQ ID NO: 29348 - DNA, 21 bp, Homo sapiens
aatagacacaatgatgtggtt

SEQ ID NO: 29349 - RNA, 21 nt, RNAi
uagacacaaugaugugguuuu

SEQ ID NO: 29350 - RNA, 21 nt, RNAi
uuaucuguguuacuacaccaa

SEQ ID NO: 29351 - DNA, 21 bp, Homo sapiens
aatgatgtggttcctacaatg

SEQ ID NO: 29352 - RNA, 21 nt, RNAi
ugaugugguuccuacaauguu

SEQ ID NO: 29353 - RNA, 21 nt, RNAi
uuacuacaccaaggauguuac

SEQ ID NO: 29354 - DNA, 21 bp, Homo sapiens
aatggcacaaggagtgattga

SEQ ID NO: 29355 - RNA, 21 nt, RNAi
uggcacaaggagugauugauu

SEQ ID NO: 29356 - RNA, 21 nt, RNAi
uuaccguguuccucacuaacu

SEQ ID NO: 29357 - DNA, 21 bp, Homo sapiens
aaggagtgattgaatacaagg

SEQ ID NO: 29358 - RNA, 21 nt, RNAi
ggagugauugaauacaagguu

SEQ ID NO: 29359 - RNA, 21 nt, RNAi
uuccucacuaacuuauguucc

SEQ ID NO: 29360 - DNA, 21 bp, Homo sapiens
aaccgcatctctttccgcatg

SEQ ID NO: 29361 - RNA, 21 nt, RNAi
ccgcaucucuuuccgcauguu

SEQ ID NO: 29362 - RNA, 21 nt, RNAi
uuggcguagagaaaggcguac

SEQ ID NO: 29363 - DNA, 21 bp, Homo sapiens
aatcagcacacacttctgttt

SEQ ID NO: 29364 - RNA, 21 nt, RNAi
ucagcacacacuucuguuuuu

SEQ ID NO: 29365 - RNA, 21 nt, RNAi
uuagucgugugugaagacaaa

SEQ ID NO: 29366 - DNA, 21 bp, Homo sapiens
aatcctgttcatcctaaacac

SEQ ID NO: 29367 - RNA, 21 nt, RNAi
uccuguucauccuaaacacuu

SEQ ID NO: 29368 - RNA, 21 nt, RNAi
uuaggacaaguaggauuugug

SEQ ID NO: 29369 - DNA, 21 bp, Homo sapiens
aaacacataggaagtatcgat

SEQ ID NO: 29370 - RNA, 21 nt, RNAi
acacauaggaaguaucgauuu

SEQ ID NO: 29371 - RNA, 21 nt, RNAi
uuuguguauccuucauagcua

SEQ ID NO: 29372 - DNA, 21 bp, Homo sapiens
aacacataggaagtatcgatc

SEQ ID NO: 29373 - RNA, 21 nt, RNAi
cacauaggaaguaucgaucuu

SEQ ID NO: 29374 - RNA, 21 nt, RNAi
uuguguauccuucauagcuag

SEQ ID NO: 29375 - DNA, 21 bp, Homo sapiens
aacgtggcggatgtggtgaaa

SEQ ID NO: 29376 - RNA, 21 nt, RNAi
cguggcggauguggugaaauu

SEQ ID NO: 29377 - RNA, 21 nt, RNAi
uugcaccgccuacaccacuuu

SEQ ID NO: 29378 - DNA, 21 bp, Homo sapiens
aaagatgcatatgaaacagcc

SEQ ID NO: 29379 - RNA, 21 nt, RNAi
agaugcauaugaaacagccuu

SEQ ID NO: 29380 - RNA, 21 nt, RNAi
uuucuacguauacuuugucgg

SEQ ID NO: 29381 - DNA, 21 bp, Homo sapiens
aagatgcatatgaaacagcca

SEQ ID NO: 29382 - RNA, 21 nt, RNAi
gaugcauaugaaacagccauu

SEQ ID NO: 29383 - RNA, 21 nt, RNAi
uucuacguauacuuugucggu

SEQ ID NO: 29384 - DNA, 21 bp, Homo sapiens
aaacagccaagatgctgtgtg

SEQ ID NO: 29385 - RNA, 21 nt, RNAi
acagccaagaugcuguguguu

SEQ ID NO: 29386 - RNA, 21 nt, RNAi
uuugucgguucuacgacacac

SEQ ID NO: 29387 - DNA, 21 bp, Homo sapiens
aacagccaagatgctgtgtga

SEQ ID NO: 29388 - RNA, 21 nt, RNAi
cagccaagaugcugugugauu

SEQ ID NO: 29389 - RNA, 21 nt, RNAi
uugucgguucuacgacacacu

SEQ ID NO: 29390 - DNA, 21 bp, Homo sapiens
aagatgctgtgtgaacagtat

SEQ ID NO: 29391 - RNA, 21 nt, RNAi
gaugcugugugaacaguauuu

SEQ ID NO: 29392 - RNA, 21 nt, RNAi
uucuacgacacacuugucaua

SEQ ID NO: 29393 - DNA, 21 bp, Homo sapiens
aacagtattacctggtagctc

SEQ ID NO: 29394 - RNA, 21 nt, RNAi
caguauuaccugguagcucuu

SEQ ID NO: 29395 - RNA, 21 nt, RNAi
uugucauaauggaccaucgag

SEQ ID NO: 29396 - DNA, 21 bp, Homo sapiens
aagttgaagaattcaatgcca

SEQ ID NO: 29397 - RNA, 21 nt, RNAi
guugaagaauucaaugccauu

SEQ ID NO: 29398 - RNA, 21 nt, RNAi
uucaacuucuuaaguuacggu

SEQ ID NO: 29399 - DNA, 21 bp, Homo sapiens
aagaattcaatgccaaagcgc

SEQ ID NO: 29400 - RNA, 21 nt, RNAi
gaauucaaugccaaagcgcuu

SEQ ID NO: 29401 - RNA, 21 nt, RNAi
uucuuaaguuacgguuucgcg

SEQ ID NO: 29402 - DNA, 21 bp, Homo sapiens
aattcaatgccaaagcgccag

SEQ ID NO: 29403 - RNA, 21 nt, RNAi
uucaaugccaaagcgccaguu

SEQ ID NO: 29404 - RNA, 21 nt, RNAi
uuaaguuacgguuucgcgguc

SEQ ID NO: 29405 - DNA, 21 bp, Homo sapiens
aatgccaaagcgccagacaaa

SEQ ID NO: 29406 - RNA, 21 nt, RNAi
ugccaaagcgccagacaaauu

SEQ ID NO: 29407 - RNA, 21 nt, RNAi
uuacgguuucgcggucuguuu

SEQ ID NO: 29408 - DNA, 21 bp, Homo sapiens
aaagcgccagacaaacctatt

SEQ ID NO: 29409 - RNA, 21 nt, RNAi
agcgccagacaaaccuauuuu

SEQ ID NO: 29410 - RNA, 21 nt, RNAi
uuucgcggucuguuuggauaa

SEQ ID NO: 29411 - DNA, 21 bp, Homo sapiens
aagcgccagacaaacctattc

SEQ ID NO: 29412 - RNA, 21 nt, RNAi
gcgccagacaaaccuauucuu

SEQ ID NO: 29413 - RNA, 21 nt, RNAi
uucgcggucuguuuggauaag

SEQ ID NO: 29414 - DNA, 21 bp, Homo sapiens
aaacctattcaggtggtttat

SEQ ID NO: 29415 - RNA, 21 nt, RNAi
accuauucaggugguuuauuu

SEQ ID NO: 29416 - RNA, 21 nt, RNAi
uuuggauaaguccaccaaaua

SEQ ID NO: 29417 - DNA, 21 bp, Homo sapiens
aacctattcaggtggtttatg

SEQ ID NO: 29418 - RNA, 21 nt, RNAi
ccuauucaggugguuuauguu

SEQ ID NO: 29419 - RNA, 21 nt, RNAi
uuggauaaguccaccaaauac

SEQ ID NO: 29420 - DNA, 21 bp, Homo sapiens
aagaactcaatgagagcgaca

SEQ ID NO: 29421 - RNA, 21 nt, RNAi
gaacucaaugagagcgacauu

SEQ ID NO: 29422 - RNA, 21 nt, RNAi
uucuugaguuacucucgcugu

SEQ ID NO: 29423 - DNA, 21 bp, Homo sapiens
aactcaatgagagcgacagtt

SEQ ID NO: 29424 - RNA, 21 nt, RNAi
cucaaugagagcgacaguuuu

SEQ ID NO: 29425 - RNA, 21 nt, RNAi
uugaguuacucucgcugucaa

SEQ ID NO: 29426 - DNA, 21 bp, Homo sapiens
aatgagagcgacagttgaact

SEQ ID NO: 29427 - RNA, 21 nt, RNAi
ugagagcgacaguugaacuuu

SEQ ID NO: 29428 - RNA, 21 nt, RNAi
uuacucucgcugucaacuuga

SEQ ID NO: 29429 - DNA, 21 bp, Homo sapiens
aagatcagtgacctaggtggt

SEQ ID NO: 29430 - RNA, 21 nt, RNAi
gaucagugaccuaggugguuu

SEQ ID NO: 29431 - RNA, 21 nt, RNAi
uucuagucacuggauccacca

SEQ ID NO: 29432 - DNA, 21 bp, Homo sapiens
aactacatgtattctactgct

SEQ ID NO: 29433 - RNA, 21 nt, RNAi
cuacauguauucuacugcuuu

SEQ ID NO: 29434 - RNA, 21 nt, RNAi
uugauguacauaagaugacga

SEQ ID NO: 29435 - DNA, 21 bp, Homo sapiens
aaggagatctgaaactgtatt

SEQ ID NO: 29436 - RNA, 21 nt, RNAi
ggagaucugaaacuguauuuu

SEQ ID NO: 29437 - RNA, 21 nt, RNAi
uuccucuagacuuugacauaa

SEQ ID NO: 29438 - DNA, 21 bp, Homo sapiens
aaactgtattccatggaagga

SEQ ID NO: 29439 - RNA, 21 nt, RNAi
acuguauuccauggaaggauu

SEQ ID NO: 29440 - RNA, 21 nt, RNAi
uuugacauaagguaccuuccu

SEQ ID NO: 29441 - DNA, 21 bp, Homo sapiens
aactgtattccatggaaggag

SEQ ID NO: 29442 - RNA, 21 nt, RNAi
cuguauuccauggaaggaguu

SEQ ID NO: 29443 - RNA, 21 nt, RNAi
uugacauaagguaccuuccuc

SEQ ID NO: 29444 - DNA, 21 bp, Homo sapiens
aaggctctttcaagtgagtca

SEQ ID NO: 29445 - RNA, 21 nt, RNAi
ggcucuuucaagugagucauu

SEQ ID NO: 29446 - RNA, 21 nt, RNAi
uuccgagaaaguucacucagu

SEQ ID NO: 29447 - DNA, 21 bp, Homo sapiens
aagtgagtcatttgagagact

SEQ ID NO: 29448 - RNA, 21 nt, RNAi
gugagucauuugagagacuuu

SEQ ID NO: 29449 - RNA, 21 nt, RNAi
uucacucaguaaacucucuga

SEQ ID NO: 29450 - DNA, 21 bp, Homo sapiens
aataagtccgcatggcgccat

SEQ ID NO: 29451 - RNA, 21 nt, RNAi
uaaguccgcauggcgccauuu

SEQ ID NO: 29452 - RNA, 21 nt, RNAi
uuauucaggcguaccgcggua

SEQ ID NO: 29453 - DNA, 21 bp, Homo sapiens
aagtccgcatggcgccattac

SEQ ID NO: 29454 - RNA, 21 nt, RNAi
guccgcauggcgccauuacuu

SEQ ID NO: 29455 - RNA, 21 nt, RNAi
uucaggcguaccgcgguaaug

SEQ ID NO: 29456 - DNA, 21 bp, Homo sapiens
aagaccacgcctgaagccgat

SEQ ID NO: 29457 - RNA, 21 nt, RNAi
gaccacgccugaagccgauuu

SEQ ID NO: 29458 - RNA, 21 nt, RNAi
uucuggugcggacuucggcua

SEQ ID NO: 29459 - DNA, 21 bp, Homo sapiens
aagccgatgattggagcaatc

SEQ ID NO: 29460 - RNA, 21 nt, RNAi
gccgaugauuggagcaaucuu

SEQ ID NO: 29461 - RNA, 21 nt, RNAi
uucggcuacuaaccucguuag

SEQ ID NO: 29462 - DNA, 21 bp, Homo sapiens
aaacagtaatataccaccttg

SEQ ID NO: 29463 - RNA, 21 nt, RNAi
acaguaauauaccaccuuguu

SEQ ID NO: 29464 - RNA, 21 nt, RNAi
uuugucauuauaugguggaac

SEQ ID NO: 29465 - DNA, 21 bp, Homo sapiens
aacagtaatataccaccttga

SEQ ID NO: 29466 - RNA, 21 nt, RNAi
caguaauauaccaccuugauu

SEQ ID NO: 29467 - RNA, 21 nt, RNAi
uugucauuauaugguggaacu

SEQ ID NO: 29468 - DNA, 21 bp, Homo sapiens
aatataccaccttgatttcca

SEQ ID NO: 29469 - RNA, 21 nt, RNAi
uauaccaccuugauuuccauu

SEQ ID NO: 29470 - RNA, 21 nt, RNAi
uuauaugguggaacuaaaggu

SEQ ID NO: 29471 - DNA, 21 bp, Homo sapiens
aattcttgcagtgtagaggta

SEQ ID NO: 29472 - RNA, 21 nt, RNAi
uucuugcaguguagagguauu

SEQ ID NO: 29473 - RNA, 21 nt, RNAi
uuaagaacgucacaucuccau

SEQ ID NO: 29474 - DNA, 21 bp, Homo sapiens
aattaagtttgcagtttgtcc

SEQ ID NO: 29475 - RNA, 21 nt, RNAi
uuaaguuugcaguuuguccuu

SEQ ID NO: 29476 - RNA, 21 nt, RNAi
uuaauucaaacgucaaacagg

SEQ ID NO: 29477 - DNA, 21 bp, Homo sapiens
aagtttgcagtttgtcctcat

SEQ ID NO: 29478 - RNA, 21 nt, RNAi
guuugcaguuuguccucauuu

SEQ ID NO: 29479 - RNA, 21 nt, RNAi
uucaaacgucaaacaggagua

SEQ ID NO: 29480 - DNA, 21 bp, Homo sapiens
aaacgttgtaggttgaaactg

SEQ ID NO: 29481 - RNA, 21 nt, RNAi
acguuguagguugaaacuguu

SEQ ID NO: 29482 - RNA, 21 nt, RNAi
uuugcaacauccaacuuugac

SEQ ID NO: 29483 - DNA, 21 bp, Homo sapiens
aacgttgtaggttgaaactga

SEQ ID NO: 29484 - RNA, 21 nt, RNAi
cguuguagguugaaacugauu

SEQ ID NO: 29485 - RNA, 21 nt, RNAi
uugcaacauccaacuuugacu

SEQ ID NO: 29486 - DNA, 21 bp, Homo sapiens
aaaggtgatctatccatccaa

SEQ ID NO: 29487 - RNA, 21 nt, RNAi
aggugaucuauccauccaauu

SEQ ID NO: 29488 - RNA, 21 nt, RNAi
uuuccacuagauagguagguu

SEQ ID NO: 29489 - DNA, 21 bp, Homo sapiens
aaggtgatctatccatccaat

SEQ ID NO: 29490 - RNA, 21 nt, RNAi
ggugaucuauccauccaauuu

SEQ ID NO: 29491 - RNA, 21 nt, RNAi
uuccacuagauagguagguua

SEQ ID NO: 29492 - DNA, 21 bp, Homo sapiens
aaaggaaggacatctgatatg

SEQ ID NO: 29493 - RNA, 21 nt, RNAi
aggaaggacaucugauauguu

SEQ ID NO: 29494 - RNA, 21 nt, RNAi
uuuccuuccuguagacuauac

SEQ ID NO: 29495 - DNA, 21 bp, Homo sapiens
aaggaaggacatctgatatgt

SEQ ID NO: 29496 - RNA, 21 nt, RNAi
ggaaggacaucugauauguuu

SEQ ID NO: 29497 - RNA, 21 nt, RNAi
uuccuuccuguagacuauaca

SEQ ID NO: 29498 - DNA, 21 bp, Homo sapiens
aaggacatctgatatgtgctg

SEQ ID NO: 29499 - RNA, 21 nt, RNAi
ggacaucugauaugugcuguu

SEQ ID NO: 29500 - RNA, 21 nt, RNAi
uuccuguagacuauacacgac

SEQ ID NO: 29501 - DNA, 21 bp, Homo sapiens
caagcagatcgagcgctactc

SEQ ID NO: 29502 - RNA, 21 nt, RNAi
agcagaucgagcgcuacucuu

SEQ ID NO: 29503 - RNA, 21 nt, RNAi
uuucgucuagcucgcgaugag

SEQ ID NO: 29504 - DNA, 21 bp, Homo sapiens
catcaaacaattcctggactt

SEQ ID NO: 29505 - RNA, 21 nt, RNAi
ucaaacaauuccuggacuuuu

SEQ ID NO: 29506 - RNA, 21 nt, RNAi
uuaguuuguuaaggaccugaa

SEQ ID NO: 29507 - DNA, 21 bp, Homo sapiens
caaacaattcctggacttcgg

SEQ ID NO: 29508 - RNA, 21 nt, RNAi
aacaauuccuggacuucgguu

SEQ ID NO: 29509 - RNA, 21 nt, RNAi
uuuuguuaaggaccugaagcc

SEQ ID NO: 29510 - DNA, 21 bp, Homo sapiens
catatatgtttctacgaaagg

SEQ ID NO: 29511 - RNA, 21 nt, RNAi
uauauguuucuacgaaagguu

SEQ ID NO: 29512 - RNA, 21 nt, RNAi
uuauauacaaagaugcuuucc

SEQ ID NO: 29513 - DNA, 21 bp, Homo sapiens
cacaatgagagaagttaatct

SEQ ID NO: 29514 - RNA, 21 nt, RNAi
caaugagagaaguuaaucuuu

SEQ ID NO: 29515 - RNA, 21 nt, RNAi
uuguuacucucuucaauuaga

SEQ ID NO: 29516 - DNA, 21 bp, Homo sapiens
caatgagagaagttaatcttc

SEQ ID NO: 29517 - RNA, 21 nt, RNAi
augagagaaguuaaucuucuu

SEQ ID NO: 29518 - RNA, 21 nt, RNAi
uuuacucucuucaauuagaag

SEQ ID NO: 29519 - DNA, 21 bp, Homo sapiens
cagagttggtatatgcagagt

SEQ ID NO: 29520 - RNA, 21 nt, RNAi
gaguugguauaugcagaguuu

SEQ ID NO: 29521 - RNA, 21 nt, RNAi
uucucaaccauauacgucuca

SEQ ID NO: 29522 - DNA, 21 bp, Homo sapiens
cacaggtcttggataactttc

SEQ ID NO: 29523 - RNA, 21 nt, RNAi
caggucuuggauaacuuucuu

SEQ ID NO: 29524 - RNA, 21 nt, RNAi
uuguccagaaccuauugaaag

SEQ ID NO: 29525 - DNA, 21 bp, Homo sapiens
caggtcttggataactttcta

SEQ ID NO: 29526 - RNA, 21 nt, RNAi
ggucuuggauaacuuucuauu

SEQ ID NO: 29527 - RNA, 21 nt, RNAi
uuccagaaccuauugaaagau

SEQ ID NO: 29528 - DNA, 21 bp, Homo sapiens
caagttctgattaaagtcaga

SEQ ID NO: 29529 - RNA, 21 nt, RNAi
aguucugauuaaagucagauu

SEQ ID NO: 29530 - RNA, 21 nt, RNAi
uuucaagacuaauuucagucu

SEQ ID NO: 29531 - DNA, 21 bp, Homo sapiens
cagaaatagacacaatgatgt

SEQ ID NO: 29532 - RNA, 21 nt, RNAi
gaaauagacacaaugauguuu

SEQ ID NO: 29533 - RNA, 21 nt, RNAi
uucuuuaucuguguuacuaca

SEQ ID NO: 29534 - DNA, 21 bp, Homo sapiens
cacaatgatgtggttcctaca

SEQ ID NO: 29535 - RNA, 21 nt, RNAi
caaugaugugguuccuacauu

SEQ ID NO: 29536 - RNA, 21 nt, RNAi
uuguuacuacaccaaggaugu

SEQ ID NO: 29537 - DNA, 21 bp, Homo sapiens
caatgatgtggttcctacaat

SEQ ID NO: 29538 - RNA, 21 nt, RNAi
augaugugguuccuacaauuu

SEQ ID NO: 29539 - RNA, 21 nt, RNAi
uuuacuacaccaaggauguua

SEQ ID NO: 29540 - DNA, 21 bp, Homo sapiens
caatggcacaaggagtgattg

SEQ ID NO: 29541 - RNA, 21 nt, RNAi
auggcacaaggagugauuguu

SEQ ID NO: 29542 - RNA, 21 nt, RNAi
uuuaccguguuccucacuaac

SEQ ID NO: 29543 - DNA, 21 bp, Homo sapiens
cacaaggagtgattgaataca

SEQ ID NO: 29544 - RNA, 21 nt, RNAi
caaggagugauugaauacauu

SEQ ID NO: 29545 - RNA, 21 nt, RNAi
uuguuccucacuaacuuaugu

SEQ ID NO: 29546 - DNA, 21 bp, Homo sapiens
caaggagtgattgaatacaag

SEQ ID NO: 29547 - RNA, 21 nt, RNAi
aggagugauugaauacaaguu

SEQ ID NO: 29548 - RNA, 21 nt, RNAi
uuuccucacuaacuuauguuc

SEQ ID NO: 29549 - DNA, 21 bp, Homo sapiens
cattagcactaacatccaata

SEQ ID NO: 29550 - RNA, 21 nt, RNAi
uuagcacuaacauccaauauu

SEQ ID NO: 29551 - RNA, 21 nt, RNAi
uuaaucgugauuguagguuau

SEQ ID NO: 29552 - DNA, 21 bp, Homo sapiens
caaccgcatctctttccgcat

SEQ ID NO: 29553 - RNA, 21 nt, RNAi
accgcaucucuuuccgcauuu

SEQ ID NO: 29554 - RNA, 21 nt, RNAi
uuuggcguagagaaaggcgua

SEQ ID NO: 29555 - DNA, 21 bp, Homo sapiens
catctctttccgcatgcttat

SEQ ID NO: 29556 - RNA, 21 nt, RNAi
ucucuuuccgcaugcuuauuu

SEQ ID NO: 29557 - RNA, 21 nt, RNAi
uuagagaaaggcguacgaaua

SEQ ID NO: 29558 - DNA, 21 bp, Homo sapiens
catgcttattaatcagcacac

SEQ ID NO: 29559 - RNA, 21 nt, RNAi
ugcuuauuaaucagcacacuu

SEQ ID NO: 29560 - RNA, 21 nt, RNAi
uuacgaauaauuagucgugug

SEQ ID NO: 29561 - DNA, 21 bp, Homo sapiens
cactaatcctgttcatcctaa

SEQ ID NO: 29562 - RNA, 21 nt, RNAi
cuaauccuguucauccuaauu

SEQ ID NO: 29563 - RNA, 21 nt, RNAi
uugauuaggacaaguaggauu

SEQ ID NO: 29564 - DNA, 21 bp, Homo sapiens
catcctaaacacataggaagt

SEQ ID NO: 29565 - RNA, 21 nt, RNAi
uccuaaacacauaggaaguuu

SEQ ID NO: 29566 - RNA, 21 nt, RNAi
uuaggauuuguguauccuuca

SEQ ID NO: 29567 - DNA, 21 bp, Homo sapiens
cacctgtaacgtggcggatgt

SEQ ID NO: 29568 - RNA, 21 nt, RNAi
ccuguaacguggcggauguuu

SEQ ID NO: 29569 - RNA, 21 nt, RNAi
uuggacauugcaccgccuaca

SEQ ID NO: 29570 - DNA, 21 bp, Homo sapiens
catatgaaacagccaagatgc

SEQ ID NO: 29571 - RNA, 21 nt, RNAi
uaugaaacagccaagaugcuu

SEQ ID NO: 29572 - RNA, 21 nt, RNAi
uuauacuuugucgguucuacg

SEQ ID NO: 29573 - DNA, 21 bp, Homo sapiens
cagccaagatgctgtgtgaac

SEQ ID NO: 29574 - RNA, 21 nt, RNAi
gccaagaugcugugugaacuu

SEQ ID NO: 29575 - RNA, 21 nt, RNAi
uucgguucuacgacacacuug

SEQ ID NO: 29576 - DNA, 21 bp, Homo sapiens
caagatgctgtgtgaacagta

SEQ ID NO: 29577 - RNA, 21 nt, RNAi
agaugcugugugaacaguauu

SEQ ID NO: 29578 - RNA, 21 nt, RNAi
uuucuacgacacacuugucau

SEQ ID NO: 29579 - DNA, 21 bp, Homo sapiens
cagtattacctggtagctcca

SEQ ID NO: 29580 - RNA, 21 nt, RNAi
guauuaccugguagcuccauu

SEQ ID NO: 29581 - RNA, 21 nt, RNAi
uucauaauggaccaucgaggu

SEQ ID NO: 29582 - DNA, 21 bp, Homo sapiens
cagagctggaagttgaagaat

SEQ ID NO: 29583 - RNA, 21 nt, RNAi
gagcuggaaguugaagaauuu

SEQ ID NO: 29584 - RNA, 21 nt, RNAi
uucucgaccuucaacuucuua

SEQ ID NO: 29585 - DNA, 21 bp, Homo sapiens
caatgccaaagcgccagacaa

SEQ ID NO: 29586 - RNA, 21 nt, RNAi
augccaaagcgccagacaauu

SEQ ID NO: 29587 - RNA, 21 nt, RNAi
uuuacgguuucgcggucuguu

SEQ ID NO: 29588 - DNA, 21 bp, Homo sapiens
caaagcgccagacaaacctat

SEQ ID NO: 29589 - RNA, 21 nt, RNAi
aagcgccagacaaaccuauuu

SEQ ID NO: 29590 - RNA, 21 nt, RNAi
uuuucgcggucuguuuggaua

SEQ ID NO: 29591 - DNA, 21 bp, Homo sapiens
cagacaaacctattcaggtgg

SEQ ID NO: 29592 - RNA, 21 nt, RNAi
gacaaaccuauucaggugguu

SEQ ID NO: 29593 - RNA, 21 nt, RNAi
uucuguuuggauaaguccacc

SEQ ID NO: 29594 - DNA, 21 bp, Homo sapiens
caaacctattcaggtggttta

SEQ ID NO: 29595 - RNA, 21 nt, RNAi
aaccuauucaggugguuuauu

SEQ ID NO: 29596 - RNA, 21 nt, RNAi
uuuuggauaaguccaccaaau

SEQ ID NO: 29597 - DNA, 21 bp, Homo sapiens
cacatctgtttcatatgctat

SEQ ID NO: 29598 - RNA, 21 nt, RNAi
caucuguuucauaugcuauuu

SEQ ID NO: 29599 - RNA, 21 nt, RNAi
uuguagacaaaguauacgaua

SEQ ID NO: 29600 - DNA, 21 bp, Homo sapiens
catatgctatttgagttgttc

SEQ ID NO: 29601 - RNA, 21 nt, RNAi
uaugcuauuugaguuguucuu

SEQ ID NO: 29602 - RNA, 21 nt, RNAi
uuauacgauaaacucaacaag

SEQ ID NO: 29603 - DNA, 21 bp, Homo sapiens
caagaactcaatgagagcgac

SEQ ID NO: 29604 - RNA, 21 nt, RNAi
agaacucaaugagagcgacuu

SEQ ID NO: 29605 - RNA, 21 nt, RNAi
uuucuugaguuacucucgcug

SEQ ID NO: 29606 - DNA, 21 bp, Homo sapiens
caatgagagcgacagttgaac

SEQ ID NO: 29607 - RNA, 21 nt, RNAi
augagagcgacaguugaacuu

SEQ ID NO: 29608 - RNA, 21 nt, RNAi
uuuacucucgcugucaacuug

SEQ ID NO: 29609 - DNA, 21 bp, Homo sapiens
cagttgaactctatgaagaca

SEQ ID NO: 29610 - RNA, 21 nt, RNAi
guugaacucuaugaagacauu

SEQ ID NO: 29611 - RNA, 21 nt, RNAi
uucaacuugagauacuucugu

SEQ ID NO: 29612 - DNA, 21 bp, Homo sapiens
cattaagatcagtgacctagg

SEQ ID NO: 29613 - RNA, 21 nt, RNAi
uuaagaucagugaccuagguu

SEQ ID NO: 29614 - RNA, 21 nt, RNAi
uuaauucuagucacuggaucc

SEQ ID NO: 29615 - DNA, 21 bp, Homo sapiens
cagtgacctaggtggtggtgt

SEQ ID NO: 29616 - RNA, 21 nt, RNAi
gugaccuagguggugguguuu

SEQ ID NO: 29617 - RNA, 21 nt, RNAi
uucacuggauccaccaccaca

SEQ ID NO: 29618 - DNA, 21 bp, Homo sapiens
catgtattctactgctcctag

SEQ ID NO: 29619 - RNA, 21 nt, RNAi
uguauucuacugcuccuaguu

SEQ ID NO: 29620 - RNA, 21 nt, RNAi
uuacauaagaugacgaggauc

SEQ ID NO: 29621 - DNA, 21 bp, Homo sapiens
caaggagatctgaaactgtat

SEQ ID NO: 29622 - RNA, 21 nt, RNAi
aggagaucugaaacuguauuu

SEQ ID NO: 29623 - RNA, 21 nt, RNAi
uuuccucuagacuuugacaua

SEQ ID NO: 29624 - DNA, 21 bp, Homo sapiens
catttatttgaaggctctttc

SEQ ID NO: 29625 - RNA, 21 nt, RNAi
uuuauuugaaggcucuuucuu

SEQ ID NO: 29626 - RNA, 21 nt, RNAi
uuaaauaaacuuccgagaaag

SEQ ID NO: 29627 - DNA, 21 bp, Homo sapiens
caagtgagtcatttgagagac

SEQ ID NO: 29628 - RNA, 21 nt, RNAi
agugagucauuugagagacuu

SEQ ID NO: 29629 - RNA, 21 nt, RNAi
uuucacucaguaaacucucug

SEQ ID NO: 29630 - DNA, 21 bp, Homo sapiens
catttgagagacttccagttt

SEQ ID NO: 29631 - RNA, 21 nt, RNAi
uuugagagacuuccaguuuuu

SEQ ID NO: 29632 - RNA, 21 nt, RNAi
uuaaacucucugaaggucaaa

SEQ ID NO: 29633 - DNA, 21 bp, Homo sapiens
catggcgccattacaagacca

SEQ ID NO: 29634 - RNA, 21 nt, RNAi
uggcgccauuacaagaccauu

SEQ ID NO: 29635 - RNA, 21 nt, RNAi
uuaccgcgguaauguucuggu

SEQ ID NO: 29636 - DNA, 21 bp, Homo sapiens
cattacaagaccacgcctgaa

SEQ ID NO: 29637 - RNA, 21 nt, RNAi
uuacaagaccacgccugaauu

SEQ ID NO: 29638 - RNA, 21 nt, RNAi
uuaauguucuggugcggacuu

SEQ ID NO: 29639 - DNA, 21 bp, Homo sapiens
caagaccacgcctgaagccga

SEQ ID NO: 29640 - RNA, 21 nt, RNAi
agaccacgccugaagccgauu

SEQ ID NO: 29641 - RNA, 21 nt, RNAi
uuucuggugcggacuucggcu

SEQ ID NO: 29642 - DNA, 21 bp, Homo sapiens
cacgcctgaagccgatgattg

SEQ ID NO: 29643 - RNA, 21 nt, RNAi
cgccugaagccgaugauuguu

SEQ ID NO: 29644 - RNA, 21 nt, RNAi
uugcggacuucggcuacuaac

SEQ ID NO: 29645 - DNA, 21 bp, Homo sapiens
cagtaatataccaccttgatt

SEQ ID NO: 29646 - RNA, 21 nt, RNAi
guaauauaccaccuugauuuu

SEQ ID NO: 29647 - RNA, 21 nt, RNAi
uucauuauaugguggaacuaa

SEQ ID NO: 29648 - DNA, 21 bp, Homo sapiens
caccttgatttccattacaaa

SEQ ID NO: 29649 - RNA, 21 nt, RNAi
ccuugauuuccauuacaaauu

SEQ ID NO: 29650 - RNA, 21 nt, RNAi
uuggaacuaaagguaauguuu

SEQ ID NO: 29651 - DNA, 21 bp, Homo sapiens
caaagtatctgatttgtctga

SEQ ID NO: 29652 - RNA, 21 nt, RNAi
aaguaucugauuugucugauu

SEQ ID NO: 29653 - RNA, 21 nt, RNAi
uuuucauagacuaaacagacu

SEQ ID NO: 29654 - DNA, 21 bp, Homo sapiens
cactcactgttccaggaattc

SEQ ID NO: 29655 - RNA, 21 nt, RNAi
cucacuguuccaggaauucuu

SEQ ID NO: 29656 - RNA, 21 nt, RNAi
uugagugacaagguccuuaag

SEQ ID NO: 29657 - DNA, 21 bp, Homo sapiens
cactgttccaggaattcttgc

SEQ ID NO: 29658 - RNA, 21 nt, RNAi
cuguuccaggaauucuugcuu

SEQ ID NO: 29659 - RNA, 21 nt, RNAi
uugacaagguccuuaagaacg

SEQ ID NO: 29660 - DNA, 21 bp, Homo sapiens
caggaattcttgcagtgtaga

SEQ ID NO: 29661 - RNA, 21 nt, RNAi
ggaauucuugcaguguagauu

SEQ ID NO: 29662 - RNA, 21 nt, RNAi
uuccuuaagaacgucacaucu

SEQ ID NO: 29663 - DNA, 21 bp, Homo sapiens
cagtgtagaggtattcacaac

SEQ ID NO: 29664 - RNA, 21 nt, RNAi
guguagagguauucacaacuu

SEQ ID NO: 29665 - RNA, 21 nt, RNAi
uucacaucuccauaaguguug

SEQ ID NO: 29666 - DNA, 21 bp, Homo sapiens
caattaagtttgcagtttgtc

SEQ ID NO: 29667 - RNA, 21 nt, RNAi
auuaaguuugcaguuugucuu

SEQ ID NO: 29668 - RNA, 21 nt, RNAi
uuuaauucaaacgucaaacag

SEQ ID NO: 29669 - DNA, 21 bp, Homo sapiens
cagtttgtcctcataaacgtt

SEQ ID NO: 29670 - RNA, 21 nt, RNAi
guuuguccucauaaacguuuu

SEQ ID NO: 29671 - RNA, 21 nt, RNAi
uucaaacaggaguauuugcaa

SEQ ID NO: 29672 - DNA, 21 bp, Homo sapiens
cataaacgttgtaggttgaaa

SEQ ID NO: 29673 - RNA, 21 nt, RNAi
uaaacguuguagguugaaauu

SEQ ID NO: 29674 - RNA, 21 nt, RNAi
uuauuugcaacauccaacuuu

SEQ ID NO: 29675 - DNA, 21 bp, Homo sapiens
caatggaatattatttggcct

SEQ ID NO: 29676 - RNA, 21 nt, RNAi
auggaauauuauuuggccuuu

SEQ ID NO: 29677 - RNA, 21 nt, RNAi
uuuaccuuauaauaaaccgga

SEQ ID NO: 29678 - DNA, 21 bp, Homo sapiens
catctgatatgtgctgcaaca

SEQ ID NO: 29679 - RNA, 21 nt, RNAi
ucugauaugugcugcaacauu

SEQ ID NO: 29680 - RNA, 21 nt, RNAi
uuagacuauacacgacguugu

SEQ ID NO: 29681 - DNA, 21 bp, Homo sapiens
gatcgagcgctactcgcgctt

SEQ ID NO: 29682 - RNA, 21 nt, RNAi
ucgagcgcuacucgcgcuuuu

SEQ ID NO: 29683 - RNA, 21 nt, RNAi
uuagcucgcgaugagcgcgaa

SEQ ID NO: 29684 - DNA, 21 bp, Homo sapiens
gagagataatgcatgtgagaa

SEQ ID NO: 29685 - RNA, 21 nt, RNAi
gagauaaugcaugugagaauu

SEQ ID NO: 29686 - RNA, 21 nt, RNAi
uucucuauuacguacacucuu

SEQ ID NO: 29687 - DNA, 21 bp, Homo sapiens
gaaaggaacttcctgtgcggc

SEQ ID NO: 29688 - RNA, 21 nt, RNAi
aaggaacuuccugugcggcuu

SEQ ID NO: 29689 - RNA, 21 nt, RNAi
uuuuccuugaaggacacgccg

SEQ ID NO: 29690 - DNA, 21 bp, Homo sapiens
gaacttcctgtgcggctggct

SEQ ID NO: 29691 - RNA, 21 nt, RNAi
acuuccugugcggcuggcuuu

SEQ ID NO: 29692 - RNA, 21 nt, RNAi
uuugaaggacacgccgaccga

SEQ ID NO: 29693 - DNA, 21 bp, Homo sapiens
gagagaagttaatcttctgcc

SEQ ID NO: 29694 - RNA, 21 nt, RNAi
gagaaguuaaucuucugccuu

SEQ ID NO: 29695 - RNA, 21 nt, RNAi
uucucuucaauuagaagacgg

SEQ ID NO: 29696 - DNA, 21 bp, Homo sapiens
gagaagttaatcttctgccgg

SEQ ID NO: 29697 - RNA, 21 nt, RNAi
gaaguuaaucuucugccgguu

SEQ ID NO: 29698 - RNA, 21 nt, RNAi
uucuucaauuagaagacggcc

SEQ ID NO: 29699 - DNA, 21 bp, Homo sapiens
gaagttaatcttctgccggat

SEQ ID NO: 29700 - RNA, 21 nt, RNAi
aguuaaucuucugccggauuu

SEQ ID NO: 29701 - RNA, 21 nt, RNAi
uuucaauuagaagacggccua

SEQ ID NO: 29702 - DNA, 21 bp, Homo sapiens
gattggttcagagttggtata

SEQ ID NO: 29703 - RNA, 21 nt, RNAi
uugguucagaguugguauauu

SEQ ID NO: 29704 - RNA, 21 nt, RNAi
uuaaccaagucucaaccauau

SEQ ID NO: 29705 - DNA, 21 bp, Homo sapiens
gagttggtatatgcagagttt

SEQ ID NO: 29706 - RNA, 21 nt, RNAi
guugguauaugcagaguuuuu

SEQ ID NO: 29707 - RNA, 21 nt, RNAi
uucaaccauauacgucucaaa

SEQ ID NO: 29708 - DNA, 21 bp, Homo sapiens
gaggatccacaggtcttggat

SEQ ID NO: 29709 - RNA, 21 nt, RNAi
ggauccacaggucuuggauuu

SEQ ID NO: 29710 - RNA, 21 nt, RNAi
uuccuagguguccagaaccua

SEQ ID NO: 29711 - DNA, 21 bp, Homo sapiens
gatccacaggtcttggataac

SEQ ID NO: 29712 - RNA, 21 nt, RNAi
uccacaggucuuggauaacuu

SEQ ID NO: 29713 - RNA, 21 nt, RNAi
uuagguguccagaaccuauug

SEQ ID NO: 29714 - DNA, 21 bp, Homo sapiens
gataactttctacaagttctg

SEQ ID NO: 29715 - RNA, 21 nt, RNAi
uaacuuucuacaaguucuguu

SEQ ID NO: 29716 - RNA, 21 nt, RNAi
uuauugaaagauguucaagac

SEQ ID NO: 29717 - DNA, 21 bp, Homo sapiens
gaaatagacacaatgatgtgg

SEQ ID NO: 29718 - RNA, 21 nt, RNAi
aauagacacaaugaugugguu

SEQ ID NO: 29719 - RNA, 21 nt, RNAi
uuuuaucuguguuacuacacc

SEQ ID NO: 29720 - DNA, 21 bp, Homo sapiens
gacacaatgatgtggttccta

SEQ ID NO: 29721 - RNA, 21 nt, RNAi
cacaaugaugugguuccuauu

SEQ ID NO: 29722 - RNA, 21 nt, RNAi
uuguguuacuacaccaaggau

SEQ ID NO: 29723 - DNA, 21 bp, Homo sapiens
gatgtggttcctacaatggca

SEQ ID NO: 29724 - RNA, 21 nt, RNAi
ugugguuccuacaauggcauu

SEQ ID NO: 29725 - RNA, 21 nt, RNAi
uuacaccaaggauguuaccgu

SEQ ID NO: 29726 - DNA, 21 bp, Homo sapiens
gagtgattgaatacaaggaga

SEQ ID NO: 29727 - RNA, 21 nt, RNAi
gugauugaauacaaggagauu

SEQ ID NO: 29728 - RNA, 21 nt, RNAi
uucacuaacuuauguuccucu

SEQ ID NO: 29729 - DNA, 21 bp, Homo sapiens
gattgaatacaaggagaagtt

SEQ ID NO: 29730 - RNA, 21 nt, RNAi
uugaauacaaggagaaguuuu

SEQ ID NO: 29731 - RNA, 21 nt, RNAi
uuaacuuauguuccucuucaa

SEQ ID NO: 29732 - DNA, 21 bp, Homo sapiens
gatcctttcattagcactaac

SEQ ID NO: 29733 - RNA, 21 nt, RNAi
uccuuucauuagcacuaacuu

SEQ ID NO: 29734 - RNA, 21 nt, RNAi
uuaggaaaguaaucgugauug

SEQ ID NO: 29735 - DNA, 21 bp, Homo sapiens
gacactaatcctgttcatcct

SEQ ID NO: 29736 - RNA, 21 nt, RNAi
cacuaauccuguucauccuuu

SEQ ID NO: 29737 - RNA, 21 nt, RNAi
uugugauuaggacaaguagga

SEQ ID NO: 29738 - DNA, 21 bp, Homo sapiens
gatgtggtgaaagatgcatat

SEQ ID NO: 29739 - RNA, 21 nt, RNAi
uguggugaaagaugcauauuu

SEQ ID NO: 29740 - RNA, 21 nt, RNAi
uuacaccacuuucuacguaua

SEQ ID NO: 29741 - DNA, 21 bp, Homo sapiens
gaaagatgcatatgaaacagc

SEQ ID NO: 29742 - RNA, 21 nt, RNAi
aagaugcauaugaaacagcuu

SEQ ID NO: 29743 - RNA, 21 nt, RNAi
uuuucuacguauacuuugucg

SEQ ID NO: 29744 - DNA, 21 bp, Homo sapiens
gatgcatatgaaacagccaag

SEQ ID NO: 29745 - RNA, 21 nt, RNAi
ugcauaugaaacagccaaguu

SEQ ID NO: 29746 - RNA, 21 nt, RNAi
uuacguauacuuugucgguuc

SEQ ID NO: 29747 - DNA, 21 bp, Homo sapiens
gaaacagccaagatgctgtgt

SEQ ID NO: 29748 - RNA, 21 nt, RNAi
aacagccaagaugcuguguuu

SEQ ID NO: 29749 - RNA, 21 nt, RNAi
uuuugucgguucuacgacaca

SEQ ID NO: 29750 - DNA, 21 bp, Homo sapiens
gatgctgtgtgaacagtatta

SEQ ID NO: 29751 - RNA, 21 nt, RNAi
ugcugugugaacaguauuauu

SEQ ID NO: 29752 - RNA, 21 nt, RNAi
uuacgacacacuugucauaau

SEQ ID NO: 29753 - DNA, 21 bp, Homo sapiens
gaacagtattacctggtagct

SEQ ID NO: 29754 - RNA, 21 nt, RNAi
acaguauuaccugguagcuuu

SEQ ID NO: 29755 - RNA, 21 nt, RNAi
uuugucauaauggaccaucga

SEQ ID NO: 29756 - DNA, 21 bp, Homo sapiens
gagctggaagttgaagaattc

SEQ ID NO: 29757 - RNA, 21 nt, RNAi
gcuggaaguugaagaauucuu

SEQ ID NO: 29758 - RNA, 21 nt, RNAi
uucgaccuucaacuucuuaag

SEQ ID NO: 29759 - DNA, 21 bp, Homo sapiens
gaagttgaagaattcaatgcc

SEQ ID NO: 29760 - RNA, 21 nt, RNAi
aguugaagaauucaaugccuu

SEQ ID NO: 29761 - RNA, 21 nt, RNAi
uuucaacuucuuaaguuacgg

SEQ ID NO: 29762 - DNA, 21 bp, Homo sapiens
gaagaattcaatgccaaagcg

SEQ ID NO: 29763 - RNA, 21 nt, RNAi
agaauucaaugccaaagcguu

SEQ ID NO: 29764 - RNA, 21 nt, RNAi
uuucuuaaguuacgguuucgc

SEQ ID NO: 29765 - DNA, 21 bp, Homo sapiens
gaattcaatgccaaagcgcca

SEQ ID NO: 29766 - RNA, 21 nt, RNAi
auucaaugccaaagcgccauu

SEQ ID NO: 29767 - RNA, 21 nt, RNAi
uuuaaguuacgguuucgcggu

SEQ ID NO: 29768 - DNA, 21 bp, Homo sapiens
gacaaacctattcaggtggtt

SEQ ID NO: 29769 - RNA, 21 nt, RNAi
caaaccuauucaggugguuuu

SEQ ID NO: 29770 - RNA, 21 nt, RNAi
uuguuuggauaaguccaccaa

SEQ ID NO: 29771 - DNA, 21 bp, Homo sapiens
gagttgttcaagaactcaatg

SEQ ID NO: 29772 - RNA, 21 nt, RNAi
guuguucaagaacucaauguu

SEQ ID NO: 29773 - RNA, 21 nt, RNAi
uucaacaaguucuugaguuac

SEQ ID NO: 29774 - DNA, 21 bp, Homo sapiens
gaactcaatgagagcgacagt

SEQ ID NO: 29775 - RNA, 21 nt, RNAi
acucaaugagagcgacaguuu

SEQ ID NO: 29776 - RNA, 21 nt, RNAi
uuugaguuacucucgcuguca

SEQ ID NO: 29777 - DNA, 21 bp, Homo sapiens
gagagcgacagttgaactcta

SEQ ID NO: 29778 - RNA, 21 nt, RNAi
gagcgacaguugaacucuauu

SEQ ID NO: 29779 - RNA, 21 nt, RNAi
uucucgcugucaacuugagau

SEQ ID NO: 29780 - DNA, 21 bp, Homo sapiens
gagcgacagttgaactctatg

SEQ ID NO: 29781 - RNA, 21 nt, RNAi
gcgacaguugaacucuauguu

SEQ ID NO: 29782 - RNA, 21 nt, RNAi
uucgcugucaacuugagauac

SEQ ID NO: 29783 - DNA, 21 bp, Homo sapiens
gacagttgaactctatgaaga

SEQ ID NO: 29784 - RNA, 21 nt, RNAi
caguugaacucuaugaagauu

SEQ ID NO: 29785 - RNA, 21 nt, RNAi
uugucaacuugagauacuucu

SEQ ID NO: 29786 - DNA, 21 bp, Homo sapiens
gaagacttatccattaagatc

SEQ ID NO: 29787 - RNA, 21 nt, RNAi
agacuuauccauuaagaucuu

SEQ ID NO: 29788 - RNA, 21 nt, RNAi
uuucugaauagguaauucuag

SEQ ID NO: 29789 - DNA, 21 bp, Homo sapiens
gacttatccattaagatcagt

SEQ ID NO: 29790 - RNA, 21 nt, RNAi
cuuauccauuaagaucaguuu

SEQ ID NO: 29791 - RNA, 21 nt, RNAi
uugaauagguaauucuaguca

SEQ ID NO: 29792 - DNA, 21 bp, Homo sapiens
gatcagtgacctaggtggtgg

SEQ ID NO: 29793 - RNA, 21 nt, RNAi
ucagugaccuagguggugguu

SEQ ID NO: 29794 - RNA, 21 nt, RNAi
uuagucacuggauccaccacc

SEQ ID NO: 29795 - DNA, 21 bp, Homo sapiens
gatttggttatggtttgccaa

SEQ ID NO: 29796 - RNA, 21 nt, RNAi
uuugguuaugguuugccaauu

SEQ ID NO: 29797 - RNA, 21 nt, RNAi
uuaaaccaauaccaaacgguu

SEQ ID NO: 29798 - DNA, 21 bp, Homo sapiens
gagatctgaaactgtattcca

SEQ ID NO: 29799 - RNA, 21 nt, RNAi
gaucugaaacuguauuccauu

SEQ ID NO: 29800 - RNA, 21 nt, RNAi
uucuagacuuugacauaaggu

SEQ ID NO: 29801 - DNA, 21 bp, Homo sapiens
gatctgaaactgtattccatg

SEQ ID NO: 29802 - RNA, 21 nt, RNAi
ucugaaacuguauuccauguu

SEQ ID NO: 29803 - RNA, 21 nt, RNAi
uuagacuuugacauaagguac

SEQ ID NO: 29804 - DNA, 21 bp, Homo sapiens
gaaactgtattccatggaagg

SEQ ID NO: 29805 - RNA, 21 nt, RNAi
aacuguauuccauggaagguu

SEQ ID NO: 29806 - RNA, 21 nt, RNAi
uuuugacauaagguaccuucc

SEQ ID NO: 29807 - DNA, 21 bp, Homo sapiens
gatgctgtcatttatttgaag

SEQ ID NO: 29808 - RNA, 21 nt, RNAi
ugcugucauuuauuugaaguu

SEQ ID NO: 29809 - RNA, 21 nt, RNAi
uuacgacaguaaauaaacuuc

SEQ ID NO: 29810 - DNA, 21 bp, Homo sapiens
gaaggctctttcaagtgagtc

SEQ ID NO: 29811 - RNA, 21 nt, RNAi
aggcucuuucaagugagucuu

SEQ ID NO: 29812 - RNA, 21 nt, RNAi
uuuccgagaaaguucacucag

SEQ ID NO: 29813 - DNA, 21 bp, Homo sapiens
gagtcatttgagagacttcca

SEQ ID NO: 29814 - RNA, 21 nt, RNAi
gucauuugagagacuuccauu

SEQ ID NO: 29815 - RNA, 21 nt, RNAi
uucaguaaacucucugaaggu

SEQ ID NO: 29816 - DNA, 21 bp, Homo sapiens
gaccacgcctgaagccgatga

SEQ ID NO: 29817 - RNA, 21 nt, RNAi
ccacgccugaagccgaugauu

SEQ ID NO: 29818 - RNA, 21 nt, RNAi
uuggugcggacuucggcuacu

SEQ ID NO: 29819 - DNA, 21 bp, Homo sapiens
gaagccgatgattggagcaat

SEQ ID NO: 29820 - RNA, 21 nt, RNAi
agccgaugauuggagcaauuu

SEQ ID NO: 29821 - RNA, 21 nt, RNAi
uuucggcuacuaaccucguua

SEQ ID NO: 29822 - DNA, 21 bp, Homo sapiens
gatttgtctgaataaaggtgt

SEQ ID NO: 29823 - RNA, 21 nt, RNAi
uuugucugaauaaagguguuu

SEQ ID NO: 29824 - RNA, 21 nt, RNAi
uuaaacagacuuauuuccaca

SEQ ID NO: 29825 - DNA, 21 bp, Homo sapiens
gaattcttgcagtgtagaggt

SEQ ID NO: 29826 - RNA, 21 nt, RNAi
auucuugcaguguagagguuu

SEQ ID NO: 29827 - RNA, 21 nt, RNAi
uuuaagaacgucacaucucca

SEQ ID NO: 29828 - DNA, 21 bp, Homo sapiens
gaggtattcacaacagcaagc

SEQ ID NO: 29829 - RNA, 21 nt, RNAi
gguauucacaacagcaagcuu

SEQ ID NO: 29830 - RNA, 21 nt, RNAi
uuccauaaguguugucguucg

SEQ ID NO: 29831 - DNA, 21 bp, Homo sapiens
gatttggcctgccatcaattt

SEQ ID NO: 29832 - RNA, 21 nt, RNAi
uuuggccugccaucaauuuuu

SEQ ID NO: 29833 - RNA, 21 nt, RNAi
uuaaaccggacgguaguuaaa

SEQ ID NO: 29834 - DNA, 21 bp, Homo sapiens
gatctatccatccaatggaat

SEQ ID NO: 29835 - RNA, 21 nt, RNAi
ucuauccauccaauggaauuu

SEQ ID NO: 29836 - RNA, 21 nt, RNAi
uuagauagguagguuaccuua

SEQ ID NO: 29837 - DNA, 21 bp, Homo sapiens
gaaggacatctgatatgtgct

SEQ ID NO: 29838 - RNA, 21 nt, RNAi
aggacaucugauaugugcuuu

SEQ ID NO: 29839 - RNA, 21 nt, RNAi
uuuccuguagacuauacacga

SEQ ID NO: 29840 - DNA, 21 bp, Homo sapiens
gacatctgatatgtgctgcaa

SEQ ID NO: 29841 - RNA, 21 nt, RNAi
caucugauaugugcugcaauu

SEQ ID NO: 29842 - RNA, 21 nt, RNAi
uuguagacuauacacgacguu

SEQ ID NO: 29843 - DNA, 21 bp, Homo sapiens
gaatcttgaagtcattatgct

SEQ ID NO: 29844 - RNA, 21 nt, RNAi
aucuugaagucauuaugcuuu

SEQ ID NO: 29845 - RNA, 21 nt, RNAi
uuuagaacuucaguaauacga

SEQ ID NO: 29846 - DNA, 21 bp, Homo sapiens
gaagtcattatgctaagtgaa

SEQ ID NO: 29847 - RNA, 21 nt, RNAi
agucauuaugcuaagugaauu

SEQ ID NO: 29848 - RNA, 21 nt, RNAi
uuucaguaauacgauucacuu

SEQ ID NO: 29849 - DNA, 21 bp, Homo sapiens
tatgtttctacgaaaggaact

SEQ ID NO: 29850 - RNA, 21 nt, RNAi
uguuucuacgaaaggaacuuu

SEQ ID NO: 29851 - RNA, 21 nt, RNAi
uuacaaagaugcuuuccuuga

SEQ ID NO: 29852 - DNA, 21 bp, Homo sapiens
tacgaaaggaacttcctgtgc

SEQ ID NO: 29853 - RNA, 21 nt, RNAi
cgaaaggaacuuccugugcuu

SEQ ID NO: 29854 - RNA, 21 nt, RNAi
uugcuuuccuugaaggacacg

SEQ ID NO: 29855 - DNA, 21 bp, Homo sapiens
taatcttctgccggataattt

SEQ ID NO: 29856 - RNA, 21 nt, RNAi
aucuucugccggauaauuuuu

SEQ ID NO: 29857 - RNA, 21 nt, RNAi
uuuagaagacggccuauuaaa

SEQ ID NO: 29858 - DNA, 21 bp, Homo sapiens
tagacacaatgatgtggttcc

SEQ ID NO: 29859 - RNA, 21 nt, RNAi
gacacaaugaugugguuccuu

SEQ ID NO: 29860 - RNA, 21 nt, RNAi
uucuguguuacuacaccaagg

SEQ ID NO: 29861 - DNA, 21 bp, Homo sapiens
tacaatggcacaaggagtgat

SEQ ID NO: 29862 - RNA, 21 nt, RNAi
caauggcacaaggagugauuu

SEQ ID NO: 29863 - RNA, 21 nt, RNAi
uuguuaccguguuccucacua

SEQ ID NO: 29864 - DNA, 21 bp, Homo sapiens
tataccaaccgcatctctttc

SEQ ID NO: 29865 - RNA, 21 nt, RNAi
uaccaaccgcaucucuuucuu

SEQ ID NO: 29866 - RNA, 21 nt, RNAi
uuaugguuggcguagagaaag

SEQ ID NO: 29867 - DNA, 21 bp, Homo sapiens
taccaaccgcatctctttccg

SEQ ID NO: 29868 - RNA, 21 nt, RNAi
ccaaccgcaucucuuuccguu

SEQ ID NO: 29869 - RNA, 21 nt, RNAi
uugguuggcguagagaaaggc

SEQ ID NO: 29870 - DNA, 21 bp, Homo sapiens
tattaatcagcacacacttct

SEQ ID NO: 29871 - RNA, 21 nt, RNAi
uuaaucagcacacacuucuuu

SEQ ID NO: 29872 - RNA, 21 nt, RNAi
uuaauuagucgugugugaaga

SEQ ID NO: 29873 - DNA, 21 bp, Homo sapiens
taatcagcacacacttctgtt

SEQ ID NO: 29874 - RNA, 21 nt, RNAi
aucagcacacacuucuguuuu

SEQ ID NO: 29875 - RNA, 21 nt, RNAi
uuuagucgugugugaagacaa

SEQ ID NO: 29876 - DNA, 21 bp, Homo sapiens
taatcctgttcatcctaaaca

SEQ ID NO: 29877 - RNA, 21 nt, RNAi
auccuguucauccuaaacauu

SEQ ID NO: 29878 - RNA, 21 nt, RNAi
uuuaggacaaguaggauuugu

SEQ ID NO: 29879 - DNA, 21 bp, Homo sapiens
taaacacataggaagtatcga

SEQ ID NO: 29880 - RNA, 21 nt, RNAi
aacacauaggaaguaucgauu

SEQ ID NO: 29881 - RNA, 21 nt, RNAi
uuuuguguauccuucauagcu

SEQ ID NO: 29882 - DNA, 21 bp, Homo sapiens
taacgtggcggatgtggtgaa

SEQ ID NO: 29883 - RNA, 21 nt, RNAi
acguggcggauguggugaauu

SEQ ID NO: 29884 - RNA, 21 nt, RNAi
uuugcaccgccuacaccacuu

SEQ ID NO: 29885 - DNA, 21 bp, Homo sapiens
tatgaaacagccaagatgctg

SEQ ID NO: 29886 - RNA, 21 nt, RNAi
ugaaacagccaagaugcuguu

SEQ ID NO: 29887 - RNA, 21 nt, RNAi
uuacuuugucgguucuacgac

SEQ ID NO: 29888 - DNA, 21 bp, Homo sapiens
tattacctggtagctccagag

SEQ ID NO: 29889 - RNA, 21 nt, RNAi
uuaccugguagcuccagaguu

SEQ ID NO: 29890 - RNA, 21 nt, RNAi
uuaauggaccaucgaggucuc

SEQ ID NO: 29891 - DNA, 21 bp, Homo sapiens
tacctggtagctccagagctg

SEQ ID NO: 29892 - RNA, 21 nt, RNAi
ccugguagcuccagagcuguu

SEQ ID NO: 29893 - RNA, 21 nt, RNAi
uuggaccaucgaggucucgac

SEQ ID NO: 29894 - DNA, 21 bp, Homo sapiens
tagctccagagctggaagttg

SEQ ID NO: 29895 - RNA, 21 nt, RNAi
gcuccagagcuggaaguuguu

SEQ ID NO: 29896 - RNA, 21 nt, RNAi
uucgaggucucgaccuucaac

SEQ ID NO: 29897 - DNA, 21 bp, Homo sapiens
tattcaggtggtttatgtgcc

SEQ ID NO: 29898 - RNA, 21 nt, RNAi
uucaggugguuuaugugccuu

SEQ ID NO: 29899 - RNA, 21 nt, RNAi
uuaaguccaccaaauacacgg

SEQ ID NO: 29900 - DNA, 21 bp, Homo sapiens
tatccattaagatcagtgacc

SEQ ID NO: 29901 - RNA, 21 nt, RNAi
uccauuaagaucagugaccuu

SEQ ID NO: 29902 - RNA, 21 nt, RNAi
uuagguaauucuagucacugg

SEQ ID NO: 29903 - DNA, 21 bp, Homo sapiens
taagatcagtgacctaggtgg

SEQ ID NO: 29904 - RNA, 21 nt, RNAi
agaucagugaccuaggugguu

SEQ ID NO: 29905 - RNA, 21 nt, RNAi
uuucuagucacuggauccacc

SEQ ID NO: 29906 - DNA, 21 bp, Homo sapiens
taactacatgtattctactgc

SEQ ID NO: 29907 - RNA, 21 nt, RNAi
acuacauguauucuacugcuu

SEQ ID NO: 29908 - RNA, 21 nt, RNAi
uuugauguacauaagaugacg

SEQ ID NO: 29909 - DNA, 21 bp, Homo sapiens
tacatgtattctactgctcct

SEQ ID NO: 29910 - RNA, 21 nt, RNAi
cauguauucuacugcuccuuu

SEQ ID NO: 29911 - RNA, 21 nt, RNAi
uuguacauaagaugacgagga

SEQ ID NO: 29912 - DNA, 21 bp, Homo sapiens
tatttgaaggctctttcaagt

SEQ ID NO: 29913 - RNA, 21 nt, RNAi
uuugaaggcucuuucaaguuu

SEQ ID NO: 29914 - RNA, 21 nt, RNAi
uuaaacuuccgagaaaguuca

SEQ ID NO: 29915 - DNA, 21 bp, Homo sapiens
taataagtccgcatggcgcca

SEQ ID NO: 29916 - RNA, 21 nt, RNAi
auaaguccgcauggcgccauu

SEQ ID NO: 29917 - RNA, 21 nt, RNAi
uuuauucaggcguaccgcggu

SEQ ID NO: 29918 - DNA, 21 bp, Homo sapiens
taagtccgcatggcgccatta

SEQ ID NO: 29919 - RNA, 21 nt, RNAi
aguccgcauggcgccauuauu

SEQ ID NO: 29920 - RNA, 21 nt, RNAi
uuucaggcguaccgcgguaau

SEQ ID NO: 29921 - DNA, 21 bp, Homo sapiens
tacaagaccacgcctgaagcc

SEQ ID NO: 29922 - RNA, 21 nt, RNAi
caagaccacgccugaagccuu

SEQ ID NO: 29923 - RNA, 21 nt, RNAi
uuguucuggugcggacuucgg

SEQ ID NO: 29924 - DNA, 21 bp, Homo sapiens
taatataccaccttgatttcc

SEQ ID NO: 29925 - RNA, 21 nt, RNAi
auauaccaccuugauuuccuu

SEQ ID NO: 29926 - RNA, 21 nt, RNAi
uuuauaugguggaacuaaagg

SEQ ID NO: 29927 - DNA, 21 bp, Homo sapiens
tataccaccttgatttccatt

SEQ ID NO: 29928 - RNA, 21 nt, RNAi
uaccaccuugauuuccauuuu

SEQ ID NO: 29929 - RNA, 21 nt, RNAi
uuaugguggaacuaaagguaa

SEQ ID NO: 29930 - DNA, 21 bp, Homo sapiens
taccaccttgatttccattac

SEQ ID NO: 29931 - RNA, 21 nt, RNAi
ccaccuugauuuccauuacuu

SEQ ID NO: 29932 - RNA, 21 nt, RNAi
uugguggaacuaaagguaaug

SEQ ID NO: 29933 - DNA, 21 bp, Homo sapiens
tagaggtattcacaacagcaa

SEQ ID NO: 29934 - RNA, 21 nt, RNAi
gagguauucacaacagcaauu

SEQ ID NO: 29935 - RNA, 21 nt, RNAi
uucuccauaaguguugucguu

SEQ ID NO: 29936 - DNA, 21 bp, Homo sapiens
taagtttgcagtttgtcctca

SEQ ID NO: 29937 - RNA, 21 nt, RNAi
aguuugcaguuuguccucauu

SEQ ID NO: 29938 - RNA, 21 nt, RNAi
uuucaaacgucaaacaggagu

SEQ ID NO: 29939 - DNA, 21 bp, Homo sapiens
taaacgttgtaggttgaaact

SEQ ID NO: 29940 - RNA, 21 nt, RNAi
aacguuguagguugaaacuuu

SEQ ID NO: 29941 - RNA, 21 nt, RNAi
uuuugcaacauccaacuuuga

SEQ ID NO: 29942 - DNA, 21 bp, Homo sapiens
aaatagacacaatgatgtggt

SEQ ID NO: 29943 - RNA, 21 nt, RNAi
auagacacaaugaugugguuu

SEQ ID NO: 29944 - RNA, 21 nt, RNAi
uuuaucuguguuacuacacca

SEQ ID NO: 29945 - DNA, 21 bp, Homo sapiens
aatagacacaatgatgtggtt

SEQ ID NO: 29946 - RNA, 21 nt, RNAi
uagacacaaugaugugguuuu

SEQ ID NO: 29947 - RNA, 21 nt, RNAi
uuaucuguguuacuacaccaa

SEQ ID NO: 29948 - DNA, 21 bp, Homo sapiens
aatgatgtggttcctacaatg

SEQ ID NO: 29949 - RNA, 21 nt, RNAi
ugaugugguuccuacaauguu

SEQ ID NO: 29950 - RNA, 21 nt, RNAi
uuacuacaccaaggauguuac

SEQ ID NO: 29951 - DNA, 21 bp, Homo sapiens
aaacacataggaagtatcgat

SEQ ID NO: 29952 - RNA, 21 nt, RNAi
acacauaggaaguaucgauuu

SEQ ID NO: 29953 - RNA, 21 nt, RNAi
uuuguguauccuucauagcua

SEQ ID NO: 29954 - DNA, 21 bp, Homo sapiens
aacacataggaagtatcgatc

SEQ ID NO: 29955 - RNA, 21 nt, RNAi
cacauaggaaguaucgaucuu

SEQ ID NO: 29956 - RNA, 21 nt, RNAi
uuguguauccuucauagcuag

SEQ ID NO: 29957 - DNA, 21 bp, Homo sapiens
aaagatgcatatgaaacagcc

SEQ ID NO: 29958 - RNA, 21 nt, RNAi
agaugcauaugaaacagccuu

SEQ ID NO: 29959 - RNA, 21 nt, RNAi
uuucuacguauacuuugucgg

SEQ ID NO: 29960 - DNA, 21 bp, Homo sapiens
aagatgcatatgaaacagcca

SEQ ID NO: 29961 - RNA, 21 nt, RNAi
gaugcauaugaaacagccauu

SEQ ID NO: 29962 - RNA, 21 nt, RNAi
uucuacguauacuuugucggu

SEQ ID NO: 29963 - DNA, 21 bp, Homo sapiens
aacagtattacctggtagctc

SEQ ID NO: 29964 - RNA, 21 nt, RNAi
caguauuaccugguagcucuu

SEQ ID NO: 29965 - RNA, 21 nt, RNAi
uugucauaauggaccaucgag

SEQ ID NO: 29966 - DNA, 21 bp, Homo sapiens
aagaattcaatgccaaagcgc

SEQ ID NO: 29967 - RNA, 21 nt, RNAi
gaauucaaugccaaagcgcuu

SEQ ID NO: 29968 - RNA, 21 nt, RNAi
uucuuaaguuacgguuucgcg

SEQ ID NO: 29969 - DNA, 21 bp, Homo sapiens
aattcaatgccaaagcgccag

SEQ ID NO: 29970 - RNA, 21 nt, RNAi
uucaaugccaaagcgccaguu

SEQ ID NO: 29971 - RNA, 21 nt, RNAi
uuaaguuacgguuucgcgguc

SEQ ID NO: 29972 - DNA, 21 bp, Homo sapiens
aaagcgccagacaaacctatt

SEQ ID NO: 29973 - RNA, 21 nt, RNAi
agcgccagacaaaccuauuuu

SEQ ID NO: 29974 - RNA, 21 nt, RNAi
uuucgcggucuguuuggauaa

SEQ ID NO: 29975 - DNA, 21 bp, Homo sapiens
aagcgccagacaaacctattc

SEQ ID NO: 29976 - RNA, 21 nt, RNAi
gcgccagacaaaccuauucuu

SEQ ID NO: 29977 - RNA, 21 nt, RNAi
uucgcggucuguuuggauaag

SEQ ID NO: 29978 - DNA, 21 bp, Homo sapiens
aagaactcaatgagagcgaca

SEQ ID NO: 29979 - RNA, 21 nt, RNAi
gaacucaaugagagcgacauu

SEQ ID NO: 29980 - RNA, 21 nt, RNAi
uucuugaguuacucucgcugu

SEQ ID NO: 29981 - DNA, 21 bp, Homo sapiens
aactcaatgagagcgacagtt

SEQ ID NO: 29982 - RNA, 21 nt, RNAi
cucaaugagagcgacaguuuu

SEQ ID NO: 29983 - RNA, 21 nt, RNAi
uugaguuacucucgcugucaa

SEQ ID NO: 29984 - DNA, 21 bp, Homo sapiens
aatgagagcgacagttgaact

SEQ ID NO: 29985 - RNA, 21 nt, RNAi
ugagagcgacaguugaacuuu

SEQ ID NO: 29986 - RNA, 21 nt, RNAi
uuacucucgcugucaacuuga

SEQ ID NO: 29987 - DNA, 21 bp, Homo sapiens
catctctttccgcatgcttat

SEQ ID NO: 29988 - RNA, 21 nt, RNAi
ucucuuuccgcaugcuuauuu

SEQ ID NO: 29989 - RNA, 21 nt, RNAi
uuagagaaaggcguacgaaua

SEQ ID NO: 29990 - DNA, 21 bp, Homo sapiens
cactaatcctgttcatcctaa

SEQ ID NO: 29991 - RNA, 21 nt, RNAi
cuaauccuguucauccuaauu

SEQ ID NO: 29992 - RNA, 21 nt, RNAi
uugauuaggacaaguaggauu

SEQ ID NO: 29993 - DNA, 21 bp, Homo sapiens
cagtattacctggtagctcca

SEQ ID NO: 29994 - RNA, 21 nt, RNAi
guauuaccugguagcuccauu

SEQ ID NO: 29995 - RNA, 21 nt, RNAi
uucauaauggaccaucgaggu

SEQ ID NO: 29996 - DNA, 21 bp, Homo sapiens
caaagcgccagacaaacctat

SEQ ID NO: 29997 - RNA, 21 nt, RNAi
aagcgccagacaaaccuauuu

SEQ ID NO: 29998 - RNA, 21 nt, RNAi
uuuucgcggucuguuuggaua

SEQ ID NO: 29999 - DNA, 21 bp, Homo sapiens
caaacctattcaggtggttta

SEQ ID NO: 30000 - RNA, 21 nt, RNAi
aaccuauucaggugguuuauu

SEQ ID NO: 30001 - RNA, 21 nt, RNAi
uuuuggauaaguccaccaaau

SEQ ID NO: 30002 - DNA, 21 bp, Homo sapiens
caatgagagcgacagttgaac

SEQ ID NO: 30003 - RNA, 21 nt, RNAi
augagagcgacaguugaacuu

SEQ ID NO: 30004 - RNA, 21 nt, RNAi
uuuacucucgcugucaacuug

SEQ ID NO: 30005 - DNA, 21 bp, Homo sapiens
cattaagatcagtgacctagg

SEQ ID NO: 30006 - RNA, 21 nt, RNAi
uuaagaucagugaccuagguu

SEQ ID NO: 30007 - RNA, 21 nt, RNAi
uuaauucuagucacuggaucc

SEQ ID NO: 30008 - DNA, 21 bp, Homo sapiens
gatgtggttcctacaatggca

SEQ ID NO: 30009 - RNA, 21 nt, RNAi
ugugguuccuacaauggcauu

SEQ ID NO: 30010 - RNA, 21 nt, RNAi
uuacaccaaggauguuaccgu

SEQ ID NO: 30011 - DNA, 21 bp, Homo sapiens
gatcctttcattagcactaac

SEQ ID NO: 30012 - RNA, 21 nt, RNAi
uccuuucauuagcacuaacuu

SEQ ID NO: 30013 - RNA, 21 nt, RNAi
uuaggaaaguaaucgugauug

SEQ ID NO: 30014 - DNA, 21 bp, Homo sapiens
gacactaatcctgttcatcct

SEQ ID NO: 30015 - RNA, 21 nt, RNAi
cacuaauccuguucauccuuu

SEQ ID NO: 30016 - RNA, 21 nt, RNAi
uugugauuaggacaaguagga

SEQ ID NO: 30017 - DNA, 21 bp, Homo sapiens
gaaagatgcatatgaaacagc

SEQ ID NO: 30018 - RNA, 21 nt, RNAi
aagaugcauaugaaacagcuu

SEQ ID NO: 30019 - RNA, 21 nt, RNAi
uuuucuacguauacuuugucg

SEQ ID NO: 30020 - DNA, 21 bp, Homo sapiens
gatgcatatgaaacagccaag

SEQ ID NO: 30021 - RNA, 21 nt, RNAi
ugcauaugaaacagccaaguu

SEQ ID NO: 30022 - RNA, 21 nt, RNAi
uuacguauacuuugucgguuc

SEQ ID NO: 30023 - DNA, 21 bp, Homo sapiens
gaattcaatgccaaagcgcca

SEQ ID NO: 30024 - RNA, 21 nt, RNAi
auucaaugccaaagcgccauu

SEQ ID NO: 30025 - RNA, 21 nt, RNAi
uuuaaguuacgguuucgcggu

SEQ ID NO: 30026 - DNA, 21 bp, Homo sapiens
gaactcaatgagagcgacagt

SEQ ID NO: 30027 - RNA, 21 nt, RNAi
acucaaugagagcgacaguuu

SEQ ID NO: 30028 - RNA, 21 nt, RNAi
uuugaguuacucucgcuguca

SEQ ID NO: 30029 - DNA, 21 bp, Homo sapiens
gagagcgacagttgaactcta

SEQ ID NO: 30030 - RNA, 21 nt, RNAi
gagcgacaguugaacucuauu

SEQ ID NO: 30031 - RNA, 21 nt, RNAi
uucucgcugucaacuugagau

SEQ ID NO: 30032 - DNA, 21 bp, Homo sapiens
tagacacaatgatgtggttcc

SEQ ID NO: 30033 - RNA, 21 nt, RNAi
gacacaaugaugugguuccuu

SEQ ID NO: 30034 - RNA, 21 nt, RNAi
uucuguguuacuacaccaagg

SEQ ID NO: 30035 - DNA, 21 bp, Homo sapiens
tataccaaccgcatctctttc

SEQ ID NO: 30036 - RNA, 21 nt, RNAi
uaccaaccgcaucucuuucuu

SEQ ID NO: 30037 - RNA, 21 nt, RNAi
uuaugguuggcguagagaaag

SEQ ID NO: 30038 - DNA, 21 bp, Homo sapiens
tattacctggtagctccagag

SEQ ID NO: 30039 - RNA, 21 nt, RNAi
uuaccugguagcuccagaguu

SEQ ID NO: 30040 - RNA, 21 nt, RNAi
uuaauggaccaucgaggucuc

SEQ ID NO: 30041 - DNA, 21 bp, Homo sapiens
tatccattaagatcagtgacc

SEQ ID NO: 30042 - RNA, 21 nt, RNAi
uccauuaagaucagugaccuu

SEQ ID NO: 30043 - RNA, 21 nt, RNAi
uuagguaauucuagucacugg

SEQ ID NO: 30044 - DNA, 21 bp, Homo sapiens
aaaggtggccagcagatgtgt

SEQ ID NO: 30045 - RNA, 21 nt, RNAi
agguggccagcagauguguuu

SEQ ID NO: 30046 - RNA, 21 nt, RNAi
uuuccaccggucgucuacaca

SEQ ID NO: 30047 - DNA, 21 bp, Homo sapiens
aaggtggccagcagatgtgtc

SEQ ID NO: 30048 - RNA, 21 nt, RNAi
gguggccagcagaugugucuu

SEQ ID NO: 30049 - RNA, 21 nt, RNAi
uuccaccggucgucuacacag

SEQ ID NO: 30050 - DNA, 21 bp, Homo sapiens
aaggtgcgctccaaggaggac

SEQ ID NO: 30051 - RNA, 21 nt, RNAi
ggugcgcuccaaggaggacuu

SEQ ID NO: 30052 - RNA, 21 nt, RNAi
uuccacgcgagguuccuccug

SEQ ID NO: 30053 - DNA, 21 bp, Homo sapiens
aaagcgttccatgtcaccatt

SEQ ID NO: 30054 - RNA, 21 nt, RNAi
agcguuccaugucaccauuuu

SEQ ID NO: 30055 - RNA, 21 nt, RNAi
uuucgcaagguacagugguaa

SEQ ID NO: 30056 - DNA, 21 bp, Homo sapiens
aagcgttccatgtcaccattc

SEQ ID NO: 30057 - RNA, 21 nt, RNAi
gcguuccaugucaccauucuu

SEQ ID NO: 30058 - RNA, 21 nt, RNAi
uucgcaagguacagugguaag

SEQ ID NO: 30059 - DNA, 21 bp, Homo sapiens
aagcctgccaacatcttcctg

SEQ ID NO: 30060 - RNA, 21 nt, RNAi
gccugccaacaucuuccuguu

SEQ ID NO: 30061 - RNA, 21 nt, RNAi
uucggacgguuguagaaggac

SEQ ID NO: 30062 - DNA, 21 bp, Homo sapiens
aagtggcatgcaacatggagc

SEQ ID NO: 30063 - RNA, 21 nt, RNAi
guggcaugcaacauggagcuu

SEQ ID NO: 30064 - RNA, 21 nt, RNAi
uucaccguacguuguaccucg

SEQ ID NO: 30065 - DNA, 21 bp, Homo sapiens
aagtgacatcaactcagagcc

SEQ ID NO: 30066 - RNA, 21 nt, RNAi
gugacaucaacucagagccuu

SEQ ID NO: 30067 - RNA, 21 nt, RNAi
uucacuguaguugagucucgg

SEQ ID NO: 30068 - DNA, 21 bp, Homo sapiens
aacctcctcagcatgtttgag

SEQ ID NO: 30069 - RNA, 21 nt, RNAi
ccuccucagcauguuugaguu

SEQ ID NO: 30070 - RNA, 21 nt, RNAi
uuggaggagucguacaaacuc

SEQ ID NO: 30071 - DNA, 21 bp, Homo sapiens
caggccagtcatgctagaacg

SEQ ID NO: 30072 - RNA, 21 nt, RNAi
ggccagucaugcuagaacguu

SEQ ID NO: 30073 - RNA, 21 nt, RNAi
uuccggucaguacgaucuugc

SEQ ID NO: 30074 - DNA, 21 bp, Homo sapiens
cagtcatgctagaacggcctc

SEQ ID NO: 30075 - RNA, 21 nt, RNAi
gucaugcuagaacggccucuu

SEQ ID NO: 30076 - RNA, 21 nt, RNAi
uucaguacgaucuugccggag

SEQ ID NO: 30077 - DNA, 21 bp, Homo sapiens
catgctagaacggcctcctgc

SEQ ID NO: 30078 - RNA, 21 nt, RNAi
ugcuagaacggccuccugcuu

SEQ ID NO: 30079 - RNA, 21 nt, RNAi
uuacgaucuugccggaggacg

SEQ ID NO: 30080 - DNA, 21 bp, Homo sapiens
cacgcagaacctggattctcc

SEQ ID NO: 30081 - RNA, 21 nt, RNAi
cgcagaaccuggauucuccuu

SEQ ID NO: 30082 - RNA, 21 nt, RNAi
uugcgucuuggaccuaagagg

SEQ ID NO: 30083 - DNA, 21 bp, Homo sapiens
cagagtccttcttccagcaga

SEQ ID NO: 30084 - RNA, 21 nt, RNAi
gaguccuucuuccagcagauu

SEQ ID NO: 30085 - RNA, 21 nt, RNAi
uucucaggaagaaggucgucu

SEQ ID NO: 30086 - DNA, 21 bp, Homo sapiens
cagcagagcttccagaggctc

SEQ ID NO: 30087 - RNA, 21 nt, RNAi
gcagagcuuccagaggcucuu

SEQ ID NO: 30088 - RNA, 21 nt, RNAi
uucgucucgaaggucuccgag

SEQ ID NO: 30089 - DNA, 21 bp, Homo sapiens
cagagcttccagaggctcagc

SEQ ID NO: 30090 - RNA, 21 nt, RNAi
gagcuuccagaggcucagcuu

SEQ ID NO: 30091 - RNA, 21 nt, RNAi
uucucgaaggucuccgagucg

SEQ ID NO: 30092 - DNA, 21 bp, Homo sapiens
catggctcctacggagaggtc

SEQ ID NO: 30093 - RNA, 21 nt, RNAi
uggcuccuacggagaggucuu

SEQ ID NO: 30094 - RNA, 21 nt, RNAi
uuaccgaggaugccucuccag

SEQ ID NO: 30095 - DNA, 21 bp, Homo sapiens
caaggtgcgctccaaggagga

SEQ ID NO: 30096 - RNA, 21 nt, RNAi
aggugcgcuccaaggaggauu

SEQ ID NO: 30097 - RNA, 21 nt, RNAi
uuuccacgcgagguuccuccu

SEQ ID NO: 30098 - DNA, 21 bp, Homo sapiens
catcctgtacctgcagacgga

SEQ ID NO: 30099 - RNA, 21 nt, RNAi
uccuguaccugcagacggauu

SEQ ID NO: 30100 - RNA, 21 nt, RNAi
uuaggacauggacgucugccu

SEQ ID NO: 30101 - DNA, 21 bp, Homo sapiens
cagcctgcagcaacactgtga

SEQ ID NO: 30102 - RNA, 21 nt, RNAi
gccugcagcaacacugugauu

SEQ ID NO: 30103 - RNA, 21 nt, RNAi
uucggacgucguugugacacu

SEQ ID NO: 30104 - DNA, 21 bp, Homo sapiens
cagcaacactgtgaagcctgg

SEQ ID NO: 30105 - RNA, 21 nt, RNAi
gcaacacugugaagccugguu

SEQ ID NO: 30106 - RNA, 21 nt, RNAi
uucguugugacacuucggacc

SEQ ID NO: 30107 - DNA, 21 bp, Homo sapiens
caccttgatgtcaagcctgcc

SEQ ID NO: 30108 - RNA, 21 nt, RNAi
ccuugaugucaagccugccuu

SEQ ID NO: 30109 - RNA, 21 nt, RNAi
uuggaacuacaguucggacgg

SEQ ID NO: 30110 - DNA, 21 bp, Homo sapiens
caagcctgccaacatcttcct

SEQ ID NO: 30111 - RNA, 21 nt, RNAi
agccugccaacaucuuccuuu

SEQ ID NO: 30112 - RNA, 21 nt, RNAi
uuucggacgguuguagaagga

SEQ ID NO: 30113 - DNA, 21 bp, Homo sapiens
cagcagcggatgtgttcagtc

SEQ ID NO: 30114 - RNA, 21 nt, RNAi
gcagcggauguguucagucuu

SEQ ID NO: 30115 - RNA, 21 nt, RNAi
uucgucgccuacacaagucag

SEQ ID NO: 30116 - DNA, 21 bp, Homo sapiens
cagcggatgtgttcagtctgg

SEQ ID NO: 30117 - RNA, 21 nt, RNAi
gcggauguguucagucugguu

SEQ ID NO: 30118 - RNA, 21 nt, RNAi
uucgccuacacaagucagacc

SEQ ID NO: 30119 - DNA, 21 bp, Homo sapiens
caccatcctggaagtggcatg

SEQ ID NO: 30120 - RNA, 21 nt, RNAi
ccauccuggaaguggcauguu

SEQ ID NO: 30121 - RNA, 21 nt, RNAi
uugguaggaccuucaccguac

SEQ ID NO: 30122 - DNA, 21 bp, Homo sapiens
catcctggaagtggcatgcaa

SEQ ID NO: 30123 - RNA, 21 nt, RNAi
uccuggaaguggcaugcaauu

SEQ ID NO: 30124 - RNA, 21 nt, RNAi
uuaggaccuucaccguacguu

SEQ ID NO: 30125 - DNA, 21 bp, Homo sapiens
cactgccggtctgtcttccga

SEQ ID NO: 30126 - RNA, 21 nt, RNAi
cugccggucugucuuccgauu

SEQ ID NO: 30127 - RNA, 21 nt, RNAi
uugacggccagacagaaggcu

SEQ ID NO: 30128 - DNA, 21 bp, Homo sapiens
cactgcctgtgttgaggcagc

SEQ ID NO: 30129 - RNA, 21 nt, RNAi
cugccuguguugaggcagcuu

SEQ ID NO: 30130 - RNA, 21 nt, RNAi
uugacggacacaacuccgucg

SEQ ID NO: 30131 - DNA, 21 bp, Homo sapiens
cagtttgctcctggacagcag

SEQ ID NO: 30132 - RNA, 21 nt, RNAi
guuugcuccuggacagcaguu

SEQ ID NO: 30133 - RNA, 21 nt, RNAi
uucaaacgaggaccugucguc

SEQ ID NO: 30134 - DNA, 21 bp, Homo sapiens
cagcagcttctccagcaactg

SEQ ID NO: 30135 - RNA, 21 nt, RNAi
gcagcuucuccagcaacuguu

SEQ ID NO: 30136 - RNA, 21 nt, RNAi
uucgucgaagaggucguugac

SEQ ID NO: 30137 - DNA, 21 bp, Homo sapiens
catcaactcagagcctcctcg

SEQ ID NO: 30138 - RNA, 21 nt, RNAi
ucaacucagagccuccucguu

SEQ ID NO: 30139 - RNA, 21 nt, RNAi
uuaguugagucucggaggagc

SEQ ID NO: 30140 - DNA, 21 bp, Homo sapiens
cagattctgcctctgcacttt

SEQ ID NO: 30141 - RNA, 21 nt, RNAi
gauucugccucugcacuuuuu

SEQ ID NO: 30142 - RNA, 21 nt, RNAi
uucuaagacggagacgugaaa

SEQ ID NO: 30143 - DNA, 21 bp, Homo sapiens
catggtcttctctgcctggcc

SEQ ID NO: 30144 - RNA, 21 nt, RNAi
uggucuucucugccuggccuu

SEQ ID NO: 30145 - RNA, 21 nt, RNAi
uuaccagaagagacggaccgg

SEQ ID NO: 30146 - DNA, 21 bp, Homo sapiens
gaggaacttaccgtctaccgg

SEQ ID NO: 30147 - RNA, 21 nt, RNAi
ggaacuuaccgucuaccgguu

SEQ ID NO: 30148 - RNA, 21 nt, RNAi
uuccuugaauggcagauggcc

SEQ ID NO: 30149 - DNA, 21 bp, Homo sapiens
gaaaggtggccagcagatgtg

SEQ ID NO: 30150 - RNA, 21 nt, RNAi
aagguggccagcagauguguu

SEQ ID NO: 30151 - RNA, 21 nt, RNAi
uuuuccaccggucgucuacac

SEQ ID NO: 30152 - DNA, 21 bp, Homo sapiens
gaggcctcagagactctgcag

SEQ ID NO: 30153 - RNA, 21 nt, RNAi
ggccucagagacucugcaguu

SEQ ID NO: 30154 - RNA, 21 nt, RNAi
uuccggagucucugagacguc

SEQ ID NO: 30155 - DNA, 21 bp, Homo sapiens
gagtccttcttccagcagagc

SEQ ID NO: 30156 - RNA, 21 nt, RNAi
guccuucuuccagcagagcuu

SEQ ID NO: 30157 - RNA, 21 nt, RNAi
uucaggaagaaggucgucucg

SEQ ID NO: 30158 - DNA, 21 bp, Homo sapiens
gagaggtcttcaaggtgcgct

SEQ ID NO: 30159 - RNA, 21 nt, RNAi
gaggucuucaaggugcgcuuu

SEQ ID NO: 30160 - RNA, 21 nt, RNAi
uucuccagaaguuccacgcga

SEQ ID NO: 30161 - DNA, 21 bp, Homo sapiens
gaggtcttcaaggtgcgctcc

SEQ ID NO: 30162 - RNA, 21 nt, RNAi
ggucuucaaggugcgcuccuu

SEQ ID NO: 30163 - RNA, 21 nt, RNAi
uuccagaaguuccacgcgagg

SEQ ID NO: 30164 - DNA, 21 bp, Homo sapiens
gatgtcaagcctgccaacatc

SEQ ID NO: 30165 - RNA, 21 nt, RNAi
ugucaagccugccaacaucuu

SEQ ID NO: 30166 - RNA, 21 nt, RNAi
uuacaguucggacgguuguag

SEQ ID NO: 30167 - DNA, 21 bp, Homo sapiens
gacttcggactgctggtggag

SEQ ID NO: 30168 - RNA, 21 nt, RNAi
cuucggacugcugguggaguu

SEQ ID NO: 30169 - RNA, 21 nt, RNAi
uugaagccugacgaccaccuc

SEQ ID NO: 30170 - DNA, 21 bp, Homo sapiens
gacagcagcggatgtgttcag

SEQ ID NO: 30171 - RNA, 21 nt, RNAi
cagcagcggauguguucaguu

SEQ ID NO: 30172 - RNA, 21 nt, RNAi
uugucgucgccuacacaaguc

SEQ ID NO: 30173 - DNA, 21 bp, Homo sapiens
gaagtggcatgcaacatggag

SEQ ID NO: 30174 - RNA, 21 nt, RNAi
aguggcaugcaacauggaguu

SEQ ID NO: 30175 - RNA, 21 nt, RNAi
uuucaccguacguuguaccuc

SEQ ID NO: 30176 - DNA, 21 bp, Homo sapiens
gagttcactgccggtctgtct

SEQ ID NO: 30177 - RNA, 21 nt, RNAi
guucacugccggucugucuuu

SEQ ID NO: 30178 - RNA, 21 nt, RNAi
uucaagugacggccagacaga

SEQ ID NO: 30179 - DNA, 21 bp, Homo sapiens
gagctgcgttctgtccttgtc

SEQ ID NO: 30180 - RNA, 21 nt, RNAi
gcugcguucuguccuugucuu

SEQ ID NO: 30181 - RNA, 21 nt, RNAi
uucgacgcaagacaggaacag

SEQ ID NO: 30182 - DNA, 21 bp, Homo sapiens
gacagcagcttctccagcaac

SEQ ID NO: 30183 - RNA, 21 nt, RNAi
cagcagcuucuccagcaacuu

SEQ ID NO: 30184 - RNA, 21 nt, RNAi
uugucgucgaagaggucguug

SEQ ID NO: 30185 - DNA, 21 bp, Homo sapiens
gacctaagtgacatcaactca

SEQ ID NO: 30186 - RNA, 21 nt, RNAi
ccuaagugacaucaacucauu

SEQ ID NO: 30187 - RNA, 21 nt, RNAi
uuggauucacuguaguugagu

SEQ ID NO: 30188 - DNA, 21 bp, Homo sapiens
gacatcaactcagagcctcct

SEQ ID NO: 30189 - RNA, 21 nt, RNAi
caucaacucagagccuccuuu

SEQ ID NO: 30190 - RNA, 21 nt, RNAi
uuguaguugagucucggagga

SEQ ID NO: 30191 - DNA, 21 bp, Homo sapiens
gaacctcctcagcatgtttga

SEQ ID NO: 30192 - RNA, 21 nt, RNAi
accuccucagcauguuugauu

SEQ ID NO: 30193 - RNA, 21 nt, RNAi
uuuggaggagucguacaaacu

SEQ ID NO: 30194 - DNA, 21 bp, Homo sapiens
tagaacggcctcctgcactgg

SEQ ID NO: 30195 - RNA, 21 nt, RNAi
gaacggccuccugcacugguu

SEQ ID NO: 30196 - RNA, 21 nt, RNAi
uucuugccggaggacgugacc

SEQ ID NO: 30197 - DNA, 21 bp, Homo sapiens
tacttccgccacgcagaacct

SEQ ID NO: 30198 - RNA, 21 nt, RNAi
cuuccgccacgcagaaccuuu

SEQ ID NO: 30199 - RNA, 21 nt, RNAi
uugaaggcggugcgucuugga

SEQ ID NO: 30200 - DNA, 21 bp, Homo sapiens
tacggagaggtcttcaaggtg

SEQ ID NO: 30201 - RNA, 21 nt, RNAi
cggagaggucuucaagguguu

SEQ ID NO: 30202 - RNA, 21 nt, RNAi
uugccucuccagaaguuccac

SEQ ID NO: 30203 - DNA, 21 bp, Homo sapiens
tatgcggtaaagcgttccatg

SEQ ID NO: 30204 - RNA, 21 nt, RNAi
ugcgguaaagcguuccauguu

SEQ ID NO: 30205 - RNA, 21 nt, RNAi
uuacgccauuucgcaagguac

SEQ ID NO: 30206 - DNA, 21 bp, Homo sapiens
taaagcgttccatgtcaccat

SEQ ID NO: 30207 - RNA, 21 nt, RNAi
aagcguuccaugucaccauuu

SEQ ID NO: 30208 - RNA, 21 nt, RNAi
uuuucgcaagguacaguggua

SEQ ID NO: 30209 - DNA, 21 bp, Homo sapiens
tacctgcagacggagctgtgc

SEQ ID NO: 30210 - RNA, 21 nt, RNAi
ccugcagacggagcugugcuu

SEQ ID NO: 30211 - RNA, 21 nt, RNAi
uuggacgucugccucgacacg

SEQ ID NO: 30212 - DNA, 21 bp, Homo sapiens
tacagcaggagctggtgaggt

SEQ ID NO: 30213 - RNA, 21 nt, RNAi
cagcaggagcuggugagguuu

SEQ ID NO: 30214 - RNA, 21 nt, RNAi
uugucguccucgaccacucca

SEQ ID NO: 30215 - DNA, 21 bp, Homo sapiens
taagtgacatcaactcagagc

SEQ ID NO: 30216 - RNA, 21 nt, RNAi
agugacaucaacucagagcuu

SEQ ID NO: 30217 - RNA, 21 nt, RNAi
uuucacuguaguugagucucg

SEQ ID NO: 30218 - DNA, 21 bp, Homo sapiens
aagtgcttcgagatctcggac

SEQ ID NO: 30219 - RNA, 21 nt, RNAi
gugcuucgagaucucggacuu

SEQ ID NO: 30220 - RNA, 21 nt, RNAi
uucacgaagcucuagagccug

SEQ ID NO: 30221 - DNA, 21 bp, Homo sapiens
aagattgtgcctaagtctctg

SEQ ID NO: 30222 - RNA, 21 nt, RNAi
gauugugccuaagucucuguu

SEQ ID NO: 30223 - RNA, 21 nt, RNAi
uucuaacacggauucagagac

SEQ ID NO: 30224 - DNA, 21 bp, Homo sapiens
aagtctctgctgctcaagccg

SEQ ID NO: 30225 - RNA, 21 nt, RNAi
gucucugcugcucaagccguu

SEQ ID NO: 30226 - RNA, 21 nt, RNAi
uucagagacgacgaguucggc

SEQ ID NO: 30227 - DNA, 21 bp, Homo sapiens
aagatgtccatggaaatatcc

SEQ ID NO: 30228 - RNA, 21 nt, RNAi
gauguccauggaaauauccuu

SEQ ID NO: 30229 - RNA, 21 nt, RNAi
uucuacagguaccuuuauagg

SEQ ID NO: 30230 - DNA, 21 bp, Homo sapiens
aaatatccattcaccgcagcc

SEQ ID NO: 30231 - RNA, 21 nt, RNAi
auauccauucaccgcagccuu

SEQ ID NO: 30232 - RNA, 21 nt, RNAi
uuuauagguaaguggcgucgg

SEQ ID NO: 30233 - DNA, 21 bp, Homo sapiens
aatatccattcaccgcagcct

SEQ ID NO: 30234 - RNA, 21 nt, RNAi
uauccauucaccgcagccuuu

SEQ ID NO: 30235 - RNA, 21 nt, RNAi
uuauagguaaguggcgucgga

SEQ ID NO: 30236 - DNA, 21 bp, Homo sapiens
aacgacttcgtgttcgtggtg

SEQ ID NO: 30237 - RNA, 21 nt, RNAi
cgacuucguguucgugguguu

SEQ ID NO: 30238 - RNA, 21 nt, RNAi
uugcugaagcacaagcaccac

SEQ ID NO: 30239 - DNA, 21 bp, Homo sapiens
aaattgtgcttggctgccagt

SEQ ID NO: 30240 - RNA, 21 nt, RNAi
auugugcuuggcugccaguuu

SEQ ID NO: 30241 - RNA, 21 nt, RNAi
uuuaacacgaaccgacgguca

SEQ ID NO: 30242 - DNA, 21 bp, Homo sapiens
aattgtgcttggctgccagta

SEQ ID NO: 30243 - RNA, 21 nt, RNAi
uugugcuuggcugccaguauu

SEQ ID NO: 30244 - RNA, 21 nt, RNAi
uuaacacgaaccgacggucau

SEQ ID NO: 30245 - DNA, 21 bp, Homo sapiens
aaaccgagttattcatcgaga

SEQ ID NO: 30246 - RNA, 21 nt, RNAi
accgaguuauucaucgagauu

SEQ ID NO: 30247 - RNA, 21 nt, RNAi
uuuggcucaauaaguagcucu

SEQ ID NO: 30248 - DNA, 21 bp, Homo sapiens
aaccgagttattcatcgagac

SEQ ID NO: 30249 - RNA, 21 nt, RNAi
ccgaguuauucaucgagacuu

SEQ ID NO: 30250 - RNA, 21 nt, RNAi
uuggcucaauaaguagcucug

SEQ ID NO: 30251 - DNA, 21 bp, Homo sapiens
aatgaagatctggaggtgaaa

SEQ ID NO: 30252 - RNA, 21 nt, RNAi
ugaagaucuggaggugaaauu

SEQ ID NO: 30253 - RNA, 21 nt, RNAi
uuacuucuagaccuccacuuu

SEQ ID NO: 30254 - DNA, 21 bp, Homo sapiens
aaccaaagtcgaatatgacgg

SEQ ID NO: 30255 - RNA, 21 nt, RNAi
ccaaagucgaauaugacgguu

SEQ ID NO: 30256 - RNA, 21 nt, RNAi
uugguuucagcuuauacugcc

SEQ ID NO: 30257 - DNA, 21 bp, Homo sapiens
aaagagacctacctccggatc

SEQ ID NO: 30258 - RNA, 21 nt, RNAi
agagaccuaccuccggaucuu

SEQ ID NO: 30259 - RNA, 21 nt, RNAi
uuucucuggauggaggccuag

SEQ ID NO: 30260 - DNA, 21 bp, Homo sapiens
aagagacctacctccggatca

SEQ ID NO: 30261 - RNA, 21 nt, RNAi
gagaccuaccuccggaucauu

SEQ ID NO: 30262 - RNA, 21 nt, RNAi
uucucuggauggaggccuagu

SEQ ID NO: 30263 - DNA, 21 bp, Homo sapiens
aaccattaacgagctgcttaa

SEQ ID NO: 30264 - RNA, 21 nt, RNAi
ccauuaacgagcugcuuaauu

SEQ ID NO: 30265 - RNA, 21 nt, RNAi
uugguaauugcucgacgaauu

SEQ ID NO: 30266 - DNA, 21 bp, Homo sapiens
aacgagctgcttaatgacgag

SEQ ID NO: 30267 - RNA, 21 nt, RNAi
cgagcugcuuaaugacgaguu

SEQ ID NO: 30268 - RNA, 21 nt, RNAi
uugcucgacgaauuacugcuc

SEQ ID NO: 30269 - DNA, 21 bp, Homo sapiens
aatgacgagttctttacttct

SEQ ID NO: 30270 - RNA, 21 nt, RNAi
ugacgaguucuuuacuucuuu

SEQ ID NO: 30271 - RNA, 21 nt, RNAi
uuacugcucaagaaaugaaga

SEQ ID NO: 30272 - DNA, 21 bp, Homo sapiens
aaagaagaaccagtggttcga

SEQ ID NO: 30273 - RNA, 21 nt, RNAi
agaagaaccagugguucgauu

SEQ ID NO: 30274 - RNA, 21 nt, RNAi
uuucuucuuggucaccaagcu

SEQ ID NO: 30275 - DNA, 21 bp, Homo sapiens
aagaagaaccagtggttcgag

SEQ ID NO: 30276 - RNA, 21 nt, RNAi
gaagaaccagugguucgaguu

SEQ ID NO: 30277 - RNA, 21 nt, RNAi
uucuucuuggucaccaagcuc

SEQ ID NO: 30278 - DNA, 21 bp, Homo sapiens
aagaaccagtggttcgagaga

SEQ ID NO: 30279 - RNA, 21 nt, RNAi
gaaccagugguucgagagauu

SEQ ID NO: 30280 - RNA, 21 nt, RNAi
uucuuggucaccaagcucucu

SEQ ID NO: 30281 - DNA, 21 bp, Homo sapiens
aaccagtggttcgagagacag

SEQ ID NO: 30282 - RNA, 21 nt, RNAi
ccagugguucgagagacaguu

SEQ ID NO: 30283 - RNA, 21 nt, RNAi
uuggucaccaagcucucuguc

SEQ ID NO: 30284 - DNA, 21 bp, Homo sapiens
aagaggaggctgaggatcctg

SEQ ID NO: 30285 - RNA, 21 nt, RNAi
gaggaggcugaggauccuguu

SEQ ID NO: 30286 - RNA, 21 nt, RNAi
uucuccuccgacuccuaggac

SEQ ID NO: 30287 - DNA, 21 bp, Homo sapiens
aatgactcaacacgcctcatc

SEQ ID NO: 30288 - RNA, 21 nt, RNAi
ugacucaacacgccucaucuu

SEQ ID NO: 30289 - RNA, 21 nt, RNAi
uuacugaguugugcggaguag

SEQ ID NO: 30290 - DNA, 21 bp, Homo sapiens
aacacgcctcatcctctacaa

SEQ ID NO: 30291 - RNA, 21 nt, RNAi
cacgccucauccucuacaauu

SEQ ID NO: 30292 - RNA, 21 nt, RNAi
uugugcggaguaggagauguu

SEQ ID NO: 30293 - DNA, 21 bp, Homo sapiens
aatgatggtgacagcctgcag

SEQ ID NO: 30294 - RNA, 21 nt, RNAi
ugauggugacagccugcaguu

SEQ ID NO: 30295 - RNA, 21 nt, RNAi
uuacuaccacugucggacguc

SEQ ID NO: 30296 - DNA, 21 bp, Homo sapiens
aactccttgatgaagaagatc

SEQ ID NO: 30297 - RNA, 21 nt, RNAi
cuccuugaugaagaagaucuu

SEQ ID NO: 30298 - RNA, 21 nt, RNAi
uugaggaacuacuucuucuag

SEQ ID NO: 30299 - DNA, 21 bp, Homo sapiens
aattacatgagcgagcacttg

SEQ ID NO: 30300 - RNA, 21 nt, RNAi
uuacaugagcgagcacuuguu

SEQ ID NO: 30301 - RNA, 21 nt, RNAi
uuaauguacucgcucgugaac

SEQ ID NO: 30302 - DNA, 21 bp, Homo sapiens
aaggcaggtgccaacatcacg

SEQ ID NO: 30303 - RNA, 21 nt, RNAi
ggcaggugccaacaucacguu

SEQ ID NO: 30304 - RNA, 21 nt, RNAi
uuccguccacgguuguagugc

SEQ ID NO: 30305 - DNA, 21 bp, Homo sapiens
aacggcagcgtgcagatcaac

SEQ ID NO: 30306 - RNA, 21 nt, RNAi
cggcagcgugcagaucaacuu

SEQ ID NO: 30307 - RNA, 21 nt, RNAi
uugccgucgcacgucuaguug

SEQ ID NO: 30308 - DNA, 21 bp, Homo sapiens
aacttcttccaggatcacacc

SEQ ID NO: 30309 - RNA, 21 nt, RNAi
cuucuuccaggaucacaccuu

SEQ ID NO: 30310 - RNA, 21 nt, RNAi
uugaagaagguccuagugugg

SEQ ID NO: 30311 - DNA, 21 bp, Homo sapiens
aagctgctgagctcacgctcg

SEQ ID NO: 30312 - RNA, 21 nt, RNAi
gcugcugagcucacgcucguu

SEQ ID NO: 30313 - RNA, 21 nt, RNAi
uucgacgacucgagugcgagc

SEQ ID NO: 30314 - DNA, 21 bp, Homo sapiens
aaccgtctcaaggcctcctaa

SEQ ID NO: 30315 - RNA, 21 nt, RNAi
ccgucucaaggccuccuaauu

SEQ ID NO: 30316 - RNA, 21 nt, RNAi
uuggcagaguuccggaggauu

SEQ ID NO: 30317 - DNA, 21 bp, Homo sapiens
aattcggaactgtcctttcct

SEQ ID NO: 30318 - RNA, 21 nt, RNAi
uucggaacuguccuuuccuuu

SEQ ID NO: 30319 - RNA, 21 nt, RNAi
uuaagccuugacaggaaagga

SEQ ID NO: 30320 - DNA, 21 bp, Homo sapiens
aactgtcctttccttggcttt

SEQ ID NO: 30321 - RNA, 21 nt, RNAi
cuguccuuuccuuggcuuuuu

SEQ ID NO: 30322 - RNA, 21 nt, RNAi
uugacaggaaaggaaccgaaa

SEQ ID NO: 30323 - DNA, 21 bp, Homo sapiens
catgagtgctgcagtgactgc

SEQ ID NO: 30324 - RNA, 21 nt, RNAi
ugagugcugcagugacugcuu

SEQ ID NO: 30325 - RNA, 21 nt, RNAi
uuacucacgacgucacugacg

SEQ ID NO: 30326 - DNA, 21 bp, Homo sapiens
caagtgcttcgagatctcgga

SEQ ID NO: 30327 - RNA, 21 nt, RNAi
agugcuucgagaucucggauu

SEQ ID NO: 30328 - RNA, 21 nt, RNAi
uuucacgaagcucuagagccu

SEQ ID NO: 30329 - DNA, 21 bp, Homo sapiens
caagattgtgcctaagtctct

SEQ ID NO: 30330 - RNA, 21 nt, RNAi
agauugugccuaagucucuuu

SEQ ID NO: 30331 - RNA, 21 nt, RNAi
uuucuaacacggauucagaga

SEQ ID NO: 30332 - DNA, 21 bp, Homo sapiens
catggaaatatccattcaccg

SEQ ID NO: 30333 - RNA, 21 nt, RNAi
uggaaauauccauucaccguu

SEQ ID NO: 30334 - RNA, 21 nt, RNAi
uuaccuuuauagguaaguggc

SEQ ID NO: 30335 - DNA, 21 bp, Homo sapiens
caccagcacgtcgtaggattc

SEQ ID NO: 30336 - RNA, 21 nt, RNAi
ccagcacgucguaggauucuu

SEQ ID NO: 30337 - RNA, 21 nt, RNAi
uuggucgugcagcauccuaag

SEQ ID NO: 30338 - DNA, 21 bp, Homo sapiens
cagcacgtcgtaggattccac

SEQ ID NO: 30339 - RNA, 21 nt, RNAi
gcacgucguaggauuccacuu

SEQ ID NO: 30340 - RNA, 21 nt, RNAi
uucgugcagcauccuaaggug

SEQ ID NO: 30341 - DNA, 21 bp, Homo sapiens
cacgtcgtaggattccacggc

SEQ ID NO: 30342 - RNA, 21 nt, RNAi
cgucguaggauuccacggcuu

SEQ ID NO: 30343 - RNA, 21 nt, RNAi
uugcagcauccuaaggugccg

SEQ ID NO: 30344 - DNA, 21 bp, Homo sapiens
caacgacttcgtgttcgtggt

SEQ ID NO: 30345 - RNA, 21 nt, RNAi
acgacuucguguucgugguuu

SEQ ID NO: 30346 - RNA, 21 nt, RNAi
uuugcugaagcacaagcacca

SEQ ID NO: 30347 - DNA, 21 bp, Homo sapiens
caaattgtgcttggctgccag

SEQ ID NO: 30348 - RNA, 21 nt, RNAi
aauugugcuuggcugccaguu

SEQ ID NO: 30349 - RNA, 21 nt, RNAi
uuuuaacacgaaccgacgguc

SEQ ID NO: 30350 - DNA, 21 bp, Homo sapiens
cagtacctgcaccgaaaccga

SEQ ID NO: 30351 - RNA, 21 nt, RNAi
guaccugcaccgaaaccgauu

SEQ ID NO: 30352 - RNA, 21 nt, RNAi
uucauggacguggcuuuggcu

SEQ ID NO: 30353 - DNA, 21 bp, Homo sapiens
caccgaaaccgagttattcat

SEQ ID NO: 30354 - RNA, 21 nt, RNAi
ccgaaaccgaguuauucauuu

SEQ ID NO: 30355 - RNA, 21 nt, RNAi
uuggcuuuggcucaauaagua

SEQ ID NO: 30356 - DNA, 21 bp, Homo sapiens
caaccaaagtcgaatatgacg

SEQ ID NO: 30357 - RNA, 21 nt, RNAi
accaaagucgaauaugacguu

SEQ ID NO: 30358 - RNA, 21 nt, RNAi
uuugguuucagcuuauacugc

SEQ ID NO: 30359 - DNA, 21 bp, Homo sapiens
cacagtttcgaggtggatgtg

SEQ ID NO: 30360 - RNA, 21 nt, RNAi
caguuucgagguggauguguu

SEQ ID NO: 30361 - RNA, 21 nt, RNAi
uugucaaagcuccaccuacac

SEQ ID NO: 30362 - DNA, 21 bp, Homo sapiens
cagtttcgaggtggatgtgtg

SEQ ID NO: 30363 - RNA, 21 nt, RNAi
guuucgagguggauguguguu

SEQ ID NO: 30364 - RNA, 21 nt, RNAi
uucaaagcuccaccuacacac

SEQ ID NO: 30365 - DNA, 21 bp, Homo sapiens
catccagaagatgcttcagac

SEQ ID NO: 30366 - RNA, 21 nt, RNAi
uccagaagaugcuucagacuu

SEQ ID NO: 30367 - RNA, 21 nt, RNAi
uuaggucuucuacgaagucug

SEQ ID NO: 30368 - DNA, 21 bp, Homo sapiens
cagaagatgcttcagacagat

SEQ ID NO: 30369 - RNA, 21 nt, RNAi
gaagaugcuucagacagauuu

SEQ ID NO: 30370 - RNA, 21 nt, RNAi
uucuucuacgaagucugucua

SEQ ID NO: 30371 - DNA, 21 bp, Homo sapiens
caaccattaacgagctgctta

SEQ ID NO: 30372 - RNA, 21 nt, RNAi
accauuaacgagcugcuuauu

SEQ ID NO: 30373 - RNA, 21 nt, RNAi
uuugguaauugcucgacgaau

SEQ ID NO: 30374 - DNA, 21 bp, Homo sapiens
cattaacgagctgcttaatga

SEQ ID NO: 30375 - RNA, 21 nt, RNAi
uuaacgagcugcuuaaugauu

SEQ ID NO: 30376 - RNA, 21 nt, RNAi
uuaauugcucgacgaauuacu

SEQ ID NO: 30377 - DNA, 21 bp, Homo sapiens
catcacctgcctgaccattcc

SEQ ID NO: 30378 - RNA, 21 nt, RNAi
ucaccugccugaccauuccuu

SEQ ID NO: 30379 - RNA, 21 nt, RNAi
uuaguggacggacugguaagg

SEQ ID NO: 30380 - DNA, 21 bp, Homo sapiens
cacctgcctgaccattccacc

SEQ ID NO: 30381 - RNA, 21 nt, RNAi
ccugccugaccauuccaccuu

SEQ ID NO: 30382 - RNA, 21 nt, RNAi
uuggacggacugguaaggugg

SEQ ID NO: 30383 - DNA, 21 bp, Homo sapiens
cacagtcctcaataaaggctt

SEQ ID NO: 30384 - RNA, 21 nt, RNAi
caguccucaauaaaggcuuuu

SEQ ID NO: 30385 - RNA, 21 nt, RNAi
uugucaggaguuauuuccgaa

SEQ ID NO: 30386 - DNA, 21 bp, Homo sapiens
cagtcctcaataaaggcttgg

SEQ ID NO: 30387 - RNA, 21 nt, RNAi
guccucaauaaaggcuugguu

SEQ ID NO: 30388 - RNA, 21 nt, RNAi
uucaggaguuauuuccgaacc

SEQ ID NO: 30389 - DNA, 21 bp, Homo sapiens
cagtggttcgagagacaggtg

SEQ ID NO: 30390 - RNA, 21 nt, RNAi
gugguucgagagacagguguu

SEQ ID NO: 30391 - RNA, 21 nt, RNAi
uucaccaagcucucuguccac

SEQ ID NO: 30392 - DNA, 21 bp, Homo sapiens
cacctcagtgacatgctgcag

SEQ ID NO: 30393 - RNA, 21 nt, RNAi
ccucagugacaugcugcaguu

SEQ ID NO: 30394 - RNA, 21 nt, RNAi
uuggagucacuguacgacguc

SEQ ID NO: 30395 - DNA, 21 bp, Homo sapiens
cagtgacatgctgcagcagct

SEQ ID NO: 30396 - RNA, 21 nt, RNAi
gugacaugcugcagcagcuuu

SEQ ID NO: 30397 - RNA, 21 nt, RNAi
uucacuguacgacgucgucga

SEQ ID NO: 30398 - DNA, 21 bp, Homo sapiens
catgctgcagcagctgcacag

SEQ ID NO: 30399 - RNA, 21 nt, RNAi
ugcugcagcagcugcacaguu

SEQ ID NO: 30400 - RNA, 21 nt, RNAi
uuacgacgucgucgacguguc

SEQ ID NO: 30401 - DNA, 21 bp, Homo sapiens
cagcagctgcacagtgtcaat

SEQ ID NO: 30402 - RNA, 21 nt, RNAi
gcagcugcacagugucaauuu

SEQ ID NO: 30403 - RNA, 21 nt, RNAi
uucgucgacgugucacaguua

SEQ ID NO: 30404 - DNA, 21 bp, Homo sapiens
cagctgcacagtgtcaatgcc

SEQ ID NO: 30405 - RNA, 21 nt, RNAi
gcugcacagugucaaugccuu

SEQ ID NO: 30406 - RNA, 21 nt, RNAi
uucgacgugucacaguuacgg

SEQ ID NO: 30407 - DNA, 21 bp, Homo sapiens
cacagtgtcaatgcctccaag

SEQ ID NO: 30408 - RNA, 21 nt, RNAi
cagugucaaugccuccaaguu

SEQ ID NO: 30409 - RNA, 21 nt, RNAi
uugucacaguuacggagguuc

SEQ ID NO: 30410 - DNA, 21 bp, Homo sapiens
cagtgtcaatgcctccaagcc

SEQ ID NO: 30411 - RNA, 21 nt, RNAi
gugucaaugccuccaagccuu

SEQ ID NO: 30412 - RNA, 21 nt, RNAi
uucacaguuacggagguucgg

SEQ ID NO: 30413 - DNA, 21 bp, Homo sapiens
caggcaagaggaggctgagga

SEQ ID NO: 30414 - RNA, 21 nt, RNAi
ggcaagaggaggcugaggauu

SEQ ID NO: 30415 - RNA, 21 nt, RNAi
uuccguucuccuccgacuccu

SEQ ID NO: 30416 - DNA, 21 bp, Homo sapiens
caagaggaggctgaggatcct

SEQ ID NO: 30417 - RNA, 21 nt, RNAi
agaggaggcugaggauccuuu

SEQ ID NO: 30418 - RNA, 21 nt, RNAi
uuucuccuccgacuccuagga

SEQ ID NO: 30419 - DNA, 21 bp, Homo sapiens
cagctctgtgataacagcgtg

SEQ ID NO: 30420 - RNA, 21 nt, RNAi
gcucugugauaacagcguguu

SEQ ID NO: 30421 - RNA, 21 nt, RNAi
uucgagacacuauugucgcac

SEQ ID NO: 30422 - DNA, 21 bp, Homo sapiens
caatgactcaacacgcctcat

SEQ ID NO: 30423 - RNA, 21 nt, RNAi
augacucaacacgccucauuu

SEQ ID NO: 30424 - RNA, 21 nt, RNAi
uuuacugaguugugcggagua

SEQ ID NO: 30425 - DNA, 21 bp, Homo sapiens
caacacgcctcatcctctaca

SEQ ID NO: 30426 - RNA, 21 nt, RNAi
acacgccucauccucuacauu

SEQ ID NO: 30427 - RNA, 21 nt, RNAi
uuugugcggaguaggagaugu

SEQ ID NO: 30428 - DNA, 21 bp, Homo sapiens
cacgcctcatcctctacaatg

SEQ ID NO: 30429 - RNA, 21 nt, RNAi
cgccucauccucuacaauguu

SEQ ID NO: 30430 - RNA, 21 nt, RNAi
uugcggaguaggagauguuac

SEQ ID NO: 30431 - DNA, 21 bp, Homo sapiens
catcctctacaatgatggtga

SEQ ID NO: 30432 - RNA, 21 nt, RNAi
uccucuacaaugauggugauu

SEQ ID NO: 30433 - RNA, 21 nt, RNAi
uuaggagauguuacuaccacu

SEQ ID NO: 30434 - DNA, 21 bp, Homo sapiens
caatgatggtgacagcctgca

SEQ ID NO: 30435 - RNA, 21 nt, RNAi
augauggugacagccugcauu

SEQ ID NO: 30436 - RNA, 21 nt, RNAi
uuuacuaccacugucggacgu

SEQ ID NO: 30437 - DNA, 21 bp, Homo sapiens
cagcctgcagtacatagagcg

SEQ ID NO: 30438 - RNA, 21 nt, RNAi
gccugcaguacauagagcguu

SEQ ID NO: 30439 - RNA, 21 nt, RNAi
uucggacgucauguaucucgc

SEQ ID NO: 30440 - DNA, 21 bp, Homo sapiens
cagtacatagagcgtgacggc

SEQ ID NO: 30441 - RNA, 21 nt, RNAi
guacauagagcgugacggcuu

SEQ ID NO: 30442 - RNA, 21 nt, RNAi
uucauguaucucgcacugccg

SEQ ID NO: 30443 - DNA, 21 bp, Homo sapiens
catagagcgtgacggcactga

SEQ ID NO: 30444 - RNA, 21 nt, RNAi
uagagcgugacggcacugauu

SEQ ID NO: 30445 - RNA, 21 nt, RNAi
uuaucucgcacugccgugacu

SEQ ID NO: 30446 - DNA, 21 bp, Homo sapiens
cactgagtcctacctcaccgt

SEQ ID NO: 30447 - RNA, 21 nt, RNAi
cugaguccuaccucaccguuu

SEQ ID NO: 30448 - RNA, 21 nt, RNAi
uugacucaggauggaguggca

SEQ ID NO: 30449 - DNA, 21 bp, Homo sapiens
caactccttgatgaagaagat

SEQ ID NO: 30450 - RNA, 21 nt, RNAi
acuccuugaugaagaagauuu

SEQ ID NO: 30451 - RNA, 21 nt, RNAi
uuugaggaacuacuucuucua

SEQ ID NO: 30452 - DNA, 21 bp, Homo sapiens
caattacatgagcgagcactt

SEQ ID NO: 30453 - RNA, 21 nt, RNAi
auuacaugagcgagcacuuuu

SEQ ID NO: 30454 - RNA, 21 nt, RNAi
uuuaauguacucgcucgugaa

SEQ ID NO: 30455 - DNA, 21 bp, Homo sapiens
catgagcgagcacttgctgaa

SEQ ID NO: 30456 - RNA, 21 nt, RNAi
ugagcgagcacuugcugaauu

SEQ ID NO: 30457 - RNA, 21 nt, RNAi
uuacucgcucgugaacgacuu

SEQ ID NO: 30458 - DNA, 21 bp, Homo sapiens
cacttgctgaaggcaggtgcc

SEQ ID NO: 30459 - RNA, 21 nt, RNAi
cuugcugaaggcaggugccuu

SEQ ID NO: 30460 - RNA, 21 nt, RNAi
uugaacgacuuccguccacgg

SEQ ID NO: 30461 - DNA, 21 bp, Homo sapiens
cagcgccatcatcctgcacct

SEQ ID NO: 30462 - RNA, 21 nt, RNAi
gcgccaucauccugcaccuuu

SEQ ID NO: 30463 - RNA, 21 nt, RNAi
uucgcgguaguaggacgugga

SEQ ID NO: 30464 - DNA, 21 bp, Homo sapiens
catcatcctgcacctcagcaa

SEQ ID NO: 30465 - RNA, 21 nt, RNAi
ucauccugcaccucagcaauu

SEQ ID NO: 30466 - RNA, 21 nt, RNAi
uuaguaggacguggagucguu

SEQ ID NO: 30467 - DNA, 21 bp, Homo sapiens
catcctgcacctcagcaacgg

SEQ ID NO: 30468 - RNA, 21 nt, RNAi
uccugcaccucagcaacgguu

SEQ ID NO: 30469 - RNA, 21 nt, RNAi
uuaggacguggagucguugcc

SEQ ID NO: 30470 - DNA, 21 bp, Homo sapiens
cagcaacggcagcgtgcagat

SEQ ID NO: 30471 - RNA, 21 nt, RNAi
gcaacggcagcgugcagauuu

SEQ ID NO: 30472 - RNA, 21 nt, RNAi
uucguugccgucgcacgucua

SEQ ID NO: 30473 - DNA, 21 bp, Homo sapiens
caacggcagcgtgcagatcaa

SEQ ID NO: 30474 - RNA, 21 nt, RNAi
acggcagcgugcagaucaauu

SEQ ID NO: 30475 - RNA, 21 nt, RNAi
uuugccgucgcacgucuaguu

SEQ ID NO: 30476 - DNA, 21 bp, Homo sapiens
cagcgtgcagatcaacttctt

SEQ ID NO: 30477 - RNA, 21 nt, RNAi
gcgugcagaucaacuucuuuu

SEQ ID NO: 30478 - RNA, 21 nt, RNAi
uucgcacgucuaguugaagaa

SEQ ID NO: 30479 - DNA, 21 bp, Homo sapiens
cagatcaacttcttccaggat

SEQ ID NO: 30480 - RNA, 21 nt, RNAi
gaucaacuucuuccaggauuu

SEQ ID NO: 30481 - RNA, 21 nt, RNAi
uucuaguugaagaagguccua

SEQ ID NO: 30482 - DNA, 21 bp, Homo sapiens
caacttcttccaggatcacac

SEQ ID NO: 30483 - RNA, 21 nt, RNAi
acuucuuccaggaucacacuu

SEQ ID NO: 30484 - RNA, 21 nt, RNAi
uuugaagaagguccuagugug

SEQ ID NO: 30485 - DNA, 21 bp, Homo sapiens
caggatcacaccaagctcatc

SEQ ID NO: 30486 - RNA, 21 nt, RNAi
ggaucacaccaagcucaucuu

SEQ ID NO: 30487 - RNA, 21 nt, RNAi
uuccuagugugguucgaguag

SEQ ID NO: 30488 - DNA, 21 bp, Homo sapiens
cacaccaagctcatcttgtgc

SEQ ID NO: 30489 - RNA, 21 nt, RNAi
caccaagcucaucuugugcuu

SEQ ID NO: 30490 - RNA, 21 nt, RNAi
uugugguucgaguagaacacg

SEQ ID NO: 30491 - DNA, 21 bp, Homo sapiens
cactgatggcagccgtgacct

SEQ ID NO: 30492 - RNA, 21 nt, RNAi
cugauggcagccgugaccuuu

SEQ ID NO: 30493 - RNA, 21 nt, RNAi
uugacuaccgucggcacugga

SEQ ID NO: 30494 - DNA, 21 bp, Homo sapiens
cagccgtgacctacatcgacg

SEQ ID NO: 30495 - RNA, 21 nt, RNAi
gccgugaccuacaucgacguu

SEQ ID NO: 30496 - RNA, 21 nt, RNAi
uucggcacuggauguagcugc

SEQ ID NO: 30497 - DNA, 21 bp, Homo sapiens
cacataccgcctgagtctcct

SEQ ID NO: 30498 - RNA, 21 nt, RNAi
cauaccgccugagucuccuuu

SEQ ID NO: 30499 - RNA, 21 nt, RNAi
uuguauggcggacucagagga

SEQ ID NO: 30500 - DNA, 21 bp, Homo sapiens
cataccgcctgagtctcctgg

SEQ ID NO: 30501 - RNA, 21 nt, RNAi
uaccgccugagucuccugguu

SEQ ID NO: 30502 - RNA, 21 nt, RNAi
uuauggcggacucagaggacc

SEQ ID NO: 30503 - DNA, 21 bp, Homo sapiens
cactatggtggacaagctgct

SEQ ID NO: 30504 - RNA, 21 nt, RNAi
cuaugguggacaagcugcuuu

SEQ ID NO: 30505 - RNA, 21 nt, RNAi
uugauaccaccuguucgacga

SEQ ID NO: 30506 - DNA, 21 bp, Homo sapiens
caagctgctgagctcacgctc

SEQ ID NO: 30507 - RNA, 21 nt, RNAi
agcugcugagcucacgcucuu

SEQ ID NO: 30508 - RNA, 21 nt, RNAi
uuucgacgacucgagugcgag

SEQ ID NO: 30509 - DNA, 21 bp, Homo sapiens
cagcaaccgtctcaaggcctc

SEQ ID NO: 30510 - RNA, 21 nt, RNAi
gcaaccgucucaaggccucuu

SEQ ID NO: 30511 - RNA, 21 nt, RNAi
uucguuggcagaguuccggag

SEQ ID NO: 30512 - DNA, 21 bp, Homo sapiens
caaccgtctcaaggcctccta

SEQ ID NO: 30513 - RNA, 21 nt, RNAi
accgucucaaggccuccuauu

SEQ ID NO: 30514 - RNA, 21 nt, RNAi
uuuggcagaguuccggaggau

SEQ ID NO: 30515 - DNA, 21 bp, Homo sapiens
caaggcctcctaatagctgcc

SEQ ID NO: 30516 - RNA, 21 nt, RNAi
aggccuccuaauagcugccuu

SEQ ID NO: 30517 - RNA, 21 nt, RNAi
uuuccggaggauuaucgacgg

SEQ ID NO: 30518 - DNA, 21 bp, Homo sapiens
cagagctgcatcatccttgca

SEQ ID NO: 30519 - RNA, 21 nt, RNAi
gagcugcaucauccuugcauu

SEQ ID NO: 30520 - RNA, 21 nt, RNAi
uucucgacguaguaggaacgu

SEQ ID NO: 30521 - DNA, 21 bp, Homo sapiens
caccatatgaattgtacagaa

SEQ ID NO: 30522 - RNA, 21 nt, RNAi
ccauaugaauuguacagaauu

SEQ ID NO: 30523 - RNA, 21 nt, RNAi
uugguauacuuaacaugucuu

SEQ ID NO: 30524 - DNA, 21 bp, Homo sapiens
gagcatgagtgctgcagtgac

SEQ ID NO: 30525 - RNA, 21 nt, RNAi
gcaugagugcugcagugacuu

SEQ ID NO: 30526 - RNA, 21 nt, RNAi
uucguacucacgacgucacug

SEQ ID NO: 30527 - DNA, 21 bp, Homo sapiens
gagtgctgcagtgactgcagg

SEQ ID NO: 30528 - RNA, 21 nt, RNAi
gugcugcagugacugcagguu

SEQ ID NO: 30529 - RNA, 21 nt, RNAi
uucacgacgucacugacgucc

SEQ ID NO: 30530 - DNA, 21 bp, Homo sapiens
gatctcggacgcggacaccaa

SEQ ID NO: 30531 - RNA, 21 nt, RNAi
ucucggacgcggacaccaauu

SEQ ID NO: 30532 - RNA, 21 nt, RNAi
uuagagccugcgccugugguu

SEQ ID NO: 30533 - DNA, 21 bp, Homo sapiens
gacaccaaggaggtgttcgcg

SEQ ID NO: 30534 - RNA, 21 nt, RNAi
caccaaggagguguucgcguu

SEQ ID NO: 30535 - RNA, 21 nt, RNAi
uugugguuccuccacaagcgc

SEQ ID NO: 30536 - DNA, 21 bp, Homo sapiens
gattgtgcctaagtctctgct

SEQ ID NO: 30537 - RNA, 21 nt, RNAi
uugugccuaagucucugcuuu

SEQ ID NO: 30538 - RNA, 21 nt, RNAi
uuaacacggauucagagacga

SEQ ID NO: 30539 - DNA, 21 bp, Homo sapiens
gagaagatgtccatggaaata

SEQ ID NO: 30540 - RNA, 21 nt, RNAi
gaagauguccauggaaauauu

SEQ ID NO: 30541 - RNA, 21 nt, RNAi
uucuucuacagguaccuuuau

SEQ ID NO: 30542 - DNA, 21 bp, Homo sapiens
gaagatgtccatggaaatatc

SEQ ID NO: 30543 - RNA, 21 nt, RNAi
agauguccauggaaauaucuu

SEQ ID NO: 30544 - RNA, 21 nt, RNAi
uuucuacagguaccuuuauag

SEQ ID NO: 30545 - DNA, 21 bp, Homo sapiens
gatgtccatggaaatatccat

SEQ ID NO: 30546 - RNA, 21 nt, RNAi
uguccauggaaauauccauuu

SEQ ID NO: 30547 - RNA, 21 nt, RNAi
uuacagguaccuuuauaggua

SEQ ID NO: 30548 - DNA, 21 bp, Homo sapiens
gaaatatccattcaccgcagc

SEQ ID NO: 30549 - RNA, 21 nt, RNAi
aauauccauucaccgcagcuu

SEQ ID NO: 30550 - RNA, 21 nt, RNAi
uuuuauagguaaguggcgucg

SEQ ID NO: 30551 - DNA, 21 bp, Homo sapiens
gaggacaacgacttcgtgttc

SEQ ID NO: 30552 - RNA, 21 nt, RNAi
ggacaacgacuucguguucuu

SEQ ID NO: 30553 - RNA, 21 nt, RNAi
uuccuguugcugaagcacaag

SEQ ID NO: 30554 - DNA, 21 bp, Homo sapiens
gacaacgacttcgtgttcgtg

SEQ ID NO: 30555 - RNA, 21 nt, RNAi
caacgacuucguguucguguu

SEQ ID NO: 30556 - RNA, 21 nt, RNAi
uuguugcugaagcacaagcac

SEQ ID NO: 30557 - DNA, 21 bp, Homo sapiens
gacttcgtgttcgtggtgttg

SEQ ID NO: 30558 - RNA, 21 nt, RNAi
cuucguguucgugguguuguu

SEQ ID NO: 30559 - RNA, 21 nt, RNAi
uugaagcacaagcaccacaac

SEQ ID NO: 30560 - DNA, 21 bp, Homo sapiens
gaggtctctcctggagctgca

SEQ ID NO: 30561 - RNA, 21 nt, RNAi
ggucucuccuggagcugcauu

SEQ ID NO: 30562 - RNA, 21 nt, RNAi
uuccagagaggaccucgacgu

SEQ ID NO: 30563 - DNA, 21 bp, Homo sapiens
gagctgcacaagaggaggaaa

SEQ ID NO: 30564 - RNA, 21 nt, RNAi
gcugcacaagaggaggaaauu

SEQ ID NO: 30565 - RNA, 21 nt, RNAi
uucgacguguucuccuccuuu

SEQ ID NO: 30566 - DNA, 21 bp, Homo sapiens
gatactacctacggcaaattg

SEQ ID NO: 30567 - RNA, 21 nt, RNAi
uacuaccuacggcaaauuguu

SEQ ID NO: 30568 - RNA, 21 nt, RNAi
uuaugauggaugccguuuaac

SEQ ID NO: 30569 - DNA, 21 bp, Homo sapiens
gaaaccgagttattcatcgag

SEQ ID NO: 30570 - RNA, 21 nt, RNAi
aaccgaguuauucaucgaguu

SEQ ID NO: 30571 - RNA, 21 nt, RNAi
uuuuggcucaauaaguagcuc

SEQ ID NO: 30572 - DNA, 21 bp, Homo sapiens
gagttattcatcgagacctca

SEQ ID NO: 30573 - RNA, 21 nt, RNAi
guuauucaucgagaccucauu

SEQ ID NO: 30574 - RNA, 21 nt, RNAi
uucaauaaguagcucuggagu

SEQ ID NO: 30575 - DNA, 21 bp, Homo sapiens
gaatgaagatctggaggtgaa

SEQ ID NO: 30576 - RNA, 21 nt, RNAi
augaagaucuggaggugaauu

SEQ ID NO: 30577 - RNA, 21 nt, RNAi
uuuacuucuagaccuccacuu

SEQ ID NO: 30578 - DNA, 21 bp, Homo sapiens
gactggcaaccaaagtcgaat

SEQ ID NO: 30579 - RNA, 21 nt, RNAi
cuggcaaccaaagucgaauuu

SEQ ID NO: 30580 - RNA, 21 nt, RNAi
uugaccguugguuucagcuua

SEQ ID NO: 30581 - DNA, 21 bp, Homo sapiens
gactcctaattacatagctcc

SEQ ID NO: 30582 - RNA, 21 nt, RNAi
cuccuaauuacauagcuccuu

SEQ ID NO: 30583 - RNA, 21 nt, RNAi
uugaggauuaauguaucgagg

SEQ ID NO: 30584 - DNA, 21 bp, Homo sapiens
gaggtggatgtgtggtccatt

SEQ ID NO: 30585 - RNA, 21 nt, RNAi
gguggaugugugguccauuuu

SEQ ID NO: 30586 - RNA, 21 nt, RNAi
uuccaccuacacaccagguaa

SEQ ID NO: 30587 - DNA, 21 bp, Homo sapiens
gagacctacctccggatcaag

SEQ ID NO: 30588 - RNA, 21 nt, RNAi
gaccuaccuccggaucaaguu

SEQ ID NO: 30589 - RNA, 21 nt, RNAi
uucuggauggaggccuaguuc

SEQ ID NO: 30590 - DNA, 21 bp, Homo sapiens
gacctacctccggatcaagaa

SEQ ID NO: 30591 - RNA, 21 nt, RNAi
ccuaccuccggaucaagaauu

SEQ ID NO: 30592 - RNA, 21 nt, RNAi
uuggauggaggccuaguucuu

SEQ ID NO: 30593 - DNA, 21 bp, Homo sapiens
gatcaagaagaatgaatacag

SEQ ID NO: 30594 - RNA, 21 nt, RNAi
ucaagaagaaugaauacaguu

SEQ ID NO: 30595 - RNA, 21 nt, RNAi
uuaguucuucuuacuuauguc

SEQ ID NO: 30596 - DNA, 21 bp, Homo sapiens
gaagaatgaatacagtattcc

SEQ ID NO: 30597 - RNA, 21 nt, RNAi
agaaugaauacaguauuccuu

SEQ ID NO: 30598 - RNA, 21 nt, RNAi
uuucuuacuuaugucauaagg

SEQ ID NO: 30599 - DNA, 21 bp, Homo sapiens
gaagatgcttcagacagatcc

SEQ ID NO: 30600 - RNA, 21 nt, RNAi
agaugcuucagacagauccuu

SEQ ID NO: 30601 - RNA, 21 nt, RNAi
uuucuacgaagucugucuagg

SEQ ID NO: 30602 - DNA, 21 bp, Homo sapiens
gagctgcttaatgacgagttc

SEQ ID NO: 30603 - RNA, 21 nt, RNAi
gcugcuuaaugacgaguucuu

SEQ ID NO: 30604 - RNA, 21 nt, RNAi
uucgacgaauuacugcucaag

SEQ ID NO: 30605 - DNA, 21 bp, Homo sapiens
gacgagttctttacttctggc

SEQ ID NO: 30606 - RNA, 21 nt, RNAi
cgaguucuuuacuucuggcuu

SEQ ID NO: 30607 - RNA, 21 nt, RNAi
uugcucaagaaaugaagaccg

SEQ ID NO: 30608 - DNA, 21 bp, Homo sapiens
gagttctttacttctggctat

SEQ ID NO: 30609 - RNA, 21 nt, RNAi
guucuuuacuucuggcuauuu

SEQ ID NO: 30610 - RNA, 21 nt, RNAi
uucaagaaaugaagaccgaua

SEQ ID NO: 30611 - DNA, 21 bp, Homo sapiens
gaagaaccagtggttcgagag

SEQ ID NO: 30612 - RNA, 21 nt, RNAi
agaaccagugguucgagaguu

SEQ ID NO: 30613 - RNA, 21 nt, RNAi
uuucuuggucaccaagcucuc

SEQ ID NO: 30614 - DNA, 21 bp, Homo sapiens
gaaccagtggttcgagagaca

SEQ ID NO: 30615 - RNA, 21 nt, RNAi
accagugguucgagagacauu

SEQ ID NO: 30616 - RNA, 21 nt, RNAi
uuuggucaccaagcucucugu

SEQ ID NO: 30617 - DNA, 21 bp, Homo sapiens
gagagacaggtgaggtggtcg

SEQ ID NO: 30618 - RNA, 21 nt, RNAi
gagacaggugagguggucguu

SEQ ID NO: 30619 - RNA, 21 nt, RNAi
uucucuguccacuccaccagc

SEQ ID NO: 30620 - DNA, 21 bp, Homo sapiens
gagacaggtgaggtggtcgac

SEQ ID NO: 30621 - RNA, 21 nt, RNAi
gacaggugagguggucgacuu

SEQ ID NO: 30622 - RNA, 21 nt, RNAi
uucuguccacuccaccagcug

SEQ ID NO: 30623 - DNA, 21 bp, Homo sapiens
gacaggtgaggtggtcgactg

SEQ ID NO: 30624 - RNA, 21 nt, RNAi
caggugagguggucgacuguu

SEQ ID NO: 30625 - RNA, 21 nt, RNAi
uuguccacuccaccagcugac

SEQ ID NO: 30626 - DNA, 21 bp, Homo sapiens
gactgccacctcagtgacatg

SEQ ID NO: 30627 - RNA, 21 nt, RNAi
cugccaccucagugacauguu

SEQ ID NO: 30628 - RNA, 21 nt, RNAi
uugacgguggagucacuguac

SEQ ID NO: 30629 - DNA, 21 bp, Homo sapiens
gacatgctgcagcagctgcac

SEQ ID NO: 30630 - RNA, 21 nt, RNAi
caugcugcagcagcugcacuu

SEQ ID NO: 30631 - RNA, 21 nt, RNAi
uuguacgacgucgucgacgug

SEQ ID NO: 30632 - DNA, 21 bp, Homo sapiens
gactattcggacaagtacggc

SEQ ID NO: 30633 - RNA, 21 nt, RNAi
cuauucggacaaguacggcuu

SEQ ID NO: 30634 - RNA, 21 nt, RNAi
uugauaagccuguucaugccg

SEQ ID NO: 30635 - DNA, 21 bp, Homo sapiens
gactcaacacgcctcatcctc

SEQ ID NO: 30636 - RNA, 21 nt, RNAi
cucaacacgccucauccucuu

SEQ ID NO: 30637 - RNA, 21 nt, RNAi
uugaguugugcggaguaggag

SEQ ID NO: 30638 - DNA, 21 bp, Homo sapiens
gatggtgacagcctgcagtac

SEQ ID NO: 30639 - RNA, 21 nt, RNAi
uggugacagccugcaguacuu

SEQ ID NO: 30640 - RNA, 21 nt, RNAi
uuaccacugucggacgucaug

SEQ ID NO: 30641 - DNA, 21 bp, Homo sapiens
gacagcctgcagtacatagag

SEQ ID NO: 30642 - RNA, 21 nt, RNAi
cagccugcaguacauagaguu

SEQ ID NO: 30643 - RNA, 21 nt, RNAi
uugucggacgucauguaucuc

SEQ ID NO: 30644 - DNA, 21 bp, Homo sapiens
gacggcactgagtcctacctc

SEQ ID NO: 30645 - RNA, 21 nt, RNAi
cggcacugaguccuaccucuu

SEQ ID NO: 30646 - RNA, 21 nt, RNAi
uugccgugacucaggauggag

SEQ ID NO: 30647 - DNA, 21 bp, Homo sapiens
gagtcctacctcaccgtgagt

SEQ ID NO: 30648 - RNA, 21 nt, RNAi
guccuaccucaccgugaguuu

SEQ ID NO: 30649 - RNA, 21 nt, RNAi
uucaggauggaguggcacuca

SEQ ID NO: 30650 - DNA, 21 bp, Homo sapiens
gagcgagcacttgctgaaggc

SEQ ID NO: 30651 - RNA, 21 nt, RNAi
gcgagcacuugcugaaggcuu

SEQ ID NO: 30652 - RNA, 21 nt, RNAi
uucgcucgugaacgacuuccg

SEQ ID NO: 30653 - DNA, 21 bp, Homo sapiens
gagcacttgctgaaggcaggt

SEQ ID NO: 30654 - RNA, 21 nt, RNAi
gcacuugcugaaggcagguuu

SEQ ID NO: 30655 - RNA, 21 nt, RNAi
uucgugaacgacuuccgucca

SEQ ID NO: 30656 - DNA, 21 bp, Homo sapiens
gaaggcaggtgccaacatcac

SEQ ID NO: 30657 - RNA, 21 nt, RNAi
aggcaggugccaacaucacuu

SEQ ID NO: 30658 - RNA, 21 nt, RNAi
uuuccguccacgguuguagug

SEQ ID NO: 30659 - DNA, 21 bp, Homo sapiens
gatcaacttcttccaggatca

SEQ ID NO: 30660 - RNA, 21 nt, RNAi
ucaacuucuuccaggaucauu

SEQ ID NO: 30661 - RNA, 21 nt, RNAi
uuaguugaagaagguccuagu

SEQ ID NO: 30662 - DNA, 21 bp, Homo sapiens
gatcacaccaagctcatcttg

SEQ ID NO: 30663 - RNA, 21 nt, RNAi
ucacaccaagcucaucuuguu

SEQ ID NO: 30664 - RNA, 21 nt, RNAi
uuagugugguucgaguagaac

SEQ ID NO: 30665 - DNA, 21 bp, Homo sapiens
gatggcagccgtgacctacat

SEQ ID NO: 30666 - RNA, 21 nt, RNAi
uggcagccgugaccuacauuu

SEQ ID NO: 30667 - RNA, 21 nt, RNAi
uuaccgucggcacuggaugua

SEQ ID NO: 30668 - DNA, 21 bp, Homo sapiens
gacctacatcgacgagaagcg

SEQ ID NO: 30669 - RNA, 21 nt, RNAi
ccuacaucgacgagaagcguu

SEQ ID NO: 30670 - RNA, 21 nt, RNAi
uuggauguagcugcucuucgc

SEQ ID NO: 30671 - DNA, 21 bp, Homo sapiens
gacttccgcacataccgcctg

SEQ ID NO: 30672 - RNA, 21 nt, RNAi
cuuccgcacauaccgccuguu

SEQ ID NO: 30673 - RNA, 21 nt, RNAi
uugaaggcguguauggcggac

SEQ ID NO: 30674 - DNA, 21 bp, Homo sapiens
gagtctcctggaggagtacgg

SEQ ID NO: 30675 - RNA, 21 nt, RNAi
gucuccuggaggaguacgguu

SEQ ID NO: 30676 - RNA, 21 nt, RNAi
uucagaggaccuccucaugcc

SEQ ID NO: 30677 - DNA, 21 bp, Homo sapiens
gaggagtacggctgctgcaag

SEQ ID NO: 30678 - RNA, 21 nt, RNAi
ggaguacggcugcugcaaguu

SEQ ID NO: 30679 - RNA, 21 nt, RNAi
uuccucaugccgacgacguuc

SEQ ID NO: 30680 - DNA, 21 bp, Homo sapiens
gagtacggctgctgcaaggag

SEQ ID NO: 30681 - RNA, 21 nt, RNAi
guacggcugcugcaaggaguu

SEQ ID NO: 30682 - RNA, 21 nt, RNAi
uucaugccgacgacguuccuc

SEQ ID NO: 30683 - DNA, 21 bp, Homo sapiens
gacaagctgctgagctcacgc

SEQ ID NO: 30684 - RNA, 21 nt, RNAi
caagcugcugagcucacgcuu

SEQ ID NO: 30685 - RNA, 21 nt, RNAi
uuguucgacgacucgagugcg

SEQ ID NO: 30686 - DNA, 21 bp, Homo sapiens
gagctgcatcatccttgcagg

SEQ ID NO: 30687 - RNA, 21 nt, RNAi
gcugcaucauccuugcagguu

SEQ ID NO: 30688 - RNA, 21 nt, RNAi
uucgacguaguaggaacgucc

SEQ ID NO: 30689 - DNA, 21 bp, Homo sapiens
gaattcggaactgtcctttcc

SEQ ID NO: 30690 - RNA, 21 nt, RNAi
auucggaacuguccuuuccuu

SEQ ID NO: 30691 - RNA, 21 nt, RNAi
uuuaagccuugacaggaaagg

SEQ ID NO: 30692 - DNA, 21 bp, Homo sapiens
gaactgtcctttccttggctt

SEQ ID NO: 30693 - RNA, 21 nt, RNAi
acuguccuuuccuuggcuuuu

SEQ ID NO: 30694 - RNA, 21 nt, RNAi
uuugacaggaaaggaaccgaa

SEQ ID NO: 30695 - DNA, 21 bp, Homo sapiens
taagtctctgctgctcaagcc

SEQ ID NO: 30696 - RNA, 21 nt, RNAi
agucucugcugcucaagccuu

SEQ ID NO: 30697 - RNA, 21 nt, RNAi
uuucagagacgacgaguucgg

SEQ ID NO: 30698 - DNA, 21 bp, Homo sapiens
tatccattcaccgcagcctcg

SEQ ID NO: 30699 - RNA, 21 nt, RNAi
uccauucaccgcagccucguu

SEQ ID NO: 30700 - RNA, 21 nt, RNAi
uuagguaaguggcgucggagc

SEQ ID NO: 30701 - DNA, 21 bp, Homo sapiens
tactacctacggcaaattgtg

SEQ ID NO: 30702 - RNA, 21 nt, RNAi
cuaccuacggcaaauuguguu

SEQ ID NO: 30703 - RNA, 21 nt, RNAi
uugauggaugccguuuaacac

SEQ ID NO: 30704 - DNA, 21 bp, Homo sapiens
tacctacggcaaattgtgctt

SEQ ID NO: 30705 - RNA, 21 nt, RNAi
ccuacggcaaauugugcuuuu

SEQ ID NO: 30706 - RNA, 21 nt, RNAi
uuggaugccguuuaacacgaa

SEQ ID NO: 30707 - DNA, 21 bp, Homo sapiens
tacggcaaattgtgcttggct

SEQ ID NO: 30708 - RNA, 21 nt, RNAi
cggcaaauugugcuuggcuuu

SEQ ID NO: 30709 - RNA, 21 nt, RNAi
uugccguuuaacacgaaccga

SEQ ID NO: 30710 - DNA, 21 bp, Homo sapiens
tacctgcaccgaaaccgagtt

SEQ ID NO: 30711 - RNA, 21 nt, RNAi
ccugcaccgaaaccgaguuuu

SEQ ID NO: 30712 - RNA, 21 nt, RNAi
uuggacguggcuuuggcucaa

SEQ ID NO: 30713 - DNA, 21 bp, Homo sapiens
tattcatcgagacctcaagct

SEQ ID NO: 30714 - RNA, 21 nt, RNAi
uucaucgagaccucaagcuuu

SEQ ID NO: 30715 - RNA, 21 nt, RNAi
uuaaguagcucuggaguucga

SEQ ID NO: 30716 - DNA, 21 bp, Homo sapiens
tacctccggatcaagaagaat

SEQ ID NO: 30717 - RNA, 21 nt, RNAi
ccuccggaucaagaagaauuu

SEQ ID NO: 30718 - RNA, 21 nt, RNAi
uuggaggccuaguucuucuua

SEQ ID NO: 30719 - DNA, 21 bp, Homo sapiens
taacgagctgcttaatgacga

SEQ ID NO: 30720 - RNA, 21 nt, RNAi
acgagcugcuuaaugacgauu

SEQ ID NO: 30721 - RNA, 21 nt, RNAi
uuugcucgacgaauuacugcu

SEQ ID NO: 30722 - DNA, 21 bp, Homo sapiens
taatgacgagttctttacttc

SEQ ID NO: 30723 - RNA, 21 nt, RNAi
augacgaguucuuuacuucuu

SEQ ID NO: 30724 - RNA, 21 nt, RNAi
uuuacugcucaagaaaugaag

SEQ ID NO: 30725 - DNA, 21 bp, Homo sapiens
tattcggacaagtacggcctt

SEQ ID NO: 30726 - RNA, 21 nt, RNAi
uucggacaaguacggccuuuu

SEQ ID NO: 30727 - RNA, 21 nt, RNAi
uuaagccuguucaugccggaa

SEQ ID NO: 30728 - DNA, 21 bp, Homo sapiens
tatcagctctgtgataacagc

SEQ ID NO: 30729 - RNA, 21 nt, RNAi
ucagcucugugauaacagcuu

SEQ ID NO: 30730 - RNA, 21 nt, RNAi
uuagucgagacacuauugucg

SEQ ID NO: 30731 - DNA, 21 bp, Homo sapiens
tacaatgatggtgacagcctg

SEQ ID NO: 30732 - RNA, 21 nt, RNAi
caaugauggugacagccuguu

SEQ ID NO: 30733 - RNA, 21 nt, RNAi
uuguuacuaccacugucggac

SEQ ID NO: 30734 - DNA, 21 bp, Homo sapiens
tacatagagcgtgacggcact

SEQ ID NO: 30735 - RNA, 21 nt, RNAi
cauagagcgugacggcacuuu

SEQ ID NO: 30736 - RNA, 21 nt, RNAi
uuguaucucgcacugccguga

SEQ ID NO: 30737 - DNA, 21 bp, Homo sapiens
tagagcgtgacggcactgagt

SEQ ID NO: 30738 - RNA, 21 nt, RNAi
gagcgugacggcacugaguuu

SEQ ID NO: 30739 - RNA, 21 nt, RNAi
uucucgcacugccgugacuca

SEQ ID NO: 30740 - DNA, 21 bp, Homo sapiens
tatttccgcaattacatgagc

SEQ ID NO: 30741 - RNA, 21 nt, RNAi
uuuccgcaauuacaugagcuu

SEQ ID NO: 30742 - RNA, 21 nt, RNAi
uuaaaggcguuaauguacucg

SEQ ID NO: 30743 - DNA, 21 bp, Homo sapiens
tacatgagcgagcacttgctg

SEQ ID NO: 30744 - RNA, 21 nt, RNAi
caugagcgagcacuugcuguu

SEQ ID NO: 30745 - RNA, 21 nt, RNAi
uuguacucgcucgugaacgac

SEQ ID NO: 30746 - DNA, 21 bp, Homo sapiens
tacctacggacctggttccgc

SEQ ID NO: 30747 - RNA, 21 nt, RNAi
ccuacggaccugguuccgcuu

SEQ ID NO: 30748 - RNA, 21 nt, RNAi
uuggaugccuggaccaaggcg

SEQ ID NO: 30749 - DNA, 21 bp, Homo sapiens
taccgcctgagtctcctggag

SEQ ID NO: 30750 - RNA, 21 nt, RNAi
ccgccugagucuccuggaguu

SEQ ID NO: 30751 - RNA, 21 nt, RNAi
uuggcggacucagaggaccuc

SEQ ID NO: 30752 - DNA, 21 bp, Homo sapiens
tacggctgctgcaaggagctg

SEQ ID NO: 30753 - RNA, 21 nt, RNAi
cggcugcugcaaggagcuguu

SEQ ID NO: 30754 - RNA, 21 nt, RNAi
uugccgacgacguuccucgac

SEQ ID NO: 30755 - DNA, 21 bp, Homo sapiens
tatggtggacaagctgctgag

SEQ ID NO: 30756 - RNA, 21 nt, RNAi
ugguggacaagcugcugaguu

SEQ ID NO: 30757 - RNA, 21 nt, RNAi
uuaccaccuguucgacgacuc

SEQ ID NO: 30758 - DNA, 21 bp, Homo sapiens
tattgaattcggaactgtcct

SEQ ID NO: 30759 - RNA, 21 nt, RNAi
uugaauucggaacuguccuuu

SEQ ID NO: 30760 - RNA, 21 nt, RNAi
uuaacuuaagccuugacagga

SEQ ID NO: 30761 - DNA, 21 bp, Homo sapiens
tatgcacattaaacagatgtg

SEQ ID NO: 30762 - RNA, 21 nt, RNAi
ugcacauuaaacagauguguu

SEQ ID NO: 30763 - RNA, 21 nt, RNAi
uuacguguaauuugucuacac

SEQ ID NO: 30764 - DNA, 21 bp, Homo sapiens
aaatatccattcaccgcagcc

SEQ ID NO: 30765 - RNA, 21 nt, RNAi
auauccauucaccgcagccuu

SEQ ID NO: 30766 - RNA, 21 nt, RNAi
uuuauagguaaguggcgucgg

SEQ ID NO: 30767 - DNA, 21 bp, Homo sapiens
aatatccattcaccgcagcct

SEQ ID NO: 30768 - RNA, 21 nt, RNAi
uauccauucaccgcagccuuu

SEQ ID NO: 30769 - RNA, 21 nt, RNAi
uuauagguaaguggcgucgga

SEQ ID NO: 30770 - DNA, 21 bp, Homo sapiens
aaaccgagttattcatcgaga

SEQ ID NO: 30771 - RNA, 21 nt, RNAi
accgaguuauucaucgagauu

SEQ ID NO: 30772 - RNA, 21 nt, RNAi
uuuggcucaauaaguagcucu

SEQ ID NO: 30773 - DNA, 21 bp, Homo sapiens
aaccgagttattcatcgagac

SEQ ID NO: 30774 - RNA, 21 nt, RNAi
ccgaguuauucaucgagacuu

SEQ ID NO: 30775 - RNA, 21 nt, RNAi
uuggcucaauaaguagcucug

SEQ ID NO: 30776 - DNA, 21 bp, Homo sapiens
aaccaaagtcgaatatgacgg

SEQ ID NO: 30777 - RNA, 21 nt, RNAi
ccaaagucgaauaugacgguu

SEQ ID NO: 30778 - RNA, 21 nt, RNAi
uugguuucagcuuauacugcc

SEQ ID NO: 30779 - DNA, 21 bp, Homo sapiens
aaccattaacgagctgcttaa

SEQ ID NO: 30780 - RNA, 21 nt, RNAi
ccauuaacgagcugcuuaauu

SEQ ID NO: 30781 - RNA, 21 nt, RNAi
uugguaauugcucgacgaauu

SEQ ID NO: 30782 - DNA, 21 bp, Homo sapiens
aacgagctgcttaatgacgag

SEQ ID NO: 30783 - RNA, 21 nt, RNAi
cgagcugcuuaaugacgaguu

SEQ ID NO: 30784 - RNA, 21 nt, RNAi
uugcucgacgaauuacugcuc

SEQ ID NO: 30785 - DNA, 21 bp, Homo sapiens
aatgacgagttctttacttct

SEQ ID NO: 30786 - RNA, 21 nt, RNAi
ugacgaguucuuuacuucuuu

SEQ ID NO: 30787 - RNA, 21 nt, RNAi
uuacugcucaagaaaugaaga

SEQ ID NO: 30788 - DNA, 21 bp, Homo sapiens
aatgactcaacacgcctcatc

SEQ ID NO: 30789 - RNA, 21 nt, RNAi
ugacucaacacgccucaucuu

SEQ ID NO: 30790 - RNA, 21 nt, RNAi
uuacugaguugugcggaguag

SEQ ID NO: 30791 - DNA, 21 bp, Homo sapiens
aattacatgagcgagcacttg

SEQ ID NO: 30792 - RNA, 21 nt, RNAi
uuacaugagcgagcacuuguu

SEQ ID NO: 30793 - RNA, 21 nt, RNAi
uuaauguacucgcucgugaac

SEQ ID NO: 30794 - DNA, 21 bp, Homo sapiens
caacgacttcgtgttcgtggt

SEQ ID NO: 30795 - RNA, 21 nt, RNAi
acgacuucguguucgugguuu

SEQ ID NO: 30796 - RNA, 21 nt, RNAi
uuugcugaagcacaagcacca

SEQ ID NO: 30797 - DNA, 21 bp, Homo sapiens
caccgaaaccgagttattcat

SEQ ID NO: 30798 - RNA, 21 nt, RNAi
ccgaaaccgaguuauucauuu

SEQ ID NO: 30799 - RNA, 21 nt, RNAi
uuggcuuuggcucaauaagua

SEQ ID NO: 30800 - DNA, 21 bp, Homo sapiens
caaccaaagtcgaatatgacg

SEQ ID NO: 30801 - RNA, 21 nt, RNAi
accaaagucgaauaugacguu

SEQ ID NO: 30802 - RNA, 21 nt, RNAi
uuugguuucagcuuauacugc

SEQ ID NO: 30803 - DNA, 21 bp, Homo sapiens
cacagtttcgaggtggatgtg

SEQ ID NO: 30804 - RNA, 21 nt, RNAi
caguuucgagguggauguguu

SEQ ID NO: 30805 - RNA, 21 nt, RNAi
uugucaaagcuccaccuacac

SEQ ID NO: 30806 - DNA, 21 bp, Homo sapiens
caaccattaacgagctgctta

SEQ ID NO: 30807 - RNA, 21 nt, RNAi
accauuaacgagcugcuuauu

SEQ ID NO: 30808 - RNA, 21 nt, RNAi
uuugguaauugcucgacgaau

SEQ ID NO: 30809 - DNA, 21 bp, Homo sapiens
cattaacgagctgcttaatga

SEQ ID NO: 30810 - RNA, 21 nt, RNAi
uuaacgagcugcuuaaugauu

SEQ ID NO: 30811 - RNA, 21 nt, RNAi
uuaauugcucgacgaauuacu

SEQ ID NO: 30812 - DNA, 21 bp, Homo sapiens
caatgactcaacacgcctcat

SEQ ID NO: 30813 - RNA, 21 nt, RNAi
augacucaacacgccucauuu

SEQ ID NO: 30814 - RNA, 21 nt, RNAi
uuuacugaguugugcggagua

SEQ ID NO: 30815 - DNA, 21 bp, Homo sapiens
catcctctacaatgatggtga

SEQ ID NO: 30816 - RNA, 21 nt, RNAi
uccucuacaaugauggugauu

SEQ ID NO: 30817 - RNA, 21 nt, RNAi
uuaggagauguuacuaccacu

SEQ ID NO: 30818 - DNA, 21 bp, Homo sapiens
caattacatgagcgagcactt

SEQ ID NO: 30819 - RNA, 21 nt, RNAi
auuacaugagcgagcacuuuu

SEQ ID NO: 30820 - RNA, 21 nt, RNAi
uuuaauguacucgcucgugaa

SEQ ID NO: 30821 - DNA, 21 bp, Homo sapiens
cagcgtgcagatcaacttctt

SEQ ID NO: 30822 - RNA, 21 nt, RNAi
gcgugcagaucaacuucuuuu

SEQ ID NO: 30823 - RNA, 21 nt, RNAi
uucgcacgucuaguugaagaa

SEQ ID NO: 30824 - DNA, 21 bp, Homo sapiens
gaaatatccattcaccgcagc

SEQ ID NO: 30825 - RNA, 21 nt, RNAi
aauauccauucaccgcagcuu

SEQ ID NO: 30826 - RNA, 21 nt, RNAi
uuuuauagguaaguggcgucg

SEQ ID NO: 30827 - DNA, 21 bp, Homo sapiens
gaggacaacgacttcgtgttc

SEQ ID NO: 30828 - RNA, 21 nt, RNAi
ggacaacgacuucguguucuu

SEQ ID NO: 30829 - RNA, 21 nt, RNAi
uuccuguugcugaagcacaag

SEQ ID NO: 30830 - DNA, 21 bp, Homo sapiens
gacaacgacttcgtgttcgtg

SEQ ID NO: 30831 - RNA, 21 nt, RNAi
caacgacuucguguucguguu

SEQ ID NO: 30832 - RNA, 21 nt, RNAi
uuguugcugaagcacaagcac

SEQ ID NO: 30833 - DNA, 21 bp, Homo sapiens
gatactacctacggcaaattg

SEQ ID NO: 30834 - RNA, 21 nt, RNAi
uacuaccuacggcaaauuguu

SEQ ID NO: 30835 - RNA, 21 nt, RNAi
uuaugauggaugccguuuaac

SEQ ID NO: 30836 - DNA, 21 bp, Homo sapiens
gaaaccgagttattcatcgag

SEQ ID NO: 30837 - RNA, 21 nt, RNAi
aaccgaguuauucaucgaguu

SEQ ID NO: 30838 - RNA, 21 nt, RNAi
uuuuggcucaauaaguagcuc

SEQ ID NO: 30839 - DNA, 21 bp, Homo sapiens
gactggcaaccaaagtcgaat

SEQ ID NO: 30840 - RNA, 21 nt, RNAi
cuggcaaccaaagucgaauuu

SEQ ID NO: 30841 - RNA, 21 nt, RNAi
uugaccguugguuucagcuua

SEQ ID NO: 30842 - DNA, 21 bp, Homo sapiens
gacctacctccggatcaagaa

SEQ ID NO: 30843 - RNA, 21 nt, RNAi
ccuaccuccggaucaagaauu

SEQ ID NO: 30844 - RNA, 21 nt, RNAi
uuggauggaggccuaguucuu

SEQ ID NO: 30845 - DNA, 21 bp, Homo sapiens
gagctgcttaatgacgagttc

SEQ ID NO: 30846 - RNA, 21 nt, RNAi
gcugcuuaaugacgaguucuu

SEQ ID NO: 30847 - RNA, 21 nt, RNAi
uucgacgaauuacugcucaag

SEQ ID NO: 30848 - DNA, 21 bp, Homo sapiens
gactattcggacaagtacggc

SEQ ID NO: 30849 - RNA, 21 nt, RNAi
cuauucggacaaguacggcuu

SEQ ID NO: 30850 - RNA, 21 nt, RNAi
uugauaagccuguucaugccg

SEQ ID NO: 30851 - DNA, 21 bp, Homo sapiens
gacagcctgcagtacatagag

SEQ ID NO: 30852 - RNA, 21 nt, RNAi
cagccugcaguacauagaguu

SEQ ID NO: 30853 - RNA, 21 nt, RNAi
uugucggacgucauguaucuc

SEQ ID NO: 30854 - DNA, 21 bp, Homo sapiens
tactacctacggcaaattgtg

SEQ ID NO: 30855 - RNA, 21 nt, RNAi
cuaccuacggcaaauuguguu

SEQ ID NO: 30856 - RNA, 21 nt, RNAi
uugauggaugccguuuaacac

SEQ ID NO: 30857 - DNA, 21 bp, Homo sapiens
tacctacggcaaattgtgctt

SEQ ID NO: 30858 - RNA, 21 nt, RNAi
ccuacggcaaauugugcuuuu

SEQ ID NO: 30859 - RNA, 21 nt, RNAi
uuggaugccguuuaacacgaa

SEQ ID NO: 30860 - DNA, 21 bp, Homo sapiens
tacctccggatcaagaagaat

SEQ ID NO: 30861 - RNA, 21 nt, RNAi
ccuccggaucaagaagaauuu

SEQ ID NO: 30862 - RNA, 21 nt, RNAi
uuggaggccuaguucuucuua

SEQ ID NO: 30863 - DNA, 21 bp, Homo sapiens
taacgagctgcttaatgacga

SEQ ID NO: 30864 - RNA, 21 nt, RNAi
acgagcugcuuaaugacgauu

SEQ ID NO: 30865 - RNA, 21 nt, RNAi
uuugcucgacgaauuacugcu

SEQ ID NO: 30866 - DNA, 21 bp, Homo sapiens
taatgacgagttctttacttc

SEQ ID NO: 30867 - RNA, 21 nt, RNAi
augacgaguucuuuacuucuu

SEQ ID NO: 30868 - RNA, 21 nt, RNAi
uuuacugcucaagaaaugaag

SEQ ID NO: 30869 - DNA, 21 bp, Homo sapiens
tattcggacaagtacggcctt

SEQ ID NO: 30870 - RNA, 21 nt, RNAi
uucggacaaguacggccuuuu

SEQ ID NO: 30871 - RNA, 21 nt, RNAi
uuaagccuguucaugccggaa

SEQ ID NO: 30872 - DNA, 21 bp, Homo sapiens
tacaatgatggtgacagcctg

SEQ ID NO: 30873 - RNA, 21 nt, RNAi
caaugauggugacagccuguu

SEQ ID NO: 30874 - RNA, 21 nt, RNAi
uuguuacuaccacugucggac

SEQ ID NO: 30875 - DNA, 21 bp, Homo sapiens
tatttccgcaattacatgagc

SEQ ID NO: 30876 - RNA, 21 nt, RNAi
uuuccgcaauuacaugagcuu

SEQ ID NO: 30877 - RNA, 21 nt, RNAi
uuaaaggcguuaauguacucg

SEQ ID NO: 30878 - DNA, 21 bp, Homo sapiens
aaatcgatacatcatacgcgc

SEQ ID NO: 30879 - RNA, 21 nt, RNAi
aucgauacaucauacgcgcuu

SEQ ID NO: 30880 - RNA, 21 nt, RNAi
uuuagcuauguaguaugcgcg

SEQ ID NO: 30881 - DNA, 21 bp, Homo sapiens
aatcgatacatcatacgcgcg

SEQ ID NO: 30882 - RNA, 21 nt, RNAi
ucgauacaucauacgcgcguu

SEQ ID NO: 30883 - RNA, 21 nt, RNAi
uuagcuauguaguaugcgcgc

SEQ ID NO: 30884 - DNA, 21 bp, Homo sapiens
aaatccgcaaggagctgaagc

SEQ ID NO: 30885 - RNA, 21 nt, RNAi
auccgcaaggagcugaagcuu

SEQ ID NO: 30886 - RNA, 21 nt, RNAi
uuuaggcguuccucgacuucg

SEQ ID NO: 30887 - DNA, 21 bp, Homo sapiens
aatccgcaaggagctgaagct

SEQ ID NO: 30888 - RNA, 21 nt, RNAi
uccgcaaggagcugaagcuuu

SEQ ID NO: 30889 - RNA, 21 nt, RNAi
uuaggcguuccucgacuucga

SEQ ID NO: 30890 - DNA, 21 bp, Homo sapiens
aaggagctgaagctgaaggag

SEQ ID NO: 30891 - RNA, 21 nt, RNAi
ggagcugaagcugaaggaguu

SEQ ID NO: 30892 - RNA, 21 nt, RNAi
uuccucgacuucgacuuccuc

SEQ ID NO: 30893 - DNA, 21 bp, Homo sapiens
aagcagttggccattgagctg

SEQ ID NO: 30894 - RNA, 21 nt, RNAi
gcaguuggccauugagcuguu

SEQ ID NO: 30895 - RNA, 21 nt, RNAi
uucgucaaccgguaacucgac

SEQ ID NO: 30896 - DNA, 21 bp, Homo sapiens
aacatgatccagacctacagc

SEQ ID NO: 30897 - RNA, 21 nt, RNAi
caugauccagaccuacagcuu

SEQ ID NO: 30898 - RNA, 21 nt, RNAi
uuguacuaggucuggaugucg

SEQ ID NO: 30899 - DNA, 21 bp, Homo sapiens
aatggcagcaccaaggaccgg

SEQ ID NO: 30900 - RNA, 21 nt, RNAi
uggcagcaccaaggaccgguu

SEQ ID NO: 30901 - RNA, 21 nt, RNAi
uuaccgucgugguuccuggcc

SEQ ID NO: 30902 - DNA, 21 bp, Homo sapiens
aaggaccggaagctgctgctg

SEQ ID NO: 30903 - RNA, 21 nt, RNAi
ggaccggaagcugcugcuguu

SEQ ID NO: 30904 - RNA, 21 nt, RNAi
uuccuggccuucgacgacgac

SEQ ID NO: 30905 - DNA, 21 bp, Homo sapiens
aagaccaagattgacatcatc

SEQ ID NO: 30906 - RNA, 21 nt, RNAi
gaccaagauugacaucaucuu

SEQ ID NO: 30907 - RNA, 21 nt, RNAi
uucugguucuaacuguaguag

SEQ ID NO: 30908 - DNA, 21 bp, Homo sapiens
aagattgacatcatccgcatg

SEQ ID NO: 30909 - RNA, 21 nt, RNAi
gauugacaucauccgcauguu

SEQ ID NO: 30910 - RNA, 21 nt, RNAi
uucuaacuguaguaggcguac

SEQ ID NO: 30911 - DNA, 21 bp, Homo sapiens
aagagctgcggcaccacttcc

SEQ ID NO: 30912 - RNA, 21 nt, RNAi
gagcugcggcaccacuuccuu

SEQ ID NO: 30913 - RNA, 21 nt, RNAi
uucucgacgccguggugaagg

SEQ ID NO: 30914 - DNA, 21 bp, Homo sapiens
aagaacgtactgcgcctgctc

SEQ ID NO: 30915 - RNA, 21 nt, RNAi
gaacguacugcgccugcucuu

SEQ ID NO: 30916 - RNA, 21 nt, RNAi
uucuugcaugacgcggacgag

SEQ ID NO: 30917 - DNA, 21 bp, Homo sapiens
aacgtactgcgcctgctcagc

SEQ ID NO: 30918 - RNA, 21 nt, RNAi
cguacugcgccugcucagcuu

SEQ ID NO: 30919 - RNA, 21 nt, RNAi
uugcaugacgcggacgagucg

SEQ ID NO: 30920 - DNA, 21 bp, Homo sapiens
aaattgacagaatccaaccag

SEQ ID NO: 30921 - RNA, 21 nt, RNAi
auugacagaauccaaccaguu

SEQ ID NO: 30922 - RNA, 21 nt, RNAi
uuuaacugucuuagguugguc

SEQ ID NO: 30923 - DNA, 21 bp, Homo sapiens
aattgacagaatccaaccaga

SEQ ID NO: 30924 - RNA, 21 nt, RNAi
uugacagaauccaaccagauu

SEQ ID NO: 30925 - RNA, 21 nt, RNAi
uuaacugucuuagguuggucu

SEQ ID NO: 30926 - DNA, 21 bp, Homo sapiens
aaagcagaagccgagaacacc

SEQ ID NO: 30927 - RNA, 21 nt, RNAi
agcagaagccgagaacaccuu

SEQ ID NO: 30928 - RNA, 21 nt, RNAi
uuucgucuucggcucuugugg

SEQ ID NO: 30929 - DNA, 21 bp, Homo sapiens
aagcagaagccgagaacacca

SEQ ID NO: 30930 - RNA, 21 nt, RNAi
gcagaagccgagaacaccauu

SEQ ID NO: 30931 - RNA, 21 nt, RNAi
uucgucuucggcucuuguggu

SEQ ID NO: 30932 - DNA, 21 bp, Homo sapiens
aagccgagaacaccagtgaag

SEQ ID NO: 30933 - RNA, 21 nt, RNAi
gccgagaacaccagugaaguu

SEQ ID NO: 30934 - RNA, 21 nt, RNAi
uucggcucuuguggucacuuc

SEQ ID NO: 30935 - DNA, 21 bp, Homo sapiens
aacaccagtgaagtcagcact

SEQ ID NO: 30936 - RNA, 21 nt, RNAi
caccagugaagucagcacuuu

SEQ ID NO: 30937 - RNA, 21 nt, RNAi
uuguggucacuucagucguga

SEQ ID NO: 30938 - DNA, 21 bp, Homo sapiens
aagtcagcactgtgcttaagc

SEQ ID NO: 30939 - RNA, 21 nt, RNAi
gucagcacugugcuuaagcuu

SEQ ID NO: 30940 - RNA, 21 nt, RNAi
uucagucgugacacgaauucg

SEQ ID NO: 30941 - DNA, 21 bp, Homo sapiens
aagctggataacacagtggtg

SEQ ID NO: 30942 - RNA, 21 nt, RNAi
gcuggauaacacagugguguu

SEQ ID NO: 30943 - RNA, 21 nt, RNAi
uucgaccuauugugucaccac

SEQ ID NO: 30944 - DNA, 21 bp, Homo sapiens
aactggagttggctgtgttct

SEQ ID NO: 30945 - RNA, 21 nt, RNAi
cuggaguuggcuguguucuuu

SEQ ID NO: 30946 - RNA, 21 nt, RNAi
uugaccucaaccgacacaaga

SEQ ID NO: 30947 - DNA, 21 bp, Homo sapiens
aaattcctgaagttggaggat

SEQ ID NO: 30948 - RNA, 21 nt, RNAi
auuccugaaguuggaggauuu

SEQ ID NO: 30949 - RNA, 21 nt, RNAi
uuuaaggacuucaaccuccua

SEQ ID NO: 30950 - DNA, 21 bp, Homo sapiens
aattcctgaagttggaggatt

SEQ ID NO: 30951 - RNA, 21 nt, RNAi
uuccugaaguuggaggauuuu

SEQ ID NO: 30952 - RNA, 21 nt, RNAi
uuaaggacuucaaccuccuaa

SEQ ID NO: 30953 - DNA, 21 bp, Homo sapiens
aagttggaggatttcttggac

SEQ ID NO: 30954 - RNA, 21 nt, RNAi
guuggaggauuucuuggacuu

SEQ ID NO: 30955 - RNA, 21 nt, RNAi
uucaaccuccuaaagaaccug

SEQ ID NO: 30956 - DNA, 21 bp, Homo sapiens
aatgagaggcatgaggtgcag

SEQ ID NO: 30957 - RNA, 21 nt, RNAi
ugagaggcaugaggugcaguu

SEQ ID NO: 30958 - RNA, 21 nt, RNAi
uuacucuccguacuccacguc

SEQ ID NO: 30959 - DNA, 21 bp, Homo sapiens
aaggcgttccagcgtgctagg

SEQ ID NO: 30960 - RNA, 21 nt, RNAi
ggcguuccagcgugcuagguu

SEQ ID NO: 30961 - RNA, 21 nt, RNAi
uuccgcaaggucgcacgaucc

SEQ ID NO: 30962 - DNA, 21 bp, Homo sapiens
aacatcgatgtcgccacgtgg

SEQ ID NO: 30963 - RNA, 21 nt, RNAi
caucgaugucgccacgugguu

SEQ ID NO: 30964 - RNA, 21 nt, RNAi
uuguagcuacagcggugcacc

SEQ ID NO: 30965 - DNA, 21 bp, Homo sapiens
aagctgaacctcggcactgac

SEQ ID NO: 30966 - RNA, 21 nt, RNAi
gcugaaccucggcacugacuu

SEQ ID NO: 30967 - RNA, 21 nt, RNAi
uucgacuuggagccgugacug

SEQ ID NO: 30968 - DNA, 21 bp, Homo sapiens
aacctcggcactgactcggac

SEQ ID NO: 30969 - RNA, 21 nt, RNAi
ccucggcacugacucggacuu

SEQ ID NO: 30970 - RNA, 21 nt, RNAi
uuggagccgugacugagccug

SEQ ID NO: 30971 - DNA, 21 bp, Homo sapiens
aagatttcaagttcctggcgg

SEQ ID NO: 30972 - RNA, 21 nt, RNAi
gauuucaaguuccuggcgguu

SEQ ID NO: 30973 - RNA, 21 nt, RNAi
uucuaaaguucaaggaccgcc

SEQ ID NO: 30974 - DNA, 21 bp, Homo sapiens
aaggtgctcctctccgaattc

SEQ ID NO: 30975 - RNA, 21 nt, RNAi
ggugcuccucuccgaauucuu

SEQ ID NO: 30976 - RNA, 21 nt, RNAi
uuccacgaggagaggcuuaag

SEQ ID NO: 30977 - DNA, 21 bp, Homo sapiens
aagcggatattggcggcagtg

SEQ ID NO: 30978 - RNA, 21 nt, RNAi
gcggauauuggcggcaguguu

SEQ ID NO: 30979 - RNA, 21 nt, RNAi
uucgccuauaaccgccgucac

SEQ ID NO: 30980 - DNA, 21 bp, Homo sapiens
aacctcttcggctgtttccag

SEQ ID NO: 30981 - RNA, 21 nt, RNAi
ccucuucggcuguuuccaguu

SEQ ID NO: 30982 - RNA, 21 nt, RNAi
uuggagaagccgacaaagguc

SEQ ID NO: 30983 - DNA, 21 bp, Homo sapiens
aagttggacaatttgctcctg

SEQ ID NO: 30984 - RNA, 21 nt, RNAi
guuggacaauuugcuccuguu

SEQ ID NO: 30985 - RNA, 21 nt, RNAi
uucaaccuguuaaacgaggac

SEQ ID NO: 30986 - DNA, 21 bp, Homo sapiens
aatttgctcctggacaccgag

SEQ ID NO: 30987 - RNA, 21 nt, RNAi
uuugcuccuggacaccgaguu

SEQ ID NO: 30988 - RNA, 21 nt, RNAi
uuaaacgaggaccuguggcuc

SEQ ID NO: 30989 - DNA, 21 bp, Homo sapiens
aagatcgcagactttggcctc

SEQ ID NO: 30990 - RNA, 21 nt, RNAi
gaucgcagacuuuggccucuu

SEQ ID NO: 30991 - RNA, 21 nt, RNAi
uucuagcgucugaaaccggag

SEQ ID NO: 30992 - DNA, 21 bp, Homo sapiens
aagccatcggcatcatgagaa

SEQ ID NO: 30993 - RNA, 21 nt, RNAi
gccaucggcaucaugagaauu

SEQ ID NO: 30994 - RNA, 21 nt, RNAi
uucgguagccguaguacucuu

SEQ ID NO: 30995 - DNA, 21 bp, Homo sapiens
aacttcgacgaggagttcacc

SEQ ID NO: 30996 - RNA, 21 nt, RNAi
cuucgacgaggaguucaccuu

SEQ ID NO: 30997 - RNA, 21 nt, RNAi
uugaagcugcuccucaagugg

SEQ ID NO: 30998 - DNA, 21 bp, Homo sapiens
caaggagctgaagctgaagga

SEQ ID NO: 30999 - RNA, 21 nt, RNAi
aggagcugaagcugaaggauu

SEQ ID NO: 31000 - RNA, 21 nt, RNAi
uuuccucgacuucgacuuccu

SEQ ID NO: 31001 - DNA, 21 bp, Homo sapiens
cagttggccattgagctgaag

SEQ ID NO: 31002 - RNA, 21 nt, RNAi
guuggccauugagcugaaguu

SEQ ID NO: 31003 - RNA, 21 nt, RNAi
uucaaccgguaacucgacuuc

SEQ ID NO: 31004 - DNA, 21 bp, Homo sapiens
cattgagctgaaggtgaagca

SEQ ID NO: 31005 - RNA, 21 nt, RNAi
uugagcugaaggugaagcauu

SEQ ID NO: 31006 - RNA, 21 nt, RNAi
uuaacucgacuuccacuucgu

SEQ ID NO: 31007 - DNA, 21 bp, Homo sapiens
catgatccagacctacagcaa

SEQ ID NO: 31008 - RNA, 21 nt, RNAi
ugauccagaccuacagcaauu

SEQ ID NO: 31009 - RNA, 21 nt, RNAi
uuacuaggucuggaugucguu

SEQ ID NO: 31010 - DNA, 21 bp, Homo sapiens
cagacctacagcaatggcagc

SEQ ID NO: 31011 - RNA, 21 nt, RNAi
gaccuacagcaauggcagcuu

SEQ ID NO: 31012 - RNA, 21 nt, RNAi
uucuggaugucguuaccgucg

SEQ ID NO: 31013 - DNA, 21 bp, Homo sapiens
cagcaatggcagcaccaagga

SEQ ID NO: 31014 - RNA, 21 nt, RNAi
gcaauggcagcaccaaggauu

SEQ ID NO: 31015 - RNA, 21 nt, RNAi
uucguuaccgucgugguuccu

SEQ ID NO: 31016 - DNA, 21 bp, Homo sapiens
caatggcagcaccaaggaccg

SEQ ID NO: 31017 - RNA, 21 nt, RNAi
auggcagcaccaaggaccguu

SEQ ID NO: 31018 - RNA, 21 nt, RNAi
uuuaccgucgugguuccuggc

SEQ ID NO: 31019 - DNA, 21 bp, Homo sapiens
cagcaccaaggaccggaagct

SEQ ID NO: 31020 - RNA, 21 nt, RNAi
gcaccaaggaccggaagcuuu

SEQ ID NO: 31021 - RNA, 21 nt, RNAi
uucgugguuccuggccuucga

SEQ ID NO: 31022 - DNA, 21 bp, Homo sapiens
caccaaggaccggaagctgct

SEQ ID NO: 31023 - RNA, 21 nt, RNAi
ccaaggaccggaagcugcuuu

SEQ ID NO: 31024 - RNA, 21 nt, RNAi
uugguuccuggccuucgacga

SEQ ID NO: 31025 - DNA, 21 bp, Homo sapiens
caaggaccggaagctgctgct

SEQ ID NO: 31026 - RNA, 21 nt, RNAi
aggaccggaagcugcugcuuu

SEQ ID NO: 31027 - RNA, 21 nt, RNAi
uuuccuggccuucgacgacga

SEQ ID NO: 31028 - DNA, 21 bp, Homo sapiens
cagcagatgttgcaggacagt

SEQ ID NO: 31029 - RNA, 21 nt, RNAi
gcagauguugcaggacaguuu

SEQ ID NO: 31030 - RNA, 21 nt, RNAi
uucgucuacaacguccuguca

SEQ ID NO: 31031 - DNA, 21 bp, Homo sapiens
cagatgttgcaggacagtaag

SEQ ID NO: 31032 - RNA, 21 nt, RNAi
gauguugcaggacaguaaguu

SEQ ID NO: 31033 - RNA, 21 nt, RNAi
uucuacaacguccugucauuc

SEQ ID NO: 31034 - DNA, 21 bp, Homo sapiens
caggacagtaagaccaagatt

SEQ ID NO: 31035 - RNA, 21 nt, RNAi
ggacaguaagaccaagauuuu

SEQ ID NO: 31036 - RNA, 21 nt, RNAi
uuccugucauucugguucuaa

SEQ ID NO: 31037 - DNA, 21 bp, Homo sapiens
cagtaagaccaagattgacat

SEQ ID NO: 31038 - RNA, 21 nt, RNAi
guaagaccaagauugacauuu

SEQ ID NO: 31039 - RNA, 21 nt, RNAi
uucauucugguucuaacugua

SEQ ID NO: 31040 - DNA, 21 bp, Homo sapiens
caagattgacatcatccgcat

SEQ ID NO: 31041 - RNA, 21 nt, RNAi
agauugacaucauccgcauuu

SEQ ID NO: 31042 - RNA, 21 nt, RNAi
uuucuaacuguaguaggcgua

SEQ ID NO: 31043 - DNA, 21 bp, Homo sapiens
catcatccgcatgcaactccg

SEQ ID NO: 31044 - RNA, 21 nt, RNAi
ucauccgcaugcaacuccguu

SEQ ID NO: 31045 - RNA, 21 nt, RNAi
uuaguaggcguacguugaggc

SEQ ID NO: 31046 - DNA, 21 bp, Homo sapiens
catcgaagagctgcggcacca

SEQ ID NO: 31047 - RNA, 21 nt, RNAi
ucgaagagcugcggcaccauu

SEQ ID NO: 31048 - RNA, 21 nt, RNAi
uuagcuucucgacgccguggu

SEQ ID NO: 31049 - DNA, 21 bp, Homo sapiens
caccacttccgagtggagcac

SEQ ID NO: 31050 - RNA, 21 nt, RNAi
ccacuuccgaguggagcacuu

SEQ ID NO: 31051 - RNA, 21 nt, RNAi
uuggugaaggcucaccucgug

SEQ ID NO: 31052 - DNA, 21 bp, Homo sapiens
caagaacgtactgcgcctgct

SEQ ID NO: 31053 - RNA, 21 nt, RNAi
agaacguacugcgccugcuuu

SEQ ID NO: 31054 - RNA, 21 nt, RNAi
uuucuugcaugacgcggacga

SEQ ID NO: 31055 - DNA, 21 bp, Homo sapiens
caggagaaattgacagaatcc

SEQ ID NO: 31056 - RNA, 21 nt, RNAi
ggagaaauugacagaauccuu

SEQ ID NO: 31057 - RNA, 21 nt, RNAi
uuccucuuuaacugucuuagg

SEQ ID NO: 31058 - DNA, 21 bp, Homo sapiens
cagaatccaaccagaagctgg

SEQ ID NO: 31059 - RNA, 21 nt, RNAi
gaauccaaccagaagcugguu

SEQ ID NO: 31060 - RNA, 21 nt, RNAi
uucuuagguuggucuucgacc

SEQ ID NO: 31061 - DNA, 21 bp, Homo sapiens
cagcctcaaagcagaagccga

SEQ ID NO: 31062 - RNA, 21 nt, RNAi
gccucaaagcagaagccgauu

SEQ ID NO: 31063 - RNA, 21 nt, RNAi
uucggaguuucgucuucggcu

SEQ ID NO: 31064 - DNA, 21 bp, Homo sapiens
caaagcagaagccgagaacac

SEQ ID NO: 31065 - RNA, 21 nt, RNAi
aagcagaagccgagaacacuu

SEQ ID NO: 31066 - RNA, 21 nt, RNAi
uuuucgucuucggcucuugug

SEQ ID NO: 31067 - DNA, 21 bp, Homo sapiens
cagaagccgagaacaccagtg

SEQ ID NO: 31068 - RNA, 21 nt, RNAi
gaagccgagaacaccaguguu

SEQ ID NO: 31069 - RNA, 21 nt, RNAi
uucuucggcucuuguggucac

SEQ ID NO: 31070 - DNA, 21 bp, Homo sapiens
caccagtgaagtcagcactgt

SEQ ID NO: 31071 - RNA, 21 nt, RNAi
ccagugaagucagcacuguuu

SEQ ID NO: 31072 - RNA, 21 nt, RNAi
uuggucacuucagucgugaca

SEQ ID NO: 31073 - DNA, 21 bp, Homo sapiens
cagtgaagtcagcactgtgct

SEQ ID NO: 31074 - RNA, 21 nt, RNAi
gugaagucagcacugugcuuu

SEQ ID NO: 31075 - RNA, 21 nt, RNAi
uucacuucagucgugacacga

SEQ ID NO: 31076 - DNA, 21 bp, Homo sapiens
cagcactgtgcttaagctgga

SEQ ID NO: 31077 - RNA, 21 nt, RNAi
gcacugugcuuaagcuggauu

SEQ ID NO: 31078 - RNA, 21 nt, RNAi
uucgugacacgaauucgaccu

SEQ ID NO: 31079 - DNA, 21 bp, Homo sapiens
cactgtgcttaagctggataa

SEQ ID NO: 31080 - RNA, 21 nt, RNAi
cugugcuuaagcuggauaauu

SEQ ID NO: 31081 - RNA, 21 nt, RNAi
uugacacgaauucgaccuauu

SEQ ID NO: 31082 - DNA, 21 bp, Homo sapiens
cagacgtcttggaagccatgt

SEQ ID NO: 31083 - RNA, 21 nt, RNAi
gacgucuuggaagccauguuu

SEQ ID NO: 31084 - RNA, 21 nt, RNAi
uucugcagaaccuucgguaca

SEQ ID NO: 31085 - DNA, 21 bp, Homo sapiens
cagagcttcactctggagctg

SEQ ID NO: 31086 - RNA, 21 nt, RNAi
gagcuucacucuggagcuguu

SEQ ID NO: 31087 - RNA, 21 nt, RNAi
uucucgaagugagaccucgac

SEQ ID NO: 31088 - DNA, 21 bp, Homo sapiens
caaattcctgaagttggagga

SEQ ID NO: 31089 - RNA, 21 nt, RNAi
aauuccugaaguuggaggauu

SEQ ID NO: 31090 - RNA, 21 nt, RNAi
uuuuaaggacuucaaccuccu

SEQ ID NO: 31091 - DNA, 21 bp, Homo sapiens
caatgagaggcatgaggtgca

SEQ ID NO: 31092 - RNA, 21 nt, RNAi
augagaggcaugaggugcauu

SEQ ID NO: 31093 - RNA, 21 nt, RNAi
uuuacucuccguacuccacgu

SEQ ID NO: 31094 - DNA, 21 bp, Homo sapiens
catgaggtgcagctggacatg

SEQ ID NO: 31095 - RNA, 21 nt, RNAi
ugaggugcagcuggacauguu

SEQ ID NO: 31096 - RNA, 21 nt, RNAi
uuacuccacgucgaccuguac

SEQ ID NO: 31097 - DNA, 21 bp, Homo sapiens
cattgagaggattcctcggct

SEQ ID NO: 31098 - RNA, 21 nt, RNAi
uugagaggauuccucggcuuu

SEQ ID NO: 31099 - RNA, 21 nt, RNAi
uuaacucuccuaaggagccga

SEQ ID NO: 31100 - DNA, 21 bp, Homo sapiens
cagcgtgctaggcagatgaac

SEQ ID NO: 31101 - RNA, 21 nt, RNAi
gcgugcuaggcagaugaacuu

SEQ ID NO: 31102 - RNA, 21 nt, RNAi
uucgcacgauccgucuacuug

SEQ ID NO: 31103 - DNA, 21 bp, Homo sapiens
cagatgaacatcgatgtcgcc

SEQ ID NO: 31104 - RNA, 21 nt, RNAi
gaugaacaucgaugucgccuu

SEQ ID NO: 31105 - RNA, 21 nt, RNAi
uucuacuuguagcuacagcgg

SEQ ID NO: 31106 - DNA, 21 bp, Homo sapiens
catatcggtggagaagctgaa

SEQ ID NO: 31107 - RNA, 21 nt, RNAi
uaucgguggagaagcugaauu

SEQ ID NO: 31108 - RNA, 21 nt, RNAi
uuauagccaccucuucgacuu

SEQ ID NO: 31109 - DNA, 21 bp, Homo sapiens
cactgactcggacagctcacc

SEQ ID NO: 31110 - RNA, 21 nt, RNAi
cugacucggacagcucaccuu

SEQ ID NO: 31111 - RNA, 21 nt, RNAi
uugacugagccugucgagugg

SEQ ID NO: 31112 - DNA, 21 bp, Homo sapiens
cagctcacctcagaagagctc

SEQ ID NO: 31113 - RNA, 21 nt, RNAi
gcucaccucagaagagcucuu

SEQ ID NO: 31114 - RNA, 21 nt, RNAi
uucgaguggagucuucucgag

SEQ ID NO: 31115 - DNA, 21 bp, Homo sapiens
catccaggaatccactgctcc

SEQ ID NO: 31116 - RNA, 21 nt, RNAi
uccaggaauccacugcuccuu

SEQ ID NO: 31117 - RNA, 21 nt, RNAi
uuagguccuuaggugacgagg

SEQ ID NO: 31118 - DNA, 21 bp, Homo sapiens
catcaaggctctgaagaaagg

SEQ ID NO: 31119 - RNA, 21 nt, RNAi
ucaaggcucugaagaaagguu

SEQ ID NO: 31120 - RNA, 21 nt, RNAi
uuaguuccgagacuucuuucc

SEQ ID NO: 31121 - DNA, 21 bp, Homo sapiens
cacgtgtgcttcgtgatggag

SEQ ID NO: 31122 - RNA, 21 nt, RNAi
cgugugcuucgugauggaguu

SEQ ID NO: 31123 - RNA, 21 nt, RNAi
uugcacacgaagcacuaccuc

SEQ ID NO: 31124 - DNA, 21 bp, Homo sapiens
cacatccacagcgacgtgttc

SEQ ID NO: 31125 - RNA, 21 nt, RNAi
cauccacagcgacguguucuu

SEQ ID NO: 31126 - RNA, 21 nt, RNAi
uuguaggugucgcugcacaag

SEQ ID NO: 31127 - DNA, 21 bp, Homo sapiens
catccacagcgacgtgttctc

SEQ ID NO: 31128 - RNA, 21 nt, RNAi
uccacagcgacguguucucuu

SEQ ID NO: 31129 - RNA, 21 nt, RNAi
uuaggugucgcugcacaagag

SEQ ID NO: 31130 - DNA, 21 bp, Homo sapiens
cacagcgacgtgttctctgag

SEQ ID NO: 31131 - RNA, 21 nt, RNAi
cagcgacguguucucugaguu

SEQ ID NO: 31132 - RNA, 21 nt, RNAi
uugucgcugcacaagagacuc

SEQ ID NO: 31133 - DNA, 21 bp, Homo sapiens
cagcgacgtgttctctgagcc

SEQ ID NO: 31134 - RNA, 21 nt, RNAi
gcgacguguucucugagccuu

SEQ ID NO: 31135 - RNA, 21 nt, RNAi
uucgcugcacaagagacucgg

SEQ ID NO: 31136 - DNA, 21 bp, Homo sapiens
cagtttcttcacgaacacaag

SEQ ID NO: 31137 - RNA, 21 nt, RNAi
guuucuucacgaacacaaguu

SEQ ID NO: 31138 - RNA, 21 nt, RNAi
uucaaagaagugcuuguguuc

SEQ ID NO: 31139 - DNA, 21 bp, Homo sapiens
cacgaacacaagatcgtctac

SEQ ID NO: 31140 - RNA, 21 nt, RNAi
cgaacacaagaucgucuacuu

SEQ ID NO: 31141 - RNA, 21 nt, RNAi
uugcuuguguucuagcagaug

SEQ ID NO: 31142 - DNA, 21 bp, Homo sapiens
caatttgctcctggacaccga

SEQ ID NO: 31143 - RNA, 21 nt, RNAi
auuugcuccuggacaccgauu

SEQ ID NO: 31144 - RNA, 21 nt, RNAi
uuuaaacgaggaccuguggcu

SEQ ID NO: 31145 - DNA, 21 bp, Homo sapiens
caagatcgcagactttggcct

SEQ ID NO: 31146 - RNA, 21 nt, RNAi
agaucgcagacuuuggccuuu

SEQ ID NO: 31147 - RNA, 21 nt, RNAi
uuucuagcgucugaaaccgga

SEQ ID NO: 31148 - DNA, 21 bp, Homo sapiens
cagactttggcctctgcaagg

SEQ ID NO: 31149 - RNA, 21 nt, RNAi
gacuuuggccucugcaagguu

SEQ ID NO: 31150 - RNA, 21 nt, RNAi
uucugaaaccggagacguucc

SEQ ID NO: 31151 - DNA, 21 bp, Homo sapiens
cacgtcgtacacgcgagctgt

SEQ ID NO: 31152 - RNA, 21 nt, RNAi
cgucguacacgcgagcuguuu

SEQ ID NO: 31153 - RNA, 21 nt, RNAi
uugcagcaugugcgcucgaca

SEQ ID NO: 31154 - DNA, 21 bp, Homo sapiens
cagcatcgtcaacgacgaggt

SEQ ID NO: 31155 - RNA, 21 nt, RNAi
gcaucgucaacgacgagguuu

SEQ ID NO: 31156 - RNA, 21 nt, RNAi
uucguagcaguugcugcucca

SEQ ID NO: 31157 - DNA, 21 bp, Homo sapiens
catcgtcaacgacgaggttcg

SEQ ID NO: 31158 - RNA, 21 nt, RNAi
ucgucaacgacgagguucguu

SEQ ID NO: 31159 - RNA, 21 nt, RNAi
uuagcaguugcugcuccaagc

SEQ ID NO: 31160 - DNA, 21 bp, Homo sapiens
catcggcatcatgagaaggct

SEQ ID NO: 31161 - RNA, 21 nt, RNAi
ucggcaucaugagaaggcuuu

SEQ ID NO: 31162 - RNA, 21 nt, RNAi
uuagccguaguacucuuccga

SEQ ID NO: 31163 - DNA, 21 bp, Homo sapiens
catcatgagaaggctgcttcg

SEQ ID NO: 31164 - RNA, 21 nt, RNAi
ucaugagaaggcugcuucguu

SEQ ID NO: 31165 - RNA, 21 nt, RNAi
uuaguacucuuccgacgaagc

SEQ ID NO: 31166 - DNA, 21 bp, Homo sapiens
catgagaaggctgcttcggag

SEQ ID NO: 31167 - RNA, 21 nt, RNAi
ugagaaggcugcuucggaguu

SEQ ID NO: 31168 - RNA, 21 nt, RNAi
uuacucuuccgacgaagccuc

SEQ ID NO: 31169 - DNA, 21 bp, Homo sapiens
cagaagatgtgaagaaacagc

SEQ ID NO: 31170 - RNA, 21 nt, RNAi
gaagaugugaagaaacagcuu

SEQ ID NO: 31171 - RNA, 21 nt, RNAi
uucuucuacacuucuuugucg

SEQ ID NO: 31172 - DNA, 21 bp, Homo sapiens
caccgacgtcagcaacttcga

SEQ ID NO: 31173 - RNA, 21 nt, RNAi
ccgacgucagcaacuucgauu

SEQ ID NO: 31174 - RNA, 21 nt, RNAi
uuggcugcagucguugaagcu

SEQ ID NO: 31175 - DNA, 21 bp, Homo sapiens
cagcaacttcgacgaggagtt

SEQ ID NO: 31176 - RNA, 21 nt, RNAi
gcaacuucgacgaggaguuuu

SEQ ID NO: 31177 - RNA, 21 nt, RNAi
uucguugaagcugcuccucaa

SEQ ID NO: 31178 - DNA, 21 bp, Homo sapiens
caacttcgacgaggagttcac

SEQ ID NO: 31179 - RNA, 21 nt, RNAi
acuucgacgaggaguucacuu

SEQ ID NO: 31180 - RNA, 21 nt, RNAi
uuugaagcugcuccucaagug

SEQ ID NO: 31181 - DNA, 21 bp, Homo sapiens
caggcagccttcctggacttc

SEQ ID NO: 31182 - RNA, 21 nt, RNAi
ggcagccuuccuggacuucuu

SEQ ID NO: 31183 - RNA, 21 nt, RNAi
uuccgucggaaggaccugaag

SEQ ID NO: 31184 - DNA, 21 bp, Homo sapiens
cagccttcctggacttcgact

SEQ ID NO: 31185 - RNA, 21 nt, RNAi
gccuuccuggacuucgacuuu

SEQ ID NO: 31186 - RNA, 21 nt, RNAi
uucggaaggaccugaagcuga

SEQ ID NO: 31187 - DNA, 21 bp, Homo sapiens
gagtaaatcgatacatcatac

SEQ ID NO: 31188 - RNA, 21 nt, RNAi
guaaaucgauacaucauacuu

SEQ ID NO: 31189 - RNA, 21 nt, RNAi
uucauuuagcuauguaguaug

SEQ ID NO: 31190 - DNA, 21 bp, Homo sapiens
gaaatccgcaaggagctgaag

SEQ ID NO: 31191 - RNA, 21 nt, RNAi
aauccgcaaggagcugaaguu

SEQ ID NO: 31192 - RNA, 21 nt, RNAi
uuuuaggcguuccucgacuuc

SEQ ID NO: 31193 - DNA, 21 bp, Homo sapiens
gagaagcagttggccattgag

SEQ ID NO: 31194 - RNA, 21 nt, RNAi
gaagcaguuggccauugaguu

SEQ ID NO: 31195 - RNA, 21 nt, RNAi
uucuucgucaaccgguaacuc

SEQ ID NO: 31196 - DNA, 21 bp, Homo sapiens
gaagcagttggccattgagct

SEQ ID NO: 31197 - RNA, 21 nt, RNAi
agcaguuggccauugagcuuu

SEQ ID NO: 31198 - RNA, 21 nt, RNAi
uuucgucaaccgguaacucga

SEQ ID NO: 31199 - DNA, 21 bp, Homo sapiens
gagaacatgatccagacctac

SEQ ID NO: 31200 - RNA, 21 nt, RNAi
gaacaugauccagaccuacuu

SEQ ID NO: 31201 - RNA, 21 nt, RNAi
uucuuguacuaggucuggaug

SEQ ID NO: 31202 - DNA, 21 bp, Homo sapiens
gaacatgatccagacctacag

SEQ ID NO: 31203 - RNA, 21 nt, RNAi
acaugauccagaccuacaguu

SEQ ID NO: 31204 - RNA, 21 nt, RNAi
uuuguacuaggucuggauguc

SEQ ID NO: 31205 - DNA, 21 bp, Homo sapiens
gatccagacctacagcaatgg

SEQ ID NO: 31206 - RNA, 21 nt, RNAi
uccagaccuacagcaaugguu

SEQ ID NO: 31207 - RNA, 21 nt, RNAi
uuaggucuggaugucguuacc

SEQ ID NO: 31208 - DNA, 21 bp, Homo sapiens
gacctacagcaatggcagcac

SEQ ID NO: 31209 - RNA, 21 nt, RNAi
ccuacagcaauggcagcacuu

SEQ ID NO: 31210 - RNA, 21 nt, RNAi
uuggaugucguuaccgucgug

SEQ ID NO: 31211 - DNA, 21 bp, Homo sapiens
gaccggaagctgctgctgaca

SEQ ID NO: 31212 - RNA, 21 nt, RNAi
ccggaagcugcugcugacauu

SEQ ID NO: 31213 - RNA, 21 nt, RNAi
uuggccuucgacgacgacugu

SEQ ID NO: 31214 - DNA, 21 bp, Homo sapiens
gatgttgcaggacagtaagac

SEQ ID NO: 31215 - RNA, 21 nt, RNAi
uguugcaggacaguaagacuu

SEQ ID NO: 31216 - RNA, 21 nt, RNAi
uuacaacguccugucauucug

SEQ ID NO: 31217 - DNA, 21 bp, Homo sapiens
gacagtaagaccaagattgac

SEQ ID NO: 31218 - RNA, 21 nt, RNAi
caguaagaccaagauugacuu

SEQ ID NO: 31219 - RNA, 21 nt, RNAi
uugucauucugguucuaacug

SEQ ID NO: 31220 - DNA, 21 bp, Homo sapiens
gaccaagattgacatcatccg

SEQ ID NO: 31221 - RNA, 21 nt, RNAi
ccaagauugacaucauccguu

SEQ ID NO: 31222 - RNA, 21 nt, RNAi
uugguucuaacuguaguaggc

SEQ ID NO: 31223 - DNA, 21 bp, Homo sapiens
gattgacatcatccgcatgca

SEQ ID NO: 31224 - RNA, 21 nt, RNAi
uugacaucauccgcaugcauu

SEQ ID NO: 31225 - RNA, 21 nt, RNAi
uuaacuguaguaggcguacgu

SEQ ID NO: 31226 - DNA, 21 bp, Homo sapiens
gacatcatccgcatgcaactc

SEQ ID NO: 31227 - RNA, 21 nt, RNAi
caucauccgcaugcaacucuu

SEQ ID NO: 31228 - RNA, 21 nt, RNAi
uuguaguaggcguacguugag

SEQ ID NO: 31229 - DNA, 21 bp, Homo sapiens
gaccagctggagaaccaggca

SEQ ID NO: 31230 - RNA, 21 nt, RNAi
ccagcuggagaaccaggcauu

SEQ ID NO: 31231 - RNA, 21 nt, RNAi
uuggucgaccucuugguccgu

SEQ ID NO: 31232 - DNA, 21 bp, Homo sapiens
gagctgcgcatcgaagagctg

SEQ ID NO: 31233 - RNA, 21 nt, RNAi
gcugcgcaucgaagagcuguu

SEQ ID NO: 31234 - RNA, 21 nt, RNAi
uucgacgcguagcuucucgac

SEQ ID NO: 31235 - DNA, 21 bp, Homo sapiens
gaagagctgcggcaccacttc

SEQ ID NO: 31236 - RNA, 21 nt, RNAi
agagcugcggcaccacuucuu

SEQ ID NO: 31237 - RNA, 21 nt, RNAi
uuucucgacgccguggugaag

SEQ ID NO: 31238 - DNA, 21 bp, Homo sapiens
gaacgtactgcgcctgctcag

SEQ ID NO: 31239 - RNA, 21 nt, RNAi
acguacugcgccugcucaguu

SEQ ID NO: 31240 - RNA, 21 nt, RNAi
uuugcaugacgcggacgaguc

SEQ ID NO: 31241 - DNA, 21 bp, Homo sapiens
gagaaattgacagaatccaac

SEQ ID NO: 31242 - RNA, 21 nt, RNAi
gaaauugacagaauccaacuu

SEQ ID NO: 31243 - RNA, 21 nt, RNAi
uucuuuaacugucuuagguug

SEQ ID NO: 31244 - DNA, 21 bp, Homo sapiens
gaaattgacagaatccaacca

SEQ ID NO: 31245 - RNA, 21 nt, RNAi
aauugacagaauccaaccauu

SEQ ID NO: 31246 - RNA, 21 nt, RNAi
uuuuaacugucuuagguuggu

SEQ ID NO: 31247 - DNA, 21 bp, Homo sapiens
gacagaatccaaccagaagct

SEQ ID NO: 31248 - RNA, 21 nt, RNAi
cagaauccaaccagaagcuuu

SEQ ID NO: 31249 - RNA, 21 nt, RNAi
uugucuuagguuggucuucga

SEQ ID NO: 31250 - DNA, 21 bp, Homo sapiens
gaggctctggagcggagactt

SEQ ID NO: 31251 - RNA, 21 nt, RNAi
ggcucuggagcggagacuuuu

SEQ ID NO: 31252 - RNA, 21 nt, RNAi
uuccgagaccucgccucugaa

SEQ ID NO: 31253 - DNA, 21 bp, Homo sapiens
gagcagcctcaaagcagaagc

SEQ ID NO: 31254 - RNA, 21 nt, RNAi
gcagccucaaagcagaagcuu

SEQ ID NO: 31255 - RNA, 21 nt, RNAi
uucgucggaguuucgucuucg

SEQ ID NO: 31256 - DNA, 21 bp, Homo sapiens
gaagccgagaacaccagtgaa

SEQ ID NO: 31257 - RNA, 21 nt, RNAi
agccgagaacaccagugaauu

SEQ ID NO: 31258 - RNA, 21 nt, RNAi
uuucggcucuuguggucacuu

SEQ ID NO: 31259 - DNA, 21 bp, Homo sapiens
gagaacaccagtgaagtcagc

SEQ ID NO: 31260 - RNA, 21 nt, RNAi
gaacaccagugaagucagcuu

SEQ ID NO: 31261 - RNA, 21 nt, RNAi
uucuuguggucacuucagucg

SEQ ID NO: 31262 - DNA, 21 bp, Homo sapiens
gaacaccagtgaagtcagcac

SEQ ID NO: 31263 - RNA, 21 nt, RNAi
acaccagugaagucagcacuu

SEQ ID NO: 31264 - RNA, 21 nt, RNAi
uuuguggucacuucagucgug

SEQ ID NO: 31265 - DNA, 21 bp, Homo sapiens
gaagtcagcactgtgcttaag

SEQ ID NO: 31266 - RNA, 21 nt, RNAi
agucagcacugugcuuaaguu

SEQ ID NO: 31267 - RNA, 21 nt, RNAi
uuucagucgugacacgaauuc

SEQ ID NO: 31268 - DNA, 21 bp, Homo sapiens
gacgtcttggaagccatgtgg

SEQ ID NO: 31269 - RNA, 21 nt, RNAi
cgucuuggaagccaugugguu

SEQ ID NO: 31270 - RNA, 21 nt, RNAi
uugcagaaccuucgguacacc

SEQ ID NO: 31271 - DNA, 21 bp, Homo sapiens
gaccagagcttcactctggag

SEQ ID NO: 31272 - RNA, 21 nt, RNAi
ccagagcuucacucuggaguu

SEQ ID NO: 31273 - RNA, 21 nt, RNAi
uuggucucgaagugagaccuc

SEQ ID NO: 31274 - DNA, 21 bp, Homo sapiens
gagcttcactctggagctgga

SEQ ID NO: 31275 - RNA, 21 nt, RNAi
gcuucacucuggagcuggauu

SEQ ID NO: 31276 - RNA, 21 nt, RNAi
uucgaagugagaccucgaccu

SEQ ID NO: 31277 - DNA, 21 bp, Homo sapiens
gaactggagttggctgtgttc

SEQ ID NO: 31278 - RNA, 21 nt, RNAi
acuggaguuggcuguguucuu

SEQ ID NO: 31279 - RNA, 21 nt, RNAi
uuugaccucaaccgacacaag

SEQ ID NO: 31280 - DNA, 21 bp, Homo sapiens
gagttggctgtgttctggcgg

SEQ ID NO: 31281 - RNA, 21 nt, RNAi
guuggcuguguucuggcgguu

SEQ ID NO: 31282 - RNA, 21 nt, RNAi
uucaaccgacacaagaccgcc

SEQ ID NO: 31283 - DNA, 21 bp, Homo sapiens
gaagttggaggatttcttgga

SEQ ID NO: 31284 - RNA, 21 nt, RNAi
aguuggaggauuucuuggauu

SEQ ID NO: 31285 - RNA, 21 nt, RNAi
uuucaaccuccuaaagaaccu

SEQ ID NO: 31286 - DNA, 21 bp, Homo sapiens
gaggatttcttggacaatgag

SEQ ID NO: 31287 - RNA, 21 nt, RNAi
ggauuucuuggacaaugaguu

SEQ ID NO: 31288 - RNA, 21 nt, RNAi
uuccuaaagaaccuguuacuc

SEQ ID NO: 31289 - DNA, 21 bp, Homo sapiens
gatttcttggacaatgagagg

SEQ ID NO: 31290 - RNA, 21 nt, RNAi
uuucuuggacaaugagagguu

SEQ ID NO: 31291 - RNA, 21 nt, RNAi
uuaaagaaccuguuacucucc

SEQ ID NO: 31292 - DNA, 21 bp, Homo sapiens
gacaatgagaggcatgaggtg

SEQ ID NO: 31293 - RNA, 21 nt, RNAi
caaugagaggcaugagguguu

SEQ ID NO: 31294 - RNA, 21 nt, RNAi
uuguuacucuccguacuccac

SEQ ID NO: 31295 - DNA, 21 bp, Homo sapiens
gagaggcatgaggtgcagctg

SEQ ID NO: 31296 - RNA, 21 nt, RNAi
gaggcaugaggugcagcuguu

SEQ ID NO: 31297 - RNA, 21 nt, RNAi
uucuccguacuccacgucgac

SEQ ID NO: 31298 - DNA, 21 bp, Homo sapiens
gaggcatgaggtgcagctgga

SEQ ID NO: 31299 - RNA, 21 nt, RNAi
ggcaugaggugcagcuggauu

SEQ ID NO: 31300 - RNA, 21 nt, RNAi
uuccguacuccacgucgaccu

SEQ ID NO: 31301 - DNA, 21 bp, Homo sapiens
gaggtgcagctggacatggaa

SEQ ID NO: 31302 - RNA, 21 nt, RNAi
ggugcagcuggacauggaauu

SEQ ID NO: 31303 - RNA, 21 nt, RNAi
uuccacgucgaccuguaccuu

SEQ ID NO: 31304 - DNA, 21 bp, Homo sapiens
gagaggattcctcggctccga

SEQ ID NO: 31305 - RNA, 21 nt, RNAi
gaggauuccucggcuccgauu

SEQ ID NO: 31306 - RNA, 21 nt, RNAi
uucuccuaaggagccgaggcu

SEQ ID NO: 31307 - DNA, 21 bp, Homo sapiens
gaaggcgttccagcgtgctag

SEQ ID NO: 31308 - RNA, 21 nt, RNAi
aggcguuccagcgugcuaguu

SEQ ID NO: 31309 - RNA, 21 nt, RNAi
uuuccgcaaggucgcacgauc

SEQ ID NO: 31310 - DNA, 21 bp, Homo sapiens
gatgaacatcgatgtcgccac

SEQ ID NO: 31311 - RNA, 21 nt, RNAi
ugaacaucgaugucgccacuu

SEQ ID NO: 31312 - RNA, 21 nt, RNAi
uuacuuguagcuacagcggug

SEQ ID NO: 31313 - DNA, 21 bp, Homo sapiens
gaacatcgatgtcgccacgtg

SEQ ID NO: 31314 - RNA, 21 nt, RNAi
acaucgaugucgccacguguu

SEQ ID NO: 31315 - RNA, 21 nt, RNAi
uuuguagcuacagcggugcac

SEQ ID NO: 31316 - DNA, 21 bp, Homo sapiens
gacatatcggtggagaagctg

SEQ ID NO: 31317 - RNA, 21 nt, RNAi
cauaucgguggagaagcuguu

SEQ ID NO: 31318 - RNA, 21 nt, RNAi
uuguauagccaccucuucgac

SEQ ID NO: 31319 - DNA, 21 bp, Homo sapiens
gagaagctgaacctcggcact

SEQ ID NO: 31320 - RNA, 21 nt, RNAi
gaagcugaaccucggcacuuu

SEQ ID NO: 31321 - RNA, 21 nt, RNAi
uucuucgacuuggagccguga

SEQ ID NO: 31322 - DNA, 21 bp, Homo sapiens
gaagctgaacctcggcactga

SEQ ID NO: 31323 - RNA, 21 nt, RNAi
agcugaaccucggcacugauu

SEQ ID NO: 31324 - RNA, 21 nt, RNAi
uuucgacuuggagccgugacu

SEQ ID NO: 31325 - DNA, 21 bp, Homo sapiens
gaacctcggcactgactcgga

SEQ ID NO: 31326 - RNA, 21 nt, RNAi
accucggcacugacucggauu

SEQ ID NO: 31327 - RNA, 21 nt, RNAi
uuuggagccgugacugagccu

SEQ ID NO: 31328 - DNA, 21 bp, Homo sapiens
gactcggacagctcacctcag

SEQ ID NO: 31329 - RNA, 21 nt, RNAi
cucggacagcucaccucaguu

SEQ ID NO: 31330 - RNA, 21 nt, RNAi
uugagccugucgaguggaguc

SEQ ID NO: 31331 - DNA, 21 bp, Homo sapiens
gacagctcacctcagaagagc

SEQ ID NO: 31332 - RNA, 21 nt, RNAi
cagcucaccucagaagagcuu

SEQ ID NO: 31333 - RNA, 21 nt, RNAi
uugucgaguggagucuucucg

SEQ ID NO: 31334 - DNA, 21 bp, Homo sapiens
gaagatttcaagttcctggcg

SEQ ID NO: 31335 - RNA, 21 nt, RNAi
agauuucaaguuccuggcguu

SEQ ID NO: 31336 - RNA, 21 nt, RNAi
uuucuaaaguucaaggaccgc

SEQ ID NO: 31337 - DNA, 21 bp, Homo sapiens
gatttcaagttcctggcggtg

SEQ ID NO: 31338 - RNA, 21 nt, RNAi
uuucaaguuccuggcgguguu

SEQ ID NO: 31339 - RNA, 21 nt, RNAi
uuaaaguucaaggaccgccac

SEQ ID NO: 31340 - DNA, 21 bp, Homo sapiens
gaaggtgctcctctccgaatt

SEQ ID NO: 31341 - RNA, 21 nt, RNAi
aggugcuccucuccgaauuuu

SEQ ID NO: 31342 - RNA, 21 nt, RNAi
uuuccacgaggagaggcuuaa

SEQ ID NO: 31343 - DNA, 21 bp, Homo sapiens
gagctgttcgccatcaaggct

SEQ ID NO: 31344 - RNA, 21 nt, RNAi
gcuguucgccaucaaggcuuu

SEQ ID NO: 31345 - RNA, 21 nt, RNAi
uucgacaagcgguaguuccga

SEQ ID NO: 31346 - DNA, 21 bp, Homo sapiens
gagacgaggtggagagcctga

SEQ ID NO: 31347 - RNA, 21 nt, RNAi
gacgagguggagagccugauu

SEQ ID NO: 31348 - RNA, 21 nt, RNAi
uucugcuccaccucucggacu

SEQ ID NO: 31349 - DNA, 21 bp, Homo sapiens
gacgaggtggagagcctgatg

SEQ ID NO: 31350 - RNA, 21 nt, RNAi
cgagguggagagccugauguu

SEQ ID NO: 31351 - RNA, 21 nt, RNAi
uugcuccaccucucggacuac

SEQ ID NO: 31352 - DNA, 21 bp, Homo sapiens
gaggtggagagcctgatgtgt

SEQ ID NO: 31353 - RNA, 21 nt, RNAi
gguggagagccugauguguuu

SEQ ID NO: 31354 - RNA, 21 nt, RNAi
uuccaccucucggacuacaca

SEQ ID NO: 31355 - DNA, 21 bp, Homo sapiens
gagagcctgatgtgtgagaag

SEQ ID NO: 31356 - RNA, 21 nt, RNAi
gagccugaugugugagaaguu

SEQ ID NO: 31357 - RNA, 21 nt, RNAi
uucucggacuacacacucuuc

SEQ ID NO: 31358 - DNA, 21 bp, Homo sapiens
gagcctgatgtgtgagaagcg

SEQ ID NO: 31359 - RNA, 21 nt, RNAi
gccugaugugugagaagcguu

SEQ ID NO: 31360 - RNA, 21 nt, RNAi
uucggacuacacacucuucgc

SEQ ID NO: 31361 - DNA, 21 bp, Homo sapiens
gatgtgtgagaagcggatatt

SEQ ID NO: 31362 - RNA, 21 nt, RNAi
ugugugagaagcggauauuuu

SEQ ID NO: 31363 - RNA, 21 nt, RNAi
uuacacacucuucgccuauaa

SEQ ID NO: 31364 - DNA, 21 bp, Homo sapiens
gagaagcggatattggcggca

SEQ ID NO: 31365 - RNA, 21 nt, RNAi
gaagcggauauuggcggcauu

SEQ ID NO: 31366 - RNA, 21 nt, RNAi
uucuucgccuauaaccgccgu

SEQ ID NO: 31367 - DNA, 21 bp, Homo sapiens
gaagcggatattggcggcagt

SEQ ID NO: 31368 - RNA, 21 nt, RNAi
agcggauauuggcggcaguuu

SEQ ID NO: 31369 - RNA, 21 nt, RNAi
uuucgccuauaaccgccguca

SEQ ID NO: 31370 - DNA, 21 bp, Homo sapiens
gatattggcggcagtgaccag

SEQ ID NO: 31371 - RNA, 21 nt, RNAi
uauuggcggcagugaccaguu

SEQ ID NO: 31372 - RNA, 21 nt, RNAi
uuauaaccgccgucacugguc

SEQ ID NO: 31373 - DNA, 21 bp, Homo sapiens
gaacctcttcggctgtttcca

SEQ ID NO: 31374 - RNA, 21 nt, RNAi
accucuucggcuguuuccauu

SEQ ID NO: 31375 - RNA, 21 nt, RNAi
uuuggagaagccgacaaaggu

SEQ ID NO: 31376 - DNA, 21 bp, Homo sapiens
gacaccggagcacgtgtgctt

SEQ ID NO: 31377 - RNA, 21 nt, RNAi
caccggagcacgugugcuuuu

SEQ ID NO: 31378 - RNA, 21 nt, RNAi
uuguggccucgugcacacgaa

SEQ ID NO: 31379 - DNA, 21 bp, Homo sapiens
gagcacgtgtgcttcgtgatg

SEQ ID NO: 31380 - RNA, 21 nt, RNAi
gcacgugugcuucgugauguu

SEQ ID NO: 31381 - RNA, 21 nt, RNAi
uucgugcacacgaagcacuac

SEQ ID NO: 31382 - DNA, 21 bp, Homo sapiens
gacctgatgctgcacatccac

SEQ ID NO: 31383 - RNA, 21 nt, RNAi
ccugaugcugcacauccacuu

SEQ ID NO: 31384 - RNA, 21 nt, RNAi
uuggacuacgacguguaggug

SEQ ID NO: 31385 - DNA, 21 bp, Homo sapiens
gatgctgcacatccacagcga

SEQ ID NO: 31386 - RNA, 21 nt, RNAi
ugcugcacauccacagcgauu

SEQ ID NO: 31387 - RNA, 21 nt, RNAi
uuacgacguguaggugucgcu

SEQ ID NO: 31388 - DNA, 21 bp, Homo sapiens
gaacacaagatcgtctacagg

SEQ ID NO: 31389 - RNA, 21 nt, RNAi
acacaagaucgucuacagguu

SEQ ID NO: 31390 - RNA, 21 nt, RNAi
uuuguguucuagcagaugucc

SEQ ID NO: 31391 - DNA, 21 bp, Homo sapiens
gacctgaagttggacaatttg

SEQ ID NO: 31392 - RNA, 21 nt, RNAi
ccugaaguuggacaauuuguu

SEQ ID NO: 31393 - RNA, 21 nt, RNAi
uuggacuucaaccuguuaaac

SEQ ID NO: 31394 - DNA, 21 bp, Homo sapiens
gaagttggacaatttgctcct

SEQ ID NO: 31395 - RNA, 21 nt, RNAi
aguuggacaauuugcuccuuu

SEQ ID NO: 31396 - RNA, 21 nt, RNAi
uuucaaccuguuaaacgagga

SEQ ID NO: 31397 - DNA, 21 bp, Homo sapiens
gacaatttgctcctggacacc

SEQ ID NO: 31398 - RNA, 21 nt, RNAi
caauuugcuccuggacaccuu

SEQ ID NO: 31399 - RNA, 21 nt, RNAi
uuguuaaacgaggaccugugg

SEQ ID NO: 31400 - DNA, 21 bp, Homo sapiens
gatcgcagactttggcctctg

SEQ ID NO: 31401 - RNA, 21 nt, RNAi
ucgcagacuuuggccucuguu

SEQ ID NO: 31402 - RNA, 21 nt, RNAi
uuagcgucugaaaccggagac

SEQ ID NO: 31403 - DNA, 21 bp, Homo sapiens
gactttggcctctgcaaggag

SEQ ID NO: 31404 - RNA, 21 nt, RNAi
cuuuggccucugcaaggaguu

SEQ ID NO: 31405 - RNA, 21 nt, RNAi
uugaaaccggagacguuccuc

SEQ ID NO: 31406 - DNA, 21 bp, Homo sapiens
gaccggaccagcacattctgt

SEQ ID NO: 31407 - RNA, 21 nt, RNAi
ccggaccagcacauucuguuu

SEQ ID NO: 31408 - RNA, 21 nt, RNAi
uuggccuggucguguaagaca

SEQ ID NO: 31409 - DNA, 21 bp, Homo sapiens
gacacgtcgtacacgcgagct

SEQ ID NO: 31410 - RNA, 21 nt, RNAi
cacgucguacacgcgagcuuu

SEQ ID NO: 31411 - RNA, 21 nt, RNAi
uugugcagcaugugcgcucga

SEQ ID NO: 31412 - DNA, 21 bp, Homo sapiens
gagatgctggttggcgagtcc

SEQ ID NO: 31413 - RNA, 21 nt, RNAi
gaugcugguuggcgaguccuu

SEQ ID NO: 31414 - RNA, 21 nt, RNAi
uucuacgaccaaccgcucagg

SEQ ID NO: 31415 - DNA, 21 bp, Homo sapiens
gatgatgaggaggaggtcttc

SEQ ID NO: 31416 - RNA, 21 nt, RNAi
ugaugaggaggaggucuucuu

SEQ ID NO: 31417 - RNA, 21 nt, RNAi
uuacuacuccuccuccagaag

SEQ ID NO: 31418 - DNA, 21 bp, Homo sapiens
gatgaggaggaggtcttcgac

SEQ ID NO: 31419 - RNA, 21 nt, RNAi
ugaggaggaggucuucgacuu

SEQ ID NO: 31420 - RNA, 21 nt, RNAi
uuacuccuccuccagaagcug

SEQ ID NO: 31421 - DNA, 21 bp, Homo sapiens
gaggaggaggtcttcgacagc

SEQ ID NO: 31422 - RNA, 21 nt, RNAi
ggaggaggucuucgacagcuu

SEQ ID NO: 31423 - RNA, 21 nt, RNAi
uuccuccuccagaagcugucg

SEQ ID NO: 31424 - DNA, 21 bp, Homo sapiens
gaggaggtcttcgacagcatc

SEQ ID NO: 31425 - RNA, 21 nt, RNAi
ggaggucuucgacagcaucuu

SEQ ID NO: 31426 - RNA, 21 nt, RNAi
uuccuccagaagcugucguag

SEQ ID NO: 31427 - DNA, 21 bp, Homo sapiens
gaggtcttcgacagcatcgtc

SEQ ID NO: 31428 - RNA, 21 nt, RNAi
ggucuucgacagcaucgucuu

SEQ ID NO: 31429 - RNA, 21 nt, RNAi
uuccagaagcugucguagcag

SEQ ID NO: 31430 - DNA, 21 bp, Homo sapiens
gacagcatcgtcaacgacgag

SEQ ID NO: 31431 - RNA, 21 nt, RNAi
cagcaucgucaacgacgaguu

SEQ ID NO: 31432 - RNA, 21 nt, RNAi
uugucguagcaguugcugcuc

SEQ ID NO: 31433 - DNA, 21 bp, Homo sapiens
gaagccatcggcatcatgaga

SEQ ID NO: 31434 - RNA, 21 nt, RNAi
agccaucggcaucaugagauu

SEQ ID NO: 31435 - RNA, 21 nt, RNAi
uuucgguagccguaguacucu

SEQ ID NO: 31436 - DNA, 21 bp, Homo sapiens
gagaaggctgcttcggaggaa

SEQ ID NO: 31437 - RNA, 21 nt, RNAi
gaaggcugcuucggaggaauu

SEQ ID NO: 31438 - RNA, 21 nt, RNAi
uucuuccgacgaagccuccuu

SEQ ID NO: 31439 - DNA, 21 bp, Homo sapiens
gaaggctgcttcggaggaacc

SEQ ID NO: 31440 - RNA, 21 nt, RNAi
aggcugcuucggaggaaccuu

SEQ ID NO: 31441 - RNA, 21 nt, RNAi
uuuccgacgaagccuccuugg

SEQ ID NO: 31442 - DNA, 21 bp, Homo sapiens
gatctagcgagagagatgcag

SEQ ID NO: 31443 - RNA, 21 nt, RNAi
ucuagcgagagagaugcaguu

SEQ ID NO: 31444 - RNA, 21 nt, RNAi
uuagaucgcucucucuacguc

SEQ ID NO: 31445 - DNA, 21 bp, Homo sapiens
gagagagatgcagaagatgtg

SEQ ID NO: 31446 - RNA, 21 nt, RNAi
gagagaugcagaagauguguu

SEQ ID NO: 31447 - RNA, 21 nt, RNAi
uucucucuacgucuucuacac

SEQ ID NO: 31448 - DNA, 21 bp, Homo sapiens
gagagatgcagaagatgtgaa

SEQ ID NO: 31449 - RNA, 21 nt, RNAi
gagaugcagaagaugugaauu

SEQ ID NO: 31450 - RNA, 21 nt, RNAi
uucucuacgucuucuacacuu

SEQ ID NO: 31451 - DNA, 21 bp, Homo sapiens
gagatgcagaagatgtgaaga

SEQ ID NO: 31452 - RNA, 21 nt, RNAi
gaugcagaagaugugaagauu

SEQ ID NO: 31453 - RNA, 21 nt, RNAi
uucuacgucuucuacacuucu

SEQ ID NO: 31454 - DNA, 21 bp, Homo sapiens
gatgcagaagatgtgaagaaa

SEQ ID NO: 31455 - RNA, 21 nt, RNAi
ugcagaagaugugaagaaauu

SEQ ID NO: 31456 - RNA, 21 nt, RNAi
uuacgucuucuacacuucuuu

SEQ ID NO: 31457 - DNA, 21 bp, Homo sapiens
gacgtcagcaacttcgacgag

SEQ ID NO: 31458 - RNA, 21 nt, RNAi
cgucagcaacuucgacgaguu

SEQ ID NO: 31459 - RNA, 21 nt, RNAi
uugcagucguugaagcugcuc

SEQ ID NO: 31460 - DNA, 21 bp, Homo sapiens
taaatcgatacatcatacgcg

SEQ ID NO: 31461 - RNA, 21 nt, RNAi
aaucgauacaucauacgcguu

SEQ ID NO: 31462 - RNA, 21 nt, RNAi
uuuuagcuauguaguaugcgc

SEQ ID NO: 31463 - DNA, 21 bp, Homo sapiens
tacagcagcagctggagctgg

SEQ ID NO: 31464 - RNA, 21 nt, RNAi
cagcagcagcuggagcugguu

SEQ ID NO: 31465 - RNA, 21 nt, RNAi
uugucgucgucgaccucgacc

SEQ ID NO: 31466 - DNA, 21 bp, Homo sapiens
tacagcaatggcagcaccaag

SEQ ID NO: 31467 - RNA, 21 nt, RNAi
cagcaauggcagcaccaaguu

SEQ ID NO: 31468 - RNA, 21 nt, RNAi
uugucguuaccgucgugguuc

SEQ ID NO: 31469 - DNA, 21 bp, Homo sapiens
taagaccaagattgacatcat

SEQ ID NO: 31470 - RNA, 21 nt, RNAi
agaccaagauugacaucauuu

SEQ ID NO: 31471 - RNA, 21 nt, RNAi
uuucugguucuaacuguagua

SEQ ID NO: 31472 - DNA, 21 bp, Homo sapiens
tacagccgaagcggaagcctc

SEQ ID NO: 31473 - RNA, 21 nt, RNAi
cagccgaagcggaagccucuu

SEQ ID NO: 31474 - RNA, 21 nt, RNAi
uugucggcuucgccuucggag

SEQ ID NO: 31475 - DNA, 21 bp, Homo sapiens
taagctggataacacagtggt

SEQ ID NO: 31476 - RNA, 21 nt, RNAi
agcuggauaacacagugguuu

SEQ ID NO: 31477 - RNA, 21 nt, RNAi
uuucgaccuauugugucacca

SEQ ID NO: 31478 - DNA, 21 bp, Homo sapiens
taggcagatgaacatcgatgt

SEQ ID NO: 31479 - RNA, 21 nt, RNAi
ggcagaugaacaucgauguuu

SEQ ID NO: 31480 - RNA, 21 nt, RNAi
uuccgucuacuuguagcuaca

SEQ ID NO: 31481 - DNA, 21 bp, Homo sapiens
tatcggtggagaagctgaacc

SEQ ID NO: 31482 - RNA, 21 nt, RNAi
ucgguggagaagcugaaccuu

SEQ ID NO: 31483 - RNA, 21 nt, RNAi
uuagccaccucuucgacuugg

SEQ ID NO: 31484 - DNA, 21 bp, Homo sapiens
tattggcggcagtgaccagtg

SEQ ID NO: 31485 - RNA, 21 nt, RNAi
uuggcggcagugaccaguguu

SEQ ID NO: 31486 - RNA, 21 nt, RNAi
uuaaccgccgucacuggucac

SEQ ID NO: 31487 - DNA, 21 bp, Homo sapiens
tattccgcctgcgtggtgctg

SEQ ID NO: 31488 - RNA, 21 nt, RNAi
uuccgccugcguggugcuguu

SEQ ID NO: 31489 - RNA, 21 nt, RNAi
uuaaggcggacgcaccacgac

SEQ ID NO: 31490 - DNA, 21 bp, Homo sapiens
tacagtttcttcacgaacaca

SEQ ID NO: 31491 - RNA, 21 nt, RNAi
caguuucuucacgaacacauu

SEQ ID NO: 31492 - RNA, 21 nt, RNAi
uugucaaagaagugcuugugu

SEQ ID NO: 31493 - DNA, 21 bp, Homo sapiens
tacgtcaagatcgcagacttt

SEQ ID NO: 31494 - RNA, 21 nt, RNAi
cgucaagaucgcagacuuuuu

SEQ ID NO: 31495 - RNA, 21 nt, RNAi
uugcaguucuagcgucugaaa

SEQ ID NO: 31496 - DNA, 21 bp, Homo sapiens
tacacgcgagctgtggactgg

SEQ ID NO: 31497 - RNA, 21 nt, RNAi
cacgcgagcuguggacugguu

SEQ ID NO: 31498 - RNA, 21 nt, RNAi
uugugcgcucgacaccugacc

SEQ ID NO: 31499 - DNA, 21 bp, Homo sapiens
tacgagatgctggttggcgag

SEQ ID NO: 31500 - RNA, 21 nt, RNAi
cgagaugcugguuggcgaguu

SEQ ID NO: 31501 - RNA, 21 nt, RNAi
uugcucuacgaccaaccgcuc

SEQ ID NO: 31502 - DNA, 21 bp, Homo sapiens
tagcgagagagatgcagaaga

SEQ ID NO: 31503 - RNA, 21 nt, RNAi
gcgagagagaugcagaagauu

SEQ ID NO: 31504 - RNA, 21 nt, RNAi
uucgcucucucuacgucuucu

SEQ ID NO: 31505 - DNA, 21 bp, Homo sapiens
aaattgacagaatccaaccag

SEQ ID NO: 31506 - RNA, 21 nt, RNAi
auugacagaauccaaccaguu

SEQ ID NO: 31507 - RNA, 21 nt, RNAi
uuuaacugucuuagguugguc

SEQ ID NO: 31508 - DNA, 21 bp, Homo sapiens
aattgacagaatccaaccaga

SEQ ID NO: 31509 - RNA, 21 nt, RNAi
uugacagaauccaaccagauu

SEQ ID NO: 31510 - RNA, 21 nt, RNAi
uuaacugucuuagguuggucu

SEQ ID NO: 31511 - DNA, 21 bp, Homo sapiens
cagatgttgcaggacagtaag

SEQ ID NO: 31512 - RNA, 21 nt, RNAi
gauguugcaggacaguaaguu

SEQ ID NO: 31513 - RNA, 21 nt, RNAi
uucuacaacguccugucauuc

SEQ ID NO: 31514 - DNA, 21 bp, Homo sapiens
cagcactgtgcttaagctgga

SEQ ID NO: 31515 - RNA, 21 nt, RNAi
gcacugugcuuaagcuggauu

SEQ ID NO: 31516 - RNA, 21 nt, RNAi
uucgugacacgaauucgaccu

SEQ ID NO: 31517 - DNA, 21 bp, Homo sapiens
cagacgtcttggaagccatgt

SEQ ID NO: 31518 - RNA, 21 nt, RNAi
gacgucuuggaagccauguuu

SEQ ID NO: 31519 - RNA, 21 nt, RNAi
uucugcagaaccuucgguaca

SEQ ID NO: 31520 - DNA, 21 bp, Homo sapiens
cagtttcttcacgaacacaag

SEQ ID NO: 31521 - RNA, 21 nt, RNAi
guuucuucacgaacacaaguu

SEQ ID NO: 31522 - RNA, 21 nt, RNAi
uucaaagaagugcuuguguuc

SEQ ID NO: 31523 - DNA, 21 bp, Homo sapiens
cacgaacacaagatcgtctac

SEQ ID NO: 31524 - RNA, 21 nt, RNAi
cgaacacaagaucgucuacuu

SEQ ID NO: 31525 - RNA, 21 nt, RNAi
uugcuuguguucuagcagaug

SEQ ID NO: 31526 - DNA, 21 bp, Homo sapiens
gacatcatccgcatgcaactc

SEQ ID NO: 31527 - RNA, 21 nt, RNAi
caucauccgcaugcaacucuu

SEQ ID NO: 31528 - RNA, 21 nt, RNAi
uuguaguaggcguacguugag

SEQ ID NO: 31529 - DNA, 21 bp, Homo sapiens
gaaggtgctcctctccgaatt

SEQ ID NO: 31530 - RNA, 21 nt, RNAi
aggugcuccucuccgaauuuu

SEQ ID NO: 31531 - RNA, 21 nt, RNAi
uuuccacgaggagaggcuuaa

SEQ ID NO: 31532 - DNA, 21 bp, Homo sapiens
gatgtgtgagaagcggatatt

SEQ ID NO: 31533 - RNA, 21 nt, RNAi
ugugugagaagcggauauuuu

SEQ ID NO: 31534 - RNA, 21 nt, RNAi
uuacacacucuucgccuauaa

SEQ ID NO: 31535 - DNA, 21 bp, Homo sapiens
gaacacaagatcgtctacagg

SEQ ID NO: 31536 - RNA, 21 nt, RNAi
acacaagaucgucuacagguu

SEQ ID NO: 31537 - RNA, 21 nt, RNAi
uuuguguucuagcagaugucc

SEQ ID NO: 31538 - DNA, 21 bp, Homo sapiens
gatctagcgagagagatgcag

SEQ ID NO: 31539 - RNA, 21 nt, RNAi
ucuagcgagagagaugcaguu

SEQ ID NO: 31540 - RNA, 21 nt, RNAi
uuagaucgcucucucuacguc

SEQ ID NO: 31541 - DNA, 21 bp, Homo sapiens
aatgcgtcctgagcagcagcc

SEQ ID NO: 31542 - RNA, 21 nt, RNAi
ugcguccugagcagcagccuu

SEQ ID NO: 31543 - RNA, 21 nt, RNAi
uuacgcaggacucgucgucgg

SEQ ID NO: 31544 - DNA, 21 bp, Homo sapiens
aagtcactcaacagtattgaa

SEQ ID NO: 31545 - RNA, 21 nt, RNAi
gucacucaacaguauugaauu

SEQ ID NO: 31546 - RNA, 21 nt, RNAi
uucagugaguugucauaacuu

SEQ ID NO: 31547 - DNA, 21 bp, Homo sapiens
aatttcgtgaatgtagagaag

SEQ ID NO: 31548 - RNA, 21 nt, RNAi
uuucgugaauguagagaaguu

SEQ ID NO: 31549 - RNA, 21 nt, RNAi
uuaaagcacuuacaucucuuc

SEQ ID NO: 31550 - DNA, 21 bp, Homo sapiens
aagatcgcaccttactctgtt

SEQ ID NO: 31551 - RNA, 21 nt, RNAi
gaucgcaccuuacucuguuuu

SEQ ID NO: 31552 - RNA, 21 nt, RNAi
uucuagcguggaaugagacaa

SEQ ID NO: 31553 - DNA, 21 bp, Homo sapiens
aattaagaacacttgtaccag

SEQ ID NO: 31554 - RNA, 21 nt, RNAi
uuaagaacacuuguaccaguu

SEQ ID NO: 31555 - RNA, 21 nt, RNAi
uuaauucuugugaacaugguc

SEQ ID NO: 31556 - DNA, 21 bp, Homo sapiens
aagaacacttgtaccagtgtt

SEQ ID NO: 31557 - RNA, 21 nt, RNAi
gaacacuuguaccaguguuuu

SEQ ID NO: 31558 - RNA, 21 nt, RNAi
uucuugugaacauggucacaa

SEQ ID NO: 31559 - DNA, 21 bp, Homo sapiens
aacacttgtaccagtgtttat

SEQ ID NO: 31560 - RNA, 21 nt, RNAi
cacuuguaccaguguuuauuu

SEQ ID NO: 31561 - RNA, 21 nt, RNAi
uugugaacauggucacaaaua

SEQ ID NO: 31562 - DNA, 21 bp, Homo sapiens
aaagatagagctgctaaatgt

SEQ ID NO: 31563 - RNA, 21 nt, RNAi
agauagagcugcuaaauguuu

SEQ ID NO: 31564 - RNA, 21 nt, RNAi
uuucuaucucgacgauuuaca

SEQ ID NO: 31565 - DNA, 21 bp, Homo sapiens
aagatagagctgctaaatgta

SEQ ID NO: 31566 - RNA, 21 nt, RNAi
gauagagcugcuaaauguauu

SEQ ID NO: 31567 - RNA, 21 nt, RNAi
uucuaucucgacgauuuacau

SEQ ID NO: 31568 - DNA, 21 bp, Homo sapiens
aagttctagactcatggatga

SEQ ID NO: 31569 - RNA, 21 nt, RNAi
guucuagacucauggaugauu

SEQ ID NO: 31570 - RNA, 21 nt, RNAi
uucaagaucugaguaccuacu

SEQ ID NO: 31571 - DNA, 21 bp, Homo sapiens
aaattctatggagaacttgca

SEQ ID NO: 31572 - RNA, 21 nt, RNAi
auucuauggagaacuugcauu

SEQ ID NO: 31573 - RNA, 21 nt, RNAi
uuuaagauaccucuugaacgu

SEQ ID NO: 31574 - DNA, 21 bp, Homo sapiens
aattctatggagaacttgcat

SEQ ID NO: 31575 - RNA, 21 nt, RNAi
uucuauggagaacuugcauuu

SEQ ID NO: 31576 - RNA, 21 nt, RNAi
uuaagauaccucuugaacgua

SEQ ID NO: 31577 - DNA, 21 bp, Homo sapiens
aaagtatatgagctcctagga

SEQ ID NO: 31578 - RNA, 21 nt, RNAi
aguauaugagcuccuaggauu

SEQ ID NO: 31579 - RNA, 21 nt, RNAi
uuucauauacucgaggauccu

SEQ ID NO: 31580 - DNA, 21 bp, Homo sapiens
aagtatatgagctcctaggat

SEQ ID NO: 31581 - RNA, 21 nt, RNAi
guauaugagcuccuaggauuu

SEQ ID NO: 31582 - RNA, 21 nt, RNAi
uucauauacucgaggauccua

SEQ ID NO: 31583 - DNA, 21 bp, Homo sapiens
aagttcatcctagtgagatga

SEQ ID NO: 31584 - RNA, 21 nt, RNAi
guucauccuagugagaugauu

SEQ ID NO: 31585 - RNA, 21 nt, RNAi
uucaaguaggaucacucuacu

SEQ ID NO: 31586 - DNA, 21 bp, Homo sapiens
aaactacctgttctggcagga

SEQ ID NO: 31587 - RNA, 21 nt, RNAi
acuaccuguucuggcaggauu

SEQ ID NO: 31588 - RNA, 21 nt, RNAi
uuugauggacaagaccguccu

SEQ ID NO: 31589 - DNA, 21 bp, Homo sapiens
aactacctgttctggcaggat

SEQ ID NO: 31590 - RNA, 21 nt, RNAi
cuaccuguucuggcaggauuu

SEQ ID NO: 31591 - RNA, 21 nt, RNAi
uugauggacaagaccguccua

SEQ ID NO: 31592 - DNA, 21 bp, Homo sapiens
aacttcactaagtccatggaa

SEQ ID NO: 31593 - RNA, 21 nt, RNAi
cuucacuaaguccauggaauu

SEQ ID NO: 31594 - RNA, 21 nt, RNAi
uugaagugauucagguaccuu

SEQ ID NO: 31595 - DNA, 21 bp, Homo sapiens
aaaggcaattcgtcctcagat

SEQ ID NO: 31596 - RNA, 21 nt, RNAi
aggcaauucguccucagauuu

SEQ ID NO: 31597 - RNA, 21 nt, RNAi
uuuccguuaagcaggagucua

SEQ ID NO: 31598 - DNA, 21 bp, Homo sapiens
aaggcaattcgtcctcagatt

SEQ ID NO: 31599 - RNA, 21 nt, RNAi
ggcaauucguccucagauuuu

SEQ ID NO: 31600 - RNA, 21 nt, RNAi
uuccguuaagcaggagucuaa

SEQ ID NO: 31601 - DNA, 21 bp, Homo sapiens
aattcgtcctcagattgatct

SEQ ID NO: 31602 - RNA, 21 nt, RNAi
uucguccucagauugaucuuu

SEQ ID NO: 31603 - RNA, 21 nt, RNAi
uuaagcaggagucuaacuaga

SEQ ID NO: 31604 - DNA, 21 bp, Homo sapiens
aactacgtgtctctatttgaa

SEQ ID NO: 31605 - RNA, 21 nt, RNAi
cuacgugucucuauuugaauu

SEQ ID NO: 31606 - RNA, 21 nt, RNAi
uugaugcacagagauaaacuu

SEQ ID NO: 31607 - DNA, 21 bp, Homo sapiens
aagtcttgttaaagtggtgtg

SEQ ID NO: 31608 - RNA, 21 nt, RNAi
gucuuguuaaagugguguguu

SEQ ID NO: 31609 - RNA, 21 nt, RNAi
uucagaacaauuucaccacac

SEQ ID NO: 31610 - DNA, 21 bp, Homo sapiens
aatcctttctgaaacaggttt

SEQ ID NO: 31611 - RNA, 21 nt, RNAi
uccuuucugaaacagguuuuu

SEQ ID NO: 31612 - RNA, 21 nt, RNAi
uuaggaaagacuuuguccaaa

SEQ ID NO: 31613 - DNA, 21 bp, Homo sapiens
aaacaggtttctaatatggtg

SEQ ID NO: 31614 - RNA, 21 nt, RNAi
acagguuucuaauaugguguu

SEQ ID NO: 31615 - RNA, 21 nt, RNAi
uuuguccaaagauuauaccac

SEQ ID NO: 31616 - DNA, 21 bp, Homo sapiens
aacaggtttctaatatggtgg

SEQ ID NO: 31617 - RNA, 21 nt, RNAi
cagguuucuaauauggugguu

SEQ ID NO: 31618 - RNA, 21 nt, RNAi
uuguccaaagauuauaccacc

SEQ ID NO: 31619 - DNA, 21 bp, Homo sapiens
aaactgcagtactttatggag

SEQ ID NO: 31620 - RNA, 21 nt, RNAi
acugcaguacuuuauggaguu

SEQ ID NO: 31621 - RNA, 21 nt, RNAi
uuugacgucaugaaauaccuc

SEQ ID NO: 31622 - DNA, 21 bp, Homo sapiens
aactgcagtactttatggagc

SEQ ID NO: 31623 - RNA, 21 nt, RNAi
cugcaguacuuuauggagcuu

SEQ ID NO: 31624 - RNA, 21 nt, RNAi
uugacgucaugaaauaccucg

SEQ ID NO: 31625 - DNA, 21 bp, Homo sapiens
aatcatcagaaatgtggattc

SEQ ID NO: 31626 - RNA, 21 nt, RNAi
ucaucagaaauguggauucuu

SEQ ID NO: 31627 - RNA, 21 nt, RNAi
uuaguagucuuuacaccuaag

SEQ ID NO: 31628 - DNA, 21 bp, Homo sapiens
aaatgtggattcgaacaacaa

SEQ ID NO: 31629 - RNA, 21 nt, RNAi
auguggauucgaacaacaauu

SEQ ID NO: 31630 - RNA, 21 nt, RNAi
uuuacaccuaagcuuguuguu

SEQ ID NO: 31631 - DNA, 21 bp, Homo sapiens
aatgtggattcgaacaacaag

SEQ ID NO: 31632 - RNA, 21 nt, RNAi
uguggauucgaacaacaaguu

SEQ ID NO: 31633 - RNA, 21 nt, RNAi
uuacaccuaagcuuguuguuc

SEQ ID NO: 31634 - DNA, 21 bp, Homo sapiens
aacaaggagttatctattgct

SEQ ID NO: 31635 - RNA, 21 nt, RNAi
caaggaguuaucuauugcuuu

SEQ ID NO: 31636 - RNA, 21 nt, RNAi
uuguuccucaauagauaacga

SEQ ID NO: 31637 - DNA, 21 bp, Homo sapiens
aaggagttatctattgctatc

SEQ ID NO: 31638 - RNA, 21 nt, RNAi
ggaguuaucuauugcuaucuu

SEQ ID NO: 31639 - RNA, 21 nt, RNAi
uuccucaauagauaacgauag

SEQ ID NO: 31640 - DNA, 21 bp, Homo sapiens
aaagatgttgacttcatgtac

SEQ ID NO: 31641 - RNA, 21 nt, RNAi
agauguugacuucauguacuu

SEQ ID NO: 31642 - RNA, 21 nt, RNAi
uuucuacaacugaaguacaug

SEQ ID NO: 31643 - DNA, 21 bp, Homo sapiens
aagatgttgacttcatgtacg

SEQ ID NO: 31644 - RNA, 21 nt, RNAi
gauguugacuucauguacguu

SEQ ID NO: 31645 - RNA, 21 nt, RNAi
uucuacaacugaaguacaugc

SEQ ID NO: 31646 - DNA, 21 bp, Homo sapiens
aagcttcctccagtctgttgc

SEQ ID NO: 31647 - RNA, 21 nt, RNAi
gcuuccuccagucuguugcuu

SEQ ID NO: 31648 - RNA, 21 nt, RNAi
uucgaaggaggucagacaacg

SEQ ID NO: 31649 - DNA, 21 bp, Homo sapiens
aagcgtcttgctgtaccttga

SEQ ID NO: 31650 - RNA, 21 nt, RNAi
gcgucuugcuguaccuugauu

SEQ ID NO: 31651 - RNA, 21 nt, RNAi
uucgcagaacgacauggaacu

SEQ ID NO: 31652 - DNA, 21 bp, Homo sapiens
aaatgcagctggtgtgttgca

SEQ ID NO: 31653 - RNA, 21 nt, RNAi
augcagcugguguguugcauu

SEQ ID NO: 31654 - RNA, 21 nt, RNAi
uuuacgucgaccacacaacgu

SEQ ID NO: 31655 - DNA, 21 bp, Homo sapiens
aatgcagctggtgtgttgcag

SEQ ID NO: 31656 - RNA, 21 nt, RNAi
ugcagcugguguguugcaguu

SEQ ID NO: 31657 - RNA, 21 nt, RNAi
uuacgucgaccacacaacguc

SEQ ID NO: 31658 - DNA, 21 bp, Homo sapiens
aaggtgttcctagctttggca

SEQ ID NO: 31659 - RNA, 21 nt, RNAi
gguguuccuagcuuuggcauu

SEQ ID NO: 31660 - RNA, 21 nt, RNAi
uuccacaaggaucgaaaccgu

SEQ ID NO: 31661 - DNA, 21 bp, Homo sapiens
aattgcattagtactgtggtg

SEQ ID NO: 31662 - RNA, 21 nt, RNAi
uugcauuaguacugugguguu

SEQ ID NO: 31663 - RNA, 21 nt, RNAi
uuaacguaaucaugacaccac

SEQ ID NO: 31664 - DNA, 21 bp, Homo sapiens
aatatgttctaaaccagtggt

SEQ ID NO: 31665 - RNA, 21 nt, RNAi
uauguucuaaaccagugguuu

SEQ ID NO: 31666 - RNA, 21 nt, RNAi
uuauacaagauuuggucacca

SEQ ID NO: 31667 - DNA, 21 bp, Homo sapiens
aaaccagtggtccttccaaag

SEQ ID NO: 31668 - RNA, 21 nt, RNAi
accagugguccuuccaaaguu

SEQ ID NO: 31669 - RNA, 21 nt, RNAi
uuuggucaccaggaagguuuc

SEQ ID NO: 31670 - DNA, 21 bp, Homo sapiens
aaccagtggtccttccaaagg

SEQ ID NO: 31671 - RNA, 21 nt, RNAi
ccagugguccuuccaaagguu

SEQ ID NO: 31672 - RNA, 21 nt, RNAi
uuggucaccaggaagguuucc

SEQ ID NO: 31673 - DNA, 21 bp, Homo sapiens
aatctgaagaccaccgtgctt

SEQ ID NO: 31674 - RNA, 21 nt, RNAi
ucugaagaccaccgugcuuuu

SEQ ID NO: 31675 - RNA, 21 nt, RNAi
uuagacuucugguggcacgaa

SEQ ID NO: 31676 - DNA, 21 bp, Homo sapiens
aagtcagaactggcaaatgga

SEQ ID NO: 31677 - RNA, 21 nt, RNAi
gucagaacuggcaaauggauu

SEQ ID NO: 31678 - RNA, 21 nt, RNAi
uucagucuugaccguuuaccu

SEQ ID NO: 31679 - DNA, 21 bp, Homo sapiens
aactggcaaatggaaggtgcc

SEQ ID NO: 31680 - RNA, 21 nt, RNAi
cuggcaaauggaaggugccuu

SEQ ID NO: 31681 - RNA, 21 nt, RNAi
uugaccguuuaccuuccacgg

SEQ ID NO: 31682 - DNA, 21 bp, Homo sapiens
aaagactacgtggatctcttc

SEQ ID NO: 31683 - RNA, 21 nt, RNAi
agacuacguggaucucuucuu

SEQ ID NO: 31684 - RNA, 21 nt, RNAi
uuucugaugcaccuagagaag

SEQ ID NO: 31685 - DNA, 21 bp, Homo sapiens
aagactacgtggatctcttca

SEQ ID NO: 31686 - RNA, 21 nt, RNAi
gacuacguggaucucuucauu

SEQ ID NO: 31687 - RNA, 21 nt, RNAi
uucugaugcaccuagagaagu

SEQ ID NO: 31688 - DNA, 21 bp, Homo sapiens
aattcctccagtgaaagtctg

SEQ ID NO: 31689 - RNA, 21 nt, RNAi
uuccuccagugaaagucuguu

SEQ ID NO: 31690 - RNA, 21 nt, RNAi
uuaaggaggucacuuucagac

SEQ ID NO: 31691 - DNA, 21 bp, Homo sapiens
aacaagagaatggagatgagg

SEQ ID NO: 31692 - RNA, 21 nt, RNAi
caagagaauggagaugagguu

SEQ ID NO: 31693 - RNA, 21 nt, RNAi
uuguucucuuaccucuacucc

SEQ ID NO: 31694 - DNA, 21 bp, Homo sapiens
aagagaatggagatgaggcgc

SEQ ID NO: 31695 - RNA, 21 nt, RNAi
gagaauggagaugaggcgcuu

SEQ ID NO: 31696 - RNA, 21 nt, RNAi
uucucuuaccucuacuccgcg

SEQ ID NO: 31697 - DNA, 21 bp, Homo sapiens
aatggagatgaggcgcctggt

SEQ ID NO: 31698 - RNA, 21 nt, RNAi
uggagaugaggcgccugguuu

SEQ ID NO: 31699 - RNA, 21 nt, RNAi
uuaccucuacuccgcggacca

SEQ ID NO: 31700 - DNA, 21 bp, Homo sapiens
aacttcagatccagcggctaa

SEQ ID NO: 31701 - RNA, 21 nt, RNAi
cuucagauccagcggcuaauu

SEQ ID NO: 31702 - RNA, 21 nt, RNAi
uugaagucuaggucgccgauu

SEQ ID NO: 31703 - DNA, 21 bp, Homo sapiens
aacttgcatccagctaaacct

SEQ ID NO: 31704 - RNA, 21 nt, RNAi
cuugcauccagcuaaaccuuu

SEQ ID NO: 31705 - RNA, 21 nt, RNAi
uugaacguaggucgauuugga

SEQ ID NO: 31706 - DNA, 21 bp, Homo sapiens
aaagagtctgaaacactctcc

SEQ ID NO: 31707 - RNA, 21 nt, RNAi
agagucugaaacacucuccuu

SEQ ID NO: 31708 - RNA, 21 nt, RNAi
uuucucagacuuugugagagg

SEQ ID NO: 31709 - DNA, 21 bp, Homo sapiens
aagagtctgaaacactctcct

SEQ ID NO: 31710 - RNA, 21 nt, RNAi
gagucugaaacacucuccuuu

SEQ ID NO: 31711 - RNA, 21 nt, RNAi
uucucagacuuugugagagga

SEQ ID NO: 31712 - DNA, 21 bp, Homo sapiens
aaatttggcaaagaggtggca

SEQ ID NO: 31713 - RNA, 21 nt, RNAi
auuuggcaaagagguggcauu

SEQ ID NO: 31714 - RNA, 21 nt, RNAi
uuuaaaccguuucuccaccgu

SEQ ID NO: 31715 - DNA, 21 bp, Homo sapiens
aatttggcaaagaggtggcag

SEQ ID NO: 31716 - RNA, 21 nt, RNAi
uuuggcaaagagguggcaguu

SEQ ID NO: 31717 - RNA, 21 nt, RNAi
uuaaaccguuucuccaccguc

SEQ ID NO: 31718 - DNA, 21 bp, Homo sapiens
aaatgaagcagtacaaagatg

SEQ ID NO: 31719 - RNA, 21 nt, RNAi
augaagcaguacaaagauguu

SEQ ID NO: 31720 - RNA, 21 nt, RNAi
uuuacuucgucauguuucuac

SEQ ID NO: 31721 - DNA, 21 bp, Homo sapiens
aatgaagcagtacaaagatga

SEQ ID NO: 31722 - RNA, 21 nt, RNAi
ugaagcaguacaaagaugauu

SEQ ID NO: 31723 - RNA, 21 nt, RNAi
uuacuucgucauguuucuacu

SEQ ID NO: 31724 - DNA, 21 bp, Homo sapiens
aagcagtacaaagatgaactt

SEQ ID NO: 31725 - RNA, 21 nt, RNAi
gcaguacaaagaugaacuuuu

SEQ ID NO: 31726 - RNA, 21 nt, RNAi
uucgucauguuucuacuugaa

SEQ ID NO: 31727 - DNA, 21 bp, Homo sapiens
aacatcattgaactcgatgtt

SEQ ID NO: 31728 - RNA, 21 nt, RNAi
caucauugaacucgauguuuu

SEQ ID NO: 31729 - RNA, 21 nt, RNAi
uuguaguaacuugagcuacaa

SEQ ID NO: 31730 - DNA, 21 bp, Homo sapiens
aactcgatgttagagcctacg

SEQ ID NO: 31731 - RNA, 21 nt, RNAi
cucgauguuagagccuacguu

SEQ ID NO: 31732 - RNA, 21 nt, RNAi
uugagcuacaaucucggaugc

SEQ ID NO: 31733 - DNA, 21 bp, Homo sapiens
aagtaggcctgaatgctctag

SEQ ID NO: 31734 - RNA, 21 nt, RNAi
guaggccugaaugcucuaguu

SEQ ID NO: 31735 - RNA, 21 nt, RNAi
uucauccggacuuacgagauc

SEQ ID NO: 31736 - DNA, 21 bp, Homo sapiens
aatgctctagaagaatggtca

SEQ ID NO: 31737 - RNA, 21 nt, RNAi
ugcucuagaagaauggucauu

SEQ ID NO: 31738 - RNA, 21 nt, RNAi
uuacgagaucuucuuaccagu

SEQ ID NO: 31739 - DNA, 21 bp, Homo sapiens
aatgcagccttattacaaaga

SEQ ID NO: 31740 - RNA, 21 nt, RNAi
ugcagccuuauuacaaagauu

SEQ ID NO: 31741 - RNA, 21 nt, RNAi
uuacgucggaauaauguuucu

SEQ ID NO: 31742 - DNA, 21 bp, Homo sapiens
aagacttcagccttgtcagat

SEQ ID NO: 31743 - RNA, 21 nt, RNAi
gacuucagccuugucagauuu

SEQ ID NO: 31744 - RNA, 21 nt, RNAi
uucugaagucggaacagucua

SEQ ID NO: 31745 - DNA, 21 bp, Homo sapiens
aaagtggtgttaaagcatctg

SEQ ID NO: 31746 - RNA, 21 nt, RNAi
agugguguuaaagcaucuguu

SEQ ID NO: 31747 - RNA, 21 nt, RNAi
uuucaccacaauuucguagac

SEQ ID NO: 31748 - DNA, 21 bp, Homo sapiens
aagtggtgttaaagcatctga

SEQ ID NO: 31749 - RNA, 21 nt, RNAi
gugguguuaaagcaucugauu

SEQ ID NO: 31750 - RNA, 21 nt, RNAi
uucaccacaauuucguagacu

SEQ ID NO: 31751 - DNA, 21 bp, Homo sapiens
aaagcatctgaagaagacaaa

SEQ ID NO: 31752 - RNA, 21 nt, RNAi
agcaucugaagaagacaaauu

SEQ ID NO: 31753 - RNA, 21 nt, RNAi
uuucguagacuucuucuguuu

SEQ ID NO: 31754 - DNA, 21 bp, Homo sapiens
aagcatctgaagaagacaaag

SEQ ID NO: 31755 - RNA, 21 nt, RNAi
gcaucugaagaagacaaaguu

SEQ ID NO: 31756 - RNA, 21 nt, RNAi
uucguagacuucuucuguuuc

SEQ ID NO: 31757 - DNA, 21 bp, Homo sapiens
aagaagacaaagaacctttca

SEQ ID NO: 31758 - RNA, 21 nt, RNAi
gaagacaaagaaccuuucauu

SEQ ID NO: 31759 - RNA, 21 nt, RNAi
uucuucuguuucuuggaaagu

SEQ ID NO: 31760 - DNA, 21 bp, Homo sapiens
aagacaaagaacctttcatca

SEQ ID NO: 31761 - RNA, 21 nt, RNAi
gacaaagaaccuuucaucauu

SEQ ID NO: 31762 - RNA, 21 nt, RNAi
uucuguuucuuggaaaguagu

SEQ ID NO: 31763 - DNA, 21 bp, Homo sapiens
aaagaacctttcatcaaacga

SEQ ID NO: 31764 - RNA, 21 nt, RNAi
agaaccuuucaucaaacgauu

SEQ ID NO: 31765 - RNA, 21 nt, RNAi
uuucuuggaaaguaguuugcu

SEQ ID NO: 31766 - DNA, 21 bp, Homo sapiens
aagaacctttcatcaaacgaa

SEQ ID NO: 31767 - RNA, 21 nt, RNAi
gaaccuuucaucaaacgaauu

SEQ ID NO: 31768 - RNA, 21 nt, RNAi
uucuuggaaaguaguuugcuu

SEQ ID NO: 31769 - DNA, 21 bp, Homo sapiens
aacctttcatcaaacgaagca

SEQ ID NO: 31770 - RNA, 21 nt, RNAi
ccuuucaucaaacgaagcauu

SEQ ID NO: 31771 - RNA, 21 nt, RNAi
uuggaaaguaguuugcuucgu

SEQ ID NO: 31772 - DNA, 21 bp, Homo sapiens
aaacgaagcaatatccttaga

SEQ ID NO: 31773 - RNA, 21 nt, RNAi
acgaagcaauauccuuagauu

SEQ ID NO: 31774 - RNA, 21 nt, RNAi
uuugcuucguuauaggaaucu

SEQ ID NO: 31775 - DNA, 21 bp, Homo sapiens
aacgaagcaatatccttagaa

SEQ ID NO: 31776 - RNA, 21 nt, RNAi
cgaagcaauauccuuagaauu

SEQ ID NO: 31777 - RNA, 21 nt, RNAi
uugcuucguuauaggaaucuu

SEQ ID NO: 31778 - DNA, 21 bp, Homo sapiens
aaatgcttggatctctaggag

SEQ ID NO: 31779 - RNA, 21 nt, RNAi
augcuuggaucucuaggaguu

SEQ ID NO: 31780 - RNA, 21 nt, RNAi
uuuacgaaccuagagauccuc

SEQ ID NO: 31781 - DNA, 21 bp, Homo sapiens
aatgcttggatctctaggagg

SEQ ID NO: 31782 - RNA, 21 nt, RNAi
ugcuuggaucucuaggagguu

SEQ ID NO: 31783 - RNA, 21 nt, RNAi
uuacgaaccuagagauccucc

SEQ ID NO: 31784 - DNA, 21 bp, Homo sapiens
aaatcttctgacagtcacgtc

SEQ ID NO: 31785 - RNA, 21 nt, RNAi
aucuucugacagucacgucuu

SEQ ID NO: 31786 - RNA, 21 nt, RNAi
uuuagaagacugucagugcag

SEQ ID NO: 31787 - DNA, 21 bp, Homo sapiens
aatcttctgacagtcacgtcc

SEQ ID NO: 31788 - RNA, 21 nt, RNAi
ucuucugacagucacguccuu

SEQ ID NO: 31789 - RNA, 21 nt, RNAi
uuagaagacugucagugcagg

SEQ ID NO: 31790 - DNA, 21 bp, Homo sapiens
aagcggctgagctttgcagtg

SEQ ID NO: 31791 - RNA, 21 nt, RNAi
gcggcugagcuuugcaguguu

SEQ ID NO: 31792 - RNA, 21 nt, RNAi
uucgccgacucgaaacgucac

SEQ ID NO: 31793 - DNA, 21 bp, Homo sapiens
aattagcgctcacagccagtg

SEQ ID NO: 31794 - RNA, 21 nt, RNAi
uuagcgcucacagccaguguu

SEQ ID NO: 31795 - RNA, 21 nt, RNAi
uuaaucgcgagugucggucac

SEQ ID NO: 31796 - DNA, 21 bp, Homo sapiens
aaactaaagttgcagcctgtg

SEQ ID NO: 31797 - RNA, 21 nt, RNAi
acuaaaguugcagccuguguu

SEQ ID NO: 31798 - RNA, 21 nt, RNAi
uuugauuucaacgucggacac

SEQ ID NO: 31799 - DNA, 21 bp, Homo sapiens
aactaaagttgcagcctgtga

SEQ ID NO: 31800 - RNA, 21 nt, RNAi
cuaaaguugcagccugugauu

SEQ ID NO: 31801 - RNA, 21 nt, RNAi
uugauuucaacgucggacacu

SEQ ID NO: 31802 - DNA, 21 bp, Homo sapiens
aaagttgcagcctgtgaactt

SEQ ID NO: 31803 - RNA, 21 nt, RNAi
aguugcagccugugaacuuuu

SEQ ID NO: 31804 - RNA, 21 nt, RNAi
uuucaacgucggacacuugaa

SEQ ID NO: 31805 - DNA, 21 bp, Homo sapiens
aagttgcagcctgtgaacttt

SEQ ID NO: 31806 - RNA, 21 nt, RNAi
guugcagccugugaacuuuuu

SEQ ID NO: 31807 - RNA, 21 nt, RNAi
uucaacgucggacacuugaaa

SEQ ID NO: 31808 - DNA, 21 bp, Homo sapiens
aaagccacgcagatgccagaa

SEQ ID NO: 31809 - RNA, 21 nt, RNAi
agccacgcagaugccagaauu

SEQ ID NO: 31810 - RNA, 21 nt, RNAi
uuucggugcgucuacggucuu

SEQ ID NO: 31811 - DNA, 21 bp, Homo sapiens
aagccacgcagatgccagaag

SEQ ID NO: 31812 - RNA, 21 nt, RNAi
gccacgcagaugccagaaguu

SEQ ID NO: 31813 - RNA, 21 nt, RNAi
uucggugcgucuacggucuuc

SEQ ID NO: 31814 - DNA, 21 bp, Homo sapiens
aagcggacgtttcctgtgctg

SEQ ID NO: 31815 - RNA, 21 nt, RNAi
gcggacguuuccugugcuguu

SEQ ID NO: 31816 - RNA, 21 nt, RNAi
uucgccugcaaaggacacgac

SEQ ID NO: 31817 - DNA, 21 bp, Homo sapiens
aaggcaactgtatgagccact

SEQ ID NO: 31818 - RNA, 21 nt, RNAi
ggcaacuguaugagccacuuu

SEQ ID NO: 31819 - RNA, 21 nt, RNAi
uuccguugacauacucgguga

SEQ ID NO: 31820 - DNA, 21 bp, Homo sapiens
aactgtatgagccactagtta

SEQ ID NO: 31821 - RNA, 21 nt, RNAi
cuguaugagccacuaguuauu

SEQ ID NO: 31822 - RNA, 21 nt, RNAi
uugacauacucggugaucaau

SEQ ID NO: 31823 - DNA, 21 bp, Homo sapiens
aatttgaaagtcaggatactg

SEQ ID NO: 31824 - RNA, 21 nt, RNAi
uuugaaagucaggauacuguu

SEQ ID NO: 31825 - RNA, 21 nt, RNAi
uuaaacuuucaguccuaugac

SEQ ID NO: 31826 - DNA, 21 bp, Homo sapiens
aaagtcaggatactgttgcct

SEQ ID NO: 31827 - RNA, 21 nt, RNAi
agucaggauacuguugccuuu

SEQ ID NO: 31828 - RNA, 21 nt, RNAi
uuucaguccuaugacaacgga

SEQ ID NO: 31829 - DNA, 21 bp, Homo sapiens
aagtcaggatactgttgcctt

SEQ ID NO: 31830 - RNA, 21 nt, RNAi
gucaggauacuguugccuuuu

SEQ ID NO: 31831 - RNA, 21 nt, RNAi
uucaguccuaugacaacggaa

SEQ ID NO: 31832 - DNA, 21 bp, Homo sapiens
aagctatattggatggaattg

SEQ ID NO: 31833 - RNA, 21 nt, RNAi
gcuauauuggauggaauuguu

SEQ ID NO: 31834 - RNA, 21 nt, RNAi
uucgauauaaccuaccuuaac

SEQ ID NO: 31835 - DNA, 21 bp, Homo sapiens
aagcaaataacaccacagcag

SEQ ID NO: 31836 - RNA, 21 nt, RNAi
gcaaauaacaccacagcaguu

SEQ ID NO: 31837 - RNA, 21 nt, RNAi
uucguuuauuguggugucguc

SEQ ID NO: 31838 - DNA, 21 bp, Homo sapiens
aaataacaccacagcagcagg

SEQ ID NO: 31839 - RNA, 21 nt, RNAi
auaacaccacagcagcagguu

SEQ ID NO: 31840 - RNA, 21 nt, RNAi
uuuauuguggugucgucgucc

SEQ ID NO: 31841 - DNA, 21 bp, Homo sapiens
aataacaccacagcagcagga

SEQ ID NO: 31842 - RNA, 21 nt, RNAi
uaacaccacagcagcaggauu

SEQ ID NO: 31843 - RNA, 21 nt, RNAi
uuauuguggugucgucguccu

SEQ ID NO: 31844 - DNA, 21 bp, Homo sapiens
aacaccacagcagcaggagaa

SEQ ID NO: 31845 - RNA, 21 nt, RNAi
caccacagcagcaggagaauu

SEQ ID NO: 31846 - RNA, 21 nt, RNAi
uuguggugucgucguccucuu

SEQ ID NO: 31847 - DNA, 21 bp, Homo sapiens
aagagtccagtaaacaccaaa

SEQ ID NO: 31848 - RNA, 21 nt, RNAi
gaguccaguaaacaccaaauu

SEQ ID NO: 31849 - RNA, 21 nt, RNAi
uucucaggucauuugugguuu

SEQ ID NO: 31850 - DNA, 21 bp, Homo sapiens
aagcgactttatagccttgcg

SEQ ID NO: 31851 - RNA, 21 nt, RNAi
gcgacuuuauagccuugcguu

SEQ ID NO: 31852 - RNA, 21 nt, RNAi
uucgcugaaauaucggaacgc

SEQ ID NO: 31853 - DNA, 21 bp, Homo sapiens
aagaagagtctctggtggaac

SEQ ID NO: 31854 - RNA, 21 nt, RNAi
gaagagucucugguggaacuu

SEQ ID NO: 31855 - RNA, 21 nt, RNAi
uucuucucagagaccaccuug

SEQ ID NO: 31856 - DNA, 21 bp, Homo sapiens
aagagtctctggtggaacagt

SEQ ID NO: 31857 - RNA, 21 nt, RNAi
gagucucugguggaacaguuu

SEQ ID NO: 31858 - RNA, 21 nt, RNAi
uucucagagaccaccuuguca

SEQ ID NO: 31859 - DNA, 21 bp, Homo sapiens
aacagtttgtgtttgaagcct

SEQ ID NO: 31860 - RNA, 21 nt, RNAi
caguuuguguuugaagccuuu

SEQ ID NO: 31861 - RNA, 21 nt, RNAi
uugucaaacacaaacuucgga

SEQ ID NO: 31862 - DNA, 21 bp, Homo sapiens
aagccttggtgatatacatgg

SEQ ID NO: 31863 - RNA, 21 nt, RNAi
gccuuggugauauacaugguu

SEQ ID NO: 31864 - RNA, 21 nt, RNAi
uucggaaccacuauauguacc

SEQ ID NO: 31865 - DNA, 21 bp, Homo sapiens
aagtccttaggtacaattcaa

SEQ ID NO: 31866 - RNA, 21 nt, RNAi
guccuuagguacaauucaauu

SEQ ID NO: 31867 - RNA, 21 nt, RNAi
uucaggaauccauguuaaguu

SEQ ID NO: 31868 - DNA, 21 bp, Homo sapiens
aattcaacagtgttgtgatgc

SEQ ID NO: 31869 - RNA, 21 nt, RNAi
uucaacaguguugugaugcuu

SEQ ID NO: 31870 - RNA, 21 nt, RNAi
uuaaguugucacaacacuacg

SEQ ID NO: 31871 - DNA, 21 bp, Homo sapiens
aacagtgttgtgatgccattg

SEQ ID NO: 31872 - RNA, 21 nt, RNAi
caguguugugaugccauuguu

SEQ ID NO: 31873 - RNA, 21 nt, RNAi
uugucacaacacuacgguaac

SEQ ID NO: 31874 - DNA, 21 bp, Homo sapiens
aaataaagcaaagaaacgacg

SEQ ID NO: 31875 - RNA, 21 nt, RNAi
auaaagcaaagaaacgacguu

SEQ ID NO: 31876 - RNA, 21 nt, RNAi
uuuauuucguuucuuugcugc

SEQ ID NO: 31877 - DNA, 21 bp, Homo sapiens
aataaagcaaagaaacgacgt

SEQ ID NO: 31878 - RNA, 21 nt, RNAi
uaaagcaaagaaacgacguuu

SEQ ID NO: 31879 - RNA, 21 nt, RNAi
uuauuucguuucuuugcugca

SEQ ID NO: 31880 - DNA, 21 bp, Homo sapiens
aaagcaaagaaacgacgtttg

SEQ ID NO: 31881 - RNA, 21 nt, RNAi
agcaaagaaacgacguuuguu

SEQ ID NO: 31882 - RNA, 21 nt, RNAi
uuucguuucuuugcugcaaac

SEQ ID NO: 31883 - DNA, 21 bp, Homo sapiens
aagcaaagaaacgacgtttgc

SEQ ID NO: 31884 - RNA, 21 nt, RNAi
gcaaagaaacgacguuugcuu

SEQ ID NO: 31885 - RNA, 21 nt, RNAi
uucguuucuuugcugcaaacg

SEQ ID NO: 31886 - DNA, 21 bp, Homo sapiens
aaagaaacgacgtttgccgcg

SEQ ID NO: 31887 - RNA, 21 nt, RNAi
agaaacgacguuugccgcguu

SEQ ID NO: 31888 - RNA, 21 nt, RNAi
uuucuuugcugcaaacggcgc

SEQ ID NO: 31889 - DNA, 21 bp, Homo sapiens
aagaaacgacgtttgccgcga

SEQ ID NO: 31890 - RNA, 21 nt, RNAi
gaaacgacguuugccgcgauu

SEQ ID NO: 31891 - RNA, 21 nt, RNAi
uucuuugcugcaaacggcgcu

SEQ ID NO: 31892 - DNA, 21 bp, Homo sapiens
aaacgacgtttgccgcgagga

SEQ ID NO: 31893 - RNA, 21 nt, RNAi
acgacguuugccgcgaggauu

SEQ ID NO: 31894 - RNA, 21 nt, RNAi
uuugcugcaaacggcgcuccu

SEQ ID NO: 31895 - DNA, 21 bp, Homo sapiens
aacgacgtttgccgcgaggat

SEQ ID NO: 31896 - RNA, 21 nt, RNAi
cgacguuugccgcgaggauuu

SEQ ID NO: 31897 - RNA, 21 nt, RNAi
uugcugcaaacggcgcuccua

SEQ ID NO: 31898 - DNA, 21 bp, Homo sapiens
aatgtcgacacaaatccattg

SEQ ID NO: 31899 - RNA, 21 nt, RNAi
ugucgacacaaauccauuguu

SEQ ID NO: 31900 - RNA, 21 nt, RNAi
uuacagcuguguuuagguaac

SEQ ID NO: 31901 - DNA, 21 bp, Homo sapiens
aaattcgttcctttattgcca

SEQ ID NO: 31902 - RNA, 21 nt, RNAi
auucguuccuuuauugccauu

SEQ ID NO: 31903 - RNA, 21 nt, RNAi
uuuaagcaaggaaauaacggu

SEQ ID NO: 31904 - DNA, 21 bp, Homo sapiens
aattcgttcctttattgccag

SEQ ID NO: 31905 - RNA, 21 nt, RNAi
uucguuccuuuauugccaguu

SEQ ID NO: 31906 - RNA, 21 nt, RNAi
uuaagcaaggaaauaacgguc

SEQ ID NO: 31907 - DNA, 21 bp, Homo sapiens
aatttgtggctgaaagatgtt

SEQ ID NO: 31908 - RNA, 21 nt, RNAi
uuuguggcugaaagauguuuu

SEQ ID NO: 31909 - RNA, 21 nt, RNAi
uuaaacaccgacuuucuacaa

SEQ ID NO: 31910 - DNA, 21 bp, Homo sapiens
aaagatgttctcaaggaagaa

SEQ ID NO: 31911 - RNA, 21 nt, RNAi
agauguucucaaggaagaauu

SEQ ID NO: 31912 - RNA, 21 nt, RNAi
uuucuacaagaguuccuucuu

SEQ ID NO: 31913 - DNA, 21 bp, Homo sapiens
aagatgttctcaaggaagaag

SEQ ID NO: 31914 - RNA, 21 nt, RNAi
gauguucucaaggaagaaguu

SEQ ID NO: 31915 - RNA, 21 nt, RNAi
uucuacaagaguuccuucuuc

SEQ ID NO: 31916 - DNA, 21 bp, Homo sapiens
aacacgttcattggcgagaga

SEQ ID NO: 31917 - RNA, 21 nt, RNAi
cacguucauuggcgagagauu

SEQ ID NO: 31918 - RNA, 21 nt, RNAi
uugugcaaguaaccgcucucu

SEQ ID NO: 31919 - DNA, 21 bp, Homo sapiens
aactgtaggagcgctccaggt

SEQ ID NO: 31920 - RNA, 21 nt, RNAi
cuguaggagcgcuccagguuu

SEQ ID NO: 31921 - RNA, 21 nt, RNAi
uugacauccucgcgaggucca

SEQ ID NO: 31922 - DNA, 21 bp, Homo sapiens
aaagcagtggctttcttctta

SEQ ID NO: 31923 - RNA, 21 nt, RNAi
agcaguggcuuucuucuuauu

SEQ ID NO: 31924 - RNA, 21 nt, RNAi
uuucgucaccgaaagaagaau

SEQ ID NO: 31925 - DNA, 21 bp, Homo sapiens
aagcagtggctttcttcttag

SEQ ID NO: 31926 - RNA, 21 nt, RNAi
gcaguggcuuucuucuuaguu

SEQ ID NO: 31927 - RNA, 21 nt, RNAi
uucgucaccgaaagaagaauc

SEQ ID NO: 31928 - DNA, 21 bp, Homo sapiens
aaagcattgccatgcatgaca

SEQ ID NO: 31929 - RNA, 21 nt, RNAi
agcauugccaugcaugacauu

SEQ ID NO: 31930 - RNA, 21 nt, RNAi
uuucguaacgguacguacugu

SEQ ID NO: 31931 - DNA, 21 bp, Homo sapiens
aagcattgccatgcatgacat

SEQ ID NO: 31932 - RNA, 21 nt, RNAi
gcauugccaugcaugacauuu

SEQ ID NO: 31933 - RNA, 21 nt, RNAi
uucguaacgguacguacugua

SEQ ID NO: 31934 - DNA, 21 bp, Homo sapiens
aaaggtacaactacagcaaat

SEQ ID NO: 31935 - RNA, 21 nt, RNAi
agguacaacuacagcaaauuu

SEQ ID NO: 31936 - RNA, 21 nt, RNAi
uuuccauguugaugucguuua

SEQ ID NO: 31937 - DNA, 21 bp, Homo sapiens
aaggtacaactacagcaaatg

SEQ ID NO: 31938 - RNA, 21 nt, RNAi
gguacaacuacagcaaauguu

SEQ ID NO: 31939 - RNA, 21 nt, RNAi
uuccauguugaugucguuuac

SEQ ID NO: 31940 - DNA, 21 bp, Homo sapiens
aactacagcaaatgcaccgtt

SEQ ID NO: 31941 - RNA, 21 nt, RNAi
cuacagcaaaugcaccguuuu

SEQ ID NO: 31942 - RNA, 21 nt, RNAi
uugaugucguuuacguggcaa

SEQ ID NO: 31943 - DNA, 21 bp, Homo sapiens
aaatgcaccgttgtggtccgg

SEQ ID NO: 31944 - RNA, 21 nt, RNAi
augcaccguugugguccgguu

SEQ ID NO: 31945 - RNA, 21 nt, RNAi
uuuacguggcaacaccaggcc

SEQ ID NO: 31946 - DNA, 21 bp, Homo sapiens
aatgcaccgttgtggtccgga

SEQ ID NO: 31947 - RNA, 21 nt, RNAi
ugcaccguugugguccggauu

SEQ ID NO: 31948 - RNA, 21 nt, RNAi
uuacguggcaacaccaggccu

SEQ ID NO: 31949 - DNA, 21 bp, Homo sapiens
aaggatggaagctcctgaaga

SEQ ID NO: 31950 - RNA, 21 nt, RNAi
ggauggaagcuccugaagauu

SEQ ID NO: 31951 - RNA, 21 nt, RNAi
uuccuaccuucgaggacuucu

SEQ ID NO: 31952 - DNA, 21 bp, Homo sapiens
aagctcctgaagaaggacttg

SEQ ID NO: 31953 - RNA, 21 nt, RNAi
gcuccugaagaaggacuuguu

SEQ ID NO: 31954 - RNA, 21 nt, RNAi
uucgaggacuucuuccugaac

SEQ ID NO: 31955 - DNA, 21 bp, Homo sapiens
aagaaggacttgtgtaataca

SEQ ID NO: 31956 - RNA, 21 nt, RNAi
gaaggacuuguguaauacauu

SEQ ID NO: 31957 - RNA, 21 nt, RNAi
uucuuccugaacacauuaugu

SEQ ID NO: 31958 - DNA, 21 bp, Homo sapiens
aaggacttgtgtaatacacac

SEQ ID NO: 31959 - RNA, 21 nt, RNAi
ggacuuguguaauacacacuu

SEQ ID NO: 31960 - RNA, 21 nt, RNAi
uuccugaacacauuaugugug

SEQ ID NO: 31961 - DNA, 21 bp, Homo sapiens
aatacacacctgatgagagtc

SEQ ID NO: 31962 - RNA, 21 nt, RNAi
uacacaccugaugagagucuu

SEQ ID NO: 31963 - RNA, 21 nt, RNAi
uuauguguggacuacucucag

SEQ ID NO: 31964 - DNA, 21 bp, Homo sapiens
aagcataggtttcaacatcgg

SEQ ID NO: 31965 - RNA, 21 nt, RNAi
gcauagguuucaacaucgguu

SEQ ID NO: 31966 - RNA, 21 nt, RNAi
uucguauccaaaguuguagcc

SEQ ID NO: 31967 - DNA, 21 bp, Homo sapiens
aacatcggagacgtccaggtt

SEQ ID NO: 31968 - RNA, 21 nt, RNAi
caucggagacguccagguuuu

SEQ ID NO: 31969 - RNA, 21 nt, RNAi
uuguagccucugcagguccaa

SEQ ID NO: 31970 - DNA, 21 bp, Homo sapiens
aatctgatgaaagctctaaag

SEQ ID NO: 31971 - RNA, 21 nt, RNAi
ucugaugaaagcucuaaaguu

SEQ ID NO: 31972 - RNA, 21 nt, RNAi
uuagacuacuuucgagauuuc

SEQ ID NO: 31973 - DNA, 21 bp, Homo sapiens
aaataacagcacagagcattg

SEQ ID NO: 31974 - RNA, 21 nt, RNAi
auaacagcacagagcauuguu

SEQ ID NO: 31975 - RNA, 21 nt, RNAi
uuuauugucgugucucguaac

SEQ ID NO: 31976 - DNA, 21 bp, Homo sapiens
aataacagcacagagcattga

SEQ ID NO: 31977 - RNA, 21 nt, RNAi
uaacagcacagagcauugauu

SEQ ID NO: 31978 - RNA, 21 nt, RNAi
uuauugucgugucucguaacu

SEQ ID NO: 31979 - DNA, 21 bp, Homo sapiens
aacagcacagagcattgagga

SEQ ID NO: 31980 - RNA, 21 nt, RNAi
cagcacagagcauugaggauu

SEQ ID NO: 31981 - RNA, 21 nt, RNAi
uugucgugucucguaacuccu

SEQ ID NO: 31982 - DNA, 21 bp, Homo sapiens
aagtggacaggagcaggctgg

SEQ ID NO: 31983 - RNA, 21 nt, RNAi
guggacaggagcaggcugguu

SEQ ID NO: 31984 - RNA, 21 nt, RNAi
uucaccuguccucguccgacc

SEQ ID NO: 31985 - DNA, 21 bp, Homo sapiens
aatatattaccgtctcagtcc

SEQ ID NO: 31986 - RNA, 21 nt, RNAi
uauauuaccgucucaguccuu

SEQ ID NO: 31987 - RNA, 21 nt, RNAi
uuauauaauggcagagucagg

SEQ ID NO: 31988 - DNA, 21 bp, Homo sapiens
aagcagctggccagcggactt

SEQ ID NO: 31989 - RNA, 21 nt, RNAi
gcagcuggccagcggacuuuu

SEQ ID NO: 31990 - RNA, 21 nt, RNAi
uucgucgaccggucgccugaa

SEQ ID NO: 31991 - DNA, 21 bp, Homo sapiens
aaacgatcaacacggaattat

SEQ ID NO: 31992 - RNA, 21 nt, RNAi
acgaucaacacggaauuauuu

SEQ ID NO: 31993 - RNA, 21 nt, RNAi
uuugcuaguugugccuuaaua

SEQ ID NO: 31994 - DNA, 21 bp, Homo sapiens
aacgatcaacacggaattatt

SEQ ID NO: 31995 - RNA, 21 nt, RNAi
cgaucaacacggaauuauuuu

SEQ ID NO: 31996 - RNA, 21 nt, RNAi
uugcuaguugugccuuaauaa

SEQ ID NO: 31997 - DNA, 21 bp, Homo sapiens
aaatctggatcttgctgtatt

SEQ ID NO: 31998 - RNA, 21 nt, RNAi
aucuggaucuugcuguauuuu

SEQ ID NO: 31999 - RNA, 21 nt, RNAi
uuuagaccuagaacgacauaa

SEQ ID NO: 32000 - DNA, 21 bp, Homo sapiens
aatctggatcttgctgtattg

SEQ ID NO: 32001 - RNA, 21 nt, RNAi
ucuggaucuugcuguauuguu

SEQ ID NO: 32002 - RNA, 21 nt, RNAi
uuagaccuagaacgacauaac

SEQ ID NO: 32003 - DNA, 21 bp, Homo sapiens
aacggcatgttagaccagagc

SEQ ID NO: 32004 - RNA, 21 nt, RNAi
cggcauguuagaccagagcuu

SEQ ID NO: 32005 - RNA, 21 nt, RNAi
uugccguacaaucuggucucg

SEQ ID NO: 32006 - DNA, 21 bp, Homo sapiens
aaaccagaaacaccaaggact

SEQ ID NO: 32007 - RNA, 21 nt, RNAi
accagaaacaccaaggacuuu

SEQ ID NO: 32008 - RNA, 21 nt, RNAi
uuuggucuuugugguuccuga

SEQ ID NO: 32009 - DNA, 21 bp, Homo sapiens
aaccagaaacaccaaggactg

SEQ ID NO: 32010 - RNA, 21 nt, RNAi
ccagaaacaccaaggacuguu

SEQ ID NO: 32011 - RNA, 21 nt, RNAi
uuggucuuugugguuccugac

SEQ ID NO: 32012 - DNA, 21 bp, Homo sapiens
aaacaccaaggactgaaactt

SEQ ID NO: 32013 - RNA, 21 nt, RNAi
acaccaaggacugaaacuuuu

SEQ ID NO: 32014 - RNA, 21 nt, RNAi
uuugugguuccugacuuugaa

SEQ ID NO: 32015 - DNA, 21 bp, Homo sapiens
aacaccaaggactgaaacttg

SEQ ID NO: 32016 - RNA, 21 nt, RNAi
caccaaggacugaaacuuguu

SEQ ID NO: 32017 - RNA, 21 nt, RNAi
uugugguuccugacuuugaac

SEQ ID NO: 32018 - DNA, 21 bp, Homo sapiens
aaggactgaaacttgcgacta

SEQ ID NO: 32019 - RNA, 21 nt, RNAi
ggacugaaacuugcgacuauu

SEQ ID NO: 32020 - RNA, 21 nt, RNAi
uuccugacuuugaacgcugau

SEQ ID NO: 32021 - DNA, 21 bp, Homo sapiens
aaacttgcgactacaattctg

SEQ ID NO: 32022 - RNA, 21 nt, RNAi
acuugcgacuacaauucuguu

SEQ ID NO: 32023 - RNA, 21 nt, RNAi
uuugaacgcugauguuaagac

SEQ ID NO: 32024 - DNA, 21 bp, Homo sapiens
aacttgcgactacaattctgc

SEQ ID NO: 32025 - RNA, 21 nt, RNAi
cuugcgacuacaauucugcuu

SEQ ID NO: 32026 - RNA, 21 nt, RNAi
uugaacgcugauguuaagacg

SEQ ID NO: 32027 - DNA, 21 bp, Homo sapiens
aattctgcaacactggaagaa

SEQ ID NO: 32028 - RNA, 21 nt, RNAi
uucugcaacacuggaagaauu

SEQ ID NO: 32029 - RNA, 21 nt, RNAi
uuaagacguugugaccuucuu

SEQ ID NO: 32030 - DNA, 21 bp, Homo sapiens
aacactggaagaagtgtgatt

SEQ ID NO: 32031 - RNA, 21 nt, RNAi
cacuggaagaagugugauuuu

SEQ ID NO: 32032 - RNA, 21 nt, RNAi
uugugaccuucuucacacuaa

SEQ ID NO: 32033 - DNA, 21 bp, Homo sapiens
aagaagtgtgattcatggtgg

SEQ ID NO: 32034 - RNA, 21 nt, RNAi
gaagugugauucauggugguu

SEQ ID NO: 32035 - RNA, 21 nt, RNAi
uucuucacacuaaguaccacc

SEQ ID NO: 32036 - DNA, 21 bp, Homo sapiens
aaatggcagtgctggccttac

SEQ ID NO: 32037 - RNA, 21 nt, RNAi
auggcagugcuggccuuacuu

SEQ ID NO: 32038 - RNA, 21 nt, RNAi
uuuaccgucacgaccggaaug

SEQ ID NO: 32039 - DNA, 21 bp, Homo sapiens
aatggcagtgctggccttact

SEQ ID NO: 32040 - RNA, 21 nt, RNAi
uggcagugcuggccuuacuuu

SEQ ID NO: 32041 - RNA, 21 nt, RNAi
uuaccgucacgaccggaauga

SEQ ID NO: 32042 - DNA, 21 bp, Homo sapiens
aatacaagtcatggttcattc

SEQ ID NO: 32043 - RNA, 21 nt, RNAi
uacaagucaugguucauucuu

SEQ ID NO: 32044 - RNA, 21 nt, RNAi
uuauguucaguaccaaguaag

SEQ ID NO: 32045 - DNA, 21 bp, Homo sapiens
aagctggatctacatttaaag

SEQ ID NO: 32046 - RNA, 21 nt, RNAi
gcuggaucuacauuuaaaguu

SEQ ID NO: 32047 - RNA, 21 nt, RNAi
uucgaccuagauguaaauuuc

SEQ ID NO: 32048 - DNA, 21 bp, Homo sapiens
aagctgtcactcttcttccat

SEQ ID NO: 32049 - RNA, 21 nt, RNAi
gcugucacucuucuuccauuu

SEQ ID NO: 32050 - RNA, 21 nt, RNAi
uucgacagugagaagaaggua

SEQ ID NO: 32051 - DNA, 21 bp, Homo sapiens
aacttagacgtgttctggagc

SEQ ID NO: 32052 - RNA, 21 nt, RNAi
cuuagacguguucuggagcuu

SEQ ID NO: 32053 - RNA, 21 nt, RNAi
uugaaucugcacaagaccucg

SEQ ID NO: 32054 - DNA, 21 bp, Homo sapiens
aatttcctccaggaactccgc

SEQ ID NO: 32055 - RNA, 21 nt, RNAi
uuuccuccaggaacuccgcuu

SEQ ID NO: 32056 - RNA, 21 nt, RNAi
uuaaaggagguccuugaggcg

SEQ ID NO: 32057 - DNA, 21 bp, Homo sapiens
aactccgcggttcaataatta

SEQ ID NO: 32058 - RNA, 21 nt, RNAi
cuccgcgguucaauaauuauu

SEQ ID NO: 32059 - RNA, 21 nt, RNAi
uugaggcgccaaguuauuaau

SEQ ID NO: 32060 - DNA, 21 bp, Homo sapiens
aataattatgtggactgcatg

SEQ ID NO: 32061 - RNA, 21 nt, RNAi
uaauuauguggacugcauguu

SEQ ID NO: 32062 - RNA, 21 nt, RNAi
uuauuaauacaccugacguac

SEQ ID NO: 32063 - DNA, 21 bp, Homo sapiens
aattatgtggactgcatgaaa

SEQ ID NO: 32064 - RNA, 21 nt, RNAi
uuauguggacugcaugaaauu

SEQ ID NO: 32065 - RNA, 21 nt, RNAi
uuaauacaccugacguacuuu

SEQ ID NO: 32066 - DNA, 21 bp, Homo sapiens
aaagtttctagatgcattgga

SEQ ID NO: 32067 - RNA, 21 nt, RNAi
aguuucuagaugcauuggauu

SEQ ID NO: 32068 - RNA, 21 nt, RNAi
uuucaaagaucuacguaaccu

SEQ ID NO: 32069 - DNA, 21 bp, Homo sapiens
aagtttctagatgcattggaa

SEQ ID NO: 32070 - RNA, 21 nt, RNAi
guuucuagaugcauuggaauu

SEQ ID NO: 32071 - RNA, 21 nt, RNAi
uucaaagaucuacguaaccuu

SEQ ID NO: 32072 - DNA, 21 bp, Homo sapiens
aacagcagcatgtcatggaag

SEQ ID NO: 32073 - RNA, 21 nt, RNAi
cagcagcaugucauggaaguu

SEQ ID NO: 32074 - RNA, 21 nt, RNAi
uugucgucguacaguaccuuc

SEQ ID NO: 32075 - DNA, 21 bp, Homo sapiens
aatccagtttcaggaggattg

SEQ ID NO: 32076 - RNA, 21 nt, RNAi
uccaguuucaggaggauuguu

SEQ ID NO: 32077 - RNA, 21 nt, RNAi
uuaggucaaaguccuccuaac

SEQ ID NO: 32078 - DNA, 21 bp, Homo sapiens
aagtaggccttctggaaagcg

SEQ ID NO: 32079 - RNA, 21 nt, RNAi
guaggccuucuggaaagcguu

SEQ ID NO: 32080 - RNA, 21 nt, RNAi
uucauccggaagaccuuucgc

SEQ ID NO: 32081 - DNA, 21 bp, Homo sapiens
aaagcgtgtatgaaatgttca

SEQ ID NO: 32082 - RNA, 21 nt, RNAi
agcguguaugaaauguucauu

SEQ ID NO: 32083 - RNA, 21 nt, RNAi
uuucgcacauacuuuacaagu

SEQ ID NO: 32084 - DNA, 21 bp, Homo sapiens
aagcgtgtatgaaatgttcag

SEQ ID NO: 32085 - RNA, 21 nt, RNAi
gcguguaugaaauguucaguu

SEQ ID NO: 32086 - RNA, 21 nt, RNAi
uucgcacauacuuuacaaguc

SEQ ID NO: 32087 - DNA, 21 bp, Homo sapiens
aaatgttcaggaaggatgacc

SEQ ID NO: 32088 - RNA, 21 nt, RNAi
auguucaggaaggaugaccuu

SEQ ID NO: 32089 - RNA, 21 nt, RNAi
uuuacaaguccuuccuacugg

SEQ ID NO: 32090 - DNA, 21 bp, Homo sapiens
aagtttcacacgccagtcctt

SEQ ID NO: 32091 - RNA, 21 nt, RNAi
guuucacacgccaguccuuuu

SEQ ID NO: 32092 - RNA, 21 nt, RNAi
uucaaagugugcggucaggaa

SEQ ID NO: 32093 - DNA, 21 bp, Homo sapiens
aattcttcagcacaattgtgg

SEQ ID NO: 32094 - RNA, 21 nt, RNAi
uucuucagcacaauugugguu

SEQ ID NO: 32095 - RNA, 21 nt, RNAi
uuaagaagucguguuaacacc

SEQ ID NO: 32096 - DNA, 21 bp, Homo sapiens
aattgtggtggatgccattga

SEQ ID NO: 32097 - RNA, 21 nt, RNAi
uugugguggaugccauugauu

SEQ ID NO: 32098 - RNA, 21 nt, RNAi
uuaacaccaccuacgguaacu

SEQ ID NO: 32099 - DNA, 21 bp, Homo sapiens
aagtccaggtttacaaagcta

SEQ ID NO: 32100 - RNA, 21 nt, RNAi
guccagguuuacaaagcuauu

SEQ ID NO: 32101 - RNA, 21 nt, RNAi
uucagguccaaauguuucgau

SEQ ID NO: 32102 - DNA, 21 bp, Homo sapiens
aagattctagacgtgatgtat

SEQ ID NO: 32103 - RNA, 21 nt, RNAi
gauucuagacgugauguauuu

SEQ ID NO: 32104 - RNA, 21 nt, RNAi
uucuaagaucugcacuacaua

SEQ ID NO: 32105 - DNA, 21 bp, Homo sapiens
aaagatgatgttcatgctaag

SEQ ID NO: 32106 - RNA, 21 nt, RNAi
agaugauguucaugcuaaguu

SEQ ID NO: 32107 - RNA, 21 nt, RNAi
uuucuacuacaaguacgauuc

SEQ ID NO: 32108 - DNA, 21 bp, Homo sapiens
aagatgatgttcatgctaagg

SEQ ID NO: 32109 - RNA, 21 nt, RNAi
gaugauguucaugcuaagguu

SEQ ID NO: 32110 - RNA, 21 nt, RNAi
uucuacuacaaguacgauucc

SEQ ID NO: 32111 - DNA, 21 bp, Homo sapiens
aaattgtgctacgatgcattt

SEQ ID NO: 32112 - RNA, 21 nt, RNAi
auugugcuacgaugcauuuuu

SEQ ID NO: 32113 - RNA, 21 nt, RNAi
uuuaacacgaugcuacguaaa

SEQ ID NO: 32114 - DNA, 21 bp, Homo sapiens
aattgtgctacgatgcattta

SEQ ID NO: 32115 - RNA, 21 nt, RNAi
uugugcuacgaugcauuuauu

SEQ ID NO: 32116 - RNA, 21 nt, RNAi
uuaacacgaugcuacguaaau

SEQ ID NO: 32117 - DNA, 21 bp, Homo sapiens
aacatggcaggagagaatcag

SEQ ID NO: 32118 - RNA, 21 nt, RNAi
cauggcaggagagaaucaguu

SEQ ID NO: 32119 - RNA, 21 nt, RNAi
uuguaccguccucucuuaguc

SEQ ID NO: 32120 - DNA, 21 bp, Homo sapiens
aatcagctgctggagaggaga

SEQ ID NO: 32121 - RNA, 21 nt, RNAi
ucagcugcuggagaggagauu

SEQ ID NO: 32122 - RNA, 21 nt, RNAi
uuagucgacgaccucuccucu

SEQ ID NO: 32123 - DNA, 21 bp, Homo sapiens
aagactttaccattgtgcagc

SEQ ID NO: 32124 - RNA, 21 nt, RNAi
gacuuuaccauugugcagcuu

SEQ ID NO: 32125 - RNA, 21 nt, RNAi
uucugaaaugguaacacgucg

SEQ ID NO: 32126 - DNA, 21 bp, Homo sapiens
aactgcgccatatctgtcatc

SEQ ID NO: 32127 - RNA, 21 nt, RNAi
cugcgccauaucugucaucuu

SEQ ID NO: 32128 - RNA, 21 nt, RNAi
uugacgcgguauagacaguag

SEQ ID NO: 32129 - DNA, 21 bp, Homo sapiens
aaatctgatcgacctgaagcg

SEQ ID NO: 32130 - RNA, 21 nt, RNAi
aucugaucgaccugaagcguu

SEQ ID NO: 32131 - RNA, 21 nt, RNAi
uuuagacuagcuggacuucgc

SEQ ID NO: 32132 - DNA, 21 bp, Homo sapiens
aatctgatcgacctgaagcgc

SEQ ID NO: 32133 - RNA, 21 nt, RNAi
ucugaucgaccugaagcgcuu

SEQ ID NO: 32134 - RNA, 21 nt, RNAi
uuagacuagcuggacuucgcg

SEQ ID NO: 32135 - DNA, 21 bp, Homo sapiens
aagttgaggttcctatggaaa

SEQ ID NO: 32136 - RNA, 21 nt, RNAi
guugagguuccuauggaaauu

SEQ ID NO: 32137 - RNA, 21 nt, RNAi
uucaacuccaaggauaccuuu

SEQ ID NO: 32138 - DNA, 21 bp, Homo sapiens
aaattaggaaagaagccagag

SEQ ID NO: 32139 - RNA, 21 nt, RNAi
auuaggaaagaagccagaguu

SEQ ID NO: 32140 - RNA, 21 nt, RNAi
uuuaauccuuucuucggucuc

SEQ ID NO: 32141 - DNA, 21 bp, Homo sapiens
aattaggaaagaagccagaga

SEQ ID NO: 32142 - RNA, 21 nt, RNAi
uuaggaaagaagccagagauu

SEQ ID NO: 32143 - RNA, 21 nt, RNAi
uuaauccuuucuucggucucu

SEQ ID NO: 32144 - DNA, 21 bp, Homo sapiens
aaagaagccagagaagcagca

SEQ ID NO: 32145 - RNA, 21 nt, RNAi
agaagccagagaagcagcauu

SEQ ID NO: 32146 - RNA, 21 nt, RNAi
uuucuucggucucuucgucgu

SEQ ID NO: 32147 - DNA, 21 bp, Homo sapiens
aagaagccagagaagcagcaa

SEQ ID NO: 32148 - RNA, 21 nt, RNAi
gaagccagagaagcagcaauu

SEQ ID NO: 32149 - RNA, 21 nt, RNAi
uucuucggucucuucgucguu

SEQ ID NO: 32150 - DNA, 21 bp, Homo sapiens
aagccagagaagcagcaaatg

SEQ ID NO: 32151 - RNA, 21 nt, RNAi
gccagagaagcagcaaauguu

SEQ ID NO: 32152 - RNA, 21 nt, RNAi
uucggucucuucgucguuuac

SEQ ID NO: 32153 - DNA, 21 bp, Homo sapiens
aatttgatttctcaaccggag

SEQ ID NO: 32154 - RNA, 21 nt, RNAi
uuugauuucucaaccggaguu

SEQ ID NO: 32155 - RNA, 21 nt, RNAi
uuaaacuaaagaguuggccuc

SEQ ID NO: 32156 - DNA, 21 bp, Homo sapiens
aaccggagttcagagctattc

SEQ ID NO: 32157 - RNA, 21 nt, RNAi
ccggaguucagagcuauucuu

SEQ ID NO: 32158 - RNA, 21 nt, RNAi
uuggccucaagucucgauaag

SEQ ID NO: 32159 - DNA, 21 bp, Homo sapiens
aatcggcatgagtgcatggcg

SEQ ID NO: 32160 - RNA, 21 nt, RNAi
ucggcaugagugcauggcguu

SEQ ID NO: 32161 - RNA, 21 nt, RNAi
uuagccguacucacguaccgc

SEQ ID NO: 32162 - DNA, 21 bp, Homo sapiens
aagcacatgcacagaagcctg

SEQ ID NO: 32163 - RNA, 21 nt, RNAi
gcacaugcacagaagccuguu

SEQ ID NO: 32164 - RNA, 21 nt, RNAi
uucguguacgugucuucggac

SEQ ID NO: 32165 - DNA, 21 bp, Homo sapiens
aaggagaagaggattcagtgc

SEQ ID NO: 32166 - RNA, 21 nt, RNAi
ggagaagaggauucagugcuu

SEQ ID NO: 32167 - RNA, 21 nt, RNAi
uuccucuucuccuaagucacg

SEQ ID NO: 32168 - DNA, 21 bp, Homo sapiens
aagaggattcagtgccaagag

SEQ ID NO: 32169 - RNA, 21 nt, RNAi
gaggauucagugccaagaguu

SEQ ID NO: 32170 - RNA, 21 nt, RNAi
uucuccuaagucacgguucuc

SEQ ID NO: 32171 - DNA, 21 bp, Homo sapiens
aagagatcttccttcttggat

SEQ ID NO: 32172 - RNA, 21 nt, RNAi
gagaucuuccuucuuggauuu

SEQ ID NO: 32173 - RNA, 21 nt, RNAi
uucucuagaaggaagaaccua

SEQ ID NO: 32174 - DNA, 21 bp, Homo sapiens
aaattcctccatggcaaactg

SEQ ID NO: 32175 - RNA, 21 nt, RNAi
auuccuccauggcaaacuguu

SEQ ID NO: 32176 - RNA, 21 nt, RNAi
uuuaaggagguaccguuugac

SEQ ID NO: 32177 - DNA, 21 bp, Homo sapiens
aattcctccatggcaaactgg

SEQ ID NO: 32178 - RNA, 21 nt, RNAi
uuccuccauggcaaacugguu

SEQ ID NO: 32179 - RNA, 21 nt, RNAi
uuaaggagguaccguuugacc

SEQ ID NO: 32180 - DNA, 21 bp, Homo sapiens
aaatatccgtctcttcttagc

SEQ ID NO: 32181 - RNA, 21 nt, RNAi
auauccgucucuucuuagcuu

SEQ ID NO: 32182 - RNA, 21 nt, RNAi
uuuauaggcagagaagaaucg

SEQ ID NO: 32183 - DNA, 21 bp, Homo sapiens
aatatccgtctcttcttagcc

SEQ ID NO: 32184 - RNA, 21 nt, RNAi
uauccgucucuucuuagccuu

SEQ ID NO: 32185 - RNA, 21 nt, RNAi
uuauaggcagagaagaaucgg

SEQ ID NO: 32186 - DNA, 21 bp, Homo sapiens
aatacagaagaggtctttcgc

SEQ ID NO: 32187 - RNA, 21 nt, RNAi
uacagaagaggucuuucgcuu

SEQ ID NO: 32188 - RNA, 21 nt, RNAi
uuaugucuucuccagaaagcg

SEQ ID NO: 32189 - DNA, 21 bp, Homo sapiens
aaacaatggaggagaaggaat

SEQ ID NO: 32190 - RNA, 21 nt, RNAi
acaauggaggagaaggaauuu

SEQ ID NO: 32191 - RNA, 21 nt, RNAi
uuuguuaccuccucuuccuua

SEQ ID NO: 32192 - DNA, 21 bp, Homo sapiens
aacaatggaggagaaggaatt

SEQ ID NO: 32193 - RNA, 21 nt, RNAi
caauggaggagaaggaauuuu

SEQ ID NO: 32194 - RNA, 21 nt, RNAi
uuguuaccuccucuuccuuaa

SEQ ID NO: 32195 - DNA, 21 bp, Homo sapiens
aatggaggagaaggaattcac

SEQ ID NO: 32196 - RNA, 21 nt, RNAi
uggaggagaaggaauucacuu

SEQ ID NO: 32197 - RNA, 21 nt, RNAi
uuaccuccucuuccuuaagug

SEQ ID NO: 32198 - DNA, 21 bp, Homo sapiens
aaggaattcactacatggtgg

SEQ ID NO: 32199 - RNA, 21 nt, RNAi
ggaauucacuacauggugguu

SEQ ID NO: 32200 - RNA, 21 nt, RNAi
uuccuuaagugauguaccacc

SEQ ID NO: 32201 - DNA, 21 bp, Homo sapiens
aattcactacatggtggttga

SEQ ID NO: 32202 - RNA, 21 nt, RNAi
uucacuacauggugguugauu

SEQ ID NO: 32203 - RNA, 21 nt, RNAi
uuaagugauguaccaccaacu

SEQ ID NO: 32204 - DNA, 21 bp, Homo sapiens
aagatgaagtgttagcaaatc

SEQ ID NO: 32205 - RNA, 21 nt, RNAi
gaugaaguguuagcaaaucuu

SEQ ID NO: 32206 - RNA, 21 nt, RNAi
uucuacuucacaaucguuuag

SEQ ID NO: 32207 - DNA, 21 bp, Homo sapiens
aagtgttagcaaatcgattgc

SEQ ID NO: 32208 - RNA, 21 nt, RNAi
guguuagcaaaucgauugcuu

SEQ ID NO: 32209 - RNA, 21 nt, RNAi
uucacaaucguuuagcuaacg

SEQ ID NO: 32210 - DNA, 21 bp, Homo sapiens
aatgaaacatgtctttcatcc

SEQ ID NO: 32211 - RNA, 21 nt, RNAi
ugaaacaugucuuucauccuu

SEQ ID NO: 32212 - RNA, 21 nt, RNAi
uuacuuuguacagaaaguagg

SEQ ID NO: 32213 - DNA, 21 bp, Homo sapiens
aaagagctgtgtttagacaca

SEQ ID NO: 32214 - RNA, 21 nt, RNAi
agagcuguguuuagacacauu

SEQ ID NO: 32215 - RNA, 21 nt, RNAi
uuucucgacacaaaucugugu

SEQ ID NO: 32216 - DNA, 21 bp, Homo sapiens
aagagctgtgtttagacacaa

SEQ ID NO: 32217 - RNA, 21 nt, RNAi
gagcuguguuuagacacaauu

SEQ ID NO: 32218 - RNA, 21 nt, RNAi
uucucgacacaaaucuguguu

SEQ ID NO: 32219 - DNA, 21 bp, Homo sapiens
aattgctaggcatcgtgatgg

SEQ ID NO: 32220 - RNA, 21 nt, RNAi
uugcuaggcaucgugaugguu

SEQ ID NO: 32221 - RNA, 21 nt, RNAi
uuaacgauccguagcacuacc

SEQ ID NO: 32222 - DNA, 21 bp, Homo sapiens
aatacttccaggctttggtga

SEQ ID NO: 32223 - RNA, 21 nt, RNAi
uacuuccaggcuuuggugauu

SEQ ID NO: 32224 - RNA, 21 nt, RNAi
uuaugaagguccgaaaccacu

SEQ ID NO: 32225 - DNA, 21 bp, Homo sapiens
aaagaagtgtatgccgctgca

SEQ ID NO: 32226 - RNA, 21 nt, RNAi
agaaguguaugccgcugcauu

SEQ ID NO: 32227 - RNA, 21 nt, RNAi
uuucuucacauacggcgacgu

SEQ ID NO: 32228 - DNA, 21 bp, Homo sapiens
aagaagtgtatgccgctgcag

SEQ ID NO: 32229 - RNA, 21 nt, RNAi
gaaguguaugccgcugcaguu

SEQ ID NO: 32230 - RNA, 21 nt, RNAi
uucuucacauacggcgacguc

SEQ ID NO: 32231 - DNA, 21 bp, Homo sapiens
aagtgtatgccgctgcagcag

SEQ ID NO: 32232 - RNA, 21 nt, RNAi
guguaugccgcugcagcaguu

SEQ ID NO: 32233 - RNA, 21 nt, RNAi
uucacauacggcgacgucguc

SEQ ID NO: 32234 - DNA, 21 bp, Homo sapiens
aagttctaggacttatacttc

SEQ ID NO: 32235 - RNA, 21 nt, RNAi
guucuaggacuuauacuucuu

SEQ ID NO: 32236 - RNA, 21 nt, RNAi
uucaagauccugaauaugaag

SEQ ID NO: 32237 - DNA, 21 bp, Homo sapiens
aaacatactggaggagtctct

SEQ ID NO: 32238 - RNA, 21 nt, RNAi
acauacuggaggagucucuuu

SEQ ID NO: 32239 - RNA, 21 nt, RNAi
uuuguaugaccuccucagaga

SEQ ID NO: 32240 - DNA, 21 bp, Homo sapiens
aacatactggaggagtctctg

SEQ ID NO: 32241 - RNA, 21 nt, RNAi
cauacuggaggagucucuguu

SEQ ID NO: 32242 - RNA, 21 nt, RNAi
uuguaugaccuccucagagac

SEQ ID NO: 32243 - DNA, 21 bp, Homo sapiens
aactggttgcgaaacaattga

SEQ ID NO: 32244 - RNA, 21 nt, RNAi
cugguugcgaaacaauugauu

SEQ ID NO: 32245 - RNA, 21 nt, RNAi
uugaccaacgcuuuguuaacu

SEQ ID NO: 32246 - DNA, 21 bp, Homo sapiens
aaacaattgaagcaacatcag

SEQ ID NO: 32247 - RNA, 21 nt, RNAi
acaauugaagcaacaucaguu

SEQ ID NO: 32248 - RNA, 21 nt, RNAi
uuuguuaacuucguuguaguc

SEQ ID NO: 32249 - DNA, 21 bp, Homo sapiens
aacaattgaagcaacatcaga

SEQ ID NO: 32250 - RNA, 21 nt, RNAi
caauugaagcaacaucagauu

SEQ ID NO: 32251 - RNA, 21 nt, RNAi
uuguuaacuucguuguagucu

SEQ ID NO: 32252 - DNA, 21 bp, Homo sapiens
aagcaacatcagaatactatg

SEQ ID NO: 32253 - RNA, 21 nt, RNAi
gcaacaucagaauacuauguu

SEQ ID NO: 32254 - RNA, 21 nt, RNAi
uucguuguagucuuaugauac

SEQ ID NO: 32255 - DNA, 21 bp, Homo sapiens
aacatcagaatactatggagg

SEQ ID NO: 32256 - RNA, 21 nt, RNAi
caucagaauacuauggagguu

SEQ ID NO: 32257 - RNA, 21 nt, RNAi
uuguagucuuaugauaccucc

SEQ ID NO: 32258 - DNA, 21 bp, Homo sapiens
aatactatggaggacaagttt

SEQ ID NO: 32259 - RNA, 21 nt, RNAi
uacuauggaggacaaguuuuu

SEQ ID NO: 32260 - RNA, 21 nt, RNAi
uuaugauaccuccuguucaaa

SEQ ID NO: 32261 - DNA, 21 bp, Homo sapiens
aagtttattgtgtgcttgaac

SEQ ID NO: 32262 - RNA, 21 nt, RNAi
guuuauugugugcuugaacuu

SEQ ID NO: 32263 - RNA, 21 nt, RNAi
uucaaauaacacacgaacuug

SEQ ID NO: 32264 - DNA, 21 bp, Homo sapiens
aacaaagtgaccaagagcttc

SEQ ID NO: 32265 - RNA, 21 nt, RNAi
caaagugaccaagagcuucuu

SEQ ID NO: 32266 - RNA, 21 nt, RNAi
uuguuucacugguucucgaag

SEQ ID NO: 32267 - DNA, 21 bp, Homo sapiens
aatgctgtgttctttctgctg

SEQ ID NO: 32268 - RNA, 21 nt, RNAi
ugcuguguucuuucugcuguu

SEQ ID NO: 32269 - RNA, 21 nt, RNAi
uuacgacacaagaaagacgac

SEQ ID NO: 32270 - DNA, 21 bp, Homo sapiens
aaacactctgtctggaggtgg

SEQ ID NO: 32271 - RNA, 21 nt, RNAi
acacucugucuggaggugguu

SEQ ID NO: 32272 - RNA, 21 nt, RNAi
uuugugagacagaccuccacc

SEQ ID NO: 32273 - DNA, 21 bp, Homo sapiens
aacactctgtctggaggtggt

SEQ ID NO: 32274 - RNA, 21 nt, RNAi
cacucugucuggaggugguuu

SEQ ID NO: 32275 - RNA, 21 nt, RNAi
uugugagacagaccuccacca

SEQ ID NO: 32276 - DNA, 21 bp, Homo sapiens
aatgacagagctgtacttcca

SEQ ID NO: 32277 - RNA, 21 nt, RNAi
ugacagagcuguacuuccauu

SEQ ID NO: 32278 - RNA, 21 nt, RNAi
uuacugucucgacaugaaggu

SEQ ID NO: 32279 - DNA, 21 bp, Homo sapiens
aaagagcaaggacttcgttca

SEQ ID NO: 32280 - RNA, 21 nt, RNAi
agagcaaggacuucguucauu

SEQ ID NO: 32281 - RNA, 21 nt, RNAi
uuucucguuccugaagcaagu

SEQ ID NO: 32282 - DNA, 21 bp, Homo sapiens
aagagcaaggacttcgttcaa

SEQ ID NO: 32283 - RNA, 21 nt, RNAi
gagcaaggacuucguucaauu

SEQ ID NO: 32284 - RNA, 21 nt, RNAi
uucucguuccugaagcaaguu

SEQ ID NO: 32285 - DNA, 21 bp, Homo sapiens
aaggacttcgttcaagtcatg

SEQ ID NO: 32286 - RNA, 21 nt, RNAi
ggacuucguucaagucauguu

SEQ ID NO: 32287 - RNA, 21 nt, RNAi
uuccugaagcaaguucaguac

SEQ ID NO: 32288 - DNA, 21 bp, Homo sapiens
aagtcatgagacatagagatg

SEQ ID NO: 32289 - RNA, 21 nt, RNAi
gucaugagacauagagauguu

SEQ ID NO: 32290 - RNA, 21 nt, RNAi
uucaguacucuguaucucuac

SEQ ID NO: 32291 - DNA, 21 bp, Homo sapiens
aaaccagtagaactccgagaa

SEQ ID NO: 32292 - RNA, 21 nt, RNAi
accaguagaacuccgagaauu

SEQ ID NO: 32293 - RNA, 21 nt, RNAi
uuuggucaucuugaggcucuu

SEQ ID NO: 32294 - DNA, 21 bp, Homo sapiens
aaccagtagaactccgagaac

SEQ ID NO: 32295 - RNA, 21 nt, RNAi
ccaguagaacuccgagaacuu

SEQ ID NO: 32296 - RNA, 21 nt, RNAi
uuggucaucuugaggcucuug

SEQ ID NO: 32297 - DNA, 21 bp, Homo sapiens
aactccgagaacttctgaacc

SEQ ID NO: 32298 - RNA, 21 nt, RNAi
cuccgagaacuucugaaccuu

SEQ ID NO: 32299 - RNA, 21 nt, RNAi
uugaggcucuugaagacuugg

SEQ ID NO: 32300 - DNA, 21 bp, Homo sapiens
aattacagagatccagaaagt

SEQ ID NO: 32301 - RNA, 21 nt, RNAi
uuacagagauccagaaaguuu

SEQ ID NO: 32302 - RNA, 21 nt, RNAi
uuaaugucucuaggucuuuca

SEQ ID NO: 32303 - DNA, 21 bp, Homo sapiens
aaagtgagacagataatgact

SEQ ID NO: 32304 - RNA, 21 nt, RNAi
agugagacagauaaugacuuu

SEQ ID NO: 32305 - RNA, 21 nt, RNAi
uuucacucugucuauuacuga

SEQ ID NO: 32306 - DNA, 21 bp, Homo sapiens
aagtgagacagataatgactc

SEQ ID NO: 32307 - RNA, 21 nt, RNAi
gugagacagauaaugacucuu

SEQ ID NO: 32308 - RNA, 21 nt, RNAi
uucacucugucuauuacugag

SEQ ID NO: 32309 - DNA, 21 bp, Homo sapiens
aaagatgtgctgattcaagga

SEQ ID NO: 32310 - RNA, 21 nt, RNAi
agaugugcugauucaaggauu

SEQ ID NO: 32311 - RNA, 21 nt, RNAi
uuucuacacgacuaaguuccu

SEQ ID NO: 32312 - DNA, 21 bp, Homo sapiens
aagatgtgctgattcaaggat

SEQ ID NO: 32313 - RNA, 21 nt, RNAi
gaugugcugauucaaggauuu

SEQ ID NO: 32314 - RNA, 21 nt, RNAi
uucuacacgacuaaguuccua

SEQ ID NO: 32315 - DNA, 21 bp, Homo sapiens
aaggattgatcgatgagaacc

SEQ ID NO: 32316 - RNA, 21 nt, RNAi
ggauugaucgaugagaaccuu

SEQ ID NO: 32317 - RNA, 21 nt, RNAi
uuccuaacuagcuacucuugg

SEQ ID NO: 32318 - DNA, 21 bp, Homo sapiens
aaatttctggagccatgaaac

SEQ ID NO: 32319 - RNA, 21 nt, RNAi
auuucuggagccaugaaacuu

SEQ ID NO: 32320 - RNA, 21 nt, RNAi
uuuaaagaccucgguacuuug

SEQ ID NO: 32321 - DNA, 21 bp, Homo sapiens
aatttctggagccatgaaact

SEQ ID NO: 32322 - RNA, 21 nt, RNAi
uuucuggagccaugaaacuuu

SEQ ID NO: 32323 - RNA, 21 nt, RNAi
uuaaagaccucgguacuuuga

SEQ ID NO: 32324 - DNA, 21 bp, Homo sapiens
aactaggttaccttcaaatac

SEQ ID NO: 32325 - RNA, 21 nt, RNAi
cuagguuaccuucaaauacuu

SEQ ID NO: 32326 - RNA, 21 nt, RNAi
uugauccaauggaaguuuaug

SEQ ID NO: 32327 - DNA, 21 bp, Homo sapiens
aaataccttggaccggttgct

SEQ ID NO: 32328 - RNA, 21 nt, RNAi
auaccuuggaccgguugcuuu

SEQ ID NO: 32329 - RNA, 21 nt, RNAi
uuuauggaaccuggccaacga

SEQ ID NO: 32330 - DNA, 21 bp, Homo sapiens
aataccttggaccggttgctg

SEQ ID NO: 32331 - RNA, 21 nt, RNAi
uaccuuggaccgguugcuguu

SEQ ID NO: 32332 - RNA, 21 nt, RNAi
uuauggaaccuggccaacgac

SEQ ID NO: 32333 - DNA, 21 bp, Homo sapiens
aagtactgttctcactccgat

SEQ ID NO: 32334 - RNA, 21 nt, RNAi
guacuguucucacuccgauuu

SEQ ID NO: 32335 - RNA, 21 nt, RNAi
uucaugacaagagugaggcua

SEQ ID NO: 32336 - DNA, 21 bp, Homo sapiens
aagaagctcatttgattggct

SEQ ID NO: 32337 - RNA, 21 nt, RNAi
gaagcucauuugauuggcuuu

SEQ ID NO: 32338 - RNA, 21 nt, RNAi
uucuucgaguaaacuaaccga

SEQ ID NO: 32339 - DNA, 21 bp, Homo sapiens
aagctcatttgattggctgac

SEQ ID NO: 32340 - RNA, 21 nt, RNAi
gcucauuugauuggcugacuu

SEQ ID NO: 32341 - RNA, 21 nt, RNAi
uucgaguaaacuaaccgacug

SEQ ID NO: 32342 - DNA, 21 bp, Homo sapiens
aagaggagtgaaaggttacag

SEQ ID NO: 32343 - RNA, 21 nt, RNAi
gaggagugaaagguuacaguu

SEQ ID NO: 32344 - RNA, 21 nt, RNAi
uucuccucacuuuccaauguc

SEQ ID NO: 32345 - DNA, 21 bp, Homo sapiens
aacaaagtgaaaggtgcggcc

SEQ ID NO: 32346 - RNA, 21 nt, RNAi
caaagugaaaggugcggccuu

SEQ ID NO: 32347 - RNA, 21 nt, RNAi
uuguuucacuuuccacgccgg

SEQ ID NO: 32348 - DNA, 21 bp, Homo sapiens
aagctcagtttgatgtatgcc

SEQ ID NO: 32349 - RNA, 21 nt, RNAi
gcucaguuugauguaugccuu

SEQ ID NO: 32350 - RNA, 21 nt, RNAi
uucgagucaaacuacauacgg

SEQ ID NO: 32351 - DNA, 21 bp, Homo sapiens
aaacgagagaaggaaatcaag

SEQ ID NO: 32352 - RNA, 21 nt, RNAi
acgagagaaggaaaucaaguu

SEQ ID NO: 32353 - RNA, 21 nt, RNAi
uuugcucucuuccuuuaguuc

SEQ ID NO: 32354 - DNA, 21 bp, Homo sapiens
aacgagagaaggaaatcaaga

SEQ ID NO: 32355 - RNA, 21 nt, RNAi
cgagagaaggaaaucaagauu

SEQ ID NO: 32356 - RNA, 21 nt, RNAi
uugcucucuuccuuuaguucu

SEQ ID NO: 32357 - DNA, 21 bp, Homo sapiens
aaggaaatcaagagtgagtta

SEQ ID NO: 32358 - RNA, 21 nt, RNAi
ggaaaucaagagugaguuauu

SEQ ID NO: 32359 - RNA, 21 nt, RNAi
uuccuuuaguucucacucaau

SEQ ID NO: 32360 - DNA, 21 bp, Homo sapiens
aagctaccggcacggagacct

SEQ ID NO: 32361 - RNA, 21 nt, RNAi
gcuaccggcacggagaccuuu

SEQ ID NO: 32362 - RNA, 21 nt, RNAi
uucgauggccgugccucugga

SEQ ID NO: 32363 - DNA, 21 bp, Homo sapiens
aagcacagcagcctcatcacc

SEQ ID NO: 32364 - RNA, 21 nt, RNAi
gcacagcagccucaucaccuu

SEQ ID NO: 32365 - RNA, 21 nt, RNAi
uucgugucgucggaguagugg

SEQ ID NO: 32366 - DNA, 21 bp, Homo sapiens
aaacagctctttagcagcttg

SEQ ID NO: 32367 - RNA, 21 nt, RNAi
acagcucuuuagcagcuuguu

SEQ ID NO: 32368 - RNA, 21 nt, RNAi
uuugucgagaaaucgucgaac

SEQ ID NO: 32369 - DNA, 21 bp, Homo sapiens
aacagctctttagcagcttgt

SEQ ID NO: 32370 - RNA, 21 nt, RNAi
cagcucuuuagcagcuuguuu

SEQ ID NO: 32371 - RNA, 21 nt, RNAi
uugucgagaaaucgucgaaca

SEQ ID NO: 32372 - DNA, 21 bp, Homo sapiens
aaagttgcttcaagacttcaa

SEQ ID NO: 32373 - RNA, 21 nt, RNAi
aguugcuucaagacuucaauu

SEQ ID NO: 32374 - RNA, 21 nt, RNAi
uuucaacgaaguucugaaguu

SEQ ID NO: 32375 - DNA, 21 bp, Homo sapiens
aagttgcttcaagacttcaat

SEQ ID NO: 32376 - RNA, 21 nt, RNAi
guugcuucaagacuucaauuu

SEQ ID NO: 32377 - RNA, 21 nt, RNAi
uucaacgaaguucugaaguua

SEQ ID NO: 32378 - DNA, 21 bp, Homo sapiens
aataccaccttctctttcttt

SEQ ID NO: 32379 - RNA, 21 nt, RNAi
uaccaccuucucuuucuuuuu

SEQ ID NO: 32380 - RNA, 21 nt, RNAi
uuaugguggaagagaaagaaa

SEQ ID NO: 32381 - DNA, 21 bp, Homo sapiens
aagctgtatagatcaattgga

SEQ ID NO: 32382 - RNA, 21 nt, RNAi
gcuguauagaucaauuggauu

SEQ ID NO: 32383 - RNA, 21 nt, RNAi
uucgacauaucuaguuaaccu

SEQ ID NO: 32384 - DNA, 21 bp, Homo sapiens
aattggagaatacgacgtcct

SEQ ID NO: 32385 - RNA, 21 nt, RNAi
uuggagaauacgacguccuuu

SEQ ID NO: 32386 - RNA, 21 nt, RNAi
uuaaccucuuaugcugcagga

SEQ ID NO: 32387 - DNA, 21 bp, Homo sapiens
aacaaagcaaatcactcagag

SEQ ID NO: 32388 - RNA, 21 nt, RNAi
caaagcaaaucacucagaguu

SEQ ID NO: 32389 - RNA, 21 nt, RNAi
uuguuucguuuagugagucuc

SEQ ID NO: 32390 - DNA, 21 bp, Homo sapiens
aaagcaaatcactcagagtgc

SEQ ID NO: 32391 - RNA, 21 nt, RNAi
agcaaaucacucagagugcuu

SEQ ID NO: 32392 - RNA, 21 nt, RNAi
uuucguuuagugagucucacg

SEQ ID NO: 32393 - DNA, 21 bp, Homo sapiens
aagcaaatcactcagagtgca

SEQ ID NO: 32394 - RNA, 21 nt, RNAi
gcaaaucacucagagugcauu

SEQ ID NO: 32395 - RNA, 21 nt, RNAi
uucguuuagugagucucacgu

SEQ ID NO: 32396 - DNA, 21 bp, Homo sapiens
aaatcactcagagtgcattat

SEQ ID NO: 32397 - RNA, 21 nt, RNAi
aucacucagagugcauuauuu

SEQ ID NO: 32398 - RNA, 21 nt, RNAi
uuuagugagucucacguaaua

SEQ ID NO: 32399 - DNA, 21 bp, Homo sapiens
aatcactcagagtgcattatt

SEQ ID NO: 32400 - RNA, 21 nt, RNAi
ucacucagagugcauuauuuu

SEQ ID NO: 32401 - RNA, 21 nt, RNAi
uuagugagucucacguaauaa

SEQ ID NO: 32402 - DNA, 21 bp, Homo sapiens
aagccagaagtgattattctg

SEQ ID NO: 32403 - RNA, 21 nt, RNAi
gccagaagugauuauucuguu

SEQ ID NO: 32404 - RNA, 21 nt, RNAi
uucggucuucacuaauaagac

SEQ ID NO: 32405 - DNA, 21 bp, Homo sapiens
aagtgattattctgaagctgc

SEQ ID NO: 32406 - RNA, 21 nt, RNAi
gugauuauucugaagcugcuu

SEQ ID NO: 32407 - RNA, 21 nt, RNAi
uucacuaauaagacuucgacg

SEQ ID NO: 32408 - DNA, 21 bp, Homo sapiens
aagctgctaagcagtatgatg

SEQ ID NO: 32409 - RNA, 21 nt, RNAi
gcugcuaagcaguaugauguu

SEQ ID NO: 32410 - RNA, 21 nt, RNAi
uucgacgauucgucauacuac

SEQ ID NO: 32411 - DNA, 21 bp, Homo sapiens
aagcagtatgatgaggctctc

SEQ ID NO: 32412 - RNA, 21 nt, RNAi
gcaguaugaugaggcucucuu

SEQ ID NO: 32413 - RNA, 21 nt, RNAi
uucgucauacuacuccgagag

SEQ ID NO: 32414 - DNA, 21 bp, Homo sapiens
aaccaccttgctgagtggaaa

SEQ ID NO: 32415 - RNA, 21 nt, RNAi
ccaccuugcugaguggaaauu

SEQ ID NO: 32416 - RNA, 21 nt, RNAi
uugguggaacgacucaccuuu

SEQ ID NO: 32417 - DNA, 21 bp, Homo sapiens
aatactgttctacagccagta

SEQ ID NO: 32418 - RNA, 21 nt, RNAi
uacuguucuacagccaguauu

SEQ ID NO: 32419 - RNA, 21 nt, RNAi
uuaugacaagaugucggucau

SEQ ID NO: 32420 - DNA, 21 bp, Homo sapiens
aagctgaagctgctgctccag

SEQ ID NO: 32421 - RNA, 21 nt, RNAi
gcugaagcugcugcuccaguu

SEQ ID NO: 32422 - RNA, 21 nt, RNAi
uucgacuucgacgacgagguc

SEQ ID NO: 32423 - DNA, 21 bp, Homo sapiens
aaggcgattctagagcttcat

SEQ ID NO: 32424 - RNA, 21 nt, RNAi
ggcgauucuagagcuucauuu

SEQ ID NO: 32425 - RNA, 21 nt, RNAi
uuccgcuaagaucucgaagua

SEQ ID NO: 32426 - DNA, 21 bp, Homo sapiens
aagagctgagtctgctttacc

SEQ ID NO: 32427 - RNA, 21 nt, RNAi
gagcugagucugcuuuaccuu

SEQ ID NO: 32428 - RNA, 21 nt, RNAi
uucucgacucagacgaaaugg

SEQ ID NO: 32429 - DNA, 21 bp, Homo sapiens
aagatgatgttgacagagcca

SEQ ID NO: 32430 - RNA, 21 nt, RNAi
gaugauguugacagagccauu

SEQ ID NO: 32431 - RNA, 21 nt, RNAi
uucuacuacaacugucucggu

SEQ ID NO: 32432 - DNA, 21 bp, Homo sapiens
aaagtagactcaccaaattgc

SEQ ID NO: 32433 - RNA, 21 nt, RNAi
aguagacucaccaaauugcuu

SEQ ID NO: 32434 - RNA, 21 nt, RNAi
uuucaucugagugguuuaacg

SEQ ID NO: 32435 - DNA, 21 bp, Homo sapiens
aagtagactcaccaaattgca

SEQ ID NO: 32436 - RNA, 21 nt, RNAi
guagacucaccaaauugcauu

SEQ ID NO: 32437 - RNA, 21 nt, RNAi
uucaucugagugguuuaacgu

SEQ ID NO: 32438 - DNA, 21 bp, Homo sapiens
aaattgcagtctgtacaggct

SEQ ID NO: 32439 - RNA, 21 nt, RNAi
auugcagucuguacaggcuuu

SEQ ID NO: 32440 - RNA, 21 nt, RNAi
uuuaacgucagacauguccga

SEQ ID NO: 32441 - DNA, 21 bp, Homo sapiens
aattgcagtctgtacaggctt

SEQ ID NO: 32442 - RNA, 21 nt, RNAi
uugcagucuguacaggcuuuu

SEQ ID NO: 32443 - RNA, 21 nt, RNAi
uuaacgucagacauguccgaa

SEQ ID NO: 32444 - DNA, 21 bp, Homo sapiens
aacagaaattcaggagttcat

SEQ ID NO: 32445 - RNA, 21 nt, RNAi
cagaaauucaggaguucauuu

SEQ ID NO: 32446 - RNA, 21 nt, RNAi
uugucuuuaaguccucaagua

SEQ ID NO: 32447 - DNA, 21 bp, Homo sapiens
aaattcaggagttcatcagct

SEQ ID NO: 32448 - RNA, 21 nt, RNAi
auucaggaguucaucagcuuu

SEQ ID NO: 32449 - RNA, 21 nt, RNAi
uuuaaguccucaaguagucga

SEQ ID NO: 32450 - DNA, 21 bp, Homo sapiens
aattcaggagttcatcagctt

SEQ ID NO: 32451 - RNA, 21 nt, RNAi
uucaggaguucaucagcuuuu

SEQ ID NO: 32452 - RNA, 21 nt, RNAi
uuaaguccucaaguagucgaa

SEQ ID NO: 32453 - DNA, 21 bp, Homo sapiens
aagcaaacaaggcaatttatc

SEQ ID NO: 32454 - RNA, 21 nt, RNAi
gcaaacaaggcaauuuaucuu

SEQ ID NO: 32455 - RNA, 21 nt, RNAi
uucguuuguuccguuaaauag

SEQ ID NO: 32456 - DNA, 21 bp, Homo sapiens
aacaaggcaatttatcatctc

SEQ ID NO: 32457 - RNA, 21 nt, RNAi
caaggcaauuuaucaucucuu

SEQ ID NO: 32458 - RNA, 21 nt, RNAi
uuguuccguuaaauaguagag

SEQ ID NO: 32459 - DNA, 21 bp, Homo sapiens
aaggcaatttatcatctcaag

SEQ ID NO: 32460 - RNA, 21 nt, RNAi
ggcaauuuaucaucucaaguu

SEQ ID NO: 32461 - RNA, 21 nt, RNAi
uuccguuaaauaguagaguuc

SEQ ID NO: 32462 - DNA, 21 bp, Homo sapiens
aagagacttctgaacacctgg

SEQ ID NO: 32463 - RNA, 21 nt, RNAi
gagacuucugaacaccugguu

SEQ ID NO: 32464 - RNA, 21 nt, RNAi
uucucugaagacuuguggacc

SEQ ID NO: 32465 - DNA, 21 bp, Homo sapiens
aacacctggacaaacagatat

SEQ ID NO: 32466 - RNA, 21 nt, RNAi
caccuggacaaacagauauuu

SEQ ID NO: 32467 - RNA, 21 nt, RNAi
uuguggaccuguuugucuaua

SEQ ID NO: 32468 - DNA, 21 bp, Homo sapiens
aaacagatatccagatgctaa

SEQ ID NO: 32469 - RNA, 21 nt, RNAi
acagauauccagaugcuaauu

SEQ ID NO: 32470 - RNA, 21 nt, RNAi
uuugucuauaggucuacgauu

SEQ ID NO: 32471 - DNA, 21 bp, Homo sapiens
aacagatatccagatgctaaa

SEQ ID NO: 32472 - RNA, 21 nt, RNAi
cagauauccagaugcuaaauu

SEQ ID NO: 32473 - RNA, 21 nt, RNAi
uugucuauaggucuacgauuu

SEQ ID NO: 32474 - DNA, 21 bp, Homo sapiens
aaatcgatgtttctttctcag

SEQ ID NO: 32475 - RNA, 21 nt, RNAi
aucgauguuucuuucucaguu

SEQ ID NO: 32476 - RNA, 21 nt, RNAi
uuuagcuacaaagaaagaguc

SEQ ID NO: 32477 - DNA, 21 bp, Homo sapiens
aatcgatgtttctttctcagc

SEQ ID NO: 32478 - RNA, 21 nt, RNAi
ucgauguuucuuucucagcuu

SEQ ID NO: 32479 - RNA, 21 nt, RNAi
uuagcuacaaagaaagagucg

SEQ ID NO: 32480 - DNA, 21 bp, Homo sapiens
aatgtggatcaagatggagac

SEQ ID NO: 32481 - RNA, 21 nt, RNAi
uguggaucaagauggagacuu

SEQ ID NO: 32482 - RNA, 21 nt, RNAi
uuacaccuaguucuaccucug

SEQ ID NO: 32483 - DNA, 21 bp, Homo sapiens
aagtgcaagagcaggaagaag

SEQ ID NO: 32484 - RNA, 21 nt, RNAi
gugcaagagcaggaagaaguu

SEQ ID NO: 32485 - RNA, 21 nt, RNAi
uucacguucucguccuucuuc

SEQ ID NO: 32486 - DNA, 21 bp, Homo sapiens
aagagcaggaagaagatatca

SEQ ID NO: 32487 - RNA, 21 nt, RNAi
gagcaggaagaagauaucauu

SEQ ID NO: 32488 - RNA, 21 nt, RNAi
uucucguccuucuucuauagu

SEQ ID NO: 32489 - DNA, 21 bp, Homo sapiens
aaatgaagatgatagacagtg

SEQ ID NO: 32490 - RNA, 21 nt, RNAi
augaagaugauagacaguguu

SEQ ID NO: 32491 - RNA, 21 nt, RNAi
uuuacuucuacuaucugucac

SEQ ID NO: 32492 - DNA, 21 bp, Homo sapiens
aatgaagatgatagacagtgc

SEQ ID NO: 32493 - RNA, 21 nt, RNAi
ugaagaugauagacagugcuu

SEQ ID NO: 32494 - RNA, 21 nt, RNAi
uuacuucuacuaucugucacg

SEQ ID NO: 32495 - DNA, 21 bp, Homo sapiens
aagcagaacaatttctcactt

SEQ ID NO: 32496 - RNA, 21 nt, RNAi
gcagaacaauuucucacuuuu

SEQ ID NO: 32497 - RNA, 21 nt, RNAi
uucgucuuguuaaagagugaa

SEQ ID NO: 32498 - DNA, 21 bp, Homo sapiens
aacaatttctcacttgctatg

SEQ ID NO: 32499 - RNA, 21 nt, RNAi
caauuucucacuugcuauguu

SEQ ID NO: 32500 - RNA, 21 nt, RNAi
uuguuaaagagugaacgauac

SEQ ID NO: 32501 - DNA, 21 bp, Homo sapiens
aaactactgaaggagctgcat

SEQ ID NO: 32502 - RNA, 21 nt, RNAi
acuacugaaggagcugcauuu

SEQ ID NO: 32503 - RNA, 21 nt, RNAi
uuugaugacuuccucgacgua

SEQ ID NO: 32504 - DNA, 21 bp, Homo sapiens
aactactgaaggagctgcata

SEQ ID NO: 32505 - RNA, 21 nt, RNAi
cuacugaaggagcugcauauu

SEQ ID NO: 32506 - RNA, 21 nt, RNAi
uugaugacuuccucgacguau

SEQ ID NO: 32507 - DNA, 21 bp, Homo sapiens
aaggagctgcataaagagtca

SEQ ID NO: 32508 - RNA, 21 nt, RNAi
ggagcugcauaaagagucauu

SEQ ID NO: 32509 - RNA, 21 nt, RNAi
uuccucgacguauuucucagu

SEQ ID NO: 32510 - DNA, 21 bp, Homo sapiens
aaaccagagacgattggctgg

SEQ ID NO: 32511 - RNA, 21 nt, RNAi
accagagacgauuggcugguu

SEQ ID NO: 32512 - RNA, 21 nt, RNAi
uuuggucucugcuaaccgacc

SEQ ID NO: 32513 - DNA, 21 bp, Homo sapiens
aaccagagacgattggctggt

SEQ ID NO: 32514 - RNA, 21 nt, RNAi
ccagagacgauuggcugguuu

SEQ ID NO: 32515 - RNA, 21 nt, RNAi
uuggucucugcuaaccgacca

SEQ ID NO: 32516 - DNA, 21 bp, Homo sapiens
aaacagtctctttgttggatg

SEQ ID NO: 32517 - RNA, 21 nt, RNAi
acagucucuuuguuggauguu

SEQ ID NO: 32518 - RNA, 21 nt, RNAi
uuugucagagaaacaaccuac

SEQ ID NO: 32519 - DNA, 21 bp, Homo sapiens
aacagtctctttgttggatga

SEQ ID NO: 32520 - RNA, 21 nt, RNAi
cagucucuuuguuggaugauu

SEQ ID NO: 32521 - RNA, 21 nt, RNAi
uugucagagaaacaaccuacu

SEQ ID NO: 32522 - DNA, 21 bp, Homo sapiens
aacaacgtgtcaagctactta

SEQ ID NO: 32523 - RNA, 21 nt, RNAi
caacgugucaagcuacuuauu

SEQ ID NO: 32524 - RNA, 21 nt, RNAi
uuguugcacaguucgaugaau

SEQ ID NO: 32525 - DNA, 21 bp, Homo sapiens
aacgtgtcaagctacttaagc

SEQ ID NO: 32526 - RNA, 21 nt, RNAi
cgugucaagcuacuuaagcuu

SEQ ID NO: 32527 - RNA, 21 nt, RNAi
uugcacaguucgaugaauucg

SEQ ID NO: 32528 - DNA, 21 bp, Homo sapiens
aaatattctggctttccgtga

SEQ ID NO: 32529 - RNA, 21 nt, RNAi
auauucuggcuuuccgugauu

SEQ ID NO: 32530 - RNA, 21 nt, RNAi
uuuauaagaccgaaaggcacu

SEQ ID NO: 32531 - DNA, 21 bp, Homo sapiens
aatattctggctttccgtgac

SEQ ID NO: 32532 - RNA, 21 nt, RNAi
uauucuggcuuuccgugacuu

SEQ ID NO: 32533 - RNA, 21 nt, RNAi
uuauaagaccgaaaggcacug

SEQ ID NO: 32534 - DNA, 21 bp, Homo sapiens
aacttacaggatcatagcgaa

SEQ ID NO: 32535 - RNA, 21 nt, RNAi
cuuacaggaucauagcgaauu

SEQ ID NO: 32536 - RNA, 21 nt, RNAi
uugaauguccuaguaucgcuu

SEQ ID NO: 32537 - DNA, 20 bp, Homo sapiens
aatgctctcagcagtgagcc

SEQ ID NO: 32538 - RNA, 20 nt, RNAi
ugcucucagcagugagccuu

SEQ ID NO: 32539 - RNA, 20 nt, RNAi
uuacgagagucgucacucgg

SEQ ID NO: 32540 - DNA, 21 bp, Homo sapiens
aaatcgaggaggacaaggcta

SEQ ID NO: 32541 - RNA, 21 nt, RNAi
aucgaggaggacaaggcuauu

SEQ ID NO: 32542 - RNA, 21 nt, RNAi
uuuagcuccuccuguuccgau

SEQ ID NO: 32543 - DNA, 21 bp, Homo sapiens
aatcgaggaggacaaggctag

SEQ ID NO: 32544 - RNA, 21 nt, RNAi
ucgaggaggacaaggcuaguu

SEQ ID NO: 32545 - RNA, 21 nt, RNAi
uuagcuccuccuguuccgauc

SEQ ID NO: 32546 - DNA, 20 bp, Homo sapiens
aaggctagaagaatcttaga

SEQ ID NO: 32547 - RNA, 20 nt, RNAi
ggcuagaagaaucuuagauu

SEQ ID NO: 32548 - RNA, 20 nt, RNAi
uuccgaucuucuuagaaucu

SEQ ID NO: 32549 - DNA, 20 bp, Homo sapiens
aagaatcttagagctttctg

SEQ ID NO: 32550 - RNA, 20 nt, RNAi
gaaucuuagagcuuucuguu

SEQ ID NO: 32551 - RNA, 20 nt, RNAi
uucuuagaaucucgaaagac

SEQ ID NO: 32552 - DNA, 20 bp, Homo sapiens
aatcttagagctttctggat

SEQ ID NO: 32553 - RNA, 20 nt, RNAi
ucuuagagcuuucuggauuu

SEQ ID NO: 32554 - RNA, 20 nt, RNAi
uuagaaucucgaaagaccua

SEQ ID NO: 32555 - DNA, 21 bp, Homo sapiens
aacagctgcgcaaggaggaag

SEQ ID NO: 32556 - RNA, 21 nt, RNAi
cagcugcgcaaggaggaaguu

SEQ ID NO: 32557 - RNA, 21 nt, RNAi
uugucgacgcguuccuccuuc

SEQ ID NO: 32558 - DNA, 21 bp, Homo sapiens
aaggaggaagagaatgcatca

SEQ ID NO: 32559 - RNA, 21 nt, RNAi
ggaggaagagaaugcaucauu

SEQ ID NO: 32560 - RNA, 21 nt, RNAi
uuccuccuucucuuacguagu

SEQ ID NO: 32561 - DNA, 21 bp, Homo sapiens
aagagaatgcatcagttattg

SEQ ID NO: 32562 - RNA, 21 nt, RNAi
gagaaugcaucaguuauuguu

SEQ ID NO: 32563 - RNA, 21 nt, RNAi
uucucuuacguagucaauaac

SEQ ID NO: 32564 - DNA, 20 bp, Homo sapiens
aactgcaggcgtatccagca

SEQ ID NO: 32565 - RNA, 20 nt, RNAi
cugcaggcguauccagcauu

SEQ ID NO: 32566 - RNA, 20 nt, RNAi
uugacguccgcauaggucgu

SEQ ID NO: 32567 - DNA, 20 bp, Homo sapiens
aaattccaatgaagccagat

SEQ ID NO: 32568 - RNA, 20 nt, RNAi
auuccaaugaagccagauuu

SEQ ID NO: 32569 - RNA, 20 nt, RNAi
uuuaagguuacuucggucua

SEQ ID NO: 32570 - DNA, 20 bp, Homo sapiens
aattccaatgaagccagatt

SEQ ID NO: 32571 - RNA, 20 nt, RNAi
uuccaaugaagccagauuuu

SEQ ID NO: 32572 - RNA, 20 nt, RNAi
uuaagguuacuucggucuaa

SEQ ID NO: 32573 - DNA, 20 bp, Homo sapiens
aatgaagccagattgaagtt

SEQ ID NO: 32574 - RNA, 20 nt, RNAi
ugaagccagauugaaguuuu

SEQ ID NO: 32575 - RNA, 20 nt, RNAi
uuacuucggucuaacuucaa

SEQ ID NO: 32576 - DNA, 20 bp, Homo sapiens
aagccagattgaagtttcct

SEQ ID NO: 32577 - RNA, 20 nt, RNAi
gccagauugaaguuuccuuu

SEQ ID NO: 32578 - RNA, 20 nt, RNAi
uucggucuaacuucaaagga

SEQ ID NO: 32579 - DNA, 21 bp, Homo sapiens
aagtttcctagattacttcag

SEQ ID NO: 32580 - RNA, 21 nt, RNAi
guuuccuagauuacuucaguu

SEQ ID NO: 32581 - RNA, 21 nt, RNAi
uucaaaggaucuaaugaaguc

SEQ ID NO: 32582 - DNA, 21 bp, Homo sapiens
aacggtatccagaggagactt

SEQ ID NO: 32583 - RNA, 21 nt, RNAi
cgguauccagaggagacuuuu

SEQ ID NO: 32584 - RNA, 21 nt, RNAi
uugccauaggucuccucugaa

SEQ ID NO: 32585 - DNA, 21 bp, Homo sapiens
aaagaccaagccgttgctgtt

SEQ ID NO: 32586 - RNA, 21 nt, RNAi
agaccaagccguugcuguuuu

SEQ ID NO: 32587 - RNA, 21 nt, RNAi
uuucugguucggcaacgacaa

SEQ ID NO: 32588 - DNA, 21 bp, Homo sapiens
aagaccaagccgttgctgttc

SEQ ID NO: 32589 - RNA, 21 nt, RNAi
gaccaagccguugcuguucuu

SEQ ID NO: 32590 - RNA, 21 nt, RNAi
uucugguucggcaacgacaag

SEQ ID NO: 32591 - DNA, 21 bp, Homo sapiens
aagccgttgctgttcagcact

SEQ ID NO: 32592 - RNA, 21 nt, RNAi
gccguugcuguucagcacuuu

SEQ ID NO: 32593 - RNA, 21 nt, RNAi
uucggcaacgacaagucguga

SEQ ID NO: 32594 - DNA, 20 bp, Homo sapiens
aagcagcgaaagctattcct

SEQ ID NO: 32595 - RNA, 20 nt, RNAi
gcagcgaaagcuauuccuuu

SEQ ID NO: 32596 - RNA, 20 nt, RNAi
uucgucgcuuucgauaagga

SEQ ID NO: 32597 - DNA, 20 bp, Homo sapiens
aaagctattccttcaaggat

SEQ ID NO: 32598 - RNA, 20 nt, RNAi
agcuauuccuucaaggauuu

SEQ ID NO: 32599 - RNA, 20 nt, RNAi
uuucgauaaggaaguuccua

SEQ ID NO: 32600 - DNA, 20 bp, Homo sapiens
aagctattccttcaaggata

SEQ ID NO: 32601 - RNA, 20 nt, RNAi
gcuauuccuucaaggauauu

SEQ ID NO: 32602 - RNA, 20 nt, RNAi
uucgauaaggaaguuccuau

SEQ ID NO: 32603 - DNA, 21 bp, Homo sapiens
aaggatacttctactggtcat

SEQ ID NO: 32604 - RNA, 21 nt, RNAi
ggauacuucuacuggucauuu

SEQ ID NO: 32605 - RNA, 21 nt, RNAi
uuccuaugaagaugaccagua

SEQ ID NO: 32606 - DNA, 21 bp, Homo sapiens
aagaataaggagtttgtggca

SEQ ID NO: 32607 - RNA, 21 nt, RNAi
gaauaaggaguuuguggcauu

SEQ ID NO: 32608 - RNA, 21 nt, RNAi
uucuuauuccucaaacaccgu

SEQ ID NO: 32609 - DNA, 21 bp, Homo sapiens
aataaggagtttgtggcaagg

SEQ ID NO: 32610 - RNA, 21 nt, RNAi
uaaggaguuuguggcaagguu

SEQ ID NO: 32611 - RNA, 21 nt, RNAi
uuauuccucaaacaccguucc

SEQ ID NO: 32612 - DNA, 21 bp, Homo sapiens
aaggagtttgtggcaaggatt

SEQ ID NO: 32613 - RNA, 21 nt, RNAi
ggaguuuguggcaaggauuuu

SEQ ID NO: 32614 - RNA, 21 nt, RNAi
uuccucaaacaccguuccuaa

SEQ ID NO: 32615 - DNA, 20 bp, Homo sapiens
aaagtaagttggatcaagga

SEQ ID NO: 32616 - RNA, 20 nt, RNAi
aguaaguuggaucaaggauu

SEQ ID NO: 32617 - RNA, 20 nt, RNAi
uuucauucaaccuaguuccu

SEQ ID NO: 32618 - DNA, 20 bp, Homo sapiens
aagtaagttggatcaaggag

SEQ ID NO: 32619 - RNA, 20 nt, RNAi
guaaguuggaucaaggaguu

SEQ ID NO: 32620 - RNA, 20 nt, RNAi
uucauucaaccuaguuccuc

SEQ ID NO: 32621 - DNA, 21 bp, Homo sapiens
aagttggatcaaggaggagtg

SEQ ID NO: 32622 - RNA, 21 nt, RNAi
guuggaucaaggaggaguguu

SEQ ID NO: 32623 - RNA, 21 nt, RNAi
uucaaccuaguuccuccucac

SEQ ID NO: 32624 - DNA, 21 bp, Homo sapiens
aaggaggagtgattcaagatt

SEQ ID NO: 32625 - RNA, 21 nt, RNAi
ggaggagugauucaagauuuu

SEQ ID NO: 32626 - RNA, 21 nt, RNAi
uuccuccucacuaaguucuaa

SEQ ID NO: 32627 - DNA, 21 bp, Homo sapiens
aatgccttagatcagctctct

SEQ ID NO: 32628 - RNA, 21 nt, RNAi
ugccuuagaucagcucucuuu

SEQ ID NO: 32629 - RNA, 21 nt, RNAi
uuacggaaucuagucgagaga

SEQ ID NO: 32630 - DNA, 20 bp, Homo sapiens
aatcctgaactgctctttaa

SEQ ID NO: 32631 - RNA, 20 nt, RNAi
uccugaacugcucuuuaauu

SEQ ID NO: 32632 - RNA, 20 nt, RNAi
uuaggacuugacgagaaauu

SEQ ID NO: 32633 - DNA, 21 bp, Homo sapiens
aactgctctttaaggattgga

SEQ ID NO: 32634 - RNA, 21 nt, RNAi
cugcucuuuaaggauuggauu

SEQ ID NO: 32635 - RNA, 21 nt, RNAi
uugacgagaaauuccuaaccu

SEQ ID NO: 32636 - DNA, 21 bp, Homo sapiens
aaggattggagcaatgatgta

SEQ ID NO: 32637 - RNA, 21 nt, RNAi
ggauuggagcaaugauguauu

SEQ ID NO: 32638 - RNA, 21 nt, RNAi
uuccuaaccucguuacuacau

SEQ ID NO: 32639 - DNA, 21 bp, Homo sapiens
aatgatgtaagagctgaacta

SEQ ID NO: 32640 - RNA, 21 nt, RNAi
ugauguaagagcugaacuauu

SEQ ID NO: 32641 - RNA, 21 nt, RNAi
uuacuacauucucgacuugau

SEQ ID NO: 32642 - DNA, 21 bp, Homo sapiens
aaagaatgtatgcagccttgg

SEQ ID NO: 32643 - RNA, 21 nt, RNAi
agaauguaugcagccuugguu

SEQ ID NO: 32644 - RNA, 21 nt, RNAi
uuucuuacauacgucggaacc

SEQ ID NO: 32645 - DNA, 21 bp, Homo sapiens
aaaggaggttctaaactactg

SEQ ID NO: 32646 - RNA, 21 nt, RNAi
aggagguucuaaacuacuguu

SEQ ID NO: 32647 - RNA, 21 nt, RNAi
uuuccuccaagauuugaugac

SEQ ID NO: 32648 - DNA, 21 bp, Homo sapiens
aaggaggttctaaactactga

SEQ ID NO: 32649 - RNA, 21 nt, RNAi
ggagguucuaaacuacugauu

SEQ ID NO: 32650 - RNA, 21 nt, RNAi
uuccuccaagauuugaugacu

SEQ ID NO: 32651 - DNA, 21 bp, Homo sapiens
aaactactgagaatgaagctc

SEQ ID NO: 32652 - RNA, 21 nt, RNAi
acuacugagaaugaagcucuu

SEQ ID NO: 32653 - RNA, 21 nt, RNAi
uuugaugacucuuacuucgag

SEQ ID NO: 32654 - DNA, 21 bp, Homo sapiens
aactactgagaatgaagctca

SEQ ID NO: 32655 - RNA, 21 nt, RNAi
cuacugagaaugaagcucauu

SEQ ID NO: 32656 - RNA, 21 nt, RNAi
uugaugacucuuacuucgagu

SEQ ID NO: 32657 - DNA, 21 bp, Homo sapiens
aatgaagctcagtgacttcaa

SEQ ID NO: 32658 - RNA, 21 nt, RNAi
ugaagcucagugacuucaauu

SEQ ID NO: 32659 - RNA, 21 nt, RNAi
uuacuucgagucacugaaguu

SEQ ID NO: 32660 - DNA, 20 bp, Homo sapiens
aagctcagtgacttcaacga

SEQ ID NO: 32661 - RNA, 20 nt, RNAi
gcucagugacuucaacgauu

SEQ ID NO: 32662 - RNA, 20 nt, RNAi
uucgagucacugaaguugcu

SEQ ID NO: 32663 - DNA, 20 bp, Homo sapiens
aacgacattaccaacatgct

SEQ ID NO: 32664 - RNA, 20 nt, RNAi
cgacauuaccaacaugcuuu

SEQ ID NO: 32665 - RNA, 20 nt, RNAi
uugcuguaaugguuguacga

SEQ ID NO: 32666 - DNA, 21 bp, Homo sapiens
aaatgaacaaagactcaaagc

SEQ ID NO: 32667 - RNA, 21 nt, RNAi
augaacaaagacucaaagcuu

SEQ ID NO: 32668 - RNA, 21 nt, RNAi
uuuacuuguuucugaguuucg

SEQ ID NO: 32669 - DNA, 21 bp, Homo sapiens
aatgaacaaagactcaaagcc

SEQ ID NO: 32670 - RNA, 21 nt, RNAi
ugaacaaagacucaaagccuu

SEQ ID NO: 32671 - RNA, 21 nt, RNAi
uuacuuguuucugaguuucgg

SEQ ID NO: 32672 - DNA, 20 bp, Homo sapiens
aatctgaaagaatgttcacc

SEQ ID NO: 32673 - RNA, 20 nt, RNAi
ucugaaagaauguucaccuu

SEQ ID NO: 32674 - RNA, 20 nt, RNAi
uuagacuuucuuacaagugg

SEQ ID NO: 32675 - DNA, 21 bp, Homo sapiens
aaagtggagttcctgagaaat

SEQ ID NO: 32676 - RNA, 21 nt, RNAi
aguggaguuccugagaaauuu

SEQ ID NO: 32677 - RNA, 21 nt, RNAi
uuucaccucaaggacucuuua

SEQ ID NO: 32678 - DNA, 21 bp, Homo sapiens
aagtggagttcctgagaaatg

SEQ ID NO: 32679 - RNA, 21 nt, RNAi
guggaguuccugagaaauguu

SEQ ID NO: 32680 - RNA, 21 nt, RNAi
uucaccucaaggacucuuuac

SEQ ID NO: 32681 - DNA, 21 bp, Homo sapiens
aaagccattgccagagtacca

SEQ ID NO: 32682 - RNA, 21 nt, RNAi
agccauugccagaguaccauu

SEQ ID NO: 32683 - RNA, 21 nt, RNAi
uuucgguaacggucucauggu

SEQ ID NO: 32684 - DNA, 21 bp, Homo sapiens
aagccattgccagagtaccac

SEQ ID NO: 32685 - RNA, 21 nt, RNAi
gccauugccagaguaccacuu

SEQ ID NO: 32686 - RNA, 21 nt, RNAi
uucgguaacggucucauggug

SEQ ID NO: 32687 - DNA, 20 bp, Homo sapiens
aagcgcatcatcatccgtgg

SEQ ID NO: 32688 - RNA, 20 nt, RNAi
gcgcaucaucauccgugguu

SEQ ID NO: 32689 - RNA, 20 nt, RNAi
uucgcguaguaguaggcacc

SEQ ID NO: 32690 - DNA, 20 bp, Homo sapiens
aagactccgcctgcagccag

SEQ ID NO: 32691 - RNA, 20 nt, RNAi
gacuccgccugcagccaguu

SEQ ID NO: 32692 - RNA, 20 nt, RNAi
uucugaggcggacgucgguc

SEQ ID NO: 32693 - DNA, 21 bp, Homo sapiens
aaatactgttaccttgaagga

SEQ ID NO: 32694 - RNA, 21 nt, RNAi
auacuguuaccuugaaggauu

SEQ ID NO: 32695 - RNA, 21 nt, RNAi
uuuaugacaauggaacuuccu

SEQ ID NO: 32696 - DNA, 21 bp, Homo sapiens
aatactgttaccttgaaggac

SEQ ID NO: 32697 - RNA, 21 nt, RNAi
uacuguuaccuugaaggacuu

SEQ ID NO: 32698 - RNA, 21 nt, RNAi
uuaugacaauggaacuuccug

SEQ ID NO: 32699 - DNA, 21 bp, Homo sapiens
aagaggagaaggcggcttacc

SEQ ID NO: 32700 - RNA, 21 nt, RNAi
gaggagaaggcggcuuaccuu

SEQ ID NO: 32701 - RNA, 21 nt, RNAi
uucuccucuuccgccgaaugg

SEQ ID NO: 32702 - DNA, 21 bp, Homo sapiens
aaggcggcttacctgagtgat

SEQ ID NO: 32703 - RNA, 21 nt, RNAi
ggcggcuuaccugagugauuu

SEQ ID NO: 32704 - RNA, 21 nt, RNAi
uuccgccgaauggacucacua

SEQ ID NO: 32705 - DNA, 21 bp, Homo sapiens
aaacatgatgttggagcttac

SEQ ID NO: 32706 - RNA, 21 nt, RNAi
acaugauguuggagcuuacuu

SEQ ID NO: 32707 - RNA, 21 nt, RNAi
uuuguacuacaaccucgaaug

SEQ ID NO: 32708 - DNA, 21 bp, Homo sapiens
aacatgatgttggagcttaca

SEQ ID NO: 32709 - RNA, 21 nt, RNAi
caugauguuggagcuuacauu

SEQ ID NO: 32710 - RNA, 21 nt, RNAi
uuguacuacaaccucgaaugu

SEQ ID NO: 32711 - DNA, 20 bp, Homo sapiens
aatgtataagggcgctaatc

SEQ ID NO: 32712 - RNA, 20 nt, RNAi
uguauaagggcgcuaaucuu

SEQ ID NO: 32713 - RNA, 20 nt, RNAi
uuacauauucccgcgauuag

SEQ ID NO: 32714 - DNA, 20 bp, Homo sapiens
aagggcgctaatcgtactga

SEQ ID NO: 32715 - RNA, 20 nt, RNAi
gggcgcuaaucguacugauu

SEQ ID NO: 32716 - RNA, 20 nt, RNAi
uucccgcgauuagcaugacu

SEQ ID NO: 32717 - DNA, 21 bp, Homo sapiens
aatcgtactgaaacagtcacg

SEQ ID NO: 32718 - RNA, 21 nt, RNAi
ucguacugaaacagucacguu

SEQ ID NO: 32719 - RNA, 21 nt, RNAi
uuagcaugacuuugucagugc

SEQ ID NO: 32720 - DNA, 21 bp, Homo sapiens
aaacgagaaagtaaagtgcct

SEQ ID NO: 32721 - RNA, 21 nt, RNAi
acgagaaaguaaagugccuuu

SEQ ID NO: 32722 - RNA, 21 nt, RNAi
uuugcucuuucauuucacgga

SEQ ID NO: 32723 - DNA, 21 bp, Homo sapiens
aacgagaaagtaaagtgcctg

SEQ ID NO: 32724 - RNA, 21 nt, RNAi
cgagaaaguaaagugccuguu

SEQ ID NO: 32725 - RNA, 21 nt, RNAi
uugcucuuucauuucacggac

SEQ ID NO: 32726 - DNA, 20 bp, Homo sapiens
aaagtaaagtgcctgctgat

SEQ ID NO: 32727 - RNA, 20 nt, RNAi
aguaaagugccugcugauuu

SEQ ID NO: 32728 - RNA, 20 nt, RNAi
uuucauuucacggacgacua

SEQ ID NO: 32729 - DNA, 20 bp, Homo sapiens
aagtaaagtgcctgctgatc

SEQ ID NO: 32730 - RNA, 20 nt, RNAi
guaaagugccugcugaucuu

SEQ ID NO: 32731 - RNA, 20 nt, RNAi
uucauuucacggacgacuag

SEQ ID NO: 32732 - DNA, 20 bp, Homo sapiens
aaagtgcctgctgatctctt

SEQ ID NO: 32733 - RNA, 20 nt, RNAi
agugccugcugaucucuuuu

SEQ ID NO: 32734 - RNA, 20 nt, RNAi
uuucacggacgacuagagaa

SEQ ID NO: 32735 - DNA, 20 bp, Homo sapiens
aagtgcctgctgatctctta

SEQ ID NO: 32736 - RNA, 20 nt, RNAi
gugccugcugaucucuuauu

SEQ ID NO: 32737 - RNA, 20 nt, RNAi
uucacggacgacuagagaau

SEQ ID NO: 32738 - DNA, 21 bp, Homo sapiens
aacaactttatggtggccatg

SEQ ID NO: 32739 - RNA, 21 nt, RNAi
caacuuuaugguggccauguu

SEQ ID NO: 32740 - RNA, 21 nt, RNAi
uuguugaaauaccaccgguac

SEQ ID NO: 32741 - DNA, 21 bp, Homo sapiens
aactttatggtggccatggag

SEQ ID NO: 32742 - RNA, 21 nt, RNAi
cuuuaugguggccauggaguu

SEQ ID NO: 32743 - RNA, 21 nt, RNAi
uugaaauaccaccgguaccuc

SEQ ID NO: 32744 - DNA, 21 bp, Homo sapiens
aactcgccagtttatcaatct

SEQ ID NO: 32745 - RNA, 21 nt, RNAi
cucgccaguuuaucaaucuuu

SEQ ID NO: 32746 - RNA, 21 nt, RNAi
uugagcggucaaauaguuaga

SEQ ID NO: 32747 - DNA, 20 bp, Homo sapiens
aacaccatggatgtgtttgt

SEQ ID NO: 32748 - RNA, 20 nt, RNAi
caccauggauguguuuguuu

SEQ ID NO: 32749 - RNA, 20 nt, RNAi
uugugguaccuacacaaaca

SEQ ID NO: 32750 - DNA, 21 bp, Homo sapiens
aagagaaagttagcaggtgcc

SEQ ID NO: 32751 - RNA, 21 nt, RNAi
gagaaaguuagcaggugccuu

SEQ ID NO: 32752 - RNA, 21 nt, RNAi
uucucuuucaaucguccacgg

SEQ ID NO: 32753 - DNA, 21 bp, Homo sapiens
aaagttagcaggtgccaatcc

SEQ ID NO: 32754 - RNA, 21 nt, RNAi
aguuagcaggugccaauccuu

SEQ ID NO: 32755 - RNA, 21 nt, RNAi
uuucaaucguccacgguuagg

SEQ ID NO: 32756 - DNA, 21 bp, Homo sapiens
aagttagcaggtgccaatcca

SEQ ID NO: 32757 - RNA, 21 nt, RNAi
guuagcaggugccaauccauu

SEQ ID NO: 32758 - RNA, 21 nt, RNAi
uucaaucguccacgguuaggu

SEQ ID NO: 32759 - DNA, 20 bp, Homo sapiens
aatccagcagtcattacttg

SEQ ID NO: 32760 - RNA, 20 nt, RNAi
uccagcagucauuacuuguu

SEQ ID NO: 32761 - RNA, 20 nt, RNAi
uuaggucgucaguaaugaac

SEQ ID NO: 32762 - DNA, 21 bp, Homo sapiens
aagcaaagatcacaacattcg

SEQ ID NO: 32763 - RNA, 21 nt, RNAi
gcaaagaucacaacauucguu

SEQ ID NO: 32764 - RNA, 21 nt, RNAi
uucguuucuaguguuguaagc

SEQ ID NO: 32765 - DNA, 21 bp, Homo sapiens
aaagatcacaacattcgtgcc

SEQ ID NO: 32766 - RNA, 21 nt, RNAi
agaucacaacauucgugccuu

SEQ ID NO: 32767 - RNA, 21 nt, RNAi
uuucuaguguuguaagcacgg

SEQ ID NO: 32768 - DNA, 20 bp, Homo sapiens
aagagactcaagtgaagtgc

SEQ ID NO: 32769 - RNA, 20 nt, RNAi
gagacucaagugaagugcuu

SEQ ID NO: 32770 - RNA, 20 nt, RNAi
uucucugaguucacuucacg

SEQ ID NO: 32771 - DNA, 21 bp, Homo sapiens
aagtgaagtgcctgatggacc

SEQ ID NO: 32772 - RNA, 21 nt, RNAi
gugaagugccugauggaccuu

SEQ ID NO: 32773 - RNA, 21 nt, RNAi
uucacuucacggacuaccugg

SEQ ID NO: 32774 - DNA, 21 bp, Homo sapiens
aagtgcctgatggaccaggca

SEQ ID NO: 32775 - RNA, 21 nt, RNAi
gugccugauggaccaggcauu

SEQ ID NO: 32776 - RNA, 21 nt, RNAi
uucacggacuaccugguccgu

SEQ ID NO: 32777 - DNA, 20 bp, Homo sapiens
aacatccttggcagaacctg

SEQ ID NO: 32778 - RNA, 20 nt, RNAi
cauccuuggcagaaccuguu

SEQ ID NO: 32779 - RNA, 20 nt, RNAi
uuguaggaaccgucuuggac

SEQ ID NO: 32780 - DNA, 21 bp, Homo sapiens
caggaatgcgtcctgagcagc

SEQ ID NO: 32781 - RNA, 21 nt, RNAi
ggaaugcguccugagcagcuu

SEQ ID NO: 32782 - RNA, 21 nt, RNAi
uuccuuacgcaggacucgucg

SEQ ID NO: 32783 - DNA, 21 bp, Homo sapiens
cagagatttcggtttgcttgt

SEQ ID NO: 32784 - RNA, 21 nt, RNAi
gagauuucgguuugcuuguuu

SEQ ID NO: 32785 - RNA, 21 nt, RNAi
uucucuaaagccaaacgaaca

SEQ ID NO: 32786 - DNA, 21 bp, Homo sapiens
cactcaacagtattgaatttc

SEQ ID NO: 32787 - RNA, 21 nt, RNAi
cucaacaguauugaauuucuu

SEQ ID NO: 32788 - RNA, 21 nt, RNAi
uugaguugucauaacuuaaag

SEQ ID NO: 32789 - DNA, 21 bp, Homo sapiens
caacagtattgaatttcgtga

SEQ ID NO: 32790 - RNA, 21 nt, RNAi
acaguauugaauuucgugauu

SEQ ID NO: 32791 - RNA, 21 nt, RNAi
uuugucauaacuuaaagcacu

SEQ ID NO: 32792 - DNA, 21 bp, Homo sapiens
cagtattgaatttcgtgaatg

SEQ ID NO: 32793 - RNA, 21 nt, RNAi
guauugaauuucgugaauguu

SEQ ID NO: 32794 - RNA, 21 nt, RNAi
uucauaacuuaaagcacuuac

SEQ ID NO: 32795 - DNA, 21 bp, Homo sapiens
cagaagatcgcaccttactct

SEQ ID NO: 32796 - RNA, 21 nt, RNAi
gaagaucgcaccuuacucuuu

SEQ ID NO: 32797 - RNA, 21 nt, RNAi
uucuucuagcguggaaugaga

SEQ ID NO: 32798 - DNA, 21 bp, Homo sapiens
caccttactctgttgaaatta

SEQ ID NO: 32799 - RNA, 21 nt, RNAi
ccuuacucuguugaaauuauu

SEQ ID NO: 32800 - RNA, 21 nt, RNAi
uuggaaugagacaacuuuaau

SEQ ID NO: 32801 - DNA, 21 bp, Homo sapiens
cacttgtaccagtgtttatac

SEQ ID NO: 32802 - RNA, 21 nt, RNAi
cuuguaccaguguuuauacuu

SEQ ID NO: 32803 - RNA, 21 nt, RNAi
uugaacauggucacaaauaug

SEQ ID NO: 32804 - DNA, 21 bp, Homo sapiens
catcctagtgagatgataaat

SEQ ID NO: 32805 - RNA, 21 nt, RNAi
uccuagugagaugauaaauuu

SEQ ID NO: 32806 - RNA, 21 nt, RNAi
uuaggaucacucuacuauuua

SEQ ID NO: 32807 - DNA, 21 bp, Homo sapiens
cagatgacatcagcagtaaga

SEQ ID NO: 32808 - RNA, 21 nt, RNAi
gaugacaucagcaguaagauu

SEQ ID NO: 32809 - RNA, 21 nt, RNAi
uucuacuguagucgucauucu

SEQ ID NO: 32810 - DNA, 21 bp, Homo sapiens
caaactacctgttctggcagg

SEQ ID NO: 32811 - RNA, 21 nt, RNAi
aacuaccuguucuggcagguu

SEQ ID NO: 32812 - RNA, 21 nt, RNAi
uuuugauggacaagaccgucc

SEQ ID NO: 32813 - DNA, 21 bp, Homo sapiens
cacttctgtgcaacttcacta

SEQ ID NO: 32814 - RNA, 21 nt, RNAi
cuucugugcaacuucacuauu

SEQ ID NO: 32815 - RNA, 21 nt, RNAi
uugaagacacguugaagugau

SEQ ID NO: 32816 - DNA, 21 bp, Homo sapiens
caacttcactaagtccatgga

SEQ ID NO: 32817 - RNA, 21 nt, RNAi
acuucacuaaguccauggauu

SEQ ID NO: 32818 - RNA, 21 nt, RNAi
uuugaagugauucagguaccu

SEQ ID NO: 32819 - DNA, 21 bp, Homo sapiens
cactaagtccatggaagaaga

SEQ ID NO: 32820 - RNA, 21 nt, RNAi
cuaaguccauggaagaagauu

SEQ ID NO: 32821 - RNA, 21 nt, RNAi
uugauucagguaccuucuucu

SEQ ID NO: 32822 - DNA, 21 bp, Homo sapiens
caattcgtcctcagattgatc

SEQ ID NO: 32823 - RNA, 21 nt, RNAi
auucguccucagauugaucuu

SEQ ID NO: 32824 - RNA, 21 nt, RNAi
uuuaagcaggagucuaacuag

SEQ ID NO: 32825 - DNA, 21 bp, Homo sapiens
cagattgatctgaagagatat

SEQ ID NO: 32826 - RNA, 21 nt, RNAi
gauugaucugaagagauauuu

SEQ ID NO: 32827 - RNA, 21 nt, RNAi
uucuaacuagacuucucuaua

SEQ ID NO: 32828 - DNA, 21 bp, Homo sapiens
cagctggcttgcgcctatttg

SEQ ID NO: 32829 - RNA, 21 nt, RNAi
gcuggcuugcgccuauuuguu

SEQ ID NO: 32830 - RNA, 21 nt, RNAi
uucgaccgaacgcggauaaac

SEQ ID NO: 32831 - DNA, 21 bp, Homo sapiens
catgcatctcagtttagcacc

SEQ ID NO: 32832 - RNA, 21 nt, RNAi
ugcaucucaguuuagcaccuu

SEQ ID NO: 32833 - RNA, 21 nt, RNAi
uuacguagagucaaaucgugg

SEQ ID NO: 32834 - DNA, 21 bp, Homo sapiens
catctcagtttagcacctgcc

SEQ ID NO: 32835 - RNA, 21 nt, RNAi
ucucaguuuagcaccugccuu

SEQ ID NO: 32836 - RNA, 21 nt, RNAi
uuagagucaaaucguggacgg

SEQ ID NO: 32837 - DNA, 21 bp, Homo sapiens
cagtttagcacctgccttctg

SEQ ID NO: 32838 - RNA, 21 nt, RNAi
guuuagcaccugccuucuguu

SEQ ID NO: 32839 - RNA, 21 nt, RNAi
uucaaaucguggacggaagac

SEQ ID NO: 32840 - DNA, 21 bp, Homo sapiens
cacctgccttctggacaacta

SEQ ID NO: 32841 - RNA, 21 nt, RNAi
ccugccuucuggacaacuauu

SEQ ID NO: 32842 - RNA, 21 nt, RNAi
uuggacggaagaccuguugau

SEQ ID NO: 32843 - DNA, 21 bp, Homo sapiens
caactacgtgtctctatttga

SEQ ID NO: 32844 - RNA, 21 nt, RNAi
acuacgugucucuauuugauu

SEQ ID NO: 32845 - RNA, 21 nt, RNAi
uuugaugcacagagauaaacu

SEQ ID NO: 32846 - DNA, 21 bp, Homo sapiens
caggtttctaatatggtggcg

SEQ ID NO: 32847 - RNA, 21 nt, RNAi
gguuucuaauaugguggcguu

SEQ ID NO: 32848 - RNA, 21 nt, RNAi
uuccaaagauuauaccaccgc

SEQ ID NO: 32849 - DNA, 21 bp, Homo sapiens
cagtactttatggagcagttt

SEQ ID NO: 32850 - RNA, 21 nt, RNAi
guacuuuauggagcaguuuuu

SEQ ID NO: 32851 - RNA, 21 nt, RNAi
uucaugaaauaccucgucaaa

SEQ ID NO: 32852 - DNA, 21 bp, Homo sapiens
catcagaaatgtggattcgaa

SEQ ID NO: 32853 - RNA, 21 nt, RNAi
ucagaaauguggauucgaauu

SEQ ID NO: 32854 - RNA, 21 nt, RNAi
uuagucuuuacaccuaagcuu

SEQ ID NO: 32855 - DNA, 21 bp, Homo sapiens
cagaaatgtggattcgaacaa

SEQ ID NO: 32856 - RNA, 21 nt, RNAi
gaaauguggauucgaacaauu

SEQ ID NO: 32857 - RNA, 21 nt, RNAi
uucuuuacaccuaagcuuguu

SEQ ID NO: 32858 - DNA, 21 bp, Homo sapiens
caacaaggagttatctattgc

SEQ ID NO: 32859 - RNA, 21 nt, RNAi
acaaggaguuaucuauugcuu

SEQ ID NO: 32860 - RNA, 21 nt, RNAi
uuuguuccucaauagauaacg

SEQ ID NO: 32861 - DNA, 21 bp, Homo sapiens
caaggagttatctattgctat

SEQ ID NO: 32862 - RNA, 21 nt, RNAi
aggaguuaucuauugcuauuu

SEQ ID NO: 32863 - RNA, 21 nt, RNAi
uuuccucaauagauaacgaua

SEQ ID NO: 32864 - DNA, 21 bp, Homo sapiens
caggaccgtgcaaggttataa

SEQ ID NO: 32865 - RNA, 21 nt, RNAi
ggaccgugcaagguuauaauu

SEQ ID NO: 32866 - RNA, 21 nt, RNAi
uuccuggcacguuccaauauu

SEQ ID NO: 32867 - DNA, 21 bp, Homo sapiens
catgtacgttgagctcattca

SEQ ID NO: 32868 - RNA, 21 nt, RNAi
uguacguugagcucauucauu

SEQ ID NO: 32869 - RNA, 21 nt, RNAi
uuacaugcaacucgaguaagu

SEQ ID NO: 32870 - DNA, 21 bp, Homo sapiens
cattcagcgctgcaagcagat

SEQ ID NO: 32871 - RNA, 21 nt, RNAi
uucagcgcugcaagcagauuu

SEQ ID NO: 32872 - RNA, 21 nt, RNAi
uuaagucgcgacguucgucua

SEQ ID NO: 32873 - DNA, 21 bp, Homo sapiens
cagcgctgcaagcagatgttc

SEQ ID NO: 32874 - RNA, 21 nt, RNAi
gcgcugcaagcagauguucuu

SEQ ID NO: 32875 - RNA, 21 nt, RNAi
uucgcgacguucgucuacaag

SEQ ID NO: 32876 - DNA, 21 bp, Homo sapiens
cagacagacactggtgacgac

SEQ ID NO: 32877 - RNA, 21 nt, RNAi
gacagacacuggugacgacuu

SEQ ID NO: 32878 - RNA, 21 nt, RNAi
uucugucugugaccacugcug

SEQ ID NO: 32879 - DNA, 21 bp, Homo sapiens
cagacactggtgacgaccgtg

SEQ ID NO: 32880 - RNA, 21 nt, RNAi
gacacuggugacgaccguguu

SEQ ID NO: 32881 - RNA, 21 nt, RNAi
uucugugaccacugcuggcac

SEQ ID NO: 32882 - DNA, 21 bp, Homo sapiens
cactggtgacgaccgtgttta

SEQ ID NO: 32883 - RNA, 21 nt, RNAi
cuggugacgaccguguuuauu

SEQ ID NO: 32884 - RNA, 21 nt, RNAi
uugaccacugcuggcacaaau

SEQ ID NO: 32885 - DNA, 21 bp, Homo sapiens
cagatgccaagcttcctccag

SEQ ID NO: 32886 - RNA, 21 nt, RNAi
gaugccaagcuuccuccaguu

SEQ ID NO: 32887 - RNA, 21 nt, RNAi
uucuacgguucgaaggagguc

SEQ ID NO: 32888 - DNA, 21 bp, Homo sapiens
caagcttcctccagtctgttg

SEQ ID NO: 32889 - RNA, 21 nt, RNAi
agcuuccuccagucuguuguu

SEQ ID NO: 32890 - RNA, 21 nt, RNAi
uuucgaaggaggucagacaac

SEQ ID NO: 32891 - DNA, 21 bp, Homo sapiens
cagtctgttgcaagcgtcttg

SEQ ID NO: 32892 - RNA, 21 nt, RNAi
gucuguugcaagcgucuuguu

SEQ ID NO: 32893 - RNA, 21 nt, RNAi
uucagacaacguucgcagaac

SEQ ID NO: 32894 - DNA, 21 bp, Homo sapiens
caagcgtcttgctgtaccttg

SEQ ID NO: 32895 - RNA, 21 nt, RNAi
agcgucuugcuguaccuuguu

SEQ ID NO: 32896 - RNA, 21 nt, RNAi
uuucgcagaacgacauggaac

SEQ ID NO: 32897 - DNA, 21 bp, Homo sapiens
cacagttcctgaggtgtatac

SEQ ID NO: 32898 - RNA, 21 nt, RNAi
caguuccugagguguauacuu

SEQ ID NO: 32899 - RNA, 21 nt, RNAi
uugucaaggacuccacauaug

SEQ ID NO: 32900 - DNA, 21 bp, Homo sapiens
cagttcctgaggtgtatactc

SEQ ID NO: 32901 - RNA, 21 nt, RNAi
guuccugagguguauacucuu

SEQ ID NO: 32902 - RNA, 21 nt, RNAi
uucaaggacuccacauaugag

SEQ ID NO: 32903 - DNA, 21 bp, Homo sapiens
cagttctggagcacctcgtgg

SEQ ID NO: 32904 - RNA, 21 nt, RNAi
guucuggagcaccucgugguu

SEQ ID NO: 32905 - RNA, 21 nt, RNAi
uucaagaccucguggagcacc

SEQ ID NO: 32906 - DNA, 21 bp, Homo sapiens
cacctcgtggtgatgcagata

SEQ ID NO: 32907 - RNA, 21 nt, RNAi
ccucguggugaugcagauauu

SEQ ID NO: 32908 - RNA, 21 nt, RNAi
uuggagcaccacuacgucuau

SEQ ID NO: 32909 - DNA, 21 bp, Homo sapiens
cagctggtgtgttgcagagcc

SEQ ID NO: 32910 - RNA, 21 nt, RNAi
gcugguguguugcagagccuu

SEQ ID NO: 32911 - RNA, 21 nt, RNAi
uucgaccacacaacgucucgg

SEQ ID NO: 32912 - DNA, 21 bp, Homo sapiens
cagagccatagtgaaggtgtt

SEQ ID NO: 32913 - RNA, 21 nt, RNAi
gagccauagugaagguguuuu

SEQ ID NO: 32914 - RNA, 21 nt, RNAi
uucucgguaucacuuccacaa

SEQ ID NO: 32915 - DNA, 21 bp, Homo sapiens
catagtgaaggtgttcctagc

SEQ ID NO: 32916 - RNA, 21 nt, RNAi
uagugaagguguuccuagcuu

SEQ ID NO: 32917 - RNA, 21 nt, RNAi
uuaucacuuccacaaggaucg

SEQ ID NO: 32918 - DNA, 21 bp, Homo sapiens
cagttctcaggaattgcatta

SEQ ID NO: 32919 - RNA, 21 nt, RNAi
guucucaggaauugcauuauu

SEQ ID NO: 32920 - RNA, 21 nt, RNAi
uucaagaguccuuaacguaau

SEQ ID NO: 32921 - DNA, 21 bp, Homo sapiens
caggaattgcattagtactgt

SEQ ID NO: 32922 - RNA, 21 nt, RNAi
ggaauugcauuaguacuguuu

SEQ ID NO: 32923 - RNA, 21 nt, RNAi
uuccuuaacguaaucaugaca

SEQ ID NO: 32924 - DNA, 21 bp, Homo sapiens
cattagtactgtggtgcatca

SEQ ID NO: 32925 - RNA, 21 nt, RNAi
uuaguacuguggugcaucauu

SEQ ID NO: 32926 - RNA, 21 nt, RNAi
uuaaucaugacaccacguagu

SEQ ID NO: 32927 - DNA, 21 bp, Homo sapiens
cagaatatgttctaaaccagt

SEQ ID NO: 32928 - RNA, 21 nt, RNAi
gaauauguucuaaaccaguuu

SEQ ID NO: 32929 - RNA, 21 nt, RNAi
uucuuauacaagauuugguca

SEQ ID NO: 32930 - DNA, 21 bp, Homo sapiens
cagaactggcaaatggaaggt

SEQ ID NO: 32931 - RNA, 21 nt, RNAi
gaacuggcaaauggaagguuu

SEQ ID NO: 32932 - RNA, 21 nt, RNAi
uucuugaccguuuaccuucca

SEQ ID NO: 32933 - DNA, 21 bp, Homo sapiens
cacatacaaagactacgtgga

SEQ ID NO: 32934 - RNA, 21 nt, RNAi
cauacaaagacuacguggauu

SEQ ID NO: 32935 - RNA, 21 nt, RNAi
uuguauguuucugaugcaccu

SEQ ID NO: 32936 - DNA, 21 bp, Homo sapiens
catacaaagactacgtggatc

SEQ ID NO: 32937 - RNA, 21 nt, RNAi
uacaaagacuacguggaucuu

SEQ ID NO: 32938 - RNA, 21 nt, RNAi
uuauguuucugaugcaccuag

SEQ ID NO: 32939 - DNA, 21 bp, Homo sapiens
caaagactacgtggatctctt

SEQ ID NO: 32940 - RNA, 21 nt, RNAi
aagacuacguggaucucuuuu

SEQ ID NO: 32941 - RNA, 21 nt, RNAi
uuuucugaugcaccuagagaa

SEQ ID NO: 32942 - DNA, 21 bp, Homo sapiens
cagacatctcctgagctctga

SEQ ID NO: 32943 - RNA, 21 nt, RNAi
gacaucuccugagcucugauu

SEQ ID NO: 32944 - RNA, 21 nt, RNAi
uucuguagaggacucgagacu

SEQ ID NO: 32945 - DNA, 21 bp, Homo sapiens
catctcctgagctctgaccag

SEQ ID NO: 32946 - RNA, 21 nt, RNAi
ucuccugagcucugaccaguu

SEQ ID NO: 32947 - RNA, 21 nt, RNAi
uuagaggacucgagacugguc

SEQ ID NO: 32948 - DNA, 21 bp, Homo sapiens
cagtgaaagtctgaatcattt

SEQ ID NO: 32949 - RNA, 21 nt, RNAi
gugaaagucugaaucauuuuu

SEQ ID NO: 32950 - RNA, 21 nt, RNAi
uucacuuucagacuuaguaaa

SEQ ID NO: 32951 - DNA, 21 bp, Homo sapiens
cacttgaaatacagactgttg

SEQ ID NO: 32952 - RNA, 21 nt, RNAi
cuugaaauacagacuguuguu

SEQ ID NO: 32953 - RNA, 21 nt, RNAi
uugaacuuuaugucugacaac

SEQ ID NO: 32954 - DNA, 21 bp, Homo sapiens
caagagaatggagatgaggcg

SEQ ID NO: 32955 - RNA, 21 nt, RNAi
agagaauggagaugaggcguu

SEQ ID NO: 32956 - RNA, 21 nt, RNAi
uuucucuuaccucuacuccgc

SEQ ID NO: 32957 - DNA, 21 bp, Homo sapiens
caacttcagatccagcggcta

SEQ ID NO: 32958 - RNA, 21 nt, RNAi
acuucagauccagcggcuauu

SEQ ID NO: 32959 - RNA, 21 nt, RNAi
uuugaagucuaggucgccgau

SEQ ID NO: 32960 - DNA, 21 bp, Homo sapiens
cagatccagcggctaacttgc

SEQ ID NO: 32961 - RNA, 21 nt, RNAi
gauccagcggcuaacuugcuu

SEQ ID NO: 32962 - RNA, 21 nt, RNAi
uucuaggucgccgauugaacg

SEQ ID NO: 32963 - DNA, 21 bp, Homo sapiens
cagcggctaacttgcatccag

SEQ ID NO: 32964 - RNA, 21 nt, RNAi
gcggcuaacuugcauccaguu

SEQ ID NO: 32965 - RNA, 21 nt, RNAi
uucgccgauugaacguagguc

SEQ ID NO: 32966 - DNA, 21 bp, Homo sapiens
catccagctaaacctaaagat

SEQ ID NO: 32967 - RNA, 21 nt, RNAi
uccagcuaaaccuaaagauuu

SEQ ID NO: 32968 - RNA, 21 nt, RNAi
uuaggucgauuuggauuucua

SEQ ID NO: 32969 - DNA, 21 bp, Homo sapiens
catcagtggtttctacaaatt

SEQ ID NO: 32970 - RNA, 21 nt, RNAi
ucagugguuucuacaaauuuu

SEQ ID NO: 32971 - RNA, 21 nt, RNAi
uuagucaccaaagauguuuaa

SEQ ID NO: 32972 - DNA, 21 bp, Homo sapiens
cagtggtttctacaaattgct

SEQ ID NO: 32973 - RNA, 21 nt, RNAi
gugguuucuacaaauugcuuu

SEQ ID NO: 32974 - RNA, 21 nt, RNAi
uucaccaaagauguuuaacga

SEQ ID NO: 32975 - DNA, 21 bp, Homo sapiens
caaagagtctgaaacactctc

SEQ ID NO: 32976 - RNA, 21 nt, RNAi
aagagucugaaacacucucuu

SEQ ID NO: 32977 - RNA, 21 nt, RNAi
uuuucucagacuuugugagag

SEQ ID NO: 32978 - DNA, 21 bp, Homo sapiens
cacacaacatcattgaactcg

SEQ ID NO: 32979 - RNA, 21 nt, RNAi
cacaacaucauugaacucguu

SEQ ID NO: 32980 - RNA, 21 nt, RNAi
uuguguuguaguaacuugagc

SEQ ID NO: 32981 - DNA, 21 bp, Homo sapiens
cacaacatcattgaactcgat

SEQ ID NO: 32982 - RNA, 21 nt, RNAi
caacaucauugaacucgauuu

SEQ ID NO: 32983 - RNA, 21 nt, RNAi
uuguuguaguaacuugagcua

SEQ ID NO: 32984 - DNA, 21 bp, Homo sapiens
caacatcattgaactcgatgt

SEQ ID NO: 32985 - RNA, 21 nt, RNAi
acaucauugaacucgauguuu

SEQ ID NO: 32986 - RNA, 21 nt, RNAi
uuuguaguaacuugagcuaca

SEQ ID NO: 32987 - DNA, 21 bp, Homo sapiens
catcattgaactcgatgttag

SEQ ID NO: 32988 - RNA, 21 nt, RNAi
ucauugaacucgauguuaguu

SEQ ID NO: 32989 - RNA, 21 nt, RNAi
uuaguaacuugagcuacaauc

SEQ ID NO: 32990 - DNA, 21 bp, Homo sapiens
cattgaactcgatgttagagc

SEQ ID NO: 32991 - RNA, 21 nt, RNAi
uugaacucgauguuagagcuu

SEQ ID NO: 32992 - RNA, 21 nt, RNAi
uuaacuugagcuacaaucucg

SEQ ID NO: 32993 - DNA, 21 bp, Homo sapiens
cactgcagatggctttcaaac

SEQ ID NO: 32994 - RNA, 21 nt, RNAi
cugcagauggcuuucaaacuu

SEQ ID NO: 32995 - RNA, 21 nt, RNAi
uugacgucuaccgaaaguuug

SEQ ID NO: 32996 - DNA, 21 bp, Homo sapiens
cagaagtaggcctgaatgctc

SEQ ID NO: 32997 - RNA, 21 nt, RNAi
gaaguaggccugaaugcucuu

SEQ ID NO: 32998 - RNA, 21 nt, RNAi
uucuucauccggacuuacgag

SEQ ID NO: 32999 - DNA, 21 bp, Homo sapiens
cagacatgtaatgcagcctta

SEQ ID NO: 33000 - RNA, 21 nt, RNAi
gacauguaaugcagccuuauu

SEQ ID NO: 33001 - RNA, 21 nt, RNAi
uucuguacauuacgucggaau

SEQ ID NO: 33002 - DNA, 21 bp, Homo sapiens
catgtaatgcagccttattac

SEQ ID NO: 33003 - RNA, 21 nt, RNAi
uguaaugcagccuuauuacuu

SEQ ID NO: 33004 - RNA, 21 nt, RNAi
uuacauuacgucggaauaaug

SEQ ID NO: 33005 - DNA, 21 bp, Homo sapiens
cagccttattacaaagacatt

SEQ ID NO: 33006 - RNA, 21 nt, RNAi
gccuuauuacaaagacauuuu

SEQ ID NO: 33007 - RNA, 21 nt, RNAi
uucggaauaauguuucuguaa

SEQ ID NO: 33008 - DNA, 21 bp, Homo sapiens
cagccttgtcagatgagacca

SEQ ID NO: 33009 - RNA, 21 nt, RNAi
gccuugucagaugagaccauu

SEQ ID NO: 33010 - RNA, 21 nt, RNAi
uucggaacagucuacucuggu

SEQ ID NO: 33011 - DNA, 21 bp, Homo sapiens
cagatgagaccaagaataact

SEQ ID NO: 33012 - RNA, 21 nt, RNAi
gaugagaccaagaauaacuuu

SEQ ID NO: 33013 - RNA, 21 nt, RNAi
uucuacucugguucuuauuga

SEQ ID NO: 33014 - DNA, 21 bp, Homo sapiens
catctgaagaagacaaagaac

SEQ ID NO: 33015 - RNA, 21 nt, RNAi
ucugaagaagacaaagaacuu

SEQ ID NO: 33016 - RNA, 21 nt, RNAi
uuagacuucuucuguuucuug

SEQ ID NO: 33017 - DNA, 21 bp, Homo sapiens
caaagaacctttcatcaaacg

SEQ ID NO: 33018 - RNA, 21 nt, RNAi
aagaaccuuucaucaaacguu

SEQ ID NO: 33019 - RNA, 21 nt, RNAi
uuuucuuggaaaguaguuugc

SEQ ID NO: 33020 - DNA, 21 bp, Homo sapiens
catcaaacgaagcaatatcct

SEQ ID NO: 33021 - RNA, 21 nt, RNAi
ucaaacgaagcaauauccuuu

SEQ ID NO: 33022 - RNA, 21 nt, RNAi
uuaguuugcuucguuauagga

SEQ ID NO: 33023 - DNA, 21 bp, Homo sapiens
caaacgaagcaatatccttag

SEQ ID NO: 33024 - RNA, 21 nt, RNAi
aacgaagcaauauccuuaguu

SEQ ID NO: 33025 - RNA, 21 nt, RNAi
uuuugcuucguuauaggaauc

SEQ ID NO: 33026 - DNA, 21 bp, Homo sapiens
caaatgcttggatctctagga

SEQ ID NO: 33027 - RNA, 21 nt, RNAi
aaugcuuggaucucuaggauu

SEQ ID NO: 33028 - RNA, 21 nt, RNAi
uuuuacgaaccuagagauccu

SEQ ID NO: 33029 - DNA, 21 bp, Homo sapiens
cagtcacgtcctcagatgaga

SEQ ID NO: 33030 - RNA, 21 nt, RNAi
gucacguccucagaugagauu

SEQ ID NO: 33031 - RNA, 21 nt, RNAi
uucagugcaggagucuacucu

SEQ ID NO: 33032 - DNA, 21 bp, Homo sapiens
cacgtcctcagatgagatgat

SEQ ID NO: 33033 - RNA, 21 nt, RNAi
cguccucagaugagaugauuu

SEQ ID NO: 33034 - RNA, 21 nt, RNAi
uugcaggagucuacucuacua

SEQ ID NO: 33035 - DNA, 21 bp, Homo sapiens
cagatgagatgatgaagagct

SEQ ID NO: 33036 - RNA, 21 nt, RNAi
gaugagaugaugaagagcuuu

SEQ ID NO: 33037 - RNA, 21 nt, RNAi
uucuacucuacuacuucucga

SEQ ID NO: 33038 - DNA, 21 bp, Homo sapiens
cagagagaagcggctgagctt

SEQ ID NO: 33039 - RNA, 21 nt, RNAi
gagagaagcggcugagcuuuu

SEQ ID NO: 33040 - RNA, 21 nt, RNAi
uucucucuucgccgacucgaa

SEQ ID NO: 33041 - DNA, 21 bp, Homo sapiens
cacagaattagcgctcacagc

SEQ ID NO: 33042 - RNA, 21 nt, RNAi
cagaauuagcgcucacagcuu

SEQ ID NO: 33043 - RNA, 21 nt, RNAi
uugucuuaaucgcgagugucg

SEQ ID NO: 33044 - DNA, 21 bp, Homo sapiens
cagaattagcgctcacagcca

SEQ ID NO: 33045 - RNA, 21 nt, RNAi
gaauuagcgcucacagccauu

SEQ ID NO: 33046 - RNA, 21 nt, RNAi
uucuuaaucgcgagugucggu

SEQ ID NO: 33047 - DNA, 21 bp, Homo sapiens
cacagccagtgacagacaaac

SEQ ID NO: 33048 - RNA, 21 nt, RNAi
cagccagugacagacaaacuu

SEQ ID NO: 33049 - RNA, 21 nt, RNAi
uugucggucacugucuguuug

SEQ ID NO: 33050 - DNA, 21 bp, Homo sapiens
cagccagtgacagacaaacta

SEQ ID NO: 33051 - RNA, 21 nt, RNAi
gccagugacagacaaacuauu

SEQ ID NO: 33052 - RNA, 21 nt, RNAi
uucggucacugucuguuugau

SEQ ID NO: 33053 - DNA, 21 bp, Homo sapiens
cagtgacagacaaactaaagt

SEQ ID NO: 33054 - RNA, 21 nt, RNAi
gugacagacaaacuaaaguuu

SEQ ID NO: 33055 - RNA, 21 nt, RNAi
uucacugucuguuugauuuca

SEQ ID NO: 33056 - DNA, 21 bp, Homo sapiens
cagacaaactaaagttgcagc

SEQ ID NO: 33057 - RNA, 21 nt, RNAi
gacaaacuaaaguugcagcuu

SEQ ID NO: 33058 - RNA, 21 nt, RNAi
uucuguuugauuucaacgucg

SEQ ID NO: 33059 - DNA, 21 bp, Homo sapiens
caaactaaagttgcagcctgt

SEQ ID NO: 33060 - RNA, 21 nt, RNAi
aacuaaaguugcagccuguuu

SEQ ID NO: 33061 - RNA, 21 nt, RNAi
uuuugauuucaacgucggaca

SEQ ID NO: 33062 - DNA, 21 bp, Homo sapiens
catagcatggttatgtttatg

SEQ ID NO: 33063 - RNA, 21 nt, RNAi
uagcaugguuauguuuauguu

SEQ ID NO: 33064 - RNA, 21 nt, RNAi
uuaucguaccaauacaaauac

SEQ ID NO: 33065 - DNA, 21 bp, Homo sapiens
caaagccacgcagatgccaga

SEQ ID NO: 33066 - RNA, 21 nt, RNAi
aagccacgcagaugccagauu

SEQ ID NO: 33067 - RNA, 21 nt, RNAi
uuuucggugcgucuacggucu

SEQ ID NO: 33068 - DNA, 21 bp, Homo sapiens
catgtaccagctctataagcg

SEQ ID NO: 33069 - RNA, 21 nt, RNAi
uguaccagcucuauaagcguu

SEQ ID NO: 33070 - RNA, 21 nt, RNAi
uuacauggucgagauauucgc

SEQ ID NO: 33071 - DNA, 21 bp, Homo sapiens
cagctctataagcggacgttt

SEQ ID NO: 33072 - RNA, 21 nt, RNAi
gcucuauaagcggacguuuuu

SEQ ID NO: 33073 - RNA, 21 nt, RNAi
uucgagauauucgccugcaaa

SEQ ID NO: 33074 - DNA, 21 bp, Homo sapiens
caggtgacaaggcaactgtat

SEQ ID NO: 33075 - RNA, 21 nt, RNAi
ggugacaaggcaacuguauuu

SEQ ID NO: 33076 - RNA, 21 nt, RNAi
uuccacuguuccguugacaua

SEQ ID NO: 33077 - DNA, 21 bp, Homo sapiens
caaggcaactgtatgagccac

SEQ ID NO: 33078 - RNA, 21 nt, RNAi
aggcaacuguaugagccacuu

SEQ ID NO: 33079 - RNA, 21 nt, RNAi
uuuccguugacauacucggug

SEQ ID NO: 33080 - DNA, 21 bp, Homo sapiens
caactgtatgagccactagtt

SEQ ID NO: 33081 - RNA, 21 nt, RNAi
acuguaugagccacuaguuuu

SEQ ID NO: 33082 - RNA, 21 nt, RNAi
uuugacauacucggugaucaa

SEQ ID NO: 33083 - DNA, 21 bp, Homo sapiens
cactagttatgcagctgattc

SEQ ID NO: 33084 - RNA, 21 nt, RNAi
cuaguuaugcagcugauucuu

SEQ ID NO: 33085 - RNA, 21 nt, RNAi
uugaucaauacgucgacuaag

SEQ ID NO: 33086 - DNA, 21 bp, Homo sapiens
cagctgattcactggttcact

SEQ ID NO: 33087 - RNA, 21 nt, RNAi
gcugauucacugguucacuuu

SEQ ID NO: 33088 - RNA, 21 nt, RNAi
uucgacuaagugaccaaguga

SEQ ID NO: 33089 - DNA, 21 bp, Homo sapiens
cactggttcactaacaacaag

SEQ ID NO: 33090 - RNA, 21 nt, RNAi
cugguucacuaacaacaaguu

SEQ ID NO: 33091 - RNA, 21 nt, RNAi
uugaccaagugauuguuguuc

SEQ ID NO: 33092 - DNA, 21 bp, Homo sapiens
caagaaatttgaaagtcagga

SEQ ID NO: 33093 - RNA, 21 nt, RNAi
agaaauuugaaagucaggauu

SEQ ID NO: 33094 - RNA, 21 nt, RNAi
uuucuuuaaacuuucaguccu

SEQ ID NO: 33095 - DNA, 21 bp, Homo sapiens
caggatactgttgccttacta

SEQ ID NO: 33096 - RNA, 21 nt, RNAi
ggauacuguugccuuacuauu

SEQ ID NO: 33097 - RNA, 21 nt, RNAi
uuccuaugacaacggaaugau

SEQ ID NO: 33098 - DNA, 21 bp, Homo sapiens
cattaagcaaataacaccaca

SEQ ID NO: 33099 - RNA, 21 nt, RNAi
uuaagcaaauaacaccacauu

SEQ ID NO: 33100 - RNA, 21 nt, RNAi
uuaauucguuuauuguggugu

SEQ ID NO: 33101 - DNA, 21 bp, Homo sapiens
caaataacaccacagcagcag

SEQ ID NO: 33102 - RNA, 21 nt, RNAi
aauaacaccacagcagcaguu

SEQ ID NO: 33103 - RNA, 21 nt, RNAi
uuuuauuguggugucgucguc

SEQ ID NO: 33104 - DNA, 21 bp, Homo sapiens
caccacagcagcaggagaaga

SEQ ID NO: 33105 - RNA, 21 nt, RNAi
ccacagcagcaggagaagauu

SEQ ID NO: 33106 - RNA, 21 nt, RNAi
uuggugucgucguccucuucu

SEQ ID NO: 33107 - DNA, 21 bp, Homo sapiens
cacagcagcaggagaagagtc

SEQ ID NO: 33108 - RNA, 21 nt, RNAi
cagcagcaggagaagagucuu

SEQ ID NO: 33109 - RNA, 21 nt, RNAi
uugucgucguccucuucucag

SEQ ID NO: 33110 - DNA, 21 bp, Homo sapiens
cagcagcaggagaagagtcca

SEQ ID NO: 33111 - RNA, 21 nt, RNAi
gcagcaggagaagaguccauu

SEQ ID NO: 33112 - RNA, 21 nt, RNAi
uucgucguccucuucucaggu

SEQ ID NO: 33113 - DNA, 21 bp, Homo sapiens
cagcaggagaagagtccagta

SEQ ID NO: 33114 - RNA, 21 nt, RNAi
gcaggagaagaguccaguauu

SEQ ID NO: 33115 - RNA, 21 nt, RNAi
uucguccucuucucaggucau

SEQ ID NO: 33116 - DNA, 21 bp, Homo sapiens
caggagaagagtccagtaaac

SEQ ID NO: 33117 - RNA, 21 nt, RNAi
ggagaagaguccaguaaacuu

SEQ ID NO: 33118 - RNA, 21 nt, RNAi
uuccucuucucaggucauuug

SEQ ID NO: 33119 - DNA, 21 bp, Homo sapiens
cagtaaacaccaaatcgcttt

SEQ ID NO: 33120 - RNA, 21 nt, RNAi
guaaacaccaaaucgcuuuuu

SEQ ID NO: 33121 - RNA, 21 nt, RNAi
uucauuugugguuuagcgaaa

SEQ ID NO: 33122 - DNA, 21 bp, Homo sapiens
caagcgactttatagccttgc

SEQ ID NO: 33123 - RNA, 21 nt, RNAi
agcgacuuuauagccuugcuu

SEQ ID NO: 33124 - RNA, 21 nt, RNAi
uuucgcugaaauaucggaacg

SEQ ID NO: 33125 - DNA, 21 bp, Homo sapiens
cagtttgtgtttgaagccttg

SEQ ID NO: 33126 - RNA, 21 nt, RNAi
guuuguguuugaagccuuguu

SEQ ID NO: 33127 - RNA, 21 nt, RNAi
uucaaacacaaacuucggaac

SEQ ID NO: 33128 - DNA, 21 bp, Homo sapiens
catggagagtctggccttagc

SEQ ID NO: 33129 - RNA, 21 nt, RNAi
uggagagucuggccuuagcuu

SEQ ID NO: 33130 - RNA, 21 nt, RNAi
uuaccucucagaccggaaucg

SEQ ID NO: 33131 - DNA, 21 bp, Homo sapiens
cacatgcagatgagaagtcct

SEQ ID NO: 33132 - RNA, 21 nt, RNAi
caugcagaugagaaguccuuu

SEQ ID NO: 33133 - RNA, 21 nt, RNAi
uuguacgucuacucuucagga

SEQ ID NO: 33134 - DNA, 21 bp, Homo sapiens
catgcagatgagaagtcctta

SEQ ID NO: 33135 - RNA, 21 nt, RNAi
ugcagaugagaaguccuuauu

SEQ ID NO: 33136 - RNA, 21 nt, RNAi
uuacgucuacucuucaggaau

SEQ ID NO: 33137 - DNA, 21 bp, Homo sapiens
cagatgagaagtccttaggta

SEQ ID NO: 33138 - RNA, 21 nt, RNAi
gaugagaaguccuuagguauu

SEQ ID NO: 33139 - RNA, 21 nt, RNAi
uucuacucuucaggaauccau

SEQ ID NO: 33140 - DNA, 21 bp, Homo sapiens
caattcaacagtgttgtgatg

SEQ ID NO: 33141 - RNA, 21 nt, RNAi
auucaacaguguugugauguu

SEQ ID NO: 33142 - RNA, 21 nt, RNAi
uuuaaguugucacaacacuac

SEQ ID NO: 33143 - DNA, 21 bp, Homo sapiens
caacagtgttgtgatgccatt

SEQ ID NO: 33144 - RNA, 21 nt, RNAi
acaguguugugaugccauuuu

SEQ ID NO: 33145 - RNA, 21 nt, RNAi
uuugucacaacacuacgguaa

SEQ ID NO: 33146 - DNA, 21 bp, Homo sapiens
cagtgttgtgatgccattgat

SEQ ID NO: 33147 - RNA, 21 nt, RNAi
guguugugaugccauugauuu

SEQ ID NO: 33148 - RNA, 21 nt, RNAi
uucacaacacuacgguaacua

SEQ ID NO: 33149 - DNA, 21 bp, Homo sapiens
cattgatcacctatgccgcat

SEQ ID NO: 33150 - RNA, 21 nt, RNAi
uugaucaccuaugccgcauuu

SEQ ID NO: 33151 - RNA, 21 nt, RNAi
uuaacuaguggauacggcgua

SEQ ID NO: 33152 - DNA, 21 bp, Homo sapiens
cacctatgccgcatcattgaa

SEQ ID NO: 33153 - RNA, 21 nt, RNAi
ccuaugccgcaucauugaauu

SEQ ID NO: 33154 - RNA, 21 nt, RNAi
uuggauacggcguaguaacuu

SEQ ID NO: 33155 - DNA, 21 bp, Homo sapiens
caaagaaacgacgtttgccgc

SEQ ID NO: 33156 - RNA, 21 nt, RNAi
aagaaacgacguuugccgcuu

SEQ ID NO: 33157 - RNA, 21 nt, RNAi
uuuucuuugcugcaaacggcg

SEQ ID NO: 33158 - DNA, 21 bp, Homo sapiens
caccttccgcatcattgtgtt

SEQ ID NO: 33159 - RNA, 21 nt, RNAi
ccuuccgcaucauuguguuuu

SEQ ID NO: 33160 - RNA, 21 nt, RNAi
uuggaaggcguaguaacacaa

SEQ ID NO: 33161 - DNA, 21 bp, Homo sapiens
catcattgtgtttattggatc

SEQ ID NO: 33162 - RNA, 21 nt, RNAi
ucauuguguuuauuggaucuu

SEQ ID NO: 33163 - RNA, 21 nt, RNAi
uuaguaacacaaauaaccuag

SEQ ID NO: 33164 - DNA, 21 bp, Homo sapiens
cattgtgtttattggatctgg

SEQ ID NO: 33165 - RNA, 21 nt, RNAi
uuguguuuauuggaucugguu

SEQ ID NO: 33166 - RNA, 21 nt, RNAi
uuaacacaaauaaccuagacc

SEQ ID NO: 33167 - DNA, 21 bp, Homo sapiens
cagacagaatgtcgacacaaa

SEQ ID NO: 33168 - RNA, 21 nt, RNAi
gacagaaugucgacacaaauu

SEQ ID NO: 33169 - RNA, 21 nt, RNAi
uucugucuuacagcuguguuu

SEQ ID NO: 33170 - DNA, 21 bp, Homo sapiens
cagaatgtcgacacaaatcca

SEQ ID NO: 33171 - RNA, 21 nt, RNAi
gaaugucgacacaaauccauu

SEQ ID NO: 33172 - RNA, 21 nt, RNAi
uucuuacagcuguguuuaggu

SEQ ID NO: 33173 - DNA, 21 bp, Homo sapiens
cacaaatccattgaactcttt

SEQ ID NO: 33174 - RNA, 21 nt, RNAi
caaauccauugaacucuuuuu

SEQ ID NO: 33175 - RNA, 21 nt, RNAi
uuguuuagguaacuugagaaa

SEQ ID NO: 33176 - DNA, 21 bp, Homo sapiens
caaggaagaaggtgtctcttt

SEQ ID NO: 33177 - RNA, 21 nt, RNAi
aggaagaaggugucucuuuuu

SEQ ID NO: 33178 - RNA, 21 nt, RNAi
uuuccuucuuccacagagaaa

SEQ ID NO: 33179 - DNA, 21 bp, Homo sapiens
cacgctatgctggctggacct

SEQ ID NO: 33180 - RNA, 21 nt, RNAi
cgcuaugcuggcuggaccuuu

SEQ ID NO: 33181 - RNA, 21 nt, RNAi
uugcgauacgaccgaccugga

SEQ ID NO: 33182 - DNA, 21 bp, Homo sapiens
caacacgttcattggcgagag

SEQ ID NO: 33183 - RNA, 21 nt, RNAi
acacguucauuggcgagaguu

SEQ ID NO: 33184 - RNA, 21 nt, RNAi
uuugugcaaguaaccgcucuc

SEQ ID NO: 33185 - DNA, 21 bp, Homo sapiens
cacgttcattggcgagagaac

SEQ ID NO: 33186 - RNA, 21 nt, RNAi
cguucauuggcgagagaacuu

SEQ ID NO: 33187 - RNA, 21 nt, RNAi
uugcaaguaaccgcucucuug

SEQ ID NO: 33188 - DNA, 21 bp, Homo sapiens
cattggcgagagaactgtagg

SEQ ID NO: 33189 - RNA, 21 nt, RNAi
uuggcgagagaacuguagguu

SEQ ID NO: 33190 - RNA, 21 nt, RNAi
uuaaccgcucucuugacaucc

SEQ ID NO: 33191 - DNA, 21 bp, Homo sapiens
caggtcctaggtactgaagcc

SEQ ID NO: 33192 - RNA, 21 nt, RNAi
gguccuagguacugaagccuu

SEQ ID NO: 33193 - RNA, 21 nt, RNAi
uuccaggauccaugacuucgg

SEQ ID NO: 33194 - DNA, 21 bp, Homo sapiens
cagtggctttcttcttagaaa

SEQ ID NO: 33195 - RNA, 21 nt, RNAi
guggcuuucuucuuagaaauu

SEQ ID NO: 33196 - RNA, 21 nt, RNAi
uucaccgaaagaagaaucuuu

SEQ ID NO: 33197 - DNA, 21 bp, Homo sapiens
cattgccatgcatgacattat

SEQ ID NO: 33198 - RNA, 21 nt, RNAi
uugccaugcaugacauuauuu

SEQ ID NO: 33199 - RNA, 21 nt, RNAi
uuaacgguacguacuguaaua

SEQ ID NO: 33200 - DNA, 21 bp, Homo sapiens
catgcatgacattatagcagc

SEQ ID NO: 33201 - RNA, 21 nt, RNAi
ugcaugacauuauagcagcuu

SEQ ID NO: 33202 - RNA, 21 nt, RNAi
uuacguacuguaauaucgucg

SEQ ID NO: 33203 - DNA, 21 bp, Homo sapiens
catgacattatagcagcagaa

SEQ ID NO: 33204 - RNA, 21 nt, RNAi
ugacauuauagcagcagaauu

SEQ ID NO: 33205 - RNA, 21 nt, RNAi
uuacuguaauaucgucgucuu

SEQ ID NO: 33206 - DNA, 21 bp, Homo sapiens
cagcaggtaacagaacaagcc

SEQ ID NO: 33207 - RNA, 21 nt, RNAi
gcagguaacagaacaagccuu

SEQ ID NO: 33208 - RNA, 21 nt, RNAi
uucguccauugucuuguucgg

SEQ ID NO: 33209 - DNA, 21 bp, Homo sapiens
caactacagcaaatgcaccgt

SEQ ID NO: 33210 - RNA, 21 nt, RNAi
acuacagcaaaugcaccguuu

SEQ ID NO: 33211 - RNA, 21 nt, RNAi
uuugaugucguuuacguggca

SEQ ID NO: 33212 - DNA, 21 bp, Homo sapiens
cagcaaatgcaccgttgtggt

SEQ ID NO: 33213 - RNA, 21 nt, RNAi
gcaaaugcaccguugugguuu

SEQ ID NO: 33214 - RNA, 21 nt, RNAi
uucguuuacguggcaacacca

SEQ ID NO: 33215 - DNA, 21 bp, Homo sapiens
caaatgcaccgttgtggtccg

SEQ ID NO: 33216 - RNA, 21 nt, RNAi
aaugcaccguugugguccguu

SEQ ID NO: 33217 - RNA, 21 nt, RNAi
uuuuacguggcaacaccaggc

SEQ ID NO: 33218 - DNA, 21 bp, Homo sapiens
caccgttgtggtccggattat

SEQ ID NO: 33219 - RNA, 21 nt, RNAi
ccguugugguccggauuauuu

SEQ ID NO: 33220 - RNA, 21 nt, RNAi
uuggcaacaccaggccuaaua

SEQ ID NO: 33221 - DNA, 21 bp, Homo sapiens
cacgactctgctaaacacctc

SEQ ID NO: 33222 - RNA, 21 nt, RNAi
cgacucugcuaaacaccucuu

SEQ ID NO: 33223 - RNA, 21 nt, RNAi
uugcugagacgauuuguggag

SEQ ID NO: 33224 - DNA, 21 bp, Homo sapiens
cacacctgatgagagtcctgg

SEQ ID NO: 33225 - RNA, 21 nt, RNAi
caccugaugagaguccugguu

SEQ ID NO: 33226 - RNA, 21 nt, RNAi
uuguggacuacucucaggacc

SEQ ID NO: 33227 - DNA, 21 bp, Homo sapiens
cacctgatgagagtcctggtg

SEQ ID NO: 33228 - RNA, 21 nt, RNAi
ccugaugagaguccugguguu

SEQ ID NO: 33229 - RNA, 21 nt, RNAi
uuggacuacucucaggaccac

SEQ ID NO: 33230 - DNA, 21 bp, Homo sapiens
caagcataggtttcaacatcg

SEQ ID NO: 33231 - RNA, 21 nt, RNAi
agcauagguuucaacaucguu

SEQ ID NO: 33232 - RNA, 21 nt, RNAi
uuucguauccaaaguuguagc

SEQ ID NO: 33233 - DNA, 21 bp, Homo sapiens
cataggtttcaacatcggaga

SEQ ID NO: 33234 - RNA, 21 nt, RNAi
uagguuucaacaucggagauu

SEQ ID NO: 33235 - RNA, 21 nt, RNAi
uuauccaaaguuguagccucu

SEQ ID NO: 33236 - DNA, 21 bp, Homo sapiens
caacatcggagacgtccaggt

SEQ ID NO: 33237 - RNA, 21 nt, RNAi
acaucggagacguccagguuu

SEQ ID NO: 33238 - RNA, 21 nt, RNAi
uuuguagccucugcaggucca

SEQ ID NO: 33239 - DNA, 21 bp, Homo sapiens
catcggagacgtccaggttat

SEQ ID NO: 33240 - RNA, 21 nt, RNAi
ucggagacguccagguuauuu

SEQ ID NO: 33241 - RNA, 21 nt, RNAi
uuagccucugcagguccaaua

SEQ ID NO: 33242 - DNA, 21 bp, Homo sapiens
caggttatggctcatcttcct

SEQ ID NO: 33243 - RNA, 21 nt, RNAi
gguuauggcucaucuuccuuu

SEQ ID NO: 33244 - RNA, 21 nt, RNAi
uuccaauaccgaguagaagga

SEQ ID NO: 33245 - DNA, 21 bp, Homo sapiens
catcttcctgatgtttgtgtg

SEQ ID NO: 33246 - RNA, 21 nt, RNAi
ucuuccugauguuuguguguu

SEQ ID NO: 33247 - RNA, 21 nt, RNAi
uuagaaggacuacaaacacac

SEQ ID NO: 33248 - DNA, 21 bp, Homo sapiens
catacaaagatatcctagaga

SEQ ID NO: 33249 - RNA, 21 nt, RNAi
uacaaagauauccuagagauu

SEQ ID NO: 33250 - RNA, 21 nt, RNAi
uuauguuucuauaggaucucu

SEQ ID NO: 33251 - DNA, 21 bp, Homo sapiens
cagcacagagcattgaggagc

SEQ ID NO: 33252 - RNA, 21 nt, RNAi
gcacagagcauugaggagcuu

SEQ ID NO: 33253 - RNA, 21 nt, RNAi
uucgugucucguaacuccucg

SEQ ID NO: 33254 - DNA, 21 bp, Homo sapiens
cacagagcattgaggagcttt

SEQ ID NO: 33255 - RNA, 21 nt, RNAi
cagagcauugaggagcuuuuu

SEQ ID NO: 33256 - RNA, 21 nt, RNAi
uugucucguaacuccucgaaa

SEQ ID NO: 33257 - DNA, 21 bp, Homo sapiens
cagagcattgaggagctttgt

SEQ ID NO: 33258 - RNA, 21 nt, RNAi
gagcauugaggagcuuuguuu

SEQ ID NO: 33259 - RNA, 21 nt, RNAi
uucucguaacuccucgaaaca

SEQ ID NO: 33260 - DNA, 21 bp, Homo sapiens
cattgaggagctttgtgccgt

SEQ ID NO: 33261 - RNA, 21 nt, RNAi
uugaggagcuuugugccguuu

SEQ ID NO: 33262 - RNA, 21 nt, RNAi
uuaacuccucgaaacacggca

SEQ ID NO: 33263 - DNA, 21 bp, Homo sapiens
caagtggacaggagcaggctg

SEQ ID NO: 33264 - RNA, 21 nt, RNAi
aguggacaggagcaggcuguu

SEQ ID NO: 33265 - RNA, 21 nt, RNAi
uuucaccuguccucguccgac

SEQ ID NO: 33266 - DNA, 21 bp, Homo sapiens
caggctggctgctgttgtgtc

SEQ ID NO: 33267 - RNA, 21 nt, RNAi
ggcuggcugcuguugugucuu

SEQ ID NO: 33268 - RNA, 21 nt, RNAi
uuccgaccgacgacaacacag

SEQ ID NO: 33269 - DNA, 21 bp, Homo sapiens
cataatatattaccgtctcag

SEQ ID NO: 33270 - RNA, 21 nt, RNAi
uaauauauuaccgucucaguu

SEQ ID NO: 33271 - RNA, 21 nt, RNAi
uuauuauauaauggcagaguc

SEQ ID NO: 33272 - DNA, 21 bp, Homo sapiens
cagtccacagatttgcatcat

SEQ ID NO: 33273 - RNA, 21 nt, RNAi
guccacagauuugcaucauuu

SEQ ID NO: 33274 - RNA, 21 nt, RNAi
uucaggugucuaaacguagua

SEQ ID NO: 33275 - DNA, 21 bp, Homo sapiens
cacagatttgcatcattctgt

SEQ ID NO: 33276 - RNA, 21 nt, RNAi
cagauuugcaucauucuguuu

SEQ ID NO: 33277 - RNA, 21 nt, RNAi
uugucuaaacguaguaagaca

SEQ ID NO: 33278 - DNA, 21 bp, Homo sapiens
cagatttgcatcattctgttg

SEQ ID NO: 33279 - RNA, 21 nt, RNAi
gauuugcaucauucuguuguu

SEQ ID NO: 33280 - RNA, 21 nt, RNAi
uucuaaacguaguaagacaac

SEQ ID NO: 33281 - DNA, 21 bp, Homo sapiens
catcattctgttggcacagaa

SEQ ID NO: 33282 - RNA, 21 nt, RNAi
ucauucuguuggcacagaauu

SEQ ID NO: 33283 - RNA, 21 nt, RNAi
uuaguaagacaaccgugucuu

SEQ ID NO: 33284 - DNA, 21 bp, Homo sapiens
cattctgttggcacagaactt

SEQ ID NO: 33285 - RNA, 21 nt, RNAi
uucuguuggcacagaacuuuu

SEQ ID NO: 33286 - RNA, 21 nt, RNAi
uuaagacaaccgugucuugaa

SEQ ID NO: 33287 - DNA, 21 bp, Homo sapiens
cagtgtctgccttctctagac

SEQ ID NO: 33288 - RNA, 21 nt, RNAi
gugucugccuucucuagacuu

SEQ ID NO: 33289 - RNA, 21 nt, RNAi
uucacagacggaagagaucug

SEQ ID NO: 33290 - DNA, 21 bp, Homo sapiens
cagttgtaagcagctggccag

SEQ ID NO: 33291 - RNA, 21 nt, RNAi
guuguaagcagcuggccaguu

SEQ ID NO: 33292 - RNA, 21 nt, RNAi
uucaacauucgucgaccgguc

SEQ ID NO: 33293 - DNA, 21 bp, Homo sapiens
cagcggacttctggagttagc

SEQ ID NO: 33294 - RNA, 21 nt, RNAi
gcggacuucuggaguuagcuu

SEQ ID NO: 33295 - RNA, 21 nt, RNAi
uucgccugaagaccucaaucg

SEQ ID NO: 33296 - DNA, 21 bp, Homo sapiens
cagaaacgatcaacacggaat

SEQ ID NO: 33297 - RNA, 21 nt, RNAi
gaaacgaucaacacggaauuu

SEQ ID NO: 33298 - RNA, 21 nt, RNAi
uucuuugcuaguugugccuua

SEQ ID NO: 33299 - DNA, 21 bp, Homo sapiens
catgcagtcttcagtggataa

SEQ ID NO: 33300 - RNA, 21 nt, RNAi
ugcagucuucaguggauaauu

SEQ ID NO: 33301 - RNA, 21 nt, RNAi
uuacgucagaagucaccuauu

SEQ ID NO: 33302 - DNA, 21 bp, Homo sapiens
cagtcttcagtggataatacc

SEQ ID NO: 33303 - RNA, 21 nt, RNAi
gucuucaguggauaauaccuu

SEQ ID NO: 33304 - RNA, 21 nt, RNAi
uucagaagucaccuauuaugg

SEQ ID NO: 33305 - DNA, 21 bp, Homo sapiens
catgttagaccagagcttcag

SEQ ID NO: 33306 - RNA, 21 nt, RNAi
uguuagaccagagcuucaguu

SEQ ID NO: 33307 - RNA, 21 nt, RNAi
uuacaaucuggucucgaaguc

SEQ ID NO: 33308 - DNA, 21 bp, Homo sapiens
caaaccagaaacaccaaggac

SEQ ID NO: 33309 - RNA, 21 nt, RNAi
aaccagaaacaccaaggacuu

SEQ ID NO: 33310 - RNA, 21 nt, RNAi
uuuuggucuuugugguuccug

SEQ ID NO: 33311 - DNA, 21 bp, Homo sapiens
cagaaacaccaaggactgaaa

SEQ ID NO: 33312 - RNA, 21 nt, RNAi
gaaacaccaaggacugaaauu

SEQ ID NO: 33313 - RNA, 21 nt, RNAi
uucuuugugguuccugacuuu

SEQ ID NO: 33314 - DNA, 21 bp, Homo sapiens
caccaaggactgaaacttgcg

SEQ ID NO: 33315 - RNA, 21 nt, RNAi
ccaaggacugaaacuugcguu

SEQ ID NO: 33316 - RNA, 21 nt, RNAi
uugguuccugacuuugaacgc

SEQ ID NO: 33317 - DNA, 21 bp, Homo sapiens
caaggactgaaacttgcgact

SEQ ID NO: 33318 - RNA, 21 nt, RNAi
aggacugaaacuugcgacuuu

SEQ ID NO: 33319 - RNA, 21 nt, RNAi
uuuccugacuuugaacgcuga

SEQ ID NO: 33320 - DNA, 21 bp, Homo sapiens
caattctgcaacactggaaga

SEQ ID NO: 33321 - RNA, 21 nt, RNAi
auucugcaacacuggaagauu

SEQ ID NO: 33322 - RNA, 21 nt, RNAi
uuuaagacguugugaccuucu

SEQ ID NO: 33323 - DNA, 21 bp, Homo sapiens
caacactggaagaagtgtgat

SEQ ID NO: 33324 - RNA, 21 nt, RNAi
acacuggaagaagugugauuu

SEQ ID NO: 33325 - RNA, 21 nt, RNAi
uuugugaccuucuucacacua

SEQ ID NO: 33326 - DNA, 21 bp, Homo sapiens
cactggaagaagtgtgattca

SEQ ID NO: 33327 - RNA, 21 nt, RNAi
cuggaagaagugugauucauu

SEQ ID NO: 33328 - RNA, 21 nt, RNAi
uugaccuucuucacacuaagu

SEQ ID NO: 33329 - DNA, 21 bp, Homo sapiens
cagtgctggccttactggcaa

SEQ ID NO: 33330 - RNA, 21 nt, RNAi
gugcuggccuuacuggcaauu

SEQ ID NO: 33331 - RNA, 21 nt, RNAi
uucacgaccggaaugaccguu

SEQ ID NO: 33332 - DNA, 21 bp, Homo sapiens
cagattgattcatctgtatct

SEQ ID NO: 33333 - RNA, 21 nt, RNAi
gauugauucaucuguaucuuu

SEQ ID NO: 33334 - RNA, 21 nt, RNAi
uucuaacuaaguagacauaga

SEQ ID NO: 33335 - DNA, 21 bp, Homo sapiens
catatattagtctacttgctg

SEQ ID NO: 33336 - RNA, 21 nt, RNAi
uauauuagucuacuugcuguu

SEQ ID NO: 33337 - RNA, 21 nt, RNAi
uuauauaaucagaugaacgac

SEQ ID NO: 33338 - DNA, 21 bp, Homo sapiens
cacaaagctggatctacattt

SEQ ID NO: 33339 - RNA, 21 nt, RNAi
caaagcuggaucuacauuuuu

SEQ ID NO: 33340 - RNA, 21 nt, RNAi
uuguuucgaccuagauguaaa

SEQ ID NO: 33341 - DNA, 21 bp, Homo sapiens
caaagctggatctacatttaa

SEQ ID NO: 33342 - RNA, 21 nt, RNAi
aagcuggaucuacauuuaauu

SEQ ID NO: 33343 - RNA, 21 nt, RNAi
uuuucgaccuagauguaaauu

SEQ ID NO: 33344 - DNA, 21 bp, Homo sapiens
caagctgtcactcttcttcca

SEQ ID NO: 33345 - RNA, 21 nt, RNAi
agcugucacucuucuuccauu

SEQ ID NO: 33346 - RNA, 21 nt, RNAi
uuucgacagugagaagaaggu

SEQ ID NO: 33347 - DNA, 21 bp, Homo sapiens
cactcttcttccattcttcac

SEQ ID NO: 33348 - RNA, 21 nt, RNAi
cucuucuuccauucuucacuu

SEQ ID NO: 33349 - RNA, 21 nt, RNAi
uugagaagaagguaagaagug

SEQ ID NO: 33350 - DNA, 21 bp, Homo sapiens
cattcttcaccagcctcactg

SEQ ID NO: 33351 - RNA, 21 nt, RNAi
uucuucaccagccucacuguu

SEQ ID NO: 33352 - RNA, 21 nt, RNAi
uuaagaaguggucggagugac

SEQ ID NO: 33353 - DNA, 21 bp, Homo sapiens
cagcctcactggaggcagtct

SEQ ID NO: 33354 - RNA, 21 nt, RNAi
gccucacuggaggcagucuuu

SEQ ID NO: 33355 - RNA, 21 nt, RNAi
uucggagugaccuccgucaga

SEQ ID NO: 33356 - DNA, 21 bp, Homo sapiens
cactggaggcagtctggagga

SEQ ID NO: 33357 - RNA, 21 nt, RNAi
cuggaggcagucuggaggauu

SEQ ID NO: 33358 - RNA, 21 nt, RNAi
uugaccuccgucagaccuccu

SEQ ID NO: 33359 - DNA, 21 bp, Homo sapiens
cagtctggaggaacttagacg

SEQ ID NO: 33360 - RNA, 21 nt, RNAi
gucuggaggaacuuagacguu

SEQ ID NO: 33361 - RNA, 21 nt, RNAi
uucagaccuccuugaaucugc

SEQ ID NO: 33362 - DNA, 21 bp, Homo sapiens
cagctcatcgttgctcacttc

SEQ ID NO: 33363 - RNA, 21 nt, RNAi
gcucaucguugcucacuucuu

SEQ ID NO: 33364 - RNA, 21 nt, RNAi
uucgaguagcaacgagugaag

SEQ ID NO: 33365 - DNA, 21 bp, Homo sapiens
caggaactccgcggttcaata

SEQ ID NO: 33366 - RNA, 21 nt, RNAi
ggaacuccgcgguucaauauu

SEQ ID NO: 33367 - RNA, 21 nt, RNAi
uuccuugaggcgccaaguuau

SEQ ID NO: 33368 - DNA, 21 bp, Homo sapiens
caataattatgtggactgcat

SEQ ID NO: 33369 - RNA, 21 nt, RNAi
auaauuauguggacugcauuu

SEQ ID NO: 33370 - RNA, 21 nt, RNAi
uuuauuaauacaccugacgua

SEQ ID NO: 33371 - DNA, 21 bp, Homo sapiens
cattggaattatctcaaagcc

SEQ ID NO: 33372 - RNA, 21 nt, RNAi
uuggaauuaucucaaagccuu

SEQ ID NO: 33373 - RNA, 21 nt, RNAi
uuaaccuuaauagaguuucgg

SEQ ID NO: 33374 - DNA, 21 bp, Homo sapiens
cagcagcatgtcatggaagaa

SEQ ID NO: 33375 - RNA, 21 nt, RNAi
gcagcaugucauggaagaauu

SEQ ID NO: 33376 - RNA, 21 nt, RNAi
uucgucguacaguaccuucuu

SEQ ID NO: 33377 - DNA, 21 bp, Homo sapiens
cagcatgtcatggaagaatta

SEQ ID NO: 33378 - RNA, 21 nt, RNAi
gcaugucauggaagaauuauu

SEQ ID NO: 33379 - RNA, 21 nt, RNAi
uucguacaguaccuucuuaau

SEQ ID NO: 33380 - DNA, 21 bp, Homo sapiens
caatccagtttcaggaggatt

SEQ ID NO: 33381 - RNA, 21 nt, RNAi
auccaguuucaggaggauuuu

SEQ ID NO: 33382 - RNA, 21 nt, RNAi
uuuaggucaaaguccuccuaa

SEQ ID NO: 33383 - DNA, 21 bp, Homo sapiens
cagtttcaggaggattgccag

SEQ ID NO: 33384 - RNA, 21 nt, RNAi
guuucaggaggauugccaguu

SEQ ID NO: 33385 - RNA, 21 nt, RNAi
uucaaaguccuccuaacgguc

SEQ ID NO: 33386 - DNA, 21 bp, Homo sapiens
catgtgtcacacaagtaggcc

SEQ ID NO: 33387 - RNA, 21 nt, RNAi
ugugucacacaaguaggccuu

SEQ ID NO: 33388 - RNA, 21 nt, RNAi
uuacacaguguguucauccgg

SEQ ID NO: 33389 - DNA, 21 bp, Homo sapiens
cacacaagtaggccttctgga

SEQ ID NO: 33390 - RNA, 21 nt, RNAi
cacaaguaggccuucuggauu

SEQ ID NO: 33391 - RNA, 21 nt, RNAi
uuguguucauccggaagaccu

SEQ ID NO: 33392 - DNA, 21 bp, Homo sapiens
cacaagtaggccttctggaaa

SEQ ID NO: 33393 - RNA, 21 nt, RNAi
caaguaggccuucuggaaauu

SEQ ID NO: 33394 - RNA, 21 nt, RNAi
uuguucauccggaagaccuuu

SEQ ID NO: 33395 - DNA, 21 bp, Homo sapiens
caagtaggccttctggaaagc

SEQ ID NO: 33396 - RNA, 21 nt, RNAi
aguaggccuucuggaaagcuu

SEQ ID NO: 33397 - RNA, 21 nt, RNAi
uuucauccggaagaccuuucg

SEQ ID NO: 33398 - DNA, 21 bp, Homo sapiens
cacacgccagtcctttgtgga

SEQ ID NO: 33399 - RNA, 21 nt, RNAi
cacgccaguccuuuguggauu

SEQ ID NO: 33400 - RNA, 21 nt, RNAi
uugugcggucaggaaacaccu

SEQ ID NO: 33401 - DNA, 21 bp, Homo sapiens
cacgccagtcctttgtggacc

SEQ ID NO: 33402 - RNA, 21 nt, RNAi
cgccaguccuuuguggaccuu

SEQ ID NO: 33403 - RNA, 21 nt, RNAi
uugcggucaggaaacaccugg

SEQ ID NO: 33404 - DNA, 21 bp, Homo sapiens
cagtcctttgtggaccgctcc

SEQ ID NO: 33405 - RNA, 21 nt, RNAi
guccuuuguggaccgcuccuu

SEQ ID NO: 33406 - RNA, 21 nt, RNAi
uucaggaaacaccuggcgagg

SEQ ID NO: 33407 - DNA, 21 bp, Homo sapiens
cactctgctgtggcactgtag

SEQ ID NO: 33408 - RNA, 21 nt, RNAi
cucugcuguggcacuguaguu

SEQ ID NO: 33409 - RNA, 21 nt, RNAi
uugagacgacaccgugacauc

SEQ ID NO: 33410 - DNA, 21 bp, Homo sapiens
cactgtagcctggatgctttg

SEQ ID NO: 33411 - RNA, 21 nt, RNAi
cuguagccuggaugcuuuguu

SEQ ID NO: 33412 - RNA, 21 nt, RNAi
uugacaucggaccuacgaaac

SEQ ID NO: 33413 - DNA, 21 bp, Homo sapiens
cagcacaattgtggtggatgc

SEQ ID NO: 33414 - RNA, 21 nt, RNAi
gcacaauugugguggaugcuu

SEQ ID NO: 33415 - RNA, 21 nt, RNAi
uucguguuaacaccaccuacg

SEQ ID NO: 33416 - DNA, 21 bp, Homo sapiens
cacaattgtggtggatgccat

SEQ ID NO: 33417 - RNA, 21 nt, RNAi
caauugugguggaugccauuu

SEQ ID NO: 33418 - RNA, 21 nt, RNAi
uuguuaacaccaccuacggua

SEQ ID NO: 33419 - DNA, 21 bp, Homo sapiens
caattgtggtggatgccattg

SEQ ID NO: 33420 - RNA, 21 nt, RNAi
auugugguggaugccauuguu

SEQ ID NO: 33421 - RNA, 21 nt, RNAi
uuuaacaccaccuacgguaac

SEQ ID NO: 33422 - DNA, 21 bp, Homo sapiens
cattgatgtgttgaagtccag

SEQ ID NO: 33423 - RNA, 21 nt, RNAi
uugauguguugaaguccaguu

SEQ ID NO: 33424 - RNA, 21 nt, RNAi
uuaacuacacaacuucagguc

SEQ ID NO: 33425 - DNA, 21 bp, Homo sapiens
caggtttacaaagctaaatga

SEQ ID NO: 33426 - RNA, 21 nt, RNAi
gguuuacaaagcuaaaugauu

SEQ ID NO: 33427 - RNA, 21 nt, RNAi
uuccaaauguuucgauuuacu

SEQ ID NO: 33428 - DNA, 21 bp, Homo sapiens
caaagctaaatgaatctacct

SEQ ID NO: 33429 - RNA, 21 nt, RNAi
aagcuaaaugaaucuaccuuu

SEQ ID NO: 33430 - RNA, 21 nt, RNAi
uuuucgauuuacuuagaugga

SEQ ID NO: 33431 - DNA, 21 bp, Homo sapiens
caaagatgatgttcatgctaa

SEQ ID NO: 33432 - RNA, 21 nt, RNAi
aagaugauguucaugcuaauu

SEQ ID NO: 33433 - RNA, 21 nt, RNAi
uuuucuacuacaaguacgauu

SEQ ID NO: 33434 - DNA, 21 bp, Homo sapiens
catggctcgtgtattacagaa

SEQ ID NO: 33435 - RNA, 21 nt, RNAi
uggcucguguauuacagaauu

SEQ ID NO: 33436 - RNA, 21 nt, RNAi
uuaccgagcacauaaugucuu

SEQ ID NO: 33437 - DNA, 21 bp, Homo sapiens
cagaaggaaatgaacttacaa

SEQ ID NO: 33438 - RNA, 21 nt, RNAi
gaaggaaaugaacuuacaauu

SEQ ID NO: 33439 - RNA, 21 nt, RNAi
uucuuccuuuacuugaauguu

SEQ ID NO: 33440 - DNA, 21 bp, Homo sapiens
cattgattaaattgtgctacg

SEQ ID NO: 33441 - RNA, 21 nt, RNAi
uugauuaaauugugcuacguu

SEQ ID NO: 33442 - RNA, 21 nt, RNAi
uuaacuaauuuaacacgaugc

SEQ ID NO: 33443 - DNA, 21 bp, Homo sapiens
catttacagagaacatggcag

SEQ ID NO: 33444 - RNA, 21 nt, RNAi
uuuacagagaacauggcaguu

SEQ ID NO: 33445 - RNA, 21 nt, RNAi
uuaaaugucucuuguaccguc

SEQ ID NO: 33446 - DNA, 21 bp, Homo sapiens
cagagaacatggcaggagaga

SEQ ID NO: 33447 - RNA, 21 nt, RNAi
gagaacauggcaggagagauu

SEQ ID NO: 33448 - RNA, 21 nt, RNAi
uucucuuguaccguccucucu

SEQ ID NO: 33449 - DNA, 21 bp, Homo sapiens
catggcaggagagaatcagct

SEQ ID NO: 33450 - RNA, 21 nt, RNAi
uggcaggagagaaucagcuuu

SEQ ID NO: 33451 - RNA, 21 nt, RNAi
uuaccguccucucuuagucga

SEQ ID NO: 33452 - DNA, 21 bp, Homo sapiens
caggagagaatcagctgctgg

SEQ ID NO: 33453 - RNA, 21 nt, RNAi
ggagagaaucagcugcugguu

SEQ ID NO: 33454 - RNA, 21 nt, RNAi
uuccucucuuagucgacgacc

SEQ ID NO: 33455 - DNA, 21 bp, Homo sapiens
cagctgctggagaggagaaga

SEQ ID NO: 33456 - RNA, 21 nt, RNAi
gcugcuggagaggagaagauu

SEQ ID NO: 33457 - RNA, 21 nt, RNAi
uucgacgaccucuccucuucu

SEQ ID NO: 33458 - DNA, 21 bp, Homo sapiens
cattgtgcagcatacaactgc

SEQ ID NO: 33459 - RNA, 21 nt, RNAi
uugugcagcauacaacugcuu

SEQ ID NO: 33460 - RNA, 21 nt, RNAi
uuaacacgucguauguugacg

SEQ ID NO: 33461 - DNA, 21 bp, Homo sapiens
cagcatacaactgcgccatat

SEQ ID NO: 33462 - RNA, 21 nt, RNAi
gcauacaacugcgccauauuu

SEQ ID NO: 33463 - RNA, 21 nt, RNAi
uucguauguugacgcgguaua

SEQ ID NO: 33464 - DNA, 21 bp, Homo sapiens
catacaactgcgccatatctg

SEQ ID NO: 33465 - RNA, 21 nt, RNAi
uacaacugcgccauaucuguu

SEQ ID NO: 33466 - RNA, 21 nt, RNAi
uuauguugacgcgguauagac

SEQ ID NO: 33467 - DNA, 21 bp, Homo sapiens
caactgcgccatatctgtcat

SEQ ID NO: 33468 - RNA, 21 nt, RNAi
acugcgccauaucugucauuu

SEQ ID NO: 33469 - RNA, 21 nt, RNAi
uuugacgcgguauagacagua

SEQ ID NO: 33470 - DNA, 21 bp, Homo sapiens
catatctgtcatctgctgtgt

SEQ ID NO: 33471 - RNA, 21 nt, RNAi
uaucugucaucugcuguguuu

SEQ ID NO: 33472 - RNA, 21 nt, RNAi
uuauagacaguagacgacaca

SEQ ID NO: 33473 - DNA, 21 bp, Homo sapiens
catctgctgtgtcttcaatga

SEQ ID NO: 33474 - RNA, 21 nt, RNAi
ucugcugugucuucaaugauu

SEQ ID NO: 33475 - RNA, 21 nt, RNAi
uuagacgacacagaaguuacu

SEQ ID NO: 33476 - DNA, 21 bp, Homo sapiens
cattgaaattaggaaagaagc

SEQ ID NO: 33477 - RNA, 21 nt, RNAi
uugaaauuaggaaagaagcuu

SEQ ID NO: 33478 - RNA, 21 nt, RNAi
uuaacuuuaauccuuucuucg

SEQ ID NO: 33479 - DNA, 21 bp, Homo sapiens
cagatggtccttcctatatgt

SEQ ID NO: 33480 - RNA, 21 nt, RNAi
gaugguccuuccuauauguuu

SEQ ID NO: 33481 - RNA, 21 nt, RNAi
uucuaccaggaaggauauaca

SEQ ID NO: 33482 - DNA, 21 bp, Homo sapiens
caatttgatttctcaaccgga

SEQ ID NO: 33483 - RNA, 21 nt, RNAi
auuugauuucucaaccggauu

SEQ ID NO: 33484 - RNA, 21 nt, RNAi
uuuaaacuaaagaguuggccu

SEQ ID NO: 33485 - DNA, 21 bp, Homo sapiens
caaccggagttcagagctatt

SEQ ID NO: 33486 - RNA, 21 nt, RNAi
accggaguucagagcuauuuu

SEQ ID NO: 33487 - RNA, 21 nt, RNAi
uuuggccucaagucucgauaa

SEQ ID NO: 33488 - DNA, 21 bp, Homo sapiens
cagagctattcatacagctcc

SEQ ID NO: 33489 - RNA, 21 nt, RNAi
gagcuauucauacagcuccuu

SEQ ID NO: 33490 - RNA, 21 nt, RNAi
uucucgauaaguaugucgagg

SEQ ID NO: 33491 - DNA, 21 bp, Homo sapiens
cacggtgcatgatgatgtgct

SEQ ID NO: 33492 - RNA, 21 nt, RNAi
cggugcaugaugaugugcuuu

SEQ ID NO: 33493 - RNA, 21 nt, RNAi
uugccacguacuacuacacga

SEQ ID NO: 33494 - DNA, 21 bp, Homo sapiens
catgatgatgtgctggagctg

SEQ ID NO: 33495 - RNA, 21 nt, RNAi
ugaugaugugcuggagcuguu

SEQ ID NO: 33496 - RNA, 21 nt, RNAi
uuacuacuacacgaccucgac

SEQ ID NO: 33497 - DNA, 21 bp, Homo sapiens
caatcggcatgagtgcatggc

SEQ ID NO: 33498 - RNA, 21 nt, RNAi
aucggcaugagugcauggcuu

SEQ ID NO: 33499 - RNA, 21 nt, RNAi
uuuagccguacucacguaccg

SEQ ID NO: 33500 - DNA, 21 bp, Homo sapiens
caagcacatgcacagaagcct

SEQ ID NO: 33501 - RNA, 21 nt, RNAi
agcacaugcacagaagccuuu

SEQ ID NO: 33502 - RNA, 21 nt, RNAi
uuucguguacgugucuucgga

SEQ ID NO: 33503 - DNA, 21 bp, Homo sapiens
caaggagaagaggattcagtg

SEQ ID NO: 33504 - RNA, 21 nt, RNAi
aggagaagaggauucaguguu

SEQ ID NO: 33505 - RNA, 21 nt, RNAi
uuuccucuucuccuaagucac

SEQ ID NO: 33506 - DNA, 21 bp, Homo sapiens
cagtgccaagagatcttcctt

SEQ ID NO: 33507 - RNA, 21 nt, RNAi
gugccaagagaucuuccuuuu

SEQ ID NO: 33508 - RNA, 21 nt, RNAi
uucacgguucucuagaaggaa

SEQ ID NO: 33509 - DNA, 21 bp, Homo sapiens
caagagatcttccttcttgga

SEQ ID NO: 33510 - RNA, 21 nt, RNAi
agagaucuuccuucuuggauu

SEQ ID NO: 33511 - RNA, 21 nt, RNAi
uuucucuagaaggaagaaccu

SEQ ID NO: 33512 - DNA, 21 bp, Homo sapiens
cattaaatatccgtctcttct

SEQ ID NO: 33513 - RNA, 21 nt, RNAi
uuaaauauccgucucuucuuu

SEQ ID NO: 33514 - RNA, 21 nt, RNAi
uuaauuuauaggcagagaaga

SEQ ID NO: 33515 - DNA, 21 bp, Homo sapiens
caatggaggagaaggaattca

SEQ ID NO: 33516 - RNA, 21 nt, RNAi
auggaggagaaggaauucauu

SEQ ID NO: 33517 - RNA, 21 nt, RNAi
uuuaccuccucuuccuuaagu

SEQ ID NO: 33518 - DNA, 21 bp, Homo sapiens
cactacatggtggttgagata

SEQ ID NO: 33519 - RNA, 21 nt, RNAi
cuacauggugguugagauauu

SEQ ID NO: 33520 - RNA, 21 nt, RNAi
uugauguaccaccaacucuau

SEQ ID NO: 33521 - DNA, 21 bp, Homo sapiens
catggtggttgagatagtggc

SEQ ID NO: 33522 - RNA, 21 nt, RNAi
uggugguugagauaguggcuu

SEQ ID NO: 33523 - RNA, 21 nt, RNAi
uuaccaccaacucuaucaccg

SEQ ID NO: 33524 - DNA, 21 bp, Homo sapiens
cactattctttcatggacagg

SEQ ID NO: 33525 - RNA, 21 nt, RNAi
cuauucuuucauggacagguu

SEQ ID NO: 33526 - RNA, 21 nt, RNAi
uugauaagaaaguaccugucc

SEQ ID NO: 33527 - DNA, 21 bp, Homo sapiens
catggacaggcttggccactc

SEQ ID NO: 33528 - RNA, 21 nt, RNAi
uggacaggcuuggccacucuu

SEQ ID NO: 33529 - RNA, 21 nt, RNAi
uuaccuguccgaaccggugag

SEQ ID NO: 33530 - DNA, 21 bp, Homo sapiens
caggcttggccactccaacag

SEQ ID NO: 33531 - RNA, 21 nt, RNAi
ggcuuggccacuccaacaguu

SEQ ID NO: 33532 - RNA, 21 nt, RNAi
uuccgaaccggugagguuguc

SEQ ID NO: 33533 - DNA, 21 bp, Homo sapiens
caaatcgattgcttaatttcc

SEQ ID NO: 33534 - RNA, 21 nt, RNAi
aaucgauugcuuaauuuccuu

SEQ ID NO: 33535 - RNA, 21 nt, RNAi
uuuuagcuaacgaauuaaagg

SEQ ID NO: 33536 - DNA, 21 bp, Homo sapiens
caattgctaggcatcgtgatg

SEQ ID NO: 33537 - RNA, 21 nt, RNAi
auugcuaggcaucgugauguu

SEQ ID NO: 33538 - RNA, 21 nt, RNAi
uuuaacgauccguagcacuac

SEQ ID NO: 33539 - DNA, 21 bp, Homo sapiens
catcgtgatggccaatgacct

SEQ ID NO: 33540 - RNA, 21 nt, RNAi
ucgugauggccaaugaccuuu

SEQ ID NO: 33541 - RNA, 21 nt, RNAi
uuagcacuaccgguuacugga

SEQ ID NO: 33542 - DNA, 21 bp, Homo sapiens
cacagtgtggcatccagagta

SEQ ID NO: 33543 - RNA, 21 nt, RNAi
caguguggcauccagaguauu

SEQ ID NO: 33544 - RNA, 21 nt, RNAi
uugucacaccguaggucucau

SEQ ID NO: 33545 - DNA, 21 bp, Homo sapiens
cagtgtggcatccagagtagc

SEQ ID NO: 33546 - RNA, 21 nt, RNAi
guguggcauccagaguagcuu

SEQ ID NO: 33547 - RNA, 21 nt, RNAi
uucacaccguaggucucaucg

SEQ ID NO: 33548 - DNA, 21 bp, Homo sapiens
catccagagtagcgaatactt

SEQ ID NO: 33549 - RNA, 21 nt, RNAi
uccagaguagcgaauacuuuu

SEQ ID NO: 33550 - RNA, 21 nt, RNAi
uuaggucucaucgcuuaugaa

SEQ ID NO: 33551 - DNA, 21 bp, Homo sapiens
cagagtagcgaatacttccag

SEQ ID NO: 33552 - RNA, 21 nt, RNAi
gaguagcgaauacuuccaguu

SEQ ID NO: 33553 - RNA, 21 nt, RNAi
uucucaucgcuuaugaagguc

SEQ ID NO: 33554 - DNA, 21 bp, Homo sapiens
caggctttggtgaataatatg

SEQ ID NO: 33555 - RNA, 21 nt, RNAi
ggcuuuggugaauaauauguu

SEQ ID NO: 33556 - RNA, 21 nt, RNAi
uuccgaaaccacuuauuauac

SEQ ID NO: 33557 - DNA, 21 bp, Homo sapiens
cagcagaagttctaggactta

SEQ ID NO: 33558 - RNA, 21 nt, RNAi
gcagaaguucuaggacuuauu

SEQ ID NO: 33559 - RNA, 21 nt, RNAi
uucgucuucaagauccugaau

SEQ ID NO: 33560 - DNA, 21 bp, Homo sapiens
cagaagttctaggacttatac

SEQ ID NO: 33561 - RNA, 21 nt, RNAi
gaaguucuaggacuuauacuu

SEQ ID NO: 33562 - RNA, 21 nt, RNAi
uucuucaagauccugaauaug

SEQ ID NO: 33563 - DNA, 21 bp, Homo sapiens
catactggaggagtctctgtg

SEQ ID NO: 33564 - RNA, 21 nt, RNAi
uacuggaggagucucuguguu

SEQ ID NO: 33565 - RNA, 21 nt, RNAi
uuaugaccuccucagagacac

SEQ ID NO: 33566 - DNA, 21 bp, Homo sapiens
caattgaagcaacatcagaat

SEQ ID NO: 33567 - RNA, 21 nt, RNAi
auugaagcaacaucagaauuu

SEQ ID NO: 33568 - RNA, 21 nt, RNAi
uuuaacuucguuguagucuua

SEQ ID NO: 33569 - DNA, 21 bp, Homo sapiens
caacatcagaatactatggag

SEQ ID NO: 33570 - RNA, 21 nt, RNAi
acaucagaauacuauggaguu

SEQ ID NO: 33571 - RNA, 21 nt, RNAi
uuuguagucuuaugauaccuc

SEQ ID NO: 33572 - DNA, 21 bp, Homo sapiens
catcagaatactatggaggac

SEQ ID NO: 33573 - RNA, 21 nt, RNAi
ucagaauacuauggaggacuu

SEQ ID NO: 33574 - RNA, 21 nt, RNAi
uuagucuuaugauaccuccug

SEQ ID NO: 33575 - DNA, 21 bp, Homo sapiens
cagaatactatggaggacaag

SEQ ID NO: 33576 - RNA, 21 nt, RNAi
gaauacuauggaggacaaguu

SEQ ID NO: 33577 - RNA, 21 nt, RNAi
uucuuaugauaccuccuguuc

SEQ ID NO: 33578 - DNA, 21 bp, Homo sapiens
caagtttattgtgtgcttgaa

SEQ ID NO: 33579 - RNA, 21 nt, RNAi
aguuuauugugugcuugaauu

SEQ ID NO: 33580 - RNA, 21 nt, RNAi
uuucaaauaacacacgaacuu

SEQ ID NO: 33581 - DNA, 21 bp, Homo sapiens
cagacaggttcatgaatgctg

SEQ ID NO: 33582 - RNA, 21 nt, RNAi
gacagguucaugaaugcuguu

SEQ ID NO: 33583 - RNA, 21 nt, RNAi
uucuguccaaguacuuacgac

SEQ ID NO: 33584 - DNA, 21 bp, Homo sapiens
caggttcatgaatgctgtgtt

SEQ ID NO: 33585 - RNA, 21 nt, RNAi
gguucaugaaugcuguguuuu

SEQ ID NO: 33586 - RNA, 21 nt, RNAi
uuccaaguacuuacgacacaa

SEQ ID NO: 33587 - DNA, 21 bp, Homo sapiens
catgaatgctgtgttctttct

SEQ ID NO: 33588 - RNA, 21 nt, RNAi
ugaaugcuguguucuuucuuu

SEQ ID NO: 33589 - RNA, 21 nt, RNAi
uuacuuacgacacaagaaaga

SEQ ID NO: 33590 - DNA, 21 bp, Homo sapiens
cactctgtctggaggtggtac

SEQ ID NO: 33591 - RNA, 21 nt, RNAi
cucugucuggaggugguacuu

SEQ ID NO: 33592 - RNA, 21 nt, RNAi
uugagacagaccuccaccaug

SEQ ID NO: 33593 - DNA, 21 bp, Homo sapiens
cagagctgtacttccagttaa

SEQ ID NO: 33594 - RNA, 21 nt, RNAi
gagcuguacuuccaguuaauu

SEQ ID NO: 33595 - RNA, 21 nt, RNAi
uucucgacaugaaggucaauu

SEQ ID NO: 33596 - DNA, 21 bp, Homo sapiens
cagttaaagagcaaggacttc

SEQ ID NO: 33597 - RNA, 21 nt, RNAi
guuaaagagcaaggacuucuu

SEQ ID NO: 33598 - RNA, 21 nt, RNAi
uucaauuucucguuccugaag

SEQ ID NO: 33599 - DNA, 21 bp, Homo sapiens
caaggacttcgttcaagtcat

SEQ ID NO: 33600 - RNA, 21 nt, RNAi
aggacuucguucaagucauuu

SEQ ID NO: 33601 - RNA, 21 nt, RNAi
uuuccugaagcaaguucagua

SEQ ID NO: 33602 - DNA, 21 bp, Homo sapiens
caagtcatgagacatagagat

SEQ ID NO: 33603 - RNA, 21 nt, RNAi
agucaugagacauagagauuu

SEQ ID NO: 33604 - RNA, 21 nt, RNAi
uuucaguacucuguaucucua

SEQ ID NO: 33605 - DNA, 21 bp, Homo sapiens
catgagacatagagatgatga

SEQ ID NO: 33606 - RNA, 21 nt, RNAi
ugagacauagagaugaugauu

SEQ ID NO: 33607 - RNA, 21 nt, RNAi
uuacucuguaucucuacuacu

SEQ ID NO: 33608 - DNA, 21 bp, Homo sapiens
catagagatgatgaaagacaa

SEQ ID NO: 33609 - RNA, 21 nt, RNAi
uagagaugaugaaagacaauu

SEQ ID NO: 33610 - RNA, 21 nt, RNAi
uuaucucuacuacuuucuguu

SEQ ID NO: 33611 - DNA, 21 bp, Homo sapiens
cagtagaactccgagaacttc

SEQ ID NO: 33612 - RNA, 21 nt, RNAi
guagaacuccgagaacuucuu

SEQ ID NO: 33613 - RNA, 21 nt, RNAi
uucaucuugaggcucuugaag

SEQ ID NO: 33614 - DNA, 21 bp, Homo sapiens
catccttctacaacatgtagg

SEQ ID NO: 33615 - RNA, 21 nt, RNAi
uccuucuacaacauguagguu

SEQ ID NO: 33616 - RNA, 21 nt, RNAi
uuaggaagauguuguacaucc

SEQ ID NO: 33617 - DNA, 21 bp, Homo sapiens
catgataattacagagatcca

SEQ ID NO: 33618 - RNA, 21 nt, RNAi
ugauaauuacagagauccauu

SEQ ID NO: 33619 - RNA, 21 nt, RNAi
uuacuauuaaugucucuaggu

SEQ ID NO: 33620 - DNA, 21 bp, Homo sapiens
cagagatccagaaagtgagac

SEQ ID NO: 33621 - RNA, 21 nt, RNAi
gagauccagaaagugagacuu

SEQ ID NO: 33622 - RNA, 21 nt, RNAi
uucucuaggucuuucacucug

SEQ ID NO: 33623 - DNA, 21 bp, Homo sapiens
cagaaagtgagacagataatg

SEQ ID NO: 33624 - RNA, 21 nt, RNAi
gaaagugagacagauaauguu

SEQ ID NO: 33625 - RNA, 21 nt, RNAi
uucuuucacucugucuauuac

SEQ ID NO: 33626 - DNA, 21 bp, Homo sapiens
caggaaatatttaagttggca

SEQ ID NO: 33627 - RNA, 21 nt, RNAi
ggaaauauuuaaguuggcauu

SEQ ID NO: 33628 - RNA, 21 nt, RNAi
uuccuuuauaaauucaaccgu

SEQ ID NO: 33629 - DNA, 21 bp, Homo sapiens
caaggattgatcgatgagaac

SEQ ID NO: 33630 - RNA, 21 nt, RNAi
aggauugaucgaugagaacuu

SEQ ID NO: 33631 - RNA, 21 nt, RNAi
uuuccuaacuagcuacucuug

SEQ ID NO: 33632 - DNA, 21 bp, Homo sapiens
catgaaactaggttaccttca

SEQ ID NO: 33633 - RNA, 21 nt, RNAi
ugaaacuagguuaccuucauu

SEQ ID NO: 33634 - RNA, 21 nt, RNAi
uuacuuugauccaauggaagu

SEQ ID NO: 33635 - DNA, 21 bp, Homo sapiens
caaataccttggaccggttgc

SEQ ID NO: 33636 - RNA, 21 nt, RNAi
aauaccuuggaccgguugcuu

SEQ ID NO: 33637 - RNA, 21 nt, RNAi
uuuuauggaaccuggccaacg

SEQ ID NO: 33638 - DNA, 21 bp, Homo sapiens
catgttcgagcatcctctgtc

SEQ ID NO: 33639 - RNA, 21 nt, RNAi
uguucgagcauccucugucuu

SEQ ID NO: 33640 - RNA, 21 nt, RNAi
uuacaagcucguaggagacag

SEQ ID NO: 33641 - DNA, 21 bp, Homo sapiens
catcctctgtcagaatgcgaa

SEQ ID NO: 33642 - RNA, 21 nt, RNAi
uccucugucagaaugcgaauu

SEQ ID NO: 33643 - RNA, 21 nt, RNAi
uuaggagacagucuuacgcuu

SEQ ID NO: 33644 - DNA, 21 bp, Homo sapiens
cagaatgcgaatttcaggaat

SEQ ID NO: 33645 - RNA, 21 nt, RNAi
gaaugcgaauuucaggaauuu

SEQ ID NO: 33646 - RNA, 21 nt, RNAi
uucuuacgcuuaaaguccuua

SEQ ID NO: 33647 - DNA, 21 bp, Homo sapiens
caggaatataccattgattct

SEQ ID NO: 33648 - RNA, 21 nt, RNAi
ggaauauaccauugauucuuu

SEQ ID NO: 33649 - RNA, 21 nt, RNAi
uuccuuauaugguaacuaaga

SEQ ID NO: 33650 - DNA, 21 bp, Homo sapiens
cattgattctgattggcgttt

SEQ ID NO: 33651 - RNA, 21 nt, RNAi
uugauucugauuggcguuuuu

SEQ ID NO: 33652 - RNA, 21 nt, RNAi
uuaacuaagacuaaccgcaaa

SEQ ID NO: 33653 - DNA, 21 bp, Homo sapiens
cactccgatgtttgtggagac

SEQ ID NO: 33654 - RNA, 21 nt, RNAi
cuccgauguuuguggagacuu

SEQ ID NO: 33655 - RNA, 21 nt, RNAi
uugaggcuacaaacaccucug

SEQ ID NO: 33656 - DNA, 21 bp, Homo sapiens
cagcagcagcatgacttcaca

SEQ ID NO: 33657 - RNA, 21 nt, RNAi
gcagcagcaugacuucacauu

SEQ ID NO: 33658 - RNA, 21 nt, RNAi
uucgucgucguacugaagugu

SEQ ID NO: 33659 - DNA, 21 bp, Homo sapiens
cagcagcatgacttcacactg

SEQ ID NO: 33660 - RNA, 21 nt, RNAi
gcagcaugacuucacacuguu

SEQ ID NO: 33661 - RNA, 21 nt, RNAi
uucgucguacugaagugugac

SEQ ID NO: 33662 - DNA, 21 bp, Homo sapiens
cagcatgacttcacactgaca

SEQ ID NO: 33663 - RNA, 21 nt, RNAi
gcaugacuucacacugacauu

SEQ ID NO: 33664 - RNA, 21 nt, RNAi
uucguacugaagugugacugu

SEQ ID NO: 33665 - DNA, 21 bp, Homo sapiens
catgacttcacactgacacag

SEQ ID NO: 33666 - RNA, 21 nt, RNAi
ugacuucacacugacacaguu

SEQ ID NO: 33667 - RNA, 21 nt, RNAi
uuacugaagugugacuguguc

SEQ ID NO: 33668 - DNA, 21 bp, Homo sapiens
cacactgacacagactgcaga

SEQ ID NO: 33669 - RNA, 21 nt, RNAi
cacugacacagacugcagauu

SEQ ID NO: 33670 - RNA, 21 nt, RNAi
uugugacugugucugacgucu

SEQ ID NO: 33671 - DNA, 21 bp, Homo sapiens
cactgacacagactgcagatg

SEQ ID NO: 33672 - RNA, 21 nt, RNAi
cugacacagacugcagauguu

SEQ ID NO: 33673 - RNA, 21 nt, RNAi
uugacugugucugacgucuac

SEQ ID NO: 33674 - DNA, 21 bp, Homo sapiens
cacagactgcagatggaagaa

SEQ ID NO: 33675 - RNA, 21 nt, RNAi
cagacugcagauggaagaauu

SEQ ID NO: 33676 - RNA, 21 nt, RNAi
uugucugacgucuaccuucuu

SEQ ID NO: 33677 - DNA, 21 bp, Homo sapiens
cagactgcagatggaagaagc

SEQ ID NO: 33678 - RNA, 21 nt, RNAi
gacugcagauggaagaagcuu

SEQ ID NO: 33679 - RNA, 21 nt, RNAi
uucugacgucuaccuucuucg

SEQ ID NO: 33680 - DNA, 21 bp, Homo sapiens
cagatggaagaagctcatttg

SEQ ID NO: 33681 - RNA, 21 nt, RNAi
gauggaagaagcucauuuguu

SEQ ID NO: 33682 - RNA, 21 nt, RNAi
uucuaccuucuucgaguaaac

SEQ ID NO: 33683 - DNA, 21 bp, Homo sapiens
catctgactccttgctgtttg

SEQ ID NO: 33684 - RNA, 21 nt, RNAi
ucugacuccuugcuguuuguu

SEQ ID NO: 33685 - RNA, 21 nt, RNAi
uuagacugaggaacgacaaac

SEQ ID NO: 33686 - DNA, 21 bp, Homo sapiens
cacaagaggagtgaaaggtta

SEQ ID NO: 33687 - RNA, 21 nt, RNAi
caagaggagugaaagguuauu

SEQ ID NO: 33688 - RNA, 21 nt, RNAi
uuguucuccucacuuuccaau

SEQ ID NO: 33689 - DNA, 21 bp, Homo sapiens
caagaggagtgaaaggttaca

SEQ ID NO: 33690 - RNA, 21 nt, RNAi
agaggagugaaagguuacauu

SEQ ID NO: 33691 - RNA, 21 nt, RNAi
uuucuccucacuuuccaaugu

SEQ ID NO: 33692 - DNA, 21 bp, Homo sapiens
caggagaagctcagtttgatg

SEQ ID NO: 33693 - RNA, 21 nt, RNAi
ggagaagcucaguuugauguu

SEQ ID NO: 33694 - RNA, 21 nt, RNAi
uuccucuucgagucaaacuac

SEQ ID NO: 33695 - DNA, 21 bp, Homo sapiens
cagtttgatgtatgccagaaa

SEQ ID NO: 33696 - RNA, 21 nt, RNAi
guuugauguaugccagaaauu

SEQ ID NO: 33697 - RNA, 21 nt, RNAi
uucaaacuacauacggucuuu

SEQ ID NO: 33698 - DNA, 21 bp, Homo sapiens
caggtcgttctgtacagaagc

SEQ ID NO: 33699 - RNA, 21 nt, RNAi
ggucguucuguacagaagcuu

SEQ ID NO: 33700 - RNA, 21 nt, RNAi
uuccagcaagacaugucuucg

SEQ ID NO: 33701 - DNA, 21 bp, Homo sapiens
cagaagctaccggcacggaga

SEQ ID NO: 33702 - RNA, 21 nt, RNAi
gaagcuaccggcacggagauu

SEQ ID NO: 33703 - RNA, 21 nt, RNAi
uucuucgauggccgugccucu

SEQ ID NO: 33704 - DNA, 21 bp, Homo sapiens
cacggagaccttcctgacatt

SEQ ID NO: 33705 - RNA, 21 nt, RNAi
cggagaccuuccugacauuuu

SEQ ID NO: 33706 - RNA, 21 nt, RNAi
uugccucuggaaggacuguaa

SEQ ID NO: 33707 - DNA, 21 bp, Homo sapiens
cattcagatcaagcacagcag

SEQ ID NO: 33708 - RNA, 21 nt, RNAi
uucagaucaagcacagcaguu

SEQ ID NO: 33709 - RNA, 21 nt, RNAi
uuaagucuaguucgugucguc

SEQ ID NO: 33710 - DNA, 21 bp, Homo sapiens
cagatcaagcacagcagcctc

SEQ ID NO: 33711 - RNA, 21 nt, RNAi
gaucaagcacagcagccucuu

SEQ ID NO: 33712 - RNA, 21 nt, RNAi
uucuaguucgugucgucggag

SEQ ID NO: 33713 - DNA, 21 bp, Homo sapiens
caagcacagcagcctcatcac

SEQ ID NO: 33714 - RNA, 21 nt, RNAi
agcacagcagccucaucacuu

SEQ ID NO: 33715 - RNA, 21 nt, RNAi
uuucgugucgucggaguagug

SEQ ID NO: 33716 - DNA, 21 bp, Homo sapiens
cagctctttagcagcttgttt

SEQ ID NO: 33717 - RNA, 21 nt, RNAi
gcucuuuagcagcuuguuuuu

SEQ ID NO: 33718 - RNA, 21 nt, RNAi
uucgagaaaucgucgaacaaa

SEQ ID NO: 33719 - DNA, 21 bp, Homo sapiens
caccttctctttctttccacc

SEQ ID NO: 33720 - RNA, 21 nt, RNAi
ccuucucuuucuuuccaccuu

SEQ ID NO: 33721 - RNA, 21 nt, RNAi
uuggaagagaaagaaaggugg

SEQ ID NO: 33722 - DNA, 21 bp, Homo sapiens
caggacattagctgtcagcac

SEQ ID NO: 33723 - RNA, 21 nt, RNAi
ggacauuagcugucagcacuu

SEQ ID NO: 33724 - RNA, 21 nt, RNAi
uuccuguaaucgacagucgug

SEQ ID NO: 33725 - DNA, 21 bp, Homo sapiens
cattagctgtcagcacgcagc

SEQ ID NO: 33726 - RNA, 21 nt, RNAi
uuagcugucagcacgcagcuu

SEQ ID NO: 33727 - RNA, 21 nt, RNAi
uuaaucgacagucgugcgucg

SEQ ID NO: 33728 - DNA, 21 bp, Homo sapiens
cagcggctgttagcgctggtt

SEQ ID NO: 33729 - RNA, 21 nt, RNAi
gcggcuguuagcgcugguuuu

SEQ ID NO: 33730 - RNA, 21 nt, RNAi
uucgccgacaaucgcgaccaa

SEQ ID NO: 33731 - DNA, 21 bp, Homo sapiens
caattggagaatacgacgtcc

SEQ ID NO: 33732 - RNA, 21 nt, RNAi
auuggagaauacgacguccuu

SEQ ID NO: 33733 - RNA, 21 nt, RNAi
uuuaaccucuuaugcugcagg

SEQ ID NO: 33734 - DNA, 21 bp, Homo sapiens
cagtgagataggaacaaagca

SEQ ID NO: 33735 - RNA, 21 nt, RNAi
gugagauaggaacaaagcauu

SEQ ID NO: 33736 - RNA, 21 nt, RNAi
uucacucuauccuuguuucgu

SEQ ID NO: 33737 - DNA, 21 bp, Homo sapiens
caaagcaaatcactcagagtg

SEQ ID NO: 33738 - RNA, 21 nt, RNAi
aagcaaaucacucagaguguu

SEQ ID NO: 33739 - RNA, 21 nt, RNAi
uuuucguuuagugagucucac

SEQ ID NO: 33740 - DNA, 21 bp, Homo sapiens
caaatcactcagagtgcatta

SEQ ID NO: 33741 - RNA, 21 nt, RNAi
aaucacucagagugcauuauu

SEQ ID NO: 33742 - RNA, 21 nt, RNAi
uuuuagugagucucacguaau

SEQ ID NO: 33743 - DNA, 21 bp, Homo sapiens
cactcagagtgcattattagc

SEQ ID NO: 33744 - RNA, 21 nt, RNAi
cucagagugcauuauuagcuu

SEQ ID NO: 33745 - RNA, 21 nt, RNAi
uugagucucacguaauaaucg

SEQ ID NO: 33746 - DNA, 21 bp, Homo sapiens
cagagtgcattattagcagaa

SEQ ID NO: 33747 - RNA, 21 nt, RNAi
gagugcauuauuagcagaauu

SEQ ID NO: 33748 - RNA, 21 nt, RNAi
uucucacguaauaaucgucuu

SEQ ID NO: 33749 - DNA, 21 bp, Homo sapiens
cattattagcagaagccagaa

SEQ ID NO: 33750 - RNA, 21 nt, RNAi
uuauuagcagaagccagaauu

SEQ ID NO: 33751 - RNA, 21 nt, RNAi
uuaauaaucgucuucggucuu

SEQ ID NO: 33752 - DNA, 21 bp, Homo sapiens
cagaagccagaagtgattatt

SEQ ID NO: 33753 - RNA, 21 nt, RNAi
gaagccagaagugauuauuuu

SEQ ID NO: 33754 - RNA, 21 nt, RNAi
uucuucggucuucacuaauaa

SEQ ID NO: 33755 - DNA, 21 bp, Homo sapiens
cagaagtgattattctgaagc

SEQ ID NO: 33756 - RNA, 21 nt, RNAi
gaagugauuauucugaagcuu

SEQ ID NO: 33757 - RNA, 21 nt, RNAi
uucuucacuaauaagacuucg

SEQ ID NO: 33758 - DNA, 21 bp, Homo sapiens
cagtatgatgaggctctcaat

SEQ ID NO: 33759 - RNA, 21 nt, RNAi
guaugaugaggcucucaauuu

SEQ ID NO: 33760 - RNA, 21 nt, RNAi
uucauacuacuccgagaguua

SEQ ID NO: 33761 - DNA, 21 bp, Homo sapiens
cacagaagccgagaaggattt

SEQ ID NO: 33762 - RNA, 21 nt, RNAi
cagaagccgagaaggauuuuu

SEQ ID NO: 33763 - RNA, 21 nt, RNAi
uugucuucggcucuuccuaaa

SEQ ID NO: 33764 - DNA, 21 bp, Homo sapiens
caaccaccttgctgagtggaa

SEQ ID NO: 33765 - RNA, 21 nt, RNAi
accaccuugcugaguggaauu

SEQ ID NO: 33766 - RNA, 21 nt, RNAi
uuugguggaacgacucaccuu

SEQ ID NO: 33767 - DNA, 21 bp, Homo sapiens
caccttgctgagtggaaatca

SEQ ID NO: 33768 - RNA, 21 nt, RNAi
ccuugcugaguggaaaucauu

SEQ ID NO: 33769 - RNA, 21 nt, RNAi
uuggaacgacucaccuuuagu

SEQ ID NO: 33770 - DNA, 21 bp, Homo sapiens
cacttgaatactgttctacag

SEQ ID NO: 33771 - RNA, 21 nt, RNAi
cuugaauacuguucuacaguu

SEQ ID NO: 33772 - RNA, 21 nt, RNAi
uugaacuuaugacaagauguc

SEQ ID NO: 33773 - DNA, 21 bp, Homo sapiens
cagccagtatagacagtgaga

SEQ ID NO: 33774 - RNA, 21 nt, RNAi
gccaguauagacagugagauu

SEQ ID NO: 33775 - RNA, 21 nt, RNAi
uucggucauaucugucacucu

SEQ ID NO: 33776 - DNA, 21 bp, Homo sapiens
caggaaacatatctaccttac

SEQ ID NO: 33777 - RNA, 21 nt, RNAi
ggaaacauaucuaccuuacuu

SEQ ID NO: 33778 - RNA, 21 nt, RNAi
uuccuuuguauagauggaaug

SEQ ID NO: 33779 - DNA, 21 bp, Homo sapiens
catatctaccttacatgatcc

SEQ ID NO: 33780 - RNA, 21 nt, RNAi
uaucuaccuuacaugauccuu

SEQ ID NO: 33781 - RNA, 21 nt, RNAi
uuauagauggaauguacuagg

SEQ ID NO: 33782 - DNA, 21 bp, Homo sapiens
catgatccgcagcaagctgaa

SEQ ID NO: 33783 - RNA, 21 nt, RNAi
ugauccgcagcaagcugaauu

SEQ ID NO: 33784 - RNA, 21 nt, RNAi
uuacuaggcgucguucgacuu

SEQ ID NO: 33785 - DNA, 21 bp, Homo sapiens
cagcaagctgaagctgctgct

SEQ ID NO: 33786 - RNA, 21 nt, RNAi
gcaagcugaagcugcugcuuu

SEQ ID NO: 33787 - RNA, 21 nt, RNAi
uucguucgacuucgacgacga

SEQ ID NO: 33788 - DNA, 21 bp, Homo sapiens
caagctgaagctgctgctcca

SEQ ID NO: 33789 - RNA, 21 nt, RNAi
agcugaagcugcugcuccauu

SEQ ID NO: 33790 - RNA, 21 nt, RNAi
uuucgacuucgacgacgaggu

SEQ ID NO: 33791 - DNA, 21 bp, Homo sapiens
catttattgacaaagctatgc

SEQ ID NO: 33792 - RNA, 21 nt, RNAi
uuuauugacaaagcuaugcuu

SEQ ID NO: 33793 - RNA, 21 nt, RNAi
uuaaauaacuguuucgauacg

SEQ ID NO: 33794 - DNA, 21 bp, Homo sapiens
cagaaggcgattctagagctt

SEQ ID NO: 33795 - RNA, 21 nt, RNAi
gaaggcgauucuagagcuuuu

SEQ ID NO: 33796 - RNA, 21 nt, RNAi
uucuuccgcuaagaucucgaa

SEQ ID NO: 33797 - DNA, 21 bp, Homo sapiens
cattacagtcaagagctgagt

SEQ ID NO: 33798 - RNA, 21 nt, RNAi
uuacagucaagagcugaguuu

SEQ ID NO: 33799 - RNA, 21 nt, RNAi
uuaaugucaguucucgacuca

SEQ ID NO: 33800 - DNA, 21 bp, Homo sapiens
cagtcaagagctgagtctgct

SEQ ID NO: 33801 - RNA, 21 nt, RNAi
gucaagagcugagucugcuuu

SEQ ID NO: 33802 - RNA, 21 nt, RNAi
uucaguucucgacucagacga

SEQ ID NO: 33803 - DNA, 21 bp, Homo sapiens
caagagctgagtctgctttac

SEQ ID NO: 33804 - RNA, 21 nt, RNAi
agagcugagucugcuuuacuu

SEQ ID NO: 33805 - RNA, 21 nt, RNAi
uuucucgacucagacgaaaug

SEQ ID NO: 33806 - DNA, 21 bp, Homo sapiens
caagatgatgttgacagagcc

SEQ ID NO: 33807 - RNA, 21 nt, RNAi
agaugauguugacagagccuu

SEQ ID NO: 33808 - RNA, 21 nt, RNAi
uuucuacuacaacugucucgg

SEQ ID NO: 33809 - DNA, 21 bp, Homo sapiens
cagagccaaatattacattca

SEQ ID NO: 33810 - RNA, 21 nt, RNAi
gagccaaauauuacauucauu

SEQ ID NO: 33811 - RNA, 21 nt, RNAi
uucucgguuuauaauguaagu

SEQ ID NO: 33812 - DNA, 21 bp, Homo sapiens
caccaaagtagactcaccaaa

SEQ ID NO: 33813 - RNA, 21 nt, RNAi
ccaaaguagacucaccaaauu

SEQ ID NO: 33814 - RNA, 21 nt, RNAi
uugguuucaucugagugguuu

SEQ ID NO: 33815 - DNA, 21 bp, Homo sapiens
caaagtagactcaccaaattg

SEQ ID NO: 33816 - RNA, 21 nt, RNAi
aaguagacucaccaaauuguu

SEQ ID NO: 33817 - RNA, 21 nt, RNAi
uuuucaucugagugguuuaac

SEQ ID NO: 33818 - DNA, 21 bp, Homo sapiens
caccaaattgcagtctgtaca

SEQ ID NO: 33819 - RNA, 21 nt, RNAi
ccaaauugcagucuguacauu

SEQ ID NO: 33820 - RNA, 21 nt, RNAi
uugguuuaacgucagacaugu

SEQ ID NO: 33821 - DNA, 21 bp, Homo sapiens
caaattgcagtctgtacaggc

SEQ ID NO: 33822 - RNA, 21 nt, RNAi
aauugcagucuguacaggcuu

SEQ ID NO: 33823 - RNA, 21 nt, RNAi
uuuuaacgucagacauguccg

SEQ ID NO: 33824 - DNA, 21 bp, Homo sapiens
cagtctgtacaggctttaaca

SEQ ID NO: 33825 - RNA, 21 nt, RNAi
gucuguacaggcuuuaacauu

SEQ ID NO: 33826 - RNA, 21 nt, RNAi
uucagacauguccgaaauugu

SEQ ID NO: 33827 - DNA, 21 bp, Homo sapiens
caggctttaacagaaattcag

SEQ ID NO: 33828 - RNA, 21 nt, RNAi
ggcuuuaacagaaauucaguu

SEQ ID NO: 33829 - RNA, 21 nt, RNAi
uuccgaaauugucuuuaaguc

SEQ ID NO: 33830 - DNA, 21 bp, Homo sapiens
cagaaattcaggagttcatca

SEQ ID NO: 33831 - RNA, 21 nt, RNAi
gaaauucaggaguucaucauu

SEQ ID NO: 33832 - RNA, 21 nt, RNAi
uucuuuaaguccucaaguagu

SEQ ID NO: 33833 - DNA, 21 bp, Homo sapiens
caggagttcatcagctttata

SEQ ID NO: 33834 - RNA, 21 nt, RNAi
ggaguucaucagcuuuauauu

SEQ ID NO: 33835 - RNA, 21 nt, RNAi
uuccucaaguagucgaaauau

SEQ ID NO: 33836 - DNA, 21 bp, Homo sapiens
catcagctttataagcaaaca

SEQ ID NO: 33837 - RNA, 21 nt, RNAi
ucagcuuuauaagcaaacauu

SEQ ID NO: 33838 - RNA, 21 nt, RNAi
uuagucgaaauauucguuugu

SEQ ID NO: 33839 - DNA, 21 bp, Homo sapiens
cagctttataagcaaacaagg

SEQ ID NO: 33840 - RNA, 21 nt, RNAi
gcuuuauaagcaaacaagguu

SEQ ID NO: 33841 - RNA, 21 nt, RNAi
uucgaaauauucguuuguucc

SEQ ID NO: 33842 - DNA, 21 bp, Homo sapiens
caaacaaggcaatttatcatc

SEQ ID NO: 33843 - RNA, 21 nt, RNAi
aacaaggcaauuuaucaucuu

SEQ ID NO: 33844 - RNA, 21 nt, RNAi
uuuuguuccguuaaauaguag

SEQ ID NO: 33845 - DNA, 21 bp, Homo sapiens
caaggcaatttatcatctcaa

SEQ ID NO: 33846 - RNA, 21 nt, RNAi
aggcaauuuaucaucucaauu

SEQ ID NO: 33847 - RNA, 21 nt, RNAi
uuuccguuaaauaguagaguu

SEQ ID NO: 33848 - DNA, 21 bp, Homo sapiens
caatttatcatctcaagttcc

SEQ ID NO: 33849 - RNA, 21 nt, RNAi
auuuaucaucucaaguuccuu

SEQ ID NO: 33850 - RNA, 21 nt, RNAi
uuuaaauaguagaguucaagg

SEQ ID NO: 33851 - DNA, 21 bp, Homo sapiens
cacctggacaaacagatatcc

SEQ ID NO: 33852 - RNA, 21 nt, RNAi
ccuggacaaacagauauccuu

SEQ ID NO: 33853 - RNA, 21 nt, RNAi
uuggaccuguuugucuauagg

SEQ ID NO: 33854 - DNA, 21 bp, Homo sapiens
caaacagatatccagatgcta

SEQ ID NO: 33855 - RNA, 21 nt, RNAi
aacagauauccagaugcuauu

SEQ ID NO: 33856 - RNA, 21 nt, RNAi
uuuugucuauaggucuacgau

SEQ ID NO: 33857 - DNA, 21 bp, Homo sapiens
catcatcacaaatcgatgttt

SEQ ID NO: 33858 - RNA, 21 nt, RNAi
ucaucacaaaucgauguuuuu

SEQ ID NO: 33859 - RNA, 21 nt, RNAi
uuaguaguguuuagcuacaaa

SEQ ID NO: 33860 - DNA, 21 bp, Homo sapiens
catcacaaatcgatgtttctt

SEQ ID NO: 33861 - RNA, 21 nt, RNAi
ucacaaaucgauguuucuuuu

SEQ ID NO: 33862 - RNA, 21 nt, RNAi
uuaguguuuagcuacaaagaa

SEQ ID NO: 33863 - DNA, 21 bp, Homo sapiens
cacaaatcgatgtttctttct

SEQ ID NO: 33864 - RNA, 21 nt, RNAi
caaaucgauguuucuuucuuu

SEQ ID NO: 33865 - RNA, 21 nt, RNAi
uuguuuagcuacaaagaaaga

SEQ ID NO: 33866 - DNA, 21 bp, Homo sapiens
caaatcgatgtttctttctca

SEQ ID NO: 33867 - RNA, 21 nt, RNAi
aaucgauguuucuuucucauu

SEQ ID NO: 33868 - RNA, 21 nt, RNAi
uuuuagcuacaaagaaagagu

SEQ ID NO: 33869 - DNA, 21 bp, Homo sapiens
cagtgacaggatggaagtgca

SEQ ID NO: 33870 - RNA, 21 nt, RNAi
gugacaggauggaagugcauu

SEQ ID NO: 33871 - RNA, 21 nt, RNAi
uucacuguccuaccuucacgu

SEQ ID NO: 33872 - DNA, 21 bp, Homo sapiens
caggatggaagtgcaagagca

SEQ ID NO: 33873 - RNA, 21 nt, RNAi
ggauggaagugcaagagcauu

SEQ ID NO: 33874 - RNA, 21 nt, RNAi
uuccuaccuucacguucucgu

SEQ ID NO: 33875 - DNA, 21 bp, Homo sapiens
caagagcaggaagaagatatc

SEQ ID NO: 33876 - RNA, 21 nt, RNAi
agagcaggaagaagauaucuu

SEQ ID NO: 33877 - RNA, 21 nt, RNAi
uuucucguccuucuucuauag

SEQ ID NO: 33878 - DNA, 21 bp, Homo sapiens
caggaagaagatatcagctcc

SEQ ID NO: 33879 - RNA, 21 nt, RNAi
ggaagaagauaucagcuccuu

SEQ ID NO: 33880 - RNA, 21 nt, RNAi
uuccuucuucuauagucgagg

SEQ ID NO: 33881 - DNA, 21 bp, Homo sapiens
cagaacaatttctcacttgct

SEQ ID NO: 33882 - RNA, 21 nt, RNAi
gaacaauuucucacuugcuuu

SEQ ID NO: 33883 - RNA, 21 nt, RNAi
uucuuguuaaagagugaacga

SEQ ID NO: 33884 - DNA, 21 bp, Homo sapiens
caatttctcacttgctatgaa

SEQ ID NO: 33885 - RNA, 21 nt, RNAi
auuucucacuugcuaugaauu

SEQ ID NO: 33886 - RNA, 21 nt, RNAi
uuuaaagagugaacgauacuu

SEQ ID NO: 33887 - DNA, 21 bp, Homo sapiens
cacttgctatgaaactactga

SEQ ID NO: 33888 - RNA, 21 nt, RNAi
cuugcuaugaaacuacugauu

SEQ ID NO: 33889 - RNA, 21 nt, RNAi
uugaacgauacuuugaugacu

SEQ ID NO: 33890 - DNA, 21 bp, Homo sapiens
cagagacgattggctggtgag

SEQ ID NO: 33891 - RNA, 21 nt, RNAi
gagacgauuggcuggugaguu

SEQ ID NO: 33892 - RNA, 21 nt, RNAi
uucucugcuaaccgaccacuc

SEQ ID NO: 33893 - DNA, 21 bp, Homo sapiens
caggtgctcactgtgctgaaa

SEQ ID NO: 33894 - RNA, 21 nt, RNAi
ggugcucacugugcugaaauu

SEQ ID NO: 33895 - RNA, 21 nt, RNAi
uuccacgagugacacgacuuu

SEQ ID NO: 33896 - DNA, 21 bp, Homo sapiens
cagtctctttgttggatgaga

SEQ ID NO: 33897 - RNA, 21 nt, RNAi
gucucuuuguuggaugagauu

SEQ ID NO: 33898 - RNA, 21 nt, RNAi
uucagagaaacaaccuacucu

SEQ ID NO: 33899 - DNA, 21 bp, Homo sapiens
caacgtgtcaagctacttaag

SEQ ID NO: 33900 - RNA, 21 nt, RNAi
acgugucaagcuacuuaaguu

SEQ ID NO: 33901 - RNA, 21 nt, RNAi
uuugcacaguucgaugaauuc

SEQ ID NO: 33902 - DNA, 21 bp, Homo sapiens
caacttacaggatcatagcga

SEQ ID NO: 33903 - RNA, 21 nt, RNAi
acuuacaggaucauagcgauu

SEQ ID NO: 33904 - RNA, 21 nt, RNAi
uuugaauguccuaguaucgcu

SEQ ID NO: 33905 - DNA, 20 bp, Homo sapiens
caggatcatagcgaatgctc

SEQ ID NO: 33906 - RNA, 20 nt, RNAi
ggaucauagcgaaugcucuu

SEQ ID NO: 33907 - RNA, 20 nt, RNAi
uuccuaguaucgcuuacgag

SEQ ID NO: 33908 - DNA, 20 bp, Homo sapiens
catagcgaatgctctcagca

SEQ ID NO: 33909 - RNA, 20 nt, RNAi
uagcgaaugcucucagcauu

SEQ ID NO: 33910 - RNA, 20 nt, RNAi
uuaucgcuuacgagagucgu

SEQ ID NO: 33911 - DNA, 21 bp, Homo sapiens
cagcctgccttgctgaaatcg

SEQ ID NO: 33912 - RNA, 21 nt, RNAi
gccugccuugcugaaaucguu

SEQ ID NO: 33913 - RNA, 21 nt, RNAi
uucggacggaacgacuuuagc

SEQ ID NO: 33914 - DNA, 20 bp, Homo sapiens
caaggctagaagaatcttag

SEQ ID NO: 33915 - RNA, 20 nt, RNAi
aggcuagaagaaucuuaguu

SEQ ID NO: 33916 - RNA, 20 nt, RNAi
uuuccgaucuucuuagaauc

SEQ ID NO: 33917 - DNA, 21 bp, Homo sapiens
cagttcagaggattcagagaa

SEQ ID NO: 33918 - RNA, 21 nt, RNAi
guucagaggauucagagaauu

SEQ ID NO: 33919 - RNA, 21 nt, RNAi
uucaagucuccuaagucucuu

SEQ ID NO: 33920 - DNA, 21 bp, Homo sapiens
cagaggattcagagaaggtga

SEQ ID NO: 33921 - RNA, 21 nt, RNAi
gaggauucagagaaggugauu

SEQ ID NO: 33922 - RNA, 21 nt, RNAi
uucuccuaagucucuuccacu

SEQ ID NO: 33923 - DNA, 20 bp, Homo sapiens
cagagagcattccagcacct

SEQ ID NO: 33924 - RNA, 20 nt, RNAi
gagagcauuccagcaccuuu

SEQ ID NO: 33925 - RNA, 20 nt, RNAi
uucucucguaaggucgugga

SEQ ID NO: 33926 - DNA, 21 bp, Homo sapiens
cattccagcacctctctgagg

SEQ ID NO: 33927 - RNA, 21 nt, RNAi
uuccagcaccucucugagguu

SEQ ID NO: 33928 - RNA, 21 nt, RNAi
uuaaggucguggagagacucc

SEQ ID NO: 33929 - DNA, 21 bp, Homo sapiens
cagcacctctctgaggctgtg

SEQ ID NO: 33930 - RNA, 21 nt, RNAi
gcaccucucugaggcuguguu

SEQ ID NO: 33931 - RNA, 21 nt, RNAi
uucguggagagacuccgacac

SEQ ID NO: 33932 - DNA, 21 bp, Homo sapiens
cacctctctgaggctgtgcag

SEQ ID NO: 33933 - RNA, 21 nt, RNAi
ccucucugaggcugugcaguu

SEQ ID NO: 33934 - RNA, 21 nt, RNAi
uuggagagacuccgacacguc

SEQ ID NO: 33935 - DNA, 21 bp, Homo sapiens
catgacgctggcagatttctg

SEQ ID NO: 33936 - RNA, 21 nt, RNAi
ugacgcuggcagauuucuguu

SEQ ID NO: 33937 - RNA, 21 nt, RNAi
uuacugcgaccgucuaaagac

SEQ ID NO: 33938 - DNA, 20 bp, Homo sapiens
cagatttctgtgaccaacag

SEQ ID NO: 33939 - RNA, 20 nt, RNAi
gauuucugugaccaacaguu

SEQ ID NO: 33940 - RNA, 20 nt, RNAi
uucuaaagacacugguuguc

SEQ ID NO: 33941 - DNA, 21 bp, Homo sapiens
caacagctgcgcaaggaggaa

SEQ ID NO: 33942 - RNA, 21 nt, RNAi
acagcugcgcaaggaggaauu

SEQ ID NO: 33943 - RNA, 21 nt, RNAi
uuugucgacgcguuccuccuu

SEQ ID NO: 33944 - DNA, 21 bp, Homo sapiens
cagctgcgcaaggaggaagag

SEQ ID NO: 33945 - RNA, 21 nt, RNAi
gcugcgcaaggaggaagaguu

SEQ ID NO: 33946 - RNA, 21 nt, RNAi
uucgacgcguuccuccuucuc

SEQ ID NO: 33947 - DNA, 21 bp, Homo sapiens
caaggaggaagagaatgcatc

SEQ ID NO: 33948 - RNA, 21 nt, RNAi
aggaggaagagaaugcaucuu

SEQ ID NO: 33949 - RNA, 21 nt, RNAi
uuuccuccuucucuuacguag

SEQ ID NO: 33950 - DNA, 21 bp, Homo sapiens
catcagttattgattctgcag

SEQ ID NO: 33951 - RNA, 21 nt, RNAi
ucaguuauugauucugcaguu

SEQ ID NO: 33952 - RNA, 21 nt, RNAi
uuagucaauaacuaagacguc

SEQ ID NO: 33953 - DNA, 21 bp, Homo sapiens
cagttattgattctgcagaac

SEQ ID NO: 33954 - RNA, 21 nt, RNAi
guuauugauucugcagaacuu

SEQ ID NO: 33955 - RNA, 21 nt, RNAi
uucaauaacuaagacgucuug

SEQ ID NO: 33956 - DNA, 20 bp, Homo sapiens
cagaactgcaggcgtatcca

SEQ ID NO: 33957 - RNA, 20 nt, RNAi
gaacugcaggcguauccauu

SEQ ID NO: 33958 - RNA, 20 nt, RNAi
uucuugacguccgcauaggu

SEQ ID NO: 33959 - DNA, 20 bp, Homo sapiens
caggcgtatccagcacttgt

SEQ ID NO: 33960 - RNA, 20 nt, RNAi
ggcguauccagcacuuguuu

SEQ ID NO: 33961 - RNA, 20 nt, RNAi
uuccgcauaggucgugaaca

SEQ ID NO: 33962 - DNA, 20 bp, Homo sapiens
caatgaagccagattgaagt

SEQ ID NO: 33963 - RNA, 20 nt, RNAi
augaagccagauugaaguuu

SEQ ID NO: 33964 - RNA, 20 nt, RNAi
uuuacuucggucuaacuuca

SEQ ID NO: 33965 - DNA, 21 bp, Homo sapiens
cagattgaagtttcctagatt

SEQ ID NO: 33966 - RNA, 21 nt, RNAi
gauugaaguuuccuagauuuu

SEQ ID NO: 33967 - RNA, 21 nt, RNAi
uucuaacuucaaaggaucuaa

SEQ ID NO: 33968 - DNA, 21 bp, Homo sapiens
cagattatagaacggtatcca

SEQ ID NO: 33969 - RNA, 21 nt, RNAi
gauuauagaacgguauccauu

SEQ ID NO: 33970 - RNA, 21 nt, RNAi
uucuaauaucuugccauaggu

SEQ ID NO: 33971 - DNA, 20 bp, Homo sapiens
cagaggagactttgagcctc

SEQ ID NO: 33972 - RNA, 20 nt, RNAi
gaggagacuuugagccucuu

SEQ ID NO: 33973 - RNA, 20 nt, RNAi
uucuccucugaaacucggag

SEQ ID NO: 33974 - DNA, 21 bp, Homo sapiens
cagttcatcagctggatcagc

SEQ ID NO: 33975 - RNA, 21 nt, RNAi
guucaucagcuggaucagcuu

SEQ ID NO: 33976 - RNA, 21 nt, RNAi
uucaaguagucgaccuagucg

SEQ ID NO: 33977 - DNA, 20 bp, Homo sapiens
catcagctggatcagccaca

SEQ ID NO: 33978 - RNA, 20 nt, RNAi
ucagcuggaucagccacauu

SEQ ID NO: 33979 - RNA, 20 nt, RNAi
uuagucgaccuagucggugu

SEQ ID NO: 33980 - DNA, 20 bp, Homo sapiens
cagctggatcagccacatgg

SEQ ID NO: 33981 - RNA, 20 nt, RNAi
gcuggaucagccacaugguu

SEQ ID NO: 33982 - RNA, 20 nt, RNAi
uucgaccuagucgguguacc

SEQ ID NO: 33983 - DNA, 20 bp, Homo sapiens
cagccacatggtggccttac

SEQ ID NO: 33984 - RNA, 20 nt, RNAi
gccacaugguggccuuacuu

SEQ ID NO: 33985 - RNA, 20 nt, RNAi
uucgguguaccaccggaaug

SEQ ID NO: 33986 - DNA, 21 bp, Homo sapiens
cacatggtggccttactggac

SEQ ID NO: 33987 - RNA, 21 nt, RNAi
caugguggccuuacuggacuu

SEQ ID NO: 33988 - RNA, 21 nt, RNAi
uuguaccaccggaaugaccug

SEQ ID NO: 33989 - DNA, 21 bp, Homo sapiens
catggtggccttactggacaa

SEQ ID NO: 33990 - RNA, 21 nt, RNAi
ugguggccuuacuggacaauu

SEQ ID NO: 33991 - RNA, 21 nt, RNAi
uuaccaccggaaugaccuguu

SEQ ID NO: 33992 - DNA, 21 bp, Homo sapiens
caaagaccaagccgttgctgt

SEQ ID NO: 33993 - RNA, 21 nt, RNAi
aagaccaagccguugcuguuu

SEQ ID NO: 33994 - RNA, 21 nt, RNAi
uuuucugguucggcaacgaca

SEQ ID NO: 33995 - DNA, 21 bp, Homo sapiens
caagccgttgctgttcagcac

SEQ ID NO: 33996 - RNA, 21 nt, RNAi
agccguugcuguucagcacuu

SEQ ID NO: 33997 - RNA, 21 nt, RNAi
uuucggcaacgacaagucgug

SEQ ID NO: 33998 - DNA, 20 bp, Homo sapiens
cagcactctgtggaagaaat

SEQ ID NO: 33999 - RNA, 20 nt, RNAi
gcacucuguggaagaaauuu

SEQ ID NO: 34000 - RNA, 20 nt, RNAi
uucgugagacaccuucuuua

SEQ ID NO: 34001 - DNA, 20 bp, Homo sapiens
cactctgtggaagaaatcac

SEQ ID NO: 34002 - RNA, 20 nt, RNAi
cucuguggaagaaaucacuu

SEQ ID NO: 34003 - RNA, 20 nt, RNAi
uugagacaccuucuuuagug

SEQ ID NO: 34004 - DNA, 21 bp, Homo sapiens
catcataagcagcgaaagcta

SEQ ID NO: 34005 - RNA, 21 nt, RNAi
ucauaagcagcgaaagcuauu

SEQ ID NO: 34006 - RNA, 21 nt, RNAi
uuaguauucgucgcuuucgau

SEQ ID NO: 34007 - DNA, 20 bp, Homo sapiens
cataagcagcgaaagctatt

SEQ ID NO: 34008 - RNA, 20 nt, RNAi
uaagcagcgaaagcuauuuu

SEQ ID NO: 34009 - RNA, 20 nt, RNAi
uuauucgucgcuuucgauaa

SEQ ID NO: 34010 - DNA, 20 bp, Homo sapiens
cagcgaaagctattccttca

SEQ ID NO: 34011 - RNA, 20 nt, RNAi
gcgaaagcuauuccuucauu

SEQ ID NO: 34012 - RNA, 20 nt, RNAi
uucgcuuucgauaaggaagu

SEQ ID NO: 34013 - DNA, 21 bp, Homo sapiens
caaggatacttctactggtca

SEQ ID NO: 34014 - RNA, 21 nt, RNAi
aggauacuucuacuggucauu

SEQ ID NO: 34015 - RNA, 21 nt, RNAi
uuuccuaugaagaugaccagu

SEQ ID NO: 34016 - DNA, 21 bp, Homo sapiens
cataagaataaggagtttgtg

SEQ ID NO: 34017 - RNA, 21 nt, RNAi
uaagaauaaggaguuuguguu

SEQ ID NO: 34018 - RNA, 21 nt, RNAi
uuauucuuauuccucaaacac

SEQ ID NO: 34019 - DNA, 21 bp, Homo sapiens
caaggaggagtgattcaagat

SEQ ID NO: 34020 - RNA, 21 nt, RNAi
aggaggagugauucaagauuu

SEQ ID NO: 34021 - RNA, 21 nt, RNAi
uuuccuccucacuaaguucua

SEQ ID NO: 34022 - DNA, 20 bp, Homo sapiens
cagctctctaatcctgaact

SEQ ID NO: 34023 - RNA, 20 nt, RNAi
gcucucuaauccugaacuuu

SEQ ID NO: 34024 - RNA, 20 nt, RNAi
uucgagagauuaggacuuga

SEQ ID NO: 34025 - DNA, 21 bp, Homo sapiens
caatgatgtaagagctgaact

SEQ ID NO: 34026 - RNA, 21 nt, RNAi
augauguaagagcugaacuuu

SEQ ID NO: 34027 - RNA, 21 nt, RNAi
uuuacuacauucucgacuuga

SEQ ID NO: 34028 - DNA, 20 bp, Homo sapiens
cagtgacttcaacgacatta

SEQ ID NO: 34029 - RNA, 20 nt, RNAi
gugacuucaacgacauuauu

SEQ ID NO: 34030 - RNA, 20 nt, RNAi
uucacugaaguugcuguaau

SEQ ID NO: 34031 - DNA, 20 bp, Homo sapiens
caacgacattaccaacatgc

SEQ ID NO: 34032 - RNA, 20 nt, RNAi
acgacauuaccaacaugcuu

SEQ ID NO: 34033 - RNA, 20 nt, RNAi
uuugcuguaaugguuguacg

SEQ ID NO: 34034 - DNA, 21 bp, Homo sapiens
caaagtggagttcctgagaaa

SEQ ID NO: 34035 - RNA, 21 nt, RNAi
aaguggaguuccugagaaauu

SEQ ID NO: 34036 - RNA, 21 nt, RNAi
uuuucaccucaaggacucuuu

SEQ ID NO: 34037 - DNA, 21 bp, Homo sapiens
cattgccagagtaccacgtgc

SEQ ID NO: 34038 - RNA, 21 nt, RNAi
uugccagaguaccacgugcuu

SEQ ID NO: 34039 - RNA, 21 nt, RNAi
uuaacggucucauggugcacg

SEQ ID NO: 34040 - DNA, 21 bp, Homo sapiens
cagagtaccacgtgcgaatcg

SEQ ID NO: 34041 - RNA, 21 nt, RNAi
gaguaccacgugcgaaucguu

SEQ ID NO: 34042 - RNA, 21 nt, RNAi
uucucauggugcacgcuuagc

SEQ ID NO: 34043 - DNA, 21 bp, Homo sapiens
cagtcatggcgtctctgcgaa

SEQ ID NO: 34044 - RNA, 21 nt, RNAi
gucauggcgucucugcgaauu

SEQ ID NO: 34045 - RNA, 21 nt, RNAi
uucaguaccgcagagacgcuu

SEQ ID NO: 34046 - DNA, 20 bp, Homo sapiens
caagcgcatcatcatccgtg

SEQ ID NO: 34047 - RNA, 20 nt, RNAi
agcgcaucaucauccguguu

SEQ ID NO: 34048 - RNA, 20 nt, RNAi
uuucgcguaguaguaggcac

SEQ ID NO: 34049 - DNA, 20 bp, Homo sapiens
catcatcatccgtggccatg

SEQ ID NO: 34050 - RNA, 20 nt, RNAi
ucaucauccguggccauguu

SEQ ID NO: 34051 - RNA, 20 nt, RNAi
uuaguaguaggcaccgguac

SEQ ID NO: 34052 - DNA, 20 bp, Homo sapiens
catcatccgtggccatgacg

SEQ ID NO: 34053 - RNA, 20 nt, RNAi
ucauccguggccaugacguu

SEQ ID NO: 34054 - RNA, 20 nt, RNAi
uuaguaggcaccgguacugc

SEQ ID NO: 34055 - DNA, 20 bp, Homo sapiens
catccgtggccatgacgaga

SEQ ID NO: 34056 - RNA, 20 nt, RNAi
uccguggccaugacgagauu

SEQ ID NO: 34057 - RNA, 20 nt, RNAi
uuaggcaccgguacugcucu

SEQ ID NO: 34058 - DNA, 21 bp, Homo sapiens
cagctcttccaggtcatgaat

SEQ ID NO: 34059 - RNA, 21 nt, RNAi
gcucuuccaggucaugaauuu

SEQ ID NO: 34060 - RNA, 21 nt, RNAi
uucgagaagguccaguacuua

SEQ ID NO: 34061 - DNA, 20 bp, Homo sapiens
caagactccgcctgcagcca

SEQ ID NO: 34062 - RNA, 20 nt, RNAi
agacuccgccugcagccauu

SEQ ID NO: 34063 - RNA, 20 nt, RNAi
uuucugaggcggacgucggu

SEQ ID NO: 34064 - DNA, 21 bp, Homo sapiens
cagctgaggacctatagcgtt

SEQ ID NO: 34065 - RNA, 21 nt, RNAi
gcugaggaccuauagcguuuu

SEQ ID NO: 34066 - RNA, 21 nt, RNAi
uucgacuccuggauaucgcaa

SEQ ID NO: 34067 - DNA, 20 bp, Homo sapiens
catgacctccaggttaggat

SEQ ID NO: 34068 - RNA, 20 nt, RNAi
ugaccuccagguuaggauuu

SEQ ID NO: 34069 - RNA, 20 nt, RNAi
uuacuggagguccaauccua

SEQ ID NO: 34070 - DNA, 20 bp, Homo sapiens
caggttaggattaattgagt

SEQ ID NO: 34071 - RNA, 20 nt, RNAi
gguuaggauuaauugaguuu

SEQ ID NO: 34072 - RNA, 20 nt, RNAi
uuccaauccuaauuaacuca

SEQ ID NO: 34073 - DNA, 21 bp, Homo sapiens
caagaggagaaggcggcttac

SEQ ID NO: 34074 - RNA, 21 nt, RNAi
agaggagaaggcggcuuacuu

SEQ ID NO: 34075 - RNA, 21 nt, RNAi
uuucuccucuuccgccgaaug

SEQ ID NO: 34076 - DNA, 20 bp, Homo sapiens
caccgccgtgtgaatataaa

SEQ ID NO: 34077 - RNA, 20 nt, RNAi
ccgccgugugaauauaaauu

SEQ ID NO: 34078 - RNA, 20 nt, RNAi
uuggcggcacacuuauauuu

SEQ ID NO: 34079 - DNA, 21 bp, Homo sapiens
catgatgttggagcttacatg

SEQ ID NO: 34080 - RNA, 21 nt, RNAi
ugauguuggagcuuacauguu

SEQ ID NO: 34081 - RNA, 21 nt, RNAi
uuacuacaaccucgaauguac

SEQ ID NO: 34082 - DNA, 20 bp, Homo sapiens
catgctaatgtataagggcg

SEQ ID NO: 34083 - RNA, 20 nt, RNAi
ugcuaauguauaagggcguu

SEQ ID NO: 34084 - RNA, 20 nt, RNAi
uuacgauuacauauucccgc

SEQ ID NO: 34085 - DNA, 21 bp, Homo sapiens
cacttcgccagctctcacgct

SEQ ID NO: 34086 - RNA, 21 nt, RNAi
cuucgccagcucucacgcuuu

SEQ ID NO: 34087 - RNA, 21 nt, RNAi
uugaagcggucgagagugcga

SEQ ID NO: 34088 - DNA, 21 bp, Homo sapiens
cagctctcacgctctgatatg

SEQ ID NO: 34089 - RNA, 21 nt, RNAi
gcucucacgcucugauauguu

SEQ ID NO: 34090 - RNA, 21 nt, RNAi
uucgagagugcgagacuauac

SEQ ID NO: 34091 - DNA, 21 bp, Homo sapiens
cacgctctgatatgcatcagc

SEQ ID NO: 34092 - RNA, 21 nt, RNAi
cgcucugauaugcaucagcuu

SEQ ID NO: 34093 - RNA, 21 nt, RNAi
uugcgagacuauacguagucg

SEQ ID NO: 34094 - DNA, 21 bp, Homo sapiens
catcagccactggatcctcgg

SEQ ID NO: 34095 - RNA, 21 nt, RNAi
ucagccacuggauccucgguu

SEQ ID NO: 34096 - RNA, 21 nt, RNAi
uuagucggugaccuaggagcc

SEQ ID NO: 34097 - DNA, 21 bp, Homo sapiens
cagacatctgaacaactttat

SEQ ID NO: 34098 - RNA, 21 nt, RNAi
gacaucugaacaacuuuauuu

SEQ ID NO: 34099 - RNA, 21 nt, RNAi
uucuguagacuuguugaaaua

SEQ ID NO: 34100 - DNA, 21 bp, Homo sapiens
catctgaacaactttatggtg

SEQ ID NO: 34101 - RNA, 21 nt, RNAi
ucugaacaacuuuaugguguu

SEQ ID NO: 34102 - RNA, 21 nt, RNAi
uuagacuuguugaaauaccac

SEQ ID NO: 34103 - DNA, 21 bp, Homo sapiens
caactttatggtggccatgga

SEQ ID NO: 34104 - RNA, 21 nt, RNAi
acuuuaugguggccauggauu

SEQ ID NO: 34105 - RNA, 21 nt, RNAi
uuugaaauaccaccgguaccu

SEQ ID NO: 34106 - DNA, 21 bp, Homo sapiens
catgcgtttggatccgctaca

SEQ ID NO: 34107 - RNA, 21 nt, RNAi
ugcguuuggauccgcuacauu

SEQ ID NO: 34108 - RNA, 21 nt, RNAi
uuacgcaaaccuaggcgaugu

SEQ ID NO: 34109 - DNA, 21 bp, Homo sapiens
caatctgatgttaccaatgaa

SEQ ID NO: 34110 - RNA, 21 nt, RNAi
aucugauguuaccaaugaauu

SEQ ID NO: 34111 - RNA, 21 nt, RNAi
uuuagacuacaaugguuacuu

SEQ ID NO: 34112 - DNA, 21 bp, Homo sapiens
cagcatcatggtacacgcact

SEQ ID NO: 34113 - RNA, 21 nt, RNAi
gcaucaugguacacgcacuuu

SEQ ID NO: 34114 - RNA, 21 nt, RNAi
uucguaguaccaugugcguga

SEQ ID NO: 34115 - DNA, 21 bp, Homo sapiens
catcatggtacacgcactccg

SEQ ID NO: 34116 - RNA, 21 nt, RNAi
ucaugguacacgcacuccguu

SEQ ID NO: 34117 - RNA, 21 nt, RNAi
uuaguaccaugugcgugaggc

SEQ ID NO: 34118 - DNA, 20 bp, Homo sapiens
caccaacaccatggatgtgt

SEQ ID NO: 34119 - RNA, 20 nt, RNAi
ccaacaccauggauguguuu

SEQ ID NO: 34120 - RNA, 20 nt, RNAi
uugguugugguaccuacaca

SEQ ID NO: 34121 - DNA, 20 bp, Homo sapiens
caacaccatggatgtgtttg

SEQ ID NO: 34122 - RNA, 20 nt, RNAi
acaccauggauguguuuguu

SEQ ID NO: 34123 - RNA, 20 nt, RNAi
uuugugguaccuacacaaac

SEQ ID NO: 34124 - DNA, 21 bp, Homo sapiens
catggatgtgtttgtcaagga

SEQ ID NO: 34125 - RNA, 21 nt, RNAi
uggauguguuugucaaggauu

SEQ ID NO: 34126 - RNA, 21 nt, RNAi
uuaccuacacaaacaguuccu

SEQ ID NO: 34127 - DNA, 21 bp, Homo sapiens
caggtgccaatccagcagtca

SEQ ID NO: 34128 - RNA, 21 nt, RNAi
ggugccaauccagcagucauu

SEQ ID NO: 34129 - RNA, 21 nt, RNAi
uuccacgguuaggucgucagu

SEQ ID NO: 34130 - DNA, 20 bp, Homo sapiens
caatccagcagtcattactt

SEQ ID NO: 34131 - RNA, 20 nt, RNAi
auccagcagucauuacuuuu

SEQ ID NO: 34132 - RNA, 20 nt, RNAi
uuuaggucgucaguaaugaa

SEQ ID NO: 34133 - DNA, 20 bp, Homo sapiens
cagcagtcattacttgtgat

SEQ ID NO: 34134 - RNA, 20 nt, RNAi
gcagucauuacuugugauuu

SEQ ID NO: 34135 - RNA, 20 nt, RNAi
uucgucaguaaugaacacua

SEQ ID NO: 34136 - DNA, 20 bp, Homo sapiens
cagtcattacttgtgatgag

SEQ ID NO: 34137 - RNA, 20 nt, RNAi
gucauuacuugugaugaguu

SEQ ID NO: 34138 - RNA, 20 nt, RNAi
uucaguaaugaacacuacuc

SEQ ID NO: 34139 - DNA, 20 bp, Homo sapiens
cattacttgtgatgagctac

SEQ ID NO: 34140 - RNA, 20 nt, RNAi
uuacuugugaugagcuacuu

SEQ ID NO: 34141 - RNA, 20 nt, RNAi
uuaaugaacacuacucgaug

SEQ ID NO: 34142 - DNA, 20 bp, Homo sapiens
cagagactatgtggctgtgg

SEQ ID NO: 34143 - RNA, 20 nt, RNAi
gagacuauguggcugugguu

SEQ ID NO: 34144 - RNA, 20 nt, RNAi
uucucugauacaccgacacc

SEQ ID NO: 34145 - DNA, 21 bp, Homo sapiens
cacgaggaagcaaagatcaca

SEQ ID NO: 34146 - RNA, 21 nt, RNAi
cgaggaagcaaagaucacauu

SEQ ID NO: 34147 - RNA, 21 nt, RNAi
uugcuccuucguuucuagugu

SEQ ID NO: 34148 - DNA, 21 bp, Homo sapiens
caaagatcacaacattcgtgc

SEQ ID NO: 34149 - RNA, 21 nt, RNAi
aagaucacaacauucgugcuu

SEQ ID NO: 34150 - RNA, 21 nt, RNAi
uuuucuaguguuguaagcacg

SEQ ID NO: 34151 - DNA, 20 bp, Homo sapiens
cagaagagactcaagtgaag

SEQ ID NO: 34152 - RNA, 20 nt, RNAi
gaagagacucaagugaaguu

SEQ ID NO: 34153 - RNA, 20 nt, RNAi
uucuucucugaguucacuuc

SEQ ID NO: 34154 - DNA, 21 bp, Homo sapiens
caagtgaagtgcctgatggac

SEQ ID NO: 34155 - RNA, 21 nt, RNAi
agugaagugccugauggacuu

SEQ ID NO: 34156 - RNA, 21 nt, RNAi
uuucacuucacggacuaccug

SEQ ID NO: 34157 - DNA, 20 bp, Homo sapiens
caacatccttggcagaacct

SEQ ID NO: 34158 - RNA, 20 nt, RNAi
acauccuuggcagaaccuuu

SEQ ID NO: 34159 - RNA, 20 nt, RNAi
uuuguaggaaccgucuugga

SEQ ID NO: 34160 - DNA, 21 bp, Homo sapiens
gaatgcgtcctgagcagcagc

SEQ ID NO: 34161 - RNA, 21 nt, RNAi
augcguccugagcagcagcuu

SEQ ID NO: 34162 - RNA, 21 nt, RNAi
uuuacgcaggacucgucgucg

SEQ ID NO: 34163 - DNA, 21 bp, Homo sapiens
gagatttcggtttgcttgtat

SEQ ID NO: 34164 - RNA, 21 nt, RNAi
gauuucgguuugcuuguauuu

SEQ ID NO: 34165 - RNA, 21 nt, RNAi
uucuaaagccaaacgaacaua

SEQ ID NO: 34166 - DNA, 21 bp, Homo sapiens
gatttcggtttgcttgtattt

SEQ ID NO: 34167 - RNA, 21 nt, RNAi
uuucgguuugcuuguauuuuu

SEQ ID NO: 34168 - RNA, 21 nt, RNAi
uuaaagccaaacgaacauaaa

SEQ ID NO: 34169 - DNA, 21 bp, Homo sapiens
gaagtcactcaacagtattga

SEQ ID NO: 34170 - RNA, 21 nt, RNAi
agucacucaacaguauugauu

SEQ ID NO: 34171 - RNA, 21 nt, RNAi
uuucagugaguugucauaacu

SEQ ID NO: 34172 - DNA, 21 bp, Homo sapiens
gaatttcgtgaatgtagagaa

SEQ ID NO: 34173 - RNA, 21 nt, RNAi
auuucgugaauguagagaauu

SEQ ID NO: 34174 - RNA, 21 nt, RNAi
uuuaaagcacuuacaucucuu

SEQ ID NO: 34175 - DNA, 21 bp, Homo sapiens
gaatgtagagaagaaatccta

SEQ ID NO: 34176 - RNA, 21 nt, RNAi
auguagagaagaaauccuauu

SEQ ID NO: 34177 - RNA, 21 nt, RNAi
uuuacaucucuucuuuaggau

SEQ ID NO: 34178 - DNA, 21 bp, Homo sapiens
gaagatcgcaccttactctgt

SEQ ID NO: 34179 - RNA, 21 nt, RNAi
agaucgcaccuuacucuguuu

SEQ ID NO: 34180 - RNA, 21 nt, RNAi
uuucuagcguggaaugagaca

SEQ ID NO: 34181 - DNA, 21 bp, Homo sapiens
gatcgcaccttactctgttga

SEQ ID NO: 34182 - RNA, 21 nt, RNAi
ucgcaccuuacucuguugauu

SEQ ID NO: 34183 - RNA, 21 nt, RNAi
uuagcguggaaugagacaacu

SEQ ID NO: 34184 - DNA, 21 bp, Homo sapiens
gaaattaagaacacttgtacc

SEQ ID NO: 34185 - RNA, 21 nt, RNAi
aauuaagaacacuuguaccuu

SEQ ID NO: 34186 - RNA, 21 nt, RNAi
uuuuaauucuugugaacaugg

SEQ ID NO: 34187 - DNA, 21 bp, Homo sapiens
gaacacttgtaccagtgttta

SEQ ID NO: 34188 - RNA, 21 nt, RNAi
acacuuguaccaguguuuauu

SEQ ID NO: 34189 - RNA, 21 nt, RNAi
uuugugaacauggucacaaau

SEQ ID NO: 34190 - DNA, 21 bp, Homo sapiens
gatagagctgctaaatgtaaa

SEQ ID NO: 34191 - RNA, 21 nt, RNAi
uagagcugcuaaauguaaauu

SEQ ID NO: 34192 - RNA, 21 nt, RNAi
uuaucucgacgauuuacauuu

SEQ ID NO: 34193 - DNA, 21 bp, Homo sapiens
gaagttctagactcatggatg

SEQ ID NO: 34194 - RNA, 21 nt, RNAi
aguucuagacucauggauguu

SEQ ID NO: 34195 - RNA, 21 nt, RNAi
uuucaagaucugaguaccuac

SEQ ID NO: 34196 - DNA, 21 bp, Homo sapiens
gaagttcatcctagtgagatg

SEQ ID NO: 34197 - RNA, 21 nt, RNAi
aguucauccuagugagauguu

SEQ ID NO: 34198 - RNA, 21 nt, RNAi
uuucaaguaggaucacucuac

SEQ ID NO: 34199 - DNA, 21 bp, Homo sapiens
gatgacatcagcagtaagaga

SEQ ID NO: 34200 - RNA, 21 nt, RNAi
ugacaucagcaguaagagauu

SEQ ID NO: 34201 - RNA, 21 nt, RNAi
uuacuguagucgucauucucu

SEQ ID NO: 34202 - DNA, 21 bp, Homo sapiens
gacatcagcagtaagagagcc

SEQ ID NO: 34203 - RNA, 21 nt, RNAi
caucagcaguaagagagccuu

SEQ ID NO: 34204 - RNA, 21 nt, RNAi
uuguagucgucauucucucgg

SEQ ID NO: 34205 - DNA, 21 bp, Homo sapiens
gattgatctgaagagatatgc

SEQ ID NO: 34206 - RNA, 21 nt, RNAi
uugaucugaagagauaugcuu

SEQ ID NO: 34207 - RNA, 21 nt, RNAi
uuaacuagacuucucuauacg

SEQ ID NO: 34208 - DNA, 21 bp, Homo sapiens
gatctgaagagatatgctgtg

SEQ ID NO: 34209 - RNA, 21 nt, RNAi
ucugaagagauaugcuguguu

SEQ ID NO: 34210 - RNA, 21 nt, RNAi
uuagacuucucuauacgacac

SEQ ID NO: 34211 - DNA, 21 bp, Homo sapiens
gacaactacgtgtctctattt

SEQ ID NO: 34212 - RNA, 21 nt, RNAi
caacuacgugucucuauuuuu

SEQ ID NO: 34213 - RNA, 21 nt, RNAi
uuguugaugcacagagauaaa

SEQ ID NO: 34214 - DNA, 21 bp, Homo sapiens
gaagtcttgttaaagtggtgt

SEQ ID NO: 34215 - RNA, 21 nt, RNAi
agucuuguuaaagugguguuu

SEQ ID NO: 34216 - RNA, 21 nt, RNAi
uuucagaacaauuucaccaca

SEQ ID NO: 34217 - DNA, 21 bp, Homo sapiens
gaatcctttctgaaacaggtt

SEQ ID NO: 34218 - RNA, 21 nt, RNAi
auccuuucugaaacagguuuu

SEQ ID NO: 34219 - RNA, 21 nt, RNAi
uuuaggaaagacuuuguccaa

SEQ ID NO: 34220 - DNA, 21 bp, Homo sapiens
gaaacaggtttctaatatggt

SEQ ID NO: 34221 - RNA, 21 nt, RNAi
aacagguuucuaauaugguuu

SEQ ID NO: 34222 - RNA, 21 nt, RNAi
uuuuguccaaagauuauacca

SEQ ID NO: 34223 - DNA, 21 bp, Homo sapiens
gaatcatcagaaatgtggatt

SEQ ID NO: 34224 - RNA, 21 nt, RNAi
aucaucagaaauguggauuuu

SEQ ID NO: 34225 - RNA, 21 nt, RNAi
uuuaguagucuuuacaccuaa

SEQ ID NO: 34226 - DNA, 21 bp, Homo sapiens
gaaatgtggattcgaacaaca

SEQ ID NO: 34227 - RNA, 21 nt, RNAi
aauguggauucgaacaacauu

SEQ ID NO: 34228 - RNA, 21 nt, RNAi
uuuuacaccuaagcuuguugu

SEQ ID NO: 34229 - DNA, 21 bp, Homo sapiens
gattcgaacaacaaggagtta

SEQ ID NO: 34230 - RNA, 21 nt, RNAi
uucgaacaacaaggaguuauu

SEQ ID NO: 34231 - RNA, 21 nt, RNAi
uuaagcuuguuguuccucaau

SEQ ID NO: 34232 - DNA, 21 bp, Homo sapiens
gaacaacaaggagttatctat

SEQ ID NO: 34233 - RNA, 21 nt, RNAi
acaacaaggaguuaucuauuu

SEQ ID NO: 34234 - RNA, 21 nt, RNAi
uuuguuguuccucaauagaua

SEQ ID NO: 34235 - DNA, 21 bp, Homo sapiens
gagttatctattgctatccgt

SEQ ID NO: 34236 - RNA, 21 nt, RNAi
guuaucuauugcuauccguuu

SEQ ID NO: 34237 - RNA, 21 nt, RNAi
uucaauagauaacgauaggca

SEQ ID NO: 34238 - DNA, 21 bp, Homo sapiens
gaccgtgcaaggttataaacg

SEQ ID NO: 34239 - RNA, 21 nt, RNAi
ccgugcaagguuauaaacguu

SEQ ID NO: 34240 - RNA, 21 nt, RNAi
uuggcacguuccaauauuugc

SEQ ID NO: 34241 - DNA, 21 bp, Homo sapiens
gatgttgacttcatgtacgtt

SEQ ID NO: 34242 - RNA, 21 nt, RNAi
uguugacuucauguacguuuu

SEQ ID NO: 34243 - RNA, 21 nt, RNAi
uuacaacugaaguacaugcaa

SEQ ID NO: 34244 - DNA, 21 bp, Homo sapiens
gacttcatgtacgttgagctc

SEQ ID NO: 34245 - RNA, 21 nt, RNAi
cuucauguacguugagcucuu

SEQ ID NO: 34246 - RNA, 21 nt, RNAi
uugaaguacaugcaacucgag

SEQ ID NO: 34247 - DNA, 21 bp, Homo sapiens
gagctcattcagcgctgcaag

SEQ ID NO: 34248 - RNA, 21 nt, RNAi
gcucauucagcgcugcaaguu

SEQ ID NO: 34249 - RNA, 21 nt, RNAi
uucgaguaagucgcgacguuc

SEQ ID NO: 34250 - DNA, 21 bp, Homo sapiens
gacagacactggtgacgaccg

SEQ ID NO: 34251 - RNA, 21 nt, RNAi
cagacacuggugacgaccguu

SEQ ID NO: 34252 - RNA, 21 nt, RNAi
uugucugugaccacugcuggc

SEQ ID NO: 34253 - DNA, 21 bp, Homo sapiens
gacactggtgacgaccgtgtt

SEQ ID NO: 34254 - RNA, 21 nt, RNAi
cacuggugacgaccguguuuu

SEQ ID NO: 34255 - RNA, 21 nt, RNAi
uugugaccacugcuggcacaa

SEQ ID NO: 34256 - DNA, 21 bp, Homo sapiens
gacgaccgtgtttatcagatg

SEQ ID NO: 34257 - RNA, 21 nt, RNAi
cgaccguguuuaucagauguu

SEQ ID NO: 34258 - RNA, 21 nt, RNAi
uugcuggcacaaauagucuac

SEQ ID NO: 34259 - DNA, 21 bp, Homo sapiens
gaccgtgtttatcagatgcca

SEQ ID NO: 34260 - RNA, 21 nt, RNAi
ccguguuuaucagaugccauu

SEQ ID NO: 34261 - RNA, 21 nt, RNAi
uuggcacaaauagucuacggu

SEQ ID NO: 34262 - DNA, 21 bp, Homo sapiens
gatgccaagcttcctccagtc

SEQ ID NO: 34263 - RNA, 21 nt, RNAi
ugccaagcuuccuccagucuu

SEQ ID NO: 34264 - RNA, 21 nt, RNAi
uuacgguucgaaggaggucag

SEQ ID NO: 34265 - DNA, 21 bp, Homo sapiens
gacacagttcctgaggtgtat

SEQ ID NO: 34266 - RNA, 21 nt, RNAi
cacaguuccugagguguauuu

SEQ ID NO: 34267 - RNA, 21 nt, RNAi
uugugucaaggacuccacaua

SEQ ID NO: 34268 - DNA, 21 bp, Homo sapiens
gaggtgtatactccagttctg

SEQ ID NO: 34269 - RNA, 21 nt, RNAi
gguguauacuccaguucuguu

SEQ ID NO: 34270 - RNA, 21 nt, RNAi
uuccacauaugaggucaagac

SEQ ID NO: 34271 - DNA, 21 bp, Homo sapiens
gagcacctcgtggtgatgcag

SEQ ID NO: 34272 - RNA, 21 nt, RNAi
gcaccucguggugaugcaguu

SEQ ID NO: 34273 - RNA, 21 nt, RNAi
uucguggagcaccacuacguc

SEQ ID NO: 34274 - DNA, 21 bp, Homo sapiens
gagccatagtgaaggtgttcc

SEQ ID NO: 34275 - RNA, 21 nt, RNAi
gccauagugaagguguuccuu

SEQ ID NO: 34276 - RNA, 21 nt, RNAi
uucgguaucacuuccacaagg

SEQ ID NO: 34277 - DNA, 21 bp, Homo sapiens
gaaggtgttcctagctttggc

SEQ ID NO: 34278 - RNA, 21 nt, RNAi
agguguuccuagcuuuggcuu

SEQ ID NO: 34279 - RNA, 21 nt, RNAi
uuuccacaaggaucgaaaccg

SEQ ID NO: 34280 - DNA, 21 bp, Homo sapiens
gaattgcattagtactgtggt

SEQ ID NO: 34281 - RNA, 21 nt, RNAi
auugcauuaguacugugguuu

SEQ ID NO: 34282 - RNA, 21 nt, RNAi
uuuaacguaaucaugacacca

SEQ ID NO: 34283 - DNA, 21 bp, Homo sapiens
gaatatgttctaaaccagtgg

SEQ ID NO: 34284 - RNA, 21 nt, RNAi
auauguucuaaaccagugguu

SEQ ID NO: 34285 - RNA, 21 nt, RNAi
uuuauacaagauuuggucacc

SEQ ID NO: 34286 - DNA, 21 bp, Homo sapiens
gagtctgaatctgaagaccac

SEQ ID NO: 34287 - RNA, 21 nt, RNAi
gucugaaucugaagaccacuu

SEQ ID NO: 34288 - RNA, 21 nt, RNAi
uucagacuuagacuucuggug

SEQ ID NO: 34289 - DNA, 21 bp, Homo sapiens
gaatctgaagaccaccgtgct

SEQ ID NO: 34290 - RNA, 21 nt, RNAi
aucugaagaccaccgugcuuu

SEQ ID NO: 34291 - RNA, 21 nt, RNAi
uuuagacuucugguggcacga

SEQ ID NO: 34292 - DNA, 21 bp, Homo sapiens
gaagtcagaactggcaaatgg

SEQ ID NO: 34293 - RNA, 21 nt, RNAi
agucagaacuggcaaaugguu

SEQ ID NO: 34294 - RNA, 21 nt, RNAi
uuucagucuugaccguuuacc

SEQ ID NO: 34295 - DNA, 21 bp, Homo sapiens
gaactggcaaatggaaggtgc

SEQ ID NO: 34296 - RNA, 21 nt, RNAi
acuggcaaauggaaggugcuu

SEQ ID NO: 34297 - RNA, 21 nt, RNAi
uuugaccguuuaccuuccacg

SEQ ID NO: 34298 - DNA, 21 bp, Homo sapiens
gactacgtggatctcttcaga

SEQ ID NO: 34299 - RNA, 21 nt, RNAi
cuacguggaucucuucagauu

SEQ ID NO: 34300 - RNA, 21 nt, RNAi
uugaugcaccuagagaagucu

SEQ ID NO: 34301 - DNA, 21 bp, Homo sapiens
gatctcttcagacatctcctg

SEQ ID NO: 34302 - RNA, 21 nt, RNAi
ucucuucagacaucuccuguu

SEQ ID NO: 34303 - RNA, 21 nt, RNAi
uuagagaagucuguagaggac

SEQ ID NO: 34304 - DNA, 21 bp, Homo sapiens
gacatctcctgagctctgacc

SEQ ID NO: 34305 - RNA, 21 nt, RNAi
caucuccugagcucugaccuu

SEQ ID NO: 34306 - RNA, 21 nt, RNAi
uuguagaggacucgagacugg

SEQ ID NO: 34307 - DNA, 21 bp, Homo sapiens
gagctctgaccagatgatgga

SEQ ID NO: 34308 - RNA, 21 nt, RNAi
gcucugaccagaugauggauu

SEQ ID NO: 34309 - RNA, 21 nt, RNAi
uucgagacuggucuacuaccu

SEQ ID NO: 34310 - DNA, 21 bp, Homo sapiens
gaccagatgatggattctatt

SEQ ID NO: 34311 - RNA, 21 nt, RNAi
ccagaugauggauucuauuuu

SEQ ID NO: 34312 - RNA, 21 nt, RNAi
uuggucuacuaccuaagauaa

SEQ ID NO: 34313 - DNA, 21 bp, Homo sapiens
gaattcctccagtgaaagtct

SEQ ID NO: 34314 - RNA, 21 nt, RNAi
auuccuccagugaaagucuuu

SEQ ID NO: 34315 - RNA, 21 nt, RNAi
uuuaaggaggucacuuucaga

SEQ ID NO: 34316 - DNA, 21 bp, Homo sapiens
gaagattgttgagaaattgga

SEQ ID NO: 34317 - RNA, 21 nt, RNAi
agauuguugagaaauuggauu

SEQ ID NO: 34318 - RNA, 21 nt, RNAi
uuucuaacaacucuuuaaccu

SEQ ID NO: 34319 - DNA, 21 bp, Homo sapiens
gattgttgagaaattggatct

SEQ ID NO: 34320 - RNA, 21 nt, RNAi
uuguugagaaauuggaucuuu

SEQ ID NO: 34321 - RNA, 21 nt, RNAi
uuaacaacucuuuaaccuaga

SEQ ID NO: 34322 - DNA, 21 bp, Homo sapiens
gagaaattggatcttacactt

SEQ ID NO: 34323 - RNA, 21 nt, RNAi
gaaauuggaucuuacacuuuu

SEQ ID NO: 34324 - RNA, 21 nt, RNAi
uucuuuaaccuagaaugugaa

SEQ ID NO: 34325 - DNA, 21 bp, Homo sapiens
gaaattggatcttacacttga

SEQ ID NO: 34326 - RNA, 21 nt, RNAi
aauuggaucuuacacuugauu

SEQ ID NO: 34327 - RNA, 21 nt, RNAi
uuuuaaccuagaaugugaacu

SEQ ID NO: 34328 - DNA, 21 bp, Homo sapiens
gatcttacacttgaaatacag

SEQ ID NO: 34329 - RNA, 21 nt, RNAi
ucuuacacuugaaauacaguu

SEQ ID NO: 34330 - RNA, 21 nt, RNAi
uuagaaugugaacuuuauguc

SEQ ID NO: 34331 - DNA, 21 bp, Homo sapiens
gaacaagagaatggagatgag

SEQ ID NO: 34332 - RNA, 21 nt, RNAi
acaagagaauggagaugaguu

SEQ ID NO: 34333 - RNA, 21 nt, RNAi
uuuguucucuuaccucuacuc

SEQ ID NO: 34334 - DNA, 21 bp, Homo sapiens
gagaatggagatgaggcgcct

SEQ ID NO: 34335 - RNA, 21 nt, RNAi
gaauggagaugaggcgccuuu

SEQ ID NO: 34336 - RNA, 21 nt, RNAi
uucuuaccucuacuccgcgga

SEQ ID NO: 34337 - DNA, 21 bp, Homo sapiens
gaatggagatgaggcgcctgg

SEQ ID NO: 34338 - RNA, 21 nt, RNAi
auggagaugaggcgccugguu

SEQ ID NO: 34339 - RNA, 21 nt, RNAi
uuuaccucuacuccgcggacc

SEQ ID NO: 34340 - DNA, 21 bp, Homo sapiens
gagatgaggcgcctggtgttt

SEQ ID NO: 34341 - RNA, 21 nt, RNAi
gaugaggcgccugguguuuuu

SEQ ID NO: 34342 - RNA, 21 nt, RNAi
uucuacuccgcggaccacaaa

SEQ ID NO: 34343 - DNA, 21 bp, Homo sapiens
gatgaggcgcctggtgtttgg

SEQ ID NO: 34344 - RNA, 21 nt, RNAi
ugaggcgccugguguuugguu

SEQ ID NO: 34345 - RNA, 21 nt, RNAi
uuacuccgcggaccacaaacc

SEQ ID NO: 34346 - DNA, 21 bp, Homo sapiens
gaggcgcctggtgtttggatg

SEQ ID NO: 34347 - RNA, 21 nt, RNAi
ggcgccugguguuuggauguu

SEQ ID NO: 34348 - RNA, 21 nt, RNAi
uuccgcggaccacaaaccuac

SEQ ID NO: 34349 - DNA, 21 bp, Homo sapiens
gatccagcggctaacttgcat

SEQ ID NO: 34350 - RNA, 21 nt, RNAi
uccagcggcuaacuugcauuu

SEQ ID NO: 34351 - RNA, 21 nt, RNAi
uuaggucgccgauugaacgua

SEQ ID NO: 34352 - DNA, 21 bp, Homo sapiens
gagttagtccaaagagtctga

SEQ ID NO: 34353 - RNA, 21 nt, RNAi
guuaguccaaagagucugauu

SEQ ID NO: 34354 - RNA, 21 nt, RNAi
uucaaucagguuucucagacu

SEQ ID NO: 34355 - DNA, 21 bp, Homo sapiens
gagtctgaaacactctcctga

SEQ ID NO: 34356 - RNA, 21 nt, RNAi
gucugaaacacucuccugauu

SEQ ID NO: 34357 - RNA, 21 nt, RNAi
uucagacuuugugagaggacu

SEQ ID NO: 34358 - DNA, 21 bp, Homo sapiens
gaaatttggcaaagaggtggc

SEQ ID NO: 34359 - RNA, 21 nt, RNAi
aauuuggcaaagagguggcuu

SEQ ID NO: 34360 - RNA, 21 nt, RNAi
uuuuaaaccguuucuccaccg

SEQ ID NO: 34361 - DNA, 21 bp, Homo sapiens
gaagcagtacaaagatgaact

SEQ ID NO: 34362 - RNA, 21 nt, RNAi
agcaguacaaagaugaacuuu

SEQ ID NO: 34363 - RNA, 21 nt, RNAi
uuucgucauguuucuacuuga

SEQ ID NO: 34364 - DNA, 21 bp, Homo sapiens
gacctttcttctgtccttgcc

SEQ ID NO: 34365 - RNA, 21 nt, RNAi
ccuuucuucuguccuugccuu

SEQ ID NO: 34366 - RNA, 21 nt, RNAi
uuggaaagaagacaggaacgg

SEQ ID NO: 34367 - DNA, 21 bp, Homo sapiens
gaactcgatgttagagcctac

SEQ ID NO: 34368 - RNA, 21 nt, RNAi
acucgauguuagagccuacuu

SEQ ID NO: 34369 - RNA, 21 nt, RNAi
uuugagcuacaaucucggaug

SEQ ID NO: 34370 - DNA, 21 bp, Homo sapiens
gatgttagagcctacgttcct

SEQ ID NO: 34371 - RNA, 21 nt, RNAi
uguuagagccuacguuccuuu

SEQ ID NO: 34372 - RNA, 21 nt, RNAi
uuacaaucucggaugcaagga

SEQ ID NO: 34373 - DNA, 21 bp, Homo sapiens
gagcctacgttcctgcactgc

SEQ ID NO: 34374 - RNA, 21 nt, RNAi
gccuacguuccugcacugcuu

SEQ ID NO: 34375 - RNA, 21 nt, RNAi
uucggaugcaaggacgugacg

SEQ ID NO: 34376 - DNA, 21 bp, Homo sapiens
gaagtaggcctgaatgctcta

SEQ ID NO: 34377 - RNA, 21 nt, RNAi
aguaggccugaaugcucuauu

SEQ ID NO: 34378 - RNA, 21 nt, RNAi
uuucauccggacuuacgagau

SEQ ID NO: 34379 - DNA, 21 bp, Homo sapiens
gaatgctctagaagaatggtc

SEQ ID NO: 34380 - RNA, 21 nt, RNAi
augcucuagaagaauggucuu

SEQ ID NO: 34381 - RNA, 21 nt, RNAi
uuuacgagaucuucuuaccag

SEQ ID NO: 34382 - DNA, 21 bp, Homo sapiens
gacagacatgtaatgcagcct

SEQ ID NO: 34383 - RNA, 21 nt, RNAi
cagacauguaaugcagccuuu

SEQ ID NO: 34384 - RNA, 21 nt, RNAi
uugucuguacauuacgucgga

SEQ ID NO: 34385 - DNA, 21 bp, Homo sapiens
gacatgtaatgcagccttatt

SEQ ID NO: 34386 - RNA, 21 nt, RNAi
cauguaaugcagccuuauuuu

SEQ ID NO: 34387 - RNA, 21 nt, RNAi
uuguacauuacgucggaauaa

SEQ ID NO: 34388 - DNA, 21 bp, Homo sapiens
gatggatacctgaagacttca

SEQ ID NO: 34389 - RNA, 21 nt, RNAi
uggauaccugaagacuucauu

SEQ ID NO: 34390 - RNA, 21 nt, RNAi
uuaccuauggacuucugaagu

SEQ ID NO: 34391 - DNA, 21 bp, Homo sapiens
gatacctgaagacttcagcct

SEQ ID NO: 34392 - RNA, 21 nt, RNAi
uaccugaagacuucagccuuu

SEQ ID NO: 34393 - RNA, 21 nt, RNAi
uuauggacuucugaagucgga

SEQ ID NO: 34394 - DNA, 21 bp, Homo sapiens
gaagacttcagccttgtcaga

SEQ ID NO: 34395 - RNA, 21 nt, RNAi
agacuucagccuugucagauu

SEQ ID NO: 34396 - RNA, 21 nt, RNAi
uuucugaagucggaacagucu

SEQ ID NO: 34397 - DNA, 21 bp, Homo sapiens
gacttcagccttgtcagatga

SEQ ID NO: 34398 - RNA, 21 nt, RNAi
cuucagccuugucagaugauu

SEQ ID NO: 34399 - RNA, 21 nt, RNAi
uugaagucggaacagucuacu

SEQ ID NO: 34400 - DNA, 21 bp, Homo sapiens
gatgagaccaagaataactgg

SEQ ID NO: 34401 - RNA, 21 nt, RNAi
ugagaccaagaauaacugguu

SEQ ID NO: 34402 - RNA, 21 nt, RNAi
uuacucugguucuuauugacc

SEQ ID NO: 34403 - DNA, 21 bp, Homo sapiens
gaagtgtcagctctttctcgg

SEQ ID NO: 34404 - RNA, 21 nt, RNAi
agugucagcucuuucucgguu

SEQ ID NO: 34405 - RNA, 21 nt, RNAi
uuucacagucgagaaagagcc

SEQ ID NO: 34406 - DNA, 21 bp, Homo sapiens
gaagaagacaaagaacctttc

SEQ ID NO: 34407 - RNA, 21 nt, RNAi
agaagacaaagaaccuuucuu

SEQ ID NO: 34408 - RNA, 21 nt, RNAi
uuucuucuguuucuuggaaag

SEQ ID NO: 34409 - DNA, 21 bp, Homo sapiens
gaagacaaagaacctttcatc

SEQ ID NO: 34410 - RNA, 21 nt, RNAi
agacaaagaaccuuucaucuu

SEQ ID NO: 34411 - RNA, 21 nt, RNAi
uuucuguuucuuggaaaguag

SEQ ID NO: 34412 - DNA, 21 bp, Homo sapiens
gacaaagaacctttcatcaaa

SEQ ID NO: 34413 - RNA, 21 nt, RNAi
caaagaaccuuucaucaaauu

SEQ ID NO: 34414 - RNA, 21 nt, RNAi
uuguuucuuggaaaguaguuu

SEQ ID NO: 34415 - DNA, 21 bp, Homo sapiens
gaacctttcatcaaacgaagc

SEQ ID NO: 34416 - RNA, 21 nt, RNAi
accuuucaucaaacgaagcuu

SEQ ID NO: 34417 - RNA, 21 nt, RNAi
uuuggaaaguaguuugcuucg

SEQ ID NO: 34418 - DNA, 21 bp, Homo sapiens
gaagcaatatccttagaagaa

SEQ ID NO: 34419 - RNA, 21 nt, RNAi
agcaauauccuuagaagaauu

SEQ ID NO: 34420 - RNA, 21 nt, RNAi
uuucguuauaggaaucuucuu

SEQ ID NO: 34421 - DNA, 21 bp, Homo sapiens
gaattagagtagtacaaatgc

SEQ ID NO: 34422 - RNA, 21 nt, RNAi
auuagaguaguacaaaugcuu

SEQ ID NO: 34423 - RNA, 21 nt, RNAi
uuuaaucucaucauguuuacg

SEQ ID NO: 34424 - DNA, 21 bp, Homo sapiens
gagtagtacaaatgcttggat

SEQ ID NO: 34425 - RNA, 21 nt, RNAi
guaguacaaaugcuuggauuu

SEQ ID NO: 34426 - RNA, 21 nt, RNAi
uucaucauguuuacgaaccua

SEQ ID NO: 34427 - DNA, 21 bp, Homo sapiens
gatctctaggaggacaaataa

SEQ ID NO: 34428 - RNA, 21 nt, RNAi
ucucuaggaggacaaauaauu

SEQ ID NO: 34429 - RNA, 21 nt, RNAi
uuagagauccuccuguuuauu

SEQ ID NO: 34430 - DNA, 21 bp, Homo sapiens
gacagtcacgtcctcagatga

SEQ ID NO: 34431 - RNA, 21 nt, RNAi
cagucacguccucagaugauu

SEQ ID NO: 34432 - RNA, 21 nt, RNAi
uugucagugcaggagucuacu

SEQ ID NO: 34433 - DNA, 21 bp, Homo sapiens
gatgagatgatgaagagctat

SEQ ID NO: 34434 - RNA, 21 nt, RNAi
ugagaugaugaagagcuauuu

SEQ ID NO: 34435 - RNA, 21 nt, RNAi
uuacucuacuacuucucgaua

SEQ ID NO: 34436 - DNA, 21 bp, Homo sapiens
gagatgatgaagagctatgtg

SEQ ID NO: 34437 - RNA, 21 nt, RNAi
gaugaugaagagcuauguguu

SEQ ID NO: 34438 - RNA, 21 nt, RNAi
uucuacuacuucucgauacac

SEQ ID NO: 34439 - DNA, 21 bp, Homo sapiens
gatgatgaagagctatgtggc

SEQ ID NO: 34440 - RNA, 21 nt, RNAi
ugaugaagagcuauguggcuu

SEQ ID NO: 34441 - RNA, 21 nt, RNAi
uuacuacuucucgauacaccg

SEQ ID NO: 34442 - DNA, 21 bp, Homo sapiens
gatgaagagctatgtggcctg

SEQ ID NO: 34443 - RNA, 21 nt, RNAi
ugaagagcuauguggccuguu

SEQ ID NO: 34444 - RNA, 21 nt, RNAi
uuacuucucgauacaccggac

SEQ ID NO: 34445 - DNA, 21 bp, Homo sapiens
gacagagagaagcggctgagc

SEQ ID NO: 34446 - RNA, 21 nt, RNAi
cagagagaagcggcugagcuu

SEQ ID NO: 34447 - RNA, 21 nt, RNAi
uugucucucuucgccgacucg

SEQ ID NO: 34448 - DNA, 21 bp, Homo sapiens
gagagaagcggctgagctttg

SEQ ID NO: 34449 - RNA, 21 nt, RNAi
gagaagcggcugagcuuuguu

SEQ ID NO: 34450 - RNA, 21 nt, RNAi
uucucuucgccgacucgaaac

SEQ ID NO: 34451 - DNA, 21 bp, Homo sapiens
gagaagcggctgagctttgca

SEQ ID NO: 34452 - RNA, 21 nt, RNAi
gaagcggcugagcuuugcauu

SEQ ID NO: 34453 - RNA, 21 nt, RNAi
uucuucgccgacucgaaacgu

SEQ ID NO: 34454 - DNA, 21 bp, Homo sapiens
gaagcggctgagctttgcagt

SEQ ID NO: 34455 - RNA, 21 nt, RNAi
agcggcugagcuuugcaguuu

SEQ ID NO: 34456 - RNA, 21 nt, RNAi
uuucgccgacucgaaacguca

SEQ ID NO: 34457 - DNA, 21 bp, Homo sapiens
gagagatgaaacctgtcattt

SEQ ID NO: 34458 - RNA, 21 nt, RNAi
gagaugaaaccugucauuuuu

SEQ ID NO: 34459 - RNA, 21 nt, RNAi
uucucuacuuuggacaguaaa

SEQ ID NO: 34460 - DNA, 21 bp, Homo sapiens
gatgtgttcctgcctcgagtc

SEQ ID NO: 34461 - RNA, 21 nt, RNAi
uguguuccugccucgagucuu

SEQ ID NO: 34462 - RNA, 21 nt, RNAi
uuacacaaggacggagcucag

SEQ ID NO: 34463 - DNA, 21 bp, Homo sapiens
gagtcacagaattagcgctca

SEQ ID NO: 34464 - RNA, 21 nt, RNAi
gucacagaauuagcgcucauu

SEQ ID NO: 34465 - RNA, 21 nt, RNAi
uucagugucuuaaucgcgagu

SEQ ID NO: 34466 - DNA, 21 bp, Homo sapiens
gaattagcgctcacagccagt

SEQ ID NO: 34467 - RNA, 21 nt, RNAi
auuagcgcucacagccaguuu

SEQ ID NO: 34468 - RNA, 21 nt, RNAi
uuuaaucgcgagugucgguca

SEQ ID NO: 34469 - DNA, 21 bp, Homo sapiens
gacagacaaactaaagttgca

SEQ ID NO: 34470 - RNA, 21 nt, RNAi
cagacaaacuaaaguugcauu

SEQ ID NO: 34471 - RNA, 21 nt, RNAi
uugucuguuugauuucaacgu

SEQ ID NO: 34472 - DNA, 21 bp, Homo sapiens
gacaaactaaagttgcagcct

SEQ ID NO: 34473 - RNA, 21 nt, RNAi
caaacuaaaguugcagccuuu

SEQ ID NO: 34474 - RNA, 21 nt, RNAi
uuguuugauuucaacgucgga

SEQ ID NO: 34475 - DNA, 21 bp, Homo sapiens
gacgtttcctgtgctgcttcg

SEQ ID NO: 34476 - RNA, 21 nt, RNAi
cguuuccugugcugcuucguu

SEQ ID NO: 34477 - RNA, 21 nt, RNAi
uugcaaaggacacgacgaagc

SEQ ID NO: 34478 - DNA, 21 bp, Homo sapiens
gacttgcgtgtgatgttgatc

SEQ ID NO: 34479 - RNA, 21 nt, RNAi
cuugcgugugauguugaucuu

SEQ ID NO: 34480 - RNA, 21 nt, RNAi
uugaacgcacacuacaacuag

SEQ ID NO: 34481 - DNA, 21 bp, Homo sapiens
gatgttgatcaggtgacaagg

SEQ ID NO: 34482 - RNA, 21 nt, RNAi
uguugaucaggugacaagguu

SEQ ID NO: 34483 - RNA, 21 nt, RNAi
uuacaacuaguccacuguucc

SEQ ID NO: 34484 - DNA, 21 bp, Homo sapiens
gatcaggtgacaaggcaactg

SEQ ID NO: 34485 - RNA, 21 nt, RNAi
ucaggugacaaggcaacuguu

SEQ ID NO: 34486 - RNA, 21 nt, RNAi
uuaguccacuguuccguugac

SEQ ID NO: 34487 - DNA, 21 bp, Homo sapiens
gacaaggcaactgtatgagcc

SEQ ID NO: 34488 - RNA, 21 nt, RNAi
caaggcaacuguaugagccuu

SEQ ID NO: 34489 - RNA, 21 nt, RNAi
uuguuccguugacauacucgg

SEQ ID NO: 34490 - DNA, 21 bp, Homo sapiens
gagccactagttatgcagctg

SEQ ID NO: 34491 - RNA, 21 nt, RNAi
gccacuaguuaugcagcuguu

SEQ ID NO: 34492 - RNA, 21 nt, RNAi
uucggugaucaauacgucgac

SEQ ID NO: 34493 - DNA, 21 bp, Homo sapiens
gattcactggttcactaacaa

SEQ ID NO: 34494 - RNA, 21 nt, RNAi
uucacugguucacuaacaauu

SEQ ID NO: 34495 - RNA, 21 nt, RNAi
uuaagugaccaagugauuguu

SEQ ID NO: 34496 - DNA, 21 bp, Homo sapiens
gaaatttgaaagtcaggatac

SEQ ID NO: 34497 - RNA, 21 nt, RNAi
aauuugaaagucaggauacuu

SEQ ID NO: 34498 - RNA, 21 nt, RNAi
uuuuaaacuuucaguccuaug

SEQ ID NO: 34499 - DNA, 21 bp, Homo sapiens
gaaagtcaggatactgttgcc

SEQ ID NO: 34500 - RNA, 21 nt, RNAi
aagucaggauacuguugccuu

SEQ ID NO: 34501 - RNA, 21 nt, RNAi
uuuucaguccuaugacaacgg

SEQ ID NO: 34502 - DNA, 21 bp, Homo sapiens
gatactgttgccttactagaa

SEQ ID NO: 34503 - RNA, 21 nt, RNAi
uacuguugccuuacuagaauu

SEQ ID NO: 34504 - RNA, 21 nt, RNAi
uuaugacaacggaaugaucuu

SEQ ID NO: 34505 - DNA, 21 bp, Homo sapiens
gaagctatattggatggaatt

SEQ ID NO: 34506 - RNA, 21 nt, RNAi
agcuauauuggauggaauuuu

SEQ ID NO: 34507 - RNA, 21 nt, RNAi
uuucgauauaaccuaccuuaa

SEQ ID NO: 34508 - DNA, 21 bp, Homo sapiens
gagaattccttaaatggtcca

SEQ ID NO: 34509 - RNA, 21 nt, RNAi
gaauuccuuaaaugguccauu

SEQ ID NO: 34510 - RNA, 21 nt, RNAi
uucuuaaggaauuuaccaggu

SEQ ID NO: 34511 - DNA, 21 bp, Homo sapiens
gaattccttaaatggtccatt

SEQ ID NO: 34512 - RNA, 21 nt, RNAi
auuccuuaaaugguccauuuu

SEQ ID NO: 34513 - RNA, 21 nt, RNAi
uuuaaggaauuuaccagguaa

SEQ ID NO: 34514 - DNA, 21 bp, Homo sapiens
gagaagagtccagtaaacacc

SEQ ID NO: 34515 - RNA, 21 nt, RNAi
gaagaguccaguaaacaccuu

SEQ ID NO: 34516 - RNA, 21 nt, RNAi
uucuucucaggucauuugugg

SEQ ID NO: 34517 - DNA, 21 bp, Homo sapiens
gaagagtccagtaaacaccaa

SEQ ID NO: 34518 - RNA, 21 nt, RNAi
agaguccaguaaacaccaauu

SEQ ID NO: 34519 - RNA, 21 nt, RNAi
uuucucaggucauuugugguu

SEQ ID NO: 34520 - DNA, 21 bp, Homo sapiens
gagtccagtaaacaccaaatc

SEQ ID NO: 34521 - RNA, 21 nt, RNAi
guccaguaaacaccaaaucuu

SEQ ID NO: 34522 - RNA, 21 nt, RNAi
uucaggucauuugugguuuag

SEQ ID NO: 34523 - DNA, 21 bp, Homo sapiens
gactttatagccttgcgcttc

SEQ ID NO: 34524 - RNA, 21 nt, RNAi
cuuuauagccuugcgcuucuu

SEQ ID NO: 34525 - RNA, 21 nt, RNAi
uugaaauaucggaacgcgaag

SEQ ID NO: 34526 - DNA, 21 bp, Homo sapiens
gagcatcacttgcctttaata

SEQ ID NO: 34527 - RNA, 21 nt, RNAi
gcaucacuugccuuuaauauu

SEQ ID NO: 34528 - RNA, 21 nt, RNAi
uucguagugaacggaaauuau

SEQ ID NO: 34529 - DNA, 21 bp, Homo sapiens
gaagaagagtctctggtggaa

SEQ ID NO: 34530 - RNA, 21 nt, RNAi
agaagagucucugguggaauu

SEQ ID NO: 34531 - RNA, 21 nt, RNAi
uuucuucucagagaccaccuu

SEQ ID NO: 34532 - DNA, 21 bp, Homo sapiens
gaagagtctctggtggaacag

SEQ ID NO: 34533 - RNA, 21 nt, RNAi
agagucucugguggaacaguu

SEQ ID NO: 34534 - RNA, 21 nt, RNAi
uuucucagagaccaccuuguc

SEQ ID NO: 34535 - DNA, 21 bp, Homo sapiens
gagtctctggtggaacagttt

SEQ ID NO: 34536 - RNA, 21 nt, RNAi
gucucugguggaacaguuuuu

SEQ ID NO: 34537 - RNA, 21 nt, RNAi
uucagagaccaccuugucaaa

SEQ ID NO: 34538 - DNA, 21 bp, Homo sapiens
gaacagtttgtgtttgaagcc

SEQ ID NO: 34539 - RNA, 21 nt, RNAi
acaguuuguguuugaagccuu

SEQ ID NO: 34540 - RNA, 21 nt, RNAi
uuugucaaacacaaacuucgg

SEQ ID NO: 34541 - DNA, 21 bp, Homo sapiens
gaagccttggtgatatacatg

SEQ ID NO: 34542 - RNA, 21 nt, RNAi
agccuuggugauauacauguu

SEQ ID NO: 34543 - RNA, 21 nt, RNAi
uuucggaaccacuauauguac

SEQ ID NO: 34544 - DNA, 21 bp, Homo sapiens
gatatacatggagagtctggc

SEQ ID NO: 34545 - RNA, 21 nt, RNAi
uauacauggagagucuggcuu

SEQ ID NO: 34546 - RNA, 21 nt, RNAi
uuauauguaccucucagaccg

SEQ ID NO: 34547 - DNA, 21 bp, Homo sapiens
gagagtctggccttagcacat

SEQ ID NO: 34548 - RNA, 21 nt, RNAi
gagucuggccuuagcacauuu

SEQ ID NO: 34549 - RNA, 21 nt, RNAi
uucucagaccggaaucgugua

SEQ ID NO: 34550 - DNA, 21 bp, Homo sapiens
gagtctggccttagcacatgc

SEQ ID NO: 34551 - RNA, 21 nt, RNAi
gucuggccuuagcacaugcuu

SEQ ID NO: 34552 - RNA, 21 nt, RNAi
uucagaccggaaucguguacg

SEQ ID NO: 34553 - DNA, 21 bp, Homo sapiens
gatgagaagtccttaggtaca

SEQ ID NO: 34554 - RNA, 21 nt, RNAi
ugagaaguccuuagguacauu

SEQ ID NO: 34555 - RNA, 21 nt, RNAi
uuacucuucaggaauccaugu

SEQ ID NO: 34556 - DNA, 21 bp, Homo sapiens
gagaagtccttaggtacaatt

SEQ ID NO: 34557 - RNA, 21 nt, RNAi
gaaguccuuagguacaauuuu

SEQ ID NO: 34558 - RNA, 21 nt, RNAi
uucuucaggaauccauguuaa

SEQ ID NO: 34559 - DNA, 21 bp, Homo sapiens
gaagtccttaggtacaattca

SEQ ID NO: 34560 - RNA, 21 nt, RNAi
aguccuuagguacaauucauu

SEQ ID NO: 34561 - RNA, 21 nt, RNAi
uuucaggaauccauguuaagu

SEQ ID NO: 34562 - DNA, 21 bp, Homo sapiens
gatgccattgatcacctatgc

SEQ ID NO: 34563 - RNA, 21 nt, RNAi
ugccauugaucaccuaugcuu

SEQ ID NO: 34564 - RNA, 21 nt, RNAi
uuacgguaacuaguggauacg

SEQ ID NO: 34565 - DNA, 21 bp, Homo sapiens
gatcacctatgccgcatcatt

SEQ ID NO: 34566 - RNA, 21 nt, RNAi
ucaccuaugccgcaucauuuu

SEQ ID NO: 34567 - RNA, 21 nt, RNAi
uuaguggauacggcguaguaa

SEQ ID NO: 34568 - DNA, 21 bp, Homo sapiens
gaaacgacgtttgccgcgagg

SEQ ID NO: 34569 - RNA, 21 nt, RNAi
aacgacguuugccgcgagguu

SEQ ID NO: 34570 - RNA, 21 nt, RNAi
uuuugcugcaaacggcgcucc

SEQ ID NO: 34571 - DNA, 21 bp, Homo sapiens
gacgtttgccgcgaggatttc

SEQ ID NO: 34572 - RNA, 21 nt, RNAi
cguuugccgcgaggauuucuu

SEQ ID NO: 34573 - RNA, 21 nt, RNAi
uugcaaacggcgcuccuaaag

SEQ ID NO: 34574 - DNA, 21 bp, Homo sapiens
gaggatttccaccttccgcat

SEQ ID NO: 34575 - RNA, 21 nt, RNAi
ggauuuccaccuuccgcauuu

SEQ ID NO: 34576 - RNA, 21 nt, RNAi
uuccuaaagguggaaggcgua

SEQ ID NO: 34577 - DNA, 21 bp, Homo sapiens
gatttccaccttccgcatcat

SEQ ID NO: 34578 - RNA, 21 nt, RNAi
uuuccaccuuccgcaucauuu

SEQ ID NO: 34579 - RNA, 21 nt, RNAi
uuaaagguggaaggcguagua

SEQ ID NO: 34580 - DNA, 21 bp, Homo sapiens
gacagaatgtcgacacaaatc

SEQ ID NO: 34581 - RNA, 21 nt, RNAi
cagaaugucgacacaaaucuu

SEQ ID NO: 34582 - RNA, 21 nt, RNAi
uugucuuacagcuguguuuag

SEQ ID NO: 34583 - DNA, 21 bp, Homo sapiens
gaatgtcgacacaaatccatt

SEQ ID NO: 34584 - RNA, 21 nt, RNAi
augucgacacaaauccauuuu

SEQ ID NO: 34585 - RNA, 21 nt, RNAi
uuuacagcuguguuuagguaa

SEQ ID NO: 34586 - DNA, 21 bp, Homo sapiens
gacacaaatccattgaactct

SEQ ID NO: 34587 - RNA, 21 nt, RNAi
cacaaauccauugaacucuuu

SEQ ID NO: 34588 - RNA, 21 nt, RNAi
uuguguuuagguaacuugaga

SEQ ID NO: 34589 - DNA, 21 bp, Homo sapiens
gaaagatgttctcaaggaaga

SEQ ID NO: 34590 - RNA, 21 nt, RNAi
aagauguucucaaggaagauu

SEQ ID NO: 34591 - RNA, 21 nt, RNAi
uuuucuacaagaguuccuucu

SEQ ID NO: 34592 - DNA, 21 bp, Homo sapiens
gatgttctcaaggaagaaggt

SEQ ID NO: 34593 - RNA, 21 nt, RNAi
uguucucaaggaagaagguuu

SEQ ID NO: 34594 - RNA, 21 nt, RNAi
uuacaagaguuccuucuucca

SEQ ID NO: 34595 - DNA, 21 bp, Homo sapiens
gagtgctacaacacgttcatt

SEQ ID NO: 34596 - RNA, 21 nt, RNAi
gugcuacaacacguucauuuu

SEQ ID NO: 34597 - RNA, 21 nt, RNAi
uucacgauguugugcaaguaa

SEQ ID NO: 34598 - DNA, 21 bp, Homo sapiens
gagagaactgtaggagcgctc

SEQ ID NO: 34599 - RNA, 21 nt, RNAi
gagaacuguaggagcgcucuu

SEQ ID NO: 34600 - RNA, 21 nt, RNAi
uucucuugacauccucgcgag

SEQ ID NO: 34601 - DNA, 21 bp, Homo sapiens
gagaactgtaggagcgctcca

SEQ ID NO: 34602 - RNA, 21 nt, RNAi
gaacuguaggagcgcuccauu

SEQ ID NO: 34603 - RNA, 21 nt, RNAi
uucuugacauccucgcgaggu

SEQ ID NO: 34604 - DNA, 21 bp, Homo sapiens
gaactgtaggagcgctccagg

SEQ ID NO: 34605 - RNA, 21 nt, RNAi
acuguaggagcgcuccagguu

SEQ ID NO: 34606 - RNA, 21 nt, RNAi
uuugacauccucgcgaggucc

SEQ ID NO: 34607 - DNA, 21 bp, Homo sapiens
gagcgctccaggtcctaggta

SEQ ID NO: 34608 - RNA, 21 nt, RNAi
gcgcuccagguccuagguauu

SEQ ID NO: 34609 - RNA, 21 nt, RNAi
uucgcgagguccaggauccau

SEQ ID NO: 34610 - DNA, 21 bp, Homo sapiens
gaaagcagtggctttcttctt

SEQ ID NO: 34611 - RNA, 21 nt, RNAi
aagcaguggcuuucuucuuuu

SEQ ID NO: 34612 - RNA, 21 nt, RNAi
uuuucgucaccgaaagaagaa

SEQ ID NO: 34613 - DNA, 21 bp, Homo sapiens
gaaagcattgccatgcatgac

SEQ ID NO: 34614 - RNA, 21 nt, RNAi
aagcauugccaugcaugacuu

SEQ ID NO: 34615 - RNA, 21 nt, RNAi
uuuucguaacgguacguacug

SEQ ID NO: 34616 - DNA, 21 bp, Homo sapiens
gagaaaggtacaactacagca

SEQ ID NO: 34617 - RNA, 21 nt, RNAi
gaaagguacaacuacagcauu

SEQ ID NO: 34618 - RNA, 21 nt, RNAi
uucuuuccauguugaugucgu

SEQ ID NO: 34619 - DNA, 21 bp, Homo sapiens
gaaaggtacaactacagcaaa

SEQ ID NO: 34620 - RNA, 21 nt, RNAi
aagguacaacuacagcaaauu

SEQ ID NO: 34621 - RNA, 21 nt, RNAi
uuuuccauguugaugucguuu

SEQ ID NO: 34622 - DNA, 21 bp, Homo sapiens
gattatggagtttaccacgac

SEQ ID NO: 34623 - RNA, 21 nt, RNAi
uuauggaguuuaccacgacuu

SEQ ID NO: 34624 - RNA, 21 nt, RNAi
uuaauaccucaaauggugcug

SEQ ID NO: 34625 - DNA, 21 bp, Homo sapiens
gagtttaccacgactctgcta

SEQ ID NO: 34626 - RNA, 21 nt, RNAi
guuuaccacgacucugcuauu

SEQ ID NO: 34627 - RNA, 21 nt, RNAi
uucaaauggugcugagacgau

SEQ ID NO: 34628 - DNA, 21 bp, Homo sapiens
gaaggatggaagctcctgaag

SEQ ID NO: 34629 - RNA, 21 nt, RNAi
aggauggaagcuccugaaguu

SEQ ID NO: 34630 - RNA, 21 nt, RNAi
uuuccuaccuucgaggacuuc

SEQ ID NO: 34631 - DNA, 21 bp, Homo sapiens
gatggaagctcctgaagaagg

SEQ ID NO: 34632 - RNA, 21 nt, RNAi
uggaagcuccugaagaagguu

SEQ ID NO: 34633 - RNA, 21 nt, RNAi
uuaccuucgaggacuucuucc

SEQ ID NO: 34634 - DNA, 21 bp, Homo sapiens
gaagctcctgaagaaggactt

SEQ ID NO: 34635 - RNA, 21 nt, RNAi
agcuccugaagaaggacuuuu

SEQ ID NO: 34636 - RNA, 21 nt, RNAi
uuucgaggacuucuuccugaa

SEQ ID NO: 34637 - DNA, 21 bp, Homo sapiens
gaagaaggacttgtgtaatac

SEQ ID NO: 34638 - RNA, 21 nt, RNAi
agaaggacuuguguaauacuu

SEQ ID NO: 34639 - RNA, 21 nt, RNAi
uuucuuccugaacacauuaug

SEQ ID NO: 34640 - DNA, 21 bp, Homo sapiens
gaaggacttgtgtaatacaca

SEQ ID NO: 34641 - RNA, 21 nt, RNAi
aggacuuguguaauacacauu

SEQ ID NO: 34642 - RNA, 21 nt, RNAi
uuuccugaacacauuaugugu

SEQ ID NO: 34643 - DNA, 21 bp, Homo sapiens
gacttgtgtaatacacacctg

SEQ ID NO: 34644 - RNA, 21 nt, RNAi
cuuguguaauacacaccuguu

SEQ ID NO: 34645 - RNA, 21 nt, RNAi
uugaacacauuauguguggac

SEQ ID NO: 34646 - DNA, 21 bp, Homo sapiens
gatgagagtcctggtgcagac

SEQ ID NO: 34647 - RNA, 21 nt, RNAi
ugagaguccuggugcagacuu

SEQ ID NO: 34648 - RNA, 21 nt, RNAi
uuacucucaggaccacgucug

SEQ ID NO: 34649 - DNA, 21 bp, Homo sapiens
gagagtcctggtgcagacgct

SEQ ID NO: 34650 - RNA, 21 nt, RNAi
gaguccuggugcagacgcuuu

SEQ ID NO: 34651 - RNA, 21 nt, RNAi
uucucaggaccacgucugcga

SEQ ID NO: 34652 - DNA, 21 bp, Homo sapiens
gagtcctggtgcagacgctgt

SEQ ID NO: 34653 - RNA, 21 nt, RNAi
guccuggugcagacgcuguuu

SEQ ID NO: 34654 - RNA, 21 nt, RNAi
uucaggaccacgucugcgaca

SEQ ID NO: 34655 - DNA, 21 bp, Homo sapiens
gagacgtccaggttatggctc

SEQ ID NO: 34656 - RNA, 21 nt, RNAi
gacguccagguuauggcucuu

SEQ ID NO: 34657 - RNA, 21 nt, RNAi
uucugcagguccaauaccgag

SEQ ID NO: 34658 - DNA, 21 bp, Homo sapiens
gacgtccaggttatggctcat

SEQ ID NO: 34659 - RNA, 21 nt, RNAi
cguccagguuauggcucauuu

SEQ ID NO: 34660 - RNA, 21 nt, RNAi
uugcagguccaauaccgagua

SEQ ID NO: 34661 - DNA, 21 bp, Homo sapiens
gatgtttgtgtgaatctgatg

SEQ ID NO: 34662 - RNA, 21 nt, RNAi
uguuugugugaaucugauguu

SEQ ID NO: 34663 - RNA, 21 nt, RNAi
uuacaaacacacuuagacuac

SEQ ID NO: 34664 - DNA, 21 bp, Homo sapiens
gaatctgatgaaagctctaaa

SEQ ID NO: 34665 - RNA, 21 nt, RNAi
aucugaugaaagcucuaaauu

SEQ ID NO: 34666 - RNA, 21 nt, RNAi
uuuagacuacuuucgagauuu

SEQ ID NO: 34667 - DNA, 21 bp, Homo sapiens
gatgaaagctctaaagatgtc

SEQ ID NO: 34668 - RNA, 21 nt, RNAi
ugaaagcucuaaagaugucuu

SEQ ID NO: 34669 - RNA, 21 nt, RNAi
uuacuuucgagauuucuacag

SEQ ID NO: 34670 - DNA, 21 bp, Homo sapiens
gagcattgaggagctttgtgc

SEQ ID NO: 34671 - RNA, 21 nt, RNAi
gcauugaggagcuuugugcuu

SEQ ID NO: 34672 - RNA, 21 nt, RNAi
uucguaacuccucgaaacacg

SEQ ID NO: 34673 - DNA, 21 bp, Homo sapiens
gaggagctttgtgccgtcaac

SEQ ID NO: 34674 - RNA, 21 nt, RNAi
ggagcuuugugccgucaacuu

SEQ ID NO: 34675 - RNA, 21 nt, RNAi
uuccucgaaacacggcaguug

SEQ ID NO: 34676 - DNA, 21 bp, Homo sapiens
gagctttgtgccgtcaacttg

SEQ ID NO: 34677 - RNA, 21 nt, RNAi
gcuuugugccgucaacuuguu

SEQ ID NO: 34678 - RNA, 21 nt, RNAi
uucgaaacacggcaguugaac

SEQ ID NO: 34679 - DNA, 21 bp, Homo sapiens
gagcaggctggctgctgttgt

SEQ ID NO: 34680 - RNA, 21 nt, RNAi
gcaggcuggcugcuguuguuu

SEQ ID NO: 34681 - RNA, 21 nt, RNAi
uucguccgaccgacgacaaca

SEQ ID NO: 34682 - DNA, 21 bp, Homo sapiens
gatttgcatcattctgttggc

SEQ ID NO: 34683 - RNA, 21 nt, RNAi
uuugcaucauucuguuggcuu

SEQ ID NO: 34684 - RNA, 21 nt, RNAi
uuaaacguaguaagacaaccg

SEQ ID NO: 34685 - DNA, 21 bp, Homo sapiens
gagatgagagacagtgtctgc

SEQ ID NO: 34686 - RNA, 21 nt, RNAi
gaugagagacagugucugcuu

SEQ ID NO: 34687 - RNA, 21 nt, RNAi
uucuacucucugucacagacg

SEQ ID NO: 34688 - DNA, 21 bp, Homo sapiens
gatgagagacagtgtctgcct

SEQ ID NO: 34689 - RNA, 21 nt, RNAi
ugagagacagugucugccuuu

SEQ ID NO: 34690 - RNA, 21 nt, RNAi
uuacucucugucacagacgga

SEQ ID NO: 34691 - DNA, 21 bp, Homo sapiens
gagagacagtgtctgccttct

SEQ ID NO: 34692 - RNA, 21 nt, RNAi
gagacagugucugccuucuuu

SEQ ID NO: 34693 - RNA, 21 nt, RNAi
uucucugucacagacggaaga

SEQ ID NO: 34694 - DNA, 21 bp, Homo sapiens
gagacagtgtctgccttctct

SEQ ID NO: 34695 - RNA, 21 nt, RNAi
gacagugucugccuucucuuu

SEQ ID NO: 34696 - RNA, 21 nt, RNAi
uucugucacagacggaagaga

SEQ ID NO: 34697 - DNA, 21 bp, Homo sapiens
gacagtgtctgccttctctag

SEQ ID NO: 34698 - RNA, 21 nt, RNAi
cagugucugccuucucuaguu

SEQ ID NO: 34699 - RNA, 21 nt, RNAi
uugucacagacggaagagauc

SEQ ID NO: 34700 - DNA, 21 bp, Homo sapiens
gacctcagttgtaagcagctg

SEQ ID NO: 34701 - RNA, 21 nt, RNAi
ccucaguuguaagcagcuguu

SEQ ID NO: 34702 - RNA, 21 nt, RNAi
uuggagucaacauucgucgac

SEQ ID NO: 34703 - DNA, 21 bp, Homo sapiens
gacttctggagttagcctttg

SEQ ID NO: 34704 - RNA, 21 nt, RNAi
cuucuggaguuagccuuuguu

SEQ ID NO: 34705 - RNA, 21 nt, RNAi
uugaagaccucaaucggaaac

SEQ ID NO: 34706 - DNA, 21 bp, Homo sapiens
gaggactgtgtgagcgccttg

SEQ ID NO: 34707 - RNA, 21 nt, RNAi
ggacugugugagcgccuuguu

SEQ ID NO: 34708 - RNA, 21 nt, RNAi
uuccugacacacucgcggaac

SEQ ID NO: 34709 - DNA, 21 bp, Homo sapiens
gactgtgtgagcgccttgtga

SEQ ID NO: 34710 - RNA, 21 nt, RNAi
cugugugagcgccuugugauu

SEQ ID NO: 34711 - RNA, 21 nt, RNAi
uugacacacucgcggaacacu

SEQ ID NO: 34712 - DNA, 21 bp, Homo sapiens
gagcgccttgtgagtcttctc

SEQ ID NO: 34713 - RNA, 21 nt, RNAi
gcgccuugugagucuucucuu

SEQ ID NO: 34714 - RNA, 21 nt, RNAi
uucgcggaacacucagaagag

SEQ ID NO: 34715 - DNA, 21 bp, Homo sapiens
gagtatttctatagcttgttc

SEQ ID NO: 34716 - RNA, 21 nt, RNAi
guauuucuauagcuuguucuu

SEQ ID NO: 34717 - RNA, 21 nt, RNAi
uucauaaagauaucgaacaag

SEQ ID NO: 34718 - DNA, 21 bp, Homo sapiens
gaaacgatcaacacggaatta

SEQ ID NO: 34719 - RNA, 21 nt, RNAi
aacgaucaacacggaauuauu

SEQ ID NO: 34720 - RNA, 21 nt, RNAi
uuuugcuaguugugccuuaau

SEQ ID NO: 34721 - DNA, 21 bp, Homo sapiens
gatcaacacggaattattgaa

SEQ ID NO: 34722 - RNA, 21 nt, RNAi
ucaacacggaauuauugaauu

SEQ ID NO: 34723 - RNA, 21 nt, RNAi
uuaguugugccuuaauaacuu

SEQ ID NO: 34724 - DNA, 21 bp, Homo sapiens
gatcttgctgtattggagctc

SEQ ID NO: 34725 - RNA, 21 nt, RNAi
ucuugcuguauuggagcucuu

SEQ ID NO: 34726 - RNA, 21 nt, RNAi
uuagaacgacauaaccucgag

SEQ ID NO: 34727 - DNA, 21 bp, Homo sapiens
gagctcatgcagtcttcagtg

SEQ ID NO: 34728 - RNA, 21 nt, RNAi
gcucaugcagucuucaguguu

SEQ ID NO: 34729 - RNA, 21 nt, RNAi
uucgaguacgucagaagucac

SEQ ID NO: 34730 - DNA, 21 bp, Homo sapiens
gaacggcatgttagaccagag

SEQ ID NO: 34731 - RNA, 21 nt, RNAi
acggcauguuagaccagaguu

SEQ ID NO: 34732 - RNA, 21 nt, RNAi
uuugccguacaaucuggucuc

SEQ ID NO: 34733 - DNA, 21 bp, Homo sapiens
gagcgagcaaaccagaaacac

SEQ ID NO: 34734 - RNA, 21 nt, RNAi
gcgagcaaaccagaaacacuu

SEQ ID NO: 34735 - RNA, 21 nt, RNAi
uucgcucguuuggucuuugug

SEQ ID NO: 34736 - DNA, 21 bp, Homo sapiens
gagcaaaccagaaacaccaag

SEQ ID NO: 34737 - RNA, 21 nt, RNAi
gcaaaccagaaacaccaaguu

SEQ ID NO: 34738 - RNA, 21 nt, RNAi
uucguuuggucuuugugguuc

SEQ ID NO: 34739 - DNA, 21 bp, Homo sapiens
gaaacaccaaggactgaaact

SEQ ID NO: 34740 - RNA, 21 nt, RNAi
aacaccaaggacugaaacuuu

SEQ ID NO: 34741 - RNA, 21 nt, RNAi
uuuugugguuccugacuuuga

SEQ ID NO: 34742 - DNA, 21 bp, Homo sapiens
gactgaaacttgcgactacaa

SEQ ID NO: 34743 - RNA, 21 nt, RNAi
cugaaacuugcgacuacaauu

SEQ ID NO: 34744 - RNA, 21 nt, RNAi
uugacuuugaacgcugauguu

SEQ ID NO: 34745 - DNA, 21 bp, Homo sapiens
gaaacttgcgactacaattct

SEQ ID NO: 34746 - RNA, 21 nt, RNAi
aacuugcgacuacaauucuuu

SEQ ID NO: 34747 - RNA, 21 nt, RNAi
uuuugaacgcugauguuaaga

SEQ ID NO: 34748 - DNA, 21 bp, Homo sapiens
gactacaattctgcaacactg

SEQ ID NO: 34749 - RNA, 21 nt, RNAi
cuacaauucugcaacacuguu

SEQ ID NO: 34750 - RNA, 21 nt, RNAi
uugauguuaagacguugugac

SEQ ID NO: 34751 - DNA, 21 bp, Homo sapiens
gaagaagtgtgattcatggtg

SEQ ID NO: 34752 - RNA, 21 nt, RNAi
agaagugugauucaugguguu

SEQ ID NO: 34753 - RNA, 21 nt, RNAi
uuucuucacacuaaguaccac

SEQ ID NO: 34754 - DNA, 21 bp, Homo sapiens
gacacaaagctggatctacat

SEQ ID NO: 34755 - RNA, 21 nt, RNAi
cacaaagcuggaucuacauuu

SEQ ID NO: 34756 - RNA, 21 nt, RNAi
uuguguuucgaccuagaugua

SEQ ID NO: 34757 - DNA, 21 bp, Homo sapiens
gaggcagtctggaggaactta

SEQ ID NO: 34758 - RNA, 21 nt, RNAi
ggcagucuggaggaacuuauu

SEQ ID NO: 34759 - RNA, 21 nt, RNAi
uuccgucagaccuccuugaau

SEQ ID NO: 34760 - DNA, 21 bp, Homo sapiens
gaggaacttagacgtgttctg

SEQ ID NO: 34761 - RNA, 21 nt, RNAi
ggaacuuagacguguucuguu

SEQ ID NO: 34762 - RNA, 21 nt, RNAi
uuccuugaaucugcacaagac

SEQ ID NO: 34763 - DNA, 21 bp, Homo sapiens
gaacttagacgtgttctggag

SEQ ID NO: 34764 - RNA, 21 nt, RNAi
acuuagacguguucuggaguu

SEQ ID NO: 34765 - RNA, 21 nt, RNAi
uuugaaucugcacaagaccuc

SEQ ID NO: 34766 - DNA, 21 bp, Homo sapiens
gacgtgttctggagcagctca

SEQ ID NO: 34767 - RNA, 21 nt, RNAi
cguguucuggagcagcucauu

SEQ ID NO: 34768 - RNA, 21 nt, RNAi
uugcacaagaccucgucgagu

SEQ ID NO: 34769 - DNA, 21 bp, Homo sapiens
gagcagctcatcgttgctcac

SEQ ID NO: 34770 - RNA, 21 nt, RNAi
gcagcucaucguugcucacuu

SEQ ID NO: 34771 - RNA, 21 nt, RNAi
uucgucgaguagcaacgagug

SEQ ID NO: 34772 - DNA, 21 bp, Homo sapiens
gaatttcctccaggaactccg

SEQ ID NO: 34773 - RNA, 21 nt, RNAi
auuuccuccaggaacuccguu

SEQ ID NO: 34774 - RNA, 21 nt, RNAi
uuuaaaggagguccuugaggc

SEQ ID NO: 34775 - DNA, 21 bp, Homo sapiens
gaactccgcggttcaataatt

SEQ ID NO: 34776 - RNA, 21 nt, RNAi
acuccgcgguucaauaauuuu

SEQ ID NO: 34777 - RNA, 21 nt, RNAi
uuugaggcgccaaguuauuaa

SEQ ID NO: 34778 - DNA, 21 bp, Homo sapiens
gatgcattggaattatctcaa

SEQ ID NO: 34779 - RNA, 21 nt, RNAi
ugcauuggaauuaucucaauu

SEQ ID NO: 34780 - RNA, 21 nt, RNAi
uuacguaaccuuaauagaguu

SEQ ID NO: 34781 - DNA, 21 bp, Homo sapiens
gaattgatgacagaagttctt

SEQ ID NO: 34782 - RNA, 21 nt, RNAi
auugaugacagaaguucuuuu

SEQ ID NO: 34783 - RNA, 21 nt, RNAi
uuuaacuacugucuucaagaa

SEQ ID NO: 34784 - DNA, 21 bp, Homo sapiens
gatgacagaagttctttgtcg

SEQ ID NO: 34785 - RNA, 21 nt, RNAi
ugacagaaguucuuugucguu

SEQ ID NO: 34786 - RNA, 21 nt, RNAi
uuacugucuucaagaaacagc

SEQ ID NO: 34787 - DNA, 21 bp, Homo sapiens
gaacagcagcatgtcatggaa

SEQ ID NO: 34788 - RNA, 21 nt, RNAi
acagcagcaugucauggaauu

SEQ ID NO: 34789 - RNA, 21 nt, RNAi
uuugucgucguacaguaccuu

SEQ ID NO: 34790 - DNA, 21 bp, Homo sapiens
gaaagcgtgtatgaaatgttc

SEQ ID NO: 34791 - RNA, 21 nt, RNAi
aagcguguaugaaauguucuu

SEQ ID NO: 34792 - RNA, 21 nt, RNAi
uuuucgcacauacuuuacaag

SEQ ID NO: 34793 - DNA, 21 bp, Homo sapiens
gaaatgttcaggaaggatgac

SEQ ID NO: 34794 - RNA, 21 nt, RNAi
aauguucaggaaggaugacuu

SEQ ID NO: 34795 - RNA, 21 nt, RNAi
uuuuacaaguccuuccuacug

SEQ ID NO: 34796 - DNA, 21 bp, Homo sapiens
gatgctttgagagaattcttc

SEQ ID NO: 34797 - RNA, 21 nt, RNAi
ugcuuugagagaauucuucuu

SEQ ID NO: 34798 - RNA, 21 nt, RNAi
uuacgaaacucucuuaagaag

SEQ ID NO: 34799 - DNA, 21 bp, Homo sapiens
gagagaattcttcagcacaat

SEQ ID NO: 34800 - RNA, 21 nt, RNAi
gagaauucuucagcacaauuu

SEQ ID NO: 34801 - RNA, 21 nt, RNAi
uucucuuaagaagucguguua

SEQ ID NO: 34802 - DNA, 21 bp, Homo sapiens
gagaattcttcagcacaattg

SEQ ID NO: 34803 - RNA, 21 nt, RNAi
gaauucuucagcacaauuguu

SEQ ID NO: 34804 - RNA, 21 nt, RNAi
uucuuaagaagucguguuaac

SEQ ID NO: 34805 - DNA, 21 bp, Homo sapiens
gaattcttcagcacaattgtg

SEQ ID NO: 34806 - RNA, 21 nt, RNAi
auucuucagcacaauuguguu

SEQ ID NO: 34807 - RNA, 21 nt, RNAi
uuuaagaagucguguuaacac

SEQ ID NO: 34808 - DNA, 21 bp, Homo sapiens
gatgccattgatgtgttgaag

SEQ ID NO: 34809 - RNA, 21 nt, RNAi
ugccauugauguguugaaguu

SEQ ID NO: 34810 - RNA, 21 nt, RNAi
uuacgguaacuacacaacuuc

SEQ ID NO: 34811 - DNA, 21 bp, Homo sapiens
gatgtgttgaagtccaggttt

SEQ ID NO: 34812 - RNA, 21 nt, RNAi
uguguugaaguccagguuuuu

SEQ ID NO: 34813 - RNA, 21 nt, RNAi
uuacacaacuucagguccaaa

SEQ ID NO: 34814 - DNA, 21 bp, Homo sapiens
gaagtccaggtttacaaagct

SEQ ID NO: 34815 - RNA, 21 nt, RNAi
aguccagguuuacaaagcuuu

SEQ ID NO: 34816 - RNA, 21 nt, RNAi
uuucagguccaaauguuucga

SEQ ID NO: 34817 - DNA, 21 bp, Homo sapiens
gaatctacctttgatactcaa

SEQ ID NO: 34818 - RNA, 21 nt, RNAi
aucuaccuuugauacucaauu

SEQ ID NO: 34819 - RNA, 21 nt, RNAi
uuuagauggaaacuaugaguu

SEQ ID NO: 34820 - DNA, 21 bp, Homo sapiens
gatactcaaatcaccaagaag

SEQ ID NO: 34821 - RNA, 21 nt, RNAi
uacucaaaucaccaagaaguu

SEQ ID NO: 34822 - RNA, 21 nt, RNAi
uuaugaguuuagugguucuuc

SEQ ID NO: 34823 - DNA, 21 bp, Homo sapiens
gattctagacgtgatgtattc

SEQ ID NO: 34824 - RNA, 21 nt, RNAi
uucuagacgugauguauucuu

SEQ ID NO: 34825 - RNA, 21 nt, RNAi
uuaagaucugcacuacauaag

SEQ ID NO: 34826 - DNA, 21 bp, Homo sapiens
gacgtgatgtattctcgcctt

SEQ ID NO: 34827 - RNA, 21 nt, RNAi
cgugauguauucucgccuuuu

SEQ ID NO: 34828 - RNA, 21 nt, RNAi
uugcacuacauaagagcggaa

SEQ ID NO: 34829 - DNA, 21 bp, Homo sapiens
gatgatgttcatgctaaggaa

SEQ ID NO: 34830 - RNA, 21 nt, RNAi
ugauguucaugcuaaggaauu

SEQ ID NO: 34831 - RNA, 21 nt, RNAi
uuacuacaaguacgauuccuu

SEQ ID NO: 34832 - DNA, 21 bp, Homo sapiens
gatgttcatgctaaggaatca

SEQ ID NO: 34833 - RNA, 21 nt, RNAi
uguucaugcuaaggaaucauu

SEQ ID NO: 34834 - RNA, 21 nt, RNAi
uuacaaguacgauuccuuagu

SEQ ID NO: 34835 - DNA, 21 bp, Homo sapiens
gaaggaaatgaacttacaaag

SEQ ID NO: 34836 - RNA, 21 nt, RNAi
aggaaaugaacuuacaaaguu

SEQ ID NO: 34837 - RNA, 21 nt, RNAi
uuuccuuuacuugaauguuuc

SEQ ID NO: 34838 - DNA, 21 bp, Homo sapiens
gattaaattgtgctacgatgc

SEQ ID NO: 34839 - RNA, 21 nt, RNAi
uuaaauugugcuacgaugcuu

SEQ ID NO: 34840 - RNA, 21 nt, RNAi
uuaauuuaacacgaugcuacg

SEQ ID NO: 34841 - DNA, 21 bp, Homo sapiens
gatgcatttacagagaacatg

SEQ ID NO: 34842 - RNA, 21 nt, RNAi
ugcauuuacagagaacauguu

SEQ ID NO: 34843 - RNA, 21 nt, RNAi
uuacguaaaugucucuuguac

SEQ ID NO: 34844 - DNA, 21 bp, Homo sapiens
gagaacatggcaggagagaat

SEQ ID NO: 34845 - RNA, 21 nt, RNAi
gaacauggcaggagagaauuu

SEQ ID NO: 34846 - RNA, 21 nt, RNAi
uucuuguaccguccucucuua

SEQ ID NO: 34847 - DNA, 21 bp, Homo sapiens
gaacatggcaggagagaatca

SEQ ID NO: 34848 - RNA, 21 nt, RNAi
acauggcaggagagaaucauu

SEQ ID NO: 34849 - RNA, 21 nt, RNAi
uuuguaccguccucucuuagu

SEQ ID NO: 34850 - DNA, 21 bp, Homo sapiens
gagagaatcagctgctggaga

SEQ ID NO: 34851 - RNA, 21 nt, RNAi
gagaaucagcugcuggagauu

SEQ ID NO: 34852 - RNA, 21 nt, RNAi
uucucuuagucgacgaccucu

SEQ ID NO: 34853 - DNA, 21 bp, Homo sapiens
gagaatcagctgctggagagg

SEQ ID NO: 34854 - RNA, 21 nt, RNAi
gaaucagcugcuggagagguu

SEQ ID NO: 34855 - RNA, 21 nt, RNAi
uucuuagucgacgaccucucc

SEQ ID NO: 34856 - DNA, 21 bp, Homo sapiens
gaatcagctgctggagaggag

SEQ ID NO: 34857 - RNA, 21 nt, RNAi
aucagcugcuggagaggaguu

SEQ ID NO: 34858 - RNA, 21 nt, RNAi
uuuagucgacgaccucuccuc

SEQ ID NO: 34859 - DNA, 21 bp, Homo sapiens
gagaggagaagactttaccat

SEQ ID NO: 34860 - RNA, 21 nt, RNAi
gaggagaagacuuuaccauuu

SEQ ID NO: 34861 - RNA, 21 nt, RNAi
uucuccucuucugaaauggua

SEQ ID NO: 34862 - DNA, 21 bp, Homo sapiens
gaggagaagactttaccattg

SEQ ID NO: 34863 - RNA, 21 nt, RNAi
ggagaagacuuuaccauuguu

SEQ ID NO: 34864 - RNA, 21 nt, RNAi
uuccucuucugaaaugguaac

SEQ ID NO: 34865 - DNA, 21 bp, Homo sapiens
gagaagactttaccattgtgc

SEQ ID NO: 34866 - RNA, 21 nt, RNAi
gaagacuuuaccauugugcuu

SEQ ID NO: 34867 - RNA, 21 nt, RNAi
uucuucugaaaugguaacacg

SEQ ID NO: 34868 - DNA, 21 bp, Homo sapiens
gaagactttaccattgtgcag

SEQ ID NO: 34869 - RNA, 21 nt, RNAi
agacuuuaccauugugcaguu

SEQ ID NO: 34870 - RNA, 21 nt, RNAi
uuucugaaaugguaacacguc

SEQ ID NO: 34871 - DNA, 21 bp, Homo sapiens
gactttaccattgtgcagcat

SEQ ID NO: 34872 - RNA, 21 nt, RNAi
cuuuaccauugugcagcauuu

SEQ ID NO: 34873 - RNA, 21 nt, RNAi
uugaaaugguaacacgucgua

SEQ ID NO: 34874 - DNA, 21 bp, Homo sapiens
gaagttgaggttcctatggaa

SEQ ID NO: 34875 - RNA, 21 nt, RNAi
aguugagguuccuauggaauu

SEQ ID NO: 34876 - RNA, 21 nt, RNAi
uuucaacuccaaggauaccuu

SEQ ID NO: 34877 - DNA, 21 bp, Homo sapiens
gaggttcctatggaaagaaag

SEQ ID NO: 34878 - RNA, 21 nt, RNAi
gguuccuauggaaagaaaguu

SEQ ID NO: 34879 - RNA, 21 nt, RNAi
uuccaaggauaccuuucuuuc

SEQ ID NO: 34880 - DNA, 21 bp, Homo sapiens
gaaattaggaaagaagccaga

SEQ ID NO: 34881 - RNA, 21 nt, RNAi
aauuaggaaagaagccagauu

SEQ ID NO: 34882 - RNA, 21 nt, RNAi
uuuuaauccuuucuucggucu

SEQ ID NO: 34883 - DNA, 21 bp, Homo sapiens
gaaagaagccagagaagcagc

SEQ ID NO: 34884 - RNA, 21 nt, RNAi
aagaagccagagaagcagcuu

SEQ ID NO: 34885 - RNA, 21 nt, RNAi
uuuucuucggucucuucgucg

SEQ ID NO: 34886 - DNA, 21 bp, Homo sapiens
gaagccagagaagcagcaaat

SEQ ID NO: 34887 - RNA, 21 nt, RNAi
agccagagaagcagcaaauuu

SEQ ID NO: 34888 - RNA, 21 nt, RNAi
uuucggucucuucgucguuua

SEQ ID NO: 34889 - DNA, 21 bp, Homo sapiens
gattcagatggtccttcctat

SEQ ID NO: 34890 - RNA, 21 nt, RNAi
uucagaugguccuuccuauuu

SEQ ID NO: 34891 - RNA, 21 nt, RNAi
uuaagucuaccaggaaggaua

SEQ ID NO: 34892 - DNA, 21 bp, Homo sapiens
gatggtccttcctatatgtct

SEQ ID NO: 34893 - RNA, 21 nt, RNAi
ugguccuuccuauaugucuuu

SEQ ID NO: 34894 - RNA, 21 nt, RNAi
uuaccaggaaggauauacaga

SEQ ID NO: 34895 - DNA, 21 bp, Homo sapiens
gagtgaggaaatgagtcaatt

SEQ ID NO: 34896 - RNA, 21 nt, RNAi
gugaggaaaugagucaauuuu

SEQ ID NO: 34897 - RNA, 21 nt, RNAi
uucacuccuuuacucaguuaa

SEQ ID NO: 34898 - DNA, 21 bp, Homo sapiens
gaggaaatgagtcaatttgat

SEQ ID NO: 34899 - RNA, 21 nt, RNAi
ggaaaugagucaauuugauuu

SEQ ID NO: 34900 - RNA, 21 nt, RNAi
uuccuuuacucaguuaaacua

SEQ ID NO: 34901 - DNA, 21 bp, Homo sapiens
gagtcaatttgatttctcaac

SEQ ID NO: 34902 - RNA, 21 nt, RNAi
gucaauuugauuucucaacuu

SEQ ID NO: 34903 - RNA, 21 nt, RNAi
uucaguuaaacuaaagaguug

SEQ ID NO: 34904 - DNA, 21 bp, Homo sapiens
gatttctcaaccggagttcag

SEQ ID NO: 34905 - RNA, 21 nt, RNAi
uuucucaaccggaguucaguu

SEQ ID NO: 34906 - RNA, 21 nt, RNAi
uuaaagaguuggccucaaguc

SEQ ID NO: 34907 - DNA, 21 bp, Homo sapiens
gagttcagagctattcataca

SEQ ID NO: 34908 - RNA, 21 nt, RNAi
guucagagcuauucauacauu

SEQ ID NO: 34909 - RNA, 21 nt, RNAi
uucaagucucgauaaguaugu

SEQ ID NO: 34910 - DNA, 21 bp, Homo sapiens
gatgatgtgctggagctggag

SEQ ID NO: 34911 - RNA, 21 nt, RNAi
ugaugugcuggagcuggaguu

SEQ ID NO: 34912 - RNA, 21 nt, RNAi
uuacuacacgaccucgaccuc

SEQ ID NO: 34913 - DNA, 21 bp, Homo sapiens
gatgtgctggagctggagatg

SEQ ID NO: 34914 - RNA, 21 nt, RNAi
ugugcuggagcuggagauguu

SEQ ID NO: 34915 - RNA, 21 nt, RNAi
uuacacgaccucgaccucuac

SEQ ID NO: 34916 - DNA, 21 bp, Homo sapiens
gagctggagatggacgagctc

SEQ ID NO: 34917 - RNA, 21 nt, RNAi
gcuggagauggacgagcucuu

SEQ ID NO: 34918 - RNA, 21 nt, RNAi
uucgaccucuaccugcucgag

SEQ ID NO: 34919 - DNA, 21 bp, Homo sapiens
gagatggacgagctcaatcgg

SEQ ID NO: 34920 - RNA, 21 nt, RNAi
gauggacgagcucaaucgguu

SEQ ID NO: 34921 - RNA, 21 nt, RNAi
uucuaccugcucgaguuagcc

SEQ ID NO: 34922 - DNA, 21 bp, Homo sapiens
gatggacgagctcaatcggca

SEQ ID NO: 34923 - RNA, 21 nt, RNAi
uggacgagcucaaucggcauu

SEQ ID NO: 34924 - RNA, 21 nt, RNAi
uuaccugcucgaguuagccgu

SEQ ID NO: 34925 - DNA, 21 bp, Homo sapiens
gacgagctcaatcggcatgag

SEQ ID NO: 34926 - RNA, 21 nt, RNAi
cgagcucaaucggcaugaguu

SEQ ID NO: 34927 - RNA, 21 nt, RNAi
uugcucgaguuagccguacuc

SEQ ID NO: 34928 - DNA, 21 bp, Homo sapiens
gagctcaatcggcatgagtgc

SEQ ID NO: 34929 - RNA, 21 nt, RNAi
gcucaaucggcaugagugcuu

SEQ ID NO: 34930 - RNA, 21 nt, RNAi
uucgaguuagccguacucacg

SEQ ID NO: 34931 - DNA, 21 bp, Homo sapiens
gagaagaggattcagtgccaa

SEQ ID NO: 34932 - RNA, 21 nt, RNAi
gaagaggauucagugccaauu

SEQ ID NO: 34933 - RNA, 21 nt, RNAi
uucuucuccuaagucacgguu

SEQ ID NO: 34934 - DNA, 21 bp, Homo sapiens
gaagaggattcagtgccaaga

SEQ ID NO: 34935 - RNA, 21 nt, RNAi
agaggauucagugccaagauu

SEQ ID NO: 34936 - RNA, 21 nt, RNAi
uuucuccuaagucacgguucu

SEQ ID NO: 34937 - DNA, 21 bp, Homo sapiens
gaggattcagtgccaagagat

SEQ ID NO: 34938 - RNA, 21 nt, RNAi
ggauucagugccaagagauuu

SEQ ID NO: 34939 - RNA, 21 nt, RNAi
uuccuaagucacgguucucua

SEQ ID NO: 34940 - DNA, 21 bp, Homo sapiens
gattcagtgccaagagatctt

SEQ ID NO: 34941 - RNA, 21 nt, RNAi
uucagugccaagagaucuuuu

SEQ ID NO: 34942 - RNA, 21 nt, RNAi
uuaagucacgguucucuagaa

SEQ ID NO: 34943 - DNA, 21 bp, Homo sapiens
gagatcttccttcttggatga

SEQ ID NO: 34944 - RNA, 21 nt, RNAi
gaucuuccuucuuggaugauu

SEQ ID NO: 34945 - RNA, 21 nt, RNAi
uucuagaaggaagaaccuacu

SEQ ID NO: 34946 - DNA, 21 bp, Homo sapiens
gatcttccttcttggatgaaa

SEQ ID NO: 34947 - RNA, 21 nt, RNAi
ucuuccuucuuggaugaaauu

SEQ ID NO: 34948 - RNA, 21 nt, RNAi
uuagaaggaagaaccuacuuu

SEQ ID NO: 34949 - DNA, 21 bp, Homo sapiens
gatgaaattcctccatggcaa

SEQ ID NO: 34950 - RNA, 21 nt, RNAi
ugaaauuccuccauggcaauu

SEQ ID NO: 34951 - RNA, 21 nt, RNAi
uuacuuuaaggagguaccguu

SEQ ID NO: 34952 - DNA, 21 bp, Homo sapiens
gaaattcctccatggcaaact

SEQ ID NO: 34953 - RNA, 21 nt, RNAi
aauuccuccauggcaaacuuu

SEQ ID NO: 34954 - RNA, 21 nt, RNAi
uuuuaaggagguaccguuuga

SEQ ID NO: 34955 - DNA, 21 bp, Homo sapiens
gaggagaaggaattcactaca

SEQ ID NO: 34956 - RNA, 21 nt, RNAi
ggagaaggaauucacuacauu

SEQ ID NO: 34957 - RNA, 21 nt, RNAi
uuccucuuccuuaagugaugu

SEQ ID NO: 34958 - DNA, 21 bp, Homo sapiens
gagaaggaattcactacatgg

SEQ ID NO: 34959 - RNA, 21 nt, RNAi
gaaggaauucacuacaugguu

SEQ ID NO: 34960 - RNA, 21 nt, RNAi
uucuuccuuaagugauguacc

SEQ ID NO: 34961 - DNA, 21 bp, Homo sapiens
gaaggaattcactacatggtg

SEQ ID NO: 34962 - RNA, 21 nt, RNAi
aggaauucacuacaugguguu

SEQ ID NO: 34963 - RNA, 21 nt, RNAi
uuuccuuaagugauguaccac

SEQ ID NO: 34964 - DNA, 21 bp, Homo sapiens
gaattcactacatggtggttg

SEQ ID NO: 34965 - RNA, 21 nt, RNAi
auucacuacauggugguuguu

SEQ ID NO: 34966 - RNA, 21 nt, RNAi
uuuaagugauguaccaccaac

SEQ ID NO: 34967 - DNA, 21 bp, Homo sapiens
gagatagtggccactattctt

SEQ ID NO: 34968 - RNA, 21 nt, RNAi
gauaguggccacuauucuuuu

SEQ ID NO: 34969 - RNA, 21 nt, RNAi
uucuaucaccggugauaagaa

SEQ ID NO: 34970 - DNA, 21 bp, Homo sapiens
gatagtggccactattctttc

SEQ ID NO: 34971 - RNA, 21 nt, RNAi
uaguggccacuauucuuucuu

SEQ ID NO: 34972 - RNA, 21 nt, RNAi
uuaucaccggugauaagaaag

SEQ ID NO: 34973 - DNA, 21 bp, Homo sapiens
gacaggcttggccactccaac

SEQ ID NO: 34974 - RNA, 21 nt, RNAi
caggcuuggccacuccaacuu

SEQ ID NO: 34975 - RNA, 21 nt, RNAi
uuguccgaaccggugagguug

SEQ ID NO: 34976 - DNA, 21 bp, Homo sapiens
gatgaagtgttagcaaatcga

SEQ ID NO: 34977 - RNA, 21 nt, RNAi
ugaaguguuagcaaaucgauu

SEQ ID NO: 34978 - RNA, 21 nt, RNAi
uuacuucacaaucguuuagcu

SEQ ID NO: 34979 - DNA, 21 bp, Homo sapiens
gaagtgttagcaaatcgattg

SEQ ID NO: 34980 - RNA, 21 nt, RNAi
aguguuagcaaaucgauuguu

SEQ ID NO: 34981 - RNA, 21 nt, RNAi
uuucacaaucguuuagcuaac

SEQ ID NO: 34982 - DNA, 21 bp, Homo sapiens
gaaacatgtctttcatccaaa

SEQ ID NO: 34983 - RNA, 21 nt, RNAi
aacaugucuuucauccaaauu

SEQ ID NO: 34984 - RNA, 21 nt, RNAi
uuuuguacagaaaguagguuu

SEQ ID NO: 34985 - DNA, 21 bp, Homo sapiens
gagctgtgtttagacacaacc

SEQ ID NO: 34986 - RNA, 21 nt, RNAi
gcuguguuuagacacaaccuu

SEQ ID NO: 34987 - RNA, 21 nt, RNAi
uucgacacaaaucuguguugg

SEQ ID NO: 34988 - DNA, 21 bp, Homo sapiens
gagtgctggaaggattgttta

SEQ ID NO: 34989 - RNA, 21 nt, RNAi
gugcuggaaggauuguuuauu

SEQ ID NO: 34990 - RNA, 21 nt, RNAi
uucacgaccuuccuaacaaau

SEQ ID NO: 34991 - DNA, 21 bp, Homo sapiens
gatcctaattctaaagacaac

SEQ ID NO: 34992 - RNA, 21 nt, RNAi
uccuaauucuaaagacaacuu

SEQ ID NO: 34993 - RNA, 21 nt, RNAi
uuaggauuaagauuucuguug

SEQ ID NO: 34994 - DNA, 21 bp, Homo sapiens
gattcaattgctaggcatcgt

SEQ ID NO: 34995 - RNA, 21 nt, RNAi
uucaauugcuaggcaucguuu

SEQ ID NO: 34996 - RNA, 21 nt, RNAi
uuaaguuaacgauccguagca

SEQ ID NO: 34997 - DNA, 21 bp, Homo sapiens
gatggccaatgacctgcctcc

SEQ ID NO: 34998 - RNA, 21 nt, RNAi
uggccaaugaccugccuccuu

SEQ ID NO: 34999 - RNA, 21 nt, RNAi
uuaccgguuacuggacggagg

SEQ ID NO: 35000 - DNA, 21 bp, Homo sapiens
gagtagcgaatacttccaggc

SEQ ID NO: 35001 - RNA, 21 nt, RNAi
guagcgaauacuuccaggcuu

SEQ ID NO: 35002 - RNA, 21 nt, RNAi
uucaucgcuuaugaagguccg

SEQ ID NO: 35003 - DNA, 21 bp, Homo sapiens
gaatacttccaggctttggtg

SEQ ID NO: 35004 - RNA, 21 nt, RNAi
auacuuccaggcuuugguguu

SEQ ID NO: 35005 - RNA, 21 nt, RNAi
uuuaugaagguccgaaaccac

SEQ ID NO: 35006 - DNA, 21 bp, Homo sapiens
gatataaagaagtgtatgccg

SEQ ID NO: 35007 - RNA, 21 nt, RNAi
uauaaagaaguguaugccguu

SEQ ID NO: 35008 - RNA, 21 nt, RNAi
uuauauuucuucacauacggc

SEQ ID NO: 35009 - DNA, 21 bp, Homo sapiens
gaagtgtatgccgctgcagca

SEQ ID NO: 35010 - RNA, 21 nt, RNAi
aguguaugccgcugcagcauu

SEQ ID NO: 35011 - RNA, 21 nt, RNAi
uuucacauacggcgacgucgu

SEQ ID NO: 35012 - DNA, 21 bp, Homo sapiens
gaagttctaggacttatactt

SEQ ID NO: 35013 - RNA, 21 nt, RNAi
aguucuaggacuuauacuuuu

SEQ ID NO: 35014 - RNA, 21 nt, RNAi
uuucaagauccugaauaugaa

SEQ ID NO: 35015 - DNA, 21 bp, Homo sapiens
gaggagtctctgtgtgaactg

SEQ ID NO: 35016 - RNA, 21 nt, RNAi
ggagucucugugugaacuguu

SEQ ID NO: 35017 - RNA, 21 nt, RNAi
uuccucagagacacacuugac

SEQ ID NO: 35018 - DNA, 21 bp, Homo sapiens
gagtctctgtgtgaactggtt

SEQ ID NO: 35019 - RNA, 21 nt, RNAi
gucucugugugaacugguuuu

SEQ ID NO: 35020 - RNA, 21 nt, RNAi
uucagagacacacuugaccaa

SEQ ID NO: 35021 - DNA, 21 bp, Homo sapiens
gaactggttgcgaaacaattg

SEQ ID NO: 35022 - RNA, 21 nt, RNAi
acugguugcgaaacaauuguu

SEQ ID NO: 35023 - RNA, 21 nt, RNAi
uuugaccaacgcuuuguuaac

SEQ ID NO: 35024 - DNA, 21 bp, Homo sapiens
gaaacaattgaagcaacatca

SEQ ID NO: 35025 - RNA, 21 nt, RNAi
aacaauugaagcaacaucauu

SEQ ID NO: 35026 - RNA, 21 nt, RNAi
uuuuguuaacuucguuguagu

SEQ ID NO: 35027 - DNA, 21 bp, Homo sapiens
gaagcaacatcagaatactat

SEQ ID NO: 35028 - RNA, 21 nt, RNAi
agcaacaucagaauacuauuu

SEQ ID NO: 35029 - RNA, 21 nt, RNAi
uuucguuguagucuuaugaua

SEQ ID NO: 35030 - DNA, 21 bp, Homo sapiens
gaatactatggaggacaagtt

SEQ ID NO: 35031 - RNA, 21 nt, RNAi
auacuauggaggacaaguuuu

SEQ ID NO: 35032 - RNA, 21 nt, RNAi
uuuaugauaccuccuguucaa

SEQ ID NO: 35033 - DNA, 21 bp, Homo sapiens
gaggacaagtttattgtgtgc

SEQ ID NO: 35034 - RNA, 21 nt, RNAi
ggacaaguuuauugugugcuu

SEQ ID NO: 35035 - RNA, 21 nt, RNAi
uuccuguucaaauaacacacg

SEQ ID NO: 35036 - DNA, 21 bp, Homo sapiens
gacaagtttattgtgtgcttg

SEQ ID NO: 35037 - RNA, 21 nt, RNAi
caaguuuauugugugcuuguu

SEQ ID NO: 35038 - RNA, 21 nt, RNAi
uuguucaaauaacacacgaac

SEQ ID NO: 35039 - DNA, 21 bp, Homo sapiens
gaacaaagtgaccaagagctt

SEQ ID NO: 35040 - RNA, 21 nt, RNAi
acaaagugaccaagagcuuuu

SEQ ID NO: 35041 - RNA, 21 nt, RNAi
uuuguuucacugguucucgaa

SEQ ID NO: 35042 - DNA, 21 bp, Homo sapiens
gacaggttcatgaatgctgtg

SEQ ID NO: 35043 - RNA, 21 nt, RNAi
cagguucaugaaugcuguguu

SEQ ID NO: 35044 - RNA, 21 nt, RNAi
uuguccaaguacuuacgacac

SEQ ID NO: 35045 - DNA, 21 bp, Homo sapiens
gaatgctgtgttctttctgct

SEQ ID NO: 35046 - RNA, 21 nt, RNAi
augcuguguucuuucugcuuu

SEQ ID NO: 35047 - RNA, 21 nt, RNAi
uuuacgacacaagaaagacga

SEQ ID NO: 35048 - DNA, 21 bp, Homo sapiens
gaggtggtactttgtcgtgtg

SEQ ID NO: 35049 - RNA, 21 nt, RNAi
ggugguacuuugucguguguu

SEQ ID NO: 35050 - RNA, 21 nt, RNAi
uuccaccaugaaacagcacac

SEQ ID NO: 35051 - DNA, 21 bp, Homo sapiens
gaatgacagagctgtacttcc

SEQ ID NO: 35052 - RNA, 21 nt, RNAi
augacagagcuguacuuccuu

SEQ ID NO: 35053 - RNA, 21 nt, RNAi
uuuacugucucgacaugaagg

SEQ ID NO: 35054 - DNA, 21 bp, Homo sapiens
gacagagctgtacttccagtt

SEQ ID NO: 35055 - RNA, 21 nt, RNAi
cagagcuguacuuccaguuuu

SEQ ID NO: 35056 - RNA, 21 nt, RNAi
uugucucgacaugaaggucaa

SEQ ID NO: 35057 - DNA, 21 bp, Homo sapiens
gagctgtacttccagttaaag

SEQ ID NO: 35058 - RNA, 21 nt, RNAi
gcuguacuuccaguuaaaguu

SEQ ID NO: 35059 - RNA, 21 nt, RNAi
uucgacaugaaggucaauuuc

SEQ ID NO: 35060 - DNA, 21 bp, Homo sapiens
gagcaaggacttcgttcaagt

SEQ ID NO: 35061 - RNA, 21 nt, RNAi
gcaaggacuucguucaaguuu

SEQ ID NO: 35062 - RNA, 21 nt, RNAi
uucguuccugaagcaaguuca

SEQ ID NO: 35063 - DNA, 21 bp, Homo sapiens
gacttcgttcaagtcatgaga

SEQ ID NO: 35064 - RNA, 21 nt, RNAi
cuucguucaagucaugagauu

SEQ ID NO: 35065 - RNA, 21 nt, RNAi
uugaagcaaguucaguacucu

SEQ ID NO: 35066 - DNA, 21 bp, Homo sapiens
gagacatagagatgatgaaag

SEQ ID NO: 35067 - RNA, 21 nt, RNAi
gacauagagaugaugaaaguu

SEQ ID NO: 35068 - RNA, 21 nt, RNAi
uucuguaucucuacuacuuuc

SEQ ID NO: 35069 - DNA, 21 bp, Homo sapiens
gacatagagatgatgaaagac

SEQ ID NO: 35070 - RNA, 21 nt, RNAi
cauagagaugaugaaagacuu

SEQ ID NO: 35071 - RNA, 21 nt, RNAi
uuguaucucuacuacuuucug

SEQ ID NO: 35072 - DNA, 21 bp, Homo sapiens
gaactccgagaacttctgaac

SEQ ID NO: 35073 - RNA, 21 nt, RNAi
acuccgagaacuucugaacuu

SEQ ID NO: 35074 - RNA, 21 nt, RNAi
uuugaggcucuugaagacuug

SEQ ID NO: 35075 - DNA, 21 bp, Homo sapiens
gataattacagagatccagaa

SEQ ID NO: 35076 - RNA, 21 nt, RNAi
uaauuacagagauccagaauu

SEQ ID NO: 35077 - RNA, 21 nt, RNAi
uuauuaaugucucuaggucuu

SEQ ID NO: 35078 - DNA, 21 bp, Homo sapiens
gagatccagaaagtgagacag

SEQ ID NO: 35079 - RNA, 21 nt, RNAi
gauccagaaagugagacaguu

SEQ ID NO: 35080 - RNA, 21 nt, RNAi
uucuaggucuuucacucuguc

SEQ ID NO: 35081 - DNA, 21 bp, Homo sapiens
gatccagaaagtgagacagat

SEQ ID NO: 35082 - RNA, 21 nt, RNAi
uccagaaagugagacagauuu

SEQ ID NO: 35083 - RNA, 21 nt, RNAi
uuaggucuuucacucugucua

SEQ ID NO: 35084 - DNA, 21 bp, Homo sapiens
gaaagtgagacagataatgac

SEQ ID NO: 35085 - RNA, 21 nt, RNAi
aagugagacagauaaugacuu

SEQ ID NO: 35086 - RNA, 21 nt, RNAi
uuuucacucugucuauuacug

SEQ ID NO: 35087 - DNA, 21 bp, Homo sapiens
gatgtgctgattcaaggattg

SEQ ID NO: 35088 - RNA, 21 nt, RNAi
ugugcugauucaaggauuguu

SEQ ID NO: 35089 - RNA, 21 nt, RNAi
uuacacgacuaaguuccuaac

SEQ ID NO: 35090 - DNA, 21 bp, Homo sapiens
gattcaaggattgatcgatga

SEQ ID NO: 35091 - RNA, 21 nt, RNAi
uucaaggauugaucgaugauu

SEQ ID NO: 35092 - RNA, 21 nt, RNAi
uuaaguuccuaacuagcuacu

SEQ ID NO: 35093 - DNA, 21 bp, Homo sapiens
gaaatttctggagccatgaaa

SEQ ID NO: 35094 - RNA, 21 nt, RNAi
aauuucuggagccaugaaauu

SEQ ID NO: 35095 - RNA, 21 nt, RNAi
uuuuaaagaccucgguacuuu

SEQ ID NO: 35096 - DNA, 21 bp, Homo sapiens
gagccatgaaactaggttacc

SEQ ID NO: 35097 - RNA, 21 nt, RNAi
gccaugaaacuagguuaccuu

SEQ ID NO: 35098 - RNA, 21 nt, RNAi
uucgguacuuugauccaaugg

SEQ ID NO: 35099 - DNA, 21 bp, Homo sapiens
gaaactaggttaccttcaaat

SEQ ID NO: 35100 - RNA, 21 nt, RNAi
aacuagguuaccuucaaauuu

SEQ ID NO: 35101 - RNA, 21 nt, RNAi
uuuugauccaauggaaguuua

SEQ ID NO: 35102 - DNA, 21 bp, Homo sapiens
gaccggttgctggcactaaat

SEQ ID NO: 35103 - RNA, 21 nt, RNAi
ccgguugcuggcacuaaauuu

SEQ ID NO: 35104 - RNA, 21 nt, RNAi
uuggccaacgaccgugauuua

SEQ ID NO: 35105 - DNA, 21 bp, Homo sapiens
gagcatcctctgtcagaatgc

SEQ ID NO: 35106 - RNA, 21 nt, RNAi
gcauccucugucagaaugcuu

SEQ ID NO: 35107 - RNA, 21 nt, RNAi
uucguaggagacagucuuacg

SEQ ID NO: 35108 - DNA, 21 bp, Homo sapiens
gaatgcgaatttcaggaatat

SEQ ID NO: 35109 - RNA, 21 nt, RNAi
augcgaauuucaggaauauuu

SEQ ID NO: 35110 - RNA, 21 nt, RNAi
uuuacgcuuaaaguccuuaua

SEQ ID NO: 35111 - DNA, 21 bp, Homo sapiens
gattctgattggcgtttccga

SEQ ID NO: 35112 - RNA, 21 nt, RNAi
uucugauuggcguuuccgauu

SEQ ID NO: 35113 - RNA, 21 nt, RNAi
uuaagacuaaccgcaaaggcu

SEQ ID NO: 35114 - DNA, 21 bp, Homo sapiens
gattggcgtttccgaagtact

SEQ ID NO: 35115 - RNA, 21 nt, RNAi
uuggcguuuccgaaguacuuu

SEQ ID NO: 35116 - RNA, 21 nt, RNAi
uuaaccgcaaaggcuucauga

SEQ ID NO: 35117 - DNA, 21 bp, Homo sapiens
gaagtactgttctcactccga

SEQ ID NO: 35118 - RNA, 21 nt, RNAi
aguacuguucucacuccgauu

SEQ ID NO: 35119 - RNA, 21 nt, RNAi
uuucaugacaagagugaggcu

SEQ ID NO: 35120 - DNA, 21 bp, Homo sapiens
gacttcacactgacacagact

SEQ ID NO: 35121 - RNA, 21 nt, RNAi
cuucacacugacacagacuuu

SEQ ID NO: 35122 - RNA, 21 nt, RNAi
uugaagugugacugugucuga

SEQ ID NO: 35123 - DNA, 21 bp, Homo sapiens
gacacagactgcagatggaag

SEQ ID NO: 35124 - RNA, 21 nt, RNAi
cacagacugcagauggaaguu

SEQ ID NO: 35125 - RNA, 21 nt, RNAi
uugugucugacgucuaccuuc

SEQ ID NO: 35126 - DNA, 21 bp, Homo sapiens
gactgcagatggaagaagctc

SEQ ID NO: 35127 - RNA, 21 nt, RNAi
cugcagauggaagaagcucuu

SEQ ID NO: 35128 - RNA, 21 nt, RNAi
uugacgucuaccuucuucgag

SEQ ID NO: 35129 - DNA, 21 bp, Homo sapiens
gatggaagaagctcatttgat

SEQ ID NO: 35130 - RNA, 21 nt, RNAi
uggaagaagcucauuugauuu

SEQ ID NO: 35131 - RNA, 21 nt, RNAi
uuaccuucuucgaguaaacua

SEQ ID NO: 35132 - DNA, 21 bp, Homo sapiens
gaagaagctcatttgattggc

SEQ ID NO: 35133 - RNA, 21 nt, RNAi
agaagcucauuugauuggcuu

SEQ ID NO: 35134 - RNA, 21 nt, RNAi
uuucuucgaguaaacuaaccg

SEQ ID NO: 35135 - DNA, 21 bp, Homo sapiens
gaagctcatttgattggctga

SEQ ID NO: 35136 - RNA, 21 nt, RNAi
agcucauuugauuggcugauu

SEQ ID NO: 35137 - RNA, 21 nt, RNAi
uuucgaguaaacuaaccgacu

SEQ ID NO: 35138 - DNA, 21 bp, Homo sapiens
gaggagtgaaaggttacagag

SEQ ID NO: 35139 - RNA, 21 nt, RNAi
ggagugaaagguuacagaguu

SEQ ID NO: 35140 - RNA, 21 nt, RNAi
uuccucacuuuccaaugucuc

SEQ ID NO: 35141 - DNA, 21 bp, Homo sapiens
gagtgaaaggttacagagagc

SEQ ID NO: 35142 - RNA, 21 nt, RNAi
gugaaagguuacagagagcuu

SEQ ID NO: 35143 - RNA, 21 nt, RNAi
uucacuuuccaaugucucucg

SEQ ID NO: 35144 - DNA, 21 bp, Homo sapiens
gacgaggtggataacaaagtg

SEQ ID NO: 35145 - RNA, 21 nt, RNAi
cgagguggauaacaaaguguu

SEQ ID NO: 35146 - RNA, 21 nt, RNAi
uugcuccaccuauuguuucac

SEQ ID NO: 35147 - DNA, 21 bp, Homo sapiens
gaggtggataacaaagtgaaa

SEQ ID NO: 35148 - RNA, 21 nt, RNAi
gguggauaacaaagugaaauu

SEQ ID NO: 35149 - RNA, 21 nt, RNAi
uuccaccuauuguuucacuuu

SEQ ID NO: 35150 - DNA, 21 bp, Homo sapiens
gataacaaagtgaaaggtgcg

SEQ ID NO: 35151 - RNA, 21 nt, RNAi
uaacaaagugaaaggugcguu

SEQ ID NO: 35152 - RNA, 21 nt, RNAi
uuauuguuucacuuuccacgc

SEQ ID NO: 35153 - DNA, 21 bp, Homo sapiens
gacggacctactacgactgcg

SEQ ID NO: 35154 - RNA, 21 nt, RNAi
cggaccuacuacgacugcguu

SEQ ID NO: 35155 - RNA, 21 nt, RNAi
uugccuggaugaugcugacgc

SEQ ID NO: 35156 - DNA, 21 bp, Homo sapiens
gacctactacgactgcgcaga

SEQ ID NO: 35157 - RNA, 21 nt, RNAi
ccuacuacgacugcgcagauu

SEQ ID NO: 35158 - RNA, 21 nt, RNAi
uuggaugaugcugacgcgucu

SEQ ID NO: 35159 - DNA, 21 bp, Homo sapiens
gactgcgcagacggtttatga

SEQ ID NO: 35160 - RNA, 21 nt, RNAi
cugcgcagacgguuuaugauu

SEQ ID NO: 35161 - RNA, 21 nt, RNAi
uugacgcgucugccaaauacu

SEQ ID NO: 35162 - DNA, 21 bp, Homo sapiens
gaccaggagaagctcagtttg

SEQ ID NO: 35163 - RNA, 21 nt, RNAi
ccaggagaagcucaguuuguu

SEQ ID NO: 35164 - RNA, 21 nt, RNAi
uugguccucuucgagucaaac

SEQ ID NO: 35165 - DNA, 21 bp, Homo sapiens
gagaagctcagtttgatgtat

SEQ ID NO: 35166 - RNA, 21 nt, RNAi
gaagcucaguuugauguauuu

SEQ ID NO: 35167 - RNA, 21 nt, RNAi
uucuucgagucaaacuacaua

SEQ ID NO: 35168 - DNA, 21 bp, Homo sapiens
gaagctcagtttgatgtatgc

SEQ ID NO: 35169 - RNA, 21 nt, RNAi
agcucaguuugauguaugcuu

SEQ ID NO: 35170 - RNA, 21 nt, RNAi
uuucgagucaaacuacauacg

SEQ ID NO: 35171 - DNA, 21 bp, Homo sapiens
gagagaaggaaatcaagagtg

SEQ ID NO: 35172 - RNA, 21 nt, RNAi
gagaaggaaaucaagaguguu

SEQ ID NO: 35173 - RNA, 21 nt, RNAi
uucucuuccuuuaguucucac

SEQ ID NO: 35174 - DNA, 21 bp, Homo sapiens
gagaaggaaatcaagagtgag

SEQ ID NO: 35175 - RNA, 21 nt, RNAi
gaaggaaaucaagagugaguu

SEQ ID NO: 35176 - RNA, 21 nt, RNAi
uucuuccuuuaguucucacuc

SEQ ID NO: 35177 - DNA, 21 bp, Homo sapiens
gaaggaaatcaagagtgagtt

SEQ ID NO: 35178 - RNA, 21 nt, RNAi
aggaaaucaagagugaguuuu

SEQ ID NO: 35179 - RNA, 21 nt, RNAi
uuuccuuuaguucucacucaa

SEQ ID NO: 35180 - DNA, 21 bp, Homo sapiens
gagaccttcctgacattcaga

SEQ ID NO: 35181 - RNA, 21 nt, RNAi
gaccuuccugacauucagauu

SEQ ID NO: 35182 - RNA, 21 nt, RNAi
uucuggaaggacuguaagucu

SEQ ID NO: 35183 - DNA, 21 bp, Homo sapiens
gaccttcctgacattcagatc

SEQ ID NO: 35184 - RNA, 21 nt, RNAi
ccuuccugacauucagaucuu

SEQ ID NO: 35185 - RNA, 21 nt, RNAi
uuggaaggacuguaagucuag

SEQ ID NO: 35186 - DNA, 21 bp, Homo sapiens
gacattcagatcaagcacagc

SEQ ID NO: 35187 - RNA, 21 nt, RNAi
cauucagaucaagcacagcuu

SEQ ID NO: 35188 - RNA, 21 nt, RNAi
uuguaagucuaguucgugucg

SEQ ID NO: 35189 - DNA, 21 bp, Homo sapiens
gatcaagcacagcagcctcat

SEQ ID NO: 35190 - RNA, 21 nt, RNAi
ucaagcacagcagccucauuu

SEQ ID NO: 35191 - RNA, 21 nt, RNAi
uuaguucgugucgucggagua

SEQ ID NO: 35192 - DNA, 21 bp, Homo sapiens
gacattagctgtcagcacgca

SEQ ID NO: 35193 - RNA, 21 nt, RNAi
cauuagcugucagcacgcauu

SEQ ID NO: 35194 - RNA, 21 nt, RNAi
uuguaaucgacagucgugcgu

SEQ ID NO: 35195 - DNA, 21 bp, Homo sapiens
gagcttgctaagctgtataga

SEQ ID NO: 35196 - RNA, 21 nt, RNAi
gcuugcuaagcuguauagauu

SEQ ID NO: 35197 - RNA, 21 nt, RNAi
uucgaacgauucgacauaucu

SEQ ID NO: 35198 - DNA, 21 bp, Homo sapiens
gatcaattggagaatacgacg

SEQ ID NO: 35199 - RNA, 21 nt, RNAi
ucaauuggagaauacgacguu

SEQ ID NO: 35200 - RNA, 21 nt, RNAi
uuaguuaaccucuuaugcugc

SEQ ID NO: 35201 - DNA, 21 bp, Homo sapiens
gagaatacgacgtcctccgtg

SEQ ID NO: 35202 - RNA, 21 nt, RNAi
gaauacgacguccuccguguu

SEQ ID NO: 35203 - RNA, 21 nt, RNAi
uucuuaugcugcaggaggcac

SEQ ID NO: 35204 - DNA, 21 bp, Homo sapiens
gagataggaacaaagcaaatc

SEQ ID NO: 35205 - RNA, 21 nt, RNAi
gauaggaacaaagcaaaucuu

SEQ ID NO: 35206 - RNA, 21 nt, RNAi
uucuauccuuguuucguuuag

SEQ ID NO: 35207 - DNA, 21 bp, Homo sapiens
gataggaacaaagcaaatcac

SEQ ID NO: 35208 - RNA, 21 nt, RNAi
uaggaacaaagcaaaucacuu

SEQ ID NO: 35209 - RNA, 21 nt, RNAi
uuauccuuguuucguuuagug

SEQ ID NO: 35210 - DNA, 21 bp, Homo sapiens
gaacaaagcaaatcactcaga

SEQ ID NO: 35211 - RNA, 21 nt, RNAi
acaaagcaaaucacucagauu

SEQ ID NO: 35212 - RNA, 21 nt, RNAi
uuuguuucguuuagugagucu

SEQ ID NO: 35213 - DNA, 21 bp, Homo sapiens
gagtgcattattagcagaagc

SEQ ID NO: 35214 - RNA, 21 nt, RNAi
gugcauuauuagcagaagcuu

SEQ ID NO: 35215 - RNA, 21 nt, RNAi
uucacguaauaaucgucuucg

SEQ ID NO: 35216 - DNA, 21 bp, Homo sapiens
gaagccagaagtgattattct

SEQ ID NO: 35217 - RNA, 21 nt, RNAi
agccagaagugauuauucuuu

SEQ ID NO: 35218 - RNA, 21 nt, RNAi
uuucggucuucacuaauaaga

SEQ ID NO: 35219 - DNA, 21 bp, Homo sapiens
gaagtgattattctgaagctg

SEQ ID NO: 35220 - RNA, 21 nt, RNAi
agugauuauucugaagcuguu

SEQ ID NO: 35221 - RNA, 21 nt, RNAi
uuucacuaauaagacuucgac

SEQ ID NO: 35222 - DNA, 21 bp, Homo sapiens
gattattctgaagctgctaag

SEQ ID NO: 35223 - RNA, 21 nt, RNAi
uuauucugaagcugcuaaguu

SEQ ID NO: 35224 - RNA, 21 nt, RNAi
uuaauaagacuucgacgauuc

SEQ ID NO: 35225 - DNA, 21 bp, Homo sapiens
gaagctgctaagcagtatgat

SEQ ID NO: 35226 - RNA, 21 nt, RNAi
agcugcuaagcaguaugauuu

SEQ ID NO: 35227 - RNA, 21 nt, RNAi
uuucgacgauucgucauacua

SEQ ID NO: 35228 - DNA, 21 bp, Homo sapiens
gatgaggctctcaataaacaa

SEQ ID NO: 35229 - RNA, 21 nt, RNAi
ugaggcucucaauaaacaauu

SEQ ID NO: 35230 - RNA, 21 nt, RNAi
uuacuccgagaguuauuuguu

SEQ ID NO: 35231 - DNA, 21 bp, Homo sapiens
gaggctctcaataaacaagac

SEQ ID NO: 35232 - RNA, 21 nt, RNAi
ggcucucaauaaacaagacuu

SEQ ID NO: 35233 - RNA, 21 nt, RNAi
uuccgagaguuauuuguucug

SEQ ID NO: 35234 - DNA, 21 bp, Homo sapiens
gactgttacaaccaccttgct

SEQ ID NO: 35235 - RNA, 21 nt, RNAi
cuguuacaaccaccuugcuuu

SEQ ID NO: 35236 - RNA, 21 nt, RNAi
uugacaauguugguggaacga

SEQ ID NO: 35237 - DNA, 21 bp, Homo sapiens
gagtggaaatcacttgaatac

SEQ ID NO: 35238 - RNA, 21 nt, RNAi
guggaaaucacuugaauacuu

SEQ ID NO: 35239 - RNA, 21 nt, RNAi
uucaccuuuagugaacuuaug

SEQ ID NO: 35240 - DNA, 21 bp, Homo sapiens
gaaatcacttgaatactgttc

SEQ ID NO: 35241 - RNA, 21 nt, RNAi
aaucacuugaauacuguucuu

SEQ ID NO: 35242 - RNA, 21 nt, RNAi
uuuuagugaacuuaugacaag

SEQ ID NO: 35243 - DNA, 21 bp, Homo sapiens
gaatactgttctacagccagt

SEQ ID NO: 35244 - RNA, 21 nt, RNAi
auacuguucuacagccaguuu

SEQ ID NO: 35245 - RNA, 21 nt, RNAi
uuuaugacaagaugucgguca

SEQ ID NO: 35246 - DNA, 21 bp, Homo sapiens
gaaacatatctaccttacatg

SEQ ID NO: 35247 - RNA, 21 nt, RNAi
aacauaucuaccuuacauguu

SEQ ID NO: 35248 - RNA, 21 nt, RNAi
uuuuguauagauggaauguac

SEQ ID NO: 35249 - DNA, 21 bp, Homo sapiens
gatccgcagcaagctgaagct

SEQ ID NO: 35250 - RNA, 21 nt, RNAi
uccgcagcaagcugaagcuuu

SEQ ID NO: 35251 - RNA, 21 nt, RNAi
uuaggcgucguucgacuucga

SEQ ID NO: 35252 - DNA, 21 bp, Homo sapiens
gagctccagaaggcgattcta

SEQ ID NO: 35253 - RNA, 21 nt, RNAi
gcuccagaaggcgauucuauu

SEQ ID NO: 35254 - RNA, 21 nt, RNAi
uucgaggucuuccgcuaagau

SEQ ID NO: 35255 - DNA, 21 bp, Homo sapiens
gaaggcgattctagagcttca

SEQ ID NO: 35256 - RNA, 21 nt, RNAi
aggcgauucuagagcuucauu

SEQ ID NO: 35257 - RNA, 21 nt, RNAi
uuuccgcuaagaucucgaagu

SEQ ID NO: 35258 - DNA, 21 bp, Homo sapiens
gattctagagcttcattacag

SEQ ID NO: 35259 - RNA, 21 nt, RNAi
uucuagagcuucauuacaguu

SEQ ID NO: 35260 - RNA, 21 nt, RNAi
uuaagaucucgaaguaauguc

SEQ ID NO: 35261 - DNA, 21 bp, Homo sapiens
gagcttcattacagtcaagag

SEQ ID NO: 35262 - RNA, 21 nt, RNAi
gcuucauuacagucaagaguu

SEQ ID NO: 35263 - RNA, 21 nt, RNAi
uucgaaguaaugucaguucuc

SEQ ID NO: 35264 - DNA, 21 bp, Homo sapiens
gagctgagtctgctttacctc

SEQ ID NO: 35265 - RNA, 21 nt, RNAi
gcugagucugcuuuaccucuu

SEQ ID NO: 35266 - RNA, 21 nt, RNAi
uucgacucagacgaaauggag

SEQ ID NO: 35267 - DNA, 21 bp, Homo sapiens
gagtctgctttacctcctgca

SEQ ID NO: 35268 - RNA, 21 nt, RNAi
gucugcuuuaccuccugcauu

SEQ ID NO: 35269 - RNA, 21 nt, RNAi
uucagacgaaauggaggacgu

SEQ ID NO: 35270 - DNA, 21 bp, Homo sapiens
gatgatgttgacagagccaaa

SEQ ID NO: 35271 - RNA, 21 nt, RNAi
ugauguugacagagccaaauu

SEQ ID NO: 35272 - RNA, 21 nt, RNAi
uuacuacaacugucucgguuu

SEQ ID NO: 35273 - DNA, 21 bp, Homo sapiens
gatgttgacagagccaaatat

SEQ ID NO: 35274 - RNA, 21 nt, RNAi
uguugacagagccaaauauuu

SEQ ID NO: 35275 - RNA, 21 nt, RNAi
uuacaacugucucgguuuaua

SEQ ID NO: 35276 - DNA, 21 bp, Homo sapiens
gacagagccaaatattacatt

SEQ ID NO: 35277 - RNA, 21 nt, RNAi
cagagccaaauauuacauuuu

SEQ ID NO: 35278 - RNA, 21 nt, RNAi
uugucucgguuuauaauguaa

SEQ ID NO: 35279 - DNA, 21 bp, Homo sapiens
gatgtcctcttacaccaaagt

SEQ ID NO: 35280 - RNA, 21 nt, RNAi
uguccucuuacaccaaaguuu

SEQ ID NO: 35281 - RNA, 21 nt, RNAi
uuacaggagaaugugguuuca

SEQ ID NO: 35282 - DNA, 21 bp, Homo sapiens
gactcaccaaattgcagtctg

SEQ ID NO: 35283 - RNA, 21 nt, RNAi
cucaccaaauugcagucuguu

SEQ ID NO: 35284 - RNA, 21 nt, RNAi
uugagugguuuaacgucagac

SEQ ID NO: 35285 - DNA, 21 bp, Homo sapiens
gaaattcaggagttcatcagc

SEQ ID NO: 35286 - RNA, 21 nt, RNAi
aauucaggaguucaucagcuu

SEQ ID NO: 35287 - RNA, 21 nt, RNAi
uuuuaaguccucaaguagucg

SEQ ID NO: 35288 - DNA, 21 bp, Homo sapiens
gagttcatcagctttataagc

SEQ ID NO: 35289 - RNA, 21 nt, RNAi
guucaucagcuuuauaagcuu

SEQ ID NO: 35290 - RNA, 21 nt, RNAi
uucaaguagucgaaauauucg

SEQ ID NO: 35291 - DNA, 21 bp, Homo sapiens
gagacttctgaacacctggac

SEQ ID NO: 35292 - RNA, 21 nt, RNAi
gacuucugaacaccuggacuu

SEQ ID NO: 35293 - RNA, 21 nt, RNAi
uucugaagacuuguggaccug

SEQ ID NO: 35294 - DNA, 21 bp, Homo sapiens
gacttctgaacacctggacaa

SEQ ID NO: 35295 - RNA, 21 nt, RNAi
cuucugaacaccuggacaauu

SEQ ID NO: 35296 - RNA, 21 nt, RNAi
uugaagacuuguggaccuguu

SEQ ID NO: 35297 - DNA, 21 bp, Homo sapiens
gaacacctggacaaacagata

SEQ ID NO: 35298 - RNA, 21 nt, RNAi
acaccuggacaaacagauauu

SEQ ID NO: 35299 - RNA, 21 nt, RNAi
uuuguggaccuguuugucuau

SEQ ID NO: 35300 - DNA, 21 bp, Homo sapiens
gacaaacagatatccagatgc

SEQ ID NO: 35301 - RNA, 21 nt, RNAi
caaacagauauccagaugcuu

SEQ ID NO: 35302 - RNA, 21 nt, RNAi
uuguuugucuauaggucuacg

SEQ ID NO: 35303 - DNA, 21 bp, Homo sapiens
gatgacatcatcacaaatcga

SEQ ID NO: 35304 - RNA, 21 nt, RNAi
ugacaucaucacaaaucgauu

SEQ ID NO: 35305 - RNA, 21 nt, RNAi
uuacuguaguaguguuuagcu

SEQ ID NO: 35306 - DNA, 21 bp, Homo sapiens
gacatcatcacaaatcgatgt

SEQ ID NO: 35307 - RNA, 21 nt, RNAi
caucaucacaaaucgauguuu

SEQ ID NO: 35308 - RNA, 21 nt, RNAi
uuguaguaguguuuagcuaca

SEQ ID NO: 35309 - DNA, 21 bp, Homo sapiens
gaatgtggatcaagatggaga

SEQ ID NO: 35310 - RNA, 21 nt, RNAi
auguggaucaagauggagauu

SEQ ID NO: 35311 - RNA, 21 nt, RNAi
uuuacaccuaguucuaccucu

SEQ ID NO: 35312 - DNA, 21 bp, Homo sapiens
gacaggatggaagtgcaagag

SEQ ID NO: 35313 - RNA, 21 nt, RNAi
caggauggaagugcaagaguu

SEQ ID NO: 35314 - RNA, 21 nt, RNAi
uuguccuaccuucacguucuc

SEQ ID NO: 35315 - DNA, 21 bp, Homo sapiens
gatggaagtgcaagagcagga

SEQ ID NO: 35316 - RNA, 21 nt, RNAi
uggaagugcaagagcaggauu

SEQ ID NO: 35317 - RNA, 21 nt, RNAi
uuaccuucacguucucguccu

SEQ ID NO: 35318 - DNA, 21 bp, Homo sapiens
gaagtgcaagagcaggaagaa

SEQ ID NO: 35319 - RNA, 21 nt, RNAi
agugcaagagcaggaagaauu

SEQ ID NO: 35320 - RNA, 21 nt, RNAi
uuucacguucucguccuucuu

SEQ ID NO: 35321 - DNA, 21 bp, Homo sapiens
gagcaggaagaagatatcagc

SEQ ID NO: 35322 - RNA, 21 nt, RNAi
gcaggaagaagauaucagcuu

SEQ ID NO: 35323 - RNA, 21 nt, RNAi
uucguccuucuucuauagucg

SEQ ID NO: 35324 - DNA, 21 bp, Homo sapiens
gaagcagaacaatttctcact

SEQ ID NO: 35325 - RNA, 21 nt, RNAi
agcagaacaauuucucacuuu

SEQ ID NO: 35326 - RNA, 21 nt, RNAi
uuucgucuuguuaaagaguga

SEQ ID NO: 35327 - DNA, 21 bp, Homo sapiens
gaacaatttctcacttgctat

SEQ ID NO: 35328 - RNA, 21 nt, RNAi
acaauuucucacuugcuauuu

SEQ ID NO: 35329 - RNA, 21 nt, RNAi
uuuguuaaagagugaacgaua

SEQ ID NO: 35330 - DNA, 21 bp, Homo sapiens
gaaactactgaaggagctgca

SEQ ID NO: 35331 - RNA, 21 nt, RNAi
aacuacugaaggagcugcauu

SEQ ID NO: 35332 - RNA, 21 nt, RNAi
uuuugaugacuuccucgacgu

SEQ ID NO: 35333 - DNA, 21 bp, Homo sapiens
gaaggagctgcataaagagtc

SEQ ID NO: 35334 - RNA, 21 nt, RNAi
aggagcugcauaaagagucuu

SEQ ID NO: 35335 - RNA, 21 nt, RNAi
uuuccucgacguauuucucag

SEQ ID NO: 35336 - DNA, 21 bp, Homo sapiens
gagacgattggctggtgagct

SEQ ID NO: 35337 - RNA, 21 nt, RNAi
gacgauuggcuggugagcuuu

SEQ ID NO: 35338 - RNA, 21 nt, RNAi
uucugcuaaccgaccacucga

SEQ ID NO: 35339 - DNA, 21 bp, Homo sapiens
gacgattggctggtgagctgg

SEQ ID NO: 35340 - RNA, 21 nt, RNAi
cgauuggcuggugagcugguu

SEQ ID NO: 35341 - RNA, 21 nt, RNAi
uugcuaaccgaccacucgacc

SEQ ID NO: 35342 - DNA, 21 bp, Homo sapiens
gagcaggtgctcactgtgctg

SEQ ID NO: 35343 - RNA, 21 nt, RNAi
gcaggugcucacugugcuguu

SEQ ID NO: 35344 - RNA, 21 nt, RNAi
uucguccacgagugacacgac

SEQ ID NO: 35345 - DNA, 21 bp, Homo sapiens
gatgagaacaacgtgtcaagc

SEQ ID NO: 35346 - RNA, 21 nt, RNAi
ugagaacaacgugucaagcuu

SEQ ID NO: 35347 - RNA, 21 nt, RNAi
uuacucuuguugcacaguucg

SEQ ID NO: 35348 - DNA, 21 bp, Homo sapiens
gagaacaacgtgtcaagctac

SEQ ID NO: 35349 - RNA, 21 nt, RNAi
gaacaacgugucaagcuacuu

SEQ ID NO: 35350 - RNA, 21 nt, RNAi
uucuuguugcacaguucgaug

SEQ ID NO: 35351 - DNA, 21 bp, Homo sapiens
gaacaacgtgtcaagctactt

SEQ ID NO: 35352 - RNA, 21 nt, RNAi
acaacgugucaagcuacuuuu

SEQ ID NO: 35353 - RNA, 21 nt, RNAi
uuuguugcacaguucgaugaa

SEQ ID NO: 35354 - DNA, 20 bp, Homo sapiens
gatcatagcgaatgctctca

SEQ ID NO: 35355 - RNA, 20 nt, RNAi
ucauagcgaaugcucucauu

SEQ ID NO: 35356 - RNA, 20 nt, RNAi
uuaguaucgcuuacgagagu

SEQ ID NO: 35357 - DNA, 20 bp, Homo sapiens
gaatgctctcagcagtgagc

SEQ ID NO: 35358 - RNA, 20 nt, RNAi
augcucucagcagugagcuu

SEQ ID NO: 35359 - RNA, 20 nt, RNAi
uuuacgagagucgucacucg

SEQ ID NO: 35360 - DNA, 21 bp, Homo sapiens
gagccagcctgccttgctgaa

SEQ ID NO: 35361 - RNA, 21 nt, RNAi
gccagccugccuugcugaauu

SEQ ID NO: 35362 - RNA, 21 nt, RNAi
uucggucggacggaacgacuu

SEQ ID NO: 35363 - DNA, 21 bp, Homo sapiens
gaaatcgaggaggacaaggct

SEQ ID NO: 35364 - RNA, 21 nt, RNAi
aaucgaggaggacaaggcuuu

SEQ ID NO: 35365 - RNA, 21 nt, RNAi
uuuuagcuccuccuguuccga

SEQ ID NO: 35366 - DNA, 21 bp, Homo sapiens
gaggaggacaaggctagaaga

SEQ ID NO: 35367 - RNA, 21 nt, RNAi
ggaggacaaggcuagaagauu

SEQ ID NO: 35368 - RNA, 21 nt, RNAi
uuccuccuguuccgaucuucu

SEQ ID NO: 35369 - DNA, 21 bp, Homo sapiens
gaggacaaggctagaagaatc

SEQ ID NO: 35370 - RNA, 21 nt, RNAi
ggacaaggcuagaagaaucuu

SEQ ID NO: 35371 - RNA, 21 nt, RNAi
uuccuguuccgaucuucuuag

SEQ ID NO: 35372 - DNA, 21 bp, Homo sapiens
gacaaggctagaagaatctta

SEQ ID NO: 35373 - RNA, 21 nt, RNAi
caaggcuagaagaaucuuauu

SEQ ID NO: 35374 - RNA, 21 nt, RNAi
uuguuccgaucuucuuagaau

SEQ ID NO: 35375 - DNA, 20 bp, Homo sapiens
gaagaatcttagagctttct

SEQ ID NO: 35376 - RNA, 20 nt, RNAi
agaaucuuagagcuuucuuu

SEQ ID NO: 35377 - RNA, 20 nt, RNAi
uuucuuagaaucucgaaaga

SEQ ID NO: 35378 - DNA, 20 bp, Homo sapiens
gaatcttagagctttctgga

SEQ ID NO: 35379 - RNA, 20 nt, RNAi
aucuuagagcuuucuggauu

SEQ ID NO: 35380 - RNA, 20 nt, RNAi
uuuagaaucucgaaagaccu

SEQ ID NO: 35381 - DNA, 21 bp, Homo sapiens
gagctttctggatccagttca

SEQ ID NO: 35382 - RNA, 21 nt, RNAi
gcuuucuggauccaguucauu

SEQ ID NO: 35383 - RNA, 21 nt, RNAi
uucgaaagaccuaggucaagu

SEQ ID NO: 35384 - DNA, 21 bp, Homo sapiens
gatccagttcagaggattcag

SEQ ID NO: 35385 - RNA, 21 nt, RNAi
uccaguucagaggauucaguu

SEQ ID NO: 35386 - RNA, 21 nt, RNAi
uuaggucaagucuccuaaguc

SEQ ID NO: 35387 - DNA, 21 bp, Homo sapiens
gaggattcagagaaggtgatc

SEQ ID NO: 35388 - RNA, 21 nt, RNAi
ggauucagagaaggugaucuu

SEQ ID NO: 35389 - RNA, 21 nt, RNAi
uuccuaagucucuuccacuag

SEQ ID NO: 35390 - DNA, 21 bp, Homo sapiens
gattcagagaaggtgatcgcg

SEQ ID NO: 35391 - RNA, 21 nt, RNAi
uucagagaaggugaucgcguu

SEQ ID NO: 35392 - RNA, 21 nt, RNAi
uuaagucucuuccacuagcgc

SEQ ID NO: 35393 - DNA, 20 bp, Homo sapiens
gagagcattccagcacctct

SEQ ID NO: 35394 - RNA, 20 nt, RNAi
gagcauuccagcaccucuuu

SEQ ID NO: 35395 - RNA, 20 nt, RNAi
uucucguaaggucguggaga

SEQ ID NO: 35396 - DNA, 20 bp, Homo sapiens
gagcattccagcacctctct

SEQ ID NO: 35397 - RNA, 20 nt, RNAi
gcauuccagcaccucucuuu

SEQ ID NO: 35398 - RNA, 20 nt, RNAi
uucguaaggucguggagaga

SEQ ID NO: 35399 - DNA, 21 bp, Homo sapiens
gattgatgcttacatgacgct

SEQ ID NO: 35400 - RNA, 21 nt, RNAi
uugaugcuuacaugacgcuuu

SEQ ID NO: 35401 - RNA, 21 nt, RNAi
uuaacuacgaauguacugcga

SEQ ID NO: 35402 - DNA, 21 bp, Homo sapiens
gatgcttacatgacgctggca

SEQ ID NO: 35403 - RNA, 21 nt, RNAi
ugcuuacaugacgcuggcauu

SEQ ID NO: 35404 - RNA, 21 nt, RNAi
uuacgaauguacugcgaccgu

SEQ ID NO: 35405 - DNA, 20 bp, Homo sapiens
gacgctggcagatttctgtg

SEQ ID NO: 35406 - RNA, 20 nt, RNAi
cgcuggcagauuucuguguu

SEQ ID NO: 35407 - RNA, 20 nt, RNAi
uugcgaccgucuaaagacac

SEQ ID NO: 35408 - DNA, 20 bp, Homo sapiens
gatttctgtgaccaacagct

SEQ ID NO: 35409 - RNA, 20 nt, RNAi
uuucugugaccaacagcuuu

SEQ ID NO: 35410 - RNA, 20 nt, RNAi
uuaaagacacugguugucga

SEQ ID NO: 35411 - DNA, 21 bp, Homo sapiens
gaccaacagctgcgcaaggag

SEQ ID NO: 35412 - RNA, 21 nt, RNAi
ccaacagcugcgcaaggaguu

SEQ ID NO: 35413 - RNA, 21 nt, RNAi
uugguugucgacgcguuccuc

SEQ ID NO: 35414 - DNA, 21 bp, Homo sapiens
gaggaagagaatgcatcagtt

SEQ ID NO: 35415 - RNA, 21 nt, RNAi
ggaagagaaugcaucaguuuu

SEQ ID NO: 35416 - RNA, 21 nt, RNAi
uuccuucucuuacguagucaa

SEQ ID NO: 35417 - DNA, 21 bp, Homo sapiens
gaagagaatgcatcagttatt

SEQ ID NO: 35418 - RNA, 21 nt, RNAi
agagaaugcaucaguuauuuu

SEQ ID NO: 35419 - RNA, 21 nt, RNAi
uuucucuuacguagucaauaa

SEQ ID NO: 35420 - DNA, 21 bp, Homo sapiens
gagaatgcatcagttattgat

SEQ ID NO: 35421 - RNA, 21 nt, RNAi
gaaugcaucaguuauugauuu

SEQ ID NO: 35422 - RNA, 21 nt, RNAi
uucuuacguagucaauaacua

SEQ ID NO: 35423 - DNA, 21 bp, Homo sapiens
gaatgcatcagttattgattc

SEQ ID NO: 35424 - RNA, 21 nt, RNAi
augcaucaguuauugauucuu

SEQ ID NO: 35425 - RNA, 21 nt, RNAi
uuuacguagucaauaacuaag

SEQ ID NO: 35426 - DNA, 20 bp, Homo sapiens
gattctgcagaactgcaggc

SEQ ID NO: 35427 - RNA, 20 nt, RNAi
uucugcagaacugcaggcuu

SEQ ID NO: 35428 - RNA, 20 nt, RNAi
uuaagacgucuugacguccg

SEQ ID NO: 35429 - DNA, 20 bp, Homo sapiens
gaactgcaggcgtatccagc

SEQ ID NO: 35430 - RNA, 20 nt, RNAi
acugcaggcguauccagcuu

SEQ ID NO: 35431 - RNA, 20 nt, RNAi
uuugacguccgcauaggucg

SEQ ID NO: 35432 - DNA, 20 bp, Homo sapiens
gaagccagattgaagtttcc

SEQ ID NO: 35433 - RNA, 20 nt, RNAi
agccagauugaaguuuccuu

SEQ ID NO: 35434 - RNA, 20 nt, RNAi
uuucggucuaacuucaaagg

SEQ ID NO: 35435 - DNA, 21 bp, Homo sapiens
gattgaagtttcctagattac

SEQ ID NO: 35436 - RNA, 21 nt, RNAi
uugaaguuuccuagauuacuu

SEQ ID NO: 35437 - RNA, 21 nt, RNAi
uuaacuucaaaggaucuaaug

SEQ ID NO: 35438 - DNA, 21 bp, Homo sapiens
gaagtttcctagattacttca

SEQ ID NO: 35439 - RNA, 21 nt, RNAi
aguuuccuagauuacuucauu

SEQ ID NO: 35440 - RNA, 21 nt, RNAi
uuucaaaggaucuaaugaagu

SEQ ID NO: 35441 - DNA, 21 bp, Homo sapiens
gattatagaacggtatccaga

SEQ ID NO: 35442 - RNA, 21 nt, RNAi
uuauagaacgguauccagauu

SEQ ID NO: 35443 - RNA, 21 nt, RNAi
uuaauaucuugccauaggucu

SEQ ID NO: 35444 - DNA, 21 bp, Homo sapiens
gaacggtatccagaggagact

SEQ ID NO: 35445 - RNA, 21 nt, RNAi
acgguauccagaggagacuuu

SEQ ID NO: 35446 - RNA, 21 nt, RNAi
uuugccauaggucuccucuga

SEQ ID NO: 35447 - DNA, 20 bp, Homo sapiens
gaggagactttgagcctcat

SEQ ID NO: 35448 - RNA, 20 nt, RNAi
ggagacuuugagccucauuu

SEQ ID NO: 35449 - RNA, 20 nt, RNAi
uuccucugaaacucggagua

SEQ ID NO: 35450 - DNA, 20 bp, Homo sapiens
gagactttgagcctcatgac

SEQ ID NO: 35451 - RNA, 20 nt, RNAi
gacuuugagccucaugacuu

SEQ ID NO: 35452 - RNA, 20 nt, RNAi
uucugaaacucggaguacug

SEQ ID NO: 35453 - DNA, 20 bp, Homo sapiens
gactttgagcctcatgacaa

SEQ ID NO: 35454 - RNA, 20 nt, RNAi
cuuugagccucaugacaauu

SEQ ID NO: 35455 - RNA, 20 nt, RNAi
uugaaacucggaguacuguu

SEQ ID NO: 35456 - DNA, 20 bp, Homo sapiens
gatcagccacatggtggcct

SEQ ID NO: 35457 - RNA, 20 nt, RNAi
ucagccacaugguggccuuu

SEQ ID NO: 35458 - RNA, 20 nt, RNAi
uuagucgguguaccaccgga

SEQ ID NO: 35459 - DNA, 21 bp, Homo sapiens
gacaaagaccaagccgttgct

SEQ ID NO: 35460 - RNA, 21 nt, RNAi
caaagaccaagccguugcuuu

SEQ ID NO: 35461 - RNA, 21 nt, RNAi
uuguuucugguucggcaacga

SEQ ID NO: 35462 - DNA, 21 bp, Homo sapiens
gaccaagccgttgctgttcag

SEQ ID NO: 35463 - RNA, 21 nt, RNAi
ccaagccguugcuguucaguu

SEQ ID NO: 35464 - RNA, 21 nt, RNAi
uugguucggcaacgacaaguc

SEQ ID NO: 35465 - DNA, 20 bp, Homo sapiens
gaaagctattccttcaagga

SEQ ID NO: 35466 - RNA, 20 nt, RNAi
aagcuauuccuucaaggauu

SEQ ID NO: 35467 - RNA, 20 nt, RNAi
uuuucgauaaggaaguuccu

SEQ ID NO: 35468 - DNA, 21 bp, Homo sapiens
gatacttctactggtcataag

SEQ ID NO: 35469 - RNA, 21 nt, RNAi
uacuucuacuggucauaaguu

SEQ ID NO: 35470 - RNA, 21 nt, RNAi
uuaugaagaugaccaguauuc

SEQ ID NO: 35471 - DNA, 21 bp, Homo sapiens
gaataaggagtttgtggcaag

SEQ ID NO: 35472 - RNA, 21 nt, RNAi
auaaggaguuuguggcaaguu

SEQ ID NO: 35473 - RNA, 21 nt, RNAi
uuuauuccucaaacaccguuc

SEQ ID NO: 35474 - DNA, 21 bp, Homo sapiens
gagtttgtggcaaggattaaa

SEQ ID NO: 35475 - RNA, 21 nt, RNAi
guuuguggcaaggauuaaauu

SEQ ID NO: 35476 - RNA, 21 nt, RNAi
uucaaacaccguuccuaauuu

SEQ ID NO: 35477 - DNA, 21 bp, Homo sapiens
gatcaaggaggagtgattcaa

SEQ ID NO: 35478 - RNA, 21 nt, RNAi
ucaaggaggagugauucaauu

SEQ ID NO: 35479 - RNA, 21 nt, RNAi
uuaguuccuccucacuaaguu

SEQ ID NO: 35480 - DNA, 20 bp, Homo sapiens
gatcagctctctaatcctga

SEQ ID NO: 35481 - RNA, 20 nt, RNAi
ucagcucucuaauccugauu

SEQ ID NO: 35482 - RNA, 20 nt, RNAi
uuagucgagagauuaggacu

SEQ ID NO: 35483 - DNA, 21 bp, Homo sapiens
gaactgctctttaaggattgg

SEQ ID NO: 35484 - RNA, 21 nt, RNAi
acugcucuuuaaggauugguu

SEQ ID NO: 35485 - RNA, 21 nt, RNAi
uuugacgagaaauuccuaacc

SEQ ID NO: 35486 - DNA, 21 bp, Homo sapiens
gattggagcaatgatgtaaga

SEQ ID NO: 35487 - RNA, 21 nt, RNAi
uuggagcaaugauguaagauu

SEQ ID NO: 35488 - RNA, 21 nt, RNAi
uuaaccucguuacuacauucu

SEQ ID NO: 35489 - DNA, 21 bp, Homo sapiens
gagcaatgatgtaagagctga

SEQ ID NO: 35490 - RNA, 21 nt, RNAi
gcaaugauguaagagcugauu

SEQ ID NO: 35491 - RNA, 21 nt, RNAi
uucguuacuacauucucgacu

SEQ ID NO: 35492 - DNA, 21 bp, Homo sapiens
gatgtaagagctgaactagca

SEQ ID NO: 35493 - RNA, 21 nt, RNAi
uguaagagcugaacuagcauu

SEQ ID NO: 35494 - RNA, 21 nt, RNAi
uuacauucucgacuugaucgu

SEQ ID NO: 35495 - DNA, 21 bp, Homo sapiens
gaaagaatgtatgcagccttg

SEQ ID NO: 35496 - RNA, 21 nt, RNAi
aagaauguaugcagccuuguu

SEQ ID NO: 35497 - RNA, 21 nt, RNAi
uuuucuuacauacgucggaac

SEQ ID NO: 35498 - DNA, 21 bp, Homo sapiens
gaaggaagtttattcagactt

SEQ ID NO: 35499 - RNA, 21 nt, RNAi
aggaaguuuauucagacuuuu

SEQ ID NO: 35500 - RNA, 21 nt, RNAi
uuuccuucaaauaagucugaa

SEQ ID NO: 35501 - DNA, 21 bp, Homo sapiens
gaaaggaggttctaaactact

SEQ ID NO: 35502 - RNA, 21 nt, RNAi
aaggagguucuaaacuacuuu

SEQ ID NO: 35503 - RNA, 21 nt, RNAi
uuuuccuccaagauuugauga

SEQ ID NO: 35504 - DNA, 21 bp, Homo sapiens
gaggttctaaactactgagaa

SEQ ID NO: 35505 - RNA, 21 nt, RNAi
gguucuaaacuacugagaauu

SEQ ID NO: 35506 - RNA, 21 nt, RNAi
uuccaagauuugaugacucuu

SEQ ID NO: 35507 - DNA, 21 bp, Homo sapiens
gagaatgaagctcagtgactt

SEQ ID NO: 35508 - RNA, 21 nt, RNAi
gaaugaagcucagugacuuuu

SEQ ID NO: 35509 - RNA, 21 nt, RNAi
uucuuacuucgagucacugaa

SEQ ID NO: 35510 - DNA, 21 bp, Homo sapiens
gaatgaagctcagtgacttca

SEQ ID NO: 35511 - RNA, 21 nt, RNAi
augaagcucagugacuucauu

SEQ ID NO: 35512 - RNA, 21 nt, RNAi
uuuacuucgagucacugaagu

SEQ ID NO: 35513 - DNA, 20 bp, Homo sapiens
gaagctcagtgacttcaacg

SEQ ID NO: 35514 - RNA, 20 nt, RNAi
agcucagugacuucaacguu

SEQ ID NO: 35515 - RNA, 20 nt, RNAi
uuucgagucacugaaguugc

SEQ ID NO: 35516 - DNA, 20 bp, Homo sapiens
gacttcaacgacattaccaa

SEQ ID NO: 35517 - RNA, 20 nt, RNAi
cuucaacgacauuaccaauu

SEQ ID NO: 35518 - RNA, 20 nt, RNAi
uugaaguugcuguaaugguu

SEQ ID NO: 35519 - DNA, 21 bp, Homo sapiens
gacattaccaacatgctactt

SEQ ID NO: 35520 - RNA, 21 nt, RNAi
cauuaccaacaugcuacuuuu

SEQ ID NO: 35521 - RNA, 21 nt, RNAi
uuguaaugguuguacgaugaa

SEQ ID NO: 35522 - DNA, 20 bp, Homo sapiens
gaatctgaaagaatgttcac

SEQ ID NO: 35523 - RNA, 20 nt, RNAi
aucugaaagaauguucacuu

SEQ ID NO: 35524 - RNA, 20 nt, RNAi
uuuagacuuucuuacaagug

SEQ ID NO: 35525 - DNA, 21 bp, Homo sapiens
gatgagcgacttcaaagtgga

SEQ ID NO: 35526 - RNA, 21 nt, RNAi
ugagcgacuucaaaguggauu

SEQ ID NO: 35527 - RNA, 21 nt, RNAi
uuacucgcugaaguuucaccu

SEQ ID NO: 35528 - DNA, 21 bp, Homo sapiens
gagcgacttcaaagtggagtt

SEQ ID NO: 35529 - RNA, 21 nt, RNAi
gcgacuucaaaguggaguuuu

SEQ ID NO: 35530 - RNA, 21 nt, RNAi
uucgcugaaguuucaccucaa

SEQ ID NO: 35531 - DNA, 21 bp, Homo sapiens
gacttcaaagtggagttcctg

SEQ ID NO: 35532 - RNA, 21 nt, RNAi
cuucaaaguggaguuccuguu

SEQ ID NO: 35533 - RNA, 21 nt, RNAi
uugaaguuucaccucaaggac

SEQ ID NO: 35534 - DNA, 21 bp, Homo sapiens
gagttcctgagaaatgagctg

SEQ ID NO: 35535 - RNA, 21 nt, RNAi
guuccugagaaaugagcuguu

SEQ ID NO: 35536 - RNA, 21 nt, RNAi
uucaaggacucuuuacucgac

SEQ ID NO: 35537 - DNA, 20 bp, Homo sapiens
gagaaatgagctggagattc

SEQ ID NO: 35538 - RNA, 20 nt, RNAi
gaaaugagcuggagauucuu

SEQ ID NO: 35539 - RNA, 20 nt, RNAi
uucuuuacucgaccucuaag

SEQ ID NO: 35540 - DNA, 21 bp, Homo sapiens
gaaagccattgccagagtacc

SEQ ID NO: 35541 - RNA, 21 nt, RNAi
aagccauugccagaguaccuu

SEQ ID NO: 35542 - RNA, 21 nt, RNAi
uuuucgguaacggucucaugg

SEQ ID NO: 35543 - DNA, 21 bp, Homo sapiens
gagtaccacgtgcgaatcgcc

SEQ ID NO: 35544 - RNA, 21 nt, RNAi
guaccacgugcgaaucgccuu

SEQ ID NO: 35545 - RNA, 21 nt, RNAi
uucauggugcacgcuuagcgg

SEQ ID NO: 35546 - DNA, 21 bp, Homo sapiens
gacagtcatggcgtctctgcg

SEQ ID NO: 35547 - RNA, 21 nt, RNAi
cagucauggcgucucugcguu

SEQ ID NO: 35548 - RNA, 21 nt, RNAi
uugucaguaccgcagagacgc

SEQ ID NO: 35549 - DNA, 21 bp, Homo sapiens
gagcagctcttccaggtcatg

SEQ ID NO: 35550 - RNA, 21 nt, RNAi
gcagcucuuccaggucauguu

SEQ ID NO: 35551 - RNA, 21 nt, RNAi
uucgucgagaagguccaguac

SEQ ID NO: 35552 - DNA, 21 bp, Homo sapiens
gaggacctatagcgttgtgcc

SEQ ID NO: 35553 - RNA, 21 nt, RNAi
ggaccuauagcguugugccuu

SEQ ID NO: 35554 - RNA, 21 nt, RNAi
uuccuggauaucgcaacacgg

SEQ ID NO: 35555 - DNA, 20 bp, Homo sapiens
gacctccaggttaggattaa

SEQ ID NO: 35556 - RNA, 20 nt, RNAi
ccuccagguuaggauuaauu

SEQ ID NO: 35557 - RNA, 20 nt, RNAi
uuggagguccaauccuaauu

SEQ ID NO: 35558 - DNA, 21 bp, Homo sapiens
gattaattgagtggcttgaaa

SEQ ID NO: 35559 - RNA, 21 nt, RNAi
uuaauugaguggcuugaaauu

SEQ ID NO: 35560 - RNA, 21 nt, RNAi
uuaauuaacucaccgaacuuu

SEQ ID NO: 35561 - DNA, 21 bp, Homo sapiens
gaggagaaggcggcttacctg

SEQ ID NO: 35562 - RNA, 21 nt, RNAi
ggagaaggcggcuuaccuguu

SEQ ID NO: 35563 - RNA, 21 nt, RNAi
uuccucuuccgccgaauggac

SEQ ID NO: 35564 - DNA, 21 bp, Homo sapiens
gagaaggcggcttacctgagt

SEQ ID NO: 35565 - RNA, 21 nt, RNAi
gaaggcggcuuaccugaguuu

SEQ ID NO: 35566 - RNA, 21 nt, RNAi
uucuuccgccgaauggacuca

SEQ ID NO: 35567 - DNA, 21 bp, Homo sapiens
gaaggcggcttacctgagtga

SEQ ID NO: 35568 - RNA, 21 nt, RNAi
aggcggcuuaccugagugauu

SEQ ID NO: 35569 - RNA, 21 nt, RNAi
uuuccgccgaauggacucacu

SEQ ID NO: 35570 - DNA, 20 bp, Homo sapiens
gaatataaagattggctgac

SEQ ID NO: 35571 - RNA, 20 nt, RNAi
auauaaagauuggcugacuu

SEQ ID NO: 35572 - RNA, 20 nt, RNAi
uuuauauuucuaaccgacug

SEQ ID NO: 35573 - DNA, 21 bp, Homo sapiens
gatgttggagcttacatgcta

SEQ ID NO: 35574 - RNA, 21 nt, RNAi
uguuggagcuuacaugcuauu

SEQ ID NO: 35575 - RNA, 21 nt, RNAi
uuacaaccucgaauguacgau

SEQ ID NO: 35576 - DNA, 21 bp, Homo sapiens
gagcttacatgctaatgtata

SEQ ID NO: 35577 - RNA, 21 nt, RNAi
gcuuacaugcuaauguauauu

SEQ ID NO: 35578 - RNA, 21 nt, RNAi
uucgaauguacgauuacauau

SEQ ID NO: 35579 - DNA, 20 bp, Homo sapiens
gagaaagtaaagtgcctgct

SEQ ID NO: 35580 - RNA, 20 nt, RNAi
gaaaguaaagugccugcuuu

SEQ ID NO: 35581 - RNA, 20 nt, RNAi
uucuuucauuucacggacga

SEQ ID NO: 35582 - DNA, 20 bp, Homo sapiens
gaaagtaaagtgcctgctga

SEQ ID NO: 35583 - RNA, 20 nt, RNAi
aaguaaagugccugcugauu

SEQ ID NO: 35584 - RNA, 20 nt, RNAi
uuuucauuucacggacgacu

SEQ ID NO: 35585 - DNA, 21 bp, Homo sapiens
gatatgcatcagccactggat

SEQ ID NO: 35586 - RNA, 21 nt, RNAi
uaugcaucagccacuggauuu

SEQ ID NO: 35587 - RNA, 21 nt, RNAi
uuauacguagucggugaccua

SEQ ID NO: 35588 - DNA, 20 bp, Homo sapiens
gattggagacagacatctga

SEQ ID NO: 35589 - RNA, 20 nt, RNAi
uuggagacagacaucugauu

SEQ ID NO: 35590 - RNA, 20 nt, RNAi
uuaaccucugucuguagacu

SEQ ID NO: 35591 - DNA, 21 bp, Homo sapiens
gagacagacatctgaacaact

SEQ ID NO: 35592 - RNA, 21 nt, RNAi
gacagacaucugaacaacuuu

SEQ ID NO: 35593 - RNA, 21 nt, RNAi
uucugucuguagacuuguuga

SEQ ID NO: 35594 - DNA, 21 bp, Homo sapiens
gacagacatctgaacaacttt

SEQ ID NO: 35595 - RNA, 21 nt, RNAi
cagacaucugaacaacuuuuu

SEQ ID NO: 35596 - RNA, 21 nt, RNAi
uugucuguagacuuguugaaa

SEQ ID NO: 35597 - DNA, 21 bp, Homo sapiens
gacatctgaacaactttatgg

SEQ ID NO: 35598 - RNA, 21 nt, RNAi
caucugaacaacuuuaugguu

SEQ ID NO: 35599 - RNA, 21 nt, RNAi
uuguagacuuguugaaauacc

SEQ ID NO: 35600 - DNA, 21 bp, Homo sapiens
gaacaactttatggtggccat

SEQ ID NO: 35601 - RNA, 21 nt, RNAi
acaacuuuaugguggccauuu

SEQ ID NO: 35602 - RNA, 21 nt, RNAi
uuuguugaaauaccaccggua

SEQ ID NO: 35603 - DNA, 21 bp, Homo sapiens
gatccgctacacagtttctgc

SEQ ID NO: 35604 - RNA, 21 nt, RNAi
uccgcuacacaguuucugcuu

SEQ ID NO: 35605 - RNA, 21 nt, RNAi
uuaggcgaugugucaaagacg

SEQ ID NO: 35606 - DNA, 20 bp, Homo sapiens
gagttgatgccttttcggct

SEQ ID NO: 35607 - RNA, 20 nt, RNAi
guugaugccuuuucggcuuu

SEQ ID NO: 35608 - RNA, 20 nt, RNAi
uucaacuacggaaaagccga

SEQ ID NO: 35609 - DNA, 20 bp, Homo sapiens
gatgccttttcggctaactc

SEQ ID NO: 35610 - RNA, 20 nt, RNAi
ugccuuuucggcuaacucuu

SEQ ID NO: 35611 - RNA, 20 nt, RNAi
uuacggaaaagccgauugag

SEQ ID NO: 35612 - DNA, 21 bp, Homo sapiens
gatgttaccaatgaaagaaac

SEQ ID NO: 35613 - RNA, 21 nt, RNAi
uguuaccaaugaaagaaacuu

SEQ ID NO: 35614 - RNA, 21 nt, RNAi
uuacaaugguuacuuucuuug

SEQ ID NO: 35615 - DNA, 21 bp, Homo sapiens
gagaaagttagcaggtgccaa

SEQ ID NO: 35616 - RNA, 21 nt, RNAi
gaaaguuagcaggugccaauu

SEQ ID NO: 35617 - RNA, 21 nt, RNAi
uucuuucaaucguccacgguu

SEQ ID NO: 35618 - DNA, 21 bp, Homo sapiens
gaaagttagcaggtgccaatc

SEQ ID NO: 35619 - RNA, 21 nt, RNAi
aaguuagcaggugccaaucuu

SEQ ID NO: 35620 - RNA, 21 nt, RNAi
uuuucaaucguccacgguuag

SEQ ID NO: 35621 - DNA, 20 bp, Homo sapiens
gagactatgtggctgtggca

SEQ ID NO: 35622 - RNA, 20 nt, RNAi
gacuauguggcuguggcauu

SEQ ID NO: 35623 - RNA, 20 nt, RNAi
uucugauacaccgacaccgu

SEQ ID NO: 35624 - DNA, 20 bp, Homo sapiens
gactatgtggctgtggcacg

SEQ ID NO: 35625 - RNA, 20 nt, RNAi
cuauguggcuguggcacguu

SEQ ID NO: 35626 - RNA, 20 nt, RNAi
uugauacaccgacaccgugc

SEQ ID NO: 35627 - DNA, 21 bp, Homo sapiens
gaggaagcaaagatcacaaca

SEQ ID NO: 35628 - RNA, 21 nt, RNAi
ggaagcaaagaucacaacauu

SEQ ID NO: 35629 - RNA, 21 nt, RNAi
uuccuucguuucuaguguugu

SEQ ID NO: 35630 - DNA, 21 bp, Homo sapiens
gaagcaaagatcacaacattc

SEQ ID NO: 35631 - RNA, 21 nt, RNAi
agcaaagaucacaacauucuu

SEQ ID NO: 35632 - RNA, 21 nt, RNAi
uuucguuucuaguguuguaag

SEQ ID NO: 35633 - DNA, 20 bp, Homo sapiens
gaagagactcaagtgaagtg

SEQ ID NO: 35634 - RNA, 20 nt, RNAi
agagacucaagugaaguguu

SEQ ID NO: 35635 - RNA, 20 nt, RNAi
uuucucugaguucacuucac

SEQ ID NO: 35636 - DNA, 21 bp, Homo sapiens
gagactcaagtgaagtgcctg

SEQ ID NO: 35637 - RNA, 21 nt, RNAi
gacucaagugaagugccuguu

SEQ ID NO: 35638 - RNA, 21 nt, RNAi
uucugaguucacuucacggac

SEQ ID NO: 35639 - DNA, 21 bp, Homo sapiens
gactcaagtgaagtgcctgat

SEQ ID NO: 35640 - RNA, 21 nt, RNAi
cucaagugaagugccugauuu

SEQ ID NO: 35641 - RNA, 21 nt, RNAi
uugaguucacuucacggacua

SEQ ID NO: 35642 - DNA, 21 bp, Homo sapiens
gaagtgcctgatggaccaggc

SEQ ID NO: 35643 - RNA, 21 nt, RNAi
agugccugauggaccaggcuu

SEQ ID NO: 35644 - RNA, 21 nt, RNAi
uuucacggacuaccugguccg

SEQ ID NO: 35645 - DNA, 21 bp, Homo sapiens
tatttgtccggaagtcactca

SEQ ID NO: 35646 - RNA, 21 nt, RNAi
uuuguccggaagucacucauu

SEQ ID NO: 35647 - RNA, 21 nt, RNAi
uuaaacaggccuucagugagu

SEQ ID NO: 35648 - DNA, 21 bp, Homo sapiens
taagaacacttgtaccagtgt

SEQ ID NO: 35649 - RNA, 21 nt, RNAi
agaacacuuguaccaguguuu

SEQ ID NO: 35650 - RNA, 21 nt, RNAi
uuucuugugaacauggucaca

SEQ ID NO: 35651 - DNA, 21 bp, Homo sapiens
tagaagttctagactcatgga

SEQ ID NO: 35652 - RNA, 21 nt, RNAi
gaaguucuagacucauggauu

SEQ ID NO: 35653 - RNA, 21 nt, RNAi
uucuucaagaucugaguaccu

SEQ ID NO: 35654 - DNA, 21 bp, Homo sapiens
taaattctatggagaacttgc

SEQ ID NO: 35655 - RNA, 21 nt, RNAi
aauucuauggagaacuugcuu

SEQ ID NO: 35656 - RNA, 21 nt, RNAi
uuuuaagauaccucuugaacg

SEQ ID NO: 35657 - DNA, 21 bp, Homo sapiens
tatggagaacttgcattgaaa

SEQ ID NO: 35658 - RNA, 21 nt, RNAi
uggagaacuugcauugaaauu

SEQ ID NO: 35659 - RNA, 21 nt, RNAi
uuaccucuugaacguaacuuu

SEQ ID NO: 35660 - DNA, 21 bp, Homo sapiens
tatatgagctcctaggattat

SEQ ID NO: 35661 - RNA, 21 nt, RNAi
uaugagcuccuaggauuauuu

SEQ ID NO: 35662 - RNA, 21 nt, RNAi
uuauacucgaggauccuaaua

SEQ ID NO: 35663 - DNA, 21 bp, Homo sapiens
tatgagctcctaggattattg

SEQ ID NO: 35664 - RNA, 21 nt, RNAi
ugagcuccuaggauuauuguu

SEQ ID NO: 35665 - RNA, 21 nt, RNAi
uuacucgaggauccuaauaac

SEQ ID NO: 35666 - DNA, 21 bp, Homo sapiens
tacctgttctggcaggatgtc

SEQ ID NO: 35667 - RNA, 21 nt, RNAi
ccuguucuggcaggaugucuu

SEQ ID NO: 35668 - RNA, 21 nt, RNAi
uuggacaagaccguccuacag

SEQ ID NO: 35669 - DNA, 21 bp, Homo sapiens
taagtccatggaagaagatcc

SEQ ID NO: 35670 - RNA, 21 nt, RNAi
aguccauggaagaagauccuu

SEQ ID NO: 35671 - RNA, 21 nt, RNAi
uuucagguaccuucuucuagg

SEQ ID NO: 35672 - DNA, 21 bp, Homo sapiens
tactaaaggcaattcgtcctc

SEQ ID NO: 35673 - RNA, 21 nt, RNAi
cuaaaggcaauucguccucuu

SEQ ID NO: 35674 - RNA, 21 nt, RNAi
uugauuuccguuaagcaggag

SEQ ID NO: 35675 - DNA, 21 bp, Homo sapiens
taaaggcaattcgtcctcaga

SEQ ID NO: 35676 - RNA, 21 nt, RNAi
aaggcaauucguccucagauu

SEQ ID NO: 35677 - RNA, 21 nt, RNAi
uuuuccguuaagcaggagucu

SEQ ID NO: 35678 - DNA, 21 bp, Homo sapiens
tagcacctgccttctggacaa

SEQ ID NO: 35679 - RNA, 21 nt, RNAi
gcaccugccuucuggacaauu

SEQ ID NO: 35680 - RNA, 21 nt, RNAi
uucguggacggaagaccuguu

SEQ ID NO: 35681 - DNA, 21 bp, Homo sapiens
tacgtgtctctatttgaagtc

SEQ ID NO: 35682 - RNA, 21 nt, RNAi
cgugucucuauuugaagucuu

SEQ ID NO: 35683 - RNA, 21 nt, RNAi
uugcacagagauaaacuucag

SEQ ID NO: 35684 - DNA, 21 bp, Homo sapiens
taaactgcagtactttatgga

SEQ ID NO: 35685 - RNA, 21 nt, RNAi
aacugcaguacuuuauggauu

SEQ ID NO: 35686 - RNA, 21 nt, RNAi
uuuugacgucaugaaauaccu

SEQ ID NO: 35687 - DNA, 21 bp, Homo sapiens
tatggaatcatcagaaatgtg

SEQ ID NO: 35688 - RNA, 21 nt, RNAi
uggaaucaucagaaauguguu

SEQ ID NO: 35689 - RNA, 21 nt, RNAi
uuaccuuaguagucuuuacac

SEQ ID NO: 35690 - DNA, 21 bp, Homo sapiens
tatctattgctatccgtggat

SEQ ID NO: 35691 - RNA, 21 nt, RNAi
ucuauugcuauccguggauuu

SEQ ID NO: 35692 - RNA, 21 nt, RNAi
uuagauaacgauaggcaccua

SEQ ID NO: 35693 - DNA, 21 bp, Homo sapiens
tattgctatccgtggatatgg

SEQ ID NO: 35694 - RNA, 21 nt, RNAi
uugcuauccguggauaugguu

SEQ ID NO: 35695 - RNA, 21 nt, RNAi
uuaacgauaggcaccuauacc

SEQ ID NO: 35696 - DNA, 21 bp, Homo sapiens
tacgttgagctcattcagcgc

SEQ ID NO: 35697 - RNA, 21 nt, RNAi
cguugagcucauucagcgcuu

SEQ ID NO: 35698 - RNA, 21 nt, RNAi
uugcaacucgaguaagucgcg

SEQ ID NO: 35699 - DNA, 21 bp, Homo sapiens
tatcagatgccaagcttcctc

SEQ ID NO: 35700 - RNA, 21 nt, RNAi
ucagaugccaagcuuccucuu

SEQ ID NO: 35701 - RNA, 21 nt, RNAi
uuagucuacgguucgaaggag

SEQ ID NO: 35702 - DNA, 21 bp, Homo sapiens
taccttgacacagttcctgag

SEQ ID NO: 35703 - RNA, 21 nt, RNAi
ccuugacacaguuccugaguu

SEQ ID NO: 35704 - RNA, 21 nt, RNAi
uuggaacugugucaaggacuc

SEQ ID NO: 35705 - DNA, 21 bp, Homo sapiens
tatactccagttctggagcac

SEQ ID NO: 35706 - RNA, 21 nt, RNAi
uacuccaguucuggagcacuu

SEQ ID NO: 35707 - RNA, 21 nt, RNAi
uuaugaggucaagaccucgug

SEQ ID NO: 35708 - DNA, 21 bp, Homo sapiens
tactccagttctggagcacct

SEQ ID NO: 35709 - RNA, 21 nt, RNAi
cuccaguucuggagcaccuuu

SEQ ID NO: 35710 - RNA, 21 nt, RNAi
uugaggucaagaccucgugga

SEQ ID NO: 35711 - DNA, 21 bp, Homo sapiens
tagtgaaggtgttcctagctt

SEQ ID NO: 35712 - RNA, 21 nt, RNAi
gugaagguguuccuagcuuuu

SEQ ID NO: 35713 - RNA, 21 nt, RNAi
uucacuuccacaaggaucgaa

SEQ ID NO: 35714 - DNA, 21 bp, Homo sapiens
tatgttctaaaccagtggtcc

SEQ ID NO: 35715 - RNA, 21 nt, RNAi
uguucuaaaccagugguccuu

SEQ ID NO: 35716 - RNA, 21 nt, RNAi
uuacaagauuuggucaccagg

SEQ ID NO: 35717 - DNA, 21 bp, Homo sapiens
taaaccagtggtccttccaaa

SEQ ID NO: 35718 - RNA, 21 nt, RNAi
aaccagugguccuuccaaauu

SEQ ID NO: 35719 - RNA, 21 nt, RNAi
uuuuggucaccaggaagguuu

SEQ ID NO: 35720 - DNA, 21 bp, Homo sapiens
tacaaagactacgtggatctc

SEQ ID NO: 35721 - RNA, 21 nt, RNAi
caaagacuacguggaucucuu

SEQ ID NO: 35722 - RNA, 21 nt, RNAi
uuguuucugaugcaccuagag

SEQ ID NO: 35723 - DNA, 21 bp, Homo sapiens
tacgtggatctcttcagacat

SEQ ID NO: 35724 - RNA, 21 nt, RNAi
cguggaucucuucagacauuu

SEQ ID NO: 35725 - RNA, 21 nt, RNAi
uugcaccuagagaagucugua

SEQ ID NO: 35726 - DNA, 21 bp, Homo sapiens
tacacttgaaatacagactgt

SEQ ID NO: 35727 - RNA, 21 nt, RNAi
cacuugaaauacagacuguuu

SEQ ID NO: 35728 - RNA, 21 nt, RNAi
uugugaacuuuaugucugaca

SEQ ID NO: 35729 - DNA, 21 bp, Homo sapiens
taacttgcatccagctaaacc

SEQ ID NO: 35730 - RNA, 21 nt, RNAi
acuugcauccagcuaaaccuu

SEQ ID NO: 35731 - RNA, 21 nt, RNAi
uuugaacguaggucgauuugg

SEQ ID NO: 35732 - DNA, 21 bp, Homo sapiens
tacagtaagaaatgccaagaa

SEQ ID NO: 35733 - RNA, 21 nt, RNAi
caguaagaaaugccaagaauu

SEQ ID NO: 35734 - RNA, 21 nt, RNAi
uugucauucuuuacgguucuu

SEQ ID NO: 35735 - DNA, 21 bp, Homo sapiens
tagtccaaagagtctgaaaca

SEQ ID NO: 35736 - RNA, 21 nt, RNAi
guccaaagagucugaaacauu

SEQ ID NO: 35737 - RNA, 21 nt, RNAi
uucagguuucucagacuuugu

SEQ ID NO: 35738 - DNA, 21 bp, Homo sapiens
tagagcctacgttcctgcact

SEQ ID NO: 35739 - RNA, 21 nt, RNAi
gagccuacguuccugcacuuu

SEQ ID NO: 35740 - RNA, 21 nt, RNAi
uucucggaugcaaggacguga

SEQ ID NO: 35741 - DNA, 21 bp, Homo sapiens
tacgttcctgcactgcagatg

SEQ ID NO: 35742 - RNA, 21 nt, RNAi
cguuccugcacugcagauguu

SEQ ID NO: 35743 - RNA, 21 nt, RNAi
uugcaaggacgugacgucuac

SEQ ID NO: 35744 - DNA, 21 bp, Homo sapiens
taggcctgaatgctctagaag

SEQ ID NO: 35745 - RNA, 21 nt, RNAi
ggccugaaugcucuagaaguu

SEQ ID NO: 35746 - RNA, 21 nt, RNAi
uuccggacuuacgagaucuuc

SEQ ID NO: 35747 - DNA, 21 bp, Homo sapiens
tattgacagacatgtaatgca

SEQ ID NO: 35748 - RNA, 21 nt, RNAi
uugacagacauguaaugcauu

SEQ ID NO: 35749 - RNA, 21 nt, RNAi
uuaacugucuguacauuacgu

SEQ ID NO: 35750 - DNA, 21 bp, Homo sapiens
taatgcagccttattacaaag

SEQ ID NO: 35751 - RNA, 21 nt, RNAi
augcagccuuauuacaaaguu

SEQ ID NO: 35752 - RNA, 21 nt, RNAi
uuuacgucggaauaauguuuc

SEQ ID NO: 35753 - DNA, 21 bp, Homo sapiens
tacctgaagacttcagccttg

SEQ ID NO: 35754 - RNA, 21 nt, RNAi
ccugaagacuucagccuuguu

SEQ ID NO: 35755 - RNA, 21 nt, RNAi
uuggacuucugaagucggaac

SEQ ID NO: 35756 - DNA, 21 bp, Homo sapiens
taaagtggtgttaaagcatct

SEQ ID NO: 35757 - RNA, 21 nt, RNAi
aagugguguuaaagcaucuuu

SEQ ID NO: 35758 - RNA, 21 nt, RNAi
uuuucaccacaauuucguaga

SEQ ID NO: 35759 - DNA, 21 bp, Homo sapiens
taaagcatctgaagaagacaa

SEQ ID NO: 35760 - RNA, 21 nt, RNAi
aagcaucugaagaagacaauu

SEQ ID NO: 35761 - RNA, 21 nt, RNAi
uuuucguagacuucuucuguu

SEQ ID NO: 35762 - DNA, 21 bp, Homo sapiens
tagagtagtacaaatgcttgg

SEQ ID NO: 35763 - RNA, 21 nt, RNAi
gaguaguacaaaugcuugguu

SEQ ID NO: 35764 - RNA, 21 nt, RNAi
uucucaucauguuuacgaacc

SEQ ID NO: 35765 - DNA, 21 bp, Homo sapiens
tagtacaaatgcttggatctc

SEQ ID NO: 35766 - RNA, 21 nt, RNAi
guacaaaugcuuggaucucuu

SEQ ID NO: 35767 - RNA, 21 nt, RNAi
uucauguuuacgaaccuagag

SEQ ID NO: 35768 - DNA, 21 bp, Homo sapiens
tacaaatgcttggatctctag

SEQ ID NO: 35769 - RNA, 21 nt, RNAi
caaaugcuuggaucucuaguu

SEQ ID NO: 35770 - RNA, 21 nt, RNAi
uuguuuacgaaccuagagauc

SEQ ID NO: 35771 - DNA, 21 bp, Homo sapiens
tagagagatgaaacctgtcat

SEQ ID NO: 35772 - RNA, 21 nt, RNAi
gagagaugaaaccugucauuu

SEQ ID NO: 35773 - RNA, 21 nt, RNAi
uucucucuacuuuggacagua

SEQ ID NO: 35774 - DNA, 21 bp, Homo sapiens
tagcgctcacagccagtgaca

SEQ ID NO: 35775 - RNA, 21 nt, RNAi
gcgcucacagccagugacauu

SEQ ID NO: 35776 - RNA, 21 nt, RNAi
uucgcgagugucggucacugu

SEQ ID NO: 35777 - DNA, 21 bp, Homo sapiens
taaagttgcagcctgtgaact

SEQ ID NO: 35778 - RNA, 21 nt, RNAi
aaguugcagccugugaacuuu

SEQ ID NO: 35779 - RNA, 21 nt, RNAi
uuuucaacgucggacacuuga

SEQ ID NO: 35780 - DNA, 21 bp, Homo sapiens
taccagctctataagcggacg

SEQ ID NO: 35781 - RNA, 21 nt, RNAi
ccagcucuauaagcggacguu

SEQ ID NO: 35782 - RNA, 21 nt, RNAi
uuggucgagauauucgccugc

SEQ ID NO: 35783 - DNA, 21 bp, Homo sapiens
tataagcggacgtttcctgtg

SEQ ID NO: 35784 - RNA, 21 nt, RNAi
uaagcggacguuuccuguguu

SEQ ID NO: 35785 - RNA, 21 nt, RNAi
uuauucgccugcaaaggacac

SEQ ID NO: 35786 - DNA, 21 bp, Homo sapiens
taagcggacgtttcctgtgct

SEQ ID NO: 35787 - RNA, 21 nt, RNAi
agcggacguuuccugugcuuu

SEQ ID NO: 35788 - RNA, 21 nt, RNAi
uuucgccugcaaaggacacga

SEQ ID NO: 35789 - DNA, 21 bp, Homo sapiens
tatgagccactagttatgcag

SEQ ID NO: 35790 - RNA, 21 nt, RNAi
ugagccacuaguuaugcaguu

SEQ ID NO: 35791 - RNA, 21 nt, RNAi
uuacucggugaucaauacguc

SEQ ID NO: 35792 - DNA, 21 bp, Homo sapiens
tagttatgcagctgattcact

SEQ ID NO: 35793 - RNA, 21 nt, RNAi
guuaugcagcugauucacuuu

SEQ ID NO: 35794 - RNA, 21 nt, RNAi
uucaauacgucgacuaaguga

SEQ ID NO: 35795 - DNA, 21 bp, Homo sapiens
tatgcagctgattcactggtt

SEQ ID NO: 35796 - RNA, 21 nt, RNAi
ugcagcugauucacugguuuu

SEQ ID NO: 35797 - RNA, 21 nt, RNAi
uuacgucgacuaagugaccaa

SEQ ID NO: 35798 - DNA, 21 bp, Homo sapiens
tactgttgccttactagaagc

SEQ ID NO: 35799 - RNA, 21 nt, RNAi
cuguugccuuacuagaagcuu

SEQ ID NO: 35800 - RNA, 21 nt, RNAi
uugacaacggaaugaucuucg

SEQ ID NO: 35801 - DNA, 21 bp, Homo sapiens
tactagaagctatattggatg

SEQ ID NO: 35802 - RNA, 21 nt, RNAi
cuagaagcuauauuggauguu

SEQ ID NO: 35803 - RNA, 21 nt, RNAi
uugaucuucgauauaaccuac

SEQ ID NO: 35804 - DNA, 21 bp, Homo sapiens
tagaagctatattggatggaa

SEQ ID NO: 35805 - RNA, 21 nt, RNAi
gaagcuauauuggauggaauu

SEQ ID NO: 35806 - RNA, 21 nt, RNAi
uucuucgauauaaccuaccuu

SEQ ID NO: 35807 - DNA, 21 bp, Homo sapiens
tatattggatggaattgtgga

SEQ ID NO: 35808 - RNA, 21 nt, RNAi
uauuggauggaauuguggauu

SEQ ID NO: 35809 - RNA, 21 nt, RNAi
uuauaaccuaccuuaacaccu

SEQ ID NO: 35810 - DNA, 21 bp, Homo sapiens
tattggatggaattgtggacc

SEQ ID NO: 35811 - RNA, 21 nt, RNAi
uuggauggaauuguggaccuu

SEQ ID NO: 35812 - RNA, 21 nt, RNAi
uuaaccuaccuuaacaccugg

SEQ ID NO: 35813 - DNA, 21 bp, Homo sapiens
taagcaaataacaccacagca

SEQ ID NO: 35814 - RNA, 21 nt, RNAi
agcaaauaacaccacagcauu

SEQ ID NO: 35815 - RNA, 21 nt, RNAi
uuucguuuauuguggugucgu

SEQ ID NO: 35816 - DNA, 21 bp, Homo sapiens
taacaccacagcagcaggaga

SEQ ID NO: 35817 - RNA, 21 nt, RNAi
acaccacagcagcaggagauu

SEQ ID NO: 35818 - RNA, 21 nt, RNAi
uuuguggugucgucguccucu

SEQ ID NO: 35819 - DNA, 21 bp, Homo sapiens
tatacatggagagtctggcct

SEQ ID NO: 35820 - RNA, 21 nt, RNAi
uacauggagagucuggccuuu

SEQ ID NO: 35821 - RNA, 21 nt, RNAi
uuauguaccucucagaccgga

SEQ ID NO: 35822 - DNA, 21 bp, Homo sapiens
tacatggagagtctggcctta

SEQ ID NO: 35823 - RNA, 21 nt, RNAi
cauggagagucuggccuuauu

SEQ ID NO: 35824 - RNA, 21 nt, RNAi
uuguaccucucagaccggaau

SEQ ID NO: 35825 - DNA, 21 bp, Homo sapiens
tagcacatgcagatgagaagt

SEQ ID NO: 35826 - RNA, 21 nt, RNAi
gcacaugcagaugagaaguuu

SEQ ID NO: 35827 - RNA, 21 nt, RNAi
uucguguacgucuacucuuca

SEQ ID NO: 35828 - DNA, 21 bp, Homo sapiens
taggtacaattcaacagtgtt

SEQ ID NO: 35829 - RNA, 21 nt, RNAi
gguacaauucaacaguguuuu

SEQ ID NO: 35830 - RNA, 21 nt, RNAi
uuccauguuaaguugucacaa

SEQ ID NO: 35831 - DNA, 21 bp, Homo sapiens
tacaattcaacagtgttgtga

SEQ ID NO: 35832 - RNA, 21 nt, RNAi
caauucaacaguguugugauu

SEQ ID NO: 35833 - RNA, 21 nt, RNAi
uuguuaaguugucacaacacu

SEQ ID NO: 35834 - DNA, 21 bp, Homo sapiens
taaagcaaagaaacgacgttt

SEQ ID NO: 35835 - RNA, 21 nt, RNAi
aagcaaagaaacgacguuuuu

SEQ ID NO: 35836 - RNA, 21 nt, RNAi
uuuucguuucuuugcugcaaa

SEQ ID NO: 35837 - DNA, 21 bp, Homo sapiens
tattggatctggtcaagtggc

SEQ ID NO: 35838 - RNA, 21 nt, RNAi
uuggaucuggucaaguggcuu

SEQ ID NO: 35839 - RNA, 21 nt, RNAi
uuaaccuagaccaguucaccg

SEQ ID NO: 35840 - DNA, 21 bp, Homo sapiens
taaattcgttcctttattgcc

SEQ ID NO: 35841 - RNA, 21 nt, RNAi
aauucguuccuuuauugccuu

SEQ ID NO: 35842 - RNA, 21 nt, RNAi
uuuuaagcaaggaaauaacgg

SEQ ID NO: 35843 - DNA, 21 bp, Homo sapiens
taatttgtggctgaaagatgt

SEQ ID NO: 35844 - RNA, 21 nt, RNAi
auuuguggcugaaagauguuu

SEQ ID NO: 35845 - RNA, 21 nt, RNAi
uuuaaacaccgacuuucuaca

SEQ ID NO: 35846 - DNA, 21 bp, Homo sapiens
tatgctggctggacctgctcc

SEQ ID NO: 35847 - RNA, 21 nt, RNAi
ugcuggcuggaccugcuccuu

SEQ ID NO: 35848 - RNA, 21 nt, RNAi
uuacgaccgaccuggacgagg

SEQ ID NO: 35849 - DNA, 21 bp, Homo sapiens
tacaacacgttcattggcgag

SEQ ID NO: 35850 - RNA, 21 nt, RNAi
caacacguucauuggcgaguu

SEQ ID NO: 35851 - RNA, 21 nt, RNAi
uuguugugcaaguaaccgcuc

SEQ ID NO: 35852 - DNA, 21 bp, Homo sapiens
taggagcgctccaggtcctag

SEQ ID NO: 35853 - RNA, 21 nt, RNAi
ggagcgcuccagguccuaguu

SEQ ID NO: 35854 - RNA, 21 nt, RNAi
uuccucgcgagguccaggauc

SEQ ID NO: 35855 - DNA, 21 bp, Homo sapiens
tagaaagcattgccatgcatg

SEQ ID NO: 35856 - RNA, 21 nt, RNAi
gaaagcauugccaugcauguu

SEQ ID NO: 35857 - RNA, 21 nt, RNAi
uucuuucguaacgguacguac

SEQ ID NO: 35858 - DNA, 21 bp, Homo sapiens
tacaactacagcaaatgcacc

SEQ ID NO: 35859 - RNA, 21 nt, RNAi
caacuacagcaaaugcaccuu

SEQ ID NO: 35860 - RNA, 21 nt, RNAi
uuguugaugucguuuacgugg

SEQ ID NO: 35861 - DNA, 21 bp, Homo sapiens
tacagcaaatgcaccgttgtg

SEQ ID NO: 35862 - RNA, 21 nt, RNAi
cagcaaaugcaccguuguguu

SEQ ID NO: 35863 - RNA, 21 nt, RNAi
uugucguuuacguggcaacac

SEQ ID NO: 35864 - DNA, 21 bp, Homo sapiens
tatggagtttaccacgactct

SEQ ID NO: 35865 - RNA, 21 nt, RNAi
uggaguuuaccacgacucuuu

SEQ ID NO: 35866 - RNA, 21 nt, RNAi
uuaccucaaauggugcugaga

SEQ ID NO: 35867 - DNA, 21 bp, Homo sapiens
taccacgactctgctaaacac

SEQ ID NO: 35868 - RNA, 21 nt, RNAi
ccacgacucugcuaaacacuu

SEQ ID NO: 35869 - RNA, 21 nt, RNAi
uuggugcugagacgauuugug

SEQ ID NO: 35870 - DNA, 21 bp, Homo sapiens
taatacacacctgatgagagt

SEQ ID NO: 35871 - RNA, 21 nt, RNAi
auacacaccugaugagaguuu

SEQ ID NO: 35872 - RNA, 21 nt, RNAi
uuuauguguggacuacucuca

SEQ ID NO: 35873 - DNA, 21 bp, Homo sapiens
tacacacctgatgagagtcct

SEQ ID NO: 35874 - RNA, 21 nt, RNAi
cacaccugaugagaguccuuu

SEQ ID NO: 35875 - RNA, 21 nt, RNAi
uuguguggacuacucucagga

SEQ ID NO: 35876 - DNA, 21 bp, Homo sapiens
taggtttcaacatcggagacg

SEQ ID NO: 35877 - RNA, 21 nt, RNAi
gguuucaacaucggagacguu

SEQ ID NO: 35878 - RNA, 21 nt, RNAi
uuccaaaguuguagccucugc

SEQ ID NO: 35879 - DNA, 21 bp, Homo sapiens
tatggctcatcttcctgatgt

SEQ ID NO: 35880 - RNA, 21 nt, RNAi
uggcucaucuuccugauguuu

SEQ ID NO: 35881 - RNA, 21 nt, RNAi
uuaccgaguagaaggacuaca

SEQ ID NO: 35882 - DNA, 21 bp, Homo sapiens
tacaaagatatcctagagacc

SEQ ID NO: 35883 - RNA, 21 nt, RNAi
caaagauauccuagagaccuu

SEQ ID NO: 35884 - RNA, 21 nt, RNAi
uuguuucuauaggaucucugg

SEQ ID NO: 35885 - DNA, 21 bp, Homo sapiens
taacagcacagagcattgagg

SEQ ID NO: 35886 - RNA, 21 nt, RNAi
acagcacagagcauugagguu

SEQ ID NO: 35887 - RNA, 21 nt, RNAi
uuugucgugucucguaacucc

SEQ ID NO: 35888 - DNA, 21 bp, Homo sapiens
taaacagcttcacagagctgg

SEQ ID NO: 35889 - RNA, 21 nt, RNAi
aacagcuucacagagcugguu

SEQ ID NO: 35890 - RNA, 21 nt, RNAi
uuuugucgaagugucucgacc

SEQ ID NO: 35891 - DNA, 21 bp, Homo sapiens
taatatattaccgtctcagtc

SEQ ID NO: 35892 - RNA, 21 nt, RNAi
auauauuaccgucucagucuu

SEQ ID NO: 35893 - RNA, 21 nt, RNAi
uuuauauaauggcagagucag

SEQ ID NO: 35894 - DNA, 21 bp, Homo sapiens
tatattaccgtctcagtccac

SEQ ID NO: 35895 - RNA, 21 nt, RNAi
uauuaccgucucaguccacuu

SEQ ID NO: 35896 - RNA, 21 nt, RNAi
uuauaauggcagagucaggug

SEQ ID NO: 35897 - DNA, 21 bp, Homo sapiens
tattaccgtctcagtccacag

SEQ ID NO: 35898 - RNA, 21 nt, RNAi
uuaccgucucaguccacaguu

SEQ ID NO: 35899 - RNA, 21 nt, RNAi
uuaauggcagagucagguguc

SEQ ID NO: 35900 - DNA, 21 bp, Homo sapiens
taccgtctcagtccacagatt

SEQ ID NO: 35901 - RNA, 21 nt, RNAi
ccgucucaguccacagauuuu

SEQ ID NO: 35902 - RNA, 21 nt, RNAi
uuggcagagucaggugucuaa

SEQ ID NO: 35903 - DNA, 21 bp, Homo sapiens
tagacctcagttgtaagcagc

SEQ ID NO: 35904 - RNA, 21 nt, RNAi
gaccucaguuguaagcagcuu

SEQ ID NO: 35905 - RNA, 21 nt, RNAi
uucuggagucaacauucgucg

SEQ ID NO: 35906 - DNA, 21 bp, Homo sapiens
taagcagctggccagcggact

SEQ ID NO: 35907 - RNA, 21 nt, RNAi
agcagcuggccagcggacuuu

SEQ ID NO: 35908 - RNA, 21 nt, RNAi
uuucgucgaccggucgccuga

SEQ ID NO: 35909 - DNA, 21 bp, Homo sapiens
tatagcttgttctcagaaacg

SEQ ID NO: 35910 - RNA, 21 nt, RNAi
uagcuuguucucagaaacguu

SEQ ID NO: 35911 - RNA, 21 nt, RNAi
uuaucgaacaagagucuuugc

SEQ ID NO: 35912 - DNA, 21 bp, Homo sapiens
tagcttgttctcagaaacgat

SEQ ID NO: 35913 - RNA, 21 nt, RNAi
gcuuguucucagaaacgauuu

SEQ ID NO: 35914 - RNA, 21 nt, RNAi
uucgaacaagagucuuugcua

SEQ ID NO: 35915 - DNA, 21 bp, Homo sapiens
tattggagctcatgcagtctt

SEQ ID NO: 35916 - RNA, 21 nt, RNAi
uuggagcucaugcagucuuuu

SEQ ID NO: 35917 - RNA, 21 nt, RNAi
uuaaccucgaguacgucagaa

SEQ ID NO: 35918 - DNA, 21 bp, Homo sapiens
tacaattctgcaacactggaa

SEQ ID NO: 35919 - RNA, 21 nt, RNAi
caauucugcaacacuggaauu

SEQ ID NO: 35920 - RNA, 21 nt, RNAi
uuguuaagacguugugaccuu

SEQ ID NO: 35921 - DNA, 21 bp, Homo sapiens
tatattagtctacttgctgac

SEQ ID NO: 35922 - RNA, 21 nt, RNAi
uauuagucuacuugcugacuu

SEQ ID NO: 35923 - RNA, 21 nt, RNAi
uuauaaucagaugaacgacug

SEQ ID NO: 35924 - DNA, 21 bp, Homo sapiens
tattagtctacttgctgacac

SEQ ID NO: 35925 - RNA, 21 nt, RNAi
uuagucuacuugcugacacuu

SEQ ID NO: 35926 - RNA, 21 nt, RNAi
uuaaucagaugaacgacugug

SEQ ID NO: 35927 - DNA, 21 bp, Homo sapiens
tagtctacttgctgacacaaa

SEQ ID NO: 35928 - RNA, 21 nt, RNAi
gucuacuugcugacacaaauu

SEQ ID NO: 35929 - RNA, 21 nt, RNAi
uucagaugaacgacuguguuu

SEQ ID NO: 35930 - DNA, 21 bp, Homo sapiens
tacttgctgacacaaagctgg

SEQ ID NO: 35931 - RNA, 21 nt, RNAi
cuugcugacacaaagcugguu

SEQ ID NO: 35932 - RNA, 21 nt, RNAi
uugaacgacuguguuucgacc

SEQ ID NO: 35933 - DNA, 21 bp, Homo sapiens
tagacgtgttctggagcagct

SEQ ID NO: 35934 - RNA, 21 nt, RNAi
gacguguucuggagcagcuuu

SEQ ID NO: 35935 - RNA, 21 nt, RNAi
uucugcacaagaccucgucga

SEQ ID NO: 35936 - DNA, 21 bp, Homo sapiens
taattatgtggactgcatgaa

SEQ ID NO: 35937 - RNA, 21 nt, RNAi
auuauguggacugcaugaauu

SEQ ID NO: 35938 - RNA, 21 nt, RNAi
uuuaauacaccugacguacuu

SEQ ID NO: 35939 - DNA, 21 bp, Homo sapiens
tagatgcattggaattatctc

SEQ ID NO: 35940 - RNA, 21 nt, RNAi
gaugcauuggaauuaucucuu

SEQ ID NO: 35941 - RNA, 21 nt, RNAi
uucuacguaaccuuaauagag

SEQ ID NO: 35942 - DNA, 21 bp, Homo sapiens
tatgttgttggaattgatgac

SEQ ID NO: 35943 - RNA, 21 nt, RNAi
uguuguuggaauugaugacuu

SEQ ID NO: 35944 - RNA, 21 nt, RNAi
uuacaacaaccuuaacuacug

SEQ ID NO: 35945 - DNA, 21 bp, Homo sapiens
tatttcaatccagtttcagga

SEQ ID NO: 35946 - RNA, 21 nt, RNAi
uuucaauccaguuucaggauu

SEQ ID NO: 35947 - RNA, 21 nt, RNAi
uuaaaguuaggucaaaguccu

SEQ ID NO: 35948 - DNA, 21 bp, Homo sapiens
taggccttctggaaagcgtgt

SEQ ID NO: 35949 - RNA, 21 nt, RNAi
ggccuucuggaaagcguguuu

SEQ ID NO: 35950 - RNA, 21 nt, RNAi
uuccggaagaccuuucgcaca

SEQ ID NO: 35951 - DNA, 21 bp, Homo sapiens
tatgaaatgttcaggaaggat

SEQ ID NO: 35952 - RNA, 21 nt, RNAi
ugaaauguucaggaaggauuu

SEQ ID NO: 35953 - RNA, 21 nt, RNAi
uuacuuuacaaguccuuccua

SEQ ID NO: 35954 - DNA, 21 bp, Homo sapiens
taagtttcacacgccagtcct

SEQ ID NO: 35955 - RNA, 21 nt, RNAi
aguuucacacgccaguccuuu

SEQ ID NO: 35956 - RNA, 21 nt, RNAi
uuucaaagugugcggucagga

SEQ ID NO: 35957 - DNA, 21 bp, Homo sapiens
tagcctggatgctttgagaga

SEQ ID NO: 35958 - RNA, 21 nt, RNAi
gccuggaugcuuugagagauu

SEQ ID NO: 35959 - RNA, 21 nt, RNAi
uucggaccuacgaaacucucu

SEQ ID NO: 35960 - DNA, 21 bp, Homo sapiens
tacctttgatactcaaatcac

SEQ ID NO: 35961 - RNA, 21 nt, RNAi
ccuuugauacucaaaucacuu

SEQ ID NO: 35962 - RNA, 21 nt, RNAi
uuggaaacuaugaguuuagug

SEQ ID NO: 35963 - DNA, 21 bp, Homo sapiens
tactcaaatcaccaagaagat

SEQ ID NO: 35964 - RNA, 21 nt, RNAi
cucaaaucaccaagaagauuu

SEQ ID NO: 35965 - RNA, 21 nt, RNAi
uugaguuuagugguucuucua

SEQ ID NO: 35966 - DNA, 21 bp, Homo sapiens
tactataagattctagacgtg

SEQ ID NO: 35967 - RNA, 21 nt, RNAi
cuauaagauucuagacguguu

SEQ ID NO: 35968 - RNA, 21 nt, RNAi
uugauauucuaagaucugcac

SEQ ID NO: 35969 - DNA, 21 bp, Homo sapiens
tataagattctagacgtgatg

SEQ ID NO: 35970 - RNA, 21 nt, RNAi
uaagauucuagacgugauguu

SEQ ID NO: 35971 - RNA, 21 nt, RNAi
uuauucuaagaucugcacuac

SEQ ID NO: 35972 - DNA, 21 bp, Homo sapiens
taagattctagacgtgatgta

SEQ ID NO: 35973 - RNA, 21 nt, RNAi
agauucuagacgugauguauu

SEQ ID NO: 35974 - RNA, 21 nt, RNAi
uuucuaagaucugcacuacau

SEQ ID NO: 35975 - DNA, 21 bp, Homo sapiens
tagacgtgatgtattctcgcc

SEQ ID NO: 35976 - RNA, 21 nt, RNAi
gacgugauguauucucgccuu

SEQ ID NO: 35977 - RNA, 21 nt, RNAi
uucugcacuacauaagagcgg

SEQ ID NO: 35978 - DNA, 21 bp, Homo sapiens
tacagaaggaaatgaacttac

SEQ ID NO: 35979 - RNA, 21 nt, RNAi
cagaaggaaaugaacuuacuu

SEQ ID NO: 35980 - RNA, 21 nt, RNAi
uugucuuccuuuacuugaaug

SEQ ID NO: 35981 - DNA, 21 bp, Homo sapiens
taaattgtgctacgatgcatt

SEQ ID NO: 35982 - RNA, 21 nt, RNAi
aauugugcuacgaugcauuuu

SEQ ID NO: 35983 - RNA, 21 nt, RNAi
uuuuaacacgaugcuacguaa

SEQ ID NO: 35984 - DNA, 21 bp, Homo sapiens
tacgatgcatttacagagaac

SEQ ID NO: 35985 - RNA, 21 nt, RNAi
cgaugcauuuacagagaacuu

SEQ ID NO: 35986 - RNA, 21 nt, RNAi
uugcuacguaaaugucucuug

SEQ ID NO: 35987 - DNA, 21 bp, Homo sapiens
tacagagaacatggcaggaga

SEQ ID NO: 35988 - RNA, 21 nt, RNAi
cagagaacauggcaggagauu

SEQ ID NO: 35989 - RNA, 21 nt, RNAi
uugucucuuguaccguccucu

SEQ ID NO: 35990 - DNA, 21 bp, Homo sapiens
taccattgtgcagcatacaac

SEQ ID NO: 35991 - RNA, 21 nt, RNAi
ccauugugcagcauacaacuu

SEQ ID NO: 35992 - RNA, 21 nt, RNAi
uugguaacacgucguauguug

SEQ ID NO: 35993 - DNA, 21 bp, Homo sapiens
tacaactgcgccatatctgtc

SEQ ID NO: 35994 - RNA, 21 nt, RNAi
caacugcgccauaucugucuu

SEQ ID NO: 35995 - RNA, 21 nt, RNAi
uuguugacgcgguauagacag

SEQ ID NO: 35996 - DNA, 21 bp, Homo sapiens
tatctgtcatctgctgtgtct

SEQ ID NO: 35997 - RNA, 21 nt, RNAi
ucugucaucugcugugucuuu

SEQ ID NO: 35998 - RNA, 21 nt, RNAi
uuagacaguagacgacacaga

SEQ ID NO: 35999 - DNA, 21 bp, Homo sapiens
tagaagttgaggttcctatgg

SEQ ID NO: 36000 - RNA, 21 nt, RNAi
gaaguugagguuccuaugguu

SEQ ID NO: 36001 - RNA, 21 nt, RNAi
uucuucaacuccaaggauacc

SEQ ID NO: 36002 - DNA, 21 bp, Homo sapiens
taggaaagaagccagagaagc

SEQ ID NO: 36003 - RNA, 21 nt, RNAi
ggaaagaagccagagaagcuu

SEQ ID NO: 36004 - RNA, 21 nt, RNAi
uuccuuucuucggucucuucg

SEQ ID NO: 36005 - DNA, 21 bp, Homo sapiens
tagacctgccactggtcgttt

SEQ ID NO: 36006 - RNA, 21 nt, RNAi
gaccugccacuggucguuuuu

SEQ ID NO: 36007 - RNA, 21 nt, RNAi
uucuggacggugaccagcaaa

SEQ ID NO: 36008 - DNA, 21 bp, Homo sapiens
tagtaccattaaatatccgtc

SEQ ID NO: 36009 - RNA, 21 nt, RNAi
guaccauuaaauauccgucuu

SEQ ID NO: 36010 - RNA, 21 nt, RNAi
uucaugguaauuuauaggcag

SEQ ID NO: 36011 - DNA, 21 bp, Homo sapiens
taccattaaatatccgtctct

SEQ ID NO: 36012 - RNA, 21 nt, RNAi
ccauuaaauauccgucucuuu

SEQ ID NO: 36013 - RNA, 21 nt, RNAi
uugguaauuuauaggcagaga

SEQ ID NO: 36014 - DNA, 21 bp, Homo sapiens
taaatatccgtctcttcttag

SEQ ID NO: 36015 - RNA, 21 nt, RNAi
aauauccgucucuucuuaguu

SEQ ID NO: 36016 - RNA, 21 nt, RNAi
uuuuauaggcagagaagaauc

SEQ ID NO: 36017 - DNA, 21 bp, Homo sapiens
tatccgtctcttcttagccaa

SEQ ID NO: 36018 - RNA, 21 nt, RNAi
uccgucucuucuuagccaauu

SEQ ID NO: 36019 - RNA, 21 nt, RNAi
uuaggcagagaagaaucgguu

SEQ ID NO: 36020 - DNA, 21 bp, Homo sapiens
taatacagaagaggtctttcg

SEQ ID NO: 36021 - RNA, 21 nt, RNAi
auacagaagaggucuuucguu

SEQ ID NO: 36022 - RNA, 21 nt, RNAi
uuuaugucuucuccagaaagc

SEQ ID NO: 36023 - DNA, 21 bp, Homo sapiens
tacgcgaagcactggcttagc

SEQ ID NO: 36024 - RNA, 21 nt, RNAi
cgcgaagcacuggcuuagcuu

SEQ ID NO: 36025 - RNA, 21 nt, RNAi
uugcgcuucgugaccgaaucg

SEQ ID NO: 36026 - DNA, 21 bp, Homo sapiens
tacatggtggttgagatagtg

SEQ ID NO: 36027 - RNA, 21 nt, RNAi
cauggugguugagauaguguu

SEQ ID NO: 36028 - RNA, 21 nt, RNAi
uuguaccaccaacucuaucac

SEQ ID NO: 36029 - DNA, 21 bp, Homo sapiens
tagtggccactattctttcat

SEQ ID NO: 36030 - RNA, 21 nt, RNAi
guggccacuauucuuucauuu

SEQ ID NO: 36031 - RNA, 21 nt, RNAi
uucaccggugauaagaaagua

SEQ ID NO: 36032 - DNA, 21 bp, Homo sapiens
tattctttcatggacaggctt

SEQ ID NO: 36033 - RNA, 21 nt, RNAi
uucuuucauggacaggcuuuu

SEQ ID NO: 36034 - RNA, 21 nt, RNAi
uuaagaaaguaccuguccgaa

SEQ ID NO: 36035 - DNA, 21 bp, Homo sapiens
taggcatcgtgatggccaatg

SEQ ID NO: 36036 - RNA, 21 nt, RNAi
ggcaucgugauggccaauguu

SEQ ID NO: 36037 - RNA, 21 nt, RNAi
uuccguagcacuaccgguuac

SEQ ID NO: 36038 - DNA, 21 bp, Homo sapiens
tagcgaatacttccaggcttt

SEQ ID NO: 36039 - RNA, 21 nt, RNAi
gcgaauacuuccaggcuuuuu

SEQ ID NO: 36040 - RNA, 21 nt, RNAi
uucgcuuaugaagguccgaaa

SEQ ID NO: 36041 - DNA, 21 bp, Homo sapiens
tacttccaggctttggtgaat

SEQ ID NO: 36042 - RNA, 21 nt, RNAi
cuuccaggcuuuggugaauuu

SEQ ID NO: 36043 - RNA, 21 nt, RNAi
uugaagguccgaaaccacuua

SEQ ID NO: 36044 - DNA, 21 bp, Homo sapiens
tataaagaagtgtatgccgct

SEQ ID NO: 36045 - RNA, 21 nt, RNAi
uaaagaaguguaugccgcuuu

SEQ ID NO: 36046 - RNA, 21 nt, RNAi
uuauuucuucacauacggcga

SEQ ID NO: 36047 - DNA, 21 bp, Homo sapiens
taaagaagtgtatgccgctgc

SEQ ID NO: 36048 - RNA, 21 nt, RNAi
aagaaguguaugccgcugcuu

SEQ ID NO: 36049 - RNA, 21 nt, RNAi
uuuucuucacauacggcgacg

SEQ ID NO: 36050 - DNA, 21 bp, Homo sapiens
tatgccgctgcagcagaagtt

SEQ ID NO: 36051 - RNA, 21 nt, RNAi
ugccgcugcagcagaaguuuu

SEQ ID NO: 36052 - RNA, 21 nt, RNAi
uuacggcgacgucgucuucaa

SEQ ID NO: 36053 - DNA, 21 bp, Homo sapiens
taggacttatacttcgatatg

SEQ ID NO: 36054 - RNA, 21 nt, RNAi
ggacuuauacuucgauauguu

SEQ ID NO: 36055 - RNA, 21 nt, RNAi
uuccugaauaugaagcuauac

SEQ ID NO: 36056 - DNA, 21 bp, Homo sapiens
tacttcgatatgttatggaga

SEQ ID NO: 36057 - RNA, 21 nt, RNAi
cuucgauauguuauggagauu

SEQ ID NO: 36058 - RNA, 21 nt, RNAi
uugaagcuauacaauaccucu

SEQ ID NO: 36059 - DNA, 21 bp, Homo sapiens
tactggaggagtctctgtgtg

SEQ ID NO: 36060 - RNA, 21 nt, RNAi
cuggaggagucucuguguguu

SEQ ID NO: 36061 - RNA, 21 nt, RNAi
uugaccuccucagagacacac

SEQ ID NO: 36062 - DNA, 21 bp, Homo sapiens
tactatggaggacaagtttat

SEQ ID NO: 36063 - RNA, 21 nt, RNAi
cuauggaggacaaguuuauuu

SEQ ID NO: 36064 - RNA, 21 nt, RNAi
uugauaccuccuguucaaaua

SEQ ID NO: 36065 - DNA, 21 bp, Homo sapiens
tatggaggacaagtttattgt

SEQ ID NO: 36066 - RNA, 21 nt, RNAi
uggaggacaaguuuauuguuu

SEQ ID NO: 36067 - RNA, 21 nt, RNAi
uuaccuccuguucaaauaaca

SEQ ID NO: 36068 - DNA, 21 bp, Homo sapiens
tattgtgtgcttgaacaaagt

SEQ ID NO: 36069 - RNA, 21 nt, RNAi
uugugugcuugaacaaaguuu

SEQ ID NO: 36070 - RNA, 21 nt, RNAi
uuaacacacgaacuuguuuca

SEQ ID NO: 36071 - DNA, 21 bp, Homo sapiens
tacttccagttaaagagcaag

SEQ ID NO: 36072 - RNA, 21 nt, RNAi
cuuccaguuaaagagcaaguu

SEQ ID NO: 36073 - RNA, 21 nt, RNAi
uugaaggucaauuucucguuc

SEQ ID NO: 36074 - DNA, 21 bp, Homo sapiens
taaagagcaaggacttcgttc

SEQ ID NO: 36075 - RNA, 21 nt, RNAi
aagagcaaggacuucguucuu

SEQ ID NO: 36076 - RNA, 21 nt, RNAi
uuuucucguuccugaagcaag

SEQ ID NO: 36077 - DNA, 21 bp, Homo sapiens
tagaactccgagaacttctga

SEQ ID NO: 36078 - RNA, 21 nt, RNAi
gaacuccgagaacuucugauu

SEQ ID NO: 36079 - RNA, 21 nt, RNAi
uucuugaggcucuugaagacu

SEQ ID NO: 36080 - DNA, 21 bp, Homo sapiens
tattctcatgtggattcatga

SEQ ID NO: 36081 - RNA, 21 nt, RNAi
uucucauguggauucaugauu

SEQ ID NO: 36082 - RNA, 21 nt, RNAi
uuaagaguacaccuaaguacu

SEQ ID NO: 36083 - DNA, 21 bp, Homo sapiens
taattacagagatccagaaag

SEQ ID NO: 36084 - RNA, 21 nt, RNAi
auuacagagauccagaaaguu

SEQ ID NO: 36085 - RNA, 21 nt, RNAi
uuuaaugucucuaggucuuuc

SEQ ID NO: 36086 - DNA, 21 bp, Homo sapiens
tacagagatccagaaagtgag

SEQ ID NO: 36087 - RNA, 21 nt, RNAi
cagagauccagaaagugaguu

SEQ ID NO: 36088 - RNA, 21 nt, RNAi
uugucucuaggucuuucacuc

SEQ ID NO: 36089 - DNA, 21 bp, Homo sapiens
tattcgaaatttctggagcca

SEQ ID NO: 36090 - RNA, 21 nt, RNAi
uucgaaauuucuggagccauu

SEQ ID NO: 36091 - RNA, 21 nt, RNAi
uuaagcuuuaaagaccucggu

SEQ ID NO: 36092 - DNA, 21 bp, Homo sapiens
taggttaccttcaaatacctt

SEQ ID NO: 36093 - RNA, 21 nt, RNAi
gguuaccuucaaauaccuuuu

SEQ ID NO: 36094 - RNA, 21 nt, RNAi
uuccaauggaaguuuauggaa

SEQ ID NO: 36095 - DNA, 21 bp, Homo sapiens
taccttcaaataccttggacc

SEQ ID NO: 36096 - RNA, 21 nt, RNAi
ccuucaaauaccuuggaccuu

SEQ ID NO: 36097 - RNA, 21 nt, RNAi
uuggaaguuuauggaaccugg

SEQ ID NO: 36098 - DNA, 21 bp, Homo sapiens
taccttggaccggttgctggc

SEQ ID NO: 36099 - RNA, 21 nt, RNAi
ccuuggaccgguugcuggcuu

SEQ ID NO: 36100 - RNA, 21 nt, RNAi
uuggaaccuggccaacgaccg

SEQ ID NO: 36101 - DNA, 21 bp, Homo sapiens
tattctcctaagatagaagtg

SEQ ID NO: 36102 - RNA, 21 nt, RNAi
uucuccuaagauagaaguguu

SEQ ID NO: 36103 - RNA, 21 nt, RNAi
uuaagaggauucuaucuucac

SEQ ID NO: 36104 - DNA, 21 bp, Homo sapiens
tataccattgattctgattgg

SEQ ID NO: 36105 - RNA, 21 nt, RNAi
uaccauugauucugauugguu

SEQ ID NO: 36106 - RNA, 21 nt, RNAi
uuaugguaacuaagacuaacc

SEQ ID NO: 36107 - DNA, 21 bp, Homo sapiens
taccattgattctgattggcg

SEQ ID NO: 36108 - RNA, 21 nt, RNAi
ccauugauucugauuggcguu

SEQ ID NO: 36109 - RNA, 21 nt, RNAi
uugguaacuaagacuaaccgc

SEQ ID NO: 36110 - DNA, 21 bp, Homo sapiens
tactgttctcactccgatgtt

SEQ ID NO: 36111 - RNA, 21 nt, RNAi
cuguucucacuccgauguuuu

SEQ ID NO: 36112 - RNA, 21 nt, RNAi
uugacaagagugaggcuacaa

SEQ ID NO: 36113 - DNA, 21 bp, Homo sapiens
taacaaagtgaaaggtgcggc

SEQ ID NO: 36114 - RNA, 21 nt, RNAi
acaaagugaaaggugcggcuu

SEQ ID NO: 36115 - RNA, 21 nt, RNAi
uuuguuucacuuuccacgccg

SEQ ID NO: 36116 - DNA, 21 bp, Homo sapiens
tactacgactgcgcagacggt

SEQ ID NO: 36117 - RNA, 21 nt, RNAi
cuacgacugcgcagacgguuu

SEQ ID NO: 36118 - RNA, 21 nt, RNAi
uugaugcugacgcgucugcca

SEQ ID NO: 36119 - DNA, 21 bp, Homo sapiens
tacgactgcgcagacggttta

SEQ ID NO: 36120 - RNA, 21 nt, RNAi
cgacugcgcagacgguuuauu

SEQ ID NO: 36121 - RNA, 21 nt, RNAi
uugcugacgcgucugccaaau

SEQ ID NO: 36122 - DNA, 21 bp, Homo sapiens
tacagaagctaccggcacgga

SEQ ID NO: 36123 - RNA, 21 nt, RNAi
cagaagcuaccggcacggauu

SEQ ID NO: 36124 - RNA, 21 nt, RNAi
uugucuucgauggccgugccu

SEQ ID NO: 36125 - DNA, 21 bp, Homo sapiens
taccggcacggagaccttcct

SEQ ID NO: 36126 - RNA, 21 nt, RNAi
ccggcacggagaccuuccuuu

SEQ ID NO: 36127 - RNA, 21 nt, RNAi
uuggccgugccucuggaagga

SEQ ID NO: 36128 - DNA, 21 bp, Homo sapiens
taataccaccttctctttctt

SEQ ID NO: 36129 - RNA, 21 nt, RNAi
auaccaccuucucuuucuuuu

SEQ ID NO: 36130 - RNA, 21 nt, RNAi
uuuaugguggaagagaaagaa

SEQ ID NO: 36131 - DNA, 21 bp, Homo sapiens
taccaccttctctttctttcc

SEQ ID NO: 36132 - RNA, 21 nt, RNAi
ccaccuucucuuucuuuccuu

SEQ ID NO: 36133 - RNA, 21 nt, RNAi
uugguggaagagaaagaaagg

SEQ ID NO: 36134 - DNA, 21 bp, Homo sapiens
tattcaggacattagctgtca

SEQ ID NO: 36135 - RNA, 21 nt, RNAi
uucaggacauuagcugucauu

SEQ ID NO: 36136 - RNA, 21 nt, RNAi
uuaaguccuguaaucgacagu

SEQ ID NO: 36137 - DNA, 21 bp, Homo sapiens
taagctgtatagatcaattgg

SEQ ID NO: 36138 - RNA, 21 nt, RNAi
agcuguauagaucaauugguu

SEQ ID NO: 36139 - RNA, 21 nt, RNAi
uuucgacauaucuaguuaacc

SEQ ID NO: 36140 - DNA, 21 bp, Homo sapiens
tagatcaattggagaatacga

SEQ ID NO: 36141 - RNA, 21 nt, RNAi
gaucaauuggagaauacgauu

SEQ ID NO: 36142 - RNA, 21 nt, RNAi
uucuaguuaaccucuuaugcu

SEQ ID NO: 36143 - DNA, 21 bp, Homo sapiens
taccagtgagataggaacaaa

SEQ ID NO: 36144 - RNA, 21 nt, RNAi
ccagugagauaggaacaaauu

SEQ ID NO: 36145 - RNA, 21 nt, RNAi
uuggucacucuauccuuguuu

SEQ ID NO: 36146 - DNA, 21 bp, Homo sapiens
taggaacaaagcaaatcactc

SEQ ID NO: 36147 - RNA, 21 nt, RNAi
ggaacaaagcaaaucacucuu

SEQ ID NO: 36148 - RNA, 21 nt, RNAi
uuccuuguuucguuuagugag

SEQ ID NO: 36149 - DNA, 21 bp, Homo sapiens
tattagcagaagccagaagtg

SEQ ID NO: 36150 - RNA, 21 nt, RNAi
uuagcagaagccagaaguguu

SEQ ID NO: 36151 - RNA, 21 nt, RNAi
uuaaucgucuucggucuucac

SEQ ID NO: 36152 - DNA, 21 bp, Homo sapiens
tagcagaagccagaagtgatt

SEQ ID NO: 36153 - RNA, 21 nt, RNAi
gcagaagccagaagugauuuu

SEQ ID NO: 36154 - RNA, 21 nt, RNAi
uucgucuucggucuucacuaa

SEQ ID NO: 36155 - DNA, 21 bp, Homo sapiens
tattctgaagctgctaagcag

SEQ ID NO: 36156 - RNA, 21 nt, RNAi
uucugaagcugcuaagcaguu

SEQ ID NO: 36157 - RNA, 21 nt, RNAi
uuaagacuucgacgauucguc

SEQ ID NO: 36158 - DNA, 21 bp, Homo sapiens
taagcagtatgatgaggctct

SEQ ID NO: 36159 - RNA, 21 nt, RNAi
agcaguaugaugaggcucuuu

SEQ ID NO: 36160 - RNA, 21 nt, RNAi
uuucgucauacuacuccgaga

SEQ ID NO: 36161 - DNA, 21 bp, Homo sapiens
tatgatgaggctctcaataaa

SEQ ID NO: 36162 - RNA, 21 nt, RNAi
ugaugaggcucucaauaaauu

SEQ ID NO: 36163 - RNA, 21 nt, RNAi
uuacuacuccgagaguuauuu

SEQ ID NO: 36164 - DNA, 21 bp, Homo sapiens
tacaaccaccttgctgagtgg

SEQ ID NO: 36165 - RNA, 21 nt, RNAi
caaccaccuugcugagugguu

SEQ ID NO: 36166 - RNA, 21 nt, RNAi
uuguugguggaacgacucacc

SEQ ID NO: 36167 - DNA, 21 bp, Homo sapiens
tactgttctacagccagtata

SEQ ID NO: 36168 - RNA, 21 nt, RNAi
cuguucuacagccaguauauu

SEQ ID NO: 36169 - RNA, 21 nt, RNAi
uugacaagaugucggucauau

SEQ ID NO: 36170 - DNA, 21 bp, Homo sapiens
tacagccagtatagacagtga

SEQ ID NO: 36171 - RNA, 21 nt, RNAi
cagccaguauagacagugauu

SEQ ID NO: 36172 - RNA, 21 nt, RNAi
uugucggucauaucugucacu

SEQ ID NO: 36173 - DNA, 21 bp, Homo sapiens
tatcaggaaacatatctacct

SEQ ID NO: 36174 - RNA, 21 nt, RNAi
ucaggaaacauaucuaccuuu

SEQ ID NO: 36175 - RNA, 21 nt, RNAi
uuaguccuuuguauagaugga

SEQ ID NO: 36176 - DNA, 21 bp, Homo sapiens
tatctaccttacatgatccgc

SEQ ID NO: 36177 - RNA, 21 nt, RNAi
ucuaccuuacaugauccgcuu

SEQ ID NO: 36178 - RNA, 21 nt, RNAi
uuagauggaauguacuaggcg

SEQ ID NO: 36179 - DNA, 21 bp, Homo sapiens
taccttacatgatccgcagca

SEQ ID NO: 36180 - RNA, 21 nt, RNAi
ccuuacaugauccgcagcauu

SEQ ID NO: 36181 - RNA, 21 nt, RNAi
uuggaauguacuaggcgucgu

SEQ ID NO: 36182 - DNA, 21 bp, Homo sapiens
tacatgatccgcagcaagctg

SEQ ID NO: 36183 - RNA, 21 nt, RNAi
caugauccgcagcaagcuguu

SEQ ID NO: 36184 - RNA, 21 nt, RNAi
uuguacuaggcgucguucgac

SEQ ID NO: 36185 - DNA, 21 bp, Homo sapiens
tattgacaaagctatgcacgg

SEQ ID NO: 36186 - RNA, 21 nt, RNAi
uugacaaagcuaugcacgguu

SEQ ID NO: 36187 - RNA, 21 nt, RNAi
uuaacuguuucgauacgugcc

SEQ ID NO: 36188 - DNA, 21 bp, Homo sapiens
tagagcttcattacagtcaag

SEQ ID NO: 36189 - RNA, 21 nt, RNAi
gagcuucauuacagucaaguu

SEQ ID NO: 36190 - RNA, 21 nt, RNAi
uucucgaaguaaugucaguuc

SEQ ID NO: 36191 - DNA, 21 bp, Homo sapiens
tacagtcaagagctgagtctg

SEQ ID NO: 36192 - RNA, 21 nt, RNAi
cagucaagagcugagucuguu

SEQ ID NO: 36193 - RNA, 21 nt, RNAi
uugucaguucucgacucagac

SEQ ID NO: 36194 - DNA, 21 bp, Homo sapiens
tacctcctgcaagatgatgtt

SEQ ID NO: 36195 - RNA, 21 nt, RNAi
ccuccugcaagaugauguuuu

SEQ ID NO: 36196 - RNA, 21 nt, RNAi
uuggaggacguucuacuacaa

SEQ ID NO: 36197 - DNA, 21 bp, Homo sapiens
tattctagtattgatgtcctc

SEQ ID NO: 36198 - RNA, 21 nt, RNAi
uucuaguauugauguccucuu

SEQ ID NO: 36199 - RNA, 21 nt, RNAi
uuaagaucauaacuacaggag

SEQ ID NO: 36200 - DNA, 21 bp, Homo sapiens
tagtattgatgtcctcttaca

SEQ ID NO: 36201 - RNA, 21 nt, RNAi
guauugauguccucuuacauu

SEQ ID NO: 36202 - RNA, 21 nt, RNAi
uucauaacuacaggagaaugu

SEQ ID NO: 36203 - DNA, 21 bp, Homo sapiens
tattgatgtcctcttacacca

SEQ ID NO: 36204 - RNA, 21 nt, RNAi
uugauguccucuuacaccauu

SEQ ID NO: 36205 - RNA, 21 nt, RNAi
uuaacuacaggagaauguggu

SEQ ID NO: 36206 - DNA, 21 bp, Homo sapiens
tacaccaaagtagactcacca

SEQ ID NO: 36207 - RNA, 21 nt, RNAi
caccaaaguagacucaccauu

SEQ ID NO: 36208 - RNA, 21 nt, RNAi
uugugguuucaucugaguggu

SEQ ID NO: 36209 - DNA, 21 bp, Homo sapiens
tagactcaccaaattgcagtc

SEQ ID NO: 36210 - RNA, 21 nt, RNAi
gacucaccaaauugcagucuu

SEQ ID NO: 36211 - RNA, 21 nt, RNAi
uucugagugguuuaacgucag

SEQ ID NO: 36212 - DNA, 21 bp, Homo sapiens
tacaggctttaacagaaattc

SEQ ID NO: 36213 - RNA, 21 nt, RNAi
caggcuuuaacagaaauucuu

SEQ ID NO: 36214 - RNA, 21 nt, RNAi
uuguccgaaauugucuuuaag

SEQ ID NO: 36215 - DNA, 21 bp, Homo sapiens
taacagaaattcaggagttca

SEQ ID NO: 36216 - RNA, 21 nt, RNAi
acagaaauucaggaguucauu

SEQ ID NO: 36217 - RNA, 21 nt, RNAi
uuugucuuuaaguccucaagu

SEQ ID NO: 36218 - DNA, 21 bp, Homo sapiens
taagagacttctgaacacctg

SEQ ID NO: 36219 - RNA, 21 nt, RNAi
agagacuucugaacaccuguu

SEQ ID NO: 36220 - RNA, 21 nt, RNAi
uuucucugaagacuuguggac

SEQ ID NO: 36221 - DNA, 21 bp, Homo sapiens
tagtatgaatgtggatcaaga

SEQ ID NO: 36222 - RNA, 21 nt, RNAi
guaugaauguggaucaagauu

SEQ ID NO: 36223 - RNA, 21 nt, RNAi
uucauacuuacaccuaguucu

SEQ ID NO: 36224 - DNA, 21 bp, Homo sapiens
tatgaatgtggatcaagatgg

SEQ ID NO: 36225 - RNA, 21 nt, RNAi
ugaauguggaucaagaugguu

SEQ ID NO: 36226 - RNA, 21 nt, RNAi
uuacuuacaccuaguucuacc

SEQ ID NO: 36227 - DNA, 21 bp, Homo sapiens
tatgaaactactgaaggagct

SEQ ID NO: 36228 - RNA, 21 nt, RNAi
ugaaacuacugaaggagcuuu

SEQ ID NO: 36229 - RNA, 21 nt, RNAi
uuacuuugaugacuuccucga

SEQ ID NO: 36230 - DNA, 21 bp, Homo sapiens
tactgaaggagctgcataaag

SEQ ID NO: 36231 - RNA, 21 nt, RNAi
cugaaggagcugcauaaaguu

SEQ ID NO: 36232 - RNA, 21 nt, RNAi
uugacuuccucgacguauuuc

SEQ ID NO: 36233 - DNA, 21 bp, Homo sapiens
tattctggctttccgtgacca

SEQ ID NO: 36234 - RNA, 21 nt, RNAi
uucuggcuuuccgugaccauu

SEQ ID NO: 36235 - RNA, 21 nt, RNAi
uuaagaccgaaaggcacuggu

SEQ ID NO: 36236 - DNA, 21 bp, Homo sapiens
tacaacttacaggatcatagc

SEQ ID NO: 36237 - RNA, 21 nt, RNAi
caacuuacaggaucauagcuu

SEQ ID NO: 36238 - RNA, 21 nt, RNAi
uuguugaauguccuaguaucg

SEQ ID NO: 36239 - DNA, 21 bp, Homo sapiens
tacaggatcatagcgaatgct

SEQ ID NO: 36240 - RNA, 21 nt, RNAi
caggaucauagcgaaugcuuu

SEQ ID NO: 36241 - RNA, 21 nt, RNAi
uuguccuaguaucgcuuacga

SEQ ID NO: 36242 - DNA, 20 bp, Homo sapiens
tagcgaatgctctcagcagt

SEQ ID NO: 36243 - RNA, 20 nt, RNAi
gcgaaugcucucagcaguuu

SEQ ID NO: 36244 - RNA, 20 nt, RNAi
uucgcuuacgagagucguca

SEQ ID NO: 36245 - DNA, 20 bp, Homo sapiens
tagagctttctggatccagt

SEQ ID NO: 36246 - RNA, 20 nt, RNAi
gagcuuucuggauccaguuu

SEQ ID NO: 36247 - RNA, 20 nt, RNAi
uucucgaaagaccuagguca

SEQ ID NO: 36248 - DNA, 20 bp, Homo sapiens
taccagagagcattccagca

SEQ ID NO: 36249 - RNA, 20 nt, RNAi
ccagagagcauuccagcauu

SEQ ID NO: 36250 - RNA, 20 nt, RNAi
uuggucucucguaaggucgu

SEQ ID NO: 36251 - DNA, 21 bp, Homo sapiens
tacatgacgctggcagatttc

SEQ ID NO: 36252 - RNA, 21 nt, RNAi
caugacgcuggcagauuucuu

SEQ ID NO: 36253 - RNA, 21 nt, RNAi
uuguacugcgaccgucuaaag

SEQ ID NO: 36254 - DNA, 21 bp, Homo sapiens
tattgattctgcagaactgca

SEQ ID NO: 36255 - RNA, 21 nt, RNAi
uugauucugcagaacugcauu

SEQ ID NO: 36256 - RNA, 21 nt, RNAi
uuaacuaagacgucuugacgu

SEQ ID NO: 36257 - DNA, 21 bp, Homo sapiens
tatccagcacttgtggtggag

SEQ ID NO: 36258 - RNA, 21 nt, RNAi
uccagcacuugugguggaguu

SEQ ID NO: 36259 - RNA, 21 nt, RNAi
uuaggucgugaacaccaccuc

SEQ ID NO: 36260 - DNA, 20 bp, Homo sapiens
taaattccaatgaagccaga

SEQ ID NO: 36261 - RNA, 20 nt, RNAi
aauuccaaugaagccagauu

SEQ ID NO: 36262 - RNA, 20 nt, RNAi
uuuuaagguuacuucggucu

SEQ ID NO: 36263 - DNA, 21 bp, Homo sapiens
tacttcagattatagaacggt

SEQ ID NO: 36264 - RNA, 21 nt, RNAi
cuucagauuauagaacgguuu

SEQ ID NO: 36265 - RNA, 21 nt, RNAi
uugaagucuaauaucuugcca

SEQ ID NO: 36266 - DNA, 21 bp, Homo sapiens
tatagaacggtatccagagga

SEQ ID NO: 36267 - RNA, 21 nt, RNAi
uagaacgguauccagaggauu

SEQ ID NO: 36268 - RNA, 21 nt, RNAi
uuaucuugccauaggucuccu

SEQ ID NO: 36269 - DNA, 21 bp, Homo sapiens
tagaacggtatccagaggaga

SEQ ID NO: 36270 - RNA, 21 nt, RNAi
gaacgguauccagaggagauu

SEQ ID NO: 36271 - RNA, 21 nt, RNAi
uucuugccauaggucuccucu

SEQ ID NO: 36272 - DNA, 20 bp, Homo sapiens
tatccagaggagactttgag

SEQ ID NO: 36273 - RNA, 20 nt, RNAi
uccagaggagacuuugaguu

SEQ ID NO: 36274 - RNA, 20 nt, RNAi
uuaggucuccucugaaacuc

SEQ ID NO: 36275 - DNA, 21 bp, Homo sapiens
tactggacaaagaccaagccg

SEQ ID NO: 36276 - RNA, 21 nt, RNAi
cuggacaaagaccaagccguu

SEQ ID NO: 36277 - RNA, 21 nt, RNAi
uugaccuguuucugguucggc

SEQ ID NO: 36278 - DNA, 20 bp, Homo sapiens
taagcagcgaaagctattcc

SEQ ID NO: 36279 - RNA, 20 nt, RNAi
agcagcgaaagcuauuccuu

SEQ ID NO: 36280 - RNA, 20 nt, RNAi
uuucgucgcuuucgauaagg

SEQ ID NO: 36281 - DNA, 20 bp, Homo sapiens
tattccttcaaggatacttc

SEQ ID NO: 36282 - RNA, 20 nt, RNAi
uuccuucaaggauacuucuu

SEQ ID NO: 36283 - RNA, 20 nt, RNAi
uuaaggaaguuccuaugaag

SEQ ID NO: 36284 - DNA, 21 bp, Homo sapiens
tacttctactggtcataagaa

SEQ ID NO: 36285 - RNA, 21 nt, RNAi
cuucuacuggucauaagaauu

SEQ ID NO: 36286 - RNA, 21 nt, RNAi
uugaagaugaccaguauucuu

SEQ ID NO: 36287 - DNA, 21 bp, Homo sapiens
tactggtcataagaataagga

SEQ ID NO: 36288 - RNA, 21 nt, RNAi
cuggucauaagaauaaggauu

SEQ ID NO: 36289 - RNA, 21 nt, RNAi
uugaccaguauucuuauuccu

SEQ ID NO: 36290 - DNA, 21 bp, Homo sapiens
taagaataaggagtttgtggc

SEQ ID NO: 36291 - RNA, 21 nt, RNAi
agaauaaggaguuuguggcuu

SEQ ID NO: 36292 - RNA, 21 nt, RNAi
uuucuuauuccucaaacaccg

SEQ ID NO: 36293 - DNA, 21 bp, Homo sapiens
taaggagtttgtggcaaggat

SEQ ID NO: 36294 - RNA, 21 nt, RNAi
aggaguuuguggcaaggauuu

SEQ ID NO: 36295 - RNA, 21 nt, RNAi
uuuccucaaacaccguuccua

SEQ ID NO: 36296 - DNA, 21 bp, Homo sapiens
tattaatgccttagatcagct

SEQ ID NO: 36297 - RNA, 21 nt, RNAi
uuaaugccuuagaucagcuuu

SEQ ID NO: 36298 - RNA, 21 nt, RNAi
uuaauuacggaaucuagucga

SEQ ID NO: 36299 - DNA, 21 bp, Homo sapiens
taatgccttagatcagctctc

SEQ ID NO: 36300 - RNA, 21 nt, RNAi
augccuuagaucagcucucuu

SEQ ID NO: 36301 - RNA, 21 nt, RNAi
uuuacggaaucuagucgagag

SEQ ID NO: 36302 - DNA, 20 bp, Homo sapiens
tagatcagctctctaatcct

SEQ ID NO: 36303 - RNA, 20 nt, RNAi
gaucagcucucuaauccuuu

SEQ ID NO: 36304 - RNA, 20 nt, RNAi
uucuagucgagagauuagga

SEQ ID NO: 36305 - DNA, 20 bp, Homo sapiens
taatcctgaactgctcttta

SEQ ID NO: 36306 - RNA, 20 nt, RNAi
auccugaacugcucuuuauu

SEQ ID NO: 36307 - RNA, 20 nt, RNAi
uuuaggacuugacgagaaau

SEQ ID NO: 36308 - DNA, 21 bp, Homo sapiens
taaggattggagcaatgatgt

SEQ ID NO: 36309 - RNA, 21 nt, RNAi
aggauuggagcaaugauguuu

SEQ ID NO: 36310 - RNA, 21 nt, RNAi
uuuccuaaccucguuacuaca

SEQ ID NO: 36311 - DNA, 21 bp, Homo sapiens
tatgaaagaatgtatgcagcc

SEQ ID NO: 36312 - RNA, 21 nt, RNAi
ugaaagaauguaugcagccuu

SEQ ID NO: 36313 - RNA, 21 nt, RNAi
uuacuuucuuacauacgucgg

SEQ ID NO: 36314 - DNA, 21 bp, Homo sapiens
tagaaggaagtttattcagac

SEQ ID NO: 36315 - RNA, 21 nt, RNAi
gaaggaaguuuauucagacuu

SEQ ID NO: 36316 - RNA, 21 nt, RNAi
uucuuccuucaaauaagucug

SEQ ID NO: 36317 - DNA, 21 bp, Homo sapiens
taaactactgagaatgaagct

SEQ ID NO: 36318 - RNA, 21 nt, RNAi
aacuacugagaaugaagcuuu

SEQ ID NO: 36319 - RNA, 21 nt, RNAi
uuuugaugacucuuacuucga

SEQ ID NO: 36320 - DNA, 21 bp, Homo sapiens
tactgagaatgaagctcagtg

SEQ ID NO: 36321 - RNA, 21 nt, RNAi
cugagaaugaagcucaguguu

SEQ ID NO: 36322 - RNA, 21 nt, RNAi
uugacucuuacuucgagucac

SEQ ID NO: 36323 - DNA, 20 bp, Homo sapiens
taccacgtgcgaatcgccgg

SEQ ID NO: 36324 - RNA, 20 nt, RNAi
ccacgugcgaaucgccgguu

SEQ ID NO: 36325 - RNA, 20 nt, RNAi
uuggugcacgcuuagcggcc

SEQ ID NO: 36326 - DNA, 20 bp, Homo sapiens
taggattaattgagtggctt

SEQ ID NO: 36327 - RNA, 20 nt, RNAi
ggauuaauugaguggcuuuu

SEQ ID NO: 36328 - RNA, 20 nt, RNAi
uuccuaauuaacucaccgaa

SEQ ID NO: 36329 - DNA, 21 bp, Homo sapiens
tactgttaccttgaaggacct

SEQ ID NO: 36330 - RNA, 21 nt, RNAi
cuguuaccuugaaggaccuuu

SEQ ID NO: 36331 - RNA, 21 nt, RNAi
uugacaauggaacuuccugga

SEQ ID NO: 36332 - DNA, 20 bp, Homo sapiens
tacatgctaatgtataaggg

SEQ ID NO: 36333 - RNA, 20 nt, RNAi
caugcuaauguauaaggguu

SEQ ID NO: 36334 - RNA, 20 nt, RNAi
uuguacgauuacauauuccc

SEQ ID NO: 36335 - DNA, 20 bp, Homo sapiens
taatgtataagggcgctaat

SEQ ID NO: 36336 - RNA, 20 nt, RNAi
auguauaagggcgcuaauuu

SEQ ID NO: 36337 - RNA, 20 nt, RNAi
uuuacauauucccgcgauua

SEQ ID NO: 36338 - DNA, 20 bp, Homo sapiens
tataagggcgctaatcgtac

SEQ ID NO: 36339 - RNA, 20 nt, RNAi
uaagggcgcuaaucguacuu

SEQ ID NO: 36340 - RNA, 20 nt, RNAi
uuauucccgcgauuagcaug

SEQ ID NO: 36341 - DNA, 20 bp, Homo sapiens
taagggcgctaatcgtactg

SEQ ID NO: 36342 - RNA, 20 nt, RNAi
agggcgcuaaucguacuguu

SEQ ID NO: 36343 - RNA, 20 nt, RNAi
uuucccgcgauuagcaugac

SEQ ID NO: 36344 - DNA, 21 bp, Homo sapiens
taatcgtactgaaacagtcac

SEQ ID NO: 36345 - RNA, 21 nt, RNAi
aucguacugaaacagucacuu

SEQ ID NO: 36346 - RNA, 21 nt, RNAi
uuuagcaugacuuugucagug

SEQ ID NO: 36347 - DNA, 21 bp, Homo sapiens
tactgaaacagtcacgtcttt

SEQ ID NO: 36348 - RNA, 21 nt, RNAi
cugaaacagucacgucuuuuu

SEQ ID NO: 36349 - RNA, 21 nt, RNAi
uugacuuugucagugcagaaa

SEQ ID NO: 36350 - DNA, 20 bp, Homo sapiens
taaagtgcctgctgatctct

SEQ ID NO: 36351 - RNA, 20 nt, RNAi
aagugccugcugaucucuuu

SEQ ID NO: 36352 - RNA, 20 nt, RNAi
uuuucacggacgacuagaga

SEQ ID NO: 36353 - DNA, 21 bp, Homo sapiens
tatgcatcagccactggatcc

SEQ ID NO: 36354 - RNA, 21 nt, RNAi
ugcaucagccacuggauccuu

SEQ ID NO: 36355 - RNA, 21 nt, RNAi
uuacguagucggugaccuagg

SEQ ID NO: 36356 - DNA, 21 bp, Homo sapiens
tatggtggccatggagactgg

SEQ ID NO: 36357 - RNA, 21 nt, RNAi
ugguggccauggagacugguu

SEQ ID NO: 36358 - RNA, 21 nt, RNAi
uuaccaccgguaccucugacc

SEQ ID NO: 36359 - DNA, 21 bp, Homo sapiens
taactcgccagtttatcaatc

SEQ ID NO: 36360 - RNA, 21 nt, RNAi
acucgccaguuuaucaaucuu

SEQ ID NO: 36361 - RNA, 21 nt, RNAi
uuugagcggucaaauaguuag

SEQ ID NO: 36362 - DNA, 20 bp, Homo sapiens
tatgtacagcatcatggtac

SEQ ID NO: 36363 - RNA, 20 nt, RNAi
uguacagcaucaugguacuu

SEQ ID NO: 36364 - RNA, 20 nt, RNAi
uuacaugucguaguaccaug

SEQ ID NO: 36365 - DNA, 21 bp, Homo sapiens
tacagcatcatggtacacgca

SEQ ID NO: 36366 - RNA, 21 nt, RNAi
cagcaucaugguacacgcauu

SEQ ID NO: 36367 - RNA, 21 nt, RNAi
uugucguaguaccaugugcgu

SEQ ID NO: 36368 - DNA, 21 bp, Homo sapiens
tatgttacgctaagagaaagt

SEQ ID NO: 36369 - RNA, 21 nt, RNAi
uguuacgcuaagagaaaguuu

SEQ ID NO: 36370 - RNA, 21 nt, RNAi
uuacaaugcgauucucuuuca

SEQ ID NO: 36371 - DNA, 21 bp, Homo sapiens
tacgctaagagaaagttagca

SEQ ID NO: 36372 - RNA, 21 nt, RNAi
cgcuaagagaaaguuagcauu

SEQ ID NO: 36373 - RNA, 21 nt, RNAi
uugcgauucucuuucaaucgu

SEQ ID NO: 36374 - DNA, 21 bp, Homo sapiens
taagagaaagttagcaggtgc

SEQ ID NO: 36375 - RNA, 21 nt, RNAi
agagaaaguuagcaggugcuu

SEQ ID NO: 36376 - RNA, 21 nt, RNAi
uuucucuuucaaucguccacg

SEQ ID NO: 36377 - DNA, 21 bp, Homo sapiens
tagcaggtgccaatccagcag

SEQ ID NO: 36378 - RNA, 21 nt, RNAi
gcaggugccaauccagcaguu

SEQ ID NO: 36379 - RNA, 21 nt, RNAi
uucguccacgguuaggucguc

SEQ ID NO: 36380 - DNA, 20 bp, Homo sapiens
tacttgtgatgagctactcc

SEQ ID NO: 36381 - RNA, 20 nt, RNAi
cuugugaugagcuacuccuu

SEQ ID NO: 36382 - RNA, 20 nt, RNAi
uugaacacuacucgaugagg

SEQ ID NO: 36383 - DNA, 20 bp, Homo sapiens
tatgtggctgtggcacgagg

SEQ ID NO: 36384 - RNA, 20 nt, RNAi
uguggcuguggcacgagguu

SEQ ID NO: 36385 - RNA, 20 nt, RNAi
uuacaccgacaccgugcucc

SEQ ID NO: 36386 - DNA, 21 bp, Homo sapiens
aaagtatatgagctcctagga

SEQ ID NO: 36387 - RNA, 21 nt, RNAi
aguauaugagcuccuaggauu

SEQ ID NO: 36388 - RNA, 21 nt, RNAi
uuucauauacucgaggauccu

SEQ ID NO: 36389 - DNA, 21 bp, Homo sapiens
aagtatatgagctcctaggat

SEQ ID NO: 36390 - RNA, 21 nt, RNAi
guauaugagcuccuaggauuu

SEQ ID NO: 36391 - RNA, 21 nt, RNAi
uucauauacucgaggauccua

SEQ ID NO: 36392 - DNA, 21 bp, Homo sapiens
aaaggcaattcgtcctcagat

SEQ ID NO: 36393 - RNA, 21 nt, RNAi
aggcaauucguccucagauuu

SEQ ID NO: 36394 - RNA, 21 nt, RNAi
uuuccguuaagcaggagucua

SEQ ID NO: 36395 - DNA, 21 bp, Homo sapiens
aaggcaattcgtcctcagatt

SEQ ID NO: 36396 - RNA, 21 nt, RNAi
ggcaauucguccucagauuuu

SEQ ID NO: 36397 - RNA, 21 nt, RNAi
uuccguuaagcaggagucuaa

SEQ ID NO: 36398 - DNA, 21 bp, Homo sapiens
aactacgtgtctctatttgaa

SEQ ID NO: 36399 - RNA, 21 nt, RNAi
cuacgugucucuauuugaauu

SEQ ID NO: 36400 - RNA, 21 nt, RNAi
uugaugcacagagauaaacuu

SEQ ID NO: 36401 - DNA, 21 bp, Homo sapiens
aaatgtggattcgaacaacaa

SEQ ID NO: 36402 - RNA, 21 nt, RNAi
auguggauucgaacaacaauu

SEQ ID NO: 36403 - RNA, 21 nt, RNAi
uuuacaccuaagcuuguuguu

SEQ ID NO: 36404 - DNA, 21 bp, Homo sapiens
aatgtggattcgaacaacaag

SEQ ID NO: 36405 - RNA, 21 nt, RNAi
uguggauucgaacaacaaguu

SEQ ID NO: 36406 - RNA, 21 nt, RNAi
uuacaccuaagcuuguuguuc

SEQ ID NO: 36407 - DNA, 21 bp, Homo sapiens
aaagatgttgacttcatgtac

SEQ ID NO: 36408 - RNA, 21 nt, RNAi
agauguugacuucauguacuu

SEQ ID NO: 36409 - RNA, 21 nt, RNAi
uuucuacaacugaaguacaug

SEQ ID NO: 36410 - DNA, 21 bp, Homo sapiens
aagatgttgacttcatgtacg

SEQ ID NO: 36411 - RNA, 21 nt, RNAi
gauguugacuucauguacguu

SEQ ID NO: 36412 - RNA, 21 nt, RNAi
uucuacaacugaaguacaugc

SEQ ID NO: 36413 - DNA, 21 bp, Homo sapiens
aaggtgttcctagctttggca

SEQ ID NO: 36414 - RNA, 21 nt, RNAi
gguguuccuagcuuuggcauu

SEQ ID NO: 36415 - RNA, 21 nt, RNAi
uuccacaaggaucgaaaccgu

SEQ ID NO: 36416 - DNA, 21 bp, Homo sapiens
aatatgttctaaaccagtggt

SEQ ID NO: 36417 - RNA, 21 nt, RNAi
uauguucuaaaccagugguuu

SEQ ID NO: 36418 - RNA, 21 nt, RNAi
uuauacaagauuuggucacca

SEQ ID NO: 36419 - DNA, 21 bp, Homo sapiens
aaagactacgtggatctcttc

SEQ ID NO: 36420 - RNA, 21 nt, RNAi
agacuacguggaucucuucuu

SEQ ID NO: 36421 - RNA, 21 nt, RNAi
uuucugaugcaccuagagaag

SEQ ID NO: 36422 - DNA, 21 bp, Homo sapiens
aagactacgtggatctcttca

SEQ ID NO: 36423 - RNA, 21 nt, RNAi
gacuacguggaucucuucauu

SEQ ID NO: 36424 - RNA, 21 nt, RNAi
uucugaugcaccuagagaagu

SEQ ID NO: 36425 - DNA, 21 bp, Homo sapiens
aacttcagatccagcggctaa

SEQ ID NO: 36426 - RNA, 21 nt, RNAi
cuucagauccagcggcuaauu

SEQ ID NO: 36427 - RNA, 21 nt, RNAi
uugaagucuaggucgccgauu

SEQ ID NO: 36428 - DNA, 21 bp, Homo sapiens
aacttgcatccagctaaacct

SEQ ID NO: 36429 - RNA, 21 nt, RNAi
cuugcauccagcuaaaccuuu

SEQ ID NO: 36430 - RNA, 21 nt, RNAi
uugaacguaggucgauuugga

SEQ ID NO: 36431 - DNA, 21 bp, Homo sapiens
aactcgatgttagagcctacg

SEQ ID NO: 36432 - RNA, 21 nt, RNAi
cucgauguuagagccuacguu

SEQ ID NO: 36433 - RNA, 21 nt, RNAi
uugagcuacaaucucggaugc

SEQ ID NO: 36434 - DNA, 21 bp, Homo sapiens
aagtaggcctgaatgctctag

SEQ ID NO: 36435 - RNA, 21 nt, RNAi
guaggccugaaugcucuaguu

SEQ ID NO: 36436 - RNA, 21 nt, RNAi
uucauccggacuuacgagauc

SEQ ID NO: 36437 - DNA, 21 bp, Homo sapiens
aatgcagccttattacaaaga

SEQ ID NO: 36438 - RNA, 21 nt, RNAi
ugcagccuuauuacaaagauu

SEQ ID NO: 36439 - RNA, 21 nt, RNAi
uuacgucggaauaauguuucu

SEQ ID NO: 36440 - DNA, 21 bp, Homo sapiens
aaagtggtgttaaagcatctg

SEQ ID NO: 36441 - RNA, 21 nt, RNAi
agugguguuaaagcaucuguu

SEQ ID NO: 36442 - RNA, 21 nt, RNAi
uuucaccacaauuucguagac

SEQ ID NO: 36443 - DNA, 21 bp, Homo sapiens
aaagaacctttcatcaaacga

SEQ ID NO: 36444 - RNA, 21 nt, RNAi
agaaccuuucaucaaacgauu

SEQ ID NO: 36445 - RNA, 21 nt, RNAi
uuucuuggaaaguaguuugcu

SEQ ID NO: 36446 - DNA, 21 bp, Homo sapiens
aagaacctttcatcaaacgaa

SEQ ID NO: 36447 - RNA, 21 nt, RNAi
gaaccuuucaucaaacgaauu

SEQ ID NO: 36448 - RNA, 21 nt, RNAi
uucuuggaaaguaguuugcuu

SEQ ID NO: 36449 - DNA, 21 bp, Homo sapiens
aaactaaagttgcagcctgtg

SEQ ID NO: 36450 - RNA, 21 nt, RNAi
acuaaaguugcagccuguguu

SEQ ID NO: 36451 - RNA, 21 nt, RNAi
uuugauuucaacgucggacac

SEQ ID NO: 36452 - DNA, 21 bp, Homo sapiens
aactaaagttgcagcctgtga

SEQ ID NO: 36453 - RNA, 21 nt, RNAi
cuaaaguugcagccugugauu

SEQ ID NO: 36454 - RNA, 21 nt, RNAi
uugauuucaacgucggacacu

SEQ ID NO: 36455 - DNA, 21 bp, Homo sapiens
aaagtcaggatactgttgcct

SEQ ID NO: 36456 - RNA, 21 nt, RNAi
agucaggauacuguugccuuu

SEQ ID NO: 36457 - RNA, 21 nt, RNAi
uuucaguccuaugacaacgga

SEQ ID NO: 36458 - DNA, 21 bp, Homo sapiens
aagcgactttatagccttgcg

SEQ ID NO: 36459 - RNA, 21 nt, RNAi
gcgacuuuauagccuugcguu

SEQ ID NO: 36460 - RNA, 21 nt, RNAi
uucgcugaaauaucggaacgc

SEQ ID NO: 36461 - DNA, 21 bp, Homo sapiens
aagaagagtctctggtggaac

SEQ ID NO: 36462 - RNA, 21 nt, RNAi
gaagagucucugguggaacuu

SEQ ID NO: 36463 - RNA, 21 nt, RNAi
uucuucucagagaccaccuug

SEQ ID NO: 36464 - DNA, 21 bp, Homo sapiens
aataaagcaaagaaacgacgt

SEQ ID NO: 36465 - RNA, 21 nt, RNAi
uaaagcaaagaaacgacguuu

SEQ ID NO: 36466 - RNA, 21 nt, RNAi
uuauuucguuucuuugcugca

SEQ ID NO: 36467 - DNA, 21 bp, Homo sapiens
aatgtcgacacaaatccattg

SEQ ID NO: 36468 - RNA, 21 nt, RNAi
ugucgacacaaauccauuguu

SEQ ID NO: 36469 - RNA, 21 nt, RNAi
uuacagcuguguuuagguaac

SEQ ID NO: 36470 - DNA, 21 bp, Homo sapiens
aacacgttcattggcgagaga

SEQ ID NO: 36471 - RNA, 21 nt, RNAi
cacguucauuggcgagagauu

SEQ ID NO: 36472 - RNA, 21 nt, RNAi
uugugcaaguaaccgcucucu

SEQ ID NO: 36473 - DNA, 21 bp, Homo sapiens
aagcattgccatgcatgacat

SEQ ID NO: 36474 - RNA, 21 nt, RNAi
gcauugccaugcaugacauuu

SEQ ID NO: 36475 - RNA, 21 nt, RNAi
uucguaacgguacguacugua

SEQ ID NO: 36476 - DNA, 21 bp, Homo sapiens
aactacagcaaatgcaccgtt

SEQ ID NO: 36477 - RNA, 21 nt, RNAi
cuacagcaaaugcaccguuuu

SEQ ID NO: 36478 - RNA, 21 nt, RNAi
uugaugucguuuacguggcaa

SEQ ID NO: 36479 - DNA, 21 bp, Homo sapiens
aatacacacctgatgagagtc

SEQ ID NO: 36480 - RNA, 21 nt, RNAi
uacacaccugaugagagucuu

SEQ ID NO: 36481 - RNA, 21 nt, RNAi
uuauguguggacuacucucag

SEQ ID NO: 36482 - DNA, 21 bp, Homo sapiens
aaacgatcaacacggaattat

SEQ ID NO: 36483 - RNA, 21 nt, RNAi
acgaucaacacggaauuauuu

SEQ ID NO: 36484 - RNA, 21 nt, RNAi
uuugcuaguugugccuuaaua

SEQ ID NO: 36485 - DNA, 21 bp, Homo sapiens
aacgatcaacacggaattatt

SEQ ID NO: 36486 - RNA, 21 nt, RNAi
cgaucaacacggaauuauuuu

SEQ ID NO: 36487 - RNA, 21 nt, RNAi
uugcuaguugugccuuaauaa

SEQ ID NO: 36488 - DNA, 21 bp, Homo sapiens
aaggactgaaacttgcgacta

SEQ ID NO: 36489 - RNA, 21 nt, RNAi
ggacugaaacuugcgacuauu

SEQ ID NO: 36490 - RNA, 21 nt, RNAi
uuccugacuuugaacgcugau

SEQ ID NO: 36491 - DNA, 21 bp, Homo sapiens
aaacttgcgactacaattctg

SEQ ID NO: 36492 - RNA, 21 nt, RNAi
acuugcgacuacaauucuguu

SEQ ID NO: 36493 - RNA, 21 nt, RNAi
uuugaacgcugauguuaagac

SEQ ID NO: 36494 - DNA, 21 bp, Homo sapiens
aacttgcgactacaattctgc

SEQ ID NO: 36495 - RNA, 21 nt, RNAi
cuugcgacuacaauucugcuu

SEQ ID NO: 36496 - RNA, 21 nt, RNAi
uugaacgcugauguuaagacg

SEQ ID NO: 36497 - DNA, 21 bp, Homo sapiens
aatacaagtcatggttcattc

SEQ ID NO: 36498 - RNA, 21 nt, RNAi
uacaagucaugguucauucuu

SEQ ID NO: 36499 - RNA, 21 nt, RNAi
uuauguucaguaccaaguaag

SEQ ID NO: 36500 - DNA, 21 bp, Homo sapiens
aacttagacgtgttctggagc

SEQ ID NO: 36501 - RNA, 21 nt, RNAi
cuuagacguguucuggagcuu

SEQ ID NO: 36502 - RNA, 21 nt, RNAi
uugaaucugcacaagaccucg

SEQ ID NO: 36503 - DNA, 21 bp, Homo sapiens
aactccgcggttcaataatta

SEQ ID NO: 36504 - RNA, 21 nt, RNAi
cuccgcgguucaauaauuauu

SEQ ID NO: 36505 - RNA, 21 nt, RNAi
uugaggcgccaaguuauuaau

SEQ ID NO: 36506 - DNA, 21 bp, Homo sapiens
aagtttcacacgccagtcctt

SEQ ID NO: 36507 - RNA, 21 nt, RNAi
guuucacacgccaguccuuuu

SEQ ID NO: 36508 - RNA, 21 nt, RNAi
uucaaagugugcggucaggaa

SEQ ID NO: 36509 - DNA, 21 bp, Homo sapiens
aagattctagacgtgatgtat

SEQ ID NO: 36510 - RNA, 21 nt, RNAi
gauucuagacgugauguauuu

SEQ ID NO: 36511 - RNA, 21 nt, RNAi
uucuaagaucugcacuacaua

SEQ ID NO: 36512 - DNA, 21 bp, Homo sapiens
aaattgtgctacgatgcattt

SEQ ID NO: 36513 - RNA, 21 nt, RNAi
auugugcuacgaugcauuuuu

SEQ ID NO: 36514 - RNA, 21 nt, RNAi
uuuaacacgaugcuacguaaa

SEQ ID NO: 36515 - DNA, 21 bp, Homo sapiens
aattgtgctacgatgcattta

SEQ ID NO: 36516 - RNA, 21 nt, RNAi
uugugcuacgaugcauuuauu

SEQ ID NO: 36517 - RNA, 21 nt, RNAi
uuaacacgaugcuacguaaau

SEQ ID NO: 36518 - DNA, 21 bp, Homo sapiens
aagactttaccattgtgcagc

SEQ ID NO: 36519 - RNA, 21 nt, RNAi
gacuuuaccauugugcagcuu

SEQ ID NO: 36520 - RNA, 21 nt, RNAi
uucugaaaugguaacacgucg

SEQ ID NO: 36521 - DNA, 21 bp, Homo sapiens
aaatctgatcgacctgaagcg

SEQ ID NO: 36522 - RNA, 21 nt, RNAi
aucugaucgaccugaagcguu

SEQ ID NO: 36523 - RNA, 21 nt, RNAi
uuuagacuagcuggacuucgc

SEQ ID NO: 36524 - DNA, 21 bp, Homo sapiens
aatacagaagaggtctttcgc

SEQ ID NO: 36525 - RNA, 21 nt, RNAi
uacagaagaggucuuucgcuu

SEQ ID NO: 36526 - RNA, 21 nt, RNAi
uuaugucuucuccagaaagcg

SEQ ID NO: 36527 - DNA, 21 bp, Homo sapiens
aagtgttagcaaatcgattgc

SEQ ID NO: 36528 - RNA, 21 nt, RNAi
guguuagcaaaucgauugcuu

SEQ ID NO: 36529 - RNA, 21 nt, RNAi
uucacaaucguuuagcuaacg

SEQ ID NO: 36530 - DNA, 21 bp, Homo sapiens
aattgctaggcatcgtgatgg

SEQ ID NO: 36531 - RNA, 21 nt, RNAi
uugcuaggcaucgugaugguu

SEQ ID NO: 36532 - RNA, 21 nt, RNAi
uuaacgauccguagcacuacc

SEQ ID NO: 36533 - DNA, 21 bp, Homo sapiens
aaagaagtgtatgccgctgca

SEQ ID NO: 36534 - RNA, 21 nt, RNAi
agaaguguaugccgcugcauu

SEQ ID NO: 36535 - RNA, 21 nt, RNAi
uuucuucacauacggcgacgu

SEQ ID NO: 36536 - DNA, 21 bp, Homo sapiens
aagttctaggacttatacttc

SEQ ID NO: 36537 - RNA, 21 nt, RNAi
guucuaggacuuauacuucuu

SEQ ID NO: 36538 - RNA, 21 nt, RNAi
uucaagauccugaauaugaag

SEQ ID NO: 36539 - DNA, 21 bp, Homo sapiens
aacatcagaatactatggagg

SEQ ID NO: 36540 - RNA, 21 nt, RNAi
caucagaauacuauggagguu

SEQ ID NO: 36541 - RNA, 21 nt, RNAi
uuguagucuuaugauaccucc

SEQ ID NO: 36542 - DNA, 21 bp, Homo sapiens
aatgacagagctgtacttcca

SEQ ID NO: 36543 - RNA, 21 nt, RNAi
ugacagagcuguacuuccauu

SEQ ID NO: 36544 - RNA, 21 nt, RNAi
uuacugucucgacaugaaggu

SEQ ID NO: 36545 - DNA, 21 bp, Homo sapiens
aaagagcaaggacttcgttca

SEQ ID NO: 36546 - RNA, 21 nt, RNAi
agagcaaggacuucguucauu

SEQ ID NO: 36547 - RNA, 21 nt, RNAi
uuucucguuccugaagcaagu

SEQ ID NO: 36548 - DNA, 21 bp, Homo sapiens
aagagcaaggacttcgttcaa

SEQ ID NO: 36549 - RNA, 21 nt, RNAi
gagcaaggacuucguucaauu

SEQ ID NO: 36550 - RNA, 21 nt, RNAi
uucucguuccugaagcaaguu

SEQ ID NO: 36551 - DNA, 21 bp, Homo sapiens
aactccgagaacttctgaacc

SEQ ID NO: 36552 - RNA, 21 nt, RNAi
cuccgagaacuucugaaccuu

SEQ ID NO: 36553 - RNA, 21 nt, RNAi
uugaggcucuugaagacuugg

SEQ ID NO: 36554 - DNA, 21 bp, Homo sapiens
aaagtgagacagataatgact

SEQ ID NO: 36555 - RNA, 21 nt, RNAi
agugagacagauaaugacuuu

SEQ ID NO: 36556 - RNA, 21 nt, RNAi
uuucacucugucuauuacuga

SEQ ID NO: 36557 - DNA, 21 bp, Homo sapiens
aagtgagacagataatgactc

SEQ ID NO: 36558 - RNA, 21 nt, RNAi
gugagacagauaaugacucuu

SEQ ID NO: 36559 - RNA, 21 nt, RNAi
uucacucugucuauuacugag

SEQ ID NO: 36560 - DNA, 21 bp, Homo sapiens
aaggattgatcgatgagaacc

SEQ ID NO: 36561 - RNA, 21 nt, RNAi
ggauugaucgaugagaaccuu

SEQ ID NO: 36562 - RNA, 21 nt, RNAi
uuccuaacuagcuacucuugg

SEQ ID NO: 36563 - DNA, 21 bp, Homo sapiens
aatttctggagccatgaaact

SEQ ID NO: 36564 - RNA, 21 nt, RNAi
uuucuggagccaugaaacuuu

SEQ ID NO: 36565 - RNA, 21 nt, RNAi
uuaaagaccucgguacuuuga

SEQ ID NO: 36566 - DNA, 21 bp, Homo sapiens
aaataccttggaccggttgct

SEQ ID NO: 36567 - RNA, 21 nt, RNAi
auaccuuggaccgguugcuuu

SEQ ID NO: 36568 - RNA, 21 nt, RNAi
uuuauggaaccuggccaacga

SEQ ID NO: 36569 - DNA, 21 bp, Homo sapiens
aagtactgttctcactccgat

SEQ ID NO: 36570 - RNA, 21 nt, RNAi
guacuguucucacuccgauuu

SEQ ID NO: 36571 - RNA, 21 nt, RNAi
uucaugacaagagugaggcua

SEQ ID NO: 36572 - DNA, 21 bp, Homo sapiens
aagctcagtttgatgtatgcc

SEQ ID NO: 36573 - RNA, 21 nt, RNAi
gcucaguuugauguaugccuu

SEQ ID NO: 36574 - RNA, 21 nt, RNAi
uucgagucaaacuacauacgg

SEQ ID NO: 36575 - DNA, 21 bp, Homo sapiens
aattggagaatacgacgtcct

SEQ ID NO: 36576 - RNA, 21 nt, RNAi
uuggagaauacgacguccuuu

SEQ ID NO: 36577 - RNA, 21 nt, RNAi
uuaaccucuuaugcugcagga

SEQ ID NO: 36578 - DNA, 21 bp, Homo sapiens
aacaaagcaaatcactcagag

SEQ ID NO: 36579 - RNA, 21 nt, RNAi
caaagcaaaucacucagaguu

SEQ ID NO: 36580 - RNA, 21 nt, RNAi
uuguuucguuuagugagucuc

SEQ ID NO: 36581 - DNA, 21 bp, Homo sapiens
aaccaccttgctgagtggaaa

SEQ ID NO: 36582 - RNA, 21 nt, RNAi
ccaccuugcugaguggaaauu

SEQ ID NO: 36583 - RNA, 21 nt, RNAi
uugguggaacgacucaccuuu

SEQ ID NO: 36584 - DNA, 21 bp, Homo sapiens
aatactgttctacagccagta

SEQ ID NO: 36585 - RNA, 21 nt, RNAi
uacuguucuacagccaguauu

SEQ ID NO: 36586 - RNA, 21 nt, RNAi
uuaugacaagaugucggucau

SEQ ID NO: 36587 - DNA, 21 bp, Homo sapiens
aaagtagactcaccaaattgc

SEQ ID NO: 36588 - RNA, 21 nt, RNAi
aguagacucaccaaauugcuu

SEQ ID NO: 36589 - RNA, 21 nt, RNAi
uuucaucugagugguuuaacg

SEQ ID NO: 36590 - DNA, 21 bp, Homo sapiens
aagtagactcaccaaattgca

SEQ ID NO: 36591 - RNA, 21 nt, RNAi
guagacucaccaaauugcauu

SEQ ID NO: 36592 - RNA, 21 nt, RNAi
uucaucugagugguuuaacgu

SEQ ID NO: 36593 - DNA, 21 bp, Homo sapiens
aaattgcagtctgtacaggct

SEQ ID NO: 36594 - RNA, 21 nt, RNAi
auugcagucuguacaggcuuu

SEQ ID NO: 36595 - RNA, 21 nt, RNAi
uuuaacgucagacauguccga

SEQ ID NO: 36596 - DNA, 21 bp, Homo sapiens
aattgcagtctgtacaggctt

SEQ ID NO: 36597 - RNA, 21 nt, RNAi
uugcagucuguacaggcuuuu

SEQ ID NO: 36598 - RNA, 21 nt, RNAi
uuaacgucagacauguccgaa

SEQ ID NO: 36599 - DNA, 21 bp, Homo sapiens
aaacagtctctttgttggatg

SEQ ID NO: 36600 - RNA, 21 nt, RNAi
acagucucuuuguuggauguu

SEQ ID NO: 36601 - RNA, 21 nt, RNAi
uuugucagagaaacaaccuac

SEQ ID NO: 36602 - DNA, 21 bp, Homo sapiens
aacagtctctttgttggatga

SEQ ID NO: 36603 - RNA, 21 nt, RNAi
cagucucuuuguuggaugauu

SEQ ID NO: 36604 - RNA, 21 nt, RNAi
uugucagagaaacaaccuacu

SEQ ID NO: 36605 - DNA, 21 bp, Homo sapiens
aacaacgtgtcaagctactta

SEQ ID NO: 36606 - RNA, 21 nt, RNAi
caacgugucaagcuacuuauu

SEQ ID NO: 36607 - RNA, 21 nt, RNAi
uuguugcacaguucgaugaau

SEQ ID NO: 36608 - DNA, 21 bp, Homo sapiens
aacgtgtcaagctacttaagc

SEQ ID NO: 36609 - RNA, 21 nt, RNAi
cgugucaagcuacuuaagcuu

SEQ ID NO: 36610 - RNA, 21 nt, RNAi
uugcacaguucgaugaauucg

SEQ ID NO: 36611 - DNA, 21 bp, Homo sapiens
aagtttcctagattacttcag

SEQ ID NO: 36612 - RNA, 21 nt, RNAi
guuuccuagauuacuucaguu

SEQ ID NO: 36613 - RNA, 21 nt, RNAi
uucaaaggaucuaaugaaguc

SEQ ID NO: 36614 - DNA, 21 bp, Homo sapiens
aaagaccaagccgttgctgtt

SEQ ID NO: 36615 - RNA, 21 nt, RNAi
agaccaagccguugcuguuuu

SEQ ID NO: 36616 - RNA, 21 nt, RNAi
uuucugguucggcaacgacaa

SEQ ID NO: 36617 - DNA, 21 bp, Homo sapiens
aagcagcgaaagctattcctt

SEQ ID NO: 36618 - RNA, 21 nt, RNAi
gcagcgaaagcuauuccuuuu

SEQ ID NO: 36619 - RNA, 21 nt, RNAi
uucgucgcuuucgauaaggaa

SEQ ID NO: 36620 - DNA, 21 bp, Homo sapiens
aaggagtttgtggcaaggatt

SEQ ID NO: 36621 - RNA, 21 nt, RNAi
ggaguuuguggcaaggauuuu

SEQ ID NO: 36622 - RNA, 21 nt, RNAi
uuccucaaacaccguuccuaa

SEQ ID NO: 36623 - DNA, 21 bp, Homo sapiens
aaagtaagttggatcaaggag

SEQ ID NO: 36624 - RNA, 21 nt, RNAi
aguaaguuggaucaaggaguu

SEQ ID NO: 36625 - RNA, 21 nt, RNAi
uuucauucaaccuaguuccuc

SEQ ID NO: 36626 - DNA, 21 bp, Homo sapiens
aaggaggagtgattcaagatt

SEQ ID NO: 36627 - RNA, 21 nt, RNAi
ggaggagugauucaagauuuu

SEQ ID NO: 36628 - RNA, 21 nt, RNAi
uuccuccucacuaaguucuaa

SEQ ID NO: 36629 - DNA, 21 bp, Homo sapiens
aatgccttagatcagctctct

SEQ ID NO: 36630 - RNA, 21 nt, RNAi
ugccuuagaucagcucucuuu

SEQ ID NO: 36631 - RNA, 21 nt, RNAi
uuacggaaucuagucgagaga

SEQ ID NO: 36632 - DNA, 21 bp, Homo sapiens
aaggattggagcaatgatgta

SEQ ID NO: 36633 - RNA, 21 nt, RNAi
ggauuggagcaaugauguauu

SEQ ID NO: 36634 - RNA, 21 nt, RNAi
uuccuaaccucguuacuacau

SEQ ID NO: 36635 - DNA, 21 bp, Homo sapiens
aaagaatgtatgcagccttgg

SEQ ID NO: 36636 - RNA, 21 nt, RNAi
agaauguaugcagccuugguu

SEQ ID NO: 36637 - RNA, 21 nt, RNAi
uuucuuacauacgucggaacc

SEQ ID NO: 36638 - DNA, 21 bp, Homo sapiens
aaaggaggttctaaactactg

SEQ ID NO: 36639 - RNA, 21 nt, RNAi
aggagguucuaaacuacuguu

SEQ ID NO: 36640 - RNA, 21 nt, RNAi
uuuccuccaagauuugaugac

SEQ ID NO: 36641 - DNA, 21 bp, Homo sapiens
aaggaggttctaaactactga

SEQ ID NO: 36642 - RNA, 21 nt, RNAi
ggagguucuaaacuacugauu

SEQ ID NO: 36643 - RNA, 21 nt, RNAi
uuccuccaagauuugaugacu

SEQ ID NO: 36644 - DNA, 21 bp, Homo sapiens
aaagccattgccagagtacca

SEQ ID NO: 36645 - RNA, 21 nt, RNAi
agccauugccagaguaccauu

SEQ ID NO: 36646 - RNA, 21 nt, RNAi
uuucgguaacggucucauggu

SEQ ID NO: 36647 - DNA, 21 bp, Homo sapiens
aacaactttatggtggccatg

SEQ ID NO: 36648 - RNA, 21 nt, RNAi
caacuuuaugguggccauguu

SEQ ID NO: 36649 - RNA, 21 nt, RNAi
uuguugaaauaccaccgguac

SEQ ID NO: 36650 - DNA, 21 bp, Homo sapiens
aagagaaagttagcaggtgcc

SEQ ID NO: 36651 - RNA, 21 nt, RNAi
gagaaaguuagcaggugccuu

SEQ ID NO: 36652 - RNA, 21 nt, RNAi
uucucuuucaaucguccacgg

SEQ ID NO: 36653 - DNA, 21 bp, Homo sapiens
aaagttagcaggtgccaatcc

SEQ ID NO: 36654 - RNA, 21 nt, RNAi
aguuagcaggugccaauccuu

SEQ ID NO: 36655 - RNA, 21 nt, RNAi
uuucaaucguccacgguuagg

SEQ ID NO: 36656 - DNA, 21 bp, Homo sapiens
aagttagcaggtgccaatcca

SEQ ID NO: 36657 - RNA, 21 nt, RNAi
guuagcaggugccaauccauu

SEQ ID NO: 36658 - RNA, 21 nt, RNAi
uucaaucguccacgguuaggu

SEQ ID NO: 36659 - DNA, 21 bp, Homo sapiens
aaagatcacaacattcgtgcc

SEQ ID NO: 36660 - RNA, 21 nt, RNAi
agaucacaacauucgugccuu

SEQ ID NO: 36661 - RNA, 21 nt, RNAi
uuucuaguguuguaagcacgg

SEQ ID NO: 36662 - DNA, 21 bp, Homo sapiens
cagatgacatcagcagtaaga

SEQ ID NO: 36663 - RNA, 21 nt, RNAi
gaugacaucagcaguaagauu

SEQ ID NO: 36664 - RNA, 21 nt, RNAi
uucuacuguagucgucauucu

SEQ ID NO: 36665 - DNA, 21 bp, Homo sapiens
cactaagtccatggaagaaga

SEQ ID NO: 36666 - RNA, 21 nt, RNAi
cuaaguccauggaagaagauu

SEQ ID NO: 36667 - RNA, 21 nt, RNAi
uugauucagguaccuucuucu

SEQ ID NO: 36668 - DNA, 21 bp, Homo sapiens
caattcgtcctcagattgatc

SEQ ID NO: 36669 - RNA, 21 nt, RNAi
auucguccucagauugaucuu

SEQ ID NO: 36670 - RNA, 21 nt, RNAi
uuuaagcaggagucuaacuag

SEQ ID NO: 36671 - DNA, 21 bp, Homo sapiens
catgcatctcagtttagcacc

SEQ ID NO: 36672 - RNA, 21 nt, RNAi
ugcaucucaguuuagcaccuu

SEQ ID NO: 36673 - RNA, 21 nt, RNAi
uuacguagagucaaaucgugg

SEQ ID NO: 36674 - DNA, 21 bp, Homo sapiens
caactacgtgtctctatttga

SEQ ID NO: 36675 - RNA, 21 nt, RNAi
acuacgugucucuauuugauu

SEQ ID NO: 36676 - RNA, 21 nt, RNAi
uuugaugcacagagauaaacu

SEQ ID NO: 36677 - DNA, 21 bp, Homo sapiens
cagtactttatggagcagttt

SEQ ID NO: 36678 - RNA, 21 nt, RNAi
guacuuuauggagcaguuuuu

SEQ ID NO: 36679 - RNA, 21 nt, RNAi
uucaugaaauaccucgucaaa

SEQ ID NO: 36680 - DNA, 21 bp, Homo sapiens
cagaaatgtggattcgaacaa

SEQ ID NO: 36681 - RNA, 21 nt, RNAi
gaaauguggauucgaacaauu

SEQ ID NO: 36682 - RNA, 21 nt, RNAi
uucuuuacaccuaagcuuguu

SEQ ID NO: 36683 - DNA, 21 bp, Homo sapiens
caacaaggagttatctattgc

SEQ ID NO: 36684 - RNA, 21 nt, RNAi
acaaggaguuaucuauugcuu

SEQ ID NO: 36685 - RNA, 21 nt, RNAi
uuuguuccucaauagauaacg

SEQ ID NO: 36686 - DNA, 21 bp, Homo sapiens
catgtacgttgagctcattca

SEQ ID NO: 36687 - RNA, 21 nt, RNAi
uguacguugagcucauucauu

SEQ ID NO: 36688 - RNA, 21 nt, RNAi
uuacaugcaacucgaguaagu

SEQ ID NO: 36689 - DNA, 21 bp, Homo sapiens
cattcagcgctgcaagcagat

SEQ ID NO: 36690 - RNA, 21 nt, RNAi
uucagcgcugcaagcagauuu

SEQ ID NO: 36691 - RNA, 21 nt, RNAi
uuaagucgcgacguucgucua

SEQ ID NO: 36692 - DNA, 21 bp, Homo sapiens
cagtctgttgcaagcgtcttg

SEQ ID NO: 36693 - RNA, 21 nt, RNAi
gucuguugcaagcgucuuguu

SEQ ID NO: 36694 - RNA, 21 nt, RNAi
uucagacaacguucgcagaac

SEQ ID NO: 36695 - DNA, 21 bp, Homo sapiens
caagcgtcttgctgtaccttg

SEQ ID NO: 36696 - RNA, 21 nt, RNAi
agcgucuugcuguaccuuguu

SEQ ID NO: 36697 - RNA, 21 nt, RNAi
uuucgcagaacgacauggaac

SEQ ID NO: 36698 - DNA, 21 bp, Homo sapiens
cagagccatagtgaaggtgtt

SEQ ID NO: 36699 - RNA, 21 nt, RNAi
gagccauagugaagguguuuu

SEQ ID NO: 36700 - RNA, 21 nt, RNAi
uucucgguaucacuuccacaa

SEQ ID NO: 36701 - DNA, 21 bp, Homo sapiens
catagtgaaggtgttcctagc

SEQ ID NO: 36702 - RNA, 21 nt, RNAi
uagugaagguguuccuagcuu

SEQ ID NO: 36703 - RNA, 21 nt, RNAi
uuaucacuuccacaaggaucg

SEQ ID NO: 36704 - DNA, 21 bp, Homo sapiens
catacaaagactacgtggatc

SEQ ID NO: 36705 - RNA, 21 nt, RNAi
uacaaagacuacguggaucuu

SEQ ID NO: 36706 - RNA, 21 nt, RNAi
uuauguuucugaugcaccuag

SEQ ID NO: 36707 - DNA, 21 bp, Homo sapiens
caaagactacgtggatctctt

SEQ ID NO: 36708 - RNA, 21 nt, RNAi
aagacuacguggaucucuuuu

SEQ ID NO: 36709 - RNA, 21 nt, RNAi
uuuucugaugcaccuagagaa

SEQ ID NO: 36710 - DNA, 21 bp, Homo sapiens
caacttcagatccagcggcta

SEQ ID NO: 36711 - RNA, 21 nt, RNAi
acuucagauccagcggcuauu

SEQ ID NO: 36712 - RNA, 21 nt, RNAi
uuugaagucuaggucgccgau

SEQ ID NO: 36713 - DNA, 21 bp, Homo sapiens
cattgaactcgatgttagagc

SEQ ID NO: 36714 - RNA, 21 nt, RNAi
uugaacucgauguuagagcuu

SEQ ID NO: 36715 - RNA, 21 nt, RNAi
uuaacuugagcuacaaucucg

SEQ ID NO: 36716 - DNA, 21 bp, Homo sapiens
cagacatgtaatgcagcctta

SEQ ID NO: 36717 - RNA, 21 nt, RNAi
gacauguaaugcagccuuauu

SEQ ID NO: 36718 - RNA, 21 nt, RNAi
uucuguacauuacgucggaau

SEQ ID NO: 36719 - DNA, 21 bp, Homo sapiens
catcaaacgaagcaatatcct

SEQ ID NO: 36720 - RNA, 21 nt, RNAi
ucaaacgaagcaauauccuuu

SEQ ID NO: 36721 - RNA, 21 nt, RNAi
uuaguuugcuucguuauagga

SEQ ID NO: 36722 - DNA, 21 bp, Homo sapiens
cagtcacgtcctcagatgaga

SEQ ID NO: 36723 - RNA, 21 nt, RNAi
gucacguccucagaugagauu

SEQ ID NO: 36724 - RNA, 21 nt, RNAi
uucagugcaggagucuacucu

SEQ ID NO: 36725 - DNA, 21 bp, Homo sapiens
cacagaattagcgctcacagc

SEQ ID NO: 36726 - RNA, 21 nt, RNAi
cagaauuagcgcucacagcuu

SEQ ID NO: 36727 - RNA, 21 nt, RNAi
uugucuuaaucgcgagugucg

SEQ ID NO: 36728 - DNA, 21 bp, Homo sapiens
cagtgacagacaaactaaagt

SEQ ID NO: 36729 - RNA, 21 nt, RNAi
gugacagacaaacuaaaguuu

SEQ ID NO: 36730 - RNA, 21 nt, RNAi
uucacugucuguuugauuuca

SEQ ID NO: 36731 - DNA, 21 bp, Homo sapiens
cagctctataagcggacgttt

SEQ ID NO: 36732 - RNA, 21 nt, RNAi
gcucuauaagcggacguuuuu

SEQ ID NO: 36733 - RNA, 21 nt, RNAi
uucgagauauucgccugcaaa

SEQ ID NO: 36734 - DNA, 21 bp, Homo sapiens
caggtgacaaggcaactgtat

SEQ ID NO: 36735 - RNA, 21 nt, RNAi
ggugacaaggcaacuguauuu

SEQ ID NO: 36736 - RNA, 21 nt, RNAi
uuccacuguuccguugacaua

SEQ ID NO: 36737 - DNA, 21 bp, Homo sapiens
cagtaaacaccaaatcgcttt

SEQ ID NO: 36738 - RNA, 21 nt, RNAi
guaaacaccaaaucgcuuuuu

SEQ ID NO: 36739 - RNA, 21 nt, RNAi
uucauuugugguuuagcgaaa

SEQ ID NO: 36740 - DNA, 21 bp, Homo sapiens
caagcgactttatagccttgc

SEQ ID NO: 36741 - RNA, 21 nt, RNAi
agcgacuuuauagccuugcuu

SEQ ID NO: 36742 - RNA, 21 nt, RNAi
uuucgcugaaauaucggaacg

SEQ ID NO: 36743 - DNA, 21 bp, Homo sapiens
catgcagatgagaagtcctta

SEQ ID NO: 36744 - RNA, 21 nt, RNAi
ugcagaugagaaguccuuauu

SEQ ID NO: 36745 - RNA, 21 nt, RNAi
uuacgucuacucuucaggaau

SEQ ID NO: 36746 - DNA, 21 bp, Homo sapiens
cagatgagaagtccttaggta

SEQ ID NO: 36747 - RNA, 21 nt, RNAi
gaugagaaguccuuagguauu

SEQ ID NO: 36748 - RNA, 21 nt, RNAi
uucuacucuucaggaauccau

SEQ ID NO: 36749 - DNA, 21 bp, Homo sapiens
cattgatcacctatgccgcat

SEQ ID NO: 36750 - RNA, 21 nt, RNAi
uugaucaccuaugccgcauuu

SEQ ID NO: 36751 - RNA, 21 nt, RNAi
uuaacuaguggauacggcgua

SEQ ID NO: 36752 - DNA, 21 bp, Homo sapiens
cacctatgccgcatcattgaa

SEQ ID NO: 36753 - RNA, 21 nt, RNAi
ccuaugccgcaucauugaauu

SEQ ID NO: 36754 - RNA, 21 nt, RNAi
uuggauacggcguaguaacuu

SEQ ID NO: 36755 - DNA, 21 bp, Homo sapiens
cagacagaatgtcgacacaaa

SEQ ID NO: 36756 - RNA, 21 nt, RNAi
gacagaaugucgacacaaauu

SEQ ID NO: 36757 - RNA, 21 nt, RNAi
uucugucuuacagcuguguuu

SEQ ID NO: 36758 - DNA, 21 bp, Homo sapiens
cagaatgtcgacacaaatcca

SEQ ID NO: 36759 - RNA, 21 nt, RNAi
gaaugucgacacaaauccauu

SEQ ID NO: 36760 - RNA, 21 nt, RNAi
uucuuacagcuguguuuaggu

SEQ ID NO: 36761 - DNA, 21 bp, Homo sapiens
caacacgttcattggcgagag

SEQ ID NO: 36762 - RNA, 21 nt, RNAi
acacguucauuggcgagaguu

SEQ ID NO: 36763 - RNA, 21 nt, RNAi
uuugugcaaguaaccgcucuc

SEQ ID NO: 36764 - DNA, 21 bp, Homo sapiens
cacgttcattggcgagagaac

SEQ ID NO: 36765 - RNA, 21 nt, RNAi
cguucauuggcgagagaacuu

SEQ ID NO: 36766 - RNA, 21 nt, RNAi
uugcaaguaaccgcucucuug

SEQ ID NO: 36767 - DNA, 21 bp, Homo sapiens
cattggcgagagaactgtagg

SEQ ID NO: 36768 - RNA, 21 nt, RNAi
uuggcgagagaacuguagguu

SEQ ID NO: 36769 - RNA, 21 nt, RNAi
uuaaccgcucucuugacaucc

SEQ ID NO: 36770 - DNA, 21 bp, Homo sapiens
cattgccatgcatgacattat

SEQ ID NO: 36771 - RNA, 21 nt, RNAi
uugccaugcaugacauuauuu

SEQ ID NO: 36772 - RNA, 21 nt, RNAi
uuaacgguacguacuguaaua

SEQ ID NO: 36773 - DNA, 21 bp, Homo sapiens
caactacagcaaatgcaccgt

SEQ ID NO: 36774 - RNA, 21 nt, RNAi
acuacagcaaaugcaccguuu

SEQ ID NO: 36775 - RNA, 21 nt, RNAi
uuugaugucguuuacguggca

SEQ ID NO: 36776 - DNA, 21 bp, Homo sapiens
cagcaaatgcaccgttgtggt

SEQ ID NO: 36777 - RNA, 21 nt, RNAi
gcaaaugcaccguugugguuu

SEQ ID NO: 36778 - RNA, 21 nt, RNAi
uucguuuacguggcaacacca

SEQ ID NO: 36779 - DNA, 21 bp, Homo sapiens
caccgttgtggtccggattat

SEQ ID NO: 36780 - RNA, 21 nt, RNAi
ccguugugguccggauuauuu

SEQ ID NO: 36781 - RNA, 21 nt, RNAi
uuggcaacaccaggccuaaua

SEQ ID NO: 36782 - DNA, 21 bp, Homo sapiens
cacgactctgctaaacacctc

SEQ ID NO: 36783 - RNA, 21 nt, RNAi
cgacucugcuaaacaccucuu

SEQ ID NO: 36784 - RNA, 21 nt, RNAi
uugcugagacgauuuguggag

SEQ ID NO: 36785 - DNA, 21 bp, Homo sapiens
cataggtttcaacatcggaga

SEQ ID NO: 36786 - RNA, 21 nt, RNAi
uagguuucaacaucggagauu

SEQ ID NO: 36787 - RNA, 21 nt, RNAi
uuauccaaaguuguagccucu

SEQ ID NO: 36788 - DNA, 21 bp, Homo sapiens
catcggagacgtccaggttat

SEQ ID NO: 36789 - RNA, 21 nt, RNAi
ucggagacguccagguuauuu

SEQ ID NO: 36790 - RNA, 21 nt, RNAi
uuagccucugcagguccaaua

SEQ ID NO: 36791 - DNA, 21 bp, Homo sapiens
cacagagcattgaggagcttt

SEQ ID NO: 36792 - RNA, 21 nt, RNAi
cagagcauugaggagcuuuuu

SEQ ID NO: 36793 - RNA, 21 nt, RNAi
uugucucguaacuccucgaaa

SEQ ID NO: 36794 - DNA, 21 bp, Homo sapiens
cagagcattgaggagctttgt

SEQ ID NO: 36795 - RNA, 21 nt, RNAi
gagcauugaggagcuuuguuu

SEQ ID NO: 36796 - RNA, 21 nt, RNAi
uucucguaacuccucgaaaca

SEQ ID NO: 36797 - DNA, 21 bp, Homo sapiens
cattgaggagctttgtgccgt

SEQ ID NO: 36798 - RNA, 21 nt, RNAi
uugaggagcuuugugccguuu

SEQ ID NO: 36799 - RNA, 21 nt, RNAi
uuaacuccucgaaacacggca

SEQ ID NO: 36800 - DNA, 21 bp, Homo sapiens
cagaaacgatcaacacggaat

SEQ ID NO: 36801 - RNA, 21 nt, RNAi
gaaacgaucaacacggaauuu

SEQ ID NO: 36802 - RNA, 21 nt, RNAi
uucuuugcuaguugugccuua

SEQ ID NO: 36803 - DNA, 21 bp, Homo sapiens
caaggactgaaacttgcgact

SEQ ID NO: 36804 - RNA, 21 nt, RNAi
aggacugaaacuugcgacuuu

SEQ ID NO: 36805 - RNA, 21 nt, RNAi
uuuccugacuuugaacgcuga

SEQ ID NO: 36806 - DNA, 21 bp, Homo sapiens
cagtctggaggaacttagacg

SEQ ID NO: 36807 - RNA, 21 nt, RNAi
gucuggaggaacuuagacguu

SEQ ID NO: 36808 - RNA, 21 nt, RNAi
uucagaccuccuugaaucugc

SEQ ID NO: 36809 - DNA, 21 bp, Homo sapiens
cagctcatcgttgctcacttc

SEQ ID NO: 36810 - RNA, 21 nt, RNAi
gcucaucguugcucacuucuu

SEQ ID NO: 36811 - RNA, 21 nt, RNAi
uucgaguagcaacgagugaag

SEQ ID NO: 36812 - DNA, 21 bp, Homo sapiens
caggaactccgcggttcaata

SEQ ID NO: 36813 - RNA, 21 nt, RNAi
ggaacuccgcgguucaauauu

SEQ ID NO: 36814 - RNA, 21 nt, RNAi
uuccuugaggcgccaaguuau

SEQ ID NO: 36815 - DNA, 21 bp, Homo sapiens
cattggaattatctcaaagcc

SEQ ID NO: 36816 - RNA, 21 nt, RNAi
uuggaauuaucucaaagccuu

SEQ ID NO: 36817 - RNA, 21 nt, RNAi
uuaaccuuaauagaguuucgg

SEQ ID NO: 36818 - DNA, 21 bp, Homo sapiens
catggctcgtgtattacagaa

SEQ ID NO: 36819 - RNA, 21 nt, RNAi
uggcucguguauuacagaauu

SEQ ID NO: 36820 - RNA, 21 nt, RNAi
uuaccgagcacauaaugucuu

SEQ ID NO: 36821 - DNA, 21 bp, Homo sapiens
cattgtgcagcatacaactgc

SEQ ID NO: 36822 - RNA, 21 nt, RNAi
uugugcagcauacaacugcuu

SEQ ID NO: 36823 - RNA, 21 nt, RNAi
uuaacacgucguauguugacg

SEQ ID NO: 36824 - DNA, 21 bp, Homo sapiens
cagcatacaactgcgccatat

SEQ ID NO: 36825 - RNA, 21 nt, RNAi
gcauacaacugcgccauauuu

SEQ ID NO: 36826 - RNA, 21 nt, RNAi
uucguauguugacgcgguaua

SEQ ID NO: 36827 - DNA, 21 bp, Homo sapiens
catacaactgcgccatatctg

SEQ ID NO: 36828 - RNA, 21 nt, RNAi
uacaacugcgccauaucuguu

SEQ ID NO: 36829 - RNA, 21 nt, RNAi
uuauguugacgcgguauagac

SEQ ID NO: 36830 - DNA, 21 bp, Homo sapiens
caactgcgccatatctgtcat

SEQ ID NO: 36831 - RNA, 21 nt, RNAi
acugcgccauaucugucauuu

SEQ ID NO: 36832 - RNA, 21 nt, RNAi
uuugacgcgguauagacagua

SEQ ID NO: 36833 - DNA, 21 bp, Homo sapiens
cactacatggtggttgagata

SEQ ID NO: 36834 - RNA, 21 nt, RNAi
cuacauggugguugagauauu

SEQ ID NO: 36835 - RNA, 21 nt, RNAi
uugauguaccaccaacucuau

SEQ ID NO: 36836 - DNA, 21 bp, Homo sapiens
catggtggttgagatagtggc

SEQ ID NO: 36837 - RNA, 21 nt, RNAi
uggugguugagauaguggcuu

SEQ ID NO: 36838 - RNA, 21 nt, RNAi
uuaccaccaacucuaucaccg

SEQ ID NO: 36839 - DNA, 21 bp, Homo sapiens
caattgctaggcatcgtgatg

SEQ ID NO: 36840 - RNA, 21 nt, RNAi
auugcuaggcaucgugauguu

SEQ ID NO: 36841 - RNA, 21 nt, RNAi
uuuaacgauccguagcacuac

SEQ ID NO: 36842 - DNA, 21 bp, Homo sapiens
catcgtgatggccaatgacct

SEQ ID NO: 36843 - RNA, 21 nt, RNAi
ucgugauggccaaugaccuuu

SEQ ID NO: 36844 - RNA, 21 nt, RNAi
uuagcacuaccgguuacugga

SEQ ID NO: 36845 - DNA, 21 bp, Homo sapiens
catccagagtagcgaatactt

SEQ ID NO: 36846 - RNA, 21 nt, RNAi
uccagaguagcgaauacuuuu

SEQ ID NO: 36847 - RNA, 21 nt, RNAi
uuaggucucaucgcuuaugaa

SEQ ID NO: 36848 - DNA, 21 bp, Homo sapiens
cagagtagcgaatacttccag

SEQ ID NO: 36849 - RNA, 21 nt, RNAi
gaguagcgaauacuuccaguu

SEQ ID NO: 36850 - RNA, 21 nt, RNAi
uucucaucgcuuaugaagguc

SEQ ID NO: 36851 - DNA, 21 bp, Homo sapiens
caacatcagaatactatggag

SEQ ID NO: 36852 - RNA, 21 nt, RNAi
acaucagaauacuauggaguu

SEQ ID NO: 36853 - RNA, 21 nt, RNAi
uuuguagucuuaugauaccuc

SEQ ID NO: 36854 - DNA, 21 bp, Homo sapiens
catcagaatactatggaggac

SEQ ID NO: 36855 - RNA, 21 nt, RNAi
ucagaauacuauggaggacuu

SEQ ID NO: 36856 - RNA, 21 nt, RNAi
uuagucuuaugauaccuccug

SEQ ID NO: 36857 - DNA, 21 bp, Homo sapiens
cagaatactatggaggacaag

SEQ ID NO: 36858 - RNA, 21 nt, RNAi
gaauacuauggaggacaaguu

SEQ ID NO: 36859 - RNA, 21 nt, RNAi
uucuuaugauaccuccuguuc

SEQ ID NO: 36860 - DNA, 21 bp, Homo sapiens
caaggattgatcgatgagaac

SEQ ID NO: 36861 - RNA, 21 nt, RNAi
aggauugaucgaugagaacuu

SEQ ID NO: 36862 - RNA, 21 nt, RNAi
uuuccuaacuagcuacucuug

SEQ ID NO: 36863 - DNA, 21 bp, Homo sapiens
caaataccttggaccggttgc

SEQ ID NO: 36864 - RNA, 21 nt, RNAi
aauaccuuggaccgguugcuu

SEQ ID NO: 36865 - RNA, 21 nt, RNAi
uuuuauggaaccuggccaacg

SEQ ID NO: 36866 - DNA, 21 bp, Homo sapiens
cacactgacacagactgcaga

SEQ ID NO: 36867 - RNA, 21 nt, RNAi
cacugacacagacugcagauu

SEQ ID NO: 36868 - RNA, 21 nt, RNAi
uugugacugugucugacgucu

SEQ ID NO: 36869 - DNA, 21 bp, Homo sapiens
caattggagaatacgacgtcc

SEQ ID NO: 36870 - RNA, 21 nt, RNAi
auuggagaauacgacguccuu

SEQ ID NO: 36871 - RNA, 21 nt, RNAi
uuuaaccucuuaugcugcagg

SEQ ID NO: 36872 - DNA, 21 bp, Homo sapiens
cagtgagataggaacaaagca

SEQ ID NO: 36873 - RNA, 21 nt, RNAi
gugagauaggaacaaagcauu

SEQ ID NO: 36874 - RNA, 21 nt, RNAi
uucacucuauccuuguuucgu

SEQ ID NO: 36875 - DNA, 21 bp, Homo sapiens
cagaagccagaagtgattatt

SEQ ID NO: 36876 - RNA, 21 nt, RNAi
gaagccagaagugauuauuuu

SEQ ID NO: 36877 - RNA, 21 nt, RNAi
uucuucggucuucacuaauaa

SEQ ID NO: 36878 - DNA, 21 bp, Homo sapiens
cagccagtatagacagtgaga

SEQ ID NO: 36879 - RNA, 21 nt, RNAi
gccaguauagacagugagauu

SEQ ID NO: 36880 - RNA, 21 nt, RNAi
uucggucauaucugucacucu

SEQ ID NO: 36881 - DNA, 21 bp, Homo sapiens
catatctaccttacatgatcc

SEQ ID NO: 36882 - RNA, 21 nt, RNAi
uaucuaccuuacaugauccuu

SEQ ID NO: 36883 - RNA, 21 nt, RNAi
uuauagauggaauguacuagg

SEQ ID NO: 36884 - DNA, 21 bp, Homo sapiens
catgatccgcagcaagctgaa

SEQ ID NO: 36885 - RNA, 21 nt, RNAi
ugauccgcagcaagcugaauu

SEQ ID NO: 36886 - RNA, 21 nt, RNAi
uuacuaggcgucguucgacuu

SEQ ID NO: 36887 - DNA, 21 bp, Homo sapiens
cagaaggcgattctagagctt

SEQ ID NO: 36888 - RNA, 21 nt, RNAi
gaaggcgauucuagagcuuuu

SEQ ID NO: 36889 - RNA, 21 nt, RNAi
uucuuccgcuaagaucucgaa

SEQ ID NO: 36890 - DNA, 21 bp, Homo sapiens
cattacagtcaagagctgagt

SEQ ID NO: 36891 - RNA, 21 nt, RNAi
uuacagucaagagcugaguuu

SEQ ID NO: 36892 - RNA, 21 nt, RNAi
uuaaugucaguucucgacuca

SEQ ID NO: 36893 - DNA, 21 bp, Homo sapiens
caccaaagtagactcaccaaa

SEQ ID NO: 36894 - RNA, 21 nt, RNAi
ccaaaguagacucaccaaauu

SEQ ID NO: 36895 - RNA, 21 nt, RNAi
uugguuucaucugagugguuu

SEQ ID NO: 36896 - DNA, 21 bp, Homo sapiens
caaagtagactcaccaaattg

SEQ ID NO: 36897 - RNA, 21 nt, RNAi
aaguagacucaccaaauuguu

SEQ ID NO: 36898 - RNA, 21 nt, RNAi
uuuucaucugagugguuuaac

SEQ ID NO: 36899 - DNA, 21 bp, Homo sapiens
caggagttcatcagctttata

SEQ ID NO: 36900 - RNA, 21 nt, RNAi
ggaguucaucagcuuuauauu

SEQ ID NO: 36901 - RNA, 21 nt, RNAi
uuccucaaguagucgaaauau

SEQ ID NO: 36902 - DNA, 21 bp, Homo sapiens
caaacagatatccagatgcta

SEQ ID NO: 36903 - RNA, 21 nt, RNAi
aacagauauccagaugcuauu

SEQ ID NO: 36904 - RNA, 21 nt, RNAi
uuuugucuauaggucuacgau

SEQ ID NO: 36905 - DNA, 21 bp, Homo sapiens
caggatggaagtgcaagagca

SEQ ID NO: 36906 - RNA, 21 nt, RNAi
ggauggaagugcaagagcauu

SEQ ID NO: 36907 - RNA, 21 nt, RNAi
uuccuaccuucacguucucgu

SEQ ID NO: 36908 - DNA, 21 bp, Homo sapiens
cacttgctatgaaactactga

SEQ ID NO: 36909 - RNA, 21 nt, RNAi
cuugcuaugaaacuacugauu

SEQ ID NO: 36910 - RNA, 21 nt, RNAi
uugaacgauacuuugaugacu

SEQ ID NO: 36911 - DNA, 21 bp, Homo sapiens
cagtctctttgttggatgaga

SEQ ID NO: 36912 - RNA, 21 nt, RNAi
gucucuuuguuggaugagauu

SEQ ID NO: 36913 - RNA, 21 nt, RNAi
uucagagaaacaaccuacucu

SEQ ID NO: 36914 - DNA, 21 bp, Homo sapiens
caacgtgtcaagctacttaag

SEQ ID NO: 36915 - RNA, 21 nt, RNAi
acgugucaagcuacuuaaguu

SEQ ID NO: 36916 - RNA, 21 nt, RNAi
uuugcacaguucgaugaauuc

SEQ ID NO: 36917 - DNA, 21 bp, Homo sapiens
caggatcatagcgaatgctct

SEQ ID NO: 36918 - RNA, 21 nt, RNAi
ggaucauagcgaaugcucuuu

SEQ ID NO: 36919 - RNA, 21 nt, RNAi
uuccuaguaucgcuuacgaga

SEQ ID NO: 36920 - DNA, 21 bp, Homo sapiens
catagcgaatgctctcagcag

SEQ ID NO: 36921 - RNA, 21 nt, RNAi
uagcgaaugcucucagcaguu

SEQ ID NO: 36922 - RNA, 21 nt, RNAi
uuaucgcuuacgagagucguc

SEQ ID NO: 36923 - DNA, 21 bp, Homo sapiens
cagaggattcagagaaggtga

SEQ ID NO: 36924 - RNA, 21 nt, RNAi
gaggauucagagaaggugauu

SEQ ID NO: 36925 - RNA, 21 nt, RNAi
uucuccuaagucucuuccacu

SEQ ID NO: 36926 - DNA, 21 bp, Homo sapiens
cagattatagaacggtatcca

SEQ ID NO: 36927 - RNA, 21 nt, RNAi
gauuauagaacgguauccauu

SEQ ID NO: 36928 - RNA, 21 nt, RNAi
uucuaauaucuugccauaggu

SEQ ID NO: 36929 - DNA, 21 bp, Homo sapiens
cagaggagactttgagcctca

SEQ ID NO: 36930 - RNA, 21 nt, RNAi
gaggagacuuugagccucauu

SEQ ID NO: 36931 - RNA, 21 nt, RNAi
uucuccucugaaacucggagu

SEQ ID NO: 36932 - DNA, 21 bp, Homo sapiens
caaagaccaagccgttgctgt

SEQ ID NO: 36933 - RNA, 21 nt, RNAi
aagaccaagccguugcuguuu

SEQ ID NO: 36934 - RNA, 21 nt, RNAi
uuuucugguucggcaacgaca

SEQ ID NO: 36935 - DNA, 21 bp, Homo sapiens
catcataagcagcgaaagcta

SEQ ID NO: 36936 - RNA, 21 nt, RNAi
ucauaagcagcgaaagcuauu

SEQ ID NO: 36937 - RNA, 21 nt, RNAi
uuaguauucgucgcuuucgau

SEQ ID NO: 36938 - DNA, 21 bp, Homo sapiens
cataagcagcgaaagctattc

SEQ ID NO: 36939 - RNA, 21 nt, RNAi
uaagcagcgaaagcuauucuu

SEQ ID NO: 36940 - RNA, 21 nt, RNAi
uuauucgucgcuuucgauaag

SEQ ID NO: 36941 - DNA, 21 bp, Homo sapiens
cagtgacttcaacgacattac

SEQ ID NO: 36942 - RNA, 21 nt, RNAi
gugacuucaacgacauuacuu

SEQ ID NO: 36943 - RNA, 21 nt, RNAi
uucacugaaguugcuguaaug

SEQ ID NO: 36944 - DNA, 21 bp, Homo sapiens
cagctgaggacctatagcgtt

SEQ ID NO: 36945 - RNA, 21 nt, RNAi
gcugaggaccuauagcguuuu

SEQ ID NO: 36946 - RNA, 21 nt, RNAi
uucgacuccuggauaucgcaa

SEQ ID NO: 36947 - DNA, 21 bp, Homo sapiens
caggttaggattaattgagtg

SEQ ID NO: 36948 - RNA, 21 nt, RNAi
gguuaggauuaauugaguguu

SEQ ID NO: 36949 - RNA, 21 nt, RNAi
uuccaauccuaauuaacucac

SEQ ID NO: 36950 - DNA, 21 bp, Homo sapiens
caccgccgtgtgaatataaag

SEQ ID NO: 36951 - RNA, 21 nt, RNAi
ccgccgugugaauauaaaguu

SEQ ID NO: 36952 - RNA, 21 nt, RNAi
uuggcggcacacuuauauuuc

SEQ ID NO: 36953 - DNA, 21 bp, Homo sapiens
cagctctcacgctctgatatg

SEQ ID NO: 36954 - RNA, 21 nt, RNAi
gcucucacgcucugauauguu

SEQ ID NO: 36955 - RNA, 21 nt, RNAi
uucgagagugcgagacuauac

SEQ ID NO: 36956 - DNA, 21 bp, Homo sapiens
catgcgtttggatccgctaca

SEQ ID NO: 36957 - RNA, 21 nt, RNAi
ugcguuuggauccgcuacauu

SEQ ID NO: 36958 - RNA, 21 nt, RNAi
uuacgcaaaccuaggcgaugu

SEQ ID NO: 36959 - DNA, 21 bp, Homo sapiens
cagcatcatggtacacgcact

SEQ ID NO: 36960 - RNA, 21 nt, RNAi
gcaucaugguacacgcacuuu

SEQ ID NO: 36961 - RNA, 21 nt, RNAi
uucguaguaccaugugcguga

SEQ ID NO: 36962 - DNA, 21 bp, Homo sapiens
catggatgtgtttgtcaagga

SEQ ID NO: 36963 - RNA, 21 nt, RNAi
uggauguguuugucaaggauu

SEQ ID NO: 36964 - RNA, 21 nt, RNAi
uuaccuacacaaacaguuccu

SEQ ID NO: 36965 - DNA, 21 bp, Homo sapiens
caaagatcacaacattcgtgc

SEQ ID NO: 36966 - RNA, 21 nt, RNAi
aagaucacaacauucgugcuu

SEQ ID NO: 36967 - RNA, 21 nt, RNAi
uuuucuaguguuguaagcacg

SEQ ID NO: 36968 - DNA, 21 bp, Homo sapiens
gattgatctgaagagatatgc

SEQ ID NO: 36969 - RNA, 21 nt, RNAi
uugaucugaagagauaugcuu

SEQ ID NO: 36970 - RNA, 21 nt, RNAi
uuaacuagacuucucuauacg

SEQ ID NO: 36971 - DNA, 21 bp, Homo sapiens
gatctgaagagatatgctgtg

SEQ ID NO: 36972 - RNA, 21 nt, RNAi
ucugaagagauaugcuguguu

SEQ ID NO: 36973 - RNA, 21 nt, RNAi
uuagacuucucuauacgacac

SEQ ID NO: 36974 - DNA, 21 bp, Homo sapiens
gaaatgtggattcgaacaaca

SEQ ID NO: 36975 - RNA, 21 nt, RNAi
aauguggauucgaacaacauu

SEQ ID NO: 36976 - RNA, 21 nt, RNAi
uuuuacaccuaagcuuguugu

SEQ ID NO: 36977 - DNA, 21 bp, Homo sapiens
gatgttgacttcatgtacgtt

SEQ ID NO: 36978 - RNA, 21 nt, RNAi
uguugacuucauguacguuuu

SEQ ID NO: 36979 - RNA, 21 nt, RNAi
uuacaacugaaguacaugcaa

SEQ ID NO: 36980 - DNA, 21 bp, Homo sapiens
gacttcatgtacgttgagctc

SEQ ID NO: 36981 - RNA, 21 nt, RNAi
cuucauguacguugagcucuu

SEQ ID NO: 36982 - RNA, 21 nt, RNAi
uugaaguacaugcaacucgag

SEQ ID NO: 36983 - DNA, 21 bp, Homo sapiens
gaggtgtatactccagttctg

SEQ ID NO: 36984 - RNA, 21 nt, RNAi
gguguauacuccaguucuguu

SEQ ID NO: 36985 - RNA, 21 nt, RNAi
uuccacauaugaggucaagac

SEQ ID NO: 36986 - DNA, 21 bp, Homo sapiens
gagccatagtgaaggtgttcc

SEQ ID NO: 36987 - RNA, 21 nt, RNAi
gccauagugaagguguuccuu

SEQ ID NO: 36988 - RNA, 21 nt, RNAi
uucgguaucacuuccacaagg

SEQ ID NO: 36989 - DNA, 21 bp, Homo sapiens
gaatatgttctaaaccagtgg

SEQ ID NO: 36990 - RNA, 21 nt, RNAi
auauguucuaaaccagugguu

SEQ ID NO: 36991 - RNA, 21 nt, RNAi
uuuauacaagauuuggucacc

SEQ ID NO: 36992 - DNA, 21 bp, Homo sapiens
gaagtcagaactggcaaatgg

SEQ ID NO: 36993 - RNA, 21 nt, RNAi
agucagaacuggcaaaugguu

SEQ ID NO: 36994 - RNA, 21 nt, RNAi
uuucagucuugaccguuuacc

SEQ ID NO: 36995 - DNA, 21 bp, Homo sapiens
gactacgtggatctcttcaga

SEQ ID NO: 36996 - RNA, 21 nt, RNAi
cuacguggaucucuucagauu

SEQ ID NO: 36997 - RNA, 21 nt, RNAi
uugaugcaccuagagaagucu

SEQ ID NO: 36998 - DNA, 21 bp, Homo sapiens
gaactcgatgttagagcctac

SEQ ID NO: 36999 - RNA, 21 nt, RNAi
acucgauguuagagccuacuu

SEQ ID NO: 37000 - RNA, 21 nt, RNAi
uuugagcuacaaucucggaug

SEQ ID NO: 37001 - DNA, 21 bp, Homo sapiens
gatgttagagcctacgttcct

SEQ ID NO: 37002 - RNA, 21 nt, RNAi
uguuagagccuacguuccuuu

SEQ ID NO: 37003 - RNA, 21 nt, RNAi
uuacaaucucggaugcaagga

SEQ ID NO: 37004 - DNA, 21 bp, Homo sapiens
gaagtaggcctgaatgctcta

SEQ ID NO: 37005 - RNA, 21 nt, RNAi
aguaggccugaaugcucuauu

SEQ ID NO: 37006 - RNA, 21 nt, RNAi
uuucauccggacuuacgagau

SEQ ID NO: 37007 - DNA, 21 bp, Homo sapiens
gacagacatgtaatgcagcct

SEQ ID NO: 37008 - RNA, 21 nt, RNAi
cagacauguaaugcagccuuu

SEQ ID NO: 37009 - RNA, 21 nt, RNAi
uugucuguacauuacgucgga

SEQ ID NO: 37010 - DNA, 21 bp, Homo sapiens
gagtcacagaattagcgctca

SEQ ID NO: 37011 - RNA, 21 nt, RNAi
gucacagaauuagcgcucauu

SEQ ID NO: 37012 - RNA, 21 nt, RNAi
uucagugucuuaaucgcgagu

SEQ ID NO: 37013 - DNA, 21 bp, Homo sapiens
gagccactagttatgcagctg

SEQ ID NO: 37014 - RNA, 21 nt, RNAi
gccacuaguuaugcagcuguu

SEQ ID NO: 37015 - RNA, 21 nt, RNAi
uucggugaucaauacgucgac

SEQ ID NO: 37016 - DNA, 21 bp, Homo sapiens
gaaagtcaggatactgttgcc

SEQ ID NO: 37017 - RNA, 21 nt, RNAi
aagucaggauacuguugccuu

SEQ ID NO: 37018 - RNA, 21 nt, RNAi
uuuucaguccuaugacaacgg

SEQ ID NO: 37019 - DNA, 21 bp, Homo sapiens
gatactgttgccttactagaa

SEQ ID NO: 37020 - RNA, 21 nt, RNAi
uacuguugccuuacuagaauu

SEQ ID NO: 37021 - RNA, 21 nt, RNAi
uuaugacaacggaaugaucuu

SEQ ID NO: 37022 - DNA, 21 bp, Homo sapiens
gagaagagtccagtaaacacc

SEQ ID NO: 37023 - RNA, 21 nt, RNAi
gaagaguccaguaaacaccuu

SEQ ID NO: 37024 - RNA, 21 nt, RNAi
uucuucucaggucauuugugg

SEQ ID NO: 37025 - DNA, 21 bp, Homo sapiens
gaagagtccagtaaacaccaa

SEQ ID NO: 37026 - RNA, 21 nt, RNAi
agaguccaguaaacaccaauu

SEQ ID NO: 37027 - RNA, 21 nt, RNAi
uuucucaggucauuugugguu

SEQ ID NO: 37028 - DNA, 21 bp, Homo sapiens
gactttatagccttgcgcttc

SEQ ID NO: 37029 - RNA, 21 nt, RNAi
cuuuauagccuugcgcuucuu

SEQ ID NO: 37030 - RNA, 21 nt, RNAi
uugaaauaucggaacgcgaag

SEQ ID NO: 37031 - DNA, 21 bp, Homo sapiens
gatgagaagtccttaggtaca

SEQ ID NO: 37032 - RNA, 21 nt, RNAi
ugagaaguccuuagguacauu

SEQ ID NO: 37033 - RNA, 21 nt, RNAi
uuacucuucaggaauccaugu

SEQ ID NO: 37034 - DNA, 21 bp, Homo sapiens
gagaagtccttaggtacaatt

SEQ ID NO: 37035 - RNA, 21 nt, RNAi
gaaguccuuagguacaauuuu

SEQ ID NO: 37036 - RNA, 21 nt, RNAi
uucuucaggaauccauguuaa

SEQ ID NO: 37037 - DNA, 21 bp, Homo sapiens
gatgccattgatcacctatgc

SEQ ID NO: 37038 - RNA, 21 nt, RNAi
ugccauugaucaccuaugcuu

SEQ ID NO: 37039 - RNA, 21 nt, RNAi
uuacgguaacuaguggauacg

SEQ ID NO: 37040 - DNA, 21 bp, Homo sapiens
gatcacctatgccgcatcatt

SEQ ID NO: 37041 - RNA, 21 nt, RNAi
ucaccuaugccgcaucauuuu

SEQ ID NO: 37042 - RNA, 21 nt, RNAi
uuaguggauacggcguaguaa

SEQ ID NO: 37043 - DNA, 21 bp, Homo sapiens
gacagaatgtcgacacaaatc

SEQ ID NO: 37044 - RNA, 21 nt, RNAi
cagaaugucgacacaaaucuu

SEQ ID NO: 37045 - RNA, 21 nt, RNAi
uugucuuacagcuguguuuag

SEQ ID NO: 37046 - DNA, 21 bp, Homo sapiens
gaatgtcgacacaaatccatt

SEQ ID NO: 37047 - RNA, 21 nt, RNAi
augucgacacaaauccauuuu

SEQ ID NO: 37048 - RNA, 21 nt, RNAi
uuuacagcuguguuuagguaa

SEQ ID NO: 37049 - DNA, 21 bp, Homo sapiens
gagtttaccacgactctgcta

SEQ ID NO: 37050 - RNA, 21 nt, RNAi
guuuaccacgacucugcuauu

SEQ ID NO: 37051 - RNA, 21 nt, RNAi
uucaaauggugcugagacgau

SEQ ID NO: 37052 - DNA, 21 bp, Homo sapiens
gatgtttgtgtgaatctgatg

SEQ ID NO: 37053 - RNA, 21 nt, RNAi
uguuugugugaaucugauguu

SEQ ID NO: 37054 - RNA, 21 nt, RNAi
uuacaaacacacuuagacuac

SEQ ID NO: 37055 - DNA, 21 bp, Homo sapiens
gagcattgaggagctttgtgc

SEQ ID NO: 37056 - RNA, 21 nt, RNAi
gcauugaggagcuuugugcuu

SEQ ID NO: 37057 - RNA, 21 nt, RNAi
uucguaacuccucgaaacacg

SEQ ID NO: 37058 - DNA, 21 bp, Homo sapiens
gacttctggagttagcctttg

SEQ ID NO: 37059 - RNA, 21 nt, RNAi
cuucuggaguuagccuuuguu

SEQ ID NO: 37060 - RNA, 21 nt, RNAi
uugaagaccucaaucggaaac

SEQ ID NO: 37061 - DNA, 21 bp, Homo sapiens
gaaacgatcaacacggaatta

SEQ ID NO: 37062 - RNA, 21 nt, RNAi
aacgaucaacacggaauuauu

SEQ ID NO: 37063 - RNA, 21 nt, RNAi
uuuugcuaguugugccuuaau

SEQ ID NO: 37064 - DNA, 21 bp, Homo sapiens
gatcttgctgtattggagctc

SEQ ID NO: 37065 - RNA, 21 nt, RNAi
ucuugcuguauuggagcucuu

SEQ ID NO: 37066 - RNA, 21 nt, RNAi
uuagaacgacauaaccucgag

SEQ ID NO: 37067 - DNA, 21 bp, Homo sapiens
gaacggcatgttagaccagag

SEQ ID NO: 37068 - RNA, 21 nt, RNAi
acggcauguuagaccagaguu

SEQ ID NO: 37069 - RNA, 21 nt, RNAi
uuugccguacaaucuggucuc

SEQ ID NO: 37070 - DNA, 21 bp, Homo sapiens
gactgaaacttgcgactacaa

SEQ ID NO: 37071 - RNA, 21 nt, RNAi
cugaaacuugcgacuacaauu

SEQ ID NO: 37072 - RNA, 21 nt, RNAi
uugacuuugaacgcugauguu

SEQ ID NO: 37073 - DNA, 21 bp, Homo sapiens
gaaacttgcgactacaattct

SEQ ID NO: 37074 - RNA, 21 nt, RNAi
aacuugcgacuacaauucuuu

SEQ ID NO: 37075 - RNA, 21 nt, RNAi
uuuugaacgcugauguuaaga

SEQ ID NO: 37076 - DNA, 21 bp, Homo sapiens
gaggaacttagacgtgttctg

SEQ ID NO: 37077 - RNA, 21 nt, RNAi
ggaacuuagacguguucuguu

SEQ ID NO: 37078 - RNA, 21 nt, RNAi
uuccuugaaucugcacaagac

SEQ ID NO: 37079 - DNA, 21 bp, Homo sapiens
gaacttagacgtgttctggag

SEQ ID NO: 37080 - RNA, 21 nt, RNAi
acuuagacguguucuggaguu

SEQ ID NO: 37081 - RNA, 21 nt, RNAi
uuugaaucugcacaagaccuc

SEQ ID NO: 37082 - DNA, 21 bp, Homo sapiens
gaactccgcggttcaataatt

SEQ ID NO: 37083 - RNA, 21 nt, RNAi
acuccgcgguucaauaauuuu

SEQ ID NO: 37084 - RNA, 21 nt, RNAi
uuugaggcgccaaguuauuaa

SEQ ID NO: 37085 - DNA, 21 bp, Homo sapiens
gattctagacgtgatgtattc

SEQ ID NO: 37086 - RNA, 21 nt, RNAi
uucuagacgugauguauucuu

SEQ ID NO: 37087 - RNA, 21 nt, RNAi
uuaagaucugcacuacauaag

SEQ ID NO: 37088 - DNA, 21 bp, Homo sapiens
gacgtgatgtattctcgcctt

SEQ ID NO: 37089 - RNA, 21 nt, RNAi
cgugauguauucucgccuuuu

SEQ ID NO: 37090 - RNA, 21 nt, RNAi
uugcacuacauaagagcggaa

SEQ ID NO: 37091 - DNA, 21 bp, Homo sapiens
gatgttcatgctaaggaatca

SEQ ID NO: 37092 - RNA, 21 nt, RNAi
uguucaugcuaaggaaucauu

SEQ ID NO: 37093 - RNA, 21 nt, RNAi
uuacaaguacgauuccuuagu

SEQ ID NO: 37094 - DNA, 21 bp, Homo sapiens
gattaaattgtgctacgatgc

SEQ ID NO: 37095 - RNA, 21 nt, RNAi
uuaaauugugcuacgaugcuu

SEQ ID NO: 37096 - RNA, 21 nt, RNAi
uuaauuuaacacgaugcuacg

SEQ ID NO: 37097 - DNA, 21 bp, Homo sapiens
gatgcatttacagagaacatg

SEQ ID NO: 37098 - RNA, 21 nt, RNAi
ugcauuuacagagaacauguu

SEQ ID NO: 37099 - RNA, 21 nt, RNAi
uuacguaaaugucucuuguac

SEQ ID NO: 37100 - DNA, 21 bp, Homo sapiens
gaagactttaccattgtgcag

SEQ ID NO: 37101 - RNA, 21 nt, RNAi
agacuuuaccauugugcaguu

SEQ ID NO: 37102 - RNA, 21 nt, RNAi
uuucugaaaugguaacacguc

SEQ ID NO: 37103 - DNA, 21 bp, Homo sapiens
gactttaccattgtgcagcat

SEQ ID NO: 37104 - RNA, 21 nt, RNAi
cuuuaccauugugcagcauuu

SEQ ID NO: 37105 - RNA, 21 nt, RNAi
uugaaaugguaacacgucgua

SEQ ID NO: 37106 - DNA, 21 bp, Homo sapiens
gagtgaggaaatgagtcaatt

SEQ ID NO: 37107 - RNA, 21 nt, RNAi
gugaggaaaugagucaauuuu

SEQ ID NO: 37108 - RNA, 21 nt, RNAi
uucacuccuuuacucaguuaa

SEQ ID NO: 37109 - DNA, 21 bp, Homo sapiens
gatttctcaaccggagttcag

SEQ ID NO: 37110 - RNA, 21 nt, RNAi
uuucucaaccggaguucaguu

SEQ ID NO: 37111 - RNA, 21 nt, RNAi
uuaaagaguuggccucaaguc

SEQ ID NO: 37112 - DNA, 21 bp, Homo sapiens
gagttcagagctattcataca

SEQ ID NO: 37113 - RNA, 21 nt, RNAi
guucagagcuauucauacauu

SEQ ID NO: 37114 - RNA, 21 nt, RNAi
uucaagucucgauaaguaugu

SEQ ID NO: 37115 - DNA, 21 bp, Homo sapiens
gaggattcagtgccaagagat

SEQ ID NO: 37116 - RNA, 21 nt, RNAi
ggauucagugccaagagauuu

SEQ ID NO: 37117 - RNA, 21 nt, RNAi
uuccuaagucacgguucucua

SEQ ID NO: 37118 - DNA, 21 bp, Homo sapiens
gaaattcctccatggcaaact

SEQ ID NO: 37119 - RNA, 21 nt, RNAi
aauuccuccauggcaaacuuu

SEQ ID NO: 37120 - RNA, 21 nt, RNAi
uuuuaaggagguaccguuuga

SEQ ID NO: 37121 - DNA, 21 bp, Homo sapiens
gagaaggaattcactacatgg

SEQ ID NO: 37122 - RNA, 21 nt, RNAi
gaaggaauucacuacaugguu

SEQ ID NO: 37123 - RNA, 21 nt, RNAi
uucuuccuuaagugauguacc

SEQ ID NO: 37124 - DNA, 21 bp, Homo sapiens
gaagtgttagcaaatcgattg

SEQ ID NO: 37125 - RNA, 21 nt, RNAi
aguguuagcaaaucgauuguu

SEQ ID NO: 37126 - RNA, 21 nt, RNAi
uuucacaaucguuuagcuaac

SEQ ID NO: 37127 - DNA, 21 bp, Homo sapiens
gagtagcgaatacttccaggc

SEQ ID NO: 37128 - RNA, 21 nt, RNAi
guagcgaauacuuccaggcuu

SEQ ID NO: 37129 - RNA, 21 nt, RNAi
uucaucgcuuaugaagguccg

SEQ ID NO: 37130 - DNA, 21 bp, Homo sapiens
gatataaagaagtgtatgccg

SEQ ID NO: 37131 - RNA, 21 nt, RNAi
uauaaagaaguguaugccguu

SEQ ID NO: 37132 - RNA, 21 nt, RNAi
uuauauuucuucacauacggc

SEQ ID NO: 37133 - DNA, 21 bp, Homo sapiens
gaggacaagtttattgtgtgc

SEQ ID NO: 37134 - RNA, 21 nt, RNAi
ggacaaguuuauugugugcuu

SEQ ID NO: 37135 - RNA, 21 nt, RNAi
uuccuguucaaauaacacacg

SEQ ID NO: 37136 - DNA, 21 bp, Homo sapiens
gaggtggtactttgtcgtgtg

SEQ ID NO: 37137 - RNA, 21 nt, RNAi
ggugguacuuugucguguguu

SEQ ID NO: 37138 - RNA, 21 nt, RNAi
uuccaccaugaaacagcacac

SEQ ID NO: 37139 - DNA, 21 bp, Homo sapiens
gaatgacagagctgtacttcc

SEQ ID NO: 37140 - RNA, 21 nt, RNAi
augacagagcuguacuuccuu

SEQ ID NO: 37141 - RNA, 21 nt, RNAi
uuuacugucucgacaugaagg

SEQ ID NO: 37142 - DNA, 21 bp, Homo sapiens
gagcaaggacttcgttcaagt

SEQ ID NO: 37143 - RNA, 21 nt, RNAi
gcaaggacuucguucaaguuu

SEQ ID NO: 37144 - RNA, 21 nt, RNAi
uucguuccugaagcaaguuca

SEQ ID NO: 37145 - DNA, 21 bp, Homo sapiens
gacttcgttcaagtcatgaga

SEQ ID NO: 37146 - RNA, 21 nt, RNAi
cuucguucaagucaugagauu

SEQ ID NO: 37147 - RNA, 21 nt, RNAi
uugaagcaaguucaguacucu

SEQ ID NO: 37148 - DNA, 21 bp, Homo sapiens
gaactccgagaacttctgaac

SEQ ID NO: 37149 - RNA, 21 nt, RNAi
acuccgagaacuucugaacuu

SEQ ID NO: 37150 - RNA, 21 nt, RNAi
uuugaggcucuugaagacuug

SEQ ID NO: 37151 - DNA, 21 bp, Homo sapiens
gaaagtgagacagataatgac

SEQ ID NO: 37152 - RNA, 21 nt, RNAi
aagugagacagauaaugacuu

SEQ ID NO: 37153 - RNA, 21 nt, RNAi
uuuucacucugucuauuacug

SEQ ID NO: 37154 - DNA, 21 bp, Homo sapiens
gattcaaggattgatcgatga

SEQ ID NO: 37155 - RNA, 21 nt, RNAi
uucaaggauugaucgaugauu

SEQ ID NO: 37156 - RNA, 21 nt, RNAi
uuaaguuccuaacuagcuacu

SEQ ID NO: 37157 - DNA, 21 bp, Homo sapiens
gaccggttgctggcactaaat

SEQ ID NO: 37158 - RNA, 21 nt, RNAi
ccgguugcuggcacuaaauuu

SEQ ID NO: 37159 - RNA, 21 nt, RNAi
uuggccaacgaccgugauuua

SEQ ID NO: 37160 - DNA, 21 bp, Homo sapiens
gattggcgtttccgaagtact

SEQ ID NO: 37161 - RNA, 21 nt, RNAi
uuggcguuuccgaaguacuuu

SEQ ID NO: 37162 - RNA, 21 nt, RNAi
uuaaccgcaaaggcuucauga

SEQ ID NO: 37163 - DNA, 21 bp, Homo sapiens
gaagtactgttctcactccga

SEQ ID NO: 37164 - RNA, 21 nt, RNAi
aguacuguucucacuccgauu

SEQ ID NO: 37165 - RNA, 21 nt, RNAi
uuucaugacaagagugaggcu

SEQ ID NO: 37166 - DNA, 21 bp, Homo sapiens
gacttcacactgacacagact

SEQ ID NO: 37167 - RNA, 21 nt, RNAi
cuucacacugacacagacuuu

SEQ ID NO: 37168 - RNA, 21 nt, RNAi
uugaagugugacugugucuga

SEQ ID NO: 37169 - DNA, 21 bp, Homo sapiens
gacgaggtggataacaaagtg

SEQ ID NO: 37170 - RNA, 21 nt, RNAi
cgagguggauaacaaaguguu

SEQ ID NO: 37171 - RNA, 21 nt, RNAi
uugcuccaccuauuguuucac

SEQ ID NO: 37172 - DNA, 21 bp, Homo sapiens
gactgcgcagacggtttatga

SEQ ID NO: 37173 - RNA, 21 nt, RNAi
cugcgcagacgguuuaugauu

SEQ ID NO: 37174 - RNA, 21 nt, RNAi
uugacgcgucugccaaauacu

SEQ ID NO: 37175 - DNA, 21 bp, Homo sapiens
gagaagctcagtttgatgtat

SEQ ID NO: 37176 - RNA, 21 nt, RNAi
gaagcucaguuugauguauuu

SEQ ID NO: 37177 - RNA, 21 nt, RNAi
uucuucgagucaaacuacaua

SEQ ID NO: 37178 - DNA, 21 bp, Homo sapiens
gaagctcagtttgatgtatgc

SEQ ID NO: 37179 - RNA, 21 nt, RNAi
agcucaguuugauguaugcuu

SEQ ID NO: 37180 - RNA, 21 nt, RNAi
uuucgagucaaacuacauacg

SEQ ID NO: 37181 - DNA, 21 bp, Homo sapiens
gacattagctgtcagcacgca

SEQ ID NO: 37182 - RNA, 21 nt, RNAi
cauuagcugucagcacgcauu

SEQ ID NO: 37183 - RNA, 21 nt, RNAi
uuguaaucgacagucgugcgu

SEQ ID NO: 37184 - DNA, 21 bp, Homo sapiens
gatcaattggagaatacgacg

SEQ ID NO: 37185 - RNA, 21 nt, RNAi
ucaauuggagaauacgacguu

SEQ ID NO: 37186 - RNA, 21 nt, RNAi
uuaguuaaccucuuaugcugc

SEQ ID NO: 37187 - DNA, 21 bp, Homo sapiens
gaagccagaagtgattattct

SEQ ID NO: 37188 - RNA, 21 nt, RNAi
agccagaagugauuauucuuu

SEQ ID NO: 37189 - RNA, 21 nt, RNAi
uuucggucuucacuaauaaga

SEQ ID NO: 37190 - DNA, 21 bp, Homo sapiens
gactgttacaaccaccttgct

SEQ ID NO: 37191 - RNA, 21 nt, RNAi
cuguuacaaccaccuugcuuu

SEQ ID NO: 37192 - RNA, 21 nt, RNAi
uugacaauguugguggaacga

SEQ ID NO: 37193 - DNA, 21 bp, Homo sapiens
gagctccagaaggcgattcta

SEQ ID NO: 37194 - RNA, 21 nt, RNAi
gcuccagaaggcgauucuauu

SEQ ID NO: 37195 - RNA, 21 nt, RNAi
uucgaggucuuccgcuaagau

SEQ ID NO: 37196 - DNA, 21 bp, Homo sapiens
gacaaacagatatccagatgc

SEQ ID NO: 37197 - RNA, 21 nt, RNAi
caaacagauauccagaugcuu

SEQ ID NO: 37198 - RNA, 21 nt, RNAi
uuguuugucuauaggucuacg

SEQ ID NO: 37199 - DNA, 21 bp, Homo sapiens
gacatcatcacaaatcgatgt

SEQ ID NO: 37200 - RNA, 21 nt, RNAi
caucaucacaaaucgauguuu

SEQ ID NO: 37201 - RNA, 21 nt, RNAi
uuguaguaguguuuagcuaca

SEQ ID NO: 37202 - DNA, 21 bp, Homo sapiens
gatgagaacaacgtgtcaagc

SEQ ID NO: 37203 - RNA, 21 nt, RNAi
ugagaacaacgugucaagcuu

SEQ ID NO: 37204 - RNA, 21 nt, RNAi
uuacucuuguugcacaguucg

SEQ ID NO: 37205 - DNA, 21 bp, Homo sapiens
gagaacaacgtgtcaagctac

SEQ ID NO: 37206 - RNA, 21 nt, RNAi
gaacaacgugucaagcuacuu

SEQ ID NO: 37207 - RNA, 21 nt, RNAi
uucuuguugcacaguucgaug

SEQ ID NO: 37208 - DNA, 21 bp, Homo sapiens
gaacaacgtgtcaagctactt

SEQ ID NO: 37209 - RNA, 21 nt, RNAi
acaacgugucaagcuacuuuu

SEQ ID NO: 37210 - RNA, 21 nt, RNAi
uuuguugcacaguucgaugaa

SEQ ID NO: 37211 - DNA, 21 bp, Homo sapiens
gatcatagcgaatgctctcag

SEQ ID NO: 37212 - RNA, 21 nt, RNAi
ucauagcgaaugcucucaguu

SEQ ID NO: 37213 - RNA, 21 nt, RNAi
uuaguaucgcuuacgagaguc

SEQ ID NO: 37214 - DNA, 21 bp, Homo sapiens
gatgcttacatgacgctggca

SEQ ID NO: 37215 - RNA, 21 nt, RNAi
ugcuuacaugacgcuggcauu

SEQ ID NO: 37216 - RNA, 21 nt, RNAi
uuacgaauguacugcgaccgu

SEQ ID NO: 37217 - DNA, 21 bp, Homo sapiens
gattatagaacggtatccaga

SEQ ID NO: 37218 - RNA, 21 nt, RNAi
uuauagaacgguauccagauu

SEQ ID NO: 37219 - RNA, 21 nt, RNAi
uuaauaucuugccauaggucu

SEQ ID NO: 37220 - DNA, 21 bp, Homo sapiens
gaggagactttgagcctcatg

SEQ ID NO: 37221 - RNA, 21 nt, RNAi
ggagacuuugagccucauguu

SEQ ID NO: 37222 - RNA, 21 nt, RNAi
uuccucugaaacucggaguac

SEQ ID NO: 37223 - DNA, 21 bp, Homo sapiens
gacaaagaccaagccgttgct

SEQ ID NO: 37224 - RNA, 21 nt, RNAi
caaagaccaagccguugcuuu

SEQ ID NO: 37225 - RNA, 21 nt, RNAi
uuguuucugguucggcaacga

SEQ ID NO: 37226 - DNA, 21 bp, Homo sapiens
gatacttctactggtcataag

SEQ ID NO: 37227 - RNA, 21 nt, RNAi
uacuucuacuggucauaaguu

SEQ ID NO: 37228 - RNA, 21 nt, RNAi
uuaugaagaugaccaguauuc

SEQ ID NO: 37229 - DNA, 21 bp, Homo sapiens
gatcagctctctaatcctgaa

SEQ ID NO: 37230 - RNA, 21 nt, RNAi
ucagcucucuaauccugaauu

SEQ ID NO: 37231 - RNA, 21 nt, RNAi
uuagucgagagauuaggacuu

SEQ ID NO: 37232 - DNA, 21 bp, Homo sapiens
gattggagcaatgatgtaaga

SEQ ID NO: 37233 - RNA, 21 nt, RNAi
uuggagcaaugauguaagauu

SEQ ID NO: 37234 - RNA, 21 nt, RNAi
uuaaccucguuacuacauucu

SEQ ID NO: 37235 - DNA, 21 bp, Homo sapiens
gaaagaatgtatgcagccttg

SEQ ID NO: 37236 - RNA, 21 nt, RNAi
aagaauguaugcagccuuguu

SEQ ID NO: 37237 - RNA, 21 nt, RNAi
uuuucuuacauacgucggaac

SEQ ID NO: 37238 - DNA, 21 bp, Homo sapiens
gaaaggaggttctaaactact

SEQ ID NO: 37239 - RNA, 21 nt, RNAi
aaggagguucuaaacuacuuu

SEQ ID NO: 37240 - RNA, 21 nt, RNAi
uuuuccuccaagauuugauga

SEQ ID NO: 37241 - DNA, 21 bp, Homo sapiens
gaggttctaaactactgagaa

SEQ ID NO: 37242 - RNA, 21 nt, RNAi
gguucuaaacuacugagaauu

SEQ ID NO: 37243 - RNA, 21 nt, RNAi
uuccaagauuugaugacucuu

SEQ ID NO: 37244 - DNA, 21 bp, Homo sapiens
gacttcaacgacattaccaac

SEQ ID NO: 37245 - RNA, 21 nt, RNAi
cuucaacgacauuaccaacuu

SEQ ID NO: 37246 - RNA, 21 nt, RNAi
uugaaguugcuguaaugguug

SEQ ID NO: 37247 - DNA, 21 bp, Homo sapiens
gatgagcgacttcaaagtgga

SEQ ID NO: 37248 - RNA, 21 nt, RNAi
ugagcgacuucaaaguggauu

SEQ ID NO: 37249 - RNA, 21 nt, RNAi
uuacucgcugaaguuucaccu

SEQ ID NO: 37250 - DNA, 21 bp, Homo sapiens
gagcgacttcaaagtggagtt

SEQ ID NO: 37251 - RNA, 21 nt, RNAi
gcgacuucaaaguggaguuuu

SEQ ID NO: 37252 - RNA, 21 nt, RNAi
uucgcugaaguuucaccucaa

SEQ ID NO: 37253 - DNA, 21 bp, Homo sapiens
gagaaatgagctggagattcc

SEQ ID NO: 37254 - RNA, 21 nt, RNAi
gaaaugagcuggagauuccuu

SEQ ID NO: 37255 - RNA, 21 nt, RNAi
uucuuuacucgaccucuaagg

SEQ ID NO: 37256 - DNA, 21 bp, Homo sapiens
gaaagccattgccagagtacc

SEQ ID NO: 37257 - RNA, 21 nt, RNAi
aagccauugccagaguaccuu

SEQ ID NO: 37258 - RNA, 21 nt, RNAi
uuuucgguaacggucucaugg

SEQ ID NO: 37259 - DNA, 21 bp, Homo sapiens
gatatgcatcagccactggat

SEQ ID NO: 37260 - RNA, 21 nt, RNAi
uaugcaucagccacuggauuu

SEQ ID NO: 37261 - RNA, 21 nt, RNAi
uuauacguagucggugaccua

SEQ ID NO: 37262 - DNA, 21 bp, Homo sapiens
gatccgctacacagtttctgc

SEQ ID NO: 37263 - RNA, 21 nt, RNAi
uccgcuacacaguuucugcuu

SEQ ID NO: 37264 - RNA, 21 nt, RNAi
uuaggcgaugugucaaagacg

SEQ ID NO: 37265 - DNA, 21 bp, Homo sapiens
gagaaagttagcaggtgccaa

SEQ ID NO: 37266 - RNA, 21 nt, RNAi
gaaaguuagcaggugccaauu

SEQ ID NO: 37267 - RNA, 21 nt, RNAi
uucuuucaaucguccacgguu

SEQ ID NO: 37268 - DNA, 21 bp, Homo sapiens
gaaagttagcaggtgccaatc

SEQ ID NO: 37269 - RNA, 21 nt, RNAi
aaguuagcaggugccaaucuu

SEQ ID NO: 37270 - RNA, 21 nt, RNAi
uuuucaaucguccacgguuag

SEQ ID NO: 37271 - DNA, 21 bp, Homo sapiens
taagtccatggaagaagatcc

SEQ ID NO: 37272 - RNA, 21 nt, RNAi
aguccauggaagaagauccuu

SEQ ID NO: 37273 - RNA, 21 nt, RNAi
uuucagguaccuucuucuagg

SEQ ID NO: 37274 - DNA, 21 bp, Homo sapiens
tactaaaggcaattcgtcctc

SEQ ID NO: 37275 - RNA, 21 nt, RNAi
cuaaaggcaauucguccucuu

SEQ ID NO: 37276 - RNA, 21 nt, RNAi
uugauuuccguuaagcaggag

SEQ ID NO: 37277 - DNA, 21 bp, Homo sapiens
taaaggcaattcgtcctcaga

SEQ ID NO: 37278 - RNA, 21 nt, RNAi
aaggcaauucguccucagauu

SEQ ID NO: 37279 - RNA, 21 nt, RNAi
uuuuccguuaagcaggagucu

SEQ ID NO: 37280 - DNA, 21 bp, Homo sapiens
tacaaagactacgtggatctc

SEQ ID NO: 37281 - RNA, 21 nt, RNAi
caaagacuacguggaucucuu

SEQ ID NO: 37282 - RNA, 21 nt, RNAi
uuguuucugaugcaccuagag

SEQ ID NO: 37283 - DNA, 21 bp, Homo sapiens
tacgtggatctcttcagacat

SEQ ID NO: 37284 - RNA, 21 nt, RNAi
cguggaucucuucagacauuu

SEQ ID NO: 37285 - RNA, 21 nt, RNAi
uugcaccuagagaagucugua

SEQ ID NO: 37286 - DNA, 21 bp, Homo sapiens
taacttgcatccagctaaacc

SEQ ID NO: 37287 - RNA, 21 nt, RNAi
acuugcauccagcuaaaccuu

SEQ ID NO: 37288 - RNA, 21 nt, RNAi
uuugaacguaggucgauuugg

SEQ ID NO: 37289 - DNA, 21 bp, Homo sapiens
tagtccaaagagtctgaaaca

SEQ ID NO: 37290 - RNA, 21 nt, RNAi
guccaaagagucugaaacauu

SEQ ID NO: 37291 - RNA, 21 nt, RNAi
uucagguuucucagacuuugu

SEQ ID NO: 37292 - DNA, 21 bp, Homo sapiens
taatgcagccttattacaaag

SEQ ID NO: 37293 - RNA, 21 nt, RNAi
augcagccuuauuacaaaguu

SEQ ID NO: 37294 - RNA, 21 nt, RNAi
uuuacgucggaauaauguuuc

SEQ ID NO: 37295 - DNA, 21 bp, Homo sapiens
taaagtggtgttaaagcatct

SEQ ID NO: 37296 - RNA, 21 nt, RNAi
aagugguguuaaagcaucuuu

SEQ ID NO: 37297 - RNA, 21 nt, RNAi
uuuucaccacaauuucguaga

SEQ ID NO: 37298 - DNA, 21 bp, Homo sapiens
tataagcggacgtttcctgtg

SEQ ID NO: 37299 - RNA, 21 nt, RNAi
uaagcggacguuuccuguguu

SEQ ID NO: 37300 - RNA, 21 nt, RNAi
uuauucgccugcaaaggacac

SEQ ID NO: 37301 - DNA, 21 bp, Homo sapiens
tattggatggaattgtggacc

SEQ ID NO: 37302 - RNA, 21 nt, RNAi
uuggauggaauuguggaccuu

SEQ ID NO: 37303 - RNA, 21 nt, RNAi
uuaaccuaccuuaacaccugg

SEQ ID NO: 37304 - DNA, 21 bp, Homo sapiens
tacatggagagtctggcctta

SEQ ID NO: 37305 - RNA, 21 nt, RNAi
cauggagagucuggccuuauu

SEQ ID NO: 37306 - RNA, 21 nt, RNAi
uuguaccucucagaccggaau

SEQ ID NO: 37307 - DNA, 21 bp, Homo sapiens
taggtacaattcaacagtgtt

SEQ ID NO: 37308 - RNA, 21 nt, RNAi
gguacaauucaacaguguuuu

SEQ ID NO: 37309 - RNA, 21 nt, RNAi
uuccauguuaaguugucacaa

SEQ ID NO: 37310 - DNA, 21 bp, Homo sapiens
taaattcgttcctttattgcc

SEQ ID NO: 37311 - RNA, 21 nt, RNAi
aauucguuccuuuauugccuu

SEQ ID NO: 37312 - RNA, 21 nt, RNAi
uuuuaagcaaggaaauaacgg

SEQ ID NO: 37313 - DNA, 21 bp, Homo sapiens
tacaacacgttcattggcgag

SEQ ID NO: 37314 - RNA, 21 nt, RNAi
caacacguucauuggcgaguu

SEQ ID NO: 37315 - RNA, 21 nt, RNAi
uuguugugcaaguaaccgcuc

SEQ ID NO: 37316 - DNA, 21 bp, Homo sapiens
tacaactacagcaaatgcacc

SEQ ID NO: 37317 - RNA, 21 nt, RNAi
caacuacagcaaaugcaccuu

SEQ ID NO: 37318 - RNA, 21 nt, RNAi
uuguugaugucguuuacgugg

SEQ ID NO: 37319 - DNA, 21 bp, Homo sapiens
tacagcaaatgcaccgttgtg

SEQ ID NO: 37320 - RNA, 21 nt, RNAi
cagcaaaugcaccguuguguu

SEQ ID NO: 37321 - RNA, 21 nt, RNAi
uugucguuuacguggcaacac

SEQ ID NO: 37322 - DNA, 21 bp, Homo sapiens
taccacgactctgctaaacac

SEQ ID NO: 37323 - RNA, 21 nt, RNAi
ccacgacucugcuaaacacuu

SEQ ID NO: 37324 - RNA, 21 nt, RNAi
uuggugcugagacgauuugug

SEQ ID NO: 37325 - DNA, 21 bp, Homo sapiens
taatacacacctgatgagagt

SEQ ID NO: 37326 - RNA, 21 nt, RNAi
auacacaccugaugagaguuu

SEQ ID NO: 37327 - RNA, 21 nt, RNAi
uuuauguguggacuacucuca

SEQ ID NO: 37328 - DNA, 21 bp, Homo sapiens
tacacacctgatgagagtcct

SEQ ID NO: 37329 - RNA, 21 nt, RNAi
cacaccugaugagaguccuuu

SEQ ID NO: 37330 - RNA, 21 nt, RNAi
uuguguggacuacucucagga

SEQ ID NO: 37331 - DNA, 21 bp, Homo sapiens
tatattaccgtctcagtccac

SEQ ID NO: 37332 - RNA, 21 nt, RNAi
uauuaccgucucaguccacuu

SEQ ID NO: 37333 - RNA, 21 nt, RNAi
uuauaauggcagagucaggug

SEQ ID NO: 37334 - DNA, 21 bp, Homo sapiens
tattaccgtctcagtccacag

SEQ ID NO: 37335 - RNA, 21 nt, RNAi
uuaccgucucaguccacaguu

SEQ ID NO: 37336 - RNA, 21 nt, RNAi
uuaauggcagagucagguguc

SEQ ID NO: 37337 - DNA, 21 bp, Homo sapiens
taccgtctcagtccacagatt

SEQ ID NO: 37338 - RNA, 21 nt, RNAi
ccgucucaguccacagauuuu

SEQ ID NO: 37339 - RNA, 21 nt, RNAi
uuggcagagucaggugucuaa

SEQ ID NO: 37340 - DNA, 21 bp, Homo sapiens
tattggagctcatgcagtctt

SEQ ID NO: 37341 - RNA, 21 nt, RNAi
uuggagcucaugcagucuuuu

SEQ ID NO: 37342 - RNA, 21 nt, RNAi
uuaaccucgaguacgucagaa

SEQ ID NO: 37343 - DNA, 21 bp, Homo sapiens
tacaattctgcaacactggaa

SEQ ID NO: 37344 - RNA, 21 nt, RNAi
caauucugcaacacuggaauu

SEQ ID NO: 37345 - RNA, 21 nt, RNAi
uuguuaagacguugugaccuu

SEQ ID NO: 37346 - DNA, 21 bp, Homo sapiens
taagtttcacacgccagtcct

SEQ ID NO: 37347 - RNA, 21 nt, RNAi
aguuucacacgccaguccuuu

SEQ ID NO: 37348 - RNA, 21 nt, RNAi
uuucaaagugugcggucagga

SEQ ID NO: 37349 - DNA, 21 bp, Homo sapiens
tataagattctagacgtgatg

SEQ ID NO: 37350 - RNA, 21 nt, RNAi
uaagauucuagacgugauguu

SEQ ID NO: 37351 - RNA, 21 nt, RNAi
uuauucuaagaucugcacuac

SEQ ID NO: 37352 - DNA, 21 bp, Homo sapiens
taagattctagacgtgatgta

SEQ ID NO: 37353 - RNA, 21 nt, RNAi
agauucuagacgugauguauu

SEQ ID NO: 37354 - RNA, 21 nt, RNAi
uuucuaagaucugcacuacau

SEQ ID NO: 37355 - DNA, 21 bp, Homo sapiens
tagacgtgatgtattctcgcc

SEQ ID NO: 37356 - RNA, 21 nt, RNAi
gacgugauguauucucgccuu

SEQ ID NO: 37357 - RNA, 21 nt, RNAi
uucugcacuacauaagagcgg

SEQ ID NO: 37358 - DNA, 21 bp, Homo sapiens
taaattgtgctacgatgcatt

SEQ ID NO: 37359 - RNA, 21 nt, RNAi
aauugugcuacgaugcauuuu

SEQ ID NO: 37360 - RNA, 21 nt, RNAi
uuuuaacacgaugcuacguaa

SEQ ID NO: 37361 - DNA, 21 bp, Homo sapiens
taccattgtgcagcatacaac

SEQ ID NO: 37362 - RNA, 21 nt, RNAi
ccauugugcagcauacaacuu

SEQ ID NO: 37363 - RNA, 21 nt, RNAi
uugguaacacgucguauguug

SEQ ID NO: 37364 - DNA, 21 bp, Homo sapiens
tacaactgcgccatatctgtc

SEQ ID NO: 37365 - RNA, 21 nt, RNAi
caacugcgccauaucugucuu

SEQ ID NO: 37366 - RNA, 21 nt, RNAi
uuguugacgcgguauagacag

SEQ ID NO: 37367 - DNA, 21 bp, Homo sapiens
tagtaccattaaatatccgtc

SEQ ID NO: 37368 - RNA, 21 nt, RNAi
guaccauuaaauauccgucuu

SEQ ID NO: 37369 - RNA, 21 nt, RNAi
uucaugguaauuuauaggcag

SEQ ID NO: 37370 - DNA, 21 bp, Homo sapiens
taccattaaatatccgtctct

SEQ ID NO: 37371 - RNA, 21 nt, RNAi
ccauuaaauauccgucucuuu

SEQ ID NO: 37372 - RNA, 21 nt, RNAi
uugguaauuuauaggcagaga

SEQ ID NO: 37373 - DNA, 21 bp, Homo sapiens
taatacagaagaggtctttcg

SEQ ID NO: 37374 - RNA, 21 nt, RNAi
auacagaagaggucuuucguu

SEQ ID NO: 37375 - RNA, 21 nt, RNAi
uuuaugucuucuccagaaagc

SEQ ID NO: 37376 - DNA, 21 bp, Homo sapiens
tacatggtggttgagatagtg

SEQ ID NO: 37377 - RNA, 21 nt, RNAi
cauggugguugagauaguguu

SEQ ID NO: 37378 - RNA, 21 nt, RNAi
uuguaccaccaacucuaucac

SEQ ID NO: 37379 - DNA, 21 bp, Homo sapiens
tattctttcatggacaggctt

SEQ ID NO: 37380 - RNA, 21 nt, RNAi
uucuuucauggacaggcuuuu

SEQ ID NO: 37381 - RNA, 21 nt, RNAi
uuaagaaaguaccuguccgaa

SEQ ID NO: 37382 - DNA, 21 bp, Homo sapiens
tagcgaatacttccaggcttt

SEQ ID NO: 37383 - RNA, 21 nt, RNAi
gcgaauacuuccaggcuuuuu

SEQ ID NO: 37384 - RNA, 21 nt, RNAi
uucgcuuaugaagguccgaaa

SEQ ID NO: 37385 - DNA, 21 bp, Homo sapiens
tataaagaagtgtatgccgct

SEQ ID NO: 37386 - RNA, 21 nt, RNAi
uaaagaaguguaugccgcuuu

SEQ ID NO: 37387 - RNA, 21 nt, RNAi
uuauuucuucacauacggcga

SEQ ID NO: 37388 - DNA, 21 bp, Homo sapiens
taaagaagtgtatgccgctgc

SEQ ID NO: 37389 - RNA, 21 nt, RNAi
aagaaguguaugccgcugcuu

SEQ ID NO: 37390 - RNA, 21 nt, RNAi
uuuucuucacauacggcgacg

SEQ ID NO: 37391 - DNA, 21 bp, Homo sapiens
taggacttatacttcgatatg

SEQ ID NO: 37392 - RNA, 21 nt, RNAi
ggacuuauacuucgauauguu

SEQ ID NO: 37393 - RNA, 21 nt, RNAi
uuccugaauaugaagcuauac

SEQ ID NO: 37394 - DNA, 21 bp, Homo sapiens
tacttcgatatgttatggaga

SEQ ID NO: 37395 - RNA, 21 nt, RNAi
cuucgauauguuauggagauu

SEQ ID NO: 37396 - RNA, 21 nt, RNAi
uugaagcuauacaauaccucu

SEQ ID NO: 37397 - DNA, 21 bp, Homo sapiens
taaagagcaaggacttcgttc

SEQ ID NO: 37398 - RNA, 21 nt, RNAi
aagagcaaggacuucguucuu

SEQ ID NO: 37399 - RNA, 21 nt, RNAi
uuuucucguuccugaagcaag

SEQ ID NO: 37400 - DNA, 21 bp, Homo sapiens
tagaactccgagaacttctga

SEQ ID NO: 37401 - RNA, 21 nt, RNAi
gaacuccgagaacuucugauu

SEQ ID NO: 37402 - RNA, 21 nt, RNAi
uucuugaggcucuugaagacu

SEQ ID NO: 37403 - DNA, 21 bp, Homo sapiens
taggttaccttcaaatacctt

SEQ ID NO: 37404 - RNA, 21 nt, RNAi
gguuaccuucaaauaccuuuu

SEQ ID NO: 37405 - RNA, 21 nt, RNAi
uuccaauggaaguuuauggaa

SEQ ID NO: 37406 - DNA, 21 bp, Homo sapiens
tactgttctcactccgatgtt

SEQ ID NO: 37407 - RNA, 21 nt, RNAi
cuguucucacuccgauguuuu

SEQ ID NO: 37408 - RNA, 21 nt, RNAi
uugacaagagugaggcuacaa

SEQ ID NO: 37409 - DNA, 21 bp, Homo sapiens
taacaaagtgaaaggtgcggc

SEQ ID NO: 37410 - RNA, 21 nt, RNAi
acaaagugaaaggugcggcuu

SEQ ID NO: 37411 - RNA, 21 nt, RNAi
uuuguuucacuuuccacgccg

SEQ ID NO: 37412 - DNA, 21 bp, Homo sapiens
tattcaggacattagctgtca

SEQ ID NO: 37413 - RNA, 21 nt, RNAi
uucaggacauuagcugucauu

SEQ ID NO: 37414 - RNA, 21 nt, RNAi
uuaaguccuguaaucgacagu

SEQ ID NO: 37415 - DNA, 21 bp, Homo sapiens
taagctgtatagatcaattgg

SEQ ID NO: 37416 - RNA, 21 nt, RNAi
agcuguauagaucaauugguu

SEQ ID NO: 37417 - RNA, 21 nt, RNAi
uuucgacauaucuaguuaacc

SEQ ID NO: 37418 - DNA, 21 bp, Homo sapiens
tagatcaattggagaatacga

SEQ ID NO: 37419 - RNA, 21 nt, RNAi
gaucaauuggagaauacgauu

SEQ ID NO: 37420 - RNA, 21 nt, RNAi
uucuaguuaaccucuuaugcu

SEQ ID NO: 37421 - DNA, 21 bp, Homo sapiens
tactgttctacagccagtata

SEQ ID NO: 37422 - RNA, 21 nt, RNAi
cuguucuacagccaguauauu

SEQ ID NO: 37423 - RNA, 21 nt, RNAi
uugacaagaugucggucauau

SEQ ID NO: 37424 - DNA, 21 bp, Homo sapiens
tatctaccttacatgatccgc

SEQ ID NO: 37425 - RNA, 21 nt, RNAi
ucuaccuuacaugauccgcuu

SEQ ID NO: 37426 - RNA, 21 nt, RNAi
uuagauggaauguacuaggcg

SEQ ID NO: 37427 - DNA, 21 bp, Homo sapiens
tattgacaaagctatgcacgg

SEQ ID NO: 37428 - RNA, 21 nt, RNAi
uugacaaagcuaugcacgguu

SEQ ID NO: 37429 - RNA, 21 nt, RNAi
uuaacuguuucgauacgugcc

SEQ ID NO: 37430 - DNA, 21 bp, Homo sapiens
tattctagtattgatgtcctc

SEQ ID NO: 37431 - RNA, 21 nt, RNAi
uucuaguauugauguccucuu

SEQ ID NO: 37432 - RNA, 21 nt, RNAi
uuaagaucauaacuacaggag

SEQ ID NO: 37433 - DNA, 21 bp, Homo sapiens
tacaccaaagtagactcacca

SEQ ID NO: 37434 - RNA, 21 nt, RNAi
caccaaaguagacucaccauu

SEQ ID NO: 37435 - RNA, 21 nt, RNAi
uugugguuucaucugaguggu

SEQ ID NO: 37436 - DNA, 21 bp, Homo sapiens
tatgaatgtggatcaagatgg

SEQ ID NO: 37437 - RNA, 21 nt, RNAi
ugaauguggaucaagaugguu

SEQ ID NO: 37438 - RNA, 21 nt, RNAi
uuacuuacaccuaguucuacc

SEQ ID NO: 37439 - DNA, 21 bp, Homo sapiens
tacaggatcatagcgaatgct

SEQ ID NO: 37440 - RNA, 21 nt, RNAi
caggaucauagcgaaugcuuu

SEQ ID NO: 37441 - RNA, 21 nt, RNAi
uuguccuaguaucgcuuacga

SEQ ID NO: 37442 - DNA, 21 bp, Homo sapiens
tatagaacggtatccagagga

SEQ ID NO: 37443 - RNA, 21 nt, RNAi
uagaacgguauccagaggauu

SEQ ID NO: 37444 - RNA, 21 nt, RNAi
uuaucuugccauaggucuccu

SEQ ID NO: 37445 - DNA, 21 bp, Homo sapiens
taagcagcgaaagctattcct

SEQ ID NO: 37446 - RNA, 21 nt, RNAi
agcagcgaaagcuauuccuuu

SEQ ID NO: 37447 - RNA, 21 nt, RNAi
uuucgucgcuuucgauaagga

SEQ ID NO: 37448 - DNA, 21 bp, Homo sapiens
tacttctactggtcataagaa

SEQ ID NO: 37449 - RNA, 21 nt, RNAi
cuucuacuggucauaagaauu

SEQ ID NO: 37450 - RNA, 21 nt, RNAi
uugaagaugaccaguauucuu

SEQ ID NO: 37451 - DNA, 21 bp, Homo sapiens
taaggagtttgtggcaaggat

SEQ ID NO: 37452 - RNA, 21 nt, RNAi
aggaguuuguggcaaggauuu

SEQ ID NO: 37453 - RNA, 21 nt, RNAi
uuuccucaaacaccguuccua

SEQ ID NO: 37454 - DNA, 21 bp, Homo sapiens
tattaatgccttagatcagct

SEQ ID NO: 37455 - RNA, 21 nt, RNAi
uuaaugccuuagaucagcuuu

SEQ ID NO: 37456 - RNA, 21 nt, RNAi
uuaauuacggaaucuagucga

SEQ ID NO: 37457 - DNA, 21 bp, Homo sapiens
taatgccttagatcagctctc

SEQ ID NO: 37458 - RNA, 21 nt, RNAi
augccuuagaucagcucucuu

SEQ ID NO: 37459 - RNA, 21 nt, RNAi
uuuacggaaucuagucgagag

SEQ ID NO: 37460 - DNA, 21 bp, Homo sapiens
tagatcagctctctaatcctg

SEQ ID NO: 37461 - RNA, 21 nt, RNAi
gaucagcucucuaauccuguu

SEQ ID NO: 37462 - RNA, 21 nt, RNAi
uucuagucgagagauuaggac

SEQ ID NO: 37463 - DNA, 21 bp, Homo sapiens
taaggattggagcaatgatgt

SEQ ID NO: 37464 - RNA, 21 nt, RNAi
aggauuggagcaaugauguuu

SEQ ID NO: 37465 - RNA, 21 nt, RNAi
uuuccuaaccucguuacuaca

SEQ ID NO: 37466 - DNA, 21 bp, Homo sapiens
aaggccatgagtgattactgg

SEQ ID NO: 37467 - RNA, 21 nt, RNAi
ggccaugagugauuacugguu

SEQ ID NO: 37468 - RNA, 21 nt, RNAi
uuccgguacucacuaaugacc

SEQ ID NO: 37469 - DNA, 21 bp, Homo sapiens
aaagatgttggtttaaagcga

SEQ ID NO: 37470 - RNA, 21 nt, RNAi
agauguugguuuaaagcgauu

SEQ ID NO: 37471 - RNA, 21 nt, RNAi
uuucuacaaccaaauuucgcu

SEQ ID NO: 37472 - DNA, 21 bp, Homo sapiens
aagatgttggtttaaagcgat

SEQ ID NO: 37473 - RNA, 21 nt, RNAi
gauguugguuuaaagcgauuu

SEQ ID NO: 37474 - RNA, 21 nt, RNAi
uucuacaaccaaauuucgcua

SEQ ID NO: 37475 - DNA, 21 bp, Homo sapiens
aagagtttactggattctgtc

SEQ ID NO: 37476 - RNA, 21 nt, RNAi
gaguuuacuggauucugucuu

SEQ ID NO: 37477 - RNA, 21 nt, RNAi
uucucaaaugaccuaagacag

SEQ ID NO: 37478 - DNA, 21 bp, Homo sapiens
aatttgccaaccttaatagag

SEQ ID NO: 37479 - RNA, 21 nt, RNAi
uuugccaaccuuaauagaguu

SEQ ID NO: 37480 - RNA, 21 nt, RNAi
uuaaacgguuggaauuaucuc

SEQ ID NO: 37481 - DNA, 21 bp, Homo sapiens
aaattctttgagatcctgtct

SEQ ID NO: 37482 - RNA, 21 nt, RNAi
auucuuugagauccugucuuu

SEQ ID NO: 37483 - RNA, 21 nt, RNAi
uuuaagaaacucuaggacaga

SEQ ID NO: 37484 - DNA, 21 bp, Homo sapiens
aattctttgagatcctgtctc

SEQ ID NO: 37485 - RNA, 21 nt, RNAi
uucuuugagauccugucucuu

SEQ ID NO: 37486 - RNA, 21 nt, RNAi
uuaagaaacucuaggacagag

SEQ ID NO: 37487 - DNA, 21 bp, Homo sapiens
aaggaatgcttcaagtgtgct

SEQ ID NO: 37488 - RNA, 21 nt, RNAi
ggaaugcuucaagugugcuuu

SEQ ID NO: 37489 - RNA, 21 nt, RNAi
uuccuuacgaaguucacacga

SEQ ID NO: 37490 - DNA, 21 bp, Homo sapiens
aatgcttcaagtgtgctcttg

SEQ ID NO: 37491 - RNA, 21 nt, RNAi
ugcuucaagugugcucuuguu

SEQ ID NO: 37492 - RNA, 21 nt, RNAi
uuacgaaguucacacgagaac

SEQ ID NO: 37493 - DNA, 21 bp, Homo sapiens
aagtgtgctcttggttcaagc

SEQ ID NO: 37494 - RNA, 21 nt, RNAi
gugugcucuugguucaagcuu

SEQ ID NO: 37495 - RNA, 21 nt, RNAi
uucacacgagaaccaaguucg

SEQ ID NO: 37496 - DNA, 21 bp, Homo sapiens
aagctggattatttcagtgga

SEQ ID NO: 37497 - RNA, 21 nt, RNAi
gcuggauuauuucaguggauu

SEQ ID NO: 37498 - RNA, 21 nt, RNAi
uucgaccuaauaaagucaccu

SEQ ID NO: 37499 - DNA, 21 bp, Homo sapiens
aagaaggaatcagttacctaa

SEQ ID NO: 37500 - RNA, 21 nt, RNAi
gaaggaaucaguuaccuaauu

SEQ ID NO: 37501 - RNA, 21 nt, RNAi
uucuuccuuagucaauggauu

SEQ ID NO: 37502 - DNA, 21 bp, Homo sapiens
aaggaatcagttacctaacgg

SEQ ID NO: 37503 - RNA, 21 nt, RNAi
ggaaucaguuaccuaacgguu

SEQ ID NO: 37504 - RNA, 21 nt, RNAi
uuccuuagucaauggauugcc

SEQ ID NO: 37505 - DNA, 21 bp, Homo sapiens
aatcagttacctaacggacaa

SEQ ID NO: 37506 - RNA, 21 nt, RNAi
ucaguuaccuaacggacaauu

SEQ ID NO: 37507 - RNA, 21 nt, RNAi
uuagucaauggauugccuguu

SEQ ID NO: 37508 - DNA, 21 bp, Homo sapiens
aagtgcaaaccattcagtatt

SEQ ID NO: 37509 - RNA, 21 nt, RNAi
gugcaaaccauucaguauuuu

SEQ ID NO: 37510 - RNA, 21 nt, RNAi
uucacguuugguaagucauaa

SEQ ID NO: 37511 - DNA, 21 bp, Homo sapiens
aaccattcagtattcaaacag

SEQ ID NO: 37512 - RNA, 21 nt, RNAi
ccauucaguauucaaacaguu

SEQ ID NO: 37513 - RNA, 21 nt, RNAi
uugguaagucauaaguuuguc

SEQ ID NO: 37514 - DNA, 21 bp, Homo sapiens
aaacagtgaagacaaggacag

SEQ ID NO: 37515 - RNA, 21 nt, RNAi
acagugaagacaaggacaguu

SEQ ID NO: 37516 - RNA, 21 nt, RNAi
uuugucacuucuguuccuguc

SEQ ID NO: 37517 - DNA, 21 bp, Homo sapiens
aacagtgaagacaaggacaga

SEQ ID NO: 37518 - RNA, 21 nt, RNAi
cagugaagacaaggacagauu

SEQ ID NO: 37519 - RNA, 21 nt, RNAi
uugucacuucuguuccugucu

SEQ ID NO: 37520 - DNA, 21 bp, Homo sapiens
aaccattgcggagaatatggc

SEQ ID NO: 37521 - RNA, 21 nt, RNAi
ccauugcggagaauauggcuu

SEQ ID NO: 37522 - RNA, 21 nt, RNAi
uugguaacgccucuuauaccg

SEQ ID NO: 37523 - DNA, 21 bp, Homo sapiens
aatatggctgacctaatagat

SEQ ID NO: 37524 - RNA, 21 nt, RNAi
uauggcugaccuaauagauuu

SEQ ID NO: 37525 - RNA, 21 nt, RNAi
uuauaccgacuggauuaucua

SEQ ID NO: 37526 - DNA, 21 bp, Homo sapiens
aatggaacctcgcagtcattt

SEQ ID NO: 37527 - RNA, 21 nt, RNAi
uggaaccucgcagucauuuuu

SEQ ID NO: 37528 - RNA, 21 nt, RNAi
uuaccuuggagcgucaguaaa

SEQ ID NO: 37529 - DNA, 21 bp, Homo sapiens
aacctcgcagtcatttatcat

SEQ ID NO: 37530 - RNA, 21 nt, RNAi
ccucgcagucauuuaucauuu

SEQ ID NO: 37531 - RNA, 21 nt, RNAi
uuggagcgucaguaaauagua

SEQ ID NO: 37532 - DNA, 21 bp, Homo sapiens
aataccaaagttggccaacag

SEQ ID NO: 37533 - RNA, 21 nt, RNAi
uaccaaaguuggccaacaguu

SEQ ID NO: 37534 - RNA, 21 nt, RNAi
uuaugguuucaaccgguuguc

SEQ ID NO: 37535 - DNA, 21 bp, Homo sapiens
aaagcaaggcatgcggacaca

SEQ ID NO: 37536 - RNA, 21 nt, RNAi
agcaaggcaugcggacacauu

SEQ ID NO: 37537 - RNA, 21 nt, RNAi
uuucguuccguacgccugugu

SEQ ID NO: 37538 - DNA, 21 bp, Homo sapiens
aagcaaggcatgcggacacac

SEQ ID NO: 37539 - RNA, 21 nt, RNAi
gcaaggcaugcggacacacuu

SEQ ID NO: 37540 - RNA, 21 nt, RNAi
uucguuccguacgccugugug

SEQ ID NO: 37541 - DNA, 21 bp, Homo sapiens
aaacagatgattatgctgaga

SEQ ID NO: 37542 - RNA, 21 nt, RNAi
acagaugauuaugcugagauu

SEQ ID NO: 37543 - RNA, 21 nt, RNAi
uuugucuacuaauacgacucu

SEQ ID NO: 37544 - DNA, 21 bp, Homo sapiens
aacagatgattatgctgagat

SEQ ID NO: 37545 - RNA, 21 nt, RNAi
cagaugauuaugcugagauuu

SEQ ID NO: 37546 - RNA, 21 nt, RNAi
uugucuacuaauacgacucua

SEQ ID NO: 37547 - DNA, 21 bp, Homo sapiens
aagaagatacttacaccatgc

SEQ ID NO: 37548 - RNA, 21 nt, RNAi
gaagauacuuacaccaugcuu

SEQ ID NO: 37549 - RNA, 21 nt, RNAi
uucuucuaugaaugugguacg

SEQ ID NO: 37550 - DNA, 21 bp, Homo sapiens
aagagaaagaatagaacttgg

SEQ ID NO: 37551 - RNA, 21 nt, RNAi
gagaaagaauagaacuugguu

SEQ ID NO: 37552 - RNA, 21 nt, RNAi
uucucuuucuuaucuugaacc

SEQ ID NO: 37553 - DNA, 21 bp, Homo sapiens
aaagaatagaacttggacgat

SEQ ID NO: 37554 - RNA, 21 nt, RNAi
agaauagaacuuggacgauuu

SEQ ID NO: 37555 - RNA, 21 nt, RNAi
uuucuuaucuugaaccugcua

SEQ ID NO: 37556 - DNA, 21 bp, Homo sapiens
aagaatagaacttggacgatg

SEQ ID NO: 37557 - RNA, 21 nt, RNAi
gaauagaacuuggacgauguu

SEQ ID NO: 37558 - RNA, 21 nt, RNAi
uucuuaucuugaaccugcuac

SEQ ID NO: 37559 - DNA, 21 bp, Homo sapiens
aatagaacttggacgatgtat

SEQ ID NO: 37560 - RNA, 21 nt, RNAi
uagaacuuggacgauguauuu

SEQ ID NO: 37561 - RNA, 21 nt, RNAi
uuaucuugaaccugcuacaua

SEQ ID NO: 37562 - DNA, 21 bp, Homo sapiens
aacttggacgatgtattggag

SEQ ID NO: 37563 - RNA, 21 nt, RNAi
cuuggacgauguauuggaguu

SEQ ID NO: 37564 - RNA, 21 nt, RNAi
uugaaccugcuacauaaccuc

SEQ ID NO: 37565 - DNA, 21 bp, Homo sapiens
aaggccaatttggagatgtac

SEQ ID NO: 37566 - RNA, 21 nt, RNAi
ggccaauuuggagauguacuu

SEQ ID NO: 37567 - RNA, 21 nt, RNAi
uuccgguuaaaccucuacaug

SEQ ID NO: 37568 - DNA, 21 bp, Homo sapiens
aatttggagatgtacatcaag

SEQ ID NO: 37569 - RNA, 21 nt, RNAi
uuuggagauguacaucaaguu

SEQ ID NO: 37570 - RNA, 21 nt, RNAi
uuaaaccucuacauguaguuc

SEQ ID NO: 37571 - DNA, 21 bp, Homo sapiens
aaggcatttatatgagtccag

SEQ ID NO: 37572 - RNA, 21 nt, RNAi
ggcauuuauaugaguccaguu

SEQ ID NO: 37573 - RNA, 21 nt, RNAi
uuccguaaauauacucagguc

SEQ ID NO: 37574 - DNA, 21 bp, Homo sapiens
aatccagctttggcggttgca

SEQ ID NO: 37575 - RNA, 21 nt, RNAi
uccagcuuuggcgguugcauu

SEQ ID NO: 37576 - RNA, 21 nt, RNAi
uuaggucgaaaccgccaacgu

SEQ ID NO: 37577 - DNA, 21 bp, Homo sapiens
aaactgtacttcggacagcgt

SEQ ID NO: 37578 - RNA, 21 nt, RNAi
acuguacuucggacagcguuu

SEQ ID NO: 37579 - RNA, 21 nt, RNAi
uuugacaugaagccugucgca

SEQ ID NO: 37580 - DNA, 21 bp, Homo sapiens
aactgtacttcggacagcgtg

SEQ ID NO: 37581 - RNA, 21 nt, RNAi
cuguacuucggacagcguguu

SEQ ID NO: 37582 - RNA, 21 nt, RNAi
uugacaugaagccugucgcac

SEQ ID NO: 37583 - DNA, 21 bp, Homo sapiens
aaatttcttcaagaagcctgc

SEQ ID NO: 37584 - RNA, 21 nt, RNAi
auuucuucaagaagccugcuu

SEQ ID NO: 37585 - RNA, 21 nt, RNAi
uuuaaagaaguucuucggacg

SEQ ID NO: 37586 - DNA, 21 bp, Homo sapiens
aatttcttcaagaagcctgcc

SEQ ID NO: 37587 - RNA, 21 nt, RNAi
uuucuucaagaagccugccuu

SEQ ID NO: 37588 - RNA, 21 nt, RNAi
uuaaagaaguucuucggacgg

SEQ ID NO: 37589 - DNA, 21 bp, Homo sapiens
aagaagcctgccattacacat

SEQ ID NO: 37590 - RNA, 21 nt, RNAi
gaagccugccauuacacauuu

SEQ ID NO: 37591 - RNA, 21 nt, RNAi
uucuucggacgguaaugugua

SEQ ID NO: 37592 - DNA, 21 bp, Homo sapiens
aagcctgccattacacatctt

SEQ ID NO: 37593 - RNA, 21 nt, RNAi
gccugccauuacacaucuuuu

SEQ ID NO: 37594 - RNA, 21 nt, RNAi
uucggacgguaauguguagaa

SEQ ID NO: 37595 - DNA, 21 bp, Homo sapiens
aagtgatcctaatgttgatgc

SEQ ID NO: 37596 - RNA, 21 nt, RNAi
gugauccuaauguugaugcuu

SEQ ID NO: 37597 - RNA, 21 nt, RNAi
uucacuaggauuacaacuacg

SEQ ID NO: 37598 - DNA, 21 bp, Homo sapiens
aatgcagagttaacaatgcgt

SEQ ID NO: 37599 - RNA, 21 nt, RNAi
ugcagaguuaacaaugcguuu

SEQ ID NO: 37600 - RNA, 21 nt, RNAi
uuacgucucaauuguuacgca

SEQ ID NO: 37601 - DNA, 21 bp, Homo sapiens
aacaatgcgtcagtttgacca

SEQ ID NO: 37602 - RNA, 21 nt, RNAi
caaugcgucaguuugaccauu

SEQ ID NO: 37603 - RNA, 21 nt, RNAi
uuguuacgcagucaaacuggu

SEQ ID NO: 37604 - DNA, 21 bp, Homo sapiens
aatgcgtcagtttgaccatcc

SEQ ID NO: 37605 - RNA, 21 nt, RNAi
ugcgucaguuugaccauccuu

SEQ ID NO: 37606 - RNA, 21 nt, RNAi
uuacgcagucaaacugguagg

SEQ ID NO: 37607 - DNA, 21 bp, Homo sapiens
aagctgattggagtcatcaca

SEQ ID NO: 37608 - RNA, 21 nt, RNAi
gcugauuggagucaucacauu

SEQ ID NO: 37609 - RNA, 21 nt, RNAi
uucgacuaaccucaguagugu

SEQ ID NO: 37610 - DNA, 21 bp, Homo sapiens
aatcctgtctggataatcatg

SEQ ID NO: 37611 - RNA, 21 nt, RNAi
uccugucuggauaaucauguu

SEQ ID NO: 37612 - RNA, 21 nt, RNAi
uuaggacagaccuauuaguac

SEQ ID NO: 37613 - DNA, 21 bp, Homo sapiens
aatcatggagctgtgcacact

SEQ ID NO: 37614 - RNA, 21 nt, RNAi
ucauggagcugugcacacuuu

SEQ ID NO: 37615 - RNA, 21 nt, RNAi
uuaguaccucgacacguguga

SEQ ID NO: 37616 - DNA, 21 bp, Homo sapiens
aagtaaggaaatacagtttgg

SEQ ID NO: 37617 - RNA, 21 nt, RNAi
guaaggaaauacaguuugguu

SEQ ID NO: 37618 - RNA, 21 nt, RNAi
uucauuccuuuaugucaaacc

SEQ ID NO: 37619 - DNA, 21 bp, Homo sapiens
aaggaaatacagtttggatct

SEQ ID NO: 37620 - RNA, 21 nt, RNAi
ggaaauacaguuuggaucuuu

SEQ ID NO: 37621 - RNA, 21 nt, RNAi
uuccuuuaugucaaaccuaga

SEQ ID NO: 37622 - DNA, 21 bp, Homo sapiens
aaatacagtttggatctagca

SEQ ID NO: 37623 - RNA, 21 nt, RNAi
auacaguuuggaucuagcauu

SEQ ID NO: 37624 - RNA, 21 nt, RNAi
uuuaugucaaaccuagaucgu

SEQ ID NO: 37625 - DNA, 21 bp, Homo sapiens
aatacagtttggatctagcat

SEQ ID NO: 37626 - RNA, 21 nt, RNAi
uacaguuuggaucuagcauuu

SEQ ID NO: 37627 - RNA, 21 nt, RNAi
uuaugucaaaccuagaucgua

SEQ ID NO: 37628 - DNA, 21 bp, Homo sapiens
aatgttctggtgtcctcaaat

SEQ ID NO: 37629 - RNA, 21 nt, RNAi
uguucugguguccucaaauuu

SEQ ID NO: 37630 - RNA, 21 nt, RNAi
uuacaagaccacaggaguuua

SEQ ID NO: 37631 - DNA, 21 bp, Homo sapiens
aattgcctattaaatggatgg

SEQ ID NO: 37632 - RNA, 21 nt, RNAi
uugccuauuaaauggaugguu

SEQ ID NO: 37633 - RNA, 21 nt, RNAi
uuaacggauaauuuaccuacc

SEQ ID NO: 37634 - DNA, 21 bp, Homo sapiens
aaatggatggctccagagtca

SEQ ID NO: 37635 - RNA, 21 nt, RNAi
auggauggcuccagagucauu

SEQ ID NO: 37636 - RNA, 21 nt, RNAi
uuuaccuaccgaggucucagu

SEQ ID NO: 37637 - DNA, 21 bp, Homo sapiens
aatggatggctccagagtcaa

SEQ ID NO: 37638 - RNA, 21 nt, RNAi
uggauggcuccagagucaauu

SEQ ID NO: 37639 - RNA, 21 nt, RNAi
uuaccuaccgaggucucaguu

SEQ ID NO: 37640 - DNA, 21 bp, Homo sapiens
aaggagtgaagaacaatgatg

SEQ ID NO: 37641 - RNA, 21 nt, RNAi
ggagugaagaacaaugauguu

SEQ ID NO: 37642 - RNA, 21 nt, RNAi
uuccucacuucuuguuacuac

SEQ ID NO: 37643 - DNA, 21 bp, Homo sapiens
aagaacaatgatgtaatcggt

SEQ ID NO: 37644 - RNA, 21 nt, RNAi
gaacaaugauguaaucgguuu

SEQ ID NO: 37645 - RNA, 21 nt, RNAi
uucuuguuacuacauuagcca

SEQ ID NO: 37646 - DNA, 21 bp, Homo sapiens
aacaatgatgtaatcggtcga

SEQ ID NO: 37647 - RNA, 21 nt, RNAi
caaugauguaaucggucgauu

SEQ ID NO: 37648 - RNA, 21 nt, RNAi
uuguuacuacauuagccagcu

SEQ ID NO: 37649 - DNA, 21 bp, Homo sapiens
aatgatgtaatcggtcgaatt

SEQ ID NO: 37650 - RNA, 21 nt, RNAi
ugauguaaucggucgaauuuu

SEQ ID NO: 37651 - RNA, 21 nt, RNAi
uuacuacauuagccagcuuaa

SEQ ID NO: 37652 - DNA, 21 bp, Homo sapiens
aaagattaccaatgcctccaa

SEQ ID NO: 37653 - RNA, 21 nt, RNAi
agauuaccaaugccuccaauu

SEQ ID NO: 37654 - RNA, 21 nt, RNAi
uuucuaaugguuacggagguu

SEQ ID NO: 37655 - DNA, 21 bp, Homo sapiens
aagattaccaatgcctccaaa

SEQ ID NO: 37656 - RNA, 21 nt, RNAi
gauuaccaaugccuccaaauu

SEQ ID NO: 37657 - RNA, 21 nt, RNAi
uucuaaugguuacggagguuu

SEQ ID NO: 37658 - DNA, 21 bp, Homo sapiens
aatgcctccaaattgtcctcc

SEQ ID NO: 37659 - RNA, 21 nt, RNAi
ugccuccaaauuguccuccuu

SEQ ID NO: 37660 - RNA, 21 nt, RNAi
uuacggagguuuaacaggagg

SEQ ID NO: 37661 - DNA, 21 bp, Homo sapiens
aacttaaagctcagctcagca

SEQ ID NO: 37662 - RNA, 21 nt, RNAi
cuuaaagcucagcucagcauu

SEQ ID NO: 37663 - RNA, 21 nt, RNAi
uugaauuucgagucgagucgu

SEQ ID NO: 37664 - DNA, 21 bp, Homo sapiens
aaagctcagctcagcacaatc

SEQ ID NO: 37665 - RNA, 21 nt, RNAi
agcucagcucagcacaaucuu

SEQ ID NO: 37666 - RNA, 21 nt, RNAi
uuucgagucgagucguguuag

SEQ ID NO: 37667 - DNA, 21 bp, Homo sapiens
aagctcagctcagcacaatcc

SEQ ID NO: 37668 - RNA, 21 nt, RNAi
gcucagcucagcacaauccuu

SEQ ID NO: 37669 - RNA, 21 nt, RNAi
uucgagucgagucguguuagg

SEQ ID NO: 37670 - DNA, 21 bp, Homo sapiens
aatcctggaggaagagaaggc

SEQ ID NO: 37671 - RNA, 21 nt, RNAi
uccuggaggaagagaaggcuu

SEQ ID NO: 37672 - RNA, 21 nt, RNAi
uuaggaccuccuucucuuccg

SEQ ID NO: 37673 - DNA, 21 bp, Homo sapiens
aagagaaggctcagcaagaag

SEQ ID NO: 37674 - RNA, 21 nt, RNAi
gagaaggcucagcaagaaguu

SEQ ID NO: 37675 - RNA, 21 nt, RNAi
uucucuuccgagucguucuuc

SEQ ID NO: 37676 - DNA, 21 bp, Homo sapiens
aaggctcagcaagaagagcgc

SEQ ID NO: 37677 - RNA, 21 nt, RNAi
ggcucagcaagaagagcgcuu

SEQ ID NO: 37678 - RNA, 21 nt, RNAi
uuccgagucguucuucucgcg

SEQ ID NO: 37679 - DNA, 21 bp, Homo sapiens
aagaagagcgcatgaggatgg

SEQ ID NO: 37680 - RNA, 21 nt, RNAi
gaagagcgcaugaggaugguu

SEQ ID NO: 37681 - RNA, 21 nt, RNAi
uucuucucgcguacuccuacc

SEQ ID NO: 37682 - DNA, 21 bp, Homo sapiens
aagagcgcatgaggatggagt

SEQ ID NO: 37683 - RNA, 21 nt, RNAi
gagcgcaugaggauggaguuu

SEQ ID NO: 37684 - RNA, 21 nt, RNAi
uucucgcguacuccuaccuca

SEQ ID NO: 37685 - DNA, 21 bp, Homo sapiens
aagacaggccacagtgtcctg

SEQ ID NO: 37686 - RNA, 21 nt, RNAi
gacaggccacaguguccuguu

SEQ ID NO: 37687 - RNA, 21 nt, RNAi
uucuguccggugucacaggac

SEQ ID NO: 37688 - DNA, 21 bp, Homo sapiens
aaaccaatcattaccaggttt

SEQ ID NO: 37689 - RNA, 21 nt, RNAi
accaaucauuaccagguuuuu

SEQ ID NO: 37690 - RNA, 21 nt, RNAi
uuugguuaguaaugguccaaa

SEQ ID NO: 37691 - DNA, 21 bp, Homo sapiens
aaccaatcattaccaggtttc

SEQ ID NO: 37692 - RNA, 21 nt, RNAi
ccaaucauuaccagguuucuu

SEQ ID NO: 37693 - RNA, 21 nt, RNAi
uugguuaguaaugguccaaag

SEQ ID NO: 37694 - DNA, 21 bp, Homo sapiens
aatcattaccaggtttctggc

SEQ ID NO: 37695 - RNA, 21 nt, RNAi
ucauuaccagguuucuggcuu

SEQ ID NO: 37696 - RNA, 21 nt, RNAi
uuaguaaugguccaaagaccg

SEQ ID NO: 37697 - DNA, 21 bp, Homo sapiens
aatcacagccatggctggcag

SEQ ID NO: 37698 - RNA, 21 nt, RNAi
ucacagccauggcuggcaguu

SEQ ID NO: 37699 - RNA, 21 nt, RNAi
uuagugucgguaccgaccguc

SEQ ID NO: 37700 - DNA, 21 bp, Homo sapiens
aacagattcatggaatcatag

SEQ ID NO: 37701 - RNA, 21 nt, RNAi
cagauucauggaaucauaguu

SEQ ID NO: 37702 - RNA, 21 nt, RNAi
uugucuaaguaccuuaguauc

SEQ ID NO: 37703 - DNA, 21 bp, Homo sapiens
aatcatagatctcaggagata

SEQ ID NO: 37704 - RNA, 21 nt, RNAi
ucauagaucucaggagauauu

SEQ ID NO: 37705 - RNA, 21 nt, RNAi
uuaguaucuagaguccucuau

SEQ ID NO: 37706 - DNA, 21 bp, Homo sapiens
aatgtggaggactctacagta

SEQ ID NO: 37707 - RNA, 21 nt, RNAi
uguggaggacucuacaguauu

SEQ ID NO: 37708 - RNA, 21 nt, RNAi
uuacaccuccugagaugucau

SEQ ID NO: 37709 - DNA, 21 bp, Homo sapiens
aagagcgtctaatccgacagc

SEQ ID NO: 37710 - RNA, 21 nt, RNAi
gagcgucuaauccgacagcuu

SEQ ID NO: 37711 - RNA, 21 nt, RNAi
uucucgcagauuaggcugucg

SEQ ID NO: 37712 - DNA, 21 bp, Homo sapiens
aatccgacagcaacaggaaat

SEQ ID NO: 37713 - RNA, 21 nt, RNAi
uccgacagcaacaggaaauuu

SEQ ID NO: 37714 - RNA, 21 nt, RNAi
uuaggcugucguuguccuuua

SEQ ID NO: 37715 - DNA, 21 bp, Homo sapiens
aacaggaaatggaagaagatc

SEQ ID NO: 37716 - RNA, 21 nt, RNAi
caggaaauggaagaagaucuu

SEQ ID NO: 37717 - RNA, 21 nt, RNAi
uuguccuuuaccuucuucuag

SEQ ID NO: 37718 - DNA, 21 bp, Homo sapiens
aaatggaagaagatcagcgct

SEQ ID NO: 37719 - RNA, 21 nt, RNAi
auggaagaagaucagcgcuuu

SEQ ID NO: 37720 - RNA, 21 nt, RNAi
uuuaccuucuucuagucgcga

SEQ ID NO: 37721 - DNA, 21 bp, Homo sapiens
aatggaagaagatcagcgctg

SEQ ID NO: 37722 - RNA, 21 nt, RNAi
uggaagaagaucagcgcuguu

SEQ ID NO: 37723 - RNA, 21 nt, RNAi
uuaccuucuucuagucgcgac

SEQ ID NO: 37724 - DNA, 21 bp, Homo sapiens
aagaagatcagcgctggctgg

SEQ ID NO: 37725 - RNA, 21 nt, RNAi
gaagaucagcgcuggcugguu

SEQ ID NO: 37726 - RNA, 21 nt, RNAi
uucuucuagucgcgaccgacc

SEQ ID NO: 37727 - DNA, 21 bp, Homo sapiens
aagatcagcgctggctggaaa

SEQ ID NO: 37728 - RNA, 21 nt, RNAi
gaucagcgcuggcuggaaauu

SEQ ID NO: 37729 - RNA, 21 nt, RNAi
uucuagucgcgaccgaccuuu

SEQ ID NO: 37730 - DNA, 21 bp, Homo sapiens
aagaggaaagatttctgattg

SEQ ID NO: 37731 - RNA, 21 nt, RNAi
gaggaaagauuucugauuguu

SEQ ID NO: 37732 - RNA, 21 nt, RNAi
uucuccuuucuaaagacuaac

SEQ ID NO: 37733 - DNA, 21 bp, Homo sapiens
aaagatttctgattggaaacc

SEQ ID NO: 37734 - RNA, 21 nt, RNAi
agauuucugauuggaaaccuu

SEQ ID NO: 37735 - RNA, 21 nt, RNAi
uuucuaaagacuaaccuuugg

SEQ ID NO: 37736 - DNA, 21 bp, Homo sapiens
aagatttctgattggaaacca

SEQ ID NO: 37737 - RNA, 21 nt, RNAi
gauuucugauuggaaaccauu

SEQ ID NO: 37738 - RNA, 21 nt, RNAi
uucuaaagacuaaccuuuggu

SEQ ID NO: 37739 - DNA, 21 bp, Homo sapiens
aaaccaacatatatatcagcc

SEQ ID NO: 37740 - RNA, 21 nt, RNAi
accaacauauauaucagccuu

SEQ ID NO: 37741 - RNA, 21 nt, RNAi
uuugguuguauauauagucgg

SEQ ID NO: 37742 - DNA, 21 bp, Homo sapiens
aaccaacatatatatcagcct

SEQ ID NO: 37743 - RNA, 21 nt, RNAi
ccaacauauauaucagccuuu

SEQ ID NO: 37744 - RNA, 21 nt, RNAi
uugguuguauauauagucgga

SEQ ID NO: 37745 - DNA, 21 bp, Homo sapiens
aacatatatatcagcctgtgg

SEQ ID NO: 37746 - RNA, 21 nt, RNAi
cauauauaucagccugugguu

SEQ ID NO: 37747 - RNA, 21 nt, RNAi
uuguauauauagucggacacc

SEQ ID NO: 37748 - DNA, 21 bp, Homo sapiens
aaaccagatcctgcagctcca

SEQ ID NO: 37749 - RNA, 21 nt, RNAi
accagauccugcagcuccauu

SEQ ID NO: 37750 - RNA, 21 nt, RNAi
uuuggucuaggacgucgaggu

SEQ ID NO: 37751 - DNA, 21 bp, Homo sapiens
aaccagatcctgcagctccac

SEQ ID NO: 37752 - RNA, 21 nt, RNAi
ccagauccugcagcuccacuu

SEQ ID NO: 37753 - RNA, 21 nt, RNAi
uuggucuaggacgucgaggug

SEQ ID NO: 37754 - DNA, 21 bp, Homo sapiens
aagccttgccagcctcagcag

SEQ ID NO: 37755 - RNA, 21 nt, RNAi
gccuugccagccucagcaguu

SEQ ID NO: 37756 - RNA, 21 nt, RNAi
uucggaacggucggagucguc

SEQ ID NO: 37757 - DNA, 21 bp, Homo sapiens
aacctggaccggtcgaatgat

SEQ ID NO: 37758 - RNA, 21 nt, RNAi
ccuggaccggucgaaugauuu

SEQ ID NO: 37759 - RNA, 21 nt, RNAi
uuggaccuggccagcuuacua

SEQ ID NO: 37760 - DNA, 21 bp, Homo sapiens
aatgataaggtgtacgagaat

SEQ ID NO: 37761 - RNA, 21 nt, RNAi
ugauaagguguacgagaauuu

SEQ ID NO: 37762 - RNA, 21 nt, RNAi
uuacuauuccacaugcucuua

SEQ ID NO: 37763 - DNA, 21 bp, Homo sapiens
aaggtgtacgagaatgtgacg

SEQ ID NO: 37764 - RNA, 21 nt, RNAi
gguguacgagaaugugacguu

SEQ ID NO: 37765 - RNA, 21 nt, RNAi
uuccacaugcucuuacacugc

SEQ ID NO: 37766 - DNA, 21 bp, Homo sapiens
aaagctgtcatcgagatgtcc

SEQ ID NO: 37767 - RNA, 21 nt, RNAi
agcugucaucgagauguccuu

SEQ ID NO: 37768 - RNA, 21 nt, RNAi
uuucgacaguagcucuacagg

SEQ ID NO: 37769 - DNA, 21 bp, Homo sapiens
aagctgtcatcgagatgtcca

SEQ ID NO: 37770 - RNA, 21 nt, RNAi
gcugucaucgagauguccauu

SEQ ID NO: 37771 - RNA, 21 nt, RNAi
uucgacaguagcucuacaggu

SEQ ID NO: 37772 - DNA, 21 bp, Homo sapiens
aagctattgaactctgacctg

SEQ ID NO: 37773 - RNA, 21 nt, RNAi
gcuauugaacucugaccuguu

SEQ ID NO: 37774 - RNA, 21 nt, RNAi
uucgauaacuugagacuggac

SEQ ID NO: 37775 - DNA, 21 bp, Homo sapiens
aaagcaaatgctgactgccgc

SEQ ID NO: 37776 - RNA, 21 nt, RNAi
agcaaaugcugacugccgcuu

SEQ ID NO: 37777 - RNA, 21 nt, RNAi
uuucguuuacgacugacggcg

SEQ ID NO: 37778 - DNA, 21 bp, Homo sapiens
aagcaaatgctgactgccgct

SEQ ID NO: 37779 - RNA, 21 nt, RNAi
gcaaaugcugacugccgcuuu

SEQ ID NO: 37780 - RNA, 21 nt, RNAi
uucguuuacgacugacggcga

SEQ ID NO: 37781 - DNA, 21 bp, Homo sapiens
aaatgctgactgccgctcacg

SEQ ID NO: 37782 - RNA, 21 nt, RNAi
augcugacugccgcucacguu

SEQ ID NO: 37783 - RNA, 21 nt, RNAi
uuuacgacugacggcgagugc

SEQ ID NO: 37784 - DNA, 21 bp, Homo sapiens
aatgctgactgccgctcacgc

SEQ ID NO: 37785 - RNA, 21 nt, RNAi
ugcugacugccgcucacgcuu

SEQ ID NO: 37786 - RNA, 21 nt, RNAi
uuacgacugacggcgagugcg

SEQ ID NO: 37787 - DNA, 21 bp, Homo sapiens
aaacttactcgatgtcattga

SEQ ID NO: 37788 - RNA, 21 nt, RNAi
acuuacucgaugucauugauu

SEQ ID NO: 37789 - RNA, 21 nt, RNAi
uuugaaugagcuacaguaacu

SEQ ID NO: 37790 - DNA, 21 bp, Homo sapiens
aacttactcgatgtcattgac

SEQ ID NO: 37791 - RNA, 21 nt, RNAi
cuuacucgaugucauugacuu

SEQ ID NO: 37792 - RNA, 21 nt, RNAi
uugaaugagcuacaguaacug

SEQ ID NO: 37793 - DNA, 21 bp, Homo sapiens
aagatgttctctagccttcca

SEQ ID NO: 37794 - RNA, 21 nt, RNAi
gauguucucuagccuuccauu

SEQ ID NO: 37795 - RNA, 21 nt, RNAi
uucuacaagagaucggaaggu

SEQ ID NO: 37796 - DNA, 21 bp, Homo sapiens
aattcctaaactaccttagct

SEQ ID NO: 37797 - RNA, 21 nt, RNAi
uuccuaaacuaccuuagcuuu

SEQ ID NO: 37798 - RNA, 21 nt, RNAi
uuaaggauuugauggaaucga

SEQ ID NO: 37799 - DNA, 21 bp, Homo sapiens
aaactaccttagctgcatagt

SEQ ID NO: 37800 - RNA, 21 nt, RNAi
acuaccuuagcugcauaguuu

SEQ ID NO: 37801 - RNA, 21 nt, RNAi
uuugauggaaucgacguauca

SEQ ID NO: 37802 - DNA, 21 bp, Homo sapiens
aactaccttagctgcatagtg

SEQ ID NO: 37803 - RNA, 21 nt, RNAi
cuaccuuagcugcauaguguu

SEQ ID NO: 37804 - RNA, 21 nt, RNAi
uugauggaaucgacguaucac

SEQ ID NO: 37805 - DNA, 21 bp, Homo sapiens
caaacatttagacaatttgcc

SEQ ID NO: 37806 - RNA, 21 nt, RNAi
aacauuuagacaauuugccuu

SEQ ID NO: 37807 - RNA, 21 nt, RNAi
uuuuguaaaucuguuaaacgg

SEQ ID NO: 37808 - DNA, 21 bp, Homo sapiens
catttagacaatttgccaacc

SEQ ID NO: 37809 - RNA, 21 nt, RNAi
uuuagacaauuugccaaccuu

SEQ ID NO: 37810 - RNA, 21 nt, RNAi
uuaaaucuguuaaacgguugg

SEQ ID NO: 37811 - DNA, 21 bp, Homo sapiens
caatttgccaaccttaataga

SEQ ID NO: 37812 - RNA, 21 nt, RNAi
auuugccaaccuuaauagauu

SEQ ID NO: 37813 - RNA, 21 nt, RNAi
uuuaaacgguuggaauuaucu

SEQ ID NO: 37814 - DNA, 21 bp, Homo sapiens
caaccttaatagagaagaaag

SEQ ID NO: 37815 - RNA, 21 nt, RNAi
accuuaauagagaagaaaguu

SEQ ID NO: 37816 - RNA, 21 nt, RNAi
uuuggaauuaucucuucuuuc

SEQ ID NO: 37817 - DNA, 21 bp, Homo sapiens
cagtctacagatttgataagg

SEQ ID NO: 37818 - RNA, 21 nt, RNAi
gucuacagauuugauaagguu

SEQ ID NO: 37819 - RNA, 21 nt, RNAi
uucagaugucuaaacuauucc

SEQ ID NO: 37820 - DNA, 21 bp, Homo sapiens
cagatttgataaggaatgctt

SEQ ID NO: 37821 - RNA, 21 nt, RNAi
gauuugauaaggaaugcuuuu

SEQ ID NO: 37822 - RNA, 21 nt, RNAi
uucuaaacuauuccuuacgaa

SEQ ID NO: 37823 - DNA, 21 bp, Homo sapiens
caagtgtgctcttggttcaag

SEQ ID NO: 37824 - RNA, 21 nt, RNAi
agugugcucuugguucaaguu

SEQ ID NO: 37825 - RNA, 21 nt, RNAi
uuucacacgagaaccaaguuc

SEQ ID NO: 37826 - DNA, 21 bp, Homo sapiens
caagctggattatttcagtgg

SEQ ID NO: 37827 - RNA, 21 nt, RNAi
agcuggauuauuucagugguu

SEQ ID NO: 37828 - RNA, 21 nt, RNAi
uuucgaccuaauaaagucacc

SEQ ID NO: 37829 - DNA, 21 bp, Homo sapiens
cagtggaactggcaatcggcc

SEQ ID NO: 37830 - RNA, 21 nt, RNAi
guggaacuggcaaucggccuu

SEQ ID NO: 37831 - RNA, 21 nt, RNAi
uucaccuugaccguuagccgg

SEQ ID NO: 37832 - DNA, 21 bp, Homo sapiens
cagaagaaggaatcagttacc

SEQ ID NO: 37833 - RNA, 21 nt, RNAi
gaagaaggaaucaguuaccuu

SEQ ID NO: 37834 - RNA, 21 nt, RNAi
uucuucuuccuuagucaaugg

SEQ ID NO: 37835 - DNA, 21 bp, Homo sapiens
cacacatcttgctgacttcac

SEQ ID NO: 37836 - RNA, 21 nt, RNAi
cacaucuugcugacuucacuu

SEQ ID NO: 37837 - RNA, 21 nt, RNAi
uuguguagaacgacugaagug

SEQ ID NO: 37838 - DNA, 21 bp, Homo sapiens
cacatcttgctgacttcactc

SEQ ID NO: 37839 - RNA, 21 nt, RNAi
caucuugcugacuucacucuu

SEQ ID NO: 37840 - RNA, 21 nt, RNAi
uuguagaacgacugaagugag

SEQ ID NO: 37841 - DNA, 21 bp, Homo sapiens
catcttgctgacttcactcaa

SEQ ID NO: 37842 - RNA, 21 nt, RNAi
ucuugcugacuucacucaauu

SEQ ID NO: 37843 - RNA, 21 nt, RNAi
uuagaacgacugaagugaguu

SEQ ID NO: 37844 - DNA, 21 bp, Homo sapiens
cactcaagtgcaaaccattca

SEQ ID NO: 37845 - RNA, 21 nt, RNAi
cucaagugcaaaccauucauu

SEQ ID NO: 37846 - RNA, 21 nt, RNAi
uugaguucacguuugguaagu

SEQ ID NO: 37847 - DNA, 21 bp, Homo sapiens
caagtgcaaaccattcagtat

SEQ ID NO: 37848 - RNA, 21 nt, RNAi
agugcaaaccauucaguauuu

SEQ ID NO: 37849 - RNA, 21 nt, RNAi
uuucacguuugguaagucaua

SEQ ID NO: 37850 - DNA, 21 bp, Homo sapiens
caaaccattcagtattcaaac

SEQ ID NO: 37851 - RNA, 21 nt, RNAi
aaccauucaguauucaaacuu

SEQ ID NO: 37852 - RNA, 21 nt, RNAi
uuuugguaagucauaaguuug

SEQ ID NO: 37853 - DNA, 21 bp, Homo sapiens
cattcagtattcaaacagtga

SEQ ID NO: 37854 - RNA, 21 nt, RNAi
uucaguauucaaacagugauu

SEQ ID NO: 37855 - RNA, 21 nt, RNAi
uuaagucauaaguuugucacu

SEQ ID NO: 37856 - DNA, 21 bp, Homo sapiens
cagtattcaaacagtgaagac

SEQ ID NO: 37857 - RNA, 21 nt, RNAi
guauucaaacagugaagacuu

SEQ ID NO: 37858 - RNA, 21 nt, RNAi
uucauaaguuugucacuucug

SEQ ID NO: 37859 - DNA, 21 bp, Homo sapiens
caaacagtgaagacaaggaca

SEQ ID NO: 37860 - RNA, 21 nt, RNAi
aacagugaagacaaggacauu

SEQ ID NO: 37861 - RNA, 21 nt, RNAi
uuuugucacuucuguuccugu

SEQ ID NO: 37862 - DNA, 21 bp, Homo sapiens
cagtgaagacaaggacagaaa

SEQ ID NO: 37863 - RNA, 21 nt, RNAi
gugaagacaaggacagaaauu

SEQ ID NO: 37864 - RNA, 21 nt, RNAi
uucacuucuguuccugucuuu

SEQ ID NO: 37865 - DNA, 21 bp, Homo sapiens
cattgcggagaatatggctga

SEQ ID NO: 37866 - RNA, 21 nt, RNAi
uugcggagaauauggcugauu

SEQ ID NO: 37867 - RNA, 21 nt, RNAi
uuaacgccucuuauaccgacu

SEQ ID NO: 37868 - DNA, 21 bp, Homo sapiens
cagtcatttatcatcagacct

SEQ ID NO: 37869 - RNA, 21 nt, RNAi
gucauuuaucaucagaccuuu

SEQ ID NO: 37870 - RNA, 21 nt, RNAi
uucaguaaauaguagucugga

SEQ ID NO: 37871 - DNA, 21 bp, Homo sapiens
catttatcatcagacctcaga

SEQ ID NO: 37872 - RNA, 21 nt, RNAi
uuuaucaucagaccucagauu

SEQ ID NO: 37873 - RNA, 21 nt, RNAi
uuaaauaguagucuggagucu

SEQ ID NO: 37874 - DNA, 21 bp, Homo sapiens
catcagacctcagaaagaagg

SEQ ID NO: 37875 - RNA, 21 nt, RNAi
ucagaccucagaaagaagguu

SEQ ID NO: 37876 - RNA, 21 nt, RNAi
uuagucuggagucuuucuucc

SEQ ID NO: 37877 - DNA, 21 bp, Homo sapiens
cagacctcagaaagaaggtga

SEQ ID NO: 37878 - RNA, 21 nt, RNAi
gaccucagaaagaaggugauu

SEQ ID NO: 37879 - RNA, 21 nt, RNAi
uucuggagucuuucuuccacu

SEQ ID NO: 37880 - DNA, 21 bp, Homo sapiens
catcaataccaaagttggcca

SEQ ID NO: 37881 - RNA, 21 nt, RNAi
ucaauaccaaaguuggccauu

SEQ ID NO: 37882 - RNA, 21 nt, RNAi
uuaguuaugguuucaaccggu

SEQ ID NO: 37883 - DNA, 21 bp, Homo sapiens
caataccaaagttggccaaca

SEQ ID NO: 37884 - RNA, 21 nt, RNAi
auaccaaaguuggccaacauu

SEQ ID NO: 37885 - RNA, 21 nt, RNAi
uuuaugguuucaaccgguugu

SEQ ID NO: 37886 - DNA, 21 bp, Homo sapiens
caaagttggccaacagcgaaa

SEQ ID NO: 37887 - RNA, 21 nt, RNAi
aaguuggccaacagcgaaauu

SEQ ID NO: 37888 - RNA, 21 nt, RNAi
uuuucaaccgguugucgcuuu

SEQ ID NO: 37889 - DNA, 21 bp, Homo sapiens
cacacgccgtctctgtgtcag

SEQ ID NO: 37890 - RNA, 21 nt, RNAi
cacgccgucucugugucaguu

SEQ ID NO: 37891 - RNA, 21 nt, RNAi
uugugcggcagagacacaguc

SEQ ID NO: 37892 - DNA, 21 bp, Homo sapiens
cacgccgtctctgtgtcagaa

SEQ ID NO: 37893 - RNA, 21 nt, RNAi
cgccgucucugugucagaauu

SEQ ID NO: 37894 - RNA, 21 nt, RNAi
uugcggcagagacacagucuu

SEQ ID NO: 37895 - DNA, 21 bp, Homo sapiens
cagaaacagatgattatgctg

SEQ ID NO: 37896 - RNA, 21 nt, RNAi
gaaacagaugauuaugcuguu

SEQ ID NO: 37897 - RNA, 21 nt, RNAi
uucuuugucuacuaauacgac

SEQ ID NO: 37898 - DNA, 21 bp, Homo sapiens
cagatgattatgctgagatta

SEQ ID NO: 37899 - RNA, 21 nt, RNAi
gaugauuaugcugagauuauu

SEQ ID NO: 37900 - RNA, 21 nt, RNAi
uucuacuaauacgacucuaau

SEQ ID NO: 37901 - DNA, 21 bp, Homo sapiens
caatttggagatgtacatcaa

SEQ ID NO: 37902 - RNA, 21 nt, RNAi
auuuggagauguacaucaauu

SEQ ID NO: 37903 - RNA, 21 nt, RNAi
uuuaaaccucuacauguaguu

SEQ ID NO: 37904 - DNA, 21 bp, Homo sapiens
catcaaggcatttatatgagt

SEQ ID NO: 37905 - RNA, 21 nt, RNAi
ucaaggcauuuauaugaguuu

SEQ ID NO: 37906 - RNA, 21 nt, RNAi
uuaguuccguaaauauacuca

SEQ ID NO: 37907 - DNA, 21 bp, Homo sapiens
caaggcatttatatgagtcca

SEQ ID NO: 37908 - RNA, 21 nt, RNAi
aggcauuuauaugaguccauu

SEQ ID NO: 37909 - RNA, 21 nt, RNAi
uuuccguaaauauacucaggu

SEQ ID NO: 37910 - DNA, 21 bp, Homo sapiens
catttatatgagtccagagaa

SEQ ID NO: 37911 - RNA, 21 nt, RNAi
uuuauaugaguccagagaauu

SEQ ID NO: 37912 - RNA, 21 nt, RNAi
uuaaauauacucaggucucuu

SEQ ID NO: 37913 - DNA, 21 bp, Homo sapiens
cagagaatccagctttggcgg

SEQ ID NO: 37914 - RNA, 21 nt, RNAi
gagaauccagcuuuggcgguu

SEQ ID NO: 37915 - RNA, 21 nt, RNAi
uucucuuaggucgaaaccgcc

SEQ ID NO: 37916 - DNA, 21 bp, Homo sapiens
cagctttggcggttgcaatta

SEQ ID NO: 37917 - RNA, 21 nt, RNAi
gcuuuggcgguugcaauuauu

SEQ ID NO: 37918 - RNA, 21 nt, RNAi
uucgaaaccgccaacguuaau

SEQ ID NO: 37919 - DNA, 21 bp, Homo sapiens
cagcgtgagagagaaatttct

SEQ ID NO: 37920 - RNA, 21 nt, RNAi
gcgugagagagaaauuucuuu

SEQ ID NO: 37921 - RNA, 21 nt, RNAi
uucgcacucucucuuuaaaga

SEQ ID NO: 37922 - DNA, 21 bp, Homo sapiens
caagaagcctgccattacaca

SEQ ID NO: 37923 - RNA, 21 nt, RNAi
agaagccugccauuacacauu

SEQ ID NO: 37924 - RNA, 21 nt, RNAi
uuucuucggacgguaaugugu

SEQ ID NO: 37925 - DNA, 21 bp, Homo sapiens
cattacacatctttgcactgg

SEQ ID NO: 37926 - RNA, 21 nt, RNAi
uuacacaucuuugcacugguu

SEQ ID NO: 37927 - RNA, 21 nt, RNAi
uuaauguguagaaacgugacc

SEQ ID NO: 37928 - DNA, 21 bp, Homo sapiens
cacatctttgcactggaattg

SEQ ID NO: 37929 - RNA, 21 nt, RNAi
caucuuugcacuggaauuguu

SEQ ID NO: 37930 - RNA, 21 nt, RNAi
uuguagaaacgugaccuuaac

SEQ ID NO: 37931 - DNA, 21 bp, Homo sapiens
catctttgcactggaattggt

SEQ ID NO: 37932 - RNA, 21 nt, RNAi
ucuuugcacuggaauugguuu

SEQ ID NO: 37933 - RNA, 21 nt, RNAi
uuagaaacgugaccuuaacca

SEQ ID NO: 37934 - DNA, 21 bp, Homo sapiens
cactggaattggtgcagatat

SEQ ID NO: 37935 - RNA, 21 nt, RNAi
cuggaauuggugcagauauuu

SEQ ID NO: 37936 - RNA, 21 nt, RNAi
uugaccuuaaccacgucuaua

SEQ ID NO: 37937 - DNA, 21 bp, Homo sapiens
caggaatgcagagttaacaat

SEQ ID NO: 37938 - RNA, 21 nt, RNAi
ggaaugcagaguuaacaauuu

SEQ ID NO: 37939 - RNA, 21 nt, RNAi
uuccuuacgucucaauuguua

SEQ ID NO: 37940 - DNA, 21 bp, Homo sapiens
cagagttaacaatgcgtcagt

SEQ ID NO: 37941 - RNA, 21 nt, RNAi
gaguuaacaaugcgucaguuu

SEQ ID NO: 37942 - RNA, 21 nt, RNAi
uucucaauuguuacgcaguca

SEQ ID NO: 37943 - DNA, 21 bp, Homo sapiens
caatgcgtcagtttgaccatc

SEQ ID NO: 37944 - RNA, 21 nt, RNAi
augcgucaguuugaccaucuu

SEQ ID NO: 37945 - RNA, 21 nt, RNAi
uuuacgcagucaaacugguag

SEQ ID NO: 37946 - DNA, 21 bp, Homo sapiens
cagtttgaccatcctcatatt

SEQ ID NO: 37947 - RNA, 21 nt, RNAi
guuugaccauccucauauuuu

SEQ ID NO: 37948 - RNA, 21 nt, RNAi
uucaaacugguaggaguauaa

SEQ ID NO: 37949 - DNA, 21 bp, Homo sapiens
catcctcatattgtgaagctg

SEQ ID NO: 37950 - RNA, 21 nt, RNAi
uccucauauugugaagcuguu

SEQ ID NO: 37951 - RNA, 21 nt, RNAi
uuaggaguauaacacuucgac

SEQ ID NO: 37952 - DNA, 21 bp, Homo sapiens
catattgtgaagctgattgga

SEQ ID NO: 37953 - RNA, 21 nt, RNAi
uauugugaagcugauuggauu

SEQ ID NO: 37954 - RNA, 21 nt, RNAi
uuauaacacuucgacuaaccu

SEQ ID NO: 37955 - DNA, 21 bp, Homo sapiens
catcacagagaatcctgtctg

SEQ ID NO: 37956 - RNA, 21 nt, RNAi
ucacagagaauccugucuguu

SEQ ID NO: 37957 - RNA, 21 nt, RNAi
uuagugucucuuaggacagac

SEQ ID NO: 37958 - DNA, 21 bp, Homo sapiens
cacagagaatcctgtctggat

SEQ ID NO: 37959 - RNA, 21 nt, RNAi
cagagaauccugucuggauuu

SEQ ID NO: 37960 - RNA, 21 nt, RNAi
uugucucuuaggacagaccua

SEQ ID NO: 37961 - DNA, 21 bp, Homo sapiens
cagagaatcctgtctggataa

SEQ ID NO: 37962 - RNA, 21 nt, RNAi
gagaauccugucuggauaauu

SEQ ID NO: 37963 - RNA, 21 nt, RNAi
uucucuuaggacagaccuauu

SEQ ID NO: 37964 - DNA, 21 bp, Homo sapiens
catggagctgtgcacacttgg

SEQ ID NO: 37965 - RNA, 21 nt, RNAi
uggagcugugcacacuugguu

SEQ ID NO: 37966 - RNA, 21 nt, RNAi
uuaccucgacacgugugaacc

SEQ ID NO: 37967 - DNA, 21 bp, Homo sapiens
cacacttggagagctgaggtc

SEQ ID NO: 37968 - RNA, 21 nt, RNAi
cacuuggagagcugaggucuu

SEQ ID NO: 37969 - RNA, 21 nt, RNAi
uugugaaccucucgacuccag

SEQ ID NO: 37970 - DNA, 21 bp, Homo sapiens
cacttggagagctgaggtcat

SEQ ID NO: 37971 - RNA, 21 nt, RNAi
cuuggagagcugaggucauuu

SEQ ID NO: 37972 - RNA, 21 nt, RNAi
uugaaccucucgacuccagua

SEQ ID NO: 37973 - DNA, 21 bp, Homo sapiens
caagtaaggaaatacagtttg

SEQ ID NO: 37974 - RNA, 21 nt, RNAi
aguaaggaaauacaguuuguu

SEQ ID NO: 37975 - RNA, 21 nt, RNAi
uuucauuccuuuaugucaaac

SEQ ID NO: 37976 - DNA, 21 bp, Homo sapiens
cagtttggatctagcatcttt

SEQ ID NO: 37977 - RNA, 21 nt, RNAi
guuuggaucuagcaucuuuuu

SEQ ID NO: 37978 - RNA, 21 nt, RNAi
uucaaaccuagaucguagaaa

SEQ ID NO: 37979 - DNA, 21 bp, Homo sapiens
catctttgatcctgtatgcct

SEQ ID NO: 37980 - RNA, 21 nt, RNAi
ucuuugauccuguaugccuuu

SEQ ID NO: 37981 - RNA, 21 nt, RNAi
uuagaaacuaggacauacgga

SEQ ID NO: 37982 - DNA, 21 bp, Homo sapiens
cagcttagtacagctcttgca

SEQ ID NO: 37983 - RNA, 21 nt, RNAi
gcuuaguacagcucuugcauu

SEQ ID NO: 37984 - RNA, 21 nt, RNAi
uucgaaucaugucgagaacgu

SEQ ID NO: 37985 - DNA, 21 bp, Homo sapiens
cagctcttgcatatctagaga

SEQ ID NO: 37986 - RNA, 21 nt, RNAi
gcucuugcauaucuagagauu

SEQ ID NO: 37987 - RNA, 21 nt, RNAi
uucgagaacguauagaucucu

SEQ ID NO: 37988 - DNA, 21 bp, Homo sapiens
cattgctgctcggaatgttct

SEQ ID NO: 37989 - RNA, 21 nt, RNAi
uugcugcucggaauguucuuu

SEQ ID NO: 37990 - RNA, 21 nt, RNAi
uuaacgacgagccuuacaaga

SEQ ID NO: 37991 - DNA, 21 bp, Homo sapiens
cagctagtgacgtatggatgt

SEQ ID NO: 37992 - RNA, 21 nt, RNAi
gcuagugacguauggauguuu

SEQ ID NO: 37993 - RNA, 21 nt, RNAi
uucgaucacugcauaccuaca

SEQ ID NO: 37994 - DNA, 21 bp, Homo sapiens
caaggagtgaagaacaatgat

SEQ ID NO: 37995 - RNA, 21 nt, RNAi
aggagugaagaacaaugauuu

SEQ ID NO: 37996 - RNA, 21 nt, RNAi
uuuccucacuucuuguuacua

SEQ ID NO: 37997 - DNA, 21 bp, Homo sapiens
caatgatgtaatcggtcgaat

SEQ ID NO: 37998 - RNA, 21 nt, RNAi
augauguaaucggucgaauuu

SEQ ID NO: 37999 - RNA, 21 nt, RNAi
uuuacuacauuagccagcuua

SEQ ID NO: 38000 - DNA, 21 bp, Homo sapiens
caatgcctccaaattgtcctc

SEQ ID NO: 38001 - RNA, 21 nt, RNAi
augccuccaaauuguccucuu

SEQ ID NO: 38002 - RNA, 21 nt, RNAi
uuuacggagguuuaacaggag

SEQ ID NO: 38003 - DNA, 21 bp, Homo sapiens
cagccttatgacgaaatgctg

SEQ ID NO: 38004 - RNA, 21 nt, RNAi
gccuuaugacgaaaugcuguu

SEQ ID NO: 38005 - RNA, 21 nt, RNAi
uucggaauacugcuuuacgac

SEQ ID NO: 38006 - DNA, 21 bp, Homo sapiens
caggtttactgaacttaaagc

SEQ ID NO: 38007 - RNA, 21 nt, RNAi
gguuuacugaacuuaaagcuu

SEQ ID NO: 38008 - RNA, 21 nt, RNAi
uuccaaaugacuugaauuucg

SEQ ID NO: 38009 - DNA, 21 bp, Homo sapiens
cagctcagcacaatcctggag

SEQ ID NO: 38010 - RNA, 21 nt, RNAi
gcucagcacaauccuggaguu

SEQ ID NO: 38011 - RNA, 21 nt, RNAi
uucgagucguguuaggaccuc

SEQ ID NO: 38012 - DNA, 21 bp, Homo sapiens
cagcacaatcctggaggaaga

SEQ ID NO: 38013 - RNA, 21 nt, RNAi
gcacaauccuggaggaagauu

SEQ ID NO: 38014 - RNA, 21 nt, RNAi
uucguguuaggaccuccuucu

SEQ ID NO: 38015 - DNA, 21 bp, Homo sapiens
cacaatcctggaggaagagaa

SEQ ID NO: 38016 - RNA, 21 nt, RNAi
caauccuggaggaagagaauu

SEQ ID NO: 38017 - RNA, 21 nt, RNAi
uuguuaggaccuccuucucuu

SEQ ID NO: 38018 - DNA, 21 bp, Homo sapiens
caatcctggaggaagagaagg

SEQ ID NO: 38019 - RNA, 21 nt, RNAi
auccuggaggaagagaagguu

SEQ ID NO: 38020 - RNA, 21 nt, RNAi
uuuaggaccuccuucucuucc

SEQ ID NO: 38021 - DNA, 21 bp, Homo sapiens
cagcaagaagagcgcatgagg

SEQ ID NO: 38022 - RNA, 21 nt, RNAi
gcaagaagagcgcaugagguu

SEQ ID NO: 38023 - RNA, 21 nt, RNAi
uucguucuucucgcguacucc

SEQ ID NO: 38024 - DNA, 21 bp, Homo sapiens
caagaagagcgcatgaggatg

SEQ ID NO: 38025 - RNA, 21 nt, RNAi
agaagagcgcaugaggauguu

SEQ ID NO: 38026 - RNA, 21 nt, RNAi
uuucuucucgcguacuccuac

SEQ ID NO: 38027 - DNA, 21 bp, Homo sapiens
catgaggatggagtccagaag

SEQ ID NO: 38028 - RNA, 21 nt, RNAi
ugaggauggaguccagaaguu

SEQ ID NO: 38029 - RNA, 21 nt, RNAi
uuacuccuaccucaggucuuc

SEQ ID NO: 38030 - DNA, 21 bp, Homo sapiens
cagaagacaggccacagtgtc

SEQ ID NO: 38031 - RNA, 21 nt, RNAi
gaagacaggccacagugucuu

SEQ ID NO: 38032 - RNA, 21 nt, RNAi
uucuucuguccggugucacag

SEQ ID NO: 38033 - DNA, 21 bp, Homo sapiens
cacagcacatggtacaaacca

SEQ ID NO: 38034 - RNA, 21 nt, RNAi
cagcacaugguacaaaccauu

SEQ ID NO: 38035 - RNA, 21 nt, RNAi
uugucguguaccauguuuggu

SEQ ID NO: 38036 - DNA, 21 bp, Homo sapiens
cagcacatggtacaaaccaat

SEQ ID NO: 38037 - RNA, 21 nt, RNAi
gcacaugguacaaaccaauuu

SEQ ID NO: 38038 - RNA, 21 nt, RNAi
uucguguaccauguuugguua

SEQ ID NO: 38039 - DNA, 21 bp, Homo sapiens
cacatggtacaaaccaatcat

SEQ ID NO: 38040 - RNA, 21 nt, RNAi
caugguacaaaccaaucauuu

SEQ ID NO: 38041 - RNA, 21 nt, RNAi
uuguaccauguuugguuagua

SEQ ID NO: 38042 - DNA, 21 bp, Homo sapiens
catggtacaaaccaatcatta

SEQ ID NO: 38043 - RNA, 21 nt, RNAi
ugguacaaaccaaucauuauu

SEQ ID NO: 38044 - RNA, 21 nt, RNAi
uuaccauguuugguuaguaau

SEQ ID NO: 38045 - DNA, 21 bp, Homo sapiens
caaaccaatcattaccaggtt

SEQ ID NO: 38046 - RNA, 21 nt, RNAi
aaccaaucauuaccagguuuu

SEQ ID NO: 38047 - RNA, 21 nt, RNAi
uuuugguuaguaaugguccaa

SEQ ID NO: 38048 - DNA, 21 bp, Homo sapiens
caatcattaccaggtttctgg

SEQ ID NO: 38049 - RNA, 21 nt, RNAi
aucauuaccagguuucugguu

SEQ ID NO: 38050 - RNA, 21 nt, RNAi
uuuaguaaugguccaaagacc

SEQ ID NO: 38051 - DNA, 21 bp, Homo sapiens
cattaccaggtttctggctac

SEQ ID NO: 38052 - RNA, 21 nt, RNAi
uuaccagguuucuggcuacuu

SEQ ID NO: 38053 - RNA, 21 nt, RNAi
uuaaugguccaaagaccgaug

SEQ ID NO: 38054 - DNA, 21 bp, Homo sapiens
cacatggaatcacagccatgg

SEQ ID NO: 38055 - RNA, 21 nt, RNAi
cauggaaucacagccaugguu

SEQ ID NO: 38056 - RNA, 21 nt, RNAi
uuguaccuuagugucgguacc

SEQ ID NO: 38057 - DNA, 21 bp, Homo sapiens
catggaatcacagccatggct

SEQ ID NO: 38058 - RNA, 21 nt, RNAi
uggaaucacagccauggcuuu

SEQ ID NO: 38059 - RNA, 21 nt, RNAi
uuaccuuagugucgguaccga

SEQ ID NO: 38060 - DNA, 21 bp, Homo sapiens
cacagccatggctggcagcat

SEQ ID NO: 38061 - RNA, 21 nt, RNAi
cagccauggcuggcagcauuu

SEQ ID NO: 38062 - RNA, 21 nt, RNAi
uugucgguaccgaccgucgua

SEQ ID NO: 38063 - DNA, 21 bp, Homo sapiens
cagccatggctggcagcatct

SEQ ID NO: 38064 - RNA, 21 nt, RNAi
gccauggcuggcagcaucuuu

SEQ ID NO: 38065 - RNA, 21 nt, RNAi
uucgguaccgaccgucguaga

SEQ ID NO: 38066 - DNA, 21 bp, Homo sapiens
catggctggcagcatctatcc

SEQ ID NO: 38067 - RNA, 21 nt, RNAi
uggcuggcagcaucuauccuu

SEQ ID NO: 38068 - RNA, 21 nt, RNAi
uuaccgaccgucguagauagg

SEQ ID NO: 38069 - DNA, 21 bp, Homo sapiens
cagcatctatccaggtcaggc

SEQ ID NO: 38070 - RNA, 21 nt, RNAi
gcaucuauccaggucaggcuu

SEQ ID NO: 38071 - RNA, 21 nt, RNAi
uucguagauagguccaguccg

SEQ ID NO: 38072 - DNA, 21 bp, Homo sapiens
catctatccaggtcaggcatc

SEQ ID NO: 38073 - RNA, 21 nt, RNAi
ucuauccaggucaggcaucuu

SEQ ID NO: 38074 - RNA, 21 nt, RNAi
uuagauagguccaguccguag

SEQ ID NO: 38075 - DNA, 21 bp, Homo sapiens
caaacagattcatggaatcat

SEQ ID NO: 38076 - RNA, 21 nt, RNAi
aacagauucauggaaucauuu

SEQ ID NO: 38077 - RNA, 21 nt, RNAi
uuuugucuaaguaccuuagua

SEQ ID NO: 38078 - DNA, 21 bp, Homo sapiens
cagattcatggaatcatagat

SEQ ID NO: 38079 - RNA, 21 nt, RNAi
gauucauggaaucauagauuu

SEQ ID NO: 38080 - RNA, 21 nt, RNAi
uucuaaguaccuuaguaucua

SEQ ID NO: 38081 - DNA, 21 bp, Homo sapiens
catggaatcatagatctcagg

SEQ ID NO: 38082 - RNA, 21 nt, RNAi
uggaaucauagaucucagguu

SEQ ID NO: 38083 - RNA, 21 nt, RNAi
uuaccuuaguaucuagagucc

SEQ ID NO: 38084 - DNA, 21 bp, Homo sapiens
catagatctcaggagatagca

SEQ ID NO: 38085 - RNA, 21 nt, RNAi
uagaucucaggagauagcauu

SEQ ID NO: 38086 - RNA, 21 nt, RNAi
uuaucuagaguccucuaucgu

SEQ ID NO: 38087 - DNA, 21 bp, Homo sapiens
caggagatagcaatgtggcag

SEQ ID NO: 38088 - RNA, 21 nt, RNAi
ggagauagcaauguggcaguu

SEQ ID NO: 38089 - RNA, 21 nt, RNAi
uuccucuaucguuacaccguc

SEQ ID NO: 38090 - DNA, 21 bp, Homo sapiens
caatgtggaggactctacagt

SEQ ID NO: 38091 - RNA, 21 nt, RNAi
auguggaggacucuacaguuu

SEQ ID NO: 38092 - RNA, 21 nt, RNAi
uuuacaccuccugagauguca

SEQ ID NO: 38093 - DNA, 21 bp, Homo sapiens
catctgatggaagagcgtcta

SEQ ID NO: 38094 - RNA, 21 nt, RNAi
ucugauggaagagcgucuauu

SEQ ID NO: 38095 - RNA, 21 nt, RNAi
uuagacuaccuucucgcagau

SEQ ID NO: 38096 - DNA, 21 bp, Homo sapiens
cagcaacaggaaatggaagaa

SEQ ID NO: 38097 - RNA, 21 nt, RNAi
gcaacaggaaauggaagaauu

SEQ ID NO: 38098 - RNA, 21 nt, RNAi
uucguuguccuuuaccuucuu

SEQ ID NO: 38099 - DNA, 21 bp, Homo sapiens
caacaggaaatggaagaagat

SEQ ID NO: 38100 - RNA, 21 nt, RNAi
acaggaaauggaagaagauuu

SEQ ID NO: 38101 - RNA, 21 nt, RNAi
uuuguccuuuaccuucuucua

SEQ ID NO: 38102 - DNA, 21 bp, Homo sapiens
caggaaatggaagaagatcag

SEQ ID NO: 38103 - RNA, 21 nt, RNAi
ggaaauggaagaagaucaguu

SEQ ID NO: 38104 - RNA, 21 nt, RNAi
uuccuuuaccuucuucuaguc

SEQ ID NO: 38105 - DNA, 21 bp, Homo sapiens
caacatatatatcagcctgtg

SEQ ID NO: 38106 - RNA, 21 nt, RNAi
acauauauaucagccuguguu

SEQ ID NO: 38107 - RNA, 21 nt, RNAi
uuuguauauauagucggacac

SEQ ID NO: 38108 - DNA, 21 bp, Homo sapiens
cagatcctgcagctccaccaa

SEQ ID NO: 38109 - RNA, 21 nt, RNAi
gauccugcagcuccaccaauu

SEQ ID NO: 38110 - RNA, 21 nt, RNAi
uucuaggacgucgaggugguu

SEQ ID NO: 38111 - DNA, 21 bp, Homo sapiens
cagctccaccaaagaaaccgc

SEQ ID NO: 38112 - RNA, 21 nt, RNAi
gcuccaccaaagaaaccgcuu

SEQ ID NO: 38113 - RNA, 21 nt, RNAi
uucgaggugguuucuuuggcg

SEQ ID NO: 38114 - DNA, 21 bp, Homo sapiens
caccaaagaaaccgcctcgcc

SEQ ID NO: 38115 - RNA, 21 nt, RNAi
ccaaagaaaccgccucgccuu

SEQ ID NO: 38116 - RNA, 21 nt, RNAi
uugguuucuuuggcggagcgg

SEQ ID NO: 38117 - DNA, 21 bp, Homo sapiens
caacctggaccggtcgaatga

SEQ ID NO: 38118 - RNA, 21 nt, RNAi
accuggaccggucgaaugauu

SEQ ID NO: 38119 - RNA, 21 nt, RNAi
uuuggaccuggccagcuuacu

SEQ ID NO: 38120 - DNA, 21 bp, Homo sapiens
cattattggccactgtggatg

SEQ ID NO: 38121 - RNA, 21 nt, RNAi
uuauuggccacuguggauguu

SEQ ID NO: 38122 - RNA, 21 nt, RNAi
uuaauaaccggugacaccuac

SEQ ID NO: 38123 - DNA, 21 bp, Homo sapiens
cactgtggatgagaccattcc

SEQ ID NO: 38124 - RNA, 21 nt, RNAi
cuguggaugagaccauuccuu

SEQ ID NO: 38125 - RNA, 21 nt, RNAi
uugacaccuacucugguaagg

SEQ ID NO: 38126 - DNA, 21 bp, Homo sapiens
caccgagagattgagatggca

SEQ ID NO: 38127 - RNA, 21 nt, RNAi
ccgagagauugagauggcauu

SEQ ID NO: 38128 - RNA, 21 nt, RNAi
uuggcucucuaacucuaccgu

SEQ ID NO: 38129 - DNA, 21 bp, Homo sapiens
cacagaagctattgaactctg

SEQ ID NO: 38130 - RNA, 21 nt, RNAi
cagaagcuauugaacucuguu

SEQ ID NO: 38131 - RNA, 21 nt, RNAi
uugucuucgauaacuugagac

SEQ ID NO: 38132 - DNA, 21 bp, Homo sapiens
cagaagctattgaactctgac

SEQ ID NO: 38133 - RNA, 21 nt, RNAi
gaagcuauugaacucugacuu

SEQ ID NO: 38134 - RNA, 21 nt, RNAi
uucuucgauaacuugagacug

SEQ ID NO: 38135 - DNA, 21 bp, Homo sapiens
catcaacaagatgaaactggc

SEQ ID NO: 38136 - RNA, 21 nt, RNAi
ucaacaagaugaaacuggcuu

(The sequence listing continues in the following parts.)

1. A method, comprising the steps of:
detecting an expression profile of at least one gene in a biological sample of a subject; and
comparing said expression profile to a reference expression profile of said at least one gene,
wherein said at least one gene is differentially expressed in at least two types of cancer cells as compared to corresponding cancer-free cells.

2. The method of claim 1, wherein each of said at least two types is selected from the group consisting of colon cancer, lung cancer, breast cancer, and prostate cancer.

3. The method of claim 2, wherein said at least one gene includes at least one kinase gene which is overexpressed in said at least two types of cancer cells as compared to said corresponding cancer-free cells.

4. The method of claim 2, wherein said at least one gene includes one or more genes selected from Table 1.

5. The method of claim 2, wherein the biological sample is a colon sample, a lung sample, a breast sample, or a prostate sample, and said reference expression profile is an average expression profile of said at least one gene in reference biological samples of cancer-free subjects.

6. The method of claim 5, wherein said expression profile and said reference expression profile are determined using RT-PCR, nucleic acid arrays, or immunoassays.

7. The method of claim 2, wherein said subject has colon cancer, lung cancer, breast cancer, or prostate cancer.

8. A method comprising:
detecting an expression profile of at least one gene in a biological sample of a subject; and
comparing said expression profile to a reference expression profile of said at least one gene,
wherein said at least one gene has a statistically significant T score under a contrast analysis, wherein the contrast analysis is capable of comparing average expression levels of said at least one gene in at least four sample sets to a predetermined pattern, wherein said at least four sample sets include a first pair and a second pair of sample sets, the first pair of sample sets including a set of samples having a first cancer and a set of samples free of the first cancer, the second pair of sample sets including a set of samples having a second cancer and a set of samples free of the second cancer, and wherein said predetermined pattern is defined as “high in cancer sample set, low in cancer-free set” or “low in cancer sample set, high in cancer-free set.”

9. A method, comprising the steps of:
detecting in a biological sample the level of T cells that are activated by one or more polypeptides encoded by at least one gene which is differentially expressed in at least two types of cancer cells as compared to corresponding cancer-free cells; and
comparing the level to a reference level of said T cells.

10. A pharmaceutical composition comprising a pharmaceutically acceptable carrier and at least one component selected from the group consisting of:
a polypeptide encoded by a gene which is over-expressed in at least two types of cancer cells as compared to corresponding cancer-free cells;
a variant of said polypeptide; and
a polynucleotide encoding said polypeptide or said variant.

11. The pharmaceutical composition of claim 10, wherein the pharmaceutical composition is a vaccine formulation capable of eliciting an immune response against a cancer cell or a component thereof, and wherein said gene is selected from Table 1.

12. A method comprising administering an immunoeffective amount of the pharmaceutical composition of claim 11 to a subject in need thereof.

13. A pharmaceutical composition comprising a pharmaceutically acceptable carrier and at least one component selected from the group consisting of:
an agent capable of modulating the expression of a gene which is over-expressed in at least two types of cancer cells as compared to corresponding cancer-free cells;
an agent capable of binding to, or modulating an activity of, a polypeptide encoded by said gene; and
a T cell activated by said polypeptide.

14. The pharmaceutical composition of claim 13, wherein said component is selected from the group consisting of:
a polynucleotide comprising or encoding an RNA that is capable of inhibiting or decreasing the expression of said gene by RNA interference or an antisense mechanism;
an antibody specific for said polypeptide encoded by said gene; and
an inhibitor of a biological activity of said polypeptide, wherein said gene is selected from Table 1.

15. A method comprising administering the pharmaceutical composition of claim 14 to a subject who has colon cancer, lung cancer, breast cancer, or prostate cancer.

16. The pharmaceutical composition of claim 13, wherein said component is a polynucleotide comprising or encoding a siRNA sense or antisense sequence selected from Table 4.

17. A nucleic acid array comprising one or more substrate supports which are stably associated with polynucleotide probes, wherein a substantial portion of all polynucleotide probes that are stably associated with said one or more substrate supports are capable of hybridizing under reduced stringent, stringent or highly stringent conditions to RNA transcripts, or the complements thereof, of genes which are differentially expressed in at least two types of cancer cells as compared to corresponding cancer-free cells.

18. A polypeptide array comprising one or more substrate supports which are stably associated with a plurality of polypeptides, wherein a substantial portion of all polypeptides that are stably associated with said one or more substrate supports consists of:
polypeptides encoded by genes which are differentially expressed in at least two types of cancer cells as compared to corresponding cancer-free cells;
variants of said polypeptides;
antibodies specific for said polypeptides or variants;
or any combination of said polypeptides, variants or antibodies.

19. A cancer diagnostic kit comprising at least one of:
a polynucleotide probe capable of specifically binding to a sequence recited in any one of SEQ ID NOS:1-44 or the complement thereof; and
an antibody capable of specifically binding to a polypeptide sequence recited in any one of SEQ ID NOS:45-88.

20. A method for identifying an agent capable of modulating an activity of a gene which is differentially expressed in at least two types of cancer cells as compared to corresponding cancer-free cells, said method comprising:
contacting a candidate agent with a polypeptide encoded by said gene;
comparing a biological activity of said polypeptide in the presence and absence of said candidate agent to determine if said candidate agent can modulate said biological activity.
